United States Patent Application Publication US 2007/0031850 A1 - sequence listing, part 3

SEQ ID NO: 21078 - DNA, 25 bp, Probe sequence
ttataatggacaatcacacacaact

SEQ ID NO: 21079 - DNA, 25 bp, Probe sequence
tcacacacaactacaaataacccta

SEQ ID NO: 21080 - DNA, 25 bp, Probe sequence
atcacacacaactacaaataaccct

SEQ ID NO: 21081 - DNA, 25 bp, Probe sequence
aatcacacacaactacaaataaccc

SEQ ID NO: 21082 - DNA, 25 bp, Probe sequence
ggacaatcacacacaactacaaata

SEQ ID NO: 21083 - DNA, 25 bp, Probe sequence
acaactacgacaactacatcatcaa

SEQ ID NO: 21084 - DNA, 25 bp, Probe sequence
acaactataactacaacacgactca

SEQ ID NO: 21085 - DNA, 25 bp, Probe sequence
cacattctggtaacttatacactgc

SEQ ID NO: 21086 - DNA, 25 bp, Probe sequence
caactacgacaactacatcatcaat

SEQ ID NO: 21087 - DNA, 25 bp, Probe sequence
caactataactacaacacgactcaa

SEQ ID NO: 21088 - DNA, 25 bp, Probe sequence
aacaactataactacaacacgactc

SEQ ID NO: 21089 - DNA, 25 bp, Probe sequence
aactacgacaactacatcatcaatt

SEQ ID NO: 21090 - DNA, 25 bp, Probe sequence
tcacattctggtaacttatacactg

SEQ ID NO: 21091 - DNA, 25 bp, Probe sequence
ttcacattctggtaacttatacact

SEQ ID NO: 21092 - DNA, 25 bp, Probe sequence
gttgttagaggatggatggtatgta

SEQ ID NO: 21093 - DNA, 25 bp, Probe sequence
gaagttacattaagtgaagcagcaa

SEQ ID NO: 21094 - DNA, 25 bp, Probe sequence
ttagaggatggatggtatgtaagtg

SEQ ID NO: 21095 - DNA, 25 bp, Probe sequence
tgttagaggatggatggtatgtaag

SEQ ID NO: 21096 - DNA, 25 bp, Probe sequence
ttacattaagtgaagcagcaacaat

SEQ ID NO: 21097 - DNA, 25 bp, Probe sequence
gttagaggatggatggtatgtaagt

SEQ ID NO: 21098 - DNA, 25 bp, Probe sequence
cagttgttagaggatggatggtatg

SEQ ID NO: 21099 - DNA, 25 bp, Probe sequence
agcgaagaattaagacaaggtatga

SEQ ID NO: 21100 - DNA, 25 bp, Probe sequence
tacattaagtgaagcagcaacaatt

SEQ ID NO: 21101 - DNA, 25 bp, Probe sequence
atgtagtattaacaccgcatattgg

SEQ ID NO: 21102 - DNA, 25 bp, Probe sequence
tgtagtattaacaccgcatattggt

SEQ ID NO: 21103 - DNA, 25 bp, Probe sequence
ttacaaacacacctaaagcatcaac

SEQ ID NO: 21104 - DNA, 25 bp, Probe sequence
tatcggtttaggtgaaattggtagt

SEQ ID NO: 21105 - DNA, 25 bp, Probe sequence
aaacacacctaaagcatcaacaaac

SEQ ID NO: 21106 - DNA, 25 bp, Probe sequence
caaacacacctaaagcatcaacaaa

SEQ ID NO: 21107 - DNA, 25 bp, Probe sequence
cattatcggtttaggtgaaattggt

SEQ ID NO: 21108 - DNA, 25 bp, Probe sequence
tatttaatcaatgcctctcgtggtc

SEQ ID NO: 21109 - DNA, 25 bp, Probe sequence
tacaaacacacctaaagcatcaaca

SEQ ID NO: 21110 - DNA, 25 bp, Probe sequence
atttagtatgggatgtcagagatgt

SEQ ID NO: 21111 - DNA, 25 bp, Probe sequence
ttcatttagtatgggatgtcagaga

SEQ ID NO: 21112 - DNA, 25 bp, Probe sequence
ttagtatgggatgtcagagatgtaa

SEQ ID NO: 21113 - DNA, 25 bp, Probe sequence
tttagtatgggatgtcagagatgta

SEQ ID NO: 21114 - DNA, 25 bp, Probe sequence
catttagtatgggatgtcagagatg

SEQ ID NO: 21115 - DNA, 25 bp, Probe sequence
tcatttagtatgggatgtcagagat

SEQ ID NO: 21116 - DNA, 25 bp, Probe sequence
agtatgggatgtcagagatgtaata

SEQ ID NO: 21117 - DNA, 25 bp, Probe sequence
tagtatgggatgtcagagatgtaat

SEQ ID NO: 21118 - DNA, 25 bp, Probe sequence
attcatttagtatgggatgtcagag

SEQ ID NO: 21119 - DNA, 25 bp, Probe sequence
tggtgccttagtatctgaagacata

SEQ ID NO: 21120 - DNA, 25 bp, Probe sequence
gttgatggtgccttagtatctgaag

SEQ ID NO: 21121 - DNA, 25 bp, Probe sequence
ttgatggtgccttagtatctgaaga

SEQ ID NO: 21122 - DNA, 25 bp, Probe sequence
atggtgccttagtatctgaagacat

SEQ ID NO: 21123 - DNA, 25 bp, Probe sequence
atgagtgttgatggtgccttagtat

SEQ ID NO: 21124 - DNA, 25 bp, Probe sequence
tgttgatggtgccttagtatctgaa

SEQ ID NO: 21125 - DNA, 25 bp, Probe sequence
aatgagtgttgatggtgccttagta

SEQ ID NO: 21126 - DNA, 25 bp, Probe sequence
gatggtgccttagtatctgaagaca

SEQ ID NO: 21127 - DNA, 25 bp, Probe sequence
tgatggtgccttagtatctgaagac

SEQ ID NO: 21128 - DNA, 25 bp, Probe sequence
agagtatgcttcaaggttagtcaat

SEQ ID NO: 21129 - DNA, 25 bp, Probe sequence
gagagtatgcttcaaggttagtcaa

SEQ ID NO: 21130 - DNA, 25 bp, Probe sequence
tagagagtatgcttcaaggttagtc

SEQ ID NO: 21131 - DNA, 25 bp, Probe sequence
agagagtatgcttcaaggttagtca

SEQ ID NO: 21132 - DNA, 25 bp, Probe sequence
gagtatgcttcaaggttagtcaatt

SEQ ID NO: 21133 - DNA, 25 bp, Probe sequence
gttggatatgtgcctagagagtatg

SEQ ID NO: 21134 - DNA, 25 bp, Probe sequence
gatatgtgcctagagagtatgcttc

SEQ ID NO: 21135 - DNA, 25 bp, Probe sequence
ctagagagtatgcttcaaggttagt

SEQ ID NO: 21136 - DNA, 25 bp, Probe sequence
atatgtgcctagagagtatgcttca

SEQ ID NO: 21137 - DNA, 25 bp, Probe sequence
aaacttaatgtcccgacctctttat

SEQ ID NO: 21138 - DNA, 25 bp, Probe sequence
aacttaatgtcccgacctctttatc

SEQ ID NO: 21139 - DNA, 25 bp, Probe sequence
ttaatgtcccgacctctttatctac

SEQ ID NO: 21140 - DNA, 25 bp, Probe sequence
cttaatgtcccgacctctttatcta

SEQ ID NO: 21141 - DNA, 25 bp, Probe sequence
acttaatgtcccgacctctttatct

SEQ ID NO: 21142 - DNA, 25 bp, Probe sequence
taatgtcccgacctctttatctacg

SEQ ID NO: 21143 - DNA, 25 bp, Probe sequence
tcccgacctctttatctacgcataa

SEQ ID NO: 21144 - DNA, 25 bp, Probe sequence
acctcatattcatatactcaatctg

SEQ ID NO: 21145 - DNA, 25 bp, Probe sequence
cacctcatattcatatactcaatct

SEQ ID NO: 21146 - DNA, 25 bp, Probe sequence
tagttattggtgtaggcatcattgt

SEQ ID NO: 21147 - DNA, 25 bp, Probe sequence
ttattacaaggaatgacagcaacac

SEQ ID NO: 21148 - DNA, 25 bp, Probe sequence
gttattggtgtaggcatcattgtta

SEQ ID NO: 21149 - DNA, 25 bp, Probe sequence
agttattggtgtaggcatcattgtt

SEQ ID NO: 21150 - DNA, 25 bp, Probe sequence
tattacaaggaatgacagcaacaca

SEQ ID NO: 21151 - DNA, 25 bp, Probe sequence
ttagttattggtgtaggcatcattg

SEQ ID NO: 21152 - DNA, 25 bp, Probe sequence
cttattacaaggaatgacagcaaca

SEQ ID NO: 21153 - DNA, 25 bp, Probe sequence
ttaggtggcatcttacataatagga

SEQ ID NO: 21154 - DNA, 25 bp, Probe sequence
ttattggtgtaggcatcattgttaa

SEQ ID NO: 21155 - DNA, 25 bp, Probe sequence
tagttatctgcacatatctccttca

SEQ ID NO: 21156 - DNA, 25 bp, Probe sequence
gtagttatctgcacatatctccttc

SEQ ID NO: 21157 - DNA, 25 bp, Probe sequence
aaagttaagtgggtatgtttctgaa

SEQ ID NO: 21158 - DNA, 25 bp, Probe sequence
agttatctgcacatatctccttcag

SEQ ID NO: 21159 - DNA, 25 bp, Probe sequence
tgtagttatctgcacatatctcctt

SEQ ID NO: 21160 - DNA, 25 bp, Probe sequence
agttcacttacttcaatggcacaaa

SEQ ID NO: 21161 - DNA, 25 bp, Probe sequence
aagttaagtgggtatgtttctgaaa

SEQ ID NO: 21162 - DNA, 25 bp, Probe sequence
tgaactactgtcagaaagaggacta

SEQ ID NO: 21163 - DNA, 25 bp, Probe sequence
gaactactgtcagaaagaggactaa

SEQ ID NO: 21164 - DNA, 25 bp, Probe sequence
agattggaacattcaaacgcatatt

SEQ ID NO: 21165 - DNA, 25 bp, Probe sequence
cagattggaacattcaaacgcatat

SEQ ID NO: 21166 - DNA, 25 bp, Probe sequence
gattggaacattcaaacgcatattt

SEQ ID NO: 21167 - DNA, 25 bp, Probe sequence
acagattggaacattcaaacgcata

SEQ ID NO: 21168 - DNA, 25 bp, Probe sequence
acgaaactaagtatatgagacaaca

SEQ ID NO: 21169 - DNA, 25 bp, Probe sequence
ttggaacattcaaacgcatatttat

SEQ ID NO: 21170 - DNA, 25 bp, Probe sequence
attggaacattcaaacgcatattta

SEQ ID NO: 21171 - DNA, 25 bp, Probe sequence
tggaacattcaaacgcatatttata

SEQ ID NO: 21172 - DNA, 25 bp, Probe sequence
gacagattggaacattcaaacgcat

SEQ ID NO: 21173 - DNA, 25 bp, Probe sequence
caatatgtggttatcggaggtaatg

SEQ ID NO: 21174 - DNA, 25 bp, Probe sequence
atatgtggttatcggaggtaatgaa

SEQ ID NO: 21175 - DNA, 25 bp, Probe sequence
aatatgtggttatcggaggtaatga

SEQ ID NO: 21176 - DNA, 25 bp, Probe sequence
gcaatatgtggttatcggaggtaat

SEQ ID NO: 21177 - DNA, 25 bp, Probe sequence
atgctgatcctagtgttagattgtc

SEQ ID NO: 21178 - DNA, 25 bp, Probe sequence
gatgctgatcctagtgttagattgt

SEQ ID NO: 21179 - DNA, 25 bp, Probe sequence
tgctgatcctagtgttagattgtca

SEQ ID NO: 21180 - DNA, 25 bp, Probe sequence
ggcaatatgtggttatcggaggtaa

SEQ ID NO: 21181 - DNA, 25 bp, Probe sequence
ttaacaacacatgatgaatcgacac

SEQ ID NO: 21182 - DNA, 25 bp, Probe sequence
acatcaatcgtaacactagaacagc

SEQ ID NO: 21183 - DNA, 25 bp, Probe sequence
tacatcaatcgtaacactagaacag

SEQ ID NO: 21184 - DNA, 25 bp, Probe sequence
taataagtgagacaacagaagacaa

SEQ ID NO: 21185 - DNA, 25 bp, Probe sequence
ttaataagtgagacaacagaagaca

SEQ ID NO: 21186 - DNA, 25 bp, Probe sequence
tcaatcgtaacactagaacagctaa

SEQ ID NO: 21187 - DNA, 25 bp, Probe sequence
aatcgtaacactagaacagctaagg

SEQ ID NO: 21188 - DNA, 25 bp, Probe sequence
caatcgtaacactagaacagctaag

SEQ ID NO: 21189 - DNA, 25 bp, Probe sequence
atcaatcgtaacactagaacagcta

SEQ ID NO: 21190 - DNA, 25 bp, Probe sequence
catcaatcgtaacactagaacagct

SEQ ID NO: 21191 - DNA, 25 bp, Probe sequence
agtacatcatcagtcattcgattca

SEQ ID NO: 21192 - DNA, 25 bp, Probe sequence
gtacatcatcagtcattcgattcag

SEQ ID NO: 21193 - DNA, 25 bp, Probe sequence
acattattagcaactcacaattcga

SEQ ID NO: 21194 - DNA, 25 bp, Probe sequence
tacatcatcagtcattcgattcagc

SEQ ID NO: 21195 - DNA, 25 bp, Probe sequence
aatgaataacgaaagcacagaatct

SEQ ID NO: 21196 - DNA, 25 bp, Probe sequence
acgcatcattagatttcataacaca

SEQ ID NO: 21197 - DNA, 25 bp, Probe sequence
atcatcagtcattcgattcagcaag

SEQ ID NO: 21198 - DNA, 25 bp, Probe sequence
cacgcatcattagatttcataacac

SEQ ID NO: 21199 - DNA, 25 bp, Probe sequence
atgaataacgaaagcacagaatctt

SEQ ID NO: 21200 - DNA, 25 bp, Probe sequence
catgtaaatatccgattggtgttgt

SEQ ID NO: 21201 - DNA, 25 bp, Probe sequence
gatgaggttagatttcaagagttgt

SEQ ID NO: 21202 - DNA, 25 bp, Probe sequence
gcatgtaaatatccgattggtgttg

SEQ ID NO: 21203 - DNA, 25 bp, Probe sequence
tgaggttagatttcaagagttgttt

SEQ ID NO: 21204 - DNA, 25 bp, Probe sequence
gaggttagatttcaagagttgtttg

SEQ ID NO: 21205 - DNA, 25 bp, Probe sequence
agatgaggttagatttcaagagttg

SEQ ID NO: 21206 - DNA, 25 bp, Probe sequence
caagatgaggttagatttcaagagt

SEQ ID NO: 21207 - DNA, 25 bp, Probe sequence
atgaggttagatttcaagagttgtt

SEQ ID NO: 21208 - DNA, 25 bp, Probe sequence
tcaagatgaggttagatttcaagag

SEQ ID NO: 21209 - DNA, 25 bp, Probe sequence
cacttgctttcatactcatttgtct

SEQ ID NO: 21210 - DNA, 25 bp, Probe sequence
acttgctttcatactcatttgtctt

SEQ ID NO: 21211 - DNA, 25 bp, Probe sequence
caacacttgctttcatactcatttg

SEQ ID NO: 21212 - DNA, 25 bp, Probe sequence
acacttgctttcatactcatttgtc

SEQ ID NO: 21213 - DNA, 25 bp, Probe sequence
aacacttgctttcatactcatttgt

SEQ ID NO: 21214 - DNA, 25 bp, Probe sequence
ttgctttcatactcatttgtcttac

SEQ ID NO: 21215 - DNA, 25 bp, Probe sequence
aacctgacatcctatatttagttgg

SEQ ID NO: 21216 - DNA, 25 bp, Probe sequence
tgctttcatactcatttgtcttaca

SEQ ID NO: 21217 - DNA, 25 bp, Probe sequence
cttgctttcatactcatttgtctta

SEQ ID NO: 21218 - DNA, 25 bp, Probe sequence
caatatggctagtcgtatggaacag

SEQ ID NO: 21219 - DNA, 25 bp, Probe sequence
atatggctagtcgtatggaacagtt

SEQ ID NO: 21220 - DNA, 25 bp, Probe sequence
aatatggctagtcgtatggaacagt

SEQ ID NO: 21221 - DNA, 25 bp, Probe sequence
tatggctagtcgtatggaacagttc

SEQ ID NO: 21222 - DNA, 25 bp, Probe sequence
gcaatatggctagtcgtatggaaca

SEQ ID NO: 21223 - DNA, 25 bp, Probe sequence
gaagagatgattgacttggaaatgc

SEQ ID NO: 21224 - DNA, 25 bp, Probe sequence
agaagagatgattgacttggaaatg

SEQ ID NO: 21225 - DNA, 25 bp, Probe sequence
gaagaagagatgattgacttggaaa

SEQ ID NO: 21226 - DNA, 25 bp, Probe sequence
aagaagagatgattgacttggaaat

SEQ ID NO: 21227 - DNA, 25 bp, Probe sequence
atggatgaacaagagaatgaagact

SEQ ID NO: 21228 - DNA, 25 bp, Probe sequence
ggaatggatgaacaagagaatgaag

SEQ ID NO: 21229 - DNA, 25 bp, Probe sequence
tggaatggatgaacaagagaatgaa

SEQ ID NO: 21230 - DNA, 25 bp, Probe sequence
tggatgaacaagagaatgaagacta

SEQ ID NO: 21231 - DNA, 25 bp, Probe sequence
aatggatgaacaagagaatgaagac

SEQ ID NO: 21232 - DNA, 25 bp, Probe sequence
gaatggatgaacaagagaatgaaga

SEQ ID NO: 21233 - DNA, 25 bp, Probe sequence
ttggaatggatgaacaagagaatga

SEQ ID NO: 21234 - DNA, 25 bp, Probe sequence
attggaatggatgaacaagagaatg

SEQ ID NO: 21235 - DNA, 25 bp, Probe sequence
agtagtcaagatggtagaacaactg

SEQ ID NO: 21236 - DNA, 25 bp, Probe sequence
cacttagccacttatctaacttagc

SEQ ID NO: 21237 - DNA, 25 bp, Probe sequence
gatattagtgatgcagagatgaagc

SEQ ID NO: 21238 - DNA, 25 bp, Probe sequence
agtgatattagtgatgcagagatga

SEQ ID NO: 21239 - DNA, 25 bp, Probe sequence
acacttagccacttatctaacttag

SEQ ID NO: 21240 - DNA, 25 bp, Probe sequence
gcagaaacacttagccacttatcta

SEQ ID NO: 21241 - DNA, 25 bp, Probe sequence
gtgatattagtgatgcagagatgaa

SEQ ID NO: 21242 - DNA, 25 bp, Probe sequence
aagcagaaacacttagccacttatc

SEQ ID NO: 21243 - DNA, 25 bp, Probe sequence
tgatattagtgatgcagagatgaag

SEQ ID NO: 21244 - DNA, 25 bp, Probe sequence
aacacttagccacttatctaactta

SEQ ID NO: 21245 - DNA, 25 bp, Probe sequence
aagaacaaggaagtaatgcaacaag

SEQ ID NO: 21246 - DNA, 25 bp, Probe sequence
gaagtaatgcaacaagagctacaat

SEQ ID NO: 21247 - DNA, 25 bp, Probe sequence
tgacaacagcattaattggtgtaat

SEQ ID NO: 21248 - DNA, 25 bp, Probe sequence
atgacaacagcattaattggtgtaa

SEQ ID NO: 21249 - DNA, 25 bp, Probe sequence
aagtaatgcaacaagagctacaatt

SEQ ID NO: 21250 - DNA, 25 bp, Probe sequence
gaacaaggaagtaatgcaacaagag

SEQ ID NO: 21251 - DNA, 25 bp, Probe sequence
agaacaaggaagtaatgcaacaaga

SEQ ID NO: 21252 - DNA, 25 bp, Probe sequence
caacagcattaattggtgtaattgt

SEQ ID NO: 21253 - DNA, 25 bp, Probe sequence
acaacagcattaattggtgtaattg

SEQ ID NO: 21254 - DNA, 25 bp, Probe sequence
tgactgaccacaaacttagaacaat

SEQ ID NO: 21255 - DNA, 25 bp, Probe sequence
gactgaccacaaacttagaacaatt

SEQ ID NO: 21256 - DNA, 25 bp, Probe sequence
attgactgaccacaaacttagaaca

SEQ ID NO: 21257 - DNA, 25 bp, Probe sequence
aattgactgaccacaaacttagaac

SEQ ID NO: 21258 - DNA, 25 bp, Probe sequence
tattgagtcacctttacaaattggc

SEQ ID NO: 21259 - DNA, 25 bp, Probe sequence
ttgactgaccacaaacttagaacaa

SEQ ID NO: 21260 - DNA, 25 bp, Probe sequence
tcagtatcataagtgcagtgagtat

SEQ ID NO: 21261 - DNA, 25 bp, Probe sequence
atcagtatcataagtgcagtgagta

SEQ ID NO: 21262 - DNA, 25 bp, Probe sequence
tatcagtatcataagtgcagtgagt

SEQ ID NO: 21263 - DNA, 25 bp, Probe sequence
agcaacaacttccatacttcatttc

SEQ ID NO: 21264 - DNA, 25 bp, Probe sequence
gcaacaacttccatacttcatttca

SEQ ID NO: 21265 - DNA, 25 bp, Probe sequence
aatatcgacattctatctgccaatt

SEQ ID NO: 21266 - DNA, 25 bp, Probe sequence
caaagcaacaacttccatacttcat

SEQ ID NO: 21267 - DNA, 25 bp, Probe sequence
aagcaacaacttccatacttcattt

SEQ ID NO: 21268 - DNA, 25 bp, Probe sequence
aaagcaacaacttccatacttcatt

SEQ ID NO: 21269 - DNA, 25 bp, Probe sequence
cttaccaaagcaacaacttccatac

SEQ ID NO: 21270 - DNA, 25 bp, Probe sequence
taccaaagcaacaacttccatactt

SEQ ID NO: 21271 - DNA, 25 bp, Probe sequence
ttaccaaagcaacaacttccatact

SEQ ID NO: 21272 - DNA, 25 bp, Probe sequence
ttgaacaagagtgaacctaatgatt

SEQ ID NO: 21273 - DNA, 25 bp, Probe sequence
aactgatggtacagactattctagc

SEQ ID NO: 21274 - DNA, 25 bp, Probe sequence
cacattctacttaactgatggtaca

SEQ ID NO: 21275 - DNA, 25 bp, Probe sequence
acacattctacttaactgatggtac

SEQ ID NO: 21276 - DNA, 25 bp, Probe sequence
aacacattctacttaactgatggta

SEQ ID NO: 21277 - DNA, 25 bp, Probe sequence
taacacattctacttaactgatggt

SEQ ID NO: 21278 - DNA, 25 bp, Probe sequence
ggtacagactattctagcttcatca

SEQ ID NO: 21279 - DNA, 25 bp, Probe sequence
tggtacagactattctagcttcatc

SEQ ID NO: 21280 - DNA, 25 bp, Probe sequence
gatggtacagactattctagcttca

SEQ ID NO: 21281 - DNA, 25 bp, Probe sequence
attacacagtcagcaacaagaagaa

SEQ ID NO: 21282 - DNA, 25 bp, Probe sequence
aattacacagtcagcaacaagaaga

SEQ ID NO: 21283 - DNA, 25 bp, Probe sequence
caattacacagtcagcaacaagaag

SEQ ID NO: 21284 - DNA, 25 bp, Probe sequence
tcaattacacagtcagcaacaagaa

SEQ ID NO: 21285 - DNA, 25 bp, Probe sequence
ttacacagtcagcaacaagaagaag

SEQ ID NO: 21286 - DNA, 25 bp, Probe sequence
ctcaattacacagtcagcaacaaga

SEQ ID NO: 21287 - DNA, 25 bp, Probe sequence
tacacagtcagcaacaagaagaagg

SEQ ID NO: 21288 - DNA, 25 bp, Probe sequence
cttatgaaggtggcgatatttcttt

SEQ ID NO: 21289 - DNA, 25 bp, Probe sequence
gtattacaacggtatttggtggttt

SEQ ID NO: 21290 - DNA, 25 bp, Probe sequence
taggttacgctatcattccgagatt

SEQ ID NO: 21291 - DNA, 25 bp, Probe sequence
ttaggttacgctatcattccgagat

SEQ ID NO: 21292 - DNA, 25 bp, Probe sequence
gcgagcgaattagttcaacaatatc

SEQ ID NO: 21293 - DNA, 25 bp, Probe sequence
ttcgtacaacaatgccaagattatt

SEQ ID NO: 21294 - DNA, 25 bp, Probe sequence
attcgtacaacaatgccaagattat

SEQ ID NO: 21295 - DNA, 25 bp, Probe sequence
cttaggttacgctatcattccgaga

SEQ ID NO: 21296 - DNA, 25 bp, Probe sequence
tgcgagcgaattagttcaacaatat

SEQ ID NO: 21297 - DNA, 25 bp, Probe sequence
atgcgagcgaattagttcaacaata

SEQ ID NO: 21298 - DNA, 25 bp, Probe sequence
tatgcgagcgaattagttcaacaat

SEQ ID NO: 21299 - DNA, 25 bp, Probe sequence
ggtgcgaatgtgaagtatattgaag

SEQ ID NO: 21300 - DNA, 25 bp, Probe sequence
tggtgcgaatgtgaagtatattgaa

SEQ ID NO: 21301 - DNA, 25 bp, Probe sequence
gtgcgaatgtgaagtatattgaagc

SEQ ID NO: 21302 - DNA, 25 bp, Probe sequence
ctggtgcgaatgtgaagtatattga

SEQ ID NO: 21303 - DNA, 25 bp, Probe sequence
aatcaatgaacttggtatggatgtc

SEQ ID NO: 21304 - DNA, 25 bp, Probe sequence
agtatattgaagcaccttatgaacc

SEQ ID NO: 21305 - DNA, 25 bp, Probe sequence
atcaatgaacttggtatggatgtcc

SEQ ID NO: 21306 - DNA, 25 bp, Probe sequence
gactggtgcgaatgtgaagtatatt

SEQ ID NO: 21307 - DNA, 25 bp, Probe sequence
actggtgcgaatgtgaagtatattg

SEQ ID NO: 21308 - DNA, 25 bp, Probe sequence
tagaattacatactggcacacttga

SEQ ID NO: 21309 - DNA, 25 bp, Probe sequence
aattacatactggcacacttgagaa

SEQ ID NO: 21310 - DNA, 25 bp, Probe sequence
attacatactggcacacttgagaac

SEQ ID NO: 21311 - DNA, 25 bp, Probe sequence
gaattacatactggcacacttgaga

SEQ ID NO: 21312 - DNA, 25 bp, Probe sequence
agaattacatactggcacacttgag

SEQ ID NO: 21313 - DNA, 25 bp, Probe sequence
ctagaattacatactggcacacttg

SEQ ID NO: 21314 - DNA, 25 bp, Probe sequence
gctagaattacatactggcacactt

SEQ ID NO: 21315 - DNA, 25 bp, Probe sequence
ttacatactggcacacttgagaaca

SEQ ID NO: 21316 - DNA, 25 bp, Probe sequence
taagctagaattacatactggcaca

SEQ ID NO: 21317 - DNA, 25 bp, Probe sequence
acatcaacaccaattagaagagatt

SEQ ID NO: 21318 - DNA, 25 bp, Probe sequence
caccaattagaagagattactgtgc

SEQ ID NO: 21319 - DNA, 25 bp, Probe sequence
ttacatcaacaccaattagaagaga

SEQ ID NO: 21320 - DNA, 25 bp, Probe sequence
caacaccaattagaagagattactg

SEQ ID NO: 21321 - DNA, 25 bp, Probe sequence
tacatcaacaccaattagaagagat

SEQ ID NO: 21322 - DNA, 25 bp, Probe sequence
tcaacaccaattagaagagattact

SEQ ID NO: 21323 - DNA, 25 bp, Probe sequence
acaccaattagaagagattactgtg

SEQ ID NO: 21324 - DNA, 25 bp, Probe sequence
accaattagaagagattactgtgca

SEQ ID NO: 21325 - DNA, 25 bp, Probe sequence
aacaccaattagaagagattactgt

SEQ ID NO: 21326 - DNA, 25 bp, Probe sequence
accttgaagaacttgagcctaataa

SEQ ID NO: 21327 - DNA, 25 bp, Probe sequence
aaccttgaagaacttgagcctaata

SEQ ID NO: 21328 - DNA, 25 bp, Probe sequence
gtcagtagaatcagcagaatcagtt

SEQ ID NO: 21329 - DNA, 25 bp, Probe sequence
tcagtagaatcagcagaatcagtta

SEQ ID NO: 21330 - DNA, 25 bp, Probe sequence
agtcagtagaatcagcagaatcagt

SEQ ID NO: 21331 - DNA, 25 bp, Probe sequence
ccttgaagaacttgagcctaataat

SEQ ID NO: 21332 - DNA, 25 bp, Probe sequence
cagtagaatcagcagaatcagttaa

SEQ ID NO: 21333 - DNA, 25 bp, Probe sequence
tacaatcaacaggcttatcagtacc

SEQ ID NO: 21334 - DNA, 25 bp, Probe sequence
ttacaatcaacaggcttatcagtac

SEQ ID NO: 21335 - DNA, 25 bp, Probe sequence
atgttggagatttgtgggataatga

SEQ ID NO: 21336 - DNA, 25 bp, Probe sequence
tgttggagatttgtgggataatgaa

SEQ ID NO: 21337 - DNA, 25 bp, Probe sequence
aatgttggagatttgtgggataatg

SEQ ID NO: 21338 - DNA, 25 bp, Probe sequence
gttggagatttgtgggataatgaac

SEQ ID NO: 21339 - DNA, 25 bp, Probe sequence
atcaatgttggagatttgtgggata

SEQ ID NO: 21340 - DNA, 25 bp, Probe sequence
caatgttggagatttgtgggataat

SEQ ID NO: 21341 - DNA, 25 bp, Probe sequence
tcaatgttggagatttgtgggataa

SEQ ID NO: 21342 - DNA, 25 bp, Probe sequence
tggagatttgtgggataatgaacat

SEQ ID NO: 21343 - DNA, 25 bp, Probe sequence
ttggagatttgtgggataatgaaca

SEQ ID NO: 21344 - DNA, 25 bp, Probe sequence
tacttaatacaagaagcaccaatcg

SEQ ID NO: 21345 - DNA, 25 bp, Probe sequence
acaacatggttatcttcaactggtt

SEQ ID NO: 21346 - DNA, 25 bp, Probe sequence
aacaacatggttatcttcaactggt

SEQ ID NO: 21347 - DNA, 25 bp, Probe sequence
ttaatacaagaagcaccaatcgaac

SEQ ID NO: 21348 - DNA, 25 bp, Probe sequence
taatacaagaagcaccaatcgaaca

SEQ ID NO: 21349 - DNA, 25 bp, Probe sequence
cttaatacaagaagcaccaatcgaa

SEQ ID NO: 21350 - DNA, 25 bp, Probe sequence
acttaatacaagaagcaccaatcga

SEQ ID NO: 21351 - DNA, 25 bp, Probe sequence
ttacttaatacaagaagcaccaatc

SEQ ID NO: 21352 - DNA, 25 bp, Probe sequence
aatacaagaagcaccaatcgaacat

SEQ ID NO: 21353 - DNA, 25 bp, Probe sequence
gaagtaggcgatgtagtcataatca

SEQ ID NO: 21354 - DNA, 25 bp, Probe sequence
aagtaggcgatgtagtcataatcat

SEQ ID NO: 21355 - DNA, 25 bp, Probe sequence
tgaagtaggcgatgtagtcataatc

SEQ ID NO: 21356 - DNA, 25 bp, Probe sequence
ttgaagtaggcgatgtagtcataat

SEQ ID NO: 21357 - DNA, 25 bp, Probe sequence
gttgaagtaggcgatgtagtcataa

SEQ ID NO: 21358 - DNA, 25 bp, Probe sequence
aattcatagagcaagagtgactgag

SEQ ID NO: 21359 - DNA, 25 bp, Probe sequence
attcatagagcaagagtgactgagt

SEQ ID NO: 21360 - DNA, 25 bp, Probe sequence
tgttgaagtaggcgatgtagtcata

SEQ ID NO: 21361 - DNA, 25 bp, Probe sequence
agtaggcgatgtagtcataatcatg

SEQ ID NO: 21362 - DNA, 25 bp, Probe sequence
atattattgctagtccacgaatcgg

SEQ ID NO: 21363 - DNA, 25 bp, Probe sequence
gatattattgctagtccacgaatcg

SEQ ID NO: 21364 - DNA, 25 bp, Probe sequence
agatattattgctagtccacgaatc

SEQ ID NO: 21365 - DNA, 25 bp, Probe sequence
tattgctagtccacgaatcggtatt

SEQ ID NO: 21366 - DNA, 25 bp, Probe sequence
ttattgctagtccacgaatcggtat

SEQ ID NO: 21367 - DNA, 25 bp, Probe sequence
attattgctagtccacgaatcggta

SEQ ID NO: 21368 - DNA, 25 bp, Probe sequence
tattattgctagtccacgaatcggt

SEQ ID NO: 21369 - DNA, 25 bp, Probe sequence
aagatattattgctagtccacgaat

SEQ ID NO: 21370 - DNA, 25 bp, Probe sequence
gtgaaaggtaatccatttgtgtctc

SEQ ID NO: 21371 - DNA, 25 bp, Probe sequence
tcctcaattagtagaacaacacgaa

SEQ ID NO: 21372 - DNA, 25 bp, Probe sequence
tccaggtgaattaggtattgatgtc

SEQ ID NO: 21373 - DNA, 25 bp, Probe sequence
atcctcaattagtagaacaacacga

SEQ ID NO: 21374 - DNA, 25 bp, Probe sequence
atccaggtgaattaggtattgatgt

SEQ ID NO: 21375 - DNA, 25 bp, Probe sequence
ccaggtgaattaggtattgatgtca

SEQ ID NO: 21376 - DNA, 25 bp, Probe sequence
tatcctcaattagtagaacaacacg

SEQ ID NO: 21377 - DNA, 25 bp, Probe sequence
tatccaggtgaattaggtattgatg

SEQ ID NO: 21378 - DNA, 25 bp, Probe sequence
caggtgaattaggtattgatgtcaa

SEQ ID NO: 21379 - DNA, 25 bp, Probe sequence
ccattagctgatgtgttagaaggag

SEQ ID NO: 21380 - DNA, 25 bp, Probe sequence
attctgtatggcagttggaagttat

SEQ ID NO: 21381 - DNA, 25 bp, Probe sequence
tattctgtatggcagttggaagtta

SEQ ID NO: 21382 - DNA, 25 bp, Probe sequence
ttctgtatggcagttggaagttatt

SEQ ID NO: 21383 - DNA, 25 bp, Probe sequence
aatcgttgtattctgtatggcagtt

SEQ ID NO: 21384 - DNA, 25 bp, Probe sequence
gtattctgtatggcagttggaagtt

SEQ ID NO: 21385 - DNA, 25 bp, Probe sequence
ttgtattctgtatggcagttggaag

SEQ ID NO: 21386 - DNA, 25 bp, Probe sequence
agcctcaacatagtgacgatacatt

SEQ ID NO: 21387 - DNA, 25 bp, Probe sequence
aagcctcaacatagtgacgatacat

SEQ ID NO: 21388 - DNA, 25 bp, Probe sequence
gttgtattctgtatggcagttggaa

SEQ ID NO: 21389 - DNA, 25 bp, Probe sequence
attagcaagcacttaacaattccag

SEQ ID NO: 21390 - DNA, 25 bp, Probe sequence
ggcatctctatgacacaagacttaa

SEQ ID NO: 21391 - DNA, 25 bp, Probe sequence
aggcatctctatgacacaagactta

SEQ ID NO: 21392 - DNA, 25 bp, Probe sequence
taggcatctctatgacacaagactt

SEQ ID NO: 21393 - DNA, 25 bp, Probe sequence
caagcacttaacaattccagtcatt

SEQ ID NO: 21394 - DNA, 25 bp, Probe sequence
ttgtagttgttgatatgccgattgg

SEQ ID NO: 21395 - DNA, 25 bp, Probe sequence
tcacttggtatgactgtattaggtt

SEQ ID NO: 21396 - DNA, 25 bp, Probe sequence
ttcacttggtatgactgtattaggt

SEQ ID NO: 21397 - DNA, 25 bp, Probe sequence
aattagcaagcacttaacaattcca

SEQ ID NO: 21398 - DNA, 25 bp, Probe sequence
acactagaagaacatacgacatacc

SEQ ID NO: 21399 - DNA, 25 bp, Probe sequence
cactagaagaacatacgacatacct

SEQ ID NO: 21400 - DNA, 25 bp, Probe sequence
actagaagaacatacgacatacctc

SEQ ID NO: 21401 - DNA, 25 bp, Probe sequence
ctagaagaacatacgacatacctct

SEQ ID NO: 21402 - DNA, 25 bp, Probe sequence
tatgattacgattataagcggttgc

SEQ ID NO: 21403 - DNA, 25 bp, Probe sequence
tacactagaagaacatacgacatac

SEQ ID NO: 21404 - DNA, 25 bp, Probe sequence
gattacgattataagcggttgcatt

SEQ ID NO: 21405 - DNA, 25 bp, Probe sequence
tcttggcgatgtatttactgttact

SEQ ID NO: 21406 - DNA, 25 bp, Probe sequence
tctcttggcgatgtatttactgtta

SEQ ID NO: 21407 - DNA, 25 bp, Probe sequence
gatgtggcagaagaaattagagaag

SEQ ID NO: 21408 - DNA, 25 bp, Probe sequence
tacgttaatggctggcttactagaa

SEQ ID NO: 21409 - DNA, 25 bp, Probe sequence
atgtggcagaagaaattagagaagc

SEQ ID NO: 21410 - DNA, 25 bp, Probe sequence
attaggtacgttaatggctggctta

SEQ ID NO: 21411 - DNA, 25 bp, Probe sequence
gtacgttaatggctggcttactaga

SEQ ID NO: 21412 - DNA, 25 bp, Probe sequence
atgttcttgactttgaagtggatga

SEQ ID NO: 21413 - DNA, 25 bp, Probe sequence
cttgtatcaacatggtacattaggt

SEQ ID NO: 21414 - DNA, 25 bp, Probe sequence
cgttaatggctggcttactagaagg

SEQ ID NO: 21415 - DNA, 25 bp, Probe sequence
tcttgtatcaacatggtacattagg

SEQ ID NO: 21416 - DNA, 25 bp, Probe sequence
aagtgatgttgttgatgaggcatat

SEQ ID NO: 21417 - DNA, 25 bp, Probe sequence
aaagaaataccaatgacgaaactgc

SEQ ID NO: 21418 - DNA, 25 bp, Probe sequence
tggctagatacaaagatacaacagt

SEQ ID NO: 21419 - DNA, 25 bp, Probe sequence
aaagtgatgttgttgatgaggcata

SEQ ID NO: 21420 - DNA, 25 bp, Probe sequence
gatgttgttgatgaggcatatgatt

SEQ ID NO: 21421 - DNA, 25 bp, Probe sequence
atggatgtgccaacttataatgatt

SEQ ID NO: 21422 - DNA, 25 bp, Probe sequence
tgatgttgttgatgaggcatatgat

SEQ ID NO: 21423 - DNA, 25 bp, Probe sequence
acagagtatgatgtgttatttgacg

SEQ ID NO: 21424 - DNA, 25 bp, Probe sequence
atggctagatacaaagatacaacag

SEQ ID NO: 21425 - DNA, 25 bp, Probe sequence
agggcaatactttatcatcacacat

SEQ ID NO: 21426 - DNA, 25 bp, Probe sequence
tatacattaacggaccagcaaatca

SEQ ID NO: 21427 - DNA, 25 bp, Probe sequence
ttatacattaacggaccagcaaatc

SEQ ID NO: 21428 - DNA, 25 bp, Probe sequence
aagggcaatactttatcatcacaca

SEQ ID NO: 21429 - DNA, 25 bp, Probe sequence
gggcaatactttatcatcacacata

SEQ ID NO: 21430 - DNA, 25 bp, Probe sequence
atacattaacggaccagcaaatcag

SEQ ID NO: 21431 - DNA, 25 bp, Probe sequence
tgatattccacgtcaattcgataat

SEQ ID NO: 21432 - DNA, 25 bp, Probe sequence
agtgatattccacgtcaattcgata

SEQ ID NO: 21433 - DNA, 25 bp, Probe sequence
tagtgatattccacgtcaattcgat

SEQ ID NO: 21434 - DNA, 25 bp, Probe sequence
caagtgttgacgctagtattattgg

SEQ ID NO: 21435 - DNA, 25 bp, Probe sequence
ttaatcggagatggatctgtaggat

SEQ ID NO: 21436 - DNA, 25 bp, Probe sequence
aggttgtattaatcggagatggatc

SEQ ID NO: 21437 - DNA, 25 bp, Probe sequence
aaggttgtattaatcggagatggat

SEQ ID NO: 21438 - DNA, 25 bp, Probe sequence
ggttgtattaatcggagatggatct

SEQ ID NO: 21439 - DNA, 25 bp, Probe sequence
attaatcggagatggatctgtagga

SEQ ID NO: 21440 - DNA, 25 bp, Probe sequence
tgttatcggttcaggtactgtattg

SEQ ID NO: 21441 - DNA, 25 bp, Probe sequence
gtgttatcggttcaggtactgtatt

SEQ ID NO: 21442 - DNA, 25 bp, Probe sequence
ttgtattaatcggagatggatctgt

SEQ ID NO: 21443 - DNA, 25 bp, Probe sequence
atgtaccaccagatcaagtgattac

SEQ ID NO: 21444 - DNA, 25 bp, Probe sequence
aatgtaccaccagatcaagtgatta

SEQ ID NO: 21445 - DNA, 25 bp, Probe sequence
tgtatcgttagcctagtcataacaa

SEQ ID NO: 21446 - DNA, 25 bp, Probe sequence
atgtatcgttagcctagtcataaca

SEQ ID NO: 21447 - DNA, 25 bp, Probe sequence
cgttagcctagtcataacaatactg

SEQ ID NO: 21448 - DNA, 25 bp, Probe sequence
tcgttagcctagtcataacaatact

SEQ ID NO: 21449 - DNA, 25 bp, Probe sequence
taccaccagatcaagtgattacaga

SEQ ID NO: 21450 - DNA, 25 bp, Probe sequence
gtaccaccagatcaagtgattacag

SEQ ID NO: 21451 - DNA, 25 bp, Probe sequence
ccaccagatcaagtgattacagaag

SEQ ID NO: 21452 - DNA, 25 bp, Probe sequence
atagtgtaggcgatgttagaggtaa

SEQ ID NO: 21453 - DNA, 25 bp, Probe sequence
aatagtgtaggcgatgttagaggta

SEQ ID NO: 21454 - DNA, 25 bp, Probe sequence
cctagagaagtaacagaagcgataa

SEQ ID NO: 21455 - DNA, 25 bp, Probe sequence
atgacatatctggacaaggttggta

SEQ ID NO: 21456 - DNA, 25 bp, Probe sequence
acctagagaagtaacagaagcgata

SEQ ID NO: 21457 - DNA, 25 bp, Probe sequence
tgacatatctggacaaggttggtaa

SEQ ID NO: 21458 - DNA, 25 bp, Probe sequence
tatgacatatctggacaaggttggt

SEQ ID NO: 21459 - DNA, 25 bp, Probe sequence
atatgacatatctggacaaggttgg

SEQ ID NO: 21460 - DNA, 25 bp, Probe sequence
caatagtgtaggcgatgttagaggt

SEQ ID NO: 21461 - DNA, 25 bp, Probe sequence
taatgaatcacctgaagaagttgct

SEQ ID NO: 21462 - DNA, 25 bp, Probe sequence
gtaatgaatcacctgaagaagttgc

SEQ ID NO: 21463 - DNA, 25 bp, Probe sequence
tgtaatgaatcacctgaagaagttg

SEQ ID NO: 21464 - DNA, 25 bp, Probe sequence
gttgtaatgaatcacctgaagaagt

SEQ ID NO: 21465 - DNA, 25 bp, Probe sequence
ttgtaatgaatcacctgaagaagtt

SEQ ID NO: 21466 - DNA, 25 bp, Probe sequence
ttacatatatcataggcggtcaagc

SEQ ID NO: 21467 - DNA, 25 bp, Probe sequence
tgttacatatatcataggcggtcaa

SEQ ID NO: 21468 - DNA, 25 bp, Probe sequence
aatgaatcacctgaagaagttgctg

SEQ ID NO: 21469 - DNA, 25 bp, Probe sequence
gttacatatatcataggcggtcaag

SEQ ID NO: 21470 - DNA, 25 bp, Probe sequence
tcaatccattaccacacatcagtta

SEQ ID NO: 21471 - DNA, 25 bp, Probe sequence
tatcaatccattaccacacatcagt

SEQ ID NO: 21472 - DNA, 25 bp, Probe sequence
atcaatccattaccacacatcagtt

SEQ ID NO: 21473 - DNA, 25 bp, Probe sequence
caatccattaccacacatcagttat

SEQ ID NO: 21474 - DNA, 25 bp, Probe sequence
ttatcaatccattaccacacatcag

SEQ ID NO: 21475 - DNA, 25 bp, Probe sequence
aatccattaccacacatcagttatg

SEQ ID NO: 21476 - DNA, 25 bp, Probe sequence
tcagttgcgttagaagtattagaac

SEQ ID NO: 21477 - DNA, 25 bp, Probe sequence
ccacaagttattgaacaacacgatg

SEQ ID NO: 21478 - DNA, 25 bp, Probe sequence
ttaactcacaagaccacactgtaat

SEQ ID NO: 21479 - DNA, 25 bp, Probe sequence
tcataattgtgttaggtgctggtat

SEQ ID NO: 21480 - DNA, 25 bp, Probe sequence
atcataattgtgttaggtgctggta

SEQ ID NO: 21481 - DNA, 25 bp, Probe sequence
tatcataattgtgttaggtgctggt

SEQ ID NO: 21482 - DNA, 25 bp, Probe sequence
tactctacacatcagcacttctatt

SEQ ID NO: 21483 - DNA, 25 bp, Probe sequence
cataattgtgttaggtgctggtatt

SEQ ID NO: 21484 - DNA, 25 bp, Probe sequence
atatcataattgtgttaggtgctgg

SEQ ID NO: 21485 - DNA, 25 bp, Probe sequence
gtactctacacatcagcacttctat

SEQ ID NO: 21486 - DNA, 25 bp, Probe sequence
ggcgtaatgtatcagtatagattgt

SEQ ID NO: 21487 - DNA, 25 bp, Probe sequence
taagtacgattcagtcacctattgt

SEQ ID NO: 21488 - DNA, 25 bp, Probe sequence
tagttcggtcactgtagtagatgat

SEQ ID NO: 21489 - DNA, 25 bp, Probe sequence
atatacatctggtacaactggcaat

SEQ ID NO: 21490 - DNA, 25 bp, Probe sequence
tatacatctggtacaactggcaatc

SEQ ID NO: 21491 - DNA, 25 bp, Probe sequence
ttattagttcaggctatacgattgg

SEQ ID NO: 21492 - DNA, 25 bp, Probe sequence
catatacatctggtacaactggcaa

SEQ ID NO: 21493 - DNA, 25 bp, Probe sequence
gcgattctgtcatatacatctggta

SEQ ID NO: 21494 - DNA, 25 bp, Probe sequence
gtcatatacatctggtacaactggc

SEQ ID NO: 21495 - DNA, 25 bp, Probe sequence
atggcgattctgtcatatacatctg

SEQ ID NO: 21496 - DNA, 25 bp, Probe sequence
ttcggtcactgtagtagatgatgag

SEQ ID NO: 21497 - DNA, 25 bp, Probe sequence
tagaagaactggatgattgtctcac

SEQ ID NO: 21498 - DNA, 25 bp, Probe sequence
atagaagaactggatgattgtctca

SEQ ID NO: 21499 - DNA, 25 bp, Probe sequence
aatagaagaactggatgattgtctc

SEQ ID NO: 21500 - DNA, 25 bp, Probe sequence
agaagaactggatgattgtctcaca

SEQ ID NO: 21501 - DNA, 25 bp, Probe sequence
acactatatcattattacgctgtgg

SEQ ID NO: 21502 - DNA, 25 bp, Probe sequence
gagtacaagcatacacacaagcatc

SEQ ID NO: 21503 - DNA, 25 bp, Probe sequence
actatatcattattacgctgtggga

SEQ ID NO: 21504 - DNA, 25 bp, Probe sequence
taacgaaggacaagaagaaacattc

SEQ ID NO: 21505 - DNA, 25 bp, Probe sequence
ttaacgaaggacaagaagaaacatt

SEQ ID NO: 21506 - DNA, 25 bp, Probe sequence
aacagtaagaggacaaggctataag

SEQ ID NO: 21507 - DNA, 25 bp, Probe sequence
atattatgatggatggtatggacgg

SEQ ID NO: 21508 - DNA, 25 bp, Probe sequence
gcagtggtagatattatgatggatg

SEQ ID NO: 21509 - DNA, 25 bp, Probe sequence
acaaggctataaggtggagaatcat

SEQ ID NO: 21510 - DNA, 25 bp, Probe sequence
gatattatgatggatggtatggacg

SEQ ID NO: 21511 - DNA, 25 bp, Probe sequence
agtaagaggacaaggctataaggtg

SEQ ID NO: 21512 - DNA, 25 bp, Probe sequence
cagtaagaggacaaggctataaggt

SEQ ID NO: 21513 - DNA, 25 bp, Probe sequence
acagtaagaggacaaggctataagg

SEQ ID NO: 21514 - DNA, 25 bp, Probe sequence
agtggtagatattatgatggatggt

SEQ ID NO: 21515 - DNA, 25 bp, Probe sequence
gcgaattagcgatttggattaaaga

SEQ ID NO: 21516 - DNA, 25 bp, Probe sequence
taggcgaattagcgatttggattaa

SEQ ID NO: 21517 - DNA, 25 bp, Probe sequence
ttaggcgaattagcgatttggatta

SEQ ID NO: 21518 - DNA, 25 bp, Probe sequence
agcgatttggattaaagaagatgat

SEQ ID NO: 21519 - DNA, 25 bp, Probe sequence
ggcgaattagcgatttggattaaag

SEQ ID NO: 21520 - DNA, 25 bp, Probe sequence
attaggcgaattagcgatttggatt

SEQ ID NO: 21521 - DNA, 25 bp, Probe sequence
aacaccattaggcgaattagcgatt

SEQ ID NO: 21522 - DNA, 25 bp, Probe sequence
aggcgaattagcgatttggattaaa

SEQ ID NO: 21523 - DNA, 25 bp, Probe sequence
tagcgatttggattaaagaagatga

SEQ ID NO: 21524 - DNA, 25 bp, Probe sequence
catcaacctattcaatcattcgtcc

SEQ ID NO: 21525 - DNA, 25 bp, Probe sequence
cattcgcattattcgtaactggatt

SEQ ID NO: 21526 - DNA, 25 bp, Probe sequence
acctattcaatcattcgtccagtaa

SEQ ID NO: 21527 - DNA, 25 bp, Probe sequence
aacctattcaatcattcgtccagta

SEQ ID NO: 21528 - DNA, 25 bp, Probe sequence
atcgcatcaacctattcaatcattc

SEQ ID NO: 21529 - DNA, 25 bp, Probe sequence
atcaacctattcaatcattcgtcca

SEQ ID NO: 21530 - DNA, 25 bp, Probe sequence
gcatcaacctattcaatcattcgtc

SEQ ID NO: 21531 - DNA, 25 bp, Probe sequence
tcaacctattcaatcattcgtccag

SEQ ID NO: 21532 - DNA, 25 bp, Probe sequence
caacctattcaatcattcgtccagt

SEQ ID NO: 21533 - DNA, 25 bp, Probe sequence
attatgaaggtagaagagcaactgg

SEQ ID NO: 21534 - DNA, 25 bp, Probe sequence
cattatgaaggtagaagagcaactg

SEQ ID NO: 21535 - DNA, 25 bp, Probe sequence
cattcaatacgccacaattactaca

SEQ ID NO: 21536 - DNA, 25 bp, Probe sequence
attcaatacgccacaattactacaa

SEQ ID NO: 21537 - DNA, 25 bp, Probe sequence
gcattcaatacgccacaattactac

SEQ ID NO: 21538 - DNA, 25 bp, Probe sequence
ttatgaaggtagaagagcaactggt

SEQ ID NO: 21539 - DNA, 25 bp, Probe sequence
gttctgtactaggtaatcgtctgag

SEQ ID NO: 21540 - DNA, 25 bp, Probe sequence
taggtaatcgtctgagtgaagataa

SEQ ID NO: 21541 - DNA, 25 bp, Probe sequence
tactaggtaatcgtctgagtgaaga

SEQ ID NO: 21542 - DNA, 25 bp, Probe sequence
aatcacatacattagtcggatacat

SEQ ID NO: 21543 - DNA, 25 bp, Probe sequence
cacatacattagtcggatacataga

SEQ ID NO: 21544 - DNA, 25 bp, Probe sequence
tcacatacattagtcggatacatag

SEQ ID NO: 21545 - DNA, 25 bp, Probe sequence
atgcacactacacctattcttctag

SEQ ID NO: 21546 - DNA, 25 bp, Probe sequence
gatgcacactacacctattcttcta

SEQ ID NO: 21547 - DNA, 25 bp, Probe sequence
ccaaatcagaaatcgtcaacaagta

SEQ ID NO: 21548 - DNA, 25 bp, Probe sequence
ttaccacaacatttcattcgcattt

SEQ ID NO: 21549 - DNA, 25 bp, Probe sequence
taccacaacatttcattcgcatttc

SEQ ID NO: 21550 - DNA, 25 bp, Probe sequence
acaacatttcattcgcatttccaaa

SEQ ID NO: 21551 - DNA, 25 bp, Probe sequence
ggcattgagactggtaagcatatta

SEQ ID NO: 21552 - DNA, 25 bp, Probe sequence
gcattgagactggtaagcatattat

SEQ ID NO: 21553 - DNA, 25 bp, Probe sequence
ttatccgttattacaagcatcatgg

SEQ ID NO: 21554 - DNA, 25 bp, Probe sequence
tggcattgagactggtaagcatatt

SEQ ID NO: 21555 - DNA, 25 bp, Probe sequence
atcaatccttacaatcaagaagtga

SEQ ID NO: 21556 - DNA, 25 bp, Probe sequence
aatgttacgaatattgccttggaac

SEQ ID NO: 21557 - DNA, 25 bp, Probe sequence
gttacgaatattgccttggaacttg

SEQ ID NO: 21558 - DNA, 25 bp, Probe sequence
taatgttacgaatattgccttggaa

SEQ ID NO: 21559 - DNA, 25 bp, Probe sequence
atgttacgaatattgccttggaact

SEQ ID NO: 21560 - DNA, 25 bp, Probe sequence
tattatccactgaacccacaatcaa

SEQ ID NO: 21561 - DNA, 25 bp, Probe sequence
atattatccactgaacccacaatca

SEQ ID NO: 21562 - DNA, 25 bp, Probe sequence
tccctttcactgttctttagtatgt

SEQ ID NO: 21563 - DNA, 25 bp, Probe sequence
ccctttcactgttctttagtatgtt

SEQ ID NO: 21564 - DNA, 25 bp, Probe sequence
tcacagaaactaccgtaatgttgat

SEQ ID NO: 21565 - DNA, 25 bp, Probe sequence
cacagaaactaccgtaatgttgatt

SEQ ID NO: 21566 - DNA, 25 bp, Probe sequence
ttcacagaaactaccgtaatgttga

SEQ ID NO: 21567 - DNA, 25 bp, Probe sequence
attatccactgaacccacaatcaac

SEQ ID NO: 21568 - DNA, 25 bp, Probe sequence
tcataacaacgtatgtcggattctt

SEQ ID NO: 21569 - DNA, 25 bp, Probe sequence
gtaatcgtgtaatgttggataagga

SEQ ID NO: 21570 - DNA, 25 bp, Probe sequence
agtaatcgtgtaatgttggataagg

SEQ ID NO: 21571 - DNA, 25 bp, Probe sequence
tggcgtacagttatattaggttcaa

SEQ ID NO: 21572 - DNA, 25 bp, Probe sequence
gagatggcgtacagttatattaggt

SEQ ID NO: 21573 - DNA, 25 bp, Probe sequence
ggaagagatggcgtacagttatatt

SEQ ID NO: 21574 - DNA, 25 bp, Probe sequence
atggcgtacagttatattaggttca

SEQ ID NO: 21575 - DNA, 25 bp, Probe sequence
agagatggcgtacagttatattagg

SEQ ID NO: 21576 - DNA, 25 bp, Probe sequence
agatggcgtacagttatattaggtt

SEQ ID NO: 21577 - DNA, 25 bp, Probe sequence
ggcgtacagttatattaggttcaag

SEQ ID NO: 21578 - DNA, 25 bp, Probe sequence
ctatcgtggttgattatactgtgga

SEQ ID NO: 21579 - DNA, 25 bp, Probe sequence
tctatcgtggttgattatactgtgg

SEQ ID NO: 21580 - DNA, 25 bp, Probe sequence
caattacatcaaggcacaccaataa

SEQ ID NO: 21581 - DNA, 25 bp, Probe sequence
tatcgtggttgattatactgtggat

SEQ ID NO: 21582 - DNA, 25 bp, Probe sequence
atcgtggttgattatactgtggatg

SEQ ID NO: 21583 - DNA, 25 bp, Probe sequence
tgcggttcaattatatcctaagtct

SEQ ID NO: 21584 - DNA, 25 bp, Probe sequence
gtctatcgtggttgattatactgtg

SEQ ID NO: 21585 - DNA, 25 bp, Probe sequence
tcaattacatcaaggcacaccaata

SEQ ID NO: 21586 - DNA, 25 bp, Probe sequence
attacatcaaggcacaccaataatg

SEQ ID NO: 21587 - DNA, 25 bp, Probe sequence
aagtatcagaagaagaacaagacga

SEQ ID NO: 21588 - DNA, 25 bp, Probe sequence
caagtatcagaagaagaacaagacg

SEQ ID NO: 21589 - DNA, 25 bp, Probe sequence
agtatcagaagaagaacaagacgat

SEQ ID NO: 21590 - DNA, 25 bp, Probe sequence
agaagtcgtgctaggaacaattatt

SEQ ID NO: 21591 - DNA, 25 bp, Probe sequence
aagaagtcgtgctaggaacaattat

SEQ ID NO: 21592 - DNA, 25 bp, Probe sequence
tcaagtatcagaagaagaacaagac

SEQ ID NO: 21593 - DNA, 25 bp, Probe sequence
gaatcgttcaagtatcagaagaaga

SEQ ID NO: 21594 - DNA, 25 bp, Probe sequence
cgaatcgttcaagtatcagaagaag

SEQ ID NO: 21595 - DNA, 25 bp, Probe sequence
tacagaggcaaccattattgaagtg

SEQ ID NO: 21596 - DNA, 25 bp, Probe sequence
acttacagtcatgctaattggtacg

SEQ ID NO: 21597 - DNA, 25 bp, Probe sequence
catacttacagtcatgctaattggt

SEQ ID NO: 21598 - DNA, 25 bp, Probe sequence
acatacttacagtcatgctaattgg

SEQ ID NO: 21599 - DNA, 25 bp, Probe sequence
acaagcatacatacttacagtcatg

SEQ ID NO: 21600 - DNA, 25 bp, Probe sequence
gtacaagcatacatacttacagtca

SEQ ID NO: 21601 - DNA, 25 bp, Probe sequence
tgttagtggactatctgtggactat

SEQ ID NO: 21602 - DNA, 25 bp, Probe sequence
ttgttagtggactatctgtggacta

SEQ ID NO: 21603 - DNA, 25 bp, Probe sequence
tacttacagtcatgctaattggtac

SEQ ID NO: 21604 - DNA, 25 bp, Probe sequence
actctcagagacatcattagcacaa

SEQ ID NO: 21605 - DNA, 25 bp, Probe sequence
gaaatgtggagataaatacgaaggt

SEQ ID NO: 21606 - DNA, 25 bp, Probe sequence
tgaaatgtggagataaatacgaagg

SEQ ID NO: 21607 - DNA, 25 bp, Probe sequence
aatgtggagataaatacgaaggtaa

SEQ ID NO: 21608 - DNA, 25 bp, Probe sequence
aaatgtggagataaatacgaaggta

SEQ ID NO: 21609 - DNA, 25 bp, Probe sequence
atgtggagataaatacgaaggtaat

SEQ ID NO: 21610 - DNA, 25 bp, Probe sequence
ttgaaatgtggagataaatacgaag

SEQ ID NO: 21611 - DNA, 25 bp, Probe sequence
tgtggagataaatacgaaggtaata

SEQ ID NO: 21612 - DNA, 25 bp, Probe sequence
gtggagataaatacgaaggtaataa

SEQ ID NO: 21613 - DNA, 25 bp, Probe sequence
tggagataaatacgaaggtaataat

SEQ ID NO: 21614 - DNA, 25 bp, Probe sequence
ggagataaatacgaaggtaataatg

SEQ ID NO: 21615 - DNA, 25 bp, Probe sequence
tataggtggagaatatgtagacggt

SEQ ID NO: 21616 - DNA, 25 bp, Probe sequence
ttataggtggagaatatgtagacgg

SEQ ID NO: 21617 - DNA, 25 bp, Probe sequence
ataggtggagaatatgtagacggtg

SEQ ID NO: 21618 - DNA, 25 bp, Probe sequence
ctgatgaaggcaatgataggttgaa

SEQ ID NO: 21619 - DNA, 25 bp, Probe sequence
ttctgatgaaggcaatgataggttg

SEQ ID NO: 21620 - DNA, 25 bp, Probe sequence
gttataggtggagaatatgtagacg

SEQ ID NO: 21621 - DNA, 25 bp, Probe sequence
tctgatgaaggcaatgataggttga

SEQ ID NO: 21622 - DNA, 25 bp, Probe sequence
aactgaagaagagattagtaacgaa

SEQ ID NO: 21623 - DNA, 25 bp, Probe sequence
tagatgattgggaaatgtttggaga

SEQ ID NO: 21624 - DNA, 25 bp, Probe sequence
cttatgatgtcttaatcgttggtgg

SEQ ID NO: 21625 - DNA, 25 bp, Probe sequence
ccttatgatgtcttaatcgttggtg

SEQ ID NO: 21626 - DNA, 25 bp, Probe sequence
ttatgatgtcttaatcgttggtggt

SEQ ID NO: 21627 - DNA, 25 bp, Probe sequence
tgtcgttcaagcacttaacttaatg

SEQ ID NO: 21628 - DNA, 25 bp, Probe sequence
gatgtcgttcaagcacttaacttaa

SEQ ID NO: 21629 - DNA, 25 bp, Probe sequence
tatgatgtcttaatcgttggtggtg

SEQ ID NO: 21630 - DNA, 25 bp, Probe sequence
ggcgaagaacatctacttaacttag

SEQ ID NO: 21631 - DNA, 25 bp, Probe sequence
cggcgaagaacatctacttaactta

SEQ ID NO: 21632 - DNA, 25 bp, Probe sequence
atgtcgttcaagcacttaacttaat

SEQ ID NO: 21633 - DNA, 25 bp, Probe sequence
gatgaacttccagaacaacttaaca

SEQ ID NO: 21634 - DNA, 25 bp, Probe sequence
tgatgaacttccagaacaacttaac

SEQ ID NO: 21635 - DNA, 25 bp, Probe sequence
atgaacttccagaacaacttaacaa

SEQ ID NO: 21636 - DNA, 25 bp, Probe sequence
ttgatgaacttccagaacaacttaa

SEQ ID NO: 21637 - DNA, 25 bp, Probe sequence
aagaatcaatgatatatggcacagc

SEQ ID NO: 21638 - DNA, 25 bp, Probe sequence
atattgaagatggtcctgtactcgt

SEQ ID NO: 21639 - DNA, 25 bp, Probe sequence
tattgaagatggtcctgtactcgtt

SEQ ID NO: 21640 - DNA, 25 bp, Probe sequence
aatattgaagatggtcctgtactcg

SEQ ID NO: 21641 - DNA, 25 bp, Probe sequence
aagtaattgtaacgagttatgacct

SEQ ID NO: 21642 - DNA, 25 bp, Probe sequence
ccaatactaaaagttgcatatccgt

SEQ ID NO: 21643 - DNA, 25 bp, Probe sequence
accaatactaaaagttgcatatccg

SEQ ID NO: 21644 - DNA, 25 bp, Probe sequence
ttgatagaatatgacctaacaatca

SEQ ID NO: 21645 - DNA, 25 bp, Probe sequence
caatactaaaagttgcatatccgtt

SEQ ID NO: 21646 - DNA, 25 bp, Probe sequence
tgacctaacaatcattttgatacca

SEQ ID NO: 21647 - DNA, 25 bp, Probe sequence
tgatagaatatgacctaacaatcat

SEQ ID NO: 21648 - DNA, 25 bp, Probe sequence
aatactaaaagttgcatatccgttt

SEQ ID NO: 21649 - DNA, 25 bp, Probe sequence
gacctaacaatcattttgataccaa

SEQ ID NO: 21650 - DNA, 25 bp, Probe sequence
tttgataccaatactaaaagttgca

SEQ ID NO: 21651 - DNA, 25 bp, Probe sequence
aagcgaagatatgacacaactgaat

SEQ ID NO: 21652 - DNA, 25 bp, Probe sequence
agcgaagatatgacacaactgaatt

SEQ ID NO: 21653 - DNA, 25 bp, Probe sequence
gcgaagatatgacacaactgaattt

SEQ ID NO: 21654 - DNA, 25 bp, Probe sequence
aaagcgaagatatgacacaactgaa

SEQ ID NO: 21655 - DNA, 25 bp, Probe sequence
cgaagatatgacacaactgaatttg

SEQ ID NO: 21656 - DNA, 25 bp, Probe sequence
aaaagcgaagatatgacacaactga

SEQ ID NO: 21657 - DNA, 25 bp, Probe sequence
gcacatagtatgacagctaaaataa

SEQ ID NO: 21658 - DNA, 25 bp, Probe sequence
agcacatagtatgacagctaaaata

SEQ ID NO: 21659 - DNA, 25 bp, Probe sequence
tgacagctaaaataactttacatca

SEQ ID NO: 21660 - DNA, 25 bp, Probe sequence
ttgttgacggtgaaggagtaagatg

SEQ ID NO: 21661 - DNA, 25 bp, Probe sequence
cgagagttattatcatacattgacg

SEQ ID NO: 21662 - DNA, 25 bp, Probe sequence
aagttcagatatggcgagaaataca

SEQ ID NO: 21663 - DNA, 25 bp, Probe sequence
tcaggatgtccatttaattgtgttg

SEQ ID NO: 21664 - DNA, 25 bp, Probe sequence
taagtctattaggtggcgaaccatt

SEQ ID NO: 21665 - DNA, 25 bp, Probe sequence
cagtgtttatgtatcaggatgtcca

SEQ ID NO: 21666 - DNA, 25 bp, Probe sequence
gttcagatatggcgagaaatacact

SEQ ID NO: 21667 - DNA, 25 bp, Probe sequence
agttcagatatggcgagaaatacac

SEQ ID NO: 21668 - DNA, 25 bp, Probe sequence
aaagttcagatatggcgagaaatac

SEQ ID NO: 21669 - DNA, 25 bp, Probe sequence
atgttactcgcagatatggaagatg

SEQ ID NO: 21670 - DNA, 25 bp, Probe sequence
tatgttactcgcagatatggaagat

SEQ ID NO: 21671 - DNA, 25 bp, Probe sequence
atatgttactcgcagatatggaaga

SEQ ID NO: 21672 - DNA, 25 bp, Probe sequence
tcgcagatatggaagatgagtatat

SEQ ID NO: 21673 - DNA, 25 bp, Probe sequence
tgttactcgcagatatggaagatga

SEQ ID NO: 21674 - DNA, 25 bp, Probe sequence
ctcgcagatatggaagatgagtata

SEQ ID NO: 21675 - DNA, 25 bp, Probe sequence
gttactcgcagatatggaagatgag

SEQ ID NO: 21676 - DNA, 25 bp, Probe sequence
cgcagatatggaagatgagtatatt

SEQ ID NO: 21677 - DNA, 25 bp, Probe sequence
tatatgttactcgcagatatggaag

SEQ ID NO: 21678 - DNA, 25 bp, Probe sequence
gtaacattaggattcggcttaggta

SEQ ID NO: 21679 - DNA, 25 bp, Probe sequence
aataatggtcgttgtaatcttggtg

SEQ ID NO: 21680 - DNA, 25 bp, Probe sequence
ataatggtcgttgtaatcttggtgt

SEQ ID NO: 21681 - DNA, 25 bp, Probe sequence
taatggtcgttgtaatcttggtgtt

SEQ ID NO: 21682 - DNA, 25 bp, Probe sequence
acgacttagattatcatccattcca

SEQ ID NO: 21683 - DNA, 25 bp, Probe sequence
gcacgacataatgaagaacaacata

SEQ ID NO: 21684 - DNA, 25 bp, Probe sequence
tgttatgaatgtgattacgatggag

SEQ ID NO: 21685 - DNA, 25 bp, Probe sequence
ttgtaacattaggattcggcttagg

SEQ ID NO: 21686 - DNA, 25 bp, Probe sequence
cacgacttagattatcatccattcc

SEQ ID NO: 21687 - DNA, 25 bp, Probe sequence
tatcacaacatcatacgcttcctta

SEQ ID NO: 21688 - DNA, 25 bp, Probe sequence
atcacaacatcatacgcttccttat

SEQ ID NO: 21689 - DNA, 25 bp, Probe sequence
taatgtagtagaaccagaccgagaa

SEQ ID NO: 21690 - DNA, 25 bp, Probe sequence
tcacaacatcatacgcttccttatt

SEQ ID NO: 21691 - DNA, 25 bp, Probe sequence
ggcattattattggcaacggtatta

SEQ ID NO: 21692 - DNA, 25 bp, Probe sequence
cacaacatcatacgcttccttatta

SEQ ID NO: 21693 - DNA, 25 bp, Probe sequence
taggcattattattggcaacggtat

SEQ ID NO: 21694 - DNA, 25 bp, Probe sequence
ttaatgtagtagaaccagaccgaga

SEQ ID NO: 21695 - DNA, 25 bp, Probe sequence
ttaggcattattattggcaacggta

SEQ ID NO: 21696 - DNA, 25 bp, Probe sequence
atgaacgagatcaagatgtaaggtt

SEQ ID NO: 21697 - DNA, 25 bp, Probe sequence
tatgaacgagatcaagatgtaaggt

SEQ ID NO: 21698 - DNA, 25 bp, Probe sequence
atatgaacgagatcaagatgtaagg

SEQ ID NO: 21699 - DNA, 25 bp, Probe sequence
ttaccgcaaacacaagatatagatg

SEQ ID NO: 21700 - DNA, 25 bp, Probe sequence
aaatgaattaccgcaaacacaagat

SEQ ID NO: 21701 - DNA, 25 bp, Probe sequence
tatagtgtgacagatttggttggat

SEQ ID NO: 21702 - DNA, 25 bp, Probe sequence
atatagtgtgacagatttggttgga

SEQ ID NO: 21703 - DNA, 25 bp, Probe sequence
gcaatagagagaaatgaattaccgc

SEQ ID NO: 21704 - DNA, 25 bp, Probe sequence
atagtgtgacagatttggttggatt

SEQ ID NO: 21705 - DNA, 25 bp, Probe sequence
ttgaaccgagtataggaagtgtatg

SEQ ID NO: 21706 - DNA, 25 bp, Probe sequence
gaaccgagtataggaagtgtatgta

SEQ ID NO: 21707 - DNA, 25 bp, Probe sequence
tgaaccgagtataggaagtgtatgt

SEQ ID NO: 21708 - DNA, 25 bp, Probe sequence
attgaaccgagtataggaagtgtat

SEQ ID NO: 21709 - DNA, 25 bp, Probe sequence
cgagtataggaagtgtatgtaatgc

SEQ ID NO: 21710 - DNA, 25 bp, Probe sequence
aattgaaccgagtataggaagtgta

SEQ ID NO: 21711 - DNA, 25 bp, Probe sequence
taattgaaccgagtataggaagtgt

SEQ ID NO: 21712 - DNA, 25 bp, Probe sequence
aaccgagtataggaagtgtatgtaa

SEQ ID NO: 21713 - DNA, 25 bp, Probe sequence
accgagtataggaagtgtatgtaat

SEQ ID NO: 21714 - DNA, 25 bp, Probe sequence
ggatttaagcgataatgatatgcgt

SEQ ID NO: 21715 - DNA, 25 bp, Probe sequence
aggatttaagcgataatgatatgcg

SEQ ID NO: 21716 - DNA, 25 bp, Probe sequence
gatttaagcgataatgatatgcgtt

SEQ ID NO: 21717 - DNA, 25 bp, Probe sequence
atttaagcgataatgatatgcgttt

SEQ ID NO: 21718 - DNA, 25 bp, Probe sequence
aaggatttaagcgataatgatatgc

SEQ ID NO: 21719 - DNA, 25 bp, Probe sequence
gtctaataatgaaggatttaagcga

SEQ ID NO: 21720 - DNA, 25 bp, Probe sequence
agtctaataatgaaggatttaagcg

SEQ ID NO: 21721 - DNA, 25 bp, Probe sequence
ggctttgtgaatagtctaataatga

SEQ ID NO: 21722 - DNA, 25 bp, Probe sequence
aatgaaggatttaagcgataatgat

SEQ ID NO: 21723 - DNA, 25 bp, Probe sequence
ttgaggcgttatatccaccatcata

SEQ ID NO: 21724 - DNA, 25 bp, Probe sequence
cttgaggcgttatatccaccatcat

SEQ ID NO: 21725 - DNA, 25 bp, Probe sequence
cgtatctagttattgcagcaaccaa

SEQ ID NO: 21726 - DNA, 25 bp, Probe sequence
catcaaatggcaatgttgtatttcc

SEQ ID NO: 21727 - DNA, 25 bp, Probe sequence
gcatcaaatggcaatgttgtatttc

SEQ ID NO: 21728 - DNA, 25 bp, Probe sequence
tttgaaccaagcgatattgtagacg

SEQ ID NO: 21729 - DNA, 25 bp, Probe sequence
aaatggcaatgttgtatttccaagt

SEQ ID NO: 21730 - DNA, 25 bp, Probe sequence
caaatggcaatgttgtatttccaag

SEQ ID NO: 21731 - DNA, 25 bp, Probe sequence
tcaaatggcaatgttgtatttccaa

SEQ ID NO: 21732 - DNA, 25 bp, Probe sequence
gaaccaggagattgtatagtagcat

SEQ ID NO: 21733 - DNA, 25 bp, Probe sequence
atgaaccaggagattgtatagtagc

SEQ ID NO: 21734 - DNA, 25 bp, Probe sequence
cgtatatgtaagcgtgtagattgtg

SEQ ID NO: 21735 - DNA, 25 bp, Probe sequence
gagattgtatagtagcattaccgca

SEQ ID NO: 21736 - DNA, 25 bp, Probe sequence
aggagattgtatagtagcattaccg

SEQ ID NO: 21737 - DNA, 25 bp, Probe sequence
gctaatagtaacgatacgacaagtg

SEQ ID NO: 21738 - DNA, 25 bp, Probe sequence
aaccaggagattgtatagtagcatt

SEQ ID NO: 21739 - DNA, 25 bp, Probe sequence
tgaaccaggagattgtatagtagca

SEQ ID NO: 21740 - DNA, 25 bp, Probe sequence
tgtaagcgtgtagattgtgatattg

SEQ ID NO: 21741 - DNA, 25 bp, Probe sequence
aatcgacaaccaggttctaatgaag

SEQ ID NO: 21742 - DNA, 25 bp, Probe sequence
caatcgacaaccaggttctaatgaa

SEQ ID NO: 21743 - DNA, 25 bp, Probe sequence
atcgacaaccaggttctaatgaaga

SEQ ID NO: 21744 - DNA, 25 bp, Probe sequence
atataaggatcgtgggtttgtagtg

SEQ ID NO: 21745 - DNA, 25 bp, Probe sequence
aatataaggatcgtgggtttgtagt

SEQ ID NO: 21746 - DNA, 25 bp, Probe sequence
gacaatcgacaaccaggttctaatg

SEQ ID NO: 21747 - DNA, 25 bp, Probe sequence
ttaaagaatgaacaaccaggaatct

SEQ ID NO: 21748 - DNA, 25 bp, Probe sequence
tataaggatcgtgggtttgtagtgt

SEQ ID NO: 21749 - DNA, 25 bp, Probe sequence
aaatataaggatcgtgggtttgtag

SEQ ID NO: 21750 - DNA, 25 bp, Probe sequence
atggaaacgaaactcatctctaaga

SEQ ID NO: 21751 - DNA, 25 bp, Probe sequence
agaatggaaacgaaactcatctcta

SEQ ID NO: 21752 - DNA, 25 bp, Probe sequence
aatggaaacgaaactcatctctaag

SEQ ID NO: 21753 - DNA, 25 bp, Probe sequence
gaatggaaacgaaactcatctctaa

SEQ ID NO: 21754 - DNA, 25 bp, Probe sequence
cagaatggaaacgaaactcatctct

SEQ ID NO: 21755 - DNA, 25 bp, Probe sequence
cgacgtggaagcaattaatcagatt

SEQ ID NO: 21756 - DNA, 25 bp, Probe sequence
cgtggaagcaattaatcagattgtt

SEQ ID NO: 21757 - DNA, 25 bp, Probe sequence
tgacagacgaatatggaaattctca

SEQ ID NO: 21758 - DNA, 25 bp, Probe sequence
gcagaatggaaacgaaactcatctc

SEQ ID NO: 21759 - DNA, 25 bp, Probe sequence
atggatatgagtgatgtggagattg

SEQ ID NO: 21760 - DNA, 25 bp, Probe sequence
tatggatatgagtgatgtggagatt

SEQ ID NO: 21761 - DNA, 25 bp, Probe sequence
ttatggatatgagtgatgtggagat

SEQ ID NO: 21762 - DNA, 25 bp, Probe sequence
tggatatgagtgatgtggagattgc

SEQ ID NO: 21763 - DNA, 25 bp, Probe sequence
gatgtggagattgcggagttactaa

SEQ ID NO: 21764 - DNA, 25 bp, Probe sequence
aagtgatttattaagtgaagccctg

SEQ ID NO: 21765 - DNA, 25 bp, Probe sequence
cgaataagtggactagccatgatta

SEQ ID NO: 21766 - DNA, 25 bp, Probe sequence
tttatggatatgagtgatgtggaga

SEQ ID NO: 21767 - DNA, 25 bp, Probe sequence
ctttatggatatgagtgatgtggag

SEQ ID NO: 21768 - DNA, 25 bp, Probe sequence
gtctatcattacctatgctctacgc

SEQ ID NO: 21769 - DNA, 25 bp, Probe sequence
agtctatcattacctatgctctacg

SEQ ID NO: 21770 - DNA, 25 bp, Probe sequence
acaactagatggcatatccgattaa

SEQ ID NO: 21771 - DNA, 25 bp, Probe sequence
aacaactagatggcatatccgatta

SEQ ID NO: 21772 - DNA, 25 bp, Probe sequence
gaacaactagatggcatatccgatt

SEQ ID NO: 21773 - DNA, 25 bp, Probe sequence
tctatcattacctatgctctacgcc

SEQ ID NO: 21774 - DNA, 25 bp, Probe sequence
gagtgaacaactagatggcatatcc

SEQ ID NO: 21775 - DNA, 25 bp, Probe sequence
ggagtgaacaactagatggcatatc

SEQ ID NO: 21776 - DNA, 25 bp, Probe sequence
tgaacaactagatggcatatccgat

SEQ ID NO: 21777 - DNA, 25 bp, Probe sequence
cacagatggcatataatcagttagc

SEQ ID NO: 21778 - DNA, 25 bp, Probe sequence
tcacagatggcatataatcagttag

SEQ ID NO: 21779 - DNA, 25 bp, Probe sequence
ttcacagatggcatataatcagtta

SEQ ID NO: 21780 - DNA, 25 bp, Probe sequence
acagatggcatataatcagttagct

SEQ ID NO: 21781 - DNA, 25 bp, Probe sequence
gttgatagttggtatggctattagt

SEQ ID NO: 21782 - DNA, 25 bp, Probe sequence
tgttgatagttggtatggctattag

SEQ ID NO: 21783 - DNA, 25 bp, Probe sequence
tcaacattacagtgaattagagtct

SEQ ID NO: 21784 - DNA, 25 bp, Probe sequence
gtttctgttattggatttgtcgtct

SEQ ID NO: 21785 - DNA, 25 bp, Probe sequence
tgtttctgttattggatttgtcgtc

SEQ ID NO: 21786 - DNA, 25 bp, Probe sequence
attgcttcaacattctcattaggtt

SEQ ID NO: 21787 - DNA, 25 bp, Probe sequence
aattgcttcaacattctcattaggt

SEQ ID NO: 21788 - DNA, 25 bp, Probe sequence
agcacatggaatctatagcaatcaa

SEQ ID NO: 21789 - DNA, 25 bp, Probe sequence
tagcacatggaatctatagcaatca

SEQ ID NO: 21790 - DNA, 25 bp, Probe sequence
gcacatggaatctatagcaatcaat

SEQ ID NO: 21791 - DNA, 25 bp, Probe sequence
taattgcttcaacattctcattagg

SEQ ID NO: 21792 - DNA, 25 bp, Probe sequence
tcataaattctgggatgttaggctt

SEQ ID NO: 21793 - DNA, 25 bp, Probe sequence
ctcataaattctgggatgttaggct

SEQ ID NO: 21794 - DNA, 25 bp, Probe sequence
actcataaattctgggatgttaggc

SEQ ID NO: 21795 - DNA, 25 bp, Probe sequence
ttcttagattctggaacactgacac

SEQ ID NO: 21796 - DNA, 25 bp, Probe sequence
tcttagattctggaacactgacacc

SEQ ID NO: 21797 - DNA, 25 bp, Probe sequence
cgtgaagagaaagatgaaagaaacc

SEQ ID NO: 21798 - DNA, 25 bp, Probe sequence
ggaacactgacaccattactaaaga

SEQ ID NO: 21799 - DNA, 25 bp, Probe sequence
gtgaagagaaagatgaaagaaacct

SEQ ID NO: 21800 - DNA, 25 bp, Probe sequence
tctggaacactgacaccattactaa

SEQ ID NO: 21801 - DNA, 25 bp, Probe sequence
ttctggaacactgacaccattacta

SEQ ID NO: 21802 - DNA, 25 bp, Probe sequence
gaacactgacaccattactaaagaa

SEQ ID NO: 21803 - DNA, 25 bp, Probe sequence
tctctaacagaacaaggtaaagcaa

SEQ ID NO: 21804 - DNA, 25 bp, Probe sequence
tattgttagcgattgttgtcattgg

SEQ ID NO: 21805 - DNA, 25 bp, Probe sequence
ggtattgttagcgattgttgtcatt

SEQ ID NO: 21806 - DNA, 25 bp, Probe sequence
attggtattgttagcgattgttgtc

SEQ ID NO: 21807 - DNA, 25 bp, Probe sequence
tcattggtattgttagcgattgttg

SEQ ID NO: 21808 - DNA, 25 bp, Probe sequence
gtcattggtattgttagcgattgtt

SEQ ID NO: 21809 - DNA, 25 bp, Probe sequence
cattggtattgttagcgattgttgt

SEQ ID NO: 21810 - DNA, 25 bp, Probe sequence
cattggcttcttgattattgctcta

SEQ ID NO: 21811 - DNA, 25 bp, Probe sequence
gtattgttagcgattgttgtcattg

SEQ ID NO: 21812 - DNA, 25 bp, Probe sequence
cagtcattggtattgttagcgattg

SEQ ID NO: 21813 - DNA, 25 bp, Probe sequence
atatacactggcagatggaattgag

SEQ ID NO: 21814 - DNA, 25 bp, Probe sequence
caagtgtctatcgtgataagcagtc

SEQ ID NO: 21815 - DNA, 25 bp, Probe sequence
ctatgtctatcaagcgtccaacttc

SEQ ID NO: 21816 - DNA, 25 bp, Probe sequence
attattaggcgttgtggaattaggc

SEQ ID NO: 21817 - DNA, 25 bp, Probe sequence
tatatacactggcagatggaattga

SEQ ID NO: 21818 - DNA, 25 bp, Probe sequence
tatgtctatcaagcgtccaacttct

SEQ ID NO: 21819 - DNA, 25 bp, Probe sequence
aattattaggcgttgtggaattagg

SEQ ID NO: 21820 - DNA, 25 bp, Probe sequence
acaagtgtctatcgtgataagcagt

SEQ ID NO: 21821 - DNA, 25 bp, Probe sequence
ttatatacactggcagatggaattg

SEQ ID NO: 21822 - DNA, 25 bp, Probe sequence
gcgacttgtaatcattccattcatt

SEQ ID NO: 21823 - DNA, 25 bp, Probe sequence
agcgacttgtaatcattccattcat

SEQ ID NO: 21824 - DNA, 25 bp, Probe sequence
aggtcggtcttaataatgaagtctt

SEQ ID NO: 21825 - DNA, 25 bp, Probe sequence
aaggtcggtcttaataatgaagtct

SEQ ID NO: 21826 - DNA, 25 bp, Probe sequence
aacaggctagtgatgatattccaat

SEQ ID NO: 21827 - DNA, 25 bp, Probe sequence
acaggctagtgatgatattccaata

SEQ ID NO: 21828 - DNA, 25 bp, Probe sequence
cagcgacttgtaatcattccattca

SEQ ID NO: 21829 - DNA, 25 bp, Probe sequence
ttcgcaataccaataacagtagcac

SEQ ID NO: 21830 - DNA, 25 bp, Probe sequence
ggctagtgatgatattccaatagac

SEQ ID NO: 21831 - DNA, 25 bp, Probe sequence
gatcgtaaggaagtctgtgatgatt

SEQ ID NO: 21832 - DNA, 25 bp, Probe sequence
tgctaagccaactgattgagaatta

SEQ ID NO: 21833 - DNA, 25 bp, Probe sequence
gatgatcgtaaggaagtctgtgatg

SEQ ID NO: 21834 - DNA, 25 bp, Probe sequence
atgctaagccaactgattgagaatt

SEQ ID NO: 21835 - DNA, 25 bp, Probe sequence
aatgctaagccaactgattgagaat

SEQ ID NO: 21836 - DNA, 25 bp, Probe sequence
tgatcgtaaggaagtctgtgatgat

SEQ ID NO: 21837 - DNA, 25 bp, Probe sequence
atgatcgtaaggaagtctgtgatga

SEQ ID NO: 21838 - DNA, 25 bp, Probe sequence
gctaagccaactgattgagaattag

SEQ ID NO: 21839 - DNA, 25 bp, Probe sequence
ctattcatatcgcagttggcattcg

SEQ ID NO: 21840 - DNA, 25 bp, Probe sequence
ttagatagacgagtgttggaagatt

SEQ ID NO: 21841 - DNA, 25 bp, Probe sequence
caagcgatgaacaaggaatagatta

SEQ ID NO: 21842 - DNA, 25 bp, Probe sequence
aagaacaggtcagtatagaagaagt

SEQ ID NO: 21843 - DNA, 25 bp, Probe sequence
ccaagcgatgaacaaggaatagatt

SEQ ID NO: 21844 - DNA, 25 bp, Probe sequence
agaacaggtcagtatagaagaagtt

SEQ ID NO: 21845 - DNA, 25 bp, Probe sequence
aagcgatgaacaaggaatagattat

SEQ ID NO: 21846 - DNA, 25 bp, Probe sequence
agcgatgaacaaggaatagattatt

SEQ ID NO: 21847 - DNA, 25 bp, Probe sequence
tgagagcatattacaagatggtact

SEQ ID NO: 21848 - DNA, 25 bp, Probe sequence
gagagcatattacaagatggtactt

SEQ ID NO: 21849 - DNA, 25 bp, Probe sequence
cttctatcctgctgacttctcattc

SEQ ID NO: 21850 - DNA, 25 bp, Probe sequence
tatgcttctatcctgctgacttctc

SEQ ID NO: 21851 - DNA, 25 bp, Probe sequence
tagtatgcttctatcctgctgactt

SEQ ID NO: 21852 - DNA, 25 bp, Probe sequence
gtatgcttctatcctgctgacttct

SEQ ID NO: 21853 - DNA, 25 bp, Probe sequence
gtagtatgcttctatcctgctgact

SEQ ID NO: 21854 - DNA, 25 bp, Probe sequence
atcaactgatactcacttcgtacac

SEQ ID NO: 21855 - DNA, 25 bp, Probe sequence
caactgatactcacttcgtacacaa

SEQ ID NO: 21856 - DNA, 25 bp, Probe sequence
tccaactgaattagaagacttacaa

SEQ ID NO: 21857 - DNA, 25 bp, Probe sequence
agtatgcttctatcctgctgacttc

SEQ ID NO: 21858 - DNA, 25 bp, Probe sequence
ttgtgaatggaggaagtgtcaatat

SEQ ID NO: 21859 - DNA, 25 bp, Probe sequence
tgtgaatggaggaagtgtcaatata

SEQ ID NO: 21860 - DNA, 25 bp, Probe sequence
cttgtgaatggaggaagtgtcaata

SEQ ID NO: 21861 - DNA, 25 bp, Probe sequence
taactgaaggtgacattattgtgga

SEQ ID NO: 21862 - DNA, 25 bp, Probe sequence
aactgaaggtgacattattgtggat

SEQ ID NO: 21863 - DNA, 25 bp, Probe sequence
actgaaggtgacattattgtggatg

SEQ ID NO: 21864 - DNA, 25 bp, Probe sequence
cgaataacagatagcttagcacttg

SEQ ID NO: 21865 - DNA, 25 bp, Probe sequence
ctgaaggtgacattattgtggatgg

SEQ ID NO: 21866 - DNA, 25 bp, Probe sequence
tgaatggaggaagtgtcaatatatg

SEQ ID NO: 21867 - DNA, 25 bp, Probe sequence
tagtgccgagtacaagtacaattaa

SEQ ID NO: 21868 - DNA, 25 bp, Probe sequence
ttagtgccgagtacaagtacaatta

SEQ ID NO: 21869 - DNA, 25 bp, Probe sequence
agtgccgagtacaagtacaattaat

SEQ ID NO: 21870 - DNA, 25 bp, Probe sequence
ggtggcataccaggttatattatga

SEQ ID NO: 21871 - DNA, 25 bp, Probe sequence
ggcggaagtttgattgaattgatta

SEQ ID NO: 21872 - DNA, 25 bp, Probe sequence
tgtagaatcattgtatggtaaagcg

SEQ ID NO: 21873 - DNA, 25 bp, Probe sequence
gtggcataccaggttatattatgat

SEQ ID NO: 21874 - DNA, 25 bp, Probe sequence
gcggaagtttgattgaattgattat

SEQ ID NO: 21875 - DNA, 25 bp, Probe sequence
tatttagtgccgagtacaagtacaa

SEQ ID NO: 21876 - DNA, 25 bp, Probe sequence
tcagataagttactagcattagcaa

SEQ ID NO: 21877 - DNA, 25 bp, Probe sequence
tgaacaatcagataagttactagca

SEQ ID NO: 21878 - DNA, 25 bp, Probe sequence
atcagataagttactagcattagca

SEQ ID NO: 21879 - DNA, 25 bp, Probe sequence
gaacaatcagataagttactagcat

SEQ ID NO: 21880 - DNA, 25 bp, Probe sequence
aatcagataagttactagcattagc

SEQ ID NO: 21881 - DNA, 25 bp, Probe sequence
atgaacaatcagataagttactagc

SEQ ID NO: 21882 - DNA, 25 bp, Probe sequence
aacaatcagataagttactagcatt

SEQ ID NO: 21883 - DNA, 25 bp, Probe sequence
aacatgaacaatcagataagttact

SEQ ID NO: 21884 - DNA, 25 bp, Probe sequence
cagataagttactagcattagcaaa

SEQ ID NO: 21885 - DNA, 25 bp, Probe sequence
ttgttgctgttcatccattcattac

SEQ ID NO: 21886 - DNA, 25 bp, Probe sequence
attgttgctgttcatccattcatta

SEQ ID NO: 21887 - DNA, 25 bp, Probe sequence
aattgttgctgttcatccattcatt

SEQ ID NO: 21888 - DNA, 25 bp, Probe sequence
gttgctgttcatccattcattacaa

SEQ ID NO: 21889 - DNA, 25 bp, Probe sequence
tgttgctgttcatccattcattaca

SEQ ID NO: 21890 - DNA, 25 bp, Probe sequence
aactaattactgcaacaatagcgac

SEQ ID NO: 21891 - DNA, 25 bp, Probe sequence
caactaattactgcaacaatagcga

SEQ ID NO: 21892 - DNA, 25 bp, Probe sequence
tcatccattcattacaaactccctt

SEQ ID NO: 21893 - DNA, 25 bp, Probe sequence
ttcatccattcattacaaactccct

SEQ ID NO: 21894 - DNA, 25 bp, Probe sequence
attatcttccacaaacttcaacaaa

SEQ ID NO: 21895 - DNA, 25 bp, Probe sequence
aaagcccaaataaattacagcaatt

SEQ ID NO: 21896 - DNA, 25 bp, Probe sequence
aattatcttccacaaacttcaacaa

SEQ ID NO: 21897 - DNA, 25 bp, Probe sequence
aaattatcttccacaaacttcaaca

SEQ ID NO: 21898 - DNA, 25 bp, Probe sequence
acaaaagcccaaataaattacagca

SEQ ID NO: 21899 - DNA, 25 bp, Probe sequence
acaaacttcaacaaaagcccaaata

SEQ ID NO: 21900 - DNA, 25 bp, Probe sequence
caaaagcccaaataaattacagcaa

SEQ ID NO: 21901 - DNA, 25 bp, Probe sequence
aacaaaagcccaaataaattacagc

SEQ ID NO: 21902 - DNA, 25 bp, Probe sequence
caaacttcaacaaaagcccaaataa

SEQ ID NO: 21903 - DNA, 25 bp, Probe sequence
taatggtatcggtattagtgaagcg

SEQ ID NO: 21904 - DNA, 25 bp, Probe sequence
aaccttgtcatcacgaagtattaac

SEQ ID NO: 21905 - DNA, 25 bp, Probe sequence
gaaccttgtcatcacgaagtattaa

SEQ ID NO: 21906 - DNA, 25 bp, Probe sequence
aatcgtgttcgtcaagaggttattc

SEQ ID NO: 21907 - DNA, 25 bp, Probe sequence
ccttgtcatcacgaagtattaactg

SEQ ID NO: 21908 - DNA, 25 bp, Probe sequence
accttgtcatcacgaagtattaact

SEQ ID NO: 21909 - DNA, 25 bp, Probe sequence
tgaaccttgtcatcacgaagtatta

SEQ ID NO: 21910 - DNA, 25 bp, Probe sequence
cttgtcatcacgaagtattaactga

SEQ ID NO: 21911 - DNA, 25 bp, Probe sequence
ataatggtatcggtattagtgaagc

SEQ ID NO: 21912 - DNA, 25 bp, Probe sequence
cacattacacacaatcagctattca

SEQ ID NO: 21913 - DNA, 25 bp, Probe sequence
tcacattacacacaatcagctattc

SEQ ID NO: 21914 - DNA, 25 bp, Probe sequence
acacacaatcagctattcattacaa

SEQ ID NO: 21915 - DNA, 25 bp, Probe sequence
ttcacattacacacaatcagctatt

SEQ ID NO: 21916 - DNA, 25 bp, Probe sequence
acattacacacaatcagctattcat

SEQ ID NO: 21917 - DNA, 25 bp, Probe sequence
aagaaatggattatcaaacgagacg

SEQ ID NO: 21918 - DNA, 25 bp, Probe sequence
cagtgggaaatgattaagtttgcta

SEQ ID NO: 21919 - DNA, 25 bp, Probe sequence
tagaacaaattgaacaagatggtgc

SEQ ID NO: 21920 - DNA, 25 bp, Probe sequence
tacacacaatcagctattcattaca

SEQ ID NO: 21921 - DNA, 25 bp, Probe sequence
gcattattgagacgaacttatgact

SEQ ID NO: 21922 - DNA, 25 bp, Probe sequence
agcattattgagacgaacttatgac

SEQ ID NO: 21923 - DNA, 25 bp, Probe sequence
ttaacttgtcattaacgattgccaa

SEQ ID NO: 21924 - DNA, 25 bp, Probe sequence
aagcattattgagacgaacttatga

SEQ ID NO: 21925 - DNA, 25 bp, Probe sequence
ttattgagacgaacttatgacttgt

SEQ ID NO: 21926 - DNA, 25 bp, Probe sequence
caagcattattgagacgaacttatg

SEQ ID NO: 21927 - DNA, 25 bp, Probe sequence
tattgagacgaacttatgacttgtc

SEQ ID NO: 21928 - DNA, 25 bp, Probe sequence
attattgagacgaacttatgacttg

SEQ ID NO: 21929 - DNA, 25 bp, Probe sequence
agacgaacttatgacttgtcagtag

SEQ ID NO: 21930 - DNA, 25 bp, Probe sequence
tcccattatttaagacatctggcaa

SEQ ID NO: 21931 - DNA, 25 bp, Probe sequence
ttcccattatttaagacatctggca

SEQ ID NO: 21932 - DNA, 25 bp, Probe sequence
cccattatttaagacatctggcaat

SEQ ID NO: 21933 - DNA, 25 bp, Probe sequence
tttcccattatttaagacatctggc

SEQ ID NO: 21934 - DNA, 25 bp, Probe sequence
gacatctggcaataagaatttaact

SEQ ID NO: 21935 - DNA, 25 bp, Probe sequence
agacatctggcaataagaatttaac

SEQ ID NO: 21936 - DNA, 25 bp, Probe sequence
agtttcccattatttaagacatctg

SEQ ID NO: 21937 - DNA, 25 bp, Probe sequence
aagacatctggcaataagaatttaa

SEQ ID NO: 21938 - DNA, 25 bp, Probe sequence
ttaagacatctggcaataagaattt

SEQ ID NO: 21939 - DNA, 25 bp, Probe sequence
aaatgacacggaaagttcaaatcaa

SEQ ID NO: 21940 - DNA, 25 bp, Probe sequence
tacaaatgacacggaaagttcaaat

SEQ ID NO: 21941 - DNA, 25 bp, Probe sequence
atacaaatgacacggaaagttcaaa

SEQ ID NO: 21942 - DNA, 25 bp, Probe sequence
aatacaaatgacacggaaagttcaa

SEQ ID NO: 21943 - DNA, 25 bp, Probe sequence
aaatacaaatgacacggaaagttca

SEQ ID NO: 21944 - DNA, 25 bp, Probe sequence
aatgacacggaaagttcaaatcaag

SEQ ID NO: 21945 - DNA, 25 bp, Probe sequence
aaagttcaaatcaagagccgtcatt

SEQ ID NO: 21946 - DNA, 25 bp, Probe sequence
caaatgacacggaaagttcaaatca

SEQ ID NO: 21947 - DNA, 25 bp, Probe sequence
acaaatgacacggaaagttcaaatc

SEQ ID NO: 21948 - DNA, 25 bp, Probe sequence
ggtagtggttctaaatcttacatcc

SEQ ID NO: 21949 - DNA, 25 bp, Probe sequence
atcttacatccaaccattgaaagtt

SEQ ID NO: 21950 - DNA, 25 bp, Probe sequence
aatcttacatccaaccattgaaagt

SEQ ID NO: 21951 - DNA, 25 bp, Probe sequence
aggtagtggttctaaatcttacatc

SEQ ID NO: 21952 - DNA, 25 bp, Probe sequence
aaatcttacatccaaccattgaaag

SEQ ID NO: 21953 - DNA, 25 bp, Probe sequence
tctaaatcttacatccaaccattga

SEQ ID NO: 21954 - DNA, 25 bp, Probe sequence
agtggttctaaatcttacatccaac

SEQ ID NO: 21955 - DNA, 25 bp, Probe sequence
gttctaaatcttacatccaaccatt

SEQ ID NO: 21956 - DNA, 25 bp, Probe sequence
ctaggtagtggttctaaatcttaca

SEQ ID NO: 21957 - DNA, 25 bp, Probe sequence
taactgagtcaatcaacactggtaa

SEQ ID NO: 21958 - DNA, 25 bp, Probe sequence
gtaactgagtcaatcaacactggta

SEQ ID NO: 21959 - DNA, 25 bp, Probe sequence
atgtaactgagtcaatcaacactgg

SEQ ID NO: 21960 - DNA, 25 bp, Probe sequence
tatgtaactgagtcaatcaacactg

SEQ ID NO: 21961 - DNA, 25 bp, Probe sequence
actatgtaactgagtcaatcaacac

SEQ ID NO: 21962 - DNA, 25 bp, Probe sequence
ggtagtggctatggttcatacatta

SEQ ID NO: 21963 - DNA, 25 bp, Probe sequence
ctatgtaactgagtcaatcaacact

SEQ ID NO: 21964 - DNA, 25 bp, Probe sequence
ctatcggtagtggctatggttcata

SEQ ID NO: 21965 - DNA, 25 bp, Probe sequence
aactatgtaactgagtcaatcaaca

SEQ ID NO: 21966 - DNA, 25 bp, Probe sequence
ttgattcagcagatgttagtcagaa

SEQ ID NO: 21967 - DNA, 25 bp, Probe sequence
attgattcagcagatgttagtcaga

SEQ ID NO: 21968 - DNA, 25 bp, Probe sequence
aattgattcagcagatgttagtcag

SEQ ID NO: 21969 - DNA, 25 bp, Probe sequence
gcagtggctcattcaactactctaa

SEQ ID NO: 21970 - DNA, 25 bp, Probe sequence
gttacaccgaatggtcaagtatctg

SEQ ID NO: 21971 - DNA, 25 bp, Probe sequence
cagcagatgttagtcagaaattagg

SEQ ID NO: 21972 - DNA, 25 bp, Probe sequence
gcagatgttagtcagaaattaggct

SEQ ID NO: 21973 - DNA, 25 bp, Probe sequence
agcagatgttagtcagaaattaggc

SEQ ID NO: 21974 - DNA, 25 bp, Probe sequence
gattcagcagatgttagtcagaaat

SEQ ID NO: 21975 - DNA, 25 bp, Probe sequence
attggtatgatgtgatggaagcatt

SEQ ID NO: 21976 - DNA, 25 bp, Probe sequence
gattggtatgatgtgatggaagcat

SEQ ID NO: 21977 - DNA, 25 bp, Probe sequence
tatatcaacaagtcggttcggattg

SEQ ID NO: 21978 - DNA, 25 bp, Probe sequence
ttggtatgatgtgatggaagcattg

SEQ ID NO: 21979 - DNA, 25 bp, Probe sequence
atatatcaacaagtcggttcggatt

SEQ ID NO: 21980 - DNA, 25 bp, Probe sequence
tatatatcaacaagtcggttcggat

SEQ ID NO: 21981 - DNA, 25 bp, Probe sequence
caactcattgctgaattgaacaagg

SEQ ID NO: 21982 - DNA, 25 bp, Probe sequence
ttcggattggtatgatgtgatggaa

SEQ ID NO: 21983 - DNA, 25 bp, Probe sequence
tcggattggtatgatgtgatggaag

SEQ ID NO: 21984 - DNA, 25 bp, Probe sequence
cgaaccatagtagatacacaaataa

SEQ ID NO: 21985 - DNA, 25 bp, Probe sequence
atcgaaccatagtagatacacaaat

SEQ ID NO: 21986 - DNA, 25 bp, Probe sequence
tcgaaccatagtagatacacaaata

SEQ ID NO: 21987 - DNA, 25 bp, Probe sequence
tatcgaaccatagtagatacacaaa

SEQ ID NO: 21988 - DNA, 25 bp, Probe sequence
agtatcgaaccatagtagatacaca

SEQ ID NO: 21989 - DNA, 25 bp, Probe sequence
gtatcgaaccatagtagatacacaa

SEQ ID NO: 21990 - DNA, 25 bp, Probe sequence
gaataaagtatcgaaccatagtaga

SEQ ID NO: 21991 - DNA, 25 bp, Probe sequence
agaataaagtatcgaaccatagtag

SEQ ID NO: 21992 - DNA, 25 bp, Probe sequence
aagtatcgaaccatagtagatacac

SEQ ID NO: 21993 - DNA, 25 bp, Probe sequence
gattaagcgtgctataacatggatg

SEQ ID NO: 21994 - DNA, 25 bp, Probe sequence
tgctataacatggatggtgaatgat

SEQ ID NO: 21995 - DNA, 25 bp, Probe sequence
gctataacatggatggtgaatgatt

SEQ ID NO: 21996 - DNA, 25 bp, Probe sequence
gtgctataacatggatggtgaatga

SEQ ID NO: 21997 - DNA, 25 bp, Probe sequence
attaagcgtgctataacatggatgg

SEQ ID NO: 21998 - DNA, 25 bp, Probe sequence
cgattaagcgtgctataacatggat

SEQ ID NO: 21999 - DNA, 25 bp, Probe sequence
aaggaactgaacatgatccgtatta

SEQ ID NO: 22000 - DNA, 25 bp, Probe sequence
gaaaggtatgcgaatgaacacaaat

SEQ ID NO: 22001 - DNA, 25 bp, Probe sequence
atagaaaggtatgcgaatgaacaca

SEQ ID NO: 22002 - DNA, 25 bp, Probe sequence
gtggatttaacccttcatttatcgc

SEQ ID NO: 22003 - DNA, 25 bp, Probe sequence
agtggatttaacccttcatttatcg

SEQ ID NO: 22004 - DNA, 25 bp, Probe sequence
acaaagtggatttaacccttcattt

SEQ ID NO: 22005 - DNA, 25 bp, Probe sequence
cctagagattatttcgttccagaca

SEQ ID NO: 22006 - DNA, 25 bp, Probe sequence
tcctagagattatttcgttccagac

SEQ ID NO: 22007 - DNA, 25 bp, Probe sequence
cctcttgccaatccgttattagaaa

SEQ ID NO: 22008 - DNA, 25 bp, Probe sequence
tacaaagtggatttaacccttcatt

SEQ ID NO: 22009 - DNA, 25 bp, Probe sequence
ctagagattatttcgttccagacag

SEQ ID NO: 22010 - DNA, 25 bp, Probe sequence
atcctagagattatttcgttccaga

SEQ ID NO: 22011 - DNA, 25 bp, Probe sequence
cggatagcgattcagattcagatag

SEQ ID NO: 22012 - DNA, 25 bp, Probe sequence
ggatagcgattcagattcagatagc

SEQ ID NO: 22013 - DNA, 25 bp, Probe sequence
gaatcagatagcgactcagaatcag

SEQ ID NO: 22014 - DNA, 25 bp, Probe sequence
cagaatcagatagcgactcagaatc

SEQ ID NO: 22015 - DNA, 25 bp, Probe sequence
tcagaatcagatagcgactcagaat

SEQ ID NO: 22016 - DNA, 25 bp, Probe sequence
atcagatagcgactcagaatcagat

SEQ ID NO: 22017 - DNA, 25 bp, Probe sequence
aatcagatagcgactcagaatcaga

SEQ ID NO: 22018 - DNA, 25 bp, Probe sequence
agaatcagatagcgactcagaatca

SEQ ID NO: 22019 - DNA, 25 bp, Probe sequence
ctcagatagcgattcagactcagat

SEQ ID NO: 22020 - DNA, 25 bp, Probe sequence
attcagatagtgactccgattcaag

SEQ ID NO: 22021 - DNA, 25 bp, Probe sequence
gattcagatagtgactccgattcaa

SEQ ID NO: 22022 - DNA, 25 bp, Probe sequence
ttcagatagtgactccgattcaaga

SEQ ID NO: 22023 - DNA, 25 bp, Probe sequence
ttcagatagtgagtcagattcagat

SEQ ID NO: 22024 - DNA, 25 bp, Probe sequence
atagtgagtcagattcagatagtga

SEQ ID NO: 22025 - DNA, 25 bp, Probe sequence
ctcagactcagatagcgattcagac

SEQ ID NO: 22026 - DNA, 25 bp, Probe sequence
gatagtgagtcagattcagatagtg

SEQ ID NO: 22027 - DNA, 25 bp, Probe sequence
tcagatagtgagtcagattcagata

SEQ ID NO: 22028 - DNA, 25 bp, Probe sequence
cagactcagacagcgattcagatag

SEQ ID NO: 22029 - DNA, 25 bp, Probe sequence
cgtatgttgtattagtggaaggtca

SEQ ID NO: 22030 - DNA, 25 bp, Probe sequence
ggattcagatagcgattcagattca

SEQ ID NO: 22031 - DNA, 25 bp, Probe sequence
cagatagtgactcagattcagacag

SEQ ID NO: 22032 - DNA, 25 bp, Probe sequence
ctcagatagtgactcagattcagac

SEQ ID NO: 22033 - DNA, 25 bp, Probe sequence
aactcagatagtgactcagattcag

SEQ ID NO: 22034 - DNA, 25 bp, Probe sequence
tcagatagtgactcagattcagaca

SEQ ID NO: 22035 - DNA, 25 bp, Probe sequence
tggaaggtcactatgataatactgg

SEQ ID NO: 22036 - DNA, 25 bp, Probe sequence
cagatagcgattcggattcagatag

SEQ ID NO: 22037 - DNA, 25 bp, Probe sequence
ggaaggtcactatgataatactggt

SEQ ID NO: 22038 - DNA, 25 bp, Probe sequence
ttacagaacaacattaagtcgcaac

SEQ ID NO: 22039 - DNA, 25 bp, Probe sequence
aagttacagaacaacattaagtcgc

SEQ ID NO: 22040 - DNA, 25 bp, Probe sequence
gttacagaacaacattaagtcgcaa

SEQ ID NO: 22041 - DNA, 25 bp, Probe sequence
tacagaacaacattaagtcgcaaca

SEQ ID NO: 22042 - DNA, 25 bp, Probe sequence
agttacagaacaacattaagtcgca

SEQ ID NO: 22043 - DNA, 25 bp, Probe sequence
ttaagcgtactatcacacagacaag

SEQ ID NO: 22044 - DNA, 25 bp, Probe sequence
agaacaacattaagtcgcaacacaa

SEQ ID NO: 22045 - DNA, 25 bp, Probe sequence
taagcgtactatcacacagacaaga

SEQ ID NO: 22046 - DNA, 25 bp, Probe sequence
aagcgtactatcacacagacaagat

SEQ ID NO: 22047 - DNA, 25 bp, Probe sequence
tcttggattgcctagagaattgatg

SEQ ID NO: 22048 - DNA, 25 bp, Probe sequence
cttggattgcctagagaattgatgg

SEQ ID NO: 22049 - DNA, 25 bp, Probe sequence
atgagcagcaacacatgaactataa

SEQ ID NO: 22050 - DNA, 25 bp, Probe sequence
aatgagcagcaacacatgaactata

SEQ ID NO: 22051 - DNA, 25 bp, Probe sequence
taatgagcagcaacacatgaactat

SEQ ID NO: 22052 - DNA, 25 bp, Probe sequence
ataatgagcagcaacacatgaacta

SEQ ID NO: 22053 - DNA, 25 bp, Probe sequence
agcagcaacacatgaactataacat

SEQ ID NO: 22054 - DNA, 25 bp, Probe sequence
atgataatgagcagcaacacatgaa

SEQ ID NO: 22055 - DNA, 25 bp, Probe sequence
aatgataatgagcagcaacacatga

SEQ ID NO: 22056 - DNA, 25 bp, Probe sequence
tgcctattctataatctcttcacct

SEQ ID NO: 22057 - DNA, 25 bp, Probe sequence
tctataatctcttcacctagcactt

SEQ ID NO: 22058 - DNA, 25 bp, Probe sequence
ttctataatctcttcacctagcact

SEQ ID NO: 22059 - DNA, 25 bp, Probe sequence
caactgacattgctcgtattctgaa

SEQ ID NO: 22060 - DNA, 25 bp, Probe sequence
ttcggtattgatagtgcctattcta

SEQ ID NO: 22061 - DNA, 25 bp, Probe sequence
aacaatatcatattcctgtcatcgc

SEQ ID NO: 22062 - DNA, 25 bp, Probe sequence
aatgatggtggtacaggtatgctaa

SEQ ID NO: 22063 - DNA, 25 bp, Probe sequence
gcacagcaagttggcaatattataa

SEQ ID NO: 22064 - DNA, 25 bp, Probe sequence
tcggtattgatagtgcctattctat

SEQ ID NO: 22065 - DNA, 25 bp, Probe sequence
gaaggtgttgaagcggttatagata

SEQ ID NO: 22066 - DNA, 25 bp, Probe sequence
aaggtgttgaagcggttatagataa

SEQ ID NO: 22067 - DNA, 25 bp, Probe sequence
tatgaaggtgttgaagcggttatag

SEQ ID NO: 22068 - DNA, 25 bp, Probe sequence
ctatgaaggtgttgaagcggttata

SEQ ID NO: 22069 - DNA, 25 bp, Probe sequence
cgtcaccactacctcaatctatact

SEQ ID NO: 22070 - DNA, 25 bp, Probe sequence
gtcaccactacctcaatctatacta

SEQ ID NO: 22071 - DNA, 25 bp, Probe sequence
cgatgatattgatgtagcaacactg

SEQ ID NO: 22072 - DNA, 25 bp, Probe sequence
gcagataccttaatgattcttacga

SEQ ID NO: 22073 - DNA, 25 bp, Probe sequence
agcagataccttaatgattcttacg

SEQ ID NO: 22074 - DNA, 25 bp, Probe sequence
aatataatcaaccattcacaagccg

SEQ ID NO: 22075 - DNA, 25 bp, Probe sequence
atacaaccgttcaaccacttagatt

SEQ ID NO: 22076 - DNA, 25 bp, Probe sequence
aatacaaccgttcaaccacttagat

SEQ ID NO: 22077 - DNA, 25 bp, Probe sequence
caaacataaagacaccgattcaact

SEQ ID NO: 22078 - DNA, 25 bp, Probe sequence
tcaaacataaagacaccgattcaac

SEQ ID NO: 22079 - DNA, 25 bp, Probe sequence
caaccgttcaaccacttagatttaa

SEQ ID NO: 22080 - DNA, 25 bp, Probe sequence
acaaccgttcaaccacttagattta

SEQ ID NO: 22081 - DNA, 25 bp, Probe sequence
tacaaccgttcaaccacttagattt

SEQ ID NO: 22082 - DNA, 25 bp, Probe sequence
aaatacaaccgttcaaccacttaga

SEQ ID NO: 22083 - DNA, 25 bp, Probe sequence
ttccttgttcactaatggctcatat

SEQ ID NO: 22084 - DNA, 25 bp, Probe sequence
ccttgttcactaatggctcatatac

SEQ ID NO: 22085 - DNA, 25 bp, Probe sequence
tccttgttcactaatggctcatata

SEQ ID NO: 22086 - DNA, 25 bp, Probe sequence
gttccttgttcactaatggctcata

SEQ ID NO: 22087 - DNA, 25 bp, Probe sequence
cttgttcactaatggctcatatact

SEQ ID NO: 22088 - DNA, 25 bp, Probe sequence
ttgttcactaatggctcatatactt

SEQ ID NO: 22089 - DNA, 25 bp, Probe sequence
agttccttgttcactaatggctcat

SEQ ID NO: 22090 - DNA, 25 bp, Probe sequence
aagttccttgttcactaatggctca

SEQ ID NO: 22091 - DNA, 25 bp, Probe sequence
aaagttccttgttcactaatggctc

SEQ ID NO: 22092 - DNA, 25 bp, Probe sequence
ctgtcgtgattattagttcattcgg

SEQ ID NO: 22093 - DNA, 25 bp, Probe sequence
gctgtcgtgattattagttcattcg

SEQ ID NO: 22094 - DNA, 25 bp, Probe sequence
cgctgtcgtgattattagttcattc

SEQ ID NO: 22095 - DNA, 25 bp, Probe sequence
atcgctgtcgtgattattagttcat

SEQ ID NO: 22096 - DNA, 25 bp, Probe sequence
tcgctgtcgtgattattagttcatt

SEQ ID NO: 22097 - DNA, 25 bp, Probe sequence
gtgattattagttcattcggcgttg

SEQ ID NO: 22098 - DNA, 25 bp, Probe sequence
atcaacaagtgactggttcaacatt

SEQ ID NO: 22099 - DNA, 25 bp, Probe sequence
gattattagttcattcggcgttgct

SEQ ID NO: 22100 - DNA, 25 bp, Probe sequence
tgtcgtgattattagttcattcggc

SEQ ID NO: 22101 - DNA, 25 bp, Probe sequence
ttgtcatcattggtgttattgtcag

SEQ ID NO: 22102 - DNA, 25 bp, Probe sequence
gtcatcattggtgttattgtcagtg

SEQ ID NO: 22103 - DNA, 25 bp, Probe sequence
catcattggtgttattgtcagtgtg

SEQ ID NO: 22104 - DNA, 25 bp, Probe sequence
tcatcattggtgttattgtcagtgt

SEQ ID NO: 22105 - DNA, 25 bp, Probe sequence
tgtcatcattggtgttattgtcagt

SEQ ID NO: 22106 - DNA, 25 bp, Probe sequence
attgtcatcattggtgttattgtca

SEQ ID NO: 22107 - DNA, 25 bp, Probe sequence
atcattggtgttattgtcagtgtgt

SEQ ID NO: 22108 - DNA, 25 bp, Probe sequence
tatatgccagaacatccaatatcgt

SEQ ID NO: 22109 - DNA, 25 bp, Probe sequence
tcattggtgttattgtcagtgtgtt

SEQ ID NO: 22110 - DNA, 25 bp, Probe sequence
gccttacttaacaatgatagcgata

SEQ ID NO: 22111 - DNA, 25 bp, Probe sequence
agcgataaagttagtaatgacccta

SEQ ID NO: 22112 - DNA, 25 bp, Probe sequence
tagcgataaagttagtaatgaccct

SEQ ID NO: 22113 - DNA, 25 bp, Probe sequence
catcgtatagacaacaatatgctaa

SEQ ID NO: 22114 - DNA, 25 bp, Probe sequence
ccttacttaacaatgatagcgataa

SEQ ID NO: 22115 - DNA, 25 bp, Probe sequence
atagcgataaagttagtaatgaccc

SEQ ID NO: 22116 - DNA, 25 bp, Probe sequence
aacaaattgacagaggcaaataatg

SEQ ID NO: 22117 - DNA, 25 bp, Probe sequence
caacaaattgacagaggcaaataat

SEQ ID NO: 22118 - DNA, 25 bp, Probe sequence
gacgcatcgtatagacaacaatatg

SEQ ID NO: 22119 - DNA, 25 bp, Probe sequence
gccacggttataggacttatatcag

SEQ ID NO: 22120 - DNA, 25 bp, Probe sequence
tgccacggttataggacttatatca

SEQ ID NO: 22121 - DNA, 25 bp, Probe sequence
gtgccacggttataggacttatatc

SEQ ID NO: 22122 - DNA, 25 bp, Probe sequence
ccacggttataggacttatatcagt

SEQ ID NO: 22123 - DNA, 25 bp, Probe sequence
tagtgccacggttataggacttata

SEQ ID NO: 22124 - DNA, 25 bp, Probe sequence
ggtgcgttcaatataatgtctgata

SEQ ID NO: 22125 - DNA, 25 bp, Probe sequence
agtgccacggttataggacttatat

SEQ ID NO: 22126 - DNA, 25 bp, Probe sequence
cggtgcgttcaatataatgtctgat

SEQ ID NO: 22127 - DNA, 25 bp, Probe sequence
ttattgtcgcctcgttactactctg

SEQ ID NO: 22128 - DNA, 25 bp, Probe sequence
cagccattctattagtcagtctaca

SEQ ID NO: 22129 - DNA, 25 bp, Probe sequence
acagccattctattagtcagtctac

SEQ ID NO: 22130 - DNA, 25 bp, Probe sequence
ggtcttactcatcgcattcttctta

SEQ ID NO: 22131 - DNA, 25 bp, Probe sequence
agccattctattagtcagtctacaa

SEQ ID NO: 22132 - DNA, 25 bp, Probe sequence
ttacagccattctattagtcagtct

SEQ ID NO: 22133 - DNA, 25 bp, Probe sequence
gtcttactcatcgcattcttcttaa

SEQ ID NO: 22134 - DNA, 25 bp, Probe sequence
ttaatcattgtcagtcaagtcgttg

SEQ ID NO: 22135 - DNA, 25 bp, Probe sequence
cattacagccattctattagtcagt

SEQ ID NO: 22136 - DNA, 25 bp, Probe sequence
tacagccattctattagtcagtcta

SEQ ID NO: 22137 - DNA, 25 bp, Probe sequence
aggtgctatgttaggtgttaatgta

SEQ ID NO: 22138 - DNA, 25 bp, Probe sequence
caggtgctatgttaggtgttaatgt

SEQ ID NO: 22139 - DNA, 25 bp, Probe sequence
aagaatctgtagaggatactgcgaa

SEQ ID NO: 22140 - DNA, 25 bp, Probe sequence
catacaattaaggcagtaatggcag

SEQ ID NO: 22141 - DNA, 25 bp, Probe sequence
ggtgctatgttaggtgttaatgtaa

SEQ ID NO: 22142 - DNA, 25 bp, Probe sequence
gattaacagacgattggcatcctac

SEQ ID NO: 22143 - DNA, 25 bp, Probe sequence
aatggattaacagacgattggcatc

SEQ ID NO: 22144 - DNA, 25 bp, Probe sequence
gaatggattaacagacgattggcat

SEQ ID NO: 22145 - DNA, 25 bp, Probe sequence
gtggaatggattaacagacgattgg

SEQ ID NO: 22146 - DNA, 25 bp, Probe sequence
gtaccatgatattcactccttgtac

SEQ ID NO: 22147 - DNA, 25 bp, Probe sequence
taccatgatattcactccttgtaca

SEQ ID NO: 22148 - DNA, 25 bp, Probe sequence
aaataatatgtttggaagcgttatg

SEQ ID NO: 22149 - DNA, 25 bp, Probe sequence
ttaaatggtttgaattttgcggttg

SEQ ID NO: 22150 - DNA, 25 bp, Probe sequence
cttaaatggtttgaattttgcggtt

SEQ ID NO: 22151 - DNA, 25 bp, Probe sequence
tcttaaatggtttgaattttgcggt

SEQ ID NO: 22152 - DNA, 25 bp, Probe sequence
ttcttaaatggtttgaattttgcgg

SEQ ID NO: 22153 - DNA, 25 bp, Probe sequence
gttcttaaatggtttgaattttgcg

SEQ ID NO: 22154 - DNA, 25 bp, Probe sequence
ggtaccatgatattcactccttgta

SEQ ID NO: 22155 - DNA, 25 bp, Probe sequence
tcaataggacacggtataacaatca

SEQ ID NO: 22156 - DNA, 25 bp, Probe sequence
taggacacggtataacaatcaatcg

SEQ ID NO: 22157 - DNA, 25 bp, Probe sequence
ctcaataggacacggtataacaatc

SEQ ID NO: 22158 - DNA, 25 bp, Probe sequence
caataggacacggtataacaatcaa

SEQ ID NO: 22159 - DNA, 25 bp, Probe sequence
gacacggtataacaatcaatcggat

SEQ ID NO: 22160 - DNA, 25 bp, Probe sequence
acacggtataacaatcaatcggatg

SEQ ID NO: 22161 - DNA, 25 bp, Probe sequence
ataggacacggtataacaatcaatc

SEQ ID NO: 22162 - DNA, 25 bp, Probe sequence
aataggacacggtataacaatcaat

SEQ ID NO: 22163 - DNA, 25 bp, Probe sequence
tactagagatccacaagcctcaata

SEQ ID NO: 22164 - DNA, 25 bp, Probe sequence
atacaatcctaatatcgtagacggc

SEQ ID NO: 22165 - DNA, 25 bp, Probe sequence
tacaatcctaatatcgtagacggca

SEQ ID NO: 22166 - DNA, 25 bp, Probe sequence
ctaatatcgtagacggcactggtaa

SEQ ID NO: 22167 - DNA, 25 bp, Probe sequence
gttggacatcacttattcattaagc

SEQ ID NO: 22168 - DNA, 25 bp, Probe sequence
aatcctaatatcgtagacggcactg

SEQ ID NO: 22169 - DNA, 25 bp, Probe sequence
caatcctaatatcgtagacggcact

SEQ ID NO: 22170 - DNA, 25 bp, Probe sequence
aatacaatcctaatatcgtagacgg

SEQ ID NO: 22171 - DNA, 25 bp, Probe sequence
acaatcctaatatcgtagacggcac

SEQ ID NO: 22172 - DNA, 25 bp, Probe sequence
catcattccaaatcgcaaacaaatt

SEQ ID NO: 22173 - DNA, 25 bp, Probe sequence
ttgaacttataggtgtaactgctgg

SEQ ID NO: 22174 - DNA, 25 bp, Probe sequence
gcattacttatagcagccttgttaa

SEQ ID NO: 22175 - DNA, 25 bp, Probe sequence
attgaacttataggtgtaactgctg

SEQ ID NO: 22176 - DNA, 25 bp, Probe sequence
agagagttgaataacagacacatcc

SEQ ID NO: 22177 - DNA, 25 bp, Probe sequence
gagagttgaataacagacacatcca

SEQ ID NO: 22178 - DNA, 25 bp, Probe sequence
gcatagagagttgaataacagacac

SEQ ID NO: 22179 - DNA, 25 bp, Probe sequence
gcttcaacttattaggtgccagatt

SEQ ID NO: 22180 - DNA, 25 bp, Probe sequence
agagttgaataacagacacatccaa

SEQ ID NO: 22181 - DNA, 25 bp, Probe sequence
cttcaacttattaggtgccagatta

SEQ ID NO: 22182 - DNA, 25 bp, Probe sequence
caaacagaacaagagatgagagaaa

SEQ ID NO: 22183 - DNA, 25 bp, Probe sequence
tcaaacagaacaagagatgagagaa

SEQ ID NO: 22184 - DNA, 25 bp, Probe sequence
atcaaacagaacaagagatgagaga

SEQ ID NO: 22185 - DNA, 25 bp, Probe sequence
atattaggtacggtgagtggaaatg

SEQ ID NO: 22186 - DNA, 25 bp, Probe sequence
tggtgtaagatatagtgcaacaaca

SEQ ID NO: 22187 - DNA, 25 bp, Probe sequence
ggtgtaagatatagtgcaacaacaa

SEQ ID NO: 22188 - DNA, 25 bp, Probe sequence
ttggtgtaagatatagtgcaacaac

SEQ ID NO: 22189 - DNA, 25 bp, Probe sequence
aatcaaacagaacaagagatgagag

SEQ ID NO: 22190 - DNA, 25 bp, Probe sequence
tattaggtacggtgagtggaaatga

SEQ ID NO: 22191 - DNA, 25 bp, Probe sequence
tgctgtgattattagttcggttatc

SEQ ID NO: 22192 - DNA, 25 bp, Probe sequence
aattattggattcgttgtcgttaga

SEQ ID NO: 22193 - DNA, 25 bp, Probe sequence
ttgctgtgattattagttcggttat

SEQ ID NO: 22194 - DNA, 25 bp, Probe sequence
attattggattcgttgtcgttagaa

SEQ ID NO: 22195 - DNA, 25 bp, Probe sequence
aaggtatgacttatcaatctgccaa

SEQ ID NO: 22196 - DNA, 25 bp, Probe sequence
cttcaagatgttatggcttagactt

SEQ ID NO: 22197 - DNA, 25 bp, Probe sequence
tcttcaagatgttatggcttagact

SEQ ID NO: 22198 - DNA, 25 bp, Probe sequence
agttgtaatcgcaggtctaatccat

SEQ ID NO: 22199 - DNA, 25 bp, Probe sequence
gcaattattggattcgttgtcgtta

SEQ ID NO: 22200 - DNA, 25 bp, Probe sequence
attctcggtagcaataattggtctt

SEQ ID NO: 22201 - DNA, 25 bp, Probe sequence
tctcattctcggtagcaataattgg

SEQ ID NO: 22202 - DNA, 25 bp, Probe sequence
cattctcggtagcaataattggtct

SEQ ID NO: 22203 - DNA, 25 bp, Probe sequence
tcattctcggtagcaataattggtc

SEQ ID NO: 22204 - DNA, 25 bp, Probe sequence
ctcattctcggtagcaataattggt

SEQ ID NO: 22205 - DNA, 25 bp, Probe sequence
atctcattctcggtagcaataattg

SEQ ID NO: 22206 - DNA, 25 bp, Probe sequence
tatctcattctcggtagcaataatt

SEQ ID NO: 22207 - DNA, 25 bp, Probe sequence
atatctcattctcggtagcaataat

SEQ ID NO: 22208 - DNA, 25 bp, Probe sequence
ttctcggtagcaataattggtcttt

SEQ ID NO: 22209 - DNA, 25 bp, Probe sequence
atctcattctcggtagcaataactg

SEQ ID NO: 22210 - DNA, 25 bp, Probe sequence
tatctcattctcggtagcaataact

SEQ ID NO: 22211 - DNA, 25 bp, Probe sequence
atgatgctattggctacgaattaca

SEQ ID NO: 22212 - DNA, 25 bp, Probe sequence
acctagtgatattacaagcgaagac

SEQ ID NO: 22213 - DNA, 25 bp, Probe sequence
gttgcgtctatgctcaatcaatata

SEQ ID NO: 22214 - DNA, 25 bp, Probe sequence
ctattggctacgaattacaaggttc

SEQ ID NO: 22215 - DNA, 25 bp, Probe sequence
gatgctattggctacgaattacaag

SEQ ID NO: 22216 - DNA, 25 bp, Probe sequence
agttgcgtctatgctcaatcaatat

SEQ ID NO: 22217 - DNA, 25 bp, Probe sequence
tgatattacaagcgaagactccgta

SEQ ID NO: 22218 - DNA, 25 bp, Probe sequence
caagttagaagtagagtcggtgatt

SEQ ID NO: 22219 - DNA, 25 bp, Probe sequence
atataacaacaacacaagtcagcac

SEQ ID NO: 22220 - DNA, 25 bp, Probe sequence
gatataacaacaacacaagtcagca

SEQ ID NO: 22221 - DNA, 25 bp, Probe sequence
agatataacaacaacacaagtcagc

SEQ ID NO: 22222 - DNA, 25 bp, Probe sequence
gtcacacaagttagaagtagagtcg

SEQ ID NO: 22223 - DNA, 25 bp, Probe sequence
cgtcacacaagttagaagtagagtc

SEQ ID NO: 22224 - DNA, 25 bp, Probe sequence
ttcgtcacacaagttagaagtagag

SEQ ID NO: 22225 - DNA, 25 bp, Probe sequence
acaagttagaagtagagtcggtgat

SEQ ID NO: 22226 - DNA, 25 bp, Probe sequence
tataacaacaacacaagtcagcaca

SEQ ID NO: 22227 - DNA, 25 bp, Probe sequence
atcacttctatgcctcaatcaatgt

SEQ ID NO: 22228 - DNA, 25 bp, Probe sequence
ggaaccattgcctataactacattg

SEQ ID NO: 22229 - DNA, 25 bp, Probe sequence
tcacttctatgcctcaatcaatgtt

SEQ ID NO: 22230 - DNA, 25 bp, Probe sequence
acttctatgcctcaatcaatgttac

SEQ ID NO: 22231 - DNA, 25 bp, Probe sequence
cacttctatgcctcaatcaatgtta

SEQ ID NO: 22232 - DNA, 25 bp, Probe sequence
tctatgcctcaatcaatgttacaac

SEQ ID NO: 22233 - DNA, 25 bp, Probe sequence
gaaccattgcctataactacattga

SEQ ID NO: 22234 - DNA, 25 bp, Probe sequence
tggaaccattgcctataactacatt

SEQ ID NO: 22235 - DNA, 25 bp, Probe sequence
ttggaaccattgcctataactacat

SEQ ID NO: 22236 - DNA, 25 bp, Probe sequence
ttagaagatgctgttggtgatagat

SEQ ID NO: 22237 - DNA, 25 bp, Probe sequence
caagaaggtatagcgagtagtgtac

SEQ ID NO: 22238 - DNA, 25 bp, Probe sequence
tagaagatgctgttggtgatagatc

SEQ ID NO: 22239 - DNA, 25 bp, Probe sequence
gcaagaaggtatagcgagtagtgta

SEQ ID NO: 22240 - DNA, 25 bp, Probe sequence
accactagaagatgagccgattatt

SEQ ID NO: 22241 - DNA, 25 bp, Probe sequence
gtatagcgagtagtgtacctagaat

SEQ ID NO: 22242 - DNA, 25 bp, Probe sequence
ctcaaggatatgcgattactgaagc

SEQ ID NO: 22243 - DNA, 25 bp, Probe sequence
gctcaaggatatgcgattactgaag

SEQ ID NO: 22244 - DNA, 25 bp, Probe sequence
caccactagaagatgagccgattat

SEQ ID NO: 22245 - DNA, 25 bp, Probe sequence
ctgacattgagccatacttccataa

SEQ ID NO: 22246 - DNA, 25 bp, Probe sequence
aatacctgacattgagccatacttc

SEQ ID NO: 22247 - DNA, 25 bp, Probe sequence
aatatccaacaactgctcaccttaa

SEQ ID NO: 22248 - DNA, 25 bp, Probe sequence
attagcagcacatcaatatccaaca

SEQ ID NO: 22249 - DNA, 25 bp, Probe sequence
caatatccaacaactgctcacctta

SEQ ID NO: 22250 - DNA, 25 bp, Probe sequence
ttagcagcacatcaatatccaacaa

SEQ ID NO: 22251 - DNA, 25 bp, Probe sequence
atgatattcttatgctgatggcgaa

SEQ ID NO: 22252 - DNA, 25 bp, Probe sequence
tattagcagcacatcaatatccaac

SEQ ID NO: 22253 - DNA, 25 bp, Probe sequence
gtcgctattatcgcacatatcaata

SEQ ID NO: 22254 - DNA, 25 bp, Probe sequence
aataaggcgttagaagacctagacc

SEQ ID NO: 22255 - DNA, 25 bp, Probe sequence
agaagacctagaccatttgaatcag

SEQ ID NO: 22256 - DNA, 25 bp, Probe sequence
cgttagaagacctagaccatttgaa

SEQ ID NO: 22257 - DNA, 25 bp, Probe sequence
ctgaaatgaacggtcaaagtgatat

SEQ ID NO: 22258 - DNA, 25 bp, Probe sequence
actgaaatgaacggtcaaagtgata

SEQ ID NO: 22259 - DNA, 25 bp, Probe sequence
tagaagacctagaccatttgaatca

SEQ ID NO: 22260 - DNA, 25 bp, Probe sequence
gaagacctagaccatttgaatcagc

SEQ ID NO: 22261 - DNA, 25 bp, Probe sequence
taaggcgttagaagacctagaccat

SEQ ID NO: 22262 - DNA, 25 bp, Probe sequence
ataaggcgttagaagacctagacca

SEQ ID NO: 22263 - DNA, 25 bp, Probe sequence
gacatagattacacagaagttgaca

SEQ ID NO: 22264 - DNA, 25 bp, Probe sequence
agacatagattacacagaagttgac

SEQ ID NO: 22265 - DNA, 25 bp, Probe sequence
acatagattacacagaagttgacat

SEQ ID NO: 22266 - DNA, 25 bp, Probe sequence
tgaacacttagacatagattacaca

SEQ ID NO: 22267 - DNA, 25 bp, Probe sequence
tagattacacagaagttgacatgaa

SEQ ID NO: 22268 - DNA, 25 bp, Probe sequence
acacttagacatagattacacagaa

SEQ ID NO: 22269 - DNA, 25 bp, Probe sequence
aacacttagacatagattacacaga

SEQ ID NO: 22270 - DNA, 25 bp, Probe sequence
gaacacttagacatagattacacag

SEQ ID NO: 22271 - DNA, 25 bp, Probe sequence
aacagtctacaatcaacacaattaa

SEQ ID NO: 22272 - DNA, 25 bp, Probe sequence
cttcgtaacatcaaggtattggttg

SEQ ID NO: 22273 - DNA, 25 bp, Probe sequence
caacttcgtaacatcaaggtattgg

SEQ ID NO: 22274 - DNA, 25 bp, Probe sequence
acttcgtaacatcaaggtattggtt

SEQ ID NO: 22275 - DNA, 25 bp, Probe sequence
aacttcgtaacatcaaggtattggt

SEQ ID NO: 22276 - DNA, 25 bp, Probe sequence
tcaacttcgtaacatcaaggtattg

SEQ ID NO: 22277 - DNA, 25 bp, Probe sequence
atctgatgtcatattggattggcaa

SEQ ID NO: 22278 - DNA, 25 bp, Probe sequence
aaggtaacaacaattcggctacaat

SEQ ID NO: 22279 - DNA, 25 bp, Probe sequence
attaactaactcggatcaacttcgt

SEQ ID NO: 22280 - DNA, 25 bp, Probe sequence
taactaactcggatcaacttcgtaa

SEQ ID NO: 22281 - DNA, 25 bp, Probe sequence
ttaggtgctattccaacatctactc

SEQ ID NO: 22282 - DNA, 25 bp, Probe sequence
attggatacgatgatattgctggat

SEQ ID NO: 22283 - DNA, 25 bp, Probe sequence
taggtgctattccaacatctactct

SEQ ID NO: 22284 - DNA, 25 bp, Probe sequence
ttggatacgatgatattgctggata

SEQ ID NO: 22285 - DNA, 25 bp, Probe sequence
tggatacgatgatattgctggatat

SEQ ID NO: 22286 - DNA, 25 bp, Probe sequence
gcttcaggaattagagatgttgcta

SEQ ID NO: 22287 - DNA, 25 bp, Probe sequence
agacattacaggtaacgaatcacat

SEQ ID NO: 22288 - DNA, 25 bp, Probe sequence
agtgaagacattacaggtaacgaat

SEQ ID NO: 22289 - DNA, 25 bp, Probe sequence
aagacattacaggtaacgaatcaca

SEQ ID NO: 22290 - DNA, 25 bp, Probe sequence
aattccatcattattgttagcggtg

SEQ ID NO: 22291 - DNA, 25 bp, Probe sequence
ttactaggcactatcgcaggttatt

SEQ ID NO: 22292 - DNA, 25 bp, Probe sequence
gttactaggcactatcgcaggttat

SEQ ID NO: 22293 - DNA, 25 bp, Probe sequence
atatgtagatgcagcacgtatcact

SEQ ID NO: 22294 - DNA, 25 bp, Probe sequence
tatcgtcgaagtgttgttattgttg

SEQ ID NO: 22295 - DNA, 25 bp, Probe sequence
gtatcgtcgaagtgttgttattgtt

SEQ ID NO: 22296 - DNA, 25 bp, Probe sequence
cgtcgaagtgttgttattgttgatg

SEQ ID NO: 22297 - DNA, 25 bp, Probe sequence
acatttgatacgacattggctacta

SEQ ID NO: 22298 - DNA, 25 bp, Probe sequence
tacatttgatacgacattggctact

SEQ ID NO: 22299 - DNA, 25 bp, Probe sequence
caactaagcaagactgaatatcgtg

SEQ ID NO: 22300 - DNA, 25 bp, Probe sequence
aactaagcaagactgaatatcgtgg

SEQ ID NO: 22301 - DNA, 25 bp, Probe sequence
ccaactaagcaagactgaatatcgt

SEQ ID NO: 22302 - DNA, 25 bp, Probe sequence
accaactaagcaagactgaatatcg

SEQ ID NO: 22303 - DNA, 25 bp, Probe sequence
caagtacatcagcaacaacaagaat

SEQ ID NO: 22304 - DNA, 25 bp, Probe sequence
aatcaagtacatcagcaacaacaag

SEQ ID NO: 22305 - DNA, 25 bp, Probe sequence
gaatcaagtacatcagcaacaacaa

SEQ ID NO: 22306 - DNA, 25 bp, Probe sequence
aagtacatcagcaacaacaagaatt

SEQ ID NO: 22307 - DNA, 25 bp, Probe sequence
taccaactaagcaagactgaatatc

SEQ ID NO: 22308 - DNA, 25 bp, Probe sequence
aattcattccagcattgatactagc

SEQ ID NO: 22309 - DNA, 25 bp, Probe sequence
acattacatagaagaagaatacgct

SEQ ID NO: 22310 - DNA, 25 bp, Probe sequence
aacattacatagaagaagaatacgc

SEQ ID NO: 22311 - DNA, 25 bp, Probe sequence
ggttagtagctgtattcactcaaca

SEQ ID NO: 22312 - DNA, 25 bp, Probe sequence
gttagtagctgtattcactcaacaa

SEQ ID NO: 22313 - DNA, 25 bp, Probe sequence
ttagtagctgtattcactcaacaag

SEQ ID NO: 22314 - DNA, 25 bp, Probe sequence
tactcgcagttattatttcactagc

SEQ ID NO: 22315 - DNA, 25 bp, Probe sequence
attacatagaagaagaatacgctac

SEQ ID NO: 22316 - DNA, 25 bp, Probe sequence
cattacatagaagaagaatacgcta

SEQ ID NO: 22317 - DNA, 25 bp, Probe sequence
agagaacatacagacattaacgcaa

SEQ ID NO: 22318 - DNA, 25 bp, Probe sequence
tcagagaacatacagacattaacgc

SEQ ID NO: 22319 - DNA, 25 bp, Probe sequence
cagagaacatacagacattaacgca

SEQ ID NO: 22320 - DNA, 25 bp, Probe sequence
aacgacaagtgccagaattaacatt

SEQ ID NO: 22321 - DNA, 25 bp, Probe sequence
agacgatattgtcatattagaccgc

SEQ ID NO: 22322 - DNA, 25 bp, Probe sequence
gtcagagaacatacagacattaacg

SEQ ID NO: 22323 - DNA, 25 bp, Probe sequence
ctcaggactaggtatgattggatta

SEQ ID NO: 22324 - DNA, 25 bp, Probe sequence
acagtcagagaacatacagacatta

SEQ ID NO: 22325 - DNA, 25 bp, Probe sequence
tacagtcagagaacatacagacatt

SEQ ID NO: 22326 - DNA, 25 bp, Probe sequence
taccaatgttaatccttatcggctt

SEQ ID NO: 22327 - DNA, 25 bp, Probe sequence
ttaccaatccaattacaccgatgat

SEQ ID NO: 22328 - DNA, 25 bp, Probe sequence
attaccaatccaattacaccgatga

SEQ ID NO: 22329 - DNA, 25 bp, Probe sequence
taccaatccaattacaccgatgatg

SEQ ID NO: 22330 - DNA, 25 bp, Probe sequence
tcgtaccaatgttaatccttatcgg

SEQ ID NO: 22331 - DNA, 25 bp, Probe sequence
gtaccaatgttaatccttatcggct

SEQ ID NO: 22332 - DNA, 25 bp, Probe sequence
ttcaattaccaatccaattacaccg

SEQ ID NO: 22333 - DNA, 25 bp, Probe sequence
ttcgtaccaatgttaatccttatcg

SEQ ID NO: 22334 - DNA, 25 bp, Probe sequence
aattaccaatccaattacaccgatg

SEQ ID NO: 22335 - DNA, 25 bp, Probe sequence
tagttaagcgatggagcgatagtaa

SEQ ID NO: 22336 - DNA, 25 bp, Probe sequence
ttagttaagcgatggagcgatagta

SEQ ID NO: 22337 - DNA, 25 bp, Probe sequence
gttaagcgatggagcgatagtaatt

SEQ ID NO: 22338 - DNA, 25 bp, Probe sequence
ttactcataacgagaactgctgaag

SEQ ID NO: 22339 - DNA, 25 bp, Probe sequence
agttaagcgatggagcgatagtaat

SEQ ID NO: 22340 - DNA, 25 bp, Probe sequence
attacggtattattgatgaagtgga

SEQ ID NO: 22341 - DNA, 25 bp, Probe sequence
gctggagagtattaggtatgtatcc

SEQ ID NO: 22342 - DNA, 25 bp, Probe sequence
cgagctggagagtattaggtatgta

SEQ ID NO: 22343 - DNA, 25 bp, Probe sequence
gcattaggtggattagctgttatta

SEQ ID NO: 22344 - DNA, 25 bp, Probe sequence
tatcgtacaagccatgaagatgatg

SEQ ID NO: 22345 - DNA, 25 bp, Probe sequence
cgtacaagccatgaagatgatgatt

SEQ ID NO: 22346 - DNA, 25 bp, Probe sequence
agttatgggtcaaagtcaaatgttt

SEQ ID NO: 22347 - DNA, 25 bp, Probe sequence
tcgtacaagccatgaagatgatgat

SEQ ID NO: 22348 - DNA, 25 bp, Probe sequence
atcgtacaagccatgaagatgatga

SEQ ID NO: 22349 - DNA, 25 bp, Probe sequence
tagttatgggtcaaagtcaaatgtt

SEQ ID NO: 22350 - DNA, 25 bp, Probe sequence
ttagttatgggtcaaagtcaaatgt

SEQ ID NO: 22351 - DNA, 25 bp, Probe sequence
gcgtagaggacagcattataaattg

SEQ ID NO: 22352 - DNA, 25 bp, Probe sequence
gtacaagccatgaagatgatgattt

SEQ ID NO: 22353 - DNA, 25 bp, Probe sequence
tgactaaagccacatccaatatagg

SEQ ID NO: 22354 - DNA, 25 bp, Probe sequence
atgactaaagccacatccaatatag

SEQ ID NO: 22355 - DNA, 25 bp, Probe sequence
actaaagccacatccaatataggac

SEQ ID NO: 22356 - DNA, 25 bp, Probe sequence
gactaaagccacatccaatatagga

SEQ ID NO: 22357 - DNA, 25 bp, Probe sequence
ctaaagccacatccaatataggacg

SEQ ID NO: 22358 - DNA, 25 bp, Probe sequence
atgtaaatcttgtaggtaatcgttt

SEQ ID NO: 22359 - DNA, 25 bp, Probe sequence
taaagccacatccaatataggacgt

SEQ ID NO: 22360 - DNA, 25 bp, Probe sequence
tatgtaaatcttgtaggtaatcgtt

SEQ ID NO: 22361 - DNA, 25 bp, Probe sequence
atatgtaaatcttgtaggtaatcgt

SEQ ID NO: 22362 - DNA, 25 bp, Probe sequence
agtggttatgtagaggctattgaag

SEQ ID NO: 22363 - DNA, 25 bp, Probe sequence
atctatattcaagcaccatactcgg

SEQ ID NO: 22364 - DNA, 25 bp, Probe sequence
tatgcgattacttagaccagaagag

SEQ ID NO: 22365 - DNA, 25 bp, Probe sequence
ctatattcaagcaccatactcggag

SEQ ID NO: 22366 - DNA, 25 bp, Probe sequence
tctatattcaagcaccatactcgga

SEQ ID NO: 22367 - DNA, 25 bp, Probe sequence
tatattcaagcaccatactcggaga

SEQ ID NO: 22368 - DNA, 25 bp, Probe sequence
gccttgtattatggtgctcagttaa

SEQ ID NO: 22369 - DNA, 25 bp, Probe sequence
atatgcgattacttagaccagaaga

SEQ ID NO: 22370 - DNA, 25 bp, Probe sequence
tagtggttatgtagaggctattgaa

SEQ ID NO: 22371 - DNA, 25 bp, Probe sequence
cagagttacttgttatattaccagg

SEQ ID NO: 22372 - DNA, 25 bp, Probe sequence
acttgtttcttcagagttacttgtt

SEQ ID NO: 22373 - DNA, 25 bp, Probe sequence
cttgtttcttcagagttacttgtta

SEQ ID NO: 22374 - DNA, 25 bp, Probe sequence
acctatatttcacagctcactttag

SEQ ID NO: 22375 - DNA, 25 bp, Probe sequence
ctacctatatttcacagctcacttt

SEQ ID NO: 22376 - DNA, 25 bp, Probe sequence
agctcactttagatatcgaacttgt

SEQ ID NO: 22377 - DNA, 25 bp, Probe sequence
acagctcactttagatatcgaactt

SEQ ID NO: 22378 - DNA, 25 bp, Probe sequence
tttcacagctcactttagatatcga

SEQ ID NO: 22379 - DNA, 25 bp, Probe sequence
cagctcactttagatatcgaacttg

SEQ ID NO: 22380 - DNA, 25 bp, Probe sequence
ttagtcatcaagagaagtatcagcg

SEQ ID NO: 22381 - DNA, 25 bp, Probe sequence
cagttgatgaattagatgatgcgtt

SEQ ID NO: 22382 - DNA, 25 bp, Probe sequence
tacagttgatgaattagatgatgcg

SEQ ID NO: 22383 - DNA, 25 bp, Probe sequence
acagttgatgaattagatgatgcgt

SEQ ID NO: 22384 - DNA, 25 bp, Probe sequence
agttgatgaattagatgatgcgtta

SEQ ID NO: 22385 - DNA, 25 bp, Probe sequence
attagtcatcaagagaagtatcagc

SEQ ID NO: 22386 - DNA, 25 bp, Probe sequence
gacatcattgctgttaagacgatac

SEQ ID NO: 22387 - DNA, 25 bp, Probe sequence
catcattgctgttaagacgatacat

SEQ ID NO: 22388 - DNA, 25 bp, Probe sequence
tgacatcattgctgttaagacgata

SEQ ID NO: 22389 - DNA, 25 bp, Probe sequence
ggatacattattctcgcatacgcta

SEQ ID NO: 22390 - DNA, 25 bp, Probe sequence
gatacattattctcgcatacgctag

SEQ ID NO: 22391 - DNA, 25 bp, Probe sequence
atacattattctcgcatacgctaga

SEQ ID NO: 22392 - DNA, 25 bp, Probe sequence
tgaggatacattattctcgcatacg

SEQ ID NO: 22393 - DNA, 25 bp, Probe sequence
aggatacattattctcgcatacgct

SEQ ID NO: 22394 - DNA, 25 bp, Probe sequence
gcgatccattacagattgatatacc

SEQ ID NO: 22395 - DNA, 25 bp, Probe sequence
ggcgatccattacagattgatatac

SEQ ID NO: 22396 - DNA, 25 bp, Probe sequence
gaggatacattattctcgcatacgc

SEQ ID NO: 22397 - DNA, 25 bp, Probe sequence
atgaggatacattattctcgcatac

SEQ ID NO: 22398 - DNA, 25 bp, Probe sequence
tggttactggaacgatgttattagt

SEQ ID NO: 22399 - DNA, 25 bp, Probe sequence
agtcatattgtgattgcgttgttaa

SEQ ID NO: 22400 - DNA, 25 bp, Probe sequence
aagtcatattgtgattgcgttgtta

SEQ ID NO: 22401 - DNA, 25 bp, Probe sequence
ttggttactggaacgatgttattag

SEQ ID NO: 22402 - DNA, 25 bp, Probe sequence
caagtcatattgtgattgcgttgtt

SEQ ID NO: 22403 - DNA, 25 bp, Probe sequence
ggttactggaacgatgttattagtt

SEQ ID NO: 22404 - DNA, 25 bp, Probe sequence
gtcatattgtgattgcgttgttaat

SEQ ID NO: 22405 - DNA, 25 bp, Probe sequence
atcttgatgctgatttcttatcgga

SEQ ID NO: 22406 - DNA, 25 bp, Probe sequence
tgctgatttcttatcggaatatgga

SEQ ID NO: 22407 - DNA, 25 bp, Probe sequence
cagccataattgagcaacatactat

SEQ ID NO: 22408 - DNA, 25 bp, Probe sequence
tcagccataattgagcaacatacta

SEQ ID NO: 22409 - DNA, 25 bp, Probe sequence
atcagccataattgagcaacatact

SEQ ID NO: 22410 - DNA, 25 bp, Probe sequence
catcagccataattgagcaacatac

SEQ ID NO: 22411 - DNA, 25 bp, Probe sequence
tcatcagccataattgagcaacata

SEQ ID NO: 22412 - DNA, 25 bp, Probe sequence
ttcgtaacattacttctagtcgtga

SEQ ID NO: 22413 - DNA, 25 bp, Probe sequence
gttcgtaacattacttctagtcgtg

SEQ ID NO: 22414 - DNA, 25 bp, Probe sequence
tcgtaacattacttctagtcgtgat

SEQ ID NO: 22415 - DNA, 25 bp, Probe sequence
atcatcagccataattgagcaacat

SEQ ID NO: 22416 - DNA, 25 bp, Probe sequence
tcaacatcaacaaccgattctacta

SEQ ID NO: 22417 - DNA, 25 bp, Probe sequence
atcaacatcaacaaccgattctact

SEQ ID NO: 22418 - DNA, 25 bp, Probe sequence
catcaacatcaacaaccgattctac

SEQ ID NO: 22419 - DNA, 25 bp, Probe sequence
atcactaagcatagcaacatcacaa

SEQ ID NO: 22420 - DNA, 25 bp, Probe sequence
caagcacatcaacatcaacaagtag

SEQ ID NO: 22421 - DNA, 25 bp, Probe sequence
caacatcaattagcgactcagaatc

SEQ ID NO: 22422 - DNA, 25 bp, Probe sequence
catcgttaagtgattcagtaagcat

SEQ ID NO: 22423 - DNA, 25 bp, Probe sequence
acatcgttaagtgattcagtaagca

SEQ ID NO: 22424 - DNA, 25 bp, Probe sequence
aacatcaattagcgactcagaatca

SEQ ID NO: 22425 - DNA, 25 bp, Probe sequence
ggttatattaggcatttatgtcgca

SEQ ID NO: 22426 - DNA, 25 bp, Probe sequence
tggttatattaggcatttatgtcgc

SEQ ID NO: 22427 - DNA, 25 bp, Probe sequence
gtcgcaataactaaagatttcacac

SEQ ID NO: 22428 - DNA, 25 bp, Probe sequence
tcgcaataactaaagatttcacact

SEQ ID NO: 22429 - DNA, 25 bp, Probe sequence
attaggcatttatgtcgcaataact

SEQ ID NO: 22430 - DNA, 25 bp, Probe sequence
aggcatttatgtcgcaataactaaa

SEQ ID NO: 22431 - DNA, 25 bp, Probe sequence
ggcatttatgtcgcaataactaaag

SEQ ID NO: 22432 - DNA, 25 bp, Probe sequence
atgtcgcaataactaaagatttcac

SEQ ID NO: 22433 - DNA, 25 bp, Probe sequence
taggcatttatgtcgcaataactaa

SEQ ID NO: 22434 - DNA, 25 bp, Probe sequence
agcatattcacagatacttccaaga

SEQ ID NO: 22435 - DNA, 25 bp, Probe sequence
tcacagatacttccaagattctcaa

SEQ ID NO: 22436 - DNA, 25 bp, Probe sequence
ttcacagatacttccaagattctca

SEQ ID NO: 22437 - DNA, 25 bp, Probe sequence
gcatattcacagatacttccaagat

SEQ ID NO: 22438 - DNA, 25 bp, Probe sequence
aagcatattcacagatacttccaag

SEQ ID NO: 22439 - DNA, 25 bp, Probe sequence
attcacagatacttccaagattctc

SEQ ID NO: 22440 - DNA, 25 bp, Probe sequence
tacttccaagattctcaaaccaaga

SEQ ID NO: 22441 - DNA, 25 bp, Probe sequence
gatacttccaagattctcaaaccaa

SEQ ID NO: 22442 - DNA, 25 bp, Probe sequence
tattcacagatacttccaagattct

SEQ ID NO: 22443 - DNA, 25 bp, Probe sequence
tatggttatgttcgcagcaaatcaa

SEQ ID NO: 22444 - DNA, 25 bp, Probe sequence
cgaaagatgggaaagataatttagc

SEQ ID NO: 22445 - DNA, 25 bp, Probe sequence
ctatggttatgttcgcagcaaatca

SEQ ID NO: 22446 - DNA, 25 bp, Probe sequence
atggttatgttcgcagcaaatcaat

SEQ ID NO: 22447 - DNA, 25 bp, Probe sequence
cctatggttatgttcgcagcaaatc

SEQ ID NO: 22448 - DNA, 25 bp, Probe sequence
ctactgtatcgaaagatgggaaaga

SEQ ID NO: 22449 - DNA, 25 bp, Probe sequence
tggttatgttcgcagcaaatcaatc

SEQ ID NO: 22450 - DNA, 25 bp, Probe sequence
tactgtatcgaaagatgggaaagat

SEQ ID NO: 22451 - DNA, 25 bp, Probe sequence
tctactgtatcgaaagatgggaaag

SEQ ID NO: 22452 - DNA, 25 bp, Probe sequence
gtatgttgtcatcattatcgcagtc

SEQ ID NO: 22453 - DNA, 25 bp, Probe sequence
tatgttgtcatcattatcgcagtca

SEQ ID NO: 22454 - DNA, 25 bp, Probe sequence
atgtatgttgtcatcattatcgcag

SEQ ID NO: 22455 - DNA, 25 bp, Probe sequence
tgttgtcatcattatcgcagtcatt

SEQ ID NO: 22456 - DNA, 25 bp, Probe sequence
tgtatgttgtcatcattatcgcagt

SEQ ID NO: 22457 - DNA, 25 bp, Probe sequence
atgttgtcatcattatcgcagtcat

SEQ ID NO: 22458 - DNA, 25 bp, Probe sequence
tgactggtcttcatacatattcacg

SEQ ID NO: 22459 - DNA, 25 bp, Probe sequence
tatgtatgttgtcatcattatcgca

SEQ ID NO: 22460 - DNA, 25 bp, Probe sequence
ttatgtatgttgtcatcattatcgc

SEQ ID NO: 22461 - DNA, 25 bp, Probe sequence
ttaacatctacaacgattaagacgc

SEQ ID NO: 22462 - DNA, 25 bp, Probe sequence
taacatctacaacgattaagacgcc

SEQ ID NO: 22463 - DNA, 25 bp, Probe sequence
tattgcttggagatgtattagatgg

SEQ ID NO: 22464 - DNA, 25 bp, Probe sequence
caacgattaagacgccaggaattaa

SEQ ID NO: 22465 - DNA, 25 bp, Probe sequence
ttggttcaattattccacgacctat

SEQ ID NO: 22466 - DNA, 25 bp, Probe sequence
acaacgattaagacgccaggaatta

SEQ ID NO: 22467 - DNA, 25 bp, Probe sequence
tacaacgattaagacgccaggaatt

SEQ ID NO: 22468 - DNA, 25 bp, Probe sequence
tggttcaattattccacgacctata

SEQ ID NO: 22469 - DNA, 25 bp, Probe sequence
gttcaattattccacgacctatagc

SEQ ID NO: 22470 - DNA, 25 bp, Probe sequence
aacaatagtagagaacgagatacgc

SEQ ID NO: 22471 - DNA, 25 bp, Probe sequence
attgatatgttggcagatgtgaatc

SEQ ID NO: 22472 - DNA, 25 bp, Probe sequence
cgtgaagatgaatatccaaccagat

SEQ ID NO: 22473 - DNA, 25 bp, Probe sequence
aattgatatgttggcagatgtgaat

SEQ ID NO: 22474 - DNA, 25 bp, Probe sequence
caacaatagtagagaacgagatacg

SEQ ID NO: 22475 - DNA, 25 bp, Probe sequence
gtgaagatgaatatccaaccagatt

SEQ ID NO: 22476 - DNA, 25 bp, Probe sequence
gtgtatcggctgaagatgttaagtt

SEQ ID NO: 22477 - DNA, 25 bp, Probe sequence
aattacttaacacactcttcggcag

SEQ ID NO: 22478 - DNA, 25 bp, Probe sequence
cagtagttaatgcgatagatcagga

SEQ ID NO: 22479 - DNA, 25 bp, Probe sequence
atccacattacaacgaagcacttaa

SEQ ID NO: 22480 - DNA, 25 bp, Probe sequence
cacattatgaagccacaaccaattc

SEQ ID NO: 22481 - DNA, 25 bp, Probe sequence
gatccacattacaacgaagcactta

SEQ ID NO: 22482 - DNA, 25 bp, Probe sequence
atccaactaatgatggtcacactaa

SEQ ID NO: 22483 - DNA, 25 bp, Probe sequence
cacattacaacgaagcacttaaact

SEQ ID NO: 22484 - DNA, 25 bp, Probe sequence
gcacattatgaagccacaaccaatt

SEQ ID NO: 22485 - DNA, 25 bp, Probe sequence
tacaacgaagcacttaaactttacg

SEQ ID NO: 22486 - DNA, 25 bp, Probe sequence
acgaagcacttaaactttacgatac

SEQ ID NO: 22487 - DNA, 25 bp, Probe sequence
acattacaacgaagcacttaaactt

SEQ ID NO: 22488 - DNA, 25 bp, Probe sequence
ttacagaaacatcggaagaagaact

SEQ ID NO: 22489 - DNA, 25 bp, Probe sequence
acagaaacatcggaagaagaactta

SEQ ID NO: 22490 - DNA, 25 bp, Probe sequence
tacagaaacatcggaagaagaactt

SEQ ID NO: 22491 - DNA, 25 bp, Probe sequence
gttacagaaacatcggaagaagaac

SEQ ID NO: 22492 - DNA, 25 bp, Probe sequence
cagaaacatcggaagaagaacttaa

SEQ ID NO: 22493 - DNA, 25 bp, Probe sequence
aacatcggaagaagaacttaaacaa

SEQ ID NO: 22494 - DNA, 25 bp, Probe sequence
aaacatcggaagaagaacttaaaca

SEQ ID NO: 22495 - DNA, 25 bp, Probe sequence
ttaggttactctagtttccaaagcg

SEQ ID NO: 22496 - DNA, 25 bp, Probe sequence
acatcggaagaagaacttaaacaat

SEQ ID NO: 22497 - DNA, 25 bp, Probe sequence
gtatgatggttatgctgaatgtgtc

SEQ ID NO: 22498 - DNA, 25 bp, Probe sequence
ttatacatacagaagcaggaagagc

SEQ ID NO: 22499 - DNA, 25 bp, Probe sequence
tatacatacagaagcaggaagagca

SEQ ID NO: 22500 - DNA, 25 bp, Probe sequence
tggaattatacatacagaagcagga

SEQ ID NO: 22501 - DNA, 25 bp, Probe sequence
cgtatgatggttatgctgaatgtgt

SEQ ID NO: 22502 - DNA, 25 bp, Probe sequence
tatgatggttatgctgaatgtgtca

SEQ ID NO: 22503 - DNA, 25 bp, Probe sequence
tgtagatgaccacttaattgaagcg

SEQ ID NO: 22504 - DNA, 25 bp, Probe sequence
atacatacagaagcaggaagagcaa

SEQ ID NO: 22505 - DNA, 25 bp, Probe sequence
atgatggttatgctgaatgtgtcaa

SEQ ID NO: 22506 - DNA, 25 bp, Probe sequence
tgtaagtggattaggattagggttt

SEQ ID NO: 22507 - DNA, 25 bp, Probe sequence
ttgtaagtggattaggattagggtt

SEQ ID NO: 22508 - DNA, 25 bp, Probe sequence
tttgtaagtggattaggattagggt

SEQ ID NO: 22509 - DNA, 25 bp, Probe sequence
cgaaagttttgtaagtggattagga

SEQ ID NO: 22510 - DNA, 25 bp, Probe sequence
gtaagtggattaggattagggtttt

SEQ ID NO: 22511 - DNA, 25 bp, Probe sequence
ttttgtaagtggattaggattaggg

SEQ ID NO: 22512 - DNA, 25 bp, Probe sequence
gatgtcgaaagttttgtaagtggat

SEQ ID NO: 22513 - DNA, 25 bp, Probe sequence
ttgatgtcgaaagttttgtaagtgg

SEQ ID NO: 22514 - DNA, 25 bp, Probe sequence
atgtcgaaagttttgtaagtggatt

SEQ ID NO: 22515 - DNA, 25 bp, Probe sequence
ttagtgtgttaggtcttgttgtagc

SEQ ID NO: 22516 - DNA, 25 bp, Probe sequence
attagtgtgttaggtcttgttgtag

SEQ ID NO: 22517 - DNA, 25 bp, Probe sequence
tcgtaatgaaggtgtatcagaatca

SEQ ID NO: 22518 - DNA, 25 bp, Probe sequence
tagtgtgttaggtcttgttgtagca

SEQ ID NO: 22519 - DNA, 25 bp, Probe sequence
gaaggtgtatcagaatcatgtcatg

SEQ ID NO: 22520 - DNA, 25 bp, Probe sequence
aaggtgtatcagaatcatgtcatgg

SEQ ID NO: 22521 - DNA, 25 bp, Probe sequence
atcgtaatgaaggtgtatcagaatc

SEQ ID NO: 22522 - DNA, 25 bp, Probe sequence
atattagtgtgttaggtcttgttgt

SEQ ID NO: 22523 - DNA, 25 bp, Probe sequence
tgaaggtgtatcagaatcatgtcat

SEQ ID NO: 22524 - DNA, 25 bp, Probe sequence
attctactaatggttgctcaaggtt

SEQ ID NO: 22525 - DNA, 25 bp, Probe sequence
ttctactaatggttgctcaaggtta

SEQ ID NO: 22526 - DNA, 25 bp, Probe sequence
tctactaatggttgctcaaggttat

SEQ ID NO: 22527 - DNA, 25 bp, Probe sequence
ctactaatggttgctcaaggttata

SEQ ID NO: 22528 - DNA, 25 bp, Probe sequence
tactaatggttgctcaaggttatat

SEQ ID NO: 22529 - DNA, 25 bp, Probe sequence
gactggctaaagtggaatcctatta

SEQ ID NO: 22530 - DNA, 25 bp, Probe sequence
tagactggctaaagtggaatcctat

SEQ ID NO: 22531 - DNA, 25 bp, Probe sequence
atagactggctaaagtggaatccta

SEQ ID NO: 22532 - DNA, 25 bp, Probe sequence
aaatagactggctaaagtggaatcc

SEQ ID NO: 22533 - DNA, 25 bp, Probe sequence
gtgaagatgtgaatatggttcgtaa

SEQ ID NO: 22534 - DNA, 25 bp, Probe sequence
cgtgaagatgtgaatatggttcgta

SEQ ID NO: 22535 - DNA, 25 bp, Probe sequence
ttactacctgaagaagaagaagtca

SEQ ID NO: 22536 - DNA, 25 bp, Probe sequence
tactacctgaagaagaagaagtcat

SEQ ID NO: 22537 - DNA, 25 bp, Probe sequence
actacctgaagaagaagaagtcatg

SEQ ID NO: 22538 - DNA, 25 bp, Probe sequence
ctcattcatggttgtattccagttg

SEQ ID NO: 22539 - DNA, 25 bp, Probe sequence
tactcattcatggttgtattccagt

SEQ ID NO: 22540 - DNA, 25 bp, Probe sequence
attcatggttgtattccagttgatg

SEQ ID NO: 22541 - DNA, 25 bp, Probe sequence
cattcatggttgtattccagttgat

SEQ ID NO: 22542 - DNA, 25 bp, Probe sequence
gctaaggatgaaggtgtaacaagta

SEQ ID NO: 22543 - DNA, 25 bp, Probe sequence
aaggatgaaggtgtaacaagtattg

SEQ ID NO: 22544 - DNA, 25 bp, Probe sequence
ctaaggatgaaggtgtaacaagtat

SEQ ID NO: 22545 - DNA, 25 bp, Probe sequence
tgccagttcagtaatcaatgataat

SEQ ID NO: 22546 - DNA, 25 bp, Probe sequence
atgccagttcagtaatcaatgataa

SEQ ID NO: 22547 - DNA, 25 bp, Probe sequence
aatgccagttcagtaatcaatgata

SEQ ID NO: 22548 - DNA, 25 bp, Probe sequence
aagctaaggatgaaggtgtaacaag

SEQ ID NO: 22549 - DNA, 25 bp, Probe sequence
taaggatgaaggtgtaacaagtatt

SEQ ID NO: 22550 - DNA, 25 bp, Probe sequence
agtattgtagcgacacctcatcatt

SEQ ID NO: 22551 - DNA, 25 bp, Probe sequence
ccgctaataatgatgctcagattca

SEQ ID NO: 22552 - DNA, 25 bp, Probe sequence
ttgtcattatgattgcggtctacta

SEQ ID NO: 22553 - DNA, 25 bp, Probe sequence
tgtcattatgattgcggtctactat

SEQ ID NO: 22554 - DNA, 25 bp, Probe sequence
attgtcattatgattgcggtctact

SEQ ID NO: 22555 - DNA, 25 bp, Probe sequence
attattacaatggctgtcatcactt

SEQ ID NO: 22556 - DNA, 25 bp, Probe sequence
gtcattatgattgcggtctactatt

SEQ ID NO: 22557 - DNA, 25 bp, Probe sequence
ttcatcttactcatacctgtactct

SEQ ID NO: 22558 - DNA, 25 bp, Probe sequence
caatggctgtcatcacttatattag

SEQ ID NO: 22559 - DNA, 25 bp, Probe sequence
ttattacaatggctgtcatcactta

SEQ ID NO: 22560 - DNA, 25 bp, Probe sequence
cgaatacacgaagaagtacatcaag

SEQ ID NO: 22561 - DNA, 25 bp, Probe sequence
acgaatacacgaagaagtacatcaa

SEQ ID NO: 22562 - DNA, 25 bp, Probe sequence
gacgaatacacgaagaagtacatca

SEQ ID NO: 22563 - DNA, 25 bp, Probe sequence
tgacgaatacacgaagaagtacatc

SEQ ID NO: 22564 - DNA, 25 bp, Probe sequence
atgacgaatacacgaagaagtacat

SEQ ID NO: 22565 - DNA, 25 bp, Probe sequence
gaatacacgaagaagtacatcaagt

SEQ ID NO: 22566 - DNA, 25 bp, Probe sequence
aatacacgaagaagtacatcaagtt

SEQ ID NO: 22567 - DNA, 25 bp, Probe sequence
ttggtcaacttatcaagacagtatt

SEQ ID NO: 22568 - DNA, 25 bp, Probe sequence
aattggtcaacttatcaagacagta

SEQ ID NO: 22569 - DNA, 25 bp, Probe sequence
gatcatacaggcgtatctgatgaac

SEQ ID NO: 22570 - DNA, 25 bp, Probe sequence
atcatacaggcgtatctgatgaact

SEQ ID NO: 22571 - DNA, 25 bp, Probe sequence
ctttagctgaaatcacataccgttt

SEQ ID NO: 22572 - DNA, 25 bp, Probe sequence
aattaacattgatcatacaggcgta

SEQ ID NO: 22573 - DNA, 25 bp, Probe sequence
atgctttagctgaaatcacataccg

SEQ ID NO: 22574 - DNA, 25 bp, Probe sequence
gctttagctgaaatcacataccgtt

SEQ ID NO: 22575 - DNA, 25 bp, Probe sequence
ggcgagaacaaattctatattggtg

SEQ ID NO: 22576 - DNA, 25 bp, Probe sequence
aggcgagaacaaattctatattggt

SEQ ID NO: 22577 - DNA, 25 bp, Probe sequence
gcgagaacaaattctatattggtga

SEQ ID NO: 22578 - DNA, 25 bp, Probe sequence
gcagtctgttaatacatatacggaa

SEQ ID NO: 22579 - DNA, 25 bp, Probe sequence
actgggaataaatctgaatctgaca

SEQ ID NO: 22580 - DNA, 25 bp, Probe sequence
atgcctgacaaatatactgcttcta

SEQ ID NO: 22581 - DNA, 25 bp, Probe sequence
tatgcctgacaaatatactgcttct

SEQ ID NO: 22582 - DNA, 25 bp, Probe sequence
gcctgacaaatatactgcttctact

SEQ ID NO: 22583 - DNA, 25 bp, Probe sequence
tgcctgacaaatatactgcttctac

SEQ ID NO: 22584 - DNA, 25 bp, Probe sequence
gttatgcctgacaaatatactgctt

SEQ ID NO: 22585 - DNA, 25 bp, Probe sequence
ttatgcctgacaaatatactgcttc

SEQ ID NO: 22586 - DNA, 25 bp, Probe sequence
ctgggaataaatctgaatctgacaa

SEQ ID NO: 22587 - DNA, 25 bp, Probe sequence
ccgaaggtaatggtattgaagtcta

SEQ ID NO: 22588 - DNA, 25 bp, Probe sequence
aggtaatggtattgaagtctatcgc

SEQ ID NO: 22589 - DNA, 25 bp, Probe sequence
gtcaacgaatcattatcaccatcat

SEQ ID NO: 22590 - DNA, 25 bp, Probe sequence
tgtcaacgaatcattatcaccatca

SEQ ID NO: 22591 - DNA, 25 bp, Probe sequence
atgtcaacgaatcattatcaccatc

SEQ ID NO: 22592 - DNA, 25 bp, Probe sequence
cgaatcattatcaccatcatattgc

SEQ ID NO: 22593 - DNA, 25 bp, Probe sequence
ttatgtcaacgaatcattatcacca

SEQ ID NO: 22594 - DNA, 25 bp, Probe sequence
tcaacgaatcattatcaccatcata

SEQ ID NO: 22595 - DNA, 25 bp, Probe sequence
aaggtaatggtattgaagtctatcg

SEQ ID NO: 22596 - DNA, 25 bp, Probe sequence
caattatctaatacgcctgaggaat

SEQ ID NO: 22597 - DNA, 25 bp, Probe sequence
tcaattatctaatacgcctgaggaa

SEQ ID NO: 22598 - DNA, 25 bp, Probe sequence
ttcaattatctaatacgcctgagga

SEQ ID NO: 22599 - DNA, 25 bp, Probe sequence
gttcaattatctaatacgcctgagg

SEQ ID NO: 22600 - DNA, 25 bp, Probe sequence
atgacggtacaacacttgatgatat

SEQ ID NO: 22601 - DNA, 25 bp, Probe sequence
tgacggtacaacacttgatgatata

SEQ ID NO: 22602 - DNA, 25 bp, Probe sequence
tatgacggtacaacacttgatgata

SEQ ID NO: 22603 - DNA, 25 bp, Probe sequence
acggtacaacacttgatgatatagc

SEQ ID NO: 22604 - DNA, 25 bp, Probe sequence
gacggtacaacacttgatgatatag

SEQ ID NO: 22605 - DNA, 25 bp, Probe sequence
ttaggtgctgcgattgatacttatg

SEQ ID NO: 22606 - DNA, 25 bp, Probe sequence
gttaggtgctgcgattgatacttat

SEQ ID NO: 22607 - DNA, 25 bp, Probe sequence
taggtgctgcgattgatacttatga

SEQ ID NO: 22608 - DNA, 25 bp, Probe sequence
tgttaggtgctgcgattgatactta

SEQ ID NO: 22609 - DNA, 25 bp, Probe sequence
aggtgctgcgattgatacttatgaa

SEQ ID NO: 22610 - DNA, 25 bp, Probe sequence
aacgcagcattatctgtcattaaca

SEQ ID NO: 22611 - DNA, 25 bp, Probe sequence
cgcagcattatctgtcattaacact

SEQ ID NO: 22612 - DNA, 25 bp, Probe sequence
ttgttaggtgctgcgattgatactt

SEQ ID NO: 22613 - DNA, 25 bp, Probe sequence
accacatattgctttcttctctgat

SEQ ID NO: 22614 - DNA, 25 bp, Probe sequence
acgctaataacaatctaccttcaca

SEQ ID NO: 22615 - DNA, 25 bp, Probe sequence
gaggatacagttacagcacaatcta

SEQ ID NO: 22616 - DNA, 25 bp, Probe sequence
cgctaataacaatctaccttcacaa

SEQ ID NO: 22617 - DNA, 25 bp, Probe sequence
aacgctaataacaatctaccttcac

SEQ ID NO: 22618 - DNA, 25 bp, Probe sequence
cgcacaagagaagaattacaagatt

SEQ ID NO: 22619 - DNA, 25 bp, Probe sequence
aattcacaggaggatacagttacag

SEQ ID NO: 22620 - DNA, 25 bp, Probe sequence
aggatacagttacagcacaatctat

SEQ ID NO: 22621 - DNA, 25 bp, Probe sequence
ggatacagttacagcacaatctatt

SEQ ID NO: 22622 - DNA, 25 bp, Probe sequence
cgtcaactagaagaattactgcgta

SEQ ID NO: 22623 - DNA, 25 bp, Probe sequence
atttatccgatttaagtgctttgcc

SEQ ID NO: 22624 - DNA, 25 bp, Probe sequence
gaagttacaaacgctttagacaaga

SEQ ID NO: 22625 - DNA, 25 bp, Probe sequence
tgaagttacaaacgctttagacaag

SEQ ID NO: 22626 - DNA, 25 bp, Probe sequence
gatgaagttacaaacgctttagaca

SEQ ID NO: 22627 - DNA, 25 bp, Probe sequence
agatgaagttacaaacgctttagac

SEQ ID NO: 22628 - DNA, 25 bp, Probe sequence
atgaagttacaaacgctttagacaa

SEQ ID NO: 22629 - DNA, 25 bp, Probe sequence
agttacaaacgctttagacaagaaa

SEQ ID NO: 22630 - DNA, 25 bp, Probe sequence
aagttacaaacgctttagacaagaa

SEQ ID NO: 22631 - DNA, 25 bp, Probe sequence
aatttatccgatttaagtgctttgc

SEQ ID NO: 22632 - DNA, 25 bp, Probe sequence
cagcattgtatattggattggttca

SEQ ID NO: 22633 - DNA, 25 bp, Probe sequence
gcattgtatattggattggttcagt

SEQ ID NO: 22634 - DNA, 25 bp, Probe sequence
ttggattggttcagtcatcttagtt

SEQ ID NO: 22635 - DNA, 25 bp, Probe sequence
attggattggttcagtcatcttagt

SEQ ID NO: 22636 - DNA, 25 bp, Probe sequence
agcattgtatattggattggttcag

SEQ ID NO: 22637 - DNA, 25 bp, Probe sequence
tcagcattgtatattggattggttc

SEQ ID NO: 22638 - DNA, 25 bp, Probe sequence
ggttcagtcatcttagttgccatta

SEQ ID NO: 22639 - DNA, 25 bp, Probe sequence
tggattggttcagtcatcttagttg

SEQ ID NO: 22640 - DNA, 25 bp, Probe sequence
gttcagtcatcttagttgccattaa

SEQ ID NO: 22641 - DNA, 25 bp, Probe sequence
caactcaggaatagatgtcactgtt

SEQ ID NO: 22642 - DNA, 25 bp, Probe sequence
actcaggaatagatgtcactgttaa

SEQ ID NO: 22643 - DNA, 25 bp, Probe sequence
aactcaggaatagatgtcactgtta

SEQ ID NO: 22644 - DNA, 25 bp, Probe sequence
gagcaactcaggaatagatgtcact

SEQ ID NO: 22645 - DNA, 25 bp, Probe sequence
agcaactcaggaatagatgtcactg

SEQ ID NO: 22646 - DNA, 25 bp, Probe sequence
gcaactcaggaatagatgtcactgt

SEQ ID NO: 22647 - DNA, 25 bp, Probe sequence
ggaatagatgtcactgttaaagatg

SEQ ID NO: 22648 - DNA, 25 bp, Probe sequence
aggaatagatgtcactgttaaagat

SEQ ID NO: 22649 - DNA, 25 bp, Probe sequence
caggaatagatgtcactgttaaaga

SEQ ID NO: 22650 - DNA, 25 bp, Probe sequence
tatagtagccatcctaatcgcattg

SEQ ID NO: 22651 - DNA, 25 bp, Probe sequence
ttatagtagccatcctaatcgcatt

SEQ ID NO: 22652 - DNA, 25 bp, Probe sequence
atagtagccatcctaatcgcattga

SEQ ID NO: 22653 - DNA, 25 bp, Probe sequence
tagtagccatcctaatcgcattgaa

SEQ ID NO: 22654 - DNA, 25 bp, Probe sequence
taaggatgtattagatcaaggtggc

SEQ ID NO: 22655 - DNA, 25 bp, Probe sequence
ttgtgtgattgataaggaaggtaat

SEQ ID NO: 22656 - DNA, 25 bp, Probe sequence
attgatatagagcatggtgttgtgt

SEQ ID NO: 22657 - DNA, 25 bp, Probe sequence
gcattagtcatacagatgttgaaga

SEQ ID NO: 22658 - DNA, 25 bp, Probe sequence
ttgatatagagcatggtgttgtgtc

SEQ ID NO: 22659 - DNA, 25 bp, Probe sequence
ttaacaggagaagatggtgaacatg

SEQ ID NO: 22660 - DNA, 25 bp, Probe sequence
aatgacactggcgaattatacaacg

SEQ ID NO: 22661 - DNA, 25 bp, Probe sequence
aatgacttacacgactctgaaatct

SEQ ID NO: 22662 - DNA, 25 bp, Probe sequence
tacacctaaatgacttacacgactc

SEQ ID NO: 22663 - DNA, 25 bp, Probe sequence
cctaaatgacttacacgactctgaa

SEQ ID NO: 22664 - DNA, 25 bp, Probe sequence
ttacacctaaatgacttacacgact

SEQ ID NO: 22665 - DNA, 25 bp, Probe sequence
atgacttacacgactctgaaatctc

SEQ ID NO: 22666 - DNA, 25 bp, Probe sequence
atctcaacaagtggaacatttagtg

SEQ ID NO: 22667 - DNA, 25 bp, Probe sequence
aaatgacttacacgactctgaaatc

SEQ ID NO: 22668 - DNA, 25 bp, Probe sequence
agcattctcatcatggatctcttac

SEQ ID NO: 22669 - DNA, 25 bp, Probe sequence
cagcattctcatcatggatctctta

SEQ ID NO: 22670 - DNA, 25 bp, Probe sequence
atagtcagcattctcatcatggatc

SEQ ID NO: 22671 - DNA, 25 bp, Probe sequence
gatagtcagcattctcatcatggat

SEQ ID NO: 22672 - DNA, 25 bp, Probe sequence
tagatagtcagcattctcatcatgg

SEQ ID NO: 22673 - DNA, 25 bp, Probe sequence
tagtcagcattctcatcatggatct

SEQ ID NO: 22674 - DNA, 25 bp, Probe sequence
tatacgagtatgactggacatgatg

SEQ ID NO: 22675 - DNA, 25 bp, Probe sequence
agatagtcagcattctcatcatgga

SEQ ID NO: 22676 - DNA, 25 bp, Probe sequence
cattctcatcatggatctcttacgc

SEQ ID NO: 22677 - DNA, 25 bp, Probe sequence
attattcggaactgttgaacctgtc

SEQ ID NO: 22678 - DNA, 25 bp, Probe sequence
cattattcggaactgttgaacctgt

SEQ ID NO: 22679 - DNA, 25 bp, Probe sequence
gttatcgcaagcagtctatggttac

SEQ ID NO: 22680 - DNA, 25 bp, Probe sequence
aaggaattatacttgccattgtcgg

SEQ ID NO: 22681 - DNA, 25 bp, Probe sequence
ttatccttcagacctacttaaccgc

SEQ ID NO: 22682 - DNA, 25 bp, Probe sequence
ttatcgcaagcagtctatggttaca

SEQ ID NO: 22683 - DNA, 25 bp, Probe sequence
tatcgcaagcagtctatggttacat

SEQ ID NO: 22684 - DNA, 25 bp, Probe sequence
ggaattatacttgccattgtcggtg

SEQ ID NO: 22685 - DNA, 25 bp, Probe sequence
acattattcggaactgttgaacctg

SEQ ID NO: 22686 - DNA, 25 bp, Probe sequence
ggtggtattagacatcagcaagata

SEQ ID NO: 22687 - DNA, 25 bp, Probe sequence
tagacatcagcaagatattcaacga

SEQ ID NO: 22688 - DNA, 25 bp, Probe sequence
gacatcagcaagatattcaacgatt

SEQ ID NO: 22689 - DNA, 25 bp, Probe sequence
atcagcaagatattcaacgattagc

SEQ ID NO: 22690 - DNA, 25 bp, Probe sequence
agacatcagcaagatattcaacgat

SEQ ID NO: 22691 - DNA, 25 bp, Probe sequence
ttagacatcagcaagatattcaacg

SEQ ID NO: 22692 - DNA, 25 bp, Probe sequence
aatgttcacgctgctattataggaa

SEQ ID NO: 22693 - DNA, 25 bp, Probe sequence
agtcattgaggagattaacaaccaa

SEQ ID NO: 22694 - DNA, 25 bp, Probe sequence
aagtcattgaggagattaacaacca

SEQ ID NO: 22695 - DNA, 25 bp, Probe sequence
tagagaagtgaagagccatagtgaa

SEQ ID NO: 22696 - DNA, 25 bp, Probe sequence
cattaggtgaattggttgattggat

SEQ ID NO: 22697 - DNA, 25 bp, Probe sequence
attaggtgaattggttgattggatt

SEQ ID NO: 22698 - DNA, 25 bp, Probe sequence
ctagagaagtgaagagccatagtga

SEQ ID NO: 22699 - DNA, 25 bp, Probe sequence
taggtgaattggttgattggattaa

SEQ ID NO: 22700 - DNA, 25 bp, Probe sequence
ttaggtgaattggttgattggatta

SEQ ID NO: 22701 - DNA, 25 bp, Probe sequence
cctagagaagtgaagagccatagtg

SEQ ID NO: 22702 - DNA, 25 bp, Probe sequence
aggtgaattggttgattggattaat

SEQ ID NO: 22703 - DNA, 25 bp, Probe sequence
agaagtgaagagccatagtgaaata

SEQ ID NO: 22704 - DNA, 25 bp, Probe sequence
aatgtatgagcatagtgatgaaggc

SEQ ID NO: 22705 - DNA, 25 bp, Probe sequence
ttgtcatcgttgattatggattagg

SEQ ID NO: 22706 - DNA, 25 bp, Probe sequence
tgattgtcatcgttgattatggatt

SEQ ID NO: 22707 - DNA, 25 bp, Probe sequence
taatgtatgagcatagtgatgaagg

SEQ ID NO: 22708 - DNA, 25 bp, Probe sequence
tatgagcatagtgatgaaggcgatg

SEQ ID NO: 22709 - DNA, 25 bp, Probe sequence
gtatgagcatagtgatgaaggcgat

SEQ ID NO: 22710 - DNA, 25 bp, Probe sequence
atgtatgagcatagtgatgaaggcg

SEQ ID NO: 22711 - DNA, 25 bp, Probe sequence
attgtcatcgttgattatggattag

SEQ ID NO: 22712 - DNA, 25 bp, Probe sequence
gattgtcatcgttgattatggatta

SEQ ID NO: 22713 - DNA, 25 bp, Probe sequence
catgccgcagttaattattatagta

SEQ ID NO: 22714 - DNA, 25 bp, Probe sequence
aggcagcacgtaactttaactatat

SEQ ID NO: 22715 - DNA, 25 bp, Probe sequence
ggcagcacgtaactttaactatatt

SEQ ID NO: 22716 - DNA, 25 bp, Probe sequence
aaggcagcacgtaactttaactata

SEQ ID NO: 22717 - DNA, 25 bp, Probe sequence
atgccgcagttaattattatagtaa

SEQ ID NO: 22718 - DNA, 25 bp, Probe sequence
cagaatacaacttttatcgcccatt

SEQ ID NO: 22719 - DNA, 25 bp, Probe sequence
tttcagaatacaacttttatcgccc

SEQ ID NO: 22720 - DNA, 25 bp, Probe sequence
tcagaatacaacttttatcgcccat

SEQ ID NO: 22721 - DNA, 25 bp, Probe sequence
atcgcccattaaaatacaatacacg

SEQ ID NO: 22722 - DNA, 25 bp, Probe sequence
gcaagattaacaacgcatattgatt

SEQ ID NO: 22723 - DNA, 25 bp, Probe sequence
ttaattcgtggaggtaatacacacc

SEQ ID NO: 22724 - DNA, 25 bp, Probe sequence
ttgatacggagttagtagaagaatt

SEQ ID NO: 22725 - DNA, 25 bp, Probe sequence
gcatattgatttaattcgtggaggt

SEQ ID NO: 22726 - DNA, 25 bp, Probe sequence
cgcatattgatttaattcgtggagg

SEQ ID NO: 22727 - DNA, 25 bp, Probe sequence
taattcgtggaggtaatacacacca

SEQ ID NO: 22728 - DNA, 25 bp, Probe sequence
aattcgtggaggtaatacacaccat

SEQ ID NO: 22729 - DNA, 25 bp, Probe sequence
cagtcaccatcgcatattaatacag

SEQ ID NO: 22730 - DNA, 25 bp, Probe sequence
agtcaccatcgcatattaatacagg

SEQ ID NO: 22731 - DNA, 25 bp, Probe sequence
ttattcagttatggctcaggttcag

SEQ ID NO: 22732 - DNA, 25 bp, Probe sequence
tattcagttatggctcaggttcagt

SEQ ID NO: 22733 - DNA, 25 bp, Probe sequence
gtatggtaattgtggcaactgaatc

SEQ ID NO: 22734 - DNA, 25 bp, Probe sequence
tatggtaattgtggcaactgaatca

SEQ ID NO: 22735 - DNA, 25 bp, Probe sequence
aaccgtactgaagtatctgttgatg

SEQ ID NO: 22736 - DNA, 25 bp, Probe sequence
taaccgtactgaagtatctgttgat

SEQ ID NO: 22737 - DNA, 25 bp, Probe sequence
ataaccgtactgaagtatctgttga

SEQ ID NO: 22738 - DNA, 25 bp, Probe sequence
tgctaaggacattataacagacgaa

SEQ ID NO: 22739 - DNA, 25 bp, Probe sequence
tgaagatgctgtagattataaccgt

SEQ ID NO: 22740 - DNA, 25 bp, Probe sequence
gtctattattagtgcaacgccatat

SEQ ID NO: 22741 - DNA, 25 bp, Probe sequence
atgagtaatccacataacccttcag

SEQ ID NO: 22742 - DNA, 25 bp, Probe sequence
taacagctattgcagataagatgaa

SEQ ID NO: 22743 - DNA, 25 bp, Probe sequence
ttaacagctattgcagataagatga

SEQ ID NO: 22744 - DNA, 25 bp, Probe sequence
tctattattagtgcaacgccatata

SEQ ID NO: 22745 - DNA, 25 bp, Probe sequence
tgagtaatccacataacccttcagg

SEQ ID NO: 22746 - DNA, 25 bp, Probe sequence
tatatcctgatgcagcatatgaaca

SEQ ID NO: 22747 - DNA, 25 bp, Probe sequence
tatcctgatgcagcatatgaacaat

SEQ ID NO: 22748 - DNA, 25 bp, Probe sequence
atatcctgatgcagcatatgaacaa

SEQ ID NO: 22749 - DNA, 25 bp, Probe sequence
atggtcaaggtaatgtcatcaactt

SEQ ID NO: 22750 - DNA, 25 bp, Probe sequence
gtggatatagatgttgaggataacg

SEQ ID NO: 22751 - DNA, 25 bp, Probe sequence
tggatatagatgttgaggataacga

SEQ ID NO: 22752 - DNA, 25 bp, Probe sequence
agatgttgaggataacgaattagtc

SEQ ID NO: 22753 - DNA, 25 bp, Probe sequence
aatgattggtacaactgctggttat

SEQ ID NO: 22754 - DNA, 25 bp, Probe sequence
atgattggtacaactgctggttatg

SEQ ID NO: 22755 - DNA, 25 bp, Probe sequence
ggatatagatgttgaggataacgaa

SEQ ID NO: 22756 - DNA, 25 bp, Probe sequence
tgtggatatagatgttgaggataac

SEQ ID NO: 22757 - DNA, 25 bp, Probe sequence
tgcgaaagattggttaattgaagaa

SEQ ID NO: 22758 - DNA, 25 bp, Probe sequence
aagttgataagattgtaggtccagg

SEQ ID NO: 22759 - DNA, 25 bp, Probe sequence
atcgctaatcaacactaccttatcc

SEQ ID NO: 22760 - DNA, 25 bp, Probe sequence
cgctaatcaacactaccttatccat

SEQ ID NO: 22761 - DNA, 25 bp, Probe sequence
tcaacagttagaagaatcagtggag

SEQ ID NO: 22762 - DNA, 25 bp, Probe sequence
atcaacagttagaagaatcagtgga

SEQ ID NO: 22763 - DNA, 25 bp, Probe sequence
aacagttagaagaatcagtggagtg

SEQ ID NO: 22764 - DNA, 25 bp, Probe sequence
caacagttagaagaatcagtggagt

SEQ ID NO: 22765 - DNA, 25 bp, Probe sequence
aatcaacagttagaagaatcagtgg

SEQ ID NO: 22766 - DNA, 25 bp, Probe sequence
attagaagcaccattagatgagtca

SEQ ID NO: 22767 - DNA, 25 bp, Probe sequence
caacgagttatgttcatactgctga

SEQ ID NO: 22768 - DNA, 25 bp, Probe sequence
gagaacgccaattattattaagtgt

SEQ ID NO: 22769 - DNA, 25 bp, Probe sequence
agagaacgccaattattattaagtg

SEQ ID NO: 22770 - DNA, 25 bp, Probe sequence
ggaggtgtctattgccaatgcttaa

SEQ ID NO: 22771 - DNA, 25 bp, Probe sequence
aatcgcaacgagttatgttcatact

SEQ ID NO: 22772 - DNA, 25 bp, Probe sequence
atcgcaacgagttatgttcatactg

SEQ ID NO: 22773 - DNA, 25 bp, Probe sequence
aacgccaattattattaagtgtaga

SEQ ID NO: 22774 - DNA, 25 bp, Probe sequence
agaacgccaattattattaagtgta

SEQ ID NO: 22775 - DNA, 25 bp, Probe sequence
tgccaatctatgtggaacaaggaat

SEQ ID NO: 22776 - DNA, 25 bp, Probe sequence
ttagaaacaagaaacaaccctgaac

SEQ ID NO: 22777 - DNA, 25 bp, Probe sequence
tagaaacaagaaacaaccctgaact

SEQ ID NO: 22778 - DNA, 25 bp, Probe sequence
tttagaaacaagaaacaaccctgaa

SEQ ID NO: 22779 - DNA, 25 bp, Probe sequence
atttagaaacaagaaacaaccctga

SEQ ID NO: 22780 - DNA, 25 bp, Probe sequence
agaaacaagaaacaaccctgaactg

SEQ ID NO: 22781 - DNA, 25 bp, Probe sequence
aatttagaaacaagaaacaaccctg

SEQ ID NO: 22782 - DNA, 25 bp, Probe sequence
gaaacaagaaacaaccctgaactgt

SEQ ID NO: 22783 - DNA, 25 bp, Probe sequence
gtaatttagaaacaagaaacaaccc

SEQ ID NO: 22784 - DNA, 25 bp, Probe sequence
taatttagaaacaagaaacaaccct

SEQ ID NO: 22785 - DNA, 25 bp, Probe sequence
tgagaatattaattacaggcacagt

SEQ ID NO: 22786 - DNA, 25 bp, Probe sequence
gcgaaagaatttaacccatctgatt

SEQ ID NO: 22787 - DNA, 25 bp, Probe sequence
tgcgaaagaatttaacccatctgat

SEQ ID NO: 22788 - DNA, 25 bp, Probe sequence
atgcgaaagaatttaacccatctga

SEQ ID NO: 22789 - DNA, 25 bp, Probe sequence
tttacatgcgaaagaatttaaccca

SEQ ID NO: 22790 - DNA, 25 bp, Probe sequence
agaatattaattacaggcacagttg

SEQ ID NO: 22791 - DNA, 25 bp, Probe sequence
tacatgcgaaagaatttaacccatc

SEQ ID NO: 22792 - DNA, 25 bp, Probe sequence
ttacatgcgaaagaatttaacccat

SEQ ID NO: 22793 - DNA, 25 bp, Probe sequence
ttacaggcacagttgctatcttaat

SEQ ID NO: 22794 - DNA, 25 bp, Probe sequence
tgcgttattactcaatgtatccaac

SEQ ID NO: 22795 - DNA, 25 bp, Probe sequence
gcgttattactcaatgtatccaact

SEQ ID NO: 22796 - DNA, 25 bp, Probe sequence
ttgcgttattactcaatgtatccaa

SEQ ID NO: 22797 - DNA, 25 bp, Probe sequence
gttattactcaatgtatccaactgc

SEQ ID NO: 22798 - DNA, 25 bp, Probe sequence
acaccagacatactatcaatgattg

SEQ ID NO: 22799 - DNA, 25 bp, Probe sequence
cgttattactcaatgtatccaactg

SEQ ID NO: 22800 - DNA, 25 bp, Probe sequence
cagccacctagatcctattacacag

SEQ ID NO: 22801 - DNA, 25 bp, Probe sequence
aacaccagacatactatcaatgatt

SEQ ID NO: 22802 - DNA, 25 bp, Probe sequence
acactatattccaaatgaccatcca

SEQ ID NO: 22803 - DNA, 25 bp, Probe sequence
cggattaacttatctagcatggtca

SEQ ID NO: 22804 - DNA, 25 bp, Probe sequence
acggattaacttatctagcatggtc

SEQ ID NO: 22805 - DNA, 25 bp, Probe sequence
aacggattaacttatctagcatggt

SEQ ID NO: 22806 - DNA, 25 bp, Probe sequence
tggtcatatgcacatcaagagttaa

SEQ ID NO: 22807 - DNA, 25 bp, Probe sequence
atggtcatatgcacatcaagagtta

SEQ ID NO: 22808 - DNA, 25 bp, Probe sequence
aaacggattaacttatctagcatgg

SEQ ID NO: 22809 - DNA, 25 bp, Probe sequence
catggtcatatgcacatcaagagtt

SEQ ID NO: 22810 - DNA, 25 bp, Probe sequence
ggtcatatgcacatcaagagttaaa

SEQ ID NO: 22811 - DNA, 25 bp, Probe sequence
aaaacggattaacttatctagcatg

SEQ ID NO: 22812 - DNA, 25 bp, Probe sequence
tatcgttgttggtatcgcactatta

SEQ ID NO: 22813 - DNA, 25 bp, Probe sequence
atattactattcttggtggcgactt

SEQ ID NO: 22814 - DNA, 25 bp, Probe sequence
gatattactattcttggtggcgact

SEQ ID NO: 22815 - DNA, 25 bp, Probe sequence
ctgatattactattcttggtggcga

SEQ ID NO: 22816 - DNA, 25 bp, Probe sequence
tgatattactattcttggtggcgac

SEQ ID NO: 22817 - DNA, 25 bp, Probe sequence
tattactattcttggtggcgacttg

SEQ ID NO: 22818 - DNA, 25 bp, Probe sequence
atcgttgttggtatcgcactattaa

SEQ ID NO: 22819 - DNA, 25 bp, Probe sequence
ctatcgttgttggtatcgcactatt

SEQ ID NO: 22820 - DNA, 25 bp, Probe sequence
cctgttgagaagaatgttgatgata

SEQ ID NO: 22821 - DNA, 25 bp, Probe sequence
tgctacttattctgatgacaatgat

SEQ ID NO: 22822 - DNA, 25 bp, Probe sequence
atgctacttattctgatgacaatga

SEQ ID NO: 22823 - DNA, 25 bp, Probe sequence
ggcaacaatgattggatgattactg

SEQ ID NO: 22824 - DNA, 25 bp, Probe sequence
gcaacaatgattggatgattactgt

SEQ ID NO: 22825 - DNA, 25 bp, Probe sequence
cacaggatagacatacacaagcgta

SEQ ID NO: 22826 - DNA, 25 bp, Probe sequence
acaggatagacatacacaagcgtat

SEQ ID NO: 22827 - DNA, 25 bp, Probe sequence
tgattggatgattactgtaagtgaa

SEQ ID NO: 22828 - DNA, 25 bp, Probe sequence
ttacaggagatacacaccaagctaa

SEQ ID NO: 22829 - DNA, 25 bp, Probe sequence
catgctacttattctgatgacaatg

SEQ ID NO: 22830 - DNA, 25 bp, Probe sequence
tggtcaagtaagtgttcaatatgat

SEQ ID NO: 22831 - DNA, 25 bp, Probe sequence
atggtcaagtaagtgttcaatatga

SEQ ID NO: 22832 - DNA, 25 bp, Probe sequence
aatggtcaagtaagtgttcaatatg

SEQ ID NO: 22833 - DNA, 25 bp, Probe sequence
ggtcaagtaagtgttcaatatgatg

SEQ ID NO: 22834 - DNA, 25 bp, Probe sequence
agtaagtgttcaatatgatgacagt

SEQ ID NO: 22835 - DNA, 25 bp, Probe sequence
ctgtatctcaaatgaaagacgcaat

SEQ ID NO: 22836 - DNA, 25 bp, Probe sequence
tgtatctcaaatgaaagacgcaatt

SEQ ID NO: 22837 - DNA, 25 bp, Probe sequence
agttgctgtatctcaaatgaaagac

SEQ ID NO: 22838 - DNA, 25 bp, Probe sequence
tcaagtaagtgttcaatatgatgac

SEQ ID NO: 22839 - DNA, 25 bp, Probe sequence
ggacgacattatcaatcaaggagat

SEQ ID NO: 22840 - DNA, 25 bp, Probe sequence
atggacgacattatcaatcaaggag

SEQ ID NO: 22841 - DNA, 25 bp, Probe sequence
tggacgacattatcaatcaaggaga

SEQ ID NO: 22842 - DNA, 25 bp, Probe sequence
gacgacattatcaatcaaggagata

SEQ ID NO: 22843 - DNA, 25 bp, Probe sequence
actcccaaaggtttacataattcca

SEQ ID NO: 22844 - DNA, 25 bp, Probe sequence
cactcccaaaggtttacataattcc

SEQ ID NO: 22845 - DNA, 25 bp, Probe sequence
gattccaagttcctcgcatttaatt

SEQ ID NO: 22846 - DNA, 25 bp, Probe sequence
aatttaatgattccaagttcctcgc

SEQ ID NO: 22847 - DNA, 25 bp, Probe sequence
acgacattatcaatcaaggagatat

SEQ ID NO: 22848 - DNA, 25 bp, Probe sequence
atcataaaggacaaggacactcaaa

SEQ ID NO: 22849 - DNA, 25 bp, Probe sequence
aatcataaaggacaaggacactcaa

SEQ ID NO: 22850 - DNA, 25 bp, Probe sequence
aaatcataaaggacaaggacactca

SEQ ID NO: 22851 - DNA, 25 bp, Probe sequence
aggtgatattattgcatattcaggc

SEQ ID NO: 22852 - DNA, 25 bp, Probe sequence
ggagaatatcaccagtggtatctac

SEQ ID NO: 22853 - DNA, 25 bp, Probe sequence
tggagaatatcaccagtggtatcta

SEQ ID NO: 22854 - DNA, 25 bp, Probe sequence
aatggagaatatcaccagtggtatc

SEQ ID NO: 22855 - DNA, 25 bp, Probe sequence
atggagaatatcaccagtggtatct

SEQ ID NO: 22856 - DNA, 25 bp, Probe sequence
agaatatcaccagtggtatctacac

SEQ ID NO: 22857 - DNA, 25 bp, Probe sequence
gatacacactcgttcaataggcaac

SEQ ID NO: 22858 - DNA, 25 bp, Probe sequence
tcacggagactttgctatttactat

SEQ ID NO: 22859 - DNA, 25 bp, Probe sequence
atcacggagactttgctatttacta

SEQ ID NO: 22860 - DNA, 25 bp, Probe sequence
tatcacggagactttgctatttact

SEQ ID NO: 22861 - DNA, 25 bp, Probe sequence
cacggagactttgctatttactatc

SEQ ID NO: 22862 - DNA, 25 bp, Probe sequence
gaaacacaatttatcacggagactt

SEQ ID NO: 22863 - DNA, 25 bp, Probe sequence
aagaaacacaatttatcacggagac

SEQ ID NO: 22864 - DNA, 25 bp, Probe sequence
agaaacacaatttatcacggagact

SEQ ID NO: 22865 - DNA, 25 bp, Probe sequence
actatcctgtagaatctgctctaat

SEQ ID NO: 22866 - DNA, 25 bp, Probe sequence
agaaagacattcaaatgcttaccaa

SEQ ID NO: 22867 - DNA, 25 bp, Probe sequence
aagaaagacattcaaatgcttacca

SEQ ID NO: 22868 - DNA, 25 bp, Probe sequence
gaagaaagacattcaaatgcttacc

SEQ ID NO: 22869 - DNA, 25 bp, Probe sequence
gaaagacattcaaatgcttaccaaa

SEQ ID NO: 22870 - DNA, 25 bp, Probe sequence
aaggtacattatttgttaggagcgt

SEQ ID NO: 22871 - DNA, 25 bp, Probe sequence
aggtacattatttgttaggagcgta

SEQ ID NO: 22872 - DNA, 25 bp, Probe sequence
aaaggtacattatttgttaggagcg

SEQ ID NO: 22873 - DNA, 25 bp, Probe sequence
agaagaaagacattcaaatgcttac

SEQ ID NO: 22874 - DNA, 25 bp, Probe sequence
ggtacattatttgttaggagcgtat

SEQ ID NO: 22875 - DNA, 25 bp, Probe sequence
ggagttaagacaattcggacagtat

SEQ ID NO: 22876 - DNA, 25 bp, Probe sequence
tatggagttaagacaattcggacag

SEQ ID NO: 22877 - DNA, 25 bp, Probe sequence
ctatggagttaagacaattcggaca

SEQ ID NO: 22878 - DNA, 25 bp, Probe sequence
acaagcaagaggatatgataattcg

SEQ ID NO: 22879 - DNA, 25 bp, Probe sequence
acgctaacatcacaggaattattct

SEQ ID NO: 22880 - DNA, 25 bp, Probe sequence
tggagttaagacaattcggacagta

SEQ ID NO: 22881 - DNA, 25 bp, Probe sequence
ttacgctaacatcacaggaattatt

SEQ ID NO: 22882 - DNA, 25 bp, Probe sequence
gctatggagttaagacaattcggac

SEQ ID NO: 22883 - DNA, 25 bp, Probe sequence
ctgctatggagttaagacaattcgg

SEQ ID NO: 22884 - DNA, 25 bp, Probe sequence
aacgatgtaagtgttctgaggataa

SEQ ID NO: 22885 - DNA, 25 bp, Probe sequence
cgctacaagatagttgatacaagga

SEQ ID NO: 22886 - DNA, 25 bp, Probe sequence
tcgctacaagatagttgatacaagg

SEQ ID NO: 22887 - DNA, 25 bp, Probe sequence
gcattcgctacaagatagttgatac

SEQ ID NO: 22888 - DNA, 25 bp, Probe sequence
gttaatggcattcgctacaagatag

SEQ ID NO: 22889 - DNA, 25 bp, Probe sequence
taatggcattcgctacaagatagtt

SEQ ID NO: 22890 - DNA, 25 bp, Probe sequence
ttaatggcattcgctacaagatagt

SEQ ID NO: 22891 - DNA, 25 bp, Probe sequence
ggcattcgctacaagatagttgata

SEQ ID NO: 22892 - DNA, 25 bp, Probe sequence
gttgatacaaggatatacagacacg

SEQ ID NO: 22893 - DNA, 25 bp, Probe sequence
aagaagacctcctagactacacatt

SEQ ID NO: 22894 - DNA, 25 bp, Probe sequence
tagatccaagaatcgttagaaccaa

SEQ ID NO: 22895 - DNA, 25 bp, Probe sequence
atagatccaagaatcgttagaacca

SEQ ID NO: 22896 - DNA, 25 bp, Probe sequence
catagatccaagaatcgttagaacc

SEQ ID NO: 22897 - DNA, 25 bp, Probe sequence
ccatagatccaagaatcgttagaac

SEQ ID NO: 22898 - DNA, 25 bp, Probe sequence
tccatagatccaagaatcgttagaa

SEQ ID NO: 22899 - DNA, 25 bp, Probe sequence
atccatagatccaagaatcgttaga

SEQ ID NO: 22900 - DNA, 25 bp, Probe sequence
aatccatagatccaagaatcgttag

SEQ ID NO: 22901 - DNA, 25 bp, Probe sequence
cattacattggtttaacacgagtca

SEQ ID NO: 22902 - DNA, 25 bp, Probe sequence
atagtcaagcaacacctacattaca

SEQ ID NO: 22903 - DNA, 25 bp, Probe sequence
atcatagtcaagcaacacctacatt

SEQ ID NO: 22904 - DNA, 25 bp, Probe sequence
catagtcaagcaacacctacattac

SEQ ID NO: 22905 - DNA, 25 bp, Probe sequence
tcatagtcaagcaacacctacatta

SEQ ID NO: 22906 - DNA, 25 bp, Probe sequence
tcaatatcatagtcaagcaacacct

SEQ ID NO: 22907 - DNA, 25 bp, Probe sequence
tagtcaagcaacacctacattacag

SEQ ID NO: 22908 - DNA, 25 bp, Probe sequence
tatcatagtcaagcaacacctacat

SEQ ID NO: 22909 - DNA, 25 bp, Probe sequence
ttacaagatacagatggacagttca

SEQ ID NO: 22910 - DNA, 25 bp, Probe sequence
atatcatagtcaagcaacacctaca

SEQ ID NO: 22911 - DNA, 25 bp, Probe sequence
gctaacaaggtttatacacaaggtg

SEQ ID NO: 22912 - DNA, 25 bp, Probe sequence
ttattgcgaatattatttgctgggc

SEQ ID NO: 22913 - DNA, 25 bp, Probe sequence
cacttattgcaccaacattagatat

SEQ ID NO: 22914 - DNA, 25 bp, Probe sequence
attattgcgaatattatttgctggg

SEQ ID NO: 22915 - DNA, 25 bp, Probe sequence
gcacttattgcaccaacattagata

SEQ ID NO: 22916 - DNA, 25 bp, Probe sequence
ttttagggcgttttgttgtaatacc

SEQ ID NO: 22917 - DNA, 25 bp, Probe sequence
cttttgctggtttaatgactggatt

SEQ ID NO: 22918 - DNA, 25 bp, Probe sequence
acttattgcaccaacattagatatt

SEQ ID NO: 22919 - DNA, 25 bp, Probe sequence
tttagggcgttttgttgtaatacca

SEQ ID NO: 22920 - DNA, 25 bp, Probe sequence
cttcgccaacaatacggttatattc

SEQ ID NO: 22921 - DNA, 25 bp, Probe sequence
atcttcgccaacaatacggttatat

SEQ ID NO: 22922 - DNA, 25 bp, Probe sequence
tcttcgccaacaatacggttatatt

SEQ ID NO: 22923 - DNA, 25 bp, Probe sequence
tcgccaacaatacggttatattcaa

SEQ ID NO: 22924 - DNA, 25 bp, Probe sequence
ttcgccaacaatacggttatattca

SEQ ID NO: 22925 - DNA, 25 bp, Probe sequence
gatcttcgccaacaatacggttata

SEQ ID NO: 22926 - DNA, 25 bp, Probe sequence
cgccaacaatacggttatattcaaa

SEQ ID NO: 22927 - DNA, 25 bp, Probe sequence
tgatcttcgccaacaatacggttat

SEQ ID NO: 22928 - DNA, 25 bp, Probe sequence
atgatcttcgccaacaatacggtta

SEQ ID NO: 22929 - DNA, 25 bp, Probe sequence
gcttgcttaacatattcaggtcatt

SEQ ID NO: 22930 - DNA, 25 bp, Probe sequence
attgcttgcttaacatattcaggtc

SEQ ID NO: 22931 - DNA, 25 bp, Probe sequence
cattgcttgcttaacatattcaggt

SEQ ID NO: 22932 - DNA, 25 bp, Probe sequence
tgcttgcttaacatattcaggtcat

SEQ ID NO: 22933 - DNA, 25 bp, Probe sequence
ttgcttgcttaacatattcaggtca

SEQ ID NO: 22934 - DNA, 25 bp, Probe sequence
tgcttaacatattcaggtcattaca

SEQ ID NO: 22935 - DNA, 25 bp, Probe sequence
tgttgatagtattgaggcattagaa

SEQ ID NO: 22936 - DNA, 25 bp, Probe sequence
atgttgatagtattgaggcattaga

SEQ ID NO: 22937 - DNA, 25 bp, Probe sequence
ttgcttaacatattcaggtcattac

SEQ ID NO: 22938 - DNA, 25 bp, Probe sequence
aggttatgcaagtgtcgttagatta

SEQ ID NO: 22939 - DNA, 25 bp, Probe sequence
ttatgaggttatgcaagtgtcgtta

SEQ ID NO: 22940 - DNA, 25 bp, Probe sequence
ggttatgcaagtgtcgttagattat

SEQ ID NO: 22941 - DNA, 25 bp, Probe sequence
tatgaggttatgcaagtgtcgttag

SEQ ID NO: 22942 - DNA, 25 bp, Probe sequence
taattatgaggttatgcaagtgtcg

SEQ ID NO: 22943 - DNA, 25 bp, Probe sequence
attatgaggttatgcaagtgtcgtt

SEQ ID NO: 22944 - DNA, 25 bp, Probe sequence
aattatgaggttatgcaagtgtcgt

SEQ ID NO: 22945 - DNA, 25 bp, Probe sequence
gaggttatgcaagtgtcgttagatt

SEQ ID NO: 22946 - DNA, 25 bp, Probe sequence
ctaaagaactaggtatcggtatggg

SEQ ID NO: 22947 - DNA, 25 bp, Probe sequence
cttgaagatgatggtgtgacgatac

SEQ ID NO: 22948 - DNA, 25 bp, Probe sequence
acttgaagatgatggtgtgacgata

SEQ ID NO: 22949 - DNA, 25 bp, Probe sequence
tagtgctgttccaattatatctgaa

SEQ ID NO: 22950 - DNA, 25 bp, Probe sequence
gaagatgatggtgtgacgatacaac

SEQ ID NO: 22951 - DNA, 25 bp, Probe sequence
atagtgctgttccaattatatctga

SEQ ID NO: 22952 - DNA, 25 bp, Probe sequence
tgaagatgatggtgtgacgatacaa

SEQ ID NO: 22953 - DNA, 25 bp, Probe sequence
ttgaagatgatggtgtgacgataca

SEQ ID NO: 22954 - DNA, 25 bp, Probe sequence
aatagtgctgttccaattatatctg

SEQ ID NO: 22955 - DNA, 25 bp, Probe sequence
attacatcgcattgcacttgaagat

SEQ ID NO: 22956 - DNA, 25 bp, Probe sequence
atcaagccaatcattcaattagcaa

SEQ ID NO: 22957 - DNA, 25 bp, Probe sequence
tcaagccaatcattcaattagcaac

SEQ ID NO: 22958 - DNA, 25 bp, Probe sequence
tattgttcgtctaaatcggcagtaa

SEQ ID NO: 22959 - DNA, 25 bp, Probe sequence
ttattgttcgtctaaatcggcagta

SEQ ID NO: 22960 - DNA, 25 bp, Probe sequence
cgtatcaagtggtttaggttcattt

SEQ ID NO: 22961 - DNA, 25 bp, Probe sequence
cctcgtgacgttgaagaagtatatc

SEQ ID NO: 22962 - DNA, 25 bp, Probe sequence
caagtggtttaggttcatttggaat

SEQ ID NO: 22963 - DNA, 25 bp, Probe sequence
ctcgtgacgttgaagaagtatatca

SEQ ID NO: 22964 - DNA, 25 bp, Probe sequence
cttattgttcgtctaaatcggcagt

SEQ ID NO: 22965 - DNA, 25 bp, Probe sequence
agcagaagtagaagagttattggaa

SEQ ID NO: 22966 - DNA, 25 bp, Probe sequence
aagcagaagtagaagagttattgga

SEQ ID NO: 22967 - DNA, 25 bp, Probe sequence
gcagaagtagaagagttattggaag

SEQ ID NO: 22968 - DNA, 25 bp, Probe sequence
gaagcagaagtagaagagttattgg

SEQ ID NO: 22969 - DNA, 25 bp, Probe sequence
gaagtagaagagttattggaagagc

SEQ ID NO: 22970 - DNA, 25 bp, Probe sequence
taatacaccgattaagtcaatggct

SEQ ID NO: 22971 - DNA, 25 bp, Probe sequence
tgaagcagaagtagaagagttattg

SEQ ID NO: 22972 - DNA, 25 bp, Probe sequence
gttgtcattggtatgctgattctac

SEQ ID NO: 22973 - DNA, 25 bp, Probe sequence
tgttgtcattggtatgctgattcta

SEQ ID NO: 22974 - DNA, 25 bp, Probe sequence
aatactatacgattaccgattcagg

SEQ ID NO: 22975 - DNA, 25 bp, Probe sequence
tgtcagtgtcagatcagattatgaa

SEQ ID NO: 22976 - DNA, 25 bp, Probe sequence
atgtcagtgtcagatcagattatga

SEQ ID NO: 22977 - DNA, 25 bp, Probe sequence
tttccagagataagtgagggtagta

SEQ ID NO: 22978 - DNA, 25 bp, Probe sequence
tccagagataagtgagggtagtatt

SEQ ID NO: 22979 - DNA, 25 bp, Probe sequence
ttccagagataagtgagggtagtat

SEQ ID NO: 22980 - DNA, 25 bp, Probe sequence
tactatacgattaccgattcaggtt

SEQ ID NO: 22981 - DNA, 25 bp, Probe sequence
caagagtttccagagataagtgagg

SEQ ID NO: 22982 - DNA, 25 bp, Probe sequence
gaggcggaaatactatacgattacc

SEQ ID NO: 22983 - DNA, 25 bp, Probe sequence
tgctgctgattatccatatattgag

SEQ ID NO: 22984 - DNA, 25 bp, Probe sequence
atgctgctgattatccatatattga

SEQ ID NO: 22985 - DNA, 25 bp, Probe sequence
ctgattatccatatattgagcctga

SEQ ID NO: 22986 - DNA, 25 bp, Probe sequence
aatgccgacgaattatcacatcatg

SEQ ID NO: 22987 - DNA, 25 bp, Probe sequence
tttacaaatgccgacgaattatcac

SEQ ID NO: 22988 - DNA, 25 bp, Probe sequence
ggtgagtttatcccattcttcttag

SEQ ID NO: 22989 - DNA, 25 bp, Probe sequence
ttaacgaagccacagtttgatttag

SEQ ID NO: 22990 - DNA, 25 bp, Probe sequence
tgattatccatatattgagcctgaa

SEQ ID NO: 22991 - DNA, 25 bp, Probe sequence
taacgaagccacagtttgatttagt

SEQ ID NO: 22992 - DNA, 25 bp, Probe sequence
ggcaataccactaatcctattctca

SEQ ID NO: 22993 - DNA, 25 bp, Probe sequence
tacggcaataccactaatcctattc

SEQ ID NO: 22994 - DNA, 25 bp, Probe sequence
ctattacggcaataccactaatcct

SEQ ID NO: 22995 - DNA, 25 bp, Probe sequence
aataccactaatcctattctcagcc

SEQ ID NO: 22996 - DNA, 25 bp, Probe sequence
ttacggcaataccactaatcctatt

SEQ ID NO: 22997 - DNA, 25 bp, Probe sequence
ttattcgcattcatcggtgtattat

SEQ ID NO: 22998 - DNA, 25 bp, Probe sequence
attacggcaataccactaatcctat

SEQ ID NO: 22999 - DNA, 25 bp, Probe sequence
cggcaataccactaatcctattctc

SEQ ID NO: 23000 - DNA, 25 bp, Probe sequence
attcgcattcatcggtgtattatat

SEQ ID NO: 23001 - DNA, 25 bp, Probe sequence
attaggttcaagttcaggttcaatc

SEQ ID NO: 23002 - DNA, 25 bp, Probe sequence
ttaggttcaagttcaggttcaatcg

SEQ ID NO: 23003 - DNA, 25 bp, Probe sequence
aggcggtcacttaggttatattcaa

SEQ ID NO: 23004 - DNA, 25 bp, Probe sequence
ctattgtagatattccaggcggtca

SEQ ID NO: 23005 - DNA, 25 bp, Probe sequence
tattaggttcaagttcaggttcaat

SEQ ID NO: 23006 - DNA, 25 bp, Probe sequence
atattaggttcaagttcaggttcaa

SEQ ID NO: 23007 - DNA, 25 bp, Probe sequence
tattgtagatattccaggcggtcac

SEQ ID NO: 23008 - DNA, 25 bp, Probe sequence
taggttcaagttcaggttcaatcgt

SEQ ID NO: 23009 - DNA, 25 bp, Probe sequence
caggcggtcacttaggttatattca

SEQ ID NO: 23010 - DNA, 25 bp, Probe sequence
gcatttgtattcgtaggtgtcattt

SEQ ID NO: 23011 - DNA, 25 bp, Probe sequence
tcgtaggtgtcatttatgttgtaga

SEQ ID NO: 23012 - DNA, 25 bp, Probe sequence
ttatgttgtagatgcacttgcttaa

SEQ ID NO: 23013 - DNA, 25 bp, Probe sequence
ttcgtaggtgtcatttatgttgtag

SEQ ID NO: 23014 - DNA, 25 bp, Probe sequence
cgtaggtgtcatttatgttgtagat

SEQ ID NO: 23015 - DNA, 25 bp, Probe sequence
taggtgtcatttatgttgtagatgc

SEQ ID NO: 23016 - DNA, 25 bp, Probe sequence
attcgtaggtgtcatttatgttgta

SEQ ID NO: 23017 - DNA, 25 bp, Probe sequence
tattcgtaggtgtcatttatgttgt

SEQ ID NO: 23018 - DNA, 25 bp, Probe sequence
tgtattcgtaggtgtcatttatgtt

SEQ ID NO: 23019 - DNA, 25 bp, Probe sequence
tagcatctatgattgtatgacggtg

SEQ ID NO: 23020 - DNA, 25 bp, Probe sequence
gcatctatgattgtatgacggtgaa

SEQ ID NO: 23021 - DNA, 25 bp, Probe sequence
atagcatctatgattgtatgacggt

SEQ ID NO: 23022 - DNA, 25 bp, Probe sequence
agcatctatgattgtatgacggtga

SEQ ID NO: 23023 - DNA, 25 bp, Probe sequence
tctatgattgtatgacggtgaaagt

SEQ ID NO: 23024 - DNA, 25 bp, Probe sequence
tatagcatctatgattgtatgacgg

SEQ ID NO: 23025 - DNA, 25 bp, Probe sequence
ctatgattgtatgacggtgaaagtt

SEQ ID NO: 23026 - DNA, 25 bp, Probe sequence
tatgattgtatgacggtgaaagttc

SEQ ID NO: 23027 - DNA, 25 bp, Probe sequence
atctatgattgtatgacggtgaaag

SEQ ID NO: 23028 - DNA, 25 bp, Probe sequence
gttggtatcaatgttggtgtgaata

SEQ ID NO: 23029 - DNA, 25 bp, Probe sequence
ttggtatcaatgttggtgtgaataa

SEQ ID NO: 23030 - DNA, 25 bp, Probe sequence
tgttggtatcaatgttggtgtgaat

SEQ ID NO: 23031 - DNA, 25 bp, Probe sequence
ctattaccagcgattactgagacat

SEQ ID NO: 23032 - DNA, 25 bp, Probe sequence
tattaccagcgattactgagacatt

SEQ ID NO: 23033 - DNA, 25 bp, Probe sequence
cactattaccagcgattactgagac

SEQ ID NO: 23034 - DNA, 25 bp, Probe sequence
ctgttggtatcaatgttggtgtgaa

SEQ ID NO: 23035 - DNA, 25 bp, Probe sequence
actattaccagcgattactgagaca

SEQ ID NO: 23036 - DNA, 25 bp, Probe sequence
taattataggtacaggcggcgtatt

SEQ ID NO: 23037 - DNA, 25 bp, Probe sequence
aggatacgcttagatattgatgttc

SEQ ID NO: 23038 - DNA, 25 bp, Probe sequence
ggatacgcttagatattgatgttct

SEQ ID NO: 23039 - DNA, 25 bp, Probe sequence
atacgcttagatattgatgttctca

SEQ ID NO: 23040 - DNA, 25 bp, Probe sequence
taggatacgcttagatattgatgtt

SEQ ID NO: 23041 - DNA, 25 bp, Probe sequence
gatacgcttagatattgatgttctc

SEQ ID NO: 23042 - DNA, 25 bp, Probe sequence
aggtttagtggagccatttattgta

SEQ ID NO: 23043 - DNA, 25 bp, Probe sequence
ataggatacgcttagatattgatgt

SEQ ID NO: 23044 - DNA, 25 bp, Probe sequence
aaaggtttagtggagccatttattg

SEQ ID NO: 23045 - DNA, 25 bp, Probe sequence
aaggtttagtggagccatttattgt

SEQ ID NO: 23046 - DNA, 25 bp, Probe sequence
ttgaatctgaagtagttgtatccga

SEQ ID NO: 23047 - DNA, 25 bp, Probe sequence
ggattaactgagtatcttggtcgta

SEQ ID NO: 23048 - DNA, 25 bp, Probe sequence
taggattaactgagtatcttggtcg

SEQ ID NO: 23049 - DNA, 25 bp, Probe sequence
aggattaactgagtatcttggtcgt

SEQ ID NO: 23050 - DNA, 25 bp, Probe sequence
tcaccagcaatgaatatgttgaatg

SEQ ID NO: 23051 - DNA, 25 bp, Probe sequence
ctcaccagcaatgaatatgttgaat

SEQ ID NO: 23052 - DNA, 25 bp, Probe sequence
actagagtctatcacatctggagat

SEQ ID NO: 23053 - DNA, 25 bp, Probe sequence
cgaacgacaagattacactagcatt

SEQ ID NO: 23054 - DNA, 25 bp, Probe sequence
gattaactgagtatcttggtcgtaa

SEQ ID NO: 23055 - DNA, 25 bp, Probe sequence
tgaactgtatagagtgataggtgtt

SEQ ID NO: 23056 - DNA, 25 bp, Probe sequence
atgaactgtatagagtgataggtgt

SEQ ID NO: 23057 - DNA, 25 bp, Probe sequence
tatcagcaattacaacaataagcaa

SEQ ID NO: 23058 - DNA, 25 bp, Probe sequence
agtagaggaacagtggtatatgtaa

SEQ ID NO: 23059 - DNA, 25 bp, Probe sequence
gattctgatcctactggaacgataa

SEQ ID NO: 23060 - DNA, 25 bp, Probe sequence
atatcagcaattacaacaataagca

SEQ ID NO: 23061 - DNA, 25 bp, Probe sequence
tgattctgatcctactggaacgata

SEQ ID NO: 23062 - DNA, 25 bp, Probe sequence
aatgaactgtatagagtgataggtg

SEQ ID NO: 23063 - DNA, 25 bp, Probe sequence
caagcacaaagggaaagatacatac

SEQ ID NO: 23064 - DNA, 25 bp, Probe sequence
gacaacaaagacacacagcaacaaa

SEQ ID NO: 23065 - DNA, 25 bp, Probe sequence
gacttctgacaacaaagacacacag

SEQ ID NO: 23066 - DNA, 25 bp, Probe sequence
tgaaaacaggagaaaatgaaacgaa

SEQ ID NO: 23067 - DNA, 25 bp, Probe sequence
atgaaaacaggagaaaatgaaacga

SEQ ID NO: 23068 - DNA, 25 bp, Probe sequence
cgtgaaatgatgaaaacaggagaaa

SEQ ID NO: 23069 - DNA, 25 bp, Probe sequence
gatgaaaacaggagaaaatgaaacg

SEQ ID NO: 23070 - DNA, 25 bp, Probe sequence
agtagcgacttctgacaacaaagac

SEQ ID NO: 23071 - DNA, 25 bp, Probe sequence
tagcgacttctgacaacaaagacac

SEQ ID NO: 23072 - DNA, 25 bp, Probe sequence
gtagcgacttctgacaacaaagaca

SEQ ID NO: 23073 - DNA, 25 bp, Probe sequence
tgggacctttagttgtttattggaa

SEQ ID NO: 23074 - DNA, 25 bp, Probe sequence
atgggacctttagttgtttattgga

SEQ ID NO: 23075 - DNA, 25 bp, Probe sequence
aatgggacctttagttgtttattgg

SEQ ID NO: 23076 - DNA, 25 bp, Probe sequence
gggacctttagttgtttattggaat

SEQ ID NO: 23077 - DNA, 25 bp, Probe sequence
gttgtttattggaattggacttggg

SEQ ID NO: 23078 - DNA, 25 bp, Probe sequence
tatagggaacgagatggttattcac

SEQ ID NO: 23079 - DNA, 25 bp, Probe sequence
agttgtttattggaattggacttgg

SEQ ID NO: 23080 - DNA, 25 bp, Probe sequence
atagggaacgagatggttattcaca

SEQ ID NO: 23081 - DNA, 25 bp, Probe sequence
tagggaacgagatggttattcacaa

SEQ ID NO: 23082 - DNA, 25 bp, Probe sequence
actttctttcatagcatttgttggt

SEQ ID NO: 23083 - DNA, 25 bp, Probe sequence
ctttctttcatagcatttgttggtg

SEQ ID NO: 23084 - DNA, 25 bp, Probe sequence
tagttgtttattggaattgggcttg

SEQ ID NO: 23085 - DNA, 25 bp, Probe sequence
gttggtgcaatcattcttatagctt

SEQ ID NO: 23086 - DNA, 25 bp, Probe sequence
ttgttggtgcaatcattcttatagc

SEQ ID NO: 23087 - DNA, 25 bp, Probe sequence
ttagttgtttattggaattgggctt

SEQ ID NO: 23088 - DNA, 25 bp, Probe sequence
tttagttgtttattggaattgggct

SEQ ID NO: 23089 - DNA, 25 bp, Probe sequence
ctttagttgtttattggaattgggc

SEQ ID NO: 23090 - DNA, 25 bp, Probe sequence
caggacctttagttgtttattggaa

SEQ ID NO: 23091 - DNA, 25 bp, Probe sequence
aatcaacgcacgctacaaataaaat

SEQ ID NO: 23092 - DNA, 25 bp, Probe sequence
aaatcaacgcacgctacaaataaaa

SEQ ID NO: 23093 - DNA, 25 bp, Probe sequence
aaaatcaacgcacgctacaaataaa

SEQ ID NO: 23094 - DNA, 25 bp, Probe sequence
atcaacgcacgctacaaataaaatt

SEQ ID NO: 23095 - DNA, 25 bp, Probe sequence
tcagttggttcactagcggtgttaa

SEQ ID NO: 23096 - DNA, 25 bp, Probe sequence
gtcagttggttcactagcggtgtta

SEQ ID NO: 23097 - DNA, 25 bp, Probe sequence
tcaacgcacgctacaaataaaattt

SEQ ID NO: 23098 - DNA, 25 bp, Probe sequence
cagttggttcactagcggtgttaac

SEQ ID NO: 23099 - DNA, 25 bp, Probe sequence
ttaacaattacggaaattgcatttc

SEQ ID NO: 23100 - DNA, 25 bp, Probe sequence
gttaacaattacggaaattgcattt

SEQ ID NO: 23101 - DNA, 25 bp, Probe sequence
tgttacatggtcaagactatactgc

SEQ ID NO: 23102 - DNA, 25 bp, Probe sequence
ttggatgttacatggtcaagactat

SEQ ID NO: 23103 - DNA, 25 bp, Probe sequence
gttggatgttacatggtcaagacta

SEQ ID NO: 23104 - DNA, 25 bp, Probe sequence
tggatgttacatggtcaagactata

SEQ ID NO: 23105 - DNA, 25 bp, Probe sequence
ggatgttacatggtcaagactatac

SEQ ID NO: 23106 - DNA, 25 bp, Probe sequence
tcaagactatactgcaatccaacaa

SEQ ID NO: 23107 - DNA, 25 bp, Probe sequence
ttacatggtcaagactatactgcaa

SEQ ID NO: 23108 - DNA, 25 bp, Probe sequence
gttacatggtcaagactatactgca

SEQ ID NO: 23109 - DNA, 25 bp, Probe sequence
atgttacatggtcaagactatactg

SEQ ID NO: 23110 - DNA, 25 bp, Probe sequence
ttgtatctgtaacactaccttggaa

SEQ ID NO: 23111 - DNA, 25 bp, Probe sequence
attgtatctgtaacactaccttgga

SEQ ID NO: 23112 - DNA, 25 bp, Probe sequence
tattgtatctgtaacactaccttgg

SEQ ID NO: 23113 - DNA, 25 bp, Probe sequence
tggaaagaatttggcggtatatttg

SEQ ID NO: 23114 - DNA, 25 bp, Probe sequence
ttggaaagaatttggcggtatattt

SEQ ID NO: 23115 - DNA, 25 bp, Probe sequence
cttggaaagaatttggcggtatatt

SEQ ID NO: 23116 - DNA, 25 bp, Probe sequence
tctgtaacactaccttggaaagaat

SEQ ID NO: 23117 - DNA, 25 bp, Probe sequence
atctgtaacactaccttggaaagaa

SEQ ID NO: 23118 - DNA, 25 bp, Probe sequence
taacactaccttggaaagaatttgg

SEQ ID NO: 23119 - DNA, 25 bp, Probe sequence
aagagaagcggaagattattacgaa

SEQ ID NO: 23120 - DNA, 25 bp, Probe sequence
gcggaagattattacgaagtgattg

SEQ ID NO: 23121 - DNA, 25 bp, Probe sequence
agcggaagattattacgaagtgatt

SEQ ID NO: 23122 - DNA, 25 bp, Probe sequence
aagcggaagattattacgaagtgat

SEQ ID NO: 23123 - DNA, 25 bp, Probe sequence
tcgcacaatatgactctgaagataa

SEQ ID NO: 23124 - DNA, 25 bp, Probe sequence
agagaagcggaagattattacgaag

SEQ ID NO: 23125 - DNA, 25 bp, Probe sequence
gagaagcggaagattattacgaagt

SEQ ID NO: 23126 - DNA, 25 bp, Probe sequence
cggaagattattacgaagtgattga

SEQ ID NO: 23127 - DNA, 25 bp, Probe sequence
gaagcggaagattattacgaagtga

SEQ ID NO: 23128 - DNA, 25 bp, Probe sequence
tgataaggtaggtggtaagttagga

SEQ ID NO: 23129 - DNA, 25 bp, Probe sequence
gctgataaggtaggtggtaagttag

SEQ ID NO: 23130 - DNA, 25 bp, Probe sequence
ctgataaggtaggtggtaagttagg

SEQ ID NO: 23131 - DNA, 25 bp, Probe sequence
tattgctgataaggtaggtggtaag

SEQ ID NO: 23132 - DNA, 25 bp, Probe sequence
ataaggtaggtggtaagttaggagg

SEQ ID NO: 23133 - DNA, 25 bp, Probe sequence
gataaggtaggtggtaagttaggag

SEQ ID NO: 23134 - DNA, 25 bp, Probe sequence
ggtaggtggtaagttaggaggtatt

SEQ ID NO: 23135 - DNA, 25 bp, Probe sequence
tgctgataaggtaggtggtaagtta

SEQ ID NO: 23136 - DNA, 25 bp, Probe sequence
attgctgataaggtaggtggtaagt

SEQ ID NO: 23137 - DNA, 25 bp, Probe sequence
gttgttacgcacttcagagattatc

SEQ ID NO: 23138 - DNA, 25 bp, Probe sequence
tgttacgcacttcagagattatcaa

SEQ ID NO: 23139 - DNA, 25 bp, Probe sequence
ttgttacgcacttcagagattatca

SEQ ID NO: 23140 - DNA, 25 bp, Probe sequence
tgttgttacgcacttcagagattat

SEQ ID NO: 23141 - DNA, 25 bp, Probe sequence
atgttgttacgcacttcagagatta

SEQ ID NO: 23142 - DNA, 25 bp, Probe sequence
gttacgcacttcagagattatcaat

SEQ ID NO: 23143 - DNA, 25 bp, Probe sequence
cgcacttcagagattatcaattacg

SEQ ID NO: 23144 - DNA, 25 bp, Probe sequence
acgcacttcagagattatcaattac

SEQ ID NO: 23145 - DNA, 25 bp, Probe sequence
tattactagatggttgtcgtgttgc

SEQ ID NO: 23146 - DNA, 25 bp, Probe sequence
tgttgtaagaccgattgaagaagat

SEQ ID NO: 23147 - DNA, 25 bp, Probe sequence
cctattgttgtaagaccgattgaag

SEQ ID NO: 23148 - DNA, 25 bp, Probe sequence
ttgttgtaagaccgattgaagaaga

SEQ ID NO: 23149 - DNA, 25 bp, Probe sequence
attgttgtaagaccgattgaagaag

SEQ ID NO: 23150 - DNA, 25 bp, Probe sequence
ttcgtgatatggatgatgaagagac

SEQ ID NO: 23151 - DNA, 25 bp, Probe sequence
attcgtgatatggatgatgaagaga

SEQ ID NO: 23152 - DNA, 25 bp, Probe sequence
ctattgttgtaagaccgattgaaga

SEQ ID NO: 23153 - DNA, 25 bp, Probe sequence
gttgtaagaccgattgaagaagata

SEQ ID NO: 23154 - DNA, 25 bp, Probe sequence
tattgttgtaagaccgattgaagaa

SEQ ID NO: 23155 - DNA, 25 bp, Probe sequence
tatcattcttactcgctgctattgt

SEQ ID NO: 23156 - DNA, 25 bp, Probe sequence
atcattcttactcgctgctattgtt

SEQ ID NO: 23157 - DNA, 25 bp, Probe sequence
ttatcattcttactcgctgctattg

SEQ ID NO: 23158 - DNA, 25 bp, Probe sequence
gttatcattcttactcgctgctatt

SEQ ID NO: 23159 - DNA, 25 bp, Probe sequence
cgttatcattcttactcgctgctat

SEQ ID NO: 23160 - DNA, 25 bp, Probe sequence
tcattcttactcgctgctattgttg

SEQ ID NO: 23161 - DNA, 25 bp, Probe sequence
ttaattggtatgatgttagcaggct

SEQ ID NO: 23162 - DNA, 25 bp, Probe sequence
taattggtatgatgttagcaggctc

SEQ ID NO: 23163 - DNA, 25 bp, Probe sequence
tagcacttgtgttagttggtatgtt

SEQ ID NO: 23164 - DNA, 25 bp, Probe sequence
tgacaagtattacagatgaacacga

SEQ ID NO: 23165 - DNA, 25 bp, Probe sequence
aggtgaagaagaattagaagaagca

SEQ ID NO: 23166 - DNA, 25 bp, Probe sequence
acaagtattacagatgaacacgatg

SEQ ID NO: 23167 - DNA, 25 bp, Probe sequence
ttgacaagtattacagatgaacacg

SEQ ID NO: 23168 - DNA, 25 bp, Probe sequence
tagcgtcagaattacaattacagga

SEQ ID NO: 23169 - DNA, 25 bp, Probe sequence
gcgtcagaattacaattacaggatg

SEQ ID NO: 23170 - DNA, 25 bp, Probe sequence
agcgtcagaattacaattacaggat

SEQ ID NO: 23171 - DNA, 25 bp, Probe sequence
gacaagtattacagatgaacacgat

SEQ ID NO: 23172 - DNA, 25 bp, Probe sequence
ggtgaagaagaattagaagaagcaa

SEQ ID NO: 23173 - DNA, 25 bp, Probe sequence
tctaattccttctgacaatacacca

SEQ ID NO: 23174 - DNA, 25 bp, Probe sequence
ctaattccttctgacaatacaccat

SEQ ID NO: 23175 - DNA, 25 bp, Probe sequence
ttaatggcgttagtcatacctagaa

SEQ ID NO: 23176 - DNA, 25 bp, Probe sequence
ttctaattccttctgacaatacacc

SEQ ID NO: 23177 - DNA, 25 bp, Probe sequence
atggcgttagtcatacctagaataa

SEQ ID NO: 23178 - DNA, 25 bp, Probe sequence
aatggcgttagtcatacctagaata

SEQ ID NO: 23179 - DNA, 25 bp, Probe sequence
taatggcgttagtcatacctagaat

SEQ ID NO: 23180 - DNA, 25 bp, Probe sequence
ttagtgtgacagaattaatcggttg

SEQ ID NO: 23181 - DNA, 25 bp, Probe sequence
tagtgtgacagaattaatcggttgg

SEQ ID NO: 23182 - DNA, 25 bp, Probe sequence
tatgatgtaatcgttataggtgcgg

SEQ ID NO: 23183 - DNA, 25 bp, Probe sequence
gcaaggtatggtagacgaacttatt

SEQ ID NO: 23184 - DNA, 25 bp, Probe sequence
atcaccaattaccatcaatcacatt

SEQ ID NO: 23185 - DNA, 25 bp, Probe sequence
aatcaccaattaccatcaatcacat

SEQ ID NO: 23186 - DNA, 25 bp, Probe sequence
atatgatgtaatcgttataggtgcg

SEQ ID NO: 23187 - DNA, 25 bp, Probe sequence
accatcaatcacattatcagacaat

SEQ ID NO: 23188 - DNA, 25 bp, Probe sequence
gacaaggattgatggcaggtattaa

SEQ ID NO: 23189 - DNA, 25 bp, Probe sequence
ttcttagagcctgaaggtcgtaata

SEQ ID NO: 23190 - DNA, 25 bp, Probe sequence
ttagagcctgaaggtcgtaatacaa

SEQ ID NO: 23191 - DNA, 25 bp, Probe sequence
aatgttccaacttgttcacgatatg

SEQ ID NO: 23192 - DNA, 25 bp, Probe sequence
tattatcaggtggttacagcagaga

SEQ ID NO: 23193 - DNA, 25 bp, Probe sequence
gtattatcaggtggttacagcagag

SEQ ID NO: 23194 - DNA, 25 bp, Probe sequence
gaatcaatctacgacgcatctgtaa

SEQ ID NO: 23195 - DNA, 25 bp, Probe sequence
cttcaccttcattctcaccagataa

SEQ ID NO: 23196 - DNA, 25 bp, Probe sequence
gtaacttcaccttcattctcaccag

SEQ ID NO: 23197 - DNA, 25 bp, Probe sequence
attatcaggtggttacagcagagaa

SEQ ID NO: 23198 - DNA, 25 bp, Probe sequence
acttcaccttcattctcaccagata

SEQ ID NO: 23199 - DNA, 25 bp, Probe sequence
taacttcaccttcattctcaccaga

SEQ ID NO: 23200 - DNA, 25 bp, Probe sequence
cctgaatacgatgatgttgaagatg

SEQ ID NO: 23201 - DNA, 25 bp, Probe sequence
tcctgaatacgatgatgttgaagat

SEQ ID NO: 23202 - DNA, 25 bp, Probe sequence
ctgaatacgatgatgttgaagatgc

SEQ ID NO: 23203 - DNA, 25 bp, Probe sequence
tagtagagaagattggtgttgaacg

SEQ ID NO: 23204 - DNA, 25 bp, Probe sequence
atcctgaatacgatgatgttgaaga

SEQ ID NO: 23205 - DNA, 25 bp, Probe sequence
gcgtgccattaagattagttgatac

SEQ ID NO: 23206 - DNA, 25 bp, Probe sequence
tgaagaagttatggtgtctgtgtta

SEQ ID NO: 23207 - DNA, 25 bp, Probe sequence
atgttgaagatgcgactactgaatt

SEQ ID NO: 23208 - DNA, 25 bp, Probe sequence
gatgttgaagatgcgactactgaat

SEQ ID NO: 23209 - DNA, 25 bp, Probe sequence
aagtacataagtcgcatatattggc

SEQ ID NO: 23210 - DNA, 25 bp, Probe sequence
attattgtaatagcaagacagccag

SEQ ID NO: 23211 - DNA, 25 bp, Probe sequence
ttattgtaatagcaagacagccagc

SEQ ID NO: 23212 - DNA, 25 bp, Probe sequence
atacagaatagtcttgagcacgtac

SEQ ID NO: 23213 - DNA, 25 bp, Probe sequence
tattattgtaatagcaagacagcca

SEQ ID NO: 23214 - DNA, 25 bp, Probe sequence
aatacagaatagtcttgagcacgta

SEQ ID NO: 23215 - DNA, 25 bp, Probe sequence
cagaatagtcttgagcacgtactta

SEQ ID NO: 23216 - DNA, 25 bp, Probe sequence
caaatacagaatagtcttgagcacg

SEQ ID NO: 23217 - DNA, 25 bp, Probe sequence
agaatagtcttgagcacgtacttaa

SEQ ID NO: 23218 - DNA, 25 bp, Probe sequence
agaacaaacagcaacaattagaaca

SEQ ID NO: 23219 - DNA, 25 bp, Probe sequence
ctcagaacaaacagcaacaattaga

SEQ ID NO: 23220 - DNA, 25 bp, Probe sequence
tctcagaacaaacagcaacaattag

SEQ ID NO: 23221 - DNA, 25 bp, Probe sequence
caaatgagcaaaccaagtatgagtg

SEQ ID NO: 23222 - DNA, 25 bp, Probe sequence
cagaacaaacagcaacaattagaac

SEQ ID NO: 23223 - DNA, 25 bp, Probe sequence
tcagaacaaacagcaacaattagaa

SEQ ID NO: 23224 - DNA, 25 bp, Probe sequence
aacagcaacaattagaacaagcaaa

SEQ ID NO: 23225 - DNA, 25 bp, Probe sequence
aaacagcaacaattagaacaagcaa

SEQ ID NO: 23226 - DNA, 25 bp, Probe sequence
aacaaacagcaacaattagaacaag

SEQ ID NO: 23227 - DNA, 25 bp, Probe sequence
acatagtaaagttcatggtttcaga

SEQ ID NO: 23228 - DNA, 25 bp, Probe sequence
cgtaaacatagtaaagttcatggtt

SEQ ID NO: 23229 - DNA, 25 bp, Probe sequence
aacatagtaaagttcatggtttcag

SEQ ID NO: 23230 - DNA, 25 bp, Probe sequence
acgtaaacatagtaaagttcatggt

SEQ ID NO: 23231 - DNA, 25 bp, Probe sequence
catagtaaagttcatggtttcagaa

SEQ ID NO: 23232 - DNA, 25 bp, Probe sequence
aacgtaaacatagtaaagttcatgg

SEQ ID NO: 23233 - DNA, 25 bp, Probe sequence
tcaaccaaataaacgtaaacatagt

SEQ ID NO: 23234 - DNA, 25 bp, Probe sequence
atagtaaagttcatggtttcagaaa

SEQ ID NO: 23235 - DNA, 25 bp, Probe sequence
aaacatagtaaagttcatggtttca

SEQ ID NO: 23236 - DNA, 25 bp, Probe sequence
gccaatccacaatatacaattcact

SEQ ID NO: 23237 - DNA, 25 bp, Probe sequence
agccaatccacaatatacaattcac

SEQ ID NO: 23238 - DNA, 25 bp, Probe sequence
acaagccaatccacaatatacaatt

SEQ ID NO: 23239 - DNA, 25 bp, Probe sequence
aagccaatccacaatatacaattca

SEQ ID NO: 23240 - DNA, 25 bp, Probe sequence
ttacaagccaatccacaatatacaa

SEQ ID NO: 23241 - DNA, 25 bp, Probe sequence
caagccaatccacaatatacaattc

SEQ ID NO: 23242 - DNA, 25 bp, Probe sequence
tacaagccaatccacaatatacaat

SEQ ID NO: 23243 - DNA, 25 bp, Probe sequence
gcaagaaatcacaagactaacacaa

SEQ ID NO: 23244 - DNA, 25 bp, Probe sequence
tatcgcaagaaatcacaagactaac

SEQ ID NO: 23245 - DNA, 25 bp, Probe sequence
tagatgaggcgacgaatgatataac

SEQ ID NO: 23246 - DNA, 25 bp, Probe sequence
gttagatgaggcgacgaatgatata

SEQ ID NO: 23247 - DNA, 25 bp, Probe sequence
ttagatgaggcgacgaatgatataa

SEQ ID NO: 23248 - DNA, 25 bp, Probe sequence
agcgatgaattatgacaataagcaa

SEQ ID NO: 23249 - DNA, 25 bp, Probe sequence
aagcgatgaattatgacaataagca

SEQ ID NO: 23250 - DNA, 25 bp, Probe sequence
aatactggaagtgcctatctacaag

SEQ ID NO: 23251 - DNA, 25 bp, Probe sequence
taatactggaagtgcctatctacaa

SEQ ID NO: 23252 - DNA, 25 bp, Probe sequence
ataatactggaagtgcctatctaca

SEQ ID NO: 23253 - DNA, 25 bp, Probe sequence
atgataatactggaagtgcctatct

SEQ ID NO: 23254 - DNA, 25 bp, Probe sequence
aaatactggacccttcaatcatcaa

SEQ ID NO: 23255 - DNA, 25 bp, Probe sequence
tggacccttcaatcatcaagataat

SEQ ID NO: 23256 - DNA, 25 bp, Probe sequence
ctggacccttcaatcatcaagataa

SEQ ID NO: 23257 - DNA, 25 bp, Probe sequence
aatactggacccttcaatcatcaag

SEQ ID NO: 23258 - DNA, 25 bp, Probe sequence
actggacccttcaatcatcaagata

SEQ ID NO: 23259 - DNA, 25 bp, Probe sequence
tactggacccttcaatcatcaagat

SEQ ID NO: 23260 - DNA, 25 bp, Probe sequence
atactggacccttcaatcatcaaga

SEQ ID NO: 23261 - DNA, 25 bp, Probe sequence
ggacccttcaatcatcaagataatt

SEQ ID NO: 23262 - DNA, 25 bp, Probe sequence
gacccttcaatcatcaagataattt

SEQ ID NO: 23263 - DNA, 25 bp, Probe sequence
agttgctaaccttattatcgtgtca

SEQ ID NO: 23264 - DNA, 25 bp, Probe sequence
cagttgctaaccttattatcgtgtc

SEQ ID NO: 23265 - DNA, 25 bp, Probe sequence
ttgctaaccttattatcgtgtcaac

SEQ ID NO: 23266 - DNA, 25 bp, Probe sequence
gttgctaaccttattatcgtgtcaa

SEQ ID NO: 23267 - DNA, 25 bp, Probe sequence
atgacgccattcaatatgctaagaa

SEQ ID NO: 23268 - DNA, 25 bp, Probe sequence
gatgacgccattcaatatgctaaga

SEQ ID NO: 23269 - DNA, 25 bp, Probe sequence
cataagacatataatggtgccatcg

SEQ ID NO: 23270 - DNA, 25 bp, Probe sequence
ataagacatataatggtgccatcgg

SEQ ID NO: 23271 - DNA, 25 bp, Probe sequence
gcagttgctaaccttattatcgtgt

SEQ ID NO: 23272 - DNA, 25 bp, Probe sequence
aataatcaacaacagaacacaccac

SEQ ID NO: 23273 - DNA, 25 bp, Probe sequence
actaatgacaatcaaccatcttcac

SEQ ID NO: 23274 - DNA, 25 bp, Probe sequence
ataatcaacaacagaacacaccacc

SEQ ID NO: 23275 - DNA, 25 bp, Probe sequence
ttatcgtattaatcggagcacttgg

SEQ ID NO: 23276 - DNA, 25 bp, Probe sequence
taatcaacaacagaacacaccacct

SEQ ID NO: 23277 - DNA, 25 bp, Probe sequence
tactaatgacaatcaaccatcttca

SEQ ID NO: 23278 - DNA, 25 bp, Probe sequence
attatcgtattaatcggagcacttg

SEQ ID NO: 23279 - DNA, 25 bp, Probe sequence
cgtaattatcgtattaatcggagca

SEQ ID NO: 23280 - DNA, 25 bp, Probe sequence
catcatcaagtaataaccaagaaca

SEQ ID NO: 23281 - DNA, 25 bp, Probe sequence
ttatctatggcgtatcaactgctaa

SEQ ID NO: 23282 - DNA, 25 bp, Probe sequence
actgatatagagatgagcgaagatg

SEQ ID NO: 23283 - DNA, 25 bp, Probe sequence
tatctatggcgtatcaactgctaat

SEQ ID NO: 23284 - DNA, 25 bp, Probe sequence
attatctatggcgtatcaactgcta

SEQ ID NO: 23285 - DNA, 25 bp, Probe sequence
tattatctatggcgtatcaactgct

SEQ ID NO: 23286 - DNA, 25 bp, Probe sequence
ctgatatagagatgagcgaagatga

SEQ ID NO: 23287 - DNA, 25 bp, Probe sequence
atctatggcgtatcaactgctaatg

SEQ ID NO: 23288 - DNA, 25 bp, Probe sequence
tgatatagagatgagcgaagatgaa

SEQ ID NO: 23289 - DNA, 25 bp, Probe sequence
ttattatctatggcgtatcaactgc

SEQ ID NO: 23290 - DNA, 25 bp, Probe sequence
ataatccgagaggtctaattcaacg

SEQ ID NO: 23291 - DNA, 25 bp, Probe sequence
ttggtattactgaaggtgctattcc

SEQ ID NO: 23292 - DNA, 25 bp, Probe sequence
catcggtcgttgtaggattgatatt

SEQ ID NO: 23293 - DNA, 25 bp, Probe sequence
cataatccgagaggtctaattcaac

SEQ ID NO: 23294 - DNA, 25 bp, Probe sequence
tcataatccgagaggtctaattcaa

SEQ ID NO: 23295 - DNA, 25 bp, Probe sequence
ttcataatccgagaggtctaattca

SEQ ID NO: 23296 - DNA, 25 bp, Probe sequence
atatatcgctgttagtatcgctgac

SEQ ID NO: 23297 - DNA, 25 bp, Probe sequence
ttatcgtagttggtggactccttat

SEQ ID NO: 23298 - DNA, 25 bp, Probe sequence
gtggctgtattaggtggtattgatc

SEQ ID NO: 23299 - DNA, 25 bp, Probe sequence
tgactaggagagaattagaatacct

SEQ ID NO: 23300 - DNA, 25 bp, Probe sequence
atgactaggagagaattagaatacc

SEQ ID NO: 23301 - DNA, 25 bp, Probe sequence
gactaggagagaattagaatacctt

SEQ ID NO: 23302 - DNA, 25 bp, Probe sequence
tgatatgactaggagagaattagaa

SEQ ID NO: 23303 - DNA, 25 bp, Probe sequence
ttgatatgactaggagagaattaga

SEQ ID NO: 23304 - DNA, 25 bp, Probe sequence
aacaattgatatgactaggagagaa

SEQ ID NO: 23305 - DNA, 25 bp, Probe sequence
acaattgatatgactaggagagaat

SEQ ID NO: 23306 - DNA, 25 bp, Probe sequence
attgatatgactaggagagaattag

SEQ ID NO: 23307 - DNA, 25 bp, Probe sequence
actaggagagaattagaatacctta

SEQ ID NO: 23308 - DNA, 25 bp, Probe sequence
aaatccagaattaaatgtcctacca

SEQ ID NO: 23309 - DNA, 25 bp, Probe sequence
aatccagaattaaatgtcctaccat

SEQ ID NO: 23310 - DNA, 25 bp, Probe sequence
ccagaattaaatgtcctaccattgg

SEQ ID NO: 23311 - DNA, 25 bp, Probe sequence
cagaattaaatgtcctaccattgga

SEQ ID NO: 23312 - DNA, 25 bp, Probe sequence
tccagaattaaatgtcctaccattg

SEQ ID NO: 23313 - DNA, 25 bp, Probe sequence
ggctatggcttgaaaattggattaa

SEQ ID NO: 23314 - DNA, 25 bp, Probe sequence
aggctatggcttgaaaattggatta

SEQ ID NO: 23315 - DNA, 25 bp, Probe sequence
taggctatggcttgaaaattggatt

SEQ ID NO: 23316 - DNA, 25 bp, Probe sequence
ttaggctatggcttgaaaattggat

SEQ ID NO: 23317 - DNA, 25 bp, Probe sequence
actactcctataacaactcacatcg

SEQ ID NO: 23318 - DNA, 25 bp, Probe sequence
aaccacatgcttattgcttagttac

SEQ ID NO: 23319 - DNA, 25 bp, Probe sequence
acaattatcaatggtccatacaagg

SEQ ID NO: 23320 - DNA, 25 bp, Probe sequence
tactcctataacaactcacatcgac

SEQ ID NO: 23321 - DNA, 25 bp, Probe sequence
ctactcctataacaactcacatcga

SEQ ID NO: 23322 - DNA, 25 bp, Probe sequence
tggtcctaatacaattatcaatggt

SEQ ID NO: 23323 - DNA, 25 bp, Probe sequence
ctataacaactcacatcgacacaca

SEQ ID NO: 23324 - DNA, 25 bp, Probe sequence
tagtgctatagtaagtcatcctgga

SEQ ID NO: 23325 - DNA, 25 bp, Probe sequence
ctcctataacaactcacatcgacac

SEQ ID NO: 23326 - DNA, 25 bp, Probe sequence
acagcacttcagactctaacaatat

SEQ ID NO: 23327 - DNA, 25 bp, Probe sequence
gacagcacttcagactctaacaata

SEQ ID NO: 23328 - DNA, 25 bp, Probe sequence
agcacttcagactctaacaatatca

SEQ ID NO: 23329 - DNA, 25 bp, Probe sequence
cagcacttcagactctaacaatatc

SEQ ID NO: 23330 - DNA, 25 bp, Probe sequence
ctgctcaatcattcaataacgatgt

SEQ ID NO: 23331 - DNA, 25 bp, Probe sequence
acctgctcaatcattcaataacgat

SEQ ID NO: 23332 - DNA, 25 bp, Probe sequence
aacctgctcaatcattcaataacga

SEQ ID NO: 23333 - DNA, 25 bp, Probe sequence
cctgctcaatcattcaataacgatg

SEQ ID NO: 23334 - DNA, 25 bp, Probe sequence
tgctcaatcattcaataacgatgtt

SEQ ID NO: 23335 - DNA, 25 bp, Probe sequence
aagggtatgattgaactgtttgaac

SEQ ID NO: 23336 - DNA, 25 bp, Probe sequence
ataccaagccagtaaacctaaattg

SEQ ID NO: 23337 - DNA, 25 bp, Probe sequence
taagggtatgattgaactgtttgaa

SEQ ID NO: 23338 - DNA, 25 bp, Probe sequence
gaagataagggtatgattgaactgt

SEQ ID NO: 23339 - DNA, 25 bp, Probe sequence
gcaagaagataagggtatgattgaa

SEQ ID NO: 23340 - DNA, 25 bp, Probe sequence
ctataccaagccagtaaacctaaat

SEQ ID NO: 23341 - DNA, 25 bp, Probe sequence
ataagggtatgattgaactgtttga

SEQ ID NO: 23342 - DNA, 25 bp, Probe sequence
agaagataagggtatgattgaactg

SEQ ID NO: 23343 - DNA, 25 bp, Probe sequence
gataagggtatgattgaactgtttg

SEQ ID NO: 23344 - DNA, 25 bp, Probe sequence
atgattatgtaatgtgcttggatgc

SEQ ID NO: 23345 - DNA, 25 bp, Probe sequence
atggaagttcagataatacagcaga

SEQ ID NO: 23346 - DNA, 25 bp, Probe sequence
gatggaagttcagataatacagcag

SEQ ID NO: 23347 - DNA, 25 bp, Probe sequence
tggaagttcagataatacagcagaa

SEQ ID NO: 23348 - DNA, 25 bp, Probe sequence
attattaacgcagcagtagttcttg

SEQ ID NO: 23349 - DNA, 25 bp, Probe sequence
gattattaacgcagcagtagttctt

SEQ ID NO: 23350 - DNA, 25 bp, Probe sequence
ttattaacgcagcagtagttcttgt

SEQ ID NO: 23351 - DNA, 25 bp, Probe sequence
gtggatgaattagaaggcattacat

SEQ ID NO: 23352 - DNA, 25 bp, Probe sequence
atgtggatgaattagaaggcattac

SEQ ID NO: 23353 - DNA, 25 bp, Probe sequence
gcggcattattatctgttatacctg

SEQ ID NO: 23354 - DNA, 25 bp, Probe sequence
agcggcattattatctgttatacct

SEQ ID NO: 23355 - DNA, 25 bp, Probe sequence
cggcattattatctgttatacctgg

SEQ ID NO: 23356 - DNA, 25 bp, Probe sequence
ggacagtacctaagttagacgattc

SEQ ID NO: 23357 - DNA, 25 bp, Probe sequence
tagcggcattattatctgttatacc

SEQ ID NO: 23358 - DNA, 25 bp, Probe sequence
ccatacttactaatctcaccaggta

SEQ ID NO: 23359 - DNA, 25 bp, Probe sequence
acttactaatctcaccaggtacatt

SEQ ID NO: 23360 - DNA, 25 bp, Probe sequence
acagtacctaagttagacgattctc

SEQ ID NO: 23361 - DNA, 25 bp, Probe sequence
gacagtacctaagttagacgattct

SEQ ID NO: 23362 - DNA, 25 bp, Probe sequence
agtatcaatacaatacgtgttgctt

SEQ ID NO: 23363 - DNA, 25 bp, Probe sequence
aagtatcaatacaatacgtgttgct

SEQ ID NO: 23364 - DNA, 25 bp, Probe sequence
agttgttctactcgtttatattggt

SEQ ID NO: 23365 - DNA, 25 bp, Probe sequence
tgttctactcgtttatattggtact

SEQ ID NO: 23366 - DNA, 25 bp, Probe sequence
agagaaacagcacttatcgctatat

SEQ ID NO: 23367 - DNA, 25 bp, Probe sequence
aagagaaacagcacttatcgctata

SEQ ID NO: 23368 - DNA, 25 bp, Probe sequence
taagagaaacagcacttatcgctat

SEQ ID NO: 23369 - DNA, 25 bp, Probe sequence
gagaaacagcacttatcgctatatc

SEQ ID NO: 23370 - DNA, 25 bp, Probe sequence
gttgttctactcgtttatattggta

SEQ ID NO: 23371 - DNA, 25 bp, Probe sequence
actccgaactccaatgattattaca

SEQ ID NO: 23372 - DNA, 25 bp, Probe sequence
cactccgaactccaatgattattac

SEQ ID NO: 23373 - DNA, 25 bp, Probe sequence
cctatccttatggcttgatgaatga

SEQ ID NO: 23374 - DNA, 25 bp, Probe sequence
ccttatggcttgatgaatgacgata

SEQ ID NO: 23375 - DNA, 25 bp, Probe sequence
ctatccttatggcttgatgaatgac

SEQ ID NO: 23376 - DNA, 25 bp, Probe sequence
tatccttatggcttgatgaatgacg

SEQ ID NO: 23377 - DNA, 25 bp, Probe sequence
ccgaactccaatgattattacatcc

SEQ ID NO: 23378 - DNA, 25 bp, Probe sequence
aggaagagaatcgtgaagtatagaa

SEQ ID NO: 23379 - DNA, 25 bp, Probe sequence
cttatggcttgatgaatgacgataa

SEQ ID NO: 23380 - DNA, 25 bp, Probe sequence
agttactgacaaccttgaattacca

SEQ ID NO: 23381 - DNA, 25 bp, Probe sequence
gttactgacaaccttgaattaccaa

SEQ ID NO: 23382 - DNA, 25 bp, Probe sequence
ctattaggtcaatggtatggctatt

SEQ ID NO: 23383 - DNA, 25 bp, Probe sequence
tcctattaggtcaatggtatggcta

SEQ ID NO: 23384 - DNA, 25 bp, Probe sequence
atgtcctattaggtcaatggtatgg

SEQ ID NO: 23385 - DNA, 25 bp, Probe sequence
cctattaggtcaatggtatggctat

SEQ ID NO: 23386 - DNA, 25 bp, Probe sequence
cagttactgacaaccttgaattacc

SEQ ID NO: 23387 - DNA, 25 bp, Probe sequence
atattactttacgaacaacacagcg

SEQ ID NO: 23388 - DNA, 25 bp, Probe sequence
tcacagttactgacaaccttgaatt

SEQ ID NO: 23389 - DNA, 25 bp, Probe sequence
tggagcgtatcataatggaatgtaa

SEQ ID NO: 23390 - DNA, 25 bp, Probe sequence
atggagcgtatcataatggaatgta

SEQ ID NO: 23391 - DNA, 25 bp, Probe sequence
aatggagcgtatcataatggaatgt

SEQ ID NO: 23392 - DNA, 25 bp, Probe sequence
ggagcgtatcataatggaatgtaat

SEQ ID NO: 23393 - DNA, 25 bp, Probe sequence
agcgtatcataatggaatgtaatgt

SEQ ID NO: 23394 - DNA, 25 bp, Probe sequence
gagcgtatcataatggaatgtaatg

SEQ ID NO: 23395 - DNA, 25 bp, Probe sequence
gcgtatcataatggaatgtaatgtt

SEQ ID NO: 23396 - DNA, 25 bp, Probe sequence
aaatggagcgtatcataatggaatg

SEQ ID NO: 23397 - DNA, 25 bp, Probe sequence
ggaatgtaatgtttatatcgtatgc

SEQ ID NO: 23398 - DNA, 25 bp, Probe sequence
gaaggtattaacggcacattatctg

SEQ ID NO: 23399 - DNA, 25 bp, Probe sequence
cagaaggtattaacggcacattatc

SEQ ID NO: 23400 - DNA, 25 bp, Probe sequence
acagaaggtattaacggcacattat

SEQ ID NO: 23401 - DNA, 25 bp, Probe sequence
tacagaaggtattaacggcacatta

SEQ ID NO: 23402 - DNA, 25 bp, Probe sequence
ggtattaacggcacattatctggta

SEQ ID NO: 23403 - DNA, 25 bp, Probe sequence
aaggtattaacggcacattatctgg

SEQ ID NO: 23404 - DNA, 25 bp, Probe sequence
ctacagaaggtattaacggcacatt

SEQ ID NO: 23405 - DNA, 25 bp, Probe sequence
agaaggtattaacggcacattatct

SEQ ID NO: 23406 - DNA, 25 bp, Probe sequence
tattaacggcacattatctggtaca

SEQ ID NO: 23407 - DNA, 25 bp, Probe sequence
cgatacaccatctatgccattagaa

SEQ ID NO: 23408 - DNA, 25 bp, Probe sequence
cgtgtcgccattaatattgatgatg

SEQ ID NO: 23409 - DNA, 25 bp, Probe sequence
gtgtcgccattaatattgatgatgc

SEQ ID NO: 23410 - DNA, 25 bp, Probe sequence
gatgcacgtattccagataatgatg

SEQ ID NO: 23411 - DNA, 25 bp, Probe sequence
gatgatgcacgtattccagataatg

SEQ ID NO: 23412 - DNA, 25 bp, Probe sequence
tgcacgtattccagataatgatgat

SEQ ID NO: 23413 - DNA, 25 bp, Probe sequence
atgcacgtattccagataatgatga

SEQ ID NO: 23414 - DNA, 25 bp, Probe sequence
tgatgcacgtattccagataatgat

SEQ ID NO: 23415 - DNA, 25 bp, Probe sequence
atgatgcacgtattccagataatga

SEQ ID NO: 23416 - DNA, 25 bp, Probe sequence
cctttattcggaaatggttcgtctc

SEQ ID NO: 23417 - DNA, 25 bp, Probe sequence
tagacctttattcggaaatggttcg

SEQ ID NO: 23418 - DNA, 25 bp, Probe sequence
atagacctttattcggaaatggttc

SEQ ID NO: 23419 - DNA, 25 bp, Probe sequence
ctaataccattcattggcaatttgg

SEQ ID NO: 23420 - DNA, 25 bp, Probe sequence
ctttattcggaaatggttcgtctcc

SEQ ID NO: 23421 - DNA, 25 bp, Probe sequence
gaaatggttcgtctccagatgaatg

SEQ ID NO: 23422 - DNA, 25 bp, Probe sequence
tctaataccattcattggcaatttg

SEQ ID NO: 23423 - DNA, 25 bp, Probe sequence
gacctttattcggaaatggttcgtc

SEQ ID NO: 23424 - DNA, 25 bp, Probe sequence
tatagacctttattcggaaatggtt

SEQ ID NO: 23425 - DNA, 25 bp, Probe sequence
ttagcatattctatcgtcggtgtag

SEQ ID NO: 23426 - DNA, 25 bp, Probe sequence
atggtatatgttcgcaatattcgtc

SEQ ID NO: 23427 - DNA, 25 bp, Probe sequence
cagcatggtatatgttcgcaatatt

SEQ ID NO: 23428 - DNA, 25 bp, Probe sequence
catggtatatgttcgcaatattcgt

SEQ ID NO: 23429 - DNA, 25 bp, Probe sequence
agcatggtatatgttcgcaatattc

SEQ ID NO: 23430 - DNA, 25 bp, Probe sequence
acctattagcttcaacaacacacta

SEQ ID NO: 23431 - DNA, 25 bp, Probe sequence
ggtaacctattagcttcaacaacac

SEQ ID NO: 23432 - DNA, 25 bp, Probe sequence
gcatattctatcgtcggtgtagatt

SEQ ID NO: 23433 - DNA, 25 bp, Probe sequence
gcatggtatatgttcgcaatattcg

SEQ ID NO: 23434 - DNA, 25 bp, Probe sequence
tactttaattacaggcatcgtcatg

SEQ ID NO: 23435 - DNA, 25 bp, Probe sequence
ttactttaattacaggcatcgtcat

SEQ ID NO: 23436 - DNA, 25 bp, Probe sequence
attactttaattacaggcatcgtca

SEQ ID NO: 23437 - DNA, 25 bp, Probe sequence
atatttgcaggaatggcgattattt

SEQ ID NO: 23438 - DNA, 25 bp, Probe sequence
aatatttgcaggaatggcgattatt

SEQ ID NO: 23439 - DNA, 25 bp, Probe sequence
caatatttgcaggaatggcgattat

SEQ ID NO: 23440 - DNA, 25 bp, Probe sequence
gcaatgtactttgtaccatttggat

SEQ ID NO: 23441 - DNA, 25 bp, Probe sequence
tattactttaattacaggcatcgtc

SEQ ID NO: 23442 - DNA, 25 bp, Probe sequence
ggcaatgtactttgtaccatttgga

SEQ ID NO: 23443 - DNA, 25 bp, Probe sequence
tgcttatcggtgtgttgaatctaat

SEQ ID NO: 23444 - DNA, 25 bp, Probe sequence
gcttatcggtgtgttgaatctaatt

SEQ ID NO: 23445 - DNA, 25 bp, Probe sequence
gtgcttatcggtgtgttgaatctaa

SEQ ID NO: 23446 - DNA, 25 bp, Probe sequence
ttagtgcttatcggtgtgttgaatc

SEQ ID NO: 23447 - DNA, 25 bp, Probe sequence
caagatattggtggaacgattggta

SEQ ID NO: 23448 - DNA, 25 bp, Probe sequence
aagatattggtggaacgattggtac

SEQ ID NO: 23449 - DNA, 25 bp, Probe sequence
agtgcttatcggtgtgttgaatcta

SEQ ID NO: 23450 - DNA, 25 bp, Probe sequence
tagtgcttatcggtgtgttgaatct

SEQ ID NO: 23451 - DNA, 25 bp, Probe sequence
agatattggtggaacgattggtaca

SEQ ID NO: 23452 - DNA, 25 bp, Probe sequence
tcagttatagattggatatcgagca

SEQ ID NO: 23453 - DNA, 25 bp, Probe sequence
cagttatagattggatatcgagcat

SEQ ID NO: 23454 - DNA, 25 bp, Probe sequence
ctcagttatagattggatatcgagc

SEQ ID NO: 23455 - DNA, 25 bp, Probe sequence
agttatagattggatatcgagcatt

SEQ ID NO: 23456 - DNA, 25 bp, Probe sequence
actcagttatagattggatatcgag

SEQ ID NO: 23457 - DNA, 25 bp, Probe sequence
aactcagttatagattggatatcga

SEQ ID NO: 23458 - DNA, 25 bp, Probe sequence
gttatagattggatatcgagcattt

SEQ ID NO: 23459 - DNA, 25 bp, Probe sequence
taactcagttatagattggatatcg

SEQ ID NO: 23460 - DNA, 25 bp, Probe sequence
actttaactcagttatagattggat

SEQ ID NO: 23461 - DNA, 25 bp, Probe sequence
ttatagattggatatcgagcatttt

SEQ ID NO: 23462 - DNA, 25 bp, Probe sequence
acattatttagaatcactgccatcc

SEQ ID NO: 23463 - DNA, 25 bp, Probe sequence
cattatttagaatcactgccatcct

SEQ ID NO: 23464 - DNA, 25 bp, Probe sequence
atttagaatcactgccatcctcttt

SEQ ID NO: 23465 - DNA, 25 bp, Probe sequence
tatttagaatcactgccatcctctt

SEQ ID NO: 23466 - DNA, 25 bp, Probe sequence
ttatttagaatcactgccatcctct

SEQ ID NO: 23467 - DNA, 25 bp, Probe sequence
attatttagaatcactgccatcctc

SEQ ID NO: 23468 - DNA, 25 bp, Probe sequence
agaacattatttagaatcactgcca

SEQ ID NO: 23469 - DNA, 25 bp, Probe sequence
aacattatttagaatcactgccatc

SEQ ID NO: 23470 - DNA, 25 bp, Probe sequence
gaacattatttagaatcactgccat

SEQ ID NO: 23471 - DNA, 25 bp, Probe sequence
taatggcaatggtcgcaatctatat

SEQ ID NO: 23472 - DNA, 25 bp, Probe sequence
ttaatggcaatggtcgcaatctata

SEQ ID NO: 23473 - DNA, 25 bp, Probe sequence
aatggcaatggtcgcaatctatatt

SEQ ID NO: 23474 - DNA, 25 bp, Probe sequence
cttaatccaggtacgaacttgtatg

SEQ ID NO: 23475 - DNA, 25 bp, Probe sequence
attcacattagcagttggattgttc

SEQ ID NO: 23476 - DNA, 25 bp, Probe sequence
aattcacattagcagttggattgtt

SEQ ID NO: 23477 - DNA, 25 bp, Probe sequence
tcacattagcagttggattgttcaa

SEQ ID NO: 23478 - DNA, 25 bp, Probe sequence
ttcacattagcagttggattgttca

SEQ ID NO: 23479 - DNA, 25 bp, Probe sequence
tattaatggcaatggtcgcaatcta

SEQ ID NO: 23480 - DNA, 25 bp, Probe sequence
tagtgtatatcattggcgttgctat

SEQ ID NO: 23481 - DNA, 25 bp, Probe sequence
ttagtgtatatcattggcgttgcta

SEQ ID NO: 23482 - DNA, 25 bp, Probe sequence
agtgtatatcattggcgttgctatt

SEQ ID NO: 23483 - DNA, 25 bp, Probe sequence
gtgtatatcattggcgttgctattt

SEQ ID NO: 23484 - DNA, 25 bp, Probe sequence
atatcattggcgttgctatttatgg

SEQ ID NO: 23485 - DNA, 25 bp, Probe sequence
tttagtgtatatcattggcgttgct

SEQ ID NO: 23486 - DNA, 25 bp, Probe sequence
tatcattggcgttgctatttatggt

SEQ ID NO: 23487 - DNA, 25 bp, Probe sequence
tgtatatcattggcgttgctattta

SEQ ID NO: 23488 - DNA, 25 bp, Probe sequence
taccttgaaacgattgctacaactt

SEQ ID NO: 23489 - DNA, 25 bp, Probe sequence
aagttcttacaatcactaccgaatg

SEQ ID NO: 23490 - DNA, 25 bp, Probe sequence
agttcttacaatcactaccgaatgt

SEQ ID NO: 23491 - DNA, 25 bp, Probe sequence
gttcttacaatcactaccgaatgtg

SEQ ID NO: 23492 - DNA, 25 bp, Probe sequence
actaccgaatgtgaatgtaagaaac

SEQ ID NO: 23493 - DNA, 25 bp, Probe sequence
taccgaatgtgaatgtaagaaactc

SEQ ID NO: 23494 - DNA, 25 bp, Probe sequence
ctaccgaatgtgaatgtaagaaact

SEQ ID NO: 23495 - DNA, 25 bp, Probe sequence
ccgaatgtgaatgtaagaaactcat

SEQ ID NO: 23496 - DNA, 25 bp, Probe sequence
accgaatgtgaatgtaagaaactca

SEQ ID NO: 23497 - DNA, 25 bp, Probe sequence
aatcttaaagagcgactgaactact

SEQ ID NO: 23498 - DNA, 25 bp, Probe sequence
taggcgtgttactactttcttactc

SEQ ID NO: 23499 - DNA, 25 bp, Probe sequence
gtgttactactttcttactcccgtt

SEQ ID NO: 23500 - DNA, 25 bp, Probe sequence
tgttactactttcttactcccgttt

SEQ ID NO: 23501 - DNA, 25 bp, Probe sequence
ataggcgtgttactactttcttact

SEQ ID NO: 23502 - DNA, 25 bp, Probe sequence
gattaacctgtgtctattctgcatt

SEQ ID NO: 23503 - DNA, 25 bp, Probe sequence
ttagattaacctgtgtctattctgc

SEQ ID NO: 23504 - DNA, 25 bp, Probe sequence
agattaacctgtgtctattctgcat

SEQ ID NO: 23505 - DNA, 25 bp, Probe sequence
aaggttatcaacagatgtcgcctaa

SEQ ID NO: 23506 - DNA, 25 bp, Probe sequence
aatttatttacacaagcgtttgagc

SEQ ID NO: 23507 - DNA, 25 bp, Probe sequence
cattgcctgtgtgttaattccattc

SEQ ID NO: 23508 - DNA, 25 bp, Probe sequence
tgcctgtgtgttaattccattcaat

SEQ ID NO: 23509 - DNA, 25 bp, Probe sequence
attgcctgtgtgttaattccattca

SEQ ID NO: 23510 - DNA, 25 bp, Probe sequence
gcctgtgtgttaattccattcaatt

SEQ ID NO: 23511 - DNA, 25 bp, Probe sequence
catacattgcctgtgtgttaattcc

SEQ ID NO: 23512 - DNA, 25 bp, Probe sequence
tacattgcctgtgtgttaattccat

SEQ ID NO: 23513 - DNA, 25 bp, Probe sequence
atacattgcctgtgtgttaattcca

SEQ ID NO: 23514 - DNA, 25 bp, Probe sequence
ttgcctgtgtgttaattccattcaa

SEQ ID NO: 23515 - DNA, 25 bp, Probe sequence
agatatgtcatacaagaaggtggta

SEQ ID NO: 23516 - DNA, 25 bp, Probe sequence
ttcaatcagtattaggtggtgtctc

SEQ ID NO: 23517 - DNA, 25 bp, Probe sequence
cttcaatcagtattaggtggtgtct

SEQ ID NO: 23518 - DNA, 25 bp, Probe sequence
tcttcaatcagtattaggtggtgtc

SEQ ID NO: 23519 - DNA, 25 bp, Probe sequence
caatcagtattaggtggtgtctcaa

SEQ ID NO: 23520 - DNA, 25 bp, Probe sequence
atcttcaatcagtattaggtggtgt

SEQ ID NO: 23521 - DNA, 25 bp, Probe sequence
acatcttcaatcagtattaggtggt

SEQ ID NO: 23522 - DNA, 25 bp, Probe sequence
catcttcaatcagtattaggtggtg

SEQ ID NO: 23523 - DNA, 25 bp, Probe sequence
tcaatcagtattaggtggtgtctca

SEQ ID NO: 23524 - DNA, 25 bp, Probe sequence
cgaattatctggtggtcaacaacaa

SEQ ID NO: 23525 - DNA, 25 bp, Probe sequence
gcgtattaggtattgctatgattgc

SEQ ID NO: 23526 - DNA, 25 bp, Probe sequence
ggcgtattaggtattgctatgattg

SEQ ID NO: 23527 - DNA, 25 bp, Probe sequence
aggcgtattaggtattgctatgatt

SEQ ID NO: 23528 - DNA, 25 bp, Probe sequence
caggcgtattaggtattgctatgat

SEQ ID NO: 23529 - DNA, 25 bp, Probe sequence
ttcaggcgtattaggtattgctatg

SEQ ID NO: 23530 - DNA, 25 bp, Probe sequence
cactaactatggctatgacatcacc

SEQ ID NO: 23531 - DNA, 25 bp, Probe sequence
gcactaactatggctatgacatcac

SEQ ID NO: 23532 - DNA, 25 bp, Probe sequence
tcaggcgtattaggtattgctatga

SEQ ID NO: 23533 - DNA, 25 bp, Probe sequence
taactatggctatgacatcaccgtt

SEQ ID NO: 23534 - DNA, 25 bp, Probe sequence
ttaactgattcaacaccagctaagt

SEQ ID NO: 23535 - DNA, 25 bp, Probe sequence
gatagccgtttgtaagttacccatt

SEQ ID NO: 23536 - DNA, 25 bp, Probe sequence
atagccgtttgtaagttacccattg

SEQ ID NO: 23537 - DNA, 25 bp, Probe sequence
tgatagccgtttgtaagttacccat

SEQ ID NO: 23538 - DNA, 25 bp, Probe sequence
ttgatagccgtttgtaagttaccca

SEQ ID NO: 23539 - DNA, 25 bp, Probe sequence
gccatctaaactatttgcactttgt

SEQ ID NO: 23540 - DNA, 25 bp, Probe sequence
taactgattcaacaccagctaagtt

SEQ ID NO: 23541 - DNA, 25 bp, Probe sequence
gattcaacaccagctaagtttgtag

SEQ ID NO: 23542 - DNA, 25 bp, Probe sequence
tgattcaacaccagctaagtttgta

SEQ ID NO: 23543 - DNA, 25 bp, Probe sequence
atcaacacaatagataacgcagatg

SEQ ID NO: 23544 - DNA, 25 bp, Probe sequence
agatgcgattgctattggtattaac

SEQ ID NO: 23545 - DNA, 25 bp, Probe sequence
cagatgcgattgctattggtattaa

SEQ ID NO: 23546 - DNA, 25 bp, Probe sequence
gatgcgattgctattggtattaacg

SEQ ID NO: 23547 - DNA, 25 bp, Probe sequence
gcgattgctattggtattaacgaac

SEQ ID NO: 23548 - DNA, 25 bp, Probe sequence
atgcgattgctattggtattaacga

SEQ ID NO: 23549 - DNA, 25 bp, Probe sequence
tgcgattgctattggtattaacgaa

SEQ ID NO: 23550 - DNA, 25 bp, Probe sequence
tcaacacaatagataacgcagatgc

SEQ ID NO: 23551 - DNA, 25 bp, Probe sequence
tatcaacacaatagataacgcagat

SEQ ID NO: 23552 - DNA, 25 bp, Probe sequence
atatcatttctgtcccactccctat

SEQ ID NO: 23553 - DNA, 25 bp, Probe sequence
tatcatttctgtcccactccctatg

SEQ ID NO: 23554 - DNA, 25 bp, Probe sequence
atgcagctatccacttcatatgtat

SEQ ID NO: 23555 - DNA, 25 bp, Probe sequence
tgcagctatccacttcatatgtatg

SEQ ID NO: 23556 - DNA, 25 bp, Probe sequence
ctatgcagctatccacttcatatgt

SEQ ID NO: 23557 - DNA, 25 bp, Probe sequence
tatgcagctatccacttcatatgta

SEQ ID NO: 23558 - DNA, 25 bp, Probe sequence
cctatgcagctatccacttcatatg

SEQ ID NO: 23559 - DNA, 25 bp, Probe sequence
cagctatccacttcatatgtatggc

SEQ ID NO: 23560 - DNA, 25 bp, Probe sequence
gcagctatccacttcatatgtatgg

SEQ ID NO: 23561 - DNA, 25 bp, Probe sequence
ttgaaggagatactattgttggtcg

SEQ ID NO: 23562 - DNA, 25 bp, Probe sequence
ttaggtcgtaaggcaactgatatag

SEQ ID NO: 23563 - DNA, 25 bp, Probe sequence
taggtcgtaaggcaactgatataga

SEQ ID NO: 23564 - DNA, 25 bp, Probe sequence
gaaggagatactattgttggtcgtc

SEQ ID NO: 23565 - DNA, 25 bp, Probe sequence
aggtcgtaaggcaactgatatagaa

SEQ ID NO: 23566 - DNA, 25 bp, Probe sequence
cttgaaggagatactattgttggtc

SEQ ID NO: 23567 - DNA, 25 bp, Probe sequence
tgaaggagatactattgttggtcgt

SEQ ID NO: 23568 - DNA, 25 bp, Probe sequence
tcttgaaggagatactattgttggt

SEQ ID NO: 23569 - DNA, 25 bp, Probe sequence
agatactattgttggtcgtcgtcat

SEQ ID NO: 23570 - DNA, 25 bp, Probe sequence
acatcacaatactgatacacaacaa

SEQ ID NO: 23571 - DNA, 25 bp, Probe sequence
aacatcacaatactgatacacaaca

SEQ ID NO: 23572 - DNA, 25 bp, Probe sequence
tcatgcaccactctcaacaaatata

SEQ ID NO: 23573 - DNA, 25 bp, Probe sequence
catgcaccactctcaacaaatatat

SEQ ID NO: 23574 - DNA, 25 bp, Probe sequence
gtcatgcaccactctcaacaaatat

SEQ ID NO: 23575 - DNA, 25 bp, Probe sequence
caatgaagcaattacgcgatcttac

SEQ ID NO: 23576 - DNA, 25 bp, Probe sequence
tcaatgaagcaattacgcgatctta

SEQ ID NO: 23577 - DNA, 25 bp, Probe sequence
atgaagcaattacgcgatcttacaa

SEQ ID NO: 23578 - DNA, 25 bp, Probe sequence
aatgaagcaattacgcgatcttaca

SEQ ID NO: 23579 - DNA, 25 bp, Probe sequence
tattcgtacatttctcaggtatcgc

SEQ ID NO: 23580 - DNA, 25 bp, Probe sequence
gtattcgtacatttctcaggtatcg

SEQ ID NO: 23581 - DNA, 25 bp, Probe sequence
cgtattcgtacatttctcaggtatc

SEQ ID NO: 23582 - DNA, 25 bp, Probe sequence
ttcgtacatttctcaggtatcgcta

SEQ ID NO: 23583 - DNA, 25 bp, Probe sequence
tcgtacatttctcaggtatcgctag

SEQ ID NO: 23584 - DNA, 25 bp, Probe sequence
attcgtacatttctcaggtatcgct

SEQ ID NO: 23585 - DNA, 25 bp, Probe sequence
ggctacaaaactttagaagaaggtc

SEQ ID NO: 23586 - DNA, 25 bp, Probe sequence
tggctacaaaactttagaagaaggt

SEQ ID NO: 23587 - DNA, 25 bp, Probe sequence
cgatggctacaaaactttagaagaa

SEQ ID NO: 23588 - DNA, 25 bp, Probe sequence
acacgcaattcaataaaatgtctaa

SEQ ID NO: 23589 - DNA, 25 bp, Probe sequence
aacacgcaattcaataaaatgtcta

SEQ ID NO: 23590 - DNA, 25 bp, Probe sequence
taacacgcaattcaataaaatgtct

SEQ ID NO: 23591 - DNA, 25 bp, Probe sequence
cacgcaattcaataaaatgtctaat

SEQ ID NO: 23592 - DNA, 25 bp, Probe sequence
ataacacgcaattcaataaaatgtc

SEQ ID NO: 23593 - DNA, 25 bp, Probe sequence
cgcaattcaataaaatgtctaatca

SEQ ID NO: 23594 - DNA, 25 bp, Probe sequence
acgcaattcaataaaatgtctaatc

SEQ ID NO: 23595 - DNA, 25 bp, Probe sequence
aataacacgcaattcaataaaatgt

SEQ ID NO: 23596 - DNA, 25 bp, Probe sequence
aaatattttagaagccagcgtttgg

SEQ ID NO: 23597 - DNA, 25 bp, Probe sequence
atgaaggtaatgaagtggatgaagc

SEQ ID NO: 23598 - DNA, 25 bp, Probe sequence
tatgaaggtaatgaagtggatgaag

SEQ ID NO: 23599 - DNA, 25 bp, Probe sequence
agatgacacgattgatgttatccat

SEQ ID NO: 23600 - DNA, 25 bp, Probe sequence
aagatgacacgattgatgttatcca

SEQ ID NO: 23601 - DNA, 25 bp, Probe sequence
ttatgaaggtaatgaagtggatgaa

SEQ ID NO: 23602 - DNA, 25 bp, Probe sequence
taatgaagtggatgaagctgaagaa

SEQ ID NO: 23603 - DNA, 25 bp, Probe sequence
gatgacacgattgatgttatccatg

SEQ ID NO: 23604 - DNA, 25 bp, Probe sequence
gtaatgaagtggatgaagctgaaga

SEQ ID NO: 23605 - DNA, 25 bp, Probe sequence
atgacacgattgatgttatccatgt

SEQ ID NO: 23606 - DNA, 25 bp, Probe sequence
gcaagaggactattagaccaagaat

SEQ ID NO: 23607 - DNA, 25 bp, Probe sequence
agcaagaggactattagaccaagaa

SEQ ID NO: 23608 - DNA, 25 bp, Probe sequence
tgctagaggtgtcattgctattatt

SEQ ID NO: 23609 - DNA, 25 bp, Probe sequence
ttgctagaggtgtcattgctattat

SEQ ID NO: 23610 - DNA, 25 bp, Probe sequence
attgctagaggtgtcattgctatta

SEQ ID NO: 23611 - DNA, 25 bp, Probe sequence
tattgctagaggtgtcattgctatt

SEQ ID NO: 23612 - DNA, 25 bp, Probe sequence
gatattgctagaggtgtcattgcta

SEQ ID NO: 23613 - DNA, 25 bp, Probe sequence
gagcaagaggactattagaccaaga

SEQ ID NO: 23614 - DNA, 25 bp, Probe sequence
atattgctagaggtgtcattgctat

SEQ ID NO: 23615 - DNA, 25 bp, Probe sequence
ctcggtaatattgctaagtactaca

SEQ ID NO: 23616 - DNA, 25 bp, Probe sequence
attgctaagtactacaacagagatt

SEQ ID NO: 23617 - DNA, 25 bp, Probe sequence
actcggtaatattgctaagtactac

SEQ ID NO: 23618 - DNA, 25 bp, Probe sequence
cggtaatattgctaagtactacaac

SEQ ID NO: 23619 - DNA, 25 bp, Probe sequence
tcggtaatattgctaagtactacaa

SEQ ID NO: 23620 - DNA, 25 bp, Probe sequence
aactcggtaatattgctaagtacta

SEQ ID NO: 23621 - DNA, 25 bp, Probe sequence
tattgctaagtactacaacagagat

SEQ ID NO: 23622 - DNA, 25 bp, Probe sequence
atattgctaagtactacaacagaga

SEQ ID NO: 23623 - DNA, 25 bp, Probe sequence
tttgacattgttatcctatgagatt

SEQ ID NO: 23624 - DNA, 25 bp, Probe sequence
gtaacaagccatgaaatgatacaca

SEQ ID NO: 23625 - DNA, 25 bp, Probe sequence
ggtaacaagccatgaaatgatacac

SEQ ID NO: 23626 - DNA, 25 bp, Probe sequence
taacaagccatgaaatgatacacat

SEQ ID NO: 23627 - DNA, 25 bp, Probe sequence
ttggtaacaagccatgaaatgatac

SEQ ID NO: 23628 - DNA, 25 bp, Probe sequence
ctttggtaacaagccatgaaatgat

SEQ ID NO: 23629 - DNA, 25 bp, Probe sequence
tggtaacaagccatgaaatgataca

SEQ ID NO: 23630 - DNA, 25 bp, Probe sequence
tttggtaacaagccatgaaatgata

SEQ ID NO: 23631 - DNA, 25 bp, Probe sequence
tctttggtaacaagccatgaaatga

SEQ ID NO: 23632 - DNA, 25 bp, Probe sequence
gtctttggtaacaagccatgaaatg

SEQ ID NO: 23633 - DNA, 25 bp, Probe sequence
atcattatttgtgacacttagcctt

SEQ ID NO: 23634 - DNA, 25 bp, Probe sequence
tcattatttgtgacacttagcctta

SEQ ID NO: 23635 - DNA, 25 bp, Probe sequence
tatcattatttgtgacacttagcct

SEQ ID NO: 23636 - DNA, 25 bp, Probe sequence
ctatcattatttgtgacacttagcc

SEQ ID NO: 23637 - DNA, 25 bp, Probe sequence
cctatcattatttgtgacacttagc

SEQ ID NO: 23638 - DNA, 25 bp, Probe sequence
cattatttgtgacacttagccttat

SEQ ID NO: 23639 - DNA, 25 bp, Probe sequence
ttatttgtgacacttagccttattt

SEQ ID NO: 23640 - DNA, 25 bp, Probe sequence
attatttgtgacacttagccttatt

SEQ ID NO: 23641 - DNA, 25 bp, Probe sequence
tgtgacacttagccttattttagca

SEQ ID NO: 23642 - DNA, 25 bp, Probe sequence
ttgaacaattatgatacaaccgtgc

SEQ ID NO: 23643 - DNA, 25 bp, Probe sequence
gaacaattatgatacaaccgtgcaa

SEQ ID NO: 23644 - DNA, 25 bp, Probe sequence
tgaacaattatgatacaaccgtgca

SEQ ID NO: 23645 - DNA, 25 bp, Probe sequence
acgatatgtagtataacttgtcaac

SEQ ID NO: 23646 - DNA, 25 bp, Probe sequence
aacaattatgatacaaccgtgcaaa

SEQ ID NO: 23647 - DNA, 25 bp, Probe sequence
cgatatgtagtataacttgtcaact

SEQ ID NO: 23648 - DNA, 25 bp, Probe sequence
acaattatgatacaaccgtgcaaac

SEQ ID NO: 23649 - DNA, 25 bp, Probe sequence
gcaaacgatatgtagtataacttgt

SEQ ID NO: 23650 - DNA, 25 bp, Probe sequence
aacgatatgtagtataacttgtcaa

SEQ ID NO: 23651 - DNA, 25 bp, Probe sequence
aatgtgagtatcaaagatggataga

SEQ ID NO: 23652 - DNA, 25 bp, Probe sequence
atgtgagtatcaaagatggatagat

SEQ ID NO: 23653 - DNA, 25 bp, Probe sequence
agcaacatatcttttcaacatacca

SEQ ID NO: 23654 - DNA, 25 bp, Probe sequence
tctagtgataaagagcaacatatct

SEQ ID NO: 23655 - DNA, 25 bp, Probe sequence
gagcaacatatcttttcaacatacc

SEQ ID NO: 23656 - DNA, 25 bp, Probe sequence
gcaacatatcttttcaacataccat

SEQ ID NO: 23657 - DNA, 25 bp, Probe sequence
aaatgtgagtatcaaagatggatag

SEQ ID NO: 23658 - DNA, 25 bp, Probe sequence
tgtgagtatcaaagatggatagata

SEQ ID NO: 23659 - DNA, 25 bp, Probe sequence
cagtctctagtgataaagagcaaca

SEQ ID NO: 23660 - DNA, 25 bp, Probe sequence
ggttgccacttgttagacttatctt

SEQ ID NO: 23661 - DNA, 25 bp, Probe sequence
tatggttgccacttgttagacttat

SEQ ID NO: 23662 - DNA, 25 bp, Probe sequence
ttatggttgccacttgttagactta

SEQ ID NO: 23663 - DNA, 25 bp, Probe sequence
attatggttgccacttgttagactt

SEQ ID NO: 23664 - DNA, 25 bp, Probe sequence
ataacgaagacattgctggtgagag

SEQ ID NO: 23665 - DNA, 25 bp, Probe sequence
atggttgccacttgttagacttatc

SEQ ID NO: 23666 - DNA, 25 bp, Probe sequence
gattatggttgccacttgttagact

SEQ ID NO: 23667 - DNA, 25 bp, Probe sequence
atgtaaatgcccttatagaagcgat

SEQ ID NO: 23668 - DNA, 25 bp, Probe sequence
tgtaaatgcccttatagaagcgatt

SEQ ID NO: 23669 - DNA, 25 bp, Probe sequence
aatgacttggagtgtgacatcaatg

SEQ ID NO: 23670 - DNA, 25 bp, Probe sequence
caatgacttggagtgtgacatcaat

SEQ ID NO: 23671 - DNA, 25 bp, Probe sequence
acttggagtgtgacatcaatgttaa

SEQ ID NO: 23672 - DNA, 25 bp, Probe sequence
gacttggagtgtgacatcaatgtta

SEQ ID NO: 23673 - DNA, 25 bp, Probe sequence
tcaatgacttggagtgtgacatcaa

SEQ ID NO: 23674 - DNA, 25 bp, Probe sequence
ctcaatgacttggagtgtgacatca

SEQ ID NO: 23675 - DNA, 25 bp, Probe sequence
atgacttggagtgtgacatcaatgt

SEQ ID NO: 23676 - DNA, 25 bp, Probe sequence
tgacttggagtgtgacatcaatgtt

SEQ ID NO: 23677 - DNA, 25 bp, Probe sequence
tcaatgttaaagagcccttaaagat

SEQ ID NO: 23678 - DNA, 25 bp, Probe sequence
ttaggagtcgttgcagtttagttaa

SEQ ID NO: 23679 - DNA, 25 bp, Probe sequence
attaggagtcgttgcagtttagtta

SEQ ID NO: 23680 - DNA, 25 bp, Probe sequence
tattaggagtcgttgcagtttagtt

SEQ ID NO: 23681 - DNA, 25 bp, Probe sequence
taggagtcgttgcagtttagttaag

SEQ ID NO: 23682 - DNA, 25 bp, Probe sequence
gtattaggagtcgttgcagtttagt

SEQ ID NO: 23683 - DNA, 25 bp, Probe sequence
ggtattaggagtcgttgcagtttag

SEQ ID NO: 23684 - DNA, 25 bp, Probe sequence
tggtattaggagtcgttgcagttta

SEQ ID NO: 23685 - DNA, 25 bp, Probe sequence
atagagggcaggattttggtattag

SEQ ID NO: 23686 - DNA, 25 bp, Probe sequence
aggattttggtattaggagtcgttg

SEQ ID NO: 23687 - DNA, 25 bp, Probe sequence
gtatatcacttagatgtgcgtggtt

SEQ ID NO: 23688 - DNA, 25 bp, Probe sequence
ttgtcgtatatcacttagatgtgcg

SEQ ID NO: 23689 - DNA, 25 bp, Probe sequence
attgtcgtatatcacttagatgtgc

SEQ ID NO: 23690 - DNA, 25 bp, Probe sequence
gtcgtatatcacttagatgtgcgtg

SEQ ID NO: 23691 - DNA, 25 bp, Probe sequence
attattgctgtgattgtcgtatatc

SEQ ID NO: 23692 - DNA, 25 bp, Probe sequence
tgtcgtatatcacttagatgtgcgt

SEQ ID NO: 23693 - DNA, 25 bp, Probe sequence
actagacttgtaagttccagttcgg

SEQ ID NO: 23694 - DNA, 25 bp, Probe sequence
aattattattgctgtgattgtcgta

SEQ ID NO: 23695 - DNA, 25 bp, Probe sequence
attattattgctgtgattgtcgtat

SEQ ID NO: 23696 - DNA, 25 bp, Probe sequence
atcaaagggttaaaccactttcaaa

SEQ ID NO: 23697 - DNA, 25 bp, Probe sequence
aatcaaagggttaaaccactttcaa

SEQ ID NO: 23698 - DNA, 25 bp, Probe sequence
aaatcaaagggttaaaccactttca

SEQ ID NO: 23699 - DNA, 25 bp, Probe sequence
tcattaaatcaaagggttaaaccac

SEQ ID NO: 23700 - DNA, 25 bp, Probe sequence
cattaaatcaaagggttaaaccact

SEQ ID NO: 23701 - DNA, 25 bp, Probe sequence
taaatcaaagggttaaaccactttc

SEQ ID NO: 23702 - DNA, 25 bp, Probe sequence
attaaatcaaagggttaaaccactt

SEQ ID NO: 23703 - DNA, 25 bp, Probe sequence
ttaaatcaaagggttaaaccacttt

SEQ ID NO: 23704 - DNA, 25 bp, Probe sequence
atcattaaatcaaagggttaaacca

SEQ ID NO: 23705 - DNA, 25 bp, Probe sequence
aattatcaaatagaaacccgagatt

SEQ ID NO: 23706 - DNA, 25 bp, Probe sequence
aaattatcaaatagaaacccgagat

SEQ ID NO: 23707 - DNA, 25 bp, Probe sequence
atagaaacccgagattttagtgaaa

SEQ ID NO: 23708 - DNA, 25 bp, Probe sequence
aatagaaacccgagattttagtgaa

SEQ ID NO: 23709 - DNA, 25 bp, Probe sequence
gaaacccgagattttagtgaaatga

SEQ ID NO: 23710 - DNA, 25 bp, Probe sequence
agaaacccgagattttagtgaaatg

SEQ ID NO: 23711 - DNA, 25 bp, Probe sequence
aaacccgagattttagtgaaatgaa

SEQ ID NO: 23712 - DNA, 25 bp, Probe sequence
aacccgagattttagtgaaatgaat

SEQ ID NO: 23713 - DNA, 25 bp, Probe sequence
attatcaaatagaaacccgagattt

SEQ ID NO: 23714 - DNA, 25 bp, Probe sequence
taccgtgatgattactataaccgtg

SEQ ID NO: 23715 - DNA, 25 bp, Probe sequence
tccaatgatgagtgatattcgtgaa

SEQ ID NO: 23716 - DNA, 25 bp, Probe sequence
attaagtcagttatctcgtggtgtt

SEQ ID NO: 23717 - DNA, 25 bp, Probe sequence
tccagttatcgcattaagtcagtta

SEQ ID NO: 23718 - DNA, 25 bp, Probe sequence
tatcgcattaagtcagttatctcgt

SEQ ID NO: 23719 - DNA, 25 bp, Probe sequence
gtccaatgatgagtgatattcgtga

SEQ ID NO: 23720 - DNA, 25 bp, Probe sequence
ataccgtgatgattactataaccgt

SEQ ID NO: 23721 - DNA, 25 bp, Probe sequence
cattaagtcagttatctcgtggtgt

SEQ ID NO: 23722 - DNA, 25 bp, Probe sequence
ttaagtcagttatctcgtggtgttg

SEQ ID NO: 23723 - DNA, 25 bp, Probe sequence
cgcatacgaacaacaacatcataat

SEQ ID NO: 23724 - DNA, 25 bp, Probe sequence
gcatacgaacaacaacatcataatg

SEQ ID NO: 23725 - DNA, 25 bp, Probe sequence
ttataccgcatacgaacaacaacat

SEQ ID NO: 23726 - DNA, 25 bp, Probe sequence
tataccgcatacgaacaacaacatc

SEQ ID NO: 23727 - DNA, 25 bp, Probe sequence
catacgcttgttagactcaacgatt

SEQ ID NO: 23728 - DNA, 25 bp, Probe sequence
ccgcatacgaacaacaacatcataa

SEQ ID NO: 23729 - DNA, 25 bp, Probe sequence
gttataccgcatacgaacaacaaca

SEQ ID NO: 23730 - DNA, 25 bp, Probe sequence
ttatagtaatctacagtgtccagga

SEQ ID NO: 23731 - DNA, 25 bp, Probe sequence
catacgaacaacaacatcataatga

SEQ ID NO: 23732 - DNA, 25 bp, Probe sequence
tggattggatatgattgaagttgga

SEQ ID NO: 23733 - DNA, 25 bp, Probe sequence
ctggattggatatgattgaagttgg

SEQ ID NO: 23734 - DNA, 25 bp, Probe sequence
gatatgattgaagttggaacaggtg

SEQ ID NO: 23735 - DNA, 25 bp, Probe sequence
ttggatatgattgaagttggaacag

SEQ ID NO: 23736 - DNA, 25 bp, Probe sequence
ggatatgattgaagttggaacaggt

SEQ ID NO: 23737 - DNA, 25 bp, Probe sequence
tggatatgattgaagttggaacagg

SEQ ID NO: 23738 - DNA, 25 bp, Probe sequence
ggattggatatgattgaagttggaa

SEQ ID NO: 23739 - DNA, 25 bp, Probe sequence
atatgattgaagttggaacaggtgg

SEQ ID NO: 23740 - DNA, 25 bp, Probe sequence
tctggattggatatgattgaagttg

SEQ ID NO: 23741 - DNA, 25 bp, Probe sequence
tgttattagataagaatgctgacca

SEQ ID NO: 23742 - DNA, 25 bp, Probe sequence
gtgttattagataagaatgctgacc

SEQ ID NO: 23743 - DNA, 25 bp, Probe sequence
gccgataaaggactacattcaatca

SEQ ID NO: 23744 - DNA, 25 bp, Probe sequence
ccgataaaggactacattcaatcaa

SEQ ID NO: 23745 - DNA, 25 bp, Probe sequence
aaaggactacattcaatcaaagaca

SEQ ID NO: 23746 - DNA, 25 bp, Probe sequence
tgtgttattagataagaatgctgac

SEQ ID NO: 23747 - DNA, 25 bp, Probe sequence
aggactacattcaatcaaagacatt

SEQ ID NO: 23748 - DNA, 25 bp, Probe sequence
aaggactacattcaatcaaagacat

SEQ ID NO: 23749 - DNA, 25 bp, Probe sequence
acttaagatcatacttcgccgataa

SEQ ID NO: 23750 - DNA, 25 bp, Probe sequence
ttactattagacttagccattggtt

SEQ ID NO: 23751 - DNA, 25 bp, Probe sequence
tattagacttagccattggtttcac

SEQ ID NO: 23752 - DNA, 25 bp, Probe sequence
ctattagacttagccattggtttca

SEQ ID NO: 23753 - DNA, 25 bp, Probe sequence
actattagacttagccattggtttc

SEQ ID NO: 23754 - DNA, 25 bp, Probe sequence
attagacttagccattggtttcacc

SEQ ID NO: 23755 - DNA, 25 bp, Probe sequence
tactattagacttagccattggttt

SEQ ID NO: 23756 - DNA, 25 bp, Probe sequence
tttactattagacttagccattggt

SEQ ID NO: 23757 - DNA, 25 bp, Probe sequence
ttagacttagccattggtttcacct

SEQ ID NO: 23758 - DNA, 25 bp, Probe sequence
ctttactattagacttagccattgg

SEQ ID NO: 23759 - DNA, 25 bp, Probe sequence
acaccaagatagacatcatagaagt

SEQ ID NO: 23760 - DNA, 25 bp, Probe sequence
gtaactacgcactatcattcagcaa

SEQ ID NO: 23761 - DNA, 25 bp, Probe sequence
ccatacaccaagatagacatcatag

SEQ ID NO: 23762 - DNA, 25 bp, Probe sequence
caccaagatagacatcatagaagtt

SEQ ID NO: 23763 - DNA, 25 bp, Probe sequence
agtaactacgcactatcattcagca

SEQ ID NO: 23764 - DNA, 25 bp, Probe sequence
catacaccaagatagacatcataga

SEQ ID NO: 23765 - DNA, 25 bp, Probe sequence
tacaccaagatagacatcatagaag

SEQ ID NO: 23766 - DNA, 25 bp, Probe sequence
gaagcaagccatagcagaatatgaa

SEQ ID NO: 23767 - DNA, 25 bp, Probe sequence
taactacgcactatcattcagcaaa

SEQ ID NO: 23768 - DNA, 25 bp, Probe sequence
aaatattcaacttagtagcgatgca

SEQ ID NO: 23769 - DNA, 25 bp, Probe sequence
taaatattcaacttagtagcgatgc

SEQ ID NO: 23770 - DNA, 25 bp, Probe sequence
atattcaacttagtagcgatgcatt

SEQ ID NO: 23771 - DNA, 25 bp, Probe sequence
aatattcaacttagtagcgatgcat

SEQ ID NO: 23772 - DNA, 25 bp, Probe sequence
tattcaacttagtagcgatgcattt

SEQ ID NO: 23773 - DNA, 25 bp, Probe sequence
ctaaatattcaacttagtagcgatg

SEQ ID NO: 23774 - DNA, 25 bp, Probe sequence
attcaacttagtagcgatgcatttt

SEQ ID NO: 23775 - DNA, 25 bp, Probe sequence
aatgaaaatgttaaagcaatatgtc

SEQ ID NO: 23776 - DNA, 25 bp, Probe sequence
actaaatattcaacttagtagcgat

SEQ ID NO: 23777 - DNA, 25 bp, Probe sequence
ttttcgctttataaatgaaaatgtt

SEQ ID NO: 23778 - DNA, 25 bp, Probe sequence
aggtgctaaagtatgtgcttctaaa

SEQ ID NO: 23779 - DNA, 25 bp, Probe sequence
caggtgctaaagtatgtgcttctaa

SEQ ID NO: 23780 - DNA, 25 bp, Probe sequence
aaagtacacaggtgctaaagtatgt

SEQ ID NO: 23781 - DNA, 25 bp, Probe sequence
acaggtgctaaagtatgtgcttcta

SEQ ID NO: 23782 - DNA, 25 bp, Probe sequence
ggtgctaaagtatgtgcttctaaaa

SEQ ID NO: 23783 - DNA, 25 bp, Probe sequence
gaatcaaaagtacacaggtgctaaa

SEQ ID NO: 23784 - DNA, 25 bp, Probe sequence
tcaaaagtacacaggtgctaaagta

SEQ ID NO: 23785 - DNA, 25 bp, Probe sequence
aatcaaaagtacacaggtgctaaag

SEQ ID NO: 23786 - DNA, 25 bp, Probe sequence
atcaaaagtacacaggtgctaaagt

SEQ ID NO: 23787 - DNA, 25 bp, Probe sequence
gtcttatcgttctgatgaagcatta

SEQ ID NO: 23788 - DNA, 25 bp, Probe sequence
ctgatgaagcattatatagcgaacg

SEQ ID NO: 23789 - DNA, 25 bp, Probe sequence
cgttctgatgaagcattatatagcg

SEQ ID NO: 23790 - DNA, 25 bp, Probe sequence
cgtcttatcgttctgatgaagcatt

SEQ ID NO: 23791 - DNA, 25 bp, Probe sequence
tctgatgaagcattatatagcgaac

SEQ ID NO: 23792 - DNA, 25 bp, Probe sequence
gttctgatgaagcattatatagcga

SEQ ID NO: 23793 - DNA, 25 bp, Probe sequence
tcgttctgatgaagcattatatagc

SEQ ID NO: 23794 - DNA, 25 bp, Probe sequence
tcttatcgttctgatgaagcattat

SEQ ID NO: 23795 - DNA, 25 bp, Probe sequence
caactcatgttcaatacctgttcaa

SEQ ID NO: 23796 - DNA, 25 bp, Probe sequence
tgtgataggtatggtagaaggtgtt

SEQ ID NO: 23797 - DNA, 25 bp, Probe sequence
gtgtgataggtatggtagaaggtgt

SEQ ID NO: 23798 - DNA, 25 bp, Probe sequence
ggtgtgataggtatggtagaaggtg

SEQ ID NO: 23799 - DNA, 25 bp, Probe sequence
gtgataggtatggtagaaggtgttt

SEQ ID NO: 23800 - DNA, 25 bp, Probe sequence
gaaagagaagtaagtaatcccgact

SEQ ID NO: 23801 - DNA, 25 bp, Probe sequence
cgagacattctatttctaattggga

SEQ ID NO: 23802 - DNA, 25 bp, Probe sequence
ggaaagagaagtaagtaatcccgac

SEQ ID NO: 23803 - DNA, 25 bp, Probe sequence
attaaaggagtggaaatcatgcaag

SEQ ID NO: 23804 - DNA, 25 bp, Probe sequence
gggtgtgataggtatggtagaaggt

SEQ ID NO: 23805 - DNA, 25 bp, Probe sequence
atggtggcattagatagtgatgaat

SEQ ID NO: 23806 - DNA, 25 bp, Probe sequence
tggtggcattagatagtgatgaatt

SEQ ID NO: 23807 - DNA, 25 bp, Probe sequence
ggtggcattagatagtgatgaattg

SEQ ID NO: 23808 - DNA, 25 bp, Probe sequence
gtggcattagatagtgatgaattga

SEQ ID NO: 23809 - DNA, 25 bp, Probe sequence
tggcattagatagtgatgaattgat

SEQ ID NO: 23810 - DNA, 25 bp, Probe sequence
cgtgattacaaagcgattagaagaa

SEQ ID NO: 23811 - DNA, 25 bp, Probe sequence
ggcattagatagtgatgaattgatt

SEQ ID NO: 23812 - DNA, 25 bp, Probe sequence
aatggtggcattagatagtgatgaa

SEQ ID NO: 23813 - DNA, 25 bp, Probe sequence
taacaatggtggcattagatagtga

SEQ ID NO: 23814 - DNA, 25 bp, Probe sequence
gctatttggtaagttctctccgtat

SEQ ID NO: 23815 - DNA, 25 bp, Probe sequence
tacattagcccaaccatctccattt

SEQ ID NO: 23816 - DNA, 25 bp, Probe sequence
aagtctacattagcccaaccatctc

SEQ ID NO: 23817 - DNA, 25 bp, Probe sequence
gaagtctacattagcccaaccatct

SEQ ID NO: 23818 - DNA, 25 bp, Probe sequence
cgctatttggtaagttctctccgta

SEQ ID NO: 23819 - DNA, 25 bp, Probe sequence
ctacattagcccaaccatctccatt

SEQ ID NO: 23820 - DNA, 25 bp, Probe sequence
tgaagtctacattagcccaaccatc

SEQ ID NO: 23821 - DNA, 25 bp, Probe sequence
ttagcccaaccatctccatttgtat

SEQ ID NO: 23822 - DNA, 25 bp, Probe sequence
attagcccaaccatctccatttgta

SEQ ID NO: 23823 - DNA, 25 bp, Probe sequence
cacattggttgaataatcgtgataa

SEQ ID NO: 23824 - DNA, 25 bp, Probe sequence
acattggttgaataatcgtgataaa

SEQ ID NO: 23825 - DNA, 25 bp, Probe sequence
ttggttgaataatcgtgataaacaa

SEQ ID NO: 23826 - DNA, 25 bp, Probe sequence
attggttgaataatcgtgataaaca

SEQ ID NO: 23827 - DNA, 25 bp, Probe sequence
tggttgaataatcgtgataaacaat

SEQ ID NO: 23828 - DNA, 25 bp, Probe sequence
cattggttgaataatcgtgataaac

SEQ ID NO: 23829 - DNA, 25 bp, Probe sequence
ttcacattggttgaataatcgtgat

SEQ ID NO: 23830 - DNA, 25 bp, Probe sequence
tgttcagcatcatatttgtatctat

SEQ ID NO: 23831 - DNA, 25 bp, Probe sequence
atgttcagcatcatatttgtatcta

SEQ ID NO: 23832 - DNA, 25 bp, Probe sequence
tccagttatgtcggttaatgaatcg

SEQ ID NO: 23833 - DNA, 25 bp, Probe sequence
atccagttatgtcggttaatgaatc

SEQ ID NO: 23834 - DNA, 25 bp, Probe sequence
aatccagttatgtcggttaatgaat

SEQ ID NO: 23835 - DNA, 25 bp, Probe sequence
aaatccagttatgtcggttaatgaa

SEQ ID NO: 23836 - DNA, 25 bp, Probe sequence
tattaagcgagtggattgttaaagg

SEQ ID NO: 23837 - DNA, 25 bp, Probe sequence
attaagcgagtggattgttaaaggg

SEQ ID NO: 23838 - DNA, 25 bp, Probe sequence
ctattaagcgagtggattgttaaag

SEQ ID NO: 23839 - DNA, 25 bp, Probe sequence
agctattaagcgagtggattgttaa

SEQ ID NO: 23840 - DNA, 25 bp, Probe sequence
aagctattaagcgagtggattgtta

SEQ ID NO: 23841 - DNA, 25 bp, Probe sequence
atttaaagatgactactgagagcgt

SEQ ID NO: 23842 - DNA, 25 bp, Probe sequence
gatttaaagatgactactgagagcg

SEQ ID NO: 23843 - DNA, 25 bp, Probe sequence
cgatttaaagatgactactgagagc

SEQ ID NO: 23844 - DNA, 25 bp, Probe sequence
tttaaagatgactactgagagcgta

SEQ ID NO: 23845 - DNA, 25 bp, Probe sequence
acgatttaaagatgactactgagag

SEQ ID NO: 23846 - DNA, 25 bp, Probe sequence
ttaaagatgactactgagagcgtag

SEQ ID NO: 23847 - DNA, 25 bp, Probe sequence
aacgatttaaagatgactactgaga

SEQ ID NO: 23848 - DNA, 25 bp, Probe sequence
taaagatgactactgagagcgtagc

SEQ ID NO: 23849 - DNA, 25 bp, Probe sequence
aaaatacgctctcaaaatgaagtca

SEQ ID NO: 23850 - DNA, 25 bp, Probe sequence
aatagcagcaacgagaacaaggaaa

SEQ ID NO: 23851 - DNA, 25 bp, Probe sequence
aaatagcagcaacgagaacaaggaa

SEQ ID NO: 23852 - DNA, 25 bp, Probe sequence
aaacaaattgcacaactgaaagagc

SEQ ID NO: 23853 - DNA, 25 bp, Probe sequence
gcacaactgaaagagcaaaagaaaa

SEQ ID NO: 23854 - DNA, 25 bp, Probe sequence
tggataaagtcattggagaatttaa

SEQ ID NO: 23855 - DNA, 25 bp, Probe sequence
aacaaaatagcagcaacgagaacaa

SEQ ID NO: 23856 - DNA, 25 bp, Probe sequence
tatggataaagtcattggagaattt

SEQ ID NO: 23857 - DNA, 25 bp, Probe sequence
ttatggataaagtcattggagaatt

SEQ ID NO: 23858 - DNA, 25 bp, Probe sequence
aattatggataaagtcattggagaa

SEQ ID NO: 23859 - DNA, 25 bp, Probe sequence
tatagcagtaatggtgatggaacaa

SEQ ID NO: 23860 - DNA, 25 bp, Probe sequence
atagcagtaatggtgatggaacaat

SEQ ID NO: 23861 - DNA, 25 bp, Probe sequence
atatagcagtaatggtgatggaaca

SEQ ID NO: 23862 - DNA, 25 bp, Probe sequence
tagcagtaatggtgatggaacaatt

SEQ ID NO: 23863 - DNA, 25 bp, Probe sequence
acatatagcagtaatggtgatggaa

SEQ ID NO: 23864 - DNA, 25 bp, Probe sequence
aacatatagcagtaatggtgatgga

SEQ ID NO: 23865 - DNA, 25 bp, Probe sequence
catatagcagtaatggtgatggaac

SEQ ID NO: 23866 - DNA, 25 bp, Probe sequence
gcagtaatggtgatggaacaattaa

SEQ ID NO: 23867 - DNA, 25 bp, Probe sequence
agcagtaatggtgatggaacaatta

SEQ ID NO: 23868 - DNA, 25 bp, Probe sequence
ggctaatgtagacttcaatacttca

SEQ ID NO: 23869 - DNA, 25 bp, Probe sequence
tgactcaagaagaataccaagaatt

SEQ ID NO: 23870 - DNA, 25 bp, Probe sequence
atgactcaagaagaataccaagaat

SEQ ID NO: 23871 - DNA, 25 bp, Probe sequence
tatgactcaagaagaataccaagaa

SEQ ID NO: 23872 - DNA, 25 bp, Probe sequence
tattaccagaaacaggagaaagcaa

SEQ ID NO: 23873 - DNA, 25 bp, Probe sequence
acctaattgtatgactcaagaagaa

SEQ ID NO: 23874 - DNA, 25 bp, Probe sequence
atacggagagaacttaccaaatagc

SEQ ID NO: 23875 - DNA, 25 bp, Probe sequence
aggagaaagcaaccaaagtgatata

SEQ ID NO: 23876 - DNA, 25 bp, Probe sequence
tgtatgactcaagaagaataccaag

SEQ ID NO: 23877 - DNA, 25 bp, Probe sequence
ggacatcgtatggataatatgacct

SEQ ID NO: 23878 - DNA, 25 bp, Probe sequence
aggacatcgtatggataatatgacc

SEQ ID NO: 23879 - DNA, 25 bp, Probe sequence
aatgatgacggattaacaatacctc

SEQ ID NO: 23880 - DNA, 25 bp, Probe sequence
tgatgacggattaacaatacctcaa

SEQ ID NO: 23881 - DNA, 25 bp, Probe sequence
atgatgacggattaacaatacctca

SEQ ID NO: 23882 - DNA, 25 bp, Probe sequence
aaggacatcgtatggataatatgac

SEQ ID NO: 23883 - DNA, 25 bp, Probe sequence
aggtactacagcatctgaattgatt

SEQ ID NO: 23884 - DNA, 25 bp, Probe sequence
aaggtactacagcatctgaattgat

SEQ ID NO: 23885 - DNA, 25 bp, Probe sequence
gacatcgtatggataatatgaccta

SEQ ID NO: 23886 - DNA, 25 bp, Probe sequence
aggagtgagtcgttctactgtatat

SEQ ID NO: 23887 - DNA, 25 bp, Probe sequence
agaccttcactaccagatcataaga

SEQ ID NO: 23888 - DNA, 25 bp, Probe sequence
gaccttcactaccagatcataagaa

SEQ ID NO: 23889 - DNA, 25 bp, Probe sequence
aagaccttcactaccagatcataag

SEQ ID NO: 23890 - DNA, 25 bp, Probe sequence
gaagaccttcactaccagatcataa

SEQ ID NO: 23891 - DNA, 25 bp, Probe sequence
ggaagaccttcactaccagatcata

SEQ ID NO: 23892 - DNA, 25 bp, Probe sequence
caggagtgagtcgttctactgtata

SEQ ID NO: 23893 - DNA, 25 bp, Probe sequence
gtgagtcgttctactgtatatagga

SEQ ID NO: 23894 - DNA, 25 bp, Probe sequence
ggagtgagtcgttctactgtatata

SEQ ID NO: 23895 - DNA, 25 bp, Probe sequence
ctacttaccagcgtttatgtgaaag

SEQ ID NO: 23896 - DNA, 25 bp, Probe sequence
tacttaccagcgtttatgtgaaaga

SEQ ID NO: 23897 - DNA, 25 bp, Probe sequence
cctacttaccagcgtttatgtgaaa

SEQ ID NO: 23898 - DNA, 25 bp, Probe sequence
acctacttaccagcgtttatgtgaa

SEQ ID NO: 23899 - DNA, 25 bp, Probe sequence
aacctacttaccagcgtttatgtga

SEQ ID NO: 23900 - DNA, 25 bp, Probe sequence
ttcaaacctacttaccagcgtttat

SEQ ID NO: 23901 - DNA, 25 bp, Probe sequence
attcaaacctacttaccagcgttta

SEQ ID NO: 23902 - DNA, 25 bp, Probe sequence
tcaaacctacttaccagcgtttatg

SEQ ID NO: 23903 - DNA, 25 bp, Probe sequence
aattcaaacctacttaccagcgttt

SEQ ID NO: 23904 - DNA, 25 bp, Probe sequence
tggtatgttcttgctataacacttc

SEQ ID NO: 23905 - DNA, 25 bp, Probe sequence
ggtatgttcttgctataacacttct

SEQ ID NO: 23906 - DNA, 25 bp, Probe sequence
ttggtatgttcttgctataacactt

SEQ ID NO: 23907 - DNA, 25 bp, Probe sequence
tttggtatgttcttgctataacact

SEQ ID NO: 23908 - DNA, 25 bp, Probe sequence
gtatgttcttgctataacacttcta

SEQ ID NO: 23909 - DNA, 25 bp, Probe sequence
atttggtatgttcttgctataacac

SEQ ID NO: 23910 - DNA, 25 bp, Probe sequence
atgttcttgctataacacttctaat

SEQ ID NO: 23911 - DNA, 25 bp, Probe sequence
aggggtttaatatatggattacaca

SEQ ID NO: 23912 - DNA, 25 bp, Probe sequence
acaggggtttaatatatggattaca

SEQ ID NO: 23913 - DNA, 25 bp, Probe sequence
ttgatggacagattgatacacttga

SEQ ID NO: 23914 - DNA, 25 bp, Probe sequence
ggacagattgatacacttgaggaat

SEQ ID NO: 23915 - DNA, 25 bp, Probe sequence
tgatggacagattgatacacttgag

SEQ ID NO: 23916 - DNA, 25 bp, Probe sequence
cttgatggacagattgatacacttg

SEQ ID NO: 23917 - DNA, 25 bp, Probe sequence
gatggacagattgatacacttgagg

SEQ ID NO: 23918 - DNA, 25 bp, Probe sequence
tcttgatggacagattgatacactt

SEQ ID NO: 23919 - DNA, 25 bp, Probe sequence
atggacagattgatacacttgagga

SEQ ID NO: 23920 - DNA, 25 bp, Probe sequence
ttgatacacttgaggaatatggttg

SEQ ID NO: 23921 - DNA, 25 bp, Probe sequence
tggacagattgatacacttgaggaa

SEQ ID NO: 23922 - DNA, 25 bp, Probe sequence
agaacttggttatatcggattagca

SEQ ID NO: 23923 - DNA, 25 bp, Probe sequence
gcattacttattggtatcgcaacat

SEQ ID NO: 23924 - DNA, 25 bp, Probe sequence
tggatatacattaagtggatggaca

SEQ ID NO: 23925 - DNA, 25 bp, Probe sequence
ttaattggtgtatcattgactggtt

SEQ ID NO: 23926 - DNA, 25 bp, Probe sequence
gaacttggttatatcggattagcat

SEQ ID NO: 23927 - DNA, 25 bp, Probe sequence
ggatatacattaagtggatggacag

SEQ ID NO: 23928 - DNA, 25 bp, Probe sequence
tgtacgaatcggtattgataactgg

SEQ ID NO: 23929 - DNA, 25 bp, Probe sequence
ttgtacgaatcggtattgataactg

SEQ ID NO: 23930 - DNA, 25 bp, Probe sequence
aacttggttatatcggattagcatt

SEQ ID NO: 23931 - DNA, 25 bp, Probe sequence
acgaagaacgattccagtgataata

SEQ ID NO: 23932 - DNA, 25 bp, Probe sequence
tgattgctgatgaattaggtgtaac

SEQ ID NO: 23933 - DNA, 25 bp, Probe sequence
cgaagaacgattccagtgataatag

SEQ ID NO: 23934 - DNA, 25 bp, Probe sequence
aacgaagaacgattccagtgataat

SEQ ID NO: 23935 - DNA, 25 bp, Probe sequence
gattgctgatgaattaggtgtaact

SEQ ID NO: 23936 - DNA, 25 bp, Probe sequence
gaagaacgattccagtgataatagg

SEQ ID NO: 23937 - DNA, 25 bp, Probe sequence
atgattgctgatgaattaggtgtaa

SEQ ID NO: 23938 - DNA, 25 bp, Probe sequence
aatgattgctgatgaattaggtgta

SEQ ID NO: 23939 - DNA, 25 bp, Probe sequence
tgaagagaataagcatgacagtaca

SEQ ID NO: 23940 - DNA, 25 bp, Probe sequence
ccgaccaaaaccataaaacctttaa

SEQ ID NO: 23941 - DNA, 25 bp, Probe sequence
cgaccaaaaccataaaacctttaag

SEQ ID NO: 23942 - DNA, 25 bp, Probe sequence
ccaaaaccataaaacctttaagacc

SEQ ID NO: 23943 - DNA, 25 bp, Probe sequence
accataaaacctttaagacctttct

SEQ ID NO: 23944 - DNA, 25 bp, Probe sequence
accaaaaccataaaacctttaagac

SEQ ID NO: 23945 - DNA, 25 bp, Probe sequence
caaaaccataaaacctttaagacct

SEQ ID NO: 23946 - DNA, 25 bp, Probe sequence
gaccaaaaccataaaacctttaaga

SEQ ID NO: 23947 - DNA, 25 bp, Probe sequence
gccgaccaaaaccataaaaccttta

SEQ ID NO: 23948 - DNA, 25 bp, Probe sequence
aaccataaaacctttaagacctttc

SEQ ID NO: 23949 - DNA, 25 bp, Probe sequence
gaaagccagactcagcaagaataaa

SEQ ID NO: 23950 - DNA, 25 bp, Probe sequence
cgaaagccagactcagcaagaataa

SEQ ID NO: 23951 - DNA, 25 bp, Probe sequence
aggtctctcgtatcttttattcagc

SEQ ID NO: 23952 - DNA, 25 bp, Probe sequence
acggacaaaaccactcaaaataaaa

SEQ ID NO: 23953 - DNA, 25 bp, Probe sequence
aacggacaaaaccactcaaaataaa

SEQ ID NO: 23954 - DNA, 25 bp, Probe sequence
gtaacggacaaaaccactcaaaata

SEQ ID NO: 23955 - DNA, 25 bp, Probe sequence
ggtctctcgtatcttttattcagca

SEQ ID NO: 23956 - DNA, 25 bp, Probe sequence
tctcgtatcttttattcagcaatcg

SEQ ID NO: 23957 - DNA, 25 bp, Probe sequence
taacggacaaaaccactcaaaataa

SEQ ID NO: 23958 - DNA, 25 bp, Probe sequence
tgatgttgcactgttctctgaataa

SEQ ID NO: 23959 - DNA, 25 bp, Probe sequence
ttgatgttgcactgttctctgaata

SEQ ID NO: 23960 - DNA, 25 bp, Probe sequence
aataatgaaagggatgcttggtttg

SEQ ID NO: 23961 - DNA, 25 bp, Probe sequence
taatgaaagggatgcttggtttgta

SEQ ID NO: 23962 - DNA, 25 bp, Probe sequence
ataatgaaagggatgcttggtttgt

SEQ ID NO: 23963 - DNA, 25 bp, Probe sequence
taataatgaaagggatgcttggttt

SEQ ID NO: 23964 - DNA, 25 bp, Probe sequence
ataataatgaaagggatgcttggtt

SEQ ID NO: 23965 - DNA, 25 bp, Probe sequence
aagggatgcttggtttgtactttat

SEQ ID NO: 23966 - DNA, 25 bp, Probe sequence
agggatgcttggtttgtactttatc

SEQ ID NO: 23967 - DNA, 25 bp, Probe sequence
actttatttcgttatcccactcaca

SEQ ID NO: 23968 - DNA, 25 bp, Probe sequence
ctttatttcgttatcccactcacat

SEQ ID NO: 23969 - DNA, 25 bp, Probe sequence
aactttatttcgttatcccactcac

SEQ ID NO: 23970 - DNA, 25 bp, Probe sequence
cacaaactttatttcgttatcccac

SEQ ID NO: 23971 - DNA, 25 bp, Probe sequence
acaaactttatttcgttatcccact

SEQ ID NO: 23972 - DNA, 25 bp, Probe sequence
tcacaaactttatttcgttatccca

SEQ ID NO: 23973 - DNA, 25 bp, Probe sequence
aaactttatttcgttatcccactca

SEQ ID NO: 23974 - DNA, 25 bp, Probe sequence
ttatttcgttatcccactcacatga

SEQ ID NO: 23975 - DNA, 25 bp, Probe sequence
caaactttatttcgttatcccactc

SEQ ID NO: 23976 - DNA, 25 bp, Probe sequence
gcattagactgtgacatcataactc

SEQ ID NO: 23977 - DNA, 25 bp, Probe sequence
cattagactgtgacatcataactca

SEQ ID NO: 23978 - DNA, 25 bp, Probe sequence
tgcattagactgtgacatcataact

SEQ ID NO: 23979 - DNA, 25 bp, Probe sequence
ttagactgtgacatcataactcatt

SEQ ID NO: 23980 - DNA, 25 bp, Probe sequence
taccaatacaatcccttctaagtgc

SEQ ID NO: 23981 - DNA, 25 bp, Probe sequence
attagactgtgacatcataactcat

SEQ ID NO: 23982 - DNA, 25 bp, Probe sequence
ctaccaatacaatcccttctaagtg

SEQ ID NO: 23983 - DNA, 25 bp, Probe sequence
tctaccaatacaatcccttctaagt

SEQ ID NO: 23984 - DNA, 25 bp, Probe sequence
tcataactcatttaagaacttcgct

SEQ ID NO: 23985 - DNA, 25 bp, Probe sequence
tcactgtaggtaacttcacttcaat

SEQ ID NO: 23986 - DNA, 25 bp, Probe sequence
gtcactgtaggtaacttcacttcaa

SEQ ID NO: 23987 - DNA, 25 bp, Probe sequence
cactgtaggtaacttcacttcaata

SEQ ID NO: 23988 - DNA, 25 bp, Probe sequence
agtcactgtaggtaacttcacttca

SEQ ID NO: 23989 - DNA, 25 bp, Probe sequence
taacttcacttcaatattcggcatg

SEQ ID NO: 23990 - DNA, 25 bp, Probe sequence
gtaacttcacttcaatattcggcat

SEQ ID NO: 23991 - DNA, 25 bp, Probe sequence
cttcacttcaatattcggcatgttc

SEQ ID NO: 23992 - DNA, 25 bp, Probe sequence
aggtaacttcacttcaatattcggc

SEQ ID NO: 23993 - DNA, 25 bp, Probe sequence
acttcacttcaatattcggcatgtt

SEQ ID NO: 23994 - DNA, 25 bp, Probe sequence
actcattagataacttaggtccagc

SEQ ID NO: 23995 - DNA, 25 bp, Probe sequence
gaacatccagaagaatatccacagt

SEQ ID NO: 23996 - DNA, 25 bp, Probe sequence
gtaactgaatctatcggtggtgtag

SEQ ID NO: 23997 - DNA, 25 bp, Probe sequence
acagcgaagtattagaatatgacga

SEQ ID NO: 23998 - DNA, 25 bp, Probe sequence
gaatctatcggtggtgtaggtattg

SEQ ID NO: 23999 - DNA, 25 bp, Probe sequence
aatctatcggtggtgtaggtattga

SEQ ID NO: 24000 - DNA, 25 bp, Probe sequence
tgaatctatcggtggtgtaggtatt

SEQ ID NO: 24001 - DNA, 25 bp, Probe sequence
ttacggttacgaattagacgaagaa

SEQ ID NO: 24002 - DNA, 25 bp, Probe sequence
acatccagaagaatatccacagtta

SEQ ID NO: 24003 - DNA, 25 bp, Probe sequence
tcaattaacagttggtacgatggtt

SEQ ID NO: 24004 - DNA, 25 bp, Probe sequence
ttcaattaacagttggtacgatggt

SEQ ID NO: 24005 - DNA, 25 bp, Probe sequence
caattaacagttggtacgatggttt

SEQ ID NO: 24006 - DNA, 25 bp, Probe sequence
tctgctttatcaaaactatcacact

SEQ ID NO: 24007 - DNA, 25 bp, Probe sequence
aattaacagttggtacgatggtttt

SEQ ID NO: 24008 - DNA, 25 bp, Probe sequence
ctgctttatcaaaactatcacactt

SEQ ID NO: 24009 - DNA, 25 bp, Probe sequence
ttctgctttatcaaaactatcacac

SEQ ID NO: 24010 - DNA, 25 bp, Probe sequence
atgtcctagccctatggataaaatg

SEQ ID NO: 24011 - DNA, 25 bp, Probe sequence
tgctttatcaaaactatcacacttt

SEQ ID NO: 24012 - DNA, 25 bp, Probe sequence
ttaacttcagtcataatgttctaca

SEQ ID NO: 24013 - DNA, 25 bp, Probe sequence
atgatttgttagtaatgagtgtagt

SEQ ID NO: 24014 - DNA, 25 bp, Probe sequence
tgatttgttagtaatgagtgtagta

SEQ ID NO: 24015 - DNA, 25 bp, Probe sequence
taacttcagtcataatgttctacat

SEQ ID NO: 24016 - DNA, 25 bp, Probe sequence
aatgatttgttagtaatgagtgtag

SEQ ID NO: 24017 - DNA, 25 bp, Probe sequence
tttaacttcagtcataatgttctac

SEQ ID NO: 24018 - DNA, 25 bp, Probe sequence
aaaatgatttgttagtaatgagtgt

SEQ ID NO: 24019 - DNA, 25 bp, Probe sequence
tgtagttggtttcccaattatttat

SEQ ID NO: 24020 - DNA, 25 bp, Probe sequence
atgtagttggtttcccaattattta

SEQ ID NO: 24021 - DNA, 25 bp, Probe sequence
aaagtagtgtctcgaagtttattca

SEQ ID NO: 24022 - DNA, 25 bp, Probe sequence
agtagtgtctcgaagtttattcatt

SEQ ID NO: 24023 - DNA, 25 bp, Probe sequence
aagtagtgtctcgaagtttattcat

SEQ ID NO: 24024 - DNA, 25 bp, Probe sequence
gtagtgtctcgaagtttattcatta

SEQ ID NO: 24025 - DNA, 25 bp, Probe sequence
agtgtctcgaagtttattcattaat

SEQ ID NO: 24026 - DNA, 25 bp, Probe sequence
tcatcactcctttaattatgtgttt

SEQ ID NO: 24027 - DNA, 25 bp, Probe sequence
tgatagaaaagtagtgtctcgaagt

SEQ ID NO: 24028 - DNA, 25 bp, Probe sequence
catcactcctttaattatgtgtttc

SEQ ID NO: 24029 - DNA, 25 bp, Probe sequence
atcatcactcctttaattatgtgtt

SEQ ID NO: 24030 - DNA, 25 bp, Probe sequence
catgaacataatactcctggatggc

SEQ ID NO: 24031 - DNA, 25 bp, Probe sequence
atgaacataatactcctggatggcg

SEQ ID NO: 24032 - DNA, 25 bp, Probe sequence
tcatgaacataatactcctggatgg

SEQ ID NO: 24033 - DNA, 25 bp, Probe sequence
tacatattgaccattttcacgcaaa

SEQ ID NO: 24034 - DNA, 25 bp, Probe sequence
atacatattgaccattttcacgcaa

SEQ ID NO: 24035 - DNA, 25 bp, Probe sequence
aatacatattgaccattttcacgca

SEQ ID NO: 24036 - DNA, 25 bp, Probe sequence
acatattgaccattttcacgcaaat

SEQ ID NO: 24037 - DNA, 25 bp, Probe sequence
catattgaccattttcacgcaaata

SEQ ID NO: 24038 - DNA, 25 bp, Probe sequence
taatacatattgaccattttcacgc

SEQ ID NO: 24039 - DNA, 25 bp, Probe sequence
ttgtataggatgttcttggtggtac

SEQ ID NO: 24040 - DNA, 25 bp, Probe sequence
tgtataggatgttcttggtggtacg

SEQ ID NO: 24041 - DNA, 25 bp, Probe sequence
tttgtataggatgttcttggtggta

SEQ ID NO: 24042 - DNA, 25 bp, Probe sequence
tgatactcgaagtctaagacattca

SEQ ID NO: 24043 - DNA, 25 bp, Probe sequence
gtataggatgttcttggtggtacgt

SEQ ID NO: 24044 - DNA, 25 bp, Probe sequence
atactcgaagtctaagacattcatg

SEQ ID NO: 24045 - DNA, 25 bp, Probe sequence
atattcgtgatctttgtagtctgac

SEQ ID NO: 24046 - DNA, 25 bp, Probe sequence
ttgatactcgaagtctaagacattc

SEQ ID NO: 24047 - DNA, 25 bp, Probe sequence
gatactcgaagtctaagacattcat

SEQ ID NO: 24048 - DNA, 25 bp, Probe sequence
catcagttaggtgttcataagtgga

SEQ ID NO: 24049 - DNA, 25 bp, Probe sequence
tcatcagttaggtgttcataagtgg

SEQ ID NO: 24050 - DNA, 25 bp, Probe sequence
cttacttagatgcttgtattgccac

SEQ ID NO: 24051 - DNA, 25 bp, Probe sequence
atgcttacttagatgcttgtattgc

SEQ ID NO: 24052 - DNA, 25 bp, Probe sequence
aggatgcttacttagatgcttgtat

SEQ ID NO: 24053 - DNA, 25 bp, Probe sequence
cttgtgcctggttattctgatgata

SEQ ID NO: 24054 - DNA, 25 bp, Probe sequence
ctaatacacacatccttaacttcgc

SEQ ID NO: 24055 - DNA, 25 bp, Probe sequence
agcctaatacacacatccttaactt

SEQ ID NO: 24056 - DNA, 25 bp, Probe sequence
gccatatcatcagttaggtgttcat

SEQ ID NO: 24057 - DNA, 25 bp, Probe sequence
tcctattatactatgcgttatcggt

SEQ ID NO: 24058 - DNA, 25 bp, Probe sequence
cctattatactatgcgttatcggtt

SEQ ID NO: 24059 - DNA, 25 bp, Probe sequence
tgttatccataatatcaatgtgcca

SEQ ID NO: 24060 - DNA, 25 bp, Probe sequence
ttcctattatactatgcgttatcgg

SEQ ID NO: 24061 - DNA, 25 bp, Probe sequence
gttatccataatatcaatgtgccac

SEQ ID NO: 24062 - DNA, 25 bp, Probe sequence
atgttatccataatatcaatgtgcc

SEQ ID NO: 24063 - DNA, 25 bp, Probe sequence
atactatgcgttatcggtttcaagg

SEQ ID NO: 24064 - DNA, 25 bp, Probe sequence
tatactatgcgttatcggtttcaag

SEQ ID NO: 24065 - DNA, 25 bp, Probe sequence
ttatactatgcgttatcggtttcaa

SEQ ID NO: 24066 - DNA, 25 bp, Probe sequence
attctccacatcgcaacataaccaa

SEQ ID NO: 24067 - DNA, 25 bp, Probe sequence
aattctccacatcgcaacataacca

SEQ ID NO: 24068 - DNA, 25 bp, Probe sequence
gaatcctatcccaatctccatgaat

SEQ ID NO: 24069 - DNA, 25 bp, Probe sequence
tgaatcctatcccaatctccatgaa

SEQ ID NO: 24070 - DNA, 25 bp, Probe sequence
atgaatcctatcccaatctccatga

SEQ ID NO: 24071 - DNA, 25 bp, Probe sequence
aatcctatcccaatctccatgaata

SEQ ID NO: 24072 - DNA, 25 bp, Probe sequence
aaattctccacatcgcaacataacc

SEQ ID NO: 24073 - DNA, 25 bp, Probe sequence
atcctatcccaatctccatgaatat

SEQ ID NO: 24074 - DNA, 25 bp, Probe sequence
tcctatcccaatctccatgaatata

SEQ ID NO: 24075 - DNA, 25 bp, Probe sequence
acggctacaatggctataaatatca

SEQ ID NO: 24076 - DNA, 25 bp, Probe sequence
gacggctacaatggctataaatatc

SEQ ID NO: 24077 - DNA, 25 bp, Probe sequence
tcattaggtttaagcactgtaggaa

SEQ ID NO: 24078 - DNA, 25 bp, Probe sequence
ttcattaggtttaagcactgtagga

SEQ ID NO: 24079 - DNA, 25 bp, Probe sequence
aagtttactaaatgtcgcaggtttc

SEQ ID NO: 24080 - DNA, 25 bp, Probe sequence
caagtttactaaatgtcgcaggttt

SEQ ID NO: 24081 - DNA, 25 bp, Probe sequence
cgacggctacaatggctataaatat

SEQ ID NO: 24082 - DNA, 25 bp, Probe sequence
atcaagtttactaaatgtcgcaggt

SEQ ID NO: 24083 - DNA, 25 bp, Probe sequence
gattatttacaagcattcgcaaagt

SEQ ID NO: 24084 - DNA, 25 bp, Probe sequence
ctctacaatgttatattgactgcgg

SEQ ID NO: 24085 - DNA, 25 bp, Probe sequence
actctacaatgttatattgactgcg

SEQ ID NO: 24086 - DNA, 25 bp, Probe sequence
ggacccaacacagagaatttctaaa

SEQ ID NO: 24087 - DNA, 25 bp, Probe sequence
gggacccaacacagagaatttctaa

SEQ ID NO: 24088 - DNA, 25 bp, Probe sequence
tctacaatgttatattgactgcggg

SEQ ID NO: 24089 - DNA, 25 bp, Probe sequence
aattctacaggcaatgcacgtttat

SEQ ID NO: 24090 - DNA, 25 bp, Probe sequence
aaattctacaggcaatgcacgttta

SEQ ID NO: 24091 - DNA, 25 bp, Probe sequence
attctacaggcaatgcacgtttatg

SEQ ID NO: 24092 - DNA, 25 bp, Probe sequence
tactctacaatgttatattgactgc

SEQ ID NO: 24093 - DNA, 25 bp, Probe sequence
gccaacttgcattgtctgtagaatt

SEQ ID NO: 24094 - DNA, 25 bp, Probe sequence
aatttatttcgttgtcactccccaa

SEQ ID NO: 24095 - DNA, 25 bp, Probe sequence
cgccaacttgcattgtctgtagaat

SEQ ID NO: 24096 - DNA, 25 bp, Probe sequence
aaaatttatttcgttgtcactcccc

SEQ ID NO: 24097 - DNA, 25 bp, Probe sequence
aaatttatttcgttgtcactcccca

SEQ ID NO: 24098 - DNA, 25 bp, Probe sequence
taaaatttatttcgttgtcactccc

SEQ ID NO: 24099 - DNA, 25 bp, Probe sequence
ttttgaatttctctatgttggggcc

SEQ ID NO: 24100 - DNA, 25 bp, Probe sequence
ataaaatttatttcgttgtcactcc

SEQ ID NO: 24101 - DNA, 25 bp, Probe sequence
atttatttcgttgtcactccccaac

SEQ ID NO: 24102 - DNA, 25 bp, Probe sequence
gtgtcagttattgcgattgcgataa

SEQ ID NO: 24103 - DNA, 25 bp, Probe sequence
ttattgcgattgcgataacttcttt

SEQ ID NO: 24104 - DNA, 25 bp, Probe sequence
gtttacattgagtgagggatattga

SEQ ID NO: 24105 - DNA, 25 bp, Probe sequence
agtttacattgagtgagggatattg

SEQ ID NO: 24106 - DNA, 25 bp, Probe sequence
ttaaagtttacattgagtgagggat

SEQ ID NO: 24107 - DNA, 25 bp, Probe sequence
aagtttacattgagtgagggatatt

SEQ ID NO: 24108 - DNA, 25 bp, Probe sequence
aaagtttacattgagtgagggatat

SEQ ID NO: 24109 - DNA, 25 bp, Probe sequence
taaagtttacattgagtgagggata

SEQ ID NO: 24110 - DNA, 25 bp, Probe sequence
tttaaagtttacattgagtgaggga

SEQ ID NO: 24111 - DNA, 25 bp, Probe sequence
tctttgtatgataccttaaatacct

SEQ ID NO: 24112 - DNA, 25 bp, Probe sequence
tacatatcccatatgaaaacggctt

SEQ ID NO: 24113 - DNA, 25 bp, Probe sequence
ttacatatcccatatgaaaacggct

SEQ ID NO: 24114 - DNA, 25 bp, Probe sequence
attacatatcccatatgaaaacggc

SEQ ID NO: 24115 - DNA, 25 bp, Probe sequence
acatatcccatatgaaaacggcttt

SEQ ID NO: 24116 - DNA, 25 bp, Probe sequence
tattacatatcccatatgaaaacgg

SEQ ID NO: 24117 - DNA, 25 bp, Probe sequence
accttattacatatcccatatgaaa

SEQ ID NO: 24118 - DNA, 25 bp, Probe sequence
ttattacatatcccatatgaaaacg

SEQ ID NO: 24119 - DNA, 25 bp, Probe sequence
tcaagtgtggttatatcattccgtt

SEQ ID NO: 24120 - DNA, 25 bp, Probe sequence
tctcaagtgtggttatatcattccg

SEQ ID NO: 24121 - DNA, 25 bp, Probe sequence
ctcaagtgtggttatatcattccgt

SEQ ID NO: 24122 - DNA, 25 bp, Probe sequence
tgtgtagatgaagaaggagataagt

SEQ ID NO: 24123 - DNA, 25 bp, Probe sequence
caagtgtggttatatcattccgttg

SEQ ID NO: 24124 - DNA, 25 bp, Probe sequence
aagaaccagcagattatacacaacg

SEQ ID NO: 24125 - DNA, 25 bp, Probe sequence
aagtgtggttatatcattccgttgc

SEQ ID NO: 24126 - DNA, 25 bp, Probe sequence
atctcaagtgtggttatatcattcc

SEQ ID NO: 24127 - DNA, 25 bp, Probe sequence
cttattcgccaagacttgttaatca

SEQ ID NO: 24128 - DNA, 25 bp, Probe sequence
ttatattggcgttattgctcctctt

SEQ ID NO: 24129 - DNA, 25 bp, Probe sequence
ggtgttcactattattcttgctgtt

SEQ ID NO: 24130 - DNA, 25 bp, Probe sequence
tggtgttcactattattcttgctgt

SEQ ID NO: 24131 - DNA, 25 bp, Probe sequence
atggtgttcactattattcttgctg

SEQ ID NO: 24132 - DNA, 25 bp, Probe sequence
ttatcagcactatcgttacaacaat

SEQ ID NO: 24133 - DNA, 25 bp, Probe sequence
acgcaatacgaattattccaatctg

SEQ ID NO: 24134 - DNA, 25 bp, Probe sequence
atcagcactatcgttacaacaatat

SEQ ID NO: 24135 - DNA, 25 bp, Probe sequence
tacgcaatacgaattattccaatct

SEQ ID NO: 24136 - DNA, 25 bp, Probe sequence
tatcagcactatcgttacaacaata

SEQ ID NO: 24137 - DNA, 25 bp, Probe sequence
gggatgttctatgtggtattgataa

SEQ ID NO: 24138 - DNA, 25 bp, Probe sequence
ggatgttctatgtggtattgataat

SEQ ID NO: 24139 - DNA, 25 bp, Probe sequence
atgaccaatccaacaagaacgaaac

SEQ ID NO: 24140 - DNA, 25 bp, Probe sequence
acattagtgagaatcattgtcaatt

SEQ ID NO: 24141 - DNA, 25 bp, Probe sequence
atacattagtgagaatcattgtcaa

SEQ ID NO: 24142 - DNA, 25 bp, Probe sequence
tacattagtgagaatcattgtcaat

SEQ ID NO: 24143 - DNA, 25 bp, Probe sequence
ggggatgttctatgtggtattgata

SEQ ID NO: 24144 - DNA, 25 bp, Probe sequence
tagtgagaatcattgtcaattagaa

SEQ ID NO: 24145 - DNA, 25 bp, Probe sequence
ttagtgagaatcattgtcaattaga

SEQ ID NO: 24146 - DNA, 25 bp, Probe sequence
ttaaatcatttgagaagttacgaca

SEQ ID NO: 24147 - DNA, 25 bp, Probe sequence
aatcatttgagaagttacgacataa

SEQ ID NO: 24148 - DNA, 25 bp, Probe sequence
aaatcatttgagaagttacgacata

SEQ ID NO: 24149 - DNA, 25 bp, Probe sequence
taaatcatttgagaagttacgacat

SEQ ID NO: 24150 - DNA, 25 bp, Probe sequence
atcatttgagaagttacgacataat

SEQ ID NO: 24151 - DNA, 25 bp, Probe sequence
ttgagaagttacgacataataattc

SEQ ID NO: 24152 - DNA, 25 bp, Probe sequence
tcatttgagaagttacgacataata

SEQ ID NO: 24153 - DNA, 25 bp, Probe sequence
tgagaagttacgacataataattct

SEQ ID NO: 24154 - DNA, 25 bp, Probe sequence
catttgagaagttacgacataataa

SEQ ID NO: 24155 - DNA, 25 bp, Probe sequence
attaactgtattattggttggtcgc

SEQ ID NO: 24156 - DNA, 25 bp, Probe sequence
ttaactgtattattggttggtcgca

SEQ ID NO: 24157 - DNA, 25 bp, Probe sequence
atcttcctagcctcagtgttaatag

SEQ ID NO: 24158 - DNA, 25 bp, Probe sequence
taactgtattattggttggtcgcaa

SEQ ID NO: 24159 - DNA, 25 bp, Probe sequence
ttaccatagccagtacaattatcgg

SEQ ID NO: 24160 - DNA, 25 bp, Probe sequence
gccgagtgatgcttatattatagaa

SEQ ID NO: 24161 - DNA, 25 bp, Probe sequence
atatcttcctagcctcagtgttaat

SEQ ID NO: 24162 - DNA, 25 bp, Probe sequence
taccatagccagtacaattatcgga

SEQ ID NO: 24163 - DNA, 25 bp, Probe sequence
ccatagccagtacaattatcggaac

SEQ ID NO: 24164 - DNA, 25 bp, Probe sequence
gaagaagtcaagccagtattggaac

SEQ ID NO: 24165 - DNA, 25 bp, Probe sequence
atgcgaagaagtcaagccagtattg

SEQ ID NO: 24166 - DNA, 25 bp, Probe sequence
aagaagtcaagccagtattggaacc

SEQ ID NO: 24167 - DNA, 25 bp, Probe sequence
cgaagaagtcaagccagtattggaa

SEQ ID NO: 24168 - DNA, 25 bp, Probe sequence
agaagtcaagccagtattggaaccg

SEQ ID NO: 24169 - DNA, 25 bp, Probe sequence
gcgaagaagtcaagccagtattgga

SEQ ID NO: 24170 - DNA, 25 bp, Probe sequence
tatacacaatcagtagccaaccact

SEQ ID NO: 24171 - DNA, 25 bp, Probe sequence
atacacaatcagtagccaaccactt

SEQ ID NO: 24172 - DNA, 25 bp, Probe sequence
gaaacagcacttgaactaaacattg

SEQ ID NO: 24173 - DNA, 25 bp, Probe sequence
cgaaacagcacttgaactaaacatt

SEQ ID NO: 24174 - DNA, 25 bp, Probe sequence
aacatttagatagcacgattgaaca

SEQ ID NO: 24175 - DNA, 25 bp, Probe sequence
acatttagatagcacgattgaacaa

SEQ ID NO: 24176 - DNA, 25 bp, Probe sequence
tgaacatttagatagcacgattgaa

SEQ ID NO: 24177 - DNA, 25 bp, Probe sequence
ttgaacatttagatagcacgattga

SEQ ID NO: 24178 - DNA, 25 bp, Probe sequence
atagacattggtttcacggaactta

SEQ ID NO: 24179 - DNA, 25 bp, Probe sequence
aggccgaatgatcaagctattataa

SEQ ID NO: 24180 - DNA, 25 bp, Probe sequence
caggccgaatgatcaagctattata

SEQ ID NO: 24181 - DNA, 25 bp, Probe sequence
gtatataacaggccgaatgatcaag

SEQ ID NO: 24182 - DNA, 25 bp, Probe sequence
tatataacaggccgaatgatcaagc

SEQ ID NO: 24183 - DNA, 25 bp, Probe sequence
tataacaggccgaatgatcaagcta

SEQ ID NO: 24184 - DNA, 25 bp, Probe sequence
tgtatataacaggccgaatgatcaa

SEQ ID NO: 24185 - DNA, 25 bp, Probe sequence
acaggccgaatgatcaagctattat

SEQ ID NO: 24186 - DNA, 25 bp, Probe sequence
ataacaggccgaatgatcaagctat

SEQ ID NO: 24187 - DNA, 25 bp, Probe sequence
atataacaggccgaatgatcaagct

SEQ ID NO: 24188 - DNA, 25 bp, Probe sequence
gcataatcgtcatcattggaatctt

SEQ ID NO: 24189 - DNA, 25 bp, Probe sequence
aagcataatcgtcatcattggaatc

SEQ ID NO: 24190 - DNA, 25 bp, Probe sequence
agcataatcgtcatcattggaatct

SEQ ID NO: 24191 - DNA, 25 bp, Probe sequence
ggttaagcataatcgtcatcattgg

SEQ ID NO: 24192 - DNA, 25 bp, Probe sequence
gttaagcataatcgtcatcattgga

SEQ ID NO: 24193 - DNA, 25 bp, Probe sequence
aggttaagcataatcgtcatcattg

SEQ ID NO: 24194 - DNA, 25 bp, Probe sequence
ttaagcataatcgtcatcattggaa

SEQ ID NO: 24195 - DNA, 25 bp, Probe sequence
aaggttaagcataatcgtcatcatt

SEQ ID NO: 24196 - DNA, 25 bp, Probe sequence
taagcataatcgtcatcattggaat

SEQ ID NO: 24197 - DNA, 25 bp, Probe sequence
aatcgttattgtgtggatacttgta

SEQ ID NO: 24198 - DNA, 25 bp, Probe sequence
taatcgttattgtgtggatacttgt

SEQ ID NO: 24199 - DNA, 25 bp, Probe sequence
tcgttattgtgtggatacttgtatt

SEQ ID NO: 24200 - DNA, 25 bp, Probe sequence
cgttattgtgtggatacttgtattc

SEQ ID NO: 24201 - DNA, 25 bp, Probe sequence
atcgttattgtgtggatacttgtat

SEQ ID NO: 24202 - DNA, 25 bp, Probe sequence
attattaatcggtgctgctattggt

SEQ ID NO: 24203 - DNA, 25 bp, Probe sequence
ttaatcgttattgtgtggatacttg

SEQ ID NO: 24204 - DNA, 25 bp, Probe sequence
ttattaatcggtgctgctattggtg

SEQ ID NO: 24205 - DNA, 25 bp, Probe sequence
cgctttcacagtaacatttattgga

SEQ ID NO: 24206 - DNA, 25 bp, Probe sequence
ttagcacttggattatcaacagcag

SEQ ID NO: 24207 - DNA, 25 bp, Probe sequence
cttggattatcaacagcagcttatg

SEQ ID NO: 24208 - DNA, 25 bp, Probe sequence
catctacagaatacgcagaaggagg

SEQ ID NO: 24209 - DNA, 25 bp, Probe sequence
acttggattatcaacagcagcttat

SEQ ID NO: 24210 - DNA, 25 bp, Probe sequence
cacttggattatcaacagcagctta

SEQ ID NO: 24211 - DNA, 25 bp, Probe sequence
gctactaaacataattgctgggtca

SEQ ID NO: 24212 - DNA, 25 bp, Probe sequence
ctttagcacttggattatcaacagc

SEQ ID NO: 24213 - DNA, 25 bp, Probe sequence
actttagcacttggattatcaacag

SEQ ID NO: 24214 - DNA, 25 bp, Probe sequence
gcatctacagaatacgcagaaggag

SEQ ID NO: 24215 - DNA, 25 bp, Probe sequence
atcgttcgttatcatttagcgtttg

SEQ ID NO: 24216 - DNA, 25 bp, Probe sequence
tatcgttcgttatcatttagcgttt

SEQ ID NO: 24217 - DNA, 25 bp, Probe sequence
gttcgttatcatttagcgtttgttt

SEQ ID NO: 24218 - DNA, 25 bp, Probe sequence
atatcgttcgttatcatttagcgtt

SEQ ID NO: 24219 - DNA, 25 bp, Probe sequence
cgttcgttatcatttagcgtttgtt

SEQ ID NO: 24220 - DNA, 25 bp, Probe sequence
tcgttcgttatcatttagcgtttgt

SEQ ID NO: 24221 - DNA, 25 bp, Probe sequence
tatatcgttcgttatcatttagcgt

SEQ ID NO: 24222 - DNA, 25 bp, Probe sequence
atatatcgttcgttatcatttagcg

SEQ ID NO: 24223 - DNA, 25 bp, Probe sequence
ttcgttatcatttagcgtttgtttt

SEQ ID NO: 24224 - DNA, 25 bp, Probe sequence
tacaaatcgcaactactctatccaa

SEQ ID NO: 24225 - DNA, 25 bp, Probe sequence
ttacaaatcgcaactactctatcca

SEQ ID NO: 24226 - DNA, 25 bp, Probe sequence
acaaatcgcaactactctatccaag

SEQ ID NO: 24227 - DNA, 25 bp, Probe sequence
tttacaaatcgcaactactctatcc

SEQ ID NO: 24228 - DNA, 25 bp, Probe sequence
cgtatttacaaatcgcaactactct

SEQ ID NO: 24229 - DNA, 25 bp, Probe sequence
caactactctatccaaggcgaaatc

SEQ ID NO: 24230 - DNA, 25 bp, Probe sequence
caaatcgcaactactctatccaagg

SEQ ID NO: 24231 - DNA, 25 bp, Probe sequence
acgtatttacaaatcgcaactactc

SEQ ID NO: 24232 - DNA, 25 bp, Probe sequence
aactactctatccaaggcgaaatcg

SEQ ID NO: 24233 - DNA, 25 bp, Probe sequence
tccagcaattcaaggtctatattca

SEQ ID NO: 24234 - DNA, 25 bp, Probe sequence
ccagcaattcaaggtctatattcaa

SEQ ID NO: 24235 - DNA, 25 bp, Probe sequence
ttccagcaattcaaggtctatattc

SEQ ID NO: 24236 - DNA, 25 bp, Probe sequence
tattcaagacctcgctctggatatt

SEQ ID NO: 24237 - DNA, 25 bp, Probe sequence
ttattcaagacctcgctctggatat

SEQ ID NO: 24238 - DNA, 25 bp, Probe sequence
attccagcaattcaaggtctatatt

SEQ ID NO: 24239 - DNA, 25 bp, Probe sequence
tcaaggtctatattcaagaggagaa

SEQ ID NO: 24240 - DNA, 25 bp, Probe sequence
ttcaaggtctatattcaagaggaga

SEQ ID NO: 24241 - DNA, 25 bp, Probe sequence
cagcaattcaaggtctatattcaag

SEQ ID NO: 24242 - DNA, 25 bp, Probe sequence
tgtatcagcattattagaaggcgaa

SEQ ID NO: 24243 - DNA, 25 bp, Probe sequence
ttagattattgttaagcgaagcgtt

SEQ ID NO: 24244 - DNA, 25 bp, Probe sequence
gtatcagcattattagaaggcgaat

SEQ ID NO: 24245 - DNA, 25 bp, Probe sequence
tagattattgttaagcgaagcgttc

SEQ ID NO: 24246 - DNA, 25 bp, Probe sequence
cagcattattagaaggcgaatatga

SEQ ID NO: 24247 - DNA, 25 bp, Probe sequence
tcagcattattagaaggcgaatatg

SEQ ID NO: 24248 - DNA, 25 bp, Probe sequence
acaccatattctccaacaacagttc

SEQ ID NO: 24249 - DNA, 25 bp, Probe sequence
cacaccatattctccaacaacagtt

SEQ ID NO: 24250 - DNA, 25 bp, Probe sequence
atcagcattattagaaggcgaatat

SEQ ID NO: 24251 - DNA, 25 bp, Probe sequence
agtttagtcatcatttatgctccct

SEQ ID NO: 24252 - DNA, 25 bp, Probe sequence
cagtttagtcatcatttatgctccc

SEQ ID NO: 24253 - DNA, 25 bp, Probe sequence
tttagtcatcatttatgctcccttg

SEQ ID NO: 24254 - DNA, 25 bp, Probe sequence
gtttagtcatcatttatgctccctt

SEQ ID NO: 24255 - DNA, 25 bp, Probe sequence
tcagtttagtcatcatttatgctcc

SEQ ID NO: 24256 - DNA, 25 bp, Probe sequence
ttagtcatcatttatgctcccttga

SEQ ID NO: 24257 - DNA, 25 bp, Probe sequence
tggctactgcaattattgttggaat

SEQ ID NO: 24258 - DNA, 25 bp, Probe sequence
atggctactgcaattattgttggaa

SEQ ID NO: 24259 - DNA, 25 bp, Probe sequence
aatggctactgcaattattgttgga

SEQ ID NO: 24260 - DNA, 25 bp, Probe sequence
tgaacattattacactcctgaaggt

SEQ ID NO: 24261 - DNA, 25 bp, Probe sequence
tctcaagaatgtatcaagcactcta

SEQ ID NO: 24262 - DNA, 25 bp, Probe sequence
agtgctgagattcaagatgcttata

SEQ ID NO: 24263 - DNA, 25 bp, Probe sequence
aagtgctgagattcaagatgcttat

SEQ ID NO: 24264 - DNA, 25 bp, Probe sequence
catacctccagttggctataattcg

SEQ ID NO: 24265 - DNA, 25 bp, Probe sequence
ttaagtgctgagattcaagatgctt

SEQ ID NO: 24266 - DNA, 25 bp, Probe sequence
ttctcaagaatgtatcaagcactct

SEQ ID NO: 24267 - DNA, 25 bp, Probe sequence
gcatacctccagttggctataattc

SEQ ID NO: 24268 - DNA, 25 bp, Probe sequence
ctcaagaatgtatcaagcactctaa

SEQ ID NO: 24269 - DNA, 25 bp, Probe sequence
ttgacagtccactagagatattagc

SEQ ID NO: 24270 - DNA, 25 bp, Probe sequence
cagttgatgttgaagaagtgtggaa

SEQ ID NO: 24271 - DNA, 25 bp, Probe sequence
gaatcgctgagcatattgaatctat

SEQ ID NO: 24272 - DNA, 25 bp, Probe sequence
agaatcgctgagcatattgaatcta

SEQ ID NO: 24273 - DNA, 25 bp, Probe sequence
cgctgagcatattgaatctattact

SEQ ID NO: 24274 - DNA, 25 bp, Probe sequence
tcgctgagcatattgaatctattac

SEQ ID NO: 24275 - DNA, 25 bp, Probe sequence
aatcgctgagcatattgaatctatt

SEQ ID NO: 24276 - DNA, 25 bp, Probe sequence
aagaatcgctgagcatattgaatct

SEQ ID NO: 24277 - DNA, 25 bp, Probe sequence
agttgatgttgaagaagtgtggaac

SEQ ID NO: 24278 - DNA, 25 bp, Probe sequence
atatgttgtaacggctgttgtctta

SEQ ID NO: 24279 - DNA, 25 bp, Probe sequence
aattaccatacatacctaagcaacg

SEQ ID NO: 24280 - DNA, 25 bp, Probe sequence
tatgttgtaacggctgttgtcttaa

SEQ ID NO: 24281 - DNA, 25 bp, Probe sequence
aatatgttgtaacggctgttgtctt

SEQ ID NO: 24282 - DNA, 25 bp, Probe sequence
ctaagcaaccaccattcttcttcag

SEQ ID NO: 24283 - DNA, 25 bp, Probe sequence
acaattaccatacatacctaagcaa

SEQ ID NO: 24284 - DNA, 25 bp, Probe sequence
aacaattaccatacatacctaagca

SEQ ID NO: 24285 - DNA, 25 bp, Probe sequence
aaccaccattcttcttcagtgtatt

SEQ ID NO: 24286 - DNA, 25 bp, Probe sequence
accaccattcttcttcagtgtatta

SEQ ID NO: 24287 - DNA, 25 bp, Probe sequence
ttaggcgacatctattgataacatt

SEQ ID NO: 24288 - DNA, 25 bp, Probe sequence
gaatcttgttgtatctttaggcgac

SEQ ID NO: 24289 - DNA, 25 bp, Probe sequence
aggcgacatctattgataacatttc

SEQ ID NO: 24290 - DNA, 25 bp, Probe sequence
agttaatgctttctttccagtcaaa

SEQ ID NO: 24291 - DNA, 25 bp, Probe sequence
cgaatcttgttgtatctttaggcga

SEQ ID NO: 24292 - DNA, 25 bp, Probe sequence
aagttaatgctttctttccagtcaa

SEQ ID NO: 24293 - DNA, 25 bp, Probe sequence
ctttaggcgacatctattgataaca

SEQ ID NO: 24294 - DNA, 25 bp, Probe sequence
gttaatgctttctttccagtcaaac

SEQ ID NO: 24295 - DNA, 25 bp, Probe sequence
ggcgacatctattgataacatttca

SEQ ID NO: 24296 - DNA, 25 bp, Probe sequence
tgtgacgattgatgataaattgagc

SEQ ID NO: 24297 - DNA, 25 bp, Probe sequence
ggtgtgacgattgatgataaattga

SEQ ID NO: 24298 - DNA, 25 bp, Probe sequence
cggtgtgacgattgatgataaattg

SEQ ID NO: 24299 - DNA, 25 bp, Probe sequence
gtgtgacgattgatgataaattgag

SEQ ID NO: 24300 - DNA, 25 bp, Probe sequence
gtgacgattgatgataaattgagct

SEQ ID NO: 24301 - DNA, 25 bp, Probe sequence
tcggtgtgacgattgatgataaatt

SEQ ID NO: 24302 - DNA, 25 bp, Probe sequence
tacatcggtgtgacgattgatgata

SEQ ID NO: 24303 - DNA, 25 bp, Probe sequence
acatcggtgtgacgattgatgataa

SEQ ID NO: 24304 - DNA, 25 bp, Probe sequence
tgacgattgatgataaattgagctc

SEQ ID NO: 24305 - DNA, 25 bp, Probe sequence
aaccaattaagccagttatcttgtg

SEQ ID NO: 24306 - DNA, 25 bp, Probe sequence
accaattaagccagttatcttgtga

SEQ ID NO: 24307 - DNA, 25 bp, Probe sequence
ccaattaagccagttatcttgtgat

SEQ ID NO: 24308 - DNA, 25 bp, Probe sequence
caatagtaatcatggcagagttcat

SEQ ID NO: 24309 - DNA, 25 bp, Probe sequence
aagccagttatcttgtgatattgaa

SEQ ID NO: 24310 - DNA, 25 bp, Probe sequence
ttatggagtggttatcctactggaa

SEQ ID NO: 24311 - DNA, 25 bp, Probe sequence
gtggttatcctactggaactattca

SEQ ID NO: 24312 - DNA, 25 bp, Probe sequence
agtggttatcctactggaactattc

SEQ ID NO: 24313 - DNA, 25 bp, Probe sequence
gagtggttatcctactggaactatt

SEQ ID NO: 24314 - DNA, 25 bp, Probe sequence
aatagcactattagtcatcctcctt

SEQ ID NO: 24315 - DNA, 25 bp, Probe sequence
tatcaaggtttaatttggttgctcg

SEQ ID NO: 24316 - DNA, 25 bp, Probe sequence
tttaccgcactttcaatttaacaat

SEQ ID NO: 24317 - DNA, 25 bp, Probe sequence
atagcactattagtcatcctccttt

SEQ ID NO: 24318 - DNA, 25 bp, Probe sequence
taatagcactattagtcatcctcct

SEQ ID NO: 24319 - DNA, 25 bp, Probe sequence
accgcactttcaatttaacaattaa

SEQ ID NO: 24320 - DNA, 25 bp, Probe sequence
ttaccgcactttcaatttaacaatt

SEQ ID NO: 24321 - DNA, 25 bp, Probe sequence
atatcaaggtttaatttggttgctc

SEQ ID NO: 24322 - DNA, 25 bp, Probe sequence
aaggtttaatttggttgctcgattt

SEQ ID NO: 24323 - DNA, 25 bp, Probe sequence
aactcgcatcactcatttaatggaa

SEQ ID NO: 24324 - DNA, 25 bp, Probe sequence
aaactcgcatcactcatttaatgga

SEQ ID NO: 24325 - DNA, 25 bp, Probe sequence
caaactcgcatcactcatttaatgg

SEQ ID NO: 24326 - DNA, 25 bp, Probe sequence
ccaaactcgcatcactcatttaatg

SEQ ID NO: 24327 - DNA, 25 bp, Probe sequence
actcgcatcactcatttaatggaag

SEQ ID NO: 24328 - DNA, 25 bp, Probe sequence
atcactcatttaatggaagcagcac

SEQ ID NO: 24329 - DNA, 25 bp, Probe sequence
catcactcatttaatggaagcagca

SEQ ID NO: 24330 - DNA, 25 bp, Probe sequence
gccaaactcgcatcactcatttaat

SEQ ID NO: 24331 - DNA, 25 bp, Probe sequence
ctcgcatcactcatttaatggaagc

SEQ ID NO: 24332 - DNA, 25 bp, Probe sequence
ataaggaatcggctgacattgataa

SEQ ID NO: 24333 - DNA, 25 bp, Probe sequence
aataaggaatcggctgacattgata

SEQ ID NO: 24334 - DNA, 25 bp, Probe sequence
taataaggaatcggctgacattgat

SEQ ID NO: 24335 - DNA, 25 bp, Probe sequence
ttaataaggaatcggctgacattga

SEQ ID NO: 24336 - DNA, 25 bp, Probe sequence
taaggaatcggctgacattgataag

SEQ ID NO: 24337 - DNA, 25 bp, Probe sequence
agaatatcaagcaacggagattatg

SEQ ID NO: 24338 - DNA, 25 bp, Probe sequence
attgtacctattgctgctgttgata

SEQ ID NO: 24339 - DNA, 25 bp, Probe sequence
tattgtacctattgctgctgttgat

SEQ ID NO: 24340 - DNA, 25 bp, Probe sequence
attattgtacctattgctgctgttg

SEQ ID NO: 24341 - DNA, 25 bp, Probe sequence
atgaagaagaaggcacaatgagtaa

SEQ ID NO: 24342 - DNA, 25 bp, Probe sequence
catgaagaagaaggcacaatgagta

SEQ ID NO: 24343 - DNA, 25 bp, Probe sequence
gaagaagaaggcacaatgagtaaag

SEQ ID NO: 24344 - DNA, 25 bp, Probe sequence
tgaggtcattgatcgtattattgaa

SEQ ID NO: 24345 - DNA, 25 bp, Probe sequence
aagaagaaggcacaatgagtaaaga

SEQ ID NO: 24346 - DNA, 25 bp, Probe sequence
gatgaggtcattgatcgtattattg

SEQ ID NO: 24347 - DNA, 25 bp, Probe sequence
aacgctatgacgattggattaatag

SEQ ID NO: 24348 - DNA, 25 bp, Probe sequence
tgaagaagaaggcacaatgagtaaa

SEQ ID NO: 24349 - DNA, 25 bp, Probe sequence
gaggtcattgatcgtattattgaac

SEQ ID NO: 24350 - DNA, 25 bp, Probe sequence
gtgcatacttaatcgaattatcagt

SEQ ID NO: 24351 - DNA, 25 bp, Probe sequence
agtgcatacttaatcgaattatcag

SEQ ID NO: 24352 - DNA, 25 bp, Probe sequence
ttaattgttcacagcacgttccttt

SEQ ID NO: 24353 - DNA, 25 bp, Probe sequence
tttaattgttcacagcacgttcctt

SEQ ID NO: 24354 - DNA, 25 bp, Probe sequence
ttttcttttaattgttcacagcacg

SEQ ID NO: 24355 - DNA, 25 bp, Probe sequence
tgcatacttaatcgaattatcagtt

SEQ ID NO: 24356 - DNA, 25 bp, Probe sequence
gttttcttttaattgttcacagcac

SEQ ID NO: 24357 - DNA, 25 bp, Probe sequence
agttttcttttaattgttcacagca

SEQ ID NO: 24358 - DNA, 25 bp, Probe sequence
cagttttcttttaattgttcacagc

SEQ ID NO: 24359 - DNA, 25 bp, Probe sequence
atgaagcgagcaacatattggttaa

SEQ ID NO: 24360 - DNA, 25 bp, Probe sequence
tatgaagcgagcaacatattggtta

SEQ ID NO: 24361 - DNA, 25 bp, Probe sequence
caatatacggtatgaagcgagcaac

SEQ ID NO: 24362 - DNA, 25 bp, Probe sequence
aatatacggtatgaagcgagcaaca

SEQ ID NO: 24363 - DNA, 25 bp, Probe sequence
atatacggtatgaagcgagcaacat

SEQ ID NO: 24364 - DNA, 25 bp, Probe sequence
tatacggtatgaagcgagcaacata

SEQ ID NO: 24365 - DNA, 25 bp, Probe sequence
gtatgaagcgagcaacatattggtt

SEQ ID NO: 24366 - DNA, 25 bp, Probe sequence
gcgagcaacatattggttaaactta

SEQ ID NO: 24367 - DNA, 25 bp, Probe sequence
atacggtatgaagcgagcaacatat

SEQ ID NO: 24368 - DNA, 25 bp, Probe sequence
ttattacagagtgaatcggattggt

SEQ ID NO: 24369 - DNA, 25 bp, Probe sequence
tattacagagtgaatcggattggtg

SEQ ID NO: 24370 - DNA, 25 bp, Probe sequence
attacagagtgaatcggattggtga

SEQ ID NO: 24371 - DNA, 25 bp, Probe sequence
ttacagagtgaatcggattggtgaa

SEQ ID NO: 24372 - DNA, 25 bp, Probe sequence
tttattacagagtgaatcggattgg

SEQ ID NO: 24373 - DNA, 25 bp, Probe sequence
tacagagtgaatcggattggtgaaa

SEQ ID NO: 24374 - DNA, 25 bp, Probe sequence
ctttattacagagtgaatcggattg

SEQ ID NO: 24375 - DNA, 25 bp, Probe sequence
ttctttattacagagtgaatcggat

SEQ ID NO: 24376 - DNA, 25 bp, Probe sequence
tctttattacagagtgaatcggatt

SEQ ID NO: 24377 - DNA, 25 bp, Probe sequence
aacatggattaacctgtgcatatta

SEQ ID NO: 24378 - DNA, 25 bp, Probe sequence
acatggattaacctgtgcatattat

SEQ ID NO: 24379 - DNA, 25 bp, Probe sequence
tggattaacctgtgcatattataca

SEQ ID NO: 24380 - DNA, 25 bp, Probe sequence
taagcgtatactttggcaatattcg

SEQ ID NO: 24381 - DNA, 25 bp, Probe sequence
aagcgtatactttggcaatattcga

SEQ ID NO: 24382 - DNA, 25 bp, Probe sequence
atggattaacctgtgcatattatac

SEQ ID NO: 24383 - DNA, 25 bp, Probe sequence
catggattaacctgtgcatattata

SEQ ID NO: 24384 - DNA, 25 bp, Probe sequence
ggattaacctgtgcatattatacat

SEQ ID NO: 24385 - DNA, 25 bp, Probe sequence
ttactataagcgtatactttggcaa

SEQ ID NO: 24386 - DNA, 25 bp, Probe sequence
aatatctatactgtcacattgatga

SEQ ID NO: 24387 - DNA, 25 bp, Probe sequence
tcacattgatgacactttatttaat

SEQ ID NO: 24388 - DNA, 25 bp, Probe sequence
atatctatactgtcacattgatgac

SEQ ID NO: 24389 - DNA, 25 bp, Probe sequence
tcacatttattttgacaaagttgat

SEQ ID NO: 24390 - DNA, 25 bp, Probe sequence
cacatttattttgacaaagttgatt

SEQ ID NO: 24391 - DNA, 25 bp, Probe sequence
gtcacattgatgacactttatttaa

SEQ ID NO: 24392 - DNA, 25 bp, Probe sequence
tcaaaatatctatactgtcacattg

SEQ ID NO: 24393 - DNA, 25 bp, Probe sequence
caaaatatctatactgtcacattga

SEQ ID NO: 24394 - DNA, 25 bp, Probe sequence
gtcacatttattttgacaaagttga

SEQ ID NO: 24395 - DNA, 25 bp, Probe sequence
tattgcgtgtttaatgacttggttt

SEQ ID NO: 24396 - DNA, 25 bp, Probe sequence
ttattgcgtgtttaatgacttggtt

SEQ ID NO: 24397 - DNA, 25 bp, Probe sequence
attattgcgtgtttaatgacttggt

SEQ ID NO: 24398 - DNA, 25 bp, Probe sequence
aattattgcgtgtttaatgacttgg

SEQ ID NO: 24399 - DNA, 25 bp, Probe sequence
aatgacttggttttgtagcgatttt

SEQ ID NO: 24400 - DNA, 25 bp, Probe sequence
taatgacttggttttgtagcgattt

SEQ ID NO: 24401 - DNA, 25 bp, Probe sequence
gtttaatgacttggttttgtagcga

SEQ ID NO: 24402 - DNA, 25 bp, Probe sequence
ttaatgacttggttttgtagcgatt

SEQ ID NO: 24403 - DNA, 25 bp, Probe sequence
tttaatgacttggttttgtagcgat

SEQ ID NO: 24404 - DNA, 25 bp, Probe sequence
cccaacttgcacattattgtaagct

SEQ ID NO: 24405 - DNA, 25 bp, Probe sequence
ttgggaatccaatttctctttgttg

SEQ ID NO: 24406 - DNA, 25 bp, Probe sequence
tccccaacttgcacattattgtaag

SEQ ID NO: 24407 - DNA, 25 bp, Probe sequence
ctccccaacttgcacattattgtaa

SEQ ID NO: 24408 - DNA, 25 bp, Probe sequence
tgggaatccaatttctctttgttgg

SEQ ID NO: 24409 - DNA, 25 bp, Probe sequence
gggaatccaatttctctttgttggg

SEQ ID NO: 24410 - DNA, 25 bp, Probe sequence
ccccaacttgcacattattgtaagc

SEQ ID NO: 24411 - DNA, 25 bp, Probe sequence
cctccccaacttgcacattattgta

SEQ ID NO: 24412 - DNA, 25 bp, Probe sequence
atatatttcgtcgtcccaccccaac

SEQ ID NO: 24413 - DNA, 25 bp, Probe sequence
attaaccatagaacgataggtgtgg

SEQ ID NO: 24414 - DNA, 25 bp, Probe sequence
cgtttattgaaatgggaacacttga

SEQ ID NO: 24415 - DNA, 25 bp, Probe sequence
atttgtcggcaactgataaagaatc

SEQ ID NO: 24416 - DNA, 25 bp, Probe sequence
tgtcgaacatattaaccatagaacg

SEQ ID NO: 24417 - DNA, 25 bp, Probe sequence
aatttgtcggcaactgataaagaat

SEQ ID NO: 24418 - DNA, 25 bp, Probe sequence
ccgtttattgaaatgggaacacttg

SEQ ID NO: 24419 - DNA, 25 bp, Probe sequence
caatttgtcggcaactgataaagaa

SEQ ID NO: 24420 - DNA, 25 bp, Probe sequence
tattaaccatagaacgataggtgtg

SEQ ID NO: 24421 - DNA, 25 bp, Probe sequence
cgaacatattaaccatagaacgata

SEQ ID NO: 24422 - DNA, 25 bp, Probe sequence
tcgtgagtattatgagtccttacaa

SEQ ID NO: 24423 - DNA, 25 bp, Probe sequence
atcgtgagtattatgagtccttaca

SEQ ID NO: 24424 - DNA, 25 bp, Probe sequence
aactgaagatatgattatgccgaat

SEQ ID NO: 24425 - DNA, 25 bp, Probe sequence
taactgaagatatgattatgccgaa

SEQ ID NO: 24426 - DNA, 25 bp, Probe sequence
ttaactgaagatatgattatgccga

SEQ ID NO: 24427 - DNA, 25 bp, Probe sequence
actgaagatatgattatgccgaata

SEQ ID NO: 24428 - DNA, 25 bp, Probe sequence
gattatcgtgagtattatgagtcct

SEQ ID NO: 24429 - DNA, 25 bp, Probe sequence
agattatcgtgagtattatgagtcc

SEQ ID NO: 24430 - DNA, 25 bp, Probe sequence
tatcgtgagtattatgagtccttac

SEQ ID NO: 24431 - DNA, 25 bp, Probe sequence
caagattcattatcaagccacttca

SEQ ID NO: 24432 - DNA, 25 bp, Probe sequence
acaagattcattatcaagccacttc

SEQ ID NO: 24433 - DNA, 25 bp, Probe sequence
agattcattatcaagccacttcatt

SEQ ID NO: 24434 - DNA, 25 bp, Probe sequence
aagattcattatcaagccacttcat

SEQ ID NO: 24435 - DNA, 25 bp, Probe sequence
ttacaagattcattatcaagccact

SEQ ID NO: 24436 - DNA, 25 bp, Probe sequence
tacaagattcattatcaagccactt

SEQ ID NO: 24437 - DNA, 25 bp, Probe sequence
cgctacaagtacacatctatatgga

SEQ ID NO: 24438 - DNA, 25 bp, Probe sequence
ccgctacaagtacacatctatatgg

SEQ ID NO: 24439 - DNA, 25 bp, Probe sequence
gctacaagtacacatctatatggag

SEQ ID NO: 24440 - DNA, 25 bp, Probe sequence
cgagatgttaggcgaccattatatt

SEQ ID NO: 24441 - DNA, 25 bp, Probe sequence
aattgaacatccatcatacacctcc

SEQ ID NO: 24442 - DNA, 25 bp, Probe sequence
gagatgttaggcgaccattatatta

SEQ ID NO: 24443 - DNA, 25 bp, Probe sequence
attgaacatccatcatacacctcct

SEQ ID NO: 24444 - DNA, 25 bp, Probe sequence
gaacatccatcatacacctcctctc

SEQ ID NO: 24445 - DNA, 25 bp, Probe sequence
ccgagatgttaggcgaccattatat

SEQ ID NO: 24446 - DNA, 25 bp, Probe sequence
aacatccatcatacacctcctctct

SEQ ID NO: 24447 - DNA, 25 bp, Probe sequence
ttgaacatccatcatacacctcctc

SEQ ID NO: 24448 - DNA, 25 bp, Probe sequence
agatgttaggcgaccattatattat

SEQ ID NO: 24449 - DNA, 25 bp, Probe sequence
tgctattaaggtgggaattgaaatg

SEQ ID NO: 24450 - DNA, 25 bp, Probe sequence
gctattaaggtgggaattgaaatga

SEQ ID NO: 24451 - DNA, 25 bp, Probe sequence
aatgctattaaggtgggaattgaaa

SEQ ID NO: 24452 - DNA, 25 bp, Probe sequence
atgctattaaggtgggaattgaaat

SEQ ID NO: 24453 - DNA, 25 bp, Probe sequence
aatcaatgctattaaggtgggaatt

SEQ ID NO: 24454 - DNA, 25 bp, Probe sequence
taatcaatgctattaaggtgggaat

SEQ ID NO: 24455 - DNA, 25 bp, Probe sequence
attaaggtgggaattgaaatgaaat

SEQ ID NO: 24456 - DNA, 25 bp, Probe sequence
ctattaaggtgggaattgaaatgaa

SEQ ID NO: 24457 - DNA, 25 bp, Probe sequence
caatgctattaaggtgggaattgaa

SEQ ID NO: 24458 - DNA, 25 bp, Probe sequence
tacagaagttggaccttatgaagac

SEQ ID NO: 24459 - DNA, 25 bp, Probe sequence
ttacagaagttggaccttatgaaga

SEQ ID NO: 24460 - DNA, 25 bp, Probe sequence
cagaagttggaccttatgaagacac

SEQ ID NO: 24461 - DNA, 25 bp, Probe sequence
attacagaagttggaccttatgaag

SEQ ID NO: 24462 - DNA, 25 bp, Probe sequence
acagaagttggaccttatgaagaca

SEQ ID NO: 24463 - DNA, 25 bp, Probe sequence
gaagttggaccttatgaagacactg

SEQ ID NO: 24464 - DNA, 25 bp, Probe sequence
agaagttggaccttatgaagacact

SEQ ID NO: 24465 - DNA, 25 bp, Probe sequence
aattacagaagttggaccttatgaa

SEQ ID NO: 24466 - DNA, 25 bp, Probe sequence
aactggtattggtattgaagaaaca

SEQ ID NO: 24467 - DNA, 25 bp, Probe sequence
aagttgtagtaggattcttgttgat

SEQ ID NO: 24468 - DNA, 25 bp, Probe sequence
taagttgtagtaggattcttgttga

SEQ ID NO: 24469 - DNA, 25 bp, Probe sequence
agttgtagtaggattcttgttgata

SEQ ID NO: 24470 - DNA, 25 bp, Probe sequence
tgatacaccagtccaaacattagat

SEQ ID NO: 24471 - DNA, 25 bp, Probe sequence
tgttaatattcctgtcggctatagt

SEQ ID NO: 24472 - DNA, 25 bp, Probe sequence
aagaagcaacatatttagaacgcaa

SEQ ID NO: 24473 - DNA, 25 bp, Probe sequence
tccaagaagcaacatatttagaacg

SEQ ID NO: 24474 - DNA, 25 bp, Probe sequence
agaagcaacatatttagaacgcaat

SEQ ID NO: 24475 - DNA, 25 bp, Probe sequence
caagaagcaacatatttagaacgca

SEQ ID NO: 24476 - DNA, 25 bp, Probe sequence
gcgattcaaccttaataggatatgc

SEQ ID NO: 24477 - DNA, 25 bp, Probe sequence
cgattcaaccttaataggatatgct

SEQ ID NO: 24478 - DNA, 25 bp, Probe sequence
taataggatatgctaaacactgccg

SEQ ID NO: 24479 - DNA, 25 bp, Probe sequence
gtagaaagatgtgtatcaggacctc

SEQ ID NO: 24480 - DNA, 25 bp, Probe sequence
ccgtttgaagtctgtttagaagaaa

SEQ ID NO: 24481 - DNA, 25 bp, Probe sequence
tcgtcatcaacacacacagtttata

SEQ ID NO: 24482 - DNA, 25 bp, Probe sequence
aatcaaacaataatttcgcagtagc

SEQ ID NO: 24483 - DNA, 25 bp, Probe sequence
tagaaagatgtgtatcaggacctct

SEQ ID NO: 24484 - DNA, 25 bp, Probe sequence
ttaataggatatgctaaacactgcc

SEQ ID NO: 24485 - DNA, 25 bp, Probe sequence
gtaatggataacacgtaagattccg

SEQ ID NO: 24486 - DNA, 25 bp, Probe sequence
tgtaatggataacacgtaagattcc

SEQ ID NO: 24487 - DNA, 25 bp, Probe sequence
taatggataacacgtaagattccgg

SEQ ID NO: 24488 - DNA, 25 bp, Probe sequence
gataacacgtaagattccggttctt

SEQ ID NO: 24489 - DNA, 25 bp, Probe sequence
atggataacacgtaagattccggtt

SEQ ID NO: 24490 - DNA, 25 bp, Probe sequence
aatggataacacgtaagattccggt

SEQ ID NO: 24491 - DNA, 25 bp, Probe sequence
ggataacacgtaagattccggttct

SEQ ID NO: 24492 - DNA, 25 bp, Probe sequence
tggataacacgtaagattccggttc

SEQ ID NO: 24493 - DNA, 25 bp, Probe sequence
ctccttgtggtgtaatggataacac

SEQ ID NO: 24494 - DNA, 25 bp, Probe sequence
gaaacgtactcaagttggctgaaga

SEQ ID NO: 24495 - DNA, 25 bp, Probe sequence
aaacgtactcaagttggctgaagag

SEQ ID NO: 24496 - DNA, 25 bp, Probe sequence
aacgtactcaagttggctgaagagg

SEQ ID NO: 24497 - DNA, 25 bp, Probe sequence
ggaaacgtactcaagttggctgaag

SEQ ID NO: 24498 - DNA, 25 bp, Probe sequence
cagtggtagagctatcggctgttaa

SEQ ID NO: 24499 - DNA, 25 bp, Probe sequence
tcagtggtagagctatcggctgtta

SEQ ID NO: 24500 - DNA, 25 bp, Probe sequence
agtggtagagctatcggctgttaac

SEQ ID NO: 24501 - DNA, 25 bp, Probe sequence
gtggtagagctatcggctgttaacc

SEQ ID NO: 24502 - DNA, 25 bp, Probe sequence
ctggatagagcaatggccttctaag

SEQ ID NO: 24503 - DNA, 25 bp, Probe sequence
tggatagagcaatggccttctaagc

SEQ ID NO: 24504 - DNA, 25 bp, Probe sequence
gctggatagagcaatggccttctaa

SEQ ID NO: 24505 - DNA, 25 bp, Probe sequence
agctggatagagcaatggccttcta

SEQ ID NO: 24506 - DNA, 25 bp, Probe sequence
ggatagagcaatggccttctaagcc

SEQ ID NO: 24507 - DNA, 25 bp, Probe sequence
gtctgaatgtgattgatgtaggttg

SEQ ID NO: 24508 - DNA, 25 bp, Probe sequence
agtctgaatgtgattgatgtaggtt

SEQ ID NO: 24509 - DNA, 25 bp, Probe sequence
tctgaatgtgattgatgtaggttgg

SEQ ID NO: 24510 - DNA, 25 bp, Probe sequence
taggtattggtgtgttagcaggtta

SEQ ID NO: 24511 - DNA, 25 bp, Probe sequence
cagtctgaatgtgattgatgtaggt

SEQ ID NO: 24512 - DNA, 25 bp, Probe sequence
cggtctgaataagttagatgctgat

SEQ ID NO: 24513 - DNA, 25 bp, Probe sequence
ttaggtattggtgtgttagcaggtt

SEQ ID NO: 24514 - DNA, 25 bp, Probe sequence
tgaataagttagatgctgatcctga

SEQ ID NO: 24515 - DNA, 25 bp, Probe sequence
ctgaataagttagatgctgatcctg

SEQ ID NO: 24516 - DNA, 25 bp, Probe sequence
cgatgtcacttatggattagcaatt

SEQ ID NO: 24517 - DNA, 25 bp, Probe sequence
ccgatgtcacttatggattagcaat

SEQ ID NO: 24518 - DNA, 25 bp, Probe sequence
aatgccgatgtcacttatggattag

SEQ ID NO: 24519 - DNA, 25 bp, Probe sequence
taatgccgatgtcacttatggatta

SEQ ID NO: 24520 - DNA, 25 bp, Probe sequence
gtaatgccgatgtcacttatggatt

SEQ ID NO: 24521 - DNA, 25 bp, Probe sequence
aacttactattgaagcaactgtcac

SEQ ID NO: 24522 - DNA, 25 bp, Probe sequence
ttactattgaagcaactgtcacaac

SEQ ID NO: 24523 - DNA, 25 bp, Probe sequence
agaacttactattgaagcaactgtc

SEQ ID NO: 24524 - DNA, 25 bp, Probe sequence
acttactattgaagcaactgtcaca

SEQ ID NO: 24525 - DNA, 25 bp, Probe sequence
gtgtagtttaatggcaaaacctcag

SEQ ID NO: 24526 - DNA, 25 bp, Probe sequence
ggtgtagtttaatggcaaaacctca

SEQ ID NO: 24527 - DNA, 25 bp, Probe sequence
tgtagtttaatggcaaaacctcagc

SEQ ID NO: 24528 - DNA, 25 bp, Probe sequence
gggtgtagtttaatggcaaaacctc

SEQ ID NO: 24529 - DNA, 25 bp, Probe sequence
caagctgatgttgtgggttcgattc

SEQ ID NO: 24530 - DNA, 25 bp, Probe sequence
cgggtgtagtttaatggcaaaacct

SEQ ID NO: 24531 - DNA, 25 bp, Probe sequence
tagtttaatggcaaaacctcagcct

SEQ ID NO: 24532 - DNA, 25 bp, Probe sequence
gtagtttaatggcaaaacctcagcc

SEQ ID NO: 24533 - DNA, 25 bp, Probe sequence
gtttaatggcaaaacctcagccttc

SEQ ID NO: 24534 - DNA, 25 bp, Probe sequence
gtgaagtggttaacacatcggattg

SEQ ID NO: 24535 - DNA, 25 bp, Probe sequence
tgaagtggttaacacatcggattgt

SEQ ID NO: 24536 - DNA, 25 bp, Probe sequence
ggtgaagtggttaacacatcggatt

SEQ ID NO: 24537 - DNA, 25 bp, Probe sequence
tggtgaagtggttaacacatcggat

SEQ ID NO: 24538 - DNA, 25 bp, Probe sequence
gaagtggttaacacatcggattgtg

SEQ ID NO: 24539 - DNA, 25 bp, Probe sequence
gtggtgaagtggttaacacatcgga

SEQ ID NO: 24540 - DNA, 25 bp, Probe sequence
tggttaacacatcggattgtggttc

SEQ ID NO: 24541 - DNA, 25 bp, Probe sequence
aagtggttaacacatcggattgtgg

SEQ ID NO: 24542 - DNA, 25 bp, Probe sequence
gtggttaacacatcggattgtggtt

SEQ ID NO: 24543 - DNA, 25 bp, Probe sequence
cagttggtagagcaatggattgaag

SEQ ID NO: 24544 - DNA, 25 bp, Probe sequence
tcagttggtagagcaatggattgaa

SEQ ID NO: 24545 - DNA, 25 bp, Probe sequence
ctcagttggtagagcaatggattga

SEQ ID NO: 24546 - DNA, 25 bp, Probe sequence
agttggtagagcaatggattgaagc

SEQ ID NO: 24547 - DNA, 25 bp, Probe sequence
gttggtagagcaatggattgaagct

SEQ ID NO: 24548 - DNA, 25 bp, Probe sequence
cagaggtctgcaaaacctttatcac

SEQ ID NO: 24549 - DNA, 25 bp, Probe sequence
agaggtctgcaaaacctttatcacc

SEQ ID NO: 24550 - DNA, 25 bp, Probe sequence
gaggtctgcaaaacctttatcaccg

SEQ ID NO: 24551 - DNA, 25 bp, Probe sequence
ggacctttagctcagttggttagag

SEQ ID NO: 24552 - DNA, 25 bp, Probe sequence
gaattggcagacgcactagacttag

SEQ ID NO: 24553 - DNA, 25 bp, Probe sequence
gcagacgcactagacttaggatcta

SEQ ID NO: 24554 - DNA, 25 bp, Probe sequence
aattggcagacgcactagacttagg

SEQ ID NO: 24555 - DNA, 25 bp, Probe sequence
ggaattggcagacgcactagactta

SEQ ID NO: 24556 - DNA, 25 bp, Probe sequence
cagacgcactagacttaggatctag

SEQ ID NO: 24557 - DNA, 25 bp, Probe sequence
tagacttaggatctagcgccttacg

SEQ ID NO: 24558 - DNA, 25 bp, Probe sequence
agacgcactagacttaggatctagc

SEQ ID NO: 24559 - DNA, 25 bp, Probe sequence
ctagacttaggatctagcgccttac

SEQ ID NO: 24560 - DNA, 25 bp, Probe sequence
actagacttaggatctagcgcctta

SEQ ID NO: 24561 - DNA, 25 bp, Probe sequence
gagaaatcccgtggaggttcaagtc

SEQ ID NO: 24562 - DNA, 25 bp, Probe sequence
aaggtattggaacacaagttgatgg

SEQ ID NO: 24563 - DNA, 25 bp, Probe sequence
aacagttgttggtagtagaagtcaa

SEQ ID NO: 24564 - DNA, 25 bp, Probe sequence
taacagttgttggtagtagaagtca

SEQ ID NO: 24565 - DNA, 25 bp, Probe sequence
acatggcaacttagaacttcttgat

SEQ ID NO: 24566 - DNA, 25 bp, Probe sequence
cagatgttgttgttgaatgttcagg

SEQ ID NO: 24567 - DNA, 25 bp, Probe sequence
catggcaacttagaacttcttgata

SEQ ID NO: 24568 - DNA, 25 bp, Probe sequence
gatgttgttgttgaatgttcaggtg

SEQ ID NO: 24569 - DNA, 25 bp, Probe sequence
agatgttgttgttgaatgttcaggt

SEQ ID NO: 24570 - DNA, 25 bp, Probe sequence
atggcaacttagaacttcttgataa

SEQ ID NO: 24571 - DNA, 25 bp, Probe sequence
aatcattaccaagtattcgtgagcg

SEQ ID NO: 24572 - DNA, 25 bp, Probe sequence
tattcgtgagcgtgaactagaagaa

SEQ ID NO: 24573 - DNA, 25 bp, Probe sequence
gaatcattaccaagtattcgtgagc

SEQ ID NO: 24574 - DNA, 25 bp, Probe sequence
aagtattcgtgagcgtgaactagaa

SEQ ID NO: 24575 - DNA, 25 bp, Probe sequence
attaccaagtattcgtgagcgtgaa

SEQ ID NO: 24576 - DNA, 25 bp, Probe sequence
gtattcgtgagcgtgaactagaaga

SEQ ID NO: 24577 - DNA, 25 bp, Probe sequence
atcattaccaagtattcgtgagcgt

SEQ ID NO: 24578 - DNA, 25 bp, Probe sequence
aaacaattagcaagtcctgaaatcg

SEQ ID NO: 24579 - DNA, 25 bp, Probe sequence
agtattcgtgagcgtgaactagaag

SEQ ID NO: 24580 - DNA, 25 bp, Probe sequence
tggtcttaaactatcaaatggtggt

SEQ ID NO: 24581 - DNA, 25 bp, Probe sequence
ccttatcgcattggtcttaaactat

SEQ ID NO: 24582 - DNA, 25 bp, Probe sequence
ctatcaaatggtggttgggtttatg

SEQ ID NO: 24583 - DNA, 25 bp, Probe sequence
cttaaactatcaaatggtggttggg

SEQ ID NO: 24584 - DNA, 25 bp, Probe sequence
actatcaaatggtggttgggtttat

SEQ ID NO: 24585 - DNA, 25 bp, Probe sequence
aactatcaaatggtggttgggttta

SEQ ID NO: 24586 - DNA, 25 bp, Probe sequence
taaactatcaaatggtggttgggtt

SEQ ID NO: 24587 - DNA, 25 bp, Probe sequence
ttaaactatcaaatggtggttgggt

SEQ ID NO: 24588 - DNA, 25 bp, Probe sequence
ggtcttaaactatcaaatggtggtt

SEQ ID NO: 24589 - DNA, 25 bp, Probe sequence
ggcaaccttacattatatgaagacg

SEQ ID NO: 24590 - DNA, 25 bp, Probe sequence
cggcaaccttacattatatgaagac

SEQ ID NO: 24591 - DNA, 25 bp, Probe sequence
acggcaaccttacattatatgaaga

SEQ ID NO: 24592 - DNA, 25 bp, Probe sequence
gacggcaaccttacattatatgaag

SEQ ID NO: 24593 - DNA, 25 bp, Probe sequence
ggacggcaaccttacattatatgaa

SEQ ID NO: 24594 - DNA, 25 bp, Probe sequence
gcaaccttacattatatgaagacga

SEQ ID NO: 24595 - DNA, 25 bp, Probe sequence
tagatgccattggaagtgatgttac

SEQ ID NO: 24596 - DNA, 25 bp, Probe sequence
gtagatgccattggaagtgatgtta

SEQ ID NO: 24597 - DNA, 25 bp, Probe sequence
agtggacggcaaccttacattatat

SEQ ID NO: 24598 - DNA, 25 bp, Probe sequence
tgtgacgattcatttagtgatactg

SEQ ID NO: 24599 - DNA, 25 bp, Probe sequence
gtgacgattcatttagtgatactga

SEQ ID NO: 24600 - DNA, 25 bp, Probe sequence
agcatgtttcaattaaatgtgacga

SEQ ID NO: 24601 - DNA, 25 bp, Probe sequence
cagcatgtttcaattaaatgtgacg

SEQ ID NO: 24602 - DNA, 25 bp, Probe sequence
gcatgtttcaattaaatgtgacgat

SEQ ID NO: 24603 - DNA, 25 bp, Probe sequence
atgtgacgattcatttagtgatact

SEQ ID NO: 24604 - DNA, 25 bp, Probe sequence
cgtttcagcatgtttcaattaaatg

SEQ ID NO: 24605 - DNA, 25 bp, Probe sequence
cgcaccagtttatgaaattataacc

SEQ ID NO: 24606 - DNA, 25 bp, Probe sequence
tcagcatgtttcaattaaatgtgac

SEQ ID NO: 24607 - DNA, 25 bp, Probe sequence
ttaatgagattattatcgcaacgcc

SEQ ID NO: 24608 - DNA, 25 bp, Probe sequence
taatgagattattatcgcaacgcca

SEQ ID NO: 24609 - DNA, 25 bp, Probe sequence
tattcaaggtgatattgccgatgat

SEQ ID NO: 24610 - DNA, 25 bp, Probe sequence
atgccattattcaaggtgatattgc

SEQ ID NO: 24611 - DNA, 25 bp, Probe sequence
tcaaggtgatattgccgatgattaa

SEQ ID NO: 24612 - DNA, 25 bp, Probe sequence
ttcaaggtgatattgccgatgatta

SEQ ID NO: 24613 - DNA, 25 bp, Probe sequence
ttattcaaggtgatattgccgatga

SEQ ID NO: 24614 - DNA, 25 bp, Probe sequence
attattcaaggtgatattgccgatg

SEQ ID NO: 24615 - DNA, 25 bp, Probe sequence
cattattcaaggtgatattgccgat

SEQ ID NO: 24616 - DNA, 25 bp, Probe sequence
ctggagaagtatatgaggcatctaa

SEQ ID NO: 24617 - DNA, 25 bp, Probe sequence
gctggagaagtatatgaggcatcta

SEQ ID NO: 24618 - DNA, 25 bp, Probe sequence
tggagaagtatatgaggcatctaat

SEQ ID NO: 24619 - DNA, 25 bp, Probe sequence
aggtatgttaggtactgaggagata

SEQ ID NO: 24620 - DNA, 25 bp, Probe sequence
ggagaagtatatgaggcatctaatg

SEQ ID NO: 24621 - DNA, 25 bp, Probe sequence
ggtatgttaggtactgaggagataa

SEQ ID NO: 24622 - DNA, 25 bp, Probe sequence
gcatacaaccgtattgaacatatcg

SEQ ID NO: 24623 - DNA, 25 bp, Probe sequence
caggtatgttaggtactgaggagat

SEQ ID NO: 24624 - DNA, 25 bp, Probe sequence
tgttaggtactgaggagataatcaa

SEQ ID NO: 24625 - DNA, 25 bp, Probe sequence
tagcacaagatgaatatgaagaacg

SEQ ID NO: 24626 - DNA, 25 bp, Probe sequence
accatatcacttagcacaagatgaa

SEQ ID NO: 24627 - DNA, 25 bp, Probe sequence
ttaccatatcacttagcacaagatg

SEQ ID NO: 24628 - DNA, 25 bp, Probe sequence
taccatatcacttagcacaagatga

SEQ ID NO: 24629 - DNA, 25 bp, Probe sequence
ccatatcacttagcacaagatgaat

SEQ ID NO: 24630 - DNA, 25 bp, Probe sequence
ggtacatatccattcgttacatcaa

SEQ ID NO: 24631 - DNA, 25 bp, Probe sequence
cacttagcacaagatgaatatgaag

SEQ ID NO: 24632 - DNA, 25 bp, Probe sequence
tacatatccattcgttacatcaagt

SEQ ID NO: 24633 - DNA, 25 bp, Probe sequence
acatatccattcgttacatcaagta

SEQ ID NO: 24634 - DNA, 25 bp, Probe sequence
tacatagatgatacacacaacgctt

SEQ ID NO: 24635 - DNA, 25 bp, Probe sequence
ttacatagatgatacacacaacgct

SEQ ID NO: 24636 - DNA, 25 bp, Probe sequence
cttacatagatgatacacacaacgc

SEQ ID NO: 24637 - DNA, 25 bp, Probe sequence
acggtcgcagttatatgattattga

SEQ ID NO: 24638 - DNA, 25 bp, Probe sequence
cggtcgcagttatatgattattgat

SEQ ID NO: 24639 - DNA, 25 bp, Probe sequence
tgaacggtcgcagttatatgattat

SEQ ID NO: 24640 - DNA, 25 bp, Probe sequence
aacggtcgcagttatatgattattg

SEQ ID NO: 24641 - DNA, 25 bp, Probe sequence
ttgaacggtcgcagttatatgatta

SEQ ID NO: 24642 - DNA, 25 bp, Probe sequence
gaacggtcgcagttatatgattatt

SEQ ID NO: 24643 - DNA, 25 bp, Probe sequence
cagagttagtgtcagtaagttatca

SEQ ID NO: 24644 - DNA, 25 bp, Probe sequence
gttagtgtcagtaagttatcatgct

SEQ ID NO: 24645 - DNA, 25 bp, Probe sequence
agttagtgtcagtaagttatcatgc

SEQ ID NO: 24646 - DNA, 25 bp, Probe sequence
gtattacacaggtcgaagagatgaa

SEQ ID NO: 24647 - DNA, 25 bp, Probe sequence
gtggaagtgaatacacgattagtac

SEQ ID NO: 24648 - DNA, 25 bp, Probe sequence
atgaagctgttggtgaagttgtatt

SEQ ID NO: 24649 - DNA, 25 bp, Probe sequence
aaggtattacacaggtcgaagagat

SEQ ID NO: 24650 - DNA, 25 bp, Probe sequence
atttgaatgtgttggaggtaaagga

SEQ ID NO: 24651 - DNA, 25 bp, Probe sequence
acagagttagtgtcagtaagttatc

SEQ ID NO: 24652 - DNA, 25 bp, Probe sequence
tcagacgaattaacgatagtagacg

SEQ ID NO: 24653 - DNA, 25 bp, Probe sequence
acgaattaacgatagtagacgcaat

SEQ ID NO: 24654 - DNA, 25 bp, Probe sequence
gacgaattaacgatagtagacgcaa

SEQ ID NO: 24655 - DNA, 25 bp, Probe sequence
ggagtaataatgttgttgttgaacg

SEQ ID NO: 24656 - DNA, 25 bp, Probe sequence
caacaatcaatctaactgaaccgta

SEQ ID NO: 24657 - DNA, 25 bp, Probe sequence
tacaacaatcaatctaactgaaccg

SEQ ID NO: 24658 - DNA, 25 bp, Probe sequence
cagacgaattaacgatagtagacgc

SEQ ID NO: 24659 - DNA, 25 bp, Probe sequence
acaacaatcaatctaactgaaccgt

SEQ ID NO: 24660 - DNA, 25 bp, Probe sequence
cgaattaacgatagtagacgcaatt

SEQ ID NO: 24661 - DNA, 25 bp, Probe sequence
ttaggcggtccaataacaatagtaa

SEQ ID NO: 24662 - DNA, 25 bp, Probe sequence
ggattagtcaatgtattcacgcaat

SEQ ID NO: 24663 - DNA, 25 bp, Probe sequence
actgtaggttctaatatggttggtg

SEQ ID NO: 24664 - DNA, 25 bp, Probe sequence
taggcggtccaataacaatagtaat

SEQ ID NO: 24665 - DNA, 25 bp, Probe sequence
gtaggttctaatatggttggtggat

SEQ ID NO: 24666 - DNA, 25 bp, Probe sequence
gagttgttcaaggattcgttaatgt

SEQ ID NO: 24667 - DNA, 25 bp, Probe sequence
caatagttatgacgatatggacagc

SEQ ID NO: 24668 - DNA, 25 bp, Probe sequence
ggttggtggattacttacatcatct

SEQ ID NO: 24669 - DNA, 25 bp, Probe sequence
gaagttacaccagaagttaagttgc

SEQ ID NO: 24670 - DNA, 25 bp, Probe sequence
atgcctattgttcctggtgtattaa

SEQ ID NO: 24671 - DNA, 25 bp, Probe sequence
gattatcgccgttattggacataca

SEQ ID NO: 24672 - DNA, 25 bp, Probe sequence
attatcgccgttattggacatacac

SEQ ID NO: 24673 - DNA, 25 bp, Probe sequence
gctcgcatactattagaatctggtg

SEQ ID NO: 24674 - DNA, 25 bp, Probe sequence
gcgatattagcaggtagtctaggat

SEQ ID NO: 24675 - DNA, 25 bp, Probe sequence
ggattatcgccgttattggacatac

SEQ ID NO: 24676 - DNA, 25 bp, Probe sequence
ttacaaggtggtagattgattgatg

SEQ ID NO: 24677 - DNA, 25 bp, Probe sequence
ctgctcgcatactattagaatctgg

SEQ ID NO: 24678 - DNA, 25 bp, Probe sequence
tacaaggtggtagattgattgatgt

SEQ ID NO: 24679 - DNA, 25 bp, Probe sequence
tgtatatgatgagttactacgccaa

SEQ ID NO: 24680 - DNA, 25 bp, Probe sequence
atgtatatgatgagttactacgcca

SEQ ID NO: 24681 - DNA, 25 bp, Probe sequence
tatgtatatgatgagttactacgcc

SEQ ID NO: 24682 - DNA, 25 bp, Probe sequence
agaatacaatgagctgactacacaa

SEQ ID NO: 24683 - DNA, 25 bp, Probe sequence
aagaatacaatgagctgactacaca

SEQ ID NO: 24684 - DNA, 25 bp, Probe sequence
tgaagaatacaatgagctgactaca

SEQ ID NO: 24685 - DNA, 25 bp, Probe sequence
ttgttacagacttgttgattagtga

SEQ ID NO: 24686 - DNA, 25 bp, Probe sequence
gaagaatacaatgagctgactacac

SEQ ID NO: 24687 - DNA, 25 bp, Probe sequence
atatcaagatggtcgctcaagtgaa

SEQ ID NO: 24688 - DNA, 25 bp, Probe sequence
tagttgtaacagatactgctgaaca

SEQ ID NO: 24689 - DNA, 25 bp, Probe sequence
ttagttgtaacagatactgctgaac

SEQ ID NO: 24690 - DNA, 25 bp, Probe sequence
cagatgaggttgtcaatttagttgt

SEQ ID NO: 24691 - DNA, 25 bp, Probe sequence
tcagatgaggttgtcaatttagttg

SEQ ID NO: 24692 - DNA, 25 bp, Probe sequence
actgctgaacaaactaaattgaatg

SEQ ID NO: 24693 - DNA, 25 bp, Probe sequence
tgtaacagatactgctgaacaaact

SEQ ID NO: 24694 - DNA, 25 bp, Probe sequence
aaatgacgaaggtactgaaataact

SEQ ID NO: 24695 - DNA, 25 bp, Probe sequence
ctgctgaacaaactaaattgaatgt

SEQ ID NO: 24696 - DNA, 25 bp, Probe sequence
tgaggttgtcaatttagttgtaaca

SEQ ID NO: 24697 - DNA, 25 bp, Probe sequence
agtatattgaagcacgaacggtatt

SEQ ID NO: 24698 - DNA, 25 bp, Probe sequence
gagtatattgaagcacgaacggtat

SEQ ID NO: 24699 - DNA, 25 bp, Probe sequence
ttatacttaatcagcgatgcgttag

SEQ ID NO: 24700 - DNA, 25 bp, Probe sequence
aatacttaactgaacatagcgatgc

SEQ ID NO: 24701 - DNA, 25 bp, Probe sequence
atacttaactgaacatagcgatgcc

SEQ ID NO: 24702 - DNA, 25 bp, Probe sequence
tacttaatcagcgatgcgttagtta

SEQ ID NO: 24703 - DNA, 25 bp, Probe sequence
tatacttaatcagcgatgcgttagt

SEQ ID NO: 24704 - DNA, 25 bp, Probe sequence
aatgagtatattgaagcacgaacgg

SEQ ID NO: 24705 - DNA, 25 bp, Probe sequence
atacttaatcagcgatgcgttagtt

SEQ ID NO: 24706 - DNA, 25 bp, Probe sequence
atgtatcagtcattgaattgagcaa

SEQ ID NO: 24707 - DNA, 25 bp, Probe sequence
tctgatgaagatccttatgagaacc

SEQ ID NO: 24708 - DNA, 25 bp, Probe sequence
tatgtatcagtcattgaattgagca

SEQ ID NO: 24709 - DNA, 25 bp, Probe sequence
tgttattatggttcttacgtcctga

SEQ ID NO: 24710 - DNA, 25 bp, Probe sequence
agaaccctcatatcaaagcaagatt

SEQ ID NO: 24711 - DNA, 25 bp, Probe sequence
gcaagattatacccagaattaccac

SEQ ID NO: 24712 - DNA, 25 bp, Probe sequence
agcaagattatacccagaattacca

SEQ ID NO: 24713 - DNA, 25 bp, Probe sequence
ttgttattatggttcttacgtcctg

SEQ ID NO: 24714 - DNA, 25 bp, Probe sequence
gaaccctcatatcaaagcaagatta

SEQ ID NO: 24715 - DNA, 25 bp, Probe sequence
ctgatgaagatggcgataatagaga

SEQ ID NO: 24716 - DNA, 25 bp, Probe sequence
aacggtaacgattgatgtagatgaa

SEQ ID NO: 24717 - DNA, 25 bp, Probe sequence
tgatgaagatggcgataatagagat

SEQ ID NO: 24718 - DNA, 25 bp, Probe sequence
gctgatgaagatggcgataatagag

SEQ ID NO: 24719 - DNA, 25 bp, Probe sequence
gatgaagatggcgataatagagata

SEQ ID NO: 24720 - DNA, 25 bp, Probe sequence
acggtaacgattgatgtagatgaaa

SEQ ID NO: 24721 - DNA, 25 bp, Probe sequence
aaacggtaacgattgatgtagatga

SEQ ID NO: 24722 - DNA, 25 bp, Probe sequence
agctgatgaagatggcgataataga

SEQ ID NO: 24723 - DNA, 25 bp, Probe sequence
atgaagatggcgataatagagatat

SEQ ID NO: 24724 - DNA, 25 bp, Probe sequence
acaatatccagatacacagttgagg

SEQ ID NO: 24725 - DNA, 25 bp, Probe sequence
gacaatatccagatacacagttgag

SEQ ID NO: 24726 - DNA, 25 bp, Probe sequence
tctggtgattcggttggttatgatt

SEQ ID NO: 24727 - DNA, 25 bp, Probe sequence
ttctggtgattcggttggttatgat

SEQ ID NO: 24728 - DNA, 25 bp, Probe sequence
ttcttctggtgattcggttggttat

SEQ ID NO: 24729 - DNA, 25 bp, Probe sequence
gctagaccttcagtcaagacattat

SEQ ID NO: 24730 - DNA, 25 bp, Probe sequence
caatatccagatacacagttgagga

SEQ ID NO: 24731 - DNA, 25 bp, Probe sequence
ggacaatatccagatacacagttga

SEQ ID NO: 24732 - DNA, 25 bp, Probe sequence
aggacaatatccagatacacagttg

SEQ ID NO: 24733 - DNA, 25 bp, Probe sequence
atacaagacaatgttaagcaaccag

SEQ ID NO: 24734 - DNA, 25 bp, Probe sequence
aatacaagacaatgttaagcaacca

SEQ ID NO: 24735 - DNA, 25 bp, Probe sequence
tacaagacaatgttaagcaaccagc

SEQ ID NO: 24736 - DNA, 25 bp, Probe sequence
cagtatccaccacaattagcatttg

SEQ ID NO: 24737 - DNA, 25 bp, Probe sequence
gcagtatccaccacaattagcattt

SEQ ID NO: 24738 - DNA, 25 bp, Probe sequence
aatatctatctagagcaccgttgaa

SEQ ID NO: 24739 - DNA, 25 bp, Probe sequence
aaatacaagacaatgttaagcaacc

SEQ ID NO: 24740 - DNA, 25 bp, Probe sequence
cgcagtatccaccacaattagcatt

SEQ ID NO: 24741 - DNA, 25 bp, Probe sequence
agtatccaccacaattagcatttgc

SEQ ID NO: 24742 - DNA, 25 bp, Probe sequence
aagacattagaagcacaaggagatt

SEQ ID NO: 24743 - DNA, 25 bp, Probe sequence
taagacattagaagcacaaggagat

SEQ ID NO: 24744 - DNA, 25 bp, Probe sequence
agttaagacattagaagcacaagga

SEQ ID NO: 24745 - DNA, 25 bp, Probe sequence
ttaagacattagaagcacaaggaga

SEQ ID NO: 24746 - DNA, 25 bp, Probe sequence
gttaagacattagaagcacaaggag

SEQ ID NO: 24747 - DNA, 25 bp, Probe sequence
gagttaagacattagaagcacaagg

SEQ ID NO: 24748 - DNA, 25 bp, Probe sequence
tcattatgtatggcgataaggttca

SEQ ID NO: 24749 - DNA, 25 bp, Probe sequence
tatgtatggcgataaggttcaattc

SEQ ID NO: 24750 - DNA, 25 bp, Probe sequence
cattatgtatggcgataaggttcaa

SEQ ID NO: 24751 - DNA, 25 bp, Probe sequence
cagtagatacagtgattgatgctat

SEQ ID NO: 24752 - DNA, 25 bp, Probe sequence
ctggtattctagctggaggtatagg

SEQ ID NO: 24753 - DNA, 25 bp, Probe sequence
aatgctattattcgaggtggtattg

SEQ ID NO: 24754 - DNA, 25 bp, Probe sequence
atgctattattcgaggtggtattgc

SEQ ID NO: 24755 - DNA, 25 bp, Probe sequence
acagtgattgatgctatagatacga

SEQ ID NO: 24756 - DNA, 25 bp, Probe sequence
caacaaatggtattaacgatgacga

SEQ ID NO: 24757 - DNA, 25 bp, Probe sequence
caaatggtattaacgatgacgatgt

SEQ ID NO: 24758 - DNA, 25 bp, Probe sequence
acaaatggtattaacgatgacgatg

SEQ ID NO: 24759 - DNA, 25 bp, Probe sequence
aacaaatggtattaacgatgacgat

SEQ ID NO: 24760 - DNA, 25 bp, Probe sequence
tcgttattgtaggtggcggttatat

SEQ ID NO: 24761 - DNA, 25 bp, Probe sequence
ccgctcaacattatgattacactga

SEQ ID NO: 24762 - DNA, 25 bp, Probe sequence
ctcgttattgtaggtggcggttata

SEQ ID NO: 24763 - DNA, 25 bp, Probe sequence
gccgctcaacattatgattacactg

SEQ ID NO: 24764 - DNA, 25 bp, Probe sequence
ctgccgctcaacattatgattacac

SEQ ID NO: 24765 - DNA, 25 bp, Probe sequence
tgtttgcgaatttaggtagtaaggt

SEQ ID NO: 24766 - DNA, 25 bp, Probe sequence
atgtttgcgaatttaggtagtaagg

SEQ ID NO: 24767 - DNA, 25 bp, Probe sequence
acattatatggtaagcaatctgaag

SEQ ID NO: 24768 - DNA, 25 bp, Probe sequence
atgttaaaggcggacttcaatttac

SEQ ID NO: 24769 - DNA, 25 bp, Probe sequence
acctacagaagttgaatatcagcat

SEQ ID NO: 24770 - DNA, 25 bp, Probe sequence
acagaagttgaatatcagcattacg

SEQ ID NO: 24771 - DNA, 25 bp, Probe sequence
cagaagttgaatatcagcattacga

SEQ ID NO: 24772 - DNA, 25 bp, Probe sequence
tacctacagaagttgaatatcagca

SEQ ID NO: 24773 - DNA, 25 bp, Probe sequence
cctacagaagttgaatatcagcatt

SEQ ID NO: 24774 - DNA, 25 bp, Probe sequence
aagttgaatatcagcattacgatga

SEQ ID NO: 24775 - DNA, 25 bp, Probe sequence
gaagttgaatatcagcattacgatg

SEQ ID NO: 24776 - DNA, 25 bp, Probe sequence
agaagttgaatatcagcattacgat

SEQ ID NO: 24777 - DNA, 25 bp, Probe sequence
atacctacagaagttgaatatcagc

SEQ ID NO: 24778 - DNA, 25 bp, Probe sequence
tattatactggtagccgtgatgaga

SEQ ID NO: 24779 - DNA, 25 bp, Probe sequence
atattatactggtagccgtgatgag

SEQ ID NO: 24780 - DNA, 25 bp, Probe sequence
gatattatactggtagccgtgatga

SEQ ID NO: 24781 - DNA, 25 bp, Probe sequence
agatattatactggtagccgtgatg

SEQ ID NO: 24782 - DNA, 25 bp, Probe sequence
ttatactggtagccgtgatgagaat

SEQ ID NO: 24783 - DNA, 25 bp, Probe sequence
attatactggtagccgtgatgagaa

SEQ ID NO: 24784 - DNA, 25 bp, Probe sequence
aagatattatactggtagccgtgat

SEQ ID NO: 24785 - DNA, 25 bp, Probe sequence
tagccgtgatgagaatgtcttatct

SEQ ID NO: 24786 - DNA, 25 bp, Probe sequence
gtagccgtgatgagaatgtcttatc

SEQ ID NO: 24787 - DNA, 25 bp, Probe sequence
gtcactgtcaaattgctcgtaatat

SEQ ID NO: 24788 - DNA, 25 bp, Probe sequence
agtcactgtcaaattgctcgtaata

SEQ ID NO: 24789 - DNA, 25 bp, Probe sequence
tcactgtcaaattgctcgtaatatt

SEQ ID NO: 24790 - DNA, 25 bp, Probe sequence
actgtcaaattgctcgtaatattgc

SEQ ID NO: 24791 - DNA, 25 bp, Probe sequence
cactgtcaaattgctcgtaatattg

SEQ ID NO: 24792 - DNA, 25 bp, Probe sequence
tgaatttagaatttaacattgccgt

SEQ ID NO: 24793 - DNA, 25 bp, Probe sequence
ttgaatttagaatttaacattgccg

SEQ ID NO: 24794 - DNA, 25 bp, Probe sequence
cttgtttaaatcctgttcaattacg

SEQ ID NO: 24795 - DNA, 25 bp, Probe sequence
aacaatcaaagatgtcattgaagac

SEQ ID NO: 24796 - DNA, 25 bp, Probe sequence
tcgcaatgtgtagagatatagaact

SEQ ID NO: 24797 - DNA, 25 bp, Probe sequence
cgcaatgtgtagagatatagaactt

SEQ ID NO: 24798 - DNA, 25 bp, Probe sequence
ttcgcaatgtgtagagatatagaac

SEQ ID NO: 24799 - DNA, 25 bp, Probe sequence
attcgcaatgtgtagagatatagaa

SEQ ID NO: 24800 - DNA, 25 bp, Probe sequence
gcaatgtgtagagatatagaacttc

SEQ ID NO: 24801 - DNA, 25 bp, Probe sequence
gtgtagagatatagaacttcactgg

SEQ ID NO: 24802 - DNA, 25 bp, Probe sequence
tattcgcaatgtgtagagatataga

SEQ ID NO: 24803 - DNA, 25 bp, Probe sequence
tgtagagatatagaacttcactggg

SEQ ID NO: 24804 - DNA, 25 bp, Probe sequence
aaaggttatgaagaaatcagtctgc

SEQ ID NO: 24805 - DNA, 25 bp, Probe sequence
atcaatccaacaatcacgatagagg

SEQ ID NO: 24806 - DNA, 25 bp, Probe sequence
agcaagaatgacaatagaagaacat

SEQ ID NO: 24807 - DNA, 25 bp, Probe sequence
tagcaagaatgacaatagaagaaca

SEQ ID NO: 24808 - DNA, 25 bp, Probe sequence
gacaatagaagaacatgagcaagac

SEQ ID NO: 24809 - DNA, 25 bp, Probe sequence
tgacaatagaagaacatgagcaaga

SEQ ID NO: 24810 - DNA, 25 bp, Probe sequence
atgacaatagaagaacatgagcaag

SEQ ID NO: 24811 - DNA, 25 bp, Probe sequence
gaatgacaatagaagaacatgagca

SEQ ID NO: 24812 - DNA, 25 bp, Probe sequence
agaatgacaatagaagaacatgagc

SEQ ID NO: 24813 - DNA, 25 bp, Probe sequence
atatcactatggacgacatcatgga

SEQ ID NO: 24814 - DNA, 25 bp, Probe sequence
attcaagttagcaatgagcaagaag

SEQ ID NO: 24815 - DNA, 25 bp, Probe sequence
ttcaagttagcaatgagcaagaagt

SEQ ID NO: 24816 - DNA, 25 bp, Probe sequence
tcaagttagcaatgagcaagaagtc

SEQ ID NO: 24817 - DNA, 25 bp, Probe sequence
caagttagcaatgagcaagaagtca

SEQ ID NO: 24818 - DNA, 25 bp, Probe sequence
aacttagccaatcagacattaagaa

SEQ ID NO: 24819 - DNA, 25 bp, Probe sequence
gaacgcataaacgaatggaaagata

SEQ ID NO: 24820 - DNA, 25 bp, Probe sequence
acgcataaacgaatggaaagataaa

SEQ ID NO: 24821 - DNA, 25 bp, Probe sequence
aacgcataaacgaatggaaagataa

SEQ ID NO: 24822 - DNA, 25 bp, Probe sequence
cattcaagttagcaatgagcaagaa

SEQ ID NO: 24823 - DNA, 25 bp, Probe sequence
tttgagaaaggaaatgtagcgaaag

SEQ ID NO: 24824 - DNA, 25 bp, Probe sequence
agttgaaggtaaaggaagaagtgtt

SEQ ID NO: 24825 - DNA, 25 bp, Probe sequence
atggagttgaaggtaaaggaagaag

SEQ ID NO: 24826 - DNA, 25 bp, Probe sequence
gagttgaaggtaaaggaagaagtgt

SEQ ID NO: 24827 - DNA, 25 bp, Probe sequence
tatggagttgaaggtaaaggaagaa

SEQ ID NO: 24828 - DNA, 25 bp, Probe sequence
gttgaaggtaaaggaagaagtgttc

SEQ ID NO: 24829 - DNA, 25 bp, Probe sequence
atatggagttgaaggtaaaggaaga

SEQ ID NO: 24830 - DNA, 25 bp, Probe sequence
ggagttgaaggtaaaggaagaagtg

SEQ ID NO: 24831 - DNA, 25 bp, Probe sequence
tcacgaaagagcactagaagattta

SEQ ID NO: 24832 - DNA, 25 bp, Probe sequence
ataatctaagaggcacggttaatct

SEQ ID NO: 24833 - DNA, 25 bp, Probe sequence
aataatctaagaggcacggttaatc

SEQ ID NO: 24834 - DNA, 25 bp, Probe sequence
aatctaagaggcacggttaatctag

SEQ ID NO: 24835 - DNA, 25 bp, Probe sequence
taatctaagaggcacggttaatcta

SEQ ID NO: 24836 - DNA, 25 bp, Probe sequence
acatgaacgattatgaagttgctaa

SEQ ID NO: 24837 - DNA, 25 bp, Probe sequence
ttacatgaacgattatgaagttgct

SEQ ID NO: 24838 - DNA, 25 bp, Probe sequence
taataatctaagaggcacggttaat

SEQ ID NO: 24839 - DNA, 25 bp, Probe sequence
ttaataatctaagaggcacggttaa

SEQ ID NO: 24840 - DNA, 25 bp, Probe sequence
tacatgaacgattatgaagttgcta

SEQ ID NO: 24841 - DNA, 25 bp, Probe sequence
gcagataattacgaagcagataacc

SEQ ID NO: 24842 - DNA, 25 bp, Probe sequence
acgagaaagcctgtaatcaatagaa

SEQ ID NO: 24843 - DNA, 25 bp, Probe sequence
aagattgaacgaaatacgagaaagc

SEQ ID NO: 24844 - DNA, 25 bp, Probe sequence
tttggaagattgaacgaaatacgag

SEQ ID NO: 24845 - DNA, 25 bp, Probe sequence
ggaagattgaacgaaatacgagaaa

SEQ ID NO: 24846 - DNA, 25 bp, Probe sequence
tggaagattgaacgaaatacgagaa

SEQ ID NO: 24847 - DNA, 25 bp, Probe sequence
ttggaagattgaacgaaatacgaga

SEQ ID NO: 24848 - DNA, 25 bp, Probe sequence
gaaatacgagaaagcctgtaatcaa

SEQ ID NO: 24849 - DNA, 25 bp, Probe sequence
cgagaaagcctgtaatcaatagaaa

SEQ ID NO: 24850 - DNA, 25 bp, Probe sequence
ccagaacaagaagaagaatacaacg

SEQ ID NO: 24851 - DNA, 25 bp, Probe sequence
gccagaacaagaagaagaatacaac

SEQ ID NO: 24852 - DNA, 25 bp, Probe sequence
agccagaacaagaagaagaatacaa

SEQ ID NO: 24853 - DNA, 25 bp, Probe sequence
aagccagaacaagaagaagaataca

SEQ ID NO: 24854 - DNA, 25 bp, Probe sequence
tggacaatgaagattatgaaggaga

SEQ ID NO: 24855 - DNA, 25 bp, Probe sequence
cagaacaagaagaagaatacaacga

SEQ ID NO: 24856 - DNA, 25 bp, Probe sequence
gccttggacaatgaagattatgaag

SEQ ID NO: 24857 - DNA, 25 bp, Probe sequence
ctcaagaagttattcaagtatggca

SEQ ID NO: 24858 - DNA, 25 bp, Probe sequence
agaacaagaagaagaatacaacgaa

SEQ ID NO: 24859 - DNA, 25 bp, Probe sequence
ttgttatcaatggtcacttatgctg

SEQ ID NO: 24860 - DNA, 25 bp, Probe sequence
gttgttatcaatggtcacttatgct

SEQ ID NO: 24861 - DNA, 25 bp, Probe sequence
tgttatcaatggtcacttatgctga

SEQ ID NO: 24862 - DNA, 25 bp, Probe sequence
agttgttatcaatggtcacttatgc

SEQ ID NO: 24863 - DNA, 25 bp, Probe sequence
tgagttgttatcaatggtcacttat

SEQ ID NO: 24864 - DNA, 25 bp, Probe sequence
gagttgttatcaatggtcacttatg

SEQ ID NO: 24865 - DNA, 25 bp, Probe sequence
aatcactgaagcaaacaacgaaatt

SEQ ID NO: 24866 - DNA, 25 bp, Probe sequence
gaatcactgaagcaaacaacgaaat

SEQ ID NO: 24867 - DNA, 25 bp, Probe sequence
tgaagcaaacaacgaaattgaacta

SEQ ID NO: 24868 - DNA, 25 bp, Probe sequence
tatgattggcgaaggacattatgat

SEQ ID NO: 24869 - DNA, 25 bp, Probe sequence
ttatgattggcgaaggacattatga

SEQ ID NO: 24870 - DNA, 25 bp, Probe sequence
atgattggcgaaggacattatgatg

SEQ ID NO: 24871 - DNA, 25 bp, Probe sequence
aagtggttgtagttgatgactgttc

SEQ ID NO: 24872 - DNA, 25 bp, Probe sequence
gaagtggttgtagttgatgactgtt

SEQ ID NO: 24873 - DNA, 25 bp, Probe sequence
ttgaagtggttgtagttgatgactg

SEQ ID NO: 24874 - DNA, 25 bp, Probe sequence
aattcaatgaaggcgaaccatactt

SEQ ID NO: 24875 - DNA, 25 bp, Probe sequence
aacaagaagcacacaatgtatgtac

SEQ ID NO: 24876 - DNA, 25 bp, Probe sequence
aagaagcacacaatgtatgtacctt

SEQ ID NO: 24877 - DNA, 25 bp, Probe sequence
atgctaacccagaaatacaatcact

SEQ ID NO: 24878 - DNA, 25 bp, Probe sequence
ccaaatgctaacccagaaatacaat

SEQ ID NO: 24879 - DNA, 25 bp, Probe sequence
aaaccaaatgctaacccagaaatac

SEQ ID NO: 24880 - DNA, 25 bp, Probe sequence
ctaaaccaaatgctaacccagaaat

SEQ ID NO: 24881 - DNA, 25 bp, Probe sequence
aatgctaacccagaaatacaatcac

SEQ ID NO: 24882 - DNA, 25 bp, Probe sequence
actaaaccaaatgctaacccagaaa

SEQ ID NO: 24883 - DNA, 25 bp, Probe sequence
accaaatgctaacccagaaatacaa

SEQ ID NO: 24884 - DNA, 25 bp, Probe sequence
aaccaaatgctaacccagaaataca

SEQ ID NO: 24885 - DNA, 25 bp, Probe sequence
aaatgctaacccagaaatacaatca

SEQ ID NO: 24886 - DNA, 25 bp, Probe sequence
atgttactggttatcgttatagcaa

SEQ ID NO: 24887 - DNA, 25 bp, Probe sequence
aatgttactggttatcgttatagca

SEQ ID NO: 24888 - DNA, 25 bp, Probe sequence
aagagagatgaaggtgacggtattg

SEQ ID NO: 24889 - DNA, 25 bp, Probe sequence
caagagagatgaaggtgacggtatt

SEQ ID NO: 24890 - DNA, 25 bp, Probe sequence
cgaaagcaagtttagcattaggtat

SEQ ID NO: 24891 - DNA, 25 bp, Probe sequence
tactggttatcgttatagcaaaggt

SEQ ID NO: 24892 - DNA, 25 bp, Probe sequence
tagcaacaggaacaataacgtcatt

SEQ ID NO: 24893 - DNA, 25 bp, Probe sequence
ttagcaacaggaacaataacgtcat

SEQ ID NO: 24894 - DNA, 25 bp, Probe sequence
actggttatcgttatagcaaaggtg

SEQ ID NO: 24895 - DNA, 25 bp, Probe sequence
gacagaaagtgacagataaaggagt

SEQ ID NO: 24896 - DNA, 25 bp, Probe sequence
agacagaaagtgacagataaaggag

SEQ ID NO: 24897 - DNA, 25 bp, Probe sequence
acagaaagtgacagataaaggagta

SEQ ID NO: 24898 - DNA, 25 bp, Probe sequence
ggcttgcttggtaaagatattgaaa

SEQ ID NO: 24899 - DNA, 25 bp, Probe sequence
caaggtgagcatgataagcaagatg

SEQ ID NO: 24900 - DNA, 25 bp, Probe sequence
tagacagaaagtgacagataaagga

SEQ ID NO: 24901 - DNA, 25 bp, Probe sequence
gaggaggaaactgttaatggaagac

SEQ ID NO: 24902 - DNA, 25 bp, Probe sequence
tggcttgcttggtaaagatattgaa

SEQ ID NO: 24903 - DNA, 25 bp, Probe sequence
ttggcttgcttggtaaagatattga

SEQ ID NO: 24904 - DNA, 25 bp, Probe sequence
aggcttattaactactggtgtgatt

SEQ ID NO: 24905 - DNA, 25 bp, Probe sequence
ggcattaggcttattaactactggt

SEQ ID NO: 24906 - DNA, 25 bp, Probe sequence
tggcattaggcttattaactactgg

SEQ ID NO: 24907 - DNA, 25 bp, Probe sequence
gcaacattggcattaggcttattaa

SEQ ID NO: 24908 - DNA, 25 bp, Probe sequence
gcattaggcttattaactactggtg

SEQ ID NO: 24909 - DNA, 25 bp, Probe sequence
ttaggcttattaactactggtgtga

SEQ ID NO: 24910 - DNA, 25 bp, Probe sequence
taggcttattaactactggtgtgat

SEQ ID NO: 24911 - DNA, 25 bp, Probe sequence
aacattggcattaggcttattaact

SEQ ID NO: 24912 - DNA, 25 bp, Probe sequence
caacattggcattaggcttattaac

SEQ ID NO: 24913 - DNA, 25 bp, Probe sequence
gttacatcaatactattcaggacct

SEQ ID NO: 24914 - DNA, 25 bp, Probe sequence
cgtatggcagatgtcattaatagtg

SEQ ID NO: 24915 - DNA, 25 bp, Probe sequence
agcgtatggcagatgtcattaatag

SEQ ID NO: 24916 - DNA, 25 bp, Probe sequence
gagcgtatggcagatgtcattaata

SEQ ID NO: 24917 - DNA, 25 bp, Probe sequence
gcgtatggcagatgtcattaatagt

SEQ ID NO: 24918 - DNA, 25 bp, Probe sequence
agttacatcaatactattcaggacc

SEQ ID NO: 24919 - DNA, 25 bp, Probe sequence
atggcagatgtcattaatagtgaac

SEQ ID NO: 24920 - DNA, 25 bp, Probe sequence
tggcagatgtcattaatagtgaaca

SEQ ID NO: 24921 - DNA, 25 bp, Probe sequence
ggcagatgtcattaatagtgaacaa

SEQ ID NO: 24922 - DNA, 25 bp, Probe sequence
atgttattacttgagcgtgtaggtt

SEQ ID NO: 24923 - DNA, 25 bp, Probe sequence
aatgttattacttgagcgtgtaggt

SEQ ID NO: 24924 - DNA, 25 bp, Probe sequence
agattaagtcattacaggcacaagt

SEQ ID NO: 24925 - DNA, 25 bp, Probe sequence
gagattaagtcattacaggcacaag

SEQ ID NO: 24926 - DNA, 25 bp, Probe sequence
aagaagagattggttgtagtcatcc

SEQ ID NO: 24927 - DNA, 25 bp, Probe sequence
gattaagtcattacaggcacaagtg

SEQ ID NO: 24928 - DNA, 25 bp, Probe sequence
caatgttattacttgagcgtgtagg

SEQ ID NO: 24929 - DNA, 25 bp, Probe sequence
gagattggttgtagtcatccgaatt

SEQ ID NO: 24930 - DNA, 25 bp, Probe sequence
agattggttgtagtcatccgaattg

SEQ ID NO: 24931 - DNA, 25 bp, Probe sequence
tctgtcaattcaagactatcactgt

SEQ ID NO: 24932 - DNA, 25 bp, Probe sequence
acatctgtcaattcaagactatcac

SEQ ID NO: 24933 - DNA, 25 bp, Probe sequence
atctgtcaattcaagactatcactg

SEQ ID NO: 24934 - DNA, 25 bp, Probe sequence
catctgtcaattcaagactatcact

SEQ ID NO: 24935 - DNA, 25 bp, Probe sequence
ctgtcaattcaagactatcactgta

SEQ ID NO: 24936 - DNA, 25 bp, Probe sequence
aacatctgtcaattcaagactatca

SEQ ID NO: 24937 - DNA, 25 bp, Probe sequence
tctttccacctattcaaacgacaat

SEQ ID NO: 24938 - DNA, 25 bp, Probe sequence
ctttccacctattcaaacgacaatt

SEQ ID NO: 24939 - DNA, 25 bp, Probe sequence
tcctatccaaacatctgtcaattca

SEQ ID NO: 24940 - DNA, 25 bp, Probe sequence
ggattggcacacataatggtattac

SEQ ID NO: 24941 - DNA, 25 bp, Probe sequence
gattggcacacataatggtattaca

SEQ ID NO: 24942 - DNA, 25 bp, Probe sequence
ttggcacacataatggtattacaac

SEQ ID NO: 24943 - DNA, 25 bp, Probe sequence
ttacaaccatacatacaacgaatca

SEQ ID NO: 24944 - DNA, 25 bp, Probe sequence
aacagagccattgaatcgttatgaa

SEQ ID NO: 24945 - DNA, 25 bp, Probe sequence
acaaccatacatacaacgaatcata

SEQ ID NO: 24946 - DNA, 25 bp, Probe sequence
tacaaccatacatacaacgaatcat

SEQ ID NO: 24947 - DNA, 25 bp, Probe sequence
attggcacacataatggtattacaa

SEQ ID NO: 24948 - DNA, 25 bp, Probe sequence
aacaacagagccattgaatcgttat

SEQ ID NO: 24949 - DNA, 25 bp, Probe sequence
ggatatagatggtgttgtatgtggc

SEQ ID NO: 24950 - DNA, 25 bp, Probe sequence
gatatagatggtgttgtatgtggcg

SEQ ID NO: 24951 - DNA, 25 bp, Probe sequence
atatagatggtgttgtatgtggcga

SEQ ID NO: 24952 - DNA, 25 bp, Probe sequence
tatagatggtgttgtatgtggcgag

SEQ ID NO: 24953 - DNA, 25 bp, Probe sequence
atggtgttgtatgtggcgagatatt

SEQ ID NO: 24954 - DNA, 25 bp, Probe sequence
gatggtgttgtatgtggcgagatat

SEQ ID NO: 24955 - DNA, 25 bp, Probe sequence
gggatatagatggtgttgtatgtgg

SEQ ID NO: 24956 - DNA, 25 bp, Probe sequence
tggtgttgtatgtggcgagatattg

SEQ ID NO: 24957 - DNA, 25 bp, Probe sequence
agatggtgttgtatgtggcgagata

SEQ ID NO: 24958 - DNA, 25 bp, Probe sequence
tatagttactggtataggtgctgct

SEQ ID NO: 24959 - DNA, 25 bp, Probe sequence
ttactggtataggtgctgctcatat

SEQ ID NO: 24960 - DNA, 25 bp, Probe sequence
atagttactggtataggtgctgctc

SEQ ID NO: 24961 - DNA, 25 bp, Probe sequence
aattcaataagtgacggtatggttg

SEQ ID NO: 24962 - DNA, 25 bp, Probe sequence
gttactggtataggtgctgctcata

SEQ ID NO: 24963 - DNA, 25 bp, Probe sequence
ttcaactagaatgctgataagtgct

SEQ ID NO: 24964 - DNA, 25 bp, Probe sequence
gttcaactagaatgctgataagtgc

SEQ ID NO: 24965 - DNA, 25 bp, Probe sequence
tagaatgctgataagtgctggtctt

SEQ ID NO: 24966 - DNA, 25 bp, Probe sequence
tcaactagaatgctgataagtgctg

SEQ ID NO: 24967 - DNA, 25 bp, Probe sequence
ataacattggcttactcttcgtacc

SEQ ID NO: 24968 - DNA, 25 bp, Probe sequence
aataacattggcttactcttcgtac

SEQ ID NO: 24969 - DNA, 25 bp, Probe sequence
tatgtactggtgctgttaagttagg

SEQ ID NO: 24970 - DNA, 25 bp, Probe sequence
cattggactaataatcgtctcaaca

SEQ ID NO: 24971 - DNA, 25 bp, Probe sequence
tcattggactaataatcgtctcaac

SEQ ID NO: 24972 - DNA, 25 bp, Probe sequence
ttatgtactggtgctgttaagttag

SEQ ID NO: 24973 - DNA, 25 bp, Probe sequence
tgtattattatgtactggtgctgtt

SEQ ID NO: 24974 - DNA, 25 bp, Probe sequence
ttgtattattatgtactggtgctgt

SEQ ID NO: 24975 - DNA, 25 bp, Probe sequence
ttggactaataatcgtctcaacaat

SEQ ID NO: 24976 - DNA, 25 bp, Probe sequence
cttgccaacatcgaatgaatatcaa

SEQ ID NO: 24977 - DNA, 25 bp, Probe sequence
aatctatacttgcgggaactttagc

SEQ ID NO: 24978 - DNA, 25 bp, Probe sequence
aaatctatacttgcgggaactttag

SEQ ID NO: 24979 - DNA, 25 bp, Probe sequence
agcttgccaacatcgaatgaatatc

SEQ ID NO: 24980 - DNA, 25 bp, Probe sequence
gcttgccaacatcgaatgaatatca

SEQ ID NO: 24981 - DNA, 25 bp, Probe sequence
agcatcaccactagtaactaatcta

SEQ ID NO: 24982 - DNA, 25 bp, Probe sequence
tagcatcaccactagtaactaatct

SEQ ID NO: 24983 - DNA, 25 bp, Probe sequence
ttgccaacatcgaatgaatatcaaa

SEQ ID NO: 24984 - DNA, 25 bp, Probe sequence
tgttaatgaattagctactggaagt

SEQ ID NO: 24985 - DNA, 25 bp, Probe sequence
attggaagtgtgtatcaggtatcag

SEQ ID NO: 24986 - DNA, 25 bp, Probe sequence
ggaagtgtgtatcaggtatcagtaa

SEQ ID NO: 24987 - DNA, 25 bp, Probe sequence
tggaagtgtgtatcaggtatcagta

SEQ ID NO: 24988 - DNA, 25 bp, Probe sequence
ggtagacaaggcaggtaatagaata

SEQ ID NO: 24989 - DNA, 25 bp, Probe sequence
aggtagacaaggcaggtaatagaat

SEQ ID NO: 24990 - DNA, 25 bp, Probe sequence
agtgtgtatcaggtatcagtaatgt

SEQ ID NO: 24991 - DNA, 25 bp, Probe sequence
tattggaagtgtgtatcaggtatca

SEQ ID NO: 24992 - DNA, 25 bp, Probe sequence
ttggaagtgtgtatcaggtatcagt

SEQ ID NO: 24993 - DNA, 25 bp, Probe sequence
gaggtagacaaggcaggtaatagaa

SEQ ID NO: 24994 - DNA, 25 bp, Probe sequence
agagtagttgaattagatccaagcg

SEQ ID NO: 24995 - DNA, 25 bp, Probe sequence
gttgtcccagatttatcagagcata

SEQ ID NO: 24996 - DNA, 25 bp, Probe sequence
tgtcccagatttatcagagcatatt

SEQ ID NO: 24997 - DNA, 25 bp, Probe sequence
ttgtcccagatttatcagagcatat

SEQ ID NO: 24998 - DNA, 25 bp, Probe sequence
ttaaacctgggactacacttacaaa

SEQ ID NO: 24999 - DNA, 25 bp, Probe sequence
tagagtagttgaattagatccaagc

SEQ ID NO: 25000 - DNA, 25 bp, Probe sequence
attaaacctgggactacacttacaa

SEQ ID NO: 25001 - DNA, 25 bp, Probe sequence
tttgatggtaaatgtgactggagtt

SEQ ID NO: 25002 - DNA, 25 bp, Probe sequence
cctattaaacctgggactacactta

SEQ ID NO: 25003 - DNA, 25 bp, Probe sequence
aattatagatggttggtgtcgcatt

SEQ ID NO: 25004 - DNA, 25 bp, Probe sequence
atacagtgaagcaagagcaaggtta

SEQ ID NO: 25005 - DNA, 25 bp, Probe sequence
ttcagccactagatacggtgataat

SEQ ID NO: 25006 - DNA, 25 bp, Probe sequence
tcagccactagatacggtgataatc

SEQ ID NO: 25007 - DNA, 25 bp, Probe sequence
ttggaacaatcataatgagtggata

SEQ ID NO: 25008 - DNA, 25 bp, Probe sequence
cttcagccactagatacggtgataa

SEQ ID NO: 25009 - DNA, 25 bp, Probe sequence
tacagtgaagcaagagcaaggttac

SEQ ID NO: 25010 - DNA, 25 bp, Probe sequence
tatagatggttggtgtcgcatttat

SEQ ID NO: 25011 - DNA, 25 bp, Probe sequence
ttatagatggttggtgtcgcattta

SEQ ID NO: 25012 - DNA, 25 bp, Probe sequence
ttatacagagcaattaacagacggt

SEQ ID NO: 25013 - DNA, 25 bp, Probe sequence
tatacagagcaattaacagacggtt

SEQ ID NO: 25014 - DNA, 25 bp, Probe sequence
agtattaactggtgtgattcaagac

SEQ ID NO: 25015 - DNA, 25 bp, Probe sequence
gtattaactggtgtgattcaagacc

SEQ ID NO: 25016 - DNA, 25 bp, Probe sequence
cccgactactaaaggtataggtgat

SEQ ID NO: 25017 - DNA, 25 bp, Probe sequence
gtgattcaagacccgactactaaag

SEQ ID NO: 25018 - DNA, 25 bp, Probe sequence
tttatacagagcaattaacagacgg

SEQ ID NO: 25019 - DNA, 25 bp, Probe sequence
tacagagcaattaacagacggttta

SEQ ID NO: 25020 - DNA, 25 bp, Probe sequence
atacagagcaattaacagacggttt

SEQ ID NO: 25021 - DNA, 25 bp, Probe sequence
atcaacaatgtgctgaggaagagta

SEQ ID NO: 25022 - DNA, 25 bp, Probe sequence
tcaacaatgtgctgaggaagagtaa

SEQ ID NO: 25023 - DNA, 25 bp, Probe sequence
gcaggataacaaacaaggattacaa

SEQ ID NO: 25024 - DNA, 25 bp, Probe sequence
aggataacaaacaaggattacaagc

SEQ ID NO: 25025 - DNA, 25 bp, Probe sequence
aatcaacaatgtgctgaggaagagt

SEQ ID NO: 25026 - DNA, 25 bp, Probe sequence
caggataacaaacaaggattacaag

SEQ ID NO: 25027 - DNA, 25 bp, Probe sequence
aaatcaacaatgtgctgaggaagag

SEQ ID NO: 25028 - DNA, 25 bp, Probe sequence
ggataacaaacaaggattacaagct

SEQ ID NO: 25029 - DNA, 25 bp, Probe sequence
atgcaggataacaaacaaggattac

SEQ ID NO: 25030 - DNA, 25 bp, Probe sequence
ttgaagacaattcagcgtattatac

SEQ ID NO: 25031 - DNA, 25 bp, Probe sequence
attcagcgtattatacgtggaacat

SEQ ID NO: 25032 - DNA, 25 bp, Probe sequence
caattcagcgtattatacgtggaac

SEQ ID NO: 25033 - DNA, 25 bp, Probe sequence
aagacaattcagcgtattatacgtg

SEQ ID NO: 25034 - DNA, 25 bp, Probe sequence
gaagacaattcagcgtattatacgt

SEQ ID NO: 25035 - DNA, 25 bp, Probe sequence
tgaagacaattcagcgtattatacg

SEQ ID NO: 25036 - DNA, 25 bp, Probe sequence
aattcagcgtattatacgtggaaca

SEQ ID NO: 25037 - DNA, 25 bp, Probe sequence
acaattcagcgtattatacgtggaa

SEQ ID NO: 25038 - DNA, 25 bp, Probe sequence
agacaattcagcgtattatacgtgg

SEQ ID NO: 25039 - DNA, 25 bp, Probe sequence
agtgttagttggtgtagttgttgta

SEQ ID NO: 25040 - DNA, 25 bp, Probe sequence
tagtgttagttggtgtagttgttgt

SEQ ID NO: 25041 - DNA, 25 bp, Probe sequence
gtgttagttggtgtagttgttgtag

SEQ ID NO: 25042 - DNA, 25 bp, Probe sequence
cctgtagaagaatcaatggcaagta

SEQ ID NO: 25043 - DNA, 25 bp, Probe sequence
ttagtgttagttggtgtagttgttg

SEQ ID NO: 25044 - DNA, 25 bp, Probe sequence
ttagttggtgtagttgttgtagcag

SEQ ID NO: 25045 - DNA, 25 bp, Probe sequence
ttaggacctgtagaagaatcaatgg

SEQ ID NO: 25046 - DNA, 25 bp, Probe sequence
caccttacttcggaatactgttatc

SEQ ID NO: 25047 - DNA, 25 bp, Probe sequence
ctgtagaagaatcaatggcaagtat

SEQ ID NO: 25048 - DNA, 25 bp, Probe sequence
gtgaagaaggcaacaaagataaaca

SEQ ID NO: 25049 - DNA, 25 bp, Probe sequence
tgaagaaggcaacaaagataaacaa

SEQ ID NO: 25050 - DNA, 25 bp, Probe sequence
gtggtaaacaaagcagtgataagtc

SEQ ID NO: 25051 - DNA, 25 bp, Probe sequence
agtattgtacctgttggtcaagatc

SEQ ID NO: 25052 - DNA, 25 bp, Probe sequence
aagaaggcaacaaagataaacaaga

SEQ ID NO: 25053 - DNA, 25 bp, Probe sequence
tcatagtattgtacctgttggtcaa

SEQ ID NO: 25054 - DNA, 25 bp, Probe sequence
ttcatagtattgtacctgttggtca

SEQ ID NO: 25055 - DNA, 25 bp, Probe sequence
ggtgaagaaggcaacaaagataaac

SEQ ID NO: 25056 - DNA, 25 bp, Probe sequence
agaaggcaacaaagataaacaagat

SEQ ID NO: 25057 - DNA, 25 bp, Probe sequence
taacgatagagatgaacaactggaa

SEQ ID NO: 25058 - DNA, 25 bp, Probe sequence
ataacgatagagatgaacaactgga

SEQ ID NO: 25059 - DNA, 25 bp, Probe sequence
aacgatagagatgaacaactggaac

SEQ ID NO: 25060 - DNA, 25 bp, Probe sequence
tctgatgagaactatgattacggtg

SEQ ID NO: 25061 - DNA, 25 bp, Probe sequence
cgatagagatgaacaactggaacat

SEQ ID NO: 25062 - DNA, 25 bp, Probe sequence
ataacaatcaattcctatggtggtg

SEQ ID NO: 25063 - DNA, 25 bp, Probe sequence
ctgatgagaactatgattacggtgc

SEQ ID NO: 25064 - DNA, 25 bp, Probe sequence
atagagatgaacaactggaacattc

SEQ ID NO: 25065 - DNA, 25 bp, Probe sequence
gatagagatgaacaactggaacatt

SEQ ID NO: 25066 - DNA, 25 bp, Probe sequence
ggaatatacgaacctcaatcagatg

SEQ ID NO: 25067 - DNA, 25 bp, Probe sequence
cttacagtgatagcggtatgaatgg

SEQ ID NO: 25068 - DNA, 25 bp, Probe sequence
aacttacagtgatagcggtatgaat

SEQ ID NO: 25069 - DNA, 25 bp, Probe sequence
ttagagttagttgtgactgatgacg

SEQ ID NO: 25070 - DNA, 25 bp, Probe sequence
acttacagtgatagcggtatgaatg

SEQ ID NO: 25071 - DNA, 25 bp, Probe sequence
tagagttagttgtgactgatgacga

SEQ ID NO: 25072 - DNA, 25 bp, Probe sequence
gagttagttgtgactgatgacgaag

SEQ ID NO: 25073 - DNA, 25 bp, Probe sequence
cggtatgaatggcataacaatcaat

SEQ ID NO: 25074 - DNA, 25 bp, Probe sequence
gaatatacgaacctcaatcagatga

SEQ ID NO: 25075 - DNA, 25 bp, Probe sequence
ttacagtgatagtggtatgaatggc

SEQ ID NO: 25076 - DNA, 25 bp, Probe sequence
cttacagtgatagtggtatgaatgg

SEQ ID NO: 25077 - DNA, 25 bp, Probe sequence
tacagtgatagtggtatgaatggca

SEQ ID NO: 25078 - DNA, 25 bp, Probe sequence
acactatcaagattgttagcagaca

SEQ ID NO: 25079 - DNA, 25 bp, Probe sequence
atcaagattgttagcagacatcact

SEQ ID NO: 25080 - DNA, 25 bp, Probe sequence
ggcgattacttcacatactattgat

SEQ ID NO: 25081 - DNA, 25 bp, Probe sequence
acagtgatagtggtatgaatggcat

SEQ ID NO: 25082 - DNA, 25 bp, Probe sequence
agattgttagcagacatcactgtaa

SEQ ID NO: 25083 - DNA, 25 bp, Probe sequence
aagattgttagcagacatcactgta

SEQ ID NO: 25084 - DNA, 25 bp, Probe sequence
tgtataacttggacagaatcgttgt

SEQ ID NO: 25085 - DNA, 25 bp, Probe sequence
gtataacttggacagaatcgttgtt

SEQ ID NO: 25086 - DNA, 25 bp, Probe sequence
atgtataacttggacagaatcgttg

SEQ ID NO: 25087 - DNA, 25 bp, Probe sequence
aatgtataacttggacagaatcgtt

SEQ ID NO: 25088 - DNA, 25 bp, Probe sequence
ccgagcaattaaaccatctagttac

SEQ ID NO: 25089 - DNA, 25 bp, Probe sequence
cccgagcaattaaaccatctagtta

SEQ ID NO: 25090 - DNA, 25 bp, Probe sequence
ttggacagaatcgttgtttatatgc

SEQ ID NO: 25091 - DNA, 25 bp, Probe sequence
cgagcaattaaaccatctagttact

SEQ ID NO: 25092 - DNA, 25 bp, Probe sequence
aacttggacagaatcgttgtttata

SEQ ID NO: 25093 - DNA, 25 bp, Probe sequence
ggcgtaggcttgaatcttatagttt

SEQ ID NO: 25094 - DNA, 25 bp, Probe sequence
caatacctgttaagttcactatcaa

SEQ ID NO: 25095 - DNA, 25 bp, Probe sequence
tatataaagggcgtaggcttgaatc

SEQ ID NO: 25096 - DNA, 25 bp, Probe sequence
taaagattggtactggaacgcttat

SEQ ID NO: 25097 - DNA, 25 bp, Probe sequence
atataaagggcgtaggcttgaatct

SEQ ID NO: 25098 - DNA, 25 bp, Probe sequence
ctaaagattggtactggaacgctta

SEQ ID NO: 25099 - DNA, 25 bp, Probe sequence
atatataaagggcgtaggcttgaat

SEQ ID NO: 25100 - DNA, 25 bp, Probe sequence
aagattggtactggaacgcttattt

SEQ ID NO: 25101 - DNA, 25 bp, Probe sequence
aaagattggtactggaacgcttatt

SEQ ID NO: 25102 - DNA, 25 bp, Probe sequence
tggttggtataacttaggtgaagac

SEQ ID NO: 25103 - DNA, 25 bp, Probe sequence
tgatggttggtataacttaggtgaa

SEQ ID NO: 25104 - DNA, 25 bp, Probe sequence
ttgatggttggtataacttaggtga

SEQ ID NO: 25105 - DNA, 25 bp, Probe sequence
gttggtataacttaggtgaagacgg

SEQ ID NO: 25106 - DNA, 25 bp, Probe sequence
ggttggtataacttaggtgaagacg

SEQ ID NO: 25107 - DNA, 25 bp, Probe sequence
atggttggtataacttaggtgaaga

SEQ ID NO: 25108 - DNA, 25 bp, Probe sequence
agattatcagccgattattgacgaa

SEQ ID NO: 25109 - DNA, 25 bp, Probe sequence
aagattatcagccgattattgacga

SEQ ID NO: 25110 - DNA, 25 bp, Probe sequence
ttggtataacttaggtgaagacggt

SEQ ID NO: 25111 - DNA, 25 bp, Probe sequence
gctaacgatattgataaccgctcta

SEQ ID NO: 25112 - DNA, 25 bp, Probe sequence
gcagataaggattacgaaccagtta

SEQ ID NO: 25113 - DNA, 25 bp, Probe sequence
tatgacagaatagaaccagcactaa

SEQ ID NO: 25114 - DNA, 25 bp, Probe sequence
ttatgacagaatagaaccagcacta

SEQ ID NO: 25115 - DNA, 25 bp, Probe sequence
gatgtcaggagcattagcgattata

SEQ ID NO: 25116 - DNA, 25 bp, Probe sequence
cttacattatgagatgcgttggaat

SEQ ID NO: 25117 - DNA, 25 bp, Probe sequence
gaaggtataaggcgagttggattac

SEQ ID NO: 25118 - DNA, 25 bp, Probe sequence
acttacattatgagatgcgttggaa

SEQ ID NO: 25119 - DNA, 25 bp, Probe sequence
gttaggttacacgattgaagataca

SEQ ID NO: 25120 - DNA, 25 bp, Probe sequence
tagacattgtcgaatcgaagattga

SEQ ID NO: 25121 - DNA, 25 bp, Probe sequence
ttagacattgtcgaatcgaagattg

SEQ ID NO: 25122 - DNA, 25 bp, Probe sequence
agacattgtcgaatcgaagattgaa

SEQ ID NO: 25123 - DNA, 25 bp, Probe sequence
gattgaaacaaagcgaactgcgaaa

SEQ ID NO: 25124 - DNA, 25 bp, Probe sequence
gacattgtcgaatcgaagattgaaa

SEQ ID NO: 25125 - DNA, 25 bp, Probe sequence
tgtcgaatcgaagattgaaacaaag

SEQ ID NO: 25126 - DNA, 25 bp, Probe sequence
cattgtcgaatcgaagattgaaaca

SEQ ID NO: 25127 - DNA, 25 bp, Probe sequence
acattgtcgaatcgaagattgaaac

SEQ ID NO: 25128 - DNA, 25 bp, Probe sequence
gaatcgaagattgaaacaaagcgaa

SEQ ID NO: 25129 - DNA, 25 bp, Probe sequence
agattggacagttaattggacgaat

SEQ ID NO: 25130 - DNA, 25 bp, Probe sequence
aagattggacagttaattggacgaa

SEQ ID NO: 25131 - DNA, 25 bp, Probe sequence
gattggacagttaattggacgaatt

SEQ ID NO: 25132 - DNA, 25 bp, Probe sequence
ttaagtgtgacagaacaggaagaat

SEQ ID NO: 25133 - DNA, 25 bp, Probe sequence
taagtgtgacagaacaggaagaata

SEQ ID NO: 25134 - DNA, 25 bp, Probe sequence
aagtgtgacagaacaggaagaatac

SEQ ID NO: 25135 - DNA, 25 bp, Probe sequence
gtgtgacagaacaggaagaatacaa

SEQ ID NO: 25136 - DNA, 25 bp, Probe sequence
agtgtgacagaacaggaagaataca

SEQ ID NO: 25137 - DNA, 25 bp, Probe sequence
aaagattggacagttaattggacga

SEQ ID NO: 25138 - DNA, 25 bp, Probe sequence
ggttatggtgtgttggtgctattaa

SEQ ID NO: 25139 - DNA, 25 bp, Probe sequence
tatggttatggtgtgttggtgctat

SEQ ID NO: 25140 - DNA, 25 bp, Probe sequence
tggttatggtgtgttggtgctatta

SEQ ID NO: 25141 - DNA, 25 bp, Probe sequence
gatctatggttatggtgtgttggtg

SEQ ID NO: 25142 - DNA, 25 bp, Probe sequence
gttatggtgtgttggtgctattaat

SEQ ID NO: 25143 - DNA, 25 bp, Probe sequence
ttatggtgtgttggtgctattaatt

SEQ ID NO: 25144 - DNA, 25 bp, Probe sequence
ctatggttatggtgtgttggtgcta

SEQ ID NO: 25145 - DNA, 25 bp, Probe sequence
atggttatggtgtgttggtgctatt

SEQ ID NO: 25146 - DNA, 25 bp, Probe sequence
tgataaatgcggttaatgactatgc

SEQ ID NO: 25147 - DNA, 25 bp, Probe sequence
cacaagataccgaggaagattatgg

SEQ ID NO: 25148 - DNA, 25 bp, Probe sequence
ccacaagataccgaggaagattatg

SEQ ID NO: 25149 - DNA, 25 bp, Probe sequence
attgaagtagaccgtccacaagata

SEQ ID NO: 25150 - DNA, 25 bp, Probe sequence
ttgttactgttcctgctgacgataa

SEQ ID NO: 25151 - DNA, 25 bp, Probe sequence
aattgaagtagaccgtccacaagat

SEQ ID NO: 25152 - DNA, 25 bp, Probe sequence
ttgaagtagaccgtccacaagatac

SEQ ID NO: 25153 - DNA, 25 bp, Probe sequence
tccacaagataccgaggaagattat

SEQ ID NO: 25154 - DNA, 25 bp, Probe sequence
tgttactgttcctgctgacgataag

SEQ ID NO: 25155 - DNA, 25 bp, Probe sequence
atgtagcgattgtatttgaaagacg

SEQ ID NO: 25156 - DNA, 25 bp, Probe sequence
cacatacgctgatgataacgagatt

SEQ ID NO: 25157 - DNA, 25 bp, Probe sequence
acacatacgctgatgataacgagat

SEQ ID NO: 25158 - DNA, 25 bp, Probe sequence
ttcaatgttattacagagaaccgtt

SEQ ID NO: 25159 - DNA, 25 bp, Probe sequence
gacacatacgctgatgataacgaga

SEQ ID NO: 25160 - DNA, 25 bp, Probe sequence
tcaatgttattacagagaaccgtta

SEQ ID NO: 25161 - DNA, 25 bp, Probe sequence
catacgctgatgataacgagatttc

SEQ ID NO: 25162 - DNA, 25 bp, Probe sequence
tgacacatacgctgatgataacgag

SEQ ID NO: 25163 - DNA, 25 bp, Probe sequence
acatacgctgatgataacgagattt

SEQ ID NO: 25164 - DNA, 25 bp, Probe sequence
gctgatgataacgagatttcaagag

SEQ ID NO: 25165 - DNA, 25 bp, Probe sequence
aatgcttgatactgctaagaggttg

SEQ ID NO: 25166 - DNA, 25 bp, Probe sequence
caatgcttgatactgctaagaggtt

SEQ ID NO: 25167 - DNA, 25 bp, Probe sequence
aacaatgcttgatactgctaagagg

SEQ ID NO: 25168 - DNA, 25 bp, Probe sequence
acaatgcttgatactgctaagaggt

SEQ ID NO: 25169 - DNA, 25 bp, Probe sequence
aaacaatgcttgatactgctaagag

SEQ ID NO: 25170 - DNA, 25 bp, Probe sequence
atgcttgatactgctaagaggttgc

SEQ ID NO: 25171 - DNA, 25 bp, Probe sequence
ctcacatcgtattcatgcaacagaa

SEQ ID NO: 25172 - DNA, 25 bp, Probe sequence
taaaggcgtctcacatcgtattcat

SEQ ID NO: 25173 - DNA, 25 bp, Probe sequence
cacatcgtattcatgcaacagaatt

SEQ ID NO: 25174 - DNA, 25 bp, Probe sequence
tgaagatgtaagcgagagagtgaac

SEQ ID NO: 25175 - DNA, 25 bp, Probe sequence
gtgaagatgtaagcgagagagtgaa

SEQ ID NO: 25176 - DNA, 25 bp, Probe sequence
ttgtgaagatgtaagcgagagagtg

SEQ ID NO: 25177 - DNA, 25 bp, Probe sequence
ttattatcagagatacacgaggtga

SEQ ID NO: 25178 - DNA, 25 bp, Probe sequence
gacactcaaacgaatctcaatacag

SEQ ID NO: 25179 - DNA, 25 bp, Probe sequence
acgaatctcaatacaggtagcaaat

SEQ ID NO: 25180 - DNA, 25 bp, Probe sequence
actcaaacgaatctcaatacaggta

SEQ ID NO: 25181 - DNA, 25 bp, Probe sequence
aatcttatttgcgtatctatggcga

SEQ ID NO: 25182 - DNA, 25 bp, Probe sequence
aacgaatctcaatacaggtagcaaa

SEQ ID NO: 25183 - DNA, 25 bp, Probe sequence
atcacaattcagaggacgacttatt

SEQ ID NO: 25184 - DNA, 25 bp, Probe sequence
tcacaattcagaggacgacttatta

SEQ ID NO: 25185 - DNA, 25 bp, Probe sequence
acaattcagaggacgacttattaga

SEQ ID NO: 25186 - DNA, 25 bp, Probe sequence
cacaattcagaggacgacttattag

SEQ ID NO: 25187 - DNA, 25 bp, Probe sequence
gatcacaattcagaggacgacttat

SEQ ID NO: 25188 - DNA, 25 bp, Probe sequence
aatagatcacaattcagaggacgac

SEQ ID NO: 25189 - DNA, 25 bp, Probe sequence
atagatcacaattcagaggacgact

SEQ ID NO: 25190 - DNA, 25 bp, Probe sequence
caattcagaggacgacttattagaa

SEQ ID NO: 25191 - DNA, 25 bp, Probe sequence
agatcacaattcagaggacgactta

SEQ ID NO: 25192 - DNA, 25 bp, Probe sequence
caacatacaattccttctacagcaa

SEQ ID NO: 25193 - DNA, 25 bp, Probe sequence
cgttattgtcgttattagcaactct

SEQ ID NO: 25194 - DNA, 25 bp, Probe sequence
atattggcgtgaatacagttgactt

SEQ ID NO: 25195 - DNA, 25 bp, Probe sequence
cgaagagagtgagaatactgacaat

SEQ ID NO: 25196 - DNA, 25 bp, Probe sequence
gcaacatacaattccttctacagca

SEQ ID NO: 25197 - DNA, 25 bp, Probe sequence
catattggcgtgaatacagttgact

SEQ ID NO: 25198 - DNA, 25 bp, Probe sequence
tattggcgtgaatacagttgacttg

SEQ ID NO: 25199 - DNA, 25 bp, Probe sequence
tcatattggcgtgaatacagttgac

SEQ ID NO: 25200 - DNA, 25 bp, Probe sequence
gttattgtcgttattagcaactctg

SEQ ID NO: 25201 - DNA, 25 bp, Probe sequence
cggtaggtattattcttgtagttgc

SEQ ID NO: 25202 - DNA, 25 bp, Probe sequence
ggttcaatcgtccttattctaatca

SEQ ID NO: 25203 - DNA, 25 bp, Probe sequence
tggttcaatcgtccttattctaatc

SEQ ID NO: 25204 - DNA, 25 bp, Probe sequence
actctcattagtaacagtagcaagt

SEQ ID NO: 25205 - DNA, 25 bp, Probe sequence
acggtaggtattattcttgtagttg

SEQ ID NO: 25206 - DNA, 25 bp, Probe sequence
ttggttcaatcgtccttattctaat

SEQ ID NO: 25207 - DNA, 25 bp, Probe sequence
cacttataactggtatgatcgcaag

SEQ ID NO: 25208 - DNA, 25 bp, Probe sequence
ctctcattagtaacagtagcaagta

SEQ ID NO: 25209 - DNA, 25 bp, Probe sequence
ttgtgatgttgttactctcattagt

SEQ ID NO: 25210 - DNA, 25 bp, Probe sequence
caagcatcaagaagatacgaatcat

SEQ ID NO: 25211 - DNA, 25 bp, Probe sequence
agattatgctcaagacatccttaca

SEQ ID NO: 25212 - DNA, 25 bp, Probe sequence
gattatgctcaagacatccttacag

SEQ ID NO: 25213 - DNA, 25 bp, Probe sequence
ccaagcatcaagaagatacgaatca

SEQ ID NO: 25214 - DNA, 25 bp, Probe sequence
aagattatgctcaagacatccttac

SEQ ID NO: 25215 - DNA, 25 bp, Probe sequence
tattggtgtgaatacagttgacttg

SEQ ID NO: 25216 - DNA, 25 bp, Probe sequence
catattggtgtgaatacagttgact

SEQ ID NO: 25217 - DNA, 25 bp, Probe sequence
tcatattggtgtgaatacagttgac

SEQ ID NO: 25218 - DNA, 25 bp, Probe sequence
tggacatagtcattcatattggtgt

SEQ ID NO: 25219 - DNA, 25 bp, Probe sequence
tggcaatgtatgaagtgaagaaatc

SEQ ID NO: 25220 - DNA, 25 bp, Probe sequence
ggcaatgtatgaagtgaagaaatct

SEQ ID NO: 25221 - DNA, 25 bp, Probe sequence
atggcaatgtatgaagtgaagaaat

SEQ ID NO: 25222 - DNA, 25 bp, Probe sequence
agcatggagtaatacttgaaagagt

SEQ ID NO: 25223 - DNA, 25 bp, Probe sequence
tgaaagagcatggagtaatacttga

SEQ ID NO: 25224 - DNA, 25 bp, Probe sequence
agagcatggagtaatacttgaaaga

SEQ ID NO: 25225 - DNA, 25 bp, Probe sequence
ctgaaagagcatggagtaatacttg

SEQ ID NO: 25226 - DNA, 25 bp, Probe sequence
gagcatggagtaatacttgaaagag

SEQ ID NO: 25227 - DNA, 25 bp, Probe sequence
gaaagagcatggagtaatacttgaa

SEQ ID NO: 25228 - DNA, 25 bp, Probe sequence
aacaatcaacaatcagtggaagtaa

SEQ ID NO: 25229 - DNA, 25 bp, Probe sequence
aacgagagcacttaataacgatgag

SEQ ID NO: 25230 - DNA, 25 bp, Probe sequence
caacgagagcacttaataacgatga

SEQ ID NO: 25231 - DNA, 25 bp, Probe sequence
caatgatattcaaggtggttcgtta

SEQ ID NO: 25232 - DNA, 25 bp, Probe sequence
gattgaatatgatgatagtgaacgc

SEQ ID NO: 25233 - DNA, 25 bp, Probe sequence
cgagagcacttaataacgatgagtt

SEQ ID NO: 25234 - DNA, 25 bp, Probe sequence
aatgatattcaaggtggttcgttaa

SEQ ID NO: 25235 - DNA, 25 bp, Probe sequence
taatcttgataagtatgtgacggtc

SEQ ID NO: 25236 - DNA, 25 bp, Probe sequence
acgagagcacttaataacgatgagt

SEQ ID NO: 25237 - DNA, 25 bp, Probe sequence
tattagtgttaattgtagcgcatcc

SEQ ID NO: 25238 - DNA, 25 bp, Probe sequence
ttattagtgttaattgtagcgcatc

SEQ ID NO: 25239 - DNA, 25 bp, Probe sequence
attattagtgttaattgtagcgcat

SEQ ID NO: 25240 - DNA, 25 bp, Probe sequence
attagtgttaattgtagcgcatccc

SEQ ID NO: 25241 - DNA, 25 bp, Probe sequence
ttagtgttaattgtagcgcatccca

SEQ ID NO: 25242 - DNA, 25 bp, Probe sequence
aattattagtgttaattgtagcgca

SEQ ID NO: 25243 - DNA, 25 bp, Probe sequence
tagtgttaattgtagcgcatcccaa

SEQ ID NO: 25244 - DNA, 25 bp, Probe sequence
agtgttaattgtagcgcatcccaat

SEQ ID NO: 25245 - DNA, 25 bp, Probe sequence
ttaacagcaattcgtgaacttacag

SEQ ID NO: 25246 - DNA, 25 bp, Probe sequence
taacagcaattcgtgaacttacaga

SEQ ID NO: 25247 - DNA, 25 bp, Probe sequence
aacagcaattcgtgaacttacagat

SEQ ID NO: 25248 - DNA, 25 bp, Probe sequence
agcaattcgtgaacttacagatgtt

SEQ ID NO: 25249 - DNA, 25 bp, Probe sequence
cagcaattcgtgaacttacagatgt

SEQ ID NO: 25250 - DNA, 25 bp, Probe sequence
acagcaattcgtgaacttacagatg

SEQ ID NO: 25251 - DNA, 25 bp, Probe sequence
gagagttggcaacattattgaggta

SEQ ID NO: 25252 - DNA, 25 bp, Probe sequence
agagttggcaacattattgaggtac

SEQ ID NO: 25253 - DNA, 25 bp, Probe sequence
gataacaacgaaatggtcatagagg

SEQ ID NO: 25254 - DNA, 25 bp, Probe sequence
gcacgatagaatcagataacaatgg

SEQ ID NO: 25255 - DNA, 25 bp, Probe sequence
cgcacgatagaatcagataacaatg

SEQ ID NO: 25256 - DNA, 25 bp, Probe sequence
atatagaagcaattaggcatagcga

SEQ ID NO: 25257 - DNA, 25 bp, Probe sequence
gatatagaagcaattaggcatagcg

SEQ ID NO: 25258 - DNA, 25 bp, Probe sequence
cttactaacatcgcacggctatatt

SEQ ID NO: 25259 - DNA, 25 bp, Probe sequence
tatagaagcaattaggcatagcgac

SEQ ID NO: 25260 - DNA, 25 bp, Probe sequence
ttactaacatcgcacggctatattg

SEQ ID NO: 25261 - DNA, 25 bp, Probe sequence
attaagtcgcacgatagaatcagat

SEQ ID NO: 25262 - DNA, 25 bp, Probe sequence
tcgcacgatagaatcagataacaat

SEQ ID NO: 25263 - DNA, 25 bp, Probe sequence
acaagtaataacgcctatgcctaat

SEQ ID NO: 25264 - DNA, 25 bp, Probe sequence
caagtatgcctgatgatgagatgta

SEQ ID NO: 25265 - DNA, 25 bp, Probe sequence
aacaagtaataacgcctatgcctaa

SEQ ID NO: 25266 - DNA, 25 bp, Probe sequence
caaggtaagtctctaatcgtatcgg

SEQ ID NO: 25267 - DNA, 25 bp, Probe sequence
cgcctatgcctaatatcaatggtaa

SEQ ID NO: 25268 - DNA, 25 bp, Probe sequence
taacgcctatgcctaatatcaatgg

SEQ ID NO: 25269 - DNA, 25 bp, Probe sequence
gaacaagtaataacgcctatgccta

SEQ ID NO: 25270 - DNA, 25 bp, Probe sequence
tggattcacaagaagaagttcaaga

SEQ ID NO: 25271 - DNA, 25 bp, Probe sequence
atggattcacaagaagaagttcaag

SEQ ID NO: 25272 - DNA, 25 bp, Probe sequence
tattgatagccgattgcgtattatg

SEQ ID NO: 25273 - DNA, 25 bp, Probe sequence
actattgatagccgattgcgtatta

SEQ ID NO: 25274 - DNA, 25 bp, Probe sequence
taactattgatagccgattgcgtat

SEQ ID NO: 25275 - DNA, 25 bp, Probe sequence
ggattaactattgatagccgattgc

SEQ ID NO: 25276 - DNA, 25 bp, Probe sequence
ttaactattgatagccgattgcgta

SEQ ID NO: 25277 - DNA, 25 bp, Probe sequence
gattaactattgatagccgattgcg

SEQ ID NO: 25278 - DNA, 25 bp, Probe sequence
gattgcgtattatggttcctgatga

SEQ ID NO: 25279 - DNA, 25 bp, Probe sequence
attgcgtattatggttcctgatgaa

SEQ ID NO: 25280 - DNA, 25 bp, Probe sequence
aactattgatagccgattgcgtatt

SEQ ID NO: 25281 - DNA, 25 bp, Probe sequence
ttgtctattatgaagcgatgtggtc

SEQ ID NO: 25282 - DNA, 25 bp, Probe sequence
tgtctattatgaagcgatgtggtca

SEQ ID NO: 25283 - DNA, 25 bp, Probe sequence
atgcgtcgaattgtattgttagaac

SEQ ID NO: 25284 - DNA, 25 bp, Probe sequence
catgcgtcgaattgtattgttagaa

SEQ ID NO: 25285 - DNA, 25 bp, Probe sequence
gcgtcgaattgtattgttagaacat

SEQ ID NO: 25286 - DNA, 25 bp, Probe sequence
tatttgtgtttcttgtggcaatcaa

SEQ ID NO: 25287 - DNA, 25 bp, Probe sequence
ttatttgtgtttcttgtggcaatca

SEQ ID NO: 25288 - DNA, 25 bp, Probe sequence
attgattgggcaagaagattagaca

SEQ ID NO: 25289 - DNA, 25 bp, Probe sequence
tgattgggcaagaagattagacaaa

SEQ ID NO: 25290 - DNA, 25 bp, Probe sequence
aacaagaggtggagaatggagatat

SEQ ID NO: 25291 - DNA, 25 bp, Probe sequence
aactcaatctacaggcaatgttaca

SEQ ID NO: 25292 - DNA, 25 bp, Probe sequence
ctcaatctacaggcaatgttacaga

SEQ ID NO: 25293 - DNA, 25 bp, Probe sequence
actcaatctacaggcaatgttacag

SEQ ID NO: 25294 - DNA, 25 bp, Probe sequence
attaacttggatgagatagctggtc

SEQ ID NO: 25295 - DNA, 25 bp, Probe sequence
cgtgttaggtattaacttggatgag

SEQ ID NO: 25296 - DNA, 25 bp, Probe sequence
tattaacttggatgagatagctggt

SEQ ID NO: 25297 - DNA, 25 bp, Probe sequence
taggtattaacttggatgagatagc

SEQ ID NO: 25298 - DNA, 25 bp, Probe sequence
taactcaatctacaggcaatgttac

SEQ ID NO: 25299 - DNA, 25 bp, Probe sequence
attcttgatataggcagagacaatt

SEQ ID NO: 25300 - DNA, 25 bp, Probe sequence
aacaacgagaaagccataataggat

SEQ ID NO: 25301 - DNA, 25 bp, Probe sequence
aaacaacgagaaagccataatagga

SEQ ID NO: 25302 - DNA, 25 bp, Probe sequence
cagtaaagtctacgataacgaaagt

SEQ ID NO: 25303 - DNA, 25 bp, Probe sequence
acagtaaagtctacgataacgaaag

SEQ ID NO: 25304 - DNA, 25 bp, Probe sequence
agtctacgataacgaaagtacatca

SEQ ID NO: 25305 - DNA, 25 bp, Probe sequence
tgatagataactacaagtggatgaa

SEQ ID NO: 25306 - DNA, 25 bp, Probe sequence
gtctacgataacgaaagtacatcaa

SEQ ID NO: 25307 - DNA, 25 bp, Probe sequence
ctaaaggcacgactagcaataaagt

SEQ ID NO: 25308 - DNA, 25 bp, Probe sequence
tgatgtggattactatgactattgt

SEQ ID NO: 25309 - DNA, 25 bp, Probe sequence
gatgtggattactatgactattgta

SEQ ID NO: 25310 - DNA, 25 bp, Probe sequence
tgactattgtatttgctatattgct

SEQ ID NO: 25311 - DNA, 25 bp, Probe sequence
tgtggattactatgactattgtatt

SEQ ID NO: 25312 - DNA, 25 bp, Probe sequence
atgtggattactatgactattgtat

SEQ ID NO: 25313 - DNA, 25 bp, Probe sequence
ggattactatgactattgtatttgc

SEQ ID NO: 25314 - DNA, 25 bp, Probe sequence
atgactattgtatttgctatattgc

SEQ ID NO: 25315 - DNA, 25 bp, Probe sequence
atttgctatattgctattagtttgt

SEQ ID NO: 25316 - DNA, 25 bp, Probe sequence
gtaattgatgttatgacgagtggtg

SEQ ID NO: 25317 - DNA, 25 bp, Probe sequence
gtgtaattgatgttatgacgagtgg

SEQ ID NO: 25318 - DNA, 25 bp, Probe sequence
tgtaattgatgttatgacgagtggt

SEQ ID NO: 25319 - DNA, 25 bp, Probe sequence
gttgatgaagtggtagatggacata

SEQ ID NO: 25320 - DNA, 25 bp, Probe sequence
agtgtaattgatgttatgacgagtg

SEQ ID NO: 25321 - DNA, 25 bp, Probe sequence
tgatgaagtggtagatggacatatt

SEQ ID NO: 25322 - DNA, 25 bp, Probe sequence
ttgatgaagtggtagatggacatat

SEQ ID NO: 25323 - DNA, 25 bp, Probe sequence
ttcgttctattggtatcaacaagtg

SEQ ID NO: 25324 - DNA, 25 bp, Probe sequence
tcgttctattggtatcaacaagtga

SEQ ID NO: 25325 - DNA, 25 bp, Probe sequence
aattaagtggtggacaattacaacg

SEQ ID NO: 25326 - DNA, 25 bp, Probe sequence
cagaattaagtggtggacaattaca

SEQ ID NO: 25327 - DNA, 25 bp, Probe sequence
tcagaattaagtggtggacaattac

SEQ ID NO: 25328 - DNA, 25 bp, Probe sequence
gatagtgaagaggctatgagtgtca

SEQ ID NO: 25329 - DNA, 25 bp, Probe sequence
tgatagtgaagaggctatgagtgtc

SEQ ID NO: 25330 - DNA, 25 bp, Probe sequence
gaattaagtggtggacaattacaac

SEQ ID NO: 25331 - DNA, 25 bp, Probe sequence
agaattaagtggtggacaattacaa

SEQ ID NO: 25332 - DNA, 25 bp, Probe sequence
gtgatagtgaagaggctatgagtgt

SEQ ID NO: 25333 - DNA, 25 bp, Probe sequence
ttggtgatagtgaagaggctatgag

SEQ ID NO: 25334 - DNA, 25 bp, Probe sequence
acatatacaggcatgattgaagagg

SEQ ID NO: 25335 - DNA, 25 bp, Probe sequence
cacatatacaggcatgattgaagag

SEQ ID NO: 25336 - DNA, 25 bp, Probe sequence
tatacaggcatgattgaagaggcta

SEQ ID NO: 25337 - DNA, 25 bp, Probe sequence
tcacatatacaggcatgattgaaga

SEQ ID NO: 25338 - DNA, 25 bp, Probe sequence
atacaggcatgattgaagaggctat

SEQ ID NO: 25339 - DNA, 25 bp, Probe sequence
atatacaggcatgattgaagaggct

SEQ ID NO: 25340 - DNA, 25 bp, Probe sequence
catatacaggcatgattgaagaggc

SEQ ID NO: 25341 - DNA, 25 bp, Probe sequence
aattaatgtagaggtggaacaggaa

SEQ ID NO: 25342 - DNA, 25 bp, Probe sequence
tacaggcatgattgaagaggctatc

SEQ ID NO: 25343 - DNA, 25 bp, Probe sequence
cagattggattagaattgcgagtaa

SEQ ID NO: 25344 - DNA, 25 bp, Probe sequence
cgttcaattaaatcactaaagcctg

SEQ ID NO: 25345 - DNA, 25 bp, Probe sequence
tcgttcaattaaatcactaaagcct

SEQ ID NO: 25346 - DNA, 25 bp, Probe sequence
agattggattagaattgcgagtaaa

SEQ ID NO: 25347 - DNA, 25 bp, Probe sequence
cctgatgcagattggattagaattg

SEQ ID NO: 25348 - DNA, 25 bp, Probe sequence
atcgttcaattaaatcactaaagcc

SEQ ID NO: 25349 - DNA, 25 bp, Probe sequence
gcctgatgcagattggattagaatt

SEQ ID NO: 25350 - DNA, 25 bp, Probe sequence
gcagattggattagaattgcgagta

SEQ ID NO: 25351 - DNA, 25 bp, Probe sequence
gcagatcgttcaattaaatcactaa

SEQ ID NO: 25352 - DNA, 25 bp, Probe sequence
acaacagacattacaacaaggattc

SEQ ID NO: 25353 - DNA, 25 bp, Probe sequence
gacaacagacattacaacaaggatt

SEQ ID NO: 25354 - DNA, 25 bp, Probe sequence
caacagacattacaacaaggattcg

SEQ ID NO: 25355 - DNA, 25 bp, Probe sequence
ttacaacaaggattcgcaattacac

SEQ ID NO: 25356 - DNA, 25 bp, Probe sequence
attacaacaaggattcgcaattaca

SEQ ID NO: 25357 - DNA, 25 bp, Probe sequence
acattacaacaaggattcgcaatta

SEQ ID NO: 25358 - DNA, 25 bp, Probe sequence
aggtgtattattaggcgaagttcta

SEQ ID NO: 25359 - DNA, 25 bp, Probe sequence
taggtgtattattaggcgaagttct

SEQ ID NO: 25360 - DNA, 25 bp, Probe sequence
gacattacaacaaggattcgcaatt

SEQ ID NO: 25361 - DNA, 25 bp, Probe sequence
atgtgagagatgtggaagtgaatac

SEQ ID NO: 25362 - DNA, 25 bp, Probe sequence
aatgtgagagatgtggaagtgaata

SEQ ID NO: 25363 - DNA, 25 bp, Probe sequence
tgagagatgtggaagtgaatacgac

SEQ ID NO: 25364 - DNA, 25 bp, Probe sequence
gtgagagatgtggaagtgaatacga

SEQ ID NO: 25365 - DNA, 25 bp, Probe sequence
tgtgagagatgtggaagtgaatacg

SEQ ID NO: 25366 - DNA, 25 bp, Probe sequence
gagagatgtggaagtgaatacgact

SEQ ID NO: 25367 - DNA, 25 bp, Probe sequence
caagcaacggaagataaacaacata

SEQ ID NO: 25368 - DNA, 25 bp, Probe sequence
gattgaaatgtgagagatgtggaag

SEQ ID NO: 25369 - DNA, 25 bp, Probe sequence
aaatgtgagagatgtggaagtgaat

SEQ ID NO: 25370 - DNA, 25 bp, Probe sequence
gaactagagcaacattcaactgatg

SEQ ID NO: 25371 - DNA, 25 bp, Probe sequence
agaactagagcaacattcaactgat

SEQ ID NO: 25372 - DNA, 25 bp, Probe sequence
aacagaactagagcaacattcaact

SEQ ID NO: 25373 - DNA, 25 bp, Probe sequence
agcaacattcaactgatggacttag

SEQ ID NO: 25374 - DNA, 25 bp, Probe sequence
gagcaacattcaactgatggactta

SEQ ID NO: 25375 - DNA, 25 bp, Probe sequence
aactagagcaacattcaactgatgg

SEQ ID NO: 25376 - DNA, 25 bp, Probe sequence
gtacttagtatatgagcaaccgcac

SEQ ID NO: 25377 - DNA, 25 bp, Probe sequence
tagagcaacattcaactgatggact

SEQ ID NO: 25378 - DNA, 25 bp, Probe sequence
ctagagcaacattcaactgatggac

SEQ ID NO: 25379 - DNA, 25 bp, Probe sequence
ttgtcacttggtattgaaatggaaa

SEQ ID NO: 25380 - DNA, 25 bp, Probe sequence
tttgtcacttggtattgaaatggaa

SEQ ID NO: 25381 - DNA, 25 bp, Probe sequence
cataatcaatttgtaccgccgtata

SEQ ID NO: 25382 - DNA, 25 bp, Probe sequence
tgtcacttggtattgaaatggaaat

SEQ ID NO: 25383 - DNA, 25 bp, Probe sequence
taccgccgtataaatatgatttcca

SEQ ID NO: 25384 - DNA, 25 bp, Probe sequence
ccgccgtataaatatgatttccaag

SEQ ID NO: 25385 - DNA, 25 bp, Probe sequence
cgccgtataaatatgatttccaaga

SEQ ID NO: 25386 - DNA, 25 bp, Probe sequence
taatcaatttgtaccgccgtataaa

SEQ ID NO: 25387 - DNA, 25 bp, Probe sequence
accgccgtataaatatgatttccaa

SEQ ID NO: 25388 - DNA, 25 bp, Probe sequence
tgatgtatattgaactatgtgattg

SEQ ID NO: 25389 - DNA, 25 bp, Probe sequence
agaaagaagtaacaaccctgaattg

SEQ ID NO: 25390 - DNA, 25 bp, Probe sequence
gtttagaaagaagtaacaaccctga

SEQ ID NO: 25391 - DNA, 25 bp, Probe sequence
tttagaaagaagtaacaaccctgaa

SEQ ID NO: 25392 - DNA, 25 bp, Probe sequence
ttagaaagaagtaacaaccctgaat

SEQ ID NO: 25393 - DNA, 25 bp, Probe sequence
tagaaagaagtaacaaccctgaatt

SEQ ID NO: 25394 - DNA, 25 bp, Probe sequence
gttgcagagttgttaaagaaggtta

SEQ ID NO: 25395 - DNA, 25 bp, Probe sequence
tgctagttactgtttagaaagaagt

SEQ ID NO: 25396 - DNA, 25 bp, Probe sequence
agttgcagagttgttaaagaaggtt

SEQ ID NO: 25397 - DNA, 25 bp, Probe sequence
ttgcagagttgttaaagaaggttaa

SEQ ID NO: 25398 - DNA, 25 bp, Probe sequence
atattcaatacaacgatggctacga

SEQ ID NO: 25399 - DNA, 25 bp, Probe sequence
aatacaacgatggctacgacttaat

SEQ ID NO: 25400 - DNA, 25 bp, Probe sequence
gatggctacgacttaatgatagacc

SEQ ID NO: 25401 - DNA, 25 bp, Probe sequence
aacgatggctacgacttaatgatag

SEQ ID NO: 25402 - DNA, 25 bp, Probe sequence
caacgatggctacgacttaatgata

SEQ ID NO: 25403 - DNA, 25 bp, Probe sequence
cgatggctacgacttaatgatagac

SEQ ID NO: 25404 - DNA, 25 bp, Probe sequence
atacaacgatggctacgacttaatg

SEQ ID NO: 25405 - DNA, 25 bp, Probe sequence
tattcaatacaacgatggctacgac

SEQ ID NO: 25406 - DNA, 25 bp, Probe sequence
acgatggctacgacttaatgataga

SEQ ID NO: 25407 - DNA, 25 bp, Probe sequence
ttcaactaggtacgataagtggttc

SEQ ID NO: 25408 - DNA, 25 bp, Probe sequence
aatcatattctcactctcgacactg

SEQ ID NO: 25409 - DNA, 25 bp, Probe sequence
taatcatattctcactctcgacact

SEQ ID NO: 25410 - DNA, 25 bp, Probe sequence
caagttaatcatattctcactctcg

SEQ ID NO: 25411 - DNA, 25 bp, Probe sequence
ttaatcatattctcactctcgacac

SEQ ID NO: 25412 - DNA, 25 bp, Probe sequence
gttaatcatattctcactctcgaca

SEQ ID NO: 25413 - DNA, 25 bp, Probe sequence
atcatattctcactctcgacactgc

SEQ ID NO: 25414 - DNA, 25 bp, Probe sequence
agttaatcatattctcactctcgac

SEQ ID NO: 25415 - DNA, 25 bp, Probe sequence
agtttcaactaggtacgataagtgg

SEQ ID NO: 25416 - DNA, 25 bp, Probe sequence
gttgttaataacggagctgtaagac

SEQ ID NO: 25417 - DNA, 25 bp, Probe sequence
ggttgttaataacggagctgtaaga

SEQ ID NO: 25418 - DNA, 25 bp, Probe sequence
ggagctgtaagacaactagaagatt

SEQ ID NO: 25419 - DNA, 25 bp, Probe sequence
ttaataacggagctgtaagacaact

SEQ ID NO: 25420 - DNA, 25 bp, Probe sequence
gttaataacggagctgtaagacaac

SEQ ID NO: 25421 - DNA, 25 bp, Probe sequence
tgttaataacggagctgtaagacaa

SEQ ID NO: 25422 - DNA, 25 bp, Probe sequence
ttgttaataacggagctgtaagaca

SEQ ID NO: 25423 - DNA, 25 bp, Probe sequence
caagtacggttgttaataacggagc

SEQ ID NO: 25424 - DNA, 25 bp, Probe sequence
aataacggagctgtaagacaactag

SEQ ID NO: 25425 - DNA, 25 bp, Probe sequence
tcatcaagcattagaggttaagact

SEQ ID NO: 25426 - DNA, 25 bp, Probe sequence
gagaacttcatcaagcattagaggt

SEQ ID NO: 25427 - DNA, 25 bp, Probe sequence
agaacttcatcaagcattagaggtt

SEQ ID NO: 25428 - DNA, 25 bp, Probe sequence
ttcatcaagcattagaggttaagac

SEQ ID NO: 25429 - DNA, 25 bp, Probe sequence
acttcatcaagcattagaggttaag

SEQ ID NO: 25430 - DNA, 25 bp, Probe sequence
gaacttcatcaagcattagaggtta

SEQ ID NO: 25431 - DNA, 25 bp, Probe sequence
gcattagaggttaagactccataca

SEQ ID NO: 25432 - DNA, 25 bp, Probe sequence
atcaagcattagaggttaagactcc

SEQ ID NO: 25433 - DNA, 25 bp, Probe sequence
caagcattagaggttaagactccat

SEQ ID NO: 25434 - DNA, 25 bp, Probe sequence
aaatcaacgccactccaattaaaga

SEQ ID NO: 25435 - DNA, 25 bp, Probe sequence
ccgaacatgcttcagttatttacaa

SEQ ID NO: 25436 - DNA, 25 bp, Probe sequence
aaccgaacatgcttcagttatttac

SEQ ID NO: 25437 - DNA, 25 bp, Probe sequence
aaaccgaacatgcttcagttattta

SEQ ID NO: 25438 - DNA, 25 bp, Probe sequence
accgaacatgcttcagttatttaca

SEQ ID NO: 25439 - DNA, 25 bp, Probe sequence
cgaacatgcttcagttatttacaaa

SEQ ID NO: 25440 - DNA, 25 bp, Probe sequence
aatcaacgccactccaattaaagag

SEQ ID NO: 25441 - DNA, 25 bp, Probe sequence
acggtgatgcaagaaataaattaga

SEQ ID NO: 25442 - DNA, 25 bp, Probe sequence
ctatcagaaagtaccacatacggtg

SEQ ID NO: 25443 - DNA, 25 bp, Probe sequence
agaatcattgaagagggtgaactta

SEQ ID NO: 25444 - DNA, 25 bp, Probe sequence
aaacagaatcattgaagagggtgaa

SEQ ID NO: 25445 - DNA, 25 bp, Probe sequence
gaatcattgaagagggtgaacttaa

SEQ ID NO: 25446 - DNA, 25 bp, Probe sequence
cagaatcattgaagagggtgaactt

SEQ ID NO: 25447 - DNA, 25 bp, Probe sequence
aacagaatcattgaagagggtgaac

SEQ ID NO: 25448 - DNA, 25 bp, Probe sequence
aatcattgaagagggtgaacttaaa

SEQ ID NO: 25449 - DNA, 25 bp, Probe sequence
acagaatcattgaagagggtgaact

SEQ ID NO: 25450 - DNA, 25 bp, Probe sequence
acaacggtaaaccagtatttatagt

SEQ ID NO: 25451 - DNA, 25 bp, Probe sequence
caacggtaaaccagtatttatagtt

SEQ ID NO: 25452 - DNA, 25 bp, Probe sequence
atgatgctgttaatcgtattgtgtt

SEQ ID NO: 25453 - DNA, 25 bp, Probe sequence
tgatgctgttaatcgtattgtgtta

SEQ ID NO: 25454 - DNA, 25 bp, Probe sequence
tatgatgctgttaatcgtattgtgt

SEQ ID NO: 25455 - DNA, 25 bp, Probe sequence
gatgctgttaatcgtattgtgttaa

SEQ ID NO: 25456 - DNA, 25 bp, Probe sequence
atatgatgctgttaatcgtattgtg

SEQ ID NO: 25457 - DNA, 25 bp, Probe sequence
gcacgattatttcattcaagacatt

SEQ ID NO: 25458 - DNA, 25 bp, Probe sequence
atatattcaaggtcagaaacaacgc

SEQ ID NO: 25459 - DNA, 25 bp, Probe sequence
gaatatggtcgtttgttagttggac

SEQ ID NO: 25460 - DNA, 25 bp, Probe sequence
aatatggtcgtttgttagttggaca

SEQ ID NO: 25461 - DNA, 25 bp, Probe sequence
agtatggacaatcgcagacctatta

SEQ ID NO: 25462 - DNA, 25 bp, Probe sequence
gtatggacaatcgcagacctattac

SEQ ID NO: 25463 - DNA, 25 bp, Probe sequence
tatggacaatcgcagacctattaca

SEQ ID NO: 25464 - DNA, 25 bp, Probe sequence
cagtatctaattctagtaatgccgc

SEQ ID NO: 25465 - DNA, 25 bp, Probe sequence
cactacctgagttgagtaatacgaa

SEQ ID NO: 25466 - DNA, 25 bp, Probe sequence
atgtctacactacctgagttgagta

SEQ ID NO: 25467 - DNA, 25 bp, Probe sequence
tatgtctacactacctgagttgagt

SEQ ID NO: 25468 - DNA, 25 bp, Probe sequence
tacactacctgagttgagtaatacg

SEQ ID NO: 25469 - DNA, 25 bp, Probe sequence
tgtctacactacctgagttgagtaa

SEQ ID NO: 25470 - DNA, 25 bp, Probe sequence
gttactaatgcgactaatcttgctg

SEQ ID NO: 25471 - DNA, 25 bp, Probe sequence
caccaaccatattagaacctacagt

SEQ ID NO: 25472 - DNA, 25 bp, Probe sequence
atccaccaaccatattagaacctac

SEQ ID NO: 25473 - DNA, 25 bp, Probe sequence
gctgtccatatcgtcataactattg

SEQ ID NO: 25474 - DNA, 25 bp, Probe sequence
ccaccaaccatattagaacctacag

SEQ ID NO: 25475 - DNA, 25 bp, Probe sequence
ctacgctcgctattacaggtattaa

SEQ ID NO: 25476 - DNA, 25 bp, Probe sequence
taatgcgactaatcttgctgctaat

SEQ ID NO: 25477 - DNA, 25 bp, Probe sequence
tgtcattgcgatagtcataattgtg

SEQ ID NO: 25478 - DNA, 25 bp, Probe sequence
gtcattgcgatagtcataattgtgg

SEQ ID NO: 25479 - DNA, 25 bp, Probe sequence
aggagagagaatcaagatgtgtatg

SEQ ID NO: 25480 - DNA, 25 bp, Probe sequence
ggagagagaatcaagatgtgtatgg

SEQ ID NO: 25481 - DNA, 25 bp, Probe sequence
aaggagagagaatcaagatgtgtat

SEQ ID NO: 25482 - DNA, 25 bp, Probe sequence
ataaggagagagaatcaagatgtgt

SEQ ID NO: 25483 - DNA, 25 bp, Probe sequence
cgttatcaatgcctagtcgtatcta

SEQ ID NO: 25484 - DNA, 25 bp, Probe sequence
taaggagagagaatcaagatgtgta

SEQ ID NO: 25485 - DNA, 25 bp, Probe sequence
tataaggagagagaatcaagatgtg

SEQ ID NO: 25486 - DNA, 25 bp, Probe sequence
gtataaggagagagaatcaagatgt

SEQ ID NO: 25487 - DNA, 25 bp, Probe sequence
agtataaggagagagaatcaagatg

SEQ ID NO: 25488 - DNA, 25 bp, Probe sequence
gctagaactaatgtgtaggctgata

SEQ ID NO: 25489 - DNA, 25 bp, Probe sequence
actaatgtgtaggctgatattgaac

SEQ ID NO: 25490 - DNA, 25 bp, Probe sequence
gaactaatgtgtaggctgatattga

SEQ ID NO: 25491 - DNA, 25 bp, Probe sequence
agaactaatgtgtaggctgatattg

SEQ ID NO: 25492 - DNA, 25 bp, Probe sequence
atgtgtaggctgatattgaacaagt

SEQ ID NO: 25493 - DNA, 25 bp, Probe sequence
tgtgtaggctgatattgaacaagtt

SEQ ID NO: 25494 - DNA, 25 bp, Probe sequence
aatgtgtaggctgatattgaacaag

SEQ ID NO: 25495 - DNA, 25 bp, Probe sequence
aactaatgtgtaggctgatattgaa

SEQ ID NO: 25496 - DNA, 25 bp, Probe sequence
ctaatgtgtaggctgatattgaaca

SEQ ID NO: 25497 - DNA, 25 bp, Probe sequence
ccacattatcggtaactcctattcc

SEQ ID NO: 25498 - DNA, 25 bp, Probe sequence
aatatggatactcggacaatcaacc

SEQ ID NO: 25499 - DNA, 25 bp, Probe sequence
gcgaactacagaatataatactcac

SEQ ID NO: 25500 - DNA, 25 bp, Probe sequence
tgatacttctcgtcagctaactaga

SEQ ID NO: 25501 - DNA, 25 bp, Probe sequence
atgatacttctcgtcagctaactag

SEQ ID NO: 25502 - DNA, 25 bp, Probe sequence
attatcggtaactcctattcccaga

SEQ ID NO: 25503 - DNA, 25 bp, Probe sequence
cattatcggtaactcctattcccag

SEQ ID NO: 25504 - DNA, 25 bp, Probe sequence
agcgaactacagaatataatactca

SEQ ID NO: 25505 - DNA, 25 bp, Probe sequence
cacattatcggtaactcctattccc

SEQ ID NO: 25506 - DNA, 25 bp, Probe sequence
attatatcaacatcgtggaattggc

SEQ ID NO: 25507 - DNA, 25 bp, Probe sequence
aatctccgtatatgttctacacacc

SEQ ID NO: 25508 - DNA, 25 bp, Probe sequence
aatgtaccactcaataaccaacctg

SEQ ID NO: 25509 - DNA, 25 bp, Probe sequence
cgaatctccgtatatgttctacaca

SEQ ID NO: 25510 - DNA, 25 bp, Probe sequence
atctccgtatatgttctacacacca

SEQ ID NO: 25511 - DNA, 25 bp, Probe sequence
gaatctccgtatatgttctacacac

SEQ ID NO: 25512 - DNA, 25 bp, Probe sequence
cgtatatgttctacacaccaggaga

SEQ ID NO: 25513 - DNA, 25 bp, Probe sequence
tctccgtatatgttctacacaccag

SEQ ID NO: 25514 - DNA, 25 bp, Probe sequence
aattatatcaacatcgtggaattgg

SEQ ID NO: 25515 - DNA, 25 bp, Probe sequence
atgaagttaatatgattaaggacgc

SEQ ID NO: 25516 - DNA, 25 bp, Probe sequence
agttaatatgattaaggacgcgcta

SEQ ID NO: 25517 - DNA, 25 bp, Probe sequence
gaagttaatatgattaaggacgcgc

SEQ ID NO: 25518 - DNA, 25 bp, Probe sequence
aagttaatatgattaaggacgcgct

SEQ ID NO: 25519 - DNA, 25 bp, Probe sequence
tgaagttaatatgattaaggacgcg

SEQ ID NO: 25520 - DNA, 25 bp, Probe sequence
gttaatatgattaaggacgcgctat

SEQ ID NO: 25521 - DNA, 25 bp, Probe sequence
taatatgattaaggacgcgctatca

SEQ ID NO: 25522 - DNA, 25 bp, Probe sequence
ttaatatgattaaggacgcgctatc

SEQ ID NO: 25523 - DNA, 25 bp, Probe sequence
aatatgattaaggacgcgctatcaa

SEQ ID NO: 25524 - DNA, 25 bp, Probe sequence
gcctgagaagcatatcactattaga

SEQ ID NO: 25525 - DNA, 25 bp, Probe sequence
agcctgagaagcatatcactattag

SEQ ID NO: 25526 - DNA, 25 bp, Probe sequence
aagcctgagaagcatatcactatta

SEQ ID NO: 25527 - DNA, 25 bp, Probe sequence
taagcctgagaagcatatcactatt

SEQ ID NO: 25528 - DNA, 25 bp, Probe sequence
ttaagcctgagaagcatatcactat

SEQ ID NO: 25529 - DNA, 25 bp, Probe sequence
ggacgcacgatggattatgattatc

SEQ ID NO: 25530 - DNA, 25 bp, Probe sequence
atgctgacaatcactatacgatgta

SEQ ID NO: 25531 - DNA, 25 bp, Probe sequence
gatgctgacaatcactatacgatgt

SEQ ID NO: 25532 - DNA, 25 bp, Probe sequence
tggacgcacgatggattatgattat

SEQ ID NO: 25533 - DNA, 25 bp, Probe sequence
gtcaagttatctcagtaggtggaag

SEQ ID NO: 25534 - DNA, 25 bp, Probe sequence
caagttatctcagtaggtggaagtg

SEQ ID NO: 25535 - DNA, 25 bp, Probe sequence
tcaagttatctcagtaggtggaagt

SEQ ID NO: 25536 - DNA, 25 bp, Probe sequence
tggtgaatcattatggagtattgct

SEQ ID NO: 25537 - DNA, 25 bp, Probe sequence
acaatctggtgaatcattatggagt

SEQ ID NO: 25538 - DNA, 25 bp, Probe sequence
ctggtgaatcattatggagtattgc

SEQ ID NO: 25539 - DNA, 25 bp, Probe sequence
acatattggtcagacgctaagtatt

SEQ ID NO: 25540 - DNA, 25 bp, Probe sequence
catattggtcagacgctaagtattg

SEQ ID NO: 25541 - DNA, 25 bp, Probe sequence
atattggtcagacgctaagtattgg

SEQ ID NO: 25542 - DNA, 25 bp, Probe sequence
agttgataatatgataaagtcgtca

SEQ ID NO: 25543 - DNA, 25 bp, Probe sequence
aagttgataatatgataaagtcgtc

SEQ ID NO: 25544 - DNA, 25 bp, Probe sequence
tcaaaagtgtaaaacttaccattga

SEQ ID NO: 25545 - DNA, 25 bp, Probe sequence
agaagaatttcaaaagtgtaaaact

SEQ ID NO: 25546 - DNA, 25 bp, Probe sequence
gttgataatatgataaagtcgtcaa

SEQ ID NO: 25547 - DNA, 25 bp, Probe sequence
caaaagtgtaaaacttaccattgaa

SEQ ID NO: 25548 - DNA, 25 bp, Probe sequence
ttcaaaagtgtaaaacttaccattg

SEQ ID NO: 25549 - DNA, 25 bp, Probe sequence
aagaagaatttcaaaagtgtaaaac

SEQ ID NO: 25550 - DNA, 25 bp, Probe sequence
gtgtaaaacttaccattgaaataac

SEQ ID NO: 25551 - DNA, 25 bp, Probe sequence
ttaccattaatagtgacggcagtac

SEQ ID NO: 25552 - DNA, 25 bp, Probe sequence
aattaccattaatagtgacggcagt

SEQ ID NO: 25553 - DNA, 25 bp, Probe sequence
attaccattaatagtgacggcagta

SEQ ID NO: 25554 - DNA, 25 bp, Probe sequence
gggtatctttgtaggctttatcgtt

SEQ ID NO: 25555 - DNA, 25 bp, Probe sequence
ttgggtatctttgtaggctttatcg

SEQ ID NO: 25556 - DNA, 25 bp, Probe sequence
ggtatctttgtaggctttatcgttt

SEQ ID NO: 25557 - DNA, 25 bp, Probe sequence
attgggtatctttgtaggctttatc

SEQ ID NO: 25558 - DNA, 25 bp, Probe sequence
tgggtatctttgtaggctttatcgt

SEQ ID NO: 25559 - DNA, 25 bp, Probe sequence
tttattgggtatctttgtaggcttt

SEQ ID NO: 25560 - DNA, 25 bp, Probe sequence
ttctgtttggaataactgcttgttc

SEQ ID NO: 25561 - DNA, 25 bp, Probe sequence
gtttggaataactgcttgttcatca

SEQ ID NO: 25562 - DNA, 25 bp, Probe sequence
tgtttggaataactgcttgttcatc

SEQ ID NO: 25563 - DNA, 25 bp, Probe sequence
ctgtttggaataactgcttgttcat

SEQ ID NO: 25564 - DNA, 25 bp, Probe sequence
tttggaataactgcttgttcatcaa

SEQ ID NO: 25565 - DNA, 25 bp, Probe sequence
tctgtttggaataactgcttgttca

SEQ ID NO: 25566 - DNA, 25 bp, Probe sequence
ggcattagcatgttgattctacttt

SEQ ID NO: 25567 - DNA, 25 bp, Probe sequence
ttgttcatcaagcattcactttatt

SEQ ID NO: 25568 - DNA, 25 bp, Probe sequence
gggcattagcatgttgattctactt

SEQ ID NO: 25569 - DNA, 25 bp, Probe sequence
attcacatagtaacaacaaccaagc

SEQ ID NO: 25570 - DNA, 25 bp, Probe sequence
tagtaacaacaaccaagcgtataac

SEQ ID NO: 25571 - DNA, 25 bp, Probe sequence
gtaacaacaaccaagcgtataacag

SEQ ID NO: 25572 - DNA, 25 bp, Probe sequence
catagtaacaacaaccaagcgtata

SEQ ID NO: 25573 - DNA, 25 bp, Probe sequence
acatagtaacaacaaccaagcgtat

SEQ ID NO: 25574 - DNA, 25 bp, Probe sequence
agtaacaacaaccaagcgtataaca

SEQ ID NO: 25575 - DNA, 25 bp, Probe sequence
caggagataacaatgactacacagc

SEQ ID NO: 25576 - DNA, 25 bp, Probe sequence
gcaggagataacaatgactacacag

SEQ ID NO: 25577 - DNA, 25 bp, Probe sequence
gagataacaatgactacacagcgag

SEQ ID NO: 25578 - DNA, 25 bp, Probe sequence
atatctgaatacaccacttgctgaa

SEQ ID NO: 25579 - DNA, 25 bp, Probe sequence
tatatctgaatacaccacttgctga

SEQ ID NO: 25580 - DNA, 25 bp, Probe sequence
aatacaccacttgctgaagatagaa

SEQ ID NO: 25581 - DNA, 25 bp, Probe sequence
gaatacaccacttgctgaagataga

SEQ ID NO: 25582 - DNA, 25 bp, Probe sequence
tgaatacaccacttgctgaagatag

SEQ ID NO: 25583 - DNA, 25 bp, Probe sequence
ctgaatacaccacttgctgaagata

SEQ ID NO: 25584 - DNA, 25 bp, Probe sequence
tatctgaatacaccacttgctgaag

SEQ ID NO: 25585 - DNA, 25 bp, Probe sequence
tctgaatacaccacttgctgaagat

SEQ ID NO: 25586 - DNA, 25 bp, Probe sequence
atctgaatacaccacttgctgaaga

SEQ ID NO: 25587 - DNA, 25 bp, Probe sequence
atcaatccaactgctatctctactt

SEQ ID NO: 25588 - DNA, 25 bp, Probe sequence
tacttcaagcacaacagaccattag

SEQ ID NO: 25589 - DNA, 25 bp, Probe sequence
caagcacaacagaccattagagatt

SEQ ID NO: 25590 - DNA, 25 bp, Probe sequence
tatcaatccaactgctatctctact

SEQ ID NO: 25591 - DNA, 25 bp, Probe sequence
gtacctacaagagacacgatgaatt

SEQ ID NO: 25592 - DNA, 25 bp, Probe sequence
cttcaagcacaacagaccattagag

SEQ ID NO: 25593 - DNA, 25 bp, Probe sequence
agtacctacaagagacacgatgaat

SEQ ID NO: 25594 - DNA, 25 bp, Probe sequence
tcaagcacaacagaccattagagat

SEQ ID NO: 25595 - DNA, 25 bp, Probe sequence
aagtacctacaagagacacgatgaa

SEQ ID NO: 25596 - DNA, 25 bp, Probe sequence
aagtttcccatttctgttattgacg

SEQ ID NO: 25597 - DNA, 25 bp, Probe sequence
ctatcaaagtcactaccaacaaagg

SEQ ID NO: 25598 - DNA, 25 bp, Probe sequence
tgatatgggaatgggatgtgactat

SEQ ID NO: 25599 - DNA, 25 bp, Probe sequence
aaataaggtaagtgctctttccaac

SEQ ID NO: 25600 - DNA, 25 bp, Probe sequence
caaataaggtaagtgctctttccaa

SEQ ID NO: 25601 - DNA, 25 bp, Probe sequence
aatttcacaaagtttcccatttctg

SEQ ID NO: 25602 - DNA, 25 bp, Probe sequence
ataaagcctgttatcatagaatcgc

SEQ ID NO: 25603 - DNA, 25 bp, Probe sequence
cgatgacaaatcaagttacaacgat

SEQ ID NO: 25604 - DNA, 25 bp, Probe sequence
gtgatatgggaatgggatgtgacta

SEQ ID NO: 25605 - DNA, 25 bp, Probe sequence
ttgaatggtggtgagaattttatgg

SEQ ID NO: 25606 - DNA, 25 bp, Probe sequence
gtggtgagaattttatggcggataa

SEQ ID NO: 25607 - DNA, 25 bp, Probe sequence
tgaatggtggtgagaattttatggc

SEQ ID NO: 25608 - DNA, 25 bp, Probe sequence
cgtagtaacccaataaacaaaagtt

SEQ ID NO: 25609 - DNA, 25 bp, Probe sequence
gaatggtggtgagaattttatggcg

SEQ ID NO: 25610 - DNA, 25 bp, Probe sequence
ggtggtgagaattttatggcggata

SEQ ID NO: 25611 - DNA, 25 bp, Probe sequence
tggtgagaattttatggcggataaa

SEQ ID NO: 25612 - DNA, 25 bp, Probe sequence
aatggtggtgagaattttatggcgg

SEQ ID NO: 25613 - DNA, 25 bp, Probe sequence
aataaacaaaagttttgaaaagccg

SEQ ID NO: 25614 - DNA, 25 bp, Probe sequence
attattacatcgcacgcattaagac

SEQ ID NO: 25615 - DNA, 25 bp, Probe sequence
atataccaattattacatcgcacgc

SEQ ID NO: 25616 - DNA, 25 bp, Probe sequence
aattattacatcgcacgcattaaga

SEQ ID NO: 25617 - DNA, 25 bp, Probe sequence
caattattacatcgcacgcattaag

SEQ ID NO: 25618 - DNA, 25 bp, Probe sequence
ccaattattacatcgcacgcattaa

SEQ ID NO: 25619 - DNA, 25 bp, Probe sequence
tataccaattattacatcgcacgca

SEQ ID NO: 25620 - DNA, 25 bp, Probe sequence
ttattacatcgcacgcattaagaca

SEQ ID NO: 25621 - DNA, 25 bp, Probe sequence
ataccaattattacatcgcacgcat

SEQ ID NO: 25622 - DNA, 25 bp, Probe sequence
agcctgtagagtcaataatatacca

SEQ ID NO: 25623 - DNA, 25 bp, Probe sequence
gcagtctaaccgtagtctaatcaat

SEQ ID NO: 25624 - DNA, 25 bp, Probe sequence
gaagcagtctaaccgtagtctaatc

SEQ ID NO: 25625 - DNA, 25 bp, Probe sequence
agcagtctaaccgtagtctaatcaa

SEQ ID NO: 25626 - DNA, 25 bp, Probe sequence
aagcagtctaaccgtagtctaatca

SEQ ID NO: 25627 - DNA, 25 bp, Probe sequence
ttattaagtgagtatgccaaccgtc

SEQ ID NO: 25628 - DNA, 25 bp, Probe sequence
gttacattgaagcacttgaagaagg

SEQ ID NO: 25629 - DNA, 25 bp, Probe sequence
agtctaaccgtagtctaatcaatca

SEQ ID NO: 25630 - DNA, 25 bp, Probe sequence
ttacattgaagcacttgaagaaggt

SEQ ID NO: 25631 - DNA, 25 bp, Probe sequence
cagtctaaccgtagtctaatcaatc

SEQ ID NO: 25632 - DNA, 25 bp, Probe sequence
attgttgatgctcttcttgttaggt

SEQ ID NO: 25633 - DNA, 25 bp, Probe sequence
aattgttgatgctcttcttgttagg

SEQ ID NO: 25634 - DNA, 25 bp, Probe sequence
ttgttgatgctcttcttgttaggtc

SEQ ID NO: 25635 - DNA, 25 bp, Probe sequence
ttgatgctcttcttgttaggtcata

SEQ ID NO: 25636 - DNA, 25 bp, Probe sequence
tgatgctcttcttgttaggtcatat

SEQ ID NO: 25637 - DNA, 25 bp, Probe sequence
gatgctcttcttgttaggtcatatt

SEQ ID NO: 25638 - DNA, 25 bp, Probe sequence
gttgatgctcttcttgttaggtcat

SEQ ID NO: 25639 - DNA, 25 bp, Probe sequence
taattgttgatgctcttcttgttag

SEQ ID NO: 25640 - DNA, 25 bp, Probe sequence
tgttgatgctcttcttgttaggtca

SEQ ID NO: 25641 - DNA, 25 bp, Probe sequence
ttattccacaatcattacttgcctt

SEQ ID NO: 25642 - DNA, 25 bp, Probe sequence
tatagttatgcctattggattacgc

SEQ ID NO: 25643 - DNA, 25 bp, Probe sequence
cctattggattacgcattgaaagaa

SEQ ID NO: 25644 - DNA, 25 bp, Probe sequence
ttggaccatatattcaggtaagcaa

SEQ ID NO: 25645 - DNA, 25 bp, Probe sequence
tggaccatatattcaggtaagcaat

SEQ ID NO: 25646 - DNA, 25 bp, Probe sequence
cagtagtcgttggattctttattgt

SEQ ID NO: 25647 - DNA, 25 bp, Probe sequence
agtcgttggattctttattgtcttt

SEQ ID NO: 25648 - DNA, 25 bp, Probe sequence
gtagtcgttggattctttattgtct

SEQ ID NO: 25649 - DNA, 25 bp, Probe sequence
agtagtcgttggattctttattgtc

SEQ ID NO: 25650 - DNA, 25 bp, Probe sequence
gttatgcgacactaaggaatcatta

SEQ ID NO: 25651 - DNA, 25 bp, Probe sequence
cgttatgcgacactaaggaatcatt

SEQ ID NO: 25652 - DNA, 25 bp, Probe sequence
ttgctgaacaaggttatgaattagt

SEQ ID NO: 25653 - DNA, 25 bp, Probe sequence
ttatgcgacactaaggaatcattaa

SEQ ID NO: 25654 - DNA, 25 bp, Probe sequence
tgctgaacaaggttatgaattagta

SEQ ID NO: 25655 - DNA, 25 bp, Probe sequence
tatgcgacactaaggaatcattaat

SEQ ID NO: 25656 - DNA, 25 bp, Probe sequence
gctgaacaaggttatgaattagtat

SEQ ID NO: 25657 - DNA, 25 bp, Probe sequence
aatgtatagttgggctcaaataggt

SEQ ID NO: 25658 - DNA, 25 bp, Probe sequence
ccgttatgcgacactaaggaatcat

SEQ ID NO: 25659 - DNA, 25 bp, Probe sequence
ttgacattcagttagtctacaagct

SEQ ID NO: 25660 - DNA, 25 bp, Probe sequence
tttgacattcagttagtctacaagc

SEQ ID NO: 25661 - DNA, 25 bp, Probe sequence
gcttgatttatcgagacgctgattt

SEQ ID NO: 25662 - DNA, 25 bp, Probe sequence
tgacattcagttagtctacaagctt

SEQ ID NO: 25663 - DNA, 25 bp, Probe sequence
tcagttagtctacaagcttatcaac

SEQ ID NO: 25664 - DNA, 25 bp, Probe sequence
ttcagttagtctacaagcttatcaa

SEQ ID NO: 25665 - DNA, 25 bp, Probe sequence
acattcagttagtctacaagcttat

SEQ ID NO: 25666 - DNA, 25 bp, Probe sequence
gacattcagttagtctacaagctta

SEQ ID NO: 25667 - DNA, 25 bp, Probe sequence
attcagttagtctacaagcttatca

SEQ ID NO: 25668 - DNA, 25 bp, Probe sequence
agcaattccaacaacttagtcctaa

SEQ ID NO: 25669 - DNA, 25 bp, Probe sequence
gagcaattccaacaacttagtccta

SEQ ID NO: 25670 - DNA, 25 bp, Probe sequence
gaagagcaattccaacaacttagtc

SEQ ID NO: 25671 - DNA, 25 bp, Probe sequence
gcaatgattaagatgagtccagagg

SEQ ID NO: 25672 - DNA, 25 bp, Probe sequence
ggcaatgattaagatgagtccagag

SEQ ID NO: 25673 - DNA, 25 bp, Probe sequence
aagagcaattccaacaacttagtcc

SEQ ID NO: 25674 - DNA, 25 bp, Probe sequence
cgaagagcaattccaacaacttagt

SEQ ID NO: 25675 - DNA, 25 bp, Probe sequence
agagcaattccaacaacttagtcct

SEQ ID NO: 25676 - DNA, 25 bp, Probe sequence
caatgattaagatgagtccagagga

SEQ ID NO: 25677 - DNA, 25 bp, Probe sequence
gcttgtcctgttgttgattctatta

SEQ ID NO: 25678 - DNA, 25 bp, Probe sequence
atgcttgtcctgttgttgattctat

SEQ ID NO: 25679 - DNA, 25 bp, Probe sequence
tgcttgtcctgttgttgattctatt

SEQ ID NO: 25680 - DNA, 25 bp, Probe sequence
tatatgttgatgatggaccagatgc

SEQ ID NO: 25681 - DNA, 25 bp, Probe sequence
gatgcttgtcctgttgttgattcta

SEQ ID NO: 25682 - DNA, 25 bp, Probe sequence
ttatatgttgatgatggaccagatg

SEQ ID NO: 25683 - DNA, 25 bp, Probe sequence
cattatatgttgatgatggaccaga

SEQ ID NO: 25684 - DNA, 25 bp, Probe sequence
gagatgcttgtcctgttgttgattc

SEQ ID NO: 25685 - DNA, 25 bp, Probe sequence
tattattgatggagatgcttgtcct

SEQ ID NO: 25686 - DNA, 25 bp, Probe sequence
atcattcaatcacaagagtcaccat

SEQ ID NO: 25687 - DNA, 25 bp, Probe sequence
tcattcaatcacaagagtcaccatt

SEQ ID NO: 25688 - DNA, 25 bp, Probe sequence
aatcattcaatcacaagagtcacca

SEQ ID NO: 25689 - DNA, 25 bp, Probe sequence
atcggtatgttcttaatgattgctg

SEQ ID NO: 25690 - DNA, 25 bp, Probe sequence
taacagattacgataaccaagttgc

SEQ ID NO: 25691 - DNA, 25 bp, Probe sequence
tcggtatgttcttaatgattgctgc

SEQ ID NO: 25692 - DNA, 25 bp, Probe sequence
tatcggtatgttcttaatgattgct

SEQ ID NO: 25693 - DNA, 25 bp, Probe sequence
ctatcggtatgttcttaatgattgc

SEQ ID NO: 25694 - DNA, 25 bp, Probe sequence
aacagattacgataaccaagttgcg

SEQ ID NO: 25695 - DNA, 25 bp, Probe sequence
gaacatgatcctgcctatattgaga

SEQ ID NO: 25696 - DNA, 25 bp, Probe sequence
agaacatgatcctgcctatattgag

SEQ ID NO: 25697 - DNA, 25 bp, Probe sequence
gagaacatgatcctgcctatattga

SEQ ID NO: 25698 - DNA, 25 bp, Probe sequence
agagaacatgatcctgcctatattg

SEQ ID NO: 25699 - DNA, 25 bp, Probe sequence
aacatgatcctgcctatattgagaa

SEQ ID NO: 25700 - DNA, 25 bp, Probe sequence
ctagagaacatgatcctgcctatat

SEQ ID NO: 25701 - DNA, 25 bp, Probe sequence
gctagagaacatgatcctgcctata

SEQ ID NO: 25702 - DNA, 25 bp, Probe sequence
tagagaacatgatcctgcctatatt

SEQ ID NO: 25703 - DNA, 25 bp, Probe sequence
gagtgatgttaaagaatatgtcggc

SEQ ID NO: 25704 - DNA, 25 bp, Probe sequence
tgtgataaggagtttaggatggttt

SEQ ID NO: 25705 - DNA, 25 bp, Probe sequence
ttgtgataaggagtttaggatggtt

SEQ ID NO: 25706 - DNA, 25 bp, Probe sequence
attgtgataaggagtttaggatggt

SEQ ID NO: 25707 - DNA, 25 bp, Probe sequence
aattgtgataaggagtttaggatgg

SEQ ID NO: 25708 - DNA, 25 bp, Probe sequence
gtgataaggagtttaggatggttta

SEQ ID NO: 25709 - DNA, 25 bp, Probe sequence
aaattgtgataaggagtttaggatg

SEQ ID NO: 25710 - DNA, 25 bp, Probe sequence
tgataaggagtttaggatggtttat

SEQ ID NO: 25711 - DNA, 25 bp, Probe sequence
gataaggagtttaggatggtttatt

SEQ ID NO: 25712 - DNA, 25 bp, Probe sequence
aaaattgtgataaggagtttaggat

SEQ ID NO: 25713 - DNA, 25 bp, Probe sequence
atctagcaataatggcggacttaat

SEQ ID NO: 25714 - DNA, 25 bp, Probe sequence
tctagcaataatggcggacttaata

SEQ ID NO: 25715 - DNA, 25 bp, Probe sequence
ctagcaataatggcggacttaatat

SEQ ID NO: 25716 - DNA, 25 bp, Probe sequence
catctagcaataatggcggacttaa

SEQ ID NO: 25717 - DNA, 25 bp, Probe sequence
ttaacagcatctagcaataatggcg

SEQ ID NO: 25718 - DNA, 25 bp, Probe sequence
tagcaataatggcggacttaatatt

SEQ ID NO: 25719 - DNA, 25 bp, Probe sequence
tttcaattcataaagggagacgaac

SEQ ID NO: 25720 - DNA, 25 bp, Probe sequence
aattcataaagggagacgaacgaaa

SEQ ID NO: 25721 - DNA, 25 bp, Probe sequence
tttaacagcatctagcaataatggc

SEQ ID NO: 25722 - DNA, 25 bp, Probe sequence
gttatgattggcttattcgtaggtg

SEQ ID NO: 25723 - DNA, 25 bp, Probe sequence
tgttatgattggcttattcgtaggt

SEQ ID NO: 25724 - DNA, 25 bp, Probe sequence
ctgttatgattggcttattcgtagg

SEQ ID NO: 25725 - DNA, 25 bp, Probe sequence
ggcttattcgtaggtgctatctata

SEQ ID NO: 25726 - DNA, 25 bp, Probe sequence
tggcttattcgtaggtgctatctat

SEQ ID NO: 25727 - DNA, 25 bp, Probe sequence
actgttatgattggcttattcgtag

SEQ ID NO: 25728 - DNA, 25 bp, Probe sequence
ttggcttattcgtaggtgctatcta

SEQ ID NO: 25729 - DNA, 25 bp, Probe sequence
ttatgattggcttattcgtaggtgc

SEQ ID NO: 25730 - DNA, 25 bp, Probe sequence
caactgttatgattggcttattcgt

SEQ ID NO: 25731 - DNA, 25 bp, Probe sequence
tatgacttagcagtaccagcatatt

SEQ ID NO: 25732 - DNA, 25 bp, Probe sequence
acaaattaaagtgatgacgaaaggt

SEQ ID NO: 25733 - DNA, 25 bp, Probe sequence
gctttagtattggatagtttggaca

SEQ ID NO: 25734 - DNA, 25 bp, Probe sequence
taattacggcacatatgacttagca

SEQ ID NO: 25735 - DNA, 25 bp, Probe sequence
ataattacggcacatatgacttagc

SEQ ID NO: 25736 - DNA, 25 bp, Probe sequence
agtattggatagtttggacatttca

SEQ ID NO: 25737 - DNA, 25 bp, Probe sequence
gcagtaccagcatatttaccgataa

SEQ ID NO: 25738 - DNA, 25 bp, Probe sequence
aattacggcacatatgacttagcag

SEQ ID NO: 25739 - DNA, 25 bp, Probe sequence
cttagcagtaccagcatatttaccg

SEQ ID NO: 25740 - DNA, 25 bp, Probe sequence
aagacaagttaatcgctactactct

SEQ ID NO: 25741 - DNA, 25 bp, Probe sequence
agacaagttaatcgctactactcta

SEQ ID NO: 25742 - DNA, 25 bp, Probe sequence
acgaatggaacaagtagacttaatt

SEQ ID NO: 25743 - DNA, 25 bp, Probe sequence
aacgaatggaacaagtagacttaat

SEQ ID NO: 25744 - DNA, 25 bp, Probe sequence
gacaagttaatcgctactactctaa

SEQ ID NO: 25745 - DNA, 25 bp, Probe sequence
taactgaattagcactcgatactgg

SEQ ID NO: 25746 - DNA, 25 bp, Probe sequence
gtaactgaattagcactcgatactg

SEQ ID NO: 25747 - DNA, 25 bp, Probe sequence
cgtaactgaattagcactcgatact

SEQ ID NO: 25748 - DNA, 25 bp, Probe sequence
ctgaattagcactcgatactggtac

SEQ ID NO: 25749 - DNA, 25 bp, Probe sequence
cagtctgagatgattgtagtgttcg

SEQ ID NO: 25750 - DNA, 25 bp, Probe sequence
gtctgagatgattgtagtgttcgtg

SEQ ID NO: 25751 - DNA, 25 bp, Probe sequence
agtctgagatgattgtagtgttcgt

SEQ ID NO: 25752 - DNA, 25 bp, Probe sequence
gatgattgtagtgttcgtgcttgat

SEQ ID NO: 25753 - DNA, 25 bp, Probe sequence
atgattgtagtgttcgtgcttgatg

SEQ ID NO: 25754 - DNA, 25 bp, Probe sequence
acagtctgagatgattgtagtgttc

SEQ ID NO: 25755 - DNA, 25 bp, Probe sequence
gattgtagtgttcgtgcttgatgaa

SEQ ID NO: 25756 - DNA, 25 bp, Probe sequence
gagatgattgtagtgttcgtgcttg

SEQ ID NO: 25757 - DNA, 25 bp, Probe sequence
tcacacagtctgagatgattgtagt

SEQ ID NO: 25758 - DNA, 25 bp, Probe sequence
acgcttagatatgagagagattcct

SEQ ID NO: 25759 - DNA, 25 bp, Probe sequence
tacgcttagatatgagagagattcc

SEQ ID NO: 25760 - DNA, 25 bp, Probe sequence
cgcttagatatgagagagattccta

SEQ ID NO: 25761 - DNA, 25 bp, Probe sequence
tattggatggaattaggacaaggac

SEQ ID NO: 25762 - DNA, 25 bp, Probe sequence
tagatgctgaattaactgaactacg

SEQ ID NO: 25763 - DNA, 25 bp, Probe sequence
atattggatggaattaggacaagga

SEQ ID NO: 25764 - DNA, 25 bp, Probe sequence
aaggacatcttgatgaagcgattaa

SEQ ID NO: 25765 - DNA, 25 bp, Probe sequence
tgagagagattcctaagtcttcaat

SEQ ID NO: 25766 - DNA, 25 bp, Probe sequence
atgagagagattcctaagtcttcaa

SEQ ID NO: 25767 - DNA, 25 bp, Probe sequence
ttctcaccgttggcttaatagatta

SEQ ID NO: 25768 - DNA, 25 bp, Probe sequence
cttctcaccgttggcttaatagatt

SEQ ID NO: 25769 - DNA, 25 bp, Probe sequence
atactaacattgacttctcaccgtt

SEQ ID NO: 25770 - DNA, 25 bp, Probe sequence
aatactaacattgacttctcaccgt

SEQ ID NO: 25771 - DNA, 25 bp, Probe sequence
tactaacattgacttctcaccgttg

SEQ ID NO: 25772 - DNA, 25 bp, Probe sequence
tctcaccgttggcttaatagattaa

SEQ ID NO: 25773 - DNA, 25 bp, Probe sequence
acttctcaccgttggcttaatagat

SEQ ID NO: 25774 - DNA, 25 bp, Probe sequence
gacttctcaccgttggcttaataga

SEQ ID NO: 25775 - DNA, 25 bp, Probe sequence
ctcaccgttggcttaatagattaat

SEQ ID NO: 25776 - DNA, 25 bp, Probe sequence
cagccaatacagaagaacaatacag

SEQ ID NO: 25777 - DNA, 25 bp, Probe sequence
gccaatacagaagaacaatacagtg

SEQ ID NO: 25778 - DNA, 25 bp, Probe sequence
agccaatacagaagaacaatacagt

SEQ ID NO: 25779 - DNA, 25 bp, Probe sequence
cacagccaatacagaagaacaatac

SEQ ID NO: 25780 - DNA, 25 bp, Probe sequence
acagccaatacagaagaacaataca

SEQ ID NO: 25781 - DNA, 25 bp, Probe sequence
ccacagccaatacagaagaacaata

SEQ ID NO: 25782 - DNA, 25 bp, Probe sequence
tgatattcctatgatgccagatgaa

SEQ ID NO: 25783 - DNA, 25 bp, Probe sequence
tccttcaattcaagatacgatgaca

SEQ ID NO: 25784 - DNA, 25 bp, Probe sequence
ccttcaattcaagatacgatgacaa

SEQ ID NO: 25785 - DNA, 25 bp, Probe sequence
caactgctgaaatcattcttactgt

SEQ ID NO: 25786 - DNA, 25 bp, Probe sequence
gcagatgaccaagacttaacattta

SEQ ID NO: 25787 - DNA, 25 bp, Probe sequence
ttgcagatgaccaagacttaacatt

SEQ ID NO: 25788 - DNA, 25 bp, Probe sequence
tgctactttcggtactcaatcatat

SEQ ID NO: 25789 - DNA, 25 bp, Probe sequence
aactgctgaaatcattcttactgta

SEQ ID NO: 25790 - DNA, 25 bp, Probe sequence
atgctactttcggtactcaatcata

SEQ ID NO: 25791 - DNA, 25 bp, Probe sequence
tgctgaaatcattcttactgtaact

SEQ ID NO: 25792 - DNA, 25 bp, Probe sequence
actgctgaaatcattcttactgtaa

SEQ ID NO: 25793 - DNA, 25 bp, Probe sequence
gcaactgctgaaatcattcttactg

SEQ ID NO: 25794 - DNA, 25 bp, Probe sequence
aacctcttattattcagcaccatca

SEQ ID NO: 25795 - DNA, 25 bp, Probe sequence
ttccaatgatgccagataaggtatt

SEQ ID NO: 25796 - DNA, 25 bp, Probe sequence
attccaatgatgccagataaggtat

SEQ ID NO: 25797 - DNA, 25 bp, Probe sequence
tgtaacctcttattattcagcacca

SEQ ID NO: 25798 - DNA, 25 bp, Probe sequence
taccagaagaacaatatcaaggacc

SEQ ID NO: 25799 - DNA, 25 bp, Probe sequence
acctcttattattcagcaccatcag

SEQ ID NO: 25800 - DNA, 25 bp, Probe sequence
atattccaatgatgccagataaggt

SEQ ID NO: 25801 - DNA, 25 bp, Probe sequence
accgaccgatgatattaagattgaa

SEQ ID NO: 25802 - DNA, 25 bp, Probe sequence
aaccgaccgatgatattaagattga

SEQ ID NO: 25803 - DNA, 25 bp, Probe sequence
tgaaattgaagttcgttctggatat

SEQ ID NO: 25804 - DNA, 25 bp, Probe sequence
atgaaattgaagttcgttctggata

SEQ ID NO: 25805 - DNA, 25 bp, Probe sequence
catgaaattgaagttcgttctggat

SEQ ID NO: 25806 - DNA, 25 bp, Probe sequence
tgaagttcgttctggatatttaaga

SEQ ID NO: 25807 - DNA, 25 bp, Probe sequence
gaaattgaagttcgttctggatatt

SEQ ID NO: 25808 - DNA, 25 bp, Probe sequence
agcttgaaatgttgggtgaagatat

SEQ ID NO: 25809 - DNA, 25 bp, Probe sequence
gctgaacaatataagcgattagaat

SEQ ID NO: 25810 - DNA, 25 bp, Probe sequence
ttgaagttcgttctggatatttaag

SEQ ID NO: 25811 - DNA, 25 bp, Probe sequence
agctgaacaatataagcgattagaa

SEQ ID NO: 25812 - DNA, 25 bp, Probe sequence
gcattataccagaactacaagaacg

SEQ ID NO: 25813 - DNA, 25 bp, Probe sequence
ggcattataccagaactacaagaac

SEQ ID NO: 25814 - DNA, 25 bp, Probe sequence
ggtggttctggattaggcttatata

SEQ ID NO: 25815 - DNA, 25 bp, Probe sequence
atgttggtagtcgcattgatattaa

SEQ ID NO: 25816 - DNA, 25 bp, Probe sequence
tgttggtagtcgcattgatattaat

SEQ ID NO: 25817 - DNA, 25 bp, Probe sequence
gaccttaacgacaataattacaagc

SEQ ID NO: 25818 - DNA, 25 bp, Probe sequence
tggcattataccagaactacaagaa

SEQ ID NO: 25819 - DNA, 25 bp, Probe sequence
ttggcattataccagaactacaaga

SEQ ID NO: 25820 - DNA, 25 bp, Probe sequence
ctgaaggactacgtgatggtataat

SEQ ID NO: 25821 - DNA, 25 bp, Probe sequence
ttcaagaagaattagtacaaccgat

SEQ ID NO: 25822 - DNA, 25 bp, Probe sequence
gctgagtatatcgaaggtagtgatt

SEQ ID NO: 25823 - DNA, 25 bp, Probe sequence
tgagtatatcgaaggtagtgattgg

SEQ ID NO: 25824 - DNA, 25 bp, Probe sequence
gccaataaggtgaaagatgtgttac

SEQ ID NO: 25825 - DNA, 25 bp, Probe sequence
ccaataaggtgaaagatgtgttact

SEQ ID NO: 25826 - DNA, 25 bp, Probe sequence
ctgagtatatcgaaggtagtgattg

SEQ ID NO: 25827 - DNA, 25 bp, Probe sequence
cgctgagtatatcgaaggtagtgat

SEQ ID NO: 25828 - DNA, 25 bp, Probe sequence
acgatacattatcaattaagcaagg

SEQ ID NO: 25829 - DNA, 25 bp, Probe sequence
tggcaaagtttcaagaagaattagt

SEQ ID NO: 25830 - DNA, 25 bp, Probe sequence
tgctaataccgtgaatgtccatata

SEQ ID NO: 25831 - DNA, 25 bp, Probe sequence
gctaataccgtgaatgtccatatac

SEQ ID NO: 25832 - DNA, 25 bp, Probe sequence
atgctaataccgtgaatgtccatat

SEQ ID NO: 25833 - DNA, 25 bp, Probe sequence
gatgctaataccgtgaatgtccata

SEQ ID NO: 25834 - DNA, 25 bp, Probe sequence
gaagatgctaataccgtgaatgtcc

SEQ ID NO: 25835 - DNA, 25 bp, Probe sequence
ttactgatcgtggatgatgaacaag

SEQ ID NO: 25836 - DNA, 25 bp, Probe sequence
cttactgatcgtggatgatgaacaa

SEQ ID NO: 25837 - DNA, 25 bp, Probe sequence
cgaagatgctaataccgtgaatgtc

SEQ ID NO: 25838 - DNA, 25 bp, Probe sequence
atcgtggatgatgaacaagacattg

SEQ ID NO: 25839 - DNA, 25 bp, Probe sequence
atgatgctgatgataatatcgtgct

SEQ ID NO: 25840 - DNA, 25 bp, Probe sequence
tgatgctgatgataatatcgtgctt

SEQ ID NO: 25841 - DNA, 25 bp, Probe sequence
gattcaaccatcgttcgtagttcaa

SEQ ID NO: 25842 - DNA, 25 bp, Probe sequence
tacaacaataatacaggtgtcgcaa

SEQ ID NO: 25843 - DNA, 25 bp, Probe sequence
ttagtacgaataatcagtcaggcga

SEQ ID NO: 25844 - DNA, 25 bp, Probe sequence
cgacaatacagatagtaagaagagt

SEQ ID NO: 25845 - DNA, 25 bp, Probe sequence
tagtacgaataatcagtcaggcgag

SEQ ID NO: 25846 - DNA, 25 bp, Probe sequence
attgaagtgcagattaacagtgaac

SEQ ID NO: 25847 - DNA, 25 bp, Probe sequence
cattgaagtgcagattaacagtgaa

SEQ ID NO: 25848 - DNA, 25 bp, Probe sequence
cgatgaatggaaagattggttgaag

SEQ ID NO: 25849 - DNA, 25 bp, Probe sequence
gatgaatggaaagattggttgaagc

SEQ ID NO: 25850 - DNA, 25 bp, Probe sequence
aaatatgggatgtcctgtagcaaat

SEQ ID NO: 25851 - DNA, 25 bp, Probe sequence
cttaaatatgggatgtcctgtagca

SEQ ID NO: 25852 - DNA, 25 bp, Probe sequence
acttaaatatgggatgtcctgtagc

SEQ ID NO: 25853 - DNA, 25 bp, Probe sequence
taaatatgggatgtcctgtagcaaa

SEQ ID NO: 25854 - DNA, 25 bp, Probe sequence
ttaaatatgggatgtcctgtagcaa

SEQ ID NO: 25855 - DNA, 25 bp, Probe sequence
atgaatggaaagattggttgaagca

SEQ ID NO: 25856 - DNA, 25 bp, Probe sequence
aatatgggatgtcctgtagcaaatg

SEQ ID NO: 25857 - DNA, 25 bp, Probe sequence
gaattagtaacagagaatgacaagt

SEQ ID NO: 25858 - DNA, 25 bp, Probe sequence
aaggtgaccctcaacaaagtttata

SEQ ID NO: 25859 - DNA, 25 bp, Probe sequence
aggtgaccctcaacaaagtttatat

SEQ ID NO: 25860 - DNA, 25 bp, Probe sequence
gggactttaaacaaattgacgatga

SEQ ID NO: 25861 - DNA, 25 bp, Probe sequence
tgggactttaaacaaattgacgatg

SEQ ID NO: 25862 - DNA, 25 bp, Probe sequence
ggtgaccctcaacaaagtttatata

SEQ ID NO: 25863 - DNA, 25 bp, Probe sequence
aattagtaacagagaatgacaagtt

SEQ ID NO: 25864 - DNA, 25 bp, Probe sequence
caaggtgaccctcaacaaagtttat

SEQ ID NO: 25865 - DNA, 25 bp, Probe sequence
ttgggactttaaacaaattgacgat

SEQ ID NO: 25866 - DNA, 25 bp, Probe sequence
catcgctaacaatactgattcacca

SEQ ID NO: 25867 - DNA, 25 bp, Probe sequence
gtcatcgctaacaatactgattcac

SEQ ID NO: 25868 - DNA, 25 bp, Probe sequence
agtcatcgctaacaatactgattca

SEQ ID NO: 25869 - DNA, 25 bp, Probe sequence
tagtaccagtcatcgctaacaatac

SEQ ID NO: 25870 - DNA, 25 bp, Probe sequence
ggttcaggtattgttatgttaatgc

SEQ ID NO: 25871 - DNA, 25 bp, Probe sequence
tcatcgctaacaatactgattcacc

SEQ ID NO: 25872 - DNA, 25 bp, Probe sequence
gctaacaatactgattcaccagagt

SEQ ID NO: 25873 - DNA, 25 bp, Probe sequence
atcgctaacaatactgattcaccag

SEQ ID NO: 25874 - DNA, 25 bp, Probe sequence
ctaacaatactgattcaccagagtg

SEQ ID NO: 25875 - DNA, 25 bp, Probe sequence
caacagtcattagtggtctcaaagg

SEQ ID NO: 25876 - DNA, 25 bp, Probe sequence
aacagtcattagtggtctcaaaggt

SEQ ID NO: 25877 - DNA, 25 bp, Probe sequence
tatagtagtgctgcaacagtcatta

SEQ ID NO: 25878 - DNA, 25 bp, Probe sequence
atagtagtgctgcaacagtcattag

SEQ ID NO: 25879 - DNA, 25 bp, Probe sequence
ctatagtagtgctgcaacagtcatt

SEQ ID NO: 25880 - DNA, 25 bp, Probe sequence
gcaacagtcattagtggtctcaaag

SEQ ID NO: 25881 - DNA, 25 bp, Probe sequence
acagtcattagtggtctcaaaggtc

SEQ ID NO: 25882 - DNA, 25 bp, Probe sequence
ttctttgaagcagatgaacattggg

SEQ ID NO: 25883 - DNA, 25 bp, Probe sequence
tagtagtgctgcaacagtcattagt

SEQ ID NO: 25884 - DNA, 25 bp, Probe sequence
tctaattcacaagatcaaggtaaca

SEQ ID NO: 25885 - DNA, 25 bp, Probe sequence
gcaatggttgactacgataaagaaa

SEQ ID NO: 25886 - DNA, 25 bp, Probe sequence
taaagaaatcgcaatggttgactac

SEQ ID NO: 25887 - DNA, 25 bp, Probe sequence
gtaaagaaatcgcaatggttgacta

SEQ ID NO: 25888 - DNA, 25 bp, Probe sequence
ctaattcacaagatcaaggtaacaa

SEQ ID NO: 25889 - DNA, 25 bp, Probe sequence
aaacggtgaaactgttgaaggtaaa

SEQ ID NO: 25890 - DNA, 25 bp, Probe sequence
aaacaaagtcagaagatagcaatgt

SEQ ID NO: 25891 - DNA, 25 bp, Probe sequence
ttctaattcacaagatcaaggtaac

SEQ ID NO: 25892 - DNA, 25 bp, Probe sequence
cgcaatggttgactacgataaagaa

SEQ ID NO: 25893 - DNA, 25 bp, Probe sequence
cgacagactataaacggaggtatat

SEQ ID NO: 25894 - DNA, 25 bp, Probe sequence
gacagactataaacggaggtatatc

SEQ ID NO: 25895 - DNA, 25 bp, Probe sequence
acagactataaacggaggtatatct

SEQ ID NO: 25896 - DNA, 25 bp, Probe sequence
aaagcaagtatggaatatcagtcga

SEQ ID NO: 25897 - DNA, 25 bp, Probe sequence
tcgacagactataaacggaggtata

SEQ ID NO: 25898 - DNA, 25 bp, Probe sequence
taaacggaggtatatctcatggaaa

SEQ ID NO: 25899 - DNA, 25 bp, Probe sequence
ataaacggaggtatatctcatggaa

SEQ ID NO: 25900 - DNA, 25 bp, Probe sequence
agactataaacggaggtatatctca

SEQ ID NO: 25901 - DNA, 25 bp, Probe sequence
cagactataaacggaggtatatctc

SEQ ID NO: 25902 - DNA, 25 bp, Probe sequence
ctattggtgcttattccgcttattc

SEQ ID NO: 25903 - DNA, 25 bp, Probe sequence
tattggtgcttattccgcttattca

SEQ ID NO: 25904 - DNA, 25 bp, Probe sequence
atagtatggtgagaagtgaaggcaa

SEQ ID NO: 25905 - DNA, 25 bp, Probe sequence
agatagtatggtgagaagtgaaggc

SEQ ID NO: 25906 - DNA, 25 bp, Probe sequence
attggtgcttattccgcttattcag

SEQ ID NO: 25907 - DNA, 25 bp, Probe sequence
gatagtatggtgagaagtgaaggca

SEQ ID NO: 25908 - DNA, 25 bp, Probe sequence
gctattggtgcttattccgcttatt

SEQ ID NO: 25909 - DNA, 25 bp, Probe sequence
gaacactatgcaagacttagaccta

SEQ ID NO: 25910 - DNA, 25 bp, Probe sequence
cgcttcttgtgattacatgacagta

SEQ ID NO: 25911 - DNA, 25 bp, Probe sequence
ttgctatcgtcgtacttataactgg

SEQ ID NO: 25912 - DNA, 25 bp, Probe sequence
tcgtcgtacttataactggattcaa

SEQ ID NO: 25913 - DNA, 25 bp, Probe sequence
gctatcgtcgtacttataactggat

SEQ ID NO: 25914 - DNA, 25 bp, Probe sequence
atcgtcgtacttataactggattca

SEQ ID NO: 25915 - DNA, 25 bp, Probe sequence
tgctatcgtcgtacttataactgga

SEQ ID NO: 25916 - DNA, 25 bp, Probe sequence
cgtcgtacttataactggattcaat

SEQ ID NO: 25917 - DNA, 25 bp, Probe sequence
attgctatcgtcgtacttataactg

SEQ ID NO: 25918 - DNA, 25 bp, Probe sequence
gctatcatattaacgattgttgtca

SEQ ID NO: 25919 - DNA, 25 bp, Probe sequence
tgctatcatattaacgattgttgtc

SEQ ID NO: 25920 - DNA, 25 bp, Probe sequence
agatagtatggtgagaagtgaaggt

SEQ ID NO: 25921 - DNA, 25 bp, Probe sequence
gatagtatggtgagaagtgaaggta

SEQ ID NO: 25922 - DNA, 25 bp, Probe sequence
atagtatggtgagaagtgaaggtaa

SEQ ID NO: 25923 - DNA, 25 bp, Probe sequence
aggagaggatagattaccagacgat

SEQ ID NO: 25924 - DNA, 25 bp, Probe sequence
aagacatagataaccttgtagcaca

SEQ ID NO: 25925 - DNA, 25 bp, Probe sequence
gaggagaggatagattaccagacga

SEQ ID NO: 25926 - DNA, 25 bp, Probe sequence
tgcttcttgtgattacatgacagta

SEQ ID NO: 25927 - DNA, 25 bp, Probe sequence
aactggtcacatatatcggactgat

SEQ ID NO: 25928 - DNA, 25 bp, Probe sequence
agacgatgatggaggtcacttaatc

SEQ ID NO: 25929 - DNA, 25 bp, Probe sequence
atcagacagcgtagataatcatacc

SEQ ID NO: 25930 - DNA, 25 bp, Probe sequence
atacaccaccgttatccagatattc

SEQ ID NO: 25931 - DNA, 25 bp, Probe sequence
agacagcgtagataatcataccgaa

SEQ ID NO: 25932 - DNA, 25 bp, Probe sequence
aaggtatccaagagttagttgactt

SEQ ID NO: 25933 - DNA, 25 bp, Probe sequence
tacaccaccgttatccagatattcc

SEQ ID NO: 25934 - DNA, 25 bp, Probe sequence
cagacagcgtagataatcataccga

SEQ ID NO: 25935 - DNA, 25 bp, Probe sequence
tcagacagcgtagataatcataccg

SEQ ID NO: 25936 - DNA, 25 bp, Probe sequence
gatacaccaccgttatccagatatt

SEQ ID NO: 25937 - DNA, 25 bp, Probe sequence
aggtatccaagagttagttgactta

SEQ ID NO: 25938 - DNA, 25 bp, Probe sequence
actgaaccaagaagtgatgaattat

SEQ ID NO: 25939 - DNA, 25 bp, Probe sequence
atactgaaccaagaagtgatgaatt

SEQ ID NO: 25940 - DNA, 25 bp, Probe sequence
acaattatactgaaccaagaagtga

SEQ ID NO: 25941 - DNA, 25 bp, Probe sequence
ctgaaccaagaagtgatgaattatt

SEQ ID NO: 25942 - DNA, 25 bp, Probe sequence
ttatactgaaccaagaagtgatgaa

SEQ ID NO: 25943 - DNA, 25 bp, Probe sequence
tactgaaccaagaagtgatgaatta

SEQ ID NO: 25944 - DNA, 25 bp, Probe sequence
tatactgaaccaagaagtgatgaat

SEQ ID NO: 25945 - DNA, 25 bp, Probe sequence
attatactgaaccaagaagtgatga

SEQ ID NO: 25946 - DNA, 25 bp, Probe sequence
aaatgaaagaagtggagaagtgttc

SEQ ID NO: 25947 - DNA, 25 bp, Probe sequence
tcggtttattattaactgcgttgag

SEQ ID NO: 25948 - DNA, 25 bp, Probe sequence
ttcggtttattattaactgcgttga

SEQ ID NO: 25949 - DNA, 25 bp, Probe sequence
cggtttattattaactgcgttgagc

SEQ ID NO: 25950 - DNA, 25 bp, Probe sequence
tttcggtttattattaactgcgttg

SEQ ID NO: 25951 - DNA, 25 bp, Probe sequence
catttcggtttattattaactgcgt

SEQ ID NO: 25952 - DNA, 25 bp, Probe sequence
acatttcggtttattattaactgcg

SEQ ID NO: 25953 - DNA, 25 bp, Probe sequence
tattattagtaattggcggaatgtt

SEQ ID NO: 25954 - DNA, 25 bp, Probe sequence
ttattattagtaattggcggaatgt

SEQ ID NO: 25955 - DNA, 25 bp, Probe sequence
atttcggtttattattaactgcgtt

SEQ ID NO: 25956 - DNA, 25 bp, Probe sequence
tatcctagtacaacgcatccatatc

SEQ ID NO: 25957 - DNA, 25 bp, Probe sequence
ctatcctagtacaacgcatccatat

SEQ ID NO: 25958 - DNA, 25 bp, Probe sequence
tctatcctagtacaacgcatccata

SEQ ID NO: 25959 - DNA, 25 bp, Probe sequence
cctagtacaacgcatccatatcaat

SEQ ID NO: 25960 - DNA, 25 bp, Probe sequence
tagtacaacgcatccatatcaattc

SEQ ID NO: 25961 - DNA, 25 bp, Probe sequence
ctagtacaacgcatccatatcaatt

SEQ ID NO: 25962 - DNA, 25 bp, Probe sequence
atctatcctagtacaacgcatccat

SEQ ID NO: 25963 - DNA, 25 bp, Probe sequence
aatctatcctagtacaacgcatcca

SEQ ID NO: 25964 - DNA, 25 bp, Probe sequence
atcctagtacaacgcatccatatca

SEQ ID NO: 25965 - DNA, 25 bp, Probe sequence
attacaggagcaactggaattagaa

SEQ ID NO: 25966 - DNA, 25 bp, Probe sequence
ttacaggagcaactggaattagaag

SEQ ID NO: 25967 - DNA, 25 bp, Probe sequence
cattacaggagcaactggaattaga

SEQ ID NO: 25968 - DNA, 25 bp, Probe sequence
tcattacaggagcaactggaattag

SEQ ID NO: 25969 - DNA, 25 bp, Probe sequence
gtcattacaggagcaactggaatta

SEQ ID NO: 25970 - DNA, 25 bp, Probe sequence
tacaggagcaactggaattagaaga

SEQ ID NO: 25971 - DNA, 25 bp, Probe sequence
aggagcaactggaattagaagactg

SEQ ID NO: 25972 - DNA, 25 bp, Probe sequence
tacagacgaacaagttaaagcaatg

SEQ ID NO: 25973 - DNA, 25 bp, Probe sequence
atacagacgaacaagttaaagcaat

SEQ ID NO: 25974 - DNA, 25 bp, Probe sequence
tcaactagcattcgcaataggtaat

SEQ ID NO: 25975 - DNA, 25 bp, Probe sequence
ctcaactagcattcgcaataggtaa

SEQ ID NO: 25976 - DNA, 25 bp, Probe sequence
acagtatccacctcaactagcattc

SEQ ID NO: 25977 - DNA, 25 bp, Probe sequence
cacagtatccacctcaactagcatt

SEQ ID NO: 25978 - DNA, 25 bp, Probe sequence
caactagcattcgcaataggtaatg

SEQ ID NO: 25979 - DNA, 25 bp, Probe sequence
cctcaactagcattcgcaataggta

SEQ ID NO: 25980 - DNA, 25 bp, Probe sequence
cagtatccacctcaactagcattcg

SEQ ID NO: 25981 - DNA, 25 bp, Probe sequence
ccacctcaactagcattcgcaatag

SEQ ID NO: 25982 - DNA, 25 bp, Probe sequence
tccacctcaactagcattcgcaata

SEQ ID NO: 25983 - DNA, 25 bp, Probe sequence
caattctgatgatgttgttgaaact

SEQ ID NO: 25984 - DNA, 25 bp, Probe sequence
attctgatgatgttgttgaaacttt

SEQ ID NO: 25985 - DNA, 25 bp, Probe sequence
aattctgatgatgttgttgaaactt

SEQ ID NO: 25986 - DNA, 25 bp, Probe sequence
aattgcatttaagtgtagtcgaacg

SEQ ID NO: 25987 - DNA, 25 bp, Probe sequence
tagcaagattaaatgaacaaagtga

SEQ ID NO: 25988 - DNA, 25 bp, Probe sequence
tgcatttaagtgtagtcgaacgtaa

SEQ ID NO: 25989 - DNA, 25 bp, Probe sequence
ttgcatttaagtgtagtcgaacgta

SEQ ID NO: 25990 - DNA, 25 bp, Probe sequence
gtatcaagttaatgattcgtctagc

SEQ ID NO: 25991 - DNA, 25 bp, Probe sequence
gaccctagagaaatagaagaacgta

SEQ ID NO: 25992 - DNA, 25 bp, Probe sequence
gtattgcctataatcatctatgcca

SEQ ID NO: 25993 - DNA, 25 bp, Probe sequence
attgcctataatcatctatgccatt

SEQ ID NO: 25994 - DNA, 25 bp, Probe sequence
agtattgcctataatcatctatgcc

SEQ ID NO: 25995 - DNA, 25 bp, Probe sequence
aacattacagatagttcaagtggaa

SEQ ID NO: 25996 - DNA, 25 bp, Probe sequence
acattacagatagttcaagtggaat

SEQ ID NO: 25997 - DNA, 25 bp, Probe sequence
tattgcctataatcatctatgccat

SEQ ID NO: 25998 - DNA, 25 bp, Probe sequence
acagatagttcaagtggaatagtta

SEQ ID NO: 25999 - DNA, 25 bp, Probe sequence
tacagatagttcaagtggaatagtt

SEQ ID NO: 26000 - DNA, 25 bp, Probe sequence
ttacagatagttcaagtggaatagt

SEQ ID NO: 26001 - DNA, 25 bp, Probe sequence
ggctaagcatattattacaggcgta

SEQ ID NO: 26002 - DNA, 25 bp, Probe sequence
gctaagcatattattacaggcgtat

SEQ ID NO: 26003 - DNA, 25 bp, Probe sequence
cgcattaacacaacatgatatggaa

SEQ ID NO: 26004 - DNA, 25 bp, Probe sequence
aacgcattaacacaacatgatatgg

SEQ ID NO: 26005 - DNA, 25 bp, Probe sequence
agcatattattacaggcgtatgtga

SEQ ID NO: 26006 - DNA, 25 bp, Probe sequence
acgcattaacacaacatgatatgga

SEQ ID NO: 26007 - DNA, 25 bp, Probe sequence
gcatattattacaggcgtatgtgaa

SEQ ID NO: 26008 - DNA, 25 bp, Probe sequence
aagcatattattacaggcgtatgtg

SEQ ID NO: 26009 - DNA, 25 bp, Probe sequence
taacatgctataacggtatcattgg

SEQ ID NO: 26010 - DNA, 25 bp, Probe sequence
acaagatcagaaggattgcgtatag

SEQ ID NO: 26011 - DNA, 25 bp, Probe sequence
cacaagatcagaaggattgcgtata

SEQ ID NO: 26012 - DNA, 25 bp, Probe sequence
caagatcagaaggattgcgtatagg

SEQ ID NO: 26013 - DNA, 25 bp, Probe sequence
atgaacacaagatcagaaggattgc

SEQ ID NO: 26014 - DNA, 25 bp, Probe sequence
tagatagagaacttcaatacagggc

SEQ ID NO: 26015 - DNA, 25 bp, Probe sequence
agaacttcaatacagggcgaataat

SEQ ID NO: 26016 - DNA, 25 bp, Probe sequence
acagggcgaataataacaaacttta

SEQ ID NO: 26017 - DNA, 25 bp, Probe sequence
tacagggcgaataataacaaacttt

SEQ ID NO: 26018 - DNA, 25 bp, Probe sequence
caatacagggcgaataataacaaac

SEQ ID NO: 26019 - DNA, 25 bp, Probe sequence
tcttcggcttcttctttcttcatta

SEQ ID NO: 26020 - DNA, 25 bp, Probe sequence
cttcggcttcttctttcttcattaa

SEQ ID NO: 26021 - DNA, 25 bp, Probe sequence
ttcttcggcttcttctttcttcatt

SEQ ID NO: 26022 - DNA, 25 bp, Probe sequence
ttcttcttcggcttcttctttcttc

SEQ ID NO: 26023 - DNA, 25 bp, Probe sequence
cttcttcttcggcttcttctttctt

SEQ ID NO: 26024 - DNA, 25 bp, Probe sequence
cttcttcggcttcttctttcttcat

SEQ ID NO: 26025 - DNA, 25 bp, Probe sequence
tttcttccacaactgcttcttcttc

SEQ ID NO: 26026 - DNA, 25 bp, Probe sequence
ttcttccacaactgcttcttcttcg

SEQ ID NO: 26027 - DNA, 25 bp, Probe sequence
tttaacattacactcaacctctctt

SEQ ID NO: 26028 - DNA, 25 bp, Probe sequence
aagagttgaggactgattacggatt

SEQ ID NO: 26029 - DNA, 25 bp, Probe sequence
gttgaggactgattacggattgact

SEQ ID NO: 26030 - DNA, 25 bp, Probe sequence
gagttgaggactgattacggattga

SEQ ID NO: 26031 - DNA, 25 bp, Probe sequence
agagttgaggactgattacggattg

SEQ ID NO: 26032 - DNA, 25 bp, Probe sequence
ttgaggactgattacggattgactc

SEQ ID NO: 26033 - DNA, 25 bp, Probe sequence
taaggtctcatcacgtacaattcaa

SEQ ID NO: 26034 - DNA, 25 bp, Probe sequence
ttaaggtctcatcacgtacaattca

SEQ ID NO: 26035 - DNA, 25 bp, Probe sequence
agttgaggactgattacggattgac

SEQ ID NO: 26036 - DNA, 25 bp, Probe sequence
gaggactgattacggattgactcaa

SEQ ID NO: 26037 - DNA, 25 bp, Probe sequence
ccgctatttggtattggaagtattg

SEQ ID NO: 26038 - DNA, 25 bp, Probe sequence
cgctatttggtattggaagtattgt

SEQ ID NO: 26039 - DNA, 25 bp, Probe sequence
gtattaacagtagttacaccgctat

SEQ ID NO: 26040 - DNA, 25 bp, Probe sequence
ttgtattaacagtagttacaccgct

SEQ ID NO: 26041 - DNA, 25 bp, Probe sequence
tgtattaacagtagttacaccgcta

SEQ ID NO: 26042 - DNA, 25 bp, Probe sequence
attgtattaacagtagttacaccgc

SEQ ID NO: 26043 - DNA, 25 bp, Probe sequence
tggtattggaagtattgtttgtagt

SEQ ID NO: 26044 - DNA, 25 bp, Probe sequence
tattaacagtagttacaccgctatt

SEQ ID NO: 26045 - DNA, 25 bp, Probe sequence
gctatttggtattggaagtattgtt

SEQ ID NO: 26046 - DNA, 25 bp, Probe sequence
tgaaagttgatattgatggcgaaat

SEQ ID NO: 26047 - DNA, 25 bp, Probe sequence
atgaaagttgatattgatggcgaaa

SEQ ID NO: 26048 - DNA, 25 bp, Probe sequence
aatgaaagttgatattgatggcgaa

SEQ ID NO: 26049 - DNA, 25 bp, Probe sequence
tattatttattcttggcggtgatgg

SEQ ID NO: 26050 - DNA, 25 bp, Probe sequence
aaacactgctaaatccaacacaatt

SEQ ID NO: 26051 - DNA, 25 bp, Probe sequence
atgataagacatattctggcgaaac

SEQ ID NO: 26052 - DNA, 25 bp, Probe sequence
gatgataagacatattctggcgaaa

SEQ ID NO: 26053 - DNA, 25 bp, Probe sequence
gataagacatattctggcgaaacga

SEQ ID NO: 26054 - DNA, 25 bp, Probe sequence
gaaagttgatattgatggcgaaatt

SEQ ID NO: 26055 - DNA, 25 bp, Probe sequence
atcatactcagatagaagtcgcctt

SEQ ID NO: 26056 - DNA, 25 bp, Probe sequence
tatcatactcagatagaagtcgcct

SEQ ID NO: 26057 - DNA, 25 bp, Probe sequence
atactcagatagaagtcgccttgtt

SEQ ID NO: 26058 - DNA, 25 bp, Probe sequence
tcatactcagatagaagtcgccttg

SEQ ID NO: 26059 - DNA, 25 bp, Probe sequence
tactcagatagaagtcgccttgttc

SEQ ID NO: 26060 - DNA, 25 bp, Probe sequence
catactcagatagaagtcgccttgt

SEQ ID NO: 26061 - DNA, 25 bp, Probe sequence
aacaaggcgatttctatcatactca

SEQ ID NO: 26062 - DNA, 25 bp, Probe sequence
acaaggcgatttctatcatactcag

SEQ ID NO: 26063 - DNA, 25 bp, Probe sequence
aaacaaggcgatttctatcatactc

SEQ ID NO: 26064 - DNA, 25 bp, Probe sequence
gttcttcatcattattggttcaggt

SEQ ID NO: 26065 - DNA, 25 bp, Probe sequence
tgttcttcatcattattggttcagg

SEQ ID NO: 26066 - DNA, 25 bp, Probe sequence
atctatatgacatcaataccaggcg

SEQ ID NO: 26067 - DNA, 25 bp, Probe sequence
ggtaatagtgctgctgttaagttag

SEQ ID NO: 26068 - DNA, 25 bp, Probe sequence
ggtgcgtcatacatactaattggta

SEQ ID NO: 26069 - DNA, 25 bp, Probe sequence
agtatggtcttattatcggaagtgt

SEQ ID NO: 26070 - DNA, 25 bp, Probe sequence
ttcttcatcattattggttcaggtt

SEQ ID NO: 26071 - DNA, 25 bp, Probe sequence
tatatgacatcaataccaggcggat

SEQ ID NO: 26072 - DNA, 25 bp, Probe sequence
gtatggtcttattatcggaagtgtt

SEQ ID NO: 26073 - DNA, 25 bp, Probe sequence
agttatgtctacgttaaagttagaa

SEQ ID NO: 26074 - DNA, 25 bp, Probe sequence
gttatgtctacgttaaagttagaaa

SEQ ID NO: 26075 - DNA, 25 bp, Probe sequence
tagttatgtctacgttaaagttaga

SEQ ID NO: 26076 - DNA, 25 bp, Probe sequence
aaattaactagcaaagacgaatttt

SEQ ID NO: 26077 - DNA, 25 bp, Probe sequence
aaaattaactagcaaagacgaattt

SEQ ID NO: 26078 - DNA, 25 bp, Probe sequence
attataccaagcccagaaatgatga

SEQ ID NO: 26079 - DNA, 25 bp, Probe sequence
ttataccaagcccagaaatgatgag

SEQ ID NO: 26080 - DNA, 25 bp, Probe sequence
gaaatggaagaggttaaacaaatcg

SEQ ID NO: 26081 - DNA, 25 bp, Probe sequence
tattataccaagcccagaaatgatg

SEQ ID NO: 26082 - DNA, 25 bp, Probe sequence
aatggaatatgaaatggaagaggtt

SEQ ID NO: 26083 - DNA, 25 bp, Probe sequence
aaatggaatatgaaatggaagaggt

SEQ ID NO: 26084 - DNA, 25 bp, Probe sequence
tctttgatgatttatggatggaact

SEQ ID NO: 26085 - DNA, 25 bp, Probe sequence
tttattataccaagcccagaaatga

SEQ ID NO: 26086 - DNA, 25 bp, Probe sequence
tgatgagctgtattattattcgagt

SEQ ID NO: 26087 - DNA, 25 bp, Probe sequence
atcgtcctgatgtattagaatcgtt

SEQ ID NO: 26088 - DNA, 25 bp, Probe sequence
tatcgtcctgatgtattagaatcgt

SEQ ID NO: 26089 - DNA, 25 bp, Probe sequence
ctatcgtcctgatgtattagaatcg

SEQ ID NO: 26090 - DNA, 25 bp, Probe sequence
ccgtcaacaagatgaattacaagat

SEQ ID NO: 26091 - DNA, 25 bp, Probe sequence
aataagcatcaaggtcgtgactatt

SEQ ID NO: 26092 - DNA, 25 bp, Probe sequence
taataagcatcaaggtcgtgactat

SEQ ID NO: 26093 - DNA, 25 bp, Probe sequence
ataataagcatcaaggtcgtgacta

SEQ ID NO: 26094 - DNA, 25 bp, Probe sequence
gataataagcatcaaggtcgtgact

SEQ ID NO: 26095 - DNA, 25 bp, Probe sequence
gccgtcaacaagatgaattacaaga

SEQ ID NO: 26096 - DNA, 25 bp, Probe sequence
cagcgatgaattgaattattacacc

SEQ ID NO: 26097 - DNA, 25 bp, Probe sequence
acagcgatgaattgaattattacac

SEQ ID NO: 26098 - DNA, 25 bp, Probe sequence
attatgttaaagagcaagaagaagc

SEQ ID NO: 26099 - DNA, 25 bp, Probe sequence
gccaatgggaagagaacattattat

SEQ ID NO: 26100 - DNA, 25 bp, Probe sequence
agattatgttaaagagcaagaagaa

SEQ ID NO: 26101 - DNA, 25 bp, Probe sequence
aagattatgttaaagagcaagaaga

SEQ ID NO: 26102 - DNA, 25 bp, Probe sequence
ttttacaagagacggcaaattgaat

SEQ ID NO: 26103 - DNA, 25 bp, Probe sequence
aatttgattttacaagagacggcaa

SEQ ID NO: 26104 - DNA, 25 bp, Probe sequence
gaatttgattttacaagagacggca

SEQ ID NO: 26105 - DNA, 25 bp, Probe sequence
tgattgggttaatacggagtttgat

SEQ ID NO: 26106 - DNA, 25 bp, Probe sequence
ttgattgggttaatacggagtttga

SEQ ID NO: 26107 - DNA, 25 bp, Probe sequence
attgattgggttaatacggagtttg

SEQ ID NO: 26108 - DNA, 25 bp, Probe sequence
gattgggttaatacggagtttgatc

SEQ ID NO: 26109 - DNA, 25 bp, Probe sequence
tattgattgggttaatacggagttt

SEQ ID NO: 26110 - DNA, 25 bp, Probe sequence
atattgattgggttaatacggagtt

SEQ ID NO: 26111 - DNA, 25 bp, Probe sequence
ttaaagaagaaggactagaaccatg

SEQ ID NO: 26112 - DNA, 25 bp, Probe sequence
tatattgattgggttaatacggagt

SEQ ID NO: 26113 - DNA, 25 bp, Probe sequence
tttacaagagaaggtacattgaatg

SEQ ID NO: 26114 - DNA, 25 bp, Probe sequence
taacattcgtaatcgagtcttccaa

SEQ ID NO: 26115 - DNA, 25 bp, Probe sequence
ttaacattcgtaatcgagtcttcca

SEQ ID NO: 26116 - DNA, 25 bp, Probe sequence
acattcgtaatcgagtcttccaatt

SEQ ID NO: 26117 - DNA, 25 bp, Probe sequence
aacattcgtaatcgagtcttccaat

SEQ ID NO: 26118 - DNA, 25 bp, Probe sequence
cattcgtaatcgagtcttccaatta

SEQ ID NO: 26119 - DNA, 25 bp, Probe sequence
attcgtaatcgagtcttccaattat

SEQ ID NO: 26120 - DNA, 25 bp, Probe sequence
gcatgatattcatccaaagagacat

SEQ ID NO: 26121 - DNA, 25 bp, Probe sequence
tggtttaacattcgtaatcgagtct

SEQ ID NO: 26122 - DNA, 25 bp, Probe sequence
ggtttaacattcgtaatcgagtctt

SEQ ID NO: 26123 - DNA, 25 bp, Probe sequence
gattgttttgttattgaaagaaggg

SEQ ID NO: 26124 - DNA, 25 bp, Probe sequence
agattgttttgttattgaaagaagg

SEQ ID NO: 26125 - DNA, 25 bp, Probe sequence
aagattgttttgttattgaaagaag

SEQ ID NO: 26126 - DNA, 25 bp, Probe sequence
ggttcaagaagttgtagtagaagga

SEQ ID NO: 26127 - DNA, 25 bp, Probe sequence
tggttcaagaagttgtagtagaagg

SEQ ID NO: 26128 - DNA, 25 bp, Probe sequence
tcaagaagttgtagtagaaggagac

SEQ ID NO: 26129 - DNA, 25 bp, Probe sequence
gttcaagaagttgtagtagaaggag

SEQ ID NO: 26130 - DNA, 25 bp, Probe sequence
ttcaagaagttgtagtagaaggaga

SEQ ID NO: 26131 - DNA, 25 bp, Probe sequence
ttggttcaagaagttgtagtagaag

SEQ ID NO: 26132 - DNA, 25 bp, Probe sequence
caagaagttgtagtagaaggagaca

SEQ ID NO: 26133 - DNA, 25 bp, Probe sequence
agaagttgtagtagaaggagacatt

SEQ ID NO: 26134 - DNA, 25 bp, Probe sequence
aagaagttgtagtagaaggagacat

SEQ ID NO: 26135 - DNA, 25 bp, Probe sequence
gttaataaagtcaatcgctcacaca

SEQ ID NO: 26136 - DNA, 25 bp, Probe sequence
aataaagtcaatcgctcacacatta

SEQ ID NO: 26137 - DNA, 25 bp, Probe sequence
taataaagtcaatcgctcacacatt

SEQ ID NO: 26138 - DNA, 25 bp, Probe sequence
ataaagtcaatcgctcacacattaa

SEQ ID NO: 26139 - DNA, 25 bp, Probe sequence
ttaataaagtcaatcgctcacacat

SEQ ID NO: 26140 - DNA, 25 bp, Probe sequence
aatcaatgatggatgacattaagcc

SEQ ID NO: 26141 - DNA, 25 bp, Probe sequence
aaactgggaaattaaagtgaagcat

SEQ ID NO: 26142 - DNA, 25 bp, Probe sequence
caaactgggaaattaaagtgaagca

SEQ ID NO: 26143 - DNA, 25 bp, Probe sequence
caatcaatgatggatgacattaagc

SEQ ID NO: 26144 - DNA, 25 bp, Probe sequence
cgccactgatgaccgaattaatatt

SEQ ID NO: 26145 - DNA, 25 bp, Probe sequence
ttaacgccactgatgaccgaattaa

SEQ ID NO: 26146 - DNA, 25 bp, Probe sequence
acgccactgatgaccgaattaatat

SEQ ID NO: 26147 - DNA, 25 bp, Probe sequence
aacgccactgatgaccgaattaata

SEQ ID NO: 26148 - DNA, 25 bp, Probe sequence
taacgccactgatgaccgaattaat

SEQ ID NO: 26149 - DNA, 25 bp, Probe sequence
gccactgatgaccgaattaatatta

SEQ ID NO: 26150 - DNA, 25 bp, Probe sequence
tttaacgccactgatgaccgaatta

SEQ ID NO: 26151 - DNA, 25 bp, Probe sequence
atttaacgccactgatgaccgaatt

SEQ ID NO: 26152 - DNA, 25 bp, Probe sequence
taaaagatttaacgccactgatgac

SEQ ID NO: 26153 - DNA, 25 bp, Probe sequence
atccatgctataagtgccataatga

SEQ ID NO: 26154 - DNA, 25 bp, Probe sequence
tccatgctataagtgccataatgag

SEQ ID NO: 26155 - DNA, 25 bp, Probe sequence
catgctataagtgccataatgagtt

SEQ ID NO: 26156 - DNA, 25 bp, Probe sequence
ccatgctataagtgccataatgagt

SEQ ID NO: 26157 - DNA, 25 bp, Probe sequence
actatccatgctataagtgccataa

SEQ ID NO: 26158 - DNA, 25 bp, Probe sequence
aatactatccatgctataagtgcca

SEQ ID NO: 26159 - DNA, 25 bp, Probe sequence
atactatccatgctataagtgccat

SEQ ID NO: 26160 - DNA, 25 bp, Probe sequence
tatccatgctataagtgccataatg

SEQ ID NO: 26161 - DNA, 25 bp, Probe sequence
tactatccatgctataagtgccata

SEQ ID NO: 26162 - DNA, 25 bp, Probe sequence
gcaagcgagtataaaccataaacta

SEQ ID NO: 26163 - DNA, 25 bp, Probe sequence
cattcttaatagatagtatggctgg

SEQ ID NO: 26164 - DNA, 25 bp, Probe sequence
tcttaatagatagtatggctggatt

SEQ ID NO: 26165 - DNA, 25 bp, Probe sequence
ttcttaatagatagtatggctggat

SEQ ID NO: 26166 - DNA, 25 bp, Probe sequence
attcttaatagatagtatggctgga

SEQ ID NO: 26167 - DNA, 25 bp, Probe sequence
agcgagtataaaccataaactacaa

SEQ ID NO: 26168 - DNA, 25 bp, Probe sequence
aagcgagtataaaccataaactaca

SEQ ID NO: 26169 - DNA, 25 bp, Probe sequence
caagcgagtataaaccataaactac

SEQ ID NO: 26170 - DNA, 25 bp, Probe sequence
tatgatattaagcaaagtgaccaac

SEQ ID NO: 26171 - DNA, 25 bp, Probe sequence
tagtcgaaggtgttcaagatgataa

SEQ ID NO: 26172 - DNA, 25 bp, Probe sequence
ttagtcgaaggtgttcaagatgata

SEQ ID NO: 26173 - DNA, 25 bp, Probe sequence
cttgcgaagttgctgtatctttaat

SEQ ID NO: 26174 - DNA, 25 bp, Probe sequence
ttgcgaagttgctgtatctttaatt

SEQ ID NO: 26175 - DNA, 25 bp, Probe sequence
ggagcttatatcagaagtgacgtaa

SEQ ID NO: 26176 - DNA, 25 bp, Probe sequence
agcttatatcagaagtgacgtaact

SEQ ID NO: 26177 - DNA, 25 bp, Probe sequence
aggagcttatatcagaagtgacgta

SEQ ID NO: 26178 - DNA, 25 bp, Probe sequence
gagcttatatcagaagtgacgtaac

SEQ ID NO: 26179 - DNA, 25 bp, Probe sequence
ttatgacttacctgttccaaacttc

SEQ ID NO: 26180 - DNA, 25 bp, Probe sequence
attactttcaatttacgtcggtgtg

SEQ ID NO: 26181 - DNA, 25 bp, Probe sequence
tattactttcaatttacgtcggtgt

SEQ ID NO: 26182 - DNA, 25 bp, Probe sequence
ttactttcaatttacgtcggtgtga

SEQ ID NO: 26183 - DNA, 25 bp, Probe sequence
atattactttcaatttacgtcggtg

SEQ ID NO: 26184 - DNA, 25 bp, Probe sequence
aagaatcgttagacaatctgatatc

SEQ ID NO: 26185 - DNA, 25 bp, Probe sequence
aaagaatcgttagacaatctgatat

SEQ ID NO: 26186 - DNA, 25 bp, Probe sequence
actgaagaaagaaaaggaaattgtt

SEQ ID NO: 26187 - DNA, 25 bp, Probe sequence
caccaaaatagaatcagctaacgaa

SEQ ID NO: 26188 - DNA, 25 bp, Probe sequence
tcaccaaaatagaatcagctaacga

SEQ ID NO: 26189 - DNA, 25 bp, Probe sequence
cgctattagatgaatggcttgaata

SEQ ID NO: 26190 - DNA, 25 bp, Probe sequence
taattgccagcatcttagaagtaca

SEQ ID NO: 26191 - DNA, 25 bp, Probe sequence
ttaattgccagcatcttagaagtac

SEQ ID NO: 26192 - DNA, 25 bp, Probe sequence
aattgccagcatcttagaagtacag

SEQ ID NO: 26193 - DNA, 25 bp, Probe sequence
caaccattcgcatatatactcatgt

SEQ ID NO: 26194 - DNA, 25 bp, Probe sequence
acaaccattcgcatatatactcatg

SEQ ID NO: 26195 - DNA, 25 bp, Probe sequence
aacaaccattcgcatatatactcat

SEQ ID NO: 26196 - DNA, 25 bp, Probe sequence
ttcggatacaaagacactacaaaga

SEQ ID NO: 26197 - DNA, 25 bp, Probe sequence
aaggattcggatacaaagacactac

SEQ ID NO: 26198 - DNA, 25 bp, Probe sequence
tattagtaattggcggaatgttcac

SEQ ID NO: 26199 - DNA, 25 bp, Probe sequence
tgttattagtaattggcggaatgtt

SEQ ID NO: 26200 - DNA, 25 bp, Probe sequence
ttgttattagtaattggcggaatgt

SEQ ID NO: 26201 - DNA, 25 bp, Probe sequence
ttattagtaattggcggaatgttca

SEQ ID NO: 26202 - DNA, 25 bp, Probe sequence
gttattagtaattggcggaatgttc

SEQ ID NO: 26203 - DNA, 25 bp, Probe sequence
attagtaattggcggaatgttcacg

SEQ ID NO: 26204 - DNA, 25 bp, Probe sequence
tgtcgtagaatccaagtttgtcata

SEQ ID NO: 26205 - DNA, 25 bp, Probe sequence
aatgtcgtagaatccaagtttgtca

SEQ ID NO: 26206 - DNA, 25 bp, Probe sequence
gtcgtagaatccaagtttgtcataa

SEQ ID NO: 26207 - DNA, 25 bp, Probe sequence
ttattatccgtgaaggtggtattcg

SEQ ID NO: 26208 - DNA, 25 bp, Probe sequence
attattatccgtgaaggtggtattc

SEQ ID NO: 26209 - DNA, 25 bp, Probe sequence
acaatggaactgctacagattatga

SEQ ID NO: 26210 - DNA, 25 bp, Probe sequence
gacaatggaactgctacagattatg

SEQ ID NO: 26211 - DNA, 25 bp, Probe sequence
agacaatggaactgctacagattat

SEQ ID NO: 26212 - DNA, 25 bp, Probe sequence
tagacaatggaactgctacagatta

SEQ ID NO: 26213 - DNA, 25 bp, Probe sequence
caatggaactgctacagattatgaa

SEQ ID NO: 26214 - DNA, 25 bp, Probe sequence
aatcgtgaagttcgcattattggtg

SEQ ID NO: 26215 - DNA, 25 bp, Probe sequence
tattattatccgtgaaggtggtatt

SEQ ID NO: 26216 - DNA, 25 bp, Probe sequence
ttattattcaacctcttagacagcc

SEQ ID NO: 26217 - DNA, 25 bp, Probe sequence
caacaggtgcgtctacatatcattc

SEQ ID NO: 26218 - DNA, 25 bp, Probe sequence
acaggtgcgtctacatatcattcaa

SEQ ID NO: 26219 - DNA, 25 bp, Probe sequence
aacaggtgcgtctacatatcattca

SEQ ID NO: 26220 - DNA, 25 bp, Probe sequence
acaacaggtgcgtctacatatcatt

SEQ ID NO: 26221 - DNA, 25 bp, Probe sequence
aacaacaggtgcgtctacatatcat

SEQ ID NO: 26222 - DNA, 25 bp, Probe sequence
aggtgcgtctacatatcattcaaat

SEQ ID NO: 26223 - DNA, 25 bp, Probe sequence
tattattcaacctcttagacagccc

SEQ ID NO: 26224 - DNA, 25 bp, Probe sequence
tgcaacatagcttaacaattagaca

SEQ ID NO: 26225 - DNA, 25 bp, Probe sequence
ttccacttatacttcggtttaatca

SEQ ID NO: 26226 - DNA, 25 bp, Probe sequence
tccacttatacttcggtttaatcat

SEQ ID NO: 26227 - DNA, 25 bp, Probe sequence
agttaatttccacttatacttcggt

SEQ ID NO: 26228 - DNA, 25 bp, Probe sequence
gttaatttccacttatacttcggtt

SEQ ID NO: 26229 - DNA, 25 bp, Probe sequence
tttccacttatacttcggtttaatc

SEQ ID NO: 26230 - DNA, 25 bp, Probe sequence
tatttacgcctcatttccaaaagac

SEQ ID NO: 26231 - DNA, 25 bp, Probe sequence
cgcctcatttccaaaagacattata

SEQ ID NO: 26232 - DNA, 25 bp, Probe sequence
tacgcctcatttccaaaagacatta

SEQ ID NO: 26233 - DNA, 25 bp, Probe sequence
aatttccacttatacttcggtttaa

SEQ ID NO: 26234 - DNA, 25 bp, Probe sequence
aatctacaacaacaccttcaactga

SEQ ID NO: 26235 - DNA, 25 bp, Probe sequence
atggatggtagtcaatatggagaat

SEQ ID NO: 26236 - DNA, 25 bp, Probe sequence
tggatggtagtcaatatggagaatt

SEQ ID NO: 26237 - DNA, 25 bp, Probe sequence
ctatggatggtagtcaatatggaga

SEQ ID NO: 26238 - DNA, 25 bp, Probe sequence
tatggatggtagtcaatatggagaa

SEQ ID NO: 26239 - DNA, 25 bp, Probe sequence
atctacaacaacaccttcaactgaa

SEQ ID NO: 26240 - DNA, 25 bp, Probe sequence
gcagtacaagtaatcattggaattg

SEQ ID NO: 26241 - DNA, 25 bp, Probe sequence
agcagtacaagtaatcattggaatt

SEQ ID NO: 26242 - DNA, 25 bp, Probe sequence
aagcagtacaagtaatcattggaat

SEQ ID NO: 26243 - DNA, 25 bp, Probe sequence
ttgctttcggtatattagtttctga

SEQ ID NO: 26244 - DNA, 25 bp, Probe sequence
tgctttcggtatattagtttctgaa

SEQ ID NO: 26245 - DNA, 25 bp, Probe sequence
taacggtagatttagagtttggaaa

SEQ ID NO: 26246 - DNA, 25 bp, Probe sequence
ttaacggtagatttagagtttggaa

SEQ ID NO: 26247 - DNA, 25 bp, Probe sequence
attgctttcggtatattagtttctg

SEQ ID NO: 26248 - DNA, 25 bp, Probe sequence
attaacggtagatttagagtttgga

SEQ ID NO: 26249 - DNA, 25 bp, Probe sequence
gattgctttcggtatattagtttct

SEQ ID NO: 26250 - DNA, 25 bp, Probe sequence
cacgtatcaaacaactgtatggtaa

SEQ ID NO: 26251 - DNA, 25 bp, Probe sequence
tagaagttacactgatttcaggtgc

SEQ ID NO: 26252 - DNA, 25 bp, Probe sequence
aatgaaccgtatcgcacatagttat

SEQ ID NO: 26253 - DNA, 25 bp, Probe sequence
tatcgcacatagttatggtcttcat

SEQ ID NO: 26254 - DNA, 25 bp, Probe sequence
gtatcgcacatagttatggtcttca

SEQ ID NO: 26255 - DNA, 25 bp, Probe sequence
cgagttgaagatacaatgaaccgta

SEQ ID NO: 26256 - DNA, 25 bp, Probe sequence
caatgaaccgtatcgcacatagtta

SEQ ID NO: 26257 - DNA, 25 bp, Probe sequence
atgaaccgtatcgcacatagttatg

SEQ ID NO: 26258 - DNA, 25 bp, Probe sequence
cgtatcgcacatagttatggtcttc

SEQ ID NO: 26259 - DNA, 25 bp, Probe sequence
tgccagattcaatcacaattataga

SEQ ID NO: 26260 - DNA, 25 bp, Probe sequence
atcgcacatagttatggtcttcata

SEQ ID NO: 26261 - DNA, 25 bp, Probe sequence
tattccatcgcttacagtattcaga

SEQ ID NO: 26262 - DNA, 25 bp, Probe sequence
attccatcgcttacagtattcagaa

SEQ ID NO: 26263 - DNA, 25 bp, Probe sequence
atatctgttatagtcgctggaatct

SEQ ID NO: 26264 - DNA, 25 bp, Probe sequence
ttattccatcgcttacagtattcag

SEQ ID NO: 26265 - DNA, 25 bp, Probe sequence
tatctgttatagtcgctggaatcta

SEQ ID NO: 26266 - DNA, 25 bp, Probe sequence
gatgtcaatgatacctactcacaca

SEQ ID NO: 26267 - DNA, 25 bp, Probe sequence
agatgtcaatgatacctactcacac

SEQ ID NO: 26268 - DNA, 25 bp, Probe sequence
atgtcaatgatacctactcacacaa

SEQ ID NO: 26269 - DNA, 25 bp, Probe sequence
aagatgtcaatgatacctactcaca

SEQ ID NO: 26270 - DNA, 25 bp, Probe sequence
ttcataatgcgtgtgtcgtagtaac

SEQ ID NO: 26271 - DNA, 25 bp, Probe sequence
gttcataatgcgtgtgtcgtagtaa

SEQ ID NO: 26272 - DNA, 25 bp, Probe sequence
ctacgagaagcagtaccatgtatag

SEQ ID NO: 26273 - DNA, 25 bp, Probe sequence
cgagaagcagtaccatgtatagtaa

SEQ ID NO: 26274 - DNA, 25 bp, Probe sequence
acgagaagcagtaccatgtatagta

SEQ ID NO: 26275 - DNA, 25 bp, Probe sequence
tacgagaagcagtaccatgtatagt

SEQ ID NO: 26276 - DNA, 25 bp, Probe sequence
gcgtgtgtcgtagtaacaagatatt

SEQ ID NO: 26277 - DNA, 25 bp, Probe sequence
aagatgccactcataattgttctgc

SEQ ID NO: 26278 - DNA, 25 bp, Probe sequence
gagaagcagtaccatgtatagtaac

SEQ ID NO: 26279 - DNA, 25 bp, Probe sequence
ttaggttctggtcaacaatggtatt

SEQ ID NO: 26280 - DNA, 25 bp, Probe sequence
attaggttctggtcaacaatggtat

SEQ ID NO: 26281 - DNA, 25 bp, Probe sequence
taggttctggtcaacaatggtattc

SEQ ID NO: 26282 - DNA, 25 bp, Probe sequence
ggttctggtcaacaatggtattcat

SEQ ID NO: 26283 - DNA, 25 bp, Probe sequence
ctggtatggttggatctcaattagt

SEQ ID NO: 26284 - DNA, 25 bp, Probe sequence
actggtatggttggatctcaattag

SEQ ID NO: 26285 - DNA, 25 bp, Probe sequence
gactggtatggttggatctcaatta

SEQ ID NO: 26286 - DNA, 25 bp, Probe sequence
tggtatggttggatctcaattagtt

SEQ ID NO: 26287 - DNA, 25 bp, Probe sequence
ggtcaacaatggtattcatggattc

SEQ ID NO: 26288 - DNA, 25 bp, Probe sequence
agtcaattagcttatcggtatccat

SEQ ID NO: 26289 - DNA, 25 bp, Probe sequence
agcttatcggtatccatacatcatg

SEQ ID NO: 26290 - DNA, 25 bp, Probe sequence
aagtcaattagcttatcggtatcca

SEQ ID NO: 26291 - DNA, 25 bp, Probe sequence
ttagcttatcggtatccatacatca

SEQ ID NO: 26292 - DNA, 25 bp, Probe sequence
tagcttatcggtatccatacatcat

SEQ ID NO: 26293 - DNA, 25 bp, Probe sequence
caattagcttatcggtatccataca

SEQ ID NO: 26294 - DNA, 25 bp, Probe sequence
gtcaattagcttatcggtatccata

SEQ ID NO: 26295 - DNA, 25 bp, Probe sequence
tcaattagcttatcggtatccatac

SEQ ID NO: 26296 - DNA, 25 bp, Probe sequence
attagcttatcggtatccatacatc

SEQ ID NO: 26297 - DNA, 25 bp, Probe sequence
tatgttgagaatgtgtcgttatcca

SEQ ID NO: 26298 - DNA, 25 bp, Probe sequence
attgaacgaacacgatattgatacg

SEQ ID NO: 26299 - DNA, 25 bp, Probe sequence
atgagtgtattagcaagtggtagta

SEQ ID NO: 26300 - DNA, 25 bp, Probe sequence
atatgttgagaatgtgtcgttatcc

SEQ ID NO: 26301 - DNA, 25 bp, Probe sequence
atgttgagaatgtgtcgttatccat

SEQ ID NO: 26302 - DNA, 25 bp, Probe sequence
aggtagtctattagttgatgttggt

SEQ ID NO: 26303 - DNA, 25 bp, Probe sequence
aagtattgaacgaacacgatattga

SEQ ID NO: 26304 - DNA, 25 bp, Probe sequence
gaacgaacacgatattgatacggaa

SEQ ID NO: 26305 - DNA, 25 bp, Probe sequence
agtattgaacgaacacgatattgat

SEQ ID NO: 26306 - DNA, 25 bp, Probe sequence
ggtggtgccttcattattattccta

SEQ ID NO: 26307 - DNA, 25 bp, Probe sequence
accaatgaatactgtagtcgctaat

SEQ ID NO: 26308 - DNA, 25 bp, Probe sequence
attattaccaccattattcggagcc

SEQ ID NO: 26309 - DNA, 25 bp, Probe sequence
attaccaatgaatactgtagtcgct

SEQ ID NO: 26310 - DNA, 25 bp, Probe sequence
taccaatgaatactgtagtcgctaa

SEQ ID NO: 26311 - DNA, 25 bp, Probe sequence
ttaccaatgaatactgtagtcgcta

SEQ ID NO: 26312 - DNA, 25 bp, Probe sequence
aattaccaatgaatactgtagtcgc

SEQ ID NO: 26313 - DNA, 25 bp, Probe sequence
gtggtgccttcattattattcctat

SEQ ID NO: 26314 - DNA, 25 bp, Probe sequence
atatcgcatcaggtcttacttctag

SEQ ID NO: 26315 - DNA, 25 bp, Probe sequence
tggtaaggcagagattaatagagaa

SEQ ID NO: 26316 - DNA, 25 bp, Probe sequence
atggtaaggcagagattaatagaga

SEQ ID NO: 26317 - DNA, 25 bp, Probe sequence
agatggtaaggcagagattaataga

SEQ ID NO: 26318 - DNA, 25 bp, Probe sequence
gatggtaaggcagagattaatagag

SEQ ID NO: 26319 - DNA, 25 bp, Probe sequence
gcaggttgttctaataaaggtgaaa

SEQ ID NO: 26320 - DNA, 25 bp, Probe sequence
aagatggtaaggcagagattaatag

SEQ ID NO: 26321 - DNA, 25 bp, Probe sequence
aacagacattaaacaagaagacagt

SEQ ID NO: 26322 - DNA, 25 bp, Probe sequence
acagacattaaacaagaagacagta

SEQ ID NO: 26323 - DNA, 25 bp, Probe sequence
aaacagacattaaacaagaagacag

SEQ ID NO: 26324 - DNA, 25 bp, Probe sequence
agaacaattacaagaagaactagcg

SEQ ID NO: 26325 - DNA, 25 bp, Probe sequence
tgctagattcttacttgttccaatt

SEQ ID NO: 26326 - DNA, 25 bp, Probe sequence
atgctagattcttacttgttccaat

SEQ ID NO: 26327 - DNA, 25 bp, Probe sequence
atatgctagattcttacttgttcca

SEQ ID NO: 26328 - DNA, 25 bp, Probe sequence
tatgctagattcttacttgttccaa

SEQ ID NO: 26329 - DNA, 25 bp, Probe sequence
tagaacaattacaagaagaactagc

SEQ ID NO: 26330 - DNA, 25 bp, Probe sequence
atgttgagttgataaatagcatcct

SEQ ID NO: 26331 - DNA, 25 bp, Probe sequence
aatatgctagattcttacttgttcc

SEQ ID NO: 26332 - DNA, 25 bp, Probe sequence
tgttgagttgataaatagcatccta

SEQ ID NO: 26333 - DNA, 25 bp, Probe sequence
ctgtagatagtgttggaacgatagt

SEQ ID NO: 26334 - DNA, 25 bp, Probe sequence
gctgtagatagtgttggaacgatag

SEQ ID NO: 26335 - DNA, 25 bp, Probe sequence
tagatagtgttggaacgatagttgg

SEQ ID NO: 26336 - DNA, 25 bp, Probe sequence
tgtagatagtgttggaacgatagtt

SEQ ID NO: 26337 - DNA, 25 bp, Probe sequence
gtagatagtgttggaacgatagttg

SEQ ID NO: 26338 - DNA, 25 bp, Probe sequence
gatagtgttggaacgatagttggtg

SEQ ID NO: 26339 - DNA, 25 bp, Probe sequence
agatagtgttggaacgatagttggt

SEQ ID NO: 26340 - DNA, 25 bp, Probe sequence
atagtgttggaacgatagttggtga

SEQ ID NO: 26341 - DNA, 25 bp, Probe sequence
tagtgttggaacgatagttggtgaa

SEQ ID NO: 26342 - DNA, 25 bp, Probe sequence
aacagtgaatcctcgaacgatacaa

SEQ ID NO: 26343 - DNA, 25 bp, Probe sequence
gaacagtgaatcctcgaacgataca

SEQ ID NO: 26344 - DNA, 25 bp, Probe sequence
acagaaacaagctaatgaacaacaa

SEQ ID NO: 26345 - DNA, 25 bp, Probe sequence
aacagaaacaagctaatgaacaaca

SEQ ID NO: 26346 - DNA, 25 bp, Probe sequence
cagaaacaagctaatgaacaacaaa

SEQ ID NO: 26347 - DNA, 25 bp, Probe sequence
aaacagaaacaagctaatgaacaac

SEQ ID NO: 26348 - DNA, 25 bp, Probe sequence
tgaatcctcgaacgatacaaacaaa

SEQ ID NO: 26349 - DNA, 25 bp, Probe sequence
gtgaatcctcgaacgatacaaacaa

SEQ ID NO: 26350 - DNA, 25 bp, Probe sequence
cagtgaatcctcgaacgatacaaac

SEQ ID NO: 26351 - DNA, 25 bp, Probe sequence
acagatgtgtcaacaacagttaatg

SEQ ID NO: 26352 - DNA, 25 bp, Probe sequence
actacagatgtgtcaacaacagtta

SEQ ID NO: 26353 - DNA, 25 bp, Probe sequence
cagatgtgtcaacaacagttaatgg

SEQ ID NO: 26354 - DNA, 25 bp, Probe sequence
ctacagatgtgtcaacaacagttaa

SEQ ID NO: 26355 - DNA, 25 bp, Probe sequence
gatgtgtcaacaacagttaatggtg

SEQ ID NO: 26356 - DNA, 25 bp, Probe sequence
agatgtgtcaacaacagttaatggt

SEQ ID NO: 26357 - DNA, 25 bp, Probe sequence
ttagcagcatcaggtgtaatgacta

SEQ ID NO: 26358 - DNA, 25 bp, Probe sequence
atgtgtcaacaacagttaatggtga

SEQ ID NO: 26359 - DNA, 25 bp, Probe sequence
gtcaacaacagttaatggtgaggtt

SEQ ID NO: 26360 - DNA, 25 bp, Probe sequence
gcattgatgggaactggtattaaag

SEQ ID NO: 26361 - DNA, 25 bp, Probe sequence
agcattgatgggaactggtattaaa

SEQ ID NO: 26362 - DNA, 25 bp, Probe sequence
aagcattgatgggaactggtattaa

SEQ ID NO: 26363 - DNA, 25 bp, Probe sequence
tacaaggtcaagtttcacaagcatt

SEQ ID NO: 26364 - DNA, 25 bp, Probe sequence
cattgatgggaactggtattaaaga

SEQ ID NO: 26365 - DNA, 25 bp, Probe sequence
caagcattgatgggaactggtatta

SEQ ID NO: 26366 - DNA, 25 bp, Probe sequence
tgatgggaactggtattaaagattc

SEQ ID NO: 26367 - DNA, 25 bp, Probe sequence
gatgggaactggtattaaagattct

SEQ ID NO: 26368 - DNA, 25 bp, Probe sequence
ttgatgggaactggtattaaagatt

SEQ ID NO: 26369 - DNA, 25 bp, Probe sequence
atagcatcattatcggtagcggtta

SEQ ID NO: 26370 - DNA, 25 bp, Probe sequence
atattatggcagtggcttggtatca

SEQ ID NO: 26371 - DNA, 25 bp, Probe sequence
atcattatcggtagcggttacagtt

SEQ ID NO: 26372 - DNA, 25 bp, Probe sequence
ctgaatctcgtgaagcattaattga

SEQ ID NO: 26373 - DNA, 25 bp, Probe sequence
aatagcatcattatcggtagcggtt

SEQ ID NO: 26374 - DNA, 25 bp, Probe sequence
tgaatctcgtgaagcattaattgaa

SEQ ID NO: 26375 - DNA, 25 bp, Probe sequence
tagcatcattatcggtagcggttac

SEQ ID NO: 26376 - DNA, 25 bp, Probe sequence
aatattatggcagtggcttggtatc

SEQ ID NO: 26377 - DNA, 25 bp, Probe sequence
tattatggcagtggcttggtatcaa

SEQ ID NO: 26378 - DNA, 25 bp, Probe sequence
cttatcttaggtgcttgtggacatc

SEQ ID NO: 26379 - DNA, 25 bp, Probe sequence
tatcttaggtgcttgtggacatcat

SEQ ID NO: 26380 - DNA, 25 bp, Probe sequence
atctatgagttaagaggtgatggaa

SEQ ID NO: 26381 - DNA, 25 bp, Probe sequence
ttatcttaggtgcttgtggacatca

SEQ ID NO: 26382 - DNA, 25 bp, Probe sequence
acttatcttaggtgcttgtggacat

SEQ ID NO: 26383 - DNA, 25 bp, Probe sequence
tatctatgagttaagaggtgatgga

SEQ ID NO: 26384 - DNA, 25 bp, Probe sequence
tacacttatcttaggtgcttgtgga

SEQ ID NO: 26385 - DNA, 25 bp, Probe sequence
agtacacttatcttaggtgcttgtg

SEQ ID NO: 26386 - DNA, 25 bp, Probe sequence
aagtacacttatcttaggtgcttgt

SEQ ID NO: 26387 - DNA, 25 bp, Probe sequence
ttattatctggattggcgaatggtc

SEQ ID NO: 26388 - DNA, 25 bp, Probe sequence
tggcgaatggtcttatcaatatgaa

SEQ ID NO: 26389 - DNA, 25 bp, Probe sequence
ttggcgaatggtcttatcaatatga

SEQ ID NO: 26390 - DNA, 25 bp, Probe sequence
tatctggattggcgaatggtcttat

SEQ ID NO: 26391 - DNA, 25 bp, Probe sequence
tattatctggattggcgaatggtct

SEQ ID NO: 26392 - DNA, 25 bp, Probe sequence
ggcgaatggtcttatcaatatgaat

SEQ ID NO: 26393 - DNA, 25 bp, Probe sequence
ttatctggattggcgaatggtctta

SEQ ID NO: 26394 - DNA, 25 bp, Probe sequence
attatctggattggcgaatggtctt

SEQ ID NO: 26395 - DNA, 25 bp, Probe sequence
atgattgtctctgtattaggaagtt

SEQ ID NO: 26396 - DNA, 25 bp, Probe sequence
tgcaacaatacataggatcattatt

SEQ ID NO: 26397 - DNA, 25 bp, Probe sequence
gcaacaatacataggatcattatta

SEQ ID NO: 26398 - DNA, 25 bp, Probe sequence
ttgcaacaatacataggatcattat

SEQ ID NO: 26399 - DNA, 25 bp, Probe sequence
cttagaatctcacaaaatatcaact

SEQ ID NO: 26400 - DNA, 25 bp, Probe sequence
tcttagaatctcacaaaatatcaac

SEQ ID NO: 26401 - DNA, 25 bp, Probe sequence
catcttagaatctcacaaaatatca

SEQ ID NO: 26402 - DNA, 25 bp, Probe sequence
agaatctcacaaaatatcaactttg

SEQ ID NO: 26403 - DNA, 25 bp, Probe sequence
ccaagatattacgacaatgaagcaa

SEQ ID NO: 26404 - DNA, 25 bp, Probe sequence
aaccaagatattacgacaatgaagc

SEQ ID NO: 26405 - DNA, 25 bp, Probe sequence
accaagatattacgacaatgaagca

SEQ ID NO: 26406 - DNA, 25 bp, Probe sequence
atcagcaacttatgtcacaattagg

SEQ ID NO: 26407 - DNA, 25 bp, Probe sequence
actatcagcaacttatgtcacaatt

SEQ ID NO: 26408 - DNA, 25 bp, Probe sequence
agactatcagcaacttatgtcacaa

SEQ ID NO: 26409 - DNA, 25 bp, Probe sequence
aagactatcagcaacttatgtcaca

SEQ ID NO: 26410 - DNA, 25 bp, Probe sequence
tgaagactatcagcaacttatgtca

SEQ ID NO: 26411 - DNA, 25 bp, Probe sequence
gaagactatcagcaacttatgtcac

SEQ ID NO: 26412 - DNA, 25 bp, Probe sequence
ggtagcttccaaatactcacagaaa

SEQ ID NO: 26413 - DNA, 25 bp, Probe sequence
gtagcttccaaatactcacagaaat

SEQ ID NO: 26414 - DNA, 25 bp, Probe sequence
agaccccaaagcattagaaataagt

SEQ ID NO: 26415 - DNA, 25 bp, Probe sequence
agtagaccccaaagcattagaaata

SEQ ID NO: 26416 - DNA, 25 bp, Probe sequence
cctaatggtagcttccaaatactca

SEQ ID NO: 26417 - DNA, 25 bp, Probe sequence
taatggtagcttccaaatactcaca

SEQ ID NO: 26418 - DNA, 25 bp, Probe sequence
ttaatacaacaagcggaaaagcaat

SEQ ID NO: 26419 - DNA, 25 bp, Probe sequence
tttaatacaacaagcggaaaagcaa

SEQ ID NO: 26420 - DNA, 25 bp, Probe sequence
cagtagaccccaaagcattagaaat

SEQ ID NO: 26421 - DNA, 25 bp, Probe sequence
ttatggtgtagtaatggcgattgta

SEQ ID NO: 26422 - DNA, 25 bp, Probe sequence
tatggtgtagtaatggcgattgtag

SEQ ID NO: 26423 - DNA, 25 bp, Probe sequence
tcagccaatccaattccaatctata

SEQ ID NO: 26424 - DNA, 25 bp, Probe sequence
tatcagccaatccaattccaatcta

SEQ ID NO: 26425 - DNA, 25 bp, Probe sequence
atcagccaatccaattccaatctat

SEQ ID NO: 26426 - DNA, 25 bp, Probe sequence
gcagtattattaacgccagtagtga

SEQ ID NO: 26427 - DNA, 25 bp, Probe sequence
cagccaatccaattccaatctatat

SEQ ID NO: 26428 - DNA, 25 bp, Probe sequence
gtatcagccaatccaattccaatct

SEQ ID NO: 26429 - DNA, 25 bp, Probe sequence
atggcattgacagcattattaggtt

SEQ ID NO: 26430 - DNA, 25 bp, Probe sequence
tcaagacttcttaactaactgccaa

SEQ ID NO: 26431 - DNA, 25 bp, Probe sequence
atcaagacttcttaactaactgcca

SEQ ID NO: 26432 - DNA, 25 bp, Probe sequence
tatcaagacttcttaactaactgcc

SEQ ID NO: 26433 - DNA, 25 bp, Probe sequence
tcgtgattatcaagacttcttaact

SEQ ID NO: 26434 - DNA, 25 bp, Probe sequence
agacttcttaactaactgccaaatt

SEQ ID NO: 26435 - DNA, 25 bp, Probe sequence
caagacttcttaactaactgccaaa

SEQ ID NO: 26436 - DNA, 25 bp, Probe sequence
agaaacagaaacagtcgctaacttt

SEQ ID NO: 26437 - DNA, 25 bp, Probe sequence
ttatcaagacttcttaactaactgc

SEQ ID NO: 26438 - DNA, 25 bp, Probe sequence
gagaaacagaaacagtcgctaactt

SEQ ID NO: 26439 - DNA, 25 bp, Probe sequence
atattgctgagaacttaggtaggct

SEQ ID NO: 26440 - DNA, 25 bp, Probe sequence
tattgctgagaacttaggtaggctt

SEQ ID NO: 26441 - DNA, 25 bp, Probe sequence
ctgctagtggacaagatagtgaatg

SEQ ID NO: 26442 - DNA, 25 bp, Probe sequence
atatggcttagcagatatggaagtg

SEQ ID NO: 26443 - DNA, 25 bp, Probe sequence
aatgcgagtacaggttcatatacag

SEQ ID NO: 26444 - DNA, 25 bp, Probe sequence
tctgctagtggacaagatagtgaat

SEQ ID NO: 26445 - DNA, 25 bp, Probe sequence
atgcctgattcattacatgctattg

SEQ ID NO: 26446 - DNA, 25 bp, Probe sequence
tatggcttagcagatatggaagtgt

SEQ ID NO: 26447 - DNA, 25 bp, Probe sequence
aatattgctgagaacttaggtaggc

SEQ ID NO: 26448 - DNA, 25 bp, Probe sequence
tgattggatgaaagtttatcgttgc

SEQ ID NO: 26449 - DNA, 25 bp, Probe sequence
attccaattacaacctggtgatatt

SEQ ID NO: 26450 - DNA, 25 bp, Probe sequence
aattccaattacaacctggtgatat

SEQ ID NO: 26451 - DNA, 25 bp, Probe sequence
gatgacaaattccaattacaacctg

SEQ ID NO: 26452 - DNA, 25 bp, Probe sequence
agatgacaaattccaattacaacct

SEQ ID NO: 26453 - DNA, 25 bp, Probe sequence
acttatattattcgttgtcgtatcc

SEQ ID NO: 26454 - DNA, 25 bp, Probe sequence
ttccaattacaacctggtgatatta

SEQ ID NO: 26455 - DNA, 25 bp, Probe sequence
atgattggatgaaagtttatcgttg

SEQ ID NO: 26456 - DNA, 25 bp, Probe sequence
aagatgacaaattccaattacaacc

SEQ ID NO: 26457 - DNA, 25 bp, Probe sequence
aaggaatacagttggttgctaatgc

SEQ ID NO: 26458 - DNA, 25 bp, Probe sequence
aaaggaatacagttggttgctaatg

SEQ ID NO: 26459 - DNA, 25 bp, Probe sequence
caaaggaatacagttggatgctaac

SEQ ID NO: 26460 - DNA, 25 bp, Probe sequence
caaaggaatacagttggttgctaat

SEQ ID NO: 26461 - DNA, 25 bp, Probe sequence
acaaaggaatacagttggatgctaa

SEQ ID NO: 26462 - DNA, 25 bp, Probe sequence
gacaaaggaatacagttggatgcta

SEQ ID NO: 26463 - DNA, 25 bp, Probe sequence
acaaaggaatacagttggttgctaa

SEQ ID NO: 26464 - DNA, 25 bp, Probe sequence
aaaggaatacagttggatgctaacg

SEQ ID NO: 26465 - DNA, 25 bp, Probe sequence
gacaaaggaatacagttggttgcta

SEQ ID NO: 26466 - DNA, 25 bp, Probe sequence
gctccaacttcttctaattgttctt

SEQ ID NO: 26467 - DNA, 25 bp, Probe sequence
agctccaacttcttctaattgttct

SEQ ID NO: 26468 - DNA, 25 bp, Probe sequence
attctacagtagctccaacttcttc

SEQ ID NO: 26469 - DNA, 25 bp, Probe sequence
tctacagtagctccaacttcttcta

SEQ ID NO: 26470 - DNA, 25 bp, Probe sequence
agtagctccaacttcttctaattgt

SEQ ID NO: 26471 - DNA, 25 bp, Probe sequence
acagtagctccaacttcttctaatt

SEQ ID NO: 26472 - DNA, 25 bp, Probe sequence
aattctacagtagctccaacttctt

SEQ ID NO: 26473 - DNA, 25 bp, Probe sequence
ctacagtagctccaacttcttctaa

SEQ ID NO: 26474 - DNA, 25 bp, Probe sequence
cagtagctccaacttcttctaattg

SEQ ID NO: 26475 - DNA, 25 bp, Probe sequence
attccagcaaccatagccattatag

SEQ ID NO: 26476 - DNA, 25 bp, Probe sequence
cattccagcaaccatagccattata

SEQ ID NO: 26477 - DNA, 25 bp, Probe sequence
tccagcaaccatagccattatagat

SEQ ID NO: 26478 - DNA, 25 bp, Probe sequence
ttccagcaaccatagccattataga

SEQ ID NO: 26479 - DNA, 25 bp, Probe sequence
ccagcaaccatagccattatagatg

SEQ ID NO: 26480 - DNA, 25 bp, Probe sequence
ttgttgttgctaatccaattccata

SEQ ID NO: 26481 - DNA, 25 bp, Probe sequence
tgttgttgctaatccaattccatat

SEQ ID NO: 26482 - DNA, 25 bp, Probe sequence
tactactgtagcgacgacgatgata

SEQ ID NO: 26483 - DNA, 25 bp, Probe sequence
ctactgtagcgacgacgatgatatg

SEQ ID NO: 26484 - DNA, 25 bp, Probe sequence
tactcatcgtatcctttaccattgc

SEQ ID NO: 26485 - DNA, 25 bp, Probe sequence
tttagatgatttatgttggctcctg

SEQ ID NO: 26486 - DNA, 25 bp, Probe sequence
ttagatgatttatgttggctcctgc

SEQ ID NO: 26487 - DNA, 25 bp, Probe sequence
ctcctgcctggtattatcatttgtg

SEQ ID NO: 26488 - DNA, 25 bp, Probe sequence
cctggtattatcatttgtggtgtga

SEQ ID NO: 26489 - DNA, 25 bp, Probe sequence
atttagatgatttatgttggctcct

SEQ ID NO: 26490 - DNA, 25 bp, Probe sequence
catttgtggtgtgatactcatcgta

SEQ ID NO: 26491 - DNA, 25 bp, Probe sequence
ctgcctggtattatcatttgtggtg

SEQ ID NO: 26492 - DNA, 25 bp, Probe sequence
gatttagatgatttatgttggctcc

SEQ ID NO: 26493 - DNA, 25 bp, Probe sequence
gttgtagtagccgtaatgttgttag

SEQ ID NO: 26494 - DNA, 25 bp, Probe sequence
tgttgtagtagccgtaatgttgtta

SEQ ID NO: 26495 - DNA, 25 bp, Probe sequence
ttgtagtagccgtaatgttgttagc

SEQ ID NO: 26496 - DNA, 25 bp, Probe sequence
ctgttgtagtagccgtaatgttgtt

SEQ ID NO: 26497 - DNA, 25 bp, Probe sequence
gtagtagccgtaatgttgttagcat

SEQ ID NO: 26498 - DNA, 25 bp, Probe sequence
ggttggtatcatcgtaggttcaatt

SEQ ID NO: 26499 - DNA, 25 bp, Probe sequence
gttggtatcatcgtaggttcaatta

SEQ ID NO: 26500 - DNA, 25 bp, Probe sequence
tgtagtagccgtaatgttgttagca

SEQ ID NO: 26501 - DNA, 25 bp, Probe sequence
ttggtatcatcgtaggttcaattaa

SEQ ID NO: 26502 - DNA, 25 bp, Probe sequence
atgagtacaaatgacgctagtaaca

SEQ ID NO: 26503 - DNA, 25 bp, Probe sequence
tgagtacaaatgacgctagtaacat

SEQ ID NO: 26504 - DNA, 25 bp, Probe sequence
gagtacaaatgacgctagtaacata

SEQ ID NO: 26505 - DNA, 25 bp, Probe sequence
gacgctagtaacataatttcaaaca

SEQ ID NO: 26506 - DNA, 25 bp, Probe sequence
agtacaaatgacgctagtaacataa

SEQ ID NO: 26507 - DNA, 25 bp, Probe sequence
tgacgctagtaacataatttcaaac

SEQ ID NO: 26508 - DNA, 25 bp, Probe sequence
acgctagtaacataatttcaaacat

SEQ ID NO: 26509 - DNA, 25 bp, Probe sequence
gtacaaatgacgctagtaacataat

SEQ ID NO: 26510 - DNA, 25 bp, Probe sequence
aagagcctatcacgccaacacttaa

SEQ ID NO: 26511 - DNA, 25 bp, Probe sequence
attacgacagcacttgttgtatcaa

SEQ ID NO: 26512 - DNA, 25 bp, Probe sequence
agatataatggcaatgagcatgatt

SEQ ID NO: 26513 - DNA, 25 bp, Probe sequence
aagatataatggcaatgagcatgat

SEQ ID NO: 26514 - DNA, 25 bp, Probe sequence
cattacgacagcacttgttgtatca

SEQ ID NO: 26515 - DNA, 25 bp, Probe sequence
acattacgacagcacttgttgtatc

SEQ ID NO: 26516 - DNA, 25 bp, Probe sequence
gacattacgacagcacttgttgtat

SEQ ID NO: 26517 - DNA, 25 bp, Probe sequence
aattgacattacgacagcacttgtt

SEQ ID NO: 26518 - DNA, 25 bp, Probe sequence
gcgtgatattgaaacagaacttaca

SEQ ID NO: 26519 - DNA, 25 bp, Probe sequence
agcgtgatattgaaacagaacttac

SEQ ID NO: 26520 - DNA, 25 bp, Probe sequence
ttacatcaatatcaagcagaacgga

SEQ ID NO: 26521 - DNA, 25 bp, Probe sequence
attacatcaatatcaagcagaacgg

SEQ ID NO: 26522 - DNA, 25 bp, Probe sequence
tacatcaatatcaagcagaacggat

SEQ ID NO: 26523 - DNA, 25 bp, Probe sequence
atcaatatcaagcagaacggatctt

SEQ ID NO: 26524 - DNA, 25 bp, Probe sequence
acatcaatatcaagcagaacggatc

SEQ ID NO: 26525 - DNA, 25 bp, Probe sequence
aattacatcaatatcaagcagaacg

SEQ ID NO: 26526 - DNA, 25 bp, Probe sequence
catcaatatcaagcagaacggatct

SEQ ID NO: 26527 - DNA, 25 bp, Probe sequence
tgagtaaggtgtattacatcgcaat

SEQ ID NO: 26528 - DNA, 25 bp, Probe sequence
gagtaaggtgtattacatcgcaatc

SEQ ID NO: 26529 - DNA, 25 bp, Probe sequence
aaagtgaaatgttgttagatggtgt

SEQ ID NO: 26530 - DNA, 25 bp, Probe sequence
aagtgaaatgttgttagatggtgta

SEQ ID NO: 26531 - DNA, 25 bp, Probe sequence
gtgaaatgttgttagatggtgtacc

SEQ ID NO: 26532 - DNA, 25 bp, Probe sequence
atgtttcacttgactgggaatgttt

SEQ ID NO: 26533 - DNA, 25 bp, Probe sequence
aatgtttcacttgactgggaatgtt

SEQ ID NO: 26534 - DNA, 25 bp, Probe sequence
aaatgtttcacttgactgggaatgt

SEQ ID NO: 26535 - DNA, 25 bp, Probe sequence
agtgaaatgttgttagatggtgtac

SEQ ID NO: 26536 - DNA, 25 bp, Probe sequence
gcactaatacatcataattggtact

SEQ ID NO: 26537 - DNA, 25 bp, Probe sequence
tgcactaatacatcataattggtac

SEQ ID NO: 26538 - DNA, 25 bp, Probe sequence
aacattgtcattgaagaggatggaa

SEQ ID NO: 26539 - DNA, 25 bp, Probe sequence
tattggcaacattgtcattgaagag

SEQ ID NO: 26540 - DNA, 25 bp, Probe sequence
atattggcaacattgtcattgaaga

SEQ ID NO: 26541 - DNA, 25 bp, Probe sequence
gatattggcaacattgtcattgaag

SEQ ID NO: 26542 - DNA, 25 bp, Probe sequence
tgatattggcaacattgtcattgaa

SEQ ID NO: 26543 - DNA, 25 bp, Probe sequence
ttgatattggcaacattgtcattga

SEQ ID NO: 26544 - DNA, 25 bp, Probe sequence
caacattgtcattgaagaggatgga

SEQ ID NO: 26545 - DNA, 25 bp, Probe sequence
taatattgctaacttcagaggacgg

SEQ ID NO: 26546 - DNA, 25 bp, Probe sequence
ttaatattgctaacttcagaggacg

SEQ ID NO: 26547 - DNA, 25 bp, Probe sequence
attgtgctgttgttaattcttgtat

SEQ ID NO: 26548 - DNA, 25 bp, Probe sequence
atattgtgctgttgttaattcttgt

SEQ ID NO: 26549 - DNA, 25 bp, Probe sequence
ccttgtatacgcattaattcacgaa

SEQ ID NO: 26550 - DNA, 25 bp, Probe sequence
ttgtgctgttgttaattcttgtata

SEQ ID NO: 26551 - DNA, 25 bp, Probe sequence
tattgtgctgttgttaattcttgta

SEQ ID NO: 26552 - DNA, 25 bp, Probe sequence
tccttgtatacgcattaattcacga

SEQ ID NO: 26553 - DNA, 25 bp, Probe sequence
atccttgtatacgcattaattcacg

SEQ ID NO: 26554 - DNA, 25 bp, Probe sequence
ttgtatacgcattaattcacgaact

SEQ ID NO: 26555 - DNA, 25 bp, Probe sequence
tgctgttgttaattcttgtatacgt

SEQ ID NO: 26556 - DNA, 25 bp, Probe sequence
taacaacgatagacaaagcaacaac

SEQ ID NO: 26557 - DNA, 25 bp, Probe sequence
gtaacaacgatagacaaagcaacaa

SEQ ID NO: 26558 - DNA, 25 bp, Probe sequence
acgatagacaaagcaacaacagata

SEQ ID NO: 26559 - DNA, 25 bp, Probe sequence
agtaacaacgatagacaaagcaaca

SEQ ID NO: 26560 - DNA, 25 bp, Probe sequence
tgatttaatgttagacgcaggagac

SEQ ID NO: 26561 - DNA, 25 bp, Probe sequence
aacgatagacaaagcaacaacagat

SEQ ID NO: 26562 - DNA, 25 bp, Probe sequence
gtaaggtgacacgctatgatttaat

SEQ ID NO: 26563 - DNA, 25 bp, Probe sequence
attaccatttggaaatacgattgcg

SEQ ID NO: 26564 - DNA, 25 bp, Probe sequence
gtgtcatcggtatggctaaattaaa

SEQ ID NO: 26565 - DNA, 25 bp, Probe sequence
tagaatacaagggcaactaaatgga

SEQ ID NO: 26566 - DNA, 25 bp, Probe sequence
gaatacaagggcaactaaatggaat

SEQ ID NO: 26567 - DNA, 25 bp, Probe sequence
agaatacaagggcaactaaatggaa

SEQ ID NO: 26568 - DNA, 25 bp, Probe sequence
atagaatacaagggcaactaaatgg

SEQ ID NO: 26569 - DNA, 25 bp, Probe sequence
acaagggcaactaaatggaattatt

SEQ ID NO: 26570 - DNA, 25 bp, Probe sequence
aatacaagggcaactaaatggaatt

SEQ ID NO: 26571 - DNA, 25 bp, Probe sequence
tacaagggcaactaaatggaattat

SEQ ID NO: 26572 - DNA, 25 bp, Probe sequence
atacaagggcaactaaatggaatta

SEQ ID NO: 26573 - DNA, 25 bp, Probe sequence
caagggcaactaaatggaattatta

SEQ ID NO: 26574 - DNA, 25 bp, Probe sequence
aagttattgcggaaggtaatgtcat

SEQ ID NO: 26575 - DNA, 25 bp, Probe sequence
agttattgcggaaggtaatgtcatt

SEQ ID NO: 26576 - DNA, 25 bp, Probe sequence
gttattgcggaaggtaatgtcatta

SEQ ID NO: 26577 - DNA, 25 bp, Probe sequence
tggattaatagtatcttgtcaggca

SEQ ID NO: 26578 - DNA, 25 bp, Probe sequence
ctagttatacgcaaggacaattact

SEQ ID NO: 26579 - DNA, 25 bp, Probe sequence
ggattaatagtatcttgtcaggcac

SEQ ID NO: 26580 - DNA, 25 bp, Probe sequence
tagttatacgcaaggacaattactt

SEQ ID NO: 26581 - DNA, 25 bp, Probe sequence
gattatattggcacgacgttacatg

SEQ ID NO: 26582 - DNA, 25 bp, Probe sequence
gaactgatagaaagccaatgtgaag

SEQ ID NO: 26583 - DNA, 25 bp, Probe sequence
tggtaaccgcaattattcatggatt

SEQ ID NO: 26584 - DNA, 25 bp, Probe sequence
atggtaaccgcaattattcatggat

SEQ ID NO: 26585 - DNA, 25 bp, Probe sequence
ttcattactcaatccacatgctatt

SEQ ID NO: 26586 - DNA, 25 bp, Probe sequence
tagtagtgctgcattatatagtggc

SEQ ID NO: 26587 - DNA, 25 bp, Probe sequence
atggatttatcttagcgattggtct

SEQ ID NO: 26588 - DNA, 25 bp, Probe sequence
tggatttatcttagcgattggtcta

SEQ ID NO: 26589 - DNA, 25 bp, Probe sequence
tttcttgatgtatatggcttggacc

SEQ ID NO: 26590 - DNA, 25 bp, Probe sequence
tggtagtagtgctgcattatatagt

SEQ ID NO: 26591 - DNA, 25 bp, Probe sequence
gtagtagtgctgcattatatagtgg

SEQ ID NO: 26592 - DNA, 25 bp, Probe sequence
gaacgacaatatcctaaatggcaag

SEQ ID NO: 26593 - DNA, 25 bp, Probe sequence
acctcactttatttacggacatact

SEQ ID NO: 26594 - DNA, 25 bp, Probe sequence
agagtatgtcgtactatacctcact

SEQ ID NO: 26595 - DNA, 25 bp, Probe sequence
aacgacaatatcctaaatggcaagt

SEQ ID NO: 26596 - DNA, 25 bp, Probe sequence
gagtatgtcgtactatacctcactt

SEQ ID NO: 26597 - DNA, 25 bp, Probe sequence
tacgaacgacaatatcctaaatggc

SEQ ID NO: 26598 - DNA, 25 bp, Probe sequence
ttacgaacgacaatatcctaaatgg

SEQ ID NO: 26599 - DNA, 25 bp, Probe sequence
acgacaatatcctaaatggcaagtg

SEQ ID NO: 26600 - DNA, 25 bp, Probe sequence
tagagtatgtcgtactatacctcac

SEQ ID NO: 26601 - DNA, 25 bp, Probe sequence
tgactgacaccttaatacatgacat

SEQ ID NO: 26602 - DNA, 25 bp, Probe sequence
aacaatgactgacaccttaatacat

SEQ ID NO: 26603 - DNA, 25 bp, Probe sequence
atgactgacaccttaatacatgaca

SEQ ID NO: 26604 - DNA, 25 bp, Probe sequence
gactgacaccttaatacatgacatt

SEQ ID NO: 26605 - DNA, 25 bp, Probe sequence
acaatgactgacaccttaatacatg

SEQ ID NO: 26606 - DNA, 25 bp, Probe sequence
aatgactgacaccttaatacatgac

SEQ ID NO: 26607 - DNA, 25 bp, Probe sequence
caatgactgacaccttaatacatga

SEQ ID NO: 26608 - DNA, 25 bp, Probe sequence
tcactcaagattcacattatagtca

SEQ ID NO: 26609 - DNA, 25 bp, Probe sequence
gtcaaacaacataggtgctaaagtt

SEQ ID NO: 26610 - DNA, 25 bp, Probe sequence
atcacaacattagcaacaccacata

SEQ ID NO: 26611 - DNA, 25 bp, Probe sequence
tcacaacattagcaacaccacataa

SEQ ID NO: 26612 - DNA, 25 bp, Probe sequence
ttaatgttacgaatgatgaacctgc

SEQ ID NO: 26613 - DNA, 25 bp, Probe sequence
cacaacattagcaacaccacataat

SEQ ID NO: 26614 - DNA, 25 bp, Probe sequence
catcaatcacaacattagcaacacc

SEQ ID NO: 26615 - DNA, 25 bp, Probe sequence
atcaatcacaacattagcaacacca

SEQ ID NO: 26616 - DNA, 25 bp, Probe sequence
cattattcactggtggtcataacaa

SEQ ID NO: 26617 - DNA, 25 bp, Probe sequence
aatcacaacattagcaacaccacat

SEQ ID NO: 26618 - DNA, 25 bp, Probe sequence
gcatcaatcacaacattagcaacac

SEQ ID NO: 26619 - DNA, 25 bp, Probe sequence
acaagaattaacaacagcacaatat

SEQ ID NO: 26620 - DNA, 25 bp, Probe sequence
atacaagaattaacaacagcacaat

SEQ ID NO: 26621 - DNA, 25 bp, Probe sequence
tacaagaattaacaacagcacaata

SEQ ID NO: 26622 - DNA, 25 bp, Probe sequence
tatacaagaattaacaacagcacaa

SEQ ID NO: 26623 - DNA, 25 bp, Probe sequence
acgtatacaagaattaacaacagca

SEQ ID NO: 26624 - DNA, 25 bp, Probe sequence
cgtatacaagaattaacaacagcac

SEQ ID NO: 26625 - DNA, 25 bp, Probe sequence
gtatacaagaattaacaacagcaca

SEQ ID NO: 26626 - DNA, 25 bp, Probe sequence
caagaattaacaacagcacaatata

SEQ ID NO: 26627 - DNA, 25 bp, Probe sequence
aagaattaacaacagcacaatataa

SEQ ID NO: 26628 - DNA, 25 bp, Probe sequence
ctcatccagaagtaacactaacagt

SEQ ID NO: 26629 - DNA, 25 bp, Probe sequence
atgctcatccagaagtaacactaac

SEQ ID NO: 26630 - DNA, 25 bp, Probe sequence
gctcatccagaagtaacactaacag

SEQ ID NO: 26631 - DNA, 25 bp, Probe sequence
gatgctcatccagaagtaacactaa

SEQ ID NO: 26632 - DNA, 25 bp, Probe sequence
tgctcatccagaagtaacactaaca

SEQ ID NO: 26633 - DNA, 25 bp, Probe sequence
actaacagtgagactagaagatgat

SEQ ID NO: 26634 - DNA, 25 bp, Probe sequence
tgatgctcatccagaagtaacacta

SEQ ID NO: 26635 - DNA, 25 bp, Probe sequence
attatgaaactaaagcgacgaatgt

SEQ ID NO: 26636 - DNA, 25 bp, Probe sequence
acattatgaaactaaagcgacgaat

SEQ ID NO: 26637 - DNA, 25 bp, Probe sequence
cgtgatgaattagaagatgtagttg

SEQ ID NO: 26638 - DNA, 25 bp, Probe sequence
tcgtgatgaattagaagatgtagtt

SEQ ID NO: 26639 - DNA, 25 bp, Probe sequence
atcgtgatgaattagaagatgtagt

SEQ ID NO: 26640 - DNA, 25 bp, Probe sequence
tcgtgctatggatttatggattgac

SEQ ID NO: 26641 - DNA, 25 bp, Probe sequence
gtcgtgctatggatttatggattga

SEQ ID NO: 26642 - DNA, 25 bp, Probe sequence
ctgtcgtgctatggatttatggatt

SEQ ID NO: 26643 - DNA, 25 bp, Probe sequence
actgttaatcgtgatgaattagaag

SEQ ID NO: 26644 - DNA, 25 bp, Probe sequence
tgtcgtgctatggatttatggattg

SEQ ID NO: 26645 - DNA, 25 bp, Probe sequence
gtgctatggatttatggattgaccc

SEQ ID NO: 26646 - DNA, 25 bp, Probe sequence
cacttcattcacgacctttcttaaa

SEQ ID NO: 26647 - DNA, 25 bp, Probe sequence
acttcattcacgacctttcttaaat

SEQ ID NO: 26648 - DNA, 25 bp, Probe sequence
ccacttcattcacgacctttcttaa

SEQ ID NO: 26649 - DNA, 25 bp, Probe sequence
agtcttataccaatatcgacagtct

SEQ ID NO: 26650 - DNA, 25 bp, Probe sequence
cttcattcacgacctttcttaaata

SEQ ID NO: 26651 - DNA, 25 bp, Probe sequence
ctgacgttgtattagtcttatacca

SEQ ID NO: 26652 - DNA, 25 bp, Probe sequence
actgacgttgtattagtcttatacc

SEQ ID NO: 26653 - DNA, 25 bp, Probe sequence
gtcttataccaatatcgacagtcta

SEQ ID NO: 26654 - DNA, 25 bp, Probe sequence
tagtcttataccaatatcgacagtc

SEQ ID NO: 26655 - DNA, 25 bp, Probe sequence
agccacatatcattactctctcaac

SEQ ID NO: 26656 - DNA, 25 bp, Probe sequence
gccacatatcattactctctcaaca

SEQ ID NO: 26657 - DNA, 25 bp, Probe sequence
atatcattactctctcaacaaggcg

SEQ ID NO: 26658 - DNA, 25 bp, Probe sequence
catatcattactctctcaacaaggc

SEQ ID NO: 26659 - DNA, 25 bp, Probe sequence
acatagccacatatcattactctct

SEQ ID NO: 26660 - DNA, 25 bp, Probe sequence
tagccacatatcattactctctcaa

SEQ ID NO: 26661 - DNA, 25 bp, Probe sequence
tgaatgataagacacctactacact

SEQ ID NO: 26662 - DNA, 25 bp, Probe sequence
actgaatgataagacacctactaca

SEQ ID NO: 26663 - DNA, 25 bp, Probe sequence
gacatagccacatatcattactctc

SEQ ID NO: 26664 - DNA, 25 bp, Probe sequence
attatattggacatgatggtgttgg

SEQ ID NO: 26665 - DNA, 25 bp, Probe sequence
ttatattggacatgatggtgttggc

SEQ ID NO: 26666 - DNA, 25 bp, Probe sequence
tgattatattggacatgatggtgtt

SEQ ID NO: 26667 - DNA, 25 bp, Probe sequence
ttgattatattggacatgatggtgt

SEQ ID NO: 26668 - DNA, 25 bp, Probe sequence
gattatattggacatgatggtgttg

SEQ ID NO: 26669 - DNA, 25 bp, Probe sequence
attgattatattggacatgatggtg

SEQ ID NO: 26670 - DNA, 25 bp, Probe sequence
gattgattatattggacatgatggt

SEQ ID NO: 26671 - DNA, 25 bp, Probe sequence
tgattgattatattggacatgatgg

SEQ ID NO: 26672 - DNA, 25 bp, Probe sequence
tgtggattgcggtcgattatttata

SEQ ID NO: 26673 - DNA, 25 bp, Probe sequence
agattcagatagcgattcagattcc

SEQ ID NO: 26674 - DNA, 25 bp, Probe sequence
gagtgattcggattcagatagtgat

SEQ ID NO: 26675 - DNA, 25 bp, Probe sequence
gattcagatagcgattcagattccg

SEQ ID NO: 26676 - DNA, 25 bp, Probe sequence
agtgattcggattcagatagtgatt

SEQ ID NO: 26677 - DNA, 25 bp, Probe sequence
gtgattcggattcagatagtgattc

SEQ ID NO: 26678 - DNA, 25 bp, Probe sequence
attcagatagcgattcagattccga

SEQ ID NO: 26679 - DNA, 25 bp, Probe sequence
atggtcatattgatccgaatagcaa

SEQ ID NO: 26680 - DNA, 25 bp, Probe sequence
aatggtcatattgatccgaatagca

SEQ ID NO: 26681 - DNA, 25 bp, Probe sequence
agcatcaataggttcattactactt

SEQ ID NO: 26682 - DNA, 25 bp, Probe sequence
agattccgatagcgattctgactca

SEQ ID NO: 26683 - DNA, 25 bp, Probe sequence
tgactcagattccgatagcgattct

SEQ ID NO: 26684 - DNA, 25 bp, Probe sequence
gattccgatagcgattctgactcag

SEQ ID NO: 26685 - DNA, 25 bp, Probe sequence
cagattccgatagcgattctgactc

SEQ ID NO: 26686 - DNA, 25 bp, Probe sequence
gactcagattccgatagcgattctg

SEQ ID NO: 26687 - DNA, 25 bp, Probe sequence
gatagcgattctgactcagacagtg

SEQ ID NO: 26688 - DNA, 25 bp, Probe sequence
atagcgattctgactcagacagtga

SEQ ID NO: 26689 - DNA, 25 bp, Probe sequence
attccgatagcgattctgactcaga

SEQ ID NO: 26690 - DNA, 25 bp, Probe sequence
tagcgattctgactcagacagtgac

SEQ ID NO: 26691 - DNA, 25 bp, Probe sequence
cgattcagattcagacagcgattct

SEQ ID NO: 26692 - DNA, 25 bp, Probe sequence
gattcagattcagacagcgattctg

SEQ ID NO: 26693 - DNA, 25 bp, Probe sequence
cagatagtgcctcagattcagatag

SEQ ID NO: 26694 - DNA, 25 bp, Probe sequence
tcagatagtgcctcagattcagata

SEQ ID NO: 26695 - DNA, 25 bp, Probe sequence
gtgagtgattctaatacaacgacaa

SEQ ID NO: 26696 - DNA, 25 bp, Probe sequence
atcagataacgactcagactcagaa

SEQ ID NO: 26697 - DNA, 25 bp, Probe sequence
caggttcagatagtggttcagattc

SEQ ID NO: 26698 - DNA, 25 bp, Probe sequence
tccgattcaggttctaacaataatg

SEQ ID NO: 26699 - DNA, 25 bp, Probe sequence
cgattccgattcaggttctaacaat

SEQ ID NO: 26700 - DNA, 25 bp, Probe sequence
gattccgattcaggttctaacaata

SEQ ID NO: 26701 - DNA, 25 bp, Probe sequence
ctcagatagtgcctcagattcagat

SEQ ID NO: 26702 - DNA, 25 bp, Probe sequence
cggagataagaaagaagaaagcaag

SEQ ID NO: 26703 - DNA, 25 bp, Probe sequence
aacgacggagataagaaagaagaaa

SEQ ID NO: 26704 - DNA, 25 bp, Probe sequence
acggagataagaaagaagaaagcaa

SEQ ID NO: 26705 - DNA, 25 bp, Probe sequence
acgacggagataagaaagaagaaag

SEQ ID NO: 26706 - DNA, 25 bp, Probe sequence
agataagaaagaagaaagcaagagc

SEQ ID NO: 26707 - DNA, 25 bp, Probe sequence
gacggagataagaaagaagaaagca

SEQ ID NO: 26708 - DNA, 25 bp, Probe sequence
acgatgaattaggtaaagaaagtgc

SEQ ID NO: 26709 - DNA, 25 bp, Probe sequence
caacgacggagataagaaagaagaa

SEQ ID NO: 26710 - DNA, 25 bp, Probe sequence
ggagataagaaagaagaaagcaaga

SEQ ID NO: 26711 - DNA, 25 bp, Probe sequence
tggaagatatgaaagaactttattc

SEQ ID NO: 26712 - DNA, 25 bp, Probe sequence
acctaattgatagagaacaaaagta

SEQ ID NO: 26713 - DNA, 25 bp, Probe sequence
tacctaattgatagagaacaaaagt

SEQ ID NO: 26714 - DNA, 25 bp, Probe sequence
tgatagagaacaaaagtatttagct

SEQ ID NO: 26715 - DNA, 25 bp, Probe sequence
ttgatagagaacaaaagtatttagc

SEQ ID NO: 26716 - DNA, 25 bp, Probe sequence
ctacctaattgatagagaacaaaag

SEQ ID NO: 26717 - DNA, 25 bp, Probe sequence
tctacctaattgatagagaacaaaa

SEQ ID NO: 26718 - DNA, 25 bp, Probe sequence
aaaagttctctacctaattgataga

SEQ ID NO: 26719 - DNA, 25 bp, Probe sequence
ctctacctaattgatagagaacaaa

SEQ ID NO: 26720 - DNA, 25 bp, Probe sequence
aaagttctctacctaattgatagag

SEQ ID NO: 26721 - DNA, 25 bp, Probe sequence
tcactatggcgagtattctattaca

SEQ ID NO: 26722 - DNA, 25 bp, Probe sequence
ctcactatggcgagtattctattac

SEQ ID NO: 26723 - DNA, 25 bp, Probe sequence
cactatggcgagtattctattacat

SEQ ID NO: 26724 - DNA, 25 bp, Probe sequence
ttagaccaatcgaagttcaacaatc

SEQ ID NO: 26725 - DNA, 25 bp, Probe sequence
aagccgaagtgttatacgaagaact

SEQ ID NO: 26726 - DNA, 25 bp, Probe sequence
taaagccgaagtgttatacgaagaa

SEQ ID NO: 26727 - DNA, 25 bp, Probe sequence
gcgagtattctattacatttgagcc

SEQ ID NO: 26728 - DNA, 25 bp, Probe sequence
ggcgagtattctattacatttgagc

SEQ ID NO: 26729 - DNA, 25 bp, Probe sequence
tattacatttgagccgttgagagtt

SEQ ID NO: 26730 - DNA, 25 bp, Probe sequence
agaaagtatgcggagttagttagaa

SEQ ID NO: 26731 - DNA, 25 bp, Probe sequence
gaaagtatgcggagttagttagaaa

SEQ ID NO: 26732 - DNA, 25 bp, Probe sequence
tagaaagtatgcggagttagttaga

SEQ ID NO: 26733 - DNA, 25 bp, Probe sequence
ttgaaattagaaagtatgcggagtt

SEQ ID NO: 26734 - DNA, 25 bp, Probe sequence
attgaaattagaaagtatgcggagt

SEQ ID NO: 26735 - DNA, 25 bp, Probe sequence
ctaagtgaattagctcgtcgtgtag

SEQ ID NO: 26736 - DNA, 25 bp, Probe sequence
taagtgaattagctcgtcgtgtagg

SEQ ID NO: 26737 - DNA, 25 bp, Probe sequence
ttagaaagtatgcggagttagttag

SEQ ID NO: 26738 - DNA, 25 bp, Probe sequence
aattagaaagtatgcggagttagtt

SEQ ID NO: 26739 - DNA, 25 bp, Probe sequence
tgaacgacatgatgaacctagttat

SEQ ID NO: 26740 - DNA, 25 bp, Probe sequence
atgaacgacatgatgaacctagtta

SEQ ID NO: 26741 - DNA, 25 bp, Probe sequence
gaacgacatgatgaacctagttatt

SEQ ID NO: 26742 - DNA, 25 bp, Probe sequence
acgacatgatgaacctagttattaa

SEQ ID NO: 26743 - DNA, 25 bp, Probe sequence
aacgacatgatgaacctagttatta

SEQ ID NO: 26744 - DNA, 25 bp, Probe sequence
acatgatgaacctagttattaacca

SEQ ID NO: 26745 - DNA, 25 bp, Probe sequence
cgacatgatgaacctagttattaac

SEQ ID NO: 26746 - DNA, 25 bp, Probe sequence
gacatgatgaacctagttattaacc

SEQ ID NO: 26747 - DNA, 25 bp, Probe sequence
tgaacctagttattaaccaaatcgt

SEQ ID NO: 26748 - DNA, 25 bp, Probe sequence
gaaggagaaggcatatacttatctt

SEQ ID NO: 26749 - DNA, 25 bp, Probe sequence
catcaggatattctcatggatcaat

SEQ ID NO: 26750 - DNA, 25 bp, Probe sequence
tatgtcgctaaatgaaatgtttgct

SEQ ID NO: 26751 - DNA, 25 bp, Probe sequence
ttatgtcgctaaatgaaatgtttgc

SEQ ID NO: 26752 - DNA, 25 bp, Probe sequence
gcattaactttatcttccgaactca

SEQ ID NO: 26753 - DNA, 25 bp, Probe sequence
agcattaactttatcttccgaactc

SEQ ID NO: 26754 - DNA, 25 bp, Probe sequence
gagcattaactttatcttccgaact

SEQ ID NO: 26755 - DNA, 25 bp, Probe sequence
gaatcaaggatggtcaaagataagt

SEQ ID NO: 26756 - DNA, 25 bp, Probe sequence
agagcattaactttatcttccgaac

SEQ ID NO: 26757 - DNA, 25 bp, Probe sequence
aatgtcagtcataaagtcgctaaac

SEQ ID NO: 26758 - DNA, 25 bp, Probe sequence
ggtaatgtcagtcataaagtcgcta

SEQ ID NO: 26759 - DNA, 25 bp, Probe sequence
attggtaatgtcagtcataaagtcg

SEQ ID NO: 26760 - DNA, 25 bp, Probe sequence
aaatggaaattggtaatgtcagtca

SEQ ID NO: 26761 - DNA, 25 bp, Probe sequence
gtttgaatatctggcaagaaatgga

SEQ ID NO: 26762 - DNA, 25 bp, Probe sequence
tggtttgaatatctggcaagaaatg

SEQ ID NO: 26763 - DNA, 25 bp, Probe sequence
gtggtttgaatatctggcaagaaat

SEQ ID NO: 26764 - DNA, 25 bp, Probe sequence
gtaatgtcagtcataaagtcgctaa

SEQ ID NO: 26765 - DNA, 25 bp, Probe sequence
agaaatggaaattggtaatgtcagt

SEQ ID NO: 26766 - DNA, 25 bp, Probe sequence
taacaagaacattgatagcaagtgc

SEQ ID NO: 26767 - DNA, 25 bp, Probe sequence
aagccgattaataccgatagtgtta

SEQ ID NO: 26768 - DNA, 25 bp, Probe sequence
taacaagccgattaataccgatagt

SEQ ID NO: 26769 - DNA, 25 bp, Probe sequence
ttaacaagaacattgatagcaagtg

SEQ ID NO: 26770 - DNA, 25 bp, Probe sequence
caagccgattaataccgatagtgtt

SEQ ID NO: 26771 - DNA, 25 bp, Probe sequence
aacaagccgattaataccgatagtg

SEQ ID NO: 26772 - DNA, 25 bp, Probe sequence
agccgattaataccgatagtgttaa

SEQ ID NO: 26773 - DNA, 25 bp, Probe sequence
ataacaagccgattaataccgatag

SEQ ID NO: 26774 - DNA, 25 bp, Probe sequence
aataacaagccgattaataccgata

SEQ ID NO: 26775 - DNA, 25 bp, Probe sequence
taagccaacaccatattccaactat

SEQ ID NO: 26776 - DNA, 25 bp, Probe sequence
ttaagccaacaccatattccaacta

SEQ ID NO: 26777 - DNA, 25 bp, Probe sequence
attaagccaacaccatattccaact

SEQ ID NO: 26778 - DNA, 25 bp, Probe sequence
tattaagccaacaccatattccaac

SEQ ID NO: 26779 - DNA, 25 bp, Probe sequence
aactaatatcgtgatgtggttcgtt

SEQ ID NO: 26780 - DNA, 25 bp, Probe sequence
ttattaagccaacaccatattccaa

SEQ ID NO: 26781 - DNA, 25 bp, Probe sequence
gctggtatcgctatcttaattgtta

SEQ ID NO: 26782 - DNA, 25 bp, Probe sequence
caactaatatcgtgatgtggttcgt

SEQ ID NO: 26783 - DNA, 25 bp, Probe sequence
tacatgatggttatagctggtatcg

SEQ ID NO: 26784 - DNA, 25 bp, Probe sequence
cattagcaacatctgtagtgaactt

SEQ ID NO: 26785 - DNA, 25 bp, Probe sequence
ccattagcaacatctgtagtgaact

SEQ ID NO: 26786 - DNA, 25 bp, Probe sequence
tccattagcaacatctgtagtgaac

SEQ ID NO: 26787 - DNA, 25 bp, Probe sequence
gtccattagcaacatctgtagtgaa

SEQ ID NO: 26788 - DNA, 25 bp, Probe sequence
ttagcaacatctgtagtgaacttaa

SEQ ID NO: 26789 - DNA, 25 bp, Probe sequence
tagcaacatctgtagtgaacttaat

SEQ ID NO: 26790 - DNA, 25 bp, Probe sequence
attagcaacatctgtagtgaactta

SEQ ID NO: 26791 - DNA, 25 bp, Probe sequence
ggtccattagcaacatctgtagtga

SEQ ID NO: 26792 - DNA, 25 bp, Probe sequence
catattatgcacttagtcgaagctt

SEQ ID NO: 26793 - DNA, 25 bp, Probe sequence
agatgttttaaatgcctatatccgc

SEQ ID NO: 26794 - DNA, 25 bp, Probe sequence
aagatgttttaaatgcctatatccg

SEQ ID NO: 26795 - DNA, 25 bp, Probe sequence
aacgaagatgttttaaatgcctata

SEQ ID NO: 26796 - DNA, 25 bp, Probe sequence
acgaagatgttttaaatgcctatat

SEQ ID NO: 26797 - DNA, 25 bp, Probe sequence
cgaagatgttttaaatgcctatatc

SEQ ID NO: 26798 - DNA, 25 bp, Probe sequence
aaacgaagatgttttaaatgcctat

SEQ ID NO: 26799 - DNA, 25 bp, Probe sequence
gatgttttaaatgcctatatccgcg

SEQ ID NO: 26800 - DNA, 25 bp, Probe sequence
gaagatgttttaaatgcctatatcc

SEQ ID NO: 26801 - DNA, 25 bp, Probe sequence
aaaacgaagatgttttaaatgccta

SEQ ID NO: 26802 - DNA, 25 bp, Probe sequence
atagacattatggtaagacactcgt

SEQ ID NO: 26803 - DNA, 25 bp, Probe sequence
tagacattatggtaagacactcgta

SEQ ID NO: 26804 - DNA, 25 bp, Probe sequence
gacattatggtaagacactcgtact

SEQ ID NO: 26805 - DNA, 25 bp, Probe sequence
agacattatggtaagacactcgtac

SEQ ID NO: 26806 - DNA, 25 bp, Probe sequence
ttcggtattatcggtactgatgatt

SEQ ID NO: 26807 - DNA, 25 bp, Probe sequence
aattcggtattatcggtactgatga

SEQ ID NO: 26808 - DNA, 25 bp, Probe sequence
attcggtattatcggtactgatgat

SEQ ID NO: 26809 - DNA, 25 bp, Probe sequence
acattatggtaagacactcgtactt

SEQ ID NO: 26810 - DNA, 25 bp, Probe sequence
aatagacattatggtaagacactcg

SEQ ID NO: 26811 - DNA, 25 bp, Probe sequence
gaagtgcctggtgtaatagaagtag

SEQ ID NO: 26812 - DNA, 25 bp, Probe sequence
gtgcctggtgtaatagaagtagaac

SEQ ID NO: 26813 - DNA, 25 bp, Probe sequence
agtgcctggtgtaatagaagtagaa

SEQ ID NO: 26814 - DNA, 25 bp, Probe sequence
aagtgcctggtgtaatagaagtaga

SEQ ID NO: 26815 - DNA, 25 bp, Probe sequence
agaagtgcctggtgtaatagaagta

SEQ ID NO: 26816 - DNA, 25 bp, Probe sequence
gaagaagtgcctggtgtaatagaag

SEQ ID NO: 26817 - DNA, 25 bp, Probe sequence
aagaagtgcctggtgtaatagaagt

SEQ ID NO: 26818 - DNA, 25 bp, Probe sequence
gcctggtgtaatagaagtagaacaa

SEQ ID NO: 26819 - DNA, 25 bp, Probe sequence
tgcctggtgtaatagaagtagaaca

SEQ ID NO: 26820 - DNA, 25 bp, Probe sequence
gaataaccaacaacacaacggacaa

SEQ ID NO: 26821 - DNA, 25 bp, Probe sequence
aacagaataaccaacaacacaacgg

SEQ ID NO: 26822 - DNA, 25 bp, Probe sequence
actggtaataatccgttcgacaata

SEQ ID NO: 26823 - DNA, 25 bp, Probe sequence
ctggtaataatccgttcgacaatac

SEQ ID NO: 26824 - DNA, 25 bp, Probe sequence
aactggtaataatccgttcgacaat

SEQ ID NO: 26825 - DNA, 25 bp, Probe sequence
cagaataaccaacaacacaacggac

SEQ ID NO: 26826 - DNA, 25 bp, Probe sequence
caaacagaataaccaacaacacaac

SEQ ID NO: 26827 - DNA, 25 bp, Probe sequence
acaaacagaataaccaacaacacaa

SEQ ID NO: 26828 - DNA, 25 bp, Probe sequence
aacaaacagaataaccaacaacaca

SEQ ID NO: 26829 - DNA, 25 bp, Probe sequence
tatgtagttggtgattgtgctgatt

SEQ ID NO: 26830 - DNA, 25 bp, Probe sequence
ggagccgaagaatatacacatagta

SEQ ID NO: 26831 - DNA, 25 bp, Probe sequence
caggagccgaagaatatacacatag

SEQ ID NO: 26832 - DNA, 25 bp, Probe sequence
ctatgtagttggtgattgtgctgat

SEQ ID NO: 26833 - DNA, 25 bp, Probe sequence
aggagccgaagaatatacacatagt

SEQ ID NO: 26834 - DNA, 25 bp, Probe sequence
catcaagtaccaacatatcgtaacg

SEQ ID NO: 26835 - DNA, 25 bp, Probe sequence
aaccagtatcatcaagtaccaacat

SEQ ID NO: 26836 - DNA, 25 bp, Probe sequence
atagaacttgccagcgaattaagag

SEQ ID NO: 26837 - DNA, 25 bp, Probe sequence
tctatgtagttggtgattgtgctga

SEQ ID NO: 26838 - DNA, 25 bp, Probe sequence
gttctacaatgacataccacttagc

SEQ ID NO: 26839 - DNA, 25 bp, Probe sequence
cgttctacaatgacataccacttag

SEQ ID NO: 26840 - DNA, 25 bp, Probe sequence
catagaagaacatacaggtcaacca

SEQ ID NO: 26841 - DNA, 25 bp, Probe sequence
acatagaagaacatacaggtcaacc

SEQ ID NO: 26842 - DNA, 25 bp, Probe sequence
tagaagaacatacaggtcaaccaat

SEQ ID NO: 26843 - DNA, 25 bp, Probe sequence
atagaagaacatacaggtcaaccaa

SEQ ID NO: 26844 - DNA, 25 bp, Probe sequence
agaagaacatacaggtcaaccaatg

SEQ ID NO: 26845 - DNA, 25 bp, Probe sequence
tcaaccaatggactatatgagacat

SEQ ID NO: 26846 - DNA, 25 bp, Probe sequence
gtcaaccaatggactatatgagaca

SEQ ID NO: 26847 - DNA, 25 bp, Probe sequence
tatcactacagattgcgtcgttatt

SEQ ID NO: 26848 - DNA, 25 bp, Probe sequence
ttatcactacagattgcgtcgttat

SEQ ID NO: 26849 - DNA, 25 bp, Probe sequence
attatcactacagattgcgtcgtta

SEQ ID NO: 26850 - DNA, 25 bp, Probe sequence
attatcaagcggattaacaacagac

SEQ ID NO: 26851 - DNA, 25 bp, Probe sequence
ggcatatcaagttagaagatggaca

SEQ ID NO: 26852 - DNA, 25 bp, Probe sequence
tggcatatcaagttagaagatggac

SEQ ID NO: 26853 - DNA, 25 bp, Probe sequence
atggcatatcaagttagaagatgga

SEQ ID NO: 26854 - DNA, 25 bp, Probe sequence
aattatcactacagattgcgtcgtt

SEQ ID NO: 26855 - DNA, 25 bp, Probe sequence
tgtcacaaccacttattaagcaatt

SEQ ID NO: 26856 - DNA, 25 bp, Probe sequence
acttatctttgttatcatcggtgct

SEQ ID NO: 26857 - DNA, 25 bp, Probe sequence
aggattattgagacttgaagatgta

SEQ ID NO: 26858 - DNA, 25 bp, Probe sequence
taggattattgagacttgaagatgt

SEQ ID NO: 26859 - DNA, 25 bp, Probe sequence
cttatctttgttatcatcggtgctt

SEQ ID NO: 26860 - DNA, 25 bp, Probe sequence
ttatctttgttatcatcggtgcttt

SEQ ID NO: 26861 - DNA, 25 bp, Probe sequence
aattacaggtcctctttcaagtcat

SEQ ID NO: 26862 - DNA, 25 bp, Probe sequence
tctttgttatcatcggtgctttaat

SEQ ID NO: 26863 - DNA, 25 bp, Probe sequence
atctttgttatcatcggtgctttaa

SEQ ID NO: 26864 - DNA, 25 bp, Probe sequence
ttacaggtcctctttcaagtcatat

SEQ ID NO: 26865 - DNA, 25 bp, Probe sequence
tggcagttatagcattattcagtat

SEQ ID NO: 26866 - DNA, 25 bp, Probe sequence
atggcagttatagcattattcagta

SEQ ID NO: 26867 - DNA, 25 bp, Probe sequence
gattgtcgttattatgatgattggt

SEQ ID NO: 26868 - DNA, 25 bp, Probe sequence
tgattgtcgttattatgatgattgg

SEQ ID NO: 26869 - DNA, 25 bp, Probe sequence
tcttcaattaatggcagttatagca

SEQ ID NO: 26870 - DNA, 25 bp, Probe sequence
gtcttcaattaatggcagttatagc

SEQ ID NO: 26871 - DNA, 25 bp, Probe sequence
ttggtcttcaattaatggcagttat

SEQ ID NO: 26872 - DNA, 25 bp, Probe sequence
tggtcttcaattaatggcagttata

SEQ ID NO: 26873 - DNA, 25 bp, Probe sequence
cattagatgcgattggtcttcaatt

SEQ ID NO: 26874 - DNA, 25 bp, Probe sequence
ttaattgcaccatctgaatcagtga

SEQ ID NO: 26875 - DNA, 25 bp, Probe sequence
taattgcaccatctgaatcagtgac

SEQ ID NO: 26876 - DNA, 25 bp, Probe sequence
gtatagtgatgagggctatttaacc

SEQ ID NO: 26877 - DNA, 25 bp, Probe sequence
agggctatttaacctcaatatacct

SEQ ID NO: 26878 - DNA, 25 bp, Probe sequence
tatagtgatgagggctatttaacct

SEQ ID NO: 26879 - DNA, 25 bp, Probe sequence
gggctatttaacctcaatataccta

SEQ ID NO: 26880 - DNA, 25 bp, Probe sequence
aacctcaatatacctagtggaaatt

SEQ ID NO: 26881 - DNA, 25 bp, Probe sequence
agtatagtgatgagggctatttaac

SEQ ID NO: 26882 - DNA, 25 bp, Probe sequence
cagtatagtgatgagggctatttaa

SEQ ID NO: 26883 - DNA, 25 bp, Probe sequence
actttgtgttaggtttcatctttgg

SEQ ID NO: 26884 - DNA, 25 bp, Probe sequence
ctttgtgttaggtttcatctttggc

SEQ ID NO: 26885 - DNA, 25 bp, Probe sequence
attaacacctggtactgtagtgctt

SEQ ID NO: 26886 - DNA, 25 bp, Probe sequence
gtactgtagtgcttggtgtaagtga

SEQ ID NO: 26887 - DNA, 25 bp, Probe sequence
tgtaagagaggtgggcgaaatataa

SEQ ID NO: 26888 - DNA, 25 bp, Probe sequence
ttgtaagagaggtgggcgaaatata

SEQ ID NO: 26889 - DNA, 25 bp, Probe sequence
tacattaacacctggtactgtagtg

SEQ ID NO: 26890 - DNA, 25 bp, Probe sequence
tgaaccaggattctttgtttatcac

SEQ ID NO: 26891 - DNA, 25 bp, Probe sequence
ttacattaacacctggtactgtagt

SEQ ID NO: 26892 - DNA, 25 bp, Probe sequence
agaacattgtctatgatgaactgaa

SEQ ID NO: 26893 - DNA, 25 bp, Probe sequence
aagaacattgtctatgatgaactga

SEQ ID NO: 26894 - DNA, 25 bp, Probe sequence
tacaatcattgagtcacaggattca

SEQ ID NO: 26895 - DNA, 25 bp, Probe sequence
acaatcattgagtcacaggattcat

SEQ ID NO: 26896 - DNA, 25 bp, Probe sequence
tattacaatcattgagtcacaggat

SEQ ID NO: 26897 - DNA, 25 bp, Probe sequence
atattacaatcattgagtcacagga

SEQ ID NO: 26898 - DNA, 25 bp, Probe sequence
ttacaatcattgagtcacaggattc

SEQ ID NO: 26899 - DNA, 25 bp, Probe sequence
tcattgagtcacaggattcatataa

SEQ ID NO: 26900 - DNA, 25 bp, Probe sequence
caatcattgagtcacaggattcata

SEQ ID NO: 26901 - DNA, 25 bp, Probe sequence
ttgtatcgtcatccttcttcgtaat

SEQ ID NO: 26902 - DNA, 25 bp, Probe sequence
acattctacaatccatcaacctacg

SEQ ID NO: 26903 - DNA, 25 bp, Probe sequence
gttgtatcgtcatccttcttcgtaa

SEQ ID NO: 26904 - DNA, 25 bp, Probe sequence
gtcgtattatattctgtcattcgca

SEQ ID NO: 26905 - DNA, 25 bp, Probe sequence
agtcgtattatattctgtcattcgc

SEQ ID NO: 26906 - DNA, 25 bp, Probe sequence
tgtatcgtcatccttcttcgtaatg

SEQ ID NO: 26907 - DNA, 25 bp, Probe sequence
aacattctacaatccatcaacctac

SEQ ID NO: 26908 - DNA, 25 bp, Probe sequence
tattctgtcattcgcatattcctac

SEQ ID NO: 26909 - DNA, 25 bp, Probe sequence
gtatcgtcatccttcttcgtaatgg

SEQ ID NO: 26910 - DNA, 25 bp, Probe sequence
tagaaaggactagcatgtctgattt

SEQ ID NO: 26911 - DNA, 25 bp, Probe sequence
ctagaaaggactagcatgtctgatt

SEQ ID NO: 26912 - DNA, 25 bp, Probe sequence
cctagaaaggactagcatgtctgat

SEQ ID NO: 26913 - DNA, 25 bp, Probe sequence
gaaaggactagcatgtctgattttg

SEQ ID NO: 26914 - DNA, 25 bp, Probe sequence
agaaaggactagcatgtctgatttt

SEQ ID NO: 26915 - DNA, 25 bp, Probe sequence
ggactagcatgtctgattttgaaat

SEQ ID NO: 26916 - DNA, 25 bp, Probe sequence
aggactagcatgtctgattttgaaa

SEQ ID NO: 26917 - DNA, 25 bp, Probe sequence
aaggactagcatgtctgattttgaa

SEQ ID NO: 26918 - DNA, 25 bp, Probe sequence
aaaggactagcatgtctgattttga

SEQ ID NO: 26919 - DNA, 25 bp, Probe sequence
tctcacagcaattagtgtctatctc

SEQ ID NO: 26920 - DNA, 25 bp, Probe sequence
tgttagtggtattctcacagcaatt

SEQ ID NO: 26921 - DNA, 25 bp, Probe sequence
ttgttagtggtattctcacagcaat

SEQ ID NO: 26922 - DNA, 25 bp, Probe sequence
ttctcacagcaattagtgtctatct

SEQ ID NO: 26923 - DNA, 25 bp, Probe sequence
tagtggtattctcacagcaattagt

SEQ ID NO: 26924 - DNA, 25 bp, Probe sequence
ggtattctcacagcaattagtgtct

SEQ ID NO: 26925 - DNA, 25 bp, Probe sequence
tggtattctcacagcaattagtgtc

SEQ ID NO: 26926 - DNA, 25 bp, Probe sequence
agtggtattctcacagcaattagtg

SEQ ID NO: 26927 - DNA, 25 bp, Probe sequence
cacagcaattagtgtctatctcgtt

SEQ ID NO: 26928 - DNA, 25 bp, Probe sequence
ggctgatgatataagattcctacgc

SEQ ID NO: 26929 - DNA, 25 bp, Probe sequence
cacgacatattggcatgattacatt

SEQ ID NO: 26930 - DNA, 25 bp, Probe sequence
acacgacatattggcatgattacat

SEQ ID NO: 26931 - DNA, 25 bp, Probe sequence
aggctgatgatataagattcctacg

SEQ ID NO: 26932 - DNA, 25 bp, Probe sequence
agacacgacatattggcatgattac

SEQ ID NO: 26933 - DNA, 25 bp, Probe sequence
cagacacgacatattggcatgatta

SEQ ID NO: 26934 - DNA, 25 bp, Probe sequence
attagatccttgttcaacagacgag

SEQ ID NO: 26935 - DNA, 25 bp, Probe sequence
gacacgacatattggcatgattaca

SEQ ID NO: 26936 - DNA, 25 bp, Probe sequence
cattagatccttgttcaacagacga

SEQ ID NO: 26937 - DNA, 25 bp, Probe sequence
gttcacttgttatcattacgattgc

SEQ ID NO: 26938 - DNA, 25 bp, Probe sequence
cggattattattcgcaagttcactt

SEQ ID NO: 26939 - DNA, 25 bp, Probe sequence
agttcacttgttatcattacgattg

SEQ ID NO: 26940 - DNA, 25 bp, Probe sequence
gcagtattctttgatttcggtgttt

SEQ ID NO: 26941 - DNA, 25 bp, Probe sequence
ttcacttgttatcattacgattgca

SEQ ID NO: 26942 - DNA, 25 bp, Probe sequence
tcacttgttatcattacgattgcat

SEQ ID NO: 26943 - DNA, 25 bp, Probe sequence
agcagtattctttgatttcggtgtt

SEQ ID NO: 26944 - DNA, 25 bp, Probe sequence
aacagcagtattctttgatttcggt

SEQ ID NO: 26945 - DNA, 25 bp, Probe sequence
acaacagcagtattctttgatttcg

SEQ ID NO: 26946 - DNA, 25 bp, Probe sequence
cgcactcattattcctatcctgtat

SEQ ID NO: 26947 - DNA, 25 bp, Probe sequence
attaggtatgattatggcgatgctt

SEQ ID NO: 26948 - DNA, 25 bp, Probe sequence
ttggtggtctatcattattaggtgg

SEQ ID NO: 26949 - DNA, 25 bp, Probe sequence
aggtggtatcatcttactcgctata

SEQ ID NO: 26950 - DNA, 25 bp, Probe sequence
taggtggtatcatcttactcgctat

SEQ ID NO: 26951 - DNA, 25 bp, Probe sequence
attcgcactcattattcctatcctg

SEQ ID NO: 26952 - DNA, 25 bp, Probe sequence
ttaggtggtatcatcttactcgcta

SEQ ID NO: 26953 - DNA, 25 bp, Probe sequence
ttggatatgctgtgtctgtattgtt

SEQ ID NO: 26954 - DNA, 25 bp, Probe sequence
tattaggtggtatcatcttactcgc

SEQ ID NO: 26955 - DNA, 25 bp, Probe sequence
taacgaccatacatgataccgatga

SEQ ID NO: 26956 - DNA, 25 bp, Probe sequence
gtaacgaccatacatgataccgatg

SEQ ID NO: 26957 - DNA, 25 bp, Probe sequence
aacgaccatacatgataccgatgat

SEQ ID NO: 26958 - DNA, 25 bp, Probe sequence
acgaccatacatgataccgatgatg

SEQ ID NO: 26959 - DNA, 25 bp, Probe sequence
gaacacaaacatgctaacaacaaat

SEQ ID NO: 26960 - DNA, 25 bp, Probe sequence
tgaacacaaacatgctaacaacaaa

SEQ ID NO: 26961 - DNA, 25 bp, Probe sequence
aacacaaacatgctaacaacaaatt

SEQ ID NO: 26962 - DNA, 25 bp, Probe sequence
atgaacacaaacatgctaacaacaa

SEQ ID NO: 26963 - DNA, 25 bp, Probe sequence
aatgaacacaaacatgctaacaaca

SEQ ID NO: 26964 - DNA, 25 bp, Probe sequence
tcacttcaacaagcaattacagatt

SEQ ID NO: 26965 - DNA, 25 bp, Probe sequence
ttcacttcaacaagcaattacagat

SEQ ID NO: 26966 - DNA, 25 bp, Probe sequence
attcacttcaacaagcaattacaga

SEQ ID NO: 26967 - DNA, 25 bp, Probe sequence
agattcacttcaacaagcaattaca

SEQ ID NO: 26968 - DNA, 25 bp, Probe sequence
gattcacttcaacaagcaattacag

SEQ ID NO: 26969 - DNA, 25 bp, Probe sequence
aagattcacttcaacaagcaattac

SEQ ID NO: 26970 - DNA, 25 bp, Probe sequence
ctatggtgtcacgattgttgaagaa

SEQ ID NO: 26971 - DNA, 25 bp, Probe sequence
cccgaaacaaggtgatttacataac

SEQ ID NO: 26972 - DNA, 25 bp, Probe sequence
caagttatcaaacacccgaaacaag

SEQ ID NO: 26973 - DNA, 25 bp, Probe sequence
caggaatggaagaacaattattagc

SEQ ID NO: 26974 - DNA, 25 bp, Probe sequence
gcgattggattaggtcctgattata

SEQ ID NO: 26975 - DNA, 25 bp, Probe sequence
ttaacgaatgagcgattcactacta

SEQ ID NO: 26976 - DNA, 25 bp, Probe sequence
taacgaatgagcgattcactactat

SEQ ID NO: 26977 - DNA, 25 bp, Probe sequence
aacgaatgagcgattcactactatc

SEQ ID NO: 26978 - DNA, 25 bp, Probe sequence
cgattggattaggtcctgattatac

SEQ ID NO: 26979 - DNA, 25 bp, Probe sequence
ggacacggtaaagttgaggattata

SEQ ID NO: 26980 - DNA, 25 bp, Probe sequence
ttggattaggtcctgattatacaga

SEQ ID NO: 26981 - DNA, 25 bp, Probe sequence
tgcgattggattaggtcctgattat

SEQ ID NO: 26982 - DNA, 25 bp, Probe sequence
ggcgtgttggatacagtaatataca

SEQ ID NO: 26983 - DNA, 25 bp, Probe sequence
caagcctgctattgaatggattata

SEQ ID NO: 26984 - DNA, 25 bp, Probe sequence
gcgtgttggatacagtaatatacaa

SEQ ID NO: 26985 - DNA, 25 bp, Probe sequence
agcctgctattgaatggattataga

SEQ ID NO: 26986 - DNA, 25 bp, Probe sequence
gcctgctattgaatggattatagat

SEQ ID NO: 26987 - DNA, 25 bp, Probe sequence
aattatattgtgaatggcaagcctg

SEQ ID NO: 26988 - DNA, 25 bp, Probe sequence
aagcctgctattgaatggattatag

SEQ ID NO: 26989 - DNA, 25 bp, Probe sequence
taattatattgtgaatggcaagcct

SEQ ID NO: 26990 - DNA, 25 bp, Probe sequence
atagatcagtacaacgtaagcatcg

SEQ ID NO: 26991 - DNA, 25 bp, Probe sequence
cgcttagctgagtataaagaagttg

SEQ ID NO: 26992 - DNA, 25 bp, Probe sequence
gcttagctgagtataaagaagttgt

SEQ ID NO: 26993 - DNA, 25 bp, Probe sequence
gctgagtataaagaagttgtgttat

SEQ ID NO: 26994 - DNA, 25 bp, Probe sequence
agctgagtataaagaagttgtgtta

SEQ ID NO: 26995 - DNA, 25 bp, Probe sequence
tagctgagtataaagaagttgtgtt

SEQ ID NO: 26996 - DNA, 25 bp, Probe sequence
ttagctgagtataaagaagttgtgt

SEQ ID NO: 26997 - DNA, 25 bp, Probe sequence
ctacctgatggaaaacgacatattc

SEQ ID NO: 26998 - DNA, 25 bp, Probe sequence
taatgtaccacagaaacatccaaga

SEQ ID NO: 26999 - DNA, 25 bp, Probe sequence
aaagaatgggttaactcctggaatg

SEQ ID NO: 27000 - DNA, 25 bp, Probe sequence
cgaatcaaggcattattagtcaaca

SEQ ID NO: 27001 - DNA, 25 bp, Probe sequence
gcgaatcaaggcattattagtcaac

SEQ ID NO: 27002 - DNA, 25 bp, Probe sequence
atcaaggcattattagtcaacaaga

SEQ ID NO: 27003 - DNA, 25 bp, Probe sequence
catcgcttccaataatgttgataca

SEQ ID NO: 27004 - DNA, 25 bp, Probe sequence
aatgttgatacaattatgcctggtt

SEQ ID NO: 27005 - DNA, 25 bp, Probe sequence
acaattatgcctggttatactcatt

SEQ ID NO: 27006 - DNA, 25 bp, Probe sequence
tcgcttccaataatgttgatacaat

SEQ ID NO: 27007 - DNA, 25 bp, Probe sequence
atcgcttccaataatgttgatacaa

SEQ ID NO: 27008 - DNA, 25 bp, Probe sequence
attattagtcaacaagacagcgaac

SEQ ID NO: 27009 - DNA, 25 bp, Probe sequence
tagatacactaactggaatatgcgt

SEQ ID NO: 27010 - DNA, 25 bp, Probe sequence
agatacactaactggaatatgcgta

SEQ ID NO: 27011 - DNA, 25 bp, Probe sequence
gatacactaactggaatatgcgtag

SEQ ID NO: 27012 - DNA, 25 bp, Probe sequence
ttagatacactaactggaatatgcg

SEQ ID NO: 27013 - DNA, 25 bp, Probe sequence
acactaactggaatatgcgtagtat

SEQ ID NO: 27014 - DNA, 25 bp, Probe sequence
atacactaactggaatatgcgtagt

SEQ ID NO: 27015 - DNA, 25 bp, Probe sequence
tacactaactggaatatgcgtagta

SEQ ID NO: 27016 - DNA, 25 bp, Probe sequence
cactaactggaatatgcgtagtatt

SEQ ID NO: 27017 - DNA, 25 bp, Probe sequence
ggtgtttgattggaatttaagatgg

SEQ ID NO: 27018 - DNA, 25 bp, Probe sequence
tgctgaacaactatacaatggactt

SEQ ID NO: 27019 - DNA, 25 bp, Probe sequence
ttgctgaacaactatacaatggact

SEQ ID NO: 27020 - DNA, 25 bp, Probe sequence
gtatcggaagaattgaccatgtaga

SEQ ID NO: 27021 - DNA, 25 bp, Probe sequence
tatcggaagaattgaccatgtagaa

SEQ ID NO: 27022 - DNA, 25 bp, Probe sequence
taagcatggtatcggaagaattgac

SEQ ID NO: 27023 - DNA, 25 bp, Probe sequence
gtaagcatggtatcggaagaattga

SEQ ID NO: 27024 - DNA, 25 bp, Probe sequence
aaccatgattcaccttattctatcg

SEQ ID NO: 27025 - DNA, 25 bp, Probe sequence
ggtaagcatggtatcggaagaattg

SEQ ID NO: 27026 - DNA, 25 bp, Probe sequence
accatgattcaccttattctatcga

SEQ ID NO: 27027 - DNA, 25 bp, Probe sequence
tactcattgtcatagcactcgtaat

SEQ ID NO: 27028 - DNA, 25 bp, Probe sequence
agatatgttatatggcattggagga

SEQ ID NO: 27029 - DNA, 25 bp, Probe sequence
cagatatgttatatggcattggagg

SEQ ID NO: 27030 - DNA, 25 bp, Probe sequence
ttatatggcattggaggattatgtg

SEQ ID NO: 27031 - DNA, 25 bp, Probe sequence
gttatatggcattggaggattatgt

SEQ ID NO: 27032 - DNA, 25 bp, Probe sequence
tgttatatggcattggaggattatg

SEQ ID NO: 27033 - DNA, 25 bp, Probe sequence
ctataataggtggactagccgataa

SEQ ID NO: 27034 - DNA, 25 bp, Probe sequence
gatatgttatatggcattggaggat

SEQ ID NO: 27035 - DNA, 25 bp, Probe sequence
tcagatatgttatatggcattggag

SEQ ID NO: 27036 - DNA, 25 bp, Probe sequence
gagcaattatcagtcgaagaatacg

SEQ ID NO: 27037 - DNA, 25 bp, Probe sequence
agagagcaattatcagtcgaagaat

SEQ ID NO: 27038 - DNA, 25 bp, Probe sequence
ctagagagcaattatcagtcgaaga

SEQ ID NO: 27039 - DNA, 25 bp, Probe sequence
cgtgaattgacacaagatccatatt

SEQ ID NO: 27040 - DNA, 25 bp, Probe sequence
tagagagcaattatcagtcgaagaa

SEQ ID NO: 27041 - DNA, 25 bp, Probe sequence
cagtatagaagaccatatcagaaca

SEQ ID NO: 27042 - DNA, 25 bp, Probe sequence
acagtatagaagaccatatcagaac

SEQ ID NO: 27043 - DNA, 25 bp, Probe sequence
agagcaattatcagtcgaagaatac

SEQ ID NO: 27044 - DNA, 25 bp, Probe sequence
gagagcaattatcagtcgaagaata

SEQ ID NO: 27045 - DNA, 25 bp, Probe sequence
attggcgaagttgttgaagatagaa

SEQ ID NO: 27046 - DNA, 25 bp, Probe sequence
cattggcgaagttgttgaagataga

SEQ ID NO: 27047 - DNA, 25 bp, Probe sequence
atgattattgaaggtgtcggtactc

SEQ ID NO: 27048 - DNA, 25 bp, Probe sequence
tatgattattgaaggtgtcggtact

SEQ ID NO: 27049 - DNA, 25 bp, Probe sequence
gatatgattattgaaggtgtcggta

SEQ ID NO: 27050 - DNA, 25 bp, Probe sequence
atatgattattgaaggtgtcggtac

SEQ ID NO: 27051 - DNA, 25 bp, Probe sequence
tcattggcgaagttgttgaagatag

SEQ ID NO: 27052 - DNA, 25 bp, Probe sequence
ttatgtcattggcgaagttgttgaa

SEQ ID NO: 27053 - DNA, 25 bp, Probe sequence
gtcattggcgaagttgttgaagata

SEQ ID NO: 27054 - DNA, 25 bp, Probe sequence
atgaagatggagatgctgaactatt

SEQ ID NO: 27055 - DNA, 25 bp, Probe sequence
acttatatggtgcgtcttctaatga

SEQ ID NO: 27056 - DNA, 25 bp, Probe sequence
cttatatggtgcgtcttctaatgaa

SEQ ID NO: 27057 - DNA, 25 bp, Probe sequence
tacttatatggtgcgtcttctaatg

SEQ ID NO: 27058 - DNA, 25 bp, Probe sequence
ttatatggtgcgtcttctaatgaat

SEQ ID NO: 27059 - DNA, 25 bp, Probe sequence
catgaagatggagatgctgaactat

SEQ ID NO: 27060 - DNA, 25 bp, Probe sequence
tatatggtgcgtcttctaatgaatt

SEQ ID NO: 27061 - DNA, 25 bp, Probe sequence
gcatatcactaatcaggaacatgac

SEQ ID NO: 27062 - DNA, 25 bp, Probe sequence
catatcactaatcaggaacatgacg

SEQ ID NO: 27063 - DNA, 25 bp, Probe sequence
gcaagaacttaaagatgtagcgaac

SEQ ID NO: 27064 - DNA, 25 bp, Probe sequence
tttacttgtccacttgaaagaatcc

SEQ ID NO: 27065 - DNA, 25 bp, Probe sequence
ccattccctgtcattgaaattgtaa

SEQ ID NO: 27066 - DNA, 25 bp, Probe sequence
gtagcgaacaatattacattcaaca

SEQ ID NO: 27067 - DNA, 25 bp, Probe sequence
ttacttgtccacttgaaagaatccc

SEQ ID NO: 27068 - DNA, 25 bp, Probe sequence
accattccctgtcattgaaattgta

SEQ ID NO: 27069 - DNA, 25 bp, Probe sequence
gcattcggtgatgaagataatgata

SEQ ID NO: 27070 - DNA, 25 bp, Probe sequence
agcgaacaatattacattcaacaat

SEQ ID NO: 27071 - DNA, 25 bp, Probe sequence
ttattgcattcggtgatgaagataa

SEQ ID NO: 27072 - DNA, 25 bp, Probe sequence
aatcatcttctaactgaggcatctt

SEQ ID NO: 27073 - DNA, 25 bp, Probe sequence
taatcatcttctaactgaggcatct

SEQ ID NO: 27074 - DNA, 25 bp, Probe sequence
aatgttgtcgtgtcttcatatatcg

SEQ ID NO: 27075 - DNA, 25 bp, Probe sequence
gaataatcatcttctaactgaggca

SEQ ID NO: 27076 - DNA, 25 bp, Probe sequence
atgttgtcgtgtcttcatatatcgc

SEQ ID NO: 27077 - DNA, 25 bp, Probe sequence
ataatcatcttctaactgaggcatc

SEQ ID NO: 27078 - DNA, 25 bp, Probe sequence
gaatcaaggtatatcattcctgcct

SEQ ID NO: 27079 - DNA, 25 bp, Probe sequence
tgaatcaaggtatatcattcctgcc

SEQ ID NO: 27080 - DNA, 25 bp, Probe sequence
aataatcatcttctaactgaggcat

SEQ ID NO: 27081 - DNA, 25 bp, Probe sequence
aattatcatggcagtattgttcacg

SEQ ID NO: 27082 - DNA, 25 bp, Probe sequence
attatcatggcagtattgttcacga

SEQ ID NO: 27083 - DNA, 25 bp, Probe sequence
tatcatggcagtattgttcacgatt

SEQ ID NO: 27084 - DNA, 25 bp, Probe sequence
ttatcatggcagtattgttcacgat

SEQ ID NO: 27085 - DNA, 25 bp, Probe sequence
ttaatagcctagtaggtggagacag

SEQ ID NO: 27086 - DNA, 25 bp, Probe sequence
cttaatagcctagtaggtggagaca

SEQ ID NO: 27087 - DNA, 25 bp, Probe sequence
acttaatagcctagtaggtggagac

SEQ ID NO: 27088 - DNA, 25 bp, Probe sequence
tgtacttaatagcctagtaggtgga

SEQ ID NO: 27089 - DNA, 25 bp, Probe sequence
tacttaatagcctagtaggtggaga

SEQ ID NO: 27090 - DNA, 25 bp, Probe sequence
tgtgctgtcgctcatcttagtataa

SEQ ID NO: 27091 - DNA, 25 bp, Probe sequence
ttgtgctgtcgctcatcttagtata

SEQ ID NO: 27092 - DNA, 25 bp, Probe sequence
aatggcttggaatggcactaataac

SEQ ID NO: 27093 - DNA, 25 bp, Probe sequence
gaagaagtctatctctgatgatcca

SEQ ID NO: 27094 - DNA, 25 bp, Probe sequence
attgtgctgtcgctcatcttagtat

SEQ ID NO: 27095 - DNA, 25 bp, Probe sequence
agaagaagtctatctctgatgatcc

SEQ ID NO: 27096 - DNA, 25 bp, Probe sequence
agaagtctatctctgatgatccatt

SEQ ID NO: 27097 - DNA, 25 bp, Probe sequence
aagaagtctatctctgatgatccat

SEQ ID NO: 27098 - DNA, 25 bp, Probe sequence
gattgtgctgtcgctcatcttagta

SEQ ID NO: 27099 - DNA, 25 bp, Probe sequence
aaatatgttgaaagaatgacgagtt

SEQ ID NO: 27100 - DNA, 25 bp, Probe sequence
aatatgttgaaagaatgacgagttt

SEQ ID NO: 27101 - DNA, 25 bp, Probe sequence
tgaaagaatgacgagttttaatggt

SEQ ID NO: 27102 - DNA, 25 bp, Probe sequence
ttgaaagaatgacgagttttaatgg

SEQ ID NO: 27103 - DNA, 25 bp, Probe sequence
gaaagaatgacgagttttaatggtt

SEQ ID NO: 27104 - DNA, 25 bp, Probe sequence
tgttgaaagaatgacgagttttaat

SEQ ID NO: 27105 - DNA, 25 bp, Probe sequence
atgttgaaagaatgacgagttttaa

SEQ ID NO: 27106 - DNA, 25 bp, Probe sequence
gttgaaagaatgacgagttttaatg

SEQ ID NO: 27107 - DNA, 25 bp, Probe sequence
aaaatatgttgaaagaatgacgagt

SEQ ID NO: 27108 - DNA, 25 bp, Probe sequence
acaatactaatatcgttccagttgg

SEQ ID NO: 27109 - DNA, 25 bp, Probe sequence
gctggtctattaacatatccacctt

SEQ ID NO: 27110 - DNA, 25 bp, Probe sequence
tcgtagatcaacatgcaattacaat

SEQ ID NO: 27111 - DNA, 25 bp, Probe sequence
atcgtagatcaacatgcaattacaa

SEQ ID NO: 27112 - DNA, 25 bp, Probe sequence
aaacctgaaattcgtatgcctaaag

SEQ ID NO: 27113 - DNA, 25 bp, Probe sequence
cgtagatcaacatgcaattacaatg

SEQ ID NO: 27114 - DNA, 25 bp, Probe sequence
aacctgaaattcgtatgcctaaagt

SEQ ID NO: 27115 - DNA, 25 bp, Probe sequence
gacaattagcagcgatttatttagc

SEQ ID NO: 27116 - DNA, 25 bp, Probe sequence
gaaacctgaaattcgtatgcctaaa

SEQ ID NO: 27117 - DNA, 25 bp, Probe sequence
aaatgatgatgaaagcgtgttactc

SEQ ID NO: 27118 - DNA, 25 bp, Probe sequence
gggaatgtgaagtaagaagaaatgt

SEQ ID NO: 27119 - DNA, 25 bp, Probe sequence
tgggaatgtgaagtaagaagaaatg

SEQ ID NO: 27120 - DNA, 25 bp, Probe sequence
aatgatgatgaaagcgtgttactct

SEQ ID NO: 27121 - DNA, 25 bp, Probe sequence
tgatgatgaaagcgtgttactctta

SEQ ID NO: 27122 - DNA, 25 bp, Probe sequence
gatgatgaaagcgtgttactcttat

SEQ ID NO: 27123 - DNA, 25 bp, Probe sequence
atgatgatgaaagcgtgttactctt

SEQ ID NO: 27124 - DNA, 25 bp, Probe sequence
tgatgaaagcgtgttactcttattt

SEQ ID NO: 27125 - DNA, 25 bp, Probe sequence
aatgggaatgtgaagtaagaagaaa

SEQ ID NO: 27126 - DNA, 25 bp, Probe sequence
ttatggcagagaacttgtattgaac

SEQ ID NO: 27127 - DNA, 25 bp, Probe sequence
gattatggcagagaacttgtattga

SEQ ID NO: 27128 - DNA, 25 bp, Probe sequence
agattatggcagagaacttgtattg

SEQ ID NO: 27129 - DNA, 25 bp, Probe sequence
attatggcagagaacttgtattgaa

SEQ ID NO: 27130 - DNA, 25 bp, Probe sequence
tatggcagagaacttgtattgaaca

SEQ ID NO: 27131 - DNA, 25 bp, Probe sequence
aagattatggcagagaacttgtatt

SEQ ID NO: 27132 - DNA, 25 bp, Probe sequence
aaagattatggcagagaacttgtat

SEQ ID NO: 27133 - DNA, 25 bp, Probe sequence
tgacggtagtagtttgatattacat

SEQ ID NO: 27134 - DNA, 25 bp, Probe sequence
atgacggtagtagtttgatattaca

SEQ ID NO: 27135 - DNA, 25 bp, Probe sequence
ggctggagaattacgaataatggaa

SEQ ID NO: 27136 - DNA, 25 bp, Probe sequence
atggctggagaattacgaataatgg

SEQ ID NO: 27137 - DNA, 25 bp, Probe sequence
tggctggagaattacgaataatgga

SEQ ID NO: 27138 - DNA, 25 bp, Probe sequence
caacaacttgtaacgatggaagaat

SEQ ID NO: 27139 - DNA, 25 bp, Probe sequence
aacaacttgtaacgatggaagaatt

SEQ ID NO: 27140 - DNA, 25 bp, Probe sequence
acaacttgtaacgatggaagaatta

SEQ ID NO: 27141 - DNA, 25 bp, Probe sequence
acttatatacagcaacaacaacttg

SEQ ID NO: 27142 - DNA, 25 bp, Probe sequence
acttgtaacgatggaagaattactt

SEQ ID NO: 27143 - DNA, 25 bp, Probe sequence
aacttgtaacgatggaagaattact

SEQ ID NO: 27144 - DNA, 25 bp, Probe sequence
gaacacggacatcctatgctaagaa

SEQ ID NO: 27145 - DNA, 25 bp, Probe sequence
aagaacacggacatcctatgctaag

SEQ ID NO: 27146 - DNA, 25 bp, Probe sequence
gaagaacacggacatcctatgctaa

SEQ ID NO: 27147 - DNA, 25 bp, Probe sequence
tccaaacatttataccgaagaacac

SEQ ID NO: 27148 - DNA, 25 bp, Probe sequence
gtccaaacatttataccgaagaaca

SEQ ID NO: 27149 - DNA, 25 bp, Probe sequence
ccaaacatttataccgaagaacacg

SEQ ID NO: 27150 - DNA, 25 bp, Probe sequence
gtgttggagattatttatttgagcg

SEQ ID NO: 27151 - DNA, 25 bp, Probe sequence
ggtgttggagattatttatttgagc

SEQ ID NO: 27152 - DNA, 25 bp, Probe sequence
gatgaacgacttaatcacctgtttc

SEQ ID NO: 27153 - DNA, 25 bp, Probe sequence
cgacattaaaccagagatgaacttg

SEQ ID NO: 27154 - DNA, 25 bp, Probe sequence
acgcataagagttaaagacaatcaa

SEQ ID NO: 27155 - DNA, 25 bp, Probe sequence
ttcaaattaaaggaacatcgctctg

SEQ ID NO: 27156 - DNA, 25 bp, Probe sequence
cacccgatttcaaattaaaggaaca

SEQ ID NO: 27157 - DNA, 25 bp, Probe sequence
acacccgatttcaaattaaaggaac

SEQ ID NO: 27158 - DNA, 25 bp, Probe sequence
tttcaaattaaaggaacatcgctct

SEQ ID NO: 27159 - DNA, 25 bp, Probe sequence
acccgatttcaaattaaaggaacat

SEQ ID NO: 27160 - DNA, 25 bp, Probe sequence
cgccaagaaactaaatataaaggtg

SEQ ID NO: 27161 - DNA, 25 bp, Probe sequence
gacattaaaccagagatgaacttga

SEQ ID NO: 27162 - DNA, 25 bp, Probe sequence
ctattatcggcttaattgttgcgtt

SEQ ID NO: 27163 - DNA, 25 bp, Probe sequence
ttgctattatcggcttaattgttgc

SEQ ID NO: 27164 - DNA, 25 bp, Probe sequence
tctgattatgctgttcattctcatc

SEQ ID NO: 27165 - DNA, 25 bp, Probe sequence
ctctgattatgctgttcattctcat

SEQ ID NO: 27166 - DNA, 25 bp, Probe sequence
tacattcaaggtcaagtaactgtca

SEQ ID NO: 27167 - DNA, 25 bp, Probe sequence
gctctgattatgctgttcattctca

SEQ ID NO: 27168 - DNA, 25 bp, Probe sequence
aataccgccaacgcattattgataa

SEQ ID NO: 27169 - DNA, 25 bp, Probe sequence
acattcaaggtcaagtaactgtcag

SEQ ID NO: 27170 - DNA, 25 bp, Probe sequence
atcgctctgattatgctgttcattc

SEQ ID NO: 27171 - DNA, 25 bp, Probe sequence
cacaacactactatcttctatttca

SEQ ID NO: 27172 - DNA, 25 bp, Probe sequence
tcacaacactactatcttctatttc

SEQ ID NO: 27173 - DNA, 25 bp, Probe sequence
acaacactactatcttctatttcag

SEQ ID NO: 27174 - DNA, 25 bp, Probe sequence
actatcttctatttcagtaacgtca

SEQ ID NO: 27175 - DNA, 25 bp, Probe sequence
caacactactatcttctatttcagt

SEQ ID NO: 27176 - DNA, 25 bp, Probe sequence
ttcacaacactactatcttctattt

SEQ ID NO: 27177 - DNA, 25 bp, Probe sequence
tttcacaacactactatcttctatt

SEQ ID NO: 27178 - DNA, 25 bp, Probe sequence
tcagtaacgtcaaaatgtgtaccta

SEQ ID NO: 27179 - DNA, 25 bp, Probe sequence
tttcagtaacgtcaaaatgtgtacc

SEQ ID NO: 27180 - DNA, 25 bp, Probe sequence
ccattagtctctcgcacatactatt

SEQ ID NO: 27181 - DNA, 25 bp, Probe sequence
attagtctctcgcacatactattcc

SEQ ID NO: 27182 - DNA, 25 bp, Probe sequence
cattagtctctcgcacatactattc

SEQ ID NO: 27183 - DNA, 25 bp, Probe sequence
acgcattcttactgagattatacta

SEQ ID NO: 27184 - DNA, 25 bp, Probe sequence
tacgcattcttactgagattatact

SEQ ID NO: 27185 - DNA, 25 bp, Probe sequence
gccattagtctctcgcacatactat

SEQ ID NO: 27186 - DNA, 25 bp, Probe sequence
cgcattcttactgagattatactaa

SEQ ID NO: 27187 - DNA, 25 bp, Probe sequence
atacgcattcttactgagattatac

SEQ ID NO: 27188 - DNA, 25 bp, Probe sequence
agccattagtctctcgcacatacta

SEQ ID NO: 27189 - DNA, 25 bp, Probe sequence
aggttacagataatcgtcatagcaa

SEQ ID NO: 27190 - DNA, 25 bp, Probe sequence
aaggttacagataatcgtcatagca

SEQ ID NO: 27191 - DNA, 25 bp, Probe sequence
aactcttcattgatagatggaccga

SEQ ID NO: 27192 - DNA, 25 bp, Probe sequence
ctcttcattgatagatggaccgagt

SEQ ID NO: 27193 - DNA, 25 bp, Probe sequence
actcttcattgatagatggaccgag

SEQ ID NO: 27194 - DNA, 25 bp, Probe sequence
cattgatagatggaccgagtcattg

SEQ ID NO: 27195 - DNA, 25 bp, Probe sequence
tcattgatagatggaccgagtcatt

SEQ ID NO: 27196 - DNA, 25 bp, Probe sequence
ttcattgatagatggaccgagtcat

SEQ ID NO: 27197 - DNA, 25 bp, Probe sequence
tcttcattgatagatggaccgagtc

SEQ ID NO: 27198 - DNA, 25 bp, Probe sequence
tgtatggtgttattctaagcggatt

SEQ ID NO: 27199 - DNA, 25 bp, Probe sequence
atgtatggtgttattctaagcggat

SEQ ID NO: 27200 - DNA, 25 bp, Probe sequence
tatgtatggtgttattctaagcgga

SEQ ID NO: 27201 - DNA, 25 bp, Probe sequence
ctatcggtctaatgtatggcatctt

SEQ ID NO: 27202 - DNA, 25 bp, Probe sequence
tcggtctaatgtatggcatcttatt

SEQ ID NO: 27203 - DNA, 25 bp, Probe sequence
atcggtctaatgtatggcatcttat

SEQ ID NO: 27204 - DNA, 25 bp, Probe sequence
ttatgtatggtgttattctaagcgg

SEQ ID NO: 27205 - DNA, 25 bp, Probe sequence
tatcggtctaatgtatggcatctta

SEQ ID NO: 27206 - DNA, 25 bp, Probe sequence
ggtcattatgttatccagtgttgaa

SEQ ID NO: 27207 - DNA, 25 bp, Probe sequence
atattccagttgctacagtgatgac

SEQ ID NO: 27208 - DNA, 25 bp, Probe sequence
tcattcatcacaaccacaagagatt

SEQ ID NO: 27209 - DNA, 25 bp, Probe sequence
gtgatgacagactatcgcttacata

SEQ ID NO: 27210 - DNA, 25 bp, Probe sequence
gcaagttacacagagtatcgttaat

SEQ ID NO: 27211 - DNA, 25 bp, Probe sequence
tgatgacagactatcgcttacataa

SEQ ID NO: 27212 - DNA, 25 bp, Probe sequence
gtcattcatcacaaccacaagagat

SEQ ID NO: 27213 - DNA, 25 bp, Probe sequence
agcagtggttaatagacaacaactt

SEQ ID NO: 27214 - DNA, 25 bp, Probe sequence
aagcagtggttaatagacaacaact

SEQ ID NO: 27215 - DNA, 25 bp, Probe sequence
acgccgtattcaacaagatattatg

SEQ ID NO: 27216 - DNA, 25 bp, Probe sequence
gcattgacacgctattctttatttg

SEQ ID NO: 27217 - DNA, 25 bp, Probe sequence
ggtagtgaaataattcggtttgaca

SEQ ID NO: 27218 - DNA, 25 bp, Probe sequence
ggcatttctagtaaaccacctattt

SEQ ID NO: 27219 - DNA, 25 bp, Probe sequence
cattgacacgctattctttatttga

SEQ ID NO: 27220 - DNA, 25 bp, Probe sequence
ttgacacgctattctttatttgaag

SEQ ID NO: 27221 - DNA, 25 bp, Probe sequence
atcccgaccaaccaatagattataa

SEQ ID NO: 27222 - DNA, 25 bp, Probe sequence
gtagtgaaataattcggtttgacaa

SEQ ID NO: 27223 - DNA, 25 bp, Probe sequence
cattcttcatgtttcataccacagt

SEQ ID NO: 27224 - DNA, 25 bp, Probe sequence
attgacacgctattctttatttgaa

SEQ ID NO: 27225 - DNA, 25 bp, Probe sequence
tattgctaccgagaatgagatatgg

SEQ ID NO: 27226 - DNA, 25 bp, Probe sequence
ttattgctaccgagaatgagatatg

SEQ ID NO: 27227 - DNA, 25 bp, Probe sequence
aagaccaattattgctaccgagaat

SEQ ID NO: 27228 - DNA, 25 bp, Probe sequence
ccaattattgctaccgagaatgaga

SEQ ID NO: 27229 - DNA, 25 bp, Probe sequence
caattattgctaccgagaatgagat

SEQ ID NO: 27230 - DNA, 25 bp, Probe sequence
accaattattgctaccgagaatgag

SEQ ID NO: 27231 - DNA, 25 bp, Probe sequence
gaccaattattgctaccgagaatga

SEQ ID NO: 27232 - DNA, 25 bp, Probe sequence
agaccaattattgctaccgagaatg

SEQ ID NO: 27233 - DNA, 25 bp, Probe sequence
aattattgctaccgagaatgagata

SEQ ID NO: 27234 - DNA, 25 bp, Probe sequence
acaagcaattgaactttattacgga

SEQ ID NO: 27235 - DNA, 25 bp, Probe sequence
caagcaattgaactttattacggaa

SEQ ID NO: 27236 - DNA, 25 bp, Probe sequence
tacaagcaattgaactttattacgg

SEQ ID NO: 27237 - DNA, 25 bp, Probe sequence
aagcaattgaactttattacggaaa

SEQ ID NO: 27238 - DNA, 25 bp, Probe sequence
gaactttattacggaaaatcaaact

SEQ ID NO: 27239 - DNA, 25 bp, Probe sequence
tgaactttattacggaaaatcaaac

SEQ ID NO: 27240 - DNA, 25 bp, Probe sequence
atacaagcaattgaactttattacg

SEQ ID NO: 27241 - DNA, 25 bp, Probe sequence
actttattacggaaaatcaaacttt

SEQ ID NO: 27242 - DNA, 25 bp, Probe sequence
aactttattacggaaaatcaaactt

SEQ ID NO: 27243 - DNA, 25 bp, Probe sequence
tgtgttatgttaggctcaatcttca

SEQ ID NO: 27244 - DNA, 25 bp, Probe sequence
ttgtgttatgttaggctcaatcttc

SEQ ID NO: 27245 - DNA, 25 bp, Probe sequence
gttatgttaggctcaatcttcacac

SEQ ID NO: 27246 - DNA, 25 bp, Probe sequence
tgttaggctcaatcttcacacttaa

SEQ ID NO: 27247 - DNA, 25 bp, Probe sequence
atgttaggctcaatcttcacactta

SEQ ID NO: 27248 - DNA, 25 bp, Probe sequence
tatgttaggctcaatcttcacactt

SEQ ID NO: 27249 - DNA, 25 bp, Probe sequence
ttatgttaggctcaatcttcacact

SEQ ID NO: 27250 - DNA, 25 bp, Probe sequence
tgttatgttaggctcaatcttcaca

SEQ ID NO: 27251 - DNA, 25 bp, Probe sequence
caagaggatatgtaagtggttatga

SEQ ID NO: 27252 - DNA, 25 bp, Probe sequence
ggcgactatcataatcctaacaact

SEQ ID NO: 27253 - DNA, 25 bp, Probe sequence
gcgactatcataatcctaacaactt

SEQ ID NO: 27254 - DNA, 25 bp, Probe sequence
tcctaacaacttgtatcactctcat

SEQ ID NO: 27255 - DNA, 25 bp, Probe sequence
atcctaacaacttgtatcactctca

SEQ ID NO: 27256 - DNA, 25 bp, Probe sequence
cgactatcataatcctaacaacttg

SEQ ID NO: 27257 - DNA, 25 bp, Probe sequence
cctaacaacttgtatcactctcatt

SEQ ID NO: 27258 - DNA, 25 bp, Probe sequence
aatcctaacaacttgtatcactctc

SEQ ID NO: 27259 - DNA, 25 bp, Probe sequence
gggcgactatcataatcctaacaac

SEQ ID NO: 27260 - DNA, 25 bp, Probe sequence
ccattcaccgttatgttcaacagaa

SEQ ID NO: 27261 - DNA, 25 bp, Probe sequence
aatcatcacatccgacagataataa

SEQ ID NO: 27262 - DNA, 25 bp, Probe sequence
ggtaaatcatcacatccgacagata

SEQ ID NO: 27263 - DNA, 25 bp, Probe sequence
aactttcaggtaaatcatcacatcc

SEQ ID NO: 27264 - DNA, 25 bp, Probe sequence
ctttcaggtaaatcatcacatccga

SEQ ID NO: 27265 - DNA, 25 bp, Probe sequence
tttcaggtaaatcatcacatccgac

SEQ ID NO: 27266 - DNA, 25 bp, Probe sequence
actttcaggtaaatcatcacatccg

SEQ ID NO: 27267 - DNA, 25 bp, Probe sequence
catcacatccgacagataataaaca

SEQ ID NO: 27268 - DNA, 25 bp, Probe sequence
tcatcacatccgacagataataaac

SEQ ID NO: 27269 - DNA, 25 bp, Probe sequence
gtaaatcatcacatccgacagataa

SEQ ID NO: 27270 - DNA, 25 bp, Probe sequence
tttctcattcttaatactggttgcg

SEQ ID NO: 27271 - DNA, 25 bp, Probe sequence
aactagacgacaaagaacatcataa

SEQ ID NO: 27272 - DNA, 25 bp, Probe sequence
ataactagacgacaaagaacatcat

SEQ ID NO: 27273 - DNA, 25 bp, Probe sequence
caacttaatgccggtgatagtaatg

SEQ ID NO: 27274 - DNA, 25 bp, Probe sequence
tcaacttaatgccggtgatagtaat

SEQ ID NO: 27275 - DNA, 25 bp, Probe sequence
aacttaatgccggtgatagtaatgt

SEQ ID NO: 27276 - DNA, 25 bp, Probe sequence
ttcaacttaatgccggtgatagtaa

SEQ ID NO: 27277 - DNA, 25 bp, Probe sequence
tgggatattcgaggtttaacatctt

SEQ ID NO: 27278 - DNA, 25 bp, Probe sequence
taactagacgacaaagaacatcata

SEQ ID NO: 27279 - DNA, 25 bp, Probe sequence
gcattatttcttggaggtttaggta

SEQ ID NO: 27280 - DNA, 25 bp, Probe sequence
atttcttggaggtttaggtattcat

SEQ ID NO: 27281 - DNA, 25 bp, Probe sequence
aggaggatttacaaatgaaagtcaa

SEQ ID NO: 27282 - DNA, 25 bp, Probe sequence
aaggaggatttacaaatgaaagtca

SEQ ID NO: 27283 - DNA, 25 bp, Probe sequence
ttcttggaggtttaggtattcataa

SEQ ID NO: 27284 - DNA, 25 bp, Probe sequence
tttcttggaggtttaggtattcata

SEQ ID NO: 27285 - DNA, 25 bp, Probe sequence
tatttcttggaggtttaggtattca

SEQ ID NO: 27286 - DNA, 25 bp, Probe sequence
ggaggatttacaaatgaaagtcaat

SEQ ID NO: 27287 - DNA, 25 bp, Probe sequence
ttacaaatgaaagtcaataaagcca

SEQ ID NO: 27288 - DNA, 25 bp, Probe sequence
gaagtataaaccgccaactaatgtt

SEQ ID NO: 27289 - DNA, 25 bp, Probe sequence
cgaagtataaaccgccaactaatgt

SEQ ID NO: 27290 - DNA, 25 bp, Probe sequence
agtataaaccgccaactaatgttaa

SEQ ID NO: 27291 - DNA, 25 bp, Probe sequence
aagtataaaccgccaactaatgtta

SEQ ID NO: 27292 - DNA, 25 bp, Probe sequence
gtataaaccgccaactaatgttaaa

SEQ ID NO: 27293 - DNA, 25 bp, Probe sequence
gcttggttaacacgttcttggtatt

SEQ ID NO: 27294 - DNA, 25 bp, Probe sequence
cttggttaacacgttcttggtattt

SEQ ID NO: 27295 - DNA, 25 bp, Probe sequence
tgcttggttaacacgttcttggtat

SEQ ID NO: 27296 - DNA, 25 bp, Probe sequence
ttaggtgcttggttaacacgttctt

SEQ ID NO: 27297 - DNA, 25 bp, Probe sequence
atagatgtactcagtgattcggatg

SEQ ID NO: 27298 - DNA, 25 bp, Probe sequence
catagatgtactcagtgattcggat

SEQ ID NO: 27299 - DNA, 25 bp, Probe sequence
tagatgtactcagtgattcggatgt

SEQ ID NO: 27300 - DNA, 25 bp, Probe sequence
agacatagatgtactcagtgattcg

SEQ ID NO: 27301 - DNA, 25 bp, Probe sequence
ccagacatagatgtactcagtgatt

SEQ ID NO: 27302 - DNA, 25 bp, Probe sequence
accagacatagatgtactcagtgat

SEQ ID NO: 27303 - DNA, 25 bp, Probe sequence
gaaccagacatagatgtactcagtg

SEQ ID NO: 27304 - DNA, 25 bp, Probe sequence
gacatagatgtactcagtgattcgg

SEQ ID NO: 27305 - DNA, 25 bp, Probe sequence
aaccagacatagatgtactcagtga

SEQ ID NO: 27306 - DNA, 25 bp, Probe sequence
cacttacacttgttgaacctgatat

SEQ ID NO: 27307 - DNA, 25 bp, Probe sequence
tacacttgttgaacctgatattgag

SEQ ID NO: 27308 - DNA, 25 bp, Probe sequence
cacttgttgaacctgatattgagtc

SEQ ID NO: 27309 - DNA, 25 bp, Probe sequence
tcacttacacttgttgaacctgata

SEQ ID NO: 27310 - DNA, 25 bp, Probe sequence
acacttgttgaacctgatattgagt

SEQ ID NO: 27311 - DNA, 25 bp, Probe sequence
ttacacttgttgaacctgatattga

SEQ ID NO: 27312 - DNA, 25 bp, Probe sequence
acttacacttgttgaacctgatatt

SEQ ID NO: 27313 - DNA, 25 bp, Probe sequence
gtcacttacacttgttgaacctgat

SEQ ID NO: 27314 - DNA, 25 bp, Probe sequence
cttacacttgttgaacctgatattg

SEQ ID NO: 27315 - DNA, 25 bp, Probe sequence
gttggattagtatgtatggctgttg

SEQ ID NO: 27316 - DNA, 25 bp, Probe sequence
agttggattagtatgtatggctgtt

SEQ ID NO: 27317 - DNA, 25 bp, Probe sequence
tacttacttgcgttgttatcattcc

SEQ ID NO: 27318 - DNA, 25 bp, Probe sequence
ggattagtatgtatggctgttggtt

SEQ ID NO: 27319 - DNA, 25 bp, Probe sequence
ttggattagtatgtatggctgttgg

SEQ ID NO: 27320 - DNA, 25 bp, Probe sequence
cctcatacattaactgcttccgtag

SEQ ID NO: 27321 - DNA, 25 bp, Probe sequence
gtatgtatggctgttggttacctat

SEQ ID NO: 27322 - DNA, 25 bp, Probe sequence
ttagtatgtatggctgttggttacc

SEQ ID NO: 27323 - DNA, 25 bp, Probe sequence
attagtatgtatggctgttggttac

SEQ ID NO: 27324 - DNA, 25 bp, Probe sequence
tattgaatcacttagcgaggtagac

SEQ ID NO: 27325 - DNA, 25 bp, Probe sequence
tcgcttaatgatgttgatgttgaat

SEQ ID NO: 27326 - DNA, 25 bp, Probe sequence
gtgaatcgcttaatgatgttgatgt

SEQ ID NO: 27327 - DNA, 25 bp, Probe sequence
tgtgaatcgcttaatgatgttgatg

SEQ ID NO: 27328 - DNA, 25 bp, Probe sequence
atcgcttaatgatgttgatgttgaa

SEQ ID NO: 27329 - DNA, 25 bp, Probe sequence
aatcgcttaatgatgttgatgttga

SEQ ID NO: 27330 - DNA, 25 bp, Probe sequence
tgaatcgcttaatgatgttgatgtt

SEQ ID NO: 27331 - DNA, 25 bp, Probe sequence
ttgtgaatcgcttaatgatgttgat

SEQ ID NO: 27332 - DNA, 25 bp, Probe sequence
gcttaatgatgttgatgttgaatcg

SEQ ID NO: 27333 - DNA, 25 bp, Probe sequence
taatgatgttgatgtgctaccagat

SEQ ID NO: 27334 - DNA, 25 bp, Probe sequence
cttaatgatgttgatgtgctaccag

SEQ ID NO: 27335 - DNA, 25 bp, Probe sequence
ttaatgatgttgatgtgctaccaga

SEQ ID NO: 27336 - DNA, 25 bp, Probe sequence
acttaatgatgttgatgtgctacca

SEQ ID NO: 27337 - DNA, 25 bp, Probe sequence
aatgatgttgatgtgctaccagatt

SEQ ID NO: 27338 - DNA, 25 bp, Probe sequence
cacttgtagaaccacttaatgatgt

SEQ ID NO: 27339 - DNA, 25 bp, Probe sequence
atgatgttgatgtgctaccagattc

SEQ ID NO: 27340 - DNA, 25 bp, Probe sequence
tacttaatgatgttgatgtgctacc

SEQ ID NO: 27341 - DNA, 25 bp, Probe sequence
agacttactatcacttgtggaatca

SEQ ID NO: 27342 - DNA, 25 bp, Probe sequence
atcgctcaatgattctgatgtactc

SEQ ID NO: 27343 - DNA, 25 bp, Probe sequence
tcgctcaatgattctgatgtactca

SEQ ID NO: 27344 - DNA, 25 bp, Probe sequence
aatcgctcaatgattctgatgtact

SEQ ID NO: 27345 - DNA, 25 bp, Probe sequence
tttgtgaatctgatttgcttgttga

SEQ ID NO: 27346 - DNA, 25 bp, Probe sequence
ctttgtgaatctgatttgcttgttg

SEQ ID NO: 27347 - DNA, 25 bp, Probe sequence
actttgtgaatctgatttgcttgtt

SEQ ID NO: 27348 - DNA, 25 bp, Probe sequence
tactttgtgaatctgatttgcttgt

SEQ ID NO: 27349 - DNA, 25 bp, Probe sequence
ttgtgaatctgatttgcttgttgac

SEQ ID NO: 27350 - DNA, 25 bp, Probe sequence
tgtactttgtgaatctgatttgctt

SEQ ID NO: 27351 - DNA, 25 bp, Probe sequence
acagaatcagataggcttacacttg

SEQ ID NO: 27352 - DNA, 25 bp, Probe sequence
cacagaatcagataggcttacactt

SEQ ID NO: 27353 - DNA, 25 bp, Probe sequence
cagatgtgcttaatgacttagatgc

SEQ ID NO: 27354 - DNA, 25 bp, Probe sequence
ctcacagaatcagataggcttacac

SEQ ID NO: 27355 - DNA, 25 bp, Probe sequence
cactcacagaatcagataggcttac

SEQ ID NO: 27356 - DNA, 25 bp, Probe sequence
agaatcagataggcttacacttgtc

SEQ ID NO: 27357 - DNA, 25 bp, Probe sequence
cagaatcagataggcttacacttgt

SEQ ID NO: 27358 - DNA, 25 bp, Probe sequence
tcacagaatcagataggcttacact

SEQ ID NO: 27359 - DNA, 25 bp, Probe sequence
actcacagaatcagataggcttaca

SEQ ID NO: 27360 - DNA, 25 bp, Probe sequence
tgtgctttgtgaagtgttatttgat

SEQ ID NO: 27361 - DNA, 25 bp, Probe sequence
ttgtgctttgtgaagtgttatttga

SEQ ID NO: 27362 - DNA, 25 bp, Probe sequence
gttgtgctttgtgaagtgttatttg

SEQ ID NO: 27363 - DNA, 25 bp, Probe sequence
gtgctttgtgaagtgttatttgatg

SEQ ID NO: 27364 - DNA, 25 bp, Probe sequence
tgctttgtgaagtgttatttgatgc

SEQ ID NO: 27365 - DNA, 25 bp, Probe sequence
cgttgtgctttgtgaagtgttattt

SEQ ID NO: 27366 - DNA, 25 bp, Probe sequence
tttgtttaagttgaccgaagatggc

SEQ ID NO: 27367 - DNA, 25 bp, Probe sequence
tgtgaagtgttatttgatgcagtac

SEQ ID NO: 27368 - DNA, 25 bp, Probe sequence
tttgtgaagtgttatttgatgcagt

SEQ ID NO: 27369 - DNA, 25 bp, Probe sequence
ttcttgattatgatgatacacagca

SEQ ID NO: 27370 - DNA, 25 bp, Probe sequence
tcttgattatgatgatacacagcat

SEQ ID NO: 27371 - DNA, 25 bp, Probe sequence
tcattggtaattggagtaatcatca

SEQ ID NO: 27372 - DNA, 25 bp, Probe sequence
tatgatgatacacagcatatcctca

SEQ ID NO: 27373 - DNA, 25 bp, Probe sequence
atagatacggcacatcaacgcatta

SEQ ID NO: 27374 - DNA, 25 bp, Probe sequence
tatagatacggcacatcaacgcatt

SEQ ID NO: 27375 - DNA, 25 bp, Probe sequence
ttatagatacggcacatcaacgcat

SEQ ID NO: 27376 - DNA, 25 bp, Probe sequence
attcttgattatgatgatacacagc

SEQ ID NO: 27377 - DNA, 25 bp, Probe sequence
tagatacggcacatcaacgcattaa

SEQ ID NO: 27378 - DNA, 25 bp, Probe sequence
aagtatggttaagcaagtggaagaa

SEQ ID NO: 27379 - DNA, 25 bp, Probe sequence
aagcaagtggaagaacaattaacaa

SEQ ID NO: 27380 - DNA, 25 bp, Probe sequence
taagcaagtggaagaacaattaaca

SEQ ID NO: 27381 - DNA, 25 bp, Probe sequence
tatggttaagcaagtggaagaacaa

SEQ ID NO: 27382 - DNA, 25 bp, Probe sequence
ggttaagcaagtggaagaacaatta

SEQ ID NO: 27383 - DNA, 25 bp, Probe sequence
agtatggttaagcaagtggaagaac

SEQ ID NO: 27384 - DNA, 25 bp, Probe sequence
atggttaagcaagtggaagaacaat

SEQ ID NO: 27385 - DNA, 25 bp, Probe sequence
gtatggttaagcaagtggaagaaca

SEQ ID NO: 27386 - DNA, 25 bp, Probe sequence
acagagcagttatattccatacaac

SEQ ID NO: 27387 - DNA, 25 bp, Probe sequence
agttgcctagtgattacaatatgga

SEQ ID NO: 27388 - DNA, 25 bp, Probe sequence
gttgcctagtgattacaatatggaa

SEQ ID NO: 27389 - DNA, 25 bp, Probe sequence
aagttgcctagtgattacaatatgg

SEQ ID NO: 27390 - DNA, 25 bp, Probe sequence
attcaatgaacataaccgattctgt

SEQ ID NO: 27391 - DNA, 25 bp, Probe sequence
tcatgttaagttgcctagtgattac

SEQ ID NO: 27392 - DNA, 25 bp, Probe sequence
tgttaagttgcctagtgattacaat

SEQ ID NO: 27393 - DNA, 25 bp, Probe sequence
atgttaagttgcctagtgattacaa

SEQ ID NO: 27394 - DNA, 25 bp, Probe sequence
catgttaagttgcctagtgattaca

SEQ ID NO: 27395 - DNA, 25 bp, Probe sequence
ttagaatcttcgataatgcagttgc

SEQ ID NO: 27396 - DNA, 25 bp, Probe sequence
actggtatggttcaatgataggtta

SEQ ID NO: 27397 - DNA, 25 bp, Probe sequence
tggtatggttcaatgataggttact

SEQ ID NO: 27398 - DNA, 25 bp, Probe sequence
aactggtatggttcaatgataggtt

SEQ ID NO: 27399 - DNA, 25 bp, Probe sequence
ctggtatggttcaatgataggttac

SEQ ID NO: 27400 - DNA, 25 bp, Probe sequence
gtaagtgagcaagaccttcctaatt

SEQ ID NO: 27401 - DNA, 25 bp, Probe sequence
taactggtatggttcaatgataggt

SEQ ID NO: 27402 - DNA, 25 bp, Probe sequence
agtaagtgagcaagaccttcctaat

SEQ ID NO: 27403 - DNA, 25 bp, Probe sequence
taagtgagcaagaccttcctaattg

SEQ ID NO: 27404 - DNA, 25 bp, Probe sequence
aagtaagtgagcaagaccttcctaa

SEQ ID NO: 27405 - DNA, 25 bp, Probe sequence
acaacgggtttaatcggtagtattt

SEQ ID NO: 27406 - DNA, 25 bp, Probe sequence
ttatcacaacgggtttaatcggtag

SEQ ID NO: 27407 - DNA, 25 bp, Probe sequence
attatcacaacgggtttaatcggta

SEQ ID NO: 27408 - DNA, 25 bp, Probe sequence
tattatcacaacgggtttaatcggt

SEQ ID NO: 27409 - DNA, 25 bp, Probe sequence
cacaacgggtttaatcggtagtatt

SEQ ID NO: 27410 - DNA, 25 bp, Probe sequence
ttattatcacaacgggtttaatcgg

SEQ ID NO: 27411 - DNA, 25 bp, Probe sequence
gttcttaacacttaaagcatttggc

SEQ ID NO: 27412 - DNA, 25 bp, Probe sequence
tataacgggtatatgaaaggtggca

SEQ ID NO: 27413 - DNA, 25 bp, Probe sequence
tcacaacgggtttaatcggtagtat

SEQ ID NO: 27414 - DNA, 25 bp, Probe sequence
ttcactatggctcttcacttctcta

SEQ ID NO: 27415 - DNA, 25 bp, Probe sequence
tcactatggctcttcacttctctag

SEQ ID NO: 27416 - DNA, 25 bp, Probe sequence
cactatggctcttcacttctctagg

SEQ ID NO: 27417 - DNA, 25 bp, Probe sequence
tatttcactatggctcttcacttct

SEQ ID NO: 27418 - DNA, 25 bp, Probe sequence
atttcactatggctcttcacttctc

SEQ ID NO: 27419 - DNA, 25 bp, Probe sequence
atatttcactatggctcttcacttc

SEQ ID NO: 27420 - DNA, 25 bp, Probe sequence
tttcactatggctcttcacttctct

SEQ ID NO: 27421 - DNA, 25 bp, Probe sequence
cacttctctagggaaattgctatct

SEQ ID NO: 27422 - DNA, 25 bp, Probe sequence
tcacttctctagggaaattgctatc

SEQ ID NO: 27423 - DNA, 25 bp, Probe sequence
tatcttcaaaggctatggacaatca

SEQ ID NO: 27424 - DNA, 25 bp, Probe sequence
atcttcaaaggctatggacaatcat

SEQ ID NO: 27425 - DNA, 25 bp, Probe sequence
gttatcttcaaaggctatggacaat

SEQ ID NO: 27426 - DNA, 25 bp, Probe sequence
ttatcttcaaaggctatggacaatc

SEQ ID NO: 27427 - DNA, 25 bp, Probe sequence
cgttatcttcaaaggctatggacaa

SEQ ID NO: 27428 - DNA, 25 bp, Probe sequence
tcttcaaaggctatggacaatcatc

SEQ ID NO: 27429 - DNA, 25 bp, Probe sequence
agcaaacagcaaacacctaagattc

SEQ ID NO: 27430 - DNA, 25 bp, Probe sequence
gcaaacagcaaacacctaagattca

SEQ ID NO: 27431 - DNA, 25 bp, Probe sequence
acacgcaaatgttatattaccaaat

SEQ ID NO: 27432 - DNA, 25 bp, Probe sequence
agacaatggcgataacaataattca

SEQ ID NO: 27433 - DNA, 25 bp, Probe sequence
cagacaatggcgataacaataattc

SEQ ID NO: 27434 - DNA, 25 bp, Probe sequence
ccagacaatggcgataacaataatt

SEQ ID NO: 27435 - DNA, 25 bp, Probe sequence
tccagacaatggcgataacaataat

SEQ ID NO: 27436 - DNA, 25 bp, Probe sequence
atccagacaatggcgataacaataa

SEQ ID NO: 27437 - DNA, 25 bp, Probe sequence
aatccagacaatggcgataacaata

SEQ ID NO: 27438 - DNA, 25 bp, Probe sequence
taatccagacaatggcgataacaat

SEQ ID NO: 27439 - DNA, 25 bp, Probe sequence
ataatccagacaatggcgataacaa

SEQ ID NO: 27440 - DNA, 25 bp, Probe sequence
ctgataatccagacaatggcgataa

SEQ ID NO: 27441 - DNA, 25 bp, Probe sequence
ttattgcttctggtgtagttgtagg

SEQ ID NO: 27442 - DNA, 25 bp, Probe sequence
ggacaatggcgataacaataattca

SEQ ID NO: 27443 - DNA, 25 bp, Probe sequence
cggacaatggcgataacaataattc

SEQ ID NO: 27444 - DNA, 25 bp, Probe sequence
attgcttctggtgtagttgtaggta

SEQ ID NO: 27445 - DNA, 25 bp, Probe sequence
tattgcttctggtgtagttgtaggt

SEQ ID NO: 27446 - DNA, 25 bp, Probe sequence
ttgcttctggtgtagttgtaggtaa

SEQ ID NO: 27447 - DNA, 25 bp, Probe sequence
caagacaattatcctaatggtggtt

SEQ ID NO: 27448 - DNA, 25 bp, Probe sequence
tccagacaatcctaataatcctgat

SEQ ID NO: 27449 - DNA, 25 bp, Probe sequence
atccagacaatcctaataatcctga

SEQ ID NO: 27450 - DNA, 25 bp, Probe sequence
attaaagcaattaaaccgagtgaaa

SEQ ID NO: 27451 - DNA, 25 bp, Probe sequence
agtcatcaatttaaacaggtctcaa

SEQ ID NO: 27452 - DNA, 25 bp, Probe sequence
gagtcatcaatttaaacaggtctca

SEQ ID NO: 27453 - DNA, 25 bp, Probe sequence
tgagtcatcaatttaaacaggtctc

SEQ ID NO: 27454 - DNA, 25 bp, Probe sequence
tattaaagcaattaaaccgagtgaa

SEQ ID NO: 27455 - DNA, 25 bp, Probe sequence
gtcatcaatttaaacaggtctcaaa

SEQ ID NO: 27456 - DNA, 25 bp, Probe sequence
atattaaagcaattaaaccgagtga

SEQ ID NO: 27457 - DNA, 25 bp, Probe sequence
attaaaccgagtgaaaaggggataa

SEQ ID NO: 27458 - DNA, 25 bp, Probe sequence
taaaccgagtgaaaaggggataaag

SEQ ID NO: 27459 - DNA, 25 bp, Probe sequence
taacagcacttaacgaaggattaga

SEQ ID NO: 27460 - DNA, 25 bp, Probe sequence
aagaaggtatgaagagacttgctaa

SEQ ID NO: 27461 - DNA, 25 bp, Probe sequence
aacagcacttaacgaaggattagaa

SEQ ID NO: 27462 - DNA, 25 bp, Probe sequence
acagcacttaacgaaggattagaag

SEQ ID NO: 27463 - DNA, 25 bp, Probe sequence
gtataacagcacttaacgaaggatt

SEQ ID NO: 27464 - DNA, 25 bp, Probe sequence
ataacagcacttaacgaaggattag

SEQ ID NO: 27465 - DNA, 25 bp, Probe sequence
tgtataacagcacttaacgaaggat

SEQ ID NO: 27466 - DNA, 25 bp, Probe sequence
atgtataacagcacttaacgaagga

SEQ ID NO: 27467 - DNA, 25 bp, Probe sequence
cagcacttaacgaaggattagaagc

SEQ ID NO: 27468 - DNA, 25 bp, Probe sequence
agtgacgaattacaacttgatcctt

SEQ ID NO: 27469 - DNA, 25 bp, Probe sequence
attggcattgttagaggatttgaat

SEQ ID NO: 27470 - DNA, 25 bp, Probe sequence
tattggcattgttagaggatttgaa

SEQ ID NO: 27471 - DNA, 25 bp, Probe sequence
ttattggcattgttagaggatttga

SEQ ID NO: 27472 - DNA, 25 bp, Probe sequence
gtgacgaattacaacttgatccttt

SEQ ID NO: 27473 - DNA, 25 bp, Probe sequence
attattggcattgttagaggatttg

SEQ ID NO: 27474 - DNA, 25 bp, Probe sequence
aagtgacgaattacaacttgatcct

SEQ ID NO: 27475 - DNA, 25 bp, Probe sequence
tccatataaagtgctatcagtttca

SEQ ID NO: 27476 - DNA, 25 bp, Probe sequence
tcatcctatcaatgcagattggtta

SEQ ID NO: 27477 - DNA, 25 bp, Probe sequence
cctccaatgccatataacatatctg

SEQ ID NO: 27478 - DNA, 25 bp, Probe sequence
tcctccaatgccatataacatatct

SEQ ID NO: 27479 - DNA, 25 bp, Probe sequence
cataatcctccaatgccatataaca

SEQ ID NO: 27480 - DNA, 25 bp, Probe sequence
acataatcctccaatgccatataac

SEQ ID NO: 27481 - DNA, 25 bp, Probe sequence
cacataatcctccaatgccatataa

SEQ ID NO: 27482 - DNA, 25 bp, Probe sequence
ctccaatgccatataacatatctga

SEQ ID NO: 27483 - DNA, 25 bp, Probe sequence
atcctccaatgccatataacatatc

SEQ ID NO: 27484 - DNA, 25 bp, Probe sequence
tccaatgccatataacatatctgaa

SEQ ID NO: 27485 - DNA, 25 bp, Probe sequence
aatcctccaatgccatataacatat

SEQ ID NO: 27486 - DNA, 25 bp, Probe sequence
caatacctaagccatcaacacctac

SEQ ID NO: 27487 - DNA, 25 bp, Probe sequence
ctacaccaatacctaagccatcaac

SEQ ID NO: 27488 - DNA, 25 bp, Probe sequence
atacctaagccatcaacacctacaa

SEQ ID NO: 27489 - DNA, 25 bp, Probe sequence
aatacctaagccatcaacacctaca

SEQ ID NO: 27490 - DNA, 25 bp, Probe sequence
tacaccaatacctaagccatcaaca

SEQ ID NO: 27491 - DNA, 25 bp, Probe sequence
ggaacacaccaatatgctacagatg

SEQ ID NO: 27492 - DNA, 25 bp, Probe sequence
ccaatacctaagccatcaacaccta

SEQ ID NO: 27493 - DNA, 25 bp, Probe sequence
cctacaccaatacctaagccatcaa

SEQ ID NO: 27494 - DNA, 25 bp, Probe sequence
aacacaccaatatgctacagatgta

SEQ ID NO: 27495 - DNA, 25 bp, Probe sequence
attggatatgataatggacagccag

SEQ ID NO: 27496 - DNA, 25 bp, Probe sequence
ggatatgataatggacagccagttg

SEQ ID NO: 27497 - DNA, 25 bp, Probe sequence
tggatatgataatggacagccagtt

SEQ ID NO: 27498 - DNA, 25 bp, Probe sequence
ttggatatgataatggacagccagt

SEQ ID NO: 27499 - DNA, 25 bp, Probe sequence
cattggatatgataatggacagcca

SEQ ID NO: 27500 - DNA, 25 bp, Probe sequence
gatatgataatggacagccagttgc

SEQ ID NO: 27501 - DNA, 25 bp, Probe sequence
gaatctattcacctcattggatatg

SEQ ID NO: 27502 - DNA, 25 bp, Probe sequence
tcattggatatgataatggacagcc

SEQ ID NO: 27503 - DNA, 25 bp, Probe sequence
ctcattggatatgataatggacagc

SEQ ID NO: 27504 - DNA, 25 bp, Probe sequence
aatcctattgtagatggtgcatgtt

SEQ ID NO: 27505 - DNA, 25 bp, Probe sequence
tcctattgtagatggtgcatgttat

SEQ ID NO: 27506 - DNA, 25 bp, Probe sequence
atcctattgtagatggtgcatgtta

SEQ ID NO: 27507 - DNA, 25 bp, Probe sequence
cctattgtagatggtgcatgttata

SEQ ID NO: 27508 - DNA, 25 bp, Probe sequence
ggaatattgctcaaatgcgaatctt

SEQ ID NO: 27509 - DNA, 25 bp, Probe sequence
tggcaatatacagcaattattagaa

SEQ ID NO: 27510 - DNA, 25 bp, Probe sequence
gaatattgctcaaatgcgaatcttt

SEQ ID NO: 27511 - DNA, 25 bp, Probe sequence
ttggcaatatacagcaattattaga

SEQ ID NO: 27512 - DNA, 25 bp, Probe sequence
attggaatattgctcaaatgcgaat

SEQ ID NO: 27513 - DNA, 25 bp, Probe sequence
aatgctaatcgtcaatccaacttaa

SEQ ID NO: 27514 - DNA, 25 bp, Probe sequence
cttctagcattggttctcattgttg

SEQ ID NO: 27515 - DNA, 25 bp, Probe sequence
ctagcattggttctcattgttgttc

SEQ ID NO: 27516 - DNA, 25 bp, Probe sequence
atccttctagcattggttctcattg

SEQ ID NO: 27517 - DNA, 25 bp, Probe sequence
tcaactaataacagtgattccagca

SEQ ID NO: 27518 - DNA, 25 bp, Probe sequence
tctagcattggttctcattgttgtt

SEQ ID NO: 27519 - DNA, 25 bp, Probe sequence
ttctagcattggttctcattgttgt

SEQ ID NO: 27520 - DNA, 25 bp, Probe sequence
caactaataacagtgattccagcaa

SEQ ID NO: 27521 - DNA, 25 bp, Probe sequence
acctgttgattattatgtgagagtc

SEQ ID NO: 27522 - DNA, 25 bp, Probe sequence
caataatcaacaacaacctgctaca

SEQ ID NO: 27523 - DNA, 25 bp, Probe sequence
tcaataatcaacaacaacctgctac

SEQ ID NO: 27524 - DNA, 25 bp, Probe sequence
gtcaataatcaacaacaacctgcta

SEQ ID NO: 27525 - DNA, 25 bp, Probe sequence
atagcgtcaataatcaacaacaacc

SEQ ID NO: 27526 - DNA, 25 bp, Probe sequence
tagcattggttcttattgttgttcc

SEQ ID NO: 27527 - DNA, 25 bp, Probe sequence
acaatagcgtcaataatcaacaaca

SEQ ID NO: 27528 - DNA, 25 bp, Probe sequence
acaacaatagcgtcaataatcaaca

SEQ ID NO: 27529 - DNA, 25 bp, Probe sequence
acgatgaatgttcctgttgattact

SEQ ID NO: 27530 - DNA, 25 bp, Probe sequence
tagcgtcaataatcaacaacaacct

SEQ ID NO: 27531 - DNA, 25 bp, Probe sequence
ctgtaggatttatcgcatctatcgt

SEQ ID NO: 27532 - DNA, 25 bp, Probe sequence
actgtaggatttatcgcatctatcg

SEQ ID NO: 27533 - DNA, 25 bp, Probe sequence
actatacacgtcattaacattccac

SEQ ID NO: 27534 - DNA, 25 bp, Probe sequence
cactatacacgtcattaacattcca

SEQ ID NO: 27535 - DNA, 25 bp, Probe sequence
acactatacacgtcattaacattcc

SEQ ID NO: 27536 - DNA, 25 bp, Probe sequence
tgtaggatttatcgcatctatcgta

SEQ ID NO: 27537 - DNA, 25 bp, Probe sequence
cgaagttgacaattatctttggctt

SEQ ID NO: 27538 - DNA, 25 bp, Probe sequence
gcatttaactgaaggtaaagatgga

SEQ ID NO: 27539 - DNA, 25 bp, Probe sequence
atttaactgaaggtaaagatggacg

SEQ ID NO: 27540 - DNA, 25 bp, Probe sequence
atactggcacttcttagatgttgtt

SEQ ID NO: 27541 - DNA, 25 bp, Probe sequence
tatactggcacttcttagatgttgt

SEQ ID NO: 27542 - DNA, 25 bp, Probe sequence
ttatactggcacttcttagatgttg

SEQ ID NO: 27543 - DNA, 25 bp, Probe sequence
cacttcttagatgttgtttgggttt

SEQ ID NO: 27544 - DNA, 25 bp, Probe sequence
tactggcacttcttagatgttgttt

SEQ ID NO: 27545 - DNA, 25 bp, Probe sequence
accctatttgcgacactattaactt

SEQ ID NO: 27546 - DNA, 25 bp, Probe sequence
ttaggtttagtctttgttggattcg

SEQ ID NO: 27547 - DNA, 25 bp, Probe sequence
taccctatttgcgacactattaact

SEQ ID NO: 27548 - DNA, 25 bp, Probe sequence
ccctatttgcgacactattaacttt

SEQ ID NO: 27549 - DNA, 25 bp, Probe sequence
aatacggagaagaagttgtagcagg

SEQ ID NO: 27550 - DNA, 25 bp, Probe sequence
ggtaatacattgtacgttatcgctg

SEQ ID NO: 27551 - DNA, 25 bp, Probe sequence
aggtaatacattgtacgttatcgct

SEQ ID NO: 27552 - DNA, 25 bp, Probe sequence
caggtaatacattgtacgttatcgc

SEQ ID NO: 27553 - DNA, 25 bp, Probe sequence
aaggtaaatacggagaagaagttgt

SEQ ID NO: 27554 - DNA, 25 bp, Probe sequence
taaatacggagaagaagttgtagca

SEQ ID NO: 27555 - DNA, 25 bp, Probe sequence
ccaggtaatacattgtacgttatcg

SEQ ID NO: 27556 - DNA, 25 bp, Probe sequence
gaaggtaaatacggagaagaagttg

SEQ ID NO: 27557 - DNA, 25 bp, Probe sequence
ggtagaagaaggtaaatacggagaa

SEQ ID NO: 27558 - DNA, 25 bp, Probe sequence
tgatgaagatattcgcattacagaa

SEQ ID NO: 27559 - DNA, 25 bp, Probe sequence
acagaagagtatgtcgctcaattaa

SEQ ID NO: 27560 - DNA, 25 bp, Probe sequence
aacagaagagtatgtcgctcaatta

SEQ ID NO: 27561 - DNA, 25 bp, Probe sequence
taacagaagagtatgtcgctcaatt

SEQ ID NO: 27562 - DNA, 25 bp, Probe sequence
ctaacagaagagtatgtcgctcaat

SEQ ID NO: 27563 - DNA, 25 bp, Probe sequence
atgatgaagatattcgcattacaga

SEQ ID NO: 27564 - DNA, 25 bp, Probe sequence
ccaacatgatgaagatattcgcatt

SEQ ID NO: 27565 - DNA, 25 bp, Probe sequence
tgaagatattcgcattacagaagat

SEQ ID NO: 27566 - DNA, 25 bp, Probe sequence
atgaagatattcgcattacagaaga

SEQ ID NO: 27567 - DNA, 25 bp, Probe sequence
ggtggtattgatgcgttacttattc

SEQ ID NO: 27568 - DNA, 25 bp, Probe sequence
ggtattgatgcgttacttattcgtg

SEQ ID NO: 27569 - DNA, 25 bp, Probe sequence
gtggtattgatgcgttacttattcg

SEQ ID NO: 27570 - DNA, 25 bp, Probe sequence
taactggatgattacaatggcacaa

SEQ ID NO: 27571 - DNA, 25 bp, Probe sequence
tggtggtattgatgcgttacttatt

SEQ ID NO: 27572 - DNA, 25 bp, Probe sequence
ctgttggattctggattggtatctt

SEQ ID NO: 27573 - DNA, 25 bp, Probe sequence
tggtattgatgcgttacttattcgt

SEQ ID NO: 27574 - DNA, 25 bp, Probe sequence
gtattgatgcgttacttattcgtgc

SEQ ID NO: 27575 - DNA, 25 bp, Probe sequence
gcgttaatcaactcattcttctcaa

SEQ ID NO: 27576 - DNA, 25 bp, Probe sequence
tggtccgataactagatataaggca

SEQ ID NO: 27577 - DNA, 25 bp, Probe sequence
ggtccgataactagatataaggcaa

SEQ ID NO: 27578 - DNA, 25 bp, Probe sequence
atggtccgataactagatataaggc

SEQ ID NO: 27579 - DNA, 25 bp, Probe sequence
gtccgataactagatataaggcaat

SEQ ID NO: 27580 - DNA, 25 bp, Probe sequence
tccgataactagatataaggcaatc

SEQ ID NO: 27581 - DNA, 25 bp, Probe sequence
taactagatataaggcaatcgtgaa

SEQ ID NO: 27582 - DNA, 25 bp, Probe sequence
aatggtccgataactagatataagg

SEQ ID NO: 27583 - DNA, 25 bp, Probe sequence
ataactagatataaggcaatcgtga

SEQ ID NO: 27584 - DNA, 25 bp, Probe sequence
gataactagatataaggcaatcgtg

SEQ ID NO: 27585 - DNA, 25 bp, Probe sequence
atacctatcataatcgttgctgctt

SEQ ID NO: 27586 - DNA, 25 bp, Probe sequence
aatacctatcataatcgttgctgct

SEQ ID NO: 27587 - DNA, 25 bp, Probe sequence
taatacctatcataatcgttgctgc

SEQ ID NO: 27588 - DNA, 25 bp, Probe sequence
aataagaatgccgaatctggtaaga

SEQ ID NO: 27589 - DNA, 25 bp, Probe sequence
aacaattattaccaagcacacctaa

SEQ ID NO: 27590 - DNA, 25 bp, Probe sequence
aatgacgaaccatataacaatgagt

SEQ ID NO: 27591 - DNA, 25 bp, Probe sequence
taataagaatgccgaatctggtaag

SEQ ID NO: 27592 - DNA, 25 bp, Probe sequence
cagtagcaagtagtcagaagttctt

SEQ ID NO: 27593 - DNA, 25 bp, Probe sequence
atgacgaaccatataacaatgagtt

SEQ ID NO: 27594 - DNA, 25 bp, Probe sequence
ctattacagtcattatcagccctcg

SEQ ID NO: 27595 - DNA, 25 bp, Probe sequence
aatactacaccacaaattaaaggcg

SEQ ID NO: 27596 - DNA, 25 bp, Probe sequence
acgacgaatactacaccacaaatta

SEQ ID NO: 27597 - DNA, 25 bp, Probe sequence
cgacgaatactacaccacaaattaa

SEQ ID NO: 27598 - DNA, 25 bp, Probe sequence
aacgacgaatactacaccacaaatt

SEQ ID NO: 27599 - DNA, 25 bp, Probe sequence
actattacagtcattatcagccctc

SEQ ID NO: 27600 - DNA, 25 bp, Probe sequence
tataaccttctaaacggcataagtg

SEQ ID NO: 27601 - DNA, 25 bp, Probe sequence
caacgacgaatactacaccacaaat

SEQ ID NO: 27602 - DNA, 25 bp, Probe sequence
aactattacagtcattatcagccct

SEQ ID NO: 27603 - DNA, 25 bp, Probe sequence
gcgttggtccattaacaattactat

SEQ ID NO: 27604 - DNA, 25 bp, Probe sequence
ggcgttggtccattaacaattacta

SEQ ID NO: 27605 - DNA, 25 bp, Probe sequence
gttatattagttggtaatgatggcg

SEQ ID NO: 27606 - DNA, 25 bp, Probe sequence
cgttatattagttggtaatgatggc

SEQ ID NO: 27607 - DNA, 25 bp, Probe sequence
cgttggtccattaacaattactatg

SEQ ID NO: 27608 - DNA, 25 bp, Probe sequence
ccgttatattagttggtaatgatgg

SEQ ID NO: 27609 - DNA, 25 bp, Probe sequence
cgttgattatgatgcggttaaagaa

SEQ ID NO: 27610 - DNA, 25 bp, Probe sequence
ttatgatgcggttaaagaaattgct

SEQ ID NO: 27611 - DNA, 25 bp, Probe sequence
aaacaaattgccaaagactacagac

SEQ ID NO: 27612 - DNA, 25 bp, Probe sequence
tggcatattattgttcaatcacctt

SEQ ID NO: 27613 - DNA, 25 bp, Probe sequence
tggtcctcgtacttactattacaac

SEQ ID NO: 27614 - DNA, 25 bp, Probe sequence
gatggtcctcgtacttactattaca

SEQ ID NO: 27615 - DNA, 25 bp, Probe sequence
atcaattatcagttgcgatggagtc

SEQ ID NO: 27616 - DNA, 25 bp, Probe sequence
agatggtcctcgtacttactattac

SEQ ID NO: 27617 - DNA, 25 bp, Probe sequence
atggtcctcgtacttactattacaa

SEQ ID NO: 27618 - DNA, 25 bp, Probe sequence
agagatggtcctcgtacttactatt

SEQ ID NO: 27619 - DNA, 25 bp, Probe sequence
ttagagatggtcctcgtacttacta

SEQ ID NO: 27620 - DNA, 25 bp, Probe sequence
tagagatggtcctcgtacttactat

SEQ ID NO: 27621 - DNA, 25 bp, Probe sequence
taaagctaaagcgacaaataccaac

SEQ ID NO: 27622 - DNA, 25 bp, Probe sequence
gcactagatataaagctaaagcgac

SEQ ID NO: 27623 - DNA, 25 bp, Probe sequence
ggcactagatataaagctaaagcga

SEQ ID NO: 27624 - DNA, 25 bp, Probe sequence
aggcactagatataaagctaaagcg

SEQ ID NO: 27625 - DNA, 25 bp, Probe sequence
caggcactagatataaagctaaagc

SEQ ID NO: 27626 - DNA, 25 bp, Probe sequence
ataaagctaaagcgacaaataccaa

SEQ ID NO: 27627 - DNA, 25 bp, Probe sequence
accaggcactagatataaagctaaa

SEQ ID NO: 27628 - DNA, 25 bp, Probe sequence
aaccaggcactagatataaagctaa

SEQ ID NO: 27629 - DNA, 25 bp, Probe sequence
aaaccaggcactagatataaagcta

SEQ ID NO: 27630 - DNA, 25 bp, Probe sequence
tagattgtgatggtgatacgaatgt

SEQ ID NO: 27631 - DNA, 25 bp, Probe sequence
agattgtgatggtgatacgaatgta

SEQ ID NO: 27632 - DNA, 25 bp, Probe sequence
taggtgagtggattacaattacagg

SEQ ID NO: 27633 - DNA, 25 bp, Probe sequence
tgatagccataatacattccagttg

SEQ ID NO: 27634 - DNA, 25 bp, Probe sequence
actagattgtgatggtgatacgaat

SEQ ID NO: 27635 - DNA, 25 bp, Probe sequence
gcgttactagattgtgatggtgata

SEQ ID NO: 27636 - DNA, 25 bp, Probe sequence
ggtctaggtgagtggattacaatta

SEQ ID NO: 27637 - DNA, 25 bp, Probe sequence
catccttatgagttgtctattggtc

SEQ ID NO: 27638 - DNA, 25 bp, Probe sequence
ctagattgtgatggtgatacgaatg

SEQ ID NO: 27639 - DNA, 25 bp, Probe sequence
aataagtcagatgccaatacgatga

SEQ ID NO: 27640 - DNA, 25 bp, Probe sequence
aaataagtcagatgccaatacgatg

SEQ ID NO: 27641 - DNA, 25 bp, Probe sequence
aatacgatgacaggtacgattgaaa

SEQ ID NO: 27642 - DNA, 25 bp, Probe sequence
caatacgatgacaggtacgattgaa

SEQ ID NO: 27643 - DNA, 25 bp, Probe sequence
ttaaataagtcagatgccaatacga

SEQ ID NO: 27644 - DNA, 25 bp, Probe sequence
cgatgacaggtacgattgaaagtat

SEQ ID NO: 27645 - DNA, 25 bp, Probe sequence
atacgatgacaggtacgattgaaag

SEQ ID NO: 27646 - DNA, 25 bp, Probe sequence
taaataagtcagatgccaatacgat

SEQ ID NO: 27647 - DNA, 25 bp, Probe sequence
tcagatgccaatacgatgacaggta

SEQ ID NO: 27648 - DNA, 25 bp, Probe sequence
gcaggttggaacttaacattattca

SEQ ID NO: 27649 - DNA, 25 bp, Probe sequence
ggttggaacttaacattattcatcg

SEQ ID NO: 27650 - DNA, 25 bp, Probe sequence
gttggaacttaacattattcatcgt

SEQ ID NO: 27651 - DNA, 25 bp, Probe sequence
caggttggaacttaacattattcat

SEQ ID NO: 27652 - DNA, 25 bp, Probe sequence
agattaattagtggtgcagtagtcg

SEQ ID NO: 27653 - DNA, 25 bp, Probe sequence
gcgattgtctgctatctaattattc

SEQ ID NO: 27654 - DNA, 25 bp, Probe sequence
gttgcaggttggaacttaacattat

SEQ ID NO: 27655 - DNA, 25 bp, Probe sequence
aggttggaacttaacattattcatc

SEQ ID NO: 27656 - DNA, 25 bp, Probe sequence
tgcaggttggaacttaacattattc

SEQ ID NO: 27657 - DNA, 25 bp, Probe sequence
ttgaagttgatgaggtgttagtagc

SEQ ID NO: 27658 - DNA, 25 bp, Probe sequence
ttagaatgatggcagcgttatatcc

SEQ ID NO: 27659 - DNA, 25 bp, Probe sequence
tgaagttgatgaggtgttagtagca

SEQ ID NO: 27660 - DNA, 25 bp, Probe sequence
aattaagcgtattagactatgcctt

SEQ ID NO: 27661 - DNA, 25 bp, Probe sequence
gaagttgatgaggtgttagtagcac

SEQ ID NO: 27662 - DNA, 25 bp, Probe sequence
aatagatgaaggtaaggatgcacaa

SEQ ID NO: 27663 - DNA, 25 bp, Probe sequence
tgctaccagatataaatgcgataca

SEQ ID NO: 27664 - DNA, 25 bp, Probe sequence
taatagatgaaggtaaggatgcaca

SEQ ID NO: 27665 - DNA, 25 bp, Probe sequence
tttagaatgatggcagcgttatatc

SEQ ID NO: 27666 - DNA, 25 bp, Probe sequence
ccaatgtaccatgttgatcttgatg

SEQ ID NO: 27667 - DNA, 25 bp, Probe sequence
tccaatgtaccatgttgatcttgat

SEQ ID NO: 27668 - DNA, 25 bp, Probe sequence
atccaatgtaccatgttgatcttga

SEQ ID NO: 27669 - DNA, 25 bp, Probe sequence
aatccaatgtaccatgttgatcttg

SEQ ID NO: 27670 - DNA, 25 bp, Probe sequence
caatgtaccatgttgatcttgatga

SEQ ID NO: 27671 - DNA, 25 bp, Probe sequence
aatgtaccatgttgatcttgatgaa

SEQ ID NO: 27672 - DNA, 25 bp, Probe sequence
tgtaccatgttgatcttgatgaaat

SEQ ID NO: 27673 - DNA, 25 bp, Probe sequence
atgtaccatgttgatcttgatgaaa

SEQ ID NO: 27674 - DNA, 25 bp, Probe sequence
gtaccatgttgatcttgatgaaatc

SEQ ID NO: 27675 - DNA, 25 bp, Probe sequence
ccattgtcaggaacgattattgagc

SEQ ID NO: 27676 - DNA, 25 bp, Probe sequence
gccattgtcaggaacgattattgag

SEQ ID NO: 27677 - DNA, 25 bp, Probe sequence
gtggatgatgaaattgtgagtatcg

SEQ ID NO: 27678 - DNA, 25 bp, Probe sequence
attgtcaggaacgattattgagcga

SEQ ID NO: 27679 - DNA, 25 bp, Probe sequence
cattgtcaggaacgattattgagcg

SEQ ID NO: 27680 - DNA, 25 bp, Probe sequence
caggaacgattattgagcgaaatac

SEQ ID NO: 27681 - DNA, 25 bp, Probe sequence
ggaacgattattgagcgaaatacaa

SEQ ID NO: 27682 - DNA, 25 bp, Probe sequence
aggaacgattattgagcgaaataca

SEQ ID NO: 27683 - DNA, 25 bp, Probe sequence
caagatgatattgggacagtaggtt

SEQ ID NO: 27684 - DNA, 25 bp, Probe sequence
ggtacgaagagtaagccaatgttat

SEQ ID NO: 27685 - DNA, 25 bp, Probe sequence
gtacgaagagtaagccaatgttatt

SEQ ID NO: 27686 - DNA, 25 bp, Probe sequence
cctaacttaacagcaccagtacata

SEQ ID NO: 27687 - DNA, 25 bp, Probe sequence
ctaacttaacagcaccagtacataa

SEQ ID NO: 27688 - DNA, 25 bp, Probe sequence
acagcaccagtacataataatacaa

SEQ ID NO: 27689 - DNA, 25 bp, Probe sequence
aacagcaccagtacataataataca

SEQ ID NO: 27690 - DNA, 25 bp, Probe sequence
ttggctaatgacacctaaagagtta

SEQ ID NO: 27691 - DNA, 25 bp, Probe sequence
acttaacagcaccagtacataataa

SEQ ID NO: 27692 - DNA, 25 bp, Probe sequence
aacttaacagcaccagtacataata

SEQ ID NO: 27693 - DNA, 25 bp, Probe sequence
ttacaatcaatcgtcagcaacagtt

SEQ ID NO: 27694 - DNA, 25 bp, Probe sequence
tctaatgcgattcgttcatcatatt

SEQ ID NO: 27695 - DNA, 25 bp, Probe sequence
atctaatgcgattcgttcatcatat

SEQ ID NO: 27696 - DNA, 25 bp, Probe sequence
tatctaatgcgattcgttcatcata

SEQ ID NO: 27697 - DNA, 25 bp, Probe sequence
aattaggtggtagttggacactatg

SEQ ID NO: 27698 - DNA, 25 bp, Probe sequence
gaattaggtggtagttggacactat

SEQ ID NO: 27699 - DNA, 25 bp, Probe sequence
cttatattcagatgtaaacggcgat

SEQ ID NO: 27700 - DNA, 25 bp, Probe sequence
ccttatattcagatgtaaacggcga

SEQ ID NO: 27701 - DNA, 25 bp, Probe sequence
caatcaatcgtcagcaacagtttaa

SEQ ID NO: 27702 - DNA, 25 bp, Probe sequence
taagatttggttattagtgctcgtc

SEQ ID NO: 27703 - DNA, 25 bp, Probe sequence
atcatctgttacgaaagacttagca

SEQ ID NO: 27704 - DNA, 25 bp, Probe sequence
tcatctgttacgaaagacttagcaa

SEQ ID NO: 27705 - DNA, 25 bp, Probe sequence
aagatttggttattagtgctcgtct

SEQ ID NO: 27706 - DNA, 25 bp, Probe sequence
catctgttacgaaagacttagcaat

SEQ ID NO: 27707 - DNA, 25 bp, Probe sequence
agatttggttattagtgctcgtctc

SEQ ID NO: 27708 - DNA, 25 bp, Probe sequence
aatcatctgttacgaaagacttagc

SEQ ID NO: 27709 - DNA, 25 bp, Probe sequence
gatttggttattagtgctcgtctcc

SEQ ID NO: 27710 - DNA, 25 bp, Probe sequence
cggttagtcatatgttagatggtca

SEQ ID NO: 27711 - DNA, 25 bp, Probe sequence
cggcattacctgtaagtgatgaata

SEQ ID NO: 27712 - DNA, 25 bp, Probe sequence
ggcattacctgtaagtgatgaatat

SEQ ID NO: 27713 - DNA, 25 bp, Probe sequence
ttctaggatgtatgcaagctaatca

SEQ ID NO: 27714 - DNA, 25 bp, Probe sequence
ctaggatgtatgcaagctaatcatg

SEQ ID NO: 27715 - DNA, 25 bp, Probe sequence
tctaggatgtatgcaagctaatcat

SEQ ID NO: 27716 - DNA, 25 bp, Probe sequence
caatatctttgtttggcaaggtgat

SEQ ID NO: 27717 - DNA, 25 bp, Probe sequence
caatgaaggtgtaggtaaagccaaa

SEQ ID NO: 27718 - DNA, 25 bp, Probe sequence
agtatataattcatacggttggtcc

SEQ ID NO: 27719 - DNA, 25 bp, Probe sequence
aatatctttgtttggcaaggtgata

SEQ ID NO: 27720 - DNA, 25 bp, Probe sequence
aatgttgtaataagagaccgtaagc

SEQ ID NO: 27721 - DNA, 25 bp, Probe sequence
atctggtaatgtacttgttgatggt

SEQ ID NO: 27722 - DNA, 25 bp, Probe sequence
tctggtaatgtacttgttgatggta

SEQ ID NO: 27723 - DNA, 25 bp, Probe sequence
ttccatctggtaatgtacttgttga

SEQ ID NO: 27724 - DNA, 25 bp, Probe sequence
ctggtaatgtacttgttgatggtag

SEQ ID NO: 27725 - DNA, 25 bp, Probe sequence
tccatctggtaatgtacttgttgat

SEQ ID NO: 27726 - DNA, 25 bp, Probe sequence
aacttatggcgtcatcgtagataca

SEQ ID NO: 27727 - DNA, 25 bp, Probe sequence
attccatctggtaatgtacttgttg

SEQ ID NO: 27728 - DNA, 25 bp, Probe sequence
ttgatggtagtggtatcggtgatat

SEQ ID NO: 27729 - DNA, 25 bp, Probe sequence
atcaacataacagagacgaggtaat

SEQ ID NO: 27730 - DNA, 25 bp, Probe sequence
tcaacataacagagacgaggtaatt

SEQ ID NO: 27731 - DNA, 25 bp, Probe sequence
tatcaacataacagagacgaggtaa

SEQ ID NO: 27732 - DNA, 25 bp, Probe sequence
caacataacagagacgaggtaattg

SEQ ID NO: 27733 - DNA, 25 bp, Probe sequence
ttatcaacataacagagacgaggta

SEQ ID NO: 27734 - DNA, 25 bp, Probe sequence
aacataacagagacgaggtaattgt

SEQ ID NO: 27735 - DNA, 25 bp, Probe sequence
acataacagagacgaggtaattgtg

SEQ ID NO: 27736 - DNA, 25 bp, Probe sequence
cataacagagacgaggtaattgtgc

SEQ ID NO: 27737 - DNA, 25 bp, Probe sequence
tttatcaacataacagagacgaggt

SEQ ID NO: 27738 - DNA, 25 bp, Probe sequence
cggttattcgctattacttgatgtt

SEQ ID NO: 27739 - DNA, 25 bp, Probe sequence
aaggtgccgttaatatgtgttgtat

SEQ ID NO: 27740 - DNA, 25 bp, Probe sequence
aggtgccgttaatatgtgttgtatt

SEQ ID NO: 27741 - DNA, 25 bp, Probe sequence
agtattcaagtagttcgccgagata

SEQ ID NO: 27742 - DNA, 25 bp, Probe sequence
gtattcaagtagttcgccgagatac

SEQ ID NO: 27743 - DNA, 25 bp, Probe sequence
tgttggtcatcttagagaagcactg

SEQ ID NO: 27744 - DNA, 25 bp, Probe sequence
ataaaggtgccgttaatatgtgttg

SEQ ID NO: 27745 - DNA, 25 bp, Probe sequence
aagcaatggataaagtgttaaagcc

SEQ ID NO: 27746 - DNA, 25 bp, Probe sequence
gataaaggtgccgttaatatgtgtt

SEQ ID NO: 27747 - DNA, 25 bp, Probe sequence
gatgataatgttgctggtctagttc

SEQ ID NO: 27748 - DNA, 25 bp, Probe sequence
attgtaagtcatagcgttcaagaag

SEQ ID NO: 27749 - DNA, 25 bp, Probe sequence
cgatgataatgttgctggtctagtt

SEQ ID NO: 27750 - DNA, 25 bp, Probe sequence
tcttatgactatatgcttgtgaacc

SEQ ID NO: 27751 - DNA, 25 bp, Probe sequence
aattgtaagtcatagcgttcaagaa

SEQ ID NO: 27752 - DNA, 25 bp, Probe sequence
atgataatgttgctggtctagttca

SEQ ID NO: 27753 - DNA, 25 bp, Probe sequence
tgataatgttgctggtctagttcac

SEQ ID NO: 27754 - DNA, 25 bp, Probe sequence
ttgtaagtcatagcgttcaagaagc

SEQ ID NO: 27755 - DNA, 25 bp, Probe sequence
cttagtgtcgatgataatgttgctg

SEQ ID NO: 27756 - DNA, 25 bp, Probe sequence
taagtaatcctgctacaaatggtgg

SEQ ID NO: 27757 - DNA, 25 bp, Probe sequence
actacagatgatgtattgaagcctt

SEQ ID NO: 27758 - DNA, 25 bp, Probe sequence
atggcactacagatgatgtattgaa

SEQ ID NO: 27759 - DNA, 25 bp, Probe sequence
atgaaatatggcactacagatgatg

SEQ ID NO: 27760 - DNA, 25 bp, Probe sequence
cactacagatgatgtattgaagcct

SEQ ID NO: 27761 - DNA, 25 bp, Probe sequence
ataagtaatcctgctacaaatggtg

SEQ ID NO: 27762 - DNA, 25 bp, Probe sequence
tggcactacagatgatgtattgaag

SEQ ID NO: 27763 - DNA, 25 bp, Probe sequence
tatggcactacagatgatgtattga

SEQ ID NO: 27764 - DNA, 25 bp, Probe sequence
aactagatgaaatggtagactgtgc

SEQ ID NO: 27765 - DNA, 25 bp, Probe sequence
gaagatgaaccaggcttatcagtat

SEQ ID NO: 27766 - DNA, 25 bp, Probe sequence
tgaaccaggcttatcagtatatgaa

SEQ ID NO: 27767 - DNA, 25 bp, Probe sequence
aatgaagatgaaccaggcttatcag

SEQ ID NO: 27768 - DNA, 25 bp, Probe sequence
atgaaccaggcttatcagtatatga

SEQ ID NO: 27769 - DNA, 25 bp, Probe sequence
aagatgaaccaggcttatcagtata

SEQ ID NO: 27770 - DNA, 25 bp, Probe sequence
gatgaaccaggcttatcagtatatg

SEQ ID NO: 27771 - DNA, 25 bp, Probe sequence
agatgaaccaggcttatcagtatat

SEQ ID NO: 27772 - DNA, 25 bp, Probe sequence
tgaagatgaaccaggcttatcagta

SEQ ID NO: 27773 - DNA, 25 bp, Probe sequence
atgaagatgaaccaggcttatcagt

SEQ ID NO: 27774 - DNA, 25 bp, Probe sequence
attaggaatagcaacaggtatggac

SEQ ID NO: 27775 - DNA, 25 bp, Probe sequence
gattaggaatagcaacaggtatgga

SEQ ID NO: 27776 - DNA, 25 bp, Probe sequence
agattaggaatagcaacaggtatgg

SEQ ID NO: 27777 - DNA, 25 bp, Probe sequence
gtgagattaggaatagcaacaggta

SEQ ID NO: 27778 - DNA, 25 bp, Probe sequence
acagtgagattaggaatagcaacag

SEQ ID NO: 27779 - DNA, 25 bp, Probe sequence
gacagtgagattaggaatagcaaca

SEQ ID NO: 27780 - DNA, 25 bp, Probe sequence
tgacagtgagattaggaatagcaac

SEQ ID NO: 27781 - DNA, 25 bp, Probe sequence
atgacagtgagattaggaatagcaa

SEQ ID NO: 27782 - DNA, 25 bp, Probe sequence
ggaatagcaacaggtatggacttag

SEQ ID NO: 27783 - DNA, 25 bp, Probe sequence
agataatggctgatacgcttactac

SEQ ID NO: 27784 - DNA, 25 bp, Probe sequence
gataatggctgatacgcttactaca

SEQ ID NO: 27785 - DNA, 25 bp, Probe sequence
ataatggctgatacgcttactacac

SEQ ID NO: 27786 - DNA, 25 bp, Probe sequence
aagataatggctgatacgcttacta

SEQ ID NO: 27787 - DNA, 25 bp, Probe sequence
taatggctgatacgcttactacacc

SEQ ID NO: 27788 - DNA, 25 bp, Probe sequence
atgatgagtttccagacaggtattt

SEQ ID NO: 27789 - DNA, 25 bp, Probe sequence
gatgatgagtttccagacaggtatt

SEQ ID NO: 27790 - DNA, 25 bp, Probe sequence
caaatgatgatgagtttccagacag

SEQ ID NO: 27791 - DNA, 25 bp, Probe sequence
aaagataatggctgatacgcttact

SEQ ID NO: 27792 - DNA, 25 bp, Probe sequence
cgtatcgcagttatctgaagaagaa

SEQ ID NO: 27793 - DNA, 25 bp, Probe sequence
ctcgtatcgcagttatctgaagaag

SEQ ID NO: 27794 - DNA, 25 bp, Probe sequence
tcgtatcgcagttatctgaagaaga

SEQ ID NO: 27795 - DNA, 25 bp, Probe sequence
actcgtatcgcagttatctgaagaa

SEQ ID NO: 27796 - DNA, 25 bp, Probe sequence
aacactcgtatcgcagttatctgaa

SEQ ID NO: 27797 - DNA, 25 bp, Probe sequence
cactcgtatcgcagttatctgaaga

SEQ ID NO: 27798 - DNA, 25 bp, Probe sequence
acactcgtatcgcagttatctgaag

SEQ ID NO: 27799 - DNA, 25 bp, Probe sequence
ctaaagcattacaacgaacaggtcc

SEQ ID NO: 27800 - DNA, 25 bp, Probe sequence
gtatcgcagttatctgaagaagaaa

SEQ ID NO: 27801 - DNA, 25 bp, Probe sequence
caacaattacctgatgattatcgtg

SEQ ID NO: 27802 - DNA, 25 bp, Probe sequence
tcaacaattacctgatgattatcgt

SEQ ID NO: 27803 - DNA, 25 bp, Probe sequence
aacaattacctgatgattatcgtgt

SEQ ID NO: 27804 - DNA, 25 bp, Probe sequence
gctattcaacaattacctgatgatt

SEQ ID NO: 27805 - DNA, 25 bp, Probe sequence
taaacgaatacatacgaccacaact

SEQ ID NO: 27806 - DNA, 25 bp, Probe sequence
aacgaatacatacgaccacaactcc

SEQ ID NO: 27807 - DNA, 25 bp, Probe sequence
ttcaacaattacctgatgattatcg

SEQ ID NO: 27808 - DNA, 25 bp, Probe sequence
aaacgaatacatacgaccacaactc

SEQ ID NO: 27809 - DNA, 25 bp, Probe sequence
aagctattcaacaattacctgatga

SEQ ID NO: 27810 - DNA, 25 bp, Probe sequence
tggtcattattaattgctgagtcac

SEQ ID NO: 27811 - DNA, 25 bp, Probe sequence
ggtcattattaattgctgagtcact

SEQ ID NO: 27812 - DNA, 25 bp, Probe sequence
taggtttcttgtttactggtatgct

SEQ ID NO: 27813 - DNA, 25 bp, Probe sequence
ttgcgaaacctaataaagaaatgct

SEQ ID NO: 27814 - DNA, 25 bp, Probe sequence
tgccaatgatgatagggactttatt

SEQ ID NO: 27815 - DNA, 25 bp, Probe sequence
gtttcttgtttactggtatgcttca

SEQ ID NO: 27816 - DNA, 25 bp, Probe sequence
ggtttcttgtttactggtatgcttc

SEQ ID NO: 27817 - DNA, 25 bp, Probe sequence
tggtataggtttcttgtttactggt

SEQ ID NO: 27818 - DNA, 25 bp, Probe sequence
ttgccaatgatgatagggactttat

SEQ ID NO: 27819 - DNA, 25 bp, Probe sequence
gcaacctttggaattggatttacta

SEQ ID NO: 27820 - DNA, 25 bp, Probe sequence
aacctttggaattggatttactaca

SEQ ID NO: 27821 - DNA, 25 bp, Probe sequence
acctttggaattggatttactacaa

SEQ ID NO: 27822 - DNA, 25 bp, Probe sequence
caacctttggaattggatttactac

SEQ ID NO: 27823 - DNA, 25 bp, Probe sequence
tgcaacctttggaattggatttact

SEQ ID NO: 27824 - DNA, 25 bp, Probe sequence
tggaattggatttactacaaagaaa

SEQ ID NO: 27825 - DNA, 25 bp, Probe sequence
ttggaattggatttactacaaagaa

SEQ ID NO: 27826 - DNA, 25 bp, Probe sequence
tattatttagttttgctgttggtgc

SEQ ID NO: 27827 - DNA, 25 bp, Probe sequence
cctttggaattggatttactacaaa

SEQ ID NO: 27828 - DNA, 25 bp, Probe sequence
ctgattacctgattgttgctgttat

SEQ ID NO: 27829 - DNA, 25 bp, Probe sequence
gattacctgattgttgctgttatcg

SEQ ID NO: 27830 - DNA, 25 bp, Probe sequence
tgattacctgattgttgctgttatc

SEQ ID NO: 27831 - DNA, 25 bp, Probe sequence
gctgattacctgattgttgctgtta

SEQ ID NO: 27832 - DNA, 25 bp, Probe sequence
attacctgattgttgctgttatcga

SEQ ID NO: 27833 - DNA, 25 bp, Probe sequence
gaagagtttgctgattacctgattg

SEQ ID NO: 27834 - DNA, 25 bp, Probe sequence
tgaagagtttgctgattacctgatt

SEQ ID NO: 27835 - DNA, 25 bp, Probe sequence
ttgaagagtttgctgattacctgat

SEQ ID NO: 27836 - DNA, 25 bp, Probe sequence
attgaagagtttgctgattacctga

SEQ ID NO: 27837 - DNA, 25 bp, Probe sequence
ttatagatgagcgcacaactgagtc

SEQ ID NO: 27838 - DNA, 25 bp, Probe sequence
tatttatagatgagcgcacaactga

SEQ ID NO: 27839 - DNA, 25 bp, Probe sequence
gtatttatagatgagcgcacaactg

SEQ ID NO: 27840 - DNA, 25 bp, Probe sequence
aagtatttatagatgagcgcacaac

SEQ ID NO: 27841 - DNA, 25 bp, Probe sequence
cacaactgagtctaaacgacttaaa

SEQ ID NO: 27842 - DNA, 25 bp, Probe sequence
aaagtatttatagatgagcgcacaa

SEQ ID NO: 27843 - DNA, 25 bp, Probe sequence
atttatagatgagcgcacaactgag

SEQ ID NO: 27844 - DNA, 25 bp, Probe sequence
agtatttatagatgagcgcacaact

SEQ ID NO: 27845 - DNA, 25 bp, Probe sequence
gcacaactgagtctaaacgacttaa

SEQ ID NO: 27846 - DNA, 25 bp, Probe sequence
gaatggaatcgtgctatcctagaag

SEQ ID NO: 27847 - DNA, 25 bp, Probe sequence
cgaatcaaccatgtaactcatattg

SEQ ID NO: 27848 - DNA, 25 bp, Probe sequence
atgactctgcaactactattcgatt

SEQ ID NO: 27849 - DNA, 25 bp, Probe sequence
atgaatggaatcgtgctatcctaga

SEQ ID NO: 27850 - DNA, 25 bp, Probe sequence
catgactctgcaactactattcgat

SEQ ID NO: 27851 - DNA, 25 bp, Probe sequence
catatcgaatcaaccatgtaactca

SEQ ID NO: 27852 - DNA, 25 bp, Probe sequence
tgactctgcaactactattcgatta

SEQ ID NO: 27853 - DNA, 25 bp, Probe sequence
tgaatggaatcgtgctatcctagaa

SEQ ID NO: 27854 - DNA, 25 bp, Probe sequence
tcatatcgaatcaaccatgtaactc

SEQ ID NO: 27855 - DNA, 25 bp, Probe sequence
gacgaggttatatccatcatattgc

SEQ ID NO: 27856 - DNA, 25 bp, Probe sequence
tcaagacaatccttcaatgtatcat

SEQ ID NO: 27857 - DNA, 25 bp, Probe sequence
atcaagacaatccttcaatgtatca

SEQ ID NO: 27858 - DNA, 25 bp, Probe sequence
ggacgaggttatatccatcatattg

SEQ ID NO: 27859 - DNA, 25 bp, Probe sequence
gcctggatttactattgatacacct

SEQ ID NO: 27860 - DNA, 25 bp, Probe sequence
acgaggttatatccatcatattgca

SEQ ID NO: 27861 - DNA, 25 bp, Probe sequence
gttaatcaagacaatccttcaatgt

SEQ ID NO: 27862 - DNA, 25 bp, Probe sequence
tagtagggcatcatcacatatccat

SEQ ID NO: 27863 - DNA, 25 bp, Probe sequence
atagtagggcatcatcacatatcca

SEQ ID NO: 27864 - DNA, 25 bp, Probe sequence
caagttcttcaacgattattagtgc

SEQ ID NO: 27865 - DNA, 25 bp, Probe sequence
aaggtgtgccaatgatgattacaac

SEQ ID NO: 27866 - DNA, 25 bp, Probe sequence
caaggtgtgccaatgatgattacaa

SEQ ID NO: 27867 - DNA, 25 bp, Probe sequence
aacaaggtgtgccaatgatgattac

SEQ ID NO: 27868 - DNA, 25 bp, Probe sequence
cttcaacgattattagtgcaacaga

SEQ ID NO: 27869 - DNA, 25 bp, Probe sequence
tcttcaacgattattagtgcaacag

SEQ ID NO: 27870 - DNA, 25 bp, Probe sequence
aacgattattagtgcaacagatcct

SEQ ID NO: 27871 - DNA, 25 bp, Probe sequence
caacgattattagtgcaacagatcc

SEQ ID NO: 27872 - DNA, 25 bp, Probe sequence
tcaagttcttcaacgattattagtg

SEQ ID NO: 27873 - DNA, 25 bp, Probe sequence
tggtcttatggttagttatcactgc

SEQ ID NO: 27874 - DNA, 25 bp, Probe sequence
atcagtaagaagtgacaagcaataa

SEQ ID NO: 27875 - DNA, 25 bp, Probe sequence
gatcagtaagaagtgacaagcaata

SEQ ID NO: 27876 - DNA, 25 bp, Probe sequence
atggtcttatggttagttatcactg

SEQ ID NO: 27877 - DNA, 25 bp, Probe sequence
cgatcagtaagaagtgacaagcaat

SEQ ID NO: 27878 - DNA, 25 bp, Probe sequence
tacgatcagtaagaagtgacaagca

SEQ ID NO: 27879 - DNA, 25 bp, Probe sequence
tgttacgatcagtaagaagtgacaa

SEQ ID NO: 27880 - DNA, 25 bp, Probe sequence
atgttacgatcagtaagaagtgaca

SEQ ID NO: 27881 - DNA, 25 bp, Probe sequence
ttatcatgctaatgttacgatcagt

SEQ ID NO: 27882 - DNA, 25 bp, Probe sequence
gctgaagcaatatcctgatatgtat

SEQ ID NO: 27883 - DNA, 25 bp, Probe sequence
ctatactaaccttcgatgagttgct

SEQ ID NO: 27884 - DNA, 25 bp, Probe sequence
tatactaaccttcgatgagttgctg

SEQ ID NO: 27885 - DNA, 25 bp, Probe sequence
accagatttagcacaacaattcaaa

SEQ ID NO: 27886 - DNA, 25 bp, Probe sequence
ccagatttagcacaacaattcaaac

SEQ ID NO: 27887 - DNA, 25 bp, Probe sequence
gaccagatttagcacaacaattcaa

SEQ ID NO: 27888 - DNA, 25 bp, Probe sequence
tcctgaatcctatgaaggctcaatc

SEQ ID NO: 27889 - DNA, 25 bp, Probe sequence
ctcctgaatcctatgaaggctcaat

SEQ ID NO: 27890 - DNA, 25 bp, Probe sequence
cagatttagcacaacaattcaaaca

SEQ ID NO: 27891 - DNA, 25 bp, Probe sequence
gacgatgtactcagtgaattagatg

SEQ ID NO: 27892 - DNA, 25 bp, Probe sequence
agacgatgtactcagtgaattagat

SEQ ID NO: 27893 - DNA, 25 bp, Probe sequence
tagacgatgtactcagtgaattaga

SEQ ID NO: 27894 - DNA, 25 bp, Probe sequence
acgatgtactcagtgaattagatga

SEQ ID NO: 27895 - DNA, 25 bp, Probe sequence
ttagacgatgtactcagtgaattag

SEQ ID NO: 27896 - DNA, 25 bp, Probe sequence
cgatgtactcagtgaattagatgat

SEQ ID NO: 27897 - DNA, 25 bp, Probe sequence
gtactcagtgaattagatgattcgc

SEQ ID NO: 27898 - DNA, 25 bp, Probe sequence
gacgacgctttatagatatggagtt

SEQ ID NO: 27899 - DNA, 25 bp, Probe sequence
acgacgctttatagatatggagttg

SEQ ID NO: 27900 - DNA, 25 bp, Probe sequence
agatggtatgtggaagttagattgg

SEQ ID NO: 27901 - DNA, 25 bp, Probe sequence
agcgacttcacatctattaggttat

SEQ ID NO: 27902 - DNA, 25 bp, Probe sequence
atagcaatacaatcgcacatacatt

SEQ ID NO: 27903 - DNA, 25 bp, Probe sequence
aatagcaatacaatcgcacatacat

SEQ ID NO: 27904 - DNA, 25 bp, Probe sequence
agcaatacaatcgcacatacattaa

SEQ ID NO: 27905 - DNA, 25 bp, Probe sequence
aagaagatggtatgtggaagttaga

SEQ ID NO: 27906 - DNA, 25 bp, Probe sequence
aagcgacttcacatctattaggtta

SEQ ID NO: 27907 - DNA, 25 bp, Probe sequence
caagatgataccttcgttccactta

SEQ ID NO: 27908 - DNA, 25 bp, Probe sequence
aagatgataccttcgttccacttaa

SEQ ID NO: 27909 - DNA, 25 bp, Probe sequence
gagagttcaagttagacgcctatta

SEQ ID NO: 27910 - DNA, 25 bp, Probe sequence
agagttcaagttagacgcctattaa

SEQ ID NO: 27911 - DNA, 25 bp, Probe sequence
caagttgtagagcaagcagaattaa

SEQ ID NO: 27912 - DNA, 25 bp, Probe sequence
atgagagttcaagttagacgcctat

SEQ ID NO: 27913 - DNA, 25 bp, Probe sequence
tgagagttcaagttagacgcctatt

SEQ ID NO: 27914 - DNA, 25 bp, Probe sequence
aatgagagttcaagttagacgccta

SEQ ID NO: 27915 - DNA, 25 bp, Probe sequence
cagaattaatggcaagtcagcaata

SEQ ID NO: 27916 - DNA, 25 bp, Probe sequence
agaattaatggcaagtcagcaataa

SEQ ID NO: 27917 - DNA, 25 bp, Probe sequence
agttgtagagcaagcagaattaatg

SEQ ID NO: 27918 - DNA, 25 bp, Probe sequence
tatattgtgaagtcagttggtgtct

SEQ ID NO: 27919 - DNA, 25 bp, Probe sequence
tgctattataggcggaattatcact

SEQ ID NO: 27920 - DNA, 25 bp, Probe sequence
atattgtgaagtcagttggtgtctc

SEQ ID NO: 27921 - DNA, 25 bp, Probe sequence
gcttatattgtgaagtcagttggtg

SEQ ID NO: 27922 - DNA, 25 bp, Probe sequence
gcttgcttatattgtgaagtcagtt

SEQ ID NO: 27923 - DNA, 25 bp, Probe sequence
ttgcttgcttatattgtgaagtcag

SEQ ID NO: 27924 - DNA, 25 bp, Probe sequence
tgcttatattgtgaagtcagttggt

SEQ ID NO: 27925 - DNA, 25 bp, Probe sequence
ttgcttatattgtgaagtcagttgg

SEQ ID NO: 27926 - DNA, 25 bp, Probe sequence
ttatattgtgaagtcagttggtgtc

SEQ ID NO: 27927 - DNA, 25 bp, Probe sequence
attacacttggtgaaggtctaacag

SEQ ID NO: 27928 - DNA, 25 bp, Probe sequence
tattacacttggtgaaggtctaaca

SEQ ID NO: 27929 - DNA, 25 bp, Probe sequence
tacacttggtgaaggtctaacagat

SEQ ID NO: 27930 - DNA, 25 bp, Probe sequence
ttacacttggtgaaggtctaacaga

SEQ ID NO: 27931 - DNA, 25 bp, Probe sequence
ttattacacttggtgaaggtctaac

SEQ ID NO: 27932 - DNA, 25 bp, Probe sequence
acacttggtgaaggtctaacagatt

SEQ ID NO: 27933 - DNA, 25 bp, Probe sequence
attatgaaccctacaactggcaatc

SEQ ID NO: 27934 - DNA, 25 bp, Probe sequence
cattatgaaccctacaactggcaat

SEQ ID NO: 27935 - DNA, 25 bp, Probe sequence
acttggtgaaggtctaacagatttg

SEQ ID NO: 27936 - DNA, 25 bp, Probe sequence
gcagttgaggcattgataaagtatt

SEQ ID NO: 27937 - DNA, 25 bp, Probe sequence
agcagttgaggcattgataaagtat

SEQ ID NO: 27938 - DNA, 25 bp, Probe sequence
aagcagttgaggcattgataaagta

SEQ ID NO: 27939 - DNA, 25 bp, Probe sequence
atcgttcaagaaattcacttaggga

SEQ ID NO: 27940 - DNA, 25 bp, Probe sequence
tcgttcaagaaattcacttagggaa

SEQ ID NO: 27941 - DNA, 25 bp, Probe sequence
aatcgttcaagaaattcacttaggg

SEQ ID NO: 27942 - DNA, 25 bp, Probe sequence
cagttgaggcattgataaagtattg

SEQ ID NO: 27943 - DNA, 25 bp, Probe sequence
gtttggaatgaaagtgaatgaacaa

SEQ ID NO: 27944 - DNA, 25 bp, Probe sequence
atgtttggaatgaaagtgaatgaac

SEQ ID NO: 27945 - DNA, 25 bp, Probe sequence
gcgttggcttaatcacagaatataa

SEQ ID NO: 27946 - DNA, 25 bp, Probe sequence
ggcgaaccagcaatctataataagt

SEQ ID NO: 27947 - DNA, 25 bp, Probe sequence
gcgaaccagcaatctataataagtt

SEQ ID NO: 27948 - DNA, 25 bp, Probe sequence
cactagcaagtcctaacaacatact

SEQ ID NO: 27949 - DNA, 25 bp, Probe sequence
tcattagcgaattattagagcatca

SEQ ID NO: 27950 - DNA, 25 bp, Probe sequence
cgtatcattagcgaattattagagc

SEQ ID NO: 27951 - DNA, 25 bp, Probe sequence
gcaagtggtacatctattagaacat

SEQ ID NO: 27952 - DNA, 25 bp, Probe sequence
cgttggcttaatcacagaatataat

SEQ ID NO: 27953 - DNA, 25 bp, Probe sequence
gcactagcaagtcctaacaacatac

SEQ ID NO: 27954 - DNA, 25 bp, Probe sequence
tatgtattatgaacgctctgaacca

SEQ ID NO: 27955 - DNA, 25 bp, Probe sequence
gaacgacgatagtaagaaggatgat

SEQ ID NO: 27956 - DNA, 25 bp, Probe sequence
gtatgtattatgaacgctctgaacc

SEQ ID NO: 27957 - DNA, 25 bp, Probe sequence
aacgacgatagtaagaaggatgatt

SEQ ID NO: 27958 - DNA, 25 bp, Probe sequence
acgacgatagtaagaaggatgattc

SEQ ID NO: 27959 - DNA, 25 bp, Probe sequence
cgacgatagtaagaaggatgattca

SEQ ID NO: 27960 - DNA, 25 bp, Probe sequence
ggaacgacgatagtaagaaggatga

SEQ ID NO: 27961 - DNA, 25 bp, Probe sequence
gacgatagtaagaaggatgattcaa

SEQ ID NO: 27962 - DNA, 25 bp, Probe sequence
atgtattatgaacgctctgaaccag

SEQ ID NO: 27963 - DNA, 25 bp, Probe sequence
agaatcaagtagtacaactccaact

SEQ ID NO: 27964 - DNA, 25 bp, Probe sequence
agtgttgagaataacgaatctatga

SEQ ID NO: 27965 - DNA, 25 bp, Probe sequence
caataccatgtcagaatcgttgata

SEQ ID NO: 27966 - DNA, 25 bp, Probe sequence
agtagaatcaagtagtacaactcca

SEQ ID NO: 27967 - DNA, 25 bp, Probe sequence
acaataccatgtcagaatcgttgat

SEQ ID NO: 27968 - DNA, 25 bp, Probe sequence
gttgagaataacgaatctatgatgg

SEQ ID NO: 27969 - DNA, 25 bp, Probe sequence
ttgagaataacgaatctatgatgga

SEQ ID NO: 27970 - DNA, 25 bp, Probe sequence
aataccatgtcagaatcgttgataa

SEQ ID NO: 27971 - DNA, 25 bp, Probe sequence
caagtagtacaactccaactaaggt

SEQ ID NO: 27972 - DNA, 25 bp, Probe sequence
cgattacagcgatggtgatattatg

SEQ ID NO: 27973 - DNA, 25 bp, Probe sequence
acgattacagcgatggtgatattat

SEQ ID NO: 27974 - DNA, 25 bp, Probe sequence
gacgattacagcgatggtgatatta

SEQ ID NO: 27975 - DNA, 25 bp, Probe sequence
ttacacatagaggttctgcttcatt

SEQ ID NO: 27976 - DNA, 25 bp, Probe sequence
attacacatagaggttctgcttcat

SEQ ID NO: 27977 - DNA, 25 bp, Probe sequence
cagttaatagacgattacagcgatg

SEQ ID NO: 27978 - DNA, 25 bp, Probe sequence
tcagttaatagacgattacagcgat

SEQ ID NO: 27979 - DNA, 25 bp, Probe sequence
atcagttaatagacgattacagcga

SEQ ID NO: 27980 - DNA, 25 bp, Probe sequence
atagacgattacagcgatggtgata

SEQ ID NO: 27981 - DNA, 25 bp, Probe sequence
aagcggatactagaacaatcaatgt

SEQ ID NO: 27982 - DNA, 25 bp, Probe sequence
aacctactgtaactacaacaagcaa

SEQ ID NO: 27983 - DNA, 25 bp, Probe sequence
tgaacctggatataagagcttaact

SEQ ID NO: 27984 - DNA, 25 bp, Probe sequence
agttgaacctggatataagagctta

SEQ ID NO: 27985 - DNA, 25 bp, Probe sequence
aagttgaagacaatcactctactaa

SEQ ID NO: 27986 - DNA, 25 bp, Probe sequence
ttgaacctggatataagagcttaac

SEQ ID NO: 27987 - DNA, 25 bp, Probe sequence
gttgaacctggatataagagcttaa

SEQ ID NO: 27988 - DNA, 25 bp, Probe sequence
aaacataacgaaacgcctaaacaag

SEQ ID NO: 27989 - DNA, 25 bp, Probe sequence
gaaacgcctaaacaagcatctaaag

SEQ ID NO: 27990 - DNA, 25 bp, Probe sequence
acagtaagtatcaatcagaacaacg

SEQ ID NO: 27991 - DNA, 25 bp, Probe sequence
ctcaagcaacatcacaaccaattaa

SEQ ID NO: 27992 - DNA, 25 bp, Probe sequence
tctcaagcaacatcacaaccaatta

SEQ ID NO: 27993 - DNA, 25 bp, Probe sequence
tattgaacaacgcatcattctggaa

SEQ ID NO: 27994 - DNA, 25 bp, Probe sequence
ttctcaagcaacatcacaaccaatt

SEQ ID NO: 27995 - DNA, 25 bp, Probe sequence
ctgtattgaacaacgcatcattctg

SEQ ID NO: 27996 - DNA, 25 bp, Probe sequence
tcaagcaacatcacaaccaattaat

SEQ ID NO: 27997 - DNA, 25 bp, Probe sequence
gtattgaacaacgcatcattctgga

SEQ ID NO: 27998 - DNA, 25 bp, Probe sequence
aacagtaagtatcaatcagaacaac

SEQ ID NO: 27999 - DNA, 25 bp, Probe sequence
ttaatatctgtgttgcgtgaaggtg

SEQ ID NO: 28000 - DNA, 25 bp, Probe sequence
atgtatatagtgtgataacggatgc

SEQ ID NO: 28001 - DNA, 25 bp, Probe sequence
taatatctgtgttgcgtgaaggtgt

SEQ ID NO: 28002 - DNA, 25 bp, Probe sequence
gtgatgtatatagtgtgataacgga

SEQ ID NO: 28003 - DNA, 25 bp, Probe sequence
agtgatgtatatagtgtgataacgg

SEQ ID NO: 28004 - DNA, 25 bp, Probe sequence
gtattgttagcgacgattggtttaa

SEQ ID NO: 28005 - DNA, 25 bp, Probe sequence
attggtttaatatctgtgttgcgtg

SEQ ID NO: 28006 - DNA, 25 bp, Probe sequence
gattggtttaatatctgtgttgcgt

SEQ ID NO: 28007 - DNA, 25 bp, Probe sequence
acgattggtttaatatctgtgttgc

SEQ ID NO: 28008 - DNA, 25 bp, Probe sequence
accaataacaacatagcattaaccg

SEQ ID NO: 28009 - DNA, 25 bp, Probe sequence
caccaataacaacatagcattaacc

SEQ ID NO: 28010 - DNA, 25 bp, Probe sequence
tcaccaataacaacatagcattaac

SEQ ID NO: 28011 - DNA, 25 bp, Probe sequence
gtcaccaataacaacatagcattaa

SEQ ID NO: 28012 - DNA, 25 bp, Probe sequence
tgtcaccaataacaacatagcatta

SEQ ID NO: 28013 - DNA, 25 bp, Probe sequence
cggatgtggattaataattaggtca

SEQ ID NO: 28014 - DNA, 25 bp, Probe sequence
caataacaacatagcattaaccgga

SEQ ID NO: 28015 - DNA, 25 bp, Probe sequence
atattgatacgaacacaccaaagta

SEQ ID NO: 28016 - DNA, 25 bp, Probe sequence
ccaataacaacatagcattaaccgg

SEQ ID NO: 28017 - DNA, 25 bp, Probe sequence
ggagaatcgaagtcattagccattg

SEQ ID NO: 28018 - DNA, 25 bp, Probe sequence
aggagaatcgaagtcattagccatt

SEQ ID NO: 28019 - DNA, 25 bp, Probe sequence
aaggagaatcgaagtcattagccat

SEQ ID NO: 28020 - DNA, 25 bp, Probe sequence
aacttctaccgcagcattctcaatt

SEQ ID NO: 28021 - DNA, 25 bp, Probe sequence
ttaatatgacgattcctaaaggtgc

SEQ ID NO: 28022 - DNA, 25 bp, Probe sequence
tcaggtaaagtcatgtttcaaggta

SEQ ID NO: 28023 - DNA, 25 bp, Probe sequence
atcaggtaaagtcatgtttcaaggt

SEQ ID NO: 28024 - DNA, 25 bp, Probe sequence
ccaatcaggtaaagtcatgtttcaa

SEQ ID NO: 28025 - DNA, 25 bp, Probe sequence
aatcaggtaaagtcatgtttcaagg

SEQ ID NO: 28026 - DNA, 25 bp, Probe sequence
gctttagtttgctacttatcattgc

SEQ ID NO: 28027 - DNA, 25 bp, Probe sequence
aagcgattggaaatattggatgaag

SEQ ID NO: 28028 - DNA, 25 bp, Probe sequence
cgattggaaatattggatgaaggtg

SEQ ID NO: 28029 - DNA, 25 bp, Probe sequence
aaagcgattggaaatattggatgaa

SEQ ID NO: 28030 - DNA, 25 bp, Probe sequence
ttggaaatattggatgaaggtgaac

SEQ ID NO: 28031 - DNA, 25 bp, Probe sequence
gattggaaatattggatgaaggtga

SEQ ID NO: 28032 - DNA, 25 bp, Probe sequence
attggaaatattggatgaaggtgaa

SEQ ID NO: 28033 - DNA, 25 bp, Probe sequence
agcgattggaaatattggatgaagg

SEQ ID NO: 28034 - DNA, 25 bp, Probe sequence
ctttagtttgctacttatcattgct

SEQ ID NO: 28035 - DNA, 25 bp, Probe sequence
caccattctcaagtcgtaaacaata

SEQ ID NO: 28036 - DNA, 25 bp, Probe sequence
ccaccattctcaagtcgtaaacaat

SEQ ID NO: 28037 - DNA, 25 bp, Probe sequence
taatcccaccattctcaagtcgtaa

SEQ ID NO: 28038 - DNA, 25 bp, Probe sequence
accattctcaagtcgtaaacaatat

SEQ ID NO: 28039 - DNA, 25 bp, Probe sequence
ttaatcccaccattctcaagtcgta

SEQ ID NO: 28040 - DNA, 25 bp, Probe sequence
ccattctcaagtcgtaaacaatatg

SEQ ID NO: 28041 - DNA, 25 bp, Probe sequence
aatcccaccattctcaagtcgtaaa

SEQ ID NO: 28042 - DNA, 25 bp, Probe sequence
tattaatcccaccattctcaagtcg

SEQ ID NO: 28043 - DNA, 25 bp, Probe sequence
tctcaagtcgtaaacaatatgatga

SEQ ID NO: 28044 - DNA, 25 bp, Probe sequence
tattatcgcatctacagtaatcgct

SEQ ID NO: 28045 - DNA, 25 bp, Probe sequence
aattaagccaaggtgatgtgaagaa

SEQ ID NO: 28046 - DNA, 25 bp, Probe sequence
ctattatcgcatctacagtaatcgc

SEQ ID NO: 28047 - DNA, 25 bp, Probe sequence
aagatggtggtcctagagattacta

SEQ ID NO: 28048 - DNA, 25 bp, Probe sequence
agatggtggtcctagagattactat

SEQ ID NO: 28049 - DNA, 25 bp, Probe sequence
tggtggtcctagagattactatact

SEQ ID NO: 28050 - DNA, 25 bp, Probe sequence
atggtggtcctagagattactatac

SEQ ID NO: 28051 - DNA, 25 bp, Probe sequence
ggtggtcctagagattactatactt

SEQ ID NO: 28052 - DNA, 25 bp, Probe sequence
gatggtggtcctagagattactata

SEQ ID NO: 28053 - DNA, 25 bp, Probe sequence
aaggtggaggcatcttaatatcatc

SEQ ID NO: 28054 - DNA, 25 bp, Probe sequence
caaggtggaggcatcttaatatcat

SEQ ID NO: 28055 - DNA, 25 bp, Probe sequence
aatcataatgcgaggtgaagtataa

SEQ ID NO: 28056 - DNA, 25 bp, Probe sequence
gtgtttatgaaagatggacgaatga

SEQ ID NO: 28057 - DNA, 25 bp, Probe sequence
agtgtttatgaaagatggacgaatg

SEQ ID NO: 28058 - DNA, 25 bp, Probe sequence
tgtttatgaaagatggacgaatgat

SEQ ID NO: 28059 - DNA, 25 bp, Probe sequence
ttagtgtttatgaaagatggacgaa

SEQ ID NO: 28060 - DNA, 25 bp, Probe sequence
tagtgtttatgaaagatggacgaat

SEQ ID NO: 28061 - DNA, 25 bp, Probe sequence
attagtgtttatgaaagatggacga

SEQ ID NO: 28062 - DNA, 25 bp, Probe sequence
cctctggatattgctgatgctaata

SEQ ID NO: 28063 - DNA, 25 bp, Probe sequence
tcctaatcctgaatatgatatggca

SEQ ID NO: 28064 - DNA, 25 bp, Probe sequence
ctctggatattgctgatgctaataa

SEQ ID NO: 28065 - DNA, 25 bp, Probe sequence
cctaatcctgaatatgatatggcaa

SEQ ID NO: 28066 - DNA, 25 bp, Probe sequence
atcctaatcctgaatatgatatggc

SEQ ID NO: 28067 - DNA, 25 bp, Probe sequence
tcctctggatattgctgatgctaat

SEQ ID NO: 28068 - DNA, 25 bp, Probe sequence
attcctctggatattgctgatgcta

SEQ ID NO: 28069 - DNA, 25 bp, Probe sequence
ttcctctggatattgctgatgctaa

SEQ ID NO: 28070 - DNA, 25 bp, Probe sequence
cctaaacttaatgaagcagcaacag

SEQ ID NO: 28071 - DNA, 25 bp, Probe sequence
tgtgatgattggtattatgtcaggt

SEQ ID NO: 28072 - DNA, 25 bp, Probe sequence
gtgtgatgattggtattatgtcagg

SEQ ID NO: 28073 - DNA, 25 bp, Probe sequence
gtgatgattggtattatgtcaggtt

SEQ ID NO: 28074 - DNA, 25 bp, Probe sequence
agtgtgatgattggtattatgtcag

SEQ ID NO: 28075 - DNA, 25 bp, Probe sequence
aagtgtgatgattggtattatgtca

SEQ ID NO: 28076 - DNA, 25 bp, Probe sequence
aagactcaagatggatgtattatgt

SEQ ID NO: 28077 - DNA, 25 bp, Probe sequence
tgattggattagttgtgactacgat

SEQ ID NO: 28078 - DNA, 25 bp, Probe sequence
atgattggattagttgtgactacga

SEQ ID NO: 28079 - DNA, 25 bp, Probe sequence
aatgattggattagttgtgactacg

SEQ ID NO: 28080 - DNA, 25 bp, Probe sequence
gcatatcaatctattgtgactggtg

SEQ ID NO: 28081 - DNA, 25 bp, Probe sequence
agcatatcaatctattgtgactggt

SEQ ID NO: 28082 - DNA, 25 bp, Probe sequence
ggttgatagcatggtatatgatggt

SEQ ID NO: 28083 - DNA, 25 bp, Probe sequence
tggttgatagcatggtatatgatgg

SEQ ID NO: 28084 - DNA, 25 bp, Probe sequence
gttgatagcatggtatatgatggtt

SEQ ID NO: 28085 - DNA, 25 bp, Probe sequence
atggttgatagcatggtatatgatg

SEQ ID NO: 28086 - DNA, 25 bp, Probe sequence
catatcaatctattgtgactggtga

SEQ ID NO: 28087 - DNA, 25 bp, Probe sequence
caatggttgatagcatggtatatga

SEQ ID NO: 28088 - DNA, 25 bp, Probe sequence
tagcatatcaatctattgtgactgg

SEQ ID NO: 28089 - DNA, 25 bp, Probe sequence
gctcatgtcaactatggttctgatt

SEQ ID NO: 28090 - DNA, 25 bp, Probe sequence
aagtagctcatgtcaactatggttc

SEQ ID NO: 28091 - DNA, 25 bp, Probe sequence
gtagctcatgtcaactatggttctg

SEQ ID NO: 28092 - DNA, 25 bp, Probe sequence
tagctcatgtcaactatggttctga

SEQ ID NO: 28093 - DNA, 25 bp, Probe sequence
agtagctcatgtcaactatggttct

SEQ ID NO: 28094 - DNA, 25 bp, Probe sequence
agctcatgtcaactatggttctgat

SEQ ID NO: 28095 - DNA, 25 bp, Probe sequence
ctcatgtcaactatggttctgattt

SEQ ID NO: 28096 - DNA, 25 bp, Probe sequence
aaagtagctcatgtcaactatggtt

SEQ ID NO: 28097 - DNA, 25 bp, Probe sequence
tcaggagagcatgaggttgtaacaa

SEQ ID NO: 28098 - DNA, 25 bp, Probe sequence
aagtggaagttatatagcagcagac

SEQ ID NO: 28099 - DNA, 25 bp, Probe sequence
gtggaagttatatagcagcagacat

SEQ ID NO: 28100 - DNA, 25 bp, Probe sequence
aattagcgaagatgagaacgaatat

SEQ ID NO: 28101 - DNA, 25 bp, Probe sequence
agcagcagacatattagttactaga

SEQ ID NO: 28102 - DNA, 25 bp, Probe sequence
tggaagttatatagcagcagacata

SEQ ID NO: 28103 - DNA, 25 bp, Probe sequence
taagtggaagttatatagcagcaga

SEQ ID NO: 28104 - DNA, 25 bp, Probe sequence
agtggaagttatatagcagcagaca

SEQ ID NO: 28105 - DNA, 25 bp, Probe sequence
ggtggacgatataacatggagaatc

SEQ ID NO: 28106 - DNA, 25 bp, Probe sequence
attagcgaagatgagaacgaatata

SEQ ID NO: 28107 - DNA, 25 bp, Probe sequence
tggcagattcaattaagcaatatgg

SEQ ID NO: 28108 - DNA, 25 bp, Probe sequence
ccgtatatagcgaatatgttgaggt

SEQ ID NO: 28109 - DNA, 25 bp, Probe sequence
acagatgaagatatgatggaactgg

SEQ ID NO: 28110 - DNA, 25 bp, Probe sequence
ttggcagattcaattaagcaatatg

SEQ ID NO: 28111 - DNA, 25 bp, Probe sequence
cgtatatagcgaatatgttgaggtt

SEQ ID NO: 28112 - DNA, 25 bp, Probe sequence
aggttattacattgtagttggtgaa

SEQ ID NO: 28113 - DNA, 25 bp, Probe sequence
aaggttattacattgtagttggtga

SEQ ID NO: 28114 - DNA, 25 bp, Probe sequence
cagatgaagatatgatggaactggc

SEQ ID NO: 28115 - DNA, 25 bp, Probe sequence
aacagatgaagatatgatggaactg

SEQ ID NO: 28116 - DNA, 25 bp, Probe sequence
tggcggtaataactacactattgat

SEQ ID NO: 28117 - DNA, 25 bp, Probe sequence
ggcggtaataactacactattgatt

SEQ ID NO: 28118 - DNA, 25 bp, Probe sequence
cagttatggtggtcttatagagaga

SEQ ID NO: 28119 - DNA, 25 bp, Probe sequence
tcagttatggtggtcttatagagag

SEQ ID NO: 28120 - DNA, 25 bp, Probe sequence
ttaagagatattcatggtcagcaca

SEQ ID NO: 28121 - DNA, 25 bp, Probe sequence
aagagatattcatggtcagcacata

SEQ ID NO: 28122 - DNA, 25 bp, Probe sequence
taagagatattcatggtcagcacat

SEQ ID NO: 28123 - DNA, 25 bp, Probe sequence
agagatattcatggtcagcacatat

SEQ ID NO: 28124 - DNA, 25 bp, Probe sequence
atcagttatggtggtcttatagaga

SEQ ID NO: 28125 - DNA, 25 bp, Probe sequence
tatcgctaatgttggtgaagatgaa

SEQ ID NO: 28126 - DNA, 25 bp, Probe sequence
atatcgctaatgttggtgaagatga

SEQ ID NO: 28127 - DNA, 25 bp, Probe sequence
tatatcgctaatgttggtgaagatg

SEQ ID NO: 28128 - DNA, 25 bp, Probe sequence
actctgaagtgattgttattagtgc

SEQ ID NO: 28129 - DNA, 25 bp, Probe sequence
ttatatcgctaatgttggtgaagat

SEQ ID NO: 28130 - DNA, 25 bp, Probe sequence
caagaagactctgaagtgattgtta

SEQ ID NO: 28131 - DNA, 25 bp, Probe sequence
gcaagaagactctgaagtgattgtt

SEQ ID NO: 28132 - DNA, 25 bp, Probe sequence
tatccgtgccgaagtaacaagttat

SEQ ID NO: 28133 - DNA, 25 bp, Probe sequence
ttatccgtgccgaagtaacaagtta

SEQ ID NO: 28134 - DNA, 25 bp, Probe sequence
cagcaacatctaacgataaacacta

SEQ ID NO: 28135 - DNA, 25 bp, Probe sequence
tttccagtttatgaaggcaataagc

SEQ ID NO: 28136 - DNA, 25 bp, Probe sequence
atacacctatcaattcttcatctga

SEQ ID NO: 28137 - DNA, 25 bp, Probe sequence
aacattgttactattaggtacagca

SEQ ID NO: 28138 - DNA, 25 bp, Probe sequence
acattgttactattaggtacagcat

SEQ ID NO: 28139 - DNA, 25 bp, Probe sequence
ggatttccagtttatgaaggcaata

SEQ ID NO: 28140 - DNA, 25 bp, Probe sequence
aagataacggtacgattcatgcaac

SEQ ID NO: 28141 - DNA, 25 bp, Probe sequence
tacacctatcaattcttcatctgaa

SEQ ID NO: 28142 - DNA, 25 bp, Probe sequence
agcaacatctaacgataaacactat

SEQ ID NO: 28143 - DNA, 25 bp, Probe sequence
ggaccgattgatataagtgatgatg

SEQ ID NO: 28144 - DNA, 25 bp, Probe sequence
ttgttactgaagttgtgtgtgatag

SEQ ID NO: 28145 - DNA, 25 bp, Probe sequence
accgattgatataagtgatgatgac

SEQ ID NO: 28146 - DNA, 25 bp, Probe sequence
gaccgattgatataagtgatgatga

SEQ ID NO: 28147 - DNA, 25 bp, Probe sequence
cggaccgattgatataagtgatgat

SEQ ID NO: 28148 - DNA, 25 bp, Probe sequence
aacggaccgattgatataagtgatg

SEQ ID NO: 28149 - DNA, 25 bp, Probe sequence
ccgattgatataagtgatgatgact

SEQ ID NO: 28150 - DNA, 25 bp, Probe sequence
acggaccgattgatataagtgatga

SEQ ID NO: 28151 - DNA, 25 bp, Probe sequence
aattccaagattacggtcaaggatt

SEQ ID NO: 28152 - DNA, 25 bp, Probe sequence
atttcttcgtaatgcgtctcagtaa

SEQ ID NO: 28153 - DNA, 25 bp, Probe sequence
gctttcacattccctttagtaatct

SEQ ID NO: 28154 - DNA, 25 bp, Probe sequence
aatttcttcgtaatgcgtctcagta

SEQ ID NO: 28155 - DNA, 25 bp, Probe sequence
atctttgctttcttgatttggattc

SEQ ID NO: 28156 - DNA, 25 bp, Probe sequence
ctttgctttcttgatttggattcac

SEQ ID NO: 28157 - DNA, 25 bp, Probe sequence
tctttgctttcttgatttggattca

SEQ ID NO: 28158 - DNA, 25 bp, Probe sequence
gctttcttgatttggattcaccttt

SEQ ID NO: 28159 - DNA, 25 bp, Probe sequence
tttgctttcttgatttggattcacc

SEQ ID NO: 28160 - DNA, 25 bp, Probe sequence
tgctttcttgatttggattcacctt

SEQ ID NO: 28161 - DNA, 25 bp, Probe sequence
acagcaaatggtattacacatatcg

SEQ ID NO: 28162 - DNA, 25 bp, Probe sequence
tttcacagcaaatggtattacacat

SEQ ID NO: 28163 - DNA, 25 bp, Probe sequence
cgttctcgtcatatggcattattac

SEQ ID NO: 28164 - DNA, 25 bp, Probe sequence
gttctcgtcatatggcattattacc

SEQ ID NO: 28165 - DNA, 25 bp, Probe sequence
ttcacagcaaatggtattacacata

SEQ ID NO: 28166 - DNA, 25 bp, Probe sequence
tcacagcaaatggtattacacatat

SEQ ID NO: 28167 - DNA, 25 bp, Probe sequence
cacagcaaatggtattacacatatc

SEQ ID NO: 28168 - DNA, 25 bp, Probe sequence
atttcacagcaaatggtattacaca

SEQ ID NO: 28169 - DNA, 25 bp, Probe sequence
atggtattacacatatcgactacaa

SEQ ID NO: 28170 - DNA, 25 bp, Probe sequence
atcaattaggagctagaatggcatt

SEQ ID NO: 28171 - DNA, 25 bp, Probe sequence
ggagatcaattaggagctagaatgg

SEQ ID NO: 28172 - DNA, 25 bp, Probe sequence
caattaggagctagaatggcattac

SEQ ID NO: 28173 - DNA, 25 bp, Probe sequence
tcaattaggagctagaatggcatta

SEQ ID NO: 28174 - DNA, 25 bp, Probe sequence
aattaggagctagaatggcattact

SEQ ID NO: 28175 - DNA, 25 bp, Probe sequence
gatcaattaggagctagaatggcat

SEQ ID NO: 28176 - DNA, 25 bp, Probe sequence
cggagatcaattaggagctagaatg

SEQ ID NO: 28177 - DNA, 25 bp, Probe sequence
tcggagatcaattaggagctagaat

SEQ ID NO: 28178 - DNA, 25 bp, Probe sequence
gagatcaattaggagctagaatggc

SEQ ID NO: 28179 - DNA, 25 bp, Probe sequence
ttctatcgctaggtatcatctatgg

SEQ ID NO: 28180 - DNA, 25 bp, Probe sequence
tctattctatcgctaggtatcatct

SEQ ID NO: 28181 - DNA, 25 bp, Probe sequence
tgcctaaaggtaacatcgtcataaa

SEQ ID NO: 28182 - DNA, 25 bp, Probe sequence
ttgcctaaaggtaacatcgtcataa

SEQ ID NO: 28183 - DNA, 25 bp, Probe sequence
tttgcctaaaggtaacatcgtcata

SEQ ID NO: 28184 - DNA, 25 bp, Probe sequence
agaacatttgcctaaaggtaacatc

SEQ ID NO: 28185 - DNA, 25 bp, Probe sequence
gagaacatttgcctaaaggtaacat

SEQ ID NO: 28186 - DNA, 25 bp, Probe sequence
gaacatttgcctaaaggtaacatcg

SEQ ID NO: 28187 - DNA, 25 bp, Probe sequence
attctatcgctaggtatcatctatg

SEQ ID NO: 28188 - DNA, 25 bp, Probe sequence
cgaagttgattgaagaatatgagca

SEQ ID NO: 28189 - DNA, 25 bp, Probe sequence
agcgaagttgattgaagaatatgag

SEQ ID NO: 28190 - DNA, 25 bp, Probe sequence
agttgattgaagaatatgagcagtc

SEQ ID NO: 28191 - DNA, 25 bp, Probe sequence
gcgaagttgattgaagaatatgagc

SEQ ID NO: 28192 - DNA, 25 bp, Probe sequence
tagagatgaattagcagaacaaggc

SEQ ID NO: 28193 - DNA, 25 bp, Probe sequence
cctgataatgacacgatactaatgg

SEQ ID NO: 28194 - DNA, 25 bp, Probe sequence
aagttgattgaagaatatgagcagt

SEQ ID NO: 28195 - DNA, 25 bp, Probe sequence
gttgattgaagaatatgagcagtct

SEQ ID NO: 28196 - DNA, 25 bp, Probe sequence
caacctgataatgacacgatactaa

SEQ ID NO: 28197 - DNA, 25 bp, Probe sequence
gcgtgcttatattacatggttcaat

SEQ ID NO: 28198 - DNA, 25 bp, Probe sequence
tagcgtgcttatattacatggttca

SEQ ID NO: 28199 - DNA, 25 bp, Probe sequence
gaggtgtctactagaatggatgatc

SEQ ID NO: 28200 - DNA, 25 bp, Probe sequence
agcgtgcttatattacatggttcaa

SEQ ID NO: 28201 - DNA, 25 bp, Probe sequence
atagcgtgcttatattacatggttc

SEQ ID NO: 28202 - DNA, 25 bp, Probe sequence
cgtgcttatattacatggttcaatt

SEQ ID NO: 28203 - DNA, 25 bp, Probe sequence
taataaagaagggaaagagacgcaa

SEQ ID NO: 28204 - DNA, 25 bp, Probe sequence
ttaataaagaagggaaagagacgca

SEQ ID NO: 28205 - DNA, 25 bp, Probe sequence
aataaagaagggaaagagacgcaat

SEQ ID NO: 28206 - DNA, 25 bp, Probe sequence
gctgatgaacaaggtaatgtcactt

SEQ ID NO: 28207 - DNA, 25 bp, Probe sequence
ctgctgatgaacaaggtaatgtcac

SEQ ID NO: 28208 - DNA, 25 bp, Probe sequence
tgctgatgaacaaggtaatgtcact

SEQ ID NO: 28209 - DNA, 25 bp, Probe sequence
tataagcaattcaactggagggaaa

SEQ ID NO: 28210 - DNA, 25 bp, Probe sequence
caattcaactggagggaaagaaatg

SEQ ID NO: 28211 - DNA, 25 bp, Probe sequence
ataagcaattcaactggagggaaag

SEQ ID NO: 28212 - DNA, 25 bp, Probe sequence
ctgatgaacaaggtaatgtcacttt

SEQ ID NO: 28213 - DNA, 25 bp, Probe sequence
attataagcaattcaactggaggga

SEQ ID NO: 28214 - DNA, 25 bp, Probe sequence
cattataagcaattcaactggaggg

SEQ ID NO: 28215 - DNA, 25 bp, Probe sequence
gaagttactgttgatgctaagaacg

SEQ ID NO: 28216 - DNA, 25 bp, Probe sequence
gttactgttgatgctaagaacggta

SEQ ID NO: 28217 - DNA, 25 bp, Probe sequence
agaagttactgttgatgctaagaac

SEQ ID NO: 28218 - DNA, 25 bp, Probe sequence
caagaagttactgttgatgctaaga

SEQ ID NO: 28219 - DNA, 25 bp, Probe sequence
attagcagtgttatcaatgtcagcg

SEQ ID NO: 28220 - DNA, 25 bp, Probe sequence
aagaagttactgttgatgctaagaa

SEQ ID NO: 28221 - DNA, 25 bp, Probe sequence
aagttactgttgatgctaagaacgg

SEQ ID NO: 28222 - DNA, 25 bp, Probe sequence
acaagaagttactgttgatgctaag

SEQ ID NO: 28223 - DNA, 25 bp, Probe sequence
ttactgttgatgctaagaacggtaa

SEQ ID NO: 28224 - DNA, 25 bp, Probe sequence
aagttagaatcctagttgacggtaa

SEQ ID NO: 28225 - DNA, 25 bp, Probe sequence
agttagaatcctagttgacggtaaa

SEQ ID NO: 28226 - DNA, 25 bp, Probe sequence
aaagttagaatcctagttgacggta

SEQ ID NO: 28227 - DNA, 25 bp, Probe sequence
gaatcctagttgacggtaaacctaa

SEQ ID NO: 28228 - DNA, 25 bp, Probe sequence
ttagaatcctagttgacggtaaacc

SEQ ID NO: 28229 - DNA, 25 bp, Probe sequence
aatcctagttgacggtaaacctaaa

SEQ ID NO: 28230 - DNA, 25 bp, Probe sequence
agaatcctagttgacggtaaaccta

SEQ ID NO: 28231 - DNA, 25 bp, Probe sequence
tagaatcctagttgacggtaaacct

SEQ ID NO: 28232 - DNA, 25 bp, Probe sequence
gttagaatcctagttgacggtaaac

SEQ ID NO: 28233 - DNA, 25 bp, Probe sequence
attagcgagaacttagtagaatgcg

SEQ ID NO: 28234 - DNA, 25 bp, Probe sequence
tattagcgagaacttagtagaatgc

SEQ ID NO: 28235 - DNA, 25 bp, Probe sequence
ttagcgagaacttagtagaatgcgt

SEQ ID NO: 28236 - DNA, 25 bp, Probe sequence
taatcgtattcatcgcatacaagga

SEQ ID NO: 28237 - DNA, 25 bp, Probe sequence
tagcgagaacttagtagaatgcgtc

SEQ ID NO: 28238 - DNA, 25 bp, Probe sequence
ttaatcgtattcatcgcatacaagg

SEQ ID NO: 28239 - DNA, 25 bp, Probe sequence
ggcactaattaatgaagctgttgaa

SEQ ID NO: 28240 - DNA, 25 bp, Probe sequence
aggcactaattaatgaagctgttga

SEQ ID NO: 28241 - DNA, 25 bp, Probe sequence
aatcgtattcatcgcatacaaggac

SEQ ID NO: 28242 - DNA, 25 bp, Probe sequence
caatatctgaagaacaacgagagaa

SEQ ID NO: 28243 - DNA, 25 bp, Probe sequence
tcaatatctgaagaacaacgagaga

SEQ ID NO: 28244 - DNA, 25 bp, Probe sequence
caagaccatgctgaacaattattag

SEQ ID NO: 28245 - DNA, 25 bp, Probe sequence
aatccaccataaataccctcaaact

SEQ ID NO: 28246 - DNA, 25 bp, Probe sequence
caatccaccataaataccctcaaac

SEQ ID NO: 28247 - DNA, 25 bp, Probe sequence
acaatccaccataaataccctcaaa

SEQ ID NO: 28248 - DNA, 25 bp, Probe sequence
aacaatccaccataaataccctcaa

SEQ ID NO: 28249 - DNA, 25 bp, Probe sequence
aaacaatccaccataaataccctca

SEQ ID NO: 28250 - DNA, 25 bp, Probe sequence
tgaaacaatccaccataaataccct

SEQ ID NO: 28251 - DNA, 25 bp, Probe sequence
tatcgcaggtattattggatcatgg

SEQ ID NO: 28252 - DNA, 25 bp, Probe sequence
ttatcgcaggtattattggatcatg

SEQ ID NO: 28253 - DNA, 25 bp, Probe sequence
attatcgcaggtattattggatcat

SEQ ID NO: 28254 - DNA, 25 bp, Probe sequence
gctggtgctattatgggtaaagata

SEQ ID NO: 28255 - DNA, 25 bp, Probe sequence
tattatcgcaggtattattggatca

SEQ ID NO: 28256 - DNA, 25 bp, Probe sequence
taggaagtatttacatcttgccagc

SEQ ID NO: 28257 - DNA, 25 bp, Probe sequence
ttaggaagtatttacatcttgccag

SEQ ID NO: 28258 - DNA, 25 bp, Probe sequence
tgctggtgctattatgggtaaagat

SEQ ID NO: 28259 - DNA, 25 bp, Probe sequence
caggtattattggatcatgggtagg

SEQ ID NO: 28260 - DNA, 25 bp, Probe sequence
ttcagacttattaagaacacagcaa

SEQ ID NO: 28261 - DNA, 25 bp, Probe sequence
ataaagatgaaatcagtgcgaatcc

SEQ ID NO: 28262 - DNA, 25 bp, Probe sequence
gaaatcagtgcgaatccgaaatatg

SEQ ID NO: 28263 - DNA, 25 bp, Probe sequence
aagttatgaagatgtatatcaacgc

SEQ ID NO: 28264 - DNA, 25 bp, Probe sequence
gcctgaaggagaaagttatgaagat

SEQ ID NO: 28265 - DNA, 25 bp, Probe sequence
ggcgtatttgagggtgaatataaag

SEQ ID NO: 28266 - DNA, 25 bp, Probe sequence
tggcgtatttgagggtgaatataaa

SEQ ID NO: 28267 - DNA, 25 bp, Probe sequence
ttggcgtatttgagggtgaatataa

SEQ ID NO: 28268 - DNA, 25 bp, Probe sequence
agacttattaagaacacagcaaacg

SEQ ID NO: 28269 - DNA, 25 bp, Probe sequence
atattgcggtaactgctgaagatat

SEQ ID NO: 28270 - DNA, 25 bp, Probe sequence
tattgcggtaactgctgaagatatg

SEQ ID NO: 28271 - DNA, 25 bp, Probe sequence
aatattgcggtaactgctgaagata

SEQ ID NO: 28272 - DNA, 25 bp, Probe sequence
actcaattattggtatcgacgatga

SEQ ID NO: 28273 - DNA, 25 bp, Probe sequence
caagcatactcaattattggtatcg

SEQ ID NO: 28274 - DNA, 25 bp, Probe sequence
gaccatgtcttccatcataataagt

SEQ ID NO: 28275 - DNA, 25 bp, Probe sequence
tgaccatgtcttccatcataataag

SEQ ID NO: 28276 - DNA, 25 bp, Probe sequence
tactcaattattggtatcgacgatg

SEQ ID NO: 28277 - DNA, 25 bp, Probe sequence
gcatactcaattattggtatcgacg

SEQ ID NO: 28278 - DNA, 25 bp, Probe sequence
ttggattaggtggcgattatatgaa

SEQ ID NO: 28279 - DNA, 25 bp, Probe sequence
ggatatacggcgaagattataccac

SEQ ID NO: 28280 - DNA, 25 bp, Probe sequence
gatatacggcgaagattataccacg

SEQ ID NO: 28281 - DNA, 25 bp, Probe sequence
tcatattattattcgctgtcacctt

SEQ ID NO: 28282 - DNA, 25 bp, Probe sequence
tatgtattactatcaccgacacacc

SEQ ID NO: 28283 - DNA, 25 bp, Probe sequence
atcatattattattcgctgtcacct

SEQ ID NO: 28284 - DNA, 25 bp, Probe sequence
gcatgtcaactgtcgttatatactt

SEQ ID NO: 28285 - DNA, 25 bp, Probe sequence
ggcatgtcaactgtcgttatatact

SEQ ID NO: 28286 - DNA, 25 bp, Probe sequence
gccaacagcatataatcaaggtatg

SEQ ID NO: 28287 - DNA, 25 bp, Probe sequence
ggtgatgcttcattaggattatacg

SEQ ID NO: 28288 - DNA, 25 bp, Probe sequence
gtgatgcttcattaggattatacga

SEQ ID NO: 28289 - DNA, 25 bp, Probe sequence
tggtgatgcttcattaggattatac

SEQ ID NO: 28290 - DNA, 25 bp, Probe sequence
tgatgcttcattaggattatacgat

SEQ ID NO: 28291 - DNA, 25 bp, Probe sequence
tagcactttgacggatggttattat

SEQ ID NO: 28292 - DNA, 25 bp, Probe sequence
atggtgatgcttcattaggattata

SEQ ID NO: 28293 - DNA, 25 bp, Probe sequence
cactttgacggatggttattatgaa

SEQ ID NO: 28294 - DNA, 25 bp, Probe sequence
actttgacggatggttattatgaaa

SEQ ID NO: 28295 - DNA, 25 bp, Probe sequence
gcactttgacggatggttattatga

SEQ ID NO: 28296 - DNA, 25 bp, Probe sequence
tcgtttagcagagagatattcaaca

SEQ ID NO: 28297 - DNA, 25 bp, Probe sequence
cgtttagcagagagatattcaacaa

SEQ ID NO: 28298 - DNA, 25 bp, Probe sequence
atcgtttagcagagagatattcaac

SEQ ID NO: 28299 - DNA, 25 bp, Probe sequence
tcgaagatgcagaggatatagctaa

SEQ ID NO: 28300 - DNA, 25 bp, Probe sequence
tgcagaattagtggttatgtctaac

SEQ ID NO: 28301 - DNA, 25 bp, Probe sequence
ttgcagaattagtggttatgtctaa

SEQ ID NO: 28302 - DNA, 25 bp, Probe sequence
gtttagcagagagatattcaacaat

SEQ ID NO: 28303 - DNA, 25 bp, Probe sequence
tatcgtttagcagagagatattcaa

SEQ ID NO: 28304 - DNA, 25 bp, Probe sequence
atttgcagaattagtggttatgtct

SEQ ID NO: 28305 - DNA, 25 bp, Probe sequence
cacggtcacttgcatattcacttaa

SEQ ID NO: 28306 - DNA, 25 bp, Probe sequence
ttatagcattaaactctccaagacc

SEQ ID NO: 28307 - DNA, 25 bp, Probe sequence
tcttaatactggtgtaacaaaggtt

SEQ ID NO: 28308 - DNA, 25 bp, Probe sequence
atcttaatactggtgtaacaaaggt

SEQ ID NO: 28309 - DNA, 25 bp, Probe sequence
gggacttatagcattaaactctcca

SEQ ID NO: 28310 - DNA, 25 bp, Probe sequence
atactggtgtaacaaaggttaatgc

SEQ ID NO: 28311 - DNA, 25 bp, Probe sequence
cgggacttatagcattaaactctcc

SEQ ID NO: 28312 - DNA, 25 bp, Probe sequence
cggtcacttgcatattcacttaaat

SEQ ID NO: 28313 - DNA, 25 bp, Probe sequence
acttatagcattaaactctccaaga

SEQ ID NO: 28314 - DNA, 25 bp, Probe sequence
aatatcataccgctacctgtgttag

SEQ ID NO: 28315 - DNA, 25 bp, Probe sequence
ggtcgtgttattacttatatgtggt

SEQ ID NO: 28316 - DNA, 25 bp, Probe sequence
tggtcgtgttattacttatatgtgg

SEQ ID NO: 28317 - DNA, 25 bp, Probe sequence
ggtctagcgatagtgttaggttcta

SEQ ID NO: 28318 - DNA, 25 bp, Probe sequence
gtaggattaggtactggtataagcg

SEQ ID NO: 28319 - DNA, 25 bp, Probe sequence
cggcatggtcgtgttattacttata

SEQ ID NO: 28320 - DNA, 25 bp, Probe sequence
aaggtctagcgatagtgttaggttc

SEQ ID NO: 28321 - DNA, 25 bp, Probe sequence
gaaggtctagcgatagtgttaggtt

SEQ ID NO: 28322 - DNA, 25 bp, Probe sequence
ggcatggtcgtgttattacttatat

SEQ ID NO: 28323 - DNA, 25 bp, Probe sequence
gaatacaacacttgaagaagcagaa

SEQ ID NO: 28324 - DNA, 25 bp, Probe sequence
tgaatacaacacttgaagaagcaga

SEQ ID NO: 28325 - DNA, 25 bp, Probe sequence
aattgtagatgtaatgacgcaagaa

SEQ ID NO: 28326 - DNA, 25 bp, Probe sequence
agaagatcgcaacttagtaggtatt

SEQ ID NO: 28327 - DNA, 25 bp, Probe sequence
aagaagatcgcaacttagtaggtat

SEQ ID NO: 28328 - DNA, 25 bp, Probe sequence
aagcaggtgtggatgtcttagttat

SEQ ID NO: 28329 - DNA, 25 bp, Probe sequence
agcaggtgtggatgtcttagttatc

SEQ ID NO: 28330 - DNA, 25 bp, Probe sequence
gtgaatacaacacttgaagaagcag

SEQ ID NO: 28331 - DNA, 25 bp, Probe sequence
gaagcaggtgtggatgtcttagtta

SEQ ID NO: 28332 - DNA, 25 bp, Probe sequence
ttacgccaagtgattagagaagaag

SEQ ID NO: 28333 - DNA, 25 bp, Probe sequence
taatgcgaagtcagatgagttattc

SEQ ID NO: 28334 - DNA, 25 bp, Probe sequence
ttaatgcgaagtcagatgagttatt

SEQ ID NO: 28335 - DNA, 25 bp, Probe sequence
tacgccaagtgattagagaagaagg

SEQ ID NO: 28336 - DNA, 25 bp, Probe sequence
gccaagtgattagagaagaaggtct

SEQ ID NO: 28337 - DNA, 25 bp, Probe sequence
tcttggtattcgtgtacttggagaa

SEQ ID NO: 28338 - DNA, 25 bp, Probe sequence
attaatgcgaagtcagatgagttat

SEQ ID NO: 28339 - DNA, 25 bp, Probe sequence
gtcttggtattcgtgtacttggaga

SEQ ID NO: 28340 - DNA, 25 bp, Probe sequence
catccagaagtacgtcatacagaat

SEQ ID NO: 28341 - DNA, 25 bp, Probe sequence
ctttatttagatatttgactgcggc

SEQ ID NO: 28342 - DNA, 25 bp, Probe sequence
ttatttagatatttgactgcggcac

SEQ ID NO: 28343 - DNA, 25 bp, Probe sequence
tacgagaaatacaaagatcaagggt

SEQ ID NO: 28344 - DNA, 25 bp, Probe sequence
gtttcccttgtaatcaatttggtgg

SEQ ID NO: 28345 - DNA, 25 bp, Probe sequence
ggtttcccttgtaatcaatttggtg

SEQ ID NO: 28346 - DNA, 25 bp, Probe sequence
cgagaaatacaaagatcaagggttt

SEQ ID NO: 28347 - DNA, 25 bp, Probe sequence
acgagaaatacaaagatcaagggtt

SEQ ID NO: 28348 - DNA, 25 bp, Probe sequence
tatttagatatttgactgcggcaca

SEQ ID NO: 28349 - DNA, 25 bp, Probe sequence
caagggtttgtaattctaggtttcc

SEQ ID NO: 28350 - DNA, 25 bp, Probe sequence
attacaatgaatgatggcacaacac

SEQ ID NO: 28351 - DNA, 25 bp, Probe sequence
aattacaatgaatgatggcacaaca

SEQ ID NO: 28352 - DNA, 25 bp, Probe sequence
acaattacaatgaatgatggcacaa

SEQ ID NO: 28353 - DNA, 25 bp, Probe sequence
caattacaatgaatgatggcacaac

SEQ ID NO: 28354 - DNA, 25 bp, Probe sequence
tacaattacaatgaatgatggcaca

SEQ ID NO: 28355 - DNA, 25 bp, Probe sequence
gaatgatggcacaacacatacaatc

SEQ ID NO: 28356 - DNA, 25 bp, Probe sequence
caatgaatgatggcacaacacatac

SEQ ID NO: 28357 - DNA, 25 bp, Probe sequence
ttacaatgaatgatggcacaacaca

SEQ ID NO: 28358 - DNA, 25 bp, Probe sequence
tgaatgatggcacaacacatacaat

SEQ ID NO: 28359 - DNA, 25 bp, Probe sequence
atataggtggtacgaagataggtgc

SEQ ID NO: 28360 - DNA, 25 bp, Probe sequence
tatataggtggtacgaagataggtg

SEQ ID NO: 28361 - DNA, 25 bp, Probe sequence
ttatataggtggtacgaagataggt

SEQ ID NO: 28362 - DNA, 25 bp, Probe sequence
gcaaataagatgaaagacgggttta

SEQ ID NO: 28363 - DNA, 25 bp, Probe sequence
aaatggcaaataagatgaaagacgg

SEQ ID NO: 28364 - DNA, 25 bp, Probe sequence
gattagggtatggattgatgagtga

SEQ ID NO: 28365 - DNA, 25 bp, Probe sequence
aggctatcgtctttactttgattct

SEQ ID NO: 28366 - DNA, 25 bp, Probe sequence
gctatcgtctttactttgattctcc

SEQ ID NO: 28367 - DNA, 25 bp, Probe sequence
ggctatcgtctttactttgattctc

SEQ ID NO: 28368 - DNA, 25 bp, Probe sequence
gatgtaaatactgctgtttgcgtta

SEQ ID NO: 28369 - DNA, 25 bp, Probe sequence
tgtaaatactgctgtttgcgttaaa

SEQ ID NO: 28370 - DNA, 25 bp, Probe sequence
atgtaaatactgctgtttgcgttaa

SEQ ID NO: 28371 - DNA, 25 bp, Probe sequence
ttgtgatgtaaatactgctgtttgc

SEQ ID NO: 28372 - DNA, 25 bp, Probe sequence
gatagacagtaatatggcaaatgcg

SEQ ID NO: 28373 - DNA, 25 bp, Probe sequence
attgtgatgtaaatactgctgtttg

SEQ ID NO: 28374 - DNA, 25 bp, Probe sequence
atagacagtaatatggcaaatgcga

SEQ ID NO: 28375 - DNA, 25 bp, Probe sequence
tagacagtaatatggcaaatgcgaa

SEQ ID NO: 28376 - DNA, 25 bp, Probe sequence
tgatagacagtaatatggcaaatgc

SEQ ID NO: 28377 - DNA, 25 bp, Probe sequence
tgctgagttctaataatgatgttgg

SEQ ID NO: 28378 - DNA, 25 bp, Probe sequence
cgtattattagcgaagccatagagc

SEQ ID NO: 28379 - DNA, 25 bp, Probe sequence
ttgatgtacctgatgagcatgatac

SEQ ID NO: 28380 - DNA, 25 bp, Probe sequence
atgctgagttctaataatgatgttg

SEQ ID NO: 28381 - DNA, 25 bp, Probe sequence
acgtattattagcgaagccatagag

SEQ ID NO: 28382 - DNA, 25 bp, Probe sequence
gacgtattattagcgaagccataga

SEQ ID NO: 28383 - DNA, 25 bp, Probe sequence
cggtgttatttactttagtgatggt

SEQ ID NO: 28384 - DNA, 25 bp, Probe sequence
cgacgtattattagcgaagccatag

SEQ ID NO: 28385 - DNA, 25 bp, Probe sequence
aatgctgagttctaataatgatgtt

SEQ ID NO: 28386 - DNA, 25 bp, Probe sequence
gattgctaataatgctggcgtagaa

SEQ ID NO: 28387 - DNA, 25 bp, Probe sequence
gtagaccgattgctaataatgctgg

SEQ ID NO: 28388 - DNA, 25 bp, Probe sequence
ggtagaccgattgctaataatgctg

SEQ ID NO: 28389 - DNA, 25 bp, Probe sequence
gtggtagaccgattgctaataatgc

SEQ ID NO: 28390 - DNA, 25 bp, Probe sequence
tggtagaccgattgctaataatgct

SEQ ID NO: 28391 - DNA, 25 bp, Probe sequence
ggtggtagaccgattgctaataatg

SEQ ID NO: 28392 - DNA, 25 bp, Probe sequence
tagaccgattgctaataatgctggc

SEQ ID NO: 28393 - DNA, 25 bp, Probe sequence
ttgctaataatgctggcgtagaaat

SEQ ID NO: 28394 - DNA, 25 bp, Probe sequence
attgctaataatgctggcgtagaaa

SEQ ID NO: 28395 - DNA, 25 bp, Probe sequence
gtggcatcacgaagactaatagtaa

SEQ ID NO: 28396 - DNA, 25 bp, Probe sequence
taaacaagaacaatcacaaacgaca

SEQ ID NO: 28397 - DNA, 25 bp, Probe sequence
cctaaacaagaacaatcacaaacga

SEQ ID NO: 28398 - DNA, 25 bp, Probe sequence
tatcacaacctaaacaagaagagca

SEQ ID NO: 28399 - DNA, 25 bp, Probe sequence
acgacggttaggtttatgaatgtta

SEQ ID NO: 28400 - DNA, 25 bp, Probe sequence
agcacaaacagatatgactcctaaa

SEQ ID NO: 28401 - DNA, 25 bp, Probe sequence
aagcacaaacagatatgactcctaa

SEQ ID NO: 28402 - DNA, 25 bp, Probe sequence
aaacaagcacaaacagatatgactc

SEQ ID NO: 28403 - DNA, 25 bp, Probe sequence
aaggcaccaaatactaatgaggaaa

SEQ ID NO: 28404 - DNA, 25 bp, Probe sequence
tgtgattagcggtataagttgtgat

SEQ ID NO: 28405 - DNA, 25 bp, Probe sequence
atgtgattagcggtataagttgtga

SEQ ID NO: 28406 - DNA, 25 bp, Probe sequence
aatgtgattagcggtataagttgtg

SEQ ID NO: 28407 - DNA, 25 bp, Probe sequence
atgcgtgaattatcttatgctggtt

SEQ ID NO: 28408 - DNA, 25 bp, Probe sequence
aatgcgtgaattatcttatgctggt

SEQ ID NO: 28409 - DNA, 25 bp, Probe sequence
gtgattagcggtataagttgtgata

SEQ ID NO: 28410 - DNA, 25 bp, Probe sequence
actatcagtatcgttatgcgttcaa

SEQ ID NO: 28411 - DNA, 25 bp, Probe sequence
tgattagcggtataagttgtgataa

SEQ ID NO: 28412 - DNA, 25 bp, Probe sequence
attacacatgccttagctgaatcaa

SEQ ID NO: 28413 - DNA, 25 bp, Probe sequence
cctgctctcttattattaccaccat

SEQ ID NO: 28414 - DNA, 25 bp, Probe sequence
attacaataggtggtatcatcggtt

SEQ ID NO: 28415 - DNA, 25 bp, Probe sequence
aattacaataggtggtatcatcggt

SEQ ID NO: 28416 - DNA, 25 bp, Probe sequence
ggaagtggaatggtaataggtagta

SEQ ID NO: 28417 - DNA, 25 bp, Probe sequence
tgcttatattgcctcaggattaact

SEQ ID NO: 28418 - DNA, 25 bp, Probe sequence
gtgcttatattgcctcaggattaac

SEQ ID NO: 28419 - DNA, 25 bp, Probe sequence
agtgcttatattgcctcaggattaa

SEQ ID NO: 28420 - DNA, 25 bp, Probe sequence
atagtgcttatattgcctcaggatt

SEQ ID NO: 28421 - DNA, 25 bp, Probe sequence
tagtgcttatattgcctcaggatta

SEQ ID NO: 28422 - DNA, 25 bp, Probe sequence
tgtaaaagtggcatttctatgtctt

SEQ ID NO: 28423 - DNA, 25 bp, Probe sequence
ttgtaaaagtggcatttctatgtct

SEQ ID NO: 28424 - DNA, 25 bp, Probe sequence
tggcatttctatgtcttaaaagtga

SEQ ID NO: 28425 - DNA, 25 bp, Probe sequence
gtggcatttctatgtcttaaaagtg

SEQ ID NO: 28426 - DNA, 25 bp, Probe sequence
agtggcatttctatgtcttaaaagt

SEQ ID NO: 28427 - DNA, 25 bp, Probe sequence
tgtttgtaaaagtggcatttctatg

SEQ ID NO: 28428 - DNA, 25 bp, Probe sequence
gtttgtaaaagtggcatttctatgt

SEQ ID NO: 28429 - DNA, 25 bp, Probe sequence
tttgtaaaagtggcatttctatgtc

SEQ ID NO: 28430 - DNA, 25 bp, Probe sequence
ttgtttgtaaaagtggcatttctat

SEQ ID NO: 28431 - DNA, 25 bp, Probe sequence
ccaatcagcgttcagtattacagtt

SEQ ID NO: 28432 - DNA, 25 bp, Probe sequence
aaccaatcagcgttcagtattacag

SEQ ID NO: 28433 - DNA, 25 bp, Probe sequence
accaatcagcgttcagtattacagt

SEQ ID NO: 28434 - DNA, 25 bp, Probe sequence
caatcagcgttcagtattacagttt

SEQ ID NO: 28435 - DNA, 25 bp, Probe sequence
aatcagcgttcagtattacagttta

SEQ ID NO: 28436 - DNA, 25 bp, Probe sequence
aaaccaatcagcgttcagtattaca

SEQ ID NO: 28437 - DNA, 25 bp, Probe sequence
atcagcgttcagtattacagtttat

SEQ ID NO: 28438 - DNA, 25 bp, Probe sequence
tcagcgttcagtattacagtttata

SEQ ID NO: 28439 - DNA, 25 bp, Probe sequence
tactgctgaccaaatatatgctcat

SEQ ID NO: 28440 - DNA, 25 bp, Probe sequence
tactaaatcagacacaccacaatcg

SEQ ID NO: 28441 - DNA, 25 bp, Probe sequence
cttcaactaaagtgacaacacctcc

SEQ ID NO: 28442 - DNA, 25 bp, Probe sequence
ccttcaactaaagtgacaacacctc

SEQ ID NO: 28443 - DNA, 25 bp, Probe sequence
ctaaagtagaagcaccgcaacaaac

SEQ ID NO: 28444 - DNA, 25 bp, Probe sequence
ctaaagtgacaacacctccatcaac

SEQ ID NO: 28445 - DNA, 25 bp, Probe sequence
caactaaagtgacaacacctccatc

SEQ ID NO: 28446 - DNA, 25 bp, Probe sequence
actaaagtgacaacacctccatcaa

SEQ ID NO: 28447 - DNA, 25 bp, Probe sequence
aactaaagtgacaacacctccatca

SEQ ID NO: 28448 - DNA, 25 bp, Probe sequence
tcaactaaagtgacaacacctccat

SEQ ID NO: 28449 - DNA, 25 bp, Probe sequence
tactcgcttatcttgttattggtgt

SEQ ID NO: 28450 - DNA, 25 bp, Probe sequence
ttatccagtatcaggttcattcagc

SEQ ID NO: 28451 - DNA, 25 bp, Probe sequence
tcgcttatcttgttattggtgtcat

SEQ ID NO: 28452 - DNA, 25 bp, Probe sequence
atactcgcttatcttgttattggtg

SEQ ID NO: 28453 - DNA, 25 bp, Probe sequence
cgctatactcgcttatcttgttatt

SEQ ID NO: 28454 - DNA, 25 bp, Probe sequence
ctcgcttatcttgttattggtgtca

SEQ ID NO: 28455 - DNA, 25 bp, Probe sequence
actcgcttatcttgttattggtgtc

SEQ ID NO: 28456 - DNA, 25 bp, Probe sequence
ttccgtacacagatccatcattatt

SEQ ID NO: 28457 - DNA, 25 bp, Probe sequence
ttattccgtacacagatccatcatt

SEQ ID NO: 28458 - DNA, 25 bp, Probe sequence
cgtcatagatggcactaatattgat

SEQ ID NO: 28459 - DNA, 25 bp, Probe sequence
acgtcatagatggcactaatattga

SEQ ID NO: 28460 - DNA, 25 bp, Probe sequence
gtaatcacaacgacaacgcaagaag

SEQ ID NO: 28461 - DNA, 25 bp, Probe sequence
ttactaaagagcagatttccttgaa

SEQ ID NO: 28462 - DNA, 25 bp, Probe sequence
caagattactaaagagcagatttcc

SEQ ID NO: 28463 - DNA, 25 bp, Probe sequence
tgatgaaggagtacataggaatgtc

SEQ ID NO: 28464 - DNA, 25 bp, Probe sequence
gatgaaggagtacataggaatgtcg

SEQ ID NO: 28465 - DNA, 25 bp, Probe sequence
catcttcaactaaagtggaaacacc

SEQ ID NO: 28466 - DNA, 25 bp, Probe sequence
attactaaagagcagatttccttga

SEQ ID NO: 28467 - DNA, 25 bp, Probe sequence
gcagatgtcatagatggcactaata

SEQ ID NO: 28468 - DNA, 25 bp, Probe sequence
cagatgtcatagatggcactaatat

SEQ ID NO: 28469 - DNA, 25 bp, Probe sequence
ggcagatgtcatagatggcactaat

SEQ ID NO: 28470 - DNA, 25 bp, Probe sequence
caacaacaccatcttcaactaaagt

SEQ ID NO: 28471 - DNA, 25 bp, Probe sequence
acaacaccaccttcgtctaatgtag

SEQ ID NO: 28472 - DNA, 25 bp, Probe sequence
gcaacaacaccatcttcaactaaag

SEQ ID NO: 28473 - DNA, 25 bp, Probe sequence
acaacaccatcttcaactaaagtag

SEQ ID NO: 28474 - DNA, 25 bp, Probe sequence
gacaacaccatcttcaactaaagta

SEQ ID NO: 28475 - DNA, 25 bp, Probe sequence
atgcaacaacaccatcttcaactaa

SEQ ID NO: 28476 - DNA, 25 bp, Probe sequence
aatggtttaaattctgttattggcg

SEQ ID NO: 28477 - DNA, 25 bp, Probe sequence
gaatggtttaaattctgttattggc

SEQ ID NO: 28478 - DNA, 25 bp, Probe sequence
atggtttaaattctgttattggcgc

SEQ ID NO: 28479 - DNA, 25 bp, Probe sequence
ggtttaaattctgttattggcgcaa

SEQ ID NO: 28480 - DNA, 25 bp, Probe sequence
tggtttaaattctgttattggcgca

SEQ ID NO: 28481 - DNA, 25 bp, Probe sequence
tgaatggtttaaattctgttattgg

SEQ ID NO: 28482 - DNA, 25 bp, Probe sequence
aaattctgttattggcgcaatgata

SEQ ID NO: 28483 - DNA, 25 bp, Probe sequence
taaattctgttattggcgcaatgat

SEQ ID NO: 28484 - DNA, 25 bp, Probe sequence
ttaaattctgttattggcgcaatga

SEQ ID NO: 28485 - DNA, 25 bp, Probe sequence
ttattgttgctatgactgaggaaga

SEQ ID NO: 28486 - DNA, 25 bp, Probe sequence
atgattgaggctggtatattagacg

SEQ ID NO: 28487 - DNA, 25 bp, Probe sequence
tattgttgctatgactgaggaagat

SEQ ID NO: 28488 - DNA, 25 bp, Probe sequence
attgttgctatgactgaggaagatg

SEQ ID NO: 28489 - DNA, 25 bp, Probe sequence
tccattacctgaacacttaacatcg

SEQ ID NO: 28490 - DNA, 25 bp, Probe sequence
attattgttgctatgactgaggaag

SEQ ID NO: 28491 - DNA, 25 bp, Probe sequence
ctatgactgaggaagatgaagcaac

SEQ ID NO: 28492 - DNA, 25 bp, Probe sequence
gttgctatgactgaggaagatgaag

SEQ ID NO: 28493 - DNA, 25 bp, Probe sequence
cattattgttgctatgactgaggaa

SEQ ID NO: 28494 - DNA, 25 bp, Probe sequence
ctaagatactggcgaagattgtcac

SEQ ID NO: 28495 - DNA, 25 bp, Probe sequence
tctaagatactggcgaagattgtca

SEQ ID NO: 28496 - DNA, 25 bp, Probe sequence
taagatactggcgaagattgtcaca

SEQ ID NO: 28497 - DNA, 25 bp, Probe sequence
atctaagatactggcgaagattgtc

SEQ ID NO: 28498 - DNA, 25 bp, Probe sequence
tatctaagatactggcgaagattgt

SEQ ID NO: 28499 - DNA, 25 bp, Probe sequence
aagatactggcgaagattgtcacag

SEQ ID NO: 28500 - DNA, 25 bp, Probe sequence
gaagattgtcacagacggtaaagat

SEQ ID NO: 28501 - DNA, 25 bp, Probe sequence
gatactggcgaagattgtcacagac

SEQ ID NO: 28502 - DNA, 25 bp, Probe sequence
agatactggcgaagattgtcacaga

SEQ ID NO: 28503 - DNA, 25 bp, Probe sequence
taatgaagaaagaagaagccgaaga

SEQ ID NO: 28504 - DNA, 25 bp, Probe sequence
ttaatgaagaaagaagaagccgaag

SEQ ID NO: 28505 - DNA, 25 bp, Probe sequence
aatgaagaaagaagaagccgaagaa

SEQ ID NO: 28506 - DNA, 25 bp, Probe sequence
aagaaagaagaagccgaagaagaag

SEQ ID NO: 28507 - DNA, 25 bp, Probe sequence
gaagaaagaagaagccgaagaagaa

SEQ ID NO: 28508 - DNA, 25 bp, Probe sequence
atgaagaaagaagaagccgaagaag

SEQ ID NO: 28509 - DNA, 25 bp, Probe sequence
gaagaagaagcagttgtggaagaaa

SEQ ID NO: 28510 - DNA, 25 bp, Probe sequence
cgaagaagaagcagttgtggaagaa

SEQ ID NO: 28511 - DNA, 25 bp, Probe sequence
aagagaggttgagtgtaatgttaaa

SEQ ID NO: 28512 - DNA, 25 bp, Probe sequence
ctagacgttggtatagatgctgtag

SEQ ID NO: 28513 - DNA, 25 bp, Probe sequence
tagacgttggtatagatgctgtaga

SEQ ID NO: 28514 - DNA, 25 bp, Probe sequence
actagacgttggtatagatgctgta

SEQ ID NO: 28515 - DNA, 25 bp, Probe sequence
agacgttggtatagatgctgtagaa

SEQ ID NO: 28516 - DNA, 25 bp, Probe sequence
aggttctatttcggcaatacttgta

SEQ ID NO: 28517 - DNA, 25 bp, Probe sequence
aactagacgttggtatagatgctgt

SEQ ID NO: 28518 - DNA, 25 bp, Probe sequence
ggttctatttcggcaatacttgtat

SEQ ID NO: 28519 - DNA, 25 bp, Probe sequence
caggttctatttcggcaatacttgt

SEQ ID NO: 28520 - DNA, 25 bp, Probe sequence
gacgttggtatagatgctgtagaaa

SEQ ID NO: 28521 - DNA, 25 bp, Probe sequence
tatgatagtggtgtattgtcctctt

SEQ ID NO: 28522 - DNA, 25 bp, Probe sequence
atatgatagtggtgtattgtcctct

SEQ ID NO: 28523 - DNA, 25 bp, Probe sequence
agatatgatagtggtgtattgtcct

SEQ ID NO: 28524 - DNA, 25 bp, Probe sequence
gatatgatagtggtgtattgtcctc

SEQ ID NO: 28525 - DNA, 25 bp, Probe sequence
aagatgagaatggtgaagattatcc

SEQ ID NO: 28526 - DNA, 25 bp, Probe sequence
gaatggtgaagattatccagattgg

SEQ ID NO: 28527 - DNA, 25 bp, Probe sequence
gattcgacacactggtatagagaag

SEQ ID NO: 28528 - DNA, 25 bp, Probe sequence
ttgattcgacacactggtatagaga

SEQ ID NO: 28529 - DNA, 25 bp, Probe sequence
tgagaatggtgaagattatccagat

SEQ ID NO: 28530 - DNA, 25 bp, Probe sequence
ggctatgaacaacaatatgacgatt

SEQ ID NO: 28531 - DNA, 25 bp, Probe sequence
aggaagatgttgatattggctatga

SEQ ID NO: 28532 - DNA, 25 bp, Probe sequence
tggctatgaacaacaatatgacgat

SEQ ID NO: 28533 - DNA, 25 bp, Probe sequence
ggaagatgttgatattggctatgaa

SEQ ID NO: 28534 - DNA, 25 bp, Probe sequence
aaggaagatgttgatattggctatg

SEQ ID NO: 28535 - DNA, 25 bp, Probe sequence
ttggctatgaacaacaatatgacga

SEQ ID NO: 28536 - DNA, 25 bp, Probe sequence
gaagatgttgatattggctatgaac

SEQ ID NO: 28537 - DNA, 25 bp, Probe sequence
attggctatgaacaacaatatgacg

SEQ ID NO: 28538 - DNA, 25 bp, Probe sequence
tttacagttgaaccaaaggaagatg

SEQ ID NO: 28539 - DNA, 25 bp, Probe sequence
aagaaggttggcgagttattagaat

SEQ ID NO: 28540 - DNA, 25 bp, Probe sequence
gaagaaggttggcgagttattagaa

SEQ ID NO: 28541 - DNA, 25 bp, Probe sequence
agaaggttggcgagttattagaatt

SEQ ID NO: 28542 - DNA, 25 bp, Probe sequence
gagaagaaggttggcgagttattag

SEQ ID NO: 28543 - DNA, 25 bp, Probe sequence
agaagaaggttggcgagttattaga

SEQ ID NO: 28544 - DNA, 25 bp, Probe sequence
agagaagaaggttggcgagttatta

SEQ ID NO: 28545 - DNA, 25 bp, Probe sequence
aagagaagaaggttggcgagttatt

SEQ ID NO: 28546 - DNA, 25 bp, Probe sequence
gaagagaagaaggttggcgagttat

SEQ ID NO: 28547 - DNA, 25 bp, Probe sequence
ggtgaaataggttatccgtctgtaa

SEQ ID NO: 28548 - DNA, 25 bp, Probe sequence
tacatcaacgtcaacatcatctaca

SEQ ID NO: 28549 - DNA, 25 bp, Probe sequence
acatcaacgtcaacatcatctacat

SEQ ID NO: 28550 - DNA, 25 bp, Probe sequence
tcagtcaggatataaagaggaagga

SEQ ID NO: 28551 - DNA, 25 bp, Probe sequence
ttacatcaacgtcaacatcatctac

SEQ ID NO: 28552 - DNA, 25 bp, Probe sequence
cagtcaggatataaagaggaaggaa

SEQ ID NO: 28553 - DNA, 25 bp, Probe sequence
catcaacgtcaacatcatctacata

SEQ ID NO: 28554 - DNA, 25 bp, Probe sequence
cgaattactatgaaagatggtgggt

SEQ ID NO: 28555 - DNA, 25 bp, Probe sequence
atcagtcaggatataaagaggaagg

SEQ ID NO: 28556 - DNA, 25 bp, Probe sequence
gttacatcaacgtcaacatcatcta

SEQ ID NO: 28557 - DNA, 25 bp, Probe sequence
ggctcgcttatcattcaagactata

SEQ ID NO: 28558 - DNA, 25 bp, Probe sequence
gctcgcttatcattcaagactatat

SEQ ID NO: 28559 - DNA, 25 bp, Probe sequence
tggctcgcttatcattcaagactat

SEQ ID NO: 28560 - DNA, 25 bp, Probe sequence
acatcgctctaatatcgcaaggatt

SEQ ID NO: 28561 - DNA, 25 bp, Probe sequence
ttggctcgcttatcattcaagacta

SEQ ID NO: 28562 - DNA, 25 bp, Probe sequence
gattggctcgcttatcattcaagac

SEQ ID NO: 28563 - DNA, 25 bp, Probe sequence
gacatcgctctaatatcgcaaggat

SEQ ID NO: 28564 - DNA, 25 bp, Probe sequence
attggctcgcttatcattcaagact

SEQ ID NO: 28565 - DNA, 25 bp, Probe sequence
cttattcgctatacttggacacgtt

SEQ ID NO: 28566 - DNA, 25 bp, Probe sequence
ttaggtgacgatgaagaagatgaag

SEQ ID NO: 28567 - DNA, 25 bp, Probe sequence
tgacgatgaagaagatgaagaagta

SEQ ID NO: 28568 - DNA, 25 bp, Probe sequence
acgatgaagaagatgaagaagtaga

SEQ ID NO: 28569 - DNA, 25 bp, Probe sequence
gacgatgaagaagatgaagaagtag

SEQ ID NO: 28570 - DNA, 25 bp, Probe sequence
gtgacgatgaagaagatgaagaagt

SEQ ID NO: 28571 - DNA, 25 bp, Probe sequence
taggtgacgatgaagaagatgaaga

SEQ ID NO: 28572 - DNA, 25 bp, Probe sequence
ccaggtgatacttctatacaaggaa

SEQ ID NO: 28573 - DNA, 25 bp, Probe sequence
accaggtgatacttctatacaagga

SEQ ID NO: 28574 - DNA, 25 bp, Probe sequence
ggtgacgatgaagaagatgaagaag

SEQ ID NO: 28575 - DNA, 25 bp, Probe sequence
accttctataaaattagaccgaatt

SEQ ID NO: 28576 - DNA, 25 bp, Probe sequence
ccttctataaaattagaccgaattg

SEQ ID NO: 28577 - DNA, 25 bp, Probe sequence
cttctataaaattagaccgaattga

SEQ ID NO: 28578 - DNA, 25 bp, Probe sequence
tatgacgaaaccatttgacaccttt

SEQ ID NO: 28579 - DNA, 25 bp, Probe sequence
atatcaagaccgtggtcctcaatat

SEQ ID NO: 28580 - DNA, 25 bp, Probe sequence
aatatcaagaccgtggtcctcaata

SEQ ID NO: 28581 - DNA, 25 bp, Probe sequence
aaagtaacttctggatatatgggcg

SEQ ID NO: 28582 - DNA, 25 bp, Probe sequence
gtatgacgaaaccatttgacacctt

SEQ ID NO: 28583 - DNA, 25 bp, Probe sequence
tatcaagaccgtggtcctcaatatc

SEQ ID NO: 28584 - DNA, 25 bp, Probe sequence
ttacaaagccgaagactatcaccaa

SEQ ID NO: 28585 - DNA, 25 bp, Probe sequence
tttacaaagccgaagactatcacca

SEQ ID NO: 28586 - DNA, 25 bp, Probe sequence
aagccgaagactatcaccaagattt

SEQ ID NO: 28587 - DNA, 25 bp, Probe sequence
attattagaaggtcgttcggatgaa

SEQ ID NO: 28588 - DNA, 25 bp, Probe sequence
aattattagaaggtcgttcggatga

SEQ ID NO: 28589 - DNA, 25 bp, Probe sequence
caagcaattcacgttgttatagaag

SEQ ID NO: 28590 - DNA, 25 bp, Probe sequence
aaattattagaaggtcgttcggatg

SEQ ID NO: 28591 - DNA, 25 bp, Probe sequence
agcaattcacgttgttatagaagaa

SEQ ID NO: 28592 - DNA, 25 bp, Probe sequence
aagcaattcacgttgttatagaaga

SEQ ID NO: 28593 - DNA, 25 bp, Probe sequence
tggcgtaagaaagtcagatcaataa

SEQ ID NO: 28594 - DNA, 25 bp, Probe sequence
cgttgttatagaagaaatgaaacca

SEQ ID NO: 28595 - DNA, 25 bp, Probe sequence
ctggcgtaagaaagtcagatcaata

SEQ ID NO: 28596 - DNA, 25 bp, Probe sequence
ttcagattcagacagagactcagac

SEQ ID NO: 28597 - DNA, 25 bp, Probe sequence
cgatagcgattcagattcagacaga

SEQ ID NO: 28598 - DNA, 25 bp, Probe sequence
gcagatagcgattcagattcagaca

SEQ ID NO: 28599 - DNA, 25 bp, Probe sequence
cagacagagactcagacgcagatag

SEQ ID NO: 28600 - DNA, 25 bp, Probe sequence
tcagattcagacagagactcagacg

SEQ ID NO: 28601 - DNA, 25 bp, Probe sequence
gatagcgattcagacagcgattcag

SEQ ID NO: 28602 - DNA, 25 bp, Probe sequence
cagatagcgattcagacagcgattc

SEQ ID NO: 28603 - DNA, 25 bp, Probe sequence
tcagacagagactcagacgcagata

SEQ ID NO: 28604 - DNA, 25 bp, Probe sequence
agattcagacagcgatagcgattca

SEQ ID NO: 28605 - DNA, 25 bp, Probe sequence
attaagccactagagttgcctatcg

SEQ ID NO: 28606 - DNA, 25 bp, Probe sequence
tggattattccgcttgtattgatac

SEQ ID NO: 28607 - DNA, 25 bp, Probe sequence
ggattattccgcttgtattgatact

SEQ ID NO: 28608 - DNA, 25 bp, Probe sequence
taatgattggaaatacgcttgtgtc

SEQ ID NO: 28609 - DNA, 25 bp, Probe sequence
atcgttattgctggtttatgtcttg

SEQ ID NO: 28610 - DNA, 25 bp, Probe sequence
catggattattccgcttgtattgat

SEQ ID NO: 28611 - DNA, 25 bp, Probe sequence
aatcgttattgctggtttatgtctt

SEQ ID NO: 28612 - DNA, 25 bp, Probe sequence
gattattccgcttgtattgatactt

SEQ ID NO: 28613 - DNA, 25 bp, Probe sequence
ttaatgattggaaatacgcttgtgt

SEQ ID NO: 28614 - DNA, 25 bp, Probe sequence
agattcagacagcgatagcgattct

SEQ ID NO: 28615 - DNA, 25 bp, Probe sequence
tgaagtagtaacacctccggtagac

SEQ ID NO: 28616 - DNA, 25 bp, Probe sequence
gtgaagtagtaacacctccggtaga

SEQ ID NO: 28617 - DNA, 25 bp, Probe sequence
gattcagacagcgatagcgattctg

SEQ ID NO: 28618 - DNA, 25 bp, Probe sequence
gtagtaacacctccggtagacgatg

SEQ ID NO: 28619 - DNA, 25 bp, Probe sequence
gaagtagtaacacctccggtagacg

SEQ ID NO: 28620 - DNA, 25 bp, Probe sequence
agtagtaacacctccggtagacgat

SEQ ID NO: 28621 - DNA, 25 bp, Probe sequence
tagtaacacctccggtagacgatgt

SEQ ID NO: 28622 - DNA, 25 bp, Probe sequence
aagtagtaacacctccggtagacga

SEQ ID NO: 28623 - DNA, 25 bp, Probe sequence
ttagagaagttgttgaagatagcga

SEQ ID NO: 28624 - DNA, 25 bp, Probe sequence
gttagagaagttgttgaagatagcg

SEQ ID NO: 28625 - DNA, 25 bp, Probe sequence
tagagaagttgttgaagatagcgat

SEQ ID NO: 28626 - DNA, 25 bp, Probe sequence
aagttgttgaagatagcgatggaat

SEQ ID NO: 28627 - DNA, 25 bp, Probe sequence
agagaagttgttgaagatagcgatg

SEQ ID NO: 28628 - DNA, 25 bp, Probe sequence
tgttagagaagttgttgaagatagc

SEQ ID NO: 28629 - DNA, 25 bp, Probe sequence
ttgttgaagatagcgatggaatgac

SEQ ID NO: 28630 - DNA, 25 bp, Probe sequence
gttgttgaagatagcgatggaatga

SEQ ID NO: 28631 - DNA, 25 bp, Probe sequence
agttgttgaagatagcgatggaatg

SEQ ID NO: 28632 - DNA, 25 bp, Probe sequence
gaactgttatcacctactcttgcta

SEQ ID NO: 28633 - DNA, 25 bp, Probe sequence
aactgttatcacctactcttgctaa

SEQ ID NO: 28634 - DNA, 25 bp, Probe sequence
taactactgctgaagaacacgacta

SEQ ID NO: 28635 - DNA, 25 bp, Probe sequence
agaactgttatcacctactcttgct

SEQ ID NO: 28636 - DNA, 25 bp, Probe sequence
gattaattggtggaagtcttgctag

SEQ ID NO: 28637 - DNA, 25 bp, Probe sequence
tattgtaactactgctgaagaacac

SEQ ID NO: 28638 - DNA, 25 bp, Probe sequence
attgtaactactgctgaagaacacg

SEQ ID NO: 28639 - DNA, 25 bp, Probe sequence
ggattaattggtggaagtcttgcta

SEQ ID NO: 28640 - DNA, 25 bp, Probe sequence
cttggattaattggtggaagtcttg

SEQ ID NO: 28641 - DNA, 25 bp, Probe sequence
aagtaataagatcactggagattcg

SEQ ID NO: 28642 - DNA, 25 bp, Probe sequence
gacaaagggaagtgggttattagat

SEQ ID NO: 28643 - DNA, 25 bp, Probe sequence
tgacaaagggaagtgggttattaga

SEQ ID NO: 28644 - DNA, 25 bp, Probe sequence
gtgacaaagggaagtgggttattag

SEQ ID NO: 28645 - DNA, 25 bp, Probe sequence
agtaataagatcactggagattcga

SEQ ID NO: 28646 - DNA, 25 bp, Probe sequence
gtaagcgatataatataacgacgaa

SEQ ID NO: 28647 - DNA, 25 bp, Probe sequence
acaaagggaagtgggttattagatc

SEQ ID NO: 28648 - DNA, 25 bp, Probe sequence
caggatgcgaaagtaataagatcac

SEQ ID NO: 28649 - DNA, 25 bp, Probe sequence
atgcgaaagtaataagatcactgga

SEQ ID NO: 28650 - DNA, 25 bp, Probe sequence
tagtgtctactttaatccaagcgag

SEQ ID NO: 28651 - DNA, 25 bp, Probe sequence
atagtgtctactttaatccaagcga

SEQ ID NO: 28652 - DNA, 25 bp, Probe sequence
gatagtgtctactttaatccaagcg

SEQ ID NO: 28653 - DNA, 25 bp, Probe sequence
cgacaaaggtacttgggttattaga

SEQ ID NO: 28654 - DNA, 25 bp, Probe sequence
ggttgtgataaatcaagcgatactt

SEQ ID NO: 28655 - DNA, 25 bp, Probe sequence
tgtgataaatcaagcgatacttcag

SEQ ID NO: 28656 - DNA, 25 bp, Probe sequence
gtgataaatcaagcgatacttcaga

SEQ ID NO: 28657 - DNA, 25 bp, Probe sequence
ttgtgataaatcaagcgatacttca

SEQ ID NO: 28658 - DNA, 25 bp, Probe sequence
gttgtgataaatcaagcgatacttc

SEQ ID NO: 28659 - DNA, 25 bp, Probe sequence
ctgatggaagacgagtgatatgtaa

SEQ ID NO: 28660 - DNA, 25 bp, Probe sequence
gctgatggaagacgagtgatatgta

SEQ ID NO: 28661 - DNA, 25 bp, Probe sequence
gtccagaagcagcaaataaacatat

SEQ ID NO: 28662 - DNA, 25 bp, Probe sequence
tgatggaagacgagtgatatgtaaa

SEQ ID NO: 28663 - DNA, 25 bp, Probe sequence
agtccagaagcagcaaataaacata

SEQ ID NO: 28664 - DNA, 25 bp, Probe sequence
tagtccagaagcagcaaataaacat

SEQ ID NO: 28665 - DNA, 25 bp, Probe sequence
gatggaagacgagtgatatgtaaac

SEQ ID NO: 28666 - DNA, 25 bp, Probe sequence
atggaagacgagtgatatgtaaaca

SEQ ID NO: 28667 - DNA, 25 bp, Probe sequence
tccagaagcagcaaataaacatata

SEQ ID NO: 28668 - DNA, 25 bp, Probe sequence
ttaatgtcatgcgttcgttattagc

SEQ ID NO: 28669 - DNA, 25 bp, Probe sequence
gattggacgattgagacctcattaa

SEQ ID NO: 28670 - DNA, 25 bp, Probe sequence
tgattggacgattgagacctcatta

SEQ ID NO: 28671 - DNA, 25 bp, Probe sequence
taaggatggcatgatagtcgatgat

SEQ ID NO: 28672 - DNA, 25 bp, Probe sequence
gtggcggacaattacaaagatttaa

SEQ ID NO: 28673 - DNA, 25 bp, Probe sequence
ttaaggatggcatgatagtcgatga

SEQ ID NO: 28674 - DNA, 25 bp, Probe sequence
agtggcggacaattacaaagattta

SEQ ID NO: 28675 - DNA, 25 bp, Probe sequence
tggcggacaattacaaagatttaat

SEQ ID NO: 28676 - DNA, 25 bp, Probe sequence
ggcggacaattacaaagatttaatg

SEQ ID NO: 28677 - DNA, 25 bp, Probe sequence
cgtgggttaatttacaaagcaaaga

SEQ ID NO: 28678 - DNA, 25 bp, Probe sequence
tcgtgggttaatttacaaagcaaag

SEQ ID NO: 28679 - DNA, 25 bp, Probe sequence
acagcatattgtattagaacatggt

SEQ ID NO: 28680 - DNA, 25 bp, Probe sequence
gtcgtgggttaatttacaaagcaaa

SEQ ID NO: 28681 - DNA, 25 bp, Probe sequence
attaatcattgcagacgaaccagtt

SEQ ID NO: 28682 - DNA, 25 bp, Probe sequence
aattaatcattgcagacgaaccagt

SEQ ID NO: 28683 - DNA, 25 bp, Probe sequence
agcatattgtattagaacatggtca

SEQ ID NO: 28684 - DNA, 25 bp, Probe sequence
cagcatattgtattagaacatggtc

SEQ ID NO: 28685 - DNA, 25 bp, Probe sequence
gtgggttaatttacaaagcaaagat

SEQ ID NO: 28686 - DNA, 25 bp, Probe sequence
tggatgaattacacaaggttgacta

SEQ ID NO: 28687 - DNA, 25 bp, Probe sequence
aatggatgaattacacaaggttgac

SEQ ID NO: 28688 - DNA, 25 bp, Probe sequence
atggatgaattacacaaggttgact

SEQ ID NO: 28689 - DNA, 25 bp, Probe sequence
gtggattgaacgattagtgttaagg

SEQ ID NO: 28690 - DNA, 25 bp, Probe sequence
ggtggattgaacgattagtgttaag

SEQ ID NO: 28691 - DNA, 25 bp, Probe sequence
tggattgaacgattagtgttaaggt

SEQ ID NO: 28692 - DNA, 25 bp, Probe sequence
ggattgaacgattagtgttaaggtt

SEQ ID NO: 28693 - DNA, 25 bp, Probe sequence
ggatgaattacacaaggttgactag

SEQ ID NO: 28694 - DNA, 25 bp, Probe sequence
tgaattacacaaggttgactagaag

SEQ ID NO: 28695 - DNA, 25 bp, Probe sequence
tcttaatggagtaacaacttctgct

SEQ ID NO: 28696 - DNA, 25 bp, Probe sequence
cttaatggagtaacaacttctgctt

SEQ ID NO: 28697 - DNA, 25 bp, Probe sequence
ctcttaatggagtaacaacttctgc

SEQ ID NO: 28698 - DNA, 25 bp, Probe sequence
tctcttaatggagtaacaacttctg

SEQ ID NO: 28699 - DNA, 25 bp, Probe sequence
ttctcttaatggagtaacaacttct

SEQ ID NO: 28700 - DNA, 25 bp, Probe sequence
tgattctcttaatggagtaacaact

SEQ ID NO: 28701 - DNA, 25 bp, Probe sequence
actgattctcttaatggagtaacaa

SEQ ID NO: 28702 - DNA, 25 bp, Probe sequence
ctgattctcttaatggagtaacaac

SEQ ID NO: 28703 - DNA, 25 bp, Probe sequence
ttaatggagtaacaacttctgcttt

SEQ ID NO: 28704 - DNA, 25 bp, Probe sequence
gtcatacgaagttgagaatgctaat

SEQ ID NO: 28705 - DNA, 25 bp, Probe sequence
tcatacgaagttgagaatgctaata

SEQ ID NO: 28706 - DNA, 25 bp, Probe sequence
catacgaagttgagaatgctaataa

SEQ ID NO: 28707 - DNA, 25 bp, Probe sequence
ggatgactgggactaatttacaaga

SEQ ID NO: 28708 - DNA, 25 bp, Probe sequence
actgggactaatttacaagacgaag

SEQ ID NO: 28709 - DNA, 25 bp, Probe sequence
gactgggactaatttacaagacgaa

SEQ ID NO: 28710 - DNA, 25 bp, Probe sequence
atgactgggactaatttacaagacg

SEQ ID NO: 28711 - DNA, 25 bp, Probe sequence
gatgactgggactaatttacaagac

SEQ ID NO: 28712 - DNA, 25 bp, Probe sequence
gggatgactgggactaatttacaag

SEQ ID NO: 28713 - DNA, 25 bp, Probe sequence
tacttagagccaatatgatgactgc

SEQ ID NO: 28714 - DNA, 25 bp, Probe sequence
ttacttagagccaatatgatgactg

SEQ ID NO: 28715 - DNA, 25 bp, Probe sequence
attacttagagccaatatgatgact

SEQ ID NO: 28716 - DNA, 25 bp, Probe sequence
agtaagatggcaataaaggaacagt

SEQ ID NO: 28717 - DNA, 25 bp, Probe sequence
tgagtaagatggcaataaaggaaca

SEQ ID NO: 28718 - DNA, 25 bp, Probe sequence
gagtaagatggcaataaaggaacag

SEQ ID NO: 28719 - DNA, 25 bp, Probe sequence
agatggcaataaaggaacagttaga

SEQ ID NO: 28720 - DNA, 25 bp, Probe sequence
gcaaatggaggaggattatcttctt

SEQ ID NO: 28721 - DNA, 25 bp, Probe sequence
gtaagatggcaataaaggaacagtt

SEQ ID NO: 28722 - DNA, 25 bp, Probe sequence
aatgaacttaggcatagaactcgaa

SEQ ID NO: 28723 - DNA, 25 bp, Probe sequence
cgagaaatatagaagcgtatgagca

SEQ ID NO: 28724 - DNA, 25 bp, Probe sequence
tatagaagcgtatgagcaagaaatc

SEQ ID NO: 28725 - DNA, 25 bp, Probe sequence
gaaatatagaagcgtatgagcaaga

SEQ ID NO: 28726 - DNA, 25 bp, Probe sequence
agaaatatagaagcgtatgagcaag

SEQ ID NO: 28727 - DNA, 25 bp, Probe sequence
gagaaatatagaagcgtatgagcaa

SEQ ID NO: 28728 - DNA, 25 bp, Probe sequence
atagaagcgtatgagcaagaaatca

SEQ ID NO: 28729 - DNA, 25 bp, Probe sequence
cgtatgagcaagaaatcaatgagat

SEQ ID NO: 28730 - DNA, 25 bp, Probe sequence
taaatgaacttaggcatagaactcg

SEQ ID NO: 28731 - DNA, 25 bp, Probe sequence
ctgttattcaaggatgcgtgttatt

SEQ ID NO: 28732 - DNA, 25 bp, Probe sequence
attggcttcttcgttgttattatca

SEQ ID NO: 28733 - DNA, 25 bp, Probe sequence
ttggcttcttcgttgttattatcaa

SEQ ID NO: 28734 - DNA, 25 bp, Probe sequence
tggcttcttcgttgttattatcaat

SEQ ID NO: 28735 - DNA, 25 bp, Probe sequence
aataggtggtactgtagtgattgaa

SEQ ID NO: 28736 - DNA, 25 bp, Probe sequence
gtctaataggtggtactgtagtgat

SEQ ID NO: 28737 - DNA, 25 bp, Probe sequence
catatctataccgctcggcattata

SEQ ID NO: 28738 - DNA, 25 bp, Probe sequence
agtctaataggtggtactgtagtga

SEQ ID NO: 28739 - DNA, 25 bp, Probe sequence
taataggtggtactgtagtgattga

SEQ ID NO: 28740 - DNA, 25 bp, Probe sequence
ttgttatattaggtgtgcttgcatt

SEQ ID NO: 28741 - DNA, 25 bp, Probe sequence
catttgttatattaggtgtgcttgc

SEQ ID NO: 28742 - DNA, 25 bp, Probe sequence
aatatcaaccattattaggatacgc

SEQ ID NO: 28743 - DNA, 25 bp, Probe sequence
acatttgttatattaggtgtgcttg

SEQ ID NO: 28744 - DNA, 25 bp, Probe sequence
tgttatattaggtgtgcttgcattt

SEQ ID NO: 28745 - DNA, 25 bp, Probe sequence
tttgttatattaggtgtgcttgcat

SEQ ID NO: 28746 - DNA, 25 bp, Probe sequence
atttgttatattaggtgtgcttgca

SEQ ID NO: 28747 - DNA, 25 bp, Probe sequence
tgcctaattatttatggatcacaac

SEQ ID NO: 28748 - DNA, 25 bp, Probe sequence
gaaattggcgtaaagaaagaaaagc

SEQ ID NO: 28749 - DNA, 25 bp, Probe sequence
tattgatgatgaacttggcattgat

SEQ ID NO: 28750 - DNA, 25 bp, Probe sequence
atattgatgatgaacttggcattga

SEQ ID NO: 28751 - DNA, 25 bp, Probe sequence
gatgaacttggcattgatcttacag

SEQ ID NO: 28752 - DNA, 25 bp, Probe sequence
attgatgatgaacttggcattgatc

SEQ ID NO: 28753 - DNA, 25 bp, Probe sequence
atgatgaacttggcattgatcttac

SEQ ID NO: 28754 - DNA, 25 bp, Probe sequence
gatgatgaacttggcattgatctta

SEQ ID NO: 28755 - DNA, 25 bp, Probe sequence
tgatgaacttggcattgatcttaca

SEQ ID NO: 28756 - DNA, 25 bp, Probe sequence
tgatgatgaacttggcattgatctt

SEQ ID NO: 28757 - DNA, 25 bp, Probe sequence
ttgatgatgaacttggcattgatct

SEQ ID NO: 28758 - DNA, 25 bp, Probe sequence
tcattaagtattgacgatagaggct

SEQ ID NO: 28759 - DNA, 25 bp, Probe sequence
cattaagtattgacgatagaggctt

SEQ ID NO: 28760 - DNA, 25 bp, Probe sequence
aacaggtacacattacgaacaataa

SEQ ID NO: 28761 - DNA, 25 bp, Probe sequence
ttaacaggtacacattacgaacaat

SEQ ID NO: 28762 - DNA, 25 bp, Probe sequence
atcattaagtattgacgatagaggc

SEQ ID NO: 28763 - DNA, 25 bp, Probe sequence
taacaggtacacattacgaacaata

SEQ ID NO: 28764 - DNA, 25 bp, Probe sequence
gagtgatttgcgtatgatgatttct

SEQ ID NO: 28765 - DNA, 25 bp, Probe sequence
agtgatttgcgtatgatgatttctt

SEQ ID NO: 28766 - DNA, 25 bp, Probe sequence
gtgatttgcgtatgatgatttcttc

SEQ ID NO: 28767 - DNA, 25 bp, Probe sequence
tactattaacacttacggtcacacg

SEQ ID NO: 28768 - DNA, 25 bp, Probe sequence
ctattaacacttacggtcacacgag

SEQ ID NO: 28769 - DNA, 25 bp, Probe sequence
gtactattaacacttacggtcacac

SEQ ID NO: 28770 - DNA, 25 bp, Probe sequence
actattaacacttacggtcacacga

SEQ ID NO: 28771 - DNA, 25 bp, Probe sequence
tattaacacttacggtcacacgagt

SEQ ID NO: 28772 - DNA, 25 bp, Probe sequence
tgtactattaacacttacggtcaca

SEQ ID NO: 28773 - DNA, 25 bp, Probe sequence
atgtactattaacacttacggtcac

SEQ ID NO: 28774 - DNA, 25 bp, Probe sequence
aatgtactattaacacttacggtca

SEQ ID NO: 28775 - DNA, 25 bp, Probe sequence
tcaatgtactattaacacttacggt

SEQ ID NO: 28776 - DNA, 25 bp, Probe sequence
attactgccattataggtccatctg

SEQ ID NO: 28777 - DNA, 25 bp, Probe sequence
aattactgccattataggtccatct

SEQ ID NO: 28778 - DNA, 25 bp, Probe sequence
aagagtagaagagttggttcaagaa

SEQ ID NO: 28779 - DNA, 25 bp, Probe sequence
taagagtagaagagttggttcaaga

SEQ ID NO: 28780 - DNA, 25 bp, Probe sequence
cattaagagtagaagagttggttca

SEQ ID NO: 28781 - DNA, 25 bp, Probe sequence
acattaagagtagaagagttggttc

SEQ ID NO: 28782 - DNA, 25 bp, Probe sequence
agagtagaagagttggttcaagaac

SEQ ID NO: 28783 - DNA, 25 bp, Probe sequence
ttaagagtagaagagttggttcaag

SEQ ID NO: 28784 - DNA, 25 bp, Probe sequence
aacattaagagtagaagagttggtt

SEQ ID NO: 28785 - DNA, 25 bp, Probe sequence
ggtcattacttgtatcttggaatca

SEQ ID NO: 28786 - DNA, 25 bp, Probe sequence
tggtcattacttgtatcttggaatc

SEQ ID NO: 28787 - DNA, 25 bp, Probe sequence
ttacaatcaggttctatcgtgaagc

SEQ ID NO: 28788 - DNA, 25 bp, Probe sequence
atggtcattacttgtatcttggaat

SEQ ID NO: 28789 - DNA, 25 bp, Probe sequence
tgacgaatgtactacttgtattagc

SEQ ID NO: 28790 - DNA, 25 bp, Probe sequence
caccagttatgccaatgagatatat

SEQ ID NO: 28791 - DNA, 25 bp, Probe sequence
tgttgacgaatgtactacttgtatt

SEQ ID NO: 28792 - DNA, 25 bp, Probe sequence
ttgttgacgaatgtactacttgtat

SEQ ID NO: 28793 - DNA, 25 bp, Probe sequence
attgttgacgaatgtactacttgta

SEQ ID NO: 28794 - DNA, 25 bp, Probe sequence
tcttaatcttaatgaatggcgttgc

SEQ ID NO: 28795 - DNA, 25 bp, Probe sequence
cgctaacaatgaccttactgatatt

SEQ ID NO: 28796 - DNA, 25 bp, Probe sequence
cttaatgaatggcgttgcgattatt

SEQ ID NO: 28797 - DNA, 25 bp, Probe sequence
cttaatcttaatgaatggcgttgcg

SEQ ID NO: 28798 - DNA, 25 bp, Probe sequence
cttgtcgtacttattgcgttgttaa

SEQ ID NO: 28799 - DNA, 25 bp, Probe sequence
taatcttaatgaatggcgttgcgat

SEQ ID NO: 28800 - DNA, 25 bp, Probe sequence
ggcaacacctagaagtatattggat

SEQ ID NO: 28801 - DNA, 25 bp, Probe sequence
ttggcaacacctagaagtatattgg

SEQ ID NO: 28802 - DNA, 25 bp, Probe sequence
ttaatcttaatgaatggcgttgcga

SEQ ID NO: 28803 - DNA, 25 bp, Probe sequence
actgaaattaaagggaaaccaaagc

SEQ ID NO: 28804 - DNA, 25 bp, Probe sequence
gtggatatgctggtgaaatcttaaa

SEQ ID NO: 28805 - DNA, 25 bp, Probe sequence
acaactgaaattaaagggaaaccaa

SEQ ID NO: 28806 - DNA, 25 bp, Probe sequence
aagaatttatgctggtggatatgct

SEQ ID NO: 28807 - DNA, 25 bp, Probe sequence
caagaatttatgctggtggatatgc

SEQ ID NO: 28808 - DNA, 25 bp, Probe sequence
acaagaatttatgctggtggatatg

SEQ ID NO: 28809 - DNA, 25 bp, Probe sequence
ggtggatatgctggtgaaatcttaa

SEQ ID NO: 28810 - DNA, 25 bp, Probe sequence
gtcgctgtatctttaggtgttaaac

SEQ ID NO: 28811 - DNA, 25 bp, Probe sequence
tagatgaaatcacttggaacttagc

SEQ ID NO: 28812 - DNA, 25 bp, Probe sequence
actggatatattgttgagatagcga

SEQ ID NO: 28813 - DNA, 25 bp, Probe sequence
tatattgttgagatagcgacaggtg

SEQ ID NO: 28814 - DNA, 25 bp, Probe sequence
ctggatatattgttgagatagcgac

SEQ ID NO: 28815 - DNA, 25 bp, Probe sequence
gactggatatattgttgagatagcg

SEQ ID NO: 28816 - DNA, 25 bp, Probe sequence
attgtatcattagcggcaggtagtt

SEQ ID NO: 28817 - DNA, 25 bp, Probe sequence
tggatatattgttgagatagcgaca

SEQ ID NO: 28818 - DNA, 25 bp, Probe sequence
atatattgttgagatagcgacaggt

SEQ ID NO: 28819 - DNA, 25 bp, Probe sequence
tattgttgagatagcgacaggtgat

SEQ ID NO: 28820 - DNA, 25 bp, Probe sequence
atattgttgagatagcgacaggtga

SEQ ID NO: 28821 - DNA, 25 bp, Probe sequence
aagtacagttacaggtgaacgtatt

SEQ ID NO: 28822 - DNA, 25 bp, Probe sequence
aacacgttctgaattagttgaatcc

SEQ ID NO: 28823 - DNA, 25 bp, Probe sequence
cgaacacgttctgaattagttgaat

SEQ ID NO: 28824 - DNA, 25 bp, Probe sequence
ttaagtacagttacaggtgaacgta

SEQ ID NO: 28825 - DNA, 25 bp, Probe sequence
acagttacaggtgaacgtattatcg

SEQ ID NO: 28826 - DNA, 25 bp, Probe sequence
agtacagttacaggtgaacgtatta

SEQ ID NO: 28827 - DNA, 25 bp, Probe sequence
taagtacagttacaggtgaacgtat

SEQ ID NO: 28828 - DNA, 25 bp, Probe sequence
tagtttacaaggtatcttaacgcca

SEQ ID NO: 28829 - DNA, 25 bp, Probe sequence
agtttacaaggtatcttaacgccag

SEQ ID NO: 28830 - DNA, 25 bp, Probe sequence
taatggtggcagtggtaatagtgat

SEQ ID NO: 28831 - DNA, 25 bp, Probe sequence
aatggtggcagtggtaatagtgatt

SEQ ID NO: 28832 - DNA, 25 bp, Probe sequence
caacactattattaggtgcttgtgg

SEQ ID NO: 28833 - DNA, 25 bp, Probe sequence
aacactattattaggtgcttgtggt

SEQ ID NO: 28834 - DNA, 25 bp, Probe sequence
gtaatggtggcagtggtaatagtga

SEQ ID NO: 28835 - DNA, 25 bp, Probe sequence
acactattattaggtgcttgtggtg

SEQ ID NO: 28836 - DNA, 25 bp, Probe sequence
cactattattaggtgcttgtggtgg

SEQ ID NO: 28837 - DNA, 25 bp, Probe sequence
actattattaggtgcttgtggtggc

SEQ ID NO: 28838 - DNA, 25 bp, Probe sequence
taaatgctgtatcaccaaactcaag

SEQ ID NO: 28839 - DNA, 25 bp, Probe sequence
aacgccagcacattattatatttcg

SEQ ID NO: 28840 - DNA, 25 bp, Probe sequence
ccaagaccatataatcatttagccg

SEQ ID NO: 28841 - DNA, 25 bp, Probe sequence
catatttggtttcaggtgtcatcat

SEQ ID NO: 28842 - DNA, 25 bp, Probe sequence
ttgggtagcgttattcttaatggta

SEQ ID NO: 28843 - DNA, 25 bp, Probe sequence
tgggtagcgttattcttaatggtat

SEQ ID NO: 28844 - DNA, 25 bp, Probe sequence
tttgggtagcgttattcttaatggt

SEQ ID NO: 28845 - DNA, 25 bp, Probe sequence
atggtttacagattatttcggtgag

SEQ ID NO: 28846 - DNA, 25 bp, Probe sequence
atttgggtagcgttattcttaatgg

SEQ ID NO: 28847 - DNA, 25 bp, Probe sequence
ggtttggtttgtgacatatttggtt

SEQ ID NO: 28848 - DNA, 25 bp, Probe sequence
tgaacgatgatgatgaattagaagt

SEQ ID NO: 28849 - DNA, 25 bp, Probe sequence
cgatgatgatgaattagaagtaggt

SEQ ID NO: 28850 - DNA, 25 bp, Probe sequence
acgatgatgatgaattagaagtagg

SEQ ID NO: 28851 - DNA, 25 bp, Probe sequence
tgatgatgaattagaagtaggtgaa

SEQ ID NO: 28852 - DNA, 25 bp, Probe sequence
tgatgaattagaagtaggtgaagaa

SEQ ID NO: 28853 - DNA, 25 bp, Probe sequence
atgaacgatgatgatgaattagaag

SEQ ID NO: 28854 - DNA, 25 bp, Probe sequence
atgatgatgaattagaagtaggtga

SEQ ID NO: 28855 - DNA, 25 bp, Probe sequence
ttcttcatttatccaaaccgttcag

SEQ ID NO: 28856 - DNA, 25 bp, Probe sequence
tttcttcatttatccaaaccgttca

SEQ ID NO: 28857 - DNA, 25 bp, Probe sequence
atgaaggttatgaatctatcagtgc

SEQ ID NO: 28858 - DNA, 25 bp, Probe sequence
tagttgttatgcaccgaattatcca

SEQ ID NO: 28859 - DNA, 25 bp, Probe sequence
ttagttgttatgcaccgaattatcc

SEQ ID NO: 28860 - DNA, 25 bp, Probe sequence
aatgtagatgattggtgggaagaag

SEQ ID NO: 28861 - DNA, 25 bp, Probe sequence
taatgtagatgattggtgggaagaa

SEQ ID NO: 28862 - DNA, 25 bp, Probe sequence
ataatgtagatgattggtgggaaga

SEQ ID NO: 28863 - DNA, 25 bp, Probe sequence
tgaaggttatgaatctatcagtgca

SEQ ID NO: 28864 - DNA, 25 bp, Probe sequence
gtagatgattggtgggaagaagttg

SEQ ID NO: 28865 - DNA, 25 bp, Probe sequence
agttgttatgcaccgaattatccag

SEQ ID NO: 28866 - DNA, 25 bp, Probe sequence
gcaaggtatattcatattcgctacg

SEQ ID NO: 28867 - DNA, 25 bp, Probe sequence
ggcaaggtatattcatattcgctac

SEQ ID NO: 28868 - DNA, 25 bp, Probe sequence
tcggacaagtattatggcaattagt

SEQ ID NO: 28869 - DNA, 25 bp, Probe sequence
actacaggtatgattacttatgcga

SEQ ID NO: 28870 - DNA, 25 bp, Probe sequence
tacatcggacaagtattatggcaat

SEQ ID NO: 28871 - DNA, 25 bp, Probe sequence
cggacaagtattatggcaattagtt

SEQ ID NO: 28872 - DNA, 25 bp, Probe sequence
ttacatcggacaagtattatggcaa

SEQ ID NO: 28873 - DNA, 25 bp, Probe sequence
aacaatcacaatggaagtcatcaac

SEQ ID NO: 28874 - DNA, 25 bp, Probe sequence
caacaatcacaatggaagtcatcaa

SEQ ID NO: 28875 - DNA, 25 bp, Probe sequence
atgaactattgcgaagattgtgaag

SEQ ID NO: 28876 - DNA, 25 bp, Probe sequence
gaactattgcgaagattgtgaagag

SEQ ID NO: 28877 - DNA, 25 bp, Probe sequence
tattgcgaagattgtgaagaggatt

SEQ ID NO: 28878 - DNA, 25 bp, Probe sequence
tgaactattgcgaagattgtgaaga

SEQ ID NO: 28879 - DNA, 25 bp, Probe sequence
ctattgcgaagattgtgaagaggat

SEQ ID NO: 28880 - DNA, 25 bp, Probe sequence
aactattgcgaagattgtgaagagg

SEQ ID NO: 28881 - DNA, 25 bp, Probe sequence
catgaactattgcgaagattgtgaa

SEQ ID NO: 28882 - DNA, 25 bp, Probe sequence
aattgtgacatgaactattgcgaag

SEQ ID NO: 28883 - DNA, 25 bp, Probe sequence
taattgtgacatgaactattgcgaa

SEQ ID NO: 28884 - DNA, 25 bp, Probe sequence
attatctgaaggtacgattgttgtc

SEQ ID NO: 28885 - DNA, 25 bp, Probe sequence
aattatctgaaggtacgattgttgt

SEQ ID NO: 28886 - DNA, 25 bp, Probe sequence
tggtgccgtttatatgaatcaattt

SEQ ID NO: 28887 - DNA, 25 bp, Probe sequence
ggtgccgtttatatgaatcaatttg

SEQ ID NO: 28888 - DNA, 25 bp, Probe sequence
atggtgccgtttatatgaatcaatt

SEQ ID NO: 28889 - DNA, 25 bp, Probe sequence
attgttgtcgtatttccagatggta

SEQ ID NO: 28890 - DNA, 25 bp, Probe sequence
gcaattatctgaaggtacgattgtt

SEQ ID NO: 28891 - DNA, 25 bp, Probe sequence
ttgttgtcgtatttccagatggtag

SEQ ID NO: 28892 - DNA, 25 bp, Probe sequence
tatggtgccgtttatatgaatcaat

SEQ ID NO: 28893 - DNA, 25 bp, Probe sequence
aagcaacatcgtattacacattagc

SEQ ID NO: 28894 - DNA, 25 bp, Probe sequence
gtagatacaacgcatacagattcaa

SEQ ID NO: 28895 - DNA, 25 bp, Probe sequence
agatacaacgcatacagattcaatt

SEQ ID NO: 28896 - DNA, 25 bp, Probe sequence
acaagtgttccatccaagtattgaa

SEQ ID NO: 28897 - DNA, 25 bp, Probe sequence
tagatacaacgcatacagattcaat

SEQ ID NO: 28898 - DNA, 25 bp, Probe sequence
aacaagtgttccatccaagtattga

SEQ ID NO: 28899 - DNA, 25 bp, Probe sequence
caacaagtgttccatccaagtattg

SEQ ID NO: 28900 - DNA, 25 bp, Probe sequence
aagaaggtattacagacggacttgt

SEQ ID NO: 28901 - DNA, 25 bp, Probe sequence
cgaatccaacaagaagttctgtaga

SEQ ID NO: 28902 - DNA, 25 bp, Probe sequence
cattattaggtgtgattgtaggtgc

SEQ ID NO: 28903 - DNA, 25 bp, Probe sequence
ttattaacgacaatggcttcaacag

SEQ ID NO: 28904 - DNA, 25 bp, Probe sequence
ccattattaggtgtgattgtaggtg

SEQ ID NO: 28905 - DNA, 25 bp, Probe sequence
atgctgttatctcaatgtcaattcc

SEQ ID NO: 28906 - DNA, 25 bp, Probe sequence
tgttattagtaagttaggttggctg

SEQ ID NO: 28907 - DNA, 25 bp, Probe sequence
gtgttattagtaagttaggttggct

SEQ ID NO: 28908 - DNA, 25 bp, Probe sequence
agtgttattagtaagttaggttggc

SEQ ID NO: 28909 - DNA, 25 bp, Probe sequence
gttattagtaagttaggttggctga

SEQ ID NO: 28910 - DNA, 25 bp, Probe sequence
tattaacgacaatggcttcaacagg

SEQ ID NO: 28911 - DNA, 25 bp, Probe sequence
aataccgagcatcatagcactaaat

SEQ ID NO: 28912 - DNA, 25 bp, Probe sequence
aatgctagagacgttattgctacag

SEQ ID NO: 28913 - DNA, 25 bp, Probe sequence
ataccgagcatcatagcactaaata

SEQ ID NO: 28914 - DNA, 25 bp, Probe sequence
taccgagcatcatagcactaaatat

SEQ ID NO: 28915 - DNA, 25 bp, Probe sequence
caataccgagcatcatagcactaaa

SEQ ID NO: 28916 - DNA, 25 bp, Probe sequence
gcaataccgagcatcatagcactaa

SEQ ID NO: 28917 - DNA, 25 bp, Probe sequence
aataggactaactgcaataccgagc

SEQ ID NO: 28918 - DNA, 25 bp, Probe sequence
accgagcatcatagcactaaatatg

SEQ ID NO: 28919 - DNA, 25 bp, Probe sequence
gtgatgctggaaaccaaataactaa

SEQ ID NO: 28920 - DNA, 25 bp, Probe sequence
ttgtaatcgtgttgctgtaatggaa

SEQ ID NO: 28921 - DNA, 25 bp, Probe sequence
ccgtatgttatatgtggcttcgatt

SEQ ID NO: 28922 - DNA, 25 bp, Probe sequence
ttggtgtgattggatatagtggtgc

SEQ ID NO: 28923 - DNA, 25 bp, Probe sequence
atttgtaatcgtgttgctgtaatgg

SEQ ID NO: 28924 - DNA, 25 bp, Probe sequence
cgttggtaagactcgtgaatcatct

SEQ ID NO: 28925 - DNA, 25 bp, Probe sequence
gactgcttcgatattgacgttatta

SEQ ID NO: 28926 - DNA, 25 bp, Probe sequence
atgcttgaatttgtaggattgagtg

SEQ ID NO: 28927 - DNA, 25 bp, Probe sequence
aaattaagcaacgagtaacggaaat

SEQ ID NO: 28928 - DNA, 25 bp, Probe sequence
tttggtgtgattggatatagtggtg

SEQ ID NO: 28929 - DNA, 25 bp, Probe sequence
atgataatcgtgatggtgttgctat

SEQ ID NO: 28930 - DNA, 25 bp, Probe sequence
tgataatcgtgatggtgttgctatt

SEQ ID NO: 28931 - DNA, 25 bp, Probe sequence
aatcgtgatggtgttgctattagag

SEQ ID NO: 28932 - DNA, 25 bp, Probe sequence
taatcgtgatggtgttgctattaga

SEQ ID NO: 28933 - DNA, 25 bp, Probe sequence
gatgataatcgtgatggtgttgcta

SEQ ID NO: 28934 - DNA, 25 bp, Probe sequence
caagatgataatcgtgatggtgttg

SEQ ID NO: 28935 - DNA, 25 bp, Probe sequence
ataatcgtgatggtgttgctattag

SEQ ID NO: 28936 - DNA, 25 bp, Probe sequence
gataatcgtgatggtgttgctatta

SEQ ID NO: 28937 - DNA, 25 bp, Probe sequence
tgaacctcaagatgataatcgtgat

SEQ ID NO: 28938 - DNA, 25 bp, Probe sequence
actgcgattattggacttattggaa

SEQ ID NO: 28939 - DNA, 25 bp, Probe sequence
ctgcgattattggacttattggaag

SEQ ID NO: 28940 - DNA, 25 bp, Probe sequence
cactgcgattattggacttattgga

SEQ ID NO: 28941 - DNA, 25 bp, Probe sequence
taccactgcgattattggacttatt

SEQ ID NO: 28942 - DNA, 25 bp, Probe sequence
ttaccactgcgattattggacttat

SEQ ID NO: 28943 - DNA, 25 bp, Probe sequence
attaccactgcgattattggactta

SEQ ID NO: 28944 - DNA, 25 bp, Probe sequence
tgattggtattccattaggtgtctt

SEQ ID NO: 28945 - DNA, 25 bp, Probe sequence
gtgattggtattccattaggtgtct

SEQ ID NO: 28946 - DNA, 25 bp, Probe sequence
agtgattggtattccattaggtgtc

SEQ ID NO: 28947 - DNA, 25 bp, Probe sequence
atccatacactggtgaagtaatcaa

SEQ ID NO: 28948 - DNA, 25 bp, Probe sequence
aatccatacactggtgaagtaatca

SEQ ID NO: 28949 - DNA, 25 bp, Probe sequence
aattacgaatccatacactggtgaa

SEQ ID NO: 28950 - DNA, 25 bp, Probe sequence
cgaatccatacactggtgaagtaat

SEQ ID NO: 28951 - DNA, 25 bp, Probe sequence
attacgaatccatacactggtgaag

SEQ ID NO: 28952 - DNA, 25 bp, Probe sequence
gaatccatacactggtgaagtaatc

SEQ ID NO: 28953 - DNA, 25 bp, Probe sequence
cgtgcattattagacttgtgtgatt

SEQ ID NO: 28954 - DNA, 25 bp, Probe sequence
cattaagtgaagttgttgatacacc

SEQ ID NO: 28955 - DNA, 25 bp, Probe sequence
tgaacgtgaacaacaagcaatatat

SEQ ID NO: 28956 - DNA, 25 bp, Probe sequence
tgatgtgatagagttaagtgaggat

SEQ ID NO: 28957 - DNA, 25 bp, Probe sequence
atgatgtgatagagttaagtgagga

SEQ ID NO: 28958 - DNA, 25 bp, Probe sequence
caatcatagacacagataagttcgt

SEQ ID NO: 28959 - DNA, 25 bp, Probe sequence
acaatcatagacacagataagttcg

SEQ ID NO: 28960 - DNA, 25 bp, Probe sequence
tcatagacacagataagttcgtcaa

SEQ ID NO: 28961 - DNA, 25 bp, Probe sequence
atcatagacacagataagttcgtca

SEQ ID NO: 28962 - DNA, 25 bp, Probe sequence
atcacaatacaatcatagacacaga

SEQ ID NO: 28963 - DNA, 25 bp, Probe sequence
tcacaatacaatcatagacacagat

SEQ ID NO: 28964 - DNA, 25 bp, Probe sequence
catagacacagataagttcgtcaat

SEQ ID NO: 28965 - DNA, 25 bp, Probe sequence
tacacattgttggctgattattgaa

SEQ ID NO: 28966 - DNA, 25 bp, Probe sequence
aacacgcttcaagtatggatcaatt

SEQ ID NO: 28967 - DNA, 25 bp, Probe sequence
atacacattgttggctgattattga

SEQ ID NO: 28968 - DNA, 25 bp, Probe sequence
tgatacacattgttggctgattatt

SEQ ID NO: 28969 - DNA, 25 bp, Probe sequence
gatacacattgttggctgattattg

SEQ ID NO: 28970 - DNA, 25 bp, Probe sequence
gtgatacacattgttggctgattat

SEQ ID NO: 28971 - DNA, 25 bp, Probe sequence
caacacgcttcaagtatggatcaat

SEQ ID NO: 28972 - DNA, 25 bp, Probe sequence
ggtgatacacattgttggctgatta

SEQ ID NO: 28973 - DNA, 25 bp, Probe sequence
aagatggcatcgtagagagtacaag

SEQ ID NO: 28974 - DNA, 25 bp, Probe sequence
tcgtagcacttgtattattagcagc

SEQ ID NO: 28975 - DNA, 25 bp, Probe sequence
atcgtagcacttgtattattagcag

SEQ ID NO: 28976 - DNA, 25 bp, Probe sequence
gtagcacttgtattattagcagcgt

SEQ ID NO: 28977 - DNA, 25 bp, Probe sequence
ggttagttatcgtagcacttgtatt

SEQ ID NO: 28978 - DNA, 25 bp, Probe sequence
atgatattgatgtggagattaagca

SEQ ID NO: 28979 - DNA, 25 bp, Probe sequence
cgtagcacttgtattattagcagcg

SEQ ID NO: 28980 - DNA, 25 bp, Probe sequence
tatcgtagcacttgtattattagca

SEQ ID NO: 28981 - DNA, 25 bp, Probe sequence
gatgatattgatgtggagattaagc

SEQ ID NO: 28982 - DNA, 25 bp, Probe sequence
tgatattgatgtggagattaagcac

SEQ ID NO: 28983 - DNA, 25 bp, Probe sequence
tgttacatgaaacttggaaagaacg

SEQ ID NO: 28984 - DNA, 25 bp, Probe sequence
gatgttatcaacgaaactgaagaat

SEQ ID NO: 28985 - DNA, 25 bp, Probe sequence
agtagaagtcattaatacagatgca

SEQ ID NO: 28986 - DNA, 25 bp, Probe sequence
atgttacatgaaacttggaaagaac

SEQ ID NO: 28987 - DNA, 25 bp, Probe sequence
aagtagaagtcattaatacagatgc

SEQ ID NO: 28988 - DNA, 25 bp, Probe sequence
tacatgaaacttggaaagaacgtac

SEQ ID NO: 28989 - DNA, 25 bp, Probe sequence
gttacatgaaacttggaaagaacgt

SEQ ID NO: 28990 - DNA, 25 bp, Probe sequence
gtagaagtcattaatacagatgcaa

SEQ ID NO: 28991 - DNA, 25 bp, Probe sequence
ttacatgaaacttggaaagaacgta

SEQ ID NO: 28992 - DNA, 25 bp, Probe sequence
aacttaccaaaacattatgcgactt

SEQ ID NO: 28993 - DNA, 25 bp, Probe sequence
caacttaccaaaacattatgcgact

SEQ ID NO: 28994 - DNA, 25 bp, Probe sequence
acaacttaccaaaacattatgcgac

SEQ ID NO: 28995 - DNA, 25 bp, Probe sequence
tacaacttaccaaaacattatgcga

SEQ ID NO: 28996 - DNA, 25 bp, Probe sequence
acttaccaaaacattatgcgactta

SEQ ID NO: 28997 - DNA, 25 bp, Probe sequence
gtacaacttaccaaaacattatgcg

SEQ ID NO: 28998 - DNA, 25 bp, Probe sequence
cttaccaaaacattatgcgacttaa

SEQ ID NO: 28999 - DNA, 25 bp, Probe sequence
aagcaggtgactcattgtcattaat

SEQ ID NO: 29000 - DNA, 25 bp, Probe sequence
caagcaggtgactcattgtcattaa

SEQ ID NO: 29001 - DNA, 25 bp, Probe sequence
tacaagttccaagtgagcaattaga

SEQ ID NO: 29002 - DNA, 25 bp, Probe sequence
atacaagttccaagtgagcaattag

SEQ ID NO: 29003 - DNA, 25 bp, Probe sequence
gttccaagtgagcaattagaagaat

SEQ ID NO: 29004 - DNA, 25 bp, Probe sequence
agttccaagtgagcaattagaagaa

SEQ ID NO: 29005 - DNA, 25 bp, Probe sequence
aagttccaagtgagcaattagaaga

SEQ ID NO: 29006 - DNA, 25 bp, Probe sequence
caagttccaagtgagcaattagaag

SEQ ID NO: 29007 - DNA, 25 bp, Probe sequence
tccaagtgagcaattagaagaatct

SEQ ID NO: 29008 - DNA, 25 bp, Probe sequence
ttccaagtgagcaattagaagaatc

SEQ ID NO: 29009 - DNA, 25 bp, Probe sequence
ttatacaagttccaagtgagcaatt

SEQ ID NO: 29010 - DNA, 25 bp, Probe sequence
gcaacaactacgaatagaggttaca

SEQ ID NO: 29011 - DNA, 25 bp, Probe sequence
caacaactacgaatagaggttacaa

SEQ ID NO: 29012 - DNA, 25 bp, Probe sequence
ctggctcaagtaattctacgagtaa

SEQ ID NO: 29013 - DNA, 25 bp, Probe sequence
tggctcaagtaattctacgagtaat

SEQ ID NO: 29014 - DNA, 25 bp, Probe sequence
tctggctcaagtaattctacgagta

SEQ ID NO: 29015 - DNA, 25 bp, Probe sequence
actacgaatagaggttacaatacac

SEQ ID NO: 29016 - DNA, 25 bp, Probe sequence
atctggctcaagtaattctacgagt

SEQ ID NO: 29017 - DNA, 25 bp, Probe sequence
aacaactacgaatagaggttacaat

SEQ ID NO: 29018 - DNA, 25 bp, Probe sequence
gcagatggttacactatcgacaata

SEQ ID NO: 29019 - DNA, 25 bp, Probe sequence
ttacggatatacgctggattgataa

SEQ ID NO: 29020 - DNA, 25 bp, Probe sequence
attacggatatacgctggattgata

SEQ ID NO: 29021 - DNA, 25 bp, Probe sequence
aattacggatatacgctggattgat

SEQ ID NO: 29022 - DNA, 25 bp, Probe sequence
cggatatacgctggattgataaaga

SEQ ID NO: 29023 - DNA, 25 bp, Probe sequence
taaagataatgatgcgttgattgcg

SEQ ID NO: 29024 - DNA, 25 bp, Probe sequence
tacggatatacgctggattgataaa

SEQ ID NO: 29025 - DNA, 25 bp, Probe sequence
acggatatacgctggattgataaag

SEQ ID NO: 29026 - DNA, 25 bp, Probe sequence
aaattacggatatacgctggattga

SEQ ID NO: 29027 - DNA, 25 bp, Probe sequence
gaaattacggatatacgctggattg

SEQ ID NO: 29028 - DNA, 25 bp, Probe sequence
tggcttagatgatatggttaatggt

SEQ ID NO: 29029 - DNA, 25 bp, Probe sequence
aatggtgtgaatcttgctgaagtaa

SEQ ID NO: 29030 - DNA, 25 bp, Probe sequence
ggcttagatgatatggttaatggtt

SEQ ID NO: 29031 - DNA, 25 bp, Probe sequence
ttggcttagatgatatggttaatgg

SEQ ID NO: 29032 - DNA, 25 bp, Probe sequence
atggtgtgaatcttgctgaagtaag

SEQ ID NO: 29033 - DNA, 25 bp, Probe sequence
gtgtgaatcttgctgaagtaagtcc

SEQ ID NO: 29034 - DNA, 25 bp, Probe sequence
ggtgtgaatcttgctgaagtaagtc

SEQ ID NO: 29035 - DNA, 25 bp, Probe sequence
gaagcaggtgtattatctgaacaac

SEQ ID NO: 29036 - DNA, 25 bp, Probe sequence
agaagcaggtgtattatctgaacaa

SEQ ID NO: 29037 - DNA, 25 bp, Probe sequence
atacgataacaggaatgacagcaag

SEQ ID NO: 29038 - DNA, 25 bp, Probe sequence
catacgataacaggaatgacagcaa

SEQ ID NO: 29039 - DNA, 25 bp, Probe sequence
tgctaaagtaccagtaatcgttgaa

SEQ ID NO: 29040 - DNA, 25 bp, Probe sequence
gctaaagtaccagtaatcgttgaat

SEQ ID NO: 29041 - DNA, 25 bp, Probe sequence
tttgtcctgctaaagtaccagtaat

SEQ ID NO: 29042 - DNA, 25 bp, Probe sequence
atttgtcctgctaaagtaccagtaa

SEQ ID NO: 29043 - DNA, 25 bp, Probe sequence
aatttgtcctgctaaagtaccagta

SEQ ID NO: 29044 - DNA, 25 bp, Probe sequence
tacaatttgtcctgctaaagtacca

SEQ ID NO: 29045 - DNA, 25 bp, Probe sequence
ccattacaatttgtcctgctaaagt

SEQ ID NO: 29046 - DNA, 25 bp, Probe sequence
aacggttaatactgacaatccacat

SEQ ID NO: 29047 - DNA, 25 bp, Probe sequence
taacggttaatactgacaatccaca

SEQ ID NO: 29048 - DNA, 25 bp, Probe sequence
ttaatactgacaatccacatgccat

SEQ ID NO: 29049 - DNA, 25 bp, Probe sequence
acggttaatactgacaatccacatg

SEQ ID NO: 29050 - DNA, 25 bp, Probe sequence
gttaatactgacaatccacatgcca

SEQ ID NO: 29051 - DNA, 25 bp, Probe sequence
taatactgacaatccacatgccatg

SEQ ID NO: 29052 - DNA, 25 bp, Probe sequence
ttaacggttaatactgacaatccac

SEQ ID NO: 29053 - DNA, 25 bp, Probe sequence
ggttaatactgacaatccacatgcc

SEQ ID NO: 29054 - DNA, 25 bp, Probe sequence
tcggaagacctgttcatattatggc

SEQ ID NO: 29055 - DNA, 25 bp, Probe sequence
cagcacaattaagaatgatgactca

SEQ ID NO: 29056 - DNA, 25 bp, Probe sequence
tcagcacaattaagaatgatgactc

SEQ ID NO: 29057 - DNA, 25 bp, Probe sequence
agcacaattaagaatgatgactcaa

SEQ ID NO: 29058 - DNA, 25 bp, Probe sequence
ttcagcacaattaagaatgatgact

SEQ ID NO: 29059 - DNA, 25 bp, Probe sequence
gcacaattaagaatgatgactcaat

SEQ ID NO: 29060 - DNA, 25 bp, Probe sequence
attcagcacaattaagaatgatgac

SEQ ID NO: 29061 - DNA, 25 bp, Probe sequence
aatgatgactcaattgtaccagctt

SEQ ID NO: 29062 - DNA, 25 bp, Probe sequence
aagaatgatgactcaattgtaccag

SEQ ID NO: 29063 - DNA, 25 bp, Probe sequence
gaatgatgactcaattgtaccagct

SEQ ID NO: 29064 - DNA, 25 bp, Probe sequence
cagaggaagagattgaagcattact

SEQ ID NO: 29065 - DNA, 25 bp, Probe sequence
gaacattcatcagcaagattagagc

SEQ ID NO: 29066 - DNA, 25 bp, Probe sequence
attcatcagcaagattagagcgatt

SEQ ID NO: 29067 - DNA, 25 bp, Probe sequence
agaggaagagattgaagcattacta

SEQ ID NO: 29068 - DNA, 25 bp, Probe sequence
ccagaggaagagattgaagcattac

SEQ ID NO: 29069 - DNA, 25 bp, Probe sequence
gaagagattgaagcattactagcac

SEQ ID NO: 29070 - DNA, 25 bp, Probe sequence
aagagattgaagcattactagcaca

SEQ ID NO: 29071 - DNA, 25 bp, Probe sequence
aggaagagattgaagcattactagc

SEQ ID NO: 29072 - DNA, 25 bp, Probe sequence
ggaagagattgaagcattactagca

SEQ ID NO: 29073 - DNA, 25 bp, Probe sequence
gcttatatgactatcgtgaggaaca

SEQ ID NO: 29074 - DNA, 25 bp, Probe sequence
ttaggtgatgtaggtaagaacttcg

SEQ ID NO: 29075 - DNA, 25 bp, Probe sequence
ggcttatatgactatcgtgaggaac

SEQ ID NO: 29076 - DNA, 25 bp, Probe sequence
aggcttatatgactatcgtgaggaa

SEQ ID NO: 29077 - DNA, 25 bp, Probe sequence
aaggcttatatgactatcgtgagga

SEQ ID NO: 29078 - DNA, 25 bp, Probe sequence
tgtagatgttgtcgttgaaggtatc

SEQ ID NO: 29079 - DNA, 25 bp, Probe sequence
gtgtagatgttgtcgttgaaggtat

SEQ ID NO: 29080 - DNA, 25 bp, Probe sequence
ggaacttgtagaaggtaagaaggat

SEQ ID NO: 29081 - DNA, 25 bp, Probe sequence
tcaggaacttgtagaaggtaagaag

SEQ ID NO: 29082 - DNA, 25 bp, Probe sequence
gtaatggactcggattatctattgc

SEQ ID NO: 29083 - DNA, 25 bp, Probe sequence
ccagcagtattagaagaatcgttaa

SEQ ID NO: 29084 - DNA, 25 bp, Probe sequence
aatgataacacagtgagagttgaac

SEQ ID NO: 29085 - DNA, 25 bp, Probe sequence
atgataacacagtgagagttgaacc

SEQ ID NO: 29086 - DNA, 25 bp, Probe sequence
gaatgataacacagtgagagttgaa

SEQ ID NO: 29087 - DNA, 25 bp, Probe sequence
cgaatgataacacagtgagagttga

SEQ ID NO: 29088 - DNA, 25 bp, Probe sequence
gattattgttaccacgatgattacg

SEQ ID NO: 29089 - DNA, 25 bp, Probe sequence
ggtaatggactcggattatctattg

SEQ ID NO: 29090 - DNA, 25 bp, Probe sequence
cacatgaattacgaacaccattaca

SEQ ID NO: 29091 - DNA, 25 bp, Probe sequence
cacgagcgataatgttgatgttaat

SEQ ID NO: 29092 - DNA, 25 bp, Probe sequence
acgagcgataatgttgatgttaata

SEQ ID NO: 29093 - DNA, 25 bp, Probe sequence
tcacgagcgataatgttgatgttaa

SEQ ID NO: 29094 - DNA, 25 bp, Probe sequence
cgagcgataatgttgatgttaataa

SEQ ID NO: 29095 - DNA, 25 bp, Probe sequence
atcacgagcgataatgttgatgtta

SEQ ID NO: 29096 - DNA, 25 bp, Probe sequence
tatcacgagcgataatgttgatgtt

SEQ ID NO: 29097 - DNA, 25 bp, Probe sequence
ctatcacgagcgataatgttgatgt

SEQ ID NO: 29098 - DNA, 25 bp, Probe sequence
tatcaaaccaacgtcgaataaacat

SEQ ID NO: 29099 - DNA, 25 bp, Probe sequence
atatcaaaccaacgtcgaataaaca

SEQ ID NO: 29100 - DNA, 25 bp, Probe sequence
cgttagaatctgagtatgatgccat

SEQ ID NO: 29101 - DNA, 25 bp, Probe sequence
ctgctgctgaagaacttaatctact

SEQ ID NO: 29102 - DNA, 25 bp, Probe sequence
gttagaatctgagtatgatgccatt

SEQ ID NO: 29103 - DNA, 25 bp, Probe sequence
gcctgctgaccttgtattattatca

SEQ ID NO: 29104 - DNA, 25 bp, Probe sequence
cgtattaagttaatggaagaagcgg

SEQ ID NO: 29105 - DNA, 25 bp, Probe sequence
gaccttgtattattatcaatcggct

SEQ ID NO: 29106 - DNA, 25 bp, Probe sequence
tgaccttgtattattatcaatcggc

SEQ ID NO: 29107 - DNA, 25 bp, Probe sequence
tcgtattaagttaatggaagaagcg

SEQ ID NO: 29108 - DNA, 25 bp, Probe sequence
cctgctgaccttgtattattatcaa

SEQ ID NO: 29109 - DNA, 25 bp, Probe sequence
gacaacaacaatctacacctatcat

SEQ ID NO: 29110 - DNA, 25 bp, Probe sequence
agacaacaacaatctacacctatca

SEQ ID NO: 29111 - DNA, 25 bp, Probe sequence
acaacaacaatctacacctatcatt

SEQ ID NO: 29112 - DNA, 25 bp, Probe sequence
tcttgaattggaactcacacatgaa

SEQ ID NO: 29113 - DNA, 25 bp, Probe sequence
ttcttgaattggaactcacacatga

SEQ ID NO: 29114 - DNA, 25 bp, Probe sequence
ggacacagagtatgatggacaagac

SEQ ID NO: 29115 - DNA, 25 bp, Probe sequence
acggtgcagacgattatatagttaa

SEQ ID NO: 29116 - DNA, 25 bp, Probe sequence
ttacggtgcagacgattatatagtt

SEQ ID NO: 29117 - DNA, 25 bp, Probe sequence
ttgattacggtgcagacgattatat

SEQ ID NO: 29118 - DNA, 25 bp, Probe sequence
ttaattggttggagtagtatgcgtg

SEQ ID NO: 29119 - DNA, 25 bp, Probe sequence
agattaagcagttgaattaccaagg

SEQ ID NO: 29120 - DNA, 25 bp, Probe sequence
attaagcagttgaattaccaaggtc

SEQ ID NO: 29121 - DNA, 25 bp, Probe sequence
gattaagcagttgaattaccaaggt

SEQ ID NO: 29122 - DNA, 25 bp, Probe sequence
attggttggagtagtatgcgtgtat

SEQ ID NO: 29123 - DNA, 25 bp, Probe sequence
ttaagcagttgaattaccaaggtca

SEQ ID NO: 29124 - DNA, 25 bp, Probe sequence
ttggttggagtagtatgcgtgtatt

SEQ ID NO: 29125 - DNA, 25 bp, Probe sequence
ccgcaattagtatctcagtatgatt

SEQ ID NO: 29126 - DNA, 25 bp, Probe sequence
acaggtattacatctggtgttacat

SEQ ID NO: 29127 - DNA, 25 bp, Probe sequence
tcattacttcttgtggcatatctca

SEQ ID NO: 29128 - DNA, 25 bp, Probe sequence
cattacttcttgtggcatatctcat

SEQ ID NO: 29129 - DNA, 25 bp, Probe sequence
ttcattacttcttgtggcatatctc

SEQ ID NO: 29130 - DNA, 25 bp, Probe sequence
acttcttgtggcatatctcatgtta

SEQ ID NO: 29131 - DNA, 25 bp, Probe sequence
tacttcttgtggcatatctcatgtt

SEQ ID NO: 29132 - DNA, 25 bp, Probe sequence
ttacttcttgtggcatatctcatgt

SEQ ID NO: 29133 - DNA, 25 bp, Probe sequence
cttcttgtggcatatctcatgttaa

SEQ ID NO: 29134 - DNA, 25 bp, Probe sequence
attacttcttgtggcatatctcatg

SEQ ID NO: 29135 - DNA, 25 bp, Probe sequence
cattatccaacagatattattgccg

SEQ ID NO: 29136 - DNA, 25 bp, Probe sequence
atggaaatgcttttaatcgcttgaa

SEQ ID NO: 29137 - DNA, 25 bp, Probe sequence
aatggaaatgcttttaatcgcttga

SEQ ID NO: 29138 - DNA, 25 bp, Probe sequence
tggaaatgcttttaatcgcttgaaa

SEQ ID NO: 29139 - DNA, 25 bp, Probe sequence
caatggaaatgcttttaatcgcttg

SEQ ID NO: 29140 - DNA, 25 bp, Probe sequence
ggaaatgcttttaatcgcttgaaaa

SEQ ID NO: 29141 - DNA, 25 bp, Probe sequence
gaaatgcttttaatcgcttgaaaac

SEQ ID NO: 29142 - DNA, 25 bp, Probe sequence
agctacaaagccatatattactgtt

SEQ ID NO: 29143 - DNA, 25 bp, Probe sequence
gctacaaagccatatattactgtta

SEQ ID NO: 29144 - DNA, 25 bp, Probe sequence
gcaatggaaatgcttttaatcgctt

SEQ ID NO: 29145 - DNA, 25 bp, Probe sequence
caatggagtgatgatgttaatgctg

SEQ ID NO: 29146 - DNA, 25 bp, Probe sequence
ggagtgatgatgttaatgctggatt

SEQ ID NO: 29147 - DNA, 25 bp, Probe sequence
aatggagtgatgatgttaatgctgg

SEQ ID NO: 29148 - DNA, 25 bp, Probe sequence
agaacgccaagaattgaatagtgtt

SEQ ID NO: 29149 - DNA, 25 bp, Probe sequence
tggagtgatgatgttaatgctggat

SEQ ID NO: 29150 - DNA, 25 bp, Probe sequence
atggagtgatgatgttaatgctgga

SEQ ID NO: 29151 - DNA, 25 bp, Probe sequence
cagaacgccaagaattgaatagtgt

SEQ ID NO: 29152 - DNA, 25 bp, Probe sequence
atgcaatggagtgatgatgttaatg

SEQ ID NO: 29153 - DNA, 25 bp, Probe sequence
acgttagacaagcacttcagaataa

SEQ ID NO: 29154 - DNA, 25 bp, Probe sequence
acaccaggattagcgaataagatag

SEQ ID NO: 29155 - DNA, 25 bp, Probe sequence
caggattagcgaataagatagcact

SEQ ID NO: 29156 - DNA, 25 bp, Probe sequence
aacaccaggattagcgaataagata

SEQ ID NO: 29157 - DNA, 25 bp, Probe sequence
taacaccaggattagcgaataagat

SEQ ID NO: 29158 - DNA, 25 bp, Probe sequence
acttaacaccaggattagcgaataa

SEQ ID NO: 29159 - DNA, 25 bp, Probe sequence
ttaacaccaggattagcgaataaga

SEQ ID NO: 29160 - DNA, 25 bp, Probe sequence
gacttaacaccaggattagcgaata

SEQ ID NO: 29161 - DNA, 25 bp, Probe sequence
aggattagcgaataagatagcactt

SEQ ID NO: 29162 - DNA, 25 bp, Probe sequence
ccaggattagcgaataagatagcac

SEQ ID NO: 29163 - DNA, 25 bp, Probe sequence
ataggtaatgatgttgcgagtgatt

SEQ ID NO: 29164 - DNA, 25 bp, Probe sequence
atattgttagaactcgtcggcttaa

SEQ ID NO: 29165 - DNA, 25 bp, Probe sequence
gtaatgatgttgcgagtgattctat

SEQ ID NO: 29166 - DNA, 25 bp, Probe sequence
catattgttagaactcgtcggctta

SEQ ID NO: 29167 - DNA, 25 bp, Probe sequence
cattcatattgttagaactcgtcgg

SEQ ID NO: 29168 - DNA, 25 bp, Probe sequence
ggtaatgatgttgcgagtgattcta

SEQ ID NO: 29169 - DNA, 25 bp, Probe sequence
taggtaatgatgttgcgagtgattc

SEQ ID NO: 29170 - DNA, 25 bp, Probe sequence
gttgttgtgaatgaggttgttgaag

SEQ ID NO: 29171 - DNA, 25 bp, Probe sequence
gaagttgttgtgaatgaggttgttg

SEQ ID NO: 29172 - DNA, 25 bp, Probe sequence
aggtcggtgaacaattaatggaata

SEQ ID NO: 29173 - DNA, 25 bp, Probe sequence
ataaggtcggtgaacaattaatgga

SEQ ID NO: 29174 - DNA, 25 bp, Probe sequence
taaggtcggtgaacaattaatggaa

SEQ ID NO: 29175 - DNA, 25 bp, Probe sequence
ggtcggtgaacaattaatggaatat

SEQ ID NO: 29176 - DNA, 25 bp, Probe sequence
cataaggtcggtgaacaattaatgg

SEQ ID NO: 29177 - DNA, 25 bp, Probe sequence
aaggtcggtgaacaattaatggaat

SEQ ID NO: 29178 - DNA, 25 bp, Probe sequence
tcataaggtcggtgaacaattaatg

SEQ ID NO: 29179 - DNA, 25 bp, Probe sequence
gtcggtgaacaattaatggaatatc

SEQ ID NO: 29180 - DNA, 25 bp, Probe sequence
cagaatggtatgatgacattgactg

SEQ ID NO: 29181 - DNA, 25 bp, Probe sequence
agagtatagtacggttgttgtagac

SEQ ID NO: 29182 - DNA, 25 bp, Probe sequence
aagagtatagtacggttgttgtaga

SEQ ID NO: 29183 - DNA, 25 bp, Probe sequence
caagagtatagtacggttgttgtag

SEQ ID NO: 29184 - DNA, 25 bp, Probe sequence
gtatagtacggttgttgtagaccat

SEQ ID NO: 29185 - DNA, 25 bp, Probe sequence
gagtatagtacggttgttgtagacc

SEQ ID NO: 29186 - DNA, 25 bp, Probe sequence
atagtacggttgttgtagaccattg

SEQ ID NO: 29187 - DNA, 25 bp, Probe sequence
tatagtacggttgttgtagaccatt

SEQ ID NO: 29188 - DNA, 25 bp, Probe sequence
agtatagtacggttgttgtagacca

SEQ ID NO: 29189 - DNA, 25 bp, Probe sequence
ttgatgataatcctgaaacgagttg

SEQ ID NO: 29190 - DNA, 25 bp, Probe sequence
ccagatggtcattatattcacggta

SEQ ID NO: 29191 - DNA, 25 bp, Probe sequence
taacgccagatggtcattatattca

SEQ ID NO: 29192 - DNA, 25 bp, Probe sequence
ttaacgccagatggtcattatattc

SEQ ID NO: 29193 - DNA, 25 bp, Probe sequence
cagatggtcattatattcacggtaa

SEQ ID NO: 29194 - DNA, 25 bp, Probe sequence
aacgccagatggtcattatattcac

SEQ ID NO: 29195 - DNA, 25 bp, Probe sequence
ccagaatgatacatcaggtgaattg

SEQ ID NO: 29196 - DNA, 25 bp, Probe sequence
tccagaatgatacatcaggtgaatt

SEQ ID NO: 29197 - DNA, 25 bp, Probe sequence
ttccagaatgatacatcaggtgaat

SEQ ID NO: 29198 - DNA, 25 bp, Probe sequence
attccagaatgatacatcaggtgaa

SEQ ID NO: 29199 - DNA, 25 bp, Probe sequence
ccgcaattatctgtattccattagc

SEQ ID NO: 29200 - DNA, 25 bp, Probe sequence
gccgcaattatctgtattccattag

SEQ ID NO: 29201 - DNA, 25 bp, Probe sequence
cgcaattatctgtattccattagca

SEQ ID NO: 29202 - DNA, 25 bp, Probe sequence
ataccagatggcgaagacttattac

SEQ ID NO: 29203 - DNA, 25 bp, Probe sequence
atataccagatggcgaagacttatt

SEQ ID NO: 29204 - DNA, 25 bp, Probe sequence
tataccagatggcgaagacttatta

SEQ ID NO: 29205 - DNA, 25 bp, Probe sequence
ctatataccagatggcgaagactta

SEQ ID NO: 29206 - DNA, 25 bp, Probe sequence
cgccgcaattatctgtattccatta

SEQ ID NO: 29207 - DNA, 25 bp, Probe sequence
tctatataccagatggcgaagactt

SEQ ID NO: 29208 - DNA, 25 bp, Probe sequence
actgatggagaaccttgtaatgaat

SEQ ID NO: 29209 - DNA, 25 bp, Probe sequence
tgatggagaaccttgtaatgaatgt

SEQ ID NO: 29210 - DNA, 25 bp, Probe sequence
gatggagaaccttgtaatgaatgtc

SEQ ID NO: 29211 - DNA, 25 bp, Probe sequence
ctgatggagaaccttgtaatgaatg

SEQ ID NO: 29212 - DNA, 25 bp, Probe sequence
cactgatggagaaccttgtaatgaa

SEQ ID NO: 29213 - DNA, 25 bp, Probe sequence
cgagcactgatgaacttagaattag

SEQ ID NO: 29214 - DNA, 25 bp, Probe sequence
aattgaatgtgaagatgaagccttg

SEQ ID NO: 29215 - DNA, 25 bp, Probe sequence
aattgatgctgctagtaataatggc

SEQ ID NO: 29216 - DNA, 25 bp, Probe sequence
tgctagtaataatggcgttgatgaa

SEQ ID NO: 29217 - DNA, 25 bp, Probe sequence
aaggtcgtctagcagaagagatatt

SEQ ID NO: 29218 - DNA, 25 bp, Probe sequence
tatgaagaatatacggaatggctaa

SEQ ID NO: 29219 - DNA, 25 bp, Probe sequence
atatgaagaatatacggaatggcta

SEQ ID NO: 29220 - DNA, 25 bp, Probe sequence
ctgattatattgagacacatggtga

SEQ ID NO: 29221 - DNA, 25 bp, Probe sequence
tctgattatattgagacacatggtg

SEQ ID NO: 29222 - DNA, 25 bp, Probe sequence
gtcgtctagcagaagagatatttga

SEQ ID NO: 29223 - DNA, 25 bp, Probe sequence
taaaggtcgtctagcagaagagata

SEQ ID NO: 29224 - DNA, 25 bp, Probe sequence
tctagcagaagagatatttgacgat

SEQ ID NO: 29225 - DNA, 25 bp, Probe sequence
ggtcgtctagcagaagagatatttg

SEQ ID NO: 29226 - DNA, 25 bp, Probe sequence
aaacatactcaaggcttaaacatcc

SEQ ID NO: 29227 - DNA, 25 bp, Probe sequence
tacaagacttagtgttagcagctac

SEQ ID NO: 29228 - DNA, 25 bp, Probe sequence
ctacaagacttagtgttagcagcta

SEQ ID NO: 29229 - DNA, 25 bp, Probe sequence
ggtaaacatactcaaggcttaaaca

SEQ ID NO: 29230 - DNA, 25 bp, Probe sequence
acttaaagaagagcgtattgtagga

SEQ ID NO: 29231 - DNA, 25 bp, Probe sequence
aacatactcaaggcttaaacatccc

SEQ ID NO: 29232 - DNA, 25 bp, Probe sequence
aggtaaacatactcaaggcttaaac

SEQ ID NO: 29233 - DNA, 25 bp, Probe sequence
ttaaagaagagcgtattgtaggaac

SEQ ID NO: 29234 - DNA, 25 bp, Probe sequence
aacttaaagaagagcgtattgtagg

SEQ ID NO: 29235 - DNA, 25 bp, Probe sequence
gtcggagatccattagtaagattca

SEQ ID NO: 29236 - DNA, 25 bp, Probe sequence
cgtcggagatccattagtaagattc

SEQ ID NO: 29237 - DNA, 25 bp, Probe sequence
ttgaagtgttagtgtctagtggtga

SEQ ID NO: 29238 - DNA, 25 bp, Probe sequence
cggagatccattagtaagattcaac

SEQ ID NO: 29239 - DNA, 25 bp, Probe sequence
tcggagatccattagtaagattcaa

SEQ ID NO: 29240 - DNA, 25 bp, Probe sequence
ggagatccattagtaagattcaacc

SEQ ID NO: 29241 - DNA, 25 bp, Probe sequence
ttagacacagttcaattagacggtg

SEQ ID NO: 29242 - DNA, 25 bp, Probe sequence
aagatattccagatcctgtattcgc

SEQ ID NO: 29243 - DNA, 25 bp, Probe sequence
tagacacagttcaattagacggtga

SEQ ID NO: 29244 - DNA, 25 bp, Probe sequence
ctcccaaaatagccagttcaaaata

SEQ ID NO: 29245 - DNA, 25 bp, Probe sequence
tctcccaaaatagccagttcaaaat

SEQ ID NO: 29246 - DNA, 25 bp, Probe sequence
atctcccaaaatagccagttcaaaa

SEQ ID NO: 29247 - DNA, 25 bp, Probe sequence
agcacagcacttaacctcatcactt

SEQ ID NO: 29248 - DNA, 25 bp, Probe sequence
gcgtgaaaacagcaacaagtaatat

SEQ ID NO: 29249 - DNA, 25 bp, Probe sequence
tcccaaaatagccagttcaaaatat

SEQ ID NO: 29250 - DNA, 25 bp, Probe sequence
aacagcacagcacttaacctcatca

SEQ ID NO: 29251 - DNA, 25 bp, Probe sequence
agcgtgaaaacagcaacaagtaata

SEQ ID NO: 29252 - DNA, 25 bp, Probe sequence
gcacagcacttaacctcatcacttt

SEQ ID NO: 29253 - DNA, 25 bp, Probe sequence
agagtatgctgacgaagtaacatta

SEQ ID NO: 29254 - DNA, 25 bp, Probe sequence
tagagtatgctgacgaagtaacatt

SEQ ID NO: 29255 - DNA, 25 bp, Probe sequence
ttagagtatgctgacgaagtaacat

SEQ ID NO: 29256 - DNA, 25 bp, Probe sequence
gtatgctgacgaagtaacattatct

SEQ ID NO: 29257 - DNA, 25 bp, Probe sequence
agtatgctgacgaagtaacattatc

SEQ ID NO: 29258 - DNA, 25 bp, Probe sequence
gagtatgctgacgaagtaacattat

SEQ ID NO: 29259 - DNA, 25 bp, Probe sequence
atgctgacgaagtaacattatctaa

SEQ ID NO: 29260 - DNA, 25 bp, Probe sequence
tatgctgacgaagtaacattatcta

SEQ ID NO: 29261 - DNA, 25 bp, Probe sequence
tttagagtatgctgacgaagtaaca

SEQ ID NO: 29262 - DNA, 25 bp, Probe sequence
tgggttatggcgatttaatatcaca

SEQ ID NO: 29263 - DNA, 25 bp, Probe sequence
gaagaattgggttatggcgatttaa

SEQ ID NO: 29264 - DNA, 25 bp, Probe sequence
ttgggttatggcgatttaatatcac

SEQ ID NO: 29265 - DNA, 25 bp, Probe sequence
aagtgcgttcagaagaatcaaatag

SEQ ID NO: 29266 - DNA, 25 bp, Probe sequence
gaagtgcgttcagaagaatcaaata

SEQ ID NO: 29267 - DNA, 25 bp, Probe sequence
agaagaattgggttatggcgattta

SEQ ID NO: 29268 - DNA, 25 bp, Probe sequence
gcgttcagaagaatcaaatagtcat

SEQ ID NO: 29269 - DNA, 25 bp, Probe sequence
cgcttgatgacgatgaaattataga

SEQ ID NO: 29270 - DNA, 25 bp, Probe sequence
gtgcgttcagaagaatcaaatagtc

SEQ ID NO: 29271 - DNA, 25 bp, Probe sequence
agcgttaatgttgaagtgaactctt

SEQ ID NO: 29272 - DNA, 25 bp, Probe sequence
aagcgttaatgttgaagtgaactct

SEQ ID NO: 29273 - DNA, 25 bp, Probe sequence
caagcgttaatgttgaagtgaactc

SEQ ID NO: 29274 - DNA, 25 bp, Probe sequence
gaccaagcgttaatgttgaagtgaa

SEQ ID NO: 29275 - DNA, 25 bp, Probe sequence
ccaagcgttaatgttgaagtgaact

SEQ ID NO: 29276 - DNA, 25 bp, Probe sequence
accaagcgttaatgttgaagtgaac

SEQ ID NO: 29277 - DNA, 25 bp, Probe sequence
cagaccaagcgttaatgttgaagtg

SEQ ID NO: 29278 - DNA, 25 bp, Probe sequence
agaccaagcgttaatgttgaagtga

SEQ ID NO: 29279 - DNA, 25 bp, Probe sequence
gcgttaatgttgaagtgaactcttc

SEQ ID NO: 29280 - DNA, 25 bp, Probe sequence
ttagaattagcggacgactatcaag

SEQ ID NO: 29281 - DNA, 25 bp, Probe sequence
tgacttatcctaactattacggtga

SEQ ID NO: 29282 - DNA, 25 bp, Probe sequence
atattcctgtactcattgacgaagc

SEQ ID NO: 29283 - DNA, 25 bp, Probe sequence
ttgacttatcctaactattacggtg

SEQ ID NO: 29284 - DNA, 25 bp, Probe sequence
gacttatcctaactattacggtgaa

SEQ ID NO: 29285 - DNA, 25 bp, Probe sequence
gttgacttatcctaactattacggt

SEQ ID NO: 29286 - DNA, 25 bp, Probe sequence
tgttgacttatcctaactattacgg

SEQ ID NO: 29287 - DNA, 25 bp, Probe sequence
tattcctgtactcattgacgaagca

SEQ ID NO: 29288 - DNA, 25 bp, Probe sequence
aatattcctgtactcattgacgaag

SEQ ID NO: 29289 - DNA, 25 bp, Probe sequence
ttacatcatatccaggcatcaagtc

SEQ ID NO: 29290 - DNA, 25 bp, Probe sequence
tacatcatatccaggcatcaagtca

SEQ ID NO: 29291 - DNA, 25 bp, Probe sequence
gctgaagactaccatcaagattatt

SEQ ID NO: 29292 - DNA, 25 bp, Probe sequence
aagtcagtcgtatctggttatagtg

SEQ ID NO: 29293 - DNA, 25 bp, Probe sequence
caagtcagtcgtatctggttatagt

SEQ ID NO: 29294 - DNA, 25 bp, Probe sequence
catcaagtcagtcgtatctggttat

SEQ ID NO: 29295 - DNA, 25 bp, Probe sequence
tcaagtcagtcgtatctggttatag

SEQ ID NO: 29296 - DNA, 25 bp, Probe sequence
atcatatccaggcatcaagtcagtc

SEQ ID NO: 29297 - DNA, 25 bp, Probe sequence
atcaagtcagtcgtatctggttata

SEQ ID NO: 29298 - DNA, 25 bp, Probe sequence
cagcaatcgccctttatcatattta

SEQ ID NO: 29299 - DNA, 25 bp, Probe sequence
cctgcccacacacttagtaataata

SEQ ID NO: 29300 - DNA, 25 bp, Probe sequence
aatcgccctttatcatatttatcgg

SEQ ID NO: 29301 - DNA, 25 bp, Probe sequence
tcagcaatcgccctttatcatattt

SEQ ID NO: 29302 - DNA, 25 bp, Probe sequence
agcaatcgccctttatcatatttat

SEQ ID NO: 29303 - DNA, 25 bp, Probe sequence
ctcagcaatcgccctttatcatatt

SEQ ID NO: 29304 - DNA, 25 bp, Probe sequence
taattctcagcaatcgccctttatc

SEQ ID NO: 29305 - DNA, 25 bp, Probe sequence
gcaatcgccctttatcatatttatc

SEQ ID NO: 29306 - DNA, 25 bp, Probe sequence
caatcgccctttatcatatttatcg

SEQ ID NO: 29307 - DNA, 25 bp, Probe sequence
gtattagaaggcaatgatatggaca

SEQ ID NO: 29308 - DNA, 25 bp, Probe sequence
tgtattagaaggcaatgatatggac

SEQ ID NO: 29309 - DNA, 25 bp, Probe sequence
atgatatggacattagaactgaagc

SEQ ID NO: 29310 - DNA, 25 bp, Probe sequence
ggcgttgaagaagtaagagcattaa

SEQ ID NO: 29311 - DNA, 25 bp, Probe sequence
agaaggtaaggttgtgttgtgtgat

SEQ ID NO: 29312 - DNA, 25 bp, Probe sequence
tggcgttgaagaagtaagagcatta

SEQ ID NO: 29313 - DNA, 25 bp, Probe sequence
aagaaggtaaggttgtgttgtgtga

SEQ ID NO: 29314 - DNA, 25 bp, Probe sequence
gaaggtaaggttgtgttgtgtgatc

SEQ ID NO: 29315 - DNA, 25 bp, Probe sequence
ttgtattagaaggcaatgatatgga

SEQ ID NO: 29316 - DNA, 25 bp, Probe sequence
atagtaacagactcaacatccgatt

SEQ ID NO: 29317 - DNA, 25 bp, Probe sequence
ttatagtaacagactcaacatccga

SEQ ID NO: 29318 - DNA, 25 bp, Probe sequence
tatagtaacagactcaacatccgat

SEQ ID NO: 29319 - DNA, 25 bp, Probe sequence
aatggtagatgctaatgtaactgtt

SEQ ID NO: 29320 - DNA, 25 bp, Probe sequence
attatagtaacagactcaacatccg

SEQ ID NO: 29321 - DNA, 25 bp, Probe sequence
tggtagatgctaatgtaactgttat

SEQ ID NO: 29322 - DNA, 25 bp, Probe sequence
atggtagatgctaatgtaactgtta

SEQ ID NO: 29323 - DNA, 25 bp, Probe sequence
caagtcaaatggtagatgctaatgt

SEQ ID NO: 29324 - DNA, 25 bp, Probe sequence
gccagccataggtgaatttatatct

SEQ ID NO: 29325 - DNA, 25 bp, Probe sequence
ccatatccagttgaagttgaagttg

SEQ ID NO: 29326 - DNA, 25 bp, Probe sequence
tccatatccagttgaagttgaagtt

SEQ ID NO: 29327 - DNA, 25 bp, Probe sequence
ttccatatccagttgaagttgaagt

SEQ ID NO: 29328 - DNA, 25 bp, Probe sequence
acattccatatccagttgaagttga

SEQ ID NO: 29329 - DNA, 25 bp, Probe sequence
cattccatatccagttgaagttgaa

SEQ ID NO: 29330 - DNA, 25 bp, Probe sequence
attccatatccagttgaagttgaag

SEQ ID NO: 29331 - DNA, 25 bp, Probe sequence
tacattccatatccagttgaagttg

SEQ ID NO: 29332 - DNA, 25 bp, Probe sequence
attcgtacattccatatccagttga

SEQ ID NO: 29333 - DNA, 25 bp, Probe sequence
cgtacaagatcaagatagtcaggaa

SEQ ID NO: 29334 - DNA, 25 bp, Probe sequence
gaaatgattgataaagtggacgaca

SEQ ID NO: 29335 - DNA, 25 bp, Probe sequence
agaaatgattgataaagtggacgac

SEQ ID NO: 29336 - DNA, 25 bp, Probe sequence
cgttctttccaccttatacatttga

SEQ ID NO: 29337 - DNA, 25 bp, Probe sequence
caccttatacatttgaagactggga

SEQ ID NO: 29338 - DNA, 25 bp, Probe sequence
accttatacatttgaagactgggaa

SEQ ID NO: 29339 - DNA, 25 bp, Probe sequence
aagaaatgattgataaagtggacga

SEQ ID NO: 29340 - DNA, 25 bp, Probe sequence
tatccattctagttgcacatgactt

SEQ ID NO: 29341 - DNA, 25 bp, Probe sequence
ttatccattctagttgcacatgact

SEQ ID NO: 29342 - DNA, 25 bp, Probe sequence
ccttatacatttgaagactgggaag

SEQ ID NO: 29343 - DNA, 25 bp, Probe sequence
gttggtgtgaattgttgcttactaa

SEQ ID NO: 29344 - DNA, 25 bp, Probe sequence
cgttggtgtgaattgttgcttacta

SEQ ID NO: 29345 - DNA, 25 bp, Probe sequence
atcaactgacggaagcacataagaa

SEQ ID NO: 29346 - DNA, 25 bp, Probe sequence
agttatacgttggtgtgaattgttg

SEQ ID NO: 29347 - DNA, 25 bp, Probe sequence
cagttatacgttggtgtgaattgtt

SEQ ID NO: 29348 - DNA, 25 bp, Probe sequence
cggaagcacataagaaattgaatca

SEQ ID NO: 29349 - DNA, 25 bp, Probe sequence
acggaagcacataagaaattgaatc

SEQ ID NO: 29350 - DNA, 25 bp, Probe sequence
gacggaagcacataagaaattgaat

SEQ ID NO: 29351 - DNA, 25 bp, Probe sequence
aaacgatgaaacaagttgcgattaa

SEQ ID NO: 29352 - DNA, 25 bp, Probe sequence
gtaagttaagttgccagttatacca

SEQ ID NO: 29353 - DNA, 25 bp, Probe sequence
gactatgaatcacatccagcaataa

SEQ ID NO: 29354 - DNA, 25 bp, Probe sequence
tgactatgaatcacatccagcaata

SEQ ID NO: 29355 - DNA, 25 bp, Probe sequence
ttgactatgaatcacatccagcaat

SEQ ID NO: 29356 - DNA, 25 bp, Probe sequence
gttgactatgaatcacatccagcaa

SEQ ID NO: 29357 - DNA, 25 bp, Probe sequence
attgttgactatgaatcacatccag

SEQ ID NO: 29358 - DNA, 25 bp, Probe sequence
ttgttgactatgaatcacatccagc

SEQ ID NO: 29359 - DNA, 25 bp, Probe sequence
aattgttgactatgaatcacatcca

SEQ ID NO: 29360 - DNA, 25 bp, Probe sequence
taagttaagttgccagttataccaa

SEQ ID NO: 29361 - DNA, 25 bp, Probe sequence
tattgctgaagaggatgttgtgtta

SEQ ID NO: 29362 - DNA, 25 bp, Probe sequence
aatggatattgctgaagaggatgtt

SEQ ID NO: 29363 - DNA, 25 bp, Probe sequence
taatggatattgctgaagaggatgt

SEQ ID NO: 29364 - DNA, 25 bp, Probe sequence
atattgctgaagaggatgttgtgtt

SEQ ID NO: 29365 - DNA, 25 bp, Probe sequence
atggatattgctgaagaggatgttg

SEQ ID NO: 29366 - DNA, 25 bp, Probe sequence
gatattgctgaagaggatgttgtgt

SEQ ID NO: 29367 - DNA, 25 bp, Probe sequence
aagaggcatagagataggtattgtt

SEQ ID NO: 29368 - DNA, 25 bp, Probe sequence
ttaatggatattgctgaagaggatg

SEQ ID NO: 29369 - DNA, 25 bp, Probe sequence
attgctgaagaggatgttgtgttac

SEQ ID NO: 29370 - DNA, 25 bp, Probe sequence
tggctatattgtatggagaaggatt

SEQ ID NO: 29371 - DNA, 25 bp, Probe sequence
ttggctatattgtatggagaaggat

SEQ ID NO: 29372 - DNA, 25 bp, Probe sequence
accaactactattgatactgcgaat

SEQ ID NO: 29373 - DNA, 25 bp, Probe sequence
aaccaactactattgatactgcgaa

SEQ ID NO: 29374 - DNA, 25 bp, Probe sequence
gaaccaactactattgatactgcga

SEQ ID NO: 29375 - DNA, 25 bp, Probe sequence
tgaaccaactactattgatactgcg

SEQ ID NO: 29376 - DNA, 25 bp, Probe sequence
ccaactactattgatactgcgaatt

SEQ ID NO: 29377 - DNA, 25 bp, Probe sequence
atgaaccaactactattgatactgc

SEQ ID NO: 29378 - DNA, 25 bp, Probe sequence
catggtgaagattgtctgttctgtt

SEQ ID NO: 29379 - DNA, 25 bp, Probe sequence
tatgaaccaagtaaatgctgatgac

SEQ ID NO: 29380 - DNA, 25 bp, Probe sequence
atgaaccaagtaaatgctgatgaca

SEQ ID NO: 29381 - DNA, 25 bp, Probe sequence
tctagtccttcgtatgctttattca

SEQ ID NO: 29382 - DNA, 25 bp, Probe sequence
ccatctagtccttcgtatgctttat

SEQ ID NO: 29383 - DNA, 25 bp, Probe sequence
gttattaactctacatgcggctgtg

SEQ ID NO: 29384 - DNA, 25 bp, Probe sequence
aaccaagtaaatgctgatgacacta

SEQ ID NO: 29385 - DNA, 25 bp, Probe sequence
atatgaaccaagtaaatgctgatga

SEQ ID NO: 29386 - DNA, 25 bp, Probe sequence
tagtccttcgtatgctttattcaaa

SEQ ID NO: 29387 - DNA, 25 bp, Probe sequence
ctagtccttcgtatgctttattcaa

SEQ ID NO: 29388 - DNA, 25 bp, Probe sequence
agaagcacataagatagcgagacat

SEQ ID NO: 29389 - DNA, 25 bp, Probe sequence
aagaagcacataagatagcgagaca

SEQ ID NO: 29390 - DNA, 25 bp, Probe sequence
acgacatatagaaggtgttgagatt

SEQ ID NO: 29391 - DNA, 25 bp, Probe sequence
cacataagatagcgagacatgagat

SEQ ID NO: 29392 - DNA, 25 bp, Probe sequence
cgacatatagaaggtgttgagattc

SEQ ID NO: 29393 - DNA, 25 bp, Probe sequence
acataagatagcgagacatgagatt

SEQ ID NO: 29394 - DNA, 25 bp, Probe sequence
cacgacatatagaaggtgttgagat

SEQ ID NO: 29395 - DNA, 25 bp, Probe sequence
gaagcacataagatagcgagacatg

SEQ ID NO: 29396 - DNA, 25 bp, Probe sequence
atccacgacatatagaaggtgttga

SEQ ID NO: 29397 - DNA, 25 bp, Probe sequence
ctacctatccagaatcacagttacc

SEQ ID NO: 29398 - DNA, 25 bp, Probe sequence
gctacctatccagaatcacagttac

SEQ ID NO: 29399 - DNA, 25 bp, Probe sequence
gctgaccaagaattaagagaacaat

SEQ ID NO: 29400 - DNA, 25 bp, Probe sequence
tgctgaccaagaattaagagaacaa

SEQ ID NO: 29401 - DNA, 25 bp, Probe sequence
ctgctgaccaagaattaagagaaca

SEQ ID NO: 29402 - DNA, 25 bp, Probe sequence
tctgctgaccaagaattaagagaac

SEQ ID NO: 29403 - DNA, 25 bp, Probe sequence
tgctactattagatgatccacagaa

SEQ ID NO: 29404 - DNA, 25 bp, Probe sequence
agctacctatccagaatcacagtta

SEQ ID NO: 29405 - DNA, 25 bp, Probe sequence
gtaatggatggtgtcctagaagaag

SEQ ID NO: 29406 - DNA, 25 bp, Probe sequence
aatagtaggaagattgccagaagaa

SEQ ID NO: 29407 - DNA, 25 bp, Probe sequence
atagtaggaagattgccagaagaat

SEQ ID NO: 29408 - DNA, 25 bp, Probe sequence
agtaggaagattgccagaagaatat

SEQ ID NO: 29409 - DNA, 25 bp, Probe sequence
tagtaggaagattgccagaagaata

SEQ ID NO: 29410 - DNA, 25 bp, Probe sequence
ggaatagagttggcagacttataca

SEQ ID NO: 29411 - DNA, 25 bp, Probe sequence
tggaatagagttggcagacttatac

SEQ ID NO: 29412 - DNA, 25 bp, Probe sequence
aatggaatagagttggcagacttat

SEQ ID NO: 29413 - DNA, 25 bp, Probe sequence
tgattgattatgacttcggaattga

SEQ ID NO: 29414 - DNA, 25 bp, Probe sequence
atggaatagagttggcagacttata

SEQ ID NO: 29415 - DNA, 25 bp, Probe sequence
ggctatcgtaagtacagtattaggt

SEQ ID NO: 29416 - DNA, 25 bp, Probe sequence
tggctatcgtaagtacagtattagg

SEQ ID NO: 29417 - DNA, 25 bp, Probe sequence
aagtacagtattaggtagcatcgtt

SEQ ID NO: 29418 - DNA, 25 bp, Probe sequence
taagtacagtattaggtagcatcgt

SEQ ID NO: 29419 - DNA, 25 bp, Probe sequence
tcgtaagtacagtattaggtagcat

SEQ ID NO: 29420 - DNA, 25 bp, Probe sequence
atcgtaagtacagtattaggtagca

SEQ ID NO: 29421 - DNA, 25 bp, Probe sequence
accttcatgttaatcattgtgctta

SEQ ID NO: 29422 - DNA, 25 bp, Probe sequence
taccttcatgttaatcattgtgctt

SEQ ID NO: 29423 - DNA, 25 bp, Probe sequence
ttaccttcatgttaatcattgtgct

SEQ ID NO: 29424 - DNA, 25 bp, Probe sequence
tgaagcattgaagcgtgaatatgaa

SEQ ID NO: 29425 - DNA, 25 bp, Probe sequence
gtctgaagcattgaagcgtgaatat

SEQ ID NO: 29426 - DNA, 25 bp, Probe sequence
ctgaagcattgaagcgtgaatatga

SEQ ID NO: 29427 - DNA, 25 bp, Probe sequence
tctgaagcattgaagcgtgaatatg

SEQ ID NO: 29428 - DNA, 25 bp, Probe sequence
agtctgaagcattgaagcgtgaata

SEQ ID NO: 29429 - DNA, 25 bp, Probe sequence
gagccaaatatacgaaagtaagacg

SEQ ID NO: 29430 - DNA, 25 bp, Probe sequence
tcaaggagccaaatatacgaaagta

SEQ ID NO: 29431 - DNA, 25 bp, Probe sequence
ggagccaaatatacgaaagtaagac

SEQ ID NO: 29432 - DNA, 25 bp, Probe sequence
aggagccaaatatacgaaagtaaga

SEQ ID NO: 29433 - DNA, 25 bp, Probe sequence
gaaccacaacacaatgaagattaca

SEQ ID NO: 29434 - DNA, 25 bp, Probe sequence
aaccacaacacaatgaagattacac

SEQ ID NO: 29435 - DNA, 25 bp, Probe sequence
accacaacacaatgaagattacact

SEQ ID NO: 29436 - DNA, 25 bp, Probe sequence
agcagagaaggtatgacatcagata

SEQ ID NO: 29437 - DNA, 25 bp, Probe sequence
cgaaccacaacacaatgaagattac

SEQ ID NO: 29438 - DNA, 25 bp, Probe sequence
ccacaacacaatgaagattacactt

SEQ ID NO: 29439 - DNA, 25 bp, Probe sequence
aagcagagaaggtatgacatcagat

SEQ ID NO: 29440 - DNA, 25 bp, Probe sequence
ccgaaccacaacacaatgaagatta

SEQ ID NO: 29441 - DNA, 25 bp, Probe sequence
cagagaaggtatgacatcagatacg

SEQ ID NO: 29442 - DNA, 25 bp, Probe sequence
tgttgatatgattgcttgtgaagac

SEQ ID NO: 29443 - DNA, 25 bp, Probe sequence
gtgttgatatgattgcttgtgaaga

SEQ ID NO: 29444 - DNA, 25 bp, Probe sequence
cgtgttgatatgattgcttgtgaag

SEQ ID NO: 29445 - DNA, 25 bp, Probe sequence
gaacagttagaattaggtcttgacg

SEQ ID NO: 29446 - DNA, 25 bp, Probe sequence
gatggctagtggattaccttcatat

SEQ ID NO: 29447 - DNA, 25 bp, Probe sequence
aattacaagcattgattcagcaagg

SEQ ID NO: 29448 - DNA, 25 bp, Probe sequence
gttgatatgattgcttgtgaagaca

SEQ ID NO: 29449 - DNA, 25 bp, Probe sequence
gatcctggatacgaattagtagtgg

SEQ ID NO: 29450 - DNA, 25 bp, Probe sequence
tgatcctggatacgaattagtagtg

SEQ ID NO: 29451 - DNA, 25 bp, Probe sequence
tcaatgagtgttcaatagggaaaga

SEQ ID NO: 29452 - DNA, 25 bp, Probe sequence
tgtatcaatgagtgttcaataggga

SEQ ID NO: 29453 - DNA, 25 bp, Probe sequence
caatgagtgttcaatagggaaagaa

SEQ ID NO: 29454 - DNA, 25 bp, Probe sequence
atcaatgagtgttcaatagggaaag

SEQ ID NO: 29455 - DNA, 25 bp, Probe sequence
ttgtatcaatgagtgttcaataggg

SEQ ID NO: 29456 - DNA, 25 bp, Probe sequence
aatgagtgttcaatagggaaagaaa

SEQ ID NO: 29457 - DNA, 25 bp, Probe sequence
gtatcaatgagtgttcaatagggaa

SEQ ID NO: 29458 - DNA, 25 bp, Probe sequence
atgagtgttcaatagggaaagaaat

SEQ ID NO: 29459 - DNA, 25 bp, Probe sequence
tgagtgttcaatagggaaagaaata

SEQ ID NO: 29460 - DNA, 25 bp, Probe sequence
attgatggcattagacttaccgtta

SEQ ID NO: 29461 - DNA, 25 bp, Probe sequence
tattgatggcattagacttaccgtt

SEQ ID NO: 29462 - DNA, 25 bp, Probe sequence
ttattgatggcattagacttaccgt

SEQ ID NO: 29463 - DNA, 25 bp, Probe sequence
tggatgagatgattgctggaattaa

SEQ ID NO: 29464 - DNA, 25 bp, Probe sequence
ttggatgagatgattgctggaatta

SEQ ID NO: 29465 - DNA, 25 bp, Probe sequence
ttgatggcattagacttaccgttac

SEQ ID NO: 29466 - DNA, 25 bp, Probe sequence
atggcattagacttaccgttaccta

SEQ ID NO: 29467 - DNA, 25 bp, Probe sequence
atatgaaggttggtattctgttccg

SEQ ID NO: 29468 - DNA, 25 bp, Probe sequence
aatatgaaggttggtattctgttcc

SEQ ID NO: 29469 - DNA, 25 bp, Probe sequence
aatgatgagcaatacgatgatgatt

SEQ ID NO: 29470 - DNA, 25 bp, Probe sequence
ttatatggcattatcggttggcatc

SEQ ID NO: 29471 - DNA, 25 bp, Probe sequence
taccaattatcattcataaccgtga

SEQ ID NO: 29472 - DNA, 25 bp, Probe sequence
ctagagaagcaggtgttgatcgtat

SEQ ID NO: 29473 - DNA, 25 bp, Probe sequence
tagagaagcaggtgttgatcgtatg

SEQ ID NO: 29474 - DNA, 25 bp, Probe sequence
ttggtattggtgaaatgggattaga

SEQ ID NO: 29475 - DNA, 25 bp, Probe sequence
aaagtgattggtattggtgaaatgg

SEQ ID NO: 29476 - DNA, 25 bp, Probe sequence
tacgatgatgatttgagtgaagtga

SEQ ID NO: 29477 - DNA, 25 bp, Probe sequence
ttaccaattatcattcataaccgtg

SEQ ID NO: 29478 - DNA, 25 bp, Probe sequence
tttcgccataataaacctactttct

SEQ ID NO: 29479 - DNA, 25 bp, Probe sequence
ttcgccataataaacctactttcta

SEQ ID NO: 29480 - DNA, 25 bp, Probe sequence
tcgccataataaacctactttctat

SEQ ID NO: 29481 - DNA, 25 bp, Probe sequence
cgccataataaacctactttctatt

SEQ ID NO: 29482 - DNA, 25 bp, Probe sequence
ttttcgccataataaacctactttc

SEQ ID NO: 29483 - DNA, 25 bp, Probe sequence
attttcgccataataaacctacttt

SEQ ID NO: 29484 - DNA, 25 bp, Probe sequence
ttcgtcgcagcatcaaaatttattt

SEQ ID NO: 29485 - DNA, 25 bp, Probe sequence
tttcgtcgcagcatcaaaatttatt

SEQ ID NO: 29486 - DNA, 25 bp, Probe sequence
ctttcgtcgcagcatcaaaatttat

SEQ ID NO: 29487 - DNA, 25 bp, Probe sequence
ttgtagaaggacgagatgatactga

SEQ ID NO: 29488 - DNA, 25 bp, Probe sequence
gttgtagaaggacgagatgatactg

SEQ ID NO: 29489 - DNA, 25 bp, Probe sequence
tagttgtagaaggacgagatgatac

SEQ ID NO: 29490 - DNA, 25 bp, Probe sequence
tgtagaaggacgagatgatactgag

SEQ ID NO: 29491 - DNA, 25 bp, Probe sequence
ttatagttgtagaaggacgagatga

SEQ ID NO: 29492 - DNA, 25 bp, Probe sequence
agttgtagaaggacgagatgatact

SEQ ID NO: 29493 - DNA, 25 bp, Probe sequence
atagttgtagaaggacgagatgata

SEQ ID NO: 29494 - DNA, 25 bp, Probe sequence
tatagttgtagaaggacgagatgat

SEQ ID NO: 29495 - DNA, 25 bp, Probe sequence
gttgaacatgccgacttaattgata

SEQ ID NO: 29496 - DNA, 25 bp, Probe sequence
tatgctacaccatcaacagatacag

SEQ ID NO: 29497 - DNA, 25 bp, Probe sequence
atatgctacaccatcaacagataca

SEQ ID NO: 29498 - DNA, 25 bp, Probe sequence
ctacaccatcaacagatacagcaat

SEQ ID NO: 29499 - DNA, 25 bp, Probe sequence
tacaccatcaacagatacagcaatt

SEQ ID NO: 29500 - DNA, 25 bp, Probe sequence
aactcacgaacattggtattatctt

SEQ ID NO: 29501 - DNA, 25 bp, Probe sequence
tatatgctacaccatcaacagatac

SEQ ID NO: 29502 - DNA, 25 bp, Probe sequence
actcacgaacattggtattatctta

SEQ ID NO: 29503 - DNA, 25 bp, Probe sequence
ggtactaattatgattcgtgttggt

SEQ ID NO: 29504 - DNA, 25 bp, Probe sequence
tggtactaattatgattcgtgttgg

SEQ ID NO: 29505 - DNA, 25 bp, Probe sequence
tgcctaataacgataatataggtgt

SEQ ID NO: 29506 - DNA, 25 bp, Probe sequence
aaaacattcaaaattggcgttagtg

SEQ ID NO: 29507 - DNA, 25 bp, Probe sequence
aacattcaaaattggcgttagtgat

SEQ ID NO: 29508 - DNA, 25 bp, Probe sequence
aaacattcaaaattggcgttagtga

SEQ ID NO: 29509 - DNA, 25 bp, Probe sequence
gtgataaaacattcaaaattggcgt

SEQ ID NO: 29510 - DNA, 25 bp, Probe sequence
acattcaaaattggcgttagtgata

SEQ ID NO: 29511 - DNA, 25 bp, Probe sequence
tgataaaacattcaaaattggcgtt

SEQ ID NO: 29512 - DNA, 25 bp, Probe sequence
tgtgataaaacattcaaaattggcg

SEQ ID NO: 29513 - DNA, 25 bp, Probe sequence
taaaacattcaaaattggcgttagt

SEQ ID NO: 29514 - DNA, 25 bp, Probe sequence
gtaacagtagataacgaggaagcat

SEQ ID NO: 29515 - DNA, 25 bp, Probe sequence
taacagtagataacgaggaagcatt

SEQ ID NO: 29516 - DNA, 25 bp, Probe sequence
tagtaacagtagataacgaggaagc

SEQ ID NO: 29517 - DNA, 25 bp, Probe sequence
agtaacagtagataacgaggaagca

SEQ ID NO: 29518 - DNA, 25 bp, Probe sequence
cagtagataacgaggaagcattctt

SEQ ID NO: 29519 - DNA, 25 bp, Probe sequence
aacagtagataacgaggaagcattc

SEQ ID NO: 29520 - DNA, 25 bp, Probe sequence
ttatgccaccacctaatgttgattc

SEQ ID NO: 29521 - DNA, 25 bp, Probe sequence
acagtagataacgaggaagcattct

SEQ ID NO: 29522 - DNA, 25 bp, Probe sequence
ccttatgataatgtgacggtgatta

SEQ ID NO: 29523 - DNA, 25 bp, Probe sequence
ggacagttattggttcaggagtatt

SEQ ID NO: 29524 - DNA, 25 bp, Probe sequence
tatcggttgtattatggctgtgtat

SEQ ID NO: 29525 - DNA, 25 bp, Probe sequence
atcggttgtattatggctgtgtatt

SEQ ID NO: 29526 - DNA, 25 bp, Probe sequence
tcagttggtatcggttgtattatgg

SEQ ID NO: 29527 - DNA, 25 bp, Probe sequence
gtatcggttgtattatggctgtgta

SEQ ID NO: 29528 - DNA, 25 bp, Probe sequence
acagttattggttcaggagtattct

SEQ ID NO: 29529 - DNA, 25 bp, Probe sequence
catctgcgttatctattgtgttgat

SEQ ID NO: 29530 - DNA, 25 bp, Probe sequence
ttaataccaatagcaatcgcatctg

SEQ ID NO: 29531 - DNA, 25 bp, Probe sequence
gacagttattggttcaggagtattc

SEQ ID NO: 29532 - DNA, 25 bp, Probe sequence
gaagaggataatcatcacgaatcaa

SEQ ID NO: 29533 - DNA, 25 bp, Probe sequence
tgaagaggataatcatcacgaatca

SEQ ID NO: 29534 - DNA, 25 bp, Probe sequence
ttgaagaggataatcatcacgaatc

SEQ ID NO: 29535 - DNA, 25 bp, Probe sequence
aagaggataatcatcacgaatcaat

SEQ ID NO: 29536 - DNA, 25 bp, Probe sequence
agaggataatcatcacgaatcaatt

SEQ ID NO: 29537 - DNA, 25 bp, Probe sequence
catttgaagaggataatcatcacga

SEQ ID NO: 29538 - DNA, 25 bp, Probe sequence
tcatttgaagaggataatcatcacg

SEQ ID NO: 29539 - DNA, 25 bp, Probe sequence
taggaaatcgtattgtactgaaagc

SEQ ID NO: 29540 - DNA, 25 bp, Probe sequence
gaaatcgtattgtactgaaagccaa

SEQ ID NO: 29541 - DNA, 25 bp, Probe sequence
ttaacggttgttgtaatgaagtgta

SEQ ID NO: 29542 - DNA, 25 bp, Probe sequence
cggttgttgtaatgaagtgtactta

SEQ ID NO: 29543 - DNA, 25 bp, Probe sequence
taacggttgttgtaatgaagtgtac

SEQ ID NO: 29544 - DNA, 25 bp, Probe sequence
acggttgttgtaatgaagtgtactt

SEQ ID NO: 29545 - DNA, 25 bp, Probe sequence
aacttaggcatatcatcaccagata

SEQ ID NO: 29546 - DNA, 25 bp, Probe sequence
aacggttgttgtaatgaagtgtact

SEQ ID NO: 29547 - DNA, 25 bp, Probe sequence
ggttgttgtaatgaagtgtacttag

SEQ ID NO: 29548 - DNA, 25 bp, Probe sequence
aaaccaaacttaggcatatcatcac

SEQ ID NO: 29549 - DNA, 25 bp, Probe sequence
gcaatatcaactaaagcaaggtgta

SEQ ID NO: 29550 - DNA, 25 bp, Probe sequence
aattggttactcgtgagatggttaa

SEQ ID NO: 29551 - DNA, 25 bp, Probe sequence
gtgtatgaagaagaaggtgtgattc

SEQ ID NO: 29552 - DNA, 25 bp, Probe sequence
gaagaaggtgtgattcattatggtg

SEQ ID NO: 29553 - DNA, 25 bp, Probe sequence
agaagaaggtgtgattcattatggt

SEQ ID NO: 29554 - DNA, 25 bp, Probe sequence
agaaggtgtgattcattatggtgta

SEQ ID NO: 29555 - DNA, 25 bp, Probe sequence
aagaaggtgtgattcattatggtgt

SEQ ID NO: 29556 - DNA, 25 bp, Probe sequence
aagaagaaggtgtgattcattatgg

SEQ ID NO: 29557 - DNA, 25 bp, Probe sequence
gaaggtgtgattcattatggtgtac

SEQ ID NO: 29558 - DNA, 25 bp, Probe sequence
caagaacttcaacaatggcattagc

SEQ ID NO: 29559 - DNA, 25 bp, Probe sequence
aattagatgctgttgttaccattgc

SEQ ID NO: 29560 - DNA, 25 bp, Probe sequence
gaagaggcgactgaagttgttaatg

SEQ ID NO: 29561 - DNA, 25 bp, Probe sequence
agaagaggcgactgaagttgttaat

SEQ ID NO: 29562 - DNA, 25 bp, Probe sequence
attagatgctgttgttaccattgcg

SEQ ID NO: 29563 - DNA, 25 bp, Probe sequence
aagaggcgactgaagttgttaatga

SEQ ID NO: 29564 - DNA, 25 bp, Probe sequence
aagaagaggcgactgaagttgttaa

SEQ ID NO: 29565 - DNA, 25 bp, Probe sequence
cgactgaagttgttaatgaggtcat

SEQ ID NO: 29566 - DNA, 25 bp, Probe sequence
gacaacaaggtgactgaaggttcta

SEQ ID NO: 29567 - DNA, 25 bp, Probe sequence
aggtaatccatcgctactaaacaaa

SEQ ID NO: 29568 - DNA, 25 bp, Probe sequence
tatgaagcggatgatgttataggta

SEQ ID NO: 29569 - DNA, 25 bp, Probe sequence
atgaagcggatgatgttataggtac

SEQ ID NO: 29570 - DNA, 25 bp, Probe sequence
ctatgaagcggatgatgttataggt

SEQ ID NO: 29571 - DNA, 25 bp, Probe sequence
actatgaagcggatgatgttatagg

SEQ ID NO: 29572 - DNA, 25 bp, Probe sequence
gcacaacaatattcaactgataacg

SEQ ID NO: 29573 - DNA, 25 bp, Probe sequence
aactatgaagcggatgatgttatag

SEQ ID NO: 29574 - DNA, 25 bp, Probe sequence
accaccagaagaattgataccacaa

SEQ ID NO: 29575 - DNA, 25 bp, Probe sequence
aggtacattagcacaacaatattca

SEQ ID NO: 29576 - DNA, 25 bp, Probe sequence
acattagcacaacaatattcaactg

SEQ ID NO: 29577 - DNA, 25 bp, Probe sequence
aatcattaacacaacaagattaccg

SEQ ID NO: 29578 - DNA, 25 bp, Probe sequence
aacagttgtgaatggtatggtttat

SEQ ID NO: 29579 - DNA, 25 bp, Probe sequence
acagttgtgaatggtatggtttata

SEQ ID NO: 29580 - DNA, 25 bp, Probe sequence
cattaacacaacaagattaccggaa

SEQ ID NO: 29581 - DNA, 25 bp, Probe sequence
attaacacaacaagattaccggaag

SEQ ID NO: 29582 - DNA, 25 bp, Probe sequence
tcattaacacaacaagattaccgga

SEQ ID NO: 29583 - DNA, 25 bp, Probe sequence
atcattaacacaacaagattaccgg

SEQ ID NO: 29584 - DNA, 25 bp, Probe sequence
caacagttgtgaatggtatggttta

SEQ ID NO: 29585 - DNA, 25 bp, Probe sequence
atggtatggtttatacttctggtca

SEQ ID NO: 29586 - DNA, 25 bp, Probe sequence
gcatcacatcagtcaataacagaac

SEQ ID NO: 29587 - DNA, 25 bp, Probe sequence
catcacatcagtcaataacagaaca

SEQ ID NO: 29588 - DNA, 25 bp, Probe sequence
aagagacaacatatcaagtggctac

SEQ ID NO: 29589 - DNA, 25 bp, Probe sequence
caagagacaacatatcaagtggcta

SEQ ID NO: 29590 - DNA, 25 bp, Probe sequence
agaggattatacatcaagaacggtt

SEQ ID NO: 29591 - DNA, 25 bp, Probe sequence
agtcaacaacatcaagcaattagtg

SEQ ID NO: 29592 - DNA, 25 bp, Probe sequence
atgatgttggaatacctgttgtgtt

SEQ ID NO: 29593 - DNA, 25 bp, Probe sequence
aatgatgttggaatacctgttgtgt

SEQ ID NO: 29594 - DNA, 25 bp, Probe sequence
ttcaacaacagcgattattaacagc

SEQ ID NO: 29595 - DNA, 25 bp, Probe sequence
gtagaagtggtaacagaagtgctaa

SEQ ID NO: 29596 - DNA, 25 bp, Probe sequence
tagaagtggtaacagaagtgctaat

SEQ ID NO: 29597 - DNA, 25 bp, Probe sequence
agaagtggtaacagaagtgctaatg

SEQ ID NO: 29598 - DNA, 25 bp, Probe sequence
ggtaacagaagtgctaatgctagta

SEQ ID NO: 29599 - DNA, 25 bp, Probe sequence
cattaccaacacttatcaatcaagc

SEQ ID NO: 29600 - DNA, 25 bp, Probe sequence
agtggtaacagaagtgctaatgcta

SEQ ID NO: 29601 - DNA, 25 bp, Probe sequence
gtaacagaagtgctaatgctagtaa

SEQ ID NO: 29602 - DNA, 25 bp, Probe sequence
gtggtaacagaagtgctaatgctag

SEQ ID NO: 29603 - DNA, 25 bp, Probe sequence
cttagagatgaagttgagtacggtg

SEQ ID NO: 29604 - DNA, 25 bp, Probe sequence
tcaaccaagaattaggcatcacaat

SEQ ID NO: 29605 - DNA, 25 bp, Probe sequence
atcaaccaagaattaggcatcacaa

SEQ ID NO: 29606 - DNA, 25 bp, Probe sequence
aatcaaccaagaattaggcatcaca

SEQ ID NO: 29607 - DNA, 25 bp, Probe sequence
caaccaagaattaggcatcacaatt

SEQ ID NO: 29608 - DNA, 25 bp, Probe sequence
gtactaagtggacgtgtaggttatc

SEQ ID NO: 29609 - DNA, 25 bp, Probe sequence
gtcagtaaagtctatcctaacggtc

SEQ ID NO: 29610 - DNA, 25 bp, Probe sequence
tactaagtggacgtgtaggttatca

SEQ ID NO: 29611 - DNA, 25 bp, Probe sequence
aaacggtcaagtgtattacgaaatg

SEQ ID NO: 29612 - DNA, 25 bp, Probe sequence
cagtaaagtctatcctaacggtcat

SEQ ID NO: 29613 - DNA, 25 bp, Probe sequence
aacgctacatcagaagattcagaag

SEQ ID NO: 29614 - DNA, 25 bp, Probe sequence
ctacatcagaagattcagaagaagc

SEQ ID NO: 29615 - DNA, 25 bp, Probe sequence
gctacatcagaagattcagaagaag

SEQ ID NO: 29616 - DNA, 25 bp, Probe sequence
cgctacatcagaagattcagaagaa

SEQ ID NO: 29617 - DNA, 25 bp, Probe sequence
acgctacatcagaagattcagaaga

SEQ ID NO: 29618 - DNA, 25 bp, Probe sequence
tacatcagaagattcagaagaagct

SEQ ID NO: 29619 - DNA, 25 bp, Probe sequence
aaagcactcgtttccattacattag

SEQ ID NO: 29620 - DNA, 25 bp, Probe sequence
agcactcgtttccattacattagat

SEQ ID NO: 29621 - DNA, 25 bp, Probe sequence
atacaaacagatggacgaatgaaag

SEQ ID NO: 29622 - DNA, 25 bp, Probe sequence
gttattggtattgccgttgtatgtt

SEQ ID NO: 29623 - DNA, 25 bp, Probe sequence
ttgttattggtattgccgttgtatg

SEQ ID NO: 29624 - DNA, 25 bp, Probe sequence
tgttattggtattgccgttgtatgt

SEQ ID NO: 29625 - DNA, 25 bp, Probe sequence
ttattggtattgccgttgtatgttt

SEQ ID NO: 29626 - DNA, 25 bp, Probe sequence
ggtattgccgttgtatgtttaatga

SEQ ID NO: 29627 - DNA, 25 bp, Probe sequence
tggtattgccgttgtatgtttaatg

SEQ ID NO: 29628 - DNA, 25 bp, Probe sequence
ttggtattgccgttgtatgtttaat

SEQ ID NO: 29629 - DNA, 25 bp, Probe sequence
attggtattgccgttgtatgtttaa

SEQ ID NO: 29630 - DNA, 25 bp, Probe sequence
agtttctaaagatgatgggaagaca

SEQ ID NO: 29631 - DNA, 25 bp, Probe sequence
tgttgaaagagtattgcagattaaa

SEQ ID NO: 29632 - DNA, 25 bp, Probe sequence
atgttgaaagagtattgcagattaa

SEQ ID NO: 29633 - DNA, 25 bp, Probe sequence
atatgttgaaagagtattgcagatt

SEQ ID NO: 29634 - DNA, 25 bp, Probe sequence
tatgttgaaagagtattgcagatta

SEQ ID NO: 29635 - DNA, 25 bp, Probe sequence
ttatatgttgaaagagtattgcaga

SEQ ID NO: 29636 - DNA, 25 bp, Probe sequence
gttgaaagagtattgcagattaaat

SEQ ID NO: 29637 - DNA, 25 bp, Probe sequence
tatatgttgaaagagtattgcagat

SEQ ID NO: 29638 - DNA, 25 bp, Probe sequence
tttatatgttgaaagagtattgcag

SEQ ID NO: 29639 - DNA, 25 bp, Probe sequence
acaatgccttttatatgttgaaaga

SEQ ID NO: 29640 - DNA, 25 bp, Probe sequence
cagattgtcaggcgataactaagaa

SEQ ID NO: 29641 - DNA, 25 bp, Probe sequence
gcggataagatggctgattatgata

SEQ ID NO: 29642 - DNA, 25 bp, Probe sequence
ttatgatgattaccgtgatgaagcg

SEQ ID NO: 29643 - DNA, 25 bp, Probe sequence
tattggtgatcgtgaagaagttgaa

SEQ ID NO: 29644 - DNA, 25 bp, Probe sequence
aatggtagagattgctaagcgtaac

SEQ ID NO: 29645 - DNA, 25 bp, Probe sequence
gtattggtgatcgtgaagaagttga

SEQ ID NO: 29646 - DNA, 25 bp, Probe sequence
cggataagatggctgattatgataa

SEQ ID NO: 29647 - DNA, 25 bp, Probe sequence
ccagattgtcaggcgataactaaga

SEQ ID NO: 29648 - DNA, 25 bp, Probe sequence
attggtgatcgtgaagaagttgaag

SEQ ID NO: 29649 - DNA, 25 bp, Probe sequence
agttatattggcgatgctgtaattg

SEQ ID NO: 29650 - DNA, 25 bp, Probe sequence
aatcacacttagaagacaaggaagg

SEQ ID NO: 29651 - DNA, 25 bp, Probe sequence
gttatattggcgatgctgtaattgg

SEQ ID NO: 29652 - DNA, 25 bp, Probe sequence
aagttatattggcgatgctgtaatt

SEQ ID NO: 29653 - DNA, 25 bp, Probe sequence
tcacacttagaagacaaggaaggta

SEQ ID NO: 29654 - DNA, 25 bp, Probe sequence
gcgaagatgttgttattggtcagta

SEQ ID NO: 29655 - DNA, 25 bp, Probe sequence
ttaagttatattggcgatgctgtaa

SEQ ID NO: 29656 - DNA, 25 bp, Probe sequence
taagttatattggcgatgctgtaat

SEQ ID NO: 29657 - DNA, 25 bp, Probe sequence
cgaagatgttgttattggtcagtac

SEQ ID NO: 29658 - DNA, 25 bp, Probe sequence
gccgatatgaataatgaagttgtaa

SEQ ID NO: 29659 - DNA, 25 bp, Probe sequence
cgtggctatagaagagaagaagtag

SEQ ID NO: 29660 - DNA, 25 bp, Probe sequence
tcgtggctatagaagagaagaagta

SEQ ID NO: 29661 - DNA, 25 bp, Probe sequence
agaagaattaagactacgtgtagca

SEQ ID NO: 29662 - DNA, 25 bp, Probe sequence
aagaattaagactacgtgtagcaac

SEQ ID NO: 29663 - DNA, 25 bp, Probe sequence
gtggctatagaagagaagaagtaga

SEQ ID NO: 29664 - DNA, 25 bp, Probe sequence
gaagaattaagactacgtgtagcaa

SEQ ID NO: 29665 - DNA, 25 bp, Probe sequence
gctatagaagagaagaagtagatgc

SEQ ID NO: 29666 - DNA, 25 bp, Probe sequence
agaattaagactacgtgtagcaaca

SEQ ID NO: 29667 - DNA, 25 bp, Probe sequence
tgacgatattattgatacagcaggt

SEQ ID NO: 29668 - DNA, 25 bp, Probe sequence
ctcgtatgattgcgttagacttaca

SEQ ID NO: 29669 - DNA, 25 bp, Probe sequence
actcgtatgattgcgttagacttac

SEQ ID NO: 29670 - DNA, 25 bp, Probe sequence
tcgtatgattgcgttagacttacat

SEQ ID NO: 29671 - DNA, 25 bp, Probe sequence
aactcgtatgattgcgttagactta

SEQ ID NO: 29672 - DNA, 25 bp, Probe sequence
ttgacgatattattgatacagcagg

SEQ ID NO: 29673 - DNA, 25 bp, Probe sequence
aaccaacatcatatcctgtgaatct

SEQ ID NO: 29674 - DNA, 25 bp, Probe sequence
caaccaacatcatatcctgtgaatc

SEQ ID NO: 29675 - DNA, 25 bp, Probe sequence
tcaaccaacatcatatcctgtgaat

SEQ ID NO: 29676 - DNA, 25 bp, Probe sequence
actgttggatgaaggattagaatgg

SEQ ID NO: 29677 - DNA, 25 bp, Probe sequence
aactgttggatgaaggattagaatg

SEQ ID NO: 29678 - DNA, 25 bp, Probe sequence
taattacaccgttccaaggacatac

SEQ ID NO: 29679 - DNA, 25 bp, Probe sequence
caatgacttacagtggtctgaagat

SEQ ID NO: 29680 - DNA, 25 bp, Probe sequence
atcaatgacttacagtggtctgaag

SEQ ID NO: 29681 - DNA, 25 bp, Probe sequence
gatgacgcacctgaagtacattatt

SEQ ID NO: 29682 - DNA, 25 bp, Probe sequence
catcaatgacttacagtggtctgaa

SEQ ID NO: 29683 - DNA, 25 bp, Probe sequence
acaactgttggatgaaggattagaa

SEQ ID NO: 29684 - DNA, 25 bp, Probe sequence
aacaactgttggatgaaggattaga

SEQ ID NO: 29685 - DNA, 25 bp, Probe sequence
gccatatactgaacatattgatagc

SEQ ID NO: 29686 - DNA, 25 bp, Probe sequence
accaaactgtaaagccatatactga

SEQ ID NO: 29687 - DNA, 25 bp, Probe sequence
ccaaactgtaaagccatatactgaa

SEQ ID NO: 29688 - DNA, 25 bp, Probe sequence
taccaaactgtaaagccatatactg

SEQ ID NO: 29689 - DNA, 25 bp, Probe sequence
attgctaacattgaacaactttctg

SEQ ID NO: 29690 - DNA, 25 bp, Probe sequence
tgattgctaacattgaacaactttc

SEQ ID NO: 29691 - DNA, 25 bp, Probe sequence
caaactgtaaagccatatactgaac

SEQ ID NO: 29692 - DNA, 25 bp, Probe sequence
tgctaacattgaacaactttctgtc

SEQ ID NO: 29693 - DNA, 25 bp, Probe sequence
ttgctaacattgaacaactttctgt

SEQ ID NO: 29694 - DNA, 25 bp, Probe sequence
tgaacttacaagacataatatcggc

SEQ ID NO: 29695 - DNA, 25 bp, Probe sequence
gaacttacaagacataatatcggct

SEQ ID NO: 29696 - DNA, 25 bp, Probe sequence
gcaccgattatggattattacaatg

SEQ ID NO: 29697 - DNA, 25 bp, Probe sequence
aacttacaagacataatatcggctt

SEQ ID NO: 29698 - DNA, 25 bp, Probe sequence
atcgaaccaatgacaatgatgaatt

SEQ ID NO: 29699 - DNA, 25 bp, Probe sequence
caaatgatgaaatggtaacgatgga

SEQ ID NO: 29700 - DNA, 25 bp, Probe sequence
gttgcaccgattatggattattaca

SEQ ID NO: 29701 - DNA, 25 bp, Probe sequence
caccgattatggattattacaatgt

SEQ ID NO: 29702 - DNA, 25 bp, Probe sequence
cggctttgaagtcgttgattatatt

SEQ ID NO: 29703 - DNA, 25 bp, Probe sequence
caatatcctgttgtgccaatgaatt

SEQ ID NO: 29704 - DNA, 25 bp, Probe sequence
tcaatatcctgttgtgccaatgaat

SEQ ID NO: 29705 - DNA, 25 bp, Probe sequence
atcaatatcctgttgtgccaatgaa

SEQ ID NO: 29706 - DNA, 25 bp, Probe sequence
aatcaatatcctgttgtgccaatga

SEQ ID NO: 29707 - DNA, 25 bp, Probe sequence
aaatcaatatcctgttgtgccaatg

SEQ ID NO: 29708 - DNA, 25 bp, Probe sequence
aaacaaggttaaagaataagcaggt

SEQ ID NO: 29709 - DNA, 25 bp, Probe sequence
aatatcctgttgtgccaatgaattt

SEQ ID NO: 29710 - DNA, 25 bp, Probe sequence
ttaaatcaatatcctgttgtgccaa

SEQ ID NO: 29711 - DNA, 25 bp, Probe sequence
caaacaaggttaaagaataagcagg

SEQ ID NO: 29712 - DNA, 25 bp, Probe sequence
tatgtggtgatgttggttatggtaa

SEQ ID NO: 29713 - DNA, 25 bp, Probe sequence
ctatgtggtgatgttggttatggta

SEQ ID NO: 29714 - DNA, 25 bp, Probe sequence
agtgttgaagatattgctgaagagt

SEQ ID NO: 29715 - DNA, 25 bp, Probe sequence
tgttgaagatattgctgaagagttg

SEQ ID NO: 29716 - DNA, 25 bp, Probe sequence
gtgttgaagatattgctgaagagtt

SEQ ID NO: 29717 - DNA, 25 bp, Probe sequence
gttgaagatattgctgaagagttga

SEQ ID NO: 29718 - DNA, 25 bp, Probe sequence
aagtgttgaagatattgctgaagag

SEQ ID NO: 29719 - DNA, 25 bp, Probe sequence
aatgattatcctgttgaagtagcac

SEQ ID NO: 29720 - DNA, 25 bp, Probe sequence
atgattatcctgttgaagtagcacg

SEQ ID NO: 29721 - DNA, 25 bp, Probe sequence
atattcgttctatcggtctgtatcg

SEQ ID NO: 29722 - DNA, 25 bp, Probe sequence
attcgttctatcggtctgtatcgta

SEQ ID NO: 29723 - DNA, 25 bp, Probe sequence
tattcgttctatcggtctgtatcgt

SEQ ID NO: 29724 - DNA, 25 bp, Probe sequence
ttcgttctatcggtctgtatcgtaa

SEQ ID NO: 29725 - DNA, 25 bp, Probe sequence
gcagtcagtgatgaagaacttatga

SEQ ID NO: 29726 - DNA, 25 bp, Probe sequence
tctgtcatacctagagatagatgga

SEQ ID NO: 29727 - DNA, 25 bp, Probe sequence
gttctatcggtctgtatcgtaacaa

SEQ ID NO: 29728 - DNA, 25 bp, Probe sequence
aatgatattcgttctatcggtctgt

SEQ ID NO: 29729 - DNA, 25 bp, Probe sequence
cagtcagtgatgaagaacttatgaa

SEQ ID NO: 29730 - DNA, 25 bp, Probe sequence
cgaatcctgataacatcaacatgat

SEQ ID NO: 29731 - DNA, 25 bp, Probe sequence
tcgaatcctgataacatcaacatga

SEQ ID NO: 29732 - DNA, 25 bp, Probe sequence
gtcgaatcctgataacatcaacatg

SEQ ID NO: 29733 - DNA, 25 bp, Probe sequence
tgtcgaatcctgataacatcaacat

SEQ ID NO: 29734 - DNA, 25 bp, Probe sequence
gtgtcgaatcctgataacatcaaca

SEQ ID NO: 29735 - DNA, 25 bp, Probe sequence
ttaacatgggtacgcctaatttaaa

SEQ ID NO: 29736 - DNA, 25 bp, Probe sequence
ggttaacatgggtacgcctaattta

SEQ ID NO: 29737 - DNA, 25 bp, Probe sequence
gttaacatgggtacgcctaatttaa

SEQ ID NO: 29738 - DNA, 25 bp, Probe sequence
tgatgttaaaagttttacggaccaa

SEQ ID NO: 29739 - DNA, 25 bp, Probe sequence
attatccatattgctgtcacgagaa

SEQ ID NO: 29740 - DNA, 25 bp, Probe sequence
tggcgtgttaagaggttattatcaa

SEQ ID NO: 29741 - DNA, 25 bp, Probe sequence
ttggcgtgttaagaggttattatca

SEQ ID NO: 29742 - DNA, 25 bp, Probe sequence
gattatccatattgctgtcacgaga

SEQ ID NO: 29743 - DNA, 25 bp, Probe sequence
tacgattatccatattgctgtcacg

SEQ ID NO: 29744 - DNA, 25 bp, Probe sequence
ggcgtgttaagaggttattatcaat

SEQ ID NO: 29745 - DNA, 25 bp, Probe sequence
cttggcgtgttaagaggttattatc

SEQ ID NO: 29746 - DNA, 25 bp, Probe sequence
gtatgacggcaggattggttattaa

SEQ ID NO: 29747 - DNA, 25 bp, Probe sequence
ttataggtatgcttggcgtgttaag

SEQ ID NO: 29748 - DNA, 25 bp, Probe sequence
agacctgtagtgatacgaagagaat

SEQ ID NO: 29749 - DNA, 25 bp, Probe sequence
aagacctgtagtgatacgaagagaa

SEQ ID NO: 29750 - DNA, 25 bp, Probe sequence
gacctgtagtgatacgaagagaatt

SEQ ID NO: 29751 - DNA, 25 bp, Probe sequence
caagacctgtagtgatacgaagaga

SEQ ID NO: 29752 - DNA, 25 bp, Probe sequence
acctgtagtgatacgaagagaatta

SEQ ID NO: 29753 - DNA, 25 bp, Probe sequence
aattatacaagcggcattagacgag

SEQ ID NO: 29754 - DNA, 25 bp, Probe sequence
caattatacaagcggcattagacga

SEQ ID NO: 29755 - DNA, 25 bp, Probe sequence
aagcaagacctgtagtgatacgaag

SEQ ID NO: 29756 - DNA, 25 bp, Probe sequence
cgtgaattgctagaattacaagttc

SEQ ID NO: 29757 - DNA, 25 bp, Probe sequence
gttagaacgcatacattgattacgc

SEQ ID NO: 29758 - DNA, 25 bp, Probe sequence
ttagaacgcatacattgattacgca

SEQ ID NO: 29759 - DNA, 25 bp, Probe sequence
tagaacgcatacattgattacgcaa

SEQ ID NO: 29760 - DNA, 25 bp, Probe sequence
tgttagaacgcatacattgattacg

SEQ ID NO: 29761 - DNA, 25 bp, Probe sequence
aatgatggcttcacactgttagatg

SEQ ID NO: 29762 - DNA, 25 bp, Probe sequence
agaagtgattacaagtcttaatgct

SEQ ID NO: 29763 - DNA, 25 bp, Probe sequence
atatgagaagacgaaggataagtca

SEQ ID NO: 29764 - DNA, 25 bp, Probe sequence
cgaagctattgacaatgaagatgat

SEQ ID NO: 29765 - DNA, 25 bp, Probe sequence
aacgcatacattgattacgcaagtt

SEQ ID NO: 29766 - DNA, 25 bp, Probe sequence
cgtgtggatgacttagaattgttag

SEQ ID NO: 29767 - DNA, 25 bp, Probe sequence
tggattagacgaagaagcatatagt

SEQ ID NO: 29768 - DNA, 25 bp, Probe sequence
caggcacaattacagaagataatcg

SEQ ID NO: 29769 - DNA, 25 bp, Probe sequence
ggcacaattacagaagataatcgtt

SEQ ID NO: 29770 - DNA, 25 bp, Probe sequence
aggcacaattacagaagataatcgt

SEQ ID NO: 29771 - DNA, 25 bp, Probe sequence
gttacaggcacaattacagaagata

SEQ ID NO: 29772 - DNA, 25 bp, Probe sequence
acaggcacaattacagaagataatc

SEQ ID NO: 29773 - DNA, 25 bp, Probe sequence
gtgtggatgacttagaattgttaga

SEQ ID NO: 29774 - DNA, 25 bp, Probe sequence
ggattagacgaagaagcatatagtt

SEQ ID NO: 29775 - DNA, 25 bp, Probe sequence
atgttaaagttgaagatgtgctgac

SEQ ID NO: 29776 - DNA, 25 bp, Probe sequence
gatgttaaagttgaagatgtgctga

SEQ ID NO: 29777 - DNA, 25 bp, Probe sequence
aaagtatcacggttaataaagcgac

SEQ ID NO: 29778 - DNA, 25 bp, Probe sequence
atcggatgttaaagttgaagatgtg

SEQ ID NO: 29779 - DNA, 25 bp, Probe sequence
ggatgttaaagttgaagatgtgctg

SEQ ID NO: 29780 - DNA, 25 bp, Probe sequence
taaagttgaagatgtgctgacgatt

SEQ ID NO: 29781 - DNA, 25 bp, Probe sequence
ttaaagttgaagatgtgctgacgat

SEQ ID NO: 29782 - DNA, 25 bp, Probe sequence
aagtatcacggttaataaagcgacg

SEQ ID NO: 29783 - DNA, 25 bp, Probe sequence
ggatcggatgttaaagttgaagatg

SEQ ID NO: 29784 - DNA, 25 bp, Probe sequence
tgatgattgtatagtggatgaagca

SEQ ID NO: 29785 - DNA, 25 bp, Probe sequence
ttgatgattgtatagtggatgaagc

SEQ ID NO: 29786 - DNA, 25 bp, Probe sequence
aatgtgtgatgatagcgaagttacc

SEQ ID NO: 29787 - DNA, 25 bp, Probe sequence
gcttgaaggctagtatgaatgagat

SEQ ID NO: 29788 - DNA, 25 bp, Probe sequence
cttgaaggctagtatgaatgagatt

SEQ ID NO: 29789 - DNA, 25 bp, Probe sequence
tagatcaacttggcttaacatatcg

SEQ ID NO: 29790 - DNA, 25 bp, Probe sequence
tgtattaacacaacagcagaaccaa

SEQ ID NO: 29791 - DNA, 25 bp, Probe sequence
tgattgtatagtggatgaagcacat

SEQ ID NO: 29792 - DNA, 25 bp, Probe sequence
atgattgtatagtggatgaagcaca

SEQ ID NO: 29793 - DNA, 25 bp, Probe sequence
tcaatataactcaggatatgccaca

SEQ ID NO: 29794 - DNA, 25 bp, Probe sequence
ttatgagaccgttaattgaagcagg

SEQ ID NO: 29795 - DNA, 25 bp, Probe sequence
caatataactcaggatatgccacaa

SEQ ID NO: 29796 - DNA, 25 bp, Probe sequence
gttaattgaagcaggctatgtgtat

SEQ ID NO: 29797 - DNA, 25 bp, Probe sequence
attgaagcaggctatgtgtatattg

SEQ ID NO: 29798 - DNA, 25 bp, Probe sequence
attaggtaattctgaagtgcgtcaa

SEQ ID NO: 29799 - DNA, 25 bp, Probe sequence
ttcaatataactcaggatatgccac

SEQ ID NO: 29800 - DNA, 25 bp, Probe sequence
taattctgaagtgcgtcaagttgta

SEQ ID NO: 29801 - DNA, 25 bp, Probe sequence
ctgaagtgcgtcaagttgtagataa

SEQ ID NO: 29802 - DNA, 25 bp, Probe sequence
ttctaagacagattatgatgcgaca

SEQ ID NO: 29803 - DNA, 25 bp, Probe sequence
tctaagacagattatgatgcgacat

SEQ ID NO: 29804 - DNA, 25 bp, Probe sequence
ctaagacagattatgatgcgacatt

SEQ ID NO: 29805 - DNA, 25 bp, Probe sequence
aatgtgatgattgttcagaatgtcc

SEQ ID NO: 29806 - DNA, 25 bp, Probe sequence
attctatatgcctacacacaatctg

SEQ ID NO: 29807 - DNA, 25 bp, Probe sequence
atgtgatgattgttcagaatgtcct

SEQ ID NO: 29808 - DNA, 25 bp, Probe sequence
attctaagacagattatgatgcgac

SEQ ID NO: 29809 - DNA, 25 bp, Probe sequence
gtgatgattgttcagaatgtcctct

SEQ ID NO: 29810 - DNA, 25 bp, Probe sequence
tgtgatgattgttcagaatgtcctc

SEQ ID NO: 29811 - DNA, 25 bp, Probe sequence
atgatgaagagtggaataatggaca

SEQ ID NO: 29812 - DNA, 25 bp, Probe sequence
acaggagaggcaataataatagacc

SEQ ID NO: 29813 - DNA, 25 bp, Probe sequence
tcagtcaggtgttagaagttcaatt

SEQ ID NO: 29814 - DNA, 25 bp, Probe sequence
gtcagtcaggtgttagaagttcaat

SEQ ID NO: 29815 - DNA, 25 bp, Probe sequence
attgtcagtcaggtgttagaagttc

SEQ ID NO: 29816 - DNA, 25 bp, Probe sequence
cattgtcagtcaggtgttagaagtt

SEQ ID NO: 29817 - DNA, 25 bp, Probe sequence
aatgatgaagagtggaataatggac

SEQ ID NO: 29818 - DNA, 25 bp, Probe sequence
tgtcagtcaggtgttagaagttcaa

SEQ ID NO: 29819 - DNA, 25 bp, Probe sequence
ttgtcagtcaggtgttagaagttca

SEQ ID NO: 29820 - DNA, 25 bp, Probe sequence
aacatcaactgctggatatacattc

SEQ ID NO: 29821 - DNA, 25 bp, Probe sequence
acgctagtaatgattcggattctaa

SEQ ID NO: 29822 - DNA, 25 bp, Probe sequence
aacgctagtaatgattcggattcta

SEQ ID NO: 29823 - DNA, 25 bp, Probe sequence
gtaacatcaactgctggatatacat

SEQ ID NO: 29824 - DNA, 25 bp, Probe sequence
aagaacgctagtaatgattcggatt

SEQ ID NO: 29825 - DNA, 25 bp, Probe sequence
gaacgctagtaatgattcggattct

SEQ ID NO: 29826 - DNA, 25 bp, Probe sequence
agaacgctagtaatgattcggattc

SEQ ID NO: 29827 - DNA, 25 bp, Probe sequence
taacatcaactgctggatatacatt

SEQ ID NO: 29828 - DNA, 25 bp, Probe sequence
atgtaacatcaactgctggatatac

SEQ ID NO: 29829 - DNA, 25 bp, Probe sequence
caatagattctacacaacttgctgc

SEQ ID NO: 29830 - DNA, 25 bp, Probe sequence
tcaatagattctacacaacttgctg

SEQ ID NO: 29831 - DNA, 25 bp, Probe sequence
aatagattctacacaacttgctgcg

SEQ ID NO: 29832 - DNA, 25 bp, Probe sequence
ttcaatagattctacacaacttgct

SEQ ID NO: 29833 - DNA, 25 bp, Probe sequence
acgattcaatagattctacacaact

SEQ ID NO: 29834 - DNA, 25 bp, Probe sequence
tggtatagaagcaataatatgtggt

SEQ ID NO: 29835 - DNA, 25 bp, Probe sequence
atagattctacacaacttgctgcga

SEQ ID NO: 29836 - DNA, 25 bp, Probe sequence
tggttgctaataatgatggtataga

SEQ ID NO: 29837 - DNA, 25 bp, Probe sequence
agaagcaataatatgtggtataggt

SEQ ID NO: 29838 - DNA, 25 bp, Probe sequence
gcattcgtagaattacctgaaggaa

SEQ ID NO: 29839 - DNA, 25 bp, Probe sequence
caacatacgagtaaaccaagtcatc

SEQ ID NO: 29840 - DNA, 25 bp, Probe sequence
acatacgagtaaaccaagtcatcaa

SEQ ID NO: 29841 - DNA, 25 bp, Probe sequence
aacatacgagtaaaccaagtcatca

SEQ ID NO: 29842 - DNA, 25 bp, Probe sequence
tagacaacatacgagtaaaccaagt

SEQ ID NO: 29843 - DNA, 25 bp, Probe sequence
acaacatacgagtaaaccaagtcat

SEQ ID NO: 29844 - DNA, 25 bp, Probe sequence
catacgagtaaaccaagtcatcaaa

SEQ ID NO: 29845 - DNA, 25 bp, Probe sequence
gtagacaacatacgagtaaaccaag

SEQ ID NO: 29846 - DNA, 25 bp, Probe sequence
agtattatctattgctgatgatgga

SEQ ID NO: 29847 - DNA, 25 bp, Probe sequence
gatggttaatggcggtgtacttatg

SEQ ID NO: 29848 - DNA, 25 bp, Probe sequence
taagaactgtaggtatagctgagga

SEQ ID NO: 29849 - DNA, 25 bp, Probe sequence
caaggacatgaaccattaatcgtta

SEQ ID NO: 29850 - DNA, 25 bp, Probe sequence
aagaactgtaggtatagctgaggaa

SEQ ID NO: 29851 - DNA, 25 bp, Probe sequence
tgatggttaatggcggtgtacttat

SEQ ID NO: 29852 - DNA, 25 bp, Probe sequence
atgatggttaatggcggtgtactta

SEQ ID NO: 29853 - DNA, 25 bp, Probe sequence
aagaagattatgtcgatcaccgtag

SEQ ID NO: 29854 - DNA, 25 bp, Probe sequence
gaagaagattatgtcgatcaccgta

SEQ ID NO: 29855 - DNA, 25 bp, Probe sequence
tcaaggacatgaaccattaatcgtt

SEQ ID NO: 29856 - DNA, 25 bp, Probe sequence
tgatgaatgtattagaagcggatgt

SEQ ID NO: 29857 - DNA, 25 bp, Probe sequence
aatgtattagaagcggatgtattgc

SEQ ID NO: 29858 - DNA, 25 bp, Probe sequence
atgatgaatgtattagaagcggatg

SEQ ID NO: 29859 - DNA, 25 bp, Probe sequence
gatgaatgtattagaagcggatgta

SEQ ID NO: 29860 - DNA, 25 bp, Probe sequence
aatgatgaatgtattagaagcggat

SEQ ID NO: 29861 - DNA, 25 bp, Probe sequence
tgaatgtattagaagcggatgtatt

SEQ ID NO: 29862 - DNA, 25 bp, Probe sequence
gaatgtattagaagcggatgtattg

SEQ ID NO: 29863 - DNA, 25 bp, Probe sequence
atgaatgtattagaagcggatgtat

SEQ ID NO: 29864 - DNA, 25 bp, Probe sequence
aatagtaatggttggcatgttgatg

SEQ ID NO: 29865 - DNA, 25 bp, Probe sequence
ggaattattgccacagaattaggaa

SEQ ID NO: 29866 - DNA, 25 bp, Probe sequence
agtgatattgtgacaagtgtgagta

SEQ ID NO: 29867 - DNA, 25 bp, Probe sequence
aagtgatattgtgacaagtgtgagt

SEQ ID NO: 29868 - DNA, 25 bp, Probe sequence
aacgctacacggtactgatattact

SEQ ID NO: 29869 - DNA, 25 bp, Probe sequence
caacgctacacggtactgatattac

SEQ ID NO: 29870 - DNA, 25 bp, Probe sequence
acaacgctacacggtactgatatta

SEQ ID NO: 29871 - DNA, 25 bp, Probe sequence
gtgatattgtgacaagtgtgagtaa

SEQ ID NO: 29872 - DNA, 25 bp, Probe sequence
gctacacggtactgatattactgtt

SEQ ID NO: 29873 - DNA, 25 bp, Probe sequence
acgctacacggtactgatattactg

SEQ ID NO: 29874 - DNA, 25 bp, Probe sequence
tcttagagactggtactacacttaa

SEQ ID NO: 29875 - DNA, 25 bp, Probe sequence
tttgttgttggttacggtttagatt

SEQ ID NO: 29876 - DNA, 25 bp, Probe sequence
ttgttggttacggtttagattatcg

SEQ ID NO: 29877 - DNA, 25 bp, Probe sequence
atttgttgttggttacggtttagat

SEQ ID NO: 29878 - DNA, 25 bp, Probe sequence
ttagataaaccaaaccgtcgtaaag

SEQ ID NO: 29879 - DNA, 25 bp, Probe sequence
tgaatttgttgttggttacggttta

SEQ ID NO: 29880 - DNA, 25 bp, Probe sequence
aaatatctgtaaggaattgggagca

SEQ ID NO: 29881 - DNA, 25 bp, Probe sequence
atgaatttgttgttggttacggttt

SEQ ID NO: 29882 - DNA, 25 bp, Probe sequence
aatttgttgttggttacggtttaga

SEQ ID NO: 29883 - DNA, 25 bp, Probe sequence
aatgggaatagatatgacagagagc

SEQ ID NO: 29884 - DNA, 25 bp, Probe sequence
ggaagcaaatacgattaaagcagaa

SEQ ID NO: 29885 - DNA, 25 bp, Probe sequence
gaggaagcaaatacgattaaagcag

SEQ ID NO: 29886 - DNA, 25 bp, Probe sequence
cagaggaagcaaatacgattaaagc

SEQ ID NO: 29887 - DNA, 25 bp, Probe sequence
aggaagcaaatacgattaaagcaga

SEQ ID NO: 29888 - DNA, 25 bp, Probe sequence
agaggaagcaaatacgattaaagca

SEQ ID NO: 29889 - DNA, 25 bp, Probe sequence
tcagaggaagcaaatacgattaaag

SEQ ID NO: 29890 - DNA, 25 bp, Probe sequence
agattcagaggaagcaaatacgatt

SEQ ID NO: 29891 - DNA, 25 bp, Probe sequence
aagattcagaggaagcaaatacgat

SEQ ID NO: 29892 - DNA, 25 bp, Probe sequence
ttccagttgtagtcatagcgttatt

SEQ ID NO: 29893 - DNA, 25 bp, Probe sequence
attccagttgtagtcatagcgttat

SEQ ID NO: 29894 - DNA, 25 bp, Probe sequence
caatggttacgcaatatggtatgag

SEQ ID NO: 29895 - DNA, 25 bp, Probe sequence
ctcaatggttacgcaatatggtatg

SEQ ID NO: 29896 - DNA, 25 bp, Probe sequence
atggttacgcaatatggtatgagta

SEQ ID NO: 29897 - DNA, 25 bp, Probe sequence
aatggttacgcaatatggtatgagt

SEQ ID NO: 29898 - DNA, 25 bp, Probe sequence
tccagttgtagtcatagcgttatta

SEQ ID NO: 29899 - DNA, 25 bp, Probe sequence
aattccagttgtagtcatagcgtta

SEQ ID NO: 29900 - DNA, 25 bp, Probe sequence
taattccagttgtagtcatagcgtt

SEQ ID NO: 29901 - DNA, 25 bp, Probe sequence
taagattcagagcagcattagtacc

SEQ ID NO: 29902 - DNA, 25 bp, Probe sequence
tgtcattagcggtattattctcaat

SEQ ID NO: 29903 - DNA, 25 bp, Probe sequence
atgtcattagcggtattattctcaa

SEQ ID NO: 29904 - DNA, 25 bp, Probe sequence
ttatcttaacagcgataggtagtgc

SEQ ID NO: 29905 - DNA, 25 bp, Probe sequence
ccattcaagatcaccaaggatattg

SEQ ID NO: 29906 - DNA, 25 bp, Probe sequence
gccattcaagatcaccaaggatatt

SEQ ID NO: 29907 - DNA, 25 bp, Probe sequence
ttaagattcagagcagcattagtac

SEQ ID NO: 29908 - DNA, 25 bp, Probe sequence
aaggtgaaggattcttaacagatca

SEQ ID NO: 29909 - DNA, 25 bp, Probe sequence
aggtattatcttaacagcgataggt

SEQ ID NO: 29910 - DNA, 25 bp, Probe sequence
ggattaacgccagaaggattactaa

SEQ ID NO: 29911 - DNA, 25 bp, Probe sequence
aggattaacgccagaaggattacta

SEQ ID NO: 29912 - DNA, 25 bp, Probe sequence
taattgaacaaggattaacgccaga

SEQ ID NO: 29913 - DNA, 25 bp, Probe sequence
aaggacctattggacgaattattgc

SEQ ID NO: 29914 - DNA, 25 bp, Probe sequence
caaggacctattggacgaattattg

SEQ ID NO: 29915 - DNA, 25 bp, Probe sequence
aattgaacaaggattaacgccagaa

SEQ ID NO: 29916 - DNA, 25 bp, Probe sequence
aaggattaacgccagaaggattact

SEQ ID NO: 29917 - DNA, 25 bp, Probe sequence
caaggattaacgccagaaggattac

SEQ ID NO: 29918 - DNA, 25 bp, Probe sequence
ttatcattcaagttatgccaggtgc

SEQ ID NO: 29919 - DNA, 25 bp, Probe sequence
atggtatggtgaacaattaagtcat

SEQ ID NO: 29920 - DNA, 25 bp, Probe sequence
atggtgaacaattaagtcatacgcc

SEQ ID NO: 29921 - DNA, 25 bp, Probe sequence
tatggtgaacaattaagtcatacgc

SEQ ID NO: 29922 - DNA, 25 bp, Probe sequence
tatggtatggtgaacaattaagtca

SEQ ID NO: 29923 - DNA, 25 bp, Probe sequence
gtgtggcaaattggtgtattatcat

SEQ ID NO: 29924 - DNA, 25 bp, Probe sequence
atgtgtggcaaattggtgtattatc

SEQ ID NO: 29925 - DNA, 25 bp, Probe sequence
gcactggcatttgtaacattattca

SEQ ID NO: 29926 - DNA, 25 bp, Probe sequence
tggtatggtgaacaattaagtcata

SEQ ID NO: 29927 - DNA, 25 bp, Probe sequence
tgtgtggcaaattggtgtattatca

SEQ ID NO: 29928 - DNA, 25 bp, Probe sequence
tagtaacagtattgccgagtaatgg

SEQ ID NO: 29929 - DNA, 25 bp, Probe sequence
cagtagtaacagtattgccgagtaa

SEQ ID NO: 29930 - DNA, 25 bp, Probe sequence
gtagtaacagtattgccgagtaatg

SEQ ID NO: 29931 - DNA, 25 bp, Probe sequence
agtagtaacagtattgccgagtaat

SEQ ID NO: 29932 - DNA, 25 bp, Probe sequence
acagtagtaacagtattgccgagta

SEQ ID NO: 29933 - DNA, 25 bp, Probe sequence
gtaatggtgaacgctacttatcaac

SEQ ID NO: 29934 - DNA, 25 bp, Probe sequence
taatggtgaacgctacttatcaaca

SEQ ID NO: 29935 - DNA, 25 bp, Probe sequence
gtaacagtattgccgagtaatggtg

SEQ ID NO: 29936 - DNA, 25 bp, Probe sequence
aacagtagtaacagtattgccgagt

SEQ ID NO: 29937 - DNA, 25 bp, Probe sequence
gatattcaaattcacttcgcaaacg

SEQ ID NO: 29938 - DNA, 25 bp, Probe sequence
tgatattcaaattcacttcgcaaac

SEQ ID NO: 29939 - DNA, 25 bp, Probe sequence
aggctagatgatttaatagttgctc

SEQ ID NO: 29940 - DNA, 25 bp, Probe sequence
atcaatttgaggacttagcagatga

SEQ ID NO: 29941 - DNA, 25 bp, Probe sequence
aatcaatttgaggacttagcagatg

SEQ ID NO: 29942 - DNA, 25 bp, Probe sequence
tcaatttgaggacttagcagatgac

SEQ ID NO: 29943 - DNA, 25 bp, Probe sequence
ggctagatgatttaatagttgctca

SEQ ID NO: 29944 - DNA, 25 bp, Probe sequence
aaggctagatgatttaatagttgct

SEQ ID NO: 29945 - DNA, 25 bp, Probe sequence
atagtatggctatagatcggcataa

SEQ ID NO: 29946 - DNA, 25 bp, Probe sequence
gaagttatggcaagactggatgaac

SEQ ID NO: 29947 - DNA, 25 bp, Probe sequence
tattatgaaaggcgttagagcagta

SEQ ID NO: 29948 - DNA, 25 bp, Probe sequence
tagaaatgaagaagccgaagttatg

SEQ ID NO: 29949 - DNA, 25 bp, Probe sequence
gtattatgaaaggcgttagagcagt

SEQ ID NO: 29950 - DNA, 25 bp, Probe sequence
atggtattatgaaaggcgttagagc

SEQ ID NO: 29951 - DNA, 25 bp, Probe sequence
agaaatgaagaagccgaagttatgg

SEQ ID NO: 29952 - DNA, 25 bp, Probe sequence
ggtattatgaaaggcgttagagcag

SEQ ID NO: 29953 - DNA, 25 bp, Probe sequence
tagatccaggtataggtttcgctaa

SEQ ID NO: 29954 - DNA, 25 bp, Probe sequence
ctagaaatgaagaagccgaagttat

SEQ ID NO: 29955 - DNA, 25 bp, Probe sequence
tattctctcgtatggcagattgtag

SEQ ID NO: 29956 - DNA, 25 bp, Probe sequence
aacttattctctcgtatggcagatt

SEQ ID NO: 29957 - DNA, 25 bp, Probe sequence
gcgatgctaatgaaggtgtattatt

SEQ ID NO: 29958 - DNA, 25 bp, Probe sequence
cttattctctcgtatggcagattgt

SEQ ID NO: 29959 - DNA, 25 bp, Probe sequence
acttattctctcgtatggcagattg

SEQ ID NO: 29960 - DNA, 25 bp, Probe sequence
ttattctctcgtatggcagattgta

SEQ ID NO: 29961 - DNA, 25 bp, Probe sequence
taagttatgttgaaccatcacctga

SEQ ID NO: 29962 - DNA, 25 bp, Probe sequence
ggcgatgctaatgaaggtgtattat

SEQ ID NO: 29963 - DNA, 25 bp, Probe sequence
aagttatgttgaaccatcacctgaa

SEQ ID NO: 29964 - DNA, 25 bp, Probe sequence
ggtcattatgatggagtaggtatcg

SEQ ID NO: 29965 - DNA, 25 bp, Probe sequence
gtcattatgatggagtaggtatcga

SEQ ID NO: 29966 - DNA, 25 bp, Probe sequence
ccgttaatttacttgagcatctagc

SEQ ID NO: 29967 - DNA, 25 bp, Probe sequence
gccgttaatttacttgagcatctag

SEQ ID NO: 29968 - DNA, 25 bp, Probe sequence
tcattatgatggagtaggtatcgaa

SEQ ID NO: 29969 - DNA, 25 bp, Probe sequence
gggtcattatgatggagtaggtatc

SEQ ID NO: 29970 - DNA, 25 bp, Probe sequence
agaggttaaatcaattatggaaggt

SEQ ID NO: 29971 - DNA, 25 bp, Probe sequence
cgggtcattatgatggagtaggtat

SEQ ID NO: 29972 - DNA, 25 bp, Probe sequence
attatggaaggtaaggccgttaatt

SEQ ID NO: 29973 - DNA, 25 bp, Probe sequence
acctactgcttctattcgtattcaa

SEQ ID NO: 29974 - DNA, 25 bp, Probe sequence
aacctactgcttctattcgtattca

SEQ ID NO: 29975 - DNA, 25 bp, Probe sequence
attcaatacacaccaatgcttcaac

SEQ ID NO: 29976 - DNA, 25 bp, Probe sequence
atacacaccaatgcttcaaccaata

SEQ ID NO: 29977 - DNA, 25 bp, Probe sequence
tattcaatacacaccaatgcttcaa

SEQ ID NO: 29978 - DNA, 25 bp, Probe sequence
ctgaacctactgcttctattcgtat

SEQ ID NO: 29979 - DNA, 25 bp, Probe sequence
tgaacctactgcttctattcgtatt

SEQ ID NO: 29980 - DNA, 25 bp, Probe sequence
tacacaccaatgcttcaaccaataa

SEQ ID NO: 29981 - DNA, 25 bp, Probe sequence
gaacctactgcttctattcgtattc

SEQ ID NO: 29982 - DNA, 25 bp, Probe sequence
gattcaagcatacttaggattaggt

SEQ ID NO: 29983 - DNA, 25 bp, Probe sequence
tgattcaagcatacttaggattagg

SEQ ID NO: 29984 - DNA, 25 bp, Probe sequence
tcaagcatacttaggattaggtagt

SEQ ID NO: 29985 - DNA, 25 bp, Probe sequence
ttcaagcatacttaggattaggtag

SEQ ID NO: 29986 - DNA, 25 bp, Probe sequence
tgatagagaaagccagttaaacgat

SEQ ID NO: 29987 - DNA, 25 bp, Probe sequence
gatagagaaagccagttaaacgatg

SEQ ID NO: 29988 - DNA, 25 bp, Probe sequence
gccagttaaacgatgctataaagat

SEQ ID NO: 29989 - DNA, 25 bp, Probe sequence
gtgatagagaaagccagttaaacga

SEQ ID NO: 29990 - DNA, 25 bp, Probe sequence
aactgttggaatgttgtttgaagac

SEQ ID NO: 29991 - DNA, 25 bp, Probe sequence
aatattaagtggctatgcagaagtt

SEQ ID NO: 29992 - DNA, 25 bp, Probe sequence
gcggtaaagtgggtattaactcaaa

SEQ ID NO: 29993 - DNA, 25 bp, Probe sequence
ttgaccatattagcacgtatattga

SEQ ID NO: 29994 - DNA, 25 bp, Probe sequence
tgaccatattagcacgtatattgat

SEQ ID NO: 29995 - DNA, 25 bp, Probe sequence
tattgctaaaggtattgaaacgaag

SEQ ID NO: 29996 - DNA, 25 bp, Probe sequence
gcaattgaccatattagcacgtata

SEQ ID NO: 29997 - DNA, 25 bp, Probe sequence
atgattctagtgttggcggtaaagt

SEQ ID NO: 29998 - DNA, 25 bp, Probe sequence
gaccatattagcacgtatattgatc

SEQ ID NO: 29999 - DNA, 25 bp, Probe sequence
catgattctagtgttggcggtaaag

SEQ ID NO: 30000 - DNA, 25 bp, Probe sequence
gcagaccatcattactatcaaccat

SEQ ID NO: 30001 - DNA, 25 bp, Probe sequence
accgtagcatcaagactattaagaa

SEQ ID NO: 30002 - DNA, 25 bp, Probe sequence
tgttaccgtagcatcaagactatta

SEQ ID NO: 30003 - DNA, 25 bp, Probe sequence
gtgttaccgtagcatcaagactatt

SEQ ID NO: 30004 - DNA, 25 bp, Probe sequence
gctctaactattcacctgactatgt

SEQ ID NO: 30005 - DNA, 25 bp, Probe sequence
tgctctaactattcacctgactatg

SEQ ID NO: 30006 - DNA, 25 bp, Probe sequence
ttgctctaactattcacctgactat

SEQ ID NO: 30007 - DNA, 25 bp, Probe sequence
cagcagaccatcattactatcaacc

SEQ ID NO: 30008 - DNA, 25 bp, Probe sequence
ccagcagaccatcattactatcaac

SEQ ID NO: 30009 - DNA, 25 bp, Probe sequence
acatccttataaaacatcagaacca

SEQ ID NO: 30010 - DNA, 25 bp, Probe sequence
cgacatccttataaaacatcagaac

SEQ ID NO: 30011 - DNA, 25 bp, Probe sequence
catccttataaaacatcagaaccac

SEQ ID NO: 30012 - DNA, 25 bp, Probe sequence
atccttataaaacatcagaaccact

SEQ ID NO: 30013 - DNA, 25 bp, Probe sequence
gacatccttataaaacatcagaacc

SEQ ID NO: 30014 - DNA, 25 bp, Probe sequence
tcgacatccttataaaacatcagaa

SEQ ID NO: 30015 - DNA, 25 bp, Probe sequence
tccttataaaacatcagaaccacta

SEQ ID NO: 30016 - DNA, 25 bp, Probe sequence
atcgacatccttataaaacatcaga

SEQ ID NO: 30017 - DNA, 25 bp, Probe sequence
aatcgacatccttataaaacatcag

SEQ ID NO: 30018 - DNA, 25 bp, Probe sequence
tcgaaagagatgtatgttgagcaaa

SEQ ID NO: 30019 - DNA, 25 bp, Probe sequence
atcgaaagagatgtatgttgagcaa

SEQ ID NO: 30020 - DNA, 25 bp, Probe sequence
cgaaagagatgtatgttgagcaaaa

SEQ ID NO: 30021 - DNA, 25 bp, Probe sequence
catcgaaagagatgtatgttgagca

SEQ ID NO: 30022 - DNA, 25 bp, Probe sequence
aaagtattagaaacatcgaaagaga

SEQ ID NO: 30023 - DNA, 25 bp, Probe sequence
aagtattagaaacatcgaaagagat

SEQ ID NO: 30024 - DNA, 25 bp, Probe sequence
agtattagaaacatcgaaagagatg

SEQ ID NO: 30025 - DNA, 25 bp, Probe sequence
taaagtattagaaacatcgaaagag

SEQ ID NO: 30026 - DNA, 25 bp, Probe sequence
tcacatggacctcaattaacagtta

SEQ ID NO: 30027 - DNA, 25 bp, Probe sequence
gaatcacatggacctcaattaacag

SEQ ID NO: 30028 - DNA, 25 bp, Probe sequence
agaatcacatggacctcaattaaca

SEQ ID NO: 30029 - DNA, 25 bp, Probe sequence
atcacatggacctcaattaacagtt

SEQ ID NO: 30030 - DNA, 25 bp, Probe sequence
aatcacatggacctcaattaacagt

SEQ ID NO: 30031 - DNA, 25 bp, Probe sequence
cacatggacctcaattaacagttat

SEQ ID NO: 30032 - DNA, 25 bp, Probe sequence
gagaatcacatggacctcaattaac

SEQ ID NO: 30033 - DNA, 25 bp, Probe sequence
ggagaatcacatggacctcaattaa

SEQ ID NO: 30034 - DNA, 25 bp, Probe sequence
acatggacctcaattaacagttatt

SEQ ID NO: 30035 - DNA, 25 bp, Probe sequence
attgttcattgtaggtagagagcat

SEQ ID NO: 30036 - DNA, 25 bp, Probe sequence
attgaagcgttagaatatggtatgc

SEQ ID NO: 30037 - DNA, 25 bp, Probe sequence
atatcgttggtgttgaaggtgtaat

SEQ ID NO: 30038 - DNA, 25 bp, Probe sequence
aattgttcattgtaggtagagagca

SEQ ID NO: 30039 - DNA, 25 bp, Probe sequence
gtagagtattccgtaatgaaggtgt

SEQ ID NO: 30040 - DNA, 25 bp, Probe sequence
ttggtagagtattccgtaatgaagg

SEQ ID NO: 30041 - DNA, 25 bp, Probe sequence
ggatgaagattacattgaagcgtta

SEQ ID NO: 30042 - DNA, 25 bp, Probe sequence
ggtagagtattccgtaatgaaggtg

SEQ ID NO: 30043 - DNA, 25 bp, Probe sequence
tggtagagtattccgtaatgaaggt

SEQ ID NO: 30044 - DNA, 25 bp, Probe sequence
attaatggaattactatatggtgct

SEQ ID NO: 30045 - DNA, 25 bp, Probe sequence
ttaatggaattactatatggtgcta

SEQ ID NO: 30046 - DNA, 25 bp, Probe sequence
ttgaagtcaaagtataacaaaagcg

SEQ ID NO: 30047 - DNA, 25 bp, Probe sequence
aatggaattactatatggtgctata

SEQ ID NO: 30048 - DNA, 25 bp, Probe sequence
tggaattactatatggtgctatatt

SEQ ID NO: 30049 - DNA, 25 bp, Probe sequence
taatggaattactatatggtgctat

SEQ ID NO: 30050 - DNA, 25 bp, Probe sequence
aattaatggaattactatatggtgc

SEQ ID NO: 30051 - DNA, 25 bp, Probe sequence
cgattattttggggattttaatgtt

SEQ ID NO: 30052 - DNA, 25 bp, Probe sequence
agataaaccacttaatcctataaca

SEQ ID NO: 30053 - DNA, 25 bp, Probe sequence
agcaacaacacattaccaagactat

SEQ ID NO: 30054 - DNA, 25 bp, Probe sequence
aagcaacaacacattaccaagacta

SEQ ID NO: 30055 - DNA, 25 bp, Probe sequence
ttaacaccagcagatgaggaatatc

SEQ ID NO: 30056 - DNA, 25 bp, Probe sequence
caacaacacattaccaagactatga

SEQ ID NO: 30057 - DNA, 25 bp, Probe sequence
gcaacaacacattaccaagactatg

SEQ ID NO: 30058 - DNA, 25 bp, Probe sequence
cgttattatggatgtcgttaatgct

SEQ ID NO: 30059 - DNA, 25 bp, Probe sequence
ggcgttattatggatgtcgttaatg

SEQ ID NO: 30060 - DNA, 25 bp, Probe sequence
cgattgactgtaatgaatgatgatg

SEQ ID NO: 30061 - DNA, 25 bp, Probe sequence
ccagcagatgaggaatatcacttaa

SEQ ID NO: 30062 - DNA, 25 bp, Probe sequence
gcaagatatagttggtgaagaagga

SEQ ID NO: 30063 - DNA, 25 bp, Probe sequence
tatcgctacagatattgaaggtgtc

SEQ ID NO: 30064 - DNA, 25 bp, Probe sequence
aaggtatcgctacagatattgaagg

SEQ ID NO: 30065 - DNA, 25 bp, Probe sequence
gtatcgctacagatattgaaggtgt

SEQ ID NO: 30066 - DNA, 25 bp, Probe sequence
cgcaagatatagttggtgaagaagg

SEQ ID NO: 30067 - DNA, 25 bp, Probe sequence
ggtatcgctacagatattgaaggtg

SEQ ID NO: 30068 - DNA, 25 bp, Probe sequence
aggtatcgctacagatattgaaggt

SEQ ID NO: 30069 - DNA, 25 bp, Probe sequence
caagatatagttggtgaagaaggat

SEQ ID NO: 30070 - DNA, 25 bp, Probe sequence
atcgctacagatattgaaggtgtct

SEQ ID NO: 30071 - DNA, 25 bp, Probe sequence
tcattcacggttcagattcattaga

SEQ ID NO: 30072 - DNA, 25 bp, Probe sequence
atcattcacggttcagattcattag

SEQ ID NO: 30073 - DNA, 25 bp, Probe sequence
atatcattcacggttcagattcatt

SEQ ID NO: 30074 - DNA, 25 bp, Probe sequence
aatatcattcacggttcagattcat

SEQ ID NO: 30075 - DNA, 25 bp, Probe sequence
tatcattcacggttcagattcatta

SEQ ID NO: 30076 - DNA, 25 bp, Probe sequence
caatggtagttgaaggtgaagatgc

SEQ ID NO: 30077 - DNA, 25 bp, Probe sequence
gcaatggtagttgaaggtgaagatg

SEQ ID NO: 30078 - DNA, 25 bp, Probe sequence
tagttgaaggtgaagatgcagttaa

SEQ ID NO: 30079 - DNA, 25 bp, Probe sequence
tgaaggtgaagatgcagttaatgta

SEQ ID NO: 30080 - DNA, 25 bp, Probe sequence
tggaccttctatttctcaacaacaa

SEQ ID NO: 30081 - DNA, 25 bp, Probe sequence
tctgacatcatagaacaatacatca

SEQ ID NO: 30082 - DNA, 25 bp, Probe sequence
gtctgacatcatagaacaatacatc

SEQ ID NO: 30083 - DNA, 25 bp, Probe sequence
ggaccttctatttctcaacaacaag

SEQ ID NO: 30084 - DNA, 25 bp, Probe sequence
gaccttctatttctcaacaacaagc

SEQ ID NO: 30085 - DNA, 25 bp, Probe sequence
ttggaccttctatttctcaacaaca

SEQ ID NO: 30086 - DNA, 25 bp, Probe sequence
caagcagttattgatagagaaacgc

SEQ ID NO: 30087 - DNA, 25 bp, Probe sequence
tgattggaccttctatttctcaaca

SEQ ID NO: 30088 - DNA, 25 bp, Probe sequence
attggaccttctatttctcaacaac

SEQ ID NO: 30089 - DNA, 25 bp, Probe sequence
attgtcaacttaatgaagcggaatt

SEQ ID NO: 30090 - DNA, 25 bp, Probe sequence
aattgtcaacttaatgaagcggaat

SEQ ID NO: 30091 - DNA, 25 bp, Probe sequence
ttgtcaacttaatgaagcggaatta

SEQ ID NO: 30092 - DNA, 25 bp, Probe sequence
gcagccattgttagagatgaaatta

SEQ ID NO: 30093 - DNA, 25 bp, Probe sequence
aagcagccattgttagagatgaaat

SEQ ID NO: 30094 - DNA, 25 bp, Probe sequence
ggaagcagccattgttagagatgaa

SEQ ID NO: 30095 - DNA, 25 bp, Probe sequence
agcagccattgttagagatgaaatt

SEQ ID NO: 30096 - DNA, 25 bp, Probe sequence
aaattgtcaacttaatgaagcggaa

SEQ ID NO: 30097 - DNA, 25 bp, Probe sequence
tgtcaacttaatgaagcggaattaa

SEQ ID NO: 30098 - DNA, 25 bp, Probe sequence
atatgaatggttacagcaatctacg

SEQ ID NO: 30099 - DNA, 25 bp, Probe sequence
agaagaatatgaatggttacagcaa

SEQ ID NO: 30100 - DNA, 25 bp, Probe sequence
aagaagaatatgaatggttacagca

SEQ ID NO: 30101 - DNA, 25 bp, Probe sequence
agaatatgaatggttacagcaatct

SEQ ID NO: 30102 - DNA, 25 bp, Probe sequence
aagaatatgaatggttacagcaatc

SEQ ID NO: 30103 - DNA, 25 bp, Probe sequence
gaagaatatgaatggttacagcaat

SEQ ID NO: 30104 - DNA, 25 bp, Probe sequence
tatgaatggttacagcaatctacgt

SEQ ID NO: 30105 - DNA, 25 bp, Probe sequence
aatatgaatggttacagcaatctac

SEQ ID NO: 30106 - DNA, 25 bp, Probe sequence
atgaatggttacagcaatctacgtt

SEQ ID NO: 30107 - DNA, 25 bp, Probe sequence
aagaggaccatattcgtattcaagc

SEQ ID NO: 30108 - DNA, 25 bp, Probe sequence
aacgagcagatatactaagagaaca

SEQ ID NO: 30109 - DNA, 25 bp, Probe sequence
acgagcagatatactaagagaacat

SEQ ID NO: 30110 - DNA, 25 bp, Probe sequence
agaatgataactatggaagaggctt

SEQ ID NO: 30111 - DNA, 25 bp, Probe sequence
gaagaggaccatattcgtattcaag

SEQ ID NO: 30112 - DNA, 25 bp, Probe sequence
gtagaatgataactatggaagaggc

SEQ ID NO: 30113 - DNA, 25 bp, Probe sequence
tagaatgataactatggaagaggct

SEQ ID NO: 30114 - DNA, 25 bp, Probe sequence
caatataggtactggtatgagagca

SEQ ID NO: 30115 - DNA, 25 bp, Probe sequence
aatgaagaggaccatattcgtattc

SEQ ID NO: 30116 - DNA, 25 bp, Probe sequence
atgagacaccttgatgacattacat

SEQ ID NO: 30117 - DNA, 25 bp, Probe sequence
tgagacaccttgatgacattacata

SEQ ID NO: 30118 - DNA, 25 bp, Probe sequence
gagacaccttgatgacattacatat

SEQ ID NO: 30119 - DNA, 25 bp, Probe sequence
agacaccttgatgacattacatata

SEQ ID NO: 30120 - DNA, 25 bp, Probe sequence
atgatattccagatgttgccaaagt

SEQ ID NO: 30121 - DNA, 25 bp, Probe sequence
tatgatattccagatgttgccaaag

SEQ ID NO: 30122 - DNA, 25 bp, Probe sequence
aatgagacaccttgatgacattaca

SEQ ID NO: 30123 - DNA, 25 bp, Probe sequence
caatgagacaccttgatgacattac

SEQ ID NO: 30124 - DNA, 25 bp, Probe sequence
acaactgttagcaaattggaaagac

SEQ ID NO: 30125 - DNA, 25 bp, Probe sequence
ggttcaagtgatggacaagattatg

SEQ ID NO: 30126 - DNA, 25 bp, Probe sequence
tggttcaagtgatggacaagattat

SEQ ID NO: 30127 - DNA, 25 bp, Probe sequence
accttcagtagtagatacagttgct

SEQ ID NO: 30128 - DNA, 25 bp, Probe sequence
atgatgatggtggacaattaactga

SEQ ID NO: 30129 - DNA, 25 bp, Probe sequence
tgatgatggtggacaattaactgaa

SEQ ID NO: 30130 - DNA, 25 bp, Probe sequence
ccttcagtagtagatacagttgcta

SEQ ID NO: 30131 - DNA, 25 bp, Probe sequence
aaccttcagtagtagatacagttgc

SEQ ID NO: 30132 - DNA, 25 bp, Probe sequence
gcaagccatagtgaataatgaggta

SEQ ID NO: 30133 - DNA, 25 bp, Probe sequence
gtggttcaagtgatggacaagatta

SEQ ID NO: 30134 - DNA, 25 bp, Probe sequence
caagtaaagttccagcattcaaagc

SEQ ID NO: 30135 - DNA, 25 bp, Probe sequence
gcaagtaaagttccagcattcaaag

SEQ ID NO: 30136 - DNA, 25 bp, Probe sequence
ttaattggtttcggtaactttgagg

SEQ ID NO: 30137 - DNA, 25 bp, Probe sequence
aattggtttcggtaactttgaggta

SEQ ID NO: 30138 - DNA, 25 bp, Probe sequence
taattggtttcggtaactttgaggt

SEQ ID NO: 30139 - DNA, 25 bp, Probe sequence
agcaagtaaagttccagcattcaaa

SEQ ID NO: 30140 - DNA, 25 bp, Probe sequence
cagcaagtaaagttccagcattcaa

SEQ ID NO: 30141 - DNA, 25 bp, Probe sequence
attggtttcggtaactttgaggtac

SEQ ID NO: 30142 - DNA, 25 bp, Probe sequence
aaccctcaaactggtaaagaaattg

SEQ ID NO: 30143 - DNA, 25 bp, Probe sequence
ttgtgtgagcgataatatcaatgat

SEQ ID NO: 30144 - DNA, 25 bp, Probe sequence
ggtgtaaattgtgtgagcgataata

SEQ ID NO: 30145 - DNA, 25 bp, Probe sequence
aggtgtaaattgtgtgagcgataat

SEQ ID NO: 30146 - DNA, 25 bp, Probe sequence
aaggtgtaaattgtgtgagcgataa

SEQ ID NO: 30147 - DNA, 25 bp, Probe sequence
aaaggtgtaaattgtgtgagcgata

SEQ ID NO: 30148 - DNA, 25 bp, Probe sequence
attgtgtgagcgataatatcaatga

SEQ ID NO: 30149 - DNA, 25 bp, Probe sequence
tgtgtgagcgataatatcaatgata

SEQ ID NO: 30150 - DNA, 25 bp, Probe sequence
aattgtgtgagcgataatatcaatg

SEQ ID NO: 30151 - DNA, 25 bp, Probe sequence
gtgtaaattgtgtgagcgataatat

SEQ ID NO: 30152 - DNA, 25 bp, Probe sequence
gtgtattaggtggaggtattgtgag

SEQ ID NO: 30153 - DNA, 25 bp, Probe sequence
agattgctatattggagaagttggt

SEQ ID NO: 30154 - DNA, 25 bp, Probe sequence
cgacggattagattgctatattgga

SEQ ID NO: 30155 - DNA, 25 bp, Probe sequence
acggattagattgctatattggaga

SEQ ID NO: 30156 - DNA, 25 bp, Probe sequence
gattgctatattggagaagttggtt

SEQ ID NO: 30157 - DNA, 25 bp, Probe sequence
gacggattagattgctatattggag

SEQ ID NO: 30158 - DNA, 25 bp, Probe sequence
atgtatggcttgtggttatcaatct

SEQ ID NO: 30159 - DNA, 25 bp, Probe sequence
aatgtatggcttgtggttatcaatc

SEQ ID NO: 30160 - DNA, 25 bp, Probe sequence
gaatgtatggcttgtggttatcaat

SEQ ID NO: 30161 - DNA, 25 bp, Probe sequence
gtatcggtgacttaatcgttacttg

SEQ ID NO: 30162 - DNA, 25 bp, Probe sequence
ggtatcggtgacttaatcgttactt

SEQ ID NO: 30163 - DNA, 25 bp, Probe sequence
tatcggtgacttaatcgttacttgc

SEQ ID NO: 30164 - DNA, 25 bp, Probe sequence
tggtatcggtgacttaatcgttact

SEQ ID NO: 30165 - DNA, 25 bp, Probe sequence
gtggtatcggtgacttaatcgttac

SEQ ID NO: 30166 - DNA, 25 bp, Probe sequence
atatcatcgcagtagcaagtggtat

SEQ ID NO: 30167 - DNA, 25 bp, Probe sequence
taacatcatcgctacttcagatatg

SEQ ID NO: 30168 - DNA, 25 bp, Probe sequence
aatatcatcgcagtagcaagtggta

SEQ ID NO: 30169 - DNA, 25 bp, Probe sequence
ttaggtggtatcggtgacttaatcg

SEQ ID NO: 30170 - DNA, 25 bp, Probe sequence
tattatgcgtagaagtgctgttgaa

SEQ ID NO: 30171 - DNA, 25 bp, Probe sequence
ttattatgcgtagaagtgctgttga

SEQ ID NO: 30172 - DNA, 25 bp, Probe sequence
cactatgtagatggcattatcggta

SEQ ID NO: 30173 - DNA, 25 bp, Probe sequence
atcactatgtagatggcattatcgg

SEQ ID NO: 30174 - DNA, 25 bp, Probe sequence
tgtagatggcattatcggtagtatt

SEQ ID NO: 30175 - DNA, 25 bp, Probe sequence
ctatgtagatggcattatcggtagt

SEQ ID NO: 30176 - DNA, 25 bp, Probe sequence
actatgtagatggcattatcggtag

SEQ ID NO: 30177 - DNA, 25 bp, Probe sequence
atgtagatggcattatcggtagtat

SEQ ID NO: 30178 - DNA, 25 bp, Probe sequence
tcactatgtagatggcattatcggt

SEQ ID NO: 30179 - DNA, 25 bp, Probe sequence
gccatagatgaagcggatgttatta

SEQ ID NO: 30180 - DNA, 25 bp, Probe sequence
cgagagacgctattgatacagagta

SEQ ID NO: 30181 - DNA, 25 bp, Probe sequence
ccatagatgaagcggatgttattat

SEQ ID NO: 30182 - DNA, 25 bp, Probe sequence
aacgagagacgctattgatacagag

SEQ ID NO: 30183 - DNA, 25 bp, Probe sequence
ttaggtcttggtgacttgttagatg

SEQ ID NO: 30184 - DNA, 25 bp, Probe sequence
acagagtatagttatgatggacaag

SEQ ID NO: 30185 - DNA, 25 bp, Probe sequence
gagagacgctattgatacagagtat

SEQ ID NO: 30186 - DNA, 25 bp, Probe sequence
caacgagagacgctattgatacaga

SEQ ID NO: 30187 - DNA, 25 bp, Probe sequence
cagagtatagttatgatggacaaga

SEQ ID NO: 30188 - DNA, 25 bp, Probe sequence
gctattcgcataccttccaaactat

SEQ ID NO: 30189 - DNA, 25 bp, Probe sequence
aagtttaggttggtgggatttattt

SEQ ID NO: 30190 - DNA, 25 bp, Probe sequence
aaagtttaggttggtgggatttatt

SEQ ID NO: 30191 - DNA, 25 bp, Probe sequence
attcgcataccttccaaactataat

SEQ ID NO: 30192 - DNA, 25 bp, Probe sequence
ttcgcataccttccaaactataatt

SEQ ID NO: 30193 - DNA, 25 bp, Probe sequence
tcgcataccttccaaactataattt

SEQ ID NO: 30194 - DNA, 25 bp, Probe sequence
ctattcgcataccttccaaactata

SEQ ID NO: 30195 - DNA, 25 bp, Probe sequence
tattcgcataccttccaaactataa

SEQ ID NO: 30196 - DNA, 25 bp, Probe sequence
ccataggtttgattttaactacgca

SEQ ID NO: 30197 - DNA, 25 bp, Probe sequence
attgaaactattgaaggcttccaac

SEQ ID NO: 30198 - DNA, 25 bp, Probe sequence
aactattgaaggcttccaacaaatg

SEQ ID NO: 30199 - DNA, 25 bp, Probe sequence
gaaactattgaaggcttccaacaaa

SEQ ID NO: 30200 - DNA, 25 bp, Probe sequence
aaactattgaaggcttccaacaaat

SEQ ID NO: 30201 - DNA, 25 bp, Probe sequence
tattgaaggcttccaacaaatgttt

SEQ ID NO: 30202 - DNA, 25 bp, Probe sequence
ctattgaaggcttccaacaaatgtt

SEQ ID NO: 30203 - DNA, 25 bp, Probe sequence
actattgaaggcttccaacaaatgt

SEQ ID NO: 30204 - DNA, 25 bp, Probe sequence
tgaaactattgaaggcttccaacaa

SEQ ID NO: 30205 - DNA, 25 bp, Probe sequence
ttgaaactattgaaggcttccaaca

SEQ ID NO: 30206 - DNA, 25 bp, Probe sequence
tgagcaatatcgtgacttaggttat

SEQ ID NO: 30207 - DNA, 25 bp, Probe sequence
ttgagcaatatcgtgacttaggtta

SEQ ID NO: 30208 - DNA, 25 bp, Probe sequence
ttattgcgttattaggttggtctcc

SEQ ID NO: 30209 - DNA, 25 bp, Probe sequence
cgtcaacatatctaccaaccattaa

SEQ ID NO: 30210 - DNA, 25 bp, Probe sequence
attgagcaatatcgtgacttaggtt

SEQ ID NO: 30211 - DNA, 25 bp, Probe sequence
cagagttaatgacgcacttattcag

SEQ ID NO: 30212 - DNA, 25 bp, Probe sequence
taccagagttaatgacgcacttatt

SEQ ID NO: 30213 - DNA, 25 bp, Probe sequence
agagttaatgacgcacttattcagt

SEQ ID NO: 30214 - DNA, 25 bp, Probe sequence
gagcaatatcgtgacttaggttatt

SEQ ID NO: 30215 - DNA, 25 bp, Probe sequence
cattgaaggtgtcgtagtaagattg

SEQ ID NO: 30216 - DNA, 25 bp, Probe sequence
attgaaggtgtcgtagtaagattgg

SEQ ID NO: 30217 - DNA, 25 bp, Probe sequence
ttcctattagtcaactatctacgca

SEQ ID NO: 30218 - DNA, 25 bp, Probe sequence
tcctattagtcaactatctacgcat

SEQ ID NO: 30219 - DNA, 25 bp, Probe sequence
cctattagtcaactatctacgcatc

SEQ ID NO: 30220 - DNA, 25 bp, Probe sequence
agtcaactatctacgcatcatattg

SEQ ID NO: 30221 - DNA, 25 bp, Probe sequence
ctattagtcaactatctacgcatca

SEQ ID NO: 30222 - DNA, 25 bp, Probe sequence
cgaagaagaagataatccaacaatt

SEQ ID NO: 30223 - DNA, 25 bp, Probe sequence
gtacaacaagttgaagacaagcaag

SEQ ID NO: 30224 - DNA, 25 bp, Probe sequence
acaatcagttccaagttattcaacg

SEQ ID NO: 30225 - DNA, 25 bp, Probe sequence
atattgttaagcaagatggtgttcg

SEQ ID NO: 30226 - DNA, 25 bp, Probe sequence
caatcagttccaagttattcaacgg

SEQ ID NO: 30227 - DNA, 25 bp, Probe sequence
atcagttccaagttattcaacggtt

SEQ ID NO: 30228 - DNA, 25 bp, Probe sequence
aatcagttccaagttattcaacggt

SEQ ID NO: 30229 - DNA, 25 bp, Probe sequence
ataatgtgacaatctatcaaggcgt

SEQ ID NO: 30230 - DNA, 25 bp, Probe sequence
catattgttaagcaagatggtgttc

SEQ ID NO: 30231 - DNA, 25 bp, Probe sequence
caggacatattgttaagcaagatgg

SEQ ID NO: 30232 - DNA, 25 bp, Probe sequence
ccaggacatattgttaagcaagatg

SEQ ID NO: 30233 - DNA, 25 bp, Probe sequence
agtgacattagatacgacaggcaag

SEQ ID NO: 30234 - DNA, 25 bp, Probe sequence
cagtgacattagatacgacaggcaa

SEQ ID NO: 30235 - DNA, 25 bp, Probe sequence
agcgagcagaaagaagatataaaga

SEQ ID NO: 30236 - DNA, 25 bp, Probe sequence
agagcgagcagaaagaagatataaa

SEQ ID NO: 30237 - DNA, 25 bp, Probe sequence
aagagcgagcagaaagaagatataa

SEQ ID NO: 30238 - DNA, 25 bp, Probe sequence
gagcgagcagaaagaagatataaag

SEQ ID NO: 30239 - DNA, 25 bp, Probe sequence
gaagagcgagcagaaagaagatata

SEQ ID NO: 30240 - DNA, 25 bp, Probe sequence
ttagataacgaagatgtaacagact

SEQ ID NO: 30241 - DNA, 25 bp, Probe sequence
taaagcagataaaggtcaatgtgtc

SEQ ID NO: 30242 - DNA, 25 bp, Probe sequence
gtggagattattcgccttcaattaa

SEQ ID NO: 30243 - DNA, 25 bp, Probe sequence
ctatatcgtggtggagattattcgc

SEQ ID NO: 30244 - DNA, 25 bp, Probe sequence
tctatatcgtggtggagattattcg

SEQ ID NO: 30245 - DNA, 25 bp, Probe sequence
ggtggagattattcgccttcaatta

SEQ ID NO: 30246 - DNA, 25 bp, Probe sequence
ggttctatatcgtggtggagattat

SEQ ID NO: 30247 - DNA, 25 bp, Probe sequence
cggttctatatcgtggtggagatta

SEQ ID NO: 30248 - DNA, 25 bp, Probe sequence
actgaagatactgtgacttatgaag

SEQ ID NO: 30249 - DNA, 25 bp, Probe sequence
tatatcgtggtggagattattcgcc

SEQ ID NO: 30250 - DNA, 25 bp, Probe sequence
gttctatatcgtggtggagattatt

SEQ ID NO: 30251 - DNA, 25 bp, Probe sequence
tggaagatacggttattgttggtag

SEQ ID NO: 30252 - DNA, 25 bp, Probe sequence
gtggaagatacggttattgttggta

SEQ ID NO: 30253 - DNA, 25 bp, Probe sequence
ctgttagagaagcgattattactgg

SEQ ID NO: 30254 - DNA, 25 bp, Probe sequence
ggaagatacggttattgttggtagg

SEQ ID NO: 30255 - DNA, 25 bp, Probe sequence
gaagatacggttattgttggtaggc

SEQ ID NO: 30256 - DNA, 25 bp, Probe sequence
agatacggttattgttggtaggcat

SEQ ID NO: 30257 - DNA, 25 bp, Probe sequence
cttatattagacggcttagaagacc

SEQ ID NO: 30258 - DNA, 25 bp, Probe sequence
aagatacggttattgttggtaggca

SEQ ID NO: 30259 - DNA, 25 bp, Probe sequence
gatacggttattgttggtaggcatg

SEQ ID NO: 30260 - DNA, 25 bp, Probe sequence
gtaacaagtgatatgagtgagcaac

SEQ ID NO: 30261 - DNA, 25 bp, Probe sequence
taacaagtgatatgagtgagcaaca

SEQ ID NO: 30262 - DNA, 25 bp, Probe sequence
tgtaacaagtgatatgagtgagcaa

SEQ ID NO: 30263 - DNA, 25 bp, Probe sequence
aacaagtgatatgagtgagcaacat

SEQ ID NO: 30264 - DNA, 25 bp, Probe sequence
gttgtaacaagtgatatgagtgagc

SEQ ID NO: 30265 - DNA, 25 bp, Probe sequence
ttgtaacaagtgatatgagtgagca

SEQ ID NO: 30266 - DNA, 25 bp, Probe sequence
cagttgtaacaagtgatatgagtga

SEQ ID NO: 30267 - DNA, 25 bp, Probe sequence
acaagtgatatgagtgagcaacatg

SEQ ID NO: 30268 - DNA, 25 bp, Probe sequence
agttgtaacaagtgatatgagtgag

SEQ ID NO: 30269 - DNA, 25 bp, Probe sequence
ggatacaatagagaatacggagcaa

SEQ ID NO: 30270 - DNA, 25 bp, Probe sequence
tacaatagagaatacggagcaacag

SEQ ID NO: 30271 - DNA, 25 bp, Probe sequence
atacaatagagaatacggagcaaca

SEQ ID NO: 30272 - DNA, 25 bp, Probe sequence
caggatacaatagagaatacggagc

SEQ ID NO: 30273 - DNA, 25 bp, Probe sequence
aggatacaatagagaatacggagca

SEQ ID NO: 30274 - DNA, 25 bp, Probe sequence
attcaatactacggttcaggttcac

SEQ ID NO: 30275 - DNA, 25 bp, Probe sequence
gatacaatagagaatacggagcaac

SEQ ID NO: 30276 - DNA, 25 bp, Probe sequence
caattcaatactacggttcaggttc

SEQ ID NO: 30277 - DNA, 25 bp, Probe sequence
aattcaatactacggttcaggttca

SEQ ID NO: 30278 - DNA, 25 bp, Probe sequence
gtgtgaacaatataagccgagagaa

SEQ ID NO: 30279 - DNA, 25 bp, Probe sequence
aatgtgtgaacaatataagccgaga

SEQ ID NO: 30280 - DNA, 25 bp, Probe sequence
taatgtgtgaacaatataagccgag

SEQ ID NO: 30281 - DNA, 25 bp, Probe sequence
tgacaactcaagacagtacaatcaa

SEQ ID NO: 30282 - DNA, 25 bp, Probe sequence
atgtgtgaacaatataagccgagag

SEQ ID NO: 30283 - DNA, 25 bp, Probe sequence
ttaatgtgtgaacaatataagccga

SEQ ID NO: 30284 - DNA, 25 bp, Probe sequence
tgtgtgaacaatataagccgagaga

SEQ ID NO: 30285 - DNA, 25 bp, Probe sequence
gtgaacaatataagccgagagaaat

SEQ ID NO: 30286 - DNA, 25 bp, Probe sequence
tgtgaacaatataagccgagagaaa

SEQ ID NO: 30287 - DNA, 25 bp, Probe sequence
aagatattcgcacaatcattcactt

SEQ ID NO: 30288 - DNA, 25 bp, Probe sequence
tatgaattatcaagagcgacacaca

SEQ ID NO: 30289 - DNA, 25 bp, Probe sequence
atatgaattatcaagagcgacacac

SEQ ID NO: 30290 - DNA, 25 bp, Probe sequence
gatggtgaactaagtcaggcaatta

SEQ ID NO: 30291 - DNA, 25 bp, Probe sequence
aattatcaagagcgacacacagttc

SEQ ID NO: 30292 - DNA, 25 bp, Probe sequence
gaattatcaagagcgacacacagtt

SEQ ID NO: 30293 - DNA, 25 bp, Probe sequence
ttggatcaatgtagacggaagtatt

SEQ ID NO: 30294 - DNA, 25 bp, Probe sequence
caacaagtccttctaactacattca

SEQ ID NO: 30295 - DNA, 25 bp, Probe sequence
gatatgaattatcaagagcgacaca

SEQ ID NO: 30296 - DNA, 25 bp, Probe sequence
taaaggcgttaagtctgaaatggaa

SEQ ID NO: 30297 - DNA, 25 bp, Probe sequence
ttaaaggcgttaagtctgaaatgga

SEQ ID NO: 30298 - DNA, 25 bp, Probe sequence
aaaggcgttaagtctgaaatggaaa

SEQ ID NO: 30299 - DNA, 25 bp, Probe sequence
gccttagatttaggaattacagcat

SEQ ID NO: 30300 - DNA, 25 bp, Probe sequence
atgccttagatttaggaattacagc

SEQ ID NO: 30301 - DNA, 25 bp, Probe sequence
tttaaaggcgttaagtctgaaatgg

SEQ ID NO: 30302 - DNA, 25 bp, Probe sequence
gccgacgaaagaagagctatttaaa

SEQ ID NO: 30303 - DNA, 25 bp, Probe sequence
agatttaggaattacagcattgaaa

SEQ ID NO: 30304 - DNA, 25 bp, Probe sequence
aaaggatttggaggttgagcagatg

SEQ ID NO: 30305 - DNA, 25 bp, Probe sequence
caaggctatgatgaaccaatgtata

SEQ ID NO: 30306 - DNA, 25 bp, Probe sequence
gcaaggctatgatgaaccaatgtat

SEQ ID NO: 30307 - DNA, 25 bp, Probe sequence
atatagcggctcaacaacaagttaa

SEQ ID NO: 30308 - DNA, 25 bp, Probe sequence
gatatagcggctcaacaacaagtta

SEQ ID NO: 30309 - DNA, 25 bp, Probe sequence
gaagatatagcggctcaacaacaag

SEQ ID NO: 30310 - DNA, 25 bp, Probe sequence
aagatatagcggctcaacaacaagt

SEQ ID NO: 30311 - DNA, 25 bp, Probe sequence
gcaaacatttcaagcaattcaacta

SEQ ID NO: 30312 - DNA, 25 bp, Probe sequence
gctatgatgaaccaatgtatacgag

SEQ ID NO: 30313 - DNA, 25 bp, Probe sequence
ggctatgatgaaccaatgtatacga

SEQ ID NO: 30314 - DNA, 25 bp, Probe sequence
aatccattgttaccagaagaagttc

SEQ ID NO: 30315 - DNA, 25 bp, Probe sequence
atccattgttaccagaagaagttcg

SEQ ID NO: 30316 - DNA, 25 bp, Probe sequence
cattgttaccagaagaagttcgctt

SEQ ID NO: 30317 - DNA, 25 bp, Probe sequence
gaatcaagttggtgaagttcaagaa

SEQ ID NO: 30318 - DNA, 25 bp, Probe sequence
agatgaatcatggtatgtggtaaga

SEQ ID NO: 30319 - DNA, 25 bp, Probe sequence
cagatgaatcatggtatgtggtaag

SEQ ID NO: 30320 - DNA, 25 bp, Probe sequence
gatgaatcatggtatgtggtaagaa

SEQ ID NO: 30321 - DNA, 25 bp, Probe sequence
gacagatgaatcatggtatgtggta

SEQ ID NO: 30322 - DNA, 25 bp, Probe sequence
acagatgaatcatggtatgtggtaa

SEQ ID NO: 30323 - DNA, 25 bp, Probe sequence
ttcttattaactgcttacgccatct

SEQ ID NO: 30324 - DNA, 25 bp, Probe sequence
tcttattaactgcttacgccatcta

SEQ ID NO: 30325 - DNA, 25 bp, Probe sequence
cttattaactgcttacgccatctat

SEQ ID NO: 30326 - DNA, 25 bp, Probe sequence
tattaactgcttacgccatctataa

SEQ ID NO: 30327 - DNA, 25 bp, Probe sequence
ttattaactgcttacgccatctata

SEQ ID NO: 30328 - DNA, 25 bp, Probe sequence
tttcttattaactgcttacgccatc

SEQ ID NO: 30329 - DNA, 25 bp, Probe sequence
gtttcttattaactgcttacgccat

SEQ ID NO: 30330 - DNA, 25 bp, Probe sequence
attaactgcttacgccatctataaa

SEQ ID NO: 30331 - DNA, 25 bp, Probe sequence
tgccaccatacttaactttagattt

SEQ ID NO: 30332 - DNA, 25 bp, Probe sequence
cgtagtatgggtatcgttgtagaat

SEQ ID NO: 30333 - DNA, 25 bp, Probe sequence
ctatgcgtattatcgaaggtactgc

SEQ ID NO: 30334 - DNA, 25 bp, Probe sequence
gctatgcgtattatcgaaggtactg

SEQ ID NO: 30335 - DNA, 25 bp, Probe sequence
agctatgcgtattatcgaaggtact

SEQ ID NO: 30336 - DNA, 25 bp, Probe sequence
cagctatgcgtattatcgaaggtac

SEQ ID NO: 30337 - DNA, 25 bp, Probe sequence
gtattatcgaaggtactgcacgtag

SEQ ID NO: 30338 - DNA, 25 bp, Probe sequence
atgggattctgtaaagagttcaatg

SEQ ID NO: 30339 - DNA, 25 bp, Probe sequence
ttcaatgcacgtactcaagatcaag

SEQ ID NO: 30340 - DNA, 25 bp, Probe sequence
tattatcgaaggtactgcacgtagt

SEQ ID NO: 30341 - DNA, 25 bp, Probe sequence
atcaccaatgtatcactctccaatt

SEQ ID NO: 30342 - DNA, 25 bp, Probe sequence
caccaatgtatcactctccaattac

SEQ ID NO: 30343 - DNA, 25 bp, Probe sequence
tcaccaatgtatcactctccaatta

SEQ ID NO: 30344 - DNA, 25 bp, Probe sequence
accaatgtatcactctccaattacg

SEQ ID NO: 30345 - DNA, 25 bp, Probe sequence
taatcaagcaaacaacattccaaac

SEQ ID NO: 30346 - DNA, 25 bp, Probe sequence
tcaagcaaacaacattccaaacaat

SEQ ID NO: 30347 - DNA, 25 bp, Probe sequence
atcaagcaaacaacattccaaacaa

SEQ ID NO: 30348 - DNA, 25 bp, Probe sequence
aatcaagcaaacaacattccaaaca

SEQ ID NO: 30349 - DNA, 25 bp, Probe sequence
ttaatcaagcaaacaacattccaaa

SEQ ID NO: 30350 - DNA, 25 bp, Probe sequence
caatttatatggtggatgttcttgc

SEQ ID NO: 30351 - DNA, 25 bp, Probe sequence
tttatatggtggatgttcttgcagt

SEQ ID NO: 30352 - DNA, 25 bp, Probe sequence
atttatatggtggatgttcttgcag

SEQ ID NO: 30353 - DNA, 25 bp, Probe sequence
aatttatatggtggatgttcttgca

SEQ ID NO: 30354 - DNA, 25 bp, Probe sequence
tcaatttatatggtggatgttcttg

SEQ ID NO: 30355 - DNA, 25 bp, Probe sequence
ttatttacatcgaggctacacgcta

SEQ ID NO: 30356 - DNA, 25 bp, Probe sequence
atcatacaaaccgctgtactcttta

SEQ ID NO: 30357 - DNA, 25 bp, Probe sequence
tatcatacaaaccgctgtactcttt

SEQ ID NO: 30358 - DNA, 25 bp, Probe sequence
ttatcatacaaaccgctgtactctt

SEQ ID NO: 30359 - DNA, 25 bp, Probe sequence
tgactatgtaggtgaagcagaatac

SEQ ID NO: 30360 - DNA, 25 bp, Probe sequence
gactatgtaggtgaagcagaatacg

SEQ ID NO: 30361 - DNA, 25 bp, Probe sequence
actacagtgttgaagaagcaattaa

SEQ ID NO: 30362 - DNA, 25 bp, Probe sequence
ctgactatgtaggtgaagcagaata

SEQ ID NO: 30363 - DNA, 25 bp, Probe sequence
ctatgtaggtgaagcagaatacgtt

SEQ ID NO: 30364 - DNA, 25 bp, Probe sequence
tatgtaggtgaagcagaatacgttc

SEQ ID NO: 30365 - DNA, 25 bp, Probe sequence
tgaagttggtaaattaggtcgtgta

SEQ ID NO: 30366 - DNA, 25 bp, Probe sequence
cactacagtgttgaagaagcaatta

SEQ ID NO: 30367 - DNA, 25 bp, Probe sequence
atgggtgaagttggtaaattaggtc

SEQ ID NO: 30368 - DNA, 25 bp, Probe sequence
cttcacacgatggtcttgtatctat

SEQ ID NO: 30369 - DNA, 25 bp, Probe sequence
gcaatgttattacagcagaagaagt

SEQ ID NO: 30370 - DNA, 25 bp, Probe sequence
ttatggaaggcaatgttattacagc

SEQ ID NO: 30371 - DNA, 25 bp, Probe sequence
ttcacacgatggtcttgtatctatg

SEQ ID NO: 30372 - DNA, 25 bp, Probe sequence
ggcaatgttattacagcagaagaag

SEQ ID NO: 30373 - DNA, 25 bp, Probe sequence
gaaggcaatgttattacagcagaag

SEQ ID NO: 30374 - DNA, 25 bp, Probe sequence
tatggaaggcaatgttattacagca

SEQ ID NO: 30375 - DNA, 25 bp, Probe sequence
aggcaatgttattacagcagaagaa

SEQ ID NO: 30376 - DNA, 25 bp, Probe sequence
aaggcaatgttattacagcagaaga

SEQ ID NO: 30377 - DNA, 25 bp, Probe sequence
gcaggcagatgtatttgaagattta

SEQ ID NO: 30378 - DNA, 25 bp, Probe sequence
taagcaggcagatgtatttgaagat

SEQ ID NO: 30379 - DNA, 25 bp, Probe sequence
tttaagcaggcagatgtatttgaag

SEQ ID NO: 30380 - DNA, 25 bp, Probe sequence
gatttaagcaggcagatgtatttga

SEQ ID NO: 30381 - DNA, 25 bp, Probe sequence
ttaagcaggcagatgtatttgaaga

SEQ ID NO: 30382 - DNA, 25 bp, Probe sequence
atttaagcaggcagatgtatttgaa

SEQ ID NO: 30383 - DNA, 25 bp, Probe sequence
agcaggcagatgtatttgaagattt

SEQ ID NO: 30384 - DNA, 25 bp, Probe sequence
aagcaggcagatgtatttgaagatt

SEQ ID NO: 30385 - DNA, 25 bp, Probe sequence
cgatttaagcaggcagatgtatttg

SEQ ID NO: 30386 - DNA, 25 bp, Probe sequence
aagaacaattagaagaagttggagc

SEQ ID NO: 30387 - DNA, 25 bp, Probe sequence
agaacaattagaagaagttggagct

SEQ ID NO: 30388 - DNA, 25 bp, Probe sequence
gaagaagttggagctactgtagaat

SEQ ID NO: 30389 - DNA, 25 bp, Probe sequence
tagaagaagttggagctactgtaga

SEQ ID NO: 30390 - DNA, 25 bp, Probe sequence
aagaagttggagctactgtagaatt

SEQ ID NO: 30391 - DNA, 25 bp, Probe sequence
aattagaagaagttggagctactgt

SEQ ID NO: 30392 - DNA, 25 bp, Probe sequence
acaattagaagaagttggagctact

SEQ ID NO: 30393 - DNA, 25 bp, Probe sequence
ttagaagaagttggagctactgtag

SEQ ID NO: 30394 - DNA, 25 bp, Probe sequence
caattagaagaagttggagctactg

SEQ ID NO: 30395 - DNA, 25 bp, Probe sequence
accatcgagtccatcaattaagtta

SEQ ID NO: 30396 - DNA, 25 bp, Probe sequence
ccatcgagtccatcaattaagttaa

SEQ ID NO: 30397 - DNA, 25 bp, Probe sequence
aaccatcgagtccatcaattaagtt

SEQ ID NO: 30398 - DNA, 25 bp, Probe sequence
tattgtaatgagtccgattgcagaa

SEQ ID NO: 30399 - DNA, 25 bp, Probe sequence
ctattgtaatgagtccgattgcaga

SEQ ID NO: 30400 - DNA, 25 bp, Probe sequence
agcaacaatccaaatcacagtaatt

SEQ ID NO: 30401 - DNA, 25 bp, Probe sequence
tagcaacaatccaaatcacagtaat

SEQ ID NO: 30402 - DNA, 25 bp, Probe sequence
atagcaacaatccaaatcacagtaa

SEQ ID NO: 30403 - DNA, 25 bp, Probe sequence
aatagcaacaatccaaatcacagta

SEQ ID NO: 30404 - DNA, 25 bp, Probe sequence
gcaagcattacatagattagactcg

SEQ ID NO: 30405 - DNA, 25 bp, Probe sequence
cgagcaagcattacatagattagac

SEQ ID NO: 30406 - DNA, 25 bp, Probe sequence
ttaaccaatccaccaataagagcag

SEQ ID NO: 30407 - DNA, 25 bp, Probe sequence
tgtaattcagaagaagcaaggtatg

SEQ ID NO: 30408 - DNA, 25 bp, Probe sequence
agcaagcattacatagattagactc

SEQ ID NO: 30409 - DNA, 25 bp, Probe sequence
gagcaagcattacatagattagact

SEQ ID NO: 30410 - DNA, 25 bp, Probe sequence
gttgtaattcagaagaagcaaggta

SEQ ID NO: 30411 - DNA, 25 bp, Probe sequence
ttatggttcagatgttcttgttcaa

SEQ ID NO: 30412 - DNA, 25 bp, Probe sequence
attatggttcagatgttcttgttca

SEQ ID NO: 30413 - DNA, 25 bp, Probe sequence
tcgtatgaacatcggacaagtatta

SEQ ID NO: 30414 - DNA, 25 bp, Probe sequence
atggatgatgaagttgtatgtcgtt

SEQ ID NO: 30415 - DNA, 25 bp, Probe sequence
cgtatgaacatcggacaagtattag

SEQ ID NO: 30416 - DNA, 25 bp, Probe sequence
atgaacatcggacaagtattagagc

SEQ ID NO: 30417 - DNA, 25 bp, Probe sequence
ctcgtatgaacatcggacaagtatt

SEQ ID NO: 30418 - DNA, 25 bp, Probe sequence
aatggattatatggatgtatcgccg

SEQ ID NO: 30419 - DNA, 25 bp, Probe sequence
gttcctgaagaagatatgccttact

SEQ ID NO: 30420 - DNA, 25 bp, Probe sequence
attgttcctgaagaagatatgcctt

SEQ ID NO: 30421 - DNA, 25 bp, Probe sequence
tgttcctgaagaagatatgccttac

SEQ ID NO: 30422 - DNA, 25 bp, Probe sequence
caaggaacatctaatgaggcaataa

SEQ ID NO: 30423 - DNA, 25 bp, Probe sequence
tcaaggaacatctaatgaggcaata

SEQ ID NO: 30424 - DNA, 25 bp, Probe sequence
caacacatacgatactgtaccacta

SEQ ID NO: 30425 - DNA, 25 bp, Probe sequence
aagacaacacatacgatactgtacc

SEQ ID NO: 30426 - DNA, 25 bp, Probe sequence
gacaacacatacgatactgtaccac

SEQ ID NO: 30427 - DNA, 25 bp, Probe sequence
agacaacacatacgatactgtacca

SEQ ID NO: 30428 - DNA, 25 bp, Probe sequence
acaacacatacgatactgtaccact

SEQ ID NO: 30429 - DNA, 25 bp, Probe sequence
tggataatagtaataagtcaacgga

SEQ ID NO: 30430 - DNA, 25 bp, Probe sequence
agttactgggtttatcaagacatca

SEQ ID NO: 30431 - DNA, 25 bp, Probe sequence
acgatatgtttaattcaagaaaagc

SEQ ID NO: 30432 - DNA, 25 bp, Probe sequence
tttcaaattaattgtagcggcgaaa

SEQ ID NO: 30433 - DNA, 25 bp, Probe sequence
atgacgatatgtttaattcaagaaa

SEQ ID NO: 30434 - DNA, 25 bp, Probe sequence
tcaaattaattgtagcggcgaaaat

SEQ ID NO: 30435 - DNA, 25 bp, Probe sequence
attttcaaattaattgtagcggcga

SEQ ID NO: 30436 - DNA, 25 bp, Probe sequence
ttcaaattaattgtagcggcgaaaa

SEQ ID NO: 30437 - DNA, 25 bp, Probe sequence
ttttcaaattaattgtagcggcgaa

SEQ ID NO: 30438 - DNA, 25 bp, Probe sequence
cgatatgtttaattcaagaaaagct

SEQ ID NO: 30439 - DNA, 25 bp, Probe sequence
aattttcaaattaattgtagcggcg

SEQ ID NO: 30440 - DNA, 25 bp, Probe sequence
cctatcgctacttgtgttgtaatat

SEQ ID NO: 30441 - DNA, 25 bp, Probe sequence
caagcaatgaacctggtaatagtcc

SEQ ID NO: 30442 - DNA, 25 bp, Probe sequence
atgtagtaatccatgttcaacaccg

SEQ ID NO: 30443 - DNA, 25 bp, Probe sequence
ccctatcgctacttgtgttgtaata

SEQ ID NO: 30444 - DNA, 25 bp, Probe sequence
gtagtaatccatgttcaacaccgag

SEQ ID NO: 30445 - DNA, 25 bp, Probe sequence
tatgtagtaatccatgttcaacacc

SEQ ID NO: 30446 - DNA, 25 bp, Probe sequence
atatctactaatgaaggacccaagc

SEQ ID NO: 30447 - DNA, 25 bp, Probe sequence
tatccaagtgatgaagaaagtcctg

SEQ ID NO: 30448 - DNA, 25 bp, Probe sequence
tatctactaatgaaggacccaagca

SEQ ID NO: 30449 - DNA, 25 bp, Probe sequence
gaagcaggtgatacgaagttattac

SEQ ID NO: 30450 - DNA, 25 bp, Probe sequence
attaccaatcacatcttcattccgt

SEQ ID NO: 30451 - DNA, 25 bp, Probe sequence
cgaagcaggtgatacgaagttatta

SEQ ID NO: 30452 - DNA, 25 bp, Probe sequence
tcgtagtattacctgataagcaaca

SEQ ID NO: 30453 - DNA, 25 bp, Probe sequence
aattaccaatcacatcttcattccg

SEQ ID NO: 30454 - DNA, 25 bp, Probe sequence
gttattgttcgtgaagaagactgtg

SEQ ID NO: 30455 - DNA, 25 bp, Probe sequence
atgttattgttcgtgaagaagactg

SEQ ID NO: 30456 - DNA, 25 bp, Probe sequence
gatgttattgttcgtgaagaagact

SEQ ID NO: 30457 - DNA, 25 bp, Probe sequence
agatgttattgttcgtgaagaagac

SEQ ID NO: 30458 - DNA, 25 bp, Probe sequence
ttgattattgctgaagacgttgaag

SEQ ID NO: 30459 - DNA, 25 bp, Probe sequence
gattattgctgaagacgttgaagta

SEQ ID NO: 30460 - DNA, 25 bp, Probe sequence
cgtgttaagccaaatcaatcagaaa

SEQ ID NO: 30461 - DNA, 25 bp, Probe sequence
tgattattgctgaagacgttgaagt

SEQ ID NO: 30462 - DNA, 25 bp, Probe sequence
attgctgaagacgttgaagtatatt

SEQ ID NO: 30463 - DNA, 25 bp, Probe sequence
attattgctgaagacgttgaagtat

SEQ ID NO: 30464 - DNA, 25 bp, Probe sequence
catgtaggtattaacgtcaatgcga

SEQ ID NO: 30465 - DNA, 25 bp, Probe sequence
ttattgctgaagacgttgaagtata

SEQ ID NO: 30466 - DNA, 25 bp, Probe sequence
tattgctgaagacgttgaagtatat

SEQ ID NO: 30467 - DNA, 25 bp, Probe sequence
aagcacagaagaatagtcatagcaa

SEQ ID NO: 30468 - DNA, 25 bp, Probe sequence
agatggcgaatgatattatggacaa

SEQ ID NO: 30469 - DNA, 25 bp, Probe sequence
aagatggcgaatgatattatggaca

SEQ ID NO: 30470 - DNA, 25 bp, Probe sequence
gatggcgaatgatattatggacaat

SEQ ID NO: 30471 - DNA, 25 bp, Probe sequence
taagatggcgaatgatattatggac

SEQ ID NO: 30472 - DNA, 25 bp, Probe sequence
tgacagttcgtgatatgactaatga

SEQ ID NO: 30473 - DNA, 25 bp, Probe sequence
gtgacagttcgtgatatgactaatg

SEQ ID NO: 30474 - DNA, 25 bp, Probe sequence
ttgtgacagttcgtgatatgactaa

SEQ ID NO: 30475 - DNA, 25 bp, Probe sequence
tgtgacagttcgtgatatgactaat

SEQ ID NO: 30476 - DNA, 25 bp, Probe sequence
tgccaactattaaccaattagtacg

SEQ ID NO: 30477 - DNA, 25 bp, Probe sequence
gaaattaacgcatacatccctggta

SEQ ID NO: 30478 - DNA, 25 bp, Probe sequence
tttactgacttaaactcaccacaaa

SEQ ID NO: 30479 - DNA, 25 bp, Probe sequence
atattgtacgtggagcacttgatac

SEQ ID NO: 30480 - DNA, 25 bp, Probe sequence
catattgtacgtggagcacttgata

SEQ ID NO: 30481 - DNA, 25 bp, Probe sequence
atttactgacttaaactcaccacaa

SEQ ID NO: 30482 - DNA, 25 bp, Probe sequence
gagcacttgatacttcaggtgttga

SEQ ID NO: 30483 - DNA, 25 bp, Probe sequence
aatttactgacttaaactcaccaca

SEQ ID NO: 30484 - DNA, 25 bp, Probe sequence
aaattaacgcatacatccctggtat

SEQ ID NO: 30485 - DNA, 25 bp, Probe sequence
caccgattattatgttgactgctaa

SEQ ID NO: 30486 - DNA, 25 bp, Probe sequence
ctaagaagaacgcaatctacaactg

SEQ ID NO: 30487 - DNA, 25 bp, Probe sequence
tctaagaagaacgcaatctacaact

SEQ ID NO: 30488 - DNA, 25 bp, Probe sequence
taagaagaacgcaatctacaactgt

SEQ ID NO: 30489 - DNA, 25 bp, Probe sequence
aagaagaacgcaatctacaactgta

SEQ ID NO: 30490 - DNA, 25 bp, Probe sequence
acaccgattattatgttgactgcta

SEQ ID NO: 30491 - DNA, 25 bp, Probe sequence
tatgttgactgctaaaggtgaagaa

SEQ ID NO: 30492 - DNA, 25 bp, Probe sequence
ttatgttgactgctaaaggtgaaga

SEQ ID NO: 30493 - DNA, 25 bp, Probe sequence
acttatcgtagatgatgaggataga

SEQ ID NO: 30494 - DNA, 25 bp, Probe sequence
cgaagaagcaatcaacaacattatg

SEQ ID NO: 30495 - DNA, 25 bp, Probe sequence
tatcaagtaccagtagaagttcgtc

SEQ ID NO: 30496 - DNA, 25 bp, Probe sequence
ctatcaagtaccagtagaagttcgt

SEQ ID NO: 30497 - DNA, 25 bp, Probe sequence
caatcaacaacattatgccagtatt

SEQ ID NO: 30498 - DNA, 25 bp, Probe sequence
tcaacaacattatgccagtattaga

SEQ ID NO: 30499 - DNA, 25 bp, Probe sequence
acaacattatgccagtattagaagt

SEQ ID NO: 30500 - DNA, 25 bp, Probe sequence
ataatacaggtggtgccgttaagaa

SEQ ID NO: 30501 - DNA, 25 bp, Probe sequence
aataatacaggtggtgccgttaaga

SEQ ID NO: 30502 - DNA, 25 bp, Probe sequence
actatcaagtaccagtagaagttcg

SEQ ID NO: 30503 - DNA, 25 bp, Probe sequence
gaattagaagatggtatgacgcaac

SEQ ID NO: 30504 - DNA, 25 bp, Probe sequence
tgaattagaagatggtatgacgcaa

SEQ ID NO: 30505 - DNA, 25 bp, Probe sequence
ttgaattagaagatggtatgacgca

SEQ ID NO: 30506 - DNA, 25 bp, Probe sequence
ctaatagcggttatacttcaagacg

SEQ ID NO: 30507 - DNA, 25 bp, Probe sequence
attgaattagaagatggtatgacgc

SEQ ID NO: 30508 - DNA, 25 bp, Probe sequence
atcagatacgattgaagttgaaggt

SEQ ID NO: 30509 - DNA, 25 bp, Probe sequence
catcagatacgattgaagttgaagg

SEQ ID NO: 30510 - DNA, 25 bp, Probe sequence
ccatcagatacgattgaagttgaag

SEQ ID NO: 30511 - DNA, 25 bp, Probe sequence
accaactcaagtgataacaagtgta

SEQ ID NO: 30512 - DNA, 25 bp, Probe sequence
ttaatgcttgacgctgtaattgatt

SEQ ID NO: 30513 - DNA, 25 bp, Probe sequence
gaacaagaccgtggtattactatca

SEQ ID NO: 30514 - DNA, 25 bp, Probe sequence
agaacaagaccgtggtattactatc

SEQ ID NO: 30515 - DNA, 25 bp, Probe sequence
caagaacaagaccgtggtattacta

SEQ ID NO: 30516 - DNA, 25 bp, Probe sequence
aagaacaagaccgtggtattactat

SEQ ID NO: 30517 - DNA, 25 bp, Probe sequence
attcctgaagaccacttagatagag

SEQ ID NO: 30518 - DNA, 25 bp, Probe sequence
gattacttaccttcaccactagacg

SEQ ID NO: 30519 - DNA, 25 bp, Probe sequence
agacatcttagtagaccgtatgaag

SEQ ID NO: 30520 - DNA, 25 bp, Probe sequence
tagttcctcgtgaatacattccatc

SEQ ID NO: 30521 - DNA, 25 bp, Probe sequence
gacaactgaagaagacgatgaagaa

SEQ ID NO: 30522 - DNA, 25 bp, Probe sequence
ttcgtagtatcaattcagatggtgc

SEQ ID NO: 30523 - DNA, 25 bp, Probe sequence
attcgtagtatcaattcagatggtg

SEQ ID NO: 30524 - DNA, 25 bp, Probe sequence
aattatcacaagcagcaatggaagt

SEQ ID NO: 30525 - DNA, 25 bp, Probe sequence
aattcgtagtatcaattcagatggt

SEQ ID NO: 30526 - DNA, 25 bp, Probe sequence
gaagaagacgatgaagaaatggatg

SEQ ID NO: 30527 - DNA, 25 bp, Probe sequence
cgacaactgaagaagacgatgaaga

SEQ ID NO: 30528 - DNA, 25 bp, Probe sequence
tgaagaagacgatgaagaaatggat

SEQ ID NO: 30529 - DNA, 25 bp, Probe sequence
aactgaagaagacgatgaagaaatg

SEQ ID NO: 30530 - DNA, 25 bp, Probe sequence
tatggtatggaactaacggaagaag

SEQ ID NO: 30531 - DNA, 25 bp, Probe sequence
atatggtatggaactaacggaagaa

SEQ ID NO: 30532 - DNA, 25 bp, Probe sequence
aatatggtatggaactaacggaaga

SEQ ID NO: 30533 - DNA, 25 bp, Probe sequence
ctgctattcctataactgaagaacg

SEQ ID NO: 30534 - DNA, 25 bp, Probe sequence
tatggaactaacggaagaaggctta

SEQ ID NO: 30535 - DNA, 25 bp, Probe sequence
tagtaatagcgaatacgagagagaa

SEQ ID NO: 30536 - DNA, 25 bp, Probe sequence
atagtaatagcgaatacgagagaga

SEQ ID NO: 30537 - DNA, 25 bp, Probe sequence
agatagtaatagcgaatacgagaga

SEQ ID NO: 30538 - DNA, 25 bp, Probe sequence
gatagtaatagcgaatacgagagag

SEQ ID NO: 30539 - DNA, 25 bp, Probe sequence
atggataaagaatctgtcgtagcaa

SEQ ID NO: 30540 - DNA, 25 bp, Probe sequence
aaagaatctgtcgtagcaagtttag

SEQ ID NO: 30541 - DNA, 25 bp, Probe sequence
ggataaagaatctgtcgtagcaagt

SEQ ID NO: 30542 - DNA, 25 bp, Probe sequence
tggataaagaatctgtcgtagcaag

SEQ ID NO: 30543 - DNA, 25 bp, Probe sequence
gataaagaatctgtcgtagcaagtt

SEQ ID NO: 30544 - DNA, 25 bp, Probe sequence
ataaagaatctgtcgtagcaagttt

SEQ ID NO: 30545 - DNA, 25 bp, Probe sequence
aagaatctgtcgtagcaagtttagc

SEQ ID NO: 30546 - DNA, 25 bp, Probe sequence
tttgaaacctaaagatgtcgtgtta

SEQ ID NO: 30547 - DNA, 25 bp, Probe sequence
aacctaaagatgtcgtgttagatgt

SEQ ID NO: 30548 - DNA, 25 bp, Probe sequence
tgctattaccacaatcaacatcaga

SEQ ID NO: 30549 - DNA, 25 bp, Probe sequence
gctattaccacaatcaacatcagat

SEQ ID NO: 30550 - DNA, 25 bp, Probe sequence
atgctattaccacaatcaacatcag

SEQ ID NO: 30551 - DNA, 25 bp, Probe sequence
gcaagcattaacagagcagtatatg

SEQ ID NO: 30552 - DNA, 25 bp, Probe sequence
aagatgctattaccacaatcaacat

SEQ ID NO: 30553 - DNA, 25 bp, Probe sequence
taagatgctattaccacaatcaaca

SEQ ID NO: 30554 - DNA, 25 bp, Probe sequence
tacctagtattagcgtcagaactct

SEQ ID NO: 30555 - DNA, 25 bp, Probe sequence
cctagtattagcgtcagaactctta

SEQ ID NO: 30556 - DNA, 25 bp, Probe sequence
acctagtattagcgtcagaactctt

SEQ ID NO: 30557 - DNA, 25 bp, Probe sequence
acaatcacgaccattcttattctct

SEQ ID NO: 30558 - DNA, 25 bp, Probe sequence
cacaatcacgaccattcttattctc

SEQ ID NO: 30559 - DNA, 25 bp, Probe sequence
tattctctacatcattagcacctgg

SEQ ID NO: 30560 - DNA, 25 bp, Probe sequence
acgaccattcttattctctacatca

SEQ ID NO: 30561 - DNA, 25 bp, Probe sequence
tcacgaccattcttattctctacat

SEQ ID NO: 30562 - DNA, 25 bp, Probe sequence
atcacgaccattcttattctctaca

SEQ ID NO: 30563 - DNA, 25 bp, Probe sequence
cacgaccattcttattctctacatc

SEQ ID NO: 30564 - DNA, 25 bp, Probe sequence
aatcacgaccattcttattctctac

SEQ ID NO: 30565 - DNA, 25 bp, Probe sequence
caatcacgaccattcttattctcta

SEQ ID NO: 30566 - DNA, 25 bp, Probe sequence
tgactgaacatcatatctcgcatat

SEQ ID NO: 30567 - DNA, 25 bp, Probe sequence
actgaacatcatatctcgcatattg

SEQ ID NO: 30568 - DNA, 25 bp, Probe sequence
ctgaacatcatatctcgcatattga

SEQ ID NO: 30569 - DNA, 25 bp, Probe sequence
gactgaacatcatatctcgcatatt

SEQ ID NO: 30570 - DNA, 25 bp, Probe sequence
tacgatgttagaacttctgtacgca

SEQ ID NO: 30571 - DNA, 25 bp, Probe sequence
tccaacggtattattagattcacca

SEQ ID NO: 30572 - DNA, 25 bp, Probe sequence
cgtatttggtaaaggcgataaagaa

SEQ ID NO: 30573 - DNA, 25 bp, Probe sequence
ccaacggtattattagattcaccaa

SEQ ID NO: 30574 - DNA, 25 bp, Probe sequence
gatgttagaacttctgtacgcaacg

SEQ ID NO: 30575 - DNA, 25 bp, Probe sequence
aagtattgatgattgctgctgaaga

SEQ ID NO: 30576 - DNA, 25 bp, Probe sequence
ttaacgacgatatgacaggaagaac

SEQ ID NO: 30577 - DNA, 25 bp, Probe sequence
agtattgatgattgctgctgaagag

SEQ ID NO: 30578 - DNA, 25 bp, Probe sequence
taagtaagcaaccaacgccagataa

SEQ ID NO: 30579 - DNA, 25 bp, Probe sequence
taacgacgatatgacaggaagaacg

SEQ ID NO: 30580 - DNA, 25 bp, Probe sequence
ttaagtaagcaaccaacgccagata

SEQ ID NO: 30581 - DNA, 25 bp, Probe sequence
tagttacattatgtcatggaccagc

SEQ ID NO: 30582 - DNA, 25 bp, Probe sequence
aaagtattgatgattgctgctgaag

SEQ ID NO: 30583 - DNA, 25 bp, Probe sequence
gaaagtattgatgattgctgctgaa

SEQ ID NO: 30584 - DNA, 25 bp, Probe sequence
ttagtatgtatggaatgtggtcgtg

SEQ ID NO: 30585 - DNA, 25 bp, Probe sequence
gtatgtatggaatgtggtcgtgtag

SEQ ID NO: 30586 - DNA, 25 bp, Probe sequence
tatgtatggaatgtggtcgtgtaga

SEQ ID NO: 30587 - DNA, 25 bp, Probe sequence
agtatgtatggaatgtggtcgtgta

SEQ ID NO: 30588 - DNA, 25 bp, Probe sequence
tagtatgtatggaatgtggtcgtgt

SEQ ID NO: 30589 - DNA, 25 bp, Probe sequence
gcgttaagcaacaattacaacaatc

SEQ ID NO: 30590 - DNA, 25 bp, Probe sequence
tatggaatgtggtcgtgtagatgaa

SEQ ID NO: 30591 - DNA, 25 bp, Probe sequence
cgttaagcaacaattacaacaatca

SEQ ID NO: 30592 - DNA, 25 bp, Probe sequence
atgtatggaatgtggtcgtgtagat

SEQ ID NO: 30593 - DNA, 25 bp, Probe sequence
caacatcaagtgccaggtatatcag

SEQ ID NO: 30594 - DNA, 25 bp, Probe sequence
atcaagtgccaggtatatcaggttc

SEQ ID NO: 30595 - DNA, 25 bp, Probe sequence
catcaagtgccaggtatatcaggtt

SEQ ID NO: 30596 - DNA, 25 bp, Probe sequence
aacatcaagtgccaggtatatcagg

SEQ ID NO: 30597 - DNA, 25 bp, Probe sequence
cgaagtgtattaagtgatagcaatt

SEQ ID NO: 30598 - DNA, 25 bp, Probe sequence
atagcattggaattgattatggaac

SEQ ID NO: 30599 - DNA, 25 bp, Probe sequence
acaactaacggtcaagtagtatcaa

SEQ ID NO: 30600 - DNA, 25 bp, Probe sequence
gtgccaggtatatcaggttctgtaa

SEQ ID NO: 30601 - DNA, 25 bp, Probe sequence
gtgatttgtttgagtatgtcgctaa

SEQ ID NO: 30602 - DNA, 25 bp, Probe sequence
tagaagatgcgaagactatcattgc

SEQ ID NO: 30603 - DNA, 25 bp, Probe sequence
atgttgtagatatgtatggttcacc

SEQ ID NO: 30604 - DNA, 25 bp, Probe sequence
atagaagatgcgaagactatcattg

SEQ ID NO: 30605 - DNA, 25 bp, Probe sequence
aatagaagatgcgaagactatcatt

SEQ ID NO: 30606 - DNA, 25 bp, Probe sequence
agtgaaacagtatcgtaaaccagta

SEQ ID NO: 30607 - DNA, 25 bp, Probe sequence
tagtgaaacagtatcgtaaaccagt

SEQ ID NO: 30608 - DNA, 25 bp, Probe sequence
agtcgtattagtgaaacagtatcgt

SEQ ID NO: 30609 - DNA, 25 bp, Probe sequence
tgaaacagtatcgtaaaccagtaga

SEQ ID NO: 30610 - DNA, 25 bp, Probe sequence
gtgaaacagtatcgtaaaccagtag

SEQ ID NO: 30611 - DNA, 25 bp, Probe sequence
atatggcagcattattatcagcaac

SEQ ID NO: 30612 - DNA, 25 bp, Probe sequence
ttaatacgccacaagtaacgattca

SEQ ID NO: 30613 - DNA, 25 bp, Probe sequence
tatggcagcattattatcagcaact

SEQ ID NO: 30614 - DNA, 25 bp, Probe sequence
taatacgccacaagtaacgattcag

SEQ ID NO: 30615 - DNA, 25 bp, Probe sequence
tagacaaggtatcgctaatagttgg

SEQ ID NO: 30616 - DNA, 25 bp, Probe sequence
gattcagcaacctacgacaatgtat

SEQ ID NO: 30617 - DNA, 25 bp, Probe sequence
attcagcaacctacgacaatgtatg

SEQ ID NO: 30618 - DNA, 25 bp, Probe sequence
ggacagataatgttcttgctacaga

SEQ ID NO: 30619 - DNA, 25 bp, Probe sequence
tggatatgatgtatatggatgatgc

SEQ ID NO: 30620 - DNA, 25 bp, Probe sequence
cgatatgcggaacaactatcagtat

SEQ ID NO: 30621 - DNA, 25 bp, Probe sequence
gatatgcggaacaactatcagtatt

SEQ ID NO: 30622 - DNA, 25 bp, Probe sequence
acgatatgcggaacaactatcagta

SEQ ID NO: 30623 - DNA, 25 bp, Probe sequence
tacgatatgcggaacaactatcagt

SEQ ID NO: 30624 - DNA, 25 bp, Probe sequence
gtacgatatgcggaacaactatcag

SEQ ID NO: 30625 - DNA, 25 bp, Probe sequence
gtgtacgatatgcggaacaactatc

SEQ ID NO: 30626 - DNA, 25 bp, Probe sequence
tgtacgatatgcggaacaactatca

SEQ ID NO: 30627 - DNA, 25 bp, Probe sequence
atttgaagaatttacagtgctggat

SEQ ID NO: 30628 - DNA, 25 bp, Probe sequence
tgcgaagtgaaatatagaaagatgt

SEQ ID NO: 30629 - DNA, 25 bp, Probe sequence
agtattatggcttgatggtgttgaa

SEQ ID NO: 30630 - DNA, 25 bp, Probe sequence
gtattatggcttgatggtgttgaac

SEQ ID NO: 30631 - DNA, 25 bp, Probe sequence
aagtattatggcttgatggtgttga

SEQ ID NO: 30632 - DNA, 25 bp, Probe sequence
aagcgtcttaataactcgttagcac

SEQ ID NO: 30633 - DNA, 25 bp, Probe sequence
taagcgtcttaataactcgttagca

SEQ ID NO: 30634 - DNA, 25 bp, Probe sequence
atatcgaagaagttggtagcatgaa

SEQ ID NO: 30635 - DNA, 25 bp, Probe sequence
tattatggcttgatggtgttgaaca

SEQ ID NO: 30636 - DNA, 25 bp, Probe sequence
tatatcgaagaagttggtagcatga

SEQ ID NO: 30637 - DNA, 25 bp, Probe sequence
aggttatgaccaagtattatggctt

SEQ ID NO: 30638 - DNA, 25 bp, Probe sequence
aacatctaacgcacatattgtaggt

SEQ ID NO: 30639 - DNA, 25 bp, Probe sequence
acatctaacgcacatattgtaggta

SEQ ID NO: 30640 - DNA, 25 bp, Probe sequence
taacatctaacgcacatattgtagg

SEQ ID NO: 30641 - DNA, 25 bp, Probe sequence
catctaacgcacatattgtaggtat

SEQ ID NO: 30642 - DNA, 25 bp, Probe sequence
atctaacgcacatattgtaggtatt

SEQ ID NO: 30643 - DNA, 25 bp, Probe sequence
gaccatatttaacatctaacgcaca

SEQ ID NO: 30644 - DNA, 25 bp, Probe sequence
accatatttaacatctaacgcacat

SEQ ID NO: 30645 - DNA, 25 bp, Probe sequence
agaccatatttaacatctaacgcac

SEQ ID NO: 30646 - DNA, 25 bp, Probe sequence
gagaccatatttaacatctaacgca

SEQ ID NO: 30647 - DNA, 25 bp, Probe sequence
acaaagtaataaacaatgcttgcca

SEQ ID NO: 30648 - DNA, 25 bp, Probe sequence
gacaaagtaataaacaatgcttgcc

SEQ ID NO: 30649 - DNA, 25 bp, Probe sequence
caaagtaataaacaatgcttgccaa

SEQ ID NO: 30650 - DNA, 25 bp, Probe sequence
tgacaaagtaataaacaatgcttgc

SEQ ID NO: 30651 - DNA, 25 bp, Probe sequence
aaagtaataaacaatgcttgccaaa

SEQ ID NO: 30652 - DNA, 25 bp, Probe sequence
aagtaataaacaatgcttgccaaat

SEQ ID NO: 30653 - DNA, 25 bp, Probe sequence
agtaataaacaatgcttgccaaata

SEQ ID NO: 30654 - DNA, 25 bp, Probe sequence
atgacaaagtaataaacaatgcttg

SEQ ID NO: 30655 - DNA, 25 bp, Probe sequence
aaataacccgtcaaacacagtgctt

SEQ ID NO: 30656 - DNA, 25 bp, Probe sequence
gtaggagacactgctaatgatatga

SEQ ID NO: 30657 - DNA, 25 bp, Probe sequence
taggagacactgctaatgatatgaa

SEQ ID NO: 30658 - DNA, 25 bp, Probe sequence
agtaggagacactgctaatgatatg

SEQ ID NO: 30659 - DNA, 25 bp, Probe sequence
tggcaataggtgtattaacaggtat

SEQ ID NO: 30660 - DNA, 25 bp, Probe sequence
atggcaataggtgtattaacaggta

SEQ ID NO: 30661 - DNA, 25 bp, Probe sequence
tatggcaataggtgtattaacaggt

SEQ ID NO: 30662 - DNA, 25 bp, Probe sequence
aggtatggcaataggtgtattaaca

SEQ ID NO: 30663 - DNA, 25 bp, Probe sequence
gtatggcaataggtgtattaacagg

SEQ ID NO: 30664 - DNA, 25 bp, Probe sequence
ggtatggcaataggtgtattaacag

SEQ ID NO: 30665 - DNA, 25 bp, Probe sequence
atggatatagagtaatggcacctga

SEQ ID NO: 30666 - DNA, 25 bp, Probe sequence
tagccaacaattatcatcatagcca

SEQ ID NO: 30667 - DNA, 25 bp, Probe sequence
tggatatagagtaatggcacctgaa

SEQ ID NO: 30668 - DNA, 25 bp, Probe sequence
tatggatatagagtaatggcacctg

SEQ ID NO: 30669 - DNA, 25 bp, Probe sequence
agccaacaattatcatcatagccat

SEQ ID NO: 30670 - DNA, 25 bp, Probe sequence
gccaacaattatcatcatagccata

SEQ ID NO: 30671 - DNA, 25 bp, Probe sequence
ttagccaacaattatcatcatagcc

SEQ ID NO: 30672 - DNA, 25 bp, Probe sequence
atatggatatagagtaatggcacct

SEQ ID NO: 30673 - DNA, 25 bp, Probe sequence
tatcatcatagccatattgaagacg

SEQ ID NO: 30674 - DNA, 25 bp, Probe sequence
ttatgacattagcgattgaagaagc

SEQ ID NO: 30675 - DNA, 25 bp, Probe sequence
aagatgatgaagttatcgctagagc

SEQ ID NO: 30676 - DNA, 25 bp, Probe sequence
gatgaagttatcgctagagcacata

SEQ ID NO: 30677 - DNA, 25 bp, Probe sequence
tgaagttatcgctagagcacataat

SEQ ID NO: 30678 - DNA, 25 bp, Probe sequence
atgaagttatcgctagagcacataa

SEQ ID NO: 30679 - DNA, 25 bp, Probe sequence
gaagttatcgctagagcacataatt

SEQ ID NO: 30680 - DNA, 25 bp, Probe sequence
atgtaaccttagaaccatgtgtcat

SEQ ID NO: 30681 - DNA, 25 bp, Probe sequence
gatgatgaagttatcgctagagcac

SEQ ID NO: 30682 - DNA, 25 bp, Probe sequence
agatgatgaagttatcgctagagca

SEQ ID NO: 30683 - DNA, 25 bp, Probe sequence
tactaaccacgaagcagaattaact

SEQ ID NO: 30684 - DNA, 25 bp, Probe sequence
gatgtagatatgaatcagccaggta

SEQ ID NO: 30685 - DNA, 25 bp, Probe sequence
ttactaaccacgaagcagaattaac

SEQ ID NO: 30686 - DNA, 25 bp, Probe sequence
taatcttactaaccacgaagcagaa

SEQ ID NO: 30687 - DNA, 25 bp, Probe sequence
aatcttactaaccacgaagcagaat

SEQ ID NO: 30688 - DNA, 25 bp, Probe sequence
tcttactaaccacgaagcagaatta

SEQ ID NO: 30689 - DNA, 25 bp, Probe sequence
tgacgatgacaagtattggtatgaa

SEQ ID NO: 30690 - DNA, 25 bp, Probe sequence
atcttactaaccacgaagcagaatt

SEQ ID NO: 30691 - DNA, 25 bp, Probe sequence
agcagtagcatatcaagtatatcca

SEQ ID NO: 30692 - DNA, 25 bp, Probe sequence
gatatggatggcacgctacttaatg

SEQ ID NO: 30693 - DNA, 25 bp, Probe sequence
gtaatgagcacttcacaccttaata

SEQ ID NO: 30694 - DNA, 25 bp, Probe sequence
tgtaatgagcacttcacaccttaat

SEQ ID NO: 30695 - DNA, 25 bp, Probe sequence
atgtaatgagcacttcacaccttaa

SEQ ID NO: 30696 - DNA, 25 bp, Probe sequence
aatgtaatgagcacttcacacctta

SEQ ID NO: 30697 - DNA, 25 bp, Probe sequence
tgatatggatggcacgctacttaat

SEQ ID NO: 30698 - DNA, 25 bp, Probe sequence
taatgagcacttcacaccttaataa

SEQ ID NO: 30699 - DNA, 25 bp, Probe sequence
caatgtaatgagcacttcacacctt

SEQ ID NO: 30700 - DNA, 25 bp, Probe sequence
ctgatatggatggcacgctacttaa

SEQ ID NO: 30701 - DNA, 25 bp, Probe sequence
ttggtaagcctacatcggatataga

SEQ ID NO: 30702 - DNA, 25 bp, Probe sequence
attggtaagcctacatcggatatag

SEQ ID NO: 30703 - DNA, 25 bp, Probe sequence
tggtaagcctacatcggatatagat

SEQ ID NO: 30704 - DNA, 25 bp, Probe sequence
gattggtaagcctacatcggatata

SEQ ID NO: 30705 - DNA, 25 bp, Probe sequence
tgattggtaagcctacatcggatat

SEQ ID NO: 30706 - DNA, 25 bp, Probe sequence
agcctacatcggatatagatcatca

SEQ ID NO: 30707 - DNA, 25 bp, Probe sequence
ggtaagcctacatcggatatagatc

SEQ ID NO: 30708 - DNA, 25 bp, Probe sequence
gcctacatcggatatagatcatcaa

SEQ ID NO: 30709 - DNA, 25 bp, Probe sequence
aagcctacatcggatatagatcatc

SEQ ID NO: 30710 - DNA, 25 bp, Probe sequence
actgtatgtgaagaagcatctatca

SEQ ID NO: 30711 - DNA, 25 bp, Probe sequence
aactgtatgtgaagaagcatctatc

SEQ ID NO: 30712 - DNA, 25 bp, Probe sequence
ctgtatgtgaagaagcatctatcaa

SEQ ID NO: 30713 - DNA, 25 bp, Probe sequence
tgtatgtgaagaagcatctatcaat

SEQ ID NO: 30714 - DNA, 25 bp, Probe sequence
taactgtatgtgaagaagcatctat

SEQ ID NO: 30715 - DNA, 25 bp, Probe sequence
ataactgtatgtgaagaagcatcta

SEQ ID NO: 30716 - DNA, 25 bp, Probe sequence
tataactgtatgtgaagaagcatct

SEQ ID NO: 30717 - DNA, 25 bp, Probe sequence
ctgagagcgaagaaattatgatgtc

SEQ ID NO: 30718 - DNA, 25 bp, Probe sequence
tctgagagcgaagaaattatgatgt

SEQ ID NO: 30719 - DNA, 25 bp, Probe sequence
ttccaccttatcattatgccaatca

SEQ ID NO: 30720 - DNA, 25 bp, Probe sequence
attccaccttatcattatgccaatc

SEQ ID NO: 30721 - DNA, 25 bp, Probe sequence
tccaccttatcattatgccaatcat

SEQ ID NO: 30722 - DNA, 25 bp, Probe sequence
ggtggcttgttatctggaattgtaa

SEQ ID NO: 30723 - DNA, 25 bp, Probe sequence
ttattccaccttatcattatgccaa

SEQ ID NO: 30724 - DNA, 25 bp, Probe sequence
tattccaccttatcattatgccaat

SEQ ID NO: 30725 - DNA, 25 bp, Probe sequence
attattccaccttatcattatgcca

SEQ ID NO: 30726 - DNA, 25 bp, Probe sequence
gaattatcggtggcttgttatctgg

SEQ ID NO: 30727 - DNA, 25 bp, Probe sequence
ggaattatcggtggcttgttatctg

SEQ ID NO: 30728 - DNA, 25 bp, Probe sequence
attgttagttcagagccattgtcac

SEQ ID NO: 30729 - DNA, 25 bp, Probe sequence
cactagcaagatacttaactgagca

SEQ ID NO: 30730 - DNA, 25 bp, Probe sequence
actagcaagatacttaactgagcat

SEQ ID NO: 30731 - DNA, 25 bp, Probe sequence
gttagttcagagccattgtcacatt

SEQ ID NO: 30732 - DNA, 25 bp, Probe sequence
ctagcaagatacttaactgagcatt

SEQ ID NO: 30733 - DNA, 25 bp, Probe sequence
gcactagcaagatacttaactgagc

SEQ ID NO: 30734 - DNA, 25 bp, Probe sequence
aggaacaacaccgtctattgatgaa

SEQ ID NO: 30735 - DNA, 25 bp, Probe sequence
ttcaggaacaacaccgtctattgat

SEQ ID NO: 30736 - DNA, 25 bp, Probe sequence
aattccaattacgagcaagattatt

SEQ ID NO: 30737 - DNA, 25 bp, Probe sequence
gactatgttgcagttgaagtatcac

SEQ ID NO: 30738 - DNA, 25 bp, Probe sequence
tatgttgcagttgaagtatcaccta

SEQ ID NO: 30739 - DNA, 25 bp, Probe sequence
aggactatgttgcagttgaagtatc

SEQ ID NO: 30740 - DNA, 25 bp, Probe sequence
gaggactatgttgcagttgaagtat

SEQ ID NO: 30741 - DNA, 25 bp, Probe sequence
ctatgttgcagttgaagtatcacct

SEQ ID NO: 30742 - DNA, 25 bp, Probe sequence
ggactatgttgcagttgaagtatca

SEQ ID NO: 30743 - DNA, 25 bp, Probe sequence
aaatgatttaggtttaactgggcat

SEQ ID NO: 30744 - DNA, 25 bp, Probe sequence
atgttgcagttgaagtatcacctac

SEQ ID NO: 30745 - DNA, 25 bp, Probe sequence
actatgttgcagttgaagtatcacc

SEQ ID NO: 30746 - DNA, 25 bp, Probe sequence
aagcaagtgaagataatgaatggaa

SEQ ID NO: 30747 - DNA, 25 bp, Probe sequence
agcaagtgaagataatgaatggaat

SEQ ID NO: 30748 - DNA, 25 bp, Probe sequence
atcgttactgaatatcaagatgcgt

SEQ ID NO: 30749 - DNA, 25 bp, Probe sequence
cgttactgaatatcaagatgcgtta

SEQ ID NO: 30750 - DNA, 25 bp, Probe sequence
tcgttactgaatatcaagatgcgtt

SEQ ID NO: 30751 - DNA, 25 bp, Probe sequence
acggtgcttcatgtgttacttatat

SEQ ID NO: 30752 - DNA, 25 bp, Probe sequence
cggtgcttcatgtgttacttatatt

SEQ ID NO: 30753 - DNA, 25 bp, Probe sequence
gcaagtgaagataatgaatggaatt

SEQ ID NO: 30754 - DNA, 25 bp, Probe sequence
gacggtgcttcatgtgttacttata

SEQ ID NO: 30755 - DNA, 25 bp, Probe sequence
aagatgacggctacatatactctga

SEQ ID NO: 30756 - DNA, 25 bp, Probe sequence
ttaggtgccaataatctagtgtgta

SEQ ID NO: 30757 - DNA, 25 bp, Probe sequence
taggtgccaataatctagtgtgtac

SEQ ID NO: 30758 - DNA, 25 bp, Probe sequence
attaggtgccaataatctagtgtgt

SEQ ID NO: 30759 - DNA, 25 bp, Probe sequence
aattaggtgccaataatctagtgtg

SEQ ID NO: 30760 - DNA, 25 bp, Probe sequence
gaatgaatcaacaatccaacctatt

SEQ ID NO: 30761 - DNA, 25 bp, Probe sequence
ggaatgaatcaacaatccaacctat

SEQ ID NO: 30762 - DNA, 25 bp, Probe sequence
tacgaatattgttgcagatgaagtc

SEQ ID NO: 30763 - DNA, 25 bp, Probe sequence
ctacgaatattgttgcagatgaagt

SEQ ID NO: 30764 - DNA, 25 bp, Probe sequence
gaaaggtactgagaatatagtgaca

SEQ ID NO: 30765 - DNA, 25 bp, Probe sequence
tgaaaggtactgagaatatagtgac

SEQ ID NO: 30766 - DNA, 25 bp, Probe sequence
aaggtactgagaatatagtgacaaa

SEQ ID NO: 30767 - DNA, 25 bp, Probe sequence
aaaggtactgagaatatagtgacaa

SEQ ID NO: 30768 - DNA, 25 bp, Probe sequence
tgttgaaaggtactgagaatatagt

SEQ ID NO: 30769 - DNA, 25 bp, Probe sequence
ggtactgagaatatagtgacaaatg

SEQ ID NO: 30770 - DNA, 25 bp, Probe sequence
aaattctaatcggactaacgtcttt

SEQ ID NO: 30771 - DNA, 25 bp, Probe sequence
aggtactgagaatatagtgacaaat

SEQ ID NO: 30772 - DNA, 25 bp, Probe sequence
gttgaaaggtactgagaatatagtg

SEQ ID NO: 30773 - DNA, 25 bp, Probe sequence
atgaagataccattgcgattgaatt

SEQ ID NO: 30774 - DNA, 25 bp, Probe sequence
gagcaagtggaattgttaatgagaa

SEQ ID NO: 30775 - DNA, 25 bp, Probe sequence
aagagcaagtggaattgttaatgag

SEQ ID NO: 30776 - DNA, 25 bp, Probe sequence
gaagagcaagtggaattgttaatga

SEQ ID NO: 30777 - DNA, 25 bp, Probe sequence
agaagagcaagtggaattgttaatg

SEQ ID NO: 30778 - DNA, 25 bp, Probe sequence
agagcaagtggaattgttaatgaga

SEQ ID NO: 30779 - DNA, 25 bp, Probe sequence
gagaagagcaagtggaattgttaat

SEQ ID NO: 30780 - DNA, 25 bp, Probe sequence
tatgaagataccattgcgattgaat

SEQ ID NO: 30781 - DNA, 25 bp, Probe sequence
gcaagtggaattgttaatgagaatg

SEQ ID NO: 30782 - DNA, 25 bp, Probe sequence
atggaaatggtttgtcagaatatcg

SEQ ID NO: 30783 - DNA, 25 bp, Probe sequence
actgattcaagatggatttaatggc

SEQ ID NO: 30784 - DNA, 25 bp, Probe sequence
ctgattcaagatggatttaatggct

SEQ ID NO: 30785 - DNA, 25 bp, Probe sequence
acgctcacaaaggttatcttaaatg

SEQ ID NO: 30786 - DNA, 25 bp, Probe sequence
cacgctcacaaaggttatcttaaat

SEQ ID NO: 30787 - DNA, 25 bp, Probe sequence
tgtcagaatatatgatgaagagcaa

SEQ ID NO: 30788 - DNA, 25 bp, Probe sequence
acacgctcacaaaggttatcttaaa

SEQ ID NO: 30789 - DNA, 25 bp, Probe sequence
gcagaactgatgttatcgacaagta

SEQ ID NO: 30790 - DNA, 25 bp, Probe sequence
aaacacgctcacaaaggttatctta

SEQ ID NO: 30791 - DNA, 25 bp, Probe sequence
gtattacctgatcgtctagtgacag

SEQ ID NO: 30792 - DNA, 25 bp, Probe sequence
tacctgatcgtctagtgacagtatt

SEQ ID NO: 30793 - DNA, 25 bp, Probe sequence
ttacctgatcgtctagtgacagtat

SEQ ID NO: 30794 - DNA, 25 bp, Probe sequence
attacctgatcgtctagtgacagta

SEQ ID NO: 30795 - DNA, 25 bp, Probe sequence
tattacctgatcgtctagtgacagt

SEQ ID NO: 30796 - DNA, 25 bp, Probe sequence
caagataaagaagcgacacaaagag

SEQ ID NO: 30797 - DNA, 25 bp, Probe sequence
cgtattacctgatcgtctagtgaca

SEQ ID NO: 30798 - DNA, 25 bp, Probe sequence
gacaagataaagaagcgacacaaag

SEQ ID NO: 30799 - DNA, 25 bp, Probe sequence
acaagataaagaagcgacacaaaga

SEQ ID NO: 30800 - DNA, 25 bp, Probe sequence
tagaacaacaaggtcaacgtgatat

SEQ ID NO: 30801 - DNA, 25 bp, Probe sequence
aaagagatggcatttaatcagcact

SEQ ID NO: 30802 - DNA, 25 bp, Probe sequence
catcattctatgttgcatgtgagtt

SEQ ID NO: 30803 - DNA, 25 bp, Probe sequence
ttagaacaacaaggtcaacgtgata

SEQ ID NO: 30804 - DNA, 25 bp, Probe sequence
agatggcatttaatcagcactgtaa

SEQ ID NO: 30805 - DNA, 25 bp, Probe sequence
taaagagatggcatttaatcagcac

SEQ ID NO: 30806 - DNA, 25 bp, Probe sequence
gaacaacaaggtcaacgtgatattc

SEQ ID NO: 30807 - DNA, 25 bp, Probe sequence
gatggcatttaatcagcactgtaaa

SEQ ID NO: 30808 - DNA, 25 bp, Probe sequence
agaacaacaaggtcaacgtgatatt

SEQ ID NO: 30809 - DNA, 25 bp, Probe sequence
ctgattatgaagttagccaagcaat

SEQ ID NO: 30810 - DNA, 25 bp, Probe sequence
tgattatgaagttagccaagcaatt

SEQ ID NO: 30811 - DNA, 25 bp, Probe sequence
aagtcctgatcttgttattgttggt

SEQ ID NO: 30812 - DNA, 25 bp, Probe sequence
agtcctgatcttgttattgttggtg

SEQ ID NO: 30813 - DNA, 25 bp, Probe sequence
gtcctgatcttgttattgttggtgg

SEQ ID NO: 30814 - DNA, 25 bp, Probe sequence
gattatgaagttagccaagcaatta

SEQ ID NO: 30815 - DNA, 25 bp, Probe sequence
agggcaatcaccattagaaagttta

SEQ ID NO: 30816 - DNA, 25 bp, Probe sequence
attatgaagttagccaagcaattaa

SEQ ID NO: 30817 - DNA, 25 bp, Probe sequence
gggcaatcaccattagaaagtttaa

SEQ ID NO: 30818 - DNA, 25 bp, Probe sequence
atcaagtaaccaatcatctgaagac

SEQ ID NO: 30819 - DNA, 25 bp, Probe sequence
tatcacaagttgtaggtagtggatt

SEQ ID NO: 30820 - DNA, 25 bp, Probe sequence
ttatcacaagttgtaggtagtggat

SEQ ID NO: 30821 - DNA, 25 bp, Probe sequence
gaaacaactgaagagatacaagcaa

SEQ ID NO: 30822 - DNA, 25 bp, Probe sequence
aagttgtaggtagtggatttgaagg

SEQ ID NO: 30823 - DNA, 25 bp, Probe sequence
atgaaacaactgaagagatacaagc

SEQ ID NO: 30824 - DNA, 25 bp, Probe sequence
aaacaactgaagagatacaagcaaa

SEQ ID NO: 30825 - DNA, 25 bp, Probe sequence
tgaaacaactgaagagatacaagca

SEQ ID NO: 30826 - DNA, 25 bp, Probe sequence
aagacaaatgaaacaactgaagaga

SEQ ID NO: 30827 - DNA, 25 bp, Probe sequence
agtaggtgctgacatcgtattaatt

SEQ ID NO: 30828 - DNA, 25 bp, Probe sequence
aggtgctgacatcgtattaattact

SEQ ID NO: 30829 - DNA, 25 bp, Probe sequence
gtaggtgctgacatcgtattaatta

SEQ ID NO: 30830 - DNA, 25 bp, Probe sequence
ggtgctgacatcgtattaattacta

SEQ ID NO: 30831 - DNA, 25 bp, Probe sequence
taggtgctgacatcgtattaattac

SEQ ID NO: 30832 - DNA, 25 bp, Probe sequence
tgtaattatctctggttcaggttcc

SEQ ID NO: 30833 - DNA, 25 bp, Probe sequence
gggattgatgactgaaatgaatgtt

SEQ ID NO: 30834 - DNA, 25 bp, Probe sequence
atgggattgatgactgaaatgaatg

SEQ ID NO: 30835 - DNA, 25 bp, Probe sequence
gttgtaatgggattgatgactgaaa

SEQ ID NO: 30836 - DNA, 25 bp, Probe sequence
tatgtcagaagtgtcagcgattatt

SEQ ID NO: 30837 - DNA, 25 bp, Probe sequence
ttatgtcagaagtgtcagcgattat

SEQ ID NO: 30838 - DNA, 25 bp, Probe sequence
attatgtcagaagtgtcagcgatta

SEQ ID NO: 30839 - DNA, 25 bp, Probe sequence
gttcacggaggactatatcattcac

SEQ ID NO: 30840 - DNA, 25 bp, Probe sequence
tcacggaggactatatcattcacaa

SEQ ID NO: 30841 - DNA, 25 bp, Probe sequence
ttcacggaggactatatcattcaca

SEQ ID NO: 30842 - DNA, 25 bp, Probe sequence
tgttcacggaggactatatcattca

SEQ ID NO: 30843 - DNA, 25 bp, Probe sequence
gtgttcacggaggactatatcattc

SEQ ID NO: 30844 - DNA, 25 bp, Probe sequence
atgtcagaagtgtcagcgattattg

SEQ ID NO: 30845 - DNA, 25 bp, Probe sequence
gtggtgtctagtaagaagagtgatg

SEQ ID NO: 30846 - DNA, 25 bp, Probe sequence
tggtgtctagtaagaagagtgatgt

SEQ ID NO: 30847 - DNA, 25 bp, Probe sequence
ggtgtctagtaagaagagtgatgta

SEQ ID NO: 30848 - DNA, 25 bp, Probe sequence
attagcagaccgaccattagatgaa

SEQ ID NO: 30849 - DNA, 25 bp, Probe sequence
aattagcagaccgaccattagatga

SEQ ID NO: 30850 - DNA, 25 bp, Probe sequence
cgtggtgtctagtaagaagagtgat

SEQ ID NO: 30851 - DNA, 25 bp, Probe sequence
ttagcagaccgaccattagatgaag

SEQ ID NO: 30852 - DNA, 25 bp, Probe sequence
ttcgtggtgtctagtaagaagagtg

SEQ ID NO: 30853 - DNA, 25 bp, Probe sequence
gatgcaaggtcattacttcattcaa

SEQ ID NO: 30854 - DNA, 25 bp, Probe sequence
tggtgaacaagtagatggtaatgat

SEQ ID NO: 30855 - DNA, 25 bp, Probe sequence
atggtgaacaagtagatggtaatga

SEQ ID NO: 30856 - DNA, 25 bp, Probe sequence
gcatacgcattagaagaaggtgata

SEQ ID NO: 30857 - DNA, 25 bp, Probe sequence
attatcggatagagcacttggttac

SEQ ID NO: 30858 - DNA, 25 bp, Probe sequence
aattatcggatagagcacttggtta

SEQ ID NO: 30859 - DNA, 25 bp, Probe sequence
acgcattagaagaaggtgatattac

SEQ ID NO: 30860 - DNA, 25 bp, Probe sequence
gattgaagcagtaacaagtcgtatg

SEQ ID NO: 30861 - DNA, 25 bp, Probe sequence
attgaagcagtaacaagtcgtatga

SEQ ID NO: 30862 - DNA, 25 bp, Probe sequence
tgattgaagcagtaacaagtcgtat

SEQ ID NO: 30863 - DNA, 25 bp, Probe sequence
atgtagataacgagcaagatagagc

SEQ ID NO: 30864 - DNA, 25 bp, Probe sequence
ataagcgtcgtaactcattaggtag

SEQ ID NO: 30865 - DNA, 25 bp, Probe sequence
gataagcgtcgtaactcattaggta

SEQ ID NO: 30866 - DNA, 25 bp, Probe sequence
cagataagcgtcgtaactcattagg

SEQ ID NO: 30867 - DNA, 25 bp, Probe sequence
ccagataagcgtcgtaactcattag

SEQ ID NO: 30868 - DNA, 25 bp, Probe sequence
agataagcgtcgtaactcattaggt

SEQ ID NO: 30869 - DNA, 25 bp, Probe sequence
tccagataagcgtcgtaactcatta

SEQ ID NO: 30870 - DNA, 25 bp, Probe sequence
taagcgtcgtaactcattaggtagt

SEQ ID NO: 30871 - DNA, 25 bp, Probe sequence
aatgtagataacgagcaagatagag

SEQ ID NO: 30872 - DNA, 25 bp, Probe sequence
ttggtattattggtggtggtgttat

SEQ ID NO: 30873 - DNA, 25 bp, Probe sequence
tggtattattggtggtggtgttatc

SEQ ID NO: 30874 - DNA, 25 bp, Probe sequence
tctgaagtgttgatggaattaggat

SEQ ID NO: 30875 - DNA, 25 bp, Probe sequence
ctctgaagtgttgatggaattagga

SEQ ID NO: 30876 - DNA, 25 bp, Probe sequence
tctctgaagtgttgatggaattagg

SEQ ID NO: 30877 - DNA, 25 bp, Probe sequence
gtagaacgacaactattaggaggta

SEQ ID NO: 30878 - DNA, 25 bp, Probe sequence
tgaagtgttgatggaattaggattg

SEQ ID NO: 30879 - DNA, 25 bp, Probe sequence
gaagtgttgatggaattaggattga

SEQ ID NO: 30880 - DNA, 25 bp, Probe sequence
tagaattaggactaacaacacacgc

SEQ ID NO: 30881 - DNA, 25 bp, Probe sequence
cgaaggtggcgtaagatactattac

SEQ ID NO: 30882 - DNA, 25 bp, Probe sequence
tttgctttgttagttattggtggta

SEQ ID NO: 30883 - DNA, 25 bp, Probe sequence
tgctttgttagttattggtggtatt

SEQ ID NO: 30884 - DNA, 25 bp, Probe sequence
ttgctttgttagttattggtggtat

SEQ ID NO: 30885 - DNA, 25 bp, Probe sequence
agtaagtgagacatataaattcgct

SEQ ID NO: 30886 - DNA, 25 bp, Probe sequence
acgaaggtggcgtaagatactatta

SEQ ID NO: 30887 - DNA, 25 bp, Probe sequence
aagtgagacatataaattcgctact

SEQ ID NO: 30888 - DNA, 25 bp, Probe sequence
gctttgttagttattggtggtatta

SEQ ID NO: 30889 - DNA, 25 bp, Probe sequence
aagtaagtgagacatataaattcgc

SEQ ID NO: 30890 - DNA, 25 bp, Probe sequence
caatgttctgcaataggcttatgtg

SEQ ID NO: 30891 - DNA, 25 bp, Probe sequence
taagagtgactgataaagcaaccat

SEQ ID NO: 30892 - DNA, 25 bp, Probe sequence
ctaagagtgactgataaagcaacca

SEQ ID NO: 30893 - DNA, 25 bp, Probe sequence
cctaagagtgactgataaagcaacc

SEQ ID NO: 30894 - DNA, 25 bp, Probe sequence
gaagcattatcaaaccagcaaatcg

SEQ ID NO: 30895 - DNA, 25 bp, Probe sequence
atgaagcattatcaaaccagcaaat

SEQ ID NO: 30896 - DNA, 25 bp, Probe sequence
aatgttctgcaataggcttatgtgg

SEQ ID NO: 30897 - DNA, 25 bp, Probe sequence
tgaagcattatcaaaccagcaaatc

SEQ ID NO: 30898 - DNA, 25 bp, Probe sequence
aagcatttacgatcaaacaacatct

SEQ ID NO: 30899 - DNA, 25 bp, Probe sequence
gaagcaattatcatcggtattccaa

SEQ ID NO: 30900 - DNA, 25 bp, Probe sequence
cacgatcacaatggtataggaacta

SEQ ID NO: 30901 - DNA, 25 bp, Probe sequence
aatcacgatcacaatggtataggaa

SEQ ID NO: 30902 - DNA, 25 bp, Probe sequence
gaatcacgatcacaatggtatagga

SEQ ID NO: 30903 - DNA, 25 bp, Probe sequence
tgaagcaattatcatcggtattcca

SEQ ID NO: 30904 - DNA, 25 bp, Probe sequence
aacgaatcacgatcacaatggtata

SEQ ID NO: 30905 - DNA, 25 bp, Probe sequence
atcacgatcacaatggtataggaac

SEQ ID NO: 30906 - DNA, 25 bp, Probe sequence
acgaatcacgatcacaatggtatag

SEQ ID NO: 30907 - DNA, 25 bp, Probe sequence
tcacgatcacaatggtataggaact

SEQ ID NO: 30908 - DNA, 25 bp, Probe sequence
ttatagaggttggacaagcgttatc

SEQ ID NO: 30909 - DNA, 25 bp, Probe sequence
gttatagaggttggacaagcgttat

SEQ ID NO: 30910 - DNA, 25 bp, Probe sequence
gttaagagaccacattgtatcggaa

SEQ ID NO: 30911 - DNA, 25 bp, Probe sequence
acaacaacacaagttcaagagttaa

SEQ ID NO: 30912 - DNA, 25 bp, Probe sequence
gagttaagagaccacattgtatcgg

SEQ ID NO: 30913 - DNA, 25 bp, Probe sequence
ggagttaagagaccacattgtatcg

SEQ ID NO: 30914 - DNA, 25 bp, Probe sequence
atcaagttatagaggttggacaagc

SEQ ID NO: 30915 - DNA, 25 bp, Probe sequence
agttaagagaccacattgtatcgga

SEQ ID NO: 30916 - DNA, 25 bp, Probe sequence
agttatagaggttggacaagcgtta

SEQ ID NO: 30917 - DNA, 25 bp, Probe sequence
tgttacggtaggtgttgattctaat

SEQ ID NO: 30918 - DNA, 25 bp, Probe sequence
gtgttacggtaggtgttgattctaa

SEQ ID NO: 30919 - DNA, 25 bp, Probe sequence
gttacggtaggtgttgattctaatt

SEQ ID NO: 30920 - DNA, 25 bp, Probe sequence
ggtgttacggtaggtgttgattcta

SEQ ID NO: 30921 - DNA, 25 bp, Probe sequence
aagattcaatacctggcgtcacaat

SEQ ID NO: 30922 - DNA, 25 bp, Probe sequence
taccagccatttccaacttactaaa

SEQ ID NO: 30923 - DNA, 25 bp, Probe sequence
atggtgttacggtaggtgttgattc

SEQ ID NO: 30924 - DNA, 25 bp, Probe sequence
gatggtgttacggtaggtgttgatt

SEQ ID NO: 30925 - DNA, 25 bp, Probe sequence
tttaggtaatgttgttgggaatggt

SEQ ID NO: 30926 - DNA, 25 bp, Probe sequence
tgaacagatagagacacaagatgaa

SEQ ID NO: 30927 - DNA, 25 bp, Probe sequence
atgaacagatagagacacaagatga

SEQ ID NO: 30928 - DNA, 25 bp, Probe sequence
aatgaacagatagagacacaagatg

SEQ ID NO: 30929 - DNA, 25 bp, Probe sequence
gaacagatagagacacaagatgaat

SEQ ID NO: 30930 - DNA, 25 bp, Probe sequence
aacagatagagacacaagatgaatt

SEQ ID NO: 30931 - DNA, 25 bp, Probe sequence
acagatagagacacaagatgaatta

SEQ ID NO: 30932 - DNA, 25 bp, Probe sequence
caagcaactgtttctcgtgatatta

SEQ ID NO: 30933 - DNA, 25 bp, Probe sequence
taaatgtcactcaagcaactgtttc

SEQ ID NO: 30934 - DNA, 25 bp, Probe sequence
ttaaatgtcactcaagcaactgttt

SEQ ID NO: 30935 - DNA, 25 bp, Probe sequence
ttagaagatattgaatgccgacaga

SEQ ID NO: 30936 - DNA, 25 bp, Probe sequence
tcgcaatatcacacgttatacaatg

SEQ ID NO: 30937 - DNA, 25 bp, Probe sequence
ctaaggatagtgtggctgcatatta

SEQ ID NO: 30938 - DNA, 25 bp, Probe sequence
caatatcacacgttatacaatggct

SEQ ID NO: 30939 - DNA, 25 bp, Probe sequence
taaggatagtgtggctgcatattat

SEQ ID NO: 30940 - DNA, 25 bp, Probe sequence
cgcaatatcacacgttatacaatgg

SEQ ID NO: 30941 - DNA, 25 bp, Probe sequence
attctaaccagcgattaaatgtgtc

SEQ ID NO: 30942 - DNA, 25 bp, Probe sequence
gattctaaccagcgattaaatgtgt

SEQ ID NO: 30943 - DNA, 25 bp, Probe sequence
gcaatatcacacgttatacaatggc

SEQ ID NO: 30944 - DNA, 25 bp, Probe sequence
cgaccagttctgttattactcactt

SEQ ID NO: 30945 - DNA, 25 bp, Probe sequence
ttattagactgctatggtgatgaag

SEQ ID NO: 30946 - DNA, 25 bp, Probe sequence
agtcaataatgaattatcggttgcg

SEQ ID NO: 30947 - DNA, 25 bp, Probe sequence
aattgacttatcatagagacgcagc

SEQ ID NO: 30948 - DNA, 25 bp, Probe sequence
catccgaccagttctgttattactc

SEQ ID NO: 30949 - DNA, 25 bp, Probe sequence
atccgaccagttctgttattactca

SEQ ID NO: 30950 - DNA, 25 bp, Probe sequence
attgacttatcatagagacgcagca

SEQ ID NO: 30951 - DNA, 25 bp, Probe sequence
aagtcaataatgaattatcggttgc

SEQ ID NO: 30952 - DNA, 25 bp, Probe sequence
ccgaccagttctgttattactcact

SEQ ID NO: 30953 - DNA, 25 bp, Probe sequence
aatacataatgagattgtgccagga

SEQ ID NO: 30954 - DNA, 25 bp, Probe sequence
atacataatgagattgtgccaggac

SEQ ID NO: 30955 - DNA, 25 bp, Probe sequence
tagcaattaatgacgatggagagat

SEQ ID NO: 30956 - DNA, 25 bp, Probe sequence
atagcaattaatgacgatggagaga

SEQ ID NO: 30957 - DNA, 25 bp, Probe sequence
agcaattaatgacgatggagagatt

SEQ ID NO: 30958 - DNA, 25 bp, Probe sequence
tacataatgagattgtgccaggaca

SEQ ID NO: 30959 - DNA, 25 bp, Probe sequence
gcaattaatgacgatggagagatta

SEQ ID NO: 30960 - DNA, 25 bp, Probe sequence
tatagcaattaatgacgatggagag

SEQ ID NO: 30961 - DNA, 25 bp, Probe sequence
cgctcgtaaatgatgataatccaat

SEQ ID NO: 30962 - DNA, 25 bp, Probe sequence
aaatgacgaatctaccgatgaataa

SEQ ID NO: 30963 - DNA, 25 bp, Probe sequence
tatgaaactatcagcagcttgtgac

SEQ ID NO: 30964 - DNA, 25 bp, Probe sequence
gtatgaaactatcagcagcttgtga

SEQ ID NO: 30965 - DNA, 25 bp, Probe sequence
tgaaacagtatctttagaggaatca

SEQ ID NO: 30966 - DNA, 25 bp, Probe sequence
gaagaaatgatgcaagaattagagc

SEQ ID NO: 30967 - DNA, 25 bp, Probe sequence
ggtatgaaactatcagcagcttgtg

SEQ ID NO: 30968 - DNA, 25 bp, Probe sequence
gtggtatgaaactatcagcagcttg

SEQ ID NO: 30969 - DNA, 25 bp, Probe sequence
tggtatgaaactatcagcagcttgt

SEQ ID NO: 30970 - DNA, 25 bp, Probe sequence
tgaagaaatgatgcaagaattagag

SEQ ID NO: 30971 - DNA, 25 bp, Probe sequence
catttacaagattgggcaagagaag

SEQ ID NO: 30972 - DNA, 25 bp, Probe sequence
atcctagtccactgtctgcatatag

SEQ ID NO: 30973 - DNA, 25 bp, Probe sequence
cactgtctgcatatagaggattctt

SEQ ID NO: 30974 - DNA, 25 bp, Probe sequence
catcctagtccactgtctgcatata

SEQ ID NO: 30975 - DNA, 25 bp, Probe sequence
ggttgggaaacatttactgatgaaa

SEQ ID NO: 30976 - DNA, 25 bp, Probe sequence
attggttgggaaacatttactgatg

SEQ ID NO: 30977 - DNA, 25 bp, Probe sequence
cgtgatattggttgggaaacattta

SEQ ID NO: 30978 - DNA, 25 bp, Probe sequence
atttacaagattgggcaagagaagg

SEQ ID NO: 30979 - DNA, 25 bp, Probe sequence
tggttgggaaacatttactgatgaa

SEQ ID NO: 30980 - DNA, 25 bp, Probe sequence
gtaagacaccgattatatcagcagt

SEQ ID NO: 30981 - DNA, 25 bp, Probe sequence
actaatacaatgttgcgtggatatg

SEQ ID NO: 30982 - DNA, 25 bp, Probe sequence
ctaatacaatgttgcgtggatatgc

SEQ ID NO: 30983 - DNA, 25 bp, Probe sequence
gagatgaagtcttattagaagcacg

SEQ ID NO: 30984 - DNA, 25 bp, Probe sequence
ggagatgaagtcttattagaagcac

SEQ ID NO: 30985 - DNA, 25 bp, Probe sequence
aggagatgaagtcttattagaagca

SEQ ID NO: 30986 - DNA, 25 bp, Probe sequence
aactaatacaatgttgcgtggatat

SEQ ID NO: 30987 - DNA, 25 bp, Probe sequence
ttgtaagacaccgattatatcagca

SEQ ID NO: 30988 - DNA, 25 bp, Probe sequence
tgtaagacaccgattatatcagcag

SEQ ID NO: 30989 - DNA, 25 bp, Probe sequence
cgcattcagcacatcatcataataa

SEQ ID NO: 30990 - DNA, 25 bp, Probe sequence
acgcattcagcacatcatcataata

SEQ ID NO: 30991 - DNA, 25 bp, Probe sequence
tacgcattcagcacatcatcataat

SEQ ID NO: 30992 - DNA, 25 bp, Probe sequence
atacgcattcagcacatcatcataa

SEQ ID NO: 30993 - DNA, 25 bp, Probe sequence
aatacgcattcagcacatcatcata

SEQ ID NO: 30994 - DNA, 25 bp, Probe sequence
aagattagcgacagatgatgacatt

SEQ ID NO: 30995 - DNA, 25 bp, Probe sequence
ttaatagcacgaattgagcaagaat

SEQ ID NO: 30996 - DNA, 25 bp, Probe sequence
gcattcagcacatcatcataataag

SEQ ID NO: 30997 - DNA, 25 bp, Probe sequence
agattagcgacagatgatgacattg

SEQ ID NO: 30998 - DNA, 25 bp, Probe sequence
gtcgtaatgaatgaagcagttgaat

SEQ ID NO: 30999 - DNA, 25 bp, Probe sequence
tcgtaatgaatgaagcagttgaatt

SEQ ID NO: 31000 - DNA, 25 bp, Probe sequence
agtcgtaatgaatgaagcagttgaa

SEQ ID NO: 31001 - DNA, 25 bp, Probe sequence
aagtcgtaatgaatgaagcagttga

SEQ ID NO: 31002 - DNA, 25 bp, Probe sequence
atcacgaacctgtattagacgagac

SEQ ID NO: 31003 - DNA, 25 bp, Probe sequence
cgaacctgtattagacgagacaatt

SEQ ID NO: 31004 - DNA, 25 bp, Probe sequence
aagatcacgaacctgtattagacga

SEQ ID NO: 31005 - DNA, 25 bp, Probe sequence
acctgtattagacgagacaattagt

SEQ ID NO: 31006 - DNA, 25 bp, Probe sequence
cgtaatgaatgaagcagttgaatta

SEQ ID NO: 31007 - DNA, 25 bp, Probe sequence
aattggtggcgtattgttcatcatt

SEQ ID NO: 31008 - DNA, 25 bp, Probe sequence
attggtggcgtattgttcatcattg

SEQ ID NO: 31009 - DNA, 25 bp, Probe sequence
agtggtacaacttcaatcaatgtta

SEQ ID NO: 31010 - DNA, 25 bp, Probe sequence
tagtggtacaacttcaatcaatgtt

SEQ ID NO: 31011 - DNA, 25 bp, Probe sequence
ttagtggtacaacttcaatcaatgt

SEQ ID NO: 31012 - DNA, 25 bp, Probe sequence
gtggtacaacttcaatcaatgttaa

SEQ ID NO: 31013 - DNA, 25 bp, Probe sequence
attagtggtacaacttcaatcaatg

SEQ ID NO: 31014 - DNA, 25 bp, Probe sequence
aggtgtaattagtggtacaacttca

SEQ ID NO: 31015 - DNA, 25 bp, Probe sequence
ggtgtaattagtggtacaacttcaa

SEQ ID NO: 31016 - DNA, 25 bp, Probe sequence
aatatgacagcgatagaacctaagc

SEQ ID NO: 31017 - DNA, 25 bp, Probe sequence
atatgacagcgatagaacctaagca

SEQ ID NO: 31018 - DNA, 25 bp, Probe sequence
tatgacagcgatagaacctaagcaa

SEQ ID NO: 31019 - DNA, 25 bp, Probe sequence
taatatgacagcgatagaacctaag

SEQ ID NO: 31020 - DNA, 25 bp, Probe sequence
ctaatatgacagcgatagaacctaa

SEQ ID NO: 31021 - DNA, 25 bp, Probe sequence
tctaatatgacagcgatagaaccta

SEQ ID NO: 31022 - DNA, 25 bp, Probe sequence
acagcgatagaacctaagcaaatta

SEQ ID NO: 31023 - DNA, 25 bp, Probe sequence
cagcgatagaacctaagcaaattaa

SEQ ID NO: 31024 - DNA, 25 bp, Probe sequence
gacagcgatagaacctaagcaaatt

SEQ ID NO: 31025 - DNA, 25 bp, Probe sequence
ggatggttagtgtctattgtggtta

SEQ ID NO: 31026 - DNA, 25 bp, Probe sequence
tgtctattgtggttattgtatccgt

SEQ ID NO: 31027 - DNA, 25 bp, Probe sequence
tctattgtggttattgtatccgtgg

SEQ ID NO: 31028 - DNA, 25 bp, Probe sequence
gtctattgtggttattgtatccgtg

SEQ ID NO: 31029 - DNA, 25 bp, Probe sequence
gtgtctattgtggttattgtatccg

SEQ ID NO: 31030 - DNA, 25 bp, Probe sequence
ttgcgaccgtattactacttgtatt

SEQ ID NO: 31031 - DNA, 25 bp, Probe sequence
attgcgaccgtattactacttgtat

SEQ ID NO: 31032 - DNA, 25 bp, Probe sequence
ttattgcgaccgtattactacttgt

SEQ ID NO: 31033 - DNA, 25 bp, Probe sequence
tcattattgcgaccgtattactact

SEQ ID NO: 31034 - DNA, 25 bp, Probe sequence
tgtggttcttggtattgatacaact

SEQ ID NO: 31035 - DNA, 25 bp, Probe sequence
tcaagtagaacatcctgtaactgaa

SEQ ID NO: 31036 - DNA, 25 bp, Probe sequence
ttcaagtagaacatcctgtaactga

SEQ ID NO: 31037 - DNA, 25 bp, Probe sequence
atacgataccgccatattatgattc

SEQ ID NO: 31038 - DNA, 25 bp, Probe sequence
gtggttcttggtattgatacaacta

SEQ ID NO: 31039 - DNA, 25 bp, Probe sequence
attcaagtagaacatcctgtaactg

SEQ ID NO: 31040 - DNA, 25 bp, Probe sequence
gaagttcattggaccaagttatcaa

SEQ ID NO: 31041 - DNA, 25 bp, Probe sequence
ttaatcatacatgaaccgacacgag

SEQ ID NO: 31042 - DNA, 25 bp, Probe sequence
tgaagttcattggaccaagttatca

SEQ ID NO: 31043 - DNA, 25 bp, Probe sequence
ggtgatgagactaaggttcaatctt

SEQ ID NO: 31044 - DNA, 25 bp, Probe sequence
taggtgatgagactaaggttcaatc

SEQ ID NO: 31045 - DNA, 25 bp, Probe sequence
aggtgatgagactaaggttcaatct

SEQ ID NO: 31046 - DNA, 25 bp, Probe sequence
ccaatcgtgttaggtgatgagacta

SEQ ID NO: 31047 - DNA, 25 bp, Probe sequence
gttaggtgatgagactaaggttcaa

SEQ ID NO: 31048 - DNA, 25 bp, Probe sequence
aatcgtgttaggtgatgagactaag

SEQ ID NO: 31049 - DNA, 25 bp, Probe sequence
caatcgtgttaggtgatgagactaa

SEQ ID NO: 31050 - DNA, 25 bp, Probe sequence
gtgttaggtgatgagactaaggttc

SEQ ID NO: 31051 - DNA, 25 bp, Probe sequence
ttaggtgatgagactaaggttcaat

SEQ ID NO: 31052 - DNA, 25 bp, Probe sequence
ttagtagaagacggacaaatggtag

SEQ ID NO: 31053 - DNA, 25 bp, Probe sequence
tagaagacggacaaatggtagagta

SEQ ID NO: 31054 - DNA, 25 bp, Probe sequence
tagtagaagacggacaaatggtaga

SEQ ID NO: 31055 - DNA, 25 bp, Probe sequence
caaagccaacttcagataatcacaa

SEQ ID NO: 31056 - DNA, 25 bp, Probe sequence
cttagtagaagacggacaaatggta

SEQ ID NO: 31057 - DNA, 25 bp, Probe sequence
gaagacggacaaatggtagagtatg

SEQ ID NO: 31058 - DNA, 25 bp, Probe sequence
agaagacggacaaatggtagagtat

SEQ ID NO: 31059 - DNA, 25 bp, Probe sequence
aaagccaacttcagataatcacaaa

SEQ ID NO: 31060 - DNA, 25 bp, Probe sequence
ctccaaagccaacttcagataatca

SEQ ID NO: 31061 - DNA, 25 bp, Probe sequence
gataatgttgtgcgtacttggattc

SEQ ID NO: 31062 - DNA, 25 bp, Probe sequence
tatcagataatgttgtgcgtacttg

SEQ ID NO: 31063 - DNA, 25 bp, Probe sequence
agataatgttgtgcgtacttggatt

SEQ ID NO: 31064 - DNA, 25 bp, Probe sequence
ataatgttgtgcgtacttggattca

SEQ ID NO: 31065 - DNA, 25 bp, Probe sequence
cgtacttggattcatcaacatactg

SEQ ID NO: 31066 - DNA, 25 bp, Probe sequence
taatgttgtgcgtacttggattcat

SEQ ID NO: 31067 - DNA, 25 bp, Probe sequence
cagataatgttgtgcgtacttggat

SEQ ID NO: 31068 - DNA, 25 bp, Probe sequence
atcagataatgttgtgcgtacttgg

SEQ ID NO: 31069 - DNA, 25 bp, Probe sequence
aacgaatgagattggttataatgcc

SEQ ID NO: 31070 - DNA, 25 bp, Probe sequence
gttgatgttaagcgtgatatgagac

SEQ ID NO: 31071 - DNA, 25 bp, Probe sequence
agttgatgttaagcgtgatatgaga

SEQ ID NO: 31072 - DNA, 25 bp, Probe sequence
aagttgatgttaagcgtgatatgag

SEQ ID NO: 31073 - DNA, 25 bp, Probe sequence
gatgttaagcgtgatatgagacaag

SEQ ID NO: 31074 - DNA, 25 bp, Probe sequence
gttagaccatcaacatattgcttgt

SEQ ID NO: 31075 - DNA, 25 bp, Probe sequence
tgatgttaagcgtgatatgagacaa

SEQ ID NO: 31076 - DNA, 25 bp, Probe sequence
ttgatgttaagcgtgatatgagaca

SEQ ID NO: 31077 - DNA, 25 bp, Probe sequence
gttaagcgtgatatgagacaagcag

SEQ ID NO: 31078 - DNA, 25 bp, Probe sequence
atgttaagcgtgatatgagacaagc

SEQ ID NO: 31079 - DNA, 25 bp, Probe sequence
tcacagttacaagagttagaagcat

SEQ ID NO: 31080 - DNA, 25 bp, Probe sequence
tatcggcttggttgttaattgaatc

SEQ ID NO: 31081 - DNA, 25 bp, Probe sequence
gttatcggcttggttgttaattgaa

SEQ ID NO: 31082 - DNA, 25 bp, Probe sequence
ttcacagttacaagagttagaagca

SEQ ID NO: 31083 - DNA, 25 bp, Probe sequence
ttatcggcttggttgttaattgaat

SEQ ID NO: 31084 - DNA, 25 bp, Probe sequence
gttacaagagttagaagcatatcgt

SEQ ID NO: 31085 - DNA, 25 bp, Probe sequence
ataacgagttaatgagtgaatggca

SEQ ID NO: 31086 - DNA, 25 bp, Probe sequence
attcacagttacaagagttagaagc

SEQ ID NO: 31087 - DNA, 25 bp, Probe sequence
taacgagttaatgagtgaatggcaa

SEQ ID NO: 31088 - DNA, 25 bp, Probe sequence
atatgattactgttgatggcgatac

SEQ ID NO: 31089 - DNA, 25 bp, Probe sequence
aatatgattactgttgatggcgata

SEQ ID NO: 31090 - DNA, 25 bp, Probe sequence
tatgattactgttgatggcgataca

SEQ ID NO: 31091 - DNA, 25 bp, Probe sequence
atgattactgttgatggcgatacaa

SEQ ID NO: 31092 - DNA, 25 bp, Probe sequence
ttaatatgattactgttgatggcga

SEQ ID NO: 31093 - DNA, 25 bp, Probe sequence
taatatgattactgttgatggcgat

SEQ ID NO: 31094 - DNA, 25 bp, Probe sequence
gattactgttgatggcgatacaagt

SEQ ID NO: 31095 - DNA, 25 bp, Probe sequence
tgattactgttgatggcgatacaag

SEQ ID NO: 31096 - DNA, 25 bp, Probe sequence
cacttgttgttaattcagctaatgc

SEQ ID NO: 31097 - DNA, 25 bp, Probe sequence
ttacgatggtatgttatatgatgcg

SEQ ID NO: 31098 - DNA, 25 bp, Probe sequence
ctggtcgtggtggaagtatgttatt

SEQ ID NO: 31099 - DNA, 25 bp, Probe sequence
cgtggtggaagtatgttattgcttg

SEQ ID NO: 31100 - DNA, 25 bp, Probe sequence
tcgtggtggaagtatgttattgctt

SEQ ID NO: 31101 - DNA, 25 bp, Probe sequence
gtggtggaagtatgttattgcttgc

SEQ ID NO: 31102 - DNA, 25 bp, Probe sequence
tggtcgtggtggaagtatgttattg

SEQ ID NO: 31103 - DNA, 25 bp, Probe sequence
aagtttagacggctatatggttgtt

SEQ ID NO: 31104 - DNA, 25 bp, Probe sequence
agtttagacggctatatggttgtta

SEQ ID NO: 31105 - DNA, 25 bp, Probe sequence
taagtttagacggctatatggttgt

SEQ ID NO: 31106 - DNA, 25 bp, Probe sequence
atgataaagatggtacagtgtggac

SEQ ID NO: 31107 - DNA, 25 bp, Probe sequence
tggtacagtgtggacaagtttatat

SEQ ID NO: 31108 - DNA, 25 bp, Probe sequence
atggtacagtgtggacaagtttata

SEQ ID NO: 31109 - DNA, 25 bp, Probe sequence
ataaagatggtacagtgtggacaag

SEQ ID NO: 31110 - DNA, 25 bp, Probe sequence
gataaagatggtacagtgtggacaa

SEQ ID NO: 31111 - DNA, 25 bp, Probe sequence
gatggtacagtgtggacaagtttat

SEQ ID NO: 31112 - DNA, 25 bp, Probe sequence
tatgataaagatggtacagtgtgga

SEQ ID NO: 31113 - DNA, 25 bp, Probe sequence
tgataaagatggtacagtgtggaca

SEQ ID NO: 31114 - DNA, 25 bp, Probe sequence
agatggtacagtgtggacaagttta

SEQ ID NO: 31115 - DNA, 25 bp, Probe sequence
tgacattattgccacaggaattgaa

SEQ ID NO: 31116 - DNA, 25 bp, Probe sequence
ttgaagatgaccttgccatgatatt

SEQ ID NO: 31117 - DNA, 25 bp, Probe sequence
atagtgacattattgccacaggaat

SEQ ID NO: 31118 - DNA, 25 bp, Probe sequence
tagtgacattattgccacaggaatt

SEQ ID NO: 31119 - DNA, 25 bp, Probe sequence
attgatagtgacattattgccacag

SEQ ID NO: 31120 - DNA, 25 bp, Probe sequence
gatagtgacattattgccacaggaa

SEQ ID NO: 31121 - DNA, 25 bp, Probe sequence
ttgatagtgacattattgccacagg

SEQ ID NO: 31122 - DNA, 25 bp, Probe sequence
tgatagtgacattattgccacagga

SEQ ID NO: 31123 - DNA, 25 bp, Probe sequence
tattgatagtgacattattgccaca

SEQ ID NO: 31124 - DNA, 25 bp, Probe sequence
gctgaaggttggcgtattgataatt

SEQ ID NO: 31125 - DNA, 25 bp, Probe sequence
ctgaaggttggcgtattgataattt

SEQ ID NO: 31126 - DNA, 25 bp, Probe sequence
tgaaggttggcgtattgataattta

SEQ ID NO: 31127 - DNA, 25 bp, Probe sequence
cgtattgaaacagatggagatgata

SEQ ID NO: 31128 - DNA, 25 bp, Probe sequence
tggttatcagattcctaaacaacaa

SEQ ID NO: 31129 - DNA, 25 bp, Probe sequence
ttggttatcagattcctaaacaaca

SEQ ID NO: 31130 - DNA, 25 bp, Probe sequence
gaaggttggcgtattgataatttaa

SEQ ID NO: 31131 - DNA, 25 bp, Probe sequence
gcaccacaaataaagcctttagtta

SEQ ID NO: 31132 - DNA, 25 bp, Probe sequence
agctgaaggttggcgtattgataat

SEQ ID NO: 31133 - DNA, 25 bp, Probe sequence
cggagatattgctgtgagtgtatat

SEQ ID NO: 31134 - DNA, 25 bp, Probe sequence
attgaagatactacggttgaagaag

SEQ ID NO: 31135 - DNA, 25 bp, Probe sequence
tattgctggagaatatgctgtaaca

SEQ ID NO: 31136 - DNA, 25 bp, Probe sequence
tgaagatactacggttgaagaagtt

SEQ ID NO: 31137 - DNA, 25 bp, Probe sequence
ttgaagatactacggttgaagaagt

SEQ ID NO: 31138 - DNA, 25 bp, Probe sequence
ttgctgtgagtgtatatagtggatg

SEQ ID NO: 31139 - DNA, 25 bp, Probe sequence
attgctgtgagtgtatatagtggat

SEQ ID NO: 31140 - DNA, 25 bp, Probe sequence
ggtggagactgtggtattacaatta

SEQ ID NO: 31141 - DNA, 25 bp, Probe sequence
tctgtacttattgcgttagatcgtt

SEQ ID NO: 31142 - DNA, 25 bp, Probe sequence
ttattggtgtaagtgatggtggtaa

SEQ ID NO: 31143 - DNA, 25 bp, Probe sequence
ctgttgttattggtgtaagtgatgg

SEQ ID NO: 31144 - DNA, 25 bp, Probe sequence
gttgttattggtgtaagtgatggtg

SEQ ID NO: 31145 - DNA, 25 bp, Probe sequence
gttattggtgtaagtgatggtggta

SEQ ID NO: 31146 - DNA, 25 bp, Probe sequence
tgttgttattggtgtaagtgatggt

SEQ ID NO: 31147 - DNA, 25 bp, Probe sequence
gctgttgttattggtgtaagtgatg

SEQ ID NO: 31148 - DNA, 25 bp, Probe sequence
ttgttattggtgtaagtgatggtgg

SEQ ID NO: 31149 - DNA, 25 bp, Probe sequence
ggctgttgttattggtgtaagtgat

SEQ ID NO: 31150 - DNA, 25 bp, Probe sequence
atgtggctgttgttattggtgtaag

SEQ ID NO: 31151 - DNA, 25 bp, Probe sequence
aatgtcaggcagtcaatataagaac

SEQ ID NO: 31152 - DNA, 25 bp, Probe sequence
atgtcaggcagtcaatataagaacg

SEQ ID NO: 31153 - DNA, 25 bp, Probe sequence
gaatgtcaggcagtcaatataagaa

SEQ ID NO: 31154 - DNA, 25 bp, Probe sequence
tgaatgtcaggcagtcaatataaga

SEQ ID NO: 31155 - DNA, 25 bp, Probe sequence
tgatgaatgtcaggcagtcaatata

SEQ ID NO: 31156 - DNA, 25 bp, Probe sequence
atgaatgtcaggcagtcaatataag

SEQ ID NO: 31157 - DNA, 25 bp, Probe sequence
gatgaatgtcaggcagtcaatataa

SEQ ID NO: 31158 - DNA, 25 bp, Probe sequence
gtgatgaatgtcaggcagtcaatat

SEQ ID NO: 31159 - DNA, 25 bp, Probe sequence
atcgtgataggttgtcaatcttatt

SEQ ID NO: 31160 - DNA, 25 bp, Probe sequence
ggtaataagcgaagagaacaacaag

SEQ ID NO: 31161 - DNA, 25 bp, Probe sequence
aatggtaataagcgaagagaacaac

SEQ ID NO: 31162 - DNA, 25 bp, Probe sequence
atggtaataagcgaagagaacaaca

SEQ ID NO: 31163 - DNA, 25 bp, Probe sequence
gtaataagcgaagagaacaacaaga

SEQ ID NO: 31164 - DNA, 25 bp, Probe sequence
aataagcgaagagaacaacaagagt

SEQ ID NO: 31165 - DNA, 25 bp, Probe sequence
tggtaataagcgaagagaacaacaa

SEQ ID NO: 31166 - DNA, 25 bp, Probe sequence
gagaacaacaagagtcaatgaatgg

SEQ ID NO: 31167 - DNA, 25 bp, Probe sequence
taataagcgaagagaacaacaagag

SEQ ID NO: 31168 - DNA, 25 bp, Probe sequence
gaacaacaagagtcaatgaatggta

SEQ ID NO: 31169 - DNA, 25 bp, Probe sequence
attcgtgagttattccgtagacatt

SEQ ID NO: 31170 - DNA, 25 bp, Probe sequence
tatgtgattcgtgagttattccgta

SEQ ID NO: 31171 - DNA, 25 bp, Probe sequence
ttatgtgattcgtgagttattccgt

SEQ ID NO: 31172 - DNA, 25 bp, Probe sequence
gattcgtgagttattccgtagacat

SEQ ID NO: 31173 - DNA, 25 bp, Probe sequence
ttcgtgagttattccgtagacattc

SEQ ID NO: 31174 - DNA, 25 bp, Probe sequence
atgtgattcgtgagttattccgtag

SEQ ID NO: 31175 - DNA, 25 bp, Probe sequence
agttattccgtagacattcagaagt

SEQ ID NO: 31176 - DNA, 25 bp, Probe sequence
gagttattccgtagacattcagaag

SEQ ID NO: 31177 - DNA, 25 bp, Probe sequence
gtgattcgtgagttattccgtagac

SEQ ID NO: 31178 - DNA, 25 bp, Probe sequence
tggtgtaggatttggtataggtatg

SEQ ID NO: 31179 - DNA, 25 bp, Probe sequence
ataaagtagactgggtagggcataa

SEQ ID NO: 31180 - DNA, 25 bp, Probe sequence
taaagtagactgggtagggcataaa

SEQ ID NO: 31181 - DNA, 25 bp, Probe sequence
ctggtgtaggatttggtataggtat

SEQ ID NO: 31182 - DNA, 25 bp, Probe sequence
gataaagtagactgggtagggcata

SEQ ID NO: 31183 - DNA, 25 bp, Probe sequence
gttgctggtgtaggatttggtatag

SEQ ID NO: 31184 - DNA, 25 bp, Probe sequence
gctggtgtaggatttggtataggta

SEQ ID NO: 31185 - DNA, 25 bp, Probe sequence
gtttggctatgagtacagtatttgc

SEQ ID NO: 31186 - DNA, 25 bp, Probe sequence
ggtttggctatgagtacagtatttg

SEQ ID NO: 31187 - DNA, 25 bp, Probe sequence
attatcgtgttcgttctgagtctat

SEQ ID NO: 31188 - DNA, 25 bp, Probe sequence
gtattatcgtgttcgttctgagtct

SEQ ID NO: 31189 - DNA, 25 bp, Probe sequence
tattatcgtgttcgttctgagtcta

SEQ ID NO: 31190 - DNA, 25 bp, Probe sequence
cgtattatcgtgttcgttctgagtc

SEQ ID NO: 31191 - DNA, 25 bp, Probe sequence
gcttcggaagatgttcaagataatt

SEQ ID NO: 31192 - DNA, 25 bp, Probe sequence
tgcttcggaagatgttcaagataat

SEQ ID NO: 31193 - DNA, 25 bp, Probe sequence
acatcaagttattcaacaagtgaga

SEQ ID NO: 31194 - DNA, 25 bp, Probe sequence
gtgcttcggaagatgttcaagataa

SEQ ID NO: 31195 - DNA, 25 bp, Probe sequence
aagcagatgatgatggtggtaactt

SEQ ID NO: 31196 - DNA, 25 bp, Probe sequence
aacagcaggtattattggatctact

SEQ ID NO: 31197 - DNA, 25 bp, Probe sequence
cagcaggtattattggatctactgt

SEQ ID NO: 31198 - DNA, 25 bp, Probe sequence
acagcaggtattattggatctactg

SEQ ID NO: 31199 - DNA, 25 bp, Probe sequence
agcaggtattattggatctactgtt

SEQ ID NO: 31200 - DNA, 25 bp, Probe sequence
aagctgtagatagtgttggtaatgc

SEQ ID NO: 31201 - DNA, 25 bp, Probe sequence
ctgtagatagtgttggtaatgccat

SEQ ID NO: 31202 - DNA, 25 bp, Probe sequence
taacagcaggtattattggatctac

SEQ ID NO: 31203 - DNA, 25 bp, Probe sequence
gtagatagtgttggtaatgccattg

SEQ ID NO: 31204 - DNA, 25 bp, Probe sequence
tgtagatagtgttggtaatgccatt

SEQ ID NO: 31205 - DNA, 25 bp, Probe sequence
ttaactacaggaataggtattggcg

SEQ ID NO: 31206 - DNA, 25 bp, Probe sequence
ggtatgtatgatgatatggcaaacg

SEQ ID NO: 31207 - DNA, 25 bp, Probe sequence
ataggtatgtatgatgatatggcaa

SEQ ID NO: 31208 - DNA, 25 bp, Probe sequence
atgtatgatgatatggcaaacgatg

SEQ ID NO: 31209 - DNA, 25 bp, Probe sequence
tgtatgatgatatggcaaacgatga

SEQ ID NO: 31210 - DNA, 25 bp, Probe sequence
gtatgatgatatggcaaacgatgat

SEQ ID NO: 31211 - DNA, 25 bp, Probe sequence
gctaaagaacatccagaagacgata

SEQ ID NO: 31212 - DNA, 25 bp, Probe sequence
gtatgtatgatgatatggcaaacga

SEQ ID NO: 31213 - DNA, 25 bp, Probe sequence
tgatgatatggcaaacgatgataaa

SEQ ID NO: 31214 - DNA, 25 bp, Probe sequence
aaacttagtgagaaggaacttgaaa

SEQ ID NO: 31215 - DNA, 25 bp, Probe sequence
aggatttataggtattgcagcattt

SEQ ID NO: 31216 - DNA, 25 bp, Probe sequence
aagtcgttcaatataatgatgagta

SEQ ID NO: 31217 - DNA, 25 bp, Probe sequence
tctttctaataagcatgggctcaat

SEQ ID NO: 31218 - DNA, 25 bp, Probe sequence
ctttctaataagcatgggctcaatt

SEQ ID NO: 31219 - DNA, 25 bp, Probe sequence
ttctttctaataagcatgggctcaa

SEQ ID NO: 31220 - DNA, 25 bp, Probe sequence
tttctttctaataagcatgggctca

SEQ ID NO: 31221 - DNA, 25 bp, Probe sequence
taggatttataggtattgcagcatt

SEQ ID NO: 31222 - DNA, 25 bp, Probe sequence
aaatccgagatataaagtcgttcaa

SEQ ID NO: 31223 - DNA, 25 bp, Probe sequence
tggtggacttatgtttatttacttt

SEQ ID NO: 31224 - DNA, 25 bp, Probe sequence
ttggtggacttatgtttatttactt

SEQ ID NO: 31225 - DNA, 25 bp, Probe sequence
attggtggacttatgtttatttact

SEQ ID NO: 31226 - DNA, 25 bp, Probe sequence
ggacttatgtttatttactttacgg

SEQ ID NO: 31227 - DNA, 25 bp, Probe sequence
gacttatgtttatttactttacggt

SEQ ID NO: 31228 - DNA, 25 bp, Probe sequence
tggacttatgtttatttactttacg

SEQ ID NO: 31229 - DNA, 25 bp, Probe sequence
ggtggacttatgtttatttacttta

SEQ ID NO: 31230 - DNA, 25 bp, Probe sequence
acttatgtttatttactttacggtt

SEQ ID NO: 31231 - DNA, 25 bp, Probe sequence
ttcgtattaataagggttttcgttt

SEQ ID NO: 31232 - DNA, 25 bp, Probe sequence
tgcgttattatcatttgttcggttt

SEQ ID NO: 31233 - DNA, 25 bp, Probe sequence
ttgcgttattatcatttgttcggtt

SEQ ID NO: 31234 - DNA, 25 bp, Probe sequence
attgcgttattatcatttgttcggt

SEQ ID NO: 31235 - DNA, 25 bp, Probe sequence
aatatgtccaaatcagcagagaaga

SEQ ID NO: 31236 - DNA, 25 bp, Probe sequence
aaatatgtccaaatcagcagagaag

SEQ ID NO: 31237 - DNA, 25 bp, Probe sequence
tgtggtggattatcaatcatgttct

SEQ ID NO: 31238 - DNA, 25 bp, Probe sequence
ctgtggtggattatcaatcatgttc

SEQ ID NO: 31239 - DNA, 25 bp, Probe sequence
tctgtggtggattatcaatcatgtt

SEQ ID NO: 31240 - DNA, 25 bp, Probe sequence
ttctgtggtggattatcaatcatgt

SEQ ID NO: 31241 - DNA, 25 bp, Probe sequence
gagttggtgactggataagtaatga

SEQ ID NO: 31242 - DNA, 25 bp, Probe sequence
ttggtgactggataagtaatgaagt

SEQ ID NO: 31243 - DNA, 25 bp, Probe sequence
agttggtgactggataagtaatgaa

SEQ ID NO: 31244 - DNA, 25 bp, Probe sequence
gttggtgactggataagtaatgaag

SEQ ID NO: 31245 - DNA, 25 bp, Probe sequence
ggagttggtgactggataagtaatg

SEQ ID NO: 31246 - DNA, 25 bp, Probe sequence
tggagttggtgactggataagtaat

SEQ ID NO: 31247 - DNA, 25 bp, Probe sequence
agtagtattggttgttggtattgta

SEQ ID NO: 31248 - DNA, 25 bp, Probe sequence
tagtagtattggttgttggtattgt

SEQ ID NO: 31249 - DNA, 25 bp, Probe sequence
gtggagttggtgactggataagtaa

SEQ ID NO: 31250 - DNA, 25 bp, Probe sequence
gaacaatcctactaggtgctacttc

SEQ ID NO: 31251 - DNA, 25 bp, Probe sequence
aacaatcctactaggtgctacttcc

SEQ ID NO: 31252 - DNA, 25 bp, Probe sequence
ggaacaatcctactaggtgctactt

SEQ ID NO: 31253 - DNA, 25 bp, Probe sequence
tatatggctatttgttgattggagg

SEQ ID NO: 31254 - DNA, 25 bp, Probe sequence
atatggctatttgttgattggaggc

SEQ ID NO: 31255 - DNA, 25 bp, Probe sequence
atcctactaggtgctacttccagaa

SEQ ID NO: 31256 - DNA, 25 bp, Probe sequence
aatcctactaggtgctacttccaga

SEQ ID NO: 31257 - DNA, 25 bp, Probe sequence
caatcctactaggtgctacttccag

SEQ ID NO: 31258 - DNA, 25 bp, Probe sequence
tgctttgtgaaaccgaaattatcaa

SEQ ID NO: 31259 - DNA, 25 bp, Probe sequence
gaagataatgcgaatacagttcagt

SEQ ID NO: 31260 - DNA, 25 bp, Probe sequence
aagataatgcgaatacagttcagta

SEQ ID NO: 31261 - DNA, 25 bp, Probe sequence
cttctagtaagtctgatgatatggc

SEQ ID NO: 31262 - DNA, 25 bp, Probe sequence
atgcgaatacagttcagtatagtcc

SEQ ID NO: 31263 - DNA, 25 bp, Probe sequence
gcgaatacagttcagtatagtccta

SEQ ID NO: 31264 - DNA, 25 bp, Probe sequence
tgcgaatacagttcagtatagtcct

SEQ ID NO: 31265 - DNA, 25 bp, Probe sequence
aatgcgaatacagttcagtatagtc

SEQ ID NO: 31266 - DNA, 25 bp, Probe sequence
aaaggcgatgattatgttgctaaag

SEQ ID NO: 31267 - DNA, 25 bp, Probe sequence
gcgatgattatgttgctaaagttga

SEQ ID NO: 31268 - DNA, 25 bp, Probe sequence
atgctgtatgatacttctaggtgtt

SEQ ID NO: 31269 - DNA, 25 bp, Probe sequence
caatggctctgagtatgttagtaac

SEQ ID NO: 31270 - DNA, 25 bp, Probe sequence
ttctactgaatatgtcatcggttct

SEQ ID NO: 31271 - DNA, 25 bp, Probe sequence
ggctctgagtatgttagtaacttca

SEQ ID NO: 31272 - DNA, 25 bp, Probe sequence
tggctctgagtatgttagtaacttc

SEQ ID NO: 31273 - DNA, 25 bp, Probe sequence
atggctctgagtatgttagtaactt

SEQ ID NO: 31274 - DNA, 25 bp, Probe sequence
aatggctctgagtatgttagtaact

SEQ ID NO: 31275 - DNA, 25 bp, Probe sequence
acaatggctctgagtatgttagtaa

SEQ ID NO: 31276 - DNA, 25 bp, Probe sequence
catgctgtatgatacttctaggtgt

SEQ ID NO: 31277 - DNA, 25 bp, Probe sequence
tccattgaggataatcttgattggt

SEQ ID NO: 31278 - DNA, 25 bp, Probe sequence
gtccattgaggataatcttgattgg

SEQ ID NO: 31279 - DNA, 25 bp, Probe sequence
tgaggataatcttgattggttatgt

SEQ ID NO: 31280 - DNA, 25 bp, Probe sequence
ccattgaggataatcttgattggtt

SEQ ID NO: 31281 - DNA, 25 bp, Probe sequence
gttatgaaatacaaatgcgaaaggc

SEQ ID NO: 31282 - DNA, 25 bp, Probe sequence
cgttatgaaatacaaatgcgaaagg

SEQ ID NO: 31283 - DNA, 25 bp, Probe sequence
agtccattgaggataatcttgattg

SEQ ID NO: 31284 - DNA, 25 bp, Probe sequence
ggaatcgttatgaaatacaaatgcg

SEQ ID NO: 31285 - DNA, 25 bp, Probe sequence
aatttgtcagacggaagaagtaaag

SEQ ID NO: 31286 - DNA, 25 bp, Probe sequence
cctcgtatgttacacaatggaagat

SEQ ID NO: 31287 - DNA, 25 bp, Probe sequence
ctcgtatgttacacaatggaagata

SEQ ID NO: 31288 - DNA, 25 bp, Probe sequence
tcgtatgttacacaatggaagataa

SEQ ID NO: 31289 - DNA, 25 bp, Probe sequence
cgtttggagcataggtggtattata

SEQ ID NO: 31290 - DNA, 25 bp, Probe sequence
atcaatcaccactcaaatcatcatc

SEQ ID NO: 31291 - DNA, 25 bp, Probe sequence
gagcataggtggtattatatttggc

SEQ ID NO: 31292 - DNA, 25 bp, Probe sequence
gcctaaactatcaatcaccactcaa

SEQ ID NO: 31293 - DNA, 25 bp, Probe sequence
gttaagcgtggcaaagataaagaaa

SEQ ID NO: 31294 - DNA, 25 bp, Probe sequence
agacaagaatgaaacaactgaagaa

SEQ ID NO: 31295 - DNA, 25 bp, Probe sequence
tagcattacatccacttattagcga

SEQ ID NO: 31296 - DNA, 25 bp, Probe sequence
agcattacatccacttattagcgaa

SEQ ID NO: 31297 - DNA, 25 bp, Probe sequence
ttagcattacatccacttattagcg

SEQ ID NO: 31298 - DNA, 25 bp, Probe sequence
gcattacatccacttattagcgaaa

SEQ ID NO: 31299 - DNA, 25 bp, Probe sequence
tcagtcatatttacaccacatctcg

SEQ ID NO: 31300 - DNA, 25 bp, Probe sequence
tcatctgaatatacgactgaatcat

SEQ ID NO: 31301 - DNA, 25 bp, Probe sequence
cagtcatatttacaccacatctcgt

SEQ ID NO: 31302 - DNA, 25 bp, Probe sequence
tcagccatttgtcagaattagagat

SEQ ID NO: 31303 - DNA, 25 bp, Probe sequence
atcagccatttgtcagaattagaga

SEQ ID NO: 31304 - DNA, 25 bp, Probe sequence
tctctactttattcgcagttacatt

SEQ ID NO: 31305 - DNA, 25 bp, Probe sequence
atctctactttattcgcagttacat

SEQ ID NO: 31306 - DNA, 25 bp, Probe sequence
tatctctactttattcgcagttaca

SEQ ID NO: 31307 - DNA, 25 bp, Probe sequence
ttattcgcagttacattaagaaagt

SEQ ID NO: 31308 - DNA, 25 bp, Probe sequence
gtatctctactttattcgcagttac

SEQ ID NO: 31309 - DNA, 25 bp, Probe sequence
actttattcgcagttacattaagaa

SEQ ID NO: 31310 - DNA, 25 bp, Probe sequence
attcgcagttacattaagaaagtat

SEQ ID NO: 31311 - DNA, 25 bp, Probe sequence
tgctctattatcaatgagttatcaa

SEQ ID NO: 31312 - DNA, 25 bp, Probe sequence
ctctactttattcgcagttacatta

SEQ ID NO: 31313 - DNA, 25 bp, Probe sequence
gcagatagattatatcgctacacaa

SEQ ID NO: 31314 - DNA, 25 bp, Probe sequence
ttgtctattgtgtatgagcttgagt

SEQ ID NO: 31315 - DNA, 25 bp, Probe sequence
tctattgtgtatgagcttgagtgaa

SEQ ID NO: 31316 - DNA, 25 bp, Probe sequence
gtctattgtgtatgagcttgagtga

SEQ ID NO: 31317 - DNA, 25 bp, Probe sequence
tgtctattgtgtatgagcttgagtg

SEQ ID NO: 31318 - DNA, 25 bp, Probe sequence
ctattgtgtatgagcttgagtgaag

SEQ ID NO: 31319 - DNA, 25 bp, Probe sequence
tatgttgctagtcgtataaattggg

SEQ ID NO: 31320 - DNA, 25 bp, Probe sequence
agcagatagattatatcgctacaca

SEQ ID NO: 31321 - DNA, 25 bp, Probe sequence
acagcagatagattatatcgctaca

SEQ ID NO: 31322 - DNA, 25 bp, Probe sequence
tattgtgttacttggtggtactgta

SEQ ID NO: 31323 - DNA, 25 bp, Probe sequence
gtattgtgttacttggtggtactgt

SEQ ID NO: 31324 - DNA, 25 bp, Probe sequence
ggtattgtgttacttggtggtactg

SEQ ID NO: 31325 - DNA, 25 bp, Probe sequence
gttacttggtggtactgtaagaaga

SEQ ID NO: 31326 - DNA, 25 bp, Probe sequence
tgttacttggtggtactgtaagaag

SEQ ID NO: 31327 - DNA, 25 bp, Probe sequence
attgtgttacttggtggtactgtaa

SEQ ID NO: 31328 - DNA, 25 bp, Probe sequence
gtgttacttggtggtactgtaagaa

SEQ ID NO: 31329 - DNA, 25 bp, Probe sequence
ttgtgttacttggtggtactgtaag

SEQ ID NO: 31330 - DNA, 25 bp, Probe sequence
ttacttggtggtactgtaagaagaa

SEQ ID NO: 31331 - DNA, 25 bp, Probe sequence
aagaatgcgaattagttgaaccaga

SEQ ID NO: 31332 - DNA, 25 bp, Probe sequence
tacaagaatgcgaattagttgaacc

SEQ ID NO: 31333 - DNA, 25 bp, Probe sequence
caagaatgcgaattagttgaaccag

SEQ ID NO: 31334 - DNA, 25 bp, Probe sequence
agaatgcgaattagttgaaccagac

SEQ ID NO: 31335 - DNA, 25 bp, Probe sequence
acaagaatgcgaattagttgaacca

SEQ ID NO: 31336 - DNA, 25 bp, Probe sequence
ttacaagaatgcgaattagttgaac

SEQ ID NO: 31337 - DNA, 25 bp, Probe sequence
gaatgcgaattagttgaaccagacg

SEQ ID NO: 31338 - DNA, 25 bp, Probe sequence
atgtatgttcaaatgtcaggcgatt

SEQ ID NO: 31339 - DNA, 25 bp, Probe sequence
aatgtatgttcaaatgtcaggcgat

SEQ ID NO: 31340 - DNA, 25 bp, Probe sequence
agtgaatatggcttcgataggtaat

SEQ ID NO: 31341 - DNA, 25 bp, Probe sequence
tagtgaatatggcttcgataggtaa

SEQ ID NO: 31342 - DNA, 25 bp, Probe sequence
ttagtgaatatggcttcgataggta

SEQ ID NO: 31343 - DNA, 25 bp, Probe sequence
aataccgactttcaaacaaggattg

SEQ ID NO: 31344 - DNA, 25 bp, Probe sequence
caggaagttcagttctatttggaat

SEQ ID NO: 31345 - DNA, 25 bp, Probe sequence
gcaggaagttcagttctatttggaa

SEQ ID NO: 31346 - DNA, 25 bp, Probe sequence
taataccgactttcaaacaaggatt

SEQ ID NO: 31347 - DNA, 25 bp, Probe sequence
ttaataccgactttcaaacaaggat

SEQ ID NO: 31348 - DNA, 25 bp, Probe sequence
gtgaatatggcttcgataggtaata

SEQ ID NO: 31349 - DNA, 25 bp, Probe sequence
atattagaagtttgtgaaatggcaa

SEQ ID NO: 31350 - DNA, 25 bp, Probe sequence
tatattagaagtttgtgaaatggca

SEQ ID NO: 31351 - DNA, 25 bp, Probe sequence
gtatattagaagtttgtgaaatggc

SEQ ID NO: 31352 - DNA, 25 bp, Probe sequence
cgtatattagaagtttgtgaaatgg

SEQ ID NO: 31353 - DNA, 25 bp, Probe sequence
tattagaagtttgtgaaatggcaaa

SEQ ID NO: 31354 - DNA, 25 bp, Probe sequence
tcgtatattagaagtttgtgaaatg

SEQ ID NO: 31355 - DNA, 25 bp, Probe sequence
aagatttcatggtgtttctaaaaga

SEQ ID NO: 31356 - DNA, 25 bp, Probe sequence
attagaagtttgtgaaatggcaaaa

SEQ ID NO: 31357 - DNA, 25 bp, Probe sequence
tttaagatttcatggtgtttctaaa

SEQ ID NO: 31358 - DNA, 25 bp, Probe sequence
gttgtaatgatattgtgtgctctcg

SEQ ID NO: 31359 - DNA, 25 bp, Probe sequence
agttgtaatgatattgtgtgctctc

SEQ ID NO: 31360 - DNA, 25 bp, Probe sequence
gctagttgtaatgatattgtgtgct

SEQ ID NO: 31361 - DNA, 25 bp, Probe sequence
gtaatgatattgtgtgctctcgctt

SEQ ID NO: 31362 - DNA, 25 bp, Probe sequence
ttgtaatgatattgtgtgctctcgc

SEQ ID NO: 31363 - DNA, 25 bp, Probe sequence
tagttgtaatgatattgtgtgctct

SEQ ID NO: 31364 - DNA, 25 bp, Probe sequence
ttctggtcagttataggaagttcgg

SEQ ID NO: 31365 - DNA, 25 bp, Probe sequence
ctggtcagttataggaagttcggtt

SEQ ID NO: 31366 - DNA, 25 bp, Probe sequence
tgtaatgatattgtgtgctctcgct

SEQ ID NO: 31367 - DNA, 25 bp, Probe sequence
atgctgacggagataatcatgtatt

SEQ ID NO: 31368 - DNA, 25 bp, Probe sequence
tatgctgacggagataatcatgtat

SEQ ID NO: 31369 - DNA, 25 bp, Probe sequence
atatgctgacggagataatcatgta

SEQ ID NO: 31370 - DNA, 25 bp, Probe sequence
tatatgctgacggagataatcatgt

SEQ ID NO: 31371 - DNA, 25 bp, Probe sequence
ttatatgctgacggagataatcatg

SEQ ID NO: 31372 - DNA, 25 bp, Probe sequence
taagaactggtgcaattcaagagaa

SEQ ID NO: 31373 - DNA, 25 bp, Probe sequence
ttaagaactggtgcaattcaagaga

SEQ ID NO: 31374 - DNA, 25 bp, Probe sequence
ctgttgataacgctatttggaaagt

SEQ ID NO: 31375 - DNA, 25 bp, Probe sequence
tctgttgataacgctatttggaaag

SEQ ID NO: 31376 - DNA, 25 bp, Probe sequence
tggtgttatgttaagaaggtattcc

SEQ ID NO: 31377 - DNA, 25 bp, Probe sequence
tagtaagtacatggttagcactctt

SEQ ID NO: 31378 - DNA, 25 bp, Probe sequence
ttagtaagtacatggttagcactct

SEQ ID NO: 31379 - DNA, 25 bp, Probe sequence
aggtggtggttcattctttactatt

SEQ ID NO: 31380 - DNA, 25 bp, Probe sequence
tttaggtggtggttcattctttact

SEQ ID NO: 31381 - DNA, 25 bp, Probe sequence
ttaggtggtggttcattctttacta

SEQ ID NO: 31382 - DNA, 25 bp, Probe sequence
ggtggtggttcattctttactattt

SEQ ID NO: 31383 - DNA, 25 bp, Probe sequence
atttaggtggtggttcattctttac

SEQ ID NO: 31384 - DNA, 25 bp, Probe sequence
taggtggtggttcattctttactat

SEQ ID NO: 31385 - DNA, 25 bp, Probe sequence
atacgattgtagcatctggtcatag

SEQ ID NO: 31386 - DNA, 25 bp, Probe sequence
gatacgattgtagcatctggtcata

SEQ ID NO: 31387 - DNA, 25 bp, Probe sequence
tacgattgtagcatctggtcataga

SEQ ID NO: 31388 - DNA, 25 bp, Probe sequence
gattgtagcatctggtcatagaggt

SEQ ID NO: 31389 - DNA, 25 bp, Probe sequence
cattcactaggacatggtattggtt

SEQ ID NO: 31390 - DNA, 25 bp, Probe sequence
gacattcactaggacatggtattgg

SEQ ID NO: 31391 - DNA, 25 bp, Probe sequence
ggacattcactaggacatggtattg

SEQ ID NO: 31392 - DNA, 25 bp, Probe sequence
attgtagcatctggtcatagaggtg

SEQ ID NO: 31393 - DNA, 25 bp, Probe sequence
acgattgtagcatctggtcatagag

SEQ ID NO: 31394 - DNA, 25 bp, Probe sequence
ttattggttggttggtaatgactgc

SEQ ID NO: 31395 - DNA, 25 bp, Probe sequence
tttattggttggttggtaatgactg

SEQ ID NO: 31396 - DNA, 25 bp, Probe sequence
taggctttattggttggttggtaat

SEQ ID NO: 31397 - DNA, 25 bp, Probe sequence
ataggctttattggttggttggtaa

SEQ ID NO: 31398 - DNA, 25 bp, Probe sequence
ctttattggttggttggtaatgact

SEQ ID NO: 31399 - DNA, 25 bp, Probe sequence
catggtgattgtaatatgttgtgca

SEQ ID NO: 31400 - DNA, 25 bp, Probe sequence
gctttattggttggttggtaatgac

SEQ ID NO: 31401 - DNA, 25 bp, Probe sequence
atggtgattgtaatatgttgtgcaa

SEQ ID NO: 31402 - DNA, 25 bp, Probe sequence
aataggctttattggttggttggta

SEQ ID NO: 31403 - DNA, 25 bp, Probe sequence
tataatatggcaatggatgaagcgt

SEQ ID NO: 31404 - DNA, 25 bp, Probe sequence
tatggcaatggatgaagcgttatta

SEQ ID NO: 31405 - DNA, 25 bp, Probe sequence
taatatggcaatggatgaagcgtta

SEQ ID NO: 31406 - DNA, 25 bp, Probe sequence
atatggcaatggatgaagcgttatt

SEQ ID NO: 31407 - DNA, 25 bp, Probe sequence
aatatggcaatggatgaagcgttat

SEQ ID NO: 31408 - DNA, 25 bp, Probe sequence
ataatatggcaatggatgaagcgtt

SEQ ID NO: 31409 - DNA, 25 bp, Probe sequence
atggcaatggatgaagcgttattaa

SEQ ID NO: 31410 - DNA, 25 bp, Probe sequence
attggcagaagtggaagaattaact

SEQ ID NO: 31411 - DNA, 25 bp, Probe sequence
aattggcagaagtggaagaattaac

SEQ ID NO: 31412 - DNA, 25 bp, Probe sequence
gattgactatgctattcctagatgc

SEQ ID NO: 31413 - DNA, 25 bp, Probe sequence
tggtcgatataataagcacttggat

SEQ ID NO: 31414 - DNA, 25 bp, Probe sequence
atggtcgatataataagcacttgga

SEQ ID NO: 31415 - DNA, 25 bp, Probe sequence
cggattgactatgctattcctagat

SEQ ID NO: 31416 - DNA, 25 bp, Probe sequence
aatggtcgatataataagcacttgg

SEQ ID NO: 31417 - DNA, 25 bp, Probe sequence
ggtcgatataataagcacttggatt

SEQ ID NO: 31418 - DNA, 25 bp, Probe sequence
tatttggcggattgactatgctatt

SEQ ID NO: 31419 - DNA, 25 bp, Probe sequence
ttatttggcggattgactatgctat

SEQ ID NO: 31420 - DNA, 25 bp, Probe sequence
tttatttggcggattgactatgcta

SEQ ID NO: 31421 - DNA, 25 bp, Probe sequence
gtatgatgattgaaccgactgagac

SEQ ID NO: 31422 - DNA, 25 bp, Probe sequence
cagcggttcttaatgcgaattatat

SEQ ID NO: 31423 - DNA, 25 bp, Probe sequence
agcggttcttaatgcgaattatatt

SEQ ID NO: 31424 - DNA, 25 bp, Probe sequence
tatgatgattgaaccgactgagaca

SEQ ID NO: 31425 - DNA, 25 bp, Probe sequence
tgttgaagaaggtatgatgattgaa

SEQ ID NO: 31426 - DNA, 25 bp, Probe sequence
gaataatggtgaaggtcatcgtgat

SEQ ID NO: 31427 - DNA, 25 bp, Probe sequence
atgttgaagaaggtatgatgattga

SEQ ID NO: 31428 - DNA, 25 bp, Probe sequence
ggtctattatattatgatggtgcga

SEQ ID NO: 31429 - DNA, 25 bp, Probe sequence
gttgaagaaggtatgatgattgaac

SEQ ID NO: 31430 - DNA, 25 bp, Probe sequence
atcagaagaattggttggagaagtt

SEQ ID NO: 31431 - DNA, 25 bp, Probe sequence
gaagaattggttggagaagttgtta

SEQ ID NO: 31432 - DNA, 25 bp, Probe sequence
agaagaattggttggagaagttgtt

SEQ ID NO: 31433 - DNA, 25 bp, Probe sequence
atccgaacttagatgaagaacaagg

SEQ ID NO: 31434 - DNA, 25 bp, Probe sequence
ccgaacttagatgaagaacaaggaa

SEQ ID NO: 31435 - DNA, 25 bp, Probe sequence
aagaattggttggagaagttgttaa

SEQ ID NO: 31436 - DNA, 25 bp, Probe sequence
tcagaagaattggttggagaagttg

SEQ ID NO: 31437 - DNA, 25 bp, Probe sequence
cagaagaattggttggagaagttgt

SEQ ID NO: 31438 - DNA, 25 bp, Probe sequence
aagaagtacatcagaacaatcaacc

SEQ ID NO: 31439 - DNA, 25 bp, Probe sequence
aacacaagatgatgaaggtaatcgt

SEQ ID NO: 31440 - DNA, 25 bp, Probe sequence
ttacacagcatatacgccatatcaa

SEQ ID NO: 31441 - DNA, 25 bp, Probe sequence
gcagatattgttgtaggtgatactc

SEQ ID NO: 31442 - DNA, 25 bp, Probe sequence
tacacagcatatacgccatatcaac

SEQ ID NO: 31443 - DNA, 25 bp, Probe sequence
atattgttgtaggtgatactcagcc

SEQ ID NO: 31444 - DNA, 25 bp, Probe sequence
gatattgttgtaggtgatactcagc

SEQ ID NO: 31445 - DNA, 25 bp, Probe sequence
ttctcaaggtgaattacaagccatt

SEQ ID NO: 31446 - DNA, 25 bp, Probe sequence
tattgttgtaggtgatactcagcca

SEQ ID NO: 31447 - DNA, 25 bp, Probe sequence
agtgaagtacaatattatcggtggt

SEQ ID NO: 31448 - DNA, 25 bp, Probe sequence
tgagacatacagcagagactattac

SEQ ID NO: 31449 - DNA, 25 bp, Probe sequence
gtgagacatacagcagagactatta

SEQ ID NO: 31450 - DNA, 25 bp, Probe sequence
gagacatacagcagagactattact

SEQ ID NO: 31451 - DNA, 25 bp, Probe sequence
acatacagcagagactattacttca

SEQ ID NO: 31452 - DNA, 25 bp, Probe sequence
agacatacagcagagactattactt

SEQ ID NO: 31453 - DNA, 25 bp, Probe sequence
gacatacagcagagactattacttc

SEQ ID NO: 31454 - DNA, 25 bp, Probe sequence
cgtgagacatacagcagagactatt

SEQ ID NO: 31455 - DNA, 25 bp, Probe sequence
catacagcagagactattacttcat

SEQ ID NO: 31456 - DNA, 25 bp, Probe sequence
tggttatattattggaactgctgaa

SEQ ID NO: 31457 - DNA, 25 bp, Probe sequence
tgaagaaggcggtattattgatgat

SEQ ID NO: 31458 - DNA, 25 bp, Probe sequence
atgaagaaggcggtattattgatga

SEQ ID NO: 31459 - DNA, 25 bp, Probe sequence
aatgaagaaggcggtattattgatg

SEQ ID NO: 31460 - DNA, 25 bp, Probe sequence
gaagaaggcggtattattgatgatt

SEQ ID NO: 31461 - DNA, 25 bp, Probe sequence
gttcaagttcgtaagcgtcaattaa

SEQ ID NO: 31462 - DNA, 25 bp, Probe sequence
cgtgatacattaagattagaggctg

SEQ ID NO: 31463 - DNA, 25 bp, Probe sequence
acattaagattagaggctggattgc

SEQ ID NO: 31464 - DNA, 25 bp, Probe sequence
tcgtgatacattaagattagaggct

SEQ ID NO: 31465 - DNA, 25 bp, Probe sequence
tgatacattaagattagaggctgga

SEQ ID NO: 31466 - DNA, 25 bp, Probe sequence
gttgaagaaggtaatgacatcgttg

SEQ ID NO: 31467 - DNA, 25 bp, Probe sequence
ttgaagaaggtaatgacatcgttgg

SEQ ID NO: 31468 - DNA, 25 bp, Probe sequence
cgttgaagaaggtaatgacatcgtt

SEQ ID NO: 31469 - DNA, 25 bp, Probe sequence
ttagtcgttgaagaaggtaatgaca

SEQ ID NO: 31470 - DNA, 25 bp, Probe sequence
tagtcgttgaagaaggtaatgacat

SEQ ID NO: 31471 - DNA, 25 bp, Probe sequence
cttagtcgttgaagaaggtaatgac

SEQ ID NO: 31472 - DNA, 25 bp, Probe sequence
agtcgttgaagaaggtaatgacatc

SEQ ID NO: 31473 - DNA, 25 bp, Probe sequence
atacaggttatggtacagcattgtt

SEQ ID NO: 31474 - DNA, 25 bp, Probe sequence
tacaggttatggtacagcattgtta

SEQ ID NO: 31475 - DNA, 25 bp, Probe sequence
attgctactggtggtggtattattg

SEQ ID NO: 31476 - DNA, 25 bp, Probe sequence
aattgctactggtggtggtattatt

SEQ ID NO: 31477 - DNA, 25 bp, Probe sequence
gatataattgctactggtggtggta

SEQ ID NO: 31478 - DNA, 25 bp, Probe sequence
tataattgctactggtggtggtatt

SEQ ID NO: 31479 - DNA, 25 bp, Probe sequence
atataattgctactggtggtggtat

SEQ ID NO: 31480 - DNA, 25 bp, Probe sequence
taattgctactggtggtggtattat

SEQ ID NO: 31481 - DNA, 25 bp, Probe sequence
ataattgctactggtggtggtatta

SEQ ID NO: 31482 - DNA, 25 bp, Probe sequence
agatataattgctactggtggtggt

SEQ ID NO: 31483 - DNA, 25 bp, Probe sequence
ttgctactggtggtggtattattga

SEQ ID NO: 31484 - DNA, 25 bp, Probe sequence
ttgatattagaggtagagcaagtgc

SEQ ID NO: 31485 - DNA, 25 bp, Probe sequence
aaggactacgatagcgattctaaag

SEQ ID NO: 31486 - DNA, 25 bp, Probe sequence
aaaggactacgatagcgattctaaa

SEQ ID NO: 31487 - DNA, 25 bp, Probe sequence
tacgatagcgattctaaagttacga

SEQ ID NO: 31488 - DNA, 25 bp, Probe sequence
ctacgatagcgattctaaagttacg

SEQ ID NO: 31489 - DNA, 25 bp, Probe sequence
cgatagcgattctaaagttacgaag

SEQ ID NO: 31490 - DNA, 25 bp, Probe sequence
acgatagcgattctaaagttacgaa

SEQ ID NO: 31491 - DNA, 25 bp, Probe sequence
gcgattctaaagttacgaagacatt

SEQ ID NO: 31492 - DNA, 25 bp, Probe sequence
tagcgattctaaagttacgaagaca

SEQ ID NO: 31493 - DNA, 25 bp, Probe sequence
tcattatcactatctaaccacgacg

SEQ ID NO: 31494 - DNA, 25 bp, Probe sequence
gctcattatcactatctaaccacga

SEQ ID NO: 31495 - DNA, 25 bp, Probe sequence
cactatctaaccacgacgcatataa

SEQ ID NO: 31496 - DNA, 25 bp, Probe sequence
ggctcattatcactatctaaccacg

SEQ ID NO: 31497 - DNA, 25 bp, Probe sequence
tatcactatctaaccacgacgcata

SEQ ID NO: 31498 - DNA, 25 bp, Probe sequence
acacttggctcattatcactatcta

SEQ ID NO: 31499 - DNA, 25 bp, Probe sequence
tacacttggctcattatcactatct

SEQ ID NO: 31500 - DNA, 25 bp, Probe sequence
tcactatctaaccacgacgcatata

SEQ ID NO: 31501 - DNA, 25 bp, Probe sequence
cttggctcattatcactatctaacc

SEQ ID NO: 31502 - DNA, 25 bp, Probe sequence
attactggagatactgaggtgaatg

SEQ ID NO: 31503 - DNA, 25 bp, Probe sequence
gcgattattactggagatactgagg

SEQ ID NO: 31504 - DNA, 25 bp, Probe sequence
agcgattattactggagatactgag

SEQ ID NO: 31505 - DNA, 25 bp, Probe sequence
cgattattactggagatactgaggt

SEQ ID NO: 31506 - DNA, 25 bp, Probe sequence
caagcgattattactggagatactg

SEQ ID NO: 31507 - DNA, 25 bp, Probe sequence
aagcgattattactggagatactga

SEQ ID NO: 31508 - DNA, 25 bp, Probe sequence
ttgaagagacagttacgattgaaca

SEQ ID NO: 31509 - DNA, 25 bp, Probe sequence
ggagaagtgctgcttaataattgtt

SEQ ID NO: 31510 - DNA, 25 bp, Probe sequence
tgaagagacagttacgattgaacaa

SEQ ID NO: 31511 - DNA, 25 bp, Probe sequence
aatgttagtagcgatgatggttata

SEQ ID NO: 31512 - DNA, 25 bp, Probe sequence
gttagtagcgatgatggttataagt

SEQ ID NO: 31513 - DNA, 25 bp, Probe sequence
tgttagtagcgatgatggttataag

SEQ ID NO: 31514 - DNA, 25 bp, Probe sequence
attgaaatgttagtagcgatgatgg

SEQ ID NO: 31515 - DNA, 25 bp, Probe sequence
tgaaatgttagtagcgatgatggtt

SEQ ID NO: 31516 - DNA, 25 bp, Probe sequence
ttgaaatgttagtagcgatgatggt

SEQ ID NO: 31517 - DNA, 25 bp, Probe sequence
gaaatgttagtagcgatgatggtta

SEQ ID NO: 31518 - DNA, 25 bp, Probe sequence
atgttagtagcgatgatggttataa

SEQ ID NO: 31519 - DNA, 25 bp, Probe sequence
aaatgttagtagcgatgatggttat

SEQ ID NO: 31520 - DNA, 25 bp, Probe sequence
tggaggttatatcattgtctgagaa

SEQ ID NO: 31521 - DNA, 25 bp, Probe sequence
atggaggttatatcattgtctgaga

SEQ ID NO: 31522 - DNA, 25 bp, Probe sequence
ggtaacaacagaacgtaatgaacaa

SEQ ID NO: 31523 - DNA, 25 bp, Probe sequence
taacaacagaacgtaatgaacaagg

SEQ ID NO: 31524 - DNA, 25 bp, Probe sequence
gaagcatttattgatattggaggca

SEQ ID NO: 31525 - DNA, 25 bp, Probe sequence
agaagcatttattgatattggaggc

SEQ ID NO: 31526 - DNA, 25 bp, Probe sequence
agaacgtaatgaacaaggaccatat

SEQ ID NO: 31527 - DNA, 25 bp, Probe sequence
gtaacaacagaacgtaatgaacaag

SEQ ID NO: 31528 - DNA, 25 bp, Probe sequence
gaacgtaatgaacaaggaccatatt

SEQ ID NO: 31529 - DNA, 25 bp, Probe sequence
actatgattgagatgcttgtggtaa

SEQ ID NO: 31530 - DNA, 25 bp, Probe sequence
ttactatgattgagatgcttgtggt

SEQ ID NO: 31531 - DNA, 25 bp, Probe sequence
tgagatgcttgtggtaatgatgtta

SEQ ID NO: 31532 - DNA, 25 bp, Probe sequence
gattgagatgcttgtggtaatgatg

SEQ ID NO: 31533 - DNA, 25 bp, Probe sequence
tgattgagatgcttgtggtaatgat

SEQ ID NO: 31534 - DNA, 25 bp, Probe sequence
atgattgagatgcttgtggtaatga

SEQ ID NO: 31535 - DNA, 25 bp, Probe sequence
attgagatgcttgtggtaatgatgt

SEQ ID NO: 31536 - DNA, 25 bp, Probe sequence
tatgattgagatgcttgtggtaatg

SEQ ID NO: 31537 - DNA, 25 bp, Probe sequence
tactatgattgagatgcttgtggta

SEQ ID NO: 31538 - DNA, 25 bp, Probe sequence
aatgctggttatacagtagatggtg

SEQ ID NO: 31539 - DNA, 25 bp, Probe sequence
gctgtggaagatgtgaatattgtac

SEQ ID NO: 31540 - DNA, 25 bp, Probe sequence
aacagtggtaacttcagttgctaag

SEQ ID NO: 31541 - DNA, 25 bp, Probe sequence
agctgtggaagatgtgaatattgta

SEQ ID NO: 31542 - DNA, 25 bp, Probe sequence
agtagtaggttcacttgttggtaca

SEQ ID NO: 31543 - DNA, 25 bp, Probe sequence
aagctgtggaagatgtgaatattgt

SEQ ID NO: 31544 - DNA, 25 bp, Probe sequence
cagtggtaacttcagttgctaagac

SEQ ID NO: 31545 - DNA, 25 bp, Probe sequence
acagtggtaacttcagttgctaaga

SEQ ID NO: 31546 - DNA, 25 bp, Probe sequence
tggttatacagtagatggtgcaatg

SEQ ID NO: 31547 - DNA, 25 bp, Probe sequence
acaattagtaatggagaagcagttg

SEQ ID NO: 31548 - DNA, 25 bp, Probe sequence
caattagtaatggagaagcagttgc

SEQ ID NO: 31549 - DNA, 25 bp, Probe sequence
aaacaaactgctcacatacaatcaa

SEQ ID NO: 31550 - DNA, 25 bp, Probe sequence
gctaaacaaactgctcacatacaat

SEQ ID NO: 31551 - DNA, 25 bp, Probe sequence
aattagtaatggagaagcagttgca

SEQ ID NO: 31552 - DNA, 25 bp, Probe sequence
aacaaactgctcacatacaatcaac

SEQ ID NO: 31553 - DNA, 25 bp, Probe sequence
attgaagacttaattgcagatggtt

SEQ ID NO: 31554 - DNA, 25 bp, Probe sequence
taaacaaactgctcacatacaatca

SEQ ID NO: 31555 - DNA, 25 bp, Probe sequence
ctaaacaaactgctcacatacaatc

SEQ ID NO: 31556 - DNA, 25 bp, Probe sequence
ctaagaagcgacaattaagtaaggc

SEQ ID NO: 31557 - DNA, 25 bp, Probe sequence
tctaagaagcgacaattaagtaagg

SEQ ID NO: 31558 - DNA, 25 bp, Probe sequence
acattctaagaagcgacaattaagt

SEQ ID NO: 31559 - DNA, 25 bp, Probe sequence
aactacattctaagaagcgacaatt

SEQ ID NO: 31560 - DNA, 25 bp, Probe sequence
tcactgataggttatagcgatacta

SEQ ID NO: 31561 - DNA, 25 bp, Probe sequence
atcactgataggttatagcgatact

SEQ ID NO: 31562 - DNA, 25 bp, Probe sequence
actacattctaagaagcgacaatta

SEQ ID NO: 31563 - DNA, 25 bp, Probe sequence
ataaactttgtgatgaaactaccgc

SEQ ID NO: 31564 - DNA, 25 bp, Probe sequence
gaaactaccgctaatatcaggctat

SEQ ID NO: 31565 - DNA, 25 bp, Probe sequence
tggatgatgatagcgttaagttgat

SEQ ID NO: 31566 - DNA, 25 bp, Probe sequence
aagtggatgatgatagcgttaagtt

SEQ ID NO: 31567 - DNA, 25 bp, Probe sequence
atgatgatagcgttaagttgattcg

SEQ ID NO: 31568 - DNA, 25 bp, Probe sequence
tgatgatagcgttaagttgattcgt

SEQ ID NO: 31569 - DNA, 25 bp, Probe sequence
ggatgatgatagcgttaagttgatt

SEQ ID NO: 31570 - DNA, 25 bp, Probe sequence
gatgatagcgttaagttgattcgta

SEQ ID NO: 31571 - DNA, 25 bp, Probe sequence
gtggatgatgatagcgttaagttga

SEQ ID NO: 31572 - DNA, 25 bp, Probe sequence
agtggatgatgatagcgttaagttg

SEQ ID NO: 31573 - DNA, 25 bp, Probe sequence
atgatagcgttaagttgattcgtaa

SEQ ID NO: 31574 - DNA, 25 bp, Probe sequence
taactactattaagcaacagcgaca

SEQ ID NO: 31575 - DNA, 25 bp, Probe sequence
gtaactactattaagcaacagcgac

SEQ ID NO: 31576 - DNA, 25 bp, Probe sequence
ttaagcaacagcgacaattagtatg

SEQ ID NO: 31577 - DNA, 25 bp, Probe sequence
actactattaagcaacagcgacaat

SEQ ID NO: 31578 - DNA, 25 bp, Probe sequence
ctattaagcaacagcgacaattagt

SEQ ID NO: 31579 - DNA, 25 bp, Probe sequence
actattaagcaacagcgacaattag

SEQ ID NO: 31580 - DNA, 25 bp, Probe sequence
ctactattaagcaacagcgacaatt

SEQ ID NO: 31581 - DNA, 25 bp, Probe sequence
aactactattaagcaacagcgacaa

SEQ ID NO: 31582 - DNA, 25 bp, Probe sequence
attaagcaacagcgacaattagtat

SEQ ID NO: 31583 - DNA, 25 bp, Probe sequence
ggtgacaatagttattcaatgccag

SEQ ID NO: 31584 - DNA, 25 bp, Probe sequence
ctatgattgaagcggtcagaattac

SEQ ID NO: 31585 - DNA, 25 bp, Probe sequence
aggtgacaatagttattcaatgcca

SEQ ID NO: 31586 - DNA, 25 bp, Probe sequence
tatgattgaagcggtcagaattaca

SEQ ID NO: 31587 - DNA, 25 bp, Probe sequence
gtgacaatagttattcaatgccaga

SEQ ID NO: 31588 - DNA, 25 bp, Probe sequence
tattgcgatggtactgactaagatt

SEQ ID NO: 31589 - DNA, 25 bp, Probe sequence
atattgcgatggtactgactaagat

SEQ ID NO: 31590 - DNA, 25 bp, Probe sequence
gattgaagcggtcagaattacattg

SEQ ID NO: 31591 - DNA, 25 bp, Probe sequence
atgattgaagcggtcagaattacat

SEQ ID NO: 31592 - DNA, 25 bp, Probe sequence
tatacgacggttgatgatgaacaat

SEQ ID NO: 31593 - DNA, 25 bp, Probe sequence
atatacgacggttgatgatgaacaa

SEQ ID NO: 31594 - DNA, 25 bp, Probe sequence
tacgacggttgatgatgaacaatta

SEQ ID NO: 31595 - DNA, 25 bp, Probe sequence
catatacgacggttgatgatgaaca

SEQ ID NO: 31596 - DNA, 25 bp, Probe sequence
atacgacggttgatgatgaacaatt

SEQ ID NO: 31597 - DNA, 25 bp, Probe sequence
acgacggttgatgatgaacaattaa

SEQ ID NO: 31598 - DNA, 25 bp, Probe sequence
tccatatacgacggttgatgatgaa

SEQ ID NO: 31599 - DNA, 25 bp, Probe sequence
ccatatacgacggttgatgatgaac

SEQ ID NO: 31600 - DNA, 25 bp, Probe sequence
tcgcagttgttggagatacattatt

SEQ ID NO: 31601 - DNA, 25 bp, Probe sequence
tgtgatgcaagtgtgattaagaata

SEQ ID NO: 31602 - DNA, 25 bp, Probe sequence
ttgtgatgcaagtgtgattaagaat

SEQ ID NO: 31603 - DNA, 25 bp, Probe sequence
attactagatgcctgcacaacaatc

SEQ ID NO: 31604 - DNA, 25 bp, Probe sequence
cattactagatgcctgcacaacaat

SEQ ID NO: 31605 - DNA, 25 bp, Probe sequence
gtgatgcaagtgtgattaagaataa

SEQ ID NO: 31606 - DNA, 25 bp, Probe sequence
tactagatgcctgcacaacaatcaa

SEQ ID NO: 31607 - DNA, 25 bp, Probe sequence
ttactagatgcctgcacaacaatca

SEQ ID NO: 31608 - DNA, 25 bp, Probe sequence
tttgtgatgcaagtgtgattaagaa

SEQ ID NO: 31609 - DNA, 25 bp, Probe sequence
ttccattactagatgcctgcacaac

SEQ ID NO: 31610 - DNA, 25 bp, Probe sequence
ttgaaaggtattggaagtgaaacag

SEQ ID NO: 31611 - DNA, 25 bp, Probe sequence
tattaacatggttagcacgacatca

SEQ ID NO: 31612 - DNA, 25 bp, Probe sequence
cattattaacatggttagcacgaca

SEQ ID NO: 31613 - DNA, 25 bp, Probe sequence
acattattaacatggttagcacgac

SEQ ID NO: 31614 - DNA, 25 bp, Probe sequence
ttattaacatggttagcacgacatc

SEQ ID NO: 31615 - DNA, 25 bp, Probe sequence
tttgaaaggtattggaagtgaaaca

SEQ ID NO: 31616 - DNA, 25 bp, Probe sequence
ggttagcacgacatcatttcaatta

SEQ ID NO: 31617 - DNA, 25 bp, Probe sequence
agcacgacatcatttcaattatcaa

SEQ ID NO: 31618 - DNA, 25 bp, Probe sequence
gcacgacatcatttcaattatcaag

SEQ ID NO: 31619 - DNA, 25 bp, Probe sequence
ggctattgttgatgtggttgttatt

SEQ ID NO: 31620 - DNA, 25 bp, Probe sequence
ttaagcgatgtattagaagttgtgc

SEQ ID NO: 31621 - DNA, 25 bp, Probe sequence
tggctattgttgatgtggttgttat

SEQ ID NO: 31622 - DNA, 25 bp, Probe sequence
atggctattgttgatgtggttgtta

SEQ ID NO: 31623 - DNA, 25 bp, Probe sequence
gctattgttgatgtggttgttattc

SEQ ID NO: 31624 - DNA, 25 bp, Probe sequence
ttgaaggtgaattaagcgatgtatt

SEQ ID NO: 31625 - DNA, 25 bp, Probe sequence
attgaaggtgaattaagcgatgtat

SEQ ID NO: 31626 - DNA, 25 bp, Probe sequence
ctattgttgatgtggttgttattcc

SEQ ID NO: 31627 - DNA, 25 bp, Probe sequence
tgaaggtgaattaagcgatgtatta

SEQ ID NO: 31628 - DNA, 25 bp, Probe sequence
aagtcatagattcaattcctgctca

SEQ ID NO: 31629 - DNA, 25 bp, Probe sequence
agtcatagattcaattcctgctcat

SEQ ID NO: 31630 - DNA, 25 bp, Probe sequence
tcatagattcaattcctgctcatca

SEQ ID NO: 31631 - DNA, 25 bp, Probe sequence
gtcatagattcaattcctgctcatc

SEQ ID NO: 31632 - DNA, 25 bp, Probe sequence
catagattcaattcctgctcatcat

SEQ ID NO: 31633 - DNA, 25 bp, Probe sequence
tagattcaattcctgctcatcataa

SEQ ID NO: 31634 - DNA, 25 bp, Probe sequence
cggaagctaagacaagatcagatta

SEQ ID NO: 31635 - DNA, 25 bp, Probe sequence
atagattcaattcctgctcatcata

SEQ ID NO: 31636 - DNA, 25 bp, Probe sequence
tagagaaacaaggcatcaaagtagt

SEQ ID NO: 31637 - DNA, 25 bp, Probe sequence
attcgttgattgtccagtgtatgta

SEQ ID NO: 31638 - DNA, 25 bp, Probe sequence
cgttgattgtccagtgtatgtagat

SEQ ID NO: 31639 - DNA, 25 bp, Probe sequence
taattgtggtcgttctggatgtatt

SEQ ID NO: 31640 - DNA, 25 bp, Probe sequence
tccagtgtatgtagataatgatgct

SEQ ID NO: 31641 - DNA, 25 bp, Probe sequence
gtccagtgtatgtagataatgatgc

SEQ ID NO: 31642 - DNA, 25 bp, Probe sequence
ttcgttgattgtccagtgtatgtag

SEQ ID NO: 31643 - DNA, 25 bp, Probe sequence
gtaattgtggtcgttctggatgtat

SEQ ID NO: 31644 - DNA, 25 bp, Probe sequence
tcacactgatacatctgatagtaca

SEQ ID NO: 31645 - DNA, 25 bp, Probe sequence
aattcgttgattgtccagtgtatgt

SEQ ID NO: 31646 - DNA, 25 bp, Probe sequence
ttaatcagagaaggaatgaacagaa

SEQ ID NO: 31647 - DNA, 25 bp, Probe sequence
tcagagaaggaatgaacagaaatga

SEQ ID NO: 31648 - DNA, 25 bp, Probe sequence
atcagagaaggaatgaacagaaatg

SEQ ID NO: 31649 - DNA, 25 bp, Probe sequence
gtacgaaatgattcaacaggagatt

SEQ ID NO: 31650 - DNA, 25 bp, Probe sequence
attaatcagagaaggaatgaacaga

SEQ ID NO: 31651 - DNA, 25 bp, Probe sequence
gattcaacaggagatttcatcattg

SEQ ID NO: 31652 - DNA, 25 bp, Probe sequence
attcaacaggagatttcatcattgt

SEQ ID NO: 31653 - DNA, 25 bp, Probe sequence
aatcagagaaggaatgaacagaaat

SEQ ID NO: 31654 - DNA, 25 bp, Probe sequence
tacgaaatgattcaacaggagattt

SEQ ID NO: 31655 - DNA, 25 bp, Probe sequence
accgagattattagaagcattgttg

SEQ ID NO: 31656 - DNA, 25 bp, Probe sequence
ccgagattattagaagcattgttga

SEQ ID NO: 31657 - DNA, 25 bp, Probe sequence
ccaaggctatccagttagaatctta

SEQ ID NO: 31658 - DNA, 25 bp, Probe sequence
agaagcattgttgacaggtatgata

SEQ ID NO: 31659 - DNA, 25 bp, Probe sequence
tagaagcattgttgacaggtatgat

SEQ ID NO: 31660 - DNA, 25 bp, Probe sequence
ttagaagcattgttgacaggtatga

SEQ ID NO: 31661 - DNA, 25 bp, Probe sequence
attagaagcattgttgacaggtatg

SEQ ID NO: 31662 - DNA, 25 bp, Probe sequence
gaagcattgttgacaggtatgatat

SEQ ID NO: 31663 - DNA, 25 bp, Probe sequence
attattagaagcattgttgacaggt

SEQ ID NO: 31664 - DNA, 25 bp, Probe sequence
cttaattcatgttcaactggcagat

SEQ ID NO: 31665 - DNA, 25 bp, Probe sequence
tacttaattcatgttcaactggcag

SEQ ID NO: 31666 - DNA, 25 bp, Probe sequence
ctacttaattcatgttcaactggca

SEQ ID NO: 31667 - DNA, 25 bp, Probe sequence
actacttaattcatgttcaactggc

SEQ ID NO: 31668 - DNA, 25 bp, Probe sequence
ttaattcatgttcaactggcagatt

SEQ ID NO: 31669 - DNA, 25 bp, Probe sequence
gctagatgacgatgaagataatgat

SEQ ID NO: 31670 - DNA, 25 bp, Probe sequence
acttaattcatgttcaactggcaga

SEQ ID NO: 31671 - DNA, 25 bp, Probe sequence
ttgagctagatgacgatgaagataa

SEQ ID NO: 31672 - DNA, 25 bp, Probe sequence
ttattgagctagatgacgatgaaga

SEQ ID NO: 31673 - DNA, 25 bp, Probe sequence
aagtggtatgattatggctactatc

SEQ ID NO: 31674 - DNA, 25 bp, Probe sequence
tagtcgaagcaattattggttcatg

SEQ ID NO: 31675 - DNA, 25 bp, Probe sequence
agttggtgtttctctgtttatgtca

SEQ ID NO: 31676 - DNA, 25 bp, Probe sequence
aatagtcgaagcaattattggttca

SEQ ID NO: 31677 - DNA, 25 bp, Probe sequence
attattagatgttggcgggttagtg

SEQ ID NO: 31678 - DNA, 25 bp, Probe sequence
aattattagatgttggcgggttagt

SEQ ID NO: 31679 - DNA, 25 bp, Probe sequence
tggtgtttctctgtttatgtcaaat

SEQ ID NO: 31680 - DNA, 25 bp, Probe sequence
tagttggtgtttctctgtttatgtc

SEQ ID NO: 31681 - DNA, 25 bp, Probe sequence
atagtcgaagcaattattggttcat

SEQ ID NO: 31682 - DNA, 25 bp, Probe sequence
agtgaataaggctcgtatgattgaa

SEQ ID NO: 31683 - DNA, 25 bp, Probe sequence
aagtgaataaggctcgtatgattga

SEQ ID NO: 31684 - DNA, 25 bp, Probe sequence
ccaagtgaataaggctcgtatgatt

SEQ ID NO: 31685 - DNA, 25 bp, Probe sequence
caagtgaataaggctcgtatgattg

SEQ ID NO: 31686 - DNA, 25 bp, Probe sequence
cctgtagtgaatgctattgaacttg

SEQ ID NO: 31687 - DNA, 25 bp, Probe sequence
tcctgtagtgaatgctattgaactt

SEQ ID NO: 31688 - DNA, 25 bp, Probe sequence
ttcctgtagtgaatgctattgaact

SEQ ID NO: 31689 - DNA, 25 bp, Probe sequence
tcgttcagagaagatgatgagttaa

SEQ ID NO: 31690 - DNA, 25 bp, Probe sequence
ttcgttcagagaagatgatgagtta

SEQ ID NO: 31691 - DNA, 25 bp, Probe sequence
agatggatacaataccttagatgcg

SEQ ID NO: 31692 - DNA, 25 bp, Probe sequence
tgccttatatctagttatcggacca

SEQ ID NO: 31693 - DNA, 25 bp, Probe sequence
ttgccttatatctagttatcggacc

SEQ ID NO: 31694 - DNA, 25 bp, Probe sequence
gccttatatctagttatcggaccat

SEQ ID NO: 31695 - DNA, 25 bp, Probe sequence
tactacttaggtaactacggtatcg

SEQ ID NO: 31696 - DNA, 25 bp, Probe sequence
tagatggatacaataccttagatgc

SEQ ID NO: 31697 - DNA, 25 bp, Probe sequence
attgccttatatctagttatcggac

SEQ ID NO: 31698 - DNA, 25 bp, Probe sequence
ttatccatccattaggtggcatatc

SEQ ID NO: 31699 - DNA, 25 bp, Probe sequence
tatccatccattaggtggcatatct

SEQ ID NO: 31700 - DNA, 25 bp, Probe sequence
cattacagtacattaggtgaaggct

SEQ ID NO: 31701 - DNA, 25 bp, Probe sequence
tacagtacattaggtgaaggctatc

SEQ ID NO: 31702 - DNA, 25 bp, Probe sequence
taagcgtaagtattatcgtccgaga

SEQ ID NO: 31703 - DNA, 25 bp, Probe sequence
ataagcgtaagtattatcgtccgag

SEQ ID NO: 31704 - DNA, 25 bp, Probe sequence
aataagcgtaagtattatcgtccga

SEQ ID NO: 31705 - DNA, 25 bp, Probe sequence
ttacagtacattaggtgaaggctat

SEQ ID NO: 31706 - DNA, 25 bp, Probe sequence
attacagtacattaggtgaaggcta

SEQ ID NO: 31707 - DNA, 25 bp, Probe sequence
aatccaacatctattgaaggtgaat

SEQ ID NO: 31708 - DNA, 25 bp, Probe sequence
atccaacatctattgaaggtgaatt

SEQ ID NO: 31709 - DNA, 25 bp, Probe sequence
ttcaagacgatggatatagaattgg

SEQ ID NO: 31710 - DNA, 25 bp, Probe sequence
ttgaacaagccttaatggatcataa

SEQ ID NO: 31711 - DNA, 25 bp, Probe sequence
ttattgaacaagccttaatggatca

SEQ ID NO: 31712 - DNA, 25 bp, Probe sequence
attgaacaagccttaatggatcata

SEQ ID NO: 31713 - DNA, 25 bp, Probe sequence
tattgaacaagccttaatggatcat

SEQ ID NO: 31714 - DNA, 25 bp, Probe sequence
taattgttgttcctggtgttggatt

SEQ ID NO: 31715 - DNA, 25 bp, Probe sequence
ttaattgttgttcctggtgttggat

SEQ ID NO: 31716 - DNA, 25 bp, Probe sequence
actgaagaatacaaagaagcaaacg

SEQ ID NO: 31717 - DNA, 25 bp, Probe sequence
aagaatacaaagaagcaaacgcaat

SEQ ID NO: 31718 - DNA, 25 bp, Probe sequence
ttactggtacaactacaagtgttaa

SEQ ID NO: 31719 - DNA, 25 bp, Probe sequence
actggtacaactacaagtgttaata

SEQ ID NO: 31720 - DNA, 25 bp, Probe sequence
tactggtacaactacaagtgttaat

SEQ ID NO: 31721 - DNA, 25 bp, Probe sequence
attactggtacaactacaagtgtta

SEQ ID NO: 31722 - DNA, 25 bp, Probe sequence
tattactggtacaactacaagtgtt

SEQ ID NO: 31723 - DNA, 25 bp, Probe sequence
atattactggtacaactacaagtgt

SEQ ID NO: 31724 - DNA, 25 bp, Probe sequence
aaattaaaccaccaataactgtagc

SEQ ID NO: 31725 - DNA, 25 bp, Probe sequence
aaagttgatgaaattaaaccaccaa

SEQ ID NO: 31726 - DNA, 25 bp, Probe sequence
aagttgatgaaattaaaccaccaat

SEQ ID NO: 31727 - DNA, 25 bp, Probe sequence
agcagtaacacatacggaatatagc

SEQ ID NO: 31728 - DNA, 25 bp, Probe sequence
gcagtaacacatacggaatatagca

SEQ ID NO: 31729 - DNA, 25 bp, Probe sequence
cttacaatgaagatggaactgaaca

SEQ ID NO: 31730 - DNA, 25 bp, Probe sequence
cagtaacacatacggaatatagcaa

SEQ ID NO: 31731 - DNA, 25 bp, Probe sequence
gatgctaatggtccaacatatcaag

SEQ ID NO: 31732 - DNA, 25 bp, Probe sequence
tgatgtataatgatgctaatggtcc

SEQ ID NO: 31733 - DNA, 25 bp, Probe sequence
aagtggcaactctattgatactgtt

SEQ ID NO: 31734 - DNA, 25 bp, Probe sequence
aagcagtaacacatacggaatatag

SEQ ID NO: 31735 - DNA, 25 bp, Probe sequence
agtggcaactctattgatactgtta

SEQ ID NO: 31736 - DNA, 25 bp, Probe sequence
tggtgacagaaactacattacaact

SEQ ID NO: 31737 - DNA, 25 bp, Probe sequence
gtggtgacagaaactacattacaac

SEQ ID NO: 31738 - DNA, 25 bp, Probe sequence
aacaaactttacaccgtgaaacaaa

SEQ ID NO: 31739 - DNA, 25 bp, Probe sequence
aaacaaactttacaccgtgaaacaa

SEQ ID NO: 31740 - DNA, 25 bp, Probe sequence
aacaaacaaactttacaccgtgaaa

SEQ ID NO: 31741 - DNA, 25 bp, Probe sequence
aaacaaacaaactttacaccgtgaa

SEQ ID NO: 31742 - DNA, 25 bp, Probe sequence
caaacaaactttacaccgtgaaaca

SEQ ID NO: 31743 - DNA, 25 bp, Probe sequence
acaaacaaactttacaccgtgaaac

SEQ ID NO: 31744 - DNA, 25 bp, Probe sequence
ggtgacagaaactacattacaacta

SEQ ID NO: 31745 - DNA, 25 bp, Probe sequence
ttcaagctattactggaatgagtct

SEQ ID NO: 31746 - DNA, 25 bp, Probe sequence
tcaagctattactggaatgagtcta

SEQ ID NO: 31747 - DNA, 25 bp, Probe sequence
tcaccgcatttgattgatgatatta

SEQ ID NO: 31748 - DNA, 25 bp, Probe sequence
gggtacaattatcgctatcatatcc

SEQ ID NO: 31749 - DNA, 25 bp, Probe sequence
caccgcatttgattgatgatattaa

SEQ ID NO: 31750 - DNA, 25 bp, Probe sequence
attcataatccacaatcagcccaga

SEQ ID NO: 31751 - DNA, 25 bp, Probe sequence
caagctattactggaatgagtctat

SEQ ID NO: 31752 - DNA, 25 bp, Probe sequence
tgggtacaattatcgctatcatatc

SEQ ID NO: 31753 - DNA, 25 bp, Probe sequence
tgctttacaaatgaatccagttatt

SEQ ID NO: 31754 - DNA, 25 bp, Probe sequence
tatgaagatgtattgcgtggtaaga

SEQ ID NO: 31755 - DNA, 25 bp, Probe sequence
ggtggagacttaggtagagatgtaa

SEQ ID NO: 31756 - DNA, 25 bp, Probe sequence
aagatgtattgcgtggtaagaagaa

SEQ ID NO: 31757 - DNA, 25 bp, Probe sequence
atgaagatgtattgcgtggtaagaa

SEQ ID NO: 31758 - DNA, 25 bp, Probe sequence
aagaggtatattcggagatgtatcg

SEQ ID NO: 31759 - DNA, 25 bp, Probe sequence
gaagatgtattgcgtggtaagaaga

SEQ ID NO: 31760 - DNA, 25 bp, Probe sequence
ttaacaggtggagacttaggtagag

SEQ ID NO: 31761 - DNA, 25 bp, Probe sequence
atatgaagatgtattgcgtggtaag

SEQ ID NO: 31762 - DNA, 25 bp, Probe sequence
tgaagatgtattgcgtggtaagaag

SEQ ID NO: 31763 - DNA, 25 bp, Probe sequence
agcattaagtctgaggatgatagtg

SEQ ID NO: 31764 - DNA, 25 bp, Probe sequence
gcaacatcaactagcatcatcatat

SEQ ID NO: 31765 - DNA, 25 bp, Probe sequence
cattaagtctgaggatgatagtgcg

SEQ ID NO: 31766 - DNA, 25 bp, Probe sequence
tagcattaagtctgaggatgatagt

SEQ ID NO: 31767 - DNA, 25 bp, Probe sequence
gaggcacatattctaggacatgatt

SEQ ID NO: 31768 - DNA, 25 bp, Probe sequence
attaagtctgaggatgatagtgcgg

SEQ ID NO: 31769 - DNA, 25 bp, Probe sequence
cgcatattgaagaaccagaagcatt

SEQ ID NO: 31770 - DNA, 25 bp, Probe sequence
tgaggcacatattctaggacatgat

SEQ ID NO: 31771 - DNA, 25 bp, Probe sequence
atgaggcacatattctaggacatga

SEQ ID NO: 31772 - DNA, 25 bp, Probe sequence
aaccaagataatccattaactgagg

SEQ ID NO: 31773 - DNA, 25 bp, Probe sequence
tatgggaacacgcttattacctaaa

SEQ ID NO: 31774 - DNA, 25 bp, Probe sequence
actacaccaaaccaagataatccat

SEQ ID NO: 31775 - DNA, 25 bp, Probe sequence
gtatgggaacacgcttattacctaa

SEQ ID NO: 31776 - DNA, 25 bp, Probe sequence
ccaagataatccattaactgagggt

SEQ ID NO: 31777 - DNA, 25 bp, Probe sequence
accaagataatccattaactgaggg

SEQ ID NO: 31778 - DNA, 25 bp, Probe sequence
gactacaccaaaccaagataatcca

SEQ ID NO: 31779 - DNA, 25 bp, Probe sequence
tgactacaccaaaccaagataatcc

SEQ ID NO: 31780 - DNA, 25 bp, Probe sequence
cattattctgggagttactttcacc

SEQ ID NO: 31781 - DNA, 25 bp, Probe sequence
gcatatcgaataattcaccaagcat

SEQ ID NO: 31782 - DNA, 25 bp, Probe sequence
aagcatatcgaataattcaccaagc

SEQ ID NO: 31783 - DNA, 25 bp, Probe sequence
acagcaagcatatcgaataattcac

SEQ ID NO: 31784 - DNA, 25 bp, Probe sequence
gacagcaagcatatcgaataattca

SEQ ID NO: 31785 - DNA, 25 bp, Probe sequence
gcaagcatatcgaataattcaccaa

SEQ ID NO: 31786 - DNA, 25 bp, Probe sequence
agacagcaagcatatcgaataattc

SEQ ID NO: 31787 - DNA, 25 bp, Probe sequence
atcgaataattcaccaagcatcaat

SEQ ID NO: 31788 - DNA, 25 bp, Probe sequence
cagcaagcatatcgaataattcacc

SEQ ID NO: 31789 - DNA, 25 bp, Probe sequence
ctagacagcaagcatatcgaataat

SEQ ID NO: 31790 - DNA, 25 bp, Probe sequence
tgaagtttatggtgtatgtgagtct

SEQ ID NO: 31791 - DNA, 25 bp, Probe sequence
ttgaagtttatggtgtatgtgagtc

SEQ ID NO: 31792 - DNA, 25 bp, Probe sequence
agtttatggtgtatgtgagtcttgc

SEQ ID NO: 31793 - DNA, 25 bp, Probe sequence
cttgaagtttatggtgtatgtgagt

SEQ ID NO: 31794 - DNA, 25 bp, Probe sequence
tcactacctggtgttaatattcaca

SEQ ID NO: 31795 - DNA, 25 bp, Probe sequence
tacagaacttgatggtgaaatgaag

SEQ ID NO: 31796 - DNA, 25 bp, Probe sequence
atacagaacttgatggtgaaatgaa

SEQ ID NO: 31797 - DNA, 25 bp, Probe sequence
aatacagaacttgatggtgaaatga

SEQ ID NO: 31798 - DNA, 25 bp, Probe sequence
aagtttatggtgtatgtgagtcttg

SEQ ID NO: 31799 - DNA, 25 bp, Probe sequence
attgtcattgccatcatagttgttc

SEQ ID NO: 31800 - DNA, 25 bp, Probe sequence
cgattattgtcattgccatcatagt

SEQ ID NO: 31801 - DNA, 25 bp, Probe sequence
acgattattgtcattgccatcatag

SEQ ID NO: 31802 - DNA, 25 bp, Probe sequence
aacgattattgtcattgccatcata

SEQ ID NO: 31803 - DNA, 25 bp, Probe sequence
tcattgccatcatagttgttctgtt

SEQ ID NO: 31804 - DNA, 25 bp, Probe sequence
ttgtcattgccatcatagttgttct

SEQ ID NO: 31805 - DNA, 25 bp, Probe sequence
tattgtcattgccatcatagttgtt

SEQ ID NO: 31806 - DNA, 25 bp, Probe sequence
ttattgtcattgccatcatagttgt

SEQ ID NO: 31807 - DNA, 25 bp, Probe sequence
caacgattattgtcattgccatcat

SEQ ID NO: 31808 - DNA, 25 bp, Probe sequence
aggtactttaattgtagttccaaca

SEQ ID NO: 31809 - DNA, 25 bp, Probe sequence
ggtactttaattgtagttccaacat

SEQ ID NO: 31810 - DNA, 25 bp, Probe sequence
taggtactttaattgtagttccaac

SEQ ID NO: 31811 - DNA, 25 bp, Probe sequence
gtactttaattgtagttccaacatt

SEQ ID NO: 31812 - DNA, 25 bp, Probe sequence
ataggtactttaattgtagttccaa

SEQ ID NO: 31813 - DNA, 25 bp, Probe sequence
aataggtactttaattgtagttcca

SEQ ID NO: 31814 - DNA, 25 bp, Probe sequence
tactttaattgtagttccaacattt

SEQ ID NO: 31815 - DNA, 25 bp, Probe sequence
caataggtactttaattgtagttcc

SEQ ID NO: 31816 - DNA, 25 bp, Probe sequence
actttaattgtagttccaacatttt

SEQ ID NO: 31817 - DNA, 25 bp, Probe sequence
gaattatcaggtggtcaacaacaac

SEQ ID NO: 31818 - DNA, 25 bp, Probe sequence
agaattatcaggtggtcaacaacaa

SEQ ID NO: 31819 - DNA, 25 bp, Probe sequence
atagcagaattatcaggtggtcaac

SEQ ID NO: 31820 - DNA, 25 bp, Probe sequence
tatagcagaattatcaggtggtcaa

SEQ ID NO: 31821 - DNA, 25 bp, Probe sequence
atatagcagaattatcaggtggtca

SEQ ID NO: 31822 - DNA, 25 bp, Probe sequence
cagaattatcaggtggtcaacaaca

SEQ ID NO: 31823 - DNA, 25 bp, Probe sequence
tagcagaattatcaggtggtcaaca

SEQ ID NO: 31824 - DNA, 25 bp, Probe sequence
aatatagcagaattatcaggtggtc

SEQ ID NO: 31825 - DNA, 25 bp, Probe sequence
aattatcaggtggtcaacaacaacg

SEQ ID NO: 31826 - DNA, 25 bp, Probe sequence
aatattggcttcggttacattggtt

SEQ ID NO: 31827 - DNA, 25 bp, Probe sequence
aagatattgtattacatccaggtgc

SEQ ID NO: 31828 - DNA, 25 bp, Probe sequence
agttagcacgtattattgatggagt

SEQ ID NO: 31829 - DNA, 25 bp, Probe sequence
agagttagcacgtattattgatgga

SEQ ID NO: 31830 - DNA, 25 bp, Probe sequence
gagttagcacgtattattgatggag

SEQ ID NO: 31831 - DNA, 25 bp, Probe sequence
gttagcacgtattattgatggagtt

SEQ ID NO: 31832 - DNA, 25 bp, Probe sequence
ggactttgatggcgtattaaatgaa

SEQ ID NO: 31833 - DNA, 25 bp, Probe sequence
gaggactttgatggcgtattaaatg

SEQ ID NO: 31834 - DNA, 25 bp, Probe sequence
agaggactttgatggcgtattaaat

SEQ ID NO: 31835 - DNA, 25 bp, Probe sequence
agaataggtccacatatcgcaaatg

SEQ ID NO: 31836 - DNA, 25 bp, Probe sequence
taaagcgtacattgtcactaattga

SEQ ID NO: 31837 - DNA, 25 bp, Probe sequence
ttaaagcgtacattgtcactaattg

SEQ ID NO: 31838 - DNA, 25 bp, Probe sequence
gttaaagcgtacattgtcactaatt

SEQ ID NO: 31839 - DNA, 25 bp, Probe sequence
tgttaaagcgtacattgtcactaat

SEQ ID NO: 31840 - DNA, 25 bp, Probe sequence
aagtaatgtccataataatacaggc

SEQ ID NO: 31841 - DNA, 25 bp, Probe sequence
agtaatgtccataataatacaggcc

SEQ ID NO: 31842 - DNA, 25 bp, Probe sequence
ataggtccacatatcgcaaatgtta

SEQ ID NO: 31843 - DNA, 25 bp, Probe sequence
taggtccacatatcgcaaatgttaa

SEQ ID NO: 31844 - DNA, 25 bp, Probe sequence
tcgtggtattgatattgaaggtgtt

SEQ ID NO: 31845 - DNA, 25 bp, Probe sequence
tctcgtggtattgatattgaaggtg

SEQ ID NO: 31846 - DNA, 25 bp, Probe sequence
gcatctcgtggtattgatattgaag

SEQ ID NO: 31847 - DNA, 25 bp, Probe sequence
agcatctcgtggtattgatattgaa

SEQ ID NO: 31848 - DNA, 25 bp, Probe sequence
ctcgtggtattgatattgaaggtgt

SEQ ID NO: 31849 - DNA, 25 bp, Probe sequence
atctcgtggtattgatattgaaggt

SEQ ID NO: 31850 - DNA, 25 bp, Probe sequence
tagcatctcgtggtattgatattga

SEQ ID NO: 31851 - DNA, 25 bp, Probe sequence
catctcgtggtattgatattgaagg

SEQ ID NO: 31852 - DNA, 25 bp, Probe sequence
cgtggtattgatattgaaggtgtta

SEQ ID NO: 31853 - DNA, 25 bp, Probe sequence
gagataatcgcactgttacaatgat

SEQ ID NO: 31854 - DNA, 25 bp, Probe sequence
ggagataatcgcactgttacaatga

SEQ ID NO: 31855 - DNA, 25 bp, Probe sequence
gtactcattacacttggacaatctg

SEQ ID NO: 31856 - DNA, 25 bp, Probe sequence
ttagtagttgtggttatcgcaatcg

SEQ ID NO: 31857 - DNA, 25 bp, Probe sequence
tactcattacacttggacaatctgt

SEQ ID NO: 31858 - DNA, 25 bp, Probe sequence
tggttcatggctattcttattaggt

SEQ ID NO: 31859 - DNA, 25 bp, Probe sequence
acacttggacaatctgtagaacaat

SEQ ID NO: 31860 - DNA, 25 bp, Probe sequence
cacttggacaatctgtagaacaatt

SEQ ID NO: 31861 - DNA, 25 bp, Probe sequence
ttggacaatctgtagaacaattacg

SEQ ID NO: 31862 - DNA, 25 bp, Probe sequence
attattggtggttcaggtattggat

SEQ ID NO: 31863 - DNA, 25 bp, Probe sequence
ttattggtggttcaggtattggata

SEQ ID NO: 31864 - DNA, 25 bp, Probe sequence
attggtggttcaggtattggatatg

SEQ ID NO: 31865 - DNA, 25 bp, Probe sequence
aattattggtggttcaggtattgga

SEQ ID NO: 31866 - DNA, 25 bp, Probe sequence
tattggtggttcaggtattggatat

SEQ ID NO: 31867 - DNA, 25 bp, Probe sequence
cgttatggcagaagtggataatcaa

SEQ ID NO: 31868 - DNA, 25 bp, Probe sequence
atacctaaggataatgttggaccat

SEQ ID NO: 31869 - DNA, 25 bp, Probe sequence
tatacctaaggataatgttggacca

SEQ ID NO: 31870 - DNA, 25 bp, Probe sequence
cattgttagatcatcatgtgccatt

SEQ ID NO: 31871 - DNA, 25 bp, Probe sequence
tagtgcttggtattagtcttctgtt

SEQ ID NO: 31872 - DNA, 25 bp, Probe sequence
ttagtgcttggtattagtcttctgt

SEQ ID NO: 31873 - DNA, 25 bp, Probe sequence
atatcatataatccagaggtgccga

SEQ ID NO: 31874 - DNA, 25 bp, Probe sequence
tatatcatataatccagaggtgccg

SEQ ID NO: 31875 - DNA, 25 bp, Probe sequence
tatcatataatccagaggtgccgag

SEQ ID NO: 31876 - DNA, 25 bp, Probe sequence
attagtgcttggtattagtcttctg

SEQ ID NO: 31877 - DNA, 25 bp, Probe sequence
aattagtgcttggtattagtcttct

SEQ ID NO: 31878 - DNA, 25 bp, Probe sequence
atacgaagtagctcaggataatcaa

SEQ ID NO: 31879 - DNA, 25 bp, Probe sequence
aatacgaagtagctcaggataatca

SEQ ID NO: 31880 - DNA, 25 bp, Probe sequence
aataacatctagcattagcacgatt

SEQ ID NO: 31881 - DNA, 25 bp, Probe sequence
taacatctagcattagcacgattaa

SEQ ID NO: 31882 - DNA, 25 bp, Probe sequence
ataacatctagcattagcacgatta

SEQ ID NO: 31883 - DNA, 25 bp, Probe sequence
ttaataacatctagcattagcacga

SEQ ID NO: 31884 - DNA, 25 bp, Probe sequence
taataacatctagcattagcacgat

SEQ ID NO: 31885 - DNA, 25 bp, Probe sequence
acatctagcattagcacgattaatt

SEQ ID NO: 31886 - DNA, 25 bp, Probe sequence
aacatctagcattagcacgattaat

SEQ ID NO: 31887 - DNA, 25 bp, Probe sequence
tgaagacttaatattggaggtgtcg

SEQ ID NO: 31888 - DNA, 25 bp, Probe sequence
ccagggtctacagtaatacgaattt

SEQ ID NO: 31889 - DNA, 25 bp, Probe sequence
ggcaagataagttaagtcaacatcc

SEQ ID NO: 31890 - DNA, 25 bp, Probe sequence
gtattgctggagaagttattcaagg

SEQ ID NO: 31891 - DNA, 25 bp, Probe sequence
ggtattgctggagaagttattcaag

SEQ ID NO: 31892 - DNA, 25 bp, Probe sequence
gcaagataagttaagtcaacatcca

SEQ ID NO: 31893 - DNA, 25 bp, Probe sequence
gataagttaagtcaacatccaaggt

SEQ ID NO: 31894 - DNA, 25 bp, Probe sequence
tattgctggagaagttattcaaggc

SEQ ID NO: 31895 - DNA, 25 bp, Probe sequence
cggtattgctggagaagttattcaa

SEQ ID NO: 31896 - DNA, 25 bp, Probe sequence
agataagttaagtcaacatccaagg

SEQ ID NO: 31897 - DNA, 25 bp, Probe sequence
ggatattggctcagatcatgcttat

SEQ ID NO: 31898 - DNA, 25 bp, Probe sequence
ttgatacaacaagtgctgtcgtaat

SEQ ID NO: 31899 - DNA, 25 bp, Probe sequence
atacaacaagtgctgtcgtaatgtc

SEQ ID NO: 31900 - DNA, 25 bp, Probe sequence
gatacaacaagtgctgtcgtaatgt

SEQ ID NO: 31901 - DNA, 25 bp, Probe sequence
tgatacaacaagtgctgtcgtaatg

SEQ ID NO: 31902 - DNA, 25 bp, Probe sequence
aacaagtgctgtcgtaatgtcaatt

SEQ ID NO: 31903 - DNA, 25 bp, Probe sequence
tgtaagttctgtttcaatatcacgc

SEQ ID NO: 31904 - DNA, 25 bp, Probe sequence
gtaagttctgtttcaatatcacgct

SEQ ID NO: 31905 - DNA, 25 bp, Probe sequence
aagttctgtttcaatatcacgcttt

SEQ ID NO: 31906 - DNA, 25 bp, Probe sequence
caacaagtgctgtcgtaatgtcaat

SEQ ID NO: 31907 - DNA, 25 bp, Probe sequence
gtattgaacaaggtgatgaagtagc

SEQ ID NO: 31908 - DNA, 25 bp, Probe sequence
tattgaacaaggtgatgaagtagca

SEQ ID NO: 31909 - DNA, 25 bp, Probe sequence
cgtattgaacaaggtgatgaagtag

SEQ ID NO: 31910 - DNA, 25 bp, Probe sequence
ggtcgtggtatgttattccttgatt

SEQ ID NO: 31911 - DNA, 25 bp, Probe sequence
attgaacaaggtgatgaagtagcaa

SEQ ID NO: 31912 - DNA, 25 bp, Probe sequence
gtcaattattacaggacttaggtcg

SEQ ID NO: 31913 - DNA, 25 bp, Probe sequence
cgtcaattattacaggacttaggtc

SEQ ID NO: 31914 - DNA, 25 bp, Probe sequence
aactgaatccaagtgatcttagtgc

SEQ ID NO: 31915 - DNA, 25 bp, Probe sequence
taggtcgtggtatgttattccttga

SEQ ID NO: 31916 - DNA, 25 bp, Probe sequence
ttagtcttattgctgctgtgatgtt

SEQ ID NO: 31917 - DNA, 25 bp, Probe sequence
actctacagaagcattacaattacg

SEQ ID NO: 31918 - DNA, 25 bp, Probe sequence
tagtcttattgctgctgtgatgttg

SEQ ID NO: 31919 - DNA, 25 bp, Probe sequence
gctgtgatgttgttgttaggtagtt

SEQ ID NO: 31920 - DNA, 25 bp, Probe sequence
tattgctgctgtgatgttgttgtta

SEQ ID NO: 31921 - DNA, 25 bp, Probe sequence
ctgctgtgatgttgttgttaggtag

SEQ ID NO: 31922 - DNA, 25 bp, Probe sequence
ttattgctgctgtgatgttgttgtt

SEQ ID NO: 31923 - DNA, 25 bp, Probe sequence
tgctgtgatgttgttgttaggtagt

SEQ ID NO: 31924 - DNA, 25 bp, Probe sequence
tcttattgctgctgtgatgttgttg

SEQ ID NO: 31925 - DNA, 25 bp, Probe sequence
ggttatgatgagtatggcggttata

SEQ ID NO: 31926 - DNA, 25 bp, Probe sequence
tgatgagtatggcggttatattgaa

SEQ ID NO: 31927 - DNA, 25 bp, Probe sequence
atgatgagtatggcggttatattga

SEQ ID NO: 31928 - DNA, 25 bp, Probe sequence
gagtatggcggttatgatgagtatg

SEQ ID NO: 31929 - DNA, 25 bp, Probe sequence
gcgaacaagcattaacatacttaca

SEQ ID NO: 31930 - DNA, 25 bp, Probe sequence
gatgagtatggcggttatattgaac

SEQ ID NO: 31931 - DNA, 25 bp, Probe sequence
tgagtatggcggttatgatgagtat

SEQ ID NO: 31932 - DNA, 25 bp, Probe sequence
atgagtatggcggttatgatgagta

SEQ ID NO: 31933 - DNA, 25 bp, Probe sequence
ggcgaacaagcattaacatacttac

SEQ ID NO: 31934 - DNA, 25 bp, Probe sequence
accagccaattattatccagaagat

SEQ ID NO: 31935 - DNA, 25 bp, Probe sequence
caccagccaattattatccagaaga

SEQ ID NO: 31936 - DNA, 25 bp, Probe sequence
ccagccaattattatccagaagatg

SEQ ID NO: 31937 - DNA, 25 bp, Probe sequence
gccaattattatccagaagatgagt

SEQ ID NO: 31938 - DNA, 25 bp, Probe sequence
cagccaattattatccagaagatga

SEQ ID NO: 31939 - DNA, 25 bp, Probe sequence
ttcaatgttagtcctgagcaattag

SEQ ID NO: 31940 - DNA, 25 bp, Probe sequence
agccaattattatccagaagatgag

SEQ ID NO: 31941 - DNA, 25 bp, Probe sequence
tcaatgttagtcctgagcaattagc

SEQ ID NO: 31942 - DNA, 25 bp, Probe sequence
gaagatgagtatggcggttacattg

SEQ ID NO: 31943 - DNA, 25 bp, Probe sequence
cgtgagttgattgatacagatgaag

SEQ ID NO: 31944 - DNA, 25 bp, Probe sequence
atgatgataatccaacgactgagaa

SEQ ID NO: 31945 - DNA, 25 bp, Probe sequence
atgatgatgataatccaacgactga

SEQ ID NO: 31946 - DNA, 25 bp, Probe sequence
ataggtatggcattagtaaggttcc

SEQ ID NO: 31947 - DNA, 25 bp, Probe sequence
atggcattagtaaggttccgattaa

SEQ ID NO: 31948 - DNA, 25 bp, Probe sequence
gttggagtattagttacaggtgctt

SEQ ID NO: 31949 - DNA, 25 bp, Probe sequence
gatgatgataatccaacgactgaga

SEQ ID NO: 31950 - DNA, 25 bp, Probe sequence
tgatgatgataatccaacgactgag

SEQ ID NO: 31951 - DNA, 25 bp, Probe sequence
tatggcattagtaaggttccgatta

SEQ ID NO: 31952 - DNA, 25 bp, Probe sequence
gccaggtatcgttcatagattagat

SEQ ID NO: 31953 - DNA, 25 bp, Probe sequence
gagccaggtatcgttcatagattag

SEQ ID NO: 31954 - DNA, 25 bp, Probe sequence
agccaggtatcgttcatagattaga

SEQ ID NO: 31955 - DNA, 25 bp, Probe sequence
aattggatgtcctgtcattgatgtt

SEQ ID NO: 31956 - DNA, 25 bp, Probe sequence
tgagccaggtatcgttcatagatta

SEQ ID NO: 31957 - DNA, 25 bp, Probe sequence
ccaggtatcgttcatagattagatg

SEQ ID NO: 31958 - DNA, 25 bp, Probe sequence
cttataatgagccaggtatcgttca

SEQ ID NO: 31959 - DNA, 25 bp, Probe sequence
cgagaacttcaaagacaccattatc

SEQ ID NO: 31960 - DNA, 25 bp, Probe sequence
ccttataatgagccaggtatcgttc

SEQ ID NO: 31961 - DNA, 25 bp, Probe sequence
gcatcattgagtaaagattcacctt

SEQ ID NO: 31962 - DNA, 25 bp, Probe sequence
catcattgagtaaagattcaccttc

SEQ ID NO: 31963 - DNA, 25 bp, Probe sequence
atcattgagtaaagattcaccttct

SEQ ID NO: 31964 - DNA, 25 bp, Probe sequence
tcattgagtaaagattcaccttcta

SEQ ID NO: 31965 - DNA, 25 bp, Probe sequence
taggacataaaattgctgctattgc

SEQ ID NO: 31966 - DNA, 25 bp, Probe sequence
cattgagtaaagattcaccttctaa

SEQ ID NO: 31967 - DNA, 25 bp, Probe sequence
gtaggacataaaattgctgctattg

SEQ ID NO: 31968 - DNA, 25 bp, Probe sequence
agtaggacataaaattgctgctatt

SEQ ID NO: 31969 - DNA, 25 bp, Probe sequence
tcagtaggacataaaattgctgcta

SEQ ID NO: 31970 - DNA, 25 bp, Probe sequence
caatccttacgaataatggcgataa

SEQ ID NO: 31971 - DNA, 25 bp, Probe sequence
tattaagcctccatctgtaagtgaa

SEQ ID NO: 31972 - DNA, 25 bp, Probe sequence
atattaagcctccatctgtaagtga

SEQ ID NO: 31973 - DNA, 25 bp, Probe sequence
gcaatccttacgaataatggcgata

SEQ ID NO: 31974 - DNA, 25 bp, Probe sequence
ggaagaagtacatcaagaagcagaa

SEQ ID NO: 31975 - DNA, 25 bp, Probe sequence
aatattaagcctccatctgtaagtg

SEQ ID NO: 31976 - DNA, 25 bp, Probe sequence
ttaagcctccatctgtaagtgaaat

SEQ ID NO: 31977 - DNA, 25 bp, Probe sequence
attaagcctccatctgtaagtgaaa

SEQ ID NO: 31978 - DNA, 25 bp, Probe sequence
tgaattatgaacctggtgatatcgt

SEQ ID NO: 31979 - DNA, 25 bp, Probe sequence
tatacgcagcagatagaatgattga

SEQ ID NO: 31980 - DNA, 25 bp, Probe sequence
atacgcagcagatagaatgattgaa

SEQ ID NO: 31981 - DNA, 25 bp, Probe sequence
aacctgttgtgctaagagagaatac

SEQ ID NO: 31982 - DNA, 25 bp, Probe sequence
ttagtcatatacgcagcagatagaa

SEQ ID NO: 31983 - DNA, 25 bp, Probe sequence
tagtcatatacgcagcagatagaat

SEQ ID NO: 31984 - DNA, 25 bp, Probe sequence
attagtcatatacgcagcagataga

SEQ ID NO: 31985 - DNA, 25 bp, Probe sequence
agtcatatacgcagcagatagaatg

SEQ ID NO: 31986 - DNA, 25 bp, Probe sequence
atatacgcagcagatagaatgattg

SEQ ID NO: 31987 - DNA, 25 bp, Probe sequence
cgaattagtcatatacgcagcagat

SEQ ID NO: 31988 - DNA, 25 bp, Probe sequence
agcagttgattatggtgaatctgat

SEQ ID NO: 31989 - DNA, 25 bp, Probe sequence
aagcagttgattatggtgaatctga

SEQ ID NO: 31990 - DNA, 25 bp, Probe sequence
gcagttgattatggtgaatctgata

SEQ ID NO: 31991 - DNA, 25 bp, Probe sequence
ggtaatgacacacaagcagatttaa

SEQ ID NO: 31992 - DNA, 25 bp, Probe sequence
gacacacaagcagatttaataggtt

SEQ ID NO: 31993 - DNA, 25 bp, Probe sequence
tgacacacaagcagatttaataggt

SEQ ID NO: 31994 - DNA, 25 bp, Probe sequence
tggtaatgacacacaagcagattta

SEQ ID NO: 31995 - DNA, 25 bp, Probe sequence
atgacacacaagcagatttaatagg

SEQ ID NO: 31996 - DNA, 25 bp, Probe sequence
aaagggattatcatcaaagcagttg

SEQ ID NO: 31997 - DNA, 25 bp, Probe sequence
tattggttggtatcagtatgtggtt

SEQ ID NO: 31998 - DNA, 25 bp, Probe sequence
ttattggttggtatcagtatgtggt

SEQ ID NO: 31999 - DNA, 25 bp, Probe sequence
tggttattggttggtatcagtatgt

SEQ ID NO: 32000 - DNA, 25 bp, Probe sequence
gttggtatcagtatgtggttcttca

SEQ ID NO: 32001 - DNA, 25 bp, Probe sequence
gttattggttggtatcagtatgtgg

SEQ ID NO: 32002 - DNA, 25 bp, Probe sequence
ggttattggttggtatcagtatgtg

SEQ ID NO: 32003 - DNA, 25 bp, Probe sequence
attggttggtatcagtatgtggttc

SEQ ID NO: 32004 - DNA, 25 bp, Probe sequence
ttaatggaatgtcagcaataggaac

SEQ ID NO: 32005 - DNA, 25 bp, Probe sequence
ggtatcagtatgtggttcttcatca

SEQ ID NO: 32006 - DNA, 25 bp, Probe sequence
aattatattcattgatacgccaggt

SEQ ID NO: 32007 - DNA, 25 bp, Probe sequence
tcattgatacgccaggtattcataa

SEQ ID NO: 32008 - DNA, 25 bp, Probe sequence
ttcattgatacgccaggtattcata

SEQ ID NO: 32009 - DNA, 25 bp, Probe sequence
tattcattgatacgccaggtattca

SEQ ID NO: 32010 - DNA, 25 bp, Probe sequence
attcattgatacgccaggtattcat

SEQ ID NO: 32011 - DNA, 25 bp, Probe sequence
attatattcattgatacgccaggta

SEQ ID NO: 32012 - DNA, 25 bp, Probe sequence
atattcattgatacgccaggtattc

SEQ ID NO: 32013 - DNA, 25 bp, Probe sequence
cgtgttcatatcgaagcaactatat

SEQ ID NO: 32014 - DNA, 25 bp, Probe sequence
gtgttaatgtggaccgtatggttaa

SEQ ID NO: 32015 - DNA, 25 bp, Probe sequence
gccttatttatctgaacttagcgac

SEQ ID NO: 32016 - DNA, 25 bp, Probe sequence
ccttatttatctgaacttagcgacg

SEQ ID NO: 32017 - DNA, 25 bp, Probe sequence
atttatctgaacttagcgacgatgt

SEQ ID NO: 32018 - DNA, 25 bp, Probe sequence
ccagaagatattaagcctatcatca

SEQ ID NO: 32019 - DNA, 25 bp, Probe sequence
gagaagataaagcagataatagggc

SEQ ID NO: 32020 - DNA, 25 bp, Probe sequence
cttatttatctgaacttagcgacga

SEQ ID NO: 32021 - DNA, 25 bp, Probe sequence
tatttatctgaacttagcgacgatg

SEQ ID NO: 32022 - DNA, 25 bp, Probe sequence
tttatctgaacttagcgacgatgtt

SEQ ID NO: 32023 - DNA, 25 bp, Probe sequence
tccagaagatattaagcctatcatc

SEQ ID NO: 32024 - DNA, 25 bp, Probe sequence
atgtgatgatgatatgcctgtgtat

SEQ ID NO: 32025 - DNA, 25 bp, Probe sequence
ttatgtgatgatgatatgcctgtgt

SEQ ID NO: 32026 - DNA, 25 bp, Probe sequence
tgtgatgatgatatgcctgtgtata

SEQ ID NO: 32027 - DNA, 25 bp, Probe sequence
tatgtgatgatgatatgcctgtgta

SEQ ID NO: 32028 - DNA, 25 bp, Probe sequence
aatcaataactgtaaccgtagatgc

SEQ ID NO: 32029 - DNA, 25 bp, Probe sequence
attatgtgatgatgatatgcctgtg

SEQ ID NO: 32030 - DNA, 25 bp, Probe sequence
aaggagatatggttatgatgacagt

SEQ ID NO: 32031 - DNA, 25 bp, Probe sequence
ggagatatggttatgatgacagtcg

SEQ ID NO: 32032 - DNA, 25 bp, Probe sequence
aggagatatggttatgatgacagtc

SEQ ID NO: 32033 - DNA, 25 bp, Probe sequence
ttgtattgatggtggttctactgat

SEQ ID NO: 32034 - DNA, 25 bp, Probe sequence
tgtattgatggtggttctactgatc

SEQ ID NO: 32035 - DNA, 25 bp, Probe sequence
ttcacagatgattgtcggagataac

SEQ ID NO: 32036 - DNA, 25 bp, Probe sequence
gttacattaacggaacaaccagatt

SEQ ID NO: 32037 - DNA, 25 bp, Probe sequence
gtaataatgaggcaacaattcgaca

SEQ ID NO: 32038 - DNA, 25 bp, Probe sequence
aataatgaggcaacaattcgacaat

SEQ ID NO: 32039 - DNA, 25 bp, Probe sequence
cggagataacgatatagatacacat

SEQ ID NO: 32040 - DNA, 25 bp, Probe sequence
cgatatagatacacatgctacaagt

SEQ ID NO: 32041 - DNA, 25 bp, Probe sequence
acgatatagatacacatgctacaag

SEQ ID NO: 32042 - DNA, 25 bp, Probe sequence
atgattgttgctattgtctttggtc

SEQ ID NO: 32043 - DNA, 25 bp, Probe sequence
aatgattgttgctattgtctttggt

SEQ ID NO: 32044 - DNA, 25 bp, Probe sequence
gattgttgctattgtctttggtctc

SEQ ID NO: 32045 - DNA, 25 bp, Probe sequence
tgattgttgctattgtctttggtct

SEQ ID NO: 32046 - DNA, 25 bp, Probe sequence
attgcattagttctcactgttgaag

SEQ ID NO: 32047 - DNA, 25 bp, Probe sequence
gctattgcattagttctcactgttg

SEQ ID NO: 32048 - DNA, 25 bp, Probe sequence
ctattgcattagttctcactgttga

SEQ ID NO: 32049 - DNA, 25 bp, Probe sequence
gctattgtctttggtctcgtactaa

SEQ ID NO: 32050 - DNA, 25 bp, Probe sequence
tattgcattagttctcactgttgaa

SEQ ID NO: 32051 - DNA, 25 bp, Probe sequence
gatgcttgaatcaatacgctatgtc

SEQ ID NO: 32052 - DNA, 25 bp, Probe sequence
gacttacttcactatggtcatatcg

SEQ ID NO: 32053 - DNA, 25 bp, Probe sequence
tcactatggtcatatcgaattgctt

SEQ ID NO: 32054 - DNA, 25 bp, Probe sequence
cactatggtcatatcgaattgcttc

SEQ ID NO: 32055 - DNA, 25 bp, Probe sequence
ttcactatggtcatatcgaattgct

SEQ ID NO: 32056 - DNA, 25 bp, Probe sequence
cttcactatggtcatatcgaattgc

SEQ ID NO: 32057 - DNA, 25 bp, Probe sequence
acttacttcactatggtcatatcga

SEQ ID NO: 32058 - DNA, 25 bp, Probe sequence
acttcactatggtcatatcgaattg

SEQ ID NO: 32059 - DNA, 25 bp, Probe sequence
caagagagatgggcgattatttaat

SEQ ID NO: 32060 - DNA, 25 bp, Probe sequence
aagcaaacaattacggacattcttt

SEQ ID NO: 32061 - DNA, 25 bp, Probe sequence
aacaagcaaacaattacggacattc

SEQ ID NO: 32062 - DNA, 25 bp, Probe sequence
gaacaagcaaacaattacggacatt

SEQ ID NO: 32063 - DNA, 25 bp, Probe sequence
caagcaaacaattacggacattctt

SEQ ID NO: 32064 - DNA, 25 bp, Probe sequence
atcacacaggcttagttaaagatgc

SEQ ID NO: 32065 - DNA, 25 bp, Probe sequence
aaagaagagcatatagaagacgatg

SEQ ID NO: 32066 - DNA, 25 bp, Probe sequence
caagaacaagcaaacaattacggac

SEQ ID NO: 32067 - DNA, 25 bp, Probe sequence
gatcacacaggcttagttaaagatg

SEQ ID NO: 32068 - DNA, 25 bp, Probe sequence
acaagcaaacaattacggacattct

SEQ ID NO: 32069 - DNA, 25 bp, Probe sequence
aggtacatggattattggttctgaa

SEQ ID NO: 32070 - DNA, 25 bp, Probe sequence
aaggtacatggattattggttctga

SEQ ID NO: 32071 - DNA, 25 bp, Probe sequence
gctctgaaagttaaaggtatggtct

SEQ ID NO: 32072 - DNA, 25 bp, Probe sequence
atggattattggttctgaaatggca

SEQ ID NO: 32073 - DNA, 25 bp, Probe sequence
attattggttctgaaatggcaactc

SEQ ID NO: 32074 - DNA, 25 bp, Probe sequence
gattattggttctgaaatggcaact

SEQ ID NO: 32075 - DNA, 25 bp, Probe sequence
ctgaaagttaaaggtatggtcttgt

SEQ ID NO: 32076 - DNA, 25 bp, Probe sequence
ggattattggttctgaaatggcaac

SEQ ID NO: 32077 - DNA, 25 bp, Probe sequence
tctgaaagttaaaggtatggtcttg

SEQ ID NO: 32078 - DNA, 25 bp, Probe sequence
aataatgacggctatacggtagaac

SEQ ID NO: 32079 - DNA, 25 bp, Probe sequence
cattaggttcacaattagcagacaa

SEQ ID NO: 32080 - DNA, 25 bp, Probe sequence
acattaggttcacaattagcagaca

SEQ ID NO: 32081 - DNA, 25 bp, Probe sequence
gttctatcggctatacattacctgc

SEQ ID NO: 32082 - DNA, 25 bp, Probe sequence
tatacggtagaacgacttattcacg

SEQ ID NO: 32083 - DNA, 25 bp, Probe sequence
gctatacggtagaacgacttattca

SEQ ID NO: 32084 - DNA, 25 bp, Probe sequence
taataatgacggctatacggtagaa

SEQ ID NO: 32085 - DNA, 25 bp, Probe sequence
ttaataatgacggctatacggtaga

SEQ ID NO: 32086 - DNA, 25 bp, Probe sequence
ggctatacggtagaacgacttattc

SEQ ID NO: 32087 - DNA, 25 bp, Probe sequence
catataatccagaggtgccaagtta

SEQ ID NO: 32088 - DNA, 25 bp, Probe sequence
tatcatataatccagaggtgccaag

SEQ ID NO: 32089 - DNA, 25 bp, Probe sequence
atatcatataatccagaggtgccaa

SEQ ID NO: 32090 - DNA, 25 bp, Probe sequence
tataatccagaggtgccaagttatt

SEQ ID NO: 32091 - DNA, 25 bp, Probe sequence
ataatccagaggtgccaagttattc

SEQ ID NO: 32092 - DNA, 25 bp, Probe sequence
atataatccagaggtgccaagttat

SEQ ID NO: 32093 - DNA, 25 bp, Probe sequence
atcatataatccagaggtgccaagt

SEQ ID NO: 32094 - DNA, 25 bp, Probe sequence
tcatataatccagaggtgccaagtt

SEQ ID NO: 32095 - DNA, 25 bp, Probe sequence
taatccagaggtgccaagttattca

SEQ ID NO: 32096 - DNA, 25 bp, Probe sequence
attgatggaaggtagaacaacgatt

SEQ ID NO: 32097 - DNA, 25 bp, Probe sequence
cattgatggaaggtagaacaacgat

SEQ ID NO: 32098 - DNA, 25 bp, Probe sequence
ttgatggaaggtagaacaacgattg

SEQ ID NO: 32099 - DNA, 25 bp, Probe sequence
aacattgatggaaggtagaacaacg

SEQ ID NO: 32100 - DNA, 25 bp, Probe sequence
gatgaaggatatgacacgcttgtag

SEQ ID NO: 32101 - DNA, 25 bp, Probe sequence
acctaacttattaccatcaatcgtt

SEQ ID NO: 32102 - DNA, 25 bp, Probe sequence
acattgatggaaggtagaacaacga

SEQ ID NO: 32103 - DNA, 25 bp, Probe sequence
tgatgaaggatatgacacgcttgta

SEQ ID NO: 32104 - DNA, 25 bp, Probe sequence
aatattagatgatgtgtcgttccaa

SEQ ID NO: 32105 - DNA, 25 bp, Probe sequence
cgcataataacacaattcaacatct

SEQ ID NO: 32106 - DNA, 25 bp, Probe sequence
gcataataacacaattcaacatctg

SEQ ID NO: 32107 - DNA, 25 bp, Probe sequence
tgcctggaattatacaaatagacga

SEQ ID NO: 32108 - DNA, 25 bp, Probe sequence
ttagtatttggtataggtcctgctg

SEQ ID NO: 32109 - DNA, 25 bp, Probe sequence
tttgctgaaggttattgatttaggt

SEQ ID NO: 32110 - DNA, 25 bp, Probe sequence
atgcctggaattatacaaatagacg

SEQ ID NO: 32111 - DNA, 25 bp, Probe sequence
gcctggaattatacaaatagacgat

SEQ ID NO: 32112 - DNA, 25 bp, Probe sequence
ttaaggaagcggtcagtaggttaca

SEQ ID NO: 32113 - DNA, 25 bp, Probe sequence
tagtatttggtataggtcctgctgg

SEQ ID NO: 32114 - DNA, 25 bp, Probe sequence
cgattcgtactgacattgatagaga

SEQ ID NO: 32115 - DNA, 25 bp, Probe sequence
ctgttgtagaacctatggcacctaa

SEQ ID NO: 32116 - DNA, 25 bp, Probe sequence
gattcgtactgacattgatagagaa

SEQ ID NO: 32117 - DNA, 25 bp, Probe sequence
cgtgctagagatattattgaggata

SEQ ID NO: 32118 - DNA, 25 bp, Probe sequence
aacgtgctagagatattattgagga

SEQ ID NO: 32119 - DNA, 25 bp, Probe sequence
acgtgctagagatattattgaggat

SEQ ID NO: 32120 - DNA, 25 bp, Probe sequence
cagcgttccaatttgataaagatga

SEQ ID NO: 32121 - DNA, 25 bp, Probe sequence
agcgttccaatttgataaagatgaa

SEQ ID NO: 32122 - DNA, 25 bp, Probe sequence
gcgttccaatttgataaagatgaag

SEQ ID NO: 32123 - DNA, 25 bp, Probe sequence
aaacaacacaaaggagataacttct

SEQ ID NO: 32124 - DNA, 25 bp, Probe sequence
agcagacaatgaaatgaaagtaaat

SEQ ID NO: 32125 - DNA, 25 bp, Probe sequence
taaacaacacaaaggagataacttc

SEQ ID NO: 32126 - DNA, 25 bp, Probe sequence
tagcagacaatgaaatgaaagtaaa

SEQ ID NO: 32127 - DNA, 25 bp, Probe sequence
atagcagacaatgaaatgaaagtaa

SEQ ID NO: 32128 - DNA, 25 bp, Probe sequence
ttatagcagacaatgaaatgaaagt

SEQ ID NO: 32129 - DNA, 25 bp, Probe sequence
ataaacaacacaaaggagataactt

SEQ ID NO: 32130 - DNA, 25 bp, Probe sequence
tatagcagacaatgaaatgaaagta

SEQ ID NO: 32131 - DNA, 25 bp, Probe sequence
tataaacaacacaaaggagataact

SEQ ID NO: 32132 - DNA, 25 bp, Probe sequence
tgatgatgagtcacctgaacattaa

SEQ ID NO: 32133 - DNA, 25 bp, Probe sequence
agtagttgaagccgaatctgaagta

SEQ ID NO: 32134 - DNA, 25 bp, Probe sequence
gttggtataggtacattggttggta

SEQ ID NO: 32135 - DNA, 25 bp, Probe sequence
ttggttctagtaagcatcatacaga

SEQ ID NO: 32136 - DNA, 25 bp, Probe sequence
tggtataggtacattggttggtatg

SEQ ID NO: 32137 - DNA, 25 bp, Probe sequence
ttggtataggtacattggttggtat

SEQ ID NO: 32138 - DNA, 25 bp, Probe sequence
gaagccgaatctgaagtaccattag

SEQ ID NO: 32139 - DNA, 25 bp, Probe sequence
attggttctagtaagcatcatacag

SEQ ID NO: 32140 - DNA, 25 bp, Probe sequence
ggtataggtacattggttggtatgc

SEQ ID NO: 32141 - DNA, 25 bp, Probe sequence
agtgatggaatatgtcatagaaggt

SEQ ID NO: 32142 - DNA, 25 bp, Probe sequence
gtgatggaatatgtcatagaaggtt

SEQ ID NO: 32143 - DNA, 25 bp, Probe sequence
ttcacttacagttattccacttgat

SEQ ID NO: 32144 - DNA, 25 bp, Probe sequence
gttggactaggaatcggagtaatta

SEQ ID NO: 32145 - DNA, 25 bp, Probe sequence
aagtgatggaatatgtcatagaagg

SEQ ID NO: 32146 - DNA, 25 bp, Probe sequence
tggactaggaatcggagtaattatc

SEQ ID NO: 32147 - DNA, 25 bp, Probe sequence
atgtaagagatgtctatggtaatgg

SEQ ID NO: 32148 - DNA, 25 bp, Probe sequence
ttggactaggaatcggagtaattat

SEQ ID NO: 32149 - DNA, 25 bp, Probe sequence
cgttggactaggaatcggagtaatt

SEQ ID NO: 32150 - DNA, 25 bp, Probe sequence
gaagttgaaggaacaagagtagttg

SEQ ID NO: 32151 - DNA, 25 bp, Probe sequence
tgaagttgaaggaacaagagtagtt

SEQ ID NO: 32152 - DNA, 25 bp, Probe sequence
ttgaagttgaaggaacaagagtagt

SEQ ID NO: 32153 - DNA, 25 bp, Probe sequence
aatgacaactatcttggaatcaacg

SEQ ID NO: 32154 - DNA, 25 bp, Probe sequence
atgacaactatcttggaatcaacgg

SEQ ID NO: 32155 - DNA, 25 bp, Probe sequence
gcagtaattggtattattggcatga

SEQ ID NO: 32156 - DNA, 25 bp, Probe sequence
ggtattatcgccacattatcattac

SEQ ID NO: 32157 - DNA, 25 bp, Probe sequence
tcaactaattctgagtcaggttaca

SEQ ID NO: 32158 - DNA, 25 bp, Probe sequence
agattcaactaattctgagtcaggt

SEQ ID NO: 32159 - DNA, 25 bp, Probe sequence
tggtagattaactgctgaggataag

SEQ ID NO: 32160 - DNA, 25 bp, Probe sequence
ggtagattaactgctgaggataaga

SEQ ID NO: 32161 - DNA, 25 bp, Probe sequence
ttggtagattaactgctgaggataa

SEQ ID NO: 32162 - DNA, 25 bp, Probe sequence
atatcatcgctacaggttcaacaga

SEQ ID NO: 32163 - DNA, 25 bp, Probe sequence
tatcatcgctacaggttcaacagaa

SEQ ID NO: 32164 - DNA, 25 bp, Probe sequence
ggtaacttatgacttatgtcgcaga

SEQ ID NO: 32165 - DNA, 25 bp, Probe sequence
gtaacttatgacttatgtcgcagag

SEQ ID NO: 32166 - DNA, 25 bp, Probe sequence
tggtaacttatgacttatgtcgcag

SEQ ID NO: 32167 - DNA, 25 bp, Probe sequence
gtagattaactgctgaggataagaa

SEQ ID NO: 32168 - DNA, 25 bp, Probe sequence
aatgaatcacttgaagatgcgttac

SEQ ID NO: 32169 - DNA, 25 bp, Probe sequence
atgaatcacttgaagatgcgttacg

SEQ ID NO: 32170 - DNA, 25 bp, Probe sequence
aaatgaatcacttgaagatgcgtta

SEQ ID NO: 32171 - DNA, 25 bp, Probe sequence
tgaatcacttgaagatgcgttacgt

SEQ ID NO: 32172 - DNA, 25 bp, Probe sequence
cacttgaagatgcgttacgtagatt

SEQ ID NO: 32173 - DNA, 25 bp, Probe sequence
aatcacttgaagatgcgttacgtag

SEQ ID NO: 32174 - DNA, 25 bp, Probe sequence
gaatcacttgaagatgcgttacgta

SEQ ID NO: 32175 - DNA, 25 bp, Probe sequence
tcacttgaagatgcgttacgtagat

SEQ ID NO: 32176 - DNA, 25 bp, Probe sequence
atcacttgaagatgcgttacgtaga

SEQ ID NO: 32177 - DNA, 25 bp, Probe sequence
gctattctaggaggtgctattgtat

SEQ ID NO: 32178 - DNA, 25 bp, Probe sequence
tgctattctaggaggtgctattgta

SEQ ID NO: 32179 - DNA, 25 bp, Probe sequence
taggtgctattctaggaggtgctat

SEQ ID NO: 32180 - DNA, 25 bp, Probe sequence
gtgctattctaggaggtgctattgt

SEQ ID NO: 32181 - DNA, 25 bp, Probe sequence
ttaggtgctattctaggaggtgcta

SEQ ID NO: 32182 - DNA, 25 bp, Probe sequence
ttataatcctagcaatcaacagcaa

SEQ ID NO: 32183 - DNA, 25 bp, Probe sequence
ctggtgcgattatacaaggtgttac

SEQ ID NO: 32184 - DNA, 25 bp, Probe sequence
acatcatcaatgagattaggattcc

SEQ ID NO: 32185 - DNA, 25 bp, Probe sequence
tctggtgcgattatacaaggtgtta

SEQ ID NO: 32186 - DNA, 25 bp, Probe sequence
aatcctgatgctgtaatctgtgtaa

SEQ ID NO: 32187 - DNA, 25 bp, Probe sequence
atcctgatgctgtaatctgtgtaac

SEQ ID NO: 32188 - DNA, 25 bp, Probe sequence
aagatgtgcttgaagtaattcctga

SEQ ID NO: 32189 - DNA, 25 bp, Probe sequence
agatgtgcttgaagtaattcctgag

SEQ ID NO: 32190 - DNA, 25 bp, Probe sequence
gatgtgcttgaagtaattcctgagg

SEQ ID NO: 32191 - DNA, 25 bp, Probe sequence
gaagcaagtcaacttacagatgaag

SEQ ID NO: 32192 - DNA, 25 bp, Probe sequence
tgaagcaagtcaacttacagatgaa

SEQ ID NO: 32193 - DNA, 25 bp, Probe sequence
catacaggtggatatggtcaagatt

SEQ ID NO: 32194 - DNA, 25 bp, Probe sequence
attcatacaggtggatatggtcaag

SEQ ID NO: 32195 - DNA, 25 bp, Probe sequence
tatattaggtattaacgcaggtggc

SEQ ID NO: 32196 - DNA, 25 bp, Probe sequence
gcattatatggtggctcaattacaa

SEQ ID NO: 32197 - DNA, 25 bp, Probe sequence
gtatattaggtattaacgcaggtgg

SEQ ID NO: 32198 - DNA, 25 bp, Probe sequence
ggtatattaggtattaacgcaggtg

SEQ ID NO: 32199 - DNA, 25 bp, Probe sequence
ctaggtgtaaggttaagcagagaac

SEQ ID NO: 32200 - DNA, 25 bp, Probe sequence
tctaggtgtaaggttaagcagagaa

SEQ ID NO: 32201 - DNA, 25 bp, Probe sequence
ggtggctcaattacaattatgtcaa

SEQ ID NO: 32202 - DNA, 25 bp, Probe sequence
atggtggctcaattacaattatgtc

SEQ ID NO: 32203 - DNA, 25 bp, Probe sequence
tggtggctcaattacaattatgtca

SEQ ID NO: 32204 - DNA, 25 bp, Probe sequence
agaattgccagttgatgttacgatt

SEQ ID NO: 32205 - DNA, 25 bp, Probe sequence
atacagaattgccagttgatgttac

SEQ ID NO: 32206 - DNA, 25 bp, Probe sequence
cagaattgccagttgatgttacgat

SEQ ID NO: 32207 - DNA, 25 bp, Probe sequence
aatacagaattgccagttgatgtta

SEQ ID NO: 32208 - DNA, 25 bp, Probe sequence
taatacagaattgccagttgatgtt

SEQ ID NO: 32209 - DNA, 25 bp, Probe sequence
ttaatacagaattgccagttgatgt

SEQ ID NO: 32210 - DNA, 25 bp, Probe sequence
tacagaattgccagttgatgttacg

SEQ ID NO: 32211 - DNA, 25 bp, Probe sequence
gattccatctattcaattcgagtcg

SEQ ID NO: 32212 - DNA, 25 bp, Probe sequence
tgtaatgagatatgatgttggtagt

SEQ ID NO: 32213 - DNA, 25 bp, Probe sequence
ttagcaccaacaacaagtcaatact

SEQ ID NO: 32214 - DNA, 25 bp, Probe sequence
tttagcaccaacaacaagtcaatac

SEQ ID NO: 32215 - DNA, 25 bp, Probe sequence
actatcgtgcctaataaaccagaat

SEQ ID NO: 32216 - DNA, 25 bp, Probe sequence
aactatcgtgcctaataaaccagaa

SEQ ID NO: 32217 - DNA, 25 bp, Probe sequence
taatgttgctaaatggtttgttggt

SEQ ID NO: 32218 - DNA, 25 bp, Probe sequence
gtagatactggtgatggtgtattac

SEQ ID NO: 32219 - DNA, 25 bp, Probe sequence
ttgctaaatggtttgttggtgatta

SEQ ID NO: 32220 - DNA, 25 bp, Probe sequence
tgctaaatggtttgttggtgattat

SEQ ID NO: 32221 - DNA, 25 bp, Probe sequence
agatactggtgatggtgtattacta

SEQ ID NO: 32222 - DNA, 25 bp, Probe sequence
cagcattcagtaattgatgttggta

SEQ ID NO: 32223 - DNA, 25 bp, Probe sequence
cacagcattcagtaattgatgttgg

SEQ ID NO: 32224 - DNA, 25 bp, Probe sequence
ccacagcattcagtaattgatgttg

SEQ ID NO: 32225 - DNA, 25 bp, Probe sequence
agcattcagtaattgatgttggtac

SEQ ID NO: 32226 - DNA, 25 bp, Probe sequence
acagcattcagtaattgatgttggt

SEQ ID NO: 32227 - DNA, 25 bp, Probe sequence
ctggctcaggtatattaagtattgc

SEQ ID NO: 32228 - DNA, 25 bp, Probe sequence
gatcatccgactacaagtatgtgtt

SEQ ID NO: 32229 - DNA, 25 bp, Probe sequence
gttggtactggctcaggtatattaa

SEQ ID NO: 32230 - DNA, 25 bp, Probe sequence
ttggtactggctcaggtatattaag

SEQ ID NO: 32231 - DNA, 25 bp, Probe sequence
ttgattggagatgaagataatgcct

SEQ ID NO: 32232 - DNA, 25 bp, Probe sequence
tgattggagatgaagataatgccta

SEQ ID NO: 32233 - DNA, 25 bp, Probe sequence
gattggagatgaagataatgcctaa

SEQ ID NO: 32234 - DNA, 25 bp, Probe sequence
aaagatatggtagcaacgaaaggta

SEQ ID NO: 32235 - DNA, 25 bp, Probe sequence
aagatatggtagcaacgaaaggtag

SEQ ID NO: 32236 - DNA, 25 bp, Probe sequence
tttgattggagatgaagataatgcc

SEQ ID NO: 32237 - DNA, 25 bp, Probe sequence
gatatggtagcaacgaaaggtagag

SEQ ID NO: 32238 - DNA, 25 bp, Probe sequence
ttaaacgctttgattggagatgaag

SEQ ID NO: 32239 - DNA, 25 bp, Probe sequence
cgctttgattggagatgaagataat

SEQ ID NO: 32240 - DNA, 25 bp, Probe sequence
aatgtaatggaagtggtcaagaatt

SEQ ID NO: 32241 - DNA, 25 bp, Probe sequence
aagacttgtagttactgtaatggcg

SEQ ID NO: 32242 - DNA, 25 bp, Probe sequence
cctaaatgtaatggaagtggtcaag

SEQ ID NO: 32243 - DNA, 25 bp, Probe sequence
acatttgaagaagcggtatttggta

SEQ ID NO: 32244 - DNA, 25 bp, Probe sequence
agaactaatgaaagaatttgcccaa

SEQ ID NO: 32245 - DNA, 25 bp, Probe sequence
aagaactaatgaaagaatttgccca

SEQ ID NO: 32246 - DNA, 25 bp, Probe sequence
gttcatggctatggatacggagatt

SEQ ID NO: 32247 - DNA, 25 bp, Probe sequence
aaatgtaatggaagtggtcaagaat

SEQ ID NO: 32248 - DNA, 25 bp, Probe sequence
ctaaatgtaatggaagtggtcaaga

SEQ ID NO: 32249 - DNA, 25 bp, Probe sequence
gcattagcagaaatcaaacaatcat

SEQ ID NO: 32250 - DNA, 25 bp, Probe sequence
gtgacgttgatattataccaatcgg

SEQ ID NO: 32251 - DNA, 25 bp, Probe sequence
ttgttagccacagtaaagaaattgc

SEQ ID NO: 32252 - DNA, 25 bp, Probe sequence
acttgttagccacagtaaagaaatt

SEQ ID NO: 32253 - DNA, 25 bp, Probe sequence
cttgttagccacagtaaagaaattg

SEQ ID NO: 32254 - DNA, 25 bp, Probe sequence
ggtgacgttgatattataccaatcg

SEQ ID NO: 32255 - DNA, 25 bp, Probe sequence
tgacgttgatattataccaatcggg

SEQ ID NO: 32256 - DNA, 25 bp, Probe sequence
tacttgttagccacagtaaagaaat

SEQ ID NO: 32257 - DNA, 25 bp, Probe sequence
atacttgttagccacagtaaagaaa

SEQ ID NO: 32258 - DNA, 25 bp, Probe sequence
tcaacagcagtagataatcaaccat

SEQ ID NO: 32259 - DNA, 25 bp, Probe sequence
ttcaacagcagtagataatcaacca

SEQ ID NO: 32260 - DNA, 25 bp, Probe sequence
aacagcagtagataatcaaccatca

SEQ ID NO: 32261 - DNA, 25 bp, Probe sequence
caacagcagtagataatcaaccatc

SEQ ID NO: 32262 - DNA, 25 bp, Probe sequence
cagcagtagataatcaaccatcagt

SEQ ID NO: 32263 - DNA, 25 bp, Probe sequence
acagcagtagataatcaaccatcag

SEQ ID NO: 32264 - DNA, 25 bp, Probe sequence
ttagaagaacaatggaacctacacg

SEQ ID NO: 32265 - DNA, 25 bp, Probe sequence
tgtaacagtattagaaggcgatgag

SEQ ID NO: 32266 - DNA, 25 bp, Probe sequence
gtgtaacagtattagaaggcgatga

SEQ ID NO: 32267 - DNA, 25 bp, Probe sequence
ttaattccattcggtctacatcaca

SEQ ID NO: 32268 - DNA, 25 bp, Probe sequence
taattccattcggtctacatcacat

SEQ ID NO: 32269 - DNA, 25 bp, Probe sequence
aattccattcggtctacatcacatt

SEQ ID NO: 32270 - DNA, 25 bp, Probe sequence
tggtgtattagaagtcggcaataat

SEQ ID NO: 32271 - DNA, 25 bp, Probe sequence
ctggtgtattagaagtcggcaataa

SEQ ID NO: 32272 - DNA, 25 bp, Probe sequence
attggtcttgtatcagatagtggtt

SEQ ID NO: 32273 - DNA, 25 bp, Probe sequence
aattggtcttgtatcagatagtggt

SEQ ID NO: 32274 - DNA, 25 bp, Probe sequence
gcaacagattatgaatggtcaagta

SEQ ID NO: 32275 - DNA, 25 bp, Probe sequence
tcgtacctattatgatggctacaac

SEQ ID NO: 32276 - DNA, 25 bp, Probe sequence
cctaataataatgttgctcgtaacg

SEQ ID NO: 32277 - DNA, 25 bp, Probe sequence
agatcctaataataatgttgctcgt

SEQ ID NO: 32278 - DNA, 25 bp, Probe sequence
aggtgctttggattctgcttattat

SEQ ID NO: 32279 - DNA, 25 bp, Probe sequence
gtgctttggattctgcttattatca

SEQ ID NO: 32280 - DNA, 25 bp, Probe sequence
ggtgctttggattctgcttattatc

SEQ ID NO: 32281 - DNA, 25 bp, Probe sequence
ttattatcatgcagacgcttccata

SEQ ID NO: 32282 - DNA, 25 bp, Probe sequence
tgcttgtgtatccactaagtgaata

SEQ ID NO: 32283 - DNA, 25 bp, Probe sequence
tattgcttgtgtatccactaagtga

SEQ ID NO: 32284 - DNA, 25 bp, Probe sequence
ttgcttgtgtatccactaagtgaat

SEQ ID NO: 32285 - DNA, 25 bp, Probe sequence
gtctgacgagaatgttattgaagaa

SEQ ID NO: 32286 - DNA, 25 bp, Probe sequence
taccagcaatagacaatatagaacg

SEQ ID NO: 32287 - DNA, 25 bp, Probe sequence
atgaacttcaacaattagcagatga

SEQ ID NO: 32288 - DNA, 25 bp, Probe sequence
tattcaccaagctgtagttcaagat

SEQ ID NO: 32289 - DNA, 25 bp, Probe sequence
atattcaccaagctgtagttcaaga

SEQ ID NO: 32290 - DNA, 25 bp, Probe sequence
aatattcaccaagctgtagttcaag

SEQ ID NO: 32291 - DNA, 25 bp, Probe sequence
aatgaacttcaacaattagcagatg

SEQ ID NO: 32292 - DNA, 25 bp, Probe sequence
attcaccaagctgtagttcaagatg

SEQ ID NO: 32293 - DNA, 25 bp, Probe sequence
accagcaatagacaatatagaacgt

SEQ ID NO: 32294 - DNA, 25 bp, Probe sequence
tatctgttattatgctggcggttat

SEQ ID NO: 32295 - DNA, 25 bp, Probe sequence
ttatctgttattatgctggcggtta

SEQ ID NO: 32296 - DNA, 25 bp, Probe sequence
ctgttattatgctggcggttatgta

SEQ ID NO: 32297 - DNA, 25 bp, Probe sequence
atctgttattatgctggcggttatg

SEQ ID NO: 32298 - DNA, 25 bp, Probe sequence
agtgttatctgttattatgctggcg

SEQ ID NO: 32299 - DNA, 25 bp, Probe sequence
gttatctgttattatgctggcggtt

SEQ ID NO: 32300 - DNA, 25 bp, Probe sequence
cagtgttatctgttattatgctggc

SEQ ID NO: 32301 - DNA, 25 bp, Probe sequence
gtgttatctgttattatgctggcgg

SEQ ID NO: 32302 - DNA, 25 bp, Probe sequence
tctgttattatgctggcggttatgt

SEQ ID NO: 32303 - DNA, 25 bp, Probe sequence
aacactaattgagcgacataacttg

SEQ ID NO: 32304 - DNA, 25 bp, Probe sequence
cactaattgagcgacataacttgaa

SEQ ID NO: 32305 - DNA, 25 bp, Probe sequence
acactaattgagcgacataacttga

SEQ ID NO: 32306 - DNA, 25 bp, Probe sequence
actaattgagcgacataacttgaat

SEQ ID NO: 32307 - DNA, 25 bp, Probe sequence
ctaattgagcgacataacttgaatg

SEQ ID NO: 32308 - DNA, 25 bp, Probe sequence
acttgaatgttagtcctgctacaat

SEQ ID NO: 32309 - DNA, 25 bp, Probe sequence
aacttgaatgttagtcctgctacaa

SEQ ID NO: 32310 - DNA, 25 bp, Probe sequence
cttgaatgttagtcctgctacaatt

SEQ ID NO: 32311 - DNA, 25 bp, Probe sequence
tacatcttgcttcagacataccgtt

SEQ ID NO: 32312 - DNA, 25 bp, Probe sequence
cacctgttgatatgtcttctaatgc

SEQ ID NO: 32313 - DNA, 25 bp, Probe sequence
cctgttgatatgtcttctaatgcca

SEQ ID NO: 32314 - DNA, 25 bp, Probe sequence
acctgttgatatgtcttctaatgcc

SEQ ID NO: 32315 - DNA, 25 bp, Probe sequence
ctgttgatatgtcttctaatgccaa

SEQ ID NO: 32316 - DNA, 25 bp, Probe sequence
acacctgttgatatgtcttctaatg

SEQ ID NO: 32317 - DNA, 25 bp, Probe sequence
gatatgtcttctaatgccaaactgc

SEQ ID NO: 32318 - DNA, 25 bp, Probe sequence
taataaatggacgatgataactgcg

SEQ ID NO: 32319 - DNA, 25 bp, Probe sequence
cgcatcatttacatcatcagtatca

SEQ ID NO: 32320 - DNA, 25 bp, Probe sequence
acgcatcatttacatcatcagtatc

SEQ ID NO: 32321 - DNA, 25 bp, Probe sequence
ggtagaacgcacaatactgaagata

SEQ ID NO: 32322 - DNA, 25 bp, Probe sequence
ttaggtagaacgcacaatactgaag

SEQ ID NO: 32323 - DNA, 25 bp, Probe sequence
gtagaacgcacaatactgaagatat

SEQ ID NO: 32324 - DNA, 25 bp, Probe sequence
taggtagaacgcacaatactgaaga

SEQ ID NO: 32325 - DNA, 25 bp, Probe sequence
agttacggcttaatacttgaaccta

SEQ ID NO: 32326 - DNA, 25 bp, Probe sequence
gttacggcttaatacttgaacctaa

SEQ ID NO: 32327 - DNA, 25 bp, Probe sequence
gagttacggcttaatacttgaacct

SEQ ID NO: 32328 - DNA, 25 bp, Probe sequence
aggtagaacgcacaatactgaagat

SEQ ID NO: 32329 - DNA, 25 bp, Probe sequence
acgaatatcaatccagtgaatcatt

SEQ ID NO: 32330 - DNA, 25 bp, Probe sequence
gcaatggaacttattcatcaacgag

SEQ ID NO: 32331 - DNA, 25 bp, Probe sequence
caatggaacttattcatcaacgagt

SEQ ID NO: 32332 - DNA, 25 bp, Probe sequence
cgtacaagattatggaattaagcgt

SEQ ID NO: 32333 - DNA, 25 bp, Probe sequence
tcgtacaagattatggaattaagcg

SEQ ID NO: 32334 - DNA, 25 bp, Probe sequence
atggaacttattcatcaacgagtaa

SEQ ID NO: 32335 - DNA, 25 bp, Probe sequence
aatggaacttattcatcaacgagta

SEQ ID NO: 32336 - DNA, 25 bp, Probe sequence
tagacatagcacatttaagccgaat

SEQ ID NO: 32337 - DNA, 25 bp, Probe sequence
atagacatagcacatttaagccgaa

SEQ ID NO: 32338 - DNA, 25 bp, Probe sequence
gatagacatagcacatttaagccga

SEQ ID NO: 32339 - DNA, 25 bp, Probe sequence
attatagcacatattgaccacggaa

SEQ ID NO: 32340 - DNA, 25 bp, Probe sequence
gattatagcacatattgaccacgga

SEQ ID NO: 32341 - DNA, 25 bp, Probe sequence
cagttgatgaattaacagttggtga

SEQ ID NO: 32342 - DNA, 25 bp, Probe sequence
gttgatgaattaacagttggtgatg

SEQ ID NO: 32343 - DNA, 25 bp, Probe sequence
agttgatgaattaacagttggtgat

SEQ ID NO: 32344 - DNA, 25 bp, Probe sequence
cgattatagcacatattgaccacgg

SEQ ID NO: 32345 - DNA, 25 bp, Probe sequence
cttccagttgatgaattaacagttg

SEQ ID NO: 32346 - DNA, 25 bp, Probe sequence
tgagttagagttattgcctgttatt

SEQ ID NO: 32347 - DNA, 25 bp, Probe sequence
aatgagttagagttattgcctgtta

SEQ ID NO: 32348 - DNA, 25 bp, Probe sequence
aataacacaatcatcagcaagagat

SEQ ID NO: 32349 - DNA, 25 bp, Probe sequence
tgttagatcaacgatgaaggtagtt

SEQ ID NO: 32350 - DNA, 25 bp, Probe sequence
atgttagatcaacgatgaaggtagt

SEQ ID NO: 32351 - DNA, 25 bp, Probe sequence
gatgttagatcaacgatgaaggtag

SEQ ID NO: 32352 - DNA, 25 bp, Probe sequence
aatgacttggattcagtgtgatata

SEQ ID NO: 32353 - DNA, 25 bp, Probe sequence
taatctacatacctgggagtcgtta

SEQ ID NO: 32354 - DNA, 25 bp, Probe sequence
cagatgatgttgaaatgacttggat

SEQ ID NO: 32355 - DNA, 25 bp, Probe sequence
atacctgggagtcgttatgataatg

SEQ ID NO: 32356 - DNA, 25 bp, Probe sequence
aatctacatacctgggagtcgttat

SEQ ID NO: 32357 - DNA, 25 bp, Probe sequence
ttagcgttaggacaagtaagacatt

SEQ ID NO: 32358 - DNA, 25 bp, Probe sequence
agcgttaggacaagtaagacattat

SEQ ID NO: 32359 - DNA, 25 bp, Probe sequence
attagcgttaggacaagtaagacat

SEQ ID NO: 32360 - DNA, 25 bp, Probe sequence
gcgttaggacaagtaagacattatc

SEQ ID NO: 32361 - DNA, 25 bp, Probe sequence
tagcgttaggacaagtaagacatta

SEQ ID NO: 32362 - DNA, 25 bp, Probe sequence
aattagcgttaggacaagtaagaca

SEQ ID NO: 32363 - DNA, 25 bp, Probe sequence
cgttaggacaagtaagacattatca

SEQ ID NO: 32364 - DNA, 25 bp, Probe sequence
gcgatagaccaacaattaataagca

SEQ ID NO: 32365 - DNA, 25 bp, Probe sequence
ggcgatagaccaacaattaataagc

SEQ ID NO: 32366 - DNA, 25 bp, Probe sequence
aatggatcaagtgatgagtatggaa

SEQ ID NO: 32367 - DNA, 25 bp, Probe sequence
atggatcaagtgatgagtatggaac

SEQ ID NO: 32368 - DNA, 25 bp, Probe sequence
caatggatcaagtgatgagtatgga

SEQ ID NO: 32369 - DNA, 25 bp, Probe sequence
tggatcaagtgatgagtatggaact

SEQ ID NO: 32370 - DNA, 25 bp, Probe sequence
aagatttcggcaaagtaatggatac

SEQ ID NO: 32371 - DNA, 25 bp, Probe sequence
agatttcggcaaagtaatggataca

SEQ ID NO: 32372 - DNA, 25 bp, Probe sequence
gatttcggcaaagtaatggatacat

SEQ ID NO: 32373 - DNA, 25 bp, Probe sequence
aatgttgctggtattgaagatttcg

SEQ ID NO: 32374 - DNA, 25 bp, Probe sequence
gaagatttcggcaaagtaatggata

SEQ ID NO: 32375 - DNA, 25 bp, Probe sequence
cgtattatggcattgattactggtg

SEQ ID NO: 32376 - DNA, 25 bp, Probe sequence
tcgtattatggcattgattactggt

SEQ ID NO: 32377 - DNA, 25 bp, Probe sequence
taacacatccacacaatgaccatat

SEQ ID NO: 32378 - DNA, 25 bp, Probe sequence
ttaacacatccacacaatgaccata

SEQ ID NO: 32379 - DNA, 25 bp, Probe sequence
atcgtattatggcattgattactgg

SEQ ID NO: 32380 - DNA, 25 bp, Probe sequence
tattatggcattgattactggtgac

SEQ ID NO: 32381 - DNA, 25 bp, Probe sequence
gtattatggcattgattactggtga

SEQ ID NO: 32382 - DNA, 25 bp, Probe sequence
aacacatccacacaatgaccatatt

SEQ ID NO: 32383 - DNA, 25 bp, Probe sequence
attatggcattgattactggtgacg

SEQ ID NO: 32384 - DNA, 25 bp, Probe sequence
aagatggacattgtatcagaacgat

SEQ ID NO: 32385 - DNA, 25 bp, Probe sequence
gaagatggacattgtatcagaacga

SEQ ID NO: 32386 - DNA, 25 bp, Probe sequence
tgaagatggacattgtatcagaacg

SEQ ID NO: 32387 - DNA, 25 bp, Probe sequence
ttgaagatggacattgtatcagaac

SEQ ID NO: 32388 - DNA, 25 bp, Probe sequence
aatcgtattattgctggtggttata

SEQ ID NO: 32389 - DNA, 25 bp, Probe sequence
agatggacattgtatcagaacgata

SEQ ID NO: 32390 - DNA, 25 bp, Probe sequence
taatcgtattattgctggtggttat

SEQ ID NO: 32391 - DNA, 25 bp, Probe sequence
attgaagatggacattgtatcagaa

SEQ ID NO: 32392 - DNA, 25 bp, Probe sequence
aattgaagatggacattgtatcaga

SEQ ID NO: 32393 - DNA, 25 bp, Probe sequence
tctggagacaagatgattatacttc

SEQ ID NO: 32394 - DNA, 25 bp, Probe sequence
ctggagacaagatgattatacttca

SEQ ID NO: 32395 - DNA, 25 bp, Probe sequence
tggagacaagatgattatacttcaa

SEQ ID NO: 32396 - DNA, 25 bp, Probe sequence
ttctggagacaagatgattatactt

SEQ ID NO: 32397 - DNA, 25 bp, Probe sequence
tgacatctaaggatagagtagttga

SEQ ID NO: 32398 - DNA, 25 bp, Probe sequence
attctggagacaagatgattatact

SEQ ID NO: 32399 - DNA, 25 bp, Probe sequence
ggagacaagatgattatacttcaag

SEQ ID NO: 32400 - DNA, 25 bp, Probe sequence
atgacatctaaggatagagtagttg

SEQ ID NO: 32401 - DNA, 25 bp, Probe sequence
aaaggtgctgttaaacatcctaatg

SEQ ID NO: 32402 - DNA, 25 bp, Probe sequence
ttaatgttaatcggtgtcgcttatt

SEQ ID NO: 32403 - DNA, 25 bp, Probe sequence
attccaagcgaacaattagacattc

SEQ ID NO: 32404 - DNA, 25 bp, Probe sequence
aatcattccaagcgaacaattagac

SEQ ID NO: 32405 - DNA, 25 bp, Probe sequence
caagcgaacaattagacattccata

SEQ ID NO: 32406 - DNA, 25 bp, Probe sequence
cattccaagcgaacaattagacatt

SEQ ID NO: 32407 - DNA, 25 bp, Probe sequence
tcattccaagcgaacaattagacat

SEQ ID NO: 32408 - DNA, 25 bp, Probe sequence
atcattccaagcgaacaattagaca

SEQ ID NO: 32409 - DNA, 25 bp, Probe sequence
aagcgaacaattagacattccatat

SEQ ID NO: 32410 - DNA, 25 bp, Probe sequence
taatcattccaagcgaacaattaga

SEQ ID NO: 32411 - DNA, 25 bp, Probe sequence
aattggcttgaaggagatatgacat

SEQ ID NO: 32412 - DNA, 25 bp, Probe sequence
attggcttgaaggagatatgacatc

SEQ ID NO: 32413 - DNA, 25 bp, Probe sequence
taagtgttgatatgttgactgttgc

SEQ ID NO: 32414 - DNA, 25 bp, Probe sequence
ttagatattggatgcggtactggta

SEQ ID NO: 32415 - DNA, 25 bp, Probe sequence
tagatattggatgcggtactggtag

SEQ ID NO: 32416 - DNA, 25 bp, Probe sequence
ttaagtgttgatatgttgactgttg

SEQ ID NO: 32417 - DNA, 25 bp, Probe sequence
aaattggcttgaaggagatatgaca

SEQ ID NO: 32418 - DNA, 25 bp, Probe sequence
aaatgtaaattggcttgaaggagat

SEQ ID NO: 32419 - DNA, 25 bp, Probe sequence
ttaggtaatgttactggtatggatt

SEQ ID NO: 32420 - DNA, 25 bp, Probe sequence
atggtgacgaattagtacatcaagt

SEQ ID NO: 32421 - DNA, 25 bp, Probe sequence
tggtgacgaattagtacatcaagta

SEQ ID NO: 32422 - DNA, 25 bp, Probe sequence
cgaatacacagatgaatatatggct

SEQ ID NO: 32423 - DNA, 25 bp, Probe sequence
catggtgacgaattagtacatcaag

SEQ ID NO: 32424 - DNA, 25 bp, Probe sequence
acatggtgacgaattagtacatcaa

SEQ ID NO: 32425 - DNA, 25 bp, Probe sequence
ggtgacgaattagtacatcaagtaa

SEQ ID NO: 32426 - DNA, 25 bp, Probe sequence
acacagatgaatatatggctgagtt

SEQ ID NO: 32427 - DNA, 25 bp, Probe sequence
tatggttcaattagaagagatggtt

SEQ ID NO: 32428 - DNA, 25 bp, Probe sequence
ttatggttcaattagaagagatggt

SEQ ID NO: 32429 - DNA, 25 bp, Probe sequence
aaggtatcagcgatatgacagatta

SEQ ID NO: 32430 - DNA, 25 bp, Probe sequence
aggtatcagcgatatgacagattat

SEQ ID NO: 32431 - DNA, 25 bp, Probe sequence
ggtatcagcgatatgacagattatt

SEQ ID NO: 32432 - DNA, 25 bp, Probe sequence
tttgttgtaacgcacggaaataatg

SEQ ID NO: 32433 - DNA, 25 bp, Probe sequence
ggtgaaagaagtagccaatgaacaa

SEQ ID NO: 32434 - DNA, 25 bp, Probe sequence
aaaggtatcagcgatatgacagatt

SEQ ID NO: 32435 - DNA, 25 bp, Probe sequence
gttgtaacgcacggaaataatgaac

SEQ ID NO: 32436 - DNA, 25 bp, Probe sequence
tgttgtaacgcacggaaataatgaa

SEQ ID NO: 32437 - DNA, 25 bp, Probe sequence
ttgttgtaacgcacggaaataatga

SEQ ID NO: 32438 - DNA, 25 bp, Probe sequence
gcctataccgagcagttaatgatat

SEQ ID NO: 32439 - DNA, 25 bp, Probe sequence
agcctataccgagcagttaatgata

SEQ ID NO: 32440 - DNA, 25 bp, Probe sequence
ctaggtattgttggtgaatcaggat

SEQ ID NO: 32441 - DNA, 25 bp, Probe sequence
gcttaatagatgcgattcctgatat

SEQ ID NO: 32442 - DNA, 25 bp, Probe sequence
taggtattgttggtgaatcaggatc

SEQ ID NO: 32443 - DNA, 25 bp, Probe sequence
aacaattacagttagacttcggcat

SEQ ID NO: 32444 - DNA, 25 bp, Probe sequence
cagttagacttcggcatcacttatt

SEQ ID NO: 32445 - DNA, 25 bp, Probe sequence
aattacagttagacttcggcatcac

SEQ ID NO: 32446 - DNA, 25 bp, Probe sequence
caattacagttagacttcggcatca

SEQ ID NO: 32447 - DNA, 25 bp, Probe sequence
tgtgtcatcatcaatcttaggtgtt

SEQ ID NO: 32448 - DNA, 25 bp, Probe sequence
gtgtcatcatcaatcttaggtgttg

SEQ ID NO: 32449 - DNA, 25 bp, Probe sequence
ttgtgtcatcatcaatcttaggtgt

SEQ ID NO: 32450 - DNA, 25 bp, Probe sequence
gttgtgtcatcatcaatcttaggtg

SEQ ID NO: 32451 - DNA, 25 bp, Probe sequence
tcatcatcaatcttaggtgttggtg

SEQ ID NO: 32452 - DNA, 25 bp, Probe sequence
gtcatcatcaatcttaggtgttggt

SEQ ID NO: 32453 - DNA, 25 bp, Probe sequence
tgtcatcatcaatcttaggtgttgg

SEQ ID NO: 32454 - DNA, 25 bp, Probe sequence
cgttgtgtcatcatcaatcttaggt

SEQ ID NO: 32455 - DNA, 25 bp, Probe sequence
tcaatcttaggtgttggtgcttcta

SEQ ID NO: 32456 - DNA, 25 bp, Probe sequence
cgagatatggcatacaatcaaggta

SEQ ID NO: 32457 - DNA, 25 bp, Probe sequence
agatatggcatacaatcaaggtagt

SEQ ID NO: 32458 - DNA, 25 bp, Probe sequence
gagatatggcatacaatcaaggtag

SEQ ID NO: 32459 - DNA, 25 bp, Probe sequence
gatatggcatacaatcaaggtagtt

SEQ ID NO: 32460 - DNA, 25 bp, Probe sequence
aggtaatgatctactgagttatggt

SEQ ID NO: 32461 - DNA, 25 bp, Probe sequence
caatgatgaggaagtattaatggct

SEQ ID NO: 32462 - DNA, 25 bp, Probe sequence
ccaggagttgatgatattcgagata

SEQ ID NO: 32463 - DNA, 25 bp, Probe sequence
agttgatgatattcgagatatggca

SEQ ID NO: 32464 - DNA, 25 bp, Probe sequence
ttcgagatatggcatacaatcaagg

SEQ ID NO: 32465 - DNA, 25 bp, Probe sequence
attggttatttcttcgttggagatg

SEQ ID NO: 32466 - DNA, 25 bp, Probe sequence
acccttgtcatttggattactgatt

SEQ ID NO: 32467 - DNA, 25 bp, Probe sequence
aacccttgtcatttggattactgat

SEQ ID NO: 32468 - DNA, 25 bp, Probe sequence
ttattggttatttcttcgttggaga

SEQ ID NO: 32469 - DNA, 25 bp, Probe sequence
cccttgtcatttggattactgatta

SEQ ID NO: 32470 - DNA, 25 bp, Probe sequence
caacccttgtcatttggattactga

SEQ ID NO: 32471 - DNA, 25 bp, Probe sequence
gacggttcggtttaattatttcaca

SEQ ID NO: 32472 - DNA, 25 bp, Probe sequence
agacggttcggtttaattatttcac

SEQ ID NO: 32473 - DNA, 25 bp, Probe sequence
tattggttatttcttcgttggagat

SEQ ID NO: 32474 - DNA, 25 bp, Probe sequence
cagcacagattaacaatgatacaga

SEQ ID NO: 32475 - DNA, 25 bp, Probe sequence
gcacagattaacaatgatacagatg

SEQ ID NO: 32476 - DNA, 25 bp, Probe sequence
tcagcacagattaacaatgatacag

SEQ ID NO: 32477 - DNA, 25 bp, Probe sequence
agcacagattaacaatgatacagat

SEQ ID NO: 32478 - DNA, 25 bp, Probe sequence
ttcagcacagattaacaatgataca

SEQ ID NO: 32479 - DNA, 25 bp, Probe sequence
gttcagcacagattaacaatgatac

SEQ ID NO: 32480 - DNA, 25 bp, Probe sequence
gacggatcagtataaccaactagag

SEQ ID NO: 32481 - DNA, 25 bp, Probe sequence
acggatcagtataaccaactagaga

SEQ ID NO: 32482 - DNA, 25 bp, Probe sequence
cggatcagtataaccaactagagaa

SEQ ID NO: 32483 - DNA, 25 bp, Probe sequence
gtcatcacaattccacttacttatg

SEQ ID NO: 32484 - DNA, 25 bp, Probe sequence
tactaataatgaatatgcgacaacg

SEQ ID NO: 32485 - DNA, 25 bp, Probe sequence
tgtcatcacaattccacttacttat

SEQ ID NO: 32486 - DNA, 25 bp, Probe sequence
ttgtatttgagtagcgattggtttg

SEQ ID NO: 32487 - DNA, 25 bp, Probe sequence
gttgtatttgagtagcgattggttt

SEQ ID NO: 32488 - DNA, 25 bp, Probe sequence
tcatcacaattccacttacttatgg

SEQ ID NO: 32489 - DNA, 25 bp, Probe sequence
atgttgtatttgagtagcgattggt

SEQ ID NO: 32490 - DNA, 25 bp, Probe sequence
tgttgtatttgagtagcgattggtt

SEQ ID NO: 32491 - DNA, 25 bp, Probe sequence
gcggaattaggctttactttcttta

SEQ ID NO: 32492 - DNA, 25 bp, Probe sequence
ttagtgcaagtgattggatctatga

SEQ ID NO: 32493 - DNA, 25 bp, Probe sequence
tagtgaattagtgcaagtgattgga

SEQ ID NO: 32494 - DNA, 25 bp, Probe sequence
tagtgcaagtgattggatctatgat

SEQ ID NO: 32495 - DNA, 25 bp, Probe sequence
tgaattagtgcaagtgattggatct

SEQ ID NO: 32496 - DNA, 25 bp, Probe sequence
gtgaattagtgcaagtgattggatc

SEQ ID NO: 32497 - DNA, 25 bp, Probe sequence
agtgaattagtgcaagtgattggat

SEQ ID NO: 32498 - DNA, 25 bp, Probe sequence
attagtgcaagtgattggatctatg

SEQ ID NO: 32499 - DNA, 25 bp, Probe sequence
gaattagtgcaagtgattggatcta

SEQ ID NO: 32500 - DNA, 25 bp, Probe sequence
aattagtgcaagtgattggatctat

SEQ ID NO: 32501 - DNA, 25 bp, Probe sequence
aaacattgcttggcttctataaaca

SEQ ID NO: 32502 - DNA, 25 bp, Probe sequence
agaaattagaaacattgcttggctt

SEQ ID NO: 32503 - DNA, 25 bp, Probe sequence
gagaaattagaaacattgcttggct

SEQ ID NO: 32504 - DNA, 25 bp, Probe sequence
tgagaaattagaaacattgcttggc

SEQ ID NO: 32505 - DNA, 25 bp, Probe sequence
gcagtcttagatttaacgatgaagc

SEQ ID NO: 32506 - DNA, 25 bp, Probe sequence
gaaacattgcttggcttctataaac

SEQ ID NO: 32507 - DNA, 25 bp, Probe sequence
gaaattagaaacattgcttggcttc

SEQ ID NO: 32508 - DNA, 25 bp, Probe sequence
cagtcttagatttaacgatgaagca

SEQ ID NO: 32509 - DNA, 25 bp, Probe sequence
aacattgcttggcttctataaacaa

SEQ ID NO: 32510 - DNA, 25 bp, Probe sequence
attaactgttgcgaatagaacgatg

SEQ ID NO: 32511 - DNA, 25 bp, Probe sequence
aattaactgttgcgaatagaacgat

SEQ ID NO: 32512 - DNA, 25 bp, Probe sequence
ttaactgttgcgaatagaacgatgg

SEQ ID NO: 32513 - DNA, 25 bp, Probe sequence
gtatggctggaaataacgaaagtat

SEQ ID NO: 32514 - DNA, 25 bp, Probe sequence
ggtatggctggaaataacgaaagta

SEQ ID NO: 32515 - DNA, 25 bp, Probe sequence
aaattaactgttgcgaatagaacga

SEQ ID NO: 32516 - DNA, 25 bp, Probe sequence
gtggatagggtataatacagatggt

SEQ ID NO: 32517 - DNA, 25 bp, Probe sequence
agtggatagggtataatacagatgg

SEQ ID NO: 32518 - DNA, 25 bp, Probe sequence
tggctggaaataacgaaagtattat

SEQ ID NO: 32519 - DNA, 25 bp, Probe sequence
atgtgattgacgataatggattgac

SEQ ID NO: 32520 - DNA, 25 bp, Probe sequence
tgatgtgattgacgataatggattg

SEQ ID NO: 32521 - DNA, 25 bp, Probe sequence
gatgtgattgacgataatggattga

SEQ ID NO: 32522 - DNA, 25 bp, Probe sequence
atgatgtgattgacgataatggatt

SEQ ID NO: 32523 - DNA, 25 bp, Probe sequence
aatgatgtgattgacgataatggat

SEQ ID NO: 32524 - DNA, 25 bp, Probe sequence
gtgattgacgataatggattgacaa

SEQ ID NO: 32525 - DNA, 25 bp, Probe sequence
tgtgattgacgataatggattgaca

SEQ ID NO: 32526 - DNA, 25 bp, Probe sequence
gacaatagtctatgctgaaccagat

SEQ ID NO: 32527 - DNA, 25 bp, Probe sequence
ttgacaatagtctatgctgaaccag

SEQ ID NO: 32528 - DNA, 25 bp, Probe sequence
acgaagttcaagatgtaggattaga

SEQ ID NO: 32529 - DNA, 25 bp, Probe sequence
ggcatagacgacttattatcatcaa

SEQ ID NO: 32530 - DNA, 25 bp, Probe sequence
aacgaagttcaagatgtaggattag

SEQ ID NO: 32531 - DNA, 25 bp, Probe sequence
atgttatgatctctggtctaggctt

SEQ ID NO: 32532 - DNA, 25 bp, Probe sequence
cgaagttcaagatgtaggattagaa

SEQ ID NO: 32533 - DNA, 25 bp, Probe sequence
gatgttatgatctctggtctaggct

SEQ ID NO: 32534 - DNA, 25 bp, Probe sequence
cgcatagattatgtatcaggtggta

SEQ ID NO: 32535 - DNA, 25 bp, Probe sequence
ataacgaagttcaagatgtaggatt

SEQ ID NO: 32536 - DNA, 25 bp, Probe sequence
taacgaagttcaagatgtaggatta

SEQ ID NO: 32537 - DNA, 25 bp, Probe sequence
gaattgatgctgatgaagtatggta

SEQ ID NO: 32538 - DNA, 25 bp, Probe sequence
cgaattgatgctgatgaagtatggt

SEQ ID NO: 32539 - DNA, 25 bp, Probe sequence
aattgatgctgatgaagtatggtac

SEQ ID NO: 32540 - DNA, 25 bp, Probe sequence
cagcagaacaatggattgatgaatt

SEQ ID NO: 32541 - DNA, 25 bp, Probe sequence
tcagcagaacaatggattgatgaat

SEQ ID NO: 32542 - DNA, 25 bp, Probe sequence
atcgaattgatgctgatgaagtatg

SEQ ID NO: 32543 - DNA, 25 bp, Probe sequence
tcgaattgatgctgatgaagtatgg

SEQ ID NO: 32544 - DNA, 25 bp, Probe sequence
attgatgctgatgaagtatggtact

SEQ ID NO: 32545 - DNA, 25 bp, Probe sequence
ttgatgctgatgaagtatggtacta

SEQ ID NO: 32546 - DNA, 25 bp, Probe sequence
aataatgagtctcgtgttgctagtt

SEQ ID NO: 32547 - DNA, 25 bp, Probe sequence
taataatgagtctcgtgttgctagt

SEQ ID NO: 32548 - DNA, 25 bp, Probe sequence
ataataatgagtctcgtgttgctag

SEQ ID NO: 32549 - DNA, 25 bp, Probe sequence
aataataatgagtctcgtgttgcta

SEQ ID NO: 32550 - DNA, 25 bp, Probe sequence
taataataatgagtctcgtgttgct

SEQ ID NO: 32551 - DNA, 25 bp, Probe sequence
ctaataataatgagtctcgtgttgc

SEQ ID NO: 32552 - DNA, 25 bp, Probe sequence
tgtctaataataatgagtctcgtgt

SEQ ID NO: 32553 - DNA, 25 bp, Probe sequence
atgcttactgatgtatttggtggta

SEQ ID NO: 32554 - DNA, 25 bp, Probe sequence
gtgaccaaatgcttactgatgtatt

SEQ ID NO: 32555 - DNA, 25 bp, Probe sequence
tgaagaaatgtgtgtactatctaat

SEQ ID NO: 32556 - DNA, 25 bp, Probe sequence
atgaagaaatgtgtgtactatctaa

SEQ ID NO: 32557 - DNA, 25 bp, Probe sequence
ttatgaagaaatgtgtgtactatct

SEQ ID NO: 32558 - DNA, 25 bp, Probe sequence
atcacttttatgaagaaatgtgtgt

SEQ ID NO: 32559 - DNA, 25 bp, Probe sequence
acttttatgaagaaatgtgtgtact

SEQ ID NO: 32560 - DNA, 25 bp, Probe sequence
tttatgaagaaatgtgtgtactatc

SEQ ID NO: 32561 - DNA, 25 bp, Probe sequence
tcacttttatgaagaaatgtgtgta

SEQ ID NO: 32562 - DNA, 25 bp, Probe sequence
cacttttatgaagaaatgtgtgtac

SEQ ID NO: 32563 - DNA, 25 bp, Probe sequence
aatcacttttatgaagaaatgtgtg

SEQ ID NO: 32564 - DNA, 25 bp, Probe sequence
aagtaggcttaattgtaagtggtga

SEQ ID NO: 32565 - DNA, 25 bp, Probe sequence
agtaggcttaattgtaagtggtgat

SEQ ID NO: 32566 - DNA, 25 bp, Probe sequence
gtaggcttaattgtaagtggtgata

SEQ ID NO: 32567 - DNA, 25 bp, Probe sequence
taggcttaattgtaagtggtgatag

SEQ ID NO: 32568 - DNA, 25 bp, Probe sequence
gtttcagacttagcaaatggagaag

SEQ ID NO: 32569 - DNA, 25 bp, Probe sequence
gtacaacaacaacaattaacagcta

SEQ ID NO: 32570 - DNA, 25 bp, Probe sequence
cagcatttggttatgaatatggaca

SEQ ID NO: 32571 - DNA, 25 bp, Probe sequence
acagcatttggttatgaatatggac

SEQ ID NO: 32572 - DNA, 25 bp, Probe sequence
gcaacagcatttggttatgaatatg

SEQ ID NO: 32573 - DNA, 25 bp, Probe sequence
gtggtgaatatgagttggtagatga

SEQ ID NO: 32574 - DNA, 25 bp, Probe sequence
agtggtgaatatgagttggtagatg

SEQ ID NO: 32575 - DNA, 25 bp, Probe sequence
tggtgaatatgagttggtagatgaa

SEQ ID NO: 32576 - DNA, 25 bp, Probe sequence
ggtgaatatgagttggtagatgaag

SEQ ID NO: 32577 - DNA, 25 bp, Probe sequence
ggtattataggcttagtcacgatga

SEQ ID NO: 32578 - DNA, 25 bp, Probe sequence
gtgaatatgagttggtagatgaaga

SEQ ID NO: 32579 - DNA, 25 bp, Probe sequence
gtattataggcttagtcacgatgaa

SEQ ID NO: 32580 - DNA, 25 bp, Probe sequence
aatatgagttggtagatgaagatga

SEQ ID NO: 32581 - DNA, 25 bp, Probe sequence
tgaatatgagttggtagatgaagat

SEQ ID NO: 32582 - DNA, 25 bp, Probe sequence
aatgttgattagtggtgtaggtgtt

SEQ ID NO: 32583 - DNA, 25 bp, Probe sequence
atgttgattagtggtgtaggtgtta

SEQ ID NO: 32584 - DNA, 25 bp, Probe sequence
tgttgattagtggtgtaggtgttac

SEQ ID NO: 32585 - DNA, 25 bp, Probe sequence
acaacaactgaaggaacaatgatta

SEQ ID NO: 32586 - DNA, 25 bp, Probe sequence
tacaacaactgaaggaacaatgatt

SEQ ID NO: 32587 - DNA, 25 bp, Probe sequence
ttacaacaactgaaggaacaatgat

SEQ ID NO: 32588 - DNA, 25 bp, Probe sequence
attacaacaactgaaggaacaatga

SEQ ID NO: 32589 - DNA, 25 bp, Probe sequence
tgattacaacaactgaaggaacaat

SEQ ID NO: 32590 - DNA, 25 bp, Probe sequence
gattacaacaactgaaggaacaatg

SEQ ID NO: 32591 - DNA, 25 bp, Probe sequence
acgaacaagataagttagatggaga

SEQ ID NO: 32592 - DNA, 25 bp, Probe sequence
gaacaagataagttagatggagagc

SEQ ID NO: 32593 - DNA, 25 bp, Probe sequence
cgaacaagataagttagatggagag

SEQ ID NO: 32594 - DNA, 25 bp, Probe sequence
aacgaacaagataagttagatggag

SEQ ID NO: 32595 - DNA, 25 bp, Probe sequence
tatgatggcaatggtagagttggaa

SEQ ID NO: 32596 - DNA, 25 bp, Probe sequence
ttatgatggcaatggtagagttgga

SEQ ID NO: 32597 - DNA, 25 bp, Probe sequence
atggcaatggtagagttggaagatt

SEQ ID NO: 32598 - DNA, 25 bp, Probe sequence
gccaagctcttgagtgattattatg

SEQ ID NO: 32599 - DNA, 25 bp, Probe sequence
tgccaagctcttgagtgattattat

SEQ ID NO: 32600 - DNA, 25 bp, Probe sequence
ttctatatgatgttagcaggacagg

SEQ ID NO: 32601 - DNA, 25 bp, Probe sequence
tctatatgatgttagcaggacaggt

SEQ ID NO: 32602 - DNA, 25 bp, Probe sequence
gtatcagcagcatcaatcatgttag

SEQ ID NO: 32603 - DNA, 25 bp, Probe sequence
tgtatcagcagcatcaatcatgtta

SEQ ID NO: 32604 - DNA, 25 bp, Probe sequence
acttctatatgatgttagcaggaca

SEQ ID NO: 32605 - DNA, 25 bp, Probe sequence
aacttctatatgatgttagcaggac

SEQ ID NO: 32606 - DNA, 25 bp, Probe sequence
tatcagcagcatcaatcatgttagg

SEQ ID NO: 32607 - DNA, 25 bp, Probe sequence
cttctatatgatgttagcaggacag

SEQ ID NO: 32608 - DNA, 25 bp, Probe sequence
agcagcatcaatcatgttaggtatg

SEQ ID NO: 32609 - DNA, 25 bp, Probe sequence
cacatcgtatattagactctggcat

SEQ ID NO: 32610 - DNA, 25 bp, Probe sequence
acatcgtatattagactctggcatt

SEQ ID NO: 32611 - DNA, 25 bp, Probe sequence
ggtggaactgtaggtggttatatta

SEQ ID NO: 32612 - DNA, 25 bp, Probe sequence
tggtggaactgtaggtggttatatt

SEQ ID NO: 32613 - DNA, 25 bp, Probe sequence
ttggtggaactgtaggtggttatat

SEQ ID NO: 32614 - DNA, 25 bp, Probe sequence
gctatgtcatcagtaattggctcag

SEQ ID NO: 32615 - DNA, 25 bp, Probe sequence
gtggaactgtaggtggttatattac

SEQ ID NO: 32616 - DNA, 25 bp, Probe sequence
ctatgtcatcagtaattggctcagc

SEQ ID NO: 32617 - DNA, 25 bp, Probe sequence
catcgtatattagactctggcatta

SEQ ID NO: 32618 - DNA, 25 bp, Probe sequence
cacagtatcaatcacagttgcttac

SEQ ID NO: 32619 - DNA, 25 bp, Probe sequence
acagtatcaatcacagttgcttaca

SEQ ID NO: 32620 - DNA, 25 bp, Probe sequence
acacagtatcaatcacagttgctta

SEQ ID NO: 32621 - DNA, 25 bp, Probe sequence
tacacagtatcaatcacagttgctt

SEQ ID NO: 32622 - DNA, 25 bp, Probe sequence
cagtatcaatcacagttgcttacat

SEQ ID NO: 32623 - DNA, 25 bp, Probe sequence
caacttcaacaagatggcatcatat

SEQ ID NO: 32624 - DNA, 25 bp, Probe sequence
ttagaggtggtatcatcattgagca

SEQ ID NO: 32625 - DNA, 25 bp, Probe sequence
tcaacttcaacaagatggcatcata

SEQ ID NO: 32626 - DNA, 25 bp, Probe sequence
agtgaatcaagtatgcgactatatc

SEQ ID NO: 32627 - DNA, 25 bp, Probe sequence
cacacatgatcctaccactgattat

SEQ ID NO: 32628 - DNA, 25 bp, Probe sequence
acacatgatcctaccactgattatt

SEQ ID NO: 32629 - DNA, 25 bp, Probe sequence
tcttattcagttgttggatcagatg

SEQ ID NO: 32630 - DNA, 25 bp, Probe sequence
aaggcaataatcatcaagatcagaa

SEQ ID NO: 32631 - DNA, 25 bp, Probe sequence
actggtgaatatgacacaactacaa

SEQ ID NO: 32632 - DNA, 25 bp, Probe sequence
aactggtgaatatgacacaactaca

SEQ ID NO: 32633 - DNA, 25 bp, Probe sequence
tattcagttgttggatcagatgagc

SEQ ID NO: 32634 - DNA, 25 bp, Probe sequence
ttattcagttgttggatcagatgag

SEQ ID NO: 32635 - DNA, 25 bp, Probe sequence
cttattcagttgttggatcagatga

SEQ ID NO: 32636 - DNA, 25 bp, Probe sequence
ttaattggtgtggttattggatgtt

SEQ ID NO: 32637 - DNA, 25 bp, Probe sequence
acaagtagtatagctcaagcaatca

SEQ ID NO: 32638 - DNA, 25 bp, Probe sequence
aacaagtagtatagctcaagcaatc

SEQ ID NO: 32639 - DNA, 25 bp, Probe sequence
caagtagtatagctcaagcaatcat

SEQ ID NO: 32640 - DNA, 25 bp, Probe sequence
gctttaattggtgtggttattggat

SEQ ID NO: 32641 - DNA, 25 bp, Probe sequence
taattggtgtggttattggatgttt

SEQ ID NO: 32642 - DNA, 25 bp, Probe sequence
agtatagctcaagcaatcattatgt

SEQ ID NO: 32643 - DNA, 25 bp, Probe sequence
aagtagtatagctcaagcaatcatt

SEQ ID NO: 32644 - DNA, 25 bp, Probe sequence
ttaacaagtagtatagctcaagcaa

SEQ ID NO: 32645 - DNA, 25 bp, Probe sequence
tgatgctgtgattactgatactgac

SEQ ID NO: 32646 - DNA, 25 bp, Probe sequence
gtgatgctgtgattactgatactga

SEQ ID NO: 32647 - DNA, 25 bp, Probe sequence
ctgatagacgatacgaagatgatgg

SEQ ID NO: 32648 - DNA, 25 bp, Probe sequence
attactgatactgacgaagcactta

SEQ ID NO: 32649 - DNA, 25 bp, Probe sequence
ttactgatactgacgaagcacttaa

SEQ ID NO: 32650 - DNA, 25 bp, Probe sequence
gattactgatactgacgaagcactt

SEQ ID NO: 32651 - DNA, 25 bp, Probe sequence
gctgatagacgatacgaagatgatg

SEQ ID NO: 32652 - DNA, 25 bp, Probe sequence
ctgtgattactgatactgacgaagc

SEQ ID NO: 32653 - DNA, 25 bp, Probe sequence
gctgtgattactgatactgacgaag

SEQ ID NO: 32654 - DNA, 25 bp, Probe sequence
ttaattggtgtcgttattggatgtt

SEQ ID NO: 32655 - DNA, 25 bp, Probe sequence
ttaacaagtagtatagctcaagcga

SEQ ID NO: 32656 - DNA, 25 bp, Probe sequence
taacaagtagtatagctcaagcgag

SEQ ID NO: 32657 - DNA, 25 bp, Probe sequence
tatgggttggctttctaatctatca

SEQ ID NO: 32658 - DNA, 25 bp, Probe sequence
gctttaattggtgtcgttattggat

SEQ ID NO: 32659 - DNA, 25 bp, Probe sequence
tggctttctaatctatcaatttggc

SEQ ID NO: 32660 - DNA, 25 bp, Probe sequence
ggctttctaatctatcaatttggct

SEQ ID NO: 32661 - DNA, 25 bp, Probe sequence
taattggtgtcgttattggatgttt

SEQ ID NO: 32662 - DNA, 25 bp, Probe sequence
accgccatttggaattattatcatt

SEQ ID NO: 32663 - DNA, 25 bp, Probe sequence
attgaactgctatatgttgaaccac

SEQ ID NO: 32664 - DNA, 25 bp, Probe sequence
cattgaactgctatatgttgaacca

SEQ ID NO: 32665 - DNA, 25 bp, Probe sequence
gaactgctatatgttgaaccacaat

SEQ ID NO: 32666 - DNA, 25 bp, Probe sequence
tgaactgctatatgttgaaccacaa

SEQ ID NO: 32667 - DNA, 25 bp, Probe sequence
ttgaactgctatatgttgaaccaca

SEQ ID NO: 32668 - DNA, 25 bp, Probe sequence
aactgctatatgttgaaccacaatt

SEQ ID NO: 32669 - DNA, 25 bp, Probe sequence
gctcttaggtacgagatgatatgtt

SEQ ID NO: 32670 - DNA, 25 bp, Probe sequence
ttgctcttaggtacgagatgatatg

SEQ ID NO: 32671 - DNA, 25 bp, Probe sequence
gtattgctcttaggtacgagatgat

SEQ ID NO: 32672 - DNA, 25 bp, Probe sequence
aagacatcggttatccagttgttat

SEQ ID NO: 32673 - DNA, 25 bp, Probe sequence
acatcggttatccagttgttatcaa

SEQ ID NO: 32674 - DNA, 25 bp, Probe sequence
ggtcatgtgatagaagcgagaataa

SEQ ID NO: 32675 - DNA, 25 bp, Probe sequence
agacatcggttatccagttgttatc

SEQ ID NO: 32676 - DNA, 25 bp, Probe sequence
ttaatggtcatgtgatagaagcgag

SEQ ID NO: 32677 - DNA, 25 bp, Probe sequence
gacatcggttatccagttgttatca

SEQ ID NO: 32678 - DNA, 25 bp, Probe sequence
tggtcatgtgatagaagcgagaata

SEQ ID NO: 32679 - DNA, 25 bp, Probe sequence
taatggtcatgtgatagaagcgaga

SEQ ID NO: 32680 - DNA, 25 bp, Probe sequence
atgaatgctcgaatacaagttgaac

SEQ ID NO: 32681 - DNA, 25 bp, Probe sequence
aagaggcatcacaagataagcaatc

SEQ ID NO: 32682 - DNA, 25 bp, Probe sequence
gaggcatcacaagataagcaatcaa

SEQ ID NO: 32683 - DNA, 25 bp, Probe sequence
agaggcatcacaagataagcaatca

SEQ ID NO: 32684 - DNA, 25 bp, Probe sequence
gataaagaggcatcacaagataagc

SEQ ID NO: 32685 - DNA, 25 bp, Probe sequence
ataaagaggcatcacaagataagca

SEQ ID NO: 32686 - DNA, 25 bp, Probe sequence
taaagaggcatcacaagataagcaa

SEQ ID NO: 32687 - DNA, 25 bp, Probe sequence
aaagaggcatcacaagataagcaat

SEQ ID NO: 32688 - DNA, 25 bp, Probe sequence
aggcatcacaagataagcaatcaaa

SEQ ID NO: 32689 - DNA, 25 bp, Probe sequence
agataaagaggcatcacaagataag

SEQ ID NO: 32690 - DNA, 25 bp, Probe sequence
ttataggatatgttgaagcgatgaa

SEQ ID NO: 32691 - DNA, 25 bp, Probe sequence
attataggatatgttgaagcgatga

SEQ ID NO: 32692 - DNA, 25 bp, Probe sequence
aggatatgttgaagcgatgaaagta

SEQ ID NO: 32693 - DNA, 25 bp, Probe sequence
taggatatgttgaagcgatgaaagt

SEQ ID NO: 32694 - DNA, 25 bp, Probe sequence
agcgatgaaagtattaaacgaggta

SEQ ID NO: 32695 - DNA, 25 bp, Probe sequence
tgaagcgatgaaagtattaaacgag

SEQ ID NO: 32696 - DNA, 25 bp, Probe sequence
gaagcgatgaaagtattaaacgagg

SEQ ID NO: 32697 - DNA, 25 bp, Probe sequence
gcgatgaaagtattaaacgaggtaa

SEQ ID NO: 32698 - DNA, 25 bp, Probe sequence
ggatatgttgaagcgatgaaagtat

SEQ ID NO: 32699 - DNA, 25 bp, Probe sequence
tgccagaattaggtagagaattaga

SEQ ID NO: 32700 - DNA, 25 bp, Probe sequence
ttgccagaattaggtagagaattag

SEQ ID NO: 32701 - DNA, 25 bp, Probe sequence
gccagaattaggtagagaattagaa

SEQ ID NO: 32702 - DNA, 25 bp, Probe sequence
actttgccagaattaggtagagaat

SEQ ID NO: 32703 - DNA, 25 bp, Probe sequence
tactttgccagaattaggtagagaa

SEQ ID NO: 32704 - DNA, 25 bp, Probe sequence
ttactttgccagaattaggtagaga

SEQ ID NO: 32705 - DNA, 25 bp, Probe sequence
tagagggtcaagatattactttgcc

SEQ ID NO: 32706 - DNA, 25 bp, Probe sequence
attgctgattctactggcgaaatta

SEQ ID NO: 32707 - DNA, 25 bp, Probe sequence
ttgctgattctactggcgaaattaa

SEQ ID NO: 32708 - DNA, 25 bp, Probe sequence
tacacattcttcaaggacctcaatt

SEQ ID NO: 32709 - DNA, 25 bp, Probe sequence
atacacattcttcaaggacctcaat

SEQ ID NO: 32710 - DNA, 25 bp, Probe sequence
tatacacattcttcaaggacctcaa

SEQ ID NO: 32711 - DNA, 25 bp, Probe sequence
ttatacacattcttcaaggacctca

SEQ ID NO: 32712 - DNA, 25 bp, Probe sequence
aatgatggtccagcgattgaatata

SEQ ID NO: 32713 - DNA, 25 bp, Probe sequence
gatggtccagcgattgaatatactt

SEQ ID NO: 32714 - DNA, 25 bp, Probe sequence
atgatggtccagcgattgaatatac

SEQ ID NO: 32715 - DNA, 25 bp, Probe sequence
acacattcttcaaggacctcaattc

SEQ ID NO: 32716 - DNA, 25 bp, Probe sequence
aattaacaatgatggtccagcgatt

SEQ ID NO: 32717 - DNA, 25 bp, Probe sequence
ttagatatgagaactatggatgcgg

SEQ ID NO: 32718 - DNA, 25 bp, Probe sequence
tagatatgagaactatggatgcggt

SEQ ID NO: 32719 - DNA, 25 bp, Probe sequence
gatatgagaactatggatgcggtta

SEQ ID NO: 32720 - DNA, 25 bp, Probe sequence
atgagaactatggatgcggttatta

SEQ ID NO: 32721 - DNA, 25 bp, Probe sequence
tatgagaactatggatgcggttatt

SEQ ID NO: 32722 - DNA, 25 bp, Probe sequence
tgagaactatggatgcggttattaa

SEQ ID NO: 32723 - DNA, 25 bp, Probe sequence
atatgagaactatggatgcggttat

SEQ ID NO: 32724 - DNA, 25 bp, Probe sequence
tgagttatcgtcgttcagaattaga

SEQ ID NO: 32725 - DNA, 25 bp, Probe sequence
gagttatcgtcgttcagaattagat

SEQ ID NO: 32726 - DNA, 25 bp, Probe sequence
aggttctgtaggtattgcgaataat

SEQ ID NO: 32727 - DNA, 25 bp, Probe sequence
ggttctgtaggtattgcgaataatc

SEQ ID NO: 32728 - DNA, 25 bp, Probe sequence
acttgatgaacaactacatacacct

SEQ ID NO: 32729 - DNA, 25 bp, Probe sequence
gacttgatgaacaactacatacacc

SEQ ID NO: 32730 - DNA, 25 bp, Probe sequence
ggacttgatgaacaactacatacac

SEQ ID NO: 32731 - DNA, 25 bp, Probe sequence
gttctgtaggtattgcgaataatca

SEQ ID NO: 32732 - DNA, 25 bp, Probe sequence
atgaacaactacatacacctagacg

SEQ ID NO: 32733 - DNA, 25 bp, Probe sequence
cggacttgatgaacaactacataca

SEQ ID NO: 32734 - DNA, 25 bp, Probe sequence
tgatgaacaactacatacacctaga

SEQ ID NO: 32735 - DNA, 25 bp, Probe sequence
gtatgttaggtattggattggttgc

SEQ ID NO: 32736 - DNA, 25 bp, Probe sequence
gcacatagagataatacaattcgcc

SEQ ID NO: 32737 - DNA, 25 bp, Probe sequence
aggaatacttagtcaacagccatat

SEQ ID NO: 32738 - DNA, 25 bp, Probe sequence
ataggaatacttagtcaacagccat

SEQ ID NO: 32739 - DNA, 25 bp, Probe sequence
agtatgttaggtattggattggttg

SEQ ID NO: 32740 - DNA, 25 bp, Probe sequence
cacatagagataatacaattcgcca

SEQ ID NO: 32741 - DNA, 25 bp, Probe sequence
taggaatacttagtcaacagccata

SEQ ID NO: 32742 - DNA, 25 bp, Probe sequence
tataggaatacttagtcaacagcca

SEQ ID NO: 32743 - DNA, 25 bp, Probe sequence
atggttccgctcatcataatcattg

SEQ ID NO: 32744 - DNA, 25 bp, Probe sequence
aagcaatatccaatgactcaagaag

SEQ ID NO: 32745 - DNA, 25 bp, Probe sequence
agcaatatccaatgactcaagaagg

SEQ ID NO: 32746 - DNA, 25 bp, Probe sequence
caatatccaatgactcaagaaggtt

SEQ ID NO: 32747 - DNA, 25 bp, Probe sequence
tagaattaccaggtgatgaagagga

SEQ ID NO: 32748 - DNA, 25 bp, Probe sequence
tgtagaattaccaggtgatgaagag

SEQ ID NO: 32749 - DNA, 25 bp, Probe sequence
gtagaattaccaggtgatgaagagg

SEQ ID NO: 32750 - DNA, 25 bp, Probe sequence
gcaatatccaatgactcaagaaggt

SEQ ID NO: 32751 - DNA, 25 bp, Probe sequence
ttgtagaattaccaggtgatgaaga

SEQ ID NO: 32752 - DNA, 25 bp, Probe sequence
ttagagcgtgaacttgaagaattaa

SEQ ID NO: 32753 - DNA, 25 bp, Probe sequence
atgtcttgctacaatctcaacaatt

SEQ ID NO: 32754 - DNA, 25 bp, Probe sequence
aatgtcttgctacaatctcaacaat

SEQ ID NO: 32755 - DNA, 25 bp, Probe sequence
tgtcttgctacaatctcaacaatta

SEQ ID NO: 32756 - DNA, 25 bp, Probe sequence
gtcttgctacaatctcaacaattat

SEQ ID NO: 32757 - DNA, 25 bp, Probe sequence
acattaattgttgctacacacgatt

SEQ ID NO: 32758 - DNA, 25 bp, Probe sequence
tatagttgttggtgtttgtggaagt

SEQ ID NO: 32759 - DNA, 25 bp, Probe sequence
aatgataagtatgatgcaacgaaca

SEQ ID NO: 32760 - DNA, 25 bp, Probe sequence
gatggtcatacattatctggcggag

SEQ ID NO: 32761 - DNA, 25 bp, Probe sequence
tgataagtatgatgcaacgaacatt

SEQ ID NO: 32762 - DNA, 25 bp, Probe sequence
cgttcaatggactctgttatcaatc

SEQ ID NO: 32763 - DNA, 25 bp, Probe sequence
gttcaatggactctgttatcaatca

SEQ ID NO: 32764 - DNA, 25 bp, Probe sequence
ttcaatggactctgttatcaatcaa

SEQ ID NO: 32765 - DNA, 25 bp, Probe sequence
gcgttcaatggactctgttatcaat

SEQ ID NO: 32766 - DNA, 25 bp, Probe sequence
acaagaagtgacattaccattgatt

SEQ ID NO: 32767 - DNA, 25 bp, Probe sequence
tcaatggactctgttatcaatcaat

SEQ ID NO: 32768 - DNA, 25 bp, Probe sequence
catacaagaagtgacattaccattg

SEQ ID NO: 32769 - DNA, 25 bp, Probe sequence
tacaagaagtgacattaccattgat

SEQ ID NO: 32770 - DNA, 25 bp, Probe sequence
atacaagaagtgacattaccattga

SEQ ID NO: 32771 - DNA, 25 bp, Probe sequence
tatggtgtattagatgcgactcgat

SEQ ID NO: 32772 - DNA, 25 bp, Probe sequence
ttatggtgtattagatgcgactcga

SEQ ID NO: 32773 - DNA, 25 bp, Probe sequence
atttatggtgtattagatgcgactc

SEQ ID NO: 32774 - DNA, 25 bp, Probe sequence
atggtgtattagatgcgactcgatt

SEQ ID NO: 32775 - DNA, 25 bp, Probe sequence
tttatggtgtattagatgcgactcg

SEQ ID NO: 32776 - DNA, 25 bp, Probe sequence
agtttcgttggaagaattggactta

SEQ ID NO: 32777 - DNA, 25 bp, Probe sequence
aaccacgttactgacacattatatt

SEQ ID NO: 32778 - DNA, 25 bp, Probe sequence
ggacgttaatcatgtcatcatagaa

SEQ ID NO: 32779 - DNA, 25 bp, Probe sequence
accacgttactgacacattatatta

SEQ ID NO: 32780 - DNA, 25 bp, Probe sequence
taggtggtcaagaatatggattacg

SEQ ID NO: 32781 - DNA, 25 bp, Probe sequence
gatggatattggtgtggactcatta

SEQ ID NO: 32782 - DNA, 25 bp, Probe sequence
atggatattggtgtggactcattaa

SEQ ID NO: 32783 - DNA, 25 bp, Probe sequence
ttgatgataatggtgaacttgatgt

SEQ ID NO: 32784 - DNA, 25 bp, Probe sequence
agaaggattggatcgtgttgtatta

SEQ ID NO: 32785 - DNA, 25 bp, Probe sequence
gaaggattggatcgtgttgtattag

SEQ ID NO: 32786 - DNA, 25 bp, Probe sequence
aagaaggattggatcgtgttgtatt

SEQ ID NO: 32787 - DNA, 25 bp, Probe sequence
gttgatgataatggtgaacttgatg

SEQ ID NO: 32788 - DNA, 25 bp, Probe sequence
gaagaaggattggatcgtgttgtat

SEQ ID NO: 32789 - DNA, 25 bp, Probe sequence
tccagcagtagtaatgtatgtgaag

SEQ ID NO: 32790 - DNA, 25 bp, Probe sequence
atccagcagtagtaatgtatgtgaa

SEQ ID NO: 32791 - DNA, 25 bp, Probe sequence
ccagcagtagtaatgtatgtgaagg

SEQ ID NO: 32792 - DNA, 25 bp, Probe sequence
cagcagtagtaatgtatgtgaaggc

SEQ ID NO: 32793 - DNA, 25 bp, Probe sequence
gatccagcagtagtaatgtatgtga

SEQ ID NO: 32794 - DNA, 25 bp, Probe sequence
ttaatgtggtaacggaacagtatcg

SEQ ID NO: 32795 - DNA, 25 bp, Probe sequence
ttacgaagattacaatggtacgcac

SEQ ID NO: 32796 - DNA, 25 bp, Probe sequence
agcagtagtaatgtatgtgaaggcg

SEQ ID NO: 32797 - DNA, 25 bp, Probe sequence
tacgaagattacaatggtacgcaca

SEQ ID NO: 32798 - DNA, 25 bp, Probe sequence
cttatattaacagtgcttagtggcg

SEQ ID NO: 32799 - DNA, 25 bp, Probe sequence
tcttatattaacagtgcttagtggc

SEQ ID NO: 32800 - DNA, 25 bp, Probe sequence
aacgcacattgttactaagtcttat

SEQ ID NO: 32801 - DNA, 25 bp, Probe sequence
acgcacattgttactaagtcttata

SEQ ID NO: 32802 - DNA, 25 bp, Probe sequence
gtcttatattaacagtgcttagtgg

SEQ ID NO: 32803 - DNA, 25 bp, Probe sequence
cgcacattgttactaagtcttatat

SEQ ID NO: 32804 - DNA, 25 bp, Probe sequence
taaacgcacattgttactaagtctt

SEQ ID NO: 32805 - DNA, 25 bp, Probe sequence
aaacgcacattgttactaagtctta

SEQ ID NO: 32806 - DNA, 25 bp, Probe sequence
ataaacgcacattgttactaagtct

SEQ ID NO: 32807 - DNA, 25 bp, Probe sequence
gcaattcgcttctatatctgatgac

SEQ ID NO: 32808 - DNA, 25 bp, Probe sequence
aagcaaccaggatatacaacgaatt

SEQ ID NO: 32809 - DNA, 25 bp, Probe sequence
caattcgcttctatatctgatgaca

SEQ ID NO: 32810 - DNA, 25 bp, Probe sequence
ttcgcttctatatctgatgacattc

SEQ ID NO: 32811 - DNA, 25 bp, Probe sequence
tcgcttctatatctgatgacattca

SEQ ID NO: 32812 - DNA, 25 bp, Probe sequence
attcgcttctatatctgatgacatt

SEQ ID NO: 32813 - DNA, 25 bp, Probe sequence
aattcgcttctatatctgatgacat

SEQ ID NO: 32814 - DNA, 25 bp, Probe sequence
tgcaattcgcttctatatctgatga

SEQ ID NO: 32815 - DNA, 25 bp, Probe sequence
gctatagttctatgcaattcgcttc

SEQ ID NO: 32816 - DNA, 25 bp, Probe sequence
aatggtgtattagacggtgttgatc

SEQ ID NO: 32817 - DNA, 25 bp, Probe sequence
tgtattacagacctggttatgttca

SEQ ID NO: 32818 - DNA, 25 bp, Probe sequence
gtgtattacagacctggttatgttc

SEQ ID NO: 32819 - DNA, 25 bp, Probe sequence
ttacatcagcatccagaattatctt

SEQ ID NO: 32820 - DNA, 25 bp, Probe sequence
gtattacagacctggttatgttcaa

SEQ ID NO: 32821 - DNA, 25 bp, Probe sequence
attgaaggtgatgtacgtggattaa

SEQ ID NO: 32822 - DNA, 25 bp, Probe sequence
aattgaaggtgatgtacgtggatta

SEQ ID NO: 32823 - DNA, 25 bp, Probe sequence
aaatggtgtattagacggtgttgat

SEQ ID NO: 32824 - DNA, 25 bp, Probe sequence
cgttatttacatcagcatccagaat

SEQ ID NO: 32825 - DNA, 25 bp, Probe sequence
cgtggtggatattatactgaaggac

SEQ ID NO: 32826 - DNA, 25 bp, Probe sequence
ggatattatactgaaggacctgctg

SEQ ID NO: 32827 - DNA, 25 bp, Probe sequence
tggatattatactgaaggacctgct

SEQ ID NO: 32828 - DNA, 25 bp, Probe sequence
gtggatattatactgaaggacctgc

SEQ ID NO: 32829 - DNA, 25 bp, Probe sequence
gatattatactgaaggacctgctgc

SEQ ID NO: 32830 - DNA, 25 bp, Probe sequence
atattatactgaaggacctgctgct

SEQ ID NO: 32831 - DNA, 25 bp, Probe sequence
caattatgacattcttaggtgtgcc

SEQ ID NO: 32832 - DNA, 25 bp, Probe sequence
attatgacattcttaggtgtgccat

SEQ ID NO: 32833 - DNA, 25 bp, Probe sequence
acaattatgacattcttaggtgtgc

SEQ ID NO: 32834 - DNA, 25 bp, Probe sequence
aagtattacatccgattgactctgc

SEQ ID NO: 32835 - DNA, 25 bp, Probe sequence
aatatgttggcttatggcactggta

SEQ ID NO: 32836 - DNA, 25 bp, Probe sequence
cgttacacttaggagaccagtctat

SEQ ID NO: 32837 - DNA, 25 bp, Probe sequence
gttacacttaggagaccagtctata

SEQ ID NO: 32838 - DNA, 25 bp, Probe sequence
acttattggaaatggttaggtttgc

SEQ ID NO: 32839 - DNA, 25 bp, Probe sequence
tatcgtgtttggtgtaggtatttca

SEQ ID NO: 32840 - DNA, 25 bp, Probe sequence
cttattggaaatggttaggtttgct

SEQ ID NO: 32841 - DNA, 25 bp, Probe sequence
cgattgactctgcatccattactat

SEQ ID NO: 32842 - DNA, 25 bp, Probe sequence
ttgctttaggtgttatgttaatgcc

SEQ ID NO: 32843 - DNA, 25 bp, Probe sequence
tcagatgaagacgatatgattgagc

SEQ ID NO: 32844 - DNA, 25 bp, Probe sequence
gctcaatcagatgaagacgatatga

SEQ ID NO: 32845 - DNA, 25 bp, Probe sequence
tgctcaatcagatgaagacgatatg

SEQ ID NO: 32846 - DNA, 25 bp, Probe sequence
gtgctcaatcagatgaagacgatat

SEQ ID NO: 32847 - DNA, 25 bp, Probe sequence
gaagaaggtgctcaatcagatgaag

SEQ ID NO: 32848 - DNA, 25 bp, Probe sequence
aagaaggtgctcaatcagatgaaga

SEQ ID NO: 32849 - DNA, 25 bp, Probe sequence
cagatgaagacgatatgattgagct

SEQ ID NO: 32850 - DNA, 25 bp, Probe sequence
tgaagacgatatgattgagcttgta

SEQ ID NO: 32851 - DNA, 25 bp, Probe sequence
gatgaagacgatatgattgagcttg

SEQ ID NO: 32852 - DNA, 25 bp, Probe sequence
taatccaataagacagagtgaacgc

SEQ ID NO: 32853 - DNA, 25 bp, Probe sequence
ttaatccaataagacagagtgaacg

SEQ ID NO: 32854 - DNA, 25 bp, Probe sequence
aatccaataagacagagtgaacgct

SEQ ID NO: 32855 - DNA, 25 bp, Probe sequence
atccaataagacagagtgaacgctt

SEQ ID NO: 32856 - DNA, 25 bp, Probe sequence
aatattcatggatggcaatggtctg

SEQ ID NO: 32857 - DNA, 25 bp, Probe sequence
ttacgaaagcggaagagactattta

SEQ ID NO: 32858 - DNA, 25 bp, Probe sequence
attacgaaagcggaagagactattt

SEQ ID NO: 32859 - DNA, 25 bp, Probe sequence
tacgaaagcggaagagactatttac

SEQ ID NO: 32860 - DNA, 25 bp, Probe sequence
cttacttgaggcatagagacgtata

SEQ ID NO: 32861 - DNA, 25 bp, Probe sequence
attagacacactccgaatcaatgaa

SEQ ID NO: 32862 - DNA, 25 bp, Probe sequence
ttagacacactccgaatcaatgaag

SEQ ID NO: 32863 - DNA, 25 bp, Probe sequence
tccttctattgagattgtgatgtgg

SEQ ID NO: 32864 - DNA, 25 bp, Probe sequence
tagacacactccgaatcaatgaaga

SEQ ID NO: 32865 - DNA, 25 bp, Probe sequence
atccttctattgagattgtgatgtg

SEQ ID NO: 32866 - DNA, 25 bp, Probe sequence
gcttatccttctattgagattgtga

SEQ ID NO: 32867 - DNA, 25 bp, Probe sequence
gctgctgaacgatcattattagaag

SEQ ID NO: 32868 - DNA, 25 bp, Probe sequence
agacacactccgaatcaatgaagaa

SEQ ID NO: 32869 - DNA, 25 bp, Probe sequence
acgatcattattagaagcagatgtt

SEQ ID NO: 32870 - DNA, 25 bp, Probe sequence
ggatttatggcagaagtttcacatc

SEQ ID NO: 32871 - DNA, 25 bp, Probe sequence
attggtggatttatggcagaagttt

SEQ ID NO: 32872 - DNA, 25 bp, Probe sequence
ttatggcagaagtttcacatcgtat

SEQ ID NO: 32873 - DNA, 25 bp, Probe sequence
tttatggcagaagtttcacatcgta

SEQ ID NO: 32874 - DNA, 25 bp, Probe sequence
gatttatggcagaagtttcacatcg

SEQ ID NO: 32875 - DNA, 25 bp, Probe sequence
tggatttatggcagaagtttcacat

SEQ ID NO: 32876 - DNA, 25 bp, Probe sequence
gattggtggatttatggcagaagtt

SEQ ID NO: 32877 - DNA, 25 bp, Probe sequence
tatggcagaagtttcacatcgtatg

SEQ ID NO: 32878 - DNA, 25 bp, Probe sequence
agaagtttcacatcgtatgccattt

SEQ ID NO: 32879 - DNA, 25 bp, Probe sequence
ttagatgaacgaggatataatgccg

SEQ ID NO: 32880 - DNA, 25 bp, Probe sequence
attagatgaacgaggatataatgcc

SEQ ID NO: 32881 - DNA, 25 bp, Probe sequence
cgaacattagatgaacgaggatata

SEQ ID NO: 32882 - DNA, 25 bp, Probe sequence
aattcgactatgaagaacttccaac

SEQ ID NO: 32883 - DNA, 25 bp, Probe sequence
ataatgccgtaaaccaaattgtagg

SEQ ID NO: 32884 - DNA, 25 bp, Probe sequence
gaggatataatgccgtaaaccaaat

SEQ ID NO: 32885 - DNA, 25 bp, Probe sequence
cgaggatataatgccgtaaaccaaa

SEQ ID NO: 32886 - DNA, 25 bp, Probe sequence
ggatataatgccgtaaaccaaattg

SEQ ID NO: 32887 - DNA, 25 bp, Probe sequence
aggatataatgccgtaaaccaaatt

SEQ ID NO: 32888 - DNA, 25 bp, Probe sequence
aacgaacaagagtgccaagttattg

SEQ ID NO: 32889 - DNA, 25 bp, Probe sequence
taacgaacaagagtgccaagttatt

SEQ ID NO: 32890 - DNA, 25 bp, Probe sequence
ttaacgaacaagagtgccaagttat

SEQ ID NO: 32891 - DNA, 25 bp, Probe sequence
tgccaagttattgctgatcgttatg

SEQ ID NO: 32892 - DNA, 25 bp, Probe sequence
gtgccaagttattgctgatcgttat

SEQ ID NO: 32893 - DNA, 25 bp, Probe sequence
gaacaagagtgccaagttattgctg

SEQ ID NO: 32894 - DNA, 25 bp, Probe sequence
caagagtgccaagttattgctgatc

SEQ ID NO: 32895 - DNA, 25 bp, Probe sequence
acaagagtgccaagttattgctgat

SEQ ID NO: 32896 - DNA, 25 bp, Probe sequence
aacaagagtgccaagttattgctga

SEQ ID NO: 32897 - DNA, 25 bp, Probe sequence
atgaacgctatcttgaagtatggaa

SEQ ID NO: 32898 - DNA, 25 bp, Probe sequence
aatgaacgctatcttgaagtatgga

SEQ ID NO: 32899 - DNA, 25 bp, Probe sequence
gtcgtattgaagcattaacaggtaa

SEQ ID NO: 32900 - DNA, 25 bp, Probe sequence
agtcgtattattcgcattgaaggta

SEQ ID NO: 32901 - DNA, 25 bp, Probe sequence
tgaacgctatcttgaagtatggaac

SEQ ID NO: 32902 - DNA, 25 bp, Probe sequence
cgtattattcgcattgaaggtaact

SEQ ID NO: 32903 - DNA, 25 bp, Probe sequence
tcgtattattcgcattgaaggtaac

SEQ ID NO: 32904 - DNA, 25 bp, Probe sequence
gtcgtattattcgcattgaaggtaa

SEQ ID NO: 32905 - DNA, 25 bp, Probe sequence
aagtcgtattattcgcattgaaggt

SEQ ID NO: 32906 - DNA, 25 bp, Probe sequence
tatagtcatatcagtgtgagtggtg

SEQ ID NO: 32907 - DNA, 25 bp, Probe sequence
ttatagtcatatcagtgtgagtggt

SEQ ID NO: 32908 - DNA, 25 bp, Probe sequence
atagtcatatcagtgtgagtggtgg

SEQ ID NO: 32909 - DNA, 25 bp, Probe sequence
attatagtcatatcagtgtgagtgg

SEQ ID NO: 32910 - DNA, 25 bp, Probe sequence
tgtatttgttatcccagtaagtgaa

SEQ ID NO: 32911 - DNA, 25 bp, Probe sequence
ttgtatttgttatcccagtaagtga

SEQ ID NO: 32912 - DNA, 25 bp, Probe sequence
atttgttatcccagtaagtgaaact

SEQ ID NO: 32913 - DNA, 25 bp, Probe sequence
tttgtatttgttatcccagtaagtg

SEQ ID NO: 32914 - DNA, 25 bp, Probe sequence
gctgttgaggatttgattacaataa

SEQ ID NO: 32915 - DNA, 25 bp, Probe sequence
tacaagagtcaactggattagaagc

SEQ ID NO: 32916 - DNA, 25 bp, Probe sequence
tgattatccagttgtattagcagcg

SEQ ID NO: 32917 - DNA, 25 bp, Probe sequence
atgattatccagttgtattagcagc

SEQ ID NO: 32918 - DNA, 25 bp, Probe sequence
gtcaacaagatggttcaagcattat

SEQ ID NO: 32919 - DNA, 25 bp, Probe sequence
agtatatcgtcaacaagatggttca

SEQ ID NO: 32920 - DNA, 25 bp, Probe sequence
gtatatcgtcaacaagatggttcaa

SEQ ID NO: 32921 - DNA, 25 bp, Probe sequence
ctacaagagtcaactggattagaag

SEQ ID NO: 32922 - DNA, 25 bp, Probe sequence
tactatggctgatattcaagtgctt

SEQ ID NO: 32923 - DNA, 25 bp, Probe sequence
tatatcgtcaacaagatggttcaag

SEQ ID NO: 32924 - DNA, 25 bp, Probe sequence
acaattatgctaggtggtcaagtta

SEQ ID NO: 32925 - DNA, 25 bp, Probe sequence
caattatgctaggtggtcaagttaa

SEQ ID NO: 32926 - DNA, 25 bp, Probe sequence
gcaatgtcattagccaatcaatcat

SEQ ID NO: 32927 - DNA, 25 bp, Probe sequence
cagcaatgtcattagccaatcaatc

SEQ ID NO: 32928 - DNA, 25 bp, Probe sequence
aacaattatgctaggtggtcaagtt

SEQ ID NO: 32929 - DNA, 25 bp, Probe sequence
agcaatgtcattagccaatcaatca

SEQ ID NO: 32930 - DNA, 25 bp, Probe sequence
aagtacgacaatcatcacatctgaa

SEQ ID NO: 32931 - DNA, 25 bp, Probe sequence
tggttcatctacattggagctaatt

SEQ ID NO: 32932 - DNA, 25 bp, Probe sequence
ctggttcatctacattggagctaat

SEQ ID NO: 32933 - DNA, 25 bp, Probe sequence
aatagaagaagcgttacaagcattg

SEQ ID NO: 32934 - DNA, 25 bp, Probe sequence
tgtaattatatgatcggtatggcgt

SEQ ID NO: 32935 - DNA, 25 bp, Probe sequence
ttaacaatagatccgaagaatggcg

SEQ ID NO: 32936 - DNA, 25 bp, Probe sequence
gtaattatatgatcggtatggcgtt

SEQ ID NO: 32937 - DNA, 25 bp, Probe sequence
ttgtaattatatgatcggtatggcg

SEQ ID NO: 32938 - DNA, 25 bp, Probe sequence
tacttgctgatgcgaatgagattga

SEQ ID NO: 32939 - DNA, 25 bp, Probe sequence
taacaatagatccgaagaatggcgt

SEQ ID NO: 32940 - DNA, 25 bp, Probe sequence
aaatagaagaagcgttacaagcatt

SEQ ID NO: 32941 - DNA, 25 bp, Probe sequence
tcaacaagcattacaaacagagatt

SEQ ID NO: 32942 - DNA, 25 bp, Probe sequence
gcgaagatatagttattgttgctgg

SEQ ID NO: 32943 - DNA, 25 bp, Probe sequence
tgaacagagcaacagcaacatataa

SEQ ID NO: 32944 - DNA, 25 bp, Probe sequence
cgaagatatagttattgttgctgga

SEQ ID NO: 32945 - DNA, 25 bp, Probe sequence
ttgaacagagcaacagcaacatata

SEQ ID NO: 32946 - DNA, 25 bp, Probe sequence
aagtgtaccaagtagtattccaagc

SEQ ID NO: 32947 - DNA, 25 bp, Probe sequence
tagttattgttgctggaagtgtacc

SEQ ID NO: 32948 - DNA, 25 bp, Probe sequence
atagttattgttgctggaagtgtac

SEQ ID NO: 32949 - DNA, 25 bp, Probe sequence
atatagttattgttgctggaagtgt

SEQ ID NO: 32950 - DNA, 25 bp, Probe sequence
caagcgaagatatagttattgttgc

SEQ ID NO: 32951 - DNA, 25 bp, Probe sequence
gcaactgaagattacaacgatgtta

SEQ ID NO: 32952 - DNA, 25 bp, Probe sequence
acgatgttattgaagtgtgtaatca

SEQ ID NO: 32953 - DNA, 25 bp, Probe sequence
tatgtagaacaaggattccatcacg

SEQ ID NO: 32954 - DNA, 25 bp, Probe sequence
acaacgatgttattgaagtgtgtaa

SEQ ID NO: 32955 - DNA, 25 bp, Probe sequence
ttacaacgatgttattgaagtgtgt

SEQ ID NO: 32956 - DNA, 25 bp, Probe sequence
caacgatgttattgaagtgtgtaat

SEQ ID NO: 32957 - DNA, 25 bp, Probe sequence
aacgatgttattgaagtgtgtaatc

SEQ ID NO: 32958 - DNA, 25 bp, Probe sequence
aagaacaaggttatgatgtcattgg

SEQ ID NO: 32959 - DNA, 25 bp, Probe sequence
gtagaacaaggattccatcacgatg

SEQ ID NO: 32960 - DNA, 25 bp, Probe sequence
gttgatgatacaggtgctattgatt

SEQ ID NO: 32961 - DNA, 25 bp, Probe sequence
aacctgaagtagtagatgcgatgat

SEQ ID NO: 32962 - DNA, 25 bp, Probe sequence
cctgaagtagtagatgcgatgatga

SEQ ID NO: 32963 - DNA, 25 bp, Probe sequence
tgttgatgatacaggtgctattgat

SEQ ID NO: 32964 - DNA, 25 bp, Probe sequence
atgttgatgatacaggtgctattga

SEQ ID NO: 32965 - DNA, 25 bp, Probe sequence
gatgttgatgatacaggtgctattg

SEQ ID NO: 32966 - DNA, 25 bp, Probe sequence
agatgttgatgatacaggtgctatt

SEQ ID NO: 32967 - DNA, 25 bp, Probe sequence
acctgaagtagtagatgcgatgatg

SEQ ID NO: 32968 - DNA, 25 bp, Probe sequence
tagatgttgatgatacaggtgctat

SEQ ID NO: 32969 - DNA, 25 bp, Probe sequence
tcttgtaggtggtatgttagcaatt

SEQ ID NO: 32970 - DNA, 25 bp, Probe sequence
gtcttgtaggtggtatgttagcaat

SEQ ID NO: 32971 - DNA, 25 bp, Probe sequence
tcttagcaggttacttaacacaagg

SEQ ID NO: 32972 - DNA, 25 bp, Probe sequence
cttagcaggttacttaacacaaggt

SEQ ID NO: 32973 - DNA, 25 bp, Probe sequence
ttcttagcaggttacttaacacaag

SEQ ID NO: 32974 - DNA, 25 bp, Probe sequence
ttagcaggttacttaacacaaggtg

SEQ ID NO: 32975 - DNA, 25 bp, Probe sequence
aatgtcgtagaagtaccagtagcag

SEQ ID NO: 32976 - DNA, 25 bp, Probe sequence
ggtcttgtaggtggtatgttagcaa

SEQ ID NO: 32977 - DNA, 25 bp, Probe sequence
gtcgtagaagtaccagtagcagatg

SEQ ID NO: 32978 - DNA, 25 bp, Probe sequence
ggtatgcctgaaggagaatatgatt

SEQ ID NO: 32979 - DNA, 25 bp, Probe sequence
aggtatgcctgaaggagaatatgat

SEQ ID NO: 32980 - DNA, 25 bp, Probe sequence
aaggtatgcctgaaggagaatatga

SEQ ID NO: 32981 - DNA, 25 bp, Probe sequence
ctgaaggagaatatgatttgggtgg

SEQ ID NO: 32982 - DNA, 25 bp, Probe sequence
atgcctgaaggagaatatgatttgg

SEQ ID NO: 32983 - DNA, 25 bp, Probe sequence
cctgaaggagaatatgatttgggtg

SEQ ID NO: 32984 - DNA, 25 bp, Probe sequence
aacggcaaagtttatactgaagatg

SEQ ID NO: 32985 - DNA, 25 bp, Probe sequence
tatgcctgaaggagaatatgatttg

SEQ ID NO: 32986 - DNA, 25 bp, Probe sequence
gtatgcctgaaggagaatatgattt

SEQ ID NO: 32987 - DNA, 25 bp, Probe sequence
gatacgataggtggatggttacaat

SEQ ID NO: 32988 - DNA, 25 bp, Probe sequence
attgatacgataggtggatggttac

SEQ ID NO: 32989 - DNA, 25 bp, Probe sequence
tgaggatattgatacgataggtgga

SEQ ID NO: 32990 - DNA, 25 bp, Probe sequence
ctgaggatattgatacgataggtgg

SEQ ID NO: 32991 - DNA, 25 bp, Probe sequence
ggatattgatacgataggtggatgg

SEQ ID NO: 32992 - DNA, 25 bp, Probe sequence
gatattgatacgataggtggatggt

SEQ ID NO: 32993 - DNA, 25 bp, Probe sequence
atacgataggtggatggttacaatc

SEQ ID NO: 32994 - DNA, 25 bp, Probe sequence
ttatagatgaatatggtggaacggc

SEQ ID NO: 32995 - DNA, 25 bp, Probe sequence
aggatattgatacgataggtggatg

SEQ ID NO: 32996 - DNA, 25 bp, Probe sequence
tggtaaagcaaaagaagttgttgaa

SEQ ID NO: 32997 - DNA, 25 bp, Probe sequence
ggtaaagcaaaagaagttgttgaaa

SEQ ID NO: 32998 - DNA, 25 bp, Probe sequence
aaagcaaaagaagttgttgaaaatg

SEQ ID NO: 32999 - DNA, 25 bp, Probe sequence
gtaaagcaaaagaagttgttgaaaa

SEQ ID NO: 33000 - DNA, 25 bp, Probe sequence
caaaagaagttgttgaaaatgctaa

SEQ ID NO: 33001 - DNA, 25 bp, Probe sequence
aatgttaaagaaacagtaggtaacg

SEQ ID NO: 33002 - DNA, 25 bp, Probe sequence
aaagaagttgttgaaaatgctaaaa

SEQ ID NO: 33003 - DNA, 25 bp, Probe sequence
aaaagaagttgttgaaaatgctaaa

SEQ ID NO: 33004 - DNA, 25 bp, Probe sequence
aaagtaagttcgatcaatttaaagg

SEQ ID NO: 33005 - DNA, 25 bp, Probe sequence
gttctaagcgaccaatgttattagg

SEQ ID NO: 33006 - DNA, 25 bp, Probe sequence
ggcaacaagttaatcttaggtattg

SEQ ID NO: 33007 - DNA, 25 bp, Probe sequence
caacaccttctacagatacagctat

SEQ ID NO: 33008 - DNA, 25 bp, Probe sequence
aacaccttctacagatacagctatt

SEQ ID NO: 33009 - DNA, 25 bp, Probe sequence
ttctaagcgaccaatgttattaggt

SEQ ID NO: 33010 - DNA, 25 bp, Probe sequence
ggttctaagcgaccaatgttattag

SEQ ID NO: 33011 - DNA, 25 bp, Probe sequence
tctaagcgaccaatgttattaggta

SEQ ID NO: 33012 - DNA, 25 bp, Probe sequence
ttcattagtattcttaccaggcata

SEQ ID NO: 33013 - DNA, 25 bp, Probe sequence
tatgcaacaccttctacagatacag

SEQ ID NO: 33014 - DNA, 25 bp, Probe sequence
aacacacgcaacatatacaactatt

SEQ ID NO: 33015 - DNA, 25 bp, Probe sequence
attaacacacgcaacatatacaact

SEQ ID NO: 33016 - DNA, 25 bp, Probe sequence
atatgacataatgacggaggacatc

SEQ ID NO: 33017 - DNA, 25 bp, Probe sequence
ttaacacacgcaacatatacaacta

SEQ ID NO: 33018 - DNA, 25 bp, Probe sequence
taacacacgcaacatatacaactat

SEQ ID NO: 33019 - DNA, 25 bp, Probe sequence
tattaacacacgcaacatatacaac

SEQ ID NO: 33020 - DNA, 25 bp, Probe sequence
tatgacataatgacggaggacatca

SEQ ID NO: 33021 - DNA, 25 bp, Probe sequence
aacatcattcctgaattaatcggtg

SEQ ID NO: 33022 - DNA, 25 bp, Probe sequence
ttattaacacacgcaacatatacaa

SEQ ID NO: 33023 - DNA, 25 bp, Probe sequence
cgaagttatggaatgactatcaagg

SEQ ID NO: 33024 - DNA, 25 bp, Probe sequence
tggaatgactatcaaggttatgaga

SEQ ID NO: 33025 - DNA, 25 bp, Probe sequence
caacgaagttatggaatgactatca

SEQ ID NO: 33026 - DNA, 25 bp, Probe sequence
acaacgaagttatggaatgactatc

SEQ ID NO: 33027 - DNA, 25 bp, Probe sequence
tatgataatgaggcttcactaggac

SEQ ID NO: 33028 - DNA, 25 bp, Probe sequence
acgaagttatggaatgactatcaag

SEQ ID NO: 33029 - DNA, 25 bp, Probe sequence
aacaacgaagttatggaatgactat

SEQ ID NO: 33030 - DNA, 25 bp, Probe sequence
ttatgataatgaggcttcactagga

SEQ ID NO: 33031 - DNA, 25 bp, Probe sequence
gaagttatggaatgactatcaaggt

SEQ ID NO: 33032 - DNA, 25 bp, Probe sequence
ggagatatggacttacattgatgat

SEQ ID NO: 33033 - DNA, 25 bp, Probe sequence
caactatggattcgcatgagagatg

SEQ ID NO: 33034 - DNA, 25 bp, Probe sequence
acaactatggattcgcatgagagat

SEQ ID NO: 33035 - DNA, 25 bp, Probe sequence
aacaactatggattcgcatgagaga

SEQ ID NO: 33036 - DNA, 25 bp, Probe sequence
gggagatatggacttacattgatga

SEQ ID NO: 33037 - DNA, 25 bp, Probe sequence
agggagatatggacttacattgatg

SEQ ID NO: 33038 - DNA, 25 bp, Probe sequence
aaagggagatatggacttacattga

SEQ ID NO: 33039 - DNA, 25 bp, Probe sequence
acttacattgatgatttctcttgct

SEQ ID NO: 33040 - DNA, 25 bp, Probe sequence
aagggagatatggacttacattgat

SEQ ID NO: 33041 - DNA, 25 bp, Probe sequence
attattaggcggcatacagttaatt

SEQ ID NO: 33042 - DNA, 25 bp, Probe sequence
ttattattaggcggcatacagttaa

SEQ ID NO: 33043 - DNA, 25 bp, Probe sequence
tattattaggcggcatacagttaat

SEQ ID NO: 33044 - DNA, 25 bp, Probe sequence
ggaagtcattacacaaacacatcaa

SEQ ID NO: 33045 - DNA, 25 bp, Probe sequence
agtcattacacaaacacatcaacaa

SEQ ID NO: 33046 - DNA, 25 bp, Probe sequence
aagtcattacacaaacacatcaaca

SEQ ID NO: 33047 - DNA, 25 bp, Probe sequence
gaagtcattacacaaacacatcaac

SEQ ID NO: 33048 - DNA, 25 bp, Probe sequence
aatccattgcatcacttgaagaata

SEQ ID NO: 33049 - DNA, 25 bp, Probe sequence
aatttgatgatggtgttggtgattt

SEQ ID NO: 33050 - DNA, 25 bp, Probe sequence
aagatattccagttcgtcgcattaa

SEQ ID NO: 33051 - DNA, 25 bp, Probe sequence
aagcattagcaagaacgaatattgg

SEQ ID NO: 33052 - DNA, 25 bp, Probe sequence
cattagcaagaacgaatattggtca

SEQ ID NO: 33053 - DNA, 25 bp, Probe sequence
gaagcattagcaagaacgaatattg

SEQ ID NO: 33054 - DNA, 25 bp, Probe sequence
gcattagcaagaacgaatattggtc

SEQ ID NO: 33055 - DNA, 25 bp, Probe sequence
attagcaagaacgaatattggtcat

SEQ ID NO: 33056 - DNA, 25 bp, Probe sequence
agcattagcaagaacgaatattggt

SEQ ID NO: 33057 - DNA, 25 bp, Probe sequence
gatattccagttcgtcgcattaaag

SEQ ID NO: 33058 - DNA, 25 bp, Probe sequence
aaagatattccagttcgtcgcatta

SEQ ID NO: 33059 - DNA, 25 bp, Probe sequence
gaaggtaggtgattactgtgagaat

SEQ ID NO: 33060 - DNA, 25 bp, Probe sequence
gttgttggtattgataatctgctga

SEQ ID NO: 33061 - DNA, 25 bp, Probe sequence
agttgttggtattgataatctgctg

SEQ ID NO: 33062 - DNA, 25 bp, Probe sequence
aatatcattcacggctatcatcctg

SEQ ID NO: 33063 - DNA, 25 bp, Probe sequence
tatcattcacggctatcatcctgta

SEQ ID NO: 33064 - DNA, 25 bp, Probe sequence
ggtaggtgattactgtgagaataga

SEQ ID NO: 33065 - DNA, 25 bp, Probe sequence
aggtaggtgattactgtgagaatag

SEQ ID NO: 33066 - DNA, 25 bp, Probe sequence
aagttgttggtattgataatctgct

SEQ ID NO: 33067 - DNA, 25 bp, Probe sequence
aaggtaggtgattactgtgagaata

SEQ ID NO: 33068 - DNA, 25 bp, Probe sequence
gcgtttaataaatgtttcctcgttg

SEQ ID NO: 33069 - DNA, 25 bp, Probe sequence
agcgtttaataaatgtttcctcgtt

SEQ ID NO: 33070 - DNA, 25 bp, Probe sequence
tagcgtttaataaatgtttcctcgt

SEQ ID NO: 33071 - DNA, 25 bp, Probe sequence
cgtttaataaatgtttcctcgttga

SEQ ID NO: 33072 - DNA, 25 bp, Probe sequence
atagcgtttaataaatgtttcctcg

SEQ ID NO: 33073 - DNA, 25 bp, Probe sequence
gtttaataaatgtttcctcgttgaa

SEQ ID NO: 33074 - DNA, 25 bp, Probe sequence
aaatgtttcctcgttgaattttggg

SEQ ID NO: 33075 - DNA, 25 bp, Probe sequence
taaatgtttcctcgttgaattttgg

SEQ ID NO: 33076 - DNA, 25 bp, Probe sequence
tgtataaatcagtgaaagaggtaaa

SEQ ID NO: 33077 - DNA, 25 bp, Probe sequence
tgatttaacagataacacatttgaa

SEQ ID NO: 33078 - DNA, 25 bp, Probe sequence
ttgatttaacagataacacatttga

SEQ ID NO: 33079 - DNA, 25 bp, Probe sequence
acttgatttaacagataacacattt

SEQ ID NO: 33080 - DNA, 25 bp, Probe sequence
cttgatttaacagataacacatttg

SEQ ID NO: 33081 - DNA, 25 bp, Probe sequence
ttttcatcgtataacaacatacacg

SEQ ID NO: 33082 - DNA, 25 bp, Probe sequence
attttcatcgtataacaacatacac

SEQ ID NO: 33083 - DNA, 25 bp, Probe sequence
aaagtattttcatcgtataacaaca

SEQ ID NO: 33084 - DNA, 25 bp, Probe sequence
aagtattttcatcgtataacaacat

SEQ ID NO: 33085 - DNA, 25 bp, Probe sequence
cagaggtgtatttgatttaaatgat

SEQ ID NO: 33086 - DNA, 25 bp, Probe sequence
cgtataacaacatacacgataaaat

SEQ ID NO: 33087 - DNA, 25 bp, Probe sequence
tgaatcttctgaggttatgatgact

SEQ ID NO: 33088 - DNA, 25 bp, Probe sequence
gtagcgtctatctcaccagaattat

SEQ ID NO: 33089 - DNA, 25 bp, Probe sequence
tgttgaatcttctgaggttatgatg

SEQ ID NO: 33090 - DNA, 25 bp, Probe sequence
agtagcgtctatctcaccagaatta

SEQ ID NO: 33091 - DNA, 25 bp, Probe sequence
ttgaatcttctgaggttatgatgac

SEQ ID NO: 33092 - DNA, 25 bp, Probe sequence
gttgaatcttctgaggttatgatga

SEQ ID NO: 33093 - DNA, 25 bp, Probe sequence
tagcgtctatctcaccagaattatt

SEQ ID NO: 33094 - DNA, 25 bp, Probe sequence
cagagtggctcaattaaggtgtata

SEQ ID NO: 33095 - DNA, 25 bp, Probe sequence
agagtggctcaattaaggtgtataa

SEQ ID NO: 33096 - DNA, 25 bp, Probe sequence
tagaaattgtgccatcagaatcaga

SEQ ID NO: 33097 - DNA, 25 bp, Probe sequence
atagaaattgtgccatcagaatcag

SEQ ID NO: 33098 - DNA, 25 bp, Probe sequence
aattgtgccatcagaatcagacatg

SEQ ID NO: 33099 - DNA, 25 bp, Probe sequence
aaatgaattagaagtaggagcgttt

SEQ ID NO: 33100 - DNA, 25 bp, Probe sequence
atcagatttcgcacgcttaaagtta

SEQ ID NO: 33101 - DNA, 25 bp, Probe sequence
cgcaagggatatgattaaacaccat

SEQ ID NO: 33102 - DNA, 25 bp, Probe sequence
agaaattgtgccatcagaatcagac

SEQ ID NO: 33103 - DNA, 25 bp, Probe sequence
ccagcaagatttgattgaaatacca

SEQ ID NO: 33104 - DNA, 25 bp, Probe sequence
accagcaagatttgattgaaatacc

SEQ ID NO: 33105 - DNA, 25 bp, Probe sequence
attagaattgctagatggtccaagt

SEQ ID NO: 33106 - DNA, 25 bp, Probe sequence
ttagaattgctagatggtccaagtg

SEQ ID NO: 33107 - DNA, 25 bp, Probe sequence
ttgaagatcctaacttagttcgtgg

SEQ ID NO: 33108 - DNA, 25 bp, Probe sequence
cctaacttagttcgtggattggatt

SEQ ID NO: 33109 - DNA, 25 bp, Probe sequence
tagaattgctagatggtccaagtga

SEQ ID NO: 33110 - DNA, 25 bp, Probe sequence
ctaactatgatggtgccattacaac

SEQ ID NO: 33111 - DNA, 25 bp, Probe sequence
agttcgtggattggattattataca

SEQ ID NO: 33112 - DNA, 25 bp, Probe sequence
cctaactatgatggtgccattacaa

SEQ ID NO: 33113 - DNA, 25 bp, Probe sequence
attgaagatcctaacttagttcgtg

SEQ ID NO: 33114 - DNA, 25 bp, Probe sequence
atcggtacaatcgcaagttatcatt

SEQ ID NO: 33115 - DNA, 25 bp, Probe sequence
aatcggtacaatcgcaagttatcat

SEQ ID NO: 33116 - DNA, 25 bp, Probe sequence
ttacaagatggcgatgaaataaagc

SEQ ID NO: 33117 - DNA, 25 bp, Probe sequence
gagagattatacagctcgtcatcat

SEQ ID NO: 33118 - DNA, 25 bp, Probe sequence
aagagagattatacagctcgtcatc

SEQ ID NO: 33119 - DNA, 25 bp, Probe sequence
agagagattatacagctcgtcatca

SEQ ID NO: 33120 - DNA, 25 bp, Probe sequence
gaacattacaagatggcgatgaaat

SEQ ID NO: 33121 - DNA, 25 bp, Probe sequence
aagaatgaagcaactttggaaatga

SEQ ID NO: 33122 - DNA, 25 bp, Probe sequence
gaatgaagcaactttggaaatgact

SEQ ID NO: 33123 - DNA, 25 bp, Probe sequence
taagatgacaagaacagacgataca

SEQ ID NO: 33124 - DNA, 25 bp, Probe sequence
aagatgacaagaacagacgatacat

SEQ ID NO: 33125 - DNA, 25 bp, Probe sequence
agatgacaagaacagacgatacata

SEQ ID NO: 33126 - DNA, 25 bp, Probe sequence
gattgaagttgaagatacatccagt

SEQ ID NO: 33127 - DNA, 25 bp, Probe sequence
ttaagatgacaagaacagacgatac

SEQ ID NO: 33128 - DNA, 25 bp, Probe sequence
gatgacaagaacagacgatacatat

SEQ ID NO: 33129 - DNA, 25 bp, Probe sequence
gttaagatgacaagaacagacgata

SEQ ID NO: 33130 - DNA, 25 bp, Probe sequence
tgaatagcaatagtgaagatagtgg

SEQ ID NO: 33131 - DNA, 25 bp, Probe sequence
ttgaagttgaagatacatccagtaa

SEQ ID NO: 33132 - DNA, 25 bp, Probe sequence
cgttcctattatatgccaatgttgt

SEQ ID NO: 33133 - DNA, 25 bp, Probe sequence
ggtcataatcaagtagttccattca

SEQ ID NO: 33134 - DNA, 25 bp, Probe sequence
ttgcgttcttcttattaaccgtaat

SEQ ID NO: 33135 - DNA, 25 bp, Probe sequence
tgactaaccactatccattcacatt

SEQ ID NO: 33136 - DNA, 25 bp, Probe sequence
ttgactaaccactatccattcacat

SEQ ID NO: 33137 - DNA, 25 bp, Probe sequence
aataatgaatatgctggtcaagtcg

SEQ ID NO: 33138 - DNA, 25 bp, Probe sequence
ttcctattatatgccaatgttgtgt

SEQ ID NO: 33139 - DNA, 25 bp, Probe sequence
accactatccattcacattagatga

SEQ ID NO: 33140 - DNA, 25 bp, Probe sequence
aaccactatccattcacattagatg

SEQ ID NO: 33141 - DNA, 25 bp, Probe sequence
attgtttattagtcggtatcggtca

SEQ ID NO: 33142 - DNA, 25 bp, Probe sequence
ttgtttattagtcggtatcggtcag

SEQ ID NO: 33143 - DNA, 25 bp, Probe sequence
tacaaagagttaaagaagcatcggt

SEQ ID NO: 33144 - DNA, 25 bp, Probe sequence
ccgtccaggtttctcaaattctaaa

SEQ ID NO: 33145 - DNA, 25 bp, Probe sequence
gtacaaagagttaaagaagcatcgg

SEQ ID NO: 33146 - DNA, 25 bp, Probe sequence
aaagagttaaagaagcatcggtgac

SEQ ID NO: 33147 - DNA, 25 bp, Probe sequence
caaagagttaaagaagcatcggtga

SEQ ID NO: 33148 - DNA, 25 bp, Probe sequence
attatttatgaaagtcaggacggca

SEQ ID NO: 33149 - DNA, 25 bp, Probe sequence
tattgtttattagtcggtatcggtc

SEQ ID NO: 33150 - DNA, 25 bp, Probe sequence
gtaagttagcgtcatatcctggtaa

SEQ ID NO: 33151 - DNA, 25 bp, Probe sequence
cctcggtatctattacacaacttct

SEQ ID NO: 33152 - DNA, 25 bp, Probe sequence
ttcaagattaggtaagcaagtgttc

SEQ ID NO: 33153 - DNA, 25 bp, Probe sequence
atagaacaagcggaagtaagaatgg

SEQ ID NO: 33154 - DNA, 25 bp, Probe sequence
catagaacaagcggaagtaagaatg

SEQ ID NO: 33155 - DNA, 25 bp, Probe sequence
tataaggaagaacttgcttggatga

SEQ ID NO: 33156 - DNA, 25 bp, Probe sequence
tcaagattaggtaagcaagtgttcg

SEQ ID NO: 33157 - DNA, 25 bp, Probe sequence
aacagaggtaagttagcgtcatatc

SEQ ID NO: 33158 - DNA, 25 bp, Probe sequence
acctcggtatctattacacaacttc

SEQ ID NO: 33159 - DNA, 25 bp, Probe sequence
agtaggtaataagatgattggtgcc

SEQ ID NO: 33160 - DNA, 25 bp, Probe sequence
tgaacaacgaatatccatatagtgc

SEQ ID NO: 33161 - DNA, 25 bp, Probe sequence
gtaggtaataagatgattggtgcca

SEQ ID NO: 33162 - DNA, 25 bp, Probe sequence
gagtgatgttattgagttgccatat

SEQ ID NO: 33163 - DNA, 25 bp, Probe sequence
cggctcttcgttatattgataatgt

SEQ ID NO: 33164 - DNA, 25 bp, Probe sequence
aagtaggtaataagatgattggtgc

SEQ ID NO: 33165 - DNA, 25 bp, Probe sequence
cgagtgatgttattgagttgccata

SEQ ID NO: 33166 - DNA, 25 bp, Probe sequence
tgtcagcagatgaatatgagtatgt

SEQ ID NO: 33167 - DNA, 25 bp, Probe sequence
gtcagcagatgaatatgagtatgtt

SEQ ID NO: 33168 - DNA, 25 bp, Probe sequence
tggtggaggtaagtctatatgctat

SEQ ID NO: 33169 - DNA, 25 bp, Probe sequence
ggtggaggtaagtctatatgctatc

SEQ ID NO: 33170 - DNA, 25 bp, Probe sequence
ctggtggaggtaagtctatatgcta

SEQ ID NO: 33171 - DNA, 25 bp, Probe sequence
gtggaggtaagtctatatgctatca

SEQ ID NO: 33172 - DNA, 25 bp, Probe sequence
gtattagaccatcgtaatgtgcttg

SEQ ID NO: 33173 - DNA, 25 bp, Probe sequence
agtattagaccatcgtaatgtgctt

SEQ ID NO: 33174 - DNA, 25 bp, Probe sequence
aagtattagaccatcgtaatgtgct

SEQ ID NO: 33175 - DNA, 25 bp, Probe sequence
caactggtggaggtaagtctatatg

SEQ ID NO: 33176 - DNA, 25 bp, Probe sequence
gaagtagaagtattcacaacaccat

SEQ ID NO: 33177 - DNA, 25 bp, Probe sequence
attacctcgtgaagtcattcgttat

SEQ ID NO: 33178 - DNA, 25 bp, Probe sequence
aattacctcgtgaagtcattcgtta

SEQ ID NO: 33179 - DNA, 25 bp, Probe sequence
ttacctcgtgaagtcattcgttatg

SEQ ID NO: 33180 - DNA, 25 bp, Probe sequence
acaattatggataatggtgaagcat

SEQ ID NO: 33181 - DNA, 25 bp, Probe sequence
tacaattatggataatggtgaagca

SEQ ID NO: 33182 - DNA, 25 bp, Probe sequence
cattcgttatgagtatgacctagaa

SEQ ID NO: 33183 - DNA, 25 bp, Probe sequence
ctacaattatggataatggtgaagc

SEQ ID NO: 33184 - DNA, 25 bp, Probe sequence
agagatgttgatatcgttgtaggac

SEQ ID NO: 33185 - DNA, 25 bp, Probe sequence
cagagatgttgatatcgttgtagga

SEQ ID NO: 33186 - DNA, 25 bp, Probe sequence
aacgaatggaatggtaatcaatcac

SEQ ID NO: 33187 - DNA, 25 bp, Probe sequence
caacgaatggaatggtaatcaatca

SEQ ID NO: 33188 - DNA, 25 bp, Probe sequence
tcaacgaatggaatggtaatcaatc

SEQ ID NO: 33189 - DNA, 25 bp, Probe sequence
tagcaactatcacagaagaagcaat

SEQ ID NO: 33190 - DNA, 25 bp, Probe sequence
aatcaacgaatggaatggtaatcaa

SEQ ID NO: 33191 - DNA, 25 bp, Probe sequence
atcaacgaatggaatggtaatcaat

SEQ ID NO: 33192 - DNA, 25 bp, Probe sequence
gtagcaactatcacagaagaagcaa

SEQ ID NO: 33193 - DNA, 25 bp, Probe sequence
attggacctagacttaatgctgtag

SEQ ID NO: 33194 - DNA, 25 bp, Probe sequence
aaggtgtcttaggtattgttgcttc

SEQ ID NO: 33195 - DNA, 25 bp, Probe sequence
ttacacatgatattcaagaggcgat

SEQ ID NO: 33196 - DNA, 25 bp, Probe sequence
tacacatgatattcaagaggcgatg

SEQ ID NO: 33197 - DNA, 25 bp, Probe sequence
gttacacatgatattcaagaggcga

SEQ ID NO: 33198 - DNA, 25 bp, Probe sequence
ttgttacacatgatattcaagaggc

SEQ ID NO: 33199 - DNA, 25 bp, Probe sequence
tgttacacatgatattcaagaggcg

SEQ ID NO: 33200 - DNA, 25 bp, Probe sequence
attgaacaaattgacacaccagaag

SEQ ID NO: 33201 - DNA, 25 bp, Probe sequence
gcgatgaaacttggtgataagattt

SEQ ID NO: 33202 - DNA, 25 bp, Probe sequence
tattgaacaaattgacacaccagaa

SEQ ID NO: 33203 - DNA, 25 bp, Probe sequence
atattgaacaaattgacacaccaga

SEQ ID NO: 33204 - DNA, 25 bp, Probe sequence
ataatgtgaaggttatggcaattcg

SEQ ID NO: 33205 - DNA, 25 bp, Probe sequence
taatgtgaaggttatggcaattcgc

SEQ ID NO: 33206 - DNA, 25 bp, Probe sequence
ggatggttatttattgcgttgttct

SEQ ID NO: 33207 - DNA, 25 bp, Probe sequence
tggatggttatttattgcgttgttc

SEQ ID NO: 33208 - DNA, 25 bp, Probe sequence
aaggttatggcaattcgcttcaatg

SEQ ID NO: 33209 - DNA, 25 bp, Probe sequence
gtggatggttatttattgcgttgtt

SEQ ID NO: 33210 - DNA, 25 bp, Probe sequence
tataatgtgaaggttatggcaattc

SEQ ID NO: 33211 - DNA, 25 bp, Probe sequence
ggttatggcaattcgcttcaatgaa

SEQ ID NO: 33212 - DNA, 25 bp, Probe sequence
aggttatggcaattcgcttcaatga

SEQ ID NO: 33213 - DNA, 25 bp, Probe sequence
accttattagagcaacaatcacaga

SEQ ID NO: 33214 - DNA, 25 bp, Probe sequence
ttattagagcaacaatcacagaacg

SEQ ID NO: 33215 - DNA, 25 bp, Probe sequence
tcaacaacatcagccagaattagta

SEQ ID NO: 33216 - DNA, 25 bp, Probe sequence
ccttattagagcaacaatcacagaa

SEQ ID NO: 33217 - DNA, 25 bp, Probe sequence
caacaacatcagccagaattagtaa

SEQ ID NO: 33218 - DNA, 25 bp, Probe sequence
tatcactaattcaacaacatcagcc

SEQ ID NO: 33219 - DNA, 25 bp, Probe sequence
tattagagcaacaatcacagaacgg

SEQ ID NO: 33220 - DNA, 25 bp, Probe sequence
aatgtcgccaagtgattattgtaag

SEQ ID NO: 33221 - DNA, 25 bp, Probe sequence
atcactaattcaacaacatcagcca

SEQ ID NO: 33222 - DNA, 25 bp, Probe sequence
ggtgtaagaacggctatggtattaa

SEQ ID NO: 33223 - DNA, 25 bp, Probe sequence
caccatatcaaggagcaccattatt

SEQ ID NO: 33224 - DNA, 25 bp, Probe sequence
tggtgtaagaacggctatggtatta

SEQ ID NO: 33225 - DNA, 25 bp, Probe sequence
cgtacaatggaacctaagttgagat

SEQ ID NO: 33226 - DNA, 25 bp, Probe sequence
cctgttataatggctggtgtaagaa

SEQ ID NO: 33227 - DNA, 25 bp, Probe sequence
ctgttataatggctggtgtaagaac

SEQ ID NO: 33228 - DNA, 25 bp, Probe sequence
ctggtgtaagaacggctatggtatt

SEQ ID NO: 33229 - DNA, 25 bp, Probe sequence
ccaccatatcaaggagcaccattat

SEQ ID NO: 33230 - DNA, 25 bp, Probe sequence
gtgtaagaacggctatggtattaat

SEQ ID NO: 33231 - DNA, 25 bp, Probe sequence
ctatactattcttcggtgctcctac

SEQ ID NO: 33232 - DNA, 25 bp, Probe sequence
tattaggtgtaggtatggctgtaga

SEQ ID NO: 33233 - DNA, 25 bp, Probe sequence
gtattaggtgtaggtatggctgtag

SEQ ID NO: 33234 - DNA, 25 bp, Probe sequence
attaggtgtaggtatggctgtagat

SEQ ID NO: 33235 - DNA, 25 bp, Probe sequence
tctggtgtattctcttcaatcttca

SEQ ID NO: 33236 - DNA, 25 bp, Probe sequence
cagcagtattattcttcttcggtga

SEQ ID NO: 33237 - DNA, 25 bp, Probe sequence
tgtatgagcgtattaaggatgaact

SEQ ID NO: 33238 - DNA, 25 bp, Probe sequence
ggtattaggtgtaggtatggctgta

SEQ ID NO: 33239 - DNA, 25 bp, Probe sequence
agcagtattattcttcttcggtgaa

SEQ ID NO: 33240 - DNA, 25 bp, Probe sequence
taatcaactatcagcatatcagcct

SEQ ID NO: 33241 - DNA, 25 bp, Probe sequence
cgtcattggtatggttatgtaatcc

SEQ ID NO: 33242 - DNA, 25 bp, Probe sequence
ttaatcaactatcagcatatcagcc

SEQ ID NO: 33243 - DNA, 25 bp, Probe sequence
agaacaacttaatcaactatcagca

SEQ ID NO: 33244 - DNA, 25 bp, Probe sequence
aatcaactatcagcatatcagcctg

SEQ ID NO: 33245 - DNA, 25 bp, Probe sequence
attcggtcaatattatcacaatgcg

SEQ ID NO: 33246 - DNA, 25 bp, Probe sequence
cggtcaatattatcacaatgcgatt

SEQ ID NO: 33247 - DNA, 25 bp, Probe sequence
cttaatcaactatcagcatatcagc

SEQ ID NO: 33248 - DNA, 25 bp, Probe sequence
gaacaacttaatcaactatcagcat

SEQ ID NO: 33249 - DNA, 25 bp, Probe sequence
cagcatcgtgagttgattaataaca

SEQ ID NO: 33250 - DNA, 25 bp, Probe sequence
acagcatcgtgagttgattaataac

SEQ ID NO: 33251 - DNA, 25 bp, Probe sequence
aacagcatcgtgagttgattaataa

SEQ ID NO: 33252 - DNA, 25 bp, Probe sequence
agcatcgtgagttgattaataacat

SEQ ID NO: 33253 - DNA, 25 bp, Probe sequence
aatggtcatggtactgaattaactt

SEQ ID NO: 33254 - DNA, 25 bp, Probe sequence
tttgcggttatgtatttcttgatga

SEQ ID NO: 33255 - DNA, 25 bp, Probe sequence
gcatcgtgagttgattaataacatt

SEQ ID NO: 33256 - DNA, 25 bp, Probe sequence
ttgcggttatgtatttcttgatgat

SEQ ID NO: 33257 - DNA, 25 bp, Probe sequence
ctgctattaaacaagttgacccttc

SEQ ID NO: 33258 - DNA, 25 bp, Probe sequence
cgattgatatggatgaagtattggc

SEQ ID NO: 33259 - DNA, 25 bp, Probe sequence
gcgattgatatggatgaagtattgg

SEQ ID NO: 33260 - DNA, 25 bp, Probe sequence
ttgatatggatgaagtattggcaga

SEQ ID NO: 33261 - DNA, 25 bp, Probe sequence
tgatatggatgaagtattggcagat

SEQ ID NO: 33262 - DNA, 25 bp, Probe sequence
attgatatggatgaagtattggcag

SEQ ID NO: 33263 - DNA, 25 bp, Probe sequence
gattgatatggatgaagtattggca

SEQ ID NO: 33264 - DNA, 25 bp, Probe sequence
gatatggatgaagtattggcagata

SEQ ID NO: 33265 - DNA, 25 bp, Probe sequence
tggatgaagtattggcagatacatt

SEQ ID NO: 33266 - DNA, 25 bp, Probe sequence
atggatgaagtattggcagatacat

SEQ ID NO: 33267 - DNA, 25 bp, Probe sequence
ttatacaaggtggcgaatatgaaga

SEQ ID NO: 33268 - DNA, 25 bp, Probe sequence
tatacaaggtggcgaatatgaagat

SEQ ID NO: 33269 - DNA, 25 bp, Probe sequence
atacaaggtggcgaatatgaagatt

SEQ ID NO: 33270 - DNA, 25 bp, Probe sequence
taagaccgttagatgagaattgtga

SEQ ID NO: 33271 - DNA, 25 bp, Probe sequence
attatacaaggtggcgaatatgaag

SEQ ID NO: 33272 - DNA, 25 bp, Probe sequence
aagaccgttagatgagaattgtgac

SEQ ID NO: 33273 - DNA, 25 bp, Probe sequence
cattatacaaggtggcgaatatgaa

SEQ ID NO: 33274 - DNA, 25 bp, Probe sequence
aacaatgagtccagaagagttaaga

SEQ ID NO: 33275 - DNA, 25 bp, Probe sequence
gatgcctgctgaatatgattatgta

SEQ ID NO: 33276 - DNA, 25 bp, Probe sequence
gatacattagtgcttaacgatacgc

SEQ ID NO: 33277 - DNA, 25 bp, Probe sequence
tggtgatacattagtgcttaacgat

SEQ ID NO: 33278 - DNA, 25 bp, Probe sequence
ctggtgatacattagtgcttaacga

SEQ ID NO: 33279 - DNA, 25 bp, Probe sequence
gacctggtgatacattagtgcttaa

SEQ ID NO: 33280 - DNA, 25 bp, Probe sequence
tgatacattagtgcttaacgatacg

SEQ ID NO: 33281 - DNA, 25 bp, Probe sequence
acctggtgatacattagtgcttaac

SEQ ID NO: 33282 - DNA, 25 bp, Probe sequence
ggtgatacattagtgcttaacgata

SEQ ID NO: 33283 - DNA, 25 bp, Probe sequence
agacctggtgatacattagtgctta

SEQ ID NO: 33284 - DNA, 25 bp, Probe sequence
tagacctggtgatacattagtgctt

SEQ ID NO: 33285 - DNA, 25 bp, Probe sequence
ttatcgttactggcactattggatt

SEQ ID NO: 33286 - DNA, 25 bp, Probe sequence
attatcgttactggcactattggat

SEQ ID NO: 33287 - DNA, 25 bp, Probe sequence
tattatcgttactggcactattgga

SEQ ID NO: 33288 - DNA, 25 bp, Probe sequence
ttattatcgttactggcactattgg

SEQ ID NO: 33289 - DNA, 25 bp, Probe sequence
aatcatcaatacatcagaggtgtgg

SEQ ID NO: 33290 - DNA, 25 bp, Probe sequence
taatcatcaatacatcagaggtgtg

SEQ ID NO: 33291 - DNA, 25 bp, Probe sequence
gttaatcatcaatacatcagaggtg

SEQ ID NO: 33292 - DNA, 25 bp, Probe sequence
agttaatcatcaatacatcagaggt

SEQ ID NO: 33293 - DNA, 25 bp, Probe sequence
tatcgttactggcactattggattt

SEQ ID NO: 33294 - DNA, 25 bp, Probe sequence
cttagacctacgagattacgacaat

SEQ ID NO: 33295 - DNA, 25 bp, Probe sequence
ttagacctacgagattacgacaata

SEQ ID NO: 33296 - DNA, 25 bp, Probe sequence
agacctacgagattacgacaatata

SEQ ID NO: 33297 - DNA, 25 bp, Probe sequence
tagacctacgagattacgacaatat

SEQ ID NO: 33298 - DNA, 25 bp, Probe sequence
agactgagtagtgttgttgaagaag

SEQ ID NO: 33299 - DNA, 25 bp, Probe sequence
gactgagtagtgttgttgaagaagt

SEQ ID NO: 33300 - DNA, 25 bp, Probe sequence
actgagtagtgttgttgaagaagtg

SEQ ID NO: 33301 - DNA, 25 bp, Probe sequence
cagactgagtagtgttgttgaagaa

SEQ ID NO: 33302 - DNA, 25 bp, Probe sequence
ttccagcaagtgaatgaagatgaac

SEQ ID NO: 33303 - DNA, 25 bp, Probe sequence
aattggttatgagtcagaagaagca

SEQ ID NO: 33304 - DNA, 25 bp, Probe sequence
attggttatgagtcagaagaagcaa

SEQ ID NO: 33305 - DNA, 25 bp, Probe sequence
aattacattcagttggtcttggtgt

SEQ ID NO: 33306 - DNA, 25 bp, Probe sequence
ttacctattgctaagtcacttgaag

SEQ ID NO: 33307 - DNA, 25 bp, Probe sequence
gagattcagttcactctggtatgga

SEQ ID NO: 33308 - DNA, 25 bp, Probe sequence
tacctattgctaagtcacttgaagg

SEQ ID NO: 33309 - DNA, 25 bp, Probe sequence
gaattacattcagttggtcttggtg

SEQ ID NO: 33310 - DNA, 25 bp, Probe sequence
ttatagtgaagcggatctaattgaa

SEQ ID NO: 33311 - DNA, 25 bp, Probe sequence
tcttattagaagtggatgacagctt

SEQ ID NO: 33312 - DNA, 25 bp, Probe sequence
tgttagcgttagaagcattaggtta

SEQ ID NO: 33313 - DNA, 25 bp, Probe sequence
caagaagcaatgttagcgttagaag

SEQ ID NO: 33314 - DNA, 25 bp, Probe sequence
cgattcattattacaagtagacgct

SEQ ID NO: 33315 - DNA, 25 bp, Probe sequence
agcgattcattattacaagtagacg

SEQ ID NO: 33316 - DNA, 25 bp, Probe sequence
gttagcgttagaagcattaggttat

SEQ ID NO: 33317 - DNA, 25 bp, Probe sequence
atgttagcgttagaagcattaggtt

SEQ ID NO: 33318 - DNA, 25 bp, Probe sequence
tgttaaggcaggtcttcaattagtt

SEQ ID NO: 33319 - DNA, 25 bp, Probe sequence
gttaaggcaggtcttcaattagttg

SEQ ID NO: 33320 - DNA, 25 bp, Probe sequence
aaggcaggtcttcaattagttgtat

SEQ ID NO: 33321 - DNA, 25 bp, Probe sequence
tgagaatgccttagatacaacaact

SEQ ID NO: 33322 - DNA, 25 bp, Probe sequence
gaacacacaagaagatatgacgaat

SEQ ID NO: 33323 - DNA, 25 bp, Probe sequence
ggaacacacaagaagatatgacgaa

SEQ ID NO: 33324 - DNA, 25 bp, Probe sequence
ttgagaatgccttagatacaacaac

SEQ ID NO: 33325 - DNA, 25 bp, Probe sequence
attggaacacacaagaagatatgac

SEQ ID NO: 33326 - DNA, 25 bp, Probe sequence
gtagaagcattacaagatgatgact

SEQ ID NO: 33327 - DNA, 25 bp, Probe sequence
gagaatgccttagatacaacaacta

SEQ ID NO: 33328 - DNA, 25 bp, Probe sequence
ttaacaggcttagatacacatcaag

SEQ ID NO: 33329 - DNA, 25 bp, Probe sequence
aacacacaagaagatatgacgaata

SEQ ID NO: 33330 - DNA, 25 bp, Probe sequence
aattagagaagatgtcttgcctgaa

SEQ ID NO: 33331 - DNA, 25 bp, Probe sequence
ttagagaagatgtcttgcctgaatc

SEQ ID NO: 33332 - DNA, 25 bp, Probe sequence
attagagaagatgtcttgcctgaat

SEQ ID NO: 33333 - DNA, 25 bp, Probe sequence
taattagagaagatgtcttgcctga

SEQ ID NO: 33334 - DNA, 25 bp, Probe sequence
tagagaagatgtcttgcctgaatcc

SEQ ID NO: 33335 - DNA, 25 bp, Probe sequence
aagcaacaataacattatcactgaa

SEQ ID NO: 33336 - DNA, 25 bp, Probe sequence
ttaattagagaagatgtcttgcctg

SEQ ID NO: 33337 - DNA, 25 bp, Probe sequence
agcaacaataacattatcactgaat

SEQ ID NO: 33338 - DNA, 25 bp, Probe sequence
cattgtccatttatgatgccgttaa

SEQ ID NO: 33339 - DNA, 25 bp, Probe sequence
ctatttatattggcagtagttggcg

SEQ ID NO: 33340 - DNA, 25 bp, Probe sequence
gctatttatattggcagtagttggc

SEQ ID NO: 33341 - DNA, 25 bp, Probe sequence
tatttatattggcagtagttggcgg

SEQ ID NO: 33342 - DNA, 25 bp, Probe sequence
atttatattggcagtagttggcggg

SEQ ID NO: 33343 - DNA, 25 bp, Probe sequence
aggcggaaagtcagctaacaatatt

SEQ ID NO: 33344 - DNA, 25 bp, Probe sequence
tgctatttatattggcagtagttgg

SEQ ID NO: 33345 - DNA, 25 bp, Probe sequence
caggcggaaagtcagctaacaatat

SEQ ID NO: 33346 - DNA, 25 bp, Probe sequence
gtacaatgctatttatattggcagt

SEQ ID NO: 33347 - DNA, 25 bp, Probe sequence
atgctatttatattggcagtagttg

SEQ ID NO: 33348 - DNA, 25 bp, Probe sequence
atgtggtaagtggtaatgctattga

SEQ ID NO: 33349 - DNA, 25 bp, Probe sequence
tgtggtaagtggtaatgctattgaa

SEQ ID NO: 33350 - DNA, 25 bp, Probe sequence
gatgatgatggtgcttatgtggtaa

SEQ ID NO: 33351 - DNA, 25 bp, Probe sequence
aaccaggtgaggaattagatgtatc

SEQ ID NO: 33352 - DNA, 25 bp, Probe sequence
gaaccaggtgaggaattagatgtat

SEQ ID NO: 33353 - DNA, 25 bp, Probe sequence
tatgtggtaagtggtaatgctattg

SEQ ID NO: 33354 - DNA, 25 bp, Probe sequence
aagagatgatgatggtgcttatgtg

SEQ ID NO: 33355 - DNA, 25 bp, Probe sequence
caagagatgatgatggtgcttatgt

SEQ ID NO: 33356 - DNA, 25 bp, Probe sequence
tgaaccaggtgaggaattagatgta

SEQ ID NO: 33357 - DNA, 25 bp, Probe sequence
tgaaaggctattgaaattatggtca

SEQ ID NO: 33358 - DNA, 25 bp, Probe sequence
ttgaaaggctattgaaattatggtc

SEQ ID NO: 33359 - DNA, 25 bp, Probe sequence
tttgaaaggctattgaaattatggt

SEQ ID NO: 33360 - DNA, 25 bp, Probe sequence
ttgacactaaattatttgaaaggct

SEQ ID NO: 33361 - DNA, 25 bp, Probe sequence
tgacactaaattatttgaaaggcta

SEQ ID NO: 33362 - DNA, 25 bp, Probe sequence
attgacactaaattatttgaaaggc

SEQ ID NO: 33363 - DNA, 25 bp, Probe sequence
atttgaaaggctattgaaattatgg

SEQ ID NO: 33364 - DNA, 25 bp, Probe sequence
agtaaacaaaatacacattccgaaa

SEQ ID NO: 33365 - DNA, 25 bp, Probe sequence
aagtaaacaaaatacacattccgaa

SEQ ID NO: 33366 - DNA, 25 bp, Probe sequence
tcaattcgtaacaggtggttcaatt

SEQ ID NO: 33367 - DNA, 25 bp, Probe sequence
gtcaattcgtaacaggtggttcaat

SEQ ID NO: 33368 - DNA, 25 bp, Probe sequence
caattcgtaacaggtggttcaattt

SEQ ID NO: 33369 - DNA, 25 bp, Probe sequence
ggtcaattcgtaacaggtggttcaa

SEQ ID NO: 33370 - DNA, 25 bp, Probe sequence
ttctgtatatgcagtagctgaataa

SEQ ID NO: 33371 - DNA, 25 bp, Probe sequence
acaagtttctgtatatgcagtagct

SEQ ID NO: 33372 - DNA, 25 bp, Probe sequence
agtttctgtatatgcagtagctgaa

SEQ ID NO: 33373 - DNA, 25 bp, Probe sequence
aagtttctgtatatgcagtagctga

SEQ ID NO: 33374 - DNA, 25 bp, Probe sequence
caagtttctgtatatgcagtagctg

SEQ ID NO: 33375 - DNA, 25 bp, Probe sequence
tgcgattataggattgacatctgag

SEQ ID NO: 33376 - DNA, 25 bp, Probe sequence
gcgattataggattgacatctgaga

SEQ ID NO: 33377 - DNA, 25 bp, Probe sequence
atgcgattataggattgacatctga

SEQ ID NO: 33378 - DNA, 25 bp, Probe sequence
tataggattgacatctgagagacca

SEQ ID NO: 33379 - DNA, 25 bp, Probe sequence
aatgcgattataggattgacatctg

SEQ ID NO: 33380 - DNA, 25 bp, Probe sequence
tggtagtgttaatgcgattatagga

SEQ ID NO: 33381 - DNA, 25 bp, Probe sequence
ttataggattgacatctgagagacc

SEQ ID NO: 33382 - DNA, 25 bp, Probe sequence
tatcaattatgacgacaatggtggt

SEQ ID NO: 33383 - DNA, 25 bp, Probe sequence
cgattataggattgacatctgagag

SEQ ID NO: 33384 - DNA, 25 bp, Probe sequence
aataggttggattgttgcttctgaa

SEQ ID NO: 33385 - DNA, 25 bp, Probe sequence
taagaataggttggattgttgcttc

SEQ ID NO: 33386 - DNA, 25 bp, Probe sequence
aataagaataggttggattgttgct

SEQ ID NO: 33387 - DNA, 25 bp, Probe sequence
gaataggttggattgttgcttctga

SEQ ID NO: 33388 - DNA, 25 bp, Probe sequence
ataagaataggttggattgttgctt

SEQ ID NO: 33389 - DNA, 25 bp, Probe sequence
tgtctaatacagccagtcatattga

SEQ ID NO: 33390 - DNA, 25 bp, Probe sequence
gtctaatacagccagtcatattgaa

SEQ ID NO: 33391 - DNA, 25 bp, Probe sequence
ctaatacagccagtcatattgaaga

SEQ ID NO: 33392 - DNA, 25 bp, Probe sequence
tctaatacagccagtcatattgaag

SEQ ID NO: 33393 - DNA, 25 bp, Probe sequence
atggtagagatactgagtcattgga

SEQ ID NO: 33394 - DNA, 25 bp, Probe sequence
aagcaatgattcaatatggttcaca

SEQ ID NO: 33395 - DNA, 25 bp, Probe sequence
gcaatatgtacgccaatctcttaat

SEQ ID NO: 33396 - DNA, 25 bp, Probe sequence
agcaatgattcaatatggttcacat

SEQ ID NO: 33397 - DNA, 25 bp, Probe sequence
acgccaatctcttaataatgatgta

SEQ ID NO: 33398 - DNA, 25 bp, Probe sequence
tacgccaatctcttaataatgatgt

SEQ ID NO: 33399 - DNA, 25 bp, Probe sequence
catggtagagatactgagtcattgg

SEQ ID NO: 33400 - DNA, 25 bp, Probe sequence
acatggtagagatactgagtcattg

SEQ ID NO: 33401 - DNA, 25 bp, Probe sequence
cgaagagttgaactacattgaacag

SEQ ID NO: 33402 - DNA, 25 bp, Probe sequence
tgttattcgcactaatcctattcca

SEQ ID NO: 33403 - DNA, 25 bp, Probe sequence
gttattcgcactaatcctattccaa

SEQ ID NO: 33404 - DNA, 25 bp, Probe sequence
ttattcgcactaatcctattccaag

SEQ ID NO: 33405 - DNA, 25 bp, Probe sequence
tggtgttattcgcactaatcctatt

SEQ ID NO: 33406 - DNA, 25 bp, Probe sequence
atggtgttattcgcactaatcctat

SEQ ID NO: 33407 - DNA, 25 bp, Probe sequence
tattcgcactaatcctattccaagg

SEQ ID NO: 33408 - DNA, 25 bp, Probe sequence
gtgttattcgcactaatcctattcc

SEQ ID NO: 33409 - DNA, 25 bp, Probe sequence
ggtgttattcgcactaatcctattc

SEQ ID NO: 33410 - DNA, 25 bp, Probe sequence
gatggtgttattcgcactaatccta

SEQ ID NO: 33411 - DNA, 25 bp, Probe sequence
taggtggagattcagttaaagttgg

SEQ ID NO: 33412 - DNA, 25 bp, Probe sequence
tgtaggtggagattcagttaaagtt

SEQ ID NO: 33413 - DNA, 25 bp, Probe sequence
ttgtaggtggagattcagttaaagt

SEQ ID NO: 33414 - DNA, 25 bp, Probe sequence
gtaggtggagattcagttaaagttg

SEQ ID NO: 33415 - DNA, 25 bp, Probe sequence
ttgctattattgaaacaggtggaaa

SEQ ID NO: 33416 - DNA, 25 bp, Probe sequence
tttgctattattgaaacaggtggaa

SEQ ID NO: 33417 - DNA, 25 bp, Probe sequence
ccatcgtcaaccatacactaaatta

SEQ ID NO: 33418 - DNA, 25 bp, Probe sequence
acaaatcaaagtagaagaaggtcaa

SEQ ID NO: 33419 - DNA, 25 bp, Probe sequence
aacaaatcaaagtagaagaaggtca

SEQ ID NO: 33420 - DNA, 25 bp, Probe sequence
cctgttattcagatcagattgtagc

SEQ ID NO: 33421 - DNA, 25 bp, Probe sequence
cgtcctgttattcagatcagattgt

SEQ ID NO: 33422 - DNA, 25 bp, Probe sequence
ctgttattcagatcagattgtagca

SEQ ID NO: 33423 - DNA, 25 bp, Probe sequence
gcgtcctgttattcagatcagattg

SEQ ID NO: 33424 - DNA, 25 bp, Probe sequence
gtcctgttattcagatcagattgta

SEQ ID NO: 33425 - DNA, 25 bp, Probe sequence
tgacttctttaattggacctaatgg

SEQ ID NO: 33426 - DNA, 25 bp, Probe sequence
tcctgttattcagatcagattgtag

SEQ ID NO: 33427 - DNA, 25 bp, Probe sequence
tgcgtcctgttattcagatcagatt

SEQ ID NO: 33428 - DNA, 25 bp, Probe sequence
ttgcgtcctgttattcagatcagat

SEQ ID NO: 33429 - DNA, 25 bp, Probe sequence
acggtatgttaggattcattcaatt

SEQ ID NO: 33430 - DNA, 25 bp, Probe sequence
tacggtatgttaggattcattcaat

SEQ ID NO: 33431 - DNA, 25 bp, Probe sequence
agtctatgtggcattaatatacggt

SEQ ID NO: 33432 - DNA, 25 bp, Probe sequence
atacggtatgttaggattcattcaa

SEQ ID NO: 33433 - DNA, 25 bp, Probe sequence
aagtctatgtggcattaatatacgg

SEQ ID NO: 33434 - DNA, 25 bp, Probe sequence
atgtggcattaatatacggtatgtt

SEQ ID NO: 33435 - DNA, 25 bp, Probe sequence
tggcattaatatacggtatgttagg

SEQ ID NO: 33436 - DNA, 25 bp, Probe sequence
ggcattaatatacggtatgttagga

SEQ ID NO: 33437 - DNA, 25 bp, Probe sequence
gtctatgtggcattaatatacggta

SEQ ID NO: 33438 - DNA, 25 bp, Probe sequence
gctggatcaactacaactacaatta

SEQ ID NO: 33439 - DNA, 25 bp, Probe sequence
agctggatcaactacaactacaatt

SEQ ID NO: 33440 - DNA, 25 bp, Probe sequence
ttagatgtaatgaaagaaatgggct

SEQ ID NO: 33441 - DNA, 25 bp, Probe sequence
agatgtaatgaaagaaatgggctta

SEQ ID NO: 33442 - DNA, 25 bp, Probe sequence
tagatgtaatgaaagaaatgggctt

SEQ ID NO: 33443 - DNA, 25 bp, Probe sequence
taagtggtaaatcaactgcgaaaca

SEQ ID NO: 33444 - DNA, 25 bp, Probe sequence
tgtaatgaaagaaatgggcttatca

SEQ ID NO: 33445 - DNA, 25 bp, Probe sequence
gaaggtgaattatcaacatttggac

SEQ ID NO: 33446 - DNA, 25 bp, Probe sequence
catgcggtaacaattctgataaaga

SEQ ID NO: 33447 - DNA, 25 bp, Probe sequence
acgagttgtgagttatccagttaat

SEQ ID NO: 33448 - DNA, 25 bp, Probe sequence
taagaaccaacaattagaagcggaa

SEQ ID NO: 33449 - DNA, 25 bp, Probe sequence
aacgagttgtgagttatccagttaa

SEQ ID NO: 33450 - DNA, 25 bp, Probe sequence
cgagttgtgagttatccagttaatt

SEQ ID NO: 33451 - DNA, 25 bp, Probe sequence
aatctcaatcacctcctgaacaata

SEQ ID NO: 33452 - DNA, 25 bp, Probe sequence
atctcaatcacctcctgaacaatat

SEQ ID NO: 33453 - DNA, 25 bp, Probe sequence
tctcaatcacctcctgaacaatata

SEQ ID NO: 33454 - DNA, 25 bp, Probe sequence
caatctcaatcacctcctgaacaat

SEQ ID NO: 33455 - DNA, 25 bp, Probe sequence
tataggagaagtgactaaggttcaa

SEQ ID NO: 33456 - DNA, 25 bp, Probe sequence
ggtatagatataactcacggcgata

SEQ ID NO: 33457 - DNA, 25 bp, Probe sequence
agtgaagcaactaatcttacgacaa

SEQ ID NO: 33458 - DNA, 25 bp, Probe sequence
aagtgaagcaactaatcttacgaca

SEQ ID NO: 33459 - DNA, 25 bp, Probe sequence
ttgtagtaataagtgcttgtggtaa

SEQ ID NO: 33460 - DNA, 25 bp, Probe sequence
tgtagtaataagtgcttgtggtaat

SEQ ID NO: 33461 - DNA, 25 bp, Probe sequence
gtatagatataactcacggcgataa

SEQ ID NO: 33462 - DNA, 25 bp, Probe sequence
ttaaggcactacaagaagatgttaa

SEQ ID NO: 33463 - DNA, 25 bp, Probe sequence
aaagggtatagatataactcacggc

SEQ ID NO: 33464 - DNA, 25 bp, Probe sequence
tagatataactcacggcgataaagc

SEQ ID NO: 33465 - DNA, 25 bp, Probe sequence
gaatgaatcgcatggcttataatga

SEQ ID NO: 33466 - DNA, 25 bp, Probe sequence
atgaatcgcatggcttataatgatc

SEQ ID NO: 33467 - DNA, 25 bp, Probe sequence
aatgaatcgcatggcttataatgat

SEQ ID NO: 33468 - DNA, 25 bp, Probe sequence
ggaatgaatcgcatggcttataatg

SEQ ID NO: 33469 - DNA, 25 bp, Probe sequence
tggaatgaatcgcatggcttataat

SEQ ID NO: 33470 - DNA, 25 bp, Probe sequence
ctggaatgaatcgcatggcttataa

SEQ ID NO: 33471 - DNA, 25 bp, Probe sequence
ttgtttatatcgccttgaaatacgc

SEQ ID NO: 33472 - DNA, 25 bp, Probe sequence
atgagtcaatgcgtgtttacaatac

SEQ ID NO: 33473 - DNA, 25 bp, Probe sequence
gatgagtcaatgcgtgtttacaata

SEQ ID NO: 33474 - DNA, 25 bp, Probe sequence
gtcattagcacaagcagaagaataa

SEQ ID NO: 33475 - DNA, 25 bp, Probe sequence
cgtcattagcacaagcagaagaata

SEQ ID NO: 33476 - DNA, 25 bp, Probe sequence
tcgtcattagcacaagcagaagaat

SEQ ID NO: 33477 - DNA, 25 bp, Probe sequence
taaatggtgaaatggtttggaatcg

SEQ ID NO: 33478 - DNA, 25 bp, Probe sequence
ttgtaaatggtgaaatggtttggaa

SEQ ID NO: 33479 - DNA, 25 bp, Probe sequence
tttgtaaatggtgaaatggtttgga

SEQ ID NO: 33480 - DNA, 25 bp, Probe sequence
tgtaaatggtgaaatggtttggaat

SEQ ID NO: 33481 - DNA, 25 bp, Probe sequence
gcgatatggacggttattatttgat

SEQ ID NO: 33482 - DNA, 25 bp, Probe sequence
gtaaatggtgaaatggtttggaatc

SEQ ID NO: 33483 - DNA, 25 bp, Probe sequence
tttattattatcggggttctcgtgc

SEQ ID NO: 33484 - DNA, 25 bp, Probe sequence
atttattattatcggggttctcgtg

SEQ ID NO: 33485 - DNA, 25 bp, Probe sequence
aacattagctttatctacgttaggt

SEQ ID NO: 33486 - DNA, 25 bp, Probe sequence
acattagctttatctacgttaggta

SEQ ID NO: 33487 - DNA, 25 bp, Probe sequence
gggttctcgtgccaatggtttatac

SEQ ID NO: 33488 - DNA, 25 bp, Probe sequence
ttattattatcggggttctcgtgcc

SEQ ID NO: 33489 - DNA, 25 bp, Probe sequence
tatttattattatcggggttctcgt

SEQ ID NO: 33490 - DNA, 25 bp, Probe sequence
ctatttattattatcggggttctcg

SEQ ID NO: 33491 - DNA, 25 bp, Probe sequence
tgactctatttattattatcggggt

SEQ ID NO: 33492 - DNA, 25 bp, Probe sequence
gcagatatgaatgaagttgaaggtg

SEQ ID NO: 33493 - DNA, 25 bp, Probe sequence
cagatatgaatgaagttgaaggtgt

SEQ ID NO: 33494 - DNA, 25 bp, Probe sequence
gctaatagatatgttgaagaggcag

SEQ ID NO: 33495 - DNA, 25 bp, Probe sequence
aatagatatgttgaagaggcagttg

SEQ ID NO: 33496 - DNA, 25 bp, Probe sequence
agatatgaatgaagttgaaggtgtt

SEQ ID NO: 33497 - DNA, 25 bp, Probe sequence
ttaggtgctcaattctatgatgacg

SEQ ID NO: 33498 - DNA, 25 bp, Probe sequence
atagatatgttgaagaggcagttgc

SEQ ID NO: 33499 - DNA, 25 bp, Probe sequence
attaggtgctcaattctatgatgac

SEQ ID NO: 33500 - DNA, 25 bp, Probe sequence
cattaggtgctcaattctatgatga

SEQ ID NO: 33501 - DNA, 25 bp, Probe sequence
caatcatcgcagttcataatcatcc

SEQ ID NO: 33502 - DNA, 25 bp, Probe sequence
atcatcgcagttcataatcatccat

SEQ ID NO: 33503 - DNA, 25 bp, Probe sequence
aatcatcgcagttcataatcatcca

SEQ ID NO: 33504 - DNA, 25 bp, Probe sequence
gcaatcatcgcagttcataatcatc

SEQ ID NO: 33505 - DNA, 25 bp, Probe sequence
tcatcgcagttcataatcatccatc

SEQ ID NO: 33506 - DNA, 25 bp, Probe sequence
accaagtgatgttgctgattatatg

SEQ ID NO: 33507 - DNA, 25 bp, Probe sequence
ccaagtgatgttgctgattatatga

SEQ ID NO: 33508 - DNA, 25 bp, Probe sequence
tgatgttgctgattatatgattcca

SEQ ID NO: 33509 - DNA, 25 bp, Probe sequence
aaccaagtgatgttgctgattatat

SEQ ID NO: 33510 - DNA, 25 bp, Probe sequence
tcttagcagttccattcattgatac

SEQ ID NO: 33511 - DNA, 25 bp, Probe sequence
tgttatcttagcagttccattcatt

SEQ ID NO: 33512 - DNA, 25 bp, Probe sequence
ttgttatcttagcagttccattcat

SEQ ID NO: 33513 - DNA, 25 bp, Probe sequence
attgttatcttagcagttccattca

SEQ ID NO: 33514 - DNA, 25 bp, Probe sequence
gttatcttagcagttccattcattg

SEQ ID NO: 33515 - DNA, 25 bp, Probe sequence
ttatcttagcagttccattcattga

SEQ ID NO: 33516 - DNA, 25 bp, Probe sequence
atcttagcagttccattcattgata

SEQ ID NO: 33517 - DNA, 25 bp, Probe sequence
tatcttagcagttccattcattgat

SEQ ID NO: 33518 - DNA, 25 bp, Probe sequence
taacttaattgatggactcgatggt

SEQ ID NO: 33519 - DNA, 25 bp, Probe sequence
tcattgctggtttagttgctttaat

SEQ ID NO: 33520 - DNA, 25 bp, Probe sequence
acctttgctttaatacctatcgtct

SEQ ID NO: 33521 - DNA, 25 bp, Probe sequence
gtcattgctggtttagttgctttaa

SEQ ID NO: 33522 - DNA, 25 bp, Probe sequence
aacctttgctttaatacctatcgtc

SEQ ID NO: 33523 - DNA, 25 bp, Probe sequence
tacatttgtcattgctggtttagtt

SEQ ID NO: 33524 - DNA, 25 bp, Probe sequence
ttacatttgtcattgctggtttagt

SEQ ID NO: 33525 - DNA, 25 bp, Probe sequence
acatttgtcattgctggtttagttg

SEQ ID NO: 33526 - DNA, 25 bp, Probe sequence
tccctctccaattcactatttatgt

SEQ ID NO: 33527 - DNA, 25 bp, Probe sequence
gggaaacctttgctttaatacctat

SEQ ID NO: 33528 - DNA, 25 bp, Probe sequence
actttgtagttcttggaatgtttga

SEQ ID NO: 33529 - DNA, 25 bp, Probe sequence
ctttgtagttcttggaatgtttgaa

SEQ ID NO: 33530 - DNA, 25 bp, Probe sequence
ttcttggaatgtttgaacgattaaa

SEQ ID NO: 33531 - DNA, 25 bp, Probe sequence
tcttggaatgtttgaacgattaaat

SEQ ID NO: 33532 - DNA, 25 bp, Probe sequence
tggaatgtttgaacgattaaataga

SEQ ID NO: 33533 - DNA, 25 bp, Probe sequence
ggaatgtttgaacgattaaatagac

SEQ ID NO: 33534 - DNA, 25 bp, Probe sequence
ttggaatgtttgaacgattaaatag

SEQ ID NO: 33535 - DNA, 25 bp, Probe sequence
cttggaatgtttgaacgattaaata

SEQ ID NO: 33536 - DNA, 25 bp, Probe sequence
aactttgtagttcttggaatgtttg

SEQ ID NO: 33537 - DNA, 25 bp, Probe sequence
cagcaatgattgaaggatgttatgt

SEQ ID NO: 33538 - DNA, 25 bp, Probe sequence
gcagcaatgattgaaggatgttatg

SEQ ID NO: 33539 - DNA, 25 bp, Probe sequence
agcaatgattgaaggatgttatgta

SEQ ID NO: 33540 - DNA, 25 bp, Probe sequence
tgaaggatgttatgtattacgtgct

SEQ ID NO: 33541 - DNA, 25 bp, Probe sequence
ttgaaggatgttatgtattacgtgc

SEQ ID NO: 33542 - DNA, 25 bp, Probe sequence
ttgaaatggttgaagaaggatacga

SEQ ID NO: 33543 - DNA, 25 bp, Probe sequence
attgaaatggttgaagaaggatacg

SEQ ID NO: 33544 - DNA, 25 bp, Probe sequence
gctattgaaatggttgaagaaggat

SEQ ID NO: 33545 - DNA, 25 bp, Probe sequence
gcaatgattgaaggatgttatgtat

SEQ ID NO: 33546 - DNA, 25 bp, Probe sequence
acgctattgtagaattagtatcacg

SEQ ID NO: 33547 - DNA, 25 bp, Probe sequence
cgcacataattcagagagtatagat

SEQ ID NO: 33548 - DNA, 25 bp, Probe sequence
tctacagttgcttaccttagaacag

SEQ ID NO: 33549 - DNA, 25 bp, Probe sequence
ctctacagttgcttaccttagaaca

SEQ ID NO: 33550 - DNA, 25 bp, Probe sequence
aattacctagagagcttgtattgga

SEQ ID NO: 33551 - DNA, 25 bp, Probe sequence
gctctacagttgcttaccttagaac

SEQ ID NO: 33552 - DNA, 25 bp, Probe sequence
attacctagagagcttgtattggat

SEQ ID NO: 33553 - DNA, 25 bp, Probe sequence
gaattacctagagagcttgtattgg

SEQ ID NO: 33554 - DNA, 25 bp, Probe sequence
gacgctattgtagaattagtatcac

SEQ ID NO: 33555 - DNA, 25 bp, Probe sequence
gattgtccttcagcttatcaagtag

SEQ ID NO: 33556 - DNA, 25 bp, Probe sequence
caagatgattgtccttcagcttatc

SEQ ID NO: 33557 - DNA, 25 bp, Probe sequence
atttaggttctggtggattaggttt

SEQ ID NO: 33558 - DNA, 25 bp, Probe sequence
ttaggttctggtggattaggtttag

SEQ ID NO: 33559 - DNA, 25 bp, Probe sequence
catttaggttctggtggattaggtt

SEQ ID NO: 33560 - DNA, 25 bp, Probe sequence
tttaggttctggtggattaggttta

SEQ ID NO: 33561 - DNA, 25 bp, Probe sequence
ttctggtggattaggtttaggctat

SEQ ID NO: 33562 - DNA, 25 bp, Probe sequence
taggttctggtggattaggtttagg

SEQ ID NO: 33563 - DNA, 25 bp, Probe sequence
acatttaggttctggtggattaggt

SEQ ID NO: 33564 - DNA, 25 bp, Probe sequence
tagacatactacaccagcaatcaag

SEQ ID NO: 33565 - DNA, 25 bp, Probe sequence
atagacatactacaccagcaatcaa

SEQ ID NO: 33566 - DNA, 25 bp, Probe sequence
tatagacatactacaccagcaatca

SEQ ID NO: 33567 - DNA, 25 bp, Probe sequence
aagttgaacaattaaggaatggaca

SEQ ID NO: 33568 - DNA, 25 bp, Probe sequence
gcacatcaatatactcaagaggctt

SEQ ID NO: 33569 - DNA, 25 bp, Probe sequence
agatatagacatactacaccagcaa

SEQ ID NO: 33570 - DNA, 25 bp, Probe sequence
aagatatagacatactacaccagca

SEQ ID NO: 33571 - DNA, 25 bp, Probe sequence
gaagatatagacatactacaccagc

SEQ ID NO: 33572 - DNA, 25 bp, Probe sequence
atatagacatactacaccagcaatc

SEQ ID NO: 33573 - DNA, 25 bp, Probe sequence
aatatgatggtgtgaaggcaagaat

SEQ ID NO: 33574 - DNA, 25 bp, Probe sequence
atatgatggtgtgaaggcaagaatt

SEQ ID NO: 33575 - DNA, 25 bp, Probe sequence
atgttgatatagacttcggttctgg

SEQ ID NO: 33576 - DNA, 25 bp, Probe sequence
aatggatgttattgacgaatacggt

SEQ ID NO: 33577 - DNA, 25 bp, Probe sequence
ttattgacgaatacggtgctgatag

SEQ ID NO: 33578 - DNA, 25 bp, Probe sequence
gttgatatagacttcggttctggtg

SEQ ID NO: 33579 - DNA, 25 bp, Probe sequence
gttattgacgaatacggtgctgata

SEQ ID NO: 33580 - DNA, 25 bp, Probe sequence
tgttgatatagacttcggttctggt

SEQ ID NO: 33581 - DNA, 25 bp, Probe sequence
atggatgttattgacgaatacggtg

SEQ ID NO: 33582 - DNA, 25 bp, Probe sequence
tgagttgtggtgctaagttatatga

SEQ ID NO: 33583 - DNA, 25 bp, Probe sequence
acaactggattaacaattcatcgtg

SEQ ID NO: 33584 - DNA, 25 bp, Probe sequence
ttgagttgtggtgctaagttatatg

SEQ ID NO: 33585 - DNA, 25 bp, Probe sequence
gagttgtggtgctaagttatatgaa

SEQ ID NO: 33586 - DNA, 25 bp, Probe sequence
tacaactggattaacaattcatcgt

SEQ ID NO: 33587 - DNA, 25 bp, Probe sequence
caactggattaacaattcatcgtgc

SEQ ID NO: 33588 - DNA, 25 bp, Probe sequence
acctaatagattatgtgacagatgc

SEQ ID NO: 33589 - DNA, 25 bp, Probe sequence
atacaactggattaacaattcatcg

SEQ ID NO: 33590 - DNA, 25 bp, Probe sequence
acatcttatgactatattgtgccaa

SEQ ID NO: 33591 - DNA, 25 bp, Probe sequence
tggtcctattatcgcatcaatcatt

SEQ ID NO: 33592 - DNA, 25 bp, Probe sequence
ttggtcctattatcgcatcaatcat

SEQ ID NO: 33593 - DNA, 25 bp, Probe sequence
agcaccactcattgtattaattgtt

SEQ ID NO: 33594 - DNA, 25 bp, Probe sequence
cactagatcattggttgttgaacat

SEQ ID NO: 33595 - DNA, 25 bp, Probe sequence
ctagatcattggttgttgaacatgg

SEQ ID NO: 33596 - DNA, 25 bp, Probe sequence
acactagatcattggttgttgaaca

SEQ ID NO: 33597 - DNA, 25 bp, Probe sequence
actagatcattggttgttgaacatg

SEQ ID NO: 33598 - DNA, 25 bp, Probe sequence
tacactagatcattggttgttgaac

SEQ ID NO: 33599 - DNA, 25 bp, Probe sequence
tagcaccactcattgtattaattgt

SEQ ID NO: 33600 - DNA, 25 bp, Probe sequence
aatgcggctaatgataatccactta

SEQ ID NO: 33601 - DNA, 25 bp, Probe sequence
aatgaatgcggctaatgataatcca

SEQ ID NO: 33602 - DNA, 25 bp, Probe sequence
atgcggctaatgataatccacttat

SEQ ID NO: 33603 - DNA, 25 bp, Probe sequence
tgcggctaatgataatccacttata

SEQ ID NO: 33604 - DNA, 25 bp, Probe sequence
gaatgcggctaatgataatccactt

SEQ ID NO: 33605 - DNA, 25 bp, Probe sequence
atgaatgcggctaatgataatccac

SEQ ID NO: 33606 - DNA, 25 bp, Probe sequence
aggatagtgacgatgtattaagaga

SEQ ID NO: 33607 - DNA, 25 bp, Probe sequence
gcggctaatgataatccacttatat

SEQ ID NO: 33608 - DNA, 25 bp, Probe sequence
gattctatcacttcatctgcgaacc

SEQ ID NO: 33609 - DNA, 25 bp, Probe sequence
gctatgatgtgctatacagtagtga

SEQ ID NO: 33610 - DNA, 25 bp, Probe sequence
ctatgatgtgctatacagtagtgac

SEQ ID NO: 33611 - DNA, 25 bp, Probe sequence
ttgcaggtagatactatgaacgatt

SEQ ID NO: 33612 - DNA, 25 bp, Probe sequence
aggtagatactatgaacgatttgcc

SEQ ID NO: 33613 - DNA, 25 bp, Probe sequence
attgcaggtagatactatgaacgat

SEQ ID NO: 33614 - DNA, 25 bp, Probe sequence
ggtagatactatgaacgatttgcca

SEQ ID NO: 33615 - DNA, 25 bp, Probe sequence
caggtagatactatgaacgatttgc

SEQ ID NO: 33616 - DNA, 25 bp, Probe sequence
gcaggtagatactatgaacgatttg

SEQ ID NO: 33617 - DNA, 25 bp, Probe sequence
cattgcaggtagatactatgaacga

SEQ ID NO: 33618 - DNA, 25 bp, Probe sequence
caacaacgacaggctatcaacatat

SEQ ID NO: 33619 - DNA, 25 bp, Probe sequence
taacacagcaattagaggattatcg

SEQ ID NO: 33620 - DNA, 25 bp, Probe sequence
aatacaacaacgacaggctatcaac

SEQ ID NO: 33621 - DNA, 25 bp, Probe sequence
aacacagcaattagaggattatcgc

SEQ ID NO: 33622 - DNA, 25 bp, Probe sequence
acaacaacgacaggctatcaacata

SEQ ID NO: 33623 - DNA, 25 bp, Probe sequence
tacaacaacgacaggctatcaacat

SEQ ID NO: 33624 - DNA, 25 bp, Probe sequence
atacaacaacgacaggctatcaaca

SEQ ID NO: 33625 - DNA, 25 bp, Probe sequence
gtaacacagcaattagaggattatc

SEQ ID NO: 33626 - DNA, 25 bp, Probe sequence
tgtaacacagcaattagaggattat

SEQ ID NO: 33627 - DNA, 25 bp, Probe sequence
gataatgacgcttacgatgataacg

SEQ ID NO: 33628 - DNA, 25 bp, Probe sequence
ataatgacgcttacgatgataacga

SEQ ID NO: 33629 - DNA, 25 bp, Probe sequence
cgcttacgatgataacgagatagaa

SEQ ID NO: 33630 - DNA, 25 bp, Probe sequence
agttgataatgacgcttacgatgat

SEQ ID NO: 33631 - DNA, 25 bp, Probe sequence
aacctcactatcacagatgctattc

SEQ ID NO: 33632 - DNA, 25 bp, Probe sequence
tgataatgacgcttacgatgataac

SEQ ID NO: 33633 - DNA, 25 bp, Probe sequence
gttgataatgacgcttacgatgata

SEQ ID NO: 33634 - DNA, 25 bp, Probe sequence
taatgacgcttacgatgataacgag

SEQ ID NO: 33635 - DNA, 25 bp, Probe sequence
aatggattcagaagaagcggtatta

SEQ ID NO: 33636 - DNA, 25 bp, Probe sequence
tatcttaacaaacgtgaagctcaag

SEQ ID NO: 33637 - DNA, 25 bp, Probe sequence
ttatcttaacaaacgtgaagctcaa

SEQ ID NO: 33638 - DNA, 25 bp, Probe sequence
gttatcttaacaaacgtgaagctca

SEQ ID NO: 33639 - DNA, 25 bp, Probe sequence
atcttaacaaacgtgaagctcaagc

SEQ ID NO: 33640 - DNA, 25 bp, Probe sequence
cttaacaaacgtgaagctcaagcag

SEQ ID NO: 33641 - DNA, 25 bp, Probe sequence
tcttaacaaacgtgaagctcaagca

SEQ ID NO: 33642 - DNA, 25 bp, Probe sequence
tatgctttgtagtcaaaactgctag

SEQ ID NO: 33643 - DNA, 25 bp, Probe sequence
atatgctttgtagtcaaaactgcta

SEQ ID NO: 33644 - DNA, 25 bp, Probe sequence
tatatgctttgtagtcaaaactgct

SEQ ID NO: 33645 - DNA, 25 bp, Probe sequence
ttacaagaaggtgacattacagagg

SEQ ID NO: 33646 - DNA, 25 bp, Probe sequence
ctatatggttgttgatggcgaagta

SEQ ID NO: 33647 - DNA, 25 bp, Probe sequence
tacaagaaggtgacattacagagga

SEQ ID NO: 33648 - DNA, 25 bp, Probe sequence
gaaggtgacattacagaggatgata

SEQ ID NO: 33649 - DNA, 25 bp, Probe sequence
gttctattgatagccattggactga

SEQ ID NO: 33650 - DNA, 25 bp, Probe sequence
ttctattgatagccattggactgat

SEQ ID NO: 33651 - DNA, 25 bp, Probe sequence
cttacaagaaggtgacattacagag

SEQ ID NO: 33652 - DNA, 25 bp, Probe sequence
attaggtgaaggcgtagaggaatta

SEQ ID NO: 33653 - DNA, 25 bp, Probe sequence
gtagactatatggttgttgatggcg

SEQ ID NO: 33654 - DNA, 25 bp, Probe sequence
gatattgctggtgtaatcgtagaac

SEQ ID NO: 33655 - DNA, 25 bp, Probe sequence
atgttaggcgatatacttgaagacg

SEQ ID NO: 33656 - DNA, 25 bp, Probe sequence
ttaggcgatatacttgaagacggtt

SEQ ID NO: 33657 - DNA, 25 bp, Probe sequence
tagagcaggttcaatgattggttat

SEQ ID NO: 33658 - DNA, 25 bp, Probe sequence
atagagcaggttcaatgattggtta

SEQ ID NO: 33659 - DNA, 25 bp, Probe sequence
agagcaggttcaatgattggttatt

SEQ ID NO: 33660 - DNA, 25 bp, Probe sequence
aatagagcaggttcaatgattggtt

SEQ ID NO: 33661 - DNA, 25 bp, Probe sequence
tatgttaggcgatatacttgaagac

SEQ ID NO: 33662 - DNA, 25 bp, Probe sequence
gttaggcgatatacttgaagacggt

SEQ ID NO: 33663 - DNA, 25 bp, Probe sequence
cgacaatgagagatatggttagaga

SEQ ID NO: 33664 - DNA, 25 bp, Probe sequence
aatcatacgaatgttccagttgttg

SEQ ID NO: 33665 - DNA, 25 bp, Probe sequence
gcgacaatgagagatatggttagag

SEQ ID NO: 33666 - DNA, 25 bp, Probe sequence
agcgacaatgagagatatggttaga

SEQ ID NO: 33667 - DNA, 25 bp, Probe sequence
cagcgacaatgagagatatggttag

SEQ ID NO: 33668 - DNA, 25 bp, Probe sequence
acaatgagagatatggttagagaga

SEQ ID NO: 33669 - DNA, 25 bp, Probe sequence
taatgagttatggtgtcaagtatgc

SEQ ID NO: 33670 - DNA, 25 bp, Probe sequence
gacaatgagagatatggttagagag

SEQ ID NO: 33671 - DNA, 25 bp, Probe sequence
tcagcgacaatgagagatatggtta

SEQ ID NO: 33672 - DNA, 25 bp, Probe sequence
tgataacattgctgtgataggaagt

SEQ ID NO: 33673 - DNA, 25 bp, Probe sequence
aacattgctgtgataggaagtaaga

SEQ ID NO: 33674 - DNA, 25 bp, Probe sequence
cattgctgtgataggaagtaagaca

SEQ ID NO: 33675 - DNA, 25 bp, Probe sequence
acattgctgtgataggaagtaagac

SEQ ID NO: 33676 - DNA, 25 bp, Probe sequence
gttgataacattgctgtgataggaa

SEQ ID NO: 33677 - DNA, 25 bp, Probe sequence
ttgataacattgctgtgataggaag

SEQ ID NO: 33678 - DNA, 25 bp, Probe sequence
atgaagccagttgtagttatgacac

SEQ ID NO: 33679 - DNA, 25 bp, Probe sequence
taacattgctgtgataggaagtaag

SEQ ID NO: 33680 - DNA, 25 bp, Probe sequence
gataacattgctgtgataggaagta

SEQ ID NO: 33681 - DNA, 25 bp, Probe sequence
gaagacttagagcaagaggtcatta

SEQ ID NO: 33682 - DNA, 25 bp, Probe sequence
aagacttagagcaagaggtcattaa

SEQ ID NO: 33683 - DNA, 25 bp, Probe sequence
agaagacttagagcaagaggtcatt

SEQ ID NO: 33684 - DNA, 25 bp, Probe sequence
aagaagacttagagcaagaggtcat

SEQ ID NO: 33685 - DNA, 25 bp, Probe sequence
tacagttgatacattcagagcttct

SEQ ID NO: 33686 - DNA, 25 bp, Probe sequence
taaggctaaagtggatgaatacgaa

SEQ ID NO: 33687 - DNA, 25 bp, Probe sequence
aaggctaaagtggatgaatacgaat

SEQ ID NO: 33688 - DNA, 25 bp, Probe sequence
tggatgctacttgggatttattaca

SEQ ID NO: 33689 - DNA, 25 bp, Probe sequence
ttaaggctaaagtggatgaatacga

SEQ ID NO: 33690 - DNA, 25 bp, Probe sequence
ggctggtcagatgatattgtaacat

SEQ ID NO: 33691 - DNA, 25 bp, Probe sequence
tgaatatacaatgaacggaacagat

SEQ ID NO: 33692 - DNA, 25 bp, Probe sequence
caggatatgctacaatctcagatca

SEQ ID NO: 33693 - DNA, 25 bp, Probe sequence
ttgatagagatacattgttacctgc

SEQ ID NO: 33694 - DNA, 25 bp, Probe sequence
aggatatgctacaatctcagatcaa

SEQ ID NO: 33695 - DNA, 25 bp, Probe sequence
ttgaatatacaatgaacggaacaga

SEQ ID NO: 33696 - DNA, 25 bp, Probe sequence
agtgacgatgaagaactattaacat

SEQ ID NO: 33697 - DNA, 25 bp, Probe sequence
gaatatacaatgaacggaacagatc

SEQ ID NO: 33698 - DNA, 25 bp, Probe sequence
gtgacgatgaagaactattaacatt

SEQ ID NO: 33699 - DNA, 25 bp, Probe sequence
tcattgaacaggctgataataagat

SEQ ID NO: 33700 - DNA, 25 bp, Probe sequence
cattgaacaggctgataataagatt

SEQ ID NO: 33701 - DNA, 25 bp, Probe sequence
ttactaaacatcattgaacaggctg

SEQ ID NO: 33702 - DNA, 25 bp, Probe sequence
attactaaacatcattgaacaggct

SEQ ID NO: 33703 - DNA, 25 bp, Probe sequence
tactaaacatcattgaacaggctga

SEQ ID NO: 33704 - DNA, 25 bp, Probe sequence
acatcattgaacaggctgataataa

SEQ ID NO: 33705 - DNA, 25 bp, Probe sequence
aacatcattgaacaggctgataata

SEQ ID NO: 33706 - DNA, 25 bp, Probe sequence
atcattgaacaggctgataataaga

SEQ ID NO: 33707 - DNA, 25 bp, Probe sequence
catcattgaacaggctgataataag

SEQ ID NO: 33708 - DNA, 25 bp, Probe sequence
agtagttgctggcgattcattatat

SEQ ID NO: 33709 - DNA, 25 bp, Probe sequence
agtagtagttaagcaagcacctaag

SEQ ID NO: 33710 - DNA, 25 bp, Probe sequence
aagtagtagttaagcaagcacctaa

SEQ ID NO: 33711 - DNA, 25 bp, Probe sequence
gtagtagttaagcaagcacctaagc

SEQ ID NO: 33712 - DNA, 25 bp, Probe sequence
aatcaccgacaacttatacagtagt

SEQ ID NO: 33713 - DNA, 25 bp, Probe sequence
caatcaccgacaacttatacagtag

SEQ ID NO: 33714 - DNA, 25 bp, Probe sequence
gcaatcaccgacaacttatacagta

SEQ ID NO: 33715 - DNA, 25 bp, Probe sequence
tagtagttaagcaagcacctaagca

SEQ ID NO: 33716 - DNA, 25 bp, Probe sequence
catgttggtgttgttgaatctgtaa

SEQ ID NO: 33717 - DNA, 25 bp, Probe sequence
gctgttgtagacgagttactgttag

SEQ ID NO: 33718 - DNA, 25 bp, Probe sequence
ctgttgtagacgagttactgttagt

SEQ ID NO: 33719 - DNA, 25 bp, Probe sequence
aattgctgttgtagacgagttactg

SEQ ID NO: 33720 - DNA, 25 bp, Probe sequence
tgctgttgtagacgagttactgtta

SEQ ID NO: 33721 - DNA, 25 bp, Probe sequence
tgttgtagacgagttactgttagtc

SEQ ID NO: 33722 - DNA, 25 bp, Probe sequence
tgtagacgagttactgttagtccat

SEQ ID NO: 33723 - DNA, 25 bp, Probe sequence
gttgtagacgagttactgttagtcc

SEQ ID NO: 33724 - DNA, 25 bp, Probe sequence
gtagacgagttactgttagtccata

SEQ ID NO: 33725 - DNA, 25 bp, Probe sequence
ttgtagacgagttactgttagtcca

SEQ ID NO: 33726 - DNA, 25 bp, Probe sequence
tagcaacagttgaagaatatcatgg

SEQ ID NO: 33727 - DNA, 25 bp, Probe sequence
gcaagttgaagaagaaatggtagag

SEQ ID NO: 33728 - DNA, 25 bp, Probe sequence
acctgttaaatatgcgagtagtgaa

SEQ ID NO: 33729 - DNA, 25 bp, Probe sequence
ctagcaacagttgaagaatatcatg

SEQ ID NO: 33730 - DNA, 25 bp, Probe sequence
cctgttaaatatgcgagtagtgaat

SEQ ID NO: 33731 - DNA, 25 bp, Probe sequence
aagttgaagaagaaatggtagagac

SEQ ID NO: 33732 - DNA, 25 bp, Probe sequence
tctagcaacagttgaagaatatcat

SEQ ID NO: 33733 - DNA, 25 bp, Probe sequence
atctagcaacagttgaagaatatca

SEQ ID NO: 33734 - DNA, 25 bp, Probe sequence
caagttgaagaagaaatggtagaga

SEQ ID NO: 33735 - DNA, 25 bp, Probe sequence
tcacacaggtcgttactatattcaa

SEQ ID NO: 33736 - DNA, 25 bp, Probe sequence
ttcacacaggtcgttactatattca

SEQ ID NO: 33737 - DNA, 25 bp, Probe sequence
agatattgaacctggtattagtgcc

SEQ ID NO: 33738 - DNA, 25 bp, Probe sequence
cacacaggtcgttactatattcaac

SEQ ID NO: 33739 - DNA, 25 bp, Probe sequence
tcttcttggttctggaattactgat

SEQ ID NO: 33740 - DNA, 25 bp, Probe sequence
atcttcttggttctggaattactga

SEQ ID NO: 33741 - DNA, 25 bp, Probe sequence
cgaactgaagtatatgctgttgttg

SEQ ID NO: 33742 - DNA, 25 bp, Probe sequence
gaactgaagtatatgctgttgttga

SEQ ID NO: 33743 - DNA, 25 bp, Probe sequence
gagatattgaacctggtattagtgc

SEQ ID NO: 33744 - DNA, 25 bp, Probe sequence
ggtcggtactattctgacattaatt

SEQ ID NO: 33745 - DNA, 25 bp, Probe sequence
ttggtgcctcaatctataaagagta

SEQ ID NO: 33746 - DNA, 25 bp, Probe sequence
tggtgcctcaatctataaagagtat

SEQ ID NO: 33747 - DNA, 25 bp, Probe sequence
cataaacatcaagatgaagatcgct

SEQ ID NO: 33748 - DNA, 25 bp, Probe sequence
ggtgcctcaatctataaagagtatt

SEQ ID NO: 33749 - DNA, 25 bp, Probe sequence
tgggtcggtactattctgacattaa

SEQ ID NO: 33750 - DNA, 25 bp, Probe sequence
taaacatcaagatgaagatcgctaa

SEQ ID NO: 33751 - DNA, 25 bp, Probe sequence
ataaacatcaagatgaagatcgcta

SEQ ID NO: 33752 - DNA, 25 bp, Probe sequence
gggtcggtactattctgacattaat

SEQ ID NO: 33753 - DNA, 25 bp, Probe sequence
agacatgatccaacacaagatgata

SEQ ID NO: 33754 - DNA, 25 bp, Probe sequence
taagacatgatccaacacaagatga

SEQ ID NO: 33755 - DNA, 25 bp, Probe sequence
aagacatgatccaacacaagatgat

SEQ ID NO: 33756 - DNA, 25 bp, Probe sequence
ttaagacatgatccaacacaagatg

SEQ ID NO: 33757 - DNA, 25 bp, Probe sequence
gacatgatccaacacaagatgatat

SEQ ID NO: 33758 - DNA, 25 bp, Probe sequence
cggtcgatctaatgtaggtaagtct

SEQ ID NO: 33759 - DNA, 25 bp, Probe sequence
ggtcgatctaatgtaggtaagtcta

SEQ ID NO: 33760 - DNA, 25 bp, Probe sequence
aagacacaattagatatggacccag

SEQ ID NO: 33761 - DNA, 25 bp, Probe sequence
tagatatggacccagacgatacaat

SEQ ID NO: 33762 - DNA, 25 bp, Probe sequence
ctgtgatacctaagaagatgacgaa

SEQ ID NO: 33763 - DNA, 25 bp, Probe sequence
aactgtgatacctaagaagatgacg

SEQ ID NO: 33764 - DNA, 25 bp, Probe sequence
actgtgatacctaagaagatgacga

SEQ ID NO: 33765 - DNA, 25 bp, Probe sequence
atcaactacgacattctgctacaag

SEQ ID NO: 33766 - DNA, 25 bp, Probe sequence
acatacggataagatggttgaacaa

SEQ ID NO: 33767 - DNA, 25 bp, Probe sequence
gaacatacggataagatggttgaac

SEQ ID NO: 33768 - DNA, 25 bp, Probe sequence
tgaacatacggataagatggttgaa

SEQ ID NO: 33769 - DNA, 25 bp, Probe sequence
ttgaacatacggataagatggttga

SEQ ID NO: 33770 - DNA, 25 bp, Probe sequence
aacatacggataagatggttgaaca

SEQ ID NO: 33771 - DNA, 25 bp, Probe sequence
atggtattgaagaagtgattaagcg

SEQ ID NO: 33772 - DNA, 25 bp, Probe sequence
taagcgtattcaacaattaggacca

SEQ ID NO: 33773 - DNA, 25 bp, Probe sequence
tatgacgaacaagcattattagcac

SEQ ID NO: 33774 - DNA, 25 bp, Probe sequence
ataagcgtattcaacaattaggacc

SEQ ID NO: 33775 - DNA, 25 bp, Probe sequence
aaccactataagcgtattcaacaat

SEQ ID NO: 33776 - DNA, 25 bp, Probe sequence
aacgaaggtagttattacagcacaa

SEQ ID NO: 33777 - DNA, 25 bp, Probe sequence
aagcgtattcaacaattaggaccaa

SEQ ID NO: 33778 - DNA, 25 bp, Probe sequence
atatgacgaacaagcattattagca

SEQ ID NO: 33779 - DNA, 25 bp, Probe sequence
accactataagcgtattcaacaatt

SEQ ID NO: 33780 - DNA, 25 bp, Probe sequence
gaagttgttgtagaccgattagttg

SEQ ID NO: 33781 - DNA, 25 bp, Probe sequence
agaagttgttgtagaccgattagtt

SEQ ID NO: 33782 - DNA, 25 bp, Probe sequence
agttgttgtagaccgattagttgtt

SEQ ID NO: 33783 - DNA, 25 bp, Probe sequence
aagttgttgtagaccgattagttgt

SEQ ID NO: 33784 - DNA, 25 bp, Probe sequence
tagaagttgttgtagaccgattagt

SEQ ID NO: 33785 - DNA, 25 bp, Probe sequence
gttgttgtagaccgattagttgtta

SEQ ID NO: 33786 - DNA, 25 bp, Probe sequence
attcaattattagcacctgtcatcg

SEQ ID NO: 33787 - DNA, 25 bp, Probe sequence
atgttgaatcattaagtgcctatgc

SEQ ID NO: 33788 - DNA, 25 bp, Probe sequence
cgttatgttgaatcattaagtgcct

SEQ ID NO: 33789 - DNA, 25 bp, Probe sequence
tcctgaagcaatggttaatactgaa

SEQ ID NO: 33790 - DNA, 25 bp, Probe sequence
ttcctgaagcaatggttaatactga

SEQ ID NO: 33791 - DNA, 25 bp, Probe sequence
cgatattcctgaagcaatggttaat

SEQ ID NO: 33792 - DNA, 25 bp, Probe sequence
cctgaagcaatggttaatactgaat

SEQ ID NO: 33793 - DNA, 25 bp, Probe sequence
attcctgaagcaatggttaatactg

SEQ ID NO: 33794 - DNA, 25 bp, Probe sequence
cagttacagttgagccagaagttaa

SEQ ID NO: 33795 - DNA, 25 bp, Probe sequence
acagttacagttgagccagaagtta

SEQ ID NO: 33796 - DNA, 25 bp, Probe sequence
ctgaattagatcgtatggtgtctga

SEQ ID NO: 33797 - DNA, 25 bp, Probe sequence
tatctgatgatgagttacaagaagc

SEQ ID NO: 33798 - DNA, 25 bp, Probe sequence
cagtattaggttggattggtgtgtt

SEQ ID NO: 33799 - DNA, 25 bp, Probe sequence
ttaagtggaggcgttacaacattag

SEQ ID NO: 33800 - DNA, 25 bp, Probe sequence
agaattatggttaccgatccttaca

SEQ ID NO: 33801 - DNA, 25 bp, Probe sequence
taagtggaggcgttacaacattaga

SEQ ID NO: 33802 - DNA, 25 bp, Probe sequence
gaattatggttaccgatccttacaa

SEQ ID NO: 33803 - DNA, 25 bp, Probe sequence
aagtggaggcgttacaacattagat

SEQ ID NO: 33804 - DNA, 25 bp, Probe sequence
ccattattctctccagtattaggtt

SEQ ID NO: 33805 - DNA, 25 bp, Probe sequence
aagaattatggttaccgatccttac

SEQ ID NO: 33806 - DNA, 25 bp, Probe sequence
attatggttaccgatccttacaatt

SEQ ID NO: 33807 - DNA, 25 bp, Probe sequence
tagcaagcaaatctgaaactacatc

SEQ ID NO: 33808 - DNA, 25 bp, Probe sequence
ttagcaagcaaatctgaaactacat

SEQ ID NO: 33809 - DNA, 25 bp, Probe sequence
attagcaagcaaatctgaaactaca

SEQ ID NO: 33810 - DNA, 25 bp, Probe sequence
cgactggtattaaattagcaagcaa

SEQ ID NO: 33811 - DNA, 25 bp, Probe sequence
acgactggtattaaattagcaagca

SEQ ID NO: 33812 - DNA, 25 bp, Probe sequence
tacgactggtattaaattagcaagc

SEQ ID NO: 33813 - DNA, 25 bp, Probe sequence
cgctccttgatacgactggtattaa

SEQ ID NO: 33814 - DNA, 25 bp, Probe sequence
caagcaaatctgaaactacatcaca

SEQ ID NO: 33815 - DNA, 25 bp, Probe sequence
aagcaaatctgaaactacatcacat

SEQ ID NO: 33816 - DNA, 25 bp, Probe sequence
actattaggaacaacggaactatcg

SEQ ID NO: 33817 - DNA, 25 bp, Probe sequence
acaactattaggaacaacggaacta

SEQ ID NO: 33818 - DNA, 25 bp, Probe sequence
tacaactattaggaacaacggaact

SEQ ID NO: 33819 - DNA, 25 bp, Probe sequence
atacaactattaggaacaacggaac

SEQ ID NO: 33820 - DNA, 25 bp, Probe sequence
cacattatgcgtcagatagaataca

SEQ ID NO: 33821 - DNA, 25 bp, Probe sequence
caactattaggaacaacggaactat

SEQ ID NO: 33822 - DNA, 25 bp, Probe sequence
tcacattatgcgtcagatagaatac

SEQ ID NO: 33823 - DNA, 25 bp, Probe sequence
gaacagtcataagagtgaggagtag

SEQ ID NO: 33824 - DNA, 25 bp, Probe sequence
agaacagtcataagagtgaggagta

SEQ ID NO: 33825 - DNA, 25 bp, Probe sequence
ctgaagaagcacaccatattatgaa

SEQ ID NO: 33826 - DNA, 25 bp, Probe sequence
tgaagaagcacaccatattatgaat

SEQ ID NO: 33827 - DNA, 25 bp, Probe sequence
tgaactcactgaagaaatagcaatg

SEQ ID NO: 33828 - DNA, 25 bp, Probe sequence
tgaaatgccgtatgttatatgagac

SEQ ID NO: 33829 - DNA, 25 bp, Probe sequence
gaagcggtagaagtaattcatcaaa

SEQ ID NO: 33830 - DNA, 25 bp, Probe sequence
acaagaatggcattacatcctctta

SEQ ID NO: 33831 - DNA, 25 bp, Probe sequence
tgatgaaatgccgtatgttatatga

SEQ ID NO: 33832 - DNA, 25 bp, Probe sequence
actcactgaagaaatagcaatgatg

SEQ ID NO: 33833 - DNA, 25 bp, Probe sequence
gaactcactgaagaaatagcaatga

SEQ ID NO: 33834 - DNA, 25 bp, Probe sequence
aagtataatccaccgttgtatagca

SEQ ID NO: 33835 - DNA, 25 bp, Probe sequence
tggaattatcattgctgtcggaata

SEQ ID NO: 33836 - DNA, 25 bp, Probe sequence
cgatggtatggaattatcattgctg

SEQ ID NO: 33837 - DNA, 25 bp, Probe sequence
tatggaattatcattgctgtcggaa

SEQ ID NO: 33838 - DNA, 25 bp, Probe sequence
acgatggtatggaattatcattgct

SEQ ID NO: 33839 - DNA, 25 bp, Probe sequence
agtataatccaccgttgtatagcaa

SEQ ID NO: 33840 - DNA, 25 bp, Probe sequence
atggtatggaattatcattgctgtc

SEQ ID NO: 33841 - DNA, 25 bp, Probe sequence
gatggtatggaattatcattgctgt

SEQ ID NO: 33842 - DNA, 25 bp, Probe sequence
atggaattatcattgctgtcggaat

SEQ ID NO: 33843 - DNA, 25 bp, Probe sequence
ggcgagatattagtgtatgaacgat

SEQ ID NO: 33844 - DNA, 25 bp, Probe sequence
atggcgagatattagtgtatgaacg

SEQ ID NO: 33845 - DNA, 25 bp, Probe sequence
caggagcagaatctattaacgaagt

SEQ ID NO: 33846 - DNA, 25 bp, Probe sequence
ttagtgtatgaacgattatctggcg

SEQ ID NO: 33847 - DNA, 25 bp, Probe sequence
gcgagatattagtgtatgaacgatt

SEQ ID NO: 33848 - DNA, 25 bp, Probe sequence
aggagcagaatctattaacgaagta

SEQ ID NO: 33849 - DNA, 25 bp, Probe sequence
gcacagagagaattagaagaagaag

SEQ ID NO: 33850 - DNA, 25 bp, Probe sequence
ccaggagcagaatctattaacgaag

SEQ ID NO: 33851 - DNA, 25 bp, Probe sequence
attagtgtatgaacgattatctggc

SEQ ID NO: 33852 - DNA, 25 bp, Probe sequence
cgcatgaagcattagttgatgaatt

SEQ ID NO: 33853 - DNA, 25 bp, Probe sequence
tatggaccagtgacgataggatcta

SEQ ID NO: 33854 - DNA, 25 bp, Probe sequence
tgattacgattggtagtaacagtgt

SEQ ID NO: 33855 - DNA, 25 bp, Probe sequence
ctgattacgattggtagtaacagtg

SEQ ID NO: 33856 - DNA, 25 bp, Probe sequence
acgcatgaagcattagttgatgaat

SEQ ID NO: 33857 - DNA, 25 bp, Probe sequence
ccagaactgattacgattggtagta

SEQ ID NO: 33858 - DNA, 25 bp, Probe sequence
aactgattacgattggtagtaacag

SEQ ID NO: 33859 - DNA, 25 bp, Probe sequence
gaactgattacgattggtagtaaca

SEQ ID NO: 33860 - DNA, 25 bp, Probe sequence
atggaccagtgacgataggatctaa

SEQ ID NO: 33861 - DNA, 25 bp, Probe sequence
aagcaacaagtaatgaaatcaggtc

SEQ ID NO: 33862 - DNA, 25 bp, Probe sequence
taagcaacaagtaatgaaatcaggt

SEQ ID NO: 33863 - DNA, 25 bp, Probe sequence
ttaaaggtggaacagtaacaagagc

SEQ ID NO: 33864 - DNA, 25 bp, Probe sequence
gcaacaagtaatgaaatcaggtcaa

SEQ ID NO: 33865 - DNA, 25 bp, Probe sequence
ctaagcaacaagtaatgaaatcagg

SEQ ID NO: 33866 - DNA, 25 bp, Probe sequence
agcaacaagtaatgaaatcaggtca

SEQ ID NO: 33867 - DNA, 25 bp, Probe sequence
gctaagcaacaagtaatgaaatcag

SEQ ID NO: 33868 - DNA, 25 bp, Probe sequence
caacaagtaatgaaatcaggtcaat

SEQ ID NO: 33869 - DNA, 25 bp, Probe sequence
gttaaaggtggaacagtaacaagag

SEQ ID NO: 33870 - DNA, 25 bp, Probe sequence
cgacgaccaagattatagagatgaa

SEQ ID NO: 33871 - DNA, 25 bp, Probe sequence
tagcgacgaccaagattatagagat

SEQ ID NO: 33872 - DNA, 25 bp, Probe sequence
attatgttattgttagcgacgacca

SEQ ID NO: 33873 - DNA, 25 bp, Probe sequence
aattatgttattgttagcgacgacc

SEQ ID NO: 33874 - DNA, 25 bp, Probe sequence
ttagcgacgaccaagattatagaga

SEQ ID NO: 33875 - DNA, 25 bp, Probe sequence
gttagcgacgaccaagattatagag

SEQ ID NO: 33876 - DNA, 25 bp, Probe sequence
tacatcaaccacaagaagttcaaga

SEQ ID NO: 33877 - DNA, 25 bp, Probe sequence
ttacatcaaccacaagaagttcaag

SEQ ID NO: 33878 - DNA, 25 bp, Probe sequence
cttacatcaaccacaagaagttcaa

SEQ ID NO: 33879 - DNA, 25 bp, Probe sequence
ctttcacatctcacttattcgcaaa

SEQ ID NO: 33880 - DNA, 25 bp, Probe sequence
tttcacatctcacttattcgcaaac

SEQ ID NO: 33881 - DNA, 25 bp, Probe sequence
ttattcgcaaacaagagcactaaac

SEQ ID NO: 33882 - DNA, 25 bp, Probe sequence
cttattcgcaaacaagagcactaaa

SEQ ID NO: 33883 - DNA, 25 bp, Probe sequence
tcacatctcacttattcgcaaacaa

SEQ ID NO: 33884 - DNA, 25 bp, Probe sequence
ttcacatctcacttattcgcaaaca

SEQ ID NO: 33885 - DNA, 25 bp, Probe sequence
cacatctcacttattcgcaaacaag

SEQ ID NO: 33886 - DNA, 25 bp, Probe sequence
tattcgcaaacaagagcactaaaca

SEQ ID NO: 33887 - DNA, 25 bp, Probe sequence
acatctcacttattcgcaaacaaga

SEQ ID NO: 33888 - DNA, 25 bp, Probe sequence
tggctaatacagaagaagtagagaa

SEQ ID NO: 33889 - DNA, 25 bp, Probe sequence
ggctaatacagaagaagtagagaac

SEQ ID NO: 33890 - DNA, 25 bp, Probe sequence
atggctaatacagaagaagtagaga

SEQ ID NO: 33891 - DNA, 25 bp, Probe sequence
aatggctaatacagaagaagtagag

SEQ ID NO: 33892 - DNA, 25 bp, Probe sequence
ggtgtaagttattgtgcagtatgtg

SEQ ID NO: 33893 - DNA, 25 bp, Probe sequence
gtgtaagttattgtgcagtatgtga

SEQ ID NO: 33894 - DNA, 25 bp, Probe sequence
ggtcaaatggctaatacagaagaag

SEQ ID NO: 33895 - DNA, 25 bp, Probe sequence
gctaatacagaagaagtagagaact

SEQ ID NO: 33896 - DNA, 25 bp, Probe sequence
aagttattgtgcagtatgtgatggt

SEQ ID NO: 33897 - DNA, 25 bp, Probe sequence
attacgcataaggaaattggtcaac

SEQ ID NO: 33898 - DNA, 25 bp, Probe sequence
cattacgcataaggaaattggtcaa

SEQ ID NO: 33899 - DNA, 25 bp, Probe sequence
aaagtatctattcgtttcagagggc

SEQ ID NO: 33900 - DNA, 25 bp, Probe sequence
caaattggtgttaaatcaaagcgtg

SEQ ID NO: 33901 - DNA, 25 bp, Probe sequence
aattggtgttaaatcaaagcgtgaa

SEQ ID NO: 33902 - DNA, 25 bp, Probe sequence
aaattggtgttaaatcaaagcgtga

SEQ ID NO: 33903 - DNA, 25 bp, Probe sequence
attggtgttaaatcaaagcgtgaag

SEQ ID NO: 33904 - DNA, 25 bp, Probe sequence
acaaattggtgttaaatcaaagcgt

SEQ ID NO: 33905 - DNA, 25 bp, Probe sequence
atggattacggtaaattcaaattcg

SEQ ID NO: 33906 - DNA, 25 bp, Probe sequence
tagcattagcagaacgactaggtaa

SEQ ID NO: 33907 - DNA, 25 bp, Probe sequence
gcattagcagaacgactaggtaatt

SEQ ID NO: 33908 - DNA, 25 bp, Probe sequence
gtagcattagcagaacgactaggta

SEQ ID NO: 33909 - DNA, 25 bp, Probe sequence
attagtaattgccatcggttgtacg

SEQ ID NO: 33910 - DNA, 25 bp, Probe sequence
agcattagcagaacgactaggtaat

SEQ ID NO: 33911 - DNA, 25 bp, Probe sequence
aattagtaattgccatcggttgtac

SEQ ID NO: 33912 - DNA, 25 bp, Probe sequence
tcgtcgatactatgaagatgaagag

SEQ ID NO: 33913 - DNA, 25 bp, Probe sequence
agcagaacgactaggtaattatcta

SEQ ID NO: 33914 - DNA, 25 bp, Probe sequence
tagcagaacgactaggtaattatct

SEQ ID NO: 33915 - DNA, 25 bp, Probe sequence
agtgaatactggttggcattgataa

SEQ ID NO: 33916 - DNA, 25 bp, Probe sequence
aagtgaatactggttggcattgata

SEQ ID NO: 33917 - DNA, 25 bp, Probe sequence
actgtagcagcagatattacgattg

SEQ ID NO: 33918 - DNA, 25 bp, Probe sequence
tgtaacttctggtggagcaattcat

SEQ ID NO: 33919 - DNA, 25 bp, Probe sequence
ttaataggatacgcaattatcggaa

SEQ ID NO: 33920 - DNA, 25 bp, Probe sequence
gtaacttctggtggagcaattcatg

SEQ ID NO: 33921 - DNA, 25 bp, Probe sequence
gtgaatactggttggcattgataaa

SEQ ID NO: 33922 - DNA, 25 bp, Probe sequence
ggatacgcaattatcggaataatgg

SEQ ID NO: 33923 - DNA, 25 bp, Probe sequence
gatacgcaattatcggaataatggt

SEQ ID NO: 33924 - DNA, 25 bp, Probe sequence
attagcggtcactcattaggtaatt

SEQ ID NO: 33925 - DNA, 25 bp, Probe sequence
aattagcggtcactcattaggtaat

SEQ ID NO: 33926 - DNA, 25 bp, Probe sequence
ccagttgaagttaataaggctgaac

SEQ ID NO: 33927 - DNA, 25 bp, Probe sequence
attgtaacagttgctgataatggtg

SEQ ID NO: 33928 - DNA, 25 bp, Probe sequence
accagttgaagttaataaggctgaa

SEQ ID NO: 33929 - DNA, 25 bp, Probe sequence
aaccagttgaagttaataaggctga

SEQ ID NO: 33930 - DNA, 25 bp, Probe sequence
gattgtaacagttgctgataatggt

SEQ ID NO: 33931 - DNA, 25 bp, Probe sequence
cgattgtaacagttgctgataatgg

SEQ ID NO: 33932 - DNA, 25 bp, Probe sequence
gcgattgtaacagttgctgataatg

SEQ ID NO: 33933 - DNA, 25 bp, Probe sequence
cgtgtaagtattgatgaccgtaatg

SEQ ID NO: 33934 - DNA, 25 bp, Probe sequence
tcgtgtaagtattgatgaccgtaat

SEQ ID NO: 33935 - DNA, 25 bp, Probe sequence
ttcgtgtaagtattgatgaccgtaa

SEQ ID NO: 33936 - DNA, 25 bp, Probe sequence
gttgttattcatcgtggtgttgtat

SEQ ID NO: 33937 - DNA, 25 bp, Probe sequence
catcatcgtccagttgttattcatc

SEQ ID NO: 33938 - DNA, 25 bp, Probe sequence
agtgaagaagcgttagaggtattac

SEQ ID NO: 33939 - DNA, 25 bp, Probe sequence
gtagtgaagaagcgttagaggtatt

SEQ ID NO: 33940 - DNA, 25 bp, Probe sequence
ttgttattcatcgtggtgttgtatc

SEQ ID NO: 33941 - DNA, 25 bp, Probe sequence
gaagagacattatcaacagcacaac

SEQ ID NO: 33942 - DNA, 25 bp, Probe sequence
caggttgagagagattgctagaatt

SEQ ID NO: 33943 - DNA, 25 bp, Probe sequence
acaggttgagagagattgctagaat

SEQ ID NO: 33944 - DNA, 25 bp, Probe sequence
gacaggttgagagagattgctagaa

SEQ ID NO: 33945 - DNA, 25 bp, Probe sequence
tgtaagagatatgcgtaattctgtt

SEQ ID NO: 33946 - DNA, 25 bp, Probe sequence
ttgtaagagatatgcgtaattctgt

SEQ ID NO: 33947 - DNA, 25 bp, Probe sequence
agacaggttgagagagattgctaga

SEQ ID NO: 33948 - DNA, 25 bp, Probe sequence
cagacaggttgagagagattgctag

SEQ ID NO: 33949 - DNA, 25 bp, Probe sequence
gccgataagattagaaatggtgaac

SEQ ID NO: 33950 - DNA, 25 bp, Probe sequence
agccgataagattagaaatggtgaa

SEQ ID NO: 33951 - DNA, 25 bp, Probe sequence
caagaccgttatcttaagcagagat

SEQ ID NO: 33952 - DNA, 25 bp, Probe sequence
atcaagaccgttatcttaagcagag

SEQ ID NO: 33953 - DNA, 25 bp, Probe sequence
gatcaagaccgttatcttaagcaga

SEQ ID NO: 33954 - DNA, 25 bp, Probe sequence
tcaagaccgttatcttaagcagaga

SEQ ID NO: 33955 - DNA, 25 bp, Probe sequence
ggatcaagaccgttatcttaagcag

SEQ ID NO: 33956 - DNA, 25 bp, Probe sequence
tttgtaatgaatacccggatcaaga

SEQ ID NO: 33957 - DNA, 25 bp, Probe sequence
ttgtaatgaatacccggatcaagac

SEQ ID NO: 33958 - DNA, 25 bp, Probe sequence
atttgtaatgaatacccggatcaag

SEQ ID NO: 33959 - DNA, 25 bp, Probe sequence
aagaccgttatcttaagcagagata

SEQ ID NO: 33960 - DNA, 25 bp, Probe sequence
tggcttaattgatgaagtgatggta

SEQ ID NO: 33961 - DNA, 25 bp, Probe sequence
atggcttaattgatgaagtgatggt

SEQ ID NO: 33962 - DNA, 25 bp, Probe sequence
tatggcttaattgatgaagtgatgg

SEQ ID NO: 33963 - DNA, 25 bp, Probe sequence
ggcttaattgatgaagtgatggtac

SEQ ID NO: 33964 - DNA, 25 bp, Probe sequence
gcagaagtaatgattcaccaaccat

SEQ ID NO: 33965 - DNA, 25 bp, Probe sequence
cagatcgtgataacttcttaactgc

SEQ ID NO: 33966 - DNA, 25 bp, Probe sequence
agacacagatcgtgataacttctta

SEQ ID NO: 33967 - DNA, 25 bp, Probe sequence
acagatcgtgataacttcttaactg

SEQ ID NO: 33968 - DNA, 25 bp, Probe sequence
atatggcttaattgatgaagtgatg

SEQ ID NO: 33969 - DNA, 25 bp, Probe sequence
aacgaatgctatgattgatgaagac

SEQ ID NO: 33970 - DNA, 25 bp, Probe sequence
acgaatgctatgattgatgaagact

SEQ ID NO: 33971 - DNA, 25 bp, Probe sequence
cgaatgctatgattgatgaagactt

SEQ ID NO: 33972 - DNA, 25 bp, Probe sequence
gctgaattaacgaatgctatgattg

SEQ ID NO: 33973 - DNA, 25 bp, Probe sequence
taacgaatgctatgattgatgaaga

SEQ ID NO: 33974 - DNA, 25 bp, Probe sequence
tgtgcctgagttatatgttgataat

SEQ ID NO: 33975 - DNA, 25 bp, Probe sequence
atgtgcctgagttatatgttgataa

SEQ ID NO: 33976 - DNA, 25 bp, Probe sequence
ttaacgaatgctatgattgatgaag

SEQ ID NO: 33977 - DNA, 25 bp, Probe sequence
ctgaattaacgaatgctatgattga

SEQ ID NO: 33978 - DNA, 25 bp, Probe sequence
gccacagcagaatcaatatcaatat

SEQ ID NO: 33979 - DNA, 25 bp, Probe sequence
ggtattgctattactcggaggatta

SEQ ID NO: 33980 - DNA, 25 bp, Probe sequence
atcaatatcaatatgtgccacctca

SEQ ID NO: 33981 - DNA, 25 bp, Probe sequence
tcaatatcaatatgtgccacctcag

SEQ ID NO: 33982 - DNA, 25 bp, Probe sequence
aatcaatatcaatatgtgccacctc

SEQ ID NO: 33983 - DNA, 25 bp, Probe sequence
gaatcaatatcaatatgtgccacct

SEQ ID NO: 33984 - DNA, 25 bp, Probe sequence
agaatcaatatcaatatgtgccacc

SEQ ID NO: 33985 - DNA, 25 bp, Probe sequence
gtattgctattactcggaggattag

SEQ ID NO: 33986 - DNA, 25 bp, Probe sequence
ccacagcagaatcaatatcaatatg

SEQ ID NO: 33987 - DNA, 25 bp, Probe sequence
atatgcgattcctgaagtattgtca

SEQ ID NO: 33988 - DNA, 25 bp, Probe sequence
acaatatgatgatataggtgcgtca

SEQ ID NO: 33989 - DNA, 25 bp, Probe sequence
ttaggtcatccattaggtgctacag

SEQ ID NO: 33990 - DNA, 25 bp, Probe sequence
atcaagatgcttatgctgtcagaag

SEQ ID NO: 33991 - DNA, 25 bp, Probe sequence
tatgcgattcctgaagtattgtcac

SEQ ID NO: 33992 - DNA, 25 bp, Probe sequence
tacaatatgatgatataggtgcgtc

SEQ ID NO: 33993 - DNA, 25 bp, Probe sequence
tcagcaatctatctgttgaagacat

SEQ ID NO: 33994 - DNA, 25 bp, Probe sequence
tgattgaagatgtcattgttggtac

SEQ ID NO: 33995 - DNA, 25 bp, Probe sequence
cagcaatctatctgttgaagacatt

SEQ ID NO: 33996 - DNA, 25 bp, Probe sequence
attgttgttagagccatcagtcata

SEQ ID NO: 33997 - DNA, 25 bp, Probe sequence
ttgttgttagagccatcagtcataa

SEQ ID NO: 33998 - DNA, 25 bp, Probe sequence
ttgttcctggtgatgctgataatag

SEQ ID NO: 33999 - DNA, 25 bp, Probe sequence
gttgttcctggtgatgctgataata

SEQ ID NO: 34000 - DNA, 25 bp, Probe sequence
cattgttgttagagccatcagtcat

SEQ ID NO: 34001 - DNA, 25 bp, Probe sequence
cgacgatgtatgtacctgataatgt

SEQ ID NO: 34002 - DNA, 25 bp, Probe sequence
acgacgatgtatgtacctgataatg

SEQ ID NO: 34003 - DNA, 25 bp, Probe sequence
ataatgtattcttcgtaccagccag

SEQ ID NO: 34004 - DNA, 25 bp, Probe sequence
tataatgtattcttcgtaccagcca

SEQ ID NO: 34005 - DNA, 25 bp, Probe sequence
atacttaatggacttgtgcgttctt

SEQ ID NO: 34006 - DNA, 25 bp, Probe sequence
tacttaatggacttgtgcgttcttg

SEQ ID NO: 34007 - DNA, 25 bp, Probe sequence
gttgaatggcaattacgagatgaag

SEQ ID NO: 34008 - DNA, 25 bp, Probe sequence
ttgaatggcaattacgagatgaagg

SEQ ID NO: 34009 - DNA, 25 bp, Probe sequence
gaatggcaattacgagatgaaggtc

SEQ ID NO: 34010 - DNA, 25 bp, Probe sequence
ggttgaatggcaattacgagatgaa

SEQ ID NO: 34011 - DNA, 25 bp, Probe sequence
aaggttgaatggcaattacgagatg

SEQ ID NO: 34012 - DNA, 25 bp, Probe sequence
caaggttgaatggcaattacgagat

SEQ ID NO: 34013 - DNA, 25 bp, Probe sequence
cgaagttagtcagcttatagttgtg

SEQ ID NO: 34014 - DNA, 25 bp, Probe sequence
aacaatcgtattcaacactaaccac

SEQ ID NO: 34015 - DNA, 25 bp, Probe sequence
aatcgtattcaacactaaccaccaa

SEQ ID NO: 34016 - DNA, 25 bp, Probe sequence
gaaggtcttgaagttgtagcagtaa

SEQ ID NO: 34017 - DNA, 25 bp, Probe sequence
atcgtattcaacactaaccaccaag

SEQ ID NO: 34018 - DNA, 25 bp, Probe sequence
aagtagaaggtcttgaagttgtagc

SEQ ID NO: 34019 - DNA, 25 bp, Probe sequence
caatcgtattcaacactaaccacca

SEQ ID NO: 34020 - DNA, 25 bp, Probe sequence
acaatcgtattcaacactaaccacc

SEQ ID NO: 34021 - DNA, 25 bp, Probe sequence
agaagtagaaggtcttgaagttgta

SEQ ID NO: 34022 - DNA, 25 bp, Probe sequence
tattcaacactaaccaccaagagtt

SEQ ID NO: 34023 - DNA, 25 bp, Probe sequence
agcattattcctacttctactggtg

SEQ ID NO: 34024 - DNA, 25 bp, Probe sequence
cattattcctacttctactggtgcg

SEQ ID NO: 34025 - DNA, 25 bp, Probe sequence
aagcattattcctacttctactggt

SEQ ID NO: 34026 - DNA, 25 bp, Probe sequence
atgactactgttcacgctattacaa

SEQ ID NO: 34027 - DNA, 25 bp, Probe sequence
aatgactactgttcacgctattaca

SEQ ID NO: 34028 - DNA, 25 bp, Probe sequence
attattcctacttctactggtgcgg

SEQ ID NO: 34029 - DNA, 25 bp, Probe sequence
taatgactactgttcacgctattac

SEQ ID NO: 34030 - DNA, 25 bp, Probe sequence
gtagaattggaagaatggtattacg

SEQ ID NO: 34031 - DNA, 25 bp, Probe sequence
ttaatgactactgttcacgctatta

SEQ ID NO: 34032 - DNA, 25 bp, Probe sequence
cactgttgtatggaatggacctatg

SEQ ID NO: 34033 - DNA, 25 bp, Probe sequence
attactaatgacaaccgtatcgttc

SEQ ID NO: 34034 - DNA, 25 bp, Probe sequence
tactaatgacaaccgtatcgttcaa

SEQ ID NO: 34035 - DNA, 25 bp, Probe sequence
ttactaatgacaaccgtatcgttca

SEQ ID NO: 34036 - DNA, 25 bp, Probe sequence
tgtagtaccatctgattcaattcca

SEQ ID NO: 34037 - DNA, 25 bp, Probe sequence
ctgtagtaccatctgattcaattcc

SEQ ID NO: 34038 - DNA, 25 bp, Probe sequence
aattactaatgacaaccgtatcgtt

SEQ ID NO: 34039 - DNA, 25 bp, Probe sequence
actaatgacaaccgtatcgttcaag

SEQ ID NO: 34040 - DNA, 25 bp, Probe sequence
actgttgtatggaatggacctatgg

SEQ ID NO: 34041 - DNA, 25 bp, Probe sequence
aatggtgagatgaatcgtcgttata

SEQ ID NO: 34042 - DNA, 25 bp, Probe sequence
atggtgagatgaatcgtcgttatat

SEQ ID NO: 34043 - DNA, 25 bp, Probe sequence
tggtgagatgaatcgtcgttatatg

SEQ ID NO: 34044 - DNA, 25 bp, Probe sequence
cgtgcgagatattatggaagaagaa

SEQ ID NO: 34045 - DNA, 25 bp, Probe sequence
tgagagattgttagaagaagaaggt

SEQ ID NO: 34046 - DNA, 25 bp, Probe sequence
aatgctatcatacatcctatcgtgc

SEQ ID NO: 34047 - DNA, 25 bp, Probe sequence
ggtgagatgaatcgtcgttatatgg

SEQ ID NO: 34048 - DNA, 25 bp, Probe sequence
accttgagagattgttagaagaaga

SEQ ID NO: 34049 - DNA, 25 bp, Probe sequence
caacagtatcagaactcttatccgt

SEQ ID NO: 34050 - DNA, 25 bp, Probe sequence
tcgtattcaatatggtggtagtgtt

SEQ ID NO: 34051 - DNA, 25 bp, Probe sequence
ctcgtattcaatatggtggtagtgt

SEQ ID NO: 34052 - DNA, 25 bp, Probe sequence
atgttgtaggtgagcaagttaagaa

SEQ ID NO: 34053 - DNA, 25 bp, Probe sequence
actcgtattcaatatggtggtagtg

SEQ ID NO: 34054 - DNA, 25 bp, Probe sequence
gatgttgtaggtgagcaagttaaga

SEQ ID NO: 34055 - DNA, 25 bp, Probe sequence
aactcgtattcaatatggtggtagt

SEQ ID NO: 34056 - DNA, 25 bp, Probe sequence
cgtattcaatatggtggtagtgtta

SEQ ID NO: 34057 - DNA, 25 bp, Probe sequence
cgatgttgtaggtgagcaagttaag

SEQ ID NO: 34058 - DNA, 25 bp, Probe sequence
acgatgttgtaggtgagcaagttaa

SEQ ID NO: 34059 - DNA, 25 bp, Probe sequence
cgtctgtagcatcttatccttcatt

SEQ ID NO: 34060 - DNA, 25 bp, Probe sequence
agacttaacacaccaacaacaagaa

SEQ ID NO: 34061 - DNA, 25 bp, Probe sequence
aagacttaacacaccaacaacaaga

SEQ ID NO: 34062 - DNA, 25 bp, Probe sequence
tacctaattatcgtaagcattggca

SEQ ID NO: 34063 - DNA, 25 bp, Probe sequence
ttatcgtaagcattggcatgttatt

SEQ ID NO: 34064 - DNA, 25 bp, Probe sequence
aattatcgtaagcattggcatgtta

SEQ ID NO: 34065 - DNA, 25 bp, Probe sequence
acctaattatcgtaagcattggcat

SEQ ID NO: 34066 - DNA, 25 bp, Probe sequence
attatcgtaagcattggcatgttat

SEQ ID NO: 34067 - DNA, 25 bp, Probe sequence
ctaattatcgtaagcattggcatgt

SEQ ID NO: 34068 - DNA, 25 bp, Probe sequence
cttagatgttggactacctgaagga

SEQ ID NO: 34069 - DNA, 25 bp, Probe sequence
ttagatgttggactacctgaaggac

SEQ ID NO: 34070 - DNA, 25 bp, Probe sequence
aattcgtagtaccattcatcgttga

SEQ ID NO: 34071 - DNA, 25 bp, Probe sequence
attcgtagtaccattcatcgttgag

SEQ ID NO: 34072 - DNA, 25 bp, Probe sequence
tgatatggttggacatagtggtatg

SEQ ID NO: 34073 - DNA, 25 bp, Probe sequence
ctgatatggttggacatagtggtat

SEQ ID NO: 34074 - DNA, 25 bp, Probe sequence
aattcacatgattcagcgttacaca

SEQ ID NO: 34075 - DNA, 25 bp, Probe sequence
attcacatgattcagcgttacacat

SEQ ID NO: 34076 - DNA, 25 bp, Probe sequence
gatatggttggacatagtggtatgc

SEQ ID NO: 34077 - DNA, 25 bp, Probe sequence
cgacgctatattcctgatattacga

SEQ ID NO: 34078 - DNA, 25 bp, Probe sequence
ttagcacacattacacaagatgaga

SEQ ID NO: 34079 - DNA, 25 bp, Probe sequence
gaggcagatgatattatcggaactt

SEQ ID NO: 34080 - DNA, 25 bp, Probe sequence
atgaggcagatgatattatcggaac

SEQ ID NO: 34081 - DNA, 25 bp, Probe sequence
actatgaggcagatgatattatcgg

SEQ ID NO: 34082 - DNA, 25 bp, Probe sequence
tagcacacattacacaagatgagag

SEQ ID NO: 34083 - DNA, 25 bp, Probe sequence
attagcacacattacacaagatgag

SEQ ID NO: 34084 - DNA, 25 bp, Probe sequence
cagtctacttatgttgaaggattgc

SEQ ID NO: 34085 - DNA, 25 bp, Probe sequence
ctatgaggcagatgatattatcgga

SEQ ID NO: 34086 - DNA, 25 bp, Probe sequence
taagcagttaccagtaccaatgatg

SEQ ID NO: 34087 - DNA, 25 bp, Probe sequence
agttaccagtaccaatgatgaacat

SEQ ID NO: 34088 - DNA, 25 bp, Probe sequence
gttaccagtaccaatgatgaacatc

SEQ ID NO: 34089 - DNA, 25 bp, Probe sequence
cagttaccagtaccaatgatgaaca

SEQ ID NO: 34090 - DNA, 25 bp, Probe sequence
cagtaccaatgatgaacatcgttaa

SEQ ID NO: 34091 - DNA, 25 bp, Probe sequence
ttaccagtaccaatgatgaacatcg

SEQ ID NO: 34092 - DNA, 25 bp, Probe sequence
caatgatgaacatcgttaatggtgg

SEQ ID NO: 34093 - DNA, 25 bp, Probe sequence
ccagtaccaatgatgaacatcgtta

SEQ ID NO: 34094 - DNA, 25 bp, Probe sequence
atgatgaacatcgttaatggtggtt

SEQ ID NO: 34095 - DNA, 25 bp, Probe sequence
atcacttaatggtcgctatatcgga

SEQ ID NO: 34096 - DNA, 25 bp, Probe sequence
tcacttaatggtcgctatatcggaa

SEQ ID NO: 34097 - DNA, 25 bp, Probe sequence
catcacttaatggtcgctatatcgg

SEQ ID NO: 34098 - DNA, 25 bp, Probe sequence
aatacagatattggattggttggtt

SEQ ID NO: 34099 - DNA, 25 bp, Probe sequence
gcatcacttaatggtcgctatatcg

SEQ ID NO: 34100 - DNA, 25 bp, Probe sequence
aacaattcaattacacaagacaact

SEQ ID NO: 34101 - DNA, 25 bp, Probe sequence
acaattcaattacacaagacaactt

SEQ ID NO: 34102 - DNA, 25 bp, Probe sequence
ttatctactgcttagaagtgatcgg

SEQ ID NO: 34103 - DNA, 25 bp, Probe sequence
tctactgcttagaagtgatcggtat

SEQ ID NO: 34104 - DNA, 25 bp, Probe sequence
acttatgtgtggtggtttatgtttg

SEQ ID NO: 34105 - DNA, 25 bp, Probe sequence
ttattataggttcggttgcattagc

SEQ ID NO: 34106 - DNA, 25 bp, Probe sequence
ttactttgtttcgttggataatgcg

SEQ ID NO: 34107 - DNA, 25 bp, Probe sequence
tattataggttcggttgcattagcg

SEQ ID NO: 34108 - DNA, 25 bp, Probe sequence
cttatgtgtggtggtttatgtttgc

SEQ ID NO: 34109 - DNA, 25 bp, Probe sequence
tacttatgtgtggtggtttatgttt

SEQ ID NO: 34110 - DNA, 25 bp, Probe sequence
tggctgatagaacgaataaagaaat

SEQ ID NO: 34111 - DNA, 25 bp, Probe sequence
atggctgatagaacgaataaagaaa

SEQ ID NO: 34112 - DNA, 25 bp, Probe sequence
cttatctagcaggcttcatcacttt

SEQ ID NO: 34113 - DNA, 25 bp, Probe sequence
cattattattcacgcttccatcaca

SEQ ID NO: 34114 - DNA, 25 bp, Probe sequence
taggcattattattcacgcttccat

SEQ ID NO: 34115 - DNA, 25 bp, Probe sequence
attaggcattattattcacgcttcc

SEQ ID NO: 34116 - DNA, 25 bp, Probe sequence
ttaggcattattattcacgcttcca

SEQ ID NO: 34117 - DNA, 25 bp, Probe sequence
caccaccgcttaatgttattgataa

SEQ ID NO: 34118 - DNA, 25 bp, Probe sequence
acattaggcattattattcacgctt

SEQ ID NO: 34119 - DNA, 25 bp, Probe sequence
gcattattattcacgcttccatcac

SEQ ID NO: 34120 - DNA, 25 bp, Probe sequence
attattattcacgcttccatcacat

SEQ ID NO: 34121 - DNA, 25 bp, Probe sequence
aacagttcaacatctcgcataatat

SEQ ID NO: 34122 - DNA, 25 bp, Probe sequence
ctgttgtactactccaagaaggtaa

SEQ ID NO: 34123 - DNA, 25 bp, Probe sequence
taactgttgtactactccaagaagg

SEQ ID NO: 34124 - DNA, 25 bp, Probe sequence
actgttgtactactccaagaaggta

SEQ ID NO: 34125 - DNA, 25 bp, Probe sequence
aactgttgtactactccaagaaggt

SEQ ID NO: 34126 - DNA, 25 bp, Probe sequence
ataactgttgtactactccaagaag

SEQ ID NO: 34127 - DNA, 25 bp, Probe sequence
aataactgttgtactactccaagaa

SEQ ID NO: 34128 - DNA, 25 bp, Probe sequence
gcattaataactgttgtactactcc

SEQ ID NO: 34129 - DNA, 25 bp, Probe sequence
ataaggaacggaggacaatttatgc

SEQ ID NO: 34130 - DNA, 25 bp, Probe sequence
tataaggaacggaggacaatttatg

SEQ ID NO: 34131 - DNA, 25 bp, Probe sequence
taggtgccgatgactatatgactaa

SEQ ID NO: 34132 - DNA, 25 bp, Probe sequence
ttaggtgccgatgactatatgacta

SEQ ID NO: 34133 - DNA, 25 bp, Probe sequence
gaattaggtgccgatgactatatga

SEQ ID NO: 34134 - DNA, 25 bp, Probe sequence
agaattaggtgccgatgactatatg

SEQ ID NO: 34135 - DNA, 25 bp, Probe sequence
aattaggtgccgatgactatatgac

SEQ ID NO: 34136 - DNA, 25 bp, Probe sequence
attaggtgccgatgactatatgact

SEQ ID NO: 34137 - DNA, 25 bp, Probe sequence
ttagaattaggtgccgatgactata

SEQ ID NO: 34138 - DNA, 25 bp, Probe sequence
tggtagtagatgacgaacattcaat

SEQ ID NO: 34139 - DNA, 25 bp, Probe sequence
ttggtagtagatgacgaacattcaa

SEQ ID NO: 34140 - DNA, 25 bp, Probe sequence
gagttatagatgctgctgttgagaa

SEQ ID NO: 34141 - DNA, 25 bp, Probe sequence
cggcagataagattacagattcaat

SEQ ID NO: 34142 - DNA, 25 bp, Probe sequence
aagcggcagataagattacagattc

SEQ ID NO: 34143 - DNA, 25 bp, Probe sequence
gaagcggcagataagattacagatt

SEQ ID NO: 34144 - DNA, 25 bp, Probe sequence
gcggcagataagattacagattcaa

SEQ ID NO: 34145 - DNA, 25 bp, Probe sequence
tagcaactatgaacttgaatggtga

SEQ ID NO: 34146 - DNA, 25 bp, Probe sequence
gtagcaactatgaacttgaatggtg

SEQ ID NO: 34147 - DNA, 25 bp, Probe sequence
tgtagcaactatgaacttgaatggt

SEQ ID NO: 34148 - DNA, 25 bp, Probe sequence
ttgtagcaactatgaacttgaatgg

SEQ ID NO: 34149 - DNA, 25 bp, Probe sequence
agaattggtgacacagttaaggtta

SEQ ID NO: 34150 - DNA, 25 bp, Probe sequence
tagaattggtgacacagttaaggtt

SEQ ID NO: 34151 - DNA, 25 bp, Probe sequence
ttagaattggtgacacagttaaggt

SEQ ID NO: 34152 - DNA, 25 bp, Probe sequence
cgaagatattcatccaacaacactt

SEQ ID NO: 34153 - DNA, 25 bp, Probe sequence
gaattggtgacacagttaaggttaa

SEQ ID NO: 34154 - DNA, 25 bp, Probe sequence
agatattcatccaacaacacttcaa

SEQ ID NO: 34155 - DNA, 25 bp, Probe sequence
aagatattcatccaacaacacttca

SEQ ID NO: 34156 - DNA, 25 bp, Probe sequence
tcaacctgaatatgaacctatgtca

SEQ ID NO: 34157 - DNA, 25 bp, Probe sequence
gcgaagatattcatccaacaacact

SEQ ID NO: 34158 - DNA, 25 bp, Probe sequence
aagtagcatcattagttacagcgtt

SEQ ID NO: 34159 - DNA, 25 bp, Probe sequence
atatgtactcaggtattgtagcagc

SEQ ID NO: 34160 - DNA, 25 bp, Probe sequence
caagttatgacgatgttatctgaga

SEQ ID NO: 34161 - DNA, 25 bp, Probe sequence
tgtcagatatgtactcaggtattgt

SEQ ID NO: 34162 - DNA, 25 bp, Probe sequence
ttatgacgatgttatctgagattgg

SEQ ID NO: 34163 - DNA, 25 bp, Probe sequence
agatatgtactcaggtattgtagca

SEQ ID NO: 34164 - DNA, 25 bp, Probe sequence
acaagttatgacgatgttatctgag

SEQ ID NO: 34165 - DNA, 25 bp, Probe sequence
gatatgtactcaggtattgtagcag

SEQ ID NO: 34166 - DNA, 25 bp, Probe sequence
cagatatgtactcaggtattgtagc

SEQ ID NO: 34167 - DNA, 25 bp, Probe sequence
gtcacgattcattgttagattctgt

SEQ ID NO: 34168 - DNA, 25 bp, Probe sequence
tgtcacgattcattgttagattctg

SEQ ID NO: 34169 - DNA, 25 bp, Probe sequence
gttagagtatatgaatcctggaggc

SEQ ID NO: 34170 - DNA, 25 bp, Probe sequence
ttagagtatatgaatcctggaggca

SEQ ID NO: 34171 - DNA, 25 bp, Probe sequence
acgattcattgttagattctgtagg

SEQ ID NO: 34172 - DNA, 25 bp, Probe sequence
atgtcacgattcattgttagattct

SEQ ID NO: 34173 - DNA, 25 bp, Probe sequence
gaactgttagccactattgacgatg

SEQ ID NO: 34174 - DNA, 25 bp, Probe sequence
agttagagtatatgaatcctggagg

SEQ ID NO: 34175 - DNA, 25 bp, Probe sequence
cctatggttcaacttcatcaactat

SEQ ID NO: 34176 - DNA, 25 bp, Probe sequence
caagattatgtacctgtatcgcaac

SEQ ID NO: 34177 - DNA, 25 bp, Probe sequence
ttaacgagaaggatcaagaacgatt

SEQ ID NO: 34178 - DNA, 25 bp, Probe sequence
aagattatgtacctgtatcgcaacc

SEQ ID NO: 34179 - DNA, 25 bp, Probe sequence
taacgagaaggatcaagaacgattc

SEQ ID NO: 34180 - DNA, 25 bp, Probe sequence
actatattccgaatcctagacatca

SEQ ID NO: 34181 - DNA, 25 bp, Probe sequence
acaagattatgtacctgtatcgcaa

SEQ ID NO: 34182 - DNA, 25 bp, Probe sequence
aacaagattatgtacctgtatcgca

SEQ ID NO: 34183 - DNA, 25 bp, Probe sequence
gattatgtacctgtatcgcaaccac

SEQ ID NO: 34184 - DNA, 25 bp, Probe sequence
agattatgtacctgtatcgcaacca

SEQ ID NO: 34185 - DNA, 25 bp, Probe sequence
tatagcaccatacgaagaagggaat

SEQ ID NO: 34186 - DNA, 25 bp, Probe sequence
atatagcaccatacgaagaagggaa

SEQ ID NO: 34187 - DNA, 25 bp, Probe sequence
agaagaaatcaccaggtacattagc

SEQ ID NO: 34188 - DNA, 25 bp, Probe sequence
gctaagaagaaatcaccaggtacat

SEQ ID NO: 34189 - DNA, 25 bp, Probe sequence
catatagcaccatacgaagaaggga

SEQ ID NO: 34190 - DNA, 25 bp, Probe sequence
aagaagaaatcaccaggtacattag

SEQ ID NO: 34191 - DNA, 25 bp, Probe sequence
ctaagaagaaatcaccaggtacatt

SEQ ID NO: 34192 - DNA, 25 bp, Probe sequence
atagcaccatacgaagaagggaatc

SEQ ID NO: 34193 - DNA, 25 bp, Probe sequence
gaagaaatcaccaggtacattagcg

SEQ ID NO: 34194 - DNA, 25 bp, Probe sequence
aattgctaatggtcaaggtattgga

SEQ ID NO: 34195 - DNA, 25 bp, Probe sequence
taacgatgttcaagtaggttcatac

SEQ ID NO: 34196 - DNA, 25 bp, Probe sequence
aattaacgatgttcaagtaggttca

SEQ ID NO: 34197 - DNA, 25 bp, Probe sequence
gttagcatgaatgaagttgaaggaa

SEQ ID NO: 34198 - DNA, 25 bp, Probe sequence
ttgttagcatgaatgaagttgaagg

SEQ ID NO: 34199 - DNA, 25 bp, Probe sequence
aacgatgttcaagtaggttcataca

SEQ ID NO: 34200 - DNA, 25 bp, Probe sequence
attaacgatgttcaagtaggttcat

SEQ ID NO: 34201 - DNA, 25 bp, Probe sequence
tgttagcatgaatgaagttgaagga

SEQ ID NO: 34202 - DNA, 25 bp, Probe sequence
acgaagttattgttagcatgaatga

SEQ ID NO: 34203 - DNA, 25 bp, Probe sequence
ttatatgagcagtcgaatataacgt

SEQ ID NO: 34204 - DNA, 25 bp, Probe sequence
tatatgagcagtcgaatataacgtt

SEQ ID NO: 34205 - DNA, 25 bp, Probe sequence
tgagcagtcgaatataacgtttaaa

SEQ ID NO: 34206 - DNA, 25 bp, Probe sequence
atgagcagtcgaatataacgtttaa

SEQ ID NO: 34207 - DNA, 25 bp, Probe sequence
atatgagcagtcgaatataacgttt

SEQ ID NO: 34208 - DNA, 25 bp, Probe sequence
tatgagcagtcgaatataacgttta

SEQ ID NO: 34209 - DNA, 25 bp, Probe sequence
tttatatgagcagtcgaatataacg

SEQ ID NO: 34210 - DNA, 25 bp, Probe sequence
gagcagtcgaatataacgtttaaaa

SEQ ID NO: 34211 - DNA, 25 bp, Probe sequence
acttaaggctataaagcaaaacttt

SEQ ID NO: 34212 - DNA, 25 bp, Probe sequence
ggtggatatgcggtagacttattaa

SEQ ID NO: 34213 - DNA, 25 bp, Probe sequence
aggtggatatgcggtagacttatta

SEQ ID NO: 34214 - DNA, 25 bp, Probe sequence
taggtggatatgcggtagacttatt

SEQ ID NO: 34215 - DNA, 25 bp, Probe sequence
ttaggtggatatgcggtagacttat

SEQ ID NO: 34216 - DNA, 25 bp, Probe sequence
tagttattggtggtgacggtagtta

SEQ ID NO: 34217 - DNA, 25 bp, Probe sequence
gttattggtggtgacggtagttatc

SEQ ID NO: 34218 - DNA, 25 bp, Probe sequence
agttattggtggtgacggtagttat

SEQ ID NO: 34219 - DNA, 25 bp, Probe sequence
ttcctggtacgattgacaatgatat

SEQ ID NO: 34220 - DNA, 25 bp, Probe sequence
attcctggtacgattgacaatgata

SEQ ID NO: 34221 - DNA, 25 bp, Probe sequence
acgaagaattagaaagaacgattga

SEQ ID NO: 34222 - DNA, 25 bp, Probe sequence
tgtgtacgaagaattagaaagaacg

SEQ ID NO: 34223 - DNA, 25 bp, Probe sequence
gtgtacgaagaattagaaagaacga

SEQ ID NO: 34224 - DNA, 25 bp, Probe sequence
acagaagagcatcatcataaagatt

SEQ ID NO: 34225 - DNA, 25 bp, Probe sequence
cgaagaattagaaagaacgattgag

SEQ ID NO: 34226 - DNA, 25 bp, Probe sequence
aactatataatttaggtggcggtgc

SEQ ID NO: 34227 - DNA, 25 bp, Probe sequence
aaactatataatttaggtggcggtg

SEQ ID NO: 34228 - DNA, 25 bp, Probe sequence
ttcagctataggatctattggaaca

SEQ ID NO: 34229 - DNA, 25 bp, Probe sequence
tcagctataggatctattggaacat

SEQ ID NO: 34230 - DNA, 25 bp, Probe sequence
tactctgttatatctcctgaaggtg

SEQ ID NO: 34231 - DNA, 25 bp, Probe sequence
actctgttatatctcctgaaggtgc

SEQ ID NO: 34232 - DNA, 25 bp, Probe sequence
atggaactacatggtgatcgtaatt

SEQ ID NO: 34233 - DNA, 25 bp, Probe sequence
ttatggaactacatggtgatcgtaa

SEQ ID NO: 34234 - DNA, 25 bp, Probe sequence
tatggaactacatggtgatcgtaat

SEQ ID NO: 34235 - DNA, 25 bp, Probe sequence
tagattcacttgagtcattatcacg

SEQ ID NO: 34236 - DNA, 25 bp, Probe sequence
ttagagatgatccagcaatgattgg

SEQ ID NO: 34237 - DNA, 25 bp, Probe sequence
cggcattattatggaaagacagtaa

SEQ ID NO: 34238 - DNA, 25 bp, Probe sequence
agattcacttgagtcattatcacgt

SEQ ID NO: 34239 - DNA, 25 bp, Probe sequence
caagcattagaacgagaagcaatat

SEQ ID NO: 34240 - DNA, 25 bp, Probe sequence
tcaagcattagaacgagaagcaata

SEQ ID NO: 34241 - DNA, 25 bp, Probe sequence
ttcaagcattagaacgagaagcaat

SEQ ID NO: 34242 - DNA, 25 bp, Probe sequence
attcaagcattagaacgagaagcaa

SEQ ID NO: 34243 - DNA, 25 bp, Probe sequence
agcacctgtatctgttgatattcat

SEQ ID NO: 34244 - DNA, 25 bp, Probe sequence
gcacctgtatctgttgatattcatc

SEQ ID NO: 34245 - DNA, 25 bp, Probe sequence
tgttagcacctgtatctgttgatat

SEQ ID NO: 34246 - DNA, 25 bp, Probe sequence
gattcaagcattagaacgagaagca

SEQ ID NO: 34247 - DNA, 25 bp, Probe sequence
ttgattcaagcattagaacgagaag

SEQ ID NO: 34248 - DNA, 25 bp, Probe sequence
tcattctgacgctggactattatat

SEQ ID NO: 34249 - DNA, 25 bp, Probe sequence
agatatgtcgcatcattgattactg

SEQ ID NO: 34250 - DNA, 25 bp, Probe sequence
gcaggtattatgactaagtgtccaa

SEQ ID NO: 34251 - DNA, 25 bp, Probe sequence
aagatatgtcgcatcattgattact

SEQ ID NO: 34252 - DNA, 25 bp, Probe sequence
cattctgacgctggactattatata

SEQ ID NO: 34253 - DNA, 25 bp, Probe sequence
tcatcatattgctttaactgcgtat

SEQ ID NO: 34254 - DNA, 25 bp, Probe sequence
atcatcatattgctttaactgcgta

SEQ ID NO: 34255 - DNA, 25 bp, Probe sequence
catcattgattactgcactgagaac

SEQ ID NO: 34256 - DNA, 25 bp, Probe sequence
tatgcgtcaaacattgtctgaaatt

SEQ ID NO: 34257 - DNA, 25 bp, Probe sequence
aaccaacatcaccgactacatatac

SEQ ID NO: 34258 - DNA, 25 bp, Probe sequence
ccaacatcaccgactacatatactg

SEQ ID NO: 34259 - DNA, 25 bp, Probe sequence
accaacatcaccgactacatatact

SEQ ID NO: 34260 - DNA, 25 bp, Probe sequence
caacatcaccgactacatatactga

SEQ ID NO: 34261 - DNA, 25 bp, Probe sequence
aacatcaccgactacatatactgaa

SEQ ID NO: 34262 - DNA, 25 bp, Probe sequence
tcacacgcataataatgttgttgaa

SEQ ID NO: 34263 - DNA, 25 bp, Probe sequence
atcacacgcataataatgttgttga

SEQ ID NO: 34264 - DNA, 25 bp, Probe sequence
cacacgcataataatgttgttgaat

SEQ ID NO: 34265 - DNA, 25 bp, Probe sequence
aatcacacgcataataatgttgttg

SEQ ID NO: 34266 - DNA, 25 bp, Probe sequence
tggttaagagtatggcagataatcc

SEQ ID NO: 34267 - DNA, 25 bp, Probe sequence
acaagatatggttaagagtatggca

SEQ ID NO: 34268 - DNA, 25 bp, Probe sequence
atatggttatgtgtgactcaagagg

SEQ ID NO: 34269 - DNA, 25 bp, Probe sequence
cacaagatatggttaagagtatggc

SEQ ID NO: 34270 - DNA, 25 bp, Probe sequence
gctgtcacaagatatggttaagagt

SEQ ID NO: 34271 - DNA, 25 bp, Probe sequence
caagatatggttaagagtatggcag

SEQ ID NO: 34272 - DNA, 25 bp, Probe sequence
gacctgaagcaagtattcctgtaat

SEQ ID NO: 34273 - DNA, 25 bp, Probe sequence
aagatatggttaagagtatggcaga

SEQ ID NO: 34274 - DNA, 25 bp, Probe sequence
acctgaagcaagtattcctgtaatg

SEQ ID NO: 34275 - DNA, 25 bp, Probe sequence
aacaacaccgactacatatactgaa

SEQ ID NO: 34276 - DNA, 25 bp, Probe sequence
caacaacaccgactacatatactga

SEQ ID NO: 34277 - DNA, 25 bp, Probe sequence
ggagaagttcaagataagtcggata

SEQ ID NO: 34278 - DNA, 25 bp, Probe sequence
aaccaacaacaccgactacatatac

SEQ ID NO: 34279 - DNA, 25 bp, Probe sequence
ccaacaacaccgactacatatactg

SEQ ID NO: 34280 - DNA, 25 bp, Probe sequence
tggagaagttcaagataagtcggat

SEQ ID NO: 34281 - DNA, 25 bp, Probe sequence
accaacaacaccgactacatatact

SEQ ID NO: 34282 - DNA, 25 bp, Probe sequence
tgttggagaagttcaagataagtcg

SEQ ID NO: 34283 - DNA, 25 bp, Probe sequence
ttgttggagaagttcaagataagtc

SEQ ID NO: 34284 - DNA, 25 bp, Probe sequence
atgaggaaccagaatacaaagaagc

SEQ ID NO: 34285 - DNA, 25 bp, Probe sequence
accagaatacaaagaagcagttaaa

SEQ ID NO: 34286 - DNA, 25 bp, Probe sequence
gaaccagaatacaaagaagcagtta

SEQ ID NO: 34287 - DNA, 25 bp, Probe sequence
aaccagaatacaaagaagcagttaa

SEQ ID NO: 34288 - DNA, 25 bp, Probe sequence
gaggaaccagaatacaaagaagcag

SEQ ID NO: 34289 - DNA, 25 bp, Probe sequence
tatgaggaaccagaatacaaagaag

SEQ ID NO: 34290 - DNA, 25 bp, Probe sequence
ggaaccagaatacaaagaagcagtt

SEQ ID NO: 34291 - DNA, 25 bp, Probe sequence
aggaaccagaatacaaagaagcagt

SEQ ID NO: 34292 - DNA, 25 bp, Probe sequence
tgaggaaccagaatacaaagaagca

SEQ ID NO: 34293 - DNA, 25 bp, Probe sequence
atcactatattgccaccgaacatta

SEQ ID NO: 34294 - DNA, 25 bp, Probe sequence
tatcactatattgccaccgaacatt

SEQ ID NO: 34295 - DNA, 25 bp, Probe sequence
ggttatcacgaagacattagtaagc

SEQ ID NO: 34296 - DNA, 25 bp, Probe sequence
ggattattaacgcaatggacaatga

SEQ ID NO: 34297 - DNA, 25 bp, Probe sequence
aggattattaacgcaatggacaatg

SEQ ID NO: 34298 - DNA, 25 bp, Probe sequence
caggattattaacgcaatggacaat

SEQ ID NO: 34299 - DNA, 25 bp, Probe sequence
ttattaacgcaatggacaatgactg

SEQ ID NO: 34300 - DNA, 25 bp, Probe sequence
ggatacaggattattaacgcaatgg

SEQ ID NO: 34301 - DNA, 25 bp, Probe sequence
cactatattgccaccgaacattaac

SEQ ID NO: 34302 - DNA, 25 bp, Probe sequence
acaatacctcagaacatactatgga

SEQ ID NO: 34303 - DNA, 25 bp, Probe sequence
aataactgaagatgtattggagcaa

SEQ ID NO: 34304 - DNA, 25 bp, Probe sequence
ggtgaagcggaatcatcattaagtt

SEQ ID NO: 34305 - DNA, 25 bp, Probe sequence
aacaatacctcagaacatactatgg

SEQ ID NO: 34306 - DNA, 25 bp, Probe sequence
caatacctcagaacatactatggaa

SEQ ID NO: 34307 - DNA, 25 bp, Probe sequence
gatgtattggagcaattcggtattc

SEQ ID NO: 34308 - DNA, 25 bp, Probe sequence
agatgtattggagcaattcggtatt

SEQ ID NO: 34309 - DNA, 25 bp, Probe sequence
aagatgtattggagcaattcggtat

SEQ ID NO: 34310 - DNA, 25 bp, Probe sequence
aactgaagatgtattggagcaattc

SEQ ID NO: 34311 - DNA, 25 bp, Probe sequence
atacacctgaaacaaagcatcctaa

SEQ ID NO: 34312 - DNA, 25 bp, Probe sequence
tacacctgaaacaaagcatcctaaa

SEQ ID NO: 34313 - DNA, 25 bp, Probe sequence
gatacacctgaaacaaagcatccta

SEQ ID NO: 34314 - DNA, 25 bp, Probe sequence
tccaacagtatatagtgcaacttca

SEQ ID NO: 34315 - DNA, 25 bp, Probe sequence
gcttggctaaagttgcttatgttta

SEQ ID NO: 34316 - DNA, 25 bp, Probe sequence
ccaacagtatatagtgcaacttcaa

SEQ ID NO: 34317 - DNA, 25 bp, Probe sequence
atccaacagtatatagtgcaacttc

SEQ ID NO: 34318 - DNA, 25 bp, Probe sequence
tattaagtgctggcatatgtatggc

SEQ ID NO: 34319 - DNA, 25 bp, Probe sequence
ttattaagtgctggcatatgtatgg

SEQ ID NO: 34320 - DNA, 25 bp, Probe sequence
acggctatattaattactggtggat

SEQ ID NO: 34321 - DNA, 25 bp, Probe sequence
gaaggtattgaattgattcctgtcg

SEQ ID NO: 34322 - DNA, 25 bp, Probe sequence
aatagcagattataagcgtatggcg

SEQ ID NO: 34323 - DNA, 25 bp, Probe sequence
aatagttcaagatataatgacgcca

SEQ ID NO: 34324 - DNA, 25 bp, Probe sequence
aggtattgaattgattcctgtcgtt

SEQ ID NO: 34325 - DNA, 25 bp, Probe sequence
aaggtattgaattgattcctgtcgt

SEQ ID NO: 34326 - DNA, 25 bp, Probe sequence
atagttcaagatataatgacgccat

SEQ ID NO: 34327 - DNA, 25 bp, Probe sequence
tcaagatggaattacagtagaagtt

SEQ ID NO: 34328 - DNA, 25 bp, Probe sequence
caatgaatcaagatggaattacagt

SEQ ID NO: 34329 - DNA, 25 bp, Probe sequence
gtattcgtacacttctcagcaatcg

SEQ ID NO: 34330 - DNA, 25 bp, Probe sequence
cgtattcgtacacttctcagcaatc

SEQ ID NO: 34331 - DNA, 25 bp, Probe sequence
caatcgctgaagatggatacaaatc

SEQ ID NO: 34332 - DNA, 25 bp, Probe sequence
tggatacaaatcattagaagaaggc

SEQ ID NO: 34333 - DNA, 25 bp, Probe sequence
atcgctgaagatggatacaaatcat

SEQ ID NO: 34334 - DNA, 25 bp, Probe sequence
tcgctgaagatggatacaaatcatt

SEQ ID NO: 34335 - DNA, 25 bp, Probe sequence
aatcgctgaagatggatacaaatca

SEQ ID NO: 34336 - DNA, 25 bp, Probe sequence
cgctgaagatggatacaaatcatta

SEQ ID NO: 34337 - DNA, 25 bp, Probe sequence
gcaatcgctgaagatggatacaaat

SEQ ID NO: 34338 - DNA, 25 bp, Probe sequence
cattaatcgaacaagatccacaaca

SEQ ID NO: 34339 - DNA, 25 bp, Probe sequence
ccattaatcgaacaagatccacaac

SEQ ID NO: 34340 - DNA, 25 bp, Probe sequence
taatcgaacaagatccacaacaatt

SEQ ID NO: 34341 - DNA, 25 bp, Probe sequence
ttaatcgaacaagatccacaacaat

SEQ ID NO: 34342 - DNA, 25 bp, Probe sequence
attaatcgaacaagatccacaacaa

SEQ ID NO: 34343 - DNA, 25 bp, Probe sequence
gtatcgtgtttgaagttgaaggaaa

SEQ ID NO: 34344 - DNA, 25 bp, Probe sequence
tgttcaagcatttcatagttcaagt

SEQ ID NO: 34345 - DNA, 25 bp, Probe sequence
tccagtttatttaggtatgccaatg

SEQ ID NO: 34346 - DNA, 25 bp, Probe sequence
aatgggtatcgtgtttgaagttgaa

SEQ ID NO: 34347 - DNA, 25 bp, Probe sequence
ataggtagtaagcacgacaatccat

SEQ ID NO: 34348 - DNA, 25 bp, Probe sequence
gacgcattaacagaagcattaacag

SEQ ID NO: 34349 - DNA, 25 bp, Probe sequence
taggtagtaagcacgacaatccatc

SEQ ID NO: 34350 - DNA, 25 bp, Probe sequence
gataggtagtaagcacgacaatcca

SEQ ID NO: 34351 - DNA, 25 bp, Probe sequence
tggataggtagtaagcacgacaatc

SEQ ID NO: 34352 - DNA, 25 bp, Probe sequence
ttcaggtattaagtggataggtagt

SEQ ID NO: 34353 - DNA, 25 bp, Probe sequence
ggtattaagtggataggtagtaagc

SEQ ID NO: 34354 - DNA, 25 bp, Probe sequence
attaagtggataggtagtaagcacg

SEQ ID NO: 34355 - DNA, 25 bp, Probe sequence
aatagatcagatattgaacaagcgg

SEQ ID NO: 34356 - DNA, 25 bp, Probe sequence
taatcaacattggatagacgctact

SEQ ID NO: 34357 - DNA, 25 bp, Probe sequence
ttagattatgtcactgagcgtaagc

SEQ ID NO: 34358 - DNA, 25 bp, Probe sequence
gatgtcattccagtattcgcagtaa

SEQ ID NO: 34359 - DNA, 25 bp, Probe sequence
aatcaacattggatagacgctactg

SEQ ID NO: 34360 - DNA, 25 bp, Probe sequence
ttaatcaacattggatagacgctac

SEQ ID NO: 34361 - DNA, 25 bp, Probe sequence
attatgtcactgagcgtaagcaatt

SEQ ID NO: 34362 - DNA, 25 bp, Probe sequence
ttgcttatatggctacaggtggtat

SEQ ID NO: 34363 - DNA, 25 bp, Probe sequence
attagattatgtcactgagcgtaag

SEQ ID NO: 34364 - DNA, 25 bp, Probe sequence
cattagattatgtcactgagcgtaa

SEQ ID NO: 34365 - DNA, 25 bp, Probe sequence
aagacaccaagtaattagagcatat

SEQ ID NO: 34366 - DNA, 25 bp, Probe sequence
gttagtgaagataaagcattccctc

SEQ ID NO: 34367 - DNA, 25 bp, Probe sequence
ttagtgaagataaagcattccctcg

SEQ ID NO: 34368 - DNA, 25 bp, Probe sequence
cgattagaagaaagacaccaagtaa

SEQ ID NO: 34369 - DNA, 25 bp, Probe sequence
cgttagtgaagataaagcattccct

SEQ ID NO: 34370 - DNA, 25 bp, Probe sequence
agaaagacaccaagtaattagagca

SEQ ID NO: 34371 - DNA, 25 bp, Probe sequence
agacaccaagtaattagagcatatg

SEQ ID NO: 34372 - DNA, 25 bp, Probe sequence
gaaagacaccaagtaattagagcat

SEQ ID NO: 34373 - DNA, 25 bp, Probe sequence
aagaaagacaccaagtaattagagc

SEQ ID NO: 34374 - DNA, 25 bp, Probe sequence
gttactgatgaacatacctgcatat

SEQ ID NO: 34375 - DNA, 25 bp, Probe sequence
ttactgatgaacatacctgcatatg

SEQ ID NO: 34376 - DNA, 25 bp, Probe sequence
tgtgtttctagcttgtttgttacat

SEQ ID NO: 34377 - DNA, 25 bp, Probe sequence
atgtgtttctagcttgtttgttaca

SEQ ID NO: 34378 - DNA, 25 bp, Probe sequence
ctgcatatgtgtttctagcttgttt

SEQ ID NO: 34379 - DNA, 25 bp, Probe sequence
atacctgcatatgtgtttctagctt

SEQ ID NO: 34380 - DNA, 25 bp, Probe sequence
gcatatgtgtttctagcttgtttgt

SEQ ID NO: 34381 - DNA, 25 bp, Probe sequence
tgcatatgtgtttctagcttgtttg

SEQ ID NO: 34382 - DNA, 25 bp, Probe sequence
tatgtgtttctagcttgtttgttac

SEQ ID NO: 34383 - DNA, 25 bp, Probe sequence
tagtcgtgagtcatggaacaataat

SEQ ID NO: 34384 - DNA, 25 bp, Probe sequence
ttagtcgtgagtcatggaacaataa

SEQ ID NO: 34385 - DNA, 25 bp, Probe sequence
attagtcgtgagtcatggaacaata

SEQ ID NO: 34386 - DNA, 25 bp, Probe sequence
ttgaaggtgagtcagtctatctatt

SEQ ID NO: 34387 - DNA, 25 bp, Probe sequence
agtcgtgagtcatggaacaataatg

SEQ ID NO: 34388 - DNA, 25 bp, Probe sequence
cattagtcgtgagtcatggaacaat

SEQ ID NO: 34389 - DNA, 25 bp, Probe sequence
gctaacagaacttggaattgctcaa

SEQ ID NO: 34390 - DNA, 25 bp, Probe sequence
gtcgtgagtcatggaacaataatgg

SEQ ID NO: 34391 - DNA, 25 bp, Probe sequence
ttaagggactaattcagggatttgg

SEQ ID NO: 34392 - DNA, 25 bp, Probe sequence
gtaactattatcggtggtggtcaag

SEQ ID NO: 34393 - DNA, 25 bp, Probe sequence
agtaactattatcggtggtggtcaa

SEQ ID NO: 34394 - DNA, 25 bp, Probe sequence
aagtaactattatcggtggtggtca

SEQ ID NO: 34395 - DNA, 25 bp, Probe sequence
aattacgacacatgatgatcctaca

SEQ ID NO: 34396 - DNA, 25 bp, Probe sequence
attacgacacatgatgatcctacat

SEQ ID NO: 34397 - DNA, 25 bp, Probe sequence
ttacgacacatgatgatcctacata

SEQ ID NO: 34398 - DNA, 25 bp, Probe sequence
acgacacatgatgatcctacatata

SEQ ID NO: 34399 - DNA, 25 bp, Probe sequence
tacgacacatgatgatcctacatat

SEQ ID NO: 34400 - DNA, 25 bp, Probe sequence
aatgagtgaggtagcaggaagaatg

SEQ ID NO: 34401 - DNA, 25 bp, Probe sequence
tgattgatatagaatggcaagcaga

SEQ ID NO: 34402 - DNA, 25 bp, Probe sequence
tagaatggcaagcagatattgacat

SEQ ID NO: 34403 - DNA, 25 bp, Probe sequence
atagaatggcaagcagatattgaca

SEQ ID NO: 34404 - DNA, 25 bp, Probe sequence
atgattgatatagaatggcaagcag

SEQ ID NO: 34405 - DNA, 25 bp, Probe sequence
gattgatatagaatggcaagcagat

SEQ ID NO: 34406 - DNA, 25 bp, Probe sequence
gactaataagtagaacggctcaagg

SEQ ID NO: 34407 - DNA, 25 bp, Probe sequence
ggactaataagtagaacggctcaag

SEQ ID NO: 34408 - DNA, 25 bp, Probe sequence
cttggactaataagtagaacggctc

SEQ ID NO: 34409 - DNA, 25 bp, Probe sequence
tatagaatggcaagcagatattgac

SEQ ID NO: 34410 - DNA, 25 bp, Probe sequence
ttgaagaattaagcgaattagcacc

SEQ ID NO: 34411 - DNA, 25 bp, Probe sequence
atgcctgaagaggaattagtaacaa

SEQ ID NO: 34412 - DNA, 25 bp, Probe sequence
aatgcctgaagaggaattagtaaca

SEQ ID NO: 34413 - DNA, 25 bp, Probe sequence
gaatgcctgaagaggaattagtaac

SEQ ID NO: 34414 - DNA, 25 bp, Probe sequence
agaatgcctgaagaggaattagtaa

SEQ ID NO: 34415 - DNA, 25 bp, Probe sequence
attgaagaattaagcgaattagcac

SEQ ID NO: 34416 - DNA, 25 bp, Probe sequence
tgaagaattaagcgaattagcaccg

SEQ ID NO: 34417 - DNA, 25 bp, Probe sequence
aattgaagaattaagcgaattagca

SEQ ID NO: 34418 - DNA, 25 bp, Probe sequence
aaagagcggcagaaatgttagataa

SEQ ID NO: 34419 - DNA, 25 bp, Probe sequence
acatagatgacgcattgctatatca

SEQ ID NO: 34420 - DNA, 25 bp, Probe sequence
cacatagatgacgcattgctatatc

SEQ ID NO: 34421 - DNA, 25 bp, Probe sequence
acagattaggagatatgagtaagga

SEQ ID NO: 34422 - DNA, 25 bp, Probe sequence
gacagattaggagatatgagtaagg

SEQ ID NO: 34423 - DNA, 25 bp, Probe sequence
catagatgacgcattgctatatcaa

SEQ ID NO: 34424 - DNA, 25 bp, Probe sequence
atagatgacgcattgctatatcaag

SEQ ID NO: 34425 - DNA, 25 bp, Probe sequence
ccgaaagacagattaggagatatga

SEQ ID NO: 34426 - DNA, 25 bp, Probe sequence
ttatgttgttactttatgaagcggg

SEQ ID NO: 34427 - DNA, 25 bp, Probe sequence
cgaaagacagattaggagatatgag

SEQ ID NO: 34428 - DNA, 25 bp, Probe sequence
aagaagcagatatcgttattggtga

SEQ ID NO: 34429 - DNA, 25 bp, Probe sequence
gaagaagcagatatcgttattggtg

SEQ ID NO: 34430 - DNA, 25 bp, Probe sequence
agaagaagcagatatcgttattggt

SEQ ID NO: 34431 - DNA, 25 bp, Probe sequence
acaagcaaatcatcaaattacacca

SEQ ID NO: 34432 - DNA, 25 bp, Probe sequence
gcagaacaacaaacaattatggaac

SEQ ID NO: 34433 - DNA, 25 bp, Probe sequence
cagaacaacaaacaattatggaacg

SEQ ID NO: 34434 - DNA, 25 bp, Probe sequence
agaagcagatatcgttattggtgat

SEQ ID NO: 34435 - DNA, 25 bp, Probe sequence
caagcaaatcatcaaattacaccag

SEQ ID NO: 34436 - DNA, 25 bp, Probe sequence
aagcaaatcatcaaattacaccaga

SEQ ID NO: 34437 - DNA, 25 bp, Probe sequence
atgaatatggcgtaagttatgaacc

SEQ ID NO: 34438 - DNA, 25 bp, Probe sequence
atcgttcaacatacacctacaataa

SEQ ID NO: 34439 - DNA, 25 bp, Probe sequence
agatgaatatggcgtaagttatgaa

SEQ ID NO: 34440 - DNA, 25 bp, Probe sequence
atatcgttcaacatacacctacaat

SEQ ID NO: 34441 - DNA, 25 bp, Probe sequence
gatgaatatggcgtaagttatgaac

SEQ ID NO: 34442 - DNA, 25 bp, Probe sequence
gagttgttatcatctgatggtatgt

SEQ ID NO: 34443 - DNA, 25 bp, Probe sequence
tatcgttcaacatacacctacaata

SEQ ID NO: 34444 - DNA, 25 bp, Probe sequence
gttagagttgttatcatctgatggt

SEQ ID NO: 34445 - DNA, 25 bp, Probe sequence
tagatgaatatggcgtaagttatga

SEQ ID NO: 34446 - DNA, 25 bp, Probe sequence
ctatggcgttgttatggaagaactt

SEQ ID NO: 34447 - DNA, 25 bp, Probe sequence
aactatggcgttgttatggaagaac

SEQ ID NO: 34448 - DNA, 25 bp, Probe sequence
gttgttatggaagaacttcgcttat

SEQ ID NO: 34449 - DNA, 25 bp, Probe sequence
cattacattaagtgaccaccgtgac

SEQ ID NO: 34450 - DNA, 25 bp, Probe sequence
ttgttatggaagaacttcgcttatt

SEQ ID NO: 34451 - DNA, 25 bp, Probe sequence
tatggcgttgttatggaagaacttc

SEQ ID NO: 34452 - DNA, 25 bp, Probe sequence
actatggcgttgttatggaagaact

SEQ ID NO: 34453 - DNA, 25 bp, Probe sequence
cgttgttatggaagaacttcgctta

SEQ ID NO: 34454 - DNA, 25 bp, Probe sequence
attacattaagtgaccaccgtgact

SEQ ID NO: 34455 - DNA, 25 bp, Probe sequence
tgaagtcaacgaagaactagaagat

SEQ ID NO: 34456 - DNA, 25 bp, Probe sequence
ttgaagtcaacgaagaactagaaga

SEQ ID NO: 34457 - DNA, 25 bp, Probe sequence
aattggaatcacagaatacgcacaa

SEQ ID NO: 34458 - DNA, 25 bp, Probe sequence
aagtcaacgaagaactagaagatag

SEQ ID NO: 34459 - DNA, 25 bp, Probe sequence
gaagtcaacgaagaactagaagata

SEQ ID NO: 34460 - DNA, 25 bp, Probe sequence
tcaacgaagaactagaagatagtcc

SEQ ID NO: 34461 - DNA, 25 bp, Probe sequence
agtcaacgaagaactagaagatagt

SEQ ID NO: 34462 - DNA, 25 bp, Probe sequence
gggttaaagttgaaggtaatgtagc

SEQ ID NO: 34463 - DNA, 25 bp, Probe sequence
gtcaacgaagaactagaagatagtc

SEQ ID NO: 34464 - DNA, 25 bp, Probe sequence
ttctacgccagcattattagcaatc

SEQ ID NO: 34465 - DNA, 25 bp, Probe sequence
ccagcattattagcaatcggtctac

SEQ ID NO: 34466 - DNA, 25 bp, Probe sequence
cagcattattagcaatcggtctacc

SEQ ID NO: 34467 - DNA, 25 bp, Probe sequence
gcattattagcaatcggtctaccac

SEQ ID NO: 34468 - DNA, 25 bp, Probe sequence
agcattattagcaatcggtctacca

SEQ ID NO: 34469 - DNA, 25 bp, Probe sequence
cattattagcaatcggtctaccacc

SEQ ID NO: 34470 - DNA, 25 bp, Probe sequence
gccagcattattagcaatcggtcta

SEQ ID NO: 34471 - DNA, 25 bp, Probe sequence
tttctacgccagcattattagcaat

SEQ ID NO: 34472 - DNA, 25 bp, Probe sequence
atttctacgccagcattattagcaa

SEQ ID NO: 34473 - DNA, 25 bp, Probe sequence
gatatacaatgacttcaacgagacg

SEQ ID NO: 34474 - DNA, 25 bp, Probe sequence
ccaagatatacaatgacttcaacga

SEQ ID NO: 34475 - DNA, 25 bp, Probe sequence
tccaagatatacaatgacttcaacg

SEQ ID NO: 34476 - DNA, 25 bp, Probe sequence
agatatacaatgacttcaacgagac

SEQ ID NO: 34477 - DNA, 25 bp, Probe sequence
gtatgatgatgcgtgttgctgataa

SEQ ID NO: 34478 - DNA, 25 bp, Probe sequence
tgtatattgaacttgaagaccatgc

SEQ ID NO: 34479 - DNA, 25 bp, Probe sequence
cgtatgtatattgaacttgaagacc

SEQ ID NO: 34480 - DNA, 25 bp, Probe sequence
aagatatacaatgacttcaacgaga

SEQ ID NO: 34481 - DNA, 25 bp, Probe sequence
caagatatacaatgacttcaacgag

SEQ ID NO: 34482 - DNA, 25 bp, Probe sequence
tttcacatatcaacatcacaaatta

SEQ ID NO: 34483 - DNA, 25 bp, Probe sequence
tcacatatcaacatcacaaattatt

SEQ ID NO: 34484 - DNA, 25 bp, Probe sequence
ttcacatatcaacatcacaaattat

SEQ ID NO: 34485 - DNA, 25 bp, Probe sequence
ttttcacatatcaacatcacaaatt

SEQ ID NO: 34486 - DNA, 25 bp, Probe sequence
ttattggcctaaccaactaattaat

SEQ ID NO: 34487 - DNA, 25 bp, Probe sequence
tttattggcctaaccaactaattaa

SEQ ID NO: 34488 - DNA, 25 bp, Probe sequence
ttttattggcctaaccaactaatta

SEQ ID NO: 34489 - DNA, 25 bp, Probe sequence
cgaaagcatttgaagaagtgttaga

SEQ ID NO: 34490 - DNA, 25 bp, Probe sequence
acgaaagcatttgaagaagtgttag

SEQ ID NO: 34491 - DNA, 25 bp, Probe sequence
gacgaaagcatttgaagaagtgtta

SEQ ID NO: 34492 - DNA, 25 bp, Probe sequence
ataatccgaatagtccgcataaagc

SEQ ID NO: 34493 - DNA, 25 bp, Probe sequence
tataatccgaatagtccgcataaag

SEQ ID NO: 34494 - DNA, 25 bp, Probe sequence
atgaggaaattaaggagttgctaaa

SEQ ID NO: 34495 - DNA, 25 bp, Probe sequence
tttatgaggaaattaaggagttgct

SEQ ID NO: 34496 - DNA, 25 bp, Probe sequence
gaaagcatttgaagaagtgttagat

SEQ ID NO: 34497 - DNA, 25 bp, Probe sequence
agcatttgaagaagtgttagatact

SEQ ID NO: 34498 - DNA, 25 bp, Probe sequence
catggaacaatgagtatagataagc

SEQ ID NO: 34499 - DNA, 25 bp, Probe sequence
atggaacaatgagtatagataagct

SEQ ID NO: 34500 - DNA, 25 bp, Probe sequence
cgttatttgagtgaaagtgaacata

SEQ ID NO: 34501 - DNA, 25 bp, Probe sequence
acgttatttgagtgaaagtgaacat

SEQ ID NO: 34502 - DNA, 25 bp, Probe sequence
tggctttacttgtaagaaagaaaca

SEQ ID NO: 34503 - DNA, 25 bp, Probe sequence
tgcagaaccagtcaatattatttgt

SEQ ID NO: 34504 - DNA, 25 bp, Probe sequence
gctttacttgtaagaaagaaacacc

SEQ ID NO: 34505 - DNA, 25 bp, Probe sequence
ggctttacttgtaagaaagaaacac

SEQ ID NO: 34506 - DNA, 25 bp, Probe sequence
gaaggagatcgaattagaaattggt

SEQ ID NO: 34507 - DNA, 25 bp, Probe sequence
gccaaggttagagcaatatgaagta

SEQ ID NO: 34508 - DNA, 25 bp, Probe sequence
cgatatagcgaggttcaggataatt

SEQ ID NO: 34509 - DNA, 25 bp, Probe sequence
atgagttgatggatagttacgaaca

SEQ ID NO: 34510 - DNA, 25 bp, Probe sequence
ttctaacttaacaagcgttcctgaa

SEQ ID NO: 34511 - DNA, 25 bp, Probe sequence
tgagttgatggatagttacgaacaa

SEQ ID NO: 34512 - DNA, 25 bp, Probe sequence
aatgagttgatggatagttacgaac

SEQ ID NO: 34513 - DNA, 25 bp, Probe sequence
cttctaacttaacaagcgttcctga

SEQ ID NO: 34514 - DNA, 25 bp, Probe sequence
gagccaaggttagagcaatatgaag

SEQ ID NO: 34515 - DNA, 25 bp, Probe sequence
ccaaggttagagcaatatgaagtac

SEQ ID NO: 34516 - DNA, 25 bp, Probe sequence
aaggtttcagaaagaatgttagaca

SEQ ID NO: 34517 - DNA, 25 bp, Probe sequence
aaagatatgcaaatcatgtctacgc

SEQ ID NO: 34518 - DNA, 25 bp, Probe sequence
tgtaaggtttcagaaagaatgttag

SEQ ID NO: 34519 - DNA, 25 bp, Probe sequence
aagatatgcaaatcatgtctacgcc

SEQ ID NO: 34520 - DNA, 25 bp, Probe sequence
tacgccgattttattgttgatgaat

SEQ ID NO: 34521 - DNA, 25 bp, Probe sequence
ctacgccgattttattgttgatgaa

SEQ ID NO: 34522 - DNA, 25 bp, Probe sequence
taaggtttcagaaagaatgttagac

SEQ ID NO: 34523 - DNA, 25 bp, Probe sequence
gtaaggtttcagaaagaatgttaga

SEQ ID NO: 34524 - DNA, 25 bp, Probe sequence
tctacgccgattttattgttgatga

SEQ ID NO: 34525 - DNA, 25 bp, Probe sequence
aagagaagcggattatcaagtgtat

SEQ ID NO: 34526 - DNA, 25 bp, Probe sequence
cagaatcatacagcagtcaatacag

SEQ ID NO: 34527 - DNA, 25 bp, Probe sequence
gaagcggattatcaagtgtatcaag

SEQ ID NO: 34528 - DNA, 25 bp, Probe sequence
agaagcggattatcaagtgtatcaa

SEQ ID NO: 34529 - DNA, 25 bp, Probe sequence
ttaagagaagcggattatcaagtgt

SEQ ID NO: 34530 - DNA, 25 bp, Probe sequence
tcagagaagatacacctaatacgct

SEQ ID NO: 34531 - DNA, 25 bp, Probe sequence
gtcagagaagatacacctaatacgc

SEQ ID NO: 34532 - DNA, 25 bp, Probe sequence
agagaagcggattatcaagtgtatc

SEQ ID NO: 34533 - DNA, 25 bp, Probe sequence
cagagaagatacacctaatacgcta

SEQ ID NO: 34534 - DNA, 25 bp, Probe sequence
ttcacaaccattaccaagtatccaa

SEQ ID NO: 34535 - DNA, 25 bp, Probe sequence
tcacaaccattaccaagtatccaag

SEQ ID NO: 34536 - DNA, 25 bp, Probe sequence
gttcacaaccattaccaagtatcca

SEQ ID NO: 34537 - DNA, 25 bp, Probe sequence
ttaagttcactcaccgatattgacc

SEQ ID NO: 34538 - DNA, 25 bp, Probe sequence
ttccgacaatgtattatagtacgct

SEQ ID NO: 34539 - DNA, 25 bp, Probe sequence
cgacaatgtattatagtacgctacg

SEQ ID NO: 34540 - DNA, 25 bp, Probe sequence
ttaacggcgaagaattgaatgacat

SEQ ID NO: 34541 - DNA, 25 bp, Probe sequence
ccgacaatgtattatagtacgctac

SEQ ID NO: 34542 - DNA, 25 bp, Probe sequence
tccgacaatgtattatagtacgcta

SEQ ID NO: 34543 - DNA, 25 bp, Probe sequence
aaggcttatccatcagagttatcag

SEQ ID NO: 34544 - DNA, 25 bp, Probe sequence
aggcttatccatcagagttatcagg

SEQ ID NO: 34545 - DNA, 25 bp, Probe sequence
aagagttaattgagcgacaagttaa

SEQ ID NO: 34546 - DNA, 25 bp, Probe sequence
ttgttatggtcaaggactgtgttaa

SEQ ID NO: 34547 - DNA, 25 bp, Probe sequence
cgcctacatcaggtgaagttattat

SEQ ID NO: 34548 - DNA, 25 bp, Probe sequence
aggtgaagttattatagatggagac

SEQ ID NO: 34549 - DNA, 25 bp, Probe sequence
caggtgaagttattatagatggaga

SEQ ID NO: 34550 - DNA, 25 bp, Probe sequence
tcaggtgaagttattatagatggag

SEQ ID NO: 34551 - DNA, 25 bp, Probe sequence
agcctattgtatcgagtctatcaac

SEQ ID NO: 34552 - DNA, 25 bp, Probe sequence
ttagaagcagagaatatgtatccgc

SEQ ID NO: 34553 - DNA, 25 bp, Probe sequence
cttatactgagactgttgtgccatt

SEQ ID NO: 34554 - DNA, 25 bp, Probe sequence
tagaagcagagaatatgtatccgca

SEQ ID NO: 34555 - DNA, 25 bp, Probe sequence
aggtgaacttagaggtgtactagat

SEQ ID NO: 34556 - DNA, 25 bp, Probe sequence
gaagcagagaatatgtatccgcaag

SEQ ID NO: 34557 - DNA, 25 bp, Probe sequence
taggtgaacttagaggtgtactaga

SEQ ID NO: 34558 - DNA, 25 bp, Probe sequence
agaagcagagaatatgtatccgcaa

SEQ ID NO: 34559 - DNA, 25 bp, Probe sequence
ttaggtgaacttagaggtgtactag

SEQ ID NO: 34560 - DNA, 25 bp, Probe sequence
ggtgaacttagaggtgtactagata

SEQ ID NO: 34561 - DNA, 25 bp, Probe sequence
aggtgtgttattattcttgtctgct

SEQ ID NO: 34562 - DNA, 25 bp, Probe sequence
ggtgtgttattattcttgtctgcta

SEQ ID NO: 34563 - DNA, 25 bp, Probe sequence
taggtgtgttattattcttgtctgc

SEQ ID NO: 34564 - DNA, 25 bp, Probe sequence
ctagtgtctggcattacagttacag

SEQ ID NO: 34565 - DNA, 25 bp, Probe sequence
gtgtgttattattcttgtctgctaa

SEQ ID NO: 34566 - DNA, 25 bp, Probe sequence
acatgacagtcgtctcaactatatt

SEQ ID NO: 34567 - DNA, 25 bp, Probe sequence
ctatacatgacagtcgtctcaacta

SEQ ID NO: 34568 - DNA, 25 bp, Probe sequence
actatacatgacagtcgtctcaact

SEQ ID NO: 34569 - DNA, 25 bp, Probe sequence
cactatacatgacagtcgtctcaac

SEQ ID NO: 34570 - DNA, 25 bp, Probe sequence
cctatcccaaatagtatagttgccc

SEQ ID NO: 34571 - DNA, 25 bp, Probe sequence
tgcctatcccaaatagtatagttgc

SEQ ID NO: 34572 - DNA, 25 bp, Probe sequence
gcctatcccaaatagtatagttgcc

SEQ ID NO: 34573 - DNA, 25 bp, Probe sequence
cgtctaatcgaatacttattctgct

SEQ ID NO: 34574 - DNA, 25 bp, Probe sequence
acgtctaatcgaatacttattctgc

SEQ ID NO: 34575 - DNA, 25 bp, Probe sequence
ttgcctatcccaaatagtatagttg

SEQ ID NO: 34576 - DNA, 25 bp, Probe sequence
aatacttattctgcttattcgacaa

SEQ ID NO: 34577 - DNA, 25 bp, Probe sequence
atcccaaatagtatagttgccccta

SEQ ID NO: 34578 - DNA, 25 bp, Probe sequence
tatcccaaatagtatagttgcccct

SEQ ID NO: 34579 - DNA, 25 bp, Probe sequence
ttcacttagaacctatggctgtata

SEQ ID NO: 34580 - DNA, 25 bp, Probe sequence
tgtagaaagtgcgaaagataatcct

SEQ ID NO: 34581 - DNA, 25 bp, Probe sequence
gcaaactatttccaacatacaccat

SEQ ID NO: 34582 - DNA, 25 bp, Probe sequence
ctgtagaaagtgcgaaagataatcc

SEQ ID NO: 34583 - DNA, 25 bp, Probe sequence
gctgtagaaagtgcgaaagataatc

SEQ ID NO: 34584 - DNA, 25 bp, Probe sequence
tgctgtagaaagtgcgaaagataat

SEQ ID NO: 34585 - DNA, 25 bp, Probe sequence
attgctgtagaaagtgcgaaagata

SEQ ID NO: 34586 - DNA, 25 bp, Probe sequence
tattgctgtagaaagtgcgaaagat

SEQ ID NO: 34587 - DNA, 25 bp, Probe sequence
ttgctgtagaaagtgcgaaagataa

SEQ ID NO: 34588 - DNA, 25 bp, Probe sequence
ctgttgcttatgttggtcctactaa

SEQ ID NO: 34589 - DNA, 25 bp, Probe sequence
cctgttgcttatgttggtcctacta

SEQ ID NO: 34590 - DNA, 25 bp, Probe sequence
gttgcttatgttggtcctactaaga

SEQ ID NO: 34591 - DNA, 25 bp, Probe sequence
tgttgcttatgttggtcctactaag

SEQ ID NO: 34592 - DNA, 25 bp, Probe sequence
tgcttatgttggtcctactaagatt

SEQ ID NO: 34593 - DNA, 25 bp, Probe sequence
ttgcttatgttggtcctactaagat

SEQ ID NO: 34594 - DNA, 25 bp, Probe sequence
gcttatgttggtcctactaagattc

SEQ ID NO: 34595 - DNA, 25 bp, Probe sequence
gcaatgttaagtaagtcaccaatat

SEQ ID NO: 34596 - DNA, 25 bp, Probe sequence
agtcaccaatattacctgttgctta

SEQ ID NO: 34597 - DNA, 25 bp, Probe sequence
tggaatagtagatattggagcgaat

SEQ ID NO: 34598 - DNA, 25 bp, Probe sequence
atggaatagtagatattggagcgaa

SEQ ID NO: 34599 - DNA, 25 bp, Probe sequence
aatggaatagtagatattggagcga

SEQ ID NO: 34600 - DNA, 25 bp, Probe sequence
ggaatagtagatattggagcgaatg

SEQ ID NO: 34601 - DNA, 25 bp, Probe sequence
gaatagtagatattggagcgaatga

SEQ ID NO: 34602 - DNA, 25 bp, Probe sequence
tagtagatattggagcgaatgaatt

SEQ ID NO: 34603 - DNA, 25 bp, Probe sequence
atagtagatattggagcgaatgaat

SEQ ID NO: 34604 - DNA, 25 bp, Probe sequence
aatagtagatattggagcgaatgaa

SEQ ID NO: 34605 - DNA, 25 bp, Probe sequence
aagaatagcttgtggtattacgcaa

SEQ ID NO: 34606 - DNA, 25 bp, Probe sequence
gtgcttgttaataatagagactggt

SEQ ID NO: 34607 - DNA, 25 bp, Probe sequence
gattcaagtaggtggatcagatcaa

SEQ ID NO: 34608 - DNA, 25 bp, Probe sequence
aagattcaagtaggtggatcagatc

SEQ ID NO: 34609 - DNA, 25 bp, Probe sequence
tgtaagattcaagtaggtggatcag

SEQ ID NO: 34610 - DNA, 25 bp, Probe sequence
ttcaagtaggtggatcagatcaatg

SEQ ID NO: 34611 - DNA, 25 bp, Probe sequence
gtaagattcaagtaggtggatcaga

SEQ ID NO: 34612 - DNA, 25 bp, Probe sequence
attcaagtaggtggatcagatcaat

SEQ ID NO: 34613 - DNA, 25 bp, Probe sequence
agattcaagtaggtggatcagatca

SEQ ID NO: 34614 - DNA, 25 bp, Probe sequence
ttaatggtgagagacaacaagatgt

SEQ ID NO: 34615 - DNA, 25 bp, Probe sequence
gttataagtattccacgattcgagg

SEQ ID NO: 34616 - DNA, 25 bp, Probe sequence
tgttataagtattccacgattcgag

SEQ ID NO: 34617 - DNA, 25 bp, Probe sequence
aagttgtagtgaatcctttgtttgc

SEQ ID NO: 34618 - DNA, 25 bp, Probe sequence
atacaattacagaaccaaagcaagt

SEQ ID NO: 34619 - DNA, 25 bp, Probe sequence
ttgttataagtattccacgattcga

SEQ ID NO: 34620 - DNA, 25 bp, Probe sequence
gcaagttgtagtgaatcctttgttt

SEQ ID NO: 34621 - DNA, 25 bp, Probe sequence
tacaattacagaaccaaagcaagtt

SEQ ID NO: 34622 - DNA, 25 bp, Probe sequence
gaaccaaagcaagttgtagtgaatc

SEQ ID NO: 34623 - DNA, 25 bp, Probe sequence
ttgtagtgaatcctttgtttgcgaa

SEQ ID NO: 34624 - DNA, 25 bp, Probe sequence
ttggattcattgttgtggttacttt

SEQ ID NO: 34625 - DNA, 25 bp, Probe sequence
tttggattcattgttgtggttactt

SEQ ID NO: 34626 - DNA, 25 bp, Probe sequence
atttggattcattgttgtggttact

SEQ ID NO: 34627 - DNA, 25 bp, Probe sequence
tggattcattgttgtggttacttta

SEQ ID NO: 34628 - DNA, 25 bp, Probe sequence
tatttggattcattgttgtggttac

SEQ ID NO: 34629 - DNA, 25 bp, Probe sequence
ggattcattgttgtggttactttaa

SEQ ID NO: 34630 - DNA, 25 bp, Probe sequence
atatttggattcattgttgtggtta

SEQ ID NO: 34631 - DNA, 25 bp, Probe sequence
aatatttggattcattgttgtggtt

SEQ ID NO: 34632 - DNA, 25 bp, Probe sequence
taatatttggattcattgttgtggt

SEQ ID NO: 34633 - DNA, 25 bp, Probe sequence
gagtcaagtaatcagtcggatgtta

SEQ ID NO: 34634 - DNA, 25 bp, Probe sequence
agtcaagtaatcagtcggatgttaa

SEQ ID NO: 34635 - DNA, 25 bp, Probe sequence
tgaacatccattctatacagcaact

SEQ ID NO: 34636 - DNA, 25 bp, Probe sequence
atgatataggtccaagagaacaagt

SEQ ID NO: 34637 - DNA, 25 bp, Probe sequence
caagtaatcagtcggatgttaatca

SEQ ID NO: 34638 - DNA, 25 bp, Probe sequence
gtcaagtaatcagtcggatgttaat

SEQ ID NO: 34639 - DNA, 25 bp, Probe sequence
gaacatccattctatacagcaactt

SEQ ID NO: 34640 - DNA, 25 bp, Probe sequence
ttgaacatccattctatacagcaac

SEQ ID NO: 34641 - DNA, 25 bp, Probe sequence
gttgaacatccattctatacagcaa

SEQ ID NO: 34642 - DNA, 25 bp, Probe sequence
agataatatccgagacaatcacact

SEQ ID NO: 34643 - DNA, 25 bp, Probe sequence
taatatccgagacaatcacacttgg

SEQ ID NO: 34644 - DNA, 25 bp, Probe sequence
ataatatccgagacaatcacacttg

SEQ ID NO: 34645 - DNA, 25 bp, Probe sequence
gataatatccgagacaatcacactt

SEQ ID NO: 34646 - DNA, 25 bp, Probe sequence
tagataatatccgagacaatcacac

SEQ ID NO: 34647 - DNA, 25 bp, Probe sequence
caattaacgatataacttggtcagg

SEQ ID NO: 34648 - DNA, 25 bp, Probe sequence
ctggaagaagcaaagtatgttagtg

SEQ ID NO: 34649 - DNA, 25 bp, Probe sequence
tggaagaagcaaagtatgttagtgt

SEQ ID NO: 34650 - DNA, 25 bp, Probe sequence
ggaagaagcaaagtatgttagtgtt

SEQ ID NO: 34651 - DNA, 25 bp, Probe sequence
tcagatgaattatggaacagatgga

SEQ ID NO: 34652 - DNA, 25 bp, Probe sequence
cagatgaattatggaacagatggaa

SEQ ID NO: 34653 - DNA, 25 bp, Probe sequence
atcagatgaattatggaacagatgg

SEQ ID NO: 34654 - DNA, 25 bp, Probe sequence
atatcaattacacatccaacctcaa

SEQ ID NO: 34655 - DNA, 25 bp, Probe sequence
aatatcaattacacatccaacctca

SEQ ID NO: 34656 - DNA, 25 bp, Probe sequence
acttacatccaggacatataatggt

SEQ ID NO: 34657 - DNA, 25 bp, Probe sequence
ggacttacatccaggacatataatg

SEQ ID NO: 34658 - DNA, 25 bp, Probe sequence
attacacatccaacctcaaacaatc

SEQ ID NO: 34659 - DNA, 25 bp, Probe sequence
aatgtttatcgctgagtttgctatg

SEQ ID NO: 34660 - DNA, 25 bp, Probe sequence
cgaatcaatcaacactacaaccaat

SEQ ID NO: 34661 - DNA, 25 bp, Probe sequence
aatcaacactacaaccaattaagga

SEQ ID NO: 34662 - DNA, 25 bp, Probe sequence
caatcaacactacaaccaattaagg

SEQ ID NO: 34663 - DNA, 25 bp, Probe sequence
atcaacactacaaccaattaaggat

SEQ ID NO: 34664 - DNA, 25 bp, Probe sequence
gaatcaatcaacactacaaccaatt

SEQ ID NO: 34665 - DNA, 25 bp, Probe sequence
tcaacactacaaccaattaaggata

SEQ ID NO: 34666 - DNA, 25 bp, Probe sequence
gcgaatcaatcaacactacaaccaa

SEQ ID NO: 34667 - DNA, 25 bp, Probe sequence
tcaatcaacactacaaccaattaag

SEQ ID NO: 34668 - DNA, 25 bp, Probe sequence
ttgcgaatcaatcaacactacaacc

SEQ ID NO: 34669 - DNA, 25 bp, Probe sequence
acgaatcaagagaagaaggttacaa

SEQ ID NO: 34670 - DNA, 25 bp, Probe sequence
tacgaatcaagagaagaaggttaca

SEQ ID NO: 34671 - DNA, 25 bp, Probe sequence
atagaacggttagtcctcggatata

SEQ ID NO: 34672 - DNA, 25 bp, Probe sequence
tatagaacggttagtcctcggatat

SEQ ID NO: 34673 - DNA, 25 bp, Probe sequence
ttatagaacggttagtcctcggata

SEQ ID NO: 34674 - DNA, 25 bp, Probe sequence
tagaacggttagtcctcggatatac

SEQ ID NO: 34675 - DNA, 25 bp, Probe sequence
ctacttatagaacggttagtcctcg

SEQ ID NO: 34676 - DNA, 25 bp, Probe sequence
gccattattatgaggtgattgtagt

SEQ ID NO: 34677 - DNA, 25 bp, Probe sequence
ggtacgaatcaagagaagaaggtta

SEQ ID NO: 34678 - DNA, 25 bp, Probe sequence
ttattaggcgtattgtggatgaatg

SEQ ID NO: 34679 - DNA, 25 bp, Probe sequence
tattaggcgtattgtggatgaatgc

SEQ ID NO: 34680 - DNA, 25 bp, Probe sequence
attattaggcgtattgtggatgaat

SEQ ID NO: 34681 - DNA, 25 bp, Probe sequence
aatgagtatgtacggttaggaggaa

SEQ ID NO: 34682 - DNA, 25 bp, Probe sequence
tattattaggcgtattgtggatgaa

SEQ ID NO: 34683 - DNA, 25 bp, Probe sequence
atattattaggcgtattgtggatga

SEQ ID NO: 34684 - DNA, 25 bp, Probe sequence
agatataagattaccgactgttagg

SEQ ID NO: 34685 - DNA, 25 bp, Probe sequence
atttgaagaaggattgaacgcattt

SEQ ID NO: 34686 - DNA, 25 bp, Probe sequence
tttgaagaaggattgaacgcattta

SEQ ID NO: 34687 - DNA, 25 bp, Probe sequence
aattggactagataagcgtatggac

SEQ ID NO: 34688 - DNA, 25 bp, Probe sequence
attggactagataagcgtatggact

SEQ ID NO: 34689 - DNA, 25 bp, Probe sequence
ttggactagataagcgtatggactt

SEQ ID NO: 34690 - DNA, 25 bp, Probe sequence
ctgaagccatacatgattagtgaag

SEQ ID NO: 34691 - DNA, 25 bp, Probe sequence
gccatacatgattagtgaaggtaac

SEQ ID NO: 34692 - DNA, 25 bp, Probe sequence
agccatacatgattagtgaaggtaa

SEQ ID NO: 34693 - DNA, 25 bp, Probe sequence
aagccatacatgattagtgaaggta

SEQ ID NO: 34694 - DNA, 25 bp, Probe sequence
gaagccatacatgattagtgaaggt

SEQ ID NO: 34695 - DNA, 25 bp, Probe sequence
tgaagccatacatgattagtgaagg

SEQ ID NO: 34696 - DNA, 25 bp, Probe sequence
atgaagtcacgcataatatcagcag

SEQ ID NO: 34697 - DNA, 25 bp, Probe sequence
tatgaagtcacgcataatatcagca

SEQ ID NO: 34698 - DNA, 25 bp, Probe sequence
ctatgaagtcacgcataatatcagc

SEQ ID NO: 34699 - DNA, 25 bp, Probe sequence
cgttgcgttacttaatatggctgtt

SEQ ID NO: 34700 - DNA, 25 bp, Probe sequence
tcctatgaagtcacgcataatatca

SEQ ID NO: 34701 - DNA, 25 bp, Probe sequence
cctatgaagtcacgcataatatcag

SEQ ID NO: 34702 - DNA, 25 bp, Probe sequence
ttcctatgaagtcacgcataatatc

SEQ ID NO: 34703 - DNA, 25 bp, Probe sequence
ataatcatacccgttgcgttactta

SEQ ID NO: 34704 - DNA, 25 bp, Probe sequence
tagagacggtttcaatatgtgtagg

SEQ ID NO: 34705 - DNA, 25 bp, Probe sequence
gttagatacttggtggatgacagaa

SEQ ID NO: 34706 - DNA, 25 bp, Probe sequence
attgttgtcgtagatgaggatgtag

SEQ ID NO: 34707 - DNA, 25 bp, Probe sequence
ttgtcgtagatgaggatgtagaaga

SEQ ID NO: 34708 - DNA, 25 bp, Probe sequence
gttgtcgtagatgaggatgtagaag

SEQ ID NO: 34709 - DNA, 25 bp, Probe sequence
taagaatgttaatgagtgctggtga

SEQ ID NO: 34710 - DNA, 25 bp, Probe sequence
cggatagattagagaacagtgaagc

SEQ ID NO: 34711 - DNA, 25 bp, Probe sequence
gcggatagattagagaacagtgaag

SEQ ID NO: 34712 - DNA, 25 bp, Probe sequence
aggatatgaaccaacagacgaatta

SEQ ID NO: 34713 - DNA, 25 bp, Probe sequence
aattgttgtcgtagatgaggatgta

SEQ ID NO: 34714 - DNA, 25 bp, Probe sequence
tctattgctgtcggtattgtattgt

SEQ ID NO: 34715 - DNA, 25 bp, Probe sequence
gtctctattgctgtcggtattgtat

SEQ ID NO: 34716 - DNA, 25 bp, Probe sequence
ctctattgctgtcggtattgtattg

SEQ ID NO: 34717 - DNA, 25 bp, Probe sequence
tctctattgctgtcggtattgtatt

SEQ ID NO: 34718 - DNA, 25 bp, Probe sequence
aattattcaagccagcaccattatt

SEQ ID NO: 34719 - DNA, 25 bp, Probe sequence
attgctgtcggtattgtattgtatt

SEQ ID NO: 34720 - DNA, 25 bp, Probe sequence
ggtgatgcgttatcgttattaagta

SEQ ID NO: 34721 - DNA, 25 bp, Probe sequence
ctattgctgtcggtattgtattgta

SEQ ID NO: 34722 - DNA, 25 bp, Probe sequence
tgtctctattgctgtcggtattgta

SEQ ID NO: 34723 - DNA, 25 bp, Probe sequence
gctgtaagagatgttagagaactca

SEQ ID NO: 34724 - DNA, 25 bp, Probe sequence
ggctgtaagagatgttagagaactc

SEQ ID NO: 34725 - DNA, 25 bp, Probe sequence
tagggctgtaagagatgttagagaa

SEQ ID NO: 34726 - DNA, 25 bp, Probe sequence
ctgtaagagatgttagagaactcat

SEQ ID NO: 34727 - DNA, 25 bp, Probe sequence
tgttactgaaactaccgaagaagaa

SEQ ID NO: 34728 - DNA, 25 bp, Probe sequence
ttgttactgaaactaccgaagaaga

SEQ ID NO: 34729 - DNA, 25 bp, Probe sequence
ctagggctgtaagagatgttagaga

SEQ ID NO: 34730 - DNA, 25 bp, Probe sequence
attgttactgaaactaccgaagaag

SEQ ID NO: 34731 - DNA, 25 bp, Probe sequence
aactaccgaagaagaattaaaccaa

SEQ ID NO: 34732 - DNA, 25 bp, Probe sequence
tacaagaagatggcacaataagagt

SEQ ID NO: 34733 - DNA, 25 bp, Probe sequence
atacaagaagatggcacaataagag

SEQ ID NO: 34734 - DNA, 25 bp, Probe sequence
aacaagaacagttagaacaacaacg

SEQ ID NO: 34735 - DNA, 25 bp, Probe sequence
tgaacaagaacagttagaacaacaa

SEQ ID NO: 34736 - DNA, 25 bp, Probe sequence
gaacaagaacagttagaacaacaac

SEQ ID NO: 34737 - DNA, 25 bp, Probe sequence
atgaacaagaacagttagaacaaca

SEQ ID NO: 34738 - DNA, 25 bp, Probe sequence
actatcgtcaacttgcttatgaaga

SEQ ID NO: 34739 - DNA, 25 bp, Probe sequence
ggatatacaagaagatggcacaata

SEQ ID NO: 34740 - DNA, 25 bp, Probe sequence
tactatcgtcaacttgcttatgaag

SEQ ID NO: 34741 - DNA, 25 bp, Probe sequence
tgtgattgtacttgattacgatgaa

SEQ ID NO: 34742 - DNA, 25 bp, Probe sequence
atgtgattgtacttgattacgatga

SEQ ID NO: 34743 - DNA, 25 bp, Probe sequence
cttagtttatgggttagtgagtgcg

SEQ ID NO: 34744 - DNA, 25 bp, Probe sequence
acttagtttatgggttagtgagtgc

SEQ ID NO: 34745 - DNA, 25 bp, Probe sequence
gcgtaggtatgtagatccaaactta

SEQ ID NO: 34746 - DNA, 25 bp, Probe sequence
atccctctaaatgagcgaataagtg

SEQ ID NO: 34747 - DNA, 25 bp, Probe sequence
tgtatatccctctaaatgagcgaat

SEQ ID NO: 34748 - DNA, 25 bp, Probe sequence
ttagtttatgggttagtgagtgcgt

SEQ ID NO: 34749 - DNA, 25 bp, Probe sequence
tatccctctaaatgagcgaataagt

SEQ ID NO: 34750 - DNA, 25 bp, Probe sequence
cagaattgaataccgaggaactaca

SEQ ID NO: 34751 - DNA, 25 bp, Probe sequence
acagaattgaataccgaggaactac

SEQ ID NO: 34752 - DNA, 25 bp, Probe sequence
cacagaattgaataccgaggaacta

SEQ ID NO: 34753 - DNA, 25 bp, Probe sequence
agaattgaataccgaggaactacaa

SEQ ID NO: 34754 - DNA, 25 bp, Probe sequence
tatctattattcacaacttgctcgt

SEQ ID NO: 34755 - DNA, 25 bp, Probe sequence
ggtgatacattgaattgttctggtg

SEQ ID NO: 34756 - DNA, 25 bp, Probe sequence
aggtgatacattgaattgttctggt

SEQ ID NO: 34757 - DNA, 25 bp, Probe sequence
gatacattgaattgttctggtgctg

SEQ ID NO: 34758 - DNA, 25 bp, Probe sequence
gtgatacattgaattgttctggtgc

SEQ ID NO: 34759 - DNA, 25 bp, Probe sequence
gttgatatgcttgaacagtggttaa

SEQ ID NO: 34760 - DNA, 25 bp, Probe sequence
aacgagtgaatgactgtccaattat

SEQ ID NO: 34761 - DNA, 25 bp, Probe sequence
acgagtgaatgactgtccaattatg

SEQ ID NO: 34762 - DNA, 25 bp, Probe sequence
attatggatgttgatatgcttgaac

SEQ ID NO: 34763 - DNA, 25 bp, Probe sequence
caattatggatgttgatatgcttga

SEQ ID NO: 34764 - DNA, 25 bp, Probe sequence
gtgttgctgtttacggtgatattaa

SEQ ID NO: 34765 - DNA, 25 bp, Probe sequence
ccaattatggatgttgatatgcttg

SEQ ID NO: 34766 - DNA, 25 bp, Probe sequence
agttgggcatttattaagatgtcac

SEQ ID NO: 34767 - DNA, 25 bp, Probe sequence
aattatggatgttgatatgcttgaa

SEQ ID NO: 34768 - DNA, 25 bp, Probe sequence
tcctattccgtcagactattggtat

SEQ ID NO: 34769 - DNA, 25 bp, Probe sequence
cctattccgtcagactattggtata

SEQ ID NO: 34770 - DNA, 25 bp, Probe sequence
cgcatgatgttatagaccaagacta

SEQ ID NO: 34771 - DNA, 25 bp, Probe sequence
ttccgtcagactattggtatagaac

SEQ ID NO: 34772 - DNA, 25 bp, Probe sequence
attccgtcagactattggtatagaa

SEQ ID NO: 34773 - DNA, 25 bp, Probe sequence
tatgtatggcgtgacaaggtatgta

SEQ ID NO: 34774 - DNA, 25 bp, Probe sequence
gtcctattccgtcagactattggta

SEQ ID NO: 34775 - DNA, 25 bp, Probe sequence
cttatgtatggcgtgacaaggtatg

SEQ ID NO: 34776 - DNA, 25 bp, Probe sequence
tattccgtcagactattggtataga

SEQ ID NO: 34777 - DNA, 25 bp, Probe sequence
atacattgcttcacaaggtaatcaa

SEQ ID NO: 34778 - DNA, 25 bp, Probe sequence
aatacattgcttcacaaggtaatca

SEQ ID NO: 34779 - DNA, 25 bp, Probe sequence
aacctgaagatacgattgtaacatt

SEQ ID NO: 34780 - DNA, 25 bp, Probe sequence
gaatacattgcttcacaaggtaatc

SEQ ID NO: 34781 - DNA, 25 bp, Probe sequence
ttgaagtggctgatgagtatttaga

SEQ ID NO: 34782 - DNA, 25 bp, Probe sequence
tgaagtggctgatgagtatttagac

SEQ ID NO: 34783 - DNA, 25 bp, Probe sequence
agttgaaacctgaagatacgattgt

SEQ ID NO: 34784 - DNA, 25 bp, Probe sequence
aagttgaaacctgaagatacgattg

SEQ ID NO: 34785 - DNA, 25 bp, Probe sequence
tttgaagtggctgatgagtatttag

SEQ ID NO: 34786 - DNA, 25 bp, Probe sequence
catcagtgaatcatacagcgataga

SEQ ID NO: 34787 - DNA, 25 bp, Probe sequence
atcagtgaatcatacagcgatagat

SEQ ID NO: 34788 - DNA, 25 bp, Probe sequence
atagatgaccgtagtgtgattggat

SEQ ID NO: 34789 - DNA, 25 bp, Probe sequence
tcagtgaatcatacagcgatagatg

SEQ ID NO: 34790 - DNA, 25 bp, Probe sequence
tagatgaccgtagtgtgattggatt

SEQ ID NO: 34791 - DNA, 25 bp, Probe sequence
gctgccattacaagttatactacac

SEQ ID NO: 34792 - DNA, 25 bp, Probe sequence
tgccattacaagttatactacacca

SEQ ID NO: 34793 - DNA, 25 bp, Probe sequence
tcatcagtgaatcatacagcgatag

SEQ ID NO: 34794 - DNA, 25 bp, Probe sequence
ccattacaagttatactacaccagc

SEQ ID NO: 34795 - DNA, 25 bp, Probe sequence
atggtgtatcagttgcctatcttag

SEQ ID NO: 34796 - DNA, 25 bp, Probe sequence
tggcacgacttacaacatatcatta

SEQ ID NO: 34797 - DNA, 25 bp, Probe sequence
aatggtgtatcagttgcctatctta

SEQ ID NO: 34798 - DNA, 25 bp, Probe sequence
ggcacgacttacaacatatcattaa

SEQ ID NO: 34799 - DNA, 25 bp, Probe sequence
attagcatcggttatggcatcaata

SEQ ID NO: 34800 - DNA, 25 bp, Probe sequence
tagcatcggttatggcatcaataat

SEQ ID NO: 34801 - DNA, 25 bp, Probe sequence
aacttatggcgatacaattagcatc

SEQ ID NO: 34802 - DNA, 25 bp, Probe sequence
atggcacgacttacaacatatcatt

SEQ ID NO: 34803 - DNA, 25 bp, Probe sequence
ttagcatcggttatggcatcaataa

SEQ ID NO: 34804 - DNA, 25 bp, Probe sequence
ttagtaagaaagaaacggagtgtgt

SEQ ID NO: 34805 - DNA, 25 bp, Probe sequence
tatggttgatggtaaaggtttggat

SEQ ID NO: 34806 - DNA, 25 bp, Probe sequence
atatggttgatggtaaaggtttgga

SEQ ID NO: 34807 - DNA, 25 bp, Probe sequence
cgtattgagatggatatttgtgagc

SEQ ID NO: 34808 - DNA, 25 bp, Probe sequence
tagtaagaaagaaacggagtgtgtc

SEQ ID NO: 34809 - DNA, 25 bp, Probe sequence
gtattgagatggatatttgtgagcc

SEQ ID NO: 34810 - DNA, 25 bp, Probe sequence
agacagacgtattgagatggatatt

SEQ ID NO: 34811 - DNA, 25 bp, Probe sequence
aagacagacgtattgagatggatat

SEQ ID NO: 34812 - DNA, 25 bp, Probe sequence
atggttgatggtaaaggtttggatt

SEQ ID NO: 34813 - DNA, 25 bp, Probe sequence
aagtgtggctgtatcaaataaagaa

SEQ ID NO: 34814 - DNA, 25 bp, Probe sequence
aaagtgtggctgtatcaaataaaga

SEQ ID NO: 34815 - DNA, 25 bp, Probe sequence
tgtggctgtatcaaataaagaatca

SEQ ID NO: 34816 - DNA, 25 bp, Probe sequence
agtgtggctgtatcaaataaagaat

SEQ ID NO: 34817 - DNA, 25 bp, Probe sequence
gtgtggctgtatcaaataaagaatc

SEQ ID NO: 34818 - DNA, 25 bp, Probe sequence
gtggctgtatcaaataaagaatcaa

SEQ ID NO: 34819 - DNA, 25 bp, Probe sequence
tggctgtatcaaataaagaatcaaa

SEQ ID NO: 34820 - DNA, 25 bp, Probe sequence
ataaagaatcaaaagcagtggcatt

SEQ ID NO: 34821 - DNA, 25 bp, Probe sequence
aataaagaatcaaaagcagtggcat

SEQ ID NO: 34822 - DNA, 25 bp, Probe sequence
aaagtgtggctgtatcaaatgaaga

SEQ ID NO: 34823 - DNA, 25 bp, Probe sequence
aagtgtggctgtatcaaatgaagag

SEQ ID NO: 34824 - DNA, 25 bp, Probe sequence
gtcacaagaggcacaagagattcaa

SEQ ID NO: 34825 - DNA, 25 bp, Probe sequence
tggctgtatcaaatgaagagtcaaa

SEQ ID NO: 34826 - DNA, 25 bp, Probe sequence
agacagtgacacatcaactaaagat

SEQ ID NO: 34827 - DNA, 25 bp, Probe sequence
aagacagtgacacatcaactaaaga

SEQ ID NO: 34828 - DNA, 25 bp, Probe sequence
agaaagacagtgacacatcaactaa

SEQ ID NO: 34829 - DNA, 25 bp, Probe sequence
aaagacagtgacacatcaactaaag

SEQ ID NO: 34830 - DNA, 25 bp, Probe sequence
gaaagacagtgacacatcaactaaa

SEQ ID NO: 34831 - DNA, 25 bp, Probe sequence
agcaacataataagaaagcatcaca

SEQ ID NO: 34832 - DNA, 25 bp, Probe sequence
aactcaacgacaaagactaatcaaa

SEQ ID NO: 34833 - DNA, 25 bp, Probe sequence
gtaactcaacgacaaagactaatca

SEQ ID NO: 34834 - DNA, 25 bp, Probe sequence
aatttaagcgatacatcacaagagg

SEQ ID NO: 34835 - DNA, 25 bp, Probe sequence
acataataagaaagcatcacaaggt

SEQ ID NO: 34836 - DNA, 25 bp, Probe sequence
gcaacataataagaaagcatcacaa

SEQ ID NO: 34837 - DNA, 25 bp, Probe sequence
gttcaagtaactcaacgacaaagac

SEQ ID NO: 34838 - DNA, 25 bp, Probe sequence
agaagcacaaacagaaacggataaa

SEQ ID NO: 34839 - DNA, 25 bp, Probe sequence
atacatcacaagaagcacaagcgat

SEQ ID NO: 34840 - DNA, 25 bp, Probe sequence
atgatgtatcagagtcagagacagt

SEQ ID NO: 34841 - DNA, 25 bp, Probe sequence
gatgtatcagagtcagagacagtta

SEQ ID NO: 34842 - DNA, 25 bp, Probe sequence
aagaatgatgtatcagagtcagaga

SEQ ID NO: 34843 - DNA, 25 bp, Probe sequence
aatgatgtatcagagtcagagacag

SEQ ID NO: 34844 - DNA, 25 bp, Probe sequence
gaatgatgtatcagagtcagagaca

SEQ ID NO: 34845 - DNA, 25 bp, Probe sequence
tgtatcagagtcagagacagttaat

SEQ ID NO: 34846 - DNA, 25 bp, Probe sequence
atgtatcagagtcagagacagttaa

SEQ ID NO: 34847 - DNA, 25 bp, Probe sequence
agaatgatgtatcagagtcagagac

SEQ ID NO: 34848 - DNA, 25 bp, Probe sequence
tgatgtatcagagtcagagacagtt

SEQ ID NO: 34849 - DNA, 25 bp, Probe sequence
gtgtagaaggtcaagttcaaggtat

SEQ ID NO: 34850 - DNA, 25 bp, Probe sequence
tgtagaaggtcaagttcaaggtatt

SEQ ID NO: 34851 - DNA, 25 bp, Probe sequence
aaggtcaagttcaaggtattactcg

SEQ ID NO: 34852 - DNA, 25 bp, Probe sequence
gtcaagttcaaggtattactcgtga

SEQ ID NO: 34853 - DNA, 25 bp, Probe sequence
agaaggtcaagttcaaggtattact

SEQ ID NO: 34854 - DNA, 25 bp, Probe sequence
gaaggtcaagttcaaggtattactc

SEQ ID NO: 34855 - DNA, 25 bp, Probe sequence
ggtcaagttcaaggtattactcgtg

SEQ ID NO: 34856 - DNA, 25 bp, Probe sequence
aggtcaagttcaaggtattactcgt

SEQ ID NO: 34857 - DNA, 25 bp, Probe sequence
ggtgtagaaggtcaagttcaaggta

SEQ ID NO: 34858 - DNA, 25 bp, Probe sequence
agcagatcgtgtattcttatgtgaa

SEQ ID NO: 34859 - DNA, 25 bp, Probe sequence
aagcagatcgtgtattcttatgtga

SEQ ID NO: 34860 - DNA, 25 bp, Probe sequence
caaggatcggatattgagaactacg

SEQ ID NO: 34861 - DNA, 25 bp, Probe sequence
ttgatgtgtatgtggatggtgagtt

SEQ ID NO: 34862 - DNA, 25 bp, Probe sequence
acatgaagttcaaggatcggatatt

SEQ ID NO: 34863 - DNA, 25 bp, Probe sequence
catgaagttcaaggatcggatattg

SEQ ID NO: 34864 - DNA, 25 bp, Probe sequence
gacatgaagttcaaggatcggatat

SEQ ID NO: 34865 - DNA, 25 bp, Probe sequence
tatgggattgcctgaaagtgattat

SEQ ID NO: 34866 - DNA, 25 bp, Probe sequence
cagcacgaaagaaatatccacataa

SEQ ID NO: 34867 - DNA, 25 bp, Probe sequence
tgttatatcttggtagcggtatgaa

SEQ ID NO: 34868 - DNA, 25 bp, Probe sequence
tcacattaccatacgaataagccag

SEQ ID NO: 34869 - DNA, 25 bp, Probe sequence
atgttatatcttggtagcggtatga

SEQ ID NO: 34870 - DNA, 25 bp, Probe sequence
ttcacattaccatacgaataagcca

SEQ ID NO: 34871 - DNA, 25 bp, Probe sequence
gaattacggcattacaagatgacat

SEQ ID NO: 34872 - DNA, 25 bp, Probe sequence
aagaattacggcattacaagatgac

SEQ ID NO: 34873 - DNA, 25 bp, Probe sequence
caagaattacggcattacaagatga

SEQ ID NO: 34874 - DNA, 25 bp, Probe sequence
tcaagaattacggcattacaagatg

SEQ ID NO: 34875 - DNA, 25 bp, Probe sequence
ttcaagaattacggcattacaagat

SEQ ID NO: 34876 - DNA, 25 bp, Probe sequence
tgaatacggtagtgaacaatagcat

SEQ ID NO: 34877 - DNA, 25 bp, Probe sequence
atgaatacggtagtgaacaatagca

SEQ ID NO: 34878 - DNA, 25 bp, Probe sequence
atacggtagtgaacaatagcatagc

SEQ ID NO: 34879 - DNA, 25 bp, Probe sequence
aatgaatacggtagtgaacaatagc

SEQ ID NO: 34880 - DNA, 25 bp, Probe sequence
ggtagtgaacaatagcatagcaatt

SEQ ID NO: 34881 - DNA, 25 bp, Probe sequence
ccaatgaatacggtagtgaacaata

SEQ ID NO: 34882 - DNA, 25 bp, Probe sequence
cggtagtgaacaatagcatagcaat

SEQ ID NO: 34883 - DNA, 25 bp, Probe sequence
atgactattatgttgctaattggcg

SEQ ID NO: 34884 - DNA, 25 bp, Probe sequence
gaatacggtagtgaacaatagcata

SEQ ID NO: 34885 - DNA, 25 bp, Probe sequence
caaggtcaattaaatggtgtcgtaa

SEQ ID NO: 34886 - DNA, 25 bp, Probe sequence
aaggtcaattaaatggtgtcgtaaa

SEQ ID NO: 34887 - DNA, 25 bp, Probe sequence
atacaaggtcaattaaatggtgtcg

SEQ ID NO: 34888 - DNA, 25 bp, Probe sequence
acaaggtcaattaaatggtgtcgta

SEQ ID NO: 34889 - DNA, 25 bp, Probe sequence
tacaaggtcaattaaatggtgtcgt

SEQ ID NO: 34890 - DNA, 25 bp, Probe sequence
agaatacaaggtcaattaaatggtg

SEQ ID NO: 34891 - DNA, 25 bp, Probe sequence
aatacaaggtcaattaaatggtgtc

SEQ ID NO: 34892 - DNA, 25 bp, Probe sequence
gaatacaaggtcaattaaatggtgt

SEQ ID NO: 34893 - DNA, 25 bp, Probe sequence
tgcatctaaaggttctatacaacgt

SEQ ID NO: 34894 - DNA, 25 bp, Probe sequence
aatctcttgttaatgaggttggtga

SEQ ID NO: 34895 - DNA, 25 bp, Probe sequence
atctcttgttaatgaggttggtgag

SEQ ID NO: 34896 - DNA, 25 bp, Probe sequence
ctaggtggtacattagcaattatcc

SEQ ID NO: 34897 - DNA, 25 bp, Probe sequence
gataatgagcagcatgtgacatatt

SEQ ID NO: 34898 - DNA, 25 bp, Probe sequence
tataacggactattaggtgtgtctg

SEQ ID NO: 34899 - DNA, 25 bp, Probe sequence
acttataacggactattaggtgtgt

SEQ ID NO: 34900 - DNA, 25 bp, Probe sequence
ggataatgagcagcatgtgacatat

SEQ ID NO: 34901 - DNA, 25 bp, Probe sequence
ataacggactattaggtgtgtctgt

SEQ ID NO: 34902 - DNA, 25 bp, Probe sequence
taacggactattaggtgtgtctgtt

SEQ ID NO: 34903 - DNA, 25 bp, Probe sequence
tatacaaaggcggtttcaattcact

SEQ ID NO: 34904 - DNA, 25 bp, Probe sequence
gcggtttcaattcacttgtcttaaa

SEQ ID NO: 34905 - DNA, 25 bp, Probe sequence
atacaaaggcggtttcaattcactt

SEQ ID NO: 34906 - DNA, 25 bp, Probe sequence
ggcggtttcaattcacttgtcttaa

SEQ ID NO: 34907 - DNA, 25 bp, Probe sequence
gcaagtgcgaataatataatagaag

SEQ ID NO: 34908 - DNA, 25 bp, Probe sequence
tcaattcacttgtcttaaactttgt

SEQ ID NO: 34909 - DNA, 25 bp, Probe sequence
tacaaaggcggtttcaattcacttg

SEQ ID NO: 34910 - DNA, 25 bp, Probe sequence
aagtatacaaaggcggtttcaattc

SEQ ID NO: 34911 - DNA, 25 bp, Probe sequence
aaagtatacaaaggcggtttcaatt

SEQ ID NO: 34912 - DNA, 25 bp, Probe sequence
tgttgttgaaattactaatgaaggt

SEQ ID NO: 34913 - DNA, 25 bp, Probe sequence
cgttggaaatgacacattacaaatt

SEQ ID NO: 34914 - DNA, 25 bp, Probe sequence
acgttggaaatgacacattacaaat

SEQ ID NO: 34915 - DNA, 25 bp, Probe sequence
atgttgttgaaattactaatgaagg

SEQ ID NO: 34916 - DNA, 25 bp, Probe sequence
agtgtactaaatgtaaacgttggaa

SEQ ID NO: 34917 - DNA, 25 bp, Probe sequence
aagtgtactaaatgtaaacgttgga

SEQ ID NO: 34918 - DNA, 25 bp, Probe sequence
actaaatgtaaacgttggaaatgac

SEQ ID NO: 34919 - DNA, 25 bp, Probe sequence
aaatgtaaacgttggaaatgacaca

SEQ ID NO: 34920 - DNA, 25 bp, Probe sequence
gtgtactaaatgtaaacgttggaaa

SEQ ID NO: 34921 - DNA, 25 bp, Probe sequence
tctacctagtgtggaacttgatgag

SEQ ID NO: 34922 - DNA, 25 bp, Probe sequence
ctctacctagtgtggaacttgatga

SEQ ID NO: 34923 - DNA, 25 bp, Probe sequence
gactctacctagtgtggaacttgat

SEQ ID NO: 34924 - DNA, 25 bp, Probe sequence
tatgaggagtcaggacctactaatg

SEQ ID NO: 34925 - DNA, 25 bp, Probe sequence
ttatgaggagtcaggacctactaat

SEQ ID NO: 34926 - DNA, 25 bp, Probe sequence
gttatgaggagtcaggacctactaa

SEQ ID NO: 34927 - DNA, 25 bp, Probe sequence
actctacctagtgtggaacttgatg

SEQ ID NO: 34928 - DNA, 25 bp, Probe sequence
ctacagactctacctagtgtggaac

SEQ ID NO: 34929 - DNA, 25 bp, Probe sequence
tacagactctacctagtgtggaact

SEQ ID NO: 34930 - DNA, 25 bp, Probe sequence
aaggtctagttccaattacatcatt

SEQ ID NO: 34931 - DNA, 25 bp, Probe sequence
attatgcctgtcattagagcgacta

SEQ ID NO: 34932 - DNA, 25 bp, Probe sequence
tattacgttgatgaagctattgcac

SEQ ID NO: 34933 - DNA, 25 bp, Probe sequence
ttattacgttgatgaagctattgca

SEQ ID NO: 34934 - DNA, 25 bp, Probe sequence
aggtatcacgattaaacttaacgct

SEQ ID NO: 34935 - DNA, 25 bp, Probe sequence
aattatgcctgtcattagagcgact

SEQ ID NO: 34936 - DNA, 25 bp, Probe sequence
ttatgcctgtcattagagcgactag

SEQ ID NO: 34937 - DNA, 25 bp, Probe sequence
aaggtatcacgattaaacttaacgc

SEQ ID NO: 34938 - DNA, 25 bp, Probe sequence
ggtatcacgattaaacttaacgcta

SEQ ID NO: 34939 - DNA, 25 bp, Probe sequence
ccagattgtagagtgatagaaccag

SEQ ID NO: 34940 - DNA, 25 bp, Probe sequence
gtccagattgtagagtgatagaacc

SEQ ID NO: 34941 - DNA, 25 bp, Probe sequence
tccagattgtagagtgatagaacca

SEQ ID NO: 34942 - DNA, 25 bp, Probe sequence
tgtccagattgtagagtgatagaac

SEQ ID NO: 34943 - DNA, 25 bp, Probe sequence
gtgtccagattgtagagtgatagaa

SEQ ID NO: 34944 - DNA, 25 bp, Probe sequence
cagattgtagagtgatagaaccaga

SEQ ID NO: 34945 - DNA, 25 bp, Probe sequence
ggtgtccagattgtagagtgataga

SEQ ID NO: 34946 - DNA, 25 bp, Probe sequence
agattgtagagtgatagaaccagat

SEQ ID NO: 34947 - DNA, 25 bp, Probe sequence
gattgtagagtgatagaaccagatt

SEQ ID NO: 34948 - DNA, 25 bp, Probe sequence
gaccaacaacatcgctatctactta

SEQ ID NO: 34949 - DNA, 25 bp, Probe sequence
accaacaacatcgctatctacttaa

SEQ ID NO: 34950 - DNA, 25 bp, Probe sequence
gcgtcaatgaagtattagagatgtt

SEQ ID NO: 34951 - DNA, 25 bp, Probe sequence
aagagtcagatgaagtgatactagc

SEQ ID NO: 34952 - DNA, 25 bp, Probe sequence
tgaccaacaacatcgctatctactt

SEQ ID NO: 34953 - DNA, 25 bp, Probe sequence
atgaccaacaacatcgctatctact

SEQ ID NO: 34954 - DNA, 25 bp, Probe sequence
atcacaatcatcacaatgtatccaa

SEQ ID NO: 34955 - DNA, 25 bp, Probe sequence
gatcacaatcatcacaatgtatcca

SEQ ID NO: 34956 - DNA, 25 bp, Probe sequence
cgtcaatgaagtattagagatgttg

SEQ ID NO: 34957 - DNA, 25 bp, Probe sequence
ttagatgtagacttgtatgttggcg

SEQ ID NO: 34958 - DNA, 25 bp, Probe sequence
gataatcgttatggttgtgtcttgg

SEQ ID NO: 34959 - DNA, 25 bp, Probe sequence
ggataatcgttatggttgtgtcttg

SEQ ID NO: 34960 - DNA, 25 bp, Probe sequence
attagatgtagacttgtatgttggc

SEQ ID NO: 34961 - DNA, 25 bp, Probe sequence
aatgttcaagaagaggttggattac

SEQ ID NO: 34962 - DNA, 25 bp, Probe sequence
atgttcaagaagaggttggattacg

SEQ ID NO: 34963 - DNA, 25 bp, Probe sequence
tagtagaagcacatgacattgaaca

SEQ ID NO: 34964 - DNA, 25 bp, Probe sequence
agttagtagaagcacatgacattga

SEQ ID NO: 34965 - DNA, 25 bp, Probe sequence
ttagtagaagcacatgacattgaac

SEQ ID NO: 34966 - DNA, 25 bp, Probe sequence
aaggctatgtcagattcaataacca

SEQ ID NO: 34967 - DNA, 25 bp, Probe sequence
aggctatgtcagattcaataaccat

SEQ ID NO: 34968 - DNA, 25 bp, Probe sequence
ggctatgtcagattcaataaccatc

SEQ ID NO: 34969 - DNA, 25 bp, Probe sequence
gctatgtcagattcaataaccatca

SEQ ID NO: 34970 - DNA, 25 bp, Probe sequence
atgtcacagtaattccatcaatgct

SEQ ID NO: 34971 - DNA, 25 bp, Probe sequence
cagtaattccatcaatgctgaagtc

SEQ ID NO: 34972 - DNA, 25 bp, Probe sequence
taattccatcaatgctgaagtcgtc

SEQ ID NO: 34973 - DNA, 25 bp, Probe sequence
agtaattccatcaatgctgaagtcg

SEQ ID NO: 34974 - DNA, 25 bp, Probe sequence
cacagtaattccatcaatgctgaag

SEQ ID NO: 34975 - DNA, 25 bp, Probe sequence
gtagaagaacttgttgagaatgagc

SEQ ID NO: 34976 - DNA, 25 bp, Probe sequence
ttaagaagaatcctaatgacaccgt

SEQ ID NO: 34977 - DNA, 25 bp, Probe sequence
ttacaacttgcgaattatgacgatg

SEQ ID NO: 34978 - DNA, 25 bp, Probe sequence
gttacaacttgcgaattatgacgat

SEQ ID NO: 34979 - DNA, 25 bp, Probe sequence
atgttacaacttgcgaattatgacg

SEQ ID NO: 34980 - DNA, 25 bp, Probe sequence
taagaagaatcctaatgacaccgta

SEQ ID NO: 34981 - DNA, 25 bp, Probe sequence
caacttgcgaattatgacgatgatt

SEQ ID NO: 34982 - DNA, 25 bp, Probe sequence
cgatgaggcattagatgaagagaat

SEQ ID NO: 34983 - DNA, 25 bp, Probe sequence
ataacagacgatgaggcattagatg

SEQ ID NO: 34984 - DNA, 25 bp, Probe sequence
cgtatgaaccttatattgaccgtaa

SEQ ID NO: 34985 - DNA, 25 bp, Probe sequence
tgaaccttatattgaccgtaagcat

SEQ ID NO: 34986 - DNA, 25 bp, Probe sequence
atgaaccttatattgaccgtaagca

SEQ ID NO: 34987 - DNA, 25 bp, Probe sequence
gaaccttatattgaccgtaagcatt

SEQ ID NO: 34988 - DNA, 25 bp, Probe sequence
tatgaaccttatattgaccgtaagc

SEQ ID NO: 34989 - DNA, 25 bp, Probe sequence
attggtcaatatagcggtaactatt

SEQ ID NO: 34990 - DNA, 25 bp, Probe sequence
atgaataatgatagaggacaaagcc

SEQ ID NO: 34991 - DNA, 25 bp, Probe sequence
tcagattgtatatgcgaatcgtaat

SEQ ID NO: 34992 - DNA, 25 bp, Probe sequence
atcagattgtatatgcgaatcgtaa

SEQ ID NO: 34993 - DNA, 25 bp, Probe sequence
tacacgatgcgattatgattgaatg

SEQ ID NO: 34994 - DNA, 25 bp, Probe sequence
cctatacacgatgcgattatgattg

SEQ ID NO: 34995 - DNA, 25 bp, Probe sequence
acctatacacgatgcgattatgatt

SEQ ID NO: 34996 - DNA, 25 bp, Probe sequence
ttcaaggtagcagtattatggcaat

SEQ ID NO: 34997 - DNA, 25 bp, Probe sequence
cgatgcgattatgattgaatgtgaa

SEQ ID NO: 34998 - DNA, 25 bp, Probe sequence
tacctatacacgatgcgattatgat

SEQ ID NO: 34999 - DNA, 25 bp, Probe sequence
aaggtagcagtattatggcaatcta

SEQ ID NO: 35000 - DNA, 25 bp, Probe sequence
caaggtagcagtattatggcaatct

SEQ ID NO: 35001 - DNA, 25 bp, Probe sequence
tcaaggtagcagtattatggcaatc

SEQ ID NO: 35002 - DNA, 25 bp, Probe sequence
ataatggtagaatgagatatgcgtt

SEQ ID NO: 35003 - DNA, 25 bp, Probe sequence
aataatggtagaatgagatatgcgt

SEQ ID NO: 35004 - DNA, 25 bp, Probe sequence
gtatcaatacaggtgctaataatgc

SEQ ID NO: 35005 - DNA, 25 bp, Probe sequence
ttaacggtcatggatctaaggcata

SEQ ID NO: 35006 - DNA, 25 bp, Probe sequence
tggtatcaatacaggtgctaataat

SEQ ID NO: 35007 - DNA, 25 bp, Probe sequence
gcgtacattaggtagttggataata

SEQ ID NO: 35008 - DNA, 25 bp, Probe sequence
ttggtatcaatacaggtgctaataa

SEQ ID NO: 35009 - DNA, 25 bp, Probe sequence
attaacggtcatggatctaaggcat

SEQ ID NO: 35010 - DNA, 25 bp, Probe sequence
agttgtctcagcttatgaagtatca

SEQ ID NO: 35011 - DNA, 25 bp, Probe sequence
tgaaaggaaatatacaatgcctacg

SEQ ID NO: 35012 - DNA, 25 bp, Probe sequence
gaaaggaaatatacaatgcctacga

SEQ ID NO: 35013 - DNA, 25 bp, Probe sequence
aaggaaatatacaatgcctacgatt

SEQ ID NO: 35014 - DNA, 25 bp, Probe sequence
aaaggaaatatacaatgcctacgat

SEQ ID NO: 35015 - DNA, 25 bp, Probe sequence
ggaaatatacaatgcctacgattaa

SEQ ID NO: 35016 - DNA, 25 bp, Probe sequence
aggaaatatacaatgcctacgatta

SEQ ID NO: 35017 - DNA, 25 bp, Probe sequence
gggcatagggaaagttttattgaag

SEQ ID NO: 35018 - DNA, 25 bp, Probe sequence
ggcatagggaaagttttattgaagt

SEQ ID NO: 35019 - DNA, 25 bp, Probe sequence
gacggtaaaagttgtaaggtatgtt

SEQ ID NO: 35020 - DNA, 25 bp, Probe sequence
aggcgattatagtaacaagttgatt

SEQ ID NO: 35021 - DNA, 25 bp, Probe sequence
aaggcgattatagtaacaagttgat

SEQ ID NO: 35022 - DNA, 25 bp, Probe sequence
aagtcaaggagataaagcagttcat

SEQ ID NO: 35023 - DNA, 25 bp, Probe sequence
aaagtcaaggagataaagcagttca

SEQ ID NO: 35024 - DNA, 25 bp, Probe sequence
actgggataagaataaaggcgatta

SEQ ID NO: 35025 - DNA, 25 bp, Probe sequence
tactgggataagaataaaggcgatt

SEQ ID NO: 35026 - DNA, 25 bp, Probe sequence
ttactgggataagaataaaggcgat

SEQ ID NO: 35027 - DNA, 25 bp, Probe sequence
agtcaaggagataaagcagttcata

SEQ ID NO: 35028 - DNA, 25 bp, Probe sequence
atcaaatcaatttaccgacacatcc

SEQ ID NO: 35029 - DNA, 25 bp, Probe sequence
aacttgtatgtatggtggtgtaact

SEQ ID NO: 35030 - DNA, 25 bp, Probe sequence
ttgtatgtatggtggtgtaactgag

SEQ ID NO: 35031 - DNA, 25 bp, Probe sequence
cttgtatgtatggtggtgtaactga

SEQ ID NO: 35032 - DNA, 25 bp, Probe sequence
acttgtatgtatggtggtgtaactg

SEQ ID NO: 35033 - DNA, 25 bp, Probe sequence
aaggtgactgctcaagaattagatt

SEQ ID NO: 35034 - DNA, 25 bp, Probe sequence
tgactgctcaagaattagattacct

SEQ ID NO: 35035 - DNA, 25 bp, Probe sequence
gtgactgctcaagaattagattacc

SEQ ID NO: 35036 - DNA, 25 bp, Probe sequence
ggtgactgctcaagaattagattac

SEQ ID NO: 35037 - DNA, 25 bp, Probe sequence
aggtgactgctcaagaattagatta

SEQ ID NO: 35038 - DNA, 25 bp, Probe sequence
atcaagaagacgatggcagtaatat

SEQ ID NO: 35039 - DNA, 25 bp, Probe sequence
aagatcatcctgaattggttgacat

SEQ ID NO: 35040 - DNA, 25 bp, Probe sequence
tcaagaagacgatggcagtaatatt

SEQ ID NO: 35041 - DNA, 25 bp, Probe sequence
agatcatcctgaattggttgacatg

SEQ ID NO: 35042 - DNA, 25 bp, Probe sequence
gatcatcctgaattggttgacatgg

SEQ ID NO: 35043 - DNA, 25 bp, Probe sequence
tacacattgaaattggttcgggtat

SEQ ID NO: 35044 - DNA, 25 bp, Probe sequence
atacacattgaaattggttcgggta

SEQ ID NO: 35045 - DNA, 25 bp, Probe sequence
ggactatttgcctacagtttagaaa

SEQ ID NO: 35046 - DNA, 25 bp, Probe sequence
tgcctacagtttagaaagtatgtct

SEQ ID NO: 35047 - DNA, 25 bp, Probe sequence
agaagaacaacacactatggcaata

SEQ ID NO: 35048 - DNA, 25 bp, Probe sequence
tagaagaacaacacactatggcaat

SEQ ID NO: 35049 - DNA, 25 bp, Probe sequence
taatcactcctattgctacttcgtt

SEQ ID NO: 35050 - DNA, 25 bp, Probe sequence
ataatcactcctattgctacttcgt

SEQ ID NO: 35051 - DNA, 25 bp, Probe sequence
tactagaagaacaacacactatggc

SEQ ID NO: 35052 - DNA, 25 bp, Probe sequence
acattgtcgttaggaataatcactc

SEQ ID NO: 35053 - DNA, 25 bp, Probe sequence
gcaacattgtcgttaggaataatca

SEQ ID NO: 35054 - DNA, 25 bp, Probe sequence
tgctactagaagaacaacacactat

SEQ ID NO: 35055 - DNA, 25 bp, Probe sequence
atgctactagaagaacaacacacta

SEQ ID NO: 35056 - DNA, 25 bp, Probe sequence
ttatccagaggtaacttcaatccag

SEQ ID NO: 35057 - DNA, 25 bp, Probe sequence
tatccagaggtaacttcaatccaga

SEQ ID NO: 35058 - DNA, 25 bp, Probe sequence
ttaatatctctaacggcttgtcagg

SEQ ID NO: 35059 - DNA, 25 bp, Probe sequence
taatatctctaacggcttgtcaggt

SEQ ID NO: 35060 - DNA, 25 bp, Probe sequence
gcaacatcagattccgataagttaa

SEQ ID NO: 35061 - DNA, 25 bp, Probe sequence
ccagaggtaacttcaatccagaatt

SEQ ID NO: 35062 - DNA, 25 bp, Probe sequence
ggtaggttattcttatggtggagat

SEQ ID NO: 35063 - DNA, 25 bp, Probe sequence
tccagaggtaacttcaatccagaat

SEQ ID NO: 35064 - DNA, 25 bp, Probe sequence
atccagaggtaacttcaatccagaa

SEQ ID NO: 35065 - DNA, 25 bp, Probe sequence
aaggaggtatcgtattgtgaatcaa

SEQ ID NO: 35066 - DNA, 25 bp, Probe sequence
caaggaggtatcgtattgtgaatca

SEQ ID NO: 35067 - DNA, 25 bp, Probe sequence
ggataccgaattaccatgctgataa

SEQ ID NO: 35068 - DNA, 25 bp, Probe sequence
aagatattcatgtattggcgtcatt

SEQ ID NO: 35069 - DNA, 25 bp, Probe sequence
aatagtgccatgattgttcgtgaag

SEQ ID NO: 35070 - DNA, 25 bp, Probe sequence
agatattcatgtattggcgtcatta

SEQ ID NO: 35071 - DNA, 25 bp, Probe sequence
gaagaaggatatcgtgcattgttac

SEQ ID NO: 35072 - DNA, 25 bp, Probe sequence
tgagtaaattgaatgattgtggtgc

SEQ ID NO: 35073 - DNA, 25 bp, Probe sequence
tgaagaaggatatcgtgcattgtta

SEQ ID NO: 35074 - DNA, 25 bp, Probe sequence
cattaccaatatcatcaattaccgc

SEQ ID NO: 35075 - DNA, 25 bp, Probe sequence
attaccaatatcatcaattaccgct

SEQ ID NO: 35076 - DNA, 25 bp, Probe sequence
cgttcgtgaagcattagatcatatc

SEQ ID NO: 35077 - DNA, 25 bp, Probe sequence
atcatactgtagatgttaaggaacg

SEQ ID NO: 35078 - DNA, 25 bp, Probe sequence
gttcgtgaagcattagatcatatca

SEQ ID NO: 35079 - DNA, 25 bp, Probe sequence
taccaatatcatcaattaccgctaa

SEQ ID NO: 35080 - DNA, 25 bp, Probe sequence
ttaccaatatcatcaattaccgcta

SEQ ID NO: 35081 - DNA, 25 bp, Probe sequence
ccgttcgtgaagcattagatcatat

SEQ ID NO: 35082 - DNA, 25 bp, Probe sequence
acagttatattgcttacaacgatca

SEQ ID NO: 35083 - DNA, 25 bp, Probe sequence
ctagaacatcaagtattggcagtac

SEQ ID NO: 35084 - DNA, 25 bp, Probe sequence
ccgaaagccaaacaacaaagattaa

SEQ ID NO: 35085 - DNA, 25 bp, Probe sequence
accgaaagccaaacaacaaagatta

SEQ ID NO: 35086 - DNA, 25 bp, Probe sequence
tctagaacatcaagtattggcagta

SEQ ID NO: 35087 - DNA, 25 bp, Probe sequence
gaccgaaagccaaacaacaaagatt

SEQ ID NO: 35088 - DNA, 25 bp, Probe sequence
tagaccgaaagccaaacaacaaaga

SEQ ID NO: 35089 - DNA, 25 bp, Probe sequence
ctagaccgaaagccaaacaacaaag

SEQ ID NO: 35090 - DNA, 25 bp, Probe sequence
gtactgataattccagaagtgttaa

SEQ ID NO: 35091 - DNA, 25 bp, Probe sequence
tagaacatcaagtattggcagtact

SEQ ID NO: 35092 - DNA, 25 bp, Probe sequence
acctattactcctgagattatgctt

SEQ ID NO: 35093 - DNA, 25 bp, Probe sequence
aacctattactcctgagattatgct

SEQ ID NO: 35094 - DNA, 25 bp, Probe sequence
gaacctattactcctgagattatgc

SEQ ID NO: 35095 - DNA, 25 bp, Probe sequence
ggcattatcagcagaaggtattgtg

SEQ ID NO: 35096 - DNA, 25 bp, Probe sequence
gatataaggatatgaacacttggct

SEQ ID NO: 35097 - DNA, 25 bp, Probe sequence
agatataaggatatgaacacttggc

SEQ ID NO: 35098 - DNA, 25 bp, Probe sequence
atataaggatatgaacacttggctt

SEQ ID NO: 35099 - DNA, 25 bp, Probe sequence
aatggaacctattactcctgagatt

SEQ ID NO: 35100 - DNA, 25 bp, Probe sequence
aagcgtatggaaatggaacctatta

SEQ ID NO: 35101 - DNA, 25 bp, Probe sequence
aagctgaagtaccaaaagaattaac

SEQ ID NO: 35102 - DNA, 25 bp, Probe sequence
gaagctgaagtaccaaaagaattaa

SEQ ID NO: 35103 - DNA, 25 bp, Probe sequence
agttattgagcttttagttgacttt

SEQ ID NO: 35104 - DNA, 25 bp, Probe sequence
ttttcaacagcatcggttacagagc

SEQ ID NO: 35105 - DNA, 25 bp, Probe sequence
gttattgagcttttagttgactttt

SEQ ID NO: 35106 - DNA, 25 bp, Probe sequence
acaaagttattgagcttttagttga

SEQ ID NO: 35107 - DNA, 25 bp, Probe sequence
caaagttattgagcttttagttgac

SEQ ID NO: 35108 - DNA, 25 bp, Probe sequence
aaagttattgagcttttagttgact

SEQ ID NO: 35109 - DNA, 25 bp, Probe sequence
tcaacaaagttattgagcttttagt

SEQ ID NO: 35110 - DNA, 25 bp, Probe sequence
aaggatcttcaagtaatgcttatgc

SEQ ID NO: 35111 - DNA, 25 bp, Probe sequence
tgaatggtgttaccgttgaagatat

SEQ ID NO: 35112 - DNA, 25 bp, Probe sequence
cgtatttggcgatggtatttatgaa

SEQ ID NO: 35113 - DNA, 25 bp, Probe sequence
gtgaatggtgttaccgttgaagata

SEQ ID NO: 35114 - DNA, 25 bp, Probe sequence
acacatccgattaacaactatattc

SEQ ID NO: 35115 - DNA, 25 bp, Probe sequence
ttgaagatatccgatggttacgttg

SEQ ID NO: 35116 - DNA, 25 bp, Probe sequence
gttgaagatatccgatggttacgtt

SEQ ID NO: 35117 - DNA, 25 bp, Probe sequence
ggtttcatacaacgacagaggatac

SEQ ID NO: 35118 - DNA, 25 bp, Probe sequence
aggtttcatacaacgacagaggata

SEQ ID NO: 35119 - DNA, 25 bp, Probe sequence
gaagatatgaatgtggattggaaga

SEQ ID NO: 35120 - DNA, 25 bp, Probe sequence
agaagatatgaatgtggattggaag

SEQ ID NO: 35121 - DNA, 25 bp, Probe sequence
cggttgtaacagaagatgctatcat

SEQ ID NO: 35122 - DNA, 25 bp, Probe sequence
attggtacggatgaagaatctgatt

SEQ ID NO: 35123 - DNA, 25 bp, Probe sequence
ttattggtacggatgaagaatctga

SEQ ID NO: 35124 - DNA, 25 bp, Probe sequence
gtacggatgaagaatctgattggaa

SEQ ID NO: 35125 - DNA, 25 bp, Probe sequence
tattggtacggatgaagaatctgat

SEQ ID NO: 35126 - DNA, 25 bp, Probe sequence
aagatatgaatgtggattggaagaa

SEQ ID NO: 35127 - DNA, 25 bp, Probe sequence
tactgttgatagtggcattctagtt

SEQ ID NO: 35128 - DNA, 25 bp, Probe sequence
aacgagcattattggaaattgaacg

SEQ ID NO: 35129 - DNA, 25 bp, Probe sequence
caacgagcattattggaaattgaac

SEQ ID NO: 35130 - DNA, 25 bp, Probe sequence
aatatactttgtcaaaccaacgagc

SEQ ID NO: 35131 - DNA, 25 bp, Probe sequence
cgaatatactttgtcaaaccaacga

SEQ ID NO: 35132 - DNA, 25 bp, Probe sequence
acgaatatactttgtcaaaccaacg

SEQ ID NO: 35133 - DNA, 25 bp, Probe sequence
ctttgtcaaaccaacgagcattatt

SEQ ID NO: 35134 - DNA, 25 bp, Probe sequence
tatactttgtcaaaccaacgagcat

SEQ ID NO: 35135 - DNA, 25 bp, Probe sequence
atatactttgtcaaaccaacgagca

SEQ ID NO: 35136 - DNA, 25 bp, Probe sequence
tttgtcaaaccaacgagcattattg

SEQ ID NO: 35137 - DNA, 25 bp, Probe sequence
atctaccagcaatacctcataccaa

SEQ ID NO: 35138 - DNA, 25 bp, Probe sequence
gatctaccagcaatacctcatacca

SEQ ID NO: 35139 - DNA, 25 bp, Probe sequence
attatcggagagctatgttagttca

SEQ ID NO: 35140 - DNA, 25 bp, Probe sequence
tcggagagctatgttagttcattaa

SEQ ID NO: 35141 - DNA, 25 bp, Probe sequence
atcggagagctatgttagttcatta

SEQ ID NO: 35142 - DNA, 25 bp, Probe sequence
tatcggagagctatgttagttcatt

SEQ ID NO: 35143 - DNA, 25 bp, Probe sequence
ttatcggagagctatgttagttcat

SEQ ID NO: 35144 - DNA, 25 bp, Probe sequence
tgtattatcggagagctatgttagt

SEQ ID NO: 35145 - DNA, 25 bp, Probe sequence
ctaccagcaatacctcataccaaat

SEQ ID NO: 35146 - DNA, 25 bp, Probe sequence
gctcgtattgatgaactgattgatg

SEQ ID NO: 35147 - DNA, 25 bp, Probe sequence
ctcgtattgatgaactgattgatga

SEQ ID NO: 35148 - DNA, 25 bp, Probe sequence
ttgatgaactgattgatgaagatgt

SEQ ID NO: 35149 - DNA, 25 bp, Probe sequence
caatgtatgtagttgttgtggtcaa

SEQ ID NO: 35150 - DNA, 25 bp, Probe sequence
tcgtattgatgaactgattgatgaa

SEQ ID NO: 35151 - DNA, 25 bp, Probe sequence
cgtattgatgaactgattgatgaag

SEQ ID NO: 35152 - DNA, 25 bp, Probe sequence
tgatgaactgattgatgaagatgta

SEQ ID NO: 35153 - DNA, 25 bp, Probe sequence
attgatgaactgattgatgaagatg

SEQ ID NO: 35154 - DNA, 25 bp, Probe sequence
agctcgtattgatgaactgattgat

SEQ ID NO: 35155 - DNA, 25 bp, Probe sequence
agacgaaagtaaatttgaacaagca

SEQ ID NO: 35156 - DNA, 25 bp, Probe sequence
cagacgaaagtaaatttgaacaagc

SEQ ID NO: 35157 - DNA, 25 bp, Probe sequence
gcagacgaaagtaaatttgaacaag

SEQ ID NO: 35158 - DNA, 25 bp, Probe sequence
aaacgaaggtaaagaagataaagct

SEQ ID NO: 35159 - DNA, 25 bp, Probe sequence
atggcagacgaaagtaaatttgaac

SEQ ID NO: 35160 - DNA, 25 bp, Probe sequence
ggcagacgaaagtaaatttgaacaa

SEQ ID NO: 35161 - DNA, 25 bp, Probe sequence
gacgaaagtaaatttgaacaagcaa

SEQ ID NO: 35162 - DNA, 25 bp, Probe sequence
tggcagacgaaagtaaatttgaaca

SEQ ID NO: 35163 - DNA, 25 bp, Probe sequence
aaaacgaaggtaaagaagataaagc

SEQ ID NO: 35164 - DNA, 25 bp, Probe sequence
ccgaatatgacaataagactgacga

SEQ ID NO: 35165 - DNA, 25 bp, Probe sequence
accgaatatgacaataagactgacg

SEQ ID NO: 35166 - DNA, 25 bp, Probe sequence
cgaatatgacaataagactgacgaa

SEQ ID NO: 35167 - DNA, 25 bp, Probe sequence
taccgaatatgacaataagactgac

SEQ ID NO: 35168 - DNA, 25 bp, Probe sequence
ttaccgaatatgacaataagactga

SEQ ID NO: 35169 - DNA, 25 bp, Probe sequence
tgacaataagactgacgaaagtatt

SEQ ID NO: 35170 - DNA, 25 bp, Probe sequence
atgacaataagactgacgaaagtat

SEQ ID NO: 35171 - DNA, 25 bp, Probe sequence
atatgacaataagactgacgaaagt

SEQ ID NO: 35172 - DNA, 25 bp, Probe sequence
aaacaaatccgaaagaatatgctaa

SEQ ID NO: 35173 - DNA, 25 bp, Probe sequence
gttatagattggttgcgtaatggtt

SEQ ID NO: 35174 - DNA, 25 bp, Probe sequence
agttatagattggttgcgtaatggt

SEQ ID NO: 35175 - DNA, 25 bp, Probe sequence
aagttatagattggttgcgtaatgg

SEQ ID NO: 35176 - DNA, 25 bp, Probe sequence
atgaagttgttgatatgacggatac

SEQ ID NO: 35177 - DNA, 25 bp, Probe sequence
agttgagaagagaaggaagttaaga

SEQ ID NO: 35178 - DNA, 25 bp, Probe sequence
ttgaagttatagattggttgcgtaa

SEQ ID NO: 35179 - DNA, 25 bp, Probe sequence
tgagaagagaaggaagttaagagaa

SEQ ID NO: 35180 - DNA, 25 bp, Probe sequence
ttgagaagagaaggaagttaagaga

SEQ ID NO: 35181 - DNA, 25 bp, Probe sequence
gttgagaagagaaggaagttaagag

SEQ ID NO: 35182 - DNA, 25 bp, Probe sequence
aatgattattcaccaagtaatgcca

SEQ ID NO: 35183 - DNA, 25 bp, Probe sequence
atgattattcaccaagtaatgccat

SEQ ID NO: 35184 - DNA, 25 bp, Probe sequence
tcaagatgttgttgctcaagtgatt

SEQ ID NO: 35185 - DNA, 25 bp, Probe sequence
ttattagacatggtaacgcaaggtt

SEQ ID NO: 35186 - DNA, 25 bp, Probe sequence
cttattagacatggtaacgcaaggt

SEQ ID NO: 35187 - DNA, 25 bp, Probe sequence
tgattattcaccaagtaatgccatg

SEQ ID NO: 35188 - DNA, 25 bp, Probe sequence
tatcaacacatcaacagatagcaat

SEQ ID NO: 35189 - DNA, 25 bp, Probe sequence
atatcaacacatcaacagatagcaa

SEQ ID NO: 35190 - DNA, 25 bp, Probe sequence
ctcaagatgttgttgctcaagtgat

SEQ ID NO: 35191 - DNA, 25 bp, Probe sequence
aaagcaaatgatttaactagactcg

SEQ ID NO: 35192 - DNA, 25 bp, Probe sequence
gcccgtttatgttggaggtttataa

SEQ ID NO: 35193 - DNA, 25 bp, Probe sequence
agcaaatgatttaactagactcgaa

SEQ ID NO: 35194 - DNA, 25 bp, Probe sequence
aagcaaatgatttaactagactcga

SEQ ID NO: 35195 - DNA, 25 bp, Probe sequence
gcaaatgatttaactagactcgaag

SEQ ID NO: 35196 - DNA, 25 bp, Probe sequence
caaatgatttaactagactcgaaga

SEQ ID NO: 35197 - DNA, 25 bp, Probe sequence
tggagtctcattttagcttagaaca

SEQ ID NO: 35198 - DNA, 25 bp, Probe sequence
agtctcattttagcttagaacatgc

SEQ ID NO: 35199 - DNA, 25 bp, Probe sequence
ggagtctcattttagcttagaacat

SEQ ID NO: 35200 - DNA, 25 bp, Probe sequence
aacagaacaatattagttggtcgtt

SEQ ID NO: 35201 - DNA, 25 bp, Probe sequence
caaagtggtgtaaatgtagcatcat

SEQ ID NO: 35202 - DNA, 25 bp, Probe sequence
ctcaaagtggtgtaaatgtagcatc

SEQ ID NO: 35203 - DNA, 25 bp, Probe sequence
tcaaagtggtgtaaatgtagcatca

SEQ ID NO: 35204 - DNA, 25 bp, Probe sequence
tcgtttaactagagacccagaatta

SEQ ID NO: 35205 - DNA, 25 bp, Probe sequence
actcaaagtggtgtaaatgtagcat

SEQ ID NO: 35206 - DNA, 25 bp, Probe sequence
cgtggacaatcgcaatattcaaata

SEQ ID NO: 35207 - DNA, 25 bp, Probe sequence
gtcgtttaactagagacccagaatt

SEQ ID NO: 35208 - DNA, 25 bp, Probe sequence
atgtagcatcattcacattagcagt

SEQ ID NO: 35209 - DNA, 25 bp, Probe sequence
cgagagtgatggaatgttagaagtc

SEQ ID NO: 35210 - DNA, 25 bp, Probe sequence
gagagtgatggaatgttagaagtca

SEQ ID NO: 35211 - DNA, 25 bp, Probe sequence
agagtgatggaatgttagaagtcaa

SEQ ID NO: 35212 - DNA, 25 bp, Probe sequence
ctggttggataagtattgatcgctc

SEQ ID NO: 35213 - DNA, 25 bp, Probe sequence
tgactggttggataagtattgatcg

SEQ ID NO: 35214 - DNA, 25 bp, Probe sequence
ttactcatggaagcgaatcattcaa

SEQ ID NO: 35215 - DNA, 25 bp, Probe sequence
gactggttggataagtattgatcgc

SEQ ID NO: 35216 - DNA, 25 bp, Probe sequence
atgactggttggataagtattgatc

SEQ ID NO: 35217 - DNA, 25 bp, Probe sequence
tggttggataagtattgatcgctca

SEQ ID NO: 35218 - DNA, 25 bp, Probe sequence
tgaagaagaaggatatgaatgggtt

SEQ ID NO: 35219 - DNA, 25 bp, Probe sequence
ttgaagaagaaggatatgaatgggt

SEQ ID NO: 35220 - DNA, 25 bp, Probe sequence
tggcatcaacattagaaatcaaaga

SEQ ID NO: 35221 - DNA, 25 bp, Probe sequence
tccatcagaaattacaggtgttaca

SEQ ID NO: 35222 - DNA, 25 bp, Probe sequence
gcatcaacattagaaatcaaagacc

SEQ ID NO: 35223 - DNA, 25 bp, Probe sequence
ggcatcaacattagaaatcaaagac

SEQ ID NO: 35224 - DNA, 25 bp, Probe sequence
caggattattcttggcaatgcaata

SEQ ID NO: 35225 - DNA, 25 bp, Probe sequence
cagaaattacaggtgttacaaatgc

SEQ ID NO: 35226 - DNA, 25 bp, Probe sequence
ccatcagaaattacaggtgttacaa

SEQ ID NO: 35227 - DNA, 25 bp, Probe sequence
ttattgataacgaatgatggtgatt

SEQ ID NO: 35228 - DNA, 25 bp, Probe sequence
caacgaacaagtaattaaatcacca

SEQ ID NO: 35229 - DNA, 25 bp, Probe sequence
agttatttcagcaaatcctatcact

SEQ ID NO: 35230 - DNA, 25 bp, Probe sequence
gttatttcagcaaatcctatcactg

SEQ ID NO: 35231 - DNA, 25 bp, Probe sequence
tcaacgaacaagtaattaaatcacc

SEQ ID NO: 35232 - DNA, 25 bp, Probe sequence
tgtaaatgtcaacgaacaagtaatt

SEQ ID NO: 35233 - DNA, 25 bp, Probe sequence
aagttatttcagcaaatcctatcac

SEQ ID NO: 35234 - DNA, 25 bp, Probe sequence
acgaacaagtaattaaatcaccaaa

SEQ ID NO: 35235 - DNA, 25 bp, Probe sequence
aacgaacaagtaattaaatcaccaa

SEQ ID NO: 35236 - DNA, 25 bp, Probe sequence
taatagggtttggcgtttatctctt

SEQ ID NO: 35237 - DNA, 25 bp, Probe sequence
ttaatagggtttggcgtttatctct

SEQ ID NO: 35238 - DNA, 25 bp, Probe sequence
aatagggtttggcgtttatctcttt

SEQ ID NO: 35239 - DNA, 25 bp, Probe sequence
tttaatagggtttggcgtttatctc

SEQ ID NO: 35240 - DNA, 25 bp, Probe sequence
tgaaatgttaatgcttgctactatc

SEQ ID NO: 35241 - DNA, 25 bp, Probe sequence
gaaatgttaatgcttgctactatct

SEQ ID NO: 35242 - DNA, 25 bp, Probe sequence
aatgttaatgcttgctactatcttt

SEQ ID NO: 35243 - DNA, 25 bp, Probe sequence
aaatgttaatgcttgctactatctt

SEQ ID NO: 35244 - DNA, 25 bp, Probe sequence
atgaaatgttaatgcttgctactat

SEQ ID NO: 35245 - DNA, 25 bp, Probe sequence
aatagagttaaggcaatggaagatt

SEQ ID NO: 35246 - DNA, 25 bp, Probe sequence
tattattccaacagaacagcatgaa

SEQ ID NO: 35247 - DNA, 25 bp, Probe sequence
atattattccaacagaacagcatga

SEQ ID NO: 35248 - DNA, 25 bp, Probe sequence
atatactttagcaggaggtgttgtg

SEQ ID NO: 35249 - DNA, 25 bp, Probe sequence
gaggtgttgtgctttattcagttaa

SEQ ID NO: 35250 - DNA, 25 bp, Probe sequence
gaacgagcaaataataggaagcata

SEQ ID NO: 35251 - DNA, 25 bp, Probe sequence
tgaacgagcaaataataggaagcat

SEQ ID NO: 35252 - DNA, 25 bp, Probe sequence
atgaacgagcaaataataggaagca

SEQ ID NO: 35253 - DNA, 25 bp, Probe sequence
cttatattattccaacagaacagca

SEQ ID NO: 35254 - DNA, 25 bp, Probe sequence
cgtacacacaagttgatgataatgc

SEQ ID NO: 35255 - DNA, 25 bp, Probe sequence
gcgtacacacaagttgatgataatg

SEQ ID NO: 35256 - DNA, 25 bp, Probe sequence
gcagtaacagtagatgaacatcgta

SEQ ID NO: 35257 - DNA, 25 bp, Probe sequence
aattgagagaagtaattgaacgcaa

SEQ ID NO: 35258 - DNA, 25 bp, Probe sequence
tgcgtacacacaagttgatgataat

SEQ ID NO: 35259 - DNA, 25 bp, Probe sequence
acagtagatgaacatcgtatcacag

SEQ ID NO: 35260 - DNA, 25 bp, Probe sequence
aacagtagatgaacatcgtatcaca

SEQ ID NO: 35261 - DNA, 25 bp, Probe sequence
attgcgtacacacaagttgatgata

SEQ ID NO: 35262 - DNA, 25 bp, Probe sequence
ttgcgtacacacaagttgatgataa

SEQ ID NO: 35263 - DNA, 25 bp, Probe sequence
gttggtgcgattattggtatattca

SEQ ID NO: 35264 - DNA, 25 bp, Probe sequence
cagttggtgcgattattggtatatt

SEQ ID NO: 35265 - DNA, 25 bp, Probe sequence
agttggtgcgattattggtatattc

SEQ ID NO: 35266 - DNA, 25 bp, Probe sequence
tgcgattattggtatattcacactc

SEQ ID NO: 35267 - DNA, 25 bp, Probe sequence
gcgattattggtatattcacactct

SEQ ID NO: 35268 - DNA, 25 bp, Probe sequence
ggtgcgattattggtatattcacac

SEQ ID NO: 35269 - DNA, 25 bp, Probe sequence
tggtgcgattattggtatattcaca

SEQ ID NO: 35270 - DNA, 25 bp, Probe sequence
ttggtgcgattattggtatattcac

SEQ ID NO: 35271 - DNA, 25 bp, Probe sequence
gtgcgattattggtatattcacact

SEQ ID NO: 35272 - DNA, 25 bp, Probe sequence
cacctaaccttccattcattgtagt

SEQ ID NO: 35273 - DNA, 25 bp, Probe sequence
acctaaccttccattcattgtagtt

SEQ ID NO: 35274 - DNA, 25 bp, Probe sequence
cctaaccttccattcattgtagttg

SEQ ID NO: 35275 - DNA, 25 bp, Probe sequence
tatacacctaaccttccattcattg

SEQ ID NO: 35276 - DNA, 25 bp, Probe sequence
atacacctaaccttccattcattgt

SEQ ID NO: 35277 - DNA, 25 bp, Probe sequence
acacctaaccttccattcattgtag

SEQ ID NO: 35278 - DNA, 25 bp, Probe sequence
atatacacctaaccttccattcatt

SEQ ID NO: 35279 - DNA, 25 bp, Probe sequence
aatatacacctaaccttccattcat

SEQ ID NO: 35280 - DNA, 25 bp, Probe sequence
ctaaccttccattcattgtagttgg

SEQ ID NO: 35281 - DNA, 25 bp, Probe sequence
aatatacacggagaagtcaagtcac

SEQ ID NO: 35282 - DNA, 25 bp, Probe sequence
taatatacacggagaagtcaagtca

SEQ ID NO: 35283 - DNA, 25 bp, Probe sequence
gtccatacgcttatctagtccaatt

SEQ ID NO: 35284 - DNA, 25 bp, Probe sequence
ctaatatacacggagaagtcaagtc

SEQ ID NO: 35285 - DNA, 25 bp, Probe sequence
tactcaatcgtgaacaagaagtcat

SEQ ID NO: 35286 - DNA, 25 bp, Probe sequence
atctactcaatcgtgaacaagaagt

SEQ ID NO: 35287 - DNA, 25 bp, Probe sequence
gctgaatatctactcaatcgtgaac

SEQ ID NO: 35288 - DNA, 25 bp, Probe sequence
agtccatacgcttatctagtccaat

SEQ ID NO: 35289 - DNA, 25 bp, Probe sequence
tatacacggagaagtcaagtcacta

SEQ ID NO: 35290 - DNA, 25 bp, Probe sequence
cgtcacagtcattacagaagttatt

SEQ ID NO: 35291 - DNA, 25 bp, Probe sequence
ataagcgtcacagtcattacagaag

SEQ ID NO: 35292 - DNA, 25 bp, Probe sequence
gataagcgtcacagtcattacagaa

SEQ ID NO: 35293 - DNA, 25 bp, Probe sequence
aggtctacattatccgagaagatga

SEQ ID NO: 35294 - DNA, 25 bp, Probe sequence
aaggtctacattatccgagaagatg

SEQ ID NO: 35295 - DNA, 25 bp, Probe sequence
gcgtcacagtcattacagaagttat

SEQ ID NO: 35296 - DNA, 25 bp, Probe sequence
ggtctacattatccgagaagatgat

SEQ ID NO: 35297 - DNA, 25 bp, Probe sequence
ctcagataagcgtcacagtcattac

SEQ ID NO: 35298 - DNA, 25 bp, Probe sequence
cagataagcgtcacagtcattacag

SEQ ID NO: 35299 - DNA, 25 bp, Probe sequence
caagcacacggatattcacattatg

SEQ ID NO: 35300 - DNA, 25 bp, Probe sequence
acaagcacacggatattcacattat

SEQ ID NO: 35301 - DNA, 25 bp, Probe sequence
gacaagcacacggatattcacatta

SEQ ID NO: 35302 - DNA, 25 bp, Probe sequence
aagcacacggatattcacattatga

SEQ ID NO: 35303 - DNA, 25 bp, Probe sequence
cgatgtatcctcattatgatggtgt

SEQ ID NO: 35304 - DNA, 25 bp, Probe sequence
acgatgtatcctcattatgatggtg

SEQ ID NO: 35305 - DNA, 25 bp, Probe sequence
aacgatgtatcctcattatgatggt

SEQ ID NO: 35306 - DNA, 25 bp, Probe sequence
gatgtatcctcattatgatggtgtt

SEQ ID NO: 35307 - DNA, 25 bp, Probe sequence
taacgatgtatcctcattatgatgg

SEQ ID NO: 35308 - DNA, 25 bp, Probe sequence
gattctatcacatccattgttcacc

SEQ ID NO: 35309 - DNA, 25 bp, Probe sequence
ccattgttcaccctgacttaataga

SEQ ID NO: 35310 - DNA, 25 bp, Probe sequence
tccattgttcaccctgacttaatag

SEQ ID NO: 35311 - DNA, 25 bp, Probe sequence
atccattgttcaccctgacttaata

SEQ ID NO: 35312 - DNA, 25 bp, Probe sequence
catccattgttcaccctgacttaat

SEQ ID NO: 35313 - DNA, 25 bp, Probe sequence
cattgttcaccctgacttaatagaa

SEQ ID NO: 35314 - DNA, 25 bp, Probe sequence
ttgttcaccctgacttaatagaaag

SEQ ID NO: 35315 - DNA, 25 bp, Probe sequence
attctatcacatccattgttcaccc

SEQ ID NO: 35316 - DNA, 25 bp, Probe sequence
tgattctatcacatccattgttcac

SEQ ID NO: 35317 - DNA, 25 bp, Probe sequence
ctgctgatattatgcgtgacttcat

SEQ ID NO: 35318 - DNA, 25 bp, Probe sequence
gctgatattatgcgtgacttcatag

SEQ ID NO: 35319 - DNA, 25 bp, Probe sequence
tgctgatattatgcgtgacttcata

SEQ ID NO: 35320 - DNA, 25 bp, Probe sequence
aacagccatattaagtaacgcaacg

SEQ ID NO: 35321 - DNA, 25 bp, Probe sequence
tgatattatgcgtgacttcatagga

SEQ ID NO: 35322 - DNA, 25 bp, Probe sequence
ctgatattatgcgtgacttcatagg

SEQ ID NO: 35323 - DNA, 25 bp, Probe sequence
gatattatgcgtgacttcataggaa

SEQ ID NO: 35324 - DNA, 25 bp, Probe sequence
taagtaacgcaacgggtatgattat

SEQ ID NO: 35325 - DNA, 25 bp, Probe sequence
cctacacatattgaaaccgtctcta

SEQ ID NO: 35326 - DNA, 25 bp, Probe sequence
gttcatcgtggtgttcatacattag

SEQ ID NO: 35327 - DNA, 25 bp, Probe sequence
catcgtggtgttcatacattaggat

SEQ ID NO: 35328 - DNA, 25 bp, Probe sequence
ttcatcgtggtgttcatacattagg

SEQ ID NO: 35329 - DNA, 25 bp, Probe sequence
ttagcatatcttgattcaacagcga

SEQ ID NO: 35330 - DNA, 25 bp, Probe sequence
atcgtggtgttcatacattaggatc

SEQ ID NO: 35331 - DNA, 25 bp, Probe sequence
tagcatatcttgattcaacagcgac

SEQ ID NO: 35332 - DNA, 25 bp, Probe sequence
cgtggtgttcatacattaggatcat

SEQ ID NO: 35333 - DNA, 25 bp, Probe sequence
tcatcgtggtgttcatacattagga

SEQ ID NO: 35334 - DNA, 25 bp, Probe sequence
cgttcatcgtggtgttcatacatta

SEQ ID NO: 35335 - DNA, 25 bp, Probe sequence
atgcttggtgaagactatgtgatta

SEQ ID NO: 35336 - DNA, 25 bp, Probe sequence
tgcttggtgaagactatgtgattac

SEQ ID NO: 35337 - DNA, 25 bp, Probe sequence
gatgcttggtgaagactatgtgatt

SEQ ID NO: 35338 - DNA, 25 bp, Probe sequence
aatgatgcttggtgaagactatgtg

SEQ ID NO: 35339 - DNA, 25 bp, Probe sequence
agaaggtacgactgaagaagaatag

SEQ ID NO: 35340 - DNA, 25 bp, Probe sequence
tggtgaagactatgtgattacagaa

SEQ ID NO: 35341 - DNA, 25 bp, Probe sequence
ttggtgaagactatgtgattacaga

SEQ ID NO: 35342 - DNA, 25 bp, Probe sequence
cttggtgaagactatgtgattacag

SEQ ID NO: 35343 - DNA, 25 bp, Probe sequence
gcttggtgaagactatgtgattaca

SEQ ID NO: 35344 - DNA, 25 bp, Probe sequence
gttgttgtatgtatggtggtcttac

SEQ ID NO: 35345 - DNA, 25 bp, Probe sequence
ggttgttgtatgtatggtggtctta

SEQ ID NO: 35346 - DNA, 25 bp, Probe sequence
aggttgttgtatgtatggtggtctt

SEQ ID NO: 35347 - DNA, 25 bp, Probe sequence
gaggttgttgtatgtatggtggtct

SEQ ID NO: 35348 - DNA, 25 bp, Probe sequence
acaggtaacaatcgacaatagacaa

SEQ ID NO: 35349 - DNA, 25 bp, Probe sequence
tacaggtaacaatcgacaatagaca

SEQ ID NO: 35350 - DNA, 25 bp, Probe sequence
gtacaggtaacaatcgacaatagac

SEQ ID NO: 35351 - DNA, 25 bp, Probe sequence
ggtaacaatcgacaatagacaatca

SEQ ID NO: 35352 - DNA, 25 bp, Probe sequence
caggtaacaatcgacaatagacaat

SEQ ID NO: 35353 - DNA, 25 bp, Probe sequence
ctgctcaatatgaatctgaagttgt

SEQ ID NO: 35354 - DNA, 25 bp, Probe sequence
tctgctcaatatgaatctgaagttg

SEQ ID NO: 35355 - DNA, 25 bp, Probe sequence
tgctcaatatgaatctgaagttgtt

SEQ ID NO: 35356 - DNA, 25 bp, Probe sequence
ttccatataacgaagtattcaacga

SEQ ID NO: 35357 - DNA, 25 bp, Probe sequence
ttccgtattaactctgagaacatgg

SEQ ID NO: 35358 - DNA, 25 bp, Probe sequence
ttctgctcaatatgaatctgaagtt

SEQ ID NO: 35359 - DNA, 25 bp, Probe sequence
agataacgaatcaacatcagataca

SEQ ID NO: 35360 - DNA, 25 bp, Probe sequence
tccatataacgaagtattcaacgat

SEQ ID NO: 35361 - DNA, 25 bp, Probe sequence
ggtggcgacttatcagaattgaatt

SEQ ID NO: 35362 - DNA, 25 bp, Probe sequence
aggagaaggtaatgagaagatgagt

SEQ ID NO: 35363 - DNA, 25 bp, Probe sequence
taagagattggttattcagtcgtca

SEQ ID NO: 35364 - DNA, 25 bp, Probe sequence
aagagattggttattcagtcgtcag

SEQ ID NO: 35365 - DNA, 25 bp, Probe sequence
ggagaaggtaatgagaagatgagta

SEQ ID NO: 35366 - DNA, 25 bp, Probe sequence
aacttatgacgaagcactacttgta

SEQ ID NO: 35367 - DNA, 25 bp, Probe sequence
taggagaaggtaatgagaagatgag

SEQ ID NO: 35368 - DNA, 25 bp, Probe sequence
ttaagagattggttattcagtcgtc

SEQ ID NO: 35369 - DNA, 25 bp, Probe sequence
aatgacaactgttcctgaagaagag

SEQ ID NO: 35370 - DNA, 25 bp, Probe sequence
ttaggagaaggtaatgagaagatga

SEQ ID NO: 35371 - DNA, 25 bp, Probe sequence
aactatgaccaacttgatgagtatc

SEQ ID NO: 35372 - DNA, 25 bp, Probe sequence
taggacttacagcaacagcattgaa

SEQ ID NO: 35373 - DNA, 25 bp, Probe sequence
ttaggacttacagcaacagcattga

SEQ ID NO: 35374 - DNA, 25 bp, Probe sequence
tggtgtgaaagatgatgaagttagt

SEQ ID NO: 35375 - DNA, 25 bp, Probe sequence
gatttggtgtgaaagatgatgaagt

SEQ ID NO: 35376 - DNA, 25 bp, Probe sequence
gccgaagatagagaggataaacaaa

SEQ ID NO: 35377 - DNA, 25 bp, Probe sequence
agatttggtgtgaaagatgatgaag

SEQ ID NO: 35378 - DNA, 25 bp, Probe sequence
acagcattgaaaggtaacataaaca

SEQ ID NO: 35379 - DNA, 25 bp, Probe sequence
agcacttacaaactatgaccaactt

SEQ ID NO: 35380 - DNA, 25 bp, Probe sequence
ctaattgttgctgttggtatctgtg

SEQ ID NO: 35381 - DNA, 25 bp, Probe sequence
cctaattgttgctgttggtatctgt

SEQ ID NO: 35382 - DNA, 25 bp, Probe sequence
taattgttgctgttggtatctgtgc

SEQ ID NO: 35383 - DNA, 25 bp, Probe sequence
gcctaattgttgctgttggtatctg

SEQ ID NO: 35384 - DNA, 25 bp, Probe sequence
ttagaggcgttggaatggtattagc

SEQ ID NO: 35385 - DNA, 25 bp, Probe sequence
tttagaggcgttggaatggtattag

SEQ ID NO: 35386 - DNA, 25 bp, Probe sequence
tgctggtgtttggatagttcttaaa

SEQ ID NO: 35387 - DNA, 25 bp, Probe sequence
gtttagaggcgttggaatggtatta

SEQ ID NO: 35388 - DNA, 25 bp, Probe sequence
atgaaatgtttagaggcgttggaat

SEQ ID NO: 35389 - DNA, 25 bp, Probe sequence
ggataaagcgacaacacaaatacaa

SEQ ID NO: 35390 - DNA, 25 bp, Probe sequence
tggataaagcgacaacacaaataca

SEQ ID NO: 35391 - DNA, 25 bp, Probe sequence
gtggataaagcgacaacacaaatac

SEQ ID NO: 35392 - DNA, 25 bp, Probe sequence
ggtggataaagcgacaacacaaata

SEQ ID NO: 35393 - DNA, 25 bp, Probe sequence
cattagagtgctggtctttattaaa

SEQ ID NO: 35394 - DNA, 25 bp, Probe sequence
ggcattagagtgctggtctttatta

SEQ ID NO: 35395 - DNA, 25 bp, Probe sequence
gcattagagtgctggtctttattaa

SEQ ID NO: 35396 - DNA, 25 bp, Probe sequence
agagtgctggtctttattaaattaa

SEQ ID NO: 35397 - DNA, 25 bp, Probe sequence
ttagagtgctggtctttattaaatt

SEQ ID NO: 35398 - DNA, 25 bp, Probe sequence
gtatgctgtatggcttgtaatgtta

SEQ ID NO: 35399 - DNA, 25 bp, Probe sequence
tatgctgtatggcttgtaatgttag

SEQ ID NO: 35400 - DNA, 25 bp, Probe sequence
atgctgtatggcttgtaatgttagg

SEQ ID NO: 35401 - DNA, 25 bp, Probe sequence
cttggtatgctgtatggcttgtaat

SEQ ID NO: 35402 - DNA, 25 bp, Probe sequence
ttcttggtggtgtattagttgatgc

SEQ ID NO: 35403 - DNA, 25 bp, Probe sequence
ggtatgctgtatggcttgtaatgtt

SEQ ID NO: 35404 - DNA, 25 bp, Probe sequence
ttggtatgctgtatggcttgtaatg

SEQ ID NO: 35405 - DNA, 25 bp, Probe sequence
tcaaggagaataatacgcaacctaa

SEQ ID NO: 35406 - DNA, 25 bp, Probe sequence
ttcaaggagaataatacgcaaccta

SEQ ID NO: 35407 - DNA, 25 bp, Probe sequence
aaggattgggtgatgatgatgttta

SEQ ID NO: 35408 - DNA, 25 bp, Probe sequence
aagtaaagaaggattgggtgatgat

SEQ ID NO: 35409 - DNA, 25 bp, Probe sequence
aaagtaaagaaggattgggtgatga

SEQ ID NO: 35410 - DNA, 25 bp, Probe sequence
taaagaaggattgggtgatgatgat

SEQ ID NO: 35411 - DNA, 25 bp, Probe sequence
atttagcagaaggcagaaagtttac

SEQ ID NO: 35412 - DNA, 25 bp, Probe sequence
gatttagcagaaggcagaaagttta

SEQ ID NO: 35413 - DNA, 25 bp, Probe sequence
gtaaagaaggattgggtgatgatga

SEQ ID NO: 35414 - DNA, 25 bp, Probe sequence
agtaaagaaggattgggtgatgatg

SEQ ID NO: 35415 - DNA, 25 bp, Probe sequence
aggattgggtgatgatgatgtttaa

SEQ ID NO: 35416 - DNA, 25 bp, Probe sequence
tcaagaagattcactaatagctggt

SEQ ID NO: 35417 - DNA, 25 bp, Probe sequence
caagaagattcactaatagctggtt

SEQ ID NO: 35418 - DNA, 25 bp, Probe sequence
ttcaagaagattcactaatagctgg

SEQ ID NO: 35419 - DNA, 25 bp, Probe sequence
taaagaggcattacaacaagcattt

SEQ ID NO: 35420 - DNA, 25 bp, Probe sequence
ctaaagacggttatatcagtggagg

SEQ ID NO: 35421 - DNA, 25 bp, Probe sequence
ataaagaggcattacaacaagcatt

SEQ ID NO: 35422 - DNA, 25 bp, Probe sequence
aataaagaggcattacaacaagcat

SEQ ID NO: 35423 - DNA, 25 bp, Probe sequence
gacggttatatcagtggaggtttaa

SEQ ID NO: 35424 - DNA, 25 bp, Probe sequence
agacggttatatcagtggaggttta

SEQ ID NO: 35425 - DNA, 25 bp, Probe sequence
cgaggcattattactatacggaaca

SEQ ID NO: 35426 - DNA, 25 bp, Probe sequence
aggcattattactatacggaacaca

SEQ ID NO: 35427 - DNA, 25 bp, Probe sequence
gaggcattattactatacggaacac

SEQ ID NO: 35428 - DNA, 25 bp, Probe sequence
taggcgttgatgatgttgttgataa

SEQ ID NO: 35429 - DNA, 25 bp, Probe sequence
tggaagaagaattaagacaagcaga

SEQ ID NO: 35430 - DNA, 25 bp, Probe sequence
gcagagttggaagaagaattaagac

SEQ ID NO: 35431 - DNA, 25 bp, Probe sequence
agcagagttggaagaagaattaaga

SEQ ID NO: 35432 - DNA, 25 bp, Probe sequence
ggcattattactatacggaacacaa

SEQ ID NO: 35433 - DNA, 25 bp, Probe sequence
ggaagaagaattaagacaagcagaa

SEQ ID NO: 35434 - DNA, 25 bp, Probe sequence
acatgaattgaatcaagtacagaca

SEQ ID NO: 35435 - DNA, 25 bp, Probe sequence
tgaattgaatcaagtacagacagat

SEQ ID NO: 35436 - DNA, 25 bp, Probe sequence
atgaattgaatcaagtacagacaga

SEQ ID NO: 35437 - DNA, 25 bp, Probe sequence
gcagacaaacaagaacaaagaagta

SEQ ID NO: 35438 - DNA, 25 bp, Probe sequence
atattagacaaagacggaacagcat

SEQ ID NO: 35439 - DNA, 25 bp, Probe sequence
catgaattgaatcaagtacagacag

SEQ ID NO: 35440 - DNA, 25 bp, Probe sequence
gacatgaattgaatcaagtacagac

SEQ ID NO: 35441 - DNA, 25 bp, Probe sequence
tgacttaacagaacctaatgaattg

SEQ ID NO: 35442 - DNA, 25 bp, Probe sequence
tattagacaaagacggaacagcatt

SEQ ID NO: 35443 - DNA, 25 bp, Probe sequence
aaggaataacaatgctgatgaagaa

SEQ ID NO: 35444 - DNA, 25 bp, Probe sequence
aagacggtggaattgtagttagtga

SEQ ID NO: 35445 - DNA, 25 bp, Probe sequence
agacggtggaattgtagttagtgag

SEQ ID NO: 35446 - DNA, 25 bp, Probe sequence
tgctaaaggaataacaatgctgatg

SEQ ID NO: 35447 - DNA, 25 bp, Probe sequence
gctaaaggaataacaatgctgatga

SEQ ID NO: 35448 - DNA, 25 bp, Probe sequence
cgcattagaaggtaaaggtaaggat

SEQ ID NO: 35449 - DNA, 25 bp, Probe sequence
gacggtggaattgtagttagtgagg

SEQ ID NO: 35450 - DNA, 25 bp, Probe sequence
aggaataacaatgctgatgaagaaa

SEQ ID NO: 35451 - DNA, 25 bp, Probe sequence
aaaggaataacaatgctgatgaaga

SEQ ID NO: 35452 - DNA, 25 bp, Probe sequence
aattgaattaacggaagaagaaggt

SEQ ID NO: 35453 - DNA, 25 bp, Probe sequence
ttgaattaacggaagaagaaggtaa

SEQ ID NO: 35454 - DNA, 25 bp, Probe sequence
attgaattaacggaagaagaaggta

SEQ ID NO: 35455 - DNA, 25 bp, Probe sequence
actctgactactcaatgagatatgg

SEQ ID NO: 35456 - DNA, 25 bp, Probe sequence
aaatcaatcagcacaaactaaaggt

SEQ ID NO: 35457 - DNA, 25 bp, Probe sequence
ttaacggaagaagaaggtaaacaaa

SEQ ID NO: 35458 - DNA, 25 bp, Probe sequence
attaacggaagaagaaggtaaacaa

SEQ ID NO: 35459 - DNA, 25 bp, Probe sequence
aattaacggaagaagaaggtaaaca

SEQ ID NO: 35460 - DNA, 25 bp, Probe sequence
tgaattaacggaagaagaaggtaaa

SEQ ID NO: 35461 - DNA, 25 bp, Probe sequence
cggtgttattcatatcggtagagta

SEQ ID NO: 35462 - DNA, 25 bp, Probe sequence
gacggtgttattcatatcggtagag

SEQ ID NO: 35463 - DNA, 25 bp, Probe sequence
tcgcacagacattatatgagaagaa

SEQ ID NO: 35464 - DNA, 25 bp, Probe sequence
atcgcacagacattatatgagaaga

SEQ ID NO: 35465 - DNA, 25 bp, Probe sequence
acggtgttattcatatcggtagagt

SEQ ID NO: 35466 - DNA, 25 bp, Probe sequence
gaaggaaccacaagaatatgacgaa

SEQ ID NO: 35467 - DNA, 25 bp, Probe sequence
aatcgcacagacattatatgagaag

SEQ ID NO: 35468 - DNA, 25 bp, Probe sequence
cagcaactagagccgatattataga

SEQ ID NO: 35469 - DNA, 25 bp, Probe sequence
ccagcaactagagccgatattatag

SEQ ID NO: 35470 - DNA, 25 bp, Probe sequence
tatcacagttgtttatacctccagc

SEQ ID NO: 35471 - DNA, 25 bp, Probe sequence
aaacacccaataagcactattatcg

SEQ ID NO: 35472 - DNA, 25 bp, Probe sequence
aacacccaataagcactattatcgg

SEQ ID NO: 35473 - DNA, 25 bp, Probe sequence
atatcacagttgtttatacctccag

SEQ ID NO: 35474 - DNA, 25 bp, Probe sequence
atttgccgaagatagcgaattgttt

SEQ ID NO: 35475 - DNA, 25 bp, Probe sequence
agaagaaagaagtgataaggaatga

SEQ ID NO: 35476 - DNA, 25 bp, Probe sequence
cacagttgtttatacctccagctaa

SEQ ID NO: 35477 - DNA, 25 bp, Probe sequence
tatacctccagctaaacacccaata

SEQ ID NO: 35478 - DNA, 25 bp, Probe sequence
atggttctcatggatcagctaaatt

SEQ ID NO: 35479 - DNA, 25 bp, Probe sequence
agaaggaagaacaagagcaagtatt

SEQ ID NO: 35480 - DNA, 25 bp, Probe sequence
tatcagaaggaagaacaagagcaag

SEQ ID NO: 35481 - DNA, 25 bp, Probe sequence
cagaaggaagaacaagagcaagtat

SEQ ID NO: 35482 - DNA, 25 bp, Probe sequence
gtatcagaaggaagaacaagagcaa

SEQ ID NO: 35483 - DNA, 25 bp, Probe sequence
cagtatcagaaggaagaacaagagc

SEQ ID NO: 35484 - DNA, 25 bp, Probe sequence
gcagtatcagaaggaagaacaagag

SEQ ID NO: 35485 - DNA, 25 bp, Probe sequence
gaaggaagaacaagagcaagtatta

SEQ ID NO: 35486 - DNA, 25 bp, Probe sequence
gaacaacaaccacaagaagaacaac

SEQ ID NO: 35487 - DNA, 25 bp, Probe sequence
agaacaacaaccacaagaagaacaa

SEQ ID NO: 35488 - DNA, 25 bp, Probe sequence
tatggtggcgtgaattattagcaat

SEQ ID NO: 35489 - DNA, 25 bp, Probe sequence
tataggtgtatggtggcgtgaatta

SEQ ID NO: 35490 - DNA, 25 bp, Probe sequence
aattatataggtgtatggtggcgtg

SEQ ID NO: 35491 - DNA, 25 bp, Probe sequence
gtggcgtgaattattagcaattagt

SEQ ID NO: 35492 - DNA, 25 bp, Probe sequence
gtatggtggcgtgaattattagcaa

SEQ ID NO: 35493 - DNA, 25 bp, Probe sequence
tatataggtgtatggtggcgtgaat

SEQ ID NO: 35494 - DNA, 25 bp, Probe sequence
attatataggtgtatggtggcgtga

SEQ ID NO: 35495 - DNA, 25 bp, Probe sequence
ggtggcgtgaattattagcaattag

SEQ ID NO: 35496 - DNA, 25 bp, Probe sequence
ggtgtatggtggcgtgaattattag

SEQ ID NO: 35497 - DNA, 25 bp, Probe sequence
aggcagatacaacaacagactatac

SEQ ID NO: 35498 - DNA, 25 bp, Probe sequence
gaggcagatacaacaacagactata

SEQ ID NO: 35499 - DNA, 25 bp, Probe sequence
ggcagatacaacaacagactataca

SEQ ID NO: 35500 - DNA, 25 bp, Probe sequence
gcagatacaacaacagactatacac

SEQ ID NO: 35501 - DNA, 25 bp, Probe sequence
ttatggtgcgttaggtgttatatgg

SEQ ID NO: 35502 - DNA, 25 bp, Probe sequence
ggcatcagtatcatccaagttacaa

SEQ ID NO: 35503 - DNA, 25 bp, Probe sequence
tgaggcagatacaacaacagactat

SEQ ID NO: 35504 - DNA, 25 bp, Probe sequence
atgaggcagatacaacaacagacta

SEQ ID NO: 35505 - DNA, 25 bp, Probe sequence
cagatacaacaacagactatacaca

SEQ ID NO: 35506 - DNA, 25 bp, Probe sequence
aatatctgttggcttggagtaataa

SEQ ID NO: 35507 - DNA, 25 bp, Probe sequence
agtaggttggaaggtgtcattaatt

SEQ ID NO: 35508 - DNA, 25 bp, Probe sequence
gagtaggttggaaggtgtcattaat

SEQ ID NO: 35509 - DNA, 25 bp, Probe sequence
aacggttatgaataagccatacact

SEQ ID NO: 35510 - DNA, 25 bp, Probe sequence
acggttatgaataagccatacacta

SEQ ID NO: 35511 - DNA, 25 bp, Probe sequence
cgagtaggttggaaggtgtcattaa

SEQ ID NO: 35512 - DNA, 25 bp, Probe sequence
ataagttgacggacagtattaatcg

SEQ ID NO: 35513 - DNA, 25 bp, Probe sequence
cggttatgaataagccatacactag

SEQ ID NO: 35514 - DNA, 25 bp, Probe sequence
ttgacggacagtattaatcgaagtt

SEQ ID NO: 35515 - DNA, 25 bp, Probe sequence
ttagaatggatttacaaagagcgtc

SEQ ID NO: 35516 - DNA, 25 bp, Probe sequence
tatgacgcttaaagaaatggacaga

SEQ ID NO: 35517 - DNA, 25 bp, Probe sequence
atgacgcttaaagaaatggacagat

SEQ ID NO: 35518 - DNA, 25 bp, Probe sequence
tgacgcttaaagaaatggacagatt

SEQ ID NO: 35519 - DNA, 25 bp, Probe sequence
attagaatggatttacaaagagcgt

SEQ ID NO: 35520 - DNA, 25 bp, Probe sequence
ttgttgaagttaaaccgtataagcg

SEQ ID NO: 35521 - DNA, 25 bp, Probe sequence
gttgaagttaaaccgtataagcgta

SEQ ID NO: 35522 - DNA, 25 bp, Probe sequence
tgttgaagttaaaccgtataagcgt

SEQ ID NO: 35523 - DNA, 25 bp, Probe sequence
ttgaagttaaaccgtataagcgtac

SEQ ID NO: 35524 - DNA, 25 bp, Probe sequence
atctatctctgatgatgacttacca

SEQ ID NO: 35525 - DNA, 25 bp, Probe sequence
tctatctctgatgatgacttaccat

SEQ ID NO: 35526 - DNA, 25 bp, Probe sequence
ctatctctgatgatgacttaccatt

SEQ ID NO: 35527 - DNA, 25 bp, Probe sequence
aatctatctctgatgatgacttacc

SEQ ID NO: 35528 - DNA, 25 bp, Probe sequence
cagaagatagtggcaacgataaatc

SEQ ID NO: 35529 - DNA, 25 bp, Probe sequence
cagcagaagatagtggcaacgataa

SEQ ID NO: 35530 - DNA, 25 bp, Probe sequence
agtaatatatagtggacgtatcgca

SEQ ID NO: 35531 - DNA, 25 bp, Probe sequence
atatatagtggacgtatcgcaactg

SEQ ID NO: 35532 - DNA, 25 bp, Probe sequence
aatatatagtggacgtatcgcaact

SEQ ID NO: 35533 - DNA, 25 bp, Probe sequence
cctgctacaacttcttctccgtatt

SEQ ID NO: 35534 - DNA, 25 bp, Probe sequence
gcgataacgtacaatgtattacctg

SEQ ID NO: 35535 - DNA, 25 bp, Probe sequence
agcgataacgtacaatgtattacct

SEQ ID NO: 35536 - DNA, 25 bp, Probe sequence
cagcgataacgtacaatgtattacc

SEQ ID NO: 35537 - DNA, 25 bp, Probe sequence
acaacttcttctccgtatttacctt

SEQ ID NO: 35538 - DNA, 25 bp, Probe sequence
tgctacaacttcttctccgtattta

SEQ ID NO: 35539 - DNA, 25 bp, Probe sequence
caacttcttctccgtatttaccttc

SEQ ID NO: 35540 - DNA, 25 bp, Probe sequence
cgataacgtacaatgtattacctgg

SEQ ID NO: 35541 - DNA, 25 bp, Probe sequence
ttctccgtatttaccttcttctacc

SEQ ID NO: 35542 - DNA, 25 bp, Probe sequence
cagtccatacgttcaattcataacc

SEQ ID NO: 35543 - DNA, 25 bp, Probe sequence
taagtttggcatcttcagtgtttac

SEQ ID NO: 35544 - DNA, 25 bp, Probe sequence
gtaagtttggcatcttcagtgttta

SEQ ID NO: 35545 - DNA, 25 bp, Probe sequence
tagtaagtttggcatcttcagtgtt

SEQ ID NO: 35546 - DNA, 25 bp, Probe sequence
ttagtaagtttggcatcttcagtgt

SEQ ID NO: 35547 - DNA, 25 bp, Probe sequence
gctttagtaagtttggcatcttcag

SEQ ID NO: 35548 - DNA, 25 bp, Probe sequence
tttagtaagtttggcatcttcagtg

SEQ ID NO: 35549 - DNA, 25 bp, Probe sequence
acagtccatacgttcaattcataac

SEQ ID NO: 35550 - DNA, 25 bp, Probe sequence
tgtctgtaaagataccatcaactcc

SEQ ID NO: 35551 - DNA, 25 bp, Probe sequence
ctggcttatacctattacctatggc

SEQ ID NO: 35552 - DNA, 25 bp, Probe sequence
gctggcttatacctattacctatgg

SEQ ID NO: 35553 - DNA, 25 bp, Probe sequence
ggcttatacctattacctatggcaa

SEQ ID NO: 35554 - DNA, 25 bp, Probe sequence
ctgctgttgaagagtctatgtatga

SEQ ID NO: 35555 - DNA, 25 bp, Probe sequence
tggcttatacctattacctatggca

SEQ ID NO: 35556 - DNA, 25 bp, Probe sequence
cggaattagtaagagagttagagcc

SEQ ID NO: 35557 - DNA, 25 bp, Probe sequence
tagtaagagagttagagccttctgg

SEQ ID NO: 35558 - DNA, 25 bp, Probe sequence
ggaattagtaagagagttagagcct

SEQ ID NO: 35559 - DNA, 25 bp, Probe sequence
gtaagagagttagagccttctggta

SEQ ID NO: 35560 - DNA, 25 bp, Probe sequence
tgaatatccaattatacaagcaggt

SEQ ID NO: 35561 - DNA, 25 bp, Probe sequence
atccaattatacaagcaggtatggc

SEQ ID NO: 35562 - DNA, 25 bp, Probe sequence
aatagattatgtacgccaattaacg

SEQ ID NO: 35563 - DNA, 25 bp, Probe sequence
caattatacaagcaggtatggcagg

SEQ ID NO: 35564 - DNA, 25 bp, Probe sequence
attatacaagcaggtatggcaggaa

SEQ ID NO: 35565 - DNA, 25 bp, Probe sequence
aattatacaagcaggtatggcagga

SEQ ID NO: 35566 - DNA, 25 bp, Probe sequence
tgttgatgaagctattgcgaatgaa

SEQ ID NO: 35567 - DNA, 25 bp, Probe sequence
aagtgttgatgaagctattgcgaat

SEQ ID NO: 35568 - DNA, 25 bp, Probe sequence
caggttactttaatacgcagcaatt

SEQ ID NO: 35569 - DNA, 25 bp, Probe sequence
tagaattgaacgagagatactggtg

SEQ ID NO: 35570 - DNA, 25 bp, Probe sequence
gaattgaacgagagatactggtgaa

SEQ ID NO: 35571 - DNA, 25 bp, Probe sequence
cacagtgattatagttgccttgatt

SEQ ID NO: 35572 - DNA, 25 bp, Probe sequence
atagaattgaacgagagatactggt

SEQ ID NO: 35573 - DNA, 25 bp, Probe sequence
agaattgaacgagagatactggtga

SEQ ID NO: 35574 - DNA, 25 bp, Probe sequence
gatagaattgaacgagagatactgg

SEQ ID NO: 35575 - DNA, 25 bp, Probe sequence
acagtgattatagttgccttgatta

SEQ ID NO: 35576 - DNA, 25 bp, Probe sequence
cttgttatgtaacgagtgtcacagt

SEQ ID NO: 35577 - DNA, 25 bp, Probe sequence
agatagaattgaacgagagatactg

SEQ ID NO: 35578 - DNA, 25 bp, Probe sequence
agatcgccgaaagattttaatcaag

SEQ ID NO: 35579 - DNA, 25 bp, Probe sequence
gaagatcgccgaaagattttaatca

SEQ ID NO: 35580 - DNA, 25 bp, Probe sequence
tgaagatcgccgaaagattttaatc

SEQ ID NO: 35581 - DNA, 25 bp, Probe sequence
ctgaagatcgccgaaagattttaat

SEQ ID NO: 35582 - DNA, 25 bp, Probe sequence
aagatcgccgaaagattttaatcaa

SEQ ID NO: 35583 - DNA, 25 bp, Probe sequence
cgccgaaagattttaatcaagcaaa

SEQ ID NO: 35584 - DNA, 25 bp, Probe sequence
gatcgccgaaagattttaatcaagc

SEQ ID NO: 35585 - DNA, 25 bp, Probe sequence
gccgaaagattttaatcaagcaaaa

SEQ ID NO: 35586 - DNA, 25 bp, Probe sequence
atttaatcaaacgaaaacatcaagc

SEQ ID NO: 35587 - DNA, 25 bp, Probe sequence
gcgtcgttgttattgctcataatat

SEQ ID NO: 35588 - DNA, 25 bp, Probe sequence
ggcgtcgttgttattgctcataata

SEQ ID NO: 35589 - DNA, 25 bp, Probe sequence
tgaagtaatgcgttatattctgact

SEQ ID NO: 35590 - DNA, 25 bp, Probe sequence
cgtcgttgttattgctcataatata

SEQ ID NO: 35591 - DNA, 25 bp, Probe sequence
atgaagtaatgcgttatattctgac

SEQ ID NO: 35592 - DNA, 25 bp, Probe sequence
aatgagacgatgaaagatacgatgg

SEQ ID NO: 35593 - DNA, 25 bp, Probe sequence
aatgggctttattgttgaagatgac

SEQ ID NO: 35594 - DNA, 25 bp, Probe sequence
ggctttattgttgaagatgacgaaa

SEQ ID NO: 35595 - DNA, 25 bp, Probe sequence
cgatgttaagaagaaatggctatca

SEQ ID NO: 35596 - DNA, 25 bp, Probe sequence
atgataagttgataagtgaaaccgc

SEQ ID NO: 35597 - DNA, 25 bp, Probe sequence
acaactgtaatatcggagggtttat

SEQ ID NO: 35598 - DNA, 25 bp, Probe sequence
ataagttgataagtgaaaccgccaa

SEQ ID NO: 35599 - DNA, 25 bp, Probe sequence
caactgtaatatcggagggtttatt

SEQ ID NO: 35600 - DNA, 25 bp, Probe sequence
gataagttgataagtgaaaccgcca

SEQ ID NO: 35601 - DNA, 25 bp, Probe sequence
tgataagttgataagtgaaaccgcc

SEQ ID NO: 35602 - DNA, 25 bp, Probe sequence
agatgatatagttgcttattctcct

SEQ ID NO: 35603 - DNA, 25 bp, Probe sequence
ccgccaagagtgtaatgaaggaatt

SEQ ID NO: 35604 - DNA, 25 bp, Probe sequence
tacaactgtaatatcggagggttta

SEQ ID NO: 35605 - DNA, 25 bp, Probe sequence
gagagttatgtgtttgtgatgtagc

SEQ ID NO: 35606 - DNA, 25 bp, Probe sequence
ttagagggagagttatgtgtttgtg

SEQ ID NO: 35607 - DNA, 25 bp, Probe sequence
agaccttgctaaacagaatcctatg

SEQ ID NO: 35608 - DNA, 25 bp, Probe sequence
tttagagggagagttatgtgtttgt

SEQ ID NO: 35609 - DNA, 25 bp, Probe sequence
aaagaccttgctaaacagaatccta

SEQ ID NO: 35610 - DNA, 25 bp, Probe sequence
tgaagataaggtaaacagggctaaa

SEQ ID NO: 35611 - DNA, 25 bp, Probe sequence
gggagagttatgtgtttgtgatgta

SEQ ID NO: 35612 - DNA, 25 bp, Probe sequence
aagaccttgctaaacagaatcctat

SEQ ID NO: 35613 - DNA, 25 bp, Probe sequence
ggagagttatgtgtttgtgatgtag

SEQ ID NO: 35614 - DNA, 25 bp, Probe sequence
tatagtaacaacgcaatcggctaat

SEQ ID NO: 35615 - DNA, 25 bp, Probe sequence
gtatagtaacaacgcaatcggctaa

SEQ ID NO: 35616 - DNA, 25 bp, Probe sequence
atagtaacaacgcaatcggctaatg

SEQ ID NO: 35617 - DNA, 25 bp, Probe sequence
agtatagtaacaacgcaatcggcta

SEQ ID NO: 35618 - DNA, 25 bp, Probe sequence
aagcaactcattgaacaacataatt

SEQ ID NO: 35619 - DNA, 25 bp, Probe sequence
aagtatagtaacaacgcaatcggct

SEQ ID NO: 35620 - DNA, 25 bp, Probe sequence
atggacgacagttaggtttatgaat

SEQ ID NO: 35621 - DNA, 25 bp, Probe sequence
tcacacgatgattcagaatataaga

SEQ ID NO: 35622 - DNA, 25 bp, Probe sequence
tctcacacgatgattcagaatataa

SEQ ID NO: 35623 - DNA, 25 bp, Probe sequence
atacaactatgaagatgacagcaat

SEQ ID NO: 35624 - DNA, 25 bp, Probe sequence
tacaactatgaagatgacagcaatt

SEQ ID NO: 35625 - DNA, 25 bp, Probe sequence
ttggagcatacaactatgaagatga

SEQ ID NO: 35626 - DNA, 25 bp, Probe sequence
ggagcatacaactatgaagatgaca

SEQ ID NO: 35627 - DNA, 25 bp, Probe sequence
tggagcatacaactatgaagatgac

SEQ ID NO: 35628 - DNA, 25 bp, Probe sequence
gagcatacaactatgaagatgacag

SEQ ID NO: 35629 - DNA, 25 bp, Probe sequence
catacaactatgaagatgacagcaa

SEQ ID NO: 35630 - DNA, 25 bp, Probe sequence
agcatacaactatgaagatgacagc

SEQ ID NO: 35631 - DNA, 25 bp, Probe sequence
gcatacaactatgaagatgacagca

SEQ ID NO: 35632 - DNA, 25 bp, Probe sequence
tagatgcgacatactatgcgataca

SEQ ID NO: 35633 - DNA, 25 bp, Probe sequence
attagatgcgacatactatgcgata

SEQ ID NO: 35634 - DNA, 25 bp, Probe sequence
aattagatgcgacatactatgcgat

SEQ ID NO: 35635 - DNA, 25 bp, Probe sequence
ttagatgcgacatactatgcgatac

SEQ ID NO: 35636 - DNA, 25 bp, Probe sequence
gaattagatgcgacatactatgcga

SEQ ID NO: 35637 - DNA, 25 bp, Probe sequence
ttaacaataattctggtggtcatgc

SEQ ID NO: 35638 - DNA, 25 bp, Probe sequence
aagatatgtcagatcaagaatggcg

SEQ ID NO: 35639 - DNA, 25 bp, Probe sequence
cagtagttgatgaaccacaagtgaa

SEQ ID NO: 35640 - DNA, 25 bp, Probe sequence
gatgcgacatactatgcgatacaac

SEQ ID NO: 35641 - DNA, 25 bp, Probe sequence
agaaatctacatagtgaatttgcta

SEQ ID NO: 35642 - DNA, 25 bp, Probe sequence
tagaaatctacatagtgaatttgct

SEQ ID NO: 35643 - DNA, 25 bp, Probe sequence
gaaatctacatagtgaatttgctat

SEQ ID NO: 35644 - DNA, 25 bp, Probe sequence
atagaaatctacatagtgaatttgc

SEQ ID NO: 35645 - DNA, 25 bp, Probe sequence
tagcaacaggaattgattatctcgt

SEQ ID NO: 35646 - DNA, 25 bp, Probe sequence
gtagcaacaggaattgattatctcg

SEQ ID NO: 35647 - DNA, 25 bp, Probe sequence
caacaggaattgattatctcgtcat

SEQ ID NO: 35648 - DNA, 25 bp, Probe sequence
agcaacaggaattgattatctcgtc

SEQ ID NO: 35649 - DNA, 25 bp, Probe sequence
cggtatatgtagcaacaggaattga

SEQ ID NO: 35650 - DNA, 25 bp, Probe sequence
gcaacaggaattgattatctcgtca

SEQ ID NO: 35651 - DNA, 25 bp, Probe sequence
tgtagcaacaggaattgattatctc

SEQ ID NO: 35652 - DNA, 25 bp, Probe sequence
ggtatatgtagcaacaggaattgat

SEQ ID NO: 35653 - DNA, 25 bp, Probe sequence
ttgtgctatgtcagttaccgtctag

SEQ ID NO: 35654 - DNA, 25 bp, Probe sequence
attaggacacattaacggttcaact

SEQ ID NO: 35655 - DNA, 25 bp, Probe sequence
ttaggacacattaacggttcaactt

SEQ ID NO: 35656 - DNA, 25 bp, Probe sequence
aattaggacacattaacggttcaac

SEQ ID NO: 35657 - DNA, 25 bp, Probe sequence
gaattaggacacattaacggttcaa

SEQ ID NO: 35658 - DNA, 25 bp, Probe sequence
tatattggacatactgagcaagcaa

SEQ ID NO: 35659 - DNA, 25 bp, Probe sequence
ttatattggacatactgagcaagca

SEQ ID NO: 35660 - DNA, 25 bp, Probe sequence
atgaattaggacacattaacggttc

SEQ ID NO: 35661 - DNA, 25 bp, Probe sequence
cttatattggacatactgagcaagc

SEQ ID NO: 35662 - DNA, 25 bp, Probe sequence
tatggtggcgtaggtacttatattg

SEQ ID NO: 35663 - DNA, 25 bp, Probe sequence
aattagaagtcttacacactccagg

SEQ ID NO: 35664 - DNA, 25 bp, Probe sequence
attagaagtcttacacactccaggc

SEQ ID NO: 35665 - DNA, 25 bp, Probe sequence
gcttcaggtattagagatgtggcaa

SEQ ID NO: 35666 - DNA, 25 bp, Probe sequence
ttgcttcaggtattagagatgtggc

SEQ ID NO: 35667 - DNA, 25 bp, Probe sequence
acgtacaggagaagcaatgattatt

SEQ ID NO: 35668 - DNA, 25 bp, Probe sequence
aacgtacaggagaagcaatgattat

SEQ ID NO: 35669 - DNA, 25 bp, Probe sequence
ttcaggtattagagatgtggcaaat

SEQ ID NO: 35670 - DNA, 25 bp, Probe sequence
cttcaggtattagagatgtggcaaa

SEQ ID NO: 35671 - DNA, 25 bp, Probe sequence
tttgcttcaggtattagagatgtgg

SEQ ID NO: 35672 - DNA, 25 bp, Probe sequence
ctaatgacgccactaatgcttattg

SEQ ID NO: 35673 - DNA, 25 bp, Probe sequence
gcggtattattatcgttccaacaat

SEQ ID NO: 35674 - DNA, 25 bp, Probe sequence
actaatgacgccactaatgcttatt

SEQ ID NO: 35675 - DNA, 25 bp, Probe sequence
atgacgccactaatgcttattgtat

SEQ ID NO: 35676 - DNA, 25 bp, Probe sequence
attggaggcggtattattatcgttc

SEQ ID NO: 35677 - DNA, 25 bp, Probe sequence
tgacgccactaatgcttattgtatt

SEQ ID NO: 35678 - DNA, 25 bp, Probe sequence
aatgacgccactaatgcttattgta

SEQ ID NO: 35679 - DNA, 25 bp, Probe sequence
taatgacgccactaatgcttattgt

SEQ ID NO: 35680 - DNA, 25 bp, Probe sequence
cattggaggcggtattattatcgtt

SEQ ID NO: 35681 - DNA, 25 bp, Probe sequence
tatcactggaagattacttgaaggt

SEQ ID NO: 35682 - DNA, 25 bp, Probe sequence
ttatcactggaagattacttgaagg

SEQ ID NO: 35683 - DNA, 25 bp, Probe sequence
atcactggaagattacttgaaggtg

SEQ ID NO: 35684 - DNA, 25 bp, Probe sequence
ggtgcgtttgaaattcctttagtag

SEQ ID NO: 35685 - DNA, 25 bp, Probe sequence
gtgcgtttgaaattcctttagtagc

SEQ ID NO: 35686 - DNA, 25 bp, Probe sequence
taacgactgaaagtattgaacaagc

SEQ ID NO: 35687 - DNA, 25 bp, Probe sequence
ttcgacatgatgttaatgaagacaa

SEQ ID NO: 35688 - DNA, 25 bp, Probe sequence
tcgacatgatgttaatgaagacaat

SEQ ID NO: 35689 - DNA, 25 bp, Probe sequence
attcgacatgatgttaatgaagaca

SEQ ID NO: 35690 - DNA, 25 bp, Probe sequence
tgaagtgattggagataagttgatt

SEQ ID NO: 35691 - DNA, 25 bp, Probe sequence
atgatgtatggataggtagagatgt

SEQ ID NO: 35692 - DNA, 25 bp, Probe sequence
atgaagtgattggagataagttgat

SEQ ID NO: 35693 - DNA, 25 bp, Probe sequence
attatgatagtaagcgaggagaatc

SEQ ID NO: 35694 - DNA, 25 bp, Probe sequence
tgatgtatggataggtagagatgta

SEQ ID NO: 35695 - DNA, 25 bp, Probe sequence
ttatgatagtaagcgaggagaatcc

SEQ ID NO: 35696 - DNA, 25 bp, Probe sequence
tatgaagtgattggagataagttga

SEQ ID NO: 35697 - DNA, 25 bp, Probe sequence
atggagttatcgaagaatggttagc

SEQ ID NO: 35698 - DNA, 25 bp, Probe sequence
tgatggagttatcgaagaatggtta

SEQ ID NO: 35699 - DNA, 25 bp, Probe sequence
cttactaaccaagatacaggaccat

SEQ ID NO: 35700 - DNA, 25 bp, Probe sequence
ttactaaccaagatacaggaccata

SEQ ID NO: 35701 - DNA, 25 bp, Probe sequence
tactaaccaagatacaggaccatat

SEQ ID NO: 35702 - DNA, 25 bp, Probe sequence
cggtaataagatagggcgaataact

SEQ ID NO: 35703 - DNA, 25 bp, Probe sequence
tatacattgcctaacccagattcag

SEQ ID NO: 35704 - DNA, 25 bp, Probe sequence
ggaatatacattgcctaacccagat

SEQ ID NO: 35705 - DNA, 25 bp, Probe sequence
atatacattgcctaacccagattca

SEQ ID NO: 35706 - DNA, 25 bp, Probe sequence
tatggtttacagaaatgaatggcaa

SEQ ID NO: 35707 - DNA, 25 bp, Probe sequence
gtgtgacaagataggcaaattaact

SEQ ID NO: 35708 - DNA, 25 bp, Probe sequence
agcagatgaaccaacaactaactta

SEQ ID NO: 35709 - DNA, 25 bp, Probe sequence
tagcagatgaaccaacaactaactt

SEQ ID NO: 35710 - DNA, 25 bp, Probe sequence
gcagatgaaccaacaactaacttag

SEQ ID NO: 35711 - DNA, 25 bp, Probe sequence
ctattagcagatgaaccaacaacta

SEQ ID NO: 35712 - DNA, 25 bp, Probe sequence
cagatgaaccaacaactaacttaga

SEQ ID NO: 35713 - DNA, 25 bp, Probe sequence
aaccttcggaagaattagaacaaga

SEQ ID NO: 35714 - DNA, 25 bp, Probe sequence
gaaccttcggaagaattagaacaag

SEQ ID NO: 35715 - DNA, 25 bp, Probe sequence
tgagtattgaaccttcggaagaatt

SEQ ID NO: 35716 - DNA, 25 bp, Probe sequence
ttgagtattgaaccttcggaagaat

SEQ ID NO: 35717 - DNA, 25 bp, Probe sequence
agtaattcaacatccagtagtgctt

SEQ ID NO: 35718 - DNA, 25 bp, Probe sequence
cagtaattcaacatccagtagtgct

SEQ ID NO: 35719 - DNA, 25 bp, Probe sequence
gcgttactatctgaatggagaagaa

SEQ ID NO: 35720 - DNA, 25 bp, Probe sequence
gtaattcaacatccagtagtgctta

SEQ ID NO: 35721 - DNA, 25 bp, Probe sequence
agcaatgttatagatgaatcaggtc

SEQ ID NO: 35722 - DNA, 25 bp, Probe sequence
gcaatgttatagatgaatcaggtca

SEQ ID NO: 35723 - DNA, 25 bp, Probe sequence
taattcaacatccagtagtgcttaa

SEQ ID NO: 35724 - DNA, 25 bp, Probe sequence
ggcgttactatctgaatggagaaga

SEQ ID NO: 35725 - DNA, 25 bp, Probe sequence
aacattatgccaagaattgcctgaa

SEQ ID NO: 35726 - DNA, 25 bp, Probe sequence
tgtagtagatgatgagaatcgtgaa

SEQ ID NO: 35727 - DNA, 25 bp, Probe sequence
ttgtagtagatgatgagaatcgtga

SEQ ID NO: 35728 - DNA, 25 bp, Probe sequence
tgagcaaggatatgatacagtaact

SEQ ID NO: 35729 - DNA, 25 bp, Probe sequence
ttgtgagattatgaatgatgacggc

SEQ ID NO: 35730 - DNA, 25 bp, Probe sequence
ttgagcaaggatatgatacagtaac

SEQ ID NO: 35731 - DNA, 25 bp, Probe sequence
attgtagtagatgatgagaatcgtg

SEQ ID NO: 35732 - DNA, 25 bp, Probe sequence
aagaattgaagttatcgtaccagaa

SEQ ID NO: 35733 - DNA, 25 bp, Probe sequence
tgctcaacttgaatcgtctatgaag

SEQ ID NO: 35734 - DNA, 25 bp, Probe sequence
gattatgaatgatgacggcacgatg

SEQ ID NO: 35735 - DNA, 25 bp, Probe sequence
ctgctgctgttctttatattgctac

SEQ ID NO: 35736 - DNA, 25 bp, Probe sequence
tggctatttatgatgattgtgaagg

SEQ ID NO: 35737 - DNA, 25 bp, Probe sequence
gaggtgtattatgattcaaacggtt

SEQ ID NO: 35738 - DNA, 25 bp, Probe sequence
ggctatttatgatgattgtgaagga

SEQ ID NO: 35739 - DNA, 25 bp, Probe sequence
gttgctgctgctgttctttatattg

SEQ ID NO: 35740 - DNA, 25 bp, Probe sequence
ggtgtattatgattcaaacggttgt

SEQ ID NO: 35741 - DNA, 25 bp, Probe sequence
gtattatgattcaaacggttgttgc

SEQ ID NO: 35742 - DNA, 25 bp, Probe sequence
aggtgtattatgattcaaacggttg

SEQ ID NO: 35743 - DNA, 25 bp, Probe sequence
tattatgattcaaacggttgttgct

SEQ ID NO: 35744 - DNA, 25 bp, Probe sequence
caagtattatggttggattaggtga

SEQ ID NO: 35745 - DNA, 25 bp, Probe sequence
tcaagtattatggttggattaggtg

SEQ ID NO: 35746 - DNA, 25 bp, Probe sequence
aagtattatggttggattaggtgaa

SEQ ID NO: 35747 - DNA, 25 bp, Probe sequence
agagatgctggttcaaatgtttatg

SEQ ID NO: 35748 - DNA, 25 bp, Probe sequence
atattacacgcctttagagtttggt

SEQ ID NO: 35749 - DNA, 25 bp, Probe sequence
tattacacgcctttagagtttggta

SEQ ID NO: 35750 - DNA, 25 bp, Probe sequence
gtgatgatttaagagatgctggttc

SEQ ID NO: 35751 - DNA, 25 bp, Probe sequence
atcaagtattatggttggattaggt

SEQ ID NO: 35752 - DNA, 25 bp, Probe sequence
aagagatgctggttcaaatgtttat

SEQ ID NO: 35753 - DNA, 25 bp, Probe sequence
aagcacataagattacggcagatat

SEQ ID NO: 35754 - DNA, 25 bp, Probe sequence
gaagcacataagattacggcagata

SEQ ID NO: 35755 - DNA, 25 bp, Probe sequence
agatgttaagcgacaatcagaagta

SEQ ID NO: 35756 - DNA, 25 bp, Probe sequence
gatgttaagcgacaatcagaagtaa

SEQ ID NO: 35757 - DNA, 25 bp, Probe sequence
ttattacgattcaatgtagccaaca

SEQ ID NO: 35758 - DNA, 25 bp, Probe sequence
attattacgattcaatgtagccaac

SEQ ID NO: 35759 - DNA, 25 bp, Probe sequence
cagatgttaagcgacaatcagaagt

SEQ ID NO: 35760 - DNA, 25 bp, Probe sequence
ttagcagatgttaagcgacaatcag

SEQ ID NO: 35761 - DNA, 25 bp, Probe sequence
agcacataagattacggcagatatg

SEQ ID NO: 35762 - DNA, 25 bp, Probe sequence
attaagccaaccattcaagatactg

SEQ ID NO: 35763 - DNA, 25 bp, Probe sequence
gattaagccaaccattcaagatact

SEQ ID NO: 35764 - DNA, 25 bp, Probe sequence
agattaagccaaccattcaagatac

SEQ ID NO: 35765 - DNA, 25 bp, Probe sequence
gaagattaagccaaccattcaagat

SEQ ID NO: 35766 - DNA, 25 bp, Probe sequence
gatgtgaagattaagccaaccattc

SEQ ID NO: 35767 - DNA, 25 bp, Probe sequence
agatgtgaagattaagccaaccatt

SEQ ID NO: 35768 - DNA, 25 bp, Probe sequence
aagatgtgaagattaagccaaccat

SEQ ID NO: 35769 - DNA, 25 bp, Probe sequence
ttaagccaaccattcaagatactga

SEQ ID NO: 35770 - DNA, 25 bp, Probe sequence
aagattaagccaaccattcaagata

SEQ ID NO: 35771 - DNA, 25 bp, Probe sequence
atgatgtgattgagataccagatgc

SEQ ID NO: 35772 - DNA, 25 bp, Probe sequence
tattgaggttgaatgcgttgatgat

SEQ ID NO: 35773 - DNA, 25 bp, Probe sequence
aatgatgtgattgagataccagatg

SEQ ID NO: 35774 - DNA, 25 bp, Probe sequence
gaaggtaggattgttggtattggtg

SEQ ID NO: 35775 - DNA, 25 bp, Probe sequence
gtattgaggttgaatgcgttgatga

SEQ ID NO: 35776 - DNA, 25 bp, Probe sequence
atgtgattgagataccagatgcgaa

SEQ ID NO: 35777 - DNA, 25 bp, Probe sequence
attgaggttgaatgcgttgatgatg

SEQ ID NO: 35778 - DNA, 25 bp, Probe sequence
acagttgaattagatgatccacaat

SEQ ID NO: 35779 - DNA, 25 bp, Probe sequence
gatgtgattgagataccagatgcga

SEQ ID NO: 35780 - DNA, 25 bp, Probe sequence
gttataccattaagcctgacaatcg

SEQ ID NO: 35781 - DNA, 25 bp, Probe sequence
tgttataccattaagcctgacaatc

SEQ ID NO: 35782 - DNA, 25 bp, Probe sequence
tcatgttataccattaagcctgaca

SEQ ID NO: 35783 - DNA, 25 bp, Probe sequence
ttataccattaagcctgacaatcga

SEQ ID NO: 35784 - DNA, 25 bp, Probe sequence
atgttataccattaagcctgacaat

SEQ ID NO: 35785 - DNA, 25 bp, Probe sequence
ttcatgttataccattaagcctgac

SEQ ID NO: 35786 - DNA, 25 bp, Probe sequence
tataccattaagcctgacaatcgac

SEQ ID NO: 35787 - DNA, 25 bp, Probe sequence
gtggtacttataatactgctgttca

SEQ ID NO: 35788 - DNA, 25 bp, Probe sequence
catgttataccattaagcctgacaa

SEQ ID NO: 35789 - DNA, 25 bp, Probe sequence
atgattgaccaggtagatgatatgt

SEQ ID NO: 35790 - DNA, 25 bp, Probe sequence
gttatacgaagcaatgattgaccag

SEQ ID NO: 35791 - DNA, 25 bp, Probe sequence
gcaatgattgaccaggtagatgata

SEQ ID NO: 35792 - DNA, 25 bp, Probe sequence
tgattgaccaggtagatgatatgta

SEQ ID NO: 35793 - DNA, 25 bp, Probe sequence
actataccgcatacattcttacatt

SEQ ID NO: 35794 - DNA, 25 bp, Probe sequence
aatgattgaccaggtagatgatatg

SEQ ID NO: 35795 - DNA, 25 bp, Probe sequence
ttatacgaagcaatgattgaccagg

SEQ ID NO: 35796 - DNA, 25 bp, Probe sequence
acattatcaataattgtcgctcacg

SEQ ID NO: 35797 - DNA, 25 bp, Probe sequence
gaagcaatgattgaccaggtagatg

SEQ ID NO: 35798 - DNA, 25 bp, Probe sequence
ttgatgacgcattaccttattacaa

SEQ ID NO: 35799 - DNA, 25 bp, Probe sequence
tgacgcattaccttattacaaacaa

SEQ ID NO: 35800 - DNA, 25 bp, Probe sequence
atgtttgatgacgcattaccttatt

SEQ ID NO: 35801 - DNA, 25 bp, Probe sequence
atgacgcattaccttattacaaaca

SEQ ID NO: 35802 - DNA, 25 bp, Probe sequence
tgatgacgcattaccttattacaaa

SEQ ID NO: 35803 - DNA, 25 bp, Probe sequence
tttgatgacgcattaccttattaca

SEQ ID NO: 35804 - DNA, 25 bp, Probe sequence
tgtttgatgacgcattaccttatta

SEQ ID NO: 35805 - DNA, 25 bp, Probe sequence
gatgacgcattaccttattacaaac

SEQ ID NO: 35806 - DNA, 25 bp, Probe sequence
gtttgatgacgcattaccttattac

SEQ ID NO: 35807 - DNA, 25 bp, Probe sequence
ctggtgtaagtgtattgagagagtt

SEQ ID NO: 35808 - DNA, 25 bp, Probe sequence
gaactggacgatattgcgattattg

SEQ ID NO: 35809 - DNA, 25 bp, Probe sequence
atgaactggacgatattgcgattat

SEQ ID NO: 35810 - DNA, 25 bp, Probe sequence
tgaactggacgatattgcgattatt

SEQ ID NO: 35811 - DNA, 25 bp, Probe sequence
aatgaactggacgatattgcgatta

SEQ ID NO: 35812 - DNA, 25 bp, Probe sequence
ctggacgatattgcgattattggta

SEQ ID NO: 35813 - DNA, 25 bp, Probe sequence
ccaatcaagttattagtccaaggtt

SEQ ID NO: 35814 - DNA, 25 bp, Probe sequence
tggtgtaagtgtattgagagagtta

SEQ ID NO: 35815 - DNA, 25 bp, Probe sequence
gtattgagagagttagttaagcacc

SEQ ID NO: 35816 - DNA, 25 bp, Probe sequence
gttgatcccgatatgaaagatgaga

SEQ ID NO: 35817 - DNA, 25 bp, Probe sequence
agttgatcccgatatgaaagatgag

SEQ ID NO: 35818 - DNA, 25 bp, Probe sequence
tgttagttgatcccgatatgaaaga

SEQ ID NO: 35819 - DNA, 25 bp, Probe sequence
tgatcccgatatgaaagatgagatt

SEQ ID NO: 35820 - DNA, 25 bp, Probe sequence
ttgatcccgatatgaaagatgagat

SEQ ID NO: 35821 - DNA, 25 bp, Probe sequence
tgagattatcaaatacgcacaagaa

SEQ ID NO: 35822 - DNA, 25 bp, Probe sequence
tagttgatcccgatatgaaagatga

SEQ ID NO: 35823 - DNA, 25 bp, Probe sequence
ttgttagttgatcccgatatgaaag

SEQ ID NO: 35824 - DNA, 25 bp, Probe sequence
acatttgttagttgatcccgatatg

SEQ ID NO: 35825 - DNA, 25 bp, Probe sequence
acgctgttaatggaattgttacctt

SEQ ID NO: 35826 - DNA, 25 bp, Probe sequence
aacgctgttaatggaattgttacct

SEQ ID NO: 35827 - DNA, 25 bp, Probe sequence
caaccgaatactattatccacttca

SEQ ID NO: 35828 - DNA, 25 bp, Probe sequence
acaaccgaatactattatccacttc

SEQ ID NO: 35829 - DNA, 25 bp, Probe sequence
aacaaccgaatactattatccactt

SEQ ID NO: 35830 - DNA, 25 bp, Probe sequence
aatggcgaatggtgtattaatgatg

SEQ ID NO: 35831 - DNA, 25 bp, Probe sequence
ggcgaatggtgtattaatgatgtta

SEQ ID NO: 35832 - DNA, 25 bp, Probe sequence
atggcgaatggtgtattaatgatgt

SEQ ID NO: 35833 - DNA, 25 bp, Probe sequence
aaccgaatactattatccacttcaa

SEQ ID NO: 35834 - DNA, 25 bp, Probe sequence
acaatcaccaggagcatcagtatat

SEQ ID NO: 35835 - DNA, 25 bp, Probe sequence
aacaatcaccaggagcatcagtata

SEQ ID NO: 35836 - DNA, 25 bp, Probe sequence
caatcaccaggagcatcagtatata

SEQ ID NO: 35837 - DNA, 25 bp, Probe sequence
tgtacgataccgatattatgtctgg

SEQ ID NO: 35838 - DNA, 25 bp, Probe sequence
caccaggagcatcagtatatatgtt

SEQ ID NO: 35839 - DNA, 25 bp, Probe sequence
atgtagttattggacttgacgaaca

SEQ ID NO: 35840 - DNA, 25 bp, Probe sequence
tgtagttattggacttgacgaacaa

SEQ ID NO: 35841 - DNA, 25 bp, Probe sequence
atcaccaggagcatcagtatatatg

SEQ ID NO: 35842 - DNA, 25 bp, Probe sequence
tcaccaggagcatcagtatatatgt

SEQ ID NO: 35843 - DNA, 25 bp, Probe sequence
atccaggagaacatcaatatgctac

SEQ ID NO: 35844 - DNA, 25 bp, Probe sequence
aatccaggagaacatcaatatgcta

SEQ ID NO: 35845 - DNA, 25 bp, Probe sequence
taagcacttcttatcaagcacagat

SEQ ID NO: 35846 - DNA, 25 bp, Probe sequence
aagcacttcttatcaagcacagatc

SEQ ID NO: 35847 - DNA, 25 bp, Probe sequence
gcacttcttatcaagcacagatcaa

SEQ ID NO: 35848 - DNA, 25 bp, Probe sequence
ttggaataataggacttgttgtcat

SEQ ID NO: 35849 - DNA, 25 bp, Probe sequence
gttgtcatatttgctgttgtctcat

SEQ ID NO: 35850 - DNA, 25 bp, Probe sequence
ttgttgtcatatttgctgttgtctc

SEQ ID NO: 35851 - DNA, 25 bp, Probe sequence
cttgttgtcatatttgctgttgtct

SEQ ID NO: 35852 - DNA, 25 bp, Probe sequence
tctcagaatctaataattgggacga

SEQ ID NO: 35853 - DNA, 25 bp, Probe sequence
gccactttatcaggacaatacttaa

SEQ ID NO: 35854 - DNA, 25 bp, Probe sequence
ctcagaatctaataattgggacgaa

SEQ ID NO: 35855 - DNA, 25 bp, Probe sequence
atctcagaatctaataattgggacg

SEQ ID NO: 35856 - DNA, 25 bp, Probe sequence
tcagaatctaataattgggacgaaa

SEQ ID NO: 35857 - DNA, 25 bp, Probe sequence
atcaggacaatacttaaattctgct

SEQ ID NO: 35858 - DNA, 25 bp, Probe sequence
cagaatctaataattgggacgaaat

SEQ ID NO: 35859 - DNA, 25 bp, Probe sequence
aggacaatacttaaattctgctaga

SEQ ID NO: 35860 - DNA, 25 bp, Probe sequence
tcaggacaatacttaaattctgcta

SEQ ID NO: 35861 - DNA, 25 bp, Probe sequence
tgattgccatgatagaagatgttga

SEQ ID NO: 35862 - DNA, 25 bp, Probe sequence
gtgattgccatgatagaagatgttg

SEQ ID NO: 35863 - DNA, 25 bp, Probe sequence
attgccatgatagaagatgttgaag

SEQ ID NO: 35864 - DNA, 25 bp, Probe sequence
gattgccatgatagaagatgttgaa

SEQ ID NO: 35865 - DNA, 25 bp, Probe sequence
gtgagacagttgagcatattgtgaa

SEQ ID NO: 35866 - DNA, 25 bp, Probe sequence
ttgccatgatagaagatgttgaagg

SEQ ID NO: 35867 - DNA, 25 bp, Probe sequence
ggtgattgccatgatagaagatgtt

SEQ ID NO: 35868 - DNA, 25 bp, Probe sequence
gatcgtgagacagttgagcatattg

SEQ ID NO: 35869 - DNA, 25 bp, Probe sequence
agatcgtgagacagttgagcatatt

SEQ ID NO: 35870 - DNA, 25 bp, Probe sequence
taattgcgaatatggctgtaggata

SEQ ID NO: 35871 - DNA, 25 bp, Probe sequence
aattgcgaatatggctgtaggatat

SEQ ID NO: 35872 - DNA, 25 bp, Probe sequence
attgcgaatatggctgtaggatatg

SEQ ID NO: 35873 - DNA, 25 bp, Probe sequence
gtaattgcgaatatggctgtaggat

SEQ ID NO: 35874 - DNA, 25 bp, Probe sequence
aagtaattgcgaatatggctgtagg

SEQ ID NO: 35875 - DNA, 25 bp, Probe sequence
tatggctgtaggatatgacaacatc

SEQ ID NO: 35876 - DNA, 25 bp, Probe sequence
ttgcgaatatggctgtaggatatga

SEQ ID NO: 35877 - DNA, 25 bp, Probe sequence
cgaatatggctgtaggatatgacaa

SEQ ID NO: 35878 - DNA, 25 bp, Probe sequence
aatatggctgtaggatatgacaaca

SEQ ID NO: 35879 - DNA, 25 bp, Probe sequence
atagcaggatcttctcttgtaatgg

SEQ ID NO: 35880 - DNA, 25 bp, Probe sequence
aggatcttctcttgtaatggatgac

SEQ ID NO: 35881 - DNA, 25 bp, Probe sequence
caggatcttctcttgtaatggatga

SEQ ID NO: 35882 - DNA, 25 bp, Probe sequence
tagcaggatcttctcttgtaatgga

SEQ ID NO: 35883 - DNA, 25 bp, Probe sequence
gcaggatcttctcttgtaatggatg

SEQ ID NO: 35884 - DNA, 25 bp, Probe sequence
agcaggatcttctcttgtaatggat

SEQ ID NO: 35885 - DNA, 25 bp, Probe sequence
tcaatagcaggatcttctcttgtaa

SEQ ID NO: 35886 - DNA, 25 bp, Probe sequence
atcaatagcaggatcttctcttgta

SEQ ID NO: 35887 - DNA, 25 bp, Probe sequence
aatagcaggatcttctcttgtaatg

SEQ ID NO: 35888 - DNA, 25 bp, Probe sequence
gtgatgacaaccaattactatgttg

SEQ ID NO: 35889 - DNA, 25 bp, Probe sequence
tgatgacaaccaattactatgttga

SEQ ID NO: 35890 - DNA, 25 bp, Probe sequence
tgacaaccaattactatgttgaatc

SEQ ID NO: 35891 - DNA, 25 bp, Probe sequence
gatgacaaccaattactatgttgaa

SEQ ID NO: 35892 - DNA, 25 bp, Probe sequence
gacaaccaattactatgttgaatct

SEQ ID NO: 35893 - DNA, 25 bp, Probe sequence
atgacaaccaattactatgttgaat

SEQ ID NO: 35894 - DNA, 25 bp, Probe sequence
acaaccaattactatgttgaatcta

SEQ ID NO: 35895 - DNA, 25 bp, Probe sequence
caaccaattactatgttgaatctat

SEQ ID NO: 35896 - DNA, 25 bp, Probe sequence
agatattgagagtaacgaagtcagc

SEQ ID NO: 35897 - DNA, 25 bp, Probe sequence
tgaagatattgagagtaacgaagtc

SEQ ID NO: 35898 - DNA, 25 bp, Probe sequence
aagatattgagagtaacgaagtcag

SEQ ID NO: 35899 - DNA, 25 bp, Probe sequence
gaagatattgagagtaacgaagtca

SEQ ID NO: 35900 - DNA, 25 bp, Probe sequence
atattgagagtaacgaagtcagctt

SEQ ID NO: 35901 - DNA, 25 bp, Probe sequence
gatattgagagtaacgaagtcagct

SEQ ID NO: 35902 - DNA, 25 bp, Probe sequence
agtaacgaagtcagctttaatatgc

SEQ ID NO: 35903 - DNA, 25 bp, Probe sequence
tgagagtaacgaagtcagctttaat

SEQ ID NO: 35904 - DNA, 25 bp, Probe sequence
attgagagtaacgaagtcagcttta

SEQ ID NO: 35905 - DNA, 25 bp, Probe sequence
gcgacacacacaataacttcattta

SEQ ID NO: 35906 - DNA, 25 bp, Probe sequence
gccacctaataaatatgttgaagca

SEQ ID NO: 35907 - DNA, 25 bp, Probe sequence
agccacctaataaatatgttgaagc

SEQ ID NO: 35908 - DNA, 25 bp, Probe sequence
atatttaatttatggcagtggcgac

SEQ ID NO: 35909 - DNA, 25 bp, Probe sequence
tatttaatttatggcagtggcgaca

SEQ ID NO: 35910 - DNA, 25 bp, Probe sequence
tatatttaatttatggcagtggcga

SEQ ID NO: 35911 - DNA, 25 bp, Probe sequence
tggcgacacacacaataacttcatt

SEQ ID NO: 35912 - DNA, 25 bp, Probe sequence
cagccacctaataaatatgttgaag

SEQ ID NO: 35913 - DNA, 25 bp, Probe sequence
ttatatttaatttatggcagtggcg

SEQ ID NO: 35914 - DNA, 25 bp, Probe sequence
tacaggcgtagatccattaccatta

SEQ ID NO: 35915 - DNA, 25 bp, Probe sequence
atacaggcgtagatccattaccatt

SEQ ID NO: 35916 - DNA, 25 bp, Probe sequence
acaggcgtagatccattaccattaa

SEQ ID NO: 35917 - DNA, 25 bp, Probe sequence
caggcgtagatccattaccattaat

SEQ ID NO: 35918 - DNA, 25 bp, Probe sequence
gatacaggcgtagatccattaccat

SEQ ID NO: 35919 - DNA, 25 bp, Probe sequence
gcgaattattcaatgtgattcaagc

SEQ ID NO: 35920 - DNA, 25 bp, Probe sequence
agtaactgaaggtgtgccaacatat

SEQ ID NO: 35921 - DNA, 25 bp, Probe sequence
cagatacaggcgtagatccattacc

SEQ ID NO: 35922 - DNA, 25 bp, Probe sequence
gcagacgatttagaaactatggaaa

SEQ ID NO: 35923 - DNA, 25 bp, Probe sequence
atggattgttcaatattcttgctga

SEQ ID NO: 35924 - DNA, 25 bp, Probe sequence
aatggattgttcaatattcttgctg

SEQ ID NO: 35925 - DNA, 25 bp, Probe sequence
ggcattagattacattgtgggaaat

SEQ ID NO: 35926 - DNA, 25 bp, Probe sequence
tagagtgggcattagattacattgt

SEQ ID NO: 35927 - DNA, 25 bp, Probe sequence
agagtgggcattagattacattgtg

SEQ ID NO: 35928 - DNA, 25 bp, Probe sequence
ttagagtgggcattagattacattg

SEQ ID NO: 35929 - DNA, 25 bp, Probe sequence
gttagagtgggcattagattacatt

SEQ ID NO: 35930 - DNA, 25 bp, Probe sequence
aaggtgaacataaacatacaacaga

SEQ ID NO: 35931 - DNA, 25 bp, Probe sequence
gggcattagattacattgtgggaaa

SEQ ID NO: 35932 - DNA, 25 bp, Probe sequence
tacggtagcagttacaagtattcaa

SEQ ID NO: 35933 - DNA, 25 bp, Probe sequence
cgcttaccagagtatatgattccta

SEQ ID NO: 35934 - DNA, 25 bp, Probe sequence
tggctacagaatggaattagaagaa

SEQ ID NO: 35935 - DNA, 25 bp, Probe sequence
tgaatggctacagaatggaattaga

SEQ ID NO: 35936 - DNA, 25 bp, Probe sequence
atggctacagaatggaattagaaga

SEQ ID NO: 35937 - DNA, 25 bp, Probe sequence
acgcttaccagagtatatgattcct

SEQ ID NO: 35938 - DNA, 25 bp, Probe sequence
cacgcttaccagagtatatgattcc

SEQ ID NO: 35939 - DNA, 25 bp, Probe sequence
ttgaatggctacagaatggaattag

SEQ ID NO: 35940 - DNA, 25 bp, Probe sequence
aatggctacagaatggaattagaag

SEQ ID NO: 35941 - DNA, 25 bp, Probe sequence
gttaagtatgccattgaacaaggat

SEQ ID NO: 35942 - DNA, 25 bp, Probe sequence
aactggtattgctagagaagactta

SEQ ID NO: 35943 - DNA, 25 bp, Probe sequence
caactggtattgctagagaagactt

SEQ ID NO: 35944 - DNA, 25 bp, Probe sequence
tcaagataagagaattggacctgat

SEQ ID NO: 35945 - DNA, 25 bp, Probe sequence
atcaagataagagaattggacctga

SEQ ID NO: 35946 - DNA, 25 bp, Probe sequence
actggtattgctagagaagacttat

SEQ ID NO: 35947 - DNA, 25 bp, Probe sequence
ttaagtatgccattgaacaaggata

SEQ ID NO: 35948 - DNA, 25 bp, Probe sequence
tcaactggtattgctagagaagact

SEQ ID NO: 35949 - DNA, 25 bp, Probe sequence
aatcaagataagagaattggacctg

SEQ ID NO: 35950 - DNA, 25 bp, Probe sequence
tggacgaagttgaaatacctaaaga

SEQ ID NO: 35951 - DNA, 25 bp, Probe sequence
ggacgaagttgaaatacctaaagaa

SEQ ID NO: 35952 - DNA, 25 bp, Probe sequence
atggacgaagttgaaatacctaaag

SEQ ID NO: 35953 - DNA, 25 bp, Probe sequence
cataatggacgaagttgaaatacct

SEQ ID NO: 35954 - DNA, 25 bp, Probe sequence
aatggacgaagttgaaatacctaaa

SEQ ID NO: 35955 - DNA, 25 bp, Probe sequence
tcataatggacgaagttgaaatacc

SEQ ID NO: 35956 - DNA, 25 bp, Probe sequence
taatggacgaagttgaaatacctaa

SEQ ID NO: 35957 - DNA, 25 bp, Probe sequence
ataatggacgaagttgaaataccta

SEQ ID NO: 35958 - DNA, 25 bp, Probe sequence
tgttatttcataatggacgaagttg

SEQ ID NO: 35959 - DNA, 25 bp, Probe sequence
gtggcattcttaatcaacttcttca

SEQ ID NO: 35960 - DNA, 25 bp, Probe sequence
cgtggcattcttaatcaacttcttc

SEQ ID NO: 35961 - DNA, 25 bp, Probe sequence
caggcaatgaatatcgtgaattagt

SEQ ID NO: 35962 - DNA, 25 bp, Probe sequence
acaggcaatgaatatcgtgaattag

SEQ ID NO: 35963 - DNA, 25 bp, Probe sequence
caacaggcaatgaatatcgtgaatt

SEQ ID NO: 35964 - DNA, 25 bp, Probe sequence
tggcattcttaatcaacttcttcat

SEQ ID NO: 35965 - DNA, 25 bp, Probe sequence
aacaggcaatgaatatcgtgaatta

SEQ ID NO: 35966 - DNA, 25 bp, Probe sequence
caatcatgccgttacaattagactt

SEQ ID NO: 35967 - DNA, 25 bp, Probe sequence
tcatgccgttacaattagacttaca

SEQ ID NO: 35968 - DNA, 25 bp, Probe sequence
cggacatgagattaattggtattcg

SEQ ID NO: 35969 - DNA, 25 bp, Probe sequence
ggacatgagattaattggtattcgt

SEQ ID NO: 35970 - DNA, 25 bp, Probe sequence
acggacatgagattaattggtattc

SEQ ID NO: 35971 - DNA, 25 bp, Probe sequence
gtaacggacatgagattaattggta

SEQ ID NO: 35972 - DNA, 25 bp, Probe sequence
aacggacatgagattaattggtatt

SEQ ID NO: 35973 - DNA, 25 bp, Probe sequence
acatgagattaattggtattcgtga

SEQ ID NO: 35974 - DNA, 25 bp, Probe sequence
tgtaacggacatgagattaattggt

SEQ ID NO: 35975 - DNA, 25 bp, Probe sequence
caatacaacgtggaagacttacaac

SEQ ID NO: 35976 - DNA, 25 bp, Probe sequence
tcaatacaacgtggaagacttacaa

SEQ ID NO: 35977 - DNA, 25 bp, Probe sequence
gttgaagcattagaagagttacgat

SEQ ID NO: 35978 - DNA, 25 bp, Probe sequence
atcgttgaagcattagaagagttac

SEQ ID NO: 35979 - DNA, 25 bp, Probe sequence
tgaagcattagaagagttacgatga

SEQ ID NO: 35980 - DNA, 25 bp, Probe sequence
ttgaagcattagaagagttacgatg

SEQ ID NO: 35981 - DNA, 25 bp, Probe sequence
aatcgttgaagcattagaagagtta

SEQ ID NO: 35982 - DNA, 25 bp, Probe sequence
aaatcgttgaagcattagaagagtt

SEQ ID NO: 35983 - DNA, 25 bp, Probe sequence
tatggactttgatagagatgagtgg

SEQ ID NO: 35984 - DNA, 25 bp, Probe sequence
atggactttgatagagatgagtggg

SEQ ID NO: 35985 - DNA, 25 bp, Probe sequence
cgttgaagcattagaagagttacga

SEQ ID NO: 35986 - DNA, 25 bp, Probe sequence
tcaggtcactgttgaatatgatgaa

SEQ ID NO: 35987 - DNA, 25 bp, Probe sequence
tagcagatcaatgtgaagtacaatt

SEQ ID NO: 35988 - DNA, 25 bp, Probe sequence
ttagcagatcaatgtgaagtacaat

SEQ ID NO: 35989 - DNA, 25 bp, Probe sequence
tgttacaacaggtatggcattgatc

SEQ ID NO: 35990 - DNA, 25 bp, Probe sequence
accaagtgtcagatgcaatattaga

SEQ ID NO: 35991 - DNA, 25 bp, Probe sequence
aaacaaccgatttacaaacaaactg

SEQ ID NO: 35992 - DNA, 25 bp, Probe sequence
tgaaacaaccgatttacaaacaaac

SEQ ID NO: 35993 - DNA, 25 bp, Probe sequence
cgtgataaagatagcgaagaagaaa

SEQ ID NO: 35994 - DNA, 25 bp, Probe sequence
tttacaaacaaactgctgcttatgg

SEQ ID NO: 35995 - DNA, 25 bp, Probe sequence
ttcttattaggtgctggtggttcta

SEQ ID NO: 35996 - DNA, 25 bp, Probe sequence
aattagtggagcggtattcattgtc

SEQ ID NO: 35997 - DNA, 25 bp, Probe sequence
aggcacactcattcaagataagtta

SEQ ID NO: 35998 - DNA, 25 bp, Probe sequence
cattcttattaggtgctggtggttc

SEQ ID NO: 35999 - DNA, 25 bp, Probe sequence
aaggcacactcattcaagataagtt

SEQ ID NO: 36000 - DNA, 25 bp, Probe sequence
attcttattaggtgctggtggttct

SEQ ID NO: 36001 - DNA, 25 bp, Probe sequence
ggcacactcattcaagataagttat

SEQ ID NO: 36002 - DNA, 25 bp, Probe sequence
tcttattaggtgctggtggttctac

SEQ ID NO: 36003 - DNA, 25 bp, Probe sequence
attagtggagcggtattcattgtct

SEQ ID NO: 36004 - DNA, 25 bp, Probe sequence
acgatgaatatgtagcagatggtta

SEQ ID NO: 36005 - DNA, 25 bp, Probe sequence
caatgaacgatgaatatgtagcaga

SEQ ID NO: 36006 - DNA, 25 bp, Probe sequence
gaacgatgaatatgtagcagatggt

SEQ ID NO: 36007 - DNA, 25 bp, Probe sequence
tgaacgatgaatatgtagcagatgg

SEQ ID NO: 36008 - DNA, 25 bp, Probe sequence
atgaacgatgaatatgtagcagatg

SEQ ID NO: 36009 - DNA, 25 bp, Probe sequence
aacgatgaatatgtagcagatggtt

SEQ ID NO: 36010 - DNA, 25 bp, Probe sequence
cgatgaatatgtagcagatggttat

SEQ ID NO: 36011 - DNA, 25 bp, Probe sequence
aatgaacgatgaatatgtagcagat

SEQ ID NO: 36012 - DNA, 25 bp, Probe sequence
acaatgaacgatgaatatgtagcag

SEQ ID NO: 36013 - DNA, 25 bp, Probe sequence
caagttggtattcatcatgcgtatt

SEQ ID NO: 36014 - DNA, 25 bp, Probe sequence
aagttggtattcatcatgcgtatta

SEQ ID NO: 36015 - DNA, 25 bp, Probe sequence
agttggtattcatcatgcgtattat

SEQ ID NO: 36016 - DNA, 25 bp, Probe sequence
gttggtattcatcatgcgtattatt

SEQ ID NO: 36017 - DNA, 25 bp, Probe sequence
gcgatggttgaaacattgacttata

SEQ ID NO: 36018 - DNA, 25 bp, Probe sequence
gatagtcaaactttagtgattgggc

SEQ ID NO: 36019 - DNA, 25 bp, Probe sequence
agcgatggttgaaacattgacttat

SEQ ID NO: 36020 - DNA, 25 bp, Probe sequence
attcatcatgcgtattatttagcgg

SEQ ID NO: 36021 - DNA, 25 bp, Probe sequence
ttcatcatgcgtattatttagcgga

SEQ ID NO: 36022 - DNA, 25 bp, Probe sequence
ggagtagctgtgtataaggataatg

SEQ ID NO: 36023 - DNA, 25 bp, Probe sequence
aggagtagctgtgtataaggataat

SEQ ID NO: 36024 - DNA, 25 bp, Probe sequence
taggagtagctgtgtataaggataa

SEQ ID NO: 36025 - DNA, 25 bp, Probe sequence
gagtagctgtgtataaggataatgt

SEQ ID NO: 36026 - DNA, 25 bp, Probe sequence
ataggagtagctgtgtataaggata

SEQ ID NO: 36027 - DNA, 25 bp, Probe sequence
tttgtgtaagaagtcaagtgtagac

SEQ ID NO: 36028 - DNA, 25 bp, Probe sequence
tctcattcggagcataaagaatcat

SEQ ID NO: 36029 - DNA, 25 bp, Probe sequence
ctcattcggagcataaagaatcatt

SEQ ID NO: 36030 - DNA, 25 bp, Probe sequence
tcattcggagcataaagaatcattt

SEQ ID NO: 36031 - DNA, 25 bp, Probe sequence
actggtctaatggataatatgaggt

SEQ ID NO: 36032 - DNA, 25 bp, Probe sequence
cactggtctaatggataatatgagg

SEQ ID NO: 36033 - DNA, 25 bp, Probe sequence
tcactggtctaatggataatatgag

SEQ ID NO: 36034 - DNA, 25 bp, Probe sequence
ctggtctaatggataatatgaggta

SEQ ID NO: 36035 - DNA, 25 bp, Probe sequence
ttcatatgtgttaagtcttgcagct

SEQ ID NO: 36036 - DNA, 25 bp, Probe sequence
tgtgttaagtcttgcagcttactat

SEQ ID NO: 36037 - DNA, 25 bp, Probe sequence
atgtgttaagtcttgcagcttacta

SEQ ID NO: 36038 - DNA, 25 bp, Probe sequence
tatgtgttaagtcttgcagcttact

SEQ ID NO: 36039 - DNA, 25 bp, Probe sequence
cttcatatgtgttaagtcttgcagc

SEQ ID NO: 36040 - DNA, 25 bp, Probe sequence
aacataacagcacaagaaatagatt

SEQ ID NO: 36041 - DNA, 25 bp, Probe sequence
aaacataacagcacaagaaatagat

SEQ ID NO: 36042 - DNA, 25 bp, Probe sequence
ccttatgagactggctatataaagt

SEQ ID NO: 36043 - DNA, 25 bp, Probe sequence
acataacagcacaagaaatagatta

SEQ ID NO: 36044 - DNA, 25 bp, Probe sequence
cgagcatgatggaaatcaaatagat

SEQ ID NO: 36045 - DNA, 25 bp, Probe sequence
tcgccttatgagactggctatataa

SEQ ID NO: 36046 - DNA, 25 bp, Probe sequence
ttcgccttatgagactggctatata

SEQ ID NO: 36047 - DNA, 25 bp, Probe sequence
gagactggctatataaagtttatcg

SEQ ID NO: 36048 - DNA, 25 bp, Probe sequence
ccgagcatgatggaaatcaaataga

SEQ ID NO: 36049 - DNA, 25 bp, Probe sequence
atgcttatacggaggagttacgata

SEQ ID NO: 36050 - DNA, 25 bp, Probe sequence
catcatgcttatacggaggagttac

SEQ ID NO: 36051 - DNA, 25 bp, Probe sequence
acatcatgcttatacggaggagtta

SEQ ID NO: 36052 - DNA, 25 bp, Probe sequence
catgcttatacggaggagttacgat

SEQ ID NO: 36053 - DNA, 25 bp, Probe sequence
atcatgcttatacggaggagttacg

SEQ ID NO: 36054 - DNA, 25 bp, Probe sequence
aacatcatgcttatacggaggagtt

SEQ ID NO: 36055 - DNA, 25 bp, Probe sequence
gtggcaattagacgagtcaaataaa

SEQ ID NO: 36056 - DNA, 25 bp, Probe sequence
tactgatataacgtggcaattagac

SEQ ID NO: 36057 - DNA, 25 bp, Probe sequence
aaatgtgtaggcttaactgaagaaa

SEQ ID NO: 36058 - DNA, 25 bp, Probe sequence
aatggtgatattgttgaaggtgatt

SEQ ID NO: 36059 - DNA, 25 bp, Probe sequence
atggtgatattgttgaaggtgattc

SEQ ID NO: 36060 - DNA, 25 bp, Probe sequence
tggtgatattgttgaaggtgattcg

SEQ ID NO: 36061 - DNA, 25 bp, Probe sequence
ttagagtatggttgcctgacacatt

SEQ ID NO: 36062 - DNA, 25 bp, Probe sequence
gatgtgttagagtatggttgcctga

SEQ ID NO: 36063 - DNA, 25 bp, Probe sequence
atgtgttagagtatggttgcctgac

SEQ ID NO: 36064 - DNA, 25 bp, Probe sequence
gatgtcgatgtgttagagtatggtt

SEQ ID NO: 36065 - DNA, 25 bp, Probe sequence
atgtcgatgtgttagagtatggttg

SEQ ID NO: 36066 - DNA, 25 bp, Probe sequence
cagatgtcgatgtgttagagtatgg

SEQ ID NO: 36067 - DNA, 25 bp, Probe sequence
ggataatgagatagcagatggcaat

SEQ ID NO: 36068 - DNA, 25 bp, Probe sequence
gataatgagatagcagatggcaatc

SEQ ID NO: 36069 - DNA, 25 bp, Probe sequence
agttgaatcattggtaagcaagaac

SEQ ID NO: 36070 - DNA, 25 bp, Probe sequence
gaagttgaatcattggtaagcaaga

SEQ ID NO: 36071 - DNA, 25 bp, Probe sequence
aggataatgagatagcagatggcaa

SEQ ID NO: 36072 - DNA, 25 bp, Probe sequence
aaggataatgagatagcagatggca

SEQ ID NO: 36073 - DNA, 25 bp, Probe sequence
aagttgaatcattggtaagcaagaa

SEQ ID NO: 36074 - DNA, 25 bp, Probe sequence
ataatgagatagcagatggcaatca

SEQ ID NO: 36075 - DNA, 25 bp, Probe sequence
tcattggtaagcaagaacgattatt

SEQ ID NO: 36076 - DNA, 25 bp, Probe sequence
gccaacagttatattaacagaagca

SEQ ID NO: 36077 - DNA, 25 bp, Probe sequence
tgccaacagttatattaacagaagc

SEQ ID NO: 36078 - DNA, 25 bp, Probe sequence
caacagttatattaacagaagcagc

SEQ ID NO: 36079 - DNA, 25 bp, Probe sequence
ccaacagttatattaacagaagcag

SEQ ID NO: 36080 - DNA, 25 bp, Probe sequence
atgtggctgtggtagttcatttaga

SEQ ID NO: 36081 - DNA, 25 bp, Probe sequence
atgccaacagttatattaacagaag

SEQ ID NO: 36082 - DNA, 25 bp, Probe sequence
aacagttatattaacagaagcagct

SEQ ID NO: 36083 - DNA, 25 bp, Probe sequence
tgtggctgtggtagttcatttagaa

SEQ ID NO: 36084 - DNA, 25 bp, Probe sequence
ggtttccaaatcgacaatcctaatg

SEQ ID NO: 36085 - DNA, 25 bp, Probe sequence
aaggtgattatccaggagatgttac

SEQ ID NO: 36086 - DNA, 25 bp, Probe sequence
gattatccaggagatgttacaccag

SEQ ID NO: 36087 - DNA, 25 bp, Probe sequence
aggtgattatccaggagatgttaca

SEQ ID NO: 36088 - DNA, 25 bp, Probe sequence
tgattatccaggagatgttacacca

SEQ ID NO: 36089 - DNA, 25 bp, Probe sequence
caactattgtcatggcattgtatca

SEQ ID NO: 36090 - DNA, 25 bp, Probe sequence
gcaactattgtcatggcattgtatc

SEQ ID NO: 36091 - DNA, 25 bp, Probe sequence
gtgattatccaggagatgttacacc

SEQ ID NO: 36092 - DNA, 25 bp, Probe sequence
ggtgattatccaggagatgttacac

SEQ ID NO: 36093 - DNA, 25 bp, Probe sequence
aactattgtcatggcattgtatcaa

SEQ ID NO: 36094 - DNA, 25 bp, Probe sequence
agcaggtagagatacaagaggatta

SEQ ID NO: 36095 - DNA, 25 bp, Probe sequence
gcaggtagagatacaagaggattaa

SEQ ID NO: 36096 - DNA, 25 bp, Probe sequence
cagtaacaattccagaagcattagt

SEQ ID NO: 36097 - DNA, 25 bp, Probe sequence
acagtaacaattccagaagcattag

SEQ ID NO: 36098 - DNA, 25 bp, Probe sequence
gaacagtaacaattccagaagcatt

SEQ ID NO: 36099 - DNA, 25 bp, Probe sequence
cagcaggtagagatacaagaggatt

SEQ ID NO: 36100 - DNA, 25 bp, Probe sequence
aacagtaacaattccagaagcatta

SEQ ID NO: 36101 - DNA, 25 bp, Probe sequence
acaattccagaagcattagtaccat

SEQ ID NO: 36102 - DNA, 25 bp, Probe sequence
aacaattccagaagcattagtacca

SEQ ID NO: 36103 - DNA, 25 bp, Probe sequence
ttacagtcattaacgaagtgattga

SEQ ID NO: 36104 - DNA, 25 bp, Probe sequence
tgttacagtcattaacgaagtgatt

SEQ ID NO: 36105 - DNA, 25 bp, Probe sequence
gttacagtcattaacgaagtgattg

SEQ ID NO: 36106 - DNA, 25 bp, Probe sequence
tctgttacagtcattaacgaagtga

SEQ ID NO: 36107 - DNA, 25 bp, Probe sequence
ctgttacagtcattaacgaagtgat

SEQ ID NO: 36108 - DNA, 25 bp, Probe sequence
atctgttacagtcattaacgaagtg

SEQ ID NO: 36109 - DNA, 25 bp, Probe sequence
caaagtggcacaaatatctgttaca

SEQ ID NO: 36110 - DNA, 25 bp, Probe sequence
attggatcaaagtggcacaaatatc

SEQ ID NO: 36111 - DNA, 25 bp, Probe sequence
aataattggatcaaagtggcacaaa

SEQ ID NO: 36112 - DNA, 25 bp, Probe sequence
aagacagacgaggaactaagatatg

SEQ ID NO: 36113 - DNA, 25 bp, Probe sequence
gtaagacagacgaggaactaagata

SEQ ID NO: 36114 - DNA, 25 bp, Probe sequence
gaagatgaagataagacacaacaca

SEQ ID NO: 36115 - DNA, 25 bp, Probe sequence
agaagatgaagataagacacaacac

SEQ ID NO: 36116 - DNA, 25 bp, Probe sequence
ggtaagacagacgaggaactaagat

SEQ ID NO: 36117 - DNA, 25 bp, Probe sequence
atgcgtatagttcaacctgttattg

SEQ ID NO: 36118 - DNA, 25 bp, Probe sequence
agacagacgaggaactaagatatgc

SEQ ID NO: 36119 - DNA, 25 bp, Probe sequence
taagacagacgaggaactaagatat

SEQ ID NO: 36120 - DNA, 25 bp, Probe sequence
agatgaagataagacacaacacatt

SEQ ID NO: 36121 - DNA, 25 bp, Probe sequence
attagagaatacgactgaaccacaa

SEQ ID NO: 36122 - DNA, 25 bp, Probe sequence
ttagagaatacgactgaaccacaac

SEQ ID NO: 36123 - DNA, 25 bp, Probe sequence
ctgtaggtggattcgtattagagaa

SEQ ID NO: 36124 - DNA, 25 bp, Probe sequence
tagagaatacgactgaaccacaact

SEQ ID NO: 36125 - DNA, 25 bp, Probe sequence
cctgtaggtggattcgtattagaga

SEQ ID NO: 36126 - DNA, 25 bp, Probe sequence
tattagagaatacgactgaaccaca

SEQ ID NO: 36127 - DNA, 25 bp, Probe sequence
agagaatacgactgaaccacaactt

SEQ ID NO: 36128 - DNA, 25 bp, Probe sequence
cgtcactattctatcgtatcaggtg

SEQ ID NO: 36129 - DNA, 25 bp, Probe sequence
tcttacaatctatgatcgaagcact

SEQ ID NO: 36130 - DNA, 25 bp, Probe sequence
ttatctatcttagttggtggtgctg

SEQ ID NO: 36131 - DNA, 25 bp, Probe sequence
tatctatcttagttggtggtgctgg

SEQ ID NO: 36132 - DNA, 25 bp, Probe sequence
gtacttgtacttggtgctggttatg

SEQ ID NO: 36133 - DNA, 25 bp, Probe sequence
tcactatgaagcaacatggttacat

SEQ ID NO: 36134 - DNA, 25 bp, Probe sequence
atcactatgaagcaacatggttaca

SEQ ID NO: 36135 - DNA, 25 bp, Probe sequence
tatcttagttggtggtgctggattc

SEQ ID NO: 36136 - DNA, 25 bp, Probe sequence
ctatcttagttggtggtgctggatt

SEQ ID NO: 36137 - DNA, 25 bp, Probe sequence
gaatatcactatgaagcaacatggt

SEQ ID NO: 36138 - DNA, 25 bp, Probe sequence
tgaatatcactatgaagcaacatgg

SEQ ID NO: 36139 - DNA, 25 bp, Probe sequence
agagacggcattacaatataacctg

SEQ ID NO: 36140 - DNA, 25 bp, Probe sequence
atggacatcatattgcgataacaga

SEQ ID NO: 36141 - DNA, 25 bp, Probe sequence
tagagacggcattacaatataacct

SEQ ID NO: 36142 - DNA, 25 bp, Probe sequence
aatggacatcatattgcgataacag

SEQ ID NO: 36143 - DNA, 25 bp, Probe sequence
tggacatcatattgcgataacagac

SEQ ID NO: 36144 - DNA, 25 bp, Probe sequence
ttatactgtgaagcgagtctattgg

SEQ ID NO: 36145 - DNA, 25 bp, Probe sequence
atagagacggcattacaatataacc

SEQ ID NO: 36146 - DNA, 25 bp, Probe sequence
acagacggtcaagaatcttatactt

SEQ ID NO: 36147 - DNA, 25 bp, Probe sequence
aacagacggtcaagaatcttatact

SEQ ID NO: 36148 - DNA, 25 bp, Probe sequence
tagaggtatcggtgaacgtgaatta

SEQ ID NO: 36149 - DNA, 25 bp, Probe sequence
tatgtaccatacacaatcgcagtaa

SEQ ID NO: 36150 - DNA, 25 bp, Probe sequence
ctatgtaccatacacaatcgcagta

SEQ ID NO: 36151 - DNA, 25 bp, Probe sequence
atagaggtatcggtgaacgtgaatt

SEQ ID NO: 36152 - DNA, 25 bp, Probe sequence
agaggtatcggtgaacgtgaattaa

SEQ ID NO: 36153 - DNA, 25 bp, Probe sequence
gtaccatacacaatcgcagtaaatg

SEQ ID NO: 36154 - DNA, 25 bp, Probe sequence
catacacaatcgcagtaaatgggac

SEQ ID NO: 36155 - DNA, 25 bp, Probe sequence
atacacaatcgcagtaaatgggaca

SEQ ID NO: 36156 - DNA, 25 bp, Probe sequence
gatagaggtatcggtgaacgtgaat

SEQ ID NO: 36157 - DNA, 25 bp, Probe sequence
aaccgagattagtaaccatcacata

SEQ ID NO: 36158 - DNA, 25 bp, Probe sequence
accgagattagtaaccatcacatat

SEQ ID NO: 36159 - DNA, 25 bp, Probe sequence
attccgacgatagtacaatggttaa

SEQ ID NO: 36160 - DNA, 25 bp, Probe sequence
tatgattccgacgatagtacaatgg

SEQ ID NO: 36161 - DNA, 25 bp, Probe sequence
gattccgacgatagtacaatggtta

SEQ ID NO: 36162 - DNA, 25 bp, Probe sequence
aatatgccaccgaatgtattaacac

SEQ ID NO: 36163 - DNA, 25 bp, Probe sequence
aatacagacgctgaaggtagattag

SEQ ID NO: 36164 - DNA, 25 bp, Probe sequence
gaatacagacgctgaaggtagatta

SEQ ID NO: 36165 - DNA, 25 bp, Probe sequence
agaagtaatgaatacagacgctgaa

SEQ ID NO: 36166 - DNA, 25 bp, Probe sequence
ccaacgatttgaaatacaacaacat

SEQ ID NO: 36167 - DNA, 25 bp, Probe sequence
gccaacgatttgaaatacaacaaca

SEQ ID NO: 36168 - DNA, 25 bp, Probe sequence
cagactatgcacatataagaggtat

SEQ ID NO: 36169 - DNA, 25 bp, Probe sequence
gcagactatgcacatataagaggta

SEQ ID NO: 36170 - DNA, 25 bp, Probe sequence
tcagcagactatgcacatataagag

SEQ ID NO: 36171 - DNA, 25 bp, Probe sequence
ttcagcagactatgcacatataaga

SEQ ID NO: 36172 - DNA, 25 bp, Probe sequence
cagcagactatgcacatataagagg

SEQ ID NO: 36173 - DNA, 25 bp, Probe sequence
agcagactatgcacatataagaggt

SEQ ID NO: 36174 - DNA, 25 bp, Probe sequence
caacgatttgaaatacaacaacata

SEQ ID NO: 36175 - DNA, 25 bp, Probe sequence
ggtgtaatgaatgctactggtgata

SEQ ID NO: 36176 - DNA, 25 bp, Probe sequence
caagtgattcaacattaggaccaac

SEQ ID NO: 36177 - DNA, 25 bp, Probe sequence
ggtatattgttggcttacttatcgg

SEQ ID NO: 36178 - DNA, 25 bp, Probe sequence
gcaacaattcctattatcgcatcat

SEQ ID NO: 36179 - DNA, 25 bp, Probe sequence
tgaatgctactggtgatatagatga

SEQ ID NO: 36180 - DNA, 25 bp, Probe sequence
gtatattgttggcttacttatcggt

SEQ ID NO: 36181 - DNA, 25 bp, Probe sequence
gtgtaatgaatgctactggtgatat

SEQ ID NO: 36182 - DNA, 25 bp, Probe sequence
aagtgattcaacattaggaccaact

SEQ ID NO: 36183 - DNA, 25 bp, Probe sequence
cagatagtgacaatgttacagagtt

SEQ ID NO: 36184 - DNA, 25 bp, Probe sequence
gctgctggattaaggctgtataatt

SEQ ID NO: 36185 - DNA, 25 bp, Probe sequence
acagacttaatgagagatagtaacg

SEQ ID NO: 36186 - DNA, 25 bp, Probe sequence
cagacttaatgagagatagtaacga

SEQ ID NO: 36187 - DNA, 25 bp, Probe sequence
tcgggttatttaagtggaagaacaa

SEQ ID NO: 36188 - DNA, 25 bp, Probe sequence
ttcgggttatttaagtggaagaaca

SEQ ID NO: 36189 - DNA, 25 bp, Probe sequence
cgggttatttaagtggaagaacaat

SEQ ID NO: 36190 - DNA, 25 bp, Probe sequence
agaacgaaacaaactattgaacctt

SEQ ID NO: 36191 - DNA, 25 bp, Probe sequence
aagaacgaaacaaactattgaacct

SEQ ID NO: 36192 - DNA, 25 bp, Probe sequence
ctgctggattaaggctgtataattt

SEQ ID NO: 36193 - DNA, 25 bp, Probe sequence
atgtcaatagatcaccaggaagatg

SEQ ID NO: 36194 - DNA, 25 bp, Probe sequence
gatgtcaatagatcaccaggaagat

SEQ ID NO: 36195 - DNA, 25 bp, Probe sequence
ttatgcgtggtacagttgctattaa

SEQ ID NO: 36196 - DNA, 25 bp, Probe sequence
gagatgtcaatagatcaccaggaag

SEQ ID NO: 36197 - DNA, 25 bp, Probe sequence
aattacagttatgcgtggtacagtt

SEQ ID NO: 36198 - DNA, 25 bp, Probe sequence
agatgtcaatagatcaccaggaaga

SEQ ID NO: 36199 - DNA, 25 bp, Probe sequence
gttatgcgtggtacagttgctatta

SEQ ID NO: 36200 - DNA, 25 bp, Probe sequence
taattacagttatgcgtggtacagt

SEQ ID NO: 36201 - DNA, 25 bp, Probe sequence
attacagttatgcgtggtacagttg

SEQ ID NO: 36202 - DNA, 25 bp, Probe sequence
caatggctaactcaggacctaatac

SEQ ID NO: 36203 - DNA, 25 bp, Probe sequence
tcaatggctaactcaggacctaata

SEQ ID NO: 36204 - DNA, 25 bp, Probe sequence
tatcaatggctaactcaggacctaa

SEQ ID NO: 36205 - DNA, 25 bp, Probe sequence
ttatcaatggctaactcaggaccta

SEQ ID NO: 36206 - DNA, 25 bp, Probe sequence
atcaatggctaactcaggacctaat

SEQ ID NO: 36207 - DNA, 25 bp, Probe sequence
attatcaatggctaactcaggacct

SEQ ID NO: 36208 - DNA, 25 bp, Probe sequence
aaacatacagtattcggtcaaatca

SEQ ID NO: 36209 - DNA, 25 bp, Probe sequence
cattatcaatggctaactcaggacc

SEQ ID NO: 36210 - DNA, 25 bp, Probe sequence
aacaaagaagtacaacaaggtgaaa

SEQ ID NO: 36211 - DNA, 25 bp, Probe sequence
tttgctgtgttacttatgcttttag

SEQ ID NO: 36212 - DNA, 25 bp, Probe sequence
tgctgtgttacttatgcttttagtt

SEQ ID NO: 36213 - DNA, 25 bp, Probe sequence
ttgctgtgttacttatgcttttagt

SEQ ID NO: 36214 - DNA, 25 bp, Probe sequence
ttttgctgtgttacttatgctttta

SEQ ID NO: 36215 - DNA, 25 bp, Probe sequence
gctgtgttacttatgcttttagttt

SEQ ID NO: 36216 - DNA, 25 bp, Probe sequence
ttcacttaaagttggaattttagca

SEQ ID NO: 36217 - DNA, 25 bp, Probe sequence
tcacttaaagttggaattttagcat

SEQ ID NO: 36218 - DNA, 25 bp, Probe sequence
cacttaaagttggaattttagcatt

SEQ ID NO: 36219 - DNA, 25 bp, Probe sequence
attcacttaaagttggaattttagc

SEQ ID NO: 36220 - DNA, 25 bp, Probe sequence
atatcaaggtgcgtgtaactggtat

SEQ ID NO: 36221 - DNA, 25 bp, Probe sequence
tatcaaggtgcgtgtaactggtatt

SEQ ID NO: 36222 - DNA, 25 bp, Probe sequence
catatcaaggtgcgtgtaactggta

SEQ ID NO: 36223 - DNA, 25 bp, Probe sequence
aacacttaaagaacgcttaccaatc

SEQ ID NO: 36224 - DNA, 25 bp, Probe sequence
aaacacttaaagaacgcttaccaat

SEQ ID NO: 36225 - DNA, 25 bp, Probe sequence
ttcaaacacttaaagaacgcttacc

SEQ ID NO: 36226 - DNA, 25 bp, Probe sequence
caaacacttaaagaacgcttaccaa

SEQ ID NO: 36227 - DNA, 25 bp, Probe sequence
caacatatcaaggtgcgtgtaactg

SEQ ID NO: 36228 - DNA, 25 bp, Probe sequence
cacttaaagaacgcttaccaatctg

SEQ ID NO: 36229 - DNA, 25 bp, Probe sequence
cttggatctatagctgcatcgaata

SEQ ID NO: 36230 - DNA, 25 bp, Probe sequence
tggatctatagctgcatcgaatatt

SEQ ID NO: 36231 - DNA, 25 bp, Probe sequence
ttggatctatagctgcatcgaatat

SEQ ID NO: 36232 - DNA, 25 bp, Probe sequence
ggatctatagctgcatcgaatattg

SEQ ID NO: 36233 - DNA, 25 bp, Probe sequence
gatctatagctgcatcgaatattga

SEQ ID NO: 36234 - DNA, 25 bp, Probe sequence
tagctgcatcgaatattgatactag

SEQ ID NO: 36235 - DNA, 25 bp, Probe sequence
atctatagctgcatcgaatattgat

SEQ ID NO: 36236 - DNA, 25 bp, Probe sequence
tgttggtggtttccttggatctata

SEQ ID NO: 36237 - DNA, 25 bp, Probe sequence
ccttggatctatagctgcatcgaat

SEQ ID NO: 36238 - DNA, 25 bp, Probe sequence
aggacatctattaatcacaagttgc

SEQ ID NO: 36239 - DNA, 25 bp, Probe sequence
aagaatggcagagtatagatatagc

SEQ ID NO: 36240 - DNA, 25 bp, Probe sequence
ggacatctattaatcacaagttgca

SEQ ID NO: 36241 - DNA, 25 bp, Probe sequence
acgaaagaatggcagagtatagata

SEQ ID NO: 36242 - DNA, 25 bp, Probe sequence
tacgaaagaatggcagagtatagat

SEQ ID NO: 36243 - DNA, 25 bp, Probe sequence
tcaaggacatctattaatcacaagt

SEQ ID NO: 36244 - DNA, 25 bp, Probe sequence
gtacgaaagaatggcagagtataga

SEQ ID NO: 36245 - DNA, 25 bp, Probe sequence
tgtacgaaagaatggcagagtatag

SEQ ID NO: 36246 - DNA, 25 bp, Probe sequence
agatatagccaaagttctttagcga

SEQ ID NO: 36247 - DNA, 25 bp, Probe sequence
atgacgaatgaagagattgaacaag

SEQ ID NO: 36248 - DNA, 25 bp, Probe sequence
aatgacgaatgaagagattgaacaa

SEQ ID NO: 36249 - DNA, 25 bp, Probe sequence
tccagagagagaagataatcatcac

SEQ ID NO: 36250 - DNA, 25 bp, Probe sequence
ccagagagagaagataatcatcact

SEQ ID NO: 36251 - DNA, 25 bp, Probe sequence
ttgacttagtagccattggtagaga

SEQ ID NO: 36252 - DNA, 25 bp, Probe sequence
gttgacttagtagccattggtagag

SEQ ID NO: 36253 - DNA, 25 bp, Probe sequence
tgacttagtagccattggtagagag

SEQ ID NO: 36254 - DNA, 25 bp, Probe sequence
gtgttgacttagtagccattggtag

SEQ ID NO: 36255 - DNA, 25 bp, Probe sequence
tgttgacttagtagccattggtaga

SEQ ID NO: 36256 - DNA, 25 bp, Probe sequence
gcattagatgttatcgttgatgagg

SEQ ID NO: 36257 - DNA, 25 bp, Probe sequence
cattagatgttatcgttgatgagga

SEQ ID NO: 36258 - DNA, 25 bp, Probe sequence
ttagatgttatcgttgatgaggatt

SEQ ID NO: 36259 - DNA, 25 bp, Probe sequence
attagatgttatcgttgatgaggat

SEQ ID NO: 36260 - DNA, 25 bp, Probe sequence
ttaaccaaggtcatagacatccgaa

SEQ ID NO: 36261 - DNA, 25 bp, Probe sequence
ttaccaatgaatacaggtgctgaag

SEQ ID NO: 36262 - DNA, 25 bp, Probe sequence
tgttatctgcatattccgctgttaa

SEQ ID NO: 36263 - DNA, 25 bp, Probe sequence
tgttatcgttgatgaggatttacca

SEQ ID NO: 36264 - DNA, 25 bp, Probe sequence
ttatcgttgatgaggatttaccagg

SEQ ID NO: 36265 - DNA, 25 bp, Probe sequence
cacgatatactgcgaataatgatgt

SEQ ID NO: 36266 - DNA, 25 bp, Probe sequence
aactcaatgacaacggaatatggaa

SEQ ID NO: 36267 - DNA, 25 bp, Probe sequence
gcttcacgatatactgcgaataatg

SEQ ID NO: 36268 - DNA, 25 bp, Probe sequence
acgatatactgcgaataatgatgtc

SEQ ID NO: 36269 - DNA, 25 bp, Probe sequence
tcaatgacaacggaatatggaagag

SEQ ID NO: 36270 - DNA, 25 bp, Probe sequence
ctcaatgacaacggaatatggaaga

SEQ ID NO: 36271 - DNA, 25 bp, Probe sequence
actcaatgacaacggaatatggaag

SEQ ID NO: 36272 - DNA, 25 bp, Probe sequence
gagatagacaagaatggtggtacaa

SEQ ID NO: 36273 - DNA, 25 bp, Probe sequence
gatagacaagaatggtggtacaatg

SEQ ID NO: 36274 - DNA, 25 bp, Probe sequence
ttatggcttggatgatggatgaata

SEQ ID NO: 36275 - DNA, 25 bp, Probe sequence
attatggcttggatgatggatgaat

SEQ ID NO: 36276 - DNA, 25 bp, Probe sequence
ggcttggatgatggatgaatatagt

SEQ ID NO: 36277 - DNA, 25 bp, Probe sequence
tggcttggatgatggatgaatatag

SEQ ID NO: 36278 - DNA, 25 bp, Probe sequence
aagatattccagcaccagatgtatt

SEQ ID NO: 36279 - DNA, 25 bp, Probe sequence
atggcttggatgatggatgaatata

SEQ ID NO: 36280 - DNA, 25 bp, Probe sequence
tatggcttggatgatggatgaatat

SEQ ID NO: 36281 - DNA, 25 bp, Probe sequence
attgtaggtatctctgatgcttacg

SEQ ID NO: 36282 - DNA, 25 bp, Probe sequence
cttggatgatggatgaatatagtgc

SEQ ID NO: 36283 - DNA, 25 bp, Probe sequence
atcggtattggtggttcttacttag

SEQ ID NO: 36284 - DNA, 25 bp, Probe sequence
catcggtattggtggttcttactta

SEQ ID NO: 36285 - DNA, 25 bp, Probe sequence
ggtattggtggttcttacttaggtg

SEQ ID NO: 36286 - DNA, 25 bp, Probe sequence
tagtcatcggtattggtggttctta

SEQ ID NO: 36287 - DNA, 25 bp, Probe sequence
ttagtagtcatcggtattggtggtt

SEQ ID NO: 36288 - DNA, 25 bp, Probe sequence
tgatgtaggtggaagatattctgtt

SEQ ID NO: 36289 - DNA, 25 bp, Probe sequence
gtattggtggttcttacttaggtgc

SEQ ID NO: 36290 - DNA, 25 bp, Probe sequence
atgatgtaggtggaagatattctgt

SEQ ID NO: 36291 - DNA, 25 bp, Probe sequence
tagtagtcatcggtattggtggttc

SEQ ID NO: 36292 - DNA, 25 bp, Probe sequence
atggactactgagacaagacaagaa

SEQ ID NO: 36293 - DNA, 25 bp, Probe sequence
atagtggttgttgttctgtagagag

SEQ ID NO: 36294 - DNA, 25 bp, Probe sequence
tagtggttgttgttctgtagagaga

SEQ ID NO: 36295 - DNA, 25 bp, Probe sequence
caagttatagtggttgttgttctgt

SEQ ID NO: 36296 - DNA, 25 bp, Probe sequence
gcaagttatagtggttgttgttctg

SEQ ID NO: 36297 - DNA, 25 bp, Probe sequence
agttatagtggttgttgttctgtag

SEQ ID NO: 36298 - DNA, 25 bp, Probe sequence
tatagtggttgttgttctgtagaga

SEQ ID NO: 36299 - DNA, 25 bp, Probe sequence
gttatagtggttgttgttctgtaga

SEQ ID NO: 36300 - DNA, 25 bp, Probe sequence
tggactactgagacaagacaagaag

SEQ ID NO: 36301 - DNA, 25 bp, Probe sequence
aggtatattgattagttggcttgga

SEQ ID NO: 36302 - DNA, 25 bp, Probe sequence
ggtatattgattagttggcttggat

SEQ ID NO: 36303 - DNA, 25 bp, Probe sequence
taggtatattgattagttggcttgg

SEQ ID NO: 36304 - DNA, 25 bp, Probe sequence
gtatattgattagttggcttggatt

SEQ ID NO: 36305 - DNA, 25 bp, Probe sequence
gtcgtttcatcaagtagaagaatgg

SEQ ID NO: 36306 - DNA, 25 bp, Probe sequence
tcgtttcatcaagtagaagaatggt

SEQ ID NO: 36307 - DNA, 25 bp, Probe sequence
cgtttcatcaagtagaagaatggtt

SEQ ID NO: 36308 - DNA, 25 bp, Probe sequence
tgtcgtttcatcaagtagaagaatg

SEQ ID NO: 36309 - DNA, 25 bp, Probe sequence
ggcatcatcaaagttagtttcaaca

SEQ ID NO: 36310 - DNA, 25 bp, Probe sequence
atggtgttggtattgggaattatgt

SEQ ID NO: 36311 - DNA, 25 bp, Probe sequence
ggtgttggtattgggaattatgtca

SEQ ID NO: 36312 - DNA, 25 bp, Probe sequence
tggtgttggtattgggaattatgtc

SEQ ID NO: 36313 - DNA, 25 bp, Probe sequence
aaattatggtgttggtattgggaat

SEQ ID NO: 36314 - DNA, 25 bp, Probe sequence
tatggtgttggtattgggaattatg

SEQ ID NO: 36315 - DNA, 25 bp, Probe sequence
gttggtattgggaattatgtcaagc

SEQ ID NO: 36316 - DNA, 25 bp, Probe sequence
gtgttggtattgggaattatgtcaa

SEQ ID NO: 36317 - DNA, 25 bp, Probe sequence
tttgttattcaagacgaactgatgc

SEQ ID NO: 36318 - DNA, 25 bp, Probe sequence
gcatttgttattcaagacgaactga

SEQ ID NO: 36319 - DNA, 25 bp, Probe sequence
tagttggtcatgtcattccgaataa

SEQ ID NO: 36320 - DNA, 25 bp, Probe sequence
atagttggtcatgtcattccgaata

SEQ ID NO: 36321 - DNA, 25 bp, Probe sequence
taatagttggtcatgtcattccgaa

SEQ ID NO: 36322 - DNA, 25 bp, Probe sequence
agttggtcatgtcattccgaataat

SEQ ID NO: 36323 - DNA, 25 bp, Probe sequence
aatagttggtcatgtcattccgaat

SEQ ID NO: 36324 - DNA, 25 bp, Probe sequence
gtaatagttggtcatgtcattccga

SEQ ID NO: 36325 - DNA, 25 bp, Probe sequence
tgtaatagttggtcatgtcattccg

SEQ ID NO: 36326 - DNA, 25 bp, Probe sequence
ttgtaatagttggtcatgtcattcc

SEQ ID NO: 36327 - DNA, 25 bp, Probe sequence
ttgctattatcattgtactgttcgt

SEQ ID NO: 36328 - DNA, 25 bp, Probe sequence
gattactaataggagaagatggtgc

SEQ ID NO: 36329 - DNA, 25 bp, Probe sequence
acgattactaataggagaagatggt

SEQ ID NO: 36330 - DNA, 25 bp, Probe sequence
cgattactaataggagaagatggtg

SEQ ID NO: 36331 - DNA, 25 bp, Probe sequence
aagatgagaatggtgaagaatatcc

SEQ ID NO: 36332 - DNA, 25 bp, Probe sequence
aacgattactaataggagaagatgg

SEQ ID NO: 36333 - DNA, 25 bp, Probe sequence
agaatggtgaagaatatccagagtg

SEQ ID NO: 36334 - DNA, 25 bp, Probe sequence
gagaatggtgaagaatatccagagt

SEQ ID NO: 36335 - DNA, 25 bp, Probe sequence
tgagaatggtgaagaatatccagag

SEQ ID NO: 36336 - DNA, 25 bp, Probe sequence
atgagaatggtgaagaatatccaga

SEQ ID NO: 36337 - DNA, 25 bp, Probe sequence
atataacataccgttcaagaagcga

SEQ ID NO: 36338 - DNA, 25 bp, Probe sequence
catataacataccgttcaagaagcg

SEQ ID NO: 36339 - DNA, 25 bp, Probe sequence
tataacataccgttcaagaagcgac

SEQ ID NO: 36340 - DNA, 25 bp, Probe sequence
tcatataacataccgttcaagaagc

SEQ ID NO: 36341 - DNA, 25 bp, Probe sequence
aatatgcaactggtacatcacaatt

SEQ ID NO: 36342 - DNA, 25 bp, Probe sequence
aataggacaattcttcagcaaactt

SEQ ID NO: 36343 - DNA, 25 bp, Probe sequence
aaataggacaattcttcagcaaact

SEQ ID NO: 36344 - DNA, 25 bp, Probe sequence
cgtcaagacaaggtttaatacttca

SEQ ID NO: 36345 - DNA, 25 bp, Probe sequence
gcaaacttgaccaacaaattgaatt

SEQ ID NO: 36346 - DNA, 25 bp, Probe sequence
aaggtaatgtagttgtcttccatgc

SEQ ID NO: 36347 - DNA, 25 bp, Probe sequence
aggtgattacattactgggactttc

SEQ ID NO: 36348 - DNA, 25 bp, Probe sequence
aaacaaggtgattacattactggga

SEQ ID NO: 36349 - DNA, 25 bp, Probe sequence
tccaagttaaagatttaccgaatgc

SEQ ID NO: 36350 - DNA, 25 bp, Probe sequence
caagttaaagatttaccgaatgcga

SEQ ID NO: 36351 - DNA, 25 bp, Probe sequence
aagttaaagatttaccgaatgcgaa

SEQ ID NO: 36352 - DNA, 25 bp, Probe sequence
aacaaggtgattacattactgggac

SEQ ID NO: 36353 - DNA, 25 bp, Probe sequence
atcgtgaagtaagtaaagatagccg

SEQ ID NO: 36354 - DNA, 25 bp, Probe sequence
aaggtgattacattactgggacttt

SEQ ID NO: 36355 - DNA, 25 bp, Probe sequence
ggttacttcattgagccacaagatt

SEQ ID NO: 36356 - DNA, 25 bp, Probe sequence
gattgcgaatgatttaagagggaac

SEQ ID NO: 36357 - DNA, 25 bp, Probe sequence
gaagacatcacgtatcaagaagcat

SEQ ID NO: 36358 - DNA, 25 bp, Probe sequence
attgcgaatgatttaagagggaaca

SEQ ID NO: 36359 - DNA, 25 bp, Probe sequence
cagactttgcctttattcaacacat

SEQ ID NO: 36360 - DNA, 25 bp, Probe sequence
gttacttcattgagccacaagattt

SEQ ID NO: 36361 - DNA, 25 bp, Probe sequence
ttgcgaatgatttaagagggaacat

SEQ ID NO: 36362 - DNA, 25 bp, Probe sequence
tcattgagccacaagatttattcag

SEQ ID NO: 36363 - DNA, 25 bp, Probe sequence
aagacatcacgtatcaagaagcatg

SEQ ID NO: 36364 - DNA, 25 bp, Probe sequence
taacgacaactcaaggtattccaat

SEQ ID NO: 36365 - DNA, 25 bp, Probe sequence
ggctgatagttggttagatgcttat

SEQ ID NO: 36366 - DNA, 25 bp, Probe sequence
cattaacgacaactcaaggtattcc

SEQ ID NO: 36367 - DNA, 25 bp, Probe sequence
attaacgacaactcaaggtattcca

SEQ ID NO: 36368 - DNA, 25 bp, Probe sequence
ttaacgacaactcaaggtattccaa

SEQ ID NO: 36369 - DNA, 25 bp, Probe sequence
attgtggctgatagttggttagatg

SEQ ID NO: 36370 - DNA, 25 bp, Probe sequence
acattaacgacaactcaaggtattc

SEQ ID NO: 36371 - DNA, 25 bp, Probe sequence
acgacaactcaaggtattccaatta

SEQ ID NO: 36372 - DNA, 25 bp, Probe sequence
aattgtggctgatagttggttagat

SEQ ID NO: 36373 - DNA, 25 bp, Probe sequence
tcaaggctctaaggctactactaat

SEQ ID NO: 36374 - DNA, 25 bp, Probe sequence
caaggctctaaggctactactaatg

SEQ ID NO: 36375 - DNA, 25 bp, Probe sequence
ttcaaggctctaaggctactactaa

SEQ ID NO: 36376 - DNA, 25 bp, Probe sequence
ggtctgcttacgatgaattattgtt

SEQ ID NO: 36377 - DNA, 25 bp, Probe sequence
atggtctgcttacgatgaattattg

SEQ ID NO: 36378 - DNA, 25 bp, Probe sequence
tggtctgcttacgatgaattattgt

SEQ ID NO: 36379 - DNA, 25 bp, Probe sequence
gatggtctgcttacgatgaattatt

SEQ ID NO: 36380 - DNA, 25 bp, Probe sequence
agaggacctaatgctagagactatt

SEQ ID NO: 36381 - DNA, 25 bp, Probe sequence
aagaggacctaatgctagagactat

SEQ ID NO: 36382 - DNA, 25 bp, Probe sequence
gatacggagtctattggttatggag

SEQ ID NO: 36383 - DNA, 25 bp, Probe sequence
atggataaggatgaagatacggagt

SEQ ID NO: 36384 - DNA, 25 bp, Probe sequence
tatggataaggatgaagatacggag

SEQ ID NO: 36385 - DNA, 25 bp, Probe sequence
tctaataataatgagcaagcgtgtt

SEQ ID NO: 36386 - DNA, 25 bp, Probe sequence
ttctaataataatgagcaagcgtgt

SEQ ID NO: 36387 - DNA, 25 bp, Probe sequence
tcagattattcatacacgatggagt

SEQ ID NO: 36388 - DNA, 25 bp, Probe sequence
gatgaagatacggagtctattggtt

SEQ ID NO: 36389 - DNA, 25 bp, Probe sequence
agatacggagtctattggttatgga

SEQ ID NO: 36390 - DNA, 25 bp, Probe sequence
aagatacggagtctattggttatgg

SEQ ID NO: 36391 - DNA, 25 bp, Probe sequence
cgcatatctgaagttgagttacatc

SEQ ID NO: 36392 - DNA, 25 bp, Probe sequence
acgcatatctgaagttgagttacat

SEQ ID NO: 36393 - DNA, 25 bp, Probe sequence
tgaggtcatagaacaacattacgat

SEQ ID NO: 36394 - DNA, 25 bp, Probe sequence
cgcaacttattcaactactaacaga

SEQ ID NO: 36395 - DNA, 25 bp, Probe sequence
gaacgcatatctgaagttgagttac

SEQ ID NO: 36396 - DNA, 25 bp, Probe sequence
agaacgcatatctgaagttgagtta

SEQ ID NO: 36397 - DNA, 25 bp, Probe sequence
aacgcatatctgaagttgagttaca

SEQ ID NO: 36398 - DNA, 25 bp, Probe sequence
aagaacgcatatctgaagttgagtt

SEQ ID NO: 36399 - DNA, 25 bp, Probe sequence
ttgctgtcaatgaacgattaacttc

SEQ ID NO: 36400 - DNA, 25 bp, Probe sequence
ccgattgaatgaaggtctatattgt

SEQ ID NO: 36401 - DNA, 25 bp, Probe sequence
gttaataagccttgttggacgagaa

SEQ ID NO: 36402 - DNA, 25 bp, Probe sequence
ttaataagccttgttggacgagaag

SEQ ID NO: 36403 - DNA, 25 bp, Probe sequence
gatgacttgaaggagttaataagcc

SEQ ID NO: 36404 - DNA, 25 bp, Probe sequence
ggatgacttgaaggagttaataagc

SEQ ID NO: 36405 - DNA, 25 bp, Probe sequence
gagttaataagccttgttggacgag

SEQ ID NO: 36406 - DNA, 25 bp, Probe sequence
taataagccttgttggacgagaaga

SEQ ID NO: 36407 - DNA, 25 bp, Probe sequence
agttaataagccttgttggacgaga

SEQ ID NO: 36408 - DNA, 25 bp, Probe sequence
atgacttgaaggagttaataagcct

SEQ ID NO: 36409 - DNA, 25 bp, Probe sequence
ttagatatagacagtcacgacaatt

SEQ ID NO: 36410 - DNA, 25 bp, Probe sequence
taattcctcaaccgccaaactataa

SEQ ID NO: 36411 - DNA, 25 bp, Probe sequence
ttaattcctcaaccgccaaactata

SEQ ID NO: 36412 - DNA, 25 bp, Probe sequence
aatcaaatgcttaattcctcaaccg

SEQ ID NO: 36413 - DNA, 25 bp, Probe sequence
cttaattcctcaaccgccaaactat

SEQ ID NO: 36414 - DNA, 25 bp, Probe sequence
agatatagacagtcacgacaatttg

SEQ ID NO: 36415 - DNA, 25 bp, Probe sequence
gacagtcacgacaatttgaatagtt

SEQ ID NO: 36416 - DNA, 25 bp, Probe sequence
acagtcacgacaatttgaatagttt

SEQ ID NO: 36417 - DNA, 25 bp, Probe sequence
agacagtcacgacaatttgaatagt

SEQ ID NO: 36418 - DNA, 25 bp, Probe sequence
actcagtcttaatcaatgttacctc

SEQ ID NO: 36419 - DNA, 25 bp, Probe sequence
ctcagtcttaatcaatgttacctct

SEQ ID NO: 36420 - DNA, 25 bp, Probe sequence
tactcagtcttaatcaatgttacct

SEQ ID NO: 36421 - DNA, 25 bp, Probe sequence
tacctaccctacccttaattcagtt

SEQ ID NO: 36422 - DNA, 25 bp, Probe sequence
atacctaccctacccttaattcagt

SEQ ID NO: 36423 - DNA, 25 bp, Probe sequence
catacctaccctacccttaattcag

SEQ ID NO: 36424 - DNA, 25 bp, Probe sequence
accctacccttaattcagtttacat

SEQ ID NO: 36425 - DNA, 25 bp, Probe sequence
cctaccctacccttaattcagttta

SEQ ID NO: 36426 - DNA, 25 bp, Probe sequence
acctaccctacccttaattcagttt

SEQ ID NO: 36427 - DNA, 25 bp, Probe sequence
caatatactcaggtgtaggaatgct

SEQ ID NO: 36428 - DNA, 25 bp, Probe sequence
ataatgttatctggaccgattgctt

SEQ ID NO: 36429 - DNA, 25 bp, Probe sequence
aataatgttatctggaccgattgct

SEQ ID NO: 36430 - DNA, 25 bp, Probe sequence
aatatactcaggtgtaggaatgctt

SEQ ID NO: 36431 - DNA, 25 bp, Probe sequence
atatactcaggtgtaggaatgcttc

SEQ ID NO: 36432 - DNA, 25 bp, Probe sequence
tactcaggtgtaggaatgcttcata

SEQ ID NO: 36433 - DNA, 25 bp, Probe sequence
tatactcaggtgtaggaatgcttca

SEQ ID NO: 36434 - DNA, 25 bp, Probe sequence
tgcttcatacattacttggaccatt

SEQ ID NO: 36435 - DNA, 25 bp, Probe sequence
atgcttcatacattacttggaccat

SEQ ID NO: 36436 - DNA, 25 bp, Probe sequence
gaatatcaaccgaatacaccacaag

SEQ ID NO: 36437 - DNA, 25 bp, Probe sequence
gacaacactcaacatccaacatatc

SEQ ID NO: 36438 - DNA, 25 bp, Probe sequence
agaatatcaaccgaatacaccacaa

SEQ ID NO: 36439 - DNA, 25 bp, Probe sequence
caatcaggatgtcacggtattctta

SEQ ID NO: 36440 - DNA, 25 bp, Probe sequence
tagaatatcaaccgaatacaccaca

SEQ ID NO: 36441 - DNA, 25 bp, Probe sequence
aatcaggatgtcacggtattcttaa

SEQ ID NO: 36442 - DNA, 25 bp, Probe sequence
atcaggatgtcacggtattcttaat

SEQ ID NO: 36443 - DNA, 25 bp, Probe sequence
aggatgtcacggtattcttaattca

SEQ ID NO: 36444 - DNA, 25 bp, Probe sequence
tcaggatgtcacggtattcttaatt

SEQ ID NO: 36445 - DNA, 25 bp, Probe sequence
ccatcatcatcaggattagcagtat

SEQ ID NO: 36446 - DNA, 25 bp, Probe sequence
gttacaacatatcaattcggtcagt

SEQ ID NO: 36447 - DNA, 25 bp, Probe sequence
accatcatcatcaggattagcagta

SEQ ID NO: 36448 - DNA, 25 bp, Probe sequence
taccatcatcatcaggattagcagt

SEQ ID NO: 36449 - DNA, 25 bp, Probe sequence
catcatcatcaggattagcagtatt

SEQ ID NO: 36450 - DNA, 25 bp, Probe sequence
atcgtaccatcatcatcaggattag

SEQ ID NO: 36451 - DNA, 25 bp, Probe sequence
ttatcgtaccatcatcatcaggatt

SEQ ID NO: 36452 - DNA, 25 bp, Probe sequence
gtaccatcatcatcaggattagcag

SEQ ID NO: 36453 - DNA, 25 bp, Probe sequence
ttacaacatatcaattcggtcagta

SEQ ID NO: 36454 - DNA, 25 bp, Probe sequence
ggtattgttattggtaagtctggtg

SEQ ID NO: 36455 - DNA, 25 bp, Probe sequence
aggtattgttattggtaagtctggt

SEQ ID NO: 36456 - DNA, 25 bp, Probe sequence
gaacgctgacaacttatatcgctaa

SEQ ID NO: 36457 - DNA, 25 bp, Probe sequence
gtattgttattggtaagtctggtga

SEQ ID NO: 36458 - DNA, 25 bp, Probe sequence
tattggaacgctgacaacttatatc

SEQ ID NO: 36459 - DNA, 25 bp, Probe sequence
attggaacgctgacaacttatatcg

SEQ ID NO: 36460 - DNA, 25 bp, Probe sequence
atattggaacgctgacaacttatat

SEQ ID NO: 36461 - DNA, 25 bp, Probe sequence
tattgttattggtaagtctggtgaa

SEQ ID NO: 36462 - DNA, 25 bp, Probe sequence
taggtattgttattggtaagtctgg

SEQ ID NO: 36463 - DNA, 25 bp, Probe sequence
ccgaacttgaatcagataacattgg

SEQ ID NO: 36464 - DNA, 25 bp, Probe sequence
cgaacttgaatcagataacattgga

SEQ ID NO: 36465 - DNA, 25 bp, Probe sequence
gccgaacttgaatcagataacattg

SEQ ID NO: 36466 - DNA, 25 bp, Probe sequence
tcagataacattggagaacaagtca

SEQ ID NO: 36467 - DNA, 25 bp, Probe sequence
cagataacattggagaacaagtcag

SEQ ID NO: 36468 - DNA, 25 bp, Probe sequence
agataacattggagaacaagtcaga

SEQ ID NO: 36469 - DNA, 25 bp, Probe sequence
gataacattggagaacaagtcagaa

SEQ ID NO: 36470 - DNA, 25 bp, Probe sequence
ttgaatcagataacattggagaaca

SEQ ID NO: 36471 - DNA, 25 bp, Probe sequence
atcagataacattggagaacaagtc

SEQ ID NO: 36472 - DNA, 25 bp, Probe sequence
gctgatgtgattgaagattatgtga

SEQ ID NO: 36473 - DNA, 25 bp, Probe sequence
ttatcagagcgtatggaagtcaata

SEQ ID NO: 36474 - DNA, 25 bp, Probe sequence
caagcaataccacgaatacacttaa

SEQ ID NO: 36475 - DNA, 25 bp, Probe sequence
ccaagaaggctattatcaaggcaat

SEQ ID NO: 36476 - DNA, 25 bp, Probe sequence
tgattgaagattatgtgatgaagca

SEQ ID NO: 36477 - DNA, 25 bp, Probe sequence
aagcaactcaatgacattacgaatc

SEQ ID NO: 36478 - DNA, 25 bp, Probe sequence
gtgattgaagattatgtgatgaagc

SEQ ID NO: 36479 - DNA, 25 bp, Probe sequence
ggacttaacatcagtaatcagacca

SEQ ID NO: 36480 - DNA, 25 bp, Probe sequence
catcagtaatcagaccaagtattca

SEQ ID NO: 36481 - DNA, 25 bp, Probe sequence
tgtacgctaataaccaactcatcag

SEQ ID NO: 36482 - DNA, 25 bp, Probe sequence
atgtacgctaataaccaactcatca

SEQ ID NO: 36483 - DNA, 25 bp, Probe sequence
tatgtacgctaataaccaactcatc

SEQ ID NO: 36484 - DNA, 25 bp, Probe sequence
cttatgtacgctaataaccaactca

SEQ ID NO: 36485 - DNA, 25 bp, Probe sequence
tcttatgtacgctaataaccaactc

SEQ ID NO: 36486 - DNA, 25 bp, Probe sequence
ttatgtacgctaataaccaactcat

SEQ ID NO: 36487 - DNA, 25 bp, Probe sequence
ttcttatgtacgctaataaccaact

SEQ ID NO: 36488 - DNA, 25 bp, Probe sequence
tcatttactaagagaaggagggact

SEQ ID NO: 36489 - DNA, 25 bp, Probe sequence
gaccactcaagaactcaaacaatat

SEQ ID NO: 36490 - DNA, 25 bp, Probe sequence
cagtagttggattgatggaagtgtc

SEQ ID NO: 36491 - DNA, 25 bp, Probe sequence
tcatcacaatggtattaggtgtcat

SEQ ID NO: 36492 - DNA, 25 bp, Probe sequence
atcatcacaatggtattaggtgtca

SEQ ID NO: 36493 - DNA, 25 bp, Probe sequence
agtagttggattgatggaagtgtcg

SEQ ID NO: 36494 - DNA, 25 bp, Probe sequence
tattaggtgtcattctaccgttagg

SEQ ID NO: 36495 - DNA, 25 bp, Probe sequence
tatcatcacaatggtattaggtgtc

SEQ ID NO: 36496 - DNA, 25 bp, Probe sequence
gattgatggaagtgtcgattgctaa

SEQ ID NO: 36497 - DNA, 25 bp, Probe sequence
gtattaggtgtcattctaccgttag

SEQ ID NO: 36498 - DNA, 25 bp, Probe sequence
tcacaatggtattaggtgtcattct

SEQ ID NO: 36499 - DNA, 25 bp, Probe sequence
aatgttgatgatgaaggcgtatgta

SEQ ID NO: 36500 - DNA, 25 bp, Probe sequence
ctgaagtgaatatcgtatggagtcc

SEQ ID NO: 36501 - DNA, 25 bp, Probe sequence
actgaagtgaatatcgtatggagtc

SEQ ID NO: 36502 - DNA, 25 bp, Probe sequence
gaatgttgatgatgaaggcgtatgt

SEQ ID NO: 36503 - DNA, 25 bp, Probe sequence
tgaatgttgatgatgaaggcgtatg

SEQ ID NO: 36504 - DNA, 25 bp, Probe sequence
gtgaatgttgatgatgaaggcgtat

SEQ ID NO: 36505 - DNA, 25 bp, Probe sequence
tactgaagtgaatatcgtatggagt

SEQ ID NO: 36506 - DNA, 25 bp, Probe sequence
atgttgatgatgaaggcgtatgtac

SEQ ID NO: 36507 - DNA, 25 bp, Probe sequence
aacagtattagcagagattcctgaa

SEQ ID NO: 36508 - DNA, 25 bp, Probe sequence
acattgatggcttagtaagtgagaa

SEQ ID NO: 36509 - DNA, 25 bp, Probe sequence
ttgatggcttagtaagtgagaagaa

SEQ ID NO: 36510 - DNA, 25 bp, Probe sequence
attgatggcttagtaagtgagaaga

SEQ ID NO: 36511 - DNA, 25 bp, Probe sequence
cattgatggcttagtaagtgagaag

SEQ ID NO: 36512 - DNA, 25 bp, Probe sequence
tcggtgattcagtaatggttgatat

SEQ ID NO: 36513 - DNA, 25 bp, Probe sequence
atcggtgattcagtaatggttgata

SEQ ID NO: 36514 - DNA, 25 bp, Probe sequence
acgaattggatatatgatggtggtt

SEQ ID NO: 36515 - DNA, 25 bp, Probe sequence
gcaatcgctgttctaggaattatta

SEQ ID NO: 36516 - DNA, 25 bp, Probe sequence
agacgaattggatatatgatggtgg

SEQ ID NO: 36517 - DNA, 25 bp, Probe sequence
ttagtgagcctgatgttgaagatac

SEQ ID NO: 36518 - DNA, 25 bp, Probe sequence
gttagtgagcctgatgttgaagata

SEQ ID NO: 36519 - DNA, 25 bp, Probe sequence
gttcgtcgtaatccatactcagtta

SEQ ID NO: 36520 - DNA, 25 bp, Probe sequence
aatgattcgtgaagttgtaacagac

SEQ ID NO: 36521 - DNA, 25 bp, Probe sequence
ttcgtcgtaatccatactcagttat

SEQ ID NO: 36522 - DNA, 25 bp, Probe sequence
gcgtattcaagatagagccttagtt

SEQ ID NO: 36523 - DNA, 25 bp, Probe sequence
acttcaatctcgtgtagaatcagaa

SEQ ID NO: 36524 - DNA, 25 bp, Probe sequence
agattacaagaactacaagaagagc

SEQ ID NO: 36525 - DNA, 25 bp, Probe sequence
gtgcgtattcaagatagagccttag

SEQ ID NO: 36526 - DNA, 25 bp, Probe sequence
gaagaccttgcgatagttcatgttc

SEQ ID NO: 36527 - DNA, 25 bp, Probe sequence
agaccttgcgatagttcatgttcat

SEQ ID NO: 36528 - DNA, 25 bp, Probe sequence
agaagaccttgcgatagttcatgtt

SEQ ID NO: 36529 - DNA, 25 bp, Probe sequence
aagaagaccttgcgatagttcatgt

SEQ ID NO: 36530 - DNA, 25 bp, Probe sequence
aatcgtaactaacaaacatatcgct

SEQ ID NO: 36531 - DNA, 25 bp, Probe sequence
caatcgtaactaacaaacatatcgc

SEQ ID NO: 36532 - DNA, 25 bp, Probe sequence
gaccttgcgatagttcatgttcatg

SEQ ID NO: 36533 - DNA, 25 bp, Probe sequence
aagaccttgcgatagttcatgttca

SEQ ID NO: 36534 - DNA, 25 bp, Probe sequence
tcgtaactaacaaacatatcgctaa

SEQ ID NO: 36535 - DNA, 25 bp, Probe sequence
atattgctggaggatctgattacga

SEQ ID NO: 36536 - DNA, 25 bp, Probe sequence
tattgctggaggatctgattacgaa

SEQ ID NO: 36537 - DNA, 25 bp, Probe sequence
aatattgctggaggatctgattacg

SEQ ID NO: 36538 - DNA, 25 bp, Probe sequence
taccaaccatctttactgcgattta

SEQ ID NO: 36539 - DNA, 25 bp, Probe sequence
ccaaccatctttactgcgatttata

SEQ ID NO: 36540 - DNA, 25 bp, Probe sequence
accaaccatctttactgcgatttat

SEQ ID NO: 36541 - DNA, 25 bp, Probe sequence
aatagcaatttggataggcatcgta

SEQ ID NO: 36542 - DNA, 25 bp, Probe sequence
ttaccaaccatctttactgcgattt

SEQ ID NO: 36543 - DNA, 25 bp, Probe sequence
tttaccaaccatctttactgcgatt

SEQ ID NO: 36544 - DNA, 25 bp, Probe sequence
gaagtaagaagtgacatcgttgctt

SEQ ID NO: 36545 - DNA, 25 bp, Probe sequence
aacgatgtacgaagtaagaagtgac

SEQ ID NO: 36546 - DNA, 25 bp, Probe sequence
caacgatgtacgaagtaagaagtga

SEQ ID NO: 36547 - DNA, 25 bp, Probe sequence
gcaacgatgtacgaagtaagaagtg

SEQ ID NO: 36548 - DNA, 25 bp, Probe sequence
acgatgtacgaagtaagaagtgaca

SEQ ID NO: 36549 - DNA, 25 bp, Probe sequence
atggcaacgatgtacgaagtaagaa

SEQ ID NO: 36550 - DNA, 25 bp, Probe sequence
aagtaagaagtgacatcgttgcttt

SEQ ID NO: 36551 - DNA, 25 bp, Probe sequence
ggcaacgatgtacgaagtaagaagt

SEQ ID NO: 36552 - DNA, 25 bp, Probe sequence
tggcaacgatgtacgaagtaagaag

SEQ ID NO: 36553 - DNA, 25 bp, Probe sequence
cgacaccattagaatacggagatat

SEQ ID NO: 36554 - DNA, 25 bp, Probe sequence
ttctgctcattgtcataacgatcta

SEQ ID NO: 36555 - DNA, 25 bp, Probe sequence
tctgctcattgtcataacgatctag

SEQ ID NO: 36556 - DNA, 25 bp, Probe sequence
ctgctcattgtcataacgatctagg

SEQ ID NO: 36557 - DNA, 25 bp, Probe sequence
aattctgttgaagtaggcatgtgta

SEQ ID NO: 36558 - DNA, 25 bp, Probe sequence
gacaccattagaatacggagatatt

SEQ ID NO: 36559 - DNA, 25 bp, Probe sequence
attctgttgaagtaggcatgtgtac

SEQ ID NO: 36560 - DNA, 25 bp, Probe sequence
atactattgccaatatctgacttgc

SEQ ID NO: 36561 - DNA, 25 bp, Probe sequence
tcgacaccattagaatacggagata

SEQ ID NO: 36562 - DNA, 25 bp, Probe sequence
aagatgtaatggctattgttgtcgg

SEQ ID NO: 36563 - DNA, 25 bp, Probe sequence
ggattagaagtgcttggagatcatt

SEQ ID NO: 36564 - DNA, 25 bp, Probe sequence
gatgtaatggctattgttgtcggag

SEQ ID NO: 36565 - DNA, 25 bp, Probe sequence
gattagaagtgcttggagatcattc

SEQ ID NO: 36566 - DNA, 25 bp, Probe sequence
cttggagatcattcgtggttctatt

SEQ ID NO: 36567 - DNA, 25 bp, Probe sequence
attagaagtgcttggagatcattcg

SEQ ID NO: 36568 - DNA, 25 bp, Probe sequence
agatgtaatggctattgttgtcgga

SEQ ID NO: 36569 - DNA, 25 bp, Probe sequence
tggattagaagtgcttggagatcat

SEQ ID NO: 36570 - DNA, 25 bp, Probe sequence
atgtaatggctattgttgtcggagt

SEQ ID NO: 36571 - DNA, 25 bp, Probe sequence
atgacgatgaacaagaacttaaatt

SEQ ID NO: 36572 - DNA, 25 bp, Probe sequence
ttatgacgatgaacaagaacttaaa

SEQ ID NO: 36573 - DNA, 25 bp, Probe sequence
tttatgacgatgaacaagaacttaa

SEQ ID NO: 36574 - DNA, 25 bp, Probe sequence
tgacgatgaacaagaacttaaatta

SEQ ID NO: 36575 - DNA, 25 bp, Probe sequence
atttatgacgatgaacaagaactta

SEQ ID NO: 36576 - DNA, 25 bp, Probe sequence
tatttatgacgatgaacaagaactt

SEQ ID NO: 36577 - DNA, 25 bp, Probe sequence
tatgacgatgaacaagaacttaaat

SEQ ID NO: 36578 - DNA, 25 bp, Probe sequence
tgatatttatgacgatgaacaagaa

SEQ ID NO: 36579 - DNA, 25 bp, Probe sequence
atatttatgacgatgaacaagaact

SEQ ID NO: 36580 - DNA, 25 bp, Probe sequence
tgcttattatggttatcaatgtgcg

SEQ ID NO: 36581 - DNA, 25 bp, Probe sequence
gcttattatggttatcaatgtgcgg

SEQ ID NO: 36582 - DNA, 25 bp, Probe sequence
gtgcttattatggttatcaatgtgc

SEQ ID NO: 36583 - DNA, 25 bp, Probe sequence
tggtgcttattatggttatcaatgt

SEQ ID NO: 36584 - DNA, 25 bp, Probe sequence
ggtgcttattatggttatcaatgtg

SEQ ID NO: 36585 - DNA, 25 bp, Probe sequence
atggtgcttattatggttatcaatg

SEQ ID NO: 36586 - DNA, 25 bp, Probe sequence
cttattatggttatcaatgtgcggg

SEQ ID NO: 36587 - DNA, 25 bp, Probe sequence
ttattatggttatcaatgtgcgggt

SEQ ID NO: 36588 - DNA, 25 bp, Probe sequence
ttcatacttctacagaaccttcggt

SEQ ID NO: 36589 - DNA, 25 bp, Probe sequence
attatatggttggaatgtgacggat

SEQ ID NO: 36590 - DNA, 25 bp, Probe sequence
atcctaatatgtgtgtgacgaactt

SEQ ID NO: 36591 - DNA, 25 bp, Probe sequence
ctgtatcctaatatgtgtgtgacga

SEQ ID NO: 36592 - DNA, 25 bp, Probe sequence
actgtatcctaatatgtgtgtgacg

SEQ ID NO: 36593 - DNA, 25 bp, Probe sequence
tataacagtggagcgattacagaat

SEQ ID NO: 36594 - DNA, 25 bp, Probe sequence
ttatatggttggaatgtgacggatt

SEQ ID NO: 36595 - DNA, 25 bp, Probe sequence
tgtatcctaatatgtgtgtgacgaa

SEQ ID NO: 36596 - DNA, 25 bp, Probe sequence
atataacagtggagcgattacagaa

SEQ ID NO: 36597 - DNA, 25 bp, Probe sequence
gtatcctaatatgtgtgtgacgaac

SEQ ID NO: 36598 - DNA, 25 bp, Probe sequence
ttattgataagccagaggattggaa

SEQ ID NO: 36599 - DNA, 25 bp, Probe sequence
tcacctatagcaattacttcagcaa

SEQ ID NO: 36600 - DNA, 25 bp, Probe sequence
ttcacctatagcaattacttcagca

SEQ ID NO: 36601 - DNA, 25 bp, Probe sequence
attcacctatagcaattacttcagc

SEQ ID NO: 36602 - DNA, 25 bp, Probe sequence
cagaggattggaaattgtatggaga

SEQ ID NO: 36603 - DNA, 25 bp, Probe sequence
agaggattggaaattgtatggagat

SEQ ID NO: 36604 - DNA, 25 bp, Probe sequence
agtgattgttcctactgatactaat

SEQ ID NO: 36605 - DNA, 25 bp, Probe sequence
gaggattggaaattgtatggagata

SEQ ID NO: 36606 - DNA, 25 bp, Probe sequence
gtgattgttcctactgatactaatt

SEQ ID NO: 36607 - DNA, 25 bp, Probe sequence
cggttaatgctatgttgttattggt

SEQ ID NO: 36608 - DNA, 25 bp, Probe sequence
ccgattgtattatgtatggcttgta

SEQ ID NO: 36609 - DNA, 25 bp, Probe sequence
ggttaatgctatgttgttattggtg

SEQ ID NO: 36610 - DNA, 25 bp, Probe sequence
ttaatgctatgttgttattggtgac

SEQ ID NO: 36611 - DNA, 25 bp, Probe sequence
gttaatgctatgttgttattggtga

SEQ ID NO: 36612 - DNA, 25 bp, Probe sequence
taatgctatgttgttattggtgaca

SEQ ID NO: 36613 - DNA, 25 bp, Probe sequence
cgattgtattatgtatggcttgtaa

SEQ ID NO: 36614 - DNA, 25 bp, Probe sequence
tgacctaattattaatccacatccg

SEQ ID NO: 36615 - DNA, 25 bp, Probe sequence
cagcgaatagtgtgtcaccatatat

SEQ ID NO: 36616 - DNA, 25 bp, Probe sequence
attatccacagagcaccttcatatt

SEQ ID NO: 36617 - DNA, 25 bp, Probe sequence
cattatccacagagcaccttcatat

SEQ ID NO: 36618 - DNA, 25 bp, Probe sequence
ttatccacagagcaccttcatattg

SEQ ID NO: 36619 - DNA, 25 bp, Probe sequence
cagagcaccttcatattgacatcta

SEQ ID NO: 36620 - DNA, 25 bp, Probe sequence
acattatccacagagcaccttcata

SEQ ID NO: 36621 - DNA, 25 bp, Probe sequence
agagcaccttcatattgacatctat

SEQ ID NO: 36622 - DNA, 25 bp, Probe sequence
gagcaccttcatattgacatctatt

SEQ ID NO: 36623 - DNA, 25 bp, Probe sequence
tatccacagagcaccttcatattga

SEQ ID NO: 36624 - DNA, 25 bp, Probe sequence
aacattatccacagagcaccttcat

SEQ ID NO: 36625 - DNA, 25 bp, Probe sequence
cgtacaacaatctatcgttatctca

SEQ ID NO: 36626 - DNA, 25 bp, Probe sequence
aatgaacttaataatcgaggcgtga

SEQ ID NO: 36627 - DNA, 25 bp, Probe sequence
taatgaacttaataatcgaggcgtg

SEQ ID NO: 36628 - DNA, 25 bp, Probe sequence
atgaacttaataatcgaggcgtgag

SEQ ID NO: 36629 - DNA, 25 bp, Probe sequence
agatacgattgttgtttggagacta

SEQ ID NO: 36630 - DNA, 25 bp, Probe sequence
tggataaatcaagttctacaggaca

SEQ ID NO: 36631 - DNA, 25 bp, Probe sequence
tagatagactaggacgtaacatggc

SEQ ID NO: 36632 - DNA, 25 bp, Probe sequence
tttagatagagccattgaatttgcg

SEQ ID NO: 36633 - DNA, 25 bp, Probe sequence
ttagatagagccattgaatttgcga

SEQ ID NO: 36634 - DNA, 25 bp, Probe sequence
acaatgaagtagaagccgatagatt

SEQ ID NO: 36635 - DNA, 25 bp, Probe sequence
gacaatgaagtagaagccgatagat

SEQ ID NO: 36636 - DNA, 25 bp, Probe sequence
atgacaatgaagtagaagccgatag

SEQ ID NO: 36637 - DNA, 25 bp, Probe sequence
acttatgcggaatctattatggact

SEQ ID NO: 36638 - DNA, 25 bp, Probe sequence
cttatgcggaatctattatggactc

SEQ ID NO: 36639 - DNA, 25 bp, Probe sequence
aacttatgcggaatctattatggac

SEQ ID NO: 36640 - DNA, 25 bp, Probe sequence
tgacaatgaagtagaagccgataga

SEQ ID NO: 36641 - DNA, 25 bp, Probe sequence
tcacacgacttgaaccataacataa

SEQ ID NO: 36642 - DNA, 25 bp, Probe sequence
catgacaatgaagtagaagccgata

SEQ ID NO: 36643 - DNA, 25 bp, Probe sequence
atggctgaatgggatgttatgaata

SEQ ID NO: 36644 - DNA, 25 bp, Probe sequence
tatggctgaatgggatgttatgaat

SEQ ID NO: 36645 - DNA, 25 bp, Probe sequence
tggctgaatgggatgttatgaatat

SEQ ID NO: 36646 - DNA, 25 bp, Probe sequence
ttgaaatatctatggctgaatggga

SEQ ID NO: 36647 - DNA, 25 bp, Probe sequence
gttgaaatatctatggctgaatggg

SEQ ID NO: 36648 - DNA, 25 bp, Probe sequence
aatatctatggctgaatgggatgtt

SEQ ID NO: 36649 - DNA, 25 bp, Probe sequence
aaatatctatggctgaatgggatgt

SEQ ID NO: 36650 - DNA, 25 bp, Probe sequence
gcaagttgaaatatctatggctgaa

SEQ ID NO: 36651 - DNA, 25 bp, Probe sequence
ctatggctgaatgggatgttatgaa

SEQ ID NO: 36652 - DNA, 25 bp, Probe sequence
ggagaaacaaagggaaagataaaga

SEQ ID NO: 36653 - DNA, 25 bp, Probe sequence
aggagaaacaaagggaaagataaag

SEQ ID NO: 36654 - DNA, 25 bp, Probe sequence
atattaatggcgtcttatggcattg

SEQ ID NO: 36655 - DNA, 25 bp, Probe sequence
aatattaatggcgtcttatggcatt

SEQ ID NO: 36656 - DNA, 25 bp, Probe sequence
gaaatattaatggcgtcttatggca

SEQ ID NO: 36657 - DNA, 25 bp, Probe sequence
taggagaaacaaagggaaagataaa

SEQ ID NO: 36658 - DNA, 25 bp, Probe sequence
ttaataggagaaacaaagggaaaga

SEQ ID NO: 36659 - DNA, 25 bp, Probe sequence
ataggagaaacaaagggaaagataa

SEQ ID NO: 36660 - DNA, 25 bp, Probe sequence
aataggagaaacaaagggaaagata

SEQ ID NO: 36661 - DNA, 25 bp, Probe sequence
ggaatccaagaacttagagaacttc

SEQ ID NO: 36662 - DNA, 25 bp, Probe sequence
atgtggcatacttcaacaagattca

SEQ ID NO: 36663 - DNA, 25 bp, Probe sequence
gtggcatacttcaacaagattcagg

SEQ ID NO: 36664 - DNA, 25 bp, Probe sequence
tatgtggcatacttcaacaagattc

SEQ ID NO: 36665 - DNA, 25 bp, Probe sequence
ttagataatagaccaatgacacgaa

SEQ ID NO: 36666 - DNA, 25 bp, Probe sequence
tgtggcatacttcaacaagattcag

SEQ ID NO: 36667 - DNA, 25 bp, Probe sequence
tggattacttggtattaatggagcc

SEQ ID NO: 36668 - DNA, 25 bp, Probe sequence
atatgtggcatacttcaacaagatt

SEQ ID NO: 36669 - DNA, 25 bp, Probe sequence
attagataatagaccaatgacacga

SEQ ID NO: 36670 - DNA, 25 bp, Probe sequence
aatcaacgaatgttacggttcataa

SEQ ID NO: 36671 - DNA, 25 bp, Probe sequence
tatcaagagcatggtaaggaagaag

SEQ ID NO: 36672 - DNA, 25 bp, Probe sequence
gtatcaagagcatggtaaggaagaa

SEQ ID NO: 36673 - DNA, 25 bp, Probe sequence
gatgtaacaattccacaaggctatg

SEQ ID NO: 36674 - DNA, 25 bp, Probe sequence
tgatgtaacaattccacaaggctat

SEQ ID NO: 36675 - DNA, 25 bp, Probe sequence
ttgatgtaacaattccacaaggcta

SEQ ID NO: 36676 - DNA, 25 bp, Probe sequence
ggtacgacaataacgaacaagtata

SEQ ID NO: 36677 - DNA, 25 bp, Probe sequence
cggtacgacaataacgaacaagtat

SEQ ID NO: 36678 - DNA, 25 bp, Probe sequence
attcaaggtggacagcagttagatt

SEQ ID NO: 36679 - DNA, 25 bp, Probe sequence
aagcagatttatcaagaacaaaggg

SEQ ID NO: 36680 - DNA, 25 bp, Probe sequence
aaagcagatttatcaagaacaaagg

SEQ ID NO: 36681 - DNA, 25 bp, Probe sequence
acagtttatgcgttagatcattctt

SEQ ID NO: 36682 - DNA, 25 bp, Probe sequence
aacagtttatgcgttagatcattct

SEQ ID NO: 36683 - DNA, 25 bp, Probe sequence
gaatgggttctacttgaatgaattt

SEQ ID NO: 36684 - DNA, 25 bp, Probe sequence
cagtttatgcgttagatcattcttt

SEQ ID NO: 36685 - DNA, 25 bp, Probe sequence
tgaagaatgggttctacttgaatga

SEQ ID NO: 36686 - DNA, 25 bp, Probe sequence
ttgaagaatgggttctacttgaatg

SEQ ID NO: 36687 - DNA, 25 bp, Probe sequence
gaagaatgggttctacttgaatgaa

SEQ ID NO: 36688 - DNA, 25 bp, Probe sequence
aactactgccaataacggaagatat

SEQ ID NO: 36689 - DNA, 25 bp, Probe sequence
ttaactactgccaataacggaagat

SEQ ID NO: 36690 - DNA, 25 bp, Probe sequence
taactactgccaataacggaagata

SEQ ID NO: 36691 - DNA, 25 bp, Probe sequence
tcagcgtcagaagaactatattaca

SEQ ID NO: 36692 - DNA, 25 bp, Probe sequence
cagcgtcagaagaactatattacag

SEQ ID NO: 36693 - DNA, 25 bp, Probe sequence
actactgccaataacggaagatata

SEQ ID NO: 36694 - DNA, 25 bp, Probe sequence
gcatcagcgtcagaagaactatatt

SEQ ID NO: 36695 - DNA, 25 bp, Probe sequence
cgagtgctaatggtaagttaatagg

SEQ ID NO: 36696 - DNA, 25 bp, Probe sequence
tgttcaacttgtattactagcgaga

SEQ ID NO: 36697 - DNA, 25 bp, Probe sequence
tttacacgattacttggaaagatgg

SEQ ID NO: 36698 - DNA, 25 bp, Probe sequence
gtttacacgattacttggaaagatg

SEQ ID NO: 36699 - DNA, 25 bp, Probe sequence
tttataactgtaactttggcactgg

SEQ ID NO: 36700 - DNA, 25 bp, Probe sequence
ttataactgtaactttggcactggg

SEQ ID NO: 36701 - DNA, 25 bp, Probe sequence
tcatttataactgtaactttggcac

SEQ ID NO: 36702 - DNA, 25 bp, Probe sequence
atttataactgtaactttggcactg

SEQ ID NO: 36703 - DNA, 25 bp, Probe sequence
catttataactgtaactttggcact

SEQ ID NO: 36704 - DNA, 25 bp, Probe sequence
tataactgtaactttggcactgggc

SEQ ID NO: 36705 - DNA, 25 bp, Probe sequence
gttccatatacaattgcagtagatg

SEQ ID NO: 36706 - DNA, 25 bp, Probe sequence
tgtgtggctcagttaatagtatcaa

SEQ ID NO: 36707 - DNA, 25 bp, Probe sequence
ttgtgtggctcagttaatagtatca

SEQ ID NO: 36708 - DNA, 25 bp, Probe sequence
ttacctgcgacttctaatacgatta

SEQ ID NO: 36709 - DNA, 25 bp, Probe sequence
tacctgcgacttctaatacgattaa

SEQ ID NO: 36710 - DNA, 25 bp, Probe sequence
gtgtggctcagttaatagtatcaat

SEQ ID NO: 36711 - DNA, 25 bp, Probe sequence
acctgcgacttctaatacgattaat

SEQ ID NO: 36712 - DNA, 25 bp, Probe sequence
atgttgtcgcacctgaaccatataa

SEQ ID NO: 36713 - DNA, 25 bp, Probe sequence
aatgttgtcgcacctgaaccatata

SEQ ID NO: 36714 - DNA, 25 bp, Probe sequence
tgtggctcagttaatagtatcaata

SEQ ID NO: 36715 - DNA, 25 bp, Probe sequence
tgtagaccacttatcagaagaggat

SEQ ID NO: 36716 - DNA, 25 bp, Probe sequence
ttcttattctcagttagccaatgcc

SEQ ID NO: 36717 - DNA, 25 bp, Probe sequence
gtagaccacttatcagaagaggatt

SEQ ID NO: 36718 - DNA, 25 bp, Probe sequence
cttattctcagttagccaatgccaa

SEQ ID NO: 36719 - DNA, 25 bp, Probe sequence
caaccagactaacttcttatgtgag

SEQ ID NO: 36720 - DNA, 25 bp, Probe sequence
caataagtatatggaacgccgtcta

SEQ ID NO: 36721 - DNA, 25 bp, Probe sequence
tcaaccagactaacttcttatgtga

SEQ ID NO: 36722 - DNA, 25 bp, Probe sequence
aataagtatatggaacgccgtctac

SEQ ID NO: 36723 - DNA, 25 bp, Probe sequence
aaccagactaacttcttatgtgagt

SEQ ID NO: 36724 - DNA, 25 bp, Probe sequence
tagatatgataattgttgccacagc

SEQ ID NO: 36725 - DNA, 25 bp, Probe sequence
gaattatggaatcagctagagaacg

SEQ ID NO: 36726 - DNA, 25 bp, Probe sequence
aattatggaatcagctagagaacgc

SEQ ID NO: 36727 - DNA, 25 bp, Probe sequence
gaattaaagaaagacattgggcaga

SEQ ID NO: 36728 - DNA, 25 bp, Probe sequence
tttgctgttagaattatgggtgatg

SEQ ID NO: 36729 - DNA, 25 bp, Probe sequence
ggaattaaagaaagacattgggcag

SEQ ID NO: 36730 - DNA, 25 bp, Probe sequence
ctggaattaaagaaagacattgggc

SEQ ID NO: 36731 - DNA, 25 bp, Probe sequence
actggaattaaagaaagacattggg

SEQ ID NO: 36732 - DNA, 25 bp, Probe sequence
attaaagaaagacattgggcagatg

SEQ ID NO: 36733 - DNA, 25 bp, Probe sequence
ttattcggaatggttggtgttatgg

SEQ ID NO: 36734 - DNA, 25 bp, Probe sequence
tactgaaggtaatatcaatcttggc

SEQ ID NO: 36735 - DNA, 25 bp, Probe sequence
ggtctatctaacattgatgacactg

SEQ ID NO: 36736 - DNA, 25 bp, Probe sequence
acagagtggtcaatataacaattct

SEQ ID NO: 36737 - DNA, 25 bp, Probe sequence
tctatctaacattgatgacactgaa

SEQ ID NO: 36738 - DNA, 25 bp, Probe sequence
gtctatctaacattgatgacactga

SEQ ID NO: 36739 - DNA, 25 bp, Probe sequence
ggaatggttggtgttatggcaatac

SEQ ID NO: 36740 - DNA, 25 bp, Probe sequence
ctgggatagggagatatttgctaaa

SEQ ID NO: 36741 - DNA, 25 bp, Probe sequence
ttatgatactgtcagtggattagct

SEQ ID NO: 36742 - DNA, 25 bp, Probe sequence
aatgtctatatggaggtacaacact

SEQ ID NO: 36743 - DNA, 25 bp, Probe sequence
tgaatgtctatatggaggtacaaca

SEQ ID NO: 36744 - DNA, 25 bp, Probe sequence
gaatgtctatatggaggtacaacac

SEQ ID NO: 36745 - DNA, 25 bp, Probe sequence
ctgaatgtctatatggaggtacaac

SEQ ID NO: 36746 - DNA, 25 bp, Probe sequence
tctgaatgtctatatggaggtacaa

SEQ ID NO: 36747 - DNA, 25 bp, Probe sequence
ttctgaatgtctatatggaggtaca

SEQ ID NO: 36748 - DNA, 25 bp, Probe sequence
tgctaatgtttgggtagatggtatt

SEQ ID NO: 36749 - DNA, 25 bp, Probe sequence
tgtctatatggaggtacaacactaa

SEQ ID NO: 36750 - DNA, 25 bp, Probe sequence
cgaaagcagaagatttacacgataa

SEQ ID NO: 36751 - DNA, 25 bp, Probe sequence
ggtggacataacgcagtattagtat

SEQ ID NO: 36752 - DNA, 25 bp, Probe sequence
gtggacataacgcagtattagtatt

SEQ ID NO: 36753 - DNA, 25 bp, Probe sequence
ggacataacgcagtattagtattca

SEQ ID NO: 36754 - DNA, 25 bp, Probe sequence
tggacataacgcagtattagtattc

SEQ ID NO: 36755 - DNA, 25 bp, Probe sequence
atgttaattcctgatatggcaactg

SEQ ID NO: 36756 - DNA, 25 bp, Probe sequence
ctatggtactacaggtgatgcttat

SEQ ID NO: 36757 - DNA, 25 bp, Probe sequence
tgttaattcctgatatggcaactgg

SEQ ID NO: 36758 - DNA, 25 bp, Probe sequence
tatggtactacaggtgatgcttatc

SEQ ID NO: 36759 - DNA, 25 bp, Probe sequence
caatgttaattcctgatatggcaac

SEQ ID NO: 36760 - DNA, 25 bp, Probe sequence
aatcagaccaccgttatcatatagc

SEQ ID NO: 36761 - DNA, 25 bp, Probe sequence
acaatcagaccaccgttatcatata

SEQ ID NO: 36762 - DNA, 25 bp, Probe sequence
aacaatcagaccaccgttatcatat

SEQ ID NO: 36763 - DNA, 25 bp, Probe sequence
caatcagaccaccgttatcatatag

SEQ ID NO: 36764 - DNA, 25 bp, Probe sequence
tattcaacaatcagaccaccgttat

SEQ ID NO: 36765 - DNA, 25 bp, Probe sequence
atattcaacaatcagaccaccgtta

SEQ ID NO: 36766 - DNA, 25 bp, Probe sequence
tatattcaacaatcagaccaccgtt

SEQ ID NO: 36767 - DNA, 25 bp, Probe sequence
caacaatcagaccaccgttatcata

SEQ ID NO: 36768 - DNA, 25 bp, Probe sequence
atatattcaacaatcagaccaccgt

SEQ ID NO: 36769 - DNA, 25 bp, Probe sequence
aagactcaggagaagtaatacagtt

SEQ ID NO: 36770 - DNA, 25 bp, Probe sequence
ccttattaatgcgtggagatgatag

SEQ ID NO: 36771 - DNA, 25 bp, Probe sequence
gccttattaatgcgtggagatgata

SEQ ID NO: 36772 - DNA, 25 bp, Probe sequence
agccttattaatgcgtggagatgat

SEQ ID NO: 36773 - DNA, 25 bp, Probe sequence
actcaggagaagtaatacagtttga

SEQ ID NO: 36774 - DNA, 25 bp, Probe sequence
gactcaggagaagtaatacagtttg

SEQ ID NO: 36775 - DNA, 25 bp, Probe sequence
agactcaggagaagtaatacagttt

SEQ ID NO: 36776 - DNA, 25 bp, Probe sequence
aaagactcaggagaagtaatacagt

SEQ ID NO: 36777 - DNA, 25 bp, Probe sequence
cgagaacttgctaaagaaacaaata

SEQ ID NO: 36778 - DNA, 25 bp, Probe sequence
agcgaaataaagcgtatagagaact

SEQ ID NO: 36779 - DNA, 25 bp, Probe sequence
aagcgaaataaagcgtatagagaac

SEQ ID NO: 36780 - DNA, 25 bp, Probe sequence
gcgaaataaagcgtatagagaactt

SEQ ID NO: 36781 - DNA, 25 bp, Probe sequence
taagcgaaataaagcgtatagagaa

SEQ ID NO: 36782 - DNA, 25 bp, Probe sequence
ataagcgaaataaagcgtatagaga

SEQ ID NO: 36783 - DNA, 25 bp, Probe sequence
cgaaataaagcgtatagagaacttc

SEQ ID NO: 36784 - DNA, 25 bp, Probe sequence
aataagcgaaataaagcgtatagag

SEQ ID NO: 36785 - DNA, 25 bp, Probe sequence
gtttaaaggacgctcagagaataaa

SEQ ID NO: 36786 - DNA, 25 bp, Probe sequence
aaataagcgaaataaagcgtataga

SEQ ID NO: 36787 - DNA, 25 bp, Probe sequence
acataagagcagagatgatagaggt

SEQ ID NO: 36788 - DNA, 25 bp, Probe sequence
ccagatacataagagcagagatgat

SEQ ID NO: 36789 - DNA, 25 bp, Probe sequence
cataagagcagagatgatagaggta

SEQ ID NO: 36790 - DNA, 25 bp, Probe sequence
tacataagagcagagatgatagagg

SEQ ID NO: 36791 - DNA, 25 bp, Probe sequence
agcagagatgatagaggtattaagt

SEQ ID NO: 36792 - DNA, 25 bp, Probe sequence
aagagcagagatgatagaggtatta

SEQ ID NO: 36793 - DNA, 25 bp, Probe sequence
taagagcagagatgatagaggtatt

SEQ ID NO: 36794 - DNA, 25 bp, Probe sequence
gccagatacataagagcagagatga

SEQ ID NO: 36795 - DNA, 25 bp, Probe sequence
agagcagagatgatagaggtattaa

SEQ ID NO: 36796 - DNA, 25 bp, Probe sequence
ttatgtactcctggttgtgctaaga

SEQ ID NO: 36797 - DNA, 25 bp, Probe sequence
tatgtactcctggttgtgctaagac

SEQ ID NO: 36798 - DNA, 25 bp, Probe sequence
aataactcaaatgattcagcaggtg

SEQ ID NO: 36799 - DNA, 25 bp, Probe sequence
caataactcaaatgattcagcaggt

SEQ ID NO: 36800 - DNA, 25 bp, Probe sequence
acaataactcaaatgattcagcagg

SEQ ID NO: 36801 - DNA, 25 bp, Probe sequence
ataactcaaatgattcagcaggtga

SEQ ID NO: 36802 - DNA, 25 bp, Probe sequence
tttatgtactcctggttgtgctaag

SEQ ID NO: 36803 - DNA, 25 bp, Probe sequence
aacaataactcaaatgattcagcag

SEQ ID NO: 36804 - DNA, 25 bp, Probe sequence
gtttatgtactcctggttgtgctaa

SEQ ID NO: 36805 - DNA, 25 bp, Probe sequence
tgattatgacgattggtagtgactt

SEQ ID NO: 36806 - DNA, 25 bp, Probe sequence
ttgattatgacgattggtagtgact

SEQ ID NO: 36807 - DNA, 25 bp, Probe sequence
tattggcttgtacgaatggattaga

SEQ ID NO: 36808 - DNA, 25 bp, Probe sequence
ttattggcttgtacgaatggattag

SEQ ID NO: 36809 - DNA, 25 bp, Probe sequence
attggcttgtacgaatggattagag

SEQ ID NO: 36810 - DNA, 25 bp, Probe sequence
atttgctttgattatgacgattggt

SEQ ID NO: 36811 - DNA, 25 bp, Probe sequence
gctttgattatgacgattggtagtg

SEQ ID NO: 36812 - DNA, 25 bp, Probe sequence
ttgctttgattatgacgattggtag

SEQ ID NO: 36813 - DNA, 25 bp, Probe sequence
tgctttgattatgacgattggtagt

SEQ ID NO: 36814 - DNA, 25 bp, Probe sequence
tggacgaacactaggctcagaatac

SEQ ID NO: 36815 - DNA, 25 bp, Probe sequence
ctcagaatacgtggacgaacactag

SEQ ID NO: 36816 - DNA, 25 bp, Probe sequence
ggacgaacactaggctcagaatacg

SEQ ID NO: 36817 - DNA, 25 bp, Probe sequence
tcagaatacgtggacgaacactagg

SEQ ID NO: 36818 - DNA, 25 bp, Probe sequence
gaacactaggctcagaatacgtgga

SEQ ID NO: 36819 - DNA, 25 bp, Probe sequence
aacactaggctcagaatacgtggac

SEQ ID NO: 36820 - DNA, 25 bp, Probe sequence
ctaggctcagaatacgtggacgaac

SEQ ID NO: 36821 - DNA, 25 bp, Probe sequence
gctcagaatacgtggacgaacacta

SEQ ID NO: 36822 - DNA, 25 bp, Probe sequence
actaggctcagaatacgtggacgaa

SEQ ID NO: 36823 - DNA, 25 bp, Probe sequence
acattaggttattcttatggcggag

SEQ ID NO: 36824 - DNA, 25 bp, Probe sequence
cattaggttattcttatggcggaga

SEQ ID NO: 36825 - DNA, 25 bp, Probe sequence
aacattaggttattcttatggcgga

SEQ ID NO: 36826 - DNA, 25 bp, Probe sequence
tatctaatggcttatcaggtggatt

SEQ ID NO: 36827 - DNA, 25 bp, Probe sequence
aggttattcttatggcggagatatt

SEQ ID NO: 36828 - DNA, 25 bp, Probe sequence
atatctaatggcttatcaggtggat

SEQ ID NO: 36829 - DNA, 25 bp, Probe sequence
ttaggttattcttatggcggagata

SEQ ID NO: 36830 - DNA, 25 bp, Probe sequence
taggttattcttatggcggagatat

SEQ ID NO: 36831 - DNA, 25 bp, Probe sequence
tatatctaatggcttatcaggtgga

SEQ ID NO: 36832 - DNA, 25 bp, Probe sequence
taggtgctatcgtggttacatcaat

SEQ ID NO: 36833 - DNA, 25 bp, Probe sequence
ttaggtgctatcgtggttacatcaa

SEQ ID NO: 36834 - DNA, 25 bp, Probe sequence
tatattggctatgtctatcacaggc

SEQ ID NO: 36835 - DNA, 25 bp, Probe sequence
ttgaagtcatagcatctattccgaa

SEQ ID NO: 36836 - DNA, 25 bp, Probe sequence
cttgaagtcatagcatctattccga

SEQ ID NO: 36837 - DNA, 25 bp, Probe sequence
cgattaacgacgatcattctaatgc

SEQ ID NO: 36838 - DNA, 25 bp, Probe sequence
tgaagtcatagcatctattccgaat

SEQ ID NO: 36839 - DNA, 25 bp, Probe sequence
atattggctatgtctatcacaggct

SEQ ID NO: 36840 - DNA, 25 bp, Probe sequence
acttgaagtcatagcatctattccg

SEQ ID NO: 36841 - DNA, 25 bp, Probe sequence
gtacggaggatgtaagtagtaagaa

SEQ ID NO: 36842 - DNA, 25 bp, Probe sequence
tccaacaggttcagcaagagaatat

SEQ ID NO: 36843 - DNA, 25 bp, Probe sequence
aacattaggatataacattggaggt

SEQ ID NO: 36844 - DNA, 25 bp, Probe sequence
ccaacaggttcagcaagagaatatt

SEQ ID NO: 36845 - DNA, 25 bp, Probe sequence
ccaatataatataggactgacgact

SEQ ID NO: 36846 - DNA, 25 bp, Probe sequence
ggtatttacgcagaaagaaagcata

SEQ ID NO: 36847 - DNA, 25 bp, Probe sequence
gtccaacaggttcagcaagagaata

SEQ ID NO: 36848 - DNA, 25 bp, Probe sequence
gtaatttccagtcagcaccatctat

SEQ ID NO: 36849 - DNA, 25 bp, Probe sequence
acggaggatgtaagtagtaagaaat

SEQ ID NO: 36850 - DNA, 25 bp, Probe sequence
agaagaagaacgagaatacgatgaa

SEQ ID NO: 36851 - DNA, 25 bp, Probe sequence
ttcaagcacatacagtcattcaatc

SEQ ID NO: 36852 - DNA, 25 bp, Probe sequence
gttcaagcacatacagtcattcaat

SEQ ID NO: 36853 - DNA, 25 bp, Probe sequence
gagaacgagaagaagaacgagaata

SEQ ID NO: 36854 - DNA, 25 bp, Probe sequence
gagaagaagaacgagaatacgatga

SEQ ID NO: 36855 - DNA, 25 bp, Probe sequence
agaacgagaagaagaacgagaatac

SEQ ID NO: 36856 - DNA, 25 bp, Probe sequence
tgtatgagtggataagagcaagatt

SEQ ID NO: 36857 - DNA, 25 bp, Probe sequence
tcaagcacatacagtcattcaatct

SEQ ID NO: 36858 - DNA, 25 bp, Probe sequence
ttgattatgacgattggcagagatt

SEQ ID NO: 36859 - DNA, 25 bp, Probe sequence
tcatcgtattggcatctgacttatt

SEQ ID NO: 36860 - DNA, 25 bp, Probe sequence
tgatagtcaagacatgatggaacat

SEQ ID NO: 36861 - DNA, 25 bp, Probe sequence
aaatcaagcatcacataaagacacg

SEQ ID NO: 36862 - DNA, 25 bp, Probe sequence
catcgtattggcatctgacttattt

SEQ ID NO: 36863 - DNA, 25 bp, Probe sequence
gcaaatcaagcatcacataaagaca

SEQ ID NO: 36864 - DNA, 25 bp, Probe sequence
caaatcaagcatcacataaagacac

SEQ ID NO: 36865 - DNA, 25 bp, Probe sequence
tgggtttgtaatttgctatggacta

SEQ ID NO: 36866 - DNA, 25 bp, Probe sequence
tatgtgggtttgtaatttgctatgg

SEQ ID NO: 36867 - DNA, 25 bp, Probe sequence
actttatgtgggtttgtaatttgct

SEQ ID NO: 36868 - DNA, 25 bp, Probe sequence
gaacgcaactatgaatggcttatta

SEQ ID NO: 36869 - DNA, 25 bp, Probe sequence
acgcaactatgaatggcttattaac

SEQ ID NO: 36870 - DNA, 25 bp, Probe sequence
cgcaactatgaatggcttattaact

SEQ ID NO: 36871 - DNA, 25 bp, Probe sequence
tatgaacgcaactatgaatggctta

SEQ ID NO: 36872 - DNA, 25 bp, Probe sequence
aacgcaactatgaatggcttattaa

SEQ ID NO: 36873 - DNA, 25 bp, Probe sequence
aattatgaacgcaactatgaatggc

SEQ ID NO: 36874 - DNA, 25 bp, Probe sequence
atgaacgcaactatgaatggcttat

SEQ ID NO: 36875 - DNA, 25 bp, Probe sequence
attatgaacgcaactatgaatggct

SEQ ID NO: 36876 - DNA, 25 bp, Probe sequence
tgaacgcaactatgaatggcttatt

SEQ ID NO: 36877 - DNA, 25 bp, Probe sequence
gatagagtggcagttatgtatggtg

SEQ ID NO: 36878 - DNA, 25 bp, Probe sequence
tgatagagtggcagttatgtatggt

SEQ ID NO: 36879 - DNA, 25 bp, Probe sequence
atagagtggcagttatgtatggtgg

SEQ ID NO: 36880 - DNA, 25 bp, Probe sequence
ctgatagagtggcagttatgtatgg

SEQ ID NO: 36881 - DNA, 25 bp, Probe sequence
gttgttgcgaatattgctgatagag

SEQ ID NO: 36882 - DNA, 25 bp, Probe sequence
gctgatagagtggcagttatgtatg

SEQ ID NO: 36883 - DNA, 25 bp, Probe sequence
ttgttgcgaatattgctgatagagt

SEQ ID NO: 36884 - DNA, 25 bp, Probe sequence
tgttgcgaatattgctgatagagtg

SEQ ID NO: 36885 - DNA, 25 bp, Probe sequence
ggttgttgcgaatattgctgataga

SEQ ID NO: 36886 - DNA, 25 bp, Probe sequence
aggtattggtgatgaattgatggat

SEQ ID NO: 36887 - DNA, 25 bp, Probe sequence
tggtgatgaattgatggattggtat

SEQ ID NO: 36888 - DNA, 25 bp, Probe sequence
aaggtattggtgatgaattgatgga

SEQ ID NO: 36889 - DNA, 25 bp, Probe sequence
ttggtgatgaattgatggattggta

SEQ ID NO: 36890 - DNA, 25 bp, Probe sequence
tattggtgatgaattgatggattgg

SEQ ID NO: 36891 - DNA, 25 bp, Probe sequence
ggtattggtgatgaattgatggatt

SEQ ID NO: 36892 - DNA, 25 bp, Probe sequence
attggtgatgaattgatggattggt

SEQ ID NO: 36893 - DNA, 25 bp, Probe sequence
ggtgatgaattgatggattggtata

SEQ ID NO: 36894 - DNA, 25 bp, Probe sequence
gtattggtgatgaattgatggattg

SEQ ID NO: 36895 - DNA, 25 bp, Probe sequence
attatagttcatatagcgaggcgtt

SEQ ID NO: 36896 - DNA, 25 bp, Probe sequence
ttatagttcatatagcgaggcgtta

SEQ ID NO: 36897 - DNA, 25 bp, Probe sequence
aattatagttcatatagcgaggcgt

SEQ ID NO: 36898 - DNA, 25 bp, Probe sequence
tatagttcatatagcgaggcgttaa

SEQ ID NO: 36899 - DNA, 25 bp, Probe sequence
tattcggaagagtcattcgttagaa

SEQ ID NO: 36900 - DNA, 25 bp, Probe sequence
ttattcggaagagtcattcgttaga

SEQ ID NO: 36901 - DNA, 25 bp, Probe sequence
attcggaagagtcattcgttagaag

SEQ ID NO: 36902 - DNA, 25 bp, Probe sequence
attattcggaagagtcattcgttag

SEQ ID NO: 36903 - DNA, 25 bp, Probe sequence
ggaagagtcattcgttagaagtgat

SEQ ID NO: 36904 - DNA, 25 bp, Probe sequence
gttggattggaatgaactcagttat

SEQ ID NO: 36905 - DNA, 25 bp, Probe sequence
ttggattggaatgaactcagttata

SEQ ID NO: 36906 - DNA, 25 bp, Probe sequence
tggattggaatgaactcagttatat

SEQ ID NO: 36907 - DNA, 25 bp, Probe sequence
ggaattatagttggattggaatgaa

SEQ ID NO: 36908 - DNA, 25 bp, Probe sequence
gggaattatagttggattggaatga

SEQ ID NO: 36909 - DNA, 25 bp, Probe sequence
agggaattatagttggattggaatg

SEQ ID NO: 36910 - DNA, 25 bp, Probe sequence
atgaactcagttatattaccaggag

SEQ ID NO: 36911 - DNA, 25 bp, Probe sequence
aaataaagtggctggatggttatgg

SEQ ID NO: 36912 - DNA, 25 bp, Probe sequence
aatgaactcagttatattaccagga

SEQ ID NO: 36913 - DNA, 25 bp, Probe sequence
gcatcgctcaagtcatattaatcat

SEQ ID NO: 36914 - DNA, 25 bp, Probe sequence
tcgctcaagtcatattaatcatcac

SEQ ID NO: 36915 - DNA, 25 bp, Probe sequence
agtggcatcgctcaagtcatattaa

SEQ ID NO: 36916 - DNA, 25 bp, Probe sequence
ggcatcgctcaagtcatattaatca

SEQ ID NO: 36917 - DNA, 25 bp, Probe sequence
tggcatcgctcaagtcatattaatc

SEQ ID NO: 36918 - DNA, 25 bp, Probe sequence
gtggcatcgctcaagtcatattaat

SEQ ID NO: 36919 - DNA, 25 bp, Probe sequence
cgctcaagtcatattaatcatcact

SEQ ID NO: 36920 - DNA, 25 bp, Probe sequence
atcgctcaagtcatattaatcatca

SEQ ID NO: 36921 - DNA, 25 bp, Probe sequence
catcgctcaagtcatattaatcatc

SEQ ID NO: 36922 - DNA, 25 bp, Probe sequence
cattaggtttagtaggagaatcggg

SEQ ID NO: 36923 - DNA, 25 bp, Probe sequence
acattaggtttagtaggagaatcgg

SEQ ID NO: 36924 - DNA, 25 bp, Probe sequence
tggatatagtagctgaaggtattga

SEQ ID NO: 36925 - DNA, 25 bp, Probe sequence
agtaatggatatagtagctgaaggt

SEQ ID NO: 36926 - DNA, 25 bp, Probe sequence
agtagctgaaggtattgatatccat

SEQ ID NO: 36927 - DNA, 25 bp, Probe sequence
gtagctgaaggtattgatatccatc

SEQ ID NO: 36928 - DNA, 25 bp, Probe sequence
cgtgtctatgatttacttgaaactg

SEQ ID NO: 36929 - DNA, 25 bp, Probe sequence
tagtagctgaaggtattgatatcca

SEQ ID NO: 36930 - DNA, 25 bp, Probe sequence
ggtgtggtaaatctacaactggtaa

SEQ ID NO: 36931 - DNA, 25 bp, Probe sequence
tatcagtggttggagcataacttaa

SEQ ID NO: 36932 - DNA, 25 bp, Probe sequence
gtatcagtggttggagcataactta

SEQ ID NO: 36933 - DNA, 25 bp, Probe sequence
atcagtggttggagcataacttaac

SEQ ID NO: 36934 - DNA, 25 bp, Probe sequence
cagtggttggagcataacttaactt

SEQ ID NO: 36935 - DNA, 25 bp, Probe sequence
attggtatcagtggttggagcataa

SEQ ID NO: 36936 - DNA, 25 bp, Probe sequence
tcagtggttggagcataacttaact

SEQ ID NO: 36937 - DNA, 25 bp, Probe sequence
cattggtatcagtggttggagcata

SEQ ID NO: 36938 - DNA, 25 bp, Probe sequence
agtagaaatcattggtatcagtggt

SEQ ID NO: 36939 - DNA, 25 bp, Probe sequence
gatgcaagattacatgacacgatag

SEQ ID NO: 36940 - DNA, 25 bp, Probe sequence
tatattatgcgatggaaggttggtt

SEQ ID NO: 36941 - DNA, 25 bp, Probe sequence
tacgcaccaagtagtattaaggatt

SEQ ID NO: 36942 - DNA, 25 bp, Probe sequence
tatggttgattggaacattggtaga

SEQ ID NO: 36943 - DNA, 25 bp, Probe sequence
atggttgattggaacattggtagaa

SEQ ID NO: 36944 - DNA, 25 bp, Probe sequence
atatggttgattggaacattggtag

SEQ ID NO: 36945 - DNA, 25 bp, Probe sequence
atatattatgcgatggaaggttggt

SEQ ID NO: 36946 - DNA, 25 bp, Probe sequence
aatatggttgattggaacattggta

SEQ ID NO: 36947 - DNA, 25 bp, Probe sequence
gatatattatgcgatggaaggttgg

SEQ ID NO: 36948 - DNA, 25 bp, Probe sequence
gtaatcacgaatacgcaccaagtag

SEQ ID NO: 36949 - DNA, 25 bp, Probe sequence
atgaacacagaagatacaccagatg

SEQ ID NO: 36950 - DNA, 25 bp, Probe sequence
tcaattccttccgatacactaacag

SEQ ID NO: 36951 - DNA, 25 bp, Probe sequence
caattccttccgatacactaacagc

SEQ ID NO: 36952 - DNA, 25 bp, Probe sequence
agagtatcactagaactgagtaaca

SEQ ID NO: 36953 - DNA, 25 bp, Probe sequence
aattccttccgatacactaacagcc

SEQ ID NO: 36954 - DNA, 25 bp, Probe sequence
ggcttatttagaaacaatgaccaca

SEQ ID NO: 36955 - DNA, 25 bp, Probe sequence
tgaacacagaagatacaccagatgc

SEQ ID NO: 36956 - DNA, 25 bp, Probe sequence
tgtagagcaattaggtatcaaagca

SEQ ID NO: 36957 - DNA, 25 bp, Probe sequence
ctgtagagcaattaggtatcaaagc

SEQ ID NO: 36958 - DNA, 25 bp, Probe sequence
tgaagaagtaatcgcagagttgtaa

SEQ ID NO: 36959 - DNA, 25 bp, Probe sequence
cagagcaagattaggtaatgaggta

SEQ ID NO: 36960 - DNA, 25 bp, Probe sequence
ttcagagcaagattaggtaatgagg

SEQ ID NO: 36961 - DNA, 25 bp, Probe sequence
acatatccacgacttagagtaactg

SEQ ID NO: 36962 - DNA, 25 bp, Probe sequence
gagcaagattaggtaatgaggtact

SEQ ID NO: 36963 - DNA, 25 bp, Probe sequence
agagcaagattaggtaatgaggtac

SEQ ID NO: 36964 - DNA, 25 bp, Probe sequence
aacatatccacgacttagagtaact

SEQ ID NO: 36965 - DNA, 25 bp, Probe sequence
tcagagcaagattaggtaatgaggt

SEQ ID NO: 36966 - DNA, 25 bp, Probe sequence
agcaagattaggtaatgaggtactt

SEQ ID NO: 36967 - DNA, 25 bp, Probe sequence
tgaatgatgagttacctggattacc

SEQ ID NO: 36968 - DNA, 25 bp, Probe sequence
aatgctggtctcaaggtattatctg

SEQ ID NO: 36969 - DNA, 25 bp, Probe sequence
taagtcatctaatgctggtctcaag

SEQ ID NO: 36970 - DNA, 25 bp, Probe sequence
ctaagtcatctaatgctggtctcaa

SEQ ID NO: 36971 - DNA, 25 bp, Probe sequence
catctaatgctggtctcaaggtatt

SEQ ID NO: 36972 - DNA, 25 bp, Probe sequence
aggtgcttattatccaagtgtagaa

SEQ ID NO: 36973 - DNA, 25 bp, Probe sequence
aaggtgcttattatccaagtgtaga

SEQ ID NO: 36974 - DNA, 25 bp, Probe sequence
cgaaggtgcttattatccaagtgta

SEQ ID NO: 36975 - DNA, 25 bp, Probe sequence
tacgaaggtgcttattatccaagtg

SEQ ID NO: 36976 - DNA, 25 bp, Probe sequence
atccacaagaactagaacatactgc

SEQ ID NO: 36977 - DNA, 25 bp, Probe sequence
tccatatccacaagaactagaacat

SEQ ID NO: 36978 - DNA, 25 bp, Probe sequence
atccatatccacaagaactagaaca

SEQ ID NO: 36979 - DNA, 25 bp, Probe sequence
ttggttggcaatctgaaggtaatac

SEQ ID NO: 36980 - DNA, 25 bp, Probe sequence
tgatccatatccacaagaactagaa

SEQ ID NO: 36981 - DNA, 25 bp, Probe sequence
gatccatatccacaagaactagaac

SEQ ID NO: 36982 - DNA, 25 bp, Probe sequence
gtactagcaccacattattcttcat

SEQ ID NO: 36983 - DNA, 25 bp, Probe sequence
atgatccatatccacaagaactaga

SEQ ID NO: 36984 - DNA, 25 bp, Probe sequence
tggttggcaatctgaaggtaataca

SEQ ID NO: 36985 - DNA, 25 bp, Probe sequence
tgcggtaagtccatattaagtaagt

SEQ ID NO: 36986 - DNA, 25 bp, Probe sequence
ggttgcggtaagtccatattaagta

SEQ ID NO: 36987 - DNA, 25 bp, Probe sequence
gcggtaagtccatattaagtaagtc

SEQ ID NO: 36988 - DNA, 25 bp, Probe sequence
gttgcggtaagtccatattaagtaa

SEQ ID NO: 36989 - DNA, 25 bp, Probe sequence
ttgcggtaagtccatattaagtaag

SEQ ID NO: 36990 - DNA, 25 bp, Probe sequence
cggtaagtccatattaagtaagtca

SEQ ID NO: 36991 - DNA, 25 bp, Probe sequence
tggcaattatgatgattacacatga

SEQ ID NO: 36992 - DNA, 25 bp, Probe sequence
taatgaatggttagcaactgttgaa

SEQ ID NO: 36993 - DNA, 25 bp, Probe sequence
ataatgaatggttagcaactgttga

SEQ ID NO: 36994 - DNA, 25 bp, Probe sequence
cgatgatgtatagagatgaagcaac

SEQ ID NO: 36995 - DNA, 25 bp, Probe sequence
aagcgatgatgtatagagatgaagc

SEQ ID NO: 36996 - DNA, 25 bp, Probe sequence
gcgatgatgtatagagatgaagcaa

SEQ ID NO: 36997 - DNA, 25 bp, Probe sequence
agcgatgatgtatagagatgaagca

SEQ ID NO: 36998 - DNA, 25 bp, Probe sequence
tagatcaaggtatggagaacggtaa

SEQ ID NO: 36999 - DNA, 25 bp, Probe sequence
ttagatcaaggtatggagaacggta

SEQ ID NO: 37000 - DNA, 25 bp, Probe sequence
tattagatcaaggtatggagaacgg

SEQ ID NO: 37001 - DNA, 25 bp, Probe sequence
atggaatgtcattgaagagagattg

SEQ ID NO: 37002 - DNA, 25 bp, Probe sequence
attagatcaaggtatggagaacggt

SEQ ID NO: 37003 - DNA, 25 bp, Probe sequence
agcctgtaagtgcattagatgtatc

SEQ ID NO: 37004 - DNA, 25 bp, Probe sequence
gagcctgtaagtgcattagatgtat

SEQ ID NO: 37005 - DNA, 25 bp, Probe sequence
gcctgtaagtgcattagatgtatct

SEQ ID NO: 37006 - DNA, 25 bp, Probe sequence
cctgtaagtgcattagatgtatctg

SEQ ID NO: 37007 - DNA, 25 bp, Probe sequence
gatgtatctgttcaatctcaagtac

SEQ ID NO: 37008 - DNA, 25 bp, Probe sequence
tgagcctgtaagtgcattagatgta

SEQ ID NO: 37009 - DNA, 25 bp, Probe sequence
gatgagcctgtaagtgcattagatg

SEQ ID NO: 37010 - DNA, 25 bp, Probe sequence
aagtgcattagatgtatctgttcaa

SEQ ID NO: 37011 - DNA, 25 bp, Probe sequence
ctgtaagtgcattagatgtatctgt

SEQ ID NO: 37012 - DNA, 25 bp, Probe sequence
tacgaacgaatgagcgatatgataa

SEQ ID NO: 37013 - DNA, 25 bp, Probe sequence
atacgaacgaatgagcgatatgata

SEQ ID NO: 37014 - DNA, 25 bp, Probe sequence
acgaacgaatgagcgatatgataat

SEQ ID NO: 37015 - DNA, 25 bp, Probe sequence
aatacgaacgaatgagcgatatgat

SEQ ID NO: 37016 - DNA, 25 bp, Probe sequence
cgaacgaatgagcgatatgataata

SEQ ID NO: 37017 - DNA, 25 bp, Probe sequence
aaatacgaacgaatgagcgatatga

SEQ ID NO: 37018 - DNA, 25 bp, Probe sequence
gaacgaatgagcgatatgataatat

SEQ ID NO: 37019 - DNA, 25 bp, Probe sequence
acgaatgagcgatatgataatatag

SEQ ID NO: 37020 - DNA, 25 bp, Probe sequence
cgaatgagcgatatgataatataga

SEQ ID NO: 37021 - DNA, 25 bp, Probe sequence
ttcatacagttcggtcaatcgtatt

SEQ ID NO: 37022 - DNA, 25 bp, Probe sequence
aagttgtagtaaatccgttgtttgc

SEQ ID NO: 37023 - DNA, 25 bp, Probe sequence
atttcatacagttcggtcaatcgta

SEQ ID NO: 37024 - DNA, 25 bp, Probe sequence
ggaatttcatacagttcggtcaatc

SEQ ID NO: 37025 - DNA, 25 bp, Probe sequence
gaatttcatacagttcggtcaatcg

SEQ ID NO: 37026 - DNA, 25 bp, Probe sequence
aatttcatacagttcggtcaatcgt

SEQ ID NO: 37027 - DNA, 25 bp, Probe sequence
tggaatttcatacagttcggtcaat

SEQ ID NO: 37028 - DNA, 25 bp, Probe sequence
tttggaatttcatacagttcggtca

SEQ ID NO: 37029 - DNA, 25 bp, Probe sequence
caagttgtagtaaatccgttgtttg

SEQ ID NO: 37030 - DNA, 25 bp, Probe sequence
aagattatgtattgacggcaaggtc

SEQ ID NO: 37031 - DNA, 25 bp, Probe sequence
aaagattatgtattgacggcaaggt

SEQ ID NO: 37032 - DNA, 25 bp, Probe sequence
ggcaaggtcaaaaggattatctatg

SEQ ID NO: 37033 - DNA, 25 bp, Probe sequence
ttatctactgctggttatattcaat

SEQ ID NO: 37034 - DNA, 25 bp, Probe sequence
attatctactgctggttatattcaa

SEQ ID NO: 37035 - DNA, 25 bp, Probe sequence
cggcaaggtcaaaaggattatctat

SEQ ID NO: 37036 - DNA, 25 bp, Probe sequence
aaaagattatgtattgacggcaagg

SEQ ID NO: 37037 - DNA, 25 bp, Probe sequence
tttcatataacggtatcggtaaatt

SEQ ID NO: 37038 - DNA, 25 bp, Probe sequence
gcaaggtcaaaaggattatctatga

SEQ ID NO: 37039 - DNA, 25 bp, Probe sequence
ttaagatggcaatggtatcaatcgg

SEQ ID NO: 37040 - DNA, 25 bp, Probe sequence
tgttattgtaatgttcccgttgttt

SEQ ID NO: 37041 - DNA, 25 bp, Probe sequence
ttgttattgtaatgttcccgttgtt

SEQ ID NO: 37042 - DNA, 25 bp, Probe sequence
attgttattgtaatgttcccgttgt

SEQ ID NO: 37043 - DNA, 25 bp, Probe sequence
gttgctttgcctgtgttaatagaat

SEQ ID NO: 37044 - DNA, 25 bp, Probe sequence
tgctttgcctgtgttaatagaattt

SEQ ID NO: 37045 - DNA, 25 bp, Probe sequence
ttgctttgcctgtgttaatagaatt

SEQ ID NO: 37046 - DNA, 25 bp, Probe sequence
taagagggagagacgcatttaatat

SEQ ID NO: 37047 - DNA, 25 bp, Probe sequence
ataagagggagagacgcatttaata

SEQ ID NO: 37048 - DNA, 25 bp, Probe sequence
acgactcaataccacatcaatacat

SEQ ID NO: 37049 - DNA, 25 bp, Probe sequence
caacgactcaataccacatcaatac

SEQ ID NO: 37050 - DNA, 25 bp, Probe sequence
tcaacgactcaataccacatcaata

SEQ ID NO: 37051 - DNA, 25 bp, Probe sequence
ttcattagcaatcatacaaccagga

SEQ ID NO: 37052 - DNA, 25 bp, Probe sequence
aacgactcaataccacatcaataca

SEQ ID NO: 37053 - DNA, 25 bp, Probe sequence
attagcaatcatacaaccaggagat

SEQ ID NO: 37054 - DNA, 25 bp, Probe sequence
cattagcaatcatacaaccaggaga

SEQ ID NO: 37055 - DNA, 25 bp, Probe sequence
tcattagcaatcatacaaccaggag

SEQ ID NO: 37056 - DNA, 25 bp, Probe sequence
cgactcaataccacatcaatacatt

SEQ ID NO: 37057 - DNA, 25 bp, Probe sequence
gatgccacctgctataatgattaca

SEQ ID NO: 37058 - DNA, 25 bp, Probe sequence
tgattggaattacagttggagtgat

SEQ ID NO: 37059 - DNA, 25 bp, Probe sequence
ttgattggaattacagttggagtga

SEQ ID NO: 37060 - DNA, 25 bp, Probe sequence
atgccacctgctataatgattacat

SEQ ID NO: 37061 - DNA, 25 bp, Probe sequence
gattggaattacagttggagtgatt

SEQ ID NO: 37062 - DNA, 25 bp, Probe sequence
ggatgccacctgctataatgattac

SEQ ID NO: 37063 - DNA, 25 bp, Probe sequence
ggatctgccataattcttgttctag

SEQ ID NO: 37064 - DNA, 25 bp, Probe sequence
gatctgccataattcttgttctagt

SEQ ID NO: 37065 - DNA, 25 bp, Probe sequence
atctgccataattcttgttctagtt

SEQ ID NO: 37066 - DNA, 25 bp, Probe sequence
tatatattcatgtgacgcaaggtgg

SEQ ID NO: 37067 - DNA, 25 bp, Probe sequence
ttatcatactagacgaaggtgaagt

SEQ ID NO: 37068 - DNA, 25 bp, Probe sequence
tatcatactagacgaaggtgaagtc

SEQ ID NO: 37069 - DNA, 25 bp, Probe sequence
gaaccgttctaatgagtacacatat

SEQ ID NO: 37070 - DNA, 25 bp, Probe sequence
gtagaacagcttacaggtggatatg

SEQ ID NO: 37071 - DNA, 25 bp, Probe sequence
agtagaacagcttacaggtggatat

SEQ ID NO: 37072 - DNA, 25 bp, Probe sequence
acacctatggaaggatctctatcaa

SEQ ID NO: 37073 - DNA, 25 bp, Probe sequence
tacacctatggaaggatctctatca

SEQ ID NO: 37074 - DNA, 25 bp, Probe sequence
aaccgttctaatgagtacacatatt

SEQ ID NO: 37075 - DNA, 25 bp, Probe sequence
ctaacgaagtaacaccagaacaatg

SEQ ID NO: 37076 - DNA, 25 bp, Probe sequence
cgttatacacaagcagaatatagcg

SEQ ID NO: 37077 - DNA, 25 bp, Probe sequence
acctaatcatcaagttgccgtatat

SEQ ID NO: 37078 - DNA, 25 bp, Probe sequence
aattagacagaatagagagcgtagc

SEQ ID NO: 37079 - DNA, 25 bp, Probe sequence
tacgcaagcaattagacagaataga

SEQ ID NO: 37080 - DNA, 25 bp, Probe sequence
gcaattagacagaatagagagcgta

SEQ ID NO: 37081 - DNA, 25 bp, Probe sequence
caagcaattagacagaatagagagc

SEQ ID NO: 37082 - DNA, 25 bp, Probe sequence
gcaagcaattagacagaatagagag

SEQ ID NO: 37083 - DNA, 25 bp, Probe sequence
cacctaatcatcaagttgccgtata

SEQ ID NO: 37084 - DNA, 25 bp, Probe sequence
tcaatcattcaagataatcctggct

SEQ ID NO: 37085 - DNA, 25 bp, Probe sequence
ttcaatcattcaagataatcctggc

SEQ ID NO: 37086 - DNA, 25 bp, Probe sequence
caatcattcaagataatcctggctt

SEQ ID NO: 37087 - DNA, 25 bp, Probe sequence
ttcaagataatcctggcttattacg

SEQ ID NO: 37088 - DNA, 25 bp, Probe sequence
caagttggttataatgaggacgaga

SEQ ID NO: 37089 - DNA, 25 bp, Probe sequence
agttggttataatgaggacgagatt

SEQ ID NO: 37090 - DNA, 25 bp, Probe sequence
aagttggttataatgaggacgagat

SEQ ID NO: 37091 - DNA, 25 bp, Probe sequence
tacaagttggttataatgaggacga

SEQ ID NO: 37092 - DNA, 25 bp, Probe sequence
acaagttggttataatgaggacgag

SEQ ID NO: 37093 - DNA, 25 bp, Probe sequence
gtgaattgaacattgaaggagaaga

SEQ ID NO: 37094 - DNA, 25 bp, Probe sequence
cgtgaattgaacattgaaggagaag

SEQ ID NO: 37095 - DNA, 25 bp, Probe sequence
tcgtgaattgaacattgaaggagaa

SEQ ID NO: 37096 - DNA, 25 bp, Probe sequence
aattagactagcgacaactgaagat

SEQ ID NO: 37097 - DNA, 25 bp, Probe sequence
attgcgagtgatgaagtagttgaag

SEQ ID NO: 37098 - DNA, 25 bp, Probe sequence
gattgcgagtgatgaagtagttgaa

SEQ ID NO: 37099 - DNA, 25 bp, Probe sequence
tgaattgaacattgaaggagaagaa

SEQ ID NO: 37100 - DNA, 25 bp, Probe sequence
gttagagaattgagtggtcctgttg

SEQ ID NO: 37101 - DNA, 25 bp, Probe sequence
agttagagaattgagtggtcctgtt

SEQ ID NO: 37102 - DNA, 25 bp, Probe sequence
tgatgaatatgtctgatgatgatgc

SEQ ID NO: 37103 - DNA, 25 bp, Probe sequence
tcatagcaatccaataactacagag

SEQ ID NO: 37104 - DNA, 25 bp, Probe sequence
tagaacgagtagatgatacaactgt

SEQ ID NO: 37105 - DNA, 25 bp, Probe sequence
cattatggattcaagtacatgcctt

SEQ ID NO: 37106 - DNA, 25 bp, Probe sequence
catagcaatccaataactacagagt

SEQ ID NO: 37107 - DNA, 25 bp, Probe sequence
agaacgagtagatgatacaactgta

SEQ ID NO: 37108 - DNA, 25 bp, Probe sequence
atcatagcaatccaataactacaga

SEQ ID NO: 37109 - DNA, 25 bp, Probe sequence
gaacgagtagatgatacaactgtaa

SEQ ID NO: 37110 - DNA, 25 bp, Probe sequence
atagaacgagtagatgatacaactg

SEQ ID NO: 37111 - DNA, 25 bp, Probe sequence
aacagatggcagatatacgatgatt

SEQ ID NO: 37112 - DNA, 25 bp, Probe sequence
acagatggcagatatacgatgatta

SEQ ID NO: 37113 - DNA, 25 bp, Probe sequence
taacagatggcagatatacgatgat

SEQ ID NO: 37114 - DNA, 25 bp, Probe sequence
ttaacagatggcagatatacgatga

SEQ ID NO: 37115 - DNA, 25 bp, Probe sequence
tgatggcttagagattgaagttgaa

SEQ ID NO: 37116 - DNA, 25 bp, Probe sequence
atgatggcttagagattgaagttga

SEQ ID NO: 37117 - DNA, 25 bp, Probe sequence
gatgatggcttagagattgaagttg

SEQ ID NO: 37118 - DNA, 25 bp, Probe sequence
tgatgatggcttagagattgaagtt

SEQ ID NO: 37119 - DNA, 25 bp, Probe sequence
ttgatgatggcttagagattgaagt

SEQ ID NO: 37120 - DNA, 25 bp, Probe sequence
tttgtcagatatggctcaaggattt

SEQ ID NO: 37121 - DNA, 25 bp, Probe sequence
tcgctaatgttgattactttgaact

SEQ ID NO: 37122 - DNA, 25 bp, Probe sequence
ataaatcggatatacaatcggcaat

SEQ ID NO: 37123 - DNA, 25 bp, Probe sequence
taaatcggatatacaatcggcaatt

SEQ ID NO: 37124 - DNA, 25 bp, Probe sequence
ttgtcagatatggctcaaggatttc

SEQ ID NO: 37125 - DNA, 25 bp, Probe sequence
tgatggcgaagaattaaataagagt

SEQ ID NO: 37126 - DNA, 25 bp, Probe sequence
taagagtttgtcagatatggctcaa

SEQ ID NO: 37127 - DNA, 25 bp, Probe sequence
gtttgtcagatatggctcaaggatt

SEQ ID NO: 37128 - DNA, 25 bp, Probe sequence
ataagagtttgtcagatatggctca

SEQ ID NO: 37129 - DNA, 25 bp, Probe sequence
attgtagatggtggtatgagattcc

SEQ ID NO: 37130 - DNA, 25 bp, Probe sequence
tagatggtggtatgagattccgtta

SEQ ID NO: 37131 - DNA, 25 bp, Probe sequence
agactctgattacattactggacaa

SEQ ID NO: 37132 - DNA, 25 bp, Probe sequence
aagactctgattacattactggaca

SEQ ID NO: 37133 - DNA, 25 bp, Probe sequence
tagcgtctgaaggtattactgtgaa

SEQ ID NO: 37134 - DNA, 25 bp, Probe sequence
ttagcgtctgaaggtattactgtga

SEQ ID NO: 37135 - DNA, 25 bp, Probe sequence
agatggtggtatgagattccgttaa

SEQ ID NO: 37136 - DNA, 25 bp, Probe sequence
cgtctgaaggtattactgtgaatgc

SEQ ID NO: 37137 - DNA, 25 bp, Probe sequence
gcgtctgaaggtattactgtgaatg

SEQ ID NO: 37138 - DNA, 25 bp, Probe sequence
gctacagtattcgccaattccttat

SEQ ID NO: 37139 - DNA, 25 bp, Probe sequence
ttagcacagatgatacagcaacaag

SEQ ID NO: 37140 - DNA, 25 bp, Probe sequence
ctacagtattcgccaattccttata

SEQ ID NO: 37141 - DNA, 25 bp, Probe sequence
tagcacagatgatacagcaacaagg

SEQ ID NO: 37142 - DNA, 25 bp, Probe sequence
tacagtattcgccaattccttataa

SEQ ID NO: 37143 - DNA, 25 bp, Probe sequence
gttattgagctacagtattcgccaa

SEQ ID NO: 37144 - DNA, 25 bp, Probe sequence
tttagcacagatgatacagcaacaa

SEQ ID NO: 37145 - DNA, 25 bp, Probe sequence
attgagtggcaattacaagttgatt

SEQ ID NO: 37146 - DNA, 25 bp, Probe sequence
tataaacagattcttcaacgaacgg

SEQ ID NO: 37147 - DNA, 25 bp, Probe sequence
gaccatacagcattagttaatcgtg

SEQ ID NO: 37148 - DNA, 25 bp, Probe sequence
gagcaagttatgagaacaagattga

SEQ ID NO: 37149 - DNA, 25 bp, Probe sequence
agagcaagttatgagaacaagattg

SEQ ID NO: 37150 - DNA, 25 bp, Probe sequence
cgtcaacaattaagtgatatgcctg

SEQ ID NO: 37151 - DNA, 25 bp, Probe sequence
gcaagttatgagaacaagattgatg

SEQ ID NO: 37152 - DNA, 25 bp, Probe sequence
agcaagttatgagaacaagattgat

SEQ ID NO: 37153 - DNA, 25 bp, Probe sequence
gtcaacaattaagtgatatgcctgt

SEQ ID NO: 37154 - DNA, 25 bp, Probe sequence
acggataagacatctaagcaaggtt

SEQ ID NO: 37155 - DNA, 25 bp, Probe sequence
aacggataagacatctaagcaaggt

SEQ ID NO: 37156 - DNA, 25 bp, Probe sequence
taatcgtcaagaactgttatggcta

SEQ ID NO: 37157 - DNA, 25 bp, Probe sequence
tgttgttatatcggagcgtgattat

SEQ ID NO: 37158 - DNA, 25 bp, Probe sequence
atgttgttatatcggagcgtgatta

SEQ ID NO: 37159 - DNA, 25 bp, Probe sequence
ttaatcgtcaagaactgttatggct

SEQ ID NO: 37160 - DNA, 25 bp, Probe sequence
aatgttgttatatcggagcgtgatt

SEQ ID NO: 37161 - DNA, 25 bp, Probe sequence
aatcgtcaagaactgttatggctac

SEQ ID NO: 37162 - DNA, 25 bp, Probe sequence
gtagaacgaatgatgatattgacca

SEQ ID NO: 37163 - DNA, 25 bp, Probe sequence
aatatagtggtcttgtagagcgatt

SEQ ID NO: 37164 - DNA, 25 bp, Probe sequence
gttgttatatcggagcgtgattata

SEQ ID NO: 37165 - DNA, 25 bp, Probe sequence
attcggatattgagatgatgtgtgt

SEQ ID NO: 37166 - DNA, 25 bp, Probe sequence
ttcggatattgagatgatgtgtgtc

SEQ ID NO: 37167 - DNA, 25 bp, Probe sequence
cctattcggatattgagatgatgtg

SEQ ID NO: 37168 - DNA, 25 bp, Probe sequence
ggatgatgttaaggctattggtgtt

SEQ ID NO: 37169 - DNA, 25 bp, Probe sequence
tattcggatattgagatgatgtgtg

SEQ ID NO: 37170 - DNA, 25 bp, Probe sequence
atgattcaggtggatacttagagaa

SEQ ID NO: 37171 - DNA, 25 bp, Probe sequence
ctattcggatattgagatgatgtgt

SEQ ID NO: 37172 - DNA, 25 bp, Probe sequence
gcgaagagattctactagattatgc

SEQ ID NO: 37173 - DNA, 25 bp, Probe sequence
tatgattcaggtggatacttagaga

SEQ ID NO: 37174 - DNA, 25 bp, Probe sequence
tgtcaatcaggtgttagaagttcaa

SEQ ID NO: 37175 - DNA, 25 bp, Probe sequence
ttgtcaatcaggtgttagaagttca

SEQ ID NO: 37176 - DNA, 25 bp, Probe sequence
gtcaatcaggtgttagaagttcaat

SEQ ID NO: 37177 - DNA, 25 bp, Probe sequence
aagcaattcatattcctcacggtaa

SEQ ID NO: 37178 - DNA, 25 bp, Probe sequence
atcaggtgttagaagttcaatagcg

SEQ ID NO: 37179 - DNA, 25 bp, Probe sequence
aatcaggtgttagaagttcaatagc

SEQ ID NO: 37180 - DNA, 25 bp, Probe sequence
gttagaagttcaatagcggtaggaa

SEQ ID NO: 37181 - DNA, 25 bp, Probe sequence
ttagaagttcaatagcggtaggaat

SEQ ID NO: 37182 - DNA, 25 bp, Probe sequence
agaagttcaatagcggtaggaatat

SEQ ID NO: 37183 - DNA, 25 bp, Probe sequence
ggtgatagtgctgagacattataca

SEQ ID NO: 37184 - DNA, 25 bp, Probe sequence
tggtgatagtgctgagacattatac

SEQ ID NO: 37185 - DNA, 25 bp, Probe sequence
attggtgatagtgctgagacattat

SEQ ID NO: 37186 - DNA, 25 bp, Probe sequence
aggtaagccagcagtagatagatat

SEQ ID NO: 37187 - DNA, 25 bp, Probe sequence
aaggtaagccagcagtagatagata

SEQ ID NO: 37188 - DNA, 25 bp, Probe sequence
tagatatgacaacacctgaaccaat

SEQ ID NO: 37189 - DNA, 25 bp, Probe sequence
gtagatatgacaacacctgaaccaa

SEQ ID NO: 37190 - DNA, 25 bp, Probe sequence
cattggtgatagtgctgagacatta

SEQ ID NO: 37191 - DNA, 25 bp, Probe sequence
ttggtgatagtgctgagacattata

SEQ ID NO: 37192 - DNA, 25 bp, Probe sequence
actagcggtgttaataactacggaa

SEQ ID NO: 37193 - DNA, 25 bp, Probe sequence
tgattcactagcggtgttaataact

SEQ ID NO: 37194 - DNA, 25 bp, Probe sequence
ttgattcactagcggtgttaataac

SEQ ID NO: 37195 - DNA, 25 bp, Probe sequence
ttcactagcggtgttaataactacg

SEQ ID NO: 37196 - DNA, 25 bp, Probe sequence
attcactagcggtgttaataactac

SEQ ID NO: 37197 - DNA, 25 bp, Probe sequence
gattcactagcggtgttaataacta

SEQ ID NO: 37198 - DNA, 25 bp, Probe sequence
tagcggtgttaataactacggaaat

SEQ ID NO: 37199 - DNA, 25 bp, Probe sequence
cactagcggtgttaataactacgga

SEQ ID NO: 37200 - DNA, 25 bp, Probe sequence
tcactagcggtgttaataactacgg

SEQ ID NO: 37201 - DNA, 25 bp, Probe sequence
tgataataacaccactccttctgac

SEQ ID NO: 37202 - DNA, 25 bp, Probe sequence
gataataacaccactccttctgact

SEQ ID NO: 37203 - DNA, 25 bp, Probe sequence
taataacaccactccttctgactac

SEQ ID NO: 37204 - DNA, 25 bp, Probe sequence
ataacaccactccttctgactactt

SEQ ID NO: 37205 - DNA, 25 bp, Probe sequence
aataacaccactccttctgactact

SEQ ID NO: 37206 - DNA, 25 bp, Probe sequence
atgataataacaccactccttctga

SEQ ID NO: 37207 - DNA, 25 bp, Probe sequence
ataataacaccactccttctgacta

SEQ ID NO: 37208 - DNA, 25 bp, Probe sequence
aatgataataacaccactccttctg

SEQ ID NO: 37209 - DNA, 25 bp, Probe sequence
taatgataataacaccactccttct

SEQ ID NO: 37210 - DNA, 25 bp, Probe sequence
attatcagaagtatgtcccgaaagg

SEQ ID NO: 37211 - DNA, 25 bp, Probe sequence
caaggcagcgtttatacatcttatg

SEQ ID NO: 37212 - DNA, 25 bp, Probe sequence
tcaaggcagcgtttatacatcttat

SEQ ID NO: 37213 - DNA, 25 bp, Probe sequence
atcaaggcagcgtttatacatctta

SEQ ID NO: 37214 - DNA, 25 bp, Probe sequence
aaaggcattatcagaagtatgtccc

SEQ ID NO: 37215 - DNA, 25 bp, Probe sequence
cattatcagaagtatgtcccgaaag

SEQ ID NO: 37216 - DNA, 25 bp, Probe sequence
tgcttattatcaattatgcgaagaa

SEQ ID NO: 37217 - DNA, 25 bp, Probe sequence
gcattatcagaagtatgtcccgaaa

SEQ ID NO: 37218 - DNA, 25 bp, Probe sequence
atgcttattatcaattatgcgaaga

SEQ ID NO: 37219 - DNA, 25 bp, Probe sequence
ggattatctgaagtaggacaaatgc

SEQ ID NO: 37220 - DNA, 25 bp, Probe sequence
ttatctgaagtaggacaaatgctcg

SEQ ID NO: 37221 - DNA, 25 bp, Probe sequence
cattagatgatggtaaagcgtatgc

SEQ ID NO: 37222 - DNA, 25 bp, Probe sequence
acattagatgatggtaaagcgtatg

SEQ ID NO: 37223 - DNA, 25 bp, Probe sequence
attatctgaagtaggacaaatgctc

SEQ ID NO: 37224 - DNA, 25 bp, Probe sequence
gattatctgaagtaggacaaatgct

SEQ ID NO: 37225 - DNA, 25 bp, Probe sequence
gacaaatgctcgttgatagtgataa

SEQ ID NO: 37226 - DNA, 25 bp, Probe sequence
tatctgaagtaggacaaatgctcgt

SEQ ID NO: 37227 - DNA, 25 bp, Probe sequence
aagtaggacaaatgctcgttgatag

SEQ ID NO: 37228 - DNA, 25 bp, Probe sequence
agaatacaaagcaatcaaagaagca

SEQ ID NO: 37229 - DNA, 25 bp, Probe sequence
aagcgaagaatacaaagcaatcaaa

SEQ ID NO: 37230 - DNA, 25 bp, Probe sequence
aaagcgaagaatacaaagcaatcaa

SEQ ID NO: 37231 - DNA, 25 bp, Probe sequence
taagagaaagcgaagaatacaaagc

SEQ ID NO: 37232 - DNA, 25 bp, Probe sequence
agaaagcgaagaatacaaagcaatc

SEQ ID NO: 37233 - DNA, 25 bp, Probe sequence
gagaaagcgaagaatacaaagcaat

SEQ ID NO: 37234 - DNA, 25 bp, Probe sequence
gcgaagaatacaaagcaatcaaaga

SEQ ID NO: 37235 - DNA, 25 bp, Probe sequence
agcgaagaatacaaagcaatcaaag

SEQ ID NO: 37236 - DNA, 25 bp, Probe sequence
gaaagcgaagaatacaaagcaatca

SEQ ID NO: 37237 - DNA, 25 bp, Probe sequence
ggttatcgtaagattacagcactga

SEQ ID NO: 37238 - DNA, 25 bp, Probe sequence
gttatcgtaagattacagcactgat

SEQ ID NO: 37239 - DNA, 25 bp, Probe sequence
cggttatcgtaagattacagcactg

SEQ ID NO: 37240 - DNA, 25 bp, Probe sequence
cataagagagtacagagaatgatgc

SEQ ID NO: 37241 - DNA, 25 bp, Probe sequence
atcgtaagattacagcactgattaa

SEQ ID NO: 37242 - DNA, 25 bp, Probe sequence
ttatcgtaagattacagcactgatt

SEQ ID NO: 37243 - DNA, 25 bp, Probe sequence
tgtgaagctaaccattatacctacg

SEQ ID NO: 37244 - DNA, 25 bp, Probe sequence
gtgaagctaaccattatacctacgg

SEQ ID NO: 37245 - DNA, 25 bp, Probe sequence
taagagagtacagagaatgatgcag

SEQ ID NO: 37246 - DNA, 25 bp, Probe sequence
tgccaatgattatatgactaagcct

SEQ ID NO: 37247 - DNA, 25 bp, Probe sequence
gtgccaatgattatatgactaagcc

SEQ ID NO: 37248 - DNA, 25 bp, Probe sequence
ggtgccaatgattatatgactaagc

SEQ ID NO: 37249 - DNA, 25 bp, Probe sequence
aatcactctatggctatgtcaatca

SEQ ID NO: 37250 - DNA, 25 bp, Probe sequence
cggtgccaatgattatatgactaag

SEQ ID NO: 37251 - DNA, 25 bp, Probe sequence
ttccaactcctaacgatattatgcc

SEQ ID NO: 37252 - DNA, 25 bp, Probe sequence
ttattggtcgttgaagatgatgaag

SEQ ID NO: 37253 - DNA, 25 bp, Probe sequence
ccaactcctaacgatattatgccat

SEQ ID NO: 37254 - DNA, 25 bp, Probe sequence
gcctaagaacagaacaaccagatat

SEQ ID NO: 37255 - DNA, 25 bp, Probe sequence
tgctcaattcctattagacaacact

SEQ ID NO: 37256 - DNA, 25 bp, Probe sequence
ttgctcaattcctattagacaacac

SEQ ID NO: 37257 - DNA, 25 bp, Probe sequence
gctcaattcctattagacaacacta

SEQ ID NO: 37258 - DNA, 25 bp, Probe sequence
tgttcgtactattgaggtgtctgaa

SEQ ID NO: 37259 - DNA, 25 bp, Probe sequence
attgctcaattcctattagacaaca

SEQ ID NO: 37260 - DNA, 25 bp, Probe sequence
gtgttcgtactattgaggtgtctga

SEQ ID NO: 37261 - DNA, 25 bp, Probe sequence
attatgcaactctaacaacaacagc

SEQ ID NO: 37262 - DNA, 25 bp, Probe sequence
aaagaaatgcgaaagatgatacagg

SEQ ID NO: 37263 - DNA, 25 bp, Probe sequence
acattatgcaactctaacaacaaca

SEQ ID NO: 37264 - DNA, 25 bp, Probe sequence
cttccacgaaccttcattgattaac

SEQ ID NO: 37265 - DNA, 25 bp, Probe sequence
aagataaggtctctgttgctgataa

SEQ ID NO: 37266 - DNA, 25 bp, Probe sequence
ttccacgaaccttcattgattaact

SEQ ID NO: 37267 - DNA, 25 bp, Probe sequence
acttccacgaaccttcattgattaa

SEQ ID NO: 37268 - DNA, 25 bp, Probe sequence
aacttccacgaaccttcattgatta

SEQ ID NO: 37269 - DNA, 25 bp, Probe sequence
cacgaaccttcattgattaactcta

SEQ ID NO: 37270 - DNA, 25 bp, Probe sequence
ccacgaaccttcattgattaactct

SEQ ID NO: 37271 - DNA, 25 bp, Probe sequence
tccacgaaccttcattgattaactc

SEQ ID NO: 37272 - DNA, 25 bp, Probe sequence
atggtatattaagaggcaatgcgat

SEQ ID NO: 37273 - DNA, 25 bp, Probe sequence
agtagttgttggtacgattatgatt

SEQ ID NO: 37274 - DNA, 25 bp, Probe sequence
ttagtagttgttggtacgattatga

SEQ ID NO: 37275 - DNA, 25 bp, Probe sequence
ctcgtagatcaatgagattagctgg

SEQ ID NO: 37276 - DNA, 25 bp, Probe sequence
tagtagttgttggtacgattatgat

SEQ ID NO: 37277 - DNA, 25 bp, Probe sequence
tagtgatgaaatggctcaacaattc

SEQ ID NO: 37278 - DNA, 25 bp, Probe sequence
aaatagtgatgaaatggctcaacaa

SEQ ID NO: 37279 - DNA, 25 bp, Probe sequence
aatagtgatgaaatggctcaacaat

SEQ ID NO: 37280 - DNA, 25 bp, Probe sequence
atagtgatgaaatggctcaacaatt

SEQ ID NO: 37281 - DNA, 25 bp, Probe sequence
aacaaggctttggtttatctcgtag

SEQ ID NO: 37282 - DNA, 25 bp, Probe sequence
aacaatatgaagttggtgaacaagc

SEQ ID NO: 37283 - DNA, 25 bp, Probe sequence
gagattcagattcgtacattagcaa

SEQ ID NO: 37284 - DNA, 25 bp, Probe sequence
ttaccgctcgtatcatgtcattatt

SEQ ID NO: 37285 - DNA, 25 bp, Probe sequence
tgagattcagattcgtacattagca

SEQ ID NO: 37286 - DNA, 25 bp, Probe sequence
taccgctcgtatcatgtcattattg

SEQ ID NO: 37287 - DNA, 25 bp, Probe sequence
gttaccgctcgtatcatgtcattat

SEQ ID NO: 37288 - DNA, 25 bp, Probe sequence
agattcagattcgtacattagcaat

SEQ ID NO: 37289 - DNA, 25 bp, Probe sequence
cgctcgtatcatgtcattattgaat

SEQ ID NO: 37290 - DNA, 25 bp, Probe sequence
aatatgaagttggtgaacaagcgtc

SEQ ID NO: 37291 - DNA, 25 bp, Probe sequence
atctatgattcaacagcagttacaa

SEQ ID NO: 37292 - DNA, 25 bp, Probe sequence
aacgcaacagacttattatgtgatc

SEQ ID NO: 37293 - DNA, 25 bp, Probe sequence
taacgcaacagacttattatgtgat

SEQ ID NO: 37294 - DNA, 25 bp, Probe sequence
ataacgcaacagacttattatgtga

SEQ ID NO: 37295 - DNA, 25 bp, Probe sequence
caacagacttattatgtgatcgtgc

SEQ ID NO: 37296 - DNA, 25 bp, Probe sequence
gcaacagacttattatgtgatcgtg

SEQ ID NO: 37297 - DNA, 25 bp, Probe sequence
tgtgacatcgttaattaccaatgaa

SEQ ID NO: 37298 - DNA, 25 bp, Probe sequence
gataacgcaacagacttattatgtg

SEQ ID NO: 37299 - DNA, 25 bp, Probe sequence
agataacgcaacagacttattatgt

SEQ ID NO: 37300 - DNA, 25 bp, Probe sequence
ggaatgttcggtcttgtaataggtt

SEQ ID NO: 37301 - DNA, 25 bp, Probe sequence
ctcttcattaagtggtagtcaagga

SEQ ID NO: 37302 - DNA, 25 bp, Probe sequence
cgctatctgttcctagtcgtattac

SEQ ID NO: 37303 - DNA, 25 bp, Probe sequence
tactggtatcttggtcacattgatg

SEQ ID NO: 37304 - DNA, 25 bp, Probe sequence
ataggtactggtatcttggtcacat

SEQ ID NO: 37305 - DNA, 25 bp, Probe sequence
taggtactggtatcttggtcacatt

SEQ ID NO: 37306 - DNA, 25 bp, Probe sequence
aataggtactggtatcttggtcaca

SEQ ID NO: 37307 - DNA, 25 bp, Probe sequence
gctatctgttcctagtcgtattact

SEQ ID NO: 37308 - DNA, 25 bp, Probe sequence
caataggtactggtatcttggtcac

SEQ ID NO: 37309 - DNA, 25 bp, Probe sequence
ttagaggcgatggattatgtgtatc

SEQ ID NO: 37310 - DNA, 25 bp, Probe sequence
caggtcattgaatatccattgcttg

SEQ ID NO: 37311 - DNA, 25 bp, Probe sequence
ttattatgagatacaacgacaacgg

SEQ ID NO: 37312 - DNA, 25 bp, Probe sequence
tagaggcgatggattatgtgtatca

SEQ ID NO: 37313 - DNA, 25 bp, Probe sequence
tattatgagatacaacgacaacggc

SEQ ID NO: 37314 - DNA, 25 bp, Probe sequence
ctacaagcattccatcagtatagcc

SEQ ID NO: 37315 - DNA, 25 bp, Probe sequence
tacattactacaagcattccatcag

SEQ ID NO: 37316 - DNA, 25 bp, Probe sequence
ggtcattgaatatccattgcttgaa

SEQ ID NO: 37317 - DNA, 25 bp, Probe sequence
acattactacaagcattccatcagt

SEQ ID NO: 37318 - DNA, 25 bp, Probe sequence
atggttcgtatagaggctggttata

SEQ ID NO: 37319 - DNA, 25 bp, Probe sequence
atagaggctggttatacgcaagata

SEQ ID NO: 37320 - DNA, 25 bp, Probe sequence
tatagaggctggttatacgcaagat

SEQ ID NO: 37321 - DNA, 25 bp, Probe sequence
ctggttatacgcaagatactatggc

SEQ ID NO: 37322 - DNA, 25 bp, Probe sequence
gctggttatacgcaagatactatgg

SEQ ID NO: 37323 - DNA, 25 bp, Probe sequence
ggctggttatacgcaagatactatg

SEQ ID NO: 37324 - DNA, 25 bp, Probe sequence
aggctggttatacgcaagatactat

SEQ ID NO: 37325 - DNA, 25 bp, Probe sequence
aatggttcgtatagaggctggttat

SEQ ID NO: 37326 - DNA, 25 bp, Probe sequence
gaggctggttatacgcaagatacta

SEQ ID NO: 37327 - DNA, 25 bp, Probe sequence
caactggtattgtgatattcgctaa

SEQ ID NO: 37328 - DNA, 25 bp, Probe sequence
attgttaatgatgaaccagtcacag

SEQ ID NO: 37329 - DNA, 25 bp, Probe sequence
gctagaagtattgtatgaagatgct

SEQ ID NO: 37330 - DNA, 25 bp, Probe sequence
ttgttaatgatgaaccagtcacagt

SEQ ID NO: 37331 - DNA, 25 bp, Probe sequence
aattgttaatgatgaaccagtcaca

SEQ ID NO: 37332 - DNA, 25 bp, Probe sequence
tgggagattctttgtatgatggttt

SEQ ID NO: 37333 - DNA, 25 bp, Probe sequence
agctagaagtattgtatgaagatgc

SEQ ID NO: 37334 - DNA, 25 bp, Probe sequence
taattgttaatgatgaaccagtcac

SEQ ID NO: 37335 - DNA, 25 bp, Probe sequence
gtgggagattctttgtatgatggtt

SEQ ID NO: 37336 - DNA, 25 bp, Probe sequence
tgatgacgatgaatatgagttgcta

SEQ ID NO: 37337 - DNA, 25 bp, Probe sequence
attgatgacgatgaatatgagttgc

SEQ ID NO: 37338 - DNA, 25 bp, Probe sequence
ttgatgacgatgaatatgagttgct

SEQ ID NO: 37339 - DNA, 25 bp, Probe sequence
gatgacgatgaatatgagttgctat

SEQ ID NO: 37340 - DNA, 25 bp, Probe sequence
aagagcgtgttcaagaggaattata

SEQ ID NO: 37341 - DNA, 25 bp, Probe sequence
ccaagaagatgttgctcaagttatg

SEQ ID NO: 37342 - DNA, 25 bp, Probe sequence
ttatggatgaagaggctagtgaaga

SEQ ID NO: 37343 - DNA, 25 bp, Probe sequence
gttatggatgaagaggctagtgaag

SEQ ID NO: 37344 - DNA, 25 bp, Probe sequence
accaagaagatgttgctcaagttat

SEQ ID NO: 37345 - DNA, 25 bp, Probe sequence
ttgttctcgtattaacttagcctct

SEQ ID NO: 37346 - DNA, 25 bp, Probe sequence
tgttctcgtattaacttagcctcta

SEQ ID NO: 37347 - DNA, 25 bp, Probe sequence
attgttctcgtattaacttagcctc

SEQ ID NO: 37348 - DNA, 25 bp, Probe sequence
cagcagaccactgtcactatattaa

SEQ ID NO: 37349 - DNA, 25 bp, Probe sequence
aattgttctcgtattaacttagcct

SEQ ID NO: 37350 - DNA, 25 bp, Probe sequence
aatagcgtaggtgaacatgaacttg

SEQ ID NO: 37351 - DNA, 25 bp, Probe sequence
caatagcgtaggtgaacatgaactt

SEQ ID NO: 37352 - DNA, 25 bp, Probe sequence
atcaatagcgtaggtgaacatgaac

SEQ ID NO: 37353 - DNA, 25 bp, Probe sequence
catcaatagcgtaggtgaacatgaa

SEQ ID NO: 37354 - DNA, 25 bp, Probe sequence
attaacatcaacattatcgctcgtg

SEQ ID NO: 37355 - DNA, 25 bp, Probe sequence
cgatacagagttagttgattcaggt

SEQ ID NO: 37356 - DNA, 25 bp, Probe sequence
acgatacagagttagttgattcagg

SEQ ID NO: 37357 - DNA, 25 bp, Probe sequence
ggacgatacagagttagttgattca

SEQ ID NO: 37358 - DNA, 25 bp, Probe sequence
acgaatgacgatgatattaaccgaa

SEQ ID NO: 37359 - DNA, 25 bp, Probe sequence
gcttggattagtggatgatgtgtta

SEQ ID NO: 37360 - DNA, 25 bp, Probe sequence
cggacgatacagagttagttgattc

SEQ ID NO: 37361 - DNA, 25 bp, Probe sequence
gacgatacagagttagttgattcag

SEQ ID NO: 37362 - DNA, 25 bp, Probe sequence
tattaacatcaacattatcgctcgt

SEQ ID NO: 37363 - DNA, 25 bp, Probe sequence
aattgctaatgatgtgagatggttg

SEQ ID NO: 37364 - DNA, 25 bp, Probe sequence
tgaacgaagtagtaagttatgttgc

SEQ ID NO: 37365 - DNA, 25 bp, Probe sequence
gaacgaagtagtaagttatgttgct

SEQ ID NO: 37366 - DNA, 25 bp, Probe sequence
attgctaatgatgtgagatggttgg

SEQ ID NO: 37367 - DNA, 25 bp, Probe sequence
aagagattagtggctggcgttatat

SEQ ID NO: 37368 - DNA, 25 bp, Probe sequence
ctaatgatgtgagatggttggcttc

SEQ ID NO: 37369 - DNA, 25 bp, Probe sequence
atgaatgtgaacgaagtagtaagtt

SEQ ID NO: 37370 - DNA, 25 bp, Probe sequence
acgaagtagtaagttatgttgctaa

SEQ ID NO: 37371 - DNA, 25 bp, Probe sequence
tgtgaacgaagtagtaagttatgtt

SEQ ID NO: 37372 - DNA, 25 bp, Probe sequence
gatggtgtatatcattcaatcgcat

SEQ ID NO: 37373 - DNA, 25 bp, Probe sequence
atggtgtatatcattcaatcgcatt

SEQ ID NO: 37374 - DNA, 25 bp, Probe sequence
tattcatgtagatagcggattccac

SEQ ID NO: 37375 - DNA, 25 bp, Probe sequence
atattcatgtagatagcggattcca

SEQ ID NO: 37376 - DNA, 25 bp, Probe sequence
aatattcatgtagatagcggattcc

SEQ ID NO: 37377 - DNA, 25 bp, Probe sequence
atttgctaatatggaagacttacgc

SEQ ID NO: 37378 - DNA, 25 bp, Probe sequence
tggtgtatatcattcaatcgcattt

SEQ ID NO: 37379 - DNA, 25 bp, Probe sequence
tataatgtgatgggtgttgctaaag

SEQ ID NO: 37380 - DNA, 25 bp, Probe sequence
agaacaattaaatcaaccagaagcg

SEQ ID NO: 37381 - DNA, 25 bp, Probe sequence
gcttgttgctctaaatccatatacg

SEQ ID NO: 37382 - DNA, 25 bp, Probe sequence
cgcttgttgctctaaatccatatac

SEQ ID NO: 37383 - DNA, 25 bp, Probe sequence
acgcttgttgctctaaatccatata

SEQ ID NO: 37384 - DNA, 25 bp, Probe sequence
tacgcttgttgctctaaatccatat

SEQ ID NO: 37385 - DNA, 25 bp, Probe sequence
ttgttgctctaaatccatatacgac

SEQ ID NO: 37386 - DNA, 25 bp, Probe sequence
cttgttgctctaaatccatatacga

SEQ ID NO: 37387 - DNA, 25 bp, Probe sequence
gttgctctaaatccatatacgacaa

SEQ ID NO: 37388 - DNA, 25 bp, Probe sequence
tgttgctctaaatccatatacgaca

SEQ ID NO: 37389 - DNA, 25 bp, Probe sequence
tgctctaaatccatatacgacaatt

SEQ ID NO: 37390 - DNA, 25 bp, Probe sequence
acgattatctcagtaggtctattgc

SEQ ID NO: 37391 - DNA, 25 bp, Probe sequence
cgattatctcagtaggtctattgct

SEQ ID NO: 37392 - DNA, 25 bp, Probe sequence
cagcagaagtatcacatccaagtaa

SEQ ID NO: 37393 - DNA, 25 bp, Probe sequence
ttatctcagtaggtctattgcttcc

SEQ ID NO: 37394 - DNA, 25 bp, Probe sequence
atatacaagaagtgccagcgttatt

SEQ ID NO: 37395 - DNA, 25 bp, Probe sequence
aatatacaagaagtgccagcgttat

SEQ ID NO: 37396 - DNA, 25 bp, Probe sequence
tatcaatatacaagaagtgccagcg

SEQ ID NO: 37397 - DNA, 25 bp, Probe sequence
ttgttacgattatctcagtaggtct

SEQ ID NO: 37398 - DNA, 25 bp, Probe sequence
caatatacaagaagtgccagcgtta

SEQ ID NO: 37399 - DNA, 25 bp, Probe sequence
aacaccactatctaatttatctcaa

SEQ ID NO: 37400 - DNA, 25 bp, Probe sequence
aaacaccactatctaatttatctca

SEQ ID NO: 37401 - DNA, 25 bp, Probe sequence
agtattaacacacccaagatattat

SEQ ID NO: 37402 - DNA, 25 bp, Probe sequence
acaccactatctaatttatctcaat

SEQ ID NO: 37403 - DNA, 25 bp, Probe sequence
tagtattaacacacccaagatatta

SEQ ID NO: 37404 - DNA, 25 bp, Probe sequence
aacacacccaagatattataaaaca

SEQ ID NO: 37405 - DNA, 25 bp, Probe sequence
acacacccaagatattataaaacat

SEQ ID NO: 37406 - DNA, 25 bp, Probe sequence
acccaagatattataaaacatcaca

SEQ ID NO: 37407 - DNA, 25 bp, Probe sequence
acacccaagatattataaaacatca

SEQ ID NO: 37408 - DNA, 25 bp, Probe sequence
gcgtttctatgtcatcaacaatcat

SEQ ID NO: 37409 - DNA, 25 bp, Probe sequence
tttccgattgtgattacatttgacg

SEQ ID NO: 37410 - DNA, 25 bp, Probe sequence
acgatactttccgattgtgattaca

SEQ ID NO: 37411 - DNA, 25 bp, Probe sequence
cgatactttccgattgtgattacat

SEQ ID NO: 37412 - DNA, 25 bp, Probe sequence
ctgcgtttctatgtcatcaacaatc

SEQ ID NO: 37413 - DNA, 25 bp, Probe sequence
actttccgattgtgattacatttga

SEQ ID NO: 37414 - DNA, 25 bp, Probe sequence
ctttccgattgtgattacatttgac

SEQ ID NO: 37415 - DNA, 25 bp, Probe sequence
cacgatactttccgattgtgattac

SEQ ID NO: 37416 - DNA, 25 bp, Probe sequence
tgcgtttctatgtcatcaacaatca

SEQ ID NO: 37417 - DNA, 25 bp, Probe sequence
ttagtcgtgtagcaatgttaagtcc

SEQ ID NO: 37418 - DNA, 25 bp, Probe sequence
tagtcgtgtagcaatgttaagtcca

SEQ ID NO: 37419 - DNA, 25 bp, Probe sequence
tcttaacaccgaatagagaattagc

SEQ ID NO: 37420 - DNA, 25 bp, Probe sequence
accgaatagagaattagctgaacaa

SEQ ID NO: 37421 - DNA, 25 bp, Probe sequence
aacaccgaatagagaattagctgaa

SEQ ID NO: 37422 - DNA, 25 bp, Probe sequence
caccgaatagagaattagctgaaca

SEQ ID NO: 37423 - DNA, 25 bp, Probe sequence
acaccgaatagagaattagctgaac

SEQ ID NO: 37424 - DNA, 25 bp, Probe sequence
taacaccgaatagagaattagctga

SEQ ID NO: 37425 - DNA, 25 bp, Probe sequence
ttaacaccgaatagagaattagctg

SEQ ID NO: 37426 - DNA, 25 bp, Probe sequence
tcaaggactaatggaagcaagagaa

SEQ ID NO: 37427 - DNA, 25 bp, Probe sequence
agtattcgtcaaggactaatggaag

SEQ ID NO: 37428 - DNA, 25 bp, Probe sequence
gtattcgtcaaggactaatggaagc

SEQ ID NO: 37429 - DNA, 25 bp, Probe sequence
tattcgtcaaggactaatggaagca

SEQ ID NO: 37430 - DNA, 25 bp, Probe sequence
aaggactaatggaagcaagagaaat

SEQ ID NO: 37431 - DNA, 25 bp, Probe sequence
tagtattcgtcaaggactaatggaa

SEQ ID NO: 37432 - DNA, 25 bp, Probe sequence
cgatgagcaaggtaagttaaatgtt

SEQ ID NO: 37433 - DNA, 25 bp, Probe sequence
aggactaatggaagcaagagaaatt

SEQ ID NO: 37434 - DNA, 25 bp, Probe sequence
caaggactaatggaagcaagagaaa

SEQ ID NO: 37435 - DNA, 25 bp, Probe sequence
tggttagagacaacatcatattggt

SEQ ID NO: 37436 - DNA, 25 bp, Probe sequence
ggttagagacaacatcatattggtt

SEQ ID NO: 37437 - DNA, 25 bp, Probe sequence
ttggttagagacaacatcatattgg

SEQ ID NO: 37438 - DNA, 25 bp, Probe sequence
agtaacagttgtaccattaagttca

SEQ ID NO: 37439 - DNA, 25 bp, Probe sequence
ttgaacaagacagttgataatatcg

SEQ ID NO: 37440 - DNA, 25 bp, Probe sequence
attggttagagacaacatcatattg

SEQ ID NO: 37441 - DNA, 25 bp, Probe sequence
gtaacagttgtaccattaagttcaa

SEQ ID NO: 37442 - DNA, 25 bp, Probe sequence
acacagaatgtagtaactattagca

SEQ ID NO: 37443 - DNA, 25 bp, Probe sequence
cacacagaatgtagtaactattagc

SEQ ID NO: 37444 - DNA, 25 bp, Probe sequence
ggttagagcattacaagacacattc

SEQ ID NO: 37445 - DNA, 25 bp, Probe sequence
ctcttgttattgttattcgttccgt

SEQ ID NO: 37446 - DNA, 25 bp, Probe sequence
tggttagagcattacaagacacatt

SEQ ID NO: 37447 - DNA, 25 bp, Probe sequence
tctcttgttattgttattcgttccg

SEQ ID NO: 37448 - DNA, 25 bp, Probe sequence
tagagcattacaagacacattcagg

SEQ ID NO: 37449 - DNA, 25 bp, Probe sequence
gttagagcattacaagacacattca

SEQ ID NO: 37450 - DNA, 25 bp, Probe sequence
tcttgttattgttattcgttccgtt

SEQ ID NO: 37451 - DNA, 25 bp, Probe sequence
ttagagcattacaagacacattcag

SEQ ID NO: 37452 - DNA, 25 bp, Probe sequence
atggttagagcattacaagacacat

SEQ ID NO: 37453 - DNA, 25 bp, Probe sequence
aggcattagattaacggataacgat

SEQ ID NO: 37454 - DNA, 25 bp, Probe sequence
aaggcattagattaacggataacga

SEQ ID NO: 37455 - DNA, 25 bp, Probe sequence
ggcattagattaacggataacgata

SEQ ID NO: 37456 - DNA, 25 bp, Probe sequence
acagcaagcgaaataagtaaacaaa

SEQ ID NO: 37457 - DNA, 25 bp, Probe sequence
gaagacagcaagcgaaataagtaaa

SEQ ID NO: 37458 - DNA, 25 bp, Probe sequence
agtattctcaagggcatataagtgg

SEQ ID NO: 37459 - DNA, 25 bp, Probe sequence
aagacagcaagcgaaataagtaaac

SEQ ID NO: 37460 - DNA, 25 bp, Probe sequence
gcagtattctcaagggcatataagt

SEQ ID NO: 37461 - DNA, 25 bp, Probe sequence
gcattagattaacggataacgataa

SEQ ID NO: 37462 - DNA, 25 bp, Probe sequence
aacgctagatatcgatggtacaatt

SEQ ID NO: 37463 - DNA, 25 bp, Probe sequence
acgctagatatcgatggtacaatta

SEQ ID NO: 37464 - DNA, 25 bp, Probe sequence
cgctagatatcgatggtacaattaa

SEQ ID NO: 37465 - DNA, 25 bp, Probe sequence
aaacgctagatatcgatggtacaat

SEQ ID NO: 37466 - DNA, 25 bp, Probe sequence
gcagtttcaaattgctaatggcatg

SEQ ID NO: 37467 - DNA, 25 bp, Probe sequence
gctagatatcgatggtacaattaat

SEQ ID NO: 37468 - DNA, 25 bp, Probe sequence
tgcagtttcaaattgctaatggcat

SEQ ID NO: 37469 - DNA, 25 bp, Probe sequence
aaaacgctagatatcgatggtacaa

SEQ ID NO: 37470 - DNA, 25 bp, Probe sequence
taaaacgctagatatcgatggtaca

SEQ ID NO: 37471 - DNA, 25 bp, Probe sequence
cacaaggactatctagccaagaatt

SEQ ID NO: 37472 - DNA, 25 bp, Probe sequence
gaagacggacgacttagaagaattg

SEQ ID NO: 37473 - DNA, 25 bp, Probe sequence
tacaatagcacaaggactatctagc

SEQ ID NO: 37474 - DNA, 25 bp, Probe sequence
agacggacgacttagaagaattgtt

SEQ ID NO: 37475 - DNA, 25 bp, Probe sequence
aagacggacgacttagaagaattgt

SEQ ID NO: 37476 - DNA, 25 bp, Probe sequence
aatagcacaaggactatctagccaa

SEQ ID NO: 37477 - DNA, 25 bp, Probe sequence
atagcacaaggactatctagccaag

SEQ ID NO: 37478 - DNA, 25 bp, Probe sequence
gacgatgacgaagataaatggaaag

SEQ ID NO: 37479 - DNA, 25 bp, Probe sequence
gcacaaggactatctagccaagaat

SEQ ID NO: 37480 - DNA, 25 bp, Probe sequence
ctaatactggtaacattgcacgtac

SEQ ID NO: 37481 - DNA, 25 bp, Probe sequence
attcctatgagtgaacatattcgtt

SEQ ID NO: 37482 - DNA, 25 bp, Probe sequence
aattcctatgagtgaacatattcgt

SEQ ID NO: 37483 - DNA, 25 bp, Probe sequence
gctaatactggtaacattgcacgta

SEQ ID NO: 37484 - DNA, 25 bp, Probe sequence
aacctcttggatttagaactgatga

SEQ ID NO: 37485 - DNA, 25 bp, Probe sequence
acctcttggatttagaactgatgat

SEQ ID NO: 37486 - DNA, 25 bp, Probe sequence
cggtttagattattgggaatttgtg

SEQ ID NO: 37487 - DNA, 25 bp, Probe sequence
tgggtgaaagagaaatatcaagaca

SEQ ID NO: 37488 - DNA, 25 bp, Probe sequence
aaacctcttggatttagaactgatg

SEQ ID NO: 37489 - DNA, 25 bp, Probe sequence
tagttatggaattgatgaggaagcc

SEQ ID NO: 37490 - DNA, 25 bp, Probe sequence
ttagttatggaattgatgaggaagc

SEQ ID NO: 37491 - DNA, 25 bp, Probe sequence
ggtgtaagttggtagtggtcaataa

SEQ ID NO: 37492 - DNA, 25 bp, Probe sequence
gattatccgagtcatcagttagtga

SEQ ID NO: 37493 - DNA, 25 bp, Probe sequence
ggtagtggtcaataaagaacaatca

SEQ ID NO: 37494 - DNA, 25 bp, Probe sequence
tggtagtggtcaataaagaacaatc

SEQ ID NO: 37495 - DNA, 25 bp, Probe sequence
tattaaggtgccacatcgagatgat

SEQ ID NO: 37496 - DNA, 25 bp, Probe sequence
atattaaggtgccacatcgagatga

SEQ ID NO: 37497 - DNA, 25 bp, Probe sequence
catattaaggtgccacatcgagatg

SEQ ID NO: 37498 - DNA, 25 bp, Probe sequence
gctatatgcctgaccaatatcgtta

SEQ ID NO: 37499 - DNA, 25 bp, Probe sequence
aacagcaaggtcaatcatagcaatt

SEQ ID NO: 37500 - DNA, 25 bp, Probe sequence
ctatatgcctgaccaatatcgttat

SEQ ID NO: 37501 - DNA, 25 bp, Probe sequence
caacagcaaggtcaatcatagcaat

SEQ ID NO: 37502 - DNA, 25 bp, Probe sequence
gaatagattatatggttgcgatacg

SEQ ID NO: 37503 - DNA, 25 bp, Probe sequence
taataccgaacaagatgacatcatt

SEQ ID NO: 37504 - DNA, 25 bp, Probe sequence
ttaataccgaacaagatgacatcat

SEQ ID NO: 37505 - DNA, 25 bp, Probe sequence
ggaatagattatatggttgcgatac

SEQ ID NO: 37506 - DNA, 25 bp, Probe sequence
attaataccgaacaagatgacatca

SEQ ID NO: 37507 - DNA, 25 bp, Probe sequence
accagataatcattgctataccaga

SEQ ID NO: 37508 - DNA, 25 bp, Probe sequence
gcatcacaactaacagattggatag

SEQ ID NO: 37509 - DNA, 25 bp, Probe sequence
catcacaactaacagattggataga

SEQ ID NO: 37510 - DNA, 25 bp, Probe sequence
ccagataatcattgctataccagat

SEQ ID NO: 37511 - DNA, 25 bp, Probe sequence
atcacaactaacagattggatagaa

SEQ ID NO: 37512 - DNA, 25 bp, Probe sequence
ttaaagaagaggaagaggcagaatc

SEQ ID NO: 37513 - DNA, 25 bp, Probe sequence
tgcatcacaactaacagattggata

SEQ ID NO: 37514 - DNA, 25 bp, Probe sequence
gattgcatcacaactaacagattgg

SEQ ID NO: 37515 - DNA, 25 bp, Probe sequence
ttgcatcacaactaacagattggat

SEQ ID NO: 37516 - DNA, 25 bp, Probe sequence
tatccgaatcaattatcaggtggtc

SEQ ID NO: 37517 - DNA, 25 bp, Probe sequence
atatccgaatcaattatcaggtggt

SEQ ID NO: 37518 - DNA, 25 bp, Probe sequence
cctgaggtagttggtgatgtattaa

SEQ ID NO: 37519 - DNA, 25 bp, Probe sequence
tcctgaggtagttggtgatgtatta

SEQ ID NO: 37520 - DNA, 25 bp, Probe sequence
gtagcaataataggtccatctggta

SEQ ID NO: 37521 - DNA, 25 bp, Probe sequence
gcaataataggtccatctggtagtg

SEQ ID NO: 37522 - DNA, 25 bp, Probe sequence
agcaataataggtccatctggtagt

SEQ ID NO: 37523 - DNA, 25 bp, Probe sequence
tagcaataataggtccatctggtag

SEQ ID NO: 37524 - DNA, 25 bp, Probe sequence
agtagcaataataggtccatctggt

SEQ ID NO: 37525 - DNA, 25 bp, Probe sequence
gagtatgatgaaggaatgccagaat

SEQ ID NO: 37526 - DNA, 25 bp, Probe sequence
agtatgatgaaggaatgccagaatc

SEQ ID NO: 37527 - DNA, 25 bp, Probe sequence
caatacgagtatgatgaaggaatgc

SEQ ID NO: 37528 - DNA, 25 bp, Probe sequence
ctacagtggataggttgaagagttc

SEQ ID NO: 37529 - DNA, 25 bp, Probe sequence
aatacgagtatgatgaaggaatgcc

SEQ ID NO: 37530 - DNA, 25 bp, Probe sequence
acaatacgagtatgatgaaggaatg

SEQ ID NO: 37531 - DNA, 25 bp, Probe sequence
ttccaagttgaagaagtaatgagtt

SEQ ID NO: 37532 - DNA, 25 bp, Probe sequence
atacgagtatgatgaaggaatgcca

SEQ ID NO: 37533 - DNA, 25 bp, Probe sequence
tacgagtatgatgaaggaatgccag

SEQ ID NO: 37534 - DNA, 25 bp, Probe sequence
tgatatagagaccttgtggacctta

SEQ ID NO: 37535 - DNA, 25 bp, Probe sequence
caagacgatatgttaggtaatggct

SEQ ID NO: 37536 - DNA, 25 bp, Probe sequence
tcaagacgatatgttaggtaatggc

SEQ ID NO: 37537 - DNA, 25 bp, Probe sequence
atgatatagagaccttgtggacctt

SEQ ID NO: 37538 - DNA, 25 bp, Probe sequence
aatgatatagagaccttgtggacct

SEQ ID NO: 37539 - DNA, 25 bp, Probe sequence
aagacgatatgttaggtaatggctt

SEQ ID NO: 37540 - DNA, 25 bp, Probe sequence
taatgatatagagaccttgtggacc

SEQ ID NO: 37541 - DNA, 25 bp, Probe sequence
ttgaagtgccaggaagtagagatta

SEQ ID NO: 37542 - DNA, 25 bp, Probe sequence
gattgttcaagacgatatgttaggt

SEQ ID NO: 37543 - DNA, 25 bp, Probe sequence
ggtctcaggaatgttgttatatgct

SEQ ID NO: 37544 - DNA, 25 bp, Probe sequence
aggtctcaggaatgttgttatatgc

SEQ ID NO: 37545 - DNA, 25 bp, Probe sequence
caggtctcaggaatgttgttatatg

SEQ ID NO: 37546 - DNA, 25 bp, Probe sequence
cgtgaatatgcttcctgtaatgaga

SEQ ID NO: 37547 - DNA, 25 bp, Probe sequence
gtgaatatgcttcctgtaatgagaa

SEQ ID NO: 37548 - DNA, 25 bp, Probe sequence
ctatcagaagttagcaacagaacaa

SEQ ID NO: 37549 - DNA, 25 bp, Probe sequence
atcagaagttagcaacagaacaatt

SEQ ID NO: 37550 - DNA, 25 bp, Probe sequence
gtctcaggaatgttgttatatgcta

SEQ ID NO: 37551 - DNA, 25 bp, Probe sequence
agatccattcaactaacctgtatca

SEQ ID NO: 37552 - DNA, 25 bp, Probe sequence
ttacacgagaacagcaaatacaaat

SEQ ID NO: 37553 - DNA, 25 bp, Probe sequence
tacacgagaacagcaaatacaaatt

SEQ ID NO: 37554 - DNA, 25 bp, Probe sequence
acttgaaggtatgtatgttacacga

SEQ ID NO: 37555 - DNA, 25 bp, Probe sequence
cacttgaaggtatgtatgttacacg

SEQ ID NO: 37556 - DNA, 25 bp, Probe sequence
gttacacgagaacagcaaatacaaa

SEQ ID NO: 37557 - DNA, 25 bp, Probe sequence
tgaaggtatgtatgttacacgagaa

SEQ ID NO: 37558 - DNA, 25 bp, Probe sequence
ttgaaggtatgtatgttacacgaga

SEQ ID NO: 37559 - DNA, 25 bp, Probe sequence
gaaggtatgtatgttacacgagaac

SEQ ID NO: 37560 - DNA, 25 bp, Probe sequence
cttgaaggtatgtatgttacacgag

SEQ ID NO: 37561 - DNA, 25 bp, Probe sequence
ataatgttgatgttgttatggagcc

SEQ ID NO: 37562 - DNA, 25 bp, Probe sequence
taatgttgatgttgttatggagcca

SEQ ID NO: 37563 - DNA, 25 bp, Probe sequence
caagaaggtgcgattcaatactata

SEQ ID NO: 37564 - DNA, 25 bp, Probe sequence
gttgatgttgttatggagccagtag

SEQ ID NO: 37565 - DNA, 25 bp, Probe sequence
aagaaggtgcgattcaatactataa

SEQ ID NO: 37566 - DNA, 25 bp, Probe sequence
aatgttgatgttgttatggagccag

SEQ ID NO: 37567 - DNA, 25 bp, Probe sequence
agaattaatgttggttgaagaagcg

SEQ ID NO: 37568 - DNA, 25 bp, Probe sequence
gaattaatgttggttgaagaagcgg

SEQ ID NO: 37569 - DNA, 25 bp, Probe sequence
tgttgatgttgttatggagccagta

SEQ ID NO: 37570 - DNA, 25 bp, Probe sequence
gcatctattacttcattaagccgtt

SEQ ID NO: 37571 - DNA, 25 bp, Probe sequence
ttgagcatacagttaatggtaagac

SEQ ID NO: 37572 - DNA, 25 bp, Probe sequence
tgagcatacagttaatggtaagact

SEQ ID NO: 37573 - DNA, 25 bp, Probe sequence
acacgcattatgaacatgattgaag

SEQ ID NO: 37574 - DNA, 25 bp, Probe sequence
gtacttacacgcattatgaacatga

SEQ ID NO: 37575 - DNA, 25 bp, Probe sequence
tacacgcattatgaacatgattgaa

SEQ ID NO: 37576 - DNA, 25 bp, Probe sequence
ttacacgcattatgaacatgattga

SEQ ID NO: 37577 - DNA, 25 bp, Probe sequence
acttacacgcattatgaacatgatt

SEQ ID NO: 37578 - DNA, 25 bp, Probe sequence
gcagtgctatggtgtatatcaatcc

SEQ ID NO: 37579 - DNA, 25 bp, Probe sequence
acgcaataatgaaggaggtagttta

SEQ ID NO: 37580 - DNA, 25 bp, Probe sequence
acgcttagtttagagacgcttaatt

SEQ ID NO: 37581 - DNA, 25 bp, Probe sequence
aacgcaataatgaaggaggtagttt

SEQ ID NO: 37582 - DNA, 25 bp, Probe sequence
aaacgcaataatgaaggaggtagtt

SEQ ID NO: 37583 - DNA, 25 bp, Probe sequence
cacgcttagtttagagacgcttaat

SEQ ID NO: 37584 - DNA, 25 bp, Probe sequence
tataacacgcttagtttagagacgc

SEQ ID NO: 37585 - DNA, 25 bp, Probe sequence
ggtgataatacaagatataacacgc

SEQ ID NO: 37586 - DNA, 25 bp, Probe sequence
cgcaataatgaaggaggtagtttat

SEQ ID NO: 37587 - DNA, 25 bp, Probe sequence
atataacacgcttagtttagagacg

SEQ ID NO: 37588 - DNA, 25 bp, Probe sequence
tacctattgatggcgttgattatgt

SEQ ID NO: 37589 - DNA, 25 bp, Probe sequence
cctattgatggcgttgattatgtta

SEQ ID NO: 37590 - DNA, 25 bp, Probe sequence
acctattgatggcgttgattatgtt

SEQ ID NO: 37591 - DNA, 25 bp, Probe sequence
attgatggcgttgattatgttacag

SEQ ID NO: 37592 - DNA, 25 bp, Probe sequence
atacctattgatggcgttgattatg

SEQ ID NO: 37593 - DNA, 25 bp, Probe sequence
catacctattgatggcgttgattat

SEQ ID NO: 37594 - DNA, 25 bp, Probe sequence
tattgatggcgttgattatgttaca

SEQ ID NO: 37595 - DNA, 25 bp, Probe sequence
ctattgatggcgttgattatgttac

SEQ ID NO: 37596 - DNA, 25 bp, Probe sequence
tcatacctattgatggcgttgatta

SEQ ID NO: 37597 - DNA, 25 bp, Probe sequence
ttgttgtgtcaggctattatggata

SEQ ID NO: 37598 - DNA, 25 bp, Probe sequence
attgttgtgtcaggctattatggat

SEQ ID NO: 37599 - DNA, 25 bp, Probe sequence
tgttgtgtcaggctattatggataa

SEQ ID NO: 37600 - DNA, 25 bp, Probe sequence
tgatgccgaatataaccaacagatt

SEQ ID NO: 37601 - DNA, 25 bp, Probe sequence
gatgccgaatataaccaacagatta

SEQ ID NO: 37602 - DNA, 25 bp, Probe sequence
gtgatgccgaatataaccaacagat

SEQ ID NO: 37603 - DNA, 25 bp, Probe sequence
cattgttgtgtcaggctattatgga

SEQ ID NO: 37604 - DNA, 25 bp, Probe sequence
tgccgaatataaccaacagattatc

SEQ ID NO: 37605 - DNA, 25 bp, Probe sequence
ttggagttggtacattatatcgtca

SEQ ID NO: 37606 - DNA, 25 bp, Probe sequence
ggtagtctcaacaggtagttacatt

SEQ ID NO: 37607 - DNA, 25 bp, Probe sequence
aatggtagtctcaacaggtagttac

SEQ ID NO: 37608 - DNA, 25 bp, Probe sequence
tggtagtctcaacaggtagttacat

SEQ ID NO: 37609 - DNA, 25 bp, Probe sequence
atggtagtctcaacaggtagttaca

SEQ ID NO: 37610 - DNA, 25 bp, Probe sequence
agttgccatgtattgttgcctataa

SEQ ID NO: 37611 - DNA, 25 bp, Probe sequence
gagttgccatgtattgttgcctata

SEQ ID NO: 37612 - DNA, 25 bp, Probe sequence
ttgtctgagttgccatgtattgttg

SEQ ID NO: 37613 - DNA, 25 bp, Probe sequence
agaacaagggtattggtagtcattt

SEQ ID NO: 37614 - DNA, 25 bp, Probe sequence
gagaacaagggtattggtagtcatt

SEQ ID NO: 37615 - DNA, 25 bp, Probe sequence
ttggtgttattctaatgcgttatgc

SEQ ID NO: 37616 - DNA, 25 bp, Probe sequence
atgattggtgttattctaatgcgtt

SEQ ID NO: 37617 - DNA, 25 bp, Probe sequence
aatgattggtgttattctaatgcgt

SEQ ID NO: 37618 - DNA, 25 bp, Probe sequence
aattatcggttggttaggttcagtt

SEQ ID NO: 37619 - DNA, 25 bp, Probe sequence
attatcggttggttaggttcagttg

SEQ ID NO: 37620 - DNA, 25 bp, Probe sequence
tgattggtgttattctaatgcgtta

SEQ ID NO: 37621 - DNA, 25 bp, Probe sequence
attggtgttattctaatgcgttatg

SEQ ID NO: 37622 - DNA, 25 bp, Probe sequence
taattatcggttggttaggttcagt

SEQ ID NO: 37623 - DNA, 25 bp, Probe sequence
agtaattatcggttggttaggttca

SEQ ID NO: 37624 - DNA, 25 bp, Probe sequence
attctattggtgctggtgttgttat

SEQ ID NO: 37625 - DNA, 25 bp, Probe sequence
ttctattggtgctggtgttgttatt

SEQ ID NO: 37626 - DNA, 25 bp, Probe sequence
aattctattggtgctggtgttgtta

SEQ ID NO: 37627 - DNA, 25 bp, Probe sequence
tctattggtgctggtgttgttattg

SEQ ID NO: 37628 - DNA, 25 bp, Probe sequence
tgtcaggtgatccaacaatgaatat

SEQ ID NO: 37629 - DNA, 25 bp, Probe sequence
atgtcaggtgatccaacaatgaata

SEQ ID NO: 37630 - DNA, 25 bp, Probe sequence
gattggttcaggtgctgttgtatat

SEQ ID NO: 37631 - DNA, 25 bp, Probe sequence
attggttcaggtgctgttgtatata

SEQ ID NO: 37632 - DNA, 25 bp, Probe sequence
ttggttcaggtgctgttgtatatag

SEQ ID NO: 37633 - DNA, 25 bp, Probe sequence
ggtcatagcatctggatagtaagtt

SEQ ID NO: 37634 - DNA, 25 bp, Probe sequence
aggtcatagcatctggatagtaagt

SEQ ID NO: 37635 - DNA, 25 bp, Probe sequence
ttatgagcatcttattgactggaca

SEQ ID NO: 37636 - DNA, 25 bp, Probe sequence
aaggtcatagcatctggatagtaag

SEQ ID NO: 37637 - DNA, 25 bp, Probe sequence
tatgagcatcttattgactggacaa

SEQ ID NO: 37638 - DNA, 25 bp, Probe sequence
attatgagcatcttattgactggac

SEQ ID NO: 37639 - DNA, 25 bp, Probe sequence
taggtcagttggtaacattgtatgc

SEQ ID NO: 37640 - DNA, 25 bp, Probe sequence
ataggtcagttggtaacattgtatg

SEQ ID NO: 37641 - DNA, 25 bp, Probe sequence
tcagacttaattgttgtaggaatgt

SEQ ID NO: 37642 - DNA, 25 bp, Probe sequence
tattgattcttgtgctgtaacttgg

SEQ ID NO: 37643 - DNA, 25 bp, Probe sequence
atattgattcttgtgctgtaacttg

SEQ ID NO: 37644 - DNA, 25 bp, Probe sequence
cactatatatgttggagatgctgtt

SEQ ID NO: 37645 - DNA, 25 bp, Probe sequence
acactatatatgttggagatgctgt

SEQ ID NO: 37646 - DNA, 25 bp, Probe sequence
gacactatatatgttggagatgctg

SEQ ID NO: 37647 - DNA, 25 bp, Probe sequence
agacactatatatgttggagatgct

SEQ ID NO: 37648 - DNA, 25 bp, Probe sequence
aagacactatatatgttggagatgc

SEQ ID NO: 37649 - DNA, 25 bp, Probe sequence
attgattcttgtgctgtaacttggg

SEQ ID NO: 37650 - DNA, 25 bp, Probe sequence
aatattgattcttgtgctgtaactt

SEQ ID NO: 37651 - DNA, 25 bp, Probe sequence
gaattacacctcaaagacaagcaat

SEQ ID NO: 37652 - DNA, 25 bp, Probe sequence
atttcttcacatactcatccaacag

SEQ ID NO: 37653 - DNA, 25 bp, Probe sequence
taagaattacacctcaaagacaagc

SEQ ID NO: 37654 - DNA, 25 bp, Probe sequence
agaattacacctcaaagacaagcaa

SEQ ID NO: 37655 - DNA, 25 bp, Probe sequence
aagaattacacctcaaagacaagca

SEQ ID NO: 37656 - DNA, 25 bp, Probe sequence
ttcttcacatactcatccaacagct

SEQ ID NO: 37657 - DNA, 25 bp, Probe sequence
tttcttcacatactcatccaacagc

SEQ ID NO: 37658 - DNA, 25 bp, Probe sequence
attacacctcaaagacaagcaatat

SEQ ID NO: 37659 - DNA, 25 bp, Probe sequence
aattacacctcaaagacaagcaata

SEQ ID NO: 37660 - DNA, 25 bp, Probe sequence
agtaagccaattagaagaacaacca

SEQ ID NO: 37661 - DNA, 25 bp, Probe sequence
gtaagccaattagaagaacaaccat

SEQ ID NO: 37662 - DNA, 25 bp, Probe sequence
tagtaagccaattagaagaacaacc

SEQ ID NO: 37663 - DNA, 25 bp, Probe sequence
taagccaattagaagaacaaccatg

SEQ ID NO: 37664 - DNA, 25 bp, Probe sequence
tggaacgctaaagaaatgacaataa

SEQ ID NO: 37665 - DNA, 25 bp, Probe sequence
atggaacgctaaagaaatgacaata

SEQ ID NO: 37666 - DNA, 25 bp, Probe sequence
atagtaagccaattagaagaacaac

SEQ ID NO: 37667 - DNA, 25 bp, Probe sequence
ggaacgctaaagaaatgacaataaa

SEQ ID NO: 37668 - DNA, 25 bp, Probe sequence
aaatgccaatgtttaataaagtgct

SEQ ID NO: 37669 - DNA, 25 bp, Probe sequence
aacgattagaactggaatacgatgt

SEQ ID NO: 37670 - DNA, 25 bp, Probe sequence
acgattagaactggaatacgatgta

SEQ ID NO: 37671 - DNA, 25 bp, Probe sequence
cgattagaactggaatacgatgtaa

SEQ ID NO: 37672 - DNA, 25 bp, Probe sequence
ggagtagttacacttatggcgaata

SEQ ID NO: 37673 - DNA, 25 bp, Probe sequence
agtagttacacttatggcgaatatc

SEQ ID NO: 37674 - DNA, 25 bp, Probe sequence
gagtagttacacttatggcgaatat

SEQ ID NO: 37675 - DNA, 25 bp, Probe sequence
aggagatttaacgatagggagtagt

SEQ ID NO: 37676 - DNA, 25 bp, Probe sequence
tcaggagatttaacgatagggagta

SEQ ID NO: 37677 - DNA, 25 bp, Probe sequence
tttcaggagatttaacgatagggag

SEQ ID NO: 37678 - DNA, 25 bp, Probe sequence
aaggtctggagatactattgttgtt

SEQ ID NO: 37679 - DNA, 25 bp, Probe sequence
caaggtctggagatactattgttgt

SEQ ID NO: 37680 - DNA, 25 bp, Probe sequence
gcaaggtctggagatactattgttg

SEQ ID NO: 37681 - DNA, 25 bp, Probe sequence
taatgagcttaatgaacgaggtgta

SEQ ID NO: 37682 - DNA, 25 bp, Probe sequence
aatgagcttaatgaacgaggtgtaa

SEQ ID NO: 37683 - DNA, 25 bp, Probe sequence
gttaatgagcttaatgaacgaggtg

SEQ ID NO: 37684 - DNA, 25 bp, Probe sequence
agttaatgagcttaatgaacgaggt

SEQ ID NO: 37685 - DNA, 25 bp, Probe sequence
ttaatgagcttaatgaacgaggtgt

SEQ ID NO: 37686 - DNA, 25 bp, Probe sequence
ttggagattagatagactaggacgt

SEQ ID NO: 37687 - DNA, 25 bp, Probe sequence
tattagttggttatgatggcggtat

SEQ ID NO: 37688 - DNA, 25 bp, Probe sequence
atattagttggttatgatggcggta

SEQ ID NO: 37689 - DNA, 25 bp, Probe sequence
tatattagttggttatgatggcggt

SEQ ID NO: 37690 - DNA, 25 bp, Probe sequence
attagttggttatgatggcggtatc

SEQ ID NO: 37691 - DNA, 25 bp, Probe sequence
aatataggacgaggtagcatagtta

SEQ ID NO: 37692 - DNA, 25 bp, Probe sequence
atataggacgaggtagcatagttaa

SEQ ID NO: 37693 - DNA, 25 bp, Probe sequence
atatattagttggttatgatggcgg

SEQ ID NO: 37694 - DNA, 25 bp, Probe sequence
gttagattatattgcagatcacggc

SEQ ID NO: 37695 - DNA, 25 bp, Probe sequence
taggacgaggtagcatagttaaaga

SEQ ID NO: 37696 - DNA, 25 bp, Probe sequence
cgtatggtgattagtgatgcctatg

SEQ ID NO: 37697 - DNA, 25 bp, Probe sequence
attgacgaagaagagttagaagtac

SEQ ID NO: 37698 - DNA, 25 bp, Probe sequence
atattgacgaagaagagttagaagt

SEQ ID NO: 37699 - DNA, 25 bp, Probe sequence
catattgacgaagaagagttagaag

SEQ ID NO: 37700 - DNA, 25 bp, Probe sequence
gtagggaagagtttagttgctgata

SEQ ID NO: 37701 - DNA, 25 bp, Probe sequence
aaatgtaagcgtagggaagagttta

SEQ ID NO: 37702 - DNA, 25 bp, Probe sequence
tcatattgacgaagaagagttagaa

SEQ ID NO: 37703 - DNA, 25 bp, Probe sequence
aatgtaagcgtagggaagagtttag

SEQ ID NO: 37704 - DNA, 25 bp, Probe sequence
tagggaagagtttagttgctgataa

SEQ ID NO: 37705 - DNA, 25 bp, Probe sequence
gcagtatatggtataagcggtgatt

SEQ ID NO: 37706 - DNA, 25 bp, Probe sequence
agtatatggtataagcggtgattca

SEQ ID NO: 37707 - DNA, 25 bp, Probe sequence
cagtatatggtataagcggtgattc

SEQ ID NO: 37708 - DNA, 25 bp, Probe sequence
gtatatggtataagcggtgattcaa

SEQ ID NO: 37709 - DNA, 25 bp, Probe sequence
gatgttgcagtatatggtataagcg

SEQ ID NO: 37710 - DNA, 25 bp, Probe sequence
atgttgcagtatatggtataagcgg

SEQ ID NO: 37711 - DNA, 25 bp, Probe sequence
tatggtataagcggtgattcaaaga

SEQ ID NO: 37712 - DNA, 25 bp, Probe sequence
atggtataagcggtgattcaaagaa

SEQ ID NO: 37713 - DNA, 25 bp, Probe sequence
atatggtataagcggtgattcaaag

SEQ ID NO: 37714 - DNA, 25 bp, Probe sequence
catcaatcgttattctattcgctgt

SEQ ID NO: 37715 - DNA, 25 bp, Probe sequence
gcatcaatcgttattctattcgctg

SEQ ID NO: 37716 - DNA, 25 bp, Probe sequence
atcaatcgttattctattcgctgtt

SEQ ID NO: 37717 - DNA, 25 bp, Probe sequence
ttggcatcaatcgttattctattcg

SEQ ID NO: 37718 - DNA, 25 bp, Probe sequence
ttaagttggcatcaatcgttattct

SEQ ID NO: 37719 - DNA, 25 bp, Probe sequence
ggcatcaatcgttattctattcgct

SEQ ID NO: 37720 - DNA, 25 bp, Probe sequence
cggaattagtgttactggattgtct

SEQ ID NO: 37721 - DNA, 25 bp, Probe sequence
agttggcatcaatcgttattctatt

SEQ ID NO: 37722 - DNA, 25 bp, Probe sequence
aagttggcatcaatcgttattctat

SEQ ID NO: 37723 - DNA, 25 bp, Probe sequence
caacagcaacagatgaagaagtagt

SEQ ID NO: 37724 - DNA, 25 bp, Probe sequence
aacagcaacagatgaagaagtagtt

SEQ ID NO: 37725 - DNA, 25 bp, Probe sequence
caagaagcattagatgtgttgagta

SEQ ID NO: 37726 - DNA, 25 bp, Probe sequence
aacagatgaagaagtagttgaagcg

SEQ ID NO: 37727 - DNA, 25 bp, Probe sequence
aagaagcattagatgtgttgagtaa

SEQ ID NO: 37728 - DNA, 25 bp, Probe sequence
ccaacagcaacagatgaagaagtag

SEQ ID NO: 37729 - DNA, 25 bp, Probe sequence
tccaacagcaacagatgaagaagta

SEQ ID NO: 37730 - DNA, 25 bp, Probe sequence
atgctaataatcaagtaggtcaagt

SEQ ID NO: 37731 - DNA, 25 bp, Probe sequence
gcaatagatggcgtgattaataacc

SEQ ID NO: 37732 - DNA, 25 bp, Probe sequence
attcgtgaatatgatgcagttgaac

SEQ ID NO: 37733 - DNA, 25 bp, Probe sequence
ttcatttagcagcattagttagtgt

SEQ ID NO: 37734 - DNA, 25 bp, Probe sequence
tcgtgaatatgatgcagttgaacaa

SEQ ID NO: 37735 - DNA, 25 bp, Probe sequence
tattcgtgaatatgatgcagttgaa

SEQ ID NO: 37736 - DNA, 25 bp, Probe sequence
ttcgtgaatatgatgcagttgaaca

SEQ ID NO: 37737 - DNA, 25 bp, Probe sequence
attcatttagcagcattagttagtg

SEQ ID NO: 37738 - DNA, 25 bp, Probe sequence
ctgacgatcatgtgtttgaattaga

SEQ ID NO: 37739 - DNA, 25 bp, Probe sequence
gctgacgatcatgtgtttgaattag

SEQ ID NO: 37740 - DNA, 25 bp, Probe sequence
tgacgatcatgtgtttgaattagat

SEQ ID NO: 37741 - DNA, 25 bp, Probe sequence
attaggcttattggaacaagatggt

SEQ ID NO: 37742 - DNA, 25 bp, Probe sequence
cattaggcttattggaacaagatgg

SEQ ID NO: 37743 - DNA, 25 bp, Probe sequence
ttaggcttattggaacaagatggtt

SEQ ID NO: 37744 - DNA, 25 bp, Probe sequence
gcattaggcttattggaacaagatg

SEQ ID NO: 37745 - DNA, 25 bp, Probe sequence
aaatgatgatattgctaagggctct

SEQ ID NO: 37746 - DNA, 25 bp, Probe sequence
aaggcagtggtatttatgtgagaaa

SEQ ID NO: 37747 - DNA, 25 bp, Probe sequence
aatgatgatattgctaagggctcta

SEQ ID NO: 37748 - DNA, 25 bp, Probe sequence
atgatgatattgctaagggctctat

SEQ ID NO: 37749 - DNA, 25 bp, Probe sequence
caaggcagtggtatttatgtgagaa

SEQ ID NO: 37750 - DNA, 25 bp, Probe sequence
acaatgtggcaaggattcaattatg

SEQ ID NO: 37751 - DNA, 25 bp, Probe sequence
tgaatacaatgttactaaggagcct

SEQ ID NO: 37752 - DNA, 25 bp, Probe sequence
tacaatgtggcaaggattcaattat

SEQ ID NO: 37753 - DNA, 25 bp, Probe sequence
aagccaatggatatgacaattagtg

SEQ ID NO: 37754 - DNA, 25 bp, Probe sequence
cagataagccaatggatatgacaat

SEQ ID NO: 37755 - DNA, 25 bp, Probe sequence
aatgtggcaaggattcaattatgag

SEQ ID NO: 37756 - DNA, 25 bp, Probe sequence
caatgtggcaaggattcaattatga

SEQ ID NO: 37757 - DNA, 25 bp, Probe sequence
gtacaatgtggcaaggattcaatta

SEQ ID NO: 37758 - DNA, 25 bp, Probe sequence
gtggcaaggattcaattatgagatt

SEQ ID NO: 37759 - DNA, 25 bp, Probe sequence
tggacattcttcaacaatggataga

SEQ ID NO: 37760 - DNA, 25 bp, Probe sequence
gtggacattcttcaacaatggatag

SEQ ID NO: 37761 - DNA, 25 bp, Probe sequence
ttgtttgtgatgaagaggcattaaa

SEQ ID NO: 37762 - DNA, 25 bp, Probe sequence
tttgtttgtgatgaagaggcattaa

SEQ ID NO: 37763 - DNA, 25 bp, Probe sequence
atttgtttgtgatgaagaggcatta

SEQ ID NO: 37764 - DNA, 25 bp, Probe sequence
catttgtttgtgatgaagaggcatt

SEQ ID NO: 37765 - DNA, 25 bp, Probe sequence
gtcagagaatccatacctaaagaag

SEQ ID NO: 37766 - DNA, 25 bp, Probe sequence
ggacattcttcaacaatggatagaa

SEQ ID NO: 37767 - DNA, 25 bp, Probe sequence
cgtggacattcttcaacaatggata

SEQ ID NO: 37768 - DNA, 25 bp, Probe sequence
atagaacttatagatgacgcactcg

SEQ ID NO: 37769 - DNA, 25 bp, Probe sequence
catagaacttatagatgacgcactc

SEQ ID NO: 37770 - DNA, 25 bp, Probe sequence
aacgacagctcatagaacttataga

SEQ ID NO: 37771 - DNA, 25 bp, Probe sequence
acgacagctcatagaacttatagat

SEQ ID NO: 37772 - DNA, 25 bp, Probe sequence
aattatcaatgaagcacttcgagag

SEQ ID NO: 37773 - DNA, 25 bp, Probe sequence
attatcaatgaagcacttcgagagg

SEQ ID NO: 37774 - DNA, 25 bp, Probe sequence
cgacagctcatagaacttatagatg

SEQ ID NO: 37775 - DNA, 25 bp, Probe sequence
tatcaatgaagcacttcgagaggta

SEQ ID NO: 37776 - DNA, 25 bp, Probe sequence
taattatcaatgaagcacttcgaga

SEQ ID NO: 37777 - DNA, 25 bp, Probe sequence
taatgtaccactagcaactgtagac

SEQ ID NO: 37778 - DNA, 25 bp, Probe sequence
gcatataatgtaccactagcaactg

SEQ ID NO: 37779 - DNA, 25 bp, Probe sequence
ataatgtaccactagcaactgtaga

SEQ ID NO: 37780 - DNA, 25 bp, Probe sequence
catataatgtaccactagcaactgt

SEQ ID NO: 37781 - DNA, 25 bp, Probe sequence
gtcatgttacaacagacacaagtta

SEQ ID NO: 37782 - DNA, 25 bp, Probe sequence
aataatcaaggtcaatatctgttgc

SEQ ID NO: 37783 - DNA, 25 bp, Probe sequence
tcatgttacaacagacacaagttaa

SEQ ID NO: 37784 - DNA, 25 bp, Probe sequence
aatgtaccactagcaactgtagacg

SEQ ID NO: 37785 - DNA, 25 bp, Probe sequence
tataatgtaccactagcaactgtag

SEQ ID NO: 37786 - DNA, 25 bp, Probe sequence
tatggatggattaagaggtcgtgtt

SEQ ID NO: 37787 - DNA, 25 bp, Probe sequence
ttatggatggattaagaggtcgtgt

SEQ ID NO: 37788 - DNA, 25 bp, Probe sequence
ggatggattaagaggtcgtgttgaa

SEQ ID NO: 37789 - DNA, 25 bp, Probe sequence
atggatggattaagaggtcgtgttg

SEQ ID NO: 37790 - DNA, 25 bp, Probe sequence
agtttatggatggattaagaggtcg

SEQ ID NO: 37791 - DNA, 25 bp, Probe sequence
tttatggatggattaagaggtcgtg

SEQ ID NO: 37792 - DNA, 25 bp, Probe sequence
gtttatggatggattaagaggtcgt

SEQ ID NO: 37793 - DNA, 25 bp, Probe sequence
tgagtttatggatggattaagaggt

SEQ ID NO: 37794 - DNA, 25 bp, Probe sequence
gatggattaagaggtcgtgttgaaa

SEQ ID NO: 37795 - DNA, 25 bp, Probe sequence
cgacgccagtagttattatgtctat

SEQ ID NO: 37796 - DNA, 25 bp, Probe sequence
gacgccagtagttattatgtctatt

SEQ ID NO: 37797 - DNA, 25 bp, Probe sequence
tgacgatgattagtgcattggttaa

SEQ ID NO: 37798 - DNA, 25 bp, Probe sequence
ttgacgatgattagtgcattggtta

SEQ ID NO: 37799 - DNA, 25 bp, Probe sequence
aaacatctaaagtgacacaaactga

SEQ ID NO: 37800 - DNA, 25 bp, Probe sequence
aacatctaaagtgacacaaactgat

SEQ ID NO: 37801 - DNA, 25 bp, Probe sequence
acgccagtagttattatgtctattt

SEQ ID NO: 37802 - DNA, 25 bp, Probe sequence
aagtgacacaaactgataatcaaca

SEQ ID NO: 37803 - DNA, 25 bp, Probe sequence
agttatttaatatttccgcagcgac

SEQ ID NO: 37804 - DNA, 25 bp, Probe sequence
agaattagcaagaacaggtgtcaat

SEQ ID NO: 37805 - DNA, 25 bp, Probe sequence
aagaattagcaagaacaggtgtcaa

SEQ ID NO: 37806 - DNA, 25 bp, Probe sequence
ggtataatgctaattgctggtatca

SEQ ID NO: 37807 - DNA, 25 bp, Probe sequence
aggtataatgctaattgctggtatc

SEQ ID NO: 37808 - DNA, 25 bp, Probe sequence
gaattagcaagaacaggtgtcaatt

SEQ ID NO: 37809 - DNA, 25 bp, Probe sequence
tgtcattccatgtcacgagttatat

SEQ ID NO: 37810 - DNA, 25 bp, Probe sequence
ttgtcattccatgtcacgagttata

SEQ ID NO: 37811 - DNA, 25 bp, Probe sequence
tgctaattgctggtatcagttatgt

SEQ ID NO: 37812 - DNA, 25 bp, Probe sequence
acaggtataatgctaattgctggta

SEQ ID NO: 37813 - DNA, 25 bp, Probe sequence
cggcatacgctcaattactattaag

SEQ ID NO: 37814 - DNA, 25 bp, Probe sequence
ttagttcctgatgatgataaccgtt

SEQ ID NO: 37815 - DNA, 25 bp, Probe sequence
cgttacacaacaaccgatacaatta

SEQ ID NO: 37816 - DNA, 25 bp, Probe sequence
tacacaacaaccgatacaattactt

SEQ ID NO: 37817 - DNA, 25 bp, Probe sequence
ttacacaacaaccgatacaattact

SEQ ID NO: 37818 - DNA, 25 bp, Probe sequence
gttacacaacaaccgatacaattac

SEQ ID NO: 37819 - DNA, 25 bp, Probe sequence
ggcatacgctcaattactattaagt

SEQ ID NO: 37820 - DNA, 25 bp, Probe sequence
tataattggtgaacctgaatcttcc

SEQ ID NO: 37821 - DNA, 25 bp, Probe sequence
cacatggtcaattaagaatggaagg

SEQ ID NO: 37822 - DNA, 25 bp, Probe sequence
taccgcaacaagcagaattattatt

SEQ ID NO: 37823 - DNA, 25 bp, Probe sequence
ataccgcaacaagcagaattattat

SEQ ID NO: 37824 - DNA, 25 bp, Probe sequence
aataccgcaacaagcagaattatta

SEQ ID NO: 37825 - DNA, 25 bp, Probe sequence
acggatatgttagtgatacttggtg

SEQ ID NO: 37826 - DNA, 25 bp, Probe sequence
aacggatatgttagtgatacttggt

SEQ ID NO: 37827 - DNA, 25 bp, Probe sequence
cggatatgttagtgatacttggtgg

SEQ ID NO: 37828 - DNA, 25 bp, Probe sequence
aatgaaggtgttggatacataggtg

SEQ ID NO: 37829 - DNA, 25 bp, Probe sequence
atgaaggtgttggatacataggtga

SEQ ID NO: 37830 - DNA, 25 bp, Probe sequence
tatatgaatgatggcgtgctacctc

SEQ ID NO: 37831 - DNA, 25 bp, Probe sequence
gccagaattaagacacgaaatacaa

SEQ ID NO: 37832 - DNA, 25 bp, Probe sequence
gagccagaattaagacacgaaatac

SEQ ID NO: 37833 - DNA, 25 bp, Probe sequence
agtaaagtaattgttgccgaaagtt

SEQ ID NO: 37834 - DNA, 25 bp, Probe sequence
aagtaaagtaattgttgccgaaagt

SEQ ID NO: 37835 - DNA, 25 bp, Probe sequence
tgagccagaattaagacacgaaata

SEQ ID NO: 37836 - DNA, 25 bp, Probe sequence
agccagaattaagacacgaaataca

SEQ ID NO: 37837 - DNA, 25 bp, Probe sequence
aaagtaaagtaattgttgccgaaag

SEQ ID NO: 37838 - DNA, 25 bp, Probe sequence
tcaaagtaaagtaattgttgccgaa

SEQ ID NO: 37839 - DNA, 25 bp, Probe sequence
atcaaagtaaagtaattgttgccga

SEQ ID NO: 37840 - DNA, 25 bp, Probe sequence
agaatatggtgttactgctgaatca

SEQ ID NO: 37841 - DNA, 25 bp, Probe sequence
aagaatatggtgttactgctgaatc

SEQ ID NO: 37842 - DNA, 25 bp, Probe sequence
ttcaacattaagagccaattaccaa

SEQ ID NO: 37843 - DNA, 25 bp, Probe sequence
gaatatggtgttactgctgaatcat

SEQ ID NO: 37844 - DNA, 25 bp, Probe sequence
tcaacattaagagccaattaccaat

SEQ ID NO: 37845 - DNA, 25 bp, Probe sequence
attcaacattaagagccaattacca

SEQ ID NO: 37846 - DNA, 25 bp, Probe sequence
atggtgttactgctgaatcatacaa

SEQ ID NO: 37847 - DNA, 25 bp, Probe sequence
acattaagagccaattaccaatact

SEQ ID NO: 37848 - DNA, 25 bp, Probe sequence
tcaatcaagcatatcattcatggtt

SEQ ID NO: 37849 - DNA, 25 bp, Probe sequence
agagaacaacaggaacttgatgata

SEQ ID NO: 37850 - DNA, 25 bp, Probe sequence
tagagaacaacaggaacttgatgat

SEQ ID NO: 37851 - DNA, 25 bp, Probe sequence
atagagaacaacaggaacttgatga

SEQ ID NO: 37852 - DNA, 25 bp, Probe sequence
atacaatgattcgcacgacagataa

SEQ ID NO: 37853 - DNA, 25 bp, Probe sequence
aatacaatgattcgcacgacagata

SEQ ID NO: 37854 - DNA, 25 bp, Probe sequence
gagaacaacaggaacttgatgatat

SEQ ID NO: 37855 - DNA, 25 bp, Probe sequence
agaacaacaggaacttgatgatatt

SEQ ID NO: 37856 - DNA, 25 bp, Probe sequence
tatagagaacaacaggaacttgatg

SEQ ID NO: 37857 - DNA, 25 bp, Probe sequence
ttatagagaacaacaggaacttgat

SEQ ID NO: 37858 - DNA, 25 bp, Probe sequence
atacagcagaggcattacatcatta

SEQ ID NO: 37859 - DNA, 25 bp, Probe sequence
tatacagcagaggcattacatcatt

SEQ ID NO: 37860 - DNA, 25 bp, Probe sequence
ttatacagcagaggcattacatcat

SEQ ID NO: 37861 - DNA, 25 bp, Probe sequence
attatacagcagaggcattacatca

SEQ ID NO: 37862 - DNA, 25 bp, Probe sequence
aatgatgattatatggtcgcaggaa

SEQ ID NO: 37863 - DNA, 25 bp, Probe sequence
agattatacagcagaggcattacat

SEQ ID NO: 37864 - DNA, 25 bp, Probe sequence
ttggttagcagcaggaatatacatt

SEQ ID NO: 37865 - DNA, 25 bp, Probe sequence
cagattatacagcagaggcattaca

SEQ ID NO: 37866 - DNA, 25 bp, Probe sequence
tacagcagaggcattacatcattac

SEQ ID NO: 37867 - DNA, 25 bp, Probe sequence
tattacggcttatagtgaaagaggg

SEQ ID NO: 37868 - DNA, 25 bp, Probe sequence
cgaaataaagcataaagggcaatat

SEQ ID NO: 37869 - DNA, 25 bp, Probe sequence
atattacggcttatagtgaaagagg

SEQ ID NO: 37870 - DNA, 25 bp, Probe sequence
gtcgaaataaagcataaagggcaat

SEQ ID NO: 37871 - DNA, 25 bp, Probe sequence
tcgaaataaagcataaagggcaata

SEQ ID NO: 37872 - DNA, 25 bp, Probe sequence
acaatcatacatcatcctatacttg

SEQ ID NO: 37873 - DNA, 25 bp, Probe sequence
gtagaacgtatgtcgaaataaagca

SEQ ID NO: 37874 - DNA, 25 bp, Probe sequence
agtagaacgtatgtcgaaataaagc

SEQ ID NO: 37875 - DNA, 25 bp, Probe sequence
catacatcatcctatacttgatcgt

SEQ ID NO: 37876 - DNA, 25 bp, Probe sequence
accattctaatcattatcgcattgt

SEQ ID NO: 37877 - DNA, 25 bp, Probe sequence
caatggaagatgaacgattctacaa

SEQ ID NO: 37878 - DNA, 25 bp, Probe sequence
tcaatggaagatgaacgattctaca

SEQ ID NO: 37879 - DNA, 25 bp, Probe sequence
aatggaagatgaacgattctacaat

SEQ ID NO: 37880 - DNA, 25 bp, Probe sequence
acaatatcaacaggctatgtcacaa

SEQ ID NO: 37881 - DNA, 25 bp, Probe sequence
aacacaatatcaacaggctatgtca

SEQ ID NO: 37882 - DNA, 25 bp, Probe sequence
caatatcaacaggctatgtcacaat

SEQ ID NO: 37883 - DNA, 25 bp, Probe sequence
ccattctaatcattatcgcattgtt

SEQ ID NO: 37884 - DNA, 25 bp, Probe sequence
aaccattctaatcattatcgcattg

SEQ ID NO: 37885 - DNA, 25 bp, Probe sequence
aaatgagaaatggaggacctaaaga

SEQ ID NO: 37886 - DNA, 25 bp, Probe sequence
atgagaaatggaggacctaaagatt

SEQ ID NO: 37887 - DNA, 25 bp, Probe sequence
aatgagaaatggaggacctaaagat

SEQ ID NO: 37888 - DNA, 25 bp, Probe sequence
tgagaaatggaggacctaaagattt

SEQ ID NO: 37889 - DNA, 25 bp, Probe sequence
tgacttaactcgtcctttagaagaa

SEQ ID NO: 37890 - DNA, 25 bp, Probe sequence
tggaggacctaaagatttctatact

SEQ ID NO: 37891 - DNA, 25 bp, Probe sequence
gacttaactcgtcctttagaagaaa

SEQ ID NO: 37892 - DNA, 25 bp, Probe sequence
atggaggacctaaagatttctatac

SEQ ID NO: 37893 - DNA, 25 bp, Probe sequence
ggaggacctaaagatttctatactt

SEQ ID NO: 37894 - DNA, 25 bp, Probe sequence
taattgaacaagatacgacggctat

SEQ ID NO: 37895 - DNA, 25 bp, Probe sequence
ataattgaacaagatacgacggcta

SEQ ID NO: 37896 - DNA, 25 bp, Probe sequence
aacataattgaacaagatacgacgg

SEQ ID NO: 37897 - DNA, 25 bp, Probe sequence
aattgaacaagatacgacggctatg

SEQ ID NO: 37898 - DNA, 25 bp, Probe sequence
cataattgaacaagatacgacggct

SEQ ID NO: 37899 - DNA, 25 bp, Probe sequence
acataattgaacaagatacgacggc

SEQ ID NO: 37900 - DNA, 25 bp, Probe sequence
gaacaagatacgacggctatggata

SEQ ID NO: 37901 - DNA, 25 bp, Probe sequence
aagatacgacggctatggatacaac

SEQ ID NO: 37902 - DNA, 25 bp, Probe sequence
caagatacgacggctatggatacaa

SEQ ID NO: 37903 - DNA, 25 bp, Probe sequence
gatgtcgcaatcgcaatcaattatt

SEQ ID NO: 37904 - DNA, 25 bp, Probe sequence
tattgatgaagattatgatgtcgca

SEQ ID NO: 37905 - DNA, 25 bp, Probe sequence
ttgatgaagattatgatgtcgcaat

SEQ ID NO: 37906 - DNA, 25 bp, Probe sequence
attgatgaagattatgatgtcgcaa

SEQ ID NO: 37907 - DNA, 25 bp, Probe sequence
ttattgatgaagattatgatgtcgc

SEQ ID NO: 37908 - DNA, 25 bp, Probe sequence
tgatgaagattatgatgtcgcaatc

SEQ ID NO: 37909 - DNA, 25 bp, Probe sequence
gatgaagattatgatgtcgcaatcg

SEQ ID NO: 37910 - DNA, 25 bp, Probe sequence
cttgcgttgatgattcataatccaa

SEQ ID NO: 37911 - DNA, 25 bp, Probe sequence
tacttgcgttgatgattcataatcc

SEQ ID NO: 37912 - DNA, 25 bp, Probe sequence
ttgatgatgcgaagaaggctattaa

SEQ ID NO: 37913 - DNA, 25 bp, Probe sequence
gattggaaaggagaaagaaggacta

SEQ ID NO: 37914 - DNA, 25 bp, Probe sequence
ttggaaaggagaaagaaggactaaa

SEQ ID NO: 37915 - DNA, 25 bp, Probe sequence
attggaaaggagaaagaaggactaa

SEQ ID NO: 37916 - DNA, 25 bp, Probe sequence
tttgatgatgcgaagaaggctatta

SEQ ID NO: 37917 - DNA, 25 bp, Probe sequence
gaggatttaagaaggttgaaagacg

SEQ ID NO: 37918 - DNA, 25 bp, Probe sequence
tgatgatgcgaagaaggctattaaa

SEQ ID NO: 37919 - DNA, 25 bp, Probe sequence
aattggatacagcaggagaagattt

SEQ ID NO: 37920 - DNA, 25 bp, Probe sequence
aaattggatacagcaggagaagatt

SEQ ID NO: 37921 - DNA, 25 bp, Probe sequence
aagtgaagagttagtaagatggcaa

SEQ ID NO: 37922 - DNA, 25 bp, Probe sequence
caagtgaagagttagtaagatggca

SEQ ID NO: 37923 - DNA, 25 bp, Probe sequence
acaagtgaagagttagtaagatggc

SEQ ID NO: 37924 - DNA, 25 bp, Probe sequence
aacggcaataccattacctgtagta

SEQ ID NO: 37925 - DNA, 25 bp, Probe sequence
aacaagtgaagagttagtaagatgg

SEQ ID NO: 37926 - DNA, 25 bp, Probe sequence
acggcaataccattacctgtagtag

SEQ ID NO: 37927 - DNA, 25 bp, Probe sequence
gcaataccattacctgtagtaggaa

SEQ ID NO: 37928 - DNA, 25 bp, Probe sequence
ggcaataccattacctgtagtagga

SEQ ID NO: 37929 - DNA, 25 bp, Probe sequence
gaacggcaataccattacctgtagt

SEQ ID NO: 37930 - DNA, 25 bp, Probe sequence
aatggtactacttgttgcctctatt

SEQ ID NO: 37931 - DNA, 25 bp, Probe sequence
tattcaatggtactacttgttgcct

SEQ ID NO: 37932 - DNA, 25 bp, Probe sequence
gtattcaatggtactacttgttgcc

SEQ ID NO: 37933 - DNA, 25 bp, Probe sequence
ggtattcaatggtactacttgttgc

SEQ ID NO: 37934 - DNA, 25 bp, Probe sequence
caatggtactacttgttgcctctat

SEQ ID NO: 37935 - DNA, 25 bp, Probe sequence
attcaatggtactacttgttgcctc

SEQ ID NO: 37936 - DNA, 25 bp, Probe sequence
tcaatggtactacttgttgcctcta

SEQ ID NO: 37937 - DNA, 25 bp, Probe sequence
aagagagcttatctgacaccattaa

SEQ ID NO: 37938 - DNA, 25 bp, Probe sequence
agagagcttatctgacaccattaat

SEQ ID NO: 37939 - DNA, 25 bp, Probe sequence
aagatccgattgttatgttagctga

SEQ ID NO: 37940 - DNA, 25 bp, Probe sequence
tccgattgttatgttagctgatgaa

SEQ ID NO: 37941 - DNA, 25 bp, Probe sequence
gatccgattgttatgttagctgatg

SEQ ID NO: 37942 - DNA, 25 bp, Probe sequence
agatccgattgttatgttagctgat

SEQ ID NO: 37943 - DNA, 25 bp, Probe sequence
atccgattgttatgttagctgatga

SEQ ID NO: 37944 - DNA, 25 bp, Probe sequence
cgattgttatgttagctgatgaacc

SEQ ID NO: 37945 - DNA, 25 bp, Probe sequence
ccgattgttatgttagctgatgaac

SEQ ID NO: 37946 - DNA, 25 bp, Probe sequence
gattgttatgttagctgatgaacca

SEQ ID NO: 37947 - DNA, 25 bp, Probe sequence
ttgttatgttagctgatgaaccaac

SEQ ID NO: 37948 - DNA, 25 bp, Probe sequence
atgtagttgatgagtcagtagttgt

SEQ ID NO: 37949 - DNA, 25 bp, Probe sequence
tgtagttgatgagtcagtagttgta

SEQ ID NO: 37950 - DNA, 25 bp, Probe sequence
gttgatgagtcagtagttgtagaca

SEQ ID NO: 37951 - DNA, 25 bp, Probe sequence
agttgatgagtcagtagttgtagac

SEQ ID NO: 37952 - DNA, 25 bp, Probe sequence
gtagttgatgagtcagtagttgtag

SEQ ID NO: 37953 - DNA, 25 bp, Probe sequence
tagttgatgagtcagtagttgtaga

SEQ ID NO: 37954 - DNA, 25 bp, Probe sequence
catgtagttgatgagtcagtagttg

SEQ ID NO: 37955 - DNA, 25 bp, Probe sequence
ttgatgagtcagtagttgtagacaa

SEQ ID NO: 37956 - DNA, 25 bp, Probe sequence
atattgtaacaagtcgagtaccaga

SEQ ID NO: 37957 - DNA, 25 bp, Probe sequence
ttataccaatatgatgacggcaaca

SEQ ID NO: 37958 - DNA, 25 bp, Probe sequence
tcaattaagagaccgctatgtagac

SEQ ID NO: 37959 - DNA, 25 bp, Probe sequence
tataccaatatgatgacggcaacat

SEQ ID NO: 37960 - DNA, 25 bp, Probe sequence
gttataccaatatgatgacggcaac

SEQ ID NO: 37961 - DNA, 25 bp, Probe sequence
atcaattaagagaccgctatgtaga

SEQ ID NO: 37962 - DNA, 25 bp, Probe sequence
ataccaatatgatgacggcaacatt

SEQ ID NO: 37963 - DNA, 25 bp, Probe sequence
caattaagagaccgctatgtagacg

SEQ ID NO: 37964 - DNA, 25 bp, Probe sequence
aatcaattaagagaccgctatgtag

SEQ ID NO: 37965 - DNA, 25 bp, Probe sequence
tattacacacaactgcctctcacat

SEQ ID NO: 37966 - DNA, 25 bp, Probe sequence
ttggatgagagtgaagtatatggat

SEQ ID NO: 37967 - DNA, 25 bp, Probe sequence
ggaagtaggaatgttaattatgccg

SEQ ID NO: 37968 - DNA, 25 bp, Probe sequence
tggatgagagtgaagtatatggata

SEQ ID NO: 37969 - DNA, 25 bp, Probe sequence
gaagtaggaatgttaattatgccgt

SEQ ID NO: 37970 - DNA, 25 bp, Probe sequence
tggaagtaggaatgttaattatgcc

SEQ ID NO: 37971 - DNA, 25 bp, Probe sequence
aagtaggaatgttaattatgccgtt

SEQ ID NO: 37972 - DNA, 25 bp, Probe sequence
ggatgagagtgaagtatatggataa

SEQ ID NO: 37973 - DNA, 25 bp, Probe sequence
aagtagatttggatgagagtgaagt

SEQ ID NO: 37974 - DNA, 25 bp, Probe sequence
agaattagcaggtttgggtgaatat

SEQ ID NO: 37975 - DNA, 25 bp, Probe sequence
tattcctcgcatataacattcctcg

SEQ ID NO: 37976 - DNA, 25 bp, Probe sequence
cctcattcaccgattagtatgtcat

SEQ ID NO: 37977 - DNA, 25 bp, Probe sequence
ccgattagtatgtcatctgaagcaa

SEQ ID NO: 37978 - DNA, 25 bp, Probe sequence
cattcaccgattagtatgtcatctg

SEQ ID NO: 37979 - DNA, 25 bp, Probe sequence
tcattcaccgattagtatgtcatct

SEQ ID NO: 37980 - DNA, 25 bp, Probe sequence
ctcattcaccgattagtatgtcatc

SEQ ID NO: 37981 - DNA, 25 bp, Probe sequence
tcctcgcatataacattcctcgtaa

SEQ ID NO: 37982 - DNA, 25 bp, Probe sequence
ttcctcgcatataacattcctcgta

SEQ ID NO: 37983 - DNA, 25 bp, Probe sequence
tcaccgattagtatgtcatctgaag

SEQ ID NO: 37984 - DNA, 25 bp, Probe sequence
tgatgtgactatggatgactatgaa

SEQ ID NO: 37985 - DNA, 25 bp, Probe sequence
ttgatgtgactatggatgactatga

SEQ ID NO: 37986 - DNA, 25 bp, Probe sequence
tgtgactatggatgactatgaagat

SEQ ID NO: 37987 - DNA, 25 bp, Probe sequence
atgtgactatggatgactatgaaga

SEQ ID NO: 37988 - DNA, 25 bp, Probe sequence
gatgtgactatggatgactatgaag

SEQ ID NO: 37989 - DNA, 25 bp, Probe sequence
aatagcgttacttgaggatatgaac

SEQ ID NO: 37990 - DNA, 25 bp, Probe sequence
acttcgtcttattatcacacaatga

SEQ ID NO: 37991 - DNA, 25 bp, Probe sequence
ggtgaacaaggttggattgatgtaa

SEQ ID NO: 37992 - DNA, 25 bp, Probe sequence
tcgtcttattatcacacaatgagaa

SEQ ID NO: 37993 - DNA, 25 bp, Probe sequence
tcaattacgataatgcgaatgtatt

SEQ ID NO: 37994 - DNA, 25 bp, Probe sequence
ttcaattacgataatgcgaatgtat

SEQ ID NO: 37995 - DNA, 25 bp, Probe sequence
tgcgtcaattataagcccattaaat

SEQ ID NO: 37996 - DNA, 25 bp, Probe sequence
ttgcgtcaattataagcccattaaa

SEQ ID NO: 37997 - DNA, 25 bp, Probe sequence
tttcaattacgataatgcgaatgta

SEQ ID NO: 37998 - DNA, 25 bp, Probe sequence
gcgtcaattataagcccattaaatt

SEQ ID NO: 37999 - DNA, 25 bp, Probe sequence
caattacgataatgcgaatgtatta

SEQ ID NO: 38000 - DNA, 25 bp, Probe sequence
attgcgtcaattataagcccattaa

SEQ ID NO: 38001 - DNA, 25 bp, Probe sequence
ttattgcgtcaattataagcccatt

SEQ ID NO: 38002 - DNA, 25 bp, Probe sequence
cgtgttgaagatatagatgaatgga

SEQ ID NO: 38003 - DNA, 25 bp, Probe sequence
gaatggattggattgttagatcagc

SEQ ID NO: 38004 - DNA, 25 bp, Probe sequence
agatgaatggattggattgttagat

SEQ ID NO: 38005 - DNA, 25 bp, Probe sequence
tgaatggattggattgttagatcag

SEQ ID NO: 38006 - DNA, 25 bp, Probe sequence
atggattggattgttagatcagctt

SEQ ID NO: 38007 - DNA, 25 bp, Probe sequence
aatggattggattgttagatcagct

SEQ ID NO: 38008 - DNA, 25 bp, Probe sequence
tagatgaatggattggattgttaga

SEQ ID NO: 38009 - DNA, 25 bp, Probe sequence
atgaatggattggattgttagatca

SEQ ID NO: 38010 - DNA, 25 bp, Probe sequence
tggattggattgttagatcagcttg

SEQ ID NO: 38011 - DNA, 25 bp, Probe sequence
tcagactagcgatcaatatgaagaa

SEQ ID NO: 38012 - DNA, 25 bp, Probe sequence
agactagcgatcaatatgaagaaga

SEQ ID NO: 38013 - DNA, 25 bp, Probe sequence
cagactagcgatcaatatgaagaag

SEQ ID NO: 38014 - DNA, 25 bp, Probe sequence
atcagactagcgatcaatatgaaga

SEQ ID NO: 38015 - DNA, 25 bp, Probe sequence
aatcagactagcgatcaatatgaag

SEQ ID NO: 38016 - DNA, 25 bp, Probe sequence
gactagcgatcaatatgaagaagat

SEQ ID NO: 38017 - DNA, 25 bp, Probe sequence
actagcgatcaatatgaagaagatt

SEQ ID NO: 38018 - DNA, 25 bp, Probe sequence
agcgatcaatatgaagaagattcta

SEQ ID NO: 38019 - DNA, 25 bp, Probe sequence
tagcgatcaatatgaagaagattct

SEQ ID NO: 38020 - DNA, 25 bp, Probe sequence
atgctaataatggtgctgtaggtaa

SEQ ID NO: 38021 - DNA, 25 bp, Probe sequence
aatgctaataatggtgctgtaggta

SEQ ID NO: 38022 - DNA, 25 bp, Probe sequence
taatgctaataatggtgctgtaggt

SEQ ID NO: 38023 - DNA, 25 bp, Probe sequence
ttaatgctaataatggtgctgtagg

SEQ ID NO: 38024 - DNA, 25 bp, Probe sequence
tattgaagtggctgagttagtcgta

SEQ ID NO: 38025 - DNA, 25 bp, Probe sequence
ttgcttattgaagtggctgagttag

SEQ ID NO: 38026 - DNA, 25 bp, Probe sequence
cgactggtacatatattgcctacat

SEQ ID NO: 38027 - DNA, 25 bp, Probe sequence
aacgactggtacatatattgcctac

SEQ ID NO: 38028 - DNA, 25 bp, Probe sequence
cttattgaagtggctgagttagtcg

SEQ ID NO: 38029 - DNA, 25 bp, Probe sequence
cctcaagatacgaatcaccatcata

SEQ ID NO: 38030 - DNA, 25 bp, Probe sequence
tcaagatacgaatcaccatcataca

SEQ ID NO: 38031 - DNA, 25 bp, Probe sequence
ctcaagatacgaatcaccatcatac

SEQ ID NO: 38032 - DNA, 25 bp, Probe sequence
caagatacgaatcaccatcatacaa

SEQ ID NO: 38033 - DNA, 25 bp, Probe sequence
gatacgaatcaccatcatacaatgt

SEQ ID NO: 38034 - DNA, 25 bp, Probe sequence
agatacgaatcaccatcatacaatg

SEQ ID NO: 38035 - DNA, 25 bp, Probe sequence
ttggtggtacattgatggctaatat

SEQ ID NO: 38036 - DNA, 25 bp, Probe sequence
atacgaatcaccatcatacaatgtt

SEQ ID NO: 38037 - DNA, 25 bp, Probe sequence
aagatacgaatcaccatcatacaat

SEQ ID NO: 38038 - DNA, 25 bp, Probe sequence
ttgagacatgacatttatgaaggaa

SEQ ID NO: 38039 - DNA, 25 bp, Probe sequence
tgagacatgacatttatgaaggaat

SEQ ID NO: 38040 - DNA, 25 bp, Probe sequence
ggtattaaaccaaattatgctgagc

SEQ ID NO: 38041 - DNA, 25 bp, Probe sequence
attaaaccaaattatgctgagcttg

SEQ ID NO: 38042 - DNA, 25 bp, Probe sequence
gtattaaaccaaattatgctgagct

SEQ ID NO: 38043 - DNA, 25 bp, Probe sequence
gacatgacatttatgaaggaatgct

SEQ ID NO: 38044 - DNA, 25 bp, Probe sequence
agacatgacatttatgaaggaatgc

SEQ ID NO: 38045 - DNA, 25 bp, Probe sequence
acatgacatttatgaaggaatgcta

SEQ ID NO: 38046 - DNA, 25 bp, Probe sequence
tattaaaccaaattatgctgagctt

SEQ ID NO: 38047 - DNA, 25 bp, Probe sequence
cgcattgatgaattaccacaactaa

SEQ ID NO: 38048 - DNA, 25 bp, Probe sequence
acgcattgatgaattaccacaacta

SEQ ID NO: 38049 - DNA, 25 bp, Probe sequence
atattcgccattgctatcgtcatag

SEQ ID NO: 38050 - DNA, 25 bp, Probe sequence
gcattgatgaattaccacaactaat

SEQ ID NO: 38051 - DNA, 25 bp, Probe sequence
aattcaaggtggatatgacttaaca

SEQ ID NO: 38052 - DNA, 25 bp, Probe sequence
aacacgcattgatgaattaccacaa

SEQ ID NO: 38053 - DNA, 25 bp, Probe sequence
attcaaggtggatatgacttaacac

SEQ ID NO: 38054 - DNA, 25 bp, Probe sequence
tattcgccattgctatcgtcataga

SEQ ID NO: 38055 - DNA, 25 bp, Probe sequence
cacgcattgatgaattaccacaact

SEQ ID NO: 38056 - DNA, 25 bp, Probe sequence
atgacgaaggtattgttggaactat

SEQ ID NO: 38057 - DNA, 25 bp, Probe sequence
ttatgacgaaggtattgttggaact

SEQ ID NO: 38058 - DNA, 25 bp, Probe sequence
tgacgaaggtattgttggaactata

SEQ ID NO: 38059 - DNA, 25 bp, Probe sequence
tatgacgaaggtattgttggaacta

SEQ ID NO: 38060 - DNA, 25 bp, Probe sequence
agcaacagattggttaatacaacaa

SEQ ID NO: 38061 - DNA, 25 bp, Probe sequence
aagcaacagattggttaatacaaca

SEQ ID NO: 38062 - DNA, 25 bp, Probe sequence
gacgaaggtattgttggaactataa

SEQ ID NO: 38063 - DNA, 25 bp, Probe sequence
gcaacagattggttaatacaacaag

SEQ ID NO: 38064 - DNA, 25 bp, Probe sequence
gaagcaacagattggttaatacaac

SEQ ID NO: 38065 - DNA, 25 bp, Probe sequence
gcaaccgaatatggaagtgataagt

SEQ ID NO: 38066 - DNA, 25 bp, Probe sequence
caaccgaatatggaagtgataagta

SEQ ID NO: 38067 - DNA, 25 bp, Probe sequence
cgcaaccgaatatggaagtgataag

SEQ ID NO: 38068 - DNA, 25 bp, Probe sequence
aaccgaatatggaagtgataagtaa

SEQ ID NO: 38069 - DNA, 25 bp, Probe sequence
caagtgaaagtatggcagaagattt

SEQ ID NO: 38070 - DNA, 25 bp, Probe sequence
ggtatctcaagagcaggtatgttta

SEQ ID NO: 38071 - DNA, 25 bp, Probe sequence
gtgaaagtatggcagaagatttaga

SEQ ID NO: 38072 - DNA, 25 bp, Probe sequence
agtgaaagtatggcagaagatttag

SEQ ID NO: 38073 - DNA, 25 bp, Probe sequence
ccgcaaccgaatatggaagtgataa

SEQ ID NO: 38074 - DNA, 25 bp, Probe sequence
atatgatgttgaagcgagaatggat

SEQ ID NO: 38075 - DNA, 25 bp, Probe sequence
atgatgttgaagcgagaatggatta

SEQ ID NO: 38076 - DNA, 25 bp, Probe sequence
tatgatgttgaagcgagaatggatt

SEQ ID NO: 38077 - DNA, 25 bp, Probe sequence
gatattgtgcgaattgatggtaacg

SEQ ID NO: 38078 - DNA, 25 bp, Probe sequence
tgatgttgaagcgagaatggattac

SEQ ID NO: 38079 - DNA, 25 bp, Probe sequence
tattgtgcgaattgatggtaacgat

SEQ ID NO: 38080 - DNA, 25 bp, Probe sequence
atattgtgcgaattgatggtaacga

SEQ ID NO: 38081 - DNA, 25 bp, Probe sequence
atgaaggttcaagaagattaggtga

SEQ ID NO: 38082 - DNA, 25 bp, Probe sequence
gatgaaggttcaagaagattaggtg

SEQ ID NO: 38083 - DNA, 25 bp, Probe sequence
agttattgatgaagaattaagcggt

SEQ ID NO: 38084 - DNA, 25 bp, Probe sequence
gttattgatgaagaattaagcggtt

SEQ ID NO: 38085 - DNA, 25 bp, Probe sequence
attgatgaagaattaagcggttatt

SEQ ID NO: 38086 - DNA, 25 bp, Probe sequence
tagttattgatgaagaattaagcgg

SEQ ID NO: 38087 - DNA, 25 bp, Probe sequence
ttattgatgaagaattaagcggtta

SEQ ID NO: 38088 - DNA, 25 bp, Probe sequence
tattgatgaagaattaagcggttat

SEQ ID NO: 38089 - DNA, 25 bp, Probe sequence
ttgatgaagaattaagcggttattt

SEQ ID NO: 38090 - DNA, 25 bp, Probe sequence
aaagaggcatttgcagattacttaa

SEQ ID NO: 38091 - DNA, 25 bp, Probe sequence
aagaggcatttgcagattacttaat

SEQ ID NO: 38092 - DNA, 25 bp, Probe sequence
ccgatttgatattgcgaagttagtt

SEQ ID NO: 38093 - DNA, 25 bp, Probe sequence
gaccgatttgatattgcgaagttag

SEQ ID NO: 38094 - DNA, 25 bp, Probe sequence
tgttaaatggagtttgaattgcgat

SEQ ID NO: 38095 - DNA, 25 bp, Probe sequence
atgttaaatggagtttgaattgcga

SEQ ID NO: 38096 - DNA, 25 bp, Probe sequence
accgatttgatattgcgaagttagt

SEQ ID NO: 38097 - DNA, 25 bp, Probe sequence
aagtaggctttatatctgatggaca

SEQ ID NO: 38098 - DNA, 25 bp, Probe sequence
cgatttgatattgcgaagttagttt

SEQ ID NO: 38099 - DNA, 25 bp, Probe sequence
ggaccgatttgatattgcgaagtta

SEQ ID NO: 38100 - DNA, 25 bp, Probe sequence
gttaaatggagtttgaattgcgata

SEQ ID NO: 38101 - DNA, 25 bp, Probe sequence
gtggctatgacaaatgaagagaaag

SEQ ID NO: 38102 - DNA, 25 bp, Probe sequence
tggctatgacaaatgaagagaaagt

SEQ ID NO: 38103 - DNA, 25 bp, Probe sequence
ggctatgacaaatgaagagaaagta

SEQ ID NO: 38104 - DNA, 25 bp, Probe sequence
tgacaaatgaagagaaagtattagc

SEQ ID NO: 38105 - DNA, 25 bp, Probe sequence
gctatgacaaatgaagagaaagtat

SEQ ID NO: 38106 - DNA, 25 bp, Probe sequence
atcaagagaaagattgtcgccaagt

SEQ ID NO: 38107 - DNA, 25 bp, Probe sequence
aagagaaagattgtcgccaagtgaa

SEQ ID NO: 38108 - DNA, 25 bp, Probe sequence
aatcaagagaaagattgtcgccaag

SEQ ID NO: 38109 - DNA, 25 bp, Probe sequence
ctattgctgacgctttaggacaatt

SEQ ID NO: 38110 - DNA, 25 bp, Probe sequence
gtgatattgaagtagttggtgaagg

SEQ ID NO: 38111 - DNA, 25 bp, Probe sequence
tgatattgaagtagttggtgaaggc

SEQ ID NO: 38112 - DNA, 25 bp, Probe sequence
agtgatattgaagtagttggtgaag

SEQ ID NO: 38113 - DNA, 25 bp, Probe sequence
gatattgaagtagttggtgaaggcg

SEQ ID NO: 38114 - DNA, 25 bp, Probe sequence
aagtgatattgaagtagttggtgaa

SEQ ID NO: 38115 - DNA, 25 bp, Probe sequence
gtgtagaagcgacgactcagattaa

SEQ ID NO: 38116 - DNA, 25 bp, Probe sequence
attagatgcaggtgtcgatagttac

SEQ ID NO: 38117 - DNA, 25 bp, Probe sequence
tgaaatgcttacagaacgagaaatg

SEQ ID NO: 38118 - DNA, 25 bp, Probe sequence
gcgaaaggttactcaaatcaagaaa

SEQ ID NO: 38119 - DNA, 25 bp, Probe sequence
gccactgaaggatgattcgtatatt

SEQ ID NO: 38120 - DNA, 25 bp, Probe sequence
gttcacaagatgaggacgaagatac

SEQ ID NO: 38121 - DNA, 25 bp, Probe sequence
tgaattacattatgataagacgcct

SEQ ID NO: 38122 - DNA, 25 bp, Probe sequence
tcacaagatgaggacgaagatacaa

SEQ ID NO: 38123 - DNA, 25 bp, Probe sequence
ttcacaagatgaggacgaagataca

SEQ ID NO: 38124 - DNA, 25 bp, Probe sequence
ctgaattacattatgataagacgcc

SEQ ID NO: 38125 - DNA, 25 bp, Probe sequence
ccactgaaggatgattcgtatatta

SEQ ID NO: 38126 - DNA, 25 bp, Probe sequence
actgaattacattatgataagacgc

SEQ ID NO: 38127 - DNA, 25 bp, Probe sequence
cgccactgaaggatgattcgtatat

SEQ ID NO: 38128 - DNA, 25 bp, Probe sequence
gtgaacgccatacttataaacttct

SEQ ID NO: 38129 - DNA, 25 bp, Probe sequence
acgccatacttataaacttcttcaa

SEQ ID NO: 38130 - DNA, 25 bp, Probe sequence
aacgccatacttataaacttcttca

SEQ ID NO: 38131 - DNA, 25 bp, Probe sequence
agtgaacgccatacttataaacttc

SEQ ID NO: 38132 - DNA, 25 bp, Probe sequence
tgaacgccatacttataaacttctt

SEQ ID NO: 38133 - DNA, 25 bp, Probe sequence
aagaagttgctcaattgttacgtat

SEQ ID NO: 38134 - DNA, 25 bp, Probe sequence
gttgctcaattgttacgtataagtg

SEQ ID NO: 38135 - DNA, 25 bp, Probe sequence
gaacgccatacttataaacttcttc

SEQ ID NO: 38136 - DNA, 25 bp, Probe sequence
agttgctcaattgttacgtataagt

SEQ ID NO: 38137 - DNA, 25 bp, Probe sequence
attgtatcattgccagattcaggta

SEQ ID NO: 38138 - DNA, 25 bp, Probe sequence
tattgtatcattgccagattcaggt

SEQ ID NO: 38139 - DNA, 25 bp, Probe sequence
gaagttagaaccaccattagaccaa

SEQ ID NO: 38140 - DNA, 25 bp, Probe sequence
ccatattgtatcattgccagattca

SEQ ID NO: 38141 - DNA, 25 bp, Probe sequence
gttccatattgtatcattgccagat

SEQ ID NO: 38142 - DNA, 25 bp, Probe sequence
atattgtatcattgccagattcagg

SEQ ID NO: 38143 - DNA, 25 bp, Probe sequence
tccatattgtatcattgccagattc

SEQ ID NO: 38144 - DNA, 25 bp, Probe sequence
attgtgtattattgttggttcggta

SEQ ID NO: 38145 - DNA, 25 bp, Probe sequence
tattgtgtattattgttggttcggt

SEQ ID NO: 38146 - DNA, 25 bp, Probe sequence
ccgtaggttataagaatagtgcgat

SEQ ID NO: 38147 - DNA, 25 bp, Probe sequence
tccgtaggttataagaatagtgcga

SEQ ID NO: 38148 - DNA, 25 bp, Probe sequence
ttccgtaggttataagaatagtgcg

SEQ ID NO: 38149 - DNA, 25 bp, Probe sequence
cgtaggttataagaatagtgcgatt

SEQ ID NO: 38150 - DNA, 25 bp, Probe sequence
agaattgcgtcaagaaggaaactaa

SEQ ID NO: 38151 - DNA, 25 bp, Probe sequence
aagaattgcgtcaagaaggaaacta

SEQ ID NO: 38152 - DNA, 25 bp, Probe sequence
atagatacgaagaattgcgtcaaga

SEQ ID NO: 38153 - DNA, 25 bp, Probe sequence
gatagatacgaagaattgcgtcaag

SEQ ID NO: 38154 - DNA, 25 bp, Probe sequence
agatagatacgaagaattgcgtcaa

SEQ ID NO: 38155 - DNA, 25 bp, Probe sequence
tcaagacatagaggcgaaagtaaat

SEQ ID NO: 38156 - DNA, 25 bp, Probe sequence
caagacatagaggcgaaagtaaatt

SEQ ID NO: 38157 - DNA, 25 bp, Probe sequence
gtcaagacatagaggcgaaagtaaa

SEQ ID NO: 38158 - DNA, 25 bp, Probe sequence
aaagtaagtataacgaagtgttccg

SEQ ID NO: 38159 - DNA, 25 bp, Probe sequence
caaacatagtgatggcgatatagaa

SEQ ID NO: 38160 - DNA, 25 bp, Probe sequence
tcaaacatagtgatggcgatataga

SEQ ID NO: 38161 - DNA, 25 bp, Probe sequence
gagaatccacaagttgaaatgttga

SEQ ID NO: 38162 - DNA, 25 bp, Probe sequence
tgagaatccacaagttgaaatgttg

SEQ ID NO: 38163 - DNA, 25 bp, Probe sequence
agaatccacaagttgaaatgttgaa

SEQ ID NO: 38164 - DNA, 25 bp, Probe sequence
tgacacaagtaagacagatagcatc

SEQ ID NO: 38165 - DNA, 25 bp, Probe sequence
caagtaagacagatagcatcgtgaa

SEQ ID NO: 38166 - DNA, 25 bp, Probe sequence
gacacaagtaagacagatagcatcg

SEQ ID NO: 38167 - DNA, 25 bp, Probe sequence
taagaagaagaggaatggaagtacc

SEQ ID NO: 38168 - DNA, 25 bp, Probe sequence
acaagtaagacagatagcatcgtga

SEQ ID NO: 38169 - DNA, 25 bp, Probe sequence
acacaagtaagacagatagcatcgt

SEQ ID NO: 38170 - DNA, 25 bp, Probe sequence
tctaagaagaagaggaatggaagta

SEQ ID NO: 38171 - DNA, 25 bp, Probe sequence
ctgacacaagtaagacagatagcat

SEQ ID NO: 38172 - DNA, 25 bp, Probe sequence
ctaagaagaagaggaatggaagtac

SEQ ID NO: 38173 - DNA, 25 bp, Probe sequence
atagcaactattccagtagagcatc

SEQ ID NO: 38174 - DNA, 25 bp, Probe sequence
gatagcaactattccagtagagcat

SEQ ID NO: 38175 - DNA, 25 bp, Probe sequence
cagatagcaactattccagtagagc

SEQ ID NO: 38176 - DNA, 25 bp, Probe sequence
agatagcaactattccagtagagca

SEQ ID NO: 38177 - DNA, 25 bp, Probe sequence
tcagatagcaactattccagtagag

SEQ ID NO: 38178 - DNA, 25 bp, Probe sequence
atcagatagcaactattccagtaga

SEQ ID NO: 38179 - DNA, 25 bp, Probe sequence
tagcaactattccagtagagcatcg

SEQ ID NO: 38180 - DNA, 25 bp, Probe sequence
tattccagtagagcatcgagaagaa

SEQ ID NO: 38181 - DNA, 25 bp, Probe sequence
gaggagatagcgagaaagcaatata

SEQ ID NO: 38182 - DNA, 25 bp, Probe sequence
aagacctgtcgctatattatgtacg

SEQ ID NO: 38183 - DNA, 25 bp, Probe sequence
atatagatgtctatgcgaatcgtgg

SEQ ID NO: 38184 - DNA, 25 bp, Probe sequence
gtccgcatgaattaagaagtgtagg

SEQ ID NO: 38185 - DNA, 25 bp, Probe sequence
gcattcgttggtgaattgattaaga

SEQ ID NO: 38186 - DNA, 25 bp, Probe sequence
tgtattattgaacaacgatggtggc

SEQ ID NO: 38187 - DNA, 25 bp, Probe sequence
aatatagatgtctatgcgaatcgtg

SEQ ID NO: 38188 - DNA, 25 bp, Probe sequence
atgtaagttatgagttcgatatgcc

SEQ ID NO: 38189 - DNA, 25 bp, Probe sequence
cgtccgcatgaattaagaagtgtag

SEQ ID NO: 38190 - DNA, 25 bp, Probe sequence
gtcgctatattatgtacgtcaggta

SEQ ID NO: 38191 - DNA, 25 bp, Probe sequence
attggcgacctacatattgacttaa

SEQ ID NO: 38192 - DNA, 25 bp, Probe sequence
aattggcgacctacatattgactta

SEQ ID NO: 38193 - DNA, 25 bp, Probe sequence
ttggcgacctacatattgacttaac

SEQ ID NO: 38194 - DNA, 25 bp, Probe sequence
gaattggcgacctacatattgactt

SEQ ID NO: 38195 - DNA, 25 bp, Probe sequence
ggcgacctacatattgacttaacaa

SEQ ID NO: 38196 - DNA, 25 bp, Probe sequence
tggcgacctacatattgacttaaca

SEQ ID NO: 38197 - DNA, 25 bp, Probe sequence
atggaattggcgacctacatattga

SEQ ID NO: 38198 - DNA, 25 bp, Probe sequence
ggaattggcgacctacatattgact

SEQ ID NO: 38199 - DNA, 25 bp, Probe sequence
actcgttctattattgggatgtgta

SEQ ID NO: 38200 - DNA, 25 bp, Probe sequence
aacggtagacaagctgataatcatt

SEQ ID NO: 38201 - DNA, 25 bp, Probe sequence
tagatgtgtttgtcgttagagaagg

SEQ ID NO: 38202 - DNA, 25 bp, Probe sequence
acggtagacaagctgataatcattc

SEQ ID NO: 38203 - DNA, 25 bp, Probe sequence
atgtgtttgtcgttagagaaggaaa

SEQ ID NO: 38204 - DNA, 25 bp, Probe sequence
aaacaacaaagtgaggctgatttaa

SEQ ID NO: 38205 - DNA, 25 bp, Probe sequence
ttaaacaacaaagtgaggctgattt

SEQ ID NO: 38206 - DNA, 25 bp, Probe sequence
ggtagacaagctgataatcattcga

SEQ ID NO: 38207 - DNA, 25 bp, Probe sequence
cccagatatagatgtgtttgtcgtt

SEQ ID NO: 38208 - DNA, 25 bp, Probe sequence
gatgtgtttgtcgttagagaaggaa

SEQ ID NO: 38209 - DNA, 25 bp, Probe sequence
ttcaatcgcaactagaattaccagt

SEQ ID NO: 38210 - DNA, 25 bp, Probe sequence
agcattaagagattatggtacaggt

SEQ ID NO: 38211 - DNA, 25 bp, Probe sequence
gcattaagagattatggtacaggtc

SEQ ID NO: 38212 - DNA, 25 bp, Probe sequence
ttctgctacaggtcatacaattcat

SEQ ID NO: 38213 - DNA, 25 bp, Probe sequence
aagcattaagagattatggtacagg

SEQ ID NO: 38214 - DNA, 25 bp, Probe sequence
aggtcatacaattcatgtggaagat

SEQ ID NO: 38215 - DNA, 25 bp, Probe sequence
tacaggtcatacaattcatgtggaa

SEQ ID NO: 38216 - DNA, 25 bp, Probe sequence
ctacaggtcatacaattcatgtgga

SEQ ID NO: 38217 - DNA, 25 bp, Probe sequence
caggtcatacaattcatgtggaaga

SEQ ID NO: 38218 - DNA, 25 bp, Probe sequence
aataaattatatgaacgctgtggca

SEQ ID NO: 38219 - DNA, 25 bp, Probe sequence
actcaaattcaacaaacttcaactg

SEQ ID NO: 38220 - DNA, 25 bp, Probe sequence
ataaattatatgaacgctgtggcat

SEQ ID NO: 38221 - DNA, 25 bp, Probe sequence
caagttaattgacagtctaatgcta

SEQ ID NO: 38222 - DNA, 25 bp, Probe sequence
tagcaagttaattgacagtctaatg

SEQ ID NO: 38223 - DNA, 25 bp, Probe sequence
tcagagttgaataaagttgaagcat

SEQ ID NO: 38224 - DNA, 25 bp, Probe sequence
atcagagttgaataaagttgaagca

SEQ ID NO: 38225 - DNA, 25 bp, Probe sequence
aactcaaattcaacaaacttcaact

SEQ ID NO: 38226 - DNA, 25 bp, Probe sequence
ctcaaattcaacaaacttcaactga

SEQ ID NO: 38227 - DNA, 25 bp, Probe sequence
atggcagatgttattgatggtacaa

SEQ ID NO: 38228 - DNA, 25 bp, Probe sequence
gtaacaacaccgccttcatctaatg

SEQ ID NO: 38229 - DNA, 25 bp, Probe sequence
ttggttcaggaacaatcgttattaa

SEQ ID NO: 38230 - DNA, 25 bp, Probe sequence
catggcagatgttattgatggtaca

SEQ ID NO: 38231 - DNA, 25 bp, Probe sequence
taaagcaggacagttagcaaagata

SEQ ID NO: 38232 - DNA, 25 bp, Probe sequence
gatgataagaaatatggtgaaggcg

SEQ ID NO: 38233 - DNA, 25 bp, Probe sequence
tatcaacatcgctttcaactcaaac

SEQ ID NO: 38234 - DNA, 25 bp, Probe sequence
gtatcaacatcgctttcaactcaaa

SEQ ID NO: 38235 - DNA, 25 bp, Probe sequence
atgataagaaatatggtgaaggcgt

SEQ ID NO: 38236 - DNA, 25 bp, Probe sequence
ggacataatacagcaacaagacaag

SEQ ID NO: 38237 - DNA, 25 bp, Probe sequence
aggacataatacagcaacaagacaa

SEQ ID NO: 38238 - DNA, 25 bp, Probe sequence
aacaggacataatacagcaacaaga

SEQ ID NO: 38239 - DNA, 25 bp, Probe sequence
caacaggacataatacagcaacaag

SEQ ID NO: 38240 - DNA, 25 bp, Probe sequence
ataatacagcaacaagacaagcaga

SEQ ID NO: 38241 - DNA, 25 bp, Probe sequence
cataatacagcaacaagacaagcag

SEQ ID NO: 38242 - DNA, 25 bp, Probe sequence
gacataatacagcaacaagacaagc

SEQ ID NO: 38243 - DNA, 25 bp, Probe sequence
taatacagcaacaagacaagcagaa

SEQ ID NO: 38244 - DNA, 25 bp, Probe sequence
caggacataatacagcaacaagaca

SEQ ID NO: 38245 - DNA, 25 bp, Probe sequence
aggtgaagatgaagaagatgaagag

SEQ ID NO: 38246 - DNA, 25 bp, Probe sequence
tgaagatgaagaagatgaagaggtg

SEQ ID NO: 38247 - DNA, 25 bp, Probe sequence
gtgaagatgaagaagatgaagaggt

SEQ ID NO: 38248 - DNA, 25 bp, Probe sequence
gaagaagatgaagaggtggaagaag

SEQ ID NO: 38249 - DNA, 25 bp, Probe sequence
gatgaagaagatgaagaggtggaag

SEQ ID NO: 38250 - DNA, 25 bp, Probe sequence
gaagatgaagaagatgaagaggtgg

SEQ ID NO: 38251 - DNA, 25 bp, Probe sequence
ggtgaagatgaagaagatgaagagg

SEQ ID NO: 38252 - DNA, 25 bp, Probe sequence
gatggtatctggatgcctattgatg

SEQ ID NO: 38253 - DNA, 25 bp, Probe sequence
atgaagaagatgaagaggtggaaga

SEQ ID NO: 38254 - DNA, 25 bp, Probe sequence
taacgattgctgctgataatgctat

SEQ ID NO: 38255 - DNA, 25 bp, Probe sequence
gacttaacgattgctgctgataatg

SEQ ID NO: 38256 - DNA, 25 bp, Probe sequence
ttaacgattgctgctgataatgcta

SEQ ID NO: 38257 - DNA, 25 bp, Probe sequence
tgacttaacgattgctgctgataat

SEQ ID NO: 38258 - DNA, 25 bp, Probe sequence
aacgattgctgctgataatgctatt

SEQ ID NO: 38259 - DNA, 25 bp, Probe sequence
gtgacttaacgattgctgctgataa

SEQ ID NO: 38260 - DNA, 25 bp, Probe sequence
cttaacgattgctgctgataatgct

SEQ ID NO: 38261 - DNA, 25 bp, Probe sequence
acttaacgattgctgctgataatgc

SEQ ID NO: 38262 - DNA, 25 bp, Probe sequence
ggtacttatgtcgtcaatacaatgc

SEQ ID NO: 38263 - DNA, 25 bp, Probe sequence
acagaagaagaattacaagcgttaa

SEQ ID NO: 38264 - DNA, 25 bp, Probe sequence
aacagaagaagaattacaagcgtta

SEQ ID NO: 38265 - DNA, 25 bp, Probe sequence
agaatggctattatgcagatacagg

SEQ ID NO: 38266 - DNA, 25 bp, Probe sequence
atttcatttgtcgttggagaatcag

SEQ ID NO: 38267 - DNA, 25 bp, Probe sequence
catttcatttgtcgttggagaatca

SEQ ID NO: 38268 - DNA, 25 bp, Probe sequence
aagaatggctattatgcagatacag

SEQ ID NO: 38269 - DNA, 25 bp, Probe sequence
gaagaatggctattatgcagataca

SEQ ID NO: 38270 - DNA, 25 bp, Probe sequence
tgaagaatggctattatgcagatac

SEQ ID NO: 38271 - DNA, 25 bp, Probe sequence
tttcatttgtcgttggagaatcaga

SEQ ID NO: 38272 - DNA, 25 bp, Probe sequence
tacatcacaagtcaacaatctagcg

SEQ ID NO: 38273 - DNA, 25 bp, Probe sequence
atcacaagtcaacaatctagcgaag

SEQ ID NO: 38274 - DNA, 25 bp, Probe sequence
catcacaagtcaacaatctagcgaa

SEQ ID NO: 38275 - DNA, 25 bp, Probe sequence
tcacaagtcaacaatctagcgaaga

SEQ ID NO: 38276 - DNA, 25 bp, Probe sequence
acatcacaagtcaacaatctagcga

SEQ ID NO: 38277 - DNA, 25 bp, Probe sequence
tatcacatctgaacagctagaactt

SEQ ID NO: 38278 - DNA, 25 bp, Probe sequence
atcacatctgaacagctagaacttc

SEQ ID NO: 38279 - DNA, 25 bp, Probe sequence
atatcacatctgaacagctagaact

SEQ ID NO: 38280 - DNA, 25 bp, Probe sequence
caagatgtcaatgtttatcggaagt

SEQ ID NO: 38281 - DNA, 25 bp, Probe sequence
gattctggtttaaggcattcaaaca

SEQ ID NO: 38282 - DNA, 25 bp, Probe sequence
tgattctggtttaaggcattcaaac

SEQ ID NO: 38283 - DNA, 25 bp, Probe sequence
attctggtttaaggcattcaaacat

SEQ ID NO: 38284 - DNA, 25 bp, Probe sequence
ttgattttgattctggtttaaggca

SEQ ID NO: 38285 - DNA, 25 bp, Probe sequence
ttctggtttaaggcattcaaacatg

SEQ ID NO: 38286 - DNA, 25 bp, Probe sequence
tgattttgattctggtttaaggcat

SEQ ID NO: 38287 - DNA, 25 bp, Probe sequence
ttgattctggtttaaggcattcaaa

SEQ ID NO: 38288 - DNA, 25 bp, Probe sequence
tttgattctggtttaaggcattcaa

SEQ ID NO: 38289 - DNA, 25 bp, Probe sequence
attttgattctggtttaaggcattc

SEQ ID NO: 38290 - DNA, 25 bp, Probe sequence
cattgtacctgaagttgttatgtgg

SEQ ID NO: 38291 - DNA, 25 bp, Probe sequence
gcattgtacctgaagttgttatgtg

SEQ ID NO: 38292 - DNA, 25 bp, Probe sequence
attgtacctgaagttgttatgtggc

SEQ ID NO: 38293 - DNA, 25 bp, Probe sequence
ggcattgtacctgaagttgttatgt

SEQ ID NO: 38294 - DNA, 25 bp, Probe sequence
ggatatggatggtgttgtatgtggc

SEQ ID NO: 38295 - DNA, 25 bp, Probe sequence
tacctgaagttgttatgtggcgaga

SEQ ID NO: 38296 - DNA, 25 bp, Probe sequence
gatatggatggtgttgtatgtggcg

SEQ ID NO: 38297 - DNA, 25 bp, Probe sequence
ttgtacctgaagttgttatgtggcg

SEQ ID NO: 38298 - DNA, 25 bp, Probe sequence
gggcattgtacctgaagttgttatg

SEQ ID NO: 38299 - DNA, 25 bp, Probe sequence
tagcggtgattgttaaaattgatgg

SEQ ID NO: 38300 - DNA, 25 bp, Probe sequence
gcggtgattgttaaaattgatggta

SEQ ID NO: 38301 - DNA, 25 bp, Probe sequence
attgatggtaaacaatcaccgctat

SEQ ID NO: 38302 - DNA, 25 bp, Probe sequence
aagtagcggtgattgttaaaattga

SEQ ID NO: 38303 - DNA, 25 bp, Probe sequence
gtagcggtgattgttaaaattgatg

SEQ ID NO: 38304 - DNA, 25 bp, Probe sequence
agtagcggtgattgttaaaattgat

SEQ ID NO: 38305 - DNA, 25 bp, Probe sequence
tgatggtaaacaatcaccgctattt

SEQ ID NO: 38306 - DNA, 25 bp, Probe sequence
ttgatggtaaacaatcaccgctatt

SEQ ID NO: 38307 - DNA, 25 bp, Probe sequence
aattgatggtaaacaatcaccgcta

SEQ ID NO: 38308 - DNA, 25 bp, Probe sequence
caatagtaatggtgattatgcaaca

SEQ ID NO: 38309 - DNA, 25 bp, Probe sequence
gatggaaacaaccaaattgatgtgt

SEQ ID NO: 38310 - DNA, 25 bp, Probe sequence
atggaaacaaccaaattgatgtgtg

SEQ ID NO: 38311 - DNA, 25 bp, Probe sequence
tcaatagtaatggtgattatgcaac

SEQ ID NO: 38312 - DNA, 25 bp, Probe sequence
ggatggaaacaaccaaattgatgtg

SEQ ID NO: 38313 - DNA, 25 bp, Probe sequence
tggatggaaacaaccaaattgatgt

SEQ ID NO: 38314 - DNA, 25 bp, Probe sequence
tggaaacaaccaaattgatgtgtgt

SEQ ID NO: 38315 - DNA, 25 bp, Probe sequence
ggaaacaaccaaattgatgtgtgtt

SEQ ID NO: 38316 - DNA, 25 bp, Probe sequence
atcaatagtaatggtgattatgcaa

SEQ ID NO: 38317 - DNA, 25 bp, Probe sequence
aagccaacattgaatagacttaacg

SEQ ID NO: 38318 - DNA, 25 bp, Probe sequence
agccaacattgaatagacttaacgg

SEQ ID NO: 38319 - DNA, 25 bp, Probe sequence
taagccaacattgaatagacttaac

SEQ ID NO: 38320 - DNA, 25 bp, Probe sequence
aatacgaagggtgttattgttcaat

SEQ ID NO: 38321 - DNA, 25 bp, Probe sequence
gccaacattgaatagacttaacggg

SEQ ID NO: 38322 - DNA, 25 bp, Probe sequence
tgacaccaacagatatgggtaaatt

SEQ ID NO: 38323 - DNA, 25 bp, Probe sequence
atgacaccaacagatatgggtaaat

SEQ ID NO: 38324 - DNA, 25 bp, Probe sequence
atacgaagggtgttattgttcaata

SEQ ID NO: 38325 - DNA, 25 bp, Probe sequence
gacaccaacagatatgggtaaatta

SEQ ID NO: 38326 - DNA, 25 bp, Probe sequence
gaagtgatagagaacaagcattagc

SEQ ID NO: 38327 - DNA, 25 bp, Probe sequence
gtgatagagaacaagcattagcaac

SEQ ID NO: 38328 - DNA, 25 bp, Probe sequence
agtgatagagaacaagcattagcaa

SEQ ID NO: 38329 - DNA, 25 bp, Probe sequence
aagtgatagagaacaagcattagca

SEQ ID NO: 38330 - DNA, 25 bp, Probe sequence
tggaagtgatagagaacaagcatta

SEQ ID NO: 38331 - DNA, 25 bp, Probe sequence
gatagagaacaagcattagcaacaa

SEQ ID NO: 38332 - DNA, 25 bp, Probe sequence
tgatagagaacaagcattagcaaca

SEQ ID NO: 38333 - DNA, 25 bp, Probe sequence
ggaagtgatagagaacaagcattag

SEQ ID NO: 38334 - DNA, 25 bp, Probe sequence
gtggaagtgatagagaacaagcatt

SEQ ID NO: 38335 - DNA, 25 bp, Probe sequence
atcaatctgcttcgttaattcgttc

SEQ ID NO: 38336 - DNA, 25 bp, Probe sequence
caatctgcttcgttaattcgttcaa

SEQ ID NO: 38337 - DNA, 25 bp, Probe sequence
tcaatctgcttcgttaattcgttca

SEQ ID NO: 38338 - DNA, 25 bp, Probe sequence
atggatcaatctgcttcgttaattc

SEQ ID NO: 38339 - DNA, 25 bp, Probe sequence
caatggatcaatctgcttcgttaat

SEQ ID NO: 38340 - DNA, 25 bp, Probe sequence
gatcaatctgcttcgttaattcgtt

SEQ ID NO: 38341 - DNA, 25 bp, Probe sequence
aatggatcaatctgcttcgttaatt

SEQ ID NO: 38342 - DNA, 25 bp, Probe sequence
acaatggatcaatctgcttcgttaa

SEQ ID NO: 38343 - DNA, 25 bp, Probe sequence
aacaatggatcaatctgcttcgtta

SEQ ID NO: 38344 - DNA, 25 bp, Probe sequence
ggaccaatgattgaacaactagatg

SEQ ID NO: 38345 - DNA, 25 bp, Probe sequence
tggaccaatgattgaacaactagat

SEQ ID NO: 38346 - DNA, 25 bp, Probe sequence
atggaccaatgattgaacaactaga

SEQ ID NO: 38347 - DNA, 25 bp, Probe sequence
gaccaatgattgaacaactagatgc

SEQ ID NO: 38348 - DNA, 25 bp, Probe sequence
catggaccaatgattgaacaactag

SEQ ID NO: 38349 - DNA, 25 bp, Probe sequence
agcattatttgtgtttcagatttcg

SEQ ID NO: 38350 - DNA, 25 bp, Probe sequence
ccaatgattgaacaactagatgcaa

SEQ ID NO: 38351 - DNA, 25 bp, Probe sequence
atgattgaacaactagatgcaagag

SEQ ID NO: 38352 - DNA, 25 bp, Probe sequence
tgattgaacaactagatgcaagagt

SEQ ID NO: 38353 - DNA, 25 bp, Probe sequence
gaatatgacgatgacacctgaagat

SEQ ID NO: 38354 - DNA, 25 bp, Probe sequence
aatatgacgatgacacctgaagatg

SEQ ID NO: 38355 - DNA, 25 bp, Probe sequence
acgatgacacctgaagatgttatta

SEQ ID NO: 38356 - DNA, 25 bp, Probe sequence
gacgatgacacctgaagatgttatt

SEQ ID NO: 38357 - DNA, 25 bp, Probe sequence
cgatgacacctgaagatgttattaa

SEQ ID NO: 38358 - DNA, 25 bp, Probe sequence
atgacacctgaagatgttattaacg

SEQ ID NO: 38359 - DNA, 25 bp, Probe sequence
acacctgaagatgttattaacgcaa

SEQ ID NO: 38360 - DNA, 25 bp, Probe sequence
gacacctgaagatgttattaacgca

SEQ ID NO: 38361 - DNA, 25 bp, Probe sequence
tgacacctgaagatgttattaacgc

SEQ ID NO: 38362 - DNA, 25 bp, Probe sequence
atcattaacgacgctaccagttatt

SEQ ID NO: 38363 - DNA, 25 bp, Probe sequence
catcattaacgacgctaccagttat

SEQ ID NO: 38364 - DNA, 25 bp, Probe sequence
tcattaacgacgctaccagttattg

SEQ ID NO: 38365 - DNA, 25 bp, Probe sequence
aattgttcaaatgccaggaggtatt

SEQ ID NO: 38366 - DNA, 25 bp, Probe sequence
aacaagtagtatccgcacatcgtac

SEQ ID NO: 38367 - DNA, 25 bp, Probe sequence
attgttcaaatgccaggaggtattc

SEQ ID NO: 38368 - DNA, 25 bp, Probe sequence
cattaacgacgctaccagttattgg

SEQ ID NO: 38369 - DNA, 25 bp, Probe sequence
aaacaagtagtatccgcacatcgta

SEQ ID NO: 38370 - DNA, 25 bp, Probe sequence
tgcagcaagaatgttaagtattcaa

SEQ ID NO: 38371 - DNA, 25 bp, Probe sequence
attgaagttagcagaggttgaagta

SEQ ID NO: 38372 - DNA, 25 bp, Probe sequence
acaataatgaaggtgctaatatggc

SEQ ID NO: 38373 - DNA, 25 bp, Probe sequence
aataatgaaggtgctaatatggctg

SEQ ID NO: 38374 - DNA, 25 bp, Probe sequence
caataatgaaggtgctaatatggct

SEQ ID NO: 38375 - DNA, 25 bp, Probe sequence
gattgaagttagcagaggttgaagt

SEQ ID NO: 38376 - DNA, 25 bp, Probe sequence
ataatgaaggtgctaatatggctgc

SEQ ID NO: 38377 - DNA, 25 bp, Probe sequence
agcagagcaagttgatgatattgta

SEQ ID NO: 38378 - DNA, 25 bp, Probe sequence
tagcagagcaagttgatgatattgt

SEQ ID NO: 38379 - DNA, 25 bp, Probe sequence
gcagagcaagttgatgatattgtat

SEQ ID NO: 38380 - DNA, 25 bp, Probe sequence
tatacaagccaagtatgacgatgaa

SEQ ID NO: 38381 - DNA, 25 bp, Probe sequence
ttatacaagccaagtatgacgatga

SEQ ID NO: 38382 - DNA, 25 bp, Probe sequence
tacaatattccgcaaggttaccaag

SEQ ID NO: 38383 - DNA, 25 bp, Probe sequence
aagtacaatattccgcaaggttacc

SEQ ID NO: 38384 - DNA, 25 bp, Probe sequence
gcaaggttaccaagctatacagtta

SEQ ID NO: 38385 - DNA, 25 bp, Probe sequence
gtacaatattccgcaaggttaccaa

SEQ ID NO: 38386 - DNA, 25 bp, Probe sequence
atgactgtactaacgaatgatgtaa

SEQ ID NO: 38387 - DNA, 25 bp, Probe sequence
tgaagattgtccatgtagatacgtt

SEQ ID NO: 38388 - DNA, 25 bp, Probe sequence
ctgaagattgtccatgtagatacgt

SEQ ID NO: 38389 - DNA, 25 bp, Probe sequence
aatctagtgatctccgtaaagcaaa

SEQ ID NO: 38390 - DNA, 25 bp, Probe sequence
atgaatctagtgatctccgtaaagc

SEQ ID NO: 38391 - DNA, 25 bp, Probe sequence
gaatctagtgatctccgtaaagcaa

SEQ ID NO: 38392 - DNA, 25 bp, Probe sequence
tgaatctagtgatctccgtaaagca

SEQ ID NO: 38393 - DNA, 25 bp, Probe sequence
aatgaatctagtgatctccgtaaag

SEQ ID NO: 38394 - DNA, 25 bp, Probe sequence
aaatgaatctagtgatctccgtaaa

SEQ ID NO: 38395 - DNA, 25 bp, Probe sequence
atctagtgatctccgtaaagcaaaa

SEQ ID NO: 38396 - DNA, 25 bp, Probe sequence
aaacgcagatcaatgattcagaaaa

SEQ ID NO: 38397 - DNA, 25 bp, Probe sequence
aaaacgcagatcaatgattcagaaa

SEQ ID NO: 38398 - DNA, 25 bp, Probe sequence
aattccattagaagtagttgttcgt

SEQ ID NO: 38399 - DNA, 25 bp, Probe sequence
cagaacaattagttaagcctgtgaa

SEQ ID NO: 38400 - DNA, 25 bp, Probe sequence
ttccattagaagtagttgttcgtaa

SEQ ID NO: 38401 - DNA, 25 bp, Probe sequence
attccattagaagtagttgttcgta

SEQ ID NO: 38402 - DNA, 25 bp, Probe sequence
tccattagaagtagttgttcgtaat

SEQ ID NO: 38403 - DNA, 25 bp, Probe sequence
agaagtagttgttcgtaatattgct

SEQ ID NO: 38404 - DNA, 25 bp, Probe sequence
taagaaagacacaatggcaggtaag

SEQ ID NO: 38405 - DNA, 25 bp, Probe sequence
ctaagaaagacacaatggcaggtaa

SEQ ID NO: 38406 - DNA, 25 bp, Probe sequence
taaagatgaagttactgctggaaac

SEQ ID NO: 38407 - DNA, 25 bp, Probe sequence
attacagaattagtgagaccagacc

SEQ ID NO: 38408 - DNA, 25 bp, Probe sequence
tacagaattagtgagaccagacctt

SEQ ID NO: 38409 - DNA, 25 bp, Probe sequence
ttacagaattagtgagaccagacct

SEQ ID NO: 38410 - DNA, 25 bp, Probe sequence
acttattggtgtcactgtaggtaat

SEQ ID NO: 38411 - DNA, 25 bp, Probe sequence
ttgatgacattggatattggagatt

SEQ ID NO: 38412 - DNA, 25 bp, Probe sequence
cttattggtgtcactgtaggtaatt

SEQ ID NO: 38413 - DNA, 25 bp, Probe sequence
acagaattagtgagaccagaccttc

SEQ ID NO: 38414 - DNA, 25 bp, Probe sequence
gacttattggtgtcactgtaggtaa

SEQ ID NO: 38415 - DNA, 25 bp, Probe sequence
tattacagaattagtgagaccagac

SEQ ID NO: 38416 - DNA, 25 bp, Probe sequence
aggaagtcactgaagatactgagtt

SEQ ID NO: 38417 - DNA, 25 bp, Probe sequence
agaggaagtcactgaagatactgag

SEQ ID NO: 38418 - DNA, 25 bp, Probe sequence
gaggaagtcactgaagatactgagt

SEQ ID NO: 38419 - DNA, 25 bp, Probe sequence
atcacagaggaagtcactgaagata

SEQ ID NO: 38420 - DNA, 25 bp, Probe sequence
tcagagagttgatagacggtacttc

SEQ ID NO: 38421 - DNA, 25 bp, Probe sequence
cagaggaagtcactgaagatactga

SEQ ID NO: 38422 - DNA, 25 bp, Probe sequence
aatcacagaggaagtcactgaagat

SEQ ID NO: 38423 - DNA, 25 bp, Probe sequence
acagaggaagtcactgaagatactg

SEQ ID NO: 38424 - DNA, 25 bp, Probe sequence
cacagaggaagtcactgaagatact

SEQ ID NO: 38425 - DNA, 25 bp, Probe sequence
tatgacagtggatgaggttagtgat

SEQ ID NO: 38426 - DNA, 25 bp, Probe sequence
tatatgacagtggatgaggttagtg

SEQ ID NO: 38427 - DNA, 25 bp, Probe sequence
atatgacagtggatgaggttagtga

SEQ ID NO: 38428 - DNA, 25 bp, Probe sequence
tacatatcacattacaaccacaagt

SEQ ID NO: 38429 - DNA, 25 bp, Probe sequence
actacatatcacattacaaccacaa

SEQ ID NO: 38430 - DNA, 25 bp, Probe sequence
aactacatatcacattacaaccaca

SEQ ID NO: 38431 - DNA, 25 bp, Probe sequence
acatatcacattacaaccacaagta

SEQ ID NO: 38432 - DNA, 25 bp, Probe sequence
gacagtggatgaggttagtgatgaa

SEQ ID NO: 38433 - DNA, 25 bp, Probe sequence
atgacagtggatgaggttagtgatg

SEQ ID NO: 38434 - DNA, 25 bp, Probe sequence
acttgttattgcgttattcgtgatt

SEQ ID NO: 38435 - DNA, 25 bp, Probe sequence
tctcaattattatgctgtcaccact

SEQ ID NO: 38436 - DNA, 25 bp, Probe sequence
ttctcaattattatgctgtcaccac

SEQ ID NO: 38437 - DNA, 25 bp, Probe sequence
aacttgttattgcgttattcgtgat

SEQ ID NO: 38438 - DNA, 25 bp, Probe sequence
caacttgttattgcgttattcgtga

SEQ ID NO: 38439 - DNA, 25 bp, Probe sequence
ctcaattattatgctgtcaccacta

SEQ ID NO: 38440 - DNA, 25 bp, Probe sequence
attctcaattattatgctgtcacca

SEQ ID NO: 38441 - DNA, 25 bp, Probe sequence
tcaattattatgctgtcaccactaa

SEQ ID NO: 38442 - DNA, 25 bp, Probe sequence
caattattatgctgtcaccactaat

SEQ ID NO: 38443 - DNA, 25 bp, Probe sequence
ttggagtgacacttaattcagactt

SEQ ID NO: 38444 - DNA, 25 bp, Probe sequence
agtgacacttaattcagacttgagt

SEQ ID NO: 38445 - DNA, 25 bp, Probe sequence
ggagtgacacttaattcagacttga

SEQ ID NO: 38446 - DNA, 25 bp, Probe sequence
gagtgacacttaattcagacttgag

SEQ ID NO: 38447 - DNA, 25 bp, Probe sequence
tggagtgacacttaattcagacttg

SEQ ID NO: 38448 - DNA, 25 bp, Probe sequence
aaagatttgtcgctaggaagattga

SEQ ID NO: 38449 - DNA, 25 bp, Probe sequence
agtgaaagtgaatacaacctagcag

SEQ ID NO: 38450 - DNA, 25 bp, Probe sequence
gagtgaaagtgaatacaacctagca

SEQ ID NO: 38451 - DNA, 25 bp, Probe sequence
tgagtgaaagtgaatacaacctagc

SEQ ID NO: 38452 - DNA, 25 bp, Probe sequence
gtgttgaagcggaatatgtagatta

SEQ ID NO: 38453 - DNA, 25 bp, Probe sequence
ggtgttgaagcggaatatgtagatt

SEQ ID NO: 38454 - DNA, 25 bp, Probe sequence
tgaaggtaagccagtattaggtgtt

SEQ ID NO: 38455 - DNA, 25 bp, Probe sequence
tgttgaagcggaatatgtagattat

SEQ ID NO: 38456 - DNA, 25 bp, Probe sequence
tggtgttgaagcggaatatgtagat

SEQ ID NO: 38457 - DNA, 25 bp, Probe sequence
aatatgtgaataatccgaacggttc

SEQ ID NO: 38458 - DNA, 25 bp, Probe sequence
tgttaggtactgatagtggtgtgaa

SEQ ID NO: 38459 - DNA, 25 bp, Probe sequence
ttgttaggtactgatagtggtgtga

SEQ ID NO: 38460 - DNA, 25 bp, Probe sequence
gttgttaggtactgatagtggtgtg

SEQ ID NO: 38461 - DNA, 25 bp, Probe sequence
ccaacttcaacacttatcatacgaa

SEQ ID NO: 38462 - DNA, 25 bp, Probe sequence
cacttatcatacgaagcacaacttg

SEQ ID NO: 38463 - DNA, 25 bp, Probe sequence
tctaagattaacgatacagttggca

SEQ ID NO: 38464 - DNA, 25 bp, Probe sequence
acacttatcatacgaagcacaactt

SEQ ID NO: 38465 - DNA, 25 bp, Probe sequence
aacacttatcatacgaagcacaact

SEQ ID NO: 38466 - DNA, 25 bp, Probe sequence
caacacttatcatacgaagcacaac

SEQ ID NO: 38467 - DNA, 25 bp, Probe sequence
tcaacacttatcatacgaagcacaa

SEQ ID NO: 38468 - DNA, 25 bp, Probe sequence
ttcaacacttatcatacgaagcaca

SEQ ID NO: 38469 - DNA, 25 bp, Probe sequence
cagttggtaagaatgaacagaatga

SEQ ID NO: 38470 - DNA, 25 bp, Probe sequence
aggcttatcagaacgaagtttatct

SEQ ID NO: 38471 - DNA, 25 bp, Probe sequence
ggcttatcagaacgaagtttatctt

SEQ ID NO: 38472 - DNA, 25 bp, Probe sequence
taggcttatcagaacgaagtttatc

SEQ ID NO: 38473 - DNA, 25 bp, Probe sequence
cgataggcttatcagaacgaagttt

SEQ ID NO: 38474 - DNA, 25 bp, Probe sequence
gcgataggcttatcagaacgaagtt

SEQ ID NO: 38475 - DNA, 25 bp, Probe sequence
ataggcttatcagaacgaagtttat

SEQ ID NO: 38476 - DNA, 25 bp, Probe sequence
gataggcttatcagaacgaagttta

SEQ ID NO: 38477 - DNA, 25 bp, Probe sequence
ctatacccagagaagaaatacaagt

SEQ ID NO: 38478 - DNA, 25 bp, Probe sequence
aattggttggagagattccgaaata

SEQ ID NO: 38479 - DNA, 25 bp, Probe sequence
gatgtatatggagagcagataaccg

SEQ ID NO: 38480 - DNA, 25 bp, Probe sequence
tgatgtatatggagagcagataacc

SEQ ID NO: 38481 - DNA, 25 bp, Probe sequence
tgtatatggagagcagataaccgat

SEQ ID NO: 38482 - DNA, 25 bp, Probe sequence
atgtatatggagagcagataaccga

SEQ ID NO: 38483 - DNA, 25 bp, Probe sequence
gtatatggagagcagataaccgata

SEQ ID NO: 38484 - DNA, 25 bp, Probe sequence
atggagagcagataaccgatattaa

SEQ ID NO: 38485 - DNA, 25 bp, Probe sequence
atatggagagcagataaccgatatt

SEQ ID NO: 38486 - DNA, 25 bp, Probe sequence
tatggagagcagataaccgatatta

SEQ ID NO: 38487 - DNA, 25 bp, Probe sequence
acattcttgaagttatacattcggt

SEQ ID NO: 38488 - DNA, 25 bp, Probe sequence
aataagagtatcggaagcaacaatc

SEQ ID NO: 38489 - DNA, 25 bp, Probe sequence
tattaagtctgatggaggcaattct

SEQ ID NO: 38490 - DNA, 25 bp, Probe sequence
ctattaagtctgatggaggcaattc

SEQ ID NO: 38491 - DNA, 25 bp, Probe sequence
aactattaagtctgatggaggcaat

SEQ ID NO: 38492 - DNA, 25 bp, Probe sequence
actattaagtctgatggaggcaatt

SEQ ID NO: 38493 - DNA, 25 bp, Probe sequence
gaaggttgctgatgattggattgaa

SEQ ID NO: 38494 - DNA, 25 bp, Probe sequence
gcaataatgaattaacaggacaaca

SEQ ID NO: 38495 - DNA, 25 bp, Probe sequence
attaagtctgatggaggcaattctc

SEQ ID NO: 38496 - DNA, 25 bp, Probe sequence
taataagagtatcggaagcaacaat

SEQ ID NO: 38497 - DNA, 25 bp, Probe sequence
cagcaagacctagttacagtaagaa

SEQ ID NO: 38498 - DNA, 25 bp, Probe sequence
ttcagcaagacctagttacagtaag

SEQ ID NO: 38499 - DNA, 25 bp, Probe sequence
tcagcaagacctagttacagtaaga

SEQ ID NO: 38500 - DNA, 25 bp, Probe sequence
attcagcaagacctagttacagtaa

SEQ ID NO: 38501 - DNA, 25 bp, Probe sequence
aattcagcaagacctagttacagta

SEQ ID NO: 38502 - DNA, 25 bp, Probe sequence
aaattcagcaagacctagttacagt

SEQ ID NO: 38503 - DNA, 25 bp, Probe sequence
agcaagacctagttacagtaagaaa

SEQ ID NO: 38504 - DNA, 25 bp, Probe sequence
gcaagacctagttacagtaagaaag

SEQ ID NO: 38505 - DNA, 25 bp, Probe sequence
taaattcagcaagacctagttacag

SEQ ID NO: 38506 - DNA, 25 bp, Probe sequence
ttggatagtgctgttataggtgaag

SEQ ID NO: 38507 - DNA, 25 bp, Probe sequence
attggatagtgctgttataggtgaa

SEQ ID NO: 38508 - DNA, 25 bp, Probe sequence
aattggatagtgctgttataggtga

SEQ ID NO: 38509 - DNA, 25 bp, Probe sequence
cgaattggatagtgctgttataggt

SEQ ID NO: 38510 - DNA, 25 bp, Probe sequence
acgaattggatagtgctgttatagg

SEQ ID NO: 38511 - DNA, 25 bp, Probe sequence
tggatagtgctgttataggtgaagt

SEQ ID NO: 38512 - DNA, 25 bp, Probe sequence
gaattggatagtgctgttataggtg

SEQ ID NO: 38513 - DNA, 25 bp, Probe sequence
caatgtgtgttggtgttatcaatca

SEQ ID NO: 38514 - DNA, 25 bp, Probe sequence
aagcaacacttgaagcaattacatt

SEQ ID NO: 38515 - DNA, 25 bp, Probe sequence
tcaagaggagaacatactaagcatc

SEQ ID NO: 38516 - DNA, 25 bp, Probe sequence
tgaagtagttaatggtatcgcagaa

SEQ ID NO: 38517 - DNA, 25 bp, Probe sequence
atgaagtagttaatggtatcgcaga

SEQ ID NO: 38518 - DNA, 25 bp, Probe sequence
cttcaagaggagaacatactaagca

SEQ ID NO: 38519 - DNA, 25 bp, Probe sequence
ttcaagaggagaacatactaagcat

SEQ ID NO: 38520 - DNA, 25 bp, Probe sequence
aatgaagtagttaatggtatcgcag

SEQ ID NO: 38521 - DNA, 25 bp, Probe sequence
atgtagatggagaatatggtggtaa

SEQ ID NO: 38522 - DNA, 25 bp, Probe sequence
aatgtagatggagaatatggtggta

SEQ ID NO: 38523 - DNA, 25 bp, Probe sequence
tgtcatcattgaaggtcattctact

SEQ ID NO: 38524 - DNA, 25 bp, Probe sequence
cttatacacatcatacgacaactgc

SEQ ID NO: 38525 - DNA, 25 bp, Probe sequence
gtccgttatgctacttcaggtaata

SEQ ID NO: 38526 - DNA, 25 bp, Probe sequence
aatgctatcagaccacttgttgtag

SEQ ID NO: 38527 - DNA, 25 bp, Probe sequence
ttcttgttgatgattccattgttcg

SEQ ID NO: 38528 - DNA, 25 bp, Probe sequence
tccgttatgctacttcaggtaataa

SEQ ID NO: 38529 - DNA, 25 bp, Probe sequence
tcttatacacatcatacgacaactg

SEQ ID NO: 38530 - DNA, 25 bp, Probe sequence
attcttgttgatgattccattgttc

SEQ ID NO: 38531 - DNA, 25 bp, Probe sequence
cgaggattaggcttactaactgaag

SEQ ID NO: 38532 - DNA, 25 bp, Probe sequence
atcttatacacatcatacgacaact

SEQ ID NO: 38533 - DNA, 25 bp, Probe sequence
acttagatgcaatcgagggtttatt

SEQ ID NO: 38534 - DNA, 25 bp, Probe sequence
cttagatgcaatcgagggtttattt

SEQ ID NO: 38535 - DNA, 25 bp, Probe sequence
gacttagatgcaatcgagggtttat

SEQ ID NO: 38536 - DNA, 25 bp, Probe sequence
ttagatgcaatcgagggtttattta

SEQ ID NO: 38537 - DNA, 25 bp, Probe sequence
tgacttagatgcaatcgagggttta

SEQ ID NO: 38538 - DNA, 25 bp, Probe sequence
tgcaatcgagggtttatttatatct

SEQ ID NO: 38539 - DNA, 25 bp, Probe sequence
agatgcaatcgagggtttatttata

SEQ ID NO: 38540 - DNA, 25 bp, Probe sequence
tagatgcaatcgagggtttatttat

SEQ ID NO: 38541 - DNA, 25 bp, Probe sequence
atgcaatcgagggtttatttatatc

SEQ ID NO: 38542 - DNA, 25 bp, Probe sequence
cagattgtgtggttgtagactctaa

SEQ ID NO: 38543 - DNA, 25 bp, Probe sequence
agattgtgtggttgtagactctaat

SEQ ID NO: 38544 - DNA, 25 bp, Probe sequence
gattgtgtggttgtagactctaata

SEQ ID NO: 38545 - DNA, 25 bp, Probe sequence
gtgtggttgtagactctaatattcc

SEQ ID NO: 38546 - DNA, 25 bp, Probe sequence
caggaatgttcacttctgtaataga

SEQ ID NO: 38547 - DNA, 25 bp, Probe sequence
attgtgtggttgtagactctaatat

SEQ ID NO: 38548 - DNA, 25 bp, Probe sequence
gcagattgtgtggttgtagactcta

SEQ ID NO: 38549 - DNA, 25 bp, Probe sequence
aggaatgttcacttctgtaatagat

SEQ ID NO: 38550 - DNA, 25 bp, Probe sequence
tataattaatgacacaggtgcagga

SEQ ID NO: 38551 - DNA, 25 bp, Probe sequence
tggttacaacaacaaggcaatatag

SEQ ID NO: 38552 - DNA, 25 bp, Probe sequence
ggttacaacaacaaggcaatataga

SEQ ID NO: 38553 - DNA, 25 bp, Probe sequence
cggatatgctgctagaattgatact

SEQ ID NO: 38554 - DNA, 25 bp, Probe sequence
ttggttacaacaacaaggcaatata

SEQ ID NO: 38555 - DNA, 25 bp, Probe sequence
gcaatgaatcatattactggtggag

SEQ ID NO: 38556 - DNA, 25 bp, Probe sequence
atgaatcatattactggtggaggtt

SEQ ID NO: 38557 - DNA, 25 bp, Probe sequence
aatgaatcatattactggtggaggt

SEQ ID NO: 38558 - DNA, 25 bp, Probe sequence
aaggcaatgaatcatattactggtg

SEQ ID NO: 38559 - DNA, 25 bp, Probe sequence
caatgaatcatattactggtggagg

SEQ ID NO: 38560 - DNA, 25 bp, Probe sequence
tgaagcattagacaataacgaacaa

SEQ ID NO: 38561 - DNA, 25 bp, Probe sequence
agcattagacaataacgaacaatca

SEQ ID NO: 38562 - DNA, 25 bp, Probe sequence
gaatcggtattactcgtcttcacat

SEQ ID NO: 38563 - DNA, 25 bp, Probe sequence
gcattagacaataacgaacaatcag

SEQ ID NO: 38564 - DNA, 25 bp, Probe sequence
atgaagcattagacaataacgaaca

SEQ ID NO: 38565 - DNA, 25 bp, Probe sequence
cgttcaattattcaatacactggtg

SEQ ID NO: 38566 - DNA, 25 bp, Probe sequence
acaataacgaacaatcagttgaaga

SEQ ID NO: 38567 - DNA, 25 bp, Probe sequence
agacaataacgaacaatcagttgaa

SEQ ID NO: 38568 - DNA, 25 bp, Probe sequence
gacaataacgaacaatcagttgaag

SEQ ID NO: 38569 - DNA, 25 bp, Probe sequence
tatagttgagcatgttgaatcagga

SEQ ID NO: 38570 - DNA, 25 bp, Probe sequence
atagttgagcatgttgaatcaggaa

SEQ ID NO: 38571 - DNA, 25 bp, Probe sequence
tgagttatatccaagtgttattgct

SEQ ID NO: 38572 - DNA, 25 bp, Probe sequence
atatagttgagcatgttgaatcagg

SEQ ID NO: 38573 - DNA, 25 bp, Probe sequence
caagcatatcatagtggcgatacta

SEQ ID NO: 38574 - DNA, 25 bp, Probe sequence
tggatacgggagaaattattgaaca

SEQ ID NO: 38575 - DNA, 25 bp, Probe sequence
tacgggagaaattattgaacagaga

SEQ ID NO: 38576 - DNA, 25 bp, Probe sequence
ggatacgggagaaattattgaacag

SEQ ID NO: 38577 - DNA, 25 bp, Probe sequence
gtggtatggatacgggagaaattat

SEQ ID NO: 38578 - DNA, 25 bp, Probe sequence
aagaatacttaggtgaaggtgtagc

SEQ ID NO: 38579 - DNA, 25 bp, Probe sequence
cgttatatcgtgtcgcttatcaata

SEQ ID NO: 38580 - DNA, 25 bp, Probe sequence
gcaagaattggatgaattacaagca

SEQ ID NO: 38581 - DNA, 25 bp, Probe sequence
tgaagagactgatccaacaattaag

SEQ ID NO: 38582 - DNA, 25 bp, Probe sequence
atatcgtgtcgcttatcaatatgaa

SEQ ID NO: 38583 - DNA, 25 bp, Probe sequence
caagaattggatgaattacaagcaa

SEQ ID NO: 38584 - DNA, 25 bp, Probe sequence
cgcaagaattggatgaattacaagc

SEQ ID NO: 38585 - DNA, 25 bp, Probe sequence
gaagagactgatccaacaattaagt

SEQ ID NO: 38586 - DNA, 25 bp, Probe sequence
ttgaagagactgatccaacaattaa

SEQ ID NO: 38587 - DNA, 25 bp, Probe sequence
atgtagcgttagtatctgatggatt

SEQ ID NO: 38588 - DNA, 25 bp, Probe sequence
cagaatatgatgaagcgattgtacg

SEQ ID NO: 38589 - DNA, 25 bp, Probe sequence
gcagaatatgatgaagcgattgtac

SEQ ID NO: 38590 - DNA, 25 bp, Probe sequence
cgtatgaagcggatagtcaatcaat

SEQ ID NO: 38591 - DNA, 25 bp, Probe sequence
catgtagcgttagtatctgatggat

SEQ ID NO: 38592 - DNA, 25 bp, Probe sequence
gtatgaagcggatagtcaatcaata

SEQ ID NO: 38593 - DNA, 25 bp, Probe sequence
tcatgtagcgttagtatctgatgga

SEQ ID NO: 38594 - DNA, 25 bp, Probe sequence
aattgcgttagagagagctattgaa

SEQ ID NO: 38595 - DNA, 25 bp, Probe sequence
tatgaagcggatagtcaatcaatat

SEQ ID NO: 38596 - DNA, 25 bp, Probe sequence
tacagaaggcgttgaacctacatat

SEQ ID NO: 38597 - DNA, 25 bp, Probe sequence
atacagaaggcgttgaacctacata

SEQ ID NO: 38598 - DNA, 25 bp, Probe sequence
caaagaaacagaagatggacaattt

SEQ ID NO: 38599 - DNA, 25 bp, Probe sequence
agaaggcgttgaacctacatatcac

SEQ ID NO: 38600 - DNA, 25 bp, Probe sequence
cagaaggcgttgaacctacatatca

SEQ ID NO: 38601 - DNA, 25 bp, Probe sequence
acagaaggcgttgaacctacatatc

SEQ ID NO: 38602 - DNA, 25 bp, Probe sequence
gatacagaaggcgttgaacctacat

SEQ ID NO: 38603 - DNA, 25 bp, Probe sequence
ggacaatttaaagtgcctacaatca

SEQ ID NO: 38604 - DNA, 25 bp, Probe sequence
tggacaatttaaagtgcctacaatc

SEQ ID NO: 38605 - DNA, 25 bp, Probe sequence
gcgatgacacagattattacattgg

SEQ ID NO: 38606 - DNA, 25 bp, Probe sequence
ttattacggttaaggaagttcttgc

SEQ ID NO: 38607 - DNA, 25 bp, Probe sequence
aattgttgtaatgttgacgatgctg

SEQ ID NO: 38608 - DNA, 25 bp, Probe sequence
cgatgacacagattattacattggt

SEQ ID NO: 38609 - DNA, 25 bp, Probe sequence
ttattccaattaagcgaccttgatg

SEQ ID NO: 38610 - DNA, 25 bp, Probe sequence
tgttgtaatgttgacgatgctgatt

SEQ ID NO: 38611 - DNA, 25 bp, Probe sequence
ttgttgtaatgttgacgatgctgat

SEQ ID NO: 38612 - DNA, 25 bp, Probe sequence
attgttgtaatgttgacgatgctga

SEQ ID NO: 38613 - DNA, 25 bp, Probe sequence
tctgagcgaagtgttgtatggataa

SEQ ID NO: 38614 - DNA, 25 bp, Probe sequence
gctacagtgttagaagaaatggaaa

SEQ ID NO: 38615 - DNA, 25 bp, Probe sequence
acagtgttagaagaaatggaaatcc

SEQ ID NO: 38616 - DNA, 25 bp, Probe sequence
agctacagtgttagaagaaatggaa

SEQ ID NO: 38617 - DNA, 25 bp, Probe sequence
acttagctcacccattaaataaagg

SEQ ID NO: 38618 - DNA, 25 bp, Probe sequence
tgatgtcttagctacagtgttagaa

SEQ ID NO: 38619 - DNA, 25 bp, Probe sequence
ttgatgtcttagctacagtgttaga

SEQ ID NO: 38620 - DNA, 25 bp, Probe sequence
aacgccctactctaatattgcatta

SEQ ID NO: 38621 - DNA, 25 bp, Probe sequence
aaagtaacttagctcacccattaaa

SEQ ID NO: 38622 - DNA, 25 bp, Probe sequence
tacagtgttagaagaaatggaaatc

SEQ ID NO: 38623 - DNA, 25 bp, Probe sequence
atgtatggtgatgaagaagaaggta

SEQ ID NO: 38624 - DNA, 25 bp, Probe sequence
tatgtatggtgatgaagaagaaggt

SEQ ID NO: 38625 - DNA, 25 bp, Probe sequence
gccagaagtgctattgagattatgt

SEQ ID NO: 38626 - DNA, 25 bp, Probe sequence
aatgtattagtaattggtgctggtg

SEQ ID NO: 38627 - DNA, 25 bp, Probe sequence
atgtattagtaattggtgctggtgg

SEQ ID NO: 38628 - DNA, 25 bp, Probe sequence
gaatgtattagtaattggtgctggt

SEQ ID NO: 38629 - DNA, 25 bp, Probe sequence
tgaatgtattagtaattggtgctgg

SEQ ID NO: 38630 - DNA, 25 bp, Probe sequence
gtgctattgagattatgtatggtga

SEQ ID NO: 38631 - DNA, 25 bp, Probe sequence
agtgctattgagattatgtatggtg

SEQ ID NO: 38632 - DNA, 25 bp, Probe sequence
aagccacaacgattagtagtagatt

SEQ ID NO: 38633 - DNA, 25 bp, Probe sequence
tggctagtgagatattatcaaggtt

SEQ ID NO: 38634 - DNA, 25 bp, Probe sequence
atggctagtgagatattatcaaggt

SEQ ID NO: 38635 - DNA, 25 bp, Probe sequence
caaggtgataactatcgtacattgt

SEQ ID NO: 38636 - DNA, 25 bp, Probe sequence
acaaggtgataactatcgtacattg

SEQ ID NO: 38637 - DNA, 25 bp, Probe sequence
ttaggacttaatccatcacacgaag

SEQ ID NO: 38638 - DNA, 25 bp, Probe sequence
aaggtgataactatcgtacattgtt

SEQ ID NO: 38639 - DNA, 25 bp, Probe sequence
aatggctagtgagatattatcaagg

SEQ ID NO: 38640 - DNA, 25 bp, Probe sequence
agccacaacgattagtagtagattt

SEQ ID NO: 38641 - DNA, 25 bp, Probe sequence
agcctatcgtattattcatcaagca

SEQ ID NO: 38642 - DNA, 25 bp, Probe sequence
cctatcgtattattcatcaagcagc

SEQ ID NO: 38643 - DNA, 25 bp, Probe sequence
gcctatcgtattattcatcaagcag

SEQ ID NO: 38644 - DNA, 25 bp, Probe sequence
gcaacaagcctatcgtattattcat

SEQ ID NO: 38645 - DNA, 25 bp, Probe sequence
atcgtattattcatcaagcagcaat

SEQ ID NO: 38646 - DNA, 25 bp, Probe sequence
ctatcgtattattcatcaagcagca

SEQ ID NO: 38647 - DNA, 25 bp, Probe sequence
aagcctatcgtattattcatcaagc

SEQ ID NO: 38648 - DNA, 25 bp, Probe sequence
ttattcatcaagcagcaattaaggc

SEQ ID NO: 38649 - DNA, 25 bp, Probe sequence
ctggcatagagaatgtaggactaac

SEQ ID NO: 38650 - DNA, 25 bp, Probe sequence
ttcactcttcactggtctcattatt

SEQ ID NO: 38651 - DNA, 25 bp, Probe sequence
gaagaggagccagaattatcaagaa

SEQ ID NO: 38652 - DNA, 25 bp, Probe sequence
aagaggagccagaattatcaagaac

SEQ ID NO: 38653 - DNA, 25 bp, Probe sequence
aggagccagaattatcaagaacaag

SEQ ID NO: 38654 - DNA, 25 bp, Probe sequence
gaggagccagaattatcaagaacaa

SEQ ID NO: 38655 - DNA, 25 bp, Probe sequence
ttaggtgaagaggagccagaattat

SEQ ID NO: 38656 - DNA, 25 bp, Probe sequence
attaggtgaagaggagccagaatta

SEQ ID NO: 38657 - DNA, 25 bp, Probe sequence
gttacaattacgagagcgaccataa

SEQ ID NO: 38658 - DNA, 25 bp, Probe sequence
ggagccagaattatcaagaacaagt

SEQ ID NO: 38659 - DNA, 25 bp, Probe sequence
tgatggaacaacaggtgaagatatt

SEQ ID NO: 38660 - DNA, 25 bp, Probe sequence
gtgatggaacaacaggtgaagatat

SEQ ID NO: 38661 - DNA, 25 bp, Probe sequence
gtagaagttcgtggtgaagcatata

SEQ ID NO: 38662 - DNA, 25 bp, Probe sequence
cgaattggtgatagtgttgtagtga

SEQ ID NO: 38663 - DNA, 25 bp, Probe sequence
atggaacaacaggtgaagatattac

SEQ ID NO: 38664 - DNA, 25 bp, Probe sequence
gaattggtgatagtgttgtagtgaa

SEQ ID NO: 38665 - DNA, 25 bp, Probe sequence
gatggaacaacaggtgaagatatta

SEQ ID NO: 38666 - DNA, 25 bp, Probe sequence
ctgaggatgctgtcacatatcatat

SEQ ID NO: 38667 - DNA, 25 bp, Probe sequence
caagttgtggacatgaattagtacg

SEQ ID NO: 38668 - DNA, 25 bp, Probe sequence
agagagtggcgttgattatgaatta

SEQ ID NO: 38669 - DNA, 25 bp, Probe sequence
gagagtggcgttgattatgaattaa

SEQ ID NO: 38670 - DNA, 25 bp, Probe sequence
aagagagtggcgttgattatgaatt

SEQ ID NO: 38671 - DNA, 25 bp, Probe sequence
gaagagagtggcgttgattatgaat

SEQ ID NO: 38672 - DNA, 25 bp, Probe sequence
gtggcgttgattatgaattaactga

SEQ ID NO: 38673 - DNA, 25 bp, Probe sequence
agagtggcgttgattatgaattaac

SEQ ID NO: 38674 - DNA, 25 bp, Probe sequence
tggcgttgattatgaattaactgaa

SEQ ID NO: 38675 - DNA, 25 bp, Probe sequence
agtggcgttgattatgaattaactg

SEQ ID NO: 38676 - DNA, 25 bp, Probe sequence
gagtggcgttgattatgaattaact

SEQ ID NO: 38677 - DNA, 25 bp, Probe sequence
cttatgtgttgtaggtgactcagat

SEQ ID NO: 38678 - DNA, 25 bp, Probe sequence
acttatgtgttgtaggtgactcaga

SEQ ID NO: 38679 - DNA, 25 bp, Probe sequence
aacttatgtgttgtaggtgactcag

SEQ ID NO: 38680 - DNA, 25 bp, Probe sequence
ttatgtgttgtaggtgactcagatc

SEQ ID NO: 38681 - DNA, 25 bp, Probe sequence
tgatgaccttattatgacaacgatt

SEQ ID NO: 38682 - DNA, 25 bp, Probe sequence
tgcgtataattgccaatagtaatga

SEQ ID NO: 38683 - DNA, 25 bp, Probe sequence
ttacgataattgatcctacagacca

SEQ ID NO: 38684 - DNA, 25 bp, Probe sequence
catctgattggaatgtaggtgacaa

SEQ ID NO: 38685 - DNA, 25 bp, Probe sequence
ctgatattgatgaggcagatactga

SEQ ID NO: 38686 - DNA, 25 bp, Probe sequence
agatcataagcaagttaatagcctt

SEQ ID NO: 38687 - DNA, 25 bp, Probe sequence
aagctgtgtctgcatctattagtta

SEQ ID NO: 38688 - DNA, 25 bp, Probe sequence
gctgtgtctgcatctattagttact

SEQ ID NO: 38689 - DNA, 25 bp, Probe sequence
agctgtgtctgcatctattagttac

SEQ ID NO: 38690 - DNA, 25 bp, Probe sequence
caagctgtgtctgcatctattagtt

SEQ ID NO: 38691 - DNA, 25 bp, Probe sequence
tagatcataagcaagttaatagcct

SEQ ID NO: 38692 - DNA, 25 bp, Probe sequence
caatgccaacgacgattcaagaatt

SEQ ID NO: 38693 - DNA, 25 bp, Probe sequence
aatgccaacgacgattcaagaattg

SEQ ID NO: 38694 - DNA, 25 bp, Probe sequence
ttagatcataagcaagttaatagcc

SEQ ID NO: 38695 - DNA, 25 bp, Probe sequence
aattatgattggtggaactgatgac

SEQ ID NO: 38696 - DNA, 25 bp, Probe sequence
attatgattggtggaactgatgacg

SEQ ID NO: 38697 - DNA, 25 bp, Probe sequence
gcagatacaattatcgtcggtgata

SEQ ID NO: 38698 - DNA, 25 bp, Probe sequence
cagatacaattatcgtcggtgatat

SEQ ID NO: 38699 - DNA, 25 bp, Probe sequence
atagagtatagtggcatttatggcg

SEQ ID NO: 38700 - DNA, 25 bp, Probe sequence
agatacaattatcgtcggtgatatt

SEQ ID NO: 38701 - DNA, 25 bp, Probe sequence
ggaactgatgacgttactgaagata

SEQ ID NO: 38702 - DNA, 25 bp, Probe sequence
agatgatgatttagatgcgatttgt

SEQ ID NO: 38703 - DNA, 25 bp, Probe sequence
aagaagatacccattgcctttagta

SEQ ID NO: 38704 - DNA, 25 bp, Probe sequence
ttatgactgatgttgacttaggtgg

SEQ ID NO: 38705 - DNA, 25 bp, Probe sequence
cgcatagcattaacataactgagac

SEQ ID NO: 38706 - DNA, 25 bp, Probe sequence
acgcatagcattaacataactgaga

SEQ ID NO: 38707 - DNA, 25 bp, Probe sequence
ttcctaattgccgtatgttgtatca

SEQ ID NO: 38708 - DNA, 25 bp, Probe sequence
tatgactgatgttgacttaggtgga

SEQ ID NO: 38709 - DNA, 25 bp, Probe sequence
gcatagcattaacataactgagaca

SEQ ID NO: 38710 - DNA, 25 bp, Probe sequence
tacgcatagcattaacataactgag

SEQ ID NO: 38711 - DNA, 25 bp, Probe sequence
tcctaattgccgtatgttgtatcat

SEQ ID NO: 38712 - DNA, 25 bp, Probe sequence
atggtaaggcagtaataggaacgaa

SEQ ID NO: 38713 - DNA, 25 bp, Probe sequence
ttatgctgacggtagtgatgaatct

SEQ ID NO: 38714 - DNA, 25 bp, Probe sequence
tatgctgacggtagtgatgaatctg

SEQ ID NO: 38715 - DNA, 25 bp, Probe sequence
gtaatcatcgacgagactggtattc

SEQ ID NO: 38716 - DNA, 25 bp, Probe sequence
tatgtaatcatcgacgagactggta

SEQ ID NO: 38717 - DNA, 25 bp, Probe sequence
taatcatcgacgagactggtattca

SEQ ID NO: 38718 - DNA, 25 bp, Probe sequence
atttatgctgacggtagtgatgaat

SEQ ID NO: 38719 - DNA, 25 bp, Probe sequence
tgtaatcatcgacgagactggtatt

SEQ ID NO: 38720 - DNA, 25 bp, Probe sequence
atgtaatcatcgacgagactggtat

SEQ ID NO: 38721 - DNA, 25 bp, Probe sequence
atatgtaatcatcgacgagactggt

SEQ ID NO: 38722 - DNA, 25 bp, Probe sequence
gttatacctatgcaacgattgaaca

SEQ ID NO: 38723 - DNA, 25 bp, Probe sequence
atacctatgcaacgattgaacaaga

SEQ ID NO: 38724 - DNA, 25 bp, Probe sequence
tatacctatgcaacgattgaacaag

SEQ ID NO: 38725 - DNA, 25 bp, Probe sequence
tacctatgcaacgattgaacaagaa

SEQ ID NO: 38726 - DNA, 25 bp, Probe sequence
ttatacctatgcaacgattgaacaa

SEQ ID NO: 38727 - DNA, 25 bp, Probe sequence
acctatgcaacgattgaacaagaat

SEQ ID NO: 38728 - DNA, 25 bp, Probe sequence
cagcgttagatgaattgtttgatgc

SEQ ID NO: 38729 - DNA, 25 bp, Probe sequence
gcagcgttagatgaattgtttgatg

SEQ ID NO: 38730 - DNA, 25 bp, Probe sequence
gattgaacaagaatctggagcatcg

SEQ ID NO: 38731 - DNA, 25 bp, Probe sequence
atgtcagagcgtgtatcatatctat

SEQ ID NO: 38732 - DNA, 25 bp, Probe sequence
tgtcagagcgtgtatcatatctata

SEQ ID NO: 38733 - DNA, 25 bp, Probe sequence
gtatgtcagagcgtgtatcatatct

SEQ ID NO: 38734 - DNA, 25 bp, Probe sequence
tgtagaattaccgaatccgagtatg

SEQ ID NO: 38735 - DNA, 25 bp, Probe sequence
gtgtagaattaccgaatccgagtat

SEQ ID NO: 38736 - DNA, 25 bp, Probe sequence
gtagaattaccgaatccgagtatga

SEQ ID NO: 38737 - DNA, 25 bp, Probe sequence
cgtatgtcagagcgtgtatcatatc

SEQ ID NO: 38738 - DNA, 25 bp, Probe sequence
ggtgatgtaatcgttaatccaactg

SEQ ID NO: 38739 - DNA, 25 bp, Probe sequence
tagaattaccgaatccgagtatgat

SEQ ID NO: 38740 - DNA, 25 bp, Probe sequence
tgagcgtattatgttaccagatgtt

SEQ ID NO: 38741 - DNA, 25 bp, Probe sequence
ggagtgaattaggacatataccgaa

SEQ ID NO: 38742 - DNA, 25 bp, Probe sequence
tggagtgaattaggacatataccga

SEQ ID NO: 38743 - DNA, 25 bp, Probe sequence
atggagtgaattaggacatataccg

SEQ ID NO: 38744 - DNA, 25 bp, Probe sequence
agcgtattatgttaccagatgttac

SEQ ID NO: 38745 - DNA, 25 bp, Probe sequence
accagatgttacaatagcactagat

SEQ ID NO: 38746 - DNA, 25 bp, Probe sequence
gagcgtattatgttaccagatgtta

SEQ ID NO: 38747 - DNA, 25 bp, Probe sequence
cgaacaagatgagtctattacaagt

SEQ ID NO: 38748 - DNA, 25 bp, Probe sequence
taccagatgttacaatagcactaga

SEQ ID NO: 38749 - DNA, 25 bp, Probe sequence
gaggcatctatgttcatcattcaac

SEQ ID NO: 38750 - DNA, 25 bp, Probe sequence
atattgagagaacgaggcatctatg

SEQ ID NO: 38751 - DNA, 25 bp, Probe sequence
cgaggcatctatgttcatcattcaa

SEQ ID NO: 38752 - DNA, 25 bp, Probe sequence
tattgagagaacgaggcatctatgt

SEQ ID NO: 38753 - DNA, 25 bp, Probe sequence
aacgaggcatctatgttcatcattc

SEQ ID NO: 38754 - DNA, 25 bp, Probe sequence
acgagataatcactcagcatatacg

SEQ ID NO: 38755 - DNA, 25 bp, Probe sequence
tctcattgaacaagatcatcgtcat

SEQ ID NO: 38756 - DNA, 25 bp, Probe sequence
attgagagaacgaggcatctatgtt

SEQ ID NO: 38757 - DNA, 25 bp, Probe sequence
ctcattgaacaagatcatcgtcata

SEQ ID NO: 38758 - DNA, 25 bp, Probe sequence
atggagacacttcagaattatggag

SEQ ID NO: 38759 - DNA, 25 bp, Probe sequence
gtagacatggagacacttcagaatt

SEQ ID NO: 38760 - DNA, 25 bp, Probe sequence
agacatggagacacttcagaattat

SEQ ID NO: 38761 - DNA, 25 bp, Probe sequence
tggagacacttcagaattatggagt

SEQ ID NO: 38762 - DNA, 25 bp, Probe sequence
catggagacacttcagaattatgga

SEQ ID NO: 38763 - DNA, 25 bp, Probe sequence
gacatggagacacttcagaattatg

SEQ ID NO: 38764 - DNA, 25 bp, Probe sequence
acatggagacacttcagaattatgg

SEQ ID NO: 38765 - DNA, 25 bp, Probe sequence
tagacatggagacacttcagaatta

SEQ ID NO: 38766 - DNA, 25 bp, Probe sequence
acttcagaattatggagtgattaca

SEQ ID NO: 38767 - DNA, 25 bp, Probe sequence
ttctcacaacctacactaagtcatc

SEQ ID NO: 38768 - DNA, 25 bp, Probe sequence
ctcacaacctacactaagtcatcat

SEQ ID NO: 38769 - DNA, 25 bp, Probe sequence
attctcacaacctacactaagtcat

SEQ ID NO: 38770 - DNA, 25 bp, Probe sequence
aattctcacaacctacactaagtca

SEQ ID NO: 38771 - DNA, 25 bp, Probe sequence
tcaattctcacaacctacactaagt

SEQ ID NO: 38772 - DNA, 25 bp, Probe sequence
caattctcacaacctacactaagtc

SEQ ID NO: 38773 - DNA, 25 bp, Probe sequence
tctcacaacctacactaagtcatca

SEQ ID NO: 38774 - DNA, 25 bp, Probe sequence
tcacaacctacactaagtcatcata

SEQ ID NO: 38775 - DNA, 25 bp, Probe sequence
ttcaattctcacaacctacactaag

SEQ ID NO: 38776 - DNA, 25 bp, Probe sequence
ttgtattagcgatggtaaggaatct

SEQ ID NO: 38777 - DNA, 25 bp, Probe sequence
ctctctgattgctagtattctcgtt

SEQ ID NO: 38778 - DNA, 25 bp, Probe sequence
tgtattagcgatggtaaggaatcta

SEQ ID NO: 38779 - DNA, 25 bp, Probe sequence
ttctctctgattgctagtattctcg

SEQ ID NO: 38780 - DNA, 25 bp, Probe sequence
attgtattagcgatggtaaggaatc

SEQ ID NO: 38781 - DNA, 25 bp, Probe sequence
tctctctgattgctagtattctcgt

SEQ ID NO: 38782 - DNA, 25 bp, Probe sequence
ttagcgatggtaaggaatctaggat

SEQ ID NO: 38783 - DNA, 25 bp, Probe sequence
attagcgatggtaaggaatctagga

SEQ ID NO: 38784 - DNA, 25 bp, Probe sequence
tattagcgatggtaaggaatctagg

SEQ ID NO: 38785 - DNA, 25 bp, Probe sequence
ttggaatgtctattctgctggtatt

SEQ ID NO: 38786 - DNA, 25 bp, Probe sequence
ggaatgtctattctgctggtattga

SEQ ID NO: 38787 - DNA, 25 bp, Probe sequence
tggaatgtctattctgctggtattg

SEQ ID NO: 38788 - DNA, 25 bp, Probe sequence
gttggaatgtctattctgctggtat

SEQ ID NO: 38789 - DNA, 25 bp, Probe sequence
gaatgtctattctgctggtattgaa

SEQ ID NO: 38790 - DNA, 25 bp, Probe sequence
ggtgaaggttggaatgtctattctg

SEQ ID NO: 38791 - DNA, 25 bp, Probe sequence
gtctattctgctggtattgaaacac

SEQ ID NO: 38792 - DNA, 25 bp, Probe sequence
tctattctgctggtattgaaacaca

SEQ ID NO: 38793 - DNA, 25 bp, Probe sequence
ctattctgctggtattgaaacacat

SEQ ID NO: 38794 - DNA, 25 bp, Probe sequence
gctagtacaatcttattcggcactt

SEQ ID NO: 38795 - DNA, 25 bp, Probe sequence
aatcttattcggcactttattaggt

SEQ ID NO: 38796 - DNA, 25 bp, Probe sequence
tattgctagtacaatcttattcggc

SEQ ID NO: 38797 - DNA, 25 bp, Probe sequence
caatcttattcggcactttattagg

SEQ ID NO: 38798 - DNA, 25 bp, Probe sequence
gttcaatctaaggcatctgctccaa

SEQ ID NO: 38799 - DNA, 25 bp, Probe sequence
tggttcaacagcagtagggaaatat

SEQ ID NO: 38800 - DNA, 25 bp, Probe sequence
atggttcaacagcagtagggaaata

SEQ ID NO: 38801 - DNA, 25 bp, Probe sequence
aagaaatcatggttcaacagcagta

SEQ ID NO: 38802 - DNA, 25 bp, Probe sequence
attgctagtacaatcttattcggca

SEQ ID NO: 38803 - DNA, 25 bp, Probe sequence
aagtgttagatgtcattgaatcagg

SEQ ID NO: 38804 - DNA, 25 bp, Probe sequence
agtgttagatgtcattgaatcaggc

SEQ ID NO: 38805 - DNA, 25 bp, Probe sequence
tctccaatagtaatgttgttgacac

SEQ ID NO: 38806 - DNA, 25 bp, Probe sequence
gtgttagatgtcattgaatcaggcg

SEQ ID NO: 38807 - DNA, 25 bp, Probe sequence
ttctccaatagtaatgttgttgaca

SEQ ID NO: 38808 - DNA, 25 bp, Probe sequence
atgtagaagagcttacgagtgaatt

SEQ ID NO: 38809 - DNA, 25 bp, Probe sequence
aatgtagaagagcttacgagtgaat

SEQ ID NO: 38810 - DNA, 25 bp, Probe sequence
tcatggttattcattattcagcagt

SEQ ID NO: 38811 - DNA, 25 bp, Probe sequence
caatgtagaagagcttacgagtgaa

SEQ ID NO: 38812 - DNA, 25 bp, Probe sequence
cgattgaattacctggactattgag

SEQ ID NO: 38813 - DNA, 25 bp, Probe sequence
gcgattgaattacctggactattga

SEQ ID NO: 38814 - DNA, 25 bp, Probe sequence
tgcgattgaattacctggactattg

SEQ ID NO: 38815 - DNA, 25 bp, Probe sequence
gtgcgattgaattacctggactatt

SEQ ID NO: 38816 - DNA, 25 bp, Probe sequence
aattattgcgtaatcgtcaacctaa

SEQ ID NO: 38817 - DNA, 25 bp, Probe sequence
ccttggattgttcgtggttatatgc

SEQ ID NO: 38818 - DNA, 25 bp, Probe sequence
gccttggattgttcgtggttatatg

SEQ ID NO: 38819 - DNA, 25 bp, Probe sequence
gattgaattacctggactattgagt

SEQ ID NO: 38820 - DNA, 25 bp, Probe sequence
agccttggattgttcgtggttatat

SEQ ID NO: 38821 - DNA, 25 bp, Probe sequence
cacggttgaagtatcacatcaagaa

SEQ ID NO: 38822 - DNA, 25 bp, Probe sequence
agatggcacggttgaagtatcacat

SEQ ID NO: 38823 - DNA, 25 bp, Probe sequence
cggttgaagtatcacatcaagaaat

SEQ ID NO: 38824 - DNA, 25 bp, Probe sequence
acggttgaagtatcacatcaagaaa

SEQ ID NO: 38825 - DNA, 25 bp, Probe sequence
gattgtttgtcacgaatgaaaatgc

SEQ ID NO: 38826 - DNA, 25 bp, Probe sequence
aagatggcacggttgaagtatcaca

SEQ ID NO: 38827 - DNA, 25 bp, Probe sequence
aaagatggcacggttgaagtatcac

SEQ ID NO: 38828 - DNA, 25 bp, Probe sequence
atggcacggttgaagtatcacatca

SEQ ID NO: 38829 - DNA, 25 bp, Probe sequence
gcacggttgaagtatcacatcaaga

SEQ ID NO: 38830 - DNA, 25 bp, Probe sequence
gtgcgttcgatagaatacattacaa

SEQ ID NO: 38831 - DNA, 25 bp, Probe sequence
tcatcatacttagtctgttattggt

SEQ ID NO: 38832 - DNA, 25 bp, Probe sequence
tgtgcgttcgatagaatacattaca

SEQ ID NO: 38833 - DNA, 25 bp, Probe sequence
gtctgttattggttagaaatgagca

SEQ ID NO: 38834 - DNA, 25 bp, Probe sequence
aagtatcttatgccaaagttccaaa

SEQ ID NO: 38835 - DNA, 25 bp, Probe sequence
aaagtatcttatgccaaagttccaa

SEQ ID NO: 38836 - DNA, 25 bp, Probe sequence
agtctgttattggttagaaatgagc

SEQ ID NO: 38837 - DNA, 25 bp, Probe sequence
tctgttattggttagaaatgagcat

SEQ ID NO: 38838 - DNA, 25 bp, Probe sequence
catcatacttagtctgttattggtt

SEQ ID NO: 38839 - DNA, 25 bp, Probe sequence
cgaagatgtatcacaaggaagcata

SEQ ID NO: 38840 - DNA, 25 bp, Probe sequence
actatgattgtcgtaacgcatgatt

SEQ ID NO: 38841 - DNA, 25 bp, Probe sequence
aactatgattgtcgtaacgcatgat

SEQ ID NO: 38842 - DNA, 25 bp, Probe sequence
gaagatgtatcacaaggaagcatat

SEQ ID NO: 38843 - DNA, 25 bp, Probe sequence
gaattgttagttctctaagcggtgg

SEQ ID NO: 38844 - DNA, 25 bp, Probe sequence
aagagtagcattggcaagattaata

SEQ ID NO: 38845 - DNA, 25 bp, Probe sequence
agagtagcattggcaagattaatat

SEQ ID NO: 38846 - DNA, 25 bp, Probe sequence
aattgttagttctctaagcggtggt

SEQ ID NO: 38847 - DNA, 25 bp, Probe sequence
aagatgtatcacaaggaagcatata

SEQ ID NO: 38848 - DNA, 25 bp, Probe sequence
aagcagcacagatgatattagatga

SEQ ID NO: 38849 - DNA, 25 bp, Probe sequence
agcagcacagatgatattagatgat

SEQ ID NO: 38850 - DNA, 25 bp, Probe sequence
gcagcacagatgatattagatgatt

SEQ ID NO: 38851 - DNA, 25 bp, Probe sequence
tgacgatagataacaatgatgaaca

SEQ ID NO: 38852 - DNA, 25 bp, Probe sequence
acgatagataacaatgatgaacagt

SEQ ID NO: 38853 - DNA, 25 bp, Probe sequence
gacgatagataacaatgatgaacag

SEQ ID NO: 38854 - DNA, 25 bp, Probe sequence
atgacgatagataacaatgatgaac

SEQ ID NO: 38855 - DNA, 25 bp, Probe sequence
aaagcagcacagatgatattagatg

SEQ ID NO: 38856 - DNA, 25 bp, Probe sequence
cgatagataacaatgatgaacagtt

SEQ ID NO: 38857 - DNA, 25 bp, Probe sequence
agaatccataagcgagaacaatatc

SEQ ID NO: 38858 - DNA, 25 bp, Probe sequence
gaatccataagcgagaacaatatct

SEQ ID NO: 38859 - DNA, 25 bp, Probe sequence
atagaatccataagcgagaacaata

SEQ ID NO: 38860 - DNA, 25 bp, Probe sequence
tatagaatccataagcgagaacaat

SEQ ID NO: 38861 - DNA, 25 bp, Probe sequence
tagaatccataagcgagaacaatat

SEQ ID NO: 38862 - DNA, 25 bp, Probe sequence
ttatagaatccataagcgagaacaa

SEQ ID NO: 38863 - DNA, 25 bp, Probe sequence
atccataagcgagaacaatatctag

SEQ ID NO: 38864 - DNA, 25 bp, Probe sequence
aatccataagcgagaacaatatcta

SEQ ID NO: 38865 - DNA, 25 bp, Probe sequence
attatagaatccataagcgagaaca

SEQ ID NO: 38866 - DNA, 25 bp, Probe sequence
ggtctcaagaggaattagccaatat

SEQ ID NO: 38867 - DNA, 25 bp, Probe sequence
gtctcaagaggaattagccaatata

SEQ ID NO: 38868 - DNA, 25 bp, Probe sequence
tggtctcaagaggaattagccaata

SEQ ID NO: 38869 - DNA, 25 bp, Probe sequence
atggtctcaagaggaattagccaat

SEQ ID NO: 38870 - DNA, 25 bp, Probe sequence
cagacaaagtgtttctaaatgggaa

SEQ ID NO: 38871 - DNA, 25 bp, Probe sequence
ggtttccagacaaagtgtttctaaa

SEQ ID NO: 38872 - DNA, 25 bp, Probe sequence
taaaggtttccagacaaagtgtttc

SEQ ID NO: 38873 - DNA, 25 bp, Probe sequence
aggtttccagacaaagtgtttctaa

SEQ ID NO: 38874 - DNA, 25 bp, Probe sequence
aaggtttccagacaaagtgtttcta

SEQ ID NO: 38875 - DNA, 25 bp, Probe sequence
tggtctgtagtattcttggcaatta

SEQ ID NO: 38876 - DNA, 25 bp, Probe sequence
ttcttcttcgtaggattcgtaggtt

SEQ ID NO: 38877 - DNA, 25 bp, Probe sequence
ttggtctgtagtattcttggcaatt

SEQ ID NO: 38878 - DNA, 25 bp, Probe sequence
cttggtctgtagtattcttggcaat

SEQ ID NO: 38879 - DNA, 25 bp, Probe sequence
ggtctgtagtattcttggcaattat

SEQ ID NO: 38880 - DNA, 25 bp, Probe sequence
ccaggttcaatagcactgattatga

SEQ ID NO: 38881 - DNA, 25 bp, Probe sequence
taccaggttcaatagcactgattat

SEQ ID NO: 38882 - DNA, 25 bp, Probe sequence
caggttcaatagcactgattatgat

SEQ ID NO: 38883 - DNA, 25 bp, Probe sequence
accaggttcaatagcactgattatg

SEQ ID NO: 38884 - DNA, 25 bp, Probe sequence
tagagatggtagtcgtatggtgatg

SEQ ID NO: 38885 - DNA, 25 bp, Probe sequence
gtagagatggtagtcgtatggtgat

SEQ ID NO: 38886 - DNA, 25 bp, Probe sequence
acatacatggtggattctggactaa

SEQ ID NO: 38887 - DNA, 25 bp, Probe sequence
aacatacatggtggattctggacta

SEQ ID NO: 38888 - DNA, 25 bp, Probe sequence
aatgtaacttcagcagaatatgagt

SEQ ID NO: 38889 - DNA, 25 bp, Probe sequence
ttggtagagatggtagtcgtatggt

SEQ ID NO: 38890 - DNA, 25 bp, Probe sequence
ggtagagatggtagtcgtatggtga

SEQ ID NO: 38891 - DNA, 25 bp, Probe sequence
acttcagcagaatatgagttagatt

SEQ ID NO: 38892 - DNA, 25 bp, Probe sequence
ctggcattaggttatacagttgtaa

SEQ ID NO: 38893 - DNA, 25 bp, Probe sequence
tattgtcgcacttattggcactata

SEQ ID NO: 38894 - DNA, 25 bp, Probe sequence
gtattggtattgtcgcacttattgg

SEQ ID NO: 38895 - DNA, 25 bp, Probe sequence
attgtcgcacttattggcactatat

SEQ ID NO: 38896 - DNA, 25 bp, Probe sequence
ttgtcgcacttattggcactatatt

SEQ ID NO: 38897 - DNA, 25 bp, Probe sequence
ttctgcgattagtattggtattgtc

SEQ ID NO: 38898 - DNA, 25 bp, Probe sequence
tgtaattcttgcttcagacttctca

SEQ ID NO: 38899 - DNA, 25 bp, Probe sequence
gtaattcttgcttcagacttctcag

SEQ ID NO: 38900 - DNA, 25 bp, Probe sequence
taattcttgcttcagacttctcagg

SEQ ID NO: 38901 - DNA, 25 bp, Probe sequence
gtattgtcgcacttattggcactat

SEQ ID NO: 38902 - DNA, 25 bp, Probe sequence
gtaaccgtattagtcattgcttgtc

SEQ ID NO: 38903 - DNA, 25 bp, Probe sequence
aatggctacctatctcaagttatgg

SEQ ID NO: 38904 - DNA, 25 bp, Probe sequence
agtaaccgtattagtcattgcttgt

SEQ ID NO: 38905 - DNA, 25 bp, Probe sequence
aagccttattagagcagatattggt

SEQ ID NO: 38906 - DNA, 25 bp, Probe sequence
ggcttagaaggcacagttgataata

SEQ ID NO: 38907 - DNA, 25 bp, Probe sequence
gccaagccttattagagcagatatt

SEQ ID NO: 38908 - DNA, 25 bp, Probe sequence
taattctaatcatccacttgccact

SEQ ID NO: 38909 - DNA, 25 bp, Probe sequence
gtaattctaatcatccacttgccac

SEQ ID NO: 38910 - DNA, 25 bp, Probe sequence
gaatcattagttactggcgaatcaa

SEQ ID NO: 38911 - DNA, 25 bp, Probe sequence
agaaggtatggacgataatgttact

SEQ ID NO: 38912 - DNA, 25 bp, Probe sequence
caagaggctgctacattatggtatc

SEQ ID NO: 38913 - DNA, 25 bp, Probe sequence
gaggctgctacattatggtatcatc

SEQ ID NO: 38914 - DNA, 25 bp, Probe sequence
aagaggctgctacattatggtatca

SEQ ID NO: 38915 - DNA, 25 bp, Probe sequence
agaggctgctacattatggtatcat

SEQ ID NO: 38916 - DNA, 25 bp, Probe sequence
acaagaggctgctacattatggtat

SEQ ID NO: 38917 - DNA, 25 bp, Probe sequence
aacaagaggctgctacattatggta

SEQ ID NO: 38918 - DNA, 25 bp, Probe sequence
gagcatgaagataatggaatgatgg

SEQ ID NO: 38919 - DNA, 25 bp, Probe sequence
atgaagatggtactcaaggtgatac

SEQ ID NO: 38920 - DNA, 25 bp, Probe sequence
tacttgattatcttgagttggcaga

SEQ ID NO: 38921 - DNA, 25 bp, Probe sequence
gaatatgtagtcatcggtctaggtc

SEQ ID NO: 38922 - DNA, 25 bp, Probe sequence
agaatatgtagtcatcggtctaggt

SEQ ID NO: 38923 - DNA, 25 bp, Probe sequence
ggtagtatcgttcgtgagttgaatg

SEQ ID NO: 38924 - DNA, 25 bp, Probe sequence
acttgattatcttgagttggcagac

SEQ ID NO: 38925 - DNA, 25 bp, Probe sequence
aagaatatgtagtcatcggtctagg

SEQ ID NO: 38926 - DNA, 25 bp, Probe sequence
aggtagtatcgttcgtgagttgaat

SEQ ID NO: 38927 - DNA, 25 bp, Probe sequence
aatatgtagtcatcggtctaggtcg

SEQ ID NO: 38928 - DNA, 25 bp, Probe sequence
gtgtacttgattatcttgagttggc

SEQ ID NO: 38929 - DNA, 25 bp, Probe sequence
attaggtgtaacttatgaggcgatt

SEQ ID NO: 38930 - DNA, 25 bp, Probe sequence
ggtgtaacttatgaggcgattgata

SEQ ID NO: 38931 - DNA, 25 bp, Probe sequence
ttaggtgtaacttatgaggcgattg

SEQ ID NO: 38932 - DNA, 25 bp, Probe sequence
cattaggtgtaacttatgaggcgat

SEQ ID NO: 38933 - DNA, 25 bp, Probe sequence
taggtgtaacttatgaggcgattga

SEQ ID NO: 38934 - DNA, 25 bp, Probe sequence
gtgtaacttatgaggcgattgataa

SEQ ID NO: 38935 - DNA, 25 bp, Probe sequence
aggtgtaacttatgaggcgattgat

SEQ ID NO: 38936 - DNA, 25 bp, Probe sequence
tgtaacttatgaggcgattgataat

SEQ ID NO: 38937 - DNA, 25 bp, Probe sequence
gaattacgtgaagaaggcattgatt

SEQ ID NO: 38938 - DNA, 25 bp, Probe sequence
aacaatcgcagtagtattagcatct

SEQ ID NO: 38939 - DNA, 25 bp, Probe sequence
acaatcgcagtagtattagcatcta

SEQ ID NO: 38940 - DNA, 25 bp, Probe sequence
atcgcagtagtattagcatctagtg

SEQ ID NO: 38941 - DNA, 25 bp, Probe sequence
gcagtagtattagcatctagtgtct

SEQ ID NO: 38942 - DNA, 25 bp, Probe sequence
cgcagtagtattagcatctagtgtc

SEQ ID NO: 38943 - DNA, 25 bp, Probe sequence
aatcgcagtagtattagcatctagt

SEQ ID NO: 38944 - DNA, 25 bp, Probe sequence
tcgcagtagtattagcatctagtgt

SEQ ID NO: 38945 - DNA, 25 bp, Probe sequence
acgcaattaagaagtctgaacaaga

SEQ ID NO: 38946 - DNA, 25 bp, Probe sequence
caatcgcagtagtattagcatctag

SEQ ID NO: 38947 - DNA, 25 bp, Probe sequence
ggtaaggcagaaggcgattatatta

SEQ ID NO: 38948 - DNA, 25 bp, Probe sequence
taaggcagaaggcgattatattact

SEQ ID NO: 38949 - DNA, 25 bp, Probe sequence
aaggcagaaggcgattatattactt

SEQ ID NO: 38950 - DNA, 25 bp, Probe sequence
aaggagatggaagaagataatgagt

SEQ ID NO: 38951 - DNA, 25 bp, Probe sequence
aagtctattggctacaaggatgatt

SEQ ID NO: 38952 - DNA, 25 bp, Probe sequence
aggtaaggcagaaggcgattatatt

SEQ ID NO: 38953 - DNA, 25 bp, Probe sequence
aggagatggaagaagataatgagta

SEQ ID NO: 38954 - DNA, 25 bp, Probe sequence
gtgtgttcctagtagatacattcca

SEQ ID NO: 38955 - DNA, 25 bp, Probe sequence
tgtgtgttcctagtagatacattcc

SEQ ID NO: 38956 - DNA, 25 bp, Probe sequence
ccgtgttggattaggttcattagta

SEQ ID NO: 38957 - DNA, 25 bp, Probe sequence
cgtgttggattaggttcattagtaa

SEQ ID NO: 38958 - DNA, 25 bp, Probe sequence
ggattaggttcattagtaactgacg

SEQ ID NO: 38959 - DNA, 25 bp, Probe sequence
gattaggttcattagtaactgacga

SEQ ID NO: 38960 - DNA, 25 bp, Probe sequence
tggattaggttcattagtaactgac

SEQ ID NO: 38961 - DNA, 25 bp, Probe sequence
gtgttggattaggttcattagtaac

SEQ ID NO: 38962 - DNA, 25 bp, Probe sequence
attaggttcattagtaactgacgaa

SEQ ID NO: 38963 - DNA, 25 bp, Probe sequence
tgttggattaggttcattagtaact

SEQ ID NO: 38964 - DNA, 25 bp, Probe sequence
gttggattaggttcattagtaactg

SEQ ID NO: 38965 - DNA, 25 bp, Probe sequence
ctcgtctattccaactatctaacaa

SEQ ID NO: 38966 - DNA, 25 bp, Probe sequence
gaatgtgaagcgttagaagaagcag

SEQ ID NO: 38967 - DNA, 25 bp, Probe sequence
cgtctattccaactatctaacaatg

SEQ ID NO: 38968 - DNA, 25 bp, Probe sequence
tcgtctattccaactatctaacaat

SEQ ID NO: 38969 - DNA, 25 bp, Probe sequence
caaccactcaagaactcaaacaata

SEQ ID NO: 38970 - DNA, 25 bp, Probe sequence
acaaccactcaagaactcaaacaat

SEQ ID NO: 38971 - DNA, 25 bp, Probe sequence
aaccactcaagaactcaaacaatat

SEQ ID NO: 38972 - DNA, 25 bp, Probe sequence
aacaaccactcaagaactcaaacaa

SEQ ID NO: 38973 - DNA, 25 bp, Probe sequence
aaacaaccactcaagaactcaaaca

SEQ ID NO: 38974 - DNA, 25 bp, Probe sequence
gctgctattaattgcgattggtata

SEQ ID NO: 38975 - DNA, 25 bp, Probe sequence
ttgtaagtacgattcaatgtgtcat

SEQ ID NO: 38976 - DNA, 25 bp, Probe sequence
gtgcttggtgtggtcaatcattatt

SEQ ID NO: 38977 - DNA, 25 bp, Probe sequence
aatgtacgctacgctgctattaatt

SEQ ID NO: 38978 - DNA, 25 bp, Probe sequence
tacaatgtacgctacgctgctatta

SEQ ID NO: 38979 - DNA, 25 bp, Probe sequence
gcaagtgttggcgttcagttatatt

SEQ ID NO: 38980 - DNA, 25 bp, Probe sequence
atgtacgctacgctgctattaattg

SEQ ID NO: 38981 - DNA, 25 bp, Probe sequence
caatgtacgctacgctgctattaat

SEQ ID NO: 38982 - DNA, 25 bp, Probe sequence
tatgatgtttattgtgcttggtgtg

SEQ ID NO: 38983 - DNA, 25 bp, Probe sequence
cagtcacaacagcattccaattatt

SEQ ID NO: 38984 - DNA, 25 bp, Probe sequence
tcacaacagcattccaattattagg

SEQ ID NO: 38985 - DNA, 25 bp, Probe sequence
cacaacagcattccaattattaggc

SEQ ID NO: 38986 - DNA, 25 bp, Probe sequence
agtcacaacagcattccaattatta

SEQ ID NO: 38987 - DNA, 25 bp, Probe sequence
gtcacaacagcattccaattattag

SEQ ID NO: 38988 - DNA, 25 bp, Probe sequence
gtggtacttctgttaattggtgaat

SEQ ID NO: 38989 - DNA, 25 bp, Probe sequence
tgtgcttgctacattaactggtatt

SEQ ID NO: 38990 - DNA, 25 bp, Probe sequence
ttgtgcttgctacattaactggtat

SEQ ID NO: 38991 - DNA, 25 bp, Probe sequence
ccagtcacaacagcattccaattat

SEQ ID NO: 38992 - DNA, 25 bp, Probe sequence
aagcatcacaattagcgtcacaata

SEQ ID NO: 38993 - DNA, 25 bp, Probe sequence
acctgatcttacggatgaacaatta

SEQ ID NO: 38994 - DNA, 25 bp, Probe sequence
tacctgatcttacggatgaacaatt

SEQ ID NO: 38995 - DNA, 25 bp, Probe sequence
gacttagtacctgatcttacggatg

SEQ ID NO: 38996 - DNA, 25 bp, Probe sequence
ttagtacctgatcttacggatgaac

SEQ ID NO: 38997 - DNA, 25 bp, Probe sequence
acttagtacctgatcttacggatga

SEQ ID NO: 38998 - DNA, 25 bp, Probe sequence
gtacctgatcttacggatgaacaat

SEQ ID NO: 38999 - DNA, 25 bp, Probe sequence
tagtacctgatcttacggatgaaca

SEQ ID NO: 39000 - DNA, 25 bp, Probe sequence
cttagtacctgatcttacggatgaa

SEQ ID NO: 39001 - DNA, 25 bp, Probe sequence
cgtgaagaagtacctgaagaagaat

SEQ ID NO: 39002 - DNA, 25 bp, Probe sequence
cggttatggaagtacaattcttagg

SEQ ID NO: 39003 - DNA, 25 bp, Probe sequence
attccgtgaagaagtacctgaagaa

SEQ ID NO: 39004 - DNA, 25 bp, Probe sequence
ggttatggaagtacaattcttaggt

SEQ ID NO: 39005 - DNA, 25 bp, Probe sequence
gtgaagaagtacctgaagaagaata

SEQ ID NO: 39006 - DNA, 25 bp, Probe sequence
gacaatggttcaagcgattaatgat

SEQ ID NO: 39007 - DNA, 25 bp, Probe sequence
aatgacaatggttcaagcgattaat

SEQ ID NO: 39008 - DNA, 25 bp, Probe sequence
acaatggttcaagcgattaatgatg

SEQ ID NO: 39009 - DNA, 25 bp, Probe sequence
atgacaatggttcaagcgattaatg

SEQ ID NO: 39010 - DNA, 25 bp, Probe sequence
caccagaacaagtatcatccgaata

SEQ ID NO: 39011 - DNA, 25 bp, Probe sequence
accagaacaagtatcatccgaatat

SEQ ID NO: 39012 - DNA, 25 bp, Probe sequence
caagtatcatccgaatatggcaatg

SEQ ID NO: 39013 - DNA, 25 bp, Probe sequence
acaagtatcatccgaatatggcaat

SEQ ID NO: 39014 - DNA, 25 bp, Probe sequence
aacaagtatcatccgaatatggcaa

SEQ ID NO: 39015 - DNA, 25 bp, Probe sequence
cagaacaagtatcatccgaatatgg

SEQ ID NO: 39016 - DNA, 25 bp, Probe sequence
ccagaacaagtatcatccgaatatg

SEQ ID NO: 39017 - DNA, 25 bp, Probe sequence
agaacaagtatcatccgaatatggc

SEQ ID NO: 39018 - DNA, 25 bp, Probe sequence
ggtggcaacaggattcttatctatg

SEQ ID NO: 39019 - DNA, 25 bp, Probe sequence
ctggagatactattgaagaagacga

SEQ ID NO: 39020 - DNA, 25 bp, Probe sequence
cagcaccagtattagcattatcatt

SEQ ID NO: 39021 - DNA, 25 bp, Probe sequence
gctggagatactattgaagaagacg

SEQ ID NO: 39022 - DNA, 25 bp, Probe sequence
agaagaagttatggtagaagaaggt

SEQ ID NO: 39023 - DNA, 25 bp, Probe sequence
tggagatactattgaagaagacgat

SEQ ID NO: 39024 - DNA, 25 bp, Probe sequence
gcagcaccagtattagcattatcat

SEQ ID NO: 39025 - DNA, 25 bp, Probe sequence
ggagatactattgaagaagacgatg

SEQ ID NO: 39026 - DNA, 25 bp, Probe sequence
ttatggtagaagaaggtacagtagc

SEQ ID NO: 39027 - DNA, 25 bp, Probe sequence
gagatactattgaagaagacgatgt

SEQ ID NO: 39028 - DNA, 25 bp, Probe sequence
acaattagacattcaagtacctggt

SEQ ID NO: 39029 - DNA, 25 bp, Probe sequence
caattagacattcaagtacctggtg

SEQ ID NO: 39030 - DNA, 25 bp, Probe sequence
aattagacattcaagtacctggtgc

SEQ ID NO: 39031 - DNA, 25 bp, Probe sequence
aacgatatatggcaatacaacactt

SEQ ID NO: 39032 - DNA, 25 bp, Probe sequence
attagacattcaagtacctggtgct

SEQ ID NO: 39033 - DNA, 25 bp, Probe sequence
tacaattagacattcaagtacctgg

SEQ ID NO: 39034 - DNA, 25 bp, Probe sequence
ttaagaatgtagtgagtggtcatgc

SEQ ID NO: 39035 - DNA, 25 bp, Probe sequence
taacgatatatggcaatacaacact

SEQ ID NO: 39036 - DNA, 25 bp, Probe sequence
ttagacattcaagtacctggtgctt

SEQ ID NO: 39037 - DNA, 25 bp, Probe sequence
tgaccgtggattattagaagttgat

SEQ ID NO: 39038 - DNA, 25 bp, Probe sequence
ctgaccgtggattattagaagttga

SEQ ID NO: 39039 - DNA, 25 bp, Probe sequence
attagttgtagttggtggaggatac

SEQ ID NO: 39040 - DNA, 25 bp, Probe sequence
atgtattagtaactgtaggtcgtcg

SEQ ID NO: 39041 - DNA, 25 bp, Probe sequence
ctgctgaagttgattacattggtat

SEQ ID NO: 39042 - DNA, 25 bp, Probe sequence
gtattagtaactgtaggtcgtcgtc

SEQ ID NO: 39043 - DNA, 25 bp, Probe sequence
caacattaggtgagatgactatgga

SEQ ID NO: 39044 - DNA, 25 bp, Probe sequence
tccaacattaggtgagatgactatg

SEQ ID NO: 39045 - DNA, 25 bp, Probe sequence
ctgaagttgattacattggtatgcc

SEQ ID NO: 39046 - DNA, 25 bp, Probe sequence
tgttgaaagttgaaaatagagcgat

SEQ ID NO: 39047 - DNA, 25 bp, Probe sequence
atgttgaaagttgaaaatagagcga

SEQ ID NO: 39048 - DNA, 25 bp, Probe sequence
tgaaagttgaaaatagagcgatgaa

SEQ ID NO: 39049 - DNA, 25 bp, Probe sequence
ttgaaagttgaaaatagagcgatga

SEQ ID NO: 39050 - DNA, 25 bp, Probe sequence
gttgaaagttgaaaatagagcgatg

SEQ ID NO: 39051 - DNA, 25 bp, Probe sequence
aaagttgaaaatagagcgatgaatc

SEQ ID NO: 39052 - DNA, 25 bp, Probe sequence
gaaagttgaaaatagagcgatgaat

SEQ ID NO: 39053 - DNA, 25 bp, Probe sequence
tatgttgaaagttgaaaatagagcg

SEQ ID NO: 39054 - DNA, 25 bp, Probe sequence
agagcgatgaatcgtgtacataata

SEQ ID NO: 39055 - DNA, 25 bp, Probe sequence
gatggtgtagatattgcgataggaa

SEQ ID NO: 39056 - DNA, 25 bp, Probe sequence
gtagtaacagatgcggaaggtatat

SEQ ID NO: 39057 - DNA, 25 bp, Probe sequence
ttgatggtgtagatattgcgatagg

SEQ ID NO: 39058 - DNA, 25 bp, Probe sequence
taacagatgcggaaggtatattagg

SEQ ID NO: 39059 - DNA, 25 bp, Probe sequence
cagatgcggaaggtatattaggtat

SEQ ID NO: 39060 - DNA, 25 bp, Probe sequence
gttgatggtgtagatattgcgatag

SEQ ID NO: 39061 - DNA, 25 bp, Probe sequence
acagatgcggaaggtatattaggta

SEQ ID NO: 39062 - DNA, 25 bp, Probe sequence
gatgcggaaggtatattaggtatcg

SEQ ID NO: 39063 - DNA, 25 bp, Probe sequence
agatgcggaaggtatattaggtatc

SEQ ID NO: 39064 - DNA, 25 bp, Probe sequence
agactggagtaatgaagagatgatt

SEQ ID NO: 39065 - DNA, 25 bp, Probe sequence
ttagactggagtaatgaagagatga

SEQ ID NO: 39066 - DNA, 25 bp, Probe sequence
tagactggagtaatgaagagatgat

SEQ ID NO: 39067 - DNA, 25 bp, Probe sequence
ttaaagaaattgtgcctgctaaagc

SEQ ID NO: 39068 - DNA, 25 bp, Probe sequence
gactggagtaatgaagagatgattt

SEQ ID NO: 39069 - DNA, 25 bp, Probe sequence
aatagttacaaagcagttcaagatg

SEQ ID NO: 39070 - DNA, 25 bp, Probe sequence
tgtagagaagtattatgaatccggc

SEQ ID NO: 39071 - DNA, 25 bp, Probe sequence
atagttacaaagcagttcaagatgt

SEQ ID NO: 39072 - DNA, 25 bp, Probe sequence
catgtagagaagtattatgaatccg

SEQ ID NO: 39073 - DNA, 25 bp, Probe sequence
atcatccacacgcacattatattaa

SEQ ID NO: 39074 - DNA, 25 bp, Probe sequence
agatcatccacacgcacattatatt

SEQ ID NO: 39075 - DNA, 25 bp, Probe sequence
aagatcatccacacgcacattatat

SEQ ID NO: 39076 - DNA, 25 bp, Probe sequence
ggtgctgatcgtatcgttacttata

SEQ ID NO: 39077 - DNA, 25 bp, Probe sequence
atgagcaaggagattcagttgtaac

SEQ ID NO: 39078 - DNA, 25 bp, Probe sequence
gatcatccacacgcacattatatta

SEQ ID NO: 39079 - DNA, 25 bp, Probe sequence
taggtgctgatcgtatcgttactta

SEQ ID NO: 39080 - DNA, 25 bp, Probe sequence
caagatcatccacacgcacattata

SEQ ID NO: 39081 - DNA, 25 bp, Probe sequence
tagcatctgaaggtgtatgtgtcat

SEQ ID NO: 39082 - DNA, 25 bp, Probe sequence
ttgtatgtcaggtcagataacactt

SEQ ID NO: 39083 - DNA, 25 bp, Probe sequence
attgtatgtcaggtcagataacact

SEQ ID NO: 39084 - DNA, 25 bp, Probe sequence
aacacgaatacttattgtagcgaca

SEQ ID NO: 39085 - DNA, 25 bp, Probe sequence
acacgaatacttattgtagcgacag

SEQ ID NO: 39086 - DNA, 25 bp, Probe sequence
tgtatgtcaggtcagataacactta

SEQ ID NO: 39087 - DNA, 25 bp, Probe sequence
tattgtatgtcaggtcagataacac

SEQ ID NO: 39088 - DNA, 25 bp, Probe sequence
gtatgtcaggtcagataacacttaa

SEQ ID NO: 39089 - DNA, 25 bp, Probe sequence
tatatcaagcacaagaagaagacgt

SEQ ID NO: 39090 - DNA, 25 bp, Probe sequence
cacgaatacttattgtagcgacagc

SEQ ID NO: 39091 - DNA, 25 bp, Probe sequence
attagttgctggtgttggtgtagta

SEQ ID NO: 39092 - DNA, 25 bp, Probe sequence
ttagttgctggtgttggtgtagtag

SEQ ID NO: 39093 - DNA, 25 bp, Probe sequence
cattagttgctggtgttggtgtagt

SEQ ID NO: 39094 - DNA, 25 bp, Probe sequence
acattagttgctggtgttggtgtag

SEQ ID NO: 39095 - DNA, 25 bp, Probe sequence
ttgctattacaacattagttgctgg

SEQ ID NO: 39096 - DNA, 25 bp, Probe sequence
gctattacaacattagttgctggtg

SEQ ID NO: 39097 - DNA, 25 bp, Probe sequence
ctattacaacattagttgctggtgt

SEQ ID NO: 39098 - DNA, 25 bp, Probe sequence
tgctattacaacattagttgctggt

SEQ ID NO: 39099 - DNA, 25 bp, Probe sequence
gttgctattacaacattagttgctg

SEQ ID NO: 39100 - DNA, 25 bp, Probe sequence
atctcaagaagtctctgaacaacaa

SEQ ID NO: 39101 - DNA, 25 bp, Probe sequence
tctgtatctcaagaagtctctgaac

SEQ ID NO: 39102 - DNA, 25 bp, Probe sequence
tatctcaagaagtctctgaacaaca

SEQ ID NO: 39103 - DNA, 25 bp, Probe sequence
gtatctcaagaagtctctgaacaac

SEQ ID NO: 39104 - DNA, 25 bp, Probe sequence
tcacacgcataatcatcttattgaa

SEQ ID NO: 39105 - DNA, 25 bp, Probe sequence
ctgtatctcaagaagtctctgaaca

SEQ ID NO: 39106 - DNA, 25 bp, Probe sequence
tgtatctcaagaagtctctgaacaa

SEQ ID NO: 39107 - DNA, 25 bp, Probe sequence
atcacacgcataatcatcttattga

SEQ ID NO: 39108 - DNA, 25 bp, Probe sequence
atctgtatctcaagaagtctctgaa

SEQ ID NO: 39109 - DNA, 25 bp, Probe sequence
ctatgaggaagtagacaatgcgtaa

SEQ ID NO: 39110 - DNA, 25 bp, Probe sequence
tattaggtccttcaggttgtggtaa

SEQ ID NO: 39111 - DNA, 25 bp, Probe sequence
ttattaggtccttcaggttgtggta

SEQ ID NO: 39112 - DNA, 25 bp, Probe sequence
cattattaggtccttcaggttgtgg

SEQ ID NO: 39113 - DNA, 25 bp, Probe sequence
attattaggtccttcaggttgtggt

SEQ ID NO: 39114 - DNA, 25 bp, Probe sequence
atatcctgacagtggtgaagtgatt

SEQ ID NO: 39115 - DNA, 25 bp, Probe sequence
aatatcctgacagtggtgaagtgat

SEQ ID NO: 39116 - DNA, 25 bp, Probe sequence
ttgaatatcctgacagtggtgaagt

SEQ ID NO: 39117 - DNA, 25 bp, Probe sequence
acattattaggtccttcaggttgtg

SEQ ID NO: 39118 - DNA, 25 bp, Probe sequence
ggaagtgttagaatcagtgatgttg

SEQ ID NO: 39119 - DNA, 25 bp, Probe sequence
aggaagtgttagaatcagtgatgtt

SEQ ID NO: 39120 - DNA, 25 bp, Probe sequence
caggaagtgttagaatcagtgatgt

SEQ ID NO: 39121 - DNA, 25 bp, Probe sequence
gaagtgttagaatcagtgatgttga

SEQ ID NO: 39122 - DNA, 25 bp, Probe sequence
gcaggaagtgttagaatcagtgatg

SEQ ID NO: 39123 - DNA, 25 bp, Probe sequence
agcaggaagtgttagaatcagtgat

SEQ ID NO: 39124 - DNA, 25 bp, Probe sequence
gagcaggaagtgttagaatcagtga

SEQ ID NO: 39125 - DNA, 25 bp, Probe sequence
aagcattaacggtgaagtagttatt

SEQ ID NO: 39126 - DNA, 25 bp, Probe sequence
acaagtattcaaagcattaacggtg

SEQ ID NO: 39127 - DNA, 25 bp, Probe sequence
aaagaaggtgttatgactgggattc

SEQ ID NO: 39128 - DNA, 25 bp, Probe sequence
tgactgggattcaagtaacctttat

SEQ ID NO: 39129 - DNA, 25 bp, Probe sequence
atgactgggattcaagtaaccttta

SEQ ID NO: 39130 - DNA, 25 bp, Probe sequence
tatgactgggattcaagtaaccttt

SEQ ID NO: 39131 - DNA, 25 bp, Probe sequence
ttatgactgggattcaagtaacctt

SEQ ID NO: 39132 - DNA, 25 bp, Probe sequence
ggtgttatgactgggattcaagtaa

SEQ ID NO: 39133 - DNA, 25 bp, Probe sequence
aggtgttatgactgggattcaagta

SEQ ID NO: 39134 - DNA, 25 bp, Probe sequence
actgggattcaagtaacctttattc

SEQ ID NO: 39135 - DNA, 25 bp, Probe sequence
gactgggattcaagtaacctttatt

SEQ ID NO: 39136 - DNA, 25 bp, Probe sequence
tattagcatcagcaatatccagagg

SEQ ID NO: 39137 - DNA, 25 bp, Probe sequence
tgccatatcatattcaggattagga

SEQ ID NO: 39138 - DNA, 25 bp, Probe sequence
caagaacttaatggcgttgatgaag

SEQ ID NO: 39139 - DNA, 25 bp, Probe sequence
ttatgagcaagaacttaatggcgtt

SEQ ID NO: 39140 - DNA, 25 bp, Probe sequence
ttattagcatcagcaatatccagag

SEQ ID NO: 39141 - DNA, 25 bp, Probe sequence
ttgccatatcatattcaggattagg

SEQ ID NO: 39142 - DNA, 25 bp, Probe sequence
gccatatcatattcaggattaggat

SEQ ID NO: 39143 - DNA, 25 bp, Probe sequence
tatgagcaagaacttaatggcgttg

SEQ ID NO: 39144 - DNA, 25 bp, Probe sequence
tagcatcagcaatatccagaggaat

SEQ ID NO: 39145 - DNA, 25 bp, Probe sequence
attcggctggtaatatgattcactt

SEQ ID NO: 39146 - DNA, 25 bp, Probe sequence
cgactgaaccacaattattaagcaa

SEQ ID NO: 39147 - DNA, 25 bp, Probe sequence
gagcgactgaaccacaattattaag

SEQ ID NO: 39148 - DNA, 25 bp, Probe sequence
tctattcattcaattcggctggtaa

SEQ ID NO: 39149 - DNA, 25 bp, Probe sequence
ttctattcattcaattcggctggta

SEQ ID NO: 39150 - DNA, 25 bp, Probe sequence
aattcggctggtaatatgattcact

SEQ ID NO: 39151 - DNA, 25 bp, Probe sequence
caattcggctggtaatatgattcac

SEQ ID NO: 39152 - DNA, 25 bp, Probe sequence
ctattcattcaattcggctggtaat

SEQ ID NO: 39153 - DNA, 25 bp, Probe sequence
actgaaccacaattattaagcaaca

SEQ ID NO: 39154 - DNA, 25 bp, Probe sequence
tcgctgggttgtgtttatattattt

SEQ ID NO: 39155 - DNA, 25 bp, Probe sequence
aaatcgctgggttgtgtttatatta

SEQ ID NO: 39156 - DNA, 25 bp, Probe sequence
atcgctgggttgtgtttatattatt

SEQ ID NO: 39157 - DNA, 25 bp, Probe sequence
aatcgctgggttgtgtttatattat

SEQ ID NO: 39158 - DNA, 25 bp, Probe sequence
taagtacaaagaaagggtgacatca

SEQ ID NO: 39159 - DNA, 25 bp, Probe sequence
aagtacaaagaaagggtgacatcag

SEQ ID NO: 39160 - DNA, 25 bp, Probe sequence
ataagtacaaagaaagggtgacatc

SEQ ID NO: 39161 - DNA, 25 bp, Probe sequence
aaataagtacaaagaaagggtgaca

SEQ ID NO: 39162 - DNA, 25 bp, Probe sequence
aataagtacaaagaaagggtgacat

SEQ ID NO: 39163 - DNA, 25 bp, Probe sequence
taatcttaatgaccgtaattcgcac

SEQ ID NO: 39164 - DNA, 25 bp, Probe sequence
gttgacggtgctagagagattatag

SEQ ID NO: 39165 - DNA, 25 bp, Probe sequence
agttgacggtgctagagagattata

SEQ ID NO: 39166 - DNA, 25 bp, Probe sequence
tagttgacggtgctagagagattat

SEQ ID NO: 39167 - DNA, 25 bp, Probe sequence
ataatcttaatgaccgtaattcgca

SEQ ID NO: 39168 - DNA, 25 bp, Probe sequence
ttgacggtgctagagagattatagg

SEQ ID NO: 39169 - DNA, 25 bp, Probe sequence
aatcttaatgaccgtaattcgcacc

SEQ ID NO: 39170 - DNA, 25 bp, Probe sequence
gctagagagattataggcatgagtt

SEQ ID NO: 39171 - DNA, 25 bp, Probe sequence
caagtaagaggtgtcgtaggtgatg

SEQ ID NO: 39172 - DNA, 25 bp, Probe sequence
tattcttaatcacacttgcatcaca

SEQ ID NO: 39173 - DNA, 25 bp, Probe sequence
attcttaatcacacttgcatcacaa

SEQ ID NO: 39174 - DNA, 25 bp, Probe sequence
gattgttgtgcaggcatctagtaat

SEQ ID NO: 39175 - DNA, 25 bp, Probe sequence
attgttgtgcaggcatctagtaatg

SEQ ID NO: 39176 - DNA, 25 bp, Probe sequence
attgtctatggatctgtatttgctg

SEQ ID NO: 39177 - DNA, 25 bp, Probe sequence
ttgtctatggatctgtatttgctgc

SEQ ID NO: 39178 - DNA, 25 bp, Probe sequence
ttattcttaatcacacttgcatcac

SEQ ID NO: 39179 - DNA, 25 bp, Probe sequence
tgattgttgtgcaggcatctagtaa

SEQ ID NO: 39180 - DNA, 25 bp, Probe sequence
ttgattgttgtgcaggcatctagta

SEQ ID NO: 39181 - DNA, 25 bp, Probe sequence
ccacgaattattatagaggtcaagc

SEQ ID NO: 39182 - DNA, 25 bp, Probe sequence
cacgaattattatagaggtcaagca

SEQ ID NO: 39183 - DNA, 25 bp, Probe sequence
acgaattattatagaggtcaagcaa

SEQ ID NO: 39184 - DNA, 25 bp, Probe sequence
tgatgatacttcaaccacgaattat

SEQ ID NO: 39185 - DNA, 25 bp, Probe sequence
atgatgatacttcaaccacgaatta

SEQ ID NO: 39186 - DNA, 25 bp, Probe sequence
tatgatgatacttcaaccacgaatt

SEQ ID NO: 39187 - DNA, 25 bp, Probe sequence
aactgaacatgacatggatagtgaa

SEQ ID NO: 39188 - DNA, 25 bp, Probe sequence
atatgatgatacttcaaccacgaat

SEQ ID NO: 39189 - DNA, 25 bp, Probe sequence
tatatgatgatacttcaaccacgaa

SEQ ID NO: 39190 - DNA, 25 bp, Probe sequence
ttggatgatgatgtttcgggttata

SEQ ID NO: 39191 - DNA, 25 bp, Probe sequence
gaagaaatgattgaagaaagggtgg

SEQ ID NO: 39192 - DNA, 25 bp, Probe sequence
tgaagaaatgattgaagaaagggtg

SEQ ID NO: 39193 - DNA, 25 bp, Probe sequence
tggatgatgatgtttcgggttatat

SEQ ID NO: 39194 - DNA, 25 bp, Probe sequence
ctgaagaaatgattgaagaaagggt

SEQ ID NO: 39195 - DNA, 25 bp, Probe sequence
actgaagaaatgattgaagaaaggg

SEQ ID NO: 39196 - DNA, 25 bp, Probe sequence
aatgattgaagaaagggtggctaat

SEQ ID NO: 39197 - DNA, 25 bp, Probe sequence
aaatgattgaagaaagggtggctaa

SEQ ID NO: 39198 - DNA, 25 bp, Probe sequence
tttggatgatgatgtttcgggttat

SEQ ID NO: 39199 - DNA, 25 bp, Probe sequence
gcataacctgaatcactataagtct

SEQ ID NO: 39200 - DNA, 25 bp, Probe sequence
agcataacctgaatcactataagtc

SEQ ID NO: 39201 - DNA, 25 bp, Probe sequence
aagcataacctgaatcactataagt

SEQ ID NO: 39202 - DNA, 25 bp, Probe sequence
gcgattattgaaagagaaagatgct

SEQ ID NO: 39203 - DNA, 25 bp, Probe sequence
tagggcgattattgaaagagaaaga

SEQ ID NO: 39204 - DNA, 25 bp, Probe sequence
aagagaaagatgctaaagaccgatt

SEQ ID NO: 39205 - DNA, 25 bp, Probe sequence
aaagagaaagatgctaaagaccgat

SEQ ID NO: 39206 - DNA, 25 bp, Probe sequence
gggcgattattgaaagagaaagatg

SEQ ID NO: 39207 - DNA, 25 bp, Probe sequence
agggcgattattgaaagagaaagat

SEQ ID NO: 39208 - DNA, 25 bp, Probe sequence
agaccattacattgaaacacaagaa

SEQ ID NO: 39209 - DNA, 25 bp, Probe sequence
aagaccattacattgaaacacaaga

SEQ ID NO: 39210 - DNA, 25 bp, Probe sequence
taatgtaggtggtagaaagcaattt

SEQ ID NO: 39211 - DNA, 25 bp, Probe sequence
ttaatgtaggtggtagaaagcaatt

SEQ ID NO: 39212 - DNA, 25 bp, Probe sequence
gaccattacattgaaacacaagaaa

SEQ ID NO: 39213 - DNA, 25 bp, Probe sequence
aaagaccattacattgaaacacaag

SEQ ID NO: 39214 - DNA, 25 bp, Probe sequence
aagagatataggatatgacgaagaa

SEQ ID NO: 39215 - DNA, 25 bp, Probe sequence
attaatgtaggtggtagaaagcaat

SEQ ID NO: 39216 - DNA, 25 bp, Probe sequence
gtggtagaaagcaatttcaaagaga

SEQ ID NO: 39217 - DNA, 25 bp, Probe sequence
gtggctatattgtggatggatatgt

SEQ ID NO: 39218 - DNA, 25 bp, Probe sequence
tggctatattgtggatggatatgtt

SEQ ID NO: 39219 - DNA, 25 bp, Probe sequence
ggtggctatattgtggatggatatg

SEQ ID NO: 39220 - DNA, 25 bp, Probe sequence
agcataggatacgatgataagacat

SEQ ID NO: 39221 - DNA, 25 bp, Probe sequence
ttgaagatagcataggatacgatga

SEQ ID NO: 39222 - DNA, 25 bp, Probe sequence
tgaagatagcataggatacgatgat

SEQ ID NO: 39223 - DNA, 25 bp, Probe sequence
tagcataggatacgatgataagaca

SEQ ID NO: 39224 - DNA, 25 bp, Probe sequence
gcataggatacgatgataagacatt

SEQ ID NO: 39225 - DNA, 25 bp, Probe sequence
tcatctctgtaactgacaatcatca

SEQ ID NO: 39226 - DNA, 25 bp, Probe sequence
ccaagataatccattaacagaaggc

SEQ ID NO: 39227 - DNA, 25 bp, Probe sequence
caagataatccattaacagaaggca

SEQ ID NO: 39228 - DNA, 25 bp, Probe sequence
aacagttgaaggaacagagttagag

SEQ ID NO: 39229 - DNA, 25 bp, Probe sequence
aaggaacagagttagagcatcaatc

SEQ ID NO: 39230 - DNA, 25 bp, Probe sequence
gaaggaacagagttagagcatcaat

SEQ ID NO: 39231 - DNA, 25 bp, Probe sequence
gttgatgaattataccaagcagcaa

SEQ ID NO: 39232 - DNA, 25 bp, Probe sequence
aagttgatgaattataccaagcagc

SEQ ID NO: 39233 - DNA, 25 bp, Probe sequence
ggacttggttagttgttaatgatgg

SEQ ID NO: 39234 - DNA, 25 bp, Probe sequence
ggttggacttggttagttgttaatg

SEQ ID NO: 39235 - DNA, 25 bp, Probe sequence
tacttcaacgattacagcacttaga

SEQ ID NO: 39236 - DNA, 25 bp, Probe sequence
acttcaacgattacagcacttagat

SEQ ID NO: 39237 - DNA, 25 bp, Probe sequence
ttacttcaacgattacagcacttag

SEQ ID NO: 39238 - DNA, 25 bp, Probe sequence
ccttattacttcaacgattacagca

SEQ ID NO: 39239 - DNA, 25 bp, Probe sequence
accttattacttcaacgattacagc

SEQ ID NO: 39240 - DNA, 25 bp, Probe sequence
tcgtccatactgaattatctaagcg

SEQ ID NO: 39241 - DNA, 25 bp, Probe sequence
cttcaacgattacagcacttagata

SEQ ID NO: 39242 - DNA, 25 bp, Probe sequence
taggttatgacgacattgattatgc

SEQ ID NO: 39243 - DNA, 25 bp, Probe sequence
attacttcaacgattacagcactta

SEQ ID NO: 39244 - DNA, 25 bp, Probe sequence
atgattatcgtgaacctgtgtatga

SEQ ID NO: 39245 - DNA, 25 bp, Probe sequence
catcagtattatccagacaggctaa

SEQ ID NO: 39246 - DNA, 25 bp, Probe sequence
agaaccatcagtattatccagacag

SEQ ID NO: 39247 - DNA, 25 bp, Probe sequence
tgattatcgtgaacctgtgtatgag

SEQ ID NO: 39248 - DNA, 25 bp, Probe sequence
gaaccatcagtattatccagacagg

SEQ ID NO: 39249 - DNA, 25 bp, Probe sequence
aagaaccatcagtattatccagaca

SEQ ID NO: 39250 - DNA, 25 bp, Probe sequence
ccatcagtattatccagacaggcta

SEQ ID NO: 39251 - DNA, 25 bp, Probe sequence
gaagaaccatcagtattatccagac

SEQ ID NO: 39252 - DNA, 25 bp, Probe sequence
tagtgcttactgtcattacgatgtt

SEQ ID NO: 39253 - DNA, 25 bp, Probe sequence
atctgacacaacgatagttactgtt

SEQ ID NO: 39254 - DNA, 25 bp, Probe sequence
catctgacacaacgatagttactgt

SEQ ID NO: 39255 - DNA, 25 bp, Probe sequence
gcatctgacacaacgatagttactg

SEQ ID NO: 39256 - DNA, 25 bp, Probe sequence
taatcttggatgagcctacaaatgg

SEQ ID NO: 39257 - DNA, 25 bp, Probe sequence
attgatgtgctgactacaattaagt

SEQ ID NO: 39258 - DNA, 25 bp, Probe sequence
ttaatcttggatgagcctacaaatg

SEQ ID NO: 39259 - DNA, 25 bp, Probe sequence
tttgactttggcgatagtagaattg

SEQ ID NO: 39260 - DNA, 25 bp, Probe sequence
ttgactttggcgatagtagaattgt

SEQ ID NO: 39261 - DNA, 25 bp, Probe sequence
ttgcatctgacacaacgatagttac

SEQ ID NO: 39262 - DNA, 25 bp, Probe sequence
aatgaatatgaagcggaatcacctt

SEQ ID NO: 39263 - DNA, 25 bp, Probe sequence
gatgggtgggtatttcattataggt

SEQ ID NO: 39264 - DNA, 25 bp, Probe sequence
tgggtgggtatttcattataggtta

SEQ ID NO: 39265 - DNA, 25 bp, Probe sequence
atgggtgggtatttcattataggtt

SEQ ID NO: 39266 - DNA, 25 bp, Probe sequence
cgatgggtgggtatttcattatagg

SEQ ID NO: 39267 - DNA, 25 bp, Probe sequence
ccgatgggtgggtatttcattatag

SEQ ID NO: 39268 - DNA, 25 bp, Probe sequence
tccgatgggtgggtatttcattata

SEQ ID NO: 39269 - DNA, 25 bp, Probe sequence
tgaatatgaagcggaatcaccttta

SEQ ID NO: 39270 - DNA, 25 bp, Probe sequence
gaatatgaagcggaatcacctttat

SEQ ID NO: 39271 - DNA, 25 bp, Probe sequence
agaacattatatcgccattcaagaa

SEQ ID NO: 39272 - DNA, 25 bp, Probe sequence
aagaacattatatcgccattcaaga

SEQ ID NO: 39273 - DNA, 25 bp, Probe sequence
tcgggaagcaataatcaatatcaga

SEQ ID NO: 39274 - DNA, 25 bp, Probe sequence
gggtgggtatttcattgtaggttat

SEQ ID NO: 39275 - DNA, 25 bp, Probe sequence
cgggaagcaataatcaatatcagaa

SEQ ID NO: 39276 - DNA, 25 bp, Probe sequence
ttcgggaagcaataatcaatatcag

SEQ ID NO: 39277 - DNA, 25 bp, Probe sequence
gcaagtatagattcgggaagcaata

SEQ ID NO: 39278 - DNA, 25 bp, Probe sequence
aaattccaagcaagtatagattcgg

SEQ ID NO: 39279 - DNA, 25 bp, Probe sequence
aatatgaagccgatccaccgttatt

SEQ ID NO: 39280 - DNA, 25 bp, Probe sequence
tatagatagtgatgaattgttcgcc

SEQ ID NO: 39281 - DNA, 25 bp, Probe sequence
gcgaattagaagatgaattagtgga

SEQ ID NO: 39282 - DNA, 25 bp, Probe sequence
agcgaattagaagatgaattagtgg

SEQ ID NO: 39283 - DNA, 25 bp, Probe sequence
cgatgatgttgaaagaatgagtgac

SEQ ID NO: 39284 - DNA, 25 bp, Probe sequence
tgaaagaatgagtgacaaagtaagt

SEQ ID NO: 39285 - DNA, 25 bp, Probe sequence
aagaagcgtatattggaatgaaaga

SEQ ID NO: 39286 - DNA, 25 bp, Probe sequence
atagatagtgatgaattgttcgccc

SEQ ID NO: 39287 - DNA, 25 bp, Probe sequence
atatagatagtgatgaattgttcgc

SEQ ID NO: 39288 - DNA, 25 bp, Probe sequence
agaagcgtatattggaatgaaagat

SEQ ID NO: 39289 - DNA, 25 bp, Probe sequence
cgctaatctacaaggaacttcaatt

SEQ ID NO: 39290 - DNA, 25 bp, Probe sequence
tatggtactggcggttatatgacaa

SEQ ID NO: 39291 - DNA, 25 bp, Probe sequence
tctatggtactggcggttatatgac

SEQ ID NO: 39292 - DNA, 25 bp, Probe sequence
gtctatggtactggcggttatatga

SEQ ID NO: 39293 - DNA, 25 bp, Probe sequence
ctatggtactggcggttatatgaca

SEQ ID NO: 39294 - DNA, 25 bp, Probe sequence
tactggcggttatatgacaagtgtt

SEQ ID NO: 39295 - DNA, 25 bp, Probe sequence
agtctatggtactggcggttatatg

SEQ ID NO: 39296 - DNA, 25 bp, Probe sequence
atatagcaagccaagtatatggagg

SEQ ID NO: 39297 - DNA, 25 bp, Probe sequence
aatagaagatatagcaagccaagta

SEQ ID NO: 39298 - DNA, 25 bp, Probe sequence
attagcgaagcaattatctcagaac

SEQ ID NO: 39299 - DNA, 25 bp, Probe sequence
ttagatatgcttcagacaacaatgg

SEQ ID NO: 39300 - DNA, 25 bp, Probe sequence
ttagcgaagcaattatctcagaacg

SEQ ID NO: 39301 - DNA, 25 bp, Probe sequence
cgtgaagaattagcgaagcaattat

SEQ ID NO: 39302 - DNA, 25 bp, Probe sequence
gaattagcgaagcaattatctcaga

SEQ ID NO: 39303 - DNA, 25 bp, Probe sequence
agaattagcgaagcaattatctcag

SEQ ID NO: 39304 - DNA, 25 bp, Probe sequence
gtgaagaattagcgaagcaattatc

SEQ ID NO: 39305 - DNA, 25 bp, Probe sequence
aattagcgaagcaattatctcagaa

SEQ ID NO: 39306 - DNA, 25 bp, Probe sequence
aagaattagcgaagcaattatctca

SEQ ID NO: 39307 - DNA, 25 bp, Probe sequence
ttatgaagcagatgtgattgaacca

SEQ ID NO: 39308 - DNA, 25 bp, Probe sequence
cttatgaagcagatgtgattgaacc

SEQ ID NO: 39309 - DNA, 25 bp, Probe sequence
tatgaagcagatgtgattgaaccaa

SEQ ID NO: 39310 - DNA, 25 bp, Probe sequence
tcgtagattaggtggtaatgattca

SEQ ID NO: 39311 - DNA, 25 bp, Probe sequence
atcgtagattaggtggtaatgattc

SEQ ID NO: 39312 - DNA, 25 bp, Probe sequence
cgtagattaggtggtaatgattcat

SEQ ID NO: 39313 - DNA, 25 bp, Probe sequence
gactcaatcgtagattaggtggtaa

SEQ ID NO: 39314 - DNA, 25 bp, Probe sequence
agactcaatcgtagattaggtggta

SEQ ID NO: 39315 - DNA, 25 bp, Probe sequence
tagactcaatcgtagattaggtggt

SEQ ID NO: 39316 - DNA, 25 bp, Probe sequence
caaggacttattcaagaagcaggaa

SEQ ID NO: 39317 - DNA, 25 bp, Probe sequence
ccaatcatcaagtattaggtgaaga

SEQ ID NO: 39318 - DNA, 25 bp, Probe sequence
atcatcaagtattaggtgaagaagg

SEQ ID NO: 39319 - DNA, 25 bp, Probe sequence
aggacttattcaagaagcaggaatt

SEQ ID NO: 39320 - DNA, 25 bp, Probe sequence
aaggacttattcaagaagcaggaat

SEQ ID NO: 39321 - DNA, 25 bp, Probe sequence
ccaaggacttattcaagaagcagga

SEQ ID NO: 39322 - DNA, 25 bp, Probe sequence
ggacttattcaagaagcaggaatta

SEQ ID NO: 39323 - DNA, 25 bp, Probe sequence
tcatcaagtattaggtgaagaaggg

SEQ ID NO: 39324 - DNA, 25 bp, Probe sequence
atttgcccaaggacttattcaagaa

SEQ ID NO: 39325 - DNA, 25 bp, Probe sequence
taatgagagatggactacgaagcaa

SEQ ID NO: 39326 - DNA, 25 bp, Probe sequence
ttaatgagagatggactacgaagca

SEQ ID NO: 39327 - DNA, 25 bp, Probe sequence
gaggaccttgatgatgaattagcat

SEQ ID NO: 39328 - DNA, 25 bp, Probe sequence
tgaggaccttgatgatgaattagca

SEQ ID NO: 39329 - DNA, 25 bp, Probe sequence
agagtattagaagaggatatggctc

SEQ ID NO: 39330 - DNA, 25 bp, Probe sequence
tagagtattagaagaggatatggct

SEQ ID NO: 39331 - DNA, 25 bp, Probe sequence
aatgagagatggactacgaagcaac

SEQ ID NO: 39332 - DNA, 25 bp, Probe sequence
tttaatgagagatggactacgaagc

SEQ ID NO: 39333 - DNA, 25 bp, Probe sequence
gtgacggtgaagttatcttaaatgg

SEQ ID NO: 39334 - DNA, 25 bp, Probe sequence
gtattggtcgtgtattcagaggtaa

SEQ ID NO: 39335 - DNA, 25 bp, Probe sequence
tattggtattggtcgtgtattcaga

SEQ ID NO: 39336 - DNA, 25 bp, Probe sequence
gtattggtattggtcgtgtattcag

SEQ ID NO: 39337 - DNA, 25 bp, Probe sequence
attggtattggtcgtgtattcagag

SEQ ID NO: 39338 - DNA, 25 bp, Probe sequence
ctacaactgataatggacttacacg

SEQ ID NO: 39339 - DNA, 25 bp, Probe sequence
tcaatgacaagaggttacggtatta

SEQ ID NO: 39340 - DNA, 25 bp, Probe sequence
cgtcgtgaaggttatgaattacaag

SEQ ID NO: 39341 - DNA, 25 bp, Probe sequence
tatgcgtcgtgaaggttatgaatta

SEQ ID NO: 39342 - DNA, 25 bp, Probe sequence
tgataacagtgatgagccattacaa

SEQ ID NO: 39343 - DNA, 25 bp, Probe sequence
tgttaaggagcaagatagttctatt

SEQ ID NO: 39344 - DNA, 25 bp, Probe sequence
ttgttaaggagcaagatagttctat

SEQ ID NO: 39345 - DNA, 25 bp, Probe sequence
ccgatttatgaacagattaagcaac

SEQ ID NO: 39346 - DNA, 25 bp, Probe sequence
tccgatttatgaacagattaagcaa

SEQ ID NO: 39347 - DNA, 25 bp, Probe sequence
ttccgatttatgaacagattaagca

SEQ ID NO: 39348 - DNA, 25 bp, Probe sequence
ggttaaagaattggttaatgaagcg

SEQ ID NO: 39349 - DNA, 25 bp, Probe sequence
ctttgttaaggagcaagatagttct

SEQ ID NO: 39350 - DNA, 25 bp, Probe sequence
cgatttatgaacagattaagcaaca

SEQ ID NO: 39351 - DNA, 25 bp, Probe sequence
tatgaacagattaagcaacaagtaa

SEQ ID NO: 39352 - DNA, 25 bp, Probe sequence
atttaacattaccttcatgcccatt

SEQ ID NO: 39353 - DNA, 25 bp, Probe sequence
aatttaacattaccttcatgcccat

SEQ ID NO: 39354 - DNA, 25 bp, Probe sequence
acattaccttcatgcccattatatg

SEQ ID NO: 39355 - DNA, 25 bp, Probe sequence
attgactaaagatgctgatgaaatc

SEQ ID NO: 39356 - DNA, 25 bp, Probe sequence
tttaacattaccttcatgcccatta

SEQ ID NO: 39357 - DNA, 25 bp, Probe sequence
agatacacaaatgtttggacttcaa

SEQ ID NO: 39358 - DNA, 25 bp, Probe sequence
taatttaacattaccttcatgccca

SEQ ID NO: 39359 - DNA, 25 bp, Probe sequence
ttaacattaccttcatgcccattat

SEQ ID NO: 39360 - DNA, 25 bp, Probe sequence
tgttaaattaggtttagttgaccgc

SEQ ID NO: 39361 - DNA, 25 bp, Probe sequence
caagtgagcatagaacaatccaata

SEQ ID NO: 39362 - DNA, 25 bp, Probe sequence
ttaatacggactatacttgctcagc

SEQ ID NO: 39363 - DNA, 25 bp, Probe sequence
aagtgagcatagaacaatccaataa

SEQ ID NO: 39364 - DNA, 25 bp, Probe sequence
aggctatcataactcttgctgaatt

SEQ ID NO: 39365 - DNA, 25 bp, Probe sequence
gcaagtgagcatagaacaatccaat

SEQ ID NO: 39366 - DNA, 25 bp, Probe sequence
ggctatcataactcttgctgaatta

SEQ ID NO: 39367 - DNA, 25 bp, Probe sequence
caggctatcataactcttgctgaat

SEQ ID NO: 39368 - DNA, 25 bp, Probe sequence
gctatcataactcttgctgaattac

SEQ ID NO: 39369 - DNA, 25 bp, Probe sequence
agcaagtgagcatagaacaatccaa

SEQ ID NO: 39370 - DNA, 25 bp, Probe sequence
ttattgtatatcgtgccttccagtt

SEQ ID NO: 39371 - DNA, 25 bp, Probe sequence
tacgctaacagatccattccaattc

SEQ ID NO: 39372 - DNA, 25 bp, Probe sequence
atcggaggattgctagttattactt

SEQ ID NO: 39373 - DNA, 25 bp, Probe sequence
gtacgctaacagatccattccaatt

SEQ ID NO: 39374 - DNA, 25 bp, Probe sequence
tagtacgctaacagatccattccaa

SEQ ID NO: 39375 - DNA, 25 bp, Probe sequence
caattcattgcttgcgataggtaac

SEQ ID NO: 39376 - DNA, 25 bp, Probe sequence
aattcattgcttgcgataggtaacg

SEQ ID NO: 39377 - DNA, 25 bp, Probe sequence
agtacgctaacagatccattccaat

SEQ ID NO: 39378 - DNA, 25 bp, Probe sequence
ttggattagtgatggtatatagtgc

SEQ ID NO: 39379 - DNA, 25 bp, Probe sequence
gacacttattacaggtggcttacta

SEQ ID NO: 39380 - DNA, 25 bp, Probe sequence
gatgacacttattacaggtggctta

SEQ ID NO: 39381 - DNA, 25 bp, Probe sequence
acacttattacaggtggcttactaa

SEQ ID NO: 39382 - DNA, 25 bp, Probe sequence
atgacacttattacaggtggcttac

SEQ ID NO: 39383 - DNA, 25 bp, Probe sequence
ggatgatgacacttattacaggtgg

SEQ ID NO: 39384 - DNA, 25 bp, Probe sequence
acttattacaggtggcttactaatt

SEQ ID NO: 39385 - DNA, 25 bp, Probe sequence
tgacacttattacaggtggcttact

SEQ ID NO: 39386 - DNA, 25 bp, Probe sequence
gatgatgacacttattacaggtggc

SEQ ID NO: 39387 - DNA, 25 bp, Probe sequence
cacttattacaggtggcttactaat

SEQ ID NO: 39388 - DNA, 25 bp, Probe sequence
aagagtaatccaagtcatatcggtg

SEQ ID NO: 39389 - DNA, 25 bp, Probe sequence
tacttgatacgcctacattcttctt

SEQ ID NO: 39390 - DNA, 25 bp, Probe sequence
ttacttgatacgcctacattcttct

SEQ ID NO: 39391 - DNA, 25 bp, Probe sequence
gttacttgatacgcctacattcttc

SEQ ID NO: 39392 - DNA, 25 bp, Probe sequence
ggagtcacttagtcattattggtca

SEQ ID NO: 39393 - DNA, 25 bp, Probe sequence
tggagtcacttagtcattattggtc

SEQ ID NO: 39394 - DNA, 25 bp, Probe sequence
aagcagataagagtaatccaagtca

SEQ ID NO: 39395 - DNA, 25 bp, Probe sequence
gcttacgaattgattggtgagttaa

SEQ ID NO: 39396 - DNA, 25 bp, Probe sequence
gcatcaattccaactgtatcttcaa

SEQ ID NO: 39397 - DNA, 25 bp, Probe sequence
ttaggtgtcgtattcgtagtgttag

SEQ ID NO: 39398 - DNA, 25 bp, Probe sequence
taggtgtcgtattcgtagtgttagc

SEQ ID NO: 39399 - DNA, 25 bp, Probe sequence
attgaatataccatcaggcgtactt

SEQ ID NO: 39400 - DNA, 25 bp, Probe sequence
acttgttcaaggtaacttaattccg

SEQ ID NO: 39401 - DNA, 25 bp, Probe sequence
ttgaatataccatcaggcgtacttg

SEQ ID NO: 39402 - DNA, 25 bp, Probe sequence
acatacaacatggaacacagtgatt

SEQ ID NO: 39403 - DNA, 25 bp, Probe sequence
tattgaatataccatcaggcgtact

SEQ ID NO: 39404 - DNA, 25 bp, Probe sequence
accaagatattgatcgtattatgcc

SEQ ID NO: 39405 - DNA, 25 bp, Probe sequence
catacaacatggaacacagtgattg

SEQ ID NO: 39406 - DNA, 25 bp, Probe sequence
cattcgcttcagttatatggttctg

SEQ ID NO: 39407 - DNA, 25 bp, Probe sequence
ttcgcttcagttatatggttctgta

SEQ ID NO: 39408 - DNA, 25 bp, Probe sequence
attcgcttcagttatatggttctgt

SEQ ID NO: 39409 - DNA, 25 bp, Probe sequence
cgcttcagttatatggttctgtact

SEQ ID NO: 39410 - DNA, 25 bp, Probe sequence
tcgcttcagttatatggttctgtac

SEQ ID NO: 39411 - DNA, 25 bp, Probe sequence
taattgccattggttggagacttat

SEQ ID NO: 39412 - DNA, 25 bp, Probe sequence
ttaattgccattggttggagactta

SEQ ID NO: 39413 - DNA, 25 bp, Probe sequence
cattggttggagacttatttggaaa

SEQ ID NO: 39414 - DNA, 25 bp, Probe sequence
aattgccattggttggagacttatt

SEQ ID NO: 39415 - DNA, 25 bp, Probe sequence
agtatccaagtgagtaccatgtaga

SEQ ID NO: 39416 - DNA, 25 bp, Probe sequence
aagtatccaagtgagtaccatgtag

SEQ ID NO: 39417 - DNA, 25 bp, Probe sequence
gtatccaagtgagtaccatgtagat

SEQ ID NO: 39418 - DNA, 25 bp, Probe sequence
ttattgcgaatgacttgaagtatgg

SEQ ID NO: 39419 - DNA, 25 bp, Probe sequence
cagttattgcgaatgacttgaagta

SEQ ID NO: 39420 - DNA, 25 bp, Probe sequence
aatgacttgaagtatggtggagaag

SEQ ID NO: 39421 - DNA, 25 bp, Probe sequence
gaatgacttgaagtatggtggagaa

SEQ ID NO: 39422 - DNA, 25 bp, Probe sequence
ttattgttatcagcagcaacgactc

SEQ ID NO: 39423 - DNA, 25 bp, Probe sequence
tattgcgaatgacttgaagtatggt

SEQ ID NO: 39424 - DNA, 25 bp, Probe sequence
ggttattcttagcatttagacgacg

SEQ ID NO: 39425 - DNA, 25 bp, Probe sequence
tgggttattcttagcatttagacga

SEQ ID NO: 39426 - DNA, 25 bp, Probe sequence
gggttattcttagcatttagacgac

SEQ ID NO: 39427 - DNA, 25 bp, Probe sequence
ctgggttattcttagcatttagacg

SEQ ID NO: 39428 - DNA, 25 bp, Probe sequence
ccatatgaatcagaacacacacatg

SEQ ID NO: 39429 - DNA, 25 bp, Probe sequence
attcttagcatttagacgacgttca

SEQ ID NO: 39430 - DNA, 25 bp, Probe sequence
gttattcttagcatttagacgacgt

SEQ ID NO: 39431 - DNA, 25 bp, Probe sequence
ttagcatttagacgacgttcaacaa

SEQ ID NO: 39432 - DNA, 25 bp, Probe sequence
ttcttagcatttagacgacgttcaa

SEQ ID NO: 39433 - DNA, 25 bp, Probe sequence
tcatcggcatcactattattagcat

SEQ ID NO: 39434 - DNA, 25 bp, Probe sequence
cctgtcatcggcatcactattatta

SEQ ID NO: 39435 - DNA, 25 bp, Probe sequence
gtcatcggcatcactattattagca

SEQ ID NO: 39436 - DNA, 25 bp, Probe sequence
tgtcatcggcatcactattattagc

SEQ ID NO: 39437 - DNA, 25 bp, Probe sequence
ctgtcatcggcatcactattattag

SEQ ID NO: 39438 - DNA, 25 bp, Probe sequence
ataggacaactgagaatgacataca

SEQ ID NO: 39439 - DNA, 25 bp, Probe sequence
taggacaactgagaatgacatacat

SEQ ID NO: 39440 - DNA, 25 bp, Probe sequence
cacaatcttcaccacgcagtaatat

SEQ ID NO: 39441 - DNA, 25 bp, Probe sequence
ttattattgcgattatgttgtctgc

SEQ ID NO: 39442 - DNA, 25 bp, Probe sequence
aatggtgttaatcatggtggtagtg

SEQ ID NO: 39443 - DNA, 25 bp, Probe sequence
catgctgacacaacttcaatgaatg

SEQ ID NO: 39444 - DNA, 25 bp, Probe sequence
atggtgttaatcatggtggtagtga

SEQ ID NO: 39445 - DNA, 25 bp, Probe sequence
atgctgacacaacttcaatgaatgt

SEQ ID NO: 39446 - DNA, 25 bp, Probe sequence
tggtgttaatcatggtggtagtgaa

SEQ ID NO: 39447 - DNA, 25 bp, Probe sequence
accatcaaatgaaccaaagtaacaa

SEQ ID NO: 39448 - DNA, 25 bp, Probe sequence
aaccatcaaatgaaccaaagtaaca

SEQ ID NO: 39449 - DNA, 25 bp, Probe sequence
caacttcaatgaatgtgtcgaataa

SEQ ID NO: 39450 - DNA, 25 bp, Probe sequence
acaacttcaatgaatgtgtcgaata

SEQ ID NO: 39451 - DNA, 25 bp, Probe sequence
cctctaatggttctgatagtgttga

SEQ ID NO: 39452 - DNA, 25 bp, Probe sequence
acttatatgaagcgacctctaatgg

SEQ ID NO: 39453 - DNA, 25 bp, Probe sequence
aacttatatgaagcgacctctaatg

SEQ ID NO: 39454 - DNA, 25 bp, Probe sequence
ctctaatggttctgatagtgttgaa

SEQ ID NO: 39455 - DNA, 25 bp, Probe sequence
gaagagcataataagcgtccagttg

SEQ ID NO: 39456 - DNA, 25 bp, Probe sequence
agaagagcataataagcgtccagtt

SEQ ID NO: 39457 - DNA, 25 bp, Probe sequence
aagagcataataagcgtccagttga

SEQ ID NO: 39458 - DNA, 25 bp, Probe sequence
ggtggagatgtaatgagagattatt

SEQ ID NO: 39459 - DNA, 25 bp, Probe sequence
tcagaagagcataataagcgtccag

SEQ ID NO: 39460 - DNA, 25 bp, Probe sequence
ttagagaggaacataagcaacatca

SEQ ID NO: 39461 - DNA, 25 bp, Probe sequence
tgcttgaacttagagaggaacataa

SEQ ID NO: 39462 - DNA, 25 bp, Probe sequence
gtgcttgaacttagagaggaacata

SEQ ID NO: 39463 - DNA, 25 bp, Probe sequence
agagaggaacataagcaacatcata

SEQ ID NO: 39464 - DNA, 25 bp, Probe sequence
tagagaggaacataagcaacatcat

SEQ ID NO: 39465 - DNA, 25 bp, Probe sequence
gagaggaacataagcaacatcataa

SEQ ID NO: 39466 - DNA, 25 bp, Probe sequence
agaggaacataagcaacatcataat

SEQ ID NO: 39467 - DNA, 25 bp, Probe sequence
gaggaacataagcaacatcataatg

SEQ ID NO: 39468 - DNA, 25 bp, Probe sequence
aacttagagaggaacataagcaaca

SEQ ID NO: 39469 - DNA, 25 bp, Probe sequence
aatggtaaagacgctaacgaagttt

SEQ ID NO: 39470 - DNA, 25 bp, Probe sequence
aaatggtaaagacgctaacgaagtt

SEQ ID NO: 39471 - DNA, 25 bp, Probe sequence
tgccatttcattatgtactttccat

SEQ ID NO: 39472 - DNA, 25 bp, Probe sequence
atgccatttcattatgtactttcca

SEQ ID NO: 39473 - DNA, 25 bp, Probe sequence
tggatactctcatgatggacttaat

SEQ ID NO: 39474 - DNA, 25 bp, Probe sequence
atggatactctcatgatggacttaa

SEQ ID NO: 39475 - DNA, 25 bp, Probe sequence
atatggatactctcatgatggactt

SEQ ID NO: 39476 - DNA, 25 bp, Probe sequence
aatatggatactctcatgatggact

SEQ ID NO: 39477 - DNA, 25 bp, Probe sequence
attgaaaatggtaaagacgctaacg

SEQ ID NO: 39478 - DNA, 25 bp, Probe sequence
tgacagattgatggatatggttgta

SEQ ID NO: 39479 - DNA, 25 bp, Probe sequence
ctgacagattgatggatatggttgt

SEQ ID NO: 39480 - DNA, 25 bp, Probe sequence
gctgacagattgatggatatggttg

SEQ ID NO: 39481 - DNA, 25 bp, Probe sequence
gacagattgatggatatggttgtaa

SEQ ID NO: 39482 - DNA, 25 bp, Probe sequence
atcgctgacagattgatggatatgg

SEQ ID NO: 39483 - DNA, 25 bp, Probe sequence
attagtagaagacccgaaagcaaat

SEQ ID NO: 39484 - DNA, 25 bp, Probe sequence
aatcgctgacagattgatggatatg

SEQ ID NO: 39485 - DNA, 25 bp, Probe sequence
aacgtacttaacaccacacttcatt

SEQ ID NO: 39486 - DNA, 25 bp, Probe sequence
atagcacgatgaaaccaagagaaat

SEQ ID NO: 39487 - DNA, 25 bp, Probe sequence
aaggcgtatattaacattactggtt

SEQ ID NO: 39488 - DNA, 25 bp, Probe sequence
ttaggcgaagaatatactggaaacg

SEQ ID NO: 39489 - DNA, 25 bp, Probe sequence
tttaggcgaagaatatactggaaac

SEQ ID NO: 39490 - DNA, 25 bp, Probe sequence
aacattactggtttaggtttcgcta

SEQ ID NO: 39491 - DNA, 25 bp, Probe sequence
taacattactggtttaggtttcgct

SEQ ID NO: 39492 - DNA, 25 bp, Probe sequence
ttaacattactggtttaggtttcgc

SEQ ID NO: 39493 - DNA, 25 bp, Probe sequence
aagattgggatttctcaagtgaaga

SEQ ID NO: 39494 - DNA, 25 bp, Probe sequence
aaagattgggatttctcaagtgaag

SEQ ID NO: 39495 - DNA, 25 bp, Probe sequence
agattgggatttctcaagtgaagag

SEQ ID NO: 39496 - DNA, 25 bp, Probe sequence
tacctacaacttatactgacggaga

SEQ ID NO: 39497 - DNA, 25 bp, Probe sequence
cctacaacttatactgacggagatg

SEQ ID NO: 39498 - DNA, 25 bp, Probe sequence
tacaacttatactgacggagatgag

SEQ ID NO: 39499 - DNA, 25 bp, Probe sequence
ctacaacttatactgacggagatga

SEQ ID NO: 39500 - DNA, 25 bp, Probe sequence
acctacaacttatactgacggagat

SEQ ID NO: 39501 - DNA, 25 bp, Probe sequence
atacctacaacttatactgacggag

SEQ ID NO: 39502 - DNA, 25 bp, Probe sequence
caagacagaattattagagagcacg

SEQ ID NO: 39503 - DNA, 25 bp, Probe sequence
aatacctacaacttatactgacgga

SEQ ID NO: 39504 - DNA, 25 bp, Probe sequence
caatacctacaacttatactgacgg

SEQ ID NO: 39505 - DNA, 25 bp, Probe sequence
tccattctttcaaacatcacatagt

SEQ ID NO: 39506 - DNA, 25 bp, Probe sequence
atatgagatgcttgacgttgtgatg

SEQ ID NO: 39507 - DNA, 25 bp, Probe sequence
ctttcaaacatcacatagtggttgt

SEQ ID NO: 39508 - DNA, 25 bp, Probe sequence
tctttcaaacatcacatagtggttg

SEQ ID NO: 39509 - DNA, 25 bp, Probe sequence
catatgagatgcttgacgttgtgat

SEQ ID NO: 39510 - DNA, 25 bp, Probe sequence
ttctttcaaacatcacatagtggtt

SEQ ID NO: 39511 - DNA, 25 bp, Probe sequence
atccattctttcaaacatcacatag

SEQ ID NO: 39512 - DNA, 25 bp, Probe sequence
aagagaaatatgatgaagtaatgcg

SEQ ID NO: 39513 - DNA, 25 bp, Probe sequence
attctttcaaacatcacatagtggt

SEQ ID NO: 39514 - DNA, 25 bp, Probe sequence
cagagtatatgagaatccttgcgtt

SEQ ID NO: 39515 - DNA, 25 bp, Probe sequence
atgagaatccttgcgtttgttatac

SEQ ID NO: 39516 - DNA, 25 bp, Probe sequence
gagtatatgagaatccttgcgtttg

SEQ ID NO: 39517 - DNA, 25 bp, Probe sequence
gtatatgagaatccttgcgtttgtt

SEQ ID NO: 39518 - DNA, 25 bp, Probe sequence
agtatatgagaatccttgcgtttgt

SEQ ID NO: 39519 - DNA, 25 bp, Probe sequence
agagtatatgagaatccttgcgttt

SEQ ID NO: 39520 - DNA, 25 bp, Probe sequence
atatgagaatccttgcgtttgttat

SEQ ID NO: 39521 - DNA, 25 bp, Probe sequence
ttctaaacggttgaattgtaaagca

SEQ ID NO: 39522 - DNA, 25 bp, Probe sequence
aatgcagagtatatgagaatccttg

SEQ ID NO: 39523 - DNA, 25 bp, Probe sequence
tatgattcgtggaggatatagttca

SEQ ID NO: 39524 - DNA, 25 bp, Probe sequence
ttatgattcgtggaggatatagttc

SEQ ID NO: 39525 - DNA, 25 bp, Probe sequence
tgattcgtggaggatatagttcatg

SEQ ID NO: 39526 - DNA, 25 bp, Probe sequence
aattgtatattcgtgatccgcaagg

SEQ ID NO: 39527 - DNA, 25 bp, Probe sequence
tattcgtgatccgcaaggtgattat

SEQ ID NO: 39528 - DNA, 25 bp, Probe sequence
atattcgtgatccgcaaggtgatta

SEQ ID NO: 39529 - DNA, 25 bp, Probe sequence
tatattcgtgatccgcaaggtgatt

SEQ ID NO: 39530 - DNA, 25 bp, Probe sequence
attatgattcgtggaggatatagtt

SEQ ID NO: 39531 - DNA, 25 bp, Probe sequence
agactttattatgattcgtggagga

SEQ ID NO: 39532 - DNA, 25 bp, Probe sequence
acatagagcacaatcaacacaagta

SEQ ID NO: 39533 - DNA, 25 bp, Probe sequence
aagacatagagcacaatcaacacaa

SEQ ID NO: 39534 - DNA, 25 bp, Probe sequence
agacatagagcacaatcaacacaag

SEQ ID NO: 39535 - DNA, 25 bp, Probe sequence
gacatagagcacaatcaacacaagt

SEQ ID NO: 39536 - DNA, 25 bp, Probe sequence
catagagcacaatcaacacaagtac

SEQ ID NO: 39537 - DNA, 25 bp, Probe sequence
atagagcacaatcaacacaagtaca

SEQ ID NO: 39538 - DNA, 25 bp, Probe sequence
tagagcacaatcaacacaagtacaa

SEQ ID NO: 39539 - DNA, 25 bp, Probe sequence
ttgaatggtgaagacaatgacgatt

SEQ ID NO: 39540 - DNA, 25 bp, Probe sequence
tcgacttattgaatggtgaagacaa

SEQ ID NO: 39541 - DNA, 25 bp, Probe sequence
acacttgcgttagatgatatggatt

SEQ ID NO: 39542 - DNA, 25 bp, Probe sequence
aacacttgcgttagatgatatggat

SEQ ID NO: 39543 - DNA, 25 bp, Probe sequence
aagaagaacaaggtacgcttacatt

SEQ ID NO: 39544 - DNA, 25 bp, Probe sequence
tgaattgtacggtgacatgattaac

SEQ ID NO: 39545 - DNA, 25 bp, Probe sequence
gttatcgagtctacagtccaagaag

SEQ ID NO: 39546 - DNA, 25 bp, Probe sequence
atgaattgtacggtgacatgattaa

SEQ ID NO: 39547 - DNA, 25 bp, Probe sequence
aatgaattgtacggtgacatgatta

SEQ ID NO: 39548 - DNA, 25 bp, Probe sequence
taataaagttgctgctgtttggaaa

SEQ ID NO: 39549 - DNA, 25 bp, Probe sequence
gataataaagttgctgctgtttgga

SEQ ID NO: 39550 - DNA, 25 bp, Probe sequence
tgctagaatgatgattcacaatcct

SEQ ID NO: 39551 - DNA, 25 bp, Probe sequence
ggttgctagaatgatgattcacaat

SEQ ID NO: 39552 - DNA, 25 bp, Probe sequence
ttgctagaatgatgattcacaatcc

SEQ ID NO: 39553 - DNA, 25 bp, Probe sequence
gtagcaagcaatacacaagtgttat

SEQ ID NO: 39554 - DNA, 25 bp, Probe sequence
tagcaagcaatacacaagtgttatc

SEQ ID NO: 39555 - DNA, 25 bp, Probe sequence
gctagaatgatgattcacaatcctt

SEQ ID NO: 39556 - DNA, 25 bp, Probe sequence
aatgatgattcacaatccttcaagt

SEQ ID NO: 39557 - DNA, 25 bp, Probe sequence
gtttacgaaatgcttggtatggatt

SEQ ID NO: 39558 - DNA, 25 bp, Probe sequence
agaatgatgattcacaatccttcaa

SEQ ID NO: 39559 - DNA, 25 bp, Probe sequence
acaatcctgaattagacgaatacct

SEQ ID NO: 39560 - DNA, 25 bp, Probe sequence
tcctgaattagacgaatacctgatt

SEQ ID NO: 39561 - DNA, 25 bp, Probe sequence
aatcctgaattagacgaatacctga

SEQ ID NO: 39562 - DNA, 25 bp, Probe sequence
caatcctgaattagacgaatacctg

SEQ ID NO: 39563 - DNA, 25 bp, Probe sequence
gacaatcctgaattagacgaatacc

SEQ ID NO: 39564 - DNA, 25 bp, Probe sequence
atcctgaattagacgaatacctgat

SEQ ID NO: 39565 - DNA, 25 bp, Probe sequence
agacaatcctgaattagacgaatac

SEQ ID NO: 39566 - DNA, 25 bp, Probe sequence
aaggaatgaggtgcggattatgtta

SEQ ID NO: 39567 - DNA, 25 bp, Probe sequence
ttacaaggaatgaggtgcggattat

SEQ ID NO: 39568 - DNA, 25 bp, Probe sequence
catctccattgttgctaatagtgaa

SEQ ID NO: 39569 - DNA, 25 bp, Probe sequence
ctccattgttgctaatagtgaagat

SEQ ID NO: 39570 - DNA, 25 bp, Probe sequence
atctccattgttgctaatagtgaag

SEQ ID NO: 39571 - DNA, 25 bp, Probe sequence
tctccattgttgctaatagtgaaga

SEQ ID NO: 39572 - DNA, 25 bp, Probe sequence
tatagagcagacgatatagtagaca

SEQ ID NO: 39573 - DNA, 25 bp, Probe sequence
actagcgactaatagagagatacca

SEQ ID NO: 39574 - DNA, 25 bp, Probe sequence
caagtgtattaagtggcaaggttaa

SEQ ID NO: 39575 - DNA, 25 bp, Probe sequence
ttgttcacgcattatatagagcaga

SEQ ID NO: 39576 - DNA, 25 bp, Probe sequence
cacgcattatatagagcagacgata

SEQ ID NO: 39577 - DNA, 25 bp, Probe sequence
aacgccatctgatgattacctatga

SEQ ID NO: 39578 - DNA, 25 bp, Probe sequence
gatttattgcccgaagagaaagaag

SEQ ID NO: 39579 - DNA, 25 bp, Probe sequence
atttattgcccgaagagaaagaaga

SEQ ID NO: 39580 - DNA, 25 bp, Probe sequence
tttattgcccgaagagaaagaagac

SEQ ID NO: 39581 - DNA, 25 bp, Probe sequence
ggatttattgcccgaagagaaagaa

SEQ ID NO: 39582 - DNA, 25 bp, Probe sequence
aactatttaatgctagagatgctgc

SEQ ID NO: 39583 - DNA, 25 bp, Probe sequence
gaccagtagccaaactatttaatgc

SEQ ID NO: 39584 - DNA, 25 bp, Probe sequence
ggaaagaccagtagccaaactattt

SEQ ID NO: 39585 - DNA, 25 bp, Probe sequence
ccgaagagaaagaagacacagaaac

SEQ ID NO: 39586 - DNA, 25 bp, Probe sequence
agagttgaagatgcgagaatatgaa

SEQ ID NO: 39587 - DNA, 25 bp, Probe sequence
aagagagttgaagatgcgagaatat

SEQ ID NO: 39588 - DNA, 25 bp, Probe sequence
gaagagagttgaagatgcgagaata

SEQ ID NO: 39589 - DNA, 25 bp, Probe sequence
tgatgaggatacgcttgagttatta

SEQ ID NO: 39590 - DNA, 25 bp, Probe sequence
gagagttgaagatgcgagaatatga

SEQ ID NO: 39591 - DNA, 25 bp, Probe sequence
agagagttgaagatgcgagaatatg

SEQ ID NO: 39592 - DNA, 25 bp, Probe sequence
ttgtcctattggttgttatgaatgg

SEQ ID NO: 39593 - DNA, 25 bp, Probe sequence
gtgatgaggatacgcttgagttatt

SEQ ID NO: 39594 - DNA, 25 bp, Probe sequence
gagttgaagatgcgagaatatgaat

SEQ ID NO: 39595 - DNA, 25 bp, Probe sequence
aatacgttagacacattgatggctc

SEQ ID NO: 39596 - DNA, 25 bp, Probe sequence
tggacatatcgttcattcaaataga

SEQ ID NO: 39597 - DNA, 25 bp, Probe sequence
atatgaaacatgaacgacaaatccg

SEQ ID NO: 39598 - DNA, 25 bp, Probe sequence
tatgaaacatgaacgacaaatccga

SEQ ID NO: 39599 - DNA, 25 bp, Probe sequence
ggacatatcgttcattcaaatagag

SEQ ID NO: 39600 - DNA, 25 bp, Probe sequence
tcgttcattcaaatagagatcgtaa

SEQ ID NO: 39601 - DNA, 25 bp, Probe sequence
atacgttagacacattgatggctca

SEQ ID NO: 39602 - DNA, 25 bp, Probe sequence
ttgtaattatgtatgtgaatgagca

SEQ ID NO: 39603 - DNA, 25 bp, Probe sequence
atcgttcattcaaatagagatcgta

SEQ ID NO: 39604 - DNA, 25 bp, Probe sequence
tgggagcaagaacaaagaaataatg

SEQ ID NO: 39605 - DNA, 25 bp, Probe sequence
ttattgctttcggatgatactttcg

SEQ ID NO: 39606 - DNA, 25 bp, Probe sequence
taatgacaactttgggaactgctat

SEQ ID NO: 39607 - DNA, 25 bp, Probe sequence
atgacaactttgggaactgctattt

SEQ ID NO: 39608 - DNA, 25 bp, Probe sequence
aatgacaactttgggaactgctatt

SEQ ID NO: 39609 - DNA, 25 bp, Probe sequence
gattgggagcaagaacaaagaaata

SEQ ID NO: 39610 - DNA, 25 bp, Probe sequence
gtaatgacaactttgggaactgcta

SEQ ID NO: 39611 - DNA, 25 bp, Probe sequence
ttgggagcaagaacaaagaaataat

SEQ ID NO: 39612 - DNA, 25 bp, Probe sequence
attgggagcaagaacaaagaaataa

SEQ ID NO: 39613 - DNA, 25 bp, Probe sequence
cgatattagagacacgcattacaag

SEQ ID NO: 39614 - DNA, 25 bp, Probe sequence
ttagagacacgcattacaagttatc

SEQ ID NO: 39615 - DNA, 25 bp, Probe sequence
tagagacacgcattacaagttatct

SEQ ID NO: 39616 - DNA, 25 bp, Probe sequence
gatattagagacacgcattacaagt

SEQ ID NO: 39617 - DNA, 25 bp, Probe sequence
gagacacgcattacaagttatctga

SEQ ID NO: 39618 - DNA, 25 bp, Probe sequence
agagacacgcattacaagttatctg

SEQ ID NO: 39619 - DNA, 25 bp, Probe sequence
attagagacacgcattacaagttat

SEQ ID NO: 39620 - DNA, 25 bp, Probe sequence
atattagagacacgcattacaagtt

SEQ ID NO: 39621 - DNA, 25 bp, Probe sequence
agacacgcattacaagttatctgac

SEQ ID NO: 39622 - DNA, 25 bp, Probe sequence
gaatacggaggatgacactaatgaa

SEQ ID NO: 39623 - DNA, 25 bp, Probe sequence
aatacggaggatgacactaatgaat

SEQ ID NO: 39624 - DNA, 25 bp, Probe sequence
tacggaggatgacactaatgaataa

SEQ ID NO: 39625 - DNA, 25 bp, Probe sequence
cacgacgaatacgaagagttaattg

SEQ ID NO: 39626 - DNA, 25 bp, Probe sequence
cgaatacgaagagttaattgccata

SEQ ID NO: 39627 - DNA, 25 bp, Probe sequence
acacgacgaatacgaagagttaatt

SEQ ID NO: 39628 - DNA, 25 bp, Probe sequence
atacggaggatgacactaatgaata

SEQ ID NO: 39629 - DNA, 25 bp, Probe sequence
acgaatacgaagagttaattgccat

SEQ ID NO: 39630 - DNA, 25 bp, Probe sequence
cacacgacgaatacgaagagttaat

SEQ ID NO: 39631 - DNA, 25 bp, Probe sequence
ggttgacagacacattgttattaga

SEQ ID NO: 39632 - DNA, 25 bp, Probe sequence
gttgacagacacattgttattagaa

SEQ ID NO: 39633 - DNA, 25 bp, Probe sequence
ggtatcatcgtttgtgaatttagca

SEQ ID NO: 39634 - DNA, 25 bp, Probe sequence
tggtatcatcgtttgtgaatttagc

SEQ ID NO: 39635 - DNA, 25 bp, Probe sequence
tcatcgtttgtgaatttagcaatca

SEQ ID NO: 39636 - DNA, 25 bp, Probe sequence
gggttgacagacacattgttattag

SEQ ID NO: 39637 - DNA, 25 bp, Probe sequence
catcgtttgtgaatttagcaatcat

SEQ ID NO: 39638 - DNA, 25 bp, Probe sequence
tatgggttgacagacacattgttat

SEQ ID NO: 39639 - DNA, 25 bp, Probe sequence
tgggttgacagacacattgttatta

SEQ ID NO: 39640 - DNA, 25 bp, Probe sequence
caaggaggacgagaatgatgtatta

SEQ ID NO: 39641 - DNA, 25 bp, Probe sequence
aaggaggacgagaatgatgtattac

SEQ ID NO: 39642 - DNA, 25 bp, Probe sequence
ggagatactacatcatcgtcacatt

SEQ ID NO: 39643 - DNA, 25 bp, Probe sequence
atgacgcaggaagaattaagagatt

SEQ ID NO: 39644 - DNA, 25 bp, Probe sequence
aatggagatactacatcatcgtcac

SEQ ID NO: 39645 - DNA, 25 bp, Probe sequence
caatggagatactacatcatcgtca

SEQ ID NO: 39646 - DNA, 25 bp, Probe sequence
tagcaatggagatactacatcatcg

SEQ ID NO: 39647 - DNA, 25 bp, Probe sequence
ggttagcaatggagatactacatca

SEQ ID NO: 39648 - DNA, 25 bp, Probe sequence
gagatactacatcatcgtcacattg

SEQ ID NO: 39649 - DNA, 25 bp, Probe sequence
cgtattcattgcgtcatcattatca

SEQ ID NO: 39650 - DNA, 25 bp, Probe sequence
aaggtattggacgaacatcatctaa

SEQ ID NO: 39651 - DNA, 25 bp, Probe sequence
aggtattggacgaacatcatctaat

SEQ ID NO: 39652 - DNA, 25 bp, Probe sequence
gcgtattcattgcgtcatcattatc

SEQ ID NO: 39653 - DNA, 25 bp, Probe sequence
tattggacgaacatcatctaatagc

SEQ ID NO: 39654 - DNA, 25 bp, Probe sequence
gtattcattgcgtcatcattatcat

SEQ ID NO: 39655 - DNA, 25 bp, Probe sequence
attgcgtcatcattatcatgtgtac

SEQ ID NO: 39656 - DNA, 25 bp, Probe sequence
cattgcgtcatcattatcatgtgta

SEQ ID NO: 39657 - DNA, 25 bp, Probe sequence
ggtattggacgaacatcatctaata

SEQ ID NO: 39658 - DNA, 25 bp, Probe sequence
agtcgattattgtgaacaagtagga

SEQ ID NO: 39659 - DNA, 25 bp, Probe sequence
gtcgattattgtgaacaagtaggag

SEQ ID NO: 39660 - DNA, 25 bp, Probe sequence
cgattattgtgaacaagtaggagct

SEQ ID NO: 39661 - DNA, 25 bp, Probe sequence
tcgattattgtgaacaagtaggagc

SEQ ID NO: 39662 - DNA, 25 bp, Probe sequence
gtcaaggttcatcaatttagtggtt

SEQ ID NO: 39663 - DNA, 25 bp, Probe sequence
tgtcaaggttcatcaatttagtggt

SEQ ID NO: 39664 - DNA, 25 bp, Probe sequence
tcaaggttcatcaatttagtggttt

SEQ ID NO: 39665 - DNA, 25 bp, Probe sequence
agagcgtatggatttaattgaacaa

SEQ ID NO: 39666 - DNA, 25 bp, Probe sequence
aagagcgtatggatttaattgaaca

SEQ ID NO: 39667 - DNA, 25 bp, Probe sequence
ggttcaatctaatcgtccaatctta

SEQ ID NO: 39668 - DNA, 25 bp, Probe sequence
aacaagtggttcaatctaatcgtcc

SEQ ID NO: 39669 - DNA, 25 bp, Probe sequence
aagtaggtaacgatggtgtcattac

SEQ ID NO: 39670 - DNA, 25 bp, Probe sequence
taattgtagctgatgaagttgaagg

SEQ ID NO: 39671 - DNA, 25 bp, Probe sequence
tggttcaatctaatcgtccaatctt

SEQ ID NO: 39672 - DNA, 25 bp, Probe sequence
aagtggttcaatctaatcgtccaat

SEQ ID NO: 39673 - DNA, 25 bp, Probe sequence
agtaggtaacgatggtgtcattaca

SEQ ID NO: 39674 - DNA, 25 bp, Probe sequence
gtggttcaatctaatcgtccaatct

SEQ ID NO: 39675 - DNA, 25 bp, Probe sequence
agtggttcaatctaatcgtccaatc

SEQ ID NO: 39676 - DNA, 25 bp, Probe sequence
ttggatagagtatgaggatgtagat

SEQ ID NO: 39677 - DNA, 25 bp, Probe sequence
tcatacaaggatacttaattgctca

SEQ ID NO: 39678 - DNA, 25 bp, Probe sequence
tggatagagtatgaggatgtagata

SEQ ID NO: 39679 - DNA, 25 bp, Probe sequence
catacaaggatacttaattgctcaa

SEQ ID NO: 39680 - DNA, 25 bp, Probe sequence
tattctgaagaagcattggctacaa

SEQ ID NO: 39681 - DNA, 25 bp, Probe sequence
ttattctgaagaagcattggctaca

SEQ ID NO: 39682 - DNA, 25 bp, Probe sequence
attattctgaagaagcattggctac

SEQ ID NO: 39683 - DNA, 25 bp, Probe sequence
ttggcggttcatatatttggataga

SEQ ID NO: 39684 - DNA, 25 bp, Probe sequence
gaaactcacagtggaaatgacaatt

SEQ ID NO: 39685 - DNA, 25 bp, Probe sequence
attatcaacaacagcagtatcaacg

SEQ ID NO: 39686 - DNA, 25 bp, Probe sequence
atatagtagcaggaacattagcagt

SEQ ID NO: 39687 - DNA, 25 bp, Probe sequence
tatagtagcaggaacattagcagta

SEQ ID NO: 39688 - DNA, 25 bp, Probe sequence
atagtagcaggaacattagcagtac

SEQ ID NO: 39689 - DNA, 25 bp, Probe sequence
actattatcaacaacagcagtatca

SEQ ID NO: 39690 - DNA, 25 bp, Probe sequence
tattatcaacaacagcagtatcaac

SEQ ID NO: 39691 - DNA, 25 bp, Probe sequence
ctattatcaacaacagcagtatcaa

SEQ ID NO: 39692 - DNA, 25 bp, Probe sequence
ttatcaacaacagcagtatcaacgt

SEQ ID NO: 39693 - DNA, 25 bp, Probe sequence
tatatagtagcaggaacattagcag

SEQ ID NO: 39694 - DNA, 25 bp, Probe sequence
taaccattaagtcaacagaagtcgt

SEQ ID NO: 39695 - DNA, 25 bp, Probe sequence
tccaattacaatccaaggtcagtta

SEQ ID NO: 39696 - DNA, 25 bp, Probe sequence
atctccaattacaatccaaggtcag

SEQ ID NO: 39697 - DNA, 25 bp, Probe sequence
tatctccaattacaatccaaggtca

SEQ ID NO: 39698 - DNA, 25 bp, Probe sequence
ccaattacaatccaaggtcagttaa

SEQ ID NO: 39699 - DNA, 25 bp, Probe sequence
ctccaattacaatccaaggtcagtt

SEQ ID NO: 39700 - DNA, 25 bp, Probe sequence
aatgttgacagtaggtaatggttgg

SEQ ID NO: 39701 - DNA, 25 bp, Probe sequence
acagcaagaacaagatgattcagaa

SEQ ID NO: 39702 - DNA, 25 bp, Probe sequence
aacagcaagaacaagatgattcaga

SEQ ID NO: 39703 - DNA, 25 bp, Probe sequence
gtacaagagtgactcctgaagtgaa

SEQ ID NO: 39704 - DNA, 25 bp, Probe sequence
aatgatggtacaagagtgactcctg

SEQ ID NO: 39705 - DNA, 25 bp, Probe sequence
gatggtacaagagtgactcctgaag

SEQ ID NO: 39706 - DNA, 25 bp, Probe sequence
atgatggtacaagagtgactcctga

SEQ ID NO: 39707 - DNA, 25 bp, Probe sequence
atggtacaagagtgactcctgaagt

SEQ ID NO: 39708 - DNA, 25 bp, Probe sequence
tgatggtacaagagtgactcctgaa

SEQ ID NO: 39709 - DNA, 25 bp, Probe sequence
taaatgatggtacaagagtgactcc

SEQ ID NO: 39710 - DNA, 25 bp, Probe sequence
attaaatgatggtacaagagtgact

SEQ ID NO: 39711 - DNA, 25 bp, Probe sequence
tacaagagtgactcctgaagtgaaa

SEQ ID NO: 39712 - DNA, 25 bp, Probe sequence
tatgctcattgattgtgtgtggatt

SEQ ID NO: 39713 - DNA, 25 bp, Probe sequence
gtatgctcattgattgtgtgtggat

SEQ ID NO: 39714 - DNA, 25 bp, Probe sequence
ttgtatgctcattgattgtgtgtgg

SEQ ID NO: 39715 - DNA, 25 bp, Probe sequence
tgtatgctcattgattgtgtgtgga

SEQ ID NO: 39716 - DNA, 25 bp, Probe sequence
ttaccagaaagtgagaaggctattt

SEQ ID NO: 39717 - DNA, 25 bp, Probe sequence
tttaccagaaagtgagaaggctatt

SEQ ID NO: 39718 - DNA, 25 bp, Probe sequence
accagaaagtgagaaggctatttat

SEQ ID NO: 39719 - DNA, 25 bp, Probe sequence
atttaccagaaagtgagaaggctat

SEQ ID NO: 39720 - DNA, 25 bp, Probe sequence
taggctcaaagaaatatacgatggt

SEQ ID NO: 39721 - DNA, 25 bp, Probe sequence
aaactgtggcgaatacaaattatca

SEQ ID NO: 39722 - DNA, 25 bp, Probe sequence
caaactgtggcgaatacaaattatc

SEQ ID NO: 39723 - DNA, 25 bp, Probe sequence
aactgtggcgaatacaaattatcac

SEQ ID NO: 39724 - DNA, 25 bp, Probe sequence
ccaaactgtggcgaatacaaattat

SEQ ID NO: 39725 - DNA, 25 bp, Probe sequence
aactgtggttcttacaatggcgaag

SEQ ID NO: 39726 - DNA, 25 bp, Probe sequence
tcttacaatggcgaagaagtagcag

SEQ ID NO: 39727 - DNA, 25 bp, Probe sequence
acaaattatcacaccgtgtatgtaa

SEQ ID NO: 39728 - DNA, 25 bp, Probe sequence
atggcgaagaagtagcagctaaata

SEQ ID NO: 39729 - DNA, 25 bp, Probe sequence
tggcgaatacaaattatcacaccgt

SEQ ID NO: 39730 - DNA, 25 bp, Probe sequence
atccagataaaccaaagccaaatcc

SEQ ID NO: 39731 - DNA, 25 bp, Probe sequence
gatccagataaaccaaagccaaatc

SEQ ID NO: 39732 - DNA, 25 bp, Probe sequence
agatccagataaaccaaagccaaat

SEQ ID NO: 39733 - DNA, 25 bp, Probe sequence
cagatccagataaaccaaagccaaa

SEQ ID NO: 39734 - DNA, 25 bp, Probe sequence
aaaccagatccagataaaccaaagc

SEQ ID NO: 39735 - DNA, 25 bp, Probe sequence
ccagatccagataaaccaaagccaa

SEQ ID NO: 39736 - DNA, 25 bp, Probe sequence
aaccagatccagataaaccaaagcc

SEQ ID NO: 39737 - DNA, 25 bp, Probe sequence
tccagataaaccaaagccaaatccg

SEQ ID NO: 39738 - DNA, 25 bp, Probe sequence
gaaaccaaaaccagacccagataaa

SEQ ID NO: 39739 - DNA, 25 bp, Probe sequence
gcatccttagcattattaatcgcaa

SEQ ID NO: 39740 - DNA, 25 bp, Probe sequence
ccttagcattattaatcgcaatcac

SEQ ID NO: 39741 - DNA, 25 bp, Probe sequence
tccttagcattattaatcgcaatca

SEQ ID NO: 39742 - DNA, 25 bp, Probe sequence
cttagcattattaatcgcaatcaca

SEQ ID NO: 39743 - DNA, 25 bp, Probe sequence
catccttagcattattaatcgcaat

SEQ ID NO: 39744 - DNA, 25 bp, Probe sequence
atccttagcattattaatcgcaatc

SEQ ID NO: 39745 - DNA, 25 bp, Probe sequence
tagcggtactttgaattatgaggtt

SEQ ID NO: 39746 - DNA, 25 bp, Probe sequence
atagcggtactttgaattatgaggt

SEQ ID NO: 39747 - DNA, 25 bp, Probe sequence
gcagatagcggtactttgaattatg

SEQ ID NO: 39748 - DNA, 25 bp, Probe sequence
aatggattatcgacacagtgaacaa

SEQ ID NO: 39749 - DNA, 25 bp, Probe sequence
attaaggaaggagtgatttcaatgg

SEQ ID NO: 39750 - DNA, 25 bp, Probe sequence
ttaaggaaggagtgatttcaatggc

SEQ ID NO: 39751 - DNA, 25 bp, Probe sequence
gagtgatttcaatggcacaagatat

SEQ ID NO: 39752 - DNA, 25 bp, Probe sequence
taaggaaggagtgatttcaatggca

SEQ ID NO: 39753 - DNA, 25 bp, Probe sequence
ggattatcgacacagtgaacaaatt

SEQ ID NO: 39754 - DNA, 25 bp, Probe sequence
ggagtgatttcaatggcacaagata

SEQ ID NO: 39755 - DNA, 25 bp, Probe sequence
tggattatcgacacagtgaacaaat

SEQ ID NO: 39756 - DNA, 25 bp, Probe sequence
atggattatcgacacagtgaacaaa

SEQ ID NO: 39757 - DNA, 25 bp, Probe sequence
atatacaacaatgattggtagcgtg

SEQ ID NO: 39758 - DNA, 25 bp, Probe sequence
catatacaacaatgattggtagcgt

SEQ ID NO: 39759 - DNA, 25 bp, Probe sequence
acatatacaacaatgattggtagcg

SEQ ID NO: 39760 - DNA, 25 bp, Probe sequence
tatacaacaatgattggtagcgtgt

SEQ ID NO: 39761 - DNA, 25 bp, Probe sequence
aatgtaactgaggaacaacaactag

SEQ ID NO: 39762 - DNA, 25 bp, Probe sequence
gcacatttatacagcagaaagagag

SEQ ID NO: 39763 - DNA, 25 bp, Probe sequence
ttatttcggcacatttatacagcag

SEQ ID NO: 39764 - DNA, 25 bp, Probe sequence
cttatttcggcacatttatacagca

SEQ ID NO: 39765 - DNA, 25 bp, Probe sequence
acttatttcggcacatttatacagc

SEQ ID NO: 39766 - DNA, 25 bp, Probe sequence
cattacaagaggttgaacaagcatt

SEQ ID NO: 39767 - DNA, 25 bp, Probe sequence
acattacaagaggttgaacaagcat

SEQ ID NO: 39768 - DNA, 25 bp, Probe sequence
aacattacaagaggttgaacaagca

SEQ ID NO: 39769 - DNA, 25 bp, Probe sequence
caatagtgacaacgaagtatggtgc

SEQ ID NO: 39770 - DNA, 25 bp, Probe sequence
gcaatagtgacaacgaagtatggtg

SEQ ID NO: 39771 - DNA, 25 bp, Probe sequence
tcaagtattggtgtagatgtatcaa

SEQ ID NO: 39772 - DNA, 25 bp, Probe sequence
tgtgaatgatattgatgtgaatgaa

SEQ ID NO: 39773 - DNA, 25 bp, Probe sequence
ttgtgaatgatattgatgtgaatga

SEQ ID NO: 39774 - DNA, 25 bp, Probe sequence
atcaagtattggtgtagatgtatca

SEQ ID NO: 39775 - DNA, 25 bp, Probe sequence
ttagaggaagtgccattcggtatta

SEQ ID NO: 39776 - DNA, 25 bp, Probe sequence
gctgataaggcaatgactcaattat

SEQ ID NO: 39777 - DNA, 25 bp, Probe sequence
tcatataagacattgcctaatcgtt

SEQ ID NO: 39778 - DNA, 25 bp, Probe sequence
cgtcatataagacattgcctaatcg

SEQ ID NO: 39779 - DNA, 25 bp, Probe sequence
tagaggaagtgccattcggtattac

SEQ ID NO: 39780 - DNA, 25 bp, Probe sequence
gtcatataagacattgcctaatcgt

SEQ ID NO: 39781 - DNA, 25 bp, Probe sequence
cttagaggaagtgccattcggtatt

SEQ ID NO: 39782 - DNA, 25 bp, Probe sequence
aattcagaatcgtaccaacaactgt

SEQ ID NO: 39783 - DNA, 25 bp, Probe sequence
attcagaatcgtaccaacaactgtt

SEQ ID NO: 39784 - DNA, 25 bp, Probe sequence
ggtataactacacgagtgatgactt

SEQ ID NO: 39785 - DNA, 25 bp, Probe sequence
ttggtataactacacgagtgatgac

SEQ ID NO: 39786 - DNA, 25 bp, Probe sequence
attggtataactacacgagtgatga

SEQ ID NO: 39787 - DNA, 25 bp, Probe sequence
tggtataactacacgagtgatgact

SEQ ID NO: 39788 - DNA, 25 bp, Probe sequence
agtattggtataactacacgagtga

SEQ ID NO: 39789 - DNA, 25 bp, Probe sequence
aagtattggtataactacacgagtg

SEQ ID NO: 39790 - DNA, 25 bp, Probe sequence
cgacagaagacgcactaggtattaa

SEQ ID NO: 39791 - DNA, 25 bp, Probe sequence
aatcatcgagataatcattggcaac

SEQ ID NO: 39792 - DNA, 25 bp, Probe sequence
tattggtataactacacgagtgatg

SEQ ID NO: 39793 - DNA, 25 bp, Probe sequence
cgttcaacaatatcaattaccaggt

SEQ ID NO: 39794 - DNA, 25 bp, Probe sequence
ttcaacaatatcaattaccaggtca

SEQ ID NO: 39795 - DNA, 25 bp, Probe sequence
tcaacaatatcaattaccaggtcat

SEQ ID NO: 39796 - DNA, 25 bp, Probe sequence
gttcaacaatatcaattaccaggtc

SEQ ID NO: 39797 - DNA, 25 bp, Probe sequence
cgtcatcatgtaggtaatgtgttat

SEQ ID NO: 39798 - DNA, 25 bp, Probe sequence
atgtaggtaatgtgttatcaagtga

SEQ ID NO: 39799 - DNA, 25 bp, Probe sequence
gatccgttaagagctaagttcattg

SEQ ID NO: 39800 - DNA, 25 bp, Probe sequence
agatccgttaagagctaagttcatt

SEQ ID NO: 39801 - DNA, 25 bp, Probe sequence
gagatccgttaagagctaagttcat

SEQ ID NO: 39802 - DNA, 25 bp, Probe sequence
ttagatgaaccgacagttggtattg

SEQ ID NO: 39803 - DNA, 25 bp, Probe sequence
gatgaaccgacagttggtattgatt

SEQ ID NO: 39804 - DNA, 25 bp, Probe sequence
tagatgaaccgacagttggtattga

SEQ ID NO: 39805 - DNA, 25 bp, Probe sequence
taaccgtattacttggtgataatgg

SEQ ID NO: 39806 - DNA, 25 bp, Probe sequence
agatgaaccgacagttggtattgat

SEQ ID NO: 39807 - DNA, 25 bp, Probe sequence
gtctgccaaagtatctacattgtcc

SEQ ID NO: 39808 - DNA, 25 bp, Probe sequence
gatggaactatcaactatttcggcg

SEQ ID NO: 39809 - DNA, 25 bp, Probe sequence
cgtctgccaaagtatctacattgtc

SEQ ID NO: 39810 - DNA, 25 bp, Probe sequence
aatctagacatgacatccaccaact

SEQ ID NO: 39811 - DNA, 25 bp, Probe sequence
agtaggtgttgcgttattcgtatta

SEQ ID NO: 39812 - DNA, 25 bp, Probe sequence
tagtaggtgttgcgttattcgtatt

SEQ ID NO: 39813 - DNA, 25 bp, Probe sequence
ttagtaggtgttgcgttattcgtat

SEQ ID NO: 39814 - DNA, 25 bp, Probe sequence
attagtaggtgttgcgttattcgta

SEQ ID NO: 39815 - DNA, 25 bp, Probe sequence
tattagtaggtgttgcgttattcgt

SEQ ID NO: 39816 - DNA, 25 bp, Probe sequence
gtaggtgttgcgttattcgtattat

SEQ ID NO: 39817 - DNA, 25 bp, Probe sequence
agtatgatattagtaggtgttgcgt

SEQ ID NO: 39818 - DNA, 25 bp, Probe sequence
atattagtaggtgttgcgttattcg

SEQ ID NO: 39819 - DNA, 25 bp, Probe sequence
agcattattacaagcagcactacaa

SEQ ID NO: 39820 - DNA, 25 bp, Probe sequence
tggaagagatacaacagatgcttaa

SEQ ID NO: 39821 - DNA, 25 bp, Probe sequence
atggaagagatacaacagatgctta

SEQ ID NO: 39822 - DNA, 25 bp, Probe sequence
gatggaagagatacaacagatgctt

SEQ ID NO: 39823 - DNA, 25 bp, Probe sequence
tatgccatatagcgtcacagtagat

SEQ ID NO: 39824 - DNA, 25 bp, Probe sequence
ccatatagcgtcacagtagatgtta

SEQ ID NO: 39825 - DNA, 25 bp, Probe sequence
gatatgccatatagcgtcacagtag

SEQ ID NO: 39826 - DNA, 25 bp, Probe sequence
atatgccatatagcgtcacagtaga

SEQ ID NO: 39827 - DNA, 25 bp, Probe sequence
agatatgccatatagcgtcacagta

SEQ ID NO: 39828 - DNA, 25 bp, Probe sequence
agaacatgactatcaaccgaatcaa

SEQ ID NO: 39829 - DNA, 25 bp, Probe sequence
atatattgaagacaagcaagaacgc

SEQ ID NO: 39830 - DNA, 25 bp, Probe sequence
catatattgaagacaagcaagaacg

SEQ ID NO: 39831 - DNA, 25 bp, Probe sequence
cggtgataatacgatgtttgatgtg

SEQ ID NO: 39832 - DNA, 25 bp, Probe sequence
actacaaggtaagacaaatcacgat

SEQ ID NO: 39833 - DNA, 25 bp, Probe sequence
ggtgataatacgatgtttgatgtgt

SEQ ID NO: 39834 - DNA, 25 bp, Probe sequence
tactacaaggtaagacaaatcacga

SEQ ID NO: 39835 - DNA, 25 bp, Probe sequence
acgatgtttgatgtgttagaagatt

SEQ ID NO: 39836 - DNA, 25 bp, Probe sequence
acatatattgaagacaagcaagaac

SEQ ID NO: 39837 - DNA, 25 bp, Probe sequence
gagaccacaatttgaatcacttgaa

SEQ ID NO: 39838 - DNA, 25 bp, Probe sequence
tatattcgtgtggattggttggtat

SEQ ID NO: 39839 - DNA, 25 bp, Probe sequence
gtatattcgtgtggattggttggta

SEQ ID NO: 39840 - DNA, 25 bp, Probe sequence
atattcgtgtggattggttggtatg

SEQ ID NO: 39841 - DNA, 25 bp, Probe sequence
aacattctgaatcaacaccacataa

SEQ ID NO: 39842 - DNA, 25 bp, Probe sequence
ttctgaatcaacaccacataatctt

SEQ ID NO: 39843 - DNA, 25 bp, Probe sequence
acattctgaatcaacaccacataat

SEQ ID NO: 39844 - DNA, 25 bp, Probe sequence
attctgaatcaacaccacataatct

SEQ ID NO: 39845 - DNA, 25 bp, Probe sequence
cattctgaatcaacaccacataatc

SEQ ID NO: 39846 - DNA, 25 bp, Probe sequence
tctgaatcaacaccacataatctta

SEQ ID NO: 39847 - DNA, 25 bp, Probe sequence
atgaagatgaaagtagcccgattat

SEQ ID NO: 39848 - DNA, 25 bp, Probe sequence
aatgaagatgaaagtagcccgatta

SEQ ID NO: 39849 - DNA, 25 bp, Probe sequence
ggattgaaacattagaaggctttga

SEQ ID NO: 39850 - DNA, 25 bp, Probe sequence
gggattgaaacattagaaggctttg

SEQ ID NO: 39851 - DNA, 25 bp, Probe sequence
aaatgaagatgaaagtagcccgatt

SEQ ID NO: 39852 - DNA, 25 bp, Probe sequence
ttgaaacattagaaggctttgatgg

SEQ ID NO: 39853 - DNA, 25 bp, Probe sequence
tgggattgaaacattagaaggcttt

SEQ ID NO: 39854 - DNA, 25 bp, Probe sequence
atgggattgaaacattagaaggctt

SEQ ID NO: 39855 - DNA, 25 bp, Probe sequence
aaacattagaaggctttgatggcat

SEQ ID NO: 39856 - DNA, 25 bp, Probe sequence
ctggaatggatgctgtaataatgga

SEQ ID NO: 39857 - DNA, 25 bp, Probe sequence
ctgctggaatggatgctgtaataat

SEQ ID NO: 39858 - DNA, 25 bp, Probe sequence
tgctggaatggatgctgtaataatg

SEQ ID NO: 39859 - DNA, 25 bp, Probe sequence
ggtacgacagatccttatcaagata

SEQ ID NO: 39860 - DNA, 25 bp, Probe sequence
gctggaatggatgctgtaataatgg

SEQ ID NO: 39861 - DNA, 25 bp, Probe sequence
cctgaattattagcacatactacac

SEQ ID NO: 39862 - DNA, 25 bp, Probe sequence
ttaggtaatgagggagaaggtgtta

SEQ ID NO: 39863 - DNA, 25 bp, Probe sequence
tcctgaattattagcacatactaca

SEQ ID NO: 39864 - DNA, 25 bp, Probe sequence
tattaggtaatgagggagaaggtgt

SEQ ID NO: 39865 - DNA, 25 bp, Probe sequence
acacgaattaggtacagtaggaatg

SEQ ID NO: 39866 - DNA, 25 bp, Probe sequence
cgaattaggtacagtaggaatggta

SEQ ID NO: 39867 - DNA, 25 bp, Probe sequence
tgatacacgaattaggtacagtagg

SEQ ID NO: 39868 - DNA, 25 bp, Probe sequence
cacgaattaggtacagtaggaatgg

SEQ ID NO: 39869 - DNA, 25 bp, Probe sequence
gatacacgaattaggtacagtagga

SEQ ID NO: 39870 - DNA, 25 bp, Probe sequence
acgaattaggtacagtaggaatggt

SEQ ID NO: 39871 - DNA, 25 bp, Probe sequence
tacacgaattaggtacagtaggaat

SEQ ID NO: 39872 - DNA, 25 bp, Probe sequence
atacacgaattaggtacagtaggaa

SEQ ID NO: 39873 - DNA, 25 bp, Probe sequence
ttaggtacagtaggaatggtatgtc

SEQ ID NO: 39874 - DNA, 25 bp, Probe sequence
ctatcgcaggtcttacactattcac

SEQ ID NO: 39875 - DNA, 25 bp, Probe sequence
gtcttacactattcacggttggtag

SEQ ID NO: 39876 - DNA, 25 bp, Probe sequence
ttagcgttaccaacaattaagcaag

SEQ ID NO: 39877 - DNA, 25 bp, Probe sequence
gcgttaccaacaattaagcaagatt

SEQ ID NO: 39878 - DNA, 25 bp, Probe sequence
tagcgttaccaacaattaagcaaga

SEQ ID NO: 39879 - DNA, 25 bp, Probe sequence
agcgttaccaacaattaagcaagat

SEQ ID NO: 39880 - DNA, 25 bp, Probe sequence
ggtcttacactattcacggttggta

SEQ ID NO: 39881 - DNA, 25 bp, Probe sequence
ttcctgtgtatcttcaagaacaact

SEQ ID NO: 39882 - DNA, 25 bp, Probe sequence
tatcgcaggtcttacactattcacg

SEQ ID NO: 39883 - DNA, 25 bp, Probe sequence
tgtatcattaccaggtcgtcatatt

SEQ ID NO: 39884 - DNA, 25 bp, Probe sequence
gtatcattaccaggtcgtcatattg

SEQ ID NO: 39885 - DNA, 25 bp, Probe sequence
gatgtatcattaccaggtcgtcata

SEQ ID NO: 39886 - DNA, 25 bp, Probe sequence
atgtatcattaccaggtcgtcatat

SEQ ID NO: 39887 - DNA, 25 bp, Probe sequence
atcattaccaggtcgtcatattgaa

SEQ ID NO: 39888 - DNA, 25 bp, Probe sequence
tatcattaccaggtcgtcatattga

SEQ ID NO: 39889 - DNA, 25 bp, Probe sequence
aattgatgtatcattaccaggtcgt

SEQ ID NO: 39890 - DNA, 25 bp, Probe sequence
attgatgtatcattaccaggtcgtc

SEQ ID NO: 39891 - DNA, 25 bp, Probe sequence
tctgtagaagttgatgtgtcatgtt

SEQ ID NO: 39892 - DNA, 25 bp, Probe sequence
ttggttcatatattgcagctagagg

SEQ ID NO: 39893 - DNA, 25 bp, Probe sequence
tggaagaaatgacggtttaggtata

SEQ ID NO: 39894 - DNA, 25 bp, Probe sequence
ctggaagaaatgacggtttaggtat

SEQ ID NO: 39895 - DNA, 25 bp, Probe sequence
cattggttcatatattgcagctaga

SEQ ID NO: 39896 - DNA, 25 bp, Probe sequence
tcattggttcatatattgcagctag

SEQ ID NO: 39897 - DNA, 25 bp, Probe sequence
gctaattggtagttggattgcatta

SEQ ID NO: 39898 - DNA, 25 bp, Probe sequence
tggttcatatattgcagctagagga

SEQ ID NO: 39899 - DNA, 25 bp, Probe sequence
attggttcatatattgcagctagag

SEQ ID NO: 39900 - DNA, 25 bp, Probe sequence
aaatgacggtttaggtataacaacg

SEQ ID NO: 39901 - DNA, 25 bp, Probe sequence
tagtcaatcaatggcaaggtaagaa

SEQ ID NO: 39902 - DNA, 25 bp, Probe sequence
tatgtagtcaatcaatggcaaggta

SEQ ID NO: 39903 - DNA, 25 bp, Probe sequence
atgtagtcaatcaatggcaaggtaa

SEQ ID NO: 39904 - DNA, 25 bp, Probe sequence
ttatgtagtcaatcaatggcaaggt

SEQ ID NO: 39905 - DNA, 25 bp, Probe sequence
attatgtagtcaatcaatggcaagg

SEQ ID NO: 39906 - DNA, 25 bp, Probe sequence
gtagtcaatcaatggcaaggtaaga

SEQ ID NO: 39907 - DNA, 25 bp, Probe sequence
tgtagtcaatcaatggcaaggtaag

SEQ ID NO: 39908 - DNA, 25 bp, Probe sequence
gaagtgttagaaggtgctggattag

SEQ ID NO: 39909 - DNA, 25 bp, Probe sequence
tgacaacattagatgatacagaacg

SEQ ID NO: 39910 - DNA, 25 bp, Probe sequence
atgacgatatgacgattacagaagc

SEQ ID NO: 39911 - DNA, 25 bp, Probe sequence
acatgacgatatgacgattacagaa

SEQ ID NO: 39912 - DNA, 25 bp, Probe sequence
catgacgatatgacgattacagaag

SEQ ID NO: 39913 - DNA, 25 bp, Probe sequence
tacatgacgatatgacgattacaga

SEQ ID NO: 39914 - DNA, 25 bp, Probe sequence
atgttgtgattctaactacaccaga

SEQ ID NO: 39915 - DNA, 25 bp, Probe sequence
agatgttgtgattctaactacacca

SEQ ID NO: 39916 - DNA, 25 bp, Probe sequence
gatgttgtgattctaactacaccag

SEQ ID NO: 39917 - DNA, 25 bp, Probe sequence
aatctgaactaagcgagagtgacat

SEQ ID NO: 39918 - DNA, 25 bp, Probe sequence
atacatgacgatatgacgattacag

SEQ ID NO: 39919 - DNA, 25 bp, Probe sequence
atggtggttcttattggaagttaat

SEQ ID NO: 39920 - DNA, 25 bp, Probe sequence
tatggtggttcttattggaagttaa

SEQ ID NO: 39921 - DNA, 25 bp, Probe sequence
tggtggttcttattggaagttaata

SEQ ID NO: 39922 - DNA, 25 bp, Probe sequence
atatggtggttcttattggaagtta

SEQ ID NO: 39923 - DNA, 25 bp, Probe sequence
tcatatggtggttcttattggaagt

SEQ ID NO: 39924 - DNA, 25 bp, Probe sequence
catatggtggttcttattggaagtt

SEQ ID NO: 39925 - DNA, 25 bp, Probe sequence
atcatatggtggttcttattggaag

SEQ ID NO: 39926 - DNA, 25 bp, Probe sequence
aatcatatggtggttcttattggaa

SEQ ID NO: 39927 - DNA, 25 bp, Probe sequence
gcaatcatatggtggttcttattgg

SEQ ID NO: 39928 - DNA, 25 bp, Probe sequence
aattagggtataaagcagcaggttt

SEQ ID NO: 39929 - DNA, 25 bp, Probe sequence
agataacccagagcacatacgatat

SEQ ID NO: 39930 - DNA, 25 bp, Probe sequence
aagaattagggtataaagcagcagg

SEQ ID NO: 39931 - DNA, 25 bp, Probe sequence
cagcaggtttagatacttcaagaaa

SEQ ID NO: 39932 - DNA, 25 bp, Probe sequence
aagataacccagagcacatacgata

SEQ ID NO: 39933 - DNA, 25 bp, Probe sequence
aaagcagcaggtttagatacttcaa

SEQ ID NO: 39934 - DNA, 25 bp, Probe sequence
gaattagggtataaagcagcaggtt

SEQ ID NO: 39935 - DNA, 25 bp, Probe sequence
gcagcaggtttagatacttcaagaa

SEQ ID NO: 39936 - DNA, 25 bp, Probe sequence
aaagaattagggtataaagcagcag

SEQ ID NO: 39937 - DNA, 25 bp, Probe sequence
attggtgcgttactaataggtgtta

SEQ ID NO: 39938 - DNA, 25 bp, Probe sequence
atcaatcaacttcacaatcaacgac

SEQ ID NO: 39939 - DNA, 25 bp, Probe sequence
tggtgcgttactaataggtgttaat

SEQ ID NO: 39940 - DNA, 25 bp, Probe sequence
ggtgcgttactaataggtgttaatg

SEQ ID NO: 39941 - DNA, 25 bp, Probe sequence
ttggtgcgttactaataggtgttaa

SEQ ID NO: 39942 - DNA, 25 bp, Probe sequence
gtgcgttactaataggtgttaatgc

SEQ ID NO: 39943 - DNA, 25 bp, Probe sequence
caatcaacttcacaatcaacgacaa

SEQ ID NO: 39944 - DNA, 25 bp, Probe sequence
taattggtgcgttactaataggtgt

SEQ ID NO: 39945 - DNA, 25 bp, Probe sequence
actaattggtgcgttactaataggt

SEQ ID NO: 39946 - DNA, 25 bp, Probe sequence
tgtcagatggtaagttagcaagtag

SEQ ID NO: 39947 - DNA, 25 bp, Probe sequence
gtcagatggtaagttagcaagtagg

SEQ ID NO: 39948 - DNA, 25 bp, Probe sequence
ctgtcagatggtaagttagcaagta

SEQ ID NO: 39949 - DNA, 25 bp, Probe sequence
attatcggatctgaaggtagaggtc

SEQ ID NO: 39950 - DNA, 25 bp, Probe sequence
gattatcggatctgaaggtagaggt

SEQ ID NO: 39951 - DNA, 25 bp, Probe sequence
tcagatggtaagttagcaagtaggc

SEQ ID NO: 39952 - DNA, 25 bp, Probe sequence
ttctgtcagatggtaagttagcaag

SEQ ID NO: 39953 - DNA, 25 bp, Probe sequence
tctgtcagatggtaagttagcaagt

SEQ ID NO: 39954 - DNA, 25 bp, Probe sequence
attcaagaaacaatgggacttcaaa

SEQ ID NO: 39955 - DNA, 25 bp, Probe sequence
tataatcaaggcgaactaacagcat

SEQ ID NO: 39956 - DNA, 25 bp, Probe sequence
atataatcaaggcgaactaacagca

SEQ ID NO: 39957 - DNA, 25 bp, Probe sequence
ataatcaaggcgaactaacagcatc

SEQ ID NO: 39958 - DNA, 25 bp, Probe sequence
tatataatcaaggcgaactaacagc

SEQ ID NO: 39959 - DNA, 25 bp, Probe sequence
actcagagcctaataatagttcagt

SEQ ID NO: 39960 - DNA, 25 bp, Probe sequence
atcaaggcgaactaacagcatctaa

SEQ ID NO: 39961 - DNA, 25 bp, Probe sequence
aatcaaggcgaactaacagcatcta

SEQ ID NO: 39962 - DNA, 25 bp, Probe sequence
taatcaaggcgaactaacagcatct

SEQ ID NO: 39963 - DNA, 25 bp, Probe sequence
acatcgcagatatgataatcaaggc

SEQ ID NO: 39964 - DNA, 25 bp, Probe sequence
tggcattatatcctaacgaagcatt

SEQ ID NO: 39965 - DNA, 25 bp, Probe sequence
ttggcattatatcctaacgaagcat

SEQ ID NO: 39966 - DNA, 25 bp, Probe sequence
attggcattatatcctaacgaagca

SEQ ID NO: 39967 - DNA, 25 bp, Probe sequence
atcctaacgaagcattacaacatca

SEQ ID NO: 39968 - DNA, 25 bp, Probe sequence
tatcctaacgaagcattacaacatc

SEQ ID NO: 39969 - DNA, 25 bp, Probe sequence
tcctaacgaagcattacaacatcag

SEQ ID NO: 39970 - DNA, 25 bp, Probe sequence
ggcattatatcctaacgaagcatta

SEQ ID NO: 39971 - DNA, 25 bp, Probe sequence
tattggcattatatcctaacgaagc

SEQ ID NO: 39972 - DNA, 25 bp, Probe sequence
atatcctaacgaagcattacaacat

SEQ ID NO: 39973 - DNA, 25 bp, Probe sequence
aattattatggtgaaggtgaggacg

SEQ ID NO: 39974 - DNA, 25 bp, Probe sequence
attattatggtgaaggtgaggacgc

SEQ ID NO: 39975 - DNA, 25 bp, Probe sequence
gcaatggttatgtgggtgaatttaa

SEQ ID NO: 39976 - DNA, 25 bp, Probe sequence
taggatttcaatatggtggtaaacg

SEQ ID NO: 39977 - DNA, 25 bp, Probe sequence
cttgtgatgtgatgagtttagaagt

SEQ ID NO: 39978 - DNA, 25 bp, Probe sequence
aaattattatggtgaaggtgaggac

SEQ ID NO: 39979 - DNA, 25 bp, Probe sequence
acttgtgatgtgatgagtttagaag

SEQ ID NO: 39980 - DNA, 25 bp, Probe sequence
tgtgatgtgatgagtttagaagtaa

SEQ ID NO: 39981 - DNA, 25 bp, Probe sequence
ttgtgatgtgatgagtttagaagta

SEQ ID NO: 39982 - DNA, 25 bp, Probe sequence
ggtgtggcatttgaaattataggag

SEQ ID NO: 39983 - DNA, 25 bp, Probe sequence
ctgtaggtgtggcatttgaaattat

SEQ ID NO: 39984 - DNA, 25 bp, Probe sequence
aggtgtggcatttgaaattatagga

SEQ ID NO: 39985 - DNA, 25 bp, Probe sequence
gtgtggcatttgaaattataggaga

SEQ ID NO: 39986 - DNA, 25 bp, Probe sequence
taggtgtggcatttgaaattatagg

SEQ ID NO: 39987 - DNA, 25 bp, Probe sequence
tgtggcatttgaaattataggagaa

SEQ ID NO: 39988 - DNA, 25 bp, Probe sequence
tgtaggtgtggcatttgaaattata

SEQ ID NO: 39989 - DNA, 25 bp, Probe sequence
gtaggtgtggcatttgaaattatag

SEQ ID NO: 39990 - DNA, 25 bp, Probe sequence
gctgtaggtgtggcatttgaaatta

SEQ ID NO: 39991 - DNA, 25 bp, Probe sequence
gggaaaggcgaaataacagtaaata

SEQ ID NO: 39992 - DNA, 25 bp, Probe sequence
agggaaaggcgaaataacagtaaat

SEQ ID NO: 39993 - DNA, 25 bp, Probe sequence
aagggaaaggcgaaataacagtaaa

SEQ ID NO: 39994 - DNA, 25 bp, Probe sequence
aaagggaaaggcgaaataacagtaa

SEQ ID NO: 39995 - DNA, 25 bp, Probe sequence
ggaaaggcgaaataacagtaaataa

SEQ ID NO: 39996 - DNA, 25 bp, Probe sequence
aaaagggaaaggcgaaataacagta

SEQ ID NO: 39997 - DNA, 25 bp, Probe sequence
gaaaggcgaaataacagtaaataaa

SEQ ID NO: 39998 - DNA, 25 bp, Probe sequence
aaaggcgaaataacagtaaataaat

SEQ ID NO: 39999 - DNA, 25 bp, Probe sequence
aaggcgaaataacagtaaataaatt

SEQ ID NO: 40000 - DNA, 25 bp, Probe sequence
tgattctggtaactattgcatggat

SEQ ID NO: 40001 - DNA, 25 bp, Probe sequence
gattctggtaactattgcatggatt

SEQ ID NO: 40002 - DNA, 25 bp, Probe sequence
gtgattctggtaactattgcatgga

SEQ ID NO: 40003 - DNA, 25 bp, Probe sequence
aagtgattctggtaactattgcatg

SEQ ID NO: 40004 - DNA, 25 bp, Probe sequence
agtgattctggtaactattgcatgg

SEQ ID NO: 40005 - DNA, 25 bp, Probe sequence
gcatggatttagaaacagatttagg

SEQ ID NO: 40006 - DNA, 25 bp, Probe sequence
attctggtaactattgcatggattt

SEQ ID NO: 40007 - DNA, 25 bp, Probe sequence
ctggtaactattgcatggatttaga

SEQ ID NO: 40008 - DNA, 25 bp, Probe sequence
tctggtaactattgcatggatttag

SEQ ID NO: 40009 - DNA, 25 bp, Probe sequence
ggcgtattataggtagaagagatgg

SEQ ID NO: 40010 - DNA, 25 bp, Probe sequence
gcgtattataggtagaagagatggt

SEQ ID NO: 40011 - DNA, 25 bp, Probe sequence
ttacagcaattacaggaagaagttc

SEQ ID NO: 40012 - DNA, 25 bp, Probe sequence
aatggatatattacctgatggctcg

SEQ ID NO: 40013 - DNA, 25 bp, Probe sequence
gatagagtgattaacgcattatcgc

SEQ ID NO: 40014 - DNA, 25 bp, Probe sequence
agtcttgaattagatgaacgaccat

SEQ ID NO: 40015 - DNA, 25 bp, Probe sequence
aagtcttgaattagatgaacgacca

SEQ ID NO: 40016 - DNA, 25 bp, Probe sequence
gtcttgaattagatgaacgaccatt

SEQ ID NO: 40017 - DNA, 25 bp, Probe sequence
accgaatattgaacaattaatggca

SEQ ID NO: 40018 - DNA, 25 bp, Probe sequence
ttagatgcgattattgttgctgaag

SEQ ID NO: 40019 - DNA, 25 bp, Probe sequence
cgaatcaaccattatcagtagcatt

SEQ ID NO: 40020 - DNA, 25 bp, Probe sequence
attagatgcgattattgttgctgaa

SEQ ID NO: 40021 - DNA, 25 bp, Probe sequence
aattagatgcgattattgttgctga

SEQ ID NO: 40022 - DNA, 25 bp, Probe sequence
tagatgcgattattgttgctgaagg

SEQ ID NO: 40023 - DNA, 25 bp, Probe sequence
gaatcaaccattatcagtagcattg

SEQ ID NO: 40024 - DNA, 25 bp, Probe sequence
ggtcctggttcatatactggcttac

SEQ ID NO: 40025 - DNA, 25 bp, Probe sequence
catcgaatcaaccattatcagtagc

SEQ ID NO: 40026 - DNA, 25 bp, Probe sequence
tcgaatcaaccattatcagtagcat

SEQ ID NO: 40027 - DNA, 25 bp, Probe sequence
ttggttgaagaagatgaaggtgtta

SEQ ID NO: 40028 - DNA, 25 bp, Probe sequence
aataaggctaagacgatgattggta

SEQ ID NO: 40029 - DNA, 25 bp, Probe sequence
taataaggctaagacgatgattggt

SEQ ID NO: 40030 - DNA, 25 bp, Probe sequence
tggttgaagaagatgaaggtgttaa

SEQ ID NO: 40031 - DNA, 25 bp, Probe sequence
attggttgaagaagatgaaggtgtt

SEQ ID NO: 40032 - DNA, 25 bp, Probe sequence
aattggttgaagaagatgaaggtgt

SEQ ID NO: 40033 - DNA, 25 bp, Probe sequence
tcagatgctattgtaacagttagga

SEQ ID NO: 40034 - DNA, 25 bp, Probe sequence
ttaataaggctaagacgatgattgg

SEQ ID NO: 40035 - DNA, 25 bp, Probe sequence
tcggagatgaacaatcaatagaaca

SEQ ID NO: 40036 - DNA, 25 bp, Probe sequence
tggattgttatcgcttagaagattc

SEQ ID NO: 40037 - DNA, 25 bp, Probe sequence
atggattgttatcgcttagaagatt

SEQ ID NO: 40038 - DNA, 25 bp, Probe sequence
tcgcttagaagattctgatgaagat

SEQ ID NO: 40039 - DNA, 25 bp, Probe sequence
atcgcttagaagattctgatgaaga

SEQ ID NO: 40040 - DNA, 25 bp, Probe sequence
cgcttagaagattctgatgaagatt

SEQ ID NO: 40041 - DNA, 25 bp, Probe sequence
tgttatcgcttagaagattctgatg

SEQ ID NO: 40042 - DNA, 25 bp, Probe sequence
ggattgttatcgcttagaagattct

SEQ ID NO: 40043 - DNA, 25 bp, Probe sequence
gttatcgcttagaagattctgatga

SEQ ID NO: 40044 - DNA, 25 bp, Probe sequence
tatggattgttatcgcttagaagat

SEQ ID NO: 40045 - DNA, 25 bp, Probe sequence
gttacgacaggcaatgattcaatta

SEQ ID NO: 40046 - DNA, 25 bp, Probe sequence
ttacgacaggcaatgattcaattaa

SEQ ID NO: 40047 - DNA, 25 bp, Probe sequence
aatatgttacgacaggcaatgattc

SEQ ID NO: 40048 - DNA, 25 bp, Probe sequence
atatgttacgacaggcaatgattca

SEQ ID NO: 40049 - DNA, 25 bp, Probe sequence
tatgttacgacaggcaatgattcaa

SEQ ID NO: 40050 - DNA, 25 bp, Probe sequence
atgttacgacaggcaatgattcaat

SEQ ID NO: 40051 - DNA, 25 bp, Probe sequence
tacgacaggcaatgattcaattaat

SEQ ID NO: 40052 - DNA, 25 bp, Probe sequence
tgttacgacaggcaatgattcaatt

SEQ ID NO: 40053 - DNA, 25 bp, Probe sequence
atgtagataatggtctcgatgcaat

SEQ ID NO: 40054 - DNA, 25 bp, Probe sequence
tacgagcagttattccttgtcatta

SEQ ID NO: 40055 - DNA, 25 bp, Probe sequence
acaagcgattatcacagcaattatt

SEQ ID NO: 40056 - DNA, 25 bp, Probe sequence
aacaagcgattatcacagcaattat

SEQ ID NO: 40057 - DNA, 25 bp, Probe sequence
gagcagttattccttgtcattagtt

SEQ ID NO: 40058 - DNA, 25 bp, Probe sequence
cgagcagttattccttgtcattagt

SEQ ID NO: 40059 - DNA, 25 bp, Probe sequence
acgagcagttattccttgtcattag

SEQ ID NO: 40060 - DNA, 25 bp, Probe sequence
atcttaatatgacaggtgtggctat

SEQ ID NO: 40061 - DNA, 25 bp, Probe sequence
tatatgattggtgccttaattgcga

SEQ ID NO: 40062 - DNA, 25 bp, Probe sequence
taatgtggcggtatctgtaggtatt

SEQ ID NO: 40063 - DNA, 25 bp, Probe sequence
cgatgctatcaacaagtcctatcat

SEQ ID NO: 40064 - DNA, 25 bp, Probe sequence
atggttacaatacatcttgctcgta

SEQ ID NO: 40065 - DNA, 25 bp, Probe sequence
tcaagcaatggttacaatacatctt

SEQ ID NO: 40066 - DNA, 25 bp, Probe sequence
ttcaagcaatggttacaatacatct

SEQ ID NO: 40067 - DNA, 25 bp, Probe sequence
gttcaagcaatggttacaatacatc

SEQ ID NO: 40068 - DNA, 25 bp, Probe sequence
tacaatacatcttgctcgtaacaac

SEQ ID NO: 40069 - DNA, 25 bp, Probe sequence
caatggttacaatacatcttgctcg

SEQ ID NO: 40070 - DNA, 25 bp, Probe sequence
atacatcttgctcgtaacaaccatt

SEQ ID NO: 40071 - DNA, 25 bp, Probe sequence
aatacatcttgctcgtaacaaccat

SEQ ID NO: 40072 - DNA, 25 bp, Probe sequence
atgaagtgatgagtattccaacatt

SEQ ID NO: 40073 - DNA, 25 bp, Probe sequence
tgaagtgatgagtattccaacatta

SEQ ID NO: 40074 - DNA, 25 bp, Probe sequence
tatgaagtgatgagtattccaacat

SEQ ID NO: 40075 - DNA, 25 bp, Probe sequence
atatgaagtgatgagtattccaaca

SEQ ID NO: 40076 - DNA, 25 bp, Probe sequence
tgagtattccaacattaatcgtctt

SEQ ID NO: 40077 - DNA, 25 bp, Probe sequence
tgatgagtattccaacattaatcgt

SEQ ID NO: 40078 - DNA, 25 bp, Probe sequence
gtgatgagtattccaacattaatcg

SEQ ID NO: 40079 - DNA, 25 bp, Probe sequence
atgagtattccaacattaatcgtct

SEQ ID NO: 40080 - DNA, 25 bp, Probe sequence
gaagtgatgagtattccaacattaa

SEQ ID NO: 40081 - DNA, 25 bp, Probe sequence
ctgacgaaacgagaaatgtaaagta

SEQ ID NO: 40082 - DNA, 25 bp, Probe sequence
tgacgaaacgagaaatgtaaagtat

SEQ ID NO: 40083 - DNA, 25 bp, Probe sequence
atctgacgaaacgagaaatgtaaag

SEQ ID NO: 40084 - DNA, 25 bp, Probe sequence
gaatctgacgaaacgagaaatgtaa

SEQ ID NO: 40085 - DNA, 25 bp, Probe sequence
tttgaatctgacgaaacgagaaatg

SEQ ID NO: 40086 - DNA, 25 bp, Probe sequence
tgaatctgacgaaacgagaaatgta

SEQ ID NO: 40087 - DNA, 25 bp, Probe sequence
tctgacgaaacgagaaatgtaaagt

SEQ ID NO: 40088 - DNA, 25 bp, Probe sequence
aatctgacgaaacgagaaatgtaaa

SEQ ID NO: 40089 - DNA, 25 bp, Probe sequence
ttgaatctgacgaaacgagaaatgt

SEQ ID NO: 40090 - DNA, 25 bp, Probe sequence
acattattattgcgttcattcggtt

SEQ ID NO: 40091 - DNA, 25 bp, Probe sequence
tgagagaagtagtaagacgacgata

SEQ ID NO: 40092 - DNA, 25 bp, Probe sequence
attattattgcgttcattcggttca

SEQ ID NO: 40093 - DNA, 25 bp, Probe sequence
cattattattgcgttcattcggttc

SEQ ID NO: 40094 - DNA, 25 bp, Probe sequence
atgagagaagtagtaagacgacgat

SEQ ID NO: 40095 - DNA, 25 bp, Probe sequence
tcaatgagagaagtagtaagacgac

SEQ ID NO: 40096 - DNA, 25 bp, Probe sequence
aatgagagaagtagtaagacgacga

SEQ ID NO: 40097 - DNA, 25 bp, Probe sequence
caatgagagaagtagtaagacgacg

SEQ ID NO: 40098 - DNA, 25 bp, Probe sequence
gatacaacgatgattccattacagc

SEQ ID NO: 40099 - DNA, 25 bp, Probe sequence
cattatggagaagatgctgttgtaa

SEQ ID NO: 40100 - DNA, 25 bp, Probe sequence
aacaatatgagcattatggagaaga

SEQ ID NO: 40101 - DNA, 25 bp, Probe sequence
acaatatgagcattatggagaagat

SEQ ID NO: 40102 - DNA, 25 bp, Probe sequence
caatatgagcattatggagaagatg

SEQ ID NO: 40103 - DNA, 25 bp, Probe sequence
attatggagaagatgctgttgtaaa

SEQ ID NO: 40104 - DNA, 25 bp, Probe sequence
tgctggtaaaggttatcaacataaa

SEQ ID NO: 40105 - DNA, 25 bp, Probe sequence
ttgctggtaaaggttatcaacataa

SEQ ID NO: 40106 - DNA, 25 bp, Probe sequence
attgctggtaaaggttatcaacata

SEQ ID NO: 40107 - DNA, 25 bp, Probe sequence
tattgctggtaaaggttatcaacat

SEQ ID NO: 40108 - DNA, 25 bp, Probe sequence
tggcttatggtcattcttagttact

SEQ ID NO: 40109 - DNA, 25 bp, Probe sequence
ggcttatggtcattcttagttactt

SEQ ID NO: 40110 - DNA, 25 bp, Probe sequence
atggcttatggtcattcttagttac

SEQ ID NO: 40111 - DNA, 25 bp, Probe sequence
gtattattgctgttgtgttccactt

SEQ ID NO: 40112 - DNA, 25 bp, Probe sequence
ttgtattattgctgttgtgttccac

SEQ ID NO: 40113 - DNA, 25 bp, Probe sequence
gcttatggtcattcttagttacttg

SEQ ID NO: 40114 - DNA, 25 bp, Probe sequence
tgtattattgctgttgtgttccact

SEQ ID NO: 40115 - DNA, 25 bp, Probe sequence
tttgtattattgctgttgtgttcca

SEQ ID NO: 40116 - DNA, 25 bp, Probe sequence
gttgttatatcacggtttgtttggt

SEQ ID NO: 40117 - DNA, 25 bp, Probe sequence
tatggatgaactggcgattgaatta

SEQ ID NO: 40118 - DNA, 25 bp, Probe sequence
atatggatgaactggcgattgaatt

SEQ ID NO: 40119 - DNA, 25 bp, Probe sequence
agcaaggattacttactgaggaatt

SEQ ID NO: 40120 - DNA, 25 bp, Probe sequence
gatatggatgaactggcgattgaat

SEQ ID NO: 40121 - DNA, 25 bp, Probe sequence
tggatattgtcagtgttggtgatat

SEQ ID NO: 40122 - DNA, 25 bp, Probe sequence
atggatattgtcagtgttggtgata

SEQ ID NO: 40123 - DNA, 25 bp, Probe sequence
aatggatattgtcagtgttggtgat

SEQ ID NO: 40124 - DNA, 25 bp, Probe sequence
gatgaactggcgattgaattacaag

SEQ ID NO: 40125 - DNA, 25 bp, Probe sequence
caatatgtgtctggtctaagttcgc

SEQ ID NO: 40126 - DNA, 25 bp, Probe sequence
ggcaacaactggacaacaattatta

SEQ ID NO: 40127 - DNA, 25 bp, Probe sequence
gagcgtaatgatgaagagtggttaa

SEQ ID NO: 40128 - DNA, 25 bp, Probe sequence
tggattagttacgaagtatgaagga

SEQ ID NO: 40129 - DNA, 25 bp, Probe sequence
agagcgtaatgatgaagagtggtta

SEQ ID NO: 40130 - DNA, 25 bp, Probe sequence
gcaacaactggacaacaattattat

SEQ ID NO: 40131 - DNA, 25 bp, Probe sequence
ttaggtgccaattcattgttatcag

SEQ ID NO: 40132 - DNA, 25 bp, Probe sequence
cttaggtgccaattcattgttatca

SEQ ID NO: 40133 - DNA, 25 bp, Probe sequence
attagttacgaagtatgaaggatgg

SEQ ID NO: 40134 - DNA, 25 bp, Probe sequence
atggattagttacgaagtatgaagg

SEQ ID NO: 40135 - DNA, 25 bp, Probe sequence
gaagaagaagtgttagaagcaatgg

SEQ ID NO: 40136 - DNA, 25 bp, Probe sequence
tcagaagaagaagtgttagaagcaa

SEQ ID NO: 40137 - DNA, 25 bp, Probe sequence
agaagaagtgttagaagcaatggaa

SEQ ID NO: 40138 - DNA, 25 bp, Probe sequence
aagaagaagtgttagaagcaatgga

SEQ ID NO: 40139 - DNA, 25 bp, Probe sequence
tggttcaactgttacgctattagat

SEQ ID NO: 40140 - DNA, 25 bp, Probe sequence
atggttcaactgttacgctattaga

SEQ ID NO: 40141 - DNA, 25 bp, Probe sequence
gatggttcaactgttacgctattag

SEQ ID NO: 40142 - DNA, 25 bp, Probe sequence
agatggttcaactgttacgctatta

SEQ ID NO: 40143 - DNA, 25 bp, Probe sequence
agaagaagaagtgttagaagcaatg

SEQ ID NO: 40144 - DNA, 25 bp, Probe sequence
atgttctatggttatcaatggtcgt

SEQ ID NO: 40145 - DNA, 25 bp, Probe sequence
tgttctatggttatcaatggtcgtg

SEQ ID NO: 40146 - DNA, 25 bp, Probe sequence
cgacaagatacaagtgattctaagc

SEQ ID NO: 40147 - DNA, 25 bp, Probe sequence
acaagatacaagtgattctaagcct

SEQ ID NO: 40148 - DNA, 25 bp, Probe sequence
gacaagatacaagtgattctaagcc

SEQ ID NO: 40149 - DNA, 25 bp, Probe sequence
aactgcttagaagaagtatgtggag

SEQ ID NO: 40150 - DNA, 25 bp, Probe sequence
gaactgcttagaagaagtatgtgga

SEQ ID NO: 40151 - DNA, 25 bp, Probe sequence
tgaactgcttagaagaagtatgtgg

SEQ ID NO: 40152 - DNA, 25 bp, Probe sequence
gtattccattaacaacatccattgc

SEQ ID NO: 40153 - DNA, 25 bp, Probe sequence
atgatattgaagatgccaagattgc

SEQ ID NO: 40154 - DNA, 25 bp, Probe sequence
ggtgtgacaatcagtatgactaagt

SEQ ID NO: 40155 - DNA, 25 bp, Probe sequence
tggtgtgacaatcagtatgactaag

SEQ ID NO: 40156 - DNA, 25 bp, Probe sequence
tgatgatattgaagatgccaagatt

SEQ ID NO: 40157 - DNA, 25 bp, Probe sequence
aagaatctggtgtgacaatcagtat

SEQ ID NO: 40158 - DNA, 25 bp, Probe sequence
ctggtgtgacaatcagtatgactaa

SEQ ID NO: 40159 - DNA, 25 bp, Probe sequence
gatgatattgaagatgccaagattg

SEQ ID NO: 40160 - DNA, 25 bp, Probe sequence
atgatgatattgaagatgccaagat

SEQ ID NO: 40161 - DNA, 25 bp, Probe sequence
gaatctggtgtgacaatcagtatga

SEQ ID NO: 40162 - DNA, 25 bp, Probe sequence
caataggtgtaatagactctggtgt

SEQ ID NO: 40163 - DNA, 25 bp, Probe sequence
gttggcgtaatagtgagtctgatac

SEQ ID NO: 40164 - DNA, 25 bp, Probe sequence
cgtaatagtgagtctgatactgtca

SEQ ID NO: 40165 - DNA, 25 bp, Probe sequence
gcgtaatagtgagtctgatactgtc

SEQ ID NO: 40166 - DNA, 25 bp, Probe sequence
ttggcgtaatagtgagtctgatact

SEQ ID NO: 40167 - DNA, 25 bp, Probe sequence
tagtgatccaacaattacaagcatt

SEQ ID NO: 40168 - DNA, 25 bp, Probe sequence
atagtgatccaacaattacaagcat

SEQ ID NO: 40169 - DNA, 25 bp, Probe sequence
gtaattgaaccaggtgctagaacag

SEQ ID NO: 40170 - DNA, 25 bp, Probe sequence
aataggtgtaatagactctggtgtc

SEQ ID NO: 40171 - DNA, 25 bp, Probe sequence
taacacctatgagacaagatggaac

SEQ ID NO: 40172 - DNA, 25 bp, Probe sequence
ttaacacctatgagacaagatggaa

SEQ ID NO: 40173 - DNA, 25 bp, Probe sequence
aacacctatgagacaagatggaact

SEQ ID NO: 40174 - DNA, 25 bp, Probe sequence
gagacaagatggaactcgtgatatt

SEQ ID NO: 40175 - DNA, 25 bp, Probe sequence
ttatactgtgcctgaattagaagag

SEQ ID NO: 40176 - DNA, 25 bp, Probe sequence
tgagacaagatggaactcgtgatat

SEQ ID NO: 40177 - DNA, 25 bp, Probe sequence
atgagacaagatggaactcgtgata

SEQ ID NO: 40178 - DNA, 25 bp, Probe sequence
tatgagacaagatggaactcgtgat

SEQ ID NO: 40179 - DNA, 25 bp, Probe sequence
tatactgtgcctgaattagaagagg

SEQ ID NO: 40180 - DNA, 25 bp, Probe sequence
atttagatttagtttcaggtgtgcc

SEQ ID NO: 40181 - DNA, 25 bp, Probe sequence
gatttagatttagtttcaggtgtgc

SEQ ID NO: 40182 - DNA, 25 bp, Probe sequence
cgatttagatttagtttcaggtgtg

SEQ ID NO: 40183 - DNA, 25 bp, Probe sequence
caggtgtgcctttaataagaaacag

SEQ ID NO: 40184 - DNA, 25 bp, Probe sequence
ttcaggtgtgcctttaataagaaac

SEQ ID NO: 40185 - DNA, 25 bp, Probe sequence
gtttcaggtgtgcctttaataagaa

SEQ ID NO: 40186 - DNA, 25 bp, Probe sequence
agtttcaggtgtgcctttaataaga

SEQ ID NO: 40187 - DNA, 25 bp, Probe sequence
gatttagtttcaggtgtgcctttaa

SEQ ID NO: 40188 - DNA, 25 bp, Probe sequence
agatttagtttcaggtgtgccttta

SEQ ID NO: 40189 - DNA, 25 bp, Probe sequence
cttggtaatacaactgatcgtcgtg

SEQ ID NO: 40190 - DNA, 25 bp, Probe sequence
atagctgatgacagtggactagaag

SEQ ID NO: 40191 - DNA, 25 bp, Probe sequence
catagctgatgacagtggactagaa

SEQ ID NO: 40192 - DNA, 25 bp, Probe sequence
gtggaagaaacaggatcaacatttg

SEQ ID NO: 40193 - DNA, 25 bp, Probe sequence
gcttggtaatacaactgatcgtcgt

SEQ ID NO: 40194 - DNA, 25 bp, Probe sequence
tgtggaagaaacaggatcaacattt

SEQ ID NO: 40195 - DNA, 25 bp, Probe sequence
tagctgatgacagtggactagaagt

SEQ ID NO: 40196 - DNA, 25 bp, Probe sequence
ttggtaatacaactgatcgtcgtgc

SEQ ID NO: 40197 - DNA, 25 bp, Probe sequence
agcttggtaatacaactgatcgtcg

SEQ ID NO: 40198 - DNA, 25 bp, Probe sequence
atggattcttatggacactcacaat

SEQ ID NO: 40199 - DNA, 25 bp, Probe sequence
tcagttagaggtagagtgttaggaa

SEQ ID NO: 40200 - DNA, 25 bp, Probe sequence
ttcagttagaggtagagtgttagga

SEQ ID NO: 40201 - DNA, 25 bp, Probe sequence
agaggtagagtgttaggaatcagtt

SEQ ID NO: 40202 - DNA, 25 bp, Probe sequence
tagaggtagagtgttaggaatcagt

SEQ ID NO: 40203 - DNA, 25 bp, Probe sequence
tggattcttatggacactcacaatt

SEQ ID NO: 40204 - DNA, 25 bp, Probe sequence
gaggtagagtgttaggaatcagttc

SEQ ID NO: 40205 - DNA, 25 bp, Probe sequence
gttagaggtagagtgttaggaatca

SEQ ID NO: 40206 - DNA, 25 bp, Probe sequence
cagttagaggtagagtgttaggaat

SEQ ID NO: 40207 - DNA, 25 bp, Probe sequence
aagattcataacgaatggcaagaag

SEQ ID NO: 40208 - DNA, 25 bp, Probe sequence
gacataagattcataacgaatggca

SEQ ID NO: 40209 - DNA, 25 bp, Probe sequence
gattcataacgaatggcaagaagtc

SEQ ID NO: 40210 - DNA, 25 bp, Probe sequence
agacataagattcataacgaatggc

SEQ ID NO: 40211 - DNA, 25 bp, Probe sequence
agattcataacgaatggcaagaagt

SEQ ID NO: 40212 - DNA, 25 bp, Probe sequence
acataagattcataacgaatggcaa

SEQ ID NO: 40213 - DNA, 25 bp, Probe sequence
gcatttactcttctgtgttattggg

SEQ ID NO: 40214 - DNA, 25 bp, Probe sequence
taagattcataacgaatggcaagaa

SEQ ID NO: 40215 - DNA, 25 bp, Probe sequence
agcatttactcttctgtgttattgg

SEQ ID NO: 40216 - DNA, 25 bp, Probe sequence
actctacaactagcaacagaatcaa

SEQ ID NO: 40217 - DNA, 25 bp, Probe sequence
aactctacaactagcaacagaatca

SEQ ID NO: 40218 - DNA, 25 bp, Probe sequence
tgaactctacaactagcaacagaat

SEQ ID NO: 40219 - DNA, 25 bp, Probe sequence
gaactctacaactagcaacagaatc

SEQ ID NO: 40220 - DNA, 25 bp, Probe sequence
ttgaactctacaactagcaacagaa

SEQ ID NO: 40221 - DNA, 25 bp, Probe sequence
attgaactctacaactagcaacaga

SEQ ID NO: 40222 - DNA, 25 bp, Probe sequence
cattgaactctacaactagcaacag

SEQ ID NO: 40223 - DNA, 25 bp, Probe sequence
tcattgaactctacaactagcaaca

SEQ ID NO: 40224 - DNA, 25 bp, Probe sequence
ttcattgaactctacaactagcaac

SEQ ID NO: 40225 - DNA, 25 bp, Probe sequence
cgatggttggtatcaagaaggagaa

SEQ ID NO: 40226 - DNA, 25 bp, Probe sequence
tattatatgaagaacttgcccacca

SEQ ID NO: 40227 - DNA, 25 bp, Probe sequence
gtattatatgaagaacttgcccacc

SEQ ID NO: 40228 - DNA, 25 bp, Probe sequence
tgaaatgtgaagttgaagtgaaaga

SEQ ID NO: 40229 - DNA, 25 bp, Probe sequence
ttattagaccttccctatccgaaag

SEQ ID NO: 40230 - DNA, 25 bp, Probe sequence
tgcttatgaaatgtgaagttgaagt

SEQ ID NO: 40231 - DNA, 25 bp, Probe sequence
attatatgaagaacttgcccaccac

SEQ ID NO: 40232 - DNA, 25 bp, Probe sequence
gcttatgaaatgtgaagttgaagtg

SEQ ID NO: 40233 - DNA, 25 bp, Probe sequence
acgaagaattgcttatgaaatgtga

SEQ ID NO: 40234 - DNA, 25 bp, Probe sequence
atgttattaggtgatgagagtgctt

SEQ ID NO: 40235 - DNA, 25 bp, Probe sequence
gatgttattaggtgatgagagtgct

SEQ ID NO: 40236 - DNA, 25 bp, Probe sequence
tgatgttattaggtgatgagagtgc

SEQ ID NO: 40237 - DNA, 25 bp, Probe sequence
tgttattaggtgatgagagtgctta

SEQ ID NO: 40238 - DNA, 25 bp, Probe sequence
ttgatgttattaggtgatgagagtg

SEQ ID NO: 40239 - DNA, 25 bp, Probe sequence
gttattaggtgatgagagtgcttat

SEQ ID NO: 40240 - DNA, 25 bp, Probe sequence
aatcgcatacatgatggaatggtaa

SEQ ID NO: 40241 - DNA, 25 bp, Probe sequence
aatcattggtgtgttacaagattgg

SEQ ID NO: 40242 - DNA, 25 bp, Probe sequence
gcaatcattggtgtgttacaagatt

SEQ ID NO: 40243 - DNA, 25 bp, Probe sequence
tatagtcctacagttattgttgcgg

SEQ ID NO: 40244 - DNA, 25 bp, Probe sequence
ggagtcagacctgtagtcataattc

SEQ ID NO: 40245 - DNA, 25 bp, Probe sequence
gagtcagacctgtagtcataattca

SEQ ID NO: 40246 - DNA, 25 bp, Probe sequence
agtcagacctgtagtcataattcaa

SEQ ID NO: 40247 - DNA, 25 bp, Probe sequence
atatagtcctacagttattgttgcg

SEQ ID NO: 40248 - DNA, 25 bp, Probe sequence
acgaggagatgtttatttagcagat

SEQ ID NO: 40249 - DNA, 25 bp, Probe sequence
gacgaggagatgtttatttagcaga

SEQ ID NO: 40250 - DNA, 25 bp, Probe sequence
agacgaggagatgtttatttagcag

SEQ ID NO: 40251 - DNA, 25 bp, Probe sequence
tagacgaggagatgtttatttagca

SEQ ID NO: 40252 - DNA, 25 bp, Probe sequence
gctgctattagtttaacggtatcaa

SEQ ID NO: 40253 - DNA, 25 bp, Probe sequence
ctgctattagtttaacggtatcaac

SEQ ID NO: 40254 - DNA, 25 bp, Probe sequence
agctgctattagtttaacggtatca

SEQ ID NO: 40255 - DNA, 25 bp, Probe sequence
tagctgctattagtttaacggtatc

SEQ ID NO: 40256 - DNA, 25 bp, Probe sequence
catagctgctattagtttaacggta

SEQ ID NO: 40257 - DNA, 25 bp, Probe sequence
ttgggaaatcaattttaagcatagc

SEQ ID NO: 40258 - DNA, 25 bp, Probe sequence
atagctgctattagtttaacggtat

SEQ ID NO: 40259 - DNA, 25 bp, Probe sequence
cggtgaatctcatgcacaaactaaa

SEQ ID NO: 40260 - DNA, 25 bp, Probe sequence
gcatagctgctattagtttaacggt

SEQ ID NO: 40261 - DNA, 25 bp, Probe sequence
aaagaaggatattcacaaatggctg

SEQ ID NO: 40262 - DNA, 25 bp, Probe sequence
agaaggatattcacaaatggctgat

SEQ ID NO: 40263 - DNA, 25 bp, Probe sequence
gaaggatattcacaaatggctgatt

SEQ ID NO: 40264 - DNA, 25 bp, Probe sequence
aagaaggatattcacaaatggctga

SEQ ID NO: 40265 - DNA, 25 bp, Probe sequence
aaggatattcacaaatggctgattt

SEQ ID NO: 40266 - DNA, 25 bp, Probe sequence
agaagtcatagcttagaacaatctt

SEQ ID NO: 40267 - DNA, 25 bp, Probe sequence
aggatattcacaaatggctgattta

SEQ ID NO: 40268 - DNA, 25 bp, Probe sequence
ttaaatctctccctagcgaacgaag

SEQ ID NO: 40269 - DNA, 25 bp, Probe sequence
ggatattcacaaatggctgatttaa

SEQ ID NO: 40270 - DNA, 25 bp, Probe sequence
tatagtggcaaccgtgttaatcata

SEQ ID NO: 40271 - DNA, 25 bp, Probe sequence
atatagtggcaaccgtgttaatcat

SEQ ID NO: 40272 - DNA, 25 bp, Probe sequence
gatatagtggcaaccgtgttaatca

SEQ ID NO: 40273 - DNA, 25 bp, Probe sequence
atagtggcaaccgtgttaatcatac

SEQ ID NO: 40274 - DNA, 25 bp, Probe sequence
aattgtaacggatatagtggcaacc

SEQ ID NO: 40275 - DNA, 25 bp, Probe sequence
ggatatagtggcaaccgtgttaatc

SEQ ID NO: 40276 - DNA, 25 bp, Probe sequence
aaattgtaacggatatagtggcaac

SEQ ID NO: 40277 - DNA, 25 bp, Probe sequence
tcatacgtgctttattaaacagtcg

SEQ ID NO: 40278 - DNA, 25 bp, Probe sequence
attaaacagtcgtaaagatgctaaa

SEQ ID NO: 40279 - DNA, 25 bp, Probe sequence
atatacattgtcagaactcagcagg

SEQ ID NO: 40280 - DNA, 25 bp, Probe sequence
gatgaagcgatagaacttagaatgc

SEQ ID NO: 40281 - DNA, 25 bp, Probe sequence
cgttagatgaagcgatagaacttag

SEQ ID NO: 40282 - DNA, 25 bp, Probe sequence
agatgaagcgatagaacttagaatg

SEQ ID NO: 40283 - DNA, 25 bp, Probe sequence
ccaggagatatgacaactgaacaat

SEQ ID NO: 40284 - DNA, 25 bp, Probe sequence
gttagatgaagcgatagaacttaga

SEQ ID NO: 40285 - DNA, 25 bp, Probe sequence
gaaccaggagatatgacaactgaac

SEQ ID NO: 40286 - DNA, 25 bp, Probe sequence
tatatacattgtcagaactcagcag

SEQ ID NO: 40287 - DNA, 25 bp, Probe sequence
caggagatatgacaactgaacaata

SEQ ID NO: 40288 - DNA, 25 bp, Probe sequence
atgttatggagtatcgttggtgtag

SEQ ID NO: 40289 - DNA, 25 bp, Probe sequence
ctatgttatggagtatcgttggtgt

SEQ ID NO: 40290 - DNA, 25 bp, Probe sequence
gttatggagtatcgttggtgtagtt

SEQ ID NO: 40291 - DNA, 25 bp, Probe sequence
ctattgtcatcctggtgttatctgg

SEQ ID NO: 40292 - DNA, 25 bp, Probe sequence
tatgttatggagtatcgttggtgta

SEQ ID NO: 40293 - DNA, 25 bp, Probe sequence
tattgtcatcctggtgttatctggt

SEQ ID NO: 40294 - DNA, 25 bp, Probe sequence
gctattgtcatcctggtgttatctg

SEQ ID NO: 40295 - DNA, 25 bp, Probe sequence
tgttatggagtatcgttggtgtagt

SEQ ID NO: 40296 - DNA, 25 bp, Probe sequence
actatgttatggagtatcgttggtg

SEQ ID NO: 40297 - DNA, 25 bp, Probe sequence
gcgatctatcaagcagtaaatgaaa

SEQ ID NO: 40298 - DNA, 25 bp, Probe sequence
tttgcgatctatcaagcagtaaatg

SEQ ID NO: 40299 - DNA, 25 bp, Probe sequence
tgcgatctatcaagcagtaaatgaa

SEQ ID NO: 40300 - DNA, 25 bp, Probe sequence
ttgcgatctatcaagcagtaaatga

SEQ ID NO: 40301 - DNA, 25 bp, Probe sequence
actttgtatattgagctatttggtt

SEQ ID NO: 40302 - DNA, 25 bp, Probe sequence
ctttataggatatatttcactggca

SEQ ID NO: 40303 - DNA, 25 bp, Probe sequence
gatatatttcactggcaatatctgc

SEQ ID NO: 40304 - DNA, 25 bp, Probe sequence
ttgacgtgtctaatttgaatttagt

SEQ ID NO: 40305 - DNA, 25 bp, Probe sequence
caatatctgccgtaattatttatgg

SEQ ID NO: 40306 - DNA, 25 bp, Probe sequence
aaagaagcgttcagtaaagcattag

SEQ ID NO: 40307 - DNA, 25 bp, Probe sequence
aagaagcgttcagtaaagcattagg

SEQ ID NO: 40308 - DNA, 25 bp, Probe sequence
attcaacaatttcacacatgagcaa

SEQ ID NO: 40309 - DNA, 25 bp, Probe sequence
catggaattggtgtagatttaatcg

SEQ ID NO: 40310 - DNA, 25 bp, Probe sequence
aattcaacaatttcacacatgagca

SEQ ID NO: 40311 - DNA, 25 bp, Probe sequence
ttcaacaatttcacacatgagcaac

SEQ ID NO: 40312 - DNA, 25 bp, Probe sequence
atgatacatggaattggtgtagatt

SEQ ID NO: 40313 - DNA, 25 bp, Probe sequence
cattatgcgatgagccaagttgttt

SEQ ID NO: 40314 - DNA, 25 bp, Probe sequence
tggaattggtgtagatttaatcgaa

SEQ ID NO: 40315 - DNA, 25 bp, Probe sequence
ttaccacttcagatgttaatgctca

SEQ ID NO: 40316 - DNA, 25 bp, Probe sequence
taccacttcagatgttaatgctcag

SEQ ID NO: 40317 - DNA, 25 bp, Probe sequence
tgttcacttatgttcaagattctgc

SEQ ID NO: 40318 - DNA, 25 bp, Probe sequence
gttcacttatgttcaagattctgcc

SEQ ID NO: 40319 - DNA, 25 bp, Probe sequence
ttcacttatgttcaagattctgcca

SEQ ID NO: 40320 - DNA, 25 bp, Probe sequence
cacttcagatgttaatgctcaggaa

SEQ ID NO: 40321 - DNA, 25 bp, Probe sequence
attaccacttcagatgttaatgctc

SEQ ID NO: 40322 - DNA, 25 bp, Probe sequence
tggtgcttatggtgttgtactatta

SEQ ID NO: 40323 - DNA, 25 bp, Probe sequence
acttatgttcaagattctgccactg

SEQ ID NO: 40324 - DNA, 25 bp, Probe sequence
gttggtcctataatgagacgctatc

SEQ ID NO: 40325 - DNA, 25 bp, Probe sequence
tgttggtcctataatgagacgctat

SEQ ID NO: 40326 - DNA, 25 bp, Probe sequence
atgttggtcctataatgagacgcta

SEQ ID NO: 40327 - DNA, 25 bp, Probe sequence
ttggtcctataatgagacgctatcg

SEQ ID NO: 40328 - DNA, 25 bp, Probe sequence
gatgttggtcctataatgagacgct

SEQ ID NO: 40329 - DNA, 25 bp, Probe sequence
tcgatgttggtcctataatgagacg

SEQ ID NO: 40330 - DNA, 25 bp, Probe sequence
cgatgttggtcctataatgagacgc

SEQ ID NO: 40331 - DNA, 25 bp, Probe sequence
tggtcctataatgagacgctatcga

SEQ ID NO: 40332 - DNA, 25 bp, Probe sequence
attaatagatagaagtgaagcacgt

SEQ ID NO: 40333 - DNA, 25 bp, Probe sequence
aacacctaacgatcttgaacagtat

SEQ ID NO: 40334 - DNA, 25 bp, Probe sequence
ataacacctaacgatcttgaacagt

SEQ ID NO: 40335 - DNA, 25 bp, Probe sequence
tggatgacttaattcaggcattaga

SEQ ID NO: 40336 - DNA, 25 bp, Probe sequence
taacacctaacgatcttgaacagta

SEQ ID NO: 40337 - DNA, 25 bp, Probe sequence
acacctaacgatcttgaacagtata

SEQ ID NO: 40338 - DNA, 25 bp, Probe sequence
acataatctggataacggtacaacg

SEQ ID NO: 40339 - DNA, 25 bp, Probe sequence
atggatgacttaattcaggcattag

SEQ ID NO: 40340 - DNA, 25 bp, Probe sequence
cctaacgatcttgaacagtatatgg

SEQ ID NO: 40341 - DNA, 25 bp, Probe sequence
aacataatctggataacggtacaac

SEQ ID NO: 40342 - DNA, 25 bp, Probe sequence
gtactgataatatggttagcaatgc

SEQ ID NO: 40343 - DNA, 25 bp, Probe sequence
gtcaagaagaagctagattacaaca

SEQ ID NO: 40344 - DNA, 25 bp, Probe sequence
agtcaagaagaagctagattacaac

SEQ ID NO: 40345 - DNA, 25 bp, Probe sequence
gaagcagcccaacaaagtataaata

SEQ ID NO: 40346 - DNA, 25 bp, Probe sequence
gcagcccaacaaagtataaataaac

SEQ ID NO: 40347 - DNA, 25 bp, Probe sequence
agcagcccaacaaagtataaataaa

SEQ ID NO: 40348 - DNA, 25 bp, Probe sequence
aagcagcccaacaaagtataaataa

SEQ ID NO: 40349 - DNA, 25 bp, Probe sequence
tcaagaagaagctagattacaacaa

SEQ ID NO: 40350 - DNA, 25 bp, Probe sequence
aagtcaagaagaagctagattacaa

SEQ ID NO: 40351 - DNA, 25 bp, Probe sequence
aacaatgattaaaccgacagggatt

SEQ ID NO: 40352 - DNA, 25 bp, Probe sequence
aaacaatgattaaaccgacagggat

SEQ ID NO: 40353 - DNA, 25 bp, Probe sequence
gacacaggtaaatcagtagaagaaa

SEQ ID NO: 40354 - DNA, 25 bp, Probe sequence
ccaatgacacaggtaaatcagtaga

SEQ ID NO: 40355 - DNA, 25 bp, Probe sequence
tgacacaggtaaatcagtagaagaa

SEQ ID NO: 40356 - DNA, 25 bp, Probe sequence
atgacacaggtaaatcagtagaaga

SEQ ID NO: 40357 - DNA, 25 bp, Probe sequence
caatgacacaggtaaatcagtagaa

SEQ ID NO: 40358 - DNA, 25 bp, Probe sequence
aatgacacaggtaaatcagtagaag

SEQ ID NO: 40359 - DNA, 25 bp, Probe sequence
acacaggtaaatcagtagaagaaat

SEQ ID NO: 40360 - DNA, 25 bp, Probe sequence
acacaatagcacagttcaattcatt

SEQ ID NO: 40361 - DNA, 25 bp, Probe sequence
ccgtagattagaaccaatggataga

SEQ ID NO: 40362 - DNA, 25 bp, Probe sequence
aacacaatagcacagttcaattcat

SEQ ID NO: 40363 - DNA, 25 bp, Probe sequence
tataggcacaccaggtatagcaata

SEQ ID NO: 40364 - DNA, 25 bp, Probe sequence
agatcataagaagagaagaacgagc

SEQ ID NO: 40365 - DNA, 25 bp, Probe sequence
ttagtataggcacaccaggtatagc

SEQ ID NO: 40366 - DNA, 25 bp, Probe sequence
taggcacaccaggtatagcaataat

SEQ ID NO: 40367 - DNA, 25 bp, Probe sequence
ataggcacaccaggtatagcaataa

SEQ ID NO: 40368 - DNA, 25 bp, Probe sequence
gtataggcacaccaggtatagcaat

SEQ ID NO: 40369 - DNA, 25 bp, Probe sequence
aagaatacctacgccacatatacac

SEQ ID NO: 40370 - DNA, 25 bp, Probe sequence
gaatacctacgccacatatacacat

SEQ ID NO: 40371 - DNA, 25 bp, Probe sequence
aatacctacgccacatatacacata

SEQ ID NO: 40372 - DNA, 25 bp, Probe sequence
agaatacctacgccacatatacaca

SEQ ID NO: 40373 - DNA, 25 bp, Probe sequence
atacctacgccacatatacacatat

SEQ ID NO: 40374 - DNA, 25 bp, Probe sequence
tacctacgccacatatacacatata

SEQ ID NO: 40375 - DNA, 25 bp, Probe sequence
tataataatggtggtattgcgatcc

SEQ ID NO: 40376 - DNA, 25 bp, Probe sequence
acctacgccacatatacacatatat

SEQ ID NO: 40377 - DNA, 25 bp, Probe sequence
ataatgaaagaatacctacgccaca

SEQ ID NO: 40378 - DNA, 25 bp, Probe sequence
acggattgacgattaatgaattaga

SEQ ID NO: 40379 - DNA, 25 bp, Probe sequence
tgctgatacactacctaataatgaa

SEQ ID NO: 40380 - DNA, 25 bp, Probe sequence
atccgataaatgaaagagcacaaac

SEQ ID NO: 40381 - DNA, 25 bp, Probe sequence
actactccctttaagaaccatttga

SEQ ID NO: 40382 - DNA, 25 bp, Probe sequence
atgctgatacactacctaataatga

SEQ ID NO: 40383 - DNA, 25 bp, Probe sequence
catccgataaatgaaagagcacaaa

SEQ ID NO: 40384 - DNA, 25 bp, Probe sequence
ccgataaatgaaagagcacaaactg

SEQ ID NO: 40385 - DNA, 25 bp, Probe sequence
tccgataaatgaaagagcacaaact

SEQ ID NO: 40386 - DNA, 25 bp, Probe sequence
ataagaggtttagcacaagtttctg

SEQ ID NO: 40387 - DNA, 25 bp, Probe sequence
aacgcatagcagaagaattaagaac

SEQ ID NO: 40388 - DNA, 25 bp, Probe sequence
acgcatagcagaagaattaagaact

SEQ ID NO: 40389 - DNA, 25 bp, Probe sequence
cgcatagcagaagaattaagaactt

SEQ ID NO: 40390 - DNA, 25 bp, Probe sequence
aaacgcatagcagaagaattaagaa

SEQ ID NO: 40391 - DNA, 25 bp, Probe sequence
atgataaacgcatagcagaagaatt

SEQ ID NO: 40392 - DNA, 25 bp, Probe sequence
tgataaacgcatagcagaagaatta

SEQ ID NO: 40393 - DNA, 25 bp, Probe sequence
taaacgcatagcagaagaattaaga

SEQ ID NO: 40394 - DNA, 25 bp, Probe sequence
tttatcatcaactgggatagcaact

SEQ ID NO: 40395 - DNA, 25 bp, Probe sequence
attaacaggaacattagcattactt

SEQ ID NO: 40396 - DNA, 25 bp, Probe sequence
gacacttggcaacatacattactta

SEQ ID NO: 40397 - DNA, 25 bp, Probe sequence
tgacacttggcaacatacattactt

SEQ ID NO: 40398 - DNA, 25 bp, Probe sequence
acacttggcaacatacattacttaa

SEQ ID NO: 40399 - DNA, 25 bp, Probe sequence
gatgatgacaatgattcaggtagtg

SEQ ID NO: 40400 - DNA, 25 bp, Probe sequence
agatgatgacaatgattcaggtagt

SEQ ID NO: 40401 - DNA, 25 bp, Probe sequence
ttgacacttggcaacatacattact

SEQ ID NO: 40402 - DNA, 25 bp, Probe sequence
atgatgacaatgattcaggtagtgt

SEQ ID NO: 40403 - DNA, 25 bp, Probe sequence
cgaagatgatgacaatgattcaggt

SEQ ID NO: 40404 - DNA, 25 bp, Probe sequence
aagatgatgacaatgattcaggtag

SEQ ID NO: 40405 - DNA, 25 bp, Probe sequence
tatctgtaactgtattaattgcggc

SEQ ID NO: 40406 - DNA, 25 bp, Probe sequence
atctgtaactgtattaattgcggca

SEQ ID NO: 40407 - DNA, 25 bp, Probe sequence
tctgtaactgtattaattgcggcaa

SEQ ID NO: 40408 - DNA, 25 bp, Probe sequence
ttggtccaatatctgtaactgtatt

SEQ ID NO: 40409 - DNA, 25 bp, Probe sequence
tggtccaatatctgtaactgtatta

SEQ ID NO: 40410 - DNA, 25 bp, Probe sequence
gtgattgatccagaaatagcaagat

SEQ ID NO: 40411 - DNA, 25 bp, Probe sequence
caacaccgatgacaattattggtcc

SEQ ID NO: 40412 - DNA, 25 bp, Probe sequence
atatctgtaactgtattaattgcgg

SEQ ID NO: 40413 - DNA, 25 bp, Probe sequence
gcaccaacaccgatgacaattattg

SEQ ID NO: 40414 - DNA, 25 bp, Probe sequence
ttagtgtatgaggcaagtgatagag

SEQ ID NO: 40415 - DNA, 25 bp, Probe sequence
tagtgtatgaggcaagtgatagagt

SEQ ID NO: 40416 - DNA, 25 bp, Probe sequence
ctattagatgaatcaacaagtgcgt

SEQ ID NO: 40417 - DNA, 25 bp, Probe sequence
attattggtccttcaggtagtggta

SEQ ID NO: 40418 - DNA, 25 bp, Probe sequence
tagatgaatcaacaagtgcgttaga

SEQ ID NO: 40419 - DNA, 25 bp, Probe sequence
ttagatgaatcaacaagtgcgttag

SEQ ID NO: 40420 - DNA, 25 bp, Probe sequence
ttattggtccttcaggtagtggtaa

SEQ ID NO: 40421 - DNA, 25 bp, Probe sequence
gatgaatcaacaagtgcgttagata

SEQ ID NO: 40422 - DNA, 25 bp, Probe sequence
agatgaatcaacaagtgcgttagat

SEQ ID NO: 40423 - DNA, 25 bp, Probe sequence
agtcctaagtcagcattgttgtatt

SEQ ID NO: 40424 - DNA, 25 bp, Probe sequence
ctaagagtcctaagtcagcattgtt

SEQ ID NO: 40425 - DNA, 25 bp, Probe sequence
taagagtcctaagtcagcattgttg

SEQ ID NO: 40426 - DNA, 25 bp, Probe sequence
gagtcctaagtcagcattgttgtat

SEQ ID NO: 40427 - DNA, 25 bp, Probe sequence
gtcctaagtcagcattgttgtatta

SEQ ID NO: 40428 - DNA, 25 bp, Probe sequence
agagtcctaagtcagcattgttgta

SEQ ID NO: 40429 - DNA, 25 bp, Probe sequence
aagagtcctaagtcagcattgttgt

SEQ ID NO: 40430 - DNA, 25 bp, Probe sequence
attgagtgtagctgtgtatgtcatt

SEQ ID NO: 40431 - DNA, 25 bp, Probe sequence
tattgagtgtagctgtgtatgtcat

SEQ ID NO: 40432 - DNA, 25 bp, Probe sequence
gaggattgacaggaagtaatgaagt

SEQ ID NO: 40433 - DNA, 25 bp, Probe sequence
ggaggattgacaggaagtaatgaag

SEQ ID NO: 40434 - DNA, 25 bp, Probe sequence
acaggaagtaatgaagtcttaggaa

SEQ ID NO: 40435 - DNA, 25 bp, Probe sequence
tggaggattgacaggaagtaatgaa

SEQ ID NO: 40436 - DNA, 25 bp, Probe sequence
tgacaggaagtaatgaagtcttagg

SEQ ID NO: 40437 - DNA, 25 bp, Probe sequence
ggattgacaggaagtaatgaagtct

SEQ ID NO: 40438 - DNA, 25 bp, Probe sequence
aggattgacaggaagtaatgaagtc

SEQ ID NO: 40439 - DNA, 25 bp, Probe sequence
gacaggaagtaatgaagtcttagga

SEQ ID NO: 40440 - DNA, 25 bp, Probe sequence
gattgacaggaagtaatgaagtctt

SEQ ID NO: 40441 - DNA, 25 bp, Probe sequence
gtatcgcctactcagaatcagaatc

SEQ ID NO: 40442 - DNA, 25 bp, Probe sequence
tatcgcctactcagaatcagaatcc

SEQ ID NO: 40443 - DNA, 25 bp, Probe sequence
ggtatcgcctactcagaatcagaat

SEQ ID NO: 40444 - DNA, 25 bp, Probe sequence
gagaaggtatcgcctactcagaatc

SEQ ID NO: 40445 - DNA, 25 bp, Probe sequence
tcttatttcggtagtgatgaatcct

SEQ ID NO: 40446 - DNA, 25 bp, Probe sequence
cttatttcggtagtgatgaatcctc

SEQ ID NO: 40447 - DNA, 25 bp, Probe sequence
atcgcctactcagaatcagaatcca

SEQ ID NO: 40448 - DNA, 25 bp, Probe sequence
gaaggtatcgcctactcagaatcag

SEQ ID NO: 40449 - DNA, 25 bp, Probe sequence
tgaatcctcatttaacgctttcttt

SEQ ID NO: 40450 - DNA, 25 bp, Probe sequence
atgattatgtgaatgtgcttgaact

SEQ ID NO: 40451 - DNA, 25 bp, Probe sequence
tgattatgtgaatgtgcttgaacta

SEQ ID NO: 40452 - DNA, 25 bp, Probe sequence
aatgattatgtgaatgtgcttgaac

SEQ ID NO: 40453 - DNA, 25 bp, Probe sequence
gattatgtgaatgtgcttgaactaa

SEQ ID NO: 40454 - DNA, 25 bp, Probe sequence
ggtggaagtaatgaatcgaatggaa

SEQ ID NO: 40455 - DNA, 25 bp, Probe sequence
taacaatagatgctgcaacaagttc

SEQ ID NO: 40456 - DNA, 25 bp, Probe sequence
gtaacaatagatgctgcaacaagtt

SEQ ID NO: 40457 - DNA, 25 bp, Probe sequence
tcaggtggaagtaatgaatcgaatg

SEQ ID NO: 40458 - DNA, 25 bp, Probe sequence
aggtggaagtaatgaatcgaatgga

SEQ ID NO: 40459 - DNA, 25 bp, Probe sequence
aacacaacaacaaccagacaatcaa

SEQ ID NO: 40460 - DNA, 25 bp, Probe sequence
caacacaacaacaaccagacaatca

SEQ ID NO: 40461 - DNA, 25 bp, Probe sequence
caatcacaagagcaatcggttcaac

SEQ ID NO: 40462 - DNA, 25 bp, Probe sequence
cacaacaacaaccagacaatcaaac

SEQ ID NO: 40463 - DNA, 25 bp, Probe sequence
ggtctgtcacaaagagaatacaatg

SEQ ID NO: 40464 - DNA, 25 bp, Probe sequence
tggtctgtcacaaagagaatacaat

SEQ ID NO: 40465 - DNA, 25 bp, Probe sequence
atggtctgtcacaaagagaatacaa

SEQ ID NO: 40466 - DNA, 25 bp, Probe sequence
attagtgagcacgttagtgttaagt

SEQ ID NO: 40467 - DNA, 25 bp, Probe sequence
atcacaagagcaatcggttcaacaa

SEQ ID NO: 40468 - DNA, 25 bp, Probe sequence
tagtcgctgcttatatgtcatcaat

SEQ ID NO: 40469 - DNA, 25 bp, Probe sequence
atagtcgctgcttatatgtcatcaa

SEQ ID NO: 40470 - DNA, 25 bp, Probe sequence
tagcacaagcgaatataggattagc

SEQ ID NO: 40471 - DNA, 25 bp, Probe sequence
gatagtcgctgcttatatgtcatca

SEQ ID NO: 40472 - DNA, 25 bp, Probe sequence
aattgatagtcgctgcttatatgtc

SEQ ID NO: 40473 - DNA, 25 bp, Probe sequence
ttgatagtcgctgcttatatgtcat

SEQ ID NO: 40474 - DNA, 25 bp, Probe sequence
attgatagtcgctgcttatatgtca

SEQ ID NO: 40475 - DNA, 25 bp, Probe sequence
tgatagtcgctgcttatatgtcatc

SEQ ID NO: 40476 - DNA, 25 bp, Probe sequence
ctagcacaagcgaatataggattag

SEQ ID NO: 40477 - DNA, 25 bp, Probe sequence
gagaactatgaaccgatgagtacaa

SEQ ID NO: 40478 - DNA, 25 bp, Probe sequence
ctagagaactatgaaccgatgagta

SEQ ID NO: 40479 - DNA, 25 bp, Probe sequence
tataacggctggattatgtgacact

SEQ ID NO: 40480 - DNA, 25 bp, Probe sequence
agagaactatgaaccgatgagtaca

SEQ ID NO: 40481 - DNA, 25 bp, Probe sequence
tagagaactatgaaccgatgagtac

SEQ ID NO: 40482 - DNA, 25 bp, Probe sequence
ttataacggctggattatgtgacac

SEQ ID NO: 40483 - DNA, 25 bp, Probe sequence
ataacggctggattatgtgacactt

SEQ ID NO: 40484 - DNA, 25 bp, Probe sequence
atggatacagttggtgtaattggat

SEQ ID NO: 40485 - DNA, 25 bp, Probe sequence
catgcaattatggatacagttggtg

SEQ ID NO: 40486 - DNA, 25 bp, Probe sequence
gctgaacactctggattgaataatg

SEQ ID NO: 40487 - DNA, 25 bp, Probe sequence
ggctgaacactctggattgaataat

SEQ ID NO: 40488 - DNA, 25 bp, Probe sequence
ctgaacactctggattgaataatga

SEQ ID NO: 40489 - DNA, 25 bp, Probe sequence
tgaacactctggattgaataatgat

SEQ ID NO: 40490 - DNA, 25 bp, Probe sequence
atggctgaacactctggattgaata

SEQ ID NO: 40491 - DNA, 25 bp, Probe sequence
tggctgaacactctggattgaataa

SEQ ID NO: 40492 - DNA, 25 bp, Probe sequence
tatagagaagcacaccattgtactg

SEQ ID NO: 40493 - DNA, 25 bp, Probe sequence
atatagagaagcacaccattgtact

SEQ ID NO: 40494 - DNA, 25 bp, Probe sequence
aatatagagaagcacaccattgtac

SEQ ID NO: 40495 - DNA, 25 bp, Probe sequence
atggaagttacagatgaagtattcg

SEQ ID NO: 40496 - DNA, 25 bp, Probe sequence
catcctactcaagttcttgctgatt

SEQ ID NO: 40497 - DNA, 25 bp, Probe sequence
gatcatcctactcaagttcttgctg

SEQ ID NO: 40498 - DNA, 25 bp, Probe sequence
agatcatcctactcaagttcttgct

SEQ ID NO: 40499 - DNA, 25 bp, Probe sequence
tggaagttacagatgaagtattcga

SEQ ID NO: 40500 - DNA, 25 bp, Probe sequence
atgtatgatggcattgaataccgtg

SEQ ID NO: 40501 - DNA, 25 bp, Probe sequence
tcatcctactcaagttcttgctgat

SEQ ID NO: 40502 - DNA, 25 bp, Probe sequence
atcatcctactcaagttcttgctga

SEQ ID NO: 40503 - DNA, 25 bp, Probe sequence
cgagaaatggaagttacagatgaag

SEQ ID NO: 40504 - DNA, 25 bp, Probe sequence
tatgtggagtgagtatcgtggtaat

SEQ ID NO: 40505 - DNA, 25 bp, Probe sequence
actattacttggtcctattggtgaa

SEQ ID NO: 40506 - DNA, 25 bp, Probe sequence
taagcggacatattcaacatattgc

SEQ ID NO: 40507 - DNA, 25 bp, Probe sequence
ctatgtggagtgagtatcgtggtaa

SEQ ID NO: 40508 - DNA, 25 bp, Probe sequence
ttaactatgtggagtgagtatcgtg

SEQ ID NO: 40509 - DNA, 25 bp, Probe sequence
tgttacttcctatgtcaatgttgtt

SEQ ID NO: 40510 - DNA, 25 bp, Probe sequence
tactattacttggtcctattggtga

SEQ ID NO: 40511 - DNA, 25 bp, Probe sequence
atgttacttcctatgtcaatgttgt

SEQ ID NO: 40512 - DNA, 25 bp, Probe sequence
attaactatgtggagtgagtatcgt

SEQ ID NO: 40513 - DNA, 25 bp, Probe sequence
gcttacatcggctatcaattacaag

SEQ ID NO: 40514 - DNA, 25 bp, Probe sequence
cttacatcggctatcaattacaaga

SEQ ID NO: 40515 - DNA, 25 bp, Probe sequence
aatgatacactcgttattgctgctg

SEQ ID NO: 40516 - DNA, 25 bp, Probe sequence
ttacatcggctatcaattacaagaa

SEQ ID NO: 40517 - DNA, 25 bp, Probe sequence
agtaattagagagcaacatgatggt

SEQ ID NO: 40518 - DNA, 25 bp, Probe sequence
accagtaattagagagcaacatgat

SEQ ID NO: 40519 - DNA, 25 bp, Probe sequence
cagtaattagagagcaacatgatgg

SEQ ID NO: 40520 - DNA, 25 bp, Probe sequence
ccagtaattagagagcaacatgatg

SEQ ID NO: 40521 - DNA, 25 bp, Probe sequence
taccagtaattagagagcaacatga

SEQ ID NO: 40522 - DNA, 25 bp, Probe sequence
gttgttgtgttgtaaggaggttatg

SEQ ID NO: 40523 - DNA, 25 bp, Probe sequence
tgttgttgtgttgtaaggaggttat

SEQ ID NO: 40524 - DNA, 25 bp, Probe sequence
atgttgttgtgttgtaaggaggtta

SEQ ID NO: 40525 - DNA, 25 bp, Probe sequence
ttgttgtgttgtaaggaggttatgg

SEQ ID NO: 40526 - DNA, 25 bp, Probe sequence
gtgttgtaaggaggttatggcaatg

SEQ ID NO: 40527 - DNA, 25 bp, Probe sequence
tgtgttgtaaggaggttatggcaat

SEQ ID NO: 40528 - DNA, 25 bp, Probe sequence
ttgtgttgtaaggaggttatggcaa

SEQ ID NO: 40529 - DNA, 25 bp, Probe sequence
gttgtgttgtaaggaggttatggca

SEQ ID NO: 40530 - DNA, 25 bp, Probe sequence
tgttgtgttgtaaggaggttatggc

SEQ ID NO: 40531 - DNA, 25 bp, Probe sequence
tagcggtattatcaatgcctatctt

SEQ ID NO: 40532 - DNA, 25 bp, Probe sequence
ttagcggtattatcaatgcctatct

SEQ ID NO: 40533 - DNA, 25 bp, Probe sequence
attggagaataggtgcttgtattgt

SEQ ID NO: 40534 - DNA, 25 bp, Probe sequence
ttgtattggagaataggtgcttgta

SEQ ID NO: 40535 - DNA, 25 bp, Probe sequence
tgtattggagaataggtgcttgtat

SEQ ID NO: 40536 - DNA, 25 bp, Probe sequence
ttggagaataggtgcttgtattgtc

SEQ ID NO: 40537 - DNA, 25 bp, Probe sequence
ttctcggttgtaattgcctctaatg

SEQ ID NO: 40538 - DNA, 25 bp, Probe sequence
gttctcggttgtaattgcctctaat

SEQ ID NO: 40539 - DNA, 25 bp, Probe sequence
tattggagaataggtgcttgtattg

SEQ ID NO: 40540 - DNA, 25 bp, Probe sequence
ttactgtattcggtggtatgcctat

SEQ ID NO: 40541 - DNA, 25 bp, Probe sequence
atgtagcagcaagaggactagatat

SEQ ID NO: 40542 - DNA, 25 bp, Probe sequence
tgtagcagcaagaggactagatatt

SEQ ID NO: 40543 - DNA, 25 bp, Probe sequence
aagttgttactgtattcggtggtat

SEQ ID NO: 40544 - DNA, 25 bp, Probe sequence
aaggtgtccaagttgttactgtatt

SEQ ID NO: 40545 - DNA, 25 bp, Probe sequence
tactgtattcggtggtatgcctatc

SEQ ID NO: 40546 - DNA, 25 bp, Probe sequence
tcatcaacctgaattagcaatcgta

SEQ ID NO: 40547 - DNA, 25 bp, Probe sequence
agttgttactgtattcggtggtatg

SEQ ID NO: 40548 - DNA, 25 bp, Probe sequence
catcaacctgaattagcaatcgtat

SEQ ID NO: 40549 - DNA, 25 bp, Probe sequence
atgaacttgtaacggataacttgaa

SEQ ID NO: 40550 - DNA, 25 bp, Probe sequence
aatgaacttgtaacggataacttga

SEQ ID NO: 40551 - DNA, 25 bp, Probe sequence
taatgaacttgtaacggataacttg

SEQ ID NO: 40552 - DNA, 25 bp, Probe sequence
ggtgtatataatgaacttgtaacgg

SEQ ID NO: 40553 - DNA, 25 bp, Probe sequence
tgaacttgtaacggataacttgaaa

SEQ ID NO: 40554 - DNA, 25 bp, Probe sequence
aattcattaacacaatcgtttgagc

SEQ ID NO: 40555 - DNA, 25 bp, Probe sequence
ataatgaacttgtaacggataactt

SEQ ID NO: 40556 - DNA, 25 bp, Probe sequence
caatgagtaaatcaagtgatgcctt

SEQ ID NO: 40557 - DNA, 25 bp, Probe sequence
acaatgagtaaatcaagtgatgcct

SEQ ID NO: 40558 - DNA, 25 bp, Probe sequence
tcgtaatggattcagtaggtattgg

SEQ ID NO: 40559 - DNA, 25 bp, Probe sequence
cgtaatggattcagtaggtattggt

SEQ ID NO: 40560 - DNA, 25 bp, Probe sequence
tgaacaaccagaagcatactatact

SEQ ID NO: 40561 - DNA, 25 bp, Probe sequence
ttatgatggtgaaggtgtaacagaa

SEQ ID NO: 40562 - DNA, 25 bp, Probe sequence
tatgatggtgaaggtgtaacagaag

SEQ ID NO: 40563 - DNA, 25 bp, Probe sequence
gtaatggattcagtaggtattggtg

SEQ ID NO: 40564 - DNA, 25 bp, Probe sequence
ttgaacaaccagaagcatactatac

SEQ ID NO: 40565 - DNA, 25 bp, Probe sequence
atcgtaatggattcagtaggtattg

SEQ ID NO: 40566 - DNA, 25 bp, Probe sequence
taatggattcagtaggtattggtga

SEQ ID NO: 40567 - DNA, 25 bp, Probe sequence
aagcgaaatatacaattaaaggcgt

SEQ ID NO: 40568 - DNA, 25 bp, Probe sequence
acttacaggtgaagatgaagaaaca

SEQ ID NO: 40569 - DNA, 25 bp, Probe sequence
cttacaggtgaagatgaagaaacag

SEQ ID NO: 40570 - DNA, 25 bp, Probe sequence
gaagcgaaatatacaattaaaggcg

SEQ ID NO: 40571 - DNA, 25 bp, Probe sequence
ttacaggtgaagatgaagaaacagc

SEQ ID NO: 40572 - DNA, 25 bp, Probe sequence
aacttacaggtgaagatgaagaaac

SEQ ID NO: 40573 - DNA, 25 bp, Probe sequence
aaactagattacgcacttgatttcg

SEQ ID NO: 40574 - DNA, 25 bp, Probe sequence
agcgaaatatacaattaaaggcgta

SEQ ID NO: 40575 - DNA, 25 bp, Probe sequence
aaacttacaggtgaagatgaagaaa

SEQ ID NO: 40576 - DNA, 25 bp, Probe sequence
caaagcacaatacacagaatgagaa

SEQ ID NO: 40577 - DNA, 25 bp, Probe sequence
tagacagtgatttgagcagtttaca

SEQ ID NO: 40578 - DNA, 25 bp, Probe sequence
aaagcacaatacacagaatgagaaa

SEQ ID NO: 40579 - DNA, 25 bp, Probe sequence
gacagtgatttgagcagtttacata

SEQ ID NO: 40580 - DNA, 25 bp, Probe sequence
agacagtgatttgagcagtttacat

SEQ ID NO: 40581 - DNA, 25 bp, Probe sequence
ttagacagtgatttgagcagtttac

SEQ ID NO: 40582 - DNA, 25 bp, Probe sequence
acaaagcacaatacacagaatgaga

SEQ ID NO: 40583 - DNA, 25 bp, Probe sequence
cacaaagcacaatacacagaatgag

SEQ ID NO: 40584 - DNA, 25 bp, Probe sequence
ctattagacagtgatttgagcagtt

SEQ ID NO: 40585 - DNA, 25 bp, Probe sequence
acacattaacggcattacaacaatt

SEQ ID NO: 40586 - DNA, 25 bp, Probe sequence
gacacattaacggcattacaacaat

SEQ ID NO: 40587 - DNA, 25 bp, Probe sequence
gaagacacattaacggcattacaac

SEQ ID NO: 40588 - DNA, 25 bp, Probe sequence
tgaagacacattaacggcattacaa

SEQ ID NO: 40589 - DNA, 25 bp, Probe sequence
ttgaagacacattaacggcattaca

SEQ ID NO: 40590 - DNA, 25 bp, Probe sequence
gttgaagacacattaacggcattac

SEQ ID NO: 40591 - DNA, 25 bp, Probe sequence
agacacattaacggcattacaacaa

SEQ ID NO: 40592 - DNA, 25 bp, Probe sequence
aagacacattaacggcattacaaca

SEQ ID NO: 40593 - DNA, 25 bp, Probe sequence
ggttgaagacacattaacggcatta

SEQ ID NO: 40594 - DNA, 25 bp, Probe sequence
tggaaggtttatttaacgcaattaa

SEQ ID NO: 40595 - DNA, 25 bp, Probe sequence
atggaaggtttatttaacgcaatta

SEQ ID NO: 40596 - DNA, 25 bp, Probe sequence
aacgcaattaaagataccgtaactg

SEQ ID NO: 40597 - DNA, 25 bp, Probe sequence
taacgcaattaaagataccgtaact

SEQ ID NO: 40598 - DNA, 25 bp, Probe sequence
ttaacgcaattaaagataccgtaac

SEQ ID NO: 40599 - DNA, 25 bp, Probe sequence
catcgttgaaaatggcgtaggttta

SEQ ID NO: 40600 - DNA, 25 bp, Probe sequence
acgcaattaaagataccgtaactgc

SEQ ID NO: 40601 - DNA, 25 bp, Probe sequence
aagcattgtgagcatcgttgaaaat

SEQ ID NO: 40602 - DNA, 25 bp, Probe sequence
tttaacgcaattaaagataccgtaa

SEQ ID NO: 40603 - DNA, 25 bp, Probe sequence
cgaagatgttcaattaacgcttaga

SEQ ID NO: 40604 - DNA, 25 bp, Probe sequence
acgaagatgttcaattaacgcttag

SEQ ID NO: 40605 - DNA, 25 bp, Probe sequence
gacgaagatgttcaattaacgctta

SEQ ID NO: 40606 - DNA, 25 bp, Probe sequence
ttagacgaagatgttcaattaacgc

SEQ ID NO: 40607 - DNA, 25 bp, Probe sequence
tagacgaagatgttcaattaacgct

SEQ ID NO: 40608 - DNA, 25 bp, Probe sequence
ctgacttagacgaagatgttcaatt

SEQ ID NO: 40609 - DNA, 25 bp, Probe sequence
agacgaagatgttcaattaacgctt

SEQ ID NO: 40610 - DNA, 25 bp, Probe sequence
aagtagttcaggacaaccatacgat

SEQ ID NO: 40611 - DNA, 25 bp, Probe sequence
gctgacttagacgaagatgttcaat

SEQ ID NO: 40612 - DNA, 25 bp, Probe sequence
attaggcacaagtatcgtagacatc

SEQ ID NO: 40613 - DNA, 25 bp, Probe sequence
aattaggcacaagtatcgtagacat

SEQ ID NO: 40614 - DNA, 25 bp, Probe sequence
aagtatcgtagacatcgttgctaac

SEQ ID NO: 40615 - DNA, 25 bp, Probe sequence
caagtatcgtagacatcgttgctaa

SEQ ID NO: 40616 - DNA, 25 bp, Probe sequence
acaagtatcgtagacatcgttgcta

SEQ ID NO: 40617 - DNA, 25 bp, Probe sequence
ttaggcacaagtatcgtagacatcg

SEQ ID NO: 40618 - DNA, 25 bp, Probe sequence
aaattaggcacaagtatcgtagaca

SEQ ID NO: 40619 - DNA, 25 bp, Probe sequence
tgaaattaggcacaagtatcgtaga

SEQ ID NO: 40620 - DNA, 25 bp, Probe sequence
gaaattaggcacaagtatcgtagac

SEQ ID NO: 40621 - DNA, 25 bp, Probe sequence
aactattgtcatcattaggtgtgaa

SEQ ID NO: 40622 - DNA, 25 bp, Probe sequence
actattgtcatcattaggtgtgaat

SEQ ID NO: 40623 - DNA, 25 bp, Probe sequence
gccagcatctaataaagtaagtcac

SEQ ID NO: 40624 - DNA, 25 bp, Probe sequence
ccagcatctaataaagtaagtcacg

SEQ ID NO: 40625 - DNA, 25 bp, Probe sequence
cagcatctaataaagtaagtcacga

SEQ ID NO: 40626 - DNA, 25 bp, Probe sequence
tgccagcatctaataaagtaagtca

SEQ ID NO: 40627 - DNA, 25 bp, Probe sequence
ttgccagcatctaataaagtaagtc

SEQ ID NO: 40628 - DNA, 25 bp, Probe sequence
agcatctaataaagtaagtcacgaa

SEQ ID NO: 40629 - DNA, 25 bp, Probe sequence
tttgccagcatctaataaagtaagt

SEQ ID NO: 40630 - DNA, 25 bp, Probe sequence
ttaacatctgacattctaggtggaa

SEQ ID NO: 40631 - DNA, 25 bp, Probe sequence
catctgacattctaggtggaatcaa

SEQ ID NO: 40632 - DNA, 25 bp, Probe sequence
aacatctgacattctaggtggaatc

SEQ ID NO: 40633 - DNA, 25 bp, Probe sequence
atctgacattctaggtggaatcaat

SEQ ID NO: 40634 - DNA, 25 bp, Probe sequence
taacatctgacattctaggtggaat

SEQ ID NO: 40635 - DNA, 25 bp, Probe sequence
tgatattggtgaggatgaaagacag

SEQ ID NO: 40636 - DNA, 25 bp, Probe sequence
atgatattggtgaggatgaaagaca

SEQ ID NO: 40637 - DNA, 25 bp, Probe sequence
acatctgacattctaggtggaatca

SEQ ID NO: 40638 - DNA, 25 bp, Probe sequence
gcactcgattatagttggagattct

SEQ ID NO: 40639 - DNA, 25 bp, Probe sequence
gggaattgaaacagaagaacaagta

SEQ ID NO: 40640 - DNA, 25 bp, Probe sequence
tgacagaacgcatttcaaatatgat

SEQ ID NO: 40641 - DNA, 25 bp, Probe sequence
acgcatttcaaatatgataggtgtt

SEQ ID NO: 40642 - DNA, 25 bp, Probe sequence
aacgcatttcaaatatgataggtgt

SEQ ID NO: 40643 - DNA, 25 bp, Probe sequence
cgcatttcaaatatgataggtgttc

SEQ ID NO: 40644 - DNA, 25 bp, Probe sequence
gaacgcatttcaaatatgataggtg

SEQ ID NO: 40645 - DNA, 25 bp, Probe sequence
agaacgcatttcaaatatgataggt

SEQ ID NO: 40646 - DNA, 25 bp, Probe sequence
tgaaacagaagaacaagtaagtcaa

SEQ ID NO: 40647 - DNA, 25 bp, Probe sequence
ttgaaacagaagaacaagtaagtca

SEQ ID NO: 40648 - DNA, 25 bp, Probe sequence
taacggatacacataagcaacaagt

SEQ ID NO: 40649 - DNA, 25 bp, Probe sequence
aacggatacacataagcaacaagta

SEQ ID NO: 40650 - DNA, 25 bp, Probe sequence
ttaacggatacacataagcaacaag

SEQ ID NO: 40651 - DNA, 25 bp, Probe sequence
caatatgactcgtggactgatatgt

SEQ ID NO: 40652 - DNA, 25 bp, Probe sequence
aggaattaacggatacacataagca

SEQ ID NO: 40653 - DNA, 25 bp, Probe sequence
aatatgactcgtggactgatatgtt

SEQ ID NO: 40654 - DNA, 25 bp, Probe sequence
cggatacacataagcaacaagtagt

SEQ ID NO: 40655 - DNA, 25 bp, Probe sequence
acggatacacataagcaacaagtag

SEQ ID NO: 40656 - DNA, 25 bp, Probe sequence
ggaattaacggatacacataagcaa

SEQ ID NO: 40657 - DNA, 25 bp, Probe sequence
tgtctattgtgatgatgtccttacg

SEQ ID NO: 40658 - DNA, 25 bp, Probe sequence
agatgtctattgtgatgatgtcctt

SEQ ID NO: 40659 - DNA, 25 bp, Probe sequence
aagatgtctattgtgatgatgtcct

SEQ ID NO: 40660 - DNA, 25 bp, Probe sequence
gaagatgtctattgtgatgatgtcc

SEQ ID NO: 40661 - DNA, 25 bp, Probe sequence
gtctattgtgatgatgtccttacgc

SEQ ID NO: 40662 - DNA, 25 bp, Probe sequence
atgtctattgtgatgatgtccttac

SEQ ID NO: 40663 - DNA, 25 bp, Probe sequence
ctattgtgatgatgtccttacgcaa

SEQ ID NO: 40664 - DNA, 25 bp, Probe sequence
tctattgtgatgatgtccttacgca

SEQ ID NO: 40665 - DNA, 25 bp, Probe sequence
gatgtctattgtgatgatgtcctta

SEQ ID NO: 40666 - DNA, 25 bp, Probe sequence
atattagatgaaccaactgtaggca

SEQ ID NO: 40667 - DNA, 25 bp, Probe sequence
attagatgaaccaactgtaggcatt

SEQ ID NO: 40668 - DNA, 25 bp, Probe sequence
tattagatgaaccaactgtaggcat

SEQ ID NO: 40669 - DNA, 25 bp, Probe sequence
catattagatgaaccaactgtaggc

SEQ ID NO: 40670 - DNA, 25 bp, Probe sequence
taataggtcctagtggttctggtaa

SEQ ID NO: 40671 - DNA, 25 bp, Probe sequence
ttaataggtcctagtggttctggta

SEQ ID NO: 40672 - DNA, 25 bp, Probe sequence
ttagatgaaccaactgtaggcattg

SEQ ID NO: 40673 - DNA, 25 bp, Probe sequence
gttaataggtcctagtggttctggt

SEQ ID NO: 40674 - DNA, 25 bp, Probe sequence
tagatgaaccaactgtaggcattga

SEQ ID NO: 40675 - DNA, 25 bp, Probe sequence
cttggttatctgattggctatggta

SEQ ID NO: 40676 - DNA, 25 bp, Probe sequence
gttcttggttatctgattggctatg

SEQ ID NO: 40677 - DNA, 25 bp, Probe sequence
ttggttatctgattggctatggtat

SEQ ID NO: 40678 - DNA, 25 bp, Probe sequence
ttcttggttatctgattggctatgg

SEQ ID NO: 40679 - DNA, 25 bp, Probe sequence
atctgattggctatggtatattcgc

SEQ ID NO: 40680 - DNA, 25 bp, Probe sequence
ggctatggtatattcgcaatcattc

SEQ ID NO: 40681 - DNA, 25 bp, Probe sequence
cgttcttggttatctgattggctat

SEQ ID NO: 40682 - DNA, 25 bp, Probe sequence
tggctatggtatattcgcaatcatt

SEQ ID NO: 40683 - DNA, 25 bp, Probe sequence
gctatggtatattcgcaatcattca

SEQ ID NO: 40684 - DNA, 25 bp, Probe sequence
tatgttcttctctggtgctgttgaa

SEQ ID NO: 40685 - DNA, 25 bp, Probe sequence
tagacgaatggcaacagattgaaga

SEQ ID NO: 40686 - DNA, 25 bp, Probe sequence
ctagacgaatggcaacagattgaag

SEQ ID NO: 40687 - DNA, 25 bp, Probe sequence
gtatgttcttctctggtgctgttga

SEQ ID NO: 40688 - DNA, 25 bp, Probe sequence
gagatttgggatagagaaacttgga

SEQ ID NO: 40689 - DNA, 25 bp, Probe sequence
ttataccgtccaagtttcgttatga

SEQ ID NO: 40690 - DNA, 25 bp, Probe sequence
tgattataccgtccaagtttcgtta

SEQ ID NO: 40691 - DNA, 25 bp, Probe sequence
tatgattataccgtccaagtttcgt

SEQ ID NO: 40692 - DNA, 25 bp, Probe sequence
tttgggatagagaaacttggaatga

SEQ ID NO: 40693 - DNA, 25 bp, Probe sequence
catcaacgccaaacctgtctataac

SEQ ID NO: 40694 - DNA, 25 bp, Probe sequence
acatcaaagtaacatggcatcaacg

SEQ ID NO: 40695 - DNA, 25 bp, Probe sequence
atcaacgccaaacctgtctataaca

SEQ ID NO: 40696 - DNA, 25 bp, Probe sequence
gcatcaacgccaaacctgtctataa

SEQ ID NO: 40697 - DNA, 25 bp, Probe sequence
gtaccagcacatcaaagtaacatgg

SEQ ID NO: 40698 - DNA, 25 bp, Probe sequence
tcaacgccaaacctgtctataacac

SEQ ID NO: 40699 - DNA, 25 bp, Probe sequence
catcaaagtaacatggcatcaacgc

SEQ ID NO: 40700 - DNA, 25 bp, Probe sequence
actacatcaagtcgcatcgtggtac

SEQ ID NO: 40701 - DNA, 25 bp, Probe sequence
cactacatcaagtcgcatcgtggta

SEQ ID NO: 40702 - DNA, 25 bp, Probe sequence
ttagatgacaataacagagcacgaa

SEQ ID NO: 40703 - DNA, 25 bp, Probe sequence
tagatgacaataacagagcacgaag

SEQ ID NO: 40704 - DNA, 25 bp, Probe sequence
gaacaacaaccaataacaacaacat

SEQ ID NO: 40705 - DNA, 25 bp, Probe sequence
accagaagcatatacacctaagtta

SEQ ID NO: 40706 - DNA, 25 bp, Probe sequence
taccagaagcatatacacctaagtt

SEQ ID NO: 40707 - DNA, 25 bp, Probe sequence
aacaacaaccaataacaacaacatt

SEQ ID NO: 40708 - DNA, 25 bp, Probe sequence
catagcaacttccgtgaattaactc

SEQ ID NO: 40709 - DNA, 25 bp, Probe sequence
ataccagaagcatatacacctaagt

SEQ ID NO: 40710 - DNA, 25 bp, Probe sequence
agttataccagaagcatatacacct

SEQ ID NO: 40711 - DNA, 25 bp, Probe sequence
aaatgtattggattggttgggaaat

SEQ ID NO: 40712 - DNA, 25 bp, Probe sequence
tttggctggttgtgactattctaaa

SEQ ID NO: 40713 - DNA, 25 bp, Probe sequence
cgattaagagtatgttgggttgttt

SEQ ID NO: 40714 - DNA, 25 bp, Probe sequence
ccgattaagagtatgttgggttgtt

SEQ ID NO: 40715 - DNA, 25 bp, Probe sequence
tgtattggattggttgggaaataac

SEQ ID NO: 40716 - DNA, 25 bp, Probe sequence
atgaacccgattaagagtatgttgg

SEQ ID NO: 40717 - DNA, 25 bp, Probe sequence
gtattggattggttgggaaataact

SEQ ID NO: 40718 - DNA, 25 bp, Probe sequence
ttggctggttgtgactattctaaac

SEQ ID NO: 40719 - DNA, 25 bp, Probe sequence
ttggattggttgggaaataacttat

SEQ ID NO: 40720 - DNA, 25 bp, Probe sequence
atgagccttgagaacgataatgtaa

SEQ ID NO: 40721 - DNA, 25 bp, Probe sequence
gatgagccttgagaacgataatgta

SEQ ID NO: 40722 - DNA, 25 bp, Probe sequence
ttcttcttatgaacgcatatacgaa

SEQ ID NO: 40723 - DNA, 25 bp, Probe sequence
ggatgagccttgagaacgataatgt

SEQ ID NO: 40724 - DNA, 25 bp, Probe sequence
tgagccttgagaacgataatgtaaa

SEQ ID NO: 40725 - DNA, 25 bp, Probe sequence
attcttcttatgaacgcatatacga

SEQ ID NO: 40726 - DNA, 25 bp, Probe sequence
atgtaaaggtagtgcgtagtaatgg

SEQ ID NO: 40727 - DNA, 25 bp, Probe sequence
gagaacgataatgtaaaggtagtgc

SEQ ID NO: 40728 - DNA, 25 bp, Probe sequence
cgataatgtaaaggtagtgcgtagt

SEQ ID NO: 40729 - DNA, 25 bp, Probe sequence
gttaatgatgatgtatccttggcaa

SEQ ID NO: 40730 - DNA, 25 bp, Probe sequence
tcgttaatgatgatgtatccttggc

SEQ ID NO: 40731 - DNA, 25 bp, Probe sequence
cgttaatgatgatgtatccttggca

SEQ ID NO: 40732 - DNA, 25 bp, Probe sequence
atcgttaatgatgatgtatccttgg

SEQ ID NO: 40733 - DNA, 25 bp, Probe sequence
tgttgattatataggtgttggacca

SEQ ID NO: 40734 - DNA, 25 bp, Probe sequence
ttaaagaaatgaatccgcaactacc

SEQ ID NO: 40735 - DNA, 25 bp, Probe sequence
gtattagaagcagcattaaaggcag

SEQ ID NO: 40736 - DNA, 25 bp, Probe sequence
aagtattagaagcagcattaaaggc

SEQ ID NO: 40737 - DNA, 25 bp, Probe sequence
agtattagaagcagcattaaaggca

SEQ ID NO: 40738 - DNA, 25 bp, Probe sequence
tatcgtattgatggttatgaggtcg

SEQ ID NO: 40739 - DNA, 25 bp, Probe sequence
actatcgtattgatggttatgaggt

SEQ ID NO: 40740 - DNA, 25 bp, Probe sequence
tcatcagagaatgtagacagcaatt

SEQ ID NO: 40741 - DNA, 25 bp, Probe sequence
ttcatcagagaatgtagacagcaat

SEQ ID NO: 40742 - DNA, 25 bp, Probe sequence
ctatcgtattgatggttatgaggtc

SEQ ID NO: 40743 - DNA, 25 bp, Probe sequence
aactatcgtattgatggttatgagg

SEQ ID NO: 40744 - DNA, 25 bp, Probe sequence
actggacattctaatggtcaagatt

SEQ ID NO: 40745 - DNA, 25 bp, Probe sequence
ttactggacattctaatggtcaaga

SEQ ID NO: 40746 - DNA, 25 bp, Probe sequence
tgattactggacattctaatggtca

SEQ ID NO: 40747 - DNA, 25 bp, Probe sequence
tattagcgttgattgatgatacagc

SEQ ID NO: 40748 - DNA, 25 bp, Probe sequence
ccagacatagaagcgttaattgaag

SEQ ID NO: 40749 - DNA, 25 bp, Probe sequence
attagcgttgattgatgatacagca

SEQ ID NO: 40750 - DNA, 25 bp, Probe sequence
accagacatagaagcgttaattgaa

SEQ ID NO: 40751 - DNA, 25 bp, Probe sequence
cagacatagaagcgttaattgaagc

SEQ ID NO: 40752 - DNA, 25 bp, Probe sequence
atagaagcgttaattgaagcggtaa

SEQ ID NO: 40753 - DNA, 25 bp, Probe sequence
gaaccagacatagaagcgttaattg

SEQ ID NO: 40754 - DNA, 25 bp, Probe sequence
agaaccagacatagaagcgttaatt

SEQ ID NO: 40755 - DNA, 25 bp, Probe sequence
aaccagacatagaagcgttaattga

SEQ ID NO: 40756 - DNA, 25 bp, Probe sequence
aagcgaagaggagttgattgtaata

SEQ ID NO: 40757 - DNA, 25 bp, Probe sequence
cgtattggttggattatagcagatg

SEQ ID NO: 40758 - DNA, 25 bp, Probe sequence
agcgaagaggagttgattgtaatat

SEQ ID NO: 40759 - DNA, 25 bp, Probe sequence
gtatatgaagcgaagaggagttgat

SEQ ID NO: 40760 - DNA, 25 bp, Probe sequence
tatatgaagcgaagaggagttgatt

SEQ ID NO: 40761 - DNA, 25 bp, Probe sequence
aagtatatgaagcgaagaggagttg

SEQ ID NO: 40762 - DNA, 25 bp, Probe sequence
gcgaagaggagttgattgtaatatc

SEQ ID NO: 40763 - DNA, 25 bp, Probe sequence
atatgaagcgaagaggagttgattg

SEQ ID NO: 40764 - DNA, 25 bp, Probe sequence
gaagcgaagaggagttgattgtaat

SEQ ID NO: 40765 - DNA, 25 bp, Probe sequence
ctgtattagtaggattcatcgccaa

SEQ ID NO: 40766 - DNA, 25 bp, Probe sequence
agtggctgtattagtaggattcatc

SEQ ID NO: 40767 - DNA, 25 bp, Probe sequence
gtagtggctgtattagtaggattca

SEQ ID NO: 40768 - DNA, 25 bp, Probe sequence
tgtagtggctgtattagtaggattc

SEQ ID NO: 40769 - DNA, 25 bp, Probe sequence
ctgtagtggctgtattagtaggatt

SEQ ID NO: 40770 - DNA, 25 bp, Probe sequence
gtggctgtattagtaggattcatcg

SEQ ID NO: 40771 - DNA, 25 bp, Probe sequence
tagtggctgtattagtaggattcat

SEQ ID NO: 40772 - DNA, 25 bp, Probe sequence
tggtaagacagttgtaacatcaatg

SEQ ID NO: 40773 - DNA, 25 bp, Probe sequence
ggtaagacagttgtaacatcaatga

SEQ ID NO: 40774 - DNA, 25 bp, Probe sequence
ggattagcaactggactgtcaatta

SEQ ID NO: 40775 - DNA, 25 bp, Probe sequence
attagcaactggactgtcaattatc

SEQ ID NO: 40776 - DNA, 25 bp, Probe sequence
gattagcaactggactgtcaattat

SEQ ID NO: 40777 - DNA, 25 bp, Probe sequence
ttagatggattagcaactggactgt

SEQ ID NO: 40778 - DNA, 25 bp, Probe sequence
caactggactgtcaattatcggatt

SEQ ID NO: 40779 - DNA, 25 bp, Probe sequence
ttagcaactggactgtcaattatcg

SEQ ID NO: 40780 - DNA, 25 bp, Probe sequence
tagatggattagcaactggactgtc

SEQ ID NO: 40781 - DNA, 25 bp, Probe sequence
atggattagcaactggactgtcaat

SEQ ID NO: 40782 - DNA, 25 bp, Probe sequence
tggattagcaactggactgtcaatt

SEQ ID NO: 40783 - DNA, 25 bp, Probe sequence
atgtaattgatcctgttatgttggc

SEQ ID NO: 40784 - DNA, 25 bp, Probe sequence
taattgatcctgttatgttggcgaa

SEQ ID NO: 40785 - DNA, 25 bp, Probe sequence
ggtagatgaacaacttgatagtgtc

SEQ ID NO: 40786 - DNA, 25 bp, Probe sequence
gtaattgatcctgttatgttggcga

SEQ ID NO: 40787 - DNA, 25 bp, Probe sequence
cattcatgtggtgtatatggtatgg

SEQ ID NO: 40788 - DNA, 25 bp, Probe sequence
atagtgtcttcaatgataccttacc

SEQ ID NO: 40789 - DNA, 25 bp, Probe sequence
agatgaacaacttgatagtgtcttc

SEQ ID NO: 40790 - DNA, 25 bp, Probe sequence
tgtaattgatcctgttatgttggcg

SEQ ID NO: 40791 - DNA, 25 bp, Probe sequence
gtagatgaacaacttgatagtgtct

SEQ ID NO: 40792 - DNA, 25 bp, Probe sequence
gccactcaagtagcaagtattatca

SEQ ID NO: 40793 - DNA, 25 bp, Probe sequence
ccactcaagtagcaagtattatcac

SEQ ID NO: 40794 - DNA, 25 bp, Probe sequence
gatagtaatcacgccactcaagtag

SEQ ID NO: 40795 - DNA, 25 bp, Probe sequence
agatagtaatcacgccactcaagta

SEQ ID NO: 40796 - DNA, 25 bp, Probe sequence
cactcaagtagcaagtattatcaca

SEQ ID NO: 40797 - DNA, 25 bp, Probe sequence
tacagatagtaatcacgccactcaa

SEQ ID NO: 40798 - DNA, 25 bp, Probe sequence
aacgaagtatattctatcacagcaa

SEQ ID NO: 40799 - DNA, 25 bp, Probe sequence
cgccactcaagtagcaagtattatc

SEQ ID NO: 40800 - DNA, 25 bp, Probe sequence
acgaagtatattctatcacagcaat

SEQ ID NO: 40801 - DNA, 25 bp, Probe sequence
ttcagattatgcggattcaatacaa

SEQ ID NO: 40802 - DNA, 25 bp, Probe sequence
ttcatcacttgtggaagatagttcg

SEQ ID NO: 40803 - DNA, 25 bp, Probe sequence
tgattcatcacttgtggaagatagt

SEQ ID NO: 40804 - DNA, 25 bp, Probe sequence
attcatcacttgtggaagatagttc

SEQ ID NO: 40805 - DNA, 25 bp, Probe sequence
gattcatcacttgtggaagatagtt

SEQ ID NO: 40806 - DNA, 25 bp, Probe sequence
agaacaagacaacggtaagctatta

SEQ ID NO: 40807 - DNA, 25 bp, Probe sequence
gaacaagacaacggtaagctattaa

SEQ ID NO: 40808 - DNA, 25 bp, Probe sequence
aagaacaagacaacggtaagctatt

SEQ ID NO: 40809 - DNA, 25 bp, Probe sequence
gtcacatgctgtagatcaaggtatt

SEQ ID NO: 40810 - DNA, 25 bp, Probe sequence
ttactgacgatgacaactcttactt

SEQ ID NO: 40811 - DNA, 25 bp, Probe sequence
agaacaacttatatactgctggaca

SEQ ID NO: 40812 - DNA, 25 bp, Probe sequence
tgaactggattggtgaatatatcgt

SEQ ID NO: 40813 - DNA, 25 bp, Probe sequence
aagatggacacacgattagtacatt

SEQ ID NO: 40814 - DNA, 25 bp, Probe sequence
caacttatatactgctggacaatgt

SEQ ID NO: 40815 - DNA, 25 bp, Probe sequence
acaacttatatactgctggacaatg

SEQ ID NO: 40816 - DNA, 25 bp, Probe sequence
gaacaacttatatactgctggacaa

SEQ ID NO: 40817 - DNA, 25 bp, Probe sequence
acaacaatcagtaccattcttcatt

SEQ ID NO: 40818 - DNA, 25 bp, Probe sequence
aacaacaatcagtaccattcttcat

SEQ ID NO: 40819 - DNA, 25 bp, Probe sequence
atgttgtattattgtcacctgcttg

SEQ ID NO: 40820 - DNA, 25 bp, Probe sequence
gatgttgtattattgtcacctgctt

SEQ ID NO: 40821 - DNA, 25 bp, Probe sequence
agttatctaatctctgaagcaccaa

SEQ ID NO: 40822 - DNA, 25 bp, Probe sequence
aagttatctaatctctgaagcacca

SEQ ID NO: 40823 - DNA, 25 bp, Probe sequence
tgttgtattattgtcacctgcttgt

SEQ ID NO: 40824 - DNA, 25 bp, Probe sequence
acaagtgatagagtcggaagaatta

SEQ ID NO: 40825 - DNA, 25 bp, Probe sequence
gttatctaatctctgaagcaccaat

SEQ ID NO: 40826 - DNA, 25 bp, Probe sequence
aacgacagttacttctctaattgga

SEQ ID NO: 40827 - DNA, 25 bp, Probe sequence
atctaatctctgaagcaccaatcat

SEQ ID NO: 40828 - DNA, 25 bp, Probe sequence
aattgttggtgaatcatacgaagaa

SEQ ID NO: 40829 - DNA, 25 bp, Probe sequence
tatggctatgacactagaacaatgg

SEQ ID NO: 40830 - DNA, 25 bp, Probe sequence
tctgacaaggaattggaacaagtaa

SEQ ID NO: 40831 - DNA, 25 bp, Probe sequence
gtctgacaaggaattggaacaagta

SEQ ID NO: 40832 - DNA, 25 bp, Probe sequence
caatatggctatgacactagaacaa

SEQ ID NO: 40833 - DNA, 25 bp, Probe sequence
atatggctatgacactagaacaatg

SEQ ID NO: 40834 - DNA, 25 bp, Probe sequence
tcaatatggctatgacactagaaca

SEQ ID NO: 40835 - DNA, 25 bp, Probe sequence
ttcaatatggctatgacactagaac

SEQ ID NO: 40836 - DNA, 25 bp, Probe sequence
aatatggctatgacactagaacaat

SEQ ID NO: 40837 - DNA, 25 bp, Probe sequence
ttgtctgatttggaggaaggtttac

SEQ ID NO: 40838 - DNA, 25 bp, Probe sequence
ggttaatctcctatggtggtttgtt

SEQ ID NO: 40839 - DNA, 25 bp, Probe sequence
gaagaaggcgatttgattcatacag

SEQ ID NO: 40840 - DNA, 25 bp, Probe sequence
cagaagaaggcgatttgattcatac

SEQ ID NO: 40841 - DNA, 25 bp, Probe sequence
gaaggcgatttgattcatacagatg

SEQ ID NO: 40842 - DNA, 25 bp, Probe sequence
agaaggcgatttgattcatacagat

SEQ ID NO: 40843 - DNA, 25 bp, Probe sequence
aagaaggcgatttgattcatacaga

SEQ ID NO: 40844 - DNA, 25 bp, Probe sequence
agaagaaggcgatttgattcataca

SEQ ID NO: 40845 - DNA, 25 bp, Probe sequence
acagaagaaggcgatttgattcata

SEQ ID NO: 40846 - DNA, 25 bp, Probe sequence
aatgacacctgaagttagacgatat

SEQ ID NO: 40847 - DNA, 25 bp, Probe sequence
atattatccgcagatgtcacaatca

SEQ ID NO: 40848 - DNA, 25 bp, Probe sequence
atgacacctgaagttagacgatata

SEQ ID NO: 40849 - DNA, 25 bp, Probe sequence
tattatccgcagatgtcacaatcat

SEQ ID NO: 40850 - DNA, 25 bp, Probe sequence
ttatccgcagatgtcacaatcatta

SEQ ID NO: 40851 - DNA, 25 bp, Probe sequence
gttgagatacacaagcaattaccaa

SEQ ID NO: 40852 - DNA, 25 bp, Probe sequence
attatccgcagatgtcacaatcatt

SEQ ID NO: 40853 - DNA, 25 bp, Probe sequence
aagttagacgatatattgccgaagt

SEQ ID NO: 40854 - DNA, 25 bp, Probe sequence
tgaagttagacgatatattgccgaa

SEQ ID NO: 40855 - DNA, 25 bp, Probe sequence
aatgttgaaaccgtttgctaagatt

SEQ ID NO: 40856 - DNA, 25 bp, Probe sequence
aaatgttgaaaccgtttgctaagat

SEQ ID NO: 40857 - DNA, 25 bp, Probe sequence
tgttgaaaccgtttgctaagattaa

SEQ ID NO: 40858 - DNA, 25 bp, Probe sequence
atgttgaaaccgtttgctaagatta

SEQ ID NO: 40859 - DNA, 25 bp, Probe sequence
aaaccgtttgctaagattaatttgc

SEQ ID NO: 40860 - DNA, 25 bp, Probe sequence
gttgaaaccgtttgctaagattaat

SEQ ID NO: 40861 - DNA, 25 bp, Probe sequence
cccttatgacctgatttggttagta

SEQ ID NO: 40862 - DNA, 25 bp, Probe sequence
gacccttatgacctgatttggttag

SEQ ID NO: 40863 - DNA, 25 bp, Probe sequence
agacccttatgacctgatttggtta

SEQ ID NO: 40864 - DNA, 25 bp, Probe sequence
gaataaagcgtcctcttgtgaaatt

SEQ ID NO: 40865 - DNA, 25 bp, Probe sequence
taaagcgtcctcttgtgaaattaga

SEQ ID NO: 40866 - DNA, 25 bp, Probe sequence
ataaagcgtcctcttgtgaaattag

SEQ ID NO: 40867 - DNA, 25 bp, Probe sequence
agaataaagcgtcctcttgtgaaat

SEQ ID NO: 40868 - DNA, 25 bp, Probe sequence
aataaagcgtcctcttgtgaaatta

SEQ ID NO: 40869 - DNA, 25 bp, Probe sequence
tcttgtgaaattagagaacgcttta

SEQ ID NO: 40870 - DNA, 25 bp, Probe sequence
cttgtgaaattagagaacgctttat

SEQ ID NO: 40871 - DNA, 25 bp, Probe sequence
ttgtgaaattagagaacgctttatt

SEQ ID NO: 40872 - DNA, 25 bp, Probe sequence
aagaataaagcgtcctcttgtgaaa

SEQ ID NO: 40873 - DNA, 25 bp, Probe sequence
aattacctatcattggaacggaagt

SEQ ID NO: 40874 - DNA, 25 bp, Probe sequence
attacctatcattggaacggaagtt

SEQ ID NO: 40875 - DNA, 25 bp, Probe sequence
atgtggtgttgatgtattagatgtt

SEQ ID NO: 40876 - DNA, 25 bp, Probe sequence
ataactatggttcaatcctaacagc

SEQ ID NO: 40877 - DNA, 25 bp, Probe sequence
actgaagaagatgttattgatgtga

SEQ ID NO: 40878 - DNA, 25 bp, Probe sequence
gcatgtggtgttgatgtattagatg

SEQ ID NO: 40879 - DNA, 25 bp, Probe sequence
agcatgtggtgttgatgtattagat

SEQ ID NO: 40880 - DNA, 25 bp, Probe sequence
gaagcatgtggtgttgatgtattag

SEQ ID NO: 40881 - DNA, 25 bp, Probe sequence
aagcatgtggtgttgatgtattaga

SEQ ID NO: 40882 - DNA, 25 bp, Probe sequence
aacattactcgcatcatcattagca

SEQ ID NO: 40883 - DNA, 25 bp, Probe sequence
acattactcgcatcatcattagcag

SEQ ID NO: 40884 - DNA, 25 bp, Probe sequence
cattactcgcatcatcattagcagt

SEQ ID NO: 40885 - DNA, 25 bp, Probe sequence
aagtacaatcacaagaagttgaagc

SEQ ID NO: 40886 - DNA, 25 bp, Probe sequence
gtacaatcacaagaagttgaagcac

SEQ ID NO: 40887 - DNA, 25 bp, Probe sequence
agtacaatcacaagaagttgaagca

SEQ ID NO: 40888 - DNA, 25 bp, Probe sequence
tacaatcacaagaagttgaagcacc

SEQ ID NO: 40889 - DNA, 25 bp, Probe sequence
caagtacaatcacaagaagttgaag

SEQ ID NO: 40890 - DNA, 25 bp, Probe sequence
attactcgcatcatcattagcagta

SEQ ID NO: 40891 - DNA, 25 bp, Probe sequence
gttacgattattagccaagcgatta

SEQ ID NO: 40892 - DNA, 25 bp, Probe sequence
cgattattagccaagcgattatcat

SEQ ID NO: 40893 - DNA, 25 bp, Probe sequence
acgattattagccaagcgattatca

SEQ ID NO: 40894 - DNA, 25 bp, Probe sequence
tgttacgattattagccaagcgatt

SEQ ID NO: 40895 - DNA, 25 bp, Probe sequence
tacgattattagccaagcgattatc

SEQ ID NO: 40896 - DNA, 25 bp, Probe sequence
ctgttacgattattagccaagcgat

SEQ ID NO: 40897 - DNA, 25 bp, Probe sequence
tatctgttacgattattagccaagc

SEQ ID NO: 40898 - DNA, 25 bp, Probe sequence
ttacgattattagccaagcgattat

SEQ ID NO: 40899 - DNA, 25 bp, Probe sequence
atctgttacgattattagccaagcg

SEQ ID NO: 40900 - DNA, 25 bp, Probe sequence
cacatcaatcataataagcggttgc

SEQ ID NO: 40901 - DNA, 25 bp, Probe sequence
gcacatcaatcataataagcggttg

SEQ ID NO: 40902 - DNA, 25 bp, Probe sequence
gcgaatcttattatgcacatcaatc

SEQ ID NO: 40903 - DNA, 25 bp, Probe sequence
tgcacatcaatcataataagcggtt

SEQ ID NO: 40904 - DNA, 25 bp, Probe sequence
atgcacatcaatcataataagcggt

SEQ ID NO: 40905 - DNA, 25 bp, Probe sequence
aaagatattccaaagacggttagcg

SEQ ID NO: 40906 - DNA, 25 bp, Probe sequence
atcaatcataataagcggttgctct

SEQ ID NO: 40907 - DNA, 25 bp, Probe sequence
catcaatcataataagcggttgctc

SEQ ID NO: 40908 - DNA, 25 bp, Probe sequence
tcaatcataataagcggttgctctt

SEQ ID NO: 40909 - DNA, 25 bp, Probe sequence
tgatgtataagcgttatgaacctga

SEQ ID NO: 40910 - DNA, 25 bp, Probe sequence
atgatgtataagcgttatgaacctg

SEQ ID NO: 40911 - DNA, 25 bp, Probe sequence
gatgtataagcgttatgaacctgaa

SEQ ID NO: 40912 - DNA, 25 bp, Probe sequence
cagagagactgttgctaactatgtt

SEQ ID NO: 40913 - DNA, 25 bp, Probe sequence
ccatgatgtataagcgttatgaacc

SEQ ID NO: 40914 - DNA, 25 bp, Probe sequence
gccatgatgtataagcgttatgaac

SEQ ID NO: 40915 - DNA, 25 bp, Probe sequence
agccatgatgtataagcgttatgaa

SEQ ID NO: 40916 - DNA, 25 bp, Probe sequence
catgatgtataagcgttatgaacct

SEQ ID NO: 40917 - DNA, 25 bp, Probe sequence
cagccatgatgtataagcgttatga

SEQ ID NO: 40918 - DNA, 25 bp, Probe sequence
gatgaacttatcgagatattagccg

SEQ ID NO: 40919 - DNA, 25 bp, Probe sequence
ggatgaacttatcgagatattagcc

SEQ ID NO: 40920 - DNA, 25 bp, Probe sequence
tgaagatagaacaaataacggagtg

SEQ ID NO: 40921 - DNA, 25 bp, Probe sequence
ttagccgatttggtaattgaagaaa

SEQ ID NO: 40922 - DNA, 25 bp, Probe sequence
gaagatagaacaaataacggagtga

SEQ ID NO: 40923 - DNA, 25 bp, Probe sequence
tggatgaacttatcgagatattagc

SEQ ID NO: 40924 - DNA, 25 bp, Probe sequence
cgagatattagccgatttggtaatt

SEQ ID NO: 40925 - DNA, 25 bp, Probe sequence
attagccgatttggtaattgaagaa

SEQ ID NO: 40926 - DNA, 25 bp, Probe sequence
agatagaacaaataacggagtgaaa

SEQ ID NO: 40927 - DNA, 25 bp, Probe sequence
tacaaggtatctcagacttaatcgc

SEQ ID NO: 40928 - DNA, 25 bp, Probe sequence
agcaatctcttctccattacttgaa

SEQ ID NO: 40929 - DNA, 25 bp, Probe sequence
aagcaatctcttctccattacttga

SEQ ID NO: 40930 - DNA, 25 bp, Probe sequence
cattaactgttggtgttgtaactcg

SEQ ID NO: 40931 - DNA, 25 bp, Probe sequence
gcattaactgttggtgttgtaactc

SEQ ID NO: 40932 - DNA, 25 bp, Probe sequence
attaactgttggtgttgtaactcgt

SEQ ID NO: 40933 - DNA, 25 bp, Probe sequence
acaaggtatctcagacttaatcgct

SEQ ID NO: 40934 - DNA, 25 bp, Probe sequence
ttaactgttggtgttgtaactcgtc

SEQ ID NO: 40935 - DNA, 25 bp, Probe sequence
acaagcaactgatagtgtaagtgaa

SEQ ID NO: 40936 - DNA, 25 bp, Probe sequence
tacattggttggtataactggtcaa

SEQ ID NO: 40937 - DNA, 25 bp, Probe sequence
gtacattggttggtataactggtca

SEQ ID NO: 40938 - DNA, 25 bp, Probe sequence
aaggtacattggttggtataactgg

SEQ ID NO: 40939 - DNA, 25 bp, Probe sequence
caaggtacattggttggtataactg

SEQ ID NO: 40940 - DNA, 25 bp, Probe sequence
tcaaggtacattggttggtataact

SEQ ID NO: 40941 - DNA, 25 bp, Probe sequence
actaatcaaggtacattggttggta

SEQ ID NO: 40942 - DNA, 25 bp, Probe sequence
ggtacattggttggtataactggtc

SEQ ID NO: 40943 - DNA, 25 bp, Probe sequence
aggtacattggttggtataactggt

SEQ ID NO: 40944 - DNA, 25 bp, Probe sequence
atcaaggtacattggttggtataac

SEQ ID NO: 40945 - DNA, 25 bp, Probe sequence
taaacaagtatcaggaaacgaacca

SEQ ID NO: 40946 - DNA, 25 bp, Probe sequence
ttgctggtattgataaatgtcgttt

SEQ ID NO: 40947 - DNA, 25 bp, Probe sequence
tttgctggtattgataaatgtcgtt

SEQ ID NO: 40948 - DNA, 25 bp, Probe sequence
aatcgctttatttgctggtattgat

SEQ ID NO: 40949 - DNA, 25 bp, Probe sequence
ttaaacaagtatcaggaaacgaacc

SEQ ID NO: 40950 - DNA, 25 bp, Probe sequence
aattatacctcacagacagccattt

SEQ ID NO: 40951 - DNA, 25 bp, Probe sequence
aaattatacctcacagacagccatt

SEQ ID NO: 40952 - DNA, 25 bp, Probe sequence
aacaagtatcaggaaacgaaccatt

SEQ ID NO: 40953 - DNA, 25 bp, Probe sequence
aaacaagtatcaggaaacgaaccat

SEQ ID NO: 40954 - DNA, 25 bp, Probe sequence
gttagcattcattggtcaacagtaa

SEQ ID NO: 40955 - DNA, 25 bp, Probe sequence
tcgttattggaccatctacatcatc

SEQ ID NO: 40956 - DNA, 25 bp, Probe sequence
cgttattggaccatctacatcatca

SEQ ID NO: 40957 - DNA, 25 bp, Probe sequence
ggaccatctacatcatcaagttatg

SEQ ID NO: 40958 - DNA, 25 bp, Probe sequence
tggaccatctacatcatcaagttat

SEQ ID NO: 40959 - DNA, 25 bp, Probe sequence
attggaccatctacatcatcaagtt

SEQ ID NO: 40960 - DNA, 25 bp, Probe sequence
ttggaccatctacatcatcaagtta

SEQ ID NO: 40961 - DNA, 25 bp, Probe sequence
tattggaccatctacatcatcaagt

SEQ ID NO: 40962 - DNA, 25 bp, Probe sequence
gttattggaccatctacatcatcaa

SEQ ID NO: 40963 - DNA, 25 bp, Probe sequence
accattgacagatgatgaagcatat

SEQ ID NO: 40964 - DNA, 25 bp, Probe sequence
ccattgacagatgatgaagcatata

SEQ ID NO: 40965 - DNA, 25 bp, Probe sequence
caccattgacagatgatgaagcata

SEQ ID NO: 40966 - DNA, 25 bp, Probe sequence
ttggtgagaatagattggaaggctt

SEQ ID NO: 40967 - DNA, 25 bp, Probe sequence
gaattgggactaaacttgtaggaga

SEQ ID NO: 40968 - DNA, 25 bp, Probe sequence
agaattgggactaaacttgtaggag

SEQ ID NO: 40969 - DNA, 25 bp, Probe sequence
acaacgactcaatttagaatatgcg

SEQ ID NO: 40970 - DNA, 25 bp, Probe sequence
aaattgtaggtttaatgacgatggc

SEQ ID NO: 40971 - DNA, 25 bp, Probe sequence
attgggactaaacttgtaggagaag

SEQ ID NO: 40972 - DNA, 25 bp, Probe sequence
atatcaatgtagaaggtcgtagtgc

SEQ ID NO: 40973 - DNA, 25 bp, Probe sequence
tgctaatatcaatgtagaaggtcgt

SEQ ID NO: 40974 - DNA, 25 bp, Probe sequence
gatagaattgaagcaggcacattac

SEQ ID NO: 40975 - DNA, 25 bp, Probe sequence
agatagaattgaagcaggcacatta

SEQ ID NO: 40976 - DNA, 25 bp, Probe sequence
atagaattgaagcaggcacattact

SEQ ID NO: 40977 - DNA, 25 bp, Probe sequence
atcaatgtagaaggtcgtagtgcta

SEQ ID NO: 40978 - DNA, 25 bp, Probe sequence
tatcaatgtagaaggtcgtagtgct

SEQ ID NO: 40979 - DNA, 25 bp, Probe sequence
actgaattaacgcacctagatagag

SEQ ID NO: 40980 - DNA, 25 bp, Probe sequence
tcaatgtagaaggtcgtagtgctaa

SEQ ID NO: 40981 - DNA, 25 bp, Probe sequence
gtaactatgaacaatgctacaccaa

SEQ ID NO: 40982 - DNA, 25 bp, Probe sequence
atgatgaagaggaagtagaagtacc

SEQ ID NO: 40983 - DNA, 25 bp, Probe sequence
agatgatgaagaggaagtagaagta

SEQ ID NO: 40984 - DNA, 25 bp, Probe sequence
tagatgatgaagaggaagtagaagt

SEQ ID NO: 40985 - DNA, 25 bp, Probe sequence
agatacacaagatattgctgatgag

SEQ ID NO: 40986 - DNA, 25 bp, Probe sequence
ttatgtacgcctgataatgtggaag

SEQ ID NO: 40987 - DNA, 25 bp, Probe sequence
cttatgtacgcctgataatgtggaa

SEQ ID NO: 40988 - DNA, 25 bp, Probe sequence
ttcttatgtacgcctgataatgtgg

SEQ ID NO: 40989 - DNA, 25 bp, Probe sequence
tatgtacgcctgataatgtggaagt

SEQ ID NO: 40990 - DNA, 25 bp, Probe sequence
tggattatatcggacaatatgcagt

SEQ ID NO: 40991 - DNA, 25 bp, Probe sequence
ggattatatcggacaatatgcagtt

SEQ ID NO: 40992 - DNA, 25 bp, Probe sequence
atggattatatcggacaatatgcag

SEQ ID NO: 40993 - DNA, 25 bp, Probe sequence
tatcggacaatatgcagttatccat

SEQ ID NO: 40994 - DNA, 25 bp, Probe sequence
atatcggacaatatgcagttatcca

SEQ ID NO: 40995 - DNA, 25 bp, Probe sequence
atcggacaatatgcagttatccatt

SEQ ID NO: 40996 - DNA, 25 bp, Probe sequence
gtatgtatttgtattgcctattggg

SEQ ID NO: 40997 - DNA, 25 bp, Probe sequence
caagtgtgtatgatatttgttgcta

SEQ ID NO: 40998 - DNA, 25 bp, Probe sequence
gcagttatccatttagtgttacatg

SEQ ID NO: 40999 - DNA, 25 bp, Probe sequence
atatcatcaatcgctgcaattatcg

SEQ ID NO: 41000 - DNA, 25 bp, Probe sequence
gacatatcatcaatcgctgcaatta

SEQ ID NO: 41001 - DNA, 25 bp, Probe sequence
acatatcatcaatcgctgcaattat

SEQ ID NO: 41002 - DNA, 25 bp, Probe sequence
tatcatcaatcgctgcaattatcgt

SEQ ID NO: 41003 - DNA, 25 bp, Probe sequence
catatcatcaatcgctgcaattatc

SEQ ID NO: 41004 - DNA, 25 bp, Probe sequence
atcatcaatcgctgcaattatcgtt

SEQ ID NO: 41005 - DNA, 25 bp, Probe sequence
tgaacctttcttacaaccatttaga

SEQ ID NO: 41006 - DNA, 25 bp, Probe sequence
acctattggaattatcgacatatca

SEQ ID NO: 41007 - DNA, 25 bp, Probe sequence
cacctattggaattatcgacatatc

SEQ ID NO: 41008 - DNA, 25 bp, Probe sequence
tattgtcactcctaatggttctgtt

SEQ ID NO: 41009 - DNA, 25 bp, Probe sequence
aatcgtgataatgttgaactcgttg

SEQ ID NO: 41010 - DNA, 25 bp, Probe sequence
atattgtcactcctaatggttctgt

SEQ ID NO: 41011 - DNA, 25 bp, Probe sequence
gatattgtcactcctaatggttctg

SEQ ID NO: 41012 - DNA, 25 bp, Probe sequence
cgtgataatgttgaactcgttgtta

SEQ ID NO: 41013 - DNA, 25 bp, Probe sequence
atcgtgataatgttgaactcgttgt

SEQ ID NO: 41014 - DNA, 25 bp, Probe sequence
caatcgtgataatgttgaactcgtt

SEQ ID NO: 41015 - DNA, 25 bp, Probe sequence
gataatgttgaactcgttgttatgc

SEQ ID NO: 41016 - DNA, 25 bp, Probe sequence
cctagatattgtcactcctaatggt

SEQ ID NO: 41017 - DNA, 25 bp, Probe sequence
acattacttatgcgtcatttattgc

SEQ ID NO: 41018 - DNA, 25 bp, Probe sequence
cattacttatgcgtcatttattgct

SEQ ID NO: 41019 - DNA, 25 bp, Probe sequence
ttacttatgcgtcatttattgctaa

SEQ ID NO: 41020 - DNA, 25 bp, Probe sequence
tacttatgcgtcatttattgctaaa

SEQ ID NO: 41021 - DNA, 25 bp, Probe sequence
attacttatgcgtcatttattgcta

SEQ ID NO: 41022 - DNA, 25 bp, Probe sequence
aacattacttatgcgtcatttattg

SEQ ID NO: 41023 - DNA, 25 bp, Probe sequence
acttatgcgtcatttattgctaaaa

SEQ ID NO: 41024 - DNA, 25 bp, Probe sequence
atttaacattacttatgcgtcattt

SEQ ID NO: 41025 - DNA, 25 bp, Probe sequence
tttaacattacttatgcgtcattta

SEQ ID NO: 41026 - DNA, 25 bp, Probe sequence
ggcattccaatttctaaagagagtt

SEQ ID NO: 41027 - DNA, 25 bp, Probe sequence
gcattccaatttctaaagagagttt

SEQ ID NO: 41028 - DNA, 25 bp, Probe sequence
gtggcattccaatttctaaagagag

SEQ ID NO: 41029 - DNA, 25 bp, Probe sequence
tggcattccaatttctaaagagagt

SEQ ID NO: 41030 - DNA, 25 bp, Probe sequence
taaagagagtttcattacctttggt

SEQ ID NO: 41031 - DNA, 25 bp, Probe sequence
tccaatttctaaagagagtttcatt

SEQ ID NO: 41032 - DNA, 25 bp, Probe sequence
ttccaatttctaaagagagtttcat

SEQ ID NO: 41033 - DNA, 25 bp, Probe sequence
attccaatttctaaagagagtttca

SEQ ID NO: 41034 - DNA, 25 bp, Probe sequence
cattccaatttctaaagagagtttc

SEQ ID NO: 41035 - DNA, 25 bp, Probe sequence
aagcaggacagttattaaatcggta

SEQ ID NO: 41036 - DNA, 25 bp, Probe sequence
gagaagcaggacagttattaaatcg

SEQ ID NO: 41037 - DNA, 25 bp, Probe sequence
cgagaagcaggacagttattaaatc

SEQ ID NO: 41038 - DNA, 25 bp, Probe sequence
acgagaagcaggacagttattaaat

SEQ ID NO: 41039 - DNA, 25 bp, Probe sequence
gcaggacagttattaaatcggtaga

SEQ ID NO: 41040 - DNA, 25 bp, Probe sequence
agcaggacagttattaaatcggtag

SEQ ID NO: 41041 - DNA, 25 bp, Probe sequence
agaagcaggacagttattaaatcgg

SEQ ID NO: 41042 - DNA, 25 bp, Probe sequence
gaagcaggacagttattaaatcggt

SEQ ID NO: 41043 - DNA, 25 bp, Probe sequence
aacgagaagcaggacagttattaaa

SEQ ID NO: 41044 - DNA, 25 bp, Probe sequence
gtagagcacacattactgacttagg

SEQ ID NO: 41045 - DNA, 25 bp, Probe sequence
ggtagagcacacattactgacttag

SEQ ID NO: 41046 - DNA, 25 bp, Probe sequence
tagagcacacattactgacttaggt

SEQ ID NO: 41047 - DNA, 25 bp, Probe sequence
tggtagagcacacattactgactta

SEQ ID NO: 41048 - DNA, 25 bp, Probe sequence
cacactattgttgattcagcagatt

SEQ ID NO: 41049 - DNA, 25 bp, Probe sequence
tcacactattgttgattcagcagat

SEQ ID NO: 41050 - DNA, 25 bp, Probe sequence
ttggtagagcacacattactgactt

SEQ ID NO: 41051 - DNA, 25 bp, Probe sequence
tggagatataattgtgaatgaacga

SEQ ID NO: 41052 - DNA, 25 bp, Probe sequence
cacacattactgacttaggtggtaa

SEQ ID NO: 41053 - DNA, 25 bp, Probe sequence
attgctatcttaggtatggacgaat

SEQ ID NO: 41054 - DNA, 25 bp, Probe sequence
ttgctatcttaggtatggacgaatt

SEQ ID NO: 41055 - DNA, 25 bp, Probe sequence
cattgctatcttaggtatggacgaa

SEQ ID NO: 41056 - DNA, 25 bp, Probe sequence
atcattgctatcttaggtatggacg

SEQ ID NO: 41057 - DNA, 25 bp, Probe sequence
aggtatggacgaattatctgatgaa

SEQ ID NO: 41058 - DNA, 25 bp, Probe sequence
ggtatggacgaattatctgatgaag

SEQ ID NO: 41059 - DNA, 25 bp, Probe sequence
tcattgctatcttaggtatggacga

SEQ ID NO: 41060 - DNA, 25 bp, Probe sequence
tgctatcttaggtatggacgaatta

SEQ ID NO: 41061 - DNA, 25 bp, Probe sequence
taggtatggacgaattatctgatga

SEQ ID NO: 41062 - DNA, 25 bp, Probe sequence
gatttaaagccagatgaagttgcag

SEQ ID NO: 41063 - DNA, 25 bp, Probe sequence
atttaaagccagatgaagttgcagc

SEQ ID NO: 41064 - DNA, 25 bp, Probe sequence
tttaaagccagatgaagttgcagca

SEQ ID NO: 41065 - DNA, 25 bp, Probe sequence
taaagccagatgaagttgcagcaaa

SEQ ID NO: 41066 - DNA, 25 bp, Probe sequence
ttaaagccagatgaagttgcagcaa

SEQ ID NO: 41067 - DNA, 25 bp, Probe sequence
aaagccagatgaagttgcagcaaat

SEQ ID NO: 41068 - DNA, 25 bp, Probe sequence
aagccagatgaagttgcagcaaatg

SEQ ID NO: 41069 - DNA, 25 bp, Probe sequence
tagaatataacagagcgagacaagc

SEQ ID NO: 41070 - DNA, 25 bp, Probe sequence
acatcaagatagtagcgaatacagt

SEQ ID NO: 41071 - DNA, 25 bp, Probe sequence
tatagtcattatgtcagcgttcttg

SEQ ID NO: 41072 - DNA, 25 bp, Probe sequence
agtgtaatcttgcctcaatatgttg

SEQ ID NO: 41073 - DNA, 25 bp, Probe sequence
aacatcaagatagtagcgaatacag

SEQ ID NO: 41074 - DNA, 25 bp, Probe sequence
atagtcattatgtcagcgttcttga

SEQ ID NO: 41075 - DNA, 25 bp, Probe sequence
tagtcattatgtcagcgttcttgaa

SEQ ID NO: 41076 - DNA, 25 bp, Probe sequence
gaatataacagagcgagacaagcag

SEQ ID NO: 41077 - DNA, 25 bp, Probe sequence
ttagaatataacagagcgagacaag

SEQ ID NO: 41078 - DNA, 25 bp, Probe sequence
acatcagacaataatcaacaatcca

SEQ ID NO: 41079 - DNA, 25 bp, Probe sequence
tcagacaataatcaacaatccaatg

SEQ ID NO: 41080 - DNA, 25 bp, Probe sequence
catcagacaataatcaacaatccaa

SEQ ID NO: 41081 - DNA, 25 bp, Probe sequence
tacatcagacaataatcaacaatcc

SEQ ID NO: 41082 - DNA, 25 bp, Probe sequence
atcagacaataatcaacaatccaat

SEQ ID NO: 41083 - DNA, 25 bp, Probe sequence
gagaaacaagctgaagcgattatag

SEQ ID NO: 41084 - DNA, 25 bp, Probe sequence
agagaaacaagctgaagcgattata

SEQ ID NO: 41085 - DNA, 25 bp, Probe sequence
gatttaaagccagatgaagttgcat

SEQ ID NO: 41086 - DNA, 25 bp, Probe sequence
gaagttgcatcaaatacatcagaca

SEQ ID NO: 41087 - DNA, 25 bp, Probe sequence
atagaacaagacagaaggcagtatg

SEQ ID NO: 41088 - DNA, 25 bp, Probe sequence
ttatagaacaagacagaaggcagta

SEQ ID NO: 41089 - DNA, 25 bp, Probe sequence
aaccagagcatattcagtcacttac

SEQ ID NO: 41090 - DNA, 25 bp, Probe sequence
caaccagagcatattcagtcactta

SEQ ID NO: 41091 - DNA, 25 bp, Probe sequence
tatagaacaagacagaaggcagtat

SEQ ID NO: 41092 - DNA, 25 bp, Probe sequence
tagaacaagacagaaggcagtatga

SEQ ID NO: 41093 - DNA, 25 bp, Probe sequence
gttatagaacaagacagaaggcagt

SEQ ID NO: 41094 - DNA, 25 bp, Probe sequence
gagcaatatgatgattcaaggtcac

SEQ ID NO: 41095 - DNA, 25 bp, Probe sequence
gtgagcaatatgatgattcaaggtc

SEQ ID NO: 41096 - DNA, 25 bp, Probe sequence
aatgtaatgacgccagatatgttaa

SEQ ID NO: 41097 - DNA, 25 bp, Probe sequence
ccgaactactaaccagtaacttcat

SEQ ID NO: 41098 - DNA, 25 bp, Probe sequence
ctccgaactactaaccagtaacttc

SEQ ID NO: 41099 - DNA, 25 bp, Probe sequence
tccgaactactaaccagtaacttca

SEQ ID NO: 41100 - DNA, 25 bp, Probe sequence
actccgaactactaaccagtaactt

SEQ ID NO: 41101 - DNA, 25 bp, Probe sequence
aactccgaactactaaccagtaact

SEQ ID NO: 41102 - DNA, 25 bp, Probe sequence
tttacaaactccgaactactaacca

SEQ ID NO: 41103 - DNA, 25 bp, Probe sequence
caaatgtaatgacgccagatatgtt

SEQ ID NO: 41104 - DNA, 25 bp, Probe sequence
ttacaaactccgaactactaaccag

SEQ ID NO: 41105 - DNA, 25 bp, Probe sequence
gtaggtgaagaactaatcggaagag

SEQ ID NO: 41106 - DNA, 25 bp, Probe sequence
gacaaggaccgattaacacaactaa

SEQ ID NO: 41107 - DNA, 25 bp, Probe sequence
ctattgatggacaaggaccgattaa

SEQ ID NO: 41108 - DNA, 25 bp, Probe sequence
tattgatggacaaggaccgattaac

SEQ ID NO: 41109 - DNA, 25 bp, Probe sequence
gcttctgaaccttctccattattat

SEQ ID NO: 41110 - DNA, 25 bp, Probe sequence
ggtattactgaaggtgacgaagtta

SEQ ID NO: 41111 - DNA, 25 bp, Probe sequence
taggtgaagaactaatcggaagagt

SEQ ID NO: 41112 - DNA, 25 bp, Probe sequence
agtaggtgaagaactaatcggaaga

SEQ ID NO: 41113 - DNA, 25 bp, Probe sequence
cagtaggtgaagaactaatcggaag

SEQ ID NO: 41114 - DNA, 25 bp, Probe sequence
gttaggtattccagatgacgctatt

SEQ ID NO: 41115 - DNA, 25 bp, Probe sequence
attccagatgacgctattataggtg

SEQ ID NO: 41116 - DNA, 25 bp, Probe sequence
ttaggtattccagatgacgctatta

SEQ ID NO: 41117 - DNA, 25 bp, Probe sequence
taggtattccagatgacgctattat

SEQ ID NO: 41118 - DNA, 25 bp, Probe sequence
aggtattccagatgacgctattata

SEQ ID NO: 41119 - DNA, 25 bp, Probe sequence
atacagcctgcttcgttatcattat

SEQ ID NO: 41120 - DNA, 25 bp, Probe sequence
tatacagcctgcttcgttatcatta

SEQ ID NO: 41121 - DNA, 25 bp, Probe sequence
tacagcctgcttcgttatcattatt

SEQ ID NO: 41122 - DNA, 25 bp, Probe sequence
tattccagatgacgctattataggt

SEQ ID NO: 41123 - DNA, 25 bp, Probe sequence
gtcgtgagttgattaatggtgtatt

SEQ ID NO: 41124 - DNA, 25 bp, Probe sequence
tcggcacaactgtattagatggtag

SEQ ID NO: 41125 - DNA, 25 bp, Probe sequence
gcacaactgtattagatggtagtgt

SEQ ID NO: 41126 - DNA, 25 bp, Probe sequence
atataacggacactacaatcaagat

SEQ ID NO: 41127 - DNA, 25 bp, Probe sequence
cgtcgtgagttgattaatggtgtat

SEQ ID NO: 41128 - DNA, 25 bp, Probe sequence
tataacggacactacaatcaagatt

SEQ ID NO: 41129 - DNA, 25 bp, Probe sequence
ggcacaactgtattagatggtagtg

SEQ ID NO: 41130 - DNA, 25 bp, Probe sequence
gtcggcacaactgtattagatggta

SEQ ID NO: 41131 - DNA, 25 bp, Probe sequence
cacaactgtattagatggtagtgtt

SEQ ID NO: 41132 - DNA, 25 bp, Probe sequence
tggagattcatttgaagtgataccg

SEQ ID NO: 41133 - DNA, 25 bp, Probe sequence
ttggagattcatttgaagtgatacc

SEQ ID NO: 41134 - DNA, 25 bp, Probe sequence
gcagtatttgtcgttatatttgacc

SEQ ID NO: 41135 - DNA, 25 bp, Probe sequence
gagattcatttgaagtgataccgca

SEQ ID NO: 41136 - DNA, 25 bp, Probe sequence
tgtcgttatatttgaccaagttact

SEQ ID NO: 41137 - DNA, 25 bp, Probe sequence
ggagattcatttgaagtgataccgc

SEQ ID NO: 41138 - DNA, 25 bp, Probe sequence
agcagtatttgtcgttatatttgac

SEQ ID NO: 41139 - DNA, 25 bp, Probe sequence
tgcacttggaaactttattgataga

SEQ ID NO: 41140 - DNA, 25 bp, Probe sequence
agattcatttgaagtgataccgcac

SEQ ID NO: 41141 - DNA, 25 bp, Probe sequence
tgaactatcagtgttaattgcttct

SEQ ID NO: 41142 - DNA, 25 bp, Probe sequence
cgtcaacagcaagaacaaattattc

SEQ ID NO: 41143 - DNA, 25 bp, Probe sequence
gatgacgcagaacaagctaagttaa

SEQ ID NO: 41144 - DNA, 25 bp, Probe sequence
gtcaacagcaagaacaaattattca

SEQ ID NO: 41145 - DNA, 25 bp, Probe sequence
aagcattggttgacaagtatctaaa

SEQ ID NO: 41146 - DNA, 25 bp, Probe sequence
aaagcattggttgacaagtatctaa

SEQ ID NO: 41147 - DNA, 25 bp, Probe sequence
gaactatcagtgttaattgcttcta

SEQ ID NO: 41148 - DNA, 25 bp, Probe sequence
tatgattgaaacagcacaaagtgaa

SEQ ID NO: 41149 - DNA, 25 bp, Probe sequence
gtatgattgaaacagcacaaagtga

SEQ ID NO: 41150 - DNA, 25 bp, Probe sequence
cgaacatccagtaacaggtgaatat

SEQ ID NO: 41151 - DNA, 25 bp, Probe sequence
tgtagataagttgctgcctgaatta

SEQ ID NO: 41152 - DNA, 25 bp, Probe sequence
tatggctgttgttgatgatggtaag

SEQ ID NO: 41153 - DNA, 25 bp, Probe sequence
ctatggctgttgttgatgatggtaa

SEQ ID NO: 41154 - DNA, 25 bp, Probe sequence
gtagataagttgctgcctgaattaa

SEQ ID NO: 41155 - DNA, 25 bp, Probe sequence
caatctatggctgttgttgatgatg

SEQ ID NO: 41156 - DNA, 25 bp, Probe sequence
aatctatggctgttgttgatgatgg

SEQ ID NO: 41157 - DNA, 25 bp, Probe sequence
gtgtagataagttgctgcctgaatt

SEQ ID NO: 41158 - DNA, 25 bp, Probe sequence
tctatggctgttgttgatgatggta

SEQ ID NO: 41159 - DNA, 25 bp, Probe sequence
ggtatcatgttcattggtgtaggtt

SEQ ID NO: 41160 - DNA, 25 bp, Probe sequence
ttatcagcattaggagcaggtatcg

SEQ ID NO: 41161 - DNA, 25 bp, Probe sequence
ttagttgaggcattacctatcatcg

SEQ ID NO: 41162 - DNA, 25 bp, Probe sequence
tacctatcatcggtgtagtaattgc

SEQ ID NO: 41163 - DNA, 25 bp, Probe sequence
gcattacctatcatcggtgtagtaa

SEQ ID NO: 41164 - DNA, 25 bp, Probe sequence
cctatcatcggtgtagtaattgcat

SEQ ID NO: 41165 - DNA, 25 bp, Probe sequence
tttatcagcattaggagcaggtatc

SEQ ID NO: 41166 - DNA, 25 bp, Probe sequence
tcatcggtgtagtaattgcattcat

SEQ ID NO: 41167 - DNA, 25 bp, Probe sequence
atcatcggtgtagtaattgcattca

SEQ ID NO: 41168 - DNA, 25 bp, Probe sequence
ataatggatgatgccgcaatacaac

SEQ ID NO: 41169 - DNA, 25 bp, Probe sequence
agacatcgacacagatattacagat

SEQ ID NO: 41170 - DNA, 25 bp, Probe sequence
tagacatcgacacagatattacaga

SEQ ID NO: 41171 - DNA, 25 bp, Probe sequence
cgcaatagacatcgacacagatatt

SEQ ID NO: 41172 - DNA, 25 bp, Probe sequence
acaacgtatacctactggaacaatt

SEQ ID NO: 41173 - DNA, 25 bp, Probe sequence
aacaacgtatacctactggaacaat

SEQ ID NO: 41174 - DNA, 25 bp, Probe sequence
gaggaaacggtaagtgtctatttag

SEQ ID NO: 41175 - DNA, 25 bp, Probe sequence
ttctaaagaggaaacggtaagtgtc

SEQ ID NO: 41176 - DNA, 25 bp, Probe sequence
cttctaaagaggaaacggtaagtgt

SEQ ID NO: 41177 - DNA, 25 bp, Probe sequence
tatattgatgatacttgttacggcg

SEQ ID NO: 41178 - DNA, 25 bp, Probe sequence
taacattacttgctggcttattctt

SEQ ID NO: 41179 - DNA, 25 bp, Probe sequence
ttaacattacttgctggcttattct

SEQ ID NO: 41180 - DNA, 25 bp, Probe sequence
gtcaattccacttcttagcagtaac

SEQ ID NO: 41181 - DNA, 25 bp, Probe sequence
atattgatgatacttgttacggcgt

SEQ ID NO: 41182 - DNA, 25 bp, Probe sequence
agagttcacttcaacattaacgctt

SEQ ID NO: 41183 - DNA, 25 bp, Probe sequence
aagagttcacttcaacattaacgct

SEQ ID NO: 41184 - DNA, 25 bp, Probe sequence
ggtcaattccacttcttagcagtaa

SEQ ID NO: 41185 - DNA, 25 bp, Probe sequence
tattgatgatacttgttacggcgtt

SEQ ID NO: 41186 - DNA, 25 bp, Probe sequence
tattatcgtaggttatgtggtagcg

SEQ ID NO: 41187 - DNA, 25 bp, Probe sequence
ttagcattcattggtaagttcactg

SEQ ID NO: 41188 - DNA, 25 bp, Probe sequence
gtattatcgtaggttatgtggtagc

SEQ ID NO: 41189 - DNA, 25 bp, Probe sequence
aggtattatcgtaggttatgtggta

SEQ ID NO: 41190 - DNA, 25 bp, Probe sequence
taggtattatcgtaggttatgtggt

SEQ ID NO: 41191 - DNA, 25 bp, Probe sequence
ggtattatcgtaggttatgtggtag

SEQ ID NO: 41192 - DNA, 25 bp, Probe sequence
gtaggtattatcgtaggttatgtgg

SEQ ID NO: 41193 - DNA, 25 bp, Probe sequence
tgtaggtattatcgtaggttatgtg

SEQ ID NO: 41194 - DNA, 25 bp, Probe sequence
caatgataaccttgcttgtaacaat

SEQ ID NO: 41195 - DNA, 25 bp, Probe sequence
agaggagtagaaatacaaagcgatt

SEQ ID NO: 41196 - DNA, 25 bp, Probe sequence
aaggcttgaatgtattgatttgtgg

SEQ ID NO: 41197 - DNA, 25 bp, Probe sequence
tgaaggcttgaatgtattgatttgt

SEQ ID NO: 41198 - DNA, 25 bp, Probe sequence
gaaggcttgaatgtattgatttgtg

SEQ ID NO: 41199 - DNA, 25 bp, Probe sequence
tagaggagtagaaatacaaagcgat

SEQ ID NO: 41200 - DNA, 25 bp, Probe sequence
atagaggagtagaaatacaaagcga

SEQ ID NO: 41201 - DNA, 25 bp, Probe sequence
ttgaaggcttgaatgtattgatttg

SEQ ID NO: 41202 - DNA, 25 bp, Probe sequence
aaactttgaagggaaatatgtcgca

SEQ ID NO: 41203 - DNA, 25 bp, Probe sequence
aatagaggagtagaaatacaaagcg

SEQ ID NO: 41204 - DNA, 25 bp, Probe sequence
atgtctgaagcatctaatccttacg

SEQ ID NO: 41205 - DNA, 25 bp, Probe sequence
gaggtgaatagacaattagttggtg

SEQ ID NO: 41206 - DNA, 25 bp, Probe sequence
agaggtgaatagacaattagttggt

SEQ ID NO: 41207 - DNA, 25 bp, Probe sequence
aatgtctgaagcatctaatccttac

SEQ ID NO: 41208 - DNA, 25 bp, Probe sequence
tgaagcatctaatccttacggtgat

SEQ ID NO: 41209 - DNA, 25 bp, Probe sequence
aggtgaatagacaattagttggtgt

SEQ ID NO: 41210 - DNA, 25 bp, Probe sequence
atgacagaattgaattgattgaacc

SEQ ID NO: 41211 - DNA, 25 bp, Probe sequence
aagaggtgaatagacaattagttgg

SEQ ID NO: 41212 - DNA, 25 bp, Probe sequence
ctgaagcatctaatccttacggtga

SEQ ID NO: 41213 - DNA, 25 bp, Probe sequence
taccttatgcttcaattacaacacg

SEQ ID NO: 41214 - DNA, 25 bp, Probe sequence
aatccgatcttaacaatggttgaag

SEQ ID NO: 41215 - DNA, 25 bp, Probe sequence
gcaggttgtcattatcatgtatgtc

SEQ ID NO: 41216 - DNA, 25 bp, Probe sequence
cagcaggttgtcattatcatgtatg

SEQ ID NO: 41217 - DNA, 25 bp, Probe sequence
agcaggttgtcattatcatgtatgt

SEQ ID NO: 41218 - DNA, 25 bp, Probe sequence
agatgatattcctggtaataatgcc

SEQ ID NO: 41219 - DNA, 25 bp, Probe sequence
ttacaactgtatgtccaatgcctaa

SEQ ID NO: 41220 - DNA, 25 bp, Probe sequence
atcttaacaatggttgaaggcgaag

SEQ ID NO: 41221 - DNA, 25 bp, Probe sequence
atccgatcttaacaatggttgaagg

SEQ ID NO: 41222 - DNA, 25 bp, Probe sequence
ttgtagacgaagttggtatgttgat

SEQ ID NO: 41223 - DNA, 25 bp, Probe sequence
tgtagacgaagttggtatgttgatg

SEQ ID NO: 41224 - DNA, 25 bp, Probe sequence
cttgtagacgaagttggtatgttga

SEQ ID NO: 41225 - DNA, 25 bp, Probe sequence
gtagacgaagttggtatgttgatgg

SEQ ID NO: 41226 - DNA, 25 bp, Probe sequence
cattgttgttgatcctatgttagca

SEQ ID NO: 41227 - DNA, 25 bp, Probe sequence
tcattgttgttgatcctatgttagc

SEQ ID NO: 41228 - DNA, 25 bp, Probe sequence
attgttgttgatcctatgttagcaa

SEQ ID NO: 41229 - DNA, 25 bp, Probe sequence
aactagagacttagagcttcaggat

SEQ ID NO: 41230 - DNA, 25 bp, Probe sequence
taactagagacttagagcttcagga

SEQ ID NO: 41231 - DNA, 25 bp, Probe sequence
gtaatcctgaagttgtagaatgtgc

SEQ ID NO: 41232 - DNA, 25 bp, Probe sequence
ggtaatcctgaagttgtagaatgtg

SEQ ID NO: 41233 - DNA, 25 bp, Probe sequence
taccatatacaactactgccgaaga

SEQ ID NO: 41234 - DNA, 25 bp, Probe sequence
taatcctgaagttgtagaatgtgcg

SEQ ID NO: 41235 - DNA, 25 bp, Probe sequence
accatatacaactactgccgaagaa

SEQ ID NO: 41236 - DNA, 25 bp, Probe sequence
tcagatccatcatatacaggtcaga

SEQ ID NO: 41237 - DNA, 25 bp, Probe sequence
ttcagatccatcatatacaggtcag

SEQ ID NO: 41238 - DNA, 25 bp, Probe sequence
gtaccatatacaactactgccgaag

SEQ ID NO: 41239 - DNA, 25 bp, Probe sequence
cagatccatcatatacaggtcagat

SEQ ID NO: 41240 - DNA, 25 bp, Probe sequence
gagcatcagcatattcaagaacaat

SEQ ID NO: 41241 - DNA, 25 bp, Probe sequence
taataagtatgctgaaggctatcca

SEQ ID NO: 41242 - DNA, 25 bp, Probe sequence
agcatcagcatattcaagaacaatt

SEQ ID NO: 41243 - DNA, 25 bp, Probe sequence
ctaataagtatgctgaaggctatcc

SEQ ID NO: 41244 - DNA, 25 bp, Probe sequence
atagcaacatagagttaatcgcatc

SEQ ID NO: 41245 - DNA, 25 bp, Probe sequence
ttgactaataagtatgctgaaggct

SEQ ID NO: 41246 - DNA, 25 bp, Probe sequence
gttgactaataagtatgctgaaggc

SEQ ID NO: 41247 - DNA, 25 bp, Probe sequence
tagcaacatagagttaatcgcatcg

SEQ ID NO: 41248 - DNA, 25 bp, Probe sequence
ggagcatcagcatattcaagaacaa

SEQ ID NO: 41249 - DNA, 25 bp, Probe sequence
cacaccaagatgatgaacgattatt

SEQ ID NO: 41250 - DNA, 25 bp, Probe sequence
aagtggtgtgcttcaagataataac

SEQ ID NO: 41251 - DNA, 25 bp, Probe sequence
gctaatgccttaacgaatgtaattg

SEQ ID NO: 41252 - DNA, 25 bp, Probe sequence
ttagtattaggctctggaccaattc

SEQ ID NO: 41253 - DNA, 25 bp, Probe sequence
cttagtattaggctctggaccaatt

SEQ ID NO: 41254 - DNA, 25 bp, Probe sequence
tcttagtattaggctctggaccaat

SEQ ID NO: 41255 - DNA, 25 bp, Probe sequence
atcttagtattaggctctggaccaa

SEQ ID NO: 41256 - DNA, 25 bp, Probe sequence
aatcttagtattaggctctggacca

SEQ ID NO: 41257 - DNA, 25 bp, Probe sequence
aacatcaattcaacaagcagaagac

SEQ ID NO: 41258 - DNA, 25 bp, Probe sequence
gtgaacatatcaacagagcgataac

SEQ ID NO: 41259 - DNA, 25 bp, Probe sequence
tgaacatatcaacagagcgataaca

SEQ ID NO: 41260 - DNA, 25 bp, Probe sequence
tgtgaacatatcaacagagcgataa

SEQ ID NO: 41261 - DNA, 25 bp, Probe sequence
gaacatatcaacagagcgataacaa

SEQ ID NO: 41262 - DNA, 25 bp, Probe sequence
aacatatcaacagagcgataacaat

SEQ ID NO: 41263 - DNA, 25 bp, Probe sequence
tcaaggatgtgaacatatcaacaga

SEQ ID NO: 41264 - DNA, 25 bp, Probe sequence
atgtgaacatatcaacagagcgata

SEQ ID NO: 41265 - DNA, 25 bp, Probe sequence
caaggatgtgaacatatcaacagag

SEQ ID NO: 41266 - DNA, 25 bp, Probe sequence
aattgtaactattgccacatctagg

SEQ ID NO: 41267 - DNA, 25 bp, Probe sequence
gcaagttctggcattagagagtaat

SEQ ID NO: 41268 - DNA, 25 bp, Probe sequence
agcaagttctggcattagagagtaa

SEQ ID NO: 41269 - DNA, 25 bp, Probe sequence
caagttctggcattagagagtaata

SEQ ID NO: 41270 - DNA, 25 bp, Probe sequence
aagttctggcattagagagtaataa

SEQ ID NO: 41271 - DNA, 25 bp, Probe sequence
aatcagcaagttctggcattagaga

SEQ ID NO: 41272 - DNA, 25 bp, Probe sequence
cagcaagttctggcattagagagta

SEQ ID NO: 41273 - DNA, 25 bp, Probe sequence
atcagcaagttctggcattagagag

SEQ ID NO: 41274 - DNA, 25 bp, Probe sequence
agttctggcattagagagtaataaa

SEQ ID NO: 41275 - DNA, 25 bp, Probe sequence
gcgatgctcaaatagtagaaatact

SEQ ID NO: 41276 - DNA, 25 bp, Probe sequence
gactcgcaactgttattacattgat

SEQ ID NO: 41277 - DNA, 25 bp, Probe sequence
actcgcaactgttattacattgatt

SEQ ID NO: 41278 - DNA, 25 bp, Probe sequence
atatgtggattggtatgctaggctt

SEQ ID NO: 41279 - DNA, 25 bp, Probe sequence
aatatgtggattggtatgctaggct

SEQ ID NO: 41280 - DNA, 25 bp, Probe sequence
ggtcttattgcagccatattacttg

SEQ ID NO: 41281 - DNA, 25 bp, Probe sequence
aggtcttattgcagccatattactt

SEQ ID NO: 41282 - DNA, 25 bp, Probe sequence
ttcaggtcttattgcagccatatta

SEQ ID NO: 41283 - DNA, 25 bp, Probe sequence
cgactcgcaactgttattacattga

SEQ ID NO: 41284 - DNA, 25 bp, Probe sequence
caggtcttattgcagccatattact

SEQ ID NO: 41285 - DNA, 25 bp, Probe sequence
ttgaatcatctagcaggtattaatt

SEQ ID NO: 41286 - DNA, 25 bp, Probe sequence
cgtcctgtcaaaatgaatagtttat

SEQ ID NO: 41287 - DNA, 25 bp, Probe sequence
tgaatcatctagcaggtattaattt

SEQ ID NO: 41288 - DNA, 25 bp, Probe sequence
tttgaatcatctagcaggtattaat

SEQ ID NO: 41289 - DNA, 25 bp, Probe sequence
cacgtcctgtcaaaatgaatagttt

SEQ ID NO: 41290 - DNA, 25 bp, Probe sequence
tcacgtcctgtcaaaatgaatagtt

SEQ ID NO: 41291 - DNA, 25 bp, Probe sequence
atgtcacgtcctgtcaaaatgaata

SEQ ID NO: 41292 - DNA, 25 bp, Probe sequence
gattgaaatgtcacgtcctgtcaaa

SEQ ID NO: 41293 - DNA, 25 bp, Probe sequence
acgtcctgtcaaaatgaatagttta

SEQ ID NO: 41294 - DNA, 25 bp, Probe sequence
aattattgcagtaacacagcttacg

SEQ ID NO: 41295 - DNA, 25 bp, Probe sequence
tagaccgattacacaaagtgacaat

SEQ ID NO: 41296 - DNA, 25 bp, Probe sequence
atgttgatctggtaaatgttcatgc

SEQ ID NO: 41297 - DNA, 25 bp, Probe sequence
gttgatctggtaaatgttcatgctg

SEQ ID NO: 41298 - DNA, 25 bp, Probe sequence
attattgcagtaacacagcttacgt

SEQ ID NO: 41299 - DNA, 25 bp, Probe sequence
tcacctcttgaaagtcgtatgttga

SEQ ID NO: 41300 - DNA, 25 bp, Probe sequence
gtagaccgattacacaaagtgacaa

SEQ ID NO: 41301 - DNA, 25 bp, Probe sequence
tgttgatctggtaaatgttcatgct

SEQ ID NO: 41302 - DNA, 25 bp, Probe sequence
taacacagcttacgtcaacaacaga

SEQ ID NO: 41303 - DNA, 25 bp, Probe sequence
aagaggtatattcgctgtgaacaat

SEQ ID NO: 41304 - DNA, 25 bp, Probe sequence
agaggtatattcgctgtgaacaatc

SEQ ID NO: 41305 - DNA, 25 bp, Probe sequence
aatcaagaggtatattcgctgtgaa

SEQ ID NO: 41306 - DNA, 25 bp, Probe sequence
gtatattcgctgtgaacaatcaagg

SEQ ID NO: 41307 - DNA, 25 bp, Probe sequence
ggtatattcgctgtgaacaatcaag

SEQ ID NO: 41308 - DNA, 25 bp, Probe sequence
caagaggtatattcgctgtgaacaa

SEQ ID NO: 41309 - DNA, 25 bp, Probe sequence
atcaagaggtatattcgctgtgaac

SEQ ID NO: 41310 - DNA, 25 bp, Probe sequence
tatattcgctgtgaacaatcaaggt

SEQ ID NO: 41311 - DNA, 25 bp, Probe sequence
aggtatattcgctgtgaacaatcaa

SEQ ID NO: 41312 - DNA, 25 bp, Probe sequence
tgaatggagagacaacttagcataa

SEQ ID NO: 41313 - DNA, 25 bp, Probe sequence
ttgaatggagagacaacttagcata

SEQ ID NO: 41314 - DNA, 25 bp, Probe sequence
attgaagctgtaacattatcaccaa

SEQ ID NO: 41315 - DNA, 25 bp, Probe sequence
tgttcgttcatcaaataagagtcat

SEQ ID NO: 41316 - DNA, 25 bp, Probe sequence
atgttcgttcatcaaataagagtca

SEQ ID NO: 41317 - DNA, 25 bp, Probe sequence
tattgaagctgtaacattatcacca

SEQ ID NO: 41318 - DNA, 25 bp, Probe sequence
tcgttcatcaaataagagtcatggt

SEQ ID NO: 41319 - DNA, 25 bp, Probe sequence
ttcgttcatcaaataagagtcatgg

SEQ ID NO: 41320 - DNA, 25 bp, Probe sequence
acatggagttcaggtattaaatcac

SEQ ID NO: 41321 - DNA, 25 bp, Probe sequence
aatacagaagcaattatgaatcgca

SEQ ID NO: 41322 - DNA, 25 bp, Probe sequence
atacagaagcaattatgaatcgcat

SEQ ID NO: 41323 - DNA, 25 bp, Probe sequence
aaggcgtgattaagttggatactaa

SEQ ID NO: 41324 - DNA, 25 bp, Probe sequence
gcaccaggtatgaagtataagcatt

SEQ ID NO: 41325 - DNA, 25 bp, Probe sequence
cgcaattcattcaattatgtcagga

SEQ ID NO: 41326 - DNA, 25 bp, Probe sequence
tccgcttattgttcatatacacagt

SEQ ID NO: 41327 - DNA, 25 bp, Probe sequence
aagccattctgtaggtagacaatta

SEQ ID NO: 41328 - DNA, 25 bp, Probe sequence
agccattctgtaggtagacaattat

SEQ ID NO: 41329 - DNA, 25 bp, Probe sequence
tacagaagcaattatgaatcgcatg

SEQ ID NO: 41330 - DNA, 25 bp, Probe sequence
atctatctagtagtcacgatgtcga

SEQ ID NO: 41331 - DNA, 25 bp, Probe sequence
ccaatctatctagtagtcacgatgt

SEQ ID NO: 41332 - DNA, 25 bp, Probe sequence
aatctatctagtagtcacgatgtcg

SEQ ID NO: 41333 - DNA, 25 bp, Probe sequence
tccaatctatctagtagtcacgatg

SEQ ID NO: 41334 - DNA, 25 bp, Probe sequence
attccaatctatctagtagtcacga

SEQ ID NO: 41335 - DNA, 25 bp, Probe sequence
ttccaatctatctagtagtcacgat

SEQ ID NO: 41336 - DNA, 25 bp, Probe sequence
caatctatctagtagtcacgatgtc

SEQ ID NO: 41337 - DNA, 25 bp, Probe sequence
gattccaatctatctagtagtcacg

SEQ ID NO: 41338 - DNA, 25 bp, Probe sequence
tgattccaatctatctagtagtcac

SEQ ID NO: 41339 - DNA, 25 bp, Probe sequence
tgaatatggctcgtaataatgctga

SEQ ID NO: 41340 - DNA, 25 bp, Probe sequence
atgaatatggctcgtaataatgctg

SEQ ID NO: 41341 - DNA, 25 bp, Probe sequence
aatgaatatggctcgtaataatgct

SEQ ID NO: 41342 - DNA, 25 bp, Probe sequence
caatgaatatggctcgtaataatgc

SEQ ID NO: 41343 - DNA, 25 bp, Probe sequence
gcaatgaatatggctcgtaataatg

SEQ ID NO: 41344 - DNA, 25 bp, Probe sequence
atatggctcgtaataatgctgagaa

SEQ ID NO: 41345 - DNA, 25 bp, Probe sequence
aatatggctcgtaataatgctgaga

SEQ ID NO: 41346 - DNA, 25 bp, Probe sequence
gaatatggctcgtaataatgctgag

SEQ ID NO: 41347 - DNA, 25 bp, Probe sequence
tatggctcgtaataatgctgagaag

SEQ ID NO: 41348 - DNA, 25 bp, Probe sequence
tataacaatggctaagtatggtgaa

SEQ ID NO: 41349 - DNA, 25 bp, Probe sequence
gtattcatggcgattgatgctaata

SEQ ID NO: 41350 - DNA, 25 bp, Probe sequence
attcatggcgattgatgctaatagt

SEQ ID NO: 41351 - DNA, 25 bp, Probe sequence
agtattcatggcgattgatgctaat

SEQ ID NO: 41352 - DNA, 25 bp, Probe sequence
tattcatggcgattgatgctaatag

SEQ ID NO: 41353 - DNA, 25 bp, Probe sequence
aagtattcatggcgattgatgctaa

SEQ ID NO: 41354 - DNA, 25 bp, Probe sequence
cagaattaccaatgaatcctgcgat

SEQ ID NO: 41355 - DNA, 25 bp, Probe sequence
tagtggcacagaattaccaatgaat

SEQ ID NO: 41356 - DNA, 25 bp, Probe sequence
atagtggcacagaattaccaatgaa

SEQ ID NO: 41357 - DNA, 25 bp, Probe sequence
cgtattcatacttcaacagctacag

SEQ ID NO: 41358 - DNA, 25 bp, Probe sequence
acgtattcatacttcaacagctaca

SEQ ID NO: 41359 - DNA, 25 bp, Probe sequence
gacgtattcatacttcaacagctac

SEQ ID NO: 41360 - DNA, 25 bp, Probe sequence
ggacgtattcatacttcaacagcta

SEQ ID NO: 41361 - DNA, 25 bp, Probe sequence
aatcaggtggacgtattcatacttc

SEQ ID NO: 41362 - DNA, 25 bp, Probe sequence
gtgacccagatgttgtaaatgattc

SEQ ID NO: 41363 - DNA, 25 bp, Probe sequence
taagtgacccagatgttgtaaatga

SEQ ID NO: 41364 - DNA, 25 bp, Probe sequence
agtgacccagatgttgtaaatgatt

SEQ ID NO: 41365 - DNA, 25 bp, Probe sequence
aagtgacccagatgttgtaaatgat

SEQ ID NO: 41366 - DNA, 25 bp, Probe sequence
aaggtgaagttgatggcgtagatta

SEQ ID NO: 41367 - DNA, 25 bp, Probe sequence
agtagaacttgcgaagaatagaatt

SEQ ID NO: 41368 - DNA, 25 bp, Probe sequence
tgtattgtagaagctgagcacttaa

SEQ ID NO: 41369 - DNA, 25 bp, Probe sequence
gctgaatatgtaggcaactattatg

SEQ ID NO: 41370 - DNA, 25 bp, Probe sequence
atgtattgtagaagctgagcactta

SEQ ID NO: 41371 - DNA, 25 bp, Probe sequence
aatgtattgtagaagctgagcactt

SEQ ID NO: 41372 - DNA, 25 bp, Probe sequence
aggtgaagttgatggcgtagattac

SEQ ID NO: 41373 - DNA, 25 bp, Probe sequence
tgaatatgtaggcaactattatggt

SEQ ID NO: 41374 - DNA, 25 bp, Probe sequence
ttcaatgtattgtagaagctgagca

SEQ ID NO: 41375 - DNA, 25 bp, Probe sequence
cgattatcttagtaggtgccaatga

SEQ ID NO: 41376 - DNA, 25 bp, Probe sequence
cgtgttattgttgctggattagata

SEQ ID NO: 41377 - DNA, 25 bp, Probe sequence
aagtggtctctcataatggtaatgc

SEQ ID NO: 41378 - DNA, 25 bp, Probe sequence
ccgattatcttagtaggtgccaatg

SEQ ID NO: 41379 - DNA, 25 bp, Probe sequence
tccgattatcttagtaggtgccaat

SEQ ID NO: 41380 - DNA, 25 bp, Probe sequence
atccgattatcttagtaggtgccaa

SEQ ID NO: 41381 - DNA, 25 bp, Probe sequence
ccgtgttattgttgctggattagat

SEQ ID NO: 41382 - DNA, 25 bp, Probe sequence
tcatctagtagaacgcaacgattaa

SEQ ID NO: 41383 - DNA, 25 bp, Probe sequence
ttcatctagtagaacgcaacgatta

SEQ ID NO: 41384 - DNA, 25 bp, Probe sequence
gagtcctatttaagtttcactgtca

SEQ ID NO: 41385 - DNA, 25 bp, Probe sequence
agagtcctatttaagtttcactgtc

SEQ ID NO: 41386 - DNA, 25 bp, Probe sequence
agtcctatttaagtttcactgtcat

SEQ ID NO: 41387 - DNA, 25 bp, Probe sequence
aagagtcctatttaagtttcactgt

SEQ ID NO: 41388 - DNA, 25 bp, Probe sequence
tttcttagttgccgctacgtttata

SEQ ID NO: 41389 - DNA, 25 bp, Probe sequence
ttcttagttgccgctacgtttatac

SEQ ID NO: 41390 - DNA, 25 bp, Probe sequence
gtcctatttaagtttcactgtcatt

SEQ ID NO: 41391 - DNA, 25 bp, Probe sequence
tcctatttaagtttcactgtcattc

SEQ ID NO: 41392 - DNA, 25 bp, Probe sequence
cctatttaagtttcactgtcattct

SEQ ID NO: 41393 - DNA, 25 bp, Probe sequence
cagttggtagagcgttagaagaaat

SEQ ID NO: 41394 - DNA, 25 bp, Probe sequence
gttagaagaaattgctgacggtaaa

SEQ ID NO: 41395 - DNA, 25 bp, Probe sequence
gttggtagagcgttagaagaaattg

SEQ ID NO: 41396 - DNA, 25 bp, Probe sequence
agttggtagagcgttagaagaaatt

SEQ ID NO: 41397 - DNA, 25 bp, Probe sequence
tgatgaacaacctgaaactgaatta

SEQ ID NO: 41398 - DNA, 25 bp, Probe sequence
attgatgaacaacctgaaactgaat

SEQ ID NO: 41399 - DNA, 25 bp, Probe sequence
ttgatgaacaacctgaaactgaatt

SEQ ID NO: 41400 - DNA, 25 bp, Probe sequence
aattgatgaacaacctgaaactgaa

SEQ ID NO: 41401 - DNA, 25 bp, Probe sequence
aaattgatgaacaacctgaaactga

SEQ ID NO: 41402 - DNA, 25 bp, Probe sequence
tctgattcacatccattctacactg

SEQ ID NO: 41403 - DNA, 25 bp, Probe sequence
atctgattcacatccattctacact

SEQ ID NO: 41404 - DNA, 25 bp, Probe sequence
catctgattcacatccattctacac

SEQ ID NO: 41405 - DNA, 25 bp, Probe sequence
tcatctgattcacatccattctaca

SEQ ID NO: 41406 - DNA, 25 bp, Probe sequence
ttcatctgattcacatccattctac

SEQ ID NO: 41407 - DNA, 25 bp, Probe sequence
catcctgagtatcaccaagtaatct

SEQ ID NO: 41408 - DNA, 25 bp, Probe sequence
tcatcctgagtatcaccaagtaatc

SEQ ID NO: 41409 - DNA, 25 bp, Probe sequence
ttcatcctgagtatcaccaagtaat

SEQ ID NO: 41410 - DNA, 25 bp, Probe sequence
attcatcctgagtatcaccaagtaa

SEQ ID NO: 41411 - DNA, 25 bp, Probe sequence
ttgagtgtaggtattgctgatgatt

SEQ ID NO: 41412 - DNA, 25 bp, Probe sequence
attgagtgtaggtattgctgatgat

SEQ ID NO: 41413 - DNA, 25 bp, Probe sequence
aattgagtgtaggtattgctgatga

SEQ ID NO: 41414 - DNA, 25 bp, Probe sequence
tctgatgataatgaattgacaatgc

SEQ ID NO: 41415 - DNA, 25 bp, Probe sequence
gagtgtaggtattgctgatgatttg

SEQ ID NO: 41416 - DNA, 25 bp, Probe sequence
tgagtgtaggtattgctgatgattt

SEQ ID NO: 41417 - DNA, 25 bp, Probe sequence
gacaccattagcatttcaagcaata

SEQ ID NO: 41418 - DNA, 25 bp, Probe sequence
acaccattagcatttcaagcaataa

SEQ ID NO: 41419 - DNA, 25 bp, Probe sequence
accattagcatttcaagcaataagt

SEQ ID NO: 41420 - DNA, 25 bp, Probe sequence
actatactaccaaggaactcactca

SEQ ID NO: 41421 - DNA, 25 bp, Probe sequence
ctatactaccaaggaactcactcaa

SEQ ID NO: 41422 - DNA, 25 bp, Probe sequence
aactatactaccaaggaactcactc

SEQ ID NO: 41423 - DNA, 25 bp, Probe sequence
gaactatactaccaaggaactcact

SEQ ID NO: 41424 - DNA, 25 bp, Probe sequence
agaactatactaccaaggaactcac

SEQ ID NO: 41425 - DNA, 25 bp, Probe sequence
tggattctataacgagattagcacg

SEQ ID NO: 41426 - DNA, 25 bp, Probe sequence
acaagaactatactaccaaggaact

SEQ ID NO: 41427 - DNA, 25 bp, Probe sequence
aagaactatactaccaaggaactca

SEQ ID NO: 41428 - DNA, 25 bp, Probe sequence
caagaactatactaccaaggaactc

SEQ ID NO: 41429 - DNA, 25 bp, Probe sequence
gtgaagaattgagtgaaggtaatcg

SEQ ID NO: 41430 - DNA, 25 bp, Probe sequence
cgtgaagaattgagtgaaggtaatc

SEQ ID NO: 41431 - DNA, 25 bp, Probe sequence
aagtgaacctggattattacaagcc

SEQ ID NO: 41432 - DNA, 25 bp, Probe sequence
aagaattgagtgaaggtaatcggtc

SEQ ID NO: 41433 - DNA, 25 bp, Probe sequence
gaagaattgagtgaaggtaatcggt

SEQ ID NO: 41434 - DNA, 25 bp, Probe sequence
tgaagaattgagtgaaggtaatcgg

SEQ ID NO: 41435 - DNA, 25 bp, Probe sequence
ttgtatgcttacttgtctgaagaac

SEQ ID NO: 41436 - DNA, 25 bp, Probe sequence
cgattcaaggttatgtaatggaagt

SEQ ID NO: 41437 - DNA, 25 bp, Probe sequence
acgattcaaggttatgtaatggaag

SEQ ID NO: 41438 - DNA, 25 bp, Probe sequence
aggtattgaagaaggtgctgaatta

SEQ ID NO: 41439 - DNA, 25 bp, Probe sequence
aaggtattgaagaaggtgctgaatt

SEQ ID NO: 41440 - DNA, 25 bp, Probe sequence
ggcgattatggtattgaagagttct

SEQ ID NO: 41441 - DNA, 25 bp, Probe sequence
ggtattgaagaaggtgctgaattat

SEQ ID NO: 41442 - DNA, 25 bp, Probe sequence
attatctgagcgtgtccattatcaa

SEQ ID NO: 41443 - DNA, 25 bp, Probe sequence
atcattatctgagcgtgtccattat

SEQ ID NO: 41444 - DNA, 25 bp, Probe sequence
ttatcattatctgagcgtgtccatt

SEQ ID NO: 41445 - DNA, 25 bp, Probe sequence
tatcattatctgagcgtgtccatta

SEQ ID NO: 41446 - DNA, 25 bp, Probe sequence
tcattatctgagcgtgtccattatc

SEQ ID NO: 41447 - DNA, 25 bp, Probe sequence
gaagacaagtctaatccagatccaa

SEQ ID NO: 41448 - DNA, 25 bp, Probe sequence
atgaagacaagtctaatccagatcc

SEQ ID NO: 41449 - DNA, 25 bp, Probe sequence
tgaagacaagtctaatccagatcca

SEQ ID NO: 41450 - DNA, 25 bp, Probe sequence
aatagtaaagggattcaaggatgga

SEQ ID NO: 41451 - DNA, 25 bp, Probe sequence
agggattcaaggatggaaagattac

SEQ ID NO: 41452 - DNA, 25 bp, Probe sequence
aaagggattcaaggatggaaagatt

SEQ ID NO: 41453 - DNA, 25 bp, Probe sequence
aagggattcaaggatggaaagatta

SEQ ID NO: 41454 - DNA, 25 bp, Probe sequence
taaagggattcaaggatggaaagat

SEQ ID NO: 41455 - DNA, 25 bp, Probe sequence
agtaaagggattcaaggatggaaag

SEQ ID NO: 41456 - DNA, 25 bp, Probe sequence
tctctcaagatgtaatgactgttca

SEQ ID NO: 41457 - DNA, 25 bp, Probe sequence
cttggtagaagttggaatggattaa

SEQ ID NO: 41458 - DNA, 25 bp, Probe sequence
tctcaagatgtaatgactgttcagc

SEQ ID NO: 41459 - DNA, 25 bp, Probe sequence
ctctcaagatgtaatgactgttcag

SEQ ID NO: 41460 - DNA, 25 bp, Probe sequence
ctcaagatgtaatgactgttcagca

SEQ ID NO: 41461 - DNA, 25 bp, Probe sequence
tcaagatgtaatgactgttcagcac

SEQ ID NO: 41462 - DNA, 25 bp, Probe sequence
gatgtaatgactgttcagcacactt

SEQ ID NO: 41463 - DNA, 25 bp, Probe sequence
aagatgtaatgactgttcagcacac

SEQ ID NO: 41464 - DNA, 25 bp, Probe sequence
caagatgtaatgactgttcagcaca

SEQ ID NO: 41465 - DNA, 25 bp, Probe sequence
attccacttgatgtagcgaatgatg

SEQ ID NO: 41466 - DNA, 25 bp, Probe sequence
cttgatgtagcgaatgatgcaatac

SEQ ID NO: 41467 - DNA, 25 bp, Probe sequence
acttgatgtagcgaatgatgcaata

SEQ ID NO: 41468 - DNA, 25 bp, Probe sequence
gatgtagcgaatgatgcaataccat

SEQ ID NO: 41469 - DNA, 25 bp, Probe sequence
atgtagcgaatgatgcaataccatg

SEQ ID NO: 41470 - DNA, 25 bp, Probe sequence
ttgatgtagcgaatgatgcaatacc

SEQ ID NO: 41471 - DNA, 25 bp, Probe sequence
cacttgatgtagcgaatgatgcaat

SEQ ID NO: 41472 - DNA, 25 bp, Probe sequence
ttccacttgatgtagcgaatgatgc

SEQ ID NO: 41473 - DNA, 25 bp, Probe sequence
tgatgtagcgaatgatgcaatacca

SEQ ID NO: 41474 - DNA, 25 bp, Probe sequence
acagacttagaaggttcaattacat

SEQ ID NO: 41475 - DNA, 25 bp, Probe sequence
aacagacttagaaggttcaattaca

SEQ ID NO: 41476 - DNA, 25 bp, Probe sequence
acagataaagaagtggaggcatatt

SEQ ID NO: 41477 - DNA, 25 bp, Probe sequence
aacagataaagaagtggaggcatat

SEQ ID NO: 41478 - DNA, 25 bp, Probe sequence
ttaacagataaagaagtggaggcat

SEQ ID NO: 41479 - DNA, 25 bp, Probe sequence
taacagataaagaagtggaggcata

SEQ ID NO: 41480 - DNA, 25 bp, Probe sequence
gttagtaccagcatcgcatcctatt

SEQ ID NO: 41481 - DNA, 25 bp, Probe sequence
tagaaggttcaattacattgccaga

SEQ ID NO: 41482 - DNA, 25 bp, Probe sequence
gttgaactaactgcacatgaagatg

SEQ ID NO: 41483 - DNA, 25 bp, Probe sequence
tgtgaatgttgatgtaagagacgaa

SEQ ID NO: 41484 - DNA, 25 bp, Probe sequence
taggtgtgaatgttgatgtaagaga

SEQ ID NO: 41485 - DNA, 25 bp, Probe sequence
gcaacagcctattacaccattatta

SEQ ID NO: 41486 - DNA, 25 bp, Probe sequence
aggtgtgaatgttgatgtaagagac

SEQ ID NO: 41487 - DNA, 25 bp, Probe sequence
gtgaattaggtgtgaatgttgatgt

SEQ ID NO: 41488 - DNA, 25 bp, Probe sequence
agtgaattaggtgtgaatgttgatg

SEQ ID NO: 41489 - DNA, 25 bp, Probe sequence
tgatagaattgaagcaggcacatat

SEQ ID NO: 41490 - DNA, 25 bp, Probe sequence
gtgtgaatgttgatgtaagagacga

SEQ ID NO: 41491 - DNA, 25 bp, Probe sequence
ttaggtgtgaatgttgatgtaagag

SEQ ID NO: 41492 - DNA, 25 bp, Probe sequence
ggctatcatttatcccaatcacact

SEQ ID NO: 41493 - DNA, 25 bp, Probe sequence
ttatcccaatcacactatttacggc

SEQ ID NO: 41494 - DNA, 25 bp, Probe sequence
tttatcccaatcacactatttacgg

SEQ ID NO: 41495 - DNA, 25 bp, Probe sequence
gctatcatttatcccaatcacacta

SEQ ID NO: 41496 - DNA, 25 bp, Probe sequence
cattaaacatcccttacattatcgc

SEQ ID NO: 41497 - DNA, 25 bp, Probe sequence
tatcccaatcacactatttacggca

SEQ ID NO: 41498 - DNA, 25 bp, Probe sequence
tattagtgggattgttatcatggca

SEQ ID NO: 41499 - DNA, 25 bp, Probe sequence
ttattagtgggattgttatcatggc

SEQ ID NO: 41500 - DNA, 25 bp, Probe sequence
cagcattattcaacagacgcctcat

SEQ ID NO: 41501 - DNA, 25 bp, Probe sequence
aatctatgaaccgtcctgaattaca

SEQ ID NO: 41502 - DNA, 25 bp, Probe sequence
gctattatcaaggcaatcttccatt

SEQ ID NO: 41503 - DNA, 25 bp, Probe sequence
ggctattatcaaggcaatcttccat

SEQ ID NO: 41504 - DNA, 25 bp, Probe sequence
cgaagacaatccagacttaacatct

SEQ ID NO: 41505 - DNA, 25 bp, Probe sequence
attatcaaggcaatcttccattagg

SEQ ID NO: 41506 - DNA, 25 bp, Probe sequence
atctatgaaccgtcctgaattacag

SEQ ID NO: 41507 - DNA, 25 bp, Probe sequence
ttatcaaggcaatcttccattagga

SEQ ID NO: 41508 - DNA, 25 bp, Probe sequence
tcaaggcaatcttccattaggatat

SEQ ID NO: 41509 - DNA, 25 bp, Probe sequence
atcaaggcaatcttccattaggata

SEQ ID NO: 41510 - DNA, 25 bp, Probe sequence
aacgagatatggttgattgttggaa

SEQ ID NO: 41511 - DNA, 25 bp, Probe sequence
attaactcacgaagaagaggaatgg

SEQ ID NO: 41512 - DNA, 25 bp, Probe sequence
ttggtgtgcgtaatagtgataggtt

SEQ ID NO: 41513 - DNA, 25 bp, Probe sequence
tattaactcacgaagaagaggaatg

SEQ ID NO: 41514 - DNA, 25 bp, Probe sequence
ttattaactcacgaagaagaggaat

SEQ ID NO: 41515 - DNA, 25 bp, Probe sequence
tggttgattgttggaaagattgttt

SEQ ID NO: 41516 - DNA, 25 bp, Probe sequence
atggttgattgttggaaagattgtt

SEQ ID NO: 41517 - DNA, 25 bp, Probe sequence
cgagatatggttgattgttggaaag

SEQ ID NO: 41518 - DNA, 25 bp, Probe sequence
ggtgtgcgtaatagtgataggttta

SEQ ID NO: 41519 - DNA, 25 bp, Probe sequence
tgcttatacaactatggatgacact

SEQ ID NO: 41520 - DNA, 25 bp, Probe sequence
ttacctgaatcattgttggcattac

SEQ ID NO: 41521 - DNA, 25 bp, Probe sequence
attacctgaatcattgttggcatta

SEQ ID NO: 41522 - DNA, 25 bp, Probe sequence
tattacctgaatcattgttggcatt

SEQ ID NO: 41523 - DNA, 25 bp, Probe sequence
ttattacctgaatcattgttggcat

SEQ ID NO: 41524 - DNA, 25 bp, Probe sequence
attattacctgaatcattgttggca

SEQ ID NO: 41525 - DNA, 25 bp, Probe sequence
acaactatggatgacactaacttga

SEQ ID NO: 41526 - DNA, 25 bp, Probe sequence
tacctgaatcattgttggcattacc

SEQ ID NO: 41527 - DNA, 25 bp, Probe sequence
atgctgaactcgttgagactaataa

SEQ ID NO: 41528 - DNA, 25 bp, Probe sequence
atcactattcctgtagcaatccatt

SEQ ID NO: 41529 - DNA, 25 bp, Probe sequence
catcactattcctgtagcaatccat

SEQ ID NO: 41530 - DNA, 25 bp, Probe sequence
ggttatgcggtaggtcaatacaata

SEQ ID NO: 41531 - DNA, 25 bp, Probe sequence
gttatgcggtaggtcaatacaatat

SEQ ID NO: 41532 - DNA, 25 bp, Probe sequence
aacatcactattcctgtagcaatcc

SEQ ID NO: 41533 - DNA, 25 bp, Probe sequence
tggttatgcggtaggtcaatacaat

SEQ ID NO: 41534 - DNA, 25 bp, Probe sequence
atggttatgcggtaggtcaatacaa

SEQ ID NO: 41535 - DNA, 25 bp, Probe sequence
aatggttatgcggtaggtcaataca

SEQ ID NO: 41536 - DNA, 25 bp, Probe sequence
attaggttcagttcatggtccatac

SEQ ID NO: 41537 - DNA, 25 bp, Probe sequence
gagtatagtatgccgaagtggatta

SEQ ID NO: 41538 - DNA, 25 bp, Probe sequence
aggaggacaaccaattattcattct

SEQ ID NO: 41539 - DNA, 25 bp, Probe sequence
aggacaaccaattattcattctcgt

SEQ ID NO: 41540 - DNA, 25 bp, Probe sequence
agtatagtatgccgaagtggattat

SEQ ID NO: 41541 - DNA, 25 bp, Probe sequence
ggacaaccaattattcattctcgtt

SEQ ID NO: 41542 - DNA, 25 bp, Probe sequence
tagtatgccgaagtggattatagat

SEQ ID NO: 41543 - DNA, 25 bp, Probe sequence
atagtatgccgaagtggattataga

SEQ ID NO: 41544 - DNA, 25 bp, Probe sequence
gcgtatagtaacttgcgtatcaatg

SEQ ID NO: 41545 - DNA, 25 bp, Probe sequence
tgcgtatagtaacttgcgtatcaat

SEQ ID NO: 41546 - DNA, 25 bp, Probe sequence
gtggtacattacgcttaggcttata

SEQ ID NO: 41547 - DNA, 25 bp, Probe sequence
ggtattacagcatcttctctaggta

SEQ ID NO: 41548 - DNA, 25 bp, Probe sequence
tggtacattacgcttaggcttatat

SEQ ID NO: 41549 - DNA, 25 bp, Probe sequence
acaacaggtgatattgagtcattac

SEQ ID NO: 41550 - DNA, 25 bp, Probe sequence
accagacttaatcgttgtaagaact

SEQ ID NO: 41551 - DNA, 25 bp, Probe sequence
ccagacttaatcgttgtaagaactg

SEQ ID NO: 41552 - DNA, 25 bp, Probe sequence
ggtacaacaggtgatattgagtcat

SEQ ID NO: 41553 - DNA, 25 bp, Probe sequence
gaacagttcaagttattccgcatat

SEQ ID NO: 41554 - DNA, 25 bp, Probe sequence
aaccagacttaatcgttgtaagaac

SEQ ID NO: 41555 - DNA, 25 bp, Probe sequence
cgtcacattacagtatcaacatcag

SEQ ID NO: 41556 - DNA, 25 bp, Probe sequence
tcacattacagtatcaacatcaggt

SEQ ID NO: 41557 - DNA, 25 bp, Probe sequence
gtcacattacagtatcaacatcagg

SEQ ID NO: 41558 - DNA, 25 bp, Probe sequence
cagtatcaacatcaggtatcattcc

SEQ ID NO: 41559 - DNA, 25 bp, Probe sequence
acagtatcaacatcaggtatcattc

SEQ ID NO: 41560 - DNA, 25 bp, Probe sequence
cacattacagtatcaacatcaggta

SEQ ID NO: 41561 - DNA, 25 bp, Probe sequence
aacttaattcctgtcaaccatgttc

SEQ ID NO: 41562 - DNA, 25 bp, Probe sequence
gactaggaattaatgccacaatacg

SEQ ID NO: 41563 - DNA, 25 bp, Probe sequence
aagagactaggaattaatgccacaa

SEQ ID NO: 41564 - DNA, 25 bp, Probe sequence
catagagataagaatgaagatgcgg

SEQ ID NO: 41565 - DNA, 25 bp, Probe sequence
ttactgatactggacaacatagaga

SEQ ID NO: 41566 - DNA, 25 bp, Probe sequence
acatagagataagaatgaagatgcg

SEQ ID NO: 41567 - DNA, 25 bp, Probe sequence
actgatactggacaacatagagata

SEQ ID NO: 41568 - DNA, 25 bp, Probe sequence
tactgatactggacaacatagagat

SEQ ID NO: 41569 - DNA, 25 bp, Probe sequence
gaaggtacaatagaagatcatggtg

SEQ ID NO: 41570 - DNA, 25 bp, Probe sequence
actggacaacatagagataagaatg

SEQ ID NO: 41571 - DNA, 25 bp, Probe sequence
agaaggtacaatagaagatcatggt

SEQ ID NO: 41572 - DNA, 25 bp, Probe sequence
ctggacaacatagagataagaatga

SEQ ID NO: 41573 - DNA, 25 bp, Probe sequence
acattgctgctattgaagtggataa

SEQ ID NO: 41574 - DNA, 25 bp, Probe sequence
aacattgctgctattgaagtggata

SEQ ID NO: 41575 - DNA, 25 bp, Probe sequence
gaacattgctgctattgaagtggat

SEQ ID NO: 41576 - DNA, 25 bp, Probe sequence
tgacaaccttaatgtgattacgatg

SEQ ID NO: 41577 - DNA, 25 bp, Probe sequence
gacaaccttaatgtgattacgatga

SEQ ID NO: 41578 - DNA, 25 bp, Probe sequence
atgaacattgctgctattgaagtgg

SEQ ID NO: 41579 - DNA, 25 bp, Probe sequence
catgaacattgctgctattgaagtg

SEQ ID NO: 41580 - DNA, 25 bp, Probe sequence
accttaatgtgattacgatgattct

SEQ ID NO: 41581 - DNA, 25 bp, Probe sequence
tacatcgttactatcagcatgaagg

SEQ ID NO: 41582 - DNA, 25 bp, Probe sequence
acaagaagtgatgacggaattagat

SEQ ID NO: 41583 - DNA, 25 bp, Probe sequence
ggagaatggctagatgaacttagag

SEQ ID NO: 41584 - DNA, 25 bp, Probe sequence
gagaatggctagatgaacttagaga

SEQ ID NO: 41585 - DNA, 25 bp, Probe sequence
aatggctagatgaacttagagatga

SEQ ID NO: 41586 - DNA, 25 bp, Probe sequence
caagaagtgatgacggaattagata

SEQ ID NO: 41587 - DNA, 25 bp, Probe sequence
tggctagatgaacttagagatgatc

SEQ ID NO: 41588 - DNA, 25 bp, Probe sequence
atggctagatgaacttagagatgat

SEQ ID NO: 41589 - DNA, 25 bp, Probe sequence
gaatggctagatgaacttagagatg

SEQ ID NO: 41590 - DNA, 25 bp, Probe sequence
agaatggctagatgaacttagagat

SEQ ID NO: 41591 - DNA, 25 bp, Probe sequence
gatgttgatgaagaagatgactgtt

SEQ ID NO: 41592 - DNA, 25 bp, Probe sequence
agcgaatgaagatgtctatgaactc

SEQ ID NO: 41593 - DNA, 25 bp, Probe sequence
gagcgaatgaagatgtctatgaact

SEQ ID NO: 41594 - DNA, 25 bp, Probe sequence
tgttgatgaagaagatgactgttac

SEQ ID NO: 41595 - DNA, 25 bp, Probe sequence
cgatgttgatgaagaagatgactgt

SEQ ID NO: 41596 - DNA, 25 bp, Probe sequence
gttgatgaagaagatgactgttact

SEQ ID NO: 41597 - DNA, 25 bp, Probe sequence
aagtaaggaagagtatagtgacgat

SEQ ID NO: 41598 - DNA, 25 bp, Probe sequence
aggaagagtatagtgacgatattga

SEQ ID NO: 41599 - DNA, 25 bp, Probe sequence
atgttgatgaagaagatgactgtta

SEQ ID NO: 41600 - DNA, 25 bp, Probe sequence
aattacctgttattgttcacgaagc

SEQ ID NO: 41601 - DNA, 25 bp, Probe sequence
ataatggtaatgagccgaacttaac

SEQ ID NO: 41602 - DNA, 25 bp, Probe sequence
taatggtaatgagccgaacttaacg

SEQ ID NO: 41603 - DNA, 25 bp, Probe sequence
aataatggtaatgagccgaacttaa

SEQ ID NO: 41604 - DNA, 25 bp, Probe sequence
ttattatgatggtgattggtacggt

SEQ ID NO: 41605 - DNA, 25 bp, Probe sequence
aatactactaatgtaccagagcacg

SEQ ID NO: 41606 - DNA, 25 bp, Probe sequence
tattatgatggtgattggtacggtg

SEQ ID NO: 41607 - DNA, 25 bp, Probe sequence
cttattatgatggtgattggtacgg

SEQ ID NO: 41608 - DNA, 25 bp, Probe sequence
aatggttcaacgagcatgttattac

SEQ ID NO: 41609 - DNA, 25 bp, Probe sequence
ctagtaattgtaatgagtgctgtcg

SEQ ID NO: 41610 - DNA, 25 bp, Probe sequence
tatcgtccagaacttaatcttgaga

SEQ ID NO: 41611 - DNA, 25 bp, Probe sequence
ttatcgtccagaacttaatcttgag

SEQ ID NO: 41612 - DNA, 25 bp, Probe sequence
atcgtccagaacttaatcttgagac

SEQ ID NO: 41613 - DNA, 25 bp, Probe sequence
cgtccagaacttaatcttgagacaa

SEQ ID NO: 41614 - DNA, 25 bp, Probe sequence
cattatcgtccagaacttaatcttg

SEQ ID NO: 41615 - DNA, 25 bp, Probe sequence
tcgtccagaacttaatcttgagaca

SEQ ID NO: 41616 - DNA, 25 bp, Probe sequence
attatcgtccagaacttaatcttga

SEQ ID NO: 41617 - DNA, 25 bp, Probe sequence
tcattatcgtccagaacttaatctt

SEQ ID NO: 41618 - DNA, 25 bp, Probe sequence
ggtgaagcagttattgatgatgatt

SEQ ID NO: 41619 - DNA, 25 bp, Probe sequence
gtggtcataatatcattggaactgc

SEQ ID NO: 41620 - DNA, 25 bp, Probe sequence
tgcttgtggtcataatatcattgga

SEQ ID NO: 41621 - DNA, 25 bp, Probe sequence
tggtgaagcagttattgatgatgat

SEQ ID NO: 41622 - DNA, 25 bp, Probe sequence
agaagttggtgaagcagttattgat

SEQ ID NO: 41623 - DNA, 25 bp, Probe sequence
gaagaagttggtgaagcagttattg

SEQ ID NO: 41624 - DNA, 25 bp, Probe sequence
ttggtgaagcagttattgatgatga

SEQ ID NO: 41625 - DNA, 25 bp, Probe sequence
gttggtgaagcagttattgatgatg

SEQ ID NO: 41626 - DNA, 25 bp, Probe sequence
agttggtgaagcagttattgatgat

SEQ ID NO: 41627 - DNA, 25 bp, Probe sequence
gatattgaagttgatggaggcgtaa

SEQ ID NO: 41628 - DNA, 25 bp, Probe sequence
gcctcatattcatcgtgctattcaa

SEQ ID NO: 41629 - DNA, 25 bp, Probe sequence
aatggtgctacaatgctagtaacag

SEQ ID NO: 41630 - DNA, 25 bp, Probe sequence
gctacaatgctagtaacaggttcat

SEQ ID NO: 41631 - DNA, 25 bp, Probe sequence
tgatattgaagttgatggaggcgta

SEQ ID NO: 41632 - DNA, 25 bp, Probe sequence
gtgctacaatgctagtaacaggttc

SEQ ID NO: 41633 - DNA, 25 bp, Probe sequence
gctggtgtagtaattaatcctggta

SEQ ID NO: 41634 - DNA, 25 bp, Probe sequence
tgctacaatgctagtaacaggttca

SEQ ID NO: 41635 - DNA, 25 bp, Probe sequence
aagctggtgtagtaattaatcctgg

SEQ ID NO: 41636 - DNA, 25 bp, Probe sequence
gttacctatgcagttcgtgttaatg

SEQ ID NO: 41637 - DNA, 25 bp, Probe sequence
ttacctatgcagttcgtgttaatgg

SEQ ID NO: 41638 - DNA, 25 bp, Probe sequence
ggttacctatgcagttcgtgttaat

SEQ ID NO: 41639 - DNA, 25 bp, Probe sequence
ggttcttgttacaggaatctttgag

SEQ ID NO: 41640 - DNA, 25 bp, Probe sequence
ttacacgagaacgacaatttagaaa

SEQ ID NO: 41641 - DNA, 25 bp, Probe sequence
tttacacgagaacgacaatttagaa

SEQ ID NO: 41642 - DNA, 25 bp, Probe sequence
acacgagaacgacaatttagaaata

SEQ ID NO: 41643 - DNA, 25 bp, Probe sequence
tacacgagaacgacaatttagaaat

SEQ ID NO: 41644 - DNA, 25 bp, Probe sequence
gttcttgttacaggaatctttgaga

SEQ ID NO: 41645 - DNA, 25 bp, Probe sequence
ataccgatgactgatgatgtagaac

SEQ ID NO: 41646 - DNA, 25 bp, Probe sequence
taccgatgactgatgatgtagaact

SEQ ID NO: 41647 - DNA, 25 bp, Probe sequence
tataccgatgactgatgatgtagaa

SEQ ID NO: 41648 - DNA, 25 bp, Probe sequence
ttataccgatgactgatgatgtaga

SEQ ID NO: 41649 - DNA, 25 bp, Probe sequence
accgatgactgatgatgtagaactt

SEQ ID NO: 41650 - DNA, 25 bp, Probe sequence
cgatgactgatgatgtagaactttc

SEQ ID NO: 41651 - DNA, 25 bp, Probe sequence
ccgatgactgatgatgtagaacttt

SEQ ID NO: 41652 - DNA, 25 bp, Probe sequence
cagaacagttacaaatcaaaccagt

SEQ ID NO: 41653 - DNA, 25 bp, Probe sequence
acagaacagttacaaatcaaaccag

SEQ ID NO: 41654 - DNA, 25 bp, Probe sequence
tggctatggttaattctggtgatat

SEQ ID NO: 41655 - DNA, 25 bp, Probe sequence
atggctatggttaattctggtgata

SEQ ID NO: 41656 - DNA, 25 bp, Probe sequence
gatggctatggttaattctggtgat

SEQ ID NO: 41657 - DNA, 25 bp, Probe sequence
ggctatggttaattctggtgatatg

SEQ ID NO: 41658 - DNA, 25 bp, Probe sequence
ggatgttactggtactgtcaattca

SEQ ID NO: 41659 - DNA, 25 bp, Probe sequence
gctatggttaattctggtgatatga

SEQ ID NO: 41660 - DNA, 25 bp, Probe sequence
gatgttactggtactgtcaattcaa

SEQ ID NO: 41661 - DNA, 25 bp, Probe sequence
attaggtcatacaggtggtacgatt

SEQ ID NO: 41662 - DNA, 25 bp, Probe sequence
gccaagatgtagacgatgttgttaa

SEQ ID NO: 41663 - DNA, 25 bp, Probe sequence
ttgcttatgtctataatggtgttgg

SEQ ID NO: 41664 - DNA, 25 bp, Probe sequence
cttatgtctataatggtgttggcaa

SEQ ID NO: 41665 - DNA, 25 bp, Probe sequence
gcttatgtctataatggtgttggca

SEQ ID NO: 41666 - DNA, 25 bp, Probe sequence
tgcttatgtctataatggtgttggc

SEQ ID NO: 41667 - DNA, 25 bp, Probe sequence
tggaatgtcactatacttaattgct

SEQ ID NO: 41668 - DNA, 25 bp, Probe sequence
ttggaatgtcactatacttaattgc

SEQ ID NO: 41669 - DNA, 25 bp, Probe sequence
tctataatggtgttggcaaaggtaa

SEQ ID NO: 41670 - DNA, 25 bp, Probe sequence
ccaccatttgtagcaggattactta

SEQ ID NO: 41671 - DNA, 25 bp, Probe sequence
ggaatgtcactatacttaattgctt

SEQ ID NO: 41672 - DNA, 25 bp, Probe sequence
ccgttgaatgttatggtattgtagg

SEQ ID NO: 41673 - DNA, 25 bp, Probe sequence
gccgttgaatgttatggtattgtag

SEQ ID NO: 41674 - DNA, 25 bp, Probe sequence
atgttatggtattgtaggtatggca

SEQ ID NO: 41675 - DNA, 25 bp, Probe sequence
cgttgaatgttatggtattgtaggt

SEQ ID NO: 41676 - DNA, 25 bp, Probe sequence
aatggcgtagtggatatagatatgt

SEQ ID NO: 41677 - DNA, 25 bp, Probe sequence
tgttatggtattgtaggtatggcat

SEQ ID NO: 41678 - DNA, 25 bp, Probe sequence
ttatggtattgtaggtatggcatct

SEQ ID NO: 41679 - DNA, 25 bp, Probe sequence
gttatggtattgtaggtatggcatc

SEQ ID NO: 41680 - DNA, 25 bp, Probe sequence
aatgttatggtattgtaggtatggc

SEQ ID NO: 41681 - DNA, 25 bp, Probe sequence
caagccaatatgtagacgaattagc

SEQ ID NO: 41682 - DNA, 25 bp, Probe sequence
gcaagccaatatgtagacgaattag

SEQ ID NO: 41683 - DNA, 25 bp, Probe sequence
taatgaagcaagccaatatgtagac

SEQ ID NO: 41684 - DNA, 25 bp, Probe sequence
agcaagccaatatgtagacgaatta

SEQ ID NO: 41685 - DNA, 25 bp, Probe sequence
aagcaagccaatatgtagacgaatt

SEQ ID NO: 41686 - DNA, 25 bp, Probe sequence
gaagcaagccaatatgtagacgaat

SEQ ID NO: 41687 - DNA, 25 bp, Probe sequence
ataatgaagcaagccaatatgtaga

SEQ ID NO: 41688 - DNA, 25 bp, Probe sequence
aatgaagcaagccaatatgtagacg

SEQ ID NO: 41689 - DNA, 25 bp, Probe sequence
tggttgaagaattatcacaagactt

SEQ ID NO: 41690 - DNA, 25 bp, Probe sequence
agagcaatatccagatgtagaagtg

SEQ ID NO: 41691 - DNA, 25 bp, Probe sequence
ttgaagataagattgtaagcagcca

SEQ ID NO: 41692 - DNA, 25 bp, Probe sequence
attgaagataagattgtaagcagcc

SEQ ID NO: 41693 - DNA, 25 bp, Probe sequence
aagagcaatatccagatgtagaagt

SEQ ID NO: 41694 - DNA, 25 bp, Probe sequence
gaagagcaatatccagatgtagaag

SEQ ID NO: 41695 - DNA, 25 bp, Probe sequence
tgaagataagattgtaagcagccaa

SEQ ID NO: 41696 - DNA, 25 bp, Probe sequence
aagaagttggtgttgttgatagtgg

SEQ ID NO: 41697 - DNA, 25 bp, Probe sequence
gattgaagataagattgtaagcagc

SEQ ID NO: 41698 - DNA, 25 bp, Probe sequence
ttgaaggtacaatacttacagttgc

SEQ ID NO: 41699 - DNA, 25 bp, Probe sequence
aactaatcacagcactacctaatcg

SEQ ID NO: 41700 - DNA, 25 bp, Probe sequence
gttaattcaacatgacctaccaaga

SEQ ID NO: 41701 - DNA, 25 bp, Probe sequence
ctaatcacagcactacctaatcgaa

SEQ ID NO: 41702 - DNA, 25 bp, Probe sequence
taatcacagcactacctaatcgaac

SEQ ID NO: 41703 - DNA, 25 bp, Probe sequence
atcacagcactacctaatcgaacta

SEQ ID NO: 41704 - DNA, 25 bp, Probe sequence
actaatcacagcactacctaatcga

SEQ ID NO: 41705 - DNA, 25 bp, Probe sequence
ttaattcaacatgacctaccaagaa

SEQ ID NO: 41706 - DNA, 25 bp, Probe sequence
tcacagcactacctaatcgaactaa

SEQ ID NO: 41707 - DNA, 25 bp, Probe sequence
ggttaattcaacatgacctaccaag

SEQ ID NO: 41708 - DNA, 25 bp, Probe sequence
ttatcgtatgttagaagttgctcgt

SEQ ID NO: 41709 - DNA, 25 bp, Probe sequence
tatgttagaagttgctcgtgatgaa

SEQ ID NO: 41710 - DNA, 25 bp, Probe sequence
aaccagtctatcgtattaaggaagg

SEQ ID NO: 41711 - DNA, 25 bp, Probe sequence
ctgttgttgaagtaggtgttaatgt

SEQ ID NO: 41712 - DNA, 25 bp, Probe sequence
tatcgtatgttagaagttgctcgtg

SEQ ID NO: 41713 - DNA, 25 bp, Probe sequence
gtatgttagaagttgctcgtgatga

SEQ ID NO: 41714 - DNA, 25 bp, Probe sequence
attatcgtatgttagaagttgctcg

SEQ ID NO: 41715 - DNA, 25 bp, Probe sequence
aacttattcaatctggcgtattctt

SEQ ID NO: 41716 - DNA, 25 bp, Probe sequence
gaacttattcaatctggcgtattct

SEQ ID NO: 41717 - DNA, 25 bp, Probe sequence
ctcagttagaagaaggcgacaatat

SEQ ID NO: 41718 - DNA, 25 bp, Probe sequence
ttatactcagttagaagaaggcgac

SEQ ID NO: 41719 - DNA, 25 bp, Probe sequence
ttgtggatataaccgttggaatcat

SEQ ID NO: 41720 - DNA, 25 bp, Probe sequence
attgtggatataaccgttggaatca

SEQ ID NO: 41721 - DNA, 25 bp, Probe sequence
tgtggatataaccgttggaatcata

SEQ ID NO: 41722 - DNA, 25 bp, Probe sequence
tgaattgtggatataaccgttggaa

SEQ ID NO: 41723 - DNA, 25 bp, Probe sequence
ttgaattgtggatataaccgttgga

SEQ ID NO: 41724 - DNA, 25 bp, Probe sequence
gaattgtggatataaccgttggaat

SEQ ID NO: 41725 - DNA, 25 bp, Probe sequence
tatactcagttagaagaaggcgaca

SEQ ID NO: 41726 - DNA, 25 bp, Probe sequence
aacataccagaattaaggaagcgta

SEQ ID NO: 41727 - DNA, 25 bp, Probe sequence
acataccagaattaaggaagcgtat

SEQ ID NO: 41728 - DNA, 25 bp, Probe sequence
cataccagaattaaggaagcgtatt

SEQ ID NO: 41729 - DNA, 25 bp, Probe sequence
taccagaattaaggaagcgtattaa

SEQ ID NO: 41730 - DNA, 25 bp, Probe sequence
cagaccatgaactaagcgacttatt

SEQ ID NO: 41731 - DNA, 25 bp, Probe sequence
gtagagaagcaatcagacaacaaat

SEQ ID NO: 41732 - DNA, 25 bp, Probe sequence
taaatgatacggtaagagcagaagc

SEQ ID NO: 41733 - DNA, 25 bp, Probe sequence
aatgatacggtaagagcagaagcac

SEQ ID NO: 41734 - DNA, 25 bp, Probe sequence
tcaagtcaatccaaatgttaaagcg

SEQ ID NO: 41735 - DNA, 25 bp, Probe sequence
tattgcgttagtatgtggtgtgata

SEQ ID NO: 41736 - DNA, 25 bp, Probe sequence
tatattgcgttagtatgtggtgtga

SEQ ID NO: 41737 - DNA, 25 bp, Probe sequence
atattgcgttagtatgtggtgtgat

SEQ ID NO: 41738 - DNA, 25 bp, Probe sequence
attgcgttagtatgtggtgtgatag

SEQ ID NO: 41739 - DNA, 25 bp, Probe sequence
aggaattatcagtgctatgttgact

SEQ ID NO: 41740 - DNA, 25 bp, Probe sequence
ggaattatcagtgctatgttgactt

SEQ ID NO: 41741 - DNA, 25 bp, Probe sequence
ttagtatgtggtgtgatagcaggtc

SEQ ID NO: 41742 - DNA, 25 bp, Probe sequence
atatattgcgttagtatgtggtgtg

SEQ ID NO: 41743 - DNA, 25 bp, Probe sequence
gttagtatgtggtgtgatagcaggt

SEQ ID NO: 41744 - DNA, 25 bp, Probe sequence
gatgttgtagttaccgatggctata

SEQ ID NO: 41745 - DNA, 25 bp, Probe sequence
aagatggattactcagaatacggtg

SEQ ID NO: 41746 - DNA, 25 bp, Probe sequence
atgttgtagttaccgatggctatac

SEQ ID NO: 41747 - DNA, 25 bp, Probe sequence
agatgttgtagttaccgatggctat

SEQ ID NO: 41748 - DNA, 25 bp, Probe sequence
tagtagtaacattgccaacgattga

SEQ ID NO: 41749 - DNA, 25 bp, Probe sequence
ttagtagtaacattgccaacgattg

SEQ ID NO: 41750 - DNA, 25 bp, Probe sequence
ttaatggatggcgatacagatgttg

SEQ ID NO: 41751 - DNA, 25 bp, Probe sequence
atggattactcagaatacggtggtt

SEQ ID NO: 41752 - DNA, 25 bp, Probe sequence
gtagtaacattgccaacgattgatg

SEQ ID NO: 41753 - DNA, 25 bp, Probe sequence
gcaatcgtcagacattacatataga

SEQ ID NO: 41754 - DNA, 25 bp, Probe sequence
tagagaagaagttgcgaatcatgtt

SEQ ID NO: 41755 - DNA, 25 bp, Probe sequence
ctagagaagaagttgcgaatcatgt

SEQ ID NO: 41756 - DNA, 25 bp, Probe sequence
tatatgaagcctagagagttctgtt

SEQ ID NO: 41757 - DNA, 25 bp, Probe sequence
ttatatgaagcctagagagttctgt

SEQ ID NO: 41758 - DNA, 25 bp, Probe sequence
atggtacgagcgagattattaatgg

SEQ ID NO: 41759 - DNA, 25 bp, Probe sequence
aatggtacgagcgagattattaatg

SEQ ID NO: 41760 - DNA, 25 bp, Probe sequence
cgagcgagattattaatggaccata

SEQ ID NO: 41761 - DNA, 25 bp, Probe sequence
gtacgagcgagattattaatggacc

SEQ ID NO: 41762 - DNA, 25 bp, Probe sequence
aactcaacagaatggctaatagacc

SEQ ID NO: 41763 - DNA, 25 bp, Probe sequence
attgacgcatagttcggcattatta

SEQ ID NO: 41764 - DNA, 25 bp, Probe sequence
tattgacgcatagttcggcattatt

SEQ ID NO: 41765 - DNA, 25 bp, Probe sequence
ttattgacgcatagttcggcattat

SEQ ID NO: 41766 - DNA, 25 bp, Probe sequence
taactcaacagaatggctaatagac

SEQ ID NO: 41767 - DNA, 25 bp, Probe sequence
ttgacgcatagttcggcattattag

SEQ ID NO: 41768 - DNA, 25 bp, Probe sequence
ttaactcaacagaatggctaataga

SEQ ID NO: 41769 - DNA, 25 bp, Probe sequence
accagtacaattcattaactcaaca

SEQ ID NO: 41770 - DNA, 25 bp, Probe sequence
caccagtacaattcattaactcaac

SEQ ID NO: 41771 - DNA, 25 bp, Probe sequence
agagaagatgttgcgacagtattaa

SEQ ID NO: 41772 - DNA, 25 bp, Probe sequence
tagagaagatgttgcgacagtatta

SEQ ID NO: 41773 - DNA, 25 bp, Probe sequence
ctagagaagatgttgcgacagtatt

SEQ ID NO: 41774 - DNA, 25 bp, Probe sequence
cctagagaagatgttgcgacagtat

SEQ ID NO: 41775 - DNA, 25 bp, Probe sequence
aattcctagagaagatgttgcgaca

SEQ ID NO: 41776 - DNA, 25 bp, Probe sequence
gctaaacattacgctgatgactatt

SEQ ID NO: 41777 - DNA, 25 bp, Probe sequence
attacgctgatgactatttaagacg

SEQ ID NO: 41778 - DNA, 25 bp, Probe sequence
gttataggtgctaatggcggtgtag

SEQ ID NO: 41779 - DNA, 25 bp, Probe sequence
tgaaagcaattcttgttgatgttga

SEQ ID NO: 41780 - DNA, 25 bp, Probe sequence
taatacagtagcgttcttagcatca

SEQ ID NO: 41781 - DNA, 25 bp, Probe sequence
aatacagtagcgttcttagcatcag

SEQ ID NO: 41782 - DNA, 25 bp, Probe sequence
agcagaagaaggatataatgtagca

SEQ ID NO: 41783 - DNA, 25 bp, Probe sequence
gcagaagaaggatataatgtagcag

SEQ ID NO: 41784 - DNA, 25 bp, Probe sequence
tggtcaagacacagatattgctaat

SEQ ID NO: 41785 - DNA, 25 bp, Probe sequence
ttggtcaagacacagatattgctaa

SEQ ID NO: 41786 - DNA, 25 bp, Probe sequence
cgttacaattagcagaagaaggata

SEQ ID NO: 41787 - DNA, 25 bp, Probe sequence
gcgttacaattagcagaagaaggat

SEQ ID NO: 41788 - DNA, 25 bp, Probe sequence
ttatcaagtgttgttggagcagtag

SEQ ID NO: 41789 - DNA, 25 bp, Probe sequence
ttacgagagagcgacacattagttg

SEQ ID NO: 41790 - DNA, 25 bp, Probe sequence
ttatttacgagagagcgacacatta

SEQ ID NO: 41791 - DNA, 25 bp, Probe sequence
tagattatttacgagagagcgacac

SEQ ID NO: 41792 - DNA, 25 bp, Probe sequence
tatttacgagagagcgacacattag

SEQ ID NO: 41793 - DNA, 25 bp, Probe sequence
attatttacgagagagcgacacatt

SEQ ID NO: 41794 - DNA, 25 bp, Probe sequence
ttagattatttacgagagagcgaca

SEQ ID NO: 41795 - DNA, 25 bp, Probe sequence
gattatttacgagagagcgacacat

SEQ ID NO: 41796 - DNA, 25 bp, Probe sequence
tgtttagattatttacgagagagcg

SEQ ID NO: 41797 - DNA, 25 bp, Probe sequence
tcaacttgatcggttaggtagaacg

SEQ ID NO: 41798 - DNA, 25 bp, Probe sequence
taggtgtagacgctgataaagtaac

SEQ ID NO: 41799 - DNA, 25 bp, Probe sequence
tcgctgaattagtaatggaattaga

SEQ ID NO: 41800 - DNA, 25 bp, Probe sequence
gacgctgataaagtaactgaagatg

SEQ ID NO: 41801 - DNA, 25 bp, Probe sequence
agacgctgataaagtaactgaagat

SEQ ID NO: 41802 - DNA, 25 bp, Probe sequence
tgtagacgctgataaagtaactgaa

SEQ ID NO: 41803 - DNA, 25 bp, Probe sequence
ttaggtgtagacgctgataaagtaa

SEQ ID NO: 41804 - DNA, 25 bp, Probe sequence
gtgtagacgctgataaagtaactga

SEQ ID NO: 41805 - DNA, 25 bp, Probe sequence
atggaattagaagacgagtttggta

SEQ ID NO: 41806 - DNA, 25 bp, Probe sequence
aatggaattagaagacgagtttggt

SEQ ID NO: 41807 - DNA, 25 bp, Probe sequence
aagtgccttgctaataatgatgttc

SEQ ID NO: 41808 - DNA, 25 bp, Probe sequence
tggtattagatgatgatagccttga

SEQ ID NO: 41809 - DNA, 25 bp, Probe sequence
gtgccttgctaataatgatgttcaa

SEQ ID NO: 41810 - DNA, 25 bp, Probe sequence
taagtgccttgctaataatgatgtt

SEQ ID NO: 41811 - DNA, 25 bp, Probe sequence
ttgctaataagtgccttgctaataa

SEQ ID NO: 41812 - DNA, 25 bp, Probe sequence
ataagtgccttgctaataatgatgt

SEQ ID NO: 41813 - DNA, 25 bp, Probe sequence
tgctaataagtgccttgctaataat

SEQ ID NO: 41814 - DNA, 25 bp, Probe sequence
agtgccttgctaataatgatgttca

SEQ ID NO: 41815 - DNA, 25 bp, Probe sequence
ttggtattagatgatgatagccttg

SEQ ID NO: 41816 - DNA, 25 bp, Probe sequence
aatgagttattaggcgtggtagatt

SEQ ID NO: 41817 - DNA, 25 bp, Probe sequence
acatcatcgtctattcacttcagaa

SEQ ID NO: 41818 - DNA, 25 bp, Probe sequence
cacatcatcgtctattcacttcaga

SEQ ID NO: 41819 - DNA, 25 bp, Probe sequence
gcacatcatcgtctattcacttcag

SEQ ID NO: 41820 - DNA, 25 bp, Probe sequence
catcatcgtctattcacttcagaag

SEQ ID NO: 41821 - DNA, 25 bp, Probe sequence
tgatgcggtattagaattgacggtt

SEQ ID NO: 41822 - DNA, 25 bp, Probe sequence
atgagttattaggcgtggtagattt

SEQ ID NO: 41823 - DNA, 25 bp, Probe sequence
aaatgagttattaggcgtggtagat

SEQ ID NO: 41824 - DNA, 25 bp, Probe sequence
cgtttagaccataatgagcgtttag

SEQ ID NO: 41825 - DNA, 25 bp, Probe sequence
gagatagcgacaatgatagagcaat

SEQ ID NO: 41826 - DNA, 25 bp, Probe sequence
agatagcgacaatgatagagcaatg

SEQ ID NO: 41827 - DNA, 25 bp, Probe sequence
caagcattaacttcagatgtaacgg

SEQ ID NO: 41828 - DNA, 25 bp, Probe sequence
ccaagcattaacttcagatgtaacg

SEQ ID NO: 41829 - DNA, 25 bp, Probe sequence
tccaagcattaacttcagatgtaac

SEQ ID NO: 41830 - DNA, 25 bp, Probe sequence
cgttagttattggagatagcgacaa

SEQ ID NO: 41831 - DNA, 25 bp, Probe sequence
taatggcgtaagtcatagtgaatgg

SEQ ID NO: 41832 - DNA, 25 bp, Probe sequence
ttaatggcgtaagtcatagtgaatg

SEQ ID NO: 41833 - DNA, 25 bp, Probe sequence
atccaagcattaacttcagatgtaa

SEQ ID NO: 41834 - DNA, 25 bp, Probe sequence
acatcaagatcagtcaagaagaatt

SEQ ID NO: 41835 - DNA, 25 bp, Probe sequence
gatacatcaagatcagtcaagaaga

SEQ ID NO: 41836 - DNA, 25 bp, Probe sequence
agatacatcaagatcagtcaagaag

SEQ ID NO: 41837 - DNA, 25 bp, Probe sequence
attccattgcttaattggttgacac

SEQ ID NO: 41838 - DNA, 25 bp, Probe sequence
tacatcaagatcagtcaagaagaat

SEQ ID NO: 41839 - DNA, 25 bp, Probe sequence
atacatcaagatcagtcaagaagaa

SEQ ID NO: 41840 - DNA, 25 bp, Probe sequence
aagatacatcaagatcagtcaagaa

SEQ ID NO: 41841 - DNA, 25 bp, Probe sequence
tcaagatcagtcaagaagaattaga

SEQ ID NO: 41842 - DNA, 25 bp, Probe sequence
ttccattgcttaattggttgacacc

SEQ ID NO: 41843 - DNA, 25 bp, Probe sequence
aatagatgatgtgttgaaggaggag

SEQ ID NO: 41844 - DNA, 25 bp, Probe sequence
tgacaacaatgagacaccaattaga

SEQ ID NO: 41845 - DNA, 25 bp, Probe sequence
acaacaatgagacaccaattagaag

SEQ ID NO: 41846 - DNA, 25 bp, Probe sequence
gacaacaatgagacaccaattagaa

SEQ ID NO: 41847 - DNA, 25 bp, Probe sequence
aattattgaagaatcggctggtgta

SEQ ID NO: 41848 - DNA, 25 bp, Probe sequence
caacaatgagacaccaattagaaga

SEQ ID NO: 41849 - DNA, 25 bp, Probe sequence
caatagatgatgtgttgaaggagga

SEQ ID NO: 41850 - DNA, 25 bp, Probe sequence
ccaattagaagattacttgcgtcaa

SEQ ID NO: 41851 - DNA, 25 bp, Probe sequence
caccaattagaagattacttgcgtc

SEQ ID NO: 41852 - DNA, 25 bp, Probe sequence
gactcattgtcagattcatatccaa

SEQ ID NO: 41853 - DNA, 25 bp, Probe sequence
tagcagttcaaagatggaataatcg

SEQ ID NO: 41854 - DNA, 25 bp, Probe sequence
aaatgtagcagttcaaagatggaat

SEQ ID NO: 41855 - DNA, 25 bp, Probe sequence
tgtagcagttcaaagatggaataat

SEQ ID NO: 41856 - DNA, 25 bp, Probe sequence
atgtagcagttcaaagatggaataa

SEQ ID NO: 41857 - DNA, 25 bp, Probe sequence
aatgtagcagttcaaagatggaata

SEQ ID NO: 41858 - DNA, 25 bp, Probe sequence
gtagcagttcaaagatggaataatc

SEQ ID NO: 41859 - DNA, 25 bp, Probe sequence
agcagttcaaagatggaataatcga

SEQ ID NO: 41860 - DNA, 25 bp, Probe sequence
ggttttaattttagatgagccagca

SEQ ID NO: 41861 - DNA, 25 bp, Probe sequence
ggttggaggtattggtgatatgtat

SEQ ID NO: 41862 - DNA, 25 bp, Probe sequence
gtgtaggttcagactatccgttatc

SEQ ID NO: 41863 - DNA, 25 bp, Probe sequence
tgtctacgaattaggtcaatcagtc

SEQ ID NO: 41864 - DNA, 25 bp, Probe sequence
gagttcttcagagcagatacagatt

SEQ ID NO: 41865 - DNA, 25 bp, Probe sequence
gtaggttcagactatccgttatctc

SEQ ID NO: 41866 - DNA, 25 bp, Probe sequence
tgtaggttcagactatccgttatct

SEQ ID NO: 41867 - DNA, 25 bp, Probe sequence
agaacaagaagtggcaattatgatt

SEQ ID NO: 41868 - DNA, 25 bp, Probe sequence
aagaacaagaagtggcaattatgat

SEQ ID NO: 41869 - DNA, 25 bp, Probe sequence
gttacagcagatacaggaatggatg

SEQ ID NO: 41870 - DNA, 25 bp, Probe sequence
ccgtaacaccattctactatccatt

SEQ ID NO: 41871 - DNA, 25 bp, Probe sequence
attgctcaagtaggttcgttagatt

SEQ ID NO: 41872 - DNA, 25 bp, Probe sequence
gattgctcaagtaggttcgttagat

SEQ ID NO: 41873 - DNA, 25 bp, Probe sequence
ttctgccgtaacaccattctactat

SEQ ID NO: 41874 - DNA, 25 bp, Probe sequence
tctgccgtaacaccattctactatc

SEQ ID NO: 41875 - DNA, 25 bp, Probe sequence
atatgccacagaactcggttatgat

SEQ ID NO: 41876 - DNA, 25 bp, Probe sequence
gccgtaacaccattctactatccat

SEQ ID NO: 41877 - DNA, 25 bp, Probe sequence
tgattgctcaagtaggttcgttaga

SEQ ID NO: 41878 - DNA, 25 bp, Probe sequence
aatatgccacagaactcggttatga

SEQ ID NO: 41879 - DNA, 25 bp, Probe sequence
ctgctgttatgtatgatgcgattaa

SEQ ID NO: 41880 - DNA, 25 bp, Probe sequence
gtgagcaattagatgacttacaacc

SEQ ID NO: 41881 - DNA, 25 bp, Probe sequence
ggtgagcaattagatgacttacaac

SEQ ID NO: 41882 - DNA, 25 bp, Probe sequence
aggtgagcaattagatgacttacaa

SEQ ID NO: 41883 - DNA, 25 bp, Probe sequence
tgagcaattagatgacttacaacca

SEQ ID NO: 41884 - DNA, 25 bp, Probe sequence
gcttattcgctgatatgattgaaca

SEQ ID NO: 41885 - DNA, 25 bp, Probe sequence
ctacggcttattcgctgatatgatt

SEQ ID NO: 41886 - DNA, 25 bp, Probe sequence
ggcttattcgctgatatgattgaac

SEQ ID NO: 41887 - DNA, 25 bp, Probe sequence
ttagatgctacaactggtcagaatg

SEQ ID NO: 41888 - DNA, 25 bp, Probe sequence
aactctcatccacatcaatcatcaa

SEQ ID NO: 41889 - DNA, 25 bp, Probe sequence
tgtgtggaattgttggttatattgg

SEQ ID NO: 41890 - DNA, 25 bp, Probe sequence
gtggaattgttggttatattggcta

SEQ ID NO: 41891 - DNA, 25 bp, Probe sequence
tgtggaattgttggttatattggct

SEQ ID NO: 41892 - DNA, 25 bp, Probe sequence
gtgtggaattgttggttatattggc

SEQ ID NO: 41893 - DNA, 25 bp, Probe sequence
cagtaatgcgtcgtattattcaaga

SEQ ID NO: 41894 - DNA, 25 bp, Probe sequence
agtaatgcgtcgtattattcaagaa

SEQ ID NO: 41895 - DNA, 25 bp, Probe sequence
tggaattgttggttatattggctat

SEQ ID NO: 41896 - DNA, 25 bp, Probe sequence
caatgttacaagtgacaagcgaata

SEQ ID NO: 41897 - DNA, 25 bp, Probe sequence
tgataatataagaagaactggcgat

SEQ ID NO: 41898 - DNA, 25 bp, Probe sequence
atgataatataagaagaactggcga

SEQ ID NO: 41899 - DNA, 25 bp, Probe sequence
ctggcgatttagttgaagattatga

SEQ ID NO: 41900 - DNA, 25 bp, Probe sequence
tggcgatttagttgaagattatgaa

SEQ ID NO: 41901 - DNA, 25 bp, Probe sequence
gataatataagaagaactggcgatt

SEQ ID NO: 41902 - DNA, 25 bp, Probe sequence
actggcgatttagttgaagattatg

SEQ ID NO: 41903 - DNA, 25 bp, Probe sequence
gtgagtagacaagcagtttatgata

SEQ ID NO: 41904 - DNA, 25 bp, Probe sequence
caacgccgagaaatatatgatgaaa

SEQ ID NO: 41905 - DNA, 25 bp, Probe sequence
acgccgagaaatatatgatgaaatg

SEQ ID NO: 41906 - DNA, 25 bp, Probe sequence
cgttcattacaagaagtcaatcgtt

SEQ ID NO: 41907 - DNA, 25 bp, Probe sequence
cctactgttgttatgatggttggtt

SEQ ID NO: 41908 - DNA, 25 bp, Probe sequence
cgatgaagcattgatgaacgaatta

SEQ ID NO: 41909 - DNA, 25 bp, Probe sequence
gatgcgtgaagtaagattagcgtta

SEQ ID NO: 41910 - DNA, 25 bp, Probe sequence
taatgatgcgtgaagtaagattagc

SEQ ID NO: 41911 - DNA, 25 bp, Probe sequence
agataatgatgcgtgaagtaagatt

SEQ ID NO: 41912 - DNA, 25 bp, Probe sequence
aagataatgatgcgtgaagtaagat

SEQ ID NO: 41913 - DNA, 25 bp, Probe sequence
aatgatgcgtgaagtaagattagcg

SEQ ID NO: 41914 - DNA, 25 bp, Probe sequence
gatgaagcattgatgaacgaattaa

SEQ ID NO: 41915 - DNA, 25 bp, Probe sequence
tgatggattacaatacaactggtga

SEQ ID NO: 41916 - DNA, 25 bp, Probe sequence
ggattacaatacaactggtgatggt

SEQ ID NO: 41917 - DNA, 25 bp, Probe sequence
tggattacaatacaactggtgatgg

SEQ ID NO: 41918 - DNA, 25 bp, Probe sequence
tggagacagaatcatagcagtagat

SEQ ID NO: 41919 - DNA, 25 bp, Probe sequence
atggattacaatacaactggtgatg

SEQ ID NO: 41920 - DNA, 25 bp, Probe sequence
atgatggattacaatacaactggtg

SEQ ID NO: 41921 - DNA, 25 bp, Probe sequence
ggagacagaatcatagcagtagatg

SEQ ID NO: 41922 - DNA, 25 bp, Probe sequence
gatggagacagaatcatagcagtag

SEQ ID NO: 41923 - DNA, 25 bp, Probe sequence
gatggattacaatacaactggtgat

SEQ ID NO: 41924 - DNA, 25 bp, Probe sequence
ccattctatcgtatcgtagtagcag

SEQ ID NO: 41925 - DNA, 25 bp, Probe sequence
tccattctatcgtatcgtagtagca

SEQ ID NO: 41926 - DNA, 25 bp, Probe sequence
atccattctatcgtatcgtagtagc

SEQ ID NO: 41927 - DNA, 25 bp, Probe sequence
tctatcgtatcgtagtagcagatgc

SEQ ID NO: 41928 - DNA, 25 bp, Probe sequence
ttctatcgtatcgtagtagcagatg

SEQ ID NO: 41929 - DNA, 25 bp, Probe sequence
cattctatcgtatcgtagtagcaga

SEQ ID NO: 41930 - DNA, 25 bp, Probe sequence
attctatcgtatcgtagtagcagat

SEQ ID NO: 41931 - DNA, 25 bp, Probe sequence
aatccattctatcgtatcgtagtag

SEQ ID NO: 41932 - DNA, 25 bp, Probe sequence
aatgctccagaaattaaagttgacg

SEQ ID NO: 41933 - DNA, 25 bp, Probe sequence
tataagcgaagttgatgcagaagta

SEQ ID NO: 41934 - DNA, 25 bp, Probe sequence
aatataagcgaagttgatgcagaag

SEQ ID NO: 41935 - DNA, 25 bp, Probe sequence
actatttcaggaccacaatcaaaga

SEQ ID NO: 41936 - DNA, 25 bp, Probe sequence
gactatttcaggaccacaatcaaag

SEQ ID NO: 41937 - DNA, 25 bp, Probe sequence
atataagcgaagttgatgcagaagt

SEQ ID NO: 41938 - DNA, 25 bp, Probe sequence
acagaaaggtagtttagcagatgat

SEQ ID NO: 41939 - DNA, 25 bp, Probe sequence
attacaaagcaagaagtttcaccac

SEQ ID NO: 41940 - DNA, 25 bp, Probe sequence
tctttaacactggtaatcttggtca

SEQ ID NO: 41941 - DNA, 25 bp, Probe sequence
aattacaaagcaagaagtttcacca

SEQ ID NO: 41942 - DNA, 25 bp, Probe sequence
tgattccttatattgctgatgttgt

SEQ ID NO: 41943 - DNA, 25 bp, Probe sequence
ttgattccttatattgctgatgttg

SEQ ID NO: 41944 - DNA, 25 bp, Probe sequence
aacgaccttgaatatactgttaagt

SEQ ID NO: 41945 - DNA, 25 bp, Probe sequence
gcataacaataacgaccttgaatat

SEQ ID NO: 41946 - DNA, 25 bp, Probe sequence
cgaccttgaatatactgttaagtca

SEQ ID NO: 41947 - DNA, 25 bp, Probe sequence
acgaccttgaatatactgttaagtc

SEQ ID NO: 41948 - DNA, 25 bp, Probe sequence
acaataacgaccttgaatatactgt

SEQ ID NO: 41949 - DNA, 25 bp, Probe sequence
attatcatcacgccaatggaaggat

SEQ ID NO: 41950 - DNA, 25 bp, Probe sequence
atatttgaaacaggtgcgaatgatg

SEQ ID NO: 41951 - DNA, 25 bp, Probe sequence
gccattgtctgatagtcctaagata

SEQ ID NO: 41952 - DNA, 25 bp, Probe sequence
cgttagaacaacttggtagaggtag

SEQ ID NO: 41953 - DNA, 25 bp, Probe sequence
gttagaacaacttggtagaggtagc

SEQ ID NO: 41954 - DNA, 25 bp, Probe sequence
tgccattgtctgatagtcctaagat

SEQ ID NO: 41955 - DNA, 25 bp, Probe sequence
ttgccattgtctgatagtcctaaga

SEQ ID NO: 41956 - DNA, 25 bp, Probe sequence
tgttattggtcagcagataagtatg

SEQ ID NO: 41957 - DNA, 25 bp, Probe sequence
aattgttattggtcagcagataagt

SEQ ID NO: 41958 - DNA, 25 bp, Probe sequence
ttagtaattgttattggtcagcaga

SEQ ID NO: 41959 - DNA, 25 bp, Probe sequence
agtaattgttattggtcagcagata

SEQ ID NO: 41960 - DNA, 25 bp, Probe sequence
tgatgctattgttagactgattcca

SEQ ID NO: 41961 - DNA, 25 bp, Probe sequence
acaagcacaaccaagtagatgatta

SEQ ID NO: 41962 - DNA, 25 bp, Probe sequence
taacaagcacaaccaagtagatgat

SEQ ID NO: 41963 - DNA, 25 bp, Probe sequence
tgactgatgctattgttagactgat

SEQ ID NO: 41964 - DNA, 25 bp, Probe sequence
atgactgatgctattgttagactga

SEQ ID NO: 41965 - DNA, 25 bp, Probe sequence
ttaatgcgatggaagacttagatgt

SEQ ID NO: 41966 - DNA, 25 bp, Probe sequence
caagcacaaccaagtagatgattat

SEQ ID NO: 41967 - DNA, 25 bp, Probe sequence
attaacaagcacaaccaagtagatg

SEQ ID NO: 41968 - DNA, 25 bp, Probe sequence
aagtagatgattatccgtatggtgg

SEQ ID NO: 41969 - DNA, 25 bp, Probe sequence
acatcgtactaattggtatgagaga

SEQ ID NO: 41970 - DNA, 25 bp, Probe sequence
aatatacctgaagagtcaccaagtg

SEQ ID NO: 41971 - DNA, 25 bp, Probe sequence
aacatcgtactaattggtatgagag

SEQ ID NO: 41972 - DNA, 25 bp, Probe sequence
atatacctgaagagtcaccaagtgg

SEQ ID NO: 41973 - DNA, 25 bp, Probe sequence
taggttcagtatcagcaataagtaa

SEQ ID NO: 41974 - DNA, 25 bp, Probe sequence
catcgtactaattggtatgagagat

SEQ ID NO: 41975 - DNA, 25 bp, Probe sequence
tattcatggtatgcctctaaggatt

SEQ ID NO: 41976 - DNA, 25 bp, Probe sequence
atattcatggtatgcctctaaggat

SEQ ID NO: 41977 - DNA, 25 bp, Probe sequence
aatattcatggtatgcctctaagga

SEQ ID NO: 41978 - DNA, 25 bp, Probe sequence
tagagtaatggctgttgttgtaagt

SEQ ID NO: 41979 - DNA, 25 bp, Probe sequence
agagtaatggctgttgttgtaagtt

SEQ ID NO: 41980 - DNA, 25 bp, Probe sequence
ttagagtaatggctgttgttgtaag

SEQ ID NO: 41981 - DNA, 25 bp, Probe sequence
ctattagagtaatggctgttgttgt

SEQ ID NO: 41982 - DNA, 25 bp, Probe sequence
aatatagcgataatcacactgaggc

SEQ ID NO: 41983 - DNA, 25 bp, Probe sequence
ttgacagattgaataagaagaccat

SEQ ID NO: 41984 - DNA, 25 bp, Probe sequence
attgacagattgaataagaagacca

SEQ ID NO: 41985 - DNA, 25 bp, Probe sequence
actattagagtaatggctgttgttg

SEQ ID NO: 41986 - DNA, 25 bp, Probe sequence
attagagtaatggctgttgttgtaa

SEQ ID NO: 41987 - DNA, 25 bp, Probe sequence
tactcgtgagcgtatccaagtattc

SEQ ID NO: 41988 - DNA, 25 bp, Probe sequence
gtacattcccattacacacaccaaa

SEQ ID NO: 41989 - DNA, 25 bp, Probe sequence
gtactcgtgagcgtatccaagtatt

SEQ ID NO: 41990 - DNA, 25 bp, Probe sequence
gtaaagctgctagaatccaagaaat

SEQ ID NO: 41991 - DNA, 25 bp, Probe sequence
ggtaaagctgctagaatccaagaaa

SEQ ID NO: 41992 - DNA, 25 bp, Probe sequence
agtttccgtcctggtgatactttac

SEQ ID NO: 41993 - DNA, 25 bp, Probe sequence
tcgaagcagtaactaaatcacaatt

SEQ ID NO: 41994 - DNA, 25 bp, Probe sequence
aatcgaagcagtaactaaatcacaa

SEQ ID NO: 41995 - DNA, 25 bp, Probe sequence
tcacaaattaatcgaagcagtaact

SEQ ID NO: 41996 - DNA, 25 bp, Probe sequence
tgttcatacgatgttaccttcaagt

SEQ ID NO: 41997 - DNA, 25 bp, Probe sequence
agatgttcatacgatgttaccttca

SEQ ID NO: 41998 - DNA, 25 bp, Probe sequence
atgttcatacgatgttaccttcaag

SEQ ID NO: 41999 - DNA, 25 bp, Probe sequence
gatgttcatacgatgttaccttcaa

SEQ ID NO: 42000 - DNA, 25 bp, Probe sequence
gttcatacgatgttaccttcaagta

SEQ ID NO: 42001 - DNA, 25 bp, Probe sequence
gcaccgtcaatatatcaatcagatg

SEQ ID NO: 42002 - DNA, 25 bp, Probe sequence
ggatcattctattcttggcgtaatt

SEQ ID NO: 42003 - DNA, 25 bp, Probe sequence
acatacggatcattctattcttggc

SEQ ID NO: 42004 - DNA, 25 bp, Probe sequence
aattattgtaacgacacctcatcct

SEQ ID NO: 42005 - DNA, 25 bp, Probe sequence
attgattacgaagcagtcattgaac

SEQ ID NO: 42006 - DNA, 25 bp, Probe sequence
aattgattacgaagcagtcattgaa

SEQ ID NO: 42007 - DNA, 25 bp, Probe sequence
ttgattacgaagcagtcattgaact

SEQ ID NO: 42008 - DNA, 25 bp, Probe sequence
ggttattcaatggtatccaggacat

SEQ ID NO: 42009 - DNA, 25 bp, Probe sequence
atggttattcaatggtatccaggac

SEQ ID NO: 42010 - DNA, 25 bp, Probe sequence
tggttattcaatggtatccaggaca

SEQ ID NO: 42011 - DNA, 25 bp, Probe sequence
tatgactgaggaattagcaaatgac

SEQ ID NO: 42012 - DNA, 25 bp, Probe sequence
aataaactggcaaagcgtagtattg

SEQ ID NO: 42013 - DNA, 25 bp, Probe sequence
aaataaactggcaaagcgtagtatt

SEQ ID NO: 42014 - DNA, 25 bp, Probe sequence
tagttgctgttatgttgattagtgc

SEQ ID NO: 42015 - DNA, 25 bp, Probe sequence
acagcgttacctagtataatgagag

SEQ ID NO: 42016 - DNA, 25 bp, Probe sequence
cagcgttacctagtataatgagaga

SEQ ID NO: 42017 - DNA, 25 bp, Probe sequence
ttgctgttatgttgattagtgcgtt

SEQ ID NO: 42018 - DNA, 25 bp, Probe sequence
agcgttacctagtataatgagagaa

SEQ ID NO: 42019 - DNA, 25 bp, Probe sequence
tacagcgttacctagtataatgaga

SEQ ID NO: 42020 - DNA, 25 bp, Probe sequence
agttgctgttatgttgattagtgcg

SEQ ID NO: 42021 - DNA, 25 bp, Probe sequence
gttgctgttatgttgattagtgcgt

SEQ ID NO: 42022 - DNA, 25 bp, Probe sequence
cttgttatggcagcttatgtgatag

SEQ ID NO: 42023 - DNA, 25 bp, Probe sequence
attgatgaagttggaagaggacctt

SEQ ID NO: 42024 - DNA, 25 bp, Probe sequence
ggattatcagtacaaccaacgcatt

SEQ ID NO: 42025 - DNA, 25 bp, Probe sequence
ttcgtgatgattatatgacacagtt

SEQ ID NO: 42026 - DNA, 25 bp, Probe sequence
accaaacaacatttactagcaatcg

SEQ ID NO: 42027 - DNA, 25 bp, Probe sequence
acaaccaacgcatttattgatagac

SEQ ID NO: 42028 - DNA, 25 bp, Probe sequence
tgatattggcattatgaaagagcat

SEQ ID NO: 42029 - DNA, 25 bp, Probe sequence
atgatattggcattatgaaagagca

SEQ ID NO: 42030 - DNA, 25 bp, Probe sequence
aatgcggttaatacaatagaagaat

SEQ ID NO: 42031 - DNA, 25 bp, Probe sequence
gatgaagttggaagaggacctttag

SEQ ID NO: 42032 - DNA, 25 bp, Probe sequence
aatgtgatgttatcgcagaaggtat

SEQ ID NO: 42033 - DNA, 25 bp, Probe sequence
gatggtgatgtattggcattagatg

SEQ ID NO: 42034 - DNA, 25 bp, Probe sequence
tgatggtgatgtattggcattagat

SEQ ID NO: 42035 - DNA, 25 bp, Probe sequence
atgtgatgttatcgcagaaggtatc

SEQ ID NO: 42036 - DNA, 25 bp, Probe sequence
ctgatggtgatgtattggcattaga

SEQ ID NO: 42037 - DNA, 25 bp, Probe sequence
tgaatatccacgagtatcaaggtaa

SEQ ID NO: 42038 - DNA, 25 bp, Probe sequence
gttatcgcagaaggtatcgttgaag

SEQ ID NO: 42039 - DNA, 25 bp, Probe sequence
atgaatatccacgagtatcaaggta

SEQ ID NO: 42040 - DNA, 25 bp, Probe sequence
gatgttatcgcagaaggtatcgttg

SEQ ID NO: 42041 - DNA, 25 bp, Probe sequence
atgtgttaagtgctgttgctgtaat

SEQ ID NO: 42042 - DNA, 25 bp, Probe sequence
gcatcaataggttcaacaataatgg

SEQ ID NO: 42043 - DNA, 25 bp, Probe sequence
ggcatcaataggttcaacaataatg

SEQ ID NO: 42044 - DNA, 25 bp, Probe sequence
aatgtgttaagtgctgttgctgtaa

SEQ ID NO: 42045 - DNA, 25 bp, Probe sequence
tgtgttaagtgctgttgctgtaatt

SEQ ID NO: 42046 - DNA, 25 bp, Probe sequence
tgttaagtgctgttgctgtaattag

SEQ ID NO: 42047 - DNA, 25 bp, Probe sequence
gtgttaagtgctgttgctgtaatta

SEQ ID NO: 42048 - DNA, 25 bp, Probe sequence
gtctaccttcaagaacaactaggat

SEQ ID NO: 42049 - DNA, 25 bp, Probe sequence
agtctaccttcaagaacaactagga

SEQ ID NO: 42050 - DNA, 25 bp, Probe sequence
ccgcttctaggtggtggtatattag

SEQ ID NO: 42051 - DNA, 25 bp, Probe sequence
cgcttctaggtggtggtatattaga

SEQ ID NO: 42052 - DNA, 25 bp, Probe sequence
ggaggtatttcatgcgattaaagtc

SEQ ID NO: 42053 - DNA, 25 bp, Probe sequence
aggaggtatttcatgcgattaaagt

SEQ ID NO: 42054 - DNA, 25 bp, Probe sequence
gaggtatttcatgcgattaaagtca

SEQ ID NO: 42055 - DNA, 25 bp, Probe sequence
aaggaggtatttcatgcgattaaag

SEQ ID NO: 42056 - DNA, 25 bp, Probe sequence
agaaggaggtatttcatgcgattaa

SEQ ID NO: 42057 - DNA, 25 bp, Probe sequence
atagaaggaggtatttcatgcgatt

SEQ ID NO: 42058 - DNA, 25 bp, Probe sequence
aggtatttcatgcgattaaagtcaa

SEQ ID NO: 42059 - DNA, 25 bp, Probe sequence
aaagtggtcataaacaagattcgga

SEQ ID NO: 42060 - DNA, 25 bp, Probe sequence
agtggtcataaacaagattcggaaa

SEQ ID NO: 42061 - DNA, 25 bp, Probe sequence
aagtggtcataaacaagattcggaa

SEQ ID NO: 42062 - DNA, 25 bp, Probe sequence
agcgaattaaagatgaagaagatgt

SEQ ID NO: 42063 - DNA, 25 bp, Probe sequence
gcttcgctaaagttacaagtaaaca

SEQ ID NO: 42064 - DNA, 25 bp, Probe sequence
gtgaatcaaactaagggtgacaatc

SEQ ID NO: 42065 - DNA, 25 bp, Probe sequence
agtgaatcaaactaagggtgacaat

SEQ ID NO: 42066 - DNA, 25 bp, Probe sequence
atgtagagaaagaattaggattgcc

SEQ ID NO: 42067 - DNA, 25 bp, Probe sequence
tcgtcttatcacctaaatatcaagc

SEQ ID NO: 42068 - DNA, 25 bp, Probe sequence
caacaaatcattcaacaaactggtg

SEQ ID NO: 42069 - DNA, 25 bp, Probe sequence
tcaacaaatcattcaacaaactggt

SEQ ID NO: 42070 - DNA, 25 bp, Probe sequence
atatcggcatccctactatctcatt

SEQ ID NO: 42071 - DNA, 25 bp, Probe sequence
aatatcggcatccctactatctcat

SEQ ID NO: 42072 - DNA, 25 bp, Probe sequence
aaatatcggcatccctactatctca

SEQ ID NO: 42073 - DNA, 25 bp, Probe sequence
gcgtaataccgaccatcaatttatc

SEQ ID NO: 42074 - DNA, 25 bp, Probe sequence
cgaccatcaatttatcaacacacaa

SEQ ID NO: 42075 - DNA, 25 bp, Probe sequence
taccgaccatcaatttatcaacaca

SEQ ID NO: 42076 - DNA, 25 bp, Probe sequence
ataccgaccatcaatttatcaacac

SEQ ID NO: 42077 - DNA, 25 bp, Probe sequence
ggtattatgcctggctatattcaca

SEQ ID NO: 42078 - DNA, 25 bp, Probe sequence
tggtattatgcctggctatattcac

SEQ ID NO: 42079 - DNA, 25 bp, Probe sequence
ttggtattatgcctggctatattca

SEQ ID NO: 42080 - DNA, 25 bp, Probe sequence
gtattatgcctggctatattcacaa

SEQ ID NO: 42081 - DNA, 25 bp, Probe sequence
attggtattatgcctggctatattc

SEQ ID NO: 42082 - DNA, 25 bp, Probe sequence
caggtgtgattacagcagatgaatg

SEQ ID NO: 42083 - DNA, 25 bp, Probe sequence
aattggtattatgcctggctatatt

SEQ ID NO: 42084 - DNA, 25 bp, Probe sequence
aaagcagttgttatgattggtgaaa

SEQ ID NO: 42085 - DNA, 25 bp, Probe sequence
aagcagttgttatgattggtgaaat

SEQ ID NO: 42086 - DNA, 25 bp, Probe sequence
ttcgcacatcatggatattcatatt

SEQ ID NO: 42087 - DNA, 25 bp, Probe sequence
ttattcgcacatcatggatattcat

SEQ ID NO: 42088 - DNA, 25 bp, Probe sequence
attcgcacatcatggatattcatat

SEQ ID NO: 42089 - DNA, 25 bp, Probe sequence
tcgcacatcatggatattcatatta

SEQ ID NO: 42090 - DNA, 25 bp, Probe sequence
tattcgcacatcatggatattcata

SEQ ID NO: 42091 - DNA, 25 bp, Probe sequence
ttgcgtctgtgagtatgtctattta

SEQ ID NO: 42092 - DNA, 25 bp, Probe sequence
tgcgtctgtgagtatgtctatttat

SEQ ID NO: 42093 - DNA, 25 bp, Probe sequence
gcgtctgtgagtatgtctatttatg

SEQ ID NO: 42094 - DNA, 25 bp, Probe sequence
ggctgggtaggtattatcttgttac

SEQ ID NO: 42095 - DNA, 25 bp, Probe sequence
gaagagaaggtagcgtcattagatt

SEQ ID NO: 42096 - DNA, 25 bp, Probe sequence
atgagtgatgatgagattaagcgtt

SEQ ID NO: 42097 - DNA, 25 bp, Probe sequence
aatgagtgatgatgagattaagcgt

SEQ ID NO: 42098 - DNA, 25 bp, Probe sequence
tagacaaggcaggatacttagaaga

SEQ ID NO: 42099 - DNA, 25 bp, Probe sequence
ttagacaaggcaggatacttagaag

SEQ ID NO: 42100 - DNA, 25 bp, Probe sequence
agacaaggcaggatacttagaagaa

SEQ ID NO: 42101 - DNA, 25 bp, Probe sequence
cgttacaagttcctagagaagaaga

SEQ ID NO: 42102 - DNA, 25 bp, Probe sequence
cttgaagagaaggtagcgtcattag

SEQ ID NO: 42103 - DNA, 25 bp, Probe sequence
tgaagagaaggtagcgtcattagat

SEQ ID NO: 42104 - DNA, 25 bp, Probe sequence
tgagattggtgttaaggttgaagat

SEQ ID NO: 42105 - DNA, 25 bp, Probe sequence
ttgagattggtgttaaggttgaaga

SEQ ID NO: 42106 - DNA, 25 bp, Probe sequence
attgagattggtgttaaggttgaag

SEQ ID NO: 42107 - DNA, 25 bp, Probe sequence
agactattgagattggtgttaaggt

SEQ ID NO: 42108 - DNA, 25 bp, Probe sequence
gagattggtgttaaggttgaagatt

SEQ ID NO: 42109 - DNA, 25 bp, Probe sequence
atctccatcaaggttatacaacagg

SEQ ID NO: 42110 - DNA, 25 bp, Probe sequence
actattgagattggtgttaaggttg

SEQ ID NO: 42111 - DNA, 25 bp, Probe sequence
ctattgagattggtgttaaggttga

SEQ ID NO: 42112 - DNA, 25 bp, Probe sequence
gactattgagattggtgttaaggtt

SEQ ID NO: 42113 - DNA, 25 bp, Probe sequence
ttacggttatcattctagcaactct

SEQ ID NO: 42114 - DNA, 25 bp, Probe sequence
gttacggttatcattctagcaactc

SEQ ID NO: 42115 - DNA, 25 bp, Probe sequence
ggttacggttatcattctagcaact

SEQ ID NO: 42116 - DNA, 25 bp, Probe sequence
tacggttatcattctagcaactcta

SEQ ID NO: 42117 - DNA, 25 bp, Probe sequence
acaggtggacttgtagacttatctt

SEQ ID NO: 42118 - DNA, 25 bp, Probe sequence
aacaggtggacttgtagacttatct

SEQ ID NO: 42119 - DNA, 25 bp, Probe sequence
tcggttacggttatcattctagcaa

SEQ ID NO: 42120 - DNA, 25 bp, Probe sequence
cggttacggttatcattctagcaac

SEQ ID NO: 42121 - DNA, 25 bp, Probe sequence
acggttatcattctagcaactctag

SEQ ID NO: 42122 - DNA, 25 bp, Probe sequence
tatccaagaaggtgctaaggtagta

SEQ ID NO: 42123 - DNA, 25 bp, Probe sequence
ccaagaaggtgctaaggtagtatta

SEQ ID NO: 42124 - DNA, 25 bp, Probe sequence
atccaagaaggtgctaaggtagtat

SEQ ID NO: 42125 - DNA, 25 bp, Probe sequence
tccaagaaggtgctaaggtagtatt

SEQ ID NO: 42126 - DNA, 25 bp, Probe sequence
gtatccaagaaggtgctaaggtagt

SEQ ID NO: 42127 - DNA, 25 bp, Probe sequence
caagaaggtgctaaggtagtattaa

SEQ ID NO: 42128 - DNA, 25 bp, Probe sequence
cgtatccaagaaggtgctaaggtag

SEQ ID NO: 42129 - DNA, 25 bp, Probe sequence
tttatgtgaatgggtgaatagggaa

SEQ ID NO: 42130 - DNA, 25 bp, Probe sequence
ttatgtgaatgggtgaatagggaag

SEQ ID NO: 42131 - DNA, 25 bp, Probe sequence
actattgctaccattattgcgaact

SEQ ID NO: 42132 - DNA, 25 bp, Probe sequence
tattgctaccattattgcgaactac

SEQ ID NO: 42133 - DNA, 25 bp, Probe sequence
tactattgctaccattattgcgaac

SEQ ID NO: 42134 - DNA, 25 bp, Probe sequence
acaagtagacaatatggtgaaggat

SEQ ID NO: 42135 - DNA, 25 bp, Probe sequence
attgctaccattattgcgaactaca

SEQ ID NO: 42136 - DNA, 25 bp, Probe sequence
ctattgctaccattattgcgaacta

SEQ ID NO: 42137 - DNA, 25 bp, Probe sequence
gtgaaggatattattctcgtcgtga

SEQ ID NO: 42138 - DNA, 25 bp, Probe sequence
atggtgaaggatattattctcgtcg

SEQ ID NO: 42139 - DNA, 25 bp, Probe sequence
tacaagtagacaatatggtgaagga

SEQ ID NO: 42140 - DNA, 25 bp, Probe sequence
aaggcaagacaacacaagtaatatg

SEQ ID NO: 42141 - DNA, 25 bp, Probe sequence
ccaagatatactgaggcgagattag

SEQ ID NO: 42142 - DNA, 25 bp, Probe sequence
atacacaaccacctccaagatatac

SEQ ID NO: 42143 - DNA, 25 bp, Probe sequence
tccaagatatactgaggcgagatta

SEQ ID NO: 42144 - DNA, 25 bp, Probe sequence
ctatacacaaccacctccaagatat

SEQ ID NO: 42145 - DNA, 25 bp, Probe sequence
actatacacaaccacctccaagata

SEQ ID NO: 42146 - DNA, 25 bp, Probe sequence
tacacaaccacctccaagatatact

SEQ ID NO: 42147 - DNA, 25 bp, Probe sequence
atggtcgcacaacaattatatgaag

SEQ ID NO: 42148 - DNA, 25 bp, Probe sequence
gatggtcgcacaacaattatatgaa

SEQ ID NO: 42149 - DNA, 25 bp, Probe sequence
gtattgaatctaggtgatgctgttg

SEQ ID NO: 42150 - DNA, 25 bp, Probe sequence
tgtattgaatctaggtgatgctgtt

SEQ ID NO: 42151 - DNA, 25 bp, Probe sequence
atgtattgaatctaggtgatgctgt

SEQ ID NO: 42152 - DNA, 25 bp, Probe sequence
gatgtattgaatctaggtgatgctg

SEQ ID NO: 42153 - DNA, 25 bp, Probe sequence
tattgaatctaggtgatgctgttgc

SEQ ID NO: 42154 - DNA, 25 bp, Probe sequence
ccgttagcctcacctgatgttatag

SEQ ID NO: 42155 - DNA, 25 bp, Probe sequence
taggtatttctaaaggtgccagttt

SEQ ID NO: 42156 - DNA, 25 bp, Probe sequence
ataggtatttctaaaggtgccagtt

SEQ ID NO: 42157 - DNA, 25 bp, Probe sequence
ataagtttatgtgtagggtctgtca

SEQ ID NO: 42158 - DNA, 25 bp, Probe sequence
aatgactggtgttgaaggttatgta

SEQ ID NO: 42159 - DNA, 25 bp, Probe sequence
gactggtgttgaaggttatgtagaa

SEQ ID NO: 42160 - DNA, 25 bp, Probe sequence
atgactggtgttgaaggttatgtag

SEQ ID NO: 42161 - DNA, 25 bp, Probe sequence
tgactggtgttgaaggttatgtaga

SEQ ID NO: 42162 - DNA, 25 bp, Probe sequence
ttccaacctatgaatgctaacttcg

SEQ ID NO: 42163 - DNA, 25 bp, Probe sequence
attatcgcaacaggaccacttacta

SEQ ID NO: 42164 - DNA, 25 bp, Probe sequence
gcattagcagttgatagacacgatt

SEQ ID NO: 42165 - DNA, 25 bp, Probe sequence
gatggatacacaattatcgcaacag

SEQ ID NO: 42166 - DNA, 25 bp, Probe sequence
cagatggatacacaattatcgcaac

SEQ ID NO: 42167 - DNA, 25 bp, Probe sequence
gatgacgcttgatgagaacattatt

SEQ ID NO: 42168 - DNA, 25 bp, Probe sequence
atattggatgacgcttgatgagaac

SEQ ID NO: 42169 - DNA, 25 bp, Probe sequence
tgacgcttgatgagaacattattaa

SEQ ID NO: 42170 - DNA, 25 bp, Probe sequence
ggatgacgcttgatgagaacattat

SEQ ID NO: 42171 - DNA, 25 bp, Probe sequence
atgacgcttgatgagaacattatta

SEQ ID NO: 42172 - DNA, 25 bp, Probe sequence
cagacctaagaacagtacaatcgtt

SEQ ID NO: 42173 - DNA, 25 bp, Probe sequence
agacctaagaacagtacaatcgtta

SEQ ID NO: 42174 - DNA, 25 bp, Probe sequence
tctatgaatattggatgacgcttga

SEQ ID NO: 42175 - DNA, 25 bp, Probe sequence
acagtacaatcgttattaggtcatg

SEQ ID NO: 42176 - DNA, 25 bp, Probe sequence
ttggtattgctgatgatggtaagaa

SEQ ID NO: 42177 - DNA, 25 bp, Probe sequence
agttggtattgctgatgatggtaag

SEQ ID NO: 42178 - DNA, 25 bp, Probe sequence
gttggtattgctgatgatggtaaga

SEQ ID NO: 42179 - DNA, 25 bp, Probe sequence
gcttgtggtaatacggataattcaa

SEQ ID NO: 42180 - DNA, 25 bp, Probe sequence
ttgtggtaatacggataattcaagt

SEQ ID NO: 42181 - DNA, 25 bp, Probe sequence
cagttggtattgctgatgatggtaa

SEQ ID NO: 42182 - DNA, 25 bp, Probe sequence
agcttgtggtaatacggataattca

SEQ ID NO: 42183 - DNA, 25 bp, Probe sequence
cagcttgtggtaatacggataattc

SEQ ID NO: 42184 - DNA, 25 bp, Probe sequence
tgtggtaatacggataattcaagta

SEQ ID NO: 42185 - DNA, 25 bp, Probe sequence
gatgatgaccttatcgctattggat

SEQ ID NO: 42186 - DNA, 25 bp, Probe sequence
cagatgatgaccttatcgctattgg

SEQ ID NO: 42187 - DNA, 25 bp, Probe sequence
ccagatgatgaccttatcgctattg

SEQ ID NO: 42188 - DNA, 25 bp, Probe sequence
agatgatgaccttatcgctattgga

SEQ ID NO: 42189 - DNA, 25 bp, Probe sequence
atgatgaccttatcgctattggatc

SEQ ID NO: 42190 - DNA, 25 bp, Probe sequence
gatgaccttatcgctattggatcag

SEQ ID NO: 42191 - DNA, 25 bp, Probe sequence
ggctgatatttgtgtctttaccaac

SEQ ID NO: 42192 - DNA, 25 bp, Probe sequence
ctgatatttgtgtctttaccaacga

SEQ ID NO: 42193 - DNA, 25 bp, Probe sequence
gctgatatttgtgtctttaccaacg

SEQ ID NO: 42194 - DNA, 25 bp, Probe sequence
tgaaggtgttctgacttatgatgtt

SEQ ID NO: 42195 - DNA, 25 bp, Probe sequence
gtgaaggtgttctgacttatgatgt

SEQ ID NO: 42196 - DNA, 25 bp, Probe sequence
tatcaagatgcgattacattggagg

SEQ ID NO: 42197 - DNA, 25 bp, Probe sequence
atatcaagatgcgattacattggag

SEQ ID NO: 42198 - DNA, 25 bp, Probe sequence
cgtgaaggtgttctgacttatgatg

SEQ ID NO: 42199 - DNA, 25 bp, Probe sequence
tatatcaagatgcgattacattgga

SEQ ID NO: 42200 - DNA, 25 bp, Probe sequence
ttcacctatggatcagcatatcaat

SEQ ID NO: 42201 - DNA, 25 bp, Probe sequence
ccgtgaaggtgttctgacttatgat

SEQ ID NO: 42202 - DNA, 25 bp, Probe sequence
tcacctatggatcagcatatcaata

SEQ ID NO: 42203 - DNA, 25 bp, Probe sequence
tgcgacgaataatcataatagtggt

SEQ ID NO: 42204 - DNA, 25 bp, Probe sequence
taggttatgtaggacgagatgttga

SEQ ID NO: 42205 - DNA, 25 bp, Probe sequence
ttgcgacgaataatcataatagtgg

SEQ ID NO: 42206 - DNA, 25 bp, Probe sequence
aataacgaagatgaagaagaaccac

SEQ ID NO: 42207 - DNA, 25 bp, Probe sequence
gaagatgaagaagaaccacctactg

SEQ ID NO: 42208 - DNA, 25 bp, Probe sequence
ataacgaagatgaagaagaaccacc

SEQ ID NO: 42209 - DNA, 25 bp, Probe sequence
aagatgaagaagaaccacctactga

SEQ ID NO: 42210 - DNA, 25 bp, Probe sequence
taatagtggtcaagatgtctcaaga

SEQ ID NO: 42211 - DNA, 25 bp, Probe sequence
aggttatgtaggacgagatgttgaa

SEQ ID NO: 42212 - DNA, 25 bp, Probe sequence
atcgtggatagttacttagagtggt

SEQ ID NO: 42213 - DNA, 25 bp, Probe sequence
taacatagtacagcaagtagtagcg

SEQ ID NO: 42214 - DNA, 25 bp, Probe sequence
cgtggatagttacttagagtggtta

SEQ ID NO: 42215 - DNA, 25 bp, Probe sequence
tcgtggatagttacttagagtggtt

SEQ ID NO: 42216 - DNA, 25 bp, Probe sequence
cttaactatggaagaagtacgagca

SEQ ID NO: 42217 - DNA, 25 bp, Probe sequence
tatcgtggatagttacttagagtgg

SEQ ID NO: 42218 - DNA, 25 bp, Probe sequence
ttaactatggaagaagtacgagcat

SEQ ID NO: 42219 - DNA, 25 bp, Probe sequence
ccttaactatggaagaagtacgagc

SEQ ID NO: 42220 - DNA, 25 bp, Probe sequence
ctcaactgtgactactgtagatgga

SEQ ID NO: 42221 - DNA, 25 bp, Probe sequence
gcagaagttattgaaagaaagcgat

SEQ ID NO: 42222 - DNA, 25 bp, Probe sequence
aagttattgaaagaaagcgattgtc

SEQ ID NO: 42223 - DNA, 25 bp, Probe sequence
gaagttattgaaagaaagcgattgt

SEQ ID NO: 42224 - DNA, 25 bp, Probe sequence
agttattgaaagaaagcgattgtca

SEQ ID NO: 42225 - DNA, 25 bp, Probe sequence
agaagttattgaaagaaagcgattg

SEQ ID NO: 42226 - DNA, 25 bp, Probe sequence
cagaagttattgaaagaaagcgatt

SEQ ID NO: 42227 - DNA, 25 bp, Probe sequence
gttgaaggaagaaacgagaagagtt

SEQ ID NO: 42228 - DNA, 25 bp, Probe sequence
ttgcagaagttattgaaagaaagcg

SEQ ID NO: 42229 - DNA, 25 bp, Probe sequence
tttgcagaagttattgaaagaaagc

SEQ ID NO: 42230 - DNA, 25 bp, Probe sequence
ttggtactaggtgaatatgctgcta

SEQ ID NO: 42231 - DNA, 25 bp, Probe sequence
gtgaatatgctgctacagttattgg

SEQ ID NO: 42232 - DNA, 25 bp, Probe sequence
ggtgaatatgctgctacagttattg

SEQ ID NO: 42233 - DNA, 25 bp, Probe sequence
aggtgaatatgctgctacagttatt

SEQ ID NO: 42234 - DNA, 25 bp, Probe sequence
tgaatatgctgctacagttattggt

SEQ ID NO: 42235 - DNA, 25 bp, Probe sequence
tatgctgctacagttattggtatgg

SEQ ID NO: 42236 - DNA, 25 bp, Probe sequence
taggtgaatatgctgctacagttat

SEQ ID NO: 42237 - DNA, 25 bp, Probe sequence
ctaggtgaatatgctgctacagtta

SEQ ID NO: 42238 - DNA, 25 bp, Probe sequence
tactaggtgaatatgctgctacagt

SEQ ID NO: 42239 - DNA, 25 bp, Probe sequence
tggtgtcatattagcagtctatcat

SEQ ID NO: 42240 - DNA, 25 bp, Probe sequence
acttaccacttatcataacgcagtt

SEQ ID NO: 42241 - DNA, 25 bp, Probe sequence
tacttaccacttatcataacgcagt

SEQ ID NO: 42242 - DNA, 25 bp, Probe sequence
tgtacttaccacttatcataacgca

SEQ ID NO: 42243 - DNA, 25 bp, Probe sequence
tcattattgattatggcgacaggtt

SEQ ID NO: 42244 - DNA, 25 bp, Probe sequence
gtacttaccacttatcataacgcag

SEQ ID NO: 42245 - DNA, 25 bp, Probe sequence
gcaattccaattagcgtcattatta

SEQ ID NO: 42246 - DNA, 25 bp, Probe sequence
ttgtacttaccacttatcataacgc

SEQ ID NO: 42247 - DNA, 25 bp, Probe sequence
ctggtgtcatattagcagtctatca

SEQ ID NO: 42248 - DNA, 25 bp, Probe sequence
aatgtagcgattacttatgcacaag

SEQ ID NO: 42249 - DNA, 25 bp, Probe sequence
atgtagcgattacttatgcacaagc

SEQ ID NO: 42250 - DNA, 25 bp, Probe sequence
ttcgaggtatacgttcaaacatcat

SEQ ID NO: 42251 - DNA, 25 bp, Probe sequence
tttcgaggtatacgttcaaacatca

SEQ ID NO: 42252 - DNA, 25 bp, Probe sequence
tcgaggtatacgttcaaacatcatg

SEQ ID NO: 42253 - DNA, 25 bp, Probe sequence
aaaaggaaaatacgacaacaacact

SEQ ID NO: 42254 - DNA, 25 bp, Probe sequence
aaaggaaaatacgacaacaacacta

SEQ ID NO: 42255 - DNA, 25 bp, Probe sequence
aaggaaaatacgacaacaacactat

SEQ ID NO: 42256 - DNA, 25 bp, Probe sequence
cgaggtatacgttcaaacatcatgt

SEQ ID NO: 42257 - DNA, 25 bp, Probe sequence
gtagtaagcgtatcagccattatct

SEQ ID NO: 42258 - DNA, 25 bp, Probe sequence
tgtagtaagcgtatcagccattatc

SEQ ID NO: 42259 - DNA, 25 bp, Probe sequence
tataacggacaagaaggagaacaag

SEQ ID NO: 42260 - DNA, 25 bp, Probe sequence
gtgtagtaagcgtatcagccattat

SEQ ID NO: 42261 - DNA, 25 bp, Probe sequence
gtagcgaactatacaccattcattg

SEQ ID NO: 42262 - DNA, 25 bp, Probe sequence
gcgaactatacaccattcattgatt

SEQ ID NO: 42263 - DNA, 25 bp, Probe sequence
tagcgaactatacaccattcattga

SEQ ID NO: 42264 - DNA, 25 bp, Probe sequence
tagtaagcgtatcagccattatctt

SEQ ID NO: 42265 - DNA, 25 bp, Probe sequence
agcgaactatacaccattcattgat

SEQ ID NO: 42266 - DNA, 25 bp, Probe sequence
tgaaatgactttgatgattatgttg

SEQ ID NO: 42267 - DNA, 25 bp, Probe sequence
gaaatgactttgatgattatgttga

SEQ ID NO: 42268 - DNA, 25 bp, Probe sequence
aatgactttgatgattatgttgaag

SEQ ID NO: 42269 - DNA, 25 bp, Probe sequence
aaatgactttgatgattatgttgaa

SEQ ID NO: 42270 - DNA, 25 bp, Probe sequence
atgaaatgactttgatgattatgtt

SEQ ID NO: 42271 - DNA, 25 bp, Probe sequence
aatgaaatgactttgatgattatgt

SEQ ID NO: 42272 - DNA, 25 bp, Probe sequence
tgatgattatgttgaagtcatttct

SEQ ID NO: 42273 - DNA, 25 bp, Probe sequence
actttgatgattatgttgaagtcat

SEQ ID NO: 42274 - DNA, 25 bp, Probe sequence
atgactttgatgattatgttgaagt

SEQ ID NO: 42275 - DNA, 25 bp, Probe sequence
aggtgtatctgttgaagttggtgaa

SEQ ID NO: 42276 - DNA, 25 bp, Probe sequence
aaggtgtatctgttgaagttggtga

SEQ ID NO: 42277 - DNA, 25 bp, Probe sequence
ggtggcttaactgatacattcacta

SEQ ID NO: 42278 - DNA, 25 bp, Probe sequence
caaggtgtatctgttgaagttggtg

SEQ ID NO: 42279 - DNA, 25 bp, Probe sequence
aaggtggcttaactgatacattcac

SEQ ID NO: 42280 - DNA, 25 bp, Probe sequence
tggcttaactgatacattcactaat

SEQ ID NO: 42281 - DNA, 25 bp, Probe sequence
gtggcttaactgatacattcactaa

SEQ ID NO: 42282 - DNA, 25 bp, Probe sequence
aggtggcttaactgatacattcact

SEQ ID NO: 42283 - DNA, 25 bp, Probe sequence
aaacaagcatacgacaatcaaactg

SEQ ID NO: 42284 - DNA, 25 bp, Probe sequence
ctatcgtaggtatcgttgacactaa

SEQ ID NO: 42285 - DNA, 25 bp, Probe sequence
tatcgtaggtatcgttgacactaac

SEQ ID NO: 42286 - DNA, 25 bp, Probe sequence
gatggtggacaagtcttattcgtag

SEQ ID NO: 42287 - DNA, 25 bp, Probe sequence
atcgtaggtatcgttgacactaact

SEQ ID NO: 42288 - DNA, 25 bp, Probe sequence
ggacaagtcttattcgtaggaacta

SEQ ID NO: 42289 - DNA, 25 bp, Probe sequence
gtggacaagtcttattcgtaggaac

SEQ ID NO: 42290 - DNA, 25 bp, Probe sequence
agatggtggacaagtcttattcgta

SEQ ID NO: 42291 - DNA, 25 bp, Probe sequence
tggacaagtcttattcgtaggaact

SEQ ID NO: 42292 - DNA, 25 bp, Probe sequence
tagacgaggcatacaacttcttgaa

SEQ ID NO: 42293 - DNA, 25 bp, Probe sequence
acaagactctacacaacaagtgatt

SEQ ID NO: 42294 - DNA, 25 bp, Probe sequence
gacaagactctacacaacaagtgat

SEQ ID NO: 42295 - DNA, 25 bp, Probe sequence
caagactctacacaacaagtgatta

SEQ ID NO: 42296 - DNA, 25 bp, Probe sequence
tgtttaattggtgtaggtattgggt

SEQ ID NO: 42297 - DNA, 25 bp, Probe sequence
aagactctacacaacaagtgattaa

SEQ ID NO: 42298 - DNA, 25 bp, Probe sequence
aacggacaagactctacacaacaag

SEQ ID NO: 42299 - DNA, 25 bp, Probe sequence
tggtgtaggtattgggtatatgaaa

SEQ ID NO: 42300 - DNA, 25 bp, Probe sequence
ttggtgtaggtattgggtatatgaa

SEQ ID NO: 42301 - DNA, 25 bp, Probe sequence
atatgaaagaccgtaagcaagattt

SEQ ID NO: 42302 - DNA, 25 bp, Probe sequence
tcgaggcaaattacaaatattcaat

SEQ ID NO: 42303 - DNA, 25 bp, Probe sequence
atcgaggcaaattacaaatattcaa

SEQ ID NO: 42304 - DNA, 25 bp, Probe sequence
aatcgaggcaaattacaaatattca

SEQ ID NO: 42305 - DNA, 25 bp, Probe sequence
gcaatcttgcctataataatgctaa

SEQ ID NO: 42306 - DNA, 25 bp, Probe sequence
cgaggcaaattacaaatattcaatt

SEQ ID NO: 42307 - DNA, 25 bp, Probe sequence
aaatcgaggcaaattacaaatattc

SEQ ID NO: 42308 - DNA, 25 bp, Probe sequence
aaagaaaatcgaggcaaattacaaa

SEQ ID NO: 42309 - DNA, 25 bp, Probe sequence
aaaagaaaatcgaggcaaattacaa

SEQ ID NO: 42310 - DNA, 25 bp, Probe sequence
aagaaaatcgaggcaaattacaaat

SEQ ID NO: 42311 - DNA, 25 bp, Probe sequence
ggttcctgttattcatgtatatcca

SEQ ID NO: 42312 - DNA, 25 bp, Probe sequence
actgaatatcaagactacttccttc

SEQ ID NO: 42313 - DNA, 25 bp, Probe sequence
aaccattacttatttcacttgctgc

SEQ ID NO: 42314 - DNA, 25 bp, Probe sequence
ttagtatcttcaaacctacgcatcg

SEQ ID NO: 42315 - DNA, 25 bp, Probe sequence
aaacctggattatacaaagacttcg

SEQ ID NO: 42316 - DNA, 25 bp, Probe sequence
tttagtatcttcaaacctacgcatc

SEQ ID NO: 42317 - DNA, 25 bp, Probe sequence
aactgaatatcaagactacttcctt

SEQ ID NO: 42318 - DNA, 25 bp, Probe sequence
ccaaccattacttatttcacttgct

SEQ ID NO: 42319 - DNA, 25 bp, Probe sequence
tccaaccattacttatttcacttgc

SEQ ID NO: 42320 - DNA, 25 bp, Probe sequence
ctatgaagtaggcgaaggtatggaa

SEQ ID NO: 42321 - DNA, 25 bp, Probe sequence
gtgctgtagatcaagacttcgttaa

SEQ ID NO: 42322 - DNA, 25 bp, Probe sequence
tgtgctgtagatcaagacttcgtta

SEQ ID NO: 42323 - DNA, 25 bp, Probe sequence
ggtgtattaacagttgttgaaggtt

SEQ ID NO: 42324 - DNA, 25 bp, Probe sequence
ttggtgtattaacagttgttgaagg

SEQ ID NO: 42325 - DNA, 25 bp, Probe sequence
gcattggtgtattaacagttgttga

SEQ ID NO: 42326 - DNA, 25 bp, Probe sequence
tggtgtattaacagttgttgaaggt

SEQ ID NO: 42327 - DNA, 25 bp, Probe sequence
tgtattaacagttgttgaaggttca

SEQ ID NO: 42328 - DNA, 25 bp, Probe sequence
gtgtattaacagttgttgaaggttc

SEQ ID NO: 42329 - DNA, 25 bp, Probe sequence
acttacaagataatcatattgccga

SEQ ID NO: 42330 - DNA, 25 bp, Probe sequence
gtttgctatgttatttagtgctggt

SEQ ID NO: 42331 - DNA, 25 bp, Probe sequence
tggtttgctatgttatttagtgctg

SEQ ID NO: 42332 - DNA, 25 bp, Probe sequence
tgctttatattctttgcggtattcg

SEQ ID NO: 42333 - DNA, 25 bp, Probe sequence
gctatgttatttagtgctggtatgg

SEQ ID NO: 42334 - DNA, 25 bp, Probe sequence
ggtttgctatgttatttagtgctgg

SEQ ID NO: 42335 - DNA, 25 bp, Probe sequence
ctttatattctttgcggtattcggc

SEQ ID NO: 42336 - DNA, 25 bp, Probe sequence
gctttatattctttgcggtattcgg

SEQ ID NO: 42337 - DNA, 25 bp, Probe sequence
agtttgctttatattctttgcggta

SEQ ID NO: 42338 - DNA, 25 bp, Probe sequence
tacaagtaatggattcaacagcatc

SEQ ID NO: 42339 - DNA, 25 bp, Probe sequence
tacttctctacagatactacagcgg

SEQ ID NO: 42340 - DNA, 25 bp, Probe sequence
aacaggtagtgacttaggtatggac

SEQ ID NO: 42341 - DNA, 25 bp, Probe sequence
atacttctctacagatactacagcg

SEQ ID NO: 42342 - DNA, 25 bp, Probe sequence
ctctacagatactacagcggcatta

SEQ ID NO: 42343 - DNA, 25 bp, Probe sequence
ttacaagtaatggattcaacagcat

SEQ ID NO: 42344 - DNA, 25 bp, Probe sequence
tctacagatactacagcggcattac

SEQ ID NO: 42345 - DNA, 25 bp, Probe sequence
caagtggctgaaccttatattcgtc

SEQ ID NO: 42346 - DNA, 25 bp, Probe sequence
catacttctctacagatactacagc

SEQ ID NO: 42347 - DNA, 25 bp, Probe sequence
cattacaacagcatcacgacaagaa

SEQ ID NO: 42348 - DNA, 25 bp, Probe sequence
ctattggtactgttgaagctatcgg

SEQ ID NO: 42349 - DNA, 25 bp, Probe sequence
tcattacaacagcatcacgacaaga

SEQ ID NO: 42350 - DNA, 25 bp, Probe sequence
tattggtactgttgaagctatcgga

SEQ ID NO: 42351 - DNA, 25 bp, Probe sequence
gaacgcctgatatgattaaacaaca

SEQ ID NO: 42352 - DNA, 25 bp, Probe sequence
cattaccaaccaacaacgacacaag

SEQ ID NO: 42353 - DNA, 25 bp, Probe sequence
cgaacgcctgatatgattaaacaac

SEQ ID NO: 42354 - DNA, 25 bp, Probe sequence
aacgcctgatatgattaaacaacat

SEQ ID NO: 42355 - DNA, 25 bp, Probe sequence
aagaggatttagtgcgtcaatttaa

SEQ ID NO: 42356 - DNA, 25 bp, Probe sequence
attagcaagcatcaatgttccagaa

SEQ ID NO: 42357 - DNA, 25 bp, Probe sequence
aattagcaagcatcaatgttccaga

SEQ ID NO: 42358 - DNA, 25 bp, Probe sequence
caattagcaagcatcaatgttccag

SEQ ID NO: 42359 - DNA, 25 bp, Probe sequence
ttactgaagatgagttgagaagtgg

SEQ ID NO: 42360 - DNA, 25 bp, Probe sequence
cgacattactgaagatgagttgaga

SEQ ID NO: 42361 - DNA, 25 bp, Probe sequence
gtacaacaattagcaagcatcaatg

SEQ ID NO: 42362 - DNA, 25 bp, Probe sequence
ttagcaagcatcaatgttccagaag

SEQ ID NO: 42363 - DNA, 25 bp, Probe sequence
tacaacaattagcaagcatcaatgt

SEQ ID NO: 42364 - DNA, 25 bp, Probe sequence
attactgaagatgagttgagaagtg

SEQ ID NO: 42365 - DNA, 25 bp, Probe sequence
gtatgactaaggcagattcgtatgt

SEQ ID NO: 42366 - DNA, 25 bp, Probe sequence
taagaagcaagtaatgatgagaggc

SEQ ID NO: 42367 - DNA, 25 bp, Probe sequence
tatgactaaggcagattcgtatgta

SEQ ID NO: 42368 - DNA, 25 bp, Probe sequence
cgtatgactaaggcagattcgtatg

SEQ ID NO: 42369 - DNA, 25 bp, Probe sequence
cagtcacaagtaaccattgaagatg

SEQ ID NO: 42370 - DNA, 25 bp, Probe sequence
tcagtcacaagtaaccattgaagat

SEQ ID NO: 42371 - DNA, 25 bp, Probe sequence
aaggagatgtcgttgtaggtatgtt

SEQ ID NO: 42372 - DNA, 25 bp, Probe sequence
ttaagaagcaagtaatgatgagagg

SEQ ID NO: 42373 - DNA, 25 bp, Probe sequence
atgactaaggcagattcgtatgtac

SEQ ID NO: 42374 - DNA, 25 bp, Probe sequence
cgtctaatatacctgaacatatcgc

SEQ ID NO: 42375 - DNA, 25 bp, Probe sequence
tcgctattattatggatggtaatgg

SEQ ID NO: 42376 - DNA, 25 bp, Probe sequence
gttgttaattcgtacttcaggagaa

SEQ ID NO: 42377 - DNA, 25 bp, Probe sequence
tccagagttgttaattcgtacttca

SEQ ID NO: 42378 - DNA, 25 bp, Probe sequence
gttaattcgtacttcaggagaacaa

SEQ ID NO: 42379 - DNA, 25 bp, Probe sequence
ttgttaattcgtacttcaggagaac

SEQ ID NO: 42380 - DNA, 25 bp, Probe sequence
agttgttaattcgtacttcaggaga

SEQ ID NO: 42381 - DNA, 25 bp, Probe sequence
agagttgttaattcgtacttcagga

SEQ ID NO: 42382 - DNA, 25 bp, Probe sequence
cagagttgttaattcgtacttcagg

SEQ ID NO: 42383 - DNA, 25 bp, Probe sequence
gaatcaaccttatcagcaattacgc

SEQ ID NO: 42384 - DNA, 25 bp, Probe sequence
cgaatgaatcaaccttatcagcaat

SEQ ID NO: 42385 - DNA, 25 bp, Probe sequence
tgaatcaaccttatcagcaattacg

SEQ ID NO: 42386 - DNA, 25 bp, Probe sequence
acggcagagtgtctaatagttcttc

SEQ ID NO: 42387 - DNA, 25 bp, Probe sequence
gaatgaatcaaccttatcagcaatt

SEQ ID NO: 42388 - DNA, 25 bp, Probe sequence
ccaagtcgaatgaatcaaccttatc

SEQ ID NO: 42389 - DNA, 25 bp, Probe sequence
accaagtcgaatgaatcaaccttat

SEQ ID NO: 42390 - DNA, 25 bp, Probe sequence
aaccaagtcgaatgaatcaacctta

SEQ ID NO: 42391 - DNA, 25 bp, Probe sequence
atgaatcaaccttatcagcaattac

SEQ ID NO: 42392 - DNA, 25 bp, Probe sequence
ttattgccttaatcgtattcttgcc

SEQ ID NO: 42393 - DNA, 25 bp, Probe sequence
ttgccttaatcgtattcttgcctat

SEQ ID NO: 42394 - DNA, 25 bp, Probe sequence
attgccttaatcgtattcttgccta

SEQ ID NO: 42395 - DNA, 25 bp, Probe sequence
tattgccttaatcgtattcttgcct

SEQ ID NO: 42396 - DNA, 25 bp, Probe sequence
ttgcttaatgtctgtggcttatgta

SEQ ID NO: 42397 - DNA, 25 bp, Probe sequence
gccttaatcgtattcttgcctatct

SEQ ID NO: 42398 - DNA, 25 bp, Probe sequence
ggtcttatcatcattatgttgccac

SEQ ID NO: 42399 - DNA, 25 bp, Probe sequence
tgccttaatcgtattcttgcctatc

SEQ ID NO: 42400 - DNA, 25 bp, Probe sequence
tgcttaatgtctgtggcttatgtag

SEQ ID NO: 42401 - DNA, 25 bp, Probe sequence
ttaatggatgtgttctcttggtcaa

SEQ ID NO: 42402 - DNA, 25 bp, Probe sequence
acatatcttatctgttaatggcggt

SEQ ID NO: 42403 - DNA, 25 bp, Probe sequence
catatcttatctgttaatggcggta

SEQ ID NO: 42404 - DNA, 25 bp, Probe sequence
attaatggatgtgttctcttggtca

SEQ ID NO: 42405 - DNA, 25 bp, Probe sequence
atatcttatctgttaatggcggtaa

SEQ ID NO: 42406 - DNA, 25 bp, Probe sequence
aacgacttcttaggtatcaattact

SEQ ID NO: 42407 - DNA, 25 bp, Probe sequence
aggtgataaaggcggttctaaatac

SEQ ID NO: 42408 - DNA, 25 bp, Probe sequence
caggtgataaaggcggttctaaata

SEQ ID NO: 42409 - DNA, 25 bp, Probe sequence
gtgttctcttggtcaaatggttatg

SEQ ID NO: 42410 - DNA, 25 bp, Probe sequence
tgatgatgttgataaggcgttagat

SEQ ID NO: 42411 - DNA, 25 bp, Probe sequence
ttgatgatgttgataaggcgttaga

SEQ ID NO: 42412 - DNA, 25 bp, Probe sequence
tagaacaagtcgcagataagtatcc

SEQ ID NO: 42413 - DNA, 25 bp, Probe sequence
agtaagttcagagacgaagtatgtt

SEQ ID NO: 42414 - DNA, 25 bp, Probe sequence
aagtaagttcagagacgaagtatgt

SEQ ID NO: 42415 - DNA, 25 bp, Probe sequence
gtaagttcagagacgaagtatgttc

SEQ ID NO: 42416 - DNA, 25 bp, Probe sequence
gtagaacaagtcgcagataagtatc

SEQ ID NO: 42417 - DNA, 25 bp, Probe sequence
ttattgcctgttggtggatatgttc

SEQ ID NO: 42418 - DNA, 25 bp, Probe sequence
taagttcagagacgaagtatgttct

SEQ ID NO: 42419 - DNA, 25 bp, Probe sequence
aatgcctgtcatcttattctcaagt

SEQ ID NO: 42420 - DNA, 25 bp, Probe sequence
caatgcctgtcatcttattctcaag

SEQ ID NO: 42421 - DNA, 25 bp, Probe sequence
tgcctgtcatcttattctcaagtat

SEQ ID NO: 42422 - DNA, 25 bp, Probe sequence
atgcctgtcatcttattctcaagta

SEQ ID NO: 42423 - DNA, 25 bp, Probe sequence
gcctgtcatcttattctcaagtatc

SEQ ID NO: 42424 - DNA, 25 bp, Probe sequence
ggtggtggtacaagtggattattag

SEQ ID NO: 42425 - DNA, 25 bp, Probe sequence
gtggtggtacaagtggattattagc

SEQ ID NO: 42426 - DNA, 25 bp, Probe sequence
cgatgtgtggattcttgttcttagc

SEQ ID NO: 42427 - DNA, 25 bp, Probe sequence
gcgatgtgtggattcttgttcttag

SEQ ID NO: 42428 - DNA, 25 bp, Probe sequence
gcatcggaaggtattgtagaagtta

SEQ ID NO: 42429 - DNA, 25 bp, Probe sequence
tatgtatcaagcgtatagccgtatt

SEQ ID NO: 42430 - DNA, 25 bp, Probe sequence
atatgtatcaagcgtatagccgtat

SEQ ID NO: 42431 - DNA, 25 bp, Probe sequence
gatatgtatcaagcgtatagccgta

SEQ ID NO: 42432 - DNA, 25 bp, Probe sequence
aagatatgtatcaagcgtatagccg

SEQ ID NO: 42433 - DNA, 25 bp, Probe sequence
caagatatgtatcaagcgtatagcc

SEQ ID NO: 42434 - DNA, 25 bp, Probe sequence
acaattaccgatgacattattccaa

SEQ ID NO: 42435 - DNA, 25 bp, Probe sequence
aacaattaccgatgacattattcca

SEQ ID NO: 42436 - DNA, 25 bp, Probe sequence
tattgaattagcaacacaagacgaa

SEQ ID NO: 42437 - DNA, 25 bp, Probe sequence
agagaagaagtccaattattaggtt

SEQ ID NO: 42438 - DNA, 25 bp, Probe sequence
aaggtgatgatattgcatacagtgt

SEQ ID NO: 42439 - DNA, 25 bp, Probe sequence
caaggtgatgatattgcatacagtg

SEQ ID NO: 42440 - DNA, 25 bp, Probe sequence
tagagaagaagtccaattattaggt

SEQ ID NO: 42441 - DNA, 25 bp, Probe sequence
gagaagaagtccaattattaggttt

SEQ ID NO: 42442 - DNA, 25 bp, Probe sequence
atagagaagaagtccaattattagg

SEQ ID NO: 42443 - DNA, 25 bp, Probe sequence
tgaatagagaagaagtccaattatt

SEQ ID NO: 42444 - DNA, 25 bp, Probe sequence
atgaatagagaagaagtccaattat

SEQ ID NO: 42445 - DNA, 25 bp, Probe sequence
tgattgaagaaggaaacaattgcat

SEQ ID NO: 42446 - DNA, 25 bp, Probe sequence
gtaatgcgaagttagttgttgatga

SEQ ID NO: 42447 - DNA, 25 bp, Probe sequence
agtaatgcgaagttagttgttgatg

SEQ ID NO: 42448 - DNA, 25 bp, Probe sequence
taacatcacatcacttacatcctcg

SEQ ID NO: 42449 - DNA, 25 bp, Probe sequence
atgcgaagttagttgttgatgataa

SEQ ID NO: 42450 - DNA, 25 bp, Probe sequence
aatgcgaagttagttgttgatgata

SEQ ID NO: 42451 - DNA, 25 bp, Probe sequence
taatgcgaagttagttgttgatgat

SEQ ID NO: 42452 - DNA, 25 bp, Probe sequence
ttagtaatgcgaagttagttgttga

SEQ ID NO: 42453 - DNA, 25 bp, Probe sequence
tagtaatgcgaagttagttgttgat

SEQ ID NO: 42454 - DNA, 25 bp, Probe sequence
aacgaatgccacaacaagattataa

SEQ ID NO: 42455 - DNA, 25 bp, Probe sequence
gcgttattagatgaatggcttgaat

SEQ ID NO: 42456 - DNA, 25 bp, Probe sequence
ttactactcacacactaaggcatac

SEQ ID NO: 42457 - DNA, 25 bp, Probe sequence
gttactactcacacactaaggcata

SEQ ID NO: 42458 - DNA, 25 bp, Probe sequence
agatggaacaggtaatacagatacg

SEQ ID NO: 42459 - DNA, 25 bp, Probe sequence
tactactcacacactaaggcataca

SEQ ID NO: 42460 - DNA, 25 bp, Probe sequence
acacactaaggcatacacacataag

SEQ ID NO: 42461 - DNA, 25 bp, Probe sequence
cacacactaaggcatacacacataa

SEQ ID NO: 42462 - DNA, 25 bp, Probe sequence
gatggaacaggtaatacagatacgc

SEQ ID NO: 42463 - DNA, 25 bp, Probe sequence
acactaaggcatacacacataagtt

SEQ ID NO: 42464 - DNA, 25 bp, Probe sequence
ttcgtgcgtcaaatgttagaagata

SEQ ID NO: 42465 - DNA, 25 bp, Probe sequence
tcgtgcgtcaaatgttagaagatac

SEQ ID NO: 42466 - DNA, 25 bp, Probe sequence
gtgcgtcaaatgttagaagatacaa

SEQ ID NO: 42467 - DNA, 25 bp, Probe sequence
tgcgtcaaatgttagaagatacaaa

SEQ ID NO: 42468 - DNA, 25 bp, Probe sequence
gcgtcaaatgttagaagatacaaag

SEQ ID NO: 42469 - DNA, 25 bp, Probe sequence
cgtgcgtcaaatgttagaagataca

SEQ ID NO: 42470 - DNA, 25 bp, Probe sequence
tagatcgactcgttaaaggatgtac

SEQ ID NO: 42471 - DNA, 25 bp, Probe sequence
aatagatcgactcgttaaaggatgt

SEQ ID NO: 42472 - DNA, 25 bp, Probe sequence
atagatcgactcgttaaaggatgta

SEQ ID NO: 42473 - DNA, 25 bp, Probe sequence
actatgatgttgatgatgctgaaga

SEQ ID NO: 42474 - DNA, 25 bp, Probe sequence
ctatgatgttgatgatgctgaagaa

SEQ ID NO: 42475 - DNA, 25 bp, Probe sequence
acatacgatgacaacattcctgata

SEQ ID NO: 42476 - DNA, 25 bp, Probe sequence
taacatacgatgacaacattcctga

SEQ ID NO: 42477 - DNA, 25 bp, Probe sequence
atgacaacattcctgataacggtag

SEQ ID NO: 42478 - DNA, 25 bp, Probe sequence
aacatacgatgacaacattcctgat

SEQ ID NO: 42479 - DNA, 25 bp, Probe sequence
tatacattgaacaaggtgaagatgc

SEQ ID NO: 42480 - DNA, 25 bp, Probe sequence
gatgacaacattcctgataacggta

SEQ ID NO: 42481 - DNA, 25 bp, Probe sequence
ttaacatacgatgacaacattcctg

SEQ ID NO: 42482 - DNA, 25 bp, Probe sequence
aagatatagagataccgagagacaa

SEQ ID NO: 42483 - DNA, 25 bp, Probe sequence
ctattgataaagaaggtggcgtaga

SEQ ID NO: 42484 - DNA, 25 bp, Probe sequence
attgataaagaaggtggcgtagatt

SEQ ID NO: 42485 - DNA, 25 bp, Probe sequence
tattgataaagaaggtggcgtagat

SEQ ID NO: 42486 - DNA, 25 bp, Probe sequence
ttgataaagaaggtggcgtagattt

SEQ ID NO: 42487 - DNA, 25 bp, Probe sequence
tctattgataaagaaggtggcgtag

SEQ ID NO: 42488 - DNA, 25 bp, Probe sequence
ctctattgataaagaaggtggcgta

SEQ ID NO: 42489 - DNA, 25 bp, Probe sequence
acgaaagatatagagataccgagag

SEQ ID NO: 42490 - DNA, 25 bp, Probe sequence
atctctattgataaagaaggtggcg

SEQ ID NO: 42491 - DNA, 25 bp, Probe sequence
tgttaatcgtgttcaagaagtaagt

SEQ ID NO: 42492 - DNA, 25 bp, Probe sequence
atgatgttaatcgtgttcaagaagt

SEQ ID NO: 42493 - DNA, 25 bp, Probe sequence
gttggttcaggtgattctacagttg

SEQ ID NO: 42494 - DNA, 25 bp, Probe sequence
agatgatgttaatcgtgttcaagaa

SEQ ID NO: 42495 - DNA, 25 bp, Probe sequence
ttctacagttgctggaattacttca

SEQ ID NO: 42496 - DNA, 25 bp, Probe sequence
gatgatgttaatcgtgttcaagaag

SEQ ID NO: 42497 - DNA, 25 bp, Probe sequence
tctacagttgctggaattacttcag

SEQ ID NO: 42498 - DNA, 25 bp, Probe sequence
tgatgttaatcgtgttcaagaagta

SEQ ID NO: 42499 - DNA, 25 bp, Probe sequence
atgttaatcgtgttcaagaagtaag

SEQ ID NO: 42500 - DNA, 25 bp, Probe sequence
cttactggaattattgaccgtgttg

SEQ ID NO: 42501 - DNA, 25 bp, Probe sequence
tacttactggaattattgaccgtgt

SEQ ID NO: 42502 - DNA, 25 bp, Probe sequence
ttactggaattattgaccgtgttga

SEQ ID NO: 42503 - DNA, 25 bp, Probe sequence
acttactggaattattgaccgtgtt

SEQ ID NO: 42504 - DNA, 25 bp, Probe sequence
cgtgttgaccatcgttatgtatatg

SEQ ID NO: 42505 - DNA, 25 bp, Probe sequence
ccgtgttgaccatcgttatgtatat

SEQ ID NO: 42506 - DNA, 25 bp, Probe sequence
tgttgaccatcgttatgtatatgtg

SEQ ID NO: 42507 - DNA, 25 bp, Probe sequence
gtgttgaccatcgttatgtatatgt

SEQ ID NO: 42508 - DNA, 25 bp, Probe sequence
tactggaattattgaccgtgttgac

SEQ ID NO: 42509 - DNA, 25 bp, Probe sequence
cattaggatgcgaccatattgttac

SEQ ID NO: 42510 - DNA, 25 bp, Probe sequence
attaggatgcgaccatattgttaca

SEQ ID NO: 42511 - DNA, 25 bp, Probe sequence
gatgcgaccatattgttacagatac

SEQ ID NO: 42512 - DNA, 25 bp, Probe sequence
ggatgcgaccatattgttacagata

SEQ ID NO: 42513 - DNA, 25 bp, Probe sequence
ttaggatgcgaccatattgttacag

SEQ ID NO: 42514 - DNA, 25 bp, Probe sequence
taggatgcgaccatattgttacaga

SEQ ID NO: 42515 - DNA, 25 bp, Probe sequence
atgcgaccatattgttacagataca

SEQ ID NO: 42516 - DNA, 25 bp, Probe sequence
aggatgcgaccatattgttacagat

SEQ ID NO: 42517 - DNA, 25 bp, Probe sequence
ttgtggaacaggtgttggtattaac

SEQ ID NO: 42518 - DNA, 25 bp, Probe sequence
aagatatgattcgtgttgttgttaa

SEQ ID NO: 42519 - DNA, 25 bp, Probe sequence
tgttgttgttaataaagaaggcgaa

SEQ ID NO: 42520 - DNA, 25 bp, Probe sequence
gtgttgttgttaataaagaaggcga

SEQ ID NO: 42521 - DNA, 25 bp, Probe sequence
tcgtgttgttgttaataaagaaggc

SEQ ID NO: 42522 - DNA, 25 bp, Probe sequence
agatatgattcgtgttgttgttaat

SEQ ID NO: 42523 - DNA, 25 bp, Probe sequence
tgtttctaaagatgttgctatggtt

SEQ ID NO: 42524 - DNA, 25 bp, Probe sequence
gttgttgttaataaagaaggcgaaa

SEQ ID NO: 42525 - DNA, 25 bp, Probe sequence
tctaaagatgttgctatggttgaaa

SEQ ID NO: 42526 - DNA, 25 bp, Probe sequence
tttctaaagatgttgctatggttga

SEQ ID NO: 42527 - DNA, 25 bp, Probe sequence
atggcgattattattggttcagatg

SEQ ID NO: 42528 - DNA, 25 bp, Probe sequence
tggcgattattattggttcagatga

SEQ ID NO: 42529 - DNA, 25 bp, Probe sequence
atgaacgctctggatatatgactag

SEQ ID NO: 42530 - DNA, 25 bp, Probe sequence
gatgaacgctctggatatatgacta

SEQ ID NO: 42531 - DNA, 25 bp, Probe sequence
ggcgattattattggttcagatgaa

SEQ ID NO: 42532 - DNA, 25 bp, Probe sequence
tgaacgctctggatatatgactaga

SEQ ID NO: 42533 - DNA, 25 bp, Probe sequence
agatgaacgctctggatatatgact

SEQ ID NO: 42534 - DNA, 25 bp, Probe sequence
gtcaagaaggtaacttaggtattgt

SEQ ID NO: 42535 - DNA, 25 bp, Probe sequence
cgattattattggttcagatgaagc

SEQ ID NO: 42536 - DNA, 25 bp, Probe sequence
gaaatgaattgggaatagcacttgg

SEQ ID NO: 42537 - DNA, 25 bp, Probe sequence
acaggtgaatcagtcattgttaatg

SEQ ID NO: 42538 - DNA, 25 bp, Probe sequence
atgaattgggaatagcacttggaaa

SEQ ID NO: 42539 - DNA, 25 bp, Probe sequence
aatgaattgggaatagcacttggaa

SEQ ID NO: 42540 - DNA, 25 bp, Probe sequence
aaatgaattgggaatagcacttgga

SEQ ID NO: 42541 - DNA, 25 bp, Probe sequence
cgaaatgaattgggaatagcacttg

SEQ ID NO: 42542 - DNA, 25 bp, Probe sequence
agttacaaagttccattcagaaagt

SEQ ID NO: 42543 - DNA, 25 bp, Probe sequence
cgtgttaatgtagggattactgacc

SEQ ID NO: 42544 - DNA, 25 bp, Probe sequence
agagttacaaagttccattcagaaa

SEQ ID NO: 42545 - DNA, 25 bp, Probe sequence
tatcaagaaggtattacagtaggcg

SEQ ID NO: 42546 - DNA, 25 bp, Probe sequence
caagaaggtattacagtaggcgaat

SEQ ID NO: 42547 - DNA, 25 bp, Probe sequence
gctggatgttatgttactgaaggta

SEQ ID NO: 42548 - DNA, 25 bp, Probe sequence
attgctggatgttatgttactgaag

SEQ ID NO: 42549 - DNA, 25 bp, Probe sequence
aagaaggtattacagtaggcgaatt

SEQ ID NO: 42550 - DNA, 25 bp, Probe sequence
ttgctggatgttatgttactgaagg

SEQ ID NO: 42551 - DNA, 25 bp, Probe sequence
actattgctggatgttatgttactg

SEQ ID NO: 42552 - DNA, 25 bp, Probe sequence
atcaagaaggtattacagtaggcga

SEQ ID NO: 42553 - DNA, 25 bp, Probe sequence
tcaagaaggtattacagtaggcgaa

SEQ ID NO: 42554 - DNA, 25 bp, Probe sequence
aagtcaatcatcatacgctcacaat

SEQ ID NO: 42555 - DNA, 25 bp, Probe sequence
gtcaatcatcatacgctcacaatta

SEQ ID NO: 42556 - DNA, 25 bp, Probe sequence
gaagaagtcaatcatcatacgctca

SEQ ID NO: 42557 - DNA, 25 bp, Probe sequence
catcatacgctcacaattattacga

SEQ ID NO: 42558 - DNA, 25 bp, Probe sequence
tcatcatacgctcacaattattacg

SEQ ID NO: 42559 - DNA, 25 bp, Probe sequence
aagaagtcaatcatcatacgctcac

SEQ ID NO: 42560 - DNA, 25 bp, Probe sequence
agtcaatcatcatacgctcacaatt

SEQ ID NO: 42561 - DNA, 25 bp, Probe sequence
gaagtcaatcatcatacgctcacaa

SEQ ID NO: 42562 - DNA, 25 bp, Probe sequence
tcatacgctcacaattattacgaat

SEQ ID NO: 42563 - DNA, 25 bp, Probe sequence
tttaacaaatgatttatcgcaggct

SEQ ID NO: 42564 - DNA, 25 bp, Probe sequence
taacaaatgatttatcgcaggctaa

SEQ ID NO: 42565 - DNA, 25 bp, Probe sequence
ttaacaaatgatttatcgcaggcta

SEQ ID NO: 42566 - DNA, 25 bp, Probe sequence
gttggtgaacaaatgaagaaggaat

SEQ ID NO: 42567 - DNA, 25 bp, Probe sequence
caaatgatttatcgcaggctaaagt

SEQ ID NO: 42568 - DNA, 25 bp, Probe sequence
acaaatgatttatcgcaggctaaag

SEQ ID NO: 42569 - DNA, 25 bp, Probe sequence
aacaaatgatttatcgcaggctaaa

SEQ ID NO: 42570 - DNA, 25 bp, Probe sequence
tggtgaacaaatgaagaaggaatta

SEQ ID NO: 42571 - DNA, 25 bp, Probe sequence
ttggtgaacaaatgaagaaggaatt

SEQ ID NO: 42572 - DNA, 25 bp, Probe sequence
gcaattcatttaagtttaagtggcg

SEQ ID NO: 42573 - DNA, 25 bp, Probe sequence
cgcaattcatttaagtttaagtggc

SEQ ID NO: 42574 - DNA, 25 bp, Probe sequence
acgcaattcatttaagtttaagtgg

SEQ ID NO: 42575 - DNA, 25 bp, Probe sequence
gggttagttccaaatatcaatcaga

SEQ ID NO: 42576 - DNA, 25 bp, Probe sequence
agggttagttccaaatatcaatcag

SEQ ID NO: 42577 - DNA, 25 bp, Probe sequence
caattcatttaagtttaagtggcga

SEQ ID NO: 42578 - DNA, 25 bp, Probe sequence
aagggttagttccaaatatcaatca

SEQ ID NO: 42579 - DNA, 25 bp, Probe sequence
aattcatttaagtttaagtggcgat

SEQ ID NO: 42580 - DNA, 25 bp, Probe sequence
agtttaagtggcgataaataccagt

SEQ ID NO: 42581 - DNA, 25 bp, Probe sequence
gcaacgagagttagtgattatgtta

SEQ ID NO: 42582 - DNA, 25 bp, Probe sequence
acgagagttagtgattatgttatgg

SEQ ID NO: 42583 - DNA, 25 bp, Probe sequence
cgagagttagtgattatgttatgga

SEQ ID NO: 42584 - DNA, 25 bp, Probe sequence
ggtatgtataggtaatgcaacgaga

SEQ ID NO: 42585 - DNA, 25 bp, Probe sequence
ctggtggatttgtgttgaaagatag

SEQ ID NO: 42586 - DNA, 25 bp, Probe sequence
tatgtataggtaatgcaacgagagt

SEQ ID NO: 42587 - DNA, 25 bp, Probe sequence
gacgatattgaccgattgttagaaa

SEQ ID NO: 42588 - DNA, 25 bp, Probe sequence
tgaaagaccaaagcgtaaagttaat

SEQ ID NO: 42589 - DNA, 25 bp, Probe sequence
gtatgtataggtaatgcaacgagag

SEQ ID NO: 42590 - DNA, 25 bp, Probe sequence
gctaacattcaacctagtgatgatt

SEQ ID NO: 42591 - DNA, 25 bp, Probe sequence
tcatagaagtgacacatcctataca

SEQ ID NO: 42592 - DNA, 25 bp, Probe sequence
tctacaacttctattcgtcaagatt

SEQ ID NO: 42593 - DNA, 25 bp, Probe sequence
ttctacaacttctattcgtcaagat

SEQ ID NO: 42594 - DNA, 25 bp, Probe sequence
tagaagtgacacatcctatacaatc

SEQ ID NO: 42595 - DNA, 25 bp, Probe sequence
agctaacattcaacctagtgatgat

SEQ ID NO: 42596 - DNA, 25 bp, Probe sequence
aacagctaacattcaacctagtgat

SEQ ID NO: 42597 - DNA, 25 bp, Probe sequence
cagctaacattcaacctagtgatga

SEQ ID NO: 42598 - DNA, 25 bp, Probe sequence
catagaagtgacacatcctatacaa

SEQ ID NO: 42599 - DNA, 25 bp, Probe sequence
gcacttacaagcagagaattagatg

SEQ ID NO: 42600 - DNA, 25 bp, Probe sequence
agcacttacaagcagagaattagat

SEQ ID NO: 42601 - DNA, 25 bp, Probe sequence
aagcacttacaagcagagaattaga

SEQ ID NO: 42602 - DNA, 25 bp, Probe sequence
cattccatcaacaagaagaacaagt

SEQ ID NO: 42603 - DNA, 25 bp, Probe sequence
aatccattccatcaacaagaagaac

SEQ ID NO: 42604 - DNA, 25 bp, Probe sequence
ccattccatcaacaagaagaacaag

SEQ ID NO: 42605 - DNA, 25 bp, Probe sequence
atccattccatcaacaagaagaaca

SEQ ID NO: 42606 - DNA, 25 bp, Probe sequence
tccattccatcaacaagaagaacaa

SEQ ID NO: 42607 - DNA, 25 bp, Probe sequence
attccatcaacaagaagaacaagtt

SEQ ID NO: 42608 - DNA, 25 bp, Probe sequence
taaatcacttggtatccgtcgttaa

SEQ ID NO: 42609 - DNA, 25 bp, Probe sequence
ttaaatcacttggtatccgtcgtta

SEQ ID NO: 42610 - DNA, 25 bp, Probe sequence
attaaatcacttggtatccgtcgtt

SEQ ID NO: 42611 - DNA, 25 bp, Probe sequence
aattaaatcacttggtatccgtcgt

SEQ ID NO: 42612 - DNA, 25 bp, Probe sequence
aatcaacgcagtaaacgaacactta

SEQ ID NO: 42613 - DNA, 25 bp, Probe sequence
taattaaatcacttggtatccgtcg

SEQ ID NO: 42614 - DNA, 25 bp, Probe sequence
cgaaatcattaaagaataccgtgta

SEQ ID NO: 42615 - DNA, 25 bp, Probe sequence
agaaatcaacgcagtaaacgaacac

SEQ ID NO: 42616 - DNA, 25 bp, Probe sequence
cagaaatcaacgcagtaaacgaaca

SEQ ID NO: 42617 - DNA, 25 bp, Probe sequence
gtcagtattgaatcgcttatcgaat

SEQ ID NO: 42618 - DNA, 25 bp, Probe sequence
tcagtattgaatcgcttatcgaatt

SEQ ID NO: 42619 - DNA, 25 bp, Probe sequence
aagacaattcatgatgcgagagatt

SEQ ID NO: 42620 - DNA, 25 bp, Probe sequence
cgtcagtattgaatcgcttatcgaa

SEQ ID NO: 42621 - DNA, 25 bp, Probe sequence
cgctcatgaatatatctcaagacac

SEQ ID NO: 42622 - DNA, 25 bp, Probe sequence
aagcaactcgaagaattaaatgaaa

SEQ ID NO: 42623 - DNA, 25 bp, Probe sequence
atgatgacaatgttgaacgtctttg

SEQ ID NO: 42624 - DNA, 25 bp, Probe sequence
attatgaaaaggttggtgtgattcc

SEQ ID NO: 42625 - DNA, 25 bp, Probe sequence
gctcatgaatatatctcaagacact

SEQ ID NO: 42626 - DNA, 25 bp, Probe sequence
atatgccagtgtgagtgaattgatt

SEQ ID NO: 42627 - DNA, 25 bp, Probe sequence
aatatgccagtgtgagtgaattgat

SEQ ID NO: 42628 - DNA, 25 bp, Probe sequence
gaatatgccagtgtgagtgaattga

SEQ ID NO: 42629 - DNA, 25 bp, Probe sequence
ggaatatgccagtgtgagtgaattg

SEQ ID NO: 42630 - DNA, 25 bp, Probe sequence
tatcgttcctattatagcggatgtg

SEQ ID NO: 42631 - DNA, 25 bp, Probe sequence
ggcagagatcctgttgaattagata

SEQ ID NO: 42632 - DNA, 25 bp, Probe sequence
atatcgttcctattatagcggatgt

SEQ ID NO: 42633 - DNA, 25 bp, Probe sequence
gcagctatatcactattcatatcgc

SEQ ID NO: 42634 - DNA, 25 bp, Probe sequence
tcatgtctggtgagttagaagtgaa

SEQ ID NO: 42635 - DNA, 25 bp, Probe sequence
attctttccagccgattagtaagtt

SEQ ID NO: 42636 - DNA, 25 bp, Probe sequence
ttctttccagccgattagtaagttt

SEQ ID NO: 42637 - DNA, 25 bp, Probe sequence
cataaattctttccagccgattagt

SEQ ID NO: 42638 - DNA, 25 bp, Probe sequence
gcataaattctttccagccgattag

SEQ ID NO: 42639 - DNA, 25 bp, Probe sequence
aattctttccagccgattagtaagt

SEQ ID NO: 42640 - DNA, 25 bp, Probe sequence
tctttccagccgattagtaagtttc

SEQ ID NO: 42641 - DNA, 25 bp, Probe sequence
aaattctttccagccgattagtaag

SEQ ID NO: 42642 - DNA, 25 bp, Probe sequence
taaattctttccagccgattagtaa

SEQ ID NO: 42643 - DNA, 25 bp, Probe sequence
ataaattctttccagccgattagta

SEQ ID NO: 42644 - DNA, 25 bp, Probe sequence
attggttcgttatggagatacagtc

SEQ ID NO: 42645 - DNA, 25 bp, Probe sequence
gctgtattggttcgttatggagata

SEQ ID NO: 42646 - DNA, 25 bp, Probe sequence
aagattagagatgttatcggacctg

SEQ ID NO: 42647 - DNA, 25 bp, Probe sequence
tattggttcgttatggagatacagt

SEQ ID NO: 42648 - DNA, 25 bp, Probe sequence
atccgtccattagattctgaagttg

SEQ ID NO: 42649 - DNA, 25 bp, Probe sequence
agattagagatgttatcggacctgg

SEQ ID NO: 42650 - DNA, 25 bp, Probe sequence
taagattagagatgttatcggacct

SEQ ID NO: 42651 - DNA, 25 bp, Probe sequence
ttatggagatacagtcgtgttatcg

SEQ ID NO: 42652 - DNA, 25 bp, Probe sequence
gattagagatgttatcggacctggt

SEQ ID NO: 42653 - DNA, 25 bp, Probe sequence
ctggcaattctactgaacctcatat

SEQ ID NO: 42654 - DNA, 25 bp, Probe sequence
gttcaagacaacagtattggaagta

SEQ ID NO: 42655 - DNA, 25 bp, Probe sequence
tggcaattctactgaacctcatata

SEQ ID NO: 42656 - DNA, 25 bp, Probe sequence
ggttcaagacaacagtattggaagt

SEQ ID NO: 42657 - DNA, 25 bp, Probe sequence
ggcaattctactgaacctcatatac

SEQ ID NO: 42658 - DNA, 25 bp, Probe sequence
tctggcaattctactgaacctcata

SEQ ID NO: 42659 - DNA, 25 bp, Probe sequence
aagacaacagtattggaagtacgaa

SEQ ID NO: 42660 - DNA, 25 bp, Probe sequence
aattctggcaattctactgaacctc

SEQ ID NO: 42661 - DNA, 25 bp, Probe sequence
caagacaacagtattggaagtacga

SEQ ID NO: 42662 - DNA, 25 bp, Probe sequence
acttggaataatggcgaatatgttg

SEQ ID NO: 42663 - DNA, 25 bp, Probe sequence
cacttggaataatggcgaatatgtt

SEQ ID NO: 42664 - DNA, 25 bp, Probe sequence
cttggaataatggcgaatatgttga

SEQ ID NO: 42665 - DNA, 25 bp, Probe sequence
ttcattcaacaggtaatcacaacaa

SEQ ID NO: 42666 - DNA, 25 bp, Probe sequence
tcacttggaataatggcgaatatgt

SEQ ID NO: 42667 - DNA, 25 bp, Probe sequence
ttggaataatggcgaatatgttgaa

SEQ ID NO: 42668 - DNA, 25 bp, Probe sequence
tcattcaacaggtaatcacaacaat

SEQ ID NO: 42669 - DNA, 25 bp, Probe sequence
tggaataatggcgaatatgttgaat

SEQ ID NO: 42670 - DNA, 25 bp, Probe sequence
ttcacttggaataatggcgaatatg

SEQ ID NO: 42671 - DNA, 25 bp, Probe sequence
cgtcgtcctatgattattccagtaa

SEQ ID NO: 42672 - DNA, 25 bp, Probe sequence
tggaagttatcattgcgaatacatt

SEQ ID NO: 42673 - DNA, 25 bp, Probe sequence
atggaagttatcattgcgaatacat

SEQ ID NO: 42674 - DNA, 25 bp, Probe sequence
tatggaagttatcattgcgaataca

SEQ ID NO: 42675 - DNA, 25 bp, Probe sequence
ttatgttagatgctggacttatgtt

SEQ ID NO: 42676 - DNA, 25 bp, Probe sequence
tacgacacacagtattcctgatagt

SEQ ID NO: 42677 - DNA, 25 bp, Probe sequence
atacgacacacagtattcctgatag

SEQ ID NO: 42678 - DNA, 25 bp, Probe sequence
gtcgtcctatgattattccagtaat

SEQ ID NO: 42679 - DNA, 25 bp, Probe sequence
ggaagttatcattgcgaatacatta

SEQ ID NO: 42680 - DNA, 25 bp, Probe sequence
ttaaccaatatgttgctcgcttcat

SEQ ID NO: 42681 - DNA, 25 bp, Probe sequence
taaccaatatgttgctcgcttcata

SEQ ID NO: 42682 - DNA, 25 bp, Probe sequence
gttgctcgcttcataccgtatattg

SEQ ID NO: 42683 - DNA, 25 bp, Probe sequence
tgttgctcgcttcataccgtatatt

SEQ ID NO: 42684 - DNA, 25 bp, Probe sequence
atgttgctcgcttcataccgtatat

SEQ ID NO: 42685 - DNA, 25 bp, Probe sequence
tatgttgctcgcttcataccgtata

SEQ ID NO: 42686 - DNA, 25 bp, Probe sequence
aaccaatatgttgctcgcttcatac

SEQ ID NO: 42687 - DNA, 25 bp, Probe sequence
taagtttaaccaatatgttgctcgc

SEQ ID NO: 42688 - DNA, 25 bp, Probe sequence
atatgttgctcgcttcataccgtat

SEQ ID NO: 42689 - DNA, 25 bp, Probe sequence
tatcagtcataccaacacagtcatt

SEQ ID NO: 42690 - DNA, 25 bp, Probe sequence
agaattagatgagaagcaaccagaa

SEQ ID NO: 42691 - DNA, 25 bp, Probe sequence
aagaattagatgagaagcaaccaga

SEQ ID NO: 42692 - DNA, 25 bp, Probe sequence
caagaattagatgagaagcaaccag

SEQ ID NO: 42693 - DNA, 25 bp, Probe sequence
agcaaccagaattaccttatatcgt

SEQ ID NO: 42694 - DNA, 25 bp, Probe sequence
tagatgagaagcaaccagaattacc

SEQ ID NO: 42695 - DNA, 25 bp, Probe sequence
tgagaagcaaccagaattaccttat

SEQ ID NO: 42696 - DNA, 25 bp, Probe sequence
atgagaagcaaccagaattacctta

SEQ ID NO: 42697 - DNA, 25 bp, Probe sequence
gaattagatgagaagcaaccagaat

SEQ ID NO: 42698 - DNA, 25 bp, Probe sequence
taggtatcgctacactaacaggttc

SEQ ID NO: 42699 - DNA, 25 bp, Probe sequence
caacatggtacattaggcacattaa

SEQ ID NO: 42700 - DNA, 25 bp, Probe sequence
ggtatcgctacactaacaggttcaa

SEQ ID NO: 42701 - DNA, 25 bp, Probe sequence
aacatggtacattaggcacattaat

SEQ ID NO: 42702 - DNA, 25 bp, Probe sequence
gtatcgctacactaacaggttcaaa

SEQ ID NO: 42703 - DNA, 25 bp, Probe sequence
aggtatcgctacactaacaggttca

SEQ ID NO: 42704 - DNA, 25 bp, Probe sequence
gcagatacaagctatgaaacgaaag

SEQ ID NO: 42705 - DNA, 25 bp, Probe sequence
cagatacaagctatgaaacgaaaga

SEQ ID NO: 42706 - DNA, 25 bp, Probe sequence
taacaccatatgcaactgtaactaa

SEQ ID NO: 42707 - DNA, 25 bp, Probe sequence
cattatagaacgattacgaactgcc

SEQ ID NO: 42708 - DNA, 25 bp, Probe sequence
ccattatagaacgattacgaactgc

SEQ ID NO: 42709 - DNA, 25 bp, Probe sequence
attatagaacgattacgaactgccg

SEQ ID NO: 42710 - DNA, 25 bp, Probe sequence
accattatagaacgattacgaactg

SEQ ID NO: 42711 - DNA, 25 bp, Probe sequence
ggcattgattactgaacaagtcatt

SEQ ID NO: 42712 - DNA, 25 bp, Probe sequence
aggcattgattactgaacaagtcat

SEQ ID NO: 42713 - DNA, 25 bp, Probe sequence
tatagaacgattacgaactgccgat

SEQ ID NO: 42714 - DNA, 25 bp, Probe sequence
aaccattatagaacgattacgaact

SEQ ID NO: 42715 - DNA, 25 bp, Probe sequence
ttatagaacgattacgaactgccga

SEQ ID NO: 42716 - DNA, 25 bp, Probe sequence
ttgatgatggtcctgaacttattgt

SEQ ID NO: 42717 - DNA, 25 bp, Probe sequence
tgatgatggtcctgaacttattgtc

SEQ ID NO: 42718 - DNA, 25 bp, Probe sequence
attgatgatggtcctgaacttattg

SEQ ID NO: 42719 - DNA, 25 bp, Probe sequence
gcagccgatatggttattgatactt

SEQ ID NO: 42720 - DNA, 25 bp, Probe sequence
atcaagaagaattagaagcggcaat

SEQ ID NO: 42721 - DNA, 25 bp, Probe sequence
taatcaagaagaattagaagcggca

SEQ ID NO: 42722 - DNA, 25 bp, Probe sequence
ttcagaagttacaatccaagacatt

SEQ ID NO: 42723 - DNA, 25 bp, Probe sequence
aatcaagaagaattagaagcggcaa

SEQ ID NO: 42724 - DNA, 25 bp, Probe sequence
gatgatggtcctgaacttattgtca

SEQ ID NO: 42725 - DNA, 25 bp, Probe sequence
caacagttggtaatatgagtgacac

SEQ ID NO: 42726 - DNA, 25 bp, Probe sequence
aagcaacagttggtaatatgagtga

SEQ ID NO: 42727 - DNA, 25 bp, Probe sequence
aacagttggtaatatgagtgacact

SEQ ID NO: 42728 - DNA, 25 bp, Probe sequence
agcaacagttggtaatatgagtgac

SEQ ID NO: 42729 - DNA, 25 bp, Probe sequence
acagttggtaatatgagtgacacta

SEQ ID NO: 42730 - DNA, 25 bp, Probe sequence
gcaacagttggtaatatgagtgaca

SEQ ID NO: 42731 - DNA, 25 bp, Probe sequence
cagttggtaatatgagtgacactat

SEQ ID NO: 42732 - DNA, 25 bp, Probe sequence
tgaaatacacaacagatcaaacgaa

SEQ ID NO: 42733 - DNA, 25 bp, Probe sequence
aaagcaacagttggtaatatgagtg

SEQ ID NO: 42734 - DNA, 25 bp, Probe sequence
ggtgctaaggtaattgttgaagaag

SEQ ID NO: 42735 - DNA, 25 bp, Probe sequence
gtgctaaggtaattgttgaagaagt

SEQ ID NO: 42736 - DNA, 25 bp, Probe sequence
tggtgctaaggtaattgttgaagaa

SEQ ID NO: 42737 - DNA, 25 bp, Probe sequence
ctggtgctaaggtaattgttgaaga

SEQ ID NO: 42738 - DNA, 25 bp, Probe sequence
ggcggtgttaatagagcaataagac

SEQ ID NO: 42739 - DNA, 25 bp, Probe sequence
tgctaaggtaattgttgaagaagta

SEQ ID NO: 42740 - DNA, 25 bp, Probe sequence
cggtgttaatagagcaataagacaa

SEQ ID NO: 42741 - DNA, 25 bp, Probe sequence
gcggtgttaatagagcaataagaca

SEQ ID NO: 42742 - DNA, 25 bp, Probe sequence
gctggtgctaaggtaattgttgaag

SEQ ID NO: 42743 - DNA, 25 bp, Probe sequence
attgaccataattcagaggatgagt

SEQ ID NO: 42744 - DNA, 25 bp, Probe sequence
aatggaggtatcagaagatgaagaa

SEQ ID NO: 42745 - DNA, 25 bp, Probe sequence
agattgaccataattcagaggatga

SEQ ID NO: 42746 - DNA, 25 bp, Probe sequence
ttgaccataattcagaggatgagta

SEQ ID NO: 42747 - DNA, 25 bp, Probe sequence
gattgaccataattcagaggatgag

SEQ ID NO: 42748 - DNA, 25 bp, Probe sequence
cgttatctctaatggaggtatcaga

SEQ ID NO: 42749 - DNA, 25 bp, Probe sequence
tcgttatctctaatggaggtatcag

SEQ ID NO: 42750 - DNA, 25 bp, Probe sequence
ctctaatggaggtatcagaagatga

SEQ ID NO: 42751 - DNA, 25 bp, Probe sequence
tctctaatggaggtatcagaagatg

SEQ ID NO: 42752 - DNA, 25 bp, Probe sequence
gatatgaatctgaagatcgtccgaa

SEQ ID NO: 42753 - DNA, 25 bp, Probe sequence
ttattagagcaaccacaaagcaaag

SEQ ID NO: 42754 - DNA, 25 bp, Probe sequence
attattagagcaaccacaaagcaaa

SEQ ID NO: 42755 - DNA, 25 bp, Probe sequence
ttatgttgtcggcaatgtagaacct

SEQ ID NO: 42756 - DNA, 25 bp, Probe sequence
gaacaaatcccacatattactgctg

SEQ ID NO: 42757 - DNA, 25 bp, Probe sequence
agaacaaatcccacatattactgct

SEQ ID NO: 42758 - DNA, 25 bp, Probe sequence
tatggcacctttagaatatgacaca

SEQ ID NO: 42759 - DNA, 25 bp, Probe sequence
attgttgaatatgatgacgtggatc

SEQ ID NO: 42760 - DNA, 25 bp, Probe sequence
aaatcccacatattactgctgaaac

SEQ ID NO: 42761 - DNA, 25 bp, Probe sequence
caatgtaagagagacggcaagttaa

SEQ ID NO: 42762 - DNA, 25 bp, Probe sequence
gaatgtcaacaatgtaagagagacg

SEQ ID NO: 42763 - DNA, 25 bp, Probe sequence
acaatgtaagagagacggcaagtta

SEQ ID NO: 42764 - DNA, 25 bp, Probe sequence
tgaatgtcaacaatgtaagagagac

SEQ ID NO: 42765 - DNA, 25 bp, Probe sequence
aatgtcaacaatgtaagagagacgg

SEQ ID NO: 42766 - DNA, 25 bp, Probe sequence
tatattatcgctagaacatcatccg

SEQ ID NO: 42767 - DNA, 25 bp, Probe sequence
atgaatgtcaacaatgtaagagaga

SEQ ID NO: 42768 - DNA, 25 bp, Probe sequence
aacaatgtaagagagacggcaagtt

SEQ ID NO: 42769 - DNA, 25 bp, Probe sequence
tcaacaatgtaagagagacggcaag

SEQ ID NO: 42770 - DNA, 25 bp, Probe sequence
aattcaatcaccaagactaatgctt

SEQ ID NO: 42771 - DNA, 25 bp, Probe sequence
cacttacactacacaatttggttca

SEQ ID NO: 42772 - DNA, 25 bp, Probe sequence
gtcacttacactacacaatttggtt

SEQ ID NO: 42773 - DNA, 25 bp, Probe sequence
tcacttacactacacaatttggttc

SEQ ID NO: 42774 - DNA, 25 bp, Probe sequence
ggaggatgttaaagaagcatttgtt

SEQ ID NO: 42775 - DNA, 25 bp, Probe sequence
aaattcaatcaccaagactaatgct

SEQ ID NO: 42776 - DNA, 25 bp, Probe sequence
ttacaatggttgaaacgccttattt

SEQ ID NO: 42777 - DNA, 25 bp, Probe sequence
cttacaatggttgaaacgccttatt

SEQ ID NO: 42778 - DNA, 25 bp, Probe sequence
acttacactacacaatttggttcat

SEQ ID NO: 42779 - DNA, 25 bp, Probe sequence
aagcattagtattaggtggttctgg

SEQ ID NO: 42780 - DNA, 25 bp, Probe sequence
gcattagtattaggtggttctggtt

SEQ ID NO: 42781 - DNA, 25 bp, Probe sequence
ttagtattaggtggttctggttcaa

SEQ ID NO: 42782 - DNA, 25 bp, Probe sequence
agtattaggtggttctggttcaatt

SEQ ID NO: 42783 - DNA, 25 bp, Probe sequence
tagtattaggtggttctggttcaat

SEQ ID NO: 42784 - DNA, 25 bp, Probe sequence
attagtattaggtggttctggttca

SEQ ID NO: 42785 - DNA, 25 bp, Probe sequence
cattagtattaggtggttctggttc

SEQ ID NO: 42786 - DNA, 25 bp, Probe sequence
agcattagtattaggtggttctggt

SEQ ID NO: 42787 - DNA, 25 bp, Probe sequence
gcaatgataactgaattaccacaac

SEQ ID NO: 42788 - DNA, 25 bp, Probe sequence
gagaatacaatatcatagtgcgagc

SEQ ID NO: 42789 - DNA, 25 bp, Probe sequence
gatgaaggtattattgaagatgcca

SEQ ID NO: 42790 - DNA, 25 bp, Probe sequence
tgatgaaggtattattgaagatgcc

SEQ ID NO: 42791 - DNA, 25 bp, Probe sequence
atacaatatcatagtgcgagcaagt

SEQ ID NO: 42792 - DNA, 25 bp, Probe sequence
agaatacaatatcatagtgcgagca

SEQ ID NO: 42793 - DNA, 25 bp, Probe sequence
cagagaatacaatatcatagtgcga

SEQ ID NO: 42794 - DNA, 25 bp, Probe sequence
tcagagaatacaatatcatagtgcg

SEQ ID NO: 42795 - DNA, 25 bp, Probe sequence
aatacaatatcatagtgcgagcaag

SEQ ID NO: 42796 - DNA, 25 bp, Probe sequence
gaatacaatatcatagtgcgagcaa

SEQ ID NO: 42797 - DNA, 25 bp, Probe sequence
gttactgccagagaatctaatccaa

SEQ ID NO: 42798 - DNA, 25 bp, Probe sequence
cataagttgattggcattagaggta

SEQ ID NO: 42799 - DNA, 25 bp, Probe sequence
tcataagttgattggcattagaggt

SEQ ID NO: 42800 - DNA, 25 bp, Probe sequence
gtcataagttgattggcattagagg

SEQ ID NO: 42801 - DNA, 25 bp, Probe sequence
ggtcataagttgattggcattagag

SEQ ID NO: 42802 - DNA, 25 bp, Probe sequence
aggtcataagttgattggcattaga

SEQ ID NO: 42803 - DNA, 25 bp, Probe sequence
gaaggtcataagttgattggcatta

SEQ ID NO: 42804 - DNA, 25 bp, Probe sequence
aaggtcataagttgattggcattag

SEQ ID NO: 42805 - DNA, 25 bp, Probe sequence
agaaggtcataagttgattggcatt

SEQ ID NO: 42806 - DNA, 25 bp, Probe sequence
tgtatgatgttattcttgcaggagt

SEQ ID NO: 42807 - DNA, 25 bp, Probe sequence
agtgtatgatgttattcttgcagga

SEQ ID NO: 42808 - DNA, 25 bp, Probe sequence
tatgatgttattcttgcaggagtga

SEQ ID NO: 42809 - DNA, 25 bp, Probe sequence
gtatgatgttattcttgcaggagtg

SEQ ID NO: 42810 - DNA, 25 bp, Probe sequence
gtgtatgatgttattcttgcaggag

SEQ ID NO: 42811 - DNA, 25 bp, Probe sequence
aaatggaaatataactggagagcga

SEQ ID NO: 42812 - DNA, 25 bp, Probe sequence
caagtggtgaatctaaagtgaacat

SEQ ID NO: 42813 - DNA, 25 bp, Probe sequence
aatggaaatataactggagagcgag

SEQ ID NO: 42814 - DNA, 25 bp, Probe sequence
atgatgttattcttgcaggagtgaa

SEQ ID NO: 42815 - DNA, 25 bp, Probe sequence
tgactttaacagaattagagcaacg

SEQ ID NO: 42816 - DNA, 25 bp, Probe sequence
agaattagagcaacgtactggaatt

SEQ ID NO: 42817 - DNA, 25 bp, Probe sequence
taacagaattagagcaacgtactgg

SEQ ID NO: 42818 - DNA, 25 bp, Probe sequence
gaattagagcaacgtactggaatta

SEQ ID NO: 42819 - DNA, 25 bp, Probe sequence
ttaacagaattagagcaacgtactg

SEQ ID NO: 42820 - DNA, 25 bp, Probe sequence
cagaattagagcaacgtactggaat

SEQ ID NO: 42821 - DNA, 25 bp, Probe sequence
ggaatgactttaacagaattagagc

SEQ ID NO: 42822 - DNA, 25 bp, Probe sequence
aattagagcaacgtactggaattaa

SEQ ID NO: 42823 - DNA, 25 bp, Probe sequence
gcgtagtaaatattgaacctaacca

SEQ ID NO: 42824 - DNA, 25 bp, Probe sequence
tataatggagaatactggacaggtg

SEQ ID NO: 42825 - DNA, 25 bp, Probe sequence
taatggagaatactggacaggtgat

SEQ ID NO: 42826 - DNA, 25 bp, Probe sequence
ataatggagaatactggacaggtga

SEQ ID NO: 42827 - DNA, 25 bp, Probe sequence
ttattagttggacacgaggacttac

SEQ ID NO: 42828 - DNA, 25 bp, Probe sequence
aatggagaatactggacaggtgatt

SEQ ID NO: 42829 - DNA, 25 bp, Probe sequence
atataatggagaatactggacaggt

SEQ ID NO: 42830 - DNA, 25 bp, Probe sequence
aagatggaagttacaatcacgatat

SEQ ID NO: 42831 - DNA, 25 bp, Probe sequence
tattagttggacacgaggacttacc

SEQ ID NO: 42832 - DNA, 25 bp, Probe sequence
accaatgtatgattccaaggatatt

SEQ ID NO: 42833 - DNA, 25 bp, Probe sequence
acagcagttactatggtagcaatta

SEQ ID NO: 42834 - DNA, 25 bp, Probe sequence
cagcagttactatggtagcaattac

SEQ ID NO: 42835 - DNA, 25 bp, Probe sequence
aacagcagttactatggtagcaatt

SEQ ID NO: 42836 - DNA, 25 bp, Probe sequence
actatggtagcaattacttggttgt

SEQ ID NO: 42837 - DNA, 25 bp, Probe sequence
ctatggtagcaattacttggttgtt

SEQ ID NO: 42838 - DNA, 25 bp, Probe sequence
agcagttactatggtagcaattact

SEQ ID NO: 42839 - DNA, 25 bp, Probe sequence
tattaggtgatccattggcaacatt

SEQ ID NO: 42840 - DNA, 25 bp, Probe sequence
ttattaggtgatccattggcaacat

SEQ ID NO: 42841 - DNA, 25 bp, Probe sequence
tggtagcaattacttggttgttatt

SEQ ID NO: 42842 - DNA, 25 bp, Probe sequence
cacaagttgaatatagaggcacagg

SEQ ID NO: 42843 - DNA, 25 bp, Probe sequence
gcacaagttgaatatagaggcacag

SEQ ID NO: 42844 - DNA, 25 bp, Probe sequence
ttagaagcagatcctgaatacagag

SEQ ID NO: 42845 - DNA, 25 bp, Probe sequence
ggtaacatcacagttaataaccgtg

SEQ ID NO: 42846 - DNA, 25 bp, Probe sequence
aggtaacatcacagttaataaccgt

SEQ ID NO: 42847 - DNA, 25 bp, Probe sequence
attagaagcagatcctgaatacaga

SEQ ID NO: 42848 - DNA, 25 bp, Probe sequence
gcattattagaagcagatcctgaat

SEQ ID NO: 42849 - DNA, 25 bp, Probe sequence
ttggcacaagttgaatatagaggca

SEQ ID NO: 42850 - DNA, 25 bp, Probe sequence
aaggtaacatcacagttaataaccg

SEQ ID NO: 42851 - DNA, 25 bp, Probe sequence
acgcaatcttatgaatataactccg

SEQ ID NO: 42852 - DNA, 25 bp, Probe sequence
cgcaatcttatgaatataactccga

SEQ ID NO: 42853 - DNA, 25 bp, Probe sequence
cagataaggcagcgtatcctattaa

SEQ ID NO: 42854 - DNA, 25 bp, Probe sequence
acagataaggcagcgtatcctatta

SEQ ID NO: 42855 - DNA, 25 bp, Probe sequence
tacagataaggcagcgtatcctatt

SEQ ID NO: 42856 - DNA, 25 bp, Probe sequence
acgattacagatcctgatatgacaa

SEQ ID NO: 42857 - DNA, 25 bp, Probe sequence
aacgattacagatcctgatatgaca

SEQ ID NO: 42858 - DNA, 25 bp, Probe sequence
ctacagataaggcagcgtatcctat

SEQ ID NO: 42859 - DNA, 25 bp, Probe sequence
cgattacagatcctgatatgacaag

SEQ ID NO: 42860 - DNA, 25 bp, Probe sequence
aagatgacttaacgaagcatacagt

SEQ ID NO: 42861 - DNA, 25 bp, Probe sequence
agatgacttaacgaagcatacagtg

SEQ ID NO: 42862 - DNA, 25 bp, Probe sequence
ttattgctgtaggctcagaactatt

SEQ ID NO: 42863 - DNA, 25 bp, Probe sequence
tattgctgtaggctcagaactattg

SEQ ID NO: 42864 - DNA, 25 bp, Probe sequence
attattgctgtaggctcagaactat

SEQ ID NO: 42865 - DNA, 25 bp, Probe sequence
cattattgctgtaggctcagaacta

SEQ ID NO: 42866 - DNA, 25 bp, Probe sequence
gatgacttaacgaagcatacagtgg

SEQ ID NO: 42867 - DNA, 25 bp, Probe sequence
tatgatggtattactaatggtgctt

SEQ ID NO: 42868 - DNA, 25 bp, Probe sequence
cagatgacacattaattgagcaagc

SEQ ID NO: 42869 - DNA, 25 bp, Probe sequence
actgctggtgaattaagaagaacta

SEQ ID NO: 42870 - DNA, 25 bp, Probe sequence
tgctggtgaattaagaagaactaac

SEQ ID NO: 42871 - DNA, 25 bp, Probe sequence
atcagaagtagcatctatcttacgc

SEQ ID NO: 42872 - DNA, 25 bp, Probe sequence
ctgctggtgaattaagaagaactaa

SEQ ID NO: 42873 - DNA, 25 bp, Probe sequence
catcagaagtagcatctatcttacg

SEQ ID NO: 42874 - DNA, 25 bp, Probe sequence
cactgctggtgaattaagaagaact

SEQ ID NO: 42875 - DNA, 25 bp, Probe sequence
gctggtgaattaagaagaactaacc

SEQ ID NO: 42876 - DNA, 25 bp, Probe sequence
tcatcagaagtagcatctatcttac

SEQ ID NO: 42877 - DNA, 25 bp, Probe sequence
actggtaacaaagaaactgacaaag

SEQ ID NO: 42878 - DNA, 25 bp, Probe sequence
gttatgttcggtaatccagagacta

SEQ ID NO: 42879 - DNA, 25 bp, Probe sequence
ttatgttcggtaatccagagactac

SEQ ID NO: 42880 - DNA, 25 bp, Probe sequence
tgttatgttcggtaatccagagact

SEQ ID NO: 42881 - DNA, 25 bp, Probe sequence
gtgttatgttcggtaatccagagac

SEQ ID NO: 42882 - DNA, 25 bp, Probe sequence
aagttggtgttatgttcggtaatcc

SEQ ID NO: 42883 - DNA, 25 bp, Probe sequence
tattgtagttgtagactcagttgct

SEQ ID NO: 42884 - DNA, 25 bp, Probe sequence
tatgttcggtaatccagagactaca

SEQ ID NO: 42885 - DNA, 25 bp, Probe sequence
atattgtagttgtagactcagttgc

SEQ ID NO: 42886 - DNA, 25 bp, Probe sequence
gcagttgatattgtagttgtagact

SEQ ID NO: 42887 - DNA, 25 bp, Probe sequence
atacctatgtcacaatggcaatatg

SEQ ID NO: 42888 - DNA, 25 bp, Probe sequence
gaatatacctatgtcacaatggcaa

SEQ ID NO: 42889 - DNA, 25 bp, Probe sequence
ttcaagtaggactgatagaggtgta

SEQ ID NO: 42890 - DNA, 25 bp, Probe sequence
atgtgagaatccatccttcaagtag

SEQ ID NO: 42891 - DNA, 25 bp, Probe sequence
tgaatatacctatgtcacaatggca

SEQ ID NO: 42892 - DNA, 25 bp, Probe sequence
cttcaagtaggactgatagaggtgt

SEQ ID NO: 42893 - DNA, 25 bp, Probe sequence
aatatacctatgtcacaatggcaat

SEQ ID NO: 42894 - DNA, 25 bp, Probe sequence
tcaagtaggactgatagaggtgtac

SEQ ID NO: 42895 - DNA, 25 bp, Probe sequence
catgtgagaatccatccttcaagta

SEQ ID NO: 42896 - DNA, 25 bp, Probe sequence
ggtggatatgtattagttgaatggc

SEQ ID NO: 42897 - DNA, 25 bp, Probe sequence
ggttatgatgccaatgttaagagaa

SEQ ID NO: 42898 - DNA, 25 bp, Probe sequence
gtggatatgtattagttgaatggca

SEQ ID NO: 42899 - DNA, 25 bp, Probe sequence
tatgatgccaatgttaagagaacga

SEQ ID NO: 42900 - DNA, 25 bp, Probe sequence
ttatgatgccaatgttaagagaacg

SEQ ID NO: 42901 - DNA, 25 bp, Probe sequence
agtatgataatgtccattgcgttac

SEQ ID NO: 42902 - DNA, 25 bp, Probe sequence
gataatgtccattgcgttacgattc

SEQ ID NO: 42903 - DNA, 25 bp, Probe sequence
atgatgccaatgttaagagaacgag

SEQ ID NO: 42904 - DNA, 25 bp, Probe sequence
tatgataatgtccattgcgttacga

SEQ ID NO: 42905 - DNA, 25 bp, Probe sequence
attagtcaaggaagcacaagaacaa

SEQ ID NO: 42906 - DNA, 25 bp, Probe sequence
atcaattagtcaaggaagcacaaga

SEQ ID NO: 42907 - DNA, 25 bp, Probe sequence
caattagtcaaggaagcacaagaac

SEQ ID NO: 42908 - DNA, 25 bp, Probe sequence
tcaattagtcaaggaagcacaagaa

SEQ ID NO: 42909 - DNA, 25 bp, Probe sequence
aattagtcaaggaagcacaagaaca

SEQ ID NO: 42910 - DNA, 25 bp, Probe sequence
ggtagaagtgtattatctggtgttg

SEQ ID NO: 42911 - DNA, 25 bp, Probe sequence
aggtagaagtgtattatctggtgtt

SEQ ID NO: 42912 - DNA, 25 bp, Probe sequence
aaggtagaagtgtattatctggtgt

SEQ ID NO: 42913 - DNA, 25 bp, Probe sequence
gatcaattagtcaaggaagcacaag

SEQ ID NO: 42914 - DNA, 25 bp, Probe sequence
gcaatgaatcctgatattatcgtgg

SEQ ID NO: 42915 - DNA, 25 bp, Probe sequence
ggcaatgaatcctgatattatcgtg

SEQ ID NO: 42916 - DNA, 25 bp, Probe sequence
tggcaatgaatcctgatattatcgt

SEQ ID NO: 42917 - DNA, 25 bp, Probe sequence
tcctgatattatcgtggttgatgaa

SEQ ID NO: 42918 - DNA, 25 bp, Probe sequence
tgaatcctgatattatcgtggttga

SEQ ID NO: 42919 - DNA, 25 bp, Probe sequence
atcctgatattatcgtggttgatga

SEQ ID NO: 42920 - DNA, 25 bp, Probe sequence
aagatattgccttaactgaagaagc

SEQ ID NO: 42921 - DNA, 25 bp, Probe sequence
ttggcaatgaatcctgatattatcg

SEQ ID NO: 42922 - DNA, 25 bp, Probe sequence
cctgatattatcgtggttgatgaac

SEQ ID NO: 42923 - DNA, 25 bp, Probe sequence
cctgcgtctgaagttatggaatata

SEQ ID NO: 42924 - DNA, 25 bp, Probe sequence
ctattacacctgcgtctgaagttat

SEQ ID NO: 42925 - DNA, 25 bp, Probe sequence
tattacacctgcgtctgaagttatg

SEQ ID NO: 42926 - DNA, 25 bp, Probe sequence
attgagcagttactaattgaatcgc

SEQ ID NO: 42927 - DNA, 25 bp, Probe sequence
ggtattcatcatataactggtgtgg

SEQ ID NO: 42928 - DNA, 25 bp, Probe sequence
aattgctgctgtaactatggctatt

SEQ ID NO: 42929 - DNA, 25 bp, Probe sequence
atatcctattacacctgcgtctgaa

SEQ ID NO: 42930 - DNA, 25 bp, Probe sequence
attcatcatataactggtgtggaac

SEQ ID NO: 42931 - DNA, 25 bp, Probe sequence
ggaggtattcatcatataactggtg

SEQ ID NO: 42932 - DNA, 25 bp, Probe sequence
agagagacaagtggaggataagaat

SEQ ID NO: 42933 - DNA, 25 bp, Probe sequence
gagagacaagtggaggataagaatt

SEQ ID NO: 42934 - DNA, 25 bp, Probe sequence
gagagagacaagtggaggataagaa

SEQ ID NO: 42935 - DNA, 25 bp, Probe sequence
atctattgttggtcataacggttct

SEQ ID NO: 42936 - DNA, 25 bp, Probe sequence
catctattgttggtcataacggttc

SEQ ID NO: 42937 - DNA, 25 bp, Probe sequence
tctattgttggtcataacggttctg

SEQ ID NO: 42938 - DNA, 25 bp, Probe sequence
tggaagcagatcatgttatcgttat

SEQ ID NO: 42939 - DNA, 25 bp, Probe sequence
acatctattgttggtcataacggtt

SEQ ID NO: 42940 - DNA, 25 bp, Probe sequence
ggaagcagatcatgttatcgttatg

SEQ ID NO: 42941 - DNA, 25 bp, Probe sequence
ttcttatggcgttcattctattcac

SEQ ID NO: 42942 - DNA, 25 bp, Probe sequence
attcttatggcgttcattctattca

SEQ ID NO: 42943 - DNA, 25 bp, Probe sequence
gaggagatggtgatggttatgctat

SEQ ID NO: 42944 - DNA, 25 bp, Probe sequence
aattcttatggcgttcattctattc

SEQ ID NO: 42945 - DNA, 25 bp, Probe sequence
aataatgttaagcctaactggtgcc

SEQ ID NO: 42946 - DNA, 25 bp, Probe sequence
attatcatctggtgccacatttgta

SEQ ID NO: 42947 - DNA, 25 bp, Probe sequence
ttatcatctggtgccacatttgtag

SEQ ID NO: 42948 - DNA, 25 bp, Probe sequence
cgtcatcagcagtaggatttgttac

SEQ ID NO: 42949 - DNA, 25 bp, Probe sequence
ggaggagatggtgatggttatgcta

SEQ ID NO: 42950 - DNA, 25 bp, Probe sequence
atgggttacagaaaattaggtcgta

SEQ ID NO: 42951 - DNA, 25 bp, Probe sequence
gggttacagaaaattaggtcgtact

SEQ ID NO: 42952 - DNA, 25 bp, Probe sequence
tgggttacagaaaattaggtcgtac

SEQ ID NO: 42953 - DNA, 25 bp, Probe sequence
ggttacagaaaattaggtcgtactt

SEQ ID NO: 42954 - DNA, 25 bp, Probe sequence
tatgttacgtgacttagctacatca

SEQ ID NO: 42955 - DNA, 25 bp, Probe sequence
acttctgatcaacgtaaagctatgt

SEQ ID NO: 42956 - DNA, 25 bp, Probe sequence
ctatgttacgtgacttagctacatc

SEQ ID NO: 42957 - DNA, 25 bp, Probe sequence
aaattaggtcgtacttctgatcaac

SEQ ID NO: 42958 - DNA, 25 bp, Probe sequence
cttctgatcaacgtaaagctatgtt

SEQ ID NO: 42959 - DNA, 25 bp, Probe sequence
aatgaacgaatggtggaacttgaat

SEQ ID NO: 42960 - DNA, 25 bp, Probe sequence
atgtccaagtattattagccaagtt

SEQ ID NO: 42961 - DNA, 25 bp, Probe sequence
aatgtccaagtattattagccaagt

SEQ ID NO: 42962 - DNA, 25 bp, Probe sequence
tgaatgtccaagtattattagccaa

SEQ ID NO: 42963 - DNA, 25 bp, Probe sequence
atgaacgaatggtggaacttgaatg

SEQ ID NO: 42964 - DNA, 25 bp, Probe sequence
gaatgtccaagtattattagccaag

SEQ ID NO: 42965 - DNA, 25 bp, Probe sequence
ttgaatgtccaagtattattagcca

SEQ ID NO: 42966 - DNA, 25 bp, Probe sequence
tgtccaagtattattagccaagtta

SEQ ID NO: 42967 - DNA, 25 bp, Probe sequence
gaacgaatggtggaacttgaatgtc

SEQ ID NO: 42968 - DNA, 25 bp, Probe sequence
atatcttcgttggtcttactgatga

SEQ ID NO: 42969 - DNA, 25 bp, Probe sequence
tgactgaacacttgaatatcttcgt

SEQ ID NO: 42970 - DNA, 25 bp, Probe sequence
acacttgaatatcttcgttggtctt

SEQ ID NO: 42971 - DNA, 25 bp, Probe sequence
tatcttcgttggtcttactgatgaa

SEQ ID NO: 42972 - DNA, 25 bp, Probe sequence
tgaatatcttcgttggtcttactga

SEQ ID NO: 42973 - DNA, 25 bp, Probe sequence
gaacacttgaatatcttcgttggtc

SEQ ID NO: 42974 - DNA, 25 bp, Probe sequence
ctgaacacttgaatatcttcgttgg

SEQ ID NO: 42975 - DNA, 25 bp, Probe sequence
aacacttgaatatcttcgttggtct

SEQ ID NO: 42976 - DNA, 25 bp, Probe sequence
actgaacacttgaatatcttcgttg

SEQ ID NO: 42977 - DNA, 25 bp, Probe sequence
caagcaacgactgatattaacactg

SEQ ID NO: 42978 - DNA, 25 bp, Probe sequence
gtatgtcacaagaagagtcagtagt

SEQ ID NO: 42979 - DNA, 25 bp, Probe sequence
caatggttgttgaagtatggtctaa

SEQ ID NO: 42980 - DNA, 25 bp, Probe sequence
tcaagcaacgactgatattaacact

SEQ ID NO: 42981 - DNA, 25 bp, Probe sequence
tagtggaagtacgaatagatgaagc

SEQ ID NO: 42982 - DNA, 25 bp, Probe sequence
gcaatggttgttgaagtatggtcta

SEQ ID NO: 42983 - DNA, 25 bp, Probe sequence
tgtatgtcacaagaagagtcagtag

SEQ ID NO: 42984 - DNA, 25 bp, Probe sequence
ctagtggaagtacgaatagatgaag

SEQ ID NO: 42985 - DNA, 25 bp, Probe sequence
tatgtcacaagaagagtcagtagtg

SEQ ID NO: 42986 - DNA, 25 bp, Probe sequence
ccgttcaacattcaacaacactatt

SEQ ID NO: 42987 - DNA, 25 bp, Probe sequence
cgttcaacattcaacaacactattg

SEQ ID NO: 42988 - DNA, 25 bp, Probe sequence
tccgttcaacattcaacaacactat

SEQ ID NO: 42989 - DNA, 25 bp, Probe sequence
atccgttcaacattcaacaacacta

SEQ ID NO: 42990 - DNA, 25 bp, Probe sequence
actatcactgatgagttcggtaatg

SEQ ID NO: 42991 - DNA, 25 bp, Probe sequence
ctatcactgatgagttcggtaatgc

SEQ ID NO: 42992 - DNA, 25 bp, Probe sequence
tatcactgatgagttcggtaatgct

SEQ ID NO: 42993 - DNA, 25 bp, Probe sequence
catccgttcaacattcaacaacact

SEQ ID NO: 42994 - DNA, 25 bp, Probe sequence
aatcagctattcgtgcattacaatc

SEQ ID NO: 42995 - DNA, 25 bp, Probe sequence
tagaacagtcggaacataccattca

SEQ ID NO: 42996 - DNA, 25 bp, Probe sequence
ctagaacagtcggaacataccattc

SEQ ID NO: 42997 - DNA, 25 bp, Probe sequence
aaatacattgcccatagttgaacag

SEQ ID NO: 42998 - DNA, 25 bp, Probe sequence
tcatcagaaccaaacgataaagact

SEQ ID NO: 42999 - DNA, 25 bp, Probe sequence
gctagaacagtcggaacataccatt

SEQ ID NO: 43000 - DNA, 25 bp, Probe sequence
atacattgcccatagttgaacagtt

SEQ ID NO: 43001 - DNA, 25 bp, Probe sequence
aatacattgcccatagttgaacagt

SEQ ID NO: 43002 - DNA, 25 bp, Probe sequence
acagattcatcagaaccaaacgata

SEQ ID NO: 43003 - DNA, 25 bp, Probe sequence
tacattgcccatagttgaacagttt

SEQ ID NO: 43004 - DNA, 25 bp, Probe sequence
gtgtgaaagatttaactgatgacga

SEQ ID NO: 43005 - DNA, 25 bp, Probe sequence
tcgtgtgaaagatttaactgatgac

SEQ ID NO: 43006 - DNA, 25 bp, Probe sequence
actcgtgtgaaagatttaactgatg

SEQ ID NO: 43007 - DNA, 25 bp, Probe sequence
gctgatactcgtgtgaaagatttaa

SEQ ID NO: 43008 - DNA, 25 bp, Probe sequence
ctcgtgtgaaagatttaactgatga

SEQ ID NO: 43009 - DNA, 25 bp, Probe sequence
tgtgaaagatttaactgatgacgaa

SEQ ID NO: 43010 - DNA, 25 bp, Probe sequence
tactcgtgtgaaagatttaactgat

SEQ ID NO: 43011 - DNA, 25 bp, Probe sequence
atactcgtgtgaaagatttaactga

SEQ ID NO: 43012 - DNA, 25 bp, Probe sequence
tgatactcgtgtgaaagatttaact

SEQ ID NO: 43013 - DNA, 25 bp, Probe sequence
gtattaagtgcggtcatagtaggtc

SEQ ID NO: 43014 - DNA, 25 bp, Probe sequence
atgtattaagtgcggtcatagtagg

SEQ ID NO: 43015 - DNA, 25 bp, Probe sequence
tgtattaagtgcggtcatagtaggt

SEQ ID NO: 43016 - DNA, 25 bp, Probe sequence
tattaagtgcggtcatagtaggtcc

SEQ ID NO: 43017 - DNA, 25 bp, Probe sequence
tagtctcaagtgctatcggatctat

SEQ ID NO: 43018 - DNA, 25 bp, Probe sequence
gtctcaagtgctatcggatctatta

SEQ ID NO: 43019 - DNA, 25 bp, Probe sequence
aatgtattaagtgcggtcatagtag

SEQ ID NO: 43020 - DNA, 25 bp, Probe sequence
agtctcaagtgctatcggatctatt

SEQ ID NO: 43021 - DNA, 25 bp, Probe sequence
gcagtattatcatcattcctctagg

SEQ ID NO: 43022 - DNA, 25 bp, Probe sequence
tagacataccagtaggatacacaca

SEQ ID NO: 43023 - DNA, 25 bp, Probe sequence
gtagacataccagtaggatacacac

SEQ ID NO: 43024 - DNA, 25 bp, Probe sequence
agacataccagtaggatacacacat

SEQ ID NO: 43025 - DNA, 25 bp, Probe sequence
gacataccagtaggatacacacata

SEQ ID NO: 43026 - DNA, 25 bp, Probe sequence
agaagttgtagacataccagtagga

SEQ ID NO: 43027 - DNA, 25 bp, Probe sequence
ttatcgtcttcaatacaagcaacac

SEQ ID NO: 43028 - DNA, 25 bp, Probe sequence
gaagttgtagacataccagtaggat

SEQ ID NO: 43029 - DNA, 25 bp, Probe sequence
agcaacacaagataatccttatggt

SEQ ID NO: 43030 - DNA, 25 bp, Probe sequence
caatacaagcaacacaagataatcc

SEQ ID NO: 43031 - DNA, 25 bp, Probe sequence
gcagttgacgatagttatggtattc

SEQ ID NO: 43032 - DNA, 25 bp, Probe sequence
cgatagttatggtattcaagttgcg

SEQ ID NO: 43033 - DNA, 25 bp, Probe sequence
ggcattggtgaagttaagtgaatta

SEQ ID NO: 43034 - DNA, 25 bp, Probe sequence
acgatagttatggtattcaagttgc

SEQ ID NO: 43035 - DNA, 25 bp, Probe sequence
aagttattagcagagcacaagtgat

SEQ ID NO: 43036 - DNA, 25 bp, Probe sequence
gatagttatggtattcaagttgcga

SEQ ID NO: 43037 - DNA, 25 bp, Probe sequence
gcattggtgaagttaagtgaattac

SEQ ID NO: 43038 - DNA, 25 bp, Probe sequence
aggcattggtgaagttaagtgaatt

SEQ ID NO: 43039 - DNA, 25 bp, Probe sequence
aattgaggcattggtgaagttaagt

SEQ ID NO: 43040 - DNA, 25 bp, Probe sequence
aattacattcgtattctacctggcg

SEQ ID NO: 43041 - DNA, 25 bp, Probe sequence
gaattacattcgtattctacctggc

SEQ ID NO: 43042 - DNA, 25 bp, Probe sequence
aagtaactgttgagatgtctccgta

SEQ ID NO: 43043 - DNA, 25 bp, Probe sequence
attagatactttaccgaacgcaatg

SEQ ID NO: 43044 - DNA, 25 bp, Probe sequence
ttagatactttaccgaacgcaatgt

SEQ ID NO: 43045 - DNA, 25 bp, Probe sequence
agtaactgttgagatgtctccgtac

SEQ ID NO: 43046 - DNA, 25 bp, Probe sequence
tgaattacattcgtattctacctgg

SEQ ID NO: 43047 - DNA, 25 bp, Probe sequence
gatactttaccgaacgcaatgttta

SEQ ID NO: 43048 - DNA, 25 bp, Probe sequence
atactttaccgaacgcaatgtttaa

SEQ ID NO: 43049 - DNA, 25 bp, Probe sequence
attgaagcggaagacttaggattag

SEQ ID NO: 43050 - DNA, 25 bp, Probe sequence
taagcattgaagtagaggaatctgg

SEQ ID NO: 43051 - DNA, 25 bp, Probe sequence
aattgaagcggaagacttaggatta

SEQ ID NO: 43052 - DNA, 25 bp, Probe sequence
acactcttaacaataggtaggttcc

SEQ ID NO: 43053 - DNA, 25 bp, Probe sequence
aagcgtctgatgattattatgatgt

SEQ ID NO: 43054 - DNA, 25 bp, Probe sequence
aactaatgaagtgatggcagagatt

SEQ ID NO: 43055 - DNA, 25 bp, Probe sequence
gaagcggaagacttaggattagtat

SEQ ID NO: 43056 - DNA, 25 bp, Probe sequence
agaaggctatcatacactcttaaca

SEQ ID NO: 43057 - DNA, 25 bp, Probe sequence
gaactaatgaagtgatggcagagat

SEQ ID NO: 43058 - DNA, 25 bp, Probe sequence
tgaagtgactgtaggtatcgttaag

SEQ ID NO: 43059 - DNA, 25 bp, Probe sequence
gaagtgactgtaggtatcgttaagg

SEQ ID NO: 43060 - DNA, 25 bp, Probe sequence
gatgaagtgactgtaggtatcgtta

SEQ ID NO: 43061 - DNA, 25 bp, Probe sequence
agtgactgtaggtatcgttaaggaa

SEQ ID NO: 43062 - DNA, 25 bp, Probe sequence
aagtgactgtaggtatcgttaagga

SEQ ID NO: 43063 - DNA, 25 bp, Probe sequence
atgaagtgactgtaggtatcgttaa

SEQ ID NO: 43064 - DNA, 25 bp, Probe sequence
ttagttcctgatgaagtgactgtag

SEQ ID NO: 43065 - DNA, 25 bp, Probe sequence
tcaacgagaagatgataatcctgaa

SEQ ID NO: 43066 - DNA, 25 bp, Probe sequence
tgatgaagtgactgtaggtatcgtt

SEQ ID NO: 43067 - DNA, 25 bp, Probe sequence
aagtgaataacaacatattgcctgc

SEQ ID NO: 43068 - DNA, 25 bp, Probe sequence
caagtgaataacaacatattgcctg

SEQ ID NO: 43069 - DNA, 25 bp, Probe sequence
tcaagtgaataacaacatattgcct

SEQ ID NO: 43070 - DNA, 25 bp, Probe sequence
atcaagtgaataacaacatattgcc

SEQ ID NO: 43071 - DNA, 25 bp, Probe sequence
agaaagaaacaaacacacaagtcat

SEQ ID NO: 43072 - DNA, 25 bp, Probe sequence
gcattgaaacgcagtatagatttga

SEQ ID NO: 43073 - DNA, 25 bp, Probe sequence
agcattgaaacgcagtatagatttg

SEQ ID NO: 43074 - DNA, 25 bp, Probe sequence
tcagaaagaaacaaacacacaagtc

SEQ ID NO: 43075 - DNA, 25 bp, Probe sequence
aagcattgaaacgcagtatagattt

SEQ ID NO: 43076 - DNA, 25 bp, Probe sequence
gtaggttctatcttcttagccgtta

SEQ ID NO: 43077 - DNA, 25 bp, Probe sequence
aggttctatcttcttagccgttatt

SEQ ID NO: 43078 - DNA, 25 bp, Probe sequence
tgtaggttctatcttcttagccgtt

SEQ ID NO: 43079 - DNA, 25 bp, Probe sequence
ttgtaggttctatcttcttagccgt

SEQ ID NO: 43080 - DNA, 25 bp, Probe sequence
aagattaggttcacaggcaacttat

SEQ ID NO: 43081 - DNA, 25 bp, Probe sequence
ttaggttcacaggcaacttatctac

SEQ ID NO: 43082 - DNA, 25 bp, Probe sequence
attaggttcacaggcaacttatcta

SEQ ID NO: 43083 - DNA, 25 bp, Probe sequence
gattaggttcacaggcaacttatct

SEQ ID NO: 43084 - DNA, 25 bp, Probe sequence
agattaggttcacaggcaacttatc

SEQ ID NO: 43085 - DNA, 25 bp, Probe sequence
tagttcctggttatattgttgctca

SEQ ID NO: 43086 - DNA, 25 bp, Probe sequence
ttagttcctggttatattgttgctc

SEQ ID NO: 43087 - DNA, 25 bp, Probe sequence
agttcctggttatattgttgctcaa

SEQ ID NO: 43088 - DNA, 25 bp, Probe sequence
ttgattggtcattagttcctggtta

SEQ ID NO: 43089 - DNA, 25 bp, Probe sequence
attatcggaacaatggcattaactt

SEQ ID NO: 43090 - DNA, 25 bp, Probe sequence
tgattggtcattagttcctggttat

SEQ ID NO: 43091 - DNA, 25 bp, Probe sequence
cattagttcctggttatattgttgc

SEQ ID NO: 43092 - DNA, 25 bp, Probe sequence
ggtcattagttcctggttatattgt

SEQ ID NO: 43093 - DNA, 25 bp, Probe sequence
tggtcattagttcctggttatattg

SEQ ID NO: 43094 - DNA, 25 bp, Probe sequence
ttgaagatggtactgaagtaactcc

SEQ ID NO: 43095 - DNA, 25 bp, Probe sequence
agaatctggtgttgttaagaatgaa

SEQ ID NO: 43096 - DNA, 25 bp, Probe sequence
gtagaatctggtgttgttaagaatg

SEQ ID NO: 43097 - DNA, 25 bp, Probe sequence
tagaatctggtgttgttaagaatga

SEQ ID NO: 43098 - DNA, 25 bp, Probe sequence
agtagaatctggtgttgttaagaat

SEQ ID NO: 43099 - DNA, 25 bp, Probe sequence
actaggtaatggttcacttgataag

SEQ ID NO: 43100 - DNA, 25 bp, Probe sequence
ctaggtaatggttcacttgataaga

SEQ ID NO: 43101 - DNA, 25 bp, Probe sequence
taggtaatggttcacttgataagaa

SEQ ID NO: 43102 - DNA, 25 bp, Probe sequence
attaccattattccgtcgtttacca

SEQ ID NO: 43103 - DNA, 25 bp, Probe sequence
gttccaagcagacattgttaatact

SEQ ID NO: 43104 - DNA, 25 bp, Probe sequence
agttccaagcagacattgttaatac

SEQ ID NO: 43105 - DNA, 25 bp, Probe sequence
cagttccaagcagacattgttaata

SEQ ID NO: 43106 - DNA, 25 bp, Probe sequence
ttggaacgattgatacttggttagt

SEQ ID NO: 43107 - DNA, 25 bp, Probe sequence
ccaagcagacattgttaatacttct

SEQ ID NO: 43108 - DNA, 25 bp, Probe sequence
tccaagcagacattgttaatacttc

SEQ ID NO: 43109 - DNA, 25 bp, Probe sequence
ttccaagcagacattgttaatactt

SEQ ID NO: 43110 - DNA, 25 bp, Probe sequence
tgttagctgtaatgacggaagtaat

SEQ ID NO: 43111 - DNA, 25 bp, Probe sequence
gttagctgtaatgacggaagtaatt

SEQ ID NO: 43112 - DNA, 25 bp, Probe sequence
gttgttgaagataaccctgctattc

SEQ ID NO: 43113 - DNA, 25 bp, Probe sequence
agttgttgaagataaccctgctatt

SEQ ID NO: 43114 - DNA, 25 bp, Probe sequence
gtagttgttgaagataaccctgcta

SEQ ID NO: 43115 - DNA, 25 bp, Probe sequence
tagttgttgaagataaccctgctat

SEQ ID NO: 43116 - DNA, 25 bp, Probe sequence
ttgttgaagataaccctgctattcg

SEQ ID NO: 43117 - DNA, 25 bp, Probe sequence
taagcacttagtaacagtagaagaa

SEQ ID NO: 43118 - DNA, 25 bp, Probe sequence
ttaagcacttagtaacagtagaaga

SEQ ID NO: 43119 - DNA, 25 bp, Probe sequence
attacaaattaccctcactcgtagt

SEQ ID NO: 43120 - DNA, 25 bp, Probe sequence
agtagttgttgaagataaccctgct

SEQ ID NO: 43121 - DNA, 25 bp, Probe sequence
tcaccattaactacacaagaagaca

SEQ ID NO: 43122 - DNA, 25 bp, Probe sequence
gttgatgatgttagaagtggtgatt

SEQ ID NO: 43123 - DNA, 25 bp, Probe sequence
accattaactacacaagaagacaga

SEQ ID NO: 43124 - DNA, 25 bp, Probe sequence
caccattaactacacaagaagacag

SEQ ID NO: 43125 - DNA, 25 bp, Probe sequence
ggcggttactatgttgaatatcgta

SEQ ID NO: 43126 - DNA, 25 bp, Probe sequence
atgatgttagaagtggtgattatgc

SEQ ID NO: 43127 - DNA, 25 bp, Probe sequence
ggttgatgatgttagaagtggtgat

SEQ ID NO: 43128 - DNA, 25 bp, Probe sequence
ccattaactacacaagaagacagag

SEQ ID NO: 43129 - DNA, 25 bp, Probe sequence
ttcaccattaactacacaagaagac

SEQ ID NO: 43130 - DNA, 25 bp, Probe sequence
gaaggtacaactccacacacaatta

SEQ ID NO: 43131 - DNA, 25 bp, Probe sequence
aaggtacaactccacacacaattac

SEQ ID NO: 43132 - DNA, 25 bp, Probe sequence
cgtacttgaattagcaggtatcact

SEQ ID NO: 43133 - DNA, 25 bp, Probe sequence
tacttgaattagcaggtatcactga

SEQ ID NO: 43134 - DNA, 25 bp, Probe sequence
acttgaattagcaggtatcactgat

SEQ ID NO: 43135 - DNA, 25 bp, Probe sequence
ggtacaactccacacacaattactg

SEQ ID NO: 43136 - DNA, 25 bp, Probe sequence
aggtacaactccacacacaattact

SEQ ID NO: 43137 - DNA, 25 bp, Probe sequence
ccgtacttgaattagcaggtatcac

SEQ ID NO: 43138 - DNA, 25 bp, Probe sequence
gtacttgaattagcaggtatcactg

SEQ ID NO: 43139 - DNA, 25 bp, Probe sequence
tatccgcaatatgttgatggtctaa

SEQ ID NO: 43140 - DNA, 25 bp, Probe sequence
atatccgcaatatgttgatggtcta

SEQ ID NO: 43141 - DNA, 25 bp, Probe sequence
atccgcaatatgttgatggtctaat

SEQ ID NO: 43142 - DNA, 25 bp, Probe sequence
tccgcaatatgttgatggtctaatt

SEQ ID NO: 43143 - DNA, 25 bp, Probe sequence
tcataatcatcgaggacatggtatt

SEQ ID NO: 43144 - DNA, 25 bp, Probe sequence
tcatgccatgcctatattattagtt

SEQ ID NO: 43145 - DNA, 25 bp, Probe sequence
aagagggcattacgatgatatgaaa

SEQ ID NO: 43146 - DNA, 25 bp, Probe sequence
gcattacgatgatatgaaacgagtt

SEQ ID NO: 43147 - DNA, 25 bp, Probe sequence
gagaggcaatgttgataaaccatac

SEQ ID NO: 43148 - DNA, 25 bp, Probe sequence
cgtgttcgtactaacttatcaggta

SEQ ID NO: 43149 - DNA, 25 bp, Probe sequence
ctcgtgttcgtactaacttatcagg

SEQ ID NO: 43150 - DNA, 25 bp, Probe sequence
atgctcgtgttcgtactaacttatc

SEQ ID NO: 43151 - DNA, 25 bp, Probe sequence
tcgtgttcgtactaacttatcaggt

SEQ ID NO: 43152 - DNA, 25 bp, Probe sequence
gctcgtgttcgtactaacttatcag

SEQ ID NO: 43153 - DNA, 25 bp, Probe sequence
catgctcgtgttcgtactaacttat

SEQ ID NO: 43154 - DNA, 25 bp, Probe sequence
tgctcgtgttcgtactaacttatca

SEQ ID NO: 43155 - DNA, 25 bp, Probe sequence
cgtatttgaccgtggaggatattta

SEQ ID NO: 43156 - DNA, 25 bp, Probe sequence
ctgacaaaggcattaaagaaatcgt

SEQ ID NO: 43157 - DNA, 25 bp, Probe sequence
caggtggaacaggcttatatattca

SEQ ID NO: 43158 - DNA, 25 bp, Probe sequence
aggtggaacaggcttatatattcaa

SEQ ID NO: 43159 - DNA, 25 bp, Probe sequence
ggtggaacaggcttatatattcaat

SEQ ID NO: 43160 - DNA, 25 bp, Probe sequence
gcaggtggaacaggcttatatattc

SEQ ID NO: 43161 - DNA, 25 bp, Probe sequence
agaggtaaagttccaatcatagcag

SEQ ID NO: 43162 - DNA, 25 bp, Probe sequence
aaagtaacacctgaagaaatggatg

SEQ ID NO: 43163 - DNA, 25 bp, Probe sequence
tggaacaggcttatatattcaatca

SEQ ID NO: 43164 - DNA, 25 bp, Probe sequence
tagaggtaaagttccaatcatagca

SEQ ID NO: 43165 - DNA, 25 bp, Probe sequence
cggacaaatgatttatgaagatgct

SEQ ID NO: 43166 - DNA, 25 bp, Probe sequence
tagcatctaacatccgttcagtaag

SEQ ID NO: 43167 - DNA, 25 bp, Probe sequence
tacttgaacttgttggtgtaggtta

SEQ ID NO: 43168 - DNA, 25 bp, Probe sequence
tgaagttgtaagaccatctgattct

SEQ ID NO: 43169 - DNA, 25 bp, Probe sequence
gaacaagttggagcattagcatcta

SEQ ID NO: 43170 - DNA, 25 bp, Probe sequence
atctaacatccgttcagtaagacct

SEQ ID NO: 43171 - DNA, 25 bp, Probe sequence
catctaacatccgttcagtaagacc

SEQ ID NO: 43172 - DNA, 25 bp, Probe sequence
ttgaagttgtaagaccatctgattc

SEQ ID NO: 43173 - DNA, 25 bp, Probe sequence
acttgaacttgttggtgtaggttac

SEQ ID NO: 43174 - DNA, 25 bp, Probe sequence
gcatctaacatccgttcagtaagac

SEQ ID NO: 43175 - DNA, 25 bp, Probe sequence
ggtgttattgaagaatacgacaagt

SEQ ID NO: 43176 - DNA, 25 bp, Probe sequence
aggtgttattgaagaatacgacaag

SEQ ID NO: 43177 - DNA, 25 bp, Probe sequence
aaggtgttattgaagaatacgacaa

SEQ ID NO: 43178 - DNA, 25 bp, Probe sequence
gcaaaccaaactgaagtaactgtat

SEQ ID NO: 43179 - DNA, 25 bp, Probe sequence
ttaaattctcaaggcaaacaacact

SEQ ID NO: 43180 - DNA, 25 bp, Probe sequence
aaagcaaaccaaactgaagtaactg

SEQ ID NO: 43181 - DNA, 25 bp, Probe sequence
taaagcaaaccaaactgaagtaact

SEQ ID NO: 43182 - DNA, 25 bp, Probe sequence
agcaaaccaaactgaagtaactgta

SEQ ID NO: 43183 - DNA, 25 bp, Probe sequence
taaattctcaaggcaaacaacactt

SEQ ID NO: 43184 - DNA, 25 bp, Probe sequence
gtcacgagaagttagaattacctgc

SEQ ID NO: 43185 - DNA, 25 bp, Probe sequence
aatgacagatccaatcgcagatatg

SEQ ID NO: 43186 - DNA, 25 bp, Probe sequence
caatgacagatccaatcgcagatat

SEQ ID NO: 43187 - DNA, 25 bp, Probe sequence
cgtcacgagaagttagaattacctg

SEQ ID NO: 43188 - DNA, 25 bp, Probe sequence
gcattagtatcaacttctgaaggtg

SEQ ID NO: 43189 - DNA, 25 bp, Probe sequence
gatgagcgtgttatcacaggattaa

SEQ ID NO: 43190 - DNA, 25 bp, Probe sequence
gtatcaacttctgaaggtgtaatca

SEQ ID NO: 43191 - DNA, 25 bp, Probe sequence
cattagtatcaacttctgaaggtgt

SEQ ID NO: 43192 - DNA, 25 bp, Probe sequence
atcaacttctgaaggtgtaatcact

SEQ ID NO: 43193 - DNA, 25 bp, Probe sequence
cgtagatagtagccatcctgaatac

SEQ ID NO: 43194 - DNA, 25 bp, Probe sequence
tcgtagatagtagccatcctgaata

SEQ ID NO: 43195 - DNA, 25 bp, Probe sequence
tacgcagtatgacacagttaatgat

SEQ ID NO: 43196 - DNA, 25 bp, Probe sequence
gtagatagtagccatcctgaatacc

SEQ ID NO: 43197 - DNA, 25 bp, Probe sequence
tagatagtagccatcctgaataccg

SEQ ID NO: 43198 - DNA, 25 bp, Probe sequence
acgcagtatgacacagttaatgatt

SEQ ID NO: 43199 - DNA, 25 bp, Probe sequence
gatagtagccatcctgaataccgta

SEQ ID NO: 43200 - DNA, 25 bp, Probe sequence
gtcgtagatagtagccatcctgaat

SEQ ID NO: 43201 - DNA, 25 bp, Probe sequence
ttatcagagacttgccaacttgaag

SEQ ID NO: 43202 - DNA, 25 bp, Probe sequence
gccgtccacattctgtatatcgtaa

SEQ ID NO: 43203 - DNA, 25 bp, Probe sequence
aattatgccgtatttgtttccgtga

SEQ ID NO: 43204 - DNA, 25 bp, Probe sequence
ttatgccgtatttgtttccgtgaat

SEQ ID NO: 43205 - DNA, 25 bp, Probe sequence
attatgccgtatttgtttccgtgaa

SEQ ID NO: 43206 - DNA, 25 bp, Probe sequence
taaattatgccgtatttgtttccgt

SEQ ID NO: 43207 - DNA, 25 bp, Probe sequence
ccgtccacattctgtatatcgtaaa

SEQ ID NO: 43208 - DNA, 25 bp, Probe sequence
atgccgtatttgtttccgtgaatta

SEQ ID NO: 43209 - DNA, 25 bp, Probe sequence
tatgccgtatttgtttccgtgaatt

SEQ ID NO: 43210 - DNA, 25 bp, Probe sequence
aaattatgccgtatttgtttccgtg

SEQ ID NO: 43211 - DNA, 25 bp, Probe sequence
gaaccgatgattgatgctattgatt

SEQ ID NO: 43212 - DNA, 25 bp, Probe sequence
ataacgaaccgatgattgatgctat

SEQ ID NO: 43213 - DNA, 25 bp, Probe sequence
taacgaaccgatgattgatgctatt

SEQ ID NO: 43214 - DNA, 25 bp, Probe sequence
aataacgaaccgatgattgatgcta

SEQ ID NO: 43215 - DNA, 25 bp, Probe sequence
agatagtggaacattgtcagaagag

SEQ ID NO: 43216 - DNA, 25 bp, Probe sequence
atagtggaacattgtcagaagagtc

SEQ ID NO: 43217 - DNA, 25 bp, Probe sequence
gatagtggaacattgtcagaagagt

SEQ ID NO: 43218 - DNA, 25 bp, Probe sequence
cagatagtggaacattgtcagaaga

SEQ ID NO: 43219 - DNA, 25 bp, Probe sequence
tcagatagtggaacattgtcagaag

SEQ ID NO: 43220 - DNA, 25 bp, Probe sequence
tatatgcctggttacgaagatgatg

SEQ ID NO: 43221 - DNA, 25 bp, Probe sequence
ttatatgcctggttacgaagatgat

SEQ ID NO: 43222 - DNA, 25 bp, Probe sequence
gttatatgcctggttacgaagatga

SEQ ID NO: 43223 - DNA, 25 bp, Probe sequence
agttatatgcctggttacgaagatg

SEQ ID NO: 43224 - DNA, 25 bp, Probe sequence
gcctggttacgaagatgatgttatt

SEQ ID NO: 43225 - DNA, 25 bp, Probe sequence
ttgaacgatgtggttatagattgac

SEQ ID NO: 43226 - DNA, 25 bp, Probe sequence
cctggttacgaagatgatgttatta

SEQ ID NO: 43227 - DNA, 25 bp, Probe sequence
ctaagattggtggatacattgctgg

SEQ ID NO: 43228 - DNA, 25 bp, Probe sequence
gttacgaagatgatgttattatggc

SEQ ID NO: 43229 - DNA, 25 bp, Probe sequence
taacgactgctaacactgatgaaga

SEQ ID NO: 43230 - DNA, 25 bp, Probe sequence
gtaacgactgctaacactgatgaag

SEQ ID NO: 43231 - DNA, 25 bp, Probe sequence
agacaatgctgttgaagaattagaa

SEQ ID NO: 43232 - DNA, 25 bp, Probe sequence
aacgactgctaacactgatgaagaa

SEQ ID NO: 43233 - DNA, 25 bp, Probe sequence
agtattagacaatgctgttgaagaa

SEQ ID NO: 43234 - DNA, 25 bp, Probe sequence
aagtattagacaatgctgttgaaga

SEQ ID NO: 43235 - DNA, 25 bp, Probe sequence
gatgaagaagctcgtgaattgttag

SEQ ID NO: 43236 - DNA, 25 bp, Probe sequence
tgatgaagaagctcgtgaattgtta

SEQ ID NO: 43237 - DNA, 25 bp, Probe sequence
tagacaatgctgttgaagaattaga

SEQ ID NO: 43238 - DNA, 25 bp, Probe sequence
aatatggctgtcttctctatgagtg

SEQ ID NO: 43239 - DNA, 25 bp, Probe sequence
tatggctgtcttctctatgagtgta

SEQ ID NO: 43240 - DNA, 25 bp, Probe sequence
gctgtcttctctatgagtgtagtaa

SEQ ID NO: 43241 - DNA, 25 bp, Probe sequence
acaacagatgaacaagagataagaa

SEQ ID NO: 43242 - DNA, 25 bp, Probe sequence
aacaacagatgaacaagagataaga

SEQ ID NO: 43243 - DNA, 25 bp, Probe sequence
atatggctgtcttctctatgagtgt

SEQ ID NO: 43244 - DNA, 25 bp, Probe sequence
ggctgtcttctctatgagtgtagta

SEQ ID NO: 43245 - DNA, 25 bp, Probe sequence
atggctgtcttctctatgagtgtag

SEQ ID NO: 43246 - DNA, 25 bp, Probe sequence
tgtcttctctatgagtgtagtaagt

SEQ ID NO: 43247 - DNA, 25 bp, Probe sequence
gcaggtaaagacaaaggtaaagaag

SEQ ID NO: 43248 - DNA, 25 bp, Probe sequence
tatcgcaggtaaagacaaaggtaaa

SEQ ID NO: 43249 - DNA, 25 bp, Probe sequence
ttatcgcaggtaaagacaaaggtaa

SEQ ID NO: 43250 - DNA, 25 bp, Probe sequence
aaagttatcgcaggtaaagacaaag

SEQ ID NO: 43251 - DNA, 25 bp, Probe sequence
aggtaaagacaaaggtaaagaaggt

SEQ ID NO: 43252 - DNA, 25 bp, Probe sequence
caggtaaagacaaaggtaaagaagg

SEQ ID NO: 43253 - DNA, 25 bp, Probe sequence
cgttaaagttatcgcaggtaaagac

SEQ ID NO: 43254 - DNA, 25 bp, Probe sequence
gttatcgcaggtaaagacaaaggta

SEQ ID NO: 43255 - DNA, 25 bp, Probe sequence
gttaaagttatcgcaggtaaagaca

SEQ ID NO: 43256 - DNA, 25 bp, Probe sequence
cattcaagacttaccttcaacactt

SEQ ID NO: 43257 - DNA, 25 bp, Probe sequence
gcattcaagacttaccttcaacact

SEQ ID NO: 43258 - DNA, 25 bp, Probe sequence
cgtgtaccatcttcaagaggattat

SEQ ID NO: 43259 - DNA, 25 bp, Probe sequence
ttaatccgtgtaccatcttcaagag

SEQ ID NO: 43260 - DNA, 25 bp, Probe sequence
gtgtaccatcttcaagaggattatc

SEQ ID NO: 43261 - DNA, 25 bp, Probe sequence
gaagcagtaggcattcaagacttac

SEQ ID NO: 43262 - DNA, 25 bp, Probe sequence
taggcattcaagacttaccttcaac

SEQ ID NO: 43263 - DNA, 25 bp, Probe sequence
gtaggcattcaagacttaccttcaa

SEQ ID NO: 43264 - DNA, 25 bp, Probe sequence
ttagaacttaatgatgatggtggat

SEQ ID NO: 43265 - DNA, 25 bp, Probe sequence
aatcgtatcattagcaccagaagta

SEQ ID NO: 43266 - DNA, 25 bp, Probe sequence
tactaagtcaggtgttcgtcgtaat

SEQ ID NO: 43267 - DNA, 25 bp, Probe sequence
atcgtatcattagcaccagaagtac

SEQ ID NO: 43268 - DNA, 25 bp, Probe sequence
aagtattaggtggatctggtcgtaa

SEQ ID NO: 43269 - DNA, 25 bp, Probe sequence
gtgctcgtgaagttcttacaatcaa

SEQ ID NO: 43270 - DNA, 25 bp, Probe sequence
gtactaagtcaggtgttcgtcgtaa

SEQ ID NO: 43271 - DNA, 25 bp, Probe sequence
actaagtcaggtgttcgtcgtaatg

SEQ ID NO: 43272 - DNA, 25 bp, Probe sequence
aaatcgtatcattagcaccagaagt

SEQ ID NO: 43273 - DNA, 25 bp, Probe sequence
ctaagtcaggtgttcgtcgtaatga

SEQ ID NO: 43274 - DNA, 25 bp, Probe sequence
agtagagattgttgaagagtcagta

SEQ ID NO: 43275 - DNA, 25 bp, Probe sequence
tagtagagattgttgaagagtcagt

SEQ ID NO: 43276 - DNA, 25 bp, Probe sequence
gtagagattgttgaagagtcagtaa

SEQ ID NO: 43277 - DNA, 25 bp, Probe sequence
agagattgttgaagagtcagtaatt

SEQ ID NO: 43278 - DNA, 25 bp, Probe sequence
cacacaaattatacggtaaacgagt

SEQ ID NO: 43279 - DNA, 25 bp, Probe sequence
acacacaaattatacggtaaacgag

SEQ ID NO: 43280 - DNA, 25 bp, Probe sequence
aacacacaaattatacggtaaacga

SEQ ID NO: 43281 - DNA, 25 bp, Probe sequence
attcaagaaactcgtcctttatcag

SEQ ID NO: 43282 - DNA, 25 bp, Probe sequence
aaactcgtcctttatcagcaacaaa

SEQ ID NO: 43283 - DNA, 25 bp, Probe sequence
ttggtctttgatgatgcaatgttta

SEQ ID NO: 43284 - DNA, 25 bp, Probe sequence
tttggtctttgatgatgcaatgttt

SEQ ID NO: 43285 - DNA, 25 bp, Probe sequence
tggtctttgatgatgcaatgtttat

SEQ ID NO: 43286 - DNA, 25 bp, Probe sequence
ggtctttgatgatgcaatgtttatt

SEQ ID NO: 43287 - DNA, 25 bp, Probe sequence
gtctttgatgatgcaatgtttatta

SEQ ID NO: 43288 - DNA, 25 bp, Probe sequence
ctttgatgatgcaatgtttattaac

SEQ ID NO: 43289 - DNA, 25 bp, Probe sequence
tctttgatgatgcaatgtttattaa

SEQ ID NO: 43290 - DNA, 25 bp, Probe sequence
tgatgatgcaatgtttattaacaaa

SEQ ID NO: 43291 - DNA, 25 bp, Probe sequence
ttgatgatgcaatgtttattaacaa

SEQ ID NO: 43292 - DNA, 25 bp, Probe sequence
aaagatactgggataagttacggta

SEQ ID NO: 43293 - DNA, 25 bp, Probe sequence
taaagatactgggataagttacggt

SEQ ID NO: 43294 - DNA, 25 bp, Probe sequence
aagatactgggataagttacggtaa

SEQ ID NO: 43295 - DNA, 25 bp, Probe sequence
agatactgggataagttacggtaat

SEQ ID NO: 43296 - DNA, 25 bp, Probe sequence
gttacggtaatattaatgctatgcg

SEQ ID NO: 43297 - DNA, 25 bp, Probe sequence
ataaagatactgggataagttacgg

SEQ ID NO: 43298 - DNA, 25 bp, Probe sequence
ttacggtaatattaatgctatgcgc

SEQ ID NO: 43299 - DNA, 25 bp, Probe sequence
gatactgggataagttacggtaata

SEQ ID NO: 43300 - DNA, 25 bp, Probe sequence
agttacggtaatattaatgctatgc

SEQ ID NO: 43301 - DNA, 25 bp, Probe sequence
aattagagacttaaccacttcagaa

SEQ ID NO: 43302 - DNA, 25 bp, Probe sequence
agagacttaaccacttcagaaatcg

SEQ ID NO: 43303 - DNA, 25 bp, Probe sequence
tcgtgaaagagaaattgaacaaagt

SEQ ID NO: 43304 - DNA, 25 bp, Probe sequence
aagagaaattgaacaaagtaaggct

SEQ ID NO: 43305 - DNA, 25 bp, Probe sequence
aaagagaaattgaacaaagtaaggc

SEQ ID NO: 43306 - DNA, 25 bp, Probe sequence
agagaaattgaacaaagtaaggcta

SEQ ID NO: 43307 - DNA, 25 bp, Probe sequence
cgtgaaagagaaattgaacaaagta

SEQ ID NO: 43308 - DNA, 25 bp, Probe sequence
ctcgtgaaagagaaattgaacaaag

SEQ ID NO: 43309 - DNA, 25 bp, Probe sequence
gctcgtgaaagagaaattgaacaaa

SEQ ID NO: 43310 - DNA, 25 bp, Probe sequence
gtcgcctaaagatacaacaagattc

SEQ ID NO: 43311 - DNA, 25 bp, Probe sequence
tttgactggaaagaaagcattaact

SEQ ID NO: 43312 - DNA, 25 bp, Probe sequence
tcgcctaaagatacaacaagattcg

SEQ ID NO: 43313 - DNA, 25 bp, Probe sequence
ttgactggaaagaaagcattaactt

SEQ ID NO: 43314 - DNA, 25 bp, Probe sequence
gtttgactggaaagaaagcattaac

SEQ ID NO: 43315 - DNA, 25 bp, Probe sequence
agtttgactggaaagaaagcattaa

SEQ ID NO: 43316 - DNA, 25 bp, Probe sequence
atgtcgcctaaagatacaacaagat

SEQ ID NO: 43317 - DNA, 25 bp, Probe sequence
tgtcgcctaaagatacaacaagatt

SEQ ID NO: 43318 - DNA, 25 bp, Probe sequence
tgtgctactactttattattctcgt

SEQ ID NO: 43319 - DNA, 25 bp, Probe sequence
atactctgtgccctatttgtgattt

SEQ ID NO: 43320 - DNA, 25 bp, Probe sequence
ctatactctgtgccctatttgtgat

SEQ ID NO: 43321 - DNA, 25 bp, Probe sequence
tatactctgtgccctatttgtgatt

SEQ ID NO: 43322 - DNA, 25 bp, Probe sequence
gctatactctgtgccctatttgtga

SEQ ID NO: 43323 - DNA, 25 bp, Probe sequence
gttcaattgtagctatactctgtgc

SEQ ID NO: 43324 - DNA, 25 bp, Probe sequence
cggttcaattgtagctatactctgt

SEQ ID NO: 43325 - DNA, 25 bp, Probe sequence
acggttcaattgtagctatactctg

SEQ ID NO: 43326 - DNA, 25 bp, Probe sequence
ttcaattgtagctatactctgtgcc

SEQ ID NO: 43327 - DNA, 25 bp, Probe sequence
ggttcaattgtagctatactctgtg

SEQ ID NO: 43328 - DNA, 25 bp, Probe sequence
gtggtataagtgaattaagaagcgg

SEQ ID NO: 43329 - DNA, 25 bp, Probe sequence
ggtggtataagtgaattaagaagcg

SEQ ID NO: 43330 - DNA, 25 bp, Probe sequence
tggtggtataagtgaattaagaagc

SEQ ID NO: 43331 - DNA, 25 bp, Probe sequence
ggtataagtgaattaagaagcggga

SEQ ID NO: 43332 - DNA, 25 bp, Probe sequence
tggtataagtgaattaagaagcggg

SEQ ID NO: 43333 - DNA, 25 bp, Probe sequence
gtataagtgaattaagaagcgggaa

SEQ ID NO: 43334 - DNA, 25 bp, Probe sequence
tataagtgaattaagaagcgggaaa

SEQ ID NO: 43335 - DNA, 25 bp, Probe sequence
atggtggtataagtgaattaagaag

SEQ ID NO: 43336 - DNA, 25 bp, Probe sequence
aatttaactttagaaacagcggaaa

SEQ ID NO: 43337 - DNA, 25 bp, Probe sequence
aatatcgtcgtcaacatcgtcctaa

SEQ ID NO: 43338 - DNA, 25 bp, Probe sequence
gtatagcaatgacacgttacatgaa

SEQ ID NO: 43339 - DNA, 25 bp, Probe sequence
aatcttcccacatacaccatatact

SEQ ID NO: 43340 - DNA, 25 bp, Probe sequence
cgtaacatttggtgagtttggttta

SEQ ID NO: 43341 - DNA, 25 bp, Probe sequence
aacatttggtgagtttggtttacaa

SEQ ID NO: 43342 - DNA, 25 bp, Probe sequence
taacatttggtgagtttggtttaca

SEQ ID NO: 43343 - DNA, 25 bp, Probe sequence
acatttggtgagtttggtttacaag

SEQ ID NO: 43344 - DNA, 25 bp, Probe sequence
gcagttgttaaaccaggtagaattt

SEQ ID NO: 43345 - DNA, 25 bp, Probe sequence
tcttcccacatacaccatatactaa

SEQ ID NO: 43346 - DNA, 25 bp, Probe sequence
aatcggacttcgtgttggtattatc

SEQ ID NO: 43347 - DNA, 25 bp, Probe sequence
cttcgtgttggtattatccgtgatt

SEQ ID NO: 43348 - DNA, 25 bp, Probe sequence
ttcgtgttggtattatccgtgattg

SEQ ID NO: 43349 - DNA, 25 bp, Probe sequence
caatcggacttcgtgttggtattat

SEQ ID NO: 43350 - DNA, 25 bp, Probe sequence
acttcgtgttggtattatccgtgat

SEQ ID NO: 43351 - DNA, 25 bp, Probe sequence
gacttcgtgttggtattatccgtga

SEQ ID NO: 43352 - DNA, 25 bp, Probe sequence
tatcgtggagaagttcttcctacta

SEQ ID NO: 43353 - DNA, 25 bp, Probe sequence
atcgtggagaagttcttcctactaa

SEQ ID NO: 43354 - DNA, 25 bp, Probe sequence
cggtaaattaggcgttaaagtatgg

SEQ ID NO: 43355 - DNA, 25 bp, Probe sequence
gtcaacctctcaccgtgaattactt

SEQ ID NO: 43356 - DNA, 25 bp, Probe sequence
cctctcaccgtgaattactttagtt

SEQ ID NO: 43357 - DNA, 25 bp, Probe sequence
aacctctcaccgtgaattactttag

SEQ ID NO: 43358 - DNA, 25 bp, Probe sequence
caacctctcaccgtgaattacttta

SEQ ID NO: 43359 - DNA, 25 bp, Probe sequence
ctctcaccgtgaattactttagttt

SEQ ID NO: 43360 - DNA, 25 bp, Probe sequence
acctctcaccgtgaattactttagt

SEQ ID NO: 43361 - DNA, 25 bp, Probe sequence
gagtcaacctctcaccgtgaattac

SEQ ID NO: 43362 - DNA, 25 bp, Probe sequence
gtgaattactttagtttacgggtta

SEQ ID NO: 43363 - DNA, 25 bp, Probe sequence
agtcaacctctcaccgtgaattact

SEQ ID NO: 43364 - DNA, 25 bp, Probe sequence
atatgctaacgaaggaccaacatta

SEQ ID NO: 43365 - DNA, 25 bp, Probe sequence
tatgctaacgaaggaccaacattaa

SEQ ID NO: 43366 - DNA, 25 bp, Probe sequence
gaacaataagaatcgcacctcgtaa

SEQ ID NO: 43367 - DNA, 25 bp, Probe sequence
gctaatgctgaacataactatgaca

SEQ ID NO: 43368 - DNA, 25 bp, Probe sequence
ctagaacaataagaatcgcacctcg

SEQ ID NO: 43369 - DNA, 25 bp, Probe sequence
gctgaacataactatgacatgaaca

SEQ ID NO: 43370 - DNA, 25 bp, Probe sequence
tgctgaacataactatgacatgaac

SEQ ID NO: 43371 - DNA, 25 bp, Probe sequence
agaacaataagaatcgcacctcgta

SEQ ID NO: 43372 - DNA, 25 bp, Probe sequence
tagaacaataagaatcgcacctcgt

SEQ ID NO: 43373 - DNA, 25 bp, Probe sequence
tactttcacaattaagacagggcaa

SEQ ID NO: 43374 - DNA, 25 bp, Probe sequence
ctttcacaattaagacagggcaaac

SEQ ID NO: 43375 - DNA, 25 bp, Probe sequence
actttcacaattaagacagggcaaa

SEQ ID NO: 43376 - DNA, 25 bp, Probe sequence
gtactttcacaattaagacagggca

SEQ ID NO: 43377 - DNA, 25 bp, Probe sequence
tttcacaattaagacagggcaaacg

SEQ ID NO: 43378 - DNA, 25 bp, Probe sequence
aatctaaccctgaatacaacagaaa

SEQ ID NO: 43379 - DNA, 25 bp, Probe sequence
gcgaagtagataatctaaccctgaa

SEQ ID NO: 43380 - DNA, 25 bp, Probe sequence
agataatctaaccctgaatacaaca

SEQ ID NO: 43381 - DNA, 25 bp, Probe sequence
taatctaaccctgaatacaacagaa

SEQ ID NO: 43382 - DNA, 25 bp, Probe sequence
tgtaactgaagatatggtaggtcat

SEQ ID NO: 43383 - DNA, 25 bp, Probe sequence
atgtaactgaagatatggtaggtca

SEQ ID NO: 43384 - DNA, 25 bp, Probe sequence
cgtacctgtatatgtaactgaagat

SEQ ID NO: 43385 - DNA, 25 bp, Probe sequence
tatgtaactgaagatatggtaggtc

SEQ ID NO: 43386 - DNA, 25 bp, Probe sequence
cacgtacctgtatatgtaactgaag

SEQ ID NO: 43387 - DNA, 25 bp, Probe sequence
acgtacctgtatatgtaactgaaga

SEQ ID NO: 43388 - DNA, 25 bp, Probe sequence
aggtcataaattaggtgagtttgct

SEQ ID NO: 43389 - DNA, 25 bp, Probe sequence
gtcataaattaggtgagtttgctcc

SEQ ID NO: 43390 - DNA, 25 bp, Probe sequence
ggtcataaattaggtgagtttgctc

SEQ ID NO: 43391 - DNA, 25 bp, Probe sequence
aatataatatcgcagtaagttggca

SEQ ID NO: 43392 - DNA, 25 bp, Probe sequence
atataatatcgcagtaagttggcaa

SEQ ID NO: 43393 - DNA, 25 bp, Probe sequence
gaatataatatcgcagtaagttggc

SEQ ID NO: 43394 - DNA, 25 bp, Probe sequence
tataatatcgcagtaagttggcaac

SEQ ID NO: 43395 - DNA, 25 bp, Probe sequence
ataatatcgcagtaagttggcaacg

SEQ ID NO: 43396 - DNA, 25 bp, Probe sequence
tccagaatataatatcgcagtaagt

SEQ ID NO: 43397 - DNA, 25 bp, Probe sequence
agaatataatatcgcagtaagttgg

SEQ ID NO: 43398 - DNA, 25 bp, Probe sequence
ccagaatataatatcgcagtaagtt

SEQ ID NO: 43399 - DNA, 25 bp, Probe sequence
atccagaatataatatcgcagtaag

SEQ ID NO: 43400 - DNA, 25 bp, Probe sequence
tggtaacctacaacacgaattagtt

SEQ ID NO: 43401 - DNA, 25 bp, Probe sequence
ttggtaacctacaacacgaattagt

SEQ ID NO: 43402 - DNA, 25 bp, Probe sequence
ttcgtatgatcttatctacttgccg

SEQ ID NO: 43403 - DNA, 25 bp, Probe sequence
gttcgtatgatcttatctacttgcc

SEQ ID NO: 43404 - DNA, 25 bp, Probe sequence
tggtgaagttcgtatgatcttatct

SEQ ID NO: 43405 - DNA, 25 bp, Probe sequence
tctggtgaagttcgtatgatcttat

SEQ ID NO: 43406 - DNA, 25 bp, Probe sequence
atctggtgaagttcgtatgatctta

SEQ ID NO: 43407 - DNA, 25 bp, Probe sequence
ctggtgaagttcgtatgatcttatc

SEQ ID NO: 43408 - DNA, 25 bp, Probe sequence
cgtatgatcttatctacttgccgtg

SEQ ID NO: 43409 - DNA, 25 bp, Probe sequence
cagttacataaggaggtttcaatta

SEQ ID NO: 43410 - DNA, 25 bp, Probe sequence
taattgaaacctccttatgtaactg

SEQ ID NO: 43411 - DNA, 25 bp, Probe sequence
cgcataagcaatatcactttaacca

SEQ ID NO: 43412 - DNA, 25 bp, Probe sequence
tcgcataagcaatatcactttaacc

SEQ ID NO: 43413 - DNA, 25 bp, Probe sequence
ctcgcataagcaatatcactttaac

SEQ ID NO: 43414 - DNA, 25 bp, Probe sequence
gcataagcaatatcactttaaccaa

SEQ ID NO: 43415 - DNA, 25 bp, Probe sequence
gctcgcataagcaatatcactttaa

SEQ ID NO: 43416 - DNA, 25 bp, Probe sequence
cgctcgcataagcaatatcacttta

SEQ ID NO: 43417 - DNA, 25 bp, Probe sequence
cataagcaatatcactttaaccaaa

SEQ ID NO: 43418 - DNA, 25 bp, Probe sequence
tgtctgacaatcgctttctttaaaa

SEQ ID NO: 43419 - DNA, 25 bp, Probe sequence
ttgtctgacaatcgctttctttaaa

SEQ ID NO: 43420 - DNA, 25 bp, Probe sequence
tggttaaagtgatattgcttatgcg

SEQ ID NO: 43421 - DNA, 25 bp, Probe sequence
ggttaaagtgatattgcttatgcga

SEQ ID NO: 43422 - DNA, 25 bp, Probe sequence
gttaaagtgatattgcttatgcgag

SEQ ID NO: 43423 - DNA, 25 bp, Probe sequence
ttggttaaagtgatattgcttatgc

SEQ ID NO: 43424 - DNA, 25 bp, Probe sequence
ttaaagtgatattgcttatgcgagc

SEQ ID NO: 43425 - DNA, 25 bp, Probe sequence
taaagtgatattgcttatgcgagcg

SEQ ID NO: 43426 - DNA, 25 bp, Probe sequence
tttggttaaagtgatattgcttatg

SEQ ID NO: 43427 - DNA, 25 bp, Probe sequence
ttttaaagaaagcgattgtcagaca

SEQ ID NO: 43428 - DNA, 25 bp, Probe sequence
tttaaagaaagcgattgtcagacaa

SEQ ID NO: 43429 - DNA, 25 bp, Probe sequence
ttcacctcgttgattatgttcatat

SEQ ID NO: 43430 - DNA, 25 bp, Probe sequence
tcacctcgttgattatgttcatata

SEQ ID NO: 43431 - DNA, 25 bp, Probe sequence
gatttcacctcgttgattatgttca

SEQ ID NO: 43432 - DNA, 25 bp, Probe sequence
atttcacctcgttgattatgttcat

SEQ ID NO: 43433 - DNA, 25 bp, Probe sequence
gcgtttaagtacatcctttcacaat

SEQ ID NO: 43434 - DNA, 25 bp, Probe sequence
tagcgtttaagtacatcctttcaca

SEQ ID NO: 43435 - DNA, 25 bp, Probe sequence
cgttagcgtttaagtacatcctttc

SEQ ID NO: 43436 - DNA, 25 bp, Probe sequence
cacctcgttgattatgttcatataa

SEQ ID NO: 43437 - DNA, 25 bp, Probe sequence
ttagcgtttaagtacatcctttcac

SEQ ID NO: 43438 - DNA, 25 bp, Probe sequence
atatgaacataatcaacgaggtgaa

SEQ ID NO: 43439 - DNA, 25 bp, Probe sequence
tatatgaacataatcaacgaggtga

SEQ ID NO: 43440 - DNA, 25 bp, Probe sequence
tgaacataatcaacgaggtgaaatc

SEQ ID NO: 43441 - DNA, 25 bp, Probe sequence
atgaacataatcaacgaggtgaaat

SEQ ID NO: 43442 - DNA, 25 bp, Probe sequence
attgtgaaaggatgtacttaaacgc

SEQ ID NO: 43443 - DNA, 25 bp, Probe sequence
gaaaggatgtacttaaacgctaacg

SEQ ID NO: 43444 - DNA, 25 bp, Probe sequence
tgtgaaaggatgtacttaaacgcta

SEQ ID NO: 43445 - DNA, 25 bp, Probe sequence
ttatatgaacataatcaacgaggtg

SEQ ID NO: 43446 - DNA, 25 bp, Probe sequence
tgaaaggatgtacttaaacgctaac

SEQ ID NO: 43447 - DNA, 25 bp, Probe sequence
tggaaaacaatgatagcaatgaagt

SEQ ID NO: 43448 - DNA, 25 bp, Probe sequence
aagtatatgtcaatcaagatagtgt

SEQ ID NO: 43449 - DNA, 25 bp, Probe sequence
ggaaaacaatgatagcaatgaagta

SEQ ID NO: 43450 - DNA, 25 bp, Probe sequence
gcaatgaagtagcttatttgttaaa

SEQ ID NO: 43451 - DNA, 25 bp, Probe sequence
gatagcaatgaagtagcttatttgt

SEQ ID NO: 43452 - DNA, 25 bp, Probe sequence
tgatagcaatgaagtagcttatttg

SEQ ID NO: 43453 - DNA, 25 bp, Probe sequence
agcaatgaagtagcttatttgttaa

SEQ ID NO: 43454 - DNA, 25 bp, Probe sequence
atagcaatgaagtagcttatttgtt

SEQ ID NO: 43455 - DNA, 25 bp, Probe sequence
tagcaatgaagtagcttatttgtta

SEQ ID NO: 43456 - DNA, 25 bp, Probe sequence
tgacaatcgttactaataagggaca

SEQ ID NO: 43457 - DNA, 25 bp, Probe sequence
acaatcgttactaataagggacaag

SEQ ID NO: 43458 - DNA, 25 bp, Probe sequence
gacaatcgttactaataagggacaa

SEQ ID NO: 43459 - DNA, 25 bp, Probe sequence
atgacaatcgttactaataagggac

SEQ ID NO: 43460 - DNA, 25 bp, Probe sequence
caatcgttactaataagggacaagt

SEQ ID NO: 43461 - DNA, 25 bp, Probe sequence
caatgacaatcgttactaataaggg

SEQ ID NO: 43462 - DNA, 25 bp, Probe sequence
aatgacaatcgttactaataaggga

SEQ ID NO: 43463 - DNA, 25 bp, Probe sequence
caagtcaaataggtttcatggtaaa

SEQ ID NO: 43464 - DNA, 25 bp, Probe sequence
ccaagtcaaataggtttcatggtaa

SEQ ID NO: 43465 - DNA, 25 bp, Probe sequence
taacgagattgcgaataagattagc

SEQ ID NO: 43466 - DNA, 25 bp, Probe sequence
atatagatgatgaaggaggcgaagt

SEQ ID NO: 43467 - DNA, 25 bp, Probe sequence
tggattcagcgtatgagttgtataa

SEQ ID NO: 43468 - DNA, 25 bp, Probe sequence
ttatggattcagcgtatgagttgta

SEQ ID NO: 43469 - DNA, 25 bp, Probe sequence
atggattcagcgtatgagttgtata

SEQ ID NO: 43470 - DNA, 25 bp, Probe sequence
tatggattcagcgtatgagttgtat

SEQ ID NO: 43471 - DNA, 25 bp, Probe sequence
tatatagatgatgaaggaggcgaag

SEQ ID NO: 43472 - DNA, 25 bp, Probe sequence
tatagatgatgaaggaggcgaagtg

SEQ ID NO: 43473 - DNA, 25 bp, Probe sequence
tgtataacgagattgcgaataagat

SEQ ID NO: 43474 - DNA, 25 bp, Probe sequence
ttatagaagaaggactcgaaccatg

SEQ ID NO: 43475 - DNA, 25 bp, Probe sequence
acggtatatgcaatggcttatgtaa

SEQ ID NO: 43476 - DNA, 25 bp, Probe sequence
aacggtatatgcaatggcttatgta

SEQ ID NO: 43477 - DNA, 25 bp, Probe sequence
aaatgaaagaagtggagaagtgttt

SEQ ID NO: 43478 - DNA, 25 bp, Probe sequence
tgaatttgactttacaagagatggc

SEQ ID NO: 43479 - DNA, 25 bp, Probe sequence
gaattgtttatagaagaaggactcg

SEQ ID NO: 43480 - DNA, 25 bp, Probe sequence
tttatagaagaaggactcgaaccat

SEQ ID NO: 43481 - DNA, 25 bp, Probe sequence
gtttatagaagaaggactcgaacca

SEQ ID NO: 43482 - DNA, 25 bp, Probe sequence
tgtttatagaagaaggactcgaacc

SEQ ID NO: 43483 - DNA, 25 bp, Probe sequence
acaacgagattgcgaataagattag

SEQ ID NO: 43484 - DNA, 25 bp, Probe sequence
caacgagattgcgaataagattagc

SEQ ID NO: 43485 - DNA, 25 bp, Probe sequence
gtacaacgagattgcgaataagatt

SEQ ID NO: 43486 - DNA, 25 bp, Probe sequence
tacaacgagattgcgaataagatta

SEQ ID NO: 43487 - DNA, 25 bp, Probe sequence
gtgttataccagaaacggaatatga

SEQ ID NO: 43488 - DNA, 25 bp, Probe sequence
cgagcaatttattaaagagcaagat

SEQ ID NO: 43489 - DNA, 25 bp, Probe sequence
tgttataccagaaacggaatatgaa

SEQ ID NO: 43490 - DNA, 25 bp, Probe sequence
aaacctgaaagtgaagatttgaatt

SEQ ID NO: 43491 - DNA, 25 bp, Probe sequence
tcgagcaatttattaaagagcaaga

SEQ ID NO: 43492 - DNA, 25 bp, Probe sequence
ctatgtaactgatcaaggtggagag

SEQ ID NO: 43493 - DNA, 25 bp, Probe sequence
aaattgcagatgaaatcagtggaat

SEQ ID NO: 43494 - DNA, 25 bp, Probe sequence
gaaattgcagatgaaatcagtggaa

SEQ ID NO: 43495 - DNA, 25 bp, Probe sequence
aattgcagatgaaatcagtggaatg

SEQ ID NO: 43496 - DNA, 25 bp, Probe sequence
tatgtaactgatcaaggtggagagg

SEQ ID NO: 43497 - DNA, 25 bp, Probe sequence
atgaaattgcagatgaaatcagtgg

SEQ ID NO: 43498 - DNA, 25 bp, Probe sequence
attgcagatgaaatcagtggaatga

SEQ ID NO: 43499 - DNA, 25 bp, Probe sequence
aatgaaattgcagatgaaatcagtg

SEQ ID NO: 43500 - DNA, 25 bp, Probe sequence
acaattgcctatgtaactgatcaag

SEQ ID NO: 43501 - DNA, 25 bp, Probe sequence
aaggcaacaggatattattacacga

SEQ ID NO: 43502 - DNA, 25 bp, Probe sequence
gaaggcaacaggatattattacacg

SEQ ID NO: 43503 - DNA, 25 bp, Probe sequence
aggcaacaggatattattacacgag

SEQ ID NO: 43504 - DNA, 25 bp, Probe sequence
caacaggatattattacacgagcaa

SEQ ID NO: 43505 - DNA, 25 bp, Probe sequence
gcaacaggatattattacacgagca

SEQ ID NO: 43506 - DNA, 25 bp, Probe sequence
agaaggcaacaggatattattacac

SEQ ID NO: 43507 - DNA, 25 bp, Probe sequence
ggcaacaggatattattacacgagc

SEQ ID NO: 43508 - DNA, 25 bp, Probe sequence
aaccaggtgagatagatgatgaagg

SEQ ID NO: 43509 - DNA, 25 bp, Probe sequence
aagaaggcaacaggatattattaca

SEQ ID NO: 43510 - DNA, 25 bp, Probe sequence
gatagtgaaggtatggtgctacatt

SEQ ID NO: 43511 - DNA, 25 bp, Probe sequence
aatgttccgtattatgaagcagagt

SEQ ID NO: 43512 - DNA, 25 bp, Probe sequence
aatggatagtgaaggtatggtgcta

SEQ ID NO: 43513 - DNA, 25 bp, Probe sequence
atgttccgtattatgaagcagagta

SEQ ID NO: 43514 - DNA, 25 bp, Probe sequence
tcagttggatataagcagatagagt

SEQ ID NO: 43515 - DNA, 25 bp, Probe sequence
gaacttcggaccatcacatagtaat

SEQ ID NO: 43516 - DNA, 25 bp, Probe sequence
aacttcggaccatcacatagtaatt

SEQ ID NO: 43517 - DNA, 25 bp, Probe sequence
atggatagtgaaggtatggtgctac

SEQ ID NO: 43518 - DNA, 25 bp, Probe sequence
ttccgtattatgaagcagagtacaa

SEQ ID NO: 43519 - DNA, 25 bp, Probe sequence
tctgatgagaacgatctatacacag

SEQ ID NO: 43520 - DNA, 25 bp, Probe sequence
ctgatgagaacgatctatacacagc

SEQ ID NO: 43521 - DNA, 25 bp, Probe sequence
gatgagaacgatctatacacagctt

SEQ ID NO: 43522 - DNA, 25 bp, Probe sequence
tgatgagaacgatctatacacagct

SEQ ID NO: 43523 - DNA, 25 bp, Probe sequence
caacacagatgaacaggacaaatta

SEQ ID NO: 43524 - DNA, 25 bp, Probe sequence
aacacagatgaacaggacaaattaa

SEQ ID NO: 43525 - DNA, 25 bp, Probe sequence
ttctgatgagaacgatctatacaca

SEQ ID NO: 43526 - DNA, 25 bp, Probe sequence
tcaacacagatgaacaggacaaatt

SEQ ID NO: 43527 - DNA, 25 bp, Probe sequence
aagagttaagaaacgagcgtatagc

SEQ ID NO: 43528 - DNA, 25 bp, Probe sequence
aagagaagtacgaggaacaagttaa

SEQ ID NO: 43529 - DNA, 25 bp, Probe sequence
gtgacacaatacttagttacaacat

SEQ ID NO: 43530 - DNA, 25 bp, Probe sequence
tacaacattcaaagattcaacagga

SEQ ID NO: 43531 - DNA, 25 bp, Probe sequence
agagaagtacgaggaacaagttaaa

SEQ ID NO: 43532 - DNA, 25 bp, Probe sequence
aaagagaagtacgaggaacaagtta

SEQ ID NO: 43533 - DNA, 25 bp, Probe sequence
ttacaacattcaaagattcaacagg

SEQ ID NO: 43534 - DNA, 25 bp, Probe sequence
gaaagagaagtacgaggaacaagtt

SEQ ID NO: 43535 - DNA, 25 bp, Probe sequence
acacaatacttagttacaacattca

SEQ ID NO: 43536 - DNA, 25 bp, Probe sequence
tgacacaatacttagttacaacatt

SEQ ID NO: 43537 - DNA, 25 bp, Probe sequence
caactgaactaatggcaacaagatt

SEQ ID NO: 43538 - DNA, 25 bp, Probe sequence
acaactgaactaatggcaacaagat

SEQ ID NO: 43539 - DNA, 25 bp, Probe sequence
aacaactgaactaatggcaacaaga

SEQ ID NO: 43540 - DNA, 25 bp, Probe sequence
aactgaactaatggcaacaagatta

SEQ ID NO: 43541 - DNA, 25 bp, Probe sequence
actgaactaatggcaacaagattat

SEQ ID NO: 43542 - DNA, 25 bp, Probe sequence
actaatggcaacaagattattgact

SEQ ID NO: 43543 - DNA, 25 bp, Probe sequence
aactaatggcaacaagattattgac

SEQ ID NO: 43544 - DNA, 25 bp, Probe sequence
tgaactaatggcaacaagattattg

SEQ ID NO: 43545 - DNA, 25 bp, Probe sequence
ctgaactaatggcaacaagattatt

SEQ ID NO: 43546 - DNA, 25 bp, Probe sequence
caactagacaacagtgatgaacaat

SEQ ID NO: 43547 - DNA, 25 bp, Probe sequence
aactagacaacagtgatgaacaatc

SEQ ID NO: 43548 - DNA, 25 bp, Probe sequence
gaagagcaactagacaacagtgatg

SEQ ID NO: 43549 - DNA, 25 bp, Probe sequence
gcaactagacaacagtgatgaacaa

SEQ ID NO: 43550 - DNA, 25 bp, Probe sequence
gagcaactagacaacagtgatgaac

SEQ ID NO: 43551 - DNA, 25 bp, Probe sequence
agagcaactagacaacagtgatgaa

SEQ ID NO: 43552 - DNA, 25 bp, Probe sequence
aagagcaactagacaacagtgatga

SEQ ID NO: 43553 - DNA, 25 bp, Probe sequence
cgtattaaagatgcggttcaagaag

SEQ ID NO: 43554 - DNA, 25 bp, Probe sequence
gtattaaagatgcggttcaagaagc

SEQ ID NO: 43555 - DNA, 25 bp, Probe sequence
agccacgatagaagtagttactgat

SEQ ID NO: 43556 - DNA, 25 bp, Probe sequence
gaagccacgatagaagtagttactg

SEQ ID NO: 43557 - DNA, 25 bp, Probe sequence
aagccacgatagaagtagttactga

SEQ ID NO: 43558 - DNA, 25 bp, Probe sequence
gccacgatagaagtagttactgatc

SEQ ID NO: 43559 - DNA, 25 bp, Probe sequence
ggaagccacgatagaagtagttact

SEQ ID NO: 43560 - DNA, 25 bp, Probe sequence
atggaagccacgatagaagtagtta

SEQ ID NO: 43561 - DNA, 25 bp, Probe sequence
gattggttatgggagactcaagata

SEQ ID NO: 43562 - DNA, 25 bp, Probe sequence
aatggaagccacgatagaagtagtt

SEQ ID NO: 43563 - DNA, 25 bp, Probe sequence
ttggttatgggagactcaagataaa

SEQ ID NO: 43564 - DNA, 25 bp, Probe sequence
aattatgatgaagtggttggcaatc

SEQ ID NO: 43565 - DNA, 25 bp, Probe sequence
attatgatgaagtggttggcaatcc

SEQ ID NO: 43566 - DNA, 25 bp, Probe sequence
gtaattatgatgaagtggttggcaa

SEQ ID NO: 43567 - DNA, 25 bp, Probe sequence
gtcgtaattatgatgaagtggttgg

SEQ ID NO: 43568 - DNA, 25 bp, Probe sequence
ggtcgtaattatgatgaagtggttg

SEQ ID NO: 43569 - DNA, 25 bp, Probe sequence
aggtcgtaattatgatgaagtggtt

SEQ ID NO: 43570 - DNA, 25 bp, Probe sequence
taggtcgtaattatgatgaagtggt

SEQ ID NO: 43571 - DNA, 25 bp, Probe sequence
atgattgttggctatgcgagagtat

SEQ ID NO: 43572 - DNA, 25 bp, Probe sequence
taattatgatgaagtggttggcaat

SEQ ID NO: 43573 - DNA, 25 bp, Probe sequence
attccagacattaccgaagcaataa

SEQ ID NO: 43574 - DNA, 25 bp, Probe sequence
aattccagacattaccgaagcaata

SEQ ID NO: 43575 - DNA, 25 bp, Probe sequence
tatgatagtgtggttataggtggtt

SEQ ID NO: 43576 - DNA, 25 bp, Probe sequence
ttatgatagtgtggttataggtggt

SEQ ID NO: 43577 - DNA, 25 bp, Probe sequence
taattccagacattaccgaagcaat

SEQ ID NO: 43578 - DNA, 25 bp, Probe sequence
ttaattccagacattaccgaagcaa

SEQ ID NO: 43579 - DNA, 25 bp, Probe sequence
attatgatagtgtggttataggtgg

SEQ ID NO: 43580 - DNA, 25 bp, Probe sequence
attaattccagacattaccgaagca

SEQ ID NO: 43581 - DNA, 25 bp, Probe sequence
atagattattggttaaggcgactaa

SEQ ID NO: 43582 - DNA, 25 bp, Probe sequence
atatatcatacaatccagaggtgcc

SEQ ID NO: 43583 - DNA, 25 bp, Probe sequence
tatatcatacaatccagaggtgccg

SEQ ID NO: 43584 - DNA, 25 bp, Probe sequence
cgtcaatgtcgattcaatctaatgg

SEQ ID NO: 43585 - DNA, 25 bp, Probe sequence
gtcaatgtcgattcaatctaatgga

SEQ ID NO: 43586 - DNA, 25 bp, Probe sequence
tataccaacgaataaagcaccaaag

SEQ ID NO: 43587 - DNA, 25 bp, Probe sequence
taagttctttgttcaatatggcgac

SEQ ID NO: 43588 - DNA, 25 bp, Probe sequence
gttctttgttcaatatggcgacttt

SEQ ID NO: 43589 - DNA, 25 bp, Probe sequence
acaagaacaacaaatggctattact

SEQ ID NO: 43590 - DNA, 25 bp, Probe sequence
tctttgttcaatatggcgactttaa

SEQ ID NO: 43591 - DNA, 25 bp, Probe sequence
tcaagcggacaacattcaagttatt

SEQ ID NO: 43592 - DNA, 25 bp, Probe sequence
ttcaagcggacaacattcaagttat

SEQ ID NO: 43593 - DNA, 25 bp, Probe sequence
ttcagcatcagatacttcagttatt

SEQ ID NO: 43594 - DNA, 25 bp, Probe sequence
atacatcttatggcacttatggatt

SEQ ID NO: 43595 - DNA, 25 bp, Probe sequence
gttcaagcggacaacattcaagtta

SEQ ID NO: 43596 - DNA, 25 bp, Probe sequence
tatcgtttgttaagacctgctaaag

SEQ ID NO: 43597 - DNA, 25 bp, Probe sequence
ctatcgtttgttaagacctgctaaa

SEQ ID NO: 43598 - DNA, 25 bp, Probe sequence
tttgaagaaactgatggtgagactg

SEQ ID NO: 43599 - DNA, 25 bp, Probe sequence
tatacatcttatggcacttatggat

SEQ ID NO: 43600 - DNA, 25 bp, Probe sequence
ttcatcaatcggacataaggacatt

SEQ ID NO: 43601 - DNA, 25 bp, Probe sequence
tcgtggagaatcaagaagagaatat

SEQ ID NO: 43602 - DNA, 25 bp, Probe sequence
gttcatcaatcggacataaggacat

SEQ ID NO: 43603 - DNA, 25 bp, Probe sequence
ttcgtggagaatcaagaagagaata

SEQ ID NO: 43604 - DNA, 25 bp, Probe sequence
aaggttcatcaatcggacataagga

SEQ ID NO: 43605 - DNA, 25 bp, Probe sequence
cgtggagaatcaagaagagaatata

SEQ ID NO: 43606 - DNA, 25 bp, Probe sequence
aggttcatcaatcggacataaggac

SEQ ID NO: 43607 - DNA, 25 bp, Probe sequence
ggttcatcaatcggacataaggaca

SEQ ID NO: 43608 - DNA, 25 bp, Probe sequence
attcgtggagaatcaagaagagaat

SEQ ID NO: 43609 - DNA, 25 bp, Probe sequence
atagtaatgttccaagttatgacgc

SEQ ID NO: 43610 - DNA, 25 bp, Probe sequence
aatgttaagcaattaagaagccgtt

SEQ ID NO: 43611 - DNA, 25 bp, Probe sequence
tgttaagcaattaagaagccgttat

SEQ ID NO: 43612 - DNA, 25 bp, Probe sequence
atgttaagcaattaagaagccgtta

SEQ ID NO: 43613 - DNA, 25 bp, Probe sequence
gaccaggtgtattagataatgaagg

SEQ ID NO: 43614 - DNA, 25 bp, Probe sequence
gttaagcaattaagaagccgttata

SEQ ID NO: 43615 - DNA, 25 bp, Probe sequence
ccaggtgtattagataatgaaggta

SEQ ID NO: 43616 - DNA, 25 bp, Probe sequence
agaccaggtgtattagataatgaag

SEQ ID NO: 43617 - DNA, 25 bp, Probe sequence
aatagtaatgttccaagttatgacg

SEQ ID NO: 43618 - DNA, 25 bp, Probe sequence
taatagttatggtagcaggttgtgg

SEQ ID NO: 43619 - DNA, 25 bp, Probe sequence
ttattatgttgacagcgttgagttc

SEQ ID NO: 43620 - DNA, 25 bp, Probe sequence
atagttatggtagcaggttgtggta

SEQ ID NO: 43621 - DNA, 25 bp, Probe sequence
tagttatggtagcaggttgtggtaa

SEQ ID NO: 43622 - DNA, 25 bp, Probe sequence
ttaatagttatggtagcaggttgtg

SEQ ID NO: 43623 - DNA, 25 bp, Probe sequence
aatagttatggtagcaggttgtggt

SEQ ID NO: 43624 - DNA, 25 bp, Probe sequence
tattatgttgacagcgttgagttcg

SEQ ID NO: 43625 - DNA, 25 bp, Probe sequence
tttattatgttgacagcgttgagtt

SEQ ID NO: 43626 - DNA, 25 bp, Probe sequence
atttattatgttgacagcgttgagt

SEQ ID NO: 43627 - DNA, 25 bp, Probe sequence
gaggacagcaacaggatattatact

SEQ ID NO: 43628 - DNA, 25 bp, Probe sequence
cgaggacagcaacaggatattatac

SEQ ID NO: 43629 - DNA, 25 bp, Probe sequence
ttatgatgaagtggataagttggca

SEQ ID NO: 43630 - DNA, 25 bp, Probe sequence
acgaggacagcaacaggatattata

SEQ ID NO: 43631 - DNA, 25 bp, Probe sequence
tacgaggacagcaacaggatattat

SEQ ID NO: 43632 - DNA, 25 bp, Probe sequence
atacgaggacagcaacaggatatta

SEQ ID NO: 43633 - DNA, 25 bp, Probe sequence
atgaatagcgaaggtatggtactac

SEQ ID NO: 43634 - DNA, 25 bp, Probe sequence
gaatagcgaaggtatggtactacat

SEQ ID NO: 43635 - DNA, 25 bp, Probe sequence
tgaatagcgaaggtatggtactaca

SEQ ID NO: 43636 - DNA, 25 bp, Probe sequence
taatcgttgtagatgctatggataa

SEQ ID NO: 43637 - DNA, 25 bp, Probe sequence
ttaatcgttgtagatgctatggata

SEQ ID NO: 43638 - DNA, 25 bp, Probe sequence
atggattgaagagtgggaagataaa

SEQ ID NO: 43639 - DNA, 25 bp, Probe sequence
aatggattgaagagtgggaagataa

SEQ ID NO: 43640 - DNA, 25 bp, Probe sequence
aaatggattgaagagtgggaagata

SEQ ID NO: 43641 - DNA, 25 bp, Probe sequence
cgccaacagtcccatatacatataa

SEQ ID NO: 43642 - DNA, 25 bp, Probe sequence
ttaagtaagccttcatacgggaaat

SEQ ID NO: 43643 - DNA, 25 bp, Probe sequence
tttaagtaagccttcatacgggaaa

SEQ ID NO: 43644 - DNA, 25 bp, Probe sequence
taagtaagccttcatacgggaaatt

SEQ ID NO: 43645 - DNA, 25 bp, Probe sequence
gcacgcaaagaatacttaaaccaat

SEQ ID NO: 43646 - DNA, 25 bp, Probe sequence
cacgcaaagaatacttaaaccaatt

SEQ ID NO: 43647 - DNA, 25 bp, Probe sequence
acgcaaagaatacttaaaccaattt

SEQ ID NO: 43648 - DNA, 25 bp, Probe sequence
cgcacgcaaagaatacttaaaccaa

SEQ ID NO: 43649 - DNA, 25 bp, Probe sequence
atagcgcacgcaaagaatacttaaa

SEQ ID NO: 43650 - DNA, 25 bp, Probe sequence
gatagcgcacgcaaagaatacttaa

SEQ ID NO: 43651 - DNA, 25 bp, Probe sequence
tagcgcacgcaaagaatacttaaac

SEQ ID NO: 43652 - DNA, 25 bp, Probe sequence
cgatagcgcacgcaaagaatactta

SEQ ID NO: 43653 - DNA, 25 bp, Probe sequence
agcgcacgcaaagaatacttaaacc

SEQ ID NO: 43654 - DNA, 25 bp, Probe sequence
gcgcacgcaaagaatacttaaacca

SEQ ID NO: 43655 - DNA, 25 bp, Probe sequence
gtattggtcttgatgaagcagtagg

SEQ ID NO: 43656 - DNA, 25 bp, Probe sequence
ggtattggtcttgatgaagcagtag

SEQ ID NO: 43657 - DNA, 25 bp, Probe sequence
aggtattggtcttgatgaagcagta

SEQ ID NO: 43658 - DNA, 25 bp, Probe sequence
gaaggtattggtcttgatgaagcag

SEQ ID NO: 43659 - DNA, 25 bp, Probe sequence
agaaggtattggtcttgatgaagca

SEQ ID NO: 43660 - DNA, 25 bp, Probe sequence
aaggtattggtcttgatgaagcagt

SEQ ID NO: 43661 - DNA, 25 bp, Probe sequence
acgggtcaagttgtctataaatatg

SEQ ID NO: 43662 - DNA, 25 bp, Probe sequence
aagaaggtattggtcttgatgaagc

SEQ ID NO: 43663 - DNA, 25 bp, Probe sequence
acattcagttaaagaaggtattggt

SEQ ID NO: 43664 - DNA, 25 bp, Probe sequence
tactgctgttagagataatcagacg

SEQ ID NO: 43665 - DNA, 25 bp, Probe sequence
ttactgctgttagagataatcagac

SEQ ID NO: 43666 - DNA, 25 bp, Probe sequence
ctgctgttagagataatcagacgtt

SEQ ID NO: 43667 - DNA, 25 bp, Probe sequence
actgctgttagagataatcagacgt

SEQ ID NO: 43668 - DNA, 25 bp, Probe sequence
tgctgttagagataatcagacgttt

SEQ ID NO: 43669 - DNA, 25 bp, Probe sequence
tttactgctgttagagataatcaga

SEQ ID NO: 43670 - DNA, 25 bp, Probe sequence
gctgttagagataatcagacgttta

SEQ ID NO: 43671 - DNA, 25 bp, Probe sequence
ttagagataatcagacgtttacagt

SEQ ID NO: 43672 - DNA, 25 bp, Probe sequence
ggacaaccacatgaacattttactg

SEQ ID NO: 43673 - DNA, 25 bp, Probe sequence
gtcatatcgcctatctatacagtgg

SEQ ID NO: 43674 - DNA, 25 bp, Probe sequence
gcttgttgtcatatcgcctatctat

SEQ ID NO: 43675 - DNA, 25 bp, Probe sequence
tgcttgttgtcatatcgcctatcta

SEQ ID NO: 43676 - DNA, 25 bp, Probe sequence
ttgttgtcatatcgcctatctatac

SEQ ID NO: 43677 - DNA, 25 bp, Probe sequence
tgtcatatcgcctatctatacagtg

SEQ ID NO: 43678 - DNA, 25 bp, Probe sequence
tgttgtcatatcgcctatctataca

SEQ ID NO: 43679 - DNA, 25 bp, Probe sequence
gatgcttgttgtcatatcgcctatc

SEQ ID NO: 43680 - DNA, 25 bp, Probe sequence
cttgttgtcatatcgcctatctata

SEQ ID NO: 43681 - DNA, 25 bp, Probe sequence
ttgtcatatcgcctatctatacagt

SEQ ID NO: 43682 - DNA, 25 bp, Probe sequence
tattatgacgacggctaatgatgat

SEQ ID NO: 43683 - DNA, 25 bp, Probe sequence
atattatgacgacggctaatgatga

SEQ ID NO: 43684 - DNA, 25 bp, Probe sequence
tatgacgacggctaatgatgatgta

SEQ ID NO: 43685 - DNA, 25 bp, Probe sequence
attatgacgacggctaatgatgatg

SEQ ID NO: 43686 - DNA, 25 bp, Probe sequence
tatattatgacgacggctaatgatg

SEQ ID NO: 43687 - DNA, 25 bp, Probe sequence
ttattcttactagcgatgtatgagc

SEQ ID NO: 43688 - DNA, 25 bp, Probe sequence
ttatgacgacggctaatgatgatgt

SEQ ID NO: 43689 - DNA, 25 bp, Probe sequence
cgatgtatgagctaggtaagtatgt

SEQ ID NO: 43690 - DNA, 25 bp, Probe sequence
gcgatgtatgagctaggtaagtatg

SEQ ID NO: 43691 - DNA, 25 bp, Probe sequence
cgtaatagtatcgtaggcgttagat

SEQ ID NO: 43692 - DNA, 25 bp, Probe sequence
gtgttgagtgattactacgaaggta

SEQ ID NO: 43693 - DNA, 25 bp, Probe sequence
aagtgttgagtgattactacgaagg

SEQ ID NO: 43694 - DNA, 25 bp, Probe sequence
aggttcagttgacggtggttatatt

SEQ ID NO: 43695 - DNA, 25 bp, Probe sequence
aaggttcagttgacggtggttatat

SEQ ID NO: 43696 - DNA, 25 bp, Probe sequence
agtgttgagtgattactacgaaggt

SEQ ID NO: 43697 - DNA, 25 bp, Probe sequence
aatgatgttgagtcgcacaatagat

SEQ ID NO: 43698 - DNA, 25 bp, Probe sequence
ttgaatgatgttgagtcgcacaata

SEQ ID NO: 43699 - DNA, 25 bp, Probe sequence
gaatgatgttgagtcgcacaataga

SEQ ID NO: 43700 - DNA, 25 bp, Probe sequence
gactttagcgatagagcaaatgaag

SEQ ID NO: 43701 - DNA, 25 bp, Probe sequence
actttagcgatagagcaaatgaaga

SEQ ID NO: 43702 - DNA, 25 bp, Probe sequence
ctttagcgatagagcaaatgaagaa

SEQ ID NO: 43703 - DNA, 25 bp, Probe sequence
ggactttagcgatagagcaaatgaa

SEQ ID NO: 43704 - DNA, 25 bp, Probe sequence
aaggactttagcgatagagcaaatg

SEQ ID NO: 43705 - DNA, 25 bp, Probe sequence
caaggactttagcgatagagcaaat

SEQ ID NO: 43706 - DNA, 25 bp, Probe sequence
aggactttagcgatagagcaaatga

SEQ ID NO: 43707 - DNA, 25 bp, Probe sequence
aacaaggactttagcgatagagcaa

SEQ ID NO: 43708 - DNA, 25 bp, Probe sequence
acaaggactttagcgatagagcaaa

SEQ ID NO: 43709 - DNA, 25 bp, Probe sequence
cagaagaattgaaagcgttgtttga

SEQ ID NO: 43710 - DNA, 25 bp, Probe sequence
agacgcactgttaaaccaatttcat

SEQ ID NO: 43711 - DNA, 25 bp, Probe sequence
tagtggtttcttagagtttggtact

SEQ ID NO: 43712 - DNA, 25 bp, Probe sequence
gcttatagtggtttcttagagtttg

SEQ ID NO: 43713 - DNA, 25 bp, Probe sequence
atagtggtttcttagagtttggtac

SEQ ID NO: 43714 - DNA, 25 bp, Probe sequence
gcagcttatagtggtttcttagagt

SEQ ID NO: 43715 - DNA, 25 bp, Probe sequence
gcagaagaattgaaagcgttgtttg

SEQ ID NO: 43716 - DNA, 25 bp, Probe sequence
ttatagtggtttcttagagtttggt

SEQ ID NO: 43717 - DNA, 25 bp, Probe sequence
gacgcactgttaaaccaatttcatg

SEQ ID NO: 43718 - DNA, 25 bp, Probe sequence
acgagcaattagatgaacagaatac

SEQ ID NO: 43719 - DNA, 25 bp, Probe sequence
cgagcaattagatgaacagaatact

SEQ ID NO: 43720 - DNA, 25 bp, Probe sequence
aataacgacatcgcttccatataca

SEQ ID NO: 43721 - DNA, 25 bp, Probe sequence
ataacgacatcgcttccatatacag

SEQ ID NO: 43722 - DNA, 25 bp, Probe sequence
aacgagcaattagatgaacagaata

SEQ ID NO: 43723 - DNA, 25 bp, Probe sequence
acgacatcgcttccatatacagtaa

SEQ ID NO: 43724 - DNA, 25 bp, Probe sequence
aacgacatcgcttccatatacagta

SEQ ID NO: 43725 - DNA, 25 bp, Probe sequence
taacgacatcgcttccatatacagt

SEQ ID NO: 43726 - DNA, 25 bp, Probe sequence
gattgactctagtctcactgaacaa

SEQ ID NO: 43727 - DNA, 25 bp, Probe sequence
cgtaagcaatagatacatcaatcct

SEQ ID NO: 43728 - DNA, 25 bp, Probe sequence
aatatagtgaacaacggcgacaatg

SEQ ID NO: 43729 - DNA, 25 bp, Probe sequence
gaccctaaagatgagactgtattcg

SEQ ID NO: 43730 - DNA, 25 bp, Probe sequence
cctaaagatgagactgtattcggta

SEQ ID NO: 43731 - DNA, 25 bp, Probe sequence
agaccctaaagatgagactgtattc

SEQ ID NO: 43732 - DNA, 25 bp, Probe sequence
ctgtattcggtaaagtaggagaaga

SEQ ID NO: 43733 - DNA, 25 bp, Probe sequence
acgtaagcaatagatacatcaatcc

SEQ ID NO: 43734 - DNA, 25 bp, Probe sequence
aaagatgagactgtattcggtaaag

SEQ ID NO: 43735 - DNA, 25 bp, Probe sequence
aaatatagtgaacaacggcgacaat

SEQ ID NO: 43736 - DNA, 25 bp, Probe sequence
tagcgatatacaacgatgccattat

SEQ ID NO: 43737 - DNA, 25 bp, Probe sequence
tattagcgatatacaacgatgccat

SEQ ID NO: 43738 - DNA, 25 bp, Probe sequence
ttgctggtattgatgcttctaatga

SEQ ID NO: 43739 - DNA, 25 bp, Probe sequence
gttgctggtattgatgcttctaatg

SEQ ID NO: 43740 - DNA, 25 bp, Probe sequence
ttagcgatatacaacgatgccatta

SEQ ID NO: 43741 - DNA, 25 bp, Probe sequence
gcgatatacaacgatgccattatta

SEQ ID NO: 43742 - DNA, 25 bp, Probe sequence
atattagcgatatacaacgatgcca

SEQ ID NO: 43743 - DNA, 25 bp, Probe sequence
tgttgctggtattgatgcttctaat

SEQ ID NO: 43744 - DNA, 25 bp, Probe sequence
agcgatatacaacgatgccattatt

SEQ ID NO: 43745 - DNA, 25 bp, Probe sequence
aacaagaagtgattgattggctatg

SEQ ID NO: 43746 - DNA, 25 bp, Probe sequence
gaacaagaagtgattgattggctat

SEQ ID NO: 43747 - DNA, 25 bp, Probe sequence
agaacaagaagtgattgattggcta

SEQ ID NO: 43748 - DNA, 25 bp, Probe sequence
cgttacagaacaagaagtgattgat

SEQ ID NO: 43749 - DNA, 25 bp, Probe sequence
tcgttacagaacaagaagtgattga

SEQ ID NO: 43750 - DNA, 25 bp, Probe sequence
atcgttacagaacaagaagtgattg

SEQ ID NO: 43751 - DNA, 25 bp, Probe sequence
tacagaacaagaagtgattgattgg

SEQ ID NO: 43752 - DNA, 25 bp, Probe sequence
acaagaagtgattgattggctatgg

SEQ ID NO: 43753 - DNA, 25 bp, Probe sequence
cagaacaagaagtgattgattggct

SEQ ID NO: 43754 - DNA, 25 bp, Probe sequence
aatcgccatcatgttaattgtatgt

SEQ ID NO: 43755 - DNA, 25 bp, Probe sequence
tcgccatcatgttaattgtatgtat

SEQ ID NO: 43756 - DNA, 25 bp, Probe sequence
atcgccatcatgttaattgtatgta

SEQ ID NO: 43757 - DNA, 25 bp, Probe sequence
cgccatcatgttaattgtatgtatt

SEQ ID NO: 43758 - DNA, 25 bp, Probe sequence
ctggcggaaagaaagatacatacta

SEQ ID NO: 43759 - DNA, 25 bp, Probe sequence
tggcggaaagaaagatacatactat

SEQ ID NO: 43760 - DNA, 25 bp, Probe sequence
taatcgccatcatgttaattgtatg

SEQ ID NO: 43761 - DNA, 25 bp, Probe sequence
ttggtcttggtattagtttaatcgc

SEQ ID NO: 43762 - DNA, 25 bp, Probe sequence
gcggaaagaaagatacatactatgg

SEQ ID NO: 43763 - DNA, 25 bp, Probe sequence
tattattgaggaggatgaagcatga

SEQ ID NO: 43764 - DNA, 25 bp, Probe sequence
ttattattgaggaggatgaagcatg

SEQ ID NO: 43765 - DNA, 25 bp, Probe sequence
ccatcagtattaacggcaataaaga

SEQ ID NO: 43766 - DNA, 25 bp, Probe sequence
tttattattgaggaggatgaagcat

SEQ ID NO: 43767 - DNA, 25 bp, Probe sequence
attgaaagagttacgagcacgagat

SEQ ID NO: 43768 - DNA, 25 bp, Probe sequence
catcagtattaacggcaataaagat

SEQ ID NO: 43769 - DNA, 25 bp, Probe sequence
gattgaaagagttacgagcacgaga

SEQ ID NO: 43770 - DNA, 25 bp, Probe sequence
ttgaaagagttacgagcacgagatg

SEQ ID NO: 43771 - DNA, 25 bp, Probe sequence
atcagtattaacggcaataaagatt

SEQ ID NO: 43772 - DNA, 25 bp, Probe sequence
tggcatagatagagaatttaaggca

SEQ ID NO: 43773 - DNA, 25 bp, Probe sequence
ggcatagatagagaatttaaggcaa

SEQ ID NO: 43774 - DNA, 25 bp, Probe sequence
ttggcatagatagagaatttaaggc

SEQ ID NO: 43775 - DNA, 25 bp, Probe sequence
gcatagatagagaatttaaggcaat

SEQ ID NO: 43776 - DNA, 25 bp, Probe sequence
gggtgattttggcatagatagagaa

SEQ ID NO: 43777 - DNA, 25 bp, Probe sequence
aatgggtgattttggcatagataga

SEQ ID NO: 43778 - DNA, 25 bp, Probe sequence
actaatgggtgattttggcatagat

SEQ ID NO: 43779 - DNA, 25 bp, Probe sequence
atgggtgattttggcatagatagag

SEQ ID NO: 43780 - DNA, 25 bp, Probe sequence
aactaatgggtgattttggcataga

SEQ ID NO: 43781 - DNA, 25 bp, Probe sequence
gttggcataagggaatttgtaaaca

SEQ ID NO: 43782 - DNA, 25 bp, Probe sequence
cgttggcataagggaatttgtaaac

SEQ ID NO: 43783 - DNA, 25 bp, Probe sequence
ttggcataagggaatttgtaaacaa

SEQ ID NO: 43784 - DNA, 25 bp, Probe sequence
ccgttggcataagggaatttgtaaa

SEQ ID NO: 43785 - DNA, 25 bp, Probe sequence
accgttggcataagggaatttgtaa

SEQ ID NO: 43786 - DNA, 25 bp, Probe sequence
tttagtagagaaaggtgaaaagggt

SEQ ID NO: 43787 - DNA, 25 bp, Probe sequence
gaccgttggcataagggaatttgta

SEQ ID NO: 43788 - DNA, 25 bp, Probe sequence
atttagtagagaaaggtgaaaaggg

SEQ ID NO: 43789 - DNA, 25 bp, Probe sequence
ttgaatttagtagagaaaggtgaaa

SEQ ID NO: 43790 - DNA, 25 bp, Probe sequence
atgagtgaagtaattgcagctatca

SEQ ID NO: 43791 - DNA, 25 bp, Probe sequence
ttgcagctatcaatgtactattact

SEQ ID NO: 43792 - DNA, 25 bp, Probe sequence
gtgaagtaattgcagctatcaatgt

SEQ ID NO: 43793 - DNA, 25 bp, Probe sequence
agtgaagtaattgcagctatcaatg

SEQ ID NO: 43794 - DNA, 25 bp, Probe sequence
gagtgaagtaattgcagctatcaat

SEQ ID NO: 43795 - DNA, 25 bp, Probe sequence
aagtaattgcagctatcaatgtact

SEQ ID NO: 43796 - DNA, 25 bp, Probe sequence
tgaagtaattgcagctatcaatgta

SEQ ID NO: 43797 - DNA, 25 bp, Probe sequence
gaagtaattgcagctatcaatgtac

SEQ ID NO: 43798 - DNA, 25 bp, Probe sequence
agtaattgcagctatcaatgtacta

SEQ ID NO: 43799 - DNA, 25 bp, Probe sequence
tctgaattatgacgaagatcaatca

SEQ ID NO: 43800 - DNA, 25 bp, Probe sequence
tgaattatgacgaagatcaatcaag

SEQ ID NO: 43801 - DNA, 25 bp, Probe sequence
ctgaattatgacgaagatcaatcaa

SEQ ID NO: 43802 - DNA, 25 bp, Probe sequence
ttgtcatttccttgtaatcatacct

SEQ ID NO: 43803 - DNA, 25 bp, Probe sequence
gaattatgacgaagatcaatcaaga

SEQ ID NO: 43804 - DNA, 25 bp, Probe sequence
aattatgacgaagatcaatcaagaa

SEQ ID NO: 43805 - DNA, 25 bp, Probe sequence
tgtcatttccttgtaatcataccta

SEQ ID NO: 43806 - DNA, 25 bp, Probe sequence
attgtcatttccttgtaatcatacc

SEQ ID NO: 43807 - DNA, 25 bp, Probe sequence
ttgaaagtaccttactgctgttctt

SEQ ID NO: 43808 - DNA, 25 bp, Probe sequence
aaatatggacgatgtaagaatgccc

SEQ ID NO: 43809 - DNA, 25 bp, Probe sequence
aatatggacgatgtaagaatgccct

SEQ ID NO: 43810 - DNA, 25 bp, Probe sequence
atatggacgatgtaagaatgccctt

SEQ ID NO: 43811 - DNA, 25 bp, Probe sequence
tatggacgatgtaagaatgcccttc

SEQ ID NO: 43812 - DNA, 25 bp, Probe sequence
tgttgtatattcttataacggcatt

SEQ ID NO: 43813 - DNA, 25 bp, Probe sequence
aatgttgtatattcttataacggca

SEQ ID NO: 43814 - DNA, 25 bp, Probe sequence
atgttgtatattcttataacggcat

SEQ ID NO: 43815 - DNA, 25 bp, Probe sequence
aaaatatggacgatgtaagaatgcc

SEQ ID NO: 43816 - DNA, 25 bp, Probe sequence
gaaagtaaaagaaccgcatttgatt

SEQ ID NO: 43817 - DNA, 25 bp, Probe sequence
ctcccatcacaaacgacgttatata

SEQ ID NO: 43818 - DNA, 25 bp, Probe sequence
ccatcacaaacgacgttatataagg

SEQ ID NO: 43819 - DNA, 25 bp, Probe sequence
cccatcacaaacgacgttatataag

SEQ ID NO: 43820 - DNA, 25 bp, Probe sequence
tcccatcacaaacgacgttatataa

SEQ ID NO: 43821 - DNA, 25 bp, Probe sequence
catcacaaacgacgttatataaggc

SEQ ID NO: 43822 - DNA, 25 bp, Probe sequence
atcacaaacgacgttatataaggca

SEQ ID NO: 43823 - DNA, 25 bp, Probe sequence
actcccatcacaaacgacgttatat

SEQ ID NO: 43824 - DNA, 25 bp, Probe sequence
cactcccatcacaaacgacgttata

SEQ ID NO: 43825 - DNA, 25 bp, Probe sequence
atcatttctgtcccactcccatcac

SEQ ID NO: 43826 - DNA, 25 bp, Probe sequence
atattagcgatatacaatgatgcca

SEQ ID NO: 43827 - DNA, 25 bp, Probe sequence
tattagcgatatacaatgatgccat

SEQ ID NO: 43828 - DNA, 25 bp, Probe sequence
gccagcatacctatatacaatcgaa

SEQ ID NO: 43829 - DNA, 25 bp, Probe sequence
ccagcatacctatatacaatcgaac

SEQ ID NO: 43830 - DNA, 25 bp, Probe sequence
cagcatacctatatacaatcgaaca

SEQ ID NO: 43831 - DNA, 25 bp, Probe sequence
agcgatatacaatgatgccattatc

SEQ ID NO: 43832 - DNA, 25 bp, Probe sequence
attagcgatatacaatgatgccatt

SEQ ID NO: 43833 - DNA, 25 bp, Probe sequence
gcatgagcctatctttgtatttgag

SEQ ID NO: 43834 - DNA, 25 bp, Probe sequence
agcatgagcctatctttgtatttga

SEQ ID NO: 43835 - DNA, 25 bp, Probe sequence
caacacataataattgctcgtggta

SEQ ID NO: 43836 - DNA, 25 bp, Probe sequence
aacacataataattgctcgtggtaa

SEQ ID NO: 43837 - DNA, 25 bp, Probe sequence
ctcagttacgtcatcctgtcttata

SEQ ID NO: 43838 - DNA, 25 bp, Probe sequence
tcagttacgtcatcctgtcttataa

SEQ ID NO: 43839 - DNA, 25 bp, Probe sequence
acacataataattgctcgtggtaaa

SEQ ID NO: 43840 - DNA, 25 bp, Probe sequence
gagtagtctgggtgtagtgacatac

SEQ ID NO: 43841 - DNA, 25 bp, Probe sequence
agagtagtctgggtgtagtgacata

SEQ ID NO: 43842 - DNA, 25 bp, Probe sequence
gctcagttacgtcatcctgtcttat

SEQ ID NO: 43843 - DNA, 25 bp, Probe sequence
tgggtgtagtgacatacattacaaa

SEQ ID NO: 43844 - DNA, 25 bp, Probe sequence
ggcggaaagtcagtttacaataatg

SEQ ID NO: 43845 - DNA, 25 bp, Probe sequence
tggcggaaagtcagtttacaataat

SEQ ID NO: 43846 - DNA, 25 bp, Probe sequence
gcggaaagtcagtttacaataatgt

SEQ ID NO: 43847 - DNA, 25 bp, Probe sequence
ggaaagtcagtttacaataatgtgc

SEQ ID NO: 43848 - DNA, 25 bp, Probe sequence
cggaaagtcagtttacaataatgtg

SEQ ID NO: 43849 - DNA, 25 bp, Probe sequence
ctggcggaaagtcagtttacaataa

SEQ ID NO: 43850 - DNA, 25 bp, Probe sequence
agtttacaataatgtgcaagttggg

SEQ ID NO: 43851 - DNA, 25 bp, Probe sequence
cagtttacaataatgtgcaagttgg

SEQ ID NO: 43852 - DNA, 25 bp, Probe sequence
agtcagtttacaataatgtgcaagt

SEQ ID NO: 43853 - DNA, 25 bp, Probe sequence
ccattcctattacttcatctgagca

SEQ ID NO: 43854 - DNA, 25 bp, Probe sequence
tgccattcctattacttcatctgag

SEQ ID NO: 43855 - DNA, 25 bp, Probe sequence
atctgagcatacacaaccaattact

SEQ ID NO: 43856 - DNA, 25 bp, Probe sequence
tcatctgagcatacacaaccaatta

SEQ ID NO: 43857 - DNA, 25 bp, Probe sequence
catctgagcatacacaaccaattac

SEQ ID NO: 43858 - DNA, 25 bp, Probe sequence
tgagcatacacaaccaattactgat

SEQ ID NO: 43859 - DNA, 25 bp, Probe sequence
ttacttcatctgagcatacacaacc

SEQ ID NO: 43860 - DNA, 25 bp, Probe sequence
attacttcatctgagcatacacaac

SEQ ID NO: 43861 - DNA, 25 bp, Probe sequence
atgccattcctattacttcatctga

SEQ ID NO: 43862 - DNA, 25 bp, Probe sequence
aatttgactgtaacttggtataacg

SEQ ID NO: 43863 - DNA, 25 bp, Probe sequence
atttgactgtaacttggtataacgt

SEQ ID NO: 43864 - DNA, 25 bp, Probe sequence
aaatttgactgtaacttggtataac

SEQ ID NO: 43865 - DNA, 25 bp, Probe sequence
attatttaaaacgtcgtgaagaaaa

SEQ ID NO: 43866 - DNA, 25 bp, Probe sequence
tattatttaaaacgtcgtgaagaaa

SEQ ID NO: 43867 - DNA, 25 bp, Probe sequence
aaaatttgactgtaacttggtataa

SEQ ID NO: 43868 - DNA, 25 bp, Probe sequence
tcaactactgccaatataacttcgt

SEQ ID NO: 43869 - DNA, 25 bp, Probe sequence
gtcaactactgccaatataacttcg

SEQ ID NO: 43870 - DNA, 25 bp, Probe sequence
tactgccaatataacttcgtagagc

SEQ ID NO: 43871 - DNA, 25 bp, Probe sequence
gccaatataacttcgtagagcatag

SEQ ID NO: 43872 - DNA, 25 bp, Probe sequence
acttcgtagagcatagaacattgat

SEQ ID NO: 43873 - DNA, 25 bp, Probe sequence
aacttcgtagagcatagaacattga

SEQ ID NO: 43874 - DNA, 25 bp, Probe sequence
cttcgtagagcatagaacattgatt

SEQ ID NO: 43875 - DNA, 25 bp, Probe sequence
caactactgccaatataacttcgta

SEQ ID NO: 43876 - DNA, 25 bp, Probe sequence
taacttcgtagagcatagaacattg

SEQ ID NO: 43877 - DNA, 25 bp, Probe sequence
gaagtagttcagcggtagaatacaa

SEQ ID NO: 43878 - DNA, 25 bp, Probe sequence
cagaagtagttcagcggtagaatac

SEQ ID NO: 43879 - DNA, 25 bp, Probe sequence
aagtagttcagcggtagaatacaac

SEQ ID NO: 43880 - DNA, 25 bp, Probe sequence
agaagtagttcagcggtagaataca

SEQ ID NO: 43881 - DNA, 25 bp, Probe sequence
gcagaagtagttcagcggtagaata

SEQ ID NO: 43882 - DNA, 25 bp, Probe sequence
tagttcagcggtagaatacaacctt

SEQ ID NO: 43883 - DNA, 25 bp, Probe sequence
gtagttcagcggtagaatacaacct

SEQ ID NO: 43884 - DNA, 25 bp, Probe sequence
agtagttcagcggtagaatacaacc

SEQ ID NO: 43885 - DNA, 25 bp, Probe sequence
agttcagcggtagaatacaaccttg

SEQ ID NO: 43886 - DNA, 25 bp, Probe sequence
gacttaaaatcctgcggtgagagat

SEQ ID NO: 43887 - DNA, 25 bp, Probe sequence
acttaaaatcctgcggtgagagatc

SEQ ID NO: 43888 - DNA, 25 bp, Probe sequence
cttaaaatcctgcggtgagagatca

SEQ ID NO: 43889 - DNA, 25 bp, Probe sequence
ggacttaaaatcctgcggtgagaga

SEQ ID NO: 43890 - DNA, 25 bp, Probe sequence
ttaaaatcctgcggtgagagatcac

SEQ ID NO: 43891 - DNA, 25 bp, Probe sequence
aggacttaaaatcctgcggtgagag

SEQ ID NO: 43892 - DNA, 25 bp, Probe sequence
agtagtgataggtggaaagggtaaa

SEQ ID NO: 43893 - DNA, 25 bp, Probe sequence
cagtagtgataggtggaaagggtaa

SEQ ID NO: 43894 - DNA, 25 bp, Probe sequence
aattcagtagtgataggtggaaagg

SEQ ID NO: 43895 - DNA, 25 bp, Probe sequence
attcagtagtgataggtggaaaggg

SEQ ID NO: 43896 - DNA, 25 bp, Probe sequence
tcagtagtgataggtggaaagggta

SEQ ID NO: 43897 - DNA, 25 bp, Probe sequence
ttcagtagtgataggtggaaagggt

SEQ ID NO: 43898 - DNA, 25 bp, Probe sequence
gaattcagtagtgataggtggaaag

SEQ ID NO: 43899 - DNA, 25 bp, Probe sequence
gttggcataaggggatttgtaaaca

SEQ ID NO: 43900 - DNA, 25 bp, Probe sequence
ttggcataaggggatttgtaaacaa

SEQ ID NO: 43901 - DNA, 25 bp, Probe sequence
agattcttatcgagttcctgatgaa

SEQ ID NO: 43902 - DNA, 25 bp, Probe sequence
gattcttatcgagttcctgatgaag

SEQ ID NO: 43903 - DNA, 25 bp, Probe sequence
tgtagattcttatcgagttcctgat

SEQ ID NO: 43904 - DNA, 25 bp, Probe sequence
atgtagattcttatcgagttcctga

SEQ ID NO: 43905 - DNA, 25 bp, Probe sequence
tgatgtagattcttatcgagttcct

SEQ ID NO: 43906 - DNA, 25 bp, Probe sequence
gtagattcttatcgagttcctgatg

SEQ ID NO: 43907 - DNA, 25 bp, Probe sequence
gatgtagattcttatcgagttcctg

SEQ ID NO: 43908 - DNA, 25 bp, Probe sequence
tagattcttatcgagttcctgatga

SEQ ID NO: 43909 - DNA, 25 bp, Probe sequence
caaagtcgcttcgtttagtgatatt

SEQ ID NO: 43910 - DNA, 25 bp, Probe sequence
atagcgagattgcgaataagattag

SEQ ID NO: 43911 - DNA, 25 bp, Probe sequence
tagcgagattgcgaataagattagc

SEQ ID NO: 43912 - DNA, 25 bp, Probe sequence
tatatagatgacggaggaggagaag

SEQ ID NO: 43913 - DNA, 25 bp, Probe sequence
atatagatgacggaggaggagaagt

SEQ ID NO: 43914 - DNA, 25 bp, Probe sequence
atatatagatgacggaggaggagaa

SEQ ID NO: 43915 - DNA, 25 bp, Probe sequence
gaataagattagcagcatgataccg

SEQ ID NO: 43916 - DNA, 25 bp, Probe sequence
cgaataagattagcagcatgatacc

SEQ ID NO: 43917 - DNA, 25 bp, Probe sequence
gcgaataagattagcagcatgatac

SEQ ID NO: 43918 - DNA, 25 bp, Probe sequence
catatatagatgacggaggaggaga

SEQ ID NO: 43919 - DNA, 25 bp, Probe sequence
atagcgagattgcgaataagattat

SEQ ID NO: 43920 - DNA, 25 bp, Probe sequence
agcgagattgcgaataagattatta

SEQ ID NO: 43921 - DNA, 25 bp, Probe sequence
tagcgagattgcgaataagattatt

SEQ ID NO: 43922 - DNA, 25 bp, Probe sequence
cgagattgcgaataagattattagc

SEQ ID NO: 43923 - DNA, 25 bp, Probe sequence
gcgagattgcgaataagattattag

SEQ ID NO: 43924 - DNA, 25 bp, Probe sequence
tggattcagtatatgagttgcatga

SEQ ID NO: 43925 - DNA, 25 bp, Probe sequence
cgatgaagaatgtggagaagtgttt

SEQ ID NO: 43926 - DNA, 25 bp, Probe sequence
atggattcagtatatgagttgcatg

SEQ ID NO: 43927 - DNA, 25 bp, Probe sequence
ggattcagtatatgagttgcatgat

SEQ ID NO: 43928 - DNA, 25 bp, Probe sequence
aacattggaaacaaacagggttgaa

SEQ ID NO: 43929 - DNA, 25 bp, Probe sequence
acattggaaacaaacagggttgaac

SEQ ID NO: 43930 - DNA, 25 bp, Probe sequence
cattggaaacaaacagggttgaacc

SEQ ID NO: 43931 - DNA, 25 bp, Probe sequence
gatgcaacattggaaacaaacaggg

SEQ ID NO: 43932 - DNA, 25 bp, Probe sequence
caacattggaaacaaacagggttga

SEQ ID NO: 43933 - DNA, 25 bp, Probe sequence
atgcaacattggaaacaaacagggt

SEQ ID NO: 43934 - DNA, 25 bp, Probe sequence
tgcaacattggaaacaaacagggtt

SEQ ID NO: 43935 - DNA, 25 bp, Probe sequence
gcaacattggaaacaaacagggttg

SEQ ID NO: 43936 - DNA, 25 bp, Probe sequence
acgataacgacatcacttccatata

SEQ ID NO: 43937 - DNA, 25 bp, Probe sequence
gacgataacgacatcacttccatat

SEQ ID NO: 43938 - DNA, 25 bp, Probe sequence
cgataacgacatcacttccatatac

SEQ ID NO: 43939 - DNA, 25 bp, Probe sequence
taacgacatcacttccatatacaac

SEQ ID NO: 43940 - DNA, 25 bp, Probe sequence
agacgataacgacatcacttccata

SEQ ID NO: 43941 - DNA, 25 bp, Probe sequence
gataacgacatcacttccatataca

SEQ ID NO: 43942 - DNA, 25 bp, Probe sequence
aagacgataacgacatcacttccat

SEQ ID NO: 43943 - DNA, 25 bp, Probe sequence
atggtgattctatggaacctatgtt

SEQ ID NO: 43944 - DNA, 25 bp, Probe sequence
aatggtgattctatggaacctatgt

SEQ ID NO: 43945 - DNA, 25 bp, Probe sequence
tgaatttgactttacaagagatggt

SEQ ID NO: 43946 - DNA, 25 bp, Probe sequence
caagagatggtaaattgaatgttgt

SEQ ID NO: 43947 - DNA, 25 bp, Probe sequence
acaagagatggtaaattgaatgttg

SEQ ID NO: 43948 - DNA, 25 bp, Probe sequence
gaatttgactttacaagagatggta

SEQ ID NO: 43949 - DNA, 25 bp, Probe sequence
agaaacgcatttaaagaagaagatt

SEQ ID NO: 43950 - DNA, 25 bp, Probe sequence
aagaaacgcatttaaagaagaagat

SEQ ID NO: 43951 - DNA, 25 bp, Probe sequence
aagagatggtaaattgaatgttgta

SEQ ID NO: 43952 - DNA, 25 bp, Probe sequence
tgttgtatttgattatgttgattgg

SEQ ID NO: 43953 - DNA, 25 bp, Probe sequence
agagatggtaaattgaatgttgtat

SEQ ID NO: 43954 - DNA, 25 bp, Probe sequence
agtagaatgggagcaagtatttaca

SEQ ID NO: 43955 - DNA, 25 bp, Probe sequence
cagtagaatgggagcaagtatttac

SEQ ID NO: 43956 - DNA, 25 bp, Probe sequence
agatcagtggaatgataccagtaga

SEQ ID NO: 43957 - DNA, 25 bp, Probe sequence
gagatcagtggaatgataccagtag

SEQ ID NO: 43958 - DNA, 25 bp, Probe sequence
gatcagtggaatgataccagtagaa

SEQ ID NO: 43959 - DNA, 25 bp, Probe sequence
tgagatcagtggaatgataccagta

SEQ ID NO: 43960 - DNA, 25 bp, Probe sequence
caagtgagatcagtggaatgatacc

SEQ ID NO: 43961 - DNA, 25 bp, Probe sequence
aagtgagatcagtggaatgatacca

SEQ ID NO: 43962 - DNA, 25 bp, Probe sequence
gcaagtgagatcagtggaatgatac

SEQ ID NO: 43963 - DNA, 25 bp, Probe sequence
tacaacgagattgcgaatgagatta

SEQ ID NO: 43964 - DNA, 25 bp, Probe sequence
aacgagattgcgaatgagattagtg

SEQ ID NO: 43965 - DNA, 25 bp, Probe sequence
caacgagattgcgaatgagattagt

SEQ ID NO: 43966 - DNA, 25 bp, Probe sequence
acaacgagattgcgaatgagattag

SEQ ID NO: 43967 - DNA, 25 bp, Probe sequence
gtacaacgagattgcgaatgagatt

SEQ ID NO: 43968 - DNA, 25 bp, Probe sequence
ggtagaatgggagcaagtatttaca

SEQ ID NO: 43969 - DNA, 25 bp, Probe sequence
gaatgagattagtgggatgataccg

SEQ ID NO: 43970 - DNA, 25 bp, Probe sequence
cgaatgagattagtgggatgatacc

SEQ ID NO: 43971 - DNA, 25 bp, Probe sequence
acgagattgcgaatgagattagtgg

SEQ ID NO: 43972 - DNA, 25 bp, Probe sequence
cagaaatggaatacgaaatggaaga

SEQ ID NO: 43973 - DNA, 25 bp, Probe sequence
aatggaatacgaaatggaagaagtt

SEQ ID NO: 43974 - DNA, 25 bp, Probe sequence
aaatggaatacgaaatggaagaagt

SEQ ID NO: 43975 - DNA, 25 bp, Probe sequence
agaaatggaatacgaaatggaagaa

SEQ ID NO: 43976 - DNA, 25 bp, Probe sequence
gaaatggaatacgaaatggaagaag

SEQ ID NO: 43977 - DNA, 25 bp, Probe sequence
tggaatacgaaatggaagaagttaa

SEQ ID NO: 43978 - DNA, 25 bp, Probe sequence
atggaatacgaaatggaagaagtta

SEQ ID NO: 43979 - DNA, 25 bp, Probe sequence
ggaatacgaaatggaagaagttaaa

SEQ ID NO: 43980 - DNA, 25 bp, Probe sequence
ggaagaagttaaagaaatcgagcaa

SEQ ID NO: 43981 - DNA, 25 bp, Probe sequence
gtagatgatgaaggtggagaggttg

SEQ ID NO: 43982 - DNA, 25 bp, Probe sequence
tagatgatgaaggtggagaggttgt

SEQ ID NO: 43983 - DNA, 25 bp, Probe sequence
aattcgagcagtagagaagtatgtt

SEQ ID NO: 43984 - DNA, 25 bp, Probe sequence
ttcgagcagtagagaagtatgttaa

SEQ ID NO: 43985 - DNA, 25 bp, Probe sequence
attcgagcagtagagaagtatgtta

SEQ ID NO: 43986 - DNA, 25 bp, Probe sequence
aaagaagatttagaaccgtggacat

SEQ ID NO: 43987 - DNA, 25 bp, Probe sequence
ctaaaccaggaagtgaagatttgaa

SEQ ID NO: 43988 - DNA, 25 bp, Probe sequence
gcagtagagaagtatgttaaagagc

SEQ ID NO: 43989 - DNA, 25 bp, Probe sequence
aagaagatttagaaccgtggacatc

SEQ ID NO: 43990 - DNA, 25 bp, Probe sequence
cgcaagtatcgcaacattcatattt

SEQ ID NO: 43991 - DNA, 25 bp, Probe sequence
gcaagtatcgcaacattcatatttt

SEQ ID NO: 43992 - DNA, 25 bp, Probe sequence
gcgacacatataaaagctacctagt

SEQ ID NO: 43993 - DNA, 25 bp, Probe sequence
cgacacatataaaagctacctagta

SEQ ID NO: 43994 - DNA, 25 bp, Probe sequence
caagtatcgcaacattcatatttta

SEQ ID NO: 43995 - DNA, 25 bp, Probe sequence
agcgacacatataaaagctacctag

SEQ ID NO: 43996 - DNA, 25 bp, Probe sequence
aagtatcgcaacattcatattttat

SEQ ID NO: 43997 - DNA, 25 bp, Probe sequence
gacacatataaaagctacctagtag

SEQ ID NO: 43998 - DNA, 25 bp, Probe sequence
tcgcaacattcatattttataaaga

SEQ ID NO: 43999 - DNA, 25 bp, Probe sequence
tcgttaaacaatgaaaagtggaaat

SEQ ID NO: 44000 - DNA, 25 bp, Probe sequence
atcgttaaacaatgaaaagtggaaa

SEQ ID NO: 44001 - DNA, 25 bp, Probe sequence
cgttaaacaatgaaaagtggaaatt

SEQ ID NO: 44002 - DNA, 25 bp, Probe sequence
tatcgttaaacaatgaaaagtggaa

SEQ ID NO: 44003 - DNA, 25 bp, Probe sequence
ttatcgttaaacaatgaaaagtgga

SEQ ID NO: 44004 - DNA, 25 bp, Probe sequence
gccaaaagtaatttatcgttaaaca

SEQ ID NO: 44005 - DNA, 25 bp, Probe sequence
tgccaaaagtaatttatcgttaaac

SEQ ID NO: 44006 - DNA, 25 bp, Probe sequence
tttatcgttaaacaatgaaaagtgg

SEQ ID NO: 44007 - DNA, 25 bp, Probe sequence
gaaaagtggaaatttgtttgttcaa

SEQ ID NO: 44008 - DNA, 25 bp, Probe sequence
ttacttataccgagaagatggcacg

SEQ ID NO: 44009 - DNA, 25 bp, Probe sequence
taaatgaagtttattcgctcacagg

SEQ ID NO: 44010 - DNA, 25 bp, Probe sequence
cgtaaatgaagtttattcgctcaca

SEQ ID NO: 44011 - DNA, 25 bp, Probe sequence
aggattacaagcaacgatatttgat

SEQ ID NO: 44012 - DNA, 25 bp, Probe sequence
aaatgaagtttattcgctcacagga

SEQ ID NO: 44013 - DNA, 25 bp, Probe sequence
gtaaatgaagtttattcgctcacag

SEQ ID NO: 44014 - DNA, 25 bp, Probe sequence
taggattacaagcaacgatatttga

SEQ ID NO: 44015 - DNA, 25 bp, Probe sequence
agctaggattacaagcaacgatatt

SEQ ID NO: 44016 - DNA, 25 bp, Probe sequence
tatgagcaagagctaggattacaag

SEQ ID NO: 44017 - DNA, 25 bp, Probe sequence
aataggatcaccaattccaacagac

SEQ ID NO: 44018 - DNA, 25 bp, Probe sequence
ataggatcaccaattccaacagaca

SEQ ID NO: 44019 - DNA, 25 bp, Probe sequence
taggatcaccaattccaacagacaa

SEQ ID NO: 44020 - DNA, 25 bp, Probe sequence
gatcaccaattccaacagacaatgc

SEQ ID NO: 44021 - DNA, 25 bp, Probe sequence
ggatcaccaatttcaacagacaatg

SEQ ID NO: 44022 - DNA, 25 bp, Probe sequence
gatcaccaatttcaacagacaatgc

SEQ ID NO: 44023 - DNA, 25 bp, Probe sequence
ggatcaccaattccaacagacaatg

SEQ ID NO: 44024 - DNA, 25 bp, Probe sequence
aggatcaccaattccaacagacaat

SEQ ID NO: 44025 - DNA, 25 bp, Probe sequence
aaataggatcaccaattccaacaga

SEQ ID NO: 44026 - DNA, 25 bp, Probe sequence
gaaagatggggagttgctagtatga

SEQ ID NO: 44027 - DNA, 25 bp, Probe sequence
ggaaagatggggagttgctagtatg

SEQ ID NO: 44028 - DNA, 25 bp, Probe sequence
tggaaagatggggagttgctagtat

SEQ ID NO: 44029 - DNA, 25 bp, Probe sequence
aagaagtaacggaagagactaagtt

SEQ ID NO: 44030 - DNA, 25 bp, Probe sequence
aggtatatgagattcaagaaggagt

SEQ ID NO: 44031 - DNA, 25 bp, Probe sequence
ggtatatgagattcaagaaggagtc

SEQ ID NO: 44032 - DNA, 25 bp, Probe sequence
agaggtatatgagattcaagaagga

SEQ ID NO: 44033 - DNA, 25 bp, Probe sequence
gaggtatatgagattcaagaaggag

SEQ ID NO: 44034 - DNA, 25 bp, Probe sequence
aggttgttagaggtatatgagattc

SEQ ID NO: 44035 - DNA, 25 bp, Probe sequence
cgatgacatgacgatgacattgatt

SEQ ID NO: 44036 - DNA, 25 bp, Probe sequence
gacgatgacattgatttggaaagat

SEQ ID NO: 44037 - DNA, 25 bp, Probe sequence
ggttgttagaggtatatgagattca

SEQ ID NO: 44038 - DNA, 25 bp, Probe sequence
aagagaagtatgaggcacaagttaa

SEQ ID NO: 44039 - DNA, 25 bp, Probe sequence
ttacagttgttgaggcagagaataa

SEQ ID NO: 44040 - DNA, 25 bp, Probe sequence
aaagagaagtatgaggcacaagtta

SEQ ID NO: 44041 - DNA, 25 bp, Probe sequence
tgttgaggcagagaataaagaagaa

SEQ ID NO: 44042 - DNA, 25 bp, Probe sequence
ttgttgaggcagagaataaagaaga

SEQ ID NO: 44043 - DNA, 25 bp, Probe sequence
gttgttgaggcagagaataaagaag

SEQ ID NO: 44044 - DNA, 25 bp, Probe sequence
gttgaggcagagaataaagaagaag

SEQ ID NO: 44045 - DNA, 25 bp, Probe sequence
agttgttgaggcagagaataaagaa

SEQ ID NO: 44046 - DNA, 25 bp, Probe sequence
agagaagtatgaggcacaagttaaa

SEQ ID NO: 44047 - DNA, 25 bp, Probe sequence
gagcaagtgtatattatgatgacgg

SEQ ID NO: 44048 - DNA, 25 bp, Probe sequence
gcaagtgtatattatgatgacggct

SEQ ID NO: 44049 - DNA, 25 bp, Probe sequence
agcaagtgtatattatgatgacggc

SEQ ID NO: 44050 - DNA, 25 bp, Probe sequence
tgagcaagtgtatattatgatgacg

SEQ ID NO: 44051 - DNA, 25 bp, Probe sequence
aggtaagtatgtaactgagcaagtg

SEQ ID NO: 44052 - DNA, 25 bp, Probe sequence
ggtaagtatgtaactgagcaagtgt

SEQ ID NO: 44053 - DNA, 25 bp, Probe sequence
caagtgtatattatgatgacggcta

SEQ ID NO: 44054 - DNA, 25 bp, Probe sequence
gtaagtatgtaactgagcaagtgta

SEQ ID NO: 44055 - DNA, 25 bp, Probe sequence
aagtgtatattatgatgacggctaa

SEQ ID NO: 44056 - DNA, 25 bp, Probe sequence
catatgatattaagccaggtacatt

SEQ ID NO: 44057 - DNA, 25 bp, Probe sequence
atgatattaagccaggtacatttaa

SEQ ID NO: 44058 - DNA, 25 bp, Probe sequence
atatgatattaagccaggtacattt

SEQ ID NO: 44059 - DNA, 25 bp, Probe sequence
tgatattaagccaggtacatttaaa

SEQ ID NO: 44060 - DNA, 25 bp, Probe sequence
tatgatattaagccaggtacattta

SEQ ID NO: 44061 - DNA, 25 bp, Probe sequence
tttcaagacaaaccatatcgctaat

SEQ ID NO: 44062 - DNA, 25 bp, Probe sequence
ttcaagacaaaccatatcgctaatt

SEQ ID NO: 44063 - DNA, 25 bp, Probe sequence
caagacaaaccatatcgctaattga

SEQ ID NO: 44064 - DNA, 25 bp, Probe sequence
tcaagacaaaccatatcgctaattg

SEQ ID NO: 44065 - DNA, 25 bp, Probe sequence
gtttcaagacaaaccatatcgctaa

SEQ ID NO: 44066 - DNA, 25 bp, Probe sequence
ttttattattgaggaggatgaggca

SEQ ID NO: 44067 - DNA, 25 bp, Probe sequence
agacaaaccatatcgctaattgagc

SEQ ID NO: 44068 - DNA, 25 bp, Probe sequence
cgtttcaagacaaaccatatcgcta

SEQ ID NO: 44069 - DNA, 25 bp, Probe sequence
tttcaatgaaacggtggaaactgtt

SEQ ID NO: 44070 - DNA, 25 bp, Probe sequence
aagaagtattatgattccacgtcaa

SEQ ID NO: 44071 - DNA, 25 bp, Probe sequence
gtcaaagaagtattatgattccacg

SEQ ID NO: 44072 - DNA, 25 bp, Probe sequence
aagattattagaatgggtgcagaca

SEQ ID NO: 44073 - DNA, 25 bp, Probe sequence
agaatgggtgcagacataagaatta

SEQ ID NO: 44074 - DNA, 25 bp, Probe sequence
tagaatgggtgcagacataagaatt

SEQ ID NO: 44075 - DNA, 25 bp, Probe sequence
ttagaatgggtgcagacataagaat

SEQ ID NO: 44076 - DNA, 25 bp, Probe sequence
attagaatgggtgcagacataagaa

SEQ ID NO: 44077 - DNA, 25 bp, Probe sequence
agattattagaatgggtgcagacat

SEQ ID NO: 44078 - DNA, 25 bp, Probe sequence
tgggtgcagacataagaattaaatg

SEQ ID NO: 44079 - DNA, 25 bp, Probe sequence
tagaacttgatgagacacaacgcaa

SEQ ID NO: 44080 - DNA, 25 bp, Probe sequence
tgctacatcaatactattctgaaga

SEQ ID NO: 44081 - DNA, 25 bp, Probe sequence
aatgtgagatcagtgtttggatttg

SEQ ID NO: 44082 - DNA, 25 bp, Probe sequence
tgtttgatgtaatggatagtaagca

SEQ ID NO: 44083 - DNA, 25 bp, Probe sequence
tgtgagatcagtgtttggatttgta

SEQ ID NO: 44084 - DNA, 25 bp, Probe sequence
gtgagatcagtgtttggatttgtaa

SEQ ID NO: 44085 - DNA, 25 bp, Probe sequence
gagatcagtgtttggatttgtaagt

SEQ ID NO: 44086 - DNA, 25 bp, Probe sequence
tgagatcagtgtttggatttgtaag

SEQ ID NO: 44087 - DNA, 25 bp, Probe sequence
acttgatgagacacaacgcaaatat

SEQ ID NO: 44088 - DNA, 25 bp, Probe sequence
taacaacagaagttcattcaggtca

SEQ ID NO: 44089 - DNA, 25 bp, Probe sequence
ttaacaacagaagttcattcaggtc

SEQ ID NO: 44090 - DNA, 25 bp, Probe sequence
aacaacagaagttcattcaggtcat

SEQ ID NO: 44091 - DNA, 25 bp, Probe sequence
acaacagaagttcattcaggtcatg

SEQ ID NO: 44092 - DNA, 25 bp, Probe sequence
tgttggtggtgtaatacagaataat

SEQ ID NO: 44093 - DNA, 25 bp, Probe sequence
gggaagtcatagaaagcaaacaaat

SEQ ID NO: 44094 - DNA, 25 bp, Probe sequence
acactggaaagactatggaaatgaa

SEQ ID NO: 44095 - DNA, 25 bp, Probe sequence
taccgatactacactggaaagacta

SEQ ID NO: 44096 - DNA, 25 bp, Probe sequence
cgatactacactggaaagactatgg

SEQ ID NO: 44097 - DNA, 25 bp, Probe sequence
taacatcttgcggtggtggtaataa

SEQ ID NO: 44098 - DNA, 25 bp, Probe sequence
gtaacatcttgcggtggtggtaata

SEQ ID NO: 44099 - DNA, 25 bp, Probe sequence
aaagaagatagggatatttcagtca

SEQ ID NO: 44100 - DNA, 25 bp, Probe sequence
ggaggagctaaagtttattaggtgt

SEQ ID NO: 44101 - DNA, 25 bp, Probe sequence
tggaggagctaaagtttattaggtg

SEQ ID NO: 44102 - DNA, 25 bp, Probe sequence
gaagatagggatatttcagtcattg

SEQ ID NO: 44103 - DNA, 25 bp, Probe sequence
atggaggagctaaagtttattaggt

SEQ ID NO: 44104 - DNA, 25 bp, Probe sequence
agaagatagggatatttcagtcatt

SEQ ID NO: 44105 - DNA, 25 bp, Probe sequence
aagaagatagggatatttcagtcat

SEQ ID NO: 44106 - DNA, 25 bp, Probe sequence
agacgaattggatgatgaaggtatg

SEQ ID NO: 44107 - DNA, 25 bp, Probe sequence
cagacgaattggatgatgaaggtat

SEQ ID NO: 44108 - DNA, 25 bp, Probe sequence
cgaattggatgatgaaggtatggtt

SEQ ID NO: 44109 - DNA, 25 bp, Probe sequence
gacgaattggatgatgaaggtatgg

SEQ ID NO: 44110 - DNA, 25 bp, Probe sequence
acgaattggatgatgaaggtatggt

SEQ ID NO: 44111 - DNA, 25 bp, Probe sequence
tcagacgaattggatgatgaaggta

SEQ ID NO: 44112 - DNA, 25 bp, Probe sequence
gctaaaggcaataaatcagacgaat

SEQ ID NO: 44113 - DNA, 25 bp, Probe sequence
atgataaagaaggataccgtgatgg

SEQ ID NO: 44114 - DNA, 25 bp, Probe sequence
aaagaaggtagggatatttcagtca

SEQ ID NO: 44115 - DNA, 25 bp, Probe sequence
caattacacaacgatgattacaatg

SEQ ID NO: 44116 - DNA, 25 bp, Probe sequence
aatagaaataccgaaacagccaaag

SEQ ID NO: 44117 - DNA, 25 bp, Probe sequence
atccgaaatagttaaacagccaaag

SEQ ID NO: 44118 - DNA, 25 bp, Probe sequence
aaggcttgcattgttaataagtgtt

SEQ ID NO: 44119 - DNA, 25 bp, Probe sequence
cggctaaatatcaattacacaacga

SEQ ID NO: 44120 - DNA, 25 bp, Probe sequence
tcggctaaatatcaattacacaacg

SEQ ID NO: 44121 - DNA, 25 bp, Probe sequence
aggcttgcattgttaataagtgtta

SEQ ID NO: 44122 - DNA, 25 bp, Probe sequence
aattacacaacgatgattacaatgt

SEQ ID NO: 44123 - DNA, 25 bp, Probe sequence
tcaattacacaacgatgattacaat

SEQ ID NO: 44124 - DNA, 25 bp, Probe sequence
cgatacttcagaaaagccaaaagaa

SEQ ID NO: 44125 - DNA, 25 bp, Probe sequence
tcagaaaagccaaaagaagattcaa

SEQ ID NO: 44126 - DNA, 25 bp, Probe sequence
ttcagaaaagccaaaagaagattca

SEQ ID NO: 44127 - DNA, 25 bp, Probe sequence
aaatcaagcgatacttcagaaaagc

SEQ ID NO: 44128 - DNA, 25 bp, Probe sequence
cagaaaagccaaaagaagattcaaa

SEQ ID NO: 44129 - DNA, 25 bp, Probe sequence
aaaagccaaaagaagattcaaaaga

SEQ ID NO: 44130 - DNA, 25 bp, Probe sequence
aaagccaaaagaagattcaaaagaa

SEQ ID NO: 44131 - DNA, 25 bp, Probe sequence
agaaaagccaaaagaagattcaaaa

SEQ ID NO: 44132 - DNA, 25 bp, Probe sequence
aagcgatacttcagaaaagccaaaa

SEQ ID NO: 44133 - DNA, 25 bp, Probe sequence
aaccaggagtattagatgatgaagg

SEQ ID NO: 44134 - DNA, 25 bp, Probe sequence
caggagtattagatgatgaaggcat

SEQ ID NO: 44135 - DNA, 25 bp, Probe sequence
gtctgaaggtgagaatgttgagtag

SEQ ID NO: 44136 - DNA, 25 bp, Probe sequence
ccaggagtattagatgatgaaggca

SEQ ID NO: 44137 - DNA, 25 bp, Probe sequence
accaggagtattagatgatgaaggc

SEQ ID NO: 44138 - DNA, 25 bp, Probe sequence
tgatgaaggcatggtgttatatctt

SEQ ID NO: 44139 - DNA, 25 bp, Probe sequence
atgatgaaggcatggtgttatatct

SEQ ID NO: 44140 - DNA, 25 bp, Probe sequence
agatgatgaaggcatggtgttatat

SEQ ID NO: 44141 - DNA, 25 bp, Probe sequence
ttagatgatgaaggcatggtgttat

SEQ ID NO: 44142 - DNA, 25 bp, Probe sequence
cgaaggtagatgaagatgatgaatg

SEQ ID NO: 44143 - DNA, 25 bp, Probe sequence
gcgaaggtagatgaagatgatgaat

SEQ ID NO: 44144 - DNA, 25 bp, Probe sequence
gaaggtagatgaagatgatgaatga

SEQ ID NO: 44145 - DNA, 25 bp, Probe sequence
ctacaacaatggtgatgtctcaatt

SEQ ID NO: 44146 - DNA, 25 bp, Probe sequence
actacaacaatggtgatgtctcaat

SEQ ID NO: 44147 - DNA, 25 bp, Probe sequence
aactacaacaatggtgatgtctcaa

SEQ ID NO: 44148 - DNA, 25 bp, Probe sequence
ggcgaaggtagatgaagatgatgaa

SEQ ID NO: 44149 - DNA, 25 bp, Probe sequence
acttagatagaaatacacggactgc

SEQ ID NO: 44150 - DNA, 25 bp, Probe sequence
ttatacgacaaagaaggataccgag

SEQ ID NO: 44151 - DNA, 25 bp, Probe sequence
tattatgatggcgtggttataggtg

SEQ ID NO: 44152 - DNA, 25 bp, Probe sequence
ttattatgatggcgtggttataggt

SEQ ID NO: 44153 - DNA, 25 bp, Probe sequence
attatgatggcgtggttataggtgg

SEQ ID NO: 44154 - DNA, 25 bp, Probe sequence
cgtggttataggtggtttgtatgat

SEQ ID NO: 44155 - DNA, 25 bp, Probe sequence
tttattatgatggcgtggttatagg

SEQ ID NO: 44156 - DNA, 25 bp, Probe sequence
tagactttaccgaagcaacaaatct

SEQ ID NO: 44157 - DNA, 25 bp, Probe sequence
tagtttcgccatatccaggttctaa

SEQ ID NO: 44158 - DNA, 25 bp, Probe sequence
ttagtttcgccatatccaggttcta

SEQ ID NO: 44159 - DNA, 25 bp, Probe sequence
ctagactttaccgaagcaacaaatc

SEQ ID NO: 44160 - DNA, 25 bp, Probe sequence
tgttgaattaggtgtggttattgtg

SEQ ID NO: 44161 - DNA, 25 bp, Probe sequence
gtgttgaattaggtgtggttattgt

SEQ ID NO: 44162 - DNA, 25 bp, Probe sequence
gttgaattaggtgtggttattgtga

SEQ ID NO: 44163 - DNA, 25 bp, Probe sequence
agtgttgaattaggtgtggttattg

SEQ ID NO: 44164 - DNA, 25 bp, Probe sequence
tgaattaggtgtggttattgtgatg

SEQ ID NO: 44165 - DNA, 25 bp, Probe sequence
gaattaggtgtggttattgtgatga

SEQ ID NO: 44166 - DNA, 25 bp, Probe sequence
aagtgttgaattaggtgtggttatt

SEQ ID NO: 44167 - DNA, 25 bp, Probe sequence
attaggtgtggttattgtgatgatt

SEQ ID NO: 44168 - DNA, 25 bp, Probe sequence
ttgaattaggtgtggttattgtgat

SEQ ID NO: 44169 - DNA, 25 bp, Probe sequence
gataaggaaggctatcgtgatgatc

SEQ ID NO: 44170 - DNA, 25 bp, Probe sequence
gatgtgactaaggacgaggatgaag

SEQ ID NO: 44171 - DNA, 25 bp, Probe sequence
aatggttactactatgtcgatgtga

SEQ ID NO: 44172 - DNA, 25 bp, Probe sequence
taggtaaagaagcggaagttaagaa

SEQ ID NO: 44173 - DNA, 25 bp, Probe sequence
aggtaaagaagcggaagttaagaaa

SEQ ID NO: 44174 - DNA, 25 bp, Probe sequence
ataggtaaagaagcggaagttaaga

SEQ ID NO: 44175 - DNA, 25 bp, Probe sequence
cataggtaaagaagcggaagttaag

SEQ ID NO: 44176 - DNA, 25 bp, Probe sequence
gaggatttatacgataaggaaggct

SEQ ID NO: 44177 - DNA, 25 bp, Probe sequence
agaggatttatacgataaggaaggc

SEQ ID NO: 44178 - DNA, 25 bp, Probe sequence
tgtcttcttcgcaggtcataataat

SEQ ID NO: 44179 - DNA, 25 bp, Probe sequence
attctcagttgttggtgttattgtc

SEQ ID NO: 44180 - DNA, 25 bp, Probe sequence
gtcttcttcgcaggtcataataatc

SEQ ID NO: 44181 - DNA, 25 bp, Probe sequence
tcttcttcgcaggtcataataatcc

SEQ ID NO: 44182 - DNA, 25 bp, Probe sequence
ttctcagttgttggtgttattgtca

SEQ ID NO: 44183 - DNA, 25 bp, Probe sequence
atgtcttcttcgcaggtcataataa

SEQ ID NO: 44184 - DNA, 25 bp, Probe sequence
tggagcattggtatcatctattact

SEQ ID NO: 44185 - DNA, 25 bp, Probe sequence
ggagcattggtatcatctattactg

SEQ ID NO: 44186 - DNA, 25 bp, Probe sequence
aagagaatgatgtcgtgttaagaac

SEQ ID NO: 44187 - DNA, 25 bp, Probe sequence
gcaatagttatagggtttgggatga

SEQ ID NO: 44188 - DNA, 25 bp, Probe sequence
actcatgctggtaatctcattatta

SEQ ID NO: 44189 - DNA, 25 bp, Probe sequence
tactcatgctggtaatctcattatt

SEQ ID NO: 44190 - DNA, 25 bp, Probe sequence
atagttatagggtttgggatgactg

SEQ ID NO: 44191 - DNA, 25 bp, Probe sequence
caatagttatagggtttgggatgac

SEQ ID NO: 44192 - DNA, 25 bp, Probe sequence
atatactcatgctggtaatctcatt

SEQ ID NO: 44193 - DNA, 25 bp, Probe sequence
atactcatgctggtaatctcattat

SEQ ID NO: 44194 - DNA, 25 bp, Probe sequence
aatagttatagggtttgggatgact

SEQ ID NO: 44195 - DNA, 25 bp, Probe sequence
tagttatagggtttgggatgactgc

SEQ ID NO: 44196 - DNA, 25 bp, Probe sequence
cgtcttcaggtatgggtctatattt

SEQ ID NO: 44197 - DNA, 25 bp, Probe sequence
aagactatggcagaggtattagtaa

SEQ ID NO: 44198 - DNA, 25 bp, Probe sequence
atatgaatggtctcgtataaactcg

SEQ ID NO: 44199 - DNA, 25 bp, Probe sequence
tgaaatctcgcatgaactggatatt

SEQ ID NO: 44200 - DNA, 25 bp, Probe sequence
ttgaaatctcgcatgaactggatat

SEQ ID NO: 44201 - DNA, 25 bp, Probe sequence
tttgaaatctcgcatgaactggata

SEQ ID NO: 44202 - DNA, 25 bp, Probe sequence
ttagtcaggttaaaggtattggttt

SEQ ID NO: 44203 - DNA, 25 bp, Probe sequence
caaacgcattgaaatatagtgagaa

SEQ ID NO: 44204 - DNA, 25 bp, Probe sequence
taaacataaagatttagcggaaacg

SEQ ID NO: 44205 - DNA, 25 bp, Probe sequence
acgattaacaagaatgaatgaagca

SEQ ID NO: 44206 - DNA, 25 bp, Probe sequence
aggaattatctgatatacgcaagca

SEQ ID NO: 44207 - DNA, 25 bp, Probe sequence
atatgtctattgaagaaggcgagtt

SEQ ID NO: 44208 - DNA, 25 bp, Probe sequence
aatatgtctattgaagaaggcgagt

SEQ ID NO: 44209 - DNA, 25 bp, Probe sequence
ggaattatctgatatacgcaagcat

SEQ ID NO: 44210 - DNA, 25 bp, Probe sequence
aaggaattatctgatatacgcaagc

SEQ ID NO: 44211 - DNA, 25 bp, Probe sequence
aacgattaacaagaatgaatgaagc

SEQ ID NO: 44212 - DNA, 25 bp, Probe sequence
cgattaacaagaatgaatgaagcat

SEQ ID NO: 44213 - DNA, 25 bp, Probe sequence
acaaggaattatctgatatacgcaa

SEQ ID NO: 44214 - DNA, 25 bp, Probe sequence
tgatgaagatggtagacctaagagt

SEQ ID NO: 44215 - DNA, 25 bp, Probe sequence
atgatgaagatggtagacctaagag

SEQ ID NO: 44216 - DNA, 25 bp, Probe sequence
gatgaagatggtagacctaagagta

SEQ ID NO: 44217 - DNA, 25 bp, Probe sequence
catgatgaagatggtagacctaaga

SEQ ID NO: 44218 - DNA, 25 bp, Probe sequence
atgaagatggtagacctaagagtaa

SEQ ID NO: 44219 - DNA, 25 bp, Probe sequence
aaataccaacgaataaagcaccaaa

SEQ ID NO: 44220 - DNA, 25 bp, Probe sequence
tccaactaaaggtatcaaagacgaa

SEQ ID NO: 44221 - DNA, 25 bp, Probe sequence
ttccaactaaaggtatcaaagacga

SEQ ID NO: 44222 - DNA, 25 bp, Probe sequence
aataccaacgaataaagcaccaaag

SEQ ID NO: 44223 - DNA, 25 bp, Probe sequence
aattatcaatatgctgttccaagtt

SEQ ID NO: 44224 - DNA, 25 bp, Probe sequence
tgccacaaataaatagtttcaaggt

SEQ ID NO: 44225 - DNA, 25 bp, Probe sequence
atccagcttcacaacaagttgataa

SEQ ID NO: 44226 - DNA, 25 bp, Probe sequence
aatccagcttcacaacaagttgata

SEQ ID NO: 44227 - DNA, 25 bp, Probe sequence
atcaatatgctgttccaagttatag

SEQ ID NO: 44228 - DNA, 25 bp, Probe sequence
gtgccacaaataaatagtttcaagg

SEQ ID NO: 44229 - DNA, 25 bp, Probe sequence
tccagcttcacaacaagttgataag

SEQ ID NO: 44230 - DNA, 25 bp, Probe sequence
caatatgctgttccaagttatagcc

SEQ ID NO: 44231 - DNA, 25 bp, Probe sequence
gcaaacccactacaagaaagttatt

SEQ ID NO: 44232 - DNA, 25 bp, Probe sequence
tggaaagttacgaacacacagaata

SEQ ID NO: 44233 - DNA, 25 bp, Probe sequence
ggaaagttacgaacacacagaatat

SEQ ID NO: 44234 - DNA, 25 bp, Probe sequence
aatttggaaagttacgaacacacag

SEQ ID NO: 44235 - DNA, 25 bp, Probe sequence
taatttggaaagttacgaacacaca

SEQ ID NO: 44236 - DNA, 25 bp, Probe sequence
ttggaaagttacgaacacacagaat

SEQ ID NO: 44237 - DNA, 25 bp, Probe sequence
atttggaaagttacgaacacacaga

SEQ ID NO: 44238 - DNA, 25 bp, Probe sequence
tttggaaagttacgaacacacagaa

SEQ ID NO: 44239 - DNA, 25 bp, Probe sequence
gaaagttacgaacacacagaatatg

SEQ ID NO: 44240 - DNA, 25 bp, Probe sequence
ataatttggaaagttacgaacacac

SEQ ID NO: 44241 - DNA, 25 bp, Probe sequence
tggctgaacttgaatccgataatat

SEQ ID NO: 44242 - DNA, 25 bp, Probe sequence
tcaaggatatggctacaagaagatt

SEQ ID NO: 44243 - DNA, 25 bp, Probe sequence
taagcaatcaggcagaacagataat

SEQ ID NO: 44244 - DNA, 25 bp, Probe sequence
ataagcaatcaggcagaacagataa

SEQ ID NO: 44245 - DNA, 25 bp, Probe sequence
ctggctgaacttgaatccgataata

SEQ ID NO: 44246 - DNA, 25 bp, Probe sequence
gataagcaatcaggcagaacagata

SEQ ID NO: 44247 - DNA, 25 bp, Probe sequence
cgtgtcatcaatcaatatggtcaat

SEQ ID NO: 44248 - DNA, 25 bp, Probe sequence
aagcaatccgtaataagaagcaact

SEQ ID NO: 44249 - DNA, 25 bp, Probe sequence
caagcaatccgtaataagaagcaac

SEQ ID NO: 44250 - DNA, 25 bp, Probe sequence
caacttttcaataatacccctctcg

SEQ ID NO: 44251 - DNA, 25 bp, Probe sequence
acaacttttcaataatacccctctc

SEQ ID NO: 44252 - DNA, 25 bp, Probe sequence
aacaacttttcaataatacccctct

SEQ ID NO: 44253 - DNA, 25 bp, Probe sequence
aaacaacttttcaataatacccctc

SEQ ID NO: 44254 - DNA, 25 bp, Probe sequence
acttttcaataatacccctctcgac

SEQ ID NO: 44255 - DNA, 25 bp, Probe sequence
aacttttcaataatacccctctcga

SEQ ID NO: 44256 - DNA, 25 bp, Probe sequence
cttttcaataatacccctctcgacg

SEQ ID NO: 44257 - DNA, 25 bp, Probe sequence
ttttcaataatacccctctcgacga

SEQ ID NO: 44258 - DNA, 25 bp, Probe sequence
tttcaataatacccctctcgacgaa

SEQ ID NO: 44259 - DNA, 25 bp, Probe sequence
gcaaaatggctcaaaaggagataac

SEQ ID NO: 44260 - DNA, 25 bp, Probe sequence
ttttatgacagtgatgatgtggggt

SEQ ID NO: 44261 - DNA, 25 bp, Probe sequence
ataaagcagccacatgtagcattaa

SEQ ID NO: 44262 - DNA, 25 bp, Probe sequence
taaagcagccacatgtagcattaaa

SEQ ID NO: 44263 - DNA, 25 bp, Probe sequence
gataaagcagccacatgtagcatta

SEQ ID NO: 44264 - DNA, 25 bp, Probe sequence
tttatgacagtgatgatgtggggtg

SEQ ID NO: 44265 - DNA, 25 bp, Probe sequence
agcaaaatggctcaaaaggagataa

SEQ ID NO: 44266 - DNA, 25 bp, Probe sequence
cagcaaaatggctcaaaaggagata

SEQ ID NO: 44267 - DNA, 25 bp, Probe sequence
tcagcaaaatggctcaaaaggagat

SEQ ID NO: 44268 - DNA, 25 bp, Probe sequence
gttattgtagattgccagtagtagc

SEQ ID NO: 44269 - DNA, 25 bp, Probe sequence
taggaacaagaatgattaacaacgg

SEQ ID NO: 44270 - DNA, 25 bp, Probe sequence
gccatacagtaggaacaagaatgat

SEQ ID NO: 44271 - DNA, 25 bp, Probe sequence
ggttattgtagattgccagtagtag

SEQ ID NO: 44272 - DNA, 25 bp, Probe sequence
caagtagagactaatagccgtgtta

SEQ ID NO: 44273 - DNA, 25 bp, Probe sequence
aagcaatgacggagtatagaactta

SEQ ID NO: 44274 - DNA, 25 bp, Probe sequence
tagagcgtacagaagagttattagc

SEQ ID NO: 44275 - DNA, 25 bp, Probe sequence
gcgtacagaagagttattagccata

SEQ ID NO: 44276 - DNA, 25 bp, Probe sequence
gtaggaacaagaatgattaacaacg

SEQ ID NO: 44277 - DNA, 25 bp, Probe sequence
accagctaatagaaccagtaatgaa

SEQ ID NO: 44278 - DNA, 25 bp, Probe sequence
aagaataccagctaatagaaccagt

SEQ ID NO: 44279 - DNA, 25 bp, Probe sequence
taccagctaatagaaccagtaatga

SEQ ID NO: 44280 - DNA, 25 bp, Probe sequence
agaataccagctaatagaaccagta

SEQ ID NO: 44281 - DNA, 25 bp, Probe sequence
gaaggttcaaaggatagaagtggag

SEQ ID NO: 44282 - DNA, 25 bp, Probe sequence
aggttcaaaggatagaagtggagaa

SEQ ID NO: 44283 - DNA, 25 bp, Probe sequence
aaggttcaaaggatagaagtggaga

SEQ ID NO: 44284 - DNA, 25 bp, Probe sequence
ataccagctaatagaaccagtaatg

SEQ ID NO: 44285 - DNA, 25 bp, Probe sequence
gaataccagctaatagaaccagtaa

SEQ ID NO: 44286 - DNA, 25 bp, Probe sequence
aattgtggaggtgatagaatgagtg

SEQ ID NO: 44287 - DNA, 25 bp, Probe sequence
attgtggaggtgatagaatgagtga

SEQ ID NO: 44288 - DNA, 25 bp, Probe sequence
aaattgtggaggtgatagaatgagt

SEQ ID NO: 44289 - DNA, 25 bp, Probe sequence
aaaattgtggaggtgatagaatgag

SEQ ID NO: 44290 - DNA, 25 bp, Probe sequence
taggttattgaagaagccacacatc

SEQ ID NO: 44291 - DNA, 25 bp, Probe sequence
gtaggttattgaagaagccacacat

SEQ ID NO: 44292 - DNA, 25 bp, Probe sequence
gaagaagccacacatcaagcaatat

SEQ ID NO: 44293 - DNA, 25 bp, Probe sequence
tgtaggttattgaagaagccacaca

SEQ ID NO: 44294 - DNA, 25 bp, Probe sequence
aggttattgaagaagccacacatca

SEQ ID NO: 44295 - DNA, 25 bp, Probe sequence
aagcgtggagaatataaagagaatc

SEQ ID NO: 44296 - DNA, 25 bp, Probe sequence
tgaagaagccacacatcaagcaata

SEQ ID NO: 44297 - DNA, 25 bp, Probe sequence
gacagggtgtaggttattgaagaag

SEQ ID NO: 44298 - DNA, 25 bp, Probe sequence
ggtgtaggttattgaagaagccaca

SEQ ID NO: 44299 - DNA, 25 bp, Probe sequence
aactattccacactgatagaggcaa

SEQ ID NO: 44300 - DNA, 25 bp, Probe sequence
ggttgtccttatgataacgcagttg

SEQ ID NO: 44301 - DNA, 25 bp, Probe sequence
tattccacactgatagaggcaaaga

SEQ ID NO: 44302 - DNA, 25 bp, Probe sequence
aggttgtccttatgataacgcagtt

SEQ ID NO: 44303 - DNA, 25 bp, Probe sequence
gaacaaatcaaactattccacactg

SEQ ID NO: 44304 - DNA, 25 bp, Probe sequence
ccacactgatagaggcaaagaattt

SEQ ID NO: 44305 - DNA, 25 bp, Probe sequence
aacaaatcaaactattccacactga

SEQ ID NO: 44306 - DNA, 25 bp, Probe sequence
tgaacaaatcaaactattccacact

SEQ ID NO: 44307 - DNA, 25 bp, Probe sequence
tcaaactattccacactgatagagg

SEQ ID NO: 44308 - DNA, 25 bp, Probe sequence
gtctaccgttgggttcaagaatatg

SEQ ID NO: 44309 - DNA, 25 bp, Probe sequence
ccttactttattcaccaaatgcgaa

SEQ ID NO: 44310 - DNA, 25 bp, Probe sequence
agaagaagggcaagcaattagtaaa

SEQ ID NO: 44311 - DNA, 25 bp, Probe sequence
cttactttattcaccaaatgcgaaa

SEQ ID NO: 44312 - DNA, 25 bp, Probe sequence
cccttactttattcaccaaatgcga

SEQ ID NO: 44313 - DNA, 25 bp, Probe sequence
tttattcaccaaatgcgaaagatcc

SEQ ID NO: 44314 - DNA, 25 bp, Probe sequence
gtggaaatgttagaagaagggcaag

SEQ ID NO: 44315 - DNA, 25 bp, Probe sequence
ttattcaccaaatgcgaaagatcct

SEQ ID NO: 44316 - DNA, 25 bp, Probe sequence
tattcaccaaatgcgaaagatcctc

SEQ ID NO: 44317 - DNA, 25 bp, Probe sequence
actttattcaccaaatgcgaaagat

SEQ ID NO: 44318 - DNA, 25 bp, Probe sequence
atattaacaacaggtgtgatgacag

SEQ ID NO: 44319 - DNA, 25 bp, Probe sequence
tattaacaacaggtgtgatgacagc

SEQ ID NO: 44320 - DNA, 25 bp, Probe sequence
gcattaggaatattaacaacaggtg

SEQ ID NO: 44321 - DNA, 25 bp, Probe sequence
agcattaggaatattaacaacaggt

SEQ ID NO: 44322 - DNA, 25 bp, Probe sequence
cgtatgtttgatgtgctggatagta

SEQ ID NO: 44323 - DNA, 25 bp, Probe sequence
ggaatattaacaacaggtgtgatga

SEQ ID NO: 44324 - DNA, 25 bp, Probe sequence
aggaatattaacaacaggtgtgatg

SEQ ID NO: 44325 - DNA, 25 bp, Probe sequence
gtatgtttgatgtgctggatagtaa

SEQ ID NO: 44326 - DNA, 25 bp, Probe sequence
cgaaagtaaagttggatgaaacaca

SEQ ID NO: 44327 - DNA, 25 bp, Probe sequence
aagagacaagcacgacatatcatat

SEQ ID NO: 44328 - DNA, 25 bp, Probe sequence
gacaagcacgacatatcatatactg

SEQ ID NO: 44329 - DNA, 25 bp, Probe sequence
agacaagcacgacatatcatatact

SEQ ID NO: 44330 - DNA, 25 bp, Probe sequence
gaagagacaagcacgacatatcata

SEQ ID NO: 44331 - DNA, 25 bp, Probe sequence
aagaagcattacaccgatactacac

SEQ ID NO: 44332 - DNA, 25 bp, Probe sequence
gagacaagcacgacatatcatatac

SEQ ID NO: 44333 - DNA, 25 bp, Probe sequence
agagacaagcacgacatatcatata

SEQ ID NO: 44334 - DNA, 25 bp, Probe sequence
aagtattattgcctggagatgagta

SEQ ID NO: 44335 - DNA, 25 bp, Probe sequence
gaagcattacaccgatactacactg

SEQ ID NO: 44336 - DNA, 25 bp, Probe sequence
cctatgatgaatgaagtaattggca

SEQ ID NO: 44337 - DNA, 25 bp, Probe sequence
acctatgatgaatgaagtaattggc

SEQ ID NO: 44338 - DNA, 25 bp, Probe sequence
tgatgaatgaagtaattggcaatcc

SEQ ID NO: 44339 - DNA, 25 bp, Probe sequence
ttcgttgtggaatctattgatcgtt

SEQ ID NO: 44340 - DNA, 25 bp, Probe sequence
atgatgaatgaagtaattggcaatc

SEQ ID NO: 44341 - DNA, 25 bp, Probe sequence
gattataggttatgcgagagtatca

SEQ ID NO: 44342 - DNA, 25 bp, Probe sequence
tgattataggttatgcgagagtatc

SEQ ID NO: 44343 - DNA, 25 bp, Probe sequence
ctatgatgaatgaagtaattggcaa

SEQ ID NO: 44344 - DNA, 25 bp, Probe sequence
ttataggttatgcgagagtatcatc

SEQ ID NO: 44345 - DNA, 25 bp, Probe sequence
gtcattgaacgcttacaggttgatt

SEQ ID NO: 44346 - DNA, 25 bp, Probe sequence
cattgaacgcttacaggttgatttg

SEQ ID NO: 44347 - DNA, 25 bp, Probe sequence
tcattgaacgcttacaggttgattt

SEQ ID NO: 44348 - DNA, 25 bp, Probe sequence
attgaaacaaaggcaagattacaaa

SEQ ID NO: 44349 - DNA, 25 bp, Probe sequence
attgaacgcttacaggttgatttgt

SEQ ID NO: 44350 - DNA, 25 bp, Probe sequence
tattgaaacaaaggcaagattacaa

SEQ ID NO: 44351 - DNA, 25 bp, Probe sequence
ttattgaaacaaaggcaagattaca

SEQ ID NO: 44352 - DNA, 25 bp, Probe sequence
cgtgtctgtctcatatccaattgaa

SEQ ID NO: 44353 - DNA, 25 bp, Probe sequence
cgatctataagtaatatggtgttgt

SEQ ID NO: 44354 - DNA, 25 bp, Probe sequence
aatgagtcgatcagttactgctata

SEQ ID NO: 44355 - DNA, 25 bp, Probe sequence
tgagtcgatcagttactgctataga

SEQ ID NO: 44356 - DNA, 25 bp, Probe sequence
atgagtcgatcagttactgctatag

SEQ ID NO: 44357 - DNA, 25 bp, Probe sequence
gagtcgatcagttactgctatagaa

SEQ ID NO: 44358 - DNA, 25 bp, Probe sequence
tactgctatagaaattgatggaggc

SEQ ID NO: 44359 - DNA, 25 bp, Probe sequence
ctgctatagaaattgatggaggctt

SEQ ID NO: 44360 - DNA, 25 bp, Probe sequence
actgctatagaaattgatggaggct

SEQ ID NO: 44361 - DNA, 25 bp, Probe sequence
aaatgagtcgatcagttactgctat

SEQ ID NO: 44362 - DNA, 25 bp, Probe sequence
ttactgctatagaaattgatggagg

SEQ ID NO: 44363 - DNA, 25 bp, Probe sequence
ccaacatactagcgaaggaacttat

SEQ ID NO: 44364 - DNA, 25 bp, Probe sequence
caacatactagcgaaggaacttata

SEQ ID NO: 44365 - DNA, 25 bp, Probe sequence
actagcgaaggaacttatatccatt

SEQ ID NO: 44366 - DNA, 25 bp, Probe sequence
acatactagcgaaggaacttatatc

SEQ ID NO: 44367 - DNA, 25 bp, Probe sequence
tactagcgaaggaacttatatccat

SEQ ID NO: 44368 - DNA, 25 bp, Probe sequence
atactagcgaaggaacttatatcca

SEQ ID NO: 44369 - DNA, 25 bp, Probe sequence
catactagcgaaggaacttatatcc

SEQ ID NO: 44370 - DNA, 25 bp, Probe sequence
aacatactagcgaaggaacttatat

SEQ ID NO: 44371 - DNA, 25 bp, Probe sequence
gccaacatactagcgaaggaactta

SEQ ID NO: 44372 - DNA, 25 bp, Probe sequence
tcaccaagataacttatcagatgaa

SEQ ID NO: 44373 - DNA, 25 bp, Probe sequence
tcaatcaccaagataacttatcaga

SEQ ID NO: 44374 - DNA, 25 bp, Probe sequence
caccaagataacttatcagatgaag

SEQ ID NO: 44375 - DNA, 25 bp, Probe sequence
atcaccaagataacttatcagatga

SEQ ID NO: 44376 - DNA, 25 bp, Probe sequence
accaagataacttatcagatgaaga

SEQ ID NO: 44377 - DNA, 25 bp, Probe sequence
tatgatttaacaccttcgccgttag

SEQ ID NO: 44378 - DNA, 25 bp, Probe sequence
ttcaatcaccaagataacttatcag

SEQ ID NO: 44379 - DNA, 25 bp, Probe sequence
gtatgatttaacaccttcgccgtta

SEQ ID NO: 44380 - DNA, 25 bp, Probe sequence
aatcaccaagataacttatcagatg

SEQ ID NO: 44381 - DNA, 25 bp, Probe sequence
attatgatggtgtggttataggtgg

SEQ ID NO: 44382 - DNA, 25 bp, Probe sequence
tatgatggtgtggttataggtggtt

SEQ ID NO: 44383 - DNA, 25 bp, Probe sequence
ttatgatggtgtggttataggtggt

SEQ ID NO: 44384 - DNA, 25 bp, Probe sequence
tattatgatggtgtggttataggtg

SEQ ID NO: 44385 - DNA, 25 bp, Probe sequence
ttattatgatggtgtggttataggt

SEQ ID NO: 44386 - DNA, 25 bp, Probe sequence
gcgactgagaaagatgtaaatgatt

SEQ ID NO: 44387 - DNA, 25 bp, Probe sequence
aatggcgactgagaaagatgtaaat

SEQ ID NO: 44388 - DNA, 25 bp, Probe sequence
cgtatcctggtgctaaagaaatgat

SEQ ID NO: 44389 - DNA, 25 bp, Probe sequence
ggcgactgagaaagatgtaaatgat

SEQ ID NO: 44390 - DNA, 25 bp, Probe sequence
ttagtgatagcctacatcttgaacc

SEQ ID NO: 44391 - DNA, 25 bp, Probe sequence
tagtgatagcctacatcttgaacca

SEQ ID NO: 44392 - DNA, 25 bp, Probe sequence
agtgatagcctacatcttgaaccaa

SEQ ID NO: 44393 - DNA, 25 bp, Probe sequence
agtcattagtattactgctggttgc

SEQ ID NO: 44394 - DNA, 25 bp, Probe sequence
tcaatgtcgattcaacctaatggaa

SEQ ID NO: 44395 - DNA, 25 bp, Probe sequence
gtcattagtattactgctggttgcg

SEQ ID NO: 44396 - DNA, 25 bp, Probe sequence
gtcaatgtcgattcaacctaatgga

SEQ ID NO: 44397 - DNA, 25 bp, Probe sequence
ataccaacaaataaagcaccaaagt

SEQ ID NO: 44398 - DNA, 25 bp, Probe sequence
agaaattcaagaacaacaaatggct

SEQ ID NO: 44399 - DNA, 25 bp, Probe sequence
tatagatgatgaaggtggagaagtg

SEQ ID NO: 44400 - DNA, 25 bp, Probe sequence
atagatgatgaaggtggagaagtgt

SEQ ID NO: 44401 - DNA, 25 bp, Probe sequence
tagatgatgaaggtggagaagtgtt

SEQ ID NO: 44402 - DNA, 25 bp, Probe sequence
gaacctggaagcaatgaattatact

SEQ ID NO: 44403 - DNA, 25 bp, Probe sequence
agaacctggaagcaatgaattatac

SEQ ID NO: 44404 - DNA, 25 bp, Probe sequence
atatagatgatgaaggtggagaagt

SEQ ID NO: 44405 - DNA, 25 bp, Probe sequence
acctggaagcaatgaattatactac

SEQ ID NO: 44406 - DNA, 25 bp, Probe sequence
tggcttatatagatgatgaaggtgg

SEQ ID NO: 44407 - DNA, 25 bp, Probe sequence
ggcttatatagatgatgaaggtgga

SEQ ID NO: 44408 - DNA, 25 bp, Probe sequence
attgttggcatgatacctgtagaat

SEQ ID NO: 44409 - DNA, 25 bp, Probe sequence
gattgttggcatgatacctgtagaa

SEQ ID NO: 44410 - DNA, 25 bp, Probe sequence
gagattgttggcatgatacctgtag

SEQ ID NO: 44411 - DNA, 25 bp, Probe sequence
ttgttggcatgatacctgtagaatg

SEQ ID NO: 44412 - DNA, 25 bp, Probe sequence
agattgttggcatgatacctgtaga

SEQ ID NO: 44413 - DNA, 25 bp, Probe sequence
aatgagattgttggcatgatacctg

SEQ ID NO: 44414 - DNA, 25 bp, Probe sequence
tgagattgttggcatgatacctgta

SEQ ID NO: 44415 - DNA, 25 bp, Probe sequence
atgtaaatgatagaggtggagaggt

SEQ ID NO: 44416 - DNA, 25 bp, Probe sequence
tgtaaatgatagaggtggagaggtc

SEQ ID NO: 44417 - DNA, 25 bp, Probe sequence
ctagatgatgaaggtggagaagtcg

SEQ ID NO: 44418 - DNA, 25 bp, Probe sequence
gcaaatgagattagtgggatgatac

SEQ ID NO: 44419 - DNA, 25 bp, Probe sequence
caaatgagattagtgggatgatacc

SEQ ID NO: 44420 - DNA, 25 bp, Probe sequence
cctagatgatgaaggtggagaagtc

SEQ ID NO: 44421 - DNA, 25 bp, Probe sequence
tacaattgcctacctagatgatgaa

SEQ ID NO: 44422 - DNA, 25 bp, Probe sequence
atacaattgcctacctagatgatga

SEQ ID NO: 44423 - DNA, 25 bp, Probe sequence
attagtgggatgataccagtagagt

SEQ ID NO: 44424 - DNA, 25 bp, Probe sequence
tgagattagtgggatgataccagta

SEQ ID NO: 44425 - DNA, 25 bp, Probe sequence
agattagtgggatgataccagtaga

SEQ ID NO: 44426 - DNA, 25 bp, Probe sequence
tatgtagatgatgaaggtggagaag

SEQ ID NO: 44427 - DNA, 25 bp, Probe sequence
atgtagatgatgaaggtggagaagt

SEQ ID NO: 44428 - DNA, 25 bp, Probe sequence
ttatgtagatgatgaaggtggagaa

SEQ ID NO: 44429 - DNA, 25 bp, Probe sequence
cttatgtagatgatgaaggtggaga

SEQ ID NO: 44430 - DNA, 25 bp, Probe sequence
ttgcttatgtagatgatgaaggtgg

SEQ ID NO: 44431 - DNA, 25 bp, Probe sequence
gcttatgtagatgatgaaggtggag

SEQ ID NO: 44432 - DNA, 25 bp, Probe sequence
attgcttatgtagatgatgaaggtg

SEQ ID NO: 44433 - DNA, 25 bp, Probe sequence
tgtagatgatgaaggtggagaagtc

SEQ ID NO: 44434 - DNA, 25 bp, Probe sequence
tgcttatgtagatgatgaaggtgga

SEQ ID NO: 44435 - DNA, 25 bp, Probe sequence
ctaacgctaatcctaaccatactgt

SEQ ID NO: 44436 - DNA, 25 bp, Probe sequence
taacgctaatcctaaccatactgtg

SEQ ID NO: 44437 - DNA, 25 bp, Probe sequence
tctaacgctaatcctaaccatactg

SEQ ID NO: 44438 - DNA, 25 bp, Probe sequence
tgtatctaacgctaatcctaaccat

SEQ ID NO: 44439 - DNA, 25 bp, Probe sequence
atgtatctaacgctaatcctaacca

SEQ ID NO: 44440 - DNA, 25 bp, Probe sequence
atctaacgctaatcctaaccatact

SEQ ID NO: 44441 - DNA, 25 bp, Probe sequence
acggagacgatgaggaattagataa

SEQ ID NO: 44442 - DNA, 25 bp, Probe sequence
acgctaatcctaaccatactgtgat

SEQ ID NO: 44443 - DNA, 25 bp, Probe sequence
gatgtatctaacgctaatcctaacc

SEQ ID NO: 44444 - DNA, 25 bp, Probe sequence
taccgagatatgaagcagaatacaa

SEQ ID NO: 44445 - DNA, 25 bp, Probe sequence
taataggttgtgatagttcaagcga

SEQ ID NO: 44446 - DNA, 25 bp, Probe sequence
aataggttgtgatagttcaagcgat

SEQ ID NO: 44447 - DNA, 25 bp, Probe sequence
taggttgtgatagttcaagcgatac

SEQ ID NO: 44448 - DNA, 25 bp, Probe sequence
ataggttgtgatagttcaagcgata

SEQ ID NO: 44449 - DNA, 25 bp, Probe sequence
aatgtaccgagatatgaagcagaat

SEQ ID NO: 44450 - DNA, 25 bp, Probe sequence
gtaccgagatatgaagcagaataca

SEQ ID NO: 44451 - DNA, 25 bp, Probe sequence
tgtaccgagatatgaagcagaatac

SEQ ID NO: 44452 - DNA, 25 bp, Probe sequence
atgtaccgagatatgaagcagaata

SEQ ID NO: 44453 - DNA, 25 bp, Probe sequence
ttaatagttgttgtagcaggttgtg

SEQ ID NO: 44454 - DNA, 25 bp, Probe sequence
taatagttgttgtagcaggttgtgg

SEQ ID NO: 44455 - DNA, 25 bp, Probe sequence
ttcctagttatgaagcagaatacaa

SEQ ID NO: 44456 - DNA, 25 bp, Probe sequence
tttaatagttgttgtagcaggttgt

SEQ ID NO: 44457 - DNA, 25 bp, Probe sequence
attcctagttatgaagcagaataca

SEQ ID NO: 44458 - DNA, 25 bp, Probe sequence
aatagttgttgtagcaggttgtggc

SEQ ID NO: 44459 - DNA, 25 bp, Probe sequence
tcctagttatgaagcagaatacaaa

SEQ ID NO: 44460 - DNA, 25 bp, Probe sequence
gatgaaatagatgacgaaggcatgg

SEQ ID NO: 44461 - DNA, 25 bp, Probe sequence
ggatgaaatagatgacgaaggcatg

SEQ ID NO: 44462 - DNA, 25 bp, Probe sequence
tgaattggatgatgaaggtatggtt

SEQ ID NO: 44463 - DNA, 25 bp, Probe sequence
gtgaattggatgatgaaggtatggt

SEQ ID NO: 44464 - DNA, 25 bp, Probe sequence
tggataggaatactagaaccgctaa

SEQ ID NO: 44465 - DNA, 25 bp, Probe sequence
ctggataggaatactagaaccgcta

SEQ ID NO: 44466 - DNA, 25 bp, Probe sequence
ggtgaattggatgatgaaggtatgg

SEQ ID NO: 44467 - DNA, 25 bp, Probe sequence
aatctggataggaatactagaaccg

SEQ ID NO: 44468 - DNA, 25 bp, Probe sequence
atctggataggaatactagaaccgc

SEQ ID NO: 44469 - DNA, 25 bp, Probe sequence
tctggataggaatactagaaccgct

SEQ ID NO: 44470 - DNA, 25 bp, Probe sequence
ggataggaatactagaaccgctaaa

SEQ ID NO: 44471 - DNA, 25 bp, Probe sequence
ggcaacaggatattattatacgagc

SEQ ID NO: 44472 - DNA, 25 bp, Probe sequence
gcaacaggatattattatacgagca

SEQ ID NO: 44473 - DNA, 25 bp, Probe sequence
gttgtaatagttcaagcgatactgc

SEQ ID NO: 44474 - DNA, 25 bp, Probe sequence
agttgtaatagttcaagcgatactg

SEQ ID NO: 44475 - DNA, 25 bp, Probe sequence
cgagatagatgacgaaggtatggtt

SEQ ID NO: 44476 - DNA, 25 bp, Probe sequence
aggcaacaggatattattatacgag

SEQ ID NO: 44477 - DNA, 25 bp, Probe sequence
ttgtaatagttcaagcgatactgcg

SEQ ID NO: 44478 - DNA, 25 bp, Probe sequence
aagttgtaatagttcaagcgatact

SEQ ID NO: 44479 - DNA, 25 bp, Probe sequence
aaggcaacaggatattattatacga

SEQ ID NO: 44480 - DNA, 25 bp, Probe sequence
tatcaagtacagataatgtgccaag

SEQ ID NO: 44481 - DNA, 25 bp, Probe sequence
atcaagtacagataatgtgccaagc

SEQ ID NO: 44482 - DNA, 25 bp, Probe sequence
atatcaagtacagataatgtgccaa

SEQ ID NO: 44483 - DNA, 25 bp, Probe sequence
aagtacagataatgtgccaagctac

SEQ ID NO: 44484 - DNA, 25 bp, Probe sequence
caagtacagataatgtgccaagcta

SEQ ID NO: 44485 - DNA, 25 bp, Probe sequence
tatatcaagtacagataatgtgcca

SEQ ID NO: 44486 - DNA, 25 bp, Probe sequence
tacagataatgtgccaagctacgat

SEQ ID NO: 44487 - DNA, 25 bp, Probe sequence
tcaagtacagataatgtgccaagct

SEQ ID NO: 44488 - DNA, 25 bp, Probe sequence
gtacagataatgtgccaagctacga

SEQ ID NO: 44489 - DNA, 25 bp, Probe sequence
tacagcaatggtgatgtctcaatta

SEQ ID NO: 44490 - DNA, 25 bp, Probe sequence
aactaagtaatgaaggcatggtctt

SEQ ID NO: 44491 - DNA, 25 bp, Probe sequence
taatgaaggcatggtcttgtactta

SEQ ID NO: 44492 - DNA, 25 bp, Probe sequence
taagtaatgaaggcatggtcttgta

SEQ ID NO: 44493 - DNA, 25 bp, Probe sequence
ggcatggtcttgtacttagatagaa

SEQ ID NO: 44494 - DNA, 25 bp, Probe sequence
aaggcatggtcttgtacttagatag

SEQ ID NO: 44495 - DNA, 25 bp, Probe sequence
gaaggcatggtcttgtacttagata

SEQ ID NO: 44496 - DNA, 25 bp, Probe sequence
gaactaagtaatgaaggcatggtct

SEQ ID NO: 44497 - DNA, 25 bp, Probe sequence
acagcaatggtgatgtctcaattaa

SEQ ID NO: 44498 - DNA, 25 bp, Probe sequence
ggtcttctgttggatataaggagat

SEQ ID NO: 44499 - DNA, 25 bp, Probe sequence
aaccgagtgaaggagactataatga

SEQ ID NO: 44500 - DNA, 25 bp, Probe sequence
cgagtgaaggagactataatgagta

SEQ ID NO: 44501 - DNA, 25 bp, Probe sequence
ccgagtgaaggagactataatgagt

SEQ ID NO: 44502 - DNA, 25 bp, Probe sequence
accgagtgaaggagactataatgag

SEQ ID NO: 44503 - DNA, 25 bp, Probe sequence
cagagagatgtgaaatgatggagta

SEQ ID NO: 44504 - DNA, 25 bp, Probe sequence
tgtgggttctgtattcatctattgt

SEQ ID NO: 44505 - DNA, 25 bp, Probe sequence
ctaagttattgttcaaaggagcagg

SEQ ID NO: 44506 - DNA, 25 bp, Probe sequence
agttattgttcaaaggagcaggtaa

SEQ ID NO: 44507 - DNA, 25 bp, Probe sequence
acacatgctggtaaccttattatca

SEQ ID NO: 44508 - DNA, 25 bp, Probe sequence
cacatgctggtaaccttattatcat

SEQ ID NO: 44509 - DNA, 25 bp, Probe sequence
tacacatgctggtaaccttattatc

SEQ ID NO: 44510 - DNA, 25 bp, Probe sequence
ttatacacatgctggtaaccttatt

SEQ ID NO: 44511 - DNA, 25 bp, Probe sequence
atacacatgctggtaaccttattat

SEQ ID NO: 44512 - DNA, 25 bp, Probe sequence
aactaaagaagacgaaattgaaggc

SEQ ID NO: 44513 - DNA, 25 bp, Probe sequence
actaaagaagacgaaattgaaggct

SEQ ID NO: 44514 - DNA, 25 bp, Probe sequence
ctaaagaagacgaaattgaaggctt

SEQ ID NO: 44515 - DNA, 25 bp, Probe sequence
aaagaagacgaaattgaaggcttaa

SEQ ID NO: 44516 - DNA, 25 bp, Probe sequence
caaggatcatggaagaggtattagt

SEQ ID NO: 44517 - DNA, 25 bp, Probe sequence
tcaaggatcatggaagaggtattag

SEQ ID NO: 44518 - DNA, 25 bp, Probe sequence
catcaaggatcatggaagaggtatt

SEQ ID NO: 44519 - DNA, 25 bp, Probe sequence
taatcatcaaggatcatggaagagg

SEQ ID NO: 44520 - DNA, 25 bp, Probe sequence
cgttaatcatcaaggatcatggaag

SEQ ID NO: 44521 - DNA, 25 bp, Probe sequence
tcatcaaggatcatggaagaggtat

SEQ ID NO: 44522 - DNA, 25 bp, Probe sequence
atcatcaaggatcatggaagaggta

SEQ ID NO: 44523 - DNA, 25 bp, Probe sequence
tgttgcgttaatcatcaaggatcat

SEQ ID NO: 44524 - DNA, 25 bp, Probe sequence
atgttgcgttaatcatcaaggatca

SEQ ID NO: 44525 - DNA, 25 bp, Probe sequence
agacgacaattattatggtgacaca

SEQ ID NO: 44526 - DNA, 25 bp, Probe sequence
aagacgacaattattatggtgacac

SEQ ID NO: 44527 - DNA, 25 bp, Probe sequence
gacgacaattattatggtgacacat

SEQ ID NO: 44528 - DNA, 25 bp, Probe sequence
caatatgtctgttgaagaaggtgaa

SEQ ID NO: 44529 - DNA, 25 bp, Probe sequence
tgaatgaagagattaagacgacaat

SEQ ID NO: 44530 - DNA, 25 bp, Probe sequence
atgaatgaagagattaagacgacaa

SEQ ID NO: 44531 - DNA, 25 bp, Probe sequence
aatgaatgaagagattaagacgaca

SEQ ID NO: 44532 - DNA, 25 bp, Probe sequence
aatatgtctgttgaagaaggtgaat

SEQ ID NO: 44533 - DNA, 25 bp, Probe sequence
acgacaattattatggtgacacatg

SEQ ID NO: 44534 - DNA, 25 bp, Probe sequence
taccgagttgttgaattacttgaac

SEQ ID NO: 44535 - DNA, 25 bp, Probe sequence
ttaccgagttgttgaattacttgaa

SEQ ID NO: 44536 - DNA, 25 bp, Probe sequence
attaccgagttgttgaattacttga

SEQ ID NO: 44537 - DNA, 25 bp, Probe sequence
gcgtttagtttattaccgagttgtt

SEQ ID NO: 44538 - DNA, 25 bp, Probe sequence
aagcgtttagtttattaccgagttg

SEQ ID NO: 44539 - DNA, 25 bp, Probe sequence
cctattctgtattctcccaatgcta

SEQ ID NO: 44540 - DNA, 25 bp, Probe sequence
aaagcgtttagtttattaccgagtt

SEQ ID NO: 44541 - DNA, 25 bp, Probe sequence
agcgtttagtttattaccgagttgt

SEQ ID NO: 44542 - DNA, 25 bp, Probe sequence
gacctattctgtattctcccaatgc

SEQ ID NO: 44543 - DNA, 25 bp, Probe sequence
gcaacatcttctatccatcatcact

SEQ ID NO: 44544 - DNA, 25 bp, Probe sequence
tatcttaccagcaccacgagtataa

SEQ ID NO: 44545 - DNA, 25 bp, Probe sequence
caacatcttctatccatcatcactt

SEQ ID NO: 44546 - DNA, 25 bp, Probe sequence
atcagaagcacctagatatacacac

SEQ ID NO: 44547 - DNA, 25 bp, Probe sequence
catcagaagcacctagatatacaca

SEQ ID NO: 44548 - DNA, 25 bp, Probe sequence
ccatcagaagcacctagatatacac

SEQ ID NO: 44549 - DNA, 25 bp, Probe sequence
aaccatcagaagcacctagatatac

SEQ ID NO: 44550 - DNA, 25 bp, Probe sequence
accatcagaagcacctagatataca

SEQ ID NO: 44551 - DNA, 25 bp, Probe sequence
gtatcttaccagcaccacgagtata

SEQ ID NO: 44552 - DNA, 25 bp, Probe sequence
tgtaactcagaacgaagagcaacta

SEQ ID NO: 44553 - DNA, 25 bp, Probe sequence
gatgtaactcagaacgaagagcaac

SEQ ID NO: 44554 - DNA, 25 bp, Probe sequence
atgtaactcagaacgaagagcaact

SEQ ID NO: 44555 - DNA, 25 bp, Probe sequence
tgatgtaactcagaacgaagagcaa

SEQ ID NO: 44556 - DNA, 25 bp, Probe sequence
tatgttacataaccatcctggacag

SEQ ID NO: 44557 - DNA, 25 bp, Probe sequence
agcaaccgaattattatttgacagt

SEQ ID NO: 44558 - DNA, 25 bp, Probe sequence
aagcaaccgaattattatttgacag

SEQ ID NO: 44559 - DNA, 25 bp, Probe sequence
aaagcaaccgaattattatttgaca

SEQ ID NO: 44560 - DNA, 25 bp, Probe sequence
gcaaccgaattattatttgacagta

SEQ ID NO: 44561 - DNA, 25 bp, Probe sequence
tgacaatcgttactaataaggaaca

SEQ ID NO: 44562 - DNA, 25 bp, Probe sequence
ccaagtcagataggtttcaaggtaa

SEQ ID NO: 44563 - DNA, 25 bp, Probe sequence
caatgacaatcgttactaataagga

SEQ ID NO: 44564 - DNA, 25 bp, Probe sequence
acaatcgttactaataaggaacaag

SEQ ID NO: 44565 - DNA, 25 bp, Probe sequence
gacaatcgttactaataaggaacaa

SEQ ID NO: 44566 - DNA, 25 bp, Probe sequence
caagtcagataggtttcaaggtaaa

SEQ ID NO: 44567 - DNA, 25 bp, Probe sequence
caatcgttactaataaggaacaagt

SEQ ID NO: 44568 - DNA, 25 bp, Probe sequence
atgacaatcgttactaataaggaac

SEQ ID NO: 44569 - DNA, 25 bp, Probe sequence
aatgacaatcgttactaataaggaa

SEQ ID NO: 44570 - DNA, 25 bp, Probe sequence
gttcaagtggacaacattcaagtta

SEQ ID NO: 44571 - DNA, 25 bp, Probe sequence
tcaagtggacaacattcaagttatt

SEQ ID NO: 44572 - DNA, 25 bp, Probe sequence
ttcaagtggacaacattcaagttat

SEQ ID NO: 44573 - DNA, 25 bp, Probe sequence
ggttcaagtggacaacattcaagtt

SEQ ID NO: 44574 - DNA, 25 bp, Probe sequence
ttggttcaagtggacaacattcaag

SEQ ID NO: 44575 - DNA, 25 bp, Probe sequence
tggttcaagtggacaacattcaagt

SEQ ID NO: 44576 - DNA, 25 bp, Probe sequence
ttcaactgctgattcatcggtgatt

SEQ ID NO: 44577 - DNA, 25 bp, Probe sequence
caagtggacaacattcaagttattt

SEQ ID NO: 44578 - DNA, 25 bp, Probe sequence
tattccgtcaactgaagaccatgtt

SEQ ID NO: 44579 - DNA, 25 bp, Probe sequence
tccatacactgactgttttaataac

SEQ ID NO: 44580 - DNA, 25 bp, Probe sequence
attgttaattcaagaaaggggatta

SEQ ID NO: 44581 - DNA, 25 bp, Probe sequence
tattgttaattcaagaaaggggatt

SEQ ID NO: 44582 - DNA, 25 bp, Probe sequence
atattgttaattcaagaaaggggat

SEQ ID NO: 44583 - DNA, 25 bp, Probe sequence
atccatacactgactgttttaataa

SEQ ID NO: 44584 - DNA, 25 bp, Probe sequence
tatattgttaattcaagaaagggga

SEQ ID NO: 44585 - DNA, 25 bp, Probe sequence
tgttaattcaagaaaggggattaaa

SEQ ID NO: 44586 - DNA, 25 bp, Probe sequence
ttgttaattcaagaaaggggattaa

SEQ ID NO: 44587 - DNA, 25 bp, Probe sequence
ccatacactgactgttttaataaca

SEQ ID NO: 44588 - DNA, 25 bp, Probe sequence
gttaattcaagaaaggggattaaaa

SEQ ID NO: 44589 - DNA, 25 bp, Probe sequence
atgatgactggtggaaagaaagata

SEQ ID NO: 44590 - DNA, 25 bp, Probe sequence
gatgactggtggaaagaaagataca

SEQ ID NO: 44591 - DNA, 25 bp, Probe sequence
tgatgactggtggaaagaaagatac

SEQ ID NO: 44592 - DNA, 25 bp, Probe sequence
tgactggtggaaagaaagatacata

SEQ ID NO: 44593 - DNA, 25 bp, Probe sequence
gatgatgactggtggaaagaaagat

SEQ ID NO: 44594 - DNA, 25 bp, Probe sequence
atgactggtggaaagaaagatacat

SEQ ID NO: 44595 - DNA, 25 bp, Probe sequence
aaagatgaaagcattgagaagaacg

SEQ ID NO: 44596 - DNA, 25 bp, Probe sequence
atgatgatgactggtggaaagaaag

SEQ ID NO: 44597 - DNA, 25 bp, Probe sequence
tggtcttggtattagtttaattgcc

SEQ ID NO: 44598 - DNA, 25 bp, Probe sequence
aagaagaatggctaagtatgtcgct

SEQ ID NO: 44599 - DNA, 25 bp, Probe sequence
gaagaatggctaagtatgtcgcttg

SEQ ID NO: 44600 - DNA, 25 bp, Probe sequence
agaagaatggctaagtatgtcgctt

SEQ ID NO: 44601 - DNA, 25 bp, Probe sequence
caaagaagaatggctaagtatgtcg

SEQ ID NO: 44602 - DNA, 25 bp, Probe sequence
aaagaagaatggctaagtatgtcgc

SEQ ID NO: 44603 - DNA, 25 bp, Probe sequence
gatgcccaagtgaaactgtataatg

SEQ ID NO: 44604 - DNA, 25 bp, Probe sequence
cccaagtgaaactgtataatgttgt

SEQ ID NO: 44605 - DNA, 25 bp, Probe sequence
tgatgcccaagtgaaactgtataat

SEQ ID NO: 44606 - DNA, 25 bp, Probe sequence
atgatgcccaagtgaaactgtataa

SEQ ID NO: 44607 - DNA, 25 bp, Probe sequence
gatgatacacagcagatcactgata

SEQ ID NO: 44608 - DNA, 25 bp, Probe sequence
atgatacacagcagatcactgatat

SEQ ID NO: 44609 - DNA, 25 bp, Probe sequence
tgaaccaactcgttataatcaaccg

SEQ ID NO: 44610 - DNA, 25 bp, Probe sequence
tactttaccagatgatacacagcag

SEQ ID NO: 44611 - DNA, 25 bp, Probe sequence
ttactttaccagatgatacacagca

SEQ ID NO: 44612 - DNA, 25 bp, Probe sequence
ctttaccagatgatacacagcagat

SEQ ID NO: 44613 - DNA, 25 bp, Probe sequence
tacctctaaatgccataccgattac

SEQ ID NO: 44614 - DNA, 25 bp, Probe sequence
cctctaaatgccataccgattactt

SEQ ID NO: 44615 - DNA, 25 bp, Probe sequence
cttacctctaaatgccataccgatt

SEQ ID NO: 44616 - DNA, 25 bp, Probe sequence
attgtcaacgaagcattatgattcc

SEQ ID NO: 44617 - DNA, 25 bp, Probe sequence
ggtgctgacattagaattaagtgtg

SEQ ID NO: 44618 - DNA, 25 bp, Probe sequence
gtgctgacattagaattaagtgtga

SEQ ID NO: 44619 - DNA, 25 bp, Probe sequence
ttgtcaacgaagcattatgattcca

SEQ ID NO: 44620 - DNA, 25 bp, Probe sequence
aattgtcaacgaagcattatgattc

SEQ ID NO: 44621 - DNA, 25 bp, Probe sequence
tgctgacattagaattaagtgtgaa

SEQ ID NO: 44622 - DNA, 25 bp, Probe sequence
tgtcaacgaagcattatgattccac

SEQ ID NO: 44623 - DNA, 25 bp, Probe sequence
atgggtgctgacattagaattaagt

SEQ ID NO: 44624 - DNA, 25 bp, Probe sequence
tgggtgctgacattagaattaagtg

SEQ ID NO: 44625 - DNA, 25 bp, Probe sequence
tgatggctagttcattgaaaggaag

SEQ ID NO: 44626 - DNA, 25 bp, Probe sequence
atgatggctagttcattgaaaggaa

SEQ ID NO: 44627 - DNA, 25 bp, Probe sequence
gatggctagttcattgaaaggaagc

SEQ ID NO: 44628 - DNA, 25 bp, Probe sequence
atggctagttcattgaaaggaagcg

SEQ ID NO: 44629 - DNA, 25 bp, Probe sequence
tgtctaataaattgaaaatgatggc

SEQ ID NO: 44630 - DNA, 25 bp, Probe sequence
ctagttcattgaaaggaagcgcaaa

SEQ ID NO: 44631 - DNA, 25 bp, Probe sequence
tagttcattgaaaggaagcgcaaac

SEQ ID NO: 44632 - DNA, 25 bp, Probe sequence
gtctaataaattgaaaatgatggct

SEQ ID NO: 44633 - DNA, 25 bp, Probe sequence
ataaattgaaaatgatggctagttc

SEQ ID NO: 44634 - DNA, 25 bp, Probe sequence
aggtaaaactaaaataaaagaagct

SEQ ID NO: 44635 - DNA, 25 bp, Probe sequence
aggtaactctgaagaaacaagtaca

SEQ ID NO: 44636 - DNA, 25 bp, Probe sequence
aaggtaactctgaagaaacaagtac

SEQ ID NO: 44637 - DNA, 25 bp, Probe sequence
aaaggtaactctgaagaaacaagta

SEQ ID NO: 44638 - DNA, 25 bp, Probe sequence
ggtaactctgaagaaacaagtacag

SEQ ID NO: 44639 - DNA, 25 bp, Probe sequence
gtaactctgaagaaacaagtacagt

SEQ ID NO: 44640 - DNA, 25 bp, Probe sequence
actctgaagaaacaagtacagtatc

SEQ ID NO: 44641 - DNA, 25 bp, Probe sequence
ctctgaagaaacaagtacagtatct

SEQ ID NO: 44642 - DNA, 25 bp, Probe sequence
aactctgaagaaacaagtacagtat

SEQ ID NO: 44643 - DNA, 25 bp, Probe sequence
aatagaaaacgcaaataacagtggt

SEQ ID NO: 44644 - DNA, 25 bp, Probe sequence
tcaaggatatatagatgcgagtgaa

SEQ ID NO: 44645 - DNA, 25 bp, Probe sequence
atcaaggatatatagatgcgagtga

SEQ ID NO: 44646 - DNA, 25 bp, Probe sequence
gcaagtattcaaacgcaaatagaaa

SEQ ID NO: 44647 - DNA, 25 bp, Probe sequence
aggatatatagatgcgagtgaaacg

SEQ ID NO: 44648 - DNA, 25 bp, Probe sequence
gagtgaaacgctaaaggatattggg

SEQ ID NO: 44649 - DNA, 25 bp, Probe sequence
tatcaaggatatatagatgcgagtg

SEQ ID NO: 44650 - DNA, 25 bp, Probe sequence
cgagtgaaacgctaaaggatattgg

SEQ ID NO: 44651 - DNA, 25 bp, Probe sequence
aaggatatatagatgcgagtgaaac

SEQ ID NO: 44652 - DNA, 25 bp, Probe sequence
caaggatatatagatgcgagtgaaa

SEQ ID NO: 44653 - DNA, 25 bp, Probe sequence
gaaagtaaacttgaaacagatccca

SEQ ID NO: 44654 - DNA, 25 bp, Probe sequence
tgaaagtaaacttgaaacagatccc

SEQ ID NO: 44655 - DNA, 25 bp, Probe sequence
gcgtatgaaagtaaacttgaaacag

SEQ ID NO: 44656 - DNA, 25 bp, Probe sequence
gtttctaatgaccaaatgttagcga

SEQ ID NO: 44657 - DNA, 25 bp, Probe sequence
tgtttctaatgaccaaatgttagcg

SEQ ID NO: 44658 - DNA, 25 bp, Probe sequence
tttctaatgaccaaatgttagcgag

SEQ ID NO: 44659 - DNA, 25 bp, Probe sequence
aagtaaacttgaaacagatcccaaa

SEQ ID NO: 44660 - DNA, 25 bp, Probe sequence
aaagtaaacttgaaacagatcccaa

SEQ ID NO: 44661 - DNA, 25 bp, Probe sequence
ttctaatgaccaaatgttagcgagc

SEQ ID NO: 44662 - DNA, 25 bp, Probe sequence
aagattgatgtctatgctggagtaa

SEQ ID NO: 44663 - DNA, 25 bp, Probe sequence
tgattggtaaggacattgtattgac

SEQ ID NO: 44664 - DNA, 25 bp, Probe sequence
cagcggctcataatgtctattctaa

SEQ ID NO: 44665 - DNA, 25 bp, Probe sequence
atgaagtaggtgattatagtacgcc

SEQ ID NO: 44666 - DNA, 25 bp, Probe sequence
cggtactatgattggtaaggacatt

SEQ ID NO: 44667 - DNA, 25 bp, Probe sequence
ggtactatgattggtaaggacattg

SEQ ID NO: 44668 - DNA, 25 bp, Probe sequence
attggtaaggacattgtattgacag

SEQ ID NO: 44669 - DNA, 25 bp, Probe sequence
gattggtaaggacattgtattgaca

SEQ ID NO: 44670 - DNA, 25 bp, Probe sequence
atgattggtaaggacattgtattga

SEQ ID NO: 44671 - DNA, 25 bp, Probe sequence
ggcagatataatcataattcaggcg

SEQ ID NO: 44672 - DNA, 25 bp, Probe sequence
cggcagatataatcataattcaggc

SEQ ID NO: 44673 - DNA, 25 bp, Probe sequence
gcagatataatcataattcaggcgt

SEQ ID NO: 44674 - DNA, 25 bp, Probe sequence
agtggtagtgcgataagagattcaa

SEQ ID NO: 44675 - DNA, 25 bp, Probe sequence
aagtggtagtgcgataagagattca

SEQ ID NO: 44676 - DNA, 25 bp, Probe sequence
acggcagatataatcataattcagg

SEQ ID NO: 44677 - DNA, 25 bp, Probe sequence
agacaagtcagacaacagacaatat

SEQ ID NO: 44678 - DNA, 25 bp, Probe sequence
gagacaagtcagacaacagacaata

SEQ ID NO: 44679 - DNA, 25 bp, Probe sequence
cagatataatcataattcaggcgtg

SEQ ID NO: 44680 - DNA, 25 bp, Probe sequence
cctcttcgtattatacttggttctg

SEQ ID NO: 44681 - DNA, 25 bp, Probe sequence
ttatggaagacgaagttgacttaga

SEQ ID NO: 44682 - DNA, 25 bp, Probe sequence
tggaagacgaagttgacttagatat

SEQ ID NO: 44683 - DNA, 25 bp, Probe sequence
atggaagacgaagttgacttagata

SEQ ID NO: 44684 - DNA, 25 bp, Probe sequence
tatggaagacgaagttgacttagat

SEQ ID NO: 44685 - DNA, 25 bp, Probe sequence
ggaagacgaagttgacttagatatg

SEQ ID NO: 44686 - DNA, 25 bp, Probe sequence
ctcttcgtattatacttggttctgt

SEQ ID NO: 44687 - DNA, 25 bp, Probe sequence
atctaatggtaatcctgtcacaatt

SEQ ID NO: 44688 - DNA, 25 bp, Probe sequence
gaagacgaagttgacttagatatgt

SEQ ID NO: 44689 - DNA, 25 bp, Probe sequence
atatacaacgagatgtgcgataatg

SEQ ID NO: 44690 - DNA, 25 bp, Probe sequence
caacgagatgtgcgataatgcttaa

SEQ ID NO: 44691 - DNA, 25 bp, Probe sequence
tatacaacgagatgtgcgataatgc

SEQ ID NO: 44692 - DNA, 25 bp, Probe sequence
gagatgtgcgataatgcttaaagta

SEQ ID NO: 44693 - DNA, 25 bp, Probe sequence
atgtgcgataatgcttaaagtatgt

SEQ ID NO: 44694 - DNA, 25 bp, Probe sequence
ttaatatatacaacgagatgtgcga

SEQ ID NO: 44695 - DNA, 25 bp, Probe sequence
tatatacaacgagatgtgcgataat

SEQ ID NO: 44696 - DNA, 25 bp, Probe sequence
gatgtgcgataatgcttaaagtatg

SEQ ID NO: 44697 - DNA, 25 bp, Probe sequence
tgtgcgataatgcttaaagtatgta

SEQ ID NO: 44698 - DNA, 25 bp, Probe sequence
ccagttatctacgcaaacaaatcaa

SEQ ID NO: 44699 - DNA, 25 bp, Probe sequence
accagttatctacgcaaacaaatca

SEQ ID NO: 44700 - DNA, 25 bp, Probe sequence
cagttatctacgcaaacaaatcaat

SEQ ID NO: 44701 - DNA, 25 bp, Probe sequence
tctacgcaaacaaatcaatatgaaa

SEQ ID NO: 44702 - DNA, 25 bp, Probe sequence
atagataatgctatccttaacaacg

SEQ ID NO: 44703 - DNA, 25 bp, Probe sequence
atctacgcaaacaaatcaatatgaa

SEQ ID NO: 44704 - DNA, 25 bp, Probe sequence
tagataatgctatccttaacaacgt

SEQ ID NO: 44705 - DNA, 25 bp, Probe sequence
agttatctacgcaaacaaatcaata

SEQ ID NO: 44706 - DNA, 25 bp, Probe sequence
tatctacgcaaacaaatcaatatga

SEQ ID NO: 44707 - DNA, 25 bp, Probe sequence
taatcatttgcgtctatggtcattg

SEQ ID NO: 44708 - DNA, 25 bp, Probe sequence
gtaatcatttgcgtctatggtcatt

SEQ ID NO: 44709 - DNA, 25 bp, Probe sequence
cgtaatcatttgcgtctatggtcat

SEQ ID NO: 44710 - DNA, 25 bp, Probe sequence
agtatgtgaacgaaatcattatgct

SEQ ID NO: 44711 - DNA, 25 bp, Probe sequence
gtatgtgaacgaaatcattatgctt

SEQ ID NO: 44712 - DNA, 25 bp, Probe sequence
aagtatgtgaacgaaatcattatgc

SEQ ID NO: 44713 - DNA, 25 bp, Probe sequence
aatcatttgcgtctatggtcattgc

SEQ ID NO: 44714 - DNA, 25 bp, Probe sequence
acctacatctaaattgatacaacca

SEQ ID NO: 44715 - DNA, 25 bp, Probe sequence
tatgtgaacgaaatcattatgcttt

SEQ ID NO: 44716 - DNA, 25 bp, Probe sequence
aatgctagaagtgattgaacagaca

SEQ ID NO: 44717 - DNA, 25 bp, Probe sequence
atgctagaagtgattgaacagacag

SEQ ID NO: 44718 - DNA, 25 bp, Probe sequence
gcttaatgctagaagtgattgaaca

SEQ ID NO: 44719 - DNA, 25 bp, Probe sequence
taatgctagaagtgattgaacagac

SEQ ID NO: 44720 - DNA, 25 bp, Probe sequence
gtacagcaagtagaacagttaggtg

SEQ ID NO: 44721 - DNA, 25 bp, Probe sequence
ttaatgctagaagtgattgaacaga

SEQ ID NO: 44722 - DNA, 25 bp, Probe sequence
cttaatgctagaagtgattgaacag

SEQ ID NO: 44723 - DNA, 25 bp, Probe sequence
ggtacagcaagtagaacagttaggt

SEQ ID NO: 44724 - DNA, 25 bp, Probe sequence
atgtttagatgtcaaagatggtcgt

SEQ ID NO: 44725 - DNA, 25 bp, Probe sequence
ttgtaagtgaagtagcagatgaact

SEQ ID NO: 44726 - DNA, 25 bp, Probe sequence
aaagcatttgtaagtgaagtagcag

SEQ ID NO: 44727 - DNA, 25 bp, Probe sequence
agcatttgtaagtgaagtagcagat

SEQ ID NO: 44728 - DNA, 25 bp, Probe sequence
agatagtgcccaatccaataatgaa

SEQ ID NO: 44729 - DNA, 25 bp, Probe sequence
aagatagtgcccaatccaataatga

SEQ ID NO: 44730 - DNA, 25 bp, Probe sequence
caagatagtgcccaatccaataatg

SEQ ID NO: 44731 - DNA, 25 bp, Probe sequence
tcaagatagtgcccaatccaataat

SEQ ID NO: 44732 - DNA, 25 bp, Probe sequence
ttcaagatagtgcccaatccaataa

SEQ ID NO: 44733 - DNA, 25 bp, Probe sequence
tttgtaagtgaagtagcagatgaac

SEQ ID NO: 44734 - DNA, 25 bp, Probe sequence
gaaatcaaagcacatcctaatggtt

SEQ ID NO: 44735 - DNA, 25 bp, Probe sequence
aaatcaaagcacatcctaatggttt

SEQ ID NO: 44736 - DNA, 25 bp, Probe sequence
atgaaatcaaagcacatcctaatgg

SEQ ID NO: 44737 - DNA, 25 bp, Probe sequence
tgaaatcaaagcacatcctaatggt

SEQ ID NO: 44738 - DNA, 25 bp, Probe sequence
atttgctgtttatttctctcctgaa

SEQ ID NO: 44739 - DNA, 25 bp, Probe sequence
tttataataacggtggtggacttta

SEQ ID NO: 44740 - DNA, 25 bp, Probe sequence
tttgctgtttatttctctcctgaaa

SEQ ID NO: 44741 - DNA, 25 bp, Probe sequence
ataataacggtggtggactttataa

SEQ ID NO: 44742 - DNA, 25 bp, Probe sequence
ttataataacggtggtggactttat

SEQ ID NO: 44743 - DNA, 25 bp, Probe sequence
caatggtgaatataataatggcgga

SEQ ID NO: 44744 - DNA, 25 bp, Probe sequence
gtccgttattcaggtcaagaagata

SEQ ID NO: 44745 - DNA, 25 bp, Probe sequence
tccgttattcaggtcaagaagatat

SEQ ID NO: 44746 - DNA, 25 bp, Probe sequence
attcaggtcaagaagatattgccat

SEQ ID NO: 44747 - DNA, 25 bp, Probe sequence
tattcaggtcaagaagatattgcca

SEQ ID NO: 44748 - DNA, 25 bp, Probe sequence
ttcaggtcaagaagatattgccatt

SEQ ID NO: 44749 - DNA, 25 bp, Probe sequence
tcaggtcaagaagatattgccattc

SEQ ID NO: 44750 - DNA, 25 bp, Probe sequence
atggtgaatataataatggcggatt

SEQ ID NO: 44751 - DNA, 25 bp, Probe sequence
aatggtgaatataataatggcggat

SEQ ID NO: 44752 - DNA, 25 bp, Probe sequence
tgattatttctgatgctttcgtaga

SEQ ID NO: 44753 - DNA, 25 bp, Probe sequence
acatgattatttctgatgctttcgt

SEQ ID NO: 44754 - DNA, 25 bp, Probe sequence
tagtaaatacgaagttgtaggtgtt

SEQ ID NO: 44755 - DNA, 25 bp, Probe sequence
tcagtgaaaggcaacatgattattt

SEQ ID NO: 44756 - DNA, 25 bp, Probe sequence
atgattatttctgatgctttcgtag

SEQ ID NO: 44757 - DNA, 25 bp, Probe sequence
atagtaaatacgaagttgtaggtgt

SEQ ID NO: 44758 - DNA, 25 bp, Probe sequence
aaaggcaacatgattatttctgatg

SEQ ID NO: 44759 - DNA, 25 bp, Probe sequence
catgattatttctgatgctttcgta

SEQ ID NO: 44760 - DNA, 25 bp, Probe sequence
tatttctgatgctttcgtagaacca

SEQ ID NO: 44761 - DNA, 25 bp, Probe sequence
aagtacgaagctattggtgtaatct

SEQ ID NO: 44762 - DNA, 25 bp, Probe sequence
agtaagtacgaagctattggtgtaa

SEQ ID NO: 44763 - DNA, 25 bp, Probe sequence
agtacgaagctattggtgtaatcta

SEQ ID NO: 44764 - DNA, 25 bp, Probe sequence
acgaagctattggtgtaatctatgc

SEQ ID NO: 44765 - DNA, 25 bp, Probe sequence
tagtaagtacgaagctattggtgta

SEQ ID NO: 44766 - DNA, 25 bp, Probe sequence
gctattggtgtaatctatgcaggta

SEQ ID NO: 44767 - DNA, 25 bp, Probe sequence
gtaagtacgaagctattggtgtaat

SEQ ID NO: 44768 - DNA, 25 bp, Probe sequence
tgtaatctatgcaggtaataagcca

SEQ ID NO: 44769 - DNA, 25 bp, Probe sequence
gaagctattggtgtaatctatgcag

SEQ ID NO: 44770 - DNA, 25 bp, Probe sequence
atgtcagtagaaggtagcagtattg

SEQ ID NO: 44771 - DNA, 25 bp, Probe sequence
gatgtcagtagaaggtagcagtatt

SEQ ID NO: 44772 - DNA, 25 bp, Probe sequence
aggtagcagtattgtatattcagcg

SEQ ID NO: 44773 - DNA, 25 bp, Probe sequence
gtcagtagaaggtagcagtattgta

SEQ ID NO: 44774 - DNA, 25 bp, Probe sequence
tgatgtcagtagaaggtagcagtat

SEQ ID NO: 44775 - DNA, 25 bp, Probe sequence
tgtcagtagaaggtagcagtattgt

SEQ ID NO: 44776 - DNA, 25 bp, Probe sequence
gtgatgtcagtagaaggtagcagta

SEQ ID NO: 44777 - DNA, 25 bp, Probe sequence
tcagtagaaggtagcagtattgtat

SEQ ID NO: 44778 - DNA, 25 bp, Probe sequence
aaggtagcagtattgtatattcagc

SEQ ID NO: 44779 - DNA, 25 bp, Probe sequence
gcgtctacttcacaccagagattaa

SEQ ID NO: 44780 - DNA, 25 bp, Probe sequence
atacacaacctaaatagcaacaacg

SEQ ID NO: 44781 - DNA, 25 bp, Probe sequence
gcatacacaacctaaatagcaacaa

SEQ ID NO: 44782 - DNA, 25 bp, Probe sequence
tgatgacaatagaaatgcttatggc

SEQ ID NO: 44783 - DNA, 25 bp, Probe sequence
caacctaaatagcaacaacgaacta

SEQ ID NO: 44784 - DNA, 25 bp, Probe sequence
gatgacaatagaaatgcttatggcg

SEQ ID NO: 44785 - DNA, 25 bp, Probe sequence
tacacaacctaaatagcaacaacga

SEQ ID NO: 44786 - DNA, 25 bp, Probe sequence
atgacaatagaaatgcttatggcgt

SEQ ID NO: 44787 - DNA, 25 bp, Probe sequence
cgtctacttcacaccagagattaaa

SEQ ID NO: 44788 - DNA, 25 bp, Probe sequence
attagccaactgaatctgctttatg

SEQ ID NO: 44789 - DNA, 25 bp, Probe sequence
tagccaactgaatctgctttatgtt

SEQ ID NO: 44790 - DNA, 25 bp, Probe sequence
ttagccaactgaatctgctttatgt

SEQ ID NO: 44791 - DNA, 25 bp, Probe sequence
gcacatcaacaccaattttatcaga

SEQ ID NO: 44792 - DNA, 25 bp, Probe sequence
ccaactgaatctgctttatgttcaa

SEQ ID NO: 44793 - DNA, 25 bp, Probe sequence
ggcacatcaacaccaattttatcag

SEQ ID NO: 44794 - DNA, 25 bp, Probe sequence
agccaactgaatctgctttatgttc

SEQ ID NO: 44795 - DNA, 25 bp, Probe sequence
caactgaatctgctttatgttcaag

SEQ ID NO: 44796 - DNA, 25 bp, Probe sequence
gctatgtaccatatacaattgcagt

SEQ ID NO: 44797 - DNA, 25 bp, Probe sequence
attacaacaacattagcattaggcg

SEQ ID NO: 44798 - DNA, 25 bp, Probe sequence
gattacaacaacattagcattaggc

SEQ ID NO: 44799 - DNA, 25 bp, Probe sequence
ttacaacaacattagcattaggcgt

SEQ ID NO: 44800 - DNA, 25 bp, Probe sequence
acaacaacattagcattaggcgtta

SEQ ID NO: 44801 - DNA, 25 bp, Probe sequence
tacaacaacattagcattaggcgtt

SEQ ID NO: 44802 - DNA, 25 bp, Probe sequence
aatgttcaagtgccatatacaatca

SEQ ID NO: 44803 - DNA, 25 bp, Probe sequence
gacattctaacatccagattccata

SEQ ID NO: 44804 - DNA, 25 bp, Probe sequence
ttccatatacaattactgtgaacgg

SEQ ID NO: 44805 - DNA, 25 bp, Probe sequence
gttcaagtgccatatacaatcacag

SEQ ID NO: 44806 - DNA, 25 bp, Probe sequence
gatcaagggataactaaacatgaca

SEQ ID NO: 44807 - DNA, 25 bp, Probe sequence
atcaagggataactaaacatgacat

SEQ ID NO: 44808 - DNA, 25 bp, Probe sequence
gaatttgtgttctataatgcaagca

SEQ ID NO: 44809 - DNA, 25 bp, Probe sequence
tgaatttgtgttctataatgcaagc

SEQ ID NO: 44810 - DNA, 25 bp, Probe sequence
caagggataactaaacatgacatag

SEQ ID NO: 44811 - DNA, 25 bp, Probe sequence
aatttgtgttctataatgcaagcaa

SEQ ID NO: 44812 - DNA, 25 bp, Probe sequence
tcaagggataactaaacatgacata

SEQ ID NO: 44813 - DNA, 25 bp, Probe sequence
tgtgaaattcccagtaacaataaat

SEQ ID NO: 44814 - DNA, 25 bp, Probe sequence
atgtgaaattcccagtaacaataaa

SEQ ID NO: 44815 - DNA, 25 bp, Probe sequence
tatagatggtggaggtggatatgtt

SEQ ID NO: 44816 - DNA, 25 bp, Probe sequence
aactcttgacattgattaccacaca

SEQ ID NO: 44817 - DNA, 25 bp, Probe sequence
ttagtggatgaattacctgaagagc

SEQ ID NO: 44818 - DNA, 25 bp, Probe sequence
gttatcaattcggtggacacaatag

SEQ ID NO: 44819 - DNA, 25 bp, Probe sequence
actcttgacattgattaccacacag

SEQ ID NO: 44820 - DNA, 25 bp, Probe sequence
agttatcaattcggtggacacaata

SEQ ID NO: 44821 - DNA, 25 bp, Probe sequence
caactcttgacattgattaccacac

SEQ ID NO: 44822 - DNA, 25 bp, Probe sequence
aataatgaagacatagcgaagagtg

SEQ ID NO: 44823 - DNA, 25 bp, Probe sequence
attgaagataaggttgatgtaacgg

SEQ ID NO: 44824 - DNA, 25 bp, Probe sequence
tgaacatggcggtaatatcattgat

SEQ ID NO: 44825 - DNA, 25 bp, Probe sequence
gaacatggcggtaatatcattgata

SEQ ID NO: 44826 - DNA, 25 bp, Probe sequence
atagcggaaatcaaagacaagtaga

SEQ ID NO: 44827 - DNA, 25 bp, Probe sequence
tgaaacacaaacaactgctactaac

SEQ ID NO: 44828 - DNA, 25 bp, Probe sequence
caatagcggaaatcaaagacaagta

SEQ ID NO: 44829 - DNA, 25 bp, Probe sequence
ctcaagacaatagcggaaatcaaag

SEQ ID NO: 44830 - DNA, 25 bp, Probe sequence
tagcggaaatcaaagacaagtagat

SEQ ID NO: 44831 - DNA, 25 bp, Probe sequence
aatagcggaaatcaaagacaagtag

SEQ ID NO: 44832 - DNA, 25 bp, Probe sequence
taattatcaattcggtggacacaat

SEQ ID NO: 44833 - DNA, 25 bp, Probe sequence
ttgaggaagacacagaagaagataa

SEQ ID NO: 44834 - DNA, 25 bp, Probe sequence
tgctgatgttgttgaatatgaagaa

SEQ ID NO: 44835 - DNA, 25 bp, Probe sequence
atgctgatgttgttgaatatgaaga

SEQ ID NO: 44836 - DNA, 25 bp, Probe sequence
cgtggatattaagagtgaattaggt

SEQ ID NO: 44837 - DNA, 25 bp, Probe sequence
catgctgatgttgttgaatatgaag

SEQ ID NO: 44838 - DNA, 25 bp, Probe sequence
acagctaatggtcgaattgatactt

SEQ ID NO: 44839 - DNA, 25 bp, Probe sequence
aacagctaatggtcgaattgatact

SEQ ID NO: 44840 - DNA, 25 bp, Probe sequence
agtaacagctaatggtcgaattgat

SEQ ID NO: 44841 - DNA, 25 bp, Probe sequence
aaggtattgtaactggtgctgttag

SEQ ID NO: 44842 - DNA, 25 bp, Probe sequence
agaagacaagcctaagtatgaacaa

SEQ ID NO: 44843 - DNA, 25 bp, Probe sequence
aagaagacaagcctaagtatgaaca

SEQ ID NO: 44844 - DNA, 25 bp, Probe sequence
cagaagaagacaagcctaagtatga

SEQ ID NO: 44845 - DNA, 25 bp, Probe sequence
gaagacaagcctaagtatgaacaag

SEQ ID NO: 44846 - DNA, 25 bp, Probe sequence
acagaagaagacaagcctaagtatg

SEQ ID NO: 44847 - DNA, 25 bp, Probe sequence
cacagaagaagacaagcctaagtat

SEQ ID NO: 44848 - DNA, 25 bp, Probe sequence
gaagaagacaagcctaagtatgaac

SEQ ID NO: 44849 - DNA, 25 bp, Probe sequence
agaagaagacaagcctaagtatgaa

SEQ ID NO: 44850 - DNA, 25 bp, Probe sequence
ggtgttactgttaatggtcgtattg

SEQ ID NO: 44851 - DNA, 25 bp, Probe sequence
cacaaataaactcggatgaagctaa

SEQ ID NO: 44852 - DNA, 25 bp, Probe sequence
agcacaccatatctaatactaaaca

SEQ ID NO: 44853 - DNA, 25 bp, Probe sequence
acaaataaactcggatgaagctaaa

SEQ ID NO: 44854 - DNA, 25 bp, Probe sequence
tcacaaataaactcggatgaagcta

SEQ ID NO: 44855 - DNA, 25 bp, Probe sequence
gcacaccatatctaatactaaacaa

SEQ ID NO: 44856 - DNA, 25 bp, Probe sequence
tttcgactatcttactgcttacttt

SEQ ID NO: 44857 - DNA, 25 bp, Probe sequence
atttcgactatcttactgcttactt

SEQ ID NO: 44858 - DNA, 25 bp, Probe sequence
attcacaaataaactcggatgaagc

SEQ ID NO: 44859 - DNA, 25 bp, Probe sequence
agttatttcgactatcttactgctt

SEQ ID NO: 44860 - DNA, 25 bp, Probe sequence
tcaacaatcaaacagtattcgcttt

SEQ ID NO: 44861 - DNA, 25 bp, Probe sequence
atcaacaatcaaacagtattcgctt

SEQ ID NO: 44862 - DNA, 25 bp, Probe sequence
agcgtgtttatagttctaccaatct

SEQ ID NO: 44863 - DNA, 25 bp, Probe sequence
cagcgtgtttatagttctaccaatc

SEQ ID NO: 44864 - DNA, 25 bp, Probe sequence
catcaacaatcaaacagtattcgct

SEQ ID NO: 44865 - DNA, 25 bp, Probe sequence
gcgtgtttatagttctaccaatctt

SEQ ID NO: 44866 - DNA, 25 bp, Probe sequence
gcatcaacaatcaaacagtattcgc

SEQ ID NO: 44867 - DNA, 25 bp, Probe sequence
acagcgtgtttatagttctaccaat

SEQ ID NO: 44868 - DNA, 25 bp, Probe sequence
acattataacaatttcacacagcgt

SEQ ID NO: 44869 - DNA, 25 bp, Probe sequence
tattcttgataacgcaatagaggca

SEQ ID NO: 44870 - DNA, 25 bp, Probe sequence
attcttgataacgcaatagaggcat

SEQ ID NO: 44871 - DNA, 25 bp, Probe sequence
ttattcttgataacgcaatagaggc

SEQ ID NO: 44872 - DNA, 25 bp, Probe sequence
tcgcagtattggtattattcttgat

SEQ ID NO: 44873 - DNA, 25 bp, Probe sequence
ttcttgataacgcaatagaggcatc

SEQ ID NO: 44874 - DNA, 25 bp, Probe sequence
ttggtattattcttgataacgcaat

SEQ ID NO: 44875 - DNA, 25 bp, Probe sequence
attggtattattcttgataacgcaa

SEQ ID NO: 44876 - DNA, 25 bp, Probe sequence
cgcagtattggtattattcttgata

SEQ ID NO: 44877 - DNA, 25 bp, Probe sequence
attattcttgataacgcaatagagg

SEQ ID NO: 44878 - DNA, 25 bp, Probe sequence
gaaatacccgatgaagtaagtagca

SEQ ID NO: 44879 - DNA, 25 bp, Probe sequence
aatacccgatgaagtaagtagcatt

SEQ ID NO: 44880 - DNA, 25 bp, Probe sequence
aaatacccgatgaagtaagtagcat

SEQ ID NO: 44881 - DNA, 25 bp, Probe sequence
tacccgatgaagtaagtagcattaa

SEQ ID NO: 44882 - DNA, 25 bp, Probe sequence
atacccgatgaagtaagtagcatta

SEQ ID NO: 44883 - DNA, 25 bp, Probe sequence
cgaaatacccgatgaagtaagtagc

SEQ ID NO: 44884 - DNA, 25 bp, Probe sequence
ctgttgtaatacttataatgtcgct

SEQ ID NO: 44885 - DNA, 25 bp, Probe sequence
tctgttgtaatacttataatgtcgc

SEQ ID NO: 44886 - DNA, 25 bp, Probe sequence
tgttgtaatacttataatgtcgctt

SEQ ID NO: 44887 - DNA, 25 bp, Probe sequence
gcattcaatcaacagttacaatctt

SEQ ID NO: 44888 - DNA, 25 bp, Probe sequence
tgcattcaatcaacagttacaatct

SEQ ID NO: 44889 - DNA, 25 bp, Probe sequence
gggaggaaagtatgatgagaacaaa

SEQ ID NO: 44890 - DNA, 25 bp, Probe sequence
agggaggaaagtatgatgagaacaa

SEQ ID NO: 44891 - DNA, 25 bp, Probe sequence
ggaggaaagtatgatgagaacaaat

SEQ ID NO: 44892 - DNA, 25 bp, Probe sequence
gagggaggaaagtatgatgagaaca

SEQ ID NO: 44893 - DNA, 25 bp, Probe sequence
ggcaatacttgaatttcagaacaga

SEQ ID NO: 44894 - DNA, 25 bp, Probe sequence
aggcaatacttgaatttcagaacag

SEQ ID NO: 44895 - DNA, 25 bp, Probe sequence
aaggcaatacttgaatttcagaaca

SEQ ID NO: 44896 - DNA, 25 bp, Probe sequence
ttgttcgtaggcgtattacagtatt

SEQ ID NO: 44897 - DNA, 25 bp, Probe sequence
gttgttcgtaggcgtattacagtat

SEQ ID NO: 44898 - DNA, 25 bp, Probe sequence
tgttgttcgtaggcgtattacagta

SEQ ID NO: 44899 - DNA, 25 bp, Probe sequence
gttcgtaggcgtattacagtatttg

SEQ ID NO: 44900 - DNA, 25 bp, Probe sequence
ttaagcaacaaaggtgaagtgattt

SEQ ID NO: 44901 - DNA, 25 bp, Probe sequence
ttcgtaggcgtattacagtatttgc

SEQ ID NO: 44902 - DNA, 25 bp, Probe sequence
ttatcaatcttgcttgttgtccaaa

SEQ ID NO: 44903 - DNA, 25 bp, Probe sequence
tttatcaatcttgcttgttgtccaa

SEQ ID NO: 44904 - DNA, 25 bp, Probe sequence
tttaggttgccagaagacaaagatt

SEQ ID NO: 44905 - DNA, 25 bp, Probe sequence
attatccgagtatagacattgtgaa

SEQ ID NO: 44906 - DNA, 25 bp, Probe sequence
aattatccgagtatagacattgtga

SEQ ID NO: 44907 - DNA, 25 bp, Probe sequence
ttatccgagtatagacattgtgaaa

SEQ ID NO: 44908 - DNA, 25 bp, Probe sequence
ccaaacaaggatataataagggaaa

SEQ ID NO: 44909 - DNA, 25 bp, Probe sequence
aaattatccgagtatagacattgtg

SEQ ID NO: 44910 - DNA, 25 bp, Probe sequence
tccaaacaaggatataataagggaa

SEQ ID NO: 44911 - DNA, 25 bp, Probe sequence
tatccgagtatagacattgtgaaaa

SEQ ID NO: 44912 - DNA, 25 bp, Probe sequence
atcgggaggatttatttaacatatg

SEQ ID NO: 44913 - DNA, 25 bp, Probe sequence
aatcgggaggatttatttaacatat

SEQ ID NO: 44914 - DNA, 25 bp, Probe sequence
agagaacacaacatcaacagaagta

SEQ ID NO: 44915 - DNA, 25 bp, Probe sequence
tagagaacacaacatcaacagaagt

SEQ ID NO: 44916 - DNA, 25 bp, Probe sequence
gagaacacaacatcaacagaagtaa

SEQ ID NO: 44917 - DNA, 25 bp, Probe sequence
agaacacaacatcaacagaagtaat

SEQ ID NO: 44918 - DNA, 25 bp, Probe sequence
actagagaacacaacatcaacagaa

SEQ ID NO: 44919 - DNA, 25 bp, Probe sequence
ctagagaacacaacatcaacagaag

SEQ ID NO: 44920 - DNA, 25 bp, Probe sequence
tactagagaacacaacatcaacaga

SEQ ID NO: 44921 - DNA, 25 bp, Probe sequence
gtactagagaacacaacatcaacag

SEQ ID NO: 44922 - DNA, 25 bp, Probe sequence
gaacacaacatcaacagaagtaatt

SEQ ID NO: 44923 - DNA, 25 bp, Probe sequence
aagagaagaacgattagaggcatta

SEQ ID NO: 44924 - DNA, 25 bp, Probe sequence
agagaagaacgattagaggcattat

SEQ ID NO: 44925 - DNA, 25 bp, Probe sequence
gagaagaacgattagaggcattatt

SEQ ID NO: 44926 - DNA, 25 bp, Probe sequence
ttattgaatccattgaccttagcat

SEQ ID NO: 44927 - DNA, 25 bp, Probe sequence
attattgaatccattgaccttagca

SEQ ID NO: 44928 - DNA, 25 bp, Probe sequence
acgcagtcttagatcaatatgtacg

SEQ ID NO: 44929 - DNA, 25 bp, Probe sequence
attgaatccattgaccttagcatat

SEQ ID NO: 44930 - DNA, 25 bp, Probe sequence
tattgaatccattgaccttagcata

SEQ ID NO: 44931 - DNA, 25 bp, Probe sequence
ttgaatccattgaccttagcatata

SEQ ID NO: 44932 - DNA, 25 bp, Probe sequence
acgaagaagaaacatcagatagtga

SEQ ID NO: 44933 - DNA, 25 bp, Probe sequence
tacgaagaagaaacatcagatagtg

SEQ ID NO: 44934 - DNA, 25 bp, Probe sequence
cgaagaagaaacatcagatagtgac

SEQ ID NO: 44935 - DNA, 25 bp, Probe sequence
aagaaacatcagatagtgactcaga

SEQ ID NO: 44936 - DNA, 25 bp, Probe sequence
agaagaaacatcagatagtgactca

SEQ ID NO: 44937 - DNA, 25 bp, Probe sequence
gtcaatctactacacaaactagcaa

SEQ ID NO: 44938 - DNA, 25 bp, Probe sequence
agaaacatcagatagtgactcagat

SEQ ID NO: 44939 - DNA, 25 bp, Probe sequence
gaagaaacatcagatagtgactcag

SEQ ID NO: 44940 - DNA, 25 bp, Probe sequence
ctacgaagaagaaacatcagatagt

SEQ ID NO: 44941 - DNA, 25 bp, Probe sequence
cagatacaattcctgttgacaagaa

SEQ ID NO: 44942 - DNA, 25 bp, Probe sequence
cagactcagactcagatagcgattc

SEQ ID NO: 44943 - DNA, 25 bp, Probe sequence
gattcagactcagactcagatagcg

SEQ ID NO: 44944 - DNA, 25 bp, Probe sequence
cgattcagactcagactcagatagc

SEQ ID NO: 44945 - DNA, 25 bp, Probe sequence
gcgattcagactcagactcagatag

SEQ ID NO: 44946 - DNA, 25 bp, Probe sequence
gatagcgattcagactcagactcag

SEQ ID NO: 44947 - DNA, 25 bp, Probe sequence
cagatagcgattcagactcagactc

SEQ ID NO: 44948 - DNA, 25 bp, Probe sequence
tcagacagtgattcagactcagatg

SEQ ID NO: 44949 - DNA, 25 bp, Probe sequence
ttcagatagtgattcagattcagac

SEQ ID NO: 44950 - DNA, 25 bp, Probe sequence
gcagataatatgacattagacagtg

SEQ ID NO: 44951 - DNA, 25 bp, Probe sequence
tgattcagactcagatagcgattcg

SEQ ID NO: 44952 - DNA, 25 bp, Probe sequence
agataatatgacattagacagtggt

SEQ ID NO: 44953 - DNA, 25 bp, Probe sequence
gattcagactcagatagcgattcgg

SEQ ID NO: 44954 - DNA, 25 bp, Probe sequence
cagataatatgacattagacagtgg

SEQ ID NO: 44955 - DNA, 25 bp, Probe sequence
atacatcagacagtgattcagactc

SEQ ID NO: 44956 - DNA, 25 bp, Probe sequence
gatacatcagacagtgattcagact

SEQ ID NO: 44957 - DNA, 25 bp, Probe sequence
agatacatcagacagtgattcagac

SEQ ID NO: 44958 - DNA, 25 bp, Probe sequence
cgaagaagatacatcagacagtgat

SEQ ID NO: 44959 - DNA, 25 bp, Probe sequence
tacaagtgaaccatctacaagtgaa

SEQ ID NO: 44960 - DNA, 25 bp, Probe sequence
ctacaagtgaaccatctacaagtga

SEQ ID NO: 44961 - DNA, 25 bp, Probe sequence
tctacaagtgaaccatctacaagtg

SEQ ID NO: 44962 - DNA, 25 bp, Probe sequence
ccatctacaagtgaaccatctacaa

SEQ ID NO: 44963 - DNA, 25 bp, Probe sequence
aaccatctacaagtgaaccatctac

SEQ ID NO: 44964 - DNA, 25 bp, Probe sequence
tcagtaagaacagatgctaatggtc

SEQ ID NO: 44965 - DNA, 25 bp, Probe sequence
cagtaagaacagatgctaatggtca

SEQ ID NO: 44966 - DNA, 25 bp, Probe sequence
atcagtaagaacagatgctaatggt

SEQ ID NO: 44967 - DNA, 25 bp, Probe sequence
atctacaagtgaaccatctacaagt

SEQ ID NO: 44968 - DNA, 25 bp, Probe sequence
aatctactgaccttgaggctatgaa

SEQ ID NO: 44969 - DNA, 25 bp, Probe sequence
atctactgaccttgaggctatgaag

SEQ ID NO: 44970 - DNA, 25 bp, Probe sequence
ctactgaccttgaggctatgaagtt

SEQ ID NO: 44971 - DNA, 25 bp, Probe sequence
caagaacgaacgatcaagaactgaa

SEQ ID NO: 44972 - DNA, 25 bp, Probe sequence
tctactgaccttgaggctatgaagt

SEQ ID NO: 44973 - DNA, 25 bp, Probe sequence
gaggctatgaagtttgatgattaca

SEQ ID NO: 44974 - DNA, 25 bp, Probe sequence
tgaggctatgaagtttgatgattac

SEQ ID NO: 44975 - DNA, 25 bp, Probe sequence
atccaagaacgaacgatcaagaact

SEQ ID NO: 44976 - DNA, 25 bp, Probe sequence
cttgaggctatgaagtttgatgatt

SEQ ID NO: 44977 - DNA, 25 bp, Probe sequence
ttgaatgatcttccagaacaacaag

SEQ ID NO: 44978 - DNA, 25 bp, Probe sequence
taagccagagtaagattggtggaat

SEQ ID NO: 44979 - DNA, 25 bp, Probe sequence
ttaagccagagtaagattggtggaa

SEQ ID NO: 44980 - DNA, 25 bp, Probe sequence
ccaatggtattgttagcacagatta

SEQ ID NO: 44981 - DNA, 25 bp, Probe sequence
tgaatgatcttccagaacaacaaga

SEQ ID NO: 44982 - DNA, 25 bp, Probe sequence
gaatgatcttccagaacaacaagaa

SEQ ID NO: 44983 - DNA, 25 bp, Probe sequence
caagaagaaactttaagccagagta

SEQ ID NO: 44984 - DNA, 25 bp, Probe sequence
atgatcttccagaacaacaagaatt

SEQ ID NO: 44985 - DNA, 25 bp, Probe sequence
aatgatcttccagaacaacaagaat

SEQ ID NO: 44986 - DNA, 25 bp, Probe sequence
gagtggacattagtggatattggta

SEQ ID NO: 44987 - DNA, 25 bp, Probe sequence
ttgtcggaatctgatgatgaagtaa

SEQ ID NO: 44988 - DNA, 25 bp, Probe sequence
attgtcggaatctgatgatgaagta

SEQ ID NO: 44989 - DNA, 25 bp, Probe sequence
agtggacattagtggatattggtaa

SEQ ID NO: 44990 - DNA, 25 bp, Probe sequence
atggagtggacattagtggatattg

SEQ ID NO: 44991 - DNA, 25 bp, Probe sequence
ggagtggacattagtggatattggt

SEQ ID NO: 44992 - DNA, 25 bp, Probe sequence
tggagtggacattagtggatattgg

SEQ ID NO: 44993 - DNA, 25 bp, Probe sequence
ttgttgacgataatcctgataatga

SEQ ID NO: 44994 - DNA, 25 bp, Probe sequence
tgttgacgataatcctgataatgat

SEQ ID NO: 44995 - DNA, 25 bp, Probe sequence
agttaagaacggtgttgttgtagat

SEQ ID NO: 44996 - DNA, 25 bp, Probe sequence
aagttaagaacggtgttgttgtaga

SEQ ID NO: 44997 - DNA, 25 bp, Probe sequence
tattagtcgtaggtaatccacttgg

SEQ ID NO: 44998 - DNA, 25 bp, Probe sequence
gttaagaacggtgttgttgtagatc

SEQ ID NO: 44999 - DNA, 25 bp, Probe sequence
ttaagaacggtgttgttgtagatca

SEQ ID NO: 45000 - DNA, 25 bp, Probe sequence
taagaacggtgttgttgtagatcaa

SEQ ID NO: 45001 - DNA, 25 bp, Probe sequence
attagtcgtaggtaatccacttggt

SEQ ID NO: 45002 - DNA, 25 bp, Probe sequence
agtgttaggagagccaatattagtc

SEQ ID NO: 45003 - DNA, 25 bp, Probe sequence
gagagccaatattagtcgtaggtaa

SEQ ID NO: 45004 - DNA, 25 bp, Probe sequence
caatatcgtagagtacaatgatggt

SEQ ID NO: 45005 - DNA, 25 bp, Probe sequence
acaatatcgtagagtacaatgatgg

SEQ ID NO: 45006 - DNA, 25 bp, Probe sequence
agacatgattataacatcgtggaat

SEQ ID NO: 45007 - DNA, 25 bp, Probe sequence
atcattactagcgatagcggcaatt

SEQ ID NO: 45008 - DNA, 25 bp, Probe sequence
aatcattactagcgatagcggcaat

SEQ ID NO: 45009 - DNA, 25 bp, Probe sequence
acaatttaataaaccagcagcgaaa

SEQ ID NO: 45010 - DNA, 25 bp, Probe sequence
cacaatatcgtagagtacaatgatg

SEQ ID NO: 45011 - DNA, 25 bp, Probe sequence
cacaatttaataaaccagcagcgaa

SEQ ID NO: 45012 - DNA, 25 bp, Probe sequence
cgtccacaatttaataaaccagcag

SEQ ID NO: 45013 - DNA, 25 bp, Probe sequence
taggtgtaatctcagtatatgctcc

SEQ ID NO: 45014 - DNA, 25 bp, Probe sequence
ggtgtaatctcagtatatgctcctg

SEQ ID NO: 45015 - DNA, 25 bp, Probe sequence
gtgtaatctcagtatatgctcctgc

SEQ ID NO: 45016 - DNA, 25 bp, Probe sequence
aggtgtaatctcagtatatgctcct

SEQ ID NO: 45017 - DNA, 25 bp, Probe sequence
ttaggtgtaatctcagtatatgctc

SEQ ID NO: 45018 - DNA, 25 bp, Probe sequence
ccaattcattcaattaggcatcata

SEQ ID NO: 45019 - DNA, 25 bp, Probe sequence
cacacttatcatcaaagagccattt

SEQ ID NO: 45020 - DNA, 25 bp, Probe sequence
atcacacttatcatcaaagagccat

SEQ ID NO: 45021 - DNA, 25 bp, Probe sequence
tatcacacttatcatcaaagagcca

SEQ ID NO: 45022 - DNA, 25 bp, Probe sequence
gttaatacgctataatgcacatggt

SEQ ID NO: 45023 - DNA, 25 bp, Probe sequence
tgttaatacgctataatgcacatgg

SEQ ID NO: 45024 - DNA, 25 bp, Probe sequence
ttaatacgctataatgcacatggtg

SEQ ID NO: 45025 - DNA, 25 bp, Probe sequence
gattgatttccgttgttatttatgc

SEQ ID NO: 45026 - DNA, 25 bp, Probe sequence
cacttatcctatatgttaatacgct

SEQ ID NO: 45027 - DNA, 25 bp, Probe sequence
gatttccgttgttatttatgcacct

SEQ ID NO: 45028 - DNA, 25 bp, Probe sequence
atttccgttgttatttatgcacctg

SEQ ID NO: 45029 - DNA, 25 bp, Probe sequence
tgatttccgttgttatttatgcacc

SEQ ID NO: 45030 - DNA, 25 bp, Probe sequence
acacttatcctatatgttaatacgc

SEQ ID NO: 45031 - DNA, 25 bp, Probe sequence
accaatatactattcaaaggaggac

SEQ ID NO: 45032 - DNA, 25 bp, Probe sequence
ccaatatactattcaaaggaggact

SEQ ID NO: 45033 - DNA, 25 bp, Probe sequence
accatatacccaatttattcaactg

SEQ ID NO: 45034 - DNA, 25 bp, Probe sequence
ccatatacccaatttattcaactgg

SEQ ID NO: 45035 - DNA, 25 bp, Probe sequence
aaccatatacccaatttattcaact

SEQ ID NO: 45036 - DNA, 25 bp, Probe sequence
taccaatatactattcaaaggagga

SEQ ID NO: 45037 - DNA, 25 bp, Probe sequence
ttcaactgggtattattatacaagc

SEQ ID NO: 45038 - DNA, 25 bp, Probe sequence
ctaccaatatactattcaaaggagg

SEQ ID NO: 45039 - DNA, 25 bp, Probe sequence
gaaccatatacccaatttattcaac

SEQ ID NO: 45040 - DNA, 25 bp, Probe sequence
tgaggagagtggtgtaaaattgaat

SEQ ID NO: 45041 - DNA, 25 bp, Probe sequence
gaggagagtggtgtaaaattgaatt

SEQ ID NO: 45042 - DNA, 25 bp, Probe sequence
gtgaggagagtggtgtaaaattgaa

SEQ ID NO: 45043 - DNA, 25 bp, Probe sequence
cagtgaggagagtggtgtaaaattg

SEQ ID NO: 45044 - DNA, 25 bp, Probe sequence
agtgaggagagtggtgtaaaattga

SEQ ID NO: 45045 - DNA, 25 bp, Probe sequence
aggagagtggtgtaaaattgaatta

SEQ ID NO: 45046 - DNA, 25 bp, Probe sequence
acagtgaggagagtggtgtaaaatt

SEQ ID NO: 45047 - DNA, 25 bp, Probe sequence
aattgaccagtttgccacgtatctt

SEQ ID NO: 45048 - DNA, 25 bp, Probe sequence
aaattgaccagtttgccacgtatct

SEQ ID NO: 45049 - DNA, 25 bp, Probe sequence
ataatgctcggtcataatcatccaa

SEQ ID NO: 45050 - DNA, 25 bp, Probe sequence
tataatgctcggtcataatcatcca

SEQ ID NO: 45051 - DNA, 25 bp, Probe sequence
gtataatgctcggtcataatcatcc

SEQ ID NO: 45052 - DNA, 25 bp, Probe sequence
taatgctcggtcataatcatccaag

SEQ ID NO: 45053 - DNA, 25 bp, Probe sequence
agtataatgctcggtcataatcatc

SEQ ID NO: 45054 - DNA, 25 bp, Probe sequence
aatgctcggtcataatcatccaagt

SEQ ID NO: 45055 - DNA, 25 bp, Probe sequence
tagtataatgctcggtcataatcat

SEQ ID NO: 45056 - DNA, 25 bp, Probe sequence
atagtataatgctcggtcataatca

SEQ ID NO: 45057 - DNA, 25 bp, Probe sequence
acctacacatattcaaacactatcg

SEQ ID NO: 45058 - DNA, 25 bp, Probe sequence
atgctatgccatcagatgatattgt

SEQ ID NO: 45059 - DNA, 25 bp, Probe sequence
tgctatgccatcagatgatattgta

SEQ ID NO: 45060 - DNA, 25 bp, Probe sequence
agaatgctatgccatcagatgatat

SEQ ID NO: 45061 - DNA, 25 bp, Probe sequence
gagaatgctatgccatcagatgata

SEQ ID NO: 45062 - DNA, 25 bp, Probe sequence
aatgctatgccatcagatgatattg

SEQ ID NO: 45063 - DNA, 25 bp, Probe sequence
gaatgctatgccatcagatgatatt

SEQ ID NO: 45064 - DNA, 25 bp, Probe sequence
gctatgccatcagatgatattgtaa

SEQ ID NO: 45065 - DNA, 25 bp, Probe sequence
atactgagcttgattggttaattgc

SEQ ID NO: 45066 - DNA, 25 bp, Probe sequence
agaattaggacttactccgcataag

SEQ ID NO: 45067 - DNA, 25 bp, Probe sequence
acattatcagagattatggcgtatt

SEQ ID NO: 45068 - DNA, 25 bp, Probe sequence
aacattatcagagattatggcgtat

SEQ ID NO: 45069 - DNA, 25 bp, Probe sequence
tttattcagtttaggttagttgggc

SEQ ID NO: 45070 - DNA, 25 bp, Probe sequence
ttattcagtttaggttagttgggcg

SEQ ID NO: 45071 - DNA, 25 bp, Probe sequence
caacaatttccagagaatgatagcc

SEQ ID NO: 45072 - DNA, 25 bp, Probe sequence
acaacaatttccagagaatgatagc

SEQ ID NO: 45073 - DNA, 25 bp, Probe sequence
aatttccagagaatgatagcccttc

SEQ ID NO: 45074 - DNA, 25 bp, Probe sequence
caatttccagagaatgatagccctt

SEQ ID NO: 45075 - DNA, 25 bp, Probe sequence
agatgtgtttagtcgtaacttctct

SEQ ID NO: 45076 - DNA, 25 bp, Probe sequence
ccaactgaattaagtgtatatgcga

SEQ ID NO: 45077 - DNA, 25 bp, Probe sequence
tccaactgaattaagtgtatatgcg

SEQ ID NO: 45078 - DNA, 25 bp, Probe sequence
tgaattaagtgtatatgcgattgga

SEQ ID NO: 45079 - DNA, 25 bp, Probe sequence
ctgaattaagtgtatatgcgattgg

SEQ ID NO: 45080 - DNA, 25 bp, Probe sequence
gaattaagtgtatatgcgattggaa

SEQ ID NO: 45081 - DNA, 25 bp, Probe sequence
aatagcagaaagcaatcaaacaaca

SEQ ID NO: 45082 - DNA, 25 bp, Probe sequence
ggtaatagcagaaagcaatcaaaca

SEQ ID NO: 45083 - DNA, 25 bp, Probe sequence
aggtaatagcagaaagcaatcaaac

SEQ ID NO: 45084 - DNA, 25 bp, Probe sequence
atagcagaaagcaatcaaacaacag

SEQ ID NO: 45085 - DNA, 25 bp, Probe sequence
aggactactaagcaactgatagatt

SEQ ID NO: 45086 - DNA, 25 bp, Probe sequence
gctagatagattaggcaggactact

SEQ ID NO: 45087 - DNA, 25 bp, Probe sequence
atattggttatgctcgtgtatctac

SEQ ID NO: 45088 - DNA, 25 bp, Probe sequence
atagattaggcaggactactaagca

SEQ ID NO: 45089 - DNA, 25 bp, Probe sequence
gatagattaggcaggactactaagc

SEQ ID NO: 45090 - DNA, 25 bp, Probe sequence
tagattaggcaggactactaagcaa

SEQ ID NO: 45091 - DNA, 25 bp, Probe sequence
caggactactaagcaactgatagat

SEQ ID NO: 45092 - DNA, 25 bp, Probe sequence
gttatgctcgtgtatctaccagaga

SEQ ID NO: 45093 - DNA, 25 bp, Probe sequence
aagctagatagattaggcaggacta

SEQ ID NO: 45094 - DNA, 25 bp, Probe sequence
attacaatcttctctgcctaatgaa

SEQ ID NO: 45095 - DNA, 25 bp, Probe sequence
aattacaatcttctctgcctaatga

SEQ ID NO: 45096 - DNA, 25 bp, Probe sequence
cgaggaaacgaaatatcaagcaata

SEQ ID NO: 45097 - DNA, 25 bp, Probe sequence
attcaactatgcaatacttccacaa

SEQ ID NO: 45098 - DNA, 25 bp, Probe sequence
tacgaggaaacgaaatatcaagcaa

SEQ ID NO: 45099 - DNA, 25 bp, Probe sequence
aactacgaggaaacgaaatatcaag

SEQ ID NO: 45100 - DNA, 25 bp, Probe sequence
ctacgaggaaacgaaatatcaagca

SEQ ID NO: 45101 - DNA, 25 bp, Probe sequence
actacgaggaaacgaaatatcaagc

SEQ ID NO: 45102 - DNA, 25 bp, Probe sequence
aaactacgaggaaacgaaatatcaa

SEQ ID NO: 45103 - DNA, 25 bp, Probe sequence
ttgaacaacaccgattatgaactaa

SEQ ID NO: 45104 - DNA, 25 bp, Probe sequence
ccagcaagtgataaacaaatgaatg

SEQ ID NO: 45105 - DNA, 25 bp, Probe sequence
tgaggattcacatatcataacagaa

SEQ ID NO: 45106 - DNA, 25 bp, Probe sequence
ttgaggattcacatatcataacaga

SEQ ID NO: 45107 - DNA, 25 bp, Probe sequence
gccagcaagtgataaacaaatgaat

SEQ ID NO: 45108 - DNA, 25 bp, Probe sequence
taatgacttcccagcaattccaata

SEQ ID NO: 45109 - DNA, 25 bp, Probe sequence
tgaacaacaccgattatgaactaaa

SEQ ID NO: 45110 - DNA, 25 bp, Probe sequence
tttgaacaacaccgattatgaacta

SEQ ID NO: 45111 - DNA, 25 bp, Probe sequence
ttaatgacttcccagcaattccaat

SEQ ID NO: 45112 - DNA, 25 bp, Probe sequence
tgcttcaataattcctggtctctag

SEQ ID NO: 45113 - DNA, 25 bp, Probe sequence
ttgcttcaataattcctggtctcta

SEQ ID NO: 45114 - DNA, 25 bp, Probe sequence
attgcttcaataattcctggtctct

SEQ ID NO: 45115 - DNA, 25 bp, Probe sequence
aattgcttcaataattcctggtctc

SEQ ID NO: 45116 - DNA, 25 bp, Probe sequence
caatatatcttgtccgtactctaca

SEQ ID NO: 45117 - DNA, 25 bp, Probe sequence
tgatacacttactaaagaccaacaa

SEQ ID NO: 45118 - DNA, 25 bp, Probe sequence
atgtaacaatttcagacaagactgt

SEQ ID NO: 45119 - DNA, 25 bp, Probe sequence
ttgatacacttactaaagaccaaca

SEQ ID NO: 45120 - DNA, 25 bp, Probe sequence
tggaagtgctaaagatatacataca

SEQ ID NO: 45121 - DNA, 25 bp, Probe sequence
ggcaaagtcgtcagattatttagag

SEQ ID NO: 45122 - DNA, 25 bp, Probe sequence
gggcaaagtcgtcagattatttaga

SEQ ID NO: 45123 - DNA, 25 bp, Probe sequence
gcaaagtcgtcagattatttagaga

SEQ ID NO: 45124 - DNA, 25 bp, Probe sequence
aactcagatgacacatttaccctaa

SEQ ID NO: 45125 - DNA, 25 bp, Probe sequence
ttaactcagatgacacatttaccct

SEQ ID NO: 45126 - DNA, 25 bp, Probe sequence
tgacacatttaccctaaagcgatta

SEQ ID NO: 45127 - DNA, 25 bp, Probe sequence
actcagatgacacatttaccctaaa

SEQ ID NO: 45128 - DNA, 25 bp, Probe sequence
tttaactcagatgacacatttaccc

SEQ ID NO: 45129 - DNA, 25 bp, Probe sequence
acacatttaccctaaagcgattatc

SEQ ID NO: 45130 - DNA, 25 bp, Probe sequence
cagtaccaggagccaatattaacta

SEQ ID NO: 45131 - DNA, 25 bp, Probe sequence
agtaccaggagccaatattaactaa

SEQ ID NO: 45132 - DNA, 25 bp, Probe sequence
tggactaaagatgaacaggctaaag

SEQ ID NO: 45133 - DNA, 25 bp, Probe sequence
ttaaatgatgagtatgtcgtttcgc

SEQ ID NO: 45134 - DNA, 25 bp, Probe sequence
taaatgatgagtatgtcgtttcgcc

SEQ ID NO: 45135 - DNA, 25 bp, Probe sequence
gcagtaccaggagccaatattaact

SEQ ID NO: 45136 - DNA, 25 bp, Probe sequence
ctggactaaagatgaacaggctaaa

SEQ ID NO: 45137 - DNA, 25 bp, Probe sequence
ggactaaagatgaacaggctaaagc

SEQ ID NO: 45138 - DNA, 25 bp, Probe sequence
gactaaagatgaacaggctaaagct

SEQ ID NO: 45139 - DNA, 25 bp, Probe sequence
aataatagatgaacaaggtgagcca

SEQ ID NO: 45140 - DNA, 25 bp, Probe sequence
caataatagatgaacaaggtgagcc

SEQ ID NO: 45141 - DNA, 25 bp, Probe sequence
gcaataatagatgaacaaggtgagc

SEQ ID NO: 45142 - DNA, 25 bp, Probe sequence
gtctgttattgcctgaattaagtgg

SEQ ID NO: 45143 - DNA, 25 bp, Probe sequence
gtcattctcacaataatccacatca

SEQ ID NO: 45144 - DNA, 25 bp, Probe sequence
agtctgttattgcctgaattaagtg

SEQ ID NO: 45145 - DNA, 25 bp, Probe sequence
agtcattctcacaataatccacatc

SEQ ID NO: 45146 - DNA, 25 bp, Probe sequence
gtgatatgcctagcgatgtattact

SEQ ID NO: 45147 - DNA, 25 bp, Probe sequence
agtgatatgcctagcgatgtattac

SEQ ID NO: 45148 - DNA, 25 bp, Probe sequence
gtggtcagttgttcaagttgtatta

SEQ ID NO: 45149 - DNA, 25 bp, Probe sequence
cattcgttacacctgcgttaatata

SEQ ID NO: 45150 - DNA, 25 bp, Probe sequence
tgtggtcagttgttcaagttgtatt

SEQ ID NO: 45151 - DNA, 25 bp, Probe sequence
tggtcagttgttcaagttgtattaa

SEQ ID NO: 45152 - DNA, 25 bp, Probe sequence
aagcagtcagtattgaagttggaat

SEQ ID NO: 45153 - DNA, 25 bp, Probe sequence
ccattcgttacacctgcgttaatat

SEQ ID NO: 45154 - DNA, 25 bp, Probe sequence
ttgtggtcagttgttcaagttgtat

SEQ ID NO: 45155 - DNA, 25 bp, Probe sequence
tatgttgtggtcagttgttcaagtt

SEQ ID NO: 45156 - DNA, 25 bp, Probe sequence
agtatgttgtggtcagttgttcaag

SEQ ID NO: 45157 - DNA, 25 bp, Probe sequence
cttgaatacgattggtagaggtgaa

SEQ ID NO: 45158 - DNA, 25 bp, Probe sequence
aacttgaatacgattggtagaggtg

SEQ ID NO: 45159 - DNA, 25 bp, Probe sequence
taacttgaatacgattggtagaggt

SEQ ID NO: 45160 - DNA, 25 bp, Probe sequence
acttgaatacgattggtagaggtga

SEQ ID NO: 45161 - DNA, 25 bp, Probe sequence
ttaacttgaatacgattggtagagg

SEQ ID NO: 45162 - DNA, 25 bp, Probe sequence
ccaatcttatatgttgttcatgcgt

SEQ ID NO: 45163 - DNA, 25 bp, Probe sequence
gttcgttaatgttaccagttgccat

SEQ ID NO: 45164 - DNA, 25 bp, Probe sequence
gccaatcttatatgttgttcatgcg

SEQ ID NO: 45165 - DNA, 25 bp, Probe sequence
caatcttatatgttgttcatgcgtt

SEQ ID NO: 45166 - DNA, 25 bp, Probe sequence
cacgaaacgacgatttagatgttat

SEQ ID NO: 45167 - DNA, 25 bp, Probe sequence
atgatgtatcgtgatggtcaaattg

SEQ ID NO: 45168 - DNA, 25 bp, Probe sequence
aaatgatgtatcgtgatggtcaaat

SEQ ID NO: 45169 - DNA, 25 bp, Probe sequence
acgaaacgacgatttagatgttata

SEQ ID NO: 45170 - DNA, 25 bp, Probe sequence
aatgatgtatcgtgatggtcaaatt

SEQ ID NO: 45171 - DNA, 25 bp, Probe sequence
atgtatcgtgatggtcaaattgaag

SEQ ID NO: 45172 - DNA, 25 bp, Probe sequence
gatgtatcgtgatggtcaaattgaa

SEQ ID NO: 45173 - DNA, 25 bp, Probe sequence
tgatgtatcgtgatggtcaaattga

SEQ ID NO: 45174 - DNA, 25 bp, Probe sequence
gcacgaaacgacgatttagatgtta

SEQ ID NO: 45175 - DNA, 25 bp, Probe sequence
taatgaacaaatggagttaggacac

SEQ ID NO: 45176 - DNA, 25 bp, Probe sequence
aatgaacaaatggagttaggacacc

SEQ ID NO: 45177 - DNA, 25 bp, Probe sequence
ataatgaacaaatggagttaggaca

SEQ ID NO: 45178 - DNA, 25 bp, Probe sequence
tgataatgaacaaatggagttagga

SEQ ID NO: 45179 - DNA, 25 bp, Probe sequence
gataatgaacaaatggagttaggac

SEQ ID NO: 45180 - DNA, 25 bp, Probe sequence
gaacaaatggagttaggacaccaaa

SEQ ID NO: 45181 - DNA, 25 bp, Probe sequence
ttgataatgaacaaatggagttagg

SEQ ID NO: 45182 - DNA, 25 bp, Probe sequence
caaatggagttaggacaccaaacaa

SEQ ID NO: 45183 - DNA, 25 bp, Probe sequence
aacaaatggagttaggacaccaaac

SEQ ID NO: 45184 - DNA, 25 bp, Probe sequence
taaatgtaggtatccgtcaaactgg

SEQ ID NO: 45185 - DNA, 25 bp, Probe sequence
tggactcggtttatatggaatgaat

SEQ ID NO: 45186 - DNA, 25 bp, Probe sequence
ggactcggtttatatggaatgaatg

SEQ ID NO: 45187 - DNA, 25 bp, Probe sequence
ctggactcggtttatatggaatgaa

SEQ ID NO: 45188 - DNA, 25 bp, Probe sequence
aaaggttctggactcggtttatatg

SEQ ID NO: 45189 - DNA, 25 bp, Probe sequence
ttctggactcggtttatatggaatg

SEQ ID NO: 45190 - DNA, 25 bp, Probe sequence
gttctggactcggtttatatggaat

SEQ ID NO: 45191 - DNA, 25 bp, Probe sequence
tctggactcggtttatatggaatga

SEQ ID NO: 45192 - DNA, 25 bp, Probe sequence
atccaagttctaagcctaaaggttc

SEQ ID NO: 45193 - DNA, 25 bp, Probe sequence
gtggattagctggaactgttatgaa

SEQ ID NO: 45194 - DNA, 25 bp, Probe sequence
gaatctaacaaaccatcatctccaa

SEQ ID NO: 45195 - DNA, 25 bp, Probe sequence
cgctttctatgaatctaacaaacca

SEQ ID NO: 45196 - DNA, 25 bp, Probe sequence
gcaatcgctttctatgaatctaaca

SEQ ID NO: 45197 - DNA, 25 bp, Probe sequence
ggcaatcgctttctatgaatctaac

SEQ ID NO: 45198 - DNA, 25 bp, Probe sequence
tcgctttctatgaatctaacaaacc

SEQ ID NO: 45199 - DNA, 25 bp, Probe sequence
aatggcactatgtttcaggtaataa

SEQ ID NO: 45200 - DNA, 25 bp, Probe sequence
tgaatctaacaaaccatcatctcca

SEQ ID NO: 45201 - DNA, 25 bp, Probe sequence
atggcactatgtttcaggtaataaa

SEQ ID NO: 45202 - DNA, 25 bp, Probe sequence
ttatgtttagttgtctttgtcgcag

SEQ ID NO: 45203 - DNA, 25 bp, Probe sequence
tttatgtttagttgtctttgtcgca

SEQ ID NO: 45204 - DNA, 25 bp, Probe sequence
taggtttcactattatggcttgttg

SEQ ID NO: 45205 - DNA, 25 bp, Probe sequence
aggtttcactattatggcttgttgg

SEQ ID NO: 45206 - DNA, 25 bp, Probe sequence
atttatgtttagttgtctttgtcgc

SEQ ID NO: 45207 - DNA, 25 bp, Probe sequence
tatgtttagttgtctttgtcgcagg

SEQ ID NO: 45208 - DNA, 25 bp, Probe sequence
ttaggtttcactattatggcttgtt

SEQ ID NO: 45209 - DNA, 25 bp, Probe sequence
tagttgtctttgtcgcaggtcatat

SEQ ID NO: 45210 - DNA, 25 bp, Probe sequence
ttagttgtctttgtcgcaggtcata

SEQ ID NO: 45211 - DNA, 25 bp, Probe sequence
cgtgattggtattcggtagatgata

SEQ ID NO: 45212 - DNA, 25 bp, Probe sequence
ttagagcgttaggtgattatgagta

SEQ ID NO: 45213 - DNA, 25 bp, Probe sequence
aagatgaagatgaactagacgaaga

SEQ ID NO: 45214 - DNA, 25 bp, Probe sequence
agaagatgaagatgaactagacgaa

SEQ ID NO: 45215 - DNA, 25 bp, Probe sequence
aagaagatgaagatgaactagacga

SEQ ID NO: 45216 - DNA, 25 bp, Probe sequence
gaagatgaagatgaactagacgaag

SEQ ID NO: 45217 - DNA, 25 bp, Probe sequence
gaagaagatgaagatgaactagacg

SEQ ID NO: 45218 - DNA, 25 bp, Probe sequence
tagagcgttaggtgattatgagtac

SEQ ID NO: 45219 - DNA, 25 bp, Probe sequence
agaagatgagcaggttgaagaagaa

SEQ ID NO: 45220 - DNA, 25 bp, Probe sequence
cgagaacgctatatggagagattag

SEQ ID NO: 45221 - DNA, 25 bp, Probe sequence
gagaacgctatatggagagattagt

SEQ ID NO: 45222 - DNA, 25 bp, Probe sequence
agaacgctatatggagagattagtt

SEQ ID NO: 45223 - DNA, 25 bp, Probe sequence
gacagaatcaagcgttagaagcatt

SEQ ID NO: 45224 - DNA, 25 bp, Probe sequence
tactaaggcacacgaagagttacaa

SEQ ID NO: 45225 - DNA, 25 bp, Probe sequence
ttactaaggcacacgaagagttaca

SEQ ID NO: 45226 - DNA, 25 bp, Probe sequence
gcattatctcaaggatataccgaat

SEQ ID NO: 45227 - DNA, 25 bp, Probe sequence
taaggcacacgaagagttacaaata

SEQ ID NO: 45228 - DNA, 25 bp, Probe sequence
cagaatcaagcgttagaagcattta

SEQ ID NO: 45229 - DNA, 25 bp, Probe sequence
gagaacgctatatggtgagattagt

SEQ ID NO: 45230 - DNA, 25 bp, Probe sequence
acagatatacacatcacaccttcaa

SEQ ID NO: 45231 - DNA, 25 bp, Probe sequence
cgagaacgctatatggtgagattag

SEQ ID NO: 45232 - DNA, 25 bp, Probe sequence
acacatcacaccttcaattaacttc

SEQ ID NO: 45233 - DNA, 25 bp, Probe sequence
cacatcacaccttcaattaacttcg

SEQ ID NO: 45234 - DNA, 25 bp, Probe sequence
tacagatatacacatcacaccttca

SEQ ID NO: 45235 - DNA, 25 bp, Probe sequence
agaacgctatatggtgagattagtt

SEQ ID NO: 45236 - DNA, 25 bp, Probe sequence
cagatatacacatcacaccttcaat

SEQ ID NO: 45237 - DNA, 25 bp, Probe sequence
tacacatcacaccttcaattaactt

SEQ ID NO: 45238 - DNA, 25 bp, Probe sequence
aaagtgatgttgtttgatgaaccaa

SEQ ID NO: 45239 - DNA, 25 bp, Probe sequence
taaagtgatgttgtttgatgaacca

SEQ ID NO: 45240 - DNA, 25 bp, Probe sequence
ctaaagtgatgttgtttgatgaacc

SEQ ID NO: 45241 - DNA, 25 bp, Probe sequence
cctaaagtgatgttgtttgatgaac

SEQ ID NO: 45242 - DNA, 25 bp, Probe sequence
ttagaaattccaactgaaggtacag

SEQ ID NO: 45243 - DNA, 25 bp, Probe sequence
aatcacaaatagaagttcgtaaaca

SEQ ID NO: 45244 - DNA, 25 bp, Probe sequence
acggcaaaacatatacatctaaaga

SEQ ID NO: 45245 - DNA, 25 bp, Probe sequence
aaatcacaaatagaagttcgtaaac

SEQ ID NO: 45246 - DNA, 25 bp, Probe sequence
atgttgaagtcatcaaaggtattga

SEQ ID NO: 45247 - DNA, 25 bp, Probe sequence
caattcaacaagcacatcaacaatt

SEQ ID NO: 45248 - DNA, 25 bp, Probe sequence
gcaattcaacaagcacatcaacaat

SEQ ID NO: 45249 - DNA, 25 bp, Probe sequence
caacaagcacatcaacaatttactg

SEQ ID NO: 45250 - DNA, 25 bp, Probe sequence
tcaacaagcacatcaacaatttact

SEQ ID NO: 45251 - DNA, 25 bp, Probe sequence
aacaagcacatcaacaatttactgg

SEQ ID NO: 45252 - DNA, 25 bp, Probe sequence
ttcaacaagcacatcaacaatttac

SEQ ID NO: 45253 - DNA, 25 bp, Probe sequence
attcaacaagcacatcaacaattta

SEQ ID NO: 45254 - DNA, 25 bp, Probe sequence
acaagcacatcaacaatttactggt

SEQ ID NO: 45255 - DNA, 25 bp, Probe sequence
aattcaacaagcacatcaacaattt

SEQ ID NO: 45256 - DNA, 25 bp, Probe sequence
tctcgttatcctcaactatattcgc

SEQ ID NO: 45257 - DNA, 25 bp, Probe sequence
tgattatgaggcaataacgacgatt

SEQ ID NO: 45258 - DNA, 25 bp, Probe sequence
gattatgaggcaataacgacgatta

SEQ ID NO: 45259 - DNA, 25 bp, Probe sequence
tactgattatgaggcaataacgacg

SEQ ID NO: 45260 - DNA, 25 bp, Probe sequence
ttactgattatgaggcaataacgac

SEQ ID NO: 45261 - DNA, 25 bp, Probe sequence
ctgattatgaggcaataacgacgat

SEQ ID NO: 45262 - DNA, 25 bp, Probe sequence
attatgaggcaataacgacgattat

SEQ ID NO: 45263 - DNA, 25 bp, Probe sequence
tagtagatgagattgatcgccttaa

SEQ ID NO: 45264 - DNA, 25 bp, Probe sequence
atagtagatgagattgatcgcctta

SEQ ID NO: 45265 - DNA, 25 bp, Probe sequence
ggaacaaggtcttactggtctaatt

SEQ ID NO: 45266 - DNA, 25 bp, Probe sequence
aacaaggtcttactggtctaattca

SEQ ID NO: 45267 - DNA, 25 bp, Probe sequence
aggaacaaggtcttactggtctaat

SEQ ID NO: 45268 - DNA, 25 bp, Probe sequence
acaaggtcttactggtctaattcat

SEQ ID NO: 45269 - DNA, 25 bp, Probe sequence
aaggaacaaggtcttactggtctaa

SEQ ID NO: 45270 - DNA, 25 bp, Probe sequence
gaacaaggtcttactggtctaattc

SEQ ID NO: 45271 - DNA, 25 bp, Probe sequence
taaggaacaaggtcttactggtcta

SEQ ID NO: 45272 - DNA, 25 bp, Probe sequence
tataaggaacaaggtcttactggtc

SEQ ID NO: 45273 - DNA, 25 bp, Probe sequence
ataaggaacaaggtcttactggtct

SEQ ID NO: 45274 - DNA, 25 bp, Probe sequence
aagcaacaagcgatgagaagtatta

SEQ ID NO: 45275 - DNA, 25 bp, Probe sequence
gcaacaagcgatgagaagtattaag

SEQ ID NO: 45276 - DNA, 25 bp, Probe sequence
caacaagcgatgagaagtattaaga

SEQ ID NO: 45277 - DNA, 25 bp, Probe sequence
agcaacaagcgatgagaagtattaa

SEQ ID NO: 45278 - DNA, 25 bp, Probe sequence
gtggttattacatcattacgacaga

SEQ ID NO: 45279 - DNA, 25 bp, Probe sequence
caatgaacgatggttacgaagagta

SEQ ID NO: 45280 - DNA, 25 bp, Probe sequence
ttacatcattacgacagaacaagaa

SEQ ID NO: 45281 - DNA, 25 bp, Probe sequence
aacaagcgatgagaagtattaagaa

SEQ ID NO: 45282 - DNA, 25 bp, Probe sequence
attacatcattacgacagaacaaga

SEQ ID NO: 45283 - DNA, 25 bp, Probe sequence
aatatgcctctattgtctgatgacc

SEQ ID NO: 45284 - DNA, 25 bp, Probe sequence
atatgcctctattgtctgatgacca

SEQ ID NO: 45285 - DNA, 25 bp, Probe sequence
attggaacaacacatagaagatcaa

SEQ ID NO: 45286 - DNA, 25 bp, Probe sequence
tatgcctctattgtctgatgaccag

SEQ ID NO: 45287 - DNA, 25 bp, Probe sequence
tattggaacaacacatagaagatca

SEQ ID NO: 45288 - DNA, 25 bp, Probe sequence
tgatttagattactggaaagacgga

SEQ ID NO: 45289 - DNA, 25 bp, Probe sequence
ctgatttagattactggaaagacgg

SEQ ID NO: 45290 - DNA, 25 bp, Probe sequence
aataaatcctaatatgcccgaaccg

SEQ ID NO: 45291 - DNA, 25 bp, Probe sequence
agaggaatagttaaatggaacgcat

SEQ ID NO: 45292 - DNA, 25 bp, Probe sequence
cgttatttgttggatggtagagttc

SEQ ID NO: 45293 - DNA, 25 bp, Probe sequence
taatgcgttatttgttggatggtag

SEQ ID NO: 45294 - DNA, 25 bp, Probe sequence
aatgcgttatttgttggatggtaga

SEQ ID NO: 45295 - DNA, 25 bp, Probe sequence
tgggtgcctatggtattaagaataa

SEQ ID NO: 45296 - DNA, 25 bp, Probe sequence
atgcgttatttgttggatggtagag

SEQ ID NO: 45297 - DNA, 25 bp, Probe sequence
atgggtgcctatggtattaagaata

SEQ ID NO: 45298 - DNA, 25 bp, Probe sequence
gcgttatttgttggatggtagagtt

SEQ ID NO: 45299 - DNA, 25 bp, Probe sequence
gggtgcctatggtattaagaataaa

SEQ ID NO: 45300 - DNA, 25 bp, Probe sequence
catgggtgcctatggtattaagaat

SEQ ID NO: 45301 - DNA, 25 bp, Probe sequence
acgacttaggtaatagagttgttgt

SEQ ID NO: 45302 - DNA, 25 bp, Probe sequence
aacgacttaggtaatagagttgttg

SEQ ID NO: 45303 - DNA, 25 bp, Probe sequence
cgacttaggtaatagagttgttgta

SEQ ID NO: 45304 - DNA, 25 bp, Probe sequence
cacacattggagaaattgagttgat

SEQ ID NO: 45305 - DNA, 25 bp, Probe sequence
acacattggagaaattgagttgatt

SEQ ID NO: 45306 - DNA, 25 bp, Probe sequence
gacacacattggagaaattgagttg

SEQ ID NO: 45307 - DNA, 25 bp, Probe sequence
ctaacgacttaggtaatagagttgt

SEQ ID NO: 45308 - DNA, 25 bp, Probe sequence
acacacattggagaaattgagttga

SEQ ID NO: 45309 - DNA, 25 bp, Probe sequence
tgacacacattggagaaattgagtt

SEQ ID NO: 45310 - DNA, 25 bp, Probe sequence
agtaagaatcaatctgttgctgaag

SEQ ID NO: 45311 - DNA, 25 bp, Probe sequence
gtaagaatcaatctgttgctgaagc

SEQ ID NO: 45312 - DNA, 25 bp, Probe sequence
agatgaaagtacaacagtaagtgga

SEQ ID NO: 45313 - DNA, 25 bp, Probe sequence
cggataaagatgaaagtacaacagt

SEQ ID NO: 45314 - DNA, 25 bp, Probe sequence
gatgaaagtacaacagtaagtggaa

SEQ ID NO: 45315 - DNA, 25 bp, Probe sequence
aagatgaaagtacaacagtaagtgg

SEQ ID NO: 45316 - DNA, 25 bp, Probe sequence
cgtaatgattggtaatgaaattggt

SEQ ID NO: 45317 - DNA, 25 bp, Probe sequence
tgaaagtacaacagtaagtggaaat

SEQ ID NO: 45318 - DNA, 25 bp, Probe sequence
atgaaagtacaacagtaagtggaaa

SEQ ID NO: 45319 - DNA, 25 bp, Probe sequence
cgcctatgtgtaatgataccttaga

SEQ ID NO: 45320 - DNA, 25 bp, Probe sequence
gacagattccatatcgttcaacatt

SEQ ID NO: 45321 - DNA, 25 bp, Probe sequence
actgtatctctccatctactgtaag

SEQ ID NO: 45322 - DNA, 25 bp, Probe sequence
tctctccatctactgtaagtcgtat

SEQ ID NO: 45323 - DNA, 25 bp, Probe sequence
atctctccatctactgtaagtcgta

SEQ ID NO: 45324 - DNA, 25 bp, Probe sequence
tatctctccatctactgtaagtcgt

SEQ ID NO: 45325 - DNA, 25 bp, Probe sequence
tgacagattccatatcgttcaacat

SEQ ID NO: 45326 - DNA, 25 bp, Probe sequence
aacgctcatctgacattgtagaatt

SEQ ID NO: 45327 - DNA, 25 bp, Probe sequence
gtatctctccatctactgtaagtcg

SEQ ID NO: 45328 - DNA, 25 bp, Probe sequence
atgctggactagattcaatgatatt

SEQ ID NO: 45329 - DNA, 25 bp, Probe sequence
aatgctggactagattcaatgatat

SEQ ID NO: 45330 - DNA, 25 bp, Probe sequence
ttgaggatatagaggatagacagaa

SEQ ID NO: 45331 - DNA, 25 bp, Probe sequence
accagctaataatgaactagaggat

SEQ ID NO: 45332 - DNA, 25 bp, Probe sequence
attgaggatatagaggatagacaga

SEQ ID NO: 45333 - DNA, 25 bp, Probe sequence
gggacgaaataagcaaagataacat

SEQ ID NO: 45334 - DNA, 25 bp, Probe sequence
aaaggtaagaatcacagtaaacagc

SEQ ID NO: 45335 - DNA, 25 bp, Probe sequence
agagaacgtatgccgaagtatataa

SEQ ID NO: 45336 - DNA, 25 bp, Probe sequence
ttagagaacgtatgccgaagtatat

SEQ ID NO: 45337 - DNA, 25 bp, Probe sequence
taacagttggacatacaccatacaa

SEQ ID NO: 45338 - DNA, 25 bp, Probe sequence
agtaacagttggacatacaccatac

SEQ ID NO: 45339 - DNA, 25 bp, Probe sequence
aagtaacagttggacatacaccata

SEQ ID NO: 45340 - DNA, 25 bp, Probe sequence
gtaacagttggacatacaccataca

SEQ ID NO: 45341 - DNA, 25 bp, Probe sequence
gaagtaacagttggacatacaccat

SEQ ID NO: 45342 - DNA, 25 bp, Probe sequence
atagagttgtcgaagtaacagttgg

SEQ ID NO: 45343 - DNA, 25 bp, Probe sequence
aatagagttgtcgaagtaacagttg

SEQ ID NO: 45344 - DNA, 25 bp, Probe sequence
ttgtgtagcagcaacattagcattg

SEQ ID NO: 45345 - DNA, 25 bp, Probe sequence
tagagttgtcgaagtaacagttgga

SEQ ID NO: 45346 - DNA, 25 bp, Probe sequence
aatagagtggttgaagttacagtgg

SEQ ID NO: 45347 - DNA, 25 bp, Probe sequence
cggcaacaacaccttactatactta

SEQ ID NO: 45348 - DNA, 25 bp, Probe sequence
atcaccaatacatcaagaagcacag

SEQ ID NO: 45349 - DNA, 25 bp, Probe sequence
ggcaacaacaccttactatacttat

SEQ ID NO: 45350 - DNA, 25 bp, Probe sequence
catcaccaatacatcaagaagcaca

SEQ ID NO: 45351 - DNA, 25 bp, Probe sequence
taatagagtggttgaagttacagtg

SEQ ID NO: 45352 - DNA, 25 bp, Probe sequence
gcaacgacattagcattaggtactt

SEQ ID NO: 45353 - DNA, 25 bp, Probe sequence
gcaacaacaccttactatacttatc

SEQ ID NO: 45354 - DNA, 25 bp, Probe sequence
cagcaacgacattagcattaggtac

SEQ ID NO: 45355 - DNA, 25 bp, Probe sequence
cttgcattgcctgtagaatttcttt

SEQ ID NO: 45356 - DNA, 25 bp, Probe sequence
acttgcattgcctgtagaatttctt

SEQ ID NO: 45357 - DNA, 25 bp, Probe sequence
aacttgcattgcctgtagaatttct

SEQ ID NO: 45358 - DNA, 25 bp, Probe sequence
caacttgcattgcctgtagaatttc

SEQ ID NO: 45359 - DNA, 25 bp, Probe sequence
ccaacttgcattgcctgtagaattt

SEQ ID NO: 45360 - DNA, 25 bp, Probe sequence
gcattgcctgtagaatttcttttcg

SEQ ID NO: 45361 - DNA, 25 bp, Probe sequence
cattgcctgtagaatttcttttcga

SEQ ID NO: 45362 - DNA, 25 bp, Probe sequence
tttcgcaaaatttatttcgttgtcc

SEQ ID NO: 45363 - DNA, 25 bp, Probe sequence
ttgcattgcctgtagaatttctttt

SEQ ID NO: 45364 - DNA, 25 bp, Probe sequence
attggtagagcaactgacttgtaat

SEQ ID NO: 45365 - DNA, 25 bp, Probe sequence
aattggtagagcaactgacttgtaa

SEQ ID NO: 45366 - DNA, 25 bp, Probe sequence
ttggtagagcaactgacttgtaatc

SEQ ID NO: 45367 - DNA, 25 bp, Probe sequence
tggtagagcaactgacttgtaatca

SEQ ID NO: 45368 - DNA, 25 bp, Probe sequence
caattggtagagcaactgacttgta

SEQ ID NO: 45369 - DNA, 25 bp, Probe sequence
ctcaattggtagagcaactgacttg

SEQ ID NO: 45370 - DNA, 25 bp, Probe sequence
ggtagagcaactgacttgtaatcag

SEQ ID NO: 45371 - DNA, 25 bp, Probe sequence
tcaattggtagagcaactgacttgt

SEQ ID NO: 45372 - DNA, 25 bp, Probe sequence
ctgacttgtaatcagtaggttgggg

SEQ ID NO: 45373 - DNA, 25 bp, Probe sequence
tgaagagcaagattacagagagtta

SEQ ID NO: 45374 - DNA, 25 bp, Probe sequence
ttgaagagcaagattacagagagtt

SEQ ID NO: 45375 - DNA, 25 bp, Probe sequence
acattgaagagcaagattacagaga

SEQ ID NO: 45376 - DNA, 25 bp, Probe sequence
agacattgaagagcaagattacaga

SEQ ID NO: 45377 - DNA, 25 bp, Probe sequence
attgaagagcaagattacagagagt

SEQ ID NO: 45378 - DNA, 25 bp, Probe sequence
gacattgaagagcaagattacagag

SEQ ID NO: 45379 - DNA, 25 bp, Probe sequence
cattgaagagcaagattacagagag

SEQ ID NO: 45380 - DNA, 25 bp, Probe sequence
aagacattgaagagcaagattacag

SEQ ID NO: 45381 - DNA, 25 bp, Probe sequence
gaagagcaagattacagagagttat

SEQ ID NO: 45382 - DNA, 25 bp, Probe sequence
ctcagcttggtagagcacttggttt

SEQ ID NO: 45383 - DNA, 25 bp, Probe sequence
ttgactacggatcaagaggttatgg

SEQ ID NO: 45384 - DNA, 25 bp, Probe sequence
ctacggatcaagaggttatgggttc

SEQ ID NO: 45385 - DNA, 25 bp, Probe sequence
actacggatcaagaggttatgggtt

SEQ ID NO: 45386 - DNA, 25 bp, Probe sequence
tttgactacggatcaagaggttatg

SEQ ID NO: 45387 - DNA, 25 bp, Probe sequence
gtttgactacggatcaagaggttat

SEQ ID NO: 45388 - DNA, 25 bp, Probe sequence
gactacggatcaagaggttatgggt

SEQ ID NO: 45389 - DNA, 25 bp, Probe sequence
tgactacggatcaagaggttatggg

SEQ ID NO: 45390 - DNA, 25 bp, Probe sequence
gatcaagaggttatgggttcgactc

SEQ ID NO: 45391 - DNA, 25 bp, Probe sequence
aagaggttatgggttcgactcctat

SEQ ID NO: 45392 - DNA, 25 bp, Probe sequence
cttttaatcagagggtcagaggttc

SEQ ID NO: 45393 - DNA, 25 bp, Probe sequence
acttttaatcagagggtcagaggtt

SEQ ID NO: 45394 - DNA, 25 bp, Probe sequence
tggtagagcatctgacttttaatca

SEQ ID NO: 45395 - DNA, 25 bp, Probe sequence
tttaatcagagggtcagaggttcga

SEQ ID NO: 45396 - DNA, 25 bp, Probe sequence
ttttaatcagagggtcagaggttcg

SEQ ID NO: 45397 - DNA, 25 bp, Probe sequence
gacttttaatcagagggtcagaggt

SEQ ID NO: 45398 - DNA, 25 bp, Probe sequence
taatcagagggtcagaggttcgaat

SEQ ID NO: 45399 - DNA, 25 bp, Probe sequence
ttaatcagagggtcagaggttcgaa

SEQ ID NO: 45400 - DNA, 25 bp, Probe sequence
ggtagagcatctgacttttaatcag

SEQ ID NO: 45401 - DNA, 25 bp, Probe sequence
cgaacacagaagttaagctccttag

SEQ ID NO: 45402 - DNA, 25 bp, Probe sequence
ccgaacacagaagttaagctcctta

SEQ ID NO: 45403 - DNA, 25 bp, Probe sequence
gaacacagaagttaagctccttagc

SEQ ID NO: 45404 - DNA, 25 bp, Probe sequence
aacacagaagttaagctccttagcg

SEQ ID NO: 45405 - DNA, 25 bp, Probe sequence
gaacttacgttccgctagagtagaa

SEQ ID NO: 45406 - DNA, 25 bp, Probe sequence
catgccgaacacagaagttaagctc

SEQ ID NO: 45407 - DNA, 25 bp, Probe sequence
cacagaagttaagctccttagcgtc

SEQ ID NO: 45408 - DNA, 25 bp, Probe sequence
gaagttaagctccttagcgtcgatg

SEQ ID NO: 45409 - DNA, 25 bp, Probe sequence
agaagttaagctccttagcgtcgat

SEQ ID NO: 45410 - DNA, 25 bp, Probe sequence
cgtggataacctacctataagactg

SEQ ID NO: 45411 - DNA, 25 bp, Probe sequence
gtggataacctacctataagactgg

SEQ ID NO: 45412 - DNA, 25 bp, Probe sequence
aagttgttctcagttcggattgtag

SEQ ID NO: 45413 - DNA, 25 bp, Probe sequence
gtcttgctgtcacttatagatggat

SEQ ID NO: 45414 - DNA, 25 bp, Probe sequence
gttgttctcagttcggattgtagtc

SEQ ID NO: 45415 - DNA, 25 bp, Probe sequence
ttgttctcagttcggattgtagtct

SEQ ID NO: 45416 - DNA, 25 bp, Probe sequence
ggaatcgctagtaatcgtagatcag

SEQ ID NO: 45417 - DNA, 25 bp, Probe sequence
ctggaatcgctagtaatcgtagatc

SEQ ID NO: 45418 - DNA, 25 bp, Probe sequence
tcttgctgtcacttatagatggatc

SEQ ID NO: 45419 - DNA, 25 bp, Probe sequence
ttagtcttaacaaccgtagtctcaa

SEQ ID NO: 45420 - DNA, 25 bp, Probe sequence
agtcttaacaaccgtagtctcaata

SEQ ID NO: 45421 - DNA, 25 bp, Probe sequence
tagtcttaacaaccgtagtctcaat

SEQ ID NO: 45422 - DNA, 25 bp, Probe sequence
gtcttaacaaccgtagtctcaataa

SEQ ID NO: 45423 - DNA, 25 bp, Probe sequence
tcttaacaaccgtagtctcaataat

SEQ ID NO: 45424 - DNA, 25 bp, Probe sequence
cttaacaaccgtagtctcaataatt

SEQ ID NO: 45425 - DNA, 25 bp, Probe sequence
tttagtcttaacaaccgtagtctca

SEQ ID NO: 45426 - DNA, 25 bp, Probe sequence
gtttagtcttaacaaccgtagtctc

SEQ ID NO: 45427 - DNA, 25 bp, Probe sequence
tttaatcatagtcggcgtagtttcg

SEQ ID NO: 45428 - DNA, 25 bp, Probe sequence
aaggattagaagagctgtcagaagt

SEQ ID NO: 45429 - DNA, 25 bp, Probe sequence
ataaagcagttgaaatgaaagcagc

SEQ ID NO: 45430 - DNA, 25 bp, Probe sequence
gtataaagcagttgaaatgaaagca

SEQ ID NO: 45431 - DNA, 25 bp, Probe sequence
tataaagcagttgaaatgaaagcag

SEQ ID NO: 45432 - DNA, 25 bp, Probe sequence
agtataaagcagttgaaatgaaagc

SEQ ID NO: 45433 - DNA, 25 bp, Probe sequence
taaagcagttgaaatgaaagcagca

SEQ ID NO: 45434 - DNA, 25 bp, Probe sequence
gtaaaggattagaagagctgtcaga

SEQ ID NO: 45435 - DNA, 25 bp, Probe sequence
aaaggattagaagagctgtcagaag

SEQ ID NO: 45436 - DNA, 25 bp, Probe sequence
ctacggtaaaggattagaagagctg

SEQ ID NO: 45437 - DNA, 25 bp, Probe sequence
ggttaccaaattcacaaacaaactg

SEQ ID NO: 45438 - DNA, 25 bp, Probe sequence
caggttaccaaattcacaaacaaac

SEQ ID NO: 45439 - DNA, 25 bp, Probe sequence
acaggttaccaaattcacaaacaaa

SEQ ID NO: 45440 - DNA, 25 bp, Probe sequence
aacaggttaccaaattcacaaacaa

SEQ ID NO: 45441 - DNA, 25 bp, Probe sequence
aggttaccaaattcacaaacaaact

SEQ ID NO: 45442 - DNA, 25 bp, Probe sequence
taacaggttaccaaattcacaaaca

SEQ ID NO: 45443 - DNA, 25 bp, Probe sequence
cagttacgcacgacaagtgttataa

SEQ ID NO: 45444 - DNA, 25 bp, Probe sequence
acagttacgcacgacaagtgttata

SEQ ID NO: 45445 - DNA, 25 bp, Probe sequence
tacagttacgcacgacaagtgttat

SEQ ID NO: 45446 - DNA, 25 bp, Probe sequence
atctccgacattgaccattgaataa

SEQ ID NO: 45447 - DNA, 25 bp, Probe sequence
ttaggaatatcaggagtcaatagcg

SEQ ID NO: 45448 - DNA, 25 bp, Probe sequence
taggaatatcaggagtcaatagcgg

SEQ ID NO: 45449 - DNA, 25 bp, Probe sequence
aatatcaggagtcaatagcggagtt

SEQ ID NO: 45450 - DNA, 25 bp, Probe sequence
gatctccgacattgaccattgaata

SEQ ID NO: 45451 - DNA, 25 bp, Probe sequence
gaatatcaggagtcaatagcggagt

SEQ ID NO: 45452 - DNA, 25 bp, Probe sequence
ggaatatcaggagtcaatagcggag

SEQ ID NO: 45453 - DNA, 25 bp, Probe sequence
atatcaggagtcaatagcggagttg

SEQ ID NO: 45454 - DNA, 25 bp, Probe sequence
aggaatatcaggagtcaatagcgga

SEQ ID NO: 45455 - DNA, 25 bp, Probe sequence
tacattaagagaattagcagaagca

SEQ ID NO: 45456 - DNA, 25 bp, Probe sequence
cgcctgaatctatgaatacattaag

SEQ ID NO: 45457 - DNA, 25 bp, Probe sequence
atacattaagagaattagcagaagc

SEQ ID NO: 45458 - DNA, 25 bp, Probe sequence
gcctgaatctatgaatacattaaga

SEQ ID NO: 45459 - DNA, 25 bp, Probe sequence
tgaatacattaagagaattagcaga

SEQ ID NO: 45460 - DNA, 25 bp, Probe sequence
gcgcctgaatctatgaatacattaa

SEQ ID NO: 45461 - DNA, 25 bp, Probe sequence
aaatcagacataaatcacagtcatg

SEQ ID NO: 45462 - DNA, 25 bp, Probe sequence
taaaggtgcgaaaggtgataaaggc

SEQ ID NO: 45463 - DNA, 25 bp, Probe sequence
cgcgcctgaatctatgaatacatta

SEQ ID NO: 45464 - DNA, 25 bp, Probe sequence
ttgatagtggtattgaatctgctgt

SEQ ID NO: 45465 - DNA, 25 bp, Probe sequence
gttgatagtggtattgaatctgctg

SEQ ID NO: 45466 - DNA, 25 bp, Probe sequence
tgatagtggtattgaatctgctgta

SEQ ID NO: 45467 - DNA, 25 bp, Probe sequence
cacattaagagaattagcagaagca

SEQ ID NO: 45468 - DNA, 25 bp, Probe sequence
acacattaagagaattagcagaagc

SEQ ID NO: 45469 - DNA, 25 bp, Probe sequence
cgcctgaatctatgaacacattaag

SEQ ID NO: 45470 - DNA, 25 bp, Probe sequence
cgttgatagtggtattgaatctgct

SEQ ID NO: 45471 - DNA, 25 bp, Probe sequence
tcgttgatagtggtattgaatctgc

SEQ ID NO: 45472 - DNA, 25 bp, Probe sequence
gatagtggtattgaatctgctgtag

SEQ ID NO: 45473 - DNA, 25 bp, Probe sequence
cgtatgtgaagattatagtgcgagt

SEQ ID NO: 45474 - DNA, 25 bp, Probe sequence
ttagaccaccatatcatccagacaa

SEQ ID NO: 45475 - DNA, 25 bp, Probe sequence
ttgttagaccaccatatcatccaga

SEQ ID NO: 45476 - DNA, 25 bp, Probe sequence
ccagaagatgatagtgatgataacg

SEQ ID NO: 45477 - DNA, 25 bp, Probe sequence
ctaatgtaagagactcgtcaccaac

SEQ ID NO: 45478 - DNA, 25 bp, Probe sequence
gacaacaatcctaactacgcaatga

SEQ ID NO: 45479 - DNA, 25 bp, Probe sequence
aattggaatatgattgacaacggtg

SEQ ID NO: 45480 - DNA, 25 bp, Probe sequence
ctattgatgtacctggttctggaat

SEQ ID NO: 45481 - DNA, 25 bp, Probe sequence
acaacaatcctaactacgcaatgac

SEQ ID NO: 45482 - DNA, 25 bp, Probe sequence
tacaccttattcttcaacggcttta

SEQ ID NO: 45483 - DNA, 25 bp, Probe sequence
ccttattcttcaacggctttaatgt

SEQ ID NO: 45484 - DNA, 25 bp, Probe sequence
accttattcttcaacggctttaatg

SEQ ID NO: 45485 - DNA, 25 bp, Probe sequence
caccttattcttcaacggctttaat

SEQ ID NO: 45486 - DNA, 25 bp, Probe sequence
ttacaccttattcttcaacggcttt

SEQ ID NO: 45487 - DNA, 25 bp, Probe sequence
tttacaccttattcttcaacggctt

SEQ ID NO: 45488 - DNA, 25 bp, Probe sequence
ttattcttcaacggctttaatgtgc

SEQ ID NO: 45489 - DNA, 25 bp, Probe sequence
cttattcttcaacggctttaatgtg

SEQ ID NO: 45490 - DNA, 25 bp, Probe sequence
acaccttattcttcaacggctttaa

SEQ ID NO: 45491 - DNA, 25 bp, Probe sequence
agaatacgctttaatcactggagaa

SEQ ID NO: 45492 - DNA, 25 bp, Probe sequence
gaatacgctttaatcactggagaaa

SEQ ID NO: 45493 - DNA, 25 bp, Probe sequence
aagaatacgctttaatcactggaga

SEQ ID NO: 45494 - DNA, 25 bp, Probe sequence
agaagaatacgctttaatcactgga

SEQ ID NO: 45495 - DNA, 25 bp, Probe sequence
gaagaatacgctttaatcactggag

SEQ ID NO: 45496 - DNA, 25 bp, Probe sequence
aagaagaatacgctttaatcactgg

SEQ ID NO: 45497 - DNA, 25 bp, Probe sequence
aatacgctttaatcactggagaaaa

SEQ ID NO: 45498 - DNA, 25 bp, Probe sequence
aaagaagaatacgctttaatcactg

SEQ ID NO: 45499 - DNA, 25 bp, Probe sequence
aaacaaaagatgaaaagtcacaggt

SEQ ID NO: 45500 - DNA, 25 bp, Probe sequence
agatgtagatgataacaatgtgcct

SEQ ID NO: 45501 - DNA, 25 bp, Probe sequence
gatgtagatgataacaatgtgccta

SEQ ID NO: 45502 - DNA, 25 bp, Probe sequence
tagatgtagatgataacaatgtgcc

SEQ ID NO: 45503 - DNA, 25 bp, Probe sequence
tgtagatgataacaatgtgcctatt

SEQ ID NO: 45504 - DNA, 25 bp, Probe sequence
atgtagatgataacaatgtgcctat

SEQ ID NO: 45505 - DNA, 25 bp, Probe sequence
acggcgaaattaaatacaatagcaa

SEQ ID NO: 45506 - DNA, 25 bp, Probe sequence
aacggcgaaattaaatacaatagca

SEQ ID NO: 45507 - DNA, 25 bp, Probe sequence
tcactaacggcgaaattaaatacaa

SEQ ID NO: 45508 - DNA, 25 bp, Probe sequence
acgtattaacaatggaattagctca

SEQ ID NO: 45509 - DNA, 25 bp, Probe sequence
gctaaagagtcacgtcaaagagtta

SEQ ID NO: 45510 - DNA, 25 bp, Probe sequence
tatgattcgagaagctaaagagtca

SEQ ID NO: 45511 - DNA, 25 bp, Probe sequence
aaagagtcacgtcaaagagttatgg

SEQ ID NO: 45512 - DNA, 25 bp, Probe sequence
atgattcgagaagctaaagagtcac

SEQ ID NO: 45513 - DNA, 25 bp, Probe sequence
acgtcaaagagttatggagtctaaa

SEQ ID NO: 45514 - DNA, 25 bp, Probe sequence
cacgtcaaagagttatggagtctaa

SEQ ID NO: 45515 - DNA, 25 bp, Probe sequence
taaagagtcacgtcaaagagttatg

SEQ ID NO: 45516 - DNA, 25 bp, Probe sequence
atatgattcgagaagctaaagagtc

SEQ ID NO: 45517 - DNA, 25 bp, Probe sequence
gatatgattcgagaagctaaagagt

SEQ ID NO: 45518 - DNA, 25 bp, Probe sequence
ggaatacacttcagatacacaacct

SEQ ID NO: 45519 - DNA, 25 bp, Probe sequence
tggaatacacttcagatacacaacc

SEQ ID NO: 45520 - DNA, 25 bp, Probe sequence
atggaatacacttcagatacacaac

SEQ ID NO: 45521 - DNA, 25 bp, Probe sequence
acctatggaatacacttcagataca

SEQ ID NO: 45522 - DNA, 25 bp, Probe sequence
ggtacacacaatgcgtatagataca

SEQ ID NO: 45523 - DNA, 25 bp, Probe sequence
cctatggaatacacttcagatacac

SEQ ID NO: 45524 - DNA, 25 bp, Probe sequence
atataggcggtgtgaataacaactt

SEQ ID NO: 45525 - DNA, 25 bp, Probe sequence
gatataggcggtgtgaataacaact

SEQ ID NO: 45526 - DNA, 25 bp, Probe sequence
gtacacacaatgcgtatagatacat

SEQ ID NO: 45527 - DNA, 25 bp, Probe sequence
aagagaatcatatccagaagcagac

SEQ ID NO: 45528 - DNA, 25 bp, Probe sequence
agatattggcttgtagtgaattgga

SEQ ID NO: 45529 - DNA, 25 bp, Probe sequence
cagatattggcttgtagtgaattgg

SEQ ID NO: 45530 - DNA, 25 bp, Probe sequence
attggcttgtagtgaattggatgta

SEQ ID NO: 45531 - DNA, 25 bp, Probe sequence
tattggcttgtagtgaattggatgt

SEQ ID NO: 45532 - DNA, 25 bp, Probe sequence
atattggcttgtagtgaattggatg

SEQ ID NO: 45533 - DNA, 25 bp, Probe sequence
gatattggcttgtagtgaattggat

SEQ ID NO: 45534 - DNA, 25 bp, Probe sequence
taagagaatcatatccagaagcaga

SEQ ID NO: 45535 - DNA, 25 bp, Probe sequence
ggttgaatgtactgctagagagatt

SEQ ID NO: 45536 - DNA, 25 bp, Probe sequence
tcagacattgcttatatgcgagata

SEQ ID NO: 45537 - DNA, 25 bp, Probe sequence
aatcgttcagacattgcttatatgc

SEQ ID NO: 45538 - DNA, 25 bp, Probe sequence
ttcagacattgcttatatgcgagat

SEQ ID NO: 45539 - DNA, 25 bp, Probe sequence
agacattgcttatatgcgagatatg

SEQ ID NO: 45540 - DNA, 25 bp, Probe sequence
cagacattgcttatatgcgagatat

SEQ ID NO: 45541 - DNA, 25 bp, Probe sequence
attgcttatatgcgagatatgttgt

SEQ ID NO: 45542 - DNA, 25 bp, Probe sequence
gttcagacattgcttatatgcgaga

SEQ ID NO: 45543 - DNA, 25 bp, Probe sequence
cattgcttatatgcgagatatgttg

SEQ ID NO: 45544 - DNA, 25 bp, Probe sequence
gtattggaacaagcctagagttaga

SEQ ID NO: 45545 - DNA, 25 bp, Probe sequence
atatccaacggcttaacgaaggtaa

SEQ ID NO: 45546 - DNA, 25 bp, Probe sequence
aatatccaacggcttaacgaaggta

SEQ ID NO: 45547 - DNA, 25 bp, Probe sequence
atgtcaacacttggtattacagatt

SEQ ID NO: 45548 - DNA, 25 bp, Probe sequence
agagtatgaaatgctaacccaagaa

SEQ ID NO: 45549 - DNA, 25 bp, Probe sequence
aagagtatgaaatgctaacccaaga

SEQ ID NO: 45550 - DNA, 25 bp, Probe sequence
atgcgaaagagtatgaaatgctaac

SEQ ID NO: 45551 - DNA, 25 bp, Probe sequence
atgtatgcgaaagagtatgaaatgc

SEQ ID NO: 45552 - DNA, 25 bp, Probe sequence
cgaatgtatgcgaaagagtatgaaa

SEQ ID NO: 45553 - DNA, 25 bp, Probe sequence
acacttggtattacagatttgaacg

SEQ ID NO: 45554 - DNA, 25 bp, Probe sequence
ttctatcggtcaaggtgtatcaatg

SEQ ID NO: 45555 - DNA, 25 bp, Probe sequence
ctatcggtcaaggtgtatcaatgtt

SEQ ID NO: 45556 - DNA, 25 bp, Probe sequence
cttctatcggtcaaggtgtatcaat

SEQ ID NO: 45557 - DNA, 25 bp, Probe sequence
tctatcggtcaaggtgtatcaatgt

SEQ ID NO: 45558 - DNA, 25 bp, Probe sequence
tatcggtcaaggtgtatcaatgttg

SEQ ID NO: 45559 - DNA, 25 bp, Probe sequence
gcttctatcggtcaaggtgtatcaa

SEQ ID NO: 45560 - DNA, 25 bp, Probe sequence
caaggtgtatcaatgttgcctgtag

SEQ ID NO: 45561 - DNA, 25 bp, Probe sequence
tgtatcaatgttgcctgtaggttta

SEQ ID NO: 45562 - DNA, 25 bp, Probe sequence
tatcaatgttgcctgtaggtttaga

SEQ ID NO: 45563 - DNA, 25 bp, Probe sequence
tatgaatatggagtgaatggtcgtt

SEQ ID NO: 45564 - DNA, 25 bp, Probe sequence
atatgaatatggagtgaatggtcgt

SEQ ID NO: 45565 - DNA, 25 bp, Probe sequence
aatatgaatatggagtgaatggtcg

SEQ ID NO: 45566 - DNA, 25 bp, Probe sequence
tgaatatgaatatggagtgaatggt

SEQ ID NO: 45567 - DNA, 25 bp, Probe sequence
taactgaatacggcttatcacatga

SEQ ID NO: 45568 - DNA, 25 bp, Probe sequence
aactgaatacggcttatcacatgaa

SEQ ID NO: 45569 - DNA, 25 bp, Probe sequence
ttaactgaatacggcttatcacatg

SEQ ID NO: 45570 - DNA, 25 bp, Probe sequence
actgaatacggcttatcacatgaag

SEQ ID NO: 45571 - DNA, 25 bp, Probe sequence
gaatatgaatatggagtgaatggtc

SEQ ID NO: 45572 - DNA, 25 bp, Probe sequence
ttgatagttattctggcgatacgaa

SEQ ID NO: 45573 - DNA, 25 bp, Probe sequence
tgatagttattctggcgatacgaat

SEQ ID NO: 45574 - DNA, 25 bp, Probe sequence
tttgatagttattctggcgatacga

SEQ ID NO: 45575 - DNA, 25 bp, Probe sequence
gtttgatagttattctggcgatacg

SEQ ID NO: 45576 - DNA, 25 bp, Probe sequence
cgtttgatagttattctggcgatac

SEQ ID NO: 45577 - DNA, 25 bp, Probe sequence
tgatatttggagtgtaagcgatgat

SEQ ID NO: 45578 - DNA, 25 bp, Probe sequence
ttgatatttggagtgtaagcgatga

SEQ ID NO: 45579 - DNA, 25 bp, Probe sequence
gatagttattctggcgatacgaatt

SEQ ID NO: 45580 - DNA, 25 bp, Probe sequence
tatgaaacgctacaaggatatggat

SEQ ID NO: 45581 - DNA, 25 bp, Probe sequence
ttgcttgaagatgacgaattagaag

SEQ ID NO: 45582 - DNA, 25 bp, Probe sequence
attgcttgaagatgacgaattagaa

SEQ ID NO: 45583 - DNA, 25 bp, Probe sequence
cattgcttgaagatgacgaattaga

SEQ ID NO: 45584 - DNA, 25 bp, Probe sequence
gcattgcttgaagatgacgaattag

SEQ ID NO: 45585 - DNA, 25 bp, Probe sequence
caatggaaggtactgagaagaagtt

SEQ ID NO: 45586 - DNA, 25 bp, Probe sequence
ttatgaccgtaacagtgattcgtta

SEQ ID NO: 45587 - DNA, 25 bp, Probe sequence
tatgaccgtaacagtgattcgttag

SEQ ID NO: 45588 - DNA, 25 bp, Probe sequence
ttgaatcaaggtaacaatccgttcg

SEQ ID NO: 45589 - DNA, 25 bp, Probe sequence
ttgctaagttagttcctgctgacaa

SEQ ID NO: 45590 - DNA, 25 bp, Probe sequence
accttagagacatagcaagagaatt

SEQ ID NO: 45591 - DNA, 25 bp, Probe sequence
taccttagagacatagcaagagaat

SEQ ID NO: 45592 - DNA, 25 bp, Probe sequence
ataccttagagacatagcaagagaa

SEQ ID NO: 45593 - DNA, 25 bp, Probe sequence
aataccttagagacatagcaagaga

SEQ ID NO: 45594 - DNA, 25 bp, Probe sequence
ccttagagacatagcaagagaatta

SEQ ID NO: 45595 - DNA, 25 bp, Probe sequence
tgacaaataccttagagacatagca

SEQ ID NO: 45596 - DNA, 25 bp, Probe sequence
agcgaaacgaaacagttattattga

SEQ ID NO: 45597 - DNA, 25 bp, Probe sequence
ctgacaaataccttagagacatagc

SEQ ID NO: 45598 - DNA, 25 bp, Probe sequence
aagcgaaacgaaacagttattattg

SEQ ID NO: 45599 - DNA, 25 bp, Probe sequence
aagacctatcagcaacatactcaag

SEQ ID NO: 45600 - DNA, 25 bp, Probe sequence
tgaaggattaggagacaatacggta

SEQ ID NO: 45601 - DNA, 25 bp, Probe sequence
gacctatcagcaacatactcaagat

SEQ ID NO: 45602 - DNA, 25 bp, Probe sequence
tggaatgacagatgtgattggtaat

SEQ ID NO: 45603 - DNA, 25 bp, Probe sequence
ttcttacctgacttaatgcttggac

SEQ ID NO: 45604 - DNA, 25 bp, Probe sequence
gttcttacctgacttaatgcttgga

SEQ ID NO: 45605 - DNA, 25 bp, Probe sequence
agacctatcagcaacatactcaaga

SEQ ID NO: 45606 - DNA, 25 bp, Probe sequence
acctatcagcaacatactcaagatg

SEQ ID NO: 45607 - DNA, 25 bp, Probe sequence
ggaatgacagatgtgattggtaatt

SEQ ID NO: 45608 - DNA, 25 bp, Probe sequence
aatcatacagtcttatctaacggcg

SEQ ID NO: 45609 - DNA, 25 bp, Probe sequence
cacaccgcttagaatactcgtataa

SEQ ID NO: 45610 - DNA, 25 bp, Probe sequence
atcatacagtcttatctaacggcga

SEQ ID NO: 45611 - DNA, 25 bp, Probe sequence
cagaatcacaccgcttagaatactc

SEQ ID NO: 45612 - DNA, 25 bp, Probe sequence
tcatacagtcttatctaacggcgat

SEQ ID NO: 45613 - DNA, 25 bp, Probe sequence
tcacaccgcttagaatactcgtata

SEQ ID NO: 45614 - DNA, 25 bp, Probe sequence
catacagtcttatctaacggcgatg

SEQ ID NO: 45615 - DNA, 25 bp, Probe sequence
aatcacaccgcttagaatactcgta

SEQ ID NO: 45616 - DNA, 25 bp, Probe sequence
atcacaccgcttagaatactcgtat

SEQ ID NO: 45617 - DNA, 25 bp, Probe sequence
tattcagtggaacgattctacagac

SEQ ID NO: 45618 - DNA, 25 bp, Probe sequence
ttattcagtggaacgattctacaga

SEQ ID NO: 45619 - DNA, 25 bp, Probe sequence
gttattcagtggaacgattctacag

SEQ ID NO: 45620 - DNA, 25 bp, Probe sequence
accaatgaaccagtagatacataca

SEQ ID NO: 45621 - DNA, 25 bp, Probe sequence
ccaatgaaccagtagatacatacaa

SEQ ID NO: 45622 - DNA, 25 bp, Probe sequence
gtgaatataccaatgaaccagtaga

SEQ ID NO: 45623 - DNA, 25 bp, Probe sequence
taaccaattacgataacttcactga

SEQ ID NO: 45624 - DNA, 25 bp, Probe sequence
actaaccaattacgataacttcact

SEQ ID NO: 45625 - DNA, 25 bp, Probe sequence
aaccaattacgataacttcactgaa

SEQ ID NO: 45626 - DNA, 25 bp, Probe sequence
attagaacagatacaagaagagcgt

SEQ ID NO: 45627 - DNA, 25 bp, Probe sequence
gattagaacagatacaagaagagcg

SEQ ID NO: 45628 - DNA, 25 bp, Probe sequence
cgattagaacagatacaagaagagc

SEQ ID NO: 45629 - DNA, 25 bp, Probe sequence
ttagaacagatacaagaagagcgtt

SEQ ID NO: 45630 - DNA, 25 bp, Probe sequence
gttacttacacaatcacaccaactt

SEQ ID NO: 45631 - DNA, 25 bp, Probe sequence
acgattagaacagatacaagaagag

SEQ ID NO: 45632 - DNA, 25 bp, Probe sequence
aacgattagaacagatacaagaaga

SEQ ID NO: 45633 - DNA, 25 bp, Probe sequence
agaacgattagaacagatacaagaa

SEQ ID NO: 45634 - DNA, 25 bp, Probe sequence
aagaacgattagaacagatacaaga

SEQ ID NO: 45635 - DNA, 25 bp, Probe sequence
caataggagttatcgacggagatta

SEQ ID NO: 45636 - DNA, 25 bp, Probe sequence
atcaataggagttatcgacggagat

SEQ ID NO: 45637 - DNA, 25 bp, Probe sequence
tcaataggagttatcgacggagatt

SEQ ID NO: 45638 - DNA, 25 bp, Probe sequence
cggcagaattgtatgaattagcgaa

SEQ ID NO: 45639 - DNA, 25 bp, Probe sequence
ataggagttatcgacggagattatt

SEQ ID NO: 45640 - DNA, 25 bp, Probe sequence
aataggagttatcgacggagattat

SEQ ID NO: 45641 - DNA, 25 bp, Probe sequence
tgtcaatgttctccaaatgtgtaaa

SEQ ID NO: 45642 - DNA, 25 bp, Probe sequence
aagcggcagaattgtatgaattagc

SEQ ID NO: 45643 - DNA, 25 bp, Probe sequence
catcaataggagttatcgacggaga

SEQ ID NO: 45644 - DNA, 25 bp, Probe sequence
acaggtcaagaatggatggtatatg

SEQ ID NO: 45645 - DNA, 25 bp, Probe sequence
cacaggtcaagaatggatggtatat

SEQ ID NO: 45646 - DNA, 25 bp, Probe sequence
caagaatggatggtatatgaggact

SEQ ID NO: 45647 - DNA, 25 bp, Probe sequence
tggatggtatatgaggacttagtga

SEQ ID NO: 45648 - DNA, 25 bp, Probe sequence
atggatggtatatgaggacttagtg

SEQ ID NO: 45649 - DNA, 25 bp, Probe sequence
ggatggtatatgaggacttagtgaa

SEQ ID NO: 45650 - DNA, 25 bp, Probe sequence
acacaggtcaagaatggatggtata

SEQ ID NO: 45651 - DNA, 25 bp, Probe sequence
tacacaggtcaagaatggatggtat

SEQ ID NO: 45652 - DNA, 25 bp, Probe sequence
atacacaggtcaagaatggatggta

SEQ ID NO: 45653 - DNA, 25 bp, Probe sequence
tcgatgtatgaagagacaaagcaaa

SEQ ID NO: 45654 - DNA, 25 bp, Probe sequence
tgaatgaaatcaactggaagaaaac

SEQ ID NO: 45655 - DNA, 25 bp, Probe sequence
gacaataacgagttatcgcctttcg

SEQ ID NO: 45656 - DNA, 25 bp, Probe sequence
atgaatgaaatcaactggaagaaaa

SEQ ID NO: 45657 - DNA, 25 bp, Probe sequence
aaatcgatgtatgaagagacaaagc

SEQ ID NO: 45658 - DNA, 25 bp, Probe sequence
atcgatgtatgaagagacaaagcaa

SEQ ID NO: 45659 - DNA, 25 bp, Probe sequence
aatcgatgtatgaagagacaaagca

SEQ ID NO: 45660 - DNA, 25 bp, Probe sequence
acaataacgagttatcgcctttcga

SEQ ID NO: 45661 - DNA, 25 bp, Probe sequence
tgaaatcgatgtatgaagagacaaa

SEQ ID NO: 45662 - DNA, 25 bp, Probe sequence
tataaccgtgacgaagatgacagta

SEQ ID NO: 45663 - DNA, 25 bp, Probe sequence
accgtgatgattattataaccgtga

SEQ ID NO: 45664 - DNA, 25 bp, Probe sequence
tattataaccgtgacgaagatgaca

SEQ ID NO: 45665 - DNA, 25 bp, Probe sequence
ccgtgatgattattataaccgtgac

SEQ ID NO: 45666 - DNA, 25 bp, Probe sequence
ctaacgaattggtaactgagttcaa

SEQ ID NO: 45667 - DNA, 25 bp, Probe sequence
attataaccgtgacgaagatgacag

SEQ ID NO: 45668 - DNA, 25 bp, Probe sequence
ataaccgtgacgaagatgacagtat

SEQ ID NO: 45669 - DNA, 25 bp, Probe sequence
gtgatgattattataaccgtgacga

SEQ ID NO: 45670 - DNA, 25 bp, Probe sequence
gctaacgaattggtaactgagttca

SEQ ID NO: 45671 - DNA, 25 bp, Probe sequence
catgaataagttggcagaatttggg

SEQ ID NO: 45672 - DNA, 25 bp, Probe sequence
ctaacttaccagcaatcatgcgtaa

SEQ ID NO: 45673 - DNA, 25 bp, Probe sequence
tgagcaaaacacaagcattagaaat

SEQ ID NO: 45674 - DNA, 25 bp, Probe sequence
atgagcaaaacacaagcattagaaa

SEQ ID NO: 45675 - DNA, 25 bp, Probe sequence
gagcaaaacacaagcattagaaatt

SEQ ID NO: 45676 - DNA, 25 bp, Probe sequence
agttagaaatgtggattgatgtatt

SEQ ID NO: 45677 - DNA, 25 bp, Probe sequence
aagttagaaatgtggattgatgtat

SEQ ID NO: 45678 - DNA, 25 bp, Probe sequence
gatgagcaaaacacaagcattagaa

SEQ ID NO: 45679 - DNA, 25 bp, Probe sequence
agaaatgtggattgatgtattaagt

SEQ ID NO: 45680 - DNA, 25 bp, Probe sequence
acaaggttatattatgctatccgaa

SEQ ID NO: 45681 - DNA, 25 bp, Probe sequence
aacaaggttatattatgctatccga

SEQ ID NO: 45682 - DNA, 25 bp, Probe sequence
gaacaaggttatattatgctatccg

SEQ ID NO: 45683 - DNA, 25 bp, Probe sequence
ataaagaagaagaaagagaagccgt

SEQ ID NO: 45684 - DNA, 25 bp, Probe sequence
aataaagaagaagaaagagaagccg

SEQ ID NO: 45685 - DNA, 25 bp, Probe sequence
taaagaagaagaaagagaagccgtc

SEQ ID NO: 45686 - DNA, 25 bp, Probe sequence
acgatacagaagaagaaagagaaga

SEQ ID NO: 45687 - DNA, 25 bp, Probe sequence
aagccgtcttctcatcttcaataaa

SEQ ID NO: 45688 - DNA, 25 bp, Probe sequence
caactgggctaaagagaatgtcaaa

SEQ ID NO: 45689 - DNA, 25 bp, Probe sequence
ttgacagtaacaatcacattgaacg

SEQ ID NO: 45690 - DNA, 25 bp, Probe sequence
gacagtaacaatcacattgaacgag

SEQ ID NO: 45691 - DNA, 25 bp, Probe sequence
cagtaacaatcacattgaacgagta

SEQ ID NO: 45692 - DNA, 25 bp, Probe sequence
acagtaacaatcacattgaacgagt

SEQ ID NO: 45693 - DNA, 25 bp, Probe sequence
gtaacaatcacattgaacgagtaca

SEQ ID NO: 45694 - DNA, 25 bp, Probe sequence
tgacagtaacaatcacattgaacga

SEQ ID NO: 45695 - DNA, 25 bp, Probe sequence
taacaatcacattgaacgagtacag

SEQ ID NO: 45696 - DNA, 25 bp, Probe sequence
agtaacaatcacattgaacgagtac

SEQ ID NO: 45697 - DNA, 25 bp, Probe sequence
acaatcacattgaacgagtacagaa

SEQ ID NO: 45698 - DNA, 25 bp, Probe sequence
ccaaagcaggacaaataataagaga

SEQ ID NO: 45699 - DNA, 25 bp, Probe sequence
aagcaggacaaataataagagaact

SEQ ID NO: 45700 - DNA, 25 bp, Probe sequence
tatctgtttctaaatccaaagcagg

SEQ ID NO: 45701 - DNA, 25 bp, Probe sequence
gcaggacaaataataagagaactga

SEQ ID NO: 45702 - DNA, 25 bp, Probe sequence
agcaggacaaataataagagaactg

SEQ ID NO: 45703 - DNA, 25 bp, Probe sequence
aaagcaggacaaataataagagaac

SEQ ID NO: 45704 - DNA, 25 bp, Probe sequence
caaagcaggacaaataataagagaa

SEQ ID NO: 45705 - DNA, 25 bp, Probe sequence
gtttctaaatccaaagcaggacaaa

SEQ ID NO: 45706 - DNA, 25 bp, Probe sequence
atctgtttctaaatccaaagcagga

SEQ ID NO: 45707 - DNA, 25 bp, Probe sequence
tcaacgaatcaggattatacagtct

SEQ ID NO: 45708 - DNA, 25 bp, Probe sequence
atcaacgaatcaggattatacagtc

SEQ ID NO: 45709 - DNA, 25 bp, Probe sequence
caacgaatcaggattatacagtcta

SEQ ID NO: 45710 - DNA, 25 bp, Probe sequence
acagtctaatcttcgatgcttctaa

SEQ ID NO: 45711 - DNA, 25 bp, Probe sequence
atacagtctaatcttcgatgcttct

SEQ ID NO: 45712 - DNA, 25 bp, Probe sequence
tacagtctaatcttcgatgcttcta

SEQ ID NO: 45713 - DNA, 25 bp, Probe sequence
tatcaacgaatcaggattatacagt

SEQ ID NO: 45714 - DNA, 25 bp, Probe sequence
aacgaatcaggattatacagtctaa

SEQ ID NO: 45715 - DNA, 25 bp, Probe sequence
tacgcaacagacaatgtaattgaac

SEQ ID NO: 45716 - DNA, 25 bp, Probe sequence
taagaacattagaggttgacggaga

SEQ ID NO: 45717 - DNA, 25 bp, Probe sequence
gtaagaacattagaggttgacggag

SEQ ID NO: 45718 - DNA, 25 bp, Probe sequence
caagagttacacagattcagacact

SEQ ID NO: 45719 - DNA, 25 bp, Probe sequence
agtaagaacattagaggttgacgga

SEQ ID NO: 45720 - DNA, 25 bp, Probe sequence
cagtaagaacattagaggttgacgg

SEQ ID NO: 45721 - DNA, 25 bp, Probe sequence
ccagtaagaacattagaggttgacg

SEQ ID NO: 45722 - DNA, 25 bp, Probe sequence
aagagttacacagattcagacacta

SEQ ID NO: 45723 - DNA, 25 bp, Probe sequence
agagttacacagattcagacactat

SEQ ID NO: 45724 - DNA, 25 bp, Probe sequence
gcaagagttacacagattcagacac

SEQ ID NO: 45725 - DNA, 25 bp, Probe sequence
catctaagcatgaataacgaagacg

SEQ ID NO: 45726 - DNA, 25 bp, Probe sequence
acatctaagcatgaataacgaagac

SEQ ID NO: 45727 - DNA, 25 bp, Probe sequence
taagcatgaataacgaagacgcatt

SEQ ID NO: 45728 - DNA, 25 bp, Probe sequence
aacatctaagcatgaataacgaaga

SEQ ID NO: 45729 - DNA, 25 bp, Probe sequence
atctaagcatgaataacgaagacgc

SEQ ID NO: 45730 - DNA, 25 bp, Probe sequence
ctaagcatgaataacgaagacgcat

SEQ ID NO: 45731 - DNA, 25 bp, Probe sequence
tctaagcatgaataacgaagacgca

SEQ ID NO: 45732 - DNA, 25 bp, Probe sequence
acaaacatctaagcatgaataacga

SEQ ID NO: 45733 - DNA, 25 bp, Probe sequence
aacaaacatctaagcatgaataacg

SEQ ID NO: 45734 - DNA, 25 bp, Probe sequence
actcaagaagatttagcaaacctct

SEQ ID NO: 45735 - DNA, 25 bp, Probe sequence
tactcaagaagatttagcaaacctc

SEQ ID NO: 45736 - DNA, 25 bp, Probe sequence
tgtactcaagaagatttagcaaacc

SEQ ID NO: 45737 - DNA, 25 bp, Probe sequence
tgatgagatgtttattatcgctgat

SEQ ID NO: 45738 - DNA, 25 bp, Probe sequence
atgatgagatgtttattatcgctga

SEQ ID NO: 45739 - DNA, 25 bp, Probe sequence
gtactcaagaagatttagcaaacct

SEQ ID NO: 45740 - DNA, 25 bp, Probe sequence
gtgtactcaagaagatttagcaaac

SEQ ID NO: 45741 - DNA, 25 bp, Probe sequence
agtgtactcaagaagatttagcaaa

SEQ ID NO: 45742 - DNA, 25 bp, Probe sequence
aagtgtactcaagaagatttagcaa

SEQ ID NO: 45743 - DNA, 25 bp, Probe sequence
ggtatggaagaagcgagtatcaata

SEQ ID NO: 45744 - DNA, 25 bp, Probe sequence
atggaagaagcgagtatcaatatgg

SEQ ID NO: 45745 - DNA, 25 bp, Probe sequence
ggaagaagcgagtatcaatatggat

SEQ ID NO: 45746 - DNA, 25 bp, Probe sequence
gaagaagcgagtatcaatatggatt

SEQ ID NO: 45747 - DNA, 25 bp, Probe sequence
tggaagaagcgagtatcaatatgga

SEQ ID NO: 45748 - DNA, 25 bp, Probe sequence
gcgagtatcaatatggattatcaca

SEQ ID NO: 45749 - DNA, 25 bp, Probe sequence
tatggaagaagcgagtatcaatatg

SEQ ID NO: 45750 - DNA, 25 bp, Probe sequence
gtatggaagaagcgagtatcaatat

SEQ ID NO: 45751 - DNA, 25 bp, Probe sequence
ttaacggtatggaagaagcgagtat

SEQ ID NO: 45752 - DNA, 25 bp, Probe sequence
agcgacttactggagaaacatatag

SEQ ID NO: 45753 - DNA, 25 bp, Probe sequence
cgacttactggagaaacatatagca

SEQ ID NO: 45754 - DNA, 25 bp, Probe sequence
gcgacttactggagaaacatatagc

SEQ ID NO: 45755 - DNA, 25 bp, Probe sequence
tatcaccaaagtacattctgctcaa

SEQ ID NO: 45756 - DNA, 25 bp, Probe sequence
actggagaaacatatagcaatatcg

SEQ ID NO: 45757 - DNA, 25 bp, Probe sequence
caccaaagtacattctgctcaaatt

SEQ ID NO: 45758 - DNA, 25 bp, Probe sequence
gacttactggagaaacatatagcaa

SEQ ID NO: 45759 - DNA, 25 bp, Probe sequence
ctatcaccaaagtacattctgctca

SEQ ID NO: 45760 - DNA, 25 bp, Probe sequence
tcaccaaagtacattctgctcaaat

SEQ ID NO: 45761 - DNA, 25 bp, Probe sequence
taacggcaaacaaacagaatttaag

SEQ ID NO: 45762 - DNA, 25 bp, Probe sequence
ctaacggcaaacaaacagaatttaa

SEQ ID NO: 45763 - DNA, 25 bp, Probe sequence
catttactaaagtagacgctaacgg

SEQ ID NO: 45764 - DNA, 25 bp, Probe sequence
gctaacggcaaacaaacagaattta

SEQ ID NO: 45765 - DNA, 25 bp, Probe sequence
atttactaaagtagacgctaacggc

SEQ ID NO: 45766 - DNA, 25 bp, Probe sequence
tcatttactaaagtagacgctaacg

SEQ ID NO: 45767 - DNA, 25 bp, Probe sequence
aacggcaaacaaacagaatttaagc

SEQ ID NO: 45768 - DNA, 25 bp, Probe sequence
ggcaaacaaacagaatttaagcgtc

SEQ ID NO: 45769 - DNA, 25 bp, Probe sequence
tactaaagtagacgctaacggcaaa

SEQ ID NO: 45770 - DNA, 25 bp, Probe sequence
tcgccaatattaatcctgaagtatc

SEQ ID NO: 45771 - DNA, 25 bp, Probe sequence
cgccaatattaatcctgaagtatca

SEQ ID NO: 45772 - DNA, 25 bp, Probe sequence
actggagaaacatacaataacatcg

SEQ ID NO: 45773 - DNA, 25 bp, Probe sequence
acatacaataacatcgaagtcatca

SEQ ID NO: 45774 - DNA, 25 bp, Probe sequence
gcgacttactggagaaacatacaat

SEQ ID NO: 45775 - DNA, 25 bp, Probe sequence
ttcgccaatattaatcctgaagtat

SEQ ID NO: 45776 - DNA, 25 bp, Probe sequence
attcgccaatattaatcctgaagta

SEQ ID NO: 45777 - DNA, 25 bp, Probe sequence
taatcctgaagtatcaaacgaccaa

SEQ ID NO: 45778 - DNA, 25 bp, Probe sequence
ttaatcctgaagtatcaaacgacca

SEQ ID NO: 45779 - DNA, 25 bp, Probe sequence
caaatcgacaaagaaggtacagaac

SEQ ID NO: 45780 - DNA, 25 bp, Probe sequence
tacaaatcgacaaagaaggtacaga

SEQ ID NO: 45781 - DNA, 25 bp, Probe sequence
acaaatcgacaaagaaggtacagaa

SEQ ID NO: 45782 - DNA, 25 bp, Probe sequence
agtatatcaagatttcacaggaagt

SEQ ID NO: 45783 - DNA, 25 bp, Probe sequence
attgcggagacgttaaatttgttat

SEQ ID NO: 45784 - DNA, 25 bp, Probe sequence
ttgcggagacgttaaatttgttata

SEQ ID NO: 45785 - DNA, 25 bp, Probe sequence
tttagtacaaatcgacaaagaaggt

SEQ ID NO: 45786 - DNA, 25 bp, Probe sequence
tgcggagacgttaaatttgttatat

SEQ ID NO: 45787 - DNA, 25 bp, Probe sequence
acagaacgtgtagtatatcaagatt

SEQ ID NO: 45788 - DNA, 25 bp, Probe sequence
gggtacattttgatttcaacaggtt

SEQ ID NO: 45789 - DNA, 25 bp, Probe sequence
agtgggtacattttgatttcaacag

SEQ ID NO: 45790 - DNA, 25 bp, Probe sequence
gtgggtacattttgatttcaacagg

SEQ ID NO: 45791 - DNA, 25 bp, Probe sequence
tgggtacattttgatttcaacaggt

SEQ ID NO: 45792 - DNA, 25 bp, Probe sequence
tagtgggtacattttgatttcaaca

SEQ ID NO: 45793 - DNA, 25 bp, Probe sequence
ggtacattttgatttcaacaggtta

SEQ ID NO: 45794 - DNA, 25 bp, Probe sequence
atagtgggtacattttgatttcaac

SEQ ID NO: 45795 - DNA, 25 bp, Probe sequence
tacaatacacaggatttaaagatgt

SEQ ID NO: 45796 - DNA, 25 bp, Probe sequence
cgattttaatagtgggtacattttg

SEQ ID NO: 45797 - DNA, 25 bp, Probe sequence
acctacagaagttgaatatcatcat

SEQ ID NO: 45798 - DNA, 25 bp, Probe sequence
tacctacagaagttgaatatcatca

SEQ ID NO: 45799 - DNA, 25 bp, Probe sequence
tgcaacgattgatataagaatacct

SEQ ID NO: 45800 - DNA, 25 bp, Probe sequence
cctacagaagttgaatatcatcatt

SEQ ID NO: 45801 - DNA, 25 bp, Probe sequence
acagaagttgaatatcatcatttcg

SEQ ID NO: 45802 - DNA, 25 bp, Probe sequence
atgcaacgattgatataagaatacc

SEQ ID NO: 45803 - DNA, 25 bp, Probe sequence
atacctacagaagttgaatatcatc

SEQ ID NO: 45804 - DNA, 25 bp, Probe sequence
catttcgatgatgtggatgatgaaa

SEQ ID NO: 45805 - DNA, 25 bp, Probe sequence
cagaagttgaatatcatcatttcga

SEQ ID NO: 45806 - DNA, 25 bp, Probe sequence
taatgacacctacgaatatgaacga

SEQ ID NO: 45807 - DNA, 25 bp, Probe sequence
gtaatgacacctacgaatatgaacg

SEQ ID NO: 45808 - DNA, 25 bp, Probe sequence
aatgacacctacgaatatgaacgac

SEQ ID NO: 45809 - DNA, 25 bp, Probe sequence
agtaatgacacctacgaatatgaac

SEQ ID NO: 45810 - DNA, 25 bp, Probe sequence
gaagtaatgacacctacgaatatga

SEQ ID NO: 45811 - DNA, 25 bp, Probe sequence
agaagtaatgacacctacgaatatg

SEQ ID NO: 45812 - DNA, 25 bp, Probe sequence
atgacacctacgaatatgaacgaca

SEQ ID NO: 45813 - DNA, 25 bp, Probe sequence
aagtaatgacacctacgaatatgaa

SEQ ID NO: 45814 - DNA, 25 bp, Probe sequence
acacctacgaatatgaacgacacaa

SEQ ID NO: 45815 - DNA, 25 bp, Probe sequence
aataaagtgggtggtgtaatgtttg

SEQ ID NO: 45816 - DNA, 25 bp, Probe sequence
gaataaagtgggtggtgtaatgttt

SEQ ID NO: 45817 - DNA, 25 bp, Probe sequence
tttgaataaagtgggtggtgtaatg

SEQ ID NO: 45818 - DNA, 25 bp, Probe sequence
tgaataaagtgggtggtgtaatgtt

SEQ ID NO: 45819 - DNA, 25 bp, Probe sequence
ttgaataaagtgggtggtgtaatgt

SEQ ID NO: 45820 - DNA, 25 bp, Probe sequence
catcaagatgtggattctaggatta

SEQ ID NO: 45821 - DNA, 25 bp, Probe sequence
aatagaagacagtctgagaacgcaa

SEQ ID NO: 45822 - DNA, 25 bp, Probe sequence
agaatagaagacagtctgagaacgc

SEQ ID NO: 45823 - DNA, 25 bp, Probe sequence
atttgaataaagtgggtggtgtaat

SEQ ID NO: 45824 - DNA, 25 bp, Probe sequence
gcgtggtatgtagatatggaagtta

SEQ ID NO: 45825 - DNA, 25 bp, Probe sequence
atagcgtggtatgtagatatggaag

SEQ ID NO: 45826 - DNA, 25 bp, Probe sequence
tagcgtggtatgtagatatggaagt

SEQ ID NO: 45827 - DNA, 25 bp, Probe sequence
agcgtggtatgtagatatggaagtt

SEQ ID NO: 45828 - DNA, 25 bp, Probe sequence
aagaagatatagcgtggtatgtaga

SEQ ID NO: 45829 - DNA, 25 bp, Probe sequence
tatagcgtggtatgtagatatggaa

SEQ ID NO: 45830 - DNA, 25 bp, Probe sequence
agaagatatagcgtggtatgtagat

SEQ ID NO: 45831 - DNA, 25 bp, Probe sequence
atatagcgtggtatgtagatatgga

SEQ ID NO: 45832 - DNA, 25 bp, Probe sequence
gatatagcgtggtatgtagatatgg

SEQ ID NO: 45833 - DNA, 25 bp, Probe sequence
cgactgatgagagtgaaggataaat

SEQ ID NO: 45834 - DNA, 25 bp, Probe sequence
catgatgctaaagtcaatttcggag

SEQ ID NO: 45835 - DNA, 25 bp, Probe sequence
gagaatcttaaagtggcaccagaga

SEQ ID NO: 45836 - DNA, 25 bp, Probe sequence
gactgatgagagtgaaggataaata

SEQ ID NO: 45837 - DNA, 25 bp, Probe sequence
taaagtcaatttcggagcttccaaa

SEQ ID NO: 45838 - DNA, 25 bp, Probe sequence
aatgtaaaagaactatcaggggtgc

SEQ ID NO: 45839 - DNA, 25 bp, Probe sequence
aaatgtaaaagaactatcaggggtg

SEQ ID NO: 45840 - DNA, 25 bp, Probe sequence
ctaaagtcaatttcggagcttccaa

SEQ ID NO: 45841 - DNA, 25 bp, Probe sequence
tttcgagaatcttaaagtggcacca

SEQ ID NO: 45842 - DNA, 25 bp, Probe sequence
tgaagattatgcgagtctgattgaa

SEQ ID NO: 45843 - DNA, 25 bp, Probe sequence
gtgaagattatgcgagtctgattga

SEQ ID NO: 45844 - DNA, 25 bp, Probe sequence
ggtgaagattatgcgagtctgattg

SEQ ID NO: 45845 - DNA, 25 bp, Probe sequence
atggtgaagattatgcgagtctgat

SEQ ID NO: 45846 - DNA, 25 bp, Probe sequence
tggtgaagattatgcgagtctgatt

SEQ ID NO: 45847 - DNA, 25 bp, Probe sequence
aatggtgaagattatgcgagtctga

SEQ ID NO: 45848 - DNA, 25 bp, Probe sequence
agatggaagttatcaagctcaagtt

SEQ ID NO: 45849 - DNA, 25 bp, Probe sequence
aaatatcaaagcacgaatagcgatt

SEQ ID NO: 45850 - DNA, 25 bp, Probe sequence
gagatggaagttatcaagctcaagt

SEQ ID NO: 45851 - DNA, 25 bp, Probe sequence
ctggttggaacttatatgtagaagc

SEQ ID NO: 45852 - DNA, 25 bp, Probe sequence
gctggttggaacttatatgtagaag

SEQ ID NO: 45853 - DNA, 25 bp, Probe sequence
ggagaagaagcgtatcaggttaatg

SEQ ID NO: 45854 - DNA, 25 bp, Probe sequence
aggagaagaagcgtatcaggttaat

SEQ ID NO: 45855 - DNA, 25 bp, Probe sequence
tcataggctagttcgtaatagtgtt

SEQ ID NO: 45856 - DNA, 25 bp, Probe sequence
ttcataggctagttcgtaatagtgt

SEQ ID NO: 45857 - DNA, 25 bp, Probe sequence
tgttcataggctagttcgtaatagt

SEQ ID NO: 45858 - DNA, 25 bp, Probe sequence
cggtgatgtaattcagatattgacg

SEQ ID NO: 45859 - DNA, 25 bp, Probe sequence
gagagagtaccttcattcatcacaa

SEQ ID NO: 45860 - DNA, 25 bp, Probe sequence
agtagtgatattgatggattgcctc

SEQ ID NO: 45861 - DNA, 25 bp, Probe sequence
cagtagtgatattgatggattgcct

SEQ ID NO: 45862 - DNA, 25 bp, Probe sequence
aggcagtagtgatattgatggattg

SEQ ID NO: 45863 - DNA, 25 bp, Probe sequence
caggcagtagtgatattgatggatt

SEQ ID NO: 45864 - DNA, 25 bp, Probe sequence
gtagtgatattgatggattgcctca

SEQ ID NO: 45865 - DNA, 25 bp, Probe sequence
aataggcgaagcaggaattattcaa

SEQ ID NO: 45866 - DNA, 25 bp, Probe sequence
gcaggcagtagtgatattgatggat

SEQ ID NO: 45867 - DNA, 25 bp, Probe sequence
ttatgcaggcagtagtgatattgat

SEQ ID NO: 45868 - DNA, 25 bp, Probe sequence
tatgcaggcagtagtgatattgatg

SEQ ID NO: 45869 - DNA, 25 bp, Probe sequence
ttattgaagttacggcatatcacat

SEQ ID NO: 45870 - DNA, 25 bp, Probe sequence
tatgaactgaatgaagctaggtaca

SEQ ID NO: 45871 - DNA, 25 bp, Probe sequence
atgaactgaatgaagctaggtacat

SEQ ID NO: 45872 - DNA, 25 bp, Probe sequence
tgaactgaatgaagctaggtacatc

SEQ ID NO: 45873 - DNA, 25 bp, Probe sequence
gaactgaatgaagctaggtacatca

SEQ ID NO: 45874 - DNA, 25 bp, Probe sequence
aactgaatgaagctaggtacatcac

SEQ ID NO: 45875 - DNA, 25 bp, Probe sequence
ttatgaactgaatgaagctaggtac

SEQ ID NO: 45876 - DNA, 25 bp, Probe sequence
cagacgagttattgcacaagataat

SEQ ID NO: 45877 - DNA, 25 bp, Probe sequence
acagacgagttattgcacaagataa

SEQ ID NO: 45878 - DNA, 25 bp, Probe sequence
tcatagatggttacaaggaagaagt

SEQ ID NO: 45879 - DNA, 25 bp, Probe sequence
tgaatcagttaattggaccgatagc

SEQ ID NO: 45880 - DNA, 25 bp, Probe sequence
taattggaccgatagcgagttctta

SEQ ID NO: 45881 - DNA, 25 bp, Probe sequence
attggaccgatagcgagttcttatt

SEQ ID NO: 45882 - DNA, 25 bp, Probe sequence
tgtaactattaacggagtagatggt

SEQ ID NO: 45883 - DNA, 25 bp, Probe sequence
acagtgtaactattaacggagtaga

SEQ ID NO: 45884 - DNA, 25 bp, Probe sequence
atcatagatggttacaaggaagaag

SEQ ID NO: 45885 - DNA, 25 bp, Probe sequence
gtgtaactattaacggagtagatgg

SEQ ID NO: 45886 - DNA, 25 bp, Probe sequence
aattggaccgatagcgagttcttat

SEQ ID NO: 45887 - DNA, 25 bp, Probe sequence
agtcattacaggtacggatttaaga

SEQ ID NO: 45888 - DNA, 25 bp, Probe sequence
agtatgggtggacattaactgaagt

SEQ ID NO: 45889 - DNA, 25 bp, Probe sequence
gtcattacaggtacggatttaagaa

SEQ ID NO: 45890 - DNA, 25 bp, Probe sequence
aagtcattacaggtacggatttaag

SEQ ID NO: 45891 - DNA, 25 bp, Probe sequence
gtatgggtggacattaactgaagtc

SEQ ID NO: 45892 - DNA, 25 bp, Probe sequence
aaagtcattacaggtacggatttaa

SEQ ID NO: 45893 - DNA, 25 bp, Probe sequence
tatgggtggacattaactgaagtca

SEQ ID NO: 45894 - DNA, 25 bp, Probe sequence
tcattacaggtacggatttaagaaa

SEQ ID NO: 45895 - DNA, 25 bp, Probe sequence
tgaagagaataaagaagagactgaa

SEQ ID NO: 45896 - DNA, 25 bp, Probe sequence
tgaaggattgactgaagaagatgtt

SEQ ID NO: 45897 - DNA, 25 bp, Probe sequence
atgaaggattgactgaagaagatgt

SEQ ID NO: 45898 - DNA, 25 bp, Probe sequence
aagatgaaggattgactgaagaaga

SEQ ID NO: 45899 - DNA, 25 bp, Probe sequence
gatgaaggattgactgaagaagatg

SEQ ID NO: 45900 - DNA, 25 bp, Probe sequence
agatgaaggattgactgaagaagat

SEQ ID NO: 45901 - DNA, 25 bp, Probe sequence
gaaggattgactgaagaagatgttc

SEQ ID NO: 45902 - DNA, 25 bp, Probe sequence
tcaatggtgaagatgaagaagattc

SEQ ID NO: 45903 - DNA, 25 bp, Probe sequence
atcaatggtgaagatgaagaagatt

SEQ ID NO: 45904 - DNA, 25 bp, Probe sequence
aatcaatggtgaagatgaagaagat

SEQ ID NO: 45905 - DNA, 25 bp, Probe sequence
caattctagtctcaggcgtatcatt

SEQ ID NO: 45906 - DNA, 25 bp, Probe sequence
aatccaattctagtctcaggcgtat

SEQ ID NO: 45907 - DNA, 25 bp, Probe sequence
atccaattctagtctcaggcgtatc

SEQ ID NO: 45908 - DNA, 25 bp, Probe sequence
ccaattctagtctcaggcgtatcat

SEQ ID NO: 45909 - DNA, 25 bp, Probe sequence
gtctactgatggaagcgataagtca

SEQ ID NO: 45910 - DNA, 25 bp, Probe sequence
caatccaattctagtctcaggcgta

SEQ ID NO: 45911 - DNA, 25 bp, Probe sequence
aaccaatccaattctagtctcaggc

SEQ ID NO: 45912 - DNA, 25 bp, Probe sequence
gcgtatcatttacaccagaaactaa

SEQ ID NO: 45913 - DNA, 25 bp, Probe sequence
tttcagtgacagtaacaaacggata

SEQ ID NO: 45914 - DNA, 25 bp, Probe sequence
aatacctacagaagttgaatatcgg

SEQ ID NO: 45915 - DNA, 25 bp, Probe sequence
cctacagaagttgaatatcggtatt

SEQ ID NO: 45916 - DNA, 25 bp, Probe sequence
acctacagaagttgaatatcggtat

SEQ ID NO: 45917 - DNA, 25 bp, Probe sequence
atacctacagaagttgaatatcggt

SEQ ID NO: 45918 - DNA, 25 bp, Probe sequence
gaatacctacagaagttgaatatcg

SEQ ID NO: 45919 - DNA, 25 bp, Probe sequence
agaaacgctggcagattacttatat

SEQ ID NO: 45920 - DNA, 25 bp, Probe sequence
aagaaacgctggcagattacttata

SEQ ID NO: 45921 - DNA, 25 bp, Probe sequence
aaagaaacgctggcagattacttat

SEQ ID NO: 45922 - DNA, 25 bp, Probe sequence
acgctggcagattacttatataaca

SEQ ID NO: 45923 - DNA, 25 bp, Probe sequence
aagagcaccgtatgtaacagtaatt

SEQ ID NO: 45924 - DNA, 25 bp, Probe sequence
cgtatgtaacagtaattggcgaatc

SEQ ID NO: 45925 - DNA, 25 bp, Probe sequence
agagcaccgtatgtaacagtaattg

SEQ ID NO: 45926 - DNA, 25 bp, Probe sequence
caagagcaccgtatgtaacagtaat

SEQ ID NO: 45927 - DNA, 25 bp, Probe sequence
gtatgtaacagtaattggcgaatcg

SEQ ID NO: 45928 - DNA, 25 bp, Probe sequence
ccgtatgtaacagtaattggcgaat

SEQ ID NO: 45929 - DNA, 25 bp, Probe sequence
gagcaccgtatgtaacagtaattgg

SEQ ID NO: 45930 - DNA, 25 bp, Probe sequence
tatgtaacagtaattggcgaatcgg

SEQ ID NO: 45931 - DNA, 25 bp, Probe sequence
ttaacaggtgactggatgaatagaa

SEQ ID NO: 45932 - DNA, 25 bp, Probe sequence
ttacacctgtttatgatttgccttc

SEQ ID NO: 45933 - DNA, 25 bp, Probe sequence
attacacctgtttatgatttgcctt

SEQ ID NO: 45934 - DNA, 25 bp, Probe sequence
tgtttatgatttgccttcagacttt

SEQ ID NO: 45935 - DNA, 25 bp, Probe sequence
tacacctgtttatgatttgccttca

SEQ ID NO: 45936 - DNA, 25 bp, Probe sequence
tattacacctgtttatgatttgcct

SEQ ID NO: 45937 - DNA, 25 bp, Probe sequence
ccctttgttgttattacacctgttt

SEQ ID NO: 45938 - DNA, 25 bp, Probe sequence
aaaccctttgttgttattacacctg

SEQ ID NO: 45939 - DNA, 25 bp, Probe sequence
accctttgttgttattacacctgtt

SEQ ID NO: 45940 - DNA, 25 bp, Probe sequence
aaccctttgttgttattacacctgt

SEQ ID NO: 45941 - DNA, 25 bp, Probe sequence
tgaacatggttatacaagagatgga

SEQ ID NO: 45942 - DNA, 25 bp, Probe sequence
gaacatggttatacaagagatggaa

SEQ ID NO: 45943 - DNA, 25 bp, Probe sequence
atgaacatggttatacaagagatgg

SEQ ID NO: 45944 - DNA, 25 bp, Probe sequence
tcacttgaatgaacatggttataca

SEQ ID NO: 45945 - DNA, 25 bp, Probe sequence
tgaatgaacatggttatacaagaga

SEQ ID NO: 45946 - DNA, 25 bp, Probe sequence
gggatacctgaagtgttgaataaat

SEQ ID NO: 45947 - DNA, 25 bp, Probe sequence
cacttgaatgaacatggttatacaa

SEQ ID NO: 45948 - DNA, 25 bp, Probe sequence
ggtgccagtatagaagaaatgacta

SEQ ID NO: 45949 - DNA, 25 bp, Probe sequence
ttgaatgaacatggttatacaagag

SEQ ID NO: 45950 - DNA, 25 bp, Probe sequence
cagatattggctataatacagtggt

SEQ ID NO: 45951 - DNA, 25 bp, Probe sequence
agaattgatacaccagatattggct

SEQ ID NO: 45952 - DNA, 25 bp, Probe sequence
aagaattgatacaccagatattggc

SEQ ID NO: 45953 - DNA, 25 bp, Probe sequence
agatattggctataatacagtggtt

SEQ ID NO: 45954 - DNA, 25 bp, Probe sequence
ccagatattggctataatacagtgg

SEQ ID NO: 45955 - DNA, 25 bp, Probe sequence
aattgacagtgcattatattccgat

SEQ ID NO: 45956 - DNA, 25 bp, Probe sequence
gaattgatacaccagatattggcta

SEQ ID NO: 45957 - DNA, 25 bp, Probe sequence
accagatattggctataatacagtg

SEQ ID NO: 45958 - DNA, 25 bp, Probe sequence
caccagatattggctataatacagt

SEQ ID NO: 45959 - DNA, 25 bp, Probe sequence
tcaatcggctaagtctgaattacta

SEQ ID NO: 45960 - DNA, 25 bp, Probe sequence
caatcggctaagtctgaattactat

SEQ ID NO: 45961 - DNA, 25 bp, Probe sequence
aaggtctcattcaatcggctaagtc

SEQ ID NO: 45962 - DNA, 25 bp, Probe sequence
aatcggctaagtctgaattactatt

SEQ ID NO: 45963 - DNA, 25 bp, Probe sequence
gaaggtctcattcaatcggctaagt

SEQ ID NO: 45964 - DNA, 25 bp, Probe sequence
ggttccagattatgacaaagatgac

SEQ ID NO: 45965 - DNA, 25 bp, Probe sequence
gtctcattcaatcggctaagtctga

SEQ ID NO: 45966 - DNA, 25 bp, Probe sequence
gggttccagattatgacaaagatga

SEQ ID NO: 45967 - DNA, 25 bp, Probe sequence
gcaagagattatgaaagtcgtggat

SEQ ID NO: 45968 - DNA, 25 bp, Probe sequence
tgatggaacaacttatgacactgat

SEQ ID NO: 45969 - DNA, 25 bp, Probe sequence
atgatggaacaacttatgacactga

SEQ ID NO: 45970 - DNA, 25 bp, Probe sequence
tatgatggaacaacttatgacactg

SEQ ID NO: 45971 - DNA, 25 bp, Probe sequence
actatgatggaacaacttatgacac

SEQ ID NO: 45972 - DNA, 25 bp, Probe sequence
gatggaacaacttatgacactgata

SEQ ID NO: 45973 - DNA, 25 bp, Probe sequence
ctatgatggaacaacttatgacact

SEQ ID NO: 45974 - DNA, 25 bp, Probe sequence
aactatgatggaacaacttatgaca

SEQ ID NO: 45975 - DNA, 25 bp, Probe sequence
tggaattaactatgatggaacaact

SEQ ID NO: 45976 - DNA, 25 bp, Probe sequence
atggaacaacttatgacactgataa

SEQ ID NO: 45977 - DNA, 25 bp, Probe sequence
aattgctagtgttatcgctatgagt

SEQ ID NO: 45978 - DNA, 25 bp, Probe sequence
attgctagtgttatcgctatgagtg

SEQ ID NO: 45979 - DNA, 25 bp, Probe sequence
tagtgttatcgctatgagtggtgac

SEQ ID NO: 45980 - DNA, 25 bp, Probe sequence
ctagtgttatcgctatgagtggtga

SEQ ID NO: 45981 - DNA, 25 bp, Probe sequence
ttgctagtgttatcgctatgagtgg

SEQ ID NO: 45982 - DNA, 25 bp, Probe sequence
tctaaagagcaatataagcgtttcg

SEQ ID NO: 45983 - DNA, 25 bp, Probe sequence
tgtagatacatctgaattggttgaa

SEQ ID NO: 45984 - DNA, 25 bp, Probe sequence
agaagaattaagaaagacagcggat

SEQ ID NO: 45985 - DNA, 25 bp, Probe sequence
gaagaattaagaaagacagcggatt

SEQ ID NO: 45986 - DNA, 25 bp, Probe sequence
gtccgattgatgtgttgaagaatac

SEQ ID NO: 45987 - DNA, 25 bp, Probe sequence
agtccgattgatgtgttgaagaata

SEQ ID NO: 45988 - DNA, 25 bp, Probe sequence
tagtccgattgatgtgttgaagaat

SEQ ID NO: 45989 - DNA, 25 bp, Probe sequence
attagtccgattgatgtgttgaaga

SEQ ID NO: 45990 - DNA, 25 bp, Probe sequence
ttagtccgattgatgtgttgaagaa

SEQ ID NO: 45991 - DNA, 25 bp, Probe sequence
cgagacatctatcatcaaccatcaa

SEQ ID NO: 45992 - DNA, 25 bp, Probe sequence
aacgagacatctatcatcaaccatc

SEQ ID NO: 45993 - DNA, 25 bp, Probe sequence
gaacgagacatctatcatcaaccat

SEQ ID NO: 45994 - DNA, 25 bp, Probe sequence
gtgctaattgaacgagacatctatc

SEQ ID NO: 45995 - DNA, 25 bp, Probe sequence
tatcagaaacagaggactttacagc

SEQ ID NO: 45996 - DNA, 25 bp, Probe sequence
ctattaacaacatggtatgcagagc

SEQ ID NO: 45997 - DNA, 25 bp, Probe sequence
atgggtatttgatgaagaattagcg

SEQ ID NO: 45998 - DNA, 25 bp, Probe sequence
actattaacaacatggtatgcagag

SEQ ID NO: 45999 - DNA, 25 bp, Probe sequence
aactattaacaacatggtatgcaga

SEQ ID NO: 46000 - DNA, 25 bp, Probe sequence
ttatcagaaacagaggactttacag

SEQ ID NO: 46001 - DNA, 25 bp, Probe sequence
tttatcagaaacagaggactttaca

SEQ ID NO: 46002 - DNA, 25 bp, Probe sequence
aatgggtatttgatgaagaattagc

SEQ ID NO: 46003 - DNA, 25 bp, Probe sequence
atcagaaacagaggactttacagcc

SEQ ID NO: 46004 - DNA, 25 bp, Probe sequence
atagttcaagaagaaggtggattcg

SEQ ID NO: 46005 - DNA, 25 bp, Probe sequence
agatagttcaagaagaaggtggatt

SEQ ID NO: 46006 - DNA, 25 bp, Probe sequence
aagatagttcaagaagaaggtggat

SEQ ID NO: 46007 - DNA, 25 bp, Probe sequence
gatagttcaagaagaaggtggattc

SEQ ID NO: 46008 - DNA, 25 bp, Probe sequence
gaatccattaagcatagaactgaca

SEQ ID NO: 46009 - DNA, 25 bp, Probe sequence
agaatccattaagcatagaactgac

SEQ ID NO: 46010 - DNA, 25 bp, Probe sequence
aagaaggtggattcggtgactatta

SEQ ID NO: 46011 - DNA, 25 bp, Probe sequence
agaaggtggattcggtgactattaa

SEQ ID NO: 46012 - DNA, 25 bp, Probe sequence
aatccattaagcatagaactgacaa

SEQ ID NO: 46013 - DNA, 25 bp, Probe sequence
ataccgcactaattcatattgttga

SEQ ID NO: 46014 - DNA, 25 bp, Probe sequence
aataccgcactaattcatattgttg

SEQ ID NO: 46015 - DNA, 25 bp, Probe sequence
tgacagtgaacaagaggaagaaata

SEQ ID NO: 46016 - DNA, 25 bp, Probe sequence
gacagtgaacaagaggaagaaatac

SEQ ID NO: 46017 - DNA, 25 bp, Probe sequence
gattgaaattgagaatagcgtttgc

SEQ ID NO: 46018 - DNA, 25 bp, Probe sequence
ttgacagtgaacaagaggaagaaat

SEQ ID NO: 46019 - DNA, 25 bp, Probe sequence
tttgacagtgaacaagaggaagaaa

SEQ ID NO: 46020 - DNA, 25 bp, Probe sequence
acagtgaacaagaggaagaaatact

SEQ ID NO: 46021 - DNA, 25 bp, Probe sequence
agattgaaattgagaatagcgtttg

SEQ ID NO: 46022 - DNA, 25 bp, Probe sequence
tgtcagtttgttatagctgtcataa

SEQ ID NO: 46023 - DNA, 25 bp, Probe sequence
atgtcagtttgttatagctgtcata

SEQ ID NO: 46024 - DNA, 25 bp, Probe sequence
agctgtcataacaaaattcatgcaa

SEQ ID NO: 46025 - DNA, 25 bp, Probe sequence
gctgtcataacaaaattcatgcaaa

SEQ ID NO: 46026 - DNA, 25 bp, Probe sequence
tagctgtcataacaaaattcatgca

SEQ ID NO: 46027 - DNA, 25 bp, Probe sequence
atagctgtcataacaaaattcatgc

SEQ ID NO: 46028 - DNA, 25 bp, Probe sequence
gtcagtttgttatagctgtcataac

SEQ ID NO: 46029 - DNA, 25 bp, Probe sequence
tgtcataacaaaattcatgcaaatg

SEQ ID NO: 46030 - DNA, 25 bp, Probe sequence
ctgtcataacaaaattcatgcaaat

SEQ ID NO: 46031 - DNA, 25 bp, Probe sequence
ttagaatcggaagaagaaggaacag

SEQ ID NO: 46032 - DNA, 25 bp, Probe sequence
gttgatgaagttgataagtggaacc

SEQ ID NO: 46033 - DNA, 25 bp, Probe sequence
ggttgatgaagttgataagtggaac

SEQ ID NO: 46034 - DNA, 25 bp, Probe sequence
tagaatcggaagaagaaggaacagt

SEQ ID NO: 46035 - DNA, 25 bp, Probe sequence
acttgagtcttcattcagtcgttat

SEQ ID NO: 46036 - DNA, 25 bp, Probe sequence
cttgagtcttcattcagtcgttatc

SEQ ID NO: 46037 - DNA, 25 bp, Probe sequence
tgatgaagttgataagtggaaccat

SEQ ID NO: 46038 - DNA, 25 bp, Probe sequence
ttgatgaagttgataagtggaacca

SEQ ID NO: 46039 - DNA, 25 bp, Probe sequence
tggttgtaattgatgaactgtctac

SEQ ID NO: 46040 - DNA, 25 bp, Probe sequence
gttgattggactgacacattagaat

SEQ ID NO: 46041 - DNA, 25 bp, Probe sequence
ttgcctattctcatcataatacgga

SEQ ID NO: 46042 - DNA, 25 bp, Probe sequence
tatcttaacacaccaattcctagca

SEQ ID NO: 46043 - DNA, 25 bp, Probe sequence
tcttaacacaccaattcctagcaat

SEQ ID NO: 46044 - DNA, 25 bp, Probe sequence
atcttaacacaccaattcctagcaa

SEQ ID NO: 46045 - DNA, 25 bp, Probe sequence
tgcctattctcatcataatacggat

SEQ ID NO: 46046 - DNA, 25 bp, Probe sequence
acataagcatagagagataagtcca

SEQ ID NO: 46047 - DNA, 25 bp, Probe sequence
actaatcacaatatggcttggtctg

SEQ ID NO: 46048 - DNA, 25 bp, Probe sequence
actgaagtgaatagaacaactacca

SEQ ID NO: 46049 - DNA, 25 bp, Probe sequence
accatagaagcattggagtatatga

SEQ ID NO: 46050 - DNA, 25 bp, Probe sequence
aaccatagaagcattggagtatatg

SEQ ID NO: 46051 - DNA, 25 bp, Probe sequence
aatggtgttgaaggtttagaagatt

SEQ ID NO: 46052 - DNA, 25 bp, Probe sequence
ccatagaagcattggagtatatgaa

SEQ ID NO: 46053 - DNA, 25 bp, Probe sequence
tggtgttgaaggtttagaagattat

SEQ ID NO: 46054 - DNA, 25 bp, Probe sequence
atggtgttgaaggtttagaagatta

SEQ ID NO: 46055 - DNA, 25 bp, Probe sequence
taatggtgttgaaggtttagaagat

SEQ ID NO: 46056 - DNA, 25 bp, Probe sequence
ataatggtgttgaaggtttagaaga

SEQ ID NO: 46057 - DNA, 25 bp, Probe sequence
ggtgttgaaggtttagaagattatg

SEQ ID NO: 46058 - DNA, 25 bp, Probe sequence
ggcgatgaattattgtgtggaagaa

SEQ ID NO: 46059 - DNA, 25 bp, Probe sequence
cgtactggttcgatgtcacttataa

SEQ ID NO: 46060 - DNA, 25 bp, Probe sequence
gtactggttcgatgtcacttataac

SEQ ID NO: 46061 - DNA, 25 bp, Probe sequence
gcgatgaattattgtgtggaagaaa

SEQ ID NO: 46062 - DNA, 25 bp, Probe sequence
ccgtactggttcgatgtcacttata

SEQ ID NO: 46063 - DNA, 25 bp, Probe sequence
cggcgatgaattattgtgtggaaga

SEQ ID NO: 46064 - DNA, 25 bp, Probe sequence
acgaaatgtgagagcggaatatgaa

SEQ ID NO: 46065 - DNA, 25 bp, Probe sequence
aacgaaatgtgagagcggaatatga

SEQ ID NO: 46066 - DNA, 25 bp, Probe sequence
caacgaaatgtgagagcggaatatg

SEQ ID NO: 46067 - DNA, 25 bp, Probe sequence
caatgcttctgttgacattagaatt

SEQ ID NO: 46068 - DNA, 25 bp, Probe sequence
gcttatatcaatgcttctgttgaca

SEQ ID NO: 46069 - DNA, 25 bp, Probe sequence
acattagaattcctacagaagtcga

SEQ ID NO: 46070 - DNA, 25 bp, Probe sequence
tcaatgcttctgttgacattagaat

SEQ ID NO: 46071 - DNA, 25 bp, Probe sequence
atcaatgcttctgttgacattagaa

SEQ ID NO: 46072 - DNA, 25 bp, Probe sequence
cattagaattcctacagaagtcgaa

SEQ ID NO: 46073 - DNA, 25 bp, Probe sequence
tatcaatgcttctgttgacattaga

SEQ ID NO: 46074 - DNA, 25 bp, Probe sequence
gacattagaattcctacagaagtcg

SEQ ID NO: 46075 - DNA, 25 bp, Probe sequence
agcttatatcaatgcttctgttgac

SEQ ID NO: 46076 - DNA, 25 bp, Probe sequence
actcaatgttcatcctcaagactta

SEQ ID NO: 46077 - DNA, 25 bp, Probe sequence
tactcaatgttcatcctcaagactt

SEQ ID NO: 46078 - DNA, 25 bp, Probe sequence
ttactcaatgttcatcctcaagact

SEQ ID NO: 46079 - DNA, 25 bp, Probe sequence
tactgctgaagaaggtaatgaacta

SEQ ID NO: 46080 - DNA, 25 bp, Probe sequence
attactcaatgttcatcctcaagac

SEQ ID NO: 46081 - DNA, 25 bp, Probe sequence
actgctgaagaaggtaatgaactag

SEQ ID NO: 46082 - DNA, 25 bp, Probe sequence
cacaatggttaattcaatgcgtatt

SEQ ID NO: 46083 - DNA, 25 bp, Probe sequence
ctcaatgttcatcctcaagacttat

SEQ ID NO: 46084 - DNA, 25 bp, Probe sequence
tcaatgttcatcctcaagacttatt

SEQ ID NO: 46085 - DNA, 25 bp, Probe sequence
tgaattagacactgatgatgaggat

SEQ ID NO: 46086 - DNA, 25 bp, Probe sequence
atgaattagacactgatgatgagga

SEQ ID NO: 46087 - DNA, 25 bp, Probe sequence
gatgaattagacactgatgatgagg

SEQ ID NO: 46088 - DNA, 25 bp, Probe sequence
gaattagacactgatgatgaggatt

SEQ ID NO: 46089 - DNA, 25 bp, Probe sequence
agacactgatgatgaggatttctta

SEQ ID NO: 46090 - DNA, 25 bp, Probe sequence
tagacactgatgatgaggatttctt

SEQ ID NO: 46091 - DNA, 25 bp, Probe sequence
ttagacactgatgatgaggatttct

SEQ ID NO: 46092 - DNA, 25 bp, Probe sequence
gacactgatgatgaggatttcttat

SEQ ID NO: 46093 - DNA, 25 bp, Probe sequence
attagacactgatgatgaggatttc

SEQ ID NO: 46094 - DNA, 25 bp, Probe sequence
gcagttctaatgtgtaatgaggttc

SEQ ID NO: 46095 - DNA, 25 bp, Probe sequence
tctaatgtgtaatgaggttcggatt

SEQ ID NO: 46096 - DNA, 25 bp, Probe sequence
ttctaatgtgtaatgaggttcggat

SEQ ID NO: 46097 - DNA, 25 bp, Probe sequence
cagttctaatgtgtaatgaggttcg

SEQ ID NO: 46098 - DNA, 25 bp, Probe sequence
ggattcgcagttctaatgtgtaatg

SEQ ID NO: 46099 - DNA, 25 bp, Probe sequence
ctaatgtgtaatgaggttcggattc

SEQ ID NO: 46100 - DNA, 25 bp, Probe sequence
attcgcagttctaatgtgtaatgag

SEQ ID NO: 46101 - DNA, 25 bp, Probe sequence
gattcgcagttctaatgtgtaatga

SEQ ID NO: 46102 - DNA, 25 bp, Probe sequence
gttctaatgtgtaatgaggttcgga

SEQ ID NO: 46103 - DNA, 25 bp, Probe sequence
tgagtagagatgacgatgtaatagc

SEQ ID NO: 46104 - DNA, 25 bp, Probe sequence
cctcaacttagattatatggcttgg

SEQ ID NO: 46105 - DNA, 25 bp, Probe sequence
gcaggtagtcattgtagattctgta

SEQ ID NO: 46106 - DNA, 25 bp, Probe sequence
aagcaggtagtcattgtagattctg

SEQ ID NO: 46107 - DNA, 25 bp, Probe sequence
accaagttacttagcattacgaatt

SEQ ID NO: 46108 - DNA, 25 bp, Probe sequence
aaccaagttacttagcattacgaat

SEQ ID NO: 46109 - DNA, 25 bp, Probe sequence
tcctcaacttagattatatggcttg

SEQ ID NO: 46110 - DNA, 25 bp, Probe sequence
agcaggtagtcattgtagattctgt

SEQ ID NO: 46111 - DNA, 25 bp, Probe sequence
ttgagtagagatgacgatgtaatag

SEQ ID NO: 46112 - DNA, 25 bp, Probe sequence
caagagaaagttaaagaagcaccaa

SEQ ID NO: 46113 - DNA, 25 bp, Probe sequence
agagaaagttaaagaagcaccaatg

SEQ ID NO: 46114 - DNA, 25 bp, Probe sequence
acaagagaaagttaaagaagcacca

SEQ ID NO: 46115 - DNA, 25 bp, Probe sequence
tacaagagaaagttaaagaagcacc

SEQ ID NO: 46116 - DNA, 25 bp, Probe sequence
aagagaaagttaaagaagcaccaat

SEQ ID NO: 46117 - DNA, 25 bp, Probe sequence
gaactatcaactgtagattcatcaa

SEQ ID NO: 46118 - DNA, 25 bp, Probe sequence
gtacaagagaaagttaaagaagcac

SEQ ID NO: 46119 - DNA, 25 bp, Probe sequence
aactatcaactgtagattcatcaat

SEQ ID NO: 46120 - DNA, 25 bp, Probe sequence
tgaactatcaactgtagattcatca

SEQ ID NO: 46121 - DNA, 25 bp, Probe sequence
atacacgaaaggagtgatagagatg

SEQ ID NO: 46122 - DNA, 25 bp, Probe sequence
cgaaaggagtgatagagatgccaaa

SEQ ID NO: 46123 - DNA, 25 bp, Probe sequence
ttatacacgaaaggagtgatagaga

SEQ ID NO: 46124 - DNA, 25 bp, Probe sequence
tatacacgaaaggagtgatagagat

SEQ ID NO: 46125 - DNA, 25 bp, Probe sequence
tacacgaaaggagtgatagagatgc

SEQ ID NO: 46126 - DNA, 25 bp, Probe sequence
attatacacgaaaggagtgatagag

SEQ ID NO: 46127 - DNA, 25 bp, Probe sequence
actaaattatacacgaaaggagtga

SEQ ID NO: 46128 - DNA, 25 bp, Probe sequence
gaaaggagtgatagagatgccaaaa

SEQ ID NO: 46129 - DNA, 25 bp, Probe sequence
acgaaaggagtgatagagatgccaa

SEQ ID NO: 46130 - DNA, 25 bp, Probe sequence
acattcaagaagcaactaagatagc

SEQ ID NO: 46131 - DNA, 25 bp, Probe sequence
aaccttatcagatattggcaacctt

SEQ ID NO: 46132 - DNA, 25 bp, Probe sequence
cttatcagatattggcaaccttcag

SEQ ID NO: 46133 - DNA, 25 bp, Probe sequence
ccttatcagatattggcaaccttca

SEQ ID NO: 46134 - DNA, 25 bp, Probe sequence
accttatcagatattggcaaccttc

SEQ ID NO: 46135 - DNA, 25 bp, Probe sequence
ctagagaccaggaattattgaagca

SEQ ID NO: 46136 - DNA, 25 bp, Probe sequence
actagagaccaggaattattgaagc

SEQ ID NO: 46137 - DNA, 25 bp, Probe sequence
ttatcagatattggcaaccttcagc

SEQ ID NO: 46138 - DNA, 25 bp, Probe sequence
tagagaccaggaattattgaagcaa

SEQ ID NO: 46139 - DNA, 25 bp, Probe sequence
gtcgttattatcggtgcaagttatt

SEQ ID NO: 46140 - DNA, 25 bp, Probe sequence
attaggttacgtcgttattatcggt

SEQ ID NO: 46141 - DNA, 25 bp, Probe sequence
cattaggttacgtcgttattatcgg

SEQ ID NO: 46142 - DNA, 25 bp, Probe sequence
ttaggttacgtcgttattatcggtg

SEQ ID NO: 46143 - DNA, 25 bp, Probe sequence
attagcacgaaacttagtagcaatg

SEQ ID NO: 46144 - DNA, 25 bp, Probe sequence
cattagcacgaaacttagtagcaat

SEQ ID NO: 46145 - DNA, 25 bp, Probe sequence
atcattagcacgaaacttagtagca

SEQ ID NO: 46146 - DNA, 25 bp, Probe sequence
tcattagcacgaaacttagtagcaa

SEQ ID NO: 46147 - DNA, 25 bp, Probe sequence
aatcattagcacgaaacttagtagc

SEQ ID NO: 46148 - DNA, 25 bp, Probe sequence
tttattctacacaggagatgatggg

SEQ ID NO: 46149 - DNA, 25 bp, Probe sequence
aaactgtagagtctgagaaattcca

SEQ ID NO: 46150 - DNA, 25 bp, Probe sequence
actgtagagtctgagaaattccatt

SEQ ID NO: 46151 - DNA, 25 bp, Probe sequence
aactgtagagtctgagaaattccat

SEQ ID NO: 46152 - DNA, 25 bp, Probe sequence
gtaccttcaagaagaatacaacatt

SEQ ID NO: 46153 - DNA, 25 bp, Probe sequence
gtagagtctgagaaattccatttgg

SEQ ID NO: 46154 - DNA, 25 bp, Probe sequence
atacaacatttatggacataacggc

SEQ ID NO: 46155 - DNA, 25 bp, Probe sequence
tgtagagtctgagaaattccatttg

SEQ ID NO: 46156 - DNA, 25 bp, Probe sequence
atttattctacacaggagatgatgg

SEQ ID NO: 46157 - DNA, 25 bp, Probe sequence
atatgtatggtggaattacgttggc

SEQ ID NO: 46158 - DNA, 25 bp, Probe sequence
tggaataagttactcaggtctttgt

SEQ ID NO: 46159 - DNA, 25 bp, Probe sequence
gcttcaaggagttagttctggaaat

SEQ ID NO: 46160 - DNA, 25 bp, Probe sequence
tctttggaataagttactcaggtct

SEQ ID NO: 46161 - DNA, 25 bp, Probe sequence
tatatgtatggtggaattacgttgg

SEQ ID NO: 46162 - DNA, 25 bp, Probe sequence
cttcaaggagttagttctggaaatt

SEQ ID NO: 46163 - DNA, 25 bp, Probe sequence
taatctctgggtcaatggtaagcaa

SEQ ID NO: 46164 - DNA, 25 bp, Probe sequence
ttggaataagttactcaggtctttg

SEQ ID NO: 46165 - DNA, 25 bp, Probe sequence
ttaatctctgggtcaatggtaagca

SEQ ID NO: 46166 - DNA, 25 bp, Probe sequence
gtaaagaagacaacaacaaacctgg

SEQ ID NO: 46167 - DNA, 25 bp, Probe sequence
cctggtaaagaagacaacaacaaac

SEQ ID NO: 46168 - DNA, 25 bp, Probe sequence
taaagaagacaacaacaaacctggc

SEQ ID NO: 46169 - DNA, 25 bp, Probe sequence
gcctggtaaagaagacaacaacaaa

SEQ ID NO: 46170 - DNA, 25 bp, Probe sequence
taaagaagacaacaacaagcctggt

SEQ ID NO: 46171 - DNA, 25 bp, Probe sequence
ggtaaagaagacaacaacaaacctg

SEQ ID NO: 46172 - DNA, 25 bp, Probe sequence
ctggtaaagaagacaacaacaaacc

SEQ ID NO: 46173 - DNA, 25 bp, Probe sequence
tggtaaagaagacaacaacaaacct

SEQ ID NO: 46174 - DNA, 25 bp, Probe sequence
caacaacaaacctggcaaagaagac

SEQ ID NO: 46175 - DNA, 25 bp, Probe sequence
gatccttcggtgagcaaagaaattt

SEQ ID NO: 46176 - DNA, 25 bp, Probe sequence
ggtgagcaaagaaattttagcagaa

SEQ ID NO: 46177 - DNA, 25 bp, Probe sequence
ccttcggtgagcaaagaaattttag

SEQ ID NO: 46178 - DNA, 25 bp, Probe sequence
tccttcggtgagcaaagaaatttta

SEQ ID NO: 46179 - DNA, 25 bp, Probe sequence
aaactggcgaagaaaatccattcat

SEQ ID NO: 46180 - DNA, 25 bp, Probe sequence
cttcggtgagcaaagaaattttagc

SEQ ID NO: 46181 - DNA, 25 bp, Probe sequence
atccttcggtgagcaaagaaatttt

SEQ ID NO: 46182 - DNA, 25 bp, Probe sequence
agaaactggcgaagaaaatccattc

SEQ ID NO: 46183 - DNA, 25 bp, Probe sequence
aactggcgaagaaaatccattcatc

SEQ ID NO: 46184 - DNA, 25 bp, Probe sequence
ctcagtaacaacaacactattgcta

SEQ ID NO: 46185 - DNA, 25 bp, Probe sequence
gtaacaacaacactattgctaggtt

SEQ ID NO: 46186 - DNA, 25 bp, Probe sequence
agtaacaacaacactattgctaggt

SEQ ID NO: 46187 - DNA, 25 bp, Probe sequence
cagtaacaacaacactattgctagg

SEQ ID NO: 46188 - DNA, 25 bp, Probe sequence
taacaacaacactattgctaggttc

SEQ ID NO: 46189 - DNA, 25 bp, Probe sequence
tcagtaacaacaacactattgctag

SEQ ID NO: 46190 - DNA, 25 bp, Probe sequence
gctcagtaacaacaacactattgct

SEQ ID NO: 46191 - DNA, 25 bp, Probe sequence
tatagtcagctcagtaacaacaaca

SEQ ID NO: 46192 - DNA, 25 bp, Probe sequence
gtatagtcagctcagtaacaacaac

SEQ ID NO: 46193 - DNA, 25 bp, Probe sequence
gaagtattacgcttacctcgcatta

SEQ ID NO: 46194 - DNA, 25 bp, Probe sequence
aagtattacgcttacctcgcattac

SEQ ID NO: 46195 - DNA, 25 bp, Probe sequence
atactcgtatctatggcaatcagtt

SEQ ID NO: 46196 - DNA, 25 bp, Probe sequence
tagaagtattacgcttacctcgcat

SEQ ID NO: 46197 - DNA, 25 bp, Probe sequence
ttagaagtattacgcttacctcgca

SEQ ID NO: 46198 - DNA, 25 bp, Probe sequence
tattacgcttacctcgcattacact

SEQ ID NO: 46199 - DNA, 25 bp, Probe sequence
ttactaatgtcagcaatgattggtg

SEQ ID NO: 46200 - DNA, 25 bp, Probe sequence
gttactaatgtcagcaatgattggt

SEQ ID NO: 46201 - DNA, 25 bp, Probe sequence
gtattacgcttacctcgcattacac

SEQ ID NO: 46202 - DNA, 25 bp, Probe sequence
tgatgattgtattagtgattccgat

SEQ ID NO: 46203 - DNA, 25 bp, Probe sequence
atgatgattgtattagtgattccga

SEQ ID NO: 46204 - DNA, 25 bp, Probe sequence
aatgatgattgtattagtgattccg

SEQ ID NO: 46205 - DNA, 25 bp, Probe sequence
agtgattccgataatgatttctggg

SEQ ID NO: 46206 - DNA, 25 bp, Probe sequence
tagtgattccgataatgatttctgg

SEQ ID NO: 46207 - DNA, 25 bp, Probe sequence
gatgattgtattagtgattccgata

SEQ ID NO: 46208 - DNA, 25 bp, Probe sequence
tgattccgataatgatttctgggat

SEQ ID NO: 46209 - DNA, 25 bp, Probe sequence
gtgattccgataatgatttctggga

SEQ ID NO: 46210 - DNA, 25 bp, Probe sequence
ttagtgattccgataatgatttctg

SEQ ID NO: 46211 - DNA, 25 bp, Probe sequence
gcgtgaatttctatgatggtaaaga

SEQ ID NO: 46212 - DNA, 25 bp, Probe sequence
cgtgaatttctatgatggtaaagat

SEQ ID NO: 46213 - DNA, 25 bp, Probe sequence
cacaaaacgaaacgctacatcaatt

SEQ ID NO: 46214 - DNA, 25 bp, Probe sequence
aaaccgctttagtgttaatcgacct

SEQ ID NO: 46215 - DNA, 25 bp, Probe sequence
tgatctcattaccaccaaaagaagg

SEQ ID NO: 46216 - DNA, 25 bp, Probe sequence
atgatctcattaccaccaaaagaag

SEQ ID NO: 46217 - DNA, 25 bp, Probe sequence
gtgaatttctatgatggtaaagatg

SEQ ID NO: 46218 - DNA, 25 bp, Probe sequence
gatctcattaccaccaaaagaaggc

SEQ ID NO: 46219 - DNA, 25 bp, Probe sequence
aaccgctttagtgttaatcgacctg

SEQ ID NO: 46220 - DNA, 25 bp, Probe sequence
caatgtagttatggtggtgttactt

SEQ ID NO: 46221 - DNA, 25 bp, Probe sequence
gcaatgtagttatggtggtgttact

SEQ ID NO: 46222 - DNA, 25 bp, Probe sequence
cgcaatgtagttatggtggtgttac

SEQ ID NO: 46223 - DNA, 25 bp, Probe sequence
acgcaatgtagttatggtggtgtta

SEQ ID NO: 46224 - DNA, 25 bp, Probe sequence
cctgtttatcatttatgtctcgctc

SEQ ID NO: 46225 - DNA, 25 bp, Probe sequence
tgaatgagaagtataagttgtacga

SEQ ID NO: 46226 - DNA, 25 bp, Probe sequence
ccttgtaatttatggattgacggac

SEQ ID NO: 46227 - DNA, 25 bp, Probe sequence
accttgtaatttatggattgacgga

SEQ ID NO: 46228 - DNA, 25 bp, Probe sequence
cagcctgtttatcatttatgtctcg

SEQ ID NO: 46229 - DNA, 25 bp, Probe sequence
tgaatcagaaccaactatatcgcaa

SEQ ID NO: 46230 - DNA, 25 bp, Probe sequence
ttacttgaagcgattggattgttaa

SEQ ID NO: 46231 - DNA, 25 bp, Probe sequence
cttacttgaagcgattggattgtta

SEQ ID NO: 46232 - DNA, 25 bp, Probe sequence
attcaattacaagtggacaacagtt

SEQ ID NO: 46233 - DNA, 25 bp, Probe sequence
aattcaattacaagtggacaacagt

SEQ ID NO: 46234 - DNA, 25 bp, Probe sequence
ttcaattacaagtggacaacagtta

SEQ ID NO: 46235 - DNA, 25 bp, Probe sequence
acttacttgaagcgattggattgtt

SEQ ID NO: 46236 - DNA, 25 bp, Probe sequence
tcaattacaagtggacaacagttat

SEQ ID NO: 46237 - DNA, 25 bp, Probe sequence
caattacaagtggacaacagttatc

SEQ ID NO: 46238 - DNA, 25 bp, Probe sequence
gaggtggagaaatactttgaggatt

SEQ ID NO: 46239 - DNA, 25 bp, Probe sequence
aggtggagaaatactttgaggatta

SEQ ID NO: 46240 - DNA, 25 bp, Probe sequence
tgaggtggagaaatactttgaggat

SEQ ID NO: 46241 - DNA, 25 bp, Probe sequence
atgaggtggagaaatactttgagga

SEQ ID NO: 46242 - DNA, 25 bp, Probe sequence
taaacaacaaatgggcttacttgaa

SEQ ID NO: 46243 - DNA, 25 bp, Probe sequence
ttaaacaacaaatgggcttacttga

SEQ ID NO: 46244 - DNA, 25 bp, Probe sequence
aaacaacaaatgggcttacttgaag

SEQ ID NO: 46245 - DNA, 25 bp, Probe sequence
ggtggagaaatactttgaggattaa

SEQ ID NO: 46246 - DNA, 25 bp, Probe sequence
catgaggtggagaaatactttgagg

SEQ ID NO: 46247 - DNA, 25 bp, Probe sequence
tatattgtatgtgctggtggagttc

SEQ ID NO: 46248 - DNA, 25 bp, Probe sequence
atattgtatgtgctggtggagttcg

SEQ ID NO: 46249 - DNA, 25 bp, Probe sequence
tatttagaggcaaatggcattgatg

SEQ ID NO: 46250 - DNA, 25 bp, Probe sequence
atatttagaggcaaatggcattgat

SEQ ID NO: 46251 - DNA, 25 bp, Probe sequence
aatatttagaggcaaatggcattga

SEQ ID NO: 46252 - DNA, 25 bp, Probe sequence
gtagaatatttagaggcaaatggca

SEQ ID NO: 46253 - DNA, 25 bp, Probe sequence
tgtagaatatttagaggcaaatggc

SEQ ID NO: 46254 - DNA, 25 bp, Probe sequence
gaatatttagaggcaaatggcattg

SEQ ID NO: 46255 - DNA, 25 bp, Probe sequence
agaatatttagaggcaaatggcatt

SEQ ID NO: 46256 - DNA, 25 bp, Probe sequence
gagttcacaagatgaccgtagatat

SEQ ID NO: 46257 - DNA, 25 bp, Probe sequence
ttcacaagatgaccgtagatattgg

SEQ ID NO: 46258 - DNA, 25 bp, Probe sequence
gttcacaagatgaccgtagatattg

SEQ ID NO: 46259 - DNA, 25 bp, Probe sequence
agttcacaagatgaccgtagatatt

SEQ ID NO: 46260 - DNA, 25 bp, Probe sequence
cacaagatgaccgtagatattggac

SEQ ID NO: 46261 - DNA, 25 bp, Probe sequence
tcacaagatgaccgtagatattgga

SEQ ID NO: 46262 - DNA, 25 bp, Probe sequence
aagaactgctaacctagattattgg

SEQ ID NO: 46263 - DNA, 25 bp, Probe sequence
ggagttcacaagatgaccgtagata

SEQ ID NO: 46264 - DNA, 25 bp, Probe sequence
gacaatggttccaacatgatcctaa

SEQ ID NO: 46265 - DNA, 25 bp, Probe sequence
taaccatcttacactaactgaacgc

SEQ ID NO: 46266 - DNA, 25 bp, Probe sequence
ataaccatcttacactaactgaacg

SEQ ID NO: 46267 - DNA, 25 bp, Probe sequence
tattgtgtacttatgcctgatcgtt

SEQ ID NO: 46268 - DNA, 25 bp, Probe sequence
ttattgtgtacttatgcctgatcgt

SEQ ID NO: 46269 - DNA, 25 bp, Probe sequence
cctgatcgttcctctaattctatgg

SEQ ID NO: 46270 - DNA, 25 bp, Probe sequence
ttatgcctgatcgttcctctaattc

SEQ ID NO: 46271 - DNA, 25 bp, Probe sequence
cttatgcctgatcgttcctctaatt

SEQ ID NO: 46272 - DNA, 25 bp, Probe sequence
tacttatgcctgatcgttcctctaa

SEQ ID NO: 46273 - DNA, 25 bp, Probe sequence
aacgatctgtatctactatctcacg

SEQ ID NO: 46274 - DNA, 25 bp, Probe sequence
tgttgaatgaggaaggaagaatagt

SEQ ID NO: 46275 - DNA, 25 bp, Probe sequence
actgttgaatgaggaaggaagaata

SEQ ID NO: 46276 - DNA, 25 bp, Probe sequence
aactgttgaatgaggaaggaagaat

SEQ ID NO: 46277 - DNA, 25 bp, Probe sequence
ggatgatatagccagcgtaatacag

SEQ ID NO: 46278 - DNA, 25 bp, Probe sequence
ctgttgaatgaggaaggaagaatag

SEQ ID NO: 46279 - DNA, 25 bp, Probe sequence
aatgaaggaactgttgaatgaggaa

SEQ ID NO: 46280 - DNA, 25 bp, Probe sequence
gaactgttgaatgaggaaggaagaa

SEQ ID NO: 46281 - DNA, 25 bp, Probe sequence
atgaaggaactgttgaatgaggaag

SEQ ID NO: 46282 - DNA, 25 bp, Probe sequence
gttgaatgaggaaggaagaatagtt

SEQ ID NO: 46283 - DNA, 25 bp, Probe sequence
ttgaagagacacaacaaatagcaaa

SEQ ID NO: 46284 - DNA, 25 bp, Probe sequence
ataaagttggcgatagaattactgc

SEQ ID NO: 46285 - DNA, 25 bp, Probe sequence
tgttacgcaagttaaagatacaaat

SEQ ID NO: 46286 - DNA, 25 bp, Probe sequence
atgttacgcaagttaaagatacaaa

SEQ ID NO: 46287 - DNA, 25 bp, Probe sequence
tataaagttggcgatagaattactg

SEQ ID NO: 46288 - DNA, 25 bp, Probe sequence
gtcattaaaagcatggcagcattag

SEQ ID NO: 46289 - DNA, 25 bp, Probe sequence
aaagatgctaaagttgatgacaaaa

SEQ ID NO: 46290 - DNA, 25 bp, Probe sequence
agtcattaaaagcatggcagcatta

SEQ ID NO: 46291 - DNA, 25 bp, Probe sequence
tagtcattaaaagcatggcagcatt

SEQ ID NO: 46292 - DNA, 25 bp, Probe sequence
ggacttgactgagtttatggaagaa

SEQ ID NO: 46293 - DNA, 25 bp, Probe sequence
gacttgactgagtttatggaagaag

SEQ ID NO: 46294 - DNA, 25 bp, Probe sequence
cttgactgagtttatggaagaagtt

SEQ ID NO: 46295 - DNA, 25 bp, Probe sequence
ctggacttgactgagtttatggaag

SEQ ID NO: 46296 - DNA, 25 bp, Probe sequence
tggacttgactgagtttatggaaga

SEQ ID NO: 46297 - DNA, 25 bp, Probe sequence
tctggacttgactgagtttatggaa

SEQ ID NO: 46298 - DNA, 25 bp, Probe sequence
gtctggacttgactgagtttatgga

SEQ ID NO: 46299 - DNA, 25 bp, Probe sequence
acttgactgagtttatggaagaagt

SEQ ID NO: 46300 - DNA, 25 bp, Probe sequence
agaagaaatgcactcaactattatg

SEQ ID NO: 46301 - DNA, 25 bp, Probe sequence
tgtattattgattccgattgcgatg

SEQ ID NO: 46302 - DNA, 25 bp, Probe sequence
gtattattgattccgattgcgatga

SEQ ID NO: 46303 - DNA, 25 bp, Probe sequence
ggttgtgcttgaagataatgagatt

SEQ ID NO: 46304 - DNA, 25 bp, Probe sequence
tggttgtgcttgaagataatgagat

SEQ ID NO: 46305 - DNA, 25 bp, Probe sequence
ttgtattattgattccgattgcgat

SEQ ID NO: 46306 - DNA, 25 bp, Probe sequence
attgtattattgattccgattgcga

SEQ ID NO: 46307 - DNA, 25 bp, Probe sequence
atgtaattggaggaacttctgtagc

SEQ ID NO: 46308 - DNA, 25 bp, Probe sequence
ctggttgtgcttgaagataatgaga

SEQ ID NO: 46309 - DNA, 25 bp, Probe sequence
ttgtggtgatgtgaatgtcttgatt

SEQ ID NO: 46310 - DNA, 25 bp, Probe sequence
cgagtgaacttgaattagagaatga

SEQ ID NO: 46311 - DNA, 25 bp, Probe sequence
gaacttgaattagagaatgaacagc

SEQ ID NO: 46312 - DNA, 25 bp, Probe sequence
atatgttggatgaatgtggcatgat

SEQ ID NO: 46313 - DNA, 25 bp, Probe sequence
tatgttggatgaatgtggcatgatt

SEQ ID NO: 46314 - DNA, 25 bp, Probe sequence
gtgaacttgaattagagaatgaaca

SEQ ID NO: 46315 - DNA, 25 bp, Probe sequence
tcgagtgaacttgaattagagaatg

SEQ ID NO: 46316 - DNA, 25 bp, Probe sequence
acttgaattagagaatgaacagctt

SEQ ID NO: 46317 - DNA, 25 bp, Probe sequence
aacttgaattagagaatgaacagct

SEQ ID NO: 46318 - DNA, 25 bp, Probe sequence
acgtattgttagttatgagctaggc

SEQ ID NO: 46319 - DNA, 25 bp, Probe sequence
gttcataagtatcaagcacatggta

SEQ ID NO: 46320 - DNA, 25 bp, Probe sequence
ggttcataagtatcaagcacatggt

SEQ ID NO: 46321 - DNA, 25 bp, Probe sequence
atctatgatgacgccagaagaacaa

SEQ ID NO: 46322 - DNA, 25 bp, Probe sequence
aatctatgatgacgccagaagaaca

SEQ ID NO: 46323 - DNA, 25 bp, Probe sequence
ttcataagtatcaagcacatggtaa

SEQ ID NO: 46324 - DNA, 25 bp, Probe sequence
ttcaaatcaatcaacccaagacatc

SEQ ID NO: 46325 - DNA, 25 bp, Probe sequence
ccaagacatcgcaatcaaatacaat

SEQ ID NO: 46326 - DNA, 25 bp, Probe sequence
attcaaatcaatcaacccaagacat

SEQ ID NO: 46327 - DNA, 25 bp, Probe sequence
aattcaaatcaatcaacccaagaca

SEQ ID NO: 46328 - DNA, 25 bp, Probe sequence
acacaattagatgagattgctgatt

SEQ ID NO: 46329 - DNA, 25 bp, Probe sequence
tacacaattagatgagattgctgat

SEQ ID NO: 46330 - DNA, 25 bp, Probe sequence
atacacaattagatgagattgctga

SEQ ID NO: 46331 - DNA, 25 bp, Probe sequence
tagatgagattgctgattacttagc

SEQ ID NO: 46332 - DNA, 25 bp, Probe sequence
gatacacaattagatgagattgctg

SEQ ID NO: 46333 - DNA, 25 bp, Probe sequence
agatacacaattagatgagattgct

SEQ ID NO: 46334 - DNA, 25 bp, Probe sequence
agatgagattgctgattacttagct

SEQ ID NO: 46335 - DNA, 25 bp, Probe sequence
ttagatgagattgctgattacttag

SEQ ID NO: 46336 - DNA, 25 bp, Probe sequence
aattagatgagattgctgattactt

SEQ ID NO: 46337 - DNA, 25 bp, Probe sequence
cacaattagcattcgcaataggtaa

SEQ ID NO: 46338 - DNA, 25 bp, Probe sequence
acagtatccaccacaattagcattc

SEQ ID NO: 46339 - DNA, 25 bp, Probe sequence
acaattagcattcgcaataggtaat

SEQ ID NO: 46340 - DNA, 25 bp, Probe sequence
cacagtatccaccacaattagcatt

SEQ ID NO: 46341 - DNA, 25 bp, Probe sequence
ccacaattagcattcgcaataggta

SEQ ID NO: 46342 - DNA, 25 bp, Probe sequence
cagtatccaccacaattagcattcg

SEQ ID NO: 46343 - DNA, 25 bp, Probe sequence
caccacaattagcattcgcaatagg

SEQ ID NO: 46344 - DNA, 25 bp, Probe sequence
ccaccacaattagcattcgcaatag

SEQ ID NO: 46345 - DNA, 25 bp, Probe sequence
tccaccacaattagcattcgcaata

SEQ ID NO: 46346 - DNA, 25 bp, Probe sequence
acttatatgccttggttgatggtta

SEQ ID NO: 46347 - DNA, 25 bp, Probe sequence
tatatgccttggttgatggttatga

SEQ ID NO: 46348 - DNA, 25 bp, Probe sequence
tatgccttggttgatggttatgaat

SEQ ID NO: 46349 - DNA, 25 bp, Probe sequence
atatgccttggttgatggttatgaa

SEQ ID NO: 46350 - DNA, 25 bp, Probe sequence
ttatatgccttggttgatggttatg

SEQ ID NO: 46351 - DNA, 25 bp, Probe sequence
taacttatatgccttggttgatggt

SEQ ID NO: 46352 - DNA, 25 bp, Probe sequence
cttatatgccttggttgatggttat

SEQ ID NO: 46353 - DNA, 25 bp, Probe sequence
aacttatatgccttggttgatggtt

SEQ ID NO: 46354 - DNA, 25 bp, Probe sequence
atgccttggttgatggttatgaatt

SEQ ID NO: 46355 - DNA, 25 bp, Probe sequence
aacattgtctgcactaatagtaagt

SEQ ID NO: 46356 - DNA, 25 bp, Probe sequence
acattgtctgcactaatagtaagta

SEQ ID NO: 46357 - DNA, 25 bp, Probe sequence
acttactatgctctatccaataaga

SEQ ID NO: 46358 - DNA, 25 bp, Probe sequence
cgctttcttttctgtagtttctgtt

SEQ ID NO: 46359 - DNA, 25 bp, Probe sequence
ttctcgctttcttttctgtagtttc

SEQ ID NO: 46360 - DNA, 25 bp, Probe sequence
ctcgctttcttttctgtagtttctg

SEQ ID NO: 46361 - DNA, 25 bp, Probe sequence
tctcgctttcttttctgtagtttct

SEQ ID NO: 46362 - DNA, 25 bp, Probe sequence
attctcgctttcttttctgtagttt

SEQ ID NO: 46363 - DNA, 25 bp, Probe sequence
tcgctttcttttctgtagtttctgt

SEQ ID NO: 46364 - DNA, 25 bp, Probe sequence
atatgaagttgattggaagacacat

SEQ ID NO: 46365 - DNA, 25 bp, Probe sequence
tatatgaagttgattggaagacaca

SEQ ID NO: 46366 - DNA, 25 bp, Probe sequence
tcagcattatatgaagttgattgga

SEQ ID NO: 46367 - DNA, 25 bp, Probe sequence
cagcattatatgaagttgattggaa

SEQ ID NO: 46368 - DNA, 25 bp, Probe sequence
gcattatatgaagttgattggaaga

SEQ ID NO: 46369 - DNA, 25 bp, Probe sequence
agcattatatgaagttgattggaag

SEQ ID NO: 46370 - DNA, 25 bp, Probe sequence
ttatatgaagttgattggaagacac

SEQ ID NO: 46371 - DNA, 25 bp, Probe sequence
tggaatagtacattaagatggcctg

SEQ ID NO: 46372 - DNA, 25 bp, Probe sequence
ttggaatagtacattaagatggcct

SEQ ID NO: 46373 - DNA, 25 bp, Probe sequence
tcaatataggttgtggcttagatac

SEQ ID NO: 46374 - DNA, 25 bp, Probe sequence
caatataggttgtggcttagataca

SEQ ID NO: 46375 - DNA, 25 bp, Probe sequence
tggcttagatacaaggtttcaaaga

SEQ ID NO: 46376 - DNA, 25 bp, Probe sequence
gtggcttagatacaaggtttcaaag

SEQ ID NO: 46377 - DNA, 25 bp, Probe sequence
ggcttagatacaaggtttcaaagat

SEQ ID NO: 46378 - DNA, 25 bp, Probe sequence
tgtggcttagatacaaggtttcaaa

SEQ ID NO: 46379 - DNA, 25 bp, Probe sequence
ggagatcataatttgacatttgcga

SEQ ID NO: 46380 - DNA, 25 bp, Probe sequence
tcataatttgacatttgcgattgaa

SEQ ID NO: 46381 - DNA, 25 bp, Probe sequence
atcataatttgacatttgcgattga

SEQ ID NO: 46382 - DNA, 25 bp, Probe sequence
gtagccaatctgccatagatcataa

SEQ ID NO: 46383 - DNA, 25 bp, Probe sequence
agtagccaatctgccatagatcata

SEQ ID NO: 46384 - DNA, 25 bp, Probe sequence
ttagcggtatctggtttgttaatgc

SEQ ID NO: 46385 - DNA, 25 bp, Probe sequence
taagtagccaatctgccatagatca

SEQ ID NO: 46386 - DNA, 25 bp, Probe sequence
aagtagccaatctgccatagatcat

SEQ ID NO: 46387 - DNA, 25 bp, Probe sequence
actactatcagatgtattaagtcgt

SEQ ID NO: 46388 - DNA, 25 bp, Probe sequence
taatgtacgtatgccaaggatgatt

SEQ ID NO: 46389 - DNA, 25 bp, Probe sequence
ataatgtacgtatgccaaggatgat

SEQ ID NO: 46390 - DNA, 25 bp, Probe sequence
ggatgattgcagggttatttattgg

SEQ ID NO: 46391 - DNA, 25 bp, Probe sequence
tgattattgagacggtattgttgga

SEQ ID NO: 46392 - DNA, 25 bp, Probe sequence
gtgattattgagacggtattgttgg

SEQ ID NO: 46393 - DNA, 25 bp, Probe sequence
gattattgagacggtattgttggac

SEQ ID NO: 46394 - DNA, 25 bp, Probe sequence
agtgattattgagacggtattgttg

SEQ ID NO: 46395 - DNA, 25 bp, Probe sequence
aagtgattattgagacggtattgtt

SEQ ID NO: 46396 - DNA, 25 bp, Probe sequence
attattgagacggtattgttggacc

SEQ ID NO: 46397 - DNA, 25 bp, Probe sequence
caaggtttagaagcagattcagatt

SEQ ID NO: 46398 - DNA, 25 bp, Probe sequence
tacaacaagacattgaagcagtggt

SEQ ID NO: 46399 - DNA, 25 bp, Probe sequence
tattgagacggtattgttggaccat

SEQ ID NO: 46400 - DNA, 25 bp, Probe sequence
tcaaccattcacttatgagttacct

SEQ ID NO: 46401 - DNA, 25 bp, Probe sequence
atcaaccattcacttatgagttacc

SEQ ID NO: 46402 - DNA, 25 bp, Probe sequence
caaccattcacttatgagttaccta

SEQ ID NO: 46403 - DNA, 25 bp, Probe sequence
cagcagtgtttgaaaggaagtttat

SEQ ID NO: 46404 - DNA, 25 bp, Probe sequence
aaccattcacttatgagttacctaa

SEQ ID NO: 46405 - DNA, 25 bp, Probe sequence
ggtaatcaaccattcacttatgagt

SEQ ID NO: 46406 - DNA, 25 bp, Probe sequence
aatcaaccattcacttatgagttac

SEQ ID NO: 46407 - DNA, 25 bp, Probe sequence
gtaatcaaccattcacttatgagtt

SEQ ID NO: 46408 - DNA, 25 bp, Probe sequence
agcagtgtttgaaaggaagtttata

SEQ ID NO: 46409 - DNA, 25 bp, Probe sequence
gaaacgaaattaggtaaggttcatt

SEQ ID NO: 46410 - DNA, 25 bp, Probe sequence
attgaaacgaaattaggtaaggttc

SEQ ID NO: 46411 - DNA, 25 bp, Probe sequence
cagttttgtttgatgatgaagggaa

SEQ ID NO: 46412 - DNA, 25 bp, Probe sequence
agttttgtttgatgatgaagggaat

SEQ ID NO: 46413 - DNA, 25 bp, Probe sequence
ttccagttttgtttgatgatgaagg

SEQ ID NO: 46414 - DNA, 25 bp, Probe sequence
aaacgaaattaggtaaggttcatta

SEQ ID NO: 46415 - DNA, 25 bp, Probe sequence
tattgaaacgaaattaggtaaggtt

SEQ ID NO: 46416 - DNA, 25 bp, Probe sequence
atattgaaacgaaattaggtaaggt

SEQ ID NO: 46417 - DNA, 25 bp, Probe sequence
gttttgtttgatgatgaagggaatt

SEQ ID NO: 46418 - DNA, 25 bp, Probe sequence
agaaatagaagaaagaacattccca

SEQ ID NO: 46419 - DNA, 25 bp, Probe sequence
gaaatagaagaaagaacattcccaa

SEQ ID NO: 46420 - DNA, 25 bp, Probe sequence
aagaaatagaagaaagaacattccc

SEQ ID NO: 46421 - DNA, 25 bp, Probe sequence
aaatagaagaaagaacattcccaaa

SEQ ID NO: 46422 - DNA, 25 bp, Probe sequence
agaagaaagaacattcccaaataat

SEQ ID NO: 46423 - DNA, 25 bp, Probe sequence
aatagaagaaagaacattcccaaat

SEQ ID NO: 46424 - DNA, 25 bp, Probe sequence
tagaagaaagaacattcccaaataa

SEQ ID NO: 46425 - DNA, 25 bp, Probe sequence
gaacattcccaaataatgaagaaga

SEQ ID NO: 46426 - DNA, 25 bp, Probe sequence
agaacattcccaaataatgaagaag

SEQ ID NO: 46427 - DNA, 25 bp, Probe sequence
taggttctgaagaagctgcaaattt

SEQ ID NO: 46428 - DNA, 25 bp, Probe sequence
ttaggttctgaagaagctgcaaatt

SEQ ID NO: 46429 - DNA, 25 bp, Probe sequence
tttaggttctgaagaagctgcaaat

SEQ ID NO: 46430 - DNA, 25 bp, Probe sequence
acatttccaaataatgaagaagagt

SEQ ID NO: 46431 - DNA, 25 bp, Probe sequence
ttttaggttctgaagaagctgcaaa

SEQ ID NO: 46432 - DNA, 25 bp, Probe sequence
caaataatgaagaagagtttaatgc

SEQ ID NO: 46433 - DNA, 25 bp, Probe sequence
atttccaaataatgaagaagagttt

SEQ ID NO: 46434 - DNA, 25 bp, Probe sequence
catttccaaataatgaagaagagtt

SEQ ID NO: 46435 - DNA, 25 bp, Probe sequence
aacatttccaaataatgaagaagag

SEQ ID NO: 46436 - DNA, 25 bp, Probe sequence
tagatttgaacgaattattacagcg

SEQ ID NO: 46437 - DNA, 25 bp, Probe sequence
tgaacgaattattacagcgtctcaa

SEQ ID NO: 46438 - DNA, 25 bp, Probe sequence
ttgaacgaattattacagcgtctca

SEQ ID NO: 46439 - DNA, 25 bp, Probe sequence
gttgaacaaacgaatacaccaggtt

SEQ ID NO: 46440 - DNA, 25 bp, Probe sequence
gtagatttgaacgaattattacagc

SEQ ID NO: 46441 - DNA, 25 bp, Probe sequence
tttgaacgaattattacagcgtctc

SEQ ID NO: 46442 - DNA, 25 bp, Probe sequence
atttgaacgaattattacagcgtct

SEQ ID NO: 46443 - DNA, 25 bp, Probe sequence
agatttgaacgaattattacagcgt

SEQ ID NO: 46444 - DNA, 25 bp, Probe sequence
gatttgaacgaattattacagcgtc

SEQ ID NO: 46445 - DNA, 25 bp, Probe sequence
cctgatgatgataatgtgctgaatc

SEQ ID NO: 46446 - DNA, 25 bp, Probe sequence
ggttatatcgcatcatcaacatctg

SEQ ID NO: 46447 - DNA, 25 bp, Probe sequence
aggttatatcgcatcatcaacatct

SEQ ID NO: 46448 - DNA, 25 bp, Probe sequence
aaggttatatcgcatcatcaacatc

SEQ ID NO: 46449 - DNA, 25 bp, Probe sequence
gttatatcgcatcatcaacatctgt

SEQ ID NO: 46450 - DNA, 25 bp, Probe sequence
cgcatcatcaacatctgttatatca

SEQ ID NO: 46451 - DNA, 25 bp, Probe sequence
tcgcatcatcaacatctgttatatc

SEQ ID NO: 46452 - DNA, 25 bp, Probe sequence
ttatatcgcatcatcaacatctgtt

SEQ ID NO: 46453 - DNA, 25 bp, Probe sequence
atcgcatcatcaacatctgttatat

SEQ ID NO: 46454 - DNA, 25 bp, Probe sequence
atatgaattgactgaagatggagaa

SEQ ID NO: 46455 - DNA, 25 bp, Probe sequence
aattacttagttcctattcggagcg

SEQ ID NO: 46456 - DNA, 25 bp, Probe sequence
gaattacttagttcctattcggagc

SEQ ID NO: 46457 - DNA, 25 bp, Probe sequence
aaatgcgactgattatggtttgaaa

SEQ ID NO: 46458 - DNA, 25 bp, Probe sequence
taaatgcgactgattatggtttgaa

SEQ ID NO: 46459 - DNA, 25 bp, Probe sequence
ttaaatgcgactgattatggtttga

SEQ ID NO: 46460 - DNA, 25 bp, Probe sequence
gcgagaaatccaacaacaagaatta

SEQ ID NO: 46461 - DNA, 25 bp, Probe sequence
ttacttgaaagcgacattaaagagc

SEQ ID NO: 46462 - DNA, 25 bp, Probe sequence
tgaattgactgaagatggagaaatc

SEQ ID NO: 46463 - DNA, 25 bp, Probe sequence
agcagcattatacatatacacatga

SEQ ID NO: 46464 - DNA, 25 bp, Probe sequence
gcagcattatacatatacacatgag

SEQ ID NO: 46465 - DNA, 25 bp, Probe sequence
acgaaaggaaatccaggcataagta

SEQ ID NO: 46466 - DNA, 25 bp, Probe sequence
cgaaaggaaatccaggcataagtac

SEQ ID NO: 46467 - DNA, 25 bp, Probe sequence
cagcattatacatatacacatgagt

SEQ ID NO: 46468 - DNA, 25 bp, Probe sequence
gacgaaaggaaatccaggcataagt

SEQ ID NO: 46469 - DNA, 25 bp, Probe sequence
gaacaaaacaaagaagcgaatcaac

SEQ ID NO: 46470 - DNA, 25 bp, Probe sequence
agaacaaaacaaagaagcgaatcaa

SEQ ID NO: 46471 - DNA, 25 bp, Probe sequence
agagaacaaaacaaagaagcgaatc

SEQ ID NO: 46472 - DNA, 25 bp, Probe sequence
ggacatactggttctgttggattat

SEQ ID NO: 46473 - DNA, 25 bp, Probe sequence
gacatactggttctgttggattatt

SEQ ID NO: 46474 - DNA, 25 bp, Probe sequence
tggacatactggttctgttggatta

SEQ ID NO: 46475 - DNA, 25 bp, Probe sequence
gatcctgataacagtccattcgtaa

SEQ ID NO: 46476 - DNA, 25 bp, Probe sequence
aagttgatcctgataacagtccatt

SEQ ID NO: 46477 - DNA, 25 bp, Probe sequence
agttgatcctgataacagtccattc

SEQ ID NO: 46478 - DNA, 25 bp, Probe sequence
caagttgatcctgataacagtccat

SEQ ID NO: 46479 - DNA, 25 bp, Probe sequence
catactggttctgttggattattac

SEQ ID NO: 46480 - DNA, 25 bp, Probe sequence
tgatcctgataacagtccattcgta

SEQ ID NO: 46481 - DNA, 25 bp, Probe sequence
tttatgactcgttgattgaaggttt

SEQ ID NO: 46482 - DNA, 25 bp, Probe sequence
atttatgactcgttgattgaaggtt

SEQ ID NO: 46483 - DNA, 25 bp, Probe sequence
agcaattattccaaacgattactgt

SEQ ID NO: 46484 - DNA, 25 bp, Probe sequence
acagcaattattccaaacgattact

SEQ ID NO: 46485 - DNA, 25 bp, Probe sequence
agaacagcaattattccaaacgatt

SEQ ID NO: 46486 - DNA, 25 bp, Probe sequence
gcaattattccaaacgattactgtc

SEQ ID NO: 46487 - DNA, 25 bp, Probe sequence
ttagaacagcaattattccaaacga

SEQ ID NO: 46488 - DNA, 25 bp, Probe sequence
tagaacagcaattattccaaacgat

SEQ ID NO: 46489 - DNA, 25 bp, Probe sequence
gttagaacagcaattattccaaacg

SEQ ID NO: 46490 - DNA, 25 bp, Probe sequence
gattgcgttagactcttgctcttag

SEQ ID NO: 46491 - DNA, 25 bp, Probe sequence
attgcgttagactcttgctcttaga

SEQ ID NO: 46492 - DNA, 25 bp, Probe sequence
ttgcgttagactcttgctcttagaa

SEQ ID NO: 46493 - DNA, 25 bp, Probe sequence
cctgttatggaggtgataggatgaa

SEQ ID NO: 46494 - DNA, 25 bp, Probe sequence
ctgttatggaggtgataggatgaaa

SEQ ID NO: 46495 - DNA, 25 bp, Probe sequence
ttatggaggtgataggatgaaactt

SEQ ID NO: 46496 - DNA, 25 bp, Probe sequence
tggaggtgataggatgaaacttaat

SEQ ID NO: 46497 - DNA, 25 bp, Probe sequence
atggaggtgataggatgaaacttaa

SEQ ID NO: 46498 - DNA, 25 bp, Probe sequence
gggtcgtttcttggattattgatga

SEQ ID NO: 46499 - DNA, 25 bp, Probe sequence
gtctgtttacaaagaactgaagaac

SEQ ID NO: 46500 - DNA, 25 bp, Probe sequence
tctgtttacaaagaactgaagaact

SEQ ID NO: 46501 - DNA, 25 bp, Probe sequence
agtctgtttacaaagaactgaagaa

SEQ ID NO: 46502 - DNA, 25 bp, Probe sequence
ctgtttacaaagaactgaagaacta

SEQ ID NO: 46503 - DNA, 25 bp, Probe sequence
cagttacagtctgtttacaaagaac

SEQ ID NO: 46504 - DNA, 25 bp, Probe sequence
aatacaccttaatgactatgcatgg

SEQ ID NO: 46505 - DNA, 25 bp, Probe sequence
tgtttacaaagaactgaagaactat

SEQ ID NO: 46506 - DNA, 25 bp, Probe sequence
atacaccttaatgactatgcatggt

SEQ ID NO: 46507 - DNA, 25 bp, Probe sequence
tacaccttaatgactatgcatggtc

SEQ ID NO: 46508 - DNA, 25 bp, Probe sequence
atgactctaatagaaccagatatga

SEQ ID NO: 46509 - DNA, 25 bp, Probe sequence
tgccagatataagtactacagtaga

SEQ ID NO: 46510 - DNA, 25 bp, Probe sequence
gaatgccagatataagtactacagt

SEQ ID NO: 46511 - DNA, 25 bp, Probe sequence
agaatgccagatataagtactacag

SEQ ID NO: 46512 - DNA, 25 bp, Probe sequence
actacagtagaaacacttaatctca

SEQ ID NO: 46513 - DNA, 25 bp, Probe sequence
aagaatgccagatataagtactaca

SEQ ID NO: 46514 - DNA, 25 bp, Probe sequence
gccagatataagtactacagtagaa

SEQ ID NO: 46515 - DNA, 25 bp, Probe sequence
atgccagatataagtactacagtag

SEQ ID NO: 46516 - DNA, 25 bp, Probe sequence
aatgccagatataagtactacagta

SEQ ID NO: 46517 - DNA, 25 bp, Probe sequence
gatattacagaattagaagagcgta

SEQ ID NO: 46518 - DNA, 25 bp, Probe sequence
atctgtgactgtgaaagatagtaca

SEQ ID NO: 46519 - DNA, 25 bp, Probe sequence
cgataaaacgatgagatggctaaaa

SEQ ID NO: 46520 - DNA, 25 bp, Probe sequence
atattacagaattagaagagcgtat

SEQ ID NO: 46521 - DNA, 25 bp, Probe sequence
aacaattggatagtgaggagaaaca

SEQ ID NO: 46522 - DNA, 25 bp, Probe sequence
aaacaattggatagtgaggagaaac

SEQ ID NO: 46523 - DNA, 25 bp, Probe sequence
attggatagtgaggagaaacaataa

SEQ ID NO: 46524 - DNA, 25 bp, Probe sequence
aattggatagtgaggagaaacaata

SEQ ID NO: 46525 - DNA, 25 bp, Probe sequence
acaattggatagtgaggagaaacaa

SEQ ID NO: 46526 - DNA, 25 bp, Probe sequence
tcttcagtagagtcagattcaagtt

SEQ ID NO: 46527 - DNA, 25 bp, Probe sequence
gatatgtgttgtatccaggcttatc

SEQ ID NO: 46528 - DNA, 25 bp, Probe sequence
catggatcgtgtcacctatcataac

SEQ ID NO: 46529 - DNA, 25 bp, Probe sequence
cttcagtagagtcagattcaagtta

SEQ ID NO: 46530 - DNA, 25 bp, Probe sequence
ctgtcgttaagcaagaagatgactt

SEQ ID NO: 46531 - DNA, 25 bp, Probe sequence
agtaactgtcgttaagcaagaagat

SEQ ID NO: 46532 - DNA, 25 bp, Probe sequence
gaagtaactgtcgttaagcaagaag

SEQ ID NO: 46533 - DNA, 25 bp, Probe sequence
taactgtcgttaagcaagaagatga

SEQ ID NO: 46534 - DNA, 25 bp, Probe sequence
gtaactgtcgttaagcaagaagatg

SEQ ID NO: 46535 - DNA, 25 bp, Probe sequence
taagtatgatgagaagaatgacgca

SEQ ID NO: 46536 - DNA, 25 bp, Probe sequence
tatgatgagaagaatgacgcaatga

SEQ ID NO: 46537 - DNA, 25 bp, Probe sequence
gtatgatgagaagaatgacgcaatg

SEQ ID NO: 46538 - DNA, 25 bp, Probe sequence
agtatgatgagaagaatgacgcaat

SEQ ID NO: 46539 - DNA, 25 bp, Probe sequence
aagtatgatgagaagaatgacgcaa

SEQ ID NO: 46540 - DNA, 25 bp, Probe sequence
gaagaatgacgcaatgaagaagaag

SEQ ID NO: 46541 - DNA, 25 bp, Probe sequence
agaagaatgacgcaatgaagaagaa

SEQ ID NO: 46542 - DNA, 25 bp, Probe sequence
atgagaagaatgacgcaatgaagaa

SEQ ID NO: 46543 - DNA, 25 bp, Probe sequence
atgatgagaagaatgacgcaatgaa

SEQ ID NO: 46544 - DNA, 25 bp, Probe sequence
aattggaacacctagagcattaaca

SEQ ID NO: 46545 - DNA, 25 bp, Probe sequence
ttagatacgaagtctgcggatatga

SEQ ID NO: 46546 - DNA, 25 bp, Probe sequence
attggaacacctagagcattaacaa

SEQ ID NO: 46547 - DNA, 25 bp, Probe sequence
tatcaagaggtagagctatcagtcg

SEQ ID NO: 46548 - DNA, 25 bp, Probe sequence
tagatacgaagtctgcggatatgac

SEQ ID NO: 46549 - DNA, 25 bp, Probe sequence
ttatcaagaggtagagctatcagtc

SEQ ID NO: 46550 - DNA, 25 bp, Probe sequence
gatttagatacgaagtctgcggata

SEQ ID NO: 46551 - DNA, 25 bp, Probe sequence
tttagatacgaagtctgcggatatg

SEQ ID NO: 46552 - DNA, 25 bp, Probe sequence
atttagatacgaagtctgcggatat

SEQ ID NO: 46553 - DNA, 25 bp, Probe sequence
ttaacggtaatccaagtgatacatt

SEQ ID NO: 46554 - DNA, 25 bp, Probe sequence
actacttcatcaacatctattccaa

SEQ ID NO: 46555 - DNA, 25 bp, Probe sequence
tgaacttcaatcaattcgagaatca

SEQ ID NO: 46556 - DNA, 25 bp, Probe sequence
gaacttcaatcaattcgagaatcaa

SEQ ID NO: 46557 - DNA, 25 bp, Probe sequence
ctacttcatcaacatctattccaat

SEQ ID NO: 46558 - DNA, 25 bp, Probe sequence
aacggtaatccaagtgatacattta

SEQ ID NO: 46559 - DNA, 25 bp, Probe sequence
taacggtaatccaagtgatacattt

SEQ ID NO: 46560 - DNA, 25 bp, Probe sequence
acggtaatccaagtgatacatttaa

SEQ ID NO: 46561 - DNA, 25 bp, Probe sequence
tttaacggtaatccaagtgatacat

SEQ ID NO: 46562 - DNA, 25 bp, Probe sequence
tggtcatacgaaagcatatcaatca

SEQ ID NO: 46563 - DNA, 25 bp, Probe sequence
ttaattagacgctctgtatgtgaat

SEQ ID NO: 46564 - DNA, 25 bp, Probe sequence
ggtcatacgaaagcatatcaatcat

SEQ ID NO: 46565 - DNA, 25 bp, Probe sequence
attaattagacgctctgtatgtgaa

SEQ ID NO: 46566 - DNA, 25 bp, Probe sequence
tacaatcgcaggatatcagacataa

SEQ ID NO: 46567 - DNA, 25 bp, Probe sequence
ttacaatcgcaggatatcagacata

SEQ ID NO: 46568 - DNA, 25 bp, Probe sequence
cttacaatcgcaggatatcagacat

SEQ ID NO: 46569 - DNA, 25 bp, Probe sequence
atggtcatacgaaagcatatcaatc

SEQ ID NO: 46570 - DNA, 25 bp, Probe sequence
taattagacgctctgtatgtgaatt

SEQ ID NO: 46571 - DNA, 25 bp, Probe sequence
aaaacattgatacaaaccatagccg

SEQ ID NO: 46572 - DNA, 25 bp, Probe sequence
taaaacattgatacaaaccatagcc

SEQ ID NO: 46573 - DNA, 25 bp, Probe sequence
aaacattgatacaaaccatagccgg

SEQ ID NO: 46574 - DNA, 25 bp, Probe sequence
tttcgtaagtattgttactgcaaat

SEQ ID NO: 46575 - DNA, 25 bp, Probe sequence
atttcgtaagtattgttactgcaaa

SEQ ID NO: 46576 - DNA, 25 bp, Probe sequence
ttcgtaagtattgttactgcaaata

SEQ ID NO: 46577 - DNA, 25 bp, Probe sequence
tatttcgtaagtattgttactgcaa

SEQ ID NO: 46578 - DNA, 25 bp, Probe sequence
tcgtaagtattgttactgcaaatat

SEQ ID NO: 46579 - DNA, 25 bp, Probe sequence
atatttcgtaagtattgttactgca

SEQ ID NO: 46580 - DNA, 25 bp, Probe sequence
tattgagttaagtagcggttggaat

SEQ ID NO: 46581 - DNA, 25 bp, Probe sequence
ctattgagttaagtagcggttggaa

SEQ ID NO: 46582 - DNA, 25 bp, Probe sequence
ttgagttaagtagcggttggaatta

SEQ ID NO: 46583 - DNA, 25 bp, Probe sequence
attgagttaagtagcggttggaatt

SEQ ID NO: 46584 - DNA, 25 bp, Probe sequence
gagttaagtagcggttggaattaca

SEQ ID NO: 46585 - DNA, 25 bp, Probe sequence
tgagttaagtagcggttggaattac

SEQ ID NO: 46586 - DNA, 25 bp, Probe sequence
gttaagtagcggttggaattacaat

SEQ ID NO: 46587 - DNA, 25 bp, Probe sequence
agttaagtagcggttggaattacaa

SEQ ID NO: 46588 - DNA, 25 bp, Probe sequence
ttaagtagcggttggaattacaatt

SEQ ID NO: 46589 - DNA, 25 bp, Probe sequence
aaatcagggtatattgccagaaaga

SEQ ID NO: 46590 - DNA, 25 bp, Probe sequence
aatcagggtatattgccagaaagac

SEQ ID NO: 46591 - DNA, 25 bp, Probe sequence
tcagggtatattgccagaaagacta

SEQ ID NO: 46592 - DNA, 25 bp, Probe sequence
cagggtatattgccagaaagactac

SEQ ID NO: 46593 - DNA, 25 bp, Probe sequence
atcagggtatattgccagaaagact

SEQ ID NO: 46594 - DNA, 25 bp, Probe sequence
caaatcagggtatattgccagaaag

SEQ ID NO: 46595 - DNA, 25 bp, Probe sequence
tacaaatcagggtatattgccagaa

SEQ ID NO: 46596 - DNA, 25 bp, Probe sequence
acaaatcagggtatattgccagaaa

SEQ ID NO: 46597 - DNA, 25 bp, Probe sequence
aaggatggatacaaatgactttacc

SEQ ID NO: 46598 - DNA, 25 bp, Probe sequence
ctgagttacaggcagatgctatatc

SEQ ID NO: 46599 - DNA, 25 bp, Probe sequence
tgagttacaggcagatgctatatcg

SEQ ID NO: 46600 - DNA, 25 bp, Probe sequence
ttgttacgacttggattattatagc

SEQ ID NO: 46601 - DNA, 25 bp, Probe sequence
gagttacaggcagatgctatatcga

SEQ ID NO: 46602 - DNA, 25 bp, Probe sequence
aattaagaatgcaacctgagttaca

SEQ ID NO: 46603 - DNA, 25 bp, Probe sequence
attcttattcaagacgatagtgcca

SEQ ID NO: 46604 - DNA, 25 bp, Probe sequence
attaagaatgcaacctgagttacag

SEQ ID NO: 46605 - DNA, 25 bp, Probe sequence
tgttacgacttggattattatagct

SEQ ID NO: 46606 - DNA, 25 bp, Probe sequence
tattcttattcaagacgatagtgcc

SEQ ID NO: 46607 - DNA, 25 bp, Probe sequence
aaggtaataggacttgtagcgacag

SEQ ID NO: 46608 - DNA, 25 bp, Probe sequence
aaacgagaattgctatggatgattt

SEQ ID NO: 46609 - DNA, 25 bp, Probe sequence
acgagaattgctatggatgatttaa

SEQ ID NO: 46610 - DNA, 25 bp, Probe sequence
aacgagaattgctatggatgattta

SEQ ID NO: 46611 - DNA, 25 bp, Probe sequence
cgacagcaggttctagtaaacatta

SEQ ID NO: 46612 - DNA, 25 bp, Probe sequence
attgagttacatgaaagcacatacg

SEQ ID NO: 46613 - DNA, 25 bp, Probe sequence
gagttacatgaaagcacatacgatg

SEQ ID NO: 46614 - DNA, 25 bp, Probe sequence
tgagttacatgaaagcacatacgat

SEQ ID NO: 46615 - DNA, 25 bp, Probe sequence
ttgtcaatgatgatgttgtatttcg

SEQ ID NO: 46616 - DNA, 25 bp, Probe sequence
atgaggataagagatttgaaggtgc

SEQ ID NO: 46617 - DNA, 25 bp, Probe sequence
aatgaggataagagatttgaaggtg

SEQ ID NO: 46618 - DNA, 25 bp, Probe sequence
aatgtgacaggttatatcagtttca

SEQ ID NO: 46619 - DNA, 25 bp, Probe sequence
tgaatacagctcctataatatgggt

SEQ ID NO: 46620 - DNA, 25 bp, Probe sequence
taatgaggataagagatttgaaggt

SEQ ID NO: 46621 - DNA, 25 bp, Probe sequence
gaatacagctcctataatatgggtg

SEQ ID NO: 46622 - DNA, 25 bp, Probe sequence
acagctcctataatatgggtgtatg

SEQ ID NO: 46623 - DNA, 25 bp, Probe sequence
aaatgtgacaggttatatcagtttc

SEQ ID NO: 46624 - DNA, 25 bp, Probe sequence
gaggataagagatttgaaggtgcaa

SEQ ID NO: 46625 - DNA, 25 bp, Probe sequence
tcaatgaagcgaagcatggtaataa

SEQ ID NO: 46626 - DNA, 25 bp, Probe sequence
ttcaatgaagcgaagcatggtaata

SEQ ID NO: 46627 - DNA, 25 bp, Probe sequence
agcgaagcatggtaataaattaagt

SEQ ID NO: 46628 - DNA, 25 bp, Probe sequence
tgaagcgaagcatggtaataaatta

SEQ ID NO: 46629 - DNA, 25 bp, Probe sequence
atgaagcgaagcatggtaataaatt

SEQ ID NO: 46630 - DNA, 25 bp, Probe sequence
aatgaagcgaagcatggtaataaat

SEQ ID NO: 46631 - DNA, 25 bp, Probe sequence
caatgaagcgaagcatggtaataaa

SEQ ID NO: 46632 - DNA, 25 bp, Probe sequence
gcgaagcatggtaataaattaagtt

SEQ ID NO: 46633 - DNA, 25 bp, Probe sequence
aagcgaagcatggtaataaattaag

SEQ ID NO: 46634 - DNA, 25 bp, Probe sequence
cttaacgggaactttgccattatca

SEQ ID NO: 46635 - DNA, 25 bp, Probe sequence
ttaacgggaactttgccattatcac

SEQ ID NO: 46636 - DNA, 25 bp, Probe sequence
acaataggtgtatttggaacaatca

SEQ ID NO: 46637 - DNA, 25 bp, Probe sequence
tggtttaacaataggtgtatttgga

SEQ ID NO: 46638 - DNA, 25 bp, Probe sequence
taacgggaactttgccattatcaca

SEQ ID NO: 46639 - DNA, 25 bp, Probe sequence
gcttaacgggaactttgccattatc

SEQ ID NO: 46640 - DNA, 25 bp, Probe sequence
aacaataggtgtatttggaacaatc

SEQ ID NO: 46641 - DNA, 25 bp, Probe sequence
ttggtttaacaataggtgtatttgg

SEQ ID NO: 46642 - DNA, 25 bp, Probe sequence
caataggtgtatttggaacaatcat

SEQ ID NO: 46643 - DNA, 25 bp, Probe sequence
gtaaagggtattgtaacgatgtgtg

SEQ ID NO: 46644 - DNA, 25 bp, Probe sequence
tgtaaagggtattgtaacgatgtgt

SEQ ID NO: 46645 - DNA, 25 bp, Probe sequence
atgtaaagggtattgtaacgatgtg

SEQ ID NO: 46646 - DNA, 25 bp, Probe sequence
gatgtaaagggtattgtaacgatgt

SEQ ID NO: 46647 - DNA, 25 bp, Probe sequence
agatgtaaagggtattgtaacgatg

SEQ ID NO: 46648 - DNA, 25 bp, Probe sequence
taaagggtattgtaacgatgtgtgc

SEQ ID NO: 46649 - DNA, 25 bp, Probe sequence
gagatgtaaagggtattgtaacgat

SEQ ID NO: 46650 - DNA, 25 bp, Probe sequence
aacgacaatatgattgatccacaat

SEQ ID NO: 46651 - DNA, 25 bp, Probe sequence
aaactgaaggtgccatttatgaagg

SEQ ID NO: 46652 - DNA, 25 bp, Probe sequence
ttattatggcgttaccaatgatttg

SEQ ID NO: 46653 - DNA, 25 bp, Probe sequence
tattattatggcgttaccaatgatt

SEQ ID NO: 46654 - DNA, 25 bp, Probe sequence
ttattattatggcgttaccaatgat

SEQ ID NO: 46655 - DNA, 25 bp, Probe sequence
tggtatcctttcttgtcttatatct

SEQ ID NO: 46656 - DNA, 25 bp, Probe sequence
tggaggtgtaattttgactagaact

SEQ ID NO: 46657 - DNA, 25 bp, Probe sequence
ttggaggtgtaattttgactagaac

SEQ ID NO: 46658 - DNA, 25 bp, Probe sequence
attattatggcgttaccaatgattt

SEQ ID NO: 46659 - DNA, 25 bp, Probe sequence
ggaggtgtaattttgactagaactt

SEQ ID NO: 46660 - DNA, 25 bp, Probe sequence
ttggtatcctttcttgtcttatatc

SEQ ID NO: 46661 - DNA, 25 bp, Probe sequence
atcctggaagtatatctcaatctag

SEQ ID NO: 46662 - DNA, 25 bp, Probe sequence
ctcaatctagaagttcaatggaaga

SEQ ID NO: 46663 - DNA, 25 bp, Probe sequence
tctcaatctagaagttcaatggaag

SEQ ID NO: 46664 - DNA, 25 bp, Probe sequence
aatcctggaagtatatctcaatcta

SEQ ID NO: 46665 - DNA, 25 bp, Probe sequence
taatcctggaagtatatctcaatct

SEQ ID NO: 46666 - DNA, 25 bp, Probe sequence
tcaatctagaagttcaatggaagaa

SEQ ID NO: 46667 - DNA, 25 bp, Probe sequence
atctcaatctagaagttcaatggaa

SEQ ID NO: 46668 - DNA, 25 bp, Probe sequence
tcctggaagtatatctcaatctaga

SEQ ID NO: 46669 - DNA, 25 bp, Probe sequence
atggacatttatatcaagtcaatcg

SEQ ID NO: 46670 - DNA, 25 bp, Probe sequence
atcaacgctattcaatctttgtttg

SEQ ID NO: 46671 - DNA, 25 bp, Probe sequence
cgtacaagatttgaggaatggtaaa

SEQ ID NO: 46672 - DNA, 25 bp, Probe sequence
ccgtacaagatttgaggaatggtaa

SEQ ID NO: 46673 - DNA, 25 bp, Probe sequence
tatcagaccgtacaagatttgagga

SEQ ID NO: 46674 - DNA, 25 bp, Probe sequence
gtatcagaccgtacaagatttgagg

SEQ ID NO: 46675 - DNA, 25 bp, Probe sequence
cgtatcagaccgtacaagatttgag

SEQ ID NO: 46676 - DNA, 25 bp, Probe sequence
cagaccgtacaagatttgaggaatg

SEQ ID NO: 46677 - DNA, 25 bp, Probe sequence
tcagaccgtacaagatttgaggaat

SEQ ID NO: 46678 - DNA, 25 bp, Probe sequence
atcagaccgtacaagatttgaggaa

SEQ ID NO: 46679 - DNA, 25 bp, Probe sequence
attcaggagttccatatcaaacagt

SEQ ID NO: 46680 - DNA, 25 bp, Probe sequence
ttcaggagttccatatcaaacagta

SEQ ID NO: 46681 - DNA, 25 bp, Probe sequence
aattcaggagttccatatcaaacag

SEQ ID NO: 46682 - DNA, 25 bp, Probe sequence
tcaggagttccatatcaaacagtac

SEQ ID NO: 46683 - DNA, 25 bp, Probe sequence
caggagttccatatcaaacagtaca

SEQ ID NO: 46684 - DNA, 25 bp, Probe sequence
aggagttccatatcaaacagtacaa

SEQ ID NO: 46685 - DNA, 25 bp, Probe sequence
ggagttccatatcaaacagtacaag

SEQ ID NO: 46686 - DNA, 25 bp, Probe sequence
aaattcaggagttccatatcaaaca

SEQ ID NO: 46687 - DNA, 25 bp, Probe sequence
gagttccatatcaaacagtacaaga

SEQ ID NO: 46688 - DNA, 25 bp, Probe sequence
acaatatgaatgcgaatgaagtgaa

SEQ ID NO: 46689 - DNA, 25 bp, Probe sequence
tacaatatgaatgcgaatgaagtga

SEQ ID NO: 46690 - DNA, 25 bp, Probe sequence
caccaatggcagatgattatgttaa

SEQ ID NO: 46691 - DNA, 25 bp, Probe sequence
ttacaatatgaatgcgaatgaagtg

SEQ ID NO: 46692 - DNA, 25 bp, Probe sequence
tcaccaatggcagatgattatgtta

SEQ ID NO: 46693 - DNA, 25 bp, Probe sequence
cagatattacggttgacaatgcgaa

SEQ ID NO: 46694 - DNA, 25 bp, Probe sequence
tggcagatgattatgttaatgtctt

SEQ ID NO: 46695 - DNA, 25 bp, Probe sequence
accaatggcagatgattatgttaat

SEQ ID NO: 46696 - DNA, 25 bp, Probe sequence
atggcagatgattatgttaatgtct

SEQ ID NO: 46697 - DNA, 25 bp, Probe sequence
gaacaagaggtgtaccagatagaat

SEQ ID NO: 46698 - DNA, 25 bp, Probe sequence
aacaagaggtgtaccagatagaatt

SEQ ID NO: 46699 - DNA, 25 bp, Probe sequence
acaagaggtgtaccagatagaatta

SEQ ID NO: 46700 - DNA, 25 bp, Probe sequence
ggaacaagaggtgtaccagatagaa

SEQ ID NO: 46701 - DNA, 25 bp, Probe sequence
caagaggtgtaccagatagaattat

SEQ ID NO: 46702 - DNA, 25 bp, Probe sequence
aagaggtgtaccagatagaattatt

SEQ ID NO: 46703 - DNA, 25 bp, Probe sequence
tggaacaagaggtgtaccagataga

SEQ ID NO: 46704 - DNA, 25 bp, Probe sequence
ttataagaatggtaggtggaacatt

SEQ ID NO: 46705 - DNA, 25 bp, Probe sequence
agaggtgtaccagatagaattatta

SEQ ID NO: 46706 - DNA, 25 bp, Probe sequence
gtacctatggcattacttaacactt

SEQ ID NO: 46707 - DNA, 25 bp, Probe sequence
gtttcggtatgtttatcgtcacttt

SEQ ID NO: 46708 - DNA, 25 bp, Probe sequence
tttcggtatgtttatcgtcactttc

SEQ ID NO: 46709 - DNA, 25 bp, Probe sequence
ttcggtatgtttatcgtcactttca

SEQ ID NO: 46710 - DNA, 25 bp, Probe sequence
taagtttcggtatgtttatcgtcac

SEQ ID NO: 46711 - DNA, 25 bp, Probe sequence
cggtatgtttatcgtcactttcatt

SEQ ID NO: 46712 - DNA, 25 bp, Probe sequence
tcggtatgtttatcgtcactttcat

SEQ ID NO: 46713 - DNA, 25 bp, Probe sequence
tgttaagtttcggtatgtttatcgt

SEQ ID NO: 46714 - DNA, 25 bp, Probe sequence
tatgtttatcgtcactttcattggt

SEQ ID NO: 46715 - DNA, 25 bp, Probe sequence
agtagttggaagtgtattagtgtgg

SEQ ID NO: 46716 - DNA, 25 bp, Probe sequence
aattacagtccgatggttatgatgc

SEQ ID NO: 46717 - DNA, 25 bp, Probe sequence
aagtagttggaagtgtattagtgtg

SEQ ID NO: 46718 - DNA, 25 bp, Probe sequence
gtagttggaagtgtattagtgtggg

SEQ ID NO: 46719 - DNA, 25 bp, Probe sequence
taagtagttggaagtgtattagtgt

SEQ ID NO: 46720 - DNA, 25 bp, Probe sequence
aaattacagtccgatggttatgatg

SEQ ID NO: 46721 - DNA, 25 bp, Probe sequence
attacagtccgatggttatgatgca

SEQ ID NO: 46722 - DNA, 25 bp, Probe sequence
ataagtagttggaagtgtattagtg

SEQ ID NO: 46723 - DNA, 25 bp, Probe sequence
aaaattacagtccgatggttatgat

SEQ ID NO: 46724 - DNA, 25 bp, Probe sequence
aaattaagattccaagaagtcagga

SEQ ID NO: 46725 - DNA, 25 bp, Probe sequence
ccaagaagtcaggaaatttgaaatt

SEQ ID NO: 46726 - DNA, 25 bp, Probe sequence
tccaagaagtcaggaaatttgaaat

SEQ ID NO: 46727 - DNA, 25 bp, Probe sequence
aattaagattccaagaagtcaggaa

SEQ ID NO: 46728 - DNA, 25 bp, Probe sequence
aaaattaagattccaagaagtcagg

SEQ ID NO: 46729 - DNA, 25 bp, Probe sequence
gattccaagaagtcaggaaatttga

SEQ ID NO: 46730 - DNA, 25 bp, Probe sequence
agattccaagaagtcaggaaatttg

SEQ ID NO: 46731 - DNA, 25 bp, Probe sequence
taagattccaagaagtcaggaaatt

SEQ ID NO: 46732 - DNA, 25 bp, Probe sequence
ttaagattccaagaagtcaggaaat

SEQ ID NO: 46733 - DNA, 25 bp, Probe sequence
taagtagaagtaatgatcgacgtaa

SEQ ID NO: 46734 - DNA, 25 bp, Probe sequence
ataagtagaagtaatgatcgacgta

SEQ ID NO: 46735 - DNA, 25 bp, Probe sequence
tataagtagaagtaatgatcgacgt

SEQ ID NO: 46736 - DNA, 25 bp, Probe sequence
aagtagaagtaatgatcgacgtaaa

SEQ ID NO: 46737 - DNA, 25 bp, Probe sequence
ttataagtagaagtaatgatcgacg

SEQ ID NO: 46738 - DNA, 25 bp, Probe sequence
agtagaagtaatgatcgacgtaaaa

SEQ ID NO: 46739 - DNA, 25 bp, Probe sequence
gatttgtgcttttataagtagaagt

SEQ ID NO: 46740 - DNA, 25 bp, Probe sequence
tgatttgtgcttttataagtagaag

SEQ ID NO: 46741 - DNA, 25 bp, Probe sequence
tgtgcttttataagtagaagtaatg

SEQ ID NO: 46742 - DNA, 25 bp, Probe sequence
ttaacacaatcagcaatagttgacg

SEQ ID NO: 46743 - DNA, 25 bp, Probe sequence
taacacaatcagcaatagttgacga

SEQ ID NO: 46744 - DNA, 25 bp, Probe sequence
caatatgcctattaacacaatcagc

SEQ ID NO: 46745 - DNA, 25 bp, Probe sequence
aacacaatcagcaatagttgacgag

SEQ ID NO: 46746 - DNA, 25 bp, Probe sequence
attaacacaatcagcaatagttgac

SEQ ID NO: 46747 - DNA, 25 bp, Probe sequence
cacaatcagcaatagttgacgagac

SEQ ID NO: 46748 - DNA, 25 bp, Probe sequence
acacaatcagcaatagttgacgaga

SEQ ID NO: 46749 - DNA, 25 bp, Probe sequence
tcaatatgcctattaacacaatcag

SEQ ID NO: 46750 - DNA, 25 bp, Probe sequence
caatagttgacgagacggaaataaa

SEQ ID NO: 46751 - DNA, 25 bp, Probe sequence
atggtggctatctgagtataaggag

SEQ ID NO: 46752 - DNA, 25 bp, Probe sequence
gatggtggctatctgagtataagga

SEQ ID NO: 46753 - DNA, 25 bp, Probe sequence
ctatctgagtataaggaggtggtgc

SEQ ID NO: 46754 - DNA, 25 bp, Probe sequence
gctatctgagtataaggaggtggtg

SEQ ID NO: 46755 - DNA, 25 bp, Probe sequence
gtggctatctgagtataaggaggtg

SEQ ID NO: 46756 - DNA, 25 bp, Probe sequence
aaggagacgcctaatgattacaatt

SEQ ID NO: 46757 - DNA, 25 bp, Probe sequence
aggagacgcctaatgattacaatta

SEQ ID NO: 46758 - DNA, 25 bp, Probe sequence
ggctatctgagtataaggaggtggt

SEQ ID NO: 46759 - DNA, 25 bp, Probe sequence
tggctatctgagtataaggaggtgg

SEQ ID NO: 46760 - DNA, 25 bp, Probe sequence
aaagaaatactcaatgactggcaaa

SEQ ID NO: 46761 - DNA, 25 bp, Probe sequence
taaagaaatactcaatgactggcaa

SEQ ID NO: 46762 - DNA, 25 bp, Probe sequence
ttaaagaaatactcaatgactggca

SEQ ID NO: 46763 - DNA, 25 bp, Probe sequence
accatttgtaagtaaggagaagtaa

SEQ ID NO: 46764 - DNA, 25 bp, Probe sequence
gtaccatttgtaagtaaggagaagt

SEQ ID NO: 46765 - DNA, 25 bp, Probe sequence
attaaagaaatactcaatgactggc

SEQ ID NO: 46766 - DNA, 25 bp, Probe sequence
agtaccatttgtaagtaaggagaag

SEQ ID NO: 46767 - DNA, 25 bp, Probe sequence
cagatgaaagaaatgattgaaagtg

SEQ ID NO: 46768 - DNA, 25 bp, Probe sequence
taccatttgtaagtaaggagaagta

SEQ ID NO: 46769 - DNA, 25 bp, Probe sequence
aacttggtgaagatggcgaatataa

SEQ ID NO: 46770 - DNA, 25 bp, Probe sequence
gaacttggtgaagatggcgaatata

SEQ ID NO: 46771 - DNA, 25 bp, Probe sequence
agaacttggtgaagatggcgaatat

SEQ ID NO: 46772 - DNA, 25 bp, Probe sequence
aagaacttggtgaagatggcgaata

SEQ ID NO: 46773 - DNA, 25 bp, Probe sequence
cttggtgaagatggcgaatataaat

SEQ ID NO: 46774 - DNA, 25 bp, Probe sequence
acttggtgaagatggcgaatataaa

SEQ ID NO: 46775 - DNA, 25 bp, Probe sequence
ttggtgaagatggcgaatataaata

SEQ ID NO: 46776 - DNA, 25 bp, Probe sequence
aagatggcgaatataaatatgttgc

SEQ ID NO: 46777 - DNA, 25 bp, Probe sequence
tggtgaagatggcgaatataaatat

SEQ ID NO: 46778 - DNA, 25 bp, Probe sequence
tcgaagacaggtgctcatatagtac

SEQ ID NO: 46779 - DNA, 25 bp, Probe sequence
gcgtgaaggtaaatatcaggtagaa

SEQ ID NO: 46780 - DNA, 25 bp, Probe sequence
gagcgtgaaggtaaatatcaggtag

SEQ ID NO: 46781 - DNA, 25 bp, Probe sequence
aaagagcgtgaaggtaaatatcagg

SEQ ID NO: 46782 - DNA, 25 bp, Probe sequence
agcgtgaaggtaaatatcaggtaga

SEQ ID NO: 46783 - DNA, 25 bp, Probe sequence
agagcgtgaaggtaaatatcaggta

SEQ ID NO: 46784 - DNA, 25 bp, Probe sequence
cgtgaaggtaaatatcaggtagaag

SEQ ID NO: 46785 - DNA, 25 bp, Probe sequence
taaagagcgtgaaggtaaatatcag

SEQ ID NO: 46786 - DNA, 25 bp, Probe sequence
ttaaagagcgtgaaggtaaatatca

SEQ ID NO: 46787 - DNA, 25 bp, Probe sequence
gaaggtaaatatcgggtagagaaca

SEQ ID NO: 46788 - DNA, 25 bp, Probe sequence
tgaaggtaaatatcgggtagagaac

SEQ ID NO: 46789 - DNA, 25 bp, Probe sequence
gtgaaggtaaatatcgggtagagaa

SEQ ID NO: 46790 - DNA, 25 bp, Probe sequence
cgggtagagaacaatactgaaatga

SEQ ID NO: 46791 - DNA, 25 bp, Probe sequence
tcgggtagagaacaatactgaaatg

SEQ ID NO: 46792 - DNA, 25 bp, Probe sequence
atcgggtagagaacaatactgaaat

SEQ ID NO: 46793 - DNA, 25 bp, Probe sequence
taaagagcgtgaaggtaaatatcgg

SEQ ID NO: 46794 - DNA, 25 bp, Probe sequence
aaggtaaatatcgggtagagaacaa

SEQ ID NO: 46795 - DNA, 25 bp, Probe sequence
ttaaagagcgtgaaggtaaatatcg

SEQ ID NO: 46796 - DNA, 25 bp, Probe sequence
ttaatcattggtgttactggttctg

SEQ ID NO: 46797 - DNA, 25 bp, Probe sequence
taatcattggtgttactggttctgc

SEQ ID NO: 46798 - DNA, 25 bp, Probe sequence
atatcagtcacacggaggcatataa

SEQ ID NO: 46799 - DNA, 25 bp, Probe sequence
attaatcattggtgttactggttct

SEQ ID NO: 46800 - DNA, 25 bp, Probe sequence
aactggaaatatgtggcgatactta

SEQ ID NO: 46801 - DNA, 25 bp, Probe sequence
actggaaatatgtggcgatacttag

SEQ ID NO: 46802 - DNA, 25 bp, Probe sequence
ggaaatatgtggcgatacttagttg

SEQ ID NO: 46803 - DNA, 25 bp, Probe sequence
tggaaatatgtggcgatacttagtt

SEQ ID NO: 46804 - DNA, 25 bp, Probe sequence
gaaatatgtggcgatacttagttgc

SEQ ID NO: 46805 - DNA, 25 bp, Probe sequence
ctttgtggattgtttgacagtagac

SEQ ID NO: 46806 - DNA, 25 bp, Probe sequence
tctttgtggattgtttgacagtaga

SEQ ID NO: 46807 - DNA, 25 bp, Probe sequence
ttctttgtggattgtttgacagtag

SEQ ID NO: 46808 - DNA, 25 bp, Probe sequence
cattctttgtggattgtttgacagt

SEQ ID NO: 46809 - DNA, 25 bp, Probe sequence
acattctttgtggattgtttgacag

SEQ ID NO: 46810 - DNA, 25 bp, Probe sequence
tttgtggattgtttgacagtagaca

SEQ ID NO: 46811 - DNA, 25 bp, Probe sequence
attctttgtggattgtttgacagta

SEQ ID NO: 46812 - DNA, 25 bp, Probe sequence
ttgtggattgtttgacagtagacag

SEQ ID NO: 46813 - DNA, 25 bp, Probe sequence
gtggattgtttgacagtagacagtc

SEQ ID NO: 46814 - DNA, 25 bp, Probe sequence
tggtattgagttgatggatgaatgt

SEQ ID NO: 46815 - DNA, 25 bp, Probe sequence
ctggtattgagttgatggatgaatg

SEQ ID NO: 46816 - DNA, 25 bp, Probe sequence
cctggtattgagttgatggatgaat

SEQ ID NO: 46817 - DNA, 25 bp, Probe sequence
ggtattgagttgatggatgaatgtt

SEQ ID NO: 46818 - DNA, 25 bp, Probe sequence
aacaagaagaatggattatgacaca

SEQ ID NO: 46819 - DNA, 25 bp, Probe sequence
tacctggtattgagttgatggatga

SEQ ID NO: 46820 - DNA, 25 bp, Probe sequence
acctggtattgagttgatggatgaa

SEQ ID NO: 46821 - DNA, 25 bp, Probe sequence
gcgtaggtggttctcttgaagtatt

SEQ ID NO: 46822 - DNA, 25 bp, Probe sequence
tgagttgatggatgaatgtttgaaa

SEQ ID NO: 46823 - DNA, 25 bp, Probe sequence
acattgccactcatattgctctttg

SEQ ID NO: 46824 - DNA, 25 bp, Probe sequence
cattgccactcatattgctctttga

SEQ ID NO: 46825 - DNA, 25 bp, Probe sequence
gacaccattcataacgtatattacc

SEQ ID NO: 46826 - DNA, 25 bp, Probe sequence
tcattaactttaaacatttcgcctg

SEQ ID NO: 46827 - DNA, 25 bp, Probe sequence
caccattcataacgtatattacccg

SEQ ID NO: 46828 - DNA, 25 bp, Probe sequence
tggatgacaccattcataacgtata

SEQ ID NO: 46829 - DNA, 25 bp, Probe sequence
gtggatgacaccattcataacgtat

SEQ ID NO: 46830 - DNA, 25 bp, Probe sequence
cattaactttaaacatttcgcctgt

SEQ ID NO: 46831 - DNA, 25 bp, Probe sequence
acaccattcataacgtatattaccc

SEQ ID NO: 46832 - DNA, 25 bp, Probe sequence
cagatgcgatagtgattggaattgg

SEQ ID NO: 46833 - DNA, 25 bp, Probe sequence
gatgcgatagtgattggaattggtg

SEQ ID NO: 46834 - DNA, 25 bp, Probe sequence
agatgcgatagtgattggaattggt

SEQ ID NO: 46835 - DNA, 25 bp, Probe sequence
cttatggcagttggcaagagtattg

SEQ ID NO: 46836 - DNA, 25 bp, Probe sequence
gatgaagcagatgcgatagtgattg

SEQ ID NO: 46837 - DNA, 25 bp, Probe sequence
gattgatgaagcagatgcgatagtg

SEQ ID NO: 46838 - DNA, 25 bp, Probe sequence
atgcttataccttgggagatgattc

SEQ ID NO: 46839 - DNA, 25 bp, Probe sequence
gatatgcttataccttgggagatga

SEQ ID NO: 46840 - DNA, 25 bp, Probe sequence
agatatgcttataccttgggagatg

SEQ ID NO: 46841 - DNA, 25 bp, Probe sequence
tgcgacacaagtagttatacaatct

SEQ ID NO: 46842 - DNA, 25 bp, Probe sequence
atgcgacacaagtagttatacaatc

SEQ ID NO: 46843 - DNA, 25 bp, Probe sequence
gatgcgacacaagtagttatacaat

SEQ ID NO: 46844 - DNA, 25 bp, Probe sequence
caattacaggttatgccatacacag

SEQ ID NO: 46845 - DNA, 25 bp, Probe sequence
acaggttatgccatacacagttaat

SEQ ID NO: 46846 - DNA, 25 bp, Probe sequence
attacaggttatgccatacacagtt

SEQ ID NO: 46847 - DNA, 25 bp, Probe sequence
aattacaggttatgccatacacagt

SEQ ID NO: 46848 - DNA, 25 bp, Probe sequence
tcaattacaggttatgccatacaca

SEQ ID NO: 46849 - DNA, 25 bp, Probe sequence
gcacatcatcatcaattacaggtta

SEQ ID NO: 46850 - DNA, 25 bp, Probe sequence
gactatctactgttggtggtgtaac

SEQ ID NO: 46851 - DNA, 25 bp, Probe sequence
agactatctactgttggtggtgtaa

SEQ ID NO: 46852 - DNA, 25 bp, Probe sequence
tatctactgttggtggtgtaacgaa

SEQ ID NO: 46853 - DNA, 25 bp, Probe sequence
ctatctactgttggtggtgtaacga

SEQ ID NO: 46854 - DNA, 25 bp, Probe sequence
actatctactgttggtggtgtaacg

SEQ ID NO: 46855 - DNA, 25 bp, Probe sequence
cagactatctactgttggtggtgta

SEQ ID NO: 46856 - DNA, 25 bp, Probe sequence
atctactgttggtggtgtaacgaag

SEQ ID NO: 46857 - DNA, 25 bp, Probe sequence
ctactgttggtggtgtaacgaagaa

SEQ ID NO: 46858 - DNA, 25 bp, Probe sequence
atgggcgatgtgttgaatagtaaag

SEQ ID NO: 46859 - DNA, 25 bp, Probe sequence
gtagatgaccattatattgtgcgac

SEQ ID NO: 46860 - DNA, 25 bp, Probe sequence
agtagatgaccattatattgtgcga

SEQ ID NO: 46861 - DNA, 25 bp, Probe sequence
ctattagacgagttatgaacggtga

SEQ ID NO: 46862 - DNA, 25 bp, Probe sequence
tattagacgagttatgaacggtgaa

SEQ ID NO: 46863 - DNA, 25 bp, Probe sequence
aatgatacatcctaaggcacaagat

SEQ ID NO: 46864 - DNA, 25 bp, Probe sequence
actattagacgagttatgaacggtg

SEQ ID NO: 46865 - DNA, 25 bp, Probe sequence
tagtagatgaccattatattgtgcg

SEQ ID NO: 46866 - DNA, 25 bp, Probe sequence
tagatgaccattatattgtgcgaca

SEQ ID NO: 46867 - DNA, 25 bp, Probe sequence
ccacactacacgaataagttgtcaa

SEQ ID NO: 46868 - DNA, 25 bp, Probe sequence
acaagatggaacaatggattcaatg

SEQ ID NO: 46869 - DNA, 25 bp, Probe sequence
gcatcaatcaattagaattatcgcc

SEQ ID NO: 46870 - DNA, 25 bp, Probe sequence
ttacaagatggaacaatggattcaa

SEQ ID NO: 46871 - DNA, 25 bp, Probe sequence
tacaagatggaacaatggattcaat

SEQ ID NO: 46872 - DNA, 25 bp, Probe sequence
caattagaattatcgccatatcacg

SEQ ID NO: 46873 - DNA, 25 bp, Probe sequence
caagatggaacaatggattcaatgt

SEQ ID NO: 46874 - DNA, 25 bp, Probe sequence
agcatcaatcaattagaattatcgc

SEQ ID NO: 46875 - DNA, 25 bp, Probe sequence
aacaaggtaagttgaagtcattcgg

SEQ ID NO: 46876 - DNA, 25 bp, Probe sequence
tggaacaatggattcaatgtatcaa

SEQ ID NO: 46877 - DNA, 25 bp, Probe sequence
ggaggatatggtcatacagctattg

SEQ ID NO: 46878 - DNA, 25 bp, Probe sequence
tggaggatatggtcatacagctatt

SEQ ID NO: 46879 - DNA, 25 bp, Probe sequence
gtggaggatatggtcatacagctat

SEQ ID NO: 46880 - DNA, 25 bp, Probe sequence
ttatcacaacacaccaactttcaaa

SEQ ID NO: 46881 - DNA, 25 bp, Probe sequence
tttatcacaacacaccaactttcaa

SEQ ID NO: 46882 - DNA, 25 bp, Probe sequence
atttatcacaacacaccaactttca

SEQ ID NO: 46883 - DNA, 25 bp, Probe sequence
tagtggaagatttggtggaggatat

SEQ ID NO: 46884 - DNA, 25 bp, Probe sequence
ttagtggaagatttggtggaggata

SEQ ID NO: 46885 - DNA, 25 bp, Probe sequence
ggatatggtcatacagctattgtct

SEQ ID NO: 46886 - DNA, 25 bp, Probe sequence
tccgttcttctttatcaacttcaga

SEQ ID NO: 46887 - DNA, 25 bp, Probe sequence
ttccgttcttctttatcaacttcag

SEQ ID NO: 46888 - DNA, 25 bp, Probe sequence
attccgttcttctttatcaacttca

SEQ ID NO: 46889 - DNA, 25 bp, Probe sequence
tattccgttcttctttatcaacttc

SEQ ID NO: 46890 - DNA, 25 bp, Probe sequence
ccgttcttctttatcaacttcagaa

SEQ ID NO: 46891 - DNA, 25 bp, Probe sequence
ttattccgttcttctttatcaactt

SEQ ID NO: 46892 - DNA, 25 bp, Probe sequence
tttattccgttcttctttatcaact

SEQ ID NO: 46893 - DNA, 25 bp, Probe sequence
atatgatttaaactcacccggacaa

SEQ ID NO: 46894 - DNA, 25 bp, Probe sequence
aacatatgatttaaactcacccgga

SEQ ID NO: 46895 - DNA, 25 bp, Probe sequence
accagagacatatccattgataact

SEQ ID NO: 46896 - DNA, 25 bp, Probe sequence
aaccagagacatatccattgataac

SEQ ID NO: 46897 - DNA, 25 bp, Probe sequence
aagacgattcaaaccagagacatat

SEQ ID NO: 46898 - DNA, 25 bp, Probe sequence
taagacgattcaaaccagagacata

SEQ ID NO: 46899 - DNA, 25 bp, Probe sequence
accaaatacaacaagcacaatctaa

SEQ ID NO: 46900 - DNA, 25 bp, Probe sequence
ttaccaaatacaacaagcacaatct

SEQ ID NO: 46901 - DNA, 25 bp, Probe sequence
agacgattcaaaccagagacatatc

SEQ ID NO: 46902 - DNA, 25 bp, Probe sequence
gtaagacgattcaaaccagagacat

SEQ ID NO: 46903 - DNA, 25 bp, Probe sequence
cgattcaaaccagagacatatccat

SEQ ID NO: 46904 - DNA, 25 bp, Probe sequence
agcgatgacacctaagattattgaa

SEQ ID NO: 46905 - DNA, 25 bp, Probe sequence
aagcgatgacacctaagattattga

SEQ ID NO: 46906 - DNA, 25 bp, Probe sequence
agattacggtgaacttgatgatgta

SEQ ID NO: 46907 - DNA, 25 bp, Probe sequence
gcgatgacacctaagattattgaat

SEQ ID NO: 46908 - DNA, 25 bp, Probe sequence
aagattacggtgaacttgatgatgt

SEQ ID NO: 46909 - DNA, 25 bp, Probe sequence
gattacggtgaacttgatgatgtat

SEQ ID NO: 46910 - DNA, 25 bp, Probe sequence
tacggtgaacttgatgatgtattac

SEQ ID NO: 46911 - DNA, 25 bp, Probe sequence
tactaagattgcttggattgaaggc

SEQ ID NO: 46912 - DNA, 25 bp, Probe sequence
attacggtgaacttgatgatgtatt

SEQ ID NO: 46913 - DNA, 25 bp, Probe sequence
cccgaaatcattggaattgttaaag

SEQ ID NO: 46914 - DNA, 25 bp, Probe sequence
gcccgaaatcattggaattgttaaa

SEQ ID NO: 46915 - DNA, 25 bp, Probe sequence
ccgaaatcattggaattgttaaagt

SEQ ID NO: 46916 - DNA, 25 bp, Probe sequence
tgcccgaaatcattggaattgttaa

SEQ ID NO: 46917 - DNA, 25 bp, Probe sequence
atgcccgaaatcattggaattgtta

SEQ ID NO: 46918 - DNA, 25 bp, Probe sequence
tgtctatatgaaagggcatgtctac

SEQ ID NO: 46919 - DNA, 25 bp, Probe sequence
gtctatatgaaagggcatgtctacc

SEQ ID NO: 46920 - DNA, 25 bp, Probe sequence
atgtctatatgaaagggcatgtcta

SEQ ID NO: 46921 - DNA, 25 bp, Probe sequence
cgaaatcattggaattgttaaagta

SEQ ID NO: 46922 - DNA, 25 bp, Probe sequence
gacactcttcttctacttatgcctt

SEQ ID NO: 46923 - DNA, 25 bp, Probe sequence
acactcttcttctacttatgcctta

SEQ ID NO: 46924 - DNA, 25 bp, Probe sequence
agacactcttcttctacttatgcct

SEQ ID NO: 46925 - DNA, 25 bp, Probe sequence
cactcttcttctacttatgccttaa

SEQ ID NO: 46926 - DNA, 25 bp, Probe sequence
gatcattggttaggatattgtacga

SEQ ID NO: 46927 - DNA, 25 bp, Probe sequence
aggtgatgaagaagtacatgaacta

SEQ ID NO: 46928 - DNA, 25 bp, Probe sequence
taggtgatgaagaagtacatgaact

SEQ ID NO: 46929 - DNA, 25 bp, Probe sequence
ttggttaggatattgtacgaatgaa

SEQ ID NO: 46930 - DNA, 25 bp, Probe sequence
ataggtgatgaagaagtacatgaac

SEQ ID NO: 46931 - DNA, 25 bp, Probe sequence
aactggcgtatcaagatcaactatt

SEQ ID NO: 46932 - DNA, 25 bp, Probe sequence
actggcgtatcaagatcaactatta

SEQ ID NO: 46933 - DNA, 25 bp, Probe sequence
ctggcgtatcaagatcaactattag

SEQ ID NO: 46934 - DNA, 25 bp, Probe sequence
tggcgtatcaagatcaactattagt

SEQ ID NO: 46935 - DNA, 25 bp, Probe sequence
gcgtatcaagatcaactattagtgg

SEQ ID NO: 46936 - DNA, 25 bp, Probe sequence
ggcgtatcaagatcaactattagtg

SEQ ID NO: 46937 - DNA, 25 bp, Probe sequence
atcatggctagagataacgtaagtg

SEQ ID NO: 46938 - DNA, 25 bp, Probe sequence
aatcatggctagagataacgtaagt

SEQ ID NO: 46939 - DNA, 25 bp, Probe sequence
cgtatcaagatcaactattagtgga

SEQ ID NO: 46940 - DNA, 25 bp, Probe sequence
gaagatagaagtccaccttacaaca

SEQ ID NO: 46941 - DNA, 25 bp, Probe sequence
tgaagatagaagtccaccttacaac

SEQ ID NO: 46942 - DNA, 25 bp, Probe sequence
aagatagaagtccaccttacaacaa

SEQ ID NO: 46943 - DNA, 25 bp, Probe sequence
gtgaagatagaagtccaccttacaa

SEQ ID NO: 46944 - DNA, 25 bp, Probe sequence
aagtgtaacagctcaagaactagac

SEQ ID NO: 46945 - DNA, 25 bp, Probe sequence
gtaacagctcaagaactagacataa

SEQ ID NO: 46946 - DNA, 25 bp, Probe sequence
gaagtccaccttacaacaaagaatg

SEQ ID NO: 46947 - DNA, 25 bp, Probe sequence
agaagtccaccttacaacaaagaat

SEQ ID NO: 46948 - DNA, 25 bp, Probe sequence
tagaagtccaccttacaacaaagaa

SEQ ID NO: 46949 - DNA, 25 bp, Probe sequence
aaagtcaaacatacacacacaaaga

SEQ ID NO: 46950 - DNA, 25 bp, Probe sequence
aagtcaaacatacacacacaaagat

SEQ ID NO: 46951 - DNA, 25 bp, Probe sequence
gcactttgatttagacgaagaagaa

SEQ ID NO: 46952 - DNA, 25 bp, Probe sequence
agcactttgatttagacgaagaaga

SEQ ID NO: 46953 - DNA, 25 bp, Probe sequence
cagcactttgatttagacgaagaag

SEQ ID NO: 46954 - DNA, 25 bp, Probe sequence
gaacagcactttgatttagacgaag

SEQ ID NO: 46955 - DNA, 25 bp, Probe sequence
acagcactttgatttagacgaagaa

SEQ ID NO: 46956 - DNA, 25 bp, Probe sequence
aacagcactttgatttagacgaaga

SEQ ID NO: 46957 - DNA, 25 bp, Probe sequence
tcaaacatacacacacaaagatact

SEQ ID NO: 46958 - DNA, 25 bp, Probe sequence
gcatcagaaggttagaagagaatga

SEQ ID NO: 46959 - DNA, 25 bp, Probe sequence
cgcatcagaaggttagaagagaatg

SEQ ID NO: 46960 - DNA, 25 bp, Probe sequence
tcagcacactcaacgaaattaaatt

SEQ ID NO: 46961 - DNA, 25 bp, Probe sequence
ctcagcacactcaacgaaattaaat

SEQ ID NO: 46962 - DNA, 25 bp, Probe sequence
gcacactcaacgaaattaaattagg

SEQ ID NO: 46963 - DNA, 25 bp, Probe sequence
cagcacactcaacgaaattaaatta

SEQ ID NO: 46964 - DNA, 25 bp, Probe sequence
agcacactcaacgaaattaaattag

SEQ ID NO: 46965 - DNA, 25 bp, Probe sequence
gtgcttggtttagttgggacaatat

SEQ ID NO: 46966 - DNA, 25 bp, Probe sequence
tcagaaggttagaagagaatgataa

SEQ ID NO: 46967 - DNA, 25 bp, Probe sequence
aaccgttattgatatgtctaagcac

SEQ ID NO: 46968 - DNA, 25 bp, Probe sequence
gaagtattcaactgatatgcgagac

SEQ ID NO: 46969 - DNA, 25 bp, Probe sequence
aattgagtacgagaaggtagaacat

SEQ ID NO: 46970 - DNA, 25 bp, Probe sequence
aagtattcaactgatatgcgagacg

SEQ ID NO: 46971 - DNA, 25 bp, Probe sequence
attgagtacgagaaggtagaacatg

SEQ ID NO: 46972 - DNA, 25 bp, Probe sequence
accgttattgatatgtctaagcaca

SEQ ID NO: 46973 - DNA, 25 bp, Probe sequence
ccgttattgatatgtctaagcacaa

SEQ ID NO: 46974 - DNA, 25 bp, Probe sequence
ttgagtacgagaaggtagaacatga

SEQ ID NO: 46975 - DNA, 25 bp, Probe sequence
gtacgagaaggtagaacatgactga

SEQ ID NO: 46976 - DNA, 25 bp, Probe sequence
cacaatggttcagaatggacaatta

SEQ ID NO: 46977 - DNA, 25 bp, Probe sequence
acaatggttcagaatggacaattaa

SEQ ID NO: 46978 - DNA, 25 bp, Probe sequence
acacaatggttcagaatggacaatt

SEQ ID NO: 46979 - DNA, 25 bp, Probe sequence
aacacaatggttcagaatggacaat

SEQ ID NO: 46980 - DNA, 25 bp, Probe sequence
atggttcagaatggacaattaatgc

SEQ ID NO: 46981 - DNA, 25 bp, Probe sequence
ggttcagaatggacaattaatgcaa

SEQ ID NO: 46982 - DNA, 25 bp, Probe sequence
acagcgattgaagatgaagaaatac

SEQ ID NO: 46983 - DNA, 25 bp, Probe sequence
acagttcaaatatggatggacctaa

SEQ ID NO: 46984 - DNA, 25 bp, Probe sequence
cagcgattgaagatgaagaaatact

SEQ ID NO: 46985 - DNA, 25 bp, Probe sequence
tgacattaagcgttcattataacca

SEQ ID NO: 46986 - DNA, 25 bp, Probe sequence
ccttactggttataatgaactgaca

SEQ ID NO: 46987 - DNA, 25 bp, Probe sequence
ctgacattaagcgttcattataacc

SEQ ID NO: 46988 - DNA, 25 bp, Probe sequence
tccttactggttataatgaactgac

SEQ ID NO: 46989 - DNA, 25 bp, Probe sequence
ttcattataaccttctccttactgg

SEQ ID NO: 46990 - DNA, 25 bp, Probe sequence
gacattaagcgttcattataaccaa

SEQ ID NO: 46991 - DNA, 25 bp, Probe sequence
ccttctccttactggttataatgaa

SEQ ID NO: 46992 - DNA, 25 bp, Probe sequence
ctccttactggttataatgaactga

SEQ ID NO: 46993 - DNA, 25 bp, Probe sequence
tctccttactggttataatgaactg

SEQ ID NO: 46994 - DNA, 25 bp, Probe sequence
ttgtaattggaggcgtgctatgaaa

SEQ ID NO: 46995 - DNA, 25 bp, Probe sequence
tttgtaattggaggcgtgctatgaa

SEQ ID NO: 46996 - DNA, 25 bp, Probe sequence
aaagatatgacgaaaagtgggaaac

SEQ ID NO: 46997 - DNA, 25 bp, Probe sequence
gatatgacgaaaagtgggaaacaac

SEQ ID NO: 46998 - DNA, 25 bp, Probe sequence
agatatgacgaaaagtgggaaacaa

SEQ ID NO: 46999 - DNA, 25 bp, Probe sequence
aagatatgacgaaaagtgggaaaca

SEQ ID NO: 47000 - DNA, 25 bp, Probe sequence
gtttgtaattggaggcgtgctatga

SEQ ID NO: 47001 - DNA, 25 bp, Probe sequence
agtttgtaattggaggcgtgctatg

SEQ ID NO: 47002 - DNA, 25 bp, Probe sequence
cagtttgtaattggaggcgtgctat

SEQ ID NO: 47003 - DNA, 25 bp, Probe sequence
tatgctatcttacgtgatcgcttaa

SEQ ID NO: 47004 - DNA, 25 bp, Probe sequence
ctatgctatcttacgtgatcgctta

SEQ ID NO: 47005 - DNA, 25 bp, Probe sequence
tgggttgatgaagatggtaacattt

SEQ ID NO: 47006 - DNA, 25 bp, Probe sequence
gggttgatgaagatggtaacattta

SEQ ID NO: 47007 - DNA, 25 bp, Probe sequence
ctgggttgatgaagatggtaacatt

SEQ ID NO: 47008 - DNA, 25 bp, Probe sequence
aatcgaacactaatgatactgactt

SEQ ID NO: 47009 - DNA, 25 bp, Probe sequence
taatgaaacctattgtcacagaacg

SEQ ID NO: 47010 - DNA, 25 bp, Probe sequence
tgttagaggacattgaggatgaaat

SEQ ID NO: 47011 - DNA, 25 bp, Probe sequence
gttagaggacattgaggatgaaata

SEQ ID NO: 47012 - DNA, 25 bp, Probe sequence
acctaattatgacattgaagccagt

SEQ ID NO: 47013 - DNA, 25 bp, Probe sequence
aacctaattatgacattgaagccag

SEQ ID NO: 47014 - DNA, 25 bp, Probe sequence
tgaagccagtcatatcaaggaactt

SEQ ID NO: 47015 - DNA, 25 bp, Probe sequence
cctaattatgacattgaagccagtc

SEQ ID NO: 47016 - DNA, 25 bp, Probe sequence
tgtgtgaatacttaggttatgcaga

SEQ ID NO: 47017 - DNA, 25 bp, Probe sequence
ttgtgtgaatacttaggttatgcag

SEQ ID NO: 47018 - DNA, 25 bp, Probe sequence
gtgtgaatacttaggttatgcagaa

SEQ ID NO: 47019 - DNA, 25 bp, Probe sequence
gtgaatacttaggttatgcagaaca

SEQ ID NO: 47020 - DNA, 25 bp, Probe sequence
tgtgaatacttaggttatgcagaac

SEQ ID NO: 47021 - DNA, 25 bp, Probe sequence
acgatacttgaccaatatgtgaact

SEQ ID NO: 47022 - DNA, 25 bp, Probe sequence
agaacgatacttgaccaatatgtga

SEQ ID NO: 47023 - DNA, 25 bp, Probe sequence
aacgatacttgaccaatatgtgaac

SEQ ID NO: 47024 - DNA, 25 bp, Probe sequence
gaacgatacttgaccaatatgtgaa

SEQ ID NO: 47025 - DNA, 25 bp, Probe sequence
cggttatggttagaacgatacttga

SEQ ID NO: 47026 - DNA, 25 bp, Probe sequence
ggttatggttagaacgatacttgac

SEQ ID NO: 47027 - DNA, 25 bp, Probe sequence
cgatacttgaccaatatgtgaacta

SEQ ID NO: 47028 - DNA, 25 bp, Probe sequence
tagaacgatacttgaccaatatgtg

SEQ ID NO: 47029 - DNA, 25 bp, Probe sequence
cgagtaactaagaatcatccaatgt

SEQ ID NO: 47030 - DNA, 25 bp, Probe sequence
tatattcagaacaggaacagcaaca

SEQ ID NO: 47031 - DNA, 25 bp, Probe sequence
agtctggtagagccttagatgataa

SEQ ID NO: 47032 - DNA, 25 bp, Probe sequence
aagtctggtagagccttagatgata

SEQ ID NO: 47033 - DNA, 25 bp, Probe sequence
ttatattcagaacaggaacagcaac

SEQ ID NO: 47034 - DNA, 25 bp, Probe sequence
atattcagaacaggaacagcaacaa

SEQ ID NO: 47035 - DNA, 25 bp, Probe sequence
tattcagaacaggaacagcaacaag

SEQ ID NO: 47036 - DNA, 25 bp, Probe sequence
attatattcagaacaggaacagcaa

SEQ ID NO: 47037 - DNA, 25 bp, Probe sequence
aattatattcagaacaggaacagca

SEQ ID NO: 47038 - DNA, 25 bp, Probe sequence
gttgttccaataactgatgatggtc

SEQ ID NO: 47039 - DNA, 25 bp, Probe sequence
agtgcgaaagaagttgtaggtaata

SEQ ID NO: 47040 - DNA, 25 bp, Probe sequence
taagtgcgaaagaagttgtaggtaa

SEQ ID NO: 47041 - DNA, 25 bp, Probe sequence
gtgcgaaagaagttgtaggtaataa

SEQ ID NO: 47042 - DNA, 25 bp, Probe sequence
ttaagtgcgaaagaagttgtaggta

SEQ ID NO: 47043 - DNA, 25 bp, Probe sequence
aagtgcgaaagaagttgtaggtaat

SEQ ID NO: 47044 - DNA, 25 bp, Probe sequence
gtttaagtgcgaaagaagttgtagg

SEQ ID NO: 47045 - DNA, 25 bp, Probe sequence
tttaagtgcgaaagaagttgtaggt

SEQ ID NO: 47046 - DNA, 25 bp, Probe sequence
cgtttaagtgcgaaagaagttgtag

SEQ ID NO: 47047 - DNA, 25 bp, Probe sequence
tgcgaaagaagttgtaggtaataaa

SEQ ID NO: 47048 - DNA, 25 bp, Probe sequence
ggaaagacgataaccaaattacaga

SEQ ID NO: 47049 - DNA, 25 bp, Probe sequence
gaaagacgataaccaaattacagaa

SEQ ID NO: 47050 - DNA, 25 bp, Probe sequence
tggaaagacgataaccaaattacag

SEQ ID NO: 47051 - DNA, 25 bp, Probe sequence
aaagacgataaccaaattacagaaa

SEQ ID NO: 47052 - DNA, 25 bp, Probe sequence
aagacgataaccaaattacagaaat

SEQ ID NO: 47053 - DNA, 25 bp, Probe sequence
ttgagcccaaaataatcatacgaat

SEQ ID NO: 47054 - DNA, 25 bp, Probe sequence
attgagcccaaaataatcatacgaa

SEQ ID NO: 47055 - DNA, 25 bp, Probe sequence
taactagctcaaagcgttatggaat

SEQ ID NO: 47056 - DNA, 25 bp, Probe sequence
tacagaaataactagctcaaagcgt

SEQ ID NO: 47057 - DNA, 25 bp, Probe sequence
tcaaccgagcatcaatcaacaagat

SEQ ID NO: 47058 - DNA, 25 bp, Probe sequence
ttcaaccgagcatcaatcaacaaga

SEQ ID NO: 47059 - DNA, 25 bp, Probe sequence
aatagattgaagcactatagcaagt

SEQ ID NO: 47060 - DNA, 25 bp, Probe sequence
tgaagcactatagcaagtataagtt

SEQ ID NO: 47061 - DNA, 25 bp, Probe sequence
ttgaagcactatagcaagtataagt

SEQ ID NO: 47062 - DNA, 25 bp, Probe sequence
ggtacttacctattggaagtgaagc

SEQ ID NO: 47063 - DNA, 25 bp, Probe sequence
tttcaaccgagcatcaatcaacaag

SEQ ID NO: 47064 - DNA, 25 bp, Probe sequence
atcattgatgagattgggtacttac

SEQ ID NO: 47065 - DNA, 25 bp, Probe sequence
taaaggttatggcgttaccgtttaa

SEQ ID NO: 47066 - DNA, 25 bp, Probe sequence
tgcgaaacagtatttagataacaat

SEQ ID NO: 47067 - DNA, 25 bp, Probe sequence
atgcgaaacagtatttagataacaa

SEQ ID NO: 47068 - DNA, 25 bp, Probe sequence
tgataaattagcattaggtgaagtg

SEQ ID NO: 47069 - DNA, 25 bp, Probe sequence
gataaattagcattaggtgaagtga

SEQ ID NO: 47070 - DNA, 25 bp, Probe sequence
ctgttgacgtatttatgtctgcaaa

SEQ ID NO: 47071 - DNA, 25 bp, Probe sequence
tgttgacgtatttatgtctgcaaat

SEQ ID NO: 47072 - DNA, 25 bp, Probe sequence
taaattagcattaggtgaagtgaaa

SEQ ID NO: 47073 - DNA, 25 bp, Probe sequence
ttaagaaaacaaattgaatcaggcg

SEQ ID NO: 47074 - DNA, 25 bp, Probe sequence
ataaattagcattaggtgaagtgaa

SEQ ID NO: 47075 - DNA, 25 bp, Probe sequence
acaagaaacaatctatggtgaaact

SEQ ID NO: 47076 - DNA, 25 bp, Probe sequence
caagaaacaatctatggtgaaactg

SEQ ID NO: 47077 - DNA, 25 bp, Probe sequence
aagaaacaatctatggtgaaactgt

SEQ ID NO: 47078 - DNA, 25 bp, Probe sequence
cacaagaaacaatctatggtgaaac

SEQ ID NO: 47079 - DNA, 25 bp, Probe sequence
ccacaagaaacaatctatggtgaaa

SEQ ID NO: 47080 - DNA, 25 bp, Probe sequence
tccacaagaaacaatctatggtgaa

SEQ ID NO: 47081 - DNA, 25 bp, Probe sequence
ttccacaagaaacaatctatggtga

SEQ ID NO: 47082 - DNA, 25 bp, Probe sequence
agaaacaatctatggtgaaactgta

SEQ ID NO: 47083 - DNA, 25 bp, Probe sequence
attccacaagaaacaatctatggtg

SEQ ID NO: 47084 - DNA, 25 bp, Probe sequence
aagaatacaatgaactacaggatgc

SEQ ID NO: 47085 - DNA, 25 bp, Probe sequence
agaatacaatgaactacaggatgca

SEQ ID NO: 47086 - DNA, 25 bp, Probe sequence
gcagaagaagataaagcaactaagg

SEQ ID NO: 47087 - DNA, 25 bp, Probe sequence
cagcagaagaagataaagcaactaa

SEQ ID NO: 47088 - DNA, 25 bp, Probe sequence
gcatataacgtaacaacacatggaa

SEQ ID NO: 47089 - DNA, 25 bp, Probe sequence
aaagcagttaaagaagcagatgatt

SEQ ID NO: 47090 - DNA, 25 bp, Probe sequence
agcagaagaagataaagcaactaag

SEQ ID NO: 47091 - DNA, 25 bp, Probe sequence
aagcagttaaagaagcagatgattc

SEQ ID NO: 47092 - DNA, 25 bp, Probe sequence
tcaataagccatcagaaacaaatgc

SEQ ID NO: 47093 - DNA, 25 bp, Probe sequence
ttaagcgacaattatactcaaccga

SEQ ID NO: 47094 - DNA, 25 bp, Probe sequence
taagcgacaattatactcaaccgac

SEQ ID NO: 47095 - DNA, 25 bp, Probe sequence
aatcaagatggcacagtatcatacg

SEQ ID NO: 47096 - DNA, 25 bp, Probe sequence
gacaattatactcaaccgacgacac

SEQ ID NO: 47097 - DNA, 25 bp, Probe sequence
gtcaaagaaacaagagaagcagtag

SEQ ID NO: 47098 - DNA, 25 bp, Probe sequence
atcaagatggcacagtatcatacgg

SEQ ID NO: 47099 - DNA, 25 bp, Probe sequence
agtcaaagaaacaagagaagcagta

SEQ ID NO: 47100 - DNA, 25 bp, Probe sequence
aggataaaccgcatcgtatttctaa

SEQ ID NO: 47101 - DNA, 25 bp, Probe sequence
ggataaaccgcatcgtatttctaat

SEQ ID NO: 47102 - DNA, 25 bp, Probe sequence
caaaccacatcgcatctctaataaa

SEQ ID NO: 47103 - DNA, 25 bp, Probe sequence
ttagcaaataaagcgtatagcgttt

SEQ ID NO: 47104 - DNA, 25 bp, Probe sequence
acaaaccacatcgcatctctaataa

SEQ ID NO: 47105 - DNA, 25 bp, Probe sequence
gacaaaccacatcgcatctctaata

SEQ ID NO: 47106 - DNA, 25 bp, Probe sequence
tagttaaagaaacaagagaagccgt

SEQ ID NO: 47107 - DNA, 25 bp, Probe sequence
tttagcaaataaagcgtatagcgtt

SEQ ID NO: 47108 - DNA, 25 bp, Probe sequence
ctagttaaagaaacaagagaagccg

SEQ ID NO: 47109 - DNA, 25 bp, Probe sequence
tgaggctctagttaaagaaacaaga

SEQ ID NO: 47110 - DNA, 25 bp, Probe sequence
tagcaaataaagcgtatagcgttta

SEQ ID NO: 47111 - DNA, 25 bp, Probe sequence
atccaattagagttacgaatcaacg

SEQ ID NO: 47112 - DNA, 25 bp, Probe sequence
cacattatccagcaagacctcaatt

SEQ ID NO: 47113 - DNA, 25 bp, Probe sequence
tcacattatccagcaagacctcaat

SEQ ID NO: 47114 - DNA, 25 bp, Probe sequence
atcacattatccagcaagacctcaa

SEQ ID NO: 47115 - DNA, 25 bp, Probe sequence
gaagcatcacattatccagcaagac

SEQ ID NO: 47116 - DNA, 25 bp, Probe sequence
cagaagcatcacattatccagcaag

SEQ ID NO: 47117 - DNA, 25 bp, Probe sequence
agaagcatcacattatccagcaaga

SEQ ID NO: 47118 - DNA, 25 bp, Probe sequence
catcacattatccagcaagacctca

SEQ ID NO: 47119 - DNA, 25 bp, Probe sequence
acagaagcatcacattatccagcaa

SEQ ID NO: 47120 - DNA, 25 bp, Probe sequence
gattgacacattatacgcagcatat

SEQ ID NO: 47121 - DNA, 25 bp, Probe sequence
agattgacacattatacgcagcata

SEQ ID NO: 47122 - DNA, 25 bp, Probe sequence
attgacacattatacgcagcatatt

SEQ ID NO: 47123 - DNA, 25 bp, Probe sequence
gagattgacacattatacgcagcat

SEQ ID NO: 47124 - DNA, 25 bp, Probe sequence
attaccttatgatgaagcaactgaa

SEQ ID NO: 47125 - DNA, 25 bp, Probe sequence
gctagatataattcttggtgatgct

SEQ ID NO: 47126 - DNA, 25 bp, Probe sequence
tattaccttatgatgaagcaactga

SEQ ID NO: 47127 - DNA, 25 bp, Probe sequence
aagagtataagcaagcgatagataa

SEQ ID NO: 47128 - DNA, 25 bp, Probe sequence
agatcctgttagaattacgaatgaa

SEQ ID NO: 47129 - DNA, 25 bp, Probe sequence
gagtataaagacgccaaagacaaat

SEQ ID NO: 47130 - DNA, 25 bp, Probe sequence
agagtataaagacgccaaagacaaa

SEQ ID NO: 47131 - DNA, 25 bp, Probe sequence
aagagtataaagacgccaaagacaa

SEQ ID NO: 47132 - DNA, 25 bp, Probe sequence
aaagagtataaagacgccaaagaca

SEQ ID NO: 47133 - DNA, 25 bp, Probe sequence
agagtaaatatgattcgccaatgtc

SEQ ID NO: 47134 - DNA, 25 bp, Probe sequence
gagagtaaatatgattcgccaatgt

SEQ ID NO: 47135 - DNA, 25 bp, Probe sequence
atgacttctttatggaaactggaca

SEQ ID NO: 47136 - DNA, 25 bp, Probe sequence
tgacttctttatggaaactggacaa

SEQ ID NO: 47137 - DNA, 25 bp, Probe sequence
agagagtaaatatgattcgccaatg

SEQ ID NO: 47138 - DNA, 25 bp, Probe sequence
gtttatttgatgaacctaaagtacc

SEQ ID NO: 47139 - DNA, 25 bp, Probe sequence
ctaaagcaatcggaattgtcggtgg

SEQ ID NO: 47140 - DNA, 25 bp, Probe sequence
tagctaaagcaatcggaattgtcgg

SEQ ID NO: 47141 - DNA, 25 bp, Probe sequence
gctaaagcaatcggaattgtcggtg

SEQ ID NO: 47142 - DNA, 25 bp, Probe sequence
agctaaagcaatcggaattgtcggt

SEQ ID NO: 47143 - DNA, 25 bp, Probe sequence
aatgagtctataaggattgaggtcg

SEQ ID NO: 47144 - DNA, 25 bp, Probe sequence
atataccgacgctccaagaatatag

SEQ ID NO: 47145 - DNA, 25 bp, Probe sequence
aatataccgacgctccaagaatata

SEQ ID NO: 47146 - DNA, 25 bp, Probe sequence
gtctataaggattgaggtcgaatga

SEQ ID NO: 47147 - DNA, 25 bp, Probe sequence
agtctataaggattgaggtcgaatg

SEQ ID NO: 47148 - DNA, 25 bp, Probe sequence
atgagtctataaggattgaggtcga

SEQ ID NO: 47149 - DNA, 25 bp, Probe sequence
gagtctataaggattgaggtcgaat

SEQ ID NO: 47150 - DNA, 25 bp, Probe sequence
tgagtctataaggattgaggtcgaa

SEQ ID NO: 47151 - DNA, 25 bp, Probe sequence
taatgagtctataaggattgaggtc

SEQ ID NO: 47152 - DNA, 25 bp, Probe sequence
aagaatttaaagagggtatgcaacg

SEQ ID NO: 47153 - DNA, 25 bp, Probe sequence
gaatttaaagagggtatgcaacgag

SEQ ID NO: 47154 - DNA, 25 bp, Probe sequence
agaatttaaagagggtatgcaacga

SEQ ID NO: 47155 - DNA, 25 bp, Probe sequence
atatgtaggacaaggcttccaacca

SEQ ID NO: 47156 - DNA, 25 bp, Probe sequence
aatttaaagagggtatgcaacgagc

SEQ ID NO: 47157 - DNA, 25 bp, Probe sequence
tttaaagagggtatgcaacgagcta

SEQ ID NO: 47158 - DNA, 25 bp, Probe sequence
aaagaatttaaagagggtatgcaac

SEQ ID NO: 47159 - DNA, 25 bp, Probe sequence
ttaaagagggtatgcaacgagctag

SEQ ID NO: 47160 - DNA, 25 bp, Probe sequence
atttaaagagggtatgcaacgagct

SEQ ID NO: 47161 - DNA, 25 bp, Probe sequence
tactgttatcaggatgttcagcgat

SEQ ID NO: 47162 - DNA, 25 bp, Probe sequence
caacgctactgttatcaggatgttc

SEQ ID NO: 47163 - DNA, 25 bp, Probe sequence
aacgctactgttatcaggatgttca

SEQ ID NO: 47164 - DNA, 25 bp, Probe sequence
cgtttggagcatttgaagatgaata

SEQ ID NO: 47165 - DNA, 25 bp, Probe sequence
ctactgttatcaggatgttcagcga

SEQ ID NO: 47166 - DNA, 25 bp, Probe sequence
acgctactgttatcaggatgttcag

SEQ ID NO: 47167 - DNA, 25 bp, Probe sequence
tcgtttggagcatttgaagatgaat

SEQ ID NO: 47168 - DNA, 25 bp, Probe sequence
gtttggagcatttgaagatgaataa

SEQ ID NO: 47169 - DNA, 25 bp, Probe sequence
ctgttatcaggatgttcagcgatga

SEQ ID NO: 47170 - DNA, 25 bp, Probe sequence
aatgacaacggtgatgatatgagta

SEQ ID NO: 47171 - DNA, 25 bp, Probe sequence
taatgacaacggtgatgatatgagt

SEQ ID NO: 47172 - DNA, 25 bp, Probe sequence
agtaatgacaacggtgatgatatga

SEQ ID NO: 47173 - DNA, 25 bp, Probe sequence
actaccaataacgaatccaacaatg

SEQ ID NO: 47174 - DNA, 25 bp, Probe sequence
aacggtgatgatatgagtatgatgg

SEQ ID NO: 47175 - DNA, 25 bp, Probe sequence
acaacggtgatgatatgagtatgat

SEQ ID NO: 47176 - DNA, 25 bp, Probe sequence
gacaacggtgatgatatgagtatga

SEQ ID NO: 47177 - DNA, 25 bp, Probe sequence
atgacaacggtgatgatatgagtat

SEQ ID NO: 47178 - DNA, 25 bp, Probe sequence
gtaatgacaacggtgatgatatgag

SEQ ID NO: 47179 - DNA, 25 bp, Probe sequence
agcacataaggaagagttggataat

SEQ ID NO: 47180 - DNA, 25 bp, Probe sequence
gagcacataaggaagagttggataa

SEQ ID NO: 47181 - DNA, 25 bp, Probe sequence
gcacataaggaagagttggataatt

SEQ ID NO: 47182 - DNA, 25 bp, Probe sequence
cgagcacataaggaagagttggata

SEQ ID NO: 47183 - DNA, 25 bp, Probe sequence
ttgaatatcgagcacataaggaaga

SEQ ID NO: 47184 - DNA, 25 bp, Probe sequence
aatatcgagcacataaggaagagtt

SEQ ID NO: 47185 - DNA, 25 bp, Probe sequence
gaatatcgagcacataaggaagagt

SEQ ID NO: 47186 - DNA, 25 bp, Probe sequence
tgaatatcgagcacataaggaagag

SEQ ID NO: 47187 - DNA, 25 bp, Probe sequence
atatcgagcacataaggaagagttg

SEQ ID NO: 47188 - DNA, 25 bp, Probe sequence
aagaattgtcaaatgttaagaagca

SEQ ID NO: 47189 - DNA, 25 bp, Probe sequence
aagcacttcagaatatggtgtgttt

SEQ ID NO: 47190 - DNA, 25 bp, Probe sequence
aaagcacttcagaatatggtgtgtt

SEQ ID NO: 47191 - DNA, 25 bp, Probe sequence
agaattgtcaaatgttaagaagcaa

SEQ ID NO: 47192 - DNA, 25 bp, Probe sequence
agcacttcagaatatggtgtgtttg

SEQ ID NO: 47193 - DNA, 25 bp, Probe sequence
gcacttcagaatatggtgtgtttga

SEQ ID NO: 47194 - DNA, 25 bp, Probe sequence
aaagaattgtcaaatgttaagaagc

SEQ ID NO: 47195 - DNA, 25 bp, Probe sequence
tgtcaaatgttaagaagcaattaaa

SEQ ID NO: 47196 - DNA, 25 bp, Probe sequence
ttgtcaaatgttaagaagcaattaa

SEQ ID NO: 47197 - DNA, 25 bp, Probe sequence
gctatcaggatgttcaactaccaat

SEQ ID NO: 47198 - DNA, 25 bp, Probe sequence
agaagtgaattacgctgctaataca

SEQ ID NO: 47199 - DNA, 25 bp, Probe sequence
aagaagtgaattacgctgctaatac

SEQ ID NO: 47200 - DNA, 25 bp, Probe sequence
ttgatgatgtaattgaactgagtga

SEQ ID NO: 47201 - DNA, 25 bp, Probe sequence
ttatatcacttactcgtcaagaagc

SEQ ID NO: 47202 - DNA, 25 bp, Probe sequence
tgctatcaggatgttcaactaccaa

SEQ ID NO: 47203 - DNA, 25 bp, Probe sequence
atgttcaactaccaataacgaatct

SEQ ID NO: 47204 - DNA, 25 bp, Probe sequence
tgatgatgtaattgaactgagtgat

SEQ ID NO: 47205 - DNA, 25 bp, Probe sequence
gttgatgatgtaattgaactgagtg

SEQ ID NO: 47206 - DNA, 25 bp, Probe sequence
caatcacaatacaaatagggaaacc

SEQ ID NO: 47207 - DNA, 25 bp, Probe sequence
ttaaagaaggaatggaacgagcaag

SEQ ID NO: 47208 - DNA, 25 bp, Probe sequence
agatgatgtaatcgaactaagtgat

SEQ ID NO: 47209 - DNA, 25 bp, Probe sequence
acaatcacaatacaaatagggaaac

SEQ ID NO: 47210 - DNA, 25 bp, Probe sequence
taaagaaggaatggaacgagcaaga

SEQ ID NO: 47211 - DNA, 25 bp, Probe sequence
aatttaaagaaggaatggaacgagc

SEQ ID NO: 47212 - DNA, 25 bp, Probe sequence
gaaagtattatgaaccactgattcg

SEQ ID NO: 47213 - DNA, 25 bp, Probe sequence
cgaaagtattatgaaccactgattc

SEQ ID NO: 47214 - DNA, 25 bp, Probe sequence
aaatgcgattgaatttgcgaagaag

SEQ ID NO: 47215 - DNA, 25 bp, Probe sequence
tagattatactgccaatactgatgc

SEQ ID NO: 47216 - DNA, 25 bp, Probe sequence
agtagatgatgtgattgaattgagt

SEQ ID NO: 47217 - DNA, 25 bp, Probe sequence
cagtagatgatgtgattgaattgag

SEQ ID NO: 47218 - DNA, 25 bp, Probe sequence
acagtagatgatgtgattgaattga

SEQ ID NO: 47219 - DNA, 25 bp, Probe sequence
agacaatacagtagatgatgtgatt

SEQ ID NO: 47220 - DNA, 25 bp, Probe sequence
aagacaatacagtagatgatgtgat

SEQ ID NO: 47221 - DNA, 25 bp, Probe sequence
agttagattatactgccaatactga

SEQ ID NO: 47222 - DNA, 25 bp, Probe sequence
ataaagacacaaacacagaaacaaa

SEQ ID NO: 47223 - DNA, 25 bp, Probe sequence
aataaagacacaaacacagaaacaa

SEQ ID NO: 47224 - DNA, 25 bp, Probe sequence
agcaagagttggatagtttaacaga

SEQ ID NO: 47225 - DNA, 25 bp, Probe sequence
agagagtgatagctcattaagaagt

SEQ ID NO: 47226 - DNA, 25 bp, Probe sequence
gcaagagttggatagtttaacagaa

SEQ ID NO: 47227 - DNA, 25 bp, Probe sequence
aagcaagagttggatagtttaacag

SEQ ID NO: 47228 - DNA, 25 bp, Probe sequence
gctcataagcaagagttggatagtt

SEQ ID NO: 47229 - DNA, 25 bp, Probe sequence
tcgataatagagagtgatagctcat

SEQ ID NO: 47230 - DNA, 25 bp, Probe sequence
ctcataagcaagagttggatagttt

SEQ ID NO: 47231 - DNA, 25 bp, Probe sequence
tactttagtaggtacagtgttgagc

SEQ ID NO: 47232 - DNA, 25 bp, Probe sequence
taagcaagagttggatagtttaaca

SEQ ID NO: 47233 - DNA, 25 bp, Probe sequence
ggctaagattatatgcttctggaca

SEQ ID NO: 47234 - DNA, 25 bp, Probe sequence
tggctaagattatatgcttctggac

SEQ ID NO: 47235 - DNA, 25 bp, Probe sequence
ctggatggctaagattatatgcttc

SEQ ID NO: 47236 - DNA, 25 bp, Probe sequence
atggctaagattatatgcttctgga

SEQ ID NO: 47237 - DNA, 25 bp, Probe sequence
tggatggctaagattatatgcttct

SEQ ID NO: 47238 - DNA, 25 bp, Probe sequence
tctggatggctaagattatatgctt

SEQ ID NO: 47239 - DNA, 25 bp, Probe sequence
gatggctaagattatatgcttctgg

SEQ ID NO: 47240 - DNA, 25 bp, Probe sequence
ggatggctaagattatatgcttctg

SEQ ID NO: 47241 - DNA, 25 bp, Probe sequence
aagattatatgcttctggacaggtg

SEQ ID NO: 47242 - DNA, 25 bp, Probe sequence
aggttggttatatggttatagtgaa

SEQ ID NO: 47243 - DNA, 25 bp, Probe sequence
aaggttggttatatggttatagtga

SEQ ID NO: 47244 - DNA, 25 bp, Probe sequence
agtaagtacacttagtcagtctcac

SEQ ID NO: 47245 - DNA, 25 bp, Probe sequence
aatcaaagcaaataagggagcataa

SEQ ID NO: 47246 - DNA, 25 bp, Probe sequence
aaatcaaagcaaataagggagcata

SEQ ID NO: 47247 - DNA, 25 bp, Probe sequence
taaatcaaagcaaataagggagcat

SEQ ID NO: 47248 - DNA, 25 bp, Probe sequence
ttaaatcaaagcaaataagggagca

SEQ ID NO: 47249 - DNA, 25 bp, Probe sequence
acccatactgaaattactactgagg

SEQ ID NO: 47250 - DNA, 25 bp, Probe sequence
cccatactgaaattactactgagga

SEQ ID NO: 47251 - DNA, 25 bp, Probe sequence
atggagttcaacatattaacaatgg

SEQ ID NO: 47252 - DNA, 25 bp, Probe sequence
atattaacaatgggcggtaaatcag

SEQ ID NO: 47253 - DNA, 25 bp, Probe sequence
caacatattaacaatgggcggtaaa

SEQ ID NO: 47254 - DNA, 25 bp, Probe sequence
catattaacaatgggcggtaaatca

SEQ ID NO: 47255 - DNA, 25 bp, Probe sequence
acatattaacaatgggcggtaaatc

SEQ ID NO: 47256 - DNA, 25 bp, Probe sequence
aacatattaacaatgggcggtaaat

SEQ ID NO: 47257 - DNA, 25 bp, Probe sequence
ggagttcaacatattaacaatgggc

SEQ ID NO: 47258 - DNA, 25 bp, Probe sequence
ctgaaattgtatcggaagagaaagt

SEQ ID NO: 47259 - DNA, 25 bp, Probe sequence
actgaaattgtatcggaagagaaag

SEQ ID NO: 47260 - DNA, 25 bp, Probe sequence
gtggcgttaatgatactaagcaatt

SEQ ID NO: 47261 - DNA, 25 bp, Probe sequence
agagagtggcgttaatgatactaag

SEQ ID NO: 47262 - DNA, 25 bp, Probe sequence
cagagagtggcgttaatgatactaa

SEQ ID NO: 47263 - DNA, 25 bp, Probe sequence
agtggcgttaatgatactaagcaat

SEQ ID NO: 47264 - DNA, 25 bp, Probe sequence
acagagagtggcgttaatgatacta

SEQ ID NO: 47265 - DNA, 25 bp, Probe sequence
gagtggcgttaatgatactaagcaa

SEQ ID NO: 47266 - DNA, 25 bp, Probe sequence
gagagtggcgttaatgatactaagc

SEQ ID NO: 47267 - DNA, 25 bp, Probe sequence
gattaggtggagaacacaacgatta

SEQ ID NO: 47268 - DNA, 25 bp, Probe sequence
agagtggcgttaatgatactaagca

SEQ ID NO: 47269 - DNA, 25 bp, Probe sequence
tacgcactcattcagatacacacat

SEQ ID NO: 47270 - DNA, 25 bp, Probe sequence
tctctacgcactcattcagatacac

SEQ ID NO: 47271 - DNA, 25 bp, Probe sequence
gcattgctcatagaatcaggtgtac

SEQ ID NO: 47272 - DNA, 25 bp, Probe sequence
ctctacgcactcattcagatacaca

SEQ ID NO: 47273 - DNA, 25 bp, Probe sequence
cactcattcagatacacacattgcg

SEQ ID NO: 47274 - DNA, 25 bp, Probe sequence
cgcactcattcagatacacacattg

SEQ ID NO: 47275 - DNA, 25 bp, Probe sequence
ctacgcactcattcagatacacaca

SEQ ID NO: 47276 - DNA, 25 bp, Probe sequence
aaggtgttgcgtgattataagataa

SEQ ID NO: 47277 - DNA, 25 bp, Probe sequence
tctacgcactcattcagatacacac

SEQ ID NO: 47278 - DNA, 25 bp, Probe sequence
acgctaagattacgaactcatacaa

SEQ ID NO: 47279 - DNA, 25 bp, Probe sequence
ttattggcattgaagtggtctgata

SEQ ID NO: 47280 - DNA, 25 bp, Probe sequence
attggcattgaagtggtctgatata

SEQ ID NO: 47281 - DNA, 25 bp, Probe sequence
tattggcattgaagtggtctgatat

SEQ ID NO: 47282 - DNA, 25 bp, Probe sequence
tacgctaagattacgaactcataca

SEQ ID NO: 47283 - DNA, 25 bp, Probe sequence
ttggcattgaagtggtctgatatag

SEQ ID NO: 47284 - DNA, 25 bp, Probe sequence
attattggcattgaagtggtctgat

SEQ ID NO: 47285 - DNA, 25 bp, Probe sequence
ctacgctaagattacgaactcatac

SEQ ID NO: 47286 - DNA, 25 bp, Probe sequence
gaattattggcattgaagtggtctg

SEQ ID NO: 47287 - DNA, 25 bp, Probe sequence
tcgttgttattccaatagaagttga

SEQ ID NO: 47288 - DNA, 25 bp, Probe sequence
cgttgttattccaatagaagttgat

SEQ ID NO: 47289 - DNA, 25 bp, Probe sequence
atcgttgttattccaatagaagttg

SEQ ID NO: 47290 - DNA, 25 bp, Probe sequence
aatcgttgttattccaatagaagtt

SEQ ID NO: 47291 - DNA, 25 bp, Probe sequence
aaatcgttgttattccaatagaagt

SEQ ID NO: 47292 - DNA, 25 bp, Probe sequence
gttgttattccaatagaagttgatt

SEQ ID NO: 47293 - DNA, 25 bp, Probe sequence
aaaatatgaatgttattggtttgcg

SEQ ID NO: 47294 - DNA, 25 bp, Probe sequence
aaatatgaatgttattggtttgcgc

SEQ ID NO: 47295 - DNA, 25 bp, Probe sequence
aatatgaatgttattggtttgcgcc

SEQ ID NO: 47296 - DNA, 25 bp, Probe sequence
cgatagaataccgacgctgaactta

SEQ ID NO: 47297 - DNA, 25 bp, Probe sequence
aagataaagaatttgctcaagacgc

SEQ ID NO: 47298 - DNA, 25 bp, Probe sequence
ctatcgaccaactcattgacgcata

SEQ ID NO: 47299 - DNA, 25 bp, Probe sequence
acgatagaataccgacgctgaactt

SEQ ID NO: 47300 - DNA, 25 bp, Probe sequence
tatcgaccaactcattgacgcatac

SEQ ID NO: 47301 - DNA, 25 bp, Probe sequence
aagaagaaaccaggtaagccgttag

SEQ ID NO: 47302 - DNA, 25 bp, Probe sequence
gaagaagaaaccaggtaagccgtta

SEQ ID NO: 47303 - DNA, 25 bp, Probe sequence
gacgatagaataccgacgctgaact

SEQ ID NO: 47304 - DNA, 25 bp, Probe sequence
cgtttaagaactggaagaagaaacc

SEQ ID NO: 47305 - DNA, 25 bp, Probe sequence
gctaatagtggacaacgtcgttata

SEQ ID NO: 47306 - DNA, 25 bp, Probe sequence
tcaagtcaattcaatgcagatacta

SEQ ID NO: 47307 - DNA, 25 bp, Probe sequence
ctaatagtggacaacgtcgttatat

SEQ ID NO: 47308 - DNA, 25 bp, Probe sequence
tggtttggtagctggtaatgttaaa

SEQ ID NO: 47309 - DNA, 25 bp, Probe sequence
tataggtggtttggtagctggtaat

SEQ ID NO: 47310 - DNA, 25 bp, Probe sequence
gtggtttggtagctggtaatgttaa

SEQ ID NO: 47311 - DNA, 25 bp, Probe sequence
caagtcaattcaatgcagatactat

SEQ ID NO: 47312 - DNA, 25 bp, Probe sequence
atcgctaagtatttaagacatgcag

SEQ ID NO: 47313 - DNA, 25 bp, Probe sequence
tcgctaagtatttaagacatgcagg

SEQ ID NO: 47314 - DNA, 25 bp, Probe sequence
gaggaatcagatgacgcaaagaatt

SEQ ID NO: 47315 - DNA, 25 bp, Probe sequence
tgagagacgtattcacaataatcaa

SEQ ID NO: 47316 - DNA, 25 bp, Probe sequence
atgagagacgtattcacaataatca

SEQ ID NO: 47317 - DNA, 25 bp, Probe sequence
catgagagacgtattcacaataatc

SEQ ID NO: 47318 - DNA, 25 bp, Probe sequence
tcttatcatgagagacgtattcaca

SEQ ID NO: 47319 - DNA, 25 bp, Probe sequence
cttatcatgagagacgtattcacaa

SEQ ID NO: 47320 - DNA, 25 bp, Probe sequence
cgaggaatcagatgacgcaaagaat

SEQ ID NO: 47321 - DNA, 25 bp, Probe sequence
ttcttatcatgagagacgtattcac

SEQ ID NO: 47322 - DNA, 25 bp, Probe sequence
gagaactttggcgaggaatcagatg

SEQ ID NO: 47323 - DNA, 25 bp, Probe sequence
atgaacatacagttgagttattaca

SEQ ID NO: 47324 - DNA, 25 bp, Probe sequence
aatgaacatacagttgagttattac

SEQ ID NO: 47325 - DNA, 25 bp, Probe sequence
acaaaatgaacatacagttgagtta

SEQ ID NO: 47326 - DNA, 25 bp, Probe sequence
tacaaaatgaacatacagttgagtt

SEQ ID NO: 47327 - DNA, 25 bp, Probe sequence
atacaaaatgaacatacagttgagt

SEQ ID NO: 47328 - DNA, 25 bp, Probe sequence
agctatttagaacatcgtatacaaa

SEQ ID NO: 47329 - DNA, 25 bp, Probe sequence
caaaatgaacatacagttgagttat

SEQ ID NO: 47330 - DNA, 25 bp, Probe sequence
agaacatcgtatacaaaatgaacat

SEQ ID NO: 47331 - DNA, 25 bp, Probe sequence
ctagctatttagaacatcgtataca

SEQ ID NO: 47332 - DNA, 25 bp, Probe sequence
tcaatgtggacttatggtatggatt

SEQ ID NO: 47333 - DNA, 25 bp, Probe sequence
ttcaatgtggacttatggtatggat

SEQ ID NO: 47334 - DNA, 25 bp, Probe sequence
attcaatgtggacttatggtatgga

SEQ ID NO: 47335 - DNA, 25 bp, Probe sequence
aattcaatgtggacttatggtatgg

SEQ ID NO: 47336 - DNA, 25 bp, Probe sequence
agaagtgatgttacaagatggtcat

SEQ ID NO: 47337 - DNA, 25 bp, Probe sequence
cagaagtgatgttacaagatggtca

SEQ ID NO: 47338 - DNA, 25 bp, Probe sequence
tacagaagtgatgttacaagatggt

SEQ ID NO: 47339 - DNA, 25 bp, Probe sequence
caattcaatgtggacttatggtatg

SEQ ID NO: 47340 - DNA, 25 bp, Probe sequence
acagaagtgatgttacaagatggtc

SEQ ID NO: 47341 - DNA, 25 bp, Probe sequence
aagtgatgattattggaggtagagc

SEQ ID NO: 47342 - DNA, 25 bp, Probe sequence
aatacatagcatatcagaaggcaca

SEQ ID NO: 47343 - DNA, 25 bp, Probe sequence
atacatagcatatcagaaggcacac

SEQ ID NO: 47344 - DNA, 25 bp, Probe sequence
gaatacatagcatatcagaaggcac

SEQ ID NO: 47345 - DNA, 25 bp, Probe sequence
gatgattattggaggtagagcactg

SEQ ID NO: 47346 - DNA, 25 bp, Probe sequence
gtaactataacggtcctaaggtagc

SEQ ID NO: 47347 - DNA, 25 bp, Probe sequence
tgatgattattggaggtagagcact

SEQ ID NO: 47348 - DNA, 25 bp, Probe sequence
agtgatgattattggaggtagagca

SEQ ID NO: 47349 - DNA, 25 bp, Probe sequence
taggcgatggataacaggttgatat

SEQ ID NO: 47350 - DNA, 25 bp, Probe sequence
gatgaatggattgaagagaacacag

SEQ ID NO: 47351 - DNA, 25 bp, Probe sequence
agatgaatggattgaagagaacaca

SEQ ID NO: 47352 - DNA, 25 bp, Probe sequence
atgcttatgtcgtagatgagaatga

SEQ ID NO: 47353 - DNA, 25 bp, Probe sequence
agatgagaatgacttagatatggca

SEQ ID NO: 47354 - DNA, 25 bp, Probe sequence
tagatgaatggattgaagagaacac

SEQ ID NO: 47355 - DNA, 25 bp, Probe sequence
atgacttagatatggcatcagactt

SEQ ID NO: 47356 - DNA, 25 bp, Probe sequence
aatgacttagatatggcatcagact

SEQ ID NO: 47357 - DNA, 25 bp, Probe sequence
tgagaatgacttagatatggcatca

SEQ ID NO: 47358 - DNA, 25 bp, Probe sequence
tattgatgacgacaaggaggactaa

SEQ ID NO: 47359 - DNA, 25 bp, Probe sequence
aacgaatggattgaagagaacacag

SEQ ID NO: 47360 - DNA, 25 bp, Probe sequence
gtacgaagaatacaaggaggactaa

SEQ ID NO: 47361 - DNA, 25 bp, Probe sequence
gaagaggagtacgaagaatacaagg

SEQ ID NO: 47362 - DNA, 25 bp, Probe sequence
aagaggagtacgaagaatacaagga

SEQ ID NO: 47363 - DNA, 25 bp, Probe sequence
cgaagaggagtacgaagaatacaag

SEQ ID NO: 47364 - DNA, 25 bp, Probe sequence
agaggagtacgaagaatacaaggag

SEQ ID NO: 47365 - DNA, 25 bp, Probe sequence
agtacgaagaatacaaggaggacta

SEQ ID NO: 47366 - DNA, 25 bp, Probe sequence
acgaatggattgaagagaacacaga

SEQ ID NO: 47367 - DNA, 25 bp, Probe sequence
gagtacgaagaatacaaggaggact

SEQ ID NO: 47368 - DNA, 25 bp, Probe sequence
tatgaatggattgaagagaacacag

SEQ ID NO: 47369 - DNA, 25 bp, Probe sequence
ttatgaatggattgaagagaacaca

SEQ ID NO: 47370 - DNA, 25 bp, Probe sequence
aacaagattacagcattctagtgaa

SEQ ID NO: 47371 - DNA, 25 bp, Probe sequence
gatgagaatgatctatacacagcat

SEQ ID NO: 47372 - DNA, 25 bp, Probe sequence
agagacaggctaattaacttagtca

SEQ ID NO: 47373 - DNA, 25 bp, Probe sequence
attgaagagaacacagacgaaagag

SEQ ID NO: 47374 - DNA, 25 bp, Probe sequence
gattgaagagaacacagacgaaaga

SEQ ID NO: 47375 - DNA, 25 bp, Probe sequence
gcagttaagaaacaagattacagca

SEQ ID NO: 47376 - DNA, 25 bp, Probe sequence
agcagttaagaaacaagattacagc

SEQ ID NO: 47377 - DNA, 25 bp, Probe sequence
ttggttggaaagacagtgaaatatg

SEQ ID NO: 47378 - DNA, 25 bp, Probe sequence
gttggttggaaagacagtgaaatat

SEQ ID NO: 47379 - DNA, 25 bp, Probe sequence
ggaaagacagtgaaatatggaaagc

SEQ ID NO: 47380 - DNA, 25 bp, Probe sequence
agttggttggaaagacagtgaaata

SEQ ID NO: 47381 - DNA, 25 bp, Probe sequence
gttggaaagacagtgaaatatggaa

SEQ ID NO: 47382 - DNA, 25 bp, Probe sequence
taaagttggttggaaagacagtgaa

SEQ ID NO: 47383 - DNA, 25 bp, Probe sequence
tggaaagacagtgaaatatggaaag

SEQ ID NO: 47384 - DNA, 25 bp, Probe sequence
ggttggaaagacagtgaaatatgga

SEQ ID NO: 47385 - DNA, 25 bp, Probe sequence
aagttggttggaaagacagtgaaat

SEQ ID NO: 47386 - DNA, 25 bp, Probe sequence
ggatatagcgaagttacgagattgt

SEQ ID NO: 47387 - DNA, 25 bp, Probe sequence
gatatagcgaagttacgagattgta

SEQ ID NO: 47388 - DNA, 25 bp, Probe sequence
gaagagtacaagaagcaacgagatg

SEQ ID NO: 47389 - DNA, 25 bp, Probe sequence
aagagtacaagaagcaacgagatga

SEQ ID NO: 47390 - DNA, 25 bp, Probe sequence
tgaagagtacaagaagcaacgagat

SEQ ID NO: 47391 - DNA, 25 bp, Probe sequence
agagtacaagaagcaacgagatgag

SEQ ID NO: 47392 - DNA, 25 bp, Probe sequence
gtaacaaagaactggagaagaaagc

SEQ ID NO: 47393 - DNA, 25 bp, Probe sequence
taacaaagaactggagaagaaagca

SEQ ID NO: 47394 - DNA, 25 bp, Probe sequence
gggatatagcgaagttacgagattg

SEQ ID NO: 47395 - DNA, 25 bp, Probe sequence
aattgcttggaagatacgaacattg

SEQ ID NO: 47396 - DNA, 25 bp, Probe sequence
attgcttggaagatacgaacattgc

SEQ ID NO: 47397 - DNA, 25 bp, Probe sequence
taagttaagagagcgtaacgaagag

SEQ ID NO: 47398 - DNA, 25 bp, Probe sequence
ctaagttaagagagcgtaacgaaga

SEQ ID NO: 47399 - DNA, 25 bp, Probe sequence
caaatggaggatgacacaaatgaat

SEQ ID NO: 47400 - DNA, 25 bp, Probe sequence
aatggaggatgacacaaatgaataa

SEQ ID NO: 47401 - DNA, 25 bp, Probe sequence
aaatggaggatgacacaaatgaata

SEQ ID NO: 47402 - DNA, 25 bp, Probe sequence
aaacaggattccaaataggcgtaat

SEQ ID NO: 47403 - DNA, 25 bp, Probe sequence
agtgaactatgaaacaggattccaa

SEQ ID NO: 47404 - DNA, 25 bp, Probe sequence
atgatacaaccaacaagagaagaat

SEQ ID NO: 47405 - DNA, 25 bp, Probe sequence
tgatacaaccaacaagagaagaatt

SEQ ID NO: 47406 - DNA, 25 bp, Probe sequence
aatgttgactctatcactgatgagc

SEQ ID NO: 47407 - DNA, 25 bp, Probe sequence
gatgagtacaagaagcaacgagatg

SEQ ID NO: 47408 - DNA, 25 bp, Probe sequence
atgagtacaagaagcaacgagatga

SEQ ID NO: 47409 - DNA, 25 bp, Probe sequence
tgatgagtacaagaagcaacgagat

SEQ ID NO: 47410 - DNA, 25 bp, Probe sequence
atgttgactctatcactgatgagca

SEQ ID NO: 47411 - DNA, 25 bp, Probe sequence
tgttgactctatcactgatgagcaa

SEQ ID NO: 47412 - DNA, 25 bp, Probe sequence
caaatggaggaagacacaaatgaat

SEQ ID NO: 47413 - DNA, 25 bp, Probe sequence
tggacgaattagcgaaagagaaata

SEQ ID NO: 47414 - DNA, 25 bp, Probe sequence
ggacgaattagcgaaagagaaatat

SEQ ID NO: 47415 - DNA, 25 bp, Probe sequence
taatattgatgaagatgaagcacgt

SEQ ID NO: 47416 - DNA, 25 bp, Probe sequence
ttaatattgatgaagatgaagcacg

SEQ ID NO: 47417 - DNA, 25 bp, Probe sequence
gtggacgaattagcgaaagagaaat

SEQ ID NO: 47418 - DNA, 25 bp, Probe sequence
tggcatgaaatattatatggtcgga

SEQ ID NO: 47419 - DNA, 25 bp, Probe sequence
atggcatgaaatattatatggtcgg

SEQ ID NO: 47420 - DNA, 25 bp, Probe sequence
ggcatgaaatattatatggtcggat

SEQ ID NO: 47421 - DNA, 25 bp, Probe sequence
gagttacttgagcaggctatcaatg

SEQ ID NO: 47422 - DNA, 25 bp, Probe sequence
gctgagctaagaagaaagaagccac

SEQ ID NO: 47423 - DNA, 25 bp, Probe sequence
aaattggaaagaaagcgaaagagag

SEQ ID NO: 47424 - DNA, 25 bp, Probe sequence
caaattggaaagaaagcgaaagaga

SEQ ID NO: 47425 - DNA, 25 bp, Probe sequence
aattggaaagaaagcgaaagagagg

SEQ ID NO: 47426 - DNA, 25 bp, Probe sequence
gcaaattggaaagaaagcgaaagag

SEQ ID NO: 47427 - DNA, 25 bp, Probe sequence
ttggaaagaaagcgaaagagaggta

SEQ ID NO: 47428 - DNA, 25 bp, Probe sequence
attggaaagaaagcgaaagagaggt

SEQ ID NO: 47429 - DNA, 25 bp, Probe sequence
aaagaggtgcagttattaaagtggg

SEQ ID NO: 47430 - DNA, 25 bp, Probe sequence
gtgcagttattaaagtgggtcagtt

SEQ ID NO: 47431 - DNA, 25 bp, Probe sequence
tggaaagaaagcgaaagagaggtac

SEQ ID NO: 47432 - DNA, 25 bp, Probe sequence
caaatgtttaagaaatggcaggaag

SEQ ID NO: 47433 - DNA, 25 bp, Probe sequence
gtttaagaaatggcaggaagcataa

SEQ ID NO: 47434 - DNA, 25 bp, Probe sequence
aaatgtttaagaaatggcaggaagc

SEQ ID NO: 47435 - DNA, 25 bp, Probe sequence
tgtttaagaaatggcaggaagcata

SEQ ID NO: 47436 - DNA, 25 bp, Probe sequence
gatccgtactggtttgatactactt

SEQ ID NO: 47437 - DNA, 25 bp, Probe sequence
aatgtttaagaaatggcaggaagca

SEQ ID NO: 47438 - DNA, 25 bp, Probe sequence
aaagaacggtttaactccaggaatg

SEQ ID NO: 47439 - DNA, 25 bp, Probe sequence
atgtttaagaaatggcaggaagcat

SEQ ID NO: 47440 - DNA, 25 bp, Probe sequence
tgatccgtactggtttgatactact

SEQ ID NO: 47441 - DNA, 25 bp, Probe sequence
attggcattaggacttgaacactta

SEQ ID NO: 47442 - DNA, 25 bp, Probe sequence
tattggcattaggacttgaacactt

SEQ ID NO: 47443 - DNA, 25 bp, Probe sequence
ttattggcattaggacttgaacact

SEQ ID NO: 47444 - DNA, 25 bp, Probe sequence
agaacaggcatcattacacttattg

SEQ ID NO: 47445 - DNA, 25 bp, Probe sequence
ttggcattaggacttgaacacttaa

SEQ ID NO: 47446 - DNA, 25 bp, Probe sequence
tggcattaggacttgaacacttaat

SEQ ID NO: 47447 - DNA, 25 bp, Probe sequence
gtattagaacaggcatcattacact

SEQ ID NO: 47448 - DNA, 25 bp, Probe sequence
gcagtcgcattagagttaattcata

SEQ ID NO: 47449 - DNA, 25 bp, Probe sequence
acaggcatcattacacttattgtct

SEQ ID NO: 47450 - DNA, 25 bp, Probe sequence
cttaatgtcccagcctccttcataa

SEQ ID NO: 47451 - DNA, 25 bp, Probe sequence
ctaagaacttaatgtcccagcctcc

SEQ ID NO: 47452 - DNA, 25 bp, Probe sequence
cctaagaacttaatgtcccagcctc

SEQ ID NO: 47453 - DNA, 25 bp, Probe sequence
taagaacttaatgtcccagcctcct

SEQ ID NO: 47454 - DNA, 25 bp, Probe sequence
acttaatgtcccagcctccttcata

SEQ ID NO: 47455 - DNA, 25 bp, Probe sequence
aacttaatgtcccagcctccttcat

SEQ ID NO: 47456 - DNA, 25 bp, Probe sequence
aagaacttaatgtcccagcctcctt

SEQ ID NO: 47457 - DNA, 25 bp, Probe sequence
agaacttaatgtcccagcctccttc

SEQ ID NO: 47458 - DNA, 25 bp, Probe sequence
tatcctatgacctatttcaaaaccc

SEQ ID NO: 47459 - DNA, 25 bp, Probe sequence
tgatccaacttacactaccaataga

SEQ ID NO: 47460 - DNA, 25 bp, Probe sequence
acttgatccaacttacactaccaat

SEQ ID NO: 47461 - DNA, 25 bp, Probe sequence
aacttgatccaacttacactaccaa

SEQ ID NO: 47462 - DNA, 25 bp, Probe sequence
taacttgatccaacttacactacca

SEQ ID NO: 47463 - DNA, 25 bp, Probe sequence
gatccaacttacactaccaatagaa

SEQ ID NO: 47464 - DNA, 25 bp, Probe sequence
aagtagaagctaatgccaataggta

SEQ ID NO: 47465 - DNA, 25 bp, Probe sequence
agtagaagctaatgccaataggtat

SEQ ID NO: 47466 - DNA, 25 bp, Probe sequence
ttgatccaacttacactaccaatag

SEQ ID NO: 47467 - DNA, 25 bp, Probe sequence
cttgatccaacttacactaccaata

SEQ ID NO: 47468 - DNA, 25 bp, Probe sequence
atagatatacattggtgcggaagaa

SEQ ID NO: 47469 - DNA, 25 bp, Probe sequence
aatagatatacattggtgcggaaga

SEQ ID NO: 47470 - DNA, 25 bp, Probe sequence
agaagctagtgccaatagatataca

SEQ ID NO: 47471 - DNA, 25 bp, Probe sequence
aagtagaagctagtgccaatagata

SEQ ID NO: 47472 - DNA, 25 bp, Probe sequence
agtagaagctagtgccaatagatat

SEQ ID NO: 47473 - DNA, 25 bp, Probe sequence
tagatatacattggtgcggaagaaa

SEQ ID NO: 47474 - DNA, 25 bp, Probe sequence
atatacattggtgcggaagaaagta

SEQ ID NO: 47475 - DNA, 25 bp, Probe sequence
agatatacattggtgcggaagaaag

SEQ ID NO: 47476 - DNA, 25 bp, Probe sequence
caatagatatacattggtgcggaag

SEQ ID NO: 47477 - DNA, 25 bp, Probe sequence
ttaccggagtatattgtagctgatg

SEQ ID NO: 47478 - DNA, 25 bp, Probe sequence
taccggagtatattgtagctgatgc

SEQ ID NO: 47479 - DNA, 25 bp, Probe sequence
tatatgaatgcaacgagctgtacat

SEQ ID NO: 47480 - DNA, 25 bp, Probe sequence
ctatatgaatgcaacgagctgtaca

SEQ ID NO: 47481 - DNA, 25 bp, Probe sequence
cttcaagctatatgaatgcaacgag

SEQ ID NO: 47482 - DNA, 25 bp, Probe sequence
tgacttcaagctatatgaatgcaac

SEQ ID NO: 47483 - DNA, 25 bp, Probe sequence
gtgacttcaagctatatgaatgcaa

SEQ ID NO: 47484 - DNA, 25 bp, Probe sequence
gacttcaagctatatgaatgcaacg

SEQ ID NO: 47485 - DNA, 25 bp, Probe sequence
acttcaagctatatgaatgcaacga

SEQ ID NO: 47486 - DNA, 25 bp, Probe sequence
attgttgaaacgatacctgatagca

SEQ ID NO: 47487 - DNA, 25 bp, Probe sequence
tgaaacgatacctgatagcaaattc

SEQ ID NO: 47488 - DNA, 25 bp, Probe sequence
gttgaaacgatacctgatagcaaat

SEQ ID NO: 47489 - DNA, 25 bp, Probe sequence
ttgcccaacttacactaccaataaa

SEQ ID NO: 47490 - DNA, 25 bp, Probe sequence
tttgcccaacttacactaccaataa

SEQ ID NO: 47491 - DNA, 25 bp, Probe sequence
tgttgaaacgatacctgatagcaaa

SEQ ID NO: 47492 - DNA, 25 bp, Probe sequence
ttgttgaaacgatacctgatagcaa

SEQ ID NO: 47493 - DNA, 25 bp, Probe sequence
ctttgcccaacttacactaccaata

SEQ ID NO: 47494 - DNA, 25 bp, Probe sequence
ttgaaacgatacctgatagcaaatt

SEQ ID NO: 47495 - DNA, 25 bp, Probe sequence
caagctatatgaatgtgatgactgt

SEQ ID NO: 47496 - DNA, 25 bp, Probe sequence
gacccaacttacactaccaatagaa

SEQ ID NO: 47497 - DNA, 25 bp, Probe sequence
atgacccaacttacactaccaatag

SEQ ID NO: 47498 - DNA, 25 bp, Probe sequence
agctatatgaatgtgatgactgttc

SEQ ID NO: 47499 - DNA, 25 bp, Probe sequence
acccaacttacactaccaatagaaa

SEQ ID NO: 47500 - DNA, 25 bp, Probe sequence
tgacccaacttacactaccaataga

SEQ ID NO: 47501 - DNA, 25 bp, Probe sequence
aagctatatgaatgtgatgactgtt

SEQ ID NO: 47502 - DNA, 25 bp, Probe sequence
tcaagctatatgaatgtgatgactg

SEQ ID NO: 47503 - DNA, 25 bp, Probe sequence
catgacccaacttacactaccaata

SEQ ID NO: 47504 - DNA, 25 bp, Probe sequence
atgcatatgagcttaatgtcccaag

SEQ ID NO: 47505 - DNA, 25 bp, Probe sequence
tgcatatgagcttaatgtcccaagc

SEQ ID NO: 47506 - DNA, 25 bp, Probe sequence
gcatatgagcttaatgtcccaagcg

SEQ ID NO: 47507 - DNA, 25 bp, Probe sequence
catatgagcttaatgtcccaagcgc

SEQ ID NO: 47508 - DNA, 25 bp, Probe sequence
tatgagcttaatgtcccaagcgcat

SEQ ID NO: 47509 - DNA, 25 bp, Probe sequence
atatgagcttaatgtcccaagcgca

SEQ ID NO: 47510 - DNA, 25 bp, Probe sequence
gagcttaatgtcccaagcgcatttt

SEQ ID NO: 47511 - DNA, 25 bp, Probe sequence
catgcgtcagtgaattgtgtaagtt

SEQ ID NO: 47512 - DNA, 25 bp, Probe sequence
atgcgtcagtgaattgtgtaagttt

SEQ ID NO: 47513 - DNA, 25 bp, Probe sequence
tgaatgtgctgataatgatttactc

SEQ ID NO: 47514 - DNA, 25 bp, Probe sequence
tcatgcgtcagtgaattgtgtaagt

SEQ ID NO: 47515 - DNA, 25 bp, Probe sequence
gaatgtgctgataatgatttactca

SEQ ID NO: 47516 - DNA, 25 bp, Probe sequence
ttcatgcgtcagtgaattgtgtaag

SEQ ID NO: 47517 - DNA, 25 bp, Probe sequence
aatgtgctgataatgatttactcaa

SEQ ID NO: 47518 - DNA, 25 bp, Probe sequence
gttcatgcgtcagtgaattgtgtaa

SEQ ID NO: 47519 - DNA, 25 bp, Probe sequence
agttcatgcgtcagtgaattgtgta

SEQ ID NO: 47520 - DNA, 25 bp, Probe sequence
aggaacacgatattaggcaaagaat

SEQ ID NO: 47521 - DNA, 25 bp, Probe sequence
taaggaacacgatattaggcaaaga

SEQ ID NO: 47522 - DNA, 25 bp, Probe sequence
aaggaacacgatattaggcaaagaa

SEQ ID NO: 47523 - DNA, 25 bp, Probe sequence
ggaacacgatattaggcaaagaatc

SEQ ID NO: 47524 - DNA, 25 bp, Probe sequence
ttataaggaacacgatattaggcaa

SEQ ID NO: 47525 - DNA, 25 bp, Probe sequence
ataaggaacacgatattaggcaaag

SEQ ID NO: 47526 - DNA, 25 bp, Probe sequence
tataaggaacacgatattaggcaaa

SEQ ID NO: 47527 - DNA, 25 bp, Probe sequence
tcatggctttataaggaacacgata

SEQ ID NO: 47528 - DNA, 25 bp, Probe sequence
aaatcatggctttataaggaacacg

SEQ ID NO: 47529 - DNA, 25 bp, Probe sequence
aggtgtagagataattgaagcagag

SEQ ID NO: 47530 - DNA, 25 bp, Probe sequence
aaggtgtagagataattgaagcaga

SEQ ID NO: 47531 - DNA, 25 bp, Probe sequence
ggtgtagagataattgaagcagagg

SEQ ID NO: 47532 - DNA, 25 bp, Probe sequence
gggtatcatcatttgttggctattt

SEQ ID NO: 47533 - DNA, 25 bp, Probe sequence
aattacaagaggatatcgttgcaga

SEQ ID NO: 47534 - DNA, 25 bp, Probe sequence
caattacaagaggatatcgttgcag

SEQ ID NO: 47535 - DNA, 25 bp, Probe sequence
tcaattacaagaggatatcgttgca

SEQ ID NO: 47536 - DNA, 25 bp, Probe sequence
aaaggtgtagagataattgaagcag

SEQ ID NO: 47537 - DNA, 25 bp, Probe sequence
atcaattacaagaggatatcgttgc

SEQ ID NO: 47538 - DNA, 25 bp, Probe sequence
tggcttatgcgaagagatattagaa

SEQ ID NO: 47539 - DNA, 25 bp, Probe sequence
atggcttatgcgaagagatattaga

SEQ ID NO: 47540 - DNA, 25 bp, Probe sequence
tcatggcttatgcgaagagatatta

SEQ ID NO: 47541 - DNA, 25 bp, Probe sequence
atcatggcttatgcgaagagatatt

SEQ ID NO: 47542 - DNA, 25 bp, Probe sequence
catggcttatgcgaagagatattag

SEQ ID NO: 47543 - DNA, 25 bp, Probe sequence
cttatcatggcttatgcgaagagat

SEQ ID NO: 47544 - DNA, 25 bp, Probe sequence
ttatcatggcttatgcgaagagata

SEQ ID NO: 47545 - DNA, 25 bp, Probe sequence
tatcatggcttatgcgaagagatat

SEQ ID NO: 47546 - DNA, 25 bp, Probe sequence
gataaattatgaatcacaccctgct

SEQ ID NO: 47547 - DNA, 25 bp, Probe sequence
gcatttgttatgtctcctttaagat

SEQ ID NO: 47548 - DNA, 25 bp, Probe sequence
gtcttgcatttgttatgtctccttt

SEQ ID NO: 47549 - DNA, 25 bp, Probe sequence
attggtcttgcatttgttatgtctc

SEQ ID NO: 47550 - DNA, 25 bp, Probe sequence
gattggtcttgcatttgttatgtct

SEQ ID NO: 47551 - DNA, 25 bp, Probe sequence
tgattggtcttgcatttgttatgtc

SEQ ID NO: 47552 - DNA, 25 bp, Probe sequence
atgattggtcttgcatttgttatgt

SEQ ID NO: 47553 - DNA, 25 bp, Probe sequence
tcttgcatttgttatgtctccttta

SEQ ID NO: 47554 - DNA, 25 bp, Probe sequence
tgcatttgttatgtctcctttaaga

SEQ ID NO: 47555 - DNA, 25 bp, Probe sequence
ggtcttgcatttgttatgtctcctt

SEQ ID NO: 47556 - DNA, 25 bp, Probe sequence
gctgttgaaggagatattaatgact

SEQ ID NO: 47557 - DNA, 25 bp, Probe sequence
aagctactgcaacaattattccaag

SEQ ID NO: 47558 - DNA, 25 bp, Probe sequence
ctactgcaacaattattccaagctc

SEQ ID NO: 47559 - DNA, 25 bp, Probe sequence
ctgcaacaattattccaagctcaat

SEQ ID NO: 47560 - DNA, 25 bp, Probe sequence
tactgcaacaattattccaagctca

SEQ ID NO: 47561 - DNA, 25 bp, Probe sequence
gcaacaattattccaagctcaatta

SEQ ID NO: 47562 - DNA, 25 bp, Probe sequence
tgcaacaattattccaagctcaatt

SEQ ID NO: 47563 - DNA, 25 bp, Probe sequence
actgcaacaattattccaagctcaa

SEQ ID NO: 47564 - DNA, 25 bp, Probe sequence
acaattattccaagctcaattaaca

SEQ ID NO: 47565 - DNA, 25 bp, Probe sequence
gactcaaaatcccgttccacttgtg

SEQ ID NO: 47566 - DNA, 25 bp, Probe sequence
ttcaacttttagaacacgttccttc

SEQ ID NO: 47567 - DNA, 25 bp, Probe sequence
tcaacttttagaacacgttccttcc

SEQ ID NO: 47568 - DNA, 25 bp, Probe sequence
caacttttagaacacgttccttccc

SEQ ID NO: 47569 - DNA, 25 bp, Probe sequence
ggagtagttcaacttttagaacacg

SEQ ID NO: 47570 - DNA, 25 bp, Probe sequence
gggagtagttcaacttttagaacac

SEQ ID NO: 47571 - DNA, 25 bp, Probe sequence
cgggagtagttcaacttttagaaca

SEQ ID NO: 47572 - DNA, 25 bp, Probe sequence
aacttttagaacacgttccttcccg

SEQ ID NO: 47573 - DNA, 25 bp, Probe sequence
gcgggagtagttcaacttttagaac

SEQ ID NO: 47574 - DNA, 25 bp, Probe sequence
gttcaacttttagaacacgttcctt

SEQ ID NO: 47575 - DNA, 25 bp, Probe sequence
catagttcaacggtagaatagaggt

SEQ ID NO: 47576 - DNA, 25 bp, Probe sequence
tagttcaacggtagaatagaggtct

SEQ ID NO: 47577 - DNA, 25 bp, Probe sequence
atagttcaacggtagaatagaggtc

SEQ ID NO: 47578 - DNA, 25 bp, Probe sequence
gcatagttcaacggtagaatagagg

SEQ ID NO: 47579 - DNA, 25 bp, Probe sequence
ggcatagttcaacggtagaatagag

SEQ ID NO: 47580 - DNA, 25 bp, Probe sequence
agttcaacggtagaatagaggtctc

SEQ ID NO: 47581 - DNA, 25 bp, Probe sequence
gttcaacggtagaatagaggtctcc

SEQ ID NO: 47582 - DNA, 25 bp, Probe sequence
tcaacggtagaatagaggtctccaa

SEQ ID NO: 47583 - DNA, 25 bp, Probe sequence
ttcaacggtagaatagaggtctcca

SEQ ID NO: 47584 - DNA, 25 bp, Probe sequence
tcggattgatgaaaggttatttact

SEQ ID NO: 47585 - DNA, 25 bp, Probe sequence
caaatcggattgatgaaaggttatt

SEQ ID NO: 47586 - DNA, 25 bp, Probe sequence
cggattgatgaaaggttatttactt

SEQ ID NO: 47587 - DNA, 25 bp, Probe sequence
atcggattgatgaaaggttatttac

SEQ ID NO: 47588 - DNA, 25 bp, Probe sequence
aaatcggattgatgaaaggttattt

SEQ ID NO: 47589 - DNA, 25 bp, Probe sequence
aatcggattgatgaaaggttattta

SEQ ID NO: 47590 - DNA, 25 bp, Probe sequence
tcaaatcggattgatgaaaggttat

SEQ ID NO: 47591 - DNA, 25 bp, Probe sequence
ggattgatgaaaggttatttacttt

SEQ ID NO: 47592 - DNA, 25 bp, Probe sequence
agattctataatcaaatcggattga

SEQ ID NO: 47593 - DNA, 25 bp, Probe sequence
tgccagatttaatagaaatgatcgt

SEQ ID NO: 47594 - DNA, 25 bp, Probe sequence
agaaagtcagcttacaataatgtgc

SEQ ID NO: 47595 - DNA, 25 bp, Probe sequence
agcttacaataatgtgcaagttggc

SEQ ID NO: 47596 - DNA, 25 bp, Probe sequence
gccagatttaatagaaatgatcgtt

SEQ ID NO: 47597 - DNA, 25 bp, Probe sequence
acagaaagtcagcttacaataatgt

SEQ ID NO: 47598 - DNA, 25 bp, Probe sequence
cagaaagtcagcttacaataatgtg

SEQ ID NO: 47599 - DNA, 25 bp, Probe sequence
atgccagatttaatagaaatgatcg

SEQ ID NO: 47600 - DNA, 25 bp, Probe sequence
gacagaaagtcagcttacaataatg

SEQ ID NO: 47601 - DNA, 25 bp, Probe sequence
cttacaataatgtgcaagttggcgg

SEQ ID NO: 47602 - DNA, 25 bp, Probe sequence
acgagaagaaatagatttaattggt

SEQ ID NO: 47603 - DNA, 25 bp, Probe sequence
cacgagaagaaatagatttaattgg

SEQ ID NO: 47604 - DNA, 25 bp, Probe sequence
aagtattcaaaatcacgagaagaaa

SEQ ID NO: 47605 - DNA, 25 bp, Probe sequence
aaagtattcaaaatcacgagaagaa

SEQ ID NO: 47606 - DNA, 25 bp, Probe sequence
aaaagtattcaaaatcacgagaaga

SEQ ID NO: 47607 - DNA, 25 bp, Probe sequence
agaaaagtattcaaaatcacgagaa

SEQ ID NO: 47608 - DNA, 25 bp, Probe sequence
aagaaaagtattcaaaatcacgaga

SEQ ID NO: 47609 - DNA, 25 bp, Probe sequence
gaaaagtattcaaaatcacgagaag

SEQ ID NO: 47610 - DNA, 25 bp, Probe sequence
gaagaaaagtattcaaaatcacgag

SEQ ID NO: 47611 - DNA, 25 bp, Probe sequence
tgtgtcaatttacaaaacaactcaa

SEQ ID NO: 47612 - DNA, 25 bp, Probe sequence
atgtgtcaatttacaaaacaactca

SEQ ID NO: 47613 - DNA, 25 bp, Probe sequence
gtgtcaatttacaaaacaactcaag

SEQ ID NO: 47614 - DNA, 25 bp, Probe sequence
aacgaaacatttaactttaatgctt

SEQ ID NO: 47615 - DNA, 25 bp, Probe sequence
tgtcaatttacaaaacaactcaaga

SEQ ID NO: 47616 - DNA, 25 bp, Probe sequence
gtcaatttacaaaacaactcaagaa

SEQ ID NO: 47617 - DNA, 25 bp, Probe sequence
aatgtgtcaatttacaaaacaactc

SEQ ID NO: 47618 - DNA, 25 bp, Probe sequence
taacgaaacatttaactttaatgct

SEQ ID NO: 47619 - DNA, 25 bp, Probe sequence
aaatgtgtcaatttacaaaacaact

SEQ ID NO: 47620 - DNA, 25 bp, Probe sequence
aaacaacatctaaaagccattttca

SEQ ID NO: 47621 - DNA, 25 bp, Probe sequence
aacaacatctaaaagccattttcat

SEQ ID NO: 47622 - DNA, 25 bp, Probe sequence
acaacatctaaaagccattttcata

SEQ ID NO: 47623 - DNA, 25 bp, Probe sequence
aaaacaacatctaaaagccattttc

SEQ ID NO: 47624 - DNA, 25 bp, Probe sequence
ttaaaacaacatctaaaagccattt

SEQ ID NO: 47625 - DNA, 25 bp, Probe sequence
caacatctaaaagccattttcataa

SEQ ID NO: 47626 - DNA, 25 bp, Probe sequence
taaaacaacatctaaaagccatttt

SEQ ID NO: 47627 - DNA, 25 bp, Probe sequence
tttaaaacaacatctaaaagccatt

SEQ ID NO: 47628 - DNA, 25 bp, Probe sequence
aacatctaaaagccattttcataat

SEQ ID NO: 47629 - DNA, 25 bp, Probe sequence
taaattatatacccaccacatttgg

SEQ ID NO: 47630 - DNA, 25 bp, Probe sequence
ttctttaaattatatacccaccaca

SEQ ID NO: 47631 - DNA, 25 bp, Probe sequence
gttctttaaattatatacccaccac

SEQ ID NO: 47632 - DNA, 25 bp, Probe sequence
tctttaaattatatacccaccacat

SEQ ID NO: 47633 - DNA, 25 bp, Probe sequence
agttctttaaattatatacccacca

SEQ ID NO: 47634 - DNA, 25 bp, Probe sequence
ttaaattatatacccaccacatttg

SEQ ID NO: 47635 - DNA, 25 bp, Probe sequence
aaattatatacccaccacatttggt

SEQ ID NO: 47636 - DNA, 25 bp, Probe sequence
ctttaaattatatacccaccacatt

SEQ ID NO: 47637 - DNA, 25 bp, Probe sequence
acttacaggtattggcgttattact

SEQ ID NO: 47638 - DNA, 25 bp, Probe sequence
gttacttacaggtattggcgttatt

SEQ ID NO: 47639 - DNA, 25 bp, Probe sequence
cgttacttacaggtattggcgttat

SEQ ID NO: 47640 - DNA, 25 bp, Probe sequence
tacttacaggtattggcgttattac

SEQ ID NO: 47641 - DNA, 25 bp, Probe sequence
ttacaggtattggcgttattactga

SEQ ID NO: 47642 - DNA, 25 bp, Probe sequence
tacaggtattggcgttattactgac

SEQ ID NO: 47643 - DNA, 25 bp, Probe sequence
cttacaggtattggcgttattactg

SEQ ID NO: 47644 - DNA, 25 bp, Probe sequence
ttacttacaggtattggcgttatta

SEQ ID NO: 47645 - DNA, 25 bp, Probe sequence
aagtcacggatttattcggattaga

SEQ ID NO: 47646 - DNA, 25 bp, Probe sequence
tgtagaagaattgaaagcgttgttt

SEQ ID NO: 47647 - DNA, 25 bp, Probe sequence
tagaagaattgaaagcgttgtttga

SEQ ID NO: 47648 - DNA, 25 bp, Probe sequence
gtagaagaattgaaagcgttgtttg

SEQ ID NO: 47649 - DNA, 25 bp, Probe sequence
ctgtagaagaattgaaagcgttgtt

SEQ ID NO: 47650 - DNA, 25 bp, Probe sequence
aactgtagaagaattgaaagcgttg

SEQ ID NO: 47651 - DNA, 25 bp, Probe sequence
actgtagaagaattgaaagcgttgt

SEQ ID NO: 47652 - DNA, 25 bp, Probe sequence
caactgtagaagaattgaaagcgtt

SEQ ID NO: 47653 - DNA, 25 bp, Probe sequence
gtggtttcttagaatttggtactcg

SEQ ID NO: 47654 - DNA, 25 bp, Probe sequence
agtggtttcttagaatttggtactc

SEQ ID NO: 47655 - DNA, 25 bp, Probe sequence
gatgtattagaagttattgaggcgt

SEQ ID NO: 47656 - DNA, 25 bp, Probe sequence
tgtattagaagttattgaggcgttc

SEQ ID NO: 47657 - DNA, 25 bp, Probe sequence
agatgtattagaagttattgaggcg

SEQ ID NO: 47658 - DNA, 25 bp, Probe sequence
atgtattagaagttattgaggcgtt

SEQ ID NO: 47659 - DNA, 25 bp, Probe sequence
aggctctgttgatggtggttatatt

SEQ ID NO: 47660 - DNA, 25 bp, Probe sequence
aaggctctgttgatggtggttatat

SEQ ID NO: 47661 - DNA, 25 bp, Probe sequence
gtattagaagttattgaggcgttca

SEQ ID NO: 47662 - DNA, 25 bp, Probe sequence
agtgttaagtgattattacgaaggt

SEQ ID NO: 47663 - DNA, 25 bp, Probe sequence
gaaggctctgttgatggtggttata

SEQ ID NO: 47664 - DNA, 25 bp, Probe sequence
aaggtcatcaagtataaagacaacg

SEQ ID NO: 47665 - DNA, 25 bp, Probe sequence
cttctatatgagcaagagctaggat

SEQ ID NO: 47666 - DNA, 25 bp, Probe sequence
ttctatatgagcaagagctaggatt

SEQ ID NO: 47667 - DNA, 25 bp, Probe sequence
gcttctatatgagcaagagctagga

SEQ ID NO: 47668 - DNA, 25 bp, Probe sequence
aggtcatcaagtataaagacaacgt

SEQ ID NO: 47669 - DNA, 25 bp, Probe sequence
ggcttctatatgagcaagagctagg

SEQ ID NO: 47670 - DNA, 25 bp, Probe sequence
ggtcatcaagtataaagacaacgta

SEQ ID NO: 47671 - DNA, 25 bp, Probe sequence
taaggtcatcaagtataaagacaac

SEQ ID NO: 47672 - DNA, 25 bp, Probe sequence
gggcttctatatgagcaagagctag

SEQ ID NO: 47673 - DNA, 25 bp, Probe sequence
gcagttattaaattaggtcagttgt

SEQ ID NO: 47674 - DNA, 25 bp, Probe sequence
gggatgcagttattaaattaggtca

SEQ ID NO: 47675 - DNA, 25 bp, Probe sequence
agggatgcagttattaaattaggtc

SEQ ID NO: 47676 - DNA, 25 bp, Probe sequence
aagggatgcagttattaaattaggt

SEQ ID NO: 47677 - DNA, 25 bp, Probe sequence
ggatgcagttattaaattaggtcag

SEQ ID NO: 47678 - DNA, 25 bp, Probe sequence
tgcagttattaaattaggtcagttg

SEQ ID NO: 47679 - DNA, 25 bp, Probe sequence
aaagggatgcagttattaaattagg

SEQ ID NO: 47680 - DNA, 25 bp, Probe sequence
gatgcagttattaaattaggtcagt

SEQ ID NO: 47681 - DNA, 25 bp, Probe sequence
atgcagttattaaattaggtcagtt

SEQ ID NO: 47682 - DNA, 25 bp, Probe sequence
ggcacaagttaagataaggagagat

SEQ ID NO: 47683 - DNA, 25 bp, Probe sequence
atacgaggcacaagttaagataagg

SEQ ID NO: 47684 - DNA, 25 bp, Probe sequence
ttaagataaggagagatggagatgc

SEQ ID NO: 47685 - DNA, 25 bp, Probe sequence
taagataaggagagatggagatgcc

SEQ ID NO: 47686 - DNA, 25 bp, Probe sequence
gcacaagttaagataaggagagatg

SEQ ID NO: 47687 - DNA, 25 bp, Probe sequence
gaggcacaagttaagataaggagag

SEQ ID NO: 47688 - DNA, 25 bp, Probe sequence
aggcacaagttaagataaggagaga

SEQ ID NO: 47689 - DNA, 25 bp, Probe sequence
aatacgaggcacaagttaagataag

SEQ ID NO: 47690 - DNA, 25 bp, Probe sequence
tacgaggcacaagttaagataagga

SEQ ID NO: 47691 - DNA, 25 bp, Probe sequence
atcttatgtaatgtgactggatacg

SEQ ID NO: 47692 - DNA, 25 bp, Probe sequence
tcttatgtaatgtgactggatacgt

SEQ ID NO: 47693 - DNA, 25 bp, Probe sequence
catcttatgtaatgtgactggatac

SEQ ID NO: 47694 - DNA, 25 bp, Probe sequence
cttatgtaatgtgactggatacgta

SEQ ID NO: 47695 - DNA, 25 bp, Probe sequence
ttgtgtgacttttgatgttgatagc

SEQ ID NO: 47696 - DNA, 25 bp, Probe sequence
ctgttgtgtgacttttgatgttgat

SEQ ID NO: 47697 - DNA, 25 bp, Probe sequence
tgttgtgtgacttttgatgttgata

SEQ ID NO: 47698 - DNA, 25 bp, Probe sequence
gtgtgacttttgatgttgatagcat

SEQ ID NO: 47699 - DNA, 25 bp, Probe sequence
gttgtgtgacttttgatgttgatag

SEQ ID NO: 47700 - DNA, 25 bp, Probe sequence
gtcattacggcattttcaacattaa

SEQ ID NO: 47701 - DNA, 25 bp, Probe sequence
tcattacggcattttcaacattaat

SEQ ID NO: 47702 - DNA, 25 bp, Probe sequence
atgatattagtgatacacatcaact

SEQ ID NO: 47703 - DNA, 25 bp, Probe sequence
tcaatgatattagtgatacacatca

SEQ ID NO: 47704 - DNA, 25 bp, Probe sequence
cgtcattacggcattttcaacatta

SEQ ID NO: 47705 - DNA, 25 bp, Probe sequence
cattacggcattttcaacattaata

SEQ ID NO: 47706 - DNA, 25 bp, Probe sequence
tgatattagtgatacacatcaacta

SEQ ID NO: 47707 - DNA, 25 bp, Probe sequence
caatgatattagtgatacacatcaa

SEQ ID NO: 47708 - DNA, 25 bp, Probe sequence
aatgatattagtgatacacatcaac

SEQ ID NO: 47709 - DNA, 25 bp, Probe sequence
gctaatactgaacaatatggtgctg

SEQ ID NO: 47710 - DNA, 25 bp, Probe sequence
aagtgacacagtgattcttgcttat

SEQ ID NO: 47711 - DNA, 25 bp, Probe sequence
agtgacacagtgattcttgcttatg

SEQ ID NO: 47712 - DNA, 25 bp, Probe sequence
ccatacgatgagcacactgatattc

SEQ ID NO: 47713 - DNA, 25 bp, Probe sequence
catacgatgagcacactgatattca

SEQ ID NO: 47714 - DNA, 25 bp, Probe sequence
atccatacgatgagcacactgatat

SEQ ID NO: 47715 - DNA, 25 bp, Probe sequence
tccatacgatgagcacactgatatt

SEQ ID NO: 47716 - DNA, 25 bp, Probe sequence
aatccatacgatgagcacactgata

SEQ ID NO: 47717 - DNA, 25 bp, Probe sequence
gtgattcttgcttatggtgcctatg

SEQ ID NO: 47718 - DNA, 25 bp, Probe sequence
tcaatcatacatgagcaagaacaac

SEQ ID NO: 47719 - DNA, 25 bp, Probe sequence
caatcatacatgagcaagaacaacc

SEQ ID NO: 47720 - DNA, 25 bp, Probe sequence
ttcaatcatacatgagcaagaacaa

SEQ ID NO: 47721 - DNA, 25 bp, Probe sequence
aagaggcattagtgaacacctatct

SEQ ID NO: 47722 - DNA, 25 bp, Probe sequence
caagaggcattagtgaacacctatc

SEQ ID NO: 47723 - DNA, 25 bp, Probe sequence
agaggcattagtgaacacctatctc

SEQ ID NO: 47724 - DNA, 25 bp, Probe sequence
acaagaggcattagtgaacacctat

SEQ ID NO: 47725 - DNA, 25 bp, Probe sequence
atccgagaagatgatgtagatgttt

SEQ ID NO: 47726 - DNA, 25 bp, Probe sequence
cacaagaggcattagtgaacaccta

SEQ ID NO: 47727 - DNA, 25 bp, Probe sequence
gacctaatccactcaatgatagcaa

SEQ ID NO: 47728 - DNA, 25 bp, Probe sequence
acctaatccactcaatgatagcaac

SEQ ID NO: 47729 - DNA, 25 bp, Probe sequence
cctaatccactcaatgatagcaacc

SEQ ID NO: 47730 - DNA, 25 bp, Probe sequence
tcggacctaatccactcaatgatag

SEQ ID NO: 47731 - DNA, 25 bp, Probe sequence
gtcggacctaatccactcaatgata

SEQ ID NO: 47732 - DNA, 25 bp, Probe sequence
accagaaggacaaacatttactttc

SEQ ID NO: 47733 - DNA, 25 bp, Probe sequence
ggacctaatccactcaatgatagca

SEQ ID NO: 47734 - DNA, 25 bp, Probe sequence
ctaatccactcaatgatagcaaccc

SEQ ID NO: 47735 - DNA, 25 bp, Probe sequence
tttaccagaaggacaaacatttact

SEQ ID NO: 47736 - DNA, 25 bp, Probe sequence
aaacgacatcacttccatatacaac

SEQ ID NO: 47737 - DNA, 25 bp, Probe sequence
gcaaatgagcaattagatgaacaga

SEQ ID NO: 47738 - DNA, 25 bp, Probe sequence
ctacgcaaatgagcaattagatgaa

SEQ ID NO: 47739 - DNA, 25 bp, Probe sequence
tacgcaaatgagcaattagatgaac

SEQ ID NO: 47740 - DNA, 25 bp, Probe sequence
aactacgcaaatgagcaattagatg

SEQ ID NO: 47741 - DNA, 25 bp, Probe sequence
acttaactacgcaaatgagcaatta

SEQ ID NO: 47742 - DNA, 25 bp, Probe sequence
tacttaactacgcaaatgagcaatt

SEQ ID NO: 47743 - DNA, 25 bp, Probe sequence
actacgcaaatgagcaattagatga

SEQ ID NO: 47744 - DNA, 25 bp, Probe sequence
ttaactacgcaaatgagcaattaga

SEQ ID NO: 47745 - DNA, 25 bp, Probe sequence
acctataacgacgcatacattacat

SEQ ID NO: 47746 - DNA, 25 bp, Probe sequence
aacctataacgacgcatacattaca

SEQ ID NO: 47747 - DNA, 25 bp, Probe sequence
cctataacgacgcatacattacatc

SEQ ID NO: 47748 - DNA, 25 bp, Probe sequence
ataacgacgcatacattacatcatt

SEQ ID NO: 47749 - DNA, 25 bp, Probe sequence
ctataacgacgcatacattacatca

SEQ ID NO: 47750 - DNA, 25 bp, Probe sequence
tataacgacgcatacattacatcat

SEQ ID NO: 47751 - DNA, 25 bp, Probe sequence
aagaacacttatgcttggaatgata

SEQ ID NO: 47752 - DNA, 25 bp, Probe sequence
agaacacttatgcttggaatgataa

SEQ ID NO: 47753 - DNA, 25 bp, Probe sequence
actaagaacacttatgcttggaatg

SEQ ID NO: 47754 - DNA, 25 bp, Probe sequence
gctatgccattcaatacttaactgc

SEQ ID NO: 47755 - DNA, 25 bp, Probe sequence
attggcagtgctattataacgattg

SEQ ID NO: 47756 - DNA, 25 bp, Probe sequence
cattggcagtgctattataacgatt

SEQ ID NO: 47757 - DNA, 25 bp, Probe sequence
taccattggcagtgctattataacg

SEQ ID NO: 47758 - DNA, 25 bp, Probe sequence
ataccattggcagtgctattataac

SEQ ID NO: 47759 - DNA, 25 bp, Probe sequence
ccattggcagtgctattataacgat

SEQ ID NO: 47760 - DNA, 25 bp, Probe sequence
ttatataccattggcagtgctatta

SEQ ID NO: 47761 - DNA, 25 bp, Probe sequence
accattggcagtgctattataacga

SEQ ID NO: 47762 - DNA, 25 bp, Probe sequence
atataccattggcagtgctattata

SEQ ID NO: 47763 - DNA, 25 bp, Probe sequence
agtgtcatcatgcttatcgtcttat

SEQ ID NO: 47764 - DNA, 25 bp, Probe sequence
gtgtcatcatgcttatcgtcttatt

SEQ ID NO: 47765 - DNA, 25 bp, Probe sequence
aagtgtcatcatgcttatcgtctta

SEQ ID NO: 47766 - DNA, 25 bp, Probe sequence
aaagtgtcatcatgcttatcgtctt

SEQ ID NO: 47767 - DNA, 25 bp, Probe sequence
tgtcatcatgcttatcgtcttattt

SEQ ID NO: 47768 - DNA, 25 bp, Probe sequence
ggcatgttctacaaacgtaaacttt

SEQ ID NO: 47769 - DNA, 25 bp, Probe sequence
tgatagaggttgtttgaaaagtgtc

SEQ ID NO: 47770 - DNA, 25 bp, Probe sequence
ctgatagaggttgtttgaaaagtgt

SEQ ID NO: 47771 - DNA, 25 bp, Probe sequence
agaaactgatagaggttgtttgaaa

SEQ ID NO: 47772 - DNA, 25 bp, Probe sequence
tgaaggttactggacttatgatgaa

SEQ ID NO: 47773 - DNA, 25 bp, Probe sequence
ttgaaggttactggacttatgatga

SEQ ID NO: 47774 - DNA, 25 bp, Probe sequence
gttgaaggttactggacttatgatg

SEQ ID NO: 47775 - DNA, 25 bp, Probe sequence
agttgaaggttactggacttatgat

SEQ ID NO: 47776 - DNA, 25 bp, Probe sequence
aagatgaggacacagttgaaggtta

SEQ ID NO: 47777 - DNA, 25 bp, Probe sequence
agatgaggacacagttgaaggttac

SEQ ID NO: 47778 - DNA, 25 bp, Probe sequence
gatgaggacacagttgaaggttact

SEQ ID NO: 47779 - DNA, 25 bp, Probe sequence
atttggaactaaagatgaggacaca

SEQ ID NO: 47780 - DNA, 25 bp, Probe sequence
taaacaacaaactatcatcggtgga

SEQ ID NO: 47781 - DNA, 25 bp, Probe sequence
atcattagaagaaggtcaagctgtt

SEQ ID NO: 47782 - DNA, 25 bp, Probe sequence
aatcattagaagaaggtcaagctgt

SEQ ID NO: 47783 - DNA, 25 bp, Probe sequence
acaaatcattagaagaaggtcaagc

SEQ ID NO: 47784 - DNA, 25 bp, Probe sequence
tcattagaagaaggtcaagctgttg

SEQ ID NO: 47785 - DNA, 25 bp, Probe sequence
tggttacaaatcattagaagaaggt

SEQ ID NO: 47786 - DNA, 25 bp, Probe sequence
tgaaacaaggtacagttaaatggtt

SEQ ID NO: 47787 - DNA, 25 bp, Probe sequence
atgaaacaaggtacagttaaatggt

SEQ ID NO: 47788 - DNA, 25 bp, Probe sequence
ggttacaaatcattagaagaaggtc

SEQ ID NO: 47789 - DNA, 25 bp, Probe sequence
aaatcattagaagaaggtcaagctg

SEQ ID NO: 47790 - DNA, 25 bp, Probe sequence
ccaacacagaagatgacgaaaagtc

SEQ ID NO: 47791 - DNA, 25 bp, Probe sequence
cccaacacagaagatgacgaaaagt

SEQ ID NO: 47792 - DNA, 25 bp, Probe sequence
gatgacgaaaagtcagcttacaata

SEQ ID NO: 47793 - DNA, 25 bp, Probe sequence
agatgacgaaaagtcagcttacaat

SEQ ID NO: 47794 - DNA, 25 bp, Probe sequence
aagatgacgaaaagtcagcttacaa

SEQ ID NO: 47795 - DNA, 25 bp, Probe sequence
aacacagaagatgacgaaaagtcag

SEQ ID NO: 47796 - DNA, 25 bp, Probe sequence
atgacgaaaagtcagcttacaataa

SEQ ID NO: 47797 - DNA, 25 bp, Probe sequence
agaagatgacgaaaagtcagcttac

SEQ ID NO: 47798 - DNA, 25 bp, Probe sequence
cagaagatgacgaaaagtcagctta

SEQ ID NO: 47799 - DNA, 25 bp, Probe sequence
tatcggtgttcaatctgagaatgtt

SEQ ID NO: 47800 - DNA, 25 bp, Probe sequence
ttatcggtgttcaatctgagaatgt

SEQ ID NO: 47801 - DNA, 25 bp, Probe sequence
attatcggtgttcaatctgagaatg

SEQ ID NO: 47802 - DNA, 25 bp, Probe sequence
ttggaatgtgaatacagtcatcgta

SEQ ID NO: 47803 - DNA, 25 bp, Probe sequence
atcggtgttcaatctgagaatgttc

SEQ ID NO: 47804 - DNA, 25 bp, Probe sequence
ccttcaattcatattatcggtgttc

SEQ ID NO: 47805 - DNA, 25 bp, Probe sequence
catattatcggtgttcaatctgaga

SEQ ID NO: 47806 - DNA, 25 bp, Probe sequence
tcatattatcggtgttcaatctgag

SEQ ID NO: 47807 - DNA, 25 bp, Probe sequence
cggtgttcaatctgagaatgttcat

SEQ ID NO: 47808 - DNA, 25 bp, Probe sequence
ttacaagtctatctggcgtacaatt

SEQ ID NO: 47809 - DNA, 25 bp, Probe sequence
aattacaagtctatctggcgtacaa

SEQ ID NO: 47810 - DNA, 25 bp, Probe sequence
attacaagtctatctggcgtacaat

SEQ ID NO: 47811 - DNA, 25 bp, Probe sequence
gctaattacaagtctatctggcgta

SEQ ID NO: 47812 - DNA, 25 bp, Probe sequence
cttctatatctgatgatgacagcgt

SEQ ID NO: 47813 - DNA, 25 bp, Probe sequence
tcttctatatctgatgatgacagcg

SEQ ID NO: 47814 - DNA, 25 bp, Probe sequence
ttctatatctgatgatgacagcgtt

SEQ ID NO: 47815 - DNA, 25 bp, Probe sequence
taattacaagtctatctggcgtaca

SEQ ID NO: 47816 - DNA, 25 bp, Probe sequence
tctatatctgatgatgacagcgtta

SEQ ID NO: 47817 - DNA, 25 bp, Probe sequence
gcattggctatgaagaaatctatgg

SEQ ID NO: 47818 - DNA, 25 bp, Probe sequence
cattggctatgaagaaatctatggg

SEQ ID NO: 47819 - DNA, 25 bp, Probe sequence
agcattggctatgaagaaatctatg

SEQ ID NO: 47820 - DNA, 25 bp, Probe sequence
attggctatgaagaaatctatgggg

SEQ ID NO: 47821 - DNA, 25 bp, Probe sequence
ggctatgaagaaatctatggggata

SEQ ID NO: 47822 - DNA, 25 bp, Probe sequence
tggctatgaagaaatctatggggat

SEQ ID NO: 47823 - DNA, 25 bp, Probe sequence
ttggctatgaagaaatctatgggga

SEQ ID NO: 47824 - DNA, 25 bp, Probe sequence
ttggaaaaccgtcaatcaaataatt

SEQ ID NO: 47825 - DNA, 25 bp, Probe sequence
gctatgaagaaatctatggggatag

SEQ ID NO: 47826 - DNA, 25 bp, Probe sequence
atggatggttattctattagtggtt

SEQ ID NO: 47827 - DNA, 25 bp, Probe sequence
aatggatggttattctattagtggt

SEQ ID NO: 47828 - DNA, 25 bp, Probe sequence
caatggatggttattctattagtgg

SEQ ID NO: 47829 - DNA, 25 bp, Probe sequence
tggatggttattctattagtggtta

SEQ ID NO: 47830 - DNA, 25 bp, Probe sequence
agctggtataagatctgttgatgat

SEQ ID NO: 47831 - DNA, 25 bp, Probe sequence
ccaatggatggttattctattagtg

SEQ ID NO: 47832 - DNA, 25 bp, Probe sequence
gctggtataagatctgttgatgatt

SEQ ID NO: 47833 - DNA, 25 bp, Probe sequence
ggatggttattctattagtggttat

SEQ ID NO: 47834 - DNA, 25 bp, Probe sequence
cccaatggatggttattctattagt

SEQ ID NO: 47835 - DNA, 25 bp, Probe sequence
aggcaagttgactaataatgaagat

SEQ ID NO: 47836 - DNA, 25 bp, Probe sequence
taggcaagttgactaataatgaaga

SEQ ID NO: 47837 - DNA, 25 bp, Probe sequence
gccaacaatcccatatacatacaat

SEQ ID NO: 47838 - DNA, 25 bp, Probe sequence
cgccaacaatcccatatacatacaa

SEQ ID NO: 47839 - DNA, 25 bp, Probe sequence
atgatgttgaaagagttgctaaagc

SEQ ID NO: 47840 - DNA, 25 bp, Probe sequence
ggcaagttgactaataatgaagata

SEQ ID NO: 47841 - DNA, 25 bp, Probe sequence
ataggcaagttgactaataatgaag

SEQ ID NO: 47842 - DNA, 25 bp, Probe sequence
accagatttaattgttgtagatgct

SEQ ID NO: 47843 - DNA, 25 bp, Probe sequence
atggattgaagagtgggacgataaa

SEQ ID NO: 47844 - DNA, 25 bp, Probe sequence
ttgtggatgatataccgttagaaga

SEQ ID NO: 47845 - DNA, 25 bp, Probe sequence
tgtggatgatataccgttagaagat

SEQ ID NO: 47846 - DNA, 25 bp, Probe sequence
ttgtagtcaagcgtggagaatataa

SEQ ID NO: 47847 - DNA, 25 bp, Probe sequence
gttgtagtcaagcgtggagaatata

SEQ ID NO: 47848 - DNA, 25 bp, Probe sequence
cgcacatcaagcaatatatacaaga

SEQ ID NO: 47849 - DNA, 25 bp, Probe sequence
attgtggatgatataccgttagaag

SEQ ID NO: 47850 - DNA, 25 bp, Probe sequence
gattgtggatgatataccgttagaa

SEQ ID NO: 47851 - DNA, 25 bp, Probe sequence
ccgcacatcaagcaatatatacaag

SEQ ID NO: 47852 - DNA, 25 bp, Probe sequence
gtggatgatataccgttagaagatt

SEQ ID NO: 47853 - DNA, 25 bp, Probe sequence
ttcatttgatttcttacacagttgc

SEQ ID NO: 47854 - DNA, 25 bp, Probe sequence
tctttgggtacttcatcatatttgc

SEQ ID NO: 47855 - DNA, 25 bp, Probe sequence
gggtcatcatggttattatagggtt

SEQ ID NO: 47856 - DNA, 25 bp, Probe sequence
ttgggtcatcatggttattataggg

SEQ ID NO: 47857 - DNA, 25 bp, Probe sequence
tgggtcatcatggttattatagggt

SEQ ID NO: 47858 - DNA, 25 bp, Probe sequence
ggtcatcatggttattatagggttc

SEQ ID NO: 47859 - DNA, 25 bp, Probe sequence
agggtttggtttatatggattaagt

SEQ ID NO: 47860 - DNA, 25 bp, Probe sequence
ttaggttgggtgactttacatataa

SEQ ID NO: 47861 - DNA, 25 bp, Probe sequence
tttaggttgggtgactttacatata

SEQ ID NO: 47862 - DNA, 25 bp, Probe sequence
ctttgtaccatttgaatctcggaaa

SEQ ID NO: 47863 - DNA, 25 bp, Probe sequence
tactttgtaccatttgaatctcgga

SEQ ID NO: 47864 - DNA, 25 bp, Probe sequence
actttgtaccatttgaatctcggaa

SEQ ID NO: 47865 - DNA, 25 bp, Probe sequence
atgccactatttatgacgataattt

SEQ ID NO: 47866 - DNA, 25 bp, Probe sequence
aatgccactatttatgacgataatt

SEQ ID NO: 47867 - DNA, 25 bp, Probe sequence
ttgaatctcggaaaatgccactatt

SEQ ID NO: 47868 - DNA, 25 bp, Probe sequence
tttgaatctcggaaaatgccactat

SEQ ID NO: 47869 - DNA, 25 bp, Probe sequence
aaatgccactatttatgacgataat

SEQ ID NO: 47870 - DNA, 25 bp, Probe sequence
gtactttgtaccatttgaatctcgg

SEQ ID NO: 47871 - DNA, 25 bp, Probe sequence
ttaggtgaactcaatgtatcagatt

SEQ ID NO: 47872 - DNA, 25 bp, Probe sequence
taagaagtctattgggcgtattgaa

SEQ ID NO: 47873 - DNA, 25 bp, Probe sequence
ataagaagtctattgggcgtattga

SEQ ID NO: 47874 - DNA, 25 bp, Probe sequence
aagaagtctattgggcgtattgaaa

SEQ ID NO: 47875 - DNA, 25 bp, Probe sequence
attaggtgaactcaatgtatcagat

SEQ ID NO: 47876 - DNA, 25 bp, Probe sequence
actcaatgtatcagatttaagcgac

SEQ ID NO: 47877 - DNA, 25 bp, Probe sequence
agaagtctattgggcgtattgaaag

SEQ ID NO: 47878 - DNA, 25 bp, Probe sequence
atgtatcagatttaagcgacttcct

SEQ ID NO: 47879 - DNA, 25 bp, Probe sequence
aagtctattgggcgtattgaaagat

SEQ ID NO: 47880 - DNA, 25 bp, Probe sequence
ttagatggtatggaaggttcaatgg

SEQ ID NO: 47881 - DNA, 25 bp, Probe sequence
tagatggtatggaaggttcaatggt

SEQ ID NO: 47882 - DNA, 25 bp, Probe sequence
attagatggtatggaaggttcaatg

SEQ ID NO: 47883 - DNA, 25 bp, Probe sequence
gtcattacggttgttgtactgttag

SEQ ID NO: 47884 - DNA, 25 bp, Probe sequence
tgtcattacggttgttgtactgtta

SEQ ID NO: 47885 - DNA, 25 bp, Probe sequence
atgtcattacggttgttgtactgtt

SEQ ID NO: 47886 - DNA, 25 bp, Probe sequence
aatgtcattacggttgttgtactgt

SEQ ID NO: 47887 - DNA, 25 bp, Probe sequence
tcattacggttgttgtactgttagc

SEQ ID NO: 47888 - DNA, 25 bp, Probe sequence
tacggttgttgtactgttagcaatt

SEQ ID NO: 47889 - DNA, 25 bp, Probe sequence
tcaaggttacggcagtctaattatg

SEQ ID NO: 47890 - DNA, 25 bp, Probe sequence
gtcaaggttacggcagtctaattat

SEQ ID NO: 47891 - DNA, 25 bp, Probe sequence
aaggttacggcagtctaattatgga

SEQ ID NO: 47892 - DNA, 25 bp, Probe sequence
caaggttacggcagtctaattatgg

SEQ ID NO: 47893 - DNA, 25 bp, Probe sequence
ttatacctaccgaaccagattcagg

SEQ ID NO: 47894 - DNA, 25 bp, Probe sequence
aggttacggcagtctaattatggag

SEQ ID NO: 47895 - DNA, 25 bp, Probe sequence
ggatttatacctaccgaaccagatt

SEQ ID NO: 47896 - DNA, 25 bp, Probe sequence
gagtacatacgttagtctgattgca

SEQ ID NO: 47897 - DNA, 25 bp, Probe sequence
tatattaaaggtgtggctgttgaga

SEQ ID NO: 47898 - DNA, 25 bp, Probe sequence
atcaagtaggttatcaaggacaagt

SEQ ID NO: 47899 - DNA, 25 bp, Probe sequence
tcagcattacttggtattacagaac

SEQ ID NO: 47900 - DNA, 25 bp, Probe sequence
aatcaagtaggttatcaaggacaag

SEQ ID NO: 47901 - DNA, 25 bp, Probe sequence
ggatcaggtattggttcagcatata

SEQ ID NO: 47902 - DNA, 25 bp, Probe sequence
atgctccgattgttattacaggtat

SEQ ID NO: 47903 - DNA, 25 bp, Probe sequence
ctatcgttggatcaggtattggttc

SEQ ID NO: 47904 - DNA, 25 bp, Probe sequence
tatgctccgattgttattacaggta

SEQ ID NO: 47905 - DNA, 25 bp, Probe sequence
tgctccgattgttattacaggtatg

SEQ ID NO: 47906 - DNA, 25 bp, Probe sequence
gtatgctccgattgttattacaggt

SEQ ID NO: 47907 - DNA, 25 bp, Probe sequence
cgattcacaatatctgtccacacaa

SEQ ID NO: 47908 - DNA, 25 bp, Probe sequence
attcatgcgattcacaatatctgtc

SEQ ID NO: 47909 - DNA, 25 bp, Probe sequence
aattcatgcgattcacaatatctgt

SEQ ID NO: 47910 - DNA, 25 bp, Probe sequence
ttcatgcgattcacaatatctgtcc

SEQ ID NO: 47911 - DNA, 25 bp, Probe sequence
atgcgattcacaatatctgtccaca

SEQ ID NO: 47912 - DNA, 25 bp, Probe sequence
attcacaatatctgtccacacaaac

SEQ ID NO: 47913 - DNA, 25 bp, Probe sequence
gattcacaatatctgtccacacaaa

SEQ ID NO: 47914 - DNA, 25 bp, Probe sequence
catgcgattcacaatatctgtccac

SEQ ID NO: 47915 - DNA, 25 bp, Probe sequence
cacaatatctgtccacacaaacaag

SEQ ID NO: 47916 - DNA, 25 bp, Probe sequence
aatgaagcaagtaatggtacagcaa

SEQ ID NO: 47917 - DNA, 25 bp, Probe sequence
tgtaggtctcgtttatgctttctta

SEQ ID NO: 47918 - DNA, 25 bp, Probe sequence
tttgctttcttaggtaactttgtcg

SEQ ID NO: 47919 - DNA, 25 bp, Probe sequence
caggtctatatgcaggtatggtatt

SEQ ID NO: 47920 - DNA, 25 bp, Probe sequence
actcacgtagatggacttatcaatt

SEQ ID NO: 47921 - DNA, 25 bp, Probe sequence
aaatggtaagcgtaatcgtttagag

SEQ ID NO: 47922 - DNA, 25 bp, Probe sequence
ttgtaggtctcgtttatgctttctt

SEQ ID NO: 47923 - DNA, 25 bp, Probe sequence
tttgtaggtctcgtttatgctttct

SEQ ID NO: 47924 - DNA, 25 bp, Probe sequence
ggtctatatgcaggtatggtattct

SEQ ID NO: 47925 - DNA, 25 bp, Probe sequence
aattatagcattgatgaacaaggcg

SEQ ID NO: 47926 - DNA, 25 bp, Probe sequence
taattatagcattgatgaacaaggc

SEQ ID NO: 47927 - DNA, 25 bp, Probe sequence
ctaattatagcattgatgaacaagg

SEQ ID NO: 47928 - DNA, 25 bp, Probe sequence
gaacaaggcgctcaacgtaatatta

SEQ ID NO: 47929 - DNA, 25 bp, Probe sequence
attatagcattgatgaacaaggcgc

SEQ ID NO: 47930 - DNA, 25 bp, Probe sequence
actaattatagcattgatgaacaag

SEQ ID NO: 47931 - DNA, 25 bp, Probe sequence
aactaattatagcattgatgaacaa

SEQ ID NO: 47932 - DNA, 25 bp, Probe sequence
atgaacaaggcgctcaacgtaatat

SEQ ID NO: 47933 - DNA, 25 bp, Probe sequence
tgaacaaggcgctcaacgtaatatt

SEQ ID NO: 47934 - DNA, 25 bp, Probe sequence
gggatttggtgtatttagatgttca

SEQ ID NO: 47935 - DNA, 25 bp, Probe sequence
ggatttggtgtatttagatgttcaa

SEQ ID NO: 47936 - DNA, 25 bp, Probe sequence
ggggatttggtgtatttagatgttc

SEQ ID NO: 47937 - DNA, 25 bp, Probe sequence
aggggatttggtgtatttagatgtt

SEQ ID NO: 47938 - DNA, 25 bp, Probe sequence
gaggggatttggtgtatttagatgt

SEQ ID NO: 47939 - DNA, 25 bp, Probe sequence
tgaggggatttggtgtatttagatg

SEQ ID NO: 47940 - DNA, 25 bp, Probe sequence
gtgaggggatttggtgtatttagat

SEQ ID NO: 47941 - DNA, 25 bp, Probe sequence
tagtgaggggatttggtgtatttag

SEQ ID NO: 47942 - DNA, 25 bp, Probe sequence
gtagtgaggggatttggtgtattta

SEQ ID NO: 47943 - DNA, 25 bp, Probe sequence
aagtgctgtgattgaaggatacatc

SEQ ID NO: 47944 - DNA, 25 bp, Probe sequence
gaagtgctgtgattgaaggatacat

SEQ ID NO: 47945 - DNA, 25 bp, Probe sequence
agaacaacaagaacgtattacactc

SEQ ID NO: 47946 - DNA, 25 bp, Probe sequence
agcgatttactacaaagaacaacaa

SEQ ID NO: 47947 - DNA, 25 bp, Probe sequence
aagcgatttactacaaagaacaaca

SEQ ID NO: 47948 - DNA, 25 bp, Probe sequence
gcgatttactacaaagaacaacaag

SEQ ID NO: 47949 - DNA, 25 bp, Probe sequence
aagaacaacaagaacgtattacact

SEQ ID NO: 47950 - DNA, 25 bp, Probe sequence
gcataatactaaagaaacgaacacg

SEQ ID NO: 47951 - DNA, 25 bp, Probe sequence
gaacaacaagaacgtattacactct

SEQ ID NO: 47952 - DNA, 25 bp, Probe sequence
gcataacactaaagaaccgaataca

SEQ ID NO: 47953 - DNA, 25 bp, Probe sequence
aaattaagcgagttactaaagccag

SEQ ID NO: 47954 - DNA, 25 bp, Probe sequence
atttggtggtgctatgatagaaagt

SEQ ID NO: 47955 - DNA, 25 bp, Probe sequence
caatttggtggtgctatgatagaaa

SEQ ID NO: 47956 - DNA, 25 bp, Probe sequence
aatttggtggtgctatgatagaaag

SEQ ID NO: 47957 - DNA, 25 bp, Probe sequence
acactaaagaaccgaatacaatcaa

SEQ ID NO: 47958 - DNA, 25 bp, Probe sequence
aacactaaagaaccgaatacaatca

SEQ ID NO: 47959 - DNA, 25 bp, Probe sequence
tactaaagccagccaatcagttaaa

SEQ ID NO: 47960 - DNA, 25 bp, Probe sequence
ttactaaagccagccaatcagttaa

SEQ ID NO: 47961 - DNA, 25 bp, Probe sequence
caggagcgtattacactctatctta

SEQ ID NO: 47962 - DNA, 25 bp, Probe sequence
acaggagcgtattacactctatctt

SEQ ID NO: 47963 - DNA, 25 bp, Probe sequence
aggagcgtattacactctatcttaa

SEQ ID NO: 47964 - DNA, 25 bp, Probe sequence
aaaccagtacatcaaaccaaatcac

SEQ ID NO: 47965 - DNA, 25 bp, Probe sequence
tactaaagaacccaataccatcaaa

SEQ ID NO: 47966 - DNA, 25 bp, Probe sequence
cgatgcagtaattgaaggttacata

SEQ ID NO: 47967 - DNA, 25 bp, Probe sequence
aaccagtacatcaaaccaaatcacc

SEQ ID NO: 47968 - DNA, 25 bp, Probe sequence
atactaaagaacccaataccatcaa

SEQ ID NO: 47969 - DNA, 25 bp, Probe sequence
aatactaaagaacccaataccatca

SEQ ID NO: 47970 - DNA, 25 bp, Probe sequence
tatcaatcgcaatactagaaccaca

SEQ ID NO: 47971 - DNA, 25 bp, Probe sequence
atcaatcgcaatactagaaccacaa

SEQ ID NO: 47972 - DNA, 25 bp, Probe sequence
atatcaatcgcaatactagaaccac

SEQ ID NO: 47973 - DNA, 25 bp, Probe sequence
tatatcaatcgcaatactagaacca

SEQ ID NO: 47974 - DNA, 25 bp, Probe sequence
taaggatatggaaacgagaggaatg

SEQ ID NO: 47975 - DNA, 25 bp, Probe sequence
gtaaggatatggaaacgagaggaat

SEQ ID NO: 47976 - DNA, 25 bp, Probe sequence
aaaggtaaggatatggaaacgagag

SEQ ID NO: 47977 - DNA, 25 bp, Probe sequence
aagccactaccgaatgacaagttaa

SEQ ID NO: 47978 - DNA, 25 bp, Probe sequence
aagtgaaatgacagatgacagtaac

SEQ ID NO: 47979 - DNA, 25 bp, Probe sequence
aatcctaatgtgccaagttattctg

SEQ ID NO: 47980 - DNA, 25 bp, Probe sequence
atcctaatgtgccaagttattctgc

SEQ ID NO: 47981 - DNA, 25 bp, Probe sequence
tatcaatcgcaatactagaacaacg

SEQ ID NO: 47982 - DNA, 25 bp, Probe sequence
attgattggaggttgtgtcattatg

SEQ ID NO: 47983 - DNA, 25 bp, Probe sequence
taatcctaatgtgccaagttattct

SEQ ID NO: 47984 - DNA, 25 bp, Probe sequence
cattatattgattggaggttgtgtc

SEQ ID NO: 47985 - DNA, 25 bp, Probe sequence
ttgattggaggttgtgtcattatga

SEQ ID NO: 47986 - DNA, 25 bp, Probe sequence
tattgattggaggttgtgtcattat

SEQ ID NO: 47987 - DNA, 25 bp, Probe sequence
atattgattggaggttgtgtcatta

SEQ ID NO: 47988 - DNA, 25 bp, Probe sequence
tgactacaatgtgaagcaacttaga

SEQ ID NO: 47989 - DNA, 25 bp, Probe sequence
atgactacaatgtgaagcaacttag

SEQ ID NO: 47990 - DNA, 25 bp, Probe sequence
gactacaatgtgaagcaacttagaa

SEQ ID NO: 47991 - DNA, 25 bp, Probe sequence
tgtgaagcaacttagaaagaggtat

SEQ ID NO: 47992 - DNA, 25 bp, Probe sequence
atgtgaagcaacttagaaagaggta

SEQ ID NO: 47993 - DNA, 25 bp, Probe sequence
tgaagcaacttagaaagaggtatga

SEQ ID NO: 47994 - DNA, 25 bp, Probe sequence
gtgaagcaacttagaaagaggtatg

SEQ ID NO: 47995 - DNA, 25 bp, Probe sequence
caatgtgaagcaacttagaaagagg

SEQ ID NO: 47996 - DNA, 25 bp, Probe sequence
aatgtgaagcaacttagaaagaggt

SEQ ID NO: 47997 - DNA, 25 bp, Probe sequence
ctgttatatcaaggtgttcaagagc

SEQ ID NO: 47998 - DNA, 25 bp, Probe sequence
tacaagcctgttatatcaaggtgtt

SEQ ID NO: 47999 - DNA, 25 bp, Probe sequence
atacaagcctgttatatcaaggtgt

SEQ ID NO: 48000 - DNA, 25 bp, Probe sequence
aagcctgttatatcaaggtgttcaa

SEQ ID NO: 48001 - DNA, 25 bp, Probe sequence
cctgttatatcaaggtgttcaagag

SEQ ID NO: 48002 - DNA, 25 bp, Probe sequence
gcctgttatatcaaggtgttcaaga

SEQ ID NO: 48003 - DNA, 25 bp, Probe sequence
agcctgttatatcaaggtgttcaag

SEQ ID NO: 48004 - DNA, 25 bp, Probe sequence
tgttatatcaaggtgttcaagagct

SEQ ID NO: 48005 - DNA, 25 bp, Probe sequence
caagcctgttatatcaaggtgttca

SEQ ID NO: 48006 - DNA, 25 bp, Probe sequence
aatactcagaatccgaacgatataa

SEQ ID NO: 48007 - DNA, 25 bp, Probe sequence
aagggtttctgatgacttgaataca

SEQ ID NO: 48008 - DNA, 25 bp, Probe sequence
agggtttctgatgacttgaatacaa

SEQ ID NO: 48009 - DNA, 25 bp, Probe sequence
gggtttctgatgacttgaatacaat

SEQ ID NO: 48010 - DNA, 25 bp, Probe sequence
gaaatactcagaatccgaacgatat

SEQ ID NO: 48011 - DNA, 25 bp, Probe sequence
tgaaatactcagaatccgaacgata

SEQ ID NO: 48012 - DNA, 25 bp, Probe sequence
atactcagaatccgaacgatataaa

SEQ ID NO: 48013 - DNA, 25 bp, Probe sequence
aaatactcagaatccgaacgatata

SEQ ID NO: 48014 - DNA, 25 bp, Probe sequence
ggtttctgatgacttgaatacaatt

SEQ ID NO: 48015 - DNA, 25 bp, Probe sequence
aatgatgaatggcatacttataaag

SEQ ID NO: 48016 - DNA, 25 bp, Probe sequence
aaatgatgaatggcatacttataaa

SEQ ID NO: 48017 - DNA, 25 bp, Probe sequence
aaaatgatgaatggcatacttataa

SEQ ID NO: 48018 - DNA, 25 bp, Probe sequence
ataactacggtggtcaagataacag

SEQ ID NO: 48019 - DNA, 25 bp, Probe sequence
aataactacggtggtcaagataaca

SEQ ID NO: 48020 - DNA, 25 bp, Probe sequence
taactacggtggtcaagataacaga

SEQ ID NO: 48021 - DNA, 25 bp, Probe sequence
tgttaataactacggtggtcaagat

SEQ ID NO: 48022 - DNA, 25 bp, Probe sequence
atgttaataactacggtggtcaaga

SEQ ID NO: 48023 - DNA, 25 bp, Probe sequence
tcaagattacgctgttactgatgta

SEQ ID NO: 48024 - DNA, 25 bp, Probe sequence
aactacggtggtcaagataacagaa

SEQ ID NO: 48025 - DNA, 25 bp, Probe sequence
taataactacggtggtcaagataac

SEQ ID NO: 48026 - DNA, 25 bp, Probe sequence
ttagaatataaggaccagtcaggcg

SEQ ID NO: 48027 - DNA, 25 bp, Probe sequence
tacaggtggtggtaatcattatacg

SEQ ID NO: 48028 - DNA, 25 bp, Probe sequence
caggtggtggtaatcattatacgat

SEQ ID NO: 48029 - DNA, 25 bp, Probe sequence
agaaggctattggacttatgatgaa

SEQ ID NO: 48030 - DNA, 25 bp, Probe sequence
acaggtggtggtaatcattatacga

SEQ ID NO: 48031 - DNA, 25 bp, Probe sequence
tagaaggctattggacttatgatga

SEQ ID NO: 48032 - DNA, 25 bp, Probe sequence
ggtggtggtaatcattatacgattg

SEQ ID NO: 48033 - DNA, 25 bp, Probe sequence
aggtggtggtaatcattatacgatt

SEQ ID NO: 48034 - DNA, 25 bp, Probe sequence
aaggatgaggatactatagaaggct

SEQ ID NO: 48035 - DNA, 25 bp, Probe sequence
caaggatgaggatactatagaaggc

SEQ ID NO: 48036 - DNA, 25 bp, Probe sequence
taatttcatacgctatcattggtgg

SEQ ID NO: 48037 - DNA, 25 bp, Probe sequence
ggtggctttgaagaaggtattgata

SEQ ID NO: 48038 - DNA, 25 bp, Probe sequence
gtggctttgaagaaggtattgatat

SEQ ID NO: 48039 - DNA, 25 bp, Probe sequence
tggctttgaagaaggtattgatatt

SEQ ID NO: 48040 - DNA, 25 bp, Probe sequence
attggtggctttgaagaaggtattg

SEQ ID NO: 48041 - DNA, 25 bp, Probe sequence
cattggtggctttgaagaaggtatt

SEQ ID NO: 48042 - DNA, 25 bp, Probe sequence
aatttcatacgctatcattggtggc

SEQ ID NO: 48043 - DNA, 25 bp, Probe sequence
ctatcattggtggctttgaagaagg

SEQ ID NO: 48044 - DNA, 25 bp, Probe sequence
ataatttcatacgctatcattggtg

SEQ ID NO: 48045 - DNA, 25 bp, Probe sequence
ggtaagtatgtaacggagcaagtat

SEQ ID NO: 48046 - DNA, 25 bp, Probe sequence
aggtaagtatgtaacggagcaagta

SEQ ID NO: 48047 - DNA, 25 bp, Probe sequence
taggtaagtatgtaacggagcaagt

SEQ ID NO: 48048 - DNA, 25 bp, Probe sequence
ctaggtaagtatgtaacggagcaag

SEQ ID NO: 48049 - DNA, 25 bp, Probe sequence
gatacaggagatgacaatgatgatt

SEQ ID NO: 48050 - DNA, 25 bp, Probe sequence
gtaagtatgtaacggagcaagtata

SEQ ID NO: 48051 - DNA, 25 bp, Probe sequence
atgagctaggtaagtatgtaacgga

SEQ ID NO: 48052 - DNA, 25 bp, Probe sequence
tatgagctaggtaagtatgtaacgg

SEQ ID NO: 48053 - DNA, 25 bp, Probe sequence
tacaggagatgacaatgatgattaa

SEQ ID NO: 48054 - DNA, 25 bp, Probe sequence
gcgaaagagaaatatgagtcacaaa

SEQ ID NO: 48055 - DNA, 25 bp, Probe sequence
gaagcgaaagagaaatatgagtcac

SEQ ID NO: 48056 - DNA, 25 bp, Probe sequence
agaagcgaaagagaaatatgagtca

SEQ ID NO: 48057 - DNA, 25 bp, Probe sequence
gagtaaagaagaagcgaaagagaaa

SEQ ID NO: 48058 - DNA, 25 bp, Probe sequence
agcgaaagagaaatatgagtcacaa

SEQ ID NO: 48059 - DNA, 25 bp, Probe sequence
aagcgaaagagaaatatgagtcaca

SEQ ID NO: 48060 - DNA, 25 bp, Probe sequence
aagaagcgaaagagaaatatgagtc

SEQ ID NO: 48061 - DNA, 25 bp, Probe sequence
gaagaagcgaaagagaaatatgagt

SEQ ID NO: 48062 - DNA, 25 bp, Probe sequence
agaagaagcgaaagagaaatatgag

SEQ ID NO: 48063 - DNA, 25 bp, Probe sequence
ggattatgacgagtcaagttgtcta

SEQ ID NO: 48064 - DNA, 25 bp, Probe sequence
aaccgtaaacaaatagaacaatccg

SEQ ID NO: 48065 - DNA, 25 bp, Probe sequence
tgtctataaatatgaggaggagcag

SEQ ID NO: 48066 - DNA, 25 bp, Probe sequence
accgtaaacaaatagaacaatccgt

SEQ ID NO: 48067 - DNA, 25 bp, Probe sequence
ttatcttgatgaagcagtagggatt

SEQ ID NO: 48068 - DNA, 25 bp, Probe sequence
tttatcttgatgaagcagtagggat

SEQ ID NO: 48069 - DNA, 25 bp, Probe sequence
atttatcttgatgaagcagtaggga

SEQ ID NO: 48070 - DNA, 25 bp, Probe sequence
ccgtaaacaaatagaacaatccgtt

SEQ ID NO: 48071 - DNA, 25 bp, Probe sequence
atcttgatgaagcagtagggattat

SEQ ID NO: 48072 - DNA, 25 bp, Probe sequence
gagatcaggagatacgattgttgtt

SEQ ID NO: 48073 - DNA, 25 bp, Probe sequence
cgagatcaggagatacgattgttgt

SEQ ID NO: 48074 - DNA, 25 bp, Probe sequence
cagactaggacgtaatatggaggat

SEQ ID NO: 48075 - DNA, 25 bp, Probe sequence
gactcgacagactaggacgtaatat

SEQ ID NO: 48076 - DNA, 25 bp, Probe sequence
agatacgattgttgtttggagactc

SEQ ID NO: 48077 - DNA, 25 bp, Probe sequence
taagacactttatgataatggcacg

SEQ ID NO: 48078 - DNA, 25 bp, Probe sequence
actcgacagactaggacgtaatatg

SEQ ID NO: 48079 - DNA, 25 bp, Probe sequence
atcaggagatacgattgttgtttgg

SEQ ID NO: 48080 - DNA, 25 bp, Probe sequence
gacagactaggacgtaatatggagg

SEQ ID NO: 48081 - DNA, 25 bp, Probe sequence
attactgacaaggacaatgtgaact

SEQ ID NO: 48082 - DNA, 25 bp, Probe sequence
ttactgacaaggacaatgtgaactt

SEQ ID NO: 48083 - DNA, 25 bp, Probe sequence
agtattactgacaaggacaatgtga

SEQ ID NO: 48084 - DNA, 25 bp, Probe sequence
tattactgacaaggacaatgtgaac

SEQ ID NO: 48085 - DNA, 25 bp, Probe sequence
gtattactgacaaggacaatgtgaa

SEQ ID NO: 48086 - DNA, 25 bp, Probe sequence
atcaacggttgtctagtattactga

SEQ ID NO: 48087 - DNA, 25 bp, Probe sequence
gatcaacggttgtctagtattactg

SEQ ID NO: 48088 - DNA, 25 bp, Probe sequence
agatcaacggttgtctagtattact

SEQ ID NO: 48089 - DNA, 25 bp, Probe sequence
tagtattactgacaaggacaatgtg

SEQ ID NO: 48090 - DNA, 25 bp, Probe sequence
atggatggctattctattagtggtt

SEQ ID NO: 48091 - DNA, 25 bp, Probe sequence
aatggatggctattctattagtggt

SEQ ID NO: 48092 - DNA, 25 bp, Probe sequence
caatggatggctattctattagtgg

SEQ ID NO: 48093 - DNA, 25 bp, Probe sequence
tggatggctattctattagtggtta

SEQ ID NO: 48094 - DNA, 25 bp, Probe sequence
ggatggctattctattagtggttat

SEQ ID NO: 48095 - DNA, 25 bp, Probe sequence
ccaatggatggctattctattagtg

SEQ ID NO: 48096 - DNA, 25 bp, Probe sequence
atgtttgtcaataagtccagtgaaa

SEQ ID NO: 48097 - DNA, 25 bp, Probe sequence
aatgtttgtcaataagtccagtgaa

SEQ ID NO: 48098 - DNA, 25 bp, Probe sequence
aaatgtttgtcaataagtccagtga

SEQ ID NO: 48099 - DNA, 25 bp, Probe sequence
gcctaagttatagtggatattgtct

SEQ ID NO: 48100 - DNA, 25 bp, Probe sequence
taaggataattcgacagtaacagct

SEQ ID NO: 48101 - DNA, 25 bp, Probe sequence
ctaaggataattcgacagtaacagc

SEQ ID NO: 48102 - DNA, 25 bp, Probe sequence
tgacttatttgatacaggaacaggg

SEQ ID NO: 48103 - DNA, 25 bp, Probe sequence
tagcgggtgattatttagagaagtc

SEQ ID NO: 48104 - DNA, 25 bp, Probe sequence
ttagcgggtgattatttagagaagt

SEQ ID NO: 48105 - DNA, 25 bp, Probe sequence
actttagcgggtgattatttagaga

SEQ ID NO: 48106 - DNA, 25 bp, Probe sequence
ggagttactttagcgggtgattatt

SEQ ID NO: 48107 - DNA, 25 bp, Probe sequence
gagttactttagcgggtgattattt

SEQ ID NO: 48108 - DNA, 25 bp, Probe sequence
cttgttgtcgcattgcctatctata

SEQ ID NO: 48109 - DNA, 25 bp, Probe sequence
ttgttgtcgcattgcctatctatac

SEQ ID NO: 48110 - DNA, 25 bp, Probe sequence
tataaccgcattgctacttgttgtc

SEQ ID NO: 48111 - DNA, 25 bp, Probe sequence
tacttgttgtcgcattgcctatcta

SEQ ID NO: 48112 - DNA, 25 bp, Probe sequence
gtataaccgcattgctacttgttgt

SEQ ID NO: 48113 - DNA, 25 bp, Probe sequence
gttgtcgcattgcctatctatacag

SEQ ID NO: 48114 - DNA, 25 bp, Probe sequence
agacgattggatatagaatacactt

SEQ ID NO: 48115 - DNA, 25 bp, Probe sequence
aagacgattggatatagaatacact

SEQ ID NO: 48116 - DNA, 25 bp, Probe sequence
ttgtcgcattgcctatctatacagt

SEQ ID NO: 48117 - DNA, 25 bp, Probe sequence
caacattcaaagattcaacaggacg

SEQ ID NO: 48118 - DNA, 25 bp, Probe sequence
gaaagagaagtacgagaaacaagtt

SEQ ID NO: 48119 - DNA, 25 bp, Probe sequence
cgaaagagaagtacgagaaacaagt

SEQ ID NO: 48120 - DNA, 25 bp, Probe sequence
agagaagtacgagaaacaagttaaa

SEQ ID NO: 48121 - DNA, 25 bp, Probe sequence
aagagaagtacgagaaacaagttaa

SEQ ID NO: 48122 - DNA, 25 bp, Probe sequence
aaagagaagtacgagaaacaagtta

SEQ ID NO: 48123 - DNA, 25 bp, Probe sequence
gaagcgaaagagaagtacgagaaac

SEQ ID NO: 48124 - DNA, 25 bp, Probe sequence
agaagcgaaagagaagtacgagaaa

SEQ ID NO: 48125 - DNA, 25 bp, Probe sequence
aagaagcgaaagagaagtacgagaa

SEQ ID NO: 48126 - DNA, 25 bp, Probe sequence
ttattactttcatgggcatatcgtg

SEQ ID NO: 48127 - DNA, 25 bp, Probe sequence
tattactttcatgggcatatcgtgc

SEQ ID NO: 48128 - DNA, 25 bp, Probe sequence
ggatttaagagatatctgtatcagg

SEQ ID NO: 48129 - DNA, 25 bp, Probe sequence
aaatcaattctttggatttaagaga

SEQ ID NO: 48130 - DNA, 25 bp, Probe sequence
tggatttaagagatatctgtatcag

SEQ ID NO: 48131 - DNA, 25 bp, Probe sequence
gatttaagagatatctgtatcagga

SEQ ID NO: 48132 - DNA, 25 bp, Probe sequence
ttctttggatttaagagatatctgt

SEQ ID NO: 48133 - DNA, 25 bp, Probe sequence
ttggatttaagagatatctgtatca

SEQ ID NO: 48134 - DNA, 25 bp, Probe sequence
tctttggatttaagagatatctgta

SEQ ID NO: 48135 - DNA, 25 bp, Probe sequence
acagatgaacaggacaaactaatga

SEQ ID NO: 48136 - DNA, 25 bp, Probe sequence
cacagatgaacaggacaaactaatg

SEQ ID NO: 48137 - DNA, 25 bp, Probe sequence
gatgaacaggacaaactaatgaact

SEQ ID NO: 48138 - DNA, 25 bp, Probe sequence
agatgaacaggacaaactaatgaac

SEQ ID NO: 48139 - DNA, 25 bp, Probe sequence
cagatgaacaggacaaactaatgaa

SEQ ID NO: 48140 - DNA, 25 bp, Probe sequence
atgaacaggacaaactaatgaactt

SEQ ID NO: 48141 - DNA, 25 bp, Probe sequence
agagttaagaaacgagcatatagcg

SEQ ID NO: 48142 - DNA, 25 bp, Probe sequence
cgattaagagttaagaaacgagcat

SEQ ID NO: 48143 - DNA, 25 bp, Probe sequence
aagagttaagaaacgagcatatagc

SEQ ID NO: 48144 - DNA, 25 bp, Probe sequence
catctgtaagaagtctattaggcgt

SEQ ID NO: 48145 - DNA, 25 bp, Probe sequence
atctgtaagaagtctattaggcgtt

SEQ ID NO: 48146 - DNA, 25 bp, Probe sequence
acatctgtaagaagtctattaggcg

SEQ ID NO: 48147 - DNA, 25 bp, Probe sequence
taatgcgaagacatctgtaagaagt

SEQ ID NO: 48148 - DNA, 25 bp, Probe sequence
ctaatgcgaagacatctgtaagaag

SEQ ID NO: 48149 - DNA, 25 bp, Probe sequence
cctaatgcgaagacatctgtaagaa

SEQ ID NO: 48150 - DNA, 25 bp, Probe sequence
tcctaatgcgaagacatctgtaaga

SEQ ID NO: 48151 - DNA, 25 bp, Probe sequence
ttaggcgaattgaatgtatcagatt

SEQ ID NO: 48152 - DNA, 25 bp, Probe sequence
attaggcgaattgaatgtatcagat

SEQ ID NO: 48153 - DNA, 25 bp, Probe sequence
gtcattacggttgttgtactgctag

SEQ ID NO: 48154 - DNA, 25 bp, Probe sequence
aatgtcattacggttgttgtactgc

SEQ ID NO: 48155 - DNA, 25 bp, Probe sequence
tgtcattacggttgttgtactgcta

SEQ ID NO: 48156 - DNA, 25 bp, Probe sequence
atggaaggttctatggtacaagcag

SEQ ID NO: 48157 - DNA, 25 bp, Probe sequence
tgggcaaatcaaatcactaaatgtt

SEQ ID NO: 48158 - DNA, 25 bp, Probe sequence
tctgggcaaatcaaatcactaaatg

SEQ ID NO: 48159 - DNA, 25 bp, Probe sequence
cttctgggcaaatcaaatcactaaa

SEQ ID NO: 48160 - DNA, 25 bp, Probe sequence
aagttggtaaagatgttgatgtgac

SEQ ID NO: 48161 - DNA, 25 bp, Probe sequence
tgaagttggtaaagatgttgatgtg

SEQ ID NO: 48162 - DNA, 25 bp, Probe sequence
aggttaattggtatgggtagagtga

SEQ ID NO: 48163 - DNA, 25 bp, Probe sequence
taggttaattggtatgggtagagtg

SEQ ID NO: 48164 - DNA, 25 bp, Probe sequence
ttacggcagtcaaattatggaacat

SEQ ID NO: 48165 - DNA, 25 bp, Probe sequence
gatttatgcctaccgaaccagattc

SEQ ID NO: 48166 - DNA, 25 bp, Probe sequence
aatttggatttatgcctaccgaacc

SEQ ID NO: 48167 - DNA, 25 bp, Probe sequence
tcaaggttacggcagtcaaattatg

SEQ ID NO: 48168 - DNA, 25 bp, Probe sequence
gtcaaggttacggcagtcaaattat

SEQ ID NO: 48169 - DNA, 25 bp, Probe sequence
ataggttaattggtatgggtagagt

SEQ ID NO: 48170 - DNA, 25 bp, Probe sequence
ttaaggattaatgcaggtatgagtc

SEQ ID NO: 48171 - DNA, 25 bp, Probe sequence
aaggttgtgtagatgtatatgaggt

SEQ ID NO: 48172 - DNA, 25 bp, Probe sequence
tatatgaggtagaagttacagacgg

SEQ ID NO: 48173 - DNA, 25 bp, Probe sequence
gaaggttgtgtagatgtatatgagg

SEQ ID NO: 48174 - DNA, 25 bp, Probe sequence
aggttgtgtagatgtatatgaggta

SEQ ID NO: 48175 - DNA, 25 bp, Probe sequence
ggttgtgtagatgtatatgaggtag

SEQ ID NO: 48176 - DNA, 25 bp, Probe sequence
gtatatgaggtagaagttacagacg

SEQ ID NO: 48177 - DNA, 25 bp, Probe sequence
tatgtattctgtccactccatgatc

SEQ ID NO: 48178 - DNA, 25 bp, Probe sequence
ctgatgaaggttgtgtagatgtata

SEQ ID NO: 48179 - DNA, 25 bp, Probe sequence
tgaaggttgtgtagatgtatatgag

SEQ ID NO: 48180 - DNA, 25 bp, Probe sequence
cttcattgcttgtggtgttatagtc

SEQ ID NO: 48181 - DNA, 25 bp, Probe sequence
cattcttcattgcttgtggtgttat

SEQ ID NO: 48182 - DNA, 25 bp, Probe sequence
tcattgcttgtggtgttatagtctt

SEQ ID NO: 48183 - DNA, 25 bp, Probe sequence
ttcattgcttgtggtgttatagtct

SEQ ID NO: 48184 - DNA, 25 bp, Probe sequence
tcttcattgcttgtggtgttatagt

SEQ ID NO: 48185 - DNA, 25 bp, Probe sequence
ttcttcattgcttgtggtgttatag

SEQ ID NO: 48186 - DNA, 25 bp, Probe sequence
agcaatcgtagactcaatatcatca

SEQ ID NO: 48187 - DNA, 25 bp, Probe sequence
attcttcattgcttgtggtgttata

SEQ ID NO: 48188 - DNA, 25 bp, Probe sequence
gcaatcgtagactcaatatcatcat

SEQ ID NO: 48189 - DNA, 25 bp, Probe sequence
tgtatatgtatagtcgctacggtca

SEQ ID NO: 48190 - DNA, 25 bp, Probe sequence
atgtatatgtatagtcgctacggtc

SEQ ID NO: 48191 - DNA, 25 bp, Probe sequence
gtatatgtatagtcgctacggtcat

SEQ ID NO: 48192 - DNA, 25 bp, Probe sequence
tatgtatatgtatagtcgctacggt

SEQ ID NO: 48193 - DNA, 25 bp, Probe sequence
atatgtatagtcgctacggtcatac

SEQ ID NO: 48194 - DNA, 25 bp, Probe sequence
ttatgtatatgtatagtcgctacgg

SEQ ID NO: 48195 - DNA, 25 bp, Probe sequence
agtgcagtgattgaaggatacataa

SEQ ID NO: 48196 - DNA, 25 bp, Probe sequence
aagtgcagtgattgaaggatacata

SEQ ID NO: 48197 - DNA, 25 bp, Probe sequence
gcagtgattgaaggatacataaacg

SEQ ID NO: 48198 - DNA, 25 bp, Probe sequence
ggaagtgctatgattgaaggttaca

SEQ ID NO: 48199 - DNA, 25 bp, Probe sequence
gaagtgctatgattgaaggttacat

SEQ ID NO: 48200 - DNA, 25 bp, Probe sequence
gcataatactatagaaccgaacacg

SEQ ID NO: 48201 - DNA, 25 bp, Probe sequence
atactatagaaccgaacacgatcaa

SEQ ID NO: 48202 - DNA, 25 bp, Probe sequence
aatactatagaaccgaacacgatca

SEQ ID NO: 48203 - DNA, 25 bp, Probe sequence
ctatgggaagtgctatgattgaagg

SEQ ID NO: 48204 - DNA, 25 bp, Probe sequence
cctatgggaagtgctatgattgaag

SEQ ID NO: 48205 - DNA, 25 bp, Probe sequence
agtgctatgattgaaggttacataa

SEQ ID NO: 48206 - DNA, 25 bp, Probe sequence
aagtgctatgattgaaggttacata

SEQ ID NO: 48207 - DNA, 25 bp, Probe sequence
aagaacaacaagagcgtattacact

SEQ ID NO: 48208 - DNA, 25 bp, Probe sequence
acactctatctcaagcataacacta

SEQ ID NO: 48209 - DNA, 25 bp, Probe sequence
tacactctatctcaagcataacact

SEQ ID NO: 48210 - DNA, 25 bp, Probe sequence
ggtctccagaacatcattatcaatt

SEQ ID NO: 48211 - DNA, 25 bp, Probe sequence
ttacactctatctcaagcataacac

SEQ ID NO: 48212 - DNA, 25 bp, Probe sequence
cactctatctcaagcataacactaa

SEQ ID NO: 48213 - DNA, 25 bp, Probe sequence
agaacaacaagagcgtattacactc

SEQ ID NO: 48214 - DNA, 25 bp, Probe sequence
attacactctatctcaagcataaca

SEQ ID NO: 48215 - DNA, 25 bp, Probe sequence
aaagaacaacaagagcgtattacac

SEQ ID NO: 48216 - DNA, 25 bp, Probe sequence
taatcctaatgtgccaagttattcc

SEQ ID NO: 48217 - DNA, 25 bp, Probe sequence
aatcctaatgtgccaagttattccg

SEQ ID NO: 48218 - DNA, 25 bp, Probe sequence
atcctaatgtgccaagttattccga

SEQ ID NO: 48219 - DNA, 25 bp, Probe sequence
tcctaatgtgccaagttattccgaa

SEQ ID NO: 48220 - DNA, 25 bp, Probe sequence
gatatgacataccaacgaaacaagc

SEQ ID NO: 48221 - DNA, 25 bp, Probe sequence
agatatgacataccaacgaaacaag

SEQ ID NO: 48222 - DNA, 25 bp, Probe sequence
atatgacataccaacgaaacaagca

SEQ ID NO: 48223 - DNA, 25 bp, Probe sequence
aagatatgacataccaacgaaacaa

SEQ ID NO: 48224 - DNA, 25 bp, Probe sequence
aaagatatgacataccaacgaaaca

SEQ ID NO: 48225 - DNA, 25 bp, Probe sequence
gaagccaatacaagatgacaagttg

SEQ ID NO: 48226 - DNA, 25 bp, Probe sequence
aagccaatacaagatgacaagttga

SEQ ID NO: 48227 - DNA, 25 bp, Probe sequence
cgaagccaatacaagatgacaagtt

SEQ ID NO: 48228 - DNA, 25 bp, Probe sequence
aacgaagccaatacaagatgacaag

SEQ ID NO: 48229 - DNA, 25 bp, Probe sequence
caacgaagccaatacaagatgacaa

SEQ ID NO: 48230 - DNA, 25 bp, Probe sequence
acgaagccaatacaagatgacaagt

SEQ ID NO: 48231 - DNA, 25 bp, Probe sequence
aggtacatggataatcagctctgaa

SEQ ID NO: 48232 - DNA, 25 bp, Probe sequence
aaggtacatggataatcagctctga

SEQ ID NO: 48233 - DNA, 25 bp, Probe sequence
caaattatcccaacgaagccaatac

SEQ ID NO: 48234 - DNA, 25 bp, Probe sequence
ctggtgtagatgcgaattattatgc

SEQ ID NO: 48235 - DNA, 25 bp, Probe sequence
gctggtgtagatgcgaattattatg

SEQ ID NO: 48236 - DNA, 25 bp, Probe sequence
tggtgtagatgcgaattattatgct

SEQ ID NO: 48237 - DNA, 25 bp, Probe sequence
tgctggtgtagatgcgaattattat

SEQ ID NO: 48238 - DNA, 25 bp, Probe sequence
tcattatggtggacaagataacaga

SEQ ID NO: 48239 - DNA, 25 bp, Probe sequence
ggtgtagatgcgaattattatgcta

SEQ ID NO: 48240 - DNA, 25 bp, Probe sequence
ggtagtccaatagtctcattaacac

SEQ ID NO: 48241 - DNA, 25 bp, Probe sequence
gtgctggtgtagatgcgaattatta

SEQ ID NO: 48242 - DNA, 25 bp, Probe sequence
cattatggtggacaagataacagaa

SEQ ID NO: 48243 - DNA, 25 bp, Probe sequence
atggtgctgtatatcttgtgaatct

SEQ ID NO: 48244 - DNA, 25 bp, Probe sequence
tggtgctgtatatcttgtgaatcta

SEQ ID NO: 48245 - DNA, 25 bp, Probe sequence
tatgctaagcgaccagttgttatag

SEQ ID NO: 48246 - DNA, 25 bp, Probe sequence
ctatgctaagcgaccagttgttata

SEQ ID NO: 48247 - DNA, 25 bp, Probe sequence
tatggtgctgtatatcttgtgaatc

SEQ ID NO: 48248 - DNA, 25 bp, Probe sequence
aagtacaatacacacagaagccata

SEQ ID NO: 48249 - DNA, 25 bp, Probe sequence
agtacaatacacacagaagccatat

SEQ ID NO: 48250 - DNA, 25 bp, Probe sequence
ggtgctgtatatcttgtgaatctat

SEQ ID NO: 48251 - DNA, 25 bp, Probe sequence
caatatggtgctgtatatcttgtga

SEQ ID NO: 48252 - DNA, 25 bp, Probe sequence
ccgcatacaaattggaatatcacta

SEQ ID NO: 48253 - DNA, 25 bp, Probe sequence
aacccgcatacaaattggaatatca

SEQ ID NO: 48254 - DNA, 25 bp, Probe sequence
cccgcatacaaattggaatatcact

SEQ ID NO: 48255 - DNA, 25 bp, Probe sequence
caacccgcatacaaattggaatatc

SEQ ID NO: 48256 - DNA, 25 bp, Probe sequence
atcgagacaatcaacttaatacaga

SEQ ID NO: 48257 - DNA, 25 bp, Probe sequence
tcgagacaatcaacttaatacagat

SEQ ID NO: 48258 - DNA, 25 bp, Probe sequence
agatcgagacaatcaacttaataca

SEQ ID NO: 48259 - DNA, 25 bp, Probe sequence
acccgcatacaaattggaatatcac

SEQ ID NO: 48260 - DNA, 25 bp, Probe sequence
acaacccgcatacaaattggaatat

SEQ ID NO: 48261 - DNA, 25 bp, Probe sequence
atgacttacgagcaagaagatgatt

SEQ ID NO: 48262 - DNA, 25 bp, Probe sequence
aatgacttacgagcaagaagatgat

SEQ ID NO: 48263 - DNA, 25 bp, Probe sequence
gacctaatccactccaagatagcaa

SEQ ID NO: 48264 - DNA, 25 bp, Probe sequence
acctaatccactccaagatagcaac

SEQ ID NO: 48265 - DNA, 25 bp, Probe sequence
cctaatccactccaagatagcaacc

SEQ ID NO: 48266 - DNA, 25 bp, Probe sequence
tgacttacgagcaagaagatgattt

SEQ ID NO: 48267 - DNA, 25 bp, Probe sequence
aaatgacttacgagcaagaagatga

SEQ ID NO: 48268 - DNA, 25 bp, Probe sequence
caaatgacttacgagcaagaagatg

SEQ ID NO: 48269 - DNA, 25 bp, Probe sequence
ccaaatgacttacgagcaagaagat

SEQ ID NO: 48270 - DNA, 25 bp, Probe sequence
aaaggagaaattagaaatggcgagt

SEQ ID NO: 48271 - DNA, 25 bp, Probe sequence
taaaggagaaattagaaatggcgag

SEQ ID NO: 48272 - DNA, 25 bp, Probe sequence
gtgagcgagaataaaggagaaatta

SEQ ID NO: 48273 - DNA, 25 bp, Probe sequence
aaggagaaattagaaatggcgagtc

SEQ ID NO: 48274 - DNA, 25 bp, Probe sequence
tgagcgagaataaaggagaaattag

SEQ ID NO: 48275 - DNA, 25 bp, Probe sequence
ataaaggagaaattagaaatggcga

SEQ ID NO: 48276 - DNA, 25 bp, Probe sequence
cgtgagcgagaataaaggagaaatt

SEQ ID NO: 48277 - DNA, 25 bp, Probe sequence
gagcgagaataaaggagaaattaga

SEQ ID NO: 48278 - DNA, 25 bp, Probe sequence
agttgaaagtttaatccaagaacct

SEQ ID NO: 48279 - DNA, 25 bp, Probe sequence
acactctatctcaagcataatacca

SEQ ID NO: 48280 - DNA, 25 bp, Probe sequence
ggagcgtattacactctatctcaag

SEQ ID NO: 48281 - DNA, 25 bp, Probe sequence
aggagcgtattacactctatctcaa

SEQ ID NO: 48282 - DNA, 25 bp, Probe sequence
cactctatctcaagcataataccaa

SEQ ID NO: 48283 - DNA, 25 bp, Probe sequence
caggagcgtattacactctatctca

SEQ ID NO: 48284 - DNA, 25 bp, Probe sequence
tacactctatctcaagcataatacc

SEQ ID NO: 48285 - DNA, 25 bp, Probe sequence
cataataccaaagaaccaaacacga

SEQ ID NO: 48286 - DNA, 25 bp, Probe sequence
agcataataccaaagaaccaaacac

SEQ ID NO: 48287 - DNA, 25 bp, Probe sequence
tacaaagaacaacaggagcgtatta

SEQ ID NO: 48288 - DNA, 25 bp, Probe sequence
tatctcaagcataataccaaggagc

SEQ ID NO: 48289 - DNA, 25 bp, Probe sequence
ttactgcttatgctacacctgaaca

SEQ ID NO: 48290 - DNA, 25 bp, Probe sequence
tactgcttatgctacacctgaacat

SEQ ID NO: 48291 - DNA, 25 bp, Probe sequence
ttatctcaagcataataccaaggag

SEQ ID NO: 48292 - DNA, 25 bp, Probe sequence
actgcttatgctacacctgaacata

SEQ ID NO: 48293 - DNA, 25 bp, Probe sequence
ataataccaaggagccaaacacaat

SEQ ID NO: 48294 - DNA, 25 bp, Probe sequence
atctcaagcataataccaaggagcc

SEQ ID NO: 48295 - DNA, 25 bp, Probe sequence
tttactgcttatgctacacctgaac

SEQ ID NO: 48296 - DNA, 25 bp, Probe sequence
taataccaaggagccaaacacaatc

SEQ ID NO: 48297 - DNA, 25 bp, Probe sequence
agaacaacaggagcgtattacactt

SEQ ID NO: 48298 - DNA, 25 bp, Probe sequence
ttactataaagaacaacaggagcgt

SEQ ID NO: 48299 - DNA, 25 bp, Probe sequence
aacaggagcgtattacactttatct

SEQ ID NO: 48300 - DNA, 25 bp, Probe sequence
caacaggagcgtattacactttatc

SEQ ID NO: 48301 - DNA, 25 bp, Probe sequence
acaacaggagcgtattacactttat

SEQ ID NO: 48302 - DNA, 25 bp, Probe sequence
aacaacaggagcgtattacacttta

SEQ ID NO: 48303 - DNA, 25 bp, Probe sequence
agcgtattacactttatctcaagca

SEQ ID NO: 48304 - DNA, 25 bp, Probe sequence
gcataatactaaagaaccaaacacg

SEQ ID NO: 48305 - DNA, 25 bp, Probe sequence
gaacaacaggagcgtattacacttt

SEQ ID NO: 48306 - DNA, 25 bp, Probe sequence
caagcgaggatacaagttatgagtc

SEQ ID NO: 48307 - DNA, 25 bp, Probe sequence
acatcaatcgtaacactagaacaac

SEQ ID NO: 48308 - DNA, 25 bp, Probe sequence
agcgaggatacaagttatgagtcaa

SEQ ID NO: 48309 - DNA, 25 bp, Probe sequence
aagcgaggatacaagttatgagtca

SEQ ID NO: 48310 - DNA, 25 bp, Probe sequence
tacatcaatcgtaacactagaacaa

SEQ ID NO: 48311 - DNA, 25 bp, Probe sequence
ccaagcgaggatacaagttatgagt

SEQ ID NO: 48312 - DNA, 25 bp, Probe sequence
aggtacttggatagttaattctgga

SEQ ID NO: 48313 - DNA, 25 bp, Probe sequence
tggatagttaattctggaatgaaca

SEQ ID NO: 48314 - DNA, 25 bp, Probe sequence
tactccaagcgaggatacaagttat

SEQ ID NO: 48315 - DNA, 25 bp, Probe sequence
tttggagattagatagattgggacg

SEQ ID NO: 48316 - DNA, 25 bp, Probe sequence
gagatacgattgttgtttggagatt

SEQ ID NO: 48317 - DNA, 25 bp, Probe sequence
ggagatacgattgttgtttggagat

SEQ ID NO: 48318 - DNA, 25 bp, Probe sequence
tgtttggagattagatagattggga

SEQ ID NO: 48319 - DNA, 25 bp, Probe sequence
taagaccctttatgataatggcacg

SEQ ID NO: 48320 - DNA, 25 bp, Probe sequence
gtttggagattagatagattgggac

SEQ ID NO: 48321 - DNA, 25 bp, Probe sequence
taaattggaggacaaggaagatgaa

SEQ ID NO: 48322 - DNA, 25 bp, Probe sequence
ataaattggaggacaaggaagatga

SEQ ID NO: 48323 - DNA, 25 bp, Probe sequence
ttaagaccctttatgataatggcac

SEQ ID NO: 48324 - DNA, 25 bp, Probe sequence
gcttgaatatgaggaggaacaggaa

SEQ ID NO: 48325 - DNA, 25 bp, Probe sequence
taagagagcttgaatatgaggagga

SEQ ID NO: 48326 - DNA, 25 bp, Probe sequence
gtaagagagcttgaatatgaggagg

SEQ ID NO: 48327 - DNA, 25 bp, Probe sequence
agtaagagagcttgaatatgaggag

SEQ ID NO: 48328 - DNA, 25 bp, Probe sequence
ttgagagaagtaagagagcttgaat

SEQ ID NO: 48329 - DNA, 25 bp, Probe sequence
atcgaacaatcagttatcagtgcta

SEQ ID NO: 48330 - DNA, 25 bp, Probe sequence
aagagagcttgaatatgaggaggaa

SEQ ID NO: 48331 - DNA, 25 bp, Probe sequence
aagtaagagagcttgaatatgagga

SEQ ID NO: 48332 - DNA, 25 bp, Probe sequence
tcgaacaatcagttatcagtgctag

SEQ ID NO: 48333 - DNA, 25 bp, Probe sequence
atatgaggaacagaagcaactaact

SEQ ID NO: 48334 - DNA, 25 bp, Probe sequence
ggaatatgaggaacagaagcaacta

SEQ ID NO: 48335 - DNA, 25 bp, Probe sequence
tatgaggaacagaagcaactaactt

SEQ ID NO: 48336 - DNA, 25 bp, Probe sequence
aatatgaggaacagaagcaactaac

SEQ ID NO: 48337 - DNA, 25 bp, Probe sequence
gaatatgaggaacagaagcaactaa

SEQ ID NO: 48338 - DNA, 25 bp, Probe sequence
ttggaatatgaggaacagaagcaac

SEQ ID NO: 48339 - DNA, 25 bp, Probe sequence
tggaatatgaggaacagaagcaact

SEQ ID NO: 48340 - DNA, 25 bp, Probe sequence
gatttggaatatgaggaacagaagc

SEQ ID NO: 48341 - DNA, 25 bp, Probe sequence
aacaggatttggaatatgaggaaca

SEQ ID NO: 48342 - DNA, 25 bp, Probe sequence
atgagactatcaaggacagattact

SEQ ID NO: 48343 - DNA, 25 bp, Probe sequence
gatgagactatcaaggacagattac

SEQ ID NO: 48344 - DNA, 25 bp, Probe sequence
tgagactatcaaggacagattacta

SEQ ID NO: 48345 - DNA, 25 bp, Probe sequence
cctgtatggaacatgagtgacttaa

SEQ ID NO: 48346 - DNA, 25 bp, Probe sequence
ggagatttaacgcaagaaagatgaa

SEQ ID NO: 48347 - DNA, 25 bp, Probe sequence
ctggagatttaacgcaagaaagatg

SEQ ID NO: 48348 - DNA, 25 bp, Probe sequence
tggagatttaacgcaagaaagatga

SEQ ID NO: 48349 - DNA, 25 bp, Probe sequence
gagactatcaaggacagattactat

SEQ ID NO: 48350 - DNA, 25 bp, Probe sequence
gcaagaaagatgaataaattcgtcg

SEQ ID NO: 48351 - DNA, 25 bp, Probe sequence
aatcggtagtggttatgatagtgtg

SEQ ID NO: 48352 - DNA, 25 bp, Probe sequence
taatcggtagtggttatgatagtgt

SEQ ID NO: 48353 - DNA, 25 bp, Probe sequence
atcggtagtggttatgatagtgtgg

SEQ ID NO: 48354 - DNA, 25 bp, Probe sequence
ctgatgagatagtctatggtatgga

SEQ ID NO: 48355 - DNA, 25 bp, Probe sequence
actgatgagatagtctatggtatgg

SEQ ID NO: 48356 - DNA, 25 bp, Probe sequence
gtagtggttatgatagtgtggcata

SEQ ID NO: 48357 - DNA, 25 bp, Probe sequence
agtggttatgatagtgtggcatatt

SEQ ID NO: 48358 - DNA, 25 bp, Probe sequence
ggtagtggttatgatagtgtggcat

SEQ ID NO: 48359 - DNA, 25 bp, Probe sequence
tagtggttatgatagtgtggcatat

SEQ ID NO: 48360 - DNA, 25 bp, Probe sequence
tacacagcgataataaatacagatt

SEQ ID NO: 48361 - DNA, 25 bp, Probe sequence
cgtatttactatacacagcgataat

SEQ ID NO: 48362 - DNA, 25 bp, Probe sequence
acagcgataataaatacagattaca

SEQ ID NO: 48363 - DNA, 25 bp, Probe sequence
acacagcgataataaatacagatta

SEQ ID NO: 48364 - DNA, 25 bp, Probe sequence
atacacagcgataataaatacagat

SEQ ID NO: 48365 - DNA, 25 bp, Probe sequence
acgtatttactatacacagcgataa

SEQ ID NO: 48366 - DNA, 25 bp, Probe sequence
cacagcgataataaatacagattac

SEQ ID NO: 48367 - DNA, 25 bp, Probe sequence
actatacacagcgataataaataca

SEQ ID NO: 48368 - DNA, 25 bp, Probe sequence
tatacacagcgataataaatacaga

SEQ ID NO: 48369 - DNA, 25 bp, Probe sequence
tattcccaatttctacagacaatgc

SEQ ID NO: 48370 - DNA, 25 bp, Probe sequence
gtattcccaatttctacagacaatg

SEQ ID NO: 48371 - DNA, 25 bp, Probe sequence
tgtattcccaatttctacagacaat

SEQ ID NO: 48372 - DNA, 25 bp, Probe sequence
attgtattcccaatttctacagaca

SEQ ID NO: 48373 - DNA, 25 bp, Probe sequence
ccaacaaagagaaattgtattccca

SEQ ID NO: 48374 - DNA, 25 bp, Probe sequence
cccaacaaagagaaattgtattccc

SEQ ID NO: 48375 - DNA, 25 bp, Probe sequence
ttgtattcccaatttctacagacaa

SEQ ID NO: 48376 - DNA, 25 bp, Probe sequence
caacaaagagaaattgtattcccaa

SEQ ID NO: 48377 - DNA, 25 bp, Probe sequence
aacaaagagaaattgtattcccaat

SEQ ID NO: 48378 - DNA, 25 bp, Probe sequence
cgagtatgatttaacacctttgacg

SEQ ID NO: 48379 - DNA, 25 bp, Probe sequence
gcgagtatgatttaacacctttgac

SEQ ID NO: 48380 - DNA, 25 bp, Probe sequence
taagccaagaaatgaaattatacgc

SEQ ID NO: 48381 - DNA, 25 bp, Probe sequence
gagtatgatttaacacctttgacgt

SEQ ID NO: 48382 - DNA, 25 bp, Probe sequence
agtatgatttaacacctttgacgtt

SEQ ID NO: 48383 - DNA, 25 bp, Probe sequence
gtaagccaagaaatgaaattatacg

SEQ ID NO: 48384 - DNA, 25 bp, Probe sequence
aaatggtaagccaagaaatgaaatt

SEQ ID NO: 48385 - DNA, 25 bp, Probe sequence
tgatttaacacctttgacgttagga

SEQ ID NO: 48386 - DNA, 25 bp, Probe sequence
atgatttaacacctttgacgttagg

SEQ ID NO: 48387 - DNA, 25 bp, Probe sequence
tcttcttaatttgtttaggaactgc

SEQ ID NO: 48388 - DNA, 25 bp, Probe sequence
tattgttgcgatgctggtgtttcta

SEQ ID NO: 48389 - DNA, 25 bp, Probe sequence
tttattgttgcgatgctggtgtttc

SEQ ID NO: 48390 - DNA, 25 bp, Probe sequence
tttattttattgttgcgatgctggt

SEQ ID NO: 48391 - DNA, 25 bp, Probe sequence
gtttattttattgttgcgatgctgg

SEQ ID NO: 48392 - DNA, 25 bp, Probe sequence
cctgtttattttattgttgcgatgc

SEQ ID NO: 48393 - DNA, 25 bp, Probe sequence
tgtttattttattgttgcgatgctg

SEQ ID NO: 48394 - DNA, 25 bp, Probe sequence
ctgtttattttattgttgcgatgct

SEQ ID NO: 48395 - DNA, 25 bp, Probe sequence
ttattttattgttgcgatgctggtg

SEQ ID NO: 48396 - DNA, 25 bp, Probe sequence
gacttaaaatcctgcggtgagtgat

SEQ ID NO: 48397 - DNA, 25 bp, Probe sequence
acttaaaatcctgcggtgagtgatc

SEQ ID NO: 48398 - DNA, 25 bp, Probe sequence
cttaaaatcctgcggtgagtgatca

SEQ ID NO: 48399 - DNA, 25 bp, Probe sequence
ggacttaaaatcctgcggtgagtga

SEQ ID NO: 48400 - DNA, 25 bp, Probe sequence
aggacttaaaatcctgcggtgagtg

SEQ ID NO: 48401 - DNA, 25 bp, Probe sequence
tgttcttatcctcaatcaattagcg

SEQ ID NO: 48402 - DNA, 25 bp, Probe sequence
gttcttatcctcaatcaattagcga

SEQ ID NO: 48403 - DNA, 25 bp, Probe sequence
tcttatcctcaatcaattagcgaat

SEQ ID NO: 48404 - DNA, 25 bp, Probe sequence
ttcttatcctcaatcaattagcgaa

SEQ ID NO: 48405 - DNA, 25 bp, Probe sequence
cgatacggtgctgtatatcttgtaa

SEQ ID NO: 48406 - DNA, 25 bp, Probe sequence
acgatacggtgctgtatatcttgta

SEQ ID NO: 48407 - DNA, 25 bp, Probe sequence
gaacgatacggtgctgtatatcttg

SEQ ID NO: 48408 - DNA, 25 bp, Probe sequence
agaacgatacggtgctgtatatctt

SEQ ID NO: 48409 - DNA, 25 bp, Probe sequence
acggtgctgtatatcttgtaaatct

SEQ ID NO: 48410 - DNA, 25 bp, Probe sequence
caacctcatacagattacctacaca

SEQ ID NO: 48411 - DNA, 25 bp, Probe sequence
tcaacctcatacagattacctacac

SEQ ID NO: 48412 - DNA, 25 bp, Probe sequence
acctcatacagattacctacacatt

SEQ ID NO: 48413 - DNA, 25 bp, Probe sequence
aacctcatacagattacctacacat

SEQ ID NO: 48414 - DNA, 25 bp, Probe sequence
atcaacctcatacagattacctaca

SEQ ID NO: 48415 - DNA, 25 bp, Probe sequence
cgatacatcacaagaggtattagtg

SEQ ID NO: 48416 - DNA, 25 bp, Probe sequence
aatcaacctcatacagattacctac

SEQ ID NO: 48417 - DNA, 25 bp, Probe sequence
cctcatacagattacctacacattt

SEQ ID NO: 48418 - DNA, 25 bp, Probe sequence
tcgatacatcacaagaggtattagt

SEQ ID NO: 48419 - DNA, 25 bp, Probe sequence
tcctaatccacactataacagcaac

SEQ ID NO: 48420 - DNA, 25 bp, Probe sequence
gtcctaatccacactataacagcaa

SEQ ID NO: 48421 - DNA, 25 bp, Probe sequence
caggtcctaatccacactataacag

SEQ ID NO: 48422 - DNA, 25 bp, Probe sequence
aacaggtcctaatccacactataac

SEQ ID NO: 48423 - DNA, 25 bp, Probe sequence
cctaatccacactataacagcaacc

SEQ ID NO: 48424 - DNA, 25 bp, Probe sequence
acaggtcctaatccacactataaca

SEQ ID NO: 48425 - DNA, 25 bp, Probe sequence
ggtcctaatccacactataacagca

SEQ ID NO: 48426 - DNA, 25 bp, Probe sequence
aggtcctaatccacactataacagc

SEQ ID NO: 48427 - DNA, 25 bp, Probe sequence
tattatcggtaaggatactcacggt

SEQ ID NO: 48428 - DNA, 25 bp, Probe sequence
gaacacacaagcaaggaactattag

SEQ ID NO: 48429 - DNA, 25 bp, Probe sequence
acacacaagcaaggaactattagat

SEQ ID NO: 48430 - DNA, 25 bp, Probe sequence
aacacacaagcaaggaactattaga

SEQ ID NO: 48431 - DNA, 25 bp, Probe sequence
cgaacacacaagcaaggaactatta

SEQ ID NO: 48432 - DNA, 25 bp, Probe sequence
cacacaagcaaggaactattagatc

SEQ ID NO: 48433 - DNA, 25 bp, Probe sequence
tatcatttctgtcccactcccatat

SEQ ID NO: 48434 - DNA, 25 bp, Probe sequence
atatcatttctgtcccactcccata

SEQ ID NO: 48435 - DNA, 25 bp, Probe sequence
caattcaagagtttgcgtagattct

SEQ ID NO: 48436 - DNA, 25 bp, Probe sequence
acaattcaagagtttgcgtagattc

SEQ ID NO: 48437 - DNA, 25 bp, Probe sequence
gtaacgacgcatacattacatcatt

SEQ ID NO: 48438 - DNA, 25 bp, Probe sequence
attaagaaacctgtaacgacgcata

SEQ ID NO: 48439 - DNA, 25 bp, Probe sequence
tattaagaaacctgtaacgacgcat

SEQ ID NO: 48440 - DNA, 25 bp, Probe sequence
ctattaagaaacctgtaacgacgca

SEQ ID NO: 48441 - DNA, 25 bp, Probe sequence
tctattaagaaacctgtaacgacgc

SEQ ID NO: 48442 - DNA, 25 bp, Probe sequence
ttaagaaacctgtaacgacgcatac

SEQ ID NO: 48443 - DNA, 25 bp, Probe sequence
gcactatcaaagagacaactgagat

SEQ ID NO: 48444 - DNA, 25 bp, Probe sequence
cactatcaaagagacaactgagatt

SEQ ID NO: 48445 - DNA, 25 bp, Probe sequence
ggcactatcaaagagacaactgaga

SEQ ID NO: 48446 - DNA, 25 bp, Probe sequence
gctatgctattcaatacttaactgc

SEQ ID NO: 48447 - DNA, 25 bp, Probe sequence
ggtagtgccattataacgattgcta

SEQ ID NO: 48448 - DNA, 25 bp, Probe sequence
gtagtgccattataacgattgctat

SEQ ID NO: 48449 - DNA, 25 bp, Probe sequence
tggctatgctattcaatacttaact

SEQ ID NO: 48450 - DNA, 25 bp, Probe sequence
ggctatgctattcaatacttaactg

SEQ ID NO: 48451 - DNA, 25 bp, Probe sequence
tagtgccattataacgattgctatt

SEQ ID NO: 48452 - DNA, 25 bp, Probe sequence
tttggttctaagacggaaggtttat

SEQ ID NO: 48453 - DNA, 25 bp, Probe sequence
ttggttctaagacggaaggtttatc

SEQ ID NO: 48454 - DNA, 25 bp, Probe sequence
ctaagacggaaggtttatctacgaa

SEQ ID NO: 48455 - DNA, 25 bp, Probe sequence
ctggtcaaggaacaataggattaga

SEQ ID NO: 48456 - DNA, 25 bp, Probe sequence
tggtcaaggaacaataggattagaa

SEQ ID NO: 48457 - DNA, 25 bp, Probe sequence
gttaatacggtcattgttccagttg

SEQ ID NO: 48458 - DNA, 25 bp, Probe sequence
ttaactgaacatcgtgaagatagca

SEQ ID NO: 48459 - DNA, 25 bp, Probe sequence
tcaattcatataatcggcgttcaag

SEQ ID NO: 48460 - DNA, 25 bp, Probe sequence
catcaattcatataatcggcgttca

SEQ ID NO: 48461 - DNA, 25 bp, Probe sequence
tgttaatacggtcattgttccagtt

SEQ ID NO: 48462 - DNA, 25 bp, Probe sequence
ccatcaattcatataatcggcgttc

SEQ ID NO: 48463 - DNA, 25 bp, Probe sequence
atcaattcatataatcggcgttcaa

SEQ ID NO: 48464 - DNA, 25 bp, Probe sequence
acttagaacagttagaaacagaatt

SEQ ID NO: 48465 - DNA, 25 bp, Probe sequence
aaacttagaacagttagaaacagaa

SEQ ID NO: 48466 - DNA, 25 bp, Probe sequence
aacagttagaaacagaattatttga

SEQ ID NO: 48467 - DNA, 25 bp, Probe sequence
aacttagaacagttagaaacagaat

SEQ ID NO: 48468 - DNA, 25 bp, Probe sequence
gaacagttagaaacagaattatttg

SEQ ID NO: 48469 - DNA, 25 bp, Probe sequence
tgaaaacttagaacagttagaaaca

SEQ ID NO: 48470 - DNA, 25 bp, Probe sequence
aaaacttagaacagttagaaacaga

SEQ ID NO: 48471 - DNA, 25 bp, Probe sequence
gaaaacttagaacagttagaaacag

SEQ ID NO: 48472 - DNA, 25 bp, Probe sequence
ttgaaaacttagaacagttagaaac

SEQ ID NO: 48473 - DNA, 25 bp, Probe sequence
tcaatattcagtaccagcaatgtgt

SEQ ID NO: 48474 - DNA, 25 bp, Probe sequence
atcaatattcagtaccagcaatgtg

SEQ ID NO: 48475 - DNA, 25 bp, Probe sequence
cacatcaatattcagtaccagcaat

SEQ ID NO: 48476 - DNA, 25 bp, Probe sequence
caatattcagtaccagcaatgtgta

SEQ ID NO: 48477 - DNA, 25 bp, Probe sequence
catcaatattcagtaccagcaatgt

SEQ ID NO: 48478 - DNA, 25 bp, Probe sequence
acatcaatattcagtaccagcaatg

SEQ ID NO: 48479 - DNA, 25 bp, Probe sequence
aatattcagtaccagcaatgtgtaa

SEQ ID NO: 48480 - DNA, 25 bp, Probe sequence
gcacatcaatattcagtaccagcaa

SEQ ID NO: 48481 - DNA, 25 bp, Probe sequence
aatgcacatcaatattcagtaccag

SEQ ID NO: 48482 - DNA, 25 bp, Probe sequence
gtggagttacattagcaggtgatta

SEQ ID NO: 48483 - DNA, 25 bp, Probe sequence
atatacggtggagttacattagcag

SEQ ID NO: 48484 - DNA, 25 bp, Probe sequence
tggagttacattagcaggtgattat

SEQ ID NO: 48485 - DNA, 25 bp, Probe sequence
ggagttacattagcaggtgattatt

SEQ ID NO: 48486 - DNA, 25 bp, Probe sequence
tatacggtggagttacattagcagg

SEQ ID NO: 48487 - DNA, 25 bp, Probe sequence
tatatacggtggagttacattagca

SEQ ID NO: 48488 - DNA, 25 bp, Probe sequence
atcatgctgtagatgtatatggtct

SEQ ID NO: 48489 - DNA, 25 bp, Probe sequence
ggtggagttacattagcaggtgatt

SEQ ID NO: 48490 - DNA, 25 bp, Probe sequence
tatggataattcgacagtaacagct

SEQ ID NO: 48491 - DNA, 25 bp, Probe sequence
gcagttattaaattagggcagttgt

SEQ ID NO: 48492 - DNA, 25 bp, Probe sequence
attaaattagggcagttgtttgaaa

SEQ ID NO: 48493 - DNA, 25 bp, Probe sequence
cagttattaaattagggcagttgtt

SEQ ID NO: 48494 - DNA, 25 bp, Probe sequence
agaggtgcagttattaaattagggc

SEQ ID NO: 48495 - DNA, 25 bp, Probe sequence
gttattaaattagggcagttgtttg

SEQ ID NO: 48496 - DNA, 25 bp, Probe sequence
aagaggtgcagttattaaattaggg

SEQ ID NO: 48497 - DNA, 25 bp, Probe sequence
tattaaattagggcagttgtttgaa

SEQ ID NO: 48498 - DNA, 25 bp, Probe sequence
ttattaaattagggcagttgtttga

SEQ ID NO: 48499 - DNA, 25 bp, Probe sequence
agttattaaattagggcagttgttt

SEQ ID NO: 48500 - DNA, 25 bp, Probe sequence
gtaggaattatggcaggtcaagtta

SEQ ID NO: 48501 - DNA, 25 bp, Probe sequence
taggaattatggcaggtcaagttat

SEQ ID NO: 48502 - DNA, 25 bp, Probe sequence
ggaattatggcaggtcaagttatct

SEQ ID NO: 48503 - DNA, 25 bp, Probe sequence
aggaattatggcaggtcaagttatc

SEQ ID NO: 48504 - DNA, 25 bp, Probe sequence
cttgatgaagcagtaggaattatgg

SEQ ID NO: 48505 - DNA, 25 bp, Probe sequence
ttgatgaagcagtaggaattatggc

SEQ ID NO: 48506 - DNA, 25 bp, Probe sequence
tattgaacttgatgaagcagtagga

SEQ ID NO: 48507 - DNA, 25 bp, Probe sequence
ttgaacttgatgaagcagtaggaat

SEQ ID NO: 48508 - DNA, 25 bp, Probe sequence
attgaacttgatgaagcagtaggaa

SEQ ID NO: 48509 - DNA, 25 bp, Probe sequence
gcgcaaagaatacttaaaccaattt

SEQ ID NO: 48510 - DNA, 25 bp, Probe sequence
cgcgcaaagaatacttaaaccaatt

SEQ ID NO: 48511 - DNA, 25 bp, Probe sequence
agagttaagaagcgagcatatagtg

SEQ ID NO: 48512 - DNA, 25 bp, Probe sequence
aagagttaagaagcgagcatatagt

SEQ ID NO: 48513 - DNA, 25 bp, Probe sequence
agttaagaagcgagcatatagtgtc

SEQ ID NO: 48514 - DNA, 25 bp, Probe sequence
gagttaagaagcgagcatatagtgt

SEQ ID NO: 48515 - DNA, 25 bp, Probe sequence
aataacacagatgaacaggacagac

SEQ ID NO: 48516 - DNA, 25 bp, Probe sequence
taacacagatgaacaggacagacta

SEQ ID NO: 48517 - DNA, 25 bp, Probe sequence
cacagatgaacaggacagactaatt

SEQ ID NO: 48518 - DNA, 25 bp, Probe sequence
acacagatgaacaggacagactaat

SEQ ID NO: 48519 - DNA, 25 bp, Probe sequence
ataacacagatgaacaggacagact

SEQ ID NO: 48520 - DNA, 25 bp, Probe sequence
ttcacagtcttagcgattgtactta

SEQ ID NO: 48521 - DNA, 25 bp, Probe sequence
cacagtcttagcgattgtacttatg

SEQ ID NO: 48522 - DNA, 25 bp, Probe sequence
tcacagtcttagcgattgtacttat

SEQ ID NO: 48523 - DNA, 25 bp, Probe sequence
cttcacagtcttagcgattgtactt

SEQ ID NO: 48524 - DNA, 25 bp, Probe sequence
acagtcttagcgattgtacttatgc

SEQ ID NO: 48525 - DNA, 25 bp, Probe sequence
cagtcttagcgattgtacttatgcc

SEQ ID NO: 48526 - DNA, 25 bp, Probe sequence
tcttagcgattgtacttatgccgtt

SEQ ID NO: 48527 - DNA, 25 bp, Probe sequence
cgattgtacttatgccgtttctata

SEQ ID NO: 48528 - DNA, 25 bp, Probe sequence
gtcttagcgattgtacttatgccgt

SEQ ID NO: 48529 - DNA, 25 bp, Probe sequence
agagttaagagcacaaggtatcgta

SEQ ID NO: 48530 - DNA, 25 bp, Probe sequence
ttaagagcacaaggtatcgtacatt

SEQ ID NO: 48531 - DNA, 25 bp, Probe sequence
aagagcacaaggtatcgtacattat

SEQ ID NO: 48532 - DNA, 25 bp, Probe sequence
agagcacaaggtatcgtacattatc

SEQ ID NO: 48533 - DNA, 25 bp, Probe sequence
taagagcacaaggtatcgtacatta

SEQ ID NO: 48534 - DNA, 25 bp, Probe sequence
gttaagagcacaaggtatcgtacat

SEQ ID NO: 48535 - DNA, 25 bp, Probe sequence
aagagttaagagcacaaggtatcgt

SEQ ID NO: 48536 - DNA, 25 bp, Probe sequence
gagttaagagcacaaggtatcgtac

SEQ ID NO: 48537 - DNA, 25 bp, Probe sequence
ggtatcgtacattatcctgatgaga

SEQ ID NO: 48538 - DNA, 25 bp, Probe sequence
tacaagaggtatctaacgctaatcc

SEQ ID NO: 48539 - DNA, 25 bp, Probe sequence
ggtacaagaggtatctaacgctaat

SEQ ID NO: 48540 - DNA, 25 bp, Probe sequence
taagacggtacaagaggtatctaac

SEQ ID NO: 48541 - DNA, 25 bp, Probe sequence
ggtatctaacgctaatcctaatcat

SEQ ID NO: 48542 - DNA, 25 bp, Probe sequence
gtacaagaggtatctaacgctaatc

SEQ ID NO: 48543 - DNA, 25 bp, Probe sequence
ttagataagacggtacaagaggtat

SEQ ID NO: 48544 - DNA, 25 bp, Probe sequence
caagaggtatctaacgctaatccta

SEQ ID NO: 48545 - DNA, 25 bp, Probe sequence
acaagaggtatctaacgctaatcct

SEQ ID NO: 48546 - DNA, 25 bp, Probe sequence
aagacggtacaagaggtatctaacg

SEQ ID NO: 48547 - DNA, 25 bp, Probe sequence
ctaatgaatggatggcagacgataa

SEQ ID NO: 48548 - DNA, 25 bp, Probe sequence
taatgaatggatggcagacgataac

SEQ ID NO: 48549 - DNA, 25 bp, Probe sequence
tagcaatgtcttagagtgttcagaa

SEQ ID NO: 48550 - DNA, 25 bp, Probe sequence
ttagcaatgtcttagagtgttcaga

SEQ ID NO: 48551 - DNA, 25 bp, Probe sequence
attagcaatgtcttagagtgttcag

SEQ ID NO: 48552 - DNA, 25 bp, Probe sequence
agcgaactataagtgatgtgttgat

SEQ ID NO: 48553 - DNA, 25 bp, Probe sequence
aagcgaactataagtgatgtgttga

SEQ ID NO: 48554 - DNA, 25 bp, Probe sequence
aagtgatgtgttgatagatgatgaa

SEQ ID NO: 48555 - DNA, 25 bp, Probe sequence
taagcgaactataagtgatgtgttg

SEQ ID NO: 48556 - DNA, 25 bp, Probe sequence
cgtaatggcgacaataaactatctg

SEQ ID NO: 48557 - DNA, 25 bp, Probe sequence
cgtgtctgtctcatatccgattgaa

SEQ ID NO: 48558 - DNA, 25 bp, Probe sequence
acgcaatttaacccagcatttatta

SEQ ID NO: 48559 - DNA, 25 bp, Probe sequence
taacgcaatttaacccagcatttat

SEQ ID NO: 48560 - DNA, 25 bp, Probe sequence
aacgcaatttaacccagcatttatt

SEQ ID NO: 48561 - DNA, 25 bp, Probe sequence
gtaatggcgacaataaactatctga

SEQ ID NO: 48562 - DNA, 25 bp, Probe sequence
taatggcgacaataaactatctgag

SEQ ID NO: 48563 - DNA, 25 bp, Probe sequence
ttaacgcaatttaacccagcattta

SEQ ID NO: 48564 - DNA, 25 bp, Probe sequence
attaacgcaatttaacccagcattt

SEQ ID NO: 48565 - DNA, 25 bp, Probe sequence
tacaacaatcagaacagtctaagca

SEQ ID NO: 48566 - DNA, 25 bp, Probe sequence
ttacaacaatcagaacagtctaagc

SEQ ID NO: 48567 - DNA, 25 bp, Probe sequence
acaacaatcagaacagtctaagcaa

SEQ ID NO: 48568 - DNA, 25 bp, Probe sequence
tgagttacaacaatcagaacagtct

SEQ ID NO: 48569 - DNA, 25 bp, Probe sequence
gtgagttacaacaatcagaacagtc

SEQ ID NO: 48570 - DNA, 25 bp, Probe sequence
agtgagttacaacaatcagaacagt

SEQ ID NO: 48571 - DNA, 25 bp, Probe sequence
caagtgagttacaacaatcagaaca

SEQ ID NO: 48572 - DNA, 25 bp, Probe sequence
aagtgagttacaacaatcagaacag

SEQ ID NO: 48573 - DNA, 25 bp, Probe sequence
tcaagtgagttacaacaatcagaac

SEQ ID NO: 48574 - DNA, 25 bp, Probe sequence
aggctatacaagaattggaacaaga

SEQ ID NO: 48575 - DNA, 25 bp, Probe sequence
ggctatacaagaattggaacaagag

SEQ ID NO: 48576 - DNA, 25 bp, Probe sequence
aaggctatacaagaattggaacaag

SEQ ID NO: 48577 - DNA, 25 bp, Probe sequence
aaaggctatacaagaattggaacaa

SEQ ID NO: 48578 - DNA, 25 bp, Probe sequence
aaaaggctatacaagaattggaaca

SEQ ID NO: 48579 - DNA, 25 bp, Probe sequence
acaaaaggctatacaagaattggaa

SEQ ID NO: 48580 - DNA, 25 bp, Probe sequence
aacaaaaggctatacaagaattgga

SEQ ID NO: 48581 - DNA, 25 bp, Probe sequence
caacaaaaggctatacaagaattgg

SEQ ID NO: 48582 - DNA, 25 bp, Probe sequence
caaaaggctatacaagaattggaac

SEQ ID NO: 48583 - DNA, 25 bp, Probe sequence
cgttactaaggtactacacaggatt

SEQ ID NO: 48584 - DNA, 25 bp, Probe sequence
tcaagtaatactgatgtgatagcga

SEQ ID NO: 48585 - DNA, 25 bp, Probe sequence
caagtaatactgatgtgatagcgaa

SEQ ID NO: 48586 - DNA, 25 bp, Probe sequence
agcaagctattcggtcatgtatata

SEQ ID NO: 48587 - DNA, 25 bp, Probe sequence
cagcaagctattcggtcatgtatat

SEQ ID NO: 48588 - DNA, 25 bp, Probe sequence
aagtaatactgatgtgatagcgaat

SEQ ID NO: 48589 - DNA, 25 bp, Probe sequence
gtaggttatgaattacatgacggta

SEQ ID NO: 48590 - DNA, 25 bp, Probe sequence
gcaagctattcggtcatgtatatat

SEQ ID NO: 48591 - DNA, 25 bp, Probe sequence
acgttactaaggtactacacaggat

SEQ ID NO: 48592 - DNA, 25 bp, Probe sequence
cttgagttaagtgtcgtgaataatt

SEQ ID NO: 48593 - DNA, 25 bp, Probe sequence
agtgtcgtgaataatttggaaagtt

SEQ ID NO: 48594 - DNA, 25 bp, Probe sequence
aagtgtcgtgaataatttggaaagt

SEQ ID NO: 48595 - DNA, 25 bp, Probe sequence
tttggaaagttatgaacacacagaa

SEQ ID NO: 48596 - DNA, 25 bp, Probe sequence
ttggaaagttatgaacacacagaat

SEQ ID NO: 48597 - DNA, 25 bp, Probe sequence
atttggaaagttatgaacacacaga

SEQ ID NO: 48598 - DNA, 25 bp, Probe sequence
agttaagtgtcgtgaataatttgga

SEQ ID NO: 48599 - DNA, 25 bp, Probe sequence
gagttaagtgtcgtgaataatttgg

SEQ ID NO: 48600 - DNA, 25 bp, Probe sequence
tggaaagttatgaacacacagaata

SEQ ID NO: 48601 - DNA, 25 bp, Probe sequence
tatctgtcgaaagtgcatacgttag

SEQ ID NO: 48602 - DNA, 25 bp, Probe sequence
caaattgttgatattgctgtttcga

SEQ ID NO: 48603 - DNA, 25 bp, Probe sequence
gaaagtgcatacgttagtctgatcg

SEQ ID NO: 48604 - DNA, 25 bp, Probe sequence
cgaaagtgcatacgttagtctgatc

SEQ ID NO: 48605 - DNA, 25 bp, Probe sequence
aaatgtatctgtcgaaagtgcatac

SEQ ID NO: 48606 - DNA, 25 bp, Probe sequence
tcgaaagtgcatacgttagtctgat

SEQ ID NO: 48607 - DNA, 25 bp, Probe sequence
gtatctgtcgaaagtgcatacgtta

SEQ ID NO: 48608 - DNA, 25 bp, Probe sequence
atctgtcgaaagtgcatacgttagt

SEQ ID NO: 48609 - DNA, 25 bp, Probe sequence
tcaaattgttgatattgctgtttcg

SEQ ID NO: 48610 - DNA, 25 bp, Probe sequence
aaggttgtgtagatgtttatgaggt

SEQ ID NO: 48611 - DNA, 25 bp, Probe sequence
gaaggttgtgtagatgtttatgagg

SEQ ID NO: 48612 - DNA, 25 bp, Probe sequence
aggttgtgtagatgtttatgaggta

SEQ ID NO: 48613 - DNA, 25 bp, Probe sequence
tggtgaatatgtattctgtccactt

SEQ ID NO: 48614 - DNA, 25 bp, Probe sequence
ggttgtgtagatgtttatgaggtag

SEQ ID NO: 48615 - DNA, 25 bp, Probe sequence
ggtgaatatgtattctgtccacttc

SEQ ID NO: 48616 - DNA, 25 bp, Probe sequence
tgaaggttgtgtagatgtttatgag

SEQ ID NO: 48617 - DNA, 25 bp, Probe sequence
ctgatgaaggttgtgtagatgttta

SEQ ID NO: 48618 - DNA, 25 bp, Probe sequence
gttattgtcaaaggcaaagaggtag

SEQ ID NO: 48619 - DNA, 25 bp, Probe sequence
cactctatctccagcataataccaa

SEQ ID NO: 48620 - DNA, 25 bp, Probe sequence
acactctatctccagcataatacca

SEQ ID NO: 48621 - DNA, 25 bp, Probe sequence
cgtattacactctatctccagcata

SEQ ID NO: 48622 - DNA, 25 bp, Probe sequence
tacactctatctccagcataatacc

SEQ ID NO: 48623 - DNA, 25 bp, Probe sequence
gcgtattacactctatctccagcat

SEQ ID NO: 48624 - DNA, 25 bp, Probe sequence
ttacactctatctccagcataatac

SEQ ID NO: 48625 - DNA, 25 bp, Probe sequence
gtattacactctatctccagcataa

SEQ ID NO: 48626 - DNA, 25 bp, Probe sequence
ataccaaagaacccaataccatcaa

SEQ ID NO: 48627 - DNA, 25 bp, Probe sequence
aataccaaagaacccaataccatca

SEQ ID NO: 48628 - DNA, 25 bp, Probe sequence
aactttcaatttgtaggtgatttaa

SEQ ID NO: 48629 - DNA, 25 bp, Probe sequence
actttcaatttgtaggtgatttaat

SEQ ID NO: 48630 - DNA, 25 bp, Probe sequence
ataactttcaatttgtaggtgattt

SEQ ID NO: 48631 - DNA, 25 bp, Probe sequence
aataactttcaatttgtaggtgatt

SEQ ID NO: 48632 - DNA, 25 bp, Probe sequence
aaaagtgaaagattaagtgagttac

SEQ ID NO: 48633 - DNA, 25 bp, Probe sequence
aatcatattaattagtgttgcaagt

SEQ ID NO: 48634 - DNA, 25 bp, Probe sequence
ttaaaagtgaaagattaagtgagtt

SEQ ID NO: 48635 - DNA, 25 bp, Probe sequence
cacctgaaaataactttcaatttgt

SEQ ID NO: 48636 - DNA, 25 bp, Probe sequence
agtgttgcaagtatctattttaaaa

SEQ ID NO: 48637 - DNA, 25 bp, Probe sequence
tggattgttgattctgagatggtaa

SEQ ID NO: 48638 - DNA, 25 bp, Probe sequence
ttggattgttgattctgagatggta

SEQ ID NO: 48639 - DNA, 25 bp, Probe sequence
attggattgttgattctgagatggt

SEQ ID NO: 48640 - DNA, 25 bp, Probe sequence
gttgattctgagatggtaattgagc

SEQ ID NO: 48641 - DNA, 25 bp, Probe sequence
aatcctaatgttccaagttattccg

SEQ ID NO: 48642 - DNA, 25 bp, Probe sequence
aattggattgttgattctgagatgg

SEQ ID NO: 48643 - DNA, 25 bp, Probe sequence
aacgatgattacaatgtgaagcaac

SEQ ID NO: 48644 - DNA, 25 bp, Probe sequence
atcctaatgttccaagttattccgc

SEQ ID NO: 48645 - DNA, 25 bp, Probe sequence
ggattgttgattctgagatggtaat

SEQ ID NO: 48646 - DNA, 25 bp, Probe sequence
gaacattgatttatgtcccagcctg

SEQ ID NO: 48647 - DNA, 25 bp, Probe sequence
cggcaaggttgactagaattgaaaa

SEQ ID NO: 48648 - DNA, 25 bp, Probe sequence
ccggcaaggttgactagaattgaaa

SEQ ID NO: 48649 - DNA, 25 bp, Probe sequence
aacattgatttatgtcccagcctgg

SEQ ID NO: 48650 - DNA, 25 bp, Probe sequence
acattgatttatgtcccagcctgga

SEQ ID NO: 48651 - DNA, 25 bp, Probe sequence
cccggcaaggttgactagaattgaa

SEQ ID NO: 48652 - DNA, 25 bp, Probe sequence
cattgatttatgtcccagcctggac

SEQ ID NO: 48653 - DNA, 25 bp, Probe sequence
ttctgttagaccacttgaagttacg

SEQ ID NO: 48654 - DNA, 25 bp, Probe sequence
ttagaccacttgaagttacggttat

SEQ ID NO: 48655 - DNA, 25 bp, Probe sequence
gttagaccacttgaagttacggtta

SEQ ID NO: 48656 - DNA, 25 bp, Probe sequence
tagaccacttgaagttacggttata

SEQ ID NO: 48657 - DNA, 25 bp, Probe sequence
tctgttagaccacttgaagttacgg

SEQ ID NO: 48658 - DNA, 25 bp, Probe sequence
agaccacttgaagttacggttataa

SEQ ID NO: 48659 - DNA, 25 bp, Probe sequence
tgttagaccacttgaagttacggtt

SEQ ID NO: 48660 - DNA, 25 bp, Probe sequence
ctgttagaccacttgaagttacggt

SEQ ID NO: 48661 - DNA, 25 bp, Probe sequence
cggttataaataggagtgaagttgt

SEQ ID NO: 48662 - DNA, 25 bp, Probe sequence
tgtcatgctatttgtatggtcgtaa

SEQ ID NO: 48663 - DNA, 25 bp, Probe sequence
ttgtcatgctatttgtatggtcgta

SEQ ID NO: 48664 - DNA, 25 bp, Probe sequence
gatggttgtcatgctatttgtatgg

SEQ ID NO: 48665 - DNA, 25 bp, Probe sequence
gtcatgctatttgtatggtcgtaaa

SEQ ID NO: 48666 - DNA, 25 bp, Probe sequence
agatggttgtcatgctatttgtatg

SEQ ID NO: 48667 - DNA, 25 bp, Probe sequence
atggttgtcatgctatttgtatggt

SEQ ID NO: 48668 - DNA, 25 bp, Probe sequence
atgctatttgtatggtcgtaaatgt

SEQ ID NO: 48669 - DNA, 25 bp, Probe sequence
caagatggttgtcatgctatttgta

SEQ ID NO: 48670 - DNA, 25 bp, Probe sequence
aagatggttgtcatgctatttgtat

SEQ ID NO: 48671 - DNA, 25 bp, Probe sequence
tgttatggtcaactatatcgtggtt

SEQ ID NO: 48672 - DNA, 25 bp, Probe sequence
ttgttatggtcaactatatcgtggt

SEQ ID NO: 48673 - DNA, 25 bp, Probe sequence
aatttgtttggtaatgaacgggttt

SEQ ID NO: 48674 - DNA, 25 bp, Probe sequence
taatttgtttggtaatgaacgggtt

SEQ ID NO: 48675 - DNA, 25 bp, Probe sequence
ataatttgtttggtaatgaacgggt

SEQ ID NO: 48676 - DNA, 25 bp, Probe sequence
gttatggtcaactatatcgtggttt

SEQ ID NO: 48677 - DNA, 25 bp, Probe sequence
tataatttgtttggtaatgaacggg

SEQ ID NO: 48678 - DNA, 25 bp, Probe sequence
gttgttatggtcaactatatcgtgg

SEQ ID NO: 48679 - DNA, 25 bp, Probe sequence
atttgtttggtaatgaacgggtttt

SEQ ID NO: 48680 - DNA, 25 bp, Probe sequence
gtttctgtgtataaagcattcggtc

SEQ ID NO: 48681 - DNA, 25 bp, Probe sequence
ttgtttgtggttaatgtttctgtgt

SEQ ID NO: 48682 - DNA, 25 bp, Probe sequence
ggtttgtttgtggttaatgtttctg

SEQ ID NO: 48683 - DNA, 25 bp, Probe sequence
aggtttgtttgtggttaatgtttct

SEQ ID NO: 48684 - DNA, 25 bp, Probe sequence
tctgtgtataaagcattcggtcaaa

SEQ ID NO: 48685 - DNA, 25 bp, Probe sequence
ttctgtgtataaagcattcggtcaa

SEQ ID NO: 48686 - DNA, 25 bp, Probe sequence
tttctgtgtataaagcattcggtca

SEQ ID NO: 48687 - DNA, 25 bp, Probe sequence
atgtttctgtgtataaagcattcgg

SEQ ID NO: 48688 - DNA, 25 bp, Probe sequence
tgtttgtggttaatgtttctgtgta

SEQ ID NO: 48689 - DNA, 25 bp, Probe sequence
atacttcactacagcatggtcaatc

SEQ ID NO: 48690 - DNA, 25 bp, Probe sequence
tacttcactacagcatggtcaatcg

SEQ ID NO: 48691 - DNA, 25 bp, Probe sequence
ctcatgccgtttctatacttcacta

SEQ ID NO: 48692 - DNA, 25 bp, Probe sequence
tcatgccgtttctatacttcactac

SEQ ID NO: 48693 - DNA, 25 bp, Probe sequence
catgccgtttctatacttcactaca

SEQ ID NO: 48694 - DNA, 25 bp, Probe sequence
actcatgccgtttctatacttcact

SEQ ID NO: 48695 - DNA, 25 bp, Probe sequence
gcaagtatagcgacattcatatttt

SEQ ID NO: 48696 - DNA, 25 bp, Probe sequence
aagctacctattagcagtactatgc

SEQ ID NO: 48697 - DNA, 25 bp, Probe sequence
cgcaagtatagcgacattcatattt

SEQ ID NO: 48698 - DNA, 25 bp, Probe sequence
atattggtcttgatgaagcagtagg

SEQ ID NO: 48699 - DNA, 25 bp, Probe sequence
gatattggtcttgatgaagcagtag

SEQ ID NO: 48700 - DNA, 25 bp, Probe sequence
agatattggtcttgatgaagcagta

SEQ ID NO: 48701 - DNA, 25 bp, Probe sequence
ataaatatgaggaggagcaggaaag

SEQ ID NO: 48702 - DNA, 25 bp, Probe sequence
gtggtctataaatatgaggaggagc

SEQ ID NO: 48703 - DNA, 25 bp, Probe sequence
ggcaagtggtctataaatatgagga

SEQ ID NO: 48704 - DNA, 25 bp, Probe sequence
ggtctataaatatgaggaggagcag

SEQ ID NO: 48705 - DNA, 25 bp, Probe sequence
tggtctataaatatgaggaggagca

SEQ ID NO: 48706 - DNA, 25 bp, Probe sequence
gggcaagtggtctataaatatgagg

SEQ ID NO: 48707 - DNA, 25 bp, Probe sequence
ctttcgagcggaggtgagtgaataa

SEQ ID NO: 48708 - DNA, 25 bp, Probe sequence
ttgctgtttgctttcttaatatcca

SEQ ID NO: 48709 - DNA, 25 bp, Probe sequence
tgctgtttgctttcttaatatccat

SEQ ID NO: 48710 - DNA, 25 bp, Probe sequence
tttgctgtttgctttcttaatatcc

SEQ ID NO: 48711 - DNA, 25 bp, Probe sequence
gctgtttgctttcttaatatccata

SEQ ID NO: 48712 - DNA, 25 bp, Probe sequence
ttgatgatggagtgataataaatgc

SEQ ID NO: 48713 - DNA, 25 bp, Probe sequence
tgatgatggagtgataataaatgca

SEQ ID NO: 48714 - DNA, 25 bp, Probe sequence
cgttttgctgtttgctttcttaata

SEQ ID NO: 48715 - DNA, 25 bp, Probe sequence
tcgttttgctgtttgctttcttaat

SEQ ID NO: 48716 - DNA, 25 bp, Probe sequence
atcgttttgctgtttgctttcttaa

SEQ ID NO: 48717 - DNA, 25 bp, Probe sequence
aattctgtaccacctgctgatgatt

SEQ ID NO: 48718 - DNA, 25 bp, Probe sequence
ttactcctgtaacgacactctttaa

SEQ ID NO: 48719 - DNA, 25 bp, Probe sequence
tttactcctgtaacgacactcttta

SEQ ID NO: 48720 - DNA, 25 bp, Probe sequence
attctgtaccacctgctgatgattt

SEQ ID NO: 48721 - DNA, 25 bp, Probe sequence
aaattctgtaccacctgctgatgat

SEQ ID NO: 48722 - DNA, 25 bp, Probe sequence
tactcctgtaacgacactctttaaa

SEQ ID NO: 48723 - DNA, 25 bp, Probe sequence
gaaattctgtaccacctgctgatga

SEQ ID NO: 48724 - DNA, 25 bp, Probe sequence
accacctgctgatgattttaataga

SEQ ID NO: 48725 - DNA, 25 bp, Probe sequence
ccacctgctgatgattttaatagag

SEQ ID NO: 48726 - DNA, 25 bp, Probe sequence
tccatttagttgcccttgtattcta

SEQ ID NO: 48727 - DNA, 25 bp, Probe sequence
ttccatttagttgcccttgtattct

SEQ ID NO: 48728 - DNA, 25 bp, Probe sequence
attccatttagttgcccttgtattc

SEQ ID NO: 48729 - DNA, 25 bp, Probe sequence
ccatttagttgcccttgtattctat

SEQ ID NO: 48730 - DNA, 25 bp, Probe sequence
aattccatttagttgcccttgtatt

SEQ ID NO: 48731 - DNA, 25 bp, Probe sequence
aataattccatttagttgcccttgt

SEQ ID NO: 48732 - DNA, 25 bp, Probe sequence
taattccatttagttgcccttgtat

SEQ ID NO: 48733 - DNA, 25 bp, Probe sequence
ataattccatttagttgcccttgta

SEQ ID NO: 48734 - DNA, 25 bp, Probe sequence
taataattccatttagttgcccttg

SEQ ID NO: 48735 - DNA, 25 bp, Probe sequence
aaccgatgataccacctattgtaat

SEQ ID NO: 48736 - DNA, 25 bp, Probe sequence
accgatgataccacctattgtaatt

SEQ ID NO: 48737 - DNA, 25 bp, Probe sequence
ggaataataatgaatgctccaccag

SEQ ID NO: 48738 - DNA, 25 bp, Probe sequence
ccagctcctacaataccagatacta

SEQ ID NO: 48739 - DNA, 25 bp, Probe sequence
cagctcctacaataccagatactaa

SEQ ID NO: 48740 - DNA, 25 bp, Probe sequence
ctaaaccgatgataccacctattgt

SEQ ID NO: 48741 - DNA, 25 bp, Probe sequence
actaaaccgatgataccacctattg

SEQ ID NO: 48742 - DNA, 25 bp, Probe sequence
aaaccgatgataccacctattgtaa

SEQ ID NO: 48743 - DNA, 25 bp, Probe sequence
ccgatgataccacctattgtaatta

SEQ ID NO: 48744 - DNA, 25 bp, Probe sequence
catgctgatgactaataataacgcc

SEQ ID NO: 48745 - DNA, 25 bp, Probe sequence
gaggaaatacgatgaaacaagcaat

SEQ ID NO: 48746 - DNA, 25 bp, Probe sequence
gaaggaggaaatacgatgaaacaag

SEQ ID NO: 48747 - DNA, 25 bp, Probe sequence
gatgactaataataacgcccaacac

SEQ ID NO: 48748 - DNA, 25 bp, Probe sequence
ctgatgactaataataacgcccaac

SEQ ID NO: 48749 - DNA, 25 bp, Probe sequence
tgatgactaataataacgcccaaca

SEQ ID NO: 48750 - DNA, 25 bp, Probe sequence
tttggaaggaggaaatacgatgaaa

SEQ ID NO: 48751 - DNA, 25 bp, Probe sequence
aaatacgatgaaacaagcaataggt

SEQ ID NO: 48752 - DNA, 25 bp, Probe sequence
tgggctcatctataaattcgttcat

SEQ ID NO: 48753 - DNA, 25 bp, Probe sequence
cttgaaggtaataattgaacacagc

SEQ ID NO: 48754 - DNA, 25 bp, Probe sequence
tgacttgttcgcctatattatcaga

SEQ ID NO: 48755 - DNA, 25 bp, Probe sequence
gacttgttcgcctatattatcagat

SEQ ID NO: 48756 - DNA, 25 bp, Probe sequence
ttgacttgttcgcctatattatcag

SEQ ID NO: 48757 - DNA, 25 bp, Probe sequence
acttgttcgcctatattatcagatt

SEQ ID NO: 48758 - DNA, 25 bp, Probe sequence
ttgttcgcctatattatcagattct

SEQ ID NO: 48759 - DNA, 25 bp, Probe sequence
cttgttcgcctatattatcagattc

SEQ ID NO: 48760 - DNA, 25 bp, Probe sequence
ttgaaggtaataattgaacacagct

SEQ ID NO: 48761 - DNA, 25 bp, Probe sequence
tgaaggtaataattgaacacagctt

SEQ ID NO: 48762 - DNA, 25 bp, Probe sequence
taggaataataatgaaggcaccacc

SEQ ID NO: 48763 - DNA, 25 bp, Probe sequence
attagcgactacagtattcattggt

SEQ ID NO: 48764 - DNA, 25 bp, Probe sequence
agcgactacagtattcattggtaat

SEQ ID NO: 48765 - DNA, 25 bp, Probe sequence
tagcgactacagtattcattggtaa

SEQ ID NO: 48766 - DNA, 25 bp, Probe sequence
ttagcgactacagtattcattggta

SEQ ID NO: 48767 - DNA, 25 bp, Probe sequence
gcgactacagtattcattggtaatt

SEQ ID NO: 48768 - DNA, 25 bp, Probe sequence
ataggaataataatgaaggcaccac

SEQ ID NO: 48769 - DNA, 25 bp, Probe sequence
tattagcgactacagtattcattgg

SEQ ID NO: 48770 - DNA, 25 bp, Probe sequence
tataggaataataatgaaggcacca

SEQ ID NO: 48771 - DNA, 25 bp, Probe sequence
gataagtatatgccttctccttccg

SEQ ID NO: 48772 - DNA, 25 bp, Probe sequence
agataagtatatgccttctccttcc

SEQ ID NO: 48773 - DNA, 25 bp, Probe sequence
aagataagtatatgccttctccttc

SEQ ID NO: 48774 - DNA, 25 bp, Probe sequence
cacttatctttgaccatccttgatt

SEQ ID NO: 48775 - DNA, 25 bp, Probe sequence
acttatctttgaccatccttgattc

SEQ ID NO: 48776 - DNA, 25 bp, Probe sequence
tcacttatctttgaccatccttgat

SEQ ID NO: 48777 - DNA, 25 bp, Probe sequence
atcacttatctttgaccatccttga

SEQ ID NO: 48778 - DNA, 25 bp, Probe sequence
gcggaaacatatcacttatctttga

SEQ ID NO: 48779 - DNA, 25 bp, Probe sequence
cttatctttgaccatccttgattca

SEQ ID NO: 48780 - DNA, 25 bp, Probe sequence
taatagttctttgcttgtgtgttcg

SEQ ID NO: 48781 - DNA, 25 bp, Probe sequence
tctaatagttctttgcttgtgtgtt

SEQ ID NO: 48782 - DNA, 25 bp, Probe sequence
ctaatagttctttgcttgtgtgttc

SEQ ID NO: 48783 - DNA, 25 bp, Probe sequence
atctaatagttctttgcttgtgtgt

SEQ ID NO: 48784 - DNA, 25 bp, Probe sequence
atcgggaatatcatcgttaattgtt

SEQ ID NO: 48785 - DNA, 25 bp, Probe sequence
tcgggaatatcatcgttaattgtta

SEQ ID NO: 48786 - DNA, 25 bp, Probe sequence
aatctaatagttctttgcttgtgtg

SEQ ID NO: 48787 - DNA, 25 bp, Probe sequence
tatcgggaatatcatcgttaattgt

SEQ ID NO: 48788 - DNA, 25 bp, Probe sequence
catctactttactcatgcgtttgat

SEQ ID NO: 48789 - DNA, 25 bp, Probe sequence
ttcttctggcaatcttcctactatt

SEQ ID NO: 48790 - DNA, 25 bp, Probe sequence
attcttctggcaatcttcctactat

SEQ ID NO: 48791 - DNA, 25 bp, Probe sequence
atattcttctggcaatcttcctact

SEQ ID NO: 48792 - DNA, 25 bp, Probe sequence
tattcttctggcaatcttcctacta

SEQ ID NO: 48793 - DNA, 25 bp, Probe sequence
gtataagtctgccaactctattcca

SEQ ID NO: 48794 - DNA, 25 bp, Probe sequence
tgtataagtctgccaactctattcc

SEQ ID NO: 48795 - DNA, 25 bp, Probe sequence
ataagtctgccaactctattccatt

SEQ ID NO: 48796 - DNA, 25 bp, Probe sequence
tataagtctgccaactctattccat

SEQ ID NO: 48797 - DNA, 25 bp, Probe sequence
ttgtataagtctgccaactctattc

SEQ ID NO: 48798 - DNA, 25 bp, Probe sequence
tacttactactctgacacacttcat

SEQ ID NO: 48799 - DNA, 25 bp, Probe sequence
atacttactactctgacacacttca

SEQ ID NO: 48800 - DNA, 25 bp, Probe sequence
cacagttatgccactactagatcaa

SEQ ID NO: 48801 - DNA, 25 bp, Probe sequence
aacacagttatgccactactagatc

SEQ ID NO: 48802 - DNA, 25 bp, Probe sequence
agtggcagataatatccttcctgat

SEQ ID NO: 48803 - DNA, 25 bp, Probe sequence
acttactactctgacacacttcatg

SEQ ID NO: 48804 - DNA, 25 bp, Probe sequence
aagtggcagataatatccttcctga

SEQ ID NO: 48805 - DNA, 25 bp, Probe sequence
acacagttatgccactactagatca

SEQ ID NO: 48806 - DNA, 25 bp, Probe sequence
aatatatcagacttggtccgcttac

SEQ ID NO: 48807 - DNA, 25 bp, Probe sequence
tgaagtgtgtcagagtagtaagtat

SEQ ID NO: 48808 - DNA, 25 bp, Probe sequence
atgaagtgtgtcagagtagtaagta

SEQ ID NO: 48809 - DNA, 25 bp, Probe sequence
atcaggaaggatattatctgccact

SEQ ID NO: 48810 - DNA, 25 bp, Probe sequence
catgaagtgtgtcagagtagtaagt

SEQ ID NO: 48811 - DNA, 25 bp, Probe sequence
tcaggaaggatattatctgccactt

SEQ ID NO: 48812 - DNA, 25 bp, Probe sequence
taagcggaccaagtctgatatattg

SEQ ID NO: 48813 - DNA, 25 bp, Probe sequence
gtaagcggaccaagtctgatatatt

SEQ ID NO: 48814 - DNA, 25 bp, Probe sequence
gatcaggaaggatattatctgccac

SEQ ID NO: 48815 - DNA, 25 bp, Probe sequence
cacttcctcgatagattcacattcc

SEQ ID NO: 48816 - DNA, 25 bp, Probe sequence
cctggaataaccaatagtaaggcaa

SEQ ID NO: 48817 - DNA, 25 bp, Probe sequence
cagcctggaataaccaatagtaagg

SEQ ID NO: 48818 - DNA, 25 bp, Probe sequence
ctggaataaccaatagtaaggcaat

SEQ ID NO: 48819 - DNA, 25 bp, Probe sequence
cgtgatgttcgctttgatgatattt

SEQ ID NO: 48820 - DNA, 25 bp, Probe sequence
tggaataaccaatagtaaggcaatt

SEQ ID NO: 48821 - DNA, 25 bp, Probe sequence
attatcttaattccgatggcaaacg

SEQ ID NO: 48822 - DNA, 25 bp, Probe sequence
actctcatcagtcgcaaactattta

SEQ ID NO: 48823 - DNA, 25 bp, Probe sequence
gcaattatcttaattccgatggcaa

SEQ ID NO: 48824 - DNA, 25 bp, Probe sequence
atttatccttcactctcatcagtcg

SEQ ID NO: 48825 - DNA, 25 bp, Probe sequence
tgctattgttcactaccgtattcat

SEQ ID NO: 48826 - DNA, 25 bp, Probe sequence
atgctattgttcactaccgtattca

SEQ ID NO: 48827 - DNA, 25 bp, Probe sequence
gctatgctattgttcactaccgtat

SEQ ID NO: 48828 - DNA, 25 bp, Probe sequence
gctattgttcactaccgtattcatt

SEQ ID NO: 48829 - DNA, 25 bp, Probe sequence
aattgctatgctattgttcactacc

SEQ ID NO: 48830 - DNA, 25 bp, Probe sequence
tattgttcactaccgtattcattgg

SEQ ID NO: 48831 - DNA, 25 bp, Probe sequence
attgctatgctattgttcactaccg

SEQ ID NO: 48832 - DNA, 25 bp, Probe sequence
tatgctattgttcactaccgtattc

SEQ ID NO: 48833 - DNA, 25 bp, Probe sequence
ctatgctattgttcactaccgtatt

SEQ ID NO: 48834 - DNA, 25 bp, Probe sequence
cctggagtgtgtaagacttctaatt

SEQ ID NO: 48835 - DNA, 25 bp, Probe sequence
gcctggagtgtgtaagacttctaat

SEQ ID NO: 48836 - DNA, 25 bp, Probe sequence
gaagtcaccgctaaataatcccatt

SEQ ID NO: 48837 - DNA, 25 bp, Probe sequence
aagtcaccgctaaataatcccattg

SEQ ID NO: 48838 - DNA, 25 bp, Probe sequence
tgaagtcaccgctaaataatcccat

SEQ ID NO: 48839 - DNA, 25 bp, Probe sequence
atgaagtcaccgctaaataatccca

SEQ ID NO: 48840 - DNA, 25 bp, Probe sequence
ctggagtgtgtaagacttctaattt

SEQ ID NO: 48841 - DNA, 25 bp, Probe sequence
accgctaaataatcccattggtata

SEQ ID NO: 48842 - DNA, 25 bp, Probe sequence
caccgctaaataatcccattggtat

SEQ ID NO: 48843 - DNA, 25 bp, Probe sequence
taatgcttgtaataacaccagtgaa

SEQ ID NO: 48844 - DNA, 25 bp, Probe sequence
ataatgcttgtaataacaccagtga

SEQ ID NO: 48845 - DNA, 25 bp, Probe sequence
caataatgcttgtaataacaccagt

SEQ ID NO: 48846 - DNA, 25 bp, Probe sequence
aataatgcttgtaataacaccagtg

SEQ ID NO: 48847 - DNA, 25 bp, Probe sequence
tcaataatgcttgtaataacaccag

SEQ ID NO: 48848 - DNA, 25 bp, Probe sequence
tgcttgtaataacaccagtgaaatc

SEQ ID NO: 48849 - DNA, 25 bp, Probe sequence
gcttgtaataacaccagtgaaatcc

SEQ ID NO: 48850 - DNA, 25 bp, Probe sequence
aatgcttgtaataacaccagtgaaa

SEQ ID NO: 48851 - DNA, 25 bp, Probe sequence
cttgtaataacaccagtgaaatcca

SEQ ID NO: 48852 - DNA, 25 bp, Probe sequence
tatggaggtgtagaaggtgttatca

SEQ ID NO: 48853 - DNA, 25 bp, Probe sequence
tgatatggaggtgtagaaggtgtta

SEQ ID NO: 48854 - DNA, 25 bp, Probe sequence
atatggaggtgtagaaggtgttatc

SEQ ID NO: 48855 - DNA, 25 bp, Probe sequence
gatatggaggtgtagaaggtgttat

SEQ ID NO: 48856 - DNA, 25 bp, Probe sequence
gaggtgtagaaggtgttatcatctt

SEQ ID NO: 48857 - DNA, 25 bp, Probe sequence
atggaggtgtagaaggtgttatcat

SEQ ID NO: 48858 - DNA, 25 bp, Probe sequence
ttaatacaagcaccgttactatctg

SEQ ID NO: 48859 - DNA, 25 bp, Probe sequence
tggaggtgtagaaggtgttatcatc

SEQ ID NO: 48860 - DNA, 25 bp, Probe sequence
ggaggtgtagaaggtgttatcatct

SEQ ID NO: 48861 - DNA, 25 bp, Probe sequence
ttcttcttctgtaatatgaaggctt

SEQ ID NO: 48862 - DNA, 25 bp, Probe sequence
ttttgttttgaatgtttctcctact

SEQ ID NO: 48863 - DNA, 25 bp, Probe sequence
tcttcttctgtaatatgaaggcttt

SEQ ID NO: 48864 - DNA, 25 bp, Probe sequence
tttcttcttctgtaatatgaaggct

SEQ ID NO: 48865 - DNA, 25 bp, Probe sequence
atttcttcttctgtaatatgaaggc

SEQ ID NO: 48866 - DNA, 25 bp, Probe sequence
tttgttttgaatgtttctcctacta

SEQ ID NO: 48867 - DNA, 25 bp, Probe sequence
gcaaattggataatttcttcttctg

SEQ ID NO: 48868 - DNA, 25 bp, Probe sequence
gtttctcctactataaaatcatcgt

SEQ ID NO: 48869 - DNA, 25 bp, Probe sequence
tgtttctcctactataaaatcatcg

SEQ ID NO: 48870 - DNA, 25 bp, Probe sequence
aaactttatcagcgactttaccaaa

SEQ ID NO: 48871 - DNA, 25 bp, Probe sequence
aactttatcagcgactttaccaaat

SEQ ID NO: 48872 - DNA, 25 bp, Probe sequence
actttatcagcgactttaccaaatt

SEQ ID NO: 48873 - DNA, 25 bp, Probe sequence
ctttatcagcgactttaccaaattg

SEQ ID NO: 48874 - DNA, 25 bp, Probe sequence
tgaagttagaaacaaatggaatggt

SEQ ID NO: 48875 - DNA, 25 bp, Probe sequence
ttcactggtcttatgatttctgtca

SEQ ID NO: 48876 - DNA, 25 bp, Probe sequence
gttcactggtcttatgatttctgtc

SEQ ID NO: 48877 - DNA, 25 bp, Probe sequence
tatcagcgactttaccaaattgaag

SEQ ID NO: 48878 - DNA, 25 bp, Probe sequence
ttatcagcgactttaccaaattgaa

SEQ ID NO: 48879 - DNA, 25 bp, Probe sequence
ctattctagcaggttggttccatct

SEQ ID NO: 48880 - DNA, 25 bp, Probe sequence
ttgtagtgtatatcacgatgtggtt

SEQ ID NO: 48881 - DNA, 25 bp, Probe sequence
attgtagtgtatatcacgatgtggt

SEQ ID NO: 48882 - DNA, 25 bp, Probe sequence
acagataccgattggagtataacaa

SEQ ID NO: 48883 - DNA, 25 bp, Probe sequence
tacagataccgattggagtataaca

SEQ ID NO: 48884 - DNA, 25 bp, Probe sequence
atgataatcctattcttcccactcg

SEQ ID NO: 48885 - DNA, 25 bp, Probe sequence
taatcctattcttcccactcgctat

SEQ ID NO: 48886 - DNA, 25 bp, Probe sequence
ataatcctattcttcccactcgcta

SEQ ID NO: 48887 - DNA, 25 bp, Probe sequence
tattgtagtgtatatcacgatgtgg

SEQ ID NO: 48888 - DNA, 25 bp, Probe sequence
ctacttagatcgaactacaggtgag

SEQ ID NO: 48889 - DNA, 25 bp, Probe sequence
tacttagatcgaactacaggtgagg

SEQ ID NO: 48890 - DNA, 25 bp, Probe sequence
tctacttagatcgaactacaggtga

SEQ ID NO: 48891 - DNA, 25 bp, Probe sequence
gtctacttagatcgaactacaggtg

SEQ ID NO: 48892 - DNA, 25 bp, Probe sequence
gtacacttatatgatgcgattgccg

SEQ ID NO: 48893 - DNA, 25 bp, Probe sequence
cgtacacttatatgatgcgattgcc

SEQ ID NO: 48894 - DNA, 25 bp, Probe sequence
ccgtacacttatatgatgcgattgc

SEQ ID NO: 48895 - DNA, 25 bp, Probe sequence
gccgaacagtttaccaaatatcata

SEQ ID NO: 48896 - DNA, 25 bp, Probe sequence
gtgtctacttagatcgaactacagg

SEQ ID NO: 48897 - DNA, 25 bp, Probe sequence
taagacgatacaagtgaatggacaa

SEQ ID NO: 48898 - DNA, 25 bp, Probe sequence
ataagacgatacaagtgaatggaca

SEQ ID NO: 48899 - DNA, 25 bp, Probe sequence
gacgataagacgatacaagtgaatg

SEQ ID NO: 48900 - DNA, 25 bp, Probe sequence
cgataagacgatacaagtgaatgga

SEQ ID NO: 48901 - DNA, 25 bp, Probe sequence
gataagacgatacaagtgaatggac

SEQ ID NO: 48902 - DNA, 25 bp, Probe sequence
acgataagacgatacaagtgaatgg

SEQ ID NO: 48903 - DNA, 25 bp, Probe sequence
cgacgataagacgatacaagtgaat

SEQ ID NO: 48904 - DNA, 25 bp, Probe sequence
ttgaccattgaagaccttacggata

SEQ ID NO: 48905 - DNA, 25 bp, Probe sequence
gcgattacgatcttctgattattgg

SEQ ID NO: 48906 - DNA, 25 bp, Probe sequence
cattgttatgattgctctgatcctc

SEQ ID NO: 48907 - DNA, 25 bp, Probe sequence
aatacaattctcctgaaggcaatgg

SEQ ID NO: 48908 - DNA, 25 bp, Probe sequence
ccattgttatgattgctctgatcct

SEQ ID NO: 48909 - DNA, 25 bp, Probe sequence
attgttatgattgctctgatcctca

SEQ ID NO: 48910 - DNA, 25 bp, Probe sequence
tggttcctttattggttcctttact

SEQ ID NO: 48911 - DNA, 25 bp, Probe sequence
ttattggttcctttactttgttgcg

SEQ ID NO: 48912 - DNA, 25 bp, Probe sequence
ttggttcctttattggttcctttac

SEQ ID NO: 48913 - DNA, 25 bp, Probe sequence
gccattgttatgattgctctgatcc

SEQ ID NO: 48914 - DNA, 25 bp, Probe sequence
ggttcctttattggttcctttactt

SEQ ID NO: 48915 - DNA, 25 bp, Probe sequence
tatcgccttgcttccttcttatatc

SEQ ID NO: 48916 - DNA, 25 bp, Probe sequence
gtatcgccttgcttccttcttatat

SEQ ID NO: 48917 - DNA, 25 bp, Probe sequence
ccttgcttccttcttatatctccta

SEQ ID NO: 48918 - DNA, 25 bp, Probe sequence
atcgccttgcttccttcttatatct

SEQ ID NO: 48919 - DNA, 25 bp, Probe sequence
gccttgcttccttcttatatctcct

SEQ ID NO: 48920 - DNA, 25 bp, Probe sequence
ggtatcgccttgcttccttcttata

SEQ ID NO: 48921 - DNA, 25 bp, Probe sequence
tcgccttgcttccttcttatatctc

SEQ ID NO: 48922 - DNA, 25 bp, Probe sequence
gatcatcaagttcatcatctactcc

SEQ ID NO: 48923 - DNA, 25 bp, Probe sequence
cttgcttccttcttatatctcctat

SEQ ID NO: 48924 - DNA, 25 bp, Probe sequence
ctataatgacggtgttgttaatcgg

SEQ ID NO: 48925 - DNA, 25 bp, Probe sequence
tataatgacggtgttgttaatcggt

SEQ ID NO: 48926 - DNA, 25 bp, Probe sequence
gctataatgacggtgttgttaatcg

SEQ ID NO: 48927 - DNA, 25 bp, Probe sequence
cgctataatgacggtgttgttaatc

SEQ ID NO: 48928 - DNA, 25 bp, Probe sequence
ataatgacggtgttgttaatcggtt

SEQ ID NO: 48929 - DNA, 25 bp, Probe sequence
caacctggtgtccatcttgtatata

SEQ ID NO: 48930 - DNA, 25 bp, Probe sequence
aatcaaaggttcaagacattcaagg

SEQ ID NO: 48931 - DNA, 25 bp, Probe sequence
atcaaaggttcaagacattcaagga

SEQ ID NO: 48932 - DNA, 25 bp, Probe sequence
atccagtcagcctacctaatgagaa

SEQ ID NO: 48933 - DNA, 25 bp, Probe sequence
ttacgaatccaacggttattagagg

SEQ ID NO: 48934 - DNA, 25 bp, Probe sequence
tgttacgaatccaacggttattaga

SEQ ID NO: 48935 - DNA, 25 bp, Probe sequence
gttacgaatccaacggttattagag

SEQ ID NO: 48936 - DNA, 25 bp, Probe sequence
ttgttacgaatccaacggttattag

SEQ ID NO: 48937 - DNA, 25 bp, Probe sequence
cgaatccaacggttattagaggaat

SEQ ID NO: 48938 - DNA, 25 bp, Probe sequence
gaatccaacggttattagaggaatt

SEQ ID NO: 48939 - DNA, 25 bp, Probe sequence
tacgaatccaacggttattagagga

SEQ ID NO: 48940 - DNA, 25 bp, Probe sequence
aaagcgtgtgatgtgaataaagaaa

SEQ ID NO: 48941 - DNA, 25 bp, Probe sequence
tattacgagcggaaaggattgatag

SEQ ID NO: 48942 - DNA, 25 bp, Probe sequence
ttgattagtaatgaagccgatgaac

SEQ ID NO: 48943 - DNA, 25 bp, Probe sequence
tgattagtaatgaagccgatgaact

SEQ ID NO: 48944 - DNA, 25 bp, Probe sequence
gcatacaggtacatcttcaacattc

SEQ ID NO: 48945 - DNA, 25 bp, Probe sequence
agtgctaattgacgaggatagtgat

SEQ ID NO: 48946 - DNA, 25 bp, Probe sequence
catacaggtacatcttcaacattcc

SEQ ID NO: 48947 - DNA, 25 bp, Probe sequence
atacaggtacatcttcaacattccg

SEQ ID NO: 48948 - DNA, 25 bp, Probe sequence
aagtgctaattgacgaggatagtga

SEQ ID NO: 48949 - DNA, 25 bp, Probe sequence
ggcatacaggtacatcttcaacatt

SEQ ID NO: 48950 - DNA, 25 bp, Probe sequence
gtgctaattgacgaggatagtgatc

SEQ ID NO: 48951 - DNA, 25 bp, Probe sequence
aatgtgattgttatggcagatgaag

SEQ ID NO: 48952 - DNA, 25 bp, Probe sequence
agatacgatggattatgtgattggt

SEQ ID NO: 48953 - DNA, 25 bp, Probe sequence
cagatacgatggattatgtgattgg

SEQ ID NO: 48954 - DNA, 25 bp, Probe sequence
aagcggttgaattgatgttattgaa

SEQ ID NO: 48955 - DNA, 25 bp, Probe sequence
gatacgatggattatgtgattggtt

SEQ ID NO: 48956 - DNA, 25 bp, Probe sequence
tgaatgatgaattacaactcgtgat

SEQ ID NO: 48957 - DNA, 25 bp, Probe sequence
atgaatgatgaattacaactcgtga

SEQ ID NO: 48958 - DNA, 25 bp, Probe sequence
cagaacttatggcgagtaatcagta

SEQ ID NO: 48959 - DNA, 25 bp, Probe sequence
agaacttatggcgagtaatcagtaa

SEQ ID NO: 48960 - DNA, 25 bp, Probe sequence
gtgacttgacttctccgtgtatatt

SEQ ID NO: 48961 - DNA, 25 bp, Probe sequence
tgacttgacttctccgtgtatatta

SEQ ID NO: 48962 - DNA, 25 bp, Probe sequence
gacttgacttctccgtgtatattag

SEQ ID NO: 48963 - DNA, 25 bp, Probe sequence
tagtgacttgacttctccgtgtata

SEQ ID NO: 48964 - DNA, 25 bp, Probe sequence
acttgacttctccgtgtatattaga

SEQ ID NO: 48965 - DNA, 25 bp, Probe sequence
agtgacttgacttctccgtgtatat

SEQ ID NO: 48966 - DNA, 25 bp, Probe sequence
ttagtgacttgacttctccgtgtat

SEQ ID NO: 48967 - DNA, 25 bp, Probe sequence
tttagtgacttgacttctccgtgta

SEQ ID NO: 48968 - DNA, 25 bp, Probe sequence
tgacttctccgtgtatattagaacg

SEQ ID NO: 48969 - DNA, 25 bp, Probe sequence
tcacgagttgtaattcatcattcat

SEQ ID NO: 48970 - DNA, 25 bp, Probe sequence
atcacgagttgtaattcatcattca

SEQ ID NO: 48971 - DNA, 25 bp, Probe sequence
aatcacgagttgtaattcatcattc

SEQ ID NO: 48972 - DNA, 25 bp, Probe sequence
caatcacgagttgtaattcatcatt

SEQ ID NO: 48973 - DNA, 25 bp, Probe sequence
ttatcatcatcatctgaatgccatt

SEQ ID NO: 48974 - DNA, 25 bp, Probe sequence
cacgagttgtaattcatcattcata

SEQ ID NO: 48975 - DNA, 25 bp, Probe sequence
atcattcctttacctttcatcgctt

SEQ ID NO: 48976 - DNA, 25 bp, Probe sequence
catcgtataaatcaacagcaattcg

SEQ ID NO: 48977 - DNA, 25 bp, Probe sequence
cctttatcatcatcatctgaatgcc

SEQ ID NO: 48978 - DNA, 25 bp, Probe sequence
ttaggaagtcatctgataggattga

SEQ ID NO: 48979 - DNA, 25 bp, Probe sequence
aggaagtcatctgataggattgata

SEQ ID NO: 48980 - DNA, 25 bp, Probe sequence
taggaagtcatctgataggattgat

SEQ ID NO: 48981 - DNA, 25 bp, Probe sequence
ggaagtcatctgataggattgataa

SEQ ID NO: 48982 - DNA, 25 bp, Probe sequence
cgatttaataattctaccgcaacat

SEQ ID NO: 48983 - DNA, 25 bp, Probe sequence
ttcagagaaacgcttagatactgtc

SEQ ID NO: 48984 - DNA, 25 bp, Probe sequence
tttaggaagtcatctgataggattg

SEQ ID NO: 48985 - DNA, 25 bp, Probe sequence
taggattgataaatcgggttgttca

SEQ ID NO: 48986 - DNA, 25 bp, Probe sequence
tgataggattgataaatcgggttgt

SEQ ID NO: 48987 - DNA, 25 bp, Probe sequence
actattgataagcgaacaggagaat

SEQ ID NO: 48988 - DNA, 25 bp, Probe sequence
cactattgataagcgaacaggagaa

SEQ ID NO: 48989 - DNA, 25 bp, Probe sequence
ctattgataagcgaacaggagaatt

SEQ ID NO: 48990 - DNA, 25 bp, Probe sequence
tcactattgataagcgaacaggaga

SEQ ID NO: 48991 - DNA, 25 bp, Probe sequence
gtcactattgataagcgaacaggag

SEQ ID NO: 48992 - DNA, 25 bp, Probe sequence
ttgatgatagaagcgatgaagataa

SEQ ID NO: 48993 - DNA, 25 bp, Probe sequence
attgatgatagaagcgatgaagata

SEQ ID NO: 48994 - DNA, 25 bp, Probe sequence
tattgatgatagaagcgatgaagat

SEQ ID NO: 48995 - DNA, 25 bp, Probe sequence
atattgatgatagaagcgatgaaga

SEQ ID NO: 48996 - DNA, 25 bp, Probe sequence
attctcctgttcgcttatcaatagt

SEQ ID NO: 48997 - DNA, 25 bp, Probe sequence
ttctcctgttcgcttatcaatagtg

SEQ ID NO: 48998 - DNA, 25 bp, Probe sequence
aattctcctgttcgcttatcaatag

SEQ ID NO: 48999 - DNA, 25 bp, Probe sequence
ctcctgttcgcttatcaatagtgac

SEQ ID NO: 49000 - DNA, 25 bp, Probe sequence
tctcctgttcgcttatcaatagtga

SEQ ID NO: 49001 - DNA, 25 bp, Probe sequence
ttatcttcatcgcttctatcatcaa

SEQ ID NO: 49002 - DNA, 25 bp, Probe sequence
atcttcatcgcttctatcatcaata

SEQ ID NO: 49003 - DNA, 25 bp, Probe sequence
tatcttcatcgcttctatcatcaat

SEQ ID NO: 49004 - DNA, 25 bp, Probe sequence
tcttcatcgcttctatcatcaatat

SEQ ID NO: 49005 - DNA, 25 bp, Probe sequence
aatggttgaagagtggactaagaat

SEQ ID NO: 49006 - DNA, 25 bp, Probe sequence
tagaatggttgaagagtggactaag

SEQ ID NO: 49007 - DNA, 25 bp, Probe sequence
gaatggttgaagagtggactaagaa

SEQ ID NO: 49008 - DNA, 25 bp, Probe sequence
gatagaatggttgaagagtggacta

SEQ ID NO: 49009 - DNA, 25 bp, Probe sequence
cagatagaatggttgaagagtggac

SEQ ID NO: 49010 - DNA, 25 bp, Probe sequence
tggttgaagagtggactaagaataa

SEQ ID NO: 49011 - DNA, 25 bp, Probe sequence
atggttgaagagtggactaagaata

SEQ ID NO: 49012 - DNA, 25 bp, Probe sequence
atagaatggttgaagagtggactaa

SEQ ID NO: 49013 - DNA, 25 bp, Probe sequence
agatagaatggttgaagagtggact

SEQ ID NO: 49014 - DNA, 25 bp, Probe sequence
gaagtatattagccattggagcagt

SEQ ID NO: 49015 - DNA, 25 bp, Probe sequence
aagtatattagccattggagcagta

SEQ ID NO: 49016 - DNA, 25 bp, Probe sequence
agtatattagccattggagcagtat

SEQ ID NO: 49017 - DNA, 25 bp, Probe sequence
ggaagtatattagccattggagcag

SEQ ID NO: 49018 - DNA, 25 bp, Probe sequence
gtatattagccattggagcagtatt

SEQ ID NO: 49019 - DNA, 25 bp, Probe sequence
cctaatatcattggtctaacagtga

SEQ ID NO: 49020 - DNA, 25 bp, Probe sequence
tcaggtggaagtatattagccattg

SEQ ID NO: 49021 - DNA, 25 bp, Probe sequence
ttcaggtggaagtatattagccatt

SEQ ID NO: 49022 - DNA, 25 bp, Probe sequence
ggtggaagtatattagccattggag

SEQ ID NO: 49023 - DNA, 25 bp, Probe sequence
tcactgttagaccaatgatattagg

SEQ ID NO: 49024 - DNA, 25 bp, Probe sequence
catcctaacgcaactttccctattt

SEQ ID NO: 49025 - DNA, 25 bp, Probe sequence
aacgcaactttccctatttgtttaa

SEQ ID NO: 49026 - DNA, 25 bp, Probe sequence
ctaacgcaactttccctatttgttt

SEQ ID NO: 49027 - DNA, 25 bp, Probe sequence
gaagtcaaagcaattagccatccta

SEQ ID NO: 49028 - DNA, 25 bp, Probe sequence
taacgcaactttccctatttgttta

SEQ ID NO: 49029 - DNA, 25 bp, Probe sequence
ctgttagaccaatgatattaggtgt

SEQ ID NO: 49030 - DNA, 25 bp, Probe sequence
actgttagaccaatgatattaggtg

SEQ ID NO: 49031 - DNA, 25 bp, Probe sequence
cactgttagaccaatgatattaggt

SEQ ID NO: 49032 - DNA, 25 bp, Probe sequence
ggattatgatacttatattgcggct

SEQ ID NO: 49033 - DNA, 25 bp, Probe sequence
cttattacaagagagaggattcact

SEQ ID NO: 49034 - DNA, 25 bp, Probe sequence
ccttattacaagagagaggattcac

SEQ ID NO: 49035 - DNA, 25 bp, Probe sequence
gggattatgatacttatattgcggc

SEQ ID NO: 49036 - DNA, 25 bp, Probe sequence
tgatgagagacgctttaagtgatag

SEQ ID NO: 49037 - DNA, 25 bp, Probe sequence
ttgatgagagacgctttaagtgata

SEQ ID NO: 49038 - DNA, 25 bp, Probe sequence
tttgatgagagacgctttaagtgat

SEQ ID NO: 49039 - DNA, 25 bp, Probe sequence
ttattacaagagagaggattcactt

SEQ ID NO: 49040 - DNA, 25 bp, Probe sequence
agtgatagctctaaccaagacttaa

SEQ ID NO: 49041 - DNA, 25 bp, Probe sequence
tagatactgtgaaggaatgctgtaa

SEQ ID NO: 49042 - DNA, 25 bp, Probe sequence
ctagatactgtgaaggaatgctgta

SEQ ID NO: 49043 - DNA, 25 bp, Probe sequence
taacacttacactgaggagtacaag

SEQ ID NO: 49044 - DNA, 25 bp, Probe sequence
gtaacacttacactgaggagtacaa

SEQ ID NO: 49045 - DNA, 25 bp, Probe sequence
agtaacacttacactgaggagtaca

SEQ ID NO: 49046 - DNA, 25 bp, Probe sequence
gatactgtgaaggaatgctgtaaac

SEQ ID NO: 49047 - DNA, 25 bp, Probe sequence
agatactgtgaaggaatgctgtaaa

SEQ ID NO: 49048 - DNA, 25 bp, Probe sequence
cttacactgaggagtacaagttaat

SEQ ID NO: 49049 - DNA, 25 bp, Probe sequence
aagaaggtcgtcaaataagtaacac

SEQ ID NO: 49050 - DNA, 25 bp, Probe sequence
aacaagcaatcactcacattagaac

SEQ ID NO: 49051 - DNA, 25 bp, Probe sequence
caacaagcaatcactcacattagaa

SEQ ID NO: 49052 - DNA, 25 bp, Probe sequence
caagcaatcactcacattagaactc

SEQ ID NO: 49053 - DNA, 25 bp, Probe sequence
acaagcaatcactcacattagaact

SEQ ID NO: 49054 - DNA, 25 bp, Probe sequence
tcaacaagcaatcactcacattaga

SEQ ID NO: 49055 - DNA, 25 bp, Probe sequence
gtcaacaagcaatcactcacattag

SEQ ID NO: 49056 - DNA, 25 bp, Probe sequence
aagcaatcactcacattagaactcg

SEQ ID NO: 49057 - DNA, 25 bp, Probe sequence
taagatgacaaggattgaagcgatt

SEQ ID NO: 49058 - DNA, 25 bp, Probe sequence
ttaagatgacaaggattgaagcgat

SEQ ID NO: 49059 - DNA, 25 bp, Probe sequence
gtccaaggaactagaagcaatagat

SEQ ID NO: 49060 - DNA, 25 bp, Probe sequence
tccaaggaactagaagcaatagatt

SEQ ID NO: 49061 - DNA, 25 bp, Probe sequence
agtccaaggaactagaagcaataga

SEQ ID NO: 49062 - DNA, 25 bp, Probe sequence
cagtccaaggaactagaagcaatag

SEQ ID NO: 49063 - DNA, 25 bp, Probe sequence
ttgccaataacttacctatcatctt

SEQ ID NO: 49064 - DNA, 25 bp, Probe sequence
ccaaggaactagaagcaatagatta

SEQ ID NO: 49065 - DNA, 25 bp, Probe sequence
acttacctatcatcttacaacaaca

SEQ ID NO: 49066 - DNA, 25 bp, Probe sequence
acagtccaaggaactagaagcaata

SEQ ID NO: 49067 - DNA, 25 bp, Probe sequence
aggtctatattatccgagaagatga

SEQ ID NO: 49068 - DNA, 25 bp, Probe sequence
cctactactcatacacacttcacaa

SEQ ID NO: 49069 - DNA, 25 bp, Probe sequence
cgatacttactaacaggaggacaat

SEQ ID NO: 49070 - DNA, 25 bp, Probe sequence
caacgatacttactaacaggaggac

SEQ ID NO: 49071 - DNA, 25 bp, Probe sequence
tcaacgatacttactaacaggagga

SEQ ID NO: 49072 - DNA, 25 bp, Probe sequence
acctactactcatacacacttcaca

SEQ ID NO: 49073 - DNA, 25 bp, Probe sequence
atcaacgatacttactaacaggagg

SEQ ID NO: 49074 - DNA, 25 bp, Probe sequence
acgatacttactaacaggaggacaa

SEQ ID NO: 49075 - DNA, 25 bp, Probe sequence
aacgatacttactaacaggaggaca

SEQ ID NO: 49076 - DNA, 25 bp, Probe sequence
tacctactactcatacacacttcac

SEQ ID NO: 49077 - DNA, 25 bp, Probe sequence
attgaacaactggttagccgtatct

SEQ ID NO: 49078 - DNA, 25 bp, Probe sequence
cattgaacaactggttagccgtatc

SEQ ID NO: 49079 - DNA, 25 bp, Probe sequence
ttgaacaactggttagccgtatctt

SEQ ID NO: 49080 - DNA, 25 bp, Probe sequence
aactggttagccgtatctttcatta

SEQ ID NO: 49081 - DNA, 25 bp, Probe sequence
actggttagccgtatctttcattaa

SEQ ID NO: 49082 - DNA, 25 bp, Probe sequence
ggctttgtcctctatcattattcat

SEQ ID NO: 49083 - DNA, 25 bp, Probe sequence
caactggttagccgtatctttcatt

SEQ ID NO: 49084 - DNA, 25 bp, Probe sequence
ctttgattggtgtactacttgggat

SEQ ID NO: 49085 - DNA, 25 bp, Probe sequence
tttgattggtgtactacttgggatg

SEQ ID NO: 49086 - DNA, 25 bp, Probe sequence
attgccataatactgctaccttgaa

SEQ ID NO: 49087 - DNA, 25 bp, Probe sequence
gattgccataatactgctaccttga

SEQ ID NO: 49088 - DNA, 25 bp, Probe sequence
agattgccataatactgctaccttg

SEQ ID NO: 49089 - DNA, 25 bp, Probe sequence
tagattgccataatactgctacctt

SEQ ID NO: 49090 - DNA, 25 bp, Probe sequence
gctcaatactataaggcataggcat

SEQ ID NO: 49091 - DNA, 25 bp, Probe sequence
catccaaccattgtacttcacttac

SEQ ID NO: 49092 - DNA, 25 bp, Probe sequence
ataaggcataggcatggaattactc

SEQ ID NO: 49093 - DNA, 25 bp, Probe sequence
tataaggcataggcatggaattact

SEQ ID NO: 49094 - DNA, 25 bp, Probe sequence
gcatccaaccattgtacttcactta

SEQ ID NO: 49095 - DNA, 25 bp, Probe sequence
actcagtaacgccaacagtattatg

SEQ ID NO: 49096 - DNA, 25 bp, Probe sequence
cagtaacgccaacagtattatgctc

SEQ ID NO: 49097 - DNA, 25 bp, Probe sequence
ctcagtaacgccaacagtattatgc

SEQ ID NO: 49098 - DNA, 25 bp, Probe sequence
tcagtaacgccaacagtattatgct

SEQ ID NO: 49099 - DNA, 25 bp, Probe sequence
tactcagtaacgccaacagtattat

SEQ ID NO: 49100 - DNA, 25 bp, Probe sequence
tatgctcggtcataatcatccaagt

SEQ ID NO: 49101 - DNA, 25 bp, Probe sequence
attaaccaaacagtgattcatccca

SEQ ID NO: 49102 - DNA, 25 bp, Probe sequence
aaatcttgcgttcattcattggaaa

SEQ ID NO: 49103 - DNA, 25 bp, Probe sequence
aacagtgattcatcccagagaaata

SEQ ID NO: 49104 - DNA, 25 bp, Probe sequence
atacattacacgaggcattagtgaa

SEQ ID NO: 49105 - DNA, 25 bp, Probe sequence
gatacattacacgaggcattagtga

SEQ ID NO: 49106 - DNA, 25 bp, Probe sequence
tacattacacgaggcattagtgaac

SEQ ID NO: 49107 - DNA, 25 bp, Probe sequence
tgtcatgttactaccagaagaatac

SEQ ID NO: 49108 - DNA, 25 bp, Probe sequence
cattcgagaagatgatgtagacctt

SEQ ID NO: 49109 - DNA, 25 bp, Probe sequence
cgatacattacacgaggcattagtg

SEQ ID NO: 49110 - DNA, 25 bp, Probe sequence
gtcatgttactaccagaagaatact

SEQ ID NO: 49111 - DNA, 25 bp, Probe sequence
aacgcattacctaagaaagtctacg

SEQ ID NO: 49112 - DNA, 25 bp, Probe sequence
aaacgcattacctaagaaagtctac

SEQ ID NO: 49113 - DNA, 25 bp, Probe sequence
ttattgatgaacgctacttgttaca

SEQ ID NO: 49114 - DNA, 25 bp, Probe sequence
tattgatgaacgctacttgttacaa

SEQ ID NO: 49115 - DNA, 25 bp, Probe sequence
attattgatgaacgctacttgttac

SEQ ID NO: 49116 - DNA, 25 bp, Probe sequence
cattattgatgaacgctacttgtta

SEQ ID NO: 49117 - DNA, 25 bp, Probe sequence
gtggctgaagatgtattacctgaaa

SEQ ID NO: 49118 - DNA, 25 bp, Probe sequence
tataatgacgctaagcaaacaactt

SEQ ID NO: 49119 - DNA, 25 bp, Probe sequence
gtcattattgatgaacgctacttgt

SEQ ID NO: 49120 - DNA, 25 bp, Probe sequence
agtcattattgatgaacgctacttg

SEQ ID NO: 49121 - DNA, 25 bp, Probe sequence
caagtcattattgatgaacgctact

SEQ ID NO: 49122 - DNA, 25 bp, Probe sequence
aggtaagtcacgacaatacataagt

SEQ ID NO: 49123 - DNA, 25 bp, Probe sequence
gcgaatataggtaagtcacgacaat

SEQ ID NO: 49124 - DNA, 25 bp, Probe sequence
gaacgactagatattccagaatcct

SEQ ID NO: 49125 - DNA, 25 bp, Probe sequence
agaacgactagatattccagaatcc

SEQ ID NO: 49126 - DNA, 25 bp, Probe sequence
aatggcgaatataggtaagtcacga

SEQ ID NO: 49127 - DNA, 25 bp, Probe sequence
agagaacgactagatattccagaat

SEQ ID NO: 49128 - DNA, 25 bp, Probe sequence
cgaatataggtaagtcacgacaata

SEQ ID NO: 49129 - DNA, 25 bp, Probe sequence
ggtaagtcacgacaatacataagtc

SEQ ID NO: 49130 - DNA, 25 bp, Probe sequence
aacgactagatattccagaatccta

SEQ ID NO: 49131 - DNA, 25 bp, Probe sequence
attatgtgtgttcctatgacagttg

SEQ ID NO: 49132 - DNA, 25 bp, Probe sequence
ttatgtgtgttcctatgacagttgc

SEQ ID NO: 49133 - DNA, 25 bp, Probe sequence
tatgtgtgttcctatgacagttgct

SEQ ID NO: 49134 - DNA, 25 bp, Probe sequence
tattatgtgtgttcctatgacagtt

SEQ ID NO: 49135 - DNA, 25 bp, Probe sequence
ttattatgtgtgttcctatgacagt

SEQ ID NO: 49136 - DNA, 25 bp, Probe sequence
atgtgtgttcctatgacagttgctt

SEQ ID NO: 49137 - DNA, 25 bp, Probe sequence
gtgttcctatgacagttgctttatg

SEQ ID NO: 49138 - DNA, 25 bp, Probe sequence
tgttcctatgacagttgctttatgt

SEQ ID NO: 49139 - DNA, 25 bp, Probe sequence
tgtgttcctatgacagttgctttat

SEQ ID NO: 49140 - DNA, 25 bp, Probe sequence
agaattattgttactggtggtggtg

SEQ ID NO: 49141 - DNA, 25 bp, Probe sequence
aagagaagtaccagaagaagttgtc

SEQ ID NO: 49142 - DNA, 25 bp, Probe sequence
ttagcaagagaagtaccagaagaag

SEQ ID NO: 49143 - DNA, 25 bp, Probe sequence
gagaagtaccagaagaagttgtcaa

SEQ ID NO: 49144 - DNA, 25 bp, Probe sequence
attagcaagagaagtaccagaagaa

SEQ ID NO: 49145 - DNA, 25 bp, Probe sequence
tagcaagagaagtaccagaagaagt

SEQ ID NO: 49146 - DNA, 25 bp, Probe sequence
agagaagtaccagaagaagttgtca

SEQ ID NO: 49147 - DNA, 25 bp, Probe sequence
aggattattagcaagagaagtacca

SEQ ID NO: 49148 - DNA, 25 bp, Probe sequence
ggattattagcaagagaagtaccag

SEQ ID NO: 49149 - DNA, 25 bp, Probe sequence
gcaatggaacgtaaggatcaattaa

SEQ ID NO: 49150 - DNA, 25 bp, Probe sequence
aagagcatacagaacctattaaacg

SEQ ID NO: 49151 - DNA, 25 bp, Probe sequence
cgcaatggaacgtaaggatcaatta

SEQ ID NO: 49152 - DNA, 25 bp, Probe sequence
agagcatacagaacctattaaacgt

SEQ ID NO: 49153 - DNA, 25 bp, Probe sequence
aaagagcatacagaacctattaaac

SEQ ID NO: 49154 - DNA, 25 bp, Probe sequence
gagcatacagaacctattaaacgta

SEQ ID NO: 49155 - DNA, 25 bp, Probe sequence
tactaaaacagcccacataagagag

SEQ ID NO: 49156 - DNA, 25 bp, Probe sequence
agcatacagaacctattaaacgtaa

SEQ ID NO: 49157 - DNA, 25 bp, Probe sequence
cccttaaaagagcatacagaaccta

SEQ ID NO: 49158 - DNA, 25 bp, Probe sequence
tggtgtagactttcataaggtagtt

SEQ ID NO: 49159 - DNA, 25 bp, Probe sequence
atggtgtagactttcataaggtagt

SEQ ID NO: 49160 - DNA, 25 bp, Probe sequence
gtaatgtctgaatactatggtgtag

SEQ ID NO: 49161 - DNA, 25 bp, Probe sequence
aatggaattggatgaaggaatatag

SEQ ID NO: 49162 - DNA, 25 bp, Probe sequence
cataggcaagcgacaagaagaagtt

SEQ ID NO: 49163 - DNA, 25 bp, Probe sequence
taatgtctgaatactatggtgtaga

SEQ ID NO: 49164 - DNA, 25 bp, Probe sequence
ctcataggcaagcgacaagaagaag

SEQ ID NO: 49165 - DNA, 25 bp, Probe sequence
ataggcaagcgacaagaagaagttg

SEQ ID NO: 49166 - DNA, 25 bp, Probe sequence
actatggtgtagactttcataaggt

SEQ ID NO: 49167 - DNA, 25 bp, Probe sequence
aactggatagatacagaaggtaaca

SEQ ID NO: 49168 - DNA, 25 bp, Probe sequence
actggatagatacagaaggtaacat

SEQ ID NO: 49169 - DNA, 25 bp, Probe sequence
aaaggacacacaaatgatactgatt

SEQ ID NO: 49170 - DNA, 25 bp, Probe sequence
agtatcattgctgaacttgaagaaa

SEQ ID NO: 49171 - DNA, 25 bp, Probe sequence
tgagaagtatcattgctgaacttga

SEQ ID NO: 49172 - DNA, 25 bp, Probe sequence
aaggacacacaaatgatactgattt

SEQ ID NO: 49173 - DNA, 25 bp, Probe sequence
taactggatagatacagaaggtaac

SEQ ID NO: 49174 - DNA, 25 bp, Probe sequence
gaagtatcattgctgaacttgaaga

SEQ ID NO: 49175 - DNA, 25 bp, Probe sequence
gagaagtatcattgctgaacttgaa

SEQ ID NO: 49176 - DNA, 25 bp, Probe sequence
ttaacaagcagcataattggcatac

SEQ ID NO: 49177 - DNA, 25 bp, Probe sequence
taacaagcagcataattggcatacc

SEQ ID NO: 49178 - DNA, 25 bp, Probe sequence
tatatctattgttggactagctggt

SEQ ID NO: 49179 - DNA, 25 bp, Probe sequence
ttaggacaagctacaggtaacgtat

SEQ ID NO: 49180 - DNA, 25 bp, Probe sequence
acaagcccatttcttatttacctct

SEQ ID NO: 49181 - DNA, 25 bp, Probe sequence
aaacacaatacaagcccatttctta

SEQ ID NO: 49182 - DNA, 25 bp, Probe sequence
aacacaatacaagcccatttcttat

SEQ ID NO: 49183 - DNA, 25 bp, Probe sequence
atatctattgttggactagctggtc

SEQ ID NO: 49184 - DNA, 25 bp, Probe sequence
ctattgttggactagctggtctatg

SEQ ID NO: 49185 - DNA, 25 bp, Probe sequence
cgacagtgaattgcgtactattaga

SEQ ID NO: 49186 - DNA, 25 bp, Probe sequence
gacagtgaattgcgtactattagaa

SEQ ID NO: 49187 - DNA, 25 bp, Probe sequence
atcgacagtgaattgcgtactatta

SEQ ID NO: 49188 - DNA, 25 bp, Probe sequence
tatcgacagtgaattgcgtactatt

SEQ ID NO: 49189 - DNA, 25 bp, Probe sequence
ttatcgacagtgaattgcgtactat

SEQ ID NO: 49190 - DNA, 25 bp, Probe sequence
tcgacagtgaattgcgtactattag

SEQ ID NO: 49191 - DNA, 25 bp, Probe sequence
gttatcgacagtgaattgcgtacta

SEQ ID NO: 49192 - DNA, 25 bp, Probe sequence
gatgttatcgacagtgaattgcgta

SEQ ID NO: 49193 - DNA, 25 bp, Probe sequence
tgaattgcgtactattagaaacact

SEQ ID NO: 49194 - DNA, 25 bp, Probe sequence
acagttgagcatttagaaagtgaga

SEQ ID NO: 49195 - DNA, 25 bp, Probe sequence
aacagttgagcatttagaaagtgag

SEQ ID NO: 49196 - DNA, 25 bp, Probe sequence
cagttgagcatttagaaagtgagat

SEQ ID NO: 49197 - DNA, 25 bp, Probe sequence
caacaaagaattatacgaaatggcg

SEQ ID NO: 49198 - DNA, 25 bp, Probe sequence
acaaagaattatacgaaatggcgaa

SEQ ID NO: 49199 - DNA, 25 bp, Probe sequence
aacaaagaattatacgaaatggcga

SEQ ID NO: 49200 - DNA, 25 bp, Probe sequence
gaaatggcgaagtattctggtaaag

SEQ ID NO: 49201 - DNA, 25 bp, Probe sequence
ctgctacgaaaggttatgtaagaaa

SEQ ID NO: 49202 - DNA, 25 bp, Probe sequence
aaagaattatacgaaatggcgaagt

SEQ ID NO: 49203 - DNA, 25 bp, Probe sequence
gaatagagattacaacttcacgcaa

SEQ ID NO: 49204 - DNA, 25 bp, Probe sequence
gcacactctcaattacacaataatg

SEQ ID NO: 49205 - DNA, 25 bp, Probe sequence
ccatgaacgagatatagacggtaat

SEQ ID NO: 49206 - DNA, 25 bp, Probe sequence
tccatgaacgagatatagacggtaa

SEQ ID NO: 49207 - DNA, 25 bp, Probe sequence
atccatgaacgagatatagacggta

SEQ ID NO: 49208 - DNA, 25 bp, Probe sequence
tatccatgaacgagatatagacggt

SEQ ID NO: 49209 - DNA, 25 bp, Probe sequence
atactaataattcgcaagatcaagc

SEQ ID NO: 49210 - DNA, 25 bp, Probe sequence
gagattacaacttcacgcaaactta

SEQ ID NO: 49211 - DNA, 25 bp, Probe sequence
atagagattacaacttcacgcaaac

SEQ ID NO: 49212 - DNA, 25 bp, Probe sequence
taaagtaaatagatcagcagacgca

SEQ ID NO: 49213 - DNA, 25 bp, Probe sequence
taaatagatcagcagacgcaaagaa

SEQ ID NO: 49214 - DNA, 25 bp, Probe sequence
ttaaagtaaatagatcagcagacgc

SEQ ID NO: 49215 - DNA, 25 bp, Probe sequence
aagtaaatagatcagcagacgcaaa

SEQ ID NO: 49216 - DNA, 25 bp, Probe sequence
aaagtaaatagatcagcagacgcaa

SEQ ID NO: 49217 - DNA, 25 bp, Probe sequence
gtaaatagatcagcagacgcaaaga

SEQ ID NO: 49218 - DNA, 25 bp, Probe sequence
agtaaatagatcagcagacgcaaag

SEQ ID NO: 49219 - DNA, 25 bp, Probe sequence
aaatagatcagcagacgcaaagaaa

SEQ ID NO: 49220 - DNA, 25 bp, Probe sequence
atcagcagacgcaaagaaaattata

SEQ ID NO: 49221 - DNA, 25 bp, Probe sequence
actgttgttccgctagatatagtta

SEQ ID NO: 49222 - DNA, 25 bp, Probe sequence
ctgttgttccgctagatatagttaa

SEQ ID NO: 49223 - DNA, 25 bp, Probe sequence
atgtatgtatggtggagtaacactg

SEQ ID NO: 49224 - DNA, 25 bp, Probe sequence
cagcatgtatgtatggtggagtaac

SEQ ID NO: 49225 - DNA, 25 bp, Probe sequence
tcataagtcattcacagtataacga

SEQ ID NO: 49226 - DNA, 25 bp, Probe sequence
attcacagtataacgacttattggt

SEQ ID NO: 49227 - DNA, 25 bp, Probe sequence
cacagtataacgacttattggtaca

SEQ ID NO: 49228 - DNA, 25 bp, Probe sequence
cattcacagtataacgacttattgg

SEQ ID NO: 49229 - DNA, 25 bp, Probe sequence
catgtatgtatggtggagtaacact

SEQ ID NO: 49230 - DNA, 25 bp, Probe sequence
atctctggaatagttggacaagatt

SEQ ID NO: 49231 - DNA, 25 bp, Probe sequence
aatctctggaatagttggacaagat

SEQ ID NO: 49232 - DNA, 25 bp, Probe sequence
tctctggaatagttggacaagattt

SEQ ID NO: 49233 - DNA, 25 bp, Probe sequence
aaatctctggaatagttggacaaga

SEQ ID NO: 49234 - DNA, 25 bp, Probe sequence
agacgctttgaaagaggctaatata

SEQ ID NO: 49235 - DNA, 25 bp, Probe sequence
aaatgtaagagacgctttgaaagag

SEQ ID NO: 49236 - DNA, 25 bp, Probe sequence
gacgctttgaaagaggctaatataa

SEQ ID NO: 49237 - DNA, 25 bp, Probe sequence
tttcagcaaatgggaactctaatgg

SEQ ID NO: 49238 - DNA, 25 bp, Probe sequence
gagacgctttgaaagaggctaatat

SEQ ID NO: 49239 - DNA, 25 bp, Probe sequence
tttacacctgaagaagtaccacaag

SEQ ID NO: 49240 - DNA, 25 bp, Probe sequence
ttacacctgaagaagtaccacaagg

SEQ ID NO: 49241 - DNA, 25 bp, Probe sequence
ctttacacctgaagaagtaccacaa

SEQ ID NO: 49242 - DNA, 25 bp, Probe sequence
tacactttacacctgaagaagtacc

SEQ ID NO: 49243 - DNA, 25 bp, Probe sequence
gtacactttacacctgaagaagtac

SEQ ID NO: 49244 - DNA, 25 bp, Probe sequence
cactttacacctgaagaagtaccac

SEQ ID NO: 49245 - DNA, 25 bp, Probe sequence
actttacacctgaagaagtaccaca

SEQ ID NO: 49246 - DNA, 25 bp, Probe sequence
acactttacacctgaagaagtacca

SEQ ID NO: 49247 - DNA, 25 bp, Probe sequence
agatagcgatagcgattctgatgca

SEQ ID NO: 49248 - DNA, 25 bp, Probe sequence
agagcatacattcattcaagagact

SEQ ID NO: 49249 - DNA, 25 bp, Probe sequence
gagcatacattcattcaagagactt

SEQ ID NO: 49250 - DNA, 25 bp, Probe sequence
tagagcatacattcattcaagagac

SEQ ID NO: 49251 - DNA, 25 bp, Probe sequence
ttagagcatacattcattcaagaga

SEQ ID NO: 49252 - DNA, 25 bp, Probe sequence
gcattcctgaacggacattagataa

SEQ ID NO: 49253 - DNA, 25 bp, Probe sequence
atacaagccttatttagtgacgacc

SEQ ID NO: 49254 - DNA, 25 bp, Probe sequence
cggacattagataaattgctgaagg

SEQ ID NO: 49255 - DNA, 25 bp, Probe sequence
tgaacggacattagataaattgctg

SEQ ID NO: 49256 - DNA, 25 bp, Probe sequence
cctgaacggacattagataaattgc

SEQ ID NO: 49257 - DNA, 25 bp, Probe sequence
ttattggcgatcttcttggtagttg

SEQ ID NO: 49258 - DNA, 25 bp, Probe sequence
gttattggcgatcttcttggtagtt

SEQ ID NO: 49259 - DNA, 25 bp, Probe sequence
aagttattggcgatcttcttggtag

SEQ ID NO: 49260 - DNA, 25 bp, Probe sequence
agttattggcgatcttcttggtagt

SEQ ID NO: 49261 - DNA, 25 bp, Probe sequence
tattggcgatcttcttggtagttgg

SEQ ID NO: 49262 - DNA, 25 bp, Probe sequence
ttaaagttattggcgatcttcttgg

SEQ ID NO: 49263 - DNA, 25 bp, Probe sequence
aaagttattggcgatcttcttggta

SEQ ID NO: 49264 - DNA, 25 bp, Probe sequence
taaagttattggcgatcttcttggt

SEQ ID NO: 49265 - DNA, 25 bp, Probe sequence
tgagcggaatatctttaataatggt

SEQ ID NO: 49266 - DNA, 25 bp, Probe sequence
aagtatcaagcagaatcagaacgaa

SEQ ID NO: 49267 - DNA, 25 bp, Probe sequence
tacaagtatcaagcagaatcagaac

SEQ ID NO: 49268 - DNA, 25 bp, Probe sequence
caagtatcaagcagaatcagaacga

SEQ ID NO: 49269 - DNA, 25 bp, Probe sequence
acaagtatcaagcagaatcagaacg

SEQ ID NO: 49270 - DNA, 25 bp, Probe sequence
gaacagaacttagatcggcaattac

SEQ ID NO: 49271 - DNA, 25 bp, Probe sequence
agaacagaacttagatcggcaatta

SEQ ID NO: 49272 - DNA, 25 bp, Probe sequence
acagaacttagatcggcaattacaa

SEQ ID NO: 49273 - DNA, 25 bp, Probe sequence
aacagaacttagatcggcaattaca

SEQ ID NO: 49274 - DNA, 25 bp, Probe sequence
cagaacttagatcggcaattacaag

SEQ ID NO: 49275 - DNA, 25 bp, Probe sequence
agactgagaataatgatacggatga

SEQ ID NO: 49276 - DNA, 25 bp, Probe sequence
ttggaagatatggagttagaagtga

SEQ ID NO: 49277 - DNA, 25 bp, Probe sequence
gcaaggttatcttatgacatctctc

SEQ ID NO: 49278 - DNA, 25 bp, Probe sequence
tggaagatatggagttagaagtgat

SEQ ID NO: 49279 - DNA, 25 bp, Probe sequence
aagactgagaataatgatacggatg

SEQ ID NO: 49280 - DNA, 25 bp, Probe sequence
gactgagaataatgatacggatgat

SEQ ID NO: 49281 - DNA, 25 bp, Probe sequence
attggaagatatggagttagaagtg

SEQ ID NO: 49282 - DNA, 25 bp, Probe sequence
aataatgatacggatgattcgcatg

SEQ ID NO: 49283 - DNA, 25 bp, Probe sequence
atgatacggatgattcgcatgataa

SEQ ID NO: 49284 - DNA, 25 bp, Probe sequence
attaacgaagaaccatccacaatag

SEQ ID NO: 49285 - DNA, 25 bp, Probe sequence
gttggagtctgagttagaagaagaa

SEQ ID NO: 49286 - DNA, 25 bp, Probe sequence
ttattaacgaagaaccatccacaat

SEQ ID NO: 49287 - DNA, 25 bp, Probe sequence
attattaacgaagaaccatccacaa

SEQ ID NO: 49288 - DNA, 25 bp, Probe sequence
aaggttggagtctgagttagaagaa

SEQ ID NO: 49289 - DNA, 25 bp, Probe sequence
aattattaacgaagaaccatccaca

SEQ ID NO: 49290 - DNA, 25 bp, Probe sequence
ggttggagtctgagttagaagaaga

SEQ ID NO: 49291 - DNA, 25 bp, Probe sequence
aggttggagtctgagttagaagaag

SEQ ID NO: 49292 - DNA, 25 bp, Probe sequence
tattaacgaagaaccatccacaata

SEQ ID NO: 49293 - DNA, 25 bp, Probe sequence
tactgctactcacgaatgtatgtct

SEQ ID NO: 49294 - DNA, 25 bp, Probe sequence
ctgctactcacgaatgtatgtcttg

SEQ ID NO: 49295 - DNA, 25 bp, Probe sequence
actgctactcacgaatgtatgtctt

SEQ ID NO: 49296 - DNA, 25 bp, Probe sequence
gtactgctactcacgaatgtatgtc

SEQ ID NO: 49297 - DNA, 25 bp, Probe sequence
tgtactgctactcacgaatgtatgt

SEQ ID NO: 49298 - DNA, 25 bp, Probe sequence
ctcacgaatgtatgtcttggtgtaa

SEQ ID NO: 49299 - DNA, 25 bp, Probe sequence
gatatagaagaacaagtgacatggt

SEQ ID NO: 49300 - DNA, 25 bp, Probe sequence
ctactcacgaatgtatgtcttggtg

SEQ ID NO: 49301 - DNA, 25 bp, Probe sequence
gctactcacgaatgtatgtcttggt

SEQ ID NO: 49302 - DNA, 25 bp, Probe sequence
tactgatgatgaagtatatgcagct

SEQ ID NO: 49303 - DNA, 25 bp, Probe sequence
ttcagaatcagacatgctagaaatt

SEQ ID NO: 49304 - DNA, 25 bp, Probe sequence
ttactgatgatgaagtatatgcagc

SEQ ID NO: 49305 - DNA, 25 bp, Probe sequence
tgctagaaattactgatgatgaagt

SEQ ID NO: 49306 - DNA, 25 bp, Probe sequence
acatgctagaaattactgatgatga

SEQ ID NO: 49307 - DNA, 25 bp, Probe sequence
cagaatcagacatgctagaaattac

SEQ ID NO: 49308 - DNA, 25 bp, Probe sequence
agaatcagacatgctagaaattact

SEQ ID NO: 49309 - DNA, 25 bp, Probe sequence
tcagaatcagacatgctagaaatta

SEQ ID NO: 49310 - DNA, 25 bp, Probe sequence
gacatgctagaaattactgatgatg

SEQ ID NO: 49311 - DNA, 25 bp, Probe sequence
gatacgcataataacggttcttctg

SEQ ID NO: 49312 - DNA, 25 bp, Probe sequence
tgatacgcataataacggttcttct

SEQ ID NO: 49313 - DNA, 25 bp, Probe sequence
gtgatacgcataataacggttcttc

SEQ ID NO: 49314 - DNA, 25 bp, Probe sequence
atacgcataataacggttcttctgt

SEQ ID NO: 49315 - DNA, 25 bp, Probe sequence
agtagcggagcaattattatgagat

SEQ ID NO: 49316 - DNA, 25 bp, Probe sequence
gagtagcggagcaattattatgaga

SEQ ID NO: 49317 - DNA, 25 bp, Probe sequence
tacaagtggtgatacgcataataac

SEQ ID NO: 49318 - DNA, 25 bp, Probe sequence
ggaagaggtagatatacacttagcc

SEQ ID NO: 49319 - DNA, 25 bp, Probe sequence
ttgtagaataattgctgaaggtgtc

SEQ ID NO: 49320 - DNA, 25 bp, Probe sequence
gttacataccacaagaagcatacct

SEQ ID NO: 49321 - DNA, 25 bp, Probe sequence
agttacataccacaagaagcatacc

SEQ ID NO: 49322 - DNA, 25 bp, Probe sequence
ttacataccacaagaagcatacctt

SEQ ID NO: 49323 - DNA, 25 bp, Probe sequence
aactcgcattcaagatattataggc

SEQ ID NO: 49324 - DNA, 25 bp, Probe sequence
tagttacataccacaagaagcatac

SEQ ID NO: 49325 - DNA, 25 bp, Probe sequence
attagttacataccacaagaagcat

SEQ ID NO: 49326 - DNA, 25 bp, Probe sequence
agagagttacatgaaggaagtagtg

SEQ ID NO: 49327 - DNA, 25 bp, Probe sequence
cagagagttacatgaaggaagtagt

SEQ ID NO: 49328 - DNA, 25 bp, Probe sequence
acagagagttacatgaaggaagtag

SEQ ID NO: 49329 - DNA, 25 bp, Probe sequence
ttattggcggagtgttattatggat

SEQ ID NO: 49330 - DNA, 25 bp, Probe sequence
ttggcggagtgttattatggatatt

SEQ ID NO: 49331 - DNA, 25 bp, Probe sequence
attggcggagtgttattatggatat

SEQ ID NO: 49332 - DNA, 25 bp, Probe sequence
ttgttattggcggagtgttattatg

SEQ ID NO: 49333 - DNA, 25 bp, Probe sequence
tattggcggagtgttattatggata

SEQ ID NO: 49334 - DNA, 25 bp, Probe sequence
tggcggagtgttattatggatatta

SEQ ID NO: 49335 - DNA, 25 bp, Probe sequence
gttattggcggagtgttattatgga

SEQ ID NO: 49336 - DNA, 25 bp, Probe sequence
tgttattggcggagtgttattatgg

SEQ ID NO: 49337 - DNA, 25 bp, Probe sequence
gactgctaattctgaacatagagga

SEQ ID NO: 49338 - DNA, 25 bp, Probe sequence
aatagagcagttagtagacaaggtg

SEQ ID NO: 49339 - DNA, 25 bp, Probe sequence
aagcaatatggaagtcagatagcag

SEQ ID NO: 49340 - DNA, 25 bp, Probe sequence
ccgaattattgatacttgatgagcc

SEQ ID NO: 49341 - DNA, 25 bp, Probe sequence
cgaattattgatacttgatgagccg

SEQ ID NO: 49342 - DNA, 25 bp, Probe sequence
gcaatatggaagtcagatagcagtt

SEQ ID NO: 49343 - DNA, 25 bp, Probe sequence
aattattgatacttgatgagccgac

SEQ ID NO: 49344 - DNA, 25 bp, Probe sequence
attattgatacttgatgagccgacg

SEQ ID NO: 49345 - DNA, 25 bp, Probe sequence
gaattattgatacttgatgagccga

SEQ ID NO: 49346 - DNA, 25 bp, Probe sequence
atagagcagttagtagacaaggtgg

SEQ ID NO: 49347 - DNA, 25 bp, Probe sequence
ttgtcaccaagtattgaaggatctt

SEQ ID NO: 49348 - DNA, 25 bp, Probe sequence
ttcttgtttatggacggctataact

SEQ ID NO: 49349 - DNA, 25 bp, Probe sequence
tttcttgtttatggacggctataac

SEQ ID NO: 49350 - DNA, 25 bp, Probe sequence
tcttgtttatggacggctataacta

SEQ ID NO: 49351 - DNA, 25 bp, Probe sequence
gtttatggacggctataactaacaa

SEQ ID NO: 49352 - DNA, 25 bp, Probe sequence
ttgtttatggacggctataactaac

SEQ ID NO: 49353 - DNA, 25 bp, Probe sequence
cttgtttatggacggctataactaa

SEQ ID NO: 49354 - DNA, 25 bp, Probe sequence
tttatggacggctataactaacaaa

SEQ ID NO: 49355 - DNA, 25 bp, Probe sequence
tttgtcaccaagtattgaaggatct

SEQ ID NO: 49356 - DNA, 25 bp, Probe sequence
ttattagaggagtatgaaggaagcg

SEQ ID NO: 49357 - DNA, 25 bp, Probe sequence
tagaggagtatgaaggaagcgtaat

SEQ ID NO: 49358 - DNA, 25 bp, Probe sequence
attagaggagtatgaaggaagcgta

SEQ ID NO: 49359 - DNA, 25 bp, Probe sequence
tattagaggagtatgaaggaagcgt

SEQ ID NO: 49360 - DNA, 25 bp, Probe sequence
ttagaggagtatgaaggaagcgtaa

SEQ ID NO: 49361 - DNA, 25 bp, Probe sequence
taattgaggaacgagtattgtggaa

SEQ ID NO: 49362 - DNA, 25 bp, Probe sequence
gtgtaattgaggaacgagtattgtg

SEQ ID NO: 49363 - DNA, 25 bp, Probe sequence
aattgttcaggataagccaggtatt

SEQ ID NO: 49364 - DNA, 25 bp, Probe sequence
gattatactccgtgttgaagatgtt

SEQ ID NO: 49365 - DNA, 25 bp, Probe sequence
tggaacatcaattagaggaagagag

SEQ ID NO: 49366 - DNA, 25 bp, Probe sequence
aagcatcatatacttcggattctgt

SEQ ID NO: 49367 - DNA, 25 bp, Probe sequence
ggaacatcaattagaggaagagaga

SEQ ID NO: 49368 - DNA, 25 bp, Probe sequence
agcatcatatacttcggattctgta

SEQ ID NO: 49369 - DNA, 25 bp, Probe sequence
acatcaattagaggaagagagacaa

SEQ ID NO: 49370 - DNA, 25 bp, Probe sequence
aacatcaattagaggaagagagaca

SEQ ID NO: 49371 - DNA, 25 bp, Probe sequence
gcatcatatacttcggattctgtaa

SEQ ID NO: 49372 - DNA, 25 bp, Probe sequence
gaacatcaattagaggaagagagac

SEQ ID NO: 49373 - DNA, 25 bp, Probe sequence
ttggaacatcaattagaggaagaga

SEQ ID NO: 49374 - DNA, 25 bp, Probe sequence
tcatacaaatcatcaacaaaccgaa

SEQ ID NO: 49375 - DNA, 25 bp, Probe sequence
atcatacaaatcatcaacaaaccga

SEQ ID NO: 49376 - DNA, 25 bp, Probe sequence
accttcgcaaatcaaatcttatgta

SEQ ID NO: 49377 - DNA, 25 bp, Probe sequence
taccttcgcaaatcaaatcttatgt

SEQ ID NO: 49378 - DNA, 25 bp, Probe sequence
catacaaatcatcaacaaaccgaat

SEQ ID NO: 49379 - DNA, 25 bp, Probe sequence
aatcatacaaatcatcaacaaaccg

SEQ ID NO: 49380 - DNA, 25 bp, Probe sequence
agaattaccttcgcaaatcaaatct

SEQ ID NO: 49381 - DNA, 25 bp, Probe sequence
acaaaccgaatttaataatgatgcc

SEQ ID NO: 49382 - DNA, 25 bp, Probe sequence
caaaccgaatttaataatgatgcct

SEQ ID NO: 49383 - DNA, 25 bp, Probe sequence
tgatacagcgactaatgatagacaa

SEQ ID NO: 49384 - DNA, 25 bp, Probe sequence
ttgatacagcgactaatgatagaca

SEQ ID NO: 49385 - DNA, 25 bp, Probe sequence
aaatcataagggcataactaaagcg

SEQ ID NO: 49386 - DNA, 25 bp, Probe sequence
atcataagggcataactaaagcgaa

SEQ ID NO: 49387 - DNA, 25 bp, Probe sequence
aatcataagggcataactaaagcga

SEQ ID NO: 49388 - DNA, 25 bp, Probe sequence
atcactaagaaagaaaggacaatgc

SEQ ID NO: 49389 - DNA, 25 bp, Probe sequence
tcataagggcataactaaagcgaaa

SEQ ID NO: 49390 - DNA, 25 bp, Probe sequence
tacagcgactaatgatagacaaagc

SEQ ID NO: 49391 - DNA, 25 bp, Probe sequence
gaagcagaattaaatcataagggca

SEQ ID NO: 49392 - DNA, 25 bp, Probe sequence
tattgaagcaagtcttaccaaggaa

SEQ ID NO: 49393 - DNA, 25 bp, Probe sequence
atattgaagcaagtcttaccaagga

SEQ ID NO: 49394 - DNA, 25 bp, Probe sequence
gatattgaagcaagtcttaccaagg

SEQ ID NO: 49395 - DNA, 25 bp, Probe sequence
tgatattgaagcaagtcttaccaag

SEQ ID NO: 49396 - DNA, 25 bp, Probe sequence
attgaagcaagtcttaccaaggaac

SEQ ID NO: 49397 - DNA, 25 bp, Probe sequence
atgatattgaagcaagtcttaccaa

SEQ ID NO: 49398 - DNA, 25 bp, Probe sequence
tatgatattgaagcaagtcttacca

SEQ ID NO: 49399 - DNA, 25 bp, Probe sequence
ttgaagcaagtcttaccaaggaact

SEQ ID NO: 49400 - DNA, 25 bp, Probe sequence
tgccacaacaatttcaagactattt

SEQ ID NO: 49401 - DNA, 25 bp, Probe sequence
ttaataagaagacatgctcatggtg

SEQ ID NO: 49402 - DNA, 25 bp, Probe sequence
taataagaagacatgctcatggtgc

SEQ ID NO: 49403 - DNA, 25 bp, Probe sequence
actgattgttatgtatacgattgcc

SEQ ID NO: 49404 - DNA, 25 bp, Probe sequence
aagaaccatttgcccaatttattca

SEQ ID NO: 49405 - DNA, 25 bp, Probe sequence
ctgattgttatgtatacgattgcct

SEQ ID NO: 49406 - DNA, 25 bp, Probe sequence
agaaccatttgcccaatttattcaa

SEQ ID NO: 49407 - DNA, 25 bp, Probe sequence
aaagaaccatttgcccaatttattc

SEQ ID NO: 49408 - DNA, 25 bp, Probe sequence
gaaccatttgcccaatttattcaat

SEQ ID NO: 49409 - DNA, 25 bp, Probe sequence
tgattgttatgtatacgattgccta

SEQ ID NO: 49410 - DNA, 25 bp, Probe sequence
gaaggctacacaagaggattacaag

SEQ ID NO: 49411 - DNA, 25 bp, Probe sequence
tctattagtgatgtgatggctagtc

SEQ ID NO: 49412 - DNA, 25 bp, Probe sequence
gtgatgatgaacagcaagttattcg

SEQ ID NO: 49413 - DNA, 25 bp, Probe sequence
agaaggctacacaagaggattacaa

SEQ ID NO: 49414 - DNA, 25 bp, Probe sequence
ttctattagtgatgtgatggctagt

SEQ ID NO: 49415 - DNA, 25 bp, Probe sequence
gagaaggctacacaagaggattaca

SEQ ID NO: 49416 - DNA, 25 bp, Probe sequence
ttagtgatgtgatggctagtcaatt

SEQ ID NO: 49417 - DNA, 25 bp, Probe sequence
attagtgatgtgatggctagtcaat

SEQ ID NO: 49418 - DNA, 25 bp, Probe sequence
ctattagtgatgtgatggctagtca

SEQ ID NO: 49419 - DNA, 25 bp, Probe sequence
aacaggctagtcaacagttagttaa

SEQ ID NO: 49420 - DNA, 25 bp, Probe sequence
gaacaggctagtcaacagttagtta

SEQ ID NO: 49421 - DNA, 25 bp, Probe sequence
acaggctagtcaacagttagttaat

SEQ ID NO: 49422 - DNA, 25 bp, Probe sequence
ctacttagtgaacaggctagtcaac

SEQ ID NO: 49423 - DNA, 25 bp, Probe sequence
tagtgaacaggctagtcaacagtta

SEQ ID NO: 49424 - DNA, 25 bp, Probe sequence
tacttagtgaacaggctagtcaaca

SEQ ID NO: 49425 - DNA, 25 bp, Probe sequence
ggctagtcaacagttagttaatagt

SEQ ID NO: 49426 - DNA, 25 bp, Probe sequence
caggctagtcaacagttagttaata

SEQ ID NO: 49427 - DNA, 25 bp, Probe sequence
tgaacaggctagtcaacagttagtt

SEQ ID NO: 49428 - DNA, 25 bp, Probe sequence
aacgaggtctttctgctacttattt

SEQ ID NO: 49429 - DNA, 25 bp, Probe sequence
aaacgaggtctttctgctacttatt

SEQ ID NO: 49430 - DNA, 25 bp, Probe sequence
acgaggtctttctgctacttattta

SEQ ID NO: 49431 - DNA, 25 bp, Probe sequence
cgaggtctttctgctacttatttag

SEQ ID NO: 49432 - DNA, 25 bp, Probe sequence
ccaaattgaaagaggagaggttaaa

SEQ ID NO: 49433 - DNA, 25 bp, Probe sequence
accaaattgaaagaggagaggttaa

SEQ ID NO: 49434 - DNA, 25 bp, Probe sequence
aaaacgaggtctttctgctacttat

SEQ ID NO: 49435 - DNA, 25 bp, Probe sequence
taaaacgaggtctttctgctactta

SEQ ID NO: 49436 - DNA, 25 bp, Probe sequence
attgaaagaggagaggttaaaacga

SEQ ID NO: 49437 - DNA, 25 bp, Probe sequence
ccaacacattacggcacaattatta

SEQ ID NO: 49438 - DNA, 25 bp, Probe sequence
taccaacacattacggcacaattat

SEQ ID NO: 49439 - DNA, 25 bp, Probe sequence
ttaccaacacattacggcacaatta

SEQ ID NO: 49440 - DNA, 25 bp, Probe sequence
caacacattacggcacaattattaa

SEQ ID NO: 49441 - DNA, 25 bp, Probe sequence
accaacacattacggcacaattatt

SEQ ID NO: 49442 - DNA, 25 bp, Probe sequence
attaccaacacattacggcacaatt

SEQ ID NO: 49443 - DNA, 25 bp, Probe sequence
aattaccaacacattacggcacaat

SEQ ID NO: 49444 - DNA, 25 bp, Probe sequence
gaattaccaacacattacggcacaa

SEQ ID NO: 49445 - DNA, 25 bp, Probe sequence
cagaattaccaacacattacggcac

SEQ ID NO: 49446 - DNA, 25 bp, Probe sequence
agaagtatatgagttgtggcttgaa

SEQ ID NO: 49447 - DNA, 25 bp, Probe sequence
aagaagtatatgagttgtggcttga

SEQ ID NO: 49448 - DNA, 25 bp, Probe sequence
gaagtatatgagttgtggcttgaac

SEQ ID NO: 49449 - DNA, 25 bp, Probe sequence
tcaagaagtacaagacagattaggt

SEQ ID NO: 49450 - DNA, 25 bp, Probe sequence
ggacatcaagacaactatggatatt

SEQ ID NO: 49451 - DNA, 25 bp, Probe sequence
atatgagttgtggcttgaacagtat

SEQ ID NO: 49452 - DNA, 25 bp, Probe sequence
tatatgagttgtggcttgaacagta

SEQ ID NO: 49453 - DNA, 25 bp, Probe sequence
aagtatatgagttgtggcttgaaca

SEQ ID NO: 49454 - DNA, 25 bp, Probe sequence
tatgagttgtggcttgaacagtatc

SEQ ID NO: 49455 - DNA, 25 bp, Probe sequence
atgaggagttagataaggcagtgaa

SEQ ID NO: 49456 - DNA, 25 bp, Probe sequence
gatgaggagttagataaggcagtga

SEQ ID NO: 49457 - DNA, 25 bp, Probe sequence
ggagacgatgaggagttagataagg

SEQ ID NO: 49458 - DNA, 25 bp, Probe sequence
cggagacgatgaggagttagataag

SEQ ID NO: 49459 - DNA, 25 bp, Probe sequence
gagacgatgaggagttagataaggc

SEQ ID NO: 49460 - DNA, 25 bp, Probe sequence
gacgatgaggagttagataaggcag

SEQ ID NO: 49461 - DNA, 25 bp, Probe sequence
acggagacgatgaggagttagataa

SEQ ID NO: 49462 - DNA, 25 bp, Probe sequence
tggatgatattccgttagaggattg

SEQ ID NO: 49463 - DNA, 25 bp, Probe sequence
gtggatgatattccgttagaggatt

SEQ ID NO: 49464 - DNA, 25 bp, Probe sequence
tagtggtgtcttagattgttcagaa

SEQ ID NO: 49465 - DNA, 25 bp, Probe sequence
ttagtggtgtcttagattgttcaga

SEQ ID NO: 49466 - DNA, 25 bp, Probe sequence
attagtggtgtcttagattgttcag

SEQ ID NO: 49467 - DNA, 25 bp, Probe sequence
atgagcgaactagaagtgatgtatt

SEQ ID NO: 49468 - DNA, 25 bp, Probe sequence
tgagcgaactagaagtgatgtatta

SEQ ID NO: 49469 - DNA, 25 bp, Probe sequence
agtggtgtcttagattgttcagaac

SEQ ID NO: 49470 - DNA, 25 bp, Probe sequence
caatgaatggatggcagacgataac

SEQ ID NO: 49471 - DNA, 25 bp, Probe sequence
catgagcgaactagaagtgatgtat

SEQ ID NO: 49472 - DNA, 25 bp, Probe sequence
gagcgaactagaagtgatgtattaa

SEQ ID NO: 49473 - DNA, 25 bp, Probe sequence
gttacaacaagcagaacagtctaag

SEQ ID NO: 49474 - DNA, 25 bp, Probe sequence
agttacaacaagcagaacagtctaa

SEQ ID NO: 49475 - DNA, 25 bp, Probe sequence
gagttacaacaagcagaacagtcta

SEQ ID NO: 49476 - DNA, 25 bp, Probe sequence
ttcaagtgagttacaacaagcagaa

SEQ ID NO: 49477 - DNA, 25 bp, Probe sequence
ttacaacaagcagaacagtctaagc

SEQ ID NO: 49478 - DNA, 25 bp, Probe sequence
aagtgagttacaacaagcagaacag

SEQ ID NO: 49479 - DNA, 25 bp, Probe sequence
tcaagtgagttacaacaagcagaac

SEQ ID NO: 49480 - DNA, 25 bp, Probe sequence
caagtgagttacaacaagcagaaca

SEQ ID NO: 49481 - DNA, 25 bp, Probe sequence
tgagttacaacaagcagaacagtct

SEQ ID NO: 49482 - DNA, 25 bp, Probe sequence
gatggacaagatgataaggcagata

SEQ ID NO: 49483 - DNA, 25 bp, Probe sequence
tggacaagatgataaggcagataac

SEQ ID NO: 49484 - DNA, 25 bp, Probe sequence
atatgcgagtgtgtatagtcaagaa

SEQ ID NO: 49485 - DNA, 25 bp, Probe sequence
aatatgcgagtgtgtatagtcaaga

SEQ ID NO: 49486 - DNA, 25 bp, Probe sequence
caatatgcgagtgtgtatagtcaag

SEQ ID NO: 49487 - DNA, 25 bp, Probe sequence
tgatagatatgaagatgagcaccag

SEQ ID NO: 49488 - DNA, 25 bp, Probe sequence
tatgcgagtgtgtatagtcaagaac

SEQ ID NO: 49489 - DNA, 25 bp, Probe sequence
atggacaagatgataaggcagataa

SEQ ID NO: 49490 - DNA, 25 bp, Probe sequence
agataagtccacatacaagcagtta

SEQ ID NO: 49491 - DNA, 25 bp, Probe sequence
tgactattatgacagttatcgccat

SEQ ID NO: 49492 - DNA, 25 bp, Probe sequence
atgactattatgacagttatcgcca

SEQ ID NO: 49493 - DNA, 25 bp, Probe sequence
tgacagttatcgccataggtatgat

SEQ ID NO: 49494 - DNA, 25 bp, Probe sequence
atgacagttatcgccataggtatga

SEQ ID NO: 49495 - DNA, 25 bp, Probe sequence
agcctattcctgtgcgacttattaa

SEQ ID NO: 49496 - DNA, 25 bp, Probe sequence
gacagttatcgccataggtatgata

SEQ ID NO: 49497 - DNA, 25 bp, Probe sequence
cctattcctgtgcgacttattaagc

SEQ ID NO: 49498 - DNA, 25 bp, Probe sequence
gcctattcctgtgcgacttattaag

SEQ ID NO: 49499 - DNA, 25 bp, Probe sequence
aagcctattcctgtgcgacttatta

SEQ ID NO: 49500 - DNA, 25 bp, Probe sequence
atatcacgggtattacggcattatc

SEQ ID NO: 49501 - DNA, 25 bp, Probe sequence
gtatatcacgggtattacggcatta

SEQ ID NO: 49502 - DNA, 25 bp, Probe sequence
tatatcacgggtattacggcattat

SEQ ID NO: 49503 - DNA, 25 bp, Probe sequence
atttgtatatcacgggtattacggc

SEQ ID NO: 49504 - DNA, 25 bp, Probe sequence
tttcaaccattctactgcttacttt

SEQ ID NO: 49505 - DNA, 25 bp, Probe sequence
gctgataatgacctcgcagattatt

SEQ ID NO: 49506 - DNA, 25 bp, Probe sequence
atttcaaccattctactgcttactt

SEQ ID NO: 49507 - DNA, 25 bp, Probe sequence
attctcaaataaactcggatgaagc

SEQ ID NO: 49508 - DNA, 25 bp, Probe sequence
cccatcttctttgtagtttatgtga

SEQ ID NO: 49509 - DNA, 25 bp, Probe sequence
cggcaacaagattaaccttaaagaa

SEQ ID NO: 49510 - DNA, 25 bp, Probe sequence
ttataatgttcctaagcaagaaggc

SEQ ID NO: 49511 - DNA, 25 bp, Probe sequence
ctcggcaacaagattaaccttaaag

SEQ ID NO: 49512 - DNA, 25 bp, Probe sequence
tcggcaacaagattaaccttaaaga

SEQ ID NO: 49513 - DNA, 25 bp, Probe sequence
tataatgttcctaagcaagaaggct

SEQ ID NO: 49514 - DNA, 25 bp, Probe sequence
ataatgttcctaagcaagaaggctc

SEQ ID NO: 49515 - DNA, 25 bp, Probe sequence
ggcaacaagattaaccttaaagaaa

SEQ ID NO: 49516 - DNA, 25 bp, Probe sequence
gctcggcaacaagattaaccttaaa

SEQ ID NO: 49517 - DNA, 25 bp, Probe sequence
ggctcggcaacaagattaaccttaa

SEQ ID NO: 49518 - DNA, 25 bp, Probe sequence
cgaacttaatcaatacaggcgatat

SEQ ID NO: 49519 - DNA, 25 bp, Probe sequence
gcgaacttaatcaatacaggcgata

SEQ ID NO: 49520 - DNA, 25 bp, Probe sequence
tagcaagcgatcaaggtattactaa

SEQ ID NO: 49521 - DNA, 25 bp, Probe sequence
ttagcaagcgatcaaggtattacta

SEQ ID NO: 49522 - DNA, 25 bp, Probe sequence
gttagcaagcgatcaaggtattact

SEQ ID NO: 49523 - DNA, 25 bp, Probe sequence
cgttagcaagcgatcaaggtattac

SEQ ID NO: 49524 - DNA, 25 bp, Probe sequence
tatacagctaacttagttcatgcga

SEQ ID NO: 49525 - DNA, 25 bp, Probe sequence
atacagctaacttagttcatgcgaa

SEQ ID NO: 49526 - DNA, 25 bp, Probe sequence
gcaacaacattagcattaggcgtta

SEQ ID NO: 49527 - DNA, 25 bp, Probe sequence
caagagcaggttagacaattagact

SEQ ID NO: 49528 - DNA, 25 bp, Probe sequence
tcaagagcaggttagacaattagac

SEQ ID NO: 49529 - DNA, 25 bp, Probe sequence
ttcaagagcaggttagacaattaga

SEQ ID NO: 49530 - DNA, 25 bp, Probe sequence
acattcaagagcaggttagacaatt

SEQ ID NO: 49531 - DNA, 25 bp, Probe sequence
cattcaagagcaggttagacaatta

SEQ ID NO: 49532 - DNA, 25 bp, Probe sequence
aacattcaagagcaggttagacaat

SEQ ID NO: 49533 - DNA, 25 bp, Probe sequence
caggttagacaattagactcaacga

SEQ ID NO: 49534 - DNA, 25 bp, Probe sequence
aggttagacaattagactcaacgat

SEQ ID NO: 49535 - DNA, 25 bp, Probe sequence
agcaggttagacaattagactcaac

SEQ ID NO: 49536 - DNA, 25 bp, Probe sequence
tgcaaatgctttatttatgaagaaa

SEQ ID NO: 49537 - DNA, 25 bp, Probe sequence
atgcaaatgctttatttatgaagaa

SEQ ID NO: 49538 - DNA, 25 bp, Probe sequence
gcaaatgctttatttatgaagaaat

SEQ ID NO: 49539 - DNA, 25 bp, Probe sequence
tgtatgcaaatgctttatttatgaa

SEQ ID NO: 49540 - DNA, 25 bp, Probe sequence
ttgtatgcaaatgctttatttatga

SEQ ID NO: 49541 - DNA, 25 bp, Probe sequence
cttgtgttttgtatgcaaatgcttt

SEQ ID NO: 49542 - DNA, 25 bp, Probe sequence
atcttgtgttttgtatgcaaatgct

SEQ ID NO: 49543 - DNA, 25 bp, Probe sequence
tcttgtgttttgtatgcaaatgctt

SEQ ID NO: 49544 - DNA, 25 bp, Probe sequence
tatcttgtgttttgtatgcaaatgc

SEQ ID NO: 49545 - DNA, 25 bp, Probe sequence
gaatagacctcaacacattactaga

SEQ ID NO: 49546 - DNA, 25 bp, Probe sequence
agacctcaacacattactagatatg

SEQ ID NO: 49547 - DNA, 25 bp, Probe sequence
tgaaagtgaagagagaacagcatat

SEQ ID NO: 49548 - DNA, 25 bp, Probe sequence
gacctcaacacattactagatatga

SEQ ID NO: 49549 - DNA, 25 bp, Probe sequence
gaacctcaatcacctaaagtttctg

SEQ ID NO: 49550 - DNA, 25 bp, Probe sequence
cctacgttacagatgctcaacataa

SEQ ID NO: 49551 - DNA, 25 bp, Probe sequence
aagaacctcaatcacctaaagtttc

SEQ ID NO: 49552 - DNA, 25 bp, Probe sequence
gaagaacctcaatcacctaaagttt

SEQ ID NO: 49553 - DNA, 25 bp, Probe sequence
accatattctgaaagtgaagagaga

SEQ ID NO: 49554 - DNA, 25 bp, Probe sequence
ttatagtcttgtctgtgaagttgac

SEQ ID NO: 49555 - DNA, 25 bp, Probe sequence
taaagatgccaaagacaaactgatg

SEQ ID NO: 49556 - DNA, 25 bp, Probe sequence
ataaagatgccaaagacaaactgat

SEQ ID NO: 49557 - DNA, 25 bp, Probe sequence
gatgccaaagacaaactgatgacta

SEQ ID NO: 49558 - DNA, 25 bp, Probe sequence
tataaagatgccaaagacaaactga

SEQ ID NO: 49559 - DNA, 25 bp, Probe sequence
ccaaagacaaactgatgactaggat

SEQ ID NO: 49560 - DNA, 25 bp, Probe sequence
agtcaaagaaacaagagaagcagtc

SEQ ID NO: 49561 - DNA, 25 bp, Probe sequence
aaagatgccaaagacaaactgatga

SEQ ID NO: 49562 - DNA, 25 bp, Probe sequence
tagcaaagagtcaagagtgaaagaa

SEQ ID NO: 49563 - DNA, 25 bp, Probe sequence
gttacaaggtactcaaggagaatca

SEQ ID NO: 49564 - DNA, 25 bp, Probe sequence
tacaaggtactcaaggagaatcaag

SEQ ID NO: 49565 - DNA, 25 bp, Probe sequence
taattatactcaaccgacgacaacg

SEQ ID NO: 49566 - DNA, 25 bp, Probe sequence
ttacaaggtactcaaggagaatcaa

SEQ ID NO: 49567 - DNA, 25 bp, Probe sequence
attatactcaaccgacgacaacgaa

SEQ ID NO: 49568 - DNA, 25 bp, Probe sequence
cgttacaaggtactcaaggagaatc

SEQ ID NO: 49569 - DNA, 25 bp, Probe sequence
caaggtactcaaggagaatcaagtg

SEQ ID NO: 49570 - DNA, 25 bp, Probe sequence
aattatactcaaccgacgacaacga

SEQ ID NO: 49571 - DNA, 25 bp, Probe sequence
acaaggtactcaaggagaatcaagt

SEQ ID NO: 49572 - DNA, 25 bp, Probe sequence
gttagttaaagaaacaagagaagcg

SEQ ID NO: 49573 - DNA, 25 bp, Probe sequence
gaaacaagagaagcggttgcaaatg

SEQ ID NO: 49574 - DNA, 25 bp, Probe sequence
agaaacaagagaagcggttgcaaat

SEQ ID NO: 49575 - DNA, 25 bp, Probe sequence
aacagaccagcactaagcgataatt

SEQ ID NO: 49576 - DNA, 25 bp, Probe sequence
agaatactaggtgaggaccaatact

SEQ ID NO: 49577 - DNA, 25 bp, Probe sequence
acagaccagcactaagcgataatta

SEQ ID NO: 49578 - DNA, 25 bp, Probe sequence
gaatactaggtgaggaccaatactt

SEQ ID NO: 49579 - DNA, 25 bp, Probe sequence
aaacatacggtgaaactgaaacaaa

SEQ ID NO: 49580 - DNA, 25 bp, Probe sequence
actagaatactaggtgaggaccaat

SEQ ID NO: 49581 - DNA, 25 bp, Probe sequence
atgactagaatactaggtgaggacc

SEQ ID NO: 49582 - DNA, 25 bp, Probe sequence
gactagaatactaggtgaggaccaa

SEQ ID NO: 49583 - DNA, 25 bp, Probe sequence
tagccctaaagataacaaagaaagc

SEQ ID NO: 49584 - DNA, 25 bp, Probe sequence
caaggaacaatctatggtgaaactg

SEQ ID NO: 49585 - DNA, 25 bp, Probe sequence
acaaggaacaatctatggtgaaact

SEQ ID NO: 49586 - DNA, 25 bp, Probe sequence
agagaagttcaagagaaagaagtca

SEQ ID NO: 49587 - DNA, 25 bp, Probe sequence
gagaagttcaagagaaagaagtcaa

SEQ ID NO: 49588 - DNA, 25 bp, Probe sequence
tccacaaggaacaatctatggtgaa

SEQ ID NO: 49589 - DNA, 25 bp, Probe sequence
aagagaagttcaagagaaagaagtc

SEQ ID NO: 49590 - DNA, 25 bp, Probe sequence
agaagttcaagagaaagaagtcaaa

SEQ ID NO: 49591 - DNA, 25 bp, Probe sequence
aaggaacaatctatggtgaaactgt

SEQ ID NO: 49592 - DNA, 25 bp, Probe sequence
aggaacaatctatggtgaaactgta

SEQ ID NO: 49593 - DNA, 25 bp, Probe sequence
ctggagcaatagacttattggaaga

SEQ ID NO: 49594 - DNA, 25 bp, Probe sequence
actggagcaatagacttattggaag

SEQ ID NO: 49595 - DNA, 25 bp, Probe sequence
tggagcaatagacttattggaagat

SEQ ID NO: 49596 - DNA, 25 bp, Probe sequence
ggagcaatagacttattggaagatt

SEQ ID NO: 49597 - DNA, 25 bp, Probe sequence
tcaagagtgaatgagaacagtaaaa

SEQ ID NO: 49598 - DNA, 25 bp, Probe sequence
gagcaatagacttattggaagatta

SEQ ID NO: 49599 - DNA, 25 bp, Probe sequence
tggaagattataaatatggagatcc

SEQ ID NO: 49600 - DNA, 25 bp, Probe sequence
agcaatagacttattggaagattat

SEQ ID NO: 49601 - DNA, 25 bp, Probe sequence
ggaagattataaatatggagatcct

SEQ ID NO: 49602 - DNA, 25 bp, Probe sequence
attcaaggtgtaactgtagaaggac

SEQ ID NO: 49603 - DNA, 25 bp, Probe sequence
aattcaaggtgtaactgtagaagga

SEQ ID NO: 49604 - DNA, 25 bp, Probe sequence
acagatgagtatcaatatggtggaa

SEQ ID NO: 49605 - DNA, 25 bp, Probe sequence
aacagatgagtatcaatatggtgga

SEQ ID NO: 49606 - DNA, 25 bp, Probe sequence
aacaaaccagaatagaccttcaact

SEQ ID NO: 49607 - DNA, 25 bp, Probe sequence
aaacaaaccagaatagaccttcaac

SEQ ID NO: 49608 - DNA, 25 bp, Probe sequence
acaaaccagaatagaccttcaacta

SEQ ID NO: 49609 - DNA, 25 bp, Probe sequence
gaaacaaaccagaatagaccttcaa

SEQ ID NO: 49610 - DNA, 25 bp, Probe sequence
acccgaatagaataactaatgaacg

SEQ ID NO: 49611 - DNA, 25 bp, Probe sequence
tcaacacattactaggtatgatgga

SEQ ID NO: 49612 - DNA, 25 bp, Probe sequence
caacacattactaggtatgatggaa

SEQ ID NO: 49613 - DNA, 25 bp, Probe sequence
ctcaacacattactaggtatgatgg

SEQ ID NO: 49614 - DNA, 25 bp, Probe sequence
cctcaacacattactaggtatgatg

SEQ ID NO: 49615 - DNA, 25 bp, Probe sequence
gaatagacctcaacacattactagg

SEQ ID NO: 49616 - DNA, 25 bp, Probe sequence
tgaaagagaagaaagaacagcatat

SEQ ID NO: 49617 - DNA, 25 bp, Probe sequence
attgggactcaaggtgaaattgtaa

SEQ ID NO: 49618 - DNA, 25 bp, Probe sequence
ttgggactcaaggtgaaattgtaaa

SEQ ID NO: 49619 - DNA, 25 bp, Probe sequence
aattgggactcaaggtgaaattgta

SEQ ID NO: 49620 - DNA, 25 bp, Probe sequence
aacagaccatcattaagcgataatt

SEQ ID NO: 49621 - DNA, 25 bp, Probe sequence
gataaccaacaagatgacaaagcaa

SEQ ID NO: 49622 - DNA, 25 bp, Probe sequence
ataaccaacaagatgacaaagcaac

SEQ ID NO: 49623 - DNA, 25 bp, Probe sequence
acagaccatcattaagcgataatta

SEQ ID NO: 49624 - DNA, 25 bp, Probe sequence
cgaagttcaagagaaagaagtcaaa

SEQ ID NO: 49625 - DNA, 25 bp, Probe sequence
gtaagcgaagttcaagagaaagaag

SEQ ID NO: 49626 - DNA, 25 bp, Probe sequence
aatgtaagcgaagttcaagagaaag

SEQ ID NO: 49627 - DNA, 25 bp, Probe sequence
tatagcgggaaatcacaagttaatg

SEQ ID NO: 49628 - DNA, 25 bp, Probe sequence
taagcgaagttcaagagaaagaagt

SEQ ID NO: 49629 - DNA, 25 bp, Probe sequence
gagatagatacactatacgcagcat

SEQ ID NO: 49630 - DNA, 25 bp, Probe sequence
tgagatagatacactatacgcagca

SEQ ID NO: 49631 - DNA, 25 bp, Probe sequence
acataacagaccatcactaagcaat

SEQ ID NO: 49632 - DNA, 25 bp, Probe sequence
aacataacagaccatcactaagcaa

SEQ ID NO: 49633 - DNA, 25 bp, Probe sequence
gtgagatagatacactatacgcagc

SEQ ID NO: 49634 - DNA, 25 bp, Probe sequence
gaacataacagaccatcactaagca

SEQ ID NO: 49635 - DNA, 25 bp, Probe sequence
tgtgagatagatacactatacgcag

SEQ ID NO: 49636 - DNA, 25 bp, Probe sequence
agatagatacactatacgcagcata

SEQ ID NO: 49637 - DNA, 25 bp, Probe sequence
cataacagaccatcactaagcaata

SEQ ID NO: 49638 - DNA, 25 bp, Probe sequence
ttgctaaggctgataattcttggaa

SEQ ID NO: 49639 - DNA, 25 bp, Probe sequence
gttgctaaggctgataattcttgga

SEQ ID NO: 49640 - DNA, 25 bp, Probe sequence
ggttgctaaggctgataattcttgg

SEQ ID NO: 49641 - DNA, 25 bp, Probe sequence
cggttgctaaggctgataattcttg

SEQ ID NO: 49642 - DNA, 25 bp, Probe sequence
ttatggcgaccagaattatagagaa

SEQ ID NO: 49643 - DNA, 25 bp, Probe sequence
cgtattatggcgaccagaattatag

SEQ ID NO: 49644 - DNA, 25 bp, Probe sequence
attatggcgaccagaattatagaga

SEQ ID NO: 49645 - DNA, 25 bp, Probe sequence
acttggagattctgataaccctaac

SEQ ID NO: 49646 - DNA, 25 bp, Probe sequence
cttggagattctgataaccctaacc

SEQ ID NO: 49647 - DNA, 25 bp, Probe sequence
gcactacaagttgatatcgctaatg

SEQ ID NO: 49648 - DNA, 25 bp, Probe sequence
tgcactacaagttgatatcgctaat

SEQ ID NO: 49649 - DNA, 25 bp, Probe sequence
atgcactacaagttgatatcgctaa

SEQ ID NO: 49650 - DNA, 25 bp, Probe sequence
gatgcactacaagttgatatcgcta

SEQ ID NO: 49651 - DNA, 25 bp, Probe sequence
cactacaagttgatatcgctaatgt

SEQ ID NO: 49652 - DNA, 25 bp, Probe sequence
tatgcgatgcactacaagttgatat

SEQ ID NO: 49653 - DNA, 25 bp, Probe sequence
atatgcgatgcactacaagttgata

SEQ ID NO: 49654 - DNA, 25 bp, Probe sequence
gttgatatcgctaatgtaaaggaga

SEQ ID NO: 49655 - DNA, 25 bp, Probe sequence
agttgatatcgctaatgtaaaggag

SEQ ID NO: 49656 - DNA, 25 bp, Probe sequence
catcaagcattagaagttaagacgg

SEQ ID NO: 49657 - DNA, 25 bp, Probe sequence
agcattagaagttaagacggcatat

SEQ ID NO: 49658 - DNA, 25 bp, Probe sequence
aagcattagaagttaagacggcata

SEQ ID NO: 49659 - DNA, 25 bp, Probe sequence
tcatcaagcattagaagttaagacg

SEQ ID NO: 49660 - DNA, 25 bp, Probe sequence
agacggtcacacatcaattagtaag

SEQ ID NO: 49661 - DNA, 25 bp, Probe sequence
cagacggtcacacatcaattagtaa

SEQ ID NO: 49662 - DNA, 25 bp, Probe sequence
aacatcaattacacattcagacggt

SEQ ID NO: 49663 - DNA, 25 bp, Probe sequence
gcattagaagttaagacggcatata

SEQ ID NO: 49664 - DNA, 25 bp, Probe sequence
attcagacggtcacacatcaattag

SEQ ID NO: 49665 - DNA, 25 bp, Probe sequence
gcatcaagtaactaagaatcatcca

SEQ ID NO: 49666 - DNA, 25 bp, Probe sequence
ttgtcaggactgctaatgatgatta

SEQ ID NO: 49667 - DNA, 25 bp, Probe sequence
tgtcaggactgctaatgatgattac

SEQ ID NO: 49668 - DNA, 25 bp, Probe sequence
gtcaggactgctaatgatgattacg

SEQ ID NO: 49669 - DNA, 25 bp, Probe sequence
agtgttgctgttaatatgtttgtca

SEQ ID NO: 49670 - DNA, 25 bp, Probe sequence
tgcatcaagtaactaagaatcatcc

SEQ ID NO: 49671 - DNA, 25 bp, Probe sequence
tgttaatatgtttgtcaggactgct

SEQ ID NO: 49672 - DNA, 25 bp, Probe sequence
aatatgtttgtcaggactgctaatg

SEQ ID NO: 49673 - DNA, 25 bp, Probe sequence
gactgctaatgatgattacgtgaat

SEQ ID NO: 49674 - DNA, 25 bp, Probe sequence
atgccgtttctatacttcaccacag

SEQ ID NO: 49675 - DNA, 25 bp, Probe sequence
ctcatgccgtttctatacttcacca

SEQ ID NO: 49676 - DNA, 25 bp, Probe sequence
actcatgccgtttctatacttcacc

SEQ ID NO: 49677 - DNA, 25 bp, Probe sequence
tcatgccgtttctatacttcaccac

SEQ ID NO: 49678 - DNA, 25 bp, Probe sequence
gcaagcatagcgacattcatatttt

SEQ ID NO: 49679 - DNA, 25 bp, Probe sequence
catgccgtttctatacttcaccaca

SEQ ID NO: 49680 - DNA, 25 bp, Probe sequence
caagcatagcgacattcatatttta

SEQ ID NO: 49681 - DNA, 25 bp, Probe sequence
aagcatagcgacattcatattttat

SEQ ID NO: 49682 - DNA, 25 bp, Probe sequence
gcagtgctatgcttcacagtcttag

SEQ ID NO: 49683 - DNA, 25 bp, Probe sequence
gaaagacaatgacggtacttattcc

SEQ ID NO: 49684 - DNA, 25 bp, Probe sequence
ccagaaagacaatgacggtacttat

SEQ ID NO: 49685 - DNA, 25 bp, Probe sequence
cagaaagacaatgacggtacttatt

SEQ ID NO: 49686 - DNA, 25 bp, Probe sequence
agaaagacaatgacggtacttattc

SEQ ID NO: 49687 - DNA, 25 bp, Probe sequence
tacttattccgtcgttgctactggt

SEQ ID NO: 49688 - DNA, 25 bp, Probe sequence
gtacttattccgtcgttgctactgg

SEQ ID NO: 49689 - DNA, 25 bp, Probe sequence
ggtacttattccgtcgttgctactg

SEQ ID NO: 49690 - DNA, 25 bp, Probe sequence
ctaggacgtggtttaaatgcaatac

SEQ ID NO: 49691 - DNA, 25 bp, Probe sequence
tctaggacgtggtttaaatgcaata

SEQ ID NO: 49692 - DNA, 25 bp, Probe sequence
tgatagtaggagcagtaggattgat

SEQ ID NO: 49693 - DNA, 25 bp, Probe sequence
aaggtaactattctggaggtggtaa

SEQ ID NO: 49694 - DNA, 25 bp, Probe sequence
aggtaactattctggaggtggtaag

SEQ ID NO: 49695 - DNA, 25 bp, Probe sequence
actattctggaggtggtaagatgaa

SEQ ID NO: 49696 - DNA, 25 bp, Probe sequence
aactattctggaggtggtaagatga

SEQ ID NO: 49697 - DNA, 25 bp, Probe sequence
taactattctggaggtggtaagatg

SEQ ID NO: 49698 - DNA, 25 bp, Probe sequence
gtaactattctggaggtggtaagat

SEQ ID NO: 49699 - DNA, 25 bp, Probe sequence
ggtaactattctggaggtggtaaga

SEQ ID NO: 49700 - DNA, 25 bp, Probe sequence
gatagtaggagcagtaggattgatc

SEQ ID NO: 49701 - DNA, 25 bp, Probe sequence
cacatgacacaagtacagacctata

SEQ ID NO: 49702 - DNA, 25 bp, Probe sequence
acatgacacaagtacagacctataa

SEQ ID NO: 49703 - DNA, 25 bp, Probe sequence
ttcagagcgtagttccgttattcaa

SEQ ID NO: 49704 - DNA, 25 bp, Probe sequence
acacatgacacaagtacagacctat

SEQ ID NO: 49705 - DNA, 25 bp, Probe sequence
atagttgctcgtaataagttagaca

SEQ ID NO: 49706 - DNA, 25 bp, Probe sequence
tgacacaagtacagacctataatgt

SEQ ID NO: 49707 - DNA, 25 bp, Probe sequence
aacacatgacacaagtacagaccta

SEQ ID NO: 49708 - DNA, 25 bp, Probe sequence
atgacacaagtacagacctataatg

SEQ ID NO: 49709 - DNA, 25 bp, Probe sequence
tagttgctcgtaataagttagacaa

SEQ ID NO: 49710 - DNA, 25 bp, Probe sequence
gaatagacggtaagatgatgatgct

SEQ ID NO: 49711 - DNA, 25 bp, Probe sequence
agaatagacggtaagatgatgatgc

SEQ ID NO: 49712 - DNA, 25 bp, Probe sequence
gtgagaatagacggtaagatgatga

SEQ ID NO: 49713 - DNA, 25 bp, Probe sequence
agtgagaatagacggtaagatgatg

SEQ ID NO: 49714 - DNA, 25 bp, Probe sequence
aagtgagaatagacggtaagatgat

SEQ ID NO: 49715 - DNA, 25 bp, Probe sequence
aatagacggtaagatgatgatgctt

SEQ ID NO: 49716 - DNA, 25 bp, Probe sequence
tgagaatagacggtaagatgatgat

SEQ ID NO: 49717 - DNA, 25 bp, Probe sequence
gagaatagacggtaagatgatgatg

SEQ ID NO: 49718 - DNA, 25 bp, Probe sequence
cactaattactaggtacgacagagg

SEQ ID NO: 49719 - DNA, 25 bp, Probe sequence
agagtattcaacaatccaagtaaca

SEQ ID NO: 49720 - DNA, 25 bp, Probe sequence
gttcctagtcaatataccttcacaa

SEQ ID NO: 49721 - DNA, 25 bp, Probe sequence
tgttcctagtcaatataccttcaca

SEQ ID NO: 49722 - DNA, 25 bp, Probe sequence
atgttcctagtcaatataccttcac

SEQ ID NO: 49723 - DNA, 25 bp, Probe sequence
gagtattcaacaatccaagtaacaa

SEQ ID NO: 49724 - DNA, 25 bp, Probe sequence
ttcctagtcaatataccttcacaat

SEQ ID NO: 49725 - DNA, 25 bp, Probe sequence
aatgttcctagtcaatataccttca

SEQ ID NO: 49726 - DNA, 25 bp, Probe sequence
atttcgctgtttaatgttcctagtc

SEQ ID NO: 49727 - DNA, 25 bp, Probe sequence
atataacaatgaagttgggcgaaag

SEQ ID NO: 49728 - DNA, 25 bp, Probe sequence
ggataaccgtgaacaaatagaacaa

SEQ ID NO: 49729 - DNA, 25 bp, Probe sequence
tggataaccgtgaacaaatagaaca

SEQ ID NO: 49730 - DNA, 25 bp, Probe sequence
atggataaccgtgaacaaatagaac

SEQ ID NO: 49731 - DNA, 25 bp, Probe sequence
tataacggcaatgacgacagatgtt

SEQ ID NO: 49732 - DNA, 25 bp, Probe sequence
ggattctacatcttaaacgacgact

SEQ ID NO: 49733 - DNA, 25 bp, Probe sequence
aggattctacatcttaaacgacgac

SEQ ID NO: 49734 - DNA, 25 bp, Probe sequence
aaggattctacatcttaaacgacga

SEQ ID NO: 49735 - DNA, 25 bp, Probe sequence
gattctacatcttaaacgacgactt

SEQ ID NO: 49736 - DNA, 25 bp, Probe sequence
aaaggattctacatcttaaacgacg

SEQ ID NO: 49737 - DNA, 25 bp, Probe sequence
ggatataggtaagttaagagagcgt

SEQ ID NO: 49738 - DNA, 25 bp, Probe sequence
tggatataggtaagttaagagagcg

SEQ ID NO: 49739 - DNA, 25 bp, Probe sequence
gtggatataggtaagttaagagagc

SEQ ID NO: 49740 - DNA, 25 bp, Probe sequence
cgtggatataggtaagttaagagag

SEQ ID NO: 49741 - DNA, 25 bp, Probe sequence
taggtaagttaagagagcgtaacaa

SEQ ID NO: 49742 - DNA, 25 bp, Probe sequence
ataggtaagttaagagagcgtaaca

SEQ ID NO: 49743 - DNA, 25 bp, Probe sequence
ggcaaagatgatgaaagagttaagt

SEQ ID NO: 49744 - DNA, 25 bp, Probe sequence
tggcaaagatgatgaaagagttaag

SEQ ID NO: 49745 - DNA, 25 bp, Probe sequence
ttggcaaagatgatgaaagagttaa

SEQ ID NO: 49746 - DNA, 25 bp, Probe sequence
agattattattcttactagcgatgt

SEQ ID NO: 49747 - DNA, 25 bp, Probe sequence
atgcgattatcaagaagatgcctaa

SEQ ID NO: 49748 - DNA, 25 bp, Probe sequence
cgattatcaagaagatgcctaactc

SEQ ID NO: 49749 - DNA, 25 bp, Probe sequence
gatgcgattatcaagaagatgccta

SEQ ID NO: 49750 - DNA, 25 bp, Probe sequence
gcgattatcaagaagatgcctaact

SEQ ID NO: 49751 - DNA, 25 bp, Probe sequence
tgcgattatcaagaagatgcctaac

SEQ ID NO: 49752 - DNA, 25 bp, Probe sequence
gattatcaagaagatgcctaactct

SEQ ID NO: 49753 - DNA, 25 bp, Probe sequence
taaagttgaagatgttgttgtgagg

SEQ ID NO: 49754 - DNA, 25 bp, Probe sequence
taacagggatgcgattatcaagaag

SEQ ID NO: 49755 - DNA, 25 bp, Probe sequence
agtaaagttgaagatgttgttgtga

SEQ ID NO: 49756 - DNA, 25 bp, Probe sequence
agaatacagcgaagaacgatattga

SEQ ID NO: 49757 - DNA, 25 bp, Probe sequence
gaatacagcgaagaacgatattgaa

SEQ ID NO: 49758 - DNA, 25 bp, Probe sequence
aagaatacagcgaagaacgatattg

SEQ ID NO: 49759 - DNA, 25 bp, Probe sequence
aataattcacaagaagcagaagttg

SEQ ID NO: 49760 - DNA, 25 bp, Probe sequence
gttaggcaatgaagttctgactaat

SEQ ID NO: 49761 - DNA, 25 bp, Probe sequence
cgttaggcaatgaagttctgactaa

SEQ ID NO: 49762 - DNA, 25 bp, Probe sequence
taggcaatgaagttctgactaataa

SEQ ID NO: 49763 - DNA, 25 bp, Probe sequence
atagaatgacgttaggcaatgaagt

SEQ ID NO: 49764 - DNA, 25 bp, Probe sequence
tgaatagaatgacgttaggcaatga

SEQ ID NO: 49765 - DNA, 25 bp, Probe sequence
tatggttctattatggttgtagcgg

SEQ ID NO: 49766 - DNA, 25 bp, Probe sequence
ctattatggttgtagcggaagactt

SEQ ID NO: 49767 - DNA, 25 bp, Probe sequence
acacattagatgcgttaagatatgc

SEQ ID NO: 49768 - DNA, 25 bp, Probe sequence
ttctattatggttgtagcggaagac

SEQ ID NO: 49769 - DNA, 25 bp, Probe sequence
gttctattatggttgtagcggaaga

SEQ ID NO: 49770 - DNA, 25 bp, Probe sequence
ttatggttctattatggttgtagcg

SEQ ID NO: 49771 - DNA, 25 bp, Probe sequence
gatgacacattagatgcgttaagat

SEQ ID NO: 49772 - DNA, 25 bp, Probe sequence
gctagacctgaacatattgaacgat

SEQ ID NO: 49773 - DNA, 25 bp, Probe sequence
tctattatggttgtagcggaagact

SEQ ID NO: 49774 - DNA, 25 bp, Probe sequence
aaccagatgacagaatgattaccaa

SEQ ID NO: 49775 - DNA, 25 bp, Probe sequence
ccagatgacagaatgattaccaact

SEQ ID NO: 49776 - DNA, 25 bp, Probe sequence
accagatgacagaatgattaccaac

SEQ ID NO: 49777 - DNA, 25 bp, Probe sequence
agtagcgaacacagaattacaagta

SEQ ID NO: 49778 - DNA, 25 bp, Probe sequence
cagatgacagaatgattaccaactt

SEQ ID NO: 49779 - DNA, 25 bp, Probe sequence
tgacagaatgattaccaacttccat

SEQ ID NO: 49780 - DNA, 25 bp, Probe sequence
atgacagaatgattaccaacttcca

SEQ ID NO: 49781 - DNA, 25 bp, Probe sequence
gatgacagaatgattaccaacttcc

SEQ ID NO: 49782 - DNA, 25 bp, Probe sequence
aagtagcgaacacagaattacaagt

SEQ ID NO: 49783 - DNA, 25 bp, Probe sequence
aatccgtgatgatattggtatgtct

SEQ ID NO: 49784 - DNA, 25 bp, Probe sequence
tccgtgatgatattggtatgtctaa

SEQ ID NO: 49785 - DNA, 25 bp, Probe sequence
cttacacatcacacaaggcattatg

SEQ ID NO: 49786 - DNA, 25 bp, Probe sequence
ggcacaatgttgactgatgactata

SEQ ID NO: 49787 - DNA, 25 bp, Probe sequence
tataggcacaatgttgactgatgac

SEQ ID NO: 49788 - DNA, 25 bp, Probe sequence
gtataggcacaatgttgactgatga

SEQ ID NO: 49789 - DNA, 25 bp, Probe sequence
atccgtgatgatattggtatgtcta

SEQ ID NO: 49790 - DNA, 25 bp, Probe sequence
ttaactcgtataggcacaatgttga

SEQ ID NO: 49791 - DNA, 25 bp, Probe sequence
taactcgtataggcacaatgttgac

SEQ ID NO: 49792 - DNA, 25 bp, Probe sequence
ctaacgacattctagcattcatcaa

SEQ ID NO: 49793 - DNA, 25 bp, Probe sequence
aagattgaacgacaagaataccgaa

SEQ ID NO: 49794 - DNA, 25 bp, Probe sequence
agatgaactggaattagtagacgac

SEQ ID NO: 49795 - DNA, 25 bp, Probe sequence
aagatgaactggaattagtagacga

SEQ ID NO: 49796 - DNA, 25 bp, Probe sequence
acgacattctagcattcatcaataa

SEQ ID NO: 49797 - DNA, 25 bp, Probe sequence
aacgacattctagcattcatcaata

SEQ ID NO: 49798 - DNA, 25 bp, Probe sequence
taacgacattctagcattcatcaat

SEQ ID NO: 49799 - DNA, 25 bp, Probe sequence
gatgaactggaattagtagacgacg

SEQ ID NO: 49800 - DNA, 25 bp, Probe sequence
caagattgaacgacaagaataccga

SEQ ID NO: 49801 - DNA, 25 bp, Probe sequence
tagatagcacattacaaggacaacc

SEQ ID NO: 49802 - DNA, 25 bp, Probe sequence
gctatcattgtgcgttctaataagt

SEQ ID NO: 49803 - DNA, 25 bp, Probe sequence
gcagaagtagatagcacattacaag

SEQ ID NO: 49804 - DNA, 25 bp, Probe sequence
gtagatagcacattacaaggacaac

SEQ ID NO: 49805 - DNA, 25 bp, Probe sequence
agtagatagcacattacaaggacaa

SEQ ID NO: 49806 - DNA, 25 bp, Probe sequence
aagtagatagcacattacaaggaca

SEQ ID NO: 49807 - DNA, 25 bp, Probe sequence
gaagtagatagcacattacaaggac

SEQ ID NO: 49808 - DNA, 25 bp, Probe sequence
agaagtagatagcacattacaagga

SEQ ID NO: 49809 - DNA, 25 bp, Probe sequence
cagaagtagatagcacattacaagg

SEQ ID NO: 49810 - DNA, 25 bp, Probe sequence
agaagtatcagaagaacgattcact

SEQ ID NO: 49811 - DNA, 25 bp, Probe sequence
gttgaagacaagcaagtagaacagt

SEQ ID NO: 49812 - DNA, 25 bp, Probe sequence
ggttagaagtatcagaagaacgatt

SEQ ID NO: 49813 - DNA, 25 bp, Probe sequence
tagaagtatcagaagaacgattcac

SEQ ID NO: 49814 - DNA, 25 bp, Probe sequence
gaagtatcagaagaacgattcactg

SEQ ID NO: 49815 - DNA, 25 bp, Probe sequence
caagacaacggacatgaatatcaag

SEQ ID NO: 49816 - DNA, 25 bp, Probe sequence
aagacaacggacatgaatatcaagt

SEQ ID NO: 49817 - DNA, 25 bp, Probe sequence
ttgaagacaagcaagtagaacagtc

SEQ ID NO: 49818 - DNA, 25 bp, Probe sequence
acaagacaacggacatgaatatcaa

SEQ ID NO: 49819 - DNA, 25 bp, Probe sequence
taaccgacatacctagtagtgctta

SEQ ID NO: 49820 - DNA, 25 bp, Probe sequence
aaccgacatacctagtagtgcttat

SEQ ID NO: 49821 - DNA, 25 bp, Probe sequence
ggcactgtgagttatacctatgtaa

SEQ ID NO: 49822 - DNA, 25 bp, Probe sequence
gtaaccgacatacctagtagtgctt

SEQ ID NO: 49823 - DNA, 25 bp, Probe sequence
attgccttatcgtaagttaagttgg

SEQ ID NO: 49824 - DNA, 25 bp, Probe sequence
gtgagttatacctatgtaaccgaca

SEQ ID NO: 49825 - DNA, 25 bp, Probe sequence
tgtgagttatacctatgtaaccgac

SEQ ID NO: 49826 - DNA, 25 bp, Probe sequence
actgtgagttatacctatgtaaccg

SEQ ID NO: 49827 - DNA, 25 bp, Probe sequence
ctgtgagttatacctatgtaaccga

SEQ ID NO: 49828 - DNA, 25 bp, Probe sequence
atatacgccgtaccacataccaata

SEQ ID NO: 49829 - DNA, 25 bp, Probe sequence
tatatacgccgtaccacataccaat

SEQ ID NO: 49830 - DNA, 25 bp, Probe sequence
tatacgccgtaccacataccaataa

SEQ ID NO: 49831 - DNA, 25 bp, Probe sequence
ctatatacgccgtaccacataccaa

SEQ ID NO: 49832 - DNA, 25 bp, Probe sequence
aacctatatacgccgtaccacatac

SEQ ID NO: 49833 - DNA, 25 bp, Probe sequence
tttaatccgtttgatgagtttccac

SEQ ID NO: 49834 - DNA, 25 bp, Probe sequence
gtttaatccgtttgatgagtttcca

SEQ ID NO: 49835 - DNA, 25 bp, Probe sequence
tgtttaatccgtttgatgagtttcc

SEQ ID NO: 49836 - DNA, 25 bp, Probe sequence
aattgaaattggagaggttgaagtc

SEQ ID NO: 49837 - DNA, 25 bp, Probe sequence
gacaactgctaagattcacaataca

SEQ ID NO: 49838 - DNA, 25 bp, Probe sequence
agacaactgctaagattcacaatac

SEQ ID NO: 49839 - DNA, 25 bp, Probe sequence
acaactgctaagattcacaatacaa

SEQ ID NO: 49840 - DNA, 25 bp, Probe sequence
aagacaactgctaagattcacaata

SEQ ID NO: 49841 - DNA, 25 bp, Probe sequence
attaacattggtagtgaatacgcaa

SEQ ID NO: 49842 - DNA, 25 bp, Probe sequence
tattaacattggtagtgaatacgca

SEQ ID NO: 49843 - DNA, 25 bp, Probe sequence
caactgctaagattcacaatacaat

SEQ ID NO: 49844 - DNA, 25 bp, Probe sequence
tggtagtgaatacgcaatatatgtc

SEQ ID NO: 49845 - DNA, 25 bp, Probe sequence
ctggagttattaacattggtagtga

SEQ ID NO: 49846 - DNA, 25 bp, Probe sequence
acacaagaagtgattactgacatag

SEQ ID NO: 49847 - DNA, 25 bp, Probe sequence
gatacacaagaagtgattactgaca

SEQ ID NO: 49848 - DNA, 25 bp, Probe sequence
tgatacacaagaagtgattactgac

SEQ ID NO: 49849 - DNA, 25 bp, Probe sequence
cacaagaagtgattactgacataga

SEQ ID NO: 49850 - DNA, 25 bp, Probe sequence
acaagaagtgattactgacatagat

SEQ ID NO: 49851 - DNA, 25 bp, Probe sequence
cagacataacacattacaaaggagt

SEQ ID NO: 49852 - DNA, 25 bp, Probe sequence
acagacataacacattacaaaggag

SEQ ID NO: 49853 - DNA, 25 bp, Probe sequence
atacacaagaagtgattactgacat

SEQ ID NO: 49854 - DNA, 25 bp, Probe sequence
ttgatacacaagaagtgattactga

SEQ ID NO: 49855 - DNA, 25 bp, Probe sequence
agttgacattaacattgaagagtgg

SEQ ID NO: 49856 - DNA, 25 bp, Probe sequence
gaagaagaactgacttataggttga

SEQ ID NO: 49857 - DNA, 25 bp, Probe sequence
agaagaagaactgacttataggttg

SEQ ID NO: 49858 - DNA, 25 bp, Probe sequence
aagttgacattaacattgaagagtg

SEQ ID NO: 49859 - DNA, 25 bp, Probe sequence
acagaagaagaactgacttataggt

SEQ ID NO: 49860 - DNA, 25 bp, Probe sequence
gaagttgacattaacattgaagagt

SEQ ID NO: 49861 - DNA, 25 bp, Probe sequence
aagaagaactgacttataggttgaa

SEQ ID NO: 49862 - DNA, 25 bp, Probe sequence
agaagttgacattaacattgaagag

SEQ ID NO: 49863 - DNA, 25 bp, Probe sequence
actgacttataggttgaataatggt

SEQ ID NO: 49864 - DNA, 25 bp, Probe sequence
tgaacgcttacgaagatagttatga

SEQ ID NO: 49865 - DNA, 25 bp, Probe sequence
gaacgcttacgaagatagttatgaa

SEQ ID NO: 49866 - DNA, 25 bp, Probe sequence
atgaacgcttacgaagatagttatg

SEQ ID NO: 49867 - DNA, 25 bp, Probe sequence
ggacacactatcagtaatgaccttg

SEQ ID NO: 49868 - DNA, 25 bp, Probe sequence
tggacacactatcagtaatgacctt

SEQ ID NO: 49869 - DNA, 25 bp, Probe sequence
gacacactatcagtaatgaccttgc

SEQ ID NO: 49870 - DNA, 25 bp, Probe sequence
acatgaacgcttacgaagatagtta

SEQ ID NO: 49871 - DNA, 25 bp, Probe sequence
aagacatgaacgcttacgaagatag

SEQ ID NO: 49872 - DNA, 25 bp, Probe sequence
gaagacatgaacgcttacgaagata

SEQ ID NO: 49873 - DNA, 25 bp, Probe sequence
tcgagatgatgaagaacaactacaa

SEQ ID NO: 49874 - DNA, 25 bp, Probe sequence
atcgagatgatgaagaacaactaca

SEQ ID NO: 49875 - DNA, 25 bp, Probe sequence
ggtatcgagatgatgaagaacaact

SEQ ID NO: 49876 - DNA, 25 bp, Probe sequence
ctggtatcgagatgatgaagaacaa

SEQ ID NO: 49877 - DNA, 25 bp, Probe sequence
taacaattaacaacgaagaagtgaa

SEQ ID NO: 49878 - DNA, 25 bp, Probe sequence
tggtatcgagatgatgaagaacaac

SEQ ID NO: 49879 - DNA, 25 bp, Probe sequence
ttggacgtaatgaataatagcggtt

SEQ ID NO: 49880 - DNA, 25 bp, Probe sequence
aaacgacacgctaaatctattacag

SEQ ID NO: 49881 - DNA, 25 bp, Probe sequence
cgagatgatgaagaacaactacaaa

SEQ ID NO: 49882 - DNA, 25 bp, Probe sequence
aacattacattattcgtggtcaaga

SEQ ID NO: 49883 - DNA, 25 bp, Probe sequence
gagaacattacattattcgtggtca

SEQ ID NO: 49884 - DNA, 25 bp, Probe sequence
tacattattcgtggtcaagaagatg

SEQ ID NO: 49885 - DNA, 25 bp, Probe sequence
agagaacattacattattcgtggtc

SEQ ID NO: 49886 - DNA, 25 bp, Probe sequence
acattattcgtggtcaagaagatga

SEQ ID NO: 49887 - DNA, 25 bp, Probe sequence
acattacattattcgtggtcaagaa

SEQ ID NO: 49888 - DNA, 25 bp, Probe sequence
agaacattacattattcgtggtcaa

SEQ ID NO: 49889 - DNA, 25 bp, Probe sequence
cattattcgtggtcaagaagatgaa

SEQ ID NO: 49890 - DNA, 25 bp, Probe sequence
gaacattacattattcgtggtcaag

SEQ ID NO: 49891 - DNA, 25 bp, Probe sequence
ctaccttacaaccgataatgcctat

SEQ ID NO: 49892 - DNA, 25 bp, Probe sequence
acactaccactaacctacctaagat

SEQ ID NO: 49893 - DNA, 25 bp, Probe sequence
gactacactaccactaacctaccta

SEQ ID NO: 49894 - DNA, 25 bp, Probe sequence
ttatccgaagtatctatgctggttg

SEQ ID NO: 49895 - DNA, 25 bp, Probe sequence
actacactaccactaacctacctaa

SEQ ID NO: 49896 - DNA, 25 bp, Probe sequence
ggtaatgtattcgctggtattggta

SEQ ID NO: 49897 - DNA, 25 bp, Probe sequence
caatctaccttacaaccgataatgc

SEQ ID NO: 49898 - DNA, 25 bp, Probe sequence
accttacaaccgataatgcctatat

SEQ ID NO: 49899 - DNA, 25 bp, Probe sequence
tcagaacaagtaggacaatcacaag

SEQ ID NO: 49900 - DNA, 25 bp, Probe sequence
taacaagcacacatatagaggcaat

SEQ ID NO: 49901 - DNA, 25 bp, Probe sequence
ataacaagcacacatatagaggcaa

SEQ ID NO: 49902 - DNA, 25 bp, Probe sequence
gataacaagcacacatatagaggca

SEQ ID NO: 49903 - DNA, 25 bp, Probe sequence
tgataacaagcacacatatagaggc

SEQ ID NO: 49904 - DNA, 25 bp, Probe sequence
cgttggattagttagcgaagtatct

SEQ ID NO: 49905 - DNA, 25 bp, Probe sequence
tgattacaatgttatcggttctggt

SEQ ID NO: 49906 - DNA, 25 bp, Probe sequence
gtagcattaacacagttcaaccaat

SEQ ID NO: 49907 - DNA, 25 bp, Probe sequence
gattacaatgttatcggttctggtt

SEQ ID NO: 49908 - DNA, 25 bp, Probe sequence
ttacaatgttatcggttctggttac

SEQ ID NO: 49909 - DNA, 25 bp, Probe sequence
atattacaaggcactgatgatgact

SEQ ID NO: 49910 - DNA, 25 bp, Probe sequence
tattacaaggcactgatgatgactg

SEQ ID NO: 49911 - DNA, 25 bp, Probe sequence
ggaagatgacctcaatgaatatgtg

SEQ ID NO: 49912 - DNA, 25 bp, Probe sequence
gatgatgactggttacacggttatt

SEQ ID NO: 49913 - DNA, 25 bp, Probe sequence
catattacaaggcactgatgatgac

SEQ ID NO: 49914 - DNA, 25 bp, Probe sequence
atgatgactggttacacggttattg

SEQ ID NO: 49915 - DNA, 25 bp, Probe sequence
ttgacgcatatcacacagattactt

SEQ ID NO: 49916 - DNA, 25 bp, Probe sequence
gtcacgaggttattatgtacgagtt

SEQ ID NO: 49917 - DNA, 25 bp, Probe sequence
tcacgaggttattatgtacgagtta

SEQ ID NO: 49918 - DNA, 25 bp, Probe sequence
tggttggagcataatagaaggtaag

SEQ ID NO: 49919 - DNA, 25 bp, Probe sequence
atagtggttggagcataatagaagg

SEQ ID NO: 49920 - DNA, 25 bp, Probe sequence
gcataatagaaggtaaggaggttga

SEQ ID NO: 49921 - DNA, 25 bp, Probe sequence
agcataatagaaggtaaggaggttg

SEQ ID NO: 49922 - DNA, 25 bp, Probe sequence
gttggagcataatagaaggtaagga

SEQ ID NO: 49923 - DNA, 25 bp, Probe sequence
gtggttggagcataatagaaggtaa

SEQ ID NO: 49924 - DNA, 25 bp, Probe sequence
agtaagaagtgctgacgatattgat

SEQ ID NO: 49925 - DNA, 25 bp, Probe sequence
aagtaagaagtgctgacgatattga

SEQ ID NO: 49926 - DNA, 25 bp, Probe sequence
tgaagtaagaagtgctgacgatatt

SEQ ID NO: 49927 - DNA, 25 bp, Probe sequence
aagccaagcagtatgtagatgataa

SEQ ID NO: 49928 - DNA, 25 bp, Probe sequence
cgtgttagttgtctatgttgttgat

SEQ ID NO: 49929 - DNA, 25 bp, Probe sequence
caagccaagcagtatgtagatgata

SEQ ID NO: 49930 - DNA, 25 bp, Probe sequence
aatcaagccaagcagtatgtagatg

SEQ ID NO: 49931 - DNA, 25 bp, Probe sequence
gtgttagttgtctatgttgttgatg

SEQ ID NO: 49932 - DNA, 25 bp, Probe sequence
tgttagttgtctatgttgttgatga

SEQ ID NO: 49933 - DNA, 25 bp, Probe sequence
gcgtgttagttgtctatgttgttga

SEQ ID NO: 49934 - DNA, 25 bp, Probe sequence
tatgttgttgatgatagtacggcac

SEQ ID NO: 49935 - DNA, 25 bp, Probe sequence
aatcgtctgagcagtccatagatag

SEQ ID NO: 49936 - DNA, 25 bp, Probe sequence
aatggagattctatggaacctatgt

SEQ ID NO: 49937 - DNA, 25 bp, Probe sequence
atggagattctatggaacctatgtt

SEQ ID NO: 49938 - DNA, 25 bp, Probe sequence
agttaatggagattctatggaacct

SEQ ID NO: 49939 - DNA, 25 bp, Probe sequence
aagttaatggagattctatggaacc

SEQ ID NO: 49940 - DNA, 25 bp, Probe sequence
acgacatcacttccatatacaataa

SEQ ID NO: 49941 - DNA, 25 bp, Probe sequence
aacgacatcacttccatatacaata

SEQ ID NO: 49942 - DNA, 25 bp, Probe sequence
taacgacatcacttccatatacaat

SEQ ID NO: 49943 - DNA, 25 bp, Probe sequence
aataacgacatcacttccatataca

SEQ ID NO: 49944 - DNA, 25 bp, Probe sequence
tggtcagattggtatattcatcatt

SEQ ID NO: 49945 - DNA, 25 bp, Probe sequence
cgcaatagtagtaggaccatctaat

SEQ ID NO: 49946 - DNA, 25 bp, Probe sequence
agcaatgaatgttaagcgaatatgg

SEQ ID NO: 49947 - DNA, 25 bp, Probe sequence
cagcaatgaatgttaagcgaatatg

SEQ ID NO: 49948 - DNA, 25 bp, Probe sequence
gctacacatcaatatgctactgcta

SEQ ID NO: 49949 - DNA, 25 bp, Probe sequence
ccgcaatagtagtaggaccatctaa

SEQ ID NO: 49950 - DNA, 25 bp, Probe sequence
ttggctagttattgaagtatgtggt

SEQ ID NO: 49951 - DNA, 25 bp, Probe sequence
gctagttattgaagtatgtggtggt

SEQ ID NO: 49952 - DNA, 25 bp, Probe sequence
tggctagttattgaagtatgtggtg

SEQ ID NO: 49953 - DNA, 25 bp, Probe sequence
ggttctccaggaagattagtaagac

SEQ ID NO: 49954 - DNA, 25 bp, Probe sequence
aagtgaacggagatgataacaatgc

SEQ ID NO: 49955 - DNA, 25 bp, Probe sequence
taatagtcgcatggatcaatcagtt

SEQ ID NO: 49956 - DNA, 25 bp, Probe sequence
ttaatagtcgcatggatcaatcagt

SEQ ID NO: 49957 - DNA, 25 bp, Probe sequence
tatcggtacaatcgtaagaacaatt

SEQ ID NO: 49958 - DNA, 25 bp, Probe sequence
attaatagtcgcatggatcaatcag

SEQ ID NO: 49959 - DNA, 25 bp, Probe sequence
atatcggtacaatcgtaagaacaat

SEQ ID NO: 49960 - DNA, 25 bp, Probe sequence
aatcccagttgacgaagtgtttata

SEQ ID NO: 49961 - DNA, 25 bp, Probe sequence
gaataacaactttactcacgcatct

SEQ ID NO: 49962 - DNA, 25 bp, Probe sequence
agaataacaactttactcacgcatc

SEQ ID NO: 49963 - DNA, 25 bp, Probe sequence
gacattgacaaggcattaagtagtg

SEQ ID NO: 49964 - DNA, 25 bp, Probe sequence
tgagtcagtaggtaacacagtattg

SEQ ID NO: 49965 - DNA, 25 bp, Probe sequence
tgacattgacaaggcattaagtagt

SEQ ID NO: 49966 - DNA, 25 bp, Probe sequence
tcttgagtcagtaggtaacacagta

SEQ ID NO: 49967 - DNA, 25 bp, Probe sequence
cttgagtcagtaggtaacacagtat

SEQ ID NO: 49968 - DNA, 25 bp, Probe sequence
gtatcttgagtcagtaggtaacaca

SEQ ID NO: 49969 - DNA, 25 bp, Probe sequence
tatcttgagtcagtaggtaacacag

SEQ ID NO: 49970 - DNA, 25 bp, Probe sequence
agtatcttgagtcagtaggtaacac

SEQ ID NO: 49971 - DNA, 25 bp, Probe sequence
ctgatgacattgacaaggcattaag

SEQ ID NO: 49972 - DNA, 25 bp, Probe sequence
acgaccaagatgttgaggttattaa

SEQ ID NO: 49973 - DNA, 25 bp, Probe sequence
gacgaccaagatgttgaggttatta

SEQ ID NO: 49974 - DNA, 25 bp, Probe sequence
gtggcacgaaatcaacagaattatt

SEQ ID NO: 49975 - DNA, 25 bp, Probe sequence
tggcacgaaatcaacagaattattg

SEQ ID NO: 49976 - DNA, 25 bp, Probe sequence
agtggcacgaaatcaacagaattat

SEQ ID NO: 49977 - DNA, 25 bp, Probe sequence
tcaacagaattattgacggacaatt

SEQ ID NO: 49978 - DNA, 25 bp, Probe sequence
aatcaacagaattattgacggacaa

SEQ ID NO: 49979 - DNA, 25 bp, Probe sequence
cagtggcacgaaatcaacagaatta

SEQ ID NO: 49980 - DNA, 25 bp, Probe sequence
atcaacagaattattgacggacaat

SEQ ID NO: 49981 - DNA, 25 bp, Probe sequence
tctaccgattcttacgagcataatt

SEQ ID NO: 49982 - DNA, 25 bp, Probe sequence
ctctaccgattcttacgagcataat

SEQ ID NO: 49983 - DNA, 25 bp, Probe sequence
atctctaccgattcttacgagcata

SEQ ID NO: 49984 - DNA, 25 bp, Probe sequence
tctctaccgattcttacgagcataa

SEQ ID NO: 49985 - DNA, 25 bp, Probe sequence
ctaccgattcttacgagcataatta

SEQ ID NO: 49986 - DNA, 25 bp, Probe sequence
ttaatctctaccgattcttacgagc

SEQ ID NO: 49987 - DNA, 25 bp, Probe sequence
taatctctaccgattcttacgagca

SEQ ID NO: 49988 - DNA, 25 bp, Probe sequence
taccgattcttacgagcataattaa

SEQ ID NO: 49989 - DNA, 25 bp, Probe sequence
agttaatctctaccgattcttacga

SEQ ID NO: 49990 - DNA, 25 bp, Probe sequence
tatacacggattcaataagcacact

SEQ ID NO: 49991 - DNA, 25 bp, Probe sequence
gaagacacagaagaagataagccta

SEQ ID NO: 49992 - DNA, 25 bp, Probe sequence
ccacatatacacggattcaataagc

SEQ ID NO: 49993 - DNA, 25 bp, Probe sequence
gccacatatacacggattcaataag

SEQ ID NO: 49994 - DNA, 25 bp, Probe sequence
tgccacatatacacggattcaataa

SEQ ID NO: 49995 - DNA, 25 bp, Probe sequence
aagaagacacagaagaagataagcc

SEQ ID NO: 49996 - DNA, 25 bp, Probe sequence
gaagaagacacagaagaagataagc

SEQ ID NO: 49997 - DNA, 25 bp, Probe sequence
aagacacagaagaagataagcctaa

SEQ ID NO: 49998 - DNA, 25 bp, Probe sequence
atatacacggattcaataagcacac

SEQ ID NO: 49999 - DNA, 25 bp, Probe sequence
gctacagaactacgattgataggaa

SEQ ID NO: 50000 - DNA, 25 bp, Probe sequence
aatggattaactggtggattgaatg

SEQ ID NO: 50001 - DNA, 25 bp, Probe sequence
tcatcagtcgctacatcaattacat

SEQ ID NO: 50002 - DNA, 25 bp, Probe sequence
atcatcagtcgctacatcaattaca

SEQ ID NO: 50003 - DNA, 25 bp, Probe sequence
catcagtcgctacatcaattacatt

SEQ ID NO: 50004 - DNA, 25 bp, Probe sequence
aatcatcagtcgctacatcaattac

SEQ ID NO: 50005 - DNA, 25 bp, Probe sequence
atggattaactggtggattgaatgg

SEQ ID NO: 50006 - DNA, 25 bp, Probe sequence
atggcagagatagtagtgattcatt

SEQ ID NO: 50007 - DNA, 25 bp, Probe sequence
tggcagagatagtagtgattcatta

SEQ ID NO: 50008 - DNA, 25 bp, Probe sequence
aagtaactcattggttagatggagg

SEQ ID NO: 50009 - DNA, 25 bp, Probe sequence
ggaagtaactcattggttagatgga

SEQ ID NO: 50010 - DNA, 25 bp, Probe sequence
tggaagtaactcattggttagatgg

SEQ ID NO: 50011 - DNA, 25 bp, Probe sequence
atgatgatggttccattactcaagc

SEQ ID NO: 50012 - DNA, 25 bp, Probe sequence
gaagtaactcattggttagatggag

SEQ ID NO: 50013 - DNA, 25 bp, Probe sequence
gatgatggttccattactcaagcaa

SEQ ID NO: 50014 - DNA, 25 bp, Probe sequence
atggaagtaactcattggttagatg

SEQ ID NO: 50015 - DNA, 25 bp, Probe sequence
gaaggtggcaattacatctttcaaa

SEQ ID NO: 50016 - DNA, 25 bp, Probe sequence
aaacaacaaagagaacacagagata

SEQ ID NO: 50017 - DNA, 25 bp, Probe sequence
gatgaacatatcaggcagataatga

SEQ ID NO: 50018 - DNA, 25 bp, Probe sequence
aattacttacgctctgtgtcaggat

SEQ ID NO: 50019 - DNA, 25 bp, Probe sequence
aagagttgtgtgtttgtgatatagc

SEQ ID NO: 50020 - DNA, 25 bp, Probe sequence
gatgaagagttgtgtgtttgtgata

SEQ ID NO: 50021 - DNA, 25 bp, Probe sequence
agagttgtgtgtttgtgatatagca

SEQ ID NO: 50022 - DNA, 25 bp, Probe sequence
atcttaggtgttacgatagcaaatg

SEQ ID NO: 50023 - DNA, 25 bp, Probe sequence
atgaagagttgtgtgtttgtgatat

SEQ ID NO: 50024 - DNA, 25 bp, Probe sequence
aatatcttaggtgttacgatagcaa

SEQ ID NO: 50025 - DNA, 25 bp, Probe sequence
gagttgtgtgtttgtgatatagcaa

SEQ ID NO: 50026 - DNA, 25 bp, Probe sequence
tgatatgacacctggacagattaga

SEQ ID NO: 50027 - DNA, 25 bp, Probe sequence
gatatgacacctggacagattagat

SEQ ID NO: 50028 - DNA, 25 bp, Probe sequence
atgacacctggacagattagatatt

SEQ ID NO: 50029 - DNA, 25 bp, Probe sequence
tgacacctggacagattagatatta

SEQ ID NO: 50030 - DNA, 25 bp, Probe sequence
tatgacacctggacagattagatat

SEQ ID NO: 50031 - DNA, 25 bp, Probe sequence
atatgacacctggacagattagata

SEQ ID NO: 50032 - DNA, 25 bp, Probe sequence
ctgatatgacacctggacagattag

SEQ ID NO: 50033 - DNA, 25 bp, Probe sequence
gacacctggacagattagatattat

SEQ ID NO: 50034 - DNA, 25 bp, Probe sequence
agagagactagctgatatggaagtt

SEQ ID NO: 50035 - DNA, 25 bp, Probe sequence
agataagttcactctattcggttga

SEQ ID NO: 50036 - DNA, 25 bp, Probe sequence
aagataagttcactctattcggttg

SEQ ID NO: 50037 - DNA, 25 bp, Probe sequence
gataagttcactctattcggttgat

SEQ ID NO: 50038 - DNA, 25 bp, Probe sequence
cggacaacataatcttccaatagga

SEQ ID NO: 50039 - DNA, 25 bp, Probe sequence
aagttcactctattcggttgataat

SEQ ID NO: 50040 - DNA, 25 bp, Probe sequence
ggacaacataatcttccaataggag

SEQ ID NO: 50041 - DNA, 25 bp, Probe sequence
caacataatcttccaataggagtgt

SEQ ID NO: 50042 - DNA, 25 bp, Probe sequence
acaacataatcttccaataggagtg

SEQ ID NO: 50043 - DNA, 25 bp, Probe sequence
actatttccttacctgtgattcctt

SEQ ID NO: 50044 - DNA, 25 bp, Probe sequence
tgataataaccgattgaccgaagaa

SEQ ID NO: 50045 - DNA, 25 bp, Probe sequence
atgataataaccgattgaccgaaga

SEQ ID NO: 50046 - DNA, 25 bp, Probe sequence
catgataataaccgattgaccgaag

SEQ ID NO: 50047 - DNA, 25 bp, Probe sequence
tacatgataataaccgattgaccga

SEQ ID NO: 50048 - DNA, 25 bp, Probe sequence
acatgataataaccgattgaccgaa

SEQ ID NO: 50049 - DNA, 25 bp, Probe sequence
ttacatgataataaccgattgaccg

SEQ ID NO: 50050 - DNA, 25 bp, Probe sequence
aagaagtaactgttcaagagctaga

SEQ ID NO: 50051 - DNA, 25 bp, Probe sequence
taccaattaacttgtggatagacgg

SEQ ID NO: 50052 - DNA, 25 bp, Probe sequence
agaagtaactgttcaagagctagat

SEQ ID NO: 50053 - DNA, 25 bp, Probe sequence
taataacagagactatcgtggagga

SEQ ID NO: 50054 - DNA, 25 bp, Probe sequence
ctaataacagagactatcgtggagg

SEQ ID NO: 50055 - DNA, 25 bp, Probe sequence
gatgattattcggatgagtggatga

SEQ ID NO: 50056 - DNA, 25 bp, Probe sequence
agatgattattcggatgagtggatg

SEQ ID NO: 50057 - DNA, 25 bp, Probe sequence
cagatgattattcggatgagtggat

SEQ ID NO: 50058 - DNA, 25 bp, Probe sequence
atgattattcggatgagtggatgac

SEQ ID NO: 50059 - DNA, 25 bp, Probe sequence
gaccacacactaataacagagacta

SEQ ID NO: 50060 - DNA, 25 bp, Probe sequence
tagaccacacactaataacagagac

SEQ ID NO: 50061 - DNA, 25 bp, Probe sequence
aataacagagactatcgtggaggaa

SEQ ID NO: 50062 - DNA, 25 bp, Probe sequence
gagttaggctataatgttgaatggc

SEQ ID NO: 50063 - DNA, 25 bp, Probe sequence
aagaacggcatccatagtaataagg

SEQ ID NO: 50064 - DNA, 25 bp, Probe sequence
acagaaggtatgccaattaagatga

SEQ ID NO: 50065 - DNA, 25 bp, Probe sequence
gacagaaggtatgccaattaagatg

SEQ ID NO: 50066 - DNA, 25 bp, Probe sequence
agaaggtatgccaattaagatgaga

SEQ ID NO: 50067 - DNA, 25 bp, Probe sequence
cagaaggtatgccaattaagatgag

SEQ ID NO: 50068 - DNA, 25 bp, Probe sequence
ggacagaaggtatgccaattaagat

SEQ ID NO: 50069 - DNA, 25 bp, Probe sequence
agttaggctataatgttgaatggcg

SEQ ID NO: 50070 - DNA, 25 bp, Probe sequence
aagaacaatgcttacaagtgaatca

SEQ ID NO: 50071 - DNA, 25 bp, Probe sequence
taactgcttactatggtcaacaaga

SEQ ID NO: 50072 - DNA, 25 bp, Probe sequence
aactgcttactatggtcaacaagaa

SEQ ID NO: 50073 - DNA, 25 bp, Probe sequence
aatacgctgttggaagtgtagaatt

SEQ ID NO: 50074 - DNA, 25 bp, Probe sequence
gaatacgctgttggaagtgtagaat

SEQ ID NO: 50075 - DNA, 25 bp, Probe sequence
actgcttactatggtcaacaagaag

SEQ ID NO: 50076 - DNA, 25 bp, Probe sequence
ttaactgcttactatggtcaacaag

SEQ ID NO: 50077 - DNA, 25 bp, Probe sequence
tgcttactatggtcaacaagaagtt

SEQ ID NO: 50078 - DNA, 25 bp, Probe sequence
ttattacctagaggcacagaatacg

SEQ ID NO: 50079 - DNA, 25 bp, Probe sequence
atacgctgttggaagtgtagaattg

SEQ ID NO: 50080 - DNA, 25 bp, Probe sequence
agtgatgaagtgcctgatattatga

SEQ ID NO: 50081 - DNA, 25 bp, Probe sequence
aaccaagcagagtctcaagtattaa

SEQ ID NO: 50082 - DNA, 25 bp, Probe sequence
caaccaagcagagtctcaagtatta

SEQ ID NO: 50083 - DNA, 25 bp, Probe sequence
gtgatgaagtgcctgatattatgaa

SEQ ID NO: 50084 - DNA, 25 bp, Probe sequence
aagtgcctgatattatgaatgttga

SEQ ID NO: 50085 - DNA, 25 bp, Probe sequence
tgaagtgcctgatattatgaatgtt

SEQ ID NO: 50086 - DNA, 25 bp, Probe sequence
gaagtgcctgatattatgaatgttg

SEQ ID NO: 50087 - DNA, 25 bp, Probe sequence
agtgcctgatattatgaatgttgat

SEQ ID NO: 50088 - DNA, 25 bp, Probe sequence
atgaagtgcctgatattatgaatgt

SEQ ID NO: 50089 - DNA, 25 bp, Probe sequence
attactcaataggcttctctcacaa

SEQ ID NO: 50090 - DNA, 25 bp, Probe sequence
ctggtggtaattcggatagtgttaa

SEQ ID NO: 50091 - DNA, 25 bp, Probe sequence
ccttatatggtggaagtagttggtg

SEQ ID NO: 50092 - DNA, 25 bp, Probe sequence
ctaatgctggtggtaattcggatag

SEQ ID NO: 50093 - DNA, 25 bp, Probe sequence
cttatatggtggaagtagttggtgc

SEQ ID NO: 50094 - DNA, 25 bp, Probe sequence
tctaatgctggtggtaattcggata

SEQ ID NO: 50095 - DNA, 25 bp, Probe sequence
tattactcaataggcttctctcaca

SEQ ID NO: 50096 - DNA, 25 bp, Probe sequence
taatgctggtggtaattcggatagt

SEQ ID NO: 50097 - DNA, 25 bp, Probe sequence
ttattactcaataggcttctctcac

SEQ ID NO: 50098 - DNA, 25 bp, Probe sequence
acagttattcataggattgcgagat

SEQ ID NO: 50099 - DNA, 25 bp, Probe sequence
tacagttattcataggattgcgaga

SEQ ID NO: 50100 - DNA, 25 bp, Probe sequence
gtgcgtaatcaatatgcttcttctg

SEQ ID NO: 50101 - DNA, 25 bp, Probe sequence
agtgcgtaatcaatatgcttcttct

SEQ ID NO: 50102 - DNA, 25 bp, Probe sequence
cagtgcgtaatcaatatgcttcttc

SEQ ID NO: 50103 - DNA, 25 bp, Probe sequence
ctacagttattcataggattgcgag

SEQ ID NO: 50104 - DNA, 25 bp, Probe sequence
actacagttattcataggattgcga

SEQ ID NO: 50105 - DNA, 25 bp, Probe sequence
ttgagaatgatgttattgaatcgca

SEQ ID NO: 50106 - DNA, 25 bp, Probe sequence
gttgagaatgatgttattgaatcgc

SEQ ID NO: 50107 - DNA, 25 bp, Probe sequence
atatagttcagtagtcacagcagga

SEQ ID NO: 50108 - DNA, 25 bp, Probe sequence
tatagttcagtagtcacagcaggag

SEQ ID NO: 50109 - DNA, 25 bp, Probe sequence
cgtatatagttcagtagtcacagca

SEQ ID NO: 50110 - DNA, 25 bp, Probe sequence
gaagtacaaggagcaacagttaatg

SEQ ID NO: 50111 - DNA, 25 bp, Probe sequence
agaagtacaaggagcaacagttaat

SEQ ID NO: 50112 - DNA, 25 bp, Probe sequence
attagaagtacaaggagcaacagtt

SEQ ID NO: 50113 - DNA, 25 bp, Probe sequence
aagcaaggattagaagtacaaggag

SEQ ID NO: 50114 - DNA, 25 bp, Probe sequence
gaagcaaggattagaagtacaagga

SEQ ID NO: 50115 - DNA, 25 bp, Probe sequence
tagaagtacaaggagcaacagttaa

SEQ ID NO: 50116 - DNA, 25 bp, Probe sequence
aatgttagtatagaggctcaagcac

SEQ ID NO: 50117 - DNA, 25 bp, Probe sequence
ttgttattggctatgtaggaagaat

SEQ ID NO: 50118 - DNA, 25 bp, Probe sequence
attggctatgtaggaagaattgtaa

SEQ ID NO: 50119 - DNA, 25 bp, Probe sequence
ttattggctatgtaggaagaattgt

SEQ ID NO: 50120 - DNA, 25 bp, Probe sequence
tgttattggctatgtaggaagaatt

SEQ ID NO: 50121 - DNA, 25 bp, Probe sequence
atgttagtatagaggctcaagcact

SEQ ID NO: 50122 - DNA, 25 bp, Probe sequence
tgttagtatagaggctcaagcactt

SEQ ID NO: 50123 - DNA, 25 bp, Probe sequence
gttattggctatgtaggaagaattg

SEQ ID NO: 50124 - DNA, 25 bp, Probe sequence
aagcaggattaataggaacaatagc

SEQ ID NO: 50125 - DNA, 25 bp, Probe sequence
ttaatacagtaacggatgctcaagt

SEQ ID NO: 50126 - DNA, 25 bp, Probe sequence
acagtaacggatgctcaagtatatg

SEQ ID NO: 50127 - DNA, 25 bp, Probe sequence
taatacagtaacggatgctcaagta

SEQ ID NO: 50128 - DNA, 25 bp, Probe sequence
tacagtaacggatgctcaagtatat

SEQ ID NO: 50129 - DNA, 25 bp, Probe sequence
cagtaacggatgctcaagtatatgc

SEQ ID NO: 50130 - DNA, 25 bp, Probe sequence
gcactatatcaccactatatgttca

SEQ ID NO: 50131 - DNA, 25 bp, Probe sequence
gacacacctccgattaatacagtaa

SEQ ID NO: 50132 - DNA, 25 bp, Probe sequence
atagacacacctccgattaatacag

SEQ ID NO: 50133 - DNA, 25 bp, Probe sequence
gatagacacacctccgattaataca

SEQ ID NO: 50134 - DNA, 25 bp, Probe sequence
atgttggacaagagattcgtataac

SEQ ID NO: 50135 - DNA, 25 bp, Probe sequence
agcaatgagattccttattatacga

SEQ ID NO: 50136 - DNA, 25 bp, Probe sequence
gcattaagtcagattacagcttctt

SEQ ID NO: 50137 - DNA, 25 bp, Probe sequence
tccaaacagataccaactcaagatt

SEQ ID NO: 50138 - DNA, 25 bp, Probe sequence
ttccaaacagataccaactcaagat

SEQ ID NO: 50139 - DNA, 25 bp, Probe sequence
tttccaaacagataccaactcaaga

SEQ ID NO: 50140 - DNA, 25 bp, Probe sequence
atttccaaacagataccaactcaag

SEQ ID NO: 50141 - DNA, 25 bp, Probe sequence
gtgcattaagtcagattacagcttc

SEQ ID NO: 50142 - DNA, 25 bp, Probe sequence
tgcattaagtcagattacagcttct

SEQ ID NO: 50143 - DNA, 25 bp, Probe sequence
gttaagaagccaagatatgcgtatg

SEQ ID NO: 50144 - DNA, 25 bp, Probe sequence
tgttaagaagccaagatatgcgtat

SEQ ID NO: 50145 - DNA, 25 bp, Probe sequence
atgttaagaagccaagatatgcgta

SEQ ID NO: 50146 - DNA, 25 bp, Probe sequence
gtatgcgagtgtaagtgaattgatg

SEQ ID NO: 50147 - DNA, 25 bp, Probe sequence
agtatgcgagtgtaagtgaattgat

SEQ ID NO: 50148 - DNA, 25 bp, Probe sequence
gactataccagaagcatcaagactt

SEQ ID NO: 50149 - DNA, 25 bp, Probe sequence
tatgcgagtgtaagtgaattgatgt

SEQ ID NO: 50150 - DNA, 25 bp, Probe sequence
gagtatgcgagtgtaagtgaattga

SEQ ID NO: 50151 - DNA, 25 bp, Probe sequence
aatgttaagaagccaagatatgcgt

SEQ ID NO: 50152 - DNA, 25 bp, Probe sequence
gttggagtattgattgtaatggtgt

SEQ ID NO: 50153 - DNA, 25 bp, Probe sequence
tgttggagtattgattgtaatggtg

SEQ ID NO: 50154 - DNA, 25 bp, Probe sequence
aatagcagaagcgtattacaatggt

SEQ ID NO: 50155 - DNA, 25 bp, Probe sequence
atagcagaagcgtattacaatggtg

SEQ ID NO: 50156 - DNA, 25 bp, Probe sequence
ttggagtattgattgtaatggtgtt

SEQ ID NO: 50157 - DNA, 25 bp, Probe sequence
ttgttggagtattgattgtaatggt

SEQ ID NO: 50158 - DNA, 25 bp, Probe sequence
aggttatgtaactaggtggattgac

SEQ ID NO: 50159 - DNA, 25 bp, Probe sequence
ttatgtaactaggtggattgacggt

SEQ ID NO: 50160 - DNA, 25 bp, Probe sequence
tgattgtaatggtgttattagtgct

SEQ ID NO: 50161 - DNA, 25 bp, Probe sequence
ataaggtctgtaattgtcacgaatg

SEQ ID NO: 50162 - DNA, 25 bp, Probe sequence
taaggtctgtaattgtcacgaatga

SEQ ID NO: 50163 - DNA, 25 bp, Probe sequence
aggtctgtaattgtcacgaatgata

SEQ ID NO: 50164 - DNA, 25 bp, Probe sequence
aaggtctgtaattgtcacgaatgat

SEQ ID NO: 50165 - DNA, 25 bp, Probe sequence
aataaggtctgtaattgtcacgaat

SEQ ID NO: 50166 - DNA, 25 bp, Probe sequence
ggtctgtaattgtcacgaatgataa

SEQ ID NO: 50167 - DNA, 25 bp, Probe sequence
attggtatgtgctcggtaatattga

SEQ ID NO: 50168 - DNA, 25 bp, Probe sequence
tagattaggaacacctgaggatgta

SEQ ID NO: 50169 - DNA, 25 bp, Probe sequence
tagttagattaggaacacctgagga

SEQ ID NO: 50170 - DNA, 25 bp, Probe sequence
tgtaattattggtggtaatcctgcc

SEQ ID NO: 50171 - DNA, 25 bp, Probe sequence
atgtaattattggtggtaatcctgc

SEQ ID NO: 50172 - DNA, 25 bp, Probe sequence
gaaataatgttgtagtaggtgctgg

SEQ ID NO: 50173 - DNA, 25 bp, Probe sequence
ggaaataatgttgtagtaggtgctg

SEQ ID NO: 50174 - DNA, 25 bp, Probe sequence
aggaaataatgttgtagtaggtgct

SEQ ID NO: 50175 - DNA, 25 bp, Probe sequence
tgccaggagtaacaataggaaataa

SEQ ID NO: 50176 - DNA, 25 bp, Probe sequence
aaataatgttgtagtaggtgctggg

SEQ ID NO: 50177 - DNA, 25 bp, Probe sequence
ttgccaggagtaacaataggaaata

SEQ ID NO: 50178 - DNA, 25 bp, Probe sequence
tttgccaggagtaacaataggaaat

SEQ ID NO: 50179 - DNA, 25 bp, Probe sequence
tgtcggtaggttcattcatactaag

SEQ ID NO: 50180 - DNA, 25 bp, Probe sequence
gtcggtaggttcattcatactaaga

SEQ ID NO: 50181 - DNA, 25 bp, Probe sequence
atgtcggtaggttcattcatactaa

SEQ ID NO: 50182 - DNA, 25 bp, Probe sequence
tcggtaggttcattcatactaagaa

SEQ ID NO: 50183 - DNA, 25 bp, Probe sequence
ttatgtcggtaggttcattcatact

SEQ ID NO: 50184 - DNA, 25 bp, Probe sequence
tatgtcggtaggttcattcatacta

SEQ ID NO: 50185 - DNA, 25 bp, Probe sequence
tatatttagcagaatgaatcgtggc

SEQ ID NO: 50186 - DNA, 25 bp, Probe sequence
cggtgcagaattaagaactatggat

SEQ ID NO: 50187 - DNA, 25 bp, Probe sequence
ggtgcagaattaagaactatggata

SEQ ID NO: 50188 - DNA, 25 bp, Probe sequence
gaacaacagtccagttagattgatg

SEQ ID NO: 50189 - DNA, 25 bp, Probe sequence
agatgaacaaccagaagtagtagtt

SEQ ID NO: 50190 - DNA, 25 bp, Probe sequence
tagatgaacaaccagaagtagtagt

SEQ ID NO: 50191 - DNA, 25 bp, Probe sequence
gtagatgaacaaccagaagtagtag

SEQ ID NO: 50192 - DNA, 25 bp, Probe sequence
atacagtattgagaatccaaggacg

SEQ ID NO: 50193 - DNA, 25 bp, Probe sequence
gcaggtgttagatacagtattgaga

SEQ ID NO: 50194 - DNA, 25 bp, Probe sequence
agcaggtgttagatacagtattgag

SEQ ID NO: 50195 - DNA, 25 bp, Probe sequence
ctcaagcaggtgttagatacagtat

SEQ ID NO: 50196 - DNA, 25 bp, Probe sequence
gatacagtattgagaatccaaggac

SEQ ID NO: 50197 - DNA, 25 bp, Probe sequence
gatgtgtggattggtcagaatgtta

SEQ ID NO: 50198 - DNA, 25 bp, Probe sequence
atgtgtggattggtcagaatgttac

SEQ ID NO: 50199 - DNA, 25 bp, Probe sequence
tggattggtcagaatgttactgtta

SEQ ID NO: 50200 - DNA, 25 bp, Probe sequence
agaatgttactgttatgccaggaat

SEQ ID NO: 50201 - DNA, 25 bp, Probe sequence
gaatgttactgttatgccaggaatt

SEQ ID NO: 50202 - DNA, 25 bp, Probe sequence
attggtcagaatgttactgttatgc

SEQ ID NO: 50203 - DNA, 25 bp, Probe sequence
tgtgtggattggtcagaatgttact

SEQ ID NO: 50204 - DNA, 25 bp, Probe sequence
aatgatgtgtggattggtcagaatg

SEQ ID NO: 50205 - DNA, 25 bp, Probe sequence
cagaatgttactgttatgccaggaa

SEQ ID NO: 50206 - DNA, 25 bp, Probe sequence
tatccaatatatgttgaacacggtg

SEQ ID NO: 50207 - DNA, 25 bp, Probe sequence
gaacacggtgcaatcaagtatatag

SEQ ID NO: 50208 - DNA, 25 bp, Probe sequence
acaaacaacatacccttcaaacaat

SEQ ID NO: 50209 - DNA, 25 bp, Probe sequence
tacaaacaacatacccttcaaacaa

SEQ ID NO: 50210 - DNA, 25 bp, Probe sequence
ttacaaacaacatacccttcaaaca

SEQ ID NO: 50211 - DNA, 25 bp, Probe sequence
aacacggtgcaatcaagtatatagg

SEQ ID NO: 50212 - DNA, 25 bp, Probe sequence
atccaatatatgttgaacacggtgc

SEQ ID NO: 50213 - DNA, 25 bp, Probe sequence
ttatccaatatatgttgaacacggt

SEQ ID NO: 50214 - DNA, 25 bp, Probe sequence
tgaacacggtgcaatcaagtatata

SEQ ID NO: 50215 - DNA, 25 bp, Probe sequence
aagcgaagaagtaatggaacagtat

SEQ ID NO: 50216 - DNA, 25 bp, Probe sequence
agcgaagaagtaatggaacagtatc

SEQ ID NO: 50217 - DNA, 25 bp, Probe sequence
tgtggttatgacttgagtagaggta

SEQ ID NO: 50218 - DNA, 25 bp, Probe sequence
gcgaagaagtaatggaacagtatca

SEQ ID NO: 50219 - DNA, 25 bp, Probe sequence
gtggttatgacttgagtagaggtat

SEQ ID NO: 50220 - DNA, 25 bp, Probe sequence
gttgtggttatgacttgagtagagg

SEQ ID NO: 50221 - DNA, 25 bp, Probe sequence
cgaagaagtaatggaacagtatcaa

SEQ ID NO: 50222 - DNA, 25 bp, Probe sequence
gtagttccgattacagaagatggtc

SEQ ID NO: 50223 - DNA, 25 bp, Probe sequence
ggcgtattctattatcagagttgct

SEQ ID NO: 50224 - DNA, 25 bp, Probe sequence
ttatggtgtcgttccaataactgat

SEQ ID NO: 50225 - DNA, 25 bp, Probe sequence
attatggtgtcgttccaataactga

SEQ ID NO: 50226 - DNA, 25 bp, Probe sequence
cattatggtgtcgttccaataactg

SEQ ID NO: 50227 - DNA, 25 bp, Probe sequence
tatggtgtcgttccaataactgatg

SEQ ID NO: 50228 - DNA, 25 bp, Probe sequence
agcctataaatgttccgtataagca

SEQ ID NO: 50229 - DNA, 25 bp, Probe sequence
ttagcaaagaaacacaagaaactgg

SEQ ID NO: 50230 - DNA, 25 bp, Probe sequence
atcaaactccagaagatacaaagca

SEQ ID NO: 50231 - DNA, 25 bp, Probe sequence
aatcaaactccagaagatacaaagc

SEQ ID NO: 50232 - DNA, 25 bp, Probe sequence
aacatattgatggcttgataacgtc

SEQ ID NO: 50233 - DNA, 25 bp, Probe sequence
tcttaaatcttcagaaggcttttca

SEQ ID NO: 50234 - DNA, 25 bp, Probe sequence
aatcttcagaaggcttttcaaaatt

SEQ ID NO: 50235 - DNA, 25 bp, Probe sequence
aaatcttcagaaggcttttcaaaat

SEQ ID NO: 50236 - DNA, 25 bp, Probe sequence
cttaaatcttcagaaggcttttcaa

SEQ ID NO: 50237 - DNA, 25 bp, Probe sequence
taaatcttcagaaggcttttcaaaa

SEQ ID NO: 50238 - DNA, 25 bp, Probe sequence
ttaaatcttcagaaggcttttcaaa

SEQ ID NO: 50239 - DNA, 25 bp, Probe sequence
ggcttttcaaaatttataccatcct

SEQ ID NO: 50240 - DNA, 25 bp, Probe sequence
aggcttttcaaaatttataccatcc

SEQ ID NO: 50241 - DNA, 25 bp, Probe sequence
atcttcagaaggcttttcaaaattt

SEQ ID NO: 50242 - DNA, 25 bp, Probe sequence
tggttacaaatcattagaagagggt

SEQ ID NO: 50243 - DNA, 25 bp, Probe sequence
ggttacaaatcattagaagagggtc

SEQ ID NO: 50244 - DNA, 25 bp, Probe sequence
acaaatcattagaagagggtcaagc

SEQ ID NO: 50245 - DNA, 25 bp, Probe sequence
gttacaaatcattagaagagggtca

SEQ ID NO: 50246 - DNA, 25 bp, Probe sequence
tacaaatcattagaagagggtcaag

SEQ ID NO: 50247 - DNA, 25 bp, Probe sequence
atggttacaaatcattagaagaggg

SEQ ID NO: 50248 - DNA, 25 bp, Probe sequence
ttacaaatcattagaagagggtcaa

SEQ ID NO: 50249 - DNA, 25 bp, Probe sequence
aaatcattagaagagggtcaagctg

SEQ ID NO: 50250 - DNA, 25 bp, Probe sequence
caaatcattagaagagggtcaagct

SEQ ID NO: 50251 - DNA, 25 bp, Probe sequence
ccatacagaggattcggatatagat

SEQ ID NO: 50252 - DNA, 25 bp, Probe sequence
cggcatctattacaattcagaatca

SEQ ID NO: 50253 - DNA, 25 bp, Probe sequence
tcggcatctattacaattcagaatc

SEQ ID NO: 50254 - DNA, 25 bp, Probe sequence
atcggcatctattacaattcagaat

SEQ ID NO: 50255 - DNA, 25 bp, Probe sequence
aagatacagagcacggaattgttac

SEQ ID NO: 50256 - DNA, 25 bp, Probe sequence
tatcggcatctattacaattcagaa

SEQ ID NO: 50257 - DNA, 25 bp, Probe sequence
agatacagagcacggaattgttact

SEQ ID NO: 50258 - DNA, 25 bp, Probe sequence
atatcggcatctattacaattcaga

SEQ ID NO: 50259 - DNA, 25 bp, Probe sequence
gatacagagcacggaattgttactg

SEQ ID NO: 50260 - DNA, 25 bp, Probe sequence
ctaccaagacgaagaggatgaagag

SEQ ID NO: 50261 - DNA, 25 bp, Probe sequence
tcgatactatgttatacgccaactt

SEQ ID NO: 50262 - DNA, 25 bp, Probe sequence
aagacgaagaggatgaagaggatga

SEQ ID NO: 50263 - DNA, 25 bp, Probe sequence
caagacgaagaggatgaagaggatg

SEQ ID NO: 50264 - DNA, 25 bp, Probe sequence
gtcgatactatgttatacgccaact

SEQ ID NO: 50265 - DNA, 25 bp, Probe sequence
atatcgccgtatgtaaggatttcag

SEQ ID NO: 50266 - DNA, 25 bp, Probe sequence
atagaagatatcgccgtatgtaagg

SEQ ID NO: 50267 - DNA, 25 bp, Probe sequence
aacgagaattggacctttacagaat

SEQ ID NO: 50268 - DNA, 25 bp, Probe sequence
tagaagatatcgccgtatgtaagga

SEQ ID NO: 50269 - DNA, 25 bp, Probe sequence
cagcagaggtatcttgagaagtctt

SEQ ID NO: 50270 - DNA, 25 bp, Probe sequence
aattgtcattctggtatcaactgcc

SEQ ID NO: 50271 - DNA, 25 bp, Probe sequence
cagaggtatcttgagaagtcttcat

SEQ ID NO: 50272 - DNA, 25 bp, Probe sequence
ggtatcttgagaagtcttcattgct

SEQ ID NO: 50273 - DNA, 25 bp, Probe sequence
aggtatcttgagaagtcttcattgc

SEQ ID NO: 50274 - DNA, 25 bp, Probe sequence
gtatcttgagaagtcttcattgctt

SEQ ID NO: 50275 - DNA, 25 bp, Probe sequence
gaggtatcttgagaagtcttcattg

SEQ ID NO: 50276 - DNA, 25 bp, Probe sequence
agaggtatcttgagaagtcttcatt

SEQ ID NO: 50277 - DNA, 25 bp, Probe sequence
agcagaggtatcttgagaagtcttc

SEQ ID NO: 50278 - DNA, 25 bp, Probe sequence
caacactaggaacacttatttcgtt

SEQ ID NO: 50279 - DNA, 25 bp, Probe sequence
ccaacactaggaacacttatttcgt

SEQ ID NO: 50280 - DNA, 25 bp, Probe sequence
aataaccgaaataatagggacaagt

SEQ ID NO: 50281 - DNA, 25 bp, Probe sequence
cacttatttcgttcggaatatgttt

SEQ ID NO: 50282 - DNA, 25 bp, Probe sequence
acacttatttcgttcggaatatgtt

SEQ ID NO: 50283 - DNA, 25 bp, Probe sequence
aacacttatttcgttcggaatatgt

SEQ ID NO: 50284 - DNA, 25 bp, Probe sequence
taaccgaaataatagggacaagttt

SEQ ID NO: 50285 - DNA, 25 bp, Probe sequence
ataaccgaaataatagggacaagtt

SEQ ID NO: 50286 - DNA, 25 bp, Probe sequence
aacatgggcaggattaggtttagta

SEQ ID NO: 50287 - DNA, 25 bp, Probe sequence
ggactaatagagattgacgaaggaa

SEQ ID NO: 50288 - DNA, 25 bp, Probe sequence
aggactaatagagattgacgaagga

SEQ ID NO: 50289 - DNA, 25 bp, Probe sequence
tattgtaggtaagaatggagttggc

SEQ ID NO: 50290 - DNA, 25 bp, Probe sequence
aaggactaatagagattgacgaagg

SEQ ID NO: 50291 - DNA, 25 bp, Probe sequence
taagtggaatgacaatatgagtggt

SEQ ID NO: 50292 - DNA, 25 bp, Probe sequence
ctgttgaggcattagaagaattgtt

SEQ ID NO: 50293 - DNA, 25 bp, Probe sequence
gaatgacaatatgagtggtggtgaa

SEQ ID NO: 50294 - DNA, 25 bp, Probe sequence
aagtggaatgacaatatgagtggtg

SEQ ID NO: 50295 - DNA, 25 bp, Probe sequence
gtattgtaggtaagaatggagttgg

SEQ ID NO: 50296 - DNA, 25 bp, Probe sequence
aatatagtggaacaacggcgacaat

SEQ ID NO: 50297 - DNA, 25 bp, Probe sequence
atatagtggaacaacggcgacaatg

SEQ ID NO: 50298 - DNA, 25 bp, Probe sequence
ccgaactaccctaatattgatgcta

SEQ ID NO: 50299 - DNA, 25 bp, Probe sequence
atccgaactaccctaatattgatgc

SEQ ID NO: 50300 - DNA, 25 bp, Probe sequence
tccgaactaccctaatattgatgct

SEQ ID NO: 50301 - DNA, 25 bp, Probe sequence
aatccgaactaccctaatattgatg

SEQ ID NO: 50302 - DNA, 25 bp, Probe sequence
aaatatagtggaacaacggcgacaa

SEQ ID NO: 50303 - DNA, 25 bp, Probe sequence
aataccatagaaggaacagttaatt

SEQ ID NO: 50304 - DNA, 25 bp, Probe sequence
aaatccgaactaccctaatattgat

SEQ ID NO: 50305 - DNA, 25 bp, Probe sequence
ttcacttaatctgtctcactgtctc

SEQ ID NO: 50306 - DNA, 25 bp, Probe sequence
cttcacttaatctgtctcactgtct

SEQ ID NO: 50307 - DNA, 25 bp, Probe sequence
cttaatctgtctcactgtctcactg

SEQ ID NO: 50308 - DNA, 25 bp, Probe sequence
ccatcaagacaccaagacacttata

SEQ ID NO: 50309 - DNA, 25 bp, Probe sequence
acttaatctgtctcactgtctcact

SEQ ID NO: 50310 - DNA, 25 bp, Probe sequence
cacttaatctgtctcactgtctcac

SEQ ID NO: 50311 - DNA, 25 bp, Probe sequence
tcacttaatctgtctcactgtctca

SEQ ID NO: 50312 - DNA, 25 bp, Probe sequence
atcaagacaccaagacacttatagc

SEQ ID NO: 50313 - DNA, 25 bp, Probe sequence
taatctgtctcactgtctcactgtt

SEQ ID NO: 50314 - DNA, 25 bp, Probe sequence
ccaattatggatgttgatatgctcg

SEQ ID NO: 50315 - DNA, 25 bp, Probe sequence
attatggatgttgatatgctcgaac

SEQ ID NO: 50316 - DNA, 25 bp, Probe sequence
acagtggtcaaaggagtataaacaa

SEQ ID NO: 50317 - DNA, 25 bp, Probe sequence
aacagtggtcaaaggagtataaaca

SEQ ID NO: 50318 - DNA, 25 bp, Probe sequence
aattatggatgttgatatgctcgaa

SEQ ID NO: 50319 - DNA, 25 bp, Probe sequence
gaacagtggtcaaaggagtataaac

SEQ ID NO: 50320 - DNA, 25 bp, Probe sequence
caattatggatgttgatatgctcga

SEQ ID NO: 50321 - DNA, 25 bp, Probe sequence
cgaacagtggtcaaaggagtataaa

SEQ ID NO: 50322 - DNA, 25 bp, Probe sequence
gtggtcaaaggagtataaacaatca

SEQ ID NO: 50323 - DNA, 25 bp, Probe sequence
aatcaaattggttaaagggactaca

SEQ ID NO: 50324 - DNA, 25 bp, Probe sequence
tcaaattggttaaagggactacaaa

SEQ ID NO: 50325 - DNA, 25 bp, Probe sequence
atcaaattggttaaagggactacaa

SEQ ID NO: 50326 - DNA, 25 bp, Probe sequence
tgacttaaattggctacttactcaa

SEQ ID NO: 50327 - DNA, 25 bp, Probe sequence
ttgacttaaattggctacttactca

SEQ ID NO: 50328 - DNA, 25 bp, Probe sequence
aaatcaaattggttaaagggactac

SEQ ID NO: 50329 - DNA, 25 bp, Probe sequence
tttgacttaaattggctacttactc

SEQ ID NO: 50330 - DNA, 25 bp, Probe sequence
ctttacaaactcggaagatgataaa

SEQ ID NO: 50331 - DNA, 25 bp, Probe sequence
gacttaaattggctacttactcaaa

SEQ ID NO: 50332 - DNA, 25 bp, Probe sequence
tatagaagatggcgaagtgtggtat

SEQ ID NO: 50333 - DNA, 25 bp, Probe sequence
atatagaagatggcgaagtgtggta

SEQ ID NO: 50334 - DNA, 25 bp, Probe sequence
atatatagaagatggcgaagtgtgg

SEQ ID NO: 50335 - DNA, 25 bp, Probe sequence
atagaagatggcgaagtgtggtatt

SEQ ID NO: 50336 - DNA, 25 bp, Probe sequence
cgaatatatagaagatggcgaagtg

SEQ ID NO: 50337 - DNA, 25 bp, Probe sequence
tatatagaagatggcgaagtgtggt

SEQ ID NO: 50338 - DNA, 25 bp, Probe sequence
aatatatagaagatggcgaagtgtg

SEQ ID NO: 50339 - DNA, 25 bp, Probe sequence
gaatatatagaagatggcgaagtgt

SEQ ID NO: 50340 - DNA, 25 bp, Probe sequence
tagaagatggcgaagtgtggtattc

SEQ ID NO: 50341 - DNA, 25 bp, Probe sequence
atccaaacctttaccatcaaccata

SEQ ID NO: 50342 - DNA, 25 bp, Probe sequence
tccaaacctttaccatcaaccatat

SEQ ID NO: 50343 - DNA, 25 bp, Probe sequence
tatccatctcaataacgtctgtctt

SEQ ID NO: 50344 - DNA, 25 bp, Probe sequence
atatccatctcaataacgtctgtct

SEQ ID NO: 50345 - DNA, 25 bp, Probe sequence
aatccaaacctttaccatcaaccat

SEQ ID NO: 50346 - DNA, 25 bp, Probe sequence
caaatccaaacctttaccatcaacc

SEQ ID NO: 50347 - DNA, 25 bp, Probe sequence
aaatccaaacctttaccatcaacca

SEQ ID NO: 50348 - DNA, 25 bp, Probe sequence
ggctcaacaaatatccatctcaata

SEQ ID NO: 50349 - DNA, 25 bp, Probe sequence
gggctcaacaaatatccatctcaat

SEQ ID NO: 50350 - DNA, 25 bp, Probe sequence
cattggcattactgtcagattcatt

SEQ ID NO: 50351 - DNA, 25 bp, Probe sequence
attcattggcattactgtcagattc

SEQ ID NO: 50352 - DNA, 25 bp, Probe sequence
ggcatcactaatcatcacattgtta

SEQ ID NO: 50353 - DNA, 25 bp, Probe sequence
tcattggcattactgtcagattcat

SEQ ID NO: 50354 - DNA, 25 bp, Probe sequence
ttcattggcattactgtcagattca

SEQ ID NO: 50355 - DNA, 25 bp, Probe sequence
aattcattggcattactgtcagatt

SEQ ID NO: 50356 - DNA, 25 bp, Probe sequence
gtggagtattacaacagagcattat

SEQ ID NO: 50357 - DNA, 25 bp, Probe sequence
ctaattcattggcattactgtcaga

SEQ ID NO: 50358 - DNA, 25 bp, Probe sequence
tctaattcattggcattactgtcag

SEQ ID NO: 50359 - DNA, 25 bp, Probe sequence
aaacgcaacaaacaaatgatttaca

SEQ ID NO: 50360 - DNA, 25 bp, Probe sequence
aacgcaacaaacaaatgatttacat

SEQ ID NO: 50361 - DNA, 25 bp, Probe sequence
aaggttataatcctacagatgaacg

SEQ ID NO: 50362 - DNA, 25 bp, Probe sequence
aggttataatcctacagatgaacgt

SEQ ID NO: 50363 - DNA, 25 bp, Probe sequence
aaataaacgcaacaaacaaatgatt

SEQ ID NO: 50364 - DNA, 25 bp, Probe sequence
aataaacgcaacaaacaaatgattt

SEQ ID NO: 50365 - DNA, 25 bp, Probe sequence
ggttataatcctacagatgaacgta

SEQ ID NO: 50366 - DNA, 25 bp, Probe sequence
taaacgcaacaaacaaatgatttac

SEQ ID NO: 50367 - DNA, 25 bp, Probe sequence
ataatcctacagatgaacgtatcaa

SEQ ID NO: 50368 - DNA, 25 bp, Probe sequence
aagtaaatgtatagaggtggaataa

SEQ ID NO: 50369 - DNA, 25 bp, Probe sequence
aaagtaaatgtatagaggtggaata

SEQ ID NO: 50370 - DNA, 25 bp, Probe sequence
aaaagtaaatgtatagaggtggaat

SEQ ID NO: 50371 - DNA, 25 bp, Probe sequence
tcaatgatgatgatttaccgttcta

SEQ ID NO: 50372 - DNA, 25 bp, Probe sequence
caatgatgatgatttaccgttctag

SEQ ID NO: 50373 - DNA, 25 bp, Probe sequence
atcaatgatgatgatttaccgttct

SEQ ID NO: 50374 - DNA, 25 bp, Probe sequence
aatgtcttagaagatgcagtcagtg

SEQ ID NO: 50375 - DNA, 25 bp, Probe sequence
atgtcttagaagatgcagtcagtgt

SEQ ID NO: 50376 - DNA, 25 bp, Probe sequence
tgtcttagaagatgcagtcagtgtt

SEQ ID NO: 50377 - DNA, 25 bp, Probe sequence
ttagaagatgcagtcagtgtttatg

SEQ ID NO: 50378 - DNA, 25 bp, Probe sequence
tcttagaagatgcagtcagtgttta

SEQ ID NO: 50379 - DNA, 25 bp, Probe sequence
aaatgtcttagaagatgcagtcagt

SEQ ID NO: 50380 - DNA, 25 bp, Probe sequence
cttagaagatgcagtcagtgtttat

SEQ ID NO: 50381 - DNA, 25 bp, Probe sequence
gatgcagtcagtgtttatgatgaat

SEQ ID NO: 50382 - DNA, 25 bp, Probe sequence
gaagatgcagtcagtgtttatgatg

SEQ ID NO: 50383 - DNA, 25 bp, Probe sequence
aatgaggagctattggaggttatga

SEQ ID NO: 50384 - DNA, 25 bp, Probe sequence
gaggagctattggaggttatgagat

SEQ ID NO: 50385 - DNA, 25 bp, Probe sequence
ggagctattggaggttatgagatga

SEQ ID NO: 50386 - DNA, 25 bp, Probe sequence
aggagctattggaggttatgagatg

SEQ ID NO: 50387 - DNA, 25 bp, Probe sequence
atgaggagctattggaggttatgag

SEQ ID NO: 50388 - DNA, 25 bp, Probe sequence
tgaggagctattggaggttatgaga

SEQ ID NO: 50389 - DNA, 25 bp, Probe sequence
aaatgaggagctattggaggttatg

SEQ ID NO: 50390 - DNA, 25 bp, Probe sequence
gatattgttcaagattcttattccg

SEQ ID NO: 50391 - DNA, 25 bp, Probe sequence
atattgttcaagattcttattccgg

SEQ ID NO: 50392 - DNA, 25 bp, Probe sequence
aggtatgatcggatataacggtact

SEQ ID NO: 50393 - DNA, 25 bp, Probe sequence
ggtatgatcggatataacggtactt

SEQ ID NO: 50394 - DNA, 25 bp, Probe sequence
aaggtatgatcggatataacggtac

SEQ ID NO: 50395 - DNA, 25 bp, Probe sequence
aaaggtatgatcggatataacggta

SEQ ID NO: 50396 - DNA, 25 bp, Probe sequence
taaaggtatgatcggatataacggt

SEQ ID NO: 50397 - DNA, 25 bp, Probe sequence
ttaaaggtatgatcggatataacgg

SEQ ID NO: 50398 - DNA, 25 bp, Probe sequence
aatagcaattaaaggtatgatcgga

SEQ ID NO: 50399 - DNA, 25 bp, Probe sequence
gtatgatcggatataacggtacttt

SEQ ID NO: 50400 - DNA, 25 bp, Probe sequence
agcaattaaaggtatgatcggatat

SEQ ID NO: 50401 - DNA, 25 bp, Probe sequence
gtagcgtatcatgcaggtatcaaat

SEQ ID NO: 50402 - DNA, 25 bp, Probe sequence
gatgctattggaggttatgagatga

SEQ ID NO: 50403 - DNA, 25 bp, Probe sequence
agatgctattggaggttatgagatg

SEQ ID NO: 50404 - DNA, 25 bp, Probe sequence
atgagatgctattggaggttatgag

SEQ ID NO: 50405 - DNA, 25 bp, Probe sequence
gagatgctattggaggttatgagat

SEQ ID NO: 50406 - DNA, 25 bp, Probe sequence
aatgagatgctattggaggttatga

SEQ ID NO: 50407 - DNA, 25 bp, Probe sequence
tgagatgctattggaggttatgaga

SEQ ID NO: 50408 - DNA, 25 bp, Probe sequence
ttgttcaagattgttattcgagaga

SEQ ID NO: 50409 - DNA, 25 bp, Probe sequence
aaatgagatgctattggaggttatg

SEQ ID NO: 50410 - DNA, 25 bp, Probe sequence
tgttcaagattgttattcgagagaa

SEQ ID NO: 50411 - DNA, 25 bp, Probe sequence
gtgatgatgccattaactaccatta

SEQ ID NO: 50412 - DNA, 25 bp, Probe sequence
agtgatgatgccattaactaccatt

SEQ ID NO: 50413 - DNA, 25 bp, Probe sequence
caagaatagtgatgatgccattaac

SEQ ID NO: 50414 - DNA, 25 bp, Probe sequence
tgatgatgccattaactaccattaa

SEQ ID NO: 50415 - DNA, 25 bp, Probe sequence
aagaatagtgatgatgccattaact

SEQ ID NO: 50416 - DNA, 25 bp, Probe sequence
tagtgatgatgccattaactaccat

SEQ ID NO: 50417 - DNA, 25 bp, Probe sequence
atagtgatgatgccattaactacca

SEQ ID NO: 50418 - DNA, 25 bp, Probe sequence
taatggtgcaagaatagtgatgatg

SEQ ID NO: 50419 - DNA, 25 bp, Probe sequence
aatagtgatgatgccattaactacc

SEQ ID NO: 50420 - DNA, 25 bp, Probe sequence
cttttagtcattcgtagtgcgtatg

SEQ ID NO: 50421 - DNA, 25 bp, Probe sequence
tttagtcattcgtagtgcgtatgcg

SEQ ID NO: 50422 - DNA, 25 bp, Probe sequence
acttttagtcattcgtagtgcgtat

SEQ ID NO: 50423 - DNA, 25 bp, Probe sequence
aacttttagtcattcgtagtgcgta

SEQ ID NO: 50424 - DNA, 25 bp, Probe sequence
ttttagtcattcgtagtgcgtatgc

SEQ ID NO: 50425 - DNA, 25 bp, Probe sequence
gaacttttagtcattcgtagtgcgt

SEQ ID NO: 50426 - DNA, 25 bp, Probe sequence
tgaacttttagtcattcgtagtgcg

SEQ ID NO: 50427 - DNA, 25 bp, Probe sequence
ttagtcattcgtagtgcgtatgcga

SEQ ID NO: 50428 - DNA, 25 bp, Probe sequence
atgaacttttagtcattcgtagtgc

SEQ ID NO: 50429 - DNA, 25 bp, Probe sequence
tgccttaaattctctatctatgcca

SEQ ID NO: 50430 - DNA, 25 bp, Probe sequence
gccttaaattctctatctatgccaa

SEQ ID NO: 50431 - DNA, 25 bp, Probe sequence
ttgccttaaattctctatctatgcc

SEQ ID NO: 50432 - DNA, 25 bp, Probe sequence
aattcccattagttgacgcatttga

SEQ ID NO: 50433 - DNA, 25 bp, Probe sequence
agttgacgcatttgactatatacct

SEQ ID NO: 50434 - DNA, 25 bp, Probe sequence
aaattcccattagttgacgcatttg

SEQ ID NO: 50435 - DNA, 25 bp, Probe sequence
gacgcatttgactatatacctaaca

SEQ ID NO: 50436 - DNA, 25 bp, Probe sequence
tgacgcatttgactatatacctaac

SEQ ID NO: 50437 - DNA, 25 bp, Probe sequence
gttgacgcatttgactatataccta

SEQ ID NO: 50438 - DNA, 25 bp, Probe sequence
tggtatcatttgtagttattttagc

SEQ ID NO: 50439 - DNA, 25 bp, Probe sequence
tctgttttacaacaaaatggtatca

SEQ ID NO: 50440 - DNA, 25 bp, Probe sequence
tcatttgtagttattttagcttcac

SEQ ID NO: 50441 - DNA, 25 bp, Probe sequence
catttgtagttattttagcttcaca

SEQ ID NO: 50442 - DNA, 25 bp, Probe sequence
gttttacaacaaaatggtatcaaaa

SEQ ID NO: 50443 - DNA, 25 bp, Probe sequence
ctgttttacaacaaaatggtatcaa

SEQ ID NO: 50444 - DNA, 25 bp, Probe sequence
ttctgttttacaacaaaatggtatc

SEQ ID NO: 50445 - DNA, 25 bp, Probe sequence
ggtatcatttgtagttattttagct

SEQ ID NO: 50446 - DNA, 25 bp, Probe sequence
tgttttacaacaaaatggtatcaaa

SEQ ID NO: 50447 - DNA, 25 bp, Probe sequence
tatttatcgggagaaagacacattt

SEQ ID NO: 50448 - DNA, 25 bp, Probe sequence
ttatttatcgggagaaagacacatt

SEQ ID NO: 50449 - DNA, 25 bp, Probe sequence
attatttatcgggagaaagacacat

SEQ ID NO: 50450 - DNA, 25 bp, Probe sequence
tattatttatcgggagaaagacaca

SEQ ID NO: 50451 - DNA, 25 bp, Probe sequence
ttattatttatcgggagaaagacac

SEQ ID NO: 50452 - DNA, 25 bp, Probe sequence
gttattatttatcgggagaaagaca

SEQ ID NO: 50453 - DNA, 25 bp, Probe sequence
tgttattatttatcgggagaaagac

SEQ ID NO: 50454 - DNA, 25 bp, Probe sequence
atttatcgggagaaagacacatttt

SEQ ID NO: 50455 - DNA, 25 bp, Probe sequence
ttgttattatttatcgggagaaaga

SEQ ID NO: 50456 - DNA, 25 bp, Probe sequence
attgttattatttatcgggagaaag

SEQ ID NO: 50457 - DNA, 25 bp, Probe sequence
gaataaagtgggtggcataatgttt

SEQ ID NO: 50458 - DNA, 25 bp, Probe sequence
tttgaataaagtgggtggcataatg

SEQ ID NO: 50459 - DNA, 25 bp, Probe sequence
aataaagtgggtggcataatgtttg

SEQ ID NO: 50460 - DNA, 25 bp, Probe sequence
atttgaataaagtgggtggcataat

SEQ ID NO: 50461 - DNA, 25 bp, Probe sequence
tgaataaagtgggtggcataatgtt

SEQ ID NO: 50462 - DNA, 25 bp, Probe sequence
ttgaataaagtgggtggcataatgt

SEQ ID NO: 50463 - DNA, 25 bp, Probe sequence
aatttgaataaagtgggtggcataa

SEQ ID NO: 50464 - DNA, 25 bp, Probe sequence
ttaatttgaataaagtgggtggcat

SEQ ID NO: 50465 - DNA, 25 bp, Probe sequence
tttaatttgaataaagtgggtggca

SEQ ID NO: 50466 - DNA, 25 bp, Probe sequence
gatgaatatagatggattagacgca

SEQ ID NO: 50467 - DNA, 25 bp, Probe sequence
tgatgaatatagatggattagacgc

SEQ ID NO: 50468 - DNA, 25 bp, Probe sequence
ttgatgaatatagatggattagacg

SEQ ID NO: 50469 - DNA, 25 bp, Probe sequence
gagtttagcgatagagcaaatgaag

SEQ ID NO: 50470 - DNA, 25 bp, Probe sequence
gtttagcgatagagcaaatgaagaa

SEQ ID NO: 50471 - DNA, 25 bp, Probe sequence
agtttagcgatagagcaaatgaaga

SEQ ID NO: 50472 - DNA, 25 bp, Probe sequence
ggagtttagcgatagagcaaatgaa

SEQ ID NO: 50473 - DNA, 25 bp, Probe sequence
aaggagtttagcgatagagcaaatg

SEQ ID NO: 50474 - DNA, 25 bp, Probe sequence
caaggagtttagcgatagagcaaat

SEQ ID NO: 50475 - DNA, 25 bp, Probe sequence
aggagtttagcgatagagcaaatga

SEQ ID NO: 50476 - DNA, 25 bp, Probe sequence
acaaggagtttagcgatagagcaaa

SEQ ID NO: 50477 - DNA, 25 bp, Probe sequence
aacaaggagtttagcgatagagcaa

SEQ ID NO: 50478 - DNA, 25 bp, Probe sequence
gtataatcaacacatcaagcaggaa

SEQ ID NO: 50479 - DNA, 25 bp, Probe sequence
agaagatgagttgtgtgattatcct

SEQ ID NO: 50480 - DNA, 25 bp, Probe sequence
cgtataatcaacacatcaagcagga

SEQ ID NO: 50481 - DNA, 25 bp, Probe sequence
aagttagaagatgagttgtgtgatt

SEQ ID NO: 50482 - DNA, 25 bp, Probe sequence
gaagatgagttgtgtgattatccta

SEQ ID NO: 50483 - DNA, 25 bp, Probe sequence
tagaagatgagttgtgtgattatcc

SEQ ID NO: 50484 - DNA, 25 bp, Probe sequence
agttagaagatgagttgtgtgatta

SEQ ID NO: 50485 - DNA, 25 bp, Probe sequence
aagatgagttgtgtgattatcctaa

SEQ ID NO: 50486 - DNA, 25 bp, Probe sequence
agatgagttgtgtgattatcctaat

SEQ ID NO: 50487 - DNA, 25 bp, Probe sequence
agagcgagagatagagatattaaga

SEQ ID NO: 50488 - DNA, 25 bp, Probe sequence
gcgagagatagagatattaagaagt

SEQ ID NO: 50489 - DNA, 25 bp, Probe sequence
agcgagagatagagatattaagaag

SEQ ID NO: 50490 - DNA, 25 bp, Probe sequence
gagcgagagatagagatattaagaa

SEQ ID NO: 50491 - DNA, 25 bp, Probe sequence
aagagcgagagatagagatattaag

SEQ ID NO: 50492 - DNA, 25 bp, Probe sequence
aaagttaaagagcgagagatagaga

SEQ ID NO: 50493 - DNA, 25 bp, Probe sequence
aagttaaagagcgagagatagagat

SEQ ID NO: 50494 - DNA, 25 bp, Probe sequence
agttaaagagcgagagatagagata

SEQ ID NO: 50495 - DNA, 25 bp, Probe sequence
tcttattgtttggtgtgatgttaca

SEQ ID NO: 50496 - DNA, 25 bp, Probe sequence
gcagaattggaatgttattagtctt

SEQ ID NO: 50497 - DNA, 25 bp, Probe sequence
tggctacattgagtgttgtactaat

SEQ ID NO: 50498 - DNA, 25 bp, Probe sequence
ttggctacattgagtgttgtactaa

SEQ ID NO: 50499 - DNA, 25 bp, Probe sequence
gttggctacattgagtgttgtacta

SEQ ID NO: 50500 - DNA, 25 bp, Probe sequence
tgcagaattggaatgttattagtct

SEQ ID NO: 50501 - DNA, 25 bp, Probe sequence
gagttacatcattacattagttcca

SEQ ID NO: 50502 - DNA, 25 bp, Probe sequence
ggctacattgagtgttgtactaata

SEQ ID NO: 50503 - DNA, 25 bp, Probe sequence
tatgttggctacattgagtgttgta

SEQ ID NO: 50504 - DNA, 25 bp, Probe sequence
aatatgttggctacattgagtgttg

SEQ ID NO: 50505 - DNA, 25 bp, Probe sequence
gagattgaggacgtgtataagagag

SEQ ID NO: 50506 - DNA, 25 bp, Probe sequence
agagattgaggacgtgtataagaga

SEQ ID NO: 50507 - DNA, 25 bp, Probe sequence
aagagattgaggacgtgtataagag

SEQ ID NO: 50508 - DNA, 25 bp, Probe sequence
tataacggtaatgacacagagggat

SEQ ID NO: 50509 - DNA, 25 bp, Probe sequence
taacggtaatgacacagagggatta

SEQ ID NO: 50510 - DNA, 25 bp, Probe sequence
ataacggtaatgacacagagggatt

SEQ ID NO: 50511 - DNA, 25 bp, Probe sequence
gtataacggtaatgacacagaggga

SEQ ID NO: 50512 - DNA, 25 bp, Probe sequence
agattgaggacgtgtataagagagc

SEQ ID NO: 50513 - DNA, 25 bp, Probe sequence
gattgaggacgtgtataagagagca

SEQ ID NO: 50514 - DNA, 25 bp, Probe sequence
ccaccattccaacaagattatcaag

SEQ ID NO: 50515 - DNA, 25 bp, Probe sequence
caccattccaacaagattatcaaga

SEQ ID NO: 50516 - DNA, 25 bp, Probe sequence
tcactggtagaacacaatacattca

SEQ ID NO: 50517 - DNA, 25 bp, Probe sequence
cactggtagaacacaatacattcaa

SEQ ID NO: 50518 - DNA, 25 bp, Probe sequence
actggtagaacacaatacattcaag

SEQ ID NO: 50519 - DNA, 25 bp, Probe sequence
atcactggtagaacacaatacattc

SEQ ID NO: 50520 - DNA, 25 bp, Probe sequence
ctggtagaacacaatacattcaaga

SEQ ID NO: 50521 - DNA, 25 bp, Probe sequence
aatcactggtagaacacaatacatt

SEQ ID NO: 50522 - DNA, 25 bp, Probe sequence
accattccaacaagattatcaagaa

SEQ ID NO: 50523 - DNA, 25 bp, Probe sequence
gatgaagagacatgacggtatcagt

SEQ ID NO: 50524 - DNA, 25 bp, Probe sequence
ctgtgatgaagagacatgacggtat

SEQ ID NO: 50525 - DNA, 25 bp, Probe sequence
tgtgatgaagagacatgacggtatc

SEQ ID NO: 50526 - DNA, 25 bp, Probe sequence
gggtttgaatttaaagtgtctgtga

SEQ ID NO: 50527 - DNA, 25 bp, Probe sequence
aacgggtttgaatttaaagtgtctg

SEQ ID NO: 50528 - DNA, 25 bp, Probe sequence
taacgggtttgaatttaaagtgtct

SEQ ID NO: 50529 - DNA, 25 bp, Probe sequence
cgggtttgaatttaaagtgtctgtg

SEQ ID NO: 50530 - DNA, 25 bp, Probe sequence
tctgtgatgaagagacatgacggta

SEQ ID NO: 50531 - DNA, 25 bp, Probe sequence
acgggtttgaatttaaagtgtctgt

SEQ ID NO: 50532 - DNA, 25 bp, Probe sequence
atgttaccctaatgagcccgttaaa

SEQ ID NO: 50533 - DNA, 25 bp, Probe sequence
catgttaccctaatgagcccgttaa

SEQ ID NO: 50534 - DNA, 25 bp, Probe sequence
tgttaccctaatgagcccgttaaaa

SEQ ID NO: 50535 - DNA, 25 bp, Probe sequence
acatgttaccctaatgagcccgtta

SEQ ID NO: 50536 - DNA, 25 bp, Probe sequence
gcaatgacacagagggattactaaa

SEQ ID NO: 50537 - DNA, 25 bp, Probe sequence
tgaataaccgtgaacaaatagaaca

SEQ ID NO: 50538 - DNA, 25 bp, Probe sequence
gaataaccgtgaacaaatagaacaa

SEQ ID NO: 50539 - DNA, 25 bp, Probe sequence
atgaataaccgtgaacaaatagaac

SEQ ID NO: 50540 - DNA, 25 bp, Probe sequence
ggcaatgacacagagggattactaa

SEQ ID NO: 50541 - DNA, 25 bp, Probe sequence
aataaccgtgaacaaatagaacaat

SEQ ID NO: 50542 - DNA, 25 bp, Probe sequence
gattgaggacgtatataagaaagcg

SEQ ID NO: 50543 - DNA, 25 bp, Probe sequence
aagagattgaggacgtatataagaa

SEQ ID NO: 50544 - DNA, 25 bp, Probe sequence
agattgaggacgtatataagaaagc

SEQ ID NO: 50545 - DNA, 25 bp, Probe sequence
gatgagtacaagaagcaacaagatg

SEQ ID NO: 50546 - DNA, 25 bp, Probe sequence
atgagtacaagaagcaacaagatga

SEQ ID NO: 50547 - DNA, 25 bp, Probe sequence
tgatgagtacaagaagcaacaagat

SEQ ID NO: 50548 - DNA, 25 bp, Probe sequence
cggtcaccttatcagatgaacaata

SEQ ID NO: 50549 - DNA, 25 bp, Probe sequence
tgagtacaagaagcaacaagatgag

SEQ ID NO: 50550 - DNA, 25 bp, Probe sequence
gtgatgagtacaagaagcaacaaga

SEQ ID NO: 50551 - DNA, 25 bp, Probe sequence
ggtcaccttatcagatgaacaatat

SEQ ID NO: 50552 - DNA, 25 bp, Probe sequence
gagtacaagaagcaacaagatgagc

SEQ ID NO: 50553 - DNA, 25 bp, Probe sequence
cgtggatataggtaagttaagagaa

SEQ ID NO: 50554 - DNA, 25 bp, Probe sequence
atctattcgccatcacattatgacg

SEQ ID NO: 50555 - DNA, 25 bp, Probe sequence
tatctattcgccatcacattatgac

SEQ ID NO: 50556 - DNA, 25 bp, Probe sequence
ttatctattcgccatcacattatga

SEQ ID NO: 50557 - DNA, 25 bp, Probe sequence
attatctattcgccatcacattatg

SEQ ID NO: 50558 - DNA, 25 bp, Probe sequence
tattcgccatcacattatgacgata

SEQ ID NO: 50559 - DNA, 25 bp, Probe sequence
attcgccatcacattatgacgatat

SEQ ID NO: 50560 - DNA, 25 bp, Probe sequence
ctattcgccatcacattatgacgat

SEQ ID NO: 50561 - DNA, 25 bp, Probe sequence
ttcgccatcacattatgacgatatg

SEQ ID NO: 50562 - DNA, 25 bp, Probe sequence
aattatctattcgccatcacattat

SEQ ID NO: 50563 - DNA, 25 bp, Probe sequence
ttgttcgccattatgttctgtctac

SEQ ID NO: 50564 - DNA, 25 bp, Probe sequence
gataatcacgaactaagaacagtct

SEQ ID NO: 50565 - DNA, 25 bp, Probe sequence
tgataatcacgaactaagaacagtc

SEQ ID NO: 50566 - DNA, 25 bp, Probe sequence
ttgataatcacgaactaagaacagt

SEQ ID NO: 50567 - DNA, 25 bp, Probe sequence
aagaagagtgtttacgggctataat

SEQ ID NO: 50568 - DNA, 25 bp, Probe sequence
aaagaagagtgtttacgggctataa

SEQ ID NO: 50569 - DNA, 25 bp, Probe sequence
aagaggtggaaatatgaaaggtgat

SEQ ID NO: 50570 - DNA, 25 bp, Probe sequence
aaagaggtggaaatatgaaaggtga

SEQ ID NO: 50571 - DNA, 25 bp, Probe sequence
tgttcgccattatgttctgtctaca

SEQ ID NO: 50572 - DNA, 25 bp, Probe sequence
gcatcatacgatattaagccaggta

SEQ ID NO: 50573 - DNA, 25 bp, Probe sequence
ctgaactaatggcaacaaggttatt

SEQ ID NO: 50574 - DNA, 25 bp, Probe sequence
actgaactaatggcaacaaggttat

SEQ ID NO: 50575 - DNA, 25 bp, Probe sequence
aactaatggcaacaaggttattgac

SEQ ID NO: 50576 - DNA, 25 bp, Probe sequence
gaactaatggcaacaaggttattga

SEQ ID NO: 50577 - DNA, 25 bp, Probe sequence
tgaactaatggcaacaaggttattg

SEQ ID NO: 50578 - DNA, 25 bp, Probe sequence
aactgaactaatggcaacaaggtta

SEQ ID NO: 50579 - DNA, 25 bp, Probe sequence
actaatggcaacaaggttattgact

SEQ ID NO: 50580 - DNA, 25 bp, Probe sequence
aatggcaacaaggttattgactaat

SEQ ID NO: 50581 - DNA, 25 bp, Probe sequence
aagaggtgtgccagatagaattatt

SEQ ID NO: 50582 - DNA, 25 bp, Probe sequence
caagaggtgtgccagatagaattat

SEQ ID NO: 50583 - DNA, 25 bp, Probe sequence
agaggtgtgccagatagaattatta

SEQ ID NO: 50584 - DNA, 25 bp, Probe sequence
gaggtgtgccagatagaattattat

SEQ ID NO: 50585 - DNA, 25 bp, Probe sequence
acaagaggtgtgccagatagaatta

SEQ ID NO: 50586 - DNA, 25 bp, Probe sequence
aggtgtgccagatagaattattatt

SEQ ID NO: 50587 - DNA, 25 bp, Probe sequence
aacaagaggtgtgccagatagaatt

SEQ ID NO: 50588 - DNA, 25 bp, Probe sequence
gaacaagaggtgtgccagatagaat

SEQ ID NO: 50589 - DNA, 25 bp, Probe sequence
gccagatagaattattattatgcca

SEQ ID NO: 50590 - DNA, 25 bp, Probe sequence
taatgacacagaggggttgctaaaa

SEQ ID NO: 50591 - DNA, 25 bp, Probe sequence
agaggggttgctaaaagagattgag

SEQ ID NO: 50592 - DNA, 25 bp, Probe sequence
cagaggggttgctaaaagagattga

SEQ ID NO: 50593 - DNA, 25 bp, Probe sequence
acagaggggttgctaaaagagattg

SEQ ID NO: 50594 - DNA, 25 bp, Probe sequence
cacagaggggttgctaaaagagatt

SEQ ID NO: 50595 - DNA, 25 bp, Probe sequence
gtaatgacacagaggggttgctaaa

SEQ ID NO: 50596 - DNA, 25 bp, Probe sequence
gaggggttgctaaaagagattgagg

SEQ ID NO: 50597 - DNA, 25 bp, Probe sequence
aatgacacagaggggttgctaaaag

SEQ ID NO: 50598 - DNA, 25 bp, Probe sequence
ggggttgctaaaagagattgaggac

SEQ ID NO: 50599 - DNA, 25 bp, Probe sequence
aggattcgcaagtatagtgacattc

SEQ ID NO: 50600 - DNA, 25 bp, Probe sequence
caggattcgcaagtatagtgacatt

SEQ ID NO: 50601 - DNA, 25 bp, Probe sequence
gattcgcaagtatagtgacattcat

SEQ ID NO: 50602 - DNA, 25 bp, Probe sequence
ggattcgcaagtatagtgacattca

SEQ ID NO: 50603 - DNA, 25 bp, Probe sequence
tcgcaagtatagtgacattcatatt

SEQ ID NO: 50604 - DNA, 25 bp, Probe sequence
ttcgcaagtatagtgacattcatat

SEQ ID NO: 50605 - DNA, 25 bp, Probe sequence
attcgcaagtatagtgacattcata

SEQ ID NO: 50606 - DNA, 25 bp, Probe sequence
cttagcgattgtactcatgccattg

SEQ ID NO: 50607 - DNA, 25 bp, Probe sequence
gcaggattcgcaagtatagtgacat

SEQ ID NO: 50608 - DNA, 25 bp, Probe sequence
tctcagagcagtatcgtttaatgtt

SEQ ID NO: 50609 - DNA, 25 bp, Probe sequence
ttctcagagcagtatcgtttaatgt

SEQ ID NO: 50610 - DNA, 25 bp, Probe sequence
aagttctcagagcagtatcgtttaa

SEQ ID NO: 50611 - DNA, 25 bp, Probe sequence
gttctcagagcagtatcgtttaatg

SEQ ID NO: 50612 - DNA, 25 bp, Probe sequence
agttctcagagcagtatcgtttaat

SEQ ID NO: 50613 - DNA, 25 bp, Probe sequence
ctcagagcagtatcgtttaatgttt

SEQ ID NO: 50614 - DNA, 25 bp, Probe sequence
caagttctcagagcagtatcgttta

SEQ ID NO: 50615 - DNA, 25 bp, Probe sequence
aagagtagtcaactttgaacctgat

SEQ ID NO: 50616 - DNA, 25 bp, Probe sequence
gtagtcaactttgaacctgatgttt

SEQ ID NO: 50617 - DNA, 25 bp, Probe sequence
cagcgattcagactcagatagcgat

SEQ ID NO: 50618 - DNA, 25 bp, Probe sequence
tgatagcgactcagactcagacagt

SEQ ID NO: 50619 - DNA, 25 bp, Probe sequence
ctgatagcgactcagactcagacag

SEQ ID NO: 50620 - DNA, 25 bp, Probe sequence
gactcagactctgatagcgactcag

SEQ ID NO: 50621 - DNA, 25 bp, Probe sequence
gatggaagatgctctgtacgaaatc

SEQ ID NO: 50622 - DNA, 25 bp, Probe sequence
gtaagaaccttgaaacagcatccac

SEQ ID NO: 50623 - DNA, 25 bp, Probe sequence
atgtttgtcatctggagccatagaa

SEQ ID NO: 50624 - DNA, 25 bp, Probe sequence
aattgttcaagaccatcaatcgctg

SEQ ID NO: 50625 - DNA, 25 bp, Probe sequence
catcaacatcgaatacatgaaagcc

SEQ ID NO: 50626 - DNA, 25 bp, Probe sequence
ccatcaacatcgaatacatgaaagc

SEQ ID NO: 50627 - DNA, 25 bp, Probe sequence
gccatcaacatcgaatacatgaaag

SEQ ID NO: 50628 - DNA, 25 bp, Probe sequence
atcaacatcgaatacatgaaagcca

SEQ ID NO: 50629 - DNA, 25 bp, Probe sequence
tcatcatgagtcatcaacttacctt

SEQ ID NO: 50630 - DNA, 25 bp, Probe sequence
agcacaagcgaaaattattatagca

SEQ ID NO: 50631 - DNA, 25 bp, Probe sequence
gcacaagcgaaaattattatagcaa

SEQ ID NO: 50632 - DNA, 25 bp, Probe sequence
acaagcgaaaattattatagcaagc

SEQ ID NO: 50633 - DNA, 25 bp, Probe sequence
aagcacaagcgaaaattattatagc

SEQ ID NO: 50634 - DNA, 25 bp, Probe sequence
cacaagcgaaaattattatagcaag

SEQ ID NO: 50635 - DNA, 25 bp, Probe sequence
aaagcacaagcgaaaattattatag

SEQ ID NO: 50636 - DNA, 25 bp, Probe sequence
ttaaaagcacaagcgaaaattatta

SEQ ID NO: 50637 - DNA, 25 bp, Probe sequence
tttaaaagcacaagcgaaaattatt

SEQ ID NO: 50638 - DNA, 25 bp, Probe sequence
aaaagcacaagcgaaaattattata

SEQ ID NO: 50639 - DNA, 25 bp, Probe sequence
tggattgattgatgtagaggattgt

SEQ ID NO: 50640 - DNA, 25 bp, Probe sequence
tgttggattgattgatgtagaggat

SEQ ID NO: 50641 - DNA, 25 bp, Probe sequence
atgttggattgattgatgtagagga

SEQ ID NO: 50642 - DNA, 25 bp, Probe sequence
gatgttggattgattgatgtagagg

SEQ ID NO: 50643 - DNA, 25 bp, Probe sequence
ggatgttggattgattgatgtagag

SEQ ID NO: 50644 - DNA, 25 bp, Probe sequence
tgattgatgtagaggattgttacga

SEQ ID NO: 50645 - DNA, 25 bp, Probe sequence
ttgattgatgtagaggattgttacg

SEQ ID NO: 50646 - DNA, 25 bp, Probe sequence
ggattgattgatgtagaggattgtt

SEQ ID NO: 50647 - DNA, 25 bp, Probe sequence
ttggattgattgatgtagaggattg

SEQ ID NO: 50648 - DNA, 25 bp, Probe sequence
agtgtattgtaacaatatgtttgaa

SEQ ID NO: 50649 - DNA, 25 bp, Probe sequence
aagtgtattgtaacaatatgtttga

SEQ ID NO: 50650 - DNA, 25 bp, Probe sequence
acacgaatgttaagtaatgtagaca

SEQ ID NO: 50651 - DNA, 25 bp, Probe sequence
tgttaagtaatgtagacaatgctga

SEQ ID NO: 50652 - DNA, 25 bp, Probe sequence
gttaagtaatgtagacaatgctgaa

SEQ ID NO: 50653 - DNA, 25 bp, Probe sequence
cacgaatgttaagtaatgtagacaa

SEQ ID NO: 50654 - DNA, 25 bp, Probe sequence
atgttaagtaatgtagacaatgctg

SEQ ID NO: 50655 - DNA, 25 bp, Probe sequence
cggtcaatattacttacaaacacga

SEQ ID NO: 50656 - DNA, 25 bp, Probe sequence
ggcggtcaatattacttacaaacac

SEQ ID NO: 50657 - DNA, 25 bp, Probe sequence
tggcggtcaatattacttacaaaca

SEQ ID NO: 50658 - DNA, 25 bp, Probe sequence
gcggtcaatattacttacaaacacg

SEQ ID NO: 50659 - DNA, 25 bp, Probe sequence
tctttaagtgtgtttgtggtgttac

SEQ ID NO: 50660 - DNA, 25 bp, Probe sequence
catctttaagtgtgtttgtggtgtt

SEQ ID NO: 50661 - DNA, 25 bp, Probe sequence
atctttaagtgtgtttgtggtgtta

SEQ ID NO: 50662 - DNA, 25 bp, Probe sequence
tttaagtgtgtttgtggtgttactc

SEQ ID NO: 50663 - DNA, 25 bp, Probe sequence
ctttaagtgtgtttgtggtgttact

SEQ ID NO: 50664 - DNA, 25 bp, Probe sequence
ttaagtgtgtttgtggtgttactcg

SEQ ID NO: 50665 - DNA, 25 bp, Probe sequence
gggacacgaaattattccagttaaa

SEQ ID NO: 50666 - DNA, 25 bp, Probe sequence
gcttgcactttatcccataatgatt

SEQ ID NO: 50667 - DNA, 25 bp, Probe sequence
tgcttgcactttatcccataatgat

SEQ ID NO: 50668 - DNA, 25 bp, Probe sequence
cgattgagcgcatttatttgactaa

SEQ ID NO: 50669 - DNA, 25 bp, Probe sequence
ttgagcgcatttatttgactaattc

SEQ ID NO: 50670 - DNA, 25 bp, Probe sequence
tgagcgcatttatttgactaattca

SEQ ID NO: 50671 - DNA, 25 bp, Probe sequence
gattgagcgcatttatttgactaat

SEQ ID NO: 50672 - DNA, 25 bp, Probe sequence
acgattgagcgcatttatttgacta

SEQ ID NO: 50673 - DNA, 25 bp, Probe sequence
attgagcgcatttatttgactaatt

SEQ ID NO: 50674 - DNA, 25 bp, Probe sequence
gacgattgagcgcatttatttgact

SEQ ID NO: 50675 - DNA, 25 bp, Probe sequence
gagcgcatttatttgactaattcaa

SEQ ID NO: 50676 - DNA, 25 bp, Probe sequence
cgacgattgagcgcatttatttgac

SEQ ID NO: 50677 - DNA, 25 bp, Probe sequence
atgatatgagtacaagtgcaatcga

SEQ ID NO: 50678 - DNA, 25 bp, Probe sequence
aatgatatgagtacaagtgcaatcg

SEQ ID NO: 50679 - DNA, 25 bp, Probe sequence
gatatgagtacaagtgcaatcgaca

SEQ ID NO: 50680 - DNA, 25 bp, Probe sequence
tgatatgagtacaagtgcaatcgac

SEQ ID NO: 50681 - DNA, 25 bp, Probe sequence
accaagtgttgtaaataagaaccct

SEQ ID NO: 50682 - DNA, 25 bp, Probe sequence
aaccaagtgttgtaaataagaaccc

SEQ ID NO: 50683 - DNA, 25 bp, Probe sequence
ccaagtgttgtaaataagaacccta

SEQ ID NO: 50684 - DNA, 25 bp, Probe sequence
aaagtcaataatgggacagcaattt

SEQ ID NO: 50685 - DNA, 25 bp, Probe sequence
aaaccaagtgttgtaaataagaacc

SEQ ID NO: 50686 - DNA, 25 bp, Probe sequence
aatggttatggatttattgataggt

SEQ ID NO: 50687 - DNA, 25 bp, Probe sequence
tggttatggatttattgataggtac

SEQ ID NO: 50688 - DNA, 25 bp, Probe sequence
ggttatggatttattgataggtact

SEQ ID NO: 50689 - DNA, 25 bp, Probe sequence
ggggtcaatggttatggatttattg

SEQ ID NO: 50690 - DNA, 25 bp, Probe sequence
atggttatggatttattgataggta

SEQ ID NO: 50691 - DNA, 25 bp, Probe sequence
tggggattgaatataaaattatcgt

SEQ ID NO: 50692 - DNA, 25 bp, Probe sequence
caatggttatggatttattgatagg

SEQ ID NO: 50693 - DNA, 25 bp, Probe sequence
gggtcaatggttatggatttattga

SEQ ID NO: 50694 - DNA, 25 bp, Probe sequence
atggggattgaatataaaattatcg

SEQ ID NO: 50695 - DNA, 25 bp, Probe sequence
tcggcataaacgtcattaaagaatt

SEQ ID NO: 50696 - DNA, 25 bp, Probe sequence
atttcggcataaacgtcattaaaga

SEQ ID NO: 50697 - DNA, 25 bp, Probe sequence
agatttcggcataaacgtcattaaa

SEQ ID NO: 50698 - DNA, 25 bp, Probe sequence
gtagatttcggcataaacgtcatta

SEQ ID NO: 50699 - DNA, 25 bp, Probe sequence
gatttcggcataaacgtcattaaag

SEQ ID NO: 50700 - DNA, 25 bp, Probe sequence
tttcggcataaacgtcattaaagaa

SEQ ID NO: 50701 - DNA, 25 bp, Probe sequence
ttcggcataaacgtcattaaagaat

SEQ ID NO: 50702 - DNA, 25 bp, Probe sequence
cggcataaacgtcattaaagaattt

SEQ ID NO: 50703 - DNA, 25 bp, Probe sequence
tagatttcggcataaacgtcattaa

SEQ ID NO: 50704 - DNA, 25 bp, Probe sequence
ttatattatgttagccacgcttcaa

SEQ ID NO: 50705 - DNA, 25 bp, Probe sequence
attatattatgttagccacgcttca

SEQ ID NO: 50706 - DNA, 25 bp, Probe sequence
actaattatattatgttagccacgc

SEQ ID NO: 50707 - DNA, 25 bp, Probe sequence
aattatattatgttagccacgcttc

SEQ ID NO: 50708 - DNA, 25 bp, Probe sequence
ttatgttagccacgcttcaaataaa

SEQ ID NO: 50709 - DNA, 25 bp, Probe sequence
attatgttagccacgcttcaaataa

SEQ ID NO: 50710 - DNA, 25 bp, Probe sequence
atattatgttagccacgcttcaaat

SEQ ID NO: 50711 - DNA, 25 bp, Probe sequence
tttaaatcgaggagctatcttagag

SEQ ID NO: 50712 - DNA, 25 bp, Probe sequence
tattatgttagccacgcttcaaata

SEQ ID NO: 50713 - DNA, 25 bp, Probe sequence
gcagcaaataaattaaccttgacta

SEQ ID NO: 50714 - DNA, 25 bp, Probe sequence
tgcagcaaataaattaaccttgact

SEQ ID NO: 50715 - DNA, 25 bp, Probe sequence
ttgcagcaaataaattaaccttgac

SEQ ID NO: 50716 - DNA, 25 bp, Probe sequence
atggattaaatatgaagaggtgttt

SEQ ID NO: 50717 - DNA, 25 bp, Probe sequence
tatggattaaatatgaagaggtgtt

SEQ ID NO: 50718 - DNA, 25 bp, Probe sequence
cagcaaataaattaaccttgactat

SEQ ID NO: 50719 - DNA, 25 bp, Probe sequence
atatggattaaatatgaagaggtgt

SEQ ID NO: 50720 - DNA, 25 bp, Probe sequence
tggattaaatatgaagaggtgtttt

SEQ ID NO: 50721 - DNA, 25 bp, Probe sequence
tttgcagcaaataaattaaccttga

SEQ ID NO: 50722 - DNA, 25 bp, Probe sequence
aatagtgttactgagacgcattacg

SEQ ID NO: 50723 - DNA, 25 bp, Probe sequence
taatagtgttactgagacgcattac

SEQ ID NO: 50724 - DNA, 25 bp, Probe sequence
atagtgttactgagacgcattacga

SEQ ID NO: 50725 - DNA, 25 bp, Probe sequence
tgttactgagacgcattacgaagaa

SEQ ID NO: 50726 - DNA, 25 bp, Probe sequence
tagtgttactgagacgcattacgaa

SEQ ID NO: 50727 - DNA, 25 bp, Probe sequence
tcttggtaatagtgttactgagacg

SEQ ID NO: 50728 - DNA, 25 bp, Probe sequence
ggtaatagtgttactgagacgcatt

SEQ ID NO: 50729 - DNA, 25 bp, Probe sequence
cttggtaatagtgttactgagacgc

SEQ ID NO: 50730 - DNA, 25 bp, Probe sequence
ttactgagacgcattacgaagaaat

SEQ ID NO: 50731 - DNA, 25 bp, Probe sequence
gagtgaaactaaaatgctaatgtgt

SEQ ID NO: 50732 - DNA, 25 bp, Probe sequence
tgagtgaaactaaaatgctaatgtg

SEQ ID NO: 50733 - DNA, 25 bp, Probe sequence
atgagtgaaactaaaatgctaatgt

SEQ ID NO: 50734 - DNA, 25 bp, Probe sequence
gtgaaactaaaatgctaatgtgtac

SEQ ID NO: 50735 - DNA, 25 bp, Probe sequence
agtgaaactaaaatgctaatgtgta

SEQ ID NO: 50736 - DNA, 25 bp, Probe sequence
tgaaactaaaatgctaatgtgtact

SEQ ID NO: 50737 - DNA, 25 bp, Probe sequence
aatgagtgaaactaaaatgctaatg

SEQ ID NO: 50738 - DNA, 25 bp, Probe sequence
aaaatgagtgaaactaaaatgctaa

SEQ ID NO: 50739 - DNA, 25 bp, Probe sequence
aacgtatcatcatttaagttacaaa

SEQ ID NO: 50740 - DNA, 25 bp, Probe sequence
gtgtctaacgaattgtcttttgttg

SEQ ID NO: 50741 - DNA, 25 bp, Probe sequence
tgtctaacgaattgtcttttgttgc

SEQ ID NO: 50742 - DNA, 25 bp, Probe sequence
gtctaacgaattgtcttttgttgcg

SEQ ID NO: 50743 - DNA, 25 bp, Probe sequence
ttttgttgcgtatactacttttgct

SEQ ID NO: 50744 - DNA, 25 bp, Probe sequence
cgaattgtcttttgttgcgtatact

SEQ ID NO: 50745 - DNA, 25 bp, Probe sequence
cttttgttgcgtatactacttttgc

SEQ ID NO: 50746 - DNA, 25 bp, Probe sequence
tgttgcgtatactacttttgctatc

SEQ ID NO: 50747 - DNA, 25 bp, Probe sequence
tttgttgcgtatactacttttgcta

SEQ ID NO: 50748 - DNA, 25 bp, Probe sequence
gttgcgtatactacttttgctatct

SEQ ID NO: 50749 - DNA, 25 bp, Probe sequence
cgaaatgggttcttactgagttatc

SEQ ID NO: 50750 - DNA, 25 bp, Probe sequence
gcgaaatgggttcttactgagttat

SEQ ID NO: 50751 - DNA, 25 bp, Probe sequence
gaaatgggttcttactgagttatct

SEQ ID NO: 50752 - DNA, 25 bp, Probe sequence
aaatgggttcttactgagttatcta

SEQ ID NO: 50753 - DNA, 25 bp, Probe sequence
ggcgaaatgggttcttactgagtta

SEQ ID NO: 50754 - DNA, 25 bp, Probe sequence
atgggttcttactgagttatctatt

SEQ ID NO: 50755 - DNA, 25 bp, Probe sequence
aatgggttcttactgagttatctat

SEQ ID NO: 50756 - DNA, 25 bp, Probe sequence
tgggttcttactgagttatctatta

SEQ ID NO: 50757 - DNA, 25 bp, Probe sequence
caaagggcgaaatgggttcttactg

SEQ ID NO: 50758 - DNA, 25 bp, Probe sequence
catacttctgcccatcaccttatga

SEQ ID NO: 50759 - DNA, 25 bp, Probe sequence
tacttctgcccatcaccttatgata

SEQ ID NO: 50760 - DNA, 25 bp, Probe sequence
ccatcaccttatgatagggagttat

SEQ ID NO: 50761 - DNA, 25 bp, Probe sequence
atacttctgcccatcaccttatgat

SEQ ID NO: 50762 - DNA, 25 bp, Probe sequence
cccatcaccttatgatagggagtta

SEQ ID NO: 50763 - DNA, 25 bp, Probe sequence
acttctgcccatcaccttatgatag

SEQ ID NO: 50764 - DNA, 25 bp, Probe sequence
catcaccttatgatagggagttatt

SEQ ID NO: 50765 - DNA, 25 bp, Probe sequence
cttctgcccatcaccttatgatagg

SEQ ID NO: 50766 - DNA, 25 bp, Probe sequence
atcaccttatgatagggagttattt

SEQ ID NO: 50767 - DNA, 25 bp, Probe sequence
ggggaataattgatgacatcaaaac

SEQ ID NO: 50768 - DNA, 25 bp, Probe sequence
gggaataattgatgacatcaaaaca

SEQ ID NO: 50769 - DNA, 25 bp, Probe sequence
ggaataattgatgacatcaaaacat

SEQ ID NO: 50770 - DNA, 25 bp, Probe sequence
gaataattgatgacatcaaaacatc

SEQ ID NO: 50771 - DNA, 25 bp, Probe sequence
tttcccgtaataaacaaaaccttaa

SEQ ID NO: 50772 - DNA, 25 bp, Probe sequence
cgtaataaacaaaaccttaatagcg

SEQ ID NO: 50773 - DNA, 25 bp, Probe sequence
ttcccgtaataaacaaaaccttaat

SEQ ID NO: 50774 - DNA, 25 bp, Probe sequence
ccgtaataaacaaaaccttaatagc

SEQ ID NO: 50775 - DNA, 25 bp, Probe sequence
acagtgttaagttacgatttaacga

SEQ ID NO: 50776 - DNA, 25 bp, Probe sequence
agttacgatttaacgaatttaacaa

SEQ ID NO: 50777 - DNA, 25 bp, Probe sequence
aagttacgatttaacgaatttaaca

SEQ ID NO: 50778 - DNA, 25 bp, Probe sequence
ttttcccgtaataaacaaaacctta

SEQ ID NO: 50779 - DNA, 25 bp, Probe sequence
aacagtgttaagttacgatttaacg

SEQ ID NO: 50780 - DNA, 25 bp, Probe sequence
tgccgacacctatacataatcctaa

SEQ ID NO: 50781 - DNA, 25 bp, Probe sequence
atgccgacacctatacataatccta

SEQ ID NO: 50782 - DNA, 25 bp, Probe sequence
gccgacacctatacataatcctaaa

SEQ ID NO: 50783 - DNA, 25 bp, Probe sequence
tcgctagaaagaccattgtattatc

SEQ ID NO: 50784 - DNA, 25 bp, Probe sequence
cgctagaaagaccattgtattatct

SEQ ID NO: 50785 - DNA, 25 bp, Probe sequence
atcgctagaaagaccattgtattat

SEQ ID NO: 50786 - DNA, 25 bp, Probe sequence
atatcgctagaaagaccattgtatt

SEQ ID NO: 50787 - DNA, 25 bp, Probe sequence
tatcgctagaaagaccattgtatta

SEQ ID NO: 50788 - DNA, 25 bp, Probe sequence
gtagtgatatcgctagaaagaccat

SEQ ID NO: 50789 - DNA, 25 bp, Probe sequence
tgttaagtttgtgtattgaaagtga

SEQ ID NO: 50790 - DNA, 25 bp, Probe sequence
attagtactgtcaacgcctctgtta

SEQ ID NO: 50791 - DNA, 25 bp, Probe sequence
ttagtactgtcaacgcctctgttaa

SEQ ID NO: 50792 - DNA, 25 bp, Probe sequence
aattagtactgtcaacgcctctgtt

SEQ ID NO: 50793 - DNA, 25 bp, Probe sequence
atgttaagtttgtgtattgaaagtg

SEQ ID NO: 50794 - DNA, 25 bp, Probe sequence
ataaattagtactgtcaacgcctct

SEQ ID NO: 50795 - DNA, 25 bp, Probe sequence
gataaattagtactgtcaacgcctc

SEQ ID NO: 50796 - DNA, 25 bp, Probe sequence
taaattagtactgtcaacgcctctg

SEQ ID NO: 50797 - DNA, 25 bp, Probe sequence
gttaagtttgtgtattgaaagtgat

SEQ ID NO: 50798 - DNA, 25 bp, Probe sequence
ccgttccattagcagtaactaaatt

SEQ ID NO: 50799 - DNA, 25 bp, Probe sequence
gccgttccattagcagtaactaaat

SEQ ID NO: 50800 - DNA, 25 bp, Probe sequence
tccattagcagtaactaaatttcga

SEQ ID NO: 50801 - DNA, 25 bp, Probe sequence
cgttccattagcagtaactaaattt

SEQ ID NO: 50802 - DNA, 25 bp, Probe sequence
ttccattagcagtaactaaatttcg

SEQ ID NO: 50803 - DNA, 25 bp, Probe sequence
ccattagcagtaactaaatttcgat

SEQ ID NO: 50804 - DNA, 25 bp, Probe sequence
tagcagtaactaaatttcgatcttt

SEQ ID NO: 50805 - DNA, 25 bp, Probe sequence
tgccgttccattagcagtaactaaa

SEQ ID NO: 50806 - DNA, 25 bp, Probe sequence
tcaacaaatttatgctttaacaact

SEQ ID NO: 50807 - DNA, 25 bp, Probe sequence
agtttcaaaagaacaattccaagaa

SEQ ID NO: 50808 - DNA, 25 bp, Probe sequence
aagtttcaaaagaacaattccaaga

SEQ ID NO: 50809 - DNA, 25 bp, Probe sequence
gaagtttcaaaagaacaattccaag

SEQ ID NO: 50810 - DNA, 25 bp, Probe sequence
accaatgaagtttcaaaagaacaat

SEQ ID NO: 50811 - DNA, 25 bp, Probe sequence
tgaagtttcaaaagaacaattccaa

SEQ ID NO: 50812 - DNA, 25 bp, Probe sequence
atgaagtttcaaaagaacaattcca

SEQ ID NO: 50813 - DNA, 25 bp, Probe sequence
taccaatgaagtttcaaaagaacaa

SEQ ID NO: 50814 - DNA, 25 bp, Probe sequence
ataccaatgaagtttcaaaagaaca

SEQ ID NO: 50815 - DNA, 25 bp, Probe sequence
ccaatgaagtttcaaaagaacaatt

SEQ ID NO: 50816 - DNA, 25 bp, Probe sequence
taatcagagtagaaagtgttgaggc

SEQ ID NO: 50817 - DNA, 25 bp, Probe sequence
gtaatcagagtagaaagtgttgagg

SEQ ID NO: 50818 - DNA, 25 bp, Probe sequence
gaggcgtttcagaagttgtttagaa

SEQ ID NO: 50819 - DNA, 25 bp, Probe sequence
tgtaatcagagtagaaagtgttgag

SEQ ID NO: 50820 - DNA, 25 bp, Probe sequence
ttgaggcgtttcagaagttgtttag

SEQ ID NO: 50821 - DNA, 25 bp, Probe sequence
gttgaggcgtttcagaagttgttta

SEQ ID NO: 50822 - DNA, 25 bp, Probe sequence
atgtaatcagagtagaaagtgttga

SEQ ID NO: 50823 - DNA, 25 bp, Probe sequence
tgaggcgtttcagaagttgtttaga

SEQ ID NO: 50824 - DNA, 25 bp, Probe sequence
aatcagagtagaaagtgttgaggcg

SEQ ID NO: 50825 - DNA, 25 bp, Probe sequence
gctatgctgataaagaatgtgatgt

SEQ ID NO: 50826 - DNA, 25 bp, Probe sequence
gaatgtgatgtcttgttaaaggtgg

SEQ ID NO: 50827 - DNA, 25 bp, Probe sequence
agaatgtgatgtcttgttaaaggtg

SEQ ID NO: 50828 - DNA, 25 bp, Probe sequence
tgatgttgaatgggttattatttgc

SEQ ID NO: 50829 - DNA, 25 bp, Probe sequence
aatgtgatgtcttgttaaaggtggg

SEQ ID NO: 50830 - DNA, 25 bp, Probe sequence
gatgttgaatgggttattatttgct

SEQ ID NO: 50831 - DNA, 25 bp, Probe sequence
gctgatgttgaatgggttattattt

SEQ ID NO: 50832 - DNA, 25 bp, Probe sequence
tgttgaatgggttattatttgctac

SEQ ID NO: 50833 - DNA, 25 bp, Probe sequence
ctatgctgataaagaatgtgatgtc

SEQ ID NO: 50834 - DNA, 25 bp, Probe sequence
tcaacttcagcctacttcattcaat

SEQ ID NO: 50835 - DNA, 25 bp, Probe sequence
ttcaacttcagcctacttcattcaa

SEQ ID NO: 50836 - DNA, 25 bp, Probe sequence
cttcagcctacttcattcaataaca

SEQ ID NO: 50837 - DNA, 25 bp, Probe sequence
acttcagcctacttcattcaataac

SEQ ID NO: 50838 - DNA, 25 bp, Probe sequence
caacttcagcctacttcattcaata

SEQ ID NO: 50839 - DNA, 25 bp, Probe sequence
cttcaacttcagcctacttcattca

SEQ ID NO: 50840 - DNA, 25 bp, Probe sequence
ttcagcctacttcattcaataacaa

SEQ ID NO: 50841 - DNA, 25 bp, Probe sequence
aacttcagcctacttcattcaataa

SEQ ID NO: 50842 - DNA, 25 bp, Probe sequence
ttcaacttcaactggcttcaacttc

SEQ ID NO: 50843 - DNA, 25 bp, Probe sequence
gaggagtatcatgcttacagaacaa

SEQ ID NO: 50844 - DNA, 25 bp, Probe sequence
aggagtatcatgcttacagaacaag

SEQ ID NO: 50845 - DNA, 25 bp, Probe sequence
ggagtatcatgcttacagaacaaga

SEQ ID NO: 50846 - DNA, 25 bp, Probe sequence
agtatcatgcttacagaacaagaga

SEQ ID NO: 50847 - DNA, 25 bp, Probe sequence
gagtatcatgcttacagaacaagag

SEQ ID NO: 50848 - DNA, 25 bp, Probe sequence
aaggaggagtatcatgcttacagaa

SEQ ID NO: 50849 - DNA, 25 bp, Probe sequence
gtatcatgcttacagaacaagagaa

SEQ ID NO: 50850 - DNA, 25 bp, Probe sequence
aggaggagtatcatgcttacagaac

SEQ ID NO: 50851 - DNA, 25 bp, Probe sequence
ggaggagtatcatgcttacagaaca

SEQ ID NO: 50852 - DNA, 25 bp, Probe sequence
tcgtaagtaattccattgtcattgc

SEQ ID NO: 50853 - DNA, 25 bp, Probe sequence
ctcgtaagtaattccattgtcattg

SEQ ID NO: 50854 - DNA, 25 bp, Probe sequence
actcgtaagtaattccattgtcatt

SEQ ID NO: 50855 - DNA, 25 bp, Probe sequence
aattccattgtcattgcaggttatt

SEQ ID NO: 50856 - DNA, 25 bp, Probe sequence
gtaattccattgtcattgcaggtta

SEQ ID NO: 50857 - DNA, 25 bp, Probe sequence
cgtaagtaattccattgtcattgca

SEQ ID NO: 50858 - DNA, 25 bp, Probe sequence
taagtaattccattgtcattgcagg

SEQ ID NO: 50859 - DNA, 25 bp, Probe sequence
taattccattgtcattgcaggttat

SEQ ID NO: 50860 - DNA, 25 bp, Probe sequence
agtaattccattgtcattgcaggtt

SEQ ID NO: 50861 - DNA, 25 bp, Probe sequence
acaatgctcatgttatacacctcat

SEQ ID NO: 50862 - DNA, 25 bp, Probe sequence
caacaatgctcatgttatacacctc

SEQ ID NO: 50863 - DNA, 25 bp, Probe sequence
aacaatgctcatgttatacacctca

SEQ ID NO: 50864 - DNA, 25 bp, Probe sequence
caatgctcatgttatacacctcatg

SEQ ID NO: 50865 - DNA, 25 bp, Probe sequence
gcaacaatgctcatgttatacacct

SEQ ID NO: 50866 - DNA, 25 bp, Probe sequence
atgcaacaatgctcatgttatacac

SEQ ID NO: 50867 - DNA, 25 bp, Probe sequence
tgcaacaatgctcatgttatacacc

SEQ ID NO: 50868 - DNA, 25 bp, Probe sequence
tttaccagtgccatcgtaccatttt

SEQ ID NO: 50869 - DNA, 25 bp, Probe sequence
ttttaccagtgccatcgtaccattt

SEQ ID NO: 50870 - DNA, 25 bp, Probe sequence
agtgatgacttgaattattacacca

SEQ ID NO: 50871 - DNA, 25 bp, Probe sequence
gtgatgacttgaattattacaccaa

SEQ ID NO: 50872 - DNA, 25 bp, Probe sequence
tgatgacttgaattattacaccaat

SEQ ID NO: 50873 - DNA, 25 bp, Probe sequence
attacaccaatatacctaaggagta

SEQ ID NO: 50874 - DNA, 25 bp, Probe sequence
attcagaatttggtcaaataggtcg

SEQ ID NO: 50875 - DNA, 25 bp, Probe sequence
tattacaccaatatacctaaggagt

SEQ ID NO: 50876 - DNA, 25 bp, Probe sequence
ttcagaatttggtcaaataggtcga

SEQ ID NO: 50877 - DNA, 25 bp, Probe sequence
ttacaccaatatacctaaggagtat

SEQ ID NO: 50878 - DNA, 25 bp, Probe sequence
aattcagaatttggtcaaataggtc

SEQ ID NO: 50879 - DNA, 25 bp, Probe sequence
tgatgacttgaattattacaccgat

SEQ ID NO: 50880 - DNA, 25 bp, Probe sequence
cctaaggagtataacatctctgtgc

SEQ ID NO: 50881 - DNA, 25 bp, Probe sequence
acctaaggagtataacatctctgtg

SEQ ID NO: 50882 - DNA, 25 bp, Probe sequence
gtgatgacttgaattattacaccga

SEQ ID NO: 50883 - DNA, 25 bp, Probe sequence
agtgatgacttgaattattacaccg

SEQ ID NO: 50884 - DNA, 25 bp, Probe sequence
tacctaaggagtataacatctctgt

SEQ ID NO: 50885 - DNA, 25 bp, Probe sequence
ggagtataacatctctgtgcaagta

SEQ ID NO: 50886 - DNA, 25 bp, Probe sequence
aaggagtataacatctctgtgcaag

SEQ ID NO: 50887 - DNA, 25 bp, Probe sequence
ctaaggagtataacatctctgtgca

SEQ ID NO: 50888 - DNA, 25 bp, Probe sequence
acacttatccttcattatacccgaa

SEQ ID NO: 50889 - DNA, 25 bp, Probe sequence
cacttatccttcattatacccgaac

SEQ ID NO: 50890 - DNA, 25 bp, Probe sequence
acttatccttcattatacccgaact

SEQ ID NO: 50891 - DNA, 25 bp, Probe sequence
tacacttatccttcattatacccga

SEQ ID NO: 50892 - DNA, 25 bp, Probe sequence
cttatccttcattatacccgaactt

SEQ ID NO: 50893 - DNA, 25 bp, Probe sequence
atacacttatccttcattatacccg

SEQ ID NO: 50894 - DNA, 25 bp, Probe sequence
ttatccttcattatacccgaacttt

SEQ ID NO: 50895 - DNA, 25 bp, Probe sequence
cgctctgtaatgttatacatacact

SEQ ID NO: 50896 - DNA, 25 bp, Probe sequence
acatacacttatccttcattatacc

SEQ ID NO: 50897 - DNA, 25 bp, Probe sequence
tggatgttgataagcgtggttatat

SEQ ID NO: 50898 - DNA, 25 bp, Probe sequence
ggatgttgataagcgtggttatatt

SEQ ID NO: 50899 - DNA, 25 bp, Probe sequence
gtggatgttgataagcgtggttata

SEQ ID NO: 50900 - DNA, 25 bp, Probe sequence
atgtggatgttgataagcgtggtta

SEQ ID NO: 50901 - DNA, 25 bp, Probe sequence
tgtggatgttgataagcgtggttat

SEQ ID NO: 50902 - DNA, 25 bp, Probe sequence
tgttgataagcgtggttatattaag

SEQ ID NO: 50903 - DNA, 25 bp, Probe sequence
gatgttgataagcgtggttatatta

SEQ ID NO: 50904 - DNA, 25 bp, Probe sequence
gttgataagcgtggttatattaaga

SEQ ID NO: 50905 - DNA, 25 bp, Probe sequence
aatgtggatgttgataagcgtggtt

SEQ ID NO: 50906 - DNA, 25 bp, Probe sequence
atgaatggcatttgtaggtctgaaa

SEQ ID NO: 50907 - DNA, 25 bp, Probe sequence
taatgaatggcatttgtaggtctga

SEQ ID NO: 50908 - DNA, 25 bp, Probe sequence
ctaatgaatggcatttgtaggtctg

SEQ ID NO: 50909 - DNA, 25 bp, Probe sequence
actaatgaatggcatttgtaggtct

SEQ ID NO: 50910 - DNA, 25 bp, Probe sequence
aactaatgaatggcatttgtaggtc

SEQ ID NO: 50911 - DNA, 25 bp, Probe sequence
aaactaatgaatggcatttgtaggt

SEQ ID NO: 50912 - DNA, 25 bp, Probe sequence
aatgaatggcatttgtaggtctgaa

SEQ ID NO: 50913 - DNA, 25 bp, Probe sequence
tgaatggcatttgtaggtctgaaaa

SEQ ID NO: 50914 - DNA, 25 bp, Probe sequence
tggcatttgtaggtctgaaaatatg

SEQ ID NO: 50915 - DNA, 25 bp, Probe sequence
gtaataggcactacaacgcttattg

SEQ ID NO: 50916 - DNA, 25 bp, Probe sequence
agtaataggcactacaacgcttatt

SEQ ID NO: 50917 - DNA, 25 bp, Probe sequence
aagtaataggcactacaacgcttat

SEQ ID NO: 50918 - DNA, 25 bp, Probe sequence
taataggcactacaacgcttattgg

SEQ ID NO: 50919 - DNA, 25 bp, Probe sequence
ggacatcaatcaaagtaataggcac

SEQ ID NO: 50920 - DNA, 25 bp, Probe sequence
tggacatcaatcaaagtaataggca

SEQ ID NO: 50921 - DNA, 25 bp, Probe sequence
aacatagagaaattgggtccgtaat

SEQ ID NO: 50922 - DNA, 25 bp, Probe sequence
ttggacatcaatcaaagtaataggc

SEQ ID NO: 50923 - DNA, 25 bp, Probe sequence
aaagtaataggcactacaacgctta

SEQ ID NO: 50924 - DNA, 25 bp, Probe sequence
cggttgttattggtattgatgctat

SEQ ID NO: 50925 - DNA, 25 bp, Probe sequence
acctcaaccaattatgactgcttat

SEQ ID NO: 50926 - DNA, 25 bp, Probe sequence
cacctcaaccaattatgactgctta

SEQ ID NO: 50927 - DNA, 25 bp, Probe sequence
cctcaaccaattatgactgcttata

SEQ ID NO: 50928 - DNA, 25 bp, Probe sequence
ggttgttattggtattgatgctatt

SEQ ID NO: 50929 - DNA, 25 bp, Probe sequence
ttgatgctattgaagatacaagagt

SEQ ID NO: 50930 - DNA, 25 bp, Probe sequence
tagcagagggaacagttaaatcaat

SEQ ID NO: 50931 - DNA, 25 bp, Probe sequence
gtatgggtgaaataacgaactactc

SEQ ID NO: 50932 - DNA, 25 bp, Probe sequence
gaaagccaatttgatgtaggtgatt

SEQ ID NO: 50933 - DNA, 25 bp, Probe sequence
gcaatcgcaaaattcaaaccattta

SEQ ID NO: 50934 - DNA, 25 bp, Probe sequence
cgcaaaattcaaaccatttaagaac

SEQ ID NO: 50935 - DNA, 25 bp, Probe sequence
tcgcaaaattcaaaccatttaagaa

SEQ ID NO: 50936 - DNA, 25 bp, Probe sequence
atcgcaaaattcaaaccatttaaga

SEQ ID NO: 50937 - DNA, 25 bp, Probe sequence
caatcgcaaaattcaaaccatttaa

SEQ ID NO: 50938 - DNA, 25 bp, Probe sequence
tttgtcaaaagaagcagctatcata

SEQ ID NO: 50939 - DNA, 25 bp, Probe sequence
tgtcaaaagaagcagctatcatatt

SEQ ID NO: 50940 - DNA, 25 bp, Probe sequence
ttgtcaaaagaagcagctatcatat

SEQ ID NO: 50941 - DNA, 25 bp, Probe sequence
aaattcaaaccatttaagaacagaa

SEQ ID NO: 50942 - DNA, 25 bp, Probe sequence
tttatggagattgggataggattca

SEQ ID NO: 50943 - DNA, 25 bp, Probe sequence
ctttatggagattgggataggattc

SEQ ID NO: 50944 - DNA, 25 bp, Probe sequence
ttatggagattgggataggattcat

SEQ ID NO: 50945 - DNA, 25 bp, Probe sequence
tatggagattgggataggattcatg

SEQ ID NO: 50946 - DNA, 25 bp, Probe sequence
tttacctttatggagattgggatag

SEQ ID NO: 50947 - DNA, 25 bp, Probe sequence
tacctttatggagattgggatagga

SEQ ID NO: 50948 - DNA, 25 bp, Probe sequence
cctttatggagattgggataggatt

SEQ ID NO: 50949 - DNA, 25 bp, Probe sequence
acctttatggagattgggataggat

SEQ ID NO: 50950 - DNA, 25 bp, Probe sequence
ttacctttatggagattgggatagg

SEQ ID NO: 50951 - DNA, 25 bp, Probe sequence
gttgatttgtattgtaatgtcgtgg

SEQ ID NO: 50952 - DNA, 25 bp, Probe sequence
tgatttgtattgtaatgtcgtggaa

SEQ ID NO: 50953 - DNA, 25 bp, Probe sequence
ttgatttgtattgtaatgtcgtgga

SEQ ID NO: 50954 - DNA, 25 bp, Probe sequence
ggagttataccagaagttgatttgt

SEQ ID NO: 50955 - DNA, 25 bp, Probe sequence
gatttgtattgtaatgtcgtggaaa

SEQ ID NO: 50956 - DNA, 25 bp, Probe sequence
agttgatttgtattgtaatgtcgtg

SEQ ID NO: 50957 - DNA, 25 bp, Probe sequence
tgatgtcgtggaaatattatggagt

SEQ ID NO: 50958 - DNA, 25 bp, Probe sequence
gtgatgtcgtggaaatattatggag

SEQ ID NO: 50959 - DNA, 25 bp, Probe sequence
tttgtattgtaatgtcgtggaaatt

SEQ ID NO: 50960 - DNA, 25 bp, Probe sequence
taccatttaaaattacagcttgcgt

SEQ ID NO: 50961 - DNA, 25 bp, Probe sequence
ccatttaaaattacagcttgcgttt

SEQ ID NO: 50962 - DNA, 25 bp, Probe sequence
accatttaaaattacagcttgcgtt

SEQ ID NO: 50963 - DNA, 25 bp, Probe sequence
ttaccatttaaaattacagcttgcg

SEQ ID NO: 50964 - DNA, 25 bp, Probe sequence
cttaccatttaaaattacagcttgc

SEQ ID NO: 50965 - DNA, 25 bp, Probe sequence
catttaaaattacagcttgcgttta

SEQ ID NO: 50966 - DNA, 25 bp, Probe sequence
agtcaacatcattttatcagtatca

SEQ ID NO: 50967 - DNA, 25 bp, Probe sequence
tcatagtcaacatcattttatcagt

SEQ ID NO: 50968 - DNA, 25 bp, Probe sequence
tacagcttgcgtttataaaatcgtt

SEQ ID NO: 50969 - DNA, 25 bp, Probe sequence
ctcagactcagatagtgactcagat

SEQ ID NO: 50970 - DNA, 25 bp, Probe sequence
cgactcagattcagatagtgattca

SEQ ID NO: 50971 - DNA, 25 bp, Probe sequence
agactcagatagtgactcagattca

SEQ ID NO: 50972 - DNA, 25 bp, Probe sequence
tagcgactcagattcagatagtgat

SEQ ID NO: 50973 - DNA, 25 bp, Probe sequence
gcgactcagattcagatagtgattc

SEQ ID NO: 50974 - DNA, 25 bp, Probe sequence
ttcagatagtgattcagactcagat

SEQ ID NO: 50975 - DNA, 25 bp, Probe sequence
attcagatagtgattcagactcaga

SEQ ID NO: 50976 - DNA, 25 bp, Probe sequence
agattcagatagtgattcagactca

SEQ ID NO: 50977 - DNA, 25 bp, Probe sequence
tcagattcagatagtgattcagact

SEQ ID NO: 50978 - DNA, 25 bp, Probe sequence
agcgttgattaagtatggaattgtt

SEQ ID NO: 50979 - DNA, 25 bp, Probe sequence
aagcgttgattaagtatggaattgt

SEQ ID NO: 50980 - DNA, 25 bp, Probe sequence
tgaagcgttgattaagtatggaatt

SEQ ID NO: 50981 - DNA, 25 bp, Probe sequence
atgaagcgttgattaagtatggaat

SEQ ID NO: 50982 - DNA, 25 bp, Probe sequence
gaagcgttgattaagtatggaattg

SEQ ID NO: 50983 - DNA, 25 bp, Probe sequence
tatgaagcgttgattaagtatggaa

SEQ ID NO: 50984 - DNA, 25 bp, Probe sequence
atatgaagcgttgattaagtatgga

SEQ ID NO: 50985 - DNA, 25 bp, Probe sequence
gcgttgattaagtatggaattgtta

SEQ ID NO: 50986 - DNA, 25 bp, Probe sequence
tatatgaagcgttgattaagtatgg

SEQ ID NO: 50987 - DNA, 25 bp, Probe sequence
ttgatttgggtagtatgctttgaca

SEQ ID NO: 50988 - DNA, 25 bp, Probe sequence
gatttgggtagtatgctttgacaca

SEQ ID NO: 50989 - DNA, 25 bp, Probe sequence
tgatttgggtagtatgctttgacac

SEQ ID NO: 50990 - DNA, 25 bp, Probe sequence
atttgggtagtatgctttgacacaa

SEQ ID NO: 50991 - DNA, 25 bp, Probe sequence
tttgggtagtatgctttgacacaac

SEQ ID NO: 50992 - DNA, 25 bp, Probe sequence
gcaaattcgatagtcaactcattct

SEQ ID NO: 50993 - DNA, 25 bp, Probe sequence
agcaaattcgatagtcaactcattc

SEQ ID NO: 50994 - DNA, 25 bp, Probe sequence
tttagcaaattcgatagtcaactca

SEQ ID NO: 50995 - DNA, 25 bp, Probe sequence
tagcaaattcgatagtcaactcatt

SEQ ID NO: 50996 - DNA, 25 bp, Probe sequence
gcattagcaaccaactgtattcctt

SEQ ID NO: 50997 - DNA, 25 bp, Probe sequence
cattagcaaccaactgtattccttt

SEQ ID NO: 50998 - DNA, 25 bp, Probe sequence
cattagcaaccaactacgttcaatt

SEQ ID NO: 50999 - DNA, 25 bp, Probe sequence
attagcaaccaactgtattcctttg

SEQ ID NO: 51000 - DNA, 25 bp, Probe sequence
gttagcatccaactgtattcctttg

SEQ ID NO: 51001 - DNA, 25 bp, Probe sequence
ttagcatccaactgtattcctttgt

SEQ ID NO: 51002 - DNA, 25 bp, Probe sequence
ttagcaaccaactgtattcctttgt

SEQ ID NO: 51003 - DNA, 25 bp, Probe sequence
tagcatccaactgtattcctttgtc

SEQ ID NO: 51004 - DNA, 25 bp, Probe sequence
cgttagcatccaactgtattccttt

SEQ ID NO: 51005 - DNA, 25 bp, Probe sequence
ggaacgccaatttctacagacaatg

SEQ ID NO: 51006 - DNA, 25 bp, Probe sequence
gaacgccaatttctacagacaatgc

SEQ ID NO: 51007 - DNA, 25 bp, Probe sequence
gccaatttctacagacaatgcaagt

SEQ ID NO: 51008 - DNA, 25 bp, Probe sequence
tggaacgccaatttctacagacaat

SEQ ID NO: 51009 - DNA, 25 bp, Probe sequence
cgccaatttctacagacaatgcaag

SEQ ID NO: 51010 - DNA, 25 bp, Probe sequence
acgccaatttctacagacaatgcaa

SEQ ID NO: 51011 - DNA, 25 bp, Probe sequence
aacgccaatttctacagacaatgca

SEQ ID NO: 51012 - DNA, 25 bp, Probe sequence
caacatagagaaattggattcccaa

SEQ ID NO: 51013 - DNA, 25 bp, Probe sequence
ccaacatagagaaattggattccca

SEQ ID NO: 51014 - DNA, 25 bp, Probe sequence
tgtgaagaagttgttaaacgttgtt

SEQ ID NO: 51015 - DNA, 25 bp, Probe sequence
atgtgaagaagttgttaaacgttgt

SEQ ID NO: 51016 - DNA, 25 bp, Probe sequence
aaaatgtgaagaagttgttaaacgt

SEQ ID NO: 51017 - DNA, 25 bp, Probe sequence
aatgtgaagaagttgttaaacgttg

SEQ ID NO: 51018 - DNA, 25 bp, Probe sequence
gtgaagaagttgttaaacgttgtta

SEQ ID NO: 51019 - DNA, 25 bp, Probe sequence
aaatgtgaagaagttgttaaacgtt

SEQ ID NO: 51020 - DNA, 25 bp, Probe sequence
aagaagttgttaaacgttgttatgt

SEQ ID NO: 51021 - DNA, 25 bp, Probe sequence
tgaagaagttgttaaacgttgttat

SEQ ID NO: 51022 - DNA, 25 bp, Probe sequence
gaagaagttgttaaacgttgttatg

SEQ ID NO: 51023 - DNA, 25 bp, Probe sequence
atattacctatggcgattttcaagg

SEQ ID NO: 51024 - DNA, 25 bp, Probe sequence
aatattacctatggcgattttcaag

SEQ ID NO: 51025 - DNA, 25 bp, Probe sequence
cctatggcgattttcaaggtattga

SEQ ID NO: 51026 - DNA, 25 bp, Probe sequence
ttgttaaaacaacatatgcagtgtg

SEQ ID NO: 51027 - DNA, 25 bp, Probe sequence
tgttaaaacaacatatgcagtgtgc

SEQ ID NO: 51028 - DNA, 25 bp, Probe sequence
tgaaaacgttctcaattacatggta

SEQ ID NO: 51029 - DNA, 25 bp, Probe sequence
taatattacctatggcgattttcaa

SEQ ID NO: 51030 - DNA, 25 bp, Probe sequence
tttgttaaaacaacatatgcagtgt

SEQ ID NO: 51031 - DNA, 25 bp, Probe sequence
tattacctatggcgattttcaaggt

SEQ ID NO: 51032 - DNA, 25 bp, Probe sequence
ggatttccaatttctacaggcaatg

SEQ ID NO: 51033 - DNA, 25 bp, Probe sequence
caatttctacaggcaatggaagttg

SEQ ID NO: 51034 - DNA, 25 bp, Probe sequence
aatttctacaggcaatggaagttgg

SEQ ID NO: 51035 - DNA, 25 bp, Probe sequence
gatttccaatttctacaggcaatgg

SEQ ID NO: 51036 - DNA, 25 bp, Probe sequence
ccaatttctacaggcaatggaagtt

SEQ ID NO: 51037 - DNA, 25 bp, Probe sequence
tggatttccaatttctacaggcaat

SEQ ID NO: 51038 - DNA, 25 bp, Probe sequence
atttctacaggcaatggaagttggg

SEQ ID NO: 51039 - DNA, 25 bp, Probe sequence
ccaatttctacaggcaatgcaagtt

SEQ ID NO: 51040 - DNA, 25 bp, Probe sequence
caacatagtgaaattggctcctccc

SEQ ID NO: 51041 - DNA, 25 bp, Probe sequence
gccaatataccaaatggtgtgttat

SEQ ID NO: 51042 - DNA, 25 bp, Probe sequence
ccaatataccaaatggtgtgttatc

SEQ ID NO: 51043 - DNA, 25 bp, Probe sequence
aaacccatgatgaaattgtaaaacg

SEQ ID NO: 51044 - DNA, 25 bp, Probe sequence
gtgtgttatcattttgaaaacccat

SEQ ID NO: 51045 - DNA, 25 bp, Probe sequence
ttttgaaaacccatgatgaaattgt

SEQ ID NO: 51046 - DNA, 25 bp, Probe sequence
tgtgttatcattttgaaaacccatg

SEQ ID NO: 51047 - DNA, 25 bp, Probe sequence
caatataccaaatggtgtgttatca

SEQ ID NO: 51048 - DNA, 25 bp, Probe sequence
ggtgtgttatcattttgaaaaccca

SEQ ID NO: 51049 - DNA, 25 bp, Probe sequence
tggtgtgttatcattttgaaaaccc

SEQ ID NO: 51050 - DNA, 25 bp, Probe sequence
aggtactattatttggagtattgct

SEQ ID NO: 51051 - DNA, 25 bp, Probe sequence
actattatttggagtattgctacat

SEQ ID NO: 51052 - DNA, 25 bp, Probe sequence
ggtactattatttggagtattgcta

SEQ ID NO: 51053 - DNA, 25 bp, Probe sequence
taggtactattatttggagtattgc

SEQ ID NO: 51054 - DNA, 25 bp, Probe sequence
ctattatttggagtattgctacatt

SEQ ID NO: 51055 - DNA, 25 bp, Probe sequence
tcaagaatgatggaaataatgaatt

SEQ ID NO: 51056 - DNA, 25 bp, Probe sequence
gaatgatggaaataatgaatttagc

SEQ ID NO: 51057 - DNA, 25 bp, Probe sequence
tactattatttggagtattgctaca

SEQ ID NO: 51058 - DNA, 25 bp, Probe sequence
aatgatggaaataatgaatttagct

SEQ ID NO: 51059 - DNA, 25 bp, Probe sequence
tttcaacaaacatttcaaactggcg

SEQ ID NO: 51060 - DNA, 25 bp, Probe sequence
caaacatttcaaactggcgtcaaac

SEQ ID NO: 51061 - DNA, 25 bp, Probe sequence
aaacatttcaaactggcgtcaaaca

SEQ ID NO: 51062 - DNA, 25 bp, Probe sequence
acaaacatttcaaactggcgtcaaa

SEQ ID NO: 51063 - DNA, 25 bp, Probe sequence
aacaaacatttcaaactggcgtcaa

SEQ ID NO: 51064 - DNA, 25 bp, Probe sequence
ttcaacaaacatttcaaactggcgt

SEQ ID NO: 51065 - DNA, 25 bp, Probe sequence
tcaacaaacatttcaaactggcgtc

SEQ ID NO: 51066 - DNA, 25 bp, Probe sequence
ttttcaacaaacatttcaaactggc

SEQ ID NO: 51067 - DNA, 25 bp, Probe sequence
aacatttcaaactggcgtcaaacac

SEQ ID NO: 51068 - DNA, 25 bp, Probe sequence
tgtgttcattctgctacaaggactt

SEQ ID NO: 51069 - DNA, 25 bp, Probe sequence
tgttcattctgctacaaggactttg

SEQ ID NO: 51070 - DNA, 25 bp, Probe sequence
gtgttcattctgctacaaggacttt

SEQ ID NO: 51071 - DNA, 25 bp, Probe sequence
aaggactttgcacttaatcgaaatt

SEQ ID NO: 51072 - DNA, 25 bp, Probe sequence
atgagttgtgttcattctgctacaa

SEQ ID NO: 51073 - DNA, 25 bp, Probe sequence
gttcattctgctacaaggactttgc

SEQ ID NO: 51074 - DNA, 25 bp, Probe sequence
caaggactttgcacttaatcgaaat

SEQ ID NO: 51075 - DNA, 25 bp, Probe sequence
tacaaggactttgcacttaatcgaa

SEQ ID NO: 51076 - DNA, 25 bp, Probe sequence
aggactttgcacttaatcgaaatta

SEQ ID NO: 51077 - DNA, 25 bp, Probe sequence
aagaatgtgaatcaaaagatgcgat

SEQ ID NO: 51078 - DNA, 25 bp, Probe sequence
gaagaatgtgaatcaaaagatgcga

SEQ ID NO: 51079 - DNA, 25 bp, Probe sequence
agaatgtgaatcaaaagatgcgata

SEQ ID NO: 51080 - DNA, 25 bp, Probe sequence
tgtgaatcaaaagatgcgatatagt

SEQ ID NO: 51081 - DNA, 25 bp, Probe sequence
tgaagaatgtgaatcaaaagatgcg

SEQ ID NO: 51082 - DNA, 25 bp, Probe sequence
gaatgtgaatcaaaagatgcgatat

SEQ ID NO: 51083 - DNA, 25 bp, Probe sequence
atgtgaatcaaaagatgcgatatag

SEQ ID NO: 51084 - DNA, 25 bp, Probe sequence
aatgtgaatcaaaagatgcgatata

SEQ ID NO: 51085 - DNA, 25 bp, Probe sequence
gtgaatcaaaagatgcgatatagta

SEQ ID NO: 51086 - DNA, 25 bp, Probe sequence
tcaaacaaaacaagatatccaagat

SEQ ID NO: 51087 - DNA, 25 bp, Probe sequence
atcaaacaaaacaagatatccaaga

SEQ ID NO: 51088 - DNA, 25 bp, Probe sequence
acaaaacaagatatccaagatacac

SEQ ID NO: 51089 - DNA, 25 bp, Probe sequence
aacaagatatccaagatacactaaa

SEQ ID NO: 51090 - DNA, 25 bp, Probe sequence
aaacaagatatccaagatacactaa

SEQ ID NO: 51091 - DNA, 25 bp, Probe sequence
caaaacaagatatccaagatacact

SEQ ID NO: 51092 - DNA, 25 bp, Probe sequence
aatcaaacaaaacaagatatccaag

SEQ ID NO: 51093 - DNA, 25 bp, Probe sequence
acaagatatccaagatacactaaat

SEQ ID NO: 51094 - DNA, 25 bp, Probe sequence
aacaaaacaagatatccaagataca

SEQ ID NO: 51095 - DNA, 25 bp, Probe sequence
gattcccaatttctacagacaatgt

SEQ ID NO: 51096 - DNA, 25 bp, Probe sequence
atttctacagacaatgtaagttggg

SEQ ID NO: 51097 - DNA, 25 bp, Probe sequence
cccaatttctacagacaatgtaagt

SEQ ID NO: 51098 - DNA, 25 bp, Probe sequence
tcccaatttctacagacaatgtaag

SEQ ID NO: 51099 - DNA, 25 bp, Probe sequence
ttcccaatttctacagacaatgtaa

SEQ ID NO: 51100 - DNA, 25 bp, Probe sequence
attcccaatttctacagacaatgta

SEQ ID NO: 51101 - DNA, 25 bp, Probe sequence
aatttctacagacaatgtaagttgg

SEQ ID NO: 51102 - DNA, 25 bp, Probe sequence
ccaatttctacagacaatgtaagtt

SEQ ID NO: 51103 - DNA, 25 bp, Probe sequence
caatttctacagacaatgtaagttg

SEQ ID NO: 51104 - DNA, 25 bp, Probe sequence
agttaattataagagtcgtcggtgt

SEQ ID NO: 51105 - DNA, 25 bp, Probe sequence
aagttaattataagagtcgtcggtg

SEQ ID NO: 51106 - DNA, 25 bp, Probe sequence
gttaattataagagtcgtcggtgta

SEQ ID NO: 51107 - DNA, 25 bp, Probe sequence
aattataagagtcgtcggtgtatta

SEQ ID NO: 51108 - DNA, 25 bp, Probe sequence
taattataagagtcgtcggtgtatt

SEQ ID NO: 51109 - DNA, 25 bp, Probe sequence
ttaattataagagtcgtcggtgtat

SEQ ID NO: 51110 - DNA, 25 bp, Probe sequence
ttataagagtcgtcggtgtattatt

SEQ ID NO: 51111 - DNA, 25 bp, Probe sequence
attataagagtcgtcggtgtattat

SEQ ID NO: 51112 - DNA, 25 bp, Probe sequence
tataagagtcgtcggtgtattattt

SEQ ID NO: 51113 - DNA, 25 bp, Probe sequence
ggaaccccaatttctacagacaatg

SEQ ID NO: 51114 - DNA, 25 bp, Probe sequence
gaaccccaatttctacagacaatgc

SEQ ID NO: 51115 - DNA, 25 bp, Probe sequence
tggaaccccaatttctacagacaat

SEQ ID NO: 51116 - DNA, 25 bp, Probe sequence
ccccaatttctacagacaatgcaag

SEQ ID NO: 51117 - DNA, 25 bp, Probe sequence
accccaatttctacagacaatgcaa

SEQ ID NO: 51118 - DNA, 25 bp, Probe sequence
aaccccaatttctacagacaatgca

SEQ ID NO: 51119 - DNA, 25 bp, Probe sequence
caacatagaagctggcgaaaagtca

SEQ ID NO: 51120 - DNA, 25 bp, Probe sequence
aacatagaagctggcgaaaagtcag

SEQ ID NO: 51121 - DNA, 25 bp, Probe sequence
tctacagacaatgcaagttggggta

SEQ ID NO: 51122 - DNA, 25 bp, Probe sequence
atgtcttaggctctattccttcatt

SEQ ID NO: 51123 - DNA, 25 bp, Probe sequence
ttatgtcttaggctctattccttca

SEQ ID NO: 51124 - DNA, 25 bp, Probe sequence
ttcattcggtcaactactaccaata

SEQ ID NO: 51125 - DNA, 25 bp, Probe sequence
tatgtcttaggctctattccttcat

SEQ ID NO: 51126 - DNA, 25 bp, Probe sequence
tcattcggtcaactactaccaatat

SEQ ID NO: 51127 - DNA, 25 bp, Probe sequence
tattgtagagcctaagacattgatt

SEQ ID NO: 51128 - DNA, 25 bp, Probe sequence
attatgtcttaggctctattccttc

SEQ ID NO: 51129 - DNA, 25 bp, Probe sequence
cttgcacattattgtaagctgactt

SEQ ID NO: 51130 - DNA, 25 bp, Probe sequence
aacttgcacattattgtaagctgac

SEQ ID NO: 51131 - DNA, 25 bp, Probe sequence
cggaaagtcagcttacaataatgtg

SEQ ID NO: 51132 - DNA, 25 bp, Probe sequence
ggaaagtcagcttacaataatgtgc

SEQ ID NO: 51133 - DNA, 25 bp, Probe sequence
gcggaaagtcagcttacaataatgt

SEQ ID NO: 51134 - DNA, 25 bp, Probe sequence
ggcggaaagtcagcttacaataatg

SEQ ID NO: 51135 - DNA, 25 bp, Probe sequence
tggcggaaagtcagcttacaataat

SEQ ID NO: 51136 - DNA, 25 bp, Probe sequence
ctggcggaaagtcagcttacaataa

SEQ ID NO: 51137 - DNA, 25 bp, Probe sequence
caacatagtgaaattggattcccaa

SEQ ID NO: 51138 - DNA, 25 bp, Probe sequence
ccaacatagtgaaattggattccca

SEQ ID NO: 51139 - DNA, 25 bp, Probe sequence
ttacaataatgtgcaagttggggag

SEQ ID NO: 51140 - DNA, 25 bp, Probe sequence
acatagactactatattttcccatt

SEQ ID NO: 51141 - DNA, 25 bp, Probe sequence
aacaagtagaaattttagaaacact

SEQ ID NO: 51142 - DNA, 25 bp, Probe sequence
acaagtagaaattttagaaacactt

SEQ ID NO: 51143 - DNA, 25 bp, Probe sequence
aagtgacctagatggctttattgtt

SEQ ID NO: 51144 - DNA, 25 bp, Probe sequence
aaagccatctatatcactccataaa

SEQ ID NO: 51145 - DNA, 25 bp, Probe sequence
gcaaacacgttatgaataaagaagg

SEQ ID NO: 51146 - DNA, 25 bp, Probe sequence
tgagcaaacacgttatgaataaaga

SEQ ID NO: 51147 - DNA, 25 bp, Probe sequence
aaagtgacctagatggctttattgt

SEQ ID NO: 51148 - DNA, 25 bp, Probe sequence
ttgagcaaacacgttatgaataaag

SEQ ID NO: 51149 - DNA, 25 bp, Probe sequence
tcaactttacattaactaaacagca

SEQ ID NO: 51150 - DNA, 25 bp, Probe sequence
gagcaaacacgttatgaataaagaa

SEQ ID NO: 51151 - DNA, 25 bp, Probe sequence
agcaaacacgttatgaataaagaag

SEQ ID NO: 51152 - DNA, 25 bp, Probe sequence
cgtcatctctaacaagccaattcaa

SEQ ID NO: 51153 - DNA, 25 bp, Probe sequence
atacgtcatctctaacaagccaatt

SEQ ID NO: 51154 - DNA, 25 bp, Probe sequence
ttatacgtcatctctaacaagccaa

SEQ ID NO: 51155 - DNA, 25 bp, Probe sequence
tatacgtcatctctaacaagccaat

SEQ ID NO: 51156 - DNA, 25 bp, Probe sequence
tacgtcatctctaacaagccaattc

SEQ ID NO: 51157 - DNA, 25 bp, Probe sequence
agccaattcaaatccagtttacttc

SEQ ID NO: 51158 - DNA, 25 bp, Probe sequence
gtcatctctaacaagccaattcaaa

SEQ ID NO: 51159 - DNA, 25 bp, Probe sequence
gccaattcaaatccagtttacttca

SEQ ID NO: 51160 - DNA, 25 bp, Probe sequence
caagccaattcaaatccagtttact

SEQ ID NO: 51161 - DNA, 25 bp, Probe sequence
gtttgatacctactgcatatcccat

SEQ ID NO: 51162 - DNA, 25 bp, Probe sequence
ttgtttgatacctactgcatatccc

SEQ ID NO: 51163 - DNA, 25 bp, Probe sequence
tttgtttgatacctactgcatatcc

SEQ ID NO: 51164 - DNA, 25 bp, Probe sequence
tttgatacctactgcatatcccata

SEQ ID NO: 51165 - DNA, 25 bp, Probe sequence
tgtttgatacctactgcatatccca

SEQ ID NO: 51166 - DNA, 25 bp, Probe sequence
ttgatacctactgcatatcccatat

SEQ ID NO: 51167 - DNA, 25 bp, Probe sequence
tgattttaatcgttttagaggtgct

SEQ ID NO: 51168 - DNA, 25 bp, Probe sequence
tgttatatgactaaatctcgtgaaa

SEQ ID NO: 51169 - DNA, 25 bp, Probe sequence
atgattttaatcgttttagaggtgc

SEQ ID NO: 51170 - DNA, 25 bp, Probe sequence
ggatttcacttgaccacttttgtta

SEQ ID NO: 51171 - DNA, 25 bp, Probe sequence
ggtcaagttttggtcaagtaaatgt

SEQ ID NO: 51172 - DNA, 25 bp, Probe sequence
tggtcaagttttggtcaagtaaatg

SEQ ID NO: 51173 - DNA, 25 bp, Probe sequence
gatttggtcaagttttggtcaagta

SEQ ID NO: 51174 - DNA, 25 bp, Probe sequence
tttggtcaagttttggtcaagtaaa

SEQ ID NO: 51175 - DNA, 25 bp, Probe sequence
ttggtcaagttttggtcaagtaaat

SEQ ID NO: 51176 - DNA, 25 bp, Probe sequence
atttggtcaagttttggtcaagtaa

SEQ ID NO: 51177 - DNA, 25 bp, Probe sequence
aaatggatttggtcaagttttggtc

SEQ ID NO: 51178 - DNA, 25 bp, Probe sequence
gatttcacttgaccacttttgttaa

SEQ ID NO: 51179 - DNA, 25 bp, Probe sequence
taatttcaactatgattatgcacat

SEQ ID NO: 51180 - DNA, 25 bp, Probe sequence
tttcaactatgattatgcacataaa

SEQ ID NO: 51181 - DNA, 25 bp, Probe sequence
atttcaactatgattatgcacataa

SEQ ID NO: 51182 - DNA, 25 bp, Probe sequence
aatttcaactatgattatgcacata

SEQ ID NO: 51183 - DNA, 25 bp, Probe sequence
ataatttcaactatgattatgcaca

SEQ ID NO: 51184 - DNA, 25 bp, Probe sequence
actatgattatgcacataaaattgt

SEQ ID NO: 51185 - DNA, 25 bp, Probe sequence
ttcaactatgattatgcacataaaa

SEQ ID NO: 51186 - DNA, 25 bp, Probe sequence
tcaactatgattatgcacataaaat

SEQ ID NO: 51187 - DNA, 25 bp, Probe sequence
tgattatgcacataaaattgtatca

SEQ ID NO: 51188 - DNA, 25 bp, Probe sequence
cacaattagatggaaatgtaactgc

SEQ ID NO: 51189 - DNA, 25 bp, Probe sequence
atgttagattcacaattagatggaa

SEQ ID NO: 51190 - DNA, 25 bp, Probe sequence
tcacaattagatggaaatgtaactg

SEQ ID NO: 51191 - DNA, 25 bp, Probe sequence
caattagatggaaatgtaactgcaa

SEQ ID NO: 51192 - DNA, 25 bp, Probe sequence
acaattagatggaaatgtaactgca

SEQ ID NO: 51193 - DNA, 25 bp, Probe sequence
aattagatggaaatgtaactgcaaa

SEQ ID NO: 51194 - DNA, 25 bp, Probe sequence
ttcacaattagatggaaatgtaact

SEQ ID NO: 51195 - DNA, 25 bp, Probe sequence
tatgttagattcacaattagatgga

SEQ ID NO: 51196 - DNA, 25 bp, Probe sequence
tgttagattcacaattagatggaaa

SEQ ID NO: 51197 - DNA, 25 bp, Probe sequence
gttcatttattttcactccttaaca

SEQ ID NO: 51198 - DNA, 25 bp, Probe sequence
tgttcatttattttcactccttaac

SEQ ID NO: 51199 - DNA, 25 bp, Probe sequence
attttcactccttaacaataacatt

SEQ ID NO: 51200 - DNA, 25 bp, Probe sequence
ttcatttattttcactccttaacaa

SEQ ID NO: 51201 - DNA, 25 bp, Probe sequence
tcatttattttcactccttaacaat

SEQ ID NO: 51202 - DNA, 25 bp, Probe sequence
atgttcatttattttcactccttaa

SEQ ID NO: 51203 - DNA, 25 bp, Probe sequence
gtgactgtattttcatttgaaatgt

SEQ ID NO: 51204 - DNA, 25 bp, Probe sequence
aaatgttcatttattttcactcctt

SEQ ID NO: 51205 - DNA, 25 bp, Probe sequence
aatgttcatttattttcactcctta

SEQ ID NO: 51206 - DNA, 25 bp, Probe sequence
gaaacatatatcacgttacgatggg

SEQ ID NO: 51207 - DNA, 25 bp, Probe sequence
ggaaacatatatcacgttacgatgg

SEQ ID NO: 51208 - DNA, 25 bp, Probe sequence
tggaaacatatatcacgttacgatg

SEQ ID NO: 51209 - DNA, 25 bp, Probe sequence
ttggaaacatatatcacgttacgat

SEQ ID NO: 51210 - DNA, 25 bp, Probe sequence
attggaaacatatatcacgttacga

SEQ ID NO: 51211 - DNA, 25 bp, Probe sequence
aattggaaacatatatcacgttacg

SEQ ID NO: 51212 - DNA, 25 bp, Probe sequence
agcattaaagttatagatttgggta

SEQ ID NO: 51213 - DNA, 25 bp, Probe sequence
tagcattaaagttatagatttgggt

SEQ ID NO: 51214 - DNA, 25 bp, Probe sequence
aaacatatatcacgttacgatgggg

SEQ ID NO: 51215 - DNA, 25 bp, Probe sequence
aatacacctctgctgattaacaaca

SEQ ID NO: 51216 - DNA, 25 bp, Probe sequence
ctctgctgattaacaacacatactt

SEQ ID NO: 51217 - DNA, 25 bp, Probe sequence
cctctgctgattaacaacacatact

SEQ ID NO: 51218 - DNA, 25 bp, Probe sequence
acctctgctgattaacaacacatac

SEQ ID NO: 51219 - DNA, 25 bp, Probe sequence
cacctctgctgattaacaacacata

SEQ ID NO: 51220 - DNA, 25 bp, Probe sequence
atacacctctgctgattaacaacac

SEQ ID NO: 51221 - DNA, 25 bp, Probe sequence
tctgctgattaacaacacatacttg

SEQ ID NO: 51222 - DNA, 25 bp, Probe sequence
tacacctctgctgattaacaacaca

SEQ ID NO: 51223 - DNA, 25 bp, Probe sequence
acacctctgctgattaacaacacat

SEQ ID NO: 51224 - DNA, 25 bp, Probe sequence
ggtgtattgtgtctttcgcatttat

SEQ ID NO: 51225 - DNA, 25 bp, Probe sequence
tggtgtattgtgtctttcgcattta

SEQ ID NO: 51226 - DNA, 25 bp, Probe sequence
ttggtgtattgtgtctttcgcattt

SEQ ID NO: 51227 - DNA, 25 bp, Probe sequence
gtgtattgtgtctttcgcatttata

SEQ ID NO: 51228 - DNA, 25 bp, Probe sequence
ttggtgtttcactataatgttgtgt

SEQ ID NO: 51229 - DNA, 25 bp, Probe sequence
tggtgtttcactataatgttgtgta

SEQ ID NO: 51230 - DNA, 25 bp, Probe sequence
tttggtgtttcactataatgttgtg

SEQ ID NO: 51231 - DNA, 25 bp, Probe sequence
gtttggtgtttcactataatgttgt

SEQ ID NO: 51232 - DNA, 25 bp, Probe sequence
ttgtgtctttcgcatttatactaat

SEQ ID NO: 51233 - DNA, 25 bp, Probe sequence
atgattatacataacaaggcccgtt

SEQ ID NO: 51234 - DNA, 25 bp, Probe sequence
tgattatacataacaaggcccgttt

SEQ ID NO: 51235 - DNA, 25 bp, Probe sequence
tatgattatacataacaaggcccgt

SEQ ID NO: 51236 - DNA, 25 bp, Probe sequence
tgtggttagtcattatgattataca

SEQ ID NO: 51237 - DNA, 25 bp, Probe sequence
gattatacataacaaggcccgtttt

SEQ ID NO: 51238 - DNA, 25 bp, Probe sequence
ttatgattatacataacaaggcccg

SEQ ID NO: 51239 - DNA, 25 bp, Probe sequence
tcattatgattatacataacaaggc

SEQ ID NO: 51240 - DNA, 25 bp, Probe sequence
cattatgattatacataacaaggcc

SEQ ID NO: 51241 - DNA, 25 bp, Probe sequence
attatgattatacataacaaggccc

SEQ ID NO: 51242 - DNA, 25 bp, Probe sequence
acaccacaatcaacaaatttaacga

SEQ ID NO: 51243 - DNA, 25 bp, Probe sequence
ccacaatcaacaaatttaacgagga

SEQ ID NO: 51244 - DNA, 25 bp, Probe sequence
caccacaatcaacaaatttaacgag

SEQ ID NO: 51245 - DNA, 25 bp, Probe sequence
accacaatcaacaaatttaacgagg

SEQ ID NO: 51246 - DNA, 25 bp, Probe sequence
aacaccacaatcaacaaatttaacg

SEQ ID NO: 51247 - DNA, 25 bp, Probe sequence
cacaatcaacaaatttaacgaggaa

SEQ ID NO: 51248 - DNA, 25 bp, Probe sequence
acaatcaacaaatttaacgaggaag

SEQ ID NO: 51249 - DNA, 25 bp, Probe sequence
caatcaacaaatttaacgaggaaga

SEQ ID NO: 51250 - DNA, 25 bp, Probe sequence
aatcaacaaatttaacgaggaagaa

SEQ ID NO: 51251 - DNA, 25 bp, Probe sequence
tgtgtctaaatataggtgtgattca

SEQ ID NO: 51252 - DNA, 25 bp, Probe sequence
gtgtctaaatataggtgtgattcag

SEQ ID NO: 51253 - DNA, 25 bp, Probe sequence
tgtctaaatataggtgtgattcaga

SEQ ID NO: 51254 - DNA, 25 bp, Probe sequence
ttgtgtctaaatataggtgtgattc

SEQ ID NO: 51255 - DNA, 25 bp, Probe sequence
tgtgaacaaattagttaccatgatt

SEQ ID NO: 51256 - DNA, 25 bp, Probe sequence
atgtgaacaaattagttaccatgat

SEQ ID NO: 51257 - DNA, 25 bp, Probe sequence
aaattgtgtctaaatataggtgtga

SEQ ID NO: 51258 - DNA, 25 bp, Probe sequence
attgtgtctaaatataggtgtgatt

SEQ ID NO: 51259 - DNA, 25 bp, Probe sequence
aattgtgtctaaatataggtgtgat

SEQ ID NO: 51260 - DNA, 25 bp, Probe sequence
tatggataaagctaaagacgcagta

SEQ ID NO: 51261 - DNA, 25 bp, Probe sequence
ttatggataaagctaaagacgcagt

SEQ ID NO: 51262 - DNA, 25 bp, Probe sequence
ggataaagctaaagacgcagtagaa

SEQ ID NO: 51263 - DNA, 25 bp, Probe sequence
atggataaagctaaagacgcagtag

SEQ ID NO: 51264 - DNA, 25 bp, Probe sequence
gataaagctaaagacgcagtagaaa

SEQ ID NO: 51265 - DNA, 25 bp, Probe sequence
atacaggatcgaataacgaagagaa

SEQ ID NO: 51266 - DNA, 25 bp, Probe sequence
aatgaatatacaggatcgaataacg

SEQ ID NO: 51267 - DNA, 25 bp, Probe sequence
tttatggataaagctaaagacgcag

SEQ ID NO: 51268 - DNA, 25 bp, Probe sequence
tggataaagctaaagacgcagtaga

SEQ ID NO: 51269 - DNA, 25 bp, Probe sequence
tgagcatcctcctatcaattactat

SEQ ID NO: 51270 - DNA, 25 bp, Probe sequence
taacttcatttgagcatcctcctat

SEQ ID NO: 51271 - DNA, 25 bp, Probe sequence
ataacttcatttgagcatcctccta

SEQ ID NO: 51272 - DNA, 25 bp, Probe sequence
aacttcatttgagcatcctcctatc

SEQ ID NO: 51273 - DNA, 25 bp, Probe sequence
gataacttcatttgagcatcctcct

SEQ ID NO: 51274 - DNA, 25 bp, Probe sequence
tgataacttcatttgagcatcctcc

SEQ ID NO: 51275 - DNA, 25 bp, Probe sequence
gagcatcctcctatcaattactata

SEQ ID NO: 51276 - DNA, 25 bp, Probe sequence
acttcatttgagcatcctcctatca

SEQ ID NO: 51277 - DNA, 25 bp, Probe sequence
agcatcctcctatcaattactatat

SEQ ID NO: 51278 - DNA, 25 bp, Probe sequence
gcacatcaatattcagtatcagcaa

SEQ ID NO: 51279 - DNA, 25 bp, Probe sequence
tcaccaagataacttatcggatgaa

SEQ ID NO: 51280 - DNA, 25 bp, Probe sequence
tcaatcaccaagataacttatcgga

SEQ ID NO: 51281 - DNA, 25 bp, Probe sequence
atcaccaagataacttatcggatga

SEQ ID NO: 51282 - DNA, 25 bp, Probe sequence
accaagataacttatcggatgaaga

SEQ ID NO: 51283 - DNA, 25 bp, Probe sequence
caccaagataacttatcggatgaag

SEQ ID NO: 51284 - DNA, 25 bp, Probe sequence
tcaatattcagtatcagcaatgtgt

SEQ ID NO: 51285 - DNA, 25 bp, Probe sequence
ttcaatcaccaagataacttatcgg

SEQ ID NO: 51286 - DNA, 25 bp, Probe sequence
aatcaccaagataacttatcggatg

SEQ ID NO: 51287 - DNA, 25 bp, Probe sequence
taatatgcatcaaagccaatcaacg

SEQ ID NO: 51288 - DNA, 25 bp, Probe sequence
ttaatatgcatcaaagccaatcaac

SEQ ID NO: 51289 - DNA, 25 bp, Probe sequence
atatgcatcaaagccaatcaacgat

SEQ ID NO: 51290 - DNA, 25 bp, Probe sequence
aatatgcatcaaagccaatcaacga

SEQ ID NO: 51291 - DNA, 25 bp, Probe sequence
tttaatatgcatcaaagccaatcaa

SEQ ID NO: 51292 - DNA, 25 bp, Probe sequence
atttaatatgcatcaaagccaatca

SEQ ID NO: 51293 - DNA, 25 bp, Probe sequence
caacgattgattttcaccaactcaa

SEQ ID NO: 51294 - DNA, 25 bp, Probe sequence
tcaacgattgattttcaccaactca

SEQ ID NO: 51295 - DNA, 25 bp, Probe sequence
tatgcatcaaagccaatcaacgatt

SEQ ID NO: 51296 - DNA, 25 bp, Probe sequence
aaggttctcatgttctgctacagtt

SEQ ID NO: 51297 - DNA, 25 bp, Probe sequence
caaggttctcatgttctgctacagt

SEQ ID NO: 51298 - DNA, 25 bp, Probe sequence
agtttgcggtctttggaagatatat

SEQ ID NO: 51299 - DNA, 25 bp, Probe sequence
ggttctcatgttctgctacagtttg

SEQ ID NO: 51300 - DNA, 25 bp, Probe sequence
aggttctcatgttctgctacagttt

SEQ ID NO: 51301 - DNA, 25 bp, Probe sequence
cagtttgcggtctttggaagatata

SEQ ID NO: 51302 - DNA, 25 bp, Probe sequence
attagaccatttcaaaatcgcaagg

SEQ ID NO: 51303 - DNA, 25 bp, Probe sequence
catttcaaaatcgcaaggttctcat

SEQ ID NO: 51304 - DNA, 25 bp, Probe sequence
gttctcatgttctgctacagtttgc

SEQ ID NO: 51305 - DNA, 25 bp, Probe sequence
ctaaacctttgtctctgcttcaatt

SEQ ID NO: 51306 - DNA, 25 bp, Probe sequence
aaacctttgtctctgcttcaatttc

SEQ ID NO: 51307 - DNA, 25 bp, Probe sequence
taaacctttgtctctgcttcaattt

SEQ ID NO: 51308 - DNA, 25 bp, Probe sequence
cccgctgaaagtatctatatttaca

SEQ ID NO: 51309 - DNA, 25 bp, Probe sequence
aacctttgtctctgcttcaatttca

SEQ ID NO: 51310 - DNA, 25 bp, Probe sequence
tcccgctgaaagtatctatatttac

SEQ ID NO: 51311 - DNA, 25 bp, Probe sequence
tgttatatcgcaaagtgacatttct

SEQ ID NO: 51312 - DNA, 25 bp, Probe sequence
gctaaacctttgtctctgcttcaat

SEQ ID NO: 51313 - DNA, 25 bp, Probe sequence
aaataattcccgctgaaagtatcta

SEQ ID NO: 51314 - DNA, 25 bp, Probe sequence
acaaagttatattggcagtagttga

SEQ ID NO: 51315 - DNA, 25 bp, Probe sequence
caaagttatattggcagtagttgac

SEQ ID NO: 51316 - DNA, 25 bp, Probe sequence
aaagttatattggcagtagttgact

SEQ ID NO: 51317 - DNA, 25 bp, Probe sequence
atgtctggtacacaaatcaatgttt

SEQ ID NO: 51318 - DNA, 25 bp, Probe sequence
ctatgtctggtacacaaatcaatgt

SEQ ID NO: 51319 - DNA, 25 bp, Probe sequence
actatgtctggtacacaaatcaatg

SEQ ID NO: 51320 - DNA, 25 bp, Probe sequence
tcggatttctaatttctacagacat

SEQ ID NO: 51321 - DNA, 25 bp, Probe sequence
atcggatttctaatttctacagaca

SEQ ID NO: 51322 - DNA, 25 bp, Probe sequence
tggattcccaatttctacagacatt

SEQ ID NO: 51323 - DNA, 25 bp, Probe sequence
ggtaaagaaatggaacaaatctctg

SEQ ID NO: 51324 - DNA, 25 bp, Probe sequence
aggtaaagaaatggaacaaatctct

SEQ ID NO: 51325 - DNA, 25 bp, Probe sequence
gtaaagaaatggaacaaatctctga

SEQ ID NO: 51326 - DNA, 25 bp, Probe sequence
aaagaaatggaacaaatctctgatc

SEQ ID NO: 51327 - DNA, 25 bp, Probe sequence
taggtaaagaaatggaacaaatctc

SEQ ID NO: 51328 - DNA, 25 bp, Probe sequence
acagtatggtaacggattttgaaga

SEQ ID NO: 51329 - DNA, 25 bp, Probe sequence
agaagaaaacagtatggtaacggat

SEQ ID NO: 51330 - DNA, 25 bp, Probe sequence
aagaagaaaacagtatggtaacgga

SEQ ID NO: 51331 - DNA, 25 bp, Probe sequence
gaagaagaaaacagtatggtaacgg

SEQ ID NO: 51332 - DNA, 25 bp, Probe sequence
aaagaaagtcaaccaaggatggatt

SEQ ID NO: 51333 - DNA, 25 bp, Probe sequence
aagaaagtcaaccaaggatggattc

SEQ ID NO: 51334 - DNA, 25 bp, Probe sequence
aaacaaaagaaagtcaaccaaggat

SEQ ID NO: 51335 - DNA, 25 bp, Probe sequence
aacaaaagaaagtcaaccaaggatg

SEQ ID NO: 51336 - DNA, 25 bp, Probe sequence
caaacaaaagaaagtcaaccaagga

SEQ ID NO: 51337 - DNA, 25 bp, Probe sequence
acaaacaaaagaaagtcaaccaagg

SEQ ID NO: 51338 - DNA, 25 bp, Probe sequence
ttaatccttggttgactctttattt

SEQ ID NO: 51339 - DNA, 25 bp, Probe sequence
tttaatccttggttgactctttatt

SEQ ID NO: 51340 - DNA, 25 bp, Probe sequence
tacaaacaaaagaaagtcaaccaag

SEQ ID NO: 51341 - DNA, 25 bp, Probe sequence
attggtaacatcgcagcttatagta

SEQ ID NO: 51342 - DNA, 25 bp, Probe sequence
ttggtaacatcgcagcttatagtac

SEQ ID NO: 51343 - DNA, 25 bp, Probe sequence
aacattggtaacatcgcagcttata

SEQ ID NO: 51344 - DNA, 25 bp, Probe sequence
cattggtaacatcgcagcttatagt

SEQ ID NO: 51345 - DNA, 25 bp, Probe sequence
acattggtaacatcgcagcttatag

SEQ ID NO: 51346 - DNA, 25 bp, Probe sequence
cataatggatgaagttgaagtacca

SEQ ID NO: 51347 - DNA, 25 bp, Probe sequence
ataatggatgaagttgaagtaccaa

SEQ ID NO: 51348 - DNA, 25 bp, Probe sequence
gtaacatcgcagcttatagtacttg

SEQ ID NO: 51349 - DNA, 25 bp, Probe sequence
ggtaacatcgcagcttatagtactt

SEQ ID NO: 51350 - DNA, 25 bp, Probe sequence
aaaagggagtggtaagtatgaatct

SEQ ID NO: 51351 - DNA, 25 bp, Probe sequence
gtggcacattttattccaaaagatg

SEQ ID NO: 51352 - DNA, 25 bp, Probe sequence
tgtggcacattttattccaaaagat

SEQ ID NO: 51353 - DNA, 25 bp, Probe sequence
tagtgtggcacattttattccaaaa

SEQ ID NO: 51354 - DNA, 25 bp, Probe sequence
atagtgtggcacattttattccaaa

SEQ ID NO: 51355 - DNA, 25 bp, Probe sequence
gtgtggcacattttattccaaaaga

SEQ ID NO: 51356 - DNA, 25 bp, Probe sequence
agtgtggcacattttattccaaaag

SEQ ID NO: 51357 - DNA, 25 bp, Probe sequence
tatagtgtggcacattttattccaa

SEQ ID NO: 51358 - DNA, 25 bp, Probe sequence
tggcacattttattccaaaagatgt

SEQ ID NO: 51359 - DNA, 25 bp, Probe sequence
agatgaaaggcatcatgttgataaa

SEQ ID NO: 51360 - DNA, 25 bp, Probe sequence
tagatgaaaggcatcatgttgataa

SEQ ID NO: 51361 - DNA, 25 bp, Probe sequence
ttatagatgaaaggcatcatgttga

SEQ ID NO: 51362 - DNA, 25 bp, Probe sequence
atagatgaaaggcatcatgttgata

SEQ ID NO: 51363 - DNA, 25 bp, Probe sequence
tatagatgaaaggcatcatgttgat

SEQ ID NO: 51364 - DNA, 25 bp, Probe sequence
tgattatagatgaaaggcatcatgt

SEQ ID NO: 51365 - DNA, 25 bp, Probe sequence
attatagatgaaaggcatcatgttg

SEQ ID NO: 51366 - DNA, 25 bp, Probe sequence
gattatagatgaaaggcatcatgtt

SEQ ID NO: 51367 - DNA, 25 bp, Probe sequence
ttgattatagatgaaaggcatcatg

SEQ ID NO: 51368 - DNA, 25 bp, Probe sequence
aaacgtaatcaaattgaaagccttt

SEQ ID NO: 51369 - DNA, 25 bp, Probe sequence
gccttttctcaagattttcataacc

SEQ ID NO: 51370 - DNA, 25 bp, Probe sequence
taaacgtaatcaaattgaaagcctt

SEQ ID NO: 51371 - DNA, 25 bp, Probe sequence
ttaaacgtaatcaaattgaaagcct

SEQ ID NO: 51372 - DNA, 25 bp, Probe sequence
agccttttctcaagattttcataac

SEQ ID NO: 51373 - DNA, 25 bp, Probe sequence
tttaaacgtaatcaaattgaaagcc

SEQ ID NO: 51374 - DNA, 25 bp, Probe sequence
ccttttctcaagattttcataacct

SEQ ID NO: 51375 - DNA, 25 bp, Probe sequence
aagccttttctcaagattttcataa

SEQ ID NO: 51376 - DNA, 25 bp, Probe sequence
aaagccttttctcaagattttcata

SEQ ID NO: 51377 - DNA, 25 bp, Probe sequence
tctgatgattgtagtatgtactcaa

SEQ ID NO: 51378 - DNA, 25 bp, Probe sequence
atctgatgattgtagtatgtactca

SEQ ID NO: 51379 - DNA, 25 bp, Probe sequence
ctgatgattgtagtatgtactcaaa

SEQ ID NO: 51380 - DNA, 25 bp, Probe sequence
tatctgatgattgtagtatgtactc

SEQ ID NO: 51381 - DNA, 25 bp, Probe sequence
agaaagtttaatatcctcgtatgat

SEQ ID NO: 51382 - DNA, 25 bp, Probe sequence
tagaaagtttaatatcctcgtatga

SEQ ID NO: 51383 - DNA, 25 bp, Probe sequence
atgattgtagtatgtactcaaaagt

SEQ ID NO: 51384 - DNA, 25 bp, Probe sequence
tgatgattgtagtatgtactcaaaa

SEQ ID NO: 51385 - DNA, 25 bp, Probe sequence
gatgattgtagtatgtactcaaaag

SEQ ID NO: 51386 - DNA, 25 bp, Probe sequence
ccatcagtaaaacctatttgcgaaa

SEQ ID NO: 51387 - DNA, 25 bp, Probe sequence
aagaccatcagtaaaacctatttgc

SEQ ID NO: 51388 - DNA, 25 bp, Probe sequence
aatccaaaacacaaacaaagacaag

SEQ ID NO: 51389 - DNA, 25 bp, Probe sequence
atccaaaacacaaacaaagacaagg

SEQ ID NO: 51390 - DNA, 25 bp, Probe sequence
aaatccaaaacacaaacaaagacaa

SEQ ID NO: 51391 - DNA, 25 bp, Probe sequence
aaaatccaaaacacaaacaaagaca

SEQ ID NO: 51392 - DNA, 25 bp, Probe sequence
accatcagtaaaacctatttgcgaa

SEQ ID NO: 51393 - DNA, 25 bp, Probe sequence
aggtaaagtaatggtaatttgtgaa

SEQ ID NO: 51394 - DNA, 25 bp, Probe sequence
aaggtaaagtaatggtaatttgtga

SEQ ID NO: 51395 - DNA, 25 bp, Probe sequence
aagcacaatggaaagaatcgttaat

SEQ ID NO: 51396 - DNA, 25 bp, Probe sequence
caagcacaatggaaagaatcgttaa

SEQ ID NO: 51397 - DNA, 25 bp, Probe sequence
agcacaatggaaagaatcgttaata

SEQ ID NO: 51398 - DNA, 25 bp, Probe sequence
acaagcacaatggaaagaatcgtta

SEQ ID NO: 51399 - DNA, 25 bp, Probe sequence
gcacaatggaaagaatcgttaatat

SEQ ID NO: 51400 - DNA, 25 bp, Probe sequence
atgacaagcacaatggaaagaatcg

SEQ ID NO: 51401 - DNA, 25 bp, Probe sequence
gacaagcacaatggaaagaatcgtt

SEQ ID NO: 51402 - DNA, 25 bp, Probe sequence
tgacaagcacaatggaaagaatcgt

SEQ ID NO: 51403 - DNA, 25 bp, Probe sequence
cacaatggaaagaatcgttaatata

SEQ ID NO: 51404 - DNA, 25 bp, Probe sequence
aaattctacagacaatgcaagttgg

SEQ ID NO: 51405 - DNA, 25 bp, Probe sequence
agaaattctacagacaatgcaagtt

SEQ ID NO: 51406 - DNA, 25 bp, Probe sequence
aagaaattctacagacaatgcaagt

SEQ ID NO: 51407 - DNA, 25 bp, Probe sequence
gaaattctacagacaatgcaagttg

SEQ ID NO: 51408 - DNA, 25 bp, Probe sequence
aagtcagcatacaataatgtgcaag

SEQ ID NO: 51409 - DNA, 25 bp, Probe sequence
tcagcatacaataatgtgcaagttg

SEQ ID NO: 51410 - DNA, 25 bp, Probe sequence
agtcagcatacaataatgtgcaagt

SEQ ID NO: 51411 - DNA, 25 bp, Probe sequence
cagcatacaataatgtgcaagttgg

SEQ ID NO: 51412 - DNA, 25 bp, Probe sequence
aaagaaattctacagacaatgcaag

SEQ ID NO: 51413 - DNA, 25 bp, Probe sequence
tgaagtgctgaggtttatatcattt

SEQ ID NO: 51414 - DNA, 25 bp, Probe sequence
ttatgaagtgctgaggtttatatca

SEQ ID NO: 51415 - DNA, 25 bp, Probe sequence
tttatgaagtgctgaggtttatatc

SEQ ID NO: 51416 - DNA, 25 bp, Probe sequence
aatttatgaagtgctgaggtttata

SEQ ID NO: 51417 - DNA, 25 bp, Probe sequence
atttatgaagtgctgaggtttatat

SEQ ID NO: 51418 - DNA, 25 bp, Probe sequence
atgaagtgctgaggtttatatcatt

SEQ ID NO: 51419 - DNA, 25 bp, Probe sequence
aaatttatgaagtgctgaggtttat

SEQ ID NO: 51420 - DNA, 25 bp, Probe sequence
tatgaagtgctgaggtttatatcat

SEQ ID NO: 51421 - DNA, 25 bp, Probe sequence
gaagtgctgaggtttatatcatttt

SEQ ID NO: 51422 - DNA, 25 bp, Probe sequence
tgagcacgttaatgaaagaaatgaa

SEQ ID NO: 51423 - DNA, 25 bp, Probe sequence
ttgagcacgttaatgaaagaaatga

SEQ ID NO: 51424 - DNA, 25 bp, Probe sequence
tttgagcacgttaatgaaagaaatg

SEQ ID NO: 51425 - DNA, 25 bp, Probe sequence
caatttgagcacgttaatgaaagaa

SEQ ID NO: 51426 - DNA, 25 bp, Probe sequence
gagcacgttaatgaaagaaatgaat

SEQ ID NO: 51427 - DNA, 25 bp, Probe sequence
tcaatttgagcacgttaatgaaaga

SEQ ID NO: 51428 - DNA, 25 bp, Probe sequence
aatttgagcacgttaatgaaagaaa

SEQ ID NO: 51429 - DNA, 25 bp, Probe sequence
atcaatttgagcacgttaatgaaag

SEQ ID NO: 51430 - DNA, 25 bp, Probe sequence
atttgagcacgttaatgaaagaaat

SEQ ID NO: 51431 - DNA, 25 bp, Probe sequence
cgttaaatgtgaataaagtgtgtct

SEQ ID NO: 51432 - DNA, 25 bp, Probe sequence
aagacacaccctaatcacgttaaat

SEQ ID NO: 51433 - DNA, 25 bp, Probe sequence
aaagacacaccctaatcacgttaaa

SEQ ID NO: 51434 - DNA, 25 bp, Probe sequence
agacacaccctaatcacgttaaatg

SEQ ID NO: 51435 - DNA, 25 bp, Probe sequence
acgttaaatgtgaataaagtgtgtc

SEQ ID NO: 51436 - DNA, 25 bp, Probe sequence
gacacaccctaatcacgttaaatgt

SEQ ID NO: 51437 - DNA, 25 bp, Probe sequence
cacgttaaatgtgaataaagtgtgt

SEQ ID NO: 51438 - DNA, 25 bp, Probe sequence
aaaagacacaccctaatcacgttaa

SEQ ID NO: 51439 - DNA, 25 bp, Probe sequence
gttaaatgtgaataaagtgtgtcta

SEQ ID NO: 51440 - DNA, 25 bp, Probe sequence
gaaattagatttacagactgctcgt

SEQ ID NO: 51441 - DNA, 25 bp, Probe sequence
tgaaattagatttacagactgctcg

SEQ ID NO: 51442 - DNA, 25 bp, Probe sequence
aaattagatttacagactgctcgtc

SEQ ID NO: 51443 - DNA, 25 bp, Probe sequence
aattagatttacagactgctcgtcg

SEQ ID NO: 51444 - DNA, 25 bp, Probe sequence
ttacagactgctcgtcgtaatttaa

SEQ ID NO: 51445 - DNA, 25 bp, Probe sequence
tttacagactgctcgtcgtaattta

SEQ ID NO: 51446 - DNA, 25 bp, Probe sequence
ttagatttacagactgctcgtcgta

SEQ ID NO: 51447 - DNA, 25 bp, Probe sequence
atttacagactgctcgtcgtaattt

SEQ ID NO: 51448 - DNA, 25 bp, Probe sequence
gatttacagactgctcgtcgtaatt

SEQ ID NO: 51449 - DNA, 25 bp, Probe sequence
atacaacaacatacaagatgacacg

SEQ ID NO: 51450 - DNA, 25 bp, Probe sequence
tacaacaacatacaagatgacacga

SEQ ID NO: 51451 - DNA, 25 bp, Probe sequence
acaacaacatacaagatgacacgaa

SEQ ID NO: 51452 - DNA, 25 bp, Probe sequence
cggttatacaacaacatacaagatg

SEQ ID NO: 51453 - DNA, 25 bp, Probe sequence
tatacaacaacatacaagatgacac

SEQ ID NO: 51454 - DNA, 25 bp, Probe sequence
aacatacaagatgacacgaaacaac

SEQ ID NO: 51455 - DNA, 25 bp, Probe sequence
caacatacaagatgacacgaaacaa

SEQ ID NO: 51456 - DNA, 25 bp, Probe sequence
aacaacatacaagatgacacgaaac

SEQ ID NO: 51457 - DNA, 25 bp, Probe sequence
caacaacatacaagatgacacgaaa

SEQ ID NO: 51458 - DNA, 25 bp, Probe sequence
acaaaatggaagtgatgactatgag

SEQ ID NO: 51459 - DNA, 25 bp, Probe sequence
aacaaaatggaagtgatgactatga

SEQ ID NO: 51460 - DNA, 25 bp, Probe sequence
aaacaaaatggaagtgatgactatg

SEQ ID NO: 51461 - DNA, 25 bp, Probe sequence
aaaacaaaatggaagtgatgactat

SEQ ID NO: 51462 - DNA, 25 bp, Probe sequence
gtaagaacgcaaaagcatttgtaaa

SEQ ID NO: 51463 - DNA, 25 bp, Probe sequence
agaacgcaaaagcatttgtaaaatt

SEQ ID NO: 51464 - DNA, 25 bp, Probe sequence
aagaacgcaaaagcatttgtaaaat

SEQ ID NO: 51465 - DNA, 25 bp, Probe sequence
tgtaagaacgcaaaagcatttgtaa

SEQ ID NO: 51466 - DNA, 25 bp, Probe sequence
ttgtaagaacgcaaaagcatttgta

SEQ ID NO: 51467 - DNA, 25 bp, Probe sequence
ttatattagtagtggatgctggtca

SEQ ID NO: 51468 - DNA, 25 bp, Probe sequence
tatattagtagtggatgctggtcac

SEQ ID NO: 51469 - DNA, 25 bp, Probe sequence
atattagtagtggatgctggtcaca

SEQ ID NO: 51470 - DNA, 25 bp, Probe sequence
ctggtcacacaagaacttcaaatat

SEQ ID NO: 51471 - DNA, 25 bp, Probe sequence
tattagtagtggatgctggtcacac

SEQ ID NO: 51472 - DNA, 25 bp, Probe sequence
gctggtcacacaagaacttcaaata

SEQ ID NO: 51473 - DNA, 25 bp, Probe sequence
tttatattagtagtggatgctggtc

SEQ ID NO: 51474 - DNA, 25 bp, Probe sequence
gatgctggtcacacaagaacttcaa

SEQ ID NO: 51475 - DNA, 25 bp, Probe sequence
tggtcacacaagaacttcaaatatt

SEQ ID NO: 51476 - DNA, 25 bp, Probe sequence
gatacaacaaccgattactaagtca

SEQ ID NO: 51477 - DNA, 25 bp, Probe sequence
tgatacaacaaccgattactaagtc

SEQ ID NO: 51478 - DNA, 25 bp, Probe sequence
atacaacaaccgattactaagtcat

SEQ ID NO: 51479 - DNA, 25 bp, Probe sequence
aacaaccgattactaagtcatgctt

SEQ ID NO: 51480 - DNA, 25 bp, Probe sequence
tacaacaaccgattactaagtcatg

SEQ ID NO: 51481 - DNA, 25 bp, Probe sequence
ttgatacaacaaccgattactaagt

SEQ ID NO: 51482 - DNA, 25 bp, Probe sequence
caacaaccgattactaagtcatgct

SEQ ID NO: 51483 - DNA, 25 bp, Probe sequence
acaacaaccgattactaagtcatgc

SEQ ID NO: 51484 - DNA, 25 bp, Probe sequence
gtagagccacaagaagcaactttaa

SEQ ID NO: 51485 - DNA, 25 bp, Probe sequence
aaccgaacaatatagacttgcattt

SEQ ID NO: 51486 - DNA, 25 bp, Probe sequence
aaaccgaacaatatagacttgcatt

SEQ ID NO: 51487 - DNA, 25 bp, Probe sequence
accgaacaatatagacttgcattta

SEQ ID NO: 51488 - DNA, 25 bp, Probe sequence
ccgaacaatatagacttgcatttat

SEQ ID NO: 51489 - DNA, 25 bp, Probe sequence
aaaaccgaacaatatagacttgcat

SEQ ID NO: 51490 - DNA, 25 bp, Probe sequence
cgaacaatatagacttgcatttatt

SEQ ID NO: 51491 - DNA, 25 bp, Probe sequence
atgaattttgcatttaaagggagat

SEQ ID NO: 51492 - DNA, 25 bp, Probe sequence
tgaattttgcatttaaagggagata

SEQ ID NO: 51493 - DNA, 25 bp, Probe sequence
aatgaattttgcatttaaagggaga

SEQ ID NO: 51494 - DNA, 25 bp, Probe sequence
gcaatacaatatggaggcgaagtaa

SEQ ID NO: 51495 - DNA, 25 bp, Probe sequence
caatatggaggcgaagtaaatgaaa

SEQ ID NO: 51496 - DNA, 25 bp, Probe sequence
tacaatatggaggcgaagtaaatga

SEQ ID NO: 51497 - DNA, 25 bp, Probe sequence
acaatatggaggcgaagtaaatgaa

SEQ ID NO: 51498 - DNA, 25 bp, Probe sequence
caatacaatatggaggcgaagtaaa

SEQ ID NO: 51499 - DNA, 25 bp, Probe sequence
atacaatatggaggcgaagtaaatg

SEQ ID NO: 51500 - DNA, 25 bp, Probe sequence
aatacaatatggaggcgaagtaaat

SEQ ID NO: 51501 - DNA, 25 bp, Probe sequence
tgcaatacaatatggaggcgaagta

SEQ ID NO: 51502 - DNA, 25 bp, Probe sequence
catgcaatacaatatggaggcgaag

SEQ ID NO: 51503 - DNA, 25 bp, Probe sequence
tcgctattgttaatttctgtaatgt

SEQ ID NO: 51504 - DNA, 25 bp, Probe sequence
atcgctattgttaatttctgtaatg

SEQ ID NO: 51505 - DNA, 25 bp, Probe sequence
cgctattgttaatttctgtaatgta

SEQ ID NO: 51506 - DNA, 25 bp, Probe sequence
tttaatcgctattgttaatttctgt

SEQ ID NO: 51507 - DNA, 25 bp, Probe sequence
aatcgctattgttaatttctgtaat

SEQ ID NO: 51508 - DNA, 25 bp, Probe sequence
ttttacaatgagaagcgatacagct

SEQ ID NO: 51509 - DNA, 25 bp, Probe sequence
taatttctgtaatgtaaaacaaggt

SEQ ID NO: 51510 - DNA, 25 bp, Probe sequence
ttaaccaagcacctaacattgagta

SEQ ID NO: 51511 - DNA, 25 bp, Probe sequence
taaccaagcacctaacattgagtac

SEQ ID NO: 51512 - DNA, 25 bp, Probe sequence
aacattagttggcggtttatacttc

SEQ ID NO: 51513 - DNA, 25 bp, Probe sequence
acattagttggcggtttatacttcg

SEQ ID NO: 51514 - DNA, 25 bp, Probe sequence
taacattagttggcggtttatactt

SEQ ID NO: 51515 - DNA, 25 bp, Probe sequence
ttaacattagttggcggtttatact

SEQ ID NO: 51516 - DNA, 25 bp, Probe sequence
tttaacattagttggcggtttatac

SEQ ID NO: 51517 - DNA, 25 bp, Probe sequence
aataccaagaacgtgttaaccaagc

SEQ ID NO: 51518 - DNA, 25 bp, Probe sequence
gttaaccaagcacctaacattgagt

SEQ ID NO: 51519 - DNA, 25 bp, Probe sequence
gcagacttctttcaattaatcggat

SEQ ID NO: 51520 - DNA, 25 bp, Probe sequence
agacttctttcaattaatcggatca

SEQ ID NO: 51521 - DNA, 25 bp, Probe sequence
tgcagacttctttcaattaatcgga

SEQ ID NO: 51522 - DNA, 25 bp, Probe sequence
cagacttctttcaattaatcggatc

SEQ ID NO: 51523 - DNA, 25 bp, Probe sequence
gacttctttcaattaatcggatcat

SEQ ID NO: 51524 - DNA, 25 bp, Probe sequence
acttctttcaattaatcggatcatt

SEQ ID NO: 51525 - DNA, 25 bp, Probe sequence
cttctttcaattaatcggatcatta

SEQ ID NO: 51526 - DNA, 25 bp, Probe sequence
gagatatggtggattactggaatga

SEQ ID NO: 51527 - DNA, 25 bp, Probe sequence
agagatatggtggattactggaatg

SEQ ID NO: 51528 - DNA, 25 bp, Probe sequence
tatggtggattactggaatgattgc

SEQ ID NO: 51529 - DNA, 25 bp, Probe sequence
ttggcgtgagagatagtaatagatt

SEQ ID NO: 51530 - DNA, 25 bp, Probe sequence
agatatggtggattactggaatgat

SEQ ID NO: 51531 - DNA, 25 bp, Probe sequence
aagagatatggtggattactggaat

SEQ ID NO: 51532 - DNA, 25 bp, Probe sequence
atatggtggattactggaatgattg

SEQ ID NO: 51533 - DNA, 25 bp, Probe sequence
gatatggtggattactggaatgatt

SEQ ID NO: 51534 - DNA, 25 bp, Probe sequence
gttattgagtgatgaagaagaatgg

SEQ ID NO: 51535 - DNA, 25 bp, Probe sequence
ggtaggttagtacaaggagtaggat

SEQ ID NO: 51536 - DNA, 25 bp, Probe sequence
aggttagtacaaggagtaggatctg

SEQ ID NO: 51537 - DNA, 25 bp, Probe sequence
gtaggttagtacaaggagtaggatc

SEQ ID NO: 51538 - DNA, 25 bp, Probe sequence
taggttagtacaaggagtaggatct

SEQ ID NO: 51539 - DNA, 25 bp, Probe sequence
tgtagcgacaataggtaatagtgtt

SEQ ID NO: 51540 - DNA, 25 bp, Probe sequence
atgtagcgacaataggtaatagtgt

SEQ ID NO: 51541 - DNA, 25 bp, Probe sequence
ttagtacaaggagtaggatctgctg

SEQ ID NO: 51542 - DNA, 25 bp, Probe sequence
gttagtacaaggagtaggatctgct

SEQ ID NO: 51543 - DNA, 25 bp, Probe sequence
tggtaggttagtacaaggagtagga

SEQ ID NO: 51544 - DNA, 25 bp, Probe sequence
gtagatagtgttgggaatgttgttg

SEQ ID NO: 51545 - DNA, 25 bp, Probe sequence
tagatagtgttgggaatgttgttgg

SEQ ID NO: 51546 - DNA, 25 bp, Probe sequence
tcatataagccctaagaaatggagc

SEQ ID NO: 51547 - DNA, 25 bp, Probe sequence
cgtagatagtgttgggaatgttgtt

SEQ ID NO: 51548 - DNA, 25 bp, Probe sequence
ggataggacataaactagacgatgg

SEQ ID NO: 51549 - DNA, 25 bp, Probe sequence
gataggacataaactagacgatggt

SEQ ID NO: 51550 - DNA, 25 bp, Probe sequence
tggataggacataaactagacgatg

SEQ ID NO: 51551 - DNA, 25 bp, Probe sequence
ttggataggacataaactagacgat

SEQ ID NO: 51552 - DNA, 25 bp, Probe sequence
attggataggacataaactagacga

SEQ ID NO: 51553 - DNA, 25 bp, Probe sequence
ggctagtcataaggatcatacacag

SEQ ID NO: 51554 - DNA, 25 bp, Probe sequence
aaggctagtcataaggatcatacac

SEQ ID NO: 51555 - DNA, 25 bp, Probe sequence
aggctagtcataaggatcatacaca

SEQ ID NO: 51556 - DNA, 25 bp, Probe sequence
gaaggctagtcataaggatcataca

SEQ ID NO: 51557 - DNA, 25 bp, Probe sequence
aagaatccacagtaagagactacat

SEQ ID NO: 51558 - DNA, 25 bp, Probe sequence
tgaaggctagtcataaggatcatac

SEQ ID NO: 51559 - DNA, 25 bp, Probe sequence
agaatccacagtaagagactacata

SEQ ID NO: 51560 - DNA, 25 bp, Probe sequence
ctagtcataaggatcatacacagct

SEQ ID NO: 51561 - DNA, 25 bp, Probe sequence
agtcataaggatcatacacagcttg

SEQ ID NO: 51562 - DNA, 25 bp, Probe sequence
aagcatctaagacagagactggttc

SEQ ID NO: 51563 - DNA, 25 bp, Probe sequence
caagcatctaagacagagactggtt

SEQ ID NO: 51564 - DNA, 25 bp, Probe sequence
aacaagcatctaagacagagactgg

SEQ ID NO: 51565 - DNA, 25 bp, Probe sequence
cgttaaacaagcatctaagacagag

SEQ ID NO: 51566 - DNA, 25 bp, Probe sequence
taaacaagcatctaagacagagact

SEQ ID NO: 51567 - DNA, 25 bp, Probe sequence
ttaaacaagcatctaagacagagac

SEQ ID NO: 51568 - DNA, 25 bp, Probe sequence
gttaaacaagcatctaagacagaga

SEQ ID NO: 51569 - DNA, 25 bp, Probe sequence
tcaataaatacaatgtctggttgct

SEQ ID NO: 51570 - DNA, 25 bp, Probe sequence
taaatacaatgtctggttgctcttt

SEQ ID NO: 51571 - DNA, 25 bp, Probe sequence
acgtaaataatccagcaatagaact

SEQ ID NO: 51572 - DNA, 25 bp, Probe sequence
cgtaaataatccagcaatagaacta

SEQ ID NO: 51573 - DNA, 25 bp, Probe sequence
aacgtaaataatccagcaatagaac

SEQ ID NO: 51574 - DNA, 25 bp, Probe sequence
tgacaccgaaaacaatacctaataa

SEQ ID NO: 51575 - DNA, 25 bp, Probe sequence
atgacaccgaaaacaatacctaata

SEQ ID NO: 51576 - DNA, 25 bp, Probe sequence
aaacgtaaataatccagcaatagaa

SEQ ID NO: 51577 - DNA, 25 bp, Probe sequence
gacaccgaaaacaatacctaataaa

SEQ ID NO: 51578 - DNA, 25 bp, Probe sequence
tttaagctaccactacctgaaaacg

SEQ ID NO: 51579 - DNA, 25 bp, Probe sequence
agttttaagctaccactacctgaaa

SEQ ID NO: 51580 - DNA, 25 bp, Probe sequence
cagtcagattatatccgagagaacg

SEQ ID NO: 51581 - DNA, 25 bp, Probe sequence
acagtcagattatatccgagagaac

SEQ ID NO: 51582 - DNA, 25 bp, Probe sequence
gaacagtcagattatatccgagaga

SEQ ID NO: 51583 - DNA, 25 bp, Probe sequence
gagacatagaatagtgcttccagaa

SEQ ID NO: 51584 - DNA, 25 bp, Probe sequence
agaacagtcagattatatccgagag

SEQ ID NO: 51585 - DNA, 25 bp, Probe sequence
cagaagaacagtcagattatatccg

SEQ ID NO: 51586 - DNA, 25 bp, Probe sequence
aacagtcagattatatccgagagaa

SEQ ID NO: 51587 - DNA, 25 bp, Probe sequence
aagaacagtcagattatatccgaga

SEQ ID NO: 51588 - DNA, 25 bp, Probe sequence
agaagaacagtcagattatatccga

SEQ ID NO: 51589 - DNA, 25 bp, Probe sequence
tcaatgagatagcatattctgttaa

SEQ ID NO: 51590 - DNA, 25 bp, Probe sequence
ctcaatgagatagcatattctgtta

SEQ ID NO: 51591 - DNA, 25 bp, Probe sequence
tgcaacgattattctcaatgagata

SEQ ID NO: 51592 - DNA, 25 bp, Probe sequence
aacgattattctcaatgagatagca

SEQ ID NO: 51593 - DNA, 25 bp, Probe sequence
acgattattctcaatgagatagcat

SEQ ID NO: 51594 - DNA, 25 bp, Probe sequence
caacgattattctcaatgagatagc

SEQ ID NO: 51595 - DNA, 25 bp, Probe sequence
gcaacgattattctcaatgagatag

SEQ ID NO: 51596 - DNA, 25 bp, Probe sequence
gttaacagatatcatgctcaaagat

SEQ ID NO: 51597 - DNA, 25 bp, Probe sequence
aacagatatcatgctcaaagattaa

SEQ ID NO: 51598 - DNA, 25 bp, Probe sequence
tgattagtcgtataacagtaattgc

SEQ ID NO: 51599 - DNA, 25 bp, Probe sequence
gattagtcgtataacagtaattgca

SEQ ID NO: 51600 - DNA, 25 bp, Probe sequence
gtgattagtcgtataacagtaattg

SEQ ID NO: 51601 - DNA, 25 bp, Probe sequence
aagtgattagtcgtataacagtaat

SEQ ID NO: 51602 - DNA, 25 bp, Probe sequence
agtgattagtcgtataacagtaatt

SEQ ID NO: 51603 - DNA, 25 bp, Probe sequence
agcgaaatagatacgttagtcttaa

SEQ ID NO: 51604 - DNA, 25 bp, Probe sequence
ttagcgaaatagatacgttagtctt

SEQ ID NO: 51605 - DNA, 25 bp, Probe sequence
attagcgaaatagatacgttagtct

SEQ ID NO: 51606 - DNA, 25 bp, Probe sequence
cgttagtcttaaaagtgattagtcg

SEQ ID NO: 51607 - DNA, 25 bp, Probe sequence
tgtttctactattcgtgtatctgcc

SEQ ID NO: 51608 - DNA, 25 bp, Probe sequence
atgtttctactattcgtgtatctgc

SEQ ID NO: 51609 - DNA, 25 bp, Probe sequence
gtttctactattcgtgtatctgccg

SEQ ID NO: 51610 - DNA, 25 bp, Probe sequence
gtacctatgtttctactattcgtgt

SEQ ID NO: 51611 - DNA, 25 bp, Probe sequence
acctatgtttctactattcgtgtat

SEQ ID NO: 51612 - DNA, 25 bp, Probe sequence
cctatgtttctactattcgtgtatc

SEQ ID NO: 51613 - DNA, 25 bp, Probe sequence
tacctatgtttctactattcgtgta

SEQ ID NO: 51614 - DNA, 25 bp, Probe sequence
tttctactattcgtgtatctgccga

SEQ ID NO: 51615 - DNA, 25 bp, Probe sequence
agtacctatgtttctactattcgtg

SEQ ID NO: 51616 - DNA, 25 bp, Probe sequence
cgttgtagttaaagaccatagcaaa

SEQ ID NO: 51617 - DNA, 25 bp, Probe sequence
ccgttgtagttaaagaccatagcaa

SEQ ID NO: 51618 - DNA, 25 bp, Probe sequence
cccgttgtagttaaagaccatagca

SEQ ID NO: 51619 - DNA, 25 bp, Probe sequence
acgattaatatgataaacgcagtct

SEQ ID NO: 51620 - DNA, 25 bp, Probe sequence
agacgattaatatgataaacgcagt

SEQ ID NO: 51621 - DNA, 25 bp, Probe sequence
atatgataaacgcagtcttagaccc

SEQ ID NO: 51622 - DNA, 25 bp, Probe sequence
aatatgataaacgcagtcttagacc

SEQ ID NO: 51623 - DNA, 25 bp, Probe sequence
cgattaatatgataaacgcagtctt

SEQ ID NO: 51624 - DNA, 25 bp, Probe sequence
aagacgattaatatgataaacgcag

SEQ ID NO: 51625 - DNA, 25 bp, Probe sequence
gagtgaaatttatcaacatttgcgt

SEQ ID NO: 51626 - DNA, 25 bp, Probe sequence
tgagtgaaatttatcaacatttgcg

SEQ ID NO: 51627 - DNA, 25 bp, Probe sequence
agtgaaatttatcaacatttgcgta

SEQ ID NO: 51628 - DNA, 25 bp, Probe sequence
gtgaaatttatcaacatttgcgtaa

SEQ ID NO: 51629 - DNA, 25 bp, Probe sequence
tccaaatgagtgaaatttatcaaca

SEQ ID NO: 51630 - DNA, 25 bp, Probe sequence
tgaaatttatcaacatttgcgtaag

SEQ ID NO: 51631 - DNA, 25 bp, Probe sequence
atgagtgaaatttatcaacatttgc

SEQ ID NO: 51632 - DNA, 25 bp, Probe sequence
ccaaatgagtgaaatttatcaacat

SEQ ID NO: 51633 - DNA, 25 bp, Probe sequence
ttccaaatgagtgaaatttatcaac

SEQ ID NO: 51634 - DNA, 25 bp, Probe sequence
atgcccaaaacagtatttattccgg

SEQ ID NO: 51635 - DNA, 25 bp, Probe sequence
tttaaggggagagcgaactatcaat

SEQ ID NO: 51636 - DNA, 25 bp, Probe sequence
atttaaggggagagcgaactatcaa

SEQ ID NO: 51637 - DNA, 25 bp, Probe sequence
aatttaaggggagagcgaactatca

SEQ ID NO: 51638 - DNA, 25 bp, Probe sequence
ggagagcgaactatcaatgatgctg

SEQ ID NO: 51639 - DNA, 25 bp, Probe sequence
ttaaggggagagcgaactatcaatg

SEQ ID NO: 51640 - DNA, 25 bp, Probe sequence
aaaatttaaggggagagcgaactat

SEQ ID NO: 51641 - DNA, 25 bp, Probe sequence
aaatttaaggggagagcgaactatc

SEQ ID NO: 51642 - DNA, 25 bp, Probe sequence
tatcaatgatgctgcaaaacacaat

SEQ ID NO: 51643 - DNA, 25 bp, Probe sequence
gaactatcaatgatgctgcaaaaca

SEQ ID NO: 51644 - DNA, 25 bp, Probe sequence
ctatgctgataaagaatgtgatgcc

SEQ ID NO: 51645 - DNA, 25 bp, Probe sequence
tatgctgataaagaatgtgatgcct

SEQ ID NO: 51646 - DNA, 25 bp, Probe sequence
gctatgctgataaagaatgtgatgc

SEQ ID NO: 51647 - DNA, 25 bp, Probe sequence
ttgaaggaagacgcatttgtaagta

SEQ ID NO: 51648 - DNA, 25 bp, Probe sequence
ctgataaagaatgtgatgccttgtt

SEQ ID NO: 51649 - DNA, 25 bp, Probe sequence
agaatgtgatgccttgttaaagatg

SEQ ID NO: 51650 - DNA, 25 bp, Probe sequence
tgaaggaagacgcatttgtaagtag

SEQ ID NO: 51651 - DNA, 25 bp, Probe sequence
aaagaatgtgatgccttgttaaaga

SEQ ID NO: 51652 - DNA, 25 bp, Probe sequence
gaatgtgatgccttgttaaagatgg

SEQ ID NO: 51653 - DNA, 25 bp, Probe sequence
attgttaccgcaaatattgttgtca

SEQ ID NO: 51654 - DNA, 25 bp, Probe sequence
cgagtattgttaccgcaaatattgt

SEQ ID NO: 51655 - DNA, 25 bp, Probe sequence
tgttaccgcaaatattgttgtcaaa

SEQ ID NO: 51656 - DNA, 25 bp, Probe sequence
ttgttaccgcaaatattgttgtcaa

SEQ ID NO: 51657 - DNA, 25 bp, Probe sequence
gtattgttaccgcaaatattgttgt

SEQ ID NO: 51658 - DNA, 25 bp, Probe sequence
tctttgcagttggtttgaagtattt

SEQ ID NO: 51659 - DNA, 25 bp, Probe sequence
tattgttaccgcaaatattgttgtc

SEQ ID NO: 51660 - DNA, 25 bp, Probe sequence
agtattgttaccgcaaatattgttg

SEQ ID NO: 51661 - DNA, 25 bp, Probe sequence
gtctttgcagttggtttgaagtatt

SEQ ID NO: 51662 - DNA, 25 bp, Probe sequence
acgaagttatattggcagtagttga

SEQ ID NO: 51663 - DNA, 25 bp, Probe sequence
cgaagttatattggcagtagttgac

SEQ ID NO: 51664 - DNA, 25 bp, Probe sequence
gctctacgaagttatattggcagta

SEQ ID NO: 51665 - DNA, 25 bp, Probe sequence
ctatgctctacgaagttatattggc

SEQ ID NO: 51666 - DNA, 25 bp, Probe sequence
tcaatgttctatgctctacgaagtt

SEQ ID NO: 51667 - DNA, 25 bp, Probe sequence
atcaatgttctatgctctacgaagt

SEQ ID NO: 51668 - DNA, 25 bp, Probe sequence
tacgaagttatattggcagtagttg

SEQ ID NO: 51669 - DNA, 25 bp, Probe sequence
aatcaatgttctatgctctacgaag

SEQ ID NO: 51670 - DNA, 25 bp, Probe sequence
caatgttctatgctctacgaagtta

SEQ ID NO: 51671 - DNA, 25 bp, Probe sequence
tcttcaagcataggtttagtggaaa

SEQ ID NO: 51672 - DNA, 25 bp, Probe sequence
gtcttcaagcataggtttagtggaa

SEQ ID NO: 51673 - DNA, 25 bp, Probe sequence
gagtcttcaagcataggtttagtgg

SEQ ID NO: 51674 - DNA, 25 bp, Probe sequence
agtcttcaagcataggtttagtgga

SEQ ID NO: 51675 - DNA, 25 bp, Probe sequence
atgagtcttcaagcataggtttagt

SEQ ID NO: 51676 - DNA, 25 bp, Probe sequence
tgagtcttcaagcataggtttagtg

SEQ ID NO: 51677 - DNA, 25 bp, Probe sequence
acatgagtcttcaagcataggttta

SEQ ID NO: 51678 - DNA, 25 bp, Probe sequence
taaacatgagtcttcaagcataggt

SEQ ID NO: 51679 - DNA, 25 bp, Probe sequence
catgagtcttcaagcataggtttag

SEQ ID NO: 51680 - DNA, 25 bp, Probe sequence
atgaatgtcatttgtaggtctgaaa

SEQ ID NO: 51681 - DNA, 25 bp, Probe sequence
tgaatgtcatttgtaggtctgaaaa

SEQ ID NO: 51682 - DNA, 25 bp, Probe sequence
gaatgtcatttgtaggtctgaaaat

SEQ ID NO: 51683 - DNA, 25 bp, Probe sequence
tgtcatttgtaggtctgaaaatatg

SEQ ID NO: 51684 - DNA, 25 bp, Probe sequence
aatgtcatttgtaggtctgaaaata

SEQ ID NO: 51685 - DNA, 25 bp, Probe sequence
atgtcatttgtaggtctgaaaatat

SEQ ID NO: 51686 - DNA, 25 bp, Probe sequence
gtcatttgtaggtctgaaaatatga

SEQ ID NO: 51687 - DNA, 25 bp, Probe sequence
aatgaatgtcatttgtaggtctgaa

SEQ ID NO: 51688 - DNA, 25 bp, Probe sequence
taatgaatgtcatttgtaggtctga

SEQ ID NO: 51689 - DNA, 25 bp, Probe sequence
cgcaatgaccttatacgaatcaata

SEQ ID NO: 51690 - DNA, 25 bp, Probe sequence
atgaccttatacgaatcaatactgc

SEQ ID NO: 51691 - DNA, 25 bp, Probe sequence
ttgagttcagtatgttcatcgttaa

SEQ ID NO: 51692 - DNA, 25 bp, Probe sequence
gacttatcgtcgcaatgaccttata

SEQ ID NO: 51693 - DNA, 25 bp, Probe sequence
acttatcgtcgcaatgaccttatac

SEQ ID NO: 51694 - DNA, 25 bp, Probe sequence
gcaatgaccttatacgaatcaatac

SEQ ID NO: 51695 - DNA, 25 bp, Probe sequence
cgaatcaatactgcaatactcacaa

SEQ ID NO: 51696 - DNA, 25 bp, Probe sequence
acgaatcaatactgcaatactcaca

SEQ ID NO: 51697 - DNA, 25 bp, Probe sequence
tacgaatcaatactgcaatactcac

SEQ ID NO: 51698 - DNA, 25 bp, Probe sequence
gaaacaactttatgccatcggtatt

SEQ ID NO: 51699 - DNA, 25 bp, Probe sequence
acaactttatgccatcggtattaac

SEQ ID NO: 51700 - DNA, 25 bp, Probe sequence
caactttatgccatcggtattaact

SEQ ID NO: 51701 - DNA, 25 bp, Probe sequence
aaacaactttatgccatcggtatta

SEQ ID NO: 51702 - DNA, 25 bp, Probe sequence
aacaactttatgccatcggtattaa

SEQ ID NO: 51703 - DNA, 25 bp, Probe sequence
ctaattgagcgaaacaactttatgc

SEQ ID NO: 51704 - DNA, 25 bp, Probe sequence
taattgagcgaaacaactttatgcc

SEQ ID NO: 51705 - DNA, 25 bp, Probe sequence
caagacaaactatttcgctaattga

SEQ ID NO: 51706 - DNA, 25 bp, Probe sequence
tcaagacaaactatttcgctaattg

SEQ ID NO: 51707 - DNA, 25 bp, Probe sequence
atgttagtaaagatgtcaagttgcg

SEQ ID NO: 51708 - DNA, 25 bp, Probe sequence
gttagtaaagatgtcaagttgcgtg

SEQ ID NO: 51709 - DNA, 25 bp, Probe sequence
tagtaaagatgtcaagttgcgtgtt

SEQ ID NO: 51710 - DNA, 25 bp, Probe sequence
ttagtaaagatgtcaagttgcgtgt

SEQ ID NO: 51711 - DNA, 25 bp, Probe sequence
tgttagtaaagatgtcaagttgcgt

SEQ ID NO: 51712 - DNA, 25 bp, Probe sequence
gatgttagtaaagatgtcaagttgc

SEQ ID NO: 51713 - DNA, 25 bp, Probe sequence
tggctggtacaacattaaagatact

SEQ ID NO: 51714 - DNA, 25 bp, Probe sequence
ggctggtacaacattaaagatactc

SEQ ID NO: 51715 - DNA, 25 bp, Probe sequence
gctggtacaacattaaagatactca

SEQ ID NO: 51716 - DNA, 25 bp, Probe sequence
tacatacatcaagatagaaccgtgc

SEQ ID NO: 51717 - DNA, 25 bp, Probe sequence
ttacatacatcaagatagaaccgtg

SEQ ID NO: 51718 - DNA, 25 bp, Probe sequence
caagatagaaccgtgccactatatg

SEQ ID NO: 51719 - DNA, 25 bp, Probe sequence
tcaagatagaaccgtgccactatat

SEQ ID NO: 51720 - DNA, 25 bp, Probe sequence
atcaagatagaaccgtgccactata

SEQ ID NO: 51721 - DNA, 25 bp, Probe sequence
attacatacatcaagatagaaccgt

SEQ ID NO: 51722 - DNA, 25 bp, Probe sequence
cattacatacatcaagatagaaccg

SEQ ID NO: 51723 - DNA, 25 bp, Probe sequence
actaggtgacatcattgattgtatg

SEQ ID NO: 51724 - DNA, 25 bp, Probe sequence
catacatcaagatagaaccgtgcca

SEQ ID NO: 51725 - DNA, 25 bp, Probe sequence
caacgacgcatacattacatcattc

SEQ ID NO: 51726 - DNA, 25 bp, Probe sequence
gcaacgacgcatacattacatcatt

SEQ ID NO: 51727 - DNA, 25 bp, Probe sequence
ggctatcaaagagacaactgagatt

SEQ ID NO: 51728 - DNA, 25 bp, Probe sequence
gctatcaaagagacaactgagatta

SEQ ID NO: 51729 - DNA, 25 bp, Probe sequence
gggctatcaaagagacaactgagat

SEQ ID NO: 51730 - DNA, 25 bp, Probe sequence
gttctattaagaaacctgcaacgac

SEQ ID NO: 51731 - DNA, 25 bp, Probe sequence
agttctattaagaaacctgcaacga

SEQ ID NO: 51732 - DNA, 25 bp, Probe sequence
tagttctattaagaaacctgcaacg

SEQ ID NO: 51733 - DNA, 25 bp, Probe sequence
tggtggtcctatcgatttaaacaaa

SEQ ID NO: 51734 - DNA, 25 bp, Probe sequence
aggatggatagagaatttaaggcaa

SEQ ID NO: 51735 - DNA, 25 bp, Probe sequence
ggatggatagagaatttaaggcaat

SEQ ID NO: 51736 - DNA, 25 bp, Probe sequence
taggatggatagagaatttaaggca

SEQ ID NO: 51737 - DNA, 25 bp, Probe sequence
ttaggatggatagagaatttaaggc

SEQ ID NO: 51738 - DNA, 25 bp, Probe sequence
taatatgctgcttgatgcaatatgg

SEQ ID NO: 51739 - DNA, 25 bp, Probe sequence
cagtaatatgctgcttgatgcaata

SEQ ID NO: 51740 - DNA, 25 bp, Probe sequence
tatgctgcttgatgcaatatggtat

SEQ ID NO: 51741 - DNA, 25 bp, Probe sequence
atatgctgcttgatgcaatatggta

SEQ ID NO: 51742 - DNA, 25 bp, Probe sequence
gtaatatgctgcttgatgcaatatg

SEQ ID NO: 51743 - DNA, 25 bp, Probe sequence
taaagaaccaacttccaacgatatg

SEQ ID NO: 51744 - DNA, 25 bp, Probe sequence
ataaagaaccaacttccaacgatat

SEQ ID NO: 51745 - DNA, 25 bp, Probe sequence
atataaagaaccaacttccaacgat

SEQ ID NO: 51746 - DNA, 25 bp, Probe sequence
tataaagaaccaacttccaacgata

SEQ ID NO: 51747 - DNA, 25 bp, Probe sequence
tatataaagaaccaacttccaacga

SEQ ID NO: 51748 - DNA, 25 bp, Probe sequence
aagacacattacttgaagattctaa

SEQ ID NO: 51749 - DNA, 25 bp, Probe sequence
aaagaaccaacttccaacgatatgg

SEQ ID NO: 51750 - DNA, 25 bp, Probe sequence
agacacattacttgaagattctaat

SEQ ID NO: 51751 - DNA, 25 bp, Probe sequence
tatatggcagcaacaaaattgattg

SEQ ID NO: 51752 - DNA, 25 bp, Probe sequence
gtgttgctgtgtatggtgatattaa

SEQ ID NO: 51753 - DNA, 25 bp, Probe sequence
ggtgttgctgtgtatggtgatatta

SEQ ID NO: 51754 - DNA, 25 bp, Probe sequence
tggtgttgctgtgtatggtgatatt

SEQ ID NO: 51755 - DNA, 25 bp, Probe sequence
tgctgtgtatggtgatattaaagtc

SEQ ID NO: 51756 - DNA, 25 bp, Probe sequence
tgttgctgtgtatggtgatattaaa

SEQ ID NO: 51757 - DNA, 25 bp, Probe sequence
gtggtgttgctgtgtatggtgatat

SEQ ID NO: 51758 - DNA, 25 bp, Probe sequence
gctgtgtatggtgatattaaagtct

SEQ ID NO: 51759 - DNA, 25 bp, Probe sequence
ttgctgtgtatggtgatattaaagt

SEQ ID NO: 51760 - DNA, 25 bp, Probe sequence
gttgctgtgtatggtgatattaaag

SEQ ID NO: 51761 - DNA, 25 bp, Probe sequence
atgttgaatcgtgcttgttatggaa

SEQ ID NO: 51762 - DNA, 25 bp, Probe sequence
gttgaatcgtgcttgttatggaaat

SEQ ID NO: 51763 - DNA, 25 bp, Probe sequence
ttgaatcgtgcttgttatggaaata

SEQ ID NO: 51764 - DNA, 25 bp, Probe sequence
aatatatggaagttaagcgacgtac

SEQ ID NO: 51765 - DNA, 25 bp, Probe sequence
tgaatcgtgcttgttatggaaatat

SEQ ID NO: 51766 - DNA, 25 bp, Probe sequence
tatatggaagttaagcgacgtactg

SEQ ID NO: 51767 - DNA, 25 bp, Probe sequence
atatatggaagttaagcgacgtact

SEQ ID NO: 51768 - DNA, 25 bp, Probe sequence
ggaaatatatggaagttaagcgacg

SEQ ID NO: 51769 - DNA, 25 bp, Probe sequence
tgttgaatcgtgcttgttatggaaa

SEQ ID NO: 51770 - DNA, 25 bp, Probe sequence
aacgaacattatggattccttaatt

SEQ ID NO: 51771 - DNA, 25 bp, Probe sequence
taccaatctatcaagcgttgaagta

SEQ ID NO: 51772 - DNA, 25 bp, Probe sequence
caatctatcaagcgttgaagtacaa

SEQ ID NO: 51773 - DNA, 25 bp, Probe sequence
ataccaatctatcaagcgttgaagt

SEQ ID NO: 51774 - DNA, 25 bp, Probe sequence
aataccaatctatcaagcgttgaag

SEQ ID NO: 51775 - DNA, 25 bp, Probe sequence
ccaatctatcaagcgttgaagtaca

SEQ ID NO: 51776 - DNA, 25 bp, Probe sequence
accaatctatcaagcgttgaagtac

SEQ ID NO: 51777 - DNA, 25 bp, Probe sequence
ttaacgaacattatggattccttaa

SEQ ID NO: 51778 - DNA, 25 bp, Probe sequence
taacgaacattatggattccttaat

SEQ ID NO: 51779 - DNA, 25 bp, Probe sequence
aacacagttcttattcaaaggtacg

SEQ ID NO: 51780 - DNA, 25 bp, Probe sequence
ttattcaaaggtacgggtgtcaatg

SEQ ID NO: 51781 - DNA, 25 bp, Probe sequence
cttattcaaaggtacgggtgtcaat

SEQ ID NO: 51782 - DNA, 25 bp, Probe sequence
acacagttcttattcaaaggtacgg

SEQ ID NO: 51783 - DNA, 25 bp, Probe sequence
gttcttattcaaaggtacgggtgtc

SEQ ID NO: 51784 - DNA, 25 bp, Probe sequence
cagttcttattcaaaggtacgggtg

SEQ ID NO: 51785 - DNA, 25 bp, Probe sequence
cacagttcttattcaaaggtacggg

SEQ ID NO: 51786 - DNA, 25 bp, Probe sequence
tcttattcaaaggtacgggtgtcaa

SEQ ID NO: 51787 - DNA, 25 bp, Probe sequence
ttcttattcaaaggtacgggtgtca

SEQ ID NO: 51788 - DNA, 25 bp, Probe sequence
tgcgtttcaaagagtagaaataaca

SEQ ID NO: 51789 - DNA, 25 bp, Probe sequence
gcgtttcaaagagtagaaataacac

SEQ ID NO: 51790 - DNA, 25 bp, Probe sequence
ttgcgtttcaaagagtagaaataac

SEQ ID NO: 51791 - DNA, 25 bp, Probe sequence
cgtttcaaagagtagaaataacaca

SEQ ID NO: 51792 - DNA, 25 bp, Probe sequence
attagttgtagaaaacgatgatccg

SEQ ID NO: 51793 - DNA, 25 bp, Probe sequence
tttgcgtttcaaagagtagaaataa

SEQ ID NO: 51794 - DNA, 25 bp, Probe sequence
aattagttgtagaaaacgatgatcc

SEQ ID NO: 51795 - DNA, 25 bp, Probe sequence
actgtgttaaatacattattgttgt

SEQ ID NO: 51796 - DNA, 25 bp, Probe sequence
gtttcaaagagtagaaataacacaa

SEQ ID NO: 51797 - DNA, 25 bp, Probe sequence
atgcagctatcaatgtactattact

SEQ ID NO: 51798 - DNA, 25 bp, Probe sequence
gcaaatgcagctatcaatgtactat

SEQ ID NO: 51799 - DNA, 25 bp, Probe sequence
aatgcagctatcaatgtactattac

SEQ ID NO: 51800 - DNA, 25 bp, Probe sequence
gtccaatatatcatgcgctagatca

SEQ ID NO: 51801 - DNA, 25 bp, Probe sequence
tccaatatatcatgcgctagatcat

SEQ ID NO: 51802 - DNA, 25 bp, Probe sequence
cgtccaatatatcatgcgctagatc

SEQ ID NO: 51803 - DNA, 25 bp, Probe sequence
caaatgcagctatcaatgtactatt

SEQ ID NO: 51804 - DNA, 25 bp, Probe sequence
agcctaaacgtgcaatgaaattctg

SEQ ID NO: 51805 - DNA, 25 bp, Probe sequence
cagcctaaacgtgcaatgaaattct

SEQ ID NO: 51806 - DNA, 25 bp, Probe sequence
cgtttagcagacaatgagttaaatt

SEQ ID NO: 51807 - DNA, 25 bp, Probe sequence
acgtttagcagacaatgagttaaat

SEQ ID NO: 51808 - DNA, 25 bp, Probe sequence
gtttagcagacaatgagttaaatta

SEQ ID NO: 51809 - DNA, 25 bp, Probe sequence
aacgtttagcagacaatgagttaaa

SEQ ID NO: 51810 - DNA, 25 bp, Probe sequence
tagcagacaatgagttaaattattt

SEQ ID NO: 51811 - DNA, 25 bp, Probe sequence
ttagcagacaatgagttaaattatt

SEQ ID NO: 51812 - DNA, 25 bp, Probe sequence
tttagcagacaatgagttaaattat

SEQ ID NO: 51813 - DNA, 25 bp, Probe sequence
gcagagtttacttatgtaaatgagt

SEQ ID NO: 51814 - DNA, 25 bp, Probe sequence
agcagagtttacttatgtaaatgag

SEQ ID NO: 51815 - DNA, 25 bp, Probe sequence
ctcagatagtgactcagactcagac

SEQ ID NO: 51816 - DNA, 25 bp, Probe sequence
aactgatgatgctgtagattctgat

SEQ ID NO: 51817 - DNA, 25 bp, Probe sequence
ttaggtaatgatgcgtatagcgaag

SEQ ID NO: 51818 - DNA, 25 bp, Probe sequence
actgatgatgctgtagattctgatg

SEQ ID NO: 51819 - DNA, 25 bp, Probe sequence
gaactgatgatgctgtagattctga

SEQ ID NO: 51820 - DNA, 25 bp, Probe sequence
ctgatgatgctgtagattctgatgg

SEQ ID NO: 51821 - DNA, 25 bp, Probe sequence
taggtaatgatgcgtatagcgaaga

SEQ ID NO: 51822 - DNA, 25 bp, Probe sequence
tgatgatgctgtagattctgatgga

SEQ ID NO: 51823 - DNA, 25 bp, Probe sequence
cagtgattcagattcagatagcgat

SEQ ID NO: 51824 - DNA, 25 bp, Probe sequence
atacatcagacagtgactcagactc

SEQ ID NO: 51825 - DNA, 25 bp, Probe sequence
gatacatcagacagtgactcagact

SEQ ID NO: 51826 - DNA, 25 bp, Probe sequence
agatacatcagacagtgactcagac

SEQ ID NO: 51827 - DNA, 25 bp, Probe sequence
aagaagatacatcagacagtgactc

SEQ ID NO: 51828 - DNA, 25 bp, Probe sequence
gaagaagatacatcagacagtgact

SEQ ID NO: 51829 - DNA, 25 bp, Probe sequence
gaagatacatcagacagtgactcag

SEQ ID NO: 51830 - DNA, 25 bp, Probe sequence
aagatacatcagacagtgactcaga

SEQ ID NO: 51831 - DNA, 25 bp, Probe sequence
agaagatacatcagacagtgactca

SEQ ID NO: 51832 - DNA, 25 bp, Probe sequence
cgaagaagatacatcagacagtgac

SEQ ID NO: 51833 - DNA, 25 bp, Probe sequence
gcaataagtgtaacctctagcatgg

SEQ ID NO: 51834 - DNA, 25 bp, Probe sequence
ctcctgcaataagtgtaacctctag

SEQ ID NO: 51835 - DNA, 25 bp, Probe sequence
ggcgaataataaacctaatgcgata

SEQ ID NO: 51836 - DNA, 25 bp, Probe sequence
gtgtaacctctagcatggtattgat

SEQ ID NO: 51837 - DNA, 25 bp, Probe sequence
aagtgtaacctctagcatggtattg

SEQ ID NO: 51838 - DNA, 25 bp, Probe sequence
caataagtgtaacctctagcatggt

SEQ ID NO: 51839 - DNA, 25 bp, Probe sequence
gatagctcctgcaataagtgtaacc

SEQ ID NO: 51840 - DNA, 25 bp, Probe sequence
ttaaggctgaggcatttctaacaaa

SEQ ID NO: 51841 - DNA, 25 bp, Probe sequence
tgtaacctctagcatggtattgatt

SEQ ID NO: 51842 - DNA, 25 bp, Probe sequence
ttctcacctcgtaattgtaactgta

SEQ ID NO: 51843 - DNA, 25 bp, Probe sequence
tgctcaatgtgtcaatacttatgtt

SEQ ID NO: 51844 - DNA, 25 bp, Probe sequence
tctcacctcgtaattgtaactgtat

SEQ ID NO: 51845 - DNA, 25 bp, Probe sequence
gttctcacctcgtaattgtaactgt

SEQ ID NO: 51846 - DNA, 25 bp, Probe sequence
ctcacctcgtaattgtaactgtatt

SEQ ID NO: 51847 - DNA, 25 bp, Probe sequence
ttgctcaatgtgtcaatacttatgt

SEQ ID NO: 51848 - DNA, 25 bp, Probe sequence
aatggttctcacctcgtaattgtaa

SEQ ID NO: 51849 - DNA, 25 bp, Probe sequence
attcaatggttctcacctcgtaatt

SEQ ID NO: 51850 - DNA, 25 bp, Probe sequence
aattcaatggttctcacctcgtaat

SEQ ID NO: 51851 - DNA, 25 bp, Probe sequence
aagtgttgaattaggtgtgattatt

SEQ ID NO: 51852 - DNA, 25 bp, Probe sequence
agtgttgaattaggtgtgattatta

SEQ ID NO: 51853 - DNA, 25 bp, Probe sequence
atttgaaagttgttgcattaacggt

SEQ ID NO: 51854 - DNA, 25 bp, Probe sequence
tatttgaaagttgttgcattaacgg

SEQ ID NO: 51855 - DNA, 25 bp, Probe sequence
aaagtgttgaattaggtgtgattat

SEQ ID NO: 51856 - DNA, 25 bp, Probe sequence
ttgaaaagtgttgaattaggtgtga

SEQ ID NO: 51857 - DNA, 25 bp, Probe sequence
tgaaaagtgttgaattaggtgtgat

SEQ ID NO: 51858 - DNA, 25 bp, Probe sequence
ttatttgaaagttgttgcattaacg

SEQ ID NO: 51859 - DNA, 25 bp, Probe sequence
tgttgaattaggtgtgattattatg

SEQ ID NO: 51860 - DNA, 25 bp, Probe sequence
taagaacgacaacattaaagccatt

SEQ ID NO: 51861 - DNA, 25 bp, Probe sequence
ttaagaacgacaacattaaagccat

SEQ ID NO: 51862 - DNA, 25 bp, Probe sequence
aagaacgacaacattaaagccattg

SEQ ID NO: 51863 - DNA, 25 bp, Probe sequence
agaacgacaacattaaagccattgc

SEQ ID NO: 51864 - DNA, 25 bp, Probe sequence
tttaagaacgacaacattaaagcca

SEQ ID NO: 51865 - DNA, 25 bp, Probe sequence
atttaagaacgacaacattaaagcc

SEQ ID NO: 51866 - DNA, 25 bp, Probe sequence
catttaagaacgacaacattaaagc

SEQ ID NO: 51867 - DNA, 25 bp, Probe sequence
gaacgacaacattaaagccattgca

SEQ ID NO: 51868 - DNA, 25 bp, Probe sequence
aaatcatttaagaacgacaacatta

SEQ ID NO: 51869 - DNA, 25 bp, Probe sequence
catctattactgcgataatgccaac

SEQ ID NO: 51870 - DNA, 25 bp, Probe sequence
tcatctattactgcgataatgccaa

SEQ ID NO: 51871 - DNA, 25 bp, Probe sequence
ttcatctattactgcgataatgcca

SEQ ID NO: 51872 - DNA, 25 bp, Probe sequence
tctattactgcgataatgccaacat

SEQ ID NO: 51873 - DNA, 25 bp, Probe sequence
atctattactgcgataatgccaaca

SEQ ID NO: 51874 - DNA, 25 bp, Probe sequence
attgtaacggtgatgctgtctctta

SEQ ID NO: 51875 - DNA, 25 bp, Probe sequence
tattgtaacggtgatgctgtctctt

SEQ ID NO: 51876 - DNA, 25 bp, Probe sequence
ttattgtaacggtgatgctgtctct

SEQ ID NO: 51877 - DNA, 25 bp, Probe sequence
gcacattcatgtaacgacaataaca

SEQ ID NO: 51878 - DNA, 25 bp, Probe sequence
aagtgctgttgtcatgtctattgtg

SEQ ID NO: 51879 - DNA, 25 bp, Probe sequence
caagtgctgttgtcatgtctattgt

SEQ ID NO: 51880 - DNA, 25 bp, Probe sequence
caccgtttctttcctagattcaatc

SEQ ID NO: 51881 - DNA, 25 bp, Probe sequence
accgtttctttcctagattcaatca

SEQ ID NO: 51882 - DNA, 25 bp, Probe sequence
ttcctagattcaatcatgctcattg

SEQ ID NO: 51883 - DNA, 25 bp, Probe sequence
ccgtttctttcctagattcaatcat

SEQ ID NO: 51884 - DNA, 25 bp, Probe sequence
gtcatgtctattgtgggtgtcttaa

SEQ ID NO: 51885 - DNA, 25 bp, Probe sequence
tcctagattcaatcatgctcattgc

SEQ ID NO: 51886 - DNA, 25 bp, Probe sequence
tctttcctagattcaatcatgctca

SEQ ID NO: 51887 - DNA, 25 bp, Probe sequence
aagaactcaccgaactaatgacatt

SEQ ID NO: 51888 - DNA, 25 bp, Probe sequence
aactcaccgaactaatgacattgtt

SEQ ID NO: 51889 - DNA, 25 bp, Probe sequence
agaactcaccgaactaatgacattg

SEQ ID NO: 51890 - DNA, 25 bp, Probe sequence
gaactcaccgaactaatgacattgt

SEQ ID NO: 51891 - DNA, 25 bp, Probe sequence
aatatatgacggaatgcaagaacag

SEQ ID NO: 51892 - DNA, 25 bp, Probe sequence
atatatgacggaatgcaagaacagc

SEQ ID NO: 51893 - DNA, 25 bp, Probe sequence
aaagaactcaccgaactaatgacat

SEQ ID NO: 51894 - DNA, 25 bp, Probe sequence
atgacaaagaactcaccgaactaat

SEQ ID NO: 51895 - DNA, 25 bp, Probe sequence
ctaaatgacaaagaactcaccgaac

SEQ ID NO: 51896 - DNA, 25 bp, Probe sequence
tcgggattggctatattattattct

SEQ ID NO: 51897 - DNA, 25 bp, Probe sequence
cgggattggctatattattattctt

SEQ ID NO: 51898 - DNA, 25 bp, Probe sequence
atcgggattggctatattattattc

SEQ ID NO: 51899 - DNA, 25 bp, Probe sequence
aaaagacattgccattttcaggaat

SEQ ID NO: 51900 - DNA, 25 bp, Probe sequence
tgccattttcaggaatgtaattgtt

SEQ ID NO: 51901 - DNA, 25 bp, Probe sequence
ttgccattttcaggaatgtaattgt

SEQ ID NO: 51902 - DNA, 25 bp, Probe sequence
aaagacattgccattttcaggaatg

SEQ ID NO: 51903 - DNA, 25 bp, Probe sequence
gccattttcaggaatgtaattgttt

SEQ ID NO: 51904 - DNA, 25 bp, Probe sequence
tttatcgggattggctatattatta

SEQ ID NO: 51905 - DNA, 25 bp, Probe sequence
atcagtggttgtctcgttacgttat

SEQ ID NO: 51906 - DNA, 25 bp, Probe sequence
tcagtggttgtctcgttacgttatt

SEQ ID NO: 51907 - DNA, 25 bp, Probe sequence
aatcagtggttgtctcgttacgtta

SEQ ID NO: 51908 - DNA, 25 bp, Probe sequence
tatttggttattggctccataaacg

SEQ ID NO: 51909 - DNA, 25 bp, Probe sequence
cgttatttggttattggctccataa

SEQ ID NO: 51910 - DNA, 25 bp, Probe sequence
gttgtctcgttacgttatttggtta

SEQ ID NO: 51911 - DNA, 25 bp, Probe sequence
gttacgttatttggttattggctcc

SEQ ID NO: 51912 - DNA, 25 bp, Probe sequence
tctcgttacgttatttggttattgg

SEQ ID NO: 51913 - DNA, 25 bp, Probe sequence
cgttacgttatttggttattggctc

SEQ ID NO: 51914 - DNA, 25 bp, Probe sequence
gacaagcaatgactaatacggttac

SEQ ID NO: 51915 - DNA, 25 bp, Probe sequence
acaagcaatgactaatacggttact

SEQ ID NO: 51916 - DNA, 25 bp, Probe sequence
ggacaagcaatgactaatacggtta

SEQ ID NO: 51917 - DNA, 25 bp, Probe sequence
caagcaatgactaatacggttacta

SEQ ID NO: 51918 - DNA, 25 bp, Probe sequence
agcaatgactaatacggttactagc

SEQ ID NO: 51919 - DNA, 25 bp, Probe sequence
atgtggacaagcaatgactaatacg

SEQ ID NO: 51920 - DNA, 25 bp, Probe sequence
gcaatgactaatacggttactagcc

SEQ ID NO: 51921 - DNA, 25 bp, Probe sequence
aagcaatgactaatacggttactag

SEQ ID NO: 51922 - DNA, 25 bp, Probe sequence
catgtggacaagcaatgactaatac

SEQ ID NO: 51923 - DNA, 25 bp, Probe sequence
ggaggacttcacttctattacaggt

SEQ ID NO: 51924 - DNA, 25 bp, Probe sequence
tggaggacttcacttctattacagg

SEQ ID NO: 51925 - DNA, 25 bp, Probe sequence
ctagaggaattaggagccattaagg

SEQ ID NO: 51926 - DNA, 25 bp, Probe sequence
gattgtaattggcggatattcacta

SEQ ID NO: 51927 - DNA, 25 bp, Probe sequence
cattcgttcattgatggatattgcc

SEQ ID NO: 51928 - DNA, 25 bp, Probe sequence
acttcatcagttaggaatcaagcaa

SEQ ID NO: 51929 - DNA, 25 bp, Probe sequence
ttgtaattggcggatattcactatt

SEQ ID NO: 51930 - DNA, 25 bp, Probe sequence
agatggaacaacctattacattggc

SEQ ID NO: 51931 - DNA, 25 bp, Probe sequence
gattattcatctggttgaggaagca

SEQ ID NO: 51932 - DNA, 25 bp, Probe sequence
ttcattggatcaccttctttcttca

SEQ ID NO: 51933 - DNA, 25 bp, Probe sequence
tttcattggatcaccttctttcttc

SEQ ID NO: 51934 - DNA, 25 bp, Probe sequence
gatcaccttctttcttcaacccttt

SEQ ID NO: 51935 - DNA, 25 bp, Probe sequence
cattggatcaccttctttcttcaac

SEQ ID NO: 51936 - DNA, 25 bp, Probe sequence
tcattggatcaccttctttcttcaa

SEQ ID NO: 51937 - DNA, 25 bp, Probe sequence
attggatcaccttctttcttcaacc

SEQ ID NO: 51938 - DNA, 25 bp, Probe sequence
ggatcaccttctttcttcaaccctt

SEQ ID NO: 51939 - DNA, 25 bp, Probe sequence
tcaccttctttcttcaaccctttta

SEQ ID NO: 51940 - DNA, 25 bp, Probe sequence
caccttctttcttcaacccttttaa

SEQ ID NO: 51941 - DNA, 25 bp, Probe sequence
ccaatgaggctagaaagtatacaag

SEQ ID NO: 51942 - DNA, 25 bp, Probe sequence
caatgaggctagaaagtatacaaga

SEQ ID NO: 51943 - DNA, 25 bp, Probe sequence
aatgaggctagaaagtatacaagat

SEQ ID NO: 51944 - DNA, 25 bp, Probe sequence
ttacaaaagggtgtgctattttact

SEQ ID NO: 51945 - DNA, 25 bp, Probe sequence
acaaaagggtgtgctattttactat

SEQ ID NO: 51946 - DNA, 25 bp, Probe sequence
caagatactgcattacaaaagggtg

SEQ ID NO: 51947 - DNA, 25 bp, Probe sequence
acaagatactgcattacaaaagggt

SEQ ID NO: 51948 - DNA, 25 bp, Probe sequence
tacaagatactgcattacaaaaggg

SEQ ID NO: 51949 - DNA, 25 bp, Probe sequence
tgaggctagaaagtatacaagatac

SEQ ID NO: 51950 - DNA, 25 bp, Probe sequence
aatccacatgctactaagagacgtt

SEQ ID NO: 51951 - DNA, 25 bp, Probe sequence
cctacaaatccacatgctactaaga

SEQ ID NO: 51952 - DNA, 25 bp, Probe sequence
acctacaaatccacatgctactaag

SEQ ID NO: 51953 - DNA, 25 bp, Probe sequence
acaaatccacatgctactaagagac

SEQ ID NO: 51954 - DNA, 25 bp, Probe sequence
cacctacaaatccacatgctactaa

SEQ ID NO: 51955 - DNA, 25 bp, Probe sequence
tacaaatccacatgctactaagaga

SEQ ID NO: 51956 - DNA, 25 bp, Probe sequence
ctacaaatccacatgctactaagag

SEQ ID NO: 51957 - DNA, 25 bp, Probe sequence
caaatccacatgctactaagagacg

SEQ ID NO: 51958 - DNA, 25 bp, Probe sequence
atccacatgctactaagagacgttt

SEQ ID NO: 51959 - DNA, 25 bp, Probe sequence
actgttacaccaactgtttacaaat

SEQ ID NO: 51960 - DNA, 25 bp, Probe sequence
tgaaattactgttacaccaactgtt

SEQ ID NO: 51961 - DNA, 25 bp, Probe sequence
ttgaaattactgttacaccaactgt

SEQ ID NO: 51962 - DNA, 25 bp, Probe sequence
tactgttacaccaactgtttacaaa

SEQ ID NO: 51963 - DNA, 25 bp, Probe sequence
ttactgttacaccaactgtttacaa

SEQ ID NO: 51964 - DNA, 25 bp, Probe sequence
attactgttacaccaactgtttaca

SEQ ID NO: 51965 - DNA, 25 bp, Probe sequence
ctgttacaccaactgtttacaaatt

SEQ ID NO: 51966 - DNA, 25 bp, Probe sequence
attgaaattactgttacaccaactg

SEQ ID NO: 51967 - DNA, 25 bp, Probe sequence
ttattcattgtcggttattattggg

SEQ ID NO: 51968 - DNA, 25 bp, Probe sequence
tatctgagtctgagtcactatctga

SEQ ID NO: 51969 - DNA, 25 bp, Probe sequence
ctatctgagtctgagtcactatctg

SEQ ID NO: 51970 - DNA, 25 bp, Probe sequence
gctatctgagtctgagtcactatct

SEQ ID NO: 51971 - DNA, 25 bp, Probe sequence
ctatctgaatctgaggcactatctg

SEQ ID NO: 51972 - DNA, 25 bp, Probe sequence
ctatctgaatctgagtcgctatctg

SEQ ID NO: 51973 - DNA, 25 bp, Probe sequence
tatctgaatctgaggcactatctga

SEQ ID NO: 51974 - DNA, 25 bp, Probe sequence
tatctgaatctgagtcgctatctga

SEQ ID NO: 51975 - DNA, 25 bp, Probe sequence
ctgaatctgaaccactatctgatgt

SEQ ID NO: 51976 - DNA, 25 bp, Probe sequence
ctgtctgagtctgagtcactatctg

SEQ ID NO: 51977 - DNA, 25 bp, Probe sequence
aatgatcgtgataacggatacattt

SEQ ID NO: 51978 - DNA, 25 bp, Probe sequence
aaatgatcgtgataacggatacatt

SEQ ID NO: 51979 - DNA, 25 bp, Probe sequence
ttaaatgatcgtgataacggataca

SEQ ID NO: 51980 - DNA, 25 bp, Probe sequence
taaatgatcgtgataacggatacat

SEQ ID NO: 51981 - DNA, 25 bp, Probe sequence
tttaaatgatcgtgataacggatac

SEQ ID NO: 51982 - DNA, 25 bp, Probe sequence
atgatcgtgataacggatacatttt

SEQ ID NO: 51983 - DNA, 25 bp, Probe sequence
tttaatcgaaatcaggttacgaaaa

SEQ ID NO: 51984 - DNA, 25 bp, Probe sequence
ttttaatcgaaatcaggttacgaaa

SEQ ID NO: 51985 - DNA, 25 bp, Probe sequence
attttaaatgatcgtgataacggat

SEQ ID NO: 51986 - DNA, 25 bp, Probe sequence
gtgagttatcgctattgaatgaacg

SEQ ID NO: 51987 - DNA, 25 bp, Probe sequence
agtgagttatcgctattgaatgaac

SEQ ID NO: 51988 - DNA, 25 bp, Probe sequence
aagtgagttatcgctattgaatgaa

SEQ ID NO: 51989 - DNA, 25 bp, Probe sequence
ctgttatgccatattatgtgagtga

SEQ ID NO: 51990 - DNA, 25 bp, Probe sequence
tctgttatgccatattatgtgagtg

SEQ ID NO: 51991 - DNA, 25 bp, Probe sequence
tgttatgccatattatgtgagtgaa

SEQ ID NO: 51992 - DNA, 25 bp, Probe sequence
cgctattgaatgaacgatgtaataa

SEQ ID NO: 51993 - DNA, 25 bp, Probe sequence
ttctgttatgccatattatgtgagt

SEQ ID NO: 51994 - DNA, 25 bp, Probe sequence
tcctctccagttaagtatataagca

SEQ ID NO: 51995 - DNA, 25 bp, Probe sequence
ggaacgagtgtaattataccatctg

SEQ ID NO: 51996 - DNA, 25 bp, Probe sequence
gaacgagtgtaattataccatctgt

SEQ ID NO: 51997 - DNA, 25 bp, Probe sequence
taagtggaacgagtgtaattatacc

SEQ ID NO: 51998 - DNA, 25 bp, Probe sequence
aagtggaacgagtgtaattatacca

SEQ ID NO: 51999 - DNA, 25 bp, Probe sequence
agtggaacgagtgtaattataccat

SEQ ID NO: 52000 - DNA, 25 bp, Probe sequence
tggaacgagtgtaattataccatct

SEQ ID NO: 52001 - DNA, 25 bp, Probe sequence
gtggaacgagtgtaattataccatc

SEQ ID NO: 52002 - DNA, 25 bp, Probe sequence
aacgagtgtaattataccatctgta

SEQ ID NO: 52003 - DNA, 25 bp, Probe sequence
aattgaattggcttatcattcgtaa

SEQ ID NO: 52004 - DNA, 25 bp, Probe sequence
cgtataagtgggtgacagatgaaat

SEQ ID NO: 52005 - DNA, 25 bp, Probe sequence
tataagtgggtgacagatgaaattg

SEQ ID NO: 52006 - DNA, 25 bp, Probe sequence
gtataagtgggtgacagatgaaatt

SEQ ID NO: 52007 - DNA, 25 bp, Probe sequence
taagtgggtgacagatgaaattgta

SEQ ID NO: 52008 - DNA, 25 bp, Probe sequence
ataagtgggtgacagatgaaattgt

SEQ ID NO: 52009 - DNA, 25 bp, Probe sequence
tgggtgacagatgaaattgtaagtt

SEQ ID NO: 52010 - DNA, 25 bp, Probe sequence
aagtgggtgacagatgaaattgtaa

SEQ ID NO: 52011 - DNA, 25 bp, Probe sequence
gggtgacagatgaaattgtaagtta

SEQ ID NO: 52012 - DNA, 25 bp, Probe sequence
agtgggtgacagatgaaattgtaag

SEQ ID NO: 52013 - DNA, 25 bp, Probe sequence
gcacaacaatttaagttcaaactgt

SEQ ID NO: 52014 - DNA, 25 bp, Probe sequence
acaacaatttaagttcaaactgtcg

SEQ ID NO: 52015 - DNA, 25 bp, Probe sequence
tgcacaacaatttaagttcaaactg

SEQ ID NO: 52016 - DNA, 25 bp, Probe sequence
cacaacaatttaagttcaaactgtc

SEQ ID NO: 52017 - DNA, 25 bp, Probe sequence
caacaatttaagttcaaactgtcga

SEQ ID NO: 52018 - DNA, 25 bp, Probe sequence
gatgcacaacaatttaagttcaaac

SEQ ID NO: 52019 - DNA, 25 bp, Probe sequence
caatttctacagacaatgcaagtca

SEQ ID NO: 52020 - DNA, 25 bp, Probe sequence
tgcctcccttttcttattgttatga

SEQ ID NO: 52021 - DNA, 25 bp, Probe sequence
aatttctacagacaatgcaagtcag

SEQ ID NO: 52022 - DNA, 25 bp, Probe sequence
aagtaacaggaactgatagcattaa

SEQ ID NO: 52023 - DNA, 25 bp, Probe sequence
tgaaagtaacaggaactgatagcat

SEQ ID NO: 52024 - DNA, 25 bp, Probe sequence
gtgaaagtaacaggaactgatagca

SEQ ID NO: 52025 - DNA, 25 bp, Probe sequence
gaaagtaacaggaactgatagcatt

SEQ ID NO: 52026 - DNA, 25 bp, Probe sequence
agtaacaggaactgatagcattaaa

SEQ ID NO: 52027 - DNA, 25 bp, Probe sequence
aaagtaacaggaactgatagcatta

SEQ ID NO: 52028 - DNA, 25 bp, Probe sequence
aagagaagctaagcaactttcatcg

SEQ ID NO: 52029 - DNA, 25 bp, Probe sequence
aggaactgatagcattaaaacactt

SEQ ID NO: 52030 - DNA, 25 bp, Probe sequence
aaagagaagctaagcaactttcatc

SEQ ID NO: 52031 - DNA, 25 bp, Probe sequence
aaggcattgtatacgttccagtaat

SEQ ID NO: 52032 - DNA, 25 bp, Probe sequence
caaggcattgtatacgttccagtaa

SEQ ID NO: 52033 - DNA, 25 bp, Probe sequence
ttacatctagtgggactttaactgg

SEQ ID NO: 52034 - DNA, 25 bp, Probe sequence
acatctagtgggactttaactggta

SEQ ID NO: 52035 - DNA, 25 bp, Probe sequence
tacatctagtgggactttaactggt

SEQ ID NO: 52036 - DNA, 25 bp, Probe sequence
catctagtgggactttaactggtac

SEQ ID NO: 52037 - DNA, 25 bp, Probe sequence
ctagtgggactttaactggtacaag

SEQ ID NO: 52038 - DNA, 25 bp, Probe sequence
atctagtgggactttaactggtaca

SEQ ID NO: 52039 - DNA, 25 bp, Probe sequence
gtagtagttacatctagtgggactt

SEQ ID NO: 52040 - DNA, 25 bp, Probe sequence
gataaataaattgggagttgcagca

SEQ ID NO: 52041 - DNA, 25 bp, Probe sequence
tgataaataaattgggagttgcagc

SEQ ID NO: 52042 - DNA, 25 bp, Probe sequence
aaataaattgggagttgcagcatat

SEQ ID NO: 52043 - DNA, 25 bp, Probe sequence
ataaataaattgggagttgcagcat

SEQ ID NO: 52044 - DNA, 25 bp, Probe sequence
taaattgggagttgcagcatataaa

SEQ ID NO: 52045 - DNA, 25 bp, Probe sequence
taaataaattgggagttgcagcata

SEQ ID NO: 52046 - DNA, 25 bp, Probe sequence
ataaattgggagttgcagcatataa

SEQ ID NO: 52047 - DNA, 25 bp, Probe sequence
aataaattgggagttgcagcatata

SEQ ID NO: 52048 - DNA, 25 bp, Probe sequence
cgtgcaactatttaattcagtgtgt

SEQ ID NO: 52049 - DNA, 25 bp, Probe sequence
tattcattatatttggcatcgtggc

SEQ ID NO: 52050 - DNA, 25 bp, Probe sequence
gaaattcggaggaaacaaatagagg

SEQ ID NO: 52051 - DNA, 25 bp, Probe sequence
acaaagaaattcggaggaaacaaat

SEQ ID NO: 52052 - DNA, 25 bp, Probe sequence
aacaaagaaattcggaggaaacaaa

SEQ ID NO: 52053 - DNA, 25 bp, Probe sequence
aaattcggaggaaacaaatagaggt

SEQ ID NO: 52054 - DNA, 25 bp, Probe sequence
aaaggttcaacaaagaaattcggag

SEQ ID NO: 52055 - DNA, 25 bp, Probe sequence
ttcaacaaagaaattcggaggaaac

SEQ ID NO: 52056 - DNA, 25 bp, Probe sequence
gttcaacaaagaaattcggaggaaa

SEQ ID NO: 52057 - DNA, 25 bp, Probe sequence
aattcggaggaaacaaatagaggtt

SEQ ID NO: 52058 - DNA, 25 bp, Probe sequence
cgcatttctaattattatatggctg

SEQ ID NO: 52059 - DNA, 25 bp, Probe sequence
tcgcatttctaattattatatggct

SEQ ID NO: 52060 - DNA, 25 bp, Probe sequence
tgttaatagaagaaagagggttaaa

SEQ ID NO: 52061 - DNA, 25 bp, Probe sequence
ttgttaatagaagaaagagggttaa

SEQ ID NO: 52062 - DNA, 25 bp, Probe sequence
attgttaatagaagaaagagggtta

SEQ ID NO: 52063 - DNA, 25 bp, Probe sequence
tattgttaatagaagaaagagggtt

SEQ ID NO: 52064 - DNA, 25 bp, Probe sequence
atcgcatttctaattattatatggc

SEQ ID NO: 52065 - DNA, 25 bp, Probe sequence
atattgttaatagaagaaagagggt

SEQ ID NO: 52066 - DNA, 25 bp, Probe sequence
tcattcatacactgactgttttaat

SEQ ID NO: 52067 - DNA, 25 bp, Probe sequence
ctcgtaccatagccataataagttg

SEQ ID NO: 52068 - DNA, 25 bp, Probe sequence
tcgtaccatagccataataagttgg

SEQ ID NO: 52069 - DNA, 25 bp, Probe sequence
gctcgtaccatagccataataagtt

SEQ ID NO: 52070 - DNA, 25 bp, Probe sequence
tagctcgtaccatagccataataag

SEQ ID NO: 52071 - DNA, 25 bp, Probe sequence
tgtcggattaaatataccaacagtt

SEQ ID NO: 52072 - DNA, 25 bp, Probe sequence
ttgtcggattaaatataccaacagt

SEQ ID NO: 52073 - DNA, 25 bp, Probe sequence
gatagctcgtaccatagccataata

SEQ ID NO: 52074 - DNA, 25 bp, Probe sequence
aaattgagccacattaaaggtgaca

SEQ ID NO: 52075 - DNA, 25 bp, Probe sequence
atagccataataagttggtttgtcg

SEQ ID NO: 52076 - DNA, 25 bp, Probe sequence
ggtaattctatcatgttaatgcgga

SEQ ID NO: 52077 - DNA, 25 bp, Probe sequence
aggtaattctatcatgttaatgcgg

SEQ ID NO: 52078 - DNA, 25 bp, Probe sequence
tctatcatgttaatgcggaatatca

SEQ ID NO: 52079 - DNA, 25 bp, Probe sequence
gtaattctatcatgttaatgcggaa

SEQ ID NO: 52080 - DNA, 25 bp, Probe sequence
aaggtaattctatcatgttaatgcg

SEQ ID NO: 52081 - DNA, 25 bp, Probe sequence
atcatgttaatgcggaatatcaatt

SEQ ID NO: 52082 - DNA, 25 bp, Probe sequence
ctatcatgttaatgcggaatatcaa

SEQ ID NO: 52083 - DNA, 25 bp, Probe sequence
ttctatcatgttaatgcggaatatc

SEQ ID NO: 52084 - DNA, 25 bp, Probe sequence
tatcatgttaatgcggaatatcaat

SEQ ID NO: 52085 - DNA, 25 bp, Probe sequence
cgtcaaacagttactgatttaaagg

SEQ ID NO: 52086 - DNA, 25 bp, Probe sequence
ccacgtcaaacagttactgatttaa

SEQ ID NO: 52087 - DNA, 25 bp, Probe sequence
accacgtcaaacagttactgattta

SEQ ID NO: 52088 - DNA, 25 bp, Probe sequence
taccacgtcaaacagttactgattt

SEQ ID NO: 52089 - DNA, 25 bp, Probe sequence
gtcgtcagaaaataattcagagtgc

SEQ ID NO: 52090 - DNA, 25 bp, Probe sequence
gtaccacgtcaaacagttactgatt

SEQ ID NO: 52091 - DNA, 25 bp, Probe sequence
agtcgtcagaaaataattcagagtg

SEQ ID NO: 52092 - DNA, 25 bp, Probe sequence
cacgtcaaacagttactgatttaaa

SEQ ID NO: 52093 - DNA, 25 bp, Probe sequence
aacagttactgatttaaaggtaggt

SEQ ID NO: 52094 - DNA, 25 bp, Probe sequence
acaaagttacatgcctaaatgtttc

SEQ ID NO: 52095 - DNA, 25 bp, Probe sequence
caaagttacatgcctaaatgtttct

SEQ ID NO: 52096 - DNA, 25 bp, Probe sequence
aaagttacatgcctaaatgtttctt

SEQ ID NO: 52097 - DNA, 25 bp, Probe sequence
acatgcctaaatgtttcttaacaaa

SEQ ID NO: 52098 - DNA, 25 bp, Probe sequence
tacaaagttacatgcctaaatgttt

SEQ ID NO: 52099 - DNA, 25 bp, Probe sequence
ttacaaagttacatgcctaaatgtt

SEQ ID NO: 52100 - DNA, 25 bp, Probe sequence
attacaaagttacatgcctaaatgt

SEQ ID NO: 52101 - DNA, 25 bp, Probe sequence
gttacatgcctaaatgtttcttaac

SEQ ID NO: 52102 - DNA, 25 bp, Probe sequence
tattacaaagttacatgcctaaatg

SEQ ID NO: 52103 - DNA, 25 bp, Probe sequence
gaaatcttccgcaactacactttag

SEQ ID NO: 52104 - DNA, 25 bp, Probe sequence
aaatcttccgcaactacactttagg

SEQ ID NO: 52105 - DNA, 25 bp, Probe sequence
cgaaatcttccgcaactacacttta

SEQ ID NO: 52106 - DNA, 25 bp, Probe sequence
aatcttccgcaactacactttaggc

SEQ ID NO: 52107 - DNA, 25 bp, Probe sequence
atgacaaatatcgcaaaagccaaaa

SEQ ID NO: 52108 - DNA, 25 bp, Probe sequence
aatgacaaatatcgcaaaagccaaa

SEQ ID NO: 52109 - DNA, 25 bp, Probe sequence
aaatgacaaatatcgcaaaagccaa

SEQ ID NO: 52110 - DNA, 25 bp, Probe sequence
aaaatgacaaatatcgcaaaagcca

SEQ ID NO: 52111 - DNA, 25 bp, Probe sequence
cttccgcaactacactttaggcttt

SEQ ID NO: 52112 - DNA, 25 bp, Probe sequence
gcagctataattgatcggttagttc

SEQ ID NO: 52113 - DNA, 25 bp, Probe sequence
agcagctataattgatcggttagtt

SEQ ID NO: 52114 - DNA, 25 bp, Probe sequence
cagcagctataattgatcggttagt

SEQ ID NO: 52115 - DNA, 25 bp, Probe sequence
tcagcagctataattgatcggttag

SEQ ID NO: 52116 - DNA, 25 bp, Probe sequence
gctataattgatcggttagttcacc

SEQ ID NO: 52117 - DNA, 25 bp, Probe sequence
aattgatcggttagttcaccattca

SEQ ID NO: 52118 - DNA, 25 bp, Probe sequence
taattgatcggttagttcaccattc

SEQ ID NO: 52119 - DNA, 25 bp, Probe sequence
agctataattgatcggttagttcac

SEQ ID NO: 52120 - DNA, 25 bp, Probe sequence
cagctataattgatcggttagttca

SEQ ID NO: 52121 - DNA, 25 bp, Probe sequence
ttgaattaggatatacagctatggc

SEQ ID NO: 52122 - DNA, 25 bp, Probe sequence
tgaattaggatatacagctatggcc

SEQ ID NO: 52123 - DNA, 25 bp, Probe sequence
caacaaaataagaaagcatcaaagc

SEQ ID NO: 52124 - DNA, 25 bp, Probe sequence
attgaattaggatatacagctatgg

SEQ ID NO: 52125 - DNA, 25 bp, Probe sequence
gcatcaaagctagattcatttaaag

SEQ ID NO: 52126 - DNA, 25 bp, Probe sequence
agaaagcatcaaagctagattcatt

SEQ ID NO: 52127 - DNA, 25 bp, Probe sequence
aagaaagcatcaaagctagattcat

SEQ ID NO: 52128 - DNA, 25 bp, Probe sequence
agacaacaaaataagaaagcatcaa

SEQ ID NO: 52129 - DNA, 25 bp, Probe sequence
aagacaacaaaataagaaagcatca

SEQ ID NO: 52130 - DNA, 25 bp, Probe sequence
tgacaatgatgttagacggtaagtt

SEQ ID NO: 52131 - DNA, 25 bp, Probe sequence
gtgacaatgatgttagacggtaagt

SEQ ID NO: 52132 - DNA, 25 bp, Probe sequence
gacaatgatgttagacggtaagtta

SEQ ID NO: 52133 - DNA, 25 bp, Probe sequence
caatgatgttagacggtaagttatc

SEQ ID NO: 52134 - DNA, 25 bp, Probe sequence
aatgatgttagacggtaagttatct

SEQ ID NO: 52135 - DNA, 25 bp, Probe sequence
acaatgatgttagacggtaagttat

SEQ ID NO: 52136 - DNA, 25 bp, Probe sequence
atgatgttagacggtaagttatcta

SEQ ID NO: 52137 - DNA, 25 bp, Probe sequence
aaagaattgctcaggttgttaactg

SEQ ID NO: 52138 - DNA, 25 bp, Probe sequence
agaattgctcaggttgttaactgaa

SEQ ID NO: 52139 - DNA, 25 bp, Probe sequence
tgaggatattgttgaaggtatgtgt

SEQ ID NO: 52140 - DNA, 25 bp, Probe sequence
aggatattgttgaaggtatgtgtct

SEQ ID NO: 52141 - DNA, 25 bp, Probe sequence
gaggatattgttgaaggtatgtgtc

SEQ ID NO: 52142 - DNA, 25 bp, Probe sequence
atgaggatattgttgaaggtatgtg

SEQ ID NO: 52143 - DNA, 25 bp, Probe sequence
ggatattgttgaaggtatgtgtctt

SEQ ID NO: 52144 - DNA, 25 bp, Probe sequence
gatgaggatattgttgaaggtatgt

SEQ ID NO: 52145 - DNA, 25 bp, Probe sequence
attgttgaaggtatgtgtcttgtat

SEQ ID NO: 52146 - DNA, 25 bp, Probe sequence
atattgttgaaggtatgtgtcttgt

SEQ ID NO: 52147 - DNA, 25 bp, Probe sequence
agatgaggatattgttgaaggtatg

SEQ ID NO: 52148 - DNA, 25 bp, Probe sequence
atctacttcatctgtccgatttaat

SEQ ID NO: 52149 - DNA, 25 bp, Probe sequence
tctacttcatctgtccgatttaata

SEQ ID NO: 52150 - DNA, 25 bp, Probe sequence
aatctacttcatctgtccgatttaa

SEQ ID NO: 52151 - DNA, 25 bp, Probe sequence
acttcatctgtccgatttaatattg

SEQ ID NO: 52152 - DNA, 25 bp, Probe sequence
ctacttcatctgtccgatttaatat

SEQ ID NO: 52153 - DNA, 25 bp, Probe sequence
cttcatctgtccgatttaatattga

SEQ ID NO: 52154 - DNA, 25 bp, Probe sequence
tcatctgtccgatttaatattgaat

SEQ ID NO: 52155 - DNA, 25 bp, Probe sequence
tacttcatctgtccgatttaatatt

SEQ ID NO: 52156 - DNA, 25 bp, Probe sequence
ttcatctgtccgatttaatattgaa

SEQ ID NO: 52157 - DNA, 25 bp, Probe sequence
gaagataacggacgctaagattgtg

SEQ ID NO: 52158 - DNA, 25 bp, Probe sequence
ggaagataacggacgctaagattgt

SEQ ID NO: 52159 - DNA, 25 bp, Probe sequence
tgaataacttgatgtctgtttgtca

SEQ ID NO: 52160 - DNA, 25 bp, Probe sequence
ttatctttgtcaaatgtgcttggag

SEQ ID NO: 52161 - DNA, 25 bp, Probe sequence
aagataacggacgctaagattgtgc

SEQ ID NO: 52162 - DNA, 25 bp, Probe sequence
attatctttgtcaaatgtgcttgga

SEQ ID NO: 52163 - DNA, 25 bp, Probe sequence
ttgaataacttgatgtctgtttgtc

SEQ ID NO: 52164 - DNA, 25 bp, Probe sequence
aattatctttgtcaaatgtgcttgg

SEQ ID NO: 52165 - DNA, 25 bp, Probe sequence
ataacttgatgtctgtttgtcatgc

SEQ ID NO: 52166 - DNA, 25 bp, Probe sequence
aatgatacaacacctacgattactt

SEQ ID NO: 52167 - DNA, 25 bp, Probe sequence
atgatacaacacctacgattacttt

SEQ ID NO: 52168 - DNA, 25 bp, Probe sequence
aaatgatacaacacctacgattact

SEQ ID NO: 52169 - DNA, 25 bp, Probe sequence
aatgatgcaacatctgatacaacac

SEQ ID NO: 52170 - DNA, 25 bp, Probe sequence
atgatgcaacatctgatacaacact

SEQ ID NO: 52171 - DNA, 25 bp, Probe sequence
tgatgcaacatctgatacaacactc

SEQ ID NO: 52172 - DNA, 25 bp, Probe sequence
tgatacaacacctacgattactttt

SEQ ID NO: 52173 - DNA, 25 bp, Probe sequence
aaaatgatacaacacctacgattac

SEQ ID NO: 52174 - DNA, 25 bp, Probe sequence
aaatgatgcaacatctgatacaaca

SEQ ID NO: 52175 - DNA, 25 bp, Probe sequence
aaaatgatgcaacatctgatacaac

SEQ ID NO: 52176 - DNA, 25 bp, Probe sequence
tgattgatacaggagatgacaatga

SEQ ID NO: 52177 - DNA, 25 bp, Probe sequence
gccagtctaaatgaacaacagttaa

SEQ ID NO: 52178 - DNA, 25 bp, Probe sequence
agccagtctaaatgaacaacagtta

SEQ ID NO: 52179 - DNA, 25 bp, Probe sequence
tagccagtctaaatgaacaacagtt

SEQ ID NO: 52180 - DNA, 25 bp, Probe sequence
ttgattgatacaggagatgacaatg

SEQ ID NO: 52181 - DNA, 25 bp, Probe sequence
attgatacaggagatgacaatgatg

SEQ ID NO: 52182 - DNA, 25 bp, Probe sequence
gattgatacaggagatgacaatgat

SEQ ID NO: 52183 - DNA, 25 bp, Probe sequence
agttaaagagtatgttgagacaggt

SEQ ID NO: 52184 - DNA, 25 bp, Probe sequence
gttagccagtctaaatgaacaacag

SEQ ID NO: 52185 - DNA, 25 bp, Probe sequence
tatgtctttgtatcaagttctttgc

SEQ ID NO: 52186 - DNA, 25 bp, Probe sequence
tgtctttgtatcaagttctttgcat

SEQ ID NO: 52187 - DNA, 25 bp, Probe sequence
atgtctttgtatcaagttctttgca

SEQ ID NO: 52188 - DNA, 25 bp, Probe sequence
gtctttgtatcaagttctttgcatc

SEQ ID NO: 52189 - DNA, 25 bp, Probe sequence
tcaagttctttgcatctaaatgtga

SEQ ID NO: 52190 - DNA, 25 bp, Probe sequence
tctttgtatcaagttctttgcatct

SEQ ID NO: 52191 - DNA, 25 bp, Probe sequence
caagttctttgcatctaaatgtgat

SEQ ID NO: 52192 - DNA, 25 bp, Probe sequence
atcaagttctttgcatctaaatgtg

SEQ ID NO: 52193 - DNA, 25 bp, Probe sequence
tgatgcaaacctataaagtatgtct

SEQ ID NO: 52194 - DNA, 25 bp, Probe sequence
atgaatgttgcgatacttgcgaatc

SEQ ID NO: 52195 - DNA, 25 bp, Probe sequence
gaccacgctgtagtgaagtatagaa

SEQ ID NO: 52196 - DNA, 25 bp, Probe sequence
gtatagaaacggcatgagtacaatc

SEQ ID NO: 52197 - DNA, 25 bp, Probe sequence
tatagaaacggcatgagtacaatcg

SEQ ID NO: 52198 - DNA, 25 bp, Probe sequence
gagtacaatcgctaagaccgtgaag

SEQ ID NO: 52199 - DNA, 25 bp, Probe sequence
acgctgtagtgaagtatagaaacgg

SEQ ID NO: 52200 - DNA, 25 bp, Probe sequence
ccacgctgtagtgaagtatagaaac

SEQ ID NO: 52201 - DNA, 25 bp, Probe sequence
atggaccacgctgtagtgaagtata

SEQ ID NO: 52202 - DNA, 25 bp, Probe sequence
accacgctgtagtgaagtatagaaa

SEQ ID NO: 52203 - DNA, 25 bp, Probe sequence
tgaaggaggaactacaaatgaaact

SEQ ID NO: 52204 - DNA, 25 bp, Probe sequence
aggaggaactacaaatgaaactact

SEQ ID NO: 52205 - DNA, 25 bp, Probe sequence
atgaaggaggaactacaaatgaaac

SEQ ID NO: 52206 - DNA, 25 bp, Probe sequence
aaggaggaactacaaatgaaactac

SEQ ID NO: 52207 - DNA, 25 bp, Probe sequence
gaaggaggaactacaaatgaaacta

SEQ ID NO: 52208 - DNA, 25 bp, Probe sequence
ggaggaactacaaatgaaactacta

SEQ ID NO: 52209 - DNA, 25 bp, Probe sequence
acaaatgaaactactaagaaggcta

SEQ ID NO: 52210 - DNA, 25 bp, Probe sequence
tacaaatgaaactactaagaaggct

SEQ ID NO: 52211 - DNA, 25 bp, Probe sequence
ctacaaatgaaactactaagaaggc

SEQ ID NO: 52212 - DNA, 25 bp, Probe sequence
actatcgtaatggtagttgcttgtt

SEQ ID NO: 52213 - DNA, 25 bp, Probe sequence
aacaagcactatcgtaatggtagtt

SEQ ID NO: 52214 - DNA, 25 bp, Probe sequence
cactatcgtaatggtagttgcttgt

SEQ ID NO: 52215 - DNA, 25 bp, Probe sequence
acaagcactatcgtaatggtagttg

SEQ ID NO: 52216 - DNA, 25 bp, Probe sequence
ctatcgtaatggtagttgcttgttt

SEQ ID NO: 52217 - DNA, 25 bp, Probe sequence
aaacaagcactatcgtaatggtagt

SEQ ID NO: 52218 - DNA, 25 bp, Probe sequence
gcactatcgtaatggtagttgcttg

SEQ ID NO: 52219 - DNA, 25 bp, Probe sequence
caagcactatcgtaatggtagttgc

SEQ ID NO: 52220 - DNA, 25 bp, Probe sequence
aaaacaagcactatcgtaatggtag

SEQ ID NO: 52221 - DNA, 25 bp, Probe sequence
aatgccaagaagcaatggaagtaat

SEQ ID NO: 52222 - DNA, 25 bp, Probe sequence
atgccaagaagcaatggaagtaatc

SEQ ID NO: 52223 - DNA, 25 bp, Probe sequence
ttatgactgtaccgtcaattcagtt

SEQ ID NO: 52224 - DNA, 25 bp, Probe sequence
agtaatccaatgtcttcttggcatt

SEQ ID NO: 52225 - DNA, 25 bp, Probe sequence
aagtaatccaatgtcttcttggcat

SEQ ID NO: 52226 - DNA, 25 bp, Probe sequence
tatgactgtaccgtcaattcagttg

SEQ ID NO: 52227 - DNA, 25 bp, Probe sequence
aaatgccaagaagcaatggaagtaa

SEQ ID NO: 52228 - DNA, 25 bp, Probe sequence
gaagtaatccaatgtcttcttggca

SEQ ID NO: 52229 - DNA, 25 bp, Probe sequence
tgtcttcttggcattttgaatttat

SEQ ID NO: 52230 - DNA, 25 bp, Probe sequence
ctttcctattcttcaagcccacttt

SEQ ID NO: 52231 - DNA, 25 bp, Probe sequence
aattaaccatcttcaaacattgccg

SEQ ID NO: 52232 - DNA, 25 bp, Probe sequence
attaaccatcttcaaacattgccgt

SEQ ID NO: 52233 - DNA, 25 bp, Probe sequence
ttaaccatcttcaaacattgccgtt

SEQ ID NO: 52234 - DNA, 25 bp, Probe sequence
tcttcaaacattgccgttagattcg

SEQ ID NO: 52235 - DNA, 25 bp, Probe sequence
aaccatcttcaaacattgccgttag

SEQ ID NO: 52236 - DNA, 25 bp, Probe sequence
taaccatcttcaaacattgccgtta

SEQ ID NO: 52237 - DNA, 25 bp, Probe sequence
taattaaccatcttcaaacattgcc

SEQ ID NO: 52238 - DNA, 25 bp, Probe sequence
atcttcaaacattgccgttagattc

SEQ ID NO: 52239 - DNA, 25 bp, Probe sequence
cgttgttgaaattactaatgaaggt

SEQ ID NO: 52240 - DNA, 25 bp, Probe sequence
aatgacagctatgaaattggacaag

SEQ ID NO: 52241 - DNA, 25 bp, Probe sequence
aaatgacagctatgaaattggacaa

SEQ ID NO: 52242 - DNA, 25 bp, Probe sequence
aaatgtaaatgttggaaatgacaca

SEQ ID NO: 52243 - DNA, 25 bp, Probe sequence
acgttgttgaaattactaatgaagg

SEQ ID NO: 52244 - DNA, 25 bp, Probe sequence
tgttggaaatgacacattacaaatt

SEQ ID NO: 52245 - DNA, 25 bp, Probe sequence
actaaatgtaaatgttggaaatgac

SEQ ID NO: 52246 - DNA, 25 bp, Probe sequence
cagctatgaaattggacaagcattt

SEQ ID NO: 52247 - DNA, 25 bp, Probe sequence
agtgtactaaatgtaaatgttggaa

SEQ ID NO: 52248 - DNA, 25 bp, Probe sequence
aattattatttgtattcgccgctgg

SEQ ID NO: 52249 - DNA, 25 bp, Probe sequence
tgttatctgtattattaggcacgtt

SEQ ID NO: 52250 - DNA, 25 bp, Probe sequence
ttgttatctgtattattaggcacgt

SEQ ID NO: 52251 - DNA, 25 bp, Probe sequence
aaattattatttgtattcgccgctg

SEQ ID NO: 52252 - DNA, 25 bp, Probe sequence
taaattattatttgtattcgccgct

SEQ ID NO: 52253 - DNA, 25 bp, Probe sequence
ctaaattattatttgtattcgccgc

SEQ ID NO: 52254 - DNA, 25 bp, Probe sequence
gctaaattattatttgtattcgccg

SEQ ID NO: 52255 - DNA, 25 bp, Probe sequence
ggcacgtttaatgtattgttatttg

SEQ ID NO: 52256 - DNA, 25 bp, Probe sequence
aggcacgtttaatgtattgttattt

SEQ ID NO: 52257 - DNA, 25 bp, Probe sequence
agtaatgaagtatgacaatggtgaa

SEQ ID NO: 52258 - DNA, 25 bp, Probe sequence
aagtaatgaagtatgacaatggtga

SEQ ID NO: 52259 - DNA, 25 bp, Probe sequence
tgaagtaatgaagtatgacaatggt

SEQ ID NO: 52260 - DNA, 25 bp, Probe sequence
gaagtaatgaagtatgacaatggtg

SEQ ID NO: 52261 - DNA, 25 bp, Probe sequence
gtaatgaagtatgacaatggtgaat

SEQ ID NO: 52262 - DNA, 25 bp, Probe sequence
atgaagtaatgaagtatgacaatgg

SEQ ID NO: 52263 - DNA, 25 bp, Probe sequence
taatgaagtatgacaatggtgaatt

SEQ ID NO: 52264 - DNA, 25 bp, Probe sequence
tgatgaagtaatgaagtatgacaat

SEQ ID NO: 52265 - DNA, 25 bp, Probe sequence
atgatgaagtaatgaagtatgacaa

SEQ ID NO: 52266 - DNA, 25 bp, Probe sequence
gcacactatataattggtatgacgg

SEQ ID NO: 52267 - DNA, 25 bp, Probe sequence
catactcaacattaacaagctggtg

SEQ ID NO: 52268 - DNA, 25 bp, Probe sequence
cacactatataattggtatgacgga

SEQ ID NO: 52269 - DNA, 25 bp, Probe sequence
tactttatatccaaaccgcaacttc

SEQ ID NO: 52270 - DNA, 25 bp, Probe sequence
ctactttatatccaaaccgcaactt

SEQ ID NO: 52271 - DNA, 25 bp, Probe sequence
attccctattactaaagccattcct

SEQ ID NO: 52272 - DNA, 25 bp, Probe sequence
cctactttatatccaaaccgcaact

SEQ ID NO: 52273 - DNA, 25 bp, Probe sequence
aaacacctactttatatccaaaccg

SEQ ID NO: 52274 - DNA, 25 bp, Probe sequence
acactatataattggtatgacggaa

SEQ ID NO: 52275 - DNA, 25 bp, Probe sequence
agtgctcatcggtattgtgttatta

SEQ ID NO: 52276 - DNA, 25 bp, Probe sequence
tagtgctcatcggtattgtgttatt

SEQ ID NO: 52277 - DNA, 25 bp, Probe sequence
atagtgctcatcggtattgtgttat

SEQ ID NO: 52278 - DNA, 25 bp, Probe sequence
ttatagtgctcatcggtattgtgtt

SEQ ID NO: 52279 - DNA, 25 bp, Probe sequence
gtgctcatcggtattgtgttattac

SEQ ID NO: 52280 - DNA, 25 bp, Probe sequence
tcatcggtattgtgttattacggtt

SEQ ID NO: 52281 - DNA, 25 bp, Probe sequence
tatagtgctcatcggtattgtgtta

SEQ ID NO: 52282 - DNA, 25 bp, Probe sequence
ctcatcggtattgtgttattacggt

SEQ ID NO: 52283 - DNA, 25 bp, Probe sequence
catcggtattgtgttattacggtta

SEQ ID NO: 52284 - DNA, 25 bp, Probe sequence
tactgctatcattccaccaattaca

SEQ ID NO: 52285 - DNA, 25 bp, Probe sequence
tgatagatgaagagtctgaagatgc

SEQ ID NO: 52286 - DNA, 25 bp, Probe sequence
gctatcattccaccaattacagaag

SEQ ID NO: 52287 - DNA, 25 bp, Probe sequence
tgctatcattccaccaattacagaa

SEQ ID NO: 52288 - DNA, 25 bp, Probe sequence
tatggaacagacatcagttatgacc

SEQ ID NO: 52289 - DNA, 25 bp, Probe sequence
gtactgctatcattccaccaattac

SEQ ID NO: 52290 - DNA, 25 bp, Probe sequence
ttcaactgtattcttcacgctaata

SEQ ID NO: 52291 - DNA, 25 bp, Probe sequence
ttatggaacagacatcagttatgac

SEQ ID NO: 52292 - DNA, 25 bp, Probe sequence
ctatcattccaccaattacagaaga

SEQ ID NO: 52293 - DNA, 25 bp, Probe sequence
gttatggaagttacaatcatttgcg

SEQ ID NO: 52294 - DNA, 25 bp, Probe sequence
ggttatggaagttacaatcatttgc

SEQ ID NO: 52295 - DNA, 25 bp, Probe sequence
ctcacaatcattaaaggacaagagt

SEQ ID NO: 52296 - DNA, 25 bp, Probe sequence
tcacaatcattaaaggacaagagta

SEQ ID NO: 52297 - DNA, 25 bp, Probe sequence
cctcacaatcattaaaggacaagag

SEQ ID NO: 52298 - DNA, 25 bp, Probe sequence
tggttatggaagttacaatcatttg

SEQ ID NO: 52299 - DNA, 25 bp, Probe sequence
cacaatcattaaaggacaagagtat

SEQ ID NO: 52300 - DNA, 25 bp, Probe sequence
ttggttatggaagttacaatcattt

SEQ ID NO: 52301 - DNA, 25 bp, Probe sequence
tttggttatggaagttacaatcatt

SEQ ID NO: 52302 - DNA, 25 bp, Probe sequence
atggtaatcaaatgacttcagatgc

SEQ ID NO: 52303 - DNA, 25 bp, Probe sequence
cgatggtaatcaaatgacttcagat

SEQ ID NO: 52304 - DNA, 25 bp, Probe sequence
atttagtttatttcacacccgagat

SEQ ID NO: 52305 - DNA, 25 bp, Probe sequence
tagtttatttcacacccgagatcaa

SEQ ID NO: 52306 - DNA, 25 bp, Probe sequence
ttagtttatttcacacccgagatca

SEQ ID NO: 52307 - DNA, 25 bp, Probe sequence
tttagtttatttcacacccgagatc

SEQ ID NO: 52308 - DNA, 25 bp, Probe sequence
tttatttcacacccgagatcaagaa

SEQ ID NO: 52309 - DNA, 25 bp, Probe sequence
gtttatttcacacccgagatcaaga

SEQ ID NO: 52310 - DNA, 25 bp, Probe sequence
agtttatttcacacccgagatcaag

SEQ ID NO: 52311 - DNA, 25 bp, Probe sequence
atgtattacctggtgttcaagttgg

SEQ ID NO: 52312 - DNA, 25 bp, Probe sequence
catgtattacctggtgttcaagttg

SEQ ID NO: 52313 - DNA, 25 bp, Probe sequence
taagcatgtattacctggtgttcaa

SEQ ID NO: 52314 - DNA, 25 bp, Probe sequence
ataagcatgtattacctggtgttca

SEQ ID NO: 52315 - DNA, 25 bp, Probe sequence
aagcatgtattacctggtgttcaag

SEQ ID NO: 52316 - DNA, 25 bp, Probe sequence
tgttcaagttggtagcacaattctt

SEQ ID NO: 52317 - DNA, 25 bp, Probe sequence
aataagcatgtattacctggtgttc

SEQ ID NO: 52318 - DNA, 25 bp, Probe sequence
cgaacataatgtgaagcaagtacaa

SEQ ID NO: 52319 - DNA, 25 bp, Probe sequence
aaggaattgttagaattggatcagc

SEQ ID NO: 52320 - DNA, 25 bp, Probe sequence
gctatcgttgaagttgaagaagatt

SEQ ID NO: 52321 - DNA, 25 bp, Probe sequence
gcattgacgatattaacatcagtga

SEQ ID NO: 52322 - DNA, 25 bp, Probe sequence
gtattgcggcattgacgatattaac

SEQ ID NO: 52323 - DNA, 25 bp, Probe sequence
agtattgcggcattgacgatattaa

SEQ ID NO: 52324 - DNA, 25 bp, Probe sequence
aagtattgcggcattgacgatatta

SEQ ID NO: 52325 - DNA, 25 bp, Probe sequence
tattgcggcattgacgatattaaca

SEQ ID NO: 52326 - DNA, 25 bp, Probe sequence
ctatcgttgaagttgaagaagattc

SEQ ID NO: 52327 - DNA, 25 bp, Probe sequence
cggcattgacgatattaacatcagt

SEQ ID NO: 52328 - DNA, 25 bp, Probe sequence
agccgaacataatgtaacgaagata

SEQ ID NO: 52329 - DNA, 25 bp, Probe sequence
acatattgacgaatggagacatctt

SEQ ID NO: 52330 - DNA, 25 bp, Probe sequence
cacatattgacgaatggagacatct

SEQ ID NO: 52331 - DNA, 25 bp, Probe sequence
atcacatattgacgaatggagacat

SEQ ID NO: 52332 - DNA, 25 bp, Probe sequence
tatcacatattgacgaatggagaca

SEQ ID NO: 52333 - DNA, 25 bp, Probe sequence
tcacatattgacgaatggagacatc

SEQ ID NO: 52334 - DNA, 25 bp, Probe sequence
accacttatcacatattgacgaatg

SEQ ID NO: 52335 - DNA, 25 bp, Probe sequence
catattgacgaatggagacatctta

SEQ ID NO: 52336 - DNA, 25 bp, Probe sequence
cacttatcacatattgacgaatgga

SEQ ID NO: 52337 - DNA, 25 bp, Probe sequence
ttatcacatattgacgaatggagac

SEQ ID NO: 52338 - DNA, 25 bp, Probe sequence
attcccattcttatttgtgccttac

SEQ ID NO: 52339 - DNA, 25 bp, Probe sequence
catattcccattcttatttgtgcct

SEQ ID NO: 52340 - DNA, 25 bp, Probe sequence
tcatattcccattcttatttgtgcc

SEQ ID NO: 52341 - DNA, 25 bp, Probe sequence
atattcccattcttatttgtgcctt

SEQ ID NO: 52342 - DNA, 25 bp, Probe sequence
gtcatattcccattcttatttgtgc

SEQ ID NO: 52343 - DNA, 25 bp, Probe sequence
tttcacttgtcatattcccattctt

SEQ ID NO: 52344 - DNA, 25 bp, Probe sequence
aacgatgaaggtttaagaactcaaa

SEQ ID NO: 52345 - DNA, 25 bp, Probe sequence
tattcccattcttatttgtgcctta

SEQ ID NO: 52346 - DNA, 25 bp, Probe sequence
cccattcttatttgtgccttacatt

SEQ ID NO: 52347 - DNA, 25 bp, Probe sequence
actccagaacttagcaatatcatta

SEQ ID NO: 52348 - DNA, 25 bp, Probe sequence
tactccagaacttagcaatatcatt

SEQ ID NO: 52349 - DNA, 25 bp, Probe sequence
ttactccagaacttagcaatatcat

SEQ ID NO: 52350 - DNA, 25 bp, Probe sequence
gaccgatccgcatctactatcttac

SEQ ID NO: 52351 - DNA, 25 bp, Probe sequence
aattagaccgatccgcatctactat

SEQ ID NO: 52352 - DNA, 25 bp, Probe sequence
agaccgatccgcatctactatctta

SEQ ID NO: 52353 - DNA, 25 bp, Probe sequence
atccgcatctactatcttacgtgaa

SEQ ID NO: 52354 - DNA, 25 bp, Probe sequence
attagaccgatccgcatctactatc

SEQ ID NO: 52355 - DNA, 25 bp, Probe sequence
agttatatcaatctgaaacggctca

SEQ ID NO: 52356 - DNA, 25 bp, Probe sequence
tgaaataattcccgctgaaagtatc

SEQ ID NO: 52357 - DNA, 25 bp, Probe sequence
tgatttacacattacttccaccatt

SEQ ID NO: 52358 - DNA, 25 bp, Probe sequence
gaaataattcccgctgaaagtatca

SEQ ID NO: 52359 - DNA, 25 bp, Probe sequence
atgaaataattcccgctgaaagtat

SEQ ID NO: 52360 - DNA, 25 bp, Probe sequence
atgatttacacattacttccaccat

SEQ ID NO: 52361 - DNA, 25 bp, Probe sequence
aaataattcccgctgaaagtatcat

SEQ ID NO: 52362 - DNA, 25 bp, Probe sequence
catgaaataattcccgctgaaagta

SEQ ID NO: 52363 - DNA, 25 bp, Probe sequence
catgatttacacattacttccacca

SEQ ID NO: 52364 - DNA, 25 bp, Probe sequence
aataattcccgctgaaagtatcatg

SEQ ID NO: 52365 - DNA, 25 bp, Probe sequence
aacaacgtcttactgtaattggtaa

SEQ ID NO: 52366 - DNA, 25 bp, Probe sequence
gtaatcaaacattcattcgagccat

SEQ ID NO: 52367 - DNA, 25 bp, Probe sequence
atcaaacattcattcgagccataaa

SEQ ID NO: 52368 - DNA, 25 bp, Probe sequence
aatcaaacattcattcgagccataa

SEQ ID NO: 52369 - DNA, 25 bp, Probe sequence
acaacgtcttactgtaattggtaat

SEQ ID NO: 52370 - DNA, 25 bp, Probe sequence
acgtcttactgtaattggtaatcaa

SEQ ID NO: 52371 - DNA, 25 bp, Probe sequence
aacgtcttactgtaattggtaatca

SEQ ID NO: 52372 - DNA, 25 bp, Probe sequence
taatcaaacattcattcgagccata

SEQ ID NO: 52373 - DNA, 25 bp, Probe sequence
aatcactacaaacaacgtcttactg

SEQ ID NO: 52374 - DNA, 25 bp, Probe sequence
ggatctacaatttctacaggcaatg

SEQ ID NO: 52375 - DNA, 25 bp, Probe sequence
tggatctacaatttctacaggcaat

SEQ ID NO: 52376 - DNA, 25 bp, Probe sequence
gatctacaatttctacaggcaatgc

SEQ ID NO: 52377 - DNA, 25 bp, Probe sequence
ttggatctacaatttctacaggcaa

SEQ ID NO: 52378 - DNA, 25 bp, Probe sequence
ctacaatttctacaggcaatgcaag

SEQ ID NO: 52379 - DNA, 25 bp, Probe sequence
atctacaatttctacaggcaatgca

SEQ ID NO: 52380 - DNA, 25 bp, Probe sequence
tctacaatttctacaggcaatgcaa

SEQ ID NO: 52381 - DNA, 25 bp, Probe sequence
tacaatttctacaggcaatgcaagt

SEQ ID NO: 52382 - DNA, 25 bp, Probe sequence
attggatctacaatttctacaggca

SEQ ID NO: 52383 - DNA, 25 bp, Probe sequence
ttgtcgaatgaacttgatgcactta

SEQ ID NO: 52384 - DNA, 25 bp, Probe sequence
aacttgatgcacttacctcattagt

SEQ ID NO: 52385 - DNA, 25 bp, Probe sequence
tgaacttgatgcacttacctcatta

SEQ ID NO: 52386 - DNA, 25 bp, Probe sequence
gaacttgatgcacttacctcattag

SEQ ID NO: 52387 - DNA, 25 bp, Probe sequence
acttgatgcacttacctcattagta

SEQ ID NO: 52388 - DNA, 25 bp, Probe sequence
gcacttacctcattagtaattgaag

SEQ ID NO: 52389 - DNA, 25 bp, Probe sequence
tgtcgaatgaacttgatgcacttac

SEQ ID NO: 52390 - DNA, 25 bp, Probe sequence
gaatgaacttgatgcacttacctca

SEQ ID NO: 52391 - DNA, 25 bp, Probe sequence
cgaatgaacttgatgcacttacctc

SEQ ID NO: 52392 - DNA, 25 bp, Probe sequence
ggttgtcatgttatttgtatggtcg

SEQ ID NO: 52393 - DNA, 25 bp, Probe sequence
tggttgtcatgttatttgtatggtc

SEQ ID NO: 52394 - DNA, 25 bp, Probe sequence
gcaagatggttgtcatgttatttgt

SEQ ID NO: 52395 - DNA, 25 bp, Probe sequence
atggttgtcatgttatttgtatggt

SEQ ID NO: 52396 - DNA, 25 bp, Probe sequence
ggcaagatggttgtcatgttatttg

SEQ ID NO: 52397 - DNA, 25 bp, Probe sequence
gatggttgtcatgttatttgtatgg

SEQ ID NO: 52398 - DNA, 25 bp, Probe sequence
gggcaagatggttgtcatgttattt

SEQ ID NO: 52399 - DNA, 25 bp, Probe sequence
caagatggttgtcatgttatttgta

SEQ ID NO: 52400 - DNA, 25 bp, Probe sequence
agatggttgtcatgttatttgtatg

SEQ ID NO: 52401 - DNA, 25 bp, Probe sequence
ggtgagaatgagaagaagaaggtaa

SEQ ID NO: 52402 - DNA, 25 bp, Probe sequence
agaatggtgagaatgagaagaagaa

SEQ ID NO: 52403 - DNA, 25 bp, Probe sequence
aagaatggtgagaatgagaagaaga

SEQ ID NO: 52404 - DNA, 25 bp, Probe sequence
aatggtgagaatgagaagaagaagg

SEQ ID NO: 52405 - DNA, 25 bp, Probe sequence
gaatggtgagaatgagaagaagaag

SEQ ID NO: 52406 - DNA, 25 bp, Probe sequence
tggtgagaatgagaagaagaaggta

SEQ ID NO: 52407 - DNA, 25 bp, Probe sequence
gtgagaatgagaagaagaaggtaac

SEQ ID NO: 52408 - DNA, 25 bp, Probe sequence
tgagaatgagaagaagaaggtaacc

SEQ ID NO: 52409 - DNA, 25 bp, Probe sequence
atggtgagaatgagaagaagaaggt

SEQ ID NO: 52410 - DNA, 25 bp, Probe sequence
caacaagtaacagtgacaaacgatt

SEQ ID NO: 52411 - DNA, 25 bp, Probe sequence
aacaagtaacagtgacaaacgatta

SEQ ID NO: 52412 - DNA, 25 bp, Probe sequence
agtaacagtgacaaacgattaacaa

SEQ ID NO: 52413 - DNA, 25 bp, Probe sequence
aagtaacagtgacaaacgattaaca

SEQ ID NO: 52414 - DNA, 25 bp, Probe sequence
acaagtaacagtgacaaacgattaa

SEQ ID NO: 52415 - DNA, 25 bp, Probe sequence
caagtaacagtgacaaacgattaac

SEQ ID NO: 52416 - DNA, 25 bp, Probe sequence
gtaacagtgacaaacgattaacaaa

SEQ ID NO: 52417 - DNA, 25 bp, Probe sequence
ccaacaagtaacagtgacaaacgat

SEQ ID NO: 52418 - DNA, 25 bp, Probe sequence
aacagtgacaaacgattaacaaaat

SEQ ID NO: 52419 - DNA, 25 bp, Probe sequence
cttatgccattgctgtacttcacta

SEQ ID NO: 52420 - DNA, 25 bp, Probe sequence
ttatgccattgctgtacttcactac

SEQ ID NO: 52421 - DNA, 25 bp, Probe sequence
gattgtgcttatgccattgctgtac

SEQ ID NO: 52422 - DNA, 25 bp, Probe sequence
attgtgcttatgccattgctgtact

SEQ ID NO: 52423 - DNA, 25 bp, Probe sequence
tatgccattgctgtacttcactaca

SEQ ID NO: 52424 - DNA, 25 bp, Probe sequence
ttgtgcttatgccattgctgtactt

SEQ ID NO: 52425 - DNA, 25 bp, Probe sequence
gcttatgccattgctgtacttcact

SEQ ID NO: 52426 - DNA, 25 bp, Probe sequence
tgcttatgccattgctgtacttcac

SEQ ID NO: 52427 - DNA, 25 bp, Probe sequence
gtgcttatgccattgctgtacttca

SEQ ID NO: 52428 - DNA, 25 bp, Probe sequence
gcatgtagaggtatagtggaagtta

SEQ ID NO: 52429 - DNA, 25 bp, Probe sequence
tatgaggcatgtagaggtatagtgg

SEQ ID NO: 52430 - DNA, 25 bp, Probe sequence
atatgaggcatgtagaggtatagtg

SEQ ID NO: 52431 - DNA, 25 bp, Probe sequence
ggcatgtagaggtatagtggaagtt

SEQ ID NO: 52432 - DNA, 25 bp, Probe sequence
gaggcatgtagaggtatagtggaag

SEQ ID NO: 52433 - DNA, 25 bp, Probe sequence
aggcatgtagaggtatagtggaagt

SEQ ID NO: 52434 - DNA, 25 bp, Probe sequence
tgaggcatgtagaggtatagtggaa

SEQ ID NO: 52435 - DNA, 25 bp, Probe sequence
atgaggcatgtagaggtatagtgga

SEQ ID NO: 52436 - DNA, 25 bp, Probe sequence
catgtagaggtatagtggaagttaa

SEQ ID NO: 52437 - DNA, 25 bp, Probe sequence
tcaacaattgaggttaacgtagtaa

SEQ ID NO: 52438 - DNA, 25 bp, Probe sequence
ttcaacaattgaggttaacgtagta

SEQ ID NO: 52439 - DNA, 25 bp, Probe sequence
caacaattgaggttaacgtagtaaa

SEQ ID NO: 52440 - DNA, 25 bp, Probe sequence
tcattttcattcatcttttcaacaa

SEQ ID NO: 52441 - DNA, 25 bp, Probe sequence
tttcaacaattgaggttaacgtagt

SEQ ID NO: 52442 - DNA, 25 bp, Probe sequence
atcattttcattcatcttttcaaca

SEQ ID NO: 52443 - DNA, 25 bp, Probe sequence
cattttcattcatcttttcaacaat

SEQ ID NO: 52444 - DNA, 25 bp, Probe sequence
aacaattgaggttaacgtagtaaaa

SEQ ID NO: 52445 - DNA, 25 bp, Probe sequence
tcttttcaacaattgaggttaacgt

SEQ ID NO: 52446 - DNA, 25 bp, Probe sequence
aacaggtgataagcaagaggttaag

SEQ ID NO: 52447 - DNA, 25 bp, Probe sequence
taacaggtgataagcaagaggttaa

SEQ ID NO: 52448 - DNA, 25 bp, Probe sequence
ttaacaggtgataagcaagaggtta

SEQ ID NO: 52449 - DNA, 25 bp, Probe sequence
taagcaagaggttaagcgaaagata

SEQ ID NO: 52450 - DNA, 25 bp, Probe sequence
acaggtgataagcaagaggttaagc

SEQ ID NO: 52451 - DNA, 25 bp, Probe sequence
ataagcaagaggttaagcgaaagat

SEQ ID NO: 52452 - DNA, 25 bp, Probe sequence
gttaagcgaaagataccttcagttt

SEQ ID NO: 52453 - DNA, 25 bp, Probe sequence
gataagcaagaggttaagcgaaaga

SEQ ID NO: 52454 - DNA, 25 bp, Probe sequence
ggtgataagcaagaggttaagcgaa

SEQ ID NO: 52455 - DNA, 25 bp, Probe sequence
aatagatgcaatggagattaacgaa

SEQ ID NO: 52456 - DNA, 25 bp, Probe sequence
taatagatgcaatggagattaacga

SEQ ID NO: 52457 - DNA, 25 bp, Probe sequence
ctaatagatgcaatggagattaacg

SEQ ID NO: 52458 - DNA, 25 bp, Probe sequence
gtgagtagtatggctacaataagta

SEQ ID NO: 52459 - DNA, 25 bp, Probe sequence
tggctacaataagtattactactga

SEQ ID NO: 52460 - DNA, 25 bp, Probe sequence
atagatgcaatggagattaacgaaa

SEQ ID NO: 52461 - DNA, 25 bp, Probe sequence
tgaacaaaacaaacataaaagcgac

SEQ ID NO: 52462 - DNA, 25 bp, Probe sequence
gtgaacaaaacaaacataaaagcga

SEQ ID NO: 52463 - DNA, 25 bp, Probe sequence
gaacaaaacaaacataaaagcgact

SEQ ID NO: 52464 - DNA, 25 bp, Probe sequence
aatatggtgaggtaactgatgaaga

SEQ ID NO: 52465 - DNA, 25 bp, Probe sequence
agaatatggtgaggtaactgatgaa

SEQ ID NO: 52466 - DNA, 25 bp, Probe sequence
aagaatatggtgaggtaactgatga

SEQ ID NO: 52467 - DNA, 25 bp, Probe sequence
atggtgaggtaactgatgaagatat

SEQ ID NO: 52468 - DNA, 25 bp, Probe sequence
atatggtgaggtaactgatgaagat

SEQ ID NO: 52469 - DNA, 25 bp, Probe sequence
gaatatggtgaggtaactgatgaag

SEQ ID NO: 52470 - DNA, 25 bp, Probe sequence
tatggtgaggtaactgatgaagata

SEQ ID NO: 52471 - DNA, 25 bp, Probe sequence
atcataatgtaacttcaccatcagt

SEQ ID NO: 52472 - DNA, 25 bp, Probe sequence
caaatggaaatcaaggaaactcaca

SEQ ID NO: 52473 - DNA, 25 bp, Probe sequence
cgacatatactgctacactgatgaa

SEQ ID NO: 52474 - DNA, 25 bp, Probe sequence
gcaatgaagaatagcaactctgtta

SEQ ID NO: 52475 - DNA, 25 bp, Probe sequence
gcgacatatactgctacactgatga

SEQ ID NO: 52476 - DNA, 25 bp, Probe sequence
tgcgacatatactgctacactgatg

SEQ ID NO: 52477 - DNA, 25 bp, Probe sequence
gccgttacaattctatgatatgtcg

SEQ ID NO: 52478 - DNA, 25 bp, Probe sequence
ttgcgacatatactgctacactgat

SEQ ID NO: 52479 - DNA, 25 bp, Probe sequence
acatatactgctacactgatgaatc

SEQ ID NO: 52480 - DNA, 25 bp, Probe sequence
gacatatactgctacactgatgaat

SEQ ID NO: 52481 - DNA, 25 bp, Probe sequence
actgatgaatcattgtgtcaagatg

SEQ ID NO: 52482 - DNA, 25 bp, Probe sequence
tggcggaaagtcagcttacattaat

SEQ ID NO: 52483 - DNA, 25 bp, Probe sequence
ctggcggaaagtcagcttacattaa

SEQ ID NO: 52484 - DNA, 25 bp, Probe sequence
ccaacataaagaaattggattccca

SEQ ID NO: 52485 - DNA, 25 bp, Probe sequence
cccaacataaagaaattggattccc

SEQ ID NO: 52486 - DNA, 25 bp, Probe sequence
caacataaagaaattggattcccaa

SEQ ID NO: 52487 - DNA, 25 bp, Probe sequence
ggcggaaagtcagcttacattaatg

SEQ ID NO: 52488 - DNA, 25 bp, Probe sequence
ccccaacataaagaaattggattcc

SEQ ID NO: 52489 - DNA, 25 bp, Probe sequence
gccccaacataaagaaattggattc

SEQ ID NO: 52490 - DNA, 25 bp, Probe sequence
ggccccaacataaagaaattggatt

SEQ ID NO: 52491 - DNA, 25 bp, Probe sequence
tggctgtatataaatatgcaagaca

SEQ ID NO: 52492 - DNA, 25 bp, Probe sequence
atggctgtatataaatatgcaagac

SEQ ID NO: 52493 - DNA, 25 bp, Probe sequence
ggctgtatataaatatgcaagacaa

SEQ ID NO: 52494 - DNA, 25 bp, Probe sequence
gctgtatataaatatgcaagacaaa

SEQ ID NO: 52495 - DNA, 25 bp, Probe sequence
aataattgttcatgtacaatatcga

SEQ ID NO: 52496 - DNA, 25 bp, Probe sequence
gtatttcaacattgtaagcgtatcg

SEQ ID NO: 52497 - DNA, 25 bp, Probe sequence
tgatgccattgtatttcaacattgt

SEQ ID NO: 52498 - DNA, 25 bp, Probe sequence
gccattgtatttcaacattgtaagc

SEQ ID NO: 52499 - DNA, 25 bp, Probe sequence
ccattgtatttcaacattgtaagcg

SEQ ID NO: 52500 - DNA, 25 bp, Probe sequence
cattgtatttcaacattgtaagcgt

SEQ ID NO: 52501 - DNA, 25 bp, Probe sequence
tgccattgtatttcaacattgtaag

SEQ ID NO: 52502 - DNA, 25 bp, Probe sequence
gatgccattgtatttcaacattgta

SEQ ID NO: 52503 - DNA, 25 bp, Probe sequence
tgtatttcaacattgtaagcgtatc

SEQ ID NO: 52504 - DNA, 25 bp, Probe sequence
atgccattgtatttcaacattgtaa

SEQ ID NO: 52505 - DNA, 25 bp, Probe sequence
tgtattattattaggtgttgcttgg

SEQ ID NO: 52506 - DNA, 25 bp, Probe sequence
cggtgttgtattattattaggtgtt

SEQ ID NO: 52507 - DNA, 25 bp, Probe sequence
cgctgttgtcgggttaatagatata

SEQ ID NO: 52508 - DNA, 25 bp, Probe sequence
tattaggtgttgcttggttatttcc

SEQ ID NO: 52509 - DNA, 25 bp, Probe sequence
gtattattattaggtgttgcttggt

SEQ ID NO: 52510 - DNA, 25 bp, Probe sequence
gctgttgtcgggttaatagatataa

SEQ ID NO: 52511 - DNA, 25 bp, Probe sequence
gtgttgtattattattaggtgttgc

SEQ ID NO: 52512 - DNA, 25 bp, Probe sequence
acgctgttgtcgggttaatagatat

SEQ ID NO: 52513 - DNA, 25 bp, Probe sequence
tattattaggtgttgcttggttatt

SEQ ID NO: 52514 - DNA, 25 bp, Probe sequence
ttcctgtagtatttatcggcatcat

SEQ ID NO: 52515 - DNA, 25 bp, Probe sequence
attcctgtagtatttatcggcatca

SEQ ID NO: 52516 - DNA, 25 bp, Probe sequence
aattcctgtagtatttatcggcatc

SEQ ID NO: 52517 - DNA, 25 bp, Probe sequence
tcctgtagtatttatcggcatcatg

SEQ ID NO: 52518 - DNA, 25 bp, Probe sequence
ttaattcctgtagtatttatcggca

SEQ ID NO: 52519 - DNA, 25 bp, Probe sequence
taattcctgtagtatttatcggcat

SEQ ID NO: 52520 - DNA, 25 bp, Probe sequence
aacattctaattgcatatacgacta

SEQ ID NO: 52521 - DNA, 25 bp, Probe sequence
attaattcctgtagtatttatcggc

SEQ ID NO: 52522 - DNA, 25 bp, Probe sequence
tgtagtatttatcggcatcatgagt

SEQ ID NO: 52523 - DNA, 25 bp, Probe sequence
tggtaaggaggacaatagttatgaa

SEQ ID NO: 52524 - DNA, 25 bp, Probe sequence
atggtaaggaggacaatagttatga

SEQ ID NO: 52525 - DNA, 25 bp, Probe sequence
ggtaaggaggacaatagttatgaat

SEQ ID NO: 52526 - DNA, 25 bp, Probe sequence
ggttcggactatatggattaagtag

SEQ ID NO: 52527 - DNA, 25 bp, Probe sequence
ctctttatctttgtgctttctggtg

SEQ ID NO: 52528 - DNA, 25 bp, Probe sequence
tctctttatctttgtgctttctggt

SEQ ID NO: 52529 - DNA, 25 bp, Probe sequence
ttctctttatctttgtgctttctgg

SEQ ID NO: 52530 - DNA, 25 bp, Probe sequence
tgttctctttatctttgtgctttct

SEQ ID NO: 52531 - DNA, 25 bp, Probe sequence
tagggttcggactatatggattaag

SEQ ID NO: 52532 - DNA, 25 bp, Probe sequence
aatgccattattcatgacgattatt

SEQ ID NO: 52533 - DNA, 25 bp, Probe sequence
atgtcggaaaatgccattattcatg

SEQ ID NO: 52534 - DNA, 25 bp, Probe sequence
aatgtcggaaaatgccattattcat

SEQ ID NO: 52535 - DNA, 25 bp, Probe sequence
ttgaatgtcggaaaatgccattatt

SEQ ID NO: 52536 - DNA, 25 bp, Probe sequence
tttgaatgtcggaaaatgccattat

SEQ ID NO: 52537 - DNA, 25 bp, Probe sequence
atttgaatgtcggaaaatgccatta

SEQ ID NO: 52538 - DNA, 25 bp, Probe sequence
gaatgtcggaaaatgccattattca

SEQ ID NO: 52539 - DNA, 25 bp, Probe sequence
tgaatgtcggaaaatgccattattc

SEQ ID NO: 52540 - DNA, 25 bp, Probe sequence
aatttgaatgtcggaaaatgccatt

SEQ ID NO: 52541 - DNA, 25 bp, Probe sequence
tgttagcatatttgagaatgaggtc

SEQ ID NO: 52542 - DNA, 25 bp, Probe sequence
tgagaatgaggtctttagtcaatga

SEQ ID NO: 52543 - DNA, 25 bp, Probe sequence
gttagcatatttgagaatgaggtct

SEQ ID NO: 52544 - DNA, 25 bp, Probe sequence
ttgttagcatatttgagaatgaggt

SEQ ID NO: 52545 - DNA, 25 bp, Probe sequence
agcatatttgagaatgaggtcttta

SEQ ID NO: 52546 - DNA, 25 bp, Probe sequence
tagcatatttgagaatgaggtcttt

SEQ ID NO: 52547 - DNA, 25 bp, Probe sequence
ttagcatatttgagaatgaggtctt

SEQ ID NO: 52548 - DNA, 25 bp, Probe sequence
gcatatttgagaatgaggtctttag

SEQ ID NO: 52549 - DNA, 25 bp, Probe sequence
agaatgaggtctttagtcaatgacg

SEQ ID NO: 52550 - DNA, 25 bp, Probe sequence
tcttcttaatgtgtttaggaactgc

SEQ ID NO: 52551 - DNA, 25 bp, Probe sequence
tgtgtttaggaactgcatctatcat

SEQ ID NO: 52552 - DNA, 25 bp, Probe sequence
atgtgtttaggaactgcatctatca

SEQ ID NO: 52553 - DNA, 25 bp, Probe sequence
cttcttaatgtgtttaggaactgca

SEQ ID NO: 52554 - DNA, 25 bp, Probe sequence
cttaatgtgtttaggaactgcatct

SEQ ID NO: 52555 - DNA, 25 bp, Probe sequence
tcttaatgtgtttaggaactgcatc

SEQ ID NO: 52556 - DNA, 25 bp, Probe sequence
gtgtttaggaactgcatctatcatt

SEQ ID NO: 52557 - DNA, 25 bp, Probe sequence
aatgtgtttaggaactgcatctatc

SEQ ID NO: 52558 - DNA, 25 bp, Probe sequence
ttcttaatgtgtttaggaactgcat

SEQ ID NO: 52559 - DNA, 25 bp, Probe sequence
gatttctcagttggtaacggaattg

SEQ ID NO: 52560 - DNA, 25 bp, Probe sequence
ttctcagttggtaacggaattggtc

SEQ ID NO: 52561 - DNA, 25 bp, Probe sequence
tgtttctacaatcttctctgctgat

SEQ ID NO: 52562 - DNA, 25 bp, Probe sequence
ctgtttctacaatcttctctgctga

SEQ ID NO: 52563 - DNA, 25 bp, Probe sequence
tttcgctgtttctacaatcttctct

SEQ ID NO: 52564 - DNA, 25 bp, Probe sequence
gtttcgctgtttctacaatcttctc

SEQ ID NO: 52565 - DNA, 25 bp, Probe sequence
atttctcagttggtaacggaattgg

SEQ ID NO: 52566 - DNA, 25 bp, Probe sequence
cgatttctcagttggtaacggaatt

SEQ ID NO: 52567 - DNA, 25 bp, Probe sequence
ttcgctgtttctacaatcttctctg

SEQ ID NO: 52568 - DNA, 25 bp, Probe sequence
cgaaatgtgtaccaaataaagttgt

SEQ ID NO: 52569 - DNA, 25 bp, Probe sequence
tcgaaatgtgtaccaaataaagttg

SEQ ID NO: 52570 - DNA, 25 bp, Probe sequence
taggctacggtatatttgcatatgg

SEQ ID NO: 52571 - DNA, 25 bp, Probe sequence
gctacggtatatttgcatatggttt

SEQ ID NO: 52572 - DNA, 25 bp, Probe sequence
gtaggctacggtatatttgcatatg

SEQ ID NO: 52573 - DNA, 25 bp, Probe sequence
ggctacggtatatttgcatatggtt

SEQ ID NO: 52574 - DNA, 25 bp, Probe sequence
acggtatatttgcatatggtttaca

SEQ ID NO: 52575 - DNA, 25 bp, Probe sequence
aggctacggtatatttgcatatggt

SEQ ID NO: 52576 - DNA, 25 bp, Probe sequence
ttatcttcaattactgttacttcga

SEQ ID NO: 52577 - DNA, 25 bp, Probe sequence
aacatattgaatcagcctcataaca

SEQ ID NO: 52578 - DNA, 25 bp, Probe sequence
acatattgaatcagcctcataacat

SEQ ID NO: 52579 - DNA, 25 bp, Probe sequence
aagagcaaagtatcgcatcatagta

SEQ ID NO: 52580 - DNA, 25 bp, Probe sequence
taagagcaaagtatcgcatcatagt

SEQ ID NO: 52581 - DNA, 25 bp, Probe sequence
gagcaaagtatcgcatcatagtaga

SEQ ID NO: 52582 - DNA, 25 bp, Probe sequence
agagcaaagtatcgcatcatagtag

SEQ ID NO: 52583 - DNA, 25 bp, Probe sequence
agcaaagtatcgcatcatagtagat

SEQ ID NO: 52584 - DNA, 25 bp, Probe sequence
catattgaatcagcctcataacatt

SEQ ID NO: 52585 - DNA, 25 bp, Probe sequence
ataagagcaaagtatcgcatcatag

SEQ ID NO: 52586 - DNA, 25 bp, Probe sequence
attacgccttcatatcaagtacatt

SEQ ID NO: 52587 - DNA, 25 bp, Probe sequence
aattacgccttcatatcaagtacat

SEQ ID NO: 52588 - DNA, 25 bp, Probe sequence
acgccttcatatcaagtacatttct

SEQ ID NO: 52589 - DNA, 25 bp, Probe sequence
tacgccttcatatcaagtacatttc

SEQ ID NO: 52590 - DNA, 25 bp, Probe sequence
ttgtcagggttcttctttatgaatt

SEQ ID NO: 52591 - DNA, 25 bp, Probe sequence
cgccttcatatcaagtacatttcta

SEQ ID NO: 52592 - DNA, 25 bp, Probe sequence
ttacgccttcatatcaagtacattt

SEQ ID NO: 52593 - DNA, 25 bp, Probe sequence
aaattacgccttcatatcaagtaca

SEQ ID NO: 52594 - DNA, 25 bp, Probe sequence
caagtacatttctattcaatcaccc

SEQ ID NO: 52595 - DNA, 25 bp, Probe sequence
gtacactcatcaagcaagtaattat

SEQ ID NO: 52596 - DNA, 25 bp, Probe sequence
tcatttggaagtcttacgtgaattt

SEQ ID NO: 52597 - DNA, 25 bp, Probe sequence
aaatcatttggaagtcttacgtgaa

SEQ ID NO: 52598 - DNA, 25 bp, Probe sequence
atcatttggaagtcttacgtgaatt

SEQ ID NO: 52599 - DNA, 25 bp, Probe sequence
aatcatttggaagtcttacgtgaat

SEQ ID NO: 52600 - DNA, 25 bp, Probe sequence
ttgtacactcatcaagcaagtaatt

SEQ ID NO: 52601 - DNA, 25 bp, Probe sequence
acactcatcaagcaagtaattatat

SEQ ID NO: 52602 - DNA, 25 bp, Probe sequence
tgtacactcatcaagcaagtaatta

SEQ ID NO: 52603 - DNA, 25 bp, Probe sequence
aaattgaggcaaatcatttggaagt

SEQ ID NO: 52604 - DNA, 25 bp, Probe sequence
tctgaattatgacgaagaccaatca

SEQ ID NO: 52605 - DNA, 25 bp, Probe sequence
atctgaattatgacgaagaccaatc

SEQ ID NO: 52606 - DNA, 25 bp, Probe sequence
tgaattatgacgaagaccaatcaag

SEQ ID NO: 52607 - DNA, 25 bp, Probe sequence
ctgaattatgacgaagaccaatcaa

SEQ ID NO: 52608 - DNA, 25 bp, Probe sequence
gaattatgacgaagaccaatcaaga

SEQ ID NO: 52609 - DNA, 25 bp, Probe sequence
aatctgaattatgacgaagaccaat

SEQ ID NO: 52610 - DNA, 25 bp, Probe sequence
aattatgacgaagaccaatcaagaa

SEQ ID NO: 52611 - DNA, 25 bp, Probe sequence
tgctagtagtatgtcgtagacctat

SEQ ID NO: 52612 - DNA, 25 bp, Probe sequence
atgctagtagtatgtcgtagaccta

SEQ ID NO: 52613 - DNA, 25 bp, Probe sequence
tcgtggacatgatacagttatatat

SEQ ID NO: 52614 - DNA, 25 bp, Probe sequence
atcgtggacatgatacagttatata

SEQ ID NO: 52615 - DNA, 25 bp, Probe sequence
tcatttcgtttatatatcgtggaca

SEQ ID NO: 52616 - DNA, 25 bp, Probe sequence
tttcgtttatatatcgtggacatga

SEQ ID NO: 52617 - DNA, 25 bp, Probe sequence
tatcgtggacatgatacagttatat

SEQ ID NO: 52618 - DNA, 25 bp, Probe sequence
atatcgtggacatgatacagttata

SEQ ID NO: 52619 - DNA, 25 bp, Probe sequence
tatatcgtggacatgatacagttat

SEQ ID NO: 52620 - DNA, 25 bp, Probe sequence
atatatcgtggacatgatacagtta

SEQ ID NO: 52621 - DNA, 25 bp, Probe sequence
tatatatcgtggacatgatacagtt

SEQ ID NO: 52622 - DNA, 25 bp, Probe sequence
gaagtaatgagaatggaacacaacc

SEQ ID NO: 52623 - DNA, 25 bp, Probe sequence
ggaagtaatgagaatggaacacaac

SEQ ID NO: 52624 - DNA, 25 bp, Probe sequence
aggaagtaatgagaatggaacacaa

SEQ ID NO: 52625 - DNA, 25 bp, Probe sequence
aaggaagtaatgagaatggaacaca

SEQ ID NO: 52626 - DNA, 25 bp, Probe sequence
caaggaagtaatgagaatggaacac

SEQ ID NO: 52627 - DNA, 25 bp, Probe sequence
acaaggaagtaatgagaatggaaca

SEQ ID NO: 52628 - DNA, 25 bp, Probe sequence
cacaaggaagtaatgagaatggaac

SEQ ID NO: 52629 - DNA, 25 bp, Probe sequence
acacaaggaagtaatgagaatggaa

SEQ ID NO: 52630 - DNA, 25 bp, Probe sequence
tgaaggtggttatgttgatggatac

SEQ ID NO: 52631 - DNA, 25 bp, Probe sequence
atgaaatctgctgagaaaaggactg

SEQ ID NO: 52632 - DNA, 25 bp, Probe sequence
tgaaatctgctgagaaaaggactgc

SEQ ID NO: 52633 - DNA, 25 bp, Probe sequence
actgcaaaagcaattagtaaacgaa

SEQ ID NO: 52634 - DNA, 25 bp, Probe sequence
aggactgcaaaagcaattagtaaac

SEQ ID NO: 52635 - DNA, 25 bp, Probe sequence
aaggactgcaaaagcaattagtaaa

SEQ ID NO: 52636 - DNA, 25 bp, Probe sequence
aaaggactgcaaaagcaattagtaa

SEQ ID NO: 52637 - DNA, 25 bp, Probe sequence
aaaaggactgcaaaagcaattagta

SEQ ID NO: 52638 - DNA, 25 bp, Probe sequence
agaaaaggactgcaaaagcaattag

SEQ ID NO: 52639 - DNA, 25 bp, Probe sequence
gagaaaaggactgcaaaagcaatta

SEQ ID NO: 52640 - DNA, 25 bp, Probe sequence
tttaaataaagtattgcgagctaca

SEQ ID NO: 52641 - DNA, 25 bp, Probe sequence
ttaaataaagtattgcgagctacaa

SEQ ID NO: 52642 - DNA, 25 bp, Probe sequence
gcatggaagcgattatacaaaacat

SEQ ID NO: 52643 - DNA, 25 bp, Probe sequence
tggaagcgattatacaaaacatttt

SEQ ID NO: 52644 - DNA, 25 bp, Probe sequence
atggaagcgattatacaaaacattt

SEQ ID NO: 52645 - DNA, 25 bp, Probe sequence
gcgagctacaattttaagggttatg

SEQ ID NO: 52646 - DNA, 25 bp, Probe sequence
catggaagcgattatacaaaacatt

SEQ ID NO: 52647 - DNA, 25 bp, Probe sequence
cgagctacaattttaagggttatga

SEQ ID NO: 52648 - DNA, 25 bp, Probe sequence
tgcgagctacaattttaagggttat

SEQ ID NO: 52649 - DNA, 25 bp, Probe sequence
cgaagttgaagcagcacataataat

SEQ ID NO: 52650 - DNA, 25 bp, Probe sequence
gactgtgaatatacctatgcgatgg

SEQ ID NO: 52651 - DNA, 25 bp, Probe sequence
cgactgtgaatatacctatgcgatg

SEQ ID NO: 52652 - DNA, 25 bp, Probe sequence
aagttgaagcagcacataataattg

SEQ ID NO: 52653 - DNA, 25 bp, Probe sequence
gaagttgaagcagcacataataatt

SEQ ID NO: 52654 - DNA, 25 bp, Probe sequence
actgtgaatatacctatgcgatggc

SEQ ID NO: 52655 - DNA, 25 bp, Probe sequence
aatcgactgtgaatatacctatgcg

SEQ ID NO: 52656 - DNA, 25 bp, Probe sequence
tcgaagttgaagcagcacataataa

SEQ ID NO: 52657 - DNA, 25 bp, Probe sequence
aaatactaagataggagggattggc

SEQ ID NO: 52658 - DNA, 25 bp, Probe sequence
cgcattcatatcacctcagagtcaa

SEQ ID NO: 52659 - DNA, 25 bp, Probe sequence
aacgcattcatatcacctcagagtc

SEQ ID NO: 52660 - DNA, 25 bp, Probe sequence
tagcagcaatgaaatggaacaatac

SEQ ID NO: 52661 - DNA, 25 bp, Probe sequence
aatagcagcaatgaaatggaacaat

SEQ ID NO: 52662 - DNA, 25 bp, Probe sequence
aaatagcagcaatgaaatggaacaa

SEQ ID NO: 52663 - DNA, 25 bp, Probe sequence
cagcaatgaaatggaacaatacctt

SEQ ID NO: 52664 - DNA, 25 bp, Probe sequence
agcaatgaaatggaacaataccttt

SEQ ID NO: 52665 - DNA, 25 bp, Probe sequence
ttaaacgcattcatatcacctcaga

SEQ ID NO: 52666 - DNA, 25 bp, Probe sequence
atagcagcaatgaaatggaacaata

SEQ ID NO: 52667 - DNA, 25 bp, Probe sequence
aaagtgtctaaatattggtggtcaa

SEQ ID NO: 52668 - DNA, 25 bp, Probe sequence
taaagtgtctaaatattggtggtca

SEQ ID NO: 52669 - DNA, 25 bp, Probe sequence
aagtgtctaaatattggtggtcaat

SEQ ID NO: 52670 - DNA, 25 bp, Probe sequence
ataaagtgtctaaatattggtggtc

SEQ ID NO: 52671 - DNA, 25 bp, Probe sequence
ttggtggtcaatattacttgcaaat

SEQ ID NO: 52672 - DNA, 25 bp, Probe sequence
tataaagtgtctaaatattggtggt

SEQ ID NO: 52673 - DNA, 25 bp, Probe sequence
tggtcaatattacttgcaaatacga

SEQ ID NO: 52674 - DNA, 25 bp, Probe sequence
gtggtcaatattacttgcaaatacg

SEQ ID NO: 52675 - DNA, 25 bp, Probe sequence
tggtggtcaatattacttgcaaata

SEQ ID NO: 52676 - DNA, 25 bp, Probe sequence
cacaaccatctaatccgaatcaatc

SEQ ID NO: 52677 - DNA, 25 bp, Probe sequence
tacacaaccatctaatccgaatcaa

SEQ ID NO: 52678 - DNA, 25 bp, Probe sequence
atacacaaccatctaatccgaatca

SEQ ID NO: 52679 - DNA, 25 bp, Probe sequence
acaaccatctaatccgaatcaatca

SEQ ID NO: 52680 - DNA, 25 bp, Probe sequence
acacaaccatctaatccgaatcaat

SEQ ID NO: 52681 - DNA, 25 bp, Probe sequence
caaccatctaatccgaatcaatcaa

SEQ ID NO: 52682 - DNA, 25 bp, Probe sequence
aatacacaaccatctaatccgaatc

SEQ ID NO: 52683 - DNA, 25 bp, Probe sequence
gaatacacaaccatctaatccgaat

SEQ ID NO: 52684 - DNA, 25 bp, Probe sequence
cgaatacacaaccatctaatccgaa

SEQ ID NO: 52685 - DNA, 25 bp, Probe sequence
ctatctctgacaacgagtgatgatt

SEQ ID NO: 52686 - DNA, 25 bp, Probe sequence
ttcagcagtgtctacaacagataat

SEQ ID NO: 52687 - DNA, 25 bp, Probe sequence
attcagcagtgtctacaacagataa

SEQ ID NO: 52688 - DNA, 25 bp, Probe sequence
gattcagcagtgtctacaacagata

SEQ ID NO: 52689 - DNA, 25 bp, Probe sequence
aaggcgttagaagacttagaccatt

SEQ ID NO: 52690 - DNA, 25 bp, Probe sequence
tcagcagtgtctacaacagataata

SEQ ID NO: 52691 - DNA, 25 bp, Probe sequence
actatctctgacaacgagtgatgat

SEQ ID NO: 52692 - DNA, 25 bp, Probe sequence
aataaggcgttagaagacttagacc

SEQ ID NO: 52693 - DNA, 25 bp, Probe sequence
caactatctctgacaacgagtgatg

SEQ ID NO: 52694 - DNA, 25 bp, Probe sequence
gattctgagtcgctaattgatgttg

SEQ ID NO: 52695 - DNA, 25 bp, Probe sequence
tctgagtcgctaattgatgttgaat

SEQ ID NO: 52696 - DNA, 25 bp, Probe sequence
attctgagtcgctaattgatgttga

SEQ ID NO: 52697 - DNA, 25 bp, Probe sequence
tgattctgagtcgctaattgatgtt

SEQ ID NO: 52698 - DNA, 25 bp, Probe sequence
ctgagtcgctaattgatgttgaatc

SEQ ID NO: 52699 - DNA, 25 bp, Probe sequence
ctgattctgagtcgctaattgatgt

SEQ ID NO: 52700 - DNA, 25 bp, Probe sequence
accagacatacttagcgattcagat

SEQ ID NO: 52701 - DNA, 25 bp, Probe sequence
ttctgagtcgctaattgatgttgaa

SEQ ID NO: 52702 - DNA, 25 bp, Probe sequence
ccagacatacttagcgattcagatg

SEQ ID NO: 52703 - DNA, 25 bp, Probe sequence
aacttgactgtaacttggtataacg

SEQ ID NO: 52704 - DNA, 25 bp, Probe sequence
aagcaccgttacaacaccaattata

SEQ ID NO: 52705 - DNA, 25 bp, Probe sequence
taagcaccgttacaacaccaattat

SEQ ID NO: 52706 - DNA, 25 bp, Probe sequence
ttaagcaccgttacaacaccaatta

SEQ ID NO: 52707 - DNA, 25 bp, Probe sequence
agcaccgttacaacaccaattatag

SEQ ID NO: 52708 - DNA, 25 bp, Probe sequence
gcaccgttacaacaccaattatagg

SEQ ID NO: 52709 - DNA, 25 bp, Probe sequence
caacaccaattataggtattccagc

SEQ ID NO: 52710 - DNA, 25 bp, Probe sequence
accgttacaacaccaattataggta

SEQ ID NO: 52711 - DNA, 25 bp, Probe sequence
acttgactgtaacttggtataacgt

SEQ ID NO: 52712 - DNA, 25 bp, Probe sequence
ccacatataagtaataacacgacca

SEQ ID NO: 52713 - DNA, 25 bp, Probe sequence
accacatataagtaataacacgacc

SEQ ID NO: 52714 - DNA, 25 bp, Probe sequence
tataagtaataacacgaccatgccg

SEQ ID NO: 52715 - DNA, 25 bp, Probe sequence
cgaccatgccgtatataacattatt

SEQ ID NO: 52716 - DNA, 25 bp, Probe sequence
atataagtaataacacgaccatgcc

SEQ ID NO: 52717 - DNA, 25 bp, Probe sequence
acaaccacatataagtaataacacg

SEQ ID NO: 52718 - DNA, 25 bp, Probe sequence
catataagtaataacacgaccatgc

SEQ ID NO: 52719 - DNA, 25 bp, Probe sequence
aaccacatataagtaataacacgac

SEQ ID NO: 52720 - DNA, 25 bp, Probe sequence
caaccacatataagtaataacacga

SEQ ID NO: 52721 - DNA, 25 bp, Probe sequence
tgaatggtacaatcgcaattaacaa

SEQ ID NO: 52722 - DNA, 25 bp, Probe sequence
gtgaatggtacaatcgcaattaaca

SEQ ID NO: 52723 - DNA, 25 bp, Probe sequence
tgtgaatggtacaatcgcaattaac

SEQ ID NO: 52724 - DNA, 25 bp, Probe sequence
gaatggtacaatcgcaattaacaaa

SEQ ID NO: 52725 - DNA, 25 bp, Probe sequence
ttgtgaatggtacaatcgcaattaa

SEQ ID NO: 52726 - DNA, 25 bp, Probe sequence
tttgtgaatggtacaatcgcaatta

SEQ ID NO: 52727 - DNA, 25 bp, Probe sequence
aatggtacaatcgcaattaacaaaa

SEQ ID NO: 52728 - DNA, 25 bp, Probe sequence
cgtaccaattgaagtacctactact

SEQ ID NO: 52729 - DNA, 25 bp, Probe sequence
tcgtaccaattgaagtacctactac

SEQ ID NO: 52730 - DNA, 25 bp, Probe sequence
aggtatgattggatataacggtact

SEQ ID NO: 52731 - DNA, 25 bp, Probe sequence
ggtatgattggatataacggtactt

SEQ ID NO: 52732 - DNA, 25 bp, Probe sequence
aaggtatgattggatataacggtac

SEQ ID NO: 52733 - DNA, 25 bp, Probe sequence
ataacggtactttatatggtcgctc

SEQ ID NO: 52734 - DNA, 25 bp, Probe sequence
aattaatacaaatgaccctgccaaa

SEQ ID NO: 52735 - DNA, 25 bp, Probe sequence
taattaatacaaatgaccctgccaa

SEQ ID NO: 52736 - DNA, 25 bp, Probe sequence
taacggtactttatatggtcgctcc

SEQ ID NO: 52737 - DNA, 25 bp, Probe sequence
tataacggtactttatatggtcgct

SEQ ID NO: 52738 - DNA, 25 bp, Probe sequence
aaaggtatgattggatataacggta

SEQ ID NO: 52739 - DNA, 25 bp, Probe sequence
tagtgcaagaccaatcattgtgaat

SEQ ID NO: 52740 - DNA, 25 bp, Probe sequence
ctagtgcaagaccaatcattgtgaa

SEQ ID NO: 52741 - DNA, 25 bp, Probe sequence
gcatcggataaaggtccaaagataa

SEQ ID NO: 52742 - DNA, 25 bp, Probe sequence
catcggataaaggtccaaagataaa

SEQ ID NO: 52743 - DNA, 25 bp, Probe sequence
agcatcggataaaggtccaaagata

SEQ ID NO: 52744 - DNA, 25 bp, Probe sequence
cggataaaggtccaaagataaattg

SEQ ID NO: 52745 - DNA, 25 bp, Probe sequence
tcggataaaggtccaaagataaatt

SEQ ID NO: 52746 - DNA, 25 bp, Probe sequence
atcggataaaggtccaaagataaat

SEQ ID NO: 52747 - DNA, 25 bp, Probe sequence
cctagtgcaagaccaatcattgtga

SEQ ID NO: 52748 - DNA, 25 bp, Probe sequence
ttaaatgtagaccaagaatccctcc

SEQ ID NO: 52749 - DNA, 25 bp, Probe sequence
taaatgtagaccaagaatccctccc

SEQ ID NO: 52750 - DNA, 25 bp, Probe sequence
tttaaatgtagaccaagaatccctc

SEQ ID NO: 52751 - DNA, 25 bp, Probe sequence
atggtttaggaataggtgaaaaggc

SEQ ID NO: 52752 - DNA, 25 bp, Probe sequence
catggtttaggaataggtgaaaagg

SEQ ID NO: 52753 - DNA, 25 bp, Probe sequence
ttttaaatgtagaccaagaatccct

SEQ ID NO: 52754 - DNA, 25 bp, Probe sequence
gttttaaatgtagaccaagaatccc

SEQ ID NO: 52755 - DNA, 25 bp, Probe sequence
tgttttaaatgtagaccaagaatcc

SEQ ID NO: 52756 - DNA, 25 bp, Probe sequence
aaatgtagaccaagaatccctcccc

SEQ ID NO: 52757 - DNA, 25 bp, Probe sequence
cgagtagattacaattagagcatgt

SEQ ID NO: 52758 - DNA, 25 bp, Probe sequence
tcgagtagattacaattagagcatg

SEQ ID NO: 52759 - DNA, 25 bp, Probe sequence
atcgagtagattacaattagagcat

SEQ ID NO: 52760 - DNA, 25 bp, Probe sequence
gattacaattagagcatgtaggtga

SEQ ID NO: 52761 - DNA, 25 bp, Probe sequence
agattacaattagagcatgtaggtg

SEQ ID NO: 52762 - DNA, 25 bp, Probe sequence
acaattagagcatgtaggtgatttg

SEQ ID NO: 52763 - DNA, 25 bp, Probe sequence
ttacaattagagcatgtaggtgatt

SEQ ID NO: 52764 - DNA, 25 bp, Probe sequence
attacaattagagcatgtaggtgat

SEQ ID NO: 52765 - DNA, 25 bp, Probe sequence
tatcgagtagattacaattagagca

SEQ ID NO: 52766 - DNA, 25 bp, Probe sequence
atattgagggaaggatgagaatgtg

SEQ ID NO: 52767 - DNA, 25 bp, Probe sequence
gatattgagggaaggatgagaatgt

SEQ ID NO: 52768 - DNA, 25 bp, Probe sequence
tgatattgagggaaggatgagaatg

SEQ ID NO: 52769 - DNA, 25 bp, Probe sequence
agatgatattgagggaaggatgaga

SEQ ID NO: 52770 - DNA, 25 bp, Probe sequence
gatgatattgagggaaggatgagaa

SEQ ID NO: 52771 - DNA, 25 bp, Probe sequence
aagatgatattgagggaaggatgag

SEQ ID NO: 52772 - DNA, 25 bp, Probe sequence
atgatattgagggaaggatgagaat

SEQ ID NO: 52773 - DNA, 25 bp, Probe sequence
tattgagggaaggatgagaatgtgt

SEQ ID NO: 52774 - DNA, 25 bp, Probe sequence
caagatgatattgagggaaggatga

SEQ ID NO: 52775 - DNA, 25 bp, Probe sequence
gcttctgttaatgctcattgtctta

SEQ ID NO: 52776 - DNA, 25 bp, Probe sequence
tgttaatgctcattgtcttatctcg

SEQ ID NO: 52777 - DNA, 25 bp, Probe sequence
tctgttaatgctcattgtcttatct

SEQ ID NO: 52778 - DNA, 25 bp, Probe sequence
catacttcggtgtatctccttcaac

SEQ ID NO: 52779 - DNA, 25 bp, Probe sequence
ctgttaatgctcattgtcttatctc

SEQ ID NO: 52780 - DNA, 25 bp, Probe sequence
cgcttctgttaatgctcattgtctt

SEQ ID NO: 52781 - DNA, 25 bp, Probe sequence
atacttcggtgtatctccttcaaca

SEQ ID NO: 52782 - DNA, 25 bp, Probe sequence
gttaatgctcattgtcttatctcga

SEQ ID NO: 52783 - DNA, 25 bp, Probe sequence
actgtcgtatgtgtagatggtaaat

SEQ ID NO: 52784 - DNA, 25 bp, Probe sequence
gggaaatggataaagcaacatcaaa

SEQ ID NO: 52785 - DNA, 25 bp, Probe sequence
tagggaaatggataaagcaacatca

SEQ ID NO: 52786 - DNA, 25 bp, Probe sequence
ttagggaaatggataaagcaacatc

SEQ ID NO: 52787 - DNA, 25 bp, Probe sequence
gttagggaaatggataaagcaacat

SEQ ID NO: 52788 - DNA, 25 bp, Probe sequence
agggaaatggataaagcaacatcaa

SEQ ID NO: 52789 - DNA, 25 bp, Probe sequence
cgttagggaaatggataaagcaaca

SEQ ID NO: 52790 - DNA, 25 bp, Probe sequence
gcgttagggaaatggataaagcaac

SEQ ID NO: 52791 - DNA, 25 bp, Probe sequence
gataaagcaacatcaaaacacaggt

SEQ ID NO: 52792 - DNA, 25 bp, Probe sequence
tggataaagcaacatcaaaacacag

SEQ ID NO: 52793 - DNA, 25 bp, Probe sequence
aagcacgagcactactagatgaatt

SEQ ID NO: 52794 - DNA, 25 bp, Probe sequence
gaagcacgagcactactagatgaat

SEQ ID NO: 52795 - DNA, 25 bp, Probe sequence
atatggcattgatgaacacacaatc

SEQ ID NO: 52796 - DNA, 25 bp, Probe sequence
aatatggcattgatgaacacacaat

SEQ ID NO: 52797 - DNA, 25 bp, Probe sequence
gagcactactagatgaatttgaagc

SEQ ID NO: 52798 - DNA, 25 bp, Probe sequence
acgagcactactagatgaatttgaa

SEQ ID NO: 52799 - DNA, 25 bp, Probe sequence
cgagcactactagatgaatttgaag

SEQ ID NO: 52800 - DNA, 25 bp, Probe sequence
aaatatggcattgatgaacacacaa

SEQ ID NO: 52801 - DNA, 25 bp, Probe sequence
cactactagatgaatttgaagccca

SEQ ID NO: 52802 - DNA, 25 bp, Probe sequence
ttggtggattatcattagcgttagg

SEQ ID NO: 52803 - DNA, 25 bp, Probe sequence
ggtggattatcattagcgttaggtg

SEQ ID NO: 52804 - DNA, 25 bp, Probe sequence
tggtggattatcattagcgttaggt

SEQ ID NO: 52805 - DNA, 25 bp, Probe sequence
gtggattatcattagcgttaggtgc

SEQ ID NO: 52806 - DNA, 25 bp, Probe sequence
aatcttgaacatgcctaacttgaac

SEQ ID NO: 52807 - DNA, 25 bp, Probe sequence
taacttgaacgaagaacaacgcaat

SEQ ID NO: 52808 - DNA, 25 bp, Probe sequence
atgcctaacttgaacgaagaacaac

SEQ ID NO: 52809 - DNA, 25 bp, Probe sequence
atcttgaacatgcctaacttgaacg

SEQ ID NO: 52810 - DNA, 25 bp, Probe sequence
gaacatgcctaacttgaacgaagaa

SEQ ID NO: 52811 - DNA, 25 bp, Probe sequence
aacaaggaacattcgttatattctt

SEQ ID NO: 52812 - DNA, 25 bp, Probe sequence
aaggaacattcgttatattcttgat

SEQ ID NO: 52813 - DNA, 25 bp, Probe sequence
agatgaatttaacaaatgagccttt

SEQ ID NO: 52814 - DNA, 25 bp, Probe sequence
aagatgaatttaacaaatgagcctt

SEQ ID NO: 52815 - DNA, 25 bp, Probe sequence
aggaacattcgttatattcttgata

SEQ ID NO: 52816 - DNA, 25 bp, Probe sequence
aaacaaggaacattcgttatattct

SEQ ID NO: 52817 - DNA, 25 bp, Probe sequence
taagatgaatttaacaaatgagcct

SEQ ID NO: 52818 - DNA, 25 bp, Probe sequence
acaaggaacattcgttatattcttg

SEQ ID NO: 52819 - DNA, 25 bp, Probe sequence
caaggaacattcgttatattcttga

SEQ ID NO: 52820 - DNA, 25 bp, Probe sequence
gtagtattaatggcaagactcctga

SEQ ID NO: 52821 - DNA, 25 bp, Probe sequence
tagtattaatggcaagactcctgag

SEQ ID NO: 52822 - DNA, 25 bp, Probe sequence
cgtagtattaatggcaagactcctg

SEQ ID NO: 52823 - DNA, 25 bp, Probe sequence
agtattaatggcaagactcctgagg

SEQ ID NO: 52824 - DNA, 25 bp, Probe sequence
acgtagtattaatggcaagactcct

SEQ ID NO: 52825 - DNA, 25 bp, Probe sequence
tacgtagtattaatggcaagactcc

SEQ ID NO: 52826 - DNA, 25 bp, Probe sequence
gtattaatggcaagactcctgaggg

SEQ ID NO: 52827 - DNA, 25 bp, Probe sequence
atacgtagtattaatggcaagactc

SEQ ID NO: 52828 - DNA, 25 bp, Probe sequence
tattaatggcaagactcctgaggga

SEQ ID NO: 52829 - DNA, 25 bp, Probe sequence
caatcaagtctgggaagtcaataga

SEQ ID NO: 52830 - DNA, 25 bp, Probe sequence
atcaagtctgggaagtcaatagaaa

SEQ ID NO: 52831 - DNA, 25 bp, Probe sequence
aatcaagtctgggaagtcaatagaa

SEQ ID NO: 52832 - DNA, 25 bp, Probe sequence
gcaatcaagtctgggaagtcaatag

SEQ ID NO: 52833 - DNA, 25 bp, Probe sequence
agcaatcaagtctgggaagtcaata

SEQ ID NO: 52834 - DNA, 25 bp, Probe sequence
aagcaatcaagtctgggaagtcaat

SEQ ID NO: 52835 - DNA, 25 bp, Probe sequence
aaagcaatcaagtctgggaagtcaa

SEQ ID NO: 52836 - DNA, 25 bp, Probe sequence
agtctgggaagtcaatagaaaatgt

SEQ ID NO: 52837 - DNA, 25 bp, Probe sequence
tcaagtctgggaagtcaatagaaaa

SEQ ID NO: 52838 - DNA, 25 bp, Probe sequence
tagataatcaaggtggagaggtcat

SEQ ID NO: 52839 - DNA, 25 bp, Probe sequence
atgtagataatcaaggtggagaggt

SEQ ID NO: 52840 - DNA, 25 bp, Probe sequence
agataatcaaggtggagaggtcatt

SEQ ID NO: 52841 - DNA, 25 bp, Probe sequence
gtagataatcaaggtggagaggtca

SEQ ID NO: 52842 - DNA, 25 bp, Probe sequence
tgtagataatcaaggtggagaggtc

SEQ ID NO: 52843 - DNA, 25 bp, Probe sequence
tatgtagataatcaaggtggagagg

SEQ ID NO: 52844 - DNA, 25 bp, Probe sequence
tgcttatgtagataatcaaggtgga

SEQ ID NO: 52845 - DNA, 25 bp, Probe sequence
aacctggaagtgaagaattgaatta

SEQ ID NO: 52846 - DNA, 25 bp, Probe sequence
gcttatgtagataatcaaggtggag

SEQ ID NO: 52847 - DNA, 25 bp, Probe sequence
ttgagcgaaataactttatgccatc

SEQ ID NO: 52848 - DNA, 25 bp, Probe sequence
attgagcgaaataactttatgccat

SEQ ID NO: 52849 - DNA, 25 bp, Probe sequence
aattgagcgaaataactttatgcca

SEQ ID NO: 52850 - DNA, 25 bp, Probe sequence
taattgagcgaaataactttatgcc

SEQ ID NO: 52851 - DNA, 25 bp, Probe sequence
tatcttcaatgaaacggtggaaact

SEQ ID NO: 52852 - DNA, 25 bp, Probe sequence
gtatcttcaatgaaacggtggaaac

SEQ ID NO: 52853 - DNA, 25 bp, Probe sequence
taactttatgccatcggtattaact

SEQ ID NO: 52854 - DNA, 25 bp, Probe sequence
gaaataactttatgccatcggtatt

SEQ ID NO: 52855 - DNA, 25 bp, Probe sequence
atcttcaatgaaacggtggaaactg

SEQ ID NO: 52856 - DNA, 25 bp, Probe sequence
cttgatgcccaaatgatgactttag

SEQ ID NO: 52857 - DNA, 25 bp, Probe sequence
ttgatgcccaaatgatgactttagc

SEQ ID NO: 52858 - DNA, 25 bp, Probe sequence
gcttgatgcccaaatgatgacttta

SEQ ID NO: 52859 - DNA, 25 bp, Probe sequence
taatatgctgcttgatgcccaaatg

SEQ ID NO: 52860 - DNA, 25 bp, Probe sequence
gtaatatgctgcttgatgcccaaat

SEQ ID NO: 52861 - DNA, 25 bp, Probe sequence
aaacagtaatatgctgcttgatgcc

SEQ ID NO: 52862 - DNA, 25 bp, Probe sequence
agtaatatgctgcttgatgcccaaa

SEQ ID NO: 52863 - DNA, 25 bp, Probe sequence
tgatgcccaaatgatgactttagct

SEQ ID NO: 52864 - DNA, 25 bp, Probe sequence
atatgctgcttgatgcccaaatgat

SEQ ID NO: 52865 - DNA, 25 bp, Probe sequence
gagccatcatgtgcaatattacgat

SEQ ID NO: 52866 - DNA, 25 bp, Probe sequence
ccatcatgtgcaatattacgatgaa

SEQ ID NO: 52867 - DNA, 25 bp, Probe sequence
cgagccatcatgtgcaatattacga

SEQ ID NO: 52868 - DNA, 25 bp, Probe sequence
gccatcatgtgcaatattacgatga

SEQ ID NO: 52869 - DNA, 25 bp, Probe sequence
agccatcatgtgcaatattacgatg

SEQ ID NO: 52870 - DNA, 25 bp, Probe sequence
aatcagtgtaagaaaagcattcatg

SEQ ID NO: 52871 - DNA, 25 bp, Probe sequence
gcaatattacgatgaaaatcaccaa

SEQ ID NO: 52872 - DNA, 25 bp, Probe sequence
ttaatcagtgtaagaaaagcattca

SEQ ID NO: 52873 - DNA, 25 bp, Probe sequence
acgatgaaaatcaccaatacaataa

SEQ ID NO: 52874 - DNA, 25 bp, Probe sequence
ccgcagtcaactactaccaatataa

SEQ ID NO: 52875 - DNA, 25 bp, Probe sequence
tccgcagtcaactactaccaatata

SEQ ID NO: 52876 - DNA, 25 bp, Probe sequence
cgcagtcaactactaccaatataag

SEQ ID NO: 52877 - DNA, 25 bp, Probe sequence
ctccgcagtcaactactaccaatat

SEQ ID NO: 52878 - DNA, 25 bp, Probe sequence
gcagtcaactactaccaatataaga

SEQ ID NO: 52879 - DNA, 25 bp, Probe sequence
ggagttatatctgtagaaattggcg

SEQ ID NO: 52880 - DNA, 25 bp, Probe sequence
gggagttatatctgtagaaattggc

SEQ ID NO: 52881 - DNA, 25 bp, Probe sequence
gagttatatctgtagaaattggcgt

SEQ ID NO: 52882 - DNA, 25 bp, Probe sequence
ccaatataagattgtagagcctacg

SEQ ID NO: 52883 - DNA, 25 bp, Probe sequence
tgtctgtatttcatttgcgttagtt

SEQ ID NO: 52884 - DNA, 25 bp, Probe sequence
ttgtctgtatttcatttgcgttagt

SEQ ID NO: 52885 - DNA, 25 bp, Probe sequence
tgtttgtctgtatttcatttgcgtt

SEQ ID NO: 52886 - DNA, 25 bp, Probe sequence
ttgtttgtctgtatttcatttgcgt

SEQ ID NO: 52887 - DNA, 25 bp, Probe sequence
gtttgtctgtatttcatttgcgtta

SEQ ID NO: 52888 - DNA, 25 bp, Probe sequence
atttgcgttagttaaaggtgaaaca

SEQ ID NO: 52889 - DNA, 25 bp, Probe sequence
catttgcgttagttaaaggtgaaac

SEQ ID NO: 52890 - DNA, 25 bp, Probe sequence
tttgcgttagttaaaggtgaaacag

SEQ ID NO: 52891 - DNA, 25 bp, Probe sequence
atttcatttgcgttagttaaaggtg

SEQ ID NO: 52892 - DNA, 25 bp, Probe sequence
agtccaagctaatacaagtgaacat

SEQ ID NO: 52893 - DNA, 25 bp, Probe sequence
gaagtccaagctaatacaagtgaac

SEQ ID NO: 52894 - DNA, 25 bp, Probe sequence
agaagtccaagctaatacaagtgaa

SEQ ID NO: 52895 - DNA, 25 bp, Probe sequence
aagaagtccaagctaatacaagtga

SEQ ID NO: 52896 - DNA, 25 bp, Probe sequence
aagtccaagctaatacaagtgaaca

SEQ ID NO: 52897 - DNA, 25 bp, Probe sequence
gtccaagctaatacaagtgaacata

SEQ ID NO: 52898 - DNA, 25 bp, Probe sequence
aatgaagtgactgtttgtaagaacc

SEQ ID NO: 52899 - DNA, 25 bp, Probe sequence
tccaagctaatacaagtgaacatat

SEQ ID NO: 52900 - DNA, 25 bp, Probe sequence
atgaagtgactgtttgtaagaaccc

SEQ ID NO: 52901 - DNA, 25 bp, Probe sequence
tcacttgtattagcttggacttctt

SEQ ID NO: 52902 - DNA, 25 bp, Probe sequence
ttcacttgtattagcttggacttct

SEQ ID NO: 52903 - DNA, 25 bp, Probe sequence
gttcacttgtattagcttggacttc

SEQ ID NO: 52904 - DNA, 25 bp, Probe sequence
atgttcacttgtattagcttggact

SEQ ID NO: 52905 - DNA, 25 bp, Probe sequence
tgttcacttgtattagcttggactt

SEQ ID NO: 52906 - DNA, 25 bp, Probe sequence
tatgttcacttgtattagcttggac

SEQ ID NO: 52907 - DNA, 25 bp, Probe sequence
ggttcttacaaacagtcacttcatt

SEQ ID NO: 52908 - DNA, 25 bp, Probe sequence
atatgttcacttgtattagcttgga

SEQ ID NO: 52909 - DNA, 25 bp, Probe sequence
gggttcttacaaacagtcacttcat

SEQ ID NO: 52910 - DNA, 25 bp, Probe sequence
tgttacagtggaagaggaatttgga

SEQ ID NO: 52911 - DNA, 25 bp, Probe sequence
ctgttacagtggaagaggaatttgg

SEQ ID NO: 52912 - DNA, 25 bp, Probe sequence
attgttagagattattatgcgctgg

SEQ ID NO: 52913 - DNA, 25 bp, Probe sequence
gattgttagagattattatgcgctg

SEQ ID NO: 52914 - DNA, 25 bp, Probe sequence
agattgttagagattattatgcgct

SEQ ID NO: 52915 - DNA, 25 bp, Probe sequence
aagattgttagagattattatgcgc

SEQ ID NO: 52916 - DNA, 25 bp, Probe sequence
ttagagattattatgcgctgggaaa

SEQ ID NO: 52917 - DNA, 25 bp, Probe sequence
tagagattattatgcgctgggaaac

SEQ ID NO: 52918 - DNA, 25 bp, Probe sequence
gttagagattattatgcgctgggaa

SEQ ID NO: 52919 - DNA, 25 bp, Probe sequence
agcacaacggaatcagttttattta

SEQ ID NO: 52920 - DNA, 25 bp, Probe sequence
gagcacaacggaatcagttttattt

SEQ ID NO: 52921 - DNA, 25 bp, Probe sequence
gcacaacggaatcagttttatttaa

SEQ ID NO: 52922 - DNA, 25 bp, Probe sequence
acaacggaatcagttttatttaacg

SEQ ID NO: 52923 - DNA, 25 bp, Probe sequence
cggaatcagttttatttaacgaaca

SEQ ID NO: 52924 - DNA, 25 bp, Probe sequence
acggaatcagttttatttaacgaac

SEQ ID NO: 52925 - DNA, 25 bp, Probe sequence
caacggaatcagttttatttaacga

SEQ ID NO: 52926 - DNA, 25 bp, Probe sequence
ggagcacaacggaatcagttttatt

SEQ ID NO: 52927 - DNA, 25 bp, Probe sequence
aacggaatcagttttatttaacgaa

SEQ ID NO: 52928 - DNA, 25 bp, Probe sequence
aaagttacgcaatatgatggtgaaa

SEQ ID NO: 52929 - DNA, 25 bp, Probe sequence
gttacgcaatatgatggtgaaacat

SEQ ID NO: 52930 - DNA, 25 bp, Probe sequence
aagttacgcaatatgatggtgaaac

SEQ ID NO: 52931 - DNA, 25 bp, Probe sequence
agttacgcaatatgatggtgaaaca

SEQ ID NO: 52932 - DNA, 25 bp, Probe sequence
tggtgaaacatctgaaataaacaaa

SEQ ID NO: 52933 - DNA, 25 bp, Probe sequence
atggtgaaacatctgaaataaacaa

SEQ ID NO: 52934 - DNA, 25 bp, Probe sequence
aaaagttacgcaatatgatggtgaa

SEQ ID NO: 52935 - DNA, 25 bp, Probe sequence
taaaagttacgcaatatgatggtga

SEQ ID NO: 52936 - DNA, 25 bp, Probe sequence
gcaatatgatggtgaaacatctgaa

SEQ ID NO: 52937 - DNA, 25 bp, Probe sequence
ataatcacttagctcacatctcctt

SEQ ID NO: 52938 - DNA, 25 bp, Probe sequence
aataatcacttagctcacatctcct

SEQ ID NO: 52939 - DNA, 25 bp, Probe sequence
agaatatgacacaactacagctaga

SEQ ID NO: 52940 - DNA, 25 bp, Probe sequence
tgacacaactacagctagatcatta

SEQ ID NO: 52941 - DNA, 25 bp, Probe sequence
atatgacacaactacagctagatca

SEQ ID NO: 52942 - DNA, 25 bp, Probe sequence
ggcacctttagaatatgacacaact

SEQ ID NO: 52943 - DNA, 25 bp, Probe sequence
gacacaactacagctagatcattat

SEQ ID NO: 52944 - DNA, 25 bp, Probe sequence
aatatgacacaactacagctagatc

SEQ ID NO: 52945 - DNA, 25 bp, Probe sequence
gaatatgacacaactacagctagat

SEQ ID NO: 52946 - DNA, 25 bp, Probe sequence
ttagattggacatcatggcgattaa

SEQ ID NO: 52947 - DNA, 25 bp, Probe sequence
attggacatcatggcgattaagtta

SEQ ID NO: 52948 - DNA, 25 bp, Probe sequence
tagattggacatcatggcgattaag

SEQ ID NO: 52949 - DNA, 25 bp, Probe sequence
gttagattggacatcatggcgatta

SEQ ID NO: 52950 - DNA, 25 bp, Probe sequence
acatcatggcgattaagttacacta

SEQ ID NO: 52951 - DNA, 25 bp, Probe sequence
ttggacatcatggcgattaagttac

SEQ ID NO: 52952 - DNA, 25 bp, Probe sequence
catcatggcgattaagttacactat

SEQ ID NO: 52953 - DNA, 25 bp, Probe sequence
gattggacatcatggcgattaagtt

SEQ ID NO: 52954 - DNA, 25 bp, Probe sequence
gacatcatggcgattaagttacact

SEQ ID NO: 52955 - DNA, 25 bp, Probe sequence
gaacatacaatagcggtcattctgg

SEQ ID NO: 52956 - DNA, 25 bp, Probe sequence
ggaacatacaatagcggtcattctg

SEQ ID NO: 52957 - DNA, 25 bp, Probe sequence
tggaacatacaatagcggtcattct

SEQ ID NO: 52958 - DNA, 25 bp, Probe sequence
catggaacatacaatagcggtcatt

SEQ ID NO: 52959 - DNA, 25 bp, Probe sequence
atacaatagcggtcattctgggtag

SEQ ID NO: 52960 - DNA, 25 bp, Probe sequence
atgggattcatgtctgtgttcttaa

SEQ ID NO: 52961 - DNA, 25 bp, Probe sequence
agaagtacagatagatttgatggga

SEQ ID NO: 52962 - DNA, 25 bp, Probe sequence
gatgggattcatgtctgtgttctta

SEQ ID NO: 52963 - DNA, 25 bp, Probe sequence
gagaagtacagatagatttgatggg

SEQ ID NO: 52964 - DNA, 25 bp, Probe sequence
agatacatcagatagcgactcagat

SEQ ID NO: 52965 - DNA, 25 bp, Probe sequence
aagaagatacatcagatagcgactc

SEQ ID NO: 52966 - DNA, 25 bp, Probe sequence
gaagaagatacatcagatagcgact

SEQ ID NO: 52967 - DNA, 25 bp, Probe sequence
gaagatacatcagatagcgactcag

SEQ ID NO: 52968 - DNA, 25 bp, Probe sequence
atacatcagatagcgactcagattc

SEQ ID NO: 52969 - DNA, 25 bp, Probe sequence
gatacatcagatagcgactcagatt

SEQ ID NO: 52970 - DNA, 25 bp, Probe sequence
aagatacatcagatagcgactcaga

SEQ ID NO: 52971 - DNA, 25 bp, Probe sequence
agaagatacatcagatagcgactca

SEQ ID NO: 52972 - DNA, 25 bp, Probe sequence
cgaagaagatacatcagatagcgac

SEQ ID NO: 52973 - DNA, 25 bp, Probe sequence
gttattcagtcaactacgaccaata

SEQ ID NO: 52974 - DNA, 25 bp, Probe sequence
tcagtcaactacgaccaatatatca

SEQ ID NO: 52975 - DNA, 25 bp, Probe sequence
cagtcaactacgaccaatatatcat

SEQ ID NO: 52976 - DNA, 25 bp, Probe sequence
ttcagtcaactacgaccaatatatc

SEQ ID NO: 52977 - DNA, 25 bp, Probe sequence
ttattcagtcaactacgaccaatat

SEQ ID NO: 52978 - DNA, 25 bp, Probe sequence
gaaattgatttatgactcaggcaca

SEQ ID NO: 52979 - DNA, 25 bp, Probe sequence
aattgatttatgactcaggcacatc

SEQ ID NO: 52980 - DNA, 25 bp, Probe sequence
aggaaattgatttatgactcaggca

SEQ ID NO: 52981 - DNA, 25 bp, Probe sequence
tttatgactcaggcacatcaaatga

SEQ ID NO: 52982 - DNA, 25 bp, Probe sequence
ttgagaactattgaattaggtgtgt

SEQ ID NO: 52983 - DNA, 25 bp, Probe sequence
tgagaactattgaattaggtgtgtt

SEQ ID NO: 52984 - DNA, 25 bp, Probe sequence
tgatttattgtttgaaagttgttgc

SEQ ID NO: 52985 - DNA, 25 bp, Probe sequence
tgaattaggtgtgtttattgtgatg

SEQ ID NO: 52986 - DNA, 25 bp, Probe sequence
gaattaggtgtgtttattgtgatga

SEQ ID NO: 52987 - DNA, 25 bp, Probe sequence
ttaggtgtgtttattgtgatgattt

SEQ ID NO: 52988 - DNA, 25 bp, Probe sequence
tttgagaactattgaattaggtgtg

SEQ ID NO: 52989 - DNA, 25 bp, Probe sequence
ttgtttgaaagttgttgcattaacg

SEQ ID NO: 52990 - DNA, 25 bp, Probe sequence
ttgaattaggtgtgtttattgtgat

SEQ ID NO: 52991 - DNA, 25 bp, Probe sequence
cagtatgattcctcagtacattcca

SEQ ID NO: 52992 - DNA, 25 bp, Probe sequence
atgattcctcagtacattccaagaa

SEQ ID NO: 52993 - DNA, 25 bp, Probe sequence
tcagtatgattcctcagtacattcc

SEQ ID NO: 52994 - DNA, 25 bp, Probe sequence
agtatgattcctcagtacattccaa

SEQ ID NO: 52995 - DNA, 25 bp, Probe sequence
tatgattcctcagtacattccaaga

SEQ ID NO: 52996 - DNA, 25 bp, Probe sequence
gtatgattcctcagtacattccaag

SEQ ID NO: 52997 - DNA, 25 bp, Probe sequence
tgattcctcagtacattccaagaaa

SEQ ID NO: 52998 - DNA, 25 bp, Probe sequence
tgtgaaagtacaaatccaaagcatt

SEQ ID NO: 52999 - DNA, 25 bp, Probe sequence
atgtgaaagtacaaatccaaagcat

SEQ ID NO: 53000 - DNA, 25 bp, Probe sequence
gaccatgctgtagtgaagtatagaa

SEQ ID NO: 53001 - DNA, 25 bp, Probe sequence
ttgaccatgctgtagtgaagtatag

SEQ ID NO: 53002 - DNA, 25 bp, Probe sequence
aattgaccatgctgtagtgaagtat

SEQ ID NO: 53003 - DNA, 25 bp, Probe sequence
attgaccatgctgtagtgaagtata

SEQ ID NO: 53004 - DNA, 25 bp, Probe sequence
tgaccatgctgtagtgaagtataga

SEQ ID NO: 53005 - DNA, 25 bp, Probe sequence
atgaatgtcactatgcttgcgaatc

SEQ ID NO: 53006 - DNA, 25 bp, Probe sequence
atgctgtagtgaagtatagaaacgg

SEQ ID NO: 53007 - DNA, 25 bp, Probe sequence
catgctgtagtgaagtatagaaacg

SEQ ID NO: 53008 - DNA, 25 bp, Probe sequence
accatgctgtagtgaagtatagaaa

SEQ ID NO: 53009 - DNA, 25 bp, Probe sequence
aagggaaagaggtgttgtatcattt

SEQ ID NO: 53010 - DNA, 25 bp, Probe sequence
gaagggaaagaggtgttgtatcatt

SEQ ID NO: 53011 - DNA, 25 bp, Probe sequence
agggaaagaggtgttgtatcatttg

SEQ ID NO: 53012 - DNA, 25 bp, Probe sequence
gggaaagaggtgttgtatcatttgt

SEQ ID NO: 53013 - DNA, 25 bp, Probe sequence
aacattggaaacaaacaggattgaa

SEQ ID NO: 53014 - DNA, 25 bp, Probe sequence
agaagggaaagaggtgttgtatcat

SEQ ID NO: 53015 - DNA, 25 bp, Probe sequence
acattggaaacaaacaggattgaac

SEQ ID NO: 53016 - DNA, 25 bp, Probe sequence
caacattggaaacaaacaggattga

SEQ ID NO: 53017 - DNA, 25 bp, Probe sequence
cattggaaacaaacaggattgaacc

SEQ ID NO: 53018 - DNA, 25 bp, Probe sequence
ggaacacaccaatatgctacagata

SEQ ID NO: 53019 - DNA, 25 bp, Probe sequence
gaacacaccaatatgctacagatat

SEQ ID NO: 53020 - DNA, 25 bp, Probe sequence
acacaccaatatgctacagatatag

SEQ ID NO: 53021 - DNA, 25 bp, Probe sequence
cacaccaatatgctacagatataga

SEQ ID NO: 53022 - DNA, 25 bp, Probe sequence
aacacaccaatatgctacagatata

SEQ ID NO: 53023 - DNA, 25 bp, Probe sequence
gctacagatatagattgggctaaca

SEQ ID NO: 53024 - DNA, 25 bp, Probe sequence
tgctacagatatagattgggctaac

SEQ ID NO: 53025 - DNA, 25 bp, Probe sequence
tacatctaaacaagttgctggtagt

SEQ ID NO: 53026 - DNA, 25 bp, Probe sequence
acagatatagattgggctaacatca

SEQ ID NO: 53027 - DNA, 25 bp, Probe sequence
taaacgatttacatcttcatacgcc

SEQ ID NO: 53028 - DNA, 25 bp, Probe sequence
ttggctaaacgatttacatcttcat

SEQ ID NO: 53029 - DNA, 25 bp, Probe sequence
ctaaacgatttacatcttcatacgc

SEQ ID NO: 53030 - DNA, 25 bp, Probe sequence
gctaaacgatttacatcttcatacg

SEQ ID NO: 53031 - DNA, 25 bp, Probe sequence
aaacgatttacatcttcatacgccg

SEQ ID NO: 53032 - DNA, 25 bp, Probe sequence
tggctaaacgatttacatcttcata

SEQ ID NO: 53033 - DNA, 25 bp, Probe sequence
ggctaaacgatttacatcttcatac

SEQ ID NO: 53034 - DNA, 25 bp, Probe sequence
aattgtaacgaaggttattccgcct

SEQ ID NO: 53035 - DNA, 25 bp, Probe sequence
attgtaacgaaggttattccgcctg

SEQ ID NO: 53036 - DNA, 25 bp, Probe sequence
tgtctcatcagcacttatacactag

SEQ ID NO: 53037 - DNA, 25 bp, Probe sequence
ctcatcagcacttatacactagtca

SEQ ID NO: 53038 - DNA, 25 bp, Probe sequence
gtctcatcagcacttatacactagt

SEQ ID NO: 53039 - DNA, 25 bp, Probe sequence
tctcatcagcacttatacactagtc

SEQ ID NO: 53040 - DNA, 25 bp, Probe sequence
tcatcagcacttatacactagtcaa

SEQ ID NO: 53041 - DNA, 25 bp, Probe sequence
gtgtctcatcagcacttatacacta

SEQ ID NO: 53042 - DNA, 25 bp, Probe sequence
catcagcacttatacactagtcaaa

SEQ ID NO: 53043 - DNA, 25 bp, Probe sequence
atcagcacttatacactagtcaaaa

SEQ ID NO: 53044 - DNA, 25 bp, Probe sequence
ttacctcctacaatagctttacaaa

SEQ ID NO: 53045 - DNA, 25 bp, Probe sequence
tttacctcctacaatagctttacaa

SEQ ID NO: 53046 - DNA, 25 bp, Probe sequence
cctcctacaatagctttacaaaaca

SEQ ID NO: 53047 - DNA, 25 bp, Probe sequence
acctcctacaatagctttacaaaac

SEQ ID NO: 53048 - DNA, 25 bp, Probe sequence
ttttacctcctacaatagctttaca

SEQ ID NO: 53049 - DNA, 25 bp, Probe sequence
tacctcctacaatagctttacaaaa

SEQ ID NO: 53050 - DNA, 25 bp, Probe sequence
ctcctacaatagctttacaaaacaa

SEQ ID NO: 53051 - DNA, 25 bp, Probe sequence
tcctacaatagctttacaaaacaaa

SEQ ID NO: 53052 - DNA, 25 bp, Probe sequence
acacttttcatattttggaaagaca

SEQ ID NO: 53053 - DNA, 25 bp, Probe sequence
gcattcacacctggtatcatatctt

SEQ ID NO: 53054 - DNA, 25 bp, Probe sequence
cgcattcacacctggtatcatatct

SEQ ID NO: 53055 - DNA, 25 bp, Probe sequence
cattcacacctggtatcatatcttt

SEQ ID NO: 53056 - DNA, 25 bp, Probe sequence
cacacctggtatcatatctttaact

SEQ ID NO: 53057 - DNA, 25 bp, Probe sequence
tcacacctggtatcatatctttaac

SEQ ID NO: 53058 - DNA, 25 bp, Probe sequence
aactttaaatactttgccgttgagc

SEQ ID NO: 53059 - DNA, 25 bp, Probe sequence
acacctggtatcatatctttaactt

SEQ ID NO: 53060 - DNA, 25 bp, Probe sequence
ttcacacctggtatcatatctttaa

SEQ ID NO: 53061 - DNA, 25 bp, Probe sequence
attcacacctggtatcatatcttta

SEQ ID NO: 53062 - DNA, 25 bp, Probe sequence
tgtgtcttgtatccttagttgttat

SEQ ID NO: 53063 - DNA, 25 bp, Probe sequence
tttgttgaaggtatgtgtcttgtat

SEQ ID NO: 53064 - DNA, 25 bp, Probe sequence
atggcatcactttatctttatctgt

SEQ ID NO: 53065 - DNA, 25 bp, Probe sequence
ggcatcactttatctttatctgtgt

SEQ ID NO: 53066 - DNA, 25 bp, Probe sequence
tggcatcactttatctttatctgtg

SEQ ID NO: 53067 - DNA, 25 bp, Probe sequence
aatggcatcactttatctttatctg

SEQ ID NO: 53068 - DNA, 25 bp, Probe sequence
gtgtcttgtatccttagttgttata

SEQ ID NO: 53069 - DNA, 25 bp, Probe sequence
ttatctgtgtagaaaggatgctatt

SEQ ID NO: 53070 - DNA, 25 bp, Probe sequence
tttatctgtgtagaaaggatgctat

SEQ ID NO: 53071 - DNA, 25 bp, Probe sequence
aaatacggagagaaagaatatagcg

SEQ ID NO: 53072 - DNA, 25 bp, Probe sequence
taaatacggagagaaagaatatagc

SEQ ID NO: 53073 - DNA, 25 bp, Probe sequence
aaagtaaatacggagagaaagaata

SEQ ID NO: 53074 - DNA, 25 bp, Probe sequence
taaagtaaatacggagagaaagaat

SEQ ID NO: 53075 - DNA, 25 bp, Probe sequence
ataaagtaaatacggagagaaagaa

SEQ ID NO: 53076 - DNA, 25 bp, Probe sequence
aataaagtaaatacggagagaaaga

SEQ ID NO: 53077 - DNA, 25 bp, Probe sequence
aatacggagagaaagaatatagcgc

SEQ ID NO: 53078 - DNA, 25 bp, Probe sequence
aagtaaatacggagagaaagaatat

SEQ ID NO: 53079 - DNA, 25 bp, Probe sequence
accattaataaagtaaatacggaga

SEQ ID NO: 53080 - DNA, 25 bp, Probe sequence
ccaattcatacagatacatatcacc

SEQ ID NO: 53081 - DNA, 25 bp, Probe sequence
ctttgatattgatggtacgctttgt

SEQ ID NO: 53082 - DNA, 25 bp, Probe sequence
tttgtctttgatattgatggtacgc

SEQ ID NO: 53083 - DNA, 25 bp, Probe sequence
tctttgatattgatggtacgctttg

SEQ ID NO: 53084 - DNA, 25 bp, Probe sequence
gtctttgatattgatggtacgcttt

SEQ ID NO: 53085 - DNA, 25 bp, Probe sequence
ttgatattgatggtacgctttgttt

SEQ ID NO: 53086 - DNA, 25 bp, Probe sequence
tttgatattgatggtacgctttgtt

SEQ ID NO: 53087 - DNA, 25 bp, Probe sequence
tgtctttgatattgatggtacgctt

SEQ ID NO: 53088 - DNA, 25 bp, Probe sequence
ttgtctttgatattgatggtacgct

SEQ ID NO: 53089 - DNA, 25 bp, Probe sequence
tgaatcttactaatggatctccgac

SEQ ID NO: 53090 - DNA, 25 bp, Probe sequence
gaatcttactaatggatctccgacg

SEQ ID NO: 53091 - DNA, 25 bp, Probe sequence
ttgaatcttactaatggatctccga

SEQ ID NO: 53092 - DNA, 25 bp, Probe sequence
gttgaatcttactaatggatctccg

SEQ ID NO: 53093 - DNA, 25 bp, Probe sequence
ggttgaatcttactaatggatctcc

SEQ ID NO: 53094 - DNA, 25 bp, Probe sequence
aggttgaatcttactaatggatctc

SEQ ID NO: 53095 - DNA, 25 bp, Probe sequence
cttactaatggatctccgacgttaa

SEQ ID NO: 53096 - DNA, 25 bp, Probe sequence
tcttactaatggatctccgacgtta

SEQ ID NO: 53097 - DNA, 25 bp, Probe sequence
atcttactaatggatctccgacgtt

SEQ ID NO: 53098 - DNA, 25 bp, Probe sequence
attacacgcaagcagattcagataa

SEQ ID NO: 53099 - DNA, 25 bp, Probe sequence
gattacacgcaagcagattcagata

SEQ ID NO: 53100 - DNA, 25 bp, Probe sequence
ttacacgcaagcagattcagataag

SEQ ID NO: 53101 - DNA, 25 bp, Probe sequence
tcaatggatcaattacaacaagctg

SEQ ID NO: 53102 - DNA, 25 bp, Probe sequence
atcaatggatcaattacaacaagct

SEQ ID NO: 53103 - DNA, 25 bp, Probe sequence
taaacatacgcctttcttcttacca

SEQ ID NO: 53104 - DNA, 25 bp, Probe sequence
tgattaataatgcaacaactcgtga

SEQ ID NO: 53105 - DNA, 25 bp, Probe sequence
actgattaataatgcaacaactcgt

SEQ ID NO: 53106 - DNA, 25 bp, Probe sequence
tgagttaaatggtgatgagagagtc

SEQ ID NO: 53107 - DNA, 25 bp, Probe sequence
ttggtagttgaacatcctgatagta

SEQ ID NO: 53108 - DNA, 25 bp, Probe sequence
tggtagttgaacatcctgatagtat

SEQ ID NO: 53109 - DNA, 25 bp, Probe sequence
acatcctgatagtattatcgttgct

SEQ ID NO: 53110 - DNA, 25 bp, Probe sequence
ggtagttgaacatcctgatagtatt

SEQ ID NO: 53111 - DNA, 25 bp, Probe sequence
aacatcctgatagtattatcgttgc

SEQ ID NO: 53112 - DNA, 25 bp, Probe sequence
catcctgatagtattatcgttgcta

SEQ ID NO: 53113 - DNA, 25 bp, Probe sequence
ctcatctcccatttatgtgtttgtt

SEQ ID NO: 53114 - DNA, 25 bp, Probe sequence
tcatctcccatttatgtgtttgttt

SEQ ID NO: 53115 - DNA, 25 bp, Probe sequence
tgaacatcctgatagtattatcgtt

SEQ ID NO: 53116 - DNA, 25 bp, Probe sequence
aatgataatatgaatggtgctgctg

SEQ ID NO: 53117 - DNA, 25 bp, Probe sequence
tgataatatgaatggtgctgctgat

SEQ ID NO: 53118 - DNA, 25 bp, Probe sequence
atgataatatgaatggtgctgctga

SEQ ID NO: 53119 - DNA, 25 bp, Probe sequence
catagcagaattgagcagttattgg

SEQ ID NO: 53120 - DNA, 25 bp, Probe sequence
acatagcagaattgagcagttattg

SEQ ID NO: 53121 - DNA, 25 bp, Probe sequence
gacatagcagaattgagcagttatt

SEQ ID NO: 53122 - DNA, 25 bp, Probe sequence
ggacatagcagaattgagcagttat

SEQ ID NO: 53123 - DNA, 25 bp, Probe sequence
gataatatgaatggtgctgctgata

SEQ ID NO: 53124 - DNA, 25 bp, Probe sequence
ggaacatctaatgaggcaattaacc

SEQ ID NO: 53125 - DNA, 25 bp, Probe sequence
tatcatttctgtcccactcccttat

SEQ ID NO: 53126 - DNA, 25 bp, Probe sequence
atatcatttctgtcccactccctta

SEQ ID NO: 53127 - DNA, 25 bp, Probe sequence
aatatcatttctgtcccactccctt

SEQ ID NO: 53128 - DNA, 25 bp, Probe sequence
atcatttctgtcccactcccttatg

SEQ ID NO: 53129 - DNA, 25 bp, Probe sequence
tcatttctgtcccactcccttatgc

SEQ ID NO: 53130 - DNA, 25 bp, Probe sequence
ggacaacgaaataaattttgcgaaa

SEQ ID NO: 53131 - DNA, 25 bp, Probe sequence
gaaaagaaattctacaggcaatgca

SEQ ID NO: 53132 - DNA, 25 bp, Probe sequence
gggacaacgaaataaattttgcgaa

SEQ ID NO: 53133 - DNA, 25 bp, Probe sequence
gggtgggacaacgaaataaattttg

SEQ ID NO: 53134 - DNA, 25 bp, Probe sequence
catgatacttgtcgttgtagtgatt

SEQ ID NO: 53135 - DNA, 25 bp, Probe sequence
tgatacttgtcgttgtagtgattaa

SEQ ID NO: 53136 - DNA, 25 bp, Probe sequence
atgatacttgtcgttgtagtgatta

SEQ ID NO: 53137 - DNA, 25 bp, Probe sequence
tagaagcatcgaattcactgttatg

SEQ ID NO: 53138 - DNA, 25 bp, Probe sequence
gaagcatcgaattcactgttatgag

SEQ ID NO: 53139 - DNA, 25 bp, Probe sequence
catcgaattcactgttatgagttca

SEQ ID NO: 53140 - DNA, 25 bp, Probe sequence
gcatcgaattcactgttatgagttc

SEQ ID NO: 53141 - DNA, 25 bp, Probe sequence
agaagcatcgaattcactgttatga

SEQ ID NO: 53142 - DNA, 25 bp, Probe sequence
agcatcgaattcactgttatgagtt

SEQ ID NO: 53143 - DNA, 25 bp, Probe sequence
ttggctatgaagaaatctatgagga

SEQ ID NO: 53144 - DNA, 25 bp, Probe sequence
tggctatgaagaaatctatgaggat

SEQ ID NO: 53145 - DNA, 25 bp, Probe sequence
attatgaagcagaaccaccgttgtt

SEQ ID NO: 53146 - DNA, 25 bp, Probe sequence
gattatgaagcagaaccaccgttgt

SEQ ID NO: 53147 - DNA, 25 bp, Probe sequence
tgattatgaagcagaaccaccgttg

SEQ ID NO: 53148 - DNA, 25 bp, Probe sequence
ggctatgaagaaatctatgaggata

SEQ ID NO: 53149 - DNA, 25 bp, Probe sequence
aaagtgattatgaagcagaaccacc

SEQ ID NO: 53150 - DNA, 25 bp, Probe sequence
aagtgattatgaagcagaaccaccg

SEQ ID NO: 53151 - DNA, 25 bp, Probe sequence
gtgattatgaagcagaaccaccgtt

SEQ ID NO: 53152 - DNA, 25 bp, Probe sequence
atatatggtgacacactattcgctg

SEQ ID NO: 53153 - DNA, 25 bp, Probe sequence
tatatatggtgacacactattcgct

SEQ ID NO: 53154 - DNA, 25 bp, Probe sequence
tatatggtgacacactattcgctgt

SEQ ID NO: 53155 - DNA, 25 bp, Probe sequence
ttatatatggtgacacactattcgc

SEQ ID NO: 53156 - DNA, 25 bp, Probe sequence
ctattcgctgttcccgtattacttt

SEQ ID NO: 53157 - DNA, 25 bp, Probe sequence
aacaaagaaataccagcggacttat

SEQ ID NO: 53158 - DNA, 25 bp, Probe sequence
tgtatcatttgtaatcacctttcgt

SEQ ID NO: 53159 - DNA, 25 bp, Probe sequence
aaacaaagaaataccagcggactta

SEQ ID NO: 53160 - DNA, 25 bp, Probe sequence
acaaagaaataccagcggacttatt

SEQ ID NO: 53161 - DNA, 25 bp, Probe sequence
atatatcttccaaagaccgcaaact

SEQ ID NO: 53162 - DNA, 25 bp, Probe sequence
tatatcttccaaagaccgcaaactg

SEQ ID NO: 53163 - DNA, 25 bp, Probe sequence
tatatatcttccaaagaccgcaaac

SEQ ID NO: 53164 - DNA, 25 bp, Probe sequence
tatcttccaaagaccgcaaactgta

SEQ ID NO: 53165 - DNA, 25 bp, Probe sequence
aactgtagcagaaaatgagaacctt

SEQ ID NO: 53166 - DNA, 25 bp, Probe sequence
aaactgtagcagaaaatgagaacct

SEQ ID NO: 53167 - DNA, 25 bp, Probe sequence
caaactgtagcagaaaatgagaacc

SEQ ID NO: 53168 - DNA, 25 bp, Probe sequence
gcaaactgtagcagaaaatgagaac

SEQ ID NO: 53169 - DNA, 25 bp, Probe sequence
actgtagcagaaaatgagaaccttg

SEQ ID NO: 53170 - DNA, 25 bp, Probe sequence
ttcattaccactcgttcaagcaatt

SEQ ID NO: 53171 - DNA, 25 bp, Probe sequence
tttcattaccactcgttcaagcaat

SEQ ID NO: 53172 - DNA, 25 bp, Probe sequence
gtttcattaccactcgttcaagcaa

SEQ ID NO: 53173 - DNA, 25 bp, Probe sequence
gatgctgctgtatacgtttcattac

SEQ ID NO: 53174 - DNA, 25 bp, Probe sequence
tgctgtatacgtttcattaccactc

SEQ ID NO: 53175 - DNA, 25 bp, Probe sequence
ctgctgtatacgtttcattaccact

SEQ ID NO: 53176 - DNA, 25 bp, Probe sequence
tcattaccactcgttcaagcaattg

SEQ ID NO: 53177 - DNA, 25 bp, Probe sequence
atgctgctgtatacgtttcattacc

SEQ ID NO: 53178 - DNA, 25 bp, Probe sequence
cgatgctgctgtatacgtttcatta

SEQ ID NO: 53179 - DNA, 25 bp, Probe sequence
aatcctaaaccagatccagataacc

SEQ ID NO: 53180 - DNA, 25 bp, Probe sequence
cgaatcctaaaccagatccagataa

SEQ ID NO: 53181 - DNA, 25 bp, Probe sequence
taaaccagatccagataacccgaaa

SEQ ID NO: 53182 - DNA, 25 bp, Probe sequence
atcctaaaccagatccagataaccc

SEQ ID NO: 53183 - DNA, 25 bp, Probe sequence
gaatcctaaaccagatccagataac

SEQ ID NO: 53184 - DNA, 25 bp, Probe sequence
ccgaatcctaaaccagatccagata

SEQ ID NO: 53185 - DNA, 25 bp, Probe sequence
ctaaaccagatccagataacccgaa

SEQ ID NO: 53186 - DNA, 25 bp, Probe sequence
tccgaatcctaaaccagatccagat

SEQ ID NO: 53187 - DNA, 25 bp, Probe sequence
caagtccgaatcctaaaccagatcc

SEQ ID NO: 53188 - DNA, 25 bp, Probe sequence
aacttattatttatcgcgcactagc

SEQ ID NO: 53189 - DNA, 25 bp, Probe sequence
ttcaacttattatttatcgcgcact

SEQ ID NO: 53190 - DNA, 25 bp, Probe sequence
tcaacttattatttatcgcgcacta

SEQ ID NO: 53191 - DNA, 25 bp, Probe sequence
attcaacttattatttatcgcgcac

SEQ ID NO: 53192 - DNA, 25 bp, Probe sequence
caacttattatttatcgcgcactag

SEQ ID NO: 53193 - DNA, 25 bp, Probe sequence
tattcaacttattatttatcgcgca

SEQ ID NO: 53194 - DNA, 25 bp, Probe sequence
tttacaagaacatgatactgaaatt

SEQ ID NO: 53195 - DNA, 25 bp, Probe sequence
ttacaagaacatgatactgaaattt

SEQ ID NO: 53196 - DNA, 25 bp, Probe sequence
atattcaacttattatttatcgcgc

SEQ ID NO: 53197 - DNA, 25 bp, Probe sequence
gttactttgatgtgttgttgtggaa

SEQ ID NO: 53198 - DNA, 25 bp, Probe sequence
atgttactttgatgtgttgttgtgg

SEQ ID NO: 53199 - DNA, 25 bp, Probe sequence
ttactttgatgtgttgttgtggaag

SEQ ID NO: 53200 - DNA, 25 bp, Probe sequence
tgttactttgatgtgttgttgtgga

SEQ ID NO: 53201 - DNA, 25 bp, Probe sequence
catgttactttgatgtgttgttgtg

SEQ ID NO: 53202 - DNA, 25 bp, Probe sequence
ccatgttactttgatgtgttgttgt

SEQ ID NO: 53203 - DNA, 25 bp, Probe sequence
tactttgatgtgttgttgtggaagc

SEQ ID NO: 53204 - DNA, 25 bp, Probe sequence
catgccatgttactttgatgtgttg

SEQ ID NO: 53205 - DNA, 25 bp, Probe sequence
gccatgttactttgatgtgttgttg

SEQ ID NO: 53206 - DNA, 25 bp, Probe sequence
catcaaagtaacatggcatcaacac

SEQ ID NO: 53207 - DNA, 25 bp, Probe sequence
acatcaaagtaacatggcatcaaca

SEQ ID NO: 53208 - DNA, 25 bp, Probe sequence
atcaaagtaacatggcatcaacacc

SEQ ID NO: 53209 - DNA, 25 bp, Probe sequence
tagcaccagcacatcaaagtaacat

SEQ ID NO: 53210 - DNA, 25 bp, Probe sequence
tagcactacatcaagtcgcatcgta

SEQ ID NO: 53211 - DNA, 25 bp, Probe sequence
gtagcaccagcacatcaaagtaaca

SEQ ID NO: 53212 - DNA, 25 bp, Probe sequence
aaagtaacatggcatcaacaccaag

SEQ ID NO: 53213 - DNA, 25 bp, Probe sequence
caaagtaacatggcatcaacaccaa

SEQ ID NO: 53214 - DNA, 25 bp, Probe sequence
tcaaagtaacatggcatcaacacca

SEQ ID NO: 53215 - DNA, 25 bp, Probe sequence
aaggagcgaataaattatgccaatc

SEQ ID NO: 53216 - DNA, 25 bp, Probe sequence
aaaggagcgaataaattatgccaat

SEQ ID NO: 53217 - DNA, 25 bp, Probe sequence
taaaggagcgaataaattatgccaa

SEQ ID NO: 53218 - DNA, 25 bp, Probe sequence
ttaaaggagcgaataaattatgcca

SEQ ID NO: 53219 - DNA, 25 bp, Probe sequence
attaaaggagcgaataaattatgcc

SEQ ID NO: 53220 - DNA, 25 bp, Probe sequence
tatgccaatcgtatattatgatgga

SEQ ID NO: 53221 - DNA, 25 bp, Probe sequence
ttatgccaatcgtatattatgatgg

SEQ ID NO: 53222 - DNA, 25 bp, Probe sequence
gagcgaataaattatgccaatcgta

SEQ ID NO: 53223 - DNA, 25 bp, Probe sequence
agcgaataaattatgccaatcgtat

SEQ ID NO: 53224 - DNA, 25 bp, Probe sequence
gtgattatgagtgatggaggattga

SEQ ID NO: 53225 - DNA, 25 bp, Probe sequence
tggaggattgattgatgtgaagaat

SEQ ID NO: 53226 - DNA, 25 bp, Probe sequence
atggaggattgattgatgtgaagaa

SEQ ID NO: 53227 - DNA, 25 bp, Probe sequence
ttatgagtgatggaggattgattga

SEQ ID NO: 53228 - DNA, 25 bp, Probe sequence
gatggaggattgattgatgtgaaga

SEQ ID NO: 53229 - DNA, 25 bp, Probe sequence
atgagtgatggaggattgattgatg

SEQ ID NO: 53230 - DNA, 25 bp, Probe sequence
tatgagtgatggaggattgattgat

SEQ ID NO: 53231 - DNA, 25 bp, Probe sequence
tgattatgagtgatggaggattgat

SEQ ID NO: 53232 - DNA, 25 bp, Probe sequence
tgatggaggattgattgatgtgaag

SEQ ID NO: 53233 - DNA, 25 bp, Probe sequence
ttgatctatgaaactgactcacaaa

SEQ ID NO: 53234 - DNA, 25 bp, Probe sequence
aactcaagaagaattgtttactgaa

SEQ ID NO: 53235 - DNA, 25 bp, Probe sequence
actcaagaagaattgtttactgaat

SEQ ID NO: 53236 - DNA, 25 bp, Probe sequence
actcacaaaatgtcaaaactcaaga

SEQ ID NO: 53237 - DNA, 25 bp, Probe sequence
gactcacaaaatgtcaaaactcaag

SEQ ID NO: 53238 - DNA, 25 bp, Probe sequence
cacaaaatgtcaaaactcaagaaga

SEQ ID NO: 53239 - DNA, 25 bp, Probe sequence
tcacaaaatgtcaaaactcaagaag

SEQ ID NO: 53240 - DNA, 25 bp, Probe sequence
ctcacaaaatgtcaaaactcaagaa

SEQ ID NO: 53241 - DNA, 25 bp, Probe sequence
tctatgaaactgactcacaaaatgt

SEQ ID NO: 53242 - DNA, 25 bp, Probe sequence
gaattataagcaatccgcagaagaa

SEQ ID NO: 53243 - DNA, 25 bp, Probe sequence
ttataagcaatccgcagaagaaatt

SEQ ID NO: 53244 - DNA, 25 bp, Probe sequence
aattataagcaatccgcagaagaaa

SEQ ID NO: 53245 - DNA, 25 bp, Probe sequence
attataagcaatccgcagaagaaat

SEQ ID NO: 53246 - DNA, 25 bp, Probe sequence
acattgtgcaacgagactacgatta

SEQ ID NO: 53247 - DNA, 25 bp, Probe sequence
tataagcaatccgcagaagaaattt

SEQ ID NO: 53248 - DNA, 25 bp, Probe sequence
gagaatttagatgcaatggcacatt

SEQ ID NO: 53249 - DNA, 25 bp, Probe sequence
ataagcaatccgcagaagaaatttt

SEQ ID NO: 53250 - DNA, 25 bp, Probe sequence
cacattgtgcaacgagactacgatt

SEQ ID NO: 53251 - DNA, 25 bp, Probe sequence
aaaagtgaacataaggattttccct

SEQ ID NO: 53252 - DNA, 25 bp, Probe sequence
aaagtgaacataaggattttccctt

SEQ ID NO: 53253 - DNA, 25 bp, Probe sequence
aagtgaacataaggattttccctta

SEQ ID NO: 53254 - DNA, 25 bp, Probe sequence
aagaaccgtagattcgattgagaat

SEQ ID NO: 53255 - DNA, 25 bp, Probe sequence
tccagaatgagttaaataatccagt

SEQ ID NO: 53256 - DNA, 25 bp, Probe sequence
aaagaaccgtagattcgattgagaa

SEQ ID NO: 53257 - DNA, 25 bp, Probe sequence
ccagaatgagttaaataatccagtt

SEQ ID NO: 53258 - DNA, 25 bp, Probe sequence
ttccagaatgagttaaataatccag

SEQ ID NO: 53259 - DNA, 25 bp, Probe sequence
tgattgattatttccagaatgagtt

SEQ ID NO: 53260 - DNA, 25 bp, Probe sequence
ttgattgattatttccagaatgagt

SEQ ID NO: 53261 - DNA, 25 bp, Probe sequence
tttccagaatgagttaaataatcca

SEQ ID NO: 53262 - DNA, 25 bp, Probe sequence
attcgattgagaatcagcggttctt

SEQ ID NO: 53263 - DNA, 25 bp, Probe sequence
gcattctactctaataacgctcaag

SEQ ID NO: 53264 - DNA, 25 bp, Probe sequence
attctactctaataacgctcaaggc

SEQ ID NO: 53265 - DNA, 25 bp, Probe sequence
cattctactctaataacgctcaagg

SEQ ID NO: 53266 - DNA, 25 bp, Probe sequence
agtagatgaattacctgaagagcat

SEQ ID NO: 53267 - DNA, 25 bp, Probe sequence
tagtagatgaattacctgaagagca

SEQ ID NO: 53268 - DNA, 25 bp, Probe sequence
tggctatcatgctaattacggttat

SEQ ID NO: 53269 - DNA, 25 bp, Probe sequence
tagatgaattacctgaagagcatgg

SEQ ID NO: 53270 - DNA, 25 bp, Probe sequence
gtagatgaattacctgaagagcatg

SEQ ID NO: 53271 - DNA, 25 bp, Probe sequence
ctgatgttacagcagttacagagaa

SEQ ID NO: 53272 - DNA, 25 bp, Probe sequence
aattcatggattcaataagcacact

SEQ ID NO: 53273 - DNA, 25 bp, Probe sequence
ctagtggatgaactaccagaagaac

SEQ ID NO: 53274 - DNA, 25 bp, Probe sequence
tagtggatgaactaccagaagaaca

SEQ ID NO: 53275 - DNA, 25 bp, Probe sequence
aaacgaaacacaaacaactacaact

SEQ ID NO: 53276 - DNA, 25 bp, Probe sequence
acgaaacacaaacaactacaactaa

SEQ ID NO: 53277 - DNA, 25 bp, Probe sequence
aacgaaacacaaacaactacaacta

SEQ ID NO: 53278 - DNA, 25 bp, Probe sequence
agtggatgaactaccagaagaacat

SEQ ID NO: 53279 - DNA, 25 bp, Probe sequence
taaacgaaacacaaacaactacaac

SEQ ID NO: 53280 - DNA, 25 bp, Probe sequence
gtaaacgaaacacaaacaactacaa

SEQ ID NO: 53281 - DNA, 25 bp, Probe sequence
aatcagaataggcagagtctaatga

SEQ ID NO: 53282 - DNA, 25 bp, Probe sequence
cagaataggcagagtctaatgacat

SEQ ID NO: 53283 - DNA, 25 bp, Probe sequence
atcagaataggcagagtctaatgac

SEQ ID NO: 53284 - DNA, 25 bp, Probe sequence
tcagaataggcagagtctaatgaca

SEQ ID NO: 53285 - DNA, 25 bp, Probe sequence
aataggcagagtctaatgacattca

SEQ ID NO: 53286 - DNA, 25 bp, Probe sequence
agaataggcagagtctaatgacatt

SEQ ID NO: 53287 - DNA, 25 bp, Probe sequence
taatcagaataggcagagtctaatg

SEQ ID NO: 53288 - DNA, 25 bp, Probe sequence
gaataggcagagtctaatgacattc

SEQ ID NO: 53289 - DNA, 25 bp, Probe sequence
tgttgcatagttgatatacgttgtt

SEQ ID NO: 53290 - DNA, 25 bp, Probe sequence
gttggagcacttttgacaaatagaa

SEQ ID NO: 53291 - DNA, 25 bp, Probe sequence
tggagcacttttgacaaatagaata

SEQ ID NO: 53292 - DNA, 25 bp, Probe sequence
ttggagcacttttgacaaatagaat

SEQ ID NO: 53293 - DNA, 25 bp, Probe sequence
gcacttttgacaaatagaataaggg

SEQ ID NO: 53294 - DNA, 25 bp, Probe sequence
agttggagcacttttgacaaataga

SEQ ID NO: 53295 - DNA, 25 bp, Probe sequence
cagttggagcacttttgacaaatag

SEQ ID NO: 53296 - DNA, 25 bp, Probe sequence
ggagcacttttgacaaatagaataa

SEQ ID NO: 53297 - DNA, 25 bp, Probe sequence
agcacttttgacaaatagaataagg

SEQ ID NO: 53298 - DNA, 25 bp, Probe sequence
gcagttggagcacttttgacaaata

SEQ ID NO: 53299 - DNA, 25 bp, Probe sequence
tttctgtgatgttacgcaatgattt

SEQ ID NO: 53300 - DNA, 25 bp, Probe sequence
ttctgtgatgttacgcaatgattta

SEQ ID NO: 53301 - DNA, 25 bp, Probe sequence
tctgtgatgttacgcaatgatttaa

SEQ ID NO: 53302 - DNA, 25 bp, Probe sequence
gtgatgttacgcaatgatttaaagc

SEQ ID NO: 53303 - DNA, 25 bp, Probe sequence
tgtgatgttacgcaatgatttaaag

SEQ ID NO: 53304 - DNA, 25 bp, Probe sequence
ctgtgatgttacgcaatgatttaaa

SEQ ID NO: 53305 - DNA, 25 bp, Probe sequence
ttttctgtgatgttacgcaatgatt

SEQ ID NO: 53306 - DNA, 25 bp, Probe sequence
attttctgtgatgttacgcaatgat

SEQ ID NO: 53307 - DNA, 25 bp, Probe sequence
tgtattttctgtgatgttacgcaat

SEQ ID NO: 53308 - DNA, 25 bp, Probe sequence
cctcccttaatggtggtgaaattac

SEQ ID NO: 53309 - DNA, 25 bp, Probe sequence
ctcccttaatggtggtgaaattacc

SEQ ID NO: 53310 - DNA, 25 bp, Probe sequence
acctcccttaatggtggtgaaatta

SEQ ID NO: 53311 - DNA, 25 bp, Probe sequence
aacctcccttaatggtggtgaaatt

SEQ ID NO: 53312 - DNA, 25 bp, Probe sequence
aaacctcccttaatggtggtgaaat

SEQ ID NO: 53313 - DNA, 25 bp, Probe sequence
tcccttaatggtggtgaaattaccg

SEQ ID NO: 53314 - DNA, 25 bp, Probe sequence
tggttcaacaacttccattggcaag

SEQ ID NO: 53315 - DNA, 25 bp, Probe sequence
ctggttcaacaacttccattggcaa

SEQ ID NO: 53316 - DNA, 25 bp, Probe sequence
ggttcaacaacttccattggcaagg

SEQ ID NO: 53317 - DNA, 25 bp, Probe sequence
aggattattattctggtggtaagcc

SEQ ID NO: 53318 - DNA, 25 bp, Probe sequence
tgttgaggattattattctggtggt

SEQ ID NO: 53319 - DNA, 25 bp, Probe sequence
gaggattattattctggtggtaagc

SEQ ID NO: 53320 - DNA, 25 bp, Probe sequence
caggtagccaatatgttgaggatta

SEQ ID NO: 53321 - DNA, 25 bp, Probe sequence
atgttgaggattattattctggtgg

SEQ ID NO: 53322 - DNA, 25 bp, Probe sequence
aggtagccaatatgttgaggattat

SEQ ID NO: 53323 - DNA, 25 bp, Probe sequence
ggtagccaatatgttgaggattatt

SEQ ID NO: 53324 - DNA, 25 bp, Probe sequence
gttgaggattattattctggtggta

SEQ ID NO: 53325 - DNA, 25 bp, Probe sequence
tgaggattattattctggtggtaag

SEQ ID NO: 53326 - DNA, 25 bp, Probe sequence
agcaccatttaatttagggaaaaga

SEQ ID NO: 53327 - DNA, 25 bp, Probe sequence
atttagggaaaagatgggaagaaaa

SEQ ID NO: 53328 - DNA, 25 bp, Probe sequence
aatttagggaaaagatgggaagaaa

SEQ ID NO: 53329 - DNA, 25 bp, Probe sequence
aaagcaatacttaaaagcaccattt

SEQ ID NO: 53330 - DNA, 25 bp, Probe sequence
aaaagcaatacttaaaagcaccatt

SEQ ID NO: 53331 - DNA, 25 bp, Probe sequence
aagcaccatttaatttagggaaaag

SEQ ID NO: 53332 - DNA, 25 bp, Probe sequence
gcaccatttaatttagggaaaagat

SEQ ID NO: 53333 - DNA, 25 bp, Probe sequence
taatttagggaaaagatgggaagaa

SEQ ID NO: 53334 - DNA, 25 bp, Probe sequence
ttaatttagggaaaagatgggaaga

SEQ ID NO: 53335 - DNA, 25 bp, Probe sequence
taaccaccaaccgattaataagttc

SEQ ID NO: 53336 - DNA, 25 bp, Probe sequence
ccaccaaccgattaataagttccaa

SEQ ID NO: 53337 - DNA, 25 bp, Probe sequence
aaccaccaaccgattaataagttcc

SEQ ID NO: 53338 - DNA, 25 bp, Probe sequence
ttaaccaccaaccgattaataagtt

SEQ ID NO: 53339 - DNA, 25 bp, Probe sequence
accaccaaccgattaataagttcca

SEQ ID NO: 53340 - DNA, 25 bp, Probe sequence
caaccgattaataagttccaaaggg

SEQ ID NO: 53341 - DNA, 25 bp, Probe sequence
ccaaccgattaataagttccaaagg

SEQ ID NO: 53342 - DNA, 25 bp, Probe sequence
caccaaccgattaataagttccaaa

SEQ ID NO: 53343 - DNA, 25 bp, Probe sequence
accaaccgattaataagttccaaag

SEQ ID NO: 53344 - DNA, 25 bp, Probe sequence
gtggatttcaaggttctggatcaaa

SEQ ID NO: 53345 - DNA, 25 bp, Probe sequence
gacccgttaaagccaatattaccat

SEQ ID NO: 53346 - DNA, 25 bp, Probe sequence
acccgttaaagccaatattaccatg

SEQ ID NO: 53347 - DNA, 25 bp, Probe sequence
tttggtggatttcaaggttctggat

SEQ ID NO: 53348 - DNA, 25 bp, Probe sequence
ggtggatttcaaggttctggatcaa

SEQ ID NO: 53349 - DNA, 25 bp, Probe sequence
ttggtggatttcaaggttctggatc

SEQ ID NO: 53350 - DNA, 25 bp, Probe sequence
ggacccgttaaagccaatattacca

SEQ ID NO: 53351 - DNA, 25 bp, Probe sequence
tctatggtctacattttggtcaaga

SEQ ID NO: 53352 - DNA, 25 bp, Probe sequence
tattaaacctattattccggccacc

SEQ ID NO: 53353 - DNA, 25 bp, Probe sequence
aaggaattactggattatggcttgg

SEQ ID NO: 53354 - DNA, 25 bp, Probe sequence
taaggaattactggattatggcttg

SEQ ID NO: 53355 - DNA, 25 bp, Probe sequence
ttaaggaattactggattatggctt

SEQ ID NO: 53356 - DNA, 25 bp, Probe sequence
attaaggaattactggattatggct

SEQ ID NO: 53357 - DNA, 25 bp, Probe sequence
cattaaggaattactggattatggc

SEQ ID NO: 53358 - DNA, 25 bp, Probe sequence
ggagccattaaggaattactggatt

SEQ ID NO: 53359 - DNA, 25 bp, Probe sequence
ccgttaaacaaatacctggagaatc

SEQ ID NO: 53360 - DNA, 25 bp, Probe sequence
ggagggattcttggtctacatttaa

SEQ ID NO: 53361 - DNA, 25 bp, Probe sequence
cgttaaacaaatacctggagaatct

SEQ ID NO: 53362 - DNA, 25 bp, Probe sequence
cttaccgttgctattatcatctcca

SEQ ID NO: 53363 - DNA, 25 bp, Probe sequence
ttaccgttgctattatcatctccac

SEQ ID NO: 53364 - DNA, 25 bp, Probe sequence
gcttaccgttgctattatcatctcc

SEQ ID NO: 53365 - DNA, 25 bp, Probe sequence
taccgttgctattatcatctccacc

SEQ ID NO: 53366 - DNA, 25 bp, Probe sequence
tattatcatctccaccaaatccacc

SEQ ID NO: 53367 - DNA, 25 bp, Probe sequence
gctattatcatctccaccaaatcca

SEQ ID NO: 53368 - DNA, 25 bp, Probe sequence
tgctattatcatctccaccaaatcc

SEQ ID NO: 53369 - DNA, 25 bp, Probe sequence
ccgttgctattatcatctccaccaa

SEQ ID NO: 53370 - DNA, 25 bp, Probe sequence
ctattatcatctccaccaaatccac

SEQ ID NO: 53371 - DNA, 25 bp, Probe sequence
aatggtcttaattcaacaaagggtg

SEQ ID NO: 53372 - DNA, 25 bp, Probe sequence
caatggtcttaattcaacaaagggt

SEQ ID NO: 53373 - DNA, 25 bp, Probe sequence
ccaatggtcttaattcaacaaaggg

SEQ ID NO: 53374 - DNA, 25 bp, Probe sequence
cccaatggtcttaattcaacaaagg

SEQ ID NO: 53375 - DNA, 25 bp, Probe sequence
atggtcttaattcaacaaagggtgg

SEQ ID NO: 53376 - DNA, 25 bp, Probe sequence
ccccaatggtcttaattcaacaaag

SEQ ID NO: 53377 - DNA, 25 bp, Probe sequence
tggtcttaattcaacaaagggtggc

SEQ ID NO: 53378 - DNA, 25 bp, Probe sequence
gccccaatggtcttaattcaacaaa

SEQ ID NO: 53379 - DNA, 25 bp, Probe sequence
ggtaaaatggctccaaaatccaata

SEQ ID NO: 53380 - DNA, 25 bp, Probe sequence
acctgtccaagatgttcgtaaatta

SEQ ID NO: 53381 - DNA, 25 bp, Probe sequence
tgtcctttcttattccaagccatat

SEQ ID NO: 53382 - DNA, 25 bp, Probe sequence
cctgtccaagatgttcgtaaattaa

SEQ ID NO: 53383 - DNA, 25 bp, Probe sequence
gtcctttcttattccaagccatatt

SEQ ID NO: 53384 - DNA, 25 bp, Probe sequence
ttgtcctttcttattccaagccata

SEQ ID NO: 53385 - DNA, 25 bp, Probe sequence
gaagttgtcctttcttattccaagc

SEQ ID NO: 53386 - DNA, 25 bp, Probe sequence
aaacctgtccaagatgttcgtaaat

SEQ ID NO: 53387 - DNA, 25 bp, Probe sequence
aacctgtccaagatgttcgtaaatt

SEQ ID NO: 53388 - DNA, 25 bp, Probe sequence
tcctttcttattccaagccatattt

SEQ ID NO: 53389 - DNA, 25 bp, Probe sequence
accacttattccaattgaaattccc

SEQ ID NO: 53390 - DNA, 25 bp, Probe sequence
gaaaatccaaaaccacttattccaa

SEQ ID NO: 53391 - DNA, 25 bp, Probe sequence
aactggggcttgaccttaacttaat

SEQ ID NO: 53392 - DNA, 25 bp, Probe sequence
aaaatccaaaaccacttattccaat

SEQ ID NO: 53393 - DNA, 25 bp, Probe sequence
aaatccaaaaccacttattccaatt

SEQ ID NO: 53394 - DNA, 25 bp, Probe sequence
aaccacttattccaattgaaattcc

SEQ ID NO: 53395 - DNA, 25 bp, Probe sequence
actggggcttgaccttaacttaatg

SEQ ID NO: 53396 - DNA, 25 bp, Probe sequence
caactggggcttgaccttaacttaa

SEQ ID NO: 53397 - DNA, 25 bp, Probe sequence
aattgaaattccccaaccgtttgtg

SEQ ID NO: 53398 - DNA, 25 bp, Probe sequence
cattgttggtaaatccagcatgtcc

SEQ ID NO: 53399 - DNA, 25 bp, Probe sequence
aaaattgaaaacatggtacttggtc

SEQ ID NO: 53400 - DNA, 25 bp, Probe sequence
aaattgaaaacatggtacttggtca

SEQ ID NO: 53401 - DNA, 25 bp, Probe sequence
tgaaaacatggtacttggtcaacaa

SEQ ID NO: 53402 - DNA, 25 bp, Probe sequence
gcattgttggtaaatccagcatgtc

SEQ ID NO: 53403 - DNA, 25 bp, Probe sequence
attgttggtaaatccagcatgtccc

SEQ ID NO: 53404 - DNA, 25 bp, Probe sequence
attgaaaacatggtacttggtcaac

SEQ ID NO: 53405 - DNA, 25 bp, Probe sequence
aattgaaaacatggtacttggtcaa

SEQ ID NO: 53406 - DNA, 25 bp, Probe sequence
ttgaaaacatggtacttggtcaaca

SEQ ID NO: 53407 - DNA, 25 bp, Probe sequence
ggatggatgggaaccttatttactt

SEQ ID NO: 53408 - DNA, 25 bp, Probe sequence
ggatgggaaccttatttactttacc

SEQ ID NO: 53409 - DNA, 25 bp, Probe sequence
gatggatgggaaccttatttacttt

SEQ ID NO: 53410 - DNA, 25 bp, Probe sequence
tggatgggaaccttatttactttac

SEQ ID NO: 53411 - DNA, 25 bp, Probe sequence
gttcacttcccttaccagaattatt

SEQ ID NO: 53412 - DNA, 25 bp, Probe sequence
gggatggatgggaaccttatttact

SEQ ID NO: 53413 - DNA, 25 bp, Probe sequence
ttcacttcccttaccagaattattt

SEQ ID NO: 53414 - DNA, 25 bp, Probe sequence
atggatgggaaccttatttacttta

SEQ ID NO: 53415 - DNA, 25 bp, Probe sequence
ggttcacttcccttaccagaattat

SEQ ID NO: 53416 - DNA, 25 bp, Probe sequence
ccgacccagggattgatttattaaa

SEQ ID NO: 53417 - DNA, 25 bp, Probe sequence
cgacccagggattgatttattaaat

SEQ ID NO: 53418 - DNA, 25 bp, Probe sequence
acccagggattgatttattaaatga

SEQ ID NO: 53419 - DNA, 25 bp, Probe sequence
gacccagggattgatttattaaatg

SEQ ID NO: 53420 - DNA, 25 bp, Probe sequence
tcttttgactttgaaatggtgagac

SEQ ID NO: 53421 - DNA, 25 bp, Probe sequence
tgaatcttttgactttgaaatggtg

SEQ ID NO: 53422 - DNA, 25 bp, Probe sequence
cccagggattgatttattaaatgaa

SEQ ID NO: 53423 - DNA, 25 bp, Probe sequence
attgattttggttccaggggtattt

SEQ ID NO: 53424 - DNA, 25 bp, Probe sequence
aattgattttggttccaggggtatt

SEQ ID NO: 53425 - DNA, 25 bp, Probe sequence
gaaaagggaatgggtggagaattaa

SEQ ID NO: 53426 - DNA, 25 bp, Probe sequence
ggaatttggcatggtaaaagaagaa

SEQ ID NO: 53427 - DNA, 25 bp, Probe sequence
tattttggtggaatttggcatggta

SEQ ID NO: 53428 - DNA, 25 bp, Probe sequence
tggaatttggcatggtaaaagaaga

SEQ ID NO: 53429 - DNA, 25 bp, Probe sequence
gtggaatttggcatggtaaaagaag

SEQ ID NO: 53430 - DNA, 25 bp, Probe sequence
aaaagggaatgggtggagaattaat

SEQ ID NO: 53431 - DNA, 25 bp, Probe sequence
aaagggaatgggtggagaattaatt

SEQ ID NO: 53432 - DNA, 25 bp, Probe sequence
gaatttggcatggtaaaagaagaat

SEQ ID NO: 53433 - DNA, 25 bp, Probe sequence
aatattttggtggaatttggcatgg

SEQ ID NO: 53434 - DNA, 25 bp, Probe sequence
aatgccaataataatgcttactgct

SEQ ID NO: 53435 - DNA, 25 bp, Probe sequence
tgccaataataatgcttactgctaa

SEQ ID NO: 53436 - DNA, 25 bp, Probe sequence
atgccaataataatgcttactgcta

SEQ ID NO: 53437 - DNA, 25 bp, Probe sequence
aaatgccaataataatgcttactgc

SEQ ID NO: 53438 - DNA, 25 bp, Probe sequence
acgaaatgccaataataatgcttac

SEQ ID NO: 53439 - DNA, 25 bp, Probe sequence
cgaaatgccaataataatgcttact

SEQ ID NO: 53440 - DNA, 25 bp, Probe sequence
gccaataataatgcttactgctaaa

SEQ ID NO: 53441 - DNA, 25 bp, Probe sequence
atacgaaatgccaataataatgctt

SEQ ID NO: 53442 - DNA, 25 bp, Probe sequence
aatacgaaatgccaataataatgct

SEQ ID NO: 53443 - DNA, 25 bp, Probe sequence
ataacagatgatgatggtaacagtt

SEQ ID NO: 53444 - DNA, 25 bp, Probe sequence
tataacagatgatgatggtaacagt

SEQ ID NO: 53445 - DNA, 25 bp, Probe sequence
gtaaacgagtagcaaacattcaaga

SEQ ID NO: 53446 - DNA, 25 bp, Probe sequence
aatctcagggaatgctatggttaaa

SEQ ID NO: 53447 - DNA, 25 bp, Probe sequence
aaatctcagggaatgctatggttaa

SEQ ID NO: 53448 - DNA, 25 bp, Probe sequence
tcagggaatgctatggttaaagtta

SEQ ID NO: 53449 - DNA, 25 bp, Probe sequence
atctcagggaatgctatggttaaag

SEQ ID NO: 53450 - DNA, 25 bp, Probe sequence
aaatgctgaattaactggtcgtaac

SEQ ID NO: 53451 - DNA, 25 bp, Probe sequence
ttaggcgtaaatgctgaattaactg

SEQ ID NO: 53452 - DNA, 25 bp, Probe sequence
tagcacaacatccattcttagacag

SEQ ID NO: 53453 - DNA, 25 bp, Probe sequence
gtagcacaacatccattcttagaca

SEQ ID NO: 53454 - DNA, 25 bp, Probe sequence
tggttcaactcttctatcacaactt

SEQ ID NO: 53455 - DNA, 25 bp, Probe sequence
cacaacatccattcttagacagaga

SEQ ID NO: 53456 - DNA, 25 bp, Probe sequence
ggttcaactcttctatcacaacttc

SEQ ID NO: 53457 - DNA, 25 bp, Probe sequence
ttcaactcttctatcacaacttcag

SEQ ID NO: 53458 - DNA, 25 bp, Probe sequence
ttggttcaactcttctatcacaact

SEQ ID NO: 53459 - DNA, 25 bp, Probe sequence
gttcaactcttctatcacaacttca

SEQ ID NO: 53460 - DNA, 25 bp, Probe sequence
gtgattctcatatccgtcgtagtat

SEQ ID NO: 53461 - DNA, 25 bp, Probe sequence
atcatatggtcaggttgcgtattaa

SEQ ID NO: 53462 - DNA, 25 bp, Probe sequence
aatcatatggtcaggttgcgtatta

SEQ ID NO: 53463 - DNA, 25 bp, Probe sequence
cattagaatcatatggtcaggttgc

SEQ ID NO: 53464 - DNA, 25 bp, Probe sequence
attagaatcatatggtcaggttgcg

SEQ ID NO: 53465 - DNA, 25 bp, Probe sequence
gaatcatatggtcaggttgcgtatt

SEQ ID NO: 53466 - DNA, 25 bp, Probe sequence
tagaatcatatggtcaggttgcgta

SEQ ID NO: 53467 - DNA, 25 bp, Probe sequence
aacgtatggaaggatacaatgaagc

SEQ ID NO: 53468 - DNA, 25 bp, Probe sequence
agaatcatatggtcaggttgcgtat

SEQ ID NO: 53469 - DNA, 25 bp, Probe sequence
caagatgcaccattagaatcatatg

SEQ ID NO: 53470 - DNA, 25 bp, Probe sequence
aagaagtacaacctttcattgaagc

SEQ ID NO: 53471 - DNA, 25 bp, Probe sequence
gtacaacctttcattgaagcgtatg

SEQ ID NO: 53472 - DNA, 25 bp, Probe sequence
agtacaacctttcattgaagcgtat

SEQ ID NO: 53473 - DNA, 25 bp, Probe sequence
aagtacaacctttcattgaagcgta

SEQ ID NO: 53474 - DNA, 25 bp, Probe sequence
agaagtacaacctttcattgaagcg

SEQ ID NO: 53475 - DNA, 25 bp, Probe sequence
gaagtacaacctttcattgaagcgt

SEQ ID NO: 53476 - DNA, 25 bp, Probe sequence
gcaaatgggttacatgatgatggtc

SEQ ID NO: 53477 - DNA, 25 bp, Probe sequence
tacaacctttcattgaagcgtatga

SEQ ID NO: 53478 - DNA, 25 bp, Probe sequence
aaagaagtacaacctttcattgaag

SEQ ID NO: 53479 - DNA, 25 bp, Probe sequence
cttactactcttagtcggcaatgtc

SEQ ID NO: 53480 - DNA, 25 bp, Probe sequence
gtcttactactcttagtcggcaatg

SEQ ID NO: 53481 - DNA, 25 bp, Probe sequence
tcttactactcttagtcggcaatgt

SEQ ID NO: 53482 - DNA, 25 bp, Probe sequence
tatcgtcttactactcttagtcggc

SEQ ID NO: 53483 - DNA, 25 bp, Probe sequence
ttatcgtcttactactcttagtcgg

SEQ ID NO: 53484 - DNA, 25 bp, Probe sequence
tggtgggtatttatcgtcttactac

SEQ ID NO: 53485 - DNA, 25 bp, Probe sequence
attggtgggtatttatcgtcttact

SEQ ID NO: 53486 - DNA, 25 bp, Probe sequence
ggtgggtatttatcgtcttactact

SEQ ID NO: 53487 - DNA, 25 bp, Probe sequence
ttggtgggtatttatcgtcttacta

SEQ ID NO: 53488 - DNA, 25 bp, Probe sequence
tagcgtcagaggaatcaagttatac

SEQ ID NO: 53489 - DNA, 25 bp, Probe sequence
attagcgtcagaggaatcaagttat

SEQ ID NO: 53490 - DNA, 25 bp, Probe sequence
ctattagcgtcagaggaatcaagtt

SEQ ID NO: 53491 - DNA, 25 bp, Probe sequence
ttagcgtcagaggaatcaagttata

SEQ ID NO: 53492 - DNA, 25 bp, Probe sequence
tattagcgtcagaggaatcaagtta

SEQ ID NO: 53493 - DNA, 25 bp, Probe sequence
gcgtcagaggaatcaagttatacaa

SEQ ID NO: 53494 - DNA, 25 bp, Probe sequence
cgtcagaggaatcaagttatacaac

SEQ ID NO: 53495 - DNA, 25 bp, Probe sequence
agcgtcagaggaatcaagttataca

SEQ ID NO: 53496 - DNA, 25 bp, Probe sequence
gttatacaactggacaagtgttcgg

SEQ ID NO: 53497 - DNA, 25 bp, Probe sequence
ataataacctgtctgtaagcggatt

SEQ ID NO: 53498 - DNA, 25 bp, Probe sequence
tataataacctgtctgtaagcggat

SEQ ID NO: 53499 - DNA, 25 bp, Probe sequence
atataataacctgtctgtaagcgga

SEQ ID NO: 53500 - DNA, 25 bp, Probe sequence
aatcagtacaccaacaagttcttct

SEQ ID NO: 53501 - DNA, 25 bp, Probe sequence
atcagtacaccaacaagttcttctt

SEQ ID NO: 53502 - DNA, 25 bp, Probe sequence
taatcagtacaccaacaagttcttc

SEQ ID NO: 53503 - DNA, 25 bp, Probe sequence
ttaatcagtacaccaacaagttctt

SEQ ID NO: 53504 - DNA, 25 bp, Probe sequence
ttattacgatatggcggtggcatta

SEQ ID NO: 53505 - DNA, 25 bp, Probe sequence
tatataataacctgtctgtaagcgg

SEQ ID NO: 53506 - DNA, 25 bp, Probe sequence
gataaaccacatacggcaatcacaa

SEQ ID NO: 53507 - DNA, 25 bp, Probe sequence
ataaaccacatacggcaatcacaac

SEQ ID NO: 53508 - DNA, 25 bp, Probe sequence
atgccaactagcgataaaccacata

SEQ ID NO: 53509 - DNA, 25 bp, Probe sequence
taaaccacatacggcaatcacaact

SEQ ID NO: 53510 - DNA, 25 bp, Probe sequence
tagcgataaaccacatacggcaatc

SEQ ID NO: 53511 - DNA, 25 bp, Probe sequence
tgccaactagcgataaaccacatac

SEQ ID NO: 53512 - DNA, 25 bp, Probe sequence
ctagcgataaaccacatacggcaat

SEQ ID NO: 53513 - DNA, 25 bp, Probe sequence
cgataaaccacatacggcaatcaca

SEQ ID NO: 53514 - DNA, 25 bp, Probe sequence
ccaactagcgataaaccacatacgg

SEQ ID NO: 53515 - DNA, 25 bp, Probe sequence
tcaacagaacatcgtaataagatcg

SEQ ID NO: 53516 - DNA, 25 bp, Probe sequence
ttcaacagaacatcgtaataagatc

SEQ ID NO: 53517 - DNA, 25 bp, Probe sequence
gatcgaatcttatatggatgtagct

SEQ ID NO: 53518 - DNA, 25 bp, Probe sequence
caacagaacatcgtaataagatcga

SEQ ID NO: 53519 - DNA, 25 bp, Probe sequence
aacagaacatcgtaataagatcgaa

SEQ ID NO: 53520 - DNA, 25 bp, Probe sequence
acagaacatcgtaataagatcgaat

SEQ ID NO: 53521 - DNA, 25 bp, Probe sequence
agatcgaatcttatatggatgtagc

SEQ ID NO: 53522 - DNA, 25 bp, Probe sequence
tttcaacagaacatcgtaataagat

SEQ ID NO: 53523 - DNA, 25 bp, Probe sequence
atttcaacagaacatcgtaataaga

SEQ ID NO: 53524 - DNA, 25 bp, Probe sequence
tgtgaccgttatcattattactcct

SEQ ID NO: 53525 - DNA, 25 bp, Probe sequence
ttgtgaccgttatcattattactcc

SEQ ID NO: 53526 - DNA, 25 bp, Probe sequence
gtgaccgttatcattattactcctt

SEQ ID NO: 53527 - DNA, 25 bp, Probe sequence
aagaagttccatatcctagctcaac

SEQ ID NO: 53528 - DNA, 25 bp, Probe sequence
ccgttatcattattactcctttccc

SEQ ID NO: 53529 - DNA, 25 bp, Probe sequence
cgttatcattattactcctttccca

SEQ ID NO: 53530 - DNA, 25 bp, Probe sequence
accgttatcattattactcctttcc

SEQ ID NO: 53531 - DNA, 25 bp, Probe sequence
ccatatcctagctcaactaaatcct

SEQ ID NO: 53532 - DNA, 25 bp, Probe sequence
tccatatcctagctcaactaaatcc

SEQ ID NO: 53533 - DNA, 25 bp, Probe sequence
aatgtatctaactgaactgcttgcc

SEQ ID NO: 53534 - DNA, 25 bp, Probe sequence
aatgatagaccaagtgcttatcgtt

SEQ ID NO: 53535 - DNA, 25 bp, Probe sequence
atgatagaccaagtgcttatcgttg

SEQ ID NO: 53536 - DNA, 25 bp, Probe sequence
atgtatctaactgaactgcttgcca

SEQ ID NO: 53537 - DNA, 25 bp, Probe sequence
aaatgtatctaactgaactgcttgc

SEQ ID NO: 53538 - DNA, 25 bp, Probe sequence
aaatgatagaccaagtgcttatcgt

SEQ ID NO: 53539 - DNA, 25 bp, Probe sequence
tgtatctaactgaactgcttgccag

SEQ ID NO: 53540 - DNA, 25 bp, Probe sequence
ctaccagcaatgaaattagtacaaa

SEQ ID NO: 53541 - DNA, 25 bp, Probe sequence
actaccagcaatgaaattagtacaa

SEQ ID NO: 53542 - DNA, 25 bp, Probe sequence
aaattcaatcgcaaatgtcaaatta

SEQ ID NO: 53543 - DNA, 25 bp, Probe sequence
gcaaaattcaatcgcaaatgtcaaa

SEQ ID NO: 53544 - DNA, 25 bp, Probe sequence
agcaaaattcaatcgcaaatgtcaa

SEQ ID NO: 53545 - DNA, 25 bp, Probe sequence
caaaattcaatcgcaaatgtcaaat

SEQ ID NO: 53546 - DNA, 25 bp, Probe sequence
gagcaaaattcaatcgcaaatgtca

SEQ ID NO: 53547 - DNA, 25 bp, Probe sequence
aaacaggttgtgaggataattttga

SEQ ID NO: 53548 - DNA, 25 bp, Probe sequence
caggttgtgaggataattttgatac

SEQ ID NO: 53549 - DNA, 25 bp, Probe sequence
aacaggttgtgaggataattttgat

SEQ ID NO: 53550 - DNA, 25 bp, Probe sequence
tgagcaaaattcaatcgcaaatgtc

SEQ ID NO: 53551 - DNA, 25 bp, Probe sequence
atgaatgttgctatacttgcgaatc

SEQ ID NO: 53552 - DNA, 25 bp, Probe sequence
tgaatgttgctatacttgcgaatcc

SEQ ID NO: 53553 - DNA, 25 bp, Probe sequence
aattgaccatgctgtagtgaagtac

SEQ ID NO: 53554 - DNA, 25 bp, Probe sequence
gctaagactgtgaagcataatactg

SEQ ID NO: 53555 - DNA, 25 bp, Probe sequence
ctaagactgtgaagcataatactgc

SEQ ID NO: 53556 - DNA, 25 bp, Probe sequence
gaatgttgctatacttgcgaatccc

SEQ ID NO: 53557 - DNA, 25 bp, Probe sequence
attgaccatgctgtagtgaagtaca

SEQ ID NO: 53558 - DNA, 25 bp, Probe sequence
taaacaaattgctaagactgtgaag

SEQ ID NO: 53559 - DNA, 25 bp, Probe sequence
ttgaccatgctgtagtgaagtacaa

SEQ ID NO: 53560 - DNA, 25 bp, Probe sequence
gattcgcaagtatagcaacattcat

SEQ ID NO: 53561 - DNA, 25 bp, Probe sequence
attcgcaagtatagcaacattcata

SEQ ID NO: 53562 - DNA, 25 bp, Probe sequence
tcgcaagtatagcaacattcatatt

SEQ ID NO: 53563 - DNA, 25 bp, Probe sequence
ttcgcaagtatagcaacattcatat

SEQ ID NO: 53564 - DNA, 25 bp, Probe sequence
cgcaagtatagcaacattcatattc

SEQ ID NO: 53565 - DNA, 25 bp, Probe sequence
ggattcgcaagtatagcaacattca

SEQ ID NO: 53566 - DNA, 25 bp, Probe sequence
gcaagtatagcaacattcatattct

SEQ ID NO: 53567 - DNA, 25 bp, Probe sequence
cagtattatgcttcacagtcttagc

SEQ ID NO: 53568 - DNA, 25 bp, Probe sequence
gcagtattatgcttcacagtcttag

SEQ ID NO: 53569 - DNA, 25 bp, Probe sequence
tgatgtggttagtcatagcaattat

SEQ ID NO: 53570 - DNA, 25 bp, Probe sequence
atcttattgtttggtgtgatgttgc

SEQ ID NO: 53571 - DNA, 25 bp, Probe sequence
gatgtggttagtcatagcaattata

SEQ ID NO: 53572 - DNA, 25 bp, Probe sequence
atgatgtggttagtcatagcaatta

SEQ ID NO: 53573 - DNA, 25 bp, Probe sequence
tgtggttagtcatagcaattatatt

SEQ ID NO: 53574 - DNA, 25 bp, Probe sequence
tcttattgtttggtgtgatgttgca

SEQ ID NO: 53575 - DNA, 25 bp, Probe sequence
atgtggttagtcatagcaattatat

SEQ ID NO: 53576 - DNA, 25 bp, Probe sequence
catcttattgtttggtgtgatgttg

SEQ ID NO: 53577 - DNA, 25 bp, Probe sequence
ttattgtttggtgtgatgttgcaag

SEQ ID NO: 53578 - DNA, 25 bp, Probe sequence
atgccagttgatgatccactgaatg

SEQ ID NO: 53579 - DNA, 25 bp, Probe sequence
ccagttgatgatccactgaatgcat

SEQ ID NO: 53580 - DNA, 25 bp, Probe sequence
accaccttcttgtatgacatatcta

SEQ ID NO: 53581 - DNA, 25 bp, Probe sequence
taccaccttcttgtatgacatatct

SEQ ID NO: 53582 - DNA, 25 bp, Probe sequence
ccaccttcttgtatgacatatctaa

SEQ ID NO: 53583 - DNA, 25 bp, Probe sequence
taatggtaaacatctgacaactggt

SEQ ID NO: 53584 - DNA, 25 bp, Probe sequence
ataccaccttcttgtatgacatatc

SEQ ID NO: 53585 - DNA, 25 bp, Probe sequence
ttaatggtaaacatctgacaactgg

SEQ ID NO: 53586 - DNA, 25 bp, Probe sequence
aatggtaaacatctgacaactggtt

SEQ ID NO: 53587 - DNA, 25 bp, Probe sequence
aataccaccttcttgtatgacatat

SEQ ID NO: 53588 - DNA, 25 bp, Probe sequence
gaaataccaccttcttgtatgacat

SEQ ID NO: 53589 - DNA, 25 bp, Probe sequence
aacacaacagagacataacaacaag

SEQ ID NO: 53590 - DNA, 25 bp, Probe sequence
caacacaacagagacataacaacaa

SEQ ID NO: 53591 - DNA, 25 bp, Probe sequence
attcacaacacaacagagacataac

SEQ ID NO: 53592 - DNA, 25 bp, Probe sequence
cattcacaacacaacagagacataa

SEQ ID NO: 53593 - DNA, 25 bp, Probe sequence
aatacattcacaacacaacagagac

SEQ ID NO: 53594 - DNA, 25 bp, Probe sequence
cacaacagagacataacaacaagat

SEQ ID NO: 53595 - DNA, 25 bp, Probe sequence
acacaacagagacataacaacaaga

SEQ ID NO: 53596 - DNA, 25 bp, Probe sequence
acattcacaacacaacagagacata

SEQ ID NO: 53597 - DNA, 25 bp, Probe sequence
tacattcacaacacaacagagacat

SEQ ID NO: 53598 - DNA, 25 bp, Probe sequence
ttgtagtggtacgaatcataaagtt

SEQ ID NO: 53599 - DNA, 25 bp, Probe sequence
attgtagtggtacgaatcataaagt

SEQ ID NO: 53600 - DNA, 25 bp, Probe sequence
tgtagtggtacgaatcataaagtta

SEQ ID NO: 53601 - DNA, 25 bp, Probe sequence
gtagtggtacgaatcataaagttat

SEQ ID NO: 53602 - DNA, 25 bp, Probe sequence
tattgtagtggtacgaatcataaag

SEQ ID NO: 53603 - DNA, 25 bp, Probe sequence
acgaatcataaagttataatcccaa

SEQ ID NO: 53604 - DNA, 25 bp, Probe sequence
ttattgtagtggtacgaatcataaa

SEQ ID NO: 53605 - DNA, 25 bp, Probe sequence
tttattgtagtggtacgaatcataa

SEQ ID NO: 53606 - DNA, 25 bp, Probe sequence
agtggtacgaatcataaagttataa

SEQ ID NO: 53607 - DNA, 25 bp, Probe sequence
tcagcaacaaatgtgtgaatctatt

SEQ ID NO: 53608 - DNA, 25 bp, Probe sequence
cagcaacaaatgtgtgaatctatta

SEQ ID NO: 53609 - DNA, 25 bp, Probe sequence
agcaacaaatgtgtgaatctattat

SEQ ID NO: 53610 - DNA, 25 bp, Probe sequence
tttcagcaacaaatgtgtgaatcta

SEQ ID NO: 53611 - DNA, 25 bp, Probe sequence
atttcagcaacaaatgtgtgaatct

SEQ ID NO: 53612 - DNA, 25 bp, Probe sequence
ttcagcaacaaatgtgtgaatctat

SEQ ID NO: 53613 - DNA, 25 bp, Probe sequence
gcaacaaatgtgtgaatctattata

SEQ ID NO: 53614 - DNA, 25 bp, Probe sequence
tgagaaagccttttcaaacatcaat

SEQ ID NO: 53615 - DNA, 25 bp, Probe sequence
gagaaagccttttcaaacatcaatt

SEQ ID NO: 53616 - DNA, 25 bp, Probe sequence
tgaaaatgagaaacaaaatggcact

SEQ ID NO: 53617 - DNA, 25 bp, Probe sequence
ctgaaaatgagaaacaaaatggcac

SEQ ID NO: 53618 - DNA, 25 bp, Probe sequence
actgaaaatgagaaacaaaatggca

SEQ ID NO: 53619 - DNA, 25 bp, Probe sequence
gaaaatgagaaacaaaatggcactt

SEQ ID NO: 53620 - DNA, 25 bp, Probe sequence
aactgaaaatgagaaacaaaatggc

SEQ ID NO: 53621 - DNA, 25 bp, Probe sequence
aaaatgagaaacaaaatggcacttt

SEQ ID NO: 53622 - DNA, 25 bp, Probe sequence
gcacatcatatttgtaactcataga

SEQ ID NO: 53623 - DNA, 25 bp, Probe sequence
caactgaaaatgagaaacaaaatgg

SEQ ID NO: 53624 - DNA, 25 bp, Probe sequence
gatgcacatcatatttgtaactcat

SEQ ID NO: 53625 - DNA, 25 bp, Probe sequence
accattatcaagcaatagctacaca

SEQ ID NO: 53626 - DNA, 25 bp, Probe sequence
ccattatcaagcaatagctacacat

SEQ ID NO: 53627 - DNA, 25 bp, Probe sequence
taccattatcaagcaatagctacac

SEQ ID NO: 53628 - DNA, 25 bp, Probe sequence
gcaatagctacacatataatctgtt

SEQ ID NO: 53629 - DNA, 25 bp, Probe sequence
ttaccattatcaagcaatagctaca

SEQ ID NO: 53630 - DNA, 25 bp, Probe sequence
agcaatagctacacatataatctgt

SEQ ID NO: 53631 - DNA, 25 bp, Probe sequence
cttaccattatcaagcaatagctac

SEQ ID NO: 53632 - DNA, 25 bp, Probe sequence
cattatcaagcaatagctacacata

SEQ ID NO: 53633 - DNA, 25 bp, Probe sequence
cgcttaccattatcaagcaatagct

SEQ ID NO: 53634 - DNA, 25 bp, Probe sequence
cgtggaaacttacagatgctttata

SEQ ID NO: 53635 - DNA, 25 bp, Probe sequence
gcgtggaaacttacagatgctttat

SEQ ID NO: 53636 - DNA, 25 bp, Probe sequence
aaacagagcgtggaaacttacagat

SEQ ID NO: 53637 - DNA, 25 bp, Probe sequence
aacagagcgtggaaacttacagatg

SEQ ID NO: 53638 - DNA, 25 bp, Probe sequence
gtggaaacttacagatgctttataa

SEQ ID NO: 53639 - DNA, 25 bp, Probe sequence
agcgtggaaacttacagatgcttta

SEQ ID NO: 53640 - DNA, 25 bp, Probe sequence
aaaacagagcgtggaaacttacaga

SEQ ID NO: 53641 - DNA, 25 bp, Probe sequence
aggagatcatattataccatggagt

SEQ ID NO: 53642 - DNA, 25 bp, Probe sequence
gagcgtggaaacttacagatgcttt

SEQ ID NO: 53643 - DNA, 25 bp, Probe sequence
tgcgattggatagttttatgatgaa

SEQ ID NO: 53644 - DNA, 25 bp, Probe sequence
atgcgattggatagttttatgatga

SEQ ID NO: 53645 - DNA, 25 bp, Probe sequence
gatgattaaccatcttgatgatgtt

SEQ ID NO: 53646 - DNA, 25 bp, Probe sequence
ttaaccatcttgatgatgttatcga

SEQ ID NO: 53647 - DNA, 25 bp, Probe sequence
attaaccatcttgatgatgttatcg

SEQ ID NO: 53648 - DNA, 25 bp, Probe sequence
gcgattggatagttttatgatgaat

SEQ ID NO: 53649 - DNA, 25 bp, Probe sequence
tgattaaccatcttgatgatgttat

SEQ ID NO: 53650 - DNA, 25 bp, Probe sequence
atgattaaccatcttgatgatgtta

SEQ ID NO: 53651 - DNA, 25 bp, Probe sequence
aaccatcttgatgatgttatcgatt

SEQ ID NO: 53652 - DNA, 25 bp, Probe sequence
tggatagatatgaccatcaatgtgg

SEQ ID NO: 53653 - DNA, 25 bp, Probe sequence
actggatagatatgaccatcaatgt

SEQ ID NO: 53654 - DNA, 25 bp, Probe sequence
acctgtactggatagatatgaccat

SEQ ID NO: 53655 - DNA, 25 bp, Probe sequence
ctggatagatatgaccatcaatgtg

SEQ ID NO: 53656 - DNA, 25 bp, Probe sequence
cctgtactggatagatatgaccatc

SEQ ID NO: 53657 - DNA, 25 bp, Probe sequence
cacctgtactggatagatatgacca

SEQ ID NO: 53658 - DNA, 25 bp, Probe sequence
ctgtactggatagatatgaccatca

SEQ ID NO: 53659 - DNA, 25 bp, Probe sequence
tgtactggatagatatgaccatcaa

SEQ ID NO: 53660 - DNA, 25 bp, Probe sequence
ccacctgtactggatagatatgacc

SEQ ID NO: 53661 - DNA, 25 bp, Probe sequence
ctgcttgattaccatatccaacaac

SEQ ID NO: 53662 - DNA, 25 bp, Probe sequence
tctgcttgattaccatatccaacaa

SEQ ID NO: 53663 - DNA, 25 bp, Probe sequence
atctgcttgattaccatatccaaca

SEQ ID NO: 53664 - DNA, 25 bp, Probe sequence
catctgcttgattaccatatccaac

SEQ ID NO: 53665 - DNA, 25 bp, Probe sequence
ccagttgctaatacacctaccattg

SEQ ID NO: 53666 - DNA, 25 bp, Probe sequence
cagttgctaatacacctaccattgc

SEQ ID NO: 53667 - DNA, 25 bp, Probe sequence
tgcttgattaccatatccaacaacg

SEQ ID NO: 53668 - DNA, 25 bp, Probe sequence
ttcgcatctgcttgattaccatatc

SEQ ID NO: 53669 - DNA, 25 bp, Probe sequence
gcatctgcttgattaccatatccaa

SEQ ID NO: 53670 - DNA, 25 bp, Probe sequence
tgtgaatcgtctacacttaattgga

SEQ ID NO: 53671 - DNA, 25 bp, Probe sequence
atgtgaatcgtctacacttaattgg

SEQ ID NO: 53672 - DNA, 25 bp, Probe sequence
gtgaatcgtctacacttaattggat

SEQ ID NO: 53673 - DNA, 25 bp, Probe sequence
tgaatcgtctacacttaattggata

SEQ ID NO: 53674 - DNA, 25 bp, Probe sequence
aatgtgaatcgtctacacttaattg

SEQ ID NO: 53675 - DNA, 25 bp, Probe sequence
gaatcgtctacacttaattggataa

SEQ ID NO: 53676 - DNA, 25 bp, Probe sequence
aaatgtgaatcgtctacacttaatt

SEQ ID NO: 53677 - DNA, 25 bp, Probe sequence
tggattctgagttttacattcaaca

SEQ ID NO: 53678 - DNA, 25 bp, Probe sequence
agttggattctgagttttacattca

SEQ ID NO: 53679 - DNA, 25 bp, Probe sequence
ctgtgttctcttcaatccattcatc

SEQ ID NO: 53680 - DNA, 25 bp, Probe sequence
tgtgttctcttcaatccattcatct

SEQ ID NO: 53681 - DNA, 25 bp, Probe sequence
tctgtgttctcttcaatccattcat

SEQ ID NO: 53682 - DNA, 25 bp, Probe sequence
ggttgaataagtctgatgccatatc

SEQ ID NO: 53683 - DNA, 25 bp, Probe sequence
attgcttggttgaataagtctgatg

SEQ ID NO: 53684 - DNA, 25 bp, Probe sequence
tgccatatctaagtcattctcatct

SEQ ID NO: 53685 - DNA, 25 bp, Probe sequence
gtctgtgttctcttcaatccattca

SEQ ID NO: 53686 - DNA, 25 bp, Probe sequence
gtgttctcttcaatccattcatcta

SEQ ID NO: 53687 - DNA, 25 bp, Probe sequence
ctattgcttggttgaataagtctga

SEQ ID NO: 53688 - DNA, 25 bp, Probe sequence
agtgttcagatatgtacgctcagaa

SEQ ID NO: 53689 - DNA, 25 bp, Probe sequence
aacttgagtgttcagatatgtacgc

SEQ ID NO: 53690 - DNA, 25 bp, Probe sequence
cttgagtgttcagatatgtacgctc

SEQ ID NO: 53691 - DNA, 25 bp, Probe sequence
acttgagtgttcagatatgtacgct

SEQ ID NO: 53692 - DNA, 25 bp, Probe sequence
gagtgttcagatatgtacgctcaga

SEQ ID NO: 53693 - DNA, 25 bp, Probe sequence
catagacgagacacaaggcaatgaa

SEQ ID NO: 53694 - DNA, 25 bp, Probe sequence
cagatatgtacgctcagaaactcat

SEQ ID NO: 53695 - DNA, 25 bp, Probe sequence
ttcagatatgtacgctcagaaactc

SEQ ID NO: 53696 - DNA, 25 bp, Probe sequence
gttcagatatgtacgctcagaaact

SEQ ID NO: 53697 - DNA, 25 bp, Probe sequence
agtagattgagacattttgaaggtt

SEQ ID NO: 53698 - DNA, 25 bp, Probe sequence
gtagattgagacattttgaaggtta

SEQ ID NO: 53699 - DNA, 25 bp, Probe sequence
tagattgagacattttgaaggttaa

SEQ ID NO: 53700 - DNA, 25 bp, Probe sequence
gtgttcctcttcttccttacaactt

SEQ ID NO: 53701 - DNA, 25 bp, Probe sequence
atgtgttcctcttcttccttacaac

SEQ ID NO: 53702 - DNA, 25 bp, Probe sequence
tgtgttcctcttcttccttacaact

SEQ ID NO: 53703 - DNA, 25 bp, Probe sequence
catgtgttcctcttcttccttacaa

SEQ ID NO: 53704 - DNA, 25 bp, Probe sequence
cctcttcttccttacaacctttagt

SEQ ID NO: 53705 - DNA, 25 bp, Probe sequence
ccctcttcttccttacaacctttag

SEQ ID NO: 53706 - DNA, 25 bp, Probe sequence
tatccctcttcttccttacaacctt

SEQ ID NO: 53707 - DNA, 25 bp, Probe sequence
tccctcttcttccttacaaccttta

SEQ ID NO: 53708 - DNA, 25 bp, Probe sequence
ccctacaaactataattcgtaagcc

SEQ ID NO: 53709 - DNA, 25 bp, Probe sequence
cttacttggtattaacaacacttcc

SEQ ID NO: 53710 - DNA, 25 bp, Probe sequence
ggtattaacaacacttcccaacttc

SEQ ID NO: 53711 - DNA, 25 bp, Probe sequence
tattaacaacacttcccaacttcac

SEQ ID NO: 53712 - DNA, 25 bp, Probe sequence
gtattaacaacacttcccaacttca

SEQ ID NO: 53713 - DNA, 25 bp, Probe sequence
attaacaacacttcccaacttcact

SEQ ID NO: 53714 - DNA, 25 bp, Probe sequence
ttaacaacacttcccaacttcactt

SEQ ID NO: 53715 - DNA, 25 bp, Probe sequence
acttacttggtattaacaacacttc

SEQ ID NO: 53716 - DNA, 25 bp, Probe sequence
ttacttggtattaacaacacttccc

SEQ ID NO: 53717 - DNA, 25 bp, Probe sequence
ttgagctgtgtaataccatgtacgt

SEQ ID NO: 53718 - DNA, 25 bp, Probe sequence
tacttcactacagcatggtctcttg

SEQ ID NO: 53719 - DNA, 25 bp, Probe sequence
gtacttcactacagcatggtctctt

SEQ ID NO: 53720 - DNA, 25 bp, Probe sequence
tgtacttcactacagcatggtctct

SEQ ID NO: 53721 - DNA, 25 bp, Probe sequence
tcgcaagtatcgcaatactcatatt

SEQ ID NO: 53722 - DNA, 25 bp, Probe sequence
ttcgcaagtatcgcaatactcatat

SEQ ID NO: 53723 - DNA, 25 bp, Probe sequence
attcgcaagtatcgcaatactcata

SEQ ID NO: 53724 - DNA, 25 bp, Probe sequence
acttatgccttttctgtacttcact

SEQ ID NO: 53725 - DNA, 25 bp, Probe sequence
gattcgcaagtatcgcaatactcat

SEQ ID NO: 53726 - DNA, 25 bp, Probe sequence
ttatgccttttctgtacttcactac

SEQ ID NO: 53727 - DNA, 25 bp, Probe sequence
tctgaacactctaagacattgctaa

SEQ ID NO: 53728 - DNA, 25 bp, Probe sequence
ttctgaacactctaagacattgcta

SEQ ID NO: 53729 - DNA, 25 bp, Probe sequence
ctgaacactctaagacattgctaat

SEQ ID NO: 53730 - DNA, 25 bp, Probe sequence
tgaacactctaagacattgctaata

SEQ ID NO: 53731 - DNA, 25 bp, Probe sequence
gttctgaacactctaagacattgct

SEQ ID NO: 53732 - DNA, 25 bp, Probe sequence
acactctaagacattgctaatatct

SEQ ID NO: 53733 - DNA, 25 bp, Probe sequence
aacactctaagacattgctaatatc

SEQ ID NO: 53734 - DNA, 25 bp, Probe sequence
gaacactctaagacattgctaatat

SEQ ID NO: 53735 - DNA, 25 bp, Probe sequence
acgtccttgtattaaagaatcgaaa

SEQ ID NO: 53736 - DNA, 25 bp, Probe sequence
ttatcgtctgccatccattcattag

SEQ ID NO: 53737 - DNA, 25 bp, Probe sequence
gttatcgtctgccatccattcatta

SEQ ID NO: 53738 - DNA, 25 bp, Probe sequence
ttcatcatctatcaacacatcactt

SEQ ID NO: 53739 - DNA, 25 bp, Probe sequence
tatcgtctgccatccattcattaga

SEQ ID NO: 53740 - DNA, 25 bp, Probe sequence
atcgtctgccatccattcattagaa

SEQ ID NO: 53741 - DNA, 25 bp, Probe sequence
tcatcatctatcaacacatcactta

SEQ ID NO: 53742 - DNA, 25 bp, Probe sequence
atgttatcgtctgccatccattcat

SEQ ID NO: 53743 - DNA, 25 bp, Probe sequence
tgttatcgtctgccatccattcatt

SEQ ID NO: 53744 - DNA, 25 bp, Probe sequence
cgtctgccatccattcattagaatt

SEQ ID NO: 53745 - DNA, 25 bp, Probe sequence
ttaagtcaggcatggattacaactc

SEQ ID NO: 53746 - DNA, 25 bp, Probe sequence
gttaagtcaggcatggattacaact

SEQ ID NO: 53747 - DNA, 25 bp, Probe sequence
aaggtgttaagtcaggcatggatta

SEQ ID NO: 53748 - DNA, 25 bp, Probe sequence
tgttaagtcaggcatggattacaac

SEQ ID NO: 53749 - DNA, 25 bp, Probe sequence
gtgttaagtcaggcatggattacaa

SEQ ID NO: 53750 - DNA, 25 bp, Probe sequence
gcttcgtatgtgattggtttcttaa

SEQ ID NO: 53751 - DNA, 25 bp, Probe sequence
aggtgttaagtcaggcatggattac

SEQ ID NO: 53752 - DNA, 25 bp, Probe sequence
caggcatggattacaactccttatg

SEQ ID NO: 53753 - DNA, 25 bp, Probe sequence
tcaggcatggattacaactccttat

SEQ ID NO: 53754 - DNA, 25 bp, Probe sequence
aacgaaccacatcacgatattagtt

SEQ ID NO: 53755 - DNA, 25 bp, Probe sequence
acgaaccacatcacgatattagttg

SEQ ID NO: 53756 - DNA, 25 bp, Probe sequence
gaaacgaaccacatcacgatattag

SEQ ID NO: 53757 - DNA, 25 bp, Probe sequence
aaacgaaccacatcacgatattagt

SEQ ID NO: 53758 - DNA, 25 bp, Probe sequence
cgaaccacatcacgatattagttgg

SEQ ID NO: 53759 - DNA, 25 bp, Probe sequence
ctactaatgaaacgaaccacatcac

SEQ ID NO: 53760 - DNA, 25 bp, Probe sequence
actactaatgaaacgaaccacatca

SEQ ID NO: 53761 - DNA, 25 bp, Probe sequence
acgatattagttggtaaacctggaa

SEQ ID NO: 53762 - DNA, 25 bp, Probe sequence
cacgatattagttggtaaacctgga

SEQ ID NO: 53763 - DNA, 25 bp, Probe sequence
gatgcagctattataaggacagagt

SEQ ID NO: 53764 - DNA, 25 bp, Probe sequence
tgcagctattataaggacagagttg

SEQ ID NO: 53765 - DNA, 25 bp, Probe sequence
atgcagctattataaggacagagtt

SEQ ID NO: 53766 - DNA, 25 bp, Probe sequence
cgatgcagctattataaggacagag

SEQ ID NO: 53767 - DNA, 25 bp, Probe sequence
cagagttgtttatgaattgtggtga

SEQ ID NO: 53768 - DNA, 25 bp, Probe sequence
gcagctattataaggacagagttgt

SEQ ID NO: 53769 - DNA, 25 bp, Probe sequence
agagttgtttatgaattgtggtgat

SEQ ID NO: 53770 - DNA, 25 bp, Probe sequence
cagctattataaggacagagttgtt

SEQ ID NO: 53771 - DNA, 25 bp, Probe sequence
acagagttgtttatgaattgtggtg

SEQ ID NO: 53772 - DNA, 25 bp, Probe sequence
gataagtcagcttacgataatgtgc

SEQ ID NO: 53773 - DNA, 25 bp, Probe sequence
cgataagtcagcttacgataatgtg

SEQ ID NO: 53774 - DNA, 25 bp, Probe sequence
acgataagtcagcttacgataatgt

SEQ ID NO: 53775 - DNA, 25 bp, Probe sequence
ataagtcagcttacgataatgtgca

SEQ ID NO: 53776 - DNA, 25 bp, Probe sequence
aagtcagcttacgataatgtgcaag

SEQ ID NO: 53777 - DNA, 25 bp, Probe sequence
taagtcagcttacgataatgtgcaa

SEQ ID NO: 53778 - DNA, 25 bp, Probe sequence
tacgataagtcagcttacgataatg

SEQ ID NO: 53779 - DNA, 25 bp, Probe sequence
cttacgataagtcagcttacgataa

SEQ ID NO: 53780 - DNA, 25 bp, Probe sequence
tcagcttacgataatgtgcaagttg

SEQ ID NO: 53781 - DNA, 25 bp, Probe sequence
gcattggatgatttagcatttgttg

SEQ ID NO: 53782 - DNA, 25 bp, Probe sequence
cattggatgatttagcatttgttgt

SEQ ID NO: 53783 - DNA, 25 bp, Probe sequence
ttggatgatttagcatttgttgttt

SEQ ID NO: 53784 - DNA, 25 bp, Probe sequence
attggatgatttagcatttgttgtt

SEQ ID NO: 53785 - DNA, 25 bp, Probe sequence
tttcaactttagcatttggcgtttt

SEQ ID NO: 53786 - DNA, 25 bp, Probe sequence
ttttcaactttagcatttggcgttt

SEQ ID NO: 53787 - DNA, 25 bp, Probe sequence
tggatgatttagcatttgttgtttt

SEQ ID NO: 53788 - DNA, 25 bp, Probe sequence
tgcattggatgatttagcatttgtt

SEQ ID NO: 53789 - DNA, 25 bp, Probe sequence
tgaatgtacgtttctctattttact

SEQ ID NO: 53790 - DNA, 25 bp, Probe sequence
tcatattgttcgagtataaagggaa

SEQ ID NO: 53791 - DNA, 25 bp, Probe sequence
atcatattgttcgagtataaaggga

SEQ ID NO: 53792 - DNA, 25 bp, Probe sequence
gttgagcatcggcaattttatcata

SEQ ID NO: 53793 - DNA, 25 bp, Probe sequence
tgagcatcggcaattttatcatatt

SEQ ID NO: 53794 - DNA, 25 bp, Probe sequence
ttgagcatcggcaattttatcatat

SEQ ID NO: 53795 - DNA, 25 bp, Probe sequence
aaagttgagcatcggcaattttatc

SEQ ID NO: 53796 - DNA, 25 bp, Probe sequence
agttgagcatcggcaattttatcat

SEQ ID NO: 53797 - DNA, 25 bp, Probe sequence
aaaagttgagcatcggcaattttat

SEQ ID NO: 53798 - DNA, 25 bp, Probe sequence
aagttgagcatcggcaattttatca

SEQ ID NO: 53799 - DNA, 25 bp, Probe sequence
cgtgctcatcgtcaagactatttaa

SEQ ID NO: 53800 - DNA, 25 bp, Probe sequence
gtgctcatcgtcaagactatttaaa

SEQ ID NO: 53801 - DNA, 25 bp, Probe sequence
ttacgtgctcatcgtcaagactatt

SEQ ID NO: 53802 - DNA, 25 bp, Probe sequence
tgctcatcgtcaagactatttaaat

SEQ ID NO: 53803 - DNA, 25 bp, Probe sequence
gctcatcgtcaagactatttaaatc

SEQ ID NO: 53804 - DNA, 25 bp, Probe sequence
tttacatcgatatgagtttctggat

SEQ ID NO: 53805 - DNA, 25 bp, Probe sequence
atttacatcgatatgagtttctgga

SEQ ID NO: 53806 - DNA, 25 bp, Probe sequence
catttacatcgatatgagtttctgg

SEQ ID NO: 53807 - DNA, 25 bp, Probe sequence
acgtgctcatcgtcaagactattta

SEQ ID NO: 53808 - DNA, 25 bp, Probe sequence
tagaacaagaaagaacaaggtcaac

SEQ ID NO: 53809 - DNA, 25 bp, Probe sequence
ttagaacaagaaagaacaaggtcaa

SEQ ID NO: 53810 - DNA, 25 bp, Probe sequence
tttagaacaagaaagaacaaggtca

SEQ ID NO: 53811 - DNA, 25 bp, Probe sequence
aacaagaaagaacaaggtcaacgag

SEQ ID NO: 53812 - DNA, 25 bp, Probe sequence
gaacaagaaagaacaaggtcaacga

SEQ ID NO: 53813 - DNA, 25 bp, Probe sequence
agaacaagaaagaacaaggtcaacg

SEQ ID NO: 53814 - DNA, 25 bp, Probe sequence
caagaaagaacaaggtcaacgagtc

SEQ ID NO: 53815 - DNA, 25 bp, Probe sequence
aagaacaaggtcaacgagtcagaaa

SEQ ID NO: 53816 - DNA, 25 bp, Probe sequence
aaagaacaaggtcaacgagtcagaa

SEQ ID NO: 53817 - DNA, 25 bp, Probe sequence
gccaacaagtaacagtaacaaacat

SEQ ID NO: 53818 - DNA, 25 bp, Probe sequence
ccaacaagtaacagtaacaaacatt

SEQ ID NO: 53819 - DNA, 25 bp, Probe sequence
cgccaacaagtaacagtaacaaaca

SEQ ID NO: 53820 - DNA, 25 bp, Probe sequence
caacaagtaacagtaacaaacattt

SEQ ID NO: 53821 - DNA, 25 bp, Probe sequence
aacaagtaacagtaacaaacattta

SEQ ID NO: 53822 - DNA, 25 bp, Probe sequence
acaagtaacagtaacaaacatttaa

SEQ ID NO: 53823 - DNA, 25 bp, Probe sequence
caagtaacagtaacaaacatttaag

SEQ ID NO: 53824 - DNA, 25 bp, Probe sequence
agtaacagtaacaaacatttaagaa

SEQ ID NO: 53825 - DNA, 25 bp, Probe sequence
aagtaacagtaacaaacatttaaga

SEQ ID NO: 53826 - DNA, 25 bp, Probe sequence
actacaatttcagacgaatacctaa

SEQ ID NO: 53827 - DNA, 25 bp, Probe sequence
ttactacaatttcagacgaatacct

SEQ ID NO: 53828 - DNA, 25 bp, Probe sequence
tttactacaatttcagacgaatacc

SEQ ID NO: 53829 - DNA, 25 bp, Probe sequence
tactacaatttcagacgaataccta

SEQ ID NO: 53830 - DNA, 25 bp, Probe sequence
ctacaatttcagacgaatacctaat

SEQ ID NO: 53831 - DNA, 25 bp, Probe sequence
aatttatgtaaacgggaacatcgac

SEQ ID NO: 53832 - DNA, 25 bp, Probe sequence
atttatgtaaacgggaacatcgaca

SEQ ID NO: 53833 - DNA, 25 bp, Probe sequence
tacaatttcagacgaatacctaatt

SEQ ID NO: 53834 - DNA, 25 bp, Probe sequence
ttatgtaaacgggaacatcgacaaa

SEQ ID NO: 53835 - DNA, 25 bp, Probe sequence
actaaaggttgtaaggaagaagagg

SEQ ID NO: 53836 - DNA, 25 bp, Probe sequence
ctaaaggttgtaaggaagaagaggg

SEQ ID NO: 53837 - DNA, 25 bp, Probe sequence
aaggttgtaaggaagaagagggata

SEQ ID NO: 53838 - DNA, 25 bp, Probe sequence
taaaggttgtaaggaagaagaggga

SEQ ID NO: 53839 - DNA, 25 bp, Probe sequence
aggttgtaaggaagaagagggatac

SEQ ID NO: 53840 - DNA, 25 bp, Probe sequence
aaaggttgtaaggaagaagagggat

SEQ ID NO: 53841 - DNA, 25 bp, Probe sequence
aactaaaggttgtaaggaagaagag

SEQ ID NO: 53842 - DNA, 25 bp, Probe sequence
gttgtaaggaagaagagggatacat

SEQ ID NO: 53843 - DNA, 25 bp, Probe sequence
ttgtaaggaagaagagggatacatg

SEQ ID NO: 53844 - DNA, 25 bp, Probe sequence
ggaagtgttgtcaataccaagtaag

SEQ ID NO: 53845 - DNA, 25 bp, Probe sequence
gaagtgttgtcaataccaagtaagt

SEQ ID NO: 53846 - DNA, 25 bp, Probe sequence
agtgttgtcaataccaagtaagtaa

SEQ ID NO: 53847 - DNA, 25 bp, Probe sequence
aagtgttgtcaataccaagtaagta

SEQ ID NO: 53848 - DNA, 25 bp, Probe sequence
tgttgtcaataccaagtaagtaaga

SEQ ID NO: 53849 - DNA, 25 bp, Probe sequence
gtgttgtcaataccaagtaagtaag

SEQ ID NO: 53850 - DNA, 25 bp, Probe sequence
gggaagtgttgtcaataccaagtaa

SEQ ID NO: 53851 - DNA, 25 bp, Probe sequence
gttgtcaataccaagtaagtaagat

SEQ ID NO: 53852 - DNA, 25 bp, Probe sequence
tgaagttgggaagtgttgtcaatac

SEQ ID NO: 53853 - DNA, 25 bp, Probe sequence
ctactgatcctgcaatactcttacc

SEQ ID NO: 53854 - DNA, 25 bp, Probe sequence
atacactactgatcctgcaatactc

SEQ ID NO: 53855 - DNA, 25 bp, Probe sequence
ctgatcctgcaatactcttaccatt

SEQ ID NO: 53856 - DNA, 25 bp, Probe sequence
actactgatcctgcaatactcttac

SEQ ID NO: 53857 - DNA, 25 bp, Probe sequence
cactactgatcctgcaatactctta

SEQ ID NO: 53858 - DNA, 25 bp, Probe sequence
tacactactgatcctgcaatactct

SEQ ID NO: 53859 - DNA, 25 bp, Probe sequence
tctacaaatacaagttcaaacggtg

SEQ ID NO: 53860 - DNA, 25 bp, Probe sequence
tgatcctgcaatactcttaccatta

SEQ ID NO: 53861 - DNA, 25 bp, Probe sequence
tactgatcctgcaatactcttacca

SEQ ID NO: 53862 - DNA, 25 bp, Probe sequence
atccacagcacctactactattact

SEQ ID NO: 53863 - DNA, 25 bp, Probe sequence
tccacagcacctactactattacta

SEQ ID NO: 53864 - DNA, 25 bp, Probe sequence
agtcatacacaccatacacaagtta

SEQ ID NO: 53865 - DNA, 25 bp, Probe sequence
aatccacagcacctactactattac

SEQ ID NO: 53866 - DNA, 25 bp, Probe sequence
caatccacagcacctactactatta

SEQ ID NO: 53867 - DNA, 25 bp, Probe sequence
aagtcatacacaccatacacaagtt

SEQ ID NO: 53868 - DNA, 25 bp, Probe sequence
ccacagcacctactactattactaa

SEQ ID NO: 53869 - DNA, 25 bp, Probe sequence
catacacaccatacacaagttatca

SEQ ID NO: 53870 - DNA, 25 bp, Probe sequence
gtcatacacaccatacacaagttat

SEQ ID NO: 53871 - DNA, 25 bp, Probe sequence
agtaatagtagtaggtgctgtggat

SEQ ID NO: 53872 - DNA, 25 bp, Probe sequence
taacttgtgtatggtgtgtatgact

SEQ ID NO: 53873 - DNA, 25 bp, Probe sequence
tagtaatagtagtaggtgctgtgga

SEQ ID NO: 53874 - DNA, 25 bp, Probe sequence
aacttgtgtatggtgtgtatgactt

SEQ ID NO: 53875 - DNA, 25 bp, Probe sequence
taatagtagtaggtgctgtggattg

SEQ ID NO: 53876 - DNA, 25 bp, Probe sequence
gtaatagtagtaggtgctgtggatt

SEQ ID NO: 53877 - DNA, 25 bp, Probe sequence
ttagtaatagtagtaggtgctgtgg

SEQ ID NO: 53878 - DNA, 25 bp, Probe sequence
ataacttgtgtatggtgtgtatgac

SEQ ID NO: 53879 - DNA, 25 bp, Probe sequence
tgataacttgtgtatggtgtgtatg

SEQ ID NO: 53880 - DNA, 25 bp, Probe sequence
agtgtgcttatatgccctttaaatt

SEQ ID NO: 53881 - DNA, 25 bp, Probe sequence
gttgaatattaaagttaaacgccgt

SEQ ID NO: 53882 - DNA, 25 bp, Probe sequence
aagtgtgcttatatgccctttaaat

SEQ ID NO: 53883 - DNA, 25 bp, Probe sequence
agttgaatattaaagttaaacgccg

SEQ ID NO: 53884 - DNA, 25 bp, Probe sequence
ttaaagttaaacgccgttaaatagc

SEQ ID NO: 53885 - DNA, 25 bp, Probe sequence
gtgtgcttatatgccctttaaattt

SEQ ID NO: 53886 - DNA, 25 bp, Probe sequence
ttgaatattaaagttaaacgccgtt

SEQ ID NO: 53887 - DNA, 25 bp, Probe sequence
taaacagcaaataaaagacgccaat

SEQ ID NO: 53888 - DNA, 25 bp, Probe sequence
ttaaacagcaaataaaagacgccaa

SEQ ID NO: 53889 - DNA, 25 bp, Probe sequence
aatttaaagggcatataagcacact

SEQ ID NO: 53890 - DNA, 25 bp, Probe sequence
acggcgtttaactttaatattcaac

SEQ ID NO: 53891 - DNA, 25 bp, Probe sequence
atttaaagggcatataagcacactt

SEQ ID NO: 53892 - DNA, 25 bp, Probe sequence
cggcgtttaactttaatattcaact

SEQ ID NO: 53893 - DNA, 25 bp, Probe sequence
gctatttaacggcgtttaactttaa

SEQ ID NO: 53894 - DNA, 25 bp, Probe sequence
aaatttaaagggcatataagcacac

SEQ ID NO: 53895 - DNA, 25 bp, Probe sequence
aacggcgtttaactttaatattcaa

SEQ ID NO: 53896 - DNA, 25 bp, Probe sequence
attggcgtcttttatttgctgttta

SEQ ID NO: 53897 - DNA, 25 bp, Probe sequence
ttggcgtcttttatttgctgtttaa

SEQ ID NO: 53898 - DNA, 25 bp, Probe sequence
tttatgctagaaagtaatgctgtac

SEQ ID NO: 53899 - DNA, 25 bp, Probe sequence
ttatgctagaaagtaatgctgtact

SEQ ID NO: 53900 - DNA, 25 bp, Probe sequence
atgctagaaagtaatgctgtactat

SEQ ID NO: 53901 - DNA, 25 bp, Probe sequence
tgctagaaagtaatgctgtactata

SEQ ID NO: 53902 - DNA, 25 bp, Probe sequence
tatgctagaaagtaatgctgtacta

SEQ ID NO: 53903 - DNA, 25 bp, Probe sequence
tgctgtactatattcaatgattagt

SEQ ID NO: 53904 - DNA, 25 bp, Probe sequence
agtaatgctgtactatattcaatga

SEQ ID NO: 53905 - DNA, 25 bp, Probe sequence
gctagaaagtaatgctgtactatat

SEQ ID NO: 53906 - DNA, 25 bp, Probe sequence
ttttatgctagaaagtaatgctgta

SEQ ID NO: 53907 - DNA, 25 bp, Probe sequence
gtacagcattactttctagcataaa

SEQ ID NO: 53908 - DNA, 25 bp, Probe sequence
agtacagcattactttctagcataa

SEQ ID NO: 53909 - DNA, 25 bp, Probe sequence
atagtacagcattactttctagcat

SEQ ID NO: 53910 - DNA, 25 bp, Probe sequence
tagtacagcattactttctagcata

SEQ ID NO: 53911 - DNA, 25 bp, Probe sequence
tatagtacagcattactttctagca

SEQ ID NO: 53912 - DNA, 25 bp, Probe sequence
tcattgaatatagtacagcattact

SEQ ID NO: 53913 - DNA, 25 bp, Probe sequence
actaatcattgaatatagtacagca

SEQ ID NO: 53914 - DNA, 25 bp, Probe sequence
atatagtacagcattactttctagc

SEQ ID NO: 53915 - DNA, 25 bp, Probe sequence
tacagcattactttctagcataaaa

SEQ ID NO: 53916 - DNA, 25 bp, Probe sequence
ctacaatagtgctctgataataggt

SEQ ID NO: 53917 - DNA, 25 bp, Probe sequence
acctgtatatgcaattcgtcaatag

SEQ ID NO: 53918 - DNA, 25 bp, Probe sequence
acaatagtgctctgataataggtta

SEQ ID NO: 53919 - DNA, 25 bp, Probe sequence
tacaatagtgctctgataataggtt

SEQ ID NO: 53920 - DNA, 25 bp, Probe sequence
cctgtatatgcaattcgtcaataga

SEQ ID NO: 53921 - DNA, 25 bp, Probe sequence
atacctgtatatgcaattcgtcaat

SEQ ID NO: 53922 - DNA, 25 bp, Probe sequence
ctatacctgtatatgcaattcgtca

SEQ ID NO: 53923 - DNA, 25 bp, Probe sequence
actatacctgtatatgcaattcgtc

SEQ ID NO: 53924 - DNA, 25 bp, Probe sequence
acttcaagaaggatgggttacttaa

SEQ ID NO: 53925 - DNA, 25 bp, Probe sequence
acctattatcagagcactattgtag

SEQ ID NO: 53926 - DNA, 25 bp, Probe sequence
ctattgacgaattgcatatacaggt

SEQ ID NO: 53927 - DNA, 25 bp, Probe sequence
tctattgacgaattgcatatacagg

SEQ ID NO: 53928 - DNA, 25 bp, Probe sequence
aacctattatcagagcactattgta

SEQ ID NO: 53929 - DNA, 25 bp, Probe sequence
taacctattatcagagcactattgt

SEQ ID NO: 53930 - DNA, 25 bp, Probe sequence
attgacgaattgcatatacaggtat

SEQ ID NO: 53931 - DNA, 25 bp, Probe sequence
gacgaattgcatatacaggtatagt

SEQ ID NO: 53932 - DNA, 25 bp, Probe sequence
tgacgaattgcatatacaggtatag

SEQ ID NO: 53933 - DNA, 25 bp, Probe sequence
ttaagtaacccatccttcttgaagt

SEQ ID NO: 53934 - DNA, 25 bp, Probe sequence
gtggttagtgtgaacaagaatcaac

SEQ ID NO: 53935 - DNA, 25 bp, Probe sequence
ggttagtgtgaacaagaatcaacat

SEQ ID NO: 53936 - DNA, 25 bp, Probe sequence
tggttagtgtgaacaagaatcaaca

SEQ ID NO: 53937 - DNA, 25 bp, Probe sequence
tgtggttagtgtgaacaagaatcaa

SEQ ID NO: 53938 - DNA, 25 bp, Probe sequence
acttaataagacattgttcgtagga

SEQ ID NO: 53939 - DNA, 25 bp, Probe sequence
atatcagagagcttgtggttagtgt

SEQ ID NO: 53940 - DNA, 25 bp, Probe sequence
cttaataagacattgttcgtaggac

SEQ ID NO: 53941 - DNA, 25 bp, Probe sequence
ttaataagacattgttcgtaggaca

SEQ ID NO: 53942 - DNA, 25 bp, Probe sequence
atagtgttcgatatcagagagcttg

SEQ ID NO: 53943 - DNA, 25 bp, Probe sequence
gttgattcttgttcacactaaccac

SEQ ID NO: 53944 - DNA, 25 bp, Probe sequence
atgttgattcttgttcacactaacc

SEQ ID NO: 53945 - DNA, 25 bp, Probe sequence
ttgattcttgttcacactaaccaca

SEQ ID NO: 53946 - DNA, 25 bp, Probe sequence
tgttgattcttgttcacactaacca

SEQ ID NO: 53947 - DNA, 25 bp, Probe sequence
tcctacgaacaatgtcttattaagt

SEQ ID NO: 53948 - DNA, 25 bp, Probe sequence
acactaaccacaagctctctgatat

SEQ ID NO: 53949 - DNA, 25 bp, Probe sequence
gtcctacgaacaatgtcttattaag

SEQ ID NO: 53950 - DNA, 25 bp, Probe sequence
tgtcctacgaacaatgtcttattaa

SEQ ID NO: 53951 - DNA, 25 bp, Probe sequence
caagctctctgatatcgaacactat

SEQ ID NO: 53952 - DNA, 25 bp, Probe sequence
ttgatatgaagatgattgaagacgc

SEQ ID NO: 53953 - DNA, 25 bp, Probe sequence
atatgaagatgattgaagacgccag

SEQ ID NO: 53954 - DNA, 25 bp, Probe sequence
gatatgaagatgattgaagacgcca

SEQ ID NO: 53955 - DNA, 25 bp, Probe sequence
tgatatgaagatgattgaagacgcc

SEQ ID NO: 53956 - DNA, 25 bp, Probe sequence
gaagatgattgaagacgccagtatg

SEQ ID NO: 53957 - DNA, 25 bp, Probe sequence
gttgatatgaagatgattgaagacg

SEQ ID NO: 53958 - DNA, 25 bp, Probe sequence
aactggtgtctaatgttattgctta

SEQ ID NO: 53959 - DNA, 25 bp, Probe sequence
tgaagatgattgaagacgccagtat

SEQ ID NO: 53960 - DNA, 25 bp, Probe sequence
atgaagatgattgaagacgccagta

SEQ ID NO: 53961 - DNA, 25 bp, Probe sequence
gcgtcttcaatcatcttcatatcaa

SEQ ID NO: 53962 - DNA, 25 bp, Probe sequence
ggcgtcttcaatcatcttcatatca

SEQ ID NO: 53963 - DNA, 25 bp, Probe sequence
tggcgtcttcaatcatcttcatatc

SEQ ID NO: 53964 - DNA, 25 bp, Probe sequence
ctggcgtcttcaatcatcttcatat

SEQ ID NO: 53965 - DNA, 25 bp, Probe sequence
catactggcgtcttcaatcatcttc

SEQ ID NO: 53966 - DNA, 25 bp, Probe sequence
cgtcttcaatcatcttcatatcaac

SEQ ID NO: 53967 - DNA, 25 bp, Probe sequence
taagcaataacattagacaccagtt

SEQ ID NO: 53968 - DNA, 25 bp, Probe sequence
actggcgtcttcaatcatcttcata

SEQ ID NO: 53969 - DNA, 25 bp, Probe sequence
tactggcgtcttcaatcatcttcat

SEQ ID NO: 53970 - DNA, 25 bp, Probe sequence
tcatcactgaatctcaactaacaca

SEQ ID NO: 53971 - DNA, 25 bp, Probe sequence
catcactgaatctcaactaacacat

SEQ ID NO: 53972 - DNA, 25 bp, Probe sequence
actgaatctcaactaacacataaca

SEQ ID NO: 53973 - DNA, 25 bp, Probe sequence
cactgaatctcaactaacacataac

SEQ ID NO: 53974 - DNA, 25 bp, Probe sequence
tcactgaatctcaactaacacataa

SEQ ID NO: 53975 - DNA, 25 bp, Probe sequence
atcactgaatctcaactaacacata

SEQ ID NO: 53976 - DNA, 25 bp, Probe sequence
tggctaacgtatgacaatgataaca

SEQ ID NO: 53977 - DNA, 25 bp, Probe sequence
ggctaacgtatgacaatgataacaa

SEQ ID NO: 53978 - DNA, 25 bp, Probe sequence
tctatggtatgactgggaatcgtat

SEQ ID NO: 53979 - DNA, 25 bp, Probe sequence
tgtgttagttgagattcagtgatga

SEQ ID NO: 53980 - DNA, 25 bp, Probe sequence
atgtgttagttgagattcagtgatg

SEQ ID NO: 53981 - DNA, 25 bp, Probe sequence
tgttatgtgttagttgagattcagt

SEQ ID NO: 53982 - DNA, 25 bp, Probe sequence
gttatgtgttagttgagattcagtg

SEQ ID NO: 53983 - DNA, 25 bp, Probe sequence
ttatgtgttagttgagattcagtga

SEQ ID NO: 53984 - DNA, 25 bp, Probe sequence
tatgtgttagttgagattcagtgat

SEQ ID NO: 53985 - DNA, 25 bp, Probe sequence
tgttatcattgtcatacgttagcca

SEQ ID NO: 53986 - DNA, 25 bp, Probe sequence
ttgttatcattgtcatacgttagcc

SEQ ID NO: 53987 - DNA, 25 bp, Probe sequence
atacgattcccagtcataccataga

SEQ ID NO: 53988 - DNA, 25 bp, Probe sequence
gcttgattgctatgtagtgggatta

SEQ ID NO: 53989 - DNA, 25 bp, Probe sequence
cttgattgctatgtagtgggattaa

SEQ ID NO: 53990 - DNA, 25 bp, Probe sequence
ttgattgctatgtagtgggattaaa

SEQ ID NO: 53991 - DNA, 25 bp, Probe sequence
agagtacatgagagtggaaatgaat

SEQ ID NO: 53992 - DNA, 25 bp, Probe sequence
tgattgctatgtagtgggattaaat

SEQ ID NO: 53993 - DNA, 25 bp, Probe sequence
ctagagtacatgagagtggaaatga

SEQ ID NO: 53994 - DNA, 25 bp, Probe sequence
agtacatgagagtggaaatgaattg

SEQ ID NO: 53995 - DNA, 25 bp, Probe sequence
acatctagagtacatgagagtggaa

SEQ ID NO: 53996 - DNA, 25 bp, Probe sequence
tagagtacatgagagtggaaatgaa

SEQ ID NO: 53997 - DNA, 25 bp, Probe sequence
taatcccactacatagcaatcaagc

SEQ ID NO: 53998 - DNA, 25 bp, Probe sequence
ttaatcccactacatagcaatcaag

SEQ ID NO: 53999 - DNA, 25 bp, Probe sequence
tttaatcccactacatagcaatcaa

SEQ ID NO: 54000 - DNA, 25 bp, Probe sequence
attcatttccactctcatgtactct

SEQ ID NO: 54001 - DNA, 25 bp, Probe sequence
atttaatcccactacatagcaatca

SEQ ID NO: 54002 - DNA, 25 bp, Probe sequence
tcatttccactctcatgtactctag

SEQ ID NO: 54003 - DNA, 25 bp, Probe sequence
ttccactctcatgtactctagatgt

SEQ ID NO: 54004 - DNA, 25 bp, Probe sequence
caattcatttccactctcatgtact

SEQ ID NO: 54005 - DNA, 25 bp, Probe sequence
ccactctcatgtactctagatgtct

SEQ ID NO: 54006 - DNA, 25 bp, Probe sequence
ttttattttgttctgaacgggttga

SEQ ID NO: 54007 - DNA, 25 bp, Probe sequence
tttattttgttctgaacgggttgat

SEQ ID NO: 54008 - DNA, 25 bp, Probe sequence
ttattttgttctgaacgggttgata

SEQ ID NO: 54009 - DNA, 25 bp, Probe sequence
attttgttctgaacgggttgatata

SEQ ID NO: 54010 - DNA, 25 bp, Probe sequence
tattttgttctgaacgggttgatat

SEQ ID NO: 54011 - DNA, 25 bp, Probe sequence
ttccgtacaataatcattaagatga

SEQ ID NO: 54012 - DNA, 25 bp, Probe sequence
tttccgtacaataatcattaagatg

SEQ ID NO: 54013 - DNA, 25 bp, Probe sequence
cattaagatgataaaattgtacggt

SEQ ID NO: 54014 - DNA, 25 bp, Probe sequence
tccgtacaataatcattaagatgat

SEQ ID NO: 54015 - DNA, 25 bp, Probe sequence
tcaacccgttcagaacaaaataaaa

SEQ ID NO: 54016 - DNA, 25 bp, Probe sequence
atcaacccgttcagaacaaaataaa

SEQ ID NO: 54017 - DNA, 25 bp, Probe sequence
tatcaacccgttcagaacaaaataa

SEQ ID NO: 54018 - DNA, 25 bp, Probe sequence
atatcaacccgttcagaacaaaata

SEQ ID NO: 54019 - DNA, 25 bp, Probe sequence
tatatcaacccgttcagaacaaaat

SEQ ID NO: 54020 - DNA, 25 bp, Probe sequence
tcatcttaatgattattgtacggaa

SEQ ID NO: 54021 - DNA, 25 bp, Probe sequence
catcttaatgattattgtacggaaa

SEQ ID NO: 54022 - DNA, 25 bp, Probe sequence
accgtacaattttatcatcttaatg

SEQ ID NO: 54023 - DNA, 25 bp, Probe sequence
atcatcttaatgattattgtacgga

SEQ ID NO: 54024 - DNA, 25 bp, Probe sequence
gcattatggtctcgatattggtaga

SEQ ID NO: 54025 - DNA, 25 bp, Probe sequence
ttgcattatggtctcgatattggta

SEQ ID NO: 54026 - DNA, 25 bp, Probe sequence
tgcattatggtctcgatattggtag

SEQ ID NO: 54027 - DNA, 25 bp, Probe sequence
cattatggtctcgatattggtagaa

SEQ ID NO: 54028 - DNA, 25 bp, Probe sequence
attatggtctcgatattggtagaat

SEQ ID NO: 54029 - DNA, 25 bp, Probe sequence
atttgcattatggtctcgatattgg

SEQ ID NO: 54030 - DNA, 25 bp, Probe sequence
tttgcattatggtctcgatattggt

SEQ ID NO: 54031 - DNA, 25 bp, Probe sequence
ttatggtctcgatattggtagaata

SEQ ID NO: 54032 - DNA, 25 bp, Probe sequence
tatttgcattatggtctcgatattg

SEQ ID NO: 54033 - DNA, 25 bp, Probe sequence
tctaccaatatcgagaccataatgc

SEQ ID NO: 54034 - DNA, 25 bp, Probe sequence
taccaatatcgagaccataatgcaa

SEQ ID NO: 54035 - DNA, 25 bp, Probe sequence
ctaccaatatcgagaccataatgca

SEQ ID NO: 54036 - DNA, 25 bp, Probe sequence
ttctaccaatatcgagaccataatg

SEQ ID NO: 54037 - DNA, 25 bp, Probe sequence
attctaccaatatcgagaccataat

SEQ ID NO: 54038 - DNA, 25 bp, Probe sequence
ccaatatcgagaccataatgcaaat

SEQ ID NO: 54039 - DNA, 25 bp, Probe sequence
accaatatcgagaccataatgcaaa

SEQ ID NO: 54040 - DNA, 25 bp, Probe sequence
tattctaccaatatcgagaccataa

SEQ ID NO: 54041 - DNA, 25 bp, Probe sequence
caatatcgagaccataatgcaaata

SEQ ID NO: 54042 - DNA, 25 bp, Probe sequence
ttggctgtgctataatctatcttgt

SEQ ID NO: 54043 - DNA, 25 bp, Probe sequence
tggctgtgctataatctatcttgtg

SEQ ID NO: 54044 - DNA, 25 bp, Probe sequence
gctgtgctataatctatcttgtgct

SEQ ID NO: 54045 - DNA, 25 bp, Probe sequence
ctgtgctataatctatcttgtgctt

SEQ ID NO: 54046 - DNA, 25 bp, Probe sequence
attggctgtgctataatctatcttg

SEQ ID NO: 54047 - DNA, 25 bp, Probe sequence
ggctgtgctataatctatcttgtgc

SEQ ID NO: 54048 - DNA, 25 bp, Probe sequence
tgtgctataatctatcttgtgctta

SEQ ID NO: 54049 - DNA, 25 bp, Probe sequence
cttctatctttattggtaggaggct

SEQ ID NO: 54050 - DNA, 25 bp, Probe sequence
tctatctttattggtaggaggcttt

SEQ ID NO: 54051 - DNA, 25 bp, Probe sequence
acaagatagattatagcacagccaa

SEQ ID NO: 54052 - DNA, 25 bp, Probe sequence
cacaagatagattatagcacagcca

SEQ ID NO: 54053 - DNA, 25 bp, Probe sequence
agcacaagatagattatagcacagc

SEQ ID NO: 54054 - DNA, 25 bp, Probe sequence
caagatagattatagcacagccaat

SEQ ID NO: 54055 - DNA, 25 bp, Probe sequence
aagcacaagatagattatagcacag

SEQ ID NO: 54056 - DNA, 25 bp, Probe sequence
gcacaagatagattatagcacagcc

SEQ ID NO: 54057 - DNA, 25 bp, Probe sequence
taagcacaagatagattatagcaca

SEQ ID NO: 54058 - DNA, 25 bp, Probe sequence
agcctcctaccaataaagatagaag

SEQ ID NO: 54059 - DNA, 25 bp, Probe sequence
aagcctcctaccaataaagatagaa

SEQ ID NO: 54060 - DNA, 25 bp, Probe sequence
ggaatagagacctcatcattgtgtt

SEQ ID NO: 54061 - DNA, 25 bp, Probe sequence
ttggaatagagacctcatcattgtg

SEQ ID NO: 54062 - DNA, 25 bp, Probe sequence
attggaatagagacctcatcattgt

SEQ ID NO: 54063 - DNA, 25 bp, Probe sequence
ccaccaatcctccataacatcaatt

SEQ ID NO: 54064 - DNA, 25 bp, Probe sequence
tggaatagagacctcatcattgtgt

SEQ ID NO: 54065 - DNA, 25 bp, Probe sequence
aatatcattatcataatccgccgtg

SEQ ID NO: 54066 - DNA, 25 bp, Probe sequence
atatcattatcataatccgccgtga

SEQ ID NO: 54067 - DNA, 25 bp, Probe sequence
tatcattatcataatccgccgtgag

SEQ ID NO: 54068 - DNA, 25 bp, Probe sequence
cctcaagtaacttagtggttggata

SEQ ID NO: 54069 - DNA, 25 bp, Probe sequence
cacaatgatgaggtctctattccaa

SEQ ID NO: 54070 - DNA, 25 bp, Probe sequence
aacacaatgatgaggtctctattcc

SEQ ID NO: 54071 - DNA, 25 bp, Probe sequence
acaatgatgaggtctctattccaat

SEQ ID NO: 54072 - DNA, 25 bp, Probe sequence
aattgatgttatggaggattggtgg

SEQ ID NO: 54073 - DNA, 25 bp, Probe sequence
acacaatgatgaggtctctattcca

SEQ ID NO: 54074 - DNA, 25 bp, Probe sequence
cacggcggattatgataatgatatt

SEQ ID NO: 54075 - DNA, 25 bp, Probe sequence
tcacggcggattatgataatgatat

SEQ ID NO: 54076 - DNA, 25 bp, Probe sequence
ctcacggcggattatgataatgata

SEQ ID NO: 54077 - DNA, 25 bp, Probe sequence
tatccaaccactaagttacttgagg

SEQ ID NO: 54078 - DNA, 25 bp, Probe sequence
tgaatcgtaataagctagtattgca

SEQ ID NO: 54079 - DNA, 25 bp, Probe sequence
atgaatcgtaataagctagtattgc

SEQ ID NO: 54080 - DNA, 25 bp, Probe sequence
cggtcgatgaactaaagttacataa

SEQ ID NO: 54081 - DNA, 25 bp, Probe sequence
tggatgacatttctgcgtctctaat

SEQ ID NO: 54082 - DNA, 25 bp, Probe sequence
atggatgacatttctgcgtctctaa

SEQ ID NO: 54083 - DNA, 25 bp, Probe sequence
gagattgactgtttaaagagaaagg

SEQ ID NO: 54084 - DNA, 25 bp, Probe sequence
tattgcagtcatatagagagattga

SEQ ID NO: 54085 - DNA, 25 bp, Probe sequence
agagagattgactgtttaaagagaa

SEQ ID NO: 54086 - DNA, 25 bp, Probe sequence
ggatgacatttctgcgtctctaatg

SEQ ID NO: 54087 - DNA, 25 bp, Probe sequence
tgcaatactagcttattacgattca

SEQ ID NO: 54088 - DNA, 25 bp, Probe sequence
gcaatactagcttattacgattcat

SEQ ID NO: 54089 - DNA, 25 bp, Probe sequence
ttatgtaactttagttcatcgaccg

SEQ ID NO: 54090 - DNA, 25 bp, Probe sequence
ttagagacgcagaaatgtcatccat

SEQ ID NO: 54091 - DNA, 25 bp, Probe sequence
attagagacgcagaaatgtcatcca

SEQ ID NO: 54092 - DNA, 25 bp, Probe sequence
cctttctctttaaacagtcaatctc

SEQ ID NO: 54093 - DNA, 25 bp, Probe sequence
tcaatctctctatatgactgcaata

SEQ ID NO: 54094 - DNA, 25 bp, Probe sequence
ttctctttaaacagtcaatctctct

SEQ ID NO: 54095 - DNA, 25 bp, Probe sequence
cattagagacgcagaaatgtcatcc

SEQ ID NO: 54096 - DNA, 25 bp, Probe sequence
gctgttgttggaattaaggttctat

SEQ ID NO: 54097 - DNA, 25 bp, Probe sequence
ggctgttgttggaattaaggttcta

SEQ ID NO: 54098 - DNA, 25 bp, Probe sequence
aatggctgttgttggaattaaggtt

SEQ ID NO: 54099 - DNA, 25 bp, Probe sequence
atggctgttgttggaattaaggttc

SEQ ID NO: 54100 - DNA, 25 bp, Probe sequence
ctgttgttggaattaaggttctatt

SEQ ID NO: 54101 - DNA, 25 bp, Probe sequence
tttatgttattggtgggaaatggct

SEQ ID NO: 54102 - DNA, 25 bp, Probe sequence
tggctgttgttggaattaaggttct

SEQ ID NO: 54103 - DNA, 25 bp, Probe sequence
gaaatggctgttgttggaattaagg

SEQ ID NO: 54104 - DNA, 25 bp, Probe sequence
ggaaatggctgttgttggaattaag

SEQ ID NO: 54105 - DNA, 25 bp, Probe sequence
atagaaccttaattccaacaacagc

SEQ ID NO: 54106 - DNA, 25 bp, Probe sequence
tagaaccttaattccaacaacagcc

SEQ ID NO: 54107 - DNA, 25 bp, Probe sequence
aaccttaattccaacaacagccatt

SEQ ID NO: 54108 - DNA, 25 bp, Probe sequence
gaaccttaattccaacaacagccat

SEQ ID NO: 54109 - DNA, 25 bp, Probe sequence
aatagaaccttaattccaacaacag

SEQ ID NO: 54110 - DNA, 25 bp, Probe sequence
agccatttcccaccaataacataaa

SEQ ID NO: 54111 - DNA, 25 bp, Probe sequence
agaaccttaattccaacaacagcca

SEQ ID NO: 54112 - DNA, 25 bp, Probe sequence
cttaattccaacaacagccatttcc

SEQ ID NO: 54113 - DNA, 25 bp, Probe sequence
ccttaattccaacaacagccatttc

SEQ ID NO: 54114 - DNA, 25 bp, Probe sequence
ggataagtaataagacatcaaggtg

SEQ ID NO: 54115 - DNA, 25 bp, Probe sequence
taagacatcaaggtgtttatccaca

SEQ ID NO: 54116 - DNA, 25 bp, Probe sequence
gggataagtaataagacatcaaggt

SEQ ID NO: 54117 - DNA, 25 bp, Probe sequence
atcaaggtgtttatccacagaaatg

SEQ ID NO: 54118 - DNA, 25 bp, Probe sequence
catcaaggtgtttatccacagaaat

SEQ ID NO: 54119 - DNA, 25 bp, Probe sequence
acatcaaggtgtttatccacagaaa

SEQ ID NO: 54120 - DNA, 25 bp, Probe sequence
gacatcaaggtgtttatccacagaa

SEQ ID NO: 54121 - DNA, 25 bp, Probe sequence
aagacatcaaggtgtttatccacag

SEQ ID NO: 54122 - DNA, 25 bp, Probe sequence
ataagacatcaaggtgtttatccac

SEQ ID NO: 54123 - DNA, 25 bp, Probe sequence
caccttgatgtcttattacttatcc

SEQ ID NO: 54124 - DNA, 25 bp, Probe sequence
tgtggataaacaccttgatgtctta

SEQ ID NO: 54125 - DNA, 25 bp, Probe sequence
accttgatgtcttattacttatccc

SEQ ID NO: 54126 - DNA, 25 bp, Probe sequence
atttctgtggataaacaccttgatg

SEQ ID NO: 54127 - DNA, 25 bp, Probe sequence
catttctgtggataaacaccttgat

SEQ ID NO: 54128 - DNA, 25 bp, Probe sequence
tttctgtggataaacaccttgatgt

SEQ ID NO: 54129 - DNA, 25 bp, Probe sequence
ctgtggataaacaccttgatgtctt

SEQ ID NO: 54130 - DNA, 25 bp, Probe sequence
ttctgtggataaacaccttgatgtc

SEQ ID NO: 54131 - DNA, 25 bp, Probe sequence
gtggataaacaccttgatgtcttat

SEQ ID NO: 54132 - DNA, 25 bp, Probe sequence
aggtttatgtgaattgctgttatgt

SEQ ID NO: 54133 - DNA, 25 bp, Probe sequence
tgaggtttatgtgaattgctgttat

SEQ ID NO: 54134 - DNA, 25 bp, Probe sequence
atgaggtttatgtgaattgctgtta

SEQ ID NO: 54135 - DNA, 25 bp, Probe sequence
tatgaggtttatgtgaattgctgtt

SEQ ID NO: 54136 - DNA, 25 bp, Probe sequence
gaggtttatgtgaattgctgttatg

SEQ ID NO: 54137 - DNA, 25 bp, Probe sequence
atatgaggtttatgtgaattgctgt

SEQ ID NO: 54138 - DNA, 25 bp, Probe sequence
tccgcagtctttcatttcaagtaaa

SEQ ID NO: 54139 - DNA, 25 bp, Probe sequence
ggtttatgtgaattgctgttatgtt

SEQ ID NO: 54140 - DNA, 25 bp, Probe sequence
ctccgcagtctttcatttcaagtaa

SEQ ID NO: 54141 - DNA, 25 bp, Probe sequence
acataacagcaattcacataaacct

SEQ ID NO: 54142 - DNA, 25 bp, Probe sequence
aacagcaattcacataaacctcata

SEQ ID NO: 54143 - DNA, 25 bp, Probe sequence
taacagcaattcacataaacctcat

SEQ ID NO: 54144 - DNA, 25 bp, Probe sequence
ataacagcaattcacataaacctca

SEQ ID NO: 54145 - DNA, 25 bp, Probe sequence
acagcaattcacataaacctcatat

SEQ ID NO: 54146 - DNA, 25 bp, Probe sequence
cataacagcaattcacataaacctc

SEQ ID NO: 54147 - DNA, 25 bp, Probe sequence
tttacttgaaatgaaagactgcgga

SEQ ID NO: 54148 - DNA, 25 bp, Probe sequence
aacataacagcaattcacataaacc

SEQ ID NO: 54149 - DNA, 25 bp, Probe sequence
ttacttgaaatgaaagactgcggag

SEQ ID NO: 54150 - DNA, 25 bp, Probe sequence
ccacagtctgaaacaagattcctat

SEQ ID NO: 54151 - DNA, 25 bp, Probe sequence
tccacagtctgaaacaagattccta

SEQ ID NO: 54152 - DNA, 25 bp, Probe sequence
cacagtctgaaacaagattcctata

SEQ ID NO: 54153 - DNA, 25 bp, Probe sequence
tggtgataaagagcagataagataa

SEQ ID NO: 54154 - DNA, 25 bp, Probe sequence
acagtctgaaacaagattcctatat

SEQ ID NO: 54155 - DNA, 25 bp, Probe sequence
atggtgataaagagcagataagata

SEQ ID NO: 54156 - DNA, 25 bp, Probe sequence
tatggtgataaagagcagataagat

SEQ ID NO: 54157 - DNA, 25 bp, Probe sequence
ttatggtgataaagagcagataaga

SEQ ID NO: 54158 - DNA, 25 bp, Probe sequence
gtccacagtctgaaacaagattcct

SEQ ID NO: 54159 - DNA, 25 bp, Probe sequence
ataggaatcttgtttcagactgtgg

SEQ ID NO: 54160 - DNA, 25 bp, Probe sequence
taggaatcttgtttcagactgtgga

SEQ ID NO: 54161 - DNA, 25 bp, Probe sequence
tataggaatcttgtttcagactgtg

SEQ ID NO: 54162 - DNA, 25 bp, Probe sequence
ttatcttatctgctctttatcacca

SEQ ID NO: 54163 - DNA, 25 bp, Probe sequence
atataggaatcttgtttcagactgt

SEQ ID NO: 54164 - DNA, 25 bp, Probe sequence
atcttatctgctctttatcaccata

SEQ ID NO: 54165 - DNA, 25 bp, Probe sequence
tatcttatctgctctttatcaccat

SEQ ID NO: 54166 - DNA, 25 bp, Probe sequence
tcttatctgctctttatcaccataa

SEQ ID NO: 54167 - DNA, 25 bp, Probe sequence
aggaatcttgtttcagactgtggac

SEQ ID NO: 54168 - DNA, 25 bp, Probe sequence
tagtctatcaaaagaaaggggttgg

SEQ ID NO: 54169 - DNA, 25 bp, Probe sequence
ttagtctatcaaaagaaaggggttg

SEQ ID NO: 54170 - DNA, 25 bp, Probe sequence
attagtctatcaaaagaaaggggtt

SEQ ID NO: 54171 - DNA, 25 bp, Probe sequence
aattagtctatcaaaagaaaggggt

SEQ ID NO: 54172 - DNA, 25 bp, Probe sequence
ctatcaaaagaaaggggttgggact

SEQ ID NO: 54173 - DNA, 25 bp, Probe sequence
tctatcaaaagaaaggggttgggac

SEQ ID NO: 54174 - DNA, 25 bp, Probe sequence
gtctatcaaaagaaaggggttggga

SEQ ID NO: 54175 - DNA, 25 bp, Probe sequence
agtctatcaaaagaaaggggttggg

SEQ ID NO: 54176 - DNA, 25 bp, Probe sequence
tatcaaaagaaaggggttgggactg

SEQ ID NO: 54177 - DNA, 25 bp, Probe sequence
ccaacccctttcttttgatagacta

SEQ ID NO: 54178 - DNA, 25 bp, Probe sequence
caacccctttcttttgatagactaa

SEQ ID NO: 54179 - DNA, 25 bp, Probe sequence
aacccctttcttttgatagactaat

SEQ ID NO: 54180 - DNA, 25 bp, Probe sequence
acccctttcttttgatagactaatt

SEQ ID NO: 54181 - DNA, 25 bp, Probe sequence
cccaacccctttcttttgatagact

SEQ ID NO: 54182 - DNA, 25 bp, Probe sequence
tcccaacccctttcttttgatagac

SEQ ID NO: 54183 - DNA, 25 bp, Probe sequence
gtcccaacccctttcttttgataga

SEQ ID NO: 54184 - DNA, 25 bp, Probe sequence
agtcccaacccctttcttttgatag

SEQ ID NO: 54185 - DNA, 25 bp, Probe sequence
cagtcccaacccctttcttttgata

SEQ ID NO: 54186 - DNA, 25 bp, Probe sequence
gcaacagaaccatctaatcttcaac

SEQ ID NO: 54187 - DNA, 25 bp, Probe sequence
caacagaaccatctaatcttcaaca

SEQ ID NO: 54188 - DNA, 25 bp, Probe sequence
aacagaaccatctaatcttcaacaa

SEQ ID NO: 54189 - DNA, 25 bp, Probe sequence
tgcaacagaaccatctaatcttcaa

SEQ ID NO: 54190 - DNA, 25 bp, Probe sequence
acagaaccatctaatcttcaacaaa

SEQ ID NO: 54191 - DNA, 25 bp, Probe sequence
gaaccatctaatcttcaacaaactg

SEQ ID NO: 54192 - DNA, 25 bp, Probe sequence
agaaccatctaatcttcaacaaact

SEQ ID NO: 54193 - DNA, 25 bp, Probe sequence
cagaaccatctaatcttcaacaaac

SEQ ID NO: 54194 - DNA, 25 bp, Probe sequence
aaccatctaatcttcaacaaactgg

SEQ ID NO: 54195 - DNA, 25 bp, Probe sequence
gttgaagattagatggttctgttgc

SEQ ID NO: 54196 - DNA, 25 bp, Probe sequence
tgttgaagattagatggttctgttg

SEQ ID NO: 54197 - DNA, 25 bp, Probe sequence
ttgttgaagattagatggttctgtt

SEQ ID NO: 54198 - DNA, 25 bp, Probe sequence
ttgaagattagatggttctgttgca

SEQ ID NO: 54199 - DNA, 25 bp, Probe sequence
tttgttgaagattagatggttctgt

SEQ ID NO: 54200 - DNA, 25 bp, Probe sequence
cagtttgttgaagattagatggttc

SEQ ID NO: 54201 - DNA, 25 bp, Probe sequence
gtttgttgaagattagatggttctg

SEQ ID NO: 54202 - DNA, 25 bp, Probe sequence
agtttgttgaagattagatggttct

SEQ ID NO: 54203 - DNA, 25 bp, Probe sequence
ccagtttgttgaagattagatggtt

SEQ ID NO: 54204 - DNA, 25 bp, Probe sequence
cgcacctttcagcaactaaaataaa

SEQ ID NO: 54205 - DNA, 25 bp, Probe sequence
gcacctttcagcaactaaaataaaa

SEQ ID NO: 54206 - DNA, 25 bp, Probe sequence
acgcacctttcagcaactaaaataa

SEQ ID NO: 54207 - DNA, 25 bp, Probe sequence
aacgcacctttcagcaactaaaata

SEQ ID NO: 54208 - DNA, 25 bp, Probe sequence
tcaagataagaaagaacaagttcaa

SEQ ID NO: 54209 - DNA, 25 bp, Probe sequence
ttcaacgcacctttcagcaactaaa

SEQ ID NO: 54210 - DNA, 25 bp, Probe sequence
agaaagaacaagttcaaaaccatca

SEQ ID NO: 54211 - DNA, 25 bp, Probe sequence
atcaagataagaaagaacaagttca

SEQ ID NO: 54212 - DNA, 25 bp, Probe sequence
gaaagaacaagttcaaaaccatcaa

SEQ ID NO: 54213 - DNA, 25 bp, Probe sequence
tttattttagttgctgaaaggtgcg

SEQ ID NO: 54214 - DNA, 25 bp, Probe sequence
ttttattttagttgctgaaaggtgc

SEQ ID NO: 54215 - DNA, 25 bp, Probe sequence
tattttagttgctgaaaggtgcgtt

SEQ ID NO: 54216 - DNA, 25 bp, Probe sequence
ttattttagttgctgaaaggtgcgt

SEQ ID NO: 54217 - DNA, 25 bp, Probe sequence
ttgaacttgttctttcttatcttga

SEQ ID NO: 54218 - DNA, 25 bp, Probe sequence
tttagttgctgaaaggtgcgttgaa

SEQ ID NO: 54219 - DNA, 25 bp, Probe sequence
tgaacttgttctttcttatcttgat

SEQ ID NO: 54220 - DNA, 25 bp, Probe sequence
tgatggttttgaacttgttctttct

SEQ ID NO: 54221 - DNA, 25 bp, Probe sequence
ttgatggttttgaacttgttctttc

SEQ ID NO: 54222 - DNA, 25 bp, Probe sequence
taagcacaccctttattccgttaat

SEQ ID NO: 54223 - DNA, 25 bp, Probe sequence
tttaagcacaccctttattccgtta

SEQ ID NO: 54224 - DNA, 25 bp, Probe sequence
ttaagcacaccctttattccgttaa

SEQ ID NO: 54225 - DNA, 25 bp, Probe sequence
atttaagcacaccctttattccgtt

SEQ ID NO: 54226 - DNA, 25 bp, Probe sequence
gatttaagcacaccctttattccgt

SEQ ID NO: 54227 - DNA, 25 bp, Probe sequence
aagcacaccctttattccgttaatg

SEQ ID NO: 54228 - DNA, 25 bp, Probe sequence
ccgatttaagcacaccctttattcc

SEQ ID NO: 54229 - DNA, 25 bp, Probe sequence
cccgatttaagcacaccctttattc

SEQ ID NO: 54230 - DNA, 25 bp, Probe sequence
acgtaaccaacatgattaacaatta

SEQ ID NO: 54231 - DNA, 25 bp, Probe sequence
attaacggaataaagggtgtgctta

SEQ ID NO: 54232 - DNA, 25 bp, Probe sequence
taacggaataaagggtgtgcttaaa

SEQ ID NO: 54233 - DNA, 25 bp, Probe sequence
ttaacggaataaagggtgtgcttaa

SEQ ID NO: 54234 - DNA, 25 bp, Probe sequence
aacggaataaagggtgtgcttaaat

SEQ ID NO: 54235 - DNA, 25 bp, Probe sequence
acggaataaagggtgtgcttaaatc

SEQ ID NO: 54236 - DNA, 25 bp, Probe sequence
cattaacggaataaagggtgtgctt

SEQ ID NO: 54237 - DNA, 25 bp, Probe sequence
gaataaagggtgtgcttaaatcggg

SEQ ID NO: 54238 - DNA, 25 bp, Probe sequence
ggaataaagggtgtgcttaaatcgg

SEQ ID NO: 54239 - DNA, 25 bp, Probe sequence
taattgttaatcatgttggttacgt

SEQ ID NO: 54240 - DNA, 25 bp, Probe sequence
taataactcgtcttcctaagcatcc

SEQ ID NO: 54241 - DNA, 25 bp, Probe sequence
ttatagcatctaatcggttctgttg

SEQ ID NO: 54242 - DNA, 25 bp, Probe sequence
aataactcgtcttcctaagcatcct

SEQ ID NO: 54243 - DNA, 25 bp, Probe sequence
ttaataactcgtcttcctaagcatc

SEQ ID NO: 54244 - DNA, 25 bp, Probe sequence
ataactcgtcttcctaagcatcctc

SEQ ID NO: 54245 - DNA, 25 bp, Probe sequence
attatagcatctaatcggttctgtt

SEQ ID NO: 54246 - DNA, 25 bp, Probe sequence
aattatagcatctaatcggttctgt

SEQ ID NO: 54247 - DNA, 25 bp, Probe sequence
acaattatagcatctaatcggttct

SEQ ID NO: 54248 - DNA, 25 bp, Probe sequence
caattatagcatctaatcggttctg

SEQ ID NO: 54249 - DNA, 25 bp, Probe sequence
ggatgcttaggaagacgagttatta

SEQ ID NO: 54250 - DNA, 25 bp, Probe sequence
caacagaaccgattagatgctataa

SEQ ID NO: 54251 - DNA, 25 bp, Probe sequence
aggatgcttaggaagacgagttatt

SEQ ID NO: 54252 - DNA, 25 bp, Probe sequence
gatgcttaggaagacgagttattaa

SEQ ID NO: 54253 - DNA, 25 bp, Probe sequence
gaggatgcttaggaagacgagttat

SEQ ID NO: 54254 - DNA, 25 bp, Probe sequence
aacagaaccgattagatgctataat

SEQ ID NO: 54255 - DNA, 25 bp, Probe sequence
agaaccgattagatgctataattgt

SEQ ID NO: 54256 - DNA, 25 bp, Probe sequence
acagaaccgattagatgctataatt

SEQ ID NO: 54257 - DNA, 25 bp, Probe sequence
cagaaccgattagatgctataattg

SEQ ID NO: 54258 - DNA, 25 bp, Probe sequence
gcaacagaaccgtattatggaatag

SEQ ID NO: 54259 - DNA, 25 bp, Probe sequence
ccgtattatggaatagagatgttgg

SEQ ID NO: 54260 - DNA, 25 bp, Probe sequence
acagaaccgtattatggaatagaga

SEQ ID NO: 54261 - DNA, 25 bp, Probe sequence
caacagaaccgtattatggaataga

SEQ ID NO: 54262 - DNA, 25 bp, Probe sequence
cgtattatggaatagagatgttggt

SEQ ID NO: 54263 - DNA, 25 bp, Probe sequence
accgtattatggaatagagatgttg

SEQ ID NO: 54264 - DNA, 25 bp, Probe sequence
aacagaaccgtattatggaatagag

SEQ ID NO: 54265 - DNA, 25 bp, Probe sequence
gaaccgtattatggaatagagatgt

SEQ ID NO: 54266 - DNA, 25 bp, Probe sequence
agaaccgtattatggaatagagatg

SEQ ID NO: 54267 - DNA, 25 bp, Probe sequence
ctattccataatacggttctgttgc

SEQ ID NO: 54268 - DNA, 25 bp, Probe sequence
ccaacatctctattccataatacgg

SEQ ID NO: 54269 - DNA, 25 bp, Probe sequence
tctctattccataatacggttctgt

SEQ ID NO: 54270 - DNA, 25 bp, Probe sequence
tctattccataatacggttctgttg

SEQ ID NO: 54271 - DNA, 25 bp, Probe sequence
caacatctctattccataatacggt

SEQ ID NO: 54272 - DNA, 25 bp, Probe sequence
accaacatctctattccataatacg

SEQ ID NO: 54273 - DNA, 25 bp, Probe sequence
ctctattccataatacggttctgtt

SEQ ID NO: 54274 - DNA, 25 bp, Probe sequence
acatctctattccataatacggttc

SEQ ID NO: 54275 - DNA, 25 bp, Probe sequence
atctctattccataatacggttctg

SEQ ID NO: 54276 - DNA, 25 bp, Probe sequence
gatgagcttgggacataaatcctaa

SEQ ID NO: 54277 - DNA, 25 bp, Probe sequence
atgagcttgggacataaatcctaac

SEQ ID NO: 54278 - DNA, 25 bp, Probe sequence
tgggacataaatcctaactcgaaat

SEQ ID NO: 54279 - DNA, 25 bp, Probe sequence
ttgggacataaatcctaactcgaaa

SEQ ID NO: 54280 - DNA, 25 bp, Probe sequence
cttgggacataaatcctaactcgaa

SEQ ID NO: 54281 - DNA, 25 bp, Probe sequence
gagcttgggacataaatcctaactc

SEQ ID NO: 54282 - DNA, 25 bp, Probe sequence
tgatgagcttgggacataaatccta

SEQ ID NO: 54283 - DNA, 25 bp, Probe sequence
tgagcttgggacataaatcctaact

SEQ ID NO: 54284 - DNA, 25 bp, Probe sequence
cttgatgagcttgggacataaatcc

SEQ ID NO: 54285 - DNA, 25 bp, Probe sequence
ttaggatttatgtcccaagctcatc

SEQ ID NO: 54286 - DNA, 25 bp, Probe sequence
gttaggatttatgtcccaagctcat

SEQ ID NO: 54287 - DNA, 25 bp, Probe sequence
ttcgagttaggatttatgtcccaag

SEQ ID NO: 54288 - DNA, 25 bp, Probe sequence
tttcgagttaggatttatgtcccaa

SEQ ID NO: 54289 - DNA, 25 bp, Probe sequence
atttcgagttaggatttatgtccca

SEQ ID NO: 54290 - DNA, 25 bp, Probe sequence
gagttaggatttatgtcccaagctc

SEQ ID NO: 54291 - DNA, 25 bp, Probe sequence
taggatttatgtcccaagctcatca

SEQ ID NO: 54292 - DNA, 25 bp, Probe sequence
agttaggatttatgtcccaagctca

SEQ ID NO: 54293 - DNA, 25 bp, Probe sequence
ggatttatgtcccaagctcatcaag

SEQ ID NO: 54294 - DNA, 25 bp, Probe sequence
agtgcgattaatgtgataatacagt

SEQ ID NO: 54295 - DNA, 25 bp, Probe sequence
gagatgagacgtagattaactccat

SEQ ID NO: 54296 - DNA, 25 bp, Probe sequence
tgagatgagacgtagattaactcca

SEQ ID NO: 54297 - DNA, 25 bp, Probe sequence
atgagatgagacgtagattaactcc

SEQ ID NO: 54298 - DNA, 25 bp, Probe sequence
gtgcgattaatgtgataatacagtt

SEQ ID NO: 54299 - DNA, 25 bp, Probe sequence
agatgagacgtagattaactccata

SEQ ID NO: 54300 - DNA, 25 bp, Probe sequence
aagtgcgattaatgtgataatacag

SEQ ID NO: 54301 - DNA, 25 bp, Probe sequence
aatgagatgagacgtagattaactc

SEQ ID NO: 54302 - DNA, 25 bp, Probe sequence
gatgagacgtagattaactccataa

SEQ ID NO: 54303 - DNA, 25 bp, Probe sequence
ggagttaatctacgtctcatctcat

SEQ ID NO: 54304 - DNA, 25 bp, Probe sequence
tggagttaatctacgtctcatctca

SEQ ID NO: 54305 - DNA, 25 bp, Probe sequence
atggagttaatctacgtctcatctc

SEQ ID NO: 54306 - DNA, 25 bp, Probe sequence
actgtattatcacattaatcgcact

SEQ ID NO: 54307 - DNA, 25 bp, Probe sequence
aactgtattatcacattaatcgcac

SEQ ID NO: 54308 - DNA, 25 bp, Probe sequence
tatggagttaatctacgtctcatct

SEQ ID NO: 54309 - DNA, 25 bp, Probe sequence
ctgtattatcacattaatcgcactt

SEQ ID NO: 54310 - DNA, 25 bp, Probe sequence
gagttaatctacgtctcatctcatt

SEQ ID NO: 54311 - DNA, 25 bp, Probe sequence
ttatggagttaatctacgtctcatc

SEQ ID NO: 54312 - DNA, 25 bp, Probe sequence
aaagttagaggtgagtcttacgttt

SEQ ID NO: 54313 - DNA, 25 bp, Probe sequence
aagttagaggtgagtcttacgtttc

SEQ ID NO: 54314 - DNA, 25 bp, Probe sequence
gttagaggtgagtcttacgtttcag

SEQ ID NO: 54315 - DNA, 25 bp, Probe sequence
ttagaggtgagtcttacgtttcagt

SEQ ID NO: 54316 - DNA, 25 bp, Probe sequence
agttagaggtgagtcttacgtttca

SEQ ID NO: 54317 - DNA, 25 bp, Probe sequence
tagaggtgagtcttacgtttcagtg

SEQ ID NO: 54318 - DNA, 25 bp, Probe sequence
gtgacggtagacttacctttaacat

SEQ ID NO: 54319 - DNA, 25 bp, Probe sequence
tgacggtagacttacctttaacatg

SEQ ID NO: 54320 - DNA, 25 bp, Probe sequence
cagtgacggtagacttacctttaac

SEQ ID NO: 54321 - DNA, 25 bp, Probe sequence
aaacgtaagactcacctctaacttt

SEQ ID NO: 54322 - DNA, 25 bp, Probe sequence
gaaacgtaagactcacctctaactt

SEQ ID NO: 54323 - DNA, 25 bp, Probe sequence
ctgaaacgtaagactcacctctaac

SEQ ID NO: 54324 - DNA, 25 bp, Probe sequence
tgaaacgtaagactcacctctaact

SEQ ID NO: 54325 - DNA, 25 bp, Probe sequence
actgaaacgtaagactcacctctaa

SEQ ID NO: 54326 - DNA, 25 bp, Probe sequence
cactgaaacgtaagactcacctcta

SEQ ID NO: 54327 - DNA, 25 bp, Probe sequence
atgttaaaggtaagtctaccgtcac

SEQ ID NO: 54328 - DNA, 25 bp, Probe sequence
catgttaaaggtaagtctaccgtca

SEQ ID NO: 54329 - DNA, 25 bp, Probe sequence
taaaggtaagtctaccgtcactgaa

SEQ ID NO: 54330 - DNA, 25 bp, Probe sequence
aaacagaggaaacaatcaagtcgtt

SEQ ID NO: 54331 - DNA, 25 bp, Probe sequence
aacagaggaaacaatcaagtcgttg

SEQ ID NO: 54332 - DNA, 25 bp, Probe sequence
caagtcgttgaatatttcctctgtt

SEQ ID NO: 54333 - DNA, 25 bp, Probe sequence
aagtcgttgaatatttcctctgttt

SEQ ID NO: 54334 - DNA, 25 bp, Probe sequence
agaaaacagaggaaacaatcaagtc

SEQ ID NO: 54335 - DNA, 25 bp, Probe sequence
gaaaacagaggaaacaatcaagtcg

SEQ ID NO: 54336 - DNA, 25 bp, Probe sequence
aaaacagaggaaacaatcaagtcgt

SEQ ID NO: 54337 - DNA, 25 bp, Probe sequence
gaggaaacaatcaagtcgttgaata

SEQ ID NO: 54338 - DNA, 25 bp, Probe sequence
tagaaaacagaggaaacaatcaagt

SEQ ID NO: 54339 - DNA, 25 bp, Probe sequence
aacgacttgattgtttcctctgttt

SEQ ID NO: 54340 - DNA, 25 bp, Probe sequence
caacgacttgattgtttcctctgtt

SEQ ID NO: 54341 - DNA, 25 bp, Probe sequence
aacagaggaaatattcaacgacttg

SEQ ID NO: 54342 - DNA, 25 bp, Probe sequence
aaacagaggaaatattcaacgactt

SEQ ID NO: 54343 - DNA, 25 bp, Probe sequence
gacttgattgtttcctctgttttct

SEQ ID NO: 54344 - DNA, 25 bp, Probe sequence
cgacttgattgtttcctctgttttc

SEQ ID NO: 54345 - DNA, 25 bp, Probe sequence
acgacttgattgtttcctctgtttt

SEQ ID NO: 54346 - DNA, 25 bp, Probe sequence
tattcaacgacttgattgtttcctc

SEQ ID NO: 54347 - DNA, 25 bp, Probe sequence
tgattgtttcctctgttttctatgt

SEQ ID NO: 54348 - DNA, 25 bp, Probe sequence
agaacgaagatgataacctaagtga

SEQ ID NO: 54349 - DNA, 25 bp, Probe sequence
gaacgaagatgataacctaagtgag

SEQ ID NO: 54350 - DNA, 25 bp, Probe sequence
aagaacgaagatgataacctaagtg

SEQ ID NO: 54351 - DNA, 25 bp, Probe sequence
aacgaagatgataacctaagtgagg

SEQ ID NO: 54352 - DNA, 25 bp, Probe sequence
aaagaacgaagatgataacctaagt

SEQ ID NO: 54353 - DNA, 25 bp, Probe sequence
tcaaaataacttatggggtaggcaa

SEQ ID NO: 54354 - DNA, 25 bp, Probe sequence
ttcaaaataacttatggggtaggca

SEQ ID NO: 54355 - DNA, 25 bp, Probe sequence
atggggtaggcaattatggaaaata

SEQ ID NO: 54356 - DNA, 25 bp, Probe sequence
tatggggtaggcaattatggaaaat

SEQ ID NO: 54357 - DNA, 25 bp, Probe sequence
tcacttaggttatcatcttcgttct

SEQ ID NO: 54358 - DNA, 25 bp, Probe sequence
ctcacttaggttatcatcttcgttc

SEQ ID NO: 54359 - DNA, 25 bp, Probe sequence
cacttaggttatcatcttcgttctt

SEQ ID NO: 54360 - DNA, 25 bp, Probe sequence
cctcacttaggttatcatcttcgtt

SEQ ID NO: 54361 - DNA, 25 bp, Probe sequence
acttaggttatcatcttcgttcttt

SEQ ID NO: 54362 - DNA, 25 bp, Probe sequence
tgcctaccccataagttattttgaa

SEQ ID NO: 54363 - DNA, 25 bp, Probe sequence
ttgcctaccccataagttattttga

SEQ ID NO: 54364 - DNA, 25 bp, Probe sequence
ccataattgcctaccccataagtta

SEQ ID NO: 54365 - DNA, 25 bp, Probe sequence
attttccataattgcctaccccata

SEQ ID NO: 54366 - DNA, 25 bp, Probe sequence
ttgaattttcggattgagggatttt

SEQ ID NO: 54367 - DNA, 25 bp, Probe sequence
attgaattttcggattgagggattt

SEQ ID NO: 54368 - DNA, 25 bp, Probe sequence
aattgaattttcggattgagggatt

SEQ ID NO: 54369 - DNA, 25 bp, Probe sequence
gaattgaattttcggattgagggat

SEQ ID NO: 54370 - DNA, 25 bp, Probe sequence
tgaataatcaaagttcgtaattgtc

SEQ ID NO: 54371 - DNA, 25 bp, Probe sequence
gaataatcaaagttcgtaattgtct

SEQ ID NO: 54372 - DNA, 25 bp, Probe sequence
aataatcaaagttcgtaattgtctt

SEQ ID NO: 54373 - DNA, 25 bp, Probe sequence
tcaaatgaataatcaaagttcgtaa

SEQ ID NO: 54374 - DNA, 25 bp, Probe sequence
atgaataatcaaagttcgtaattgt

SEQ ID NO: 54375 - DNA, 25 bp, Probe sequence
aaaatccctcaatccgaaaattcaa

SEQ ID NO: 54376 - DNA, 25 bp, Probe sequence
aatccctcaatccgaaaattcaatt

SEQ ID NO: 54377 - DNA, 25 bp, Probe sequence
aaatccctcaatccgaaaattcaat

SEQ ID NO: 54378 - DNA, 25 bp, Probe sequence
atccctcaatccgaaaattcaattc

SEQ ID NO: 54379 - DNA, 25 bp, Probe sequence
gacaattacgaactttgattattca

SEQ ID NO: 54380 - DNA, 25 bp, Probe sequence
agacaattacgaactttgattattc

SEQ ID NO: 54381 - DNA, 25 bp, Probe sequence
aagacaattacgaactttgattatt

SEQ ID NO: 54382 - DNA, 25 bp, Probe sequence
ttacgaactttgattattcatttga

SEQ ID NO: 54383 - DNA, 25 bp, Probe sequence
acaattacgaactttgattattcat

SEQ ID NO: 54384 - DNA, 25 bp, Probe sequence
cggatagaatcatttgccaaatacc

SEQ ID NO: 54385 - DNA, 25 bp, Probe sequence
acggatagaatcatttgccaaatac

SEQ ID NO: 54386 - DNA, 25 bp, Probe sequence
aaacggatagaatcatttgccaaat

SEQ ID NO: 54387 - DNA, 25 bp, Probe sequence
ggatagaatcatttgccaaatacct

SEQ ID NO: 54388 - DNA, 25 bp, Probe sequence
aacggatagaatcatttgccaaata

SEQ ID NO: 54389 - DNA, 25 bp, Probe sequence
aatcaatttatgtggaggaaatgaa

SEQ ID NO: 54390 - DNA, 25 bp, Probe sequence
taaaacggatagaatcatttgccaa

SEQ ID NO: 54391 - DNA, 25 bp, Probe sequence
ataaaacggatagaatcatttgcca

SEQ ID NO: 54392 - DNA, 25 bp, Probe sequence
aacttaatcaatttatgtggaggaa

SEQ ID NO: 54393 - DNA, 25 bp, Probe sequence
atttggcaaatgattctatccgttt

SEQ ID NO: 54394 - DNA, 25 bp, Probe sequence
gtatttggcaaatgattctatccgt

SEQ ID NO: 54395 - DNA, 25 bp, Probe sequence
ggtatttggcaaatgattctatccg

SEQ ID NO: 54396 - DNA, 25 bp, Probe sequence
tatttggcaaatgattctatccgtt

SEQ ID NO: 54397 - DNA, 25 bp, Probe sequence
aggtatttggcaaatgattctatcc

SEQ ID NO: 54398 - DNA, 25 bp, Probe sequence
ttcatttcctccacataaattgatt

SEQ ID NO: 54399 - DNA, 25 bp, Probe sequence
ttggcaaatgattctatccgtttta

SEQ ID NO: 54400 - DNA, 25 bp, Probe sequence
tggcaaatgattctatccgttttat

SEQ ID NO: 54401 - DNA, 25 bp, Probe sequence
ttcctccacataaattgattaagtt

SEQ ID NO: 54402 - DNA, 25 bp, Probe sequence
cctggagaaggtgtgatgtcttatc

SEQ ID NO: 54403 - DNA, 25 bp, Probe sequence
agaaggtgtgatgtcttatcaagag

SEQ ID NO: 54404 - DNA, 25 bp, Probe sequence
gagaaggtgtgatgtcttatcaaga

SEQ ID NO: 54405 - DNA, 25 bp, Probe sequence
gaaggtgtgatgtcttatcaagagt

SEQ ID NO: 54406 - DNA, 25 bp, Probe sequence
aggtgtgatgtcttatcaagagtaa

SEQ ID NO: 54407 - DNA, 25 bp, Probe sequence
aaggtgtgatgtcttatcaagagta

SEQ ID NO: 54408 - DNA, 25 bp, Probe sequence
tcctggagaaggtgtgatgtcttat

SEQ ID NO: 54409 - DNA, 25 bp, Probe sequence
ggagaaggtgtgatgtcttatcaag

SEQ ID NO: 54410 - DNA, 25 bp, Probe sequence
tggagaaggtgtgatgtcttatcaa

SEQ ID NO: 54411 - DNA, 25 bp, Probe sequence
gataagacatcacaccttctccagg

SEQ ID NO: 54412 - DNA, 25 bp, Probe sequence
tcttgataagacatcacaccttctc

SEQ ID NO: 54413 - DNA, 25 bp, Probe sequence
ctcttgataagacatcacaccttct

SEQ ID NO: 54414 - DNA, 25 bp, Probe sequence
actcttgataagacatcacaccttc

SEQ ID NO: 54415 - DNA, 25 bp, Probe sequence
tactcttgataagacatcacacctt

SEQ ID NO: 54416 - DNA, 25 bp, Probe sequence
ttactcttgataagacatcacacct

SEQ ID NO: 54417 - DNA, 25 bp, Probe sequence
ataagacatcacaccttctccagga

SEQ ID NO: 54418 - DNA, 25 bp, Probe sequence
cttgataagacatcacaccttctcc

SEQ ID NO: 54419 - DNA, 25 bp, Probe sequence
ttgataagacatcacaccttctcca

SEQ ID NO: 54420 - DNA, 25 bp, Probe sequence
tgcctcctagatagtgttatagtga

SEQ ID NO: 54421 - DNA, 25 bp, Probe sequence
ttgcctcctagatagtgttatagtg

SEQ ID NO: 54422 - DNA, 25 bp, Probe sequence
gcctcctagatagtgttatagtgat

SEQ ID NO: 54423 - DNA, 25 bp, Probe sequence
atcattgcctcctagatagtgttat

SEQ ID NO: 54424 - DNA, 25 bp, Probe sequence
attgcctcctagatagtgttatagt

SEQ ID NO: 54425 - DNA, 25 bp, Probe sequence
tcattgcctcctagatagtgttata

SEQ ID NO: 54426 - DNA, 25 bp, Probe sequence
cattgcctcctagatagtgttatag

SEQ ID NO: 54427 - DNA, 25 bp, Probe sequence
gtgggatgttctttagcaatttcaa

SEQ ID NO: 54428 - DNA, 25 bp, Probe sequence
agcaatttcaatataagcatcgtgt

SEQ ID NO: 54429 - DNA, 25 bp, Probe sequence
tcactataacactatctaggaggca

SEQ ID NO: 54430 - DNA, 25 bp, Probe sequence
cactataacactatctaggaggcaa

SEQ ID NO: 54431 - DNA, 25 bp, Probe sequence
ataacactatctaggaggcaatgat

SEQ ID NO: 54432 - DNA, 25 bp, Probe sequence
atcactataacactatctaggaggc

SEQ ID NO: 54433 - DNA, 25 bp, Probe sequence
tataacactatctaggaggcaatga

SEQ ID NO: 54434 - DNA, 25 bp, Probe sequence
actataacactatctaggaggcaat

SEQ ID NO: 54435 - DNA, 25 bp, Probe sequence
ctataacactatctaggaggcaatg

SEQ ID NO: 54436 - DNA, 25 bp, Probe sequence
ttgaaattgctaaagaacatcccac

SEQ ID NO: 54437 - DNA, 25 bp, Probe sequence
acacgatgcttatattgaaattgct

SEQ ID NO: 54438 - DNA, 25 bp, Probe sequence
acttcctcctactaatgaactaaga

SEQ ID NO: 54439 - DNA, 25 bp, Probe sequence
aacttcctcctactaatgaactaag

SEQ ID NO: 54440 - DNA, 25 bp, Probe sequence
cttcctcctactaatgaactaagat

SEQ ID NO: 54441 - DNA, 25 bp, Probe sequence
agccaagaagttatcatttgaaagc

SEQ ID NO: 54442 - DNA, 25 bp, Probe sequence
tcctcctactaatgaactaagatag

SEQ ID NO: 54443 - DNA, 25 bp, Probe sequence
taacttcctcctactaatgaactaa

SEQ ID NO: 54444 - DNA, 25 bp, Probe sequence
ttaacttcctcctactaatgaacta

SEQ ID NO: 54445 - DNA, 25 bp, Probe sequence
gccaagaagttatcatttgaaagct

SEQ ID NO: 54446 - DNA, 25 bp, Probe sequence
tagccaagaagttatcatttgaaag

SEQ ID NO: 54447 - DNA, 25 bp, Probe sequence
tcttagttcattagtaggaggaagt

SEQ ID NO: 54448 - DNA, 25 bp, Probe sequence
cttagttcattagtaggaggaagtt

SEQ ID NO: 54449 - DNA, 25 bp, Probe sequence
atcttagttcattagtaggaggaag

SEQ ID NO: 54450 - DNA, 25 bp, Probe sequence
gctttcaaatgataacttcttggct

SEQ ID NO: 54451 - DNA, 25 bp, Probe sequence
ctatcttagttcattagtaggagga

SEQ ID NO: 54452 - DNA, 25 bp, Probe sequence
ttagttcattagtaggaggaagtta

SEQ ID NO: 54453 - DNA, 25 bp, Probe sequence
tagttcattagtaggaggaagttaa

SEQ ID NO: 54454 - DNA, 25 bp, Probe sequence
agctttcaaatgataacttcttggc

SEQ ID NO: 54455 - DNA, 25 bp, Probe sequence
ctttcaaatgataacttcttggcta

SEQ ID NO: 54456 - DNA, 25 bp, Probe sequence
atagttggctgctatggttagtgta

SEQ ID NO: 54457 - DNA, 25 bp, Probe sequence
ttggctgctatggttagtgtactag

SEQ ID NO: 54458 - DNA, 25 bp, Probe sequence
gttggctgctatggttagtgtacta

SEQ ID NO: 54459 - DNA, 25 bp, Probe sequence
tagttggctgctatggttagtgtac

SEQ ID NO: 54460 - DNA, 25 bp, Probe sequence
tgctatggttagtgtactagtctag

SEQ ID NO: 54461 - DNA, 25 bp, Probe sequence
ctgctatggttagtgtactagtcta

SEQ ID NO: 54462 - DNA, 25 bp, Probe sequence
gctgctatggttagtgtactagtct

SEQ ID NO: 54463 - DNA, 25 bp, Probe sequence
agttggctgctatggttagtgtact

SEQ ID NO: 54464 - DNA, 25 bp, Probe sequence
ggctgctatggttagtgtactagtc

SEQ ID NO: 54465 - DNA, 25 bp, Probe sequence
tacactaaccatagcagccaactat

SEQ ID NO: 54466 - DNA, 25 bp, Probe sequence
ctagtacactaaccatagcagccaa

SEQ ID NO: 54467 - DNA, 25 bp, Probe sequence
gtacactaaccatagcagccaacta

SEQ ID NO: 54468 - DNA, 25 bp, Probe sequence
tagtacactaaccatagcagccaac

SEQ ID NO: 54469 - DNA, 25 bp, Probe sequence
tagactagtacactaaccatagcag

SEQ ID NO: 54470 - DNA, 25 bp, Probe sequence
ctagactagtacactaaccatagca

SEQ ID NO: 54471 - DNA, 25 bp, Probe sequence
agactagtacactaaccatagcagc

SEQ ID NO: 54472 - DNA, 25 bp, Probe sequence
agtacactaaccatagcagccaact

SEQ ID NO: 54473 - DNA, 25 bp, Probe sequence
gactagtacactaaccatagcagcc

SEQ ID NO: 54474 - DNA, 25 bp, Probe sequence
tcggttgttaatacttctatgggac

SEQ ID NO: 54475 - DNA, 25 bp, Probe sequence
tacttctatgggacaattcgcttta

SEQ ID NO: 54476 - DNA, 25 bp, Probe sequence
atacttctatgggacaattcgcttt

SEQ ID NO: 54477 - DNA, 25 bp, Probe sequence
aatacttctatgggacaattcgctt

SEQ ID NO: 54478 - DNA, 25 bp, Probe sequence
taatacttctatgggacaattcgct

SEQ ID NO: 54479 - DNA, 25 bp, Probe sequence
atcggttgttaatacttctatggga

SEQ ID NO: 54480 - DNA, 25 bp, Probe sequence
acttctatgggacaattcgctttaa

SEQ ID NO: 54481 - DNA, 25 bp, Probe sequence
ttaatacttctatgggacaattcgc

SEQ ID NO: 54482 - DNA, 25 bp, Probe sequence
cggttgttaatacttctatgggaca

SEQ ID NO: 54483 - DNA, 25 bp, Probe sequence
gtcccatagaagtattaacaaccga

SEQ ID NO: 54484 - DNA, 25 bp, Probe sequence
taaagcgaattgtcccatagaagta

SEQ ID NO: 54485 - DNA, 25 bp, Probe sequence
aagcgaattgtcccatagaagtatt

SEQ ID NO: 54486 - DNA, 25 bp, Probe sequence
aaagcgaattgtcccatagaagtat

SEQ ID NO: 54487 - DNA, 25 bp, Probe sequence
tcccatagaagtattaacaaccgat

SEQ ID NO: 54488 - DNA, 25 bp, Probe sequence
agcgaattgtcccatagaagtatta

SEQ ID NO: 54489 - DNA, 25 bp, Probe sequence
ttaaagcgaattgtcccatagaagt

SEQ ID NO: 54490 - DNA, 25 bp, Probe sequence
gcgaattgtcccatagaagtattaa

SEQ ID NO: 54491 - DNA, 25 bp, Probe sequence
tgtcccatagaagtattaacaaccg

SEQ ID NO: 54492 - DNA, 25 bp, Probe sequence
ggtcagtctactatatgatacggtt

SEQ ID NO: 54493 - DNA, 25 bp, Probe sequence
gggtcagtctactatatgatacggt

SEQ ID NO: 54494 - DNA, 25 bp, Probe sequence
taattggatatagagggaaagaagc

SEQ ID NO: 54495 - DNA, 25 bp, Probe sequence
aattggatatagagggaaagaagct

SEQ ID NO: 54496 - DNA, 25 bp, Probe sequence
attggatatagagggaaagaagcta

SEQ ID NO: 54497 - DNA, 25 bp, Probe sequence
gtcagtctactatatgatacggttt

SEQ ID NO: 54498 - DNA, 25 bp, Probe sequence
ttggatatagagggaaagaagctat

SEQ ID NO: 54499 - DNA, 25 bp, Probe sequence
tggggtcagtctactatatgatacg

SEQ ID NO: 54500 - DNA, 25 bp, Probe sequence
ggggtcagtctactatatgatacgg

SEQ ID NO: 54501 - DNA, 25 bp, Probe sequence
aaccgtatcatatagtagactgacc

SEQ ID NO: 54502 - DNA, 25 bp, Probe sequence
accgtatcatatagtagactgaccc

SEQ ID NO: 54503 - DNA, 25 bp, Probe sequence
gcttctttccctctatatccaatta

SEQ ID NO: 54504 - DNA, 25 bp, Probe sequence
agcttctttccctctatatccaatt

SEQ ID NO: 54505 - DNA, 25 bp, Probe sequence
tagcttctttccctctatatccaat

SEQ ID NO: 54506 - DNA, 25 bp, Probe sequence
aaaccgtatcatatagtagactgac

SEQ ID NO: 54507 - DNA, 25 bp, Probe sequence
atagcttctttccctctatatccaa

SEQ ID NO: 54508 - DNA, 25 bp, Probe sequence
cgtatcatatagtagactgacccca

SEQ ID NO: 54509 - DNA, 25 bp, Probe sequence
ccgtatcatatagtagactgacccc

SEQ ID NO: 54510 - DNA, 25 bp, Probe sequence
tttccatatcctctttagtagcaat

SEQ ID NO: 54511 - DNA, 25 bp, Probe sequence
tccatatcctctttagtagcaattt

SEQ ID NO: 54512 - DNA, 25 bp, Probe sequence
ttccatatcctctttagtagcaatt

SEQ ID NO: 54513 - DNA, 25 bp, Probe sequence
ggttttccatatcctctttagtagc

SEQ ID NO: 54514 - DNA, 25 bp, Probe sequence
gttttccatatcctctttagtagca

SEQ ID NO: 54515 - DNA, 25 bp, Probe sequence
ttttccatatcctctttagtagcaa

SEQ ID NO: 54516 - DNA, 25 bp, Probe sequence
ccatatcctctttagtagcaatttt

SEQ ID NO: 54517 - DNA, 25 bp, Probe sequence
tggttttccatatcctctttagtag

SEQ ID NO: 54518 - DNA, 25 bp, Probe sequence
cctctttagtagcaattttctaaca

SEQ ID NO: 54519 - DNA, 25 bp, Probe sequence
attgctactaaagaggatatggaaa

SEQ ID NO: 54520 - DNA, 25 bp, Probe sequence
aattgctactaaagaggatatggaa

SEQ ID NO: 54521 - DNA, 25 bp, Probe sequence
aaattgctactaaagaggatatgga

SEQ ID NO: 54522 - DNA, 25 bp, Probe sequence
gctactaaagaggatatggaaaacc

SEQ ID NO: 54523 - DNA, 25 bp, Probe sequence
tgctactaaagaggatatggaaaac

SEQ ID NO: 54524 - DNA, 25 bp, Probe sequence
ttgctactaaagaggatatggaaaa

SEQ ID NO: 54525 - DNA, 25 bp, Probe sequence
aaaattgctactaaagaggatatgg

SEQ ID NO: 54526 - DNA, 25 bp, Probe sequence
ctactaaagaggatatggaaaacca

SEQ ID NO: 54527 - DNA, 25 bp, Probe sequence
tgttagaaaattgctactaaagagg

SEQ ID NO: 54528 - DNA, 25 bp, Probe sequence
tacaggtgttaagttgctccaatat

SEQ ID NO: 54529 - DNA, 25 bp, Probe sequence
ttacaggtgttaagttgctccaata

SEQ ID NO: 54530 - DNA, 25 bp, Probe sequence
gaatacgatgacagaatgaataggt

SEQ ID NO: 54531 - DNA, 25 bp, Probe sequence
tgaatacgatgacagaatgaatagg

SEQ ID NO: 54532 - DNA, 25 bp, Probe sequence
gtagttacaggtgttaagttgctcc

SEQ ID NO: 54533 - DNA, 25 bp, Probe sequence
tagttacaggtgttaagttgctcca

SEQ ID NO: 54534 - DNA, 25 bp, Probe sequence
acaggtgttaagttgctccaatatg

SEQ ID NO: 54535 - DNA, 25 bp, Probe sequence
gttacaggtgttaagttgctccaat

SEQ ID NO: 54536 - DNA, 25 bp, Probe sequence
ttgtagttacaggtgttaagttgct

SEQ ID NO: 54537 - DNA, 25 bp, Probe sequence
tattggagcaacttaacacctgtaa

SEQ ID NO: 54538 - DNA, 25 bp, Probe sequence
atattggagcaacttaacacctgta

SEQ ID NO: 54539 - DNA, 25 bp, Probe sequence
cctattcattctgtcatcgtattca

SEQ ID NO: 54540 - DNA, 25 bp, Probe sequence
acctattcattctgtcatcgtattc

SEQ ID NO: 54541 - DNA, 25 bp, Probe sequence
ggagcaacttaacacctgtaactac

SEQ ID NO: 54542 - DNA, 25 bp, Probe sequence
tggagcaacttaacacctgtaacta

SEQ ID NO: 54543 - DNA, 25 bp, Probe sequence
catattggagcaacttaacacctgt

SEQ ID NO: 54544 - DNA, 25 bp, Probe sequence
attggagcaacttaacacctgtaac

SEQ ID NO: 54545 - DNA, 25 bp, Probe sequence
agcaacttaacacctgtaactacaa

SEQ ID NO: 54546 - DNA, 25 bp, Probe sequence
ttacactattagctgtcgttgtcat

SEQ ID NO: 54547 - DNA, 25 bp, Probe sequence
attacactattagctgtcgttgtca

SEQ ID NO: 54548 - DNA, 25 bp, Probe sequence
tgattacactattagctgtcgttgt

SEQ ID NO: 54549 - DNA, 25 bp, Probe sequence
gcaatgattacactattagctgtcg

SEQ ID NO: 54550 - DNA, 25 bp, Probe sequence
cgcaatgattacactattagctgtc

SEQ ID NO: 54551 - DNA, 25 bp, Probe sequence
gattacactattagctgtcgttgtc

SEQ ID NO: 54552 - DNA, 25 bp, Probe sequence
tacactattagctgtcgttgtcatc

SEQ ID NO: 54553 - DNA, 25 bp, Probe sequence
atgattacactattagctgtcgttg

SEQ ID NO: 54554 - DNA, 25 bp, Probe sequence
caatgattacactattagctgtcgt

SEQ ID NO: 54555 - DNA, 25 bp, Probe sequence
acaacgacagctaatagtgtaatca

SEQ ID NO: 54556 - DNA, 25 bp, Probe sequence
tgacaacgacagctaatagtgtaat

SEQ ID NO: 54557 - DNA, 25 bp, Probe sequence
atgacaacgacagctaatagtgtaa

SEQ ID NO: 54558 - DNA, 25 bp, Probe sequence
gacagctaatagtgtaatcattgcg

SEQ ID NO: 54559 - DNA, 25 bp, Probe sequence
cgacagctaatagtgtaatcattgc

SEQ ID NO: 54560 - DNA, 25 bp, Probe sequence
gacaacgacagctaatagtgtaatc

SEQ ID NO: 54561 - DNA, 25 bp, Probe sequence
gatgacaacgacagctaatagtgta

SEQ ID NO: 54562 - DNA, 25 bp, Probe sequence
acgacagctaatagtgtaatcattg

SEQ ID NO: 54563 - DNA, 25 bp, Probe sequence
caacgacagctaatagtgtaatcat

SEQ ID NO: 54564 - DNA, 25 bp, Probe sequence
gtgaaggagattaagcaatgtaact

SEQ ID NO: 54565 - DNA, 25 bp, Probe sequence
agtgaaggagattaagcaatgtaac

SEQ ID NO: 54566 - DNA, 25 bp, Probe sequence
gcaatgtaacttggcttaatctctt

SEQ ID NO: 54567 - DNA, 25 bp, Probe sequence
aaggagattaagcaatgtaacttgg

SEQ ID NO: 54568 - DNA, 25 bp, Probe sequence
aagtgaaggagattaagcaatgtaa

SEQ ID NO: 54569 - DNA, 25 bp, Probe sequence
aggagattaagcaatgtaacttggc

SEQ ID NO: 54570 - DNA, 25 bp, Probe sequence
tgaaggagattaagcaatgtaactt

SEQ ID NO: 54571 - DNA, 25 bp, Probe sequence
catccatgtggttcattagcattat

SEQ ID NO: 54572 - DNA, 25 bp, Probe sequence
gaaggagattaagcaatgtaacttg

SEQ ID NO: 54573 - DNA, 25 bp, Probe sequence
gttacattgcttaatctccttcact

SEQ ID NO: 54574 - DNA, 25 bp, Probe sequence
agttacattgcttaatctccttcac

SEQ ID NO: 54575 - DNA, 25 bp, Probe sequence
aagagattaagccaagttacattgc

SEQ ID NO: 54576 - DNA, 25 bp, Probe sequence
ccaagttacattgcttaatctcctt

SEQ ID NO: 54577 - DNA, 25 bp, Probe sequence
ttacattgcttaatctccttcactt

SEQ ID NO: 54578 - DNA, 25 bp, Probe sequence
gccaagttacattgcttaatctcct

SEQ ID NO: 54579 - DNA, 25 bp, Probe sequence
aagttacattgcttaatctccttca

SEQ ID NO: 54580 - DNA, 25 bp, Probe sequence
ataatgctaatgaaccacatggatg

SEQ ID NO: 54581 - DNA, 25 bp, Probe sequence
caagttacattgcttaatctccttc

SEQ ID NO: 54582 - DNA, 25 bp, Probe sequence
catcgtgaccatttgtcttattact

SEQ ID NO: 54583 - DNA, 25 bp, Probe sequence
tcatcgtgaccatttgtcttattac

SEQ ID NO: 54584 - DNA, 25 bp, Probe sequence
aatcatcgtgaccatttgtcttatt

SEQ ID NO: 54585 - DNA, 25 bp, Probe sequence
aaatcatcgtgaccatttgtcttat

SEQ ID NO: 54586 - DNA, 25 bp, Probe sequence
atcgtgaccatttgtcttattactt

SEQ ID NO: 54587 - DNA, 25 bp, Probe sequence
atcatcgtgaccatttgtcttatta

SEQ ID NO: 54588 - DNA, 25 bp, Probe sequence
tcgtgaccatttgtcttattactta

SEQ ID NO: 54589 - DNA, 25 bp, Probe sequence
cgtgaccatttgtcttattacttag

SEQ ID NO: 54590 - DNA, 25 bp, Probe sequence
ttacttagatgtagttgttcgtatt

SEQ ID NO: 54591 - DNA, 25 bp, Probe sequence
gtaataagacaaatggtcacgatga

SEQ ID NO: 54592 - DNA, 25 bp, Probe sequence
agtaataagacaaatggtcacgatg

SEQ ID NO: 54593 - DNA, 25 bp, Probe sequence
ataagacaaatggtcacgatgattt

SEQ ID NO: 54594 - DNA, 25 bp, Probe sequence
aataagacaaatggtcacgatgatt

SEQ ID NO: 54595 - DNA, 25 bp, Probe sequence
aagtaataagacaaatggtcacgat

SEQ ID NO: 54596 - DNA, 25 bp, Probe sequence
taataagacaaatggtcacgatgat

SEQ ID NO: 54597 - DNA, 25 bp, Probe sequence
taagtaataagacaaatggtcacga

SEQ ID NO: 54598 - DNA, 25 bp, Probe sequence
ctaagtaataagacaaatggtcacg

SEQ ID NO: 54599 - DNA, 25 bp, Probe sequence
acgaacaactacatctaagtaataa

SEQ ID NO: 54600 - DNA, 25 bp, Probe sequence
gctgatttctatgaagagaggttat

SEQ ID NO: 54601 - DNA, 25 bp, Probe sequence
tgatttctatgaagagaggttatgg

SEQ ID NO: 54602 - DNA, 25 bp, Probe sequence
gatttctatgaagagaggttatgga

SEQ ID NO: 54603 - DNA, 25 bp, Probe sequence
agctgatttctatgaagagaggtta

SEQ ID NO: 54604 - DNA, 25 bp, Probe sequence
tagctgatttctatgaagagaggtt

SEQ ID NO: 54605 - DNA, 25 bp, Probe sequence
ttagctgatttctatgaagagaggt

SEQ ID NO: 54606 - DNA, 25 bp, Probe sequence
atttctatgaagagaggttatggat

SEQ ID NO: 54607 - DNA, 25 bp, Probe sequence
tttagctgatttctatgaagagagg

SEQ ID NO: 54608 - DNA, 25 bp, Probe sequence
ctgatttctatgaagagaggttatg

SEQ ID NO: 54609 - DNA, 25 bp, Probe sequence
ataacctctcttcatagaaatcagc

SEQ ID NO: 54610 - DNA, 25 bp, Probe sequence
ccataacctctcttcatagaaatca

SEQ ID NO: 54611 - DNA, 25 bp, Probe sequence
tccataacctctcttcatagaaatc

SEQ ID NO: 54612 - DNA, 25 bp, Probe sequence
acctctcttcatagaaatcagctaa

SEQ ID NO: 54613 - DNA, 25 bp, Probe sequence
aacctctcttcatagaaatcagcta

SEQ ID NO: 54614 - DNA, 25 bp, Probe sequence
taacctctcttcatagaaatcagct

SEQ ID NO: 54615 - DNA, 25 bp, Probe sequence
atccataacctctcttcatagaaat

SEQ ID NO: 54616 - DNA, 25 bp, Probe sequence
cctctcttcatagaaatcagctaaa

SEQ ID NO: 54617 - DNA, 25 bp, Probe sequence
cataacctctcttcatagaaatcag

SEQ ID NO: 54618 - DNA, 25 bp, Probe sequence
gaggagataataatttggagggtgt

SEQ ID NO: 54619 - DNA, 25 bp, Probe sequence
tgaggagataataatttggagggtg

SEQ ID NO: 54620 - DNA, 25 bp, Probe sequence
aggagataataatttggagggtgtt

SEQ ID NO: 54621 - DNA, 25 bp, Probe sequence
atgaggagataataatttggagggt

SEQ ID NO: 54622 - DNA, 25 bp, Probe sequence
ataatttggagggtgttaaatggtg

SEQ ID NO: 54623 - DNA, 25 bp, Probe sequence
aacctcatcattaactgatacgcag

SEQ ID NO: 54624 - DNA, 25 bp, Probe sequence
ctcatcattaactgatacgcagagg

SEQ ID NO: 54625 - DNA, 25 bp, Probe sequence
cctcatcattaactgatacgcagag

SEQ ID NO: 54626 - DNA, 25 bp, Probe sequence
ggagataataatttggagggtgtta

SEQ ID NO: 54627 - DNA, 25 bp, Probe sequence
caccctccaaattattatctcctca

SEQ ID NO: 54628 - DNA, 25 bp, Probe sequence
acaccctccaaattattatctcctc

SEQ ID NO: 54629 - DNA, 25 bp, Probe sequence
aacaccctccaaattattatctcct

SEQ ID NO: 54630 - DNA, 25 bp, Probe sequence
accctccaaattattatctcctcat

SEQ ID NO: 54631 - DNA, 25 bp, Probe sequence
caccatttaacaccctccaaattat

SEQ ID NO: 54632 - DNA, 25 bp, Probe sequence
ctgcgtatcagttaatgatgaggtt

SEQ ID NO: 54633 - DNA, 25 bp, Probe sequence
ctctgcgtatcagttaatgatgagg

SEQ ID NO: 54634 - DNA, 25 bp, Probe sequence
cctctgcgtatcagttaatgatgag

SEQ ID NO: 54635 - DNA, 25 bp, Probe sequence
taacaccctccaaattattatctcc

SEQ ID NO: 54636 - DNA, 25 bp, Probe sequence
actgacaatttgcgagactcataaa

SEQ ID NO: 54637 - DNA, 25 bp, Probe sequence
aactgacaatttgcgagactcataa

SEQ ID NO: 54638 - DNA, 25 bp, Probe sequence
aaactgacaatttgcgagactcata

SEQ ID NO: 54639 - DNA, 25 bp, Probe sequence
gagtatcaatcaagaaagatgtagt

SEQ ID NO: 54640 - DNA, 25 bp, Probe sequence
aaagagtatcaatcaagaaagatgt

SEQ ID NO: 54641 - DNA, 25 bp, Probe sequence
ctgacaatttgcgagactcataaaa

SEQ ID NO: 54642 - DNA, 25 bp, Probe sequence
acaatttgcgagactcataaaatgt

SEQ ID NO: 54643 - DNA, 25 bp, Probe sequence
tgacaatttgcgagactcataaaat

SEQ ID NO: 54644 - DNA, 25 bp, Probe sequence
gacaatttgcgagactcataaaatg

SEQ ID NO: 54645 - DNA, 25 bp, Probe sequence
tatgagtctcgcaaattgtcagttt

SEQ ID NO: 54646 - DNA, 25 bp, Probe sequence
ttatgagtctcgcaaattgtcagtt

SEQ ID NO: 54647 - DNA, 25 bp, Probe sequence
tttatgagtctcgcaaattgtcagt

SEQ ID NO: 54648 - DNA, 25 bp, Probe sequence
acatctttcttgattgatactcttt

SEQ ID NO: 54649 - DNA, 25 bp, Probe sequence
actacatctttcttgattgatactc

SEQ ID NO: 54650 - DNA, 25 bp, Probe sequence
ttttatgagtctcgcaaattgtcag

SEQ ID NO: 54651 - DNA, 25 bp, Probe sequence
acattttatgagtctcgcaaattgt

SEQ ID NO: 54652 - DNA, 25 bp, Probe sequence
attttatgagtctcgcaaattgtca

SEQ ID NO: 54653 - DNA, 25 bp, Probe sequence
ctacatctttcttgattgatactct

SEQ ID NO: 54654 - DNA, 25 bp, Probe sequence
tcctcctttcccttattactcatac

SEQ ID NO: 54655 - DNA, 25 bp, Probe sequence
attcctcctttcccttattactcat

SEQ ID NO: 54656 - DNA, 25 bp, Probe sequence
acaaacaaacaaaggaggaaactta

SEQ ID NO: 54657 - DNA, 25 bp, Probe sequence
aattcctcctttcccttattactca

SEQ ID NO: 54658 - DNA, 25 bp, Probe sequence
cacaaacaaacaaaggaggaaactt

SEQ ID NO: 54659 - DNA, 25 bp, Probe sequence
ttcctcctttcccttattactcata

SEQ ID NO: 54660 - DNA, 25 bp, Probe sequence
acacaaacaaacaaaggaggaaact

SEQ ID NO: 54661 - DNA, 25 bp, Probe sequence
cacacaaacaaacaaaggaggaaac

SEQ ID NO: 54662 - DNA, 25 bp, Probe sequence
tcacacaaacaaacaaaggaggaaa

SEQ ID NO: 54663 - DNA, 25 bp, Probe sequence
gtatgagtaataagggaaaggagga

SEQ ID NO: 54664 - DNA, 25 bp, Probe sequence
atgagtaataagggaaaggaggaat

SEQ ID NO: 54665 - DNA, 25 bp, Probe sequence
taagtttcctcctttgtttgtttgt

SEQ ID NO: 54666 - DNA, 25 bp, Probe sequence
aagtttcctcctttgtttgtttgtg

SEQ ID NO: 54667 - DNA, 25 bp, Probe sequence
tgagtaataagggaaaggaggaatt

SEQ ID NO: 54668 - DNA, 25 bp, Probe sequence
gtttcctcctttgtttgtttgtgtg

SEQ ID NO: 54669 - DNA, 25 bp, Probe sequence
agtttcctcctttgtttgtttgtgt

SEQ ID NO: 54670 - DNA, 25 bp, Probe sequence
tatgagtaataagggaaaggaggaa

SEQ ID NO: 54671 - DNA, 25 bp, Probe sequence
tttcctcctttgtttgtttgtgtga

SEQ ID NO: 54672 - DNA, 25 bp, Probe sequence
tcgggaaattgctgtctgagttata

SEQ ID NO: 54673 - DNA, 25 bp, Probe sequence
gggaaattgctgtctgagttataag

SEQ ID NO: 54674 - DNA, 25 bp, Probe sequence
ggaaattgctgtctgagttataagt

SEQ ID NO: 54675 - DNA, 25 bp, Probe sequence
tgctgtctgagttataagtattagt

SEQ ID NO: 54676 - DNA, 25 bp, Probe sequence
cgggaaattgctgtctgagttataa

SEQ ID NO: 54677 - DNA, 25 bp, Probe sequence
ttcgggaaattgctgtctgagttat

SEQ ID NO: 54678 - DNA, 25 bp, Probe sequence
tttcgggaaattgctgtctgagtta

SEQ ID NO: 54679 - DNA, 25 bp, Probe sequence
aattgctgtctgagttataagtatt

SEQ ID NO: 54680 - DNA, 25 bp, Probe sequence
atccgaactgcatacatatttgttg

SEQ ID NO: 54681 - DNA, 25 bp, Probe sequence
tataactcagacagcaatttcccga

SEQ ID NO: 54682 - DNA, 25 bp, Probe sequence
cttataactcagacagcaatttccc

SEQ ID NO: 54683 - DNA, 25 bp, Probe sequence
acttataactcagacagcaatttcc

SEQ ID NO: 54684 - DNA, 25 bp, Probe sequence
actaatacttataactcagacagca

SEQ ID NO: 54685 - DNA, 25 bp, Probe sequence
ttataactcagacagcaatttcccg

SEQ ID NO: 54686 - DNA, 25 bp, Probe sequence
ataactcagacagcaatttcccgaa

SEQ ID NO: 54687 - DNA, 25 bp, Probe sequence
taactcagacagcaatttcccgaaa

SEQ ID NO: 54688 - DNA, 25 bp, Probe sequence
aatacttataactcagacagcaatt

SEQ ID NO: 54689 - DNA, 25 bp, Probe sequence
caacaaatatgtatgcagttcggat

SEQ ID NO: 54690 - DNA, 25 bp, Probe sequence
cctagaggtatttgacaagttccat

SEQ ID NO: 54691 - DNA, 25 bp, Probe sequence
agaggtatttgacaagttccattca

SEQ ID NO: 54692 - DNA, 25 bp, Probe sequence
acaagttccattcaaccgtttagaa

SEQ ID NO: 54693 - DNA, 25 bp, Probe sequence
tagaggtatttgacaagttccattc

SEQ ID NO: 54694 - DNA, 25 bp, Probe sequence
gacaagttccattcaaccgtttaga

SEQ ID NO: 54695 - DNA, 25 bp, Probe sequence
ctagaggtatttgacaagttccatt

SEQ ID NO: 54696 - DNA, 25 bp, Probe sequence
ccctagaggtatttgacaagttcca

SEQ ID NO: 54697 - DNA, 25 bp, Probe sequence
tgacaagttccattcaaccgtttag

SEQ ID NO: 54698 - DNA, 25 bp, Probe sequence
caagttccattcaaccgtttagaat

SEQ ID NO: 54699 - DNA, 25 bp, Probe sequence
atggaacttgtcaaatacctctagg

SEQ ID NO: 54700 - DNA, 25 bp, Probe sequence
tgaatggaacttgtcaaatacctct

SEQ ID NO: 54701 - DNA, 25 bp, Probe sequence
ttctaaacggttgaatggaacttgt

SEQ ID NO: 54702 - DNA, 25 bp, Probe sequence
gaatggaacttgtcaaatacctcta

SEQ ID NO: 54703 - DNA, 25 bp, Probe sequence
tctaaacggttgaatggaacttgtc

SEQ ID NO: 54704 - DNA, 25 bp, Probe sequence
aatggaacttgtcaaatacctctag

SEQ ID NO: 54705 - DNA, 25 bp, Probe sequence
tggaacttgtcaaatacctctaggg

SEQ ID NO: 54706 - DNA, 25 bp, Probe sequence
ctaaacggttgaatggaacttgtca

SEQ ID NO: 54707 - DNA, 25 bp, Probe sequence
attctaaacggttgaatggaacttg

SEQ ID NO: 54708 - DNA, 25 bp, Probe sequence
cagtgttgtgtttatatgtcgtgaa

SEQ ID NO: 54709 - DNA, 25 bp, Probe sequence
gtcagtgttgtgtttatatgtcgtg

SEQ ID NO: 54710 - DNA, 25 bp, Probe sequence
gtgtcagtgttgtgtttatatgtcg

SEQ ID NO: 54711 - DNA, 25 bp, Probe sequence
cgtgtcagtgttgtgtttatatgtc

SEQ ID NO: 54712 - DNA, 25 bp, Probe sequence
tgtcagtgttgtgtttatatgtcgt

SEQ ID NO: 54713 - DNA, 25 bp, Probe sequence
agtgttgtgtttatatgtcgtgaat

SEQ ID NO: 54714 - DNA, 25 bp, Probe sequence
tcagtgttgtgtttatatgtcgtga

SEQ ID NO: 54715 - DNA, 25 bp, Probe sequence
gtgttgtgtttatatgtcgtgaatt

SEQ ID NO: 54716 - DNA, 25 bp, Probe sequence
tgttgtgtttatatgtcgtgaattt

SEQ ID NO: 54717 - DNA, 25 bp, Probe sequence
ttcacgacatataaacacaacactg

SEQ ID NO: 54718 - DNA, 25 bp, Probe sequence
gacatataaacacaacactgacacg

SEQ ID NO: 54719 - DNA, 25 bp, Probe sequence
cgacatataaacacaacactgacac

SEQ ID NO: 54720 - DNA, 25 bp, Probe sequence
cacgacatataaacacaacactgac

SEQ ID NO: 54721 - DNA, 25 bp, Probe sequence
acgacatataaacacaacactgaca

SEQ ID NO: 54722 - DNA, 25 bp, Probe sequence
attcacgacatataaacacaacact

SEQ ID NO: 54723 - DNA, 25 bp, Probe sequence
tcacgacatataaacacaacactga

SEQ ID NO: 54724 - DNA, 25 bp, Probe sequence
aattcacgacatataaacacaacac

SEQ ID NO: 54725 - DNA, 25 bp, Probe sequence
aaattcacgacatataaacacaaca

SEQ ID NO: 54726 - DNA, 25 bp, Probe sequence
tgtctgttgaacactaagagcaatt

SEQ ID NO: 54727 - DNA, 25 bp, Probe sequence
ttgtctgttgaacactaagagcaat

SEQ ID NO: 54728 - DNA, 25 bp, Probe sequence
agtagaaagtgttcaatccgtgtta

SEQ ID NO: 54729 - DNA, 25 bp, Probe sequence
taagtagaaagtgttcaatccgtgt

SEQ ID NO: 54730 - DNA, 25 bp, Probe sequence
ctaagtagaaagtgttcaatccgtg

SEQ ID NO: 54731 - DNA, 25 bp, Probe sequence
cctaagtagaaagtgttcaatccgt

SEQ ID NO: 54732 - DNA, 25 bp, Probe sequence
acctaagtagaaagtgttcaatccg

SEQ ID NO: 54733 - DNA, 25 bp, Probe sequence
gtagaaagtgttcaatccgtgttaa

SEQ ID NO: 54734 - DNA, 25 bp, Probe sequence
agaaagtgttcaatccgtgttaaat

SEQ ID NO: 54735 - DNA, 25 bp, Probe sequence
attgctcttagtgttcaacagacaa

SEQ ID NO: 54736 - DNA, 25 bp, Probe sequence
aattgctcttagtgttcaacagaca

SEQ ID NO: 54737 - DNA, 25 bp, Probe sequence
cacggattgaacactttctacttag

SEQ ID NO: 54738 - DNA, 25 bp, Probe sequence
acacggattgaacactttctactta

SEQ ID NO: 54739 - DNA, 25 bp, Probe sequence
taacacggattgaacactttctact

SEQ ID NO: 54740 - DNA, 25 bp, Probe sequence
cggattgaacactttctacttaggt

SEQ ID NO: 54741 - DNA, 25 bp, Probe sequence
acggattgaacactttctacttagg

SEQ ID NO: 54742 - DNA, 25 bp, Probe sequence
ttaacacggattgaacactttctac

SEQ ID NO: 54743 - DNA, 25 bp, Probe sequence
atttaacacggattgaacactttct

SEQ ID NO: 54744 - DNA, 25 bp, Probe sequence
aaccatttgaaagggaagtctaaga

SEQ ID NO: 54745 - DNA, 25 bp, Probe sequence
ccatttgaaagggaagtctaagagt

SEQ ID NO: 54746 - DNA, 25 bp, Probe sequence
accatttgaaagggaagtctaagag

SEQ ID NO: 54747 - DNA, 25 bp, Probe sequence
ttgaaagggaagtctaagagtagtc

SEQ ID NO: 54748 - DNA, 25 bp, Probe sequence
tgaaagggaagtctaagagtagtct

SEQ ID NO: 54749 - DNA, 25 bp, Probe sequence
tttgaaagggaagtctaagagtagt

SEQ ID NO: 54750 - DNA, 25 bp, Probe sequence
caaccatttgaaagggaagtctaag

SEQ ID NO: 54751 - DNA, 25 bp, Probe sequence
gaaagggaagtctaagagtagtcta

SEQ ID NO: 54752 - DNA, 25 bp, Probe sequence
catttgaaagggaagtctaagagta

SEQ ID NO: 54753 - DNA, 25 bp, Probe sequence
tcttagacttccctttcaaatggtt

SEQ ID NO: 54754 - DNA, 25 bp, Probe sequence
ctcttagacttccctttcaaatggt

SEQ ID NO: 54755 - DNA, 25 bp, Probe sequence
actcttagacttccctttcaaatgg

SEQ ID NO: 54756 - DNA, 25 bp, Probe sequence
gactactcttagacttccctttcaa

SEQ ID NO: 54757 - DNA, 25 bp, Probe sequence
actactcttagacttccctttcaaa

SEQ ID NO: 54758 - DNA, 25 bp, Probe sequence
agactactcttagacttccctttca

SEQ ID NO: 54759 - DNA, 25 bp, Probe sequence
cttagacttccctttcaaatggttg

SEQ ID NO: 54760 - DNA, 25 bp, Probe sequence
tactcttagacttccctttcaaatg

SEQ ID NO: 54761 - DNA, 25 bp, Probe sequence
tagactactcttagacttccctttc

SEQ ID NO: 54762 - DNA, 25 bp, Probe sequence
tcataaattgccatactcaactatt

SEQ ID NO: 54763 - DNA, 25 bp, Probe sequence
cataaattgccatactcaactattt

SEQ ID NO: 54764 - DNA, 25 bp, Probe sequence
attatttgaaaatagaggtgagcag

SEQ ID NO: 54765 - DNA, 25 bp, Probe sequence
aattatttgaaaatagaggtgagca

SEQ ID NO: 54766 - DNA, 25 bp, Probe sequence
caattatttgaaaatagaggtgagc

SEQ ID NO: 54767 - DNA, 25 bp, Probe sequence
gccatactcaactattttgaaaagt

SEQ ID NO: 54768 - DNA, 25 bp, Probe sequence
tgccatactcaactattttgaaaag

SEQ ID NO: 54769 - DNA, 25 bp, Probe sequence
ttgccatactcaactattttgaaaa

SEQ ID NO: 54770 - DNA, 25 bp, Probe sequence
taaattgccatactcaactattttg

SEQ ID NO: 54771 - DNA, 25 bp, Probe sequence
aatagttgagtatggcaatttatga

SEQ ID NO: 54772 - DNA, 25 bp, Probe sequence
aaatagttgagtatggcaatttatg

SEQ ID NO: 54773 - DNA, 25 bp, Probe sequence
ctgctcacctctattttcaaataat

SEQ ID NO: 54774 - DNA, 25 bp, Probe sequence
tgctcacctctattttcaaataatt

SEQ ID NO: 54775 - DNA, 25 bp, Probe sequence
gctcacctctattttcaaataattg

SEQ ID NO: 54776 - DNA, 25 bp, Probe sequence
cttttcaaaatagttgagtatggca

SEQ ID NO: 54777 - DNA, 25 bp, Probe sequence
acttttcaaaatagttgagtatggc

SEQ ID NO: 54778 - DNA, 25 bp, Probe sequence
caaaatagttgagtatggcaattta

SEQ ID NO: 54779 - DNA, 25 bp, Probe sequence
ttttcaaaatagttgagtatggcaa

SEQ ID NO: 54780 - DNA, 25 bp, Probe sequence
aacaaatagggaacaaggtgggatt

SEQ ID NO: 54781 - DNA, 25 bp, Probe sequence
aaacaaatagggaacaaggtgggat

SEQ ID NO: 54782 - DNA, 25 bp, Probe sequence
caaatagggaacaaggtgggatttc

SEQ ID NO: 54783 - DNA, 25 bp, Probe sequence
acaaatagggaacaaggtgggattt

SEQ ID NO: 54784 - DNA, 25 bp, Probe sequence
gcaaatgaaggcatagaagaaattt

SEQ ID NO: 54785 - DNA, 25 bp, Probe sequence
aaaacaaatagggaacaaggtggga

SEQ ID NO: 54786 - DNA, 25 bp, Probe sequence
tgcaaatgaaggcatagaagaaatt

SEQ ID NO: 54787 - DNA, 25 bp, Probe sequence
ttaagggagtgctcattcaggagtg

SEQ ID NO: 54788 - DNA, 25 bp, Probe sequence
gtccaaatttagttgcaaatgaagg

SEQ ID NO: 54789 - DNA, 25 bp, Probe sequence
atcccaccttgttccctatttgttt

SEQ ID NO: 54790 - DNA, 25 bp, Probe sequence
aatcccaccttgttccctatttgtt

SEQ ID NO: 54791 - DNA, 25 bp, Probe sequence
gaaatcccaccttgttccctatttg

SEQ ID NO: 54792 - DNA, 25 bp, Probe sequence
aaatcccaccttgttccctatttgt

SEQ ID NO: 54793 - DNA, 25 bp, Probe sequence
aaatttcttctatgccttcatttgc

SEQ ID NO: 54794 - DNA, 25 bp, Probe sequence
tcccaccttgttccctatttgtttt

SEQ ID NO: 54795 - DNA, 25 bp, Probe sequence
aatttcttctatgccttcatttgca

SEQ ID NO: 54796 - DNA, 25 bp, Probe sequence
cactcctgaatgagcactcccttaa

SEQ ID NO: 54797 - DNA, 25 bp, Probe sequence
ccttcatttgcaactaaatttggac

SEQ ID NO: 54798 - DNA, 25 bp, Probe sequence
ggaagttatacattttaaaaggagc

SEQ ID NO: 54799 - DNA, 25 bp, Probe sequence
gaagttatacattttaaaaggagca

SEQ ID NO: 54800 - DNA, 25 bp, Probe sequence
agttatacattttaaaaggagcaaa

SEQ ID NO: 54801 - DNA, 25 bp, Probe sequence
aagttatacattttaaaaggagcaa

SEQ ID NO: 54802 - DNA, 25 bp, Probe sequence
acattttaaaaggagcaaaattgaa

SEQ ID NO: 54803 - DNA, 25 bp, Probe sequence
aggaagttatacattttaaaaggag

SEQ ID NO: 54804 - DNA, 25 bp, Probe sequence
gaggaagttatacattttaaaagga

SEQ ID NO: 54805 - DNA, 25 bp, Probe sequence
agaggaagttatacattttaaaagg

SEQ ID NO: 54806 - DNA, 25 bp, Probe sequence
tacattttaaaaggagcaaaattga

SEQ ID NO: 54807 - DNA, 25 bp, Probe sequence
gctccttttaaaatgtataacttcc

SEQ ID NO: 54808 - DNA, 25 bp, Probe sequence
tgctccttttaaaatgtataacttc

SEQ ID NO: 54809 - DNA, 25 bp, Probe sequence
ttgctccttttaaaatgtataactt

SEQ ID NO: 54810 - DNA, 25 bp, Probe sequence
tttgctccttttaaaatgtataact

SEQ ID NO: 54811 - DNA, 25 bp, Probe sequence
ttcaattttgctccttttaaaatgt

SEQ ID NO: 54812 - DNA, 25 bp, Probe sequence
ccttttaaaatgtataacttcctct

SEQ ID NO: 54813 - DNA, 25 bp, Probe sequence
tccttttaaaatgtataacttcctc

SEQ ID NO: 54814 - DNA, 25 bp, Probe sequence
ctccttttaaaatgtataacttcct

SEQ ID NO: 54815 - DNA, 25 bp, Probe sequence
tcaattttgctccttttaaaatgta

SEQ ID NO: 54816 - DNA, 25 bp, Probe sequence
tatgtaaagcactatcctaagggtc

SEQ ID NO: 54817 - DNA, 25 bp, Probe sequence
atgtaaagcactatcctaagggtct

SEQ ID NO: 54818 - DNA, 25 bp, Probe sequence
gcactatcctaagggtctttaatca

SEQ ID NO: 54819 - DNA, 25 bp, Probe sequence
agcactatcctaagggtctttaatc

SEQ ID NO: 54820 - DNA, 25 bp, Probe sequence
aagcactatcctaagggtctttaat

SEQ ID NO: 54821 - DNA, 25 bp, Probe sequence
tgtaaagcactatcctaagggtctt

SEQ ID NO: 54822 - DNA, 25 bp, Probe sequence
atatgtaaagcactatcctaagggt

SEQ ID NO: 54823 - DNA, 25 bp, Probe sequence
cactatcctaagggtctttaatcat

SEQ ID NO: 54824 - DNA, 25 bp, Probe sequence
tatatgtaaagcactatcctaaggg

SEQ ID NO: 54825 - DNA, 25 bp, Probe sequence
gacccttaggatagtgctttacata

SEQ ID NO: 54826 - DNA, 25 bp, Probe sequence
agacccttaggatagtgctttacat

SEQ ID NO: 54827 - DNA, 25 bp, Probe sequence
tgattaaagacccttaggatagtgc

SEQ ID NO: 54828 - DNA, 25 bp, Probe sequence
gattaaagacccttaggatagtgct

SEQ ID NO: 54829 - DNA, 25 bp, Probe sequence
attaaagacccttaggatagtgctt

SEQ ID NO: 54830 - DNA, 25 bp, Probe sequence
aagacccttaggatagtgctttaca

SEQ ID NO: 54831 - DNA, 25 bp, Probe sequence
acccttaggatagtgctttacatat

SEQ ID NO: 54832 - DNA, 25 bp, Probe sequence
atgattaaagacccttaggatagtg

SEQ ID NO: 54833 - DNA, 25 bp, Probe sequence
cccttaggatagtgctttacatata

SEQ ID NO: 54834 - DNA, 25 bp, Probe sequence
aattgaacagattgtttgtgaaatt

SEQ ID NO: 54835 - DNA, 25 bp, Probe sequence
aaattgaacagattgtttgtgaaat

SEQ ID NO: 54836 - DNA, 25 bp, Probe sequence
taaattgaacagattgtttgtgaaa

SEQ ID NO: 54837 - DNA, 25 bp, Probe sequence
attgaacagattgtttgtgaaattt

SEQ ID NO: 54838 - DNA, 25 bp, Probe sequence
ataaattgaacagattgtttgtgaa

SEQ ID NO: 54839 - DNA, 25 bp, Probe sequence
agacgagtatgaaaatagttagatt

SEQ ID NO: 54840 - DNA, 25 bp, Probe sequence
aagacgagtatgaaaatagttagat

SEQ ID NO: 54841 - DNA, 25 bp, Probe sequence
acgagtatgaaaatagttagattct

SEQ ID NO: 54842 - DNA, 25 bp, Probe sequence
gacgagtatgaaaatagttagattc

SEQ ID NO: 54843 - DNA, 25 bp, Probe sequence
atttcacaaacaatctgttcaattt

SEQ ID NO: 54844 - DNA, 25 bp, Probe sequence
aatttcacaaacaatctgttcaatt

SEQ ID NO: 54845 - DNA, 25 bp, Probe sequence
tttcacaaacaatctgttcaattta

SEQ ID NO: 54846 - DNA, 25 bp, Probe sequence
aaatttcacaaacaatctgttcaat

SEQ ID NO: 54847 - DNA, 25 bp, Probe sequence
ttcacaaacaatctgttcaatttat

SEQ ID NO: 54848 - DNA, 25 bp, Probe sequence
atctaactattttcatactcgtctt

SEQ ID NO: 54849 - DNA, 25 bp, Probe sequence
aatctaactattttcatactcgtct

SEQ ID NO: 54850 - DNA, 25 bp, Probe sequence
agaatctaactattttcatactcgt

SEQ ID NO: 54851 - DNA, 25 bp, Probe sequence
gaatctaactattttcatactcgtc

SEQ ID NO: 54852 - DNA, 25 bp, Probe sequence
gtgaccaataaagagtatgaaatcg

SEQ ID NO: 54853 - DNA, 25 bp, Probe sequence
cgtgaccaataaagagtatgaaatc

SEQ ID NO: 54854 - DNA, 25 bp, Probe sequence
aataaagagtatgaaatcgaacccg

SEQ ID NO: 54855 - DNA, 25 bp, Probe sequence
acgtgaccaataaagagtatgaaat

SEQ ID NO: 54856 - DNA, 25 bp, Probe sequence
caataaagagtatgaaatcgaaccc

SEQ ID NO: 54857 - DNA, 25 bp, Probe sequence
ccaataaagagtatgaaatcgaacc

SEQ ID NO: 54858 - DNA, 25 bp, Probe sequence
tgaccaataaagagtatgaaatcga

SEQ ID NO: 54859 - DNA, 25 bp, Probe sequence
accaataaagagtatgaaatcgaac

SEQ ID NO: 54860 - DNA, 25 bp, Probe sequence
ataaagagtatgaaatcgaacccgg

SEQ ID NO: 54861 - DNA, 25 bp, Probe sequence
gatttcatactctttattggtcacg

SEQ ID NO: 54862 - DNA, 25 bp, Probe sequence
cgatttcatactctttattggtcac

SEQ ID NO: 54863 - DNA, 25 bp, Probe sequence
cgggttcgatttcatactctttatt

SEQ ID NO: 54864 - DNA, 25 bp, Probe sequence
atttcatactctttattggtcacgt

SEQ ID NO: 54865 - DNA, 25 bp, Probe sequence
tcgatttcatactctttattggtca

SEQ ID NO: 54866 - DNA, 25 bp, Probe sequence
ggttcgatttcatactctttattgg

SEQ ID NO: 54867 - DNA, 25 bp, Probe sequence
gggttcgatttcatactctttattg

SEQ ID NO: 54868 - DNA, 25 bp, Probe sequence
gttcgatttcatactctttattggt

SEQ ID NO: 54869 - DNA, 25 bp, Probe sequence
ccgggttcgatttcatactctttat

SEQ ID NO: 54870 - DNA, 25 bp, Probe sequence
tcaaattatgaaatcgatccaggaa

SEQ ID NO: 54871 - DNA, 25 bp, Probe sequence
caaattatgaaatcgatccaggaaa

SEQ ID NO: 54872 - DNA, 25 bp, Probe sequence
atcaaattatgaaatcgatccagga

SEQ ID NO: 54873 - DNA, 25 bp, Probe sequence
gatcaaattatgaaatcgatccagg

SEQ ID NO: 54874 - DNA, 25 bp, Probe sequence
aaattatgaaatcgatccaggaaaa

SEQ ID NO: 54875 - DNA, 25 bp, Probe sequence
catgattcgatcaaattatgaaatc

SEQ ID NO: 54876 - DNA, 25 bp, Probe sequence
atgattcgatcaaattatgaaatcg

SEQ ID NO: 54877 - DNA, 25 bp, Probe sequence
cgatcaaattatgaaatcgatccag

SEQ ID NO: 54878 - DNA, 25 bp, Probe sequence
tcatgattcgatcaaattatgaaat

SEQ ID NO: 54879 - DNA, 25 bp, Probe sequence
ttcctggatcgatttcataatttga

SEQ ID NO: 54880 - DNA, 25 bp, Probe sequence
tcctggatcgatttcataatttgat

SEQ ID NO: 54881 - DNA, 25 bp, Probe sequence
tttcctggatcgatttcataatttg

SEQ ID NO: 54882 - DNA, 25 bp, Probe sequence
cctggatcgatttcataatttgatc

SEQ ID NO: 54883 - DNA, 25 bp, Probe sequence
ttttcctggatcgatttcataattt

SEQ ID NO: 54884 - DNA, 25 bp, Probe sequence
gatttcataatttgatcgaatcatg

SEQ ID NO: 54885 - DNA, 25 bp, Probe sequence
cgatttcataatttgatcgaatcat

SEQ ID NO: 54886 - DNA, 25 bp, Probe sequence
ctggatcgatttcataatttgatcg

SEQ ID NO: 54887 - DNA, 25 bp, Probe sequence
atttcataatttgatcgaatcatga

SEQ ID NO: 54888 - DNA, 25 bp, Probe sequence
tcgtgactaataaagagtatgaaat

SEQ ID NO: 54889 - DNA, 25 bp, Probe sequence
gtgactaataaagagtatgaaatcg

SEQ ID NO: 54890 - DNA, 25 bp, Probe sequence
cgtgactaataaagagtatgaaatc

SEQ ID NO: 54891 - DNA, 25 bp, Probe sequence
tgactaataaagagtatgaaatcga

SEQ ID NO: 54892 - DNA, 25 bp, Probe sequence
atcgattcaaggaaacaaaataaaa

SEQ ID NO: 54893 - DNA, 25 bp, Probe sequence
atttcatactctttattagtcacga

SEQ ID NO: 54894 - DNA, 25 bp, Probe sequence
gatttcatactctttattagtcacg

SEQ ID NO: 54895 - DNA, 25 bp, Probe sequence
cgatttcatactctttattagtcac

SEQ ID NO: 54896 - DNA, 25 bp, Probe sequence
tcgatttcatactctttattagtca

SEQ ID NO: 54897 - DNA, 25 bp, Probe sequence
ttttattttgtttccttgaatcgat

SEQ ID NO: 54898 - DNA, 25 bp, Probe sequence
aaatatgaaatcaatccaggaaaga

SEQ ID NO: 54899 - DNA, 25 bp, Probe sequence
atgaaatcaatccaggaaagataat

SEQ ID NO: 54900 - DNA, 25 bp, Probe sequence
aatatgaaatcaatccaggaaagat

SEQ ID NO: 54901 - DNA, 25 bp, Probe sequence
tgaaatcaatccaggaaagataata

SEQ ID NO: 54902 - DNA, 25 bp, Probe sequence
tatgaaatcaatccaggaaagataa

SEQ ID NO: 54903 - DNA, 25 bp, Probe sequence
atatgaaatcaatccaggaaagata

SEQ ID NO: 54904 - DNA, 25 bp, Probe sequence
gaaatcaatccaggaaagataataa

SEQ ID NO: 54905 - DNA, 25 bp, Probe sequence
aaaatatgaaatcaatccaggaaag

SEQ ID NO: 54906 - DNA, 25 bp, Probe sequence
cgattaaaatatgaaatcaatccag

SEQ ID NO: 54907 - DNA, 25 bp, Probe sequence
tctttcctggattgatttcatattt

SEQ ID NO: 54908 - DNA, 25 bp, Probe sequence
atctttcctggattgatttcatatt

SEQ ID NO: 54909 - DNA, 25 bp, Probe sequence
attatctttcctggattgatttcat

SEQ ID NO: 54910 - DNA, 25 bp, Probe sequence
ttatctttcctggattgatttcata

SEQ ID NO: 54911 - DNA, 25 bp, Probe sequence
tattatctttcctggattgatttca

SEQ ID NO: 54912 - DNA, 25 bp, Probe sequence
tatctttcctggattgatttcatat

SEQ ID NO: 54913 - DNA, 25 bp, Probe sequence
ttattatctttcctggattgatttc

SEQ ID NO: 54914 - DNA, 25 bp, Probe sequence
ctttcctggattgatttcatatttt

SEQ ID NO: 54915 - DNA, 25 bp, Probe sequence
ctggattgatttcatattttaatcg

SEQ ID NO: 54916 - DNA, 25 bp, Probe sequence
acacgaatttcaaatatgttgctgt

SEQ ID NO: 54917 - DNA, 25 bp, Probe sequence
cacgaatttcaaatatgttgctgta

SEQ ID NO: 54918 - DNA, 25 bp, Probe sequence
acgaatttcaaatatgttgctgtaa

SEQ ID NO: 54919 - DNA, 25 bp, Probe sequence
acacgattcaacacgaatttcaaat

SEQ ID NO: 54920 - DNA, 25 bp, Probe sequence
cacgattcaacacgaatttcaaata

SEQ ID NO: 54921 - DNA, 25 bp, Probe sequence
cacacgattcaacacgaatttcaaa

SEQ ID NO: 54922 - DNA, 25 bp, Probe sequence
cgaatttcaaatatgttgctgtaaa

SEQ ID NO: 54923 - DNA, 25 bp, Probe sequence
acgattcaacacgaatttcaaatat

SEQ ID NO: 54924 - DNA, 25 bp, Probe sequence
cgattcaacacgaatttcaaatatg

SEQ ID NO: 54925 - DNA, 25 bp, Probe sequence
acagcaacatatttgaaattcgtgt

SEQ ID NO: 54926 - DNA, 25 bp, Probe sequence
tacagcaacatatttgaaattcgtg

SEQ ID NO: 54927 - DNA, 25 bp, Probe sequence
ttacagcaacatatttgaaattcgt

SEQ ID NO: 54928 - DNA, 25 bp, Probe sequence
atttgaaattcgtgttgaatcgtgt

SEQ ID NO: 54929 - DNA, 25 bp, Probe sequence
tatttgaaattcgtgttgaatcgtg

SEQ ID NO: 54930 - DNA, 25 bp, Probe sequence
tttgaaattcgtgttgaatcgtgtg

SEQ ID NO: 54931 - DNA, 25 bp, Probe sequence
tttacagcaacatatttgaaattcg

SEQ ID NO: 54932 - DNA, 25 bp, Probe sequence
atatttgaaattcgtgttgaatcgt

SEQ ID NO: 54933 - DNA, 25 bp, Probe sequence
catatttgaaattcgtgttgaatcg

SEQ ID NO: 54934 - DNA, 25 bp, Probe sequence
tgatgtaactaaggagatgaaggat

SEQ ID NO: 54935 - DNA, 25 bp, Probe sequence
atgatgtaactaaggagatgaagga

SEQ ID NO: 54936 - DNA, 25 bp, Probe sequence
tatgatgtaactaaggagatgaagg

SEQ ID NO: 54937 - DNA, 25 bp, Probe sequence
acatctctgttgttggcaatataaa

SEQ ID NO: 54938 - DNA, 25 bp, Probe sequence
catctctgttgttggcaatataaat

SEQ ID NO: 54939 - DNA, 25 bp, Probe sequence
aacatctctgttgttggcaatataa

SEQ ID NO: 54940 - DNA, 25 bp, Probe sequence
ttaacatctctgttgttggcaatat

SEQ ID NO: 54941 - DNA, 25 bp, Probe sequence
ttatgatgtaactaaggagatgaag

SEQ ID NO: 54942 - DNA, 25 bp, Probe sequence
taacatctctgttgttggcaatata

SEQ ID NO: 54943 - DNA, 25 bp, Probe sequence
tccttcatctccttagttacatcat

SEQ ID NO: 54944 - DNA, 25 bp, Probe sequence
atccttcatctccttagttacatca

SEQ ID NO: 54945 - DNA, 25 bp, Probe sequence
ccttcatctccttagttacatcata

SEQ ID NO: 54946 - DNA, 25 bp, Probe sequence
tttatattgccaacaacagagatgt

SEQ ID NO: 54947 - DNA, 25 bp, Probe sequence
atttatattgccaacaacagagatg

SEQ ID NO: 54948 - DNA, 25 bp, Probe sequence
atattgccaacaacagagatgttaa

SEQ ID NO: 54949 - DNA, 25 bp, Probe sequence
ttatattgccaacaacagagatgtt

SEQ ID NO: 54950 - DNA, 25 bp, Probe sequence
cttcatctccttagttacatcataa

SEQ ID NO: 54951 - DNA, 25 bp, Probe sequence
tatattgccaacaacagagatgtta

SEQ ID NO: 54952 - DNA, 25 bp, Probe sequence
aaatgaggaaatgtatagagcagtg

SEQ ID NO: 54953 - DNA, 25 bp, Probe sequence
aatgaggaaatgtatagagcagtgc

SEQ ID NO: 54954 - DNA, 25 bp, Probe sequence
taaatgaggaaatgtatagagcagt

SEQ ID NO: 54955 - DNA, 25 bp, Probe sequence
atgtatagagcagtgcatatagata

SEQ ID NO: 54956 - DNA, 25 bp, Probe sequence
aatgtatagagcagtgcatatagat

SEQ ID NO: 54957 - DNA, 25 bp, Probe sequence
gaggaaatgtatagagcagtgcata

SEQ ID NO: 54958 - DNA, 25 bp, Probe sequence
aggaaatgtatagagcagtgcatat

SEQ ID NO: 54959 - DNA, 25 bp, Probe sequence
tgtatagagcagtgcatatagataa

SEQ ID NO: 54960 - DNA, 25 bp, Probe sequence
atgaggaaatgtatagagcagtgca

SEQ ID NO: 54961 - DNA, 25 bp, Probe sequence
cactgctctatacatttcctcattt

SEQ ID NO: 54962 - DNA, 25 bp, Probe sequence
gcactgctctatacatttcctcatt

SEQ ID NO: 54963 - DNA, 25 bp, Probe sequence
actgctctatacatttcctcattta

SEQ ID NO: 54964 - DNA, 25 bp, Probe sequence
tatctatatgcactgctctatacat

SEQ ID NO: 54965 - DNA, 25 bp, Probe sequence
tatgcactgctctatacatttcctc

SEQ ID NO: 54966 - DNA, 25 bp, Probe sequence
atctatatgcactgctctatacatt

SEQ ID NO: 54967 - DNA, 25 bp, Probe sequence
atatgcactgctctatacatttcct

SEQ ID NO: 54968 - DNA, 25 bp, Probe sequence
ttatctatatgcactgctctataca

SEQ ID NO: 54969 - DNA, 25 bp, Probe sequence
tgcactgctctatacatttcctcat

SEQ ID NO: 54970 - DNA, 25 bp, Probe sequence
gatgttggattgaccttgtatatgc

SEQ ID NO: 54971 - DNA, 25 bp, Probe sequence
attgaccttgtatatgcctctgaat

SEQ ID NO: 54972 - DNA, 25 bp, Probe sequence
ttgaccttgtatatgcctctgaatc

SEQ ID NO: 54973 - DNA, 25 bp, Probe sequence
gattgaccttgtatatgcctctgaa

SEQ ID NO: 54974 - DNA, 25 bp, Probe sequence
cattgatgttggattgaccttgtat

SEQ ID NO: 54975 - DNA, 25 bp, Probe sequence
gaccttgtatatgcctctgaatctc

SEQ ID NO: 54976 - DNA, 25 bp, Probe sequence
ccttgtatatgcctctgaatctcta

SEQ ID NO: 54977 - DNA, 25 bp, Probe sequence
accttgtatatgcctctgaatctct

SEQ ID NO: 54978 - DNA, 25 bp, Probe sequence
tgaccttgtatatgcctctgaatct

SEQ ID NO: 54979 - DNA, 25 bp, Probe sequence
gcatatacaaggtcaatccaacatc

SEQ ID NO: 54980 - DNA, 25 bp, Probe sequence
attcagaggcatatacaaggtcaat

SEQ ID NO: 54981 - DNA, 25 bp, Probe sequence
ttcagaggcatatacaaggtcaatc

SEQ ID NO: 54982 - DNA, 25 bp, Probe sequence
gattcagaggcatatacaaggtcaa

SEQ ID NO: 54983 - DNA, 25 bp, Probe sequence
atacaaggtcaatccaacatcaatg

SEQ ID NO: 54984 - DNA, 25 bp, Probe sequence
gagattcagaggcatatacaaggtc

SEQ ID NO: 54985 - DNA, 25 bp, Probe sequence
agagattcagaggcatatacaaggt

SEQ ID NO: 54986 - DNA, 25 bp, Probe sequence
tagagattcagaggcatatacaagg

SEQ ID NO: 54987 - DNA, 25 bp, Probe sequence
agattcagaggcatatacaaggtca

SEQ ID NO: 54988 - DNA, 25 bp, Probe sequence
tttcacctcaaataagctttatatt

SEQ ID NO: 54989 - DNA, 25 bp, Probe sequence
ttcacctcaaataagctttatattt

SEQ ID NO: 54990 - DNA, 25 bp, Probe sequence
aatataaagcttatttgaggtgaaa

SEQ ID NO: 54991 - DNA, 25 bp, Probe sequence
aaatataaagcttatttgaggtgaa

SEQ ID NO: 54992 - DNA, 25 bp, Probe sequence
tctatcccactccatgatttgaaat

SEQ ID NO: 54993 - DNA, 25 bp, Probe sequence
ttctatcccactccatgatttgaaa

SEQ ID NO: 54994 - DNA, 25 bp, Probe sequence
ctatcccactccatgatttgaaatc

SEQ ID NO: 54995 - DNA, 25 bp, Probe sequence
cactccatgatttgaaatcaccaaa

SEQ ID NO: 54996 - DNA, 25 bp, Probe sequence
tatcccactccatgatttgaaatca

SEQ ID NO: 54997 - DNA, 25 bp, Probe sequence
actccatgatttgaaatcaccaaat

SEQ ID NO: 54998 - DNA, 25 bp, Probe sequence
atcccactccatgatttgaaatcac

SEQ ID NO: 54999 - DNA, 25 bp, Probe sequence
ccactccatgatttgaaatcaccaa

SEQ ID NO: 55000 - DNA, 25 bp, Probe sequence
ctccatgatttgaaatcaccaaata

SEQ ID NO: 55001 - DNA, 25 bp, Probe sequence
atttcaaatcatggagtgggataga

SEQ ID NO: 55002 - DNA, 25 bp, Probe sequence
tttcaaatcatggagtgggatagaa

SEQ ID NO: 55003 - DNA, 25 bp, Probe sequence
gatttcaaatcatggagtgggatag

SEQ ID NO: 55004 - DNA, 25 bp, Probe sequence
tgatttcaaatcatggagtgggata

SEQ ID NO: 55005 - DNA, 25 bp, Probe sequence
tttggtgatttcaaatcatggagtg

SEQ ID NO: 55006 - DNA, 25 bp, Probe sequence
atttggtgatttcaaatcatggagt

SEQ ID NO: 55007 - DNA, 25 bp, Probe sequence
gtgatttcaaatcatggagtgggat

SEQ ID NO: 55008 - DNA, 25 bp, Probe sequence
ttggtgatttcaaatcatggagtgg

SEQ ID NO: 55009 - DNA, 25 bp, Probe sequence
tatttggtgatttcaaatcatggag

SEQ ID NO: 55010 - DNA, 25 bp, Probe sequence
ccaccaagtcctttcgtattagaat

SEQ ID NO: 55011 - DNA, 25 bp, Probe sequence
atccaccaagtcctttcgtattaga

SEQ ID NO: 55012 - DNA, 25 bp, Probe sequence
tccaccaagtcctttcgtattagaa

SEQ ID NO: 55013 - DNA, 25 bp, Probe sequence
caccaagtcctttcgtattagaata

SEQ ID NO: 55014 - DNA, 25 bp, Probe sequence
attagaatacactcagactataccc

SEQ ID NO: 55015 - DNA, 25 bp, Probe sequence
ccaagtcctttcgtattagaataca

SEQ ID NO: 55016 - DNA, 25 bp, Probe sequence
accaagtcctttcgtattagaatac

SEQ ID NO: 55017 - DNA, 25 bp, Probe sequence
gtcctttcgtattagaatacactca

SEQ ID NO: 55018 - DNA, 25 bp, Probe sequence
agaatacactcagactatacccctt

SEQ ID NO: 55019 - DNA, 25 bp, Probe sequence
attctaatacgaaaggacttggtgg

SEQ ID NO: 55020 - DNA, 25 bp, Probe sequence
tctaatacgaaaggacttggtggat

SEQ ID NO: 55021 - DNA, 25 bp, Probe sequence
ttctaatacgaaaggacttggtgga

SEQ ID NO: 55022 - DNA, 25 bp, Probe sequence
tattctaatacgaaaggacttggtg

SEQ ID NO: 55023 - DNA, 25 bp, Probe sequence
gggtatagtctgagtgtattctaat

SEQ ID NO: 55024 - DNA, 25 bp, Probe sequence
gtattctaatacgaaaggacttggt

SEQ ID NO: 55025 - DNA, 25 bp, Probe sequence
tgtattctaatacgaaaggacttgg

SEQ ID NO: 55026 - DNA, 25 bp, Probe sequence
tgagtgtattctaatacgaaaggac

SEQ ID NO: 55027 - DNA, 25 bp, Probe sequence
aaggggtatagtctgagtgtattct

SEQ ID NO: 55028 - DNA, 25 bp, Probe sequence
actcctgacgcaattatagtatcat

SEQ ID NO: 55029 - DNA, 25 bp, Probe sequence
ctcctgacgcaattatagtatcatt

SEQ ID NO: 55030 - DNA, 25 bp, Probe sequence
ggatactcctgacgcaattatagta

SEQ ID NO: 55031 - DNA, 25 bp, Probe sequence
tactcctgacgcaattatagtatca

SEQ ID NO: 55032 - DNA, 25 bp, Probe sequence
cctgacgcaattatagtatcattac

SEQ ID NO: 55033 - DNA, 25 bp, Probe sequence
tcctgacgcaattatagtatcatta

SEQ ID NO: 55034 - DNA, 25 bp, Probe sequence
cggatactcctgacgcaattatagt

SEQ ID NO: 55035 - DNA, 25 bp, Probe sequence
ctgacgcaattatagtatcattaca

SEQ ID NO: 55036 - DNA, 25 bp, Probe sequence
cgaatcattatgtggcatgttaaac

SEQ ID NO: 55037 - DNA, 25 bp, Probe sequence
atgatactataattgcgtcaggagt

SEQ ID NO: 55038 - DNA, 25 bp, Probe sequence
aatgatactataattgcgtcaggag

SEQ ID NO: 55039 - DNA, 25 bp, Probe sequence
tactataattgcgtcaggagtatcc

SEQ ID NO: 55040 - DNA, 25 bp, Probe sequence
tgatactataattgcgtcaggagta

SEQ ID NO: 55041 - DNA, 25 bp, Probe sequence
taatgatactataattgcgtcagga

SEQ ID NO: 55042 - DNA, 25 bp, Probe sequence
gtaatgatactataattgcgtcagg

SEQ ID NO: 55043 - DNA, 25 bp, Probe sequence
actataattgcgtcaggagtatccg

SEQ ID NO: 55044 - DNA, 25 bp, Probe sequence
tgtaatgatactataattgcgtcag

SEQ ID NO: 55045 - DNA, 25 bp, Probe sequence
gtttaacatgccacataatgattcg

SEQ ID NO: 55046 - DNA, 25 bp, Probe sequence
cctgtcacatataggagtgttacat

SEQ ID NO: 55047 - DNA, 25 bp, Probe sequence
ttgaagcggattcctgatattatta

SEQ ID NO: 55048 - DNA, 25 bp, Probe sequence
ttgcctgtcacatataggagtgtta

SEQ ID NO: 55049 - DNA, 25 bp, Probe sequence
tgaagcggattcctgatattattat

SEQ ID NO: 55050 - DNA, 25 bp, Probe sequence
attgcctgtcacatataggagtgtt

SEQ ID NO: 55051 - DNA, 25 bp, Probe sequence
gcctgtcacatataggagtgttaca

SEQ ID NO: 55052 - DNA, 25 bp, Probe sequence
tgcctgtcacatataggagtgttac

SEQ ID NO: 55053 - DNA, 25 bp, Probe sequence
ctgtcacatataggagtgttacatt

SEQ ID NO: 55054 - DNA, 25 bp, Probe sequence
gattgcctgtcacatataggagtgt

SEQ ID NO: 55055 - DNA, 25 bp, Probe sequence
atgtaacactcctatatgtgacagg

SEQ ID NO: 55056 - DNA, 25 bp, Probe sequence
taataatatcaggaatccgcttcaa

SEQ ID NO: 55057 - DNA, 25 bp, Probe sequence
taacactcctatatgtgacaggcaa

SEQ ID NO: 55058 - DNA, 25 bp, Probe sequence
ataataatatcaggaatccgcttca

SEQ ID NO: 55059 - DNA, 25 bp, Probe sequence
aacactcctatatgtgacaggcaat

SEQ ID NO: 55060 - DNA, 25 bp, Probe sequence
gtaacactcctatatgtgacaggca

SEQ ID NO: 55061 - DNA, 25 bp, Probe sequence
tgtaacactcctatatgtgacaggc

SEQ ID NO: 55062 - DNA, 25 bp, Probe sequence
aatgtaacactcctatatgtgacag

SEQ ID NO: 55063 - DNA, 25 bp, Probe sequence
acactcctatatgtgacaggcaatc

SEQ ID NO: 55064 - DNA, 25 bp, Probe sequence
aatgagcatcttgtctagttcgatt

SEQ ID NO: 55065 - DNA, 25 bp, Probe sequence
caatgagcatcttgtctagttcgat

SEQ ID NO: 55066 - DNA, 25 bp, Probe sequence
aatgttgtcacttggattcaaatga

SEQ ID NO: 55067 - DNA, 25 bp, Probe sequence
taatgttgtcacttggattcaaatg

SEQ ID NO: 55068 - DNA, 25 bp, Probe sequence
atgagcatcttgtctagttcgattt

SEQ ID NO: 55069 - DNA, 25 bp, Probe sequence
aataatgttgtcacttggattcaaa

SEQ ID NO: 55070 - DNA, 25 bp, Probe sequence
aaataatgttgtcacttggattcaa

SEQ ID NO: 55071 - DNA, 25 bp, Probe sequence
ataatgttgtcacttggattcaaat

SEQ ID NO: 55072 - DNA, 25 bp, Probe sequence
gcaatgagcatcttgtctagttcga

SEQ ID NO: 55073 - DNA, 25 bp, Probe sequence
aatcgaactagacaagatgctcatt

SEQ ID NO: 55074 - DNA, 25 bp, Probe sequence
atcgaactagacaagatgctcattg

SEQ ID NO: 55075 - DNA, 25 bp, Probe sequence
tcatttgaatccaagtgacaacatt

SEQ ID NO: 55076 - DNA, 25 bp, Probe sequence
catttgaatccaagtgacaacatta

SEQ ID NO: 55077 - DNA, 25 bp, Probe sequence
aaatcgaactagacaagatgctcat

SEQ ID NO: 55078 - DNA, 25 bp, Probe sequence
ttgaatccaagtgacaacattattt

SEQ ID NO: 55079 - DNA, 25 bp, Probe sequence
tttgaatccaagtgacaacattatt

SEQ ID NO: 55080 - DNA, 25 bp, Probe sequence
atttgaatccaagtgacaacattat

SEQ ID NO: 55081 - DNA, 25 bp, Probe sequence
tcgaactagacaagatgctcattgc

SEQ ID NO: 55082 - DNA, 25 bp, Probe sequence
atctatcgttgtgtattgtttgttt

SEQ ID NO: 55083 - DNA, 25 bp, Probe sequence
tatctatcgttgtgtattgtttgtt

SEQ ID NO: 55084 - DNA, 25 bp, Probe sequence
atatctatcgttgtgtattgtttgt

SEQ ID NO: 55085 - DNA, 25 bp, Probe sequence
tcaaataagaatgtgttaatcaacg

SEQ ID NO: 55086 - DNA, 25 bp, Probe sequence
atgatatctatcgttgtgtattgtt

SEQ ID NO: 55087 - DNA, 25 bp, Probe sequence
aatgatatctatcgttgtgtattgt

SEQ ID NO: 55088 - DNA, 25 bp, Probe sequence
caaataagaatgtgttaatcaacgt

SEQ ID NO: 55089 - DNA, 25 bp, Probe sequence
tgatatctatcgttgtgtattgttt

SEQ ID NO: 55090 - DNA, 25 bp, Probe sequence
gatatctatcgttgtgtattgtttg

SEQ ID NO: 55091 - DNA, 25 bp, Probe sequence
aaacaaacaatacacaacgatagat

SEQ ID NO: 55092 - DNA, 25 bp, Probe sequence
aacaaacaatacacaacgatagata

SEQ ID NO: 55093 - DNA, 25 bp, Probe sequence
acaaacaatacacaacgatagatat

SEQ ID NO: 55094 - DNA, 25 bp, Probe sequence
cgttgattaacacattcttatttga

SEQ ID NO: 55095 - DNA, 25 bp, Probe sequence
acaatacacaacgatagatatcatt

SEQ ID NO: 55096 - DNA, 25 bp, Probe sequence
aacaatacacaacgatagatatcat

SEQ ID NO: 55097 - DNA, 25 bp, Probe sequence
acgttgattaacacattcttatttg

SEQ ID NO: 55098 - DNA, 25 bp, Probe sequence
aaacaatacacaacgatagatatca

SEQ ID NO: 55099 - DNA, 25 bp, Probe sequence
caaacaatacacaacgatagatatc

SEQ ID NO: 55100 - DNA, 25 bp, Probe sequence
aagttgttcattatgtgctgaggtt

SEQ ID NO: 55101 - DNA, 25 bp, Probe sequence
gctttgaatgtgctgaggtttaatt

SEQ ID NO: 55102 - DNA, 25 bp, Probe sequence
ttgaatgtgctgaggtttaatttcg

SEQ ID NO: 55103 - DNA, 25 bp, Probe sequence
ctttgaatgtgctgaggtttaattt

SEQ ID NO: 55104 - DNA, 25 bp, Probe sequence
agaaagttgttcattatgtgctgag

SEQ ID NO: 55105 - DNA, 25 bp, Probe sequence
aatgtgctgaggtttaatttcggaa

SEQ ID NO: 55106 - DNA, 25 bp, Probe sequence
gaaagttgttcattatgtgctgagg

SEQ ID NO: 55107 - DNA, 25 bp, Probe sequence
tttgaatgtgctgaggtttaatttc

SEQ ID NO: 55108 - DNA, 25 bp, Probe sequence
agttgttcattatgtgctgaggttt

SEQ ID NO: 55109 - DNA, 25 bp, Probe sequence
aacctcagcacataatgaacaactt

SEQ ID NO: 55110 - DNA, 25 bp, Probe sequence
aattaaacctcagcacattcaaagc

SEQ ID NO: 55111 - DNA, 25 bp, Probe sequence
cgaaattaaacctcagcacattcaa

SEQ ID NO: 55112 - DNA, 25 bp, Probe sequence
aaattaaacctcagcacattcaaag

SEQ ID NO: 55113 - DNA, 25 bp, Probe sequence
ctcagcacataatgaacaactttct

SEQ ID NO: 55114 - DNA, 25 bp, Probe sequence
ttccgaaattaaacctcagcacatt

SEQ ID NO: 55115 - DNA, 25 bp, Probe sequence
cctcagcacataatgaacaactttc

SEQ ID NO: 55116 - DNA, 25 bp, Probe sequence
gaaattaaacctcagcacattcaaa

SEQ ID NO: 55117 - DNA, 25 bp, Probe sequence
acctcagcacataatgaacaacttt

SEQ ID NO: 55118 - DNA, 25 bp, Probe sequence
agaatatgagtcggtgttatttgta

SEQ ID NO: 55119 - DNA, 25 bp, Probe sequence
tagaatatgagtcggtgttatttgt

SEQ ID NO: 55120 - DNA, 25 bp, Probe sequence
gaatatgagtcggtgttatttgtat

SEQ ID NO: 55121 - DNA, 25 bp, Probe sequence
tagctaacttcgttgtgaggtcatt

SEQ ID NO: 55122 - DNA, 25 bp, Probe sequence
tcgttgtgaggtcattttgttttaa

SEQ ID NO: 55123 - DNA, 25 bp, Probe sequence
ttcgttgtgaggtcattttgtttta

SEQ ID NO: 55124 - DNA, 25 bp, Probe sequence
atagaatatgagtcggtgttatttg

SEQ ID NO: 55125 - DNA, 25 bp, Probe sequence
cgttgtgaggtcattttgttttaat

SEQ ID NO: 55126 - DNA, 25 bp, Probe sequence
cttcgttgtgaggtcattttgtttt

SEQ ID NO: 55127 - DNA, 25 bp, Probe sequence
acaaataacaccgactcatattcta

SEQ ID NO: 55128 - DNA, 25 bp, Probe sequence
tacaaataacaccgactcatattct

SEQ ID NO: 55129 - DNA, 25 bp, Probe sequence
atacaaataacaccgactcatattc

SEQ ID NO: 55130 - DNA, 25 bp, Probe sequence
aatgacctcacaacgaagttagcta

SEQ ID NO: 55131 - DNA, 25 bp, Probe sequence
taaaacaaaatgacctcacaacgaa

SEQ ID NO: 55132 - DNA, 25 bp, Probe sequence
ttaaaacaaaatgacctcacaacga

SEQ ID NO: 55133 - DNA, 25 bp, Probe sequence
caaataacaccgactcatattctat

SEQ ID NO: 55134 - DNA, 25 bp, Probe sequence
aaaacaaaatgacctcacaacgaag

SEQ ID NO: 55135 - DNA, 25 bp, Probe sequence
attaaaacaaaatgacctcacaacg

SEQ ID NO: 55136 - DNA, 25 bp, Probe sequence
aattagcctccttcgtgatgtatga

SEQ ID NO: 55137 - DNA, 25 bp, Probe sequence
ttcgtgatgtatgacaatgagaatc

SEQ ID NO: 55138 - DNA, 25 bp, Probe sequence
cttcgtgatgtatgacaatgagaat

SEQ ID NO: 55139 - DNA, 25 bp, Probe sequence
taattagcctccttcgtgatgtatg

SEQ ID NO: 55140 - DNA, 25 bp, Probe sequence
ccttcgtgatgtatgacaatgagaa

SEQ ID NO: 55141 - DNA, 25 bp, Probe sequence
attagcctccttcgtgatgtatgac

SEQ ID NO: 55142 - DNA, 25 bp, Probe sequence
ctccttcgtgatgtatgacaatgag

SEQ ID NO: 55143 - DNA, 25 bp, Probe sequence
tccttcgtgatgtatgacaatgaga

SEQ ID NO: 55144 - DNA, 25 bp, Probe sequence
cctccttcgtgatgtatgacaatga

SEQ ID NO: 55145 - DNA, 25 bp, Probe sequence
tcatacatcacgaaggaggctaatt

SEQ ID NO: 55146 - DNA, 25 bp, Probe sequence
attctcattgtcatacatcacgaag

SEQ ID NO: 55147 - DNA, 25 bp, Probe sequence
gattctcattgtcatacatcacgaa

SEQ ID NO: 55148 - DNA, 25 bp, Probe sequence
catacatcacgaaggaggctaatta

SEQ ID NO: 55149 - DNA, 25 bp, Probe sequence
ttctcattgtcatacatcacgaagg

SEQ ID NO: 55150 - DNA, 25 bp, Probe sequence
gtcatacatcacgaaggaggctaat

SEQ ID NO: 55151 - DNA, 25 bp, Probe sequence
ctcattgtcatacatcacgaaggag

SEQ ID NO: 55152 - DNA, 25 bp, Probe sequence
tctcattgtcatacatcacgaagga

SEQ ID NO: 55153 - DNA, 25 bp, Probe sequence
tcattgtcatacatcacgaaggagg

SEQ ID NO: 55154 - DNA, 25 bp, Probe sequence
tgatgatttagcgtattgatagcga

SEQ ID NO: 55155 - DNA, 25 bp, Probe sequence
tgtgatgttgagggaaatatgatga

SEQ ID NO: 55156 - DNA, 25 bp, Probe sequence
actgtgatgttgagggaaatatgat

SEQ ID NO: 55157 - DNA, 25 bp, Probe sequence
ctgtgatgttgagggaaatatgatg

SEQ ID NO: 55158 - DNA, 25 bp, Probe sequence
gatgatttagcgtattgatagcgaa

SEQ ID NO: 55159 - DNA, 25 bp, Probe sequence
atgatgatttagcgtattgatagcg

SEQ ID NO: 55160 - DNA, 25 bp, Probe sequence
tactgtgatgttgagggaaatatga

SEQ ID NO: 55161 - DNA, 25 bp, Probe sequence
atgatttagcgtattgatagcgaaa

SEQ ID NO: 55162 - DNA, 25 bp, Probe sequence
gtgatgttgagggaaatatgatgat

SEQ ID NO: 55163 - DNA, 25 bp, Probe sequence
atcatatttccctcaacatcacagt

SEQ ID NO: 55164 - DNA, 25 bp, Probe sequence
tcatcatatttccctcaacatcaca

SEQ ID NO: 55165 - DNA, 25 bp, Probe sequence
tcgctatcaatacgctaaatcatca

SEQ ID NO: 55166 - DNA, 25 bp, Probe sequence
catcatatttccctcaacatcacag

SEQ ID NO: 55167 - DNA, 25 bp, Probe sequence
cgctatcaatacgctaaatcatcat

SEQ ID NO: 55168 - DNA, 25 bp, Probe sequence
ttcgctatcaatacgctaaatcatc

SEQ ID NO: 55169 - DNA, 25 bp, Probe sequence
tcatatttccctcaacatcacagta

SEQ ID NO: 55170 - DNA, 25 bp, Probe sequence
tttcgctatcaatacgctaaatcat

SEQ ID NO: 55171 - DNA, 25 bp, Probe sequence
atcatcatatttccctcaacatcac

SEQ ID NO: 55172 - DNA, 25 bp, Probe sequence
ttgttaaatggagctacctttgttg

SEQ ID NO: 55173 - DNA, 25 bp, Probe sequence
aaatggagctacctttgttgtacta

SEQ ID NO: 55174 - DNA, 25 bp, Probe sequence
taaatggagctacctttgttgtact

SEQ ID NO: 55175 - DNA, 25 bp, Probe sequence
tttaaacgcattgccaatcactaat

SEQ ID NO: 55176 - DNA, 25 bp, Probe sequence
atttaaacgcattgccaatcactaa

SEQ ID NO: 55177 - DNA, 25 bp, Probe sequence
ggagctacctttgttgtactattca

SEQ ID NO: 55178 - DNA, 25 bp, Probe sequence
tggagctacctttgttgtactattc

SEQ ID NO: 55179 - DNA, 25 bp, Probe sequence
atggagctacctttgttgtactatt

SEQ ID NO: 55180 - DNA, 25 bp, Probe sequence
aatggagctacctttgttgtactat

SEQ ID NO: 55181 - DNA, 25 bp, Probe sequence
caacaaaggtagctccatttaacaa

SEQ ID NO: 55182 - DNA, 25 bp, Probe sequence
ttagtgattggcaatgcgtttaaat

SEQ ID NO: 55183 - DNA, 25 bp, Probe sequence
attagtgattggcaatgcgtttaaa

SEQ ID NO: 55184 - DNA, 25 bp, Probe sequence
agtacaacaaaggtagctccattta

SEQ ID NO: 55185 - DNA, 25 bp, Probe sequence
tagtacaacaaaggtagctccattt

SEQ ID NO: 55186 - DNA, 25 bp, Probe sequence
atagtacaacaaaggtagctccatt

SEQ ID NO: 55187 - DNA, 25 bp, Probe sequence
aatagtacaacaaaggtagctccat

SEQ ID NO: 55188 - DNA, 25 bp, Probe sequence
gaatagtacaacaaaggtagctcca

SEQ ID NO: 55189 - DNA, 25 bp, Probe sequence
tgaatagtacaacaaaggtagctcc

SEQ ID NO: 55190 - DNA, 25 bp, Probe sequence
tttaatgtataaatgaggtggaaga

SEQ ID NO: 55191 - DNA, 25 bp, Probe sequence
ttaatgtataaatgaggtggaagat

SEQ ID NO: 55192 - DNA, 25 bp, Probe sequence
ttttaatgtataaatgaggtggaag

SEQ ID NO: 55193 - DNA, 25 bp, Probe sequence
tcttccacctcatttatacattaaa

SEQ ID NO: 55194 - DNA, 25 bp, Probe sequence
atcttccacctcatttatacattaa

SEQ ID NO: 55195 - DNA, 25 bp, Probe sequence
cttccacctcatttatacattaaaa

SEQ ID NO: 55196 - DNA, 25 bp, Probe sequence
tctgatgagatagccatgttaagaa

SEQ ID NO: 55197 - DNA, 25 bp, Probe sequence
attgttacagtataacgaggaatcc

SEQ ID NO: 55198 - DNA, 25 bp, Probe sequence
gagacagtatcaaatggcattaaga

SEQ ID NO: 55199 - DNA, 25 bp, Probe sequence
atctgatgagatagccatgttaaga

SEQ ID NO: 55200 - DNA, 25 bp, Probe sequence
catctgatgagatagccatgttaag

SEQ ID NO: 55201 - DNA, 25 bp, Probe sequence
agacagtatcaaatggcattaagaa

SEQ ID NO: 55202 - DNA, 25 bp, Probe sequence
tgagacagtatcaaatggcattaag

SEQ ID NO: 55203 - DNA, 25 bp, Probe sequence
gaaatatgtgccatcattgatttgc

SEQ ID NO: 55204 - DNA, 25 bp, Probe sequence
ttacagtataacgaggaatcccttg

SEQ ID NO: 55205 - DNA, 25 bp, Probe sequence
ttcttaacatggctatctcatcaga

SEQ ID NO: 55206 - DNA, 25 bp, Probe sequence
ggattcctcgttatactgtaacaat

SEQ ID NO: 55207 - DNA, 25 bp, Probe sequence
tcttaatgccatttgatactgtctc

SEQ ID NO: 55208 - DNA, 25 bp, Probe sequence
cttaacatggctatctcatcagatg

SEQ ID NO: 55209 - DNA, 25 bp, Probe sequence
tcttaacatggctatctcatcagat

SEQ ID NO: 55210 - DNA, 25 bp, Probe sequence
ttcttaatgccatttgatactgtct

SEQ ID NO: 55211 - DNA, 25 bp, Probe sequence
cttaatgccatttgatactgtctca

SEQ ID NO: 55212 - DNA, 25 bp, Probe sequence
gcaaatcaatgatggcacatatttc

SEQ ID NO: 55213 - DNA, 25 bp, Probe sequence
caagggattcctcgttatactgtaa

SEQ ID NO: 55214 - DNA, 25 bp, Probe sequence
tcggtaacgctatactttagaaatt

SEQ ID NO: 55215 - DNA, 25 bp, Probe sequence
atcggtaacgctatactttagaaat

SEQ ID NO: 55216 - DNA, 25 bp, Probe sequence
tatcggtaacgctatactttagaaa

SEQ ID NO: 55217 - DNA, 25 bp, Probe sequence
gtatcggtaacgctatactttagaa

SEQ ID NO: 55218 - DNA, 25 bp, Probe sequence
cggtaacgctatactttagaaattt

SEQ ID NO: 55219 - DNA, 25 bp, Probe sequence
taaaagcgggaaacaaaagcagtta

SEQ ID NO: 55220 - DNA, 25 bp, Probe sequence
ttctctttaaaagcgggaaacaaaa

SEQ ID NO: 55221 - DNA, 25 bp, Probe sequence
attctctttaaaagcgggaaacaaa

SEQ ID NO: 55222 - DNA, 25 bp, Probe sequence
aattctctttaaaagcgggaaacaa

SEQ ID NO: 55223 - DNA, 25 bp, Probe sequence
aatttctaaagtatagcgttaccga

SEQ ID NO: 55224 - DNA, 25 bp, Probe sequence
atttctaaagtatagcgttaccgat

SEQ ID NO: 55225 - DNA, 25 bp, Probe sequence
tttctaaagtatagcgttaccgata

SEQ ID NO: 55226 - DNA, 25 bp, Probe sequence
ttctaaagtatagcgttaccgatac

SEQ ID NO: 55227 - DNA, 25 bp, Probe sequence
aaatttctaaagtatagcgttaccg

SEQ ID NO: 55228 - DNA, 25 bp, Probe sequence
taactgcttttgtttcccgctttta

SEQ ID NO: 55229 - DNA, 25 bp, Probe sequence
ttgtttcccgcttttaaagagaatt

SEQ ID NO: 55230 - DNA, 25 bp, Probe sequence
tttgtttcccgcttttaaagagaat

SEQ ID NO: 55231 - DNA, 25 bp, Probe sequence
ttttgtttcccgcttttaaagagaa

SEQ ID NO: 55232 - DNA, 25 bp, Probe sequence
aacttaatataattgaggtggagca

SEQ ID NO: 55233 - DNA, 25 bp, Probe sequence
acttaatataattgaggtggagcat

SEQ ID NO: 55234 - DNA, 25 bp, Probe sequence
cttaatataattgaggtggagcatt

SEQ ID NO: 55235 - DNA, 25 bp, Probe sequence
ataattgaggtggagcatttacaag

SEQ ID NO: 55236 - DNA, 25 bp, Probe sequence
taattgaggtggagcatttacaagg

SEQ ID NO: 55237 - DNA, 25 bp, Probe sequence
atataattgaggtggagcatttaca

SEQ ID NO: 55238 - DNA, 25 bp, Probe sequence
tataattgaggtggagcatttacaa

SEQ ID NO: 55239 - DNA, 25 bp, Probe sequence
taacttaatataattgaggtggagc

SEQ ID NO: 55240 - DNA, 25 bp, Probe sequence
aatataattgaggtggagcatttac

SEQ ID NO: 55241 - DNA, 25 bp, Probe sequence
tgctccacctcaattatattaagtt

SEQ ID NO: 55242 - DNA, 25 bp, Probe sequence
atgctccacctcaattatattaagt

SEQ ID NO: 55243 - DNA, 25 bp, Probe sequence
aatgctccacctcaattatattaag

SEQ ID NO: 55244 - DNA, 25 bp, Probe sequence
cttgtaaatgctccacctcaattat

SEQ ID NO: 55245 - DNA, 25 bp, Probe sequence
ccttgtaaatgctccacctcaatta

SEQ ID NO: 55246 - DNA, 25 bp, Probe sequence
tgtaaatgctccacctcaattatat

SEQ ID NO: 55247 - DNA, 25 bp, Probe sequence
ttgtaaatgctccacctcaattata

SEQ ID NO: 55248 - DNA, 25 bp, Probe sequence
gctccacctcaattatattaagtta

SEQ ID NO: 55249 - DNA, 25 bp, Probe sequence
gtaaatgctccacctcaattatatt

SEQ ID NO: 55250 - DNA, 25 bp, Probe sequence
cgtgtgattatctgagcgagcctag

SEQ ID NO: 55251 - DNA, 25 bp, Probe sequence
aaatcgtgtgattatctgagcgagc

SEQ ID NO: 55252 - DNA, 25 bp, Probe sequence
aaaatcgtgtgattatctgagcgag

SEQ ID NO: 55253 - DNA, 25 bp, Probe sequence
aatcgtgtgattatctgagcgagcc

SEQ ID NO: 55254 - DNA, 25 bp, Probe sequence
ctaggctcgctcagataatcacacg

SEQ ID NO: 55255 - DNA, 25 bp, Probe sequence
gctcgctcagataatcacacgattt

SEQ ID NO: 55256 - DNA, 25 bp, Probe sequence
ctcgctcagataatcacacgatttt

SEQ ID NO: 55257 - DNA, 25 bp, Probe sequence
ggctcgctcagataatcacacgatt

SEQ ID NO: 55258 - DNA, 25 bp, Probe sequence
accaactccctaaatagtcatcaaa

SEQ ID NO: 55259 - DNA, 25 bp, Probe sequence
taccaactccctaaatagtcatcaa

SEQ ID NO: 55260 - DNA, 25 bp, Probe sequence
ttaccaactccctaaatagtcatca

SEQ ID NO: 55261 - DNA, 25 bp, Probe sequence
ttcttaccaactccctaaatagtca

SEQ ID NO: 55262 - DNA, 25 bp, Probe sequence
tcttaccaactccctaaatagtcat

SEQ ID NO: 55263 - DNA, 25 bp, Probe sequence
cttaccaactccctaaatagtcatc

SEQ ID NO: 55264 - DNA, 25 bp, Probe sequence
tttcttaccaactccctaaatagtc

SEQ ID NO: 55265 - DNA, 25 bp, Probe sequence
ccatttcttaccaactccctaaata

SEQ ID NO: 55266 - DNA, 25 bp, Probe sequence
atttcttaccaactccctaaatagt

SEQ ID NO: 55267 - DNA, 25 bp, Probe sequence
tttgatgactatttagggagttggt

SEQ ID NO: 55268 - DNA, 25 bp, Probe sequence
tgatgactatttagggagttggtaa

SEQ ID NO: 55269 - DNA, 25 bp, Probe sequence
ttgatgactatttagggagttggta

SEQ ID NO: 55270 - DNA, 25 bp, Probe sequence
tgactatttagggagttggtaagaa

SEQ ID NO: 55271 - DNA, 25 bp, Probe sequence
atgactatttagggagttggtaaga

SEQ ID NO: 55272 - DNA, 25 bp, Probe sequence
gatgactatttagggagttggtaag

SEQ ID NO: 55273 - DNA, 25 bp, Probe sequence
gactatttagggagttggtaagaaa

SEQ ID NO: 55274 - DNA, 25 bp, Probe sequence
tatttagggagttggtaagaaatgg

SEQ ID NO: 55275 - DNA, 25 bp, Probe sequence
actatttagggagttggtaagaaat

SEQ ID NO: 55276 - DNA, 25 bp, Probe sequence
acaaggttagtagctgtaactgtaa

SEQ ID NO: 55277 - DNA, 25 bp, Probe sequence
atacaaggttagtagctgtaactgt

SEQ ID NO: 55278 - DNA, 25 bp, Probe sequence
gtagacaacctccataaagttactt

SEQ ID NO: 55279 - DNA, 25 bp, Probe sequence
tacaaggttagtagctgtaactgta

SEQ ID NO: 55280 - DNA, 25 bp, Probe sequence
gttacttaatcactctcatcataca

SEQ ID NO: 55281 - DNA, 25 bp, Probe sequence
agacaacctccataaagttacttaa

SEQ ID NO: 55282 - DNA, 25 bp, Probe sequence
agttacttaatcactctcatcatac

SEQ ID NO: 55283 - DNA, 25 bp, Probe sequence
tatacaaggttagtagctgtaactg

SEQ ID NO: 55284 - DNA, 25 bp, Probe sequence
acctccataaagttacttaatcact

SEQ ID NO: 55285 - DNA, 25 bp, Probe sequence
ttacagttacagctactaaccttgt

SEQ ID NO: 55286 - DNA, 25 bp, Probe sequence
acagttacagctactaaccttgtat

SEQ ID NO: 55287 - DNA, 25 bp, Probe sequence
aagtaactttatggaggttgtctac

SEQ ID NO: 55288 - DNA, 25 bp, Probe sequence
tacagttacagctactaaccttgta

SEQ ID NO: 55289 - DNA, 25 bp, Probe sequence
tgtatgatgagagtgattaagtaac

SEQ ID NO: 55290 - DNA, 25 bp, Probe sequence
ttaagtaactttatggaggttgtct

SEQ ID NO: 55291 - DNA, 25 bp, Probe sequence
gtatgatgagagtgattaagtaact

SEQ ID NO: 55292 - DNA, 25 bp, Probe sequence
cagttacagctactaaccttgtata

SEQ ID NO: 55293 - DNA, 25 bp, Probe sequence
agtgattaagtaactttatggaggt

SEQ ID NO: 55294 - DNA, 25 bp, Probe sequence
gagattatataacacgaggagtagt

SEQ ID NO: 55295 - DNA, 25 bp, Probe sequence
agagattatataacacgaggagtag

SEQ ID NO: 55296 - DNA, 25 bp, Probe sequence
aagagattatataacacgaggagta

SEQ ID NO: 55297 - DNA, 25 bp, Probe sequence
ttatataacacgaggagtagtaagt

SEQ ID NO: 55298 - DNA, 25 bp, Probe sequence
aaagagattatataacacgaggagt

SEQ ID NO: 55299 - DNA, 25 bp, Probe sequence
agattatataacacgaggagtagta

SEQ ID NO: 55300 - DNA, 25 bp, Probe sequence
attatataacacgaggagtagtaag

SEQ ID NO: 55301 - DNA, 25 bp, Probe sequence
gattatataacacgaggagtagtaa

SEQ ID NO: 55302 - DNA, 25 bp, Probe sequence
taaagagattatataacacgaggag

SEQ ID NO: 55303 - DNA, 25 bp, Probe sequence
cgcgagatatattcgtatttatagt

SEQ ID NO: 55304 - DNA, 25 bp, Probe sequence
actactcctcgtgttatataatctc

SEQ ID NO: 55305 - DNA, 25 bp, Probe sequence
ctactcctcgtgttatataatctct

SEQ ID NO: 55306 - DNA, 25 bp, Probe sequence
tactcctcgtgttatataatctctt

SEQ ID NO: 55307 - DNA, 25 bp, Probe sequence
acttactactcctcgtgttatataa

SEQ ID NO: 55308 - DNA, 25 bp, Probe sequence
actcctcgtgttatataatctcttt

SEQ ID NO: 55309 - DNA, 25 bp, Probe sequence
tactactcctcgtgttatataatct

SEQ ID NO: 55310 - DNA, 25 bp, Probe sequence
ttactactcctcgtgttatataatc

SEQ ID NO: 55311 - DNA, 25 bp, Probe sequence
cttactactcctcgtgttatataat

SEQ ID NO: 55312 - DNA, 25 bp, Probe sequence
ctcctcgtgttatataatctcttta

SEQ ID NO: 55313 - DNA, 25 bp, Probe sequence
actataaatacgaatatatctcgcg

SEQ ID NO: 55314 - DNA, 25 bp, Probe sequence
cggtaggacctcttatttaggagta

SEQ ID NO: 55315 - DNA, 25 bp, Probe sequence
tataatagagaaacgtgacggtagg

SEQ ID NO: 55316 - DNA, 25 bp, Probe sequence
ataatagagaaacgtgacggtagga

SEQ ID NO: 55317 - DNA, 25 bp, Probe sequence
gacggtaggacctcttatttaggag

SEQ ID NO: 55318 - DNA, 25 bp, Probe sequence
taggacctcttatttaggagtatcc

SEQ ID NO: 55319 - DNA, 25 bp, Probe sequence
ggtaggacctcttatttaggagtat

SEQ ID NO: 55320 - DNA, 25 bp, Probe sequence
acggtaggacctcttatttaggagt

SEQ ID NO: 55321 - DNA, 25 bp, Probe sequence
tgacggtaggacctcttatttagga

SEQ ID NO: 55322 - DNA, 25 bp, Probe sequence
gtgacggtaggacctcttatttagg

SEQ ID NO: 55323 - DNA, 25 bp, Probe sequence
tactcctaaataagaggtcctaccg

SEQ ID NO: 55324 - DNA, 25 bp, Probe sequence
cctaccgtcacgtttctctattata

SEQ ID NO: 55325 - DNA, 25 bp, Probe sequence
tcctaccgtcacgtttctctattat

SEQ ID NO: 55326 - DNA, 25 bp, Probe sequence
ctcctaaataagaggtcctaccgtc

SEQ ID NO: 55327 - DNA, 25 bp, Probe sequence
ggatactcctaaataagaggtccta

SEQ ID NO: 55328 - DNA, 25 bp, Probe sequence
atactcctaaataagaggtcctacc

SEQ ID NO: 55329 - DNA, 25 bp, Probe sequence
cctaaataagaggtcctaccgtcac

SEQ ID NO: 55330 - DNA, 25 bp, Probe sequence
tcctaaataagaggtcctaccgtca

SEQ ID NO: 55331 - DNA, 25 bp, Probe sequence
actcctaaataagaggtcctaccgt

SEQ ID NO: 55332 - DNA, 25 bp, Probe sequence
aaagccaaggtaaactgaaatatca

SEQ ID NO: 55333 - DNA, 25 bp, Probe sequence
atcatagacattgggtttctgtgta

SEQ ID NO: 55334 - DNA, 25 bp, Probe sequence
tatcatagacattgggtttctgtgt

SEQ ID NO: 55335 - DNA, 25 bp, Probe sequence
agcgacacctttctatatctgtttc

SEQ ID NO: 55336 - DNA, 25 bp, Probe sequence
aagccaaggtaaactgaaatatcat

SEQ ID NO: 55337 - DNA, 25 bp, Probe sequence
gcgacacctttctatatctgtttca

SEQ ID NO: 55338 - DNA, 25 bp, Probe sequence
cgacacctttctatatctgtttcag

SEQ ID NO: 55339 - DNA, 25 bp, Probe sequence
cagcgacacctttctatatctgttt

SEQ ID NO: 55340 - DNA, 25 bp, Probe sequence
atatcatagacattgggtttctgtg

SEQ ID NO: 55341 - DNA, 25 bp, Probe sequence
tgatatttcagtttaccttggcttt

SEQ ID NO: 55342 - DNA, 25 bp, Probe sequence
acacagaaacccaatgtctatgata

SEQ ID NO: 55343 - DNA, 25 bp, Probe sequence
tacacagaaacccaatgtctatgat

SEQ ID NO: 55344 - DNA, 25 bp, Probe sequence
atgatatttcagtttaccttggctt

SEQ ID NO: 55345 - DNA, 25 bp, Probe sequence
gaaacagatatagaaaggtgtcgct

SEQ ID NO: 55346 - DNA, 25 bp, Probe sequence
tgaaacagatatagaaaggtgtcgc

SEQ ID NO: 55347 - DNA, 25 bp, Probe sequence
ctgaaacagatatagaaaggtgtcg

SEQ ID NO: 55348 - DNA, 25 bp, Probe sequence
aaacagatatagaaaggtgtcgctg

SEQ ID NO: 55349 - DNA, 25 bp, Probe sequence
cacagaaacccaatgtctatgatat

SEQ ID NO: 55350 - DNA, 25 bp, Probe sequence
aattacacttatagcgtaccacatt

SEQ ID NO: 55351 - DNA, 25 bp, Probe sequence
gaaattacacttatagcgtaccaca

SEQ ID NO: 55352 - DNA, 25 bp, Probe sequence
tgaaattacacttatagcgtaccac

SEQ ID NO: 55353 - DNA, 25 bp, Probe sequence
attacacttatagcgtaccacattt

SEQ ID NO: 55354 - DNA, 25 bp, Probe sequence
aaattacacttatagcgtaccacat

SEQ ID NO: 55355 - DNA, 25 bp, Probe sequence
gcaatgaaattacacttatagcgta

SEQ ID NO: 55356 - DNA, 25 bp, Probe sequence
cccttcacattcttaatcgtgtaat

SEQ ID NO: 55357 - DNA, 25 bp, Probe sequence
atgaaattacacttatagcgtacca

SEQ ID NO: 55358 - DNA, 25 bp, Probe sequence
ccttcacattcttaatcgtgtaata

SEQ ID NO: 55359 - DNA, 25 bp, Probe sequence
aatgtggtacgctataagtgtaatt

SEQ ID NO: 55360 - DNA, 25 bp, Probe sequence
gtggtacgctataagtgtaatttca

SEQ ID NO: 55361 - DNA, 25 bp, Probe sequence
tgtggtacgctataagtgtaatttc

SEQ ID NO: 55362 - DNA, 25 bp, Probe sequence
atgtggtacgctataagtgtaattt

SEQ ID NO: 55363 - DNA, 25 bp, Probe sequence
aaatgtggtacgctataagtgtaat

SEQ ID NO: 55364 - DNA, 25 bp, Probe sequence
tacgctataagtgtaatttcattgc

SEQ ID NO: 55365 - DNA, 25 bp, Probe sequence
attacacgattaagaatgtgaaggg

SEQ ID NO: 55366 - DNA, 25 bp, Probe sequence
tattacacgattaagaatgtgaagg

SEQ ID NO: 55367 - DNA, 25 bp, Probe sequence
tggtacgctataagtgtaatttcat

SEQ ID NO: 55368 - DNA, 25 bp, Probe sequence
aaagatgtttgtgattgaaggagtg

SEQ ID NO: 55369 - DNA, 25 bp, Probe sequence
gaaagatgtttgtgattgaaggagt

SEQ ID NO: 55370 - DNA, 25 bp, Probe sequence
agaaagatgtttgtgattgaaggag

SEQ ID NO: 55371 - DNA, 25 bp, Probe sequence
aagatgtttgtgattgaaggagtga

SEQ ID NO: 55372 - DNA, 25 bp, Probe sequence
aagaaagatgtttgtgattgaagga

SEQ ID NO: 55373 - DNA, 25 bp, Probe sequence
agatgtttgtgattgaaggagtgag

SEQ ID NO: 55374 - DNA, 25 bp, Probe sequence
gatgtttgtgattgaaggagtgagt

SEQ ID NO: 55375 - DNA, 25 bp, Probe sequence
atgtttgtgattgaaggagtgagtg

SEQ ID NO: 55376 - DNA, 25 bp, Probe sequence
gtttgtgattgaaggagtgagtgag

SEQ ID NO: 55377 - DNA, 25 bp, Probe sequence
cactccttcaatcacaaacatcttt

SEQ ID NO: 55378 - DNA, 25 bp, Probe sequence
actccttcaatcacaaacatctttc

SEQ ID NO: 55379 - DNA, 25 bp, Probe sequence
ctccttcaatcacaaacatctttct

SEQ ID NO: 55380 - DNA, 25 bp, Probe sequence
tcactccttcaatcacaaacatctt

SEQ ID NO: 55381 - DNA, 25 bp, Probe sequence
tccttcaatcacaaacatctttctt

SEQ ID NO: 55382 - DNA, 25 bp, Probe sequence
ctcactccttcaatcacaaacatct

SEQ ID NO: 55383 - DNA, 25 bp, Probe sequence
actcactccttcaatcacaaacatc

SEQ ID NO: 55384 - DNA, 25 bp, Probe sequence
cactcactccttcaatcacaaacat

SEQ ID NO: 55385 - DNA, 25 bp, Probe sequence
ctcactcactccttcaatcacaaac

SEQ ID NO: 55386 - DNA, 25 bp, Probe sequence
aaactaaccactcttaaacgtcaat

SEQ ID NO: 55387 - DNA, 25 bp, Probe sequence
taaactaaccactcttaaacgtcaa

SEQ ID NO: 55388 - DNA, 25 bp, Probe sequence
aactaaccactcttaaacgtcaata

SEQ ID NO: 55389 - DNA, 25 bp, Probe sequence
ttaaactaaccactcttaaacgtca

SEQ ID NO: 55390 - DNA, 25 bp, Probe sequence
accactcttaaacgtcaatatactt

SEQ ID NO: 55391 - DNA, 25 bp, Probe sequence
aaccactcttaaacgtcaatatact

SEQ ID NO: 55392 - DNA, 25 bp, Probe sequence
actaaccactcttaaacgtcaatat

SEQ ID NO: 55393 - DNA, 25 bp, Probe sequence
ccactcttaaacgtcaatatacttt

SEQ ID NO: 55394 - DNA, 25 bp, Probe sequence
taaccactcttaaacgtcaatatac

SEQ ID NO: 55395 - DNA, 25 bp, Probe sequence
attgacgtttaagagtggttagttt

SEQ ID NO: 55396 - DNA, 25 bp, Probe sequence
ttgacgtttaagagtggttagttta

SEQ ID NO: 55397 - DNA, 25 bp, Probe sequence
tattgacgtttaagagtggttagtt

SEQ ID NO: 55398 - DNA, 25 bp, Probe sequence
tgacgtttaagagtggttagtttaa

SEQ ID NO: 55399 - DNA, 25 bp, Probe sequence
atattgacgtttaagagtggttagt

SEQ ID NO: 55400 - DNA, 25 bp, Probe sequence
agtatattgacgtttaagagtggtt

SEQ ID NO: 55401 - DNA, 25 bp, Probe sequence
aagtatattgacgtttaagagtggt

SEQ ID NO: 55402 - DNA, 25 bp, Probe sequence
aaagtatattgacgtttaagagtgg

SEQ ID NO: 55403 - DNA, 25 bp, Probe sequence
gtatattgacgtttaagagtggtta

SEQ ID NO: 55404 - DNA, 25 bp, Probe sequence
gtaacatctgttgataggtagcgac

SEQ ID NO: 55405 - DNA, 25 bp, Probe sequence
tgtaacatctgttgataggtagcga

SEQ ID NO: 55406 - DNA, 25 bp, Probe sequence
gtgtaacatctgttgataggtagcg

SEQ ID NO: 55407 - DNA, 25 bp, Probe sequence
tgtgtaacatctgttgataggtagc

SEQ ID NO: 55408 - DNA, 25 bp, Probe sequence
taacatctgttgataggtagcgaca

SEQ ID NO: 55409 - DNA, 25 bp, Probe sequence
ttgtgtaacatctgttgataggtag

SEQ ID NO: 55410 - DNA, 25 bp, Probe sequence
acatctgttgataggtagcgacaag

SEQ ID NO: 55411 - DNA, 25 bp, Probe sequence
aacatctgttgataggtagcgacaa

SEQ ID NO: 55412 - DNA, 25 bp, Probe sequence
atctgttgataggtagcgacaagga

SEQ ID NO: 55413 - DNA, 25 bp, Probe sequence
gtcgctacctatcaacagatgttac

SEQ ID NO: 55414 - DNA, 25 bp, Probe sequence
cgctacctatcaacagatgttacac

SEQ ID NO: 55415 - DNA, 25 bp, Probe sequence
tcgctacctatcaacagatgttaca

SEQ ID NO: 55416 - DNA, 25 bp, Probe sequence
gctacctatcaacagatgttacaca

SEQ ID NO: 55417 - DNA, 25 bp, Probe sequence
tgtcgctacctatcaacagatgtta

SEQ ID NO: 55418 - DNA, 25 bp, Probe sequence
ctacctatcaacagatgttacacaa

SEQ ID NO: 55419 - DNA, 25 bp, Probe sequence
cttgtcgctacctatcaacagatgt

SEQ ID NO: 55420 - DNA, 25 bp, Probe sequence
ttgtcgctacctatcaacagatgtt

SEQ ID NO: 55421 - DNA, 25 bp, Probe sequence
ccttgtcgctacctatcaacagatg

SEQ ID NO: 55422 - DNA, 25 bp, Probe sequence
tgaatatgcgtaaataatgcggttt

SEQ ID NO: 55423 - DNA, 25 bp, Probe sequence
atgaatatgcgtaaataatgcggtt

SEQ ID NO: 55424 - DNA, 25 bp, Probe sequence
aatgaatatgcgtaaataatgcggt

SEQ ID NO: 55425 - DNA, 25 bp, Probe sequence
aaatgaatatgcgtaaataatgcgg

SEQ ID NO: 55426 - DNA, 25 bp, Probe sequence
aagattgatactcatttcgcaaact

SEQ ID NO: 55427 - DNA, 25 bp, Probe sequence
actcatttcgcaaactattactact

SEQ ID NO: 55428 - DNA, 25 bp, Probe sequence
gaatatgcgtaaataatgcggttta

SEQ ID NO: 55429 - DNA, 25 bp, Probe sequence
agattgatactcatttcgcaaacta

SEQ ID NO: 55430 - DNA, 25 bp, Probe sequence
aatatgcgtaaataatgcggtttaa

SEQ ID NO: 55431 - DNA, 25 bp, Probe sequence
aaaccgcattatttacgcatattca

SEQ ID NO: 55432 - DNA, 25 bp, Probe sequence
accgcattatttacgcatattcatt

SEQ ID NO: 55433 - DNA, 25 bp, Probe sequence
aaccgcattatttacgcatattcat

SEQ ID NO: 55434 - DNA, 25 bp, Probe sequence
ccgcattatttacgcatattcattt

SEQ ID NO: 55435 - DNA, 25 bp, Probe sequence
agtttgcgaaatgagtatcaatctt

SEQ ID NO: 55436 - DNA, 25 bp, Probe sequence
agtagtaatagtttgcgaaatgagt

SEQ ID NO: 55437 - DNA, 25 bp, Probe sequence
taaaccgcattatttacgcatattc

SEQ ID NO: 55438 - DNA, 25 bp, Probe sequence
tagtttgcgaaatgagtatcaatct

SEQ ID NO: 55439 - DNA, 25 bp, Probe sequence
ttaaaccgcattatttacgcatatt

SEQ ID NO: 55440 - DNA, 25 bp, Probe sequence
aatcgttttatttggaggttatagt

SEQ ID NO: 55441 - DNA, 25 bp, Probe sequence
aaatcgttttatttggaggttatag

SEQ ID NO: 55442 - DNA, 25 bp, Probe sequence
catacaaatcgttttatttggaggt

SEQ ID NO: 55443 - DNA, 25 bp, Probe sequence
acatacaaatcgttttatttggagg

SEQ ID NO: 55444 - DNA, 25 bp, Probe sequence
acaaatcgttttatttggaggttat

SEQ ID NO: 55445 - DNA, 25 bp, Probe sequence
atacaaatcgttttatttggaggtt

SEQ ID NO: 55446 - DNA, 25 bp, Probe sequence
tacaaatcgttttatttggaggtta

SEQ ID NO: 55447 - DNA, 25 bp, Probe sequence
caacatacaaatcgttttatttgga

SEQ ID NO: 55448 - DNA, 25 bp, Probe sequence
tcaacatacaaatcgttttatttgg

SEQ ID NO: 55449 - DNA, 25 bp, Probe sequence
actataacctccaaataaaacgatt

SEQ ID NO: 55450 - DNA, 25 bp, Probe sequence
ctataacctccaaataaaacgattt

SEQ ID NO: 55451 - DNA, 25 bp, Probe sequence
cctccaaataaaacgatttgtatgt

SEQ ID NO: 55452 - DNA, 25 bp, Probe sequence
acctccaaataaaacgatttgtatg

SEQ ID NO: 55453 - DNA, 25 bp, Probe sequence
aacctccaaataaaacgatttgtat

SEQ ID NO: 55454 - DNA, 25 bp, Probe sequence
ataacctccaaataaaacgatttgt

SEQ ID NO: 55455 - DNA, 25 bp, Probe sequence
taacctccaaataaaacgatttgta

SEQ ID NO: 55456 - DNA, 25 bp, Probe sequence
ccaaataaaacgatttgtatgttga

SEQ ID NO: 55457 - DNA, 25 bp, Probe sequence
tccaaataaaacgatttgtatgttg

SEQ ID NO: 55458 - DNA, 25 bp, Probe sequence
ccctaatcatgaagttggtttagac

SEQ ID NO: 55459 - DNA, 25 bp, Probe sequence
cctaatcatgaagttggtttagaca

SEQ ID NO: 55460 - DNA, 25 bp, Probe sequence
ctaatcatgaagttggtttagacaa

SEQ ID NO: 55461 - DNA, 25 bp, Probe sequence
cccctaatcatgaagttggtttaga

SEQ ID NO: 55462 - DNA, 25 bp, Probe sequence
gtttagacaaccagcggtgactagg

SEQ ID NO: 55463 - DNA, 25 bp, Probe sequence
acccctaatcatgaagttggtttag

SEQ ID NO: 55464 - DNA, 25 bp, Probe sequence
aatcatgaagttggtttagacaacc

SEQ ID NO: 55465 - DNA, 25 bp, Probe sequence
taatcatgaagttggtttagacaac

SEQ ID NO: 55466 - DNA, 25 bp, Probe sequence
aacccctaatcatgaagttggttta

SEQ ID NO: 55467 - DNA, 25 bp, Probe sequence
gtctaaaccaacttcatgattaggg

SEQ ID NO: 55468 - DNA, 25 bp, Probe sequence
tgtctaaaccaacttcatgattagg

SEQ ID NO: 55469 - DNA, 25 bp, Probe sequence
ttgtctaaaccaacttcatgattag

SEQ ID NO: 55470 - DNA, 25 bp, Probe sequence
tctaaaccaacttcatgattagggg

SEQ ID NO: 55471 - DNA, 25 bp, Probe sequence
ctaaaccaacttcatgattaggggt

SEQ ID NO: 55472 - DNA, 25 bp, Probe sequence
cctagtcaccgctggttgtctaaac

SEQ ID NO: 55473 - DNA, 25 bp, Probe sequence
ggttgtctaaaccaacttcatgatt

SEQ ID NO: 55474 - DNA, 25 bp, Probe sequence
gttgtctaaaccaacttcatgatta

SEQ ID NO: 55475 - DNA, 25 bp, Probe sequence
taaaccaacttcatgattaggggtt

SEQ ID NO: 55476 - DNA, 25 bp, Probe sequence
atgagacttctgtgagctgattatt

SEQ ID NO: 55477 - DNA, 25 bp, Probe sequence
aatgagacttctgtgagctgattat

SEQ ID NO: 55478 - DNA, 25 bp, Probe sequence
gcgactttcataacaaccaaactat

SEQ ID NO: 55479 - DNA, 25 bp, Probe sequence
ttattcttgtcccattaacgcattt

SEQ ID NO: 55480 - DNA, 25 bp, Probe sequence
attattcttgtcccattaacgcatt

SEQ ID NO: 55481 - DNA, 25 bp, Probe sequence
aattattcttgtcccattaacgcat

SEQ ID NO: 55482 - DNA, 25 bp, Probe sequence
tgtatgataagtgcaatgactcagt

SEQ ID NO: 55483 - DNA, 25 bp, Probe sequence
gtgtatgataagtgcaatgactcag

SEQ ID NO: 55484 - DNA, 25 bp, Probe sequence
tgtgtatgataagtgcaatgactca

SEQ ID NO: 55485 - DNA, 25 bp, Probe sequence
ataatcagctcacagaagtctcatt

SEQ ID NO: 55486 - DNA, 25 bp, Probe sequence
aataatcagctcacagaagtctcat

SEQ ID NO: 55487 - DNA, 25 bp, Probe sequence
atagtttggttgttatgaaagtcgc

SEQ ID NO: 55488 - DNA, 25 bp, Probe sequence
aaatgcgttaatgggacaagaataa

SEQ ID NO: 55489 - DNA, 25 bp, Probe sequence
aatgcgttaatgggacaagaataat

SEQ ID NO: 55490 - DNA, 25 bp, Probe sequence
atgcgttaatgggacaagaataatt

SEQ ID NO: 55491 - DNA, 25 bp, Probe sequence
actgagtcattgcacttatcataca

SEQ ID NO: 55492 - DNA, 25 bp, Probe sequence
ctgagtcattgcacttatcatacac

SEQ ID NO: 55493 - DNA, 25 bp, Probe sequence
tgagtcattgcacttatcatacaca

SEQ ID NO: 55494 - DNA, 25 bp, Probe sequence
cagtctagcggtaagtcttaacatt

SEQ ID NO: 55495 - DNA, 25 bp, Probe sequence
tcagtctagcggtaagtcttaacat

SEQ ID NO: 55496 - DNA, 25 bp, Probe sequence
taggtcagtctagcggtaagtctta

SEQ ID NO: 55497 - DNA, 25 bp, Probe sequence
gtcagtctagcggtaagtcttaaca

SEQ ID NO: 55498 - DNA, 25 bp, Probe sequence
ggtcagtctagcggtaagtcttaac

SEQ ID NO: 55499 - DNA, 25 bp, Probe sequence
aggtcagtctagcggtaagtcttaa

SEQ ID NO: 55500 - DNA, 25 bp, Probe sequence
taaatatcgtttctgaagcgtgttt

SEQ ID NO: 55501 - DNA, 25 bp, Probe sequence
ataaatatcgtttctgaagcgtgtt

SEQ ID NO: 55502 - DNA, 25 bp, Probe sequence
aataaatatcgtttctgaagcgtgt

SEQ ID NO: 55503 - DNA, 25 bp, Probe sequence
aatgttaagacttaccgctagactg

SEQ ID NO: 55504 - DNA, 25 bp, Probe sequence
atgttaagacttaccgctagactga

SEQ ID NO: 55505 - DNA, 25 bp, Probe sequence
taagacttaccgctagactgaccta

SEQ ID NO: 55506 - DNA, 25 bp, Probe sequence
tgttaagacttaccgctagactgac

SEQ ID NO: 55507 - DNA, 25 bp, Probe sequence
ttaagacttaccgctagactgacct

SEQ ID NO: 55508 - DNA, 25 bp, Probe sequence
gttaagacttaccgctagactgacc

SEQ ID NO: 55509 - DNA, 25 bp, Probe sequence
aaacacgcttcagaaacgatattta

SEQ ID NO: 55510 - DNA, 25 bp, Probe sequence
acacgcttcagaaacgatatttatt

SEQ ID NO: 55511 - DNA, 25 bp, Probe sequence
aacacgcttcagaaacgatatttat

SEQ ID NO: 55512 - DNA, 25 bp, Probe sequence
tagggataaagtaaagagcgaatgt

SEQ ID NO: 55513 - DNA, 25 bp, Probe sequence
tgatagggataaagtaaagagcgaa

SEQ ID NO: 55514 - DNA, 25 bp, Probe sequence
agggataaagtaaagagcgaatgtg

SEQ ID NO: 55515 - DNA, 25 bp, Probe sequence
atgatagggataaagtaaagagcga

SEQ ID NO: 55516 - DNA, 25 bp, Probe sequence
atagggataaagtaaagagcgaatg

SEQ ID NO: 55517 - DNA, 25 bp, Probe sequence
gatagggataaagtaaagagcgaat

SEQ ID NO: 55518 - DNA, 25 bp, Probe sequence
gggataaagtaaagagcgaatgtgc

SEQ ID NO: 55519 - DNA, 25 bp, Probe sequence
tatgatagggataaagtaaagagcg

SEQ ID NO: 55520 - DNA, 25 bp, Probe sequence
gtaactaacacaataatctcgtaca

SEQ ID NO: 55521 - DNA, 25 bp, Probe sequence
acattcgctctttactttatcccta

SEQ ID NO: 55522 - DNA, 25 bp, Probe sequence
ttcgctctttactttatccctatca

SEQ ID NO: 55523 - DNA, 25 bp, Probe sequence
tcgctctttactttatccctatcat

SEQ ID NO: 55524 - DNA, 25 bp, Probe sequence
cacattcgctctttactttatccct

SEQ ID NO: 55525 - DNA, 25 bp, Probe sequence
cattcgctctttactttatccctat

SEQ ID NO: 55526 - DNA, 25 bp, Probe sequence
attcgctctttactttatccctatc

SEQ ID NO: 55527 - DNA, 25 bp, Probe sequence
cgctctttactttatccctatcata

SEQ ID NO: 55528 - DNA, 25 bp, Probe sequence
gcacattcgctctttactttatccc

SEQ ID NO: 55529 - DNA, 25 bp, Probe sequence
tgtacgagattattgtgttagttac

SEQ ID NO: 55530 - DNA, 25 bp, Probe sequence
aatcgctcaatatccttgtaatccg

SEQ ID NO: 55531 - DNA, 25 bp, Probe sequence
cgctcaatatccttgtaatccgata

SEQ ID NO: 55532 - DNA, 25 bp, Probe sequence
gctcaatatccttgtaatccgataa

SEQ ID NO: 55533 - DNA, 25 bp, Probe sequence
ttcaaccattgttataggaggtctt

SEQ ID NO: 55534 - DNA, 25 bp, Probe sequence
tcaaccattgttataggaggtctta

SEQ ID NO: 55535 - DNA, 25 bp, Probe sequence
aaatcgctcaatatccttgtaatcc

SEQ ID NO: 55536 - DNA, 25 bp, Probe sequence
caaccattgttataggaggtcttat

SEQ ID NO: 55537 - DNA, 25 bp, Probe sequence
tcaatatccttgtaatccgataaga

SEQ ID NO: 55538 - DNA, 25 bp, Probe sequence
ctcaatatccttgtaatccgataag

SEQ ID NO: 55539 - DNA, 25 bp, Probe sequence
cggattacaaggatattgagcgatt

SEQ ID NO: 55540 - DNA, 25 bp, Probe sequence
tatcggattacaaggatattgagcg

SEQ ID NO: 55541 - DNA, 25 bp, Probe sequence
ttatcggattacaaggatattgagc

SEQ ID NO: 55542 - DNA, 25 bp, Probe sequence
aagacctcctataacaatggttgaa

SEQ ID NO: 55543 - DNA, 25 bp, Probe sequence
taagacctcctataacaatggttga

SEQ ID NO: 55544 - DNA, 25 bp, Probe sequence
ggattacaaggatattgagcgattt

SEQ ID NO: 55545 - DNA, 25 bp, Probe sequence
ataagacctcctataacaatggttg

SEQ ID NO: 55546 - DNA, 25 bp, Probe sequence
tcttatcggattacaaggatattga

SEQ ID NO: 55547 - DNA, 25 bp, Probe sequence
cttatcggattacaaggatattgag

SEQ ID NO: 55548 - DNA, 25 bp, Probe sequence
gcactcataccaaaccataatcatc

SEQ ID NO: 55549 - DNA, 25 bp, Probe sequence
agcactcataccaaaccataatcat

SEQ ID NO: 55550 - DNA, 25 bp, Probe sequence
aagagcactcataccaaaccataat

SEQ ID NO: 55551 - DNA, 25 bp, Probe sequence
taagagcactcataccaaaccataa

SEQ ID NO: 55552 - DNA, 25 bp, Probe sequence
ataagagcactcataccaaaccata

SEQ ID NO: 55553 - DNA, 25 bp, Probe sequence
tataagagcactcataccaaaccat

SEQ ID NO: 55554 - DNA, 25 bp, Probe sequence
agagcactcataccaaaccataatc

SEQ ID NO: 55555 - DNA, 25 bp, Probe sequence
gagcactcataccaaaccataatca

SEQ ID NO: 55556 - DNA, 25 bp, Probe sequence
ataacaattcacgatataagggctg

SEQ ID NO: 55557 - DNA, 25 bp, Probe sequence
gatgattatggtttggtatgagtgc

SEQ ID NO: 55558 - DNA, 25 bp, Probe sequence
atgattatggtttggtatgagtgct

SEQ ID NO: 55559 - DNA, 25 bp, Probe sequence
ttatggtttggtatgagtgctctta

SEQ ID NO: 55560 - DNA, 25 bp, Probe sequence
attatggtttggtatgagtgctctt

SEQ ID NO: 55561 - DNA, 25 bp, Probe sequence
atggtttggtatgagtgctcttata

SEQ ID NO: 55562 - DNA, 25 bp, Probe sequence
tatggtttggtatgagtgctcttat

SEQ ID NO: 55563 - DNA, 25 bp, Probe sequence
gattatggtttggtatgagtgctct

SEQ ID NO: 55564 - DNA, 25 bp, Probe sequence
tgattatggtttggtatgagtgctc

SEQ ID NO: 55565 - DNA, 25 bp, Probe sequence
cagcccttatatcgtgaattgttat

SEQ ID NO: 55566 - DNA, 25 bp, Probe sequence
tttgtttagatgcgtttgttgaaac

SEQ ID NO: 55567 - DNA, 25 bp, Probe sequence
gtttagatgcgtttgttgaaacatt

SEQ ID NO: 55568 - DNA, 25 bp, Probe sequence
ttttgtttagatgcgtttgttgaaa

SEQ ID NO: 55569 - DNA, 25 bp, Probe sequence
tttagatgcgtttgttgaaacattt

SEQ ID NO: 55570 - DNA, 25 bp, Probe sequence
aatgtgaacaattaatgaacttctt

SEQ ID NO: 55571 - DNA, 25 bp, Probe sequence
tgtgaacaattaatgaacttcttat

SEQ ID NO: 55572 - DNA, 25 bp, Probe sequence
atgtgaacaattaatgaacttctta

SEQ ID NO: 55573 - DNA, 25 bp, Probe sequence
aaatgtgaacaattaatgaacttct

SEQ ID NO: 55574 - DNA, 25 bp, Probe sequence
aggtgtataatgaaaatgtgaacaa

SEQ ID NO: 55575 - DNA, 25 bp, Probe sequence
gtttcaacaaacgcatctaaacaaa

SEQ ID NO: 55576 - DNA, 25 bp, Probe sequence
aatgtttcaacaaacgcatctaaac

SEQ ID NO: 55577 - DNA, 25 bp, Probe sequence
tttcaacaaacgcatctaaacaaaa

SEQ ID NO: 55578 - DNA, 25 bp, Probe sequence
aaatgtttcaacaaacgcatctaaa

SEQ ID NO: 55579 - DNA, 25 bp, Probe sequence
aagaagttcattaattgttcacatt

SEQ ID NO: 55580 - DNA, 25 bp, Probe sequence
taagaagttcattaattgttcacat

SEQ ID NO: 55581 - DNA, 25 bp, Probe sequence
ataagaagttcattaattgttcaca

SEQ ID NO: 55582 - DNA, 25 bp, Probe sequence
tgttcacattttcattatacacctt

SEQ ID NO: 55583 - DNA, 25 bp, Probe sequence
ttgttcacattttcattatacacct

SEQ ID NO: 55584 - DNA, 25 bp, Probe sequence
attacatctaagtatagtcacggct

SEQ ID NO: 55585 - DNA, 25 bp, Probe sequence
gattacatctaagtatagtcacggc

SEQ ID NO: 55586 - DNA, 25 bp, Probe sequence
ttacatctaagtatagtcacggcta

SEQ ID NO: 55587 - DNA, 25 bp, Probe sequence
catctaagtatagtcacggctatgt

SEQ ID NO: 55588 - DNA, 25 bp, Probe sequence
acatctaagtatagtcacggctatg

SEQ ID NO: 55589 - DNA, 25 bp, Probe sequence
aagtatagtcacggctatgttagga

SEQ ID NO: 55590 - DNA, 25 bp, Probe sequence
taagtatagtcacggctatgttagg

SEQ ID NO: 55591 - DNA, 25 bp, Probe sequence
atctaagtatagtcacggctatgtt

SEQ ID NO: 55592 - DNA, 25 bp, Probe sequence
tatagtcacggctatgttaggacaa

SEQ ID NO: 55593 - DNA, 25 bp, Probe sequence
agccgtgactatacttagatgtaat

SEQ ID NO: 55594 - DNA, 25 bp, Probe sequence
gccgtgactatacttagatgtaatc

SEQ ID NO: 55595 - DNA, 25 bp, Probe sequence
tagccgtgactatacttagatgtaa

SEQ ID NO: 55596 - DNA, 25 bp, Probe sequence
catagccgtgactatacttagatgt

SEQ ID NO: 55597 - DNA, 25 bp, Probe sequence
acatagccgtgactatacttagatg

SEQ ID NO: 55598 - DNA, 25 bp, Probe sequence
tcctaacatagccgtgactatactt

SEQ ID NO: 55599 - DNA, 25 bp, Probe sequence
cctaacatagccgtgactatactta

SEQ ID NO: 55600 - DNA, 25 bp, Probe sequence
aacatagccgtgactatacttagat

SEQ ID NO: 55601 - DNA, 25 bp, Probe sequence
ttgtcctaacatagccgtgactata

SEQ ID NO: 55602 - DNA, 25 bp, Probe sequence
ggtagtgtgtatatatgtggatagg

SEQ ID NO: 55603 - DNA, 25 bp, Probe sequence
aatggtagtgtgtatatatgtggat

SEQ ID NO: 55604 - DNA, 25 bp, Probe sequence
tggtagtgtgtatatatgtggatag

SEQ ID NO: 55605 - DNA, 25 bp, Probe sequence
gtagtgtgtatatatgtggataggg

SEQ ID NO: 55606 - DNA, 25 bp, Probe sequence
atggtagtgtgtatatatgtggata

SEQ ID NO: 55607 - DNA, 25 bp, Probe sequence
aaatggtagtgtgtatatatgtgga

SEQ ID NO: 55608 - DNA, 25 bp, Probe sequence
atatgtggataggggtgtagttatt

SEQ ID NO: 55609 - DNA, 25 bp, Probe sequence
tgtgtatatatgtggataggggtgt

SEQ ID NO: 55610 - DNA, 25 bp, Probe sequence
gtgtgtatatatgtggataggggtg

SEQ ID NO: 55611 - DNA, 25 bp, Probe sequence
cctatccacatatatacacactacc

SEQ ID NO: 55612 - DNA, 25 bp, Probe sequence
atccacatatatacacactaccatt

SEQ ID NO: 55613 - DNA, 25 bp, Probe sequence
ctatccacatatatacacactacca

SEQ ID NO: 55614 - DNA, 25 bp, Probe sequence
ccctatccacatatatacacactac

SEQ ID NO: 55615 - DNA, 25 bp, Probe sequence
tatccacatatatacacactaccat

SEQ ID NO: 55616 - DNA, 25 bp, Probe sequence
tccacatatatacacactaccattt

SEQ ID NO: 55617 - DNA, 25 bp, Probe sequence
aataactacacccctatccacatat

SEQ ID NO: 55618 - DNA, 25 bp, Probe sequence
acccctatccacatatatacacact

SEQ ID NO: 55619 - DNA, 25 bp, Probe sequence
cacccctatccacatatatacacac

SEQ ID NO: 55620 - DNA, 25 bp, Probe sequence
tgattaacgagttgtagtgtgctat

SEQ ID NO: 55621 - DNA, 25 bp, Probe sequence
gattaacgagttgtagtgtgctatt

SEQ ID NO: 55622 - DNA, 25 bp, Probe sequence
gtgattaacgagttgtagtgtgcta

SEQ ID NO: 55623 - DNA, 25 bp, Probe sequence
aagtgattaacgagttgtagtgtgc

SEQ ID NO: 55624 - DNA, 25 bp, Probe sequence
agtgattaacgagttgtagtgtgct

SEQ ID NO: 55625 - DNA, 25 bp, Probe sequence
ttcgtcggttatcatatcatcatgc

SEQ ID NO: 55626 - DNA, 25 bp, Probe sequence
gaacaacagaaagtgattaacgagt

SEQ ID NO: 55627 - DNA, 25 bp, Probe sequence
tgaacaacagaaagtgattaacgag

SEQ ID NO: 55628 - DNA, 25 bp, Probe sequence
aaagtgattaacgagttgtagtgtg

SEQ ID NO: 55629 - DNA, 25 bp, Probe sequence
atagcacactacaactcgttaatca

SEQ ID NO: 55630 - DNA, 25 bp, Probe sequence
aatagcacactacaactcgttaatc

SEQ ID NO: 55631 - DNA, 25 bp, Probe sequence
tagcacactacaactcgttaatcac

SEQ ID NO: 55632 - DNA, 25 bp, Probe sequence
gcacactacaactcgttaatcactt

SEQ ID NO: 55633 - DNA, 25 bp, Probe sequence
agcacactacaactcgttaatcact

SEQ ID NO: 55634 - DNA, 25 bp, Probe sequence
gcatgatgatatgataaccgacgaa

SEQ ID NO: 55635 - DNA, 25 bp, Probe sequence
ctcgttaatcactttctgttgttca

SEQ ID NO: 55636 - DNA, 25 bp, Probe sequence
actcgttaatcactttctgttgttc

SEQ ID NO: 55637 - DNA, 25 bp, Probe sequence
cacactacaactcgttaatcacttt

SEQ ID NO: 55638 - DNA, 25 bp, Probe sequence
cgtaagttggctggaatcatatcat

SEQ ID NO: 55639 - DNA, 25 bp, Probe sequence
taagttggctggaatcatatcatgt

SEQ ID NO: 55640 - DNA, 25 bp, Probe sequence
gtaagttggctggaatcatatcatg

SEQ ID NO: 55641 - DNA, 25 bp, Probe sequence
aagttggctggaatcatatcatgtc

SEQ ID NO: 55642 - DNA, 25 bp, Probe sequence
ggctggaatcatatcatgtcagtta

SEQ ID NO: 55643 - DNA, 25 bp, Probe sequence
gctggaatcatatcatgtcagttaa

SEQ ID NO: 55644 - DNA, 25 bp, Probe sequence
aatatcttgttacgacgcatttgag

SEQ ID NO: 55645 - DNA, 25 bp, Probe sequence
agttggctggaatcatatcatgtca

SEQ ID NO: 55646 - DNA, 25 bp, Probe sequence
gcatcaatcatcatactcaaacgat

SEQ ID NO: 55647 - DNA, 25 bp, Probe sequence
atgatatgattccagccaacttacg

SEQ ID NO: 55648 - DNA, 25 bp, Probe sequence
catgatatgattccagccaacttac

SEQ ID NO: 55649 - DNA, 25 bp, Probe sequence
acatgatatgattccagccaactta

SEQ ID NO: 55650 - DNA, 25 bp, Probe sequence
gacatgatatgattccagccaactt

SEQ ID NO: 55651 - DNA, 25 bp, Probe sequence
taactgacatgatatgattccagcc

SEQ ID NO: 55652 - DNA, 25 bp, Probe sequence
ttaactgacatgatatgattccagc

SEQ ID NO: 55653 - DNA, 25 bp, Probe sequence
ctcaaatgcgtcgtaacaagatatt

SEQ ID NO: 55654 - DNA, 25 bp, Probe sequence
tgacatgatatgattccagccaact

SEQ ID NO: 55655 - DNA, 25 bp, Probe sequence
tcgtttgagtatgatgattgatgct

SEQ ID NO: 55656 - DNA, 25 bp, Probe sequence
tggataatcgaactggaatcatctc

SEQ ID NO: 55657 - DNA, 25 bp, Probe sequence
atggataatcgaactggaatcatct

SEQ ID NO: 55658 - DNA, 25 bp, Probe sequence
caatggataatcgaactggaatcat

SEQ ID NO: 55659 - DNA, 25 bp, Probe sequence
aatggataatcgaactggaatcatc

SEQ ID NO: 55660 - DNA, 25 bp, Probe sequence
aacgagatgaacggtaaataaatgt

SEQ ID NO: 55661 - DNA, 25 bp, Probe sequence
gcaatggataatcgaactggaatca

SEQ ID NO: 55662 - DNA, 25 bp, Probe sequence
acgagatgaacggtaaataaatgtt

SEQ ID NO: 55663 - DNA, 25 bp, Probe sequence
gactcctctctatttactatcctca

SEQ ID NO: 55664 - DNA, 25 bp, Probe sequence
cgagatgaacggtaaataaatgttt

SEQ ID NO: 55665 - DNA, 25 bp, Probe sequence
gagatgattccagttcgattatcca

SEQ ID NO: 55666 - DNA, 25 bp, Probe sequence
agatgattccagttcgattatccat

SEQ ID NO: 55667 - DNA, 25 bp, Probe sequence
atgattccagttcgattatccattg

SEQ ID NO: 55668 - DNA, 25 bp, Probe sequence
gatgattccagttcgattatccatt

SEQ ID NO: 55669 - DNA, 25 bp, Probe sequence
acatttatttaccgttcatctcgtt

SEQ ID NO: 55670 - DNA, 25 bp, Probe sequence
tgattccagttcgattatccattgc

SEQ ID NO: 55671 - DNA, 25 bp, Probe sequence
aacatttatttaccgttcatctcgt

SEQ ID NO: 55672 - DNA, 25 bp, Probe sequence
tgaggatagtaaatagagaggagtc

SEQ ID NO: 55673 - DNA, 25 bp, Probe sequence
aaacatttatttaccgttcatctcg

SEQ ID NO: 55674 - DNA, 25 bp, Probe sequence
tgtggataatcagtgatatgtatgt

SEQ ID NO: 55675 - DNA, 25 bp, Probe sequence
cggtctccctcctttatatttatac

SEQ ID NO: 55676 - DNA, 25 bp, Probe sequence
tgatatgtatgtatacgattgcagt

SEQ ID NO: 55677 - DNA, 25 bp, Probe sequence
agtgatatgtatgtatacgattgca

SEQ ID NO: 55678 - DNA, 25 bp, Probe sequence
gtgatatgtatgtatacgattgcag

SEQ ID NO: 55679 - DNA, 25 bp, Probe sequence
cagtgatatgtatgtatacgattgc

SEQ ID NO: 55680 - DNA, 25 bp, Probe sequence
ttgtggataatcagtgatatgtatg

SEQ ID NO: 55681 - DNA, 25 bp, Probe sequence
ggtctccctcctttatatttataca

SEQ ID NO: 55682 - DNA, 25 bp, Probe sequence
tacagttgttcaatataagtgtcaa

SEQ ID NO: 55683 - DNA, 25 bp, Probe sequence
acatacatatcactgattatccaca

SEQ ID NO: 55684 - DNA, 25 bp, Probe sequence
gtataaatataaaggagggagaccg

SEQ ID NO: 55685 - DNA, 25 bp, Probe sequence
tgcaatcgtatacatacatatcact

SEQ ID NO: 55686 - DNA, 25 bp, Probe sequence
actgcaatcgtatacatacatatca

SEQ ID NO: 55687 - DNA, 25 bp, Probe sequence
gcaatcgtatacatacatatcactg

SEQ ID NO: 55688 - DNA, 25 bp, Probe sequence
ctgcaatcgtatacatacatatcac

SEQ ID NO: 55689 - DNA, 25 bp, Probe sequence
catacatatcactgattatccacaa

SEQ ID NO: 55690 - DNA, 25 bp, Probe sequence
tgtataaatataaaggagggagacc

SEQ ID NO: 55691 - DNA, 25 bp, Probe sequence
tgacacttatattgaacaactgtaa

SEQ ID NO: 55692 - DNA, 25 bp, Probe sequence
aggctaagtttatagataggaggtt

SEQ ID NO: 55693 - DNA, 25 bp, Probe sequence
taggctaagtttatagataggaggt

SEQ ID NO: 55694 - DNA, 25 bp, Probe sequence
ggctaagtttatagataggaggtta

SEQ ID NO: 55695 - DNA, 25 bp, Probe sequence
tatgtagtaggggcgtaagttaaga

SEQ ID NO: 55696 - DNA, 25 bp, Probe sequence
ttatgtagtaggggcgtaagttaag

SEQ ID NO: 55697 - DNA, 25 bp, Probe sequence
atgtagtaggggcgtaagttaagaa

SEQ ID NO: 55698 - DNA, 25 bp, Probe sequence
gggcgtaagttaagaacgatttaat

SEQ ID NO: 55699 - DNA, 25 bp, Probe sequence
ataggctaagtttatagataggagg

SEQ ID NO: 55700 - DNA, 25 bp, Probe sequence
agtttatagataggaggttagacaa

SEQ ID NO: 55701 - DNA, 25 bp, Probe sequence
aacctcctatctataaacttagcct

SEQ ID NO: 55702 - DNA, 25 bp, Probe sequence
acctcctatctataaacttagccta

SEQ ID NO: 55703 - DNA, 25 bp, Probe sequence
taacctcctatctataaacttagcc

SEQ ID NO: 55704 - DNA, 25 bp, Probe sequence
cttaacttacgcccctactacataa

SEQ ID NO: 55705 - DNA, 25 bp, Probe sequence
tcttaacttacgcccctactacata

SEQ ID NO: 55706 - DNA, 25 bp, Probe sequence
ttcttaacttacgcccctactacat

SEQ ID NO: 55707 - DNA, 25 bp, Probe sequence
attaaatcgttcttaacttacgccc

SEQ ID NO: 55708 - DNA, 25 bp, Probe sequence
cctcctatctataaacttagcctat

SEQ ID NO: 55709 - DNA, 25 bp, Probe sequence
tgtctaacctcctatctataaactt

SEQ ID NO: 55710 - DNA, 25 bp, Probe sequence
gtattcgcttaaacttataccctgt

SEQ ID NO: 55711 - DNA, 25 bp, Probe sequence
agtattcgcttaaacttataccctg

SEQ ID NO: 55712 - DNA, 25 bp, Probe sequence
tattcgcttaaacttataccctgta

SEQ ID NO: 55713 - DNA, 25 bp, Probe sequence
attcgcttaaacttataccctgtat

SEQ ID NO: 55714 - DNA, 25 bp, Probe sequence
aagtattcgcttaaacttataccct

SEQ ID NO: 55715 - DNA, 25 bp, Probe sequence
cgcttaaacttataccctgtatacg

SEQ ID NO: 55716 - DNA, 25 bp, Probe sequence
ttcgcttaaacttataccctgtata

SEQ ID NO: 55717 - DNA, 25 bp, Probe sequence
aaagtattcgcttaaacttataccc

SEQ ID NO: 55718 - DNA, 25 bp, Probe sequence
gcttaaacttataccctgtatacga

SEQ ID NO: 55719 - DNA, 25 bp, Probe sequence
acagggtataagtttaagcgaatac

SEQ ID NO: 55720 - DNA, 25 bp, Probe sequence
cagggtataagtttaagcgaatact

SEQ ID NO: 55721 - DNA, 25 bp, Probe sequence
tacagggtataagtttaagcgaata

SEQ ID NO: 55722 - DNA, 25 bp, Probe sequence
atacagggtataagtttaagcgaat

SEQ ID NO: 55723 - DNA, 25 bp, Probe sequence
agggtataagtttaagcgaatactt

SEQ ID NO: 55724 - DNA, 25 bp, Probe sequence
cgtatacagggtataagtttaagcg

SEQ ID NO: 55725 - DNA, 25 bp, Probe sequence
tatacagggtataagtttaagcgaa

SEQ ID NO: 55726 - DNA, 25 bp, Probe sequence
gggtataagtttaagcgaatacttt

SEQ ID NO: 55727 - DNA, 25 bp, Probe sequence
gtatacagggtataagtttaagcga

SEQ ID NO: 55728 - DNA, 25 bp, Probe sequence
gttgttgtaataatccagcagtagc

SEQ ID NO: 55729 - DNA, 25 bp, Probe sequence
ttgttgtaataatccagcagtagca

SEQ ID NO: 55730 - DNA, 25 bp, Probe sequence
tgttgtaataatccagcagtagcag

SEQ ID NO: 55731 - DNA, 25 bp, Probe sequence
agttgttgtaataatccagcagtag

SEQ ID NO: 55732 - DNA, 25 bp, Probe sequence
aagttgttgtaataatccagcagta

SEQ ID NO: 55733 - DNA, 25 bp, Probe sequence
agcgattacacaactcaactatatt

SEQ ID NO: 55734 - DNA, 25 bp, Probe sequence
aagcgattacacaactcaactatat

SEQ ID NO: 55735 - DNA, 25 bp, Probe sequence
gttgtaataatccagcagtagcagc

SEQ ID NO: 55736 - DNA, 25 bp, Probe sequence
taagcgattacacaactcaactata

SEQ ID NO: 55737 - DNA, 25 bp, Probe sequence
gctactgctggattattacaacaac

SEQ ID NO: 55738 - DNA, 25 bp, Probe sequence
tgctactgctggattattacaacaa

SEQ ID NO: 55739 - DNA, 25 bp, Probe sequence
ctgctactgctggattattacaaca

SEQ ID NO: 55740 - DNA, 25 bp, Probe sequence
ctactgctggattattacaacaact

SEQ ID NO: 55741 - DNA, 25 bp, Probe sequence
tactgctggattattacaacaactt

SEQ ID NO: 55742 - DNA, 25 bp, Probe sequence
atatagttgagttgtgtaatcgctt

SEQ ID NO: 55743 - DNA, 25 bp, Probe sequence
aatatagttgagttgtgtaatcgct

SEQ ID NO: 55744 - DNA, 25 bp, Probe sequence
gctgctactgctggattattacaac

SEQ ID NO: 55745 - DNA, 25 bp, Probe sequence
tatagttgagttgtgtaatcgctta

SEQ ID NO: 55746 - DNA, 25 bp, Probe sequence
ataaaggcgtgacaaattaaagcaa

SEQ ID NO: 55747 - DNA, 25 bp, Probe sequence
taaaggcgtgacaaattaaagcaaa

SEQ ID NO: 55748 - DNA, 25 bp, Probe sequence
gataaaggcgtgacaaattaaagca

SEQ ID NO: 55749 - DNA, 25 bp, Probe sequence
tgataaaggcgtgacaaattaaagc

SEQ ID NO: 55750 - DNA, 25 bp, Probe sequence
gacaaattaaagcaaagttcaggtt

SEQ ID NO: 55751 - DNA, 25 bp, Probe sequence
cgtgacaaattaaagcaaagttcag

SEQ ID NO: 55752 - DNA, 25 bp, Probe sequence
tgacaaattaaagcaaagttcaggt

SEQ ID NO: 55753 - DNA, 25 bp, Probe sequence
gtgacaaattaaagcaaagttcagg

SEQ ID NO: 55754 - DNA, 25 bp, Probe sequence
ttgatgtgattcagttgtttgatga

SEQ ID NO: 55755 - DNA, 25 bp, Probe sequence
ttgctttaatttgtcacgcctttat

SEQ ID NO: 55756 - DNA, 25 bp, Probe sequence
tttgctttaatttgtcacgccttta

SEQ ID NO: 55757 - DNA, 25 bp, Probe sequence
gctttaatttgtcacgcctttatca

SEQ ID NO: 55758 - DNA, 25 bp, Probe sequence
tgctttaatttgtcacgcctttatc

SEQ ID NO: 55759 - DNA, 25 bp, Probe sequence
aacctgaactttgctttaatttgtc

SEQ ID NO: 55760 - DNA, 25 bp, Probe sequence
ctgaactttgctttaatttgtcacg

SEQ ID NO: 55761 - DNA, 25 bp, Probe sequence
acctgaactttgctttaatttgtca

SEQ ID NO: 55762 - DNA, 25 bp, Probe sequence
tcatcaaacaactgaatcacatcaa

SEQ ID NO: 55763 - DNA, 25 bp, Probe sequence
cctgaactttgctttaatttgtcac

SEQ ID NO: 55764 - DNA, 25 bp, Probe sequence
agagcaatagaaagtgtatggaagg

SEQ ID NO: 55765 - DNA, 25 bp, Probe sequence
gagcaatagaaagtgtatggaaggg

SEQ ID NO: 55766 - DNA, 25 bp, Probe sequence
tagagcaatagaaagtgtatggaag

SEQ ID NO: 55767 - DNA, 25 bp, Probe sequence
ttagagcaatagaaagtgtatggaa

SEQ ID NO: 55768 - DNA, 25 bp, Probe sequence
tttagagcaatagaaagtgtatgga

SEQ ID NO: 55769 - DNA, 25 bp, Probe sequence
tacgacttacctcaaagacaaatat

SEQ ID NO: 55770 - DNA, 25 bp, Probe sequence
atacgacttacctcaaagacaaata

SEQ ID NO: 55771 - DNA, 25 bp, Probe sequence
tatacgacttacctcaaagacaaat

SEQ ID NO: 55772 - DNA, 25 bp, Probe sequence
acgacttacctcaaagacaaatatt

SEQ ID NO: 55773 - DNA, 25 bp, Probe sequence
ccttccatacactttctattgctct

SEQ ID NO: 55774 - DNA, 25 bp, Probe sequence
cccttccatacactttctattgctc

SEQ ID NO: 55775 - DNA, 25 bp, Probe sequence
cttccatacactttctattgctcta

SEQ ID NO: 55776 - DNA, 25 bp, Probe sequence
ttccatacactttctattgctctaa

SEQ ID NO: 55777 - DNA, 25 bp, Probe sequence
tccatacactttctattgctctaaa

SEQ ID NO: 55778 - DNA, 25 bp, Probe sequence
atttgtctttgaggtaagtcgtata

SEQ ID NO: 55779 - DNA, 25 bp, Probe sequence
tatttgtctttgaggtaagtcgtat

SEQ ID NO: 55780 - DNA, 25 bp, Probe sequence
atatttgtctttgaggtaagtcgta

SEQ ID NO: 55781 - DNA, 25 bp, Probe sequence
aatatttgtctttgaggtaagtcgt

SEQ ID NO: 55782 - DNA, 25 bp, Probe sequence
gacctcctaatgatataattctcct

SEQ ID NO: 55783 - DNA, 25 bp, Probe sequence
agacctcctaatgatataattctcc

SEQ ID NO: 55784 - DNA, 25 bp, Probe sequence
acctcctaatgatataattctccta

SEQ ID NO: 55785 - DNA, 25 bp, Probe sequence
atggtttgaagagtatttaacattt

SEQ ID NO: 55786 - DNA, 25 bp, Probe sequence
agtatttaacatttataggaggaca

SEQ ID NO: 55787 - DNA, 25 bp, Probe sequence
aaatggtttgaagagtatttaacat

SEQ ID NO: 55788 - DNA, 25 bp, Probe sequence
aatggtttgaagagtatttaacatt

SEQ ID NO: 55789 - DNA, 25 bp, Probe sequence
aaaatggtttgaagagtatttaaca

SEQ ID NO: 55790 - DNA, 25 bp, Probe sequence
aggagaattatatcattaggaggtc

SEQ ID NO: 55791 - DNA, 25 bp, Probe sequence
ggagaattatatcattaggaggtct

SEQ ID NO: 55792 - DNA, 25 bp, Probe sequence
taggagaattatatcattaggaggt

SEQ ID NO: 55793 - DNA, 25 bp, Probe sequence
aaatgttaaatactcttcaaaccat

SEQ ID NO: 55794 - DNA, 25 bp, Probe sequence
tgtcctcctataaatgttaaatact

SEQ ID NO: 55795 - DNA, 25 bp, Probe sequence
atgttaaatactcttcaaaccattt

SEQ ID NO: 55796 - DNA, 25 bp, Probe sequence
aatgttaaatactcttcaaaccatt

SEQ ID NO: 55797 - DNA, 25 bp, Probe sequence
tgttaaatactcttcaaaccatttt

SEQ ID NO: 55798 - DNA, 25 bp, Probe sequence
taaactgactatcaacaccaacgat

SEQ ID NO: 55799 - DNA, 25 bp, Probe sequence
ttaaactgactatcaacaccaacga

SEQ ID NO: 55800 - DNA, 25 bp, Probe sequence
attaaactgactatcaacaccaacg

SEQ ID NO: 55801 - DNA, 25 bp, Probe sequence
aaactgactatcaacaccaacgatg

SEQ ID NO: 55802 - DNA, 25 bp, Probe sequence
cgatggaaatgcgtattagaataaa

SEQ ID NO: 55803 - DNA, 25 bp, Probe sequence
ctgactatcaacaccaacgatggaa

SEQ ID NO: 55804 - DNA, 25 bp, Probe sequence
aactgactatcaacaccaacgatgg

SEQ ID NO: 55805 - DNA, 25 bp, Probe sequence
gactatcaacaccaacgatggaaat

SEQ ID NO: 55806 - DNA, 25 bp, Probe sequence
actatcaacaccaacgatggaaatg

SEQ ID NO: 55807 - DNA, 25 bp, Probe sequence
atcgttggtgttgatagtcagttta

SEQ ID NO: 55808 - DNA, 25 bp, Probe sequence
cgttggtgttgatagtcagtttaat

SEQ ID NO: 55809 - DNA, 25 bp, Probe sequence
tcgttggtgttgatagtcagtttaa

SEQ ID NO: 55810 - DNA, 25 bp, Probe sequence
catcgttggtgttgatagtcagttt

SEQ ID NO: 55811 - DNA, 25 bp, Probe sequence
tttattctaatacgcatttccatcg

SEQ ID NO: 55812 - DNA, 25 bp, Probe sequence
ttccatcgttggtgttgatagtcag

SEQ ID NO: 55813 - DNA, 25 bp, Probe sequence
ccatcgttggtgttgatagtcagtt

SEQ ID NO: 55814 - DNA, 25 bp, Probe sequence
atttccatcgttggtgttgatagtc

SEQ ID NO: 55815 - DNA, 25 bp, Probe sequence
catttccatcgttggtgttgatagt

SEQ ID NO: 55816 - DNA, 25 bp, Probe sequence
attggtgttaataataggcggatta

SEQ ID NO: 55817 - DNA, 25 bp, Probe sequence
tattggtgttaataataggcggatt

SEQ ID NO: 55818 - DNA, 25 bp, Probe sequence
atattggtgttaataataggcggat

SEQ ID NO: 55819 - DNA, 25 bp, Probe sequence
tatattggtgttaataataggcgga

SEQ ID NO: 55820 - DNA, 25 bp, Probe sequence
atatattggtgttaataataggcgg

SEQ ID NO: 55821 - DNA, 25 bp, Probe sequence
aatatattggtgttaataataggcg

SEQ ID NO: 55822 - DNA, 25 bp, Probe sequence
aatccgcctattattaacaccaata

SEQ ID NO: 55823 - DNA, 25 bp, Probe sequence
taatccgcctattattaacaccaat

SEQ ID NO: 55824 - DNA, 25 bp, Probe sequence
atccgcctattattaacaccaatat

SEQ ID NO: 55825 - DNA, 25 bp, Probe sequence
tccgcctattattaacaccaatata

SEQ ID NO: 55826 - DNA, 25 bp, Probe sequence
ccgcctattattaacaccaatatat

SEQ ID NO: 55827 - DNA, 25 bp, Probe sequence
cgcctattattaacaccaatatatt

SEQ ID NO: 55828 - DNA, 25 bp, Probe sequence
tggatgagatatttggagagaaacc

SEQ ID NO: 55829 - DNA, 25 bp, Probe sequence
ttggatgagatatttggagagaaac

SEQ ID NO: 55830 - DNA, 25 bp, Probe sequence
tttggatgagatatttggagagaaa

SEQ ID NO: 55831 - DNA, 25 bp, Probe sequence
atttggatgagatatttggagagaa

SEQ ID NO: 55832 - DNA, 25 bp, Probe sequence
aatttggatgagatatttggagaga

SEQ ID NO: 55833 - DNA, 25 bp, Probe sequence
tgagatatttggagagaaaccacaa

SEQ ID NO: 55834 - DNA, 25 bp, Probe sequence
ggatgagatatttggagagaaacca

SEQ ID NO: 55835 - DNA, 25 bp, Probe sequence
atgagatatttggagagaaaccaca

SEQ ID NO: 55836 - DNA, 25 bp, Probe sequence
gatgagatatttggagagaaaccac

SEQ ID NO: 55837 - DNA, 25 bp, Probe sequence
ggtttctctccaaatatctcatcca

SEQ ID NO: 55838 - DNA, 25 bp, Probe sequence
gtttctctccaaatatctcatccaa

SEQ ID NO: 55839 - DNA, 25 bp, Probe sequence
tttctctccaaatatctcatccaaa

SEQ ID NO: 55840 - DNA, 25 bp, Probe sequence
ttctctccaaatatctcatccaaat

SEQ ID NO: 55841 - DNA, 25 bp, Probe sequence
tctctccaaatatctcatccaaatt

SEQ ID NO: 55842 - DNA, 25 bp, Probe sequence
tggtttctctccaaatatctcatcc

SEQ ID NO: 55843 - DNA, 25 bp, Probe sequence
ttgtggtttctctccaaatatctca

SEQ ID NO: 55844 - DNA, 25 bp, Probe sequence
tgtggtttctctccaaatatctcat

SEQ ID NO: 55845 - DNA, 25 bp, Probe sequence
gtggtttctctccaaatatctcatc

SEQ ID NO: 55846 - DNA, 25 bp, Probe sequence
tctaacataacacatcagaggttgc

SEQ ID NO: 55847 - DNA, 25 bp, Probe sequence
tcatctaacataacacatcagaggt

SEQ ID NO: 55848 - DNA, 25 bp, Probe sequence
gtcatctaacataacacatcagagg

SEQ ID NO: 55849 - DNA, 25 bp, Probe sequence
atctaacataacacatcagaggttg

SEQ ID NO: 55850 - DNA, 25 bp, Probe sequence
catctaacataacacatcagaggtt

SEQ ID NO: 55851 - DNA, 25 bp, Probe sequence
ctaacataacacatcagaggttgcc

SEQ ID NO: 55852 - DNA, 25 bp, Probe sequence
agtcatctaacataacacatcagag

SEQ ID NO: 55853 - DNA, 25 bp, Probe sequence
aagtcatctaacataacacatcaga

SEQ ID NO: 55854 - DNA, 25 bp, Probe sequence
ttccagaccatacagtgataaagtt

SEQ ID NO: 55855 - DNA, 25 bp, Probe sequence
acctctgatgtgttatgttagatga

SEQ ID NO: 55856 - DNA, 25 bp, Probe sequence
gcaacctctgatgtgttatgttaga

SEQ ID NO: 55857 - DNA, 25 bp, Probe sequence
cctctgatgtgttatgttagatgac

SEQ ID NO: 55858 - DNA, 25 bp, Probe sequence
aacctctgatgtgttatgttagatg

SEQ ID NO: 55859 - DNA, 25 bp, Probe sequence
caacctctgatgtgttatgttagat

SEQ ID NO: 55860 - DNA, 25 bp, Probe sequence
ggcaacctctgatgtgttatgttag

SEQ ID NO: 55861 - DNA, 25 bp, Probe sequence
ctctgatgtgttatgttagatgact

SEQ ID NO: 55862 - DNA, 25 bp, Probe sequence
tctgatgtgttatgttagatgactt

SEQ ID NO: 55863 - DNA, 25 bp, Probe sequence
tcactgtatggtctggaataaatcg

SEQ ID NO: 55864 - DNA, 25 bp, Probe sequence
tgatgcttgagtgtagtaatgttga

SEQ ID NO: 55865 - DNA, 25 bp, Probe sequence
gtgatgcttgagtgtagtaatgttg

SEQ ID NO: 55866 - DNA, 25 bp, Probe sequence
agtgatgcttgagtgtagtaatgtt

SEQ ID NO: 55867 - DNA, 25 bp, Probe sequence
agagtgatgcttgagtgtagtaatg

SEQ ID NO: 55868 - DNA, 25 bp, Probe sequence
gatgcttgagtgtagtaatgttgaa

SEQ ID NO: 55869 - DNA, 25 bp, Probe sequence
gagtgatgcttgagtgtagtaatgt

SEQ ID NO: 55870 - DNA, 25 bp, Probe sequence
ttagagtgatgcttgagtgtagtaa

SEQ ID NO: 55871 - DNA, 25 bp, Probe sequence
tagagtgatgcttgagtgtagtaat

SEQ ID NO: 55872 - DNA, 25 bp, Probe sequence
tgcttgagtgtagtaatgttgaagt

SEQ ID NO: 55873 - DNA, 25 bp, Probe sequence
aacattactacactcaagcatcact

SEQ ID NO: 55874 - DNA, 25 bp, Probe sequence
caacattactacactcaagcatcac

SEQ ID NO: 55875 - DNA, 25 bp, Probe sequence
tcaacattactacactcaagcatca

SEQ ID NO: 55876 - DNA, 25 bp, Probe sequence
cattactacactcaagcatcactct

SEQ ID NO: 55877 - DNA, 25 bp, Probe sequence
acattactacactcaagcatcactc

SEQ ID NO: 55878 - DNA, 25 bp, Probe sequence
ttcaacattactacactcaagcatc

SEQ ID NO: 55879 - DNA, 25 bp, Probe sequence
ttactacactcaagcatcactctaa

SEQ ID NO: 55880 - DNA, 25 bp, Probe sequence
attactacactcaagcatcactcta

SEQ ID NO: 55881 - DNA, 25 bp, Probe sequence
acttcaacattactacactcaagca

SEQ ID NO: 55882 - DNA, 25 bp, Probe sequence
ttgaggagtcacacagtgtaattaa

SEQ ID NO: 55883 - DNA, 25 bp, Probe sequence
gttgaggagtcacacagtgtaatta

SEQ ID NO: 55884 - DNA, 25 bp, Probe sequence
tgaggagtcacacagtgtaattaaa

SEQ ID NO: 55885 - DNA, 25 bp, Probe sequence
cgttgaggagtcacacagtgtaatt

SEQ ID NO: 55886 - DNA, 25 bp, Probe sequence
ccaccgtttctcaaaatacttcatt

SEQ ID NO: 55887 - DNA, 25 bp, Probe sequence
attcccaccgtttctcaaaatactt

SEQ ID NO: 55888 - DNA, 25 bp, Probe sequence
cccaccgtttctcaaaatacttcat

SEQ ID NO: 55889 - DNA, 25 bp, Probe sequence
ttcccaccgtttctcaaaatacttc

SEQ ID NO: 55890 - DNA, 25 bp, Probe sequence
cattcccaccgtttctcaaaatact

SEQ ID NO: 55891 - DNA, 25 bp, Probe sequence
ttaattacactgtgtgactcctcaa

SEQ ID NO: 55892 - DNA, 25 bp, Probe sequence
taattacactgtgtgactcctcaac

SEQ ID NO: 55893 - DNA, 25 bp, Probe sequence
tttaattacactgtgtgactcctca

SEQ ID NO: 55894 - DNA, 25 bp, Probe sequence
aattacactgtgtgactcctcaacg

SEQ ID NO: 55895 - DNA, 25 bp, Probe sequence
aatgaagtattttgagaaacggtgg

SEQ ID NO: 55896 - DNA, 25 bp, Probe sequence
aagtattttgagaaacggtgggaat

SEQ ID NO: 55897 - DNA, 25 bp, Probe sequence
agtattttgagaaacggtgggaatg

SEQ ID NO: 55898 - DNA, 25 bp, Probe sequence
gaagtattttgagaaacggtgggaa

SEQ ID NO: 55899 - DNA, 25 bp, Probe sequence
atgaagtattttgagaaacggtggg

SEQ ID NO: 55900 - DNA, 25 bp, Probe sequence
aaatatatgaaggatggatgccact

SEQ ID NO: 55901 - DNA, 25 bp, Probe sequence
tttcttcatctatatttggcagtac

SEQ ID NO: 55902 - DNA, 25 bp, Probe sequence
tggcagtactactaaagtatgagtg

SEQ ID NO: 55903 - DNA, 25 bp, Probe sequence
ttcttcatctatatttggcagtact

SEQ ID NO: 55904 - DNA, 25 bp, Probe sequence
ccaaaatatatgaaggatggatgcc

SEQ ID NO: 55905 - DNA, 25 bp, Probe sequence
cccaaaatatatgaaggatggatgc

SEQ ID NO: 55906 - DNA, 25 bp, Probe sequence
ttggcagtactactaaagtatgagt

SEQ ID NO: 55907 - DNA, 25 bp, Probe sequence
aaaatatatgaaggatggatgccac

SEQ ID NO: 55908 - DNA, 25 bp, Probe sequence
caaaatatatgaaggatggatgcca

SEQ ID NO: 55909 - DNA, 25 bp, Probe sequence
agtggcatccatccttcatatattt

SEQ ID NO: 55910 - DNA, 25 bp, Probe sequence
gtactgccaaatatagatgaagaaa

SEQ ID NO: 55911 - DNA, 25 bp, Probe sequence
cactcatactttagtagtactgcca

SEQ ID NO: 55912 - DNA, 25 bp, Probe sequence
agtactgccaaatatagatgaagaa

SEQ ID NO: 55913 - DNA, 25 bp, Probe sequence
gcatccatccttcatatattttggg

SEQ ID NO: 55914 - DNA, 25 bp, Probe sequence
ggcatccatccttcatatattttgg

SEQ ID NO: 55915 - DNA, 25 bp, Probe sequence
actcatactttagtagtactgccaa

SEQ ID NO: 55916 - DNA, 25 bp, Probe sequence
tggcatccatccttcatatattttg

SEQ ID NO: 55917 - DNA, 25 bp, Probe sequence
gtggcatccatccttcatatatttt

SEQ ID NO: 55918 - DNA, 25 bp, Probe sequence
atgtaagacaaggttgttagcattg

SEQ ID NO: 55919 - DNA, 25 bp, Probe sequence
attaagcaatcattgtgtgagtatg

SEQ ID NO: 55920 - DNA, 25 bp, Probe sequence
tgtaagacaaggttgttagcattgg

SEQ ID NO: 55921 - DNA, 25 bp, Probe sequence
ttgttagcattggcagtgaaatatc

SEQ ID NO: 55922 - DNA, 25 bp, Probe sequence
gttgttagcattggcagtgaaatat

SEQ ID NO: 55923 - DNA, 25 bp, Probe sequence
caaactgtaaacaaagtatgggagg

SEQ ID NO: 55924 - DNA, 25 bp, Probe sequence
aattaagcaatcattgtgtgagtat

SEQ ID NO: 55925 - DNA, 25 bp, Probe sequence
tcaaactgtaaacaaagtatgggag

SEQ ID NO: 55926 - DNA, 25 bp, Probe sequence
aatgtaagacaaggttgttagcatt

SEQ ID NO: 55927 - DNA, 25 bp, Probe sequence
caatgctaacaaccttgtcttacat

SEQ ID NO: 55928 - DNA, 25 bp, Probe sequence
catactcacacaatgattgcttaat

SEQ ID NO: 55929 - DNA, 25 bp, Probe sequence
ccaatgctaacaaccttgtcttaca

SEQ ID NO: 55930 - DNA, 25 bp, Probe sequence
gatatttcactgccaatgctaacaa

SEQ ID NO: 55931 - DNA, 25 bp, Probe sequence
atatttcactgccaatgctaacaac

SEQ ID NO: 55932 - DNA, 25 bp, Probe sequence
cctcccatactttgtttacagtttg

SEQ ID NO: 55933 - DNA, 25 bp, Probe sequence
atactcacacaatgattgcttaatt

SEQ ID NO: 55934 - DNA, 25 bp, Probe sequence
ctcccatactttgtttacagtttga

SEQ ID NO: 55935 - DNA, 25 bp, Probe sequence
aatgctaacaaccttgtcttacatt

SEQ ID NO: 55936 - DNA, 25 bp, Probe sequence
ggcagaattgataaagaaccactaa

SEQ ID NO: 55937 - DNA, 25 bp, Probe sequence
gggcagaattgataaagaaccacta

SEQ ID NO: 55938 - DNA, 25 bp, Probe sequence
ttgataaagaaccactaatgacgat

SEQ ID NO: 55939 - DNA, 25 bp, Probe sequence
attgataaagaaccactaatgacga

SEQ ID NO: 55940 - DNA, 25 bp, Probe sequence
aaagaaccactaatgacgataaaga

SEQ ID NO: 55941 - DNA, 25 bp, Probe sequence
agaaccactaatgacgataaagatt

SEQ ID NO: 55942 - DNA, 25 bp, Probe sequence
aagaaccactaatgacgataaagat

SEQ ID NO: 55943 - DNA, 25 bp, Probe sequence
tgataaagaaccactaatgacgata

SEQ ID NO: 55944 - DNA, 25 bp, Probe sequence
aattgataaagaaccactaatgacg

SEQ ID NO: 55945 - DNA, 25 bp, Probe sequence
ttagtggttctttatcaattctgcc

SEQ ID NO: 55946 - DNA, 25 bp, Probe sequence
tagtggttctttatcaattctgccc

SEQ ID NO: 55947 - DNA, 25 bp, Probe sequence
tcgtcattagtggttctttatcaat

SEQ ID NO: 55948 - DNA, 25 bp, Probe sequence
atcgtcattagtggttctttatcaa

SEQ ID NO: 55949 - DNA, 25 bp, Probe sequence
tctttatcgtcattagtggttcttt

SEQ ID NO: 55950 - DNA, 25 bp, Probe sequence
atctttatcgtcattagtggttctt

SEQ ID NO: 55951 - DNA, 25 bp, Probe sequence
aatctttatcgtcattagtggttct

SEQ ID NO: 55952 - DNA, 25 bp, Probe sequence
tatcgtcattagtggttctttatca

SEQ ID NO: 55953 - DNA, 25 bp, Probe sequence
cgtcattagtggttctttatcaatt

SEQ ID NO: 55954 - DNA, 25 bp, Probe sequence
attcacagtaacaatcctcaccatt

SEQ ID NO: 55955 - DNA, 25 bp, Probe sequence
cattcacagtaacaatcctcaccat

SEQ ID NO: 55956 - DNA, 25 bp, Probe sequence
caatggtcatagacacgacatactt

SEQ ID NO: 55957 - DNA, 25 bp, Probe sequence
acaatggtcatagacacgacatact

SEQ ID NO: 55958 - DNA, 25 bp, Probe sequence
cacaatggtcatagacacgacatac

SEQ ID NO: 55959 - DNA, 25 bp, Probe sequence
tcacaatggtcatagacacgacata

SEQ ID NO: 55960 - DNA, 25 bp, Probe sequence
ccattcacagtaacaatcctcacca

SEQ ID NO: 55961 - DNA, 25 bp, Probe sequence
aggttagtctgaagtttgtctgaag

SEQ ID NO: 55962 - DNA, 25 bp, Probe sequence
gaggttagtctgaagtttgtctgaa

SEQ ID NO: 55963 - DNA, 25 bp, Probe sequence
aatggtgaggattgttactgtgaat

SEQ ID NO: 55964 - DNA, 25 bp, Probe sequence
atggtgaggattgttactgtgaatg

SEQ ID NO: 55965 - DNA, 25 bp, Probe sequence
aagtatgtcgtgtctatgaccattg

SEQ ID NO: 55966 - DNA, 25 bp, Probe sequence
tatgtcgtgtctatgaccattgtga

SEQ ID NO: 55967 - DNA, 25 bp, Probe sequence
gtatgtcgtgtctatgaccattgtg

SEQ ID NO: 55968 - DNA, 25 bp, Probe sequence
agtatgtcgtgtctatgaccattgt

SEQ ID NO: 55969 - DNA, 25 bp, Probe sequence
tggtgaggattgttactgtgaatgg

SEQ ID NO: 55970 - DNA, 25 bp, Probe sequence
ttcagacaaacttcagactaacctc

SEQ ID NO: 55971 - DNA, 25 bp, Probe sequence
cttcagacaaacttcagactaacct

SEQ ID NO: 55972 - DNA, 25 bp, Probe sequence
accgacgtgatatatttggcttaac

SEQ ID NO: 55973 - DNA, 25 bp, Probe sequence
taacgaaaatgattgaggtgacaga

SEQ ID NO: 55974 - DNA, 25 bp, Probe sequence
ttaacgaaaatgattgaggtgacag

SEQ ID NO: 55975 - DNA, 25 bp, Probe sequence
cttaacgaaaatgattgaggtgaca

SEQ ID NO: 55976 - DNA, 25 bp, Probe sequence
tttggcttaacgaaaatgattgagg

SEQ ID NO: 55977 - DNA, 25 bp, Probe sequence
gcttaacgaaaatgattgaggtgac

SEQ ID NO: 55978 - DNA, 25 bp, Probe sequence
aacgaaaatgattgaggtgacagag

SEQ ID NO: 55979 - DNA, 25 bp, Probe sequence
ttggcttaacgaaaatgattgaggt

SEQ ID NO: 55980 - DNA, 25 bp, Probe sequence
caccgacgtgatatatttggcttaa

SEQ ID NO: 55981 - DNA, 25 bp, Probe sequence
gttaagccaaatatatcacgtcggt

SEQ ID NO: 55982 - DNA, 25 bp, Probe sequence
tctgtcacctcaatcattttcgtta

SEQ ID NO: 55983 - DNA, 25 bp, Probe sequence
tgtcacctcaatcattttcgttaag

SEQ ID NO: 55984 - DNA, 25 bp, Probe sequence
ctgtcacctcaatcattttcgttaa

SEQ ID NO: 55985 - DNA, 25 bp, Probe sequence
cctcaatcattttcgttaagccaaa

SEQ ID NO: 55986 - DNA, 25 bp, Probe sequence
gtcacctcaatcattttcgttaagc

SEQ ID NO: 55987 - DNA, 25 bp, Probe sequence
ctctgtcacctcaatcattttcgtt

SEQ ID NO: 55988 - DNA, 25 bp, Probe sequence
ttaagccaaatatatcacgtcggtg

SEQ ID NO: 55989 - DNA, 25 bp, Probe sequence
acctcaatcattttcgttaagccaa

SEQ ID NO: 55990 - DNA, 25 bp, Probe sequence
tagggtgactcaatgaatttactcc

SEQ ID NO: 55991 - DNA, 25 bp, Probe sequence
ttatgaagtatccttatttgcccga

SEQ ID NO: 55992 - DNA, 25 bp, Probe sequence
gttatgaagtatccttatttgcccg

SEQ ID NO: 55993 - DNA, 25 bp, Probe sequence
tatgaagtatccttatttgcccgac

SEQ ID NO: 55994 - DNA, 25 bp, Probe sequence
gggtgactcaatgaatttactcctt

SEQ ID NO: 55995 - DNA, 25 bp, Probe sequence
gatgaaagatactgcttctaccctt

SEQ ID NO: 55996 - DNA, 25 bp, Probe sequence
atgaaagatactgcttctacccttg

SEQ ID NO: 55997 - DNA, 25 bp, Probe sequence
agagatgaaagatactgcttctacc

SEQ ID NO: 55998 - DNA, 25 bp, Probe sequence
atgtgcgtgaagagatgaaagatac

SEQ ID NO: 55999 - DNA, 25 bp, Probe sequence
ggagtaaattcattgagtcacccta

SEQ ID NO: 56000 - DNA, 25 bp, Probe sequence
cgggcaaataaggatacttcataac

SEQ ID NO: 56001 - DNA, 25 bp, Probe sequence
tcgggcaaataaggatacttcataa

SEQ ID NO: 56002 - DNA, 25 bp, Probe sequence
gtcgggcaaataaggatacttcata

SEQ ID NO: 56003 - DNA, 25 bp, Probe sequence
aaggagtaaattcattgagtcaccc

SEQ ID NO: 56004 - DNA, 25 bp, Probe sequence
aagggtagaagcagtatctttcatc

SEQ ID NO: 56005 - DNA, 25 bp, Probe sequence
caagggtagaagcagtatctttcat

SEQ ID NO: 56006 - DNA, 25 bp, Probe sequence
gtatctttcatctcttcacgcacat

SEQ ID NO: 56007 - DNA, 25 bp, Probe sequence
ggtagaagcagtatctttcatctct

SEQ ID NO: 56008 - DNA, 25 bp, Probe sequence
ttcacaacattatacagatggaggc

SEQ ID NO: 56009 - DNA, 25 bp, Probe sequence
attcacaacattatacagatggagg

SEQ ID NO: 56010 - DNA, 25 bp, Probe sequence
acaacattatacagatggaggcgtt

SEQ ID NO: 56011 - DNA, 25 bp, Probe sequence
tcacaacattatacagatggaggcg

SEQ ID NO: 56012 - DNA, 25 bp, Probe sequence
gcaattagcatattactgttacaca

SEQ ID NO: 56013 - DNA, 25 bp, Probe sequence
cattatacagatggaggcgtttagt

SEQ ID NO: 56014 - DNA, 25 bp, Probe sequence
acattatacagatggaggcgtttag

SEQ ID NO: 56015 - DNA, 25 bp, Probe sequence
aacattatacagatggaggcgttta

SEQ ID NO: 56016 - DNA, 25 bp, Probe sequence
aattcacaacattatacagatggag

SEQ ID NO: 56017 - DNA, 25 bp, Probe sequence
gcctccatctgtataatgttgtgaa

SEQ ID NO: 56018 - DNA, 25 bp, Probe sequence
cctccatctgtataatgttgtgaat

SEQ ID NO: 56019 - DNA, 25 bp, Probe sequence
aacgcctccatctgtataatgttgt

SEQ ID NO: 56020 - DNA, 25 bp, Probe sequence
cgcctccatctgtataatgttgtga

SEQ ID NO: 56021 - DNA, 25 bp, Probe sequence
tgtgtaacagtaatatgctaattgc

SEQ ID NO: 56022 - DNA, 25 bp, Probe sequence
ctaaacgcctccatctgtataatgt

SEQ ID NO: 56023 - DNA, 25 bp, Probe sequence
actaaacgcctccatctgtataatg

SEQ ID NO: 56024 - DNA, 25 bp, Probe sequence
taaacgcctccatctgtataatgtt

SEQ ID NO: 56025 - DNA, 25 bp, Probe sequence
ctccatctgtataatgttgtgaatt

SEQ ID NO: 56026 - DNA, 25 bp, Probe sequence
ttgagtattgagtattagcaagacg

SEQ ID NO: 56027 - DNA, 25 bp, Probe sequence
tgagtattagcaagacgtagtaagt

SEQ ID NO: 56028 - DNA, 25 bp, Probe sequence
tgagtattgagtattagcaagacgt

SEQ ID NO: 56029 - DNA, 25 bp, Probe sequence
gtattgagtattagcaagacgtagt

SEQ ID NO: 56030 - DNA, 25 bp, Probe sequence
ttgagtattagcaagacgtagtaag

SEQ ID NO: 56031 - DNA, 25 bp, Probe sequence
gagtattgagtattagcaagacgta

SEQ ID NO: 56032 - DNA, 25 bp, Probe sequence
attgagtattgagtattagcaagac

SEQ ID NO: 56033 - DNA, 25 bp, Probe sequence
agtattgagtattagcaagacgtag

SEQ ID NO: 56034 - DNA, 25 bp, Probe sequence
gagtattagcaagacgtagtaagta

SEQ ID NO: 56035 - DNA, 25 bp, Probe sequence
cgtcttgctaatactcaatactcaa

SEQ ID NO: 56036 - DNA, 25 bp, Probe sequence
acttactacgtcttgctaatactca

SEQ ID NO: 56037 - DNA, 25 bp, Probe sequence
acgtcttgctaatactcaatactca

SEQ ID NO: 56038 - DNA, 25 bp, Probe sequence
actacgtcttgctaatactcaatac

SEQ ID NO: 56039 - DNA, 25 bp, Probe sequence
cttactacgtcttgctaatactcaa

SEQ ID NO: 56040 - DNA, 25 bp, Probe sequence
tacgtcttgctaatactcaatactc

SEQ ID NO: 56041 - DNA, 25 bp, Probe sequence
gtcttgctaatactcaatactcaat

SEQ ID NO: 56042 - DNA, 25 bp, Probe sequence
ctacgtcttgctaatactcaatact

SEQ ID NO: 56043 - DNA, 25 bp, Probe sequence
tacttactacgtcttgctaatactc

SEQ ID NO: 56044 - DNA, 25 bp, Probe sequence
ataggcaatcgtttcattcgtttat

SEQ ID NO: 56045 - DNA, 25 bp, Probe sequence
aggcaatcgtttcattcgtttatat

SEQ ID NO: 56046 - DNA, 25 bp, Probe sequence
gataggcaatcgtttcattcgttta

SEQ ID NO: 56047 - DNA, 25 bp, Probe sequence
taggcaatcgtttcattcgtttata

SEQ ID NO: 56048 - DNA, 25 bp, Probe sequence
ggcaatcgtttcattcgtttatatt

SEQ ID NO: 56049 - DNA, 25 bp, Probe sequence
tatgggataggcaatcgtttcattc

SEQ ID NO: 56050 - DNA, 25 bp, Probe sequence
ctatgggataggcaatcgtttcatt

SEQ ID NO: 56051 - DNA, 25 bp, Probe sequence
gcaatcgtttcattcgtttatattc

SEQ ID NO: 56052 - DNA, 25 bp, Probe sequence
ggataggcaatcgtttcattcgttt

SEQ ID NO: 56053 - DNA, 25 bp, Probe sequence
ataaacgaatgaaacgattgcctat

SEQ ID NO: 56054 - DNA, 25 bp, Probe sequence
taaacgaatgaaacgattgcctatc

SEQ ID NO: 56055 - DNA, 25 bp, Probe sequence
atataaacgaatgaaacgattgcct

SEQ ID NO: 56056 - DNA, 25 bp, Probe sequence
tataaacgaatgaaacgattgccta

SEQ ID NO: 56057 - DNA, 25 bp, Probe sequence
aatataaacgaatgaaacgattgcc

SEQ ID NO: 56058 - DNA, 25 bp, Probe sequence
gaatgaaacgattgcctatcccata

SEQ ID NO: 56059 - DNA, 25 bp, Probe sequence
aatgaaacgattgcctatcccatag

SEQ ID NO: 56060 - DNA, 25 bp, Probe sequence
gaatataaacgaatgaaacgattgc

SEQ ID NO: 56061 - DNA, 25 bp, Probe sequence
aaacgaatgaaacgattgcctatcc

SEQ ID NO: 56062 - DNA, 25 bp, Probe sequence
tgtttctttaatgtagattgggcaa

SEQ ID NO: 56063 - DNA, 25 bp, Probe sequence
ttgtttctttaatgtagattgggca

SEQ ID NO: 56064 - DNA, 25 bp, Probe sequence
tttgtttctttaatgtagattgggc

SEQ ID NO: 56065 - DNA, 25 bp, Probe sequence
gtttctttaatgtagattgggcaat

SEQ ID NO: 56066 - DNA, 25 bp, Probe sequence
tctttaatgtagattgggcaattac

SEQ ID NO: 56067 - DNA, 25 bp, Probe sequence
tttctttaatgtagattgggcaatt

SEQ ID NO: 56068 - DNA, 25 bp, Probe sequence
ttctttaatgtagattgggcaatta

SEQ ID NO: 56069 - DNA, 25 bp, Probe sequence
gtagattgggcaattacattttgga

SEQ ID NO: 56070 - DNA, 25 bp, Probe sequence
tagattgggcaattacattttggag

SEQ ID NO: 56071 - DNA, 25 bp, Probe sequence
tgcccaatctacattaaagaaacaa

SEQ ID NO: 56072 - DNA, 25 bp, Probe sequence
ttgcccaatctacattaaagaaaca

SEQ ID NO: 56073 - DNA, 25 bp, Probe sequence
gcccaatctacattaaagaaacaaa

SEQ ID NO: 56074 - DNA, 25 bp, Probe sequence
attgcccaatctacattaaagaaac

SEQ ID NO: 56075 - DNA, 25 bp, Probe sequence
aattgcccaatctacattaaagaaa

SEQ ID NO: 56076 - DNA, 25 bp, Probe sequence
gtaattgcccaatctacattaaaga

SEQ ID NO: 56077 - DNA, 25 bp, Probe sequence
taattgcccaatctacattaaagaa

SEQ ID NO: 56078 - DNA, 25 bp, Probe sequence
tccaaaatgtaattgcccaatctac

SEQ ID NO: 56079 - DNA, 25 bp, Probe sequence
ctccaaaatgtaattgcccaatcta

SEQ ID NO: 56080 - DNA, 25 bp, Probe sequence
actctatccaaagacatacagtcaa

SEQ ID NO: 56081 - DNA, 25 bp, Probe sequence
aactctatccaaagacatacagtca

SEQ ID NO: 56082 - DNA, 25 bp, Probe sequence
gaacaatcggaagcatatttctaaa

SEQ ID NO: 56083 - DNA, 25 bp, Probe sequence
tccaaagacatacagtcaatacaaa

SEQ ID NO: 56084 - DNA, 25 bp, Probe sequence
ccaaagacatacagtcaatacaaag

SEQ ID NO: 56085 - DNA, 25 bp, Probe sequence
atccaaagacatacagtcaatacaa

SEQ ID NO: 56086 - DNA, 25 bp, Probe sequence
tctaactgaattaaagcatcgaaca

SEQ ID NO: 56087 - DNA, 25 bp, Probe sequence
ctctatccaaagacatacagtcaat

SEQ ID NO: 56088 - DNA, 25 bp, Probe sequence
aactgaattaaagcatcgaacaatc

SEQ ID NO: 56089 - DNA, 25 bp, Probe sequence
tgactgtatgtctttggatagagtt

SEQ ID NO: 56090 - DNA, 25 bp, Probe sequence
ttgactgtatgtctttggatagagt

SEQ ID NO: 56091 - DNA, 25 bp, Probe sequence
tttagaaatatgcttccgattgttc

SEQ ID NO: 56092 - DNA, 25 bp, Probe sequence
tttgtattgactgtatgtctttgga

SEQ ID NO: 56093 - DNA, 25 bp, Probe sequence
ttgtattgactgtatgtctttggat

SEQ ID NO: 56094 - DNA, 25 bp, Probe sequence
ctttgtattgactgtatgtctttgg

SEQ ID NO: 56095 - DNA, 25 bp, Probe sequence
tgttcgatgctttaattcagttaga

SEQ ID NO: 56096 - DNA, 25 bp, Probe sequence
attgactgtatgtctttggatagag

SEQ ID NO: 56097 - DNA, 25 bp, Probe sequence
attcagttagaagcatcatagaatg

SEQ ID NO: 56098 - DNA, 25 bp, Probe sequence
gaaataaccaccatcccattaaacc

SEQ ID NO: 56099 - DNA, 25 bp, Probe sequence
aaataaccaccatcccattaaacca

SEQ ID NO: 56100 - DNA, 25 bp, Probe sequence
aataaccaccatcccattaaaccac

SEQ ID NO: 56101 - DNA, 25 bp, Probe sequence
ataaccaccatcccattaaaccact

SEQ ID NO: 56102 - DNA, 25 bp, Probe sequence
taaccaccatcccattaaaccactt

SEQ ID NO: 56103 - DNA, 25 bp, Probe sequence
ggaaataaccaccatcccattaaac

SEQ ID NO: 56104 - DNA, 25 bp, Probe sequence
cggaaataaccaccatcccattaaa

SEQ ID NO: 56105 - DNA, 25 bp, Probe sequence
aaccaccatcccattaaaccacttt

SEQ ID NO: 56106 - DNA, 25 bp, Probe sequence
acggaaataaccaccatcccattaa

SEQ ID NO: 56107 - DNA, 25 bp, Probe sequence
ggtttaatgggatggtggttatttc

SEQ ID NO: 56108 - DNA, 25 bp, Probe sequence
tggtttaatgggatggtggttattt

SEQ ID NO: 56109 - DNA, 25 bp, Probe sequence
gtggtttaatgggatggtggttatt

SEQ ID NO: 56110 - DNA, 25 bp, Probe sequence
agtggtttaatgggatggtggttat

SEQ ID NO: 56111 - DNA, 25 bp, Probe sequence
aagtggtttaatgggatggtggtta

SEQ ID NO: 56112 - DNA, 25 bp, Probe sequence
gtttaatgggatggtggttatttcc

SEQ ID NO: 56113 - DNA, 25 bp, Probe sequence
tttaatgggatggtggttatttccg

SEQ ID NO: 56114 - DNA, 25 bp, Probe sequence
aaagtggtttaatgggatggtggtt

SEQ ID NO: 56115 - DNA, 25 bp, Probe sequence
taatgggatggtggttatttccgtt

SEQ ID NO: 56116 - DNA, 25 bp, Probe sequence
ttgacagtcatcttagcctcttatt

SEQ ID NO: 56117 - DNA, 25 bp, Probe sequence
gacagtcatcttagcctcttattta

SEQ ID NO: 56118 - DNA, 25 bp, Probe sequence
ctttgacagtcatcttagcctctta

SEQ ID NO: 56119 - DNA, 25 bp, Probe sequence
tatctttgacagtcatcttagcctc

SEQ ID NO: 56120 - DNA, 25 bp, Probe sequence
gtatctttgacagtcatcttagcct

SEQ ID NO: 56121 - DNA, 25 bp, Probe sequence
agtatctttgacagtcatcttagcc

SEQ ID NO: 56122 - DNA, 25 bp, Probe sequence
tgacagtcatcttagcctcttattt

SEQ ID NO: 56123 - DNA, 25 bp, Probe sequence
tttgacagtcatcttagcctcttat

SEQ ID NO: 56124 - DNA, 25 bp, Probe sequence
acagtcatcttagcctcttatttaa

SEQ ID NO: 56125 - DNA, 25 bp, Probe sequence
aataagaggctaagatgactgtcaa

SEQ ID NO: 56126 - DNA, 25 bp, Probe sequence
taaataagaggctaagatgactgtc

SEQ ID NO: 56127 - DNA, 25 bp, Probe sequence
ggctaagatgactgtcaaagatact

SEQ ID NO: 56128 - DNA, 25 bp, Probe sequence
aggctaagatgactgtcaaagatac

SEQ ID NO: 56129 - DNA, 25 bp, Probe sequence
gaggctaagatgactgtcaaagata

SEQ ID NO: 56130 - DNA, 25 bp, Probe sequence
taagaggctaagatgactgtcaaag

SEQ ID NO: 56131 - DNA, 25 bp, Probe sequence
ataagaggctaagatgactgtcaaa

SEQ ID NO: 56132 - DNA, 25 bp, Probe sequence
aaataagaggctaagatgactgtca

SEQ ID NO: 56133 - DNA, 25 bp, Probe sequence
ttaaataagaggctaagatgactgt

SEQ ID NO: 56134 - DNA, 25 bp, Probe sequence
aacacgctttatttgtaaacgctta

SEQ ID NO: 56135 - DNA, 25 bp, Probe sequence
caacacgctttatttgtaaacgctt

SEQ ID NO: 56136 - DNA, 25 bp, Probe sequence
acacgctttatttgtaaacgcttac

SEQ ID NO: 56137 - DNA, 25 bp, Probe sequence
gtaaacgcttacactaaatgtcaaa

SEQ ID NO: 56138 - DNA, 25 bp, Probe sequence
aaacaacacgctttatttgtaaacg

SEQ ID NO: 56139 - DNA, 25 bp, Probe sequence
aacaacacgctttatttgtaaacgc

SEQ ID NO: 56140 - DNA, 25 bp, Probe sequence
taaacgcttacactaaatgtcaaaa

SEQ ID NO: 56141 - DNA, 25 bp, Probe sequence
acaacacgctttatttgtaaacgct

SEQ ID NO: 56142 - DNA, 25 bp, Probe sequence
cgctttatttgtaaacgcttacact

SEQ ID NO: 56143 - DNA, 25 bp, Probe sequence
taagcgtttacaaataaagcgtgtt

SEQ ID NO: 56144 - DNA, 25 bp, Probe sequence
aagcgtttacaaataaagcgtgttg

SEQ ID NO: 56145 - DNA, 25 bp, Probe sequence
gtaagcgtttacaaataaagcgtgt

SEQ ID NO: 56146 - DNA, 25 bp, Probe sequence
tttgacatttagtgtaagcgtttac

SEQ ID NO: 56147 - DNA, 25 bp, Probe sequence
cgtttacaaataaagcgtgttgttt

SEQ ID NO: 56148 - DNA, 25 bp, Probe sequence
gcgtttacaaataaagcgtgttgtt

SEQ ID NO: 56149 - DNA, 25 bp, Probe sequence
ttttgacatttagtgtaagcgttta

SEQ ID NO: 56150 - DNA, 25 bp, Probe sequence
agcgtttacaaataaagcgtgttgt

SEQ ID NO: 56151 - DNA, 25 bp, Probe sequence
agtgtaagcgtttacaaataaagcg

SEQ ID NO: 56152 - DNA, 25 bp, Probe sequence
tgataatagacacagtatagacaca

SEQ ID NO: 56153 - DNA, 25 bp, Probe sequence
cgcccaatcgaacaaagtatttata

SEQ ID NO: 56154 - DNA, 25 bp, Probe sequence
ctgataatagacacagtatagacac

SEQ ID NO: 56155 - DNA, 25 bp, Probe sequence
gcccaatcgaacaaagtatttatat

SEQ ID NO: 56156 - DNA, 25 bp, Probe sequence
agtcacctccatcacatttgataaa

SEQ ID NO: 56157 - DNA, 25 bp, Probe sequence
aagtcacctccatcacatttgataa

SEQ ID NO: 56158 - DNA, 25 bp, Probe sequence
tctgataatagacacagtatagaca

SEQ ID NO: 56159 - DNA, 25 bp, Probe sequence
caagtcacctccatcacatttgata

SEQ ID NO: 56160 - DNA, 25 bp, Probe sequence
gataatagacacagtatagacacat

SEQ ID NO: 56161 - DNA, 25 bp, Probe sequence
tgtgtctatactgtgtctattatca

SEQ ID NO: 56162 - DNA, 25 bp, Probe sequence
tataaatactttgttcgattgggcg

SEQ ID NO: 56163 - DNA, 25 bp, Probe sequence
gtgtctatactgtgtctattatcag

SEQ ID NO: 56164 - DNA, 25 bp, Probe sequence
atataaatactttgttcgattgggc

SEQ ID NO: 56165 - DNA, 25 bp, Probe sequence
ttatcaaatgtgatggaggtgactt

SEQ ID NO: 56166 - DNA, 25 bp, Probe sequence
tttatcaaatgtgatggaggtgact

SEQ ID NO: 56167 - DNA, 25 bp, Probe sequence
tgtctatactgtgtctattatcaga

SEQ ID NO: 56168 - DNA, 25 bp, Probe sequence
tatcaaatgtgatggaggtgacttg

SEQ ID NO: 56169 - DNA, 25 bp, Probe sequence
atgtgtctatactgtgtctattatc

SEQ ID NO: 56170 - DNA, 25 bp, Probe sequence
ataagcaaattaaaccacgccataa

SEQ ID NO: 56171 - DNA, 25 bp, Probe sequence
tcatataagcaaattaaaccacgcc

SEQ ID NO: 56172 - DNA, 25 bp, Probe sequence
atataagcaaattaaaccacgccat

SEQ ID NO: 56173 - DNA, 25 bp, Probe sequence
catataagcaaattaaaccacgcca

SEQ ID NO: 56174 - DNA, 25 bp, Probe sequence
aaccacgccataatcatattggatg

SEQ ID NO: 56175 - DNA, 25 bp, Probe sequence
tataagcaaattaaaccacgccata

SEQ ID NO: 56176 - DNA, 25 bp, Probe sequence
taagcaaattaaaccacgccataat

SEQ ID NO: 56177 - DNA, 25 bp, Probe sequence
aagcaaattaaaccacgccataatc

SEQ ID NO: 56178 - DNA, 25 bp, Probe sequence
atcatataagcaaattaaaccacgc

SEQ ID NO: 56179 - DNA, 25 bp, Probe sequence
ggcgtggtttaatttgcttatatga

SEQ ID NO: 56180 - DNA, 25 bp, Probe sequence
ttatggcgtggtttaatttgcttat

SEQ ID NO: 56181 - DNA, 25 bp, Probe sequence
atggcgtggtttaatttgcttatat

SEQ ID NO: 56182 - DNA, 25 bp, Probe sequence
tggcgtggtttaatttgcttatatg

SEQ ID NO: 56183 - DNA, 25 bp, Probe sequence
catccaatatgattatggcgtggtt

SEQ ID NO: 56184 - DNA, 25 bp, Probe sequence
tatggcgtggtttaatttgcttata

SEQ ID NO: 56185 - DNA, 25 bp, Probe sequence
attatggcgtggtttaatttgctta

SEQ ID NO: 56186 - DNA, 25 bp, Probe sequence
gattatggcgtggtttaatttgctt

SEQ ID NO: 56187 - DNA, 25 bp, Probe sequence
gcgtggtttaatttgcttatatgat

SEQ ID NO: 56188 - DNA, 25 bp, Probe sequence
tgaagttagcgacatttatagtgat

SEQ ID NO: 56189 - DNA, 25 bp, Probe sequence
agttagcgacatttatagtgattca

SEQ ID NO: 56190 - DNA, 25 bp, Probe sequence
atgaagttagcgacatttatagtga

SEQ ID NO: 56191 - DNA, 25 bp, Probe sequence
aagttagcgacatttatagtgattc

SEQ ID NO: 56192 - DNA, 25 bp, Probe sequence
gaagttagcgacatttatagtgatt

SEQ ID NO: 56193 - DNA, 25 bp, Probe sequence
tagcgacatttatagtgattcacga

SEQ ID NO: 56194 - DNA, 25 bp, Probe sequence
agcgacatttatagtgattcacgat

SEQ ID NO: 56195 - DNA, 25 bp, Probe sequence
ttagcgacatttatagtgattcacg

SEQ ID NO: 56196 - DNA, 25 bp, Probe sequence
gcgacatttatagtgattcacgata

SEQ ID NO: 56197 - DNA, 25 bp, Probe sequence
atcactataaatgtcgctaacttca

SEQ ID NO: 56198 - DNA, 25 bp, Probe sequence
tgaatcactataaatgtcgctaact

SEQ ID NO: 56199 - DNA, 25 bp, Probe sequence
tcactataaatgtcgctaacttcat

SEQ ID NO: 56200 - DNA, 25 bp, Probe sequence
aatcactataaatgtcgctaacttc

SEQ ID NO: 56201 - DNA, 25 bp, Probe sequence
gaatcactataaatgtcgctaactt

SEQ ID NO: 56202 - DNA, 25 bp, Probe sequence
tcgtgaatcactataaatgtcgcta

SEQ ID NO: 56203 - DNA, 25 bp, Probe sequence
atcgtgaatcactataaatgtcgct

SEQ ID NO: 56204 - DNA, 25 bp, Probe sequence
cgtgaatcactataaatgtcgctaa

SEQ ID NO: 56205 - DNA, 25 bp, Probe sequence
tatcgtgaatcactataaatgtcgc

SEQ ID NO: 56206 - DNA, 25 bp, Probe sequence
aaagtaaagtcatagctgttttggt

SEQ ID NO: 56207 - DNA, 25 bp, Probe sequence
aaaacagccatgacaaagtaaagtc

SEQ ID NO: 56208 - DNA, 25 bp, Probe sequence
aagtaaagtcatagctgttttggta

SEQ ID NO: 56209 - DNA, 25 bp, Probe sequence
agtcatagctgttttggtatagatg

SEQ ID NO: 56210 - DNA, 25 bp, Probe sequence
agtaaagtcatagctgttttggtat

SEQ ID NO: 56211 - DNA, 25 bp, Probe sequence
aaagtcatagctgttttggtataga

SEQ ID NO: 56212 - DNA, 25 bp, Probe sequence
aagtcatagctgttttggtatagat

SEQ ID NO: 56213 - DNA, 25 bp, Probe sequence
aaacagccatgacaaagtaaagtca

SEQ ID NO: 56214 - DNA, 25 bp, Probe sequence
gacaaagtaaagtcatagctgtttt

SEQ ID NO: 56215 - DNA, 25 bp, Probe sequence
accaaaacagctatgactttacttt

SEQ ID NO: 56216 - DNA, 25 bp, Probe sequence
gactttactttgtcatggctgtttt

SEQ ID NO: 56217 - DNA, 25 bp, Probe sequence
taccaaaacagctatgactttactt

SEQ ID NO: 56218 - DNA, 25 bp, Probe sequence
ataccaaaacagctatgactttact

SEQ ID NO: 56219 - DNA, 25 bp, Probe sequence
catctataccaaaacagctatgact

SEQ ID NO: 56220 - DNA, 25 bp, Probe sequence
tctataccaaaacagctatgacttt

SEQ ID NO: 56221 - DNA, 25 bp, Probe sequence
atctataccaaaacagctatgactt

SEQ ID NO: 56222 - DNA, 25 bp, Probe sequence
tgactttactttgtcatggctgttt

SEQ ID NO: 56223 - DNA, 25 bp, Probe sequence
aaaacagctatgactttactttgtc

SEQ ID NO: 56224 - DNA, 25 bp, Probe sequence
acttatcaataagcattgtgtacaa

SEQ ID NO: 56225 - DNA, 25 bp, Probe sequence
atacttatcaataagcattgtgtac

SEQ ID NO: 56226 - DNA, 25 bp, Probe sequence
tacttatcaataagcattgtgtaca

SEQ ID NO: 56227 - DNA, 25 bp, Probe sequence
cttatcaataagcattgtgtacaat

SEQ ID NO: 56228 - DNA, 25 bp, Probe sequence
aaatacttatcaataagcattgtgt

SEQ ID NO: 56229 - DNA, 25 bp, Probe sequence
ttgtacacaatgcttattgataagt

SEQ ID NO: 56230 - DNA, 25 bp, Probe sequence
gtacacaatgcttattgataagtat

SEQ ID NO: 56231 - DNA, 25 bp, Probe sequence
tgtacacaatgcttattgataagta

SEQ ID NO: 56232 - DNA, 25 bp, Probe sequence
attgtacacaatgcttattgataag

SEQ ID NO: 56233 - DNA, 25 bp, Probe sequence
acacaatgcttattgataagtattt

SEQ ID NO: 56234 - DNA, 25 bp, Probe sequence
ttgtatcgccaataagcagcattaa

SEQ ID NO: 56235 - DNA, 25 bp, Probe sequence
acgaagactaaagacacctaagatg

SEQ ID NO: 56236 - DNA, 25 bp, Probe sequence
gccaataagcagcattaaactaaca

SEQ ID NO: 56237 - DNA, 25 bp, Probe sequence
aataatcactggcgaagtacgaaga

SEQ ID NO: 56238 - DNA, 25 bp, Probe sequence
gtatcgccaataagcagcattaaac

SEQ ID NO: 56239 - DNA, 25 bp, Probe sequence
tacgaagactaaagacacctaagat

SEQ ID NO: 56240 - DNA, 25 bp, Probe sequence
atcgccaataagcagcattaaacta

SEQ ID NO: 56241 - DNA, 25 bp, Probe sequence
tatcgccaataagcagcattaaact

SEQ ID NO: 56242 - DNA, 25 bp, Probe sequence
cgccaataagcagcattaaactaac

SEQ ID NO: 56243 - DNA, 25 bp, Probe sequence
ttaatgctgcttattggcgatacaa

SEQ ID NO: 56244 - DNA, 25 bp, Probe sequence
catcttaggtgtctttagtcttcgt

SEQ ID NO: 56245 - DNA, 25 bp, Probe sequence
tgttagtttaatgctgcttattggc

SEQ ID NO: 56246 - DNA, 25 bp, Probe sequence
tcttcgtacttcgccagtgattatt

SEQ ID NO: 56247 - DNA, 25 bp, Probe sequence
gtttaatgctgcttattggcgatac

SEQ ID NO: 56248 - DNA, 25 bp, Probe sequence
atcttaggtgtctttagtcttcgta

SEQ ID NO: 56249 - DNA, 25 bp, Probe sequence
agtttaatgctgcttattggcgata

SEQ ID NO: 56250 - DNA, 25 bp, Probe sequence
tagtttaatgctgcttattggcgat

SEQ ID NO: 56251 - DNA, 25 bp, Probe sequence
ttagtttaatgctgcttattggcga

SEQ ID NO: 56252 - DNA, 25 bp, Probe sequence
aatgtagtgaaagtcgttgttgaaa

SEQ ID NO: 56253 - DNA, 25 bp, Probe sequence
atgtagtgaaagtcgttgttgaaat

SEQ ID NO: 56254 - DNA, 25 bp, Probe sequence
tgtagtgaaagtcgttgttgaaatt

SEQ ID NO: 56255 - DNA, 25 bp, Probe sequence
taatgtagtgaaagtcgttgttgaa

SEQ ID NO: 56256 - DNA, 25 bp, Probe sequence
atacaactatatgtgtcgagtagcc

SEQ ID NO: 56257 - DNA, 25 bp, Probe sequence
ttaatgtagtgaaagtcgttgttga

SEQ ID NO: 56258 - DNA, 25 bp, Probe sequence
gatacaactatatgtgtcgagtagc

SEQ ID NO: 56259 - DNA, 25 bp, Probe sequence
tttaatgtagtgaaagtcgttgttg

SEQ ID NO: 56260 - DNA, 25 bp, Probe sequence
agtgaaagtcgttgttgaaattaaa

SEQ ID NO: 56261 - DNA, 25 bp, Probe sequence
tttcaacaacgactttcactacatt

SEQ ID NO: 56262 - DNA, 25 bp, Probe sequence
atttcaacaacgactttcactacat

SEQ ID NO: 56263 - DNA, 25 bp, Probe sequence
aatttcaacaacgactttcactaca

SEQ ID NO: 56264 - DNA, 25 bp, Probe sequence
ttcaacaacgactttcactacatta

SEQ ID NO: 56265 - DNA, 25 bp, Probe sequence
ggctactcgacacatatagttgtat

SEQ ID NO: 56266 - DNA, 25 bp, Probe sequence
tcaacaacgactttcactacattaa

SEQ ID NO: 56267 - DNA, 25 bp, Probe sequence
gctactcgacacatatagttgtatc

SEQ ID NO: 56268 - DNA, 25 bp, Probe sequence
caacaacgactttcactacattaaa

SEQ ID NO: 56269 - DNA, 25 bp, Probe sequence
tttaatttcaacaacgactttcact

SEQ ID NO: 56270 - DNA, 25 bp, Probe sequence
gtaggttgataaggcatatcggata

SEQ ID NO: 56271 - DNA, 25 bp, Probe sequence
taggttgataaggcatatcggataa

SEQ ID NO: 56272 - DNA, 25 bp, Probe sequence
ggtaggttgataaggcatatcggat

SEQ ID NO: 56273 - DNA, 25 bp, Probe sequence
tagcgaggtaggttgataaggcata

SEQ ID NO: 56274 - DNA, 25 bp, Probe sequence
gtcggtatagatatgtagacatcct

SEQ ID NO: 56275 - DNA, 25 bp, Probe sequence
agtcggtatagatatgtagacatcc

SEQ ID NO: 56276 - DNA, 25 bp, Probe sequence
gaggtaggttgataaggcatatcgg

SEQ ID NO: 56277 - DNA, 25 bp, Probe sequence
agcgaggtaggttgataaggcatat

SEQ ID NO: 56278 - DNA, 25 bp, Probe sequence
aggtaggttgataaggcatatcgga

SEQ ID NO: 56279 - DNA, 25 bp, Probe sequence
tatccgatatgccttatcaacctac

SEQ ID NO: 56280 - DNA, 25 bp, Probe sequence
ttatccgatatgccttatcaaccta

SEQ ID NO: 56281 - DNA, 25 bp, Probe sequence
tatgccttatcaacctacctcgcta

SEQ ID NO: 56282 - DNA, 25 bp, Probe sequence
atccgatatgccttatcaacctacc

SEQ ID NO: 56283 - DNA, 25 bp, Probe sequence
ggatgtctacatatctataccgact

SEQ ID NO: 56284 - DNA, 25 bp, Probe sequence
aggatgtctacatatctataccgac

SEQ ID NO: 56285 - DNA, 25 bp, Probe sequence
ccgatatgccttatcaacctacctc

SEQ ID NO: 56286 - DNA, 25 bp, Probe sequence
atatgccttatcaacctacctcgct

SEQ ID NO: 56287 - DNA, 25 bp, Probe sequence
tccgatatgccttatcaacctacct

SEQ ID NO: 56288 - DNA, 25 bp, Probe sequence
cctgatataagcgtccttagggttt

SEQ ID NO: 56289 - DNA, 25 bp, Probe sequence
aatagatacagttaaccctaaggcg

SEQ ID NO: 56290 - DNA, 25 bp, Probe sequence
tttatagtggattacattggtcatg

SEQ ID NO: 56291 - DNA, 25 bp, Probe sequence
ttatagtggattacattggtcatga

SEQ ID NO: 56292 - DNA, 25 bp, Probe sequence
aaatagatacagttaaccctaaggc

SEQ ID NO: 56293 - DNA, 25 bp, Probe sequence
ctgatataagcgtccttagggtttt

SEQ ID NO: 56294 - DNA, 25 bp, Probe sequence
gcctgatataagcgtccttagggtt

SEQ ID NO: 56295 - DNA, 25 bp, Probe sequence
atagatacagttaaccctaaggcgc

SEQ ID NO: 56296 - DNA, 25 bp, Probe sequence
ttttatagtggattacattggtcat

SEQ ID NO: 56297 - DNA, 25 bp, Probe sequence
aaaccctaaggacgcttatatcagg

SEQ ID NO: 56298 - DNA, 25 bp, Probe sequence
cgccttagggttaactgtatctatt

SEQ ID NO: 56299 - DNA, 25 bp, Probe sequence
catgaccaatgtaatccactataaa

SEQ ID NO: 56300 - DNA, 25 bp, Probe sequence
tcatgaccaatgtaatccactataa

SEQ ID NO: 56301 - DNA, 25 bp, Probe sequence
gccttagggttaactgtatctattt

SEQ ID NO: 56302 - DNA, 25 bp, Probe sequence
aaaaccctaaggacgcttatatcag

SEQ ID NO: 56303 - DNA, 25 bp, Probe sequence
aaccctaaggacgcttatatcaggc

SEQ ID NO: 56304 - DNA, 25 bp, Probe sequence
gcgccttagggttaactgtatctat

SEQ ID NO: 56305 - DNA, 25 bp, Probe sequence
atgaccaatgtaatccactataaaa

SEQ ID NO: 56306 - DNA, 25 bp, Probe sequence
tgatatgtaacgtgggtcaataaca

SEQ ID NO: 56307 - DNA, 25 bp, Probe sequence
tgtaacgtgggtcaataacatataa

SEQ ID NO: 56308 - DNA, 25 bp, Probe sequence
gtaacgtgggtcaataacatataaa

SEQ ID NO: 56309 - DNA, 25 bp, Probe sequence
cggaattgatatgtaacgtgggtca

SEQ ID NO: 56310 - DNA, 25 bp, Probe sequence
ttgatatgtaacgtgggtcaataac

SEQ ID NO: 56311 - DNA, 25 bp, Probe sequence
gatatgtaacgtgggtcaataacat

SEQ ID NO: 56312 - DNA, 25 bp, Probe sequence
ggaattgatatgtaacgtgggtcaa

SEQ ID NO: 56313 - DNA, 25 bp, Probe sequence
aacgtgggtcaataacatataaata

SEQ ID NO: 56314 - DNA, 25 bp, Probe sequence
taacgtgggtcaataacatataaat

SEQ ID NO: 56315 - DNA, 25 bp, Probe sequence
tgttattgacccacgttacatatca

SEQ ID NO: 56316 - DNA, 25 bp, Probe sequence
ttatatgttattgacccacgttaca

SEQ ID NO: 56317 - DNA, 25 bp, Probe sequence
tttatatgttattgacccacgttac

SEQ ID NO: 56318 - DNA, 25 bp, Probe sequence
tgacccacgttacatatcaattccg

SEQ ID NO: 56319 - DNA, 25 bp, Probe sequence
gttattgacccacgttacatatcaa

SEQ ID NO: 56320 - DNA, 25 bp, Probe sequence
atgttattgacccacgttacatatc

SEQ ID NO: 56321 - DNA, 25 bp, Probe sequence
ttgacccacgttacatatcaattcc

SEQ ID NO: 56322 - DNA, 25 bp, Probe sequence
atttatatgttattgacccacgtta

SEQ ID NO: 56323 - DNA, 25 bp, Probe sequence
tatttatatgttattgacccacgtt

SEQ ID NO: 56324 - DNA, 25 bp, Probe sequence
aatgatgtaatgacagaatggagga

SEQ ID NO: 56325 - DNA, 25 bp, Probe sequence
atgatgtaatgacagaatggaggac

SEQ ID NO: 56326 - DNA, 25 bp, Probe sequence
gatgtaatgacagaatggaggacaa

SEQ ID NO: 56327 - DNA, 25 bp, Probe sequence
atgtaatgacagaatggaggacaac

SEQ ID NO: 56328 - DNA, 25 bp, Probe sequence
tgatgtaatgacagaatggaggaca

SEQ ID NO: 56329 - DNA, 25 bp, Probe sequence
aagaggcaagtgagcaataggttag

SEQ ID NO: 56330 - DNA, 25 bp, Probe sequence
aaatatgcttgtgaatcggttgttt

SEQ ID NO: 56331 - DNA, 25 bp, Probe sequence
acttgtgtgaaatatgcttgtgaat

SEQ ID NO: 56332 - DNA, 25 bp, Probe sequence
cggtttacttgtgtgaaatatgctt

SEQ ID NO: 56333 - DNA, 25 bp, Probe sequence
tcctccattctgtcattacatcatt

SEQ ID NO: 56334 - DNA, 25 bp, Probe sequence
gtcctccattctgtcattacatcat

SEQ ID NO: 56335 - DNA, 25 bp, Probe sequence
ttgtcctccattctgtcattacatc

SEQ ID NO: 56336 - DNA, 25 bp, Probe sequence
gttgtcctccattctgtcattacat

SEQ ID NO: 56337 - DNA, 25 bp, Probe sequence
tgtcctccattctgtcattacatca

SEQ ID NO: 56338 - DNA, 25 bp, Probe sequence
ctaacctattgctcacttgcctctt

SEQ ID NO: 56339 - DNA, 25 bp, Probe sequence
attcacaagcatatttcacacaagt

SEQ ID NO: 56340 - DNA, 25 bp, Probe sequence
aaacaaccgattcacaagcatattt

SEQ ID NO: 56341 - DNA, 25 bp, Probe sequence
aagcatatttcacacaagtaaaccg

SEQ ID NO: 56342 - DNA, 25 bp, Probe sequence
gagaagcaggactatacaatgagaa

SEQ ID NO: 56343 - DNA, 25 bp, Probe sequence
atgagaagcaggactatacaatgag

SEQ ID NO: 56344 - DNA, 25 bp, Probe sequence
gatgagaagcaggactatacaatga

SEQ ID NO: 56345 - DNA, 25 bp, Probe sequence
tgatgagaagcaggactatacaatg

SEQ ID NO: 56346 - DNA, 25 bp, Probe sequence
agaagcaggactatacaatgagaat

SEQ ID NO: 56347 - DNA, 25 bp, Probe sequence
tgagaagcaggactatacaatgaga

SEQ ID NO: 56348 - DNA, 25 bp, Probe sequence
atgatgagaagcaggactatacaat

SEQ ID NO: 56349 - DNA, 25 bp, Probe sequence
gcaggactatacaatgagaataacc

SEQ ID NO: 56350 - DNA, 25 bp, Probe sequence
agcaggactatacaatgagaataac

SEQ ID NO: 56351 - DNA, 25 bp, Probe sequence
tcattgtatagtcctgcttctcatc

SEQ ID NO: 56352 - DNA, 25 bp, Probe sequence
ctcattgtatagtcctgcttctcat

SEQ ID NO: 56353 - DNA, 25 bp, Probe sequence
ttctcattgtatagtcctgcttctc

SEQ ID NO: 56354 - DNA, 25 bp, Probe sequence
cattgtatagtcctgcttctcatca

SEQ ID NO: 56355 - DNA, 25 bp, Probe sequence
attgtatagtcctgcttctcatcat

SEQ ID NO: 56356 - DNA, 25 bp, Probe sequence
tctcattgtatagtcctgcttctca

SEQ ID NO: 56357 - DNA, 25 bp, Probe sequence
attctcattgtatagtcctgcttct

SEQ ID NO: 56358 - DNA, 25 bp, Probe sequence
ggttattctcattgtatagtcctgc

SEQ ID NO: 56359 - DNA, 25 bp, Probe sequence
gttattctcattgtatagtcctgct

SEQ ID NO: 56360 - DNA, 25 bp, Probe sequence
gataattaacgacaagtgtaatggt

SEQ ID NO: 56361 - DNA, 25 bp, Probe sequence
tgataattaacgacaagtgtaatgg

SEQ ID NO: 56362 - DNA, 25 bp, Probe sequence
aacgacaagtgtaatggttaaatgt

SEQ ID NO: 56363 - DNA, 25 bp, Probe sequence
acgacaagtgtaatggttaaatgta

SEQ ID NO: 56364 - DNA, 25 bp, Probe sequence
ataattaacgacaagtgtaatggtt

SEQ ID NO: 56365 - DNA, 25 bp, Probe sequence
cgacaagtgtaatggttaaatgtat

SEQ ID NO: 56366 - DNA, 25 bp, Probe sequence
taacgacaagtgtaatggttaaatg

SEQ ID NO: 56367 - DNA, 25 bp, Probe sequence
taattaacgacaagtgtaatggtta

SEQ ID NO: 56368 - DNA, 25 bp, Probe sequence
cgtatgataattaacgacaagtgta

SEQ ID NO: 56369 - DNA, 25 bp, Probe sequence
ccattacacttgtcgttaattatca

SEQ ID NO: 56370 - DNA, 25 bp, Probe sequence
accattacacttgtcgttaattatc

SEQ ID NO: 56371 - DNA, 25 bp, Probe sequence
acatttaaccattacacttgtcgtt

SEQ ID NO: 56372 - DNA, 25 bp, Probe sequence
tacatttaaccattacacttgtcgt

SEQ ID NO: 56373 - DNA, 25 bp, Probe sequence
aaccattacacttgtcgttaattat

SEQ ID NO: 56374 - DNA, 25 bp, Probe sequence
atacatttaaccattacacttgtcg

SEQ ID NO: 56375 - DNA, 25 bp, Probe sequence
catttaaccattacacttgtcgtta

SEQ ID NO: 56376 - DNA, 25 bp, Probe sequence
taaccattacacttgtcgttaatta

SEQ ID NO: 56377 - DNA, 25 bp, Probe sequence
tacacttgtcgttaattatcatacg

SEQ ID NO: 56378 - DNA, 25 bp, Probe sequence
acgaaatgtttgcttgtatgttatt

SEQ ID NO: 56379 - DNA, 25 bp, Probe sequence
aacgaaatgtttgcttgtatgttat

SEQ ID NO: 56380 - DNA, 25 bp, Probe sequence
agatatagttgaatggaggaagtat

SEQ ID NO: 56381 - DNA, 25 bp, Probe sequence
atagatatagttgaatggaggaagt

SEQ ID NO: 56382 - DNA, 25 bp, Probe sequence
tagatatagttgaatggaggaagta

SEQ ID NO: 56383 - DNA, 25 bp, Probe sequence
gatatagttgaatggaggaagtatt

SEQ ID NO: 56384 - DNA, 25 bp, Probe sequence
cgaaatgtttgcttgtatgttatta

SEQ ID NO: 56385 - DNA, 25 bp, Probe sequence
aaacgaaatgtttgcttgtatgtta

SEQ ID NO: 56386 - DNA, 25 bp, Probe sequence
taaacgaaatgtttgcttgtatgtt

SEQ ID NO: 56387 - DNA, 25 bp, Probe sequence
aataacatacaagcaaacatttcgt

SEQ ID NO: 56388 - DNA, 25 bp, Probe sequence
ataacatacaagcaaacatttcgtt

SEQ ID NO: 56389 - DNA, 25 bp, Probe sequence
acttcctccattcaactatatctat

SEQ ID NO: 56390 - DNA, 25 bp, Probe sequence
atacttcctccattcaactatatct

SEQ ID NO: 56391 - DNA, 25 bp, Probe sequence
tacttcctccattcaactatatcta

SEQ ID NO: 56392 - DNA, 25 bp, Probe sequence
aatacttcctccattcaactatatc

SEQ ID NO: 56393 - DNA, 25 bp, Probe sequence
taataacatacaagcaaacatttcg

SEQ ID NO: 56394 - DNA, 25 bp, Probe sequence
aacatacaagcaaacatttcgttta

SEQ ID NO: 56395 - DNA, 25 bp, Probe sequence
taacatacaagcaaacatttcgttt

SEQ ID NO: 56396 - DNA, 25 bp, Probe sequence
atgccctcaaatctatgtgaactaa

SEQ ID NO: 56397 - DNA, 25 bp, Probe sequence
aatgccctcaaatctatgtgaacta

SEQ ID NO: 56398 - DNA, 25 bp, Probe sequence
taaatgccctcaaatctatgtgaac

SEQ ID NO: 56399 - DNA, 25 bp, Probe sequence
aaatgccctcaaatctatgtgaact

SEQ ID NO: 56400 - DNA, 25 bp, Probe sequence
tgccctcaaatctatgtgaactaac

SEQ ID NO: 56401 - DNA, 25 bp, Probe sequence
gccctcaaatctatgtgaactaaca

SEQ ID NO: 56402 - DNA, 25 bp, Probe sequence
ataaatgccctcaaatctatgtgaa

SEQ ID NO: 56403 - DNA, 25 bp, Probe sequence
aataaatgccctcaaatctatgtga

SEQ ID NO: 56404 - DNA, 25 bp, Probe sequence
tgtgaactaacataatttgagggtt

SEQ ID NO: 56405 - DNA, 25 bp, Probe sequence
tagttcacatagatttgagggcatt

SEQ ID NO: 56406 - DNA, 25 bp, Probe sequence
ttagttcacatagatttgagggcat

SEQ ID NO: 56407 - DNA, 25 bp, Probe sequence
gttcacatagatttgagggcattta

SEQ ID NO: 56408 - DNA, 25 bp, Probe sequence
agttcacatagatttgagggcattt

SEQ ID NO: 56409 - DNA, 25 bp, Probe sequence
gttagttcacatagatttgagggca

SEQ ID NO: 56410 - DNA, 25 bp, Probe sequence
tgttagttcacatagatttgagggc

SEQ ID NO: 56411 - DNA, 25 bp, Probe sequence
tcacatagatttgagggcatttatt

SEQ ID NO: 56412 - DNA, 25 bp, Probe sequence
ttcacatagatttgagggcatttat

SEQ ID NO: 56413 - DNA, 25 bp, Probe sequence
aaccctcaaattatgttagttcaca

SEQ ID NO: 56414 - DNA, 25 bp, Probe sequence
cgattagaaactgttggcaaagtaa

SEQ ID NO: 56415 - DNA, 25 bp, Probe sequence
tagaaactgttggcaaagtaatgtc

SEQ ID NO: 56416 - DNA, 25 bp, Probe sequence
ttagaaactgttggcaaagtaatgt

SEQ ID NO: 56417 - DNA, 25 bp, Probe sequence
agaaactgttggcaaagtaatgtca

SEQ ID NO: 56418 - DNA, 25 bp, Probe sequence
attagaaactgttggcaaagtaatg

SEQ ID NO: 56419 - DNA, 25 bp, Probe sequence
gaaactgttggcaaagtaatgtcag

SEQ ID NO: 56420 - DNA, 25 bp, Probe sequence
gattagaaactgttggcaaagtaat

SEQ ID NO: 56421 - DNA, 25 bp, Probe sequence
gcgattagaaactgttggcaaagta

SEQ ID NO: 56422 - DNA, 25 bp, Probe sequence
gttggcaaagtaatgtcagcagttt

SEQ ID NO: 56423 - DNA, 25 bp, Probe sequence
ttactttgccaacagtttctaatcg

SEQ ID NO: 56424 - DNA, 25 bp, Probe sequence
gacattactttgccaacagtttcta

SEQ ID NO: 56425 - DNA, 25 bp, Probe sequence
acattactttgccaacagtttctaa

SEQ ID NO: 56426 - DNA, 25 bp, Probe sequence
tgacattactttgccaacagtttct

SEQ ID NO: 56427 - DNA, 25 bp, Probe sequence
cattactttgccaacagtttctaat

SEQ ID NO: 56428 - DNA, 25 bp, Probe sequence
ctgacattactttgccaacagtttc

SEQ ID NO: 56429 - DNA, 25 bp, Probe sequence
attactttgccaacagtttctaatc

SEQ ID NO: 56430 - DNA, 25 bp, Probe sequence
tactttgccaacagtttctaatcgc

SEQ ID NO: 56431 - DNA, 25 bp, Probe sequence
aaactgctgacattactttgccaac

SEQ ID NO: 56432 - DNA, 25 bp, Probe sequence
caaatcgaagtgagccatctatact

SEQ ID NO: 56433 - DNA, 25 bp, Probe sequence
tagttaaatcaaacgtaggaggcaa

SEQ ID NO: 56434 - DNA, 25 bp, Probe sequence
ttagttaaatcaaacgtaggaggca

SEQ ID NO: 56435 - DNA, 25 bp, Probe sequence
tttagttaaatcaaacgtaggaggc

SEQ ID NO: 56436 - DNA, 25 bp, Probe sequence
gttaaatcaaacgtaggaggcaatg

SEQ ID NO: 56437 - DNA, 25 bp, Probe sequence
agttaaatcaaacgtaggaggcaat

SEQ ID NO: 56438 - DNA, 25 bp, Probe sequence
gcaaatcgaagtgagccatctatac

SEQ ID NO: 56439 - DNA, 25 bp, Probe sequence
ttaaatcaaacgtaggaggcaatgg

SEQ ID NO: 56440 - DNA, 25 bp, Probe sequence
agtgagccatctatactttagttaa

SEQ ID NO: 56441 - DNA, 25 bp, Probe sequence
agtatagatggctcacttcgatttg

SEQ ID NO: 56442 - DNA, 25 bp, Probe sequence
tgcctcctacgtttgatttaactaa

SEQ ID NO: 56443 - DNA, 25 bp, Probe sequence
ttgcctcctacgtttgatttaacta

SEQ ID NO: 56444 - DNA, 25 bp, Probe sequence
gcctcctacgtttgatttaactaaa

SEQ ID NO: 56445 - DNA, 25 bp, Probe sequence
attgcctcctacgtttgatttaact

SEQ ID NO: 56446 - DNA, 25 bp, Probe sequence
cattgcctcctacgtttgatttaac

SEQ ID NO: 56447 - DNA, 25 bp, Probe sequence
gtatagatggctcacttcgatttgc

SEQ ID NO: 56448 - DNA, 25 bp, Probe sequence
ccattgcctcctacgtttgatttaa

SEQ ID NO: 56449 - DNA, 25 bp, Probe sequence
ttaactaaagtatagatggctcact

SEQ ID NO: 56450 - DNA, 25 bp, Probe sequence
gcaagataatagcaatttgagccat

SEQ ID NO: 56451 - DNA, 25 bp, Probe sequence
aagcaagataatagcaatttgagcc

SEQ ID NO: 56452 - DNA, 25 bp, Probe sequence
agcaagataatagcaatttgagcca

SEQ ID NO: 56453 - DNA, 25 bp, Probe sequence
caagataatagcaatttgagccatt

SEQ ID NO: 56454 - DNA, 25 bp, Probe sequence
taagcaagataatagcaatttgagc

SEQ ID NO: 56455 - DNA, 25 bp, Probe sequence
tttgagccattgttattatcgtaaa

SEQ ID NO: 56456 - DNA, 25 bp, Probe sequence
acctaagcaagataatagcaatttg

SEQ ID NO: 56457 - DNA, 25 bp, Probe sequence
atttgagccattgttattatcgtaa

SEQ ID NO: 56458 - DNA, 25 bp, Probe sequence
cctaagcaagataatagcaatttga

SEQ ID NO: 56459 - DNA, 25 bp, Probe sequence
ggctcaaattgctattatcttgctt

SEQ ID NO: 56460 - DNA, 25 bp, Probe sequence
atggctcaaattgctattatcttgc

SEQ ID NO: 56461 - DNA, 25 bp, Probe sequence
tggctcaaattgctattatcttgct

SEQ ID NO: 56462 - DNA, 25 bp, Probe sequence
aatggctcaaattgctattatcttg

SEQ ID NO: 56463 - DNA, 25 bp, Probe sequence
gctcaaattgctattatcttgctta

SEQ ID NO: 56464 - DNA, 25 bp, Probe sequence
caaattgctattatcttgcttaggt

SEQ ID NO: 56465 - DNA, 25 bp, Probe sequence
tttacgataataacaatggctcaaa

SEQ ID NO: 56466 - DNA, 25 bp, Probe sequence
ttacgataataacaatggctcaaat

SEQ ID NO: 56467 - DNA, 25 bp, Probe sequence
tcaaattgctattatcttgcttagg

SEQ ID NO: 56468 - DNA, 25 bp, Probe sequence
tcctcgtttcactttgtctgtaatt

SEQ ID NO: 56469 - DNA, 25 bp, Probe sequence
tattctgtcctcgtttcactttgtc

SEQ ID NO: 56470 - DNA, 25 bp, Probe sequence
gtcctcgtttcactttgtctgtaat

SEQ ID NO: 56471 - DNA, 25 bp, Probe sequence
cctcgtttcactttgtctgtaatta

SEQ ID NO: 56472 - DNA, 25 bp, Probe sequence
tgtcctcgtttcactttgtctgtaa

SEQ ID NO: 56473 - DNA, 25 bp, Probe sequence
attctgtcctcgtttcactttgtct

SEQ ID NO: 56474 - DNA, 25 bp, Probe sequence
tttcattctactatcaagttgaggg

SEQ ID NO: 56475 - DNA, 25 bp, Probe sequence
ctgtcctcgtttcactttgtctgta

SEQ ID NO: 56476 - DNA, 25 bp, Probe sequence
ctcgtttcactttgtctgtaattat

SEQ ID NO: 56477 - DNA, 25 bp, Probe sequence
gacaaagtgaaacgaggacagaata

SEQ ID NO: 56478 - DNA, 25 bp, Probe sequence
aattacagacaaagtgaaacgagga

SEQ ID NO: 56479 - DNA, 25 bp, Probe sequence
attacagacaaagtgaaacgaggac

SEQ ID NO: 56480 - DNA, 25 bp, Probe sequence
taattacagacaaagtgaaacgagg

SEQ ID NO: 56481 - DNA, 25 bp, Probe sequence
ttacagacaaagtgaaacgaggaca

SEQ ID NO: 56482 - DNA, 25 bp, Probe sequence
agacaaagtgaaacgaggacagaat

SEQ ID NO: 56483 - DNA, 25 bp, Probe sequence
ccctcaacttgatagtagaatgaaa

SEQ ID NO: 56484 - DNA, 25 bp, Probe sequence
tacagacaaagtgaaacgaggacag

SEQ ID NO: 56485 - DNA, 25 bp, Probe sequence
ataattacagacaaagtgaaacgag

SEQ ID NO: 56486 - DNA, 25 bp, Probe sequence
taggacctacagtgttataatggcg

SEQ ID NO: 56487 - DNA, 25 bp, Probe sequence
ggttagagcccgagacataaattaa

SEQ ID NO: 56488 - DNA, 25 bp, Probe sequence
gttagagcccgagacataaattaat

SEQ ID NO: 56489 - DNA, 25 bp, Probe sequence
gtaggacctacagtgttataatggc

SEQ ID NO: 56490 - DNA, 25 bp, Probe sequence
agtaggacctacagtgttataatgg

SEQ ID NO: 56491 - DNA, 25 bp, Probe sequence
aggacctacagtgttataatggcgg

SEQ ID NO: 56492 - DNA, 25 bp, Probe sequence
agcccgagacataaattaatatagt

SEQ ID NO: 56493 - DNA, 25 bp, Probe sequence
ttagagcccgagacataaattaata

SEQ ID NO: 56494 - DNA, 25 bp, Probe sequence
agagcccgagacataaattaatata

SEQ ID NO: 56495 - DNA, 25 bp, Probe sequence
cgccattataacactgtaggtccta

SEQ ID NO: 56496 - DNA, 25 bp, Probe sequence
ttaatttatgtctcgggctctaacc

SEQ ID NO: 56497 - DNA, 25 bp, Probe sequence
attaatttatgtctcgggctctaac

SEQ ID NO: 56498 - DNA, 25 bp, Probe sequence
gccattataacactgtaggtcctac

SEQ ID NO: 56499 - DNA, 25 bp, Probe sequence
ccattataacactgtaggtcctact

SEQ ID NO: 56500 - DNA, 25 bp, Probe sequence
ccgccattataacactgtaggtcct

SEQ ID NO: 56501 - DNA, 25 bp, Probe sequence
tattaatttatgtctcgggctctaa

SEQ ID NO: 56502 - DNA, 25 bp, Probe sequence
actatattaatttatgtctcgggct

SEQ ID NO: 56503 - DNA, 25 bp, Probe sequence
atattaatttatgtctcgggctcta

SEQ ID NO: 56504 - DNA, 25 bp, Probe sequence
tgacttactaatcaacgataacgat

SEQ ID NO: 56505 - DNA, 25 bp, Probe sequence
atgacttactaatcaacgataacga

SEQ ID NO: 56506 - DNA, 25 bp, Probe sequence
gatgacttactaatcaacgataacg

SEQ ID NO: 56507 - DNA, 25 bp, Probe sequence
aatatcatttctgttccaatcccgt

SEQ ID NO: 56508 - DNA, 25 bp, Probe sequence
atatcatttctgttccaatcccgtg

SEQ ID NO: 56509 - DNA, 25 bp, Probe sequence
tgttaagtagatgattagtgtcaca

SEQ ID NO: 56510 - DNA, 25 bp, Probe sequence
agatacaaagtacagttagtggcat

SEQ ID NO: 56511 - DNA, 25 bp, Probe sequence
tagatacaaagtacagttagtggca

SEQ ID NO: 56512 - DNA, 25 bp, Probe sequence
gatacaaagtacagttagtggcatt

SEQ ID NO: 56513 - DNA, 25 bp, Probe sequence
tcgttatcgttgattagtaagtcat

SEQ ID NO: 56514 - DNA, 25 bp, Probe sequence
atcgttatcgttgattagtaagtca

SEQ ID NO: 56515 - DNA, 25 bp, Probe sequence
cgttatcgttgattagtaagtcatc

SEQ ID NO: 56516 - DNA, 25 bp, Probe sequence
acgggattggaacagaaatgatatt

SEQ ID NO: 56517 - DNA, 25 bp, Probe sequence
cacgggattggaacagaaatgatat

SEQ ID NO: 56518 - DNA, 25 bp, Probe sequence
tgtgacactaatcatctacttaaca

SEQ ID NO: 56519 - DNA, 25 bp, Probe sequence
atgccactaactgtactttgtatct

SEQ ID NO: 56520 - DNA, 25 bp, Probe sequence
tgccactaactgtactttgtatcta

SEQ ID NO: 56521 - DNA, 25 bp, Probe sequence
aatgccactaactgtactttgtatc

SEQ ID NO: 56522 - DNA, 25 bp, Probe sequence
cagccatgatatacgaatgttgcat

SEQ ID NO: 56523 - DNA, 25 bp, Probe sequence
cacagccatgatatacgaatgttgc

SEQ ID NO: 56524 - DNA, 25 bp, Probe sequence
gcacagccatgatatacgaatgttg

SEQ ID NO: 56525 - DNA, 25 bp, Probe sequence
agcacagccatgatatacgaatgtt

SEQ ID NO: 56526 - DNA, 25 bp, Probe sequence
aagcacagccatgatatacgaatgt

SEQ ID NO: 56527 - DNA, 25 bp, Probe sequence
aaccttcatatcatagctgtgtttg

SEQ ID NO: 56528 - DNA, 25 bp, Probe sequence
aaagcacagccatgatatacgaatg

SEQ ID NO: 56529 - DNA, 25 bp, Probe sequence
accttcatatcatagctgtgtttga

SEQ ID NO: 56530 - DNA, 25 bp, Probe sequence
ctaaaccttcatatcatagctgtgt

SEQ ID NO: 56531 - DNA, 25 bp, Probe sequence
atgcaacattcgtatatcatggctg

SEQ ID NO: 56532 - DNA, 25 bp, Probe sequence
acattcgtatatcatggctgtgctt

SEQ ID NO: 56533 - DNA, 25 bp, Probe sequence
aacattcgtatatcatggctgtgct

SEQ ID NO: 56534 - DNA, 25 bp, Probe sequence
caacattcgtatatcatggctgtgc

SEQ ID NO: 56535 - DNA, 25 bp, Probe sequence
gcaacattcgtatatcatggctgtg

SEQ ID NO: 56536 - DNA, 25 bp, Probe sequence
caaacacagctatgatatgaaggtt

SEQ ID NO: 56537 - DNA, 25 bp, Probe sequence
cattcgtatatcatggctgtgcttt

SEQ ID NO: 56538 - DNA, 25 bp, Probe sequence
tcaaacacagctatgatatgaaggt

SEQ ID NO: 56539 - DNA, 25 bp, Probe sequence
acacagctatgatatgaaggtttag

SEQ ID NO: 56540 - DNA, 25 bp, Probe sequence
gcctaacaatgatgagtatatttcg

SEQ ID NO: 56541 - DNA, 25 bp, Probe sequence
acaatgatgagtatatttcggaaga

SEQ ID NO: 56542 - DNA, 25 bp, Probe sequence
cctaacaatgatgagtatatttcgg

SEQ ID NO: 56543 - DNA, 25 bp, Probe sequence
aacaatgatgagtatatttcggaag

SEQ ID NO: 56544 - DNA, 25 bp, Probe sequence
tgatgagtatatttcggaagatacg

SEQ ID NO: 56545 - DNA, 25 bp, Probe sequence
caatgatgagtatatttcggaagat

SEQ ID NO: 56546 - DNA, 25 bp, Probe sequence
ctaacaatgatgagtatatttcgga

SEQ ID NO: 56547 - DNA, 25 bp, Probe sequence
ctaagggcctaacaatgatgagtat

SEQ ID NO: 56548 - DNA, 25 bp, Probe sequence
agggcctaacaatgatgagtatatt

SEQ ID NO: 56549 - DNA, 25 bp, Probe sequence
cgaaatatactcatcattgttaggc

SEQ ID NO: 56550 - DNA, 25 bp, Probe sequence
tcttccgaaatatactcatcattgt

SEQ ID NO: 56551 - DNA, 25 bp, Probe sequence
ccgaaatatactcatcattgttagg

SEQ ID NO: 56552 - DNA, 25 bp, Probe sequence
cttccgaaatatactcatcattgtt

SEQ ID NO: 56553 - DNA, 25 bp, Probe sequence
cgtatcttccgaaatatactcatca

SEQ ID NO: 56554 - DNA, 25 bp, Probe sequence
atcttccgaaatatactcatcattg

SEQ ID NO: 56555 - DNA, 25 bp, Probe sequence
tccgaaatatactcatcattgttag

SEQ ID NO: 56556 - DNA, 25 bp, Probe sequence
atactcatcattgttaggcccttag

SEQ ID NO: 56557 - DNA, 25 bp, Probe sequence
atatactcatcattgttaggccctt

SEQ ID NO: 56558 - DNA, 25 bp, Probe sequence
atgacatatgaagacgtgaatgact

SEQ ID NO: 56559 - DNA, 25 bp, Probe sequence
gatgacatatgaagacgtgaatgac

SEQ ID NO: 56560 - DNA, 25 bp, Probe sequence
tgatgacatatgaagacgtgaatga

SEQ ID NO: 56561 - DNA, 25 bp, Probe sequence
tgacatatgaagacgtgaatgactt

SEQ ID NO: 56562 - DNA, 25 bp, Probe sequence
ttgatgacatatgaagacgtgaatg

SEQ ID NO: 56563 - DNA, 25 bp, Probe sequence
acatttgatgacatatgaagacgtg

SEQ ID NO: 56564 - DNA, 25 bp, Probe sequence
catttgatgacatatgaagacgtga

SEQ ID NO: 56565 - DNA, 25 bp, Probe sequence
gacatatgaagacgtgaatgacttt

SEQ ID NO: 56566 - DNA, 25 bp, Probe sequence
tttgatgacatatgaagacgtgaat

SEQ ID NO: 56567 - DNA, 25 bp, Probe sequence
tcattcacgtcttcatatgtcatca

SEQ ID NO: 56568 - DNA, 25 bp, Probe sequence
gtcattcacgtcttcatatgtcatc

SEQ ID NO: 56569 - DNA, 25 bp, Probe sequence
agtcattcacgtcttcatatgtcat

SEQ ID NO: 56570 - DNA, 25 bp, Probe sequence
aagtcattcacgtcttcatatgtca

SEQ ID NO: 56571 - DNA, 25 bp, Probe sequence
cattcacgtcttcatatgtcatcaa

SEQ ID NO: 56572 - DNA, 25 bp, Probe sequence
cacgtcttcatatgtcatcaaatgt

SEQ ID NO: 56573 - DNA, 25 bp, Probe sequence
tcacgtcttcatatgtcatcaaatg

SEQ ID NO: 56574 - DNA, 25 bp, Probe sequence
aaagtcattcacgtcttcatatgtc

SEQ ID NO: 56575 - DNA, 25 bp, Probe sequence
ttcacgtcttcatatgtcatcaaat

SEQ ID NO: 56576 - DNA, 25 bp, Probe sequence
attagagtaagcgaagaacagagaa

SEQ ID NO: 56577 - DNA, 25 bp, Probe sequence
aattagagtaagcgaagaacagaga

SEQ ID NO: 56578 - DNA, 25 bp, Probe sequence
taattagagtaagcgaagaacagag

SEQ ID NO: 56579 - DNA, 25 bp, Probe sequence
ttagagtaagcgaagaacagagaaa

SEQ ID NO: 56580 - DNA, 25 bp, Probe sequence
ataattagagtaagcgaagaacaga

SEQ ID NO: 56581 - DNA, 25 bp, Probe sequence
tataattagagtaagcgaagaacag

SEQ ID NO: 56582 - DNA, 25 bp, Probe sequence
tagagtaagcgaagaacagagaaaa

SEQ ID NO: 56583 - DNA, 25 bp, Probe sequence
atataattagagtaagcgaagaaca

SEQ ID NO: 56584 - DNA, 25 bp, Probe sequence
agtgaatataattagagtaagcgaa

SEQ ID NO: 56585 - DNA, 25 bp, Probe sequence
ttctctgttcttcgcttactctaat

SEQ ID NO: 56586 - DNA, 25 bp, Probe sequence
tctctgttcttcgcttactctaatt

SEQ ID NO: 56587 - DNA, 25 bp, Probe sequence
ctctgttcttcgcttactctaatta

SEQ ID NO: 56588 - DNA, 25 bp, Probe sequence
tttctctgttcttcgcttactctaa

SEQ ID NO: 56589 - DNA, 25 bp, Probe sequence
tctgttcttcgcttactctaattat

SEQ ID NO: 56590 - DNA, 25 bp, Probe sequence
ctgttcttcgcttactctaattata

SEQ ID NO: 56591 - DNA, 25 bp, Probe sequence
ttttctctgttcttcgcttactcta

SEQ ID NO: 56592 - DNA, 25 bp, Probe sequence
ttcgcttactctaattatattcact

SEQ ID NO: 56593 - DNA, 25 bp, Probe sequence
tgttcttcgcttactctaattatat

SEQ ID NO: 56594 - DNA, 25 bp, Probe sequence
tgagatgaagtgaacggatgtatag

SEQ ID NO: 56595 - DNA, 25 bp, Probe sequence
gagatgaagtgaacggatgtataga

SEQ ID NO: 56596 - DNA, 25 bp, Probe sequence
tgaagtgaacggatgtatagatgat

SEQ ID NO: 56597 - DNA, 25 bp, Probe sequence
atgaagtgaacggatgtatagatga

SEQ ID NO: 56598 - DNA, 25 bp, Probe sequence
atgagatgaagtgaacggatgtata

SEQ ID NO: 56599 - DNA, 25 bp, Probe sequence
gatgaagtgaacggatgtatagatg

SEQ ID NO: 56600 - DNA, 25 bp, Probe sequence
agatgaagtgaacggatgtatagat

SEQ ID NO: 56601 - DNA, 25 bp, Probe sequence
aagtgaacggatgtatagatgatcg

SEQ ID NO: 56602 - DNA, 25 bp, Probe sequence
gaagtgaacggatgtatagatgatc

SEQ ID NO: 56603 - DNA, 25 bp, Probe sequence
ctatacatccgttcacttcatctca

SEQ ID NO: 56604 - DNA, 25 bp, Probe sequence
tctatacatccgttcacttcatctc

SEQ ID NO: 56605 - DNA, 25 bp, Probe sequence
tatacatccgttcacttcatctcat

SEQ ID NO: 56606 - DNA, 25 bp, Probe sequence
tcatctatacatccgttcacttcat

SEQ ID NO: 56607 - DNA, 25 bp, Probe sequence
atcatctatacatccgttcacttca

SEQ ID NO: 56608 - DNA, 25 bp, Probe sequence
catctatacatccgttcacttcatc

SEQ ID NO: 56609 - DNA, 25 bp, Probe sequence
atctatacatccgttcacttcatct

SEQ ID NO: 56610 - DNA, 25 bp, Probe sequence
cgatcatctatacatccgttcactt

SEQ ID NO: 56611 - DNA, 25 bp, Probe sequence
gatcatctatacatccgttcacttc

SEQ ID NO: 56612 - DNA, 25 bp, Probe sequence
actatcatacattagcgttgaaccg

SEQ ID NO: 56613 - DNA, 25 bp, Probe sequence
tactatcatacattagcgttgaacc

SEQ ID NO: 56614 - DNA, 25 bp, Probe sequence
acatggacgaatgattagttgttaa

SEQ ID NO: 56615 - DNA, 25 bp, Probe sequence
cgattgagaatggaatttggttgat

SEQ ID NO: 56616 - DNA, 25 bp, Probe sequence
cgaacatggacgaatgattagttgt

SEQ ID NO: 56617 - DNA, 25 bp, Probe sequence
catggacgaatgattagttgttaat

SEQ ID NO: 56618 - DNA, 25 bp, Probe sequence
atggacgaatgattagttgttaatt

SEQ ID NO: 56619 - DNA, 25 bp, Probe sequence
ttggttgatatgatttgatggatga

SEQ ID NO: 56620 - DNA, 25 bp, Probe sequence
ttactatcatacattagcgttgaac

SEQ ID NO: 56621 - DNA, 25 bp, Probe sequence
cggttcaacgctaatgtatgatagt

SEQ ID NO: 56622 - DNA, 25 bp, Probe sequence
ggttcaacgctaatgtatgatagta

SEQ ID NO: 56623 - DNA, 25 bp, Probe sequence
ttaacaactaatcattcgtccatgt

SEQ ID NO: 56624 - DNA, 25 bp, Probe sequence
atcaaccaaattccattctcaatcg

SEQ ID NO: 56625 - DNA, 25 bp, Probe sequence
acaactaatcattcgtccatgttcg

SEQ ID NO: 56626 - DNA, 25 bp, Probe sequence
attaacaactaatcattcgtccatg

SEQ ID NO: 56627 - DNA, 25 bp, Probe sequence
aattaacaactaatcattcgtccat

SEQ ID NO: 56628 - DNA, 25 bp, Probe sequence
tcatccatcaaatcatatcaaccaa

SEQ ID NO: 56629 - DNA, 25 bp, Probe sequence
gttcaacgctaatgtatgatagtaa

SEQ ID NO: 56630 - DNA, 25 bp, Probe sequence
atcccaagttacaatatcatacgca

SEQ ID NO: 56631 - DNA, 25 bp, Probe sequence
tcccaagttacaatatcatacgcaa

SEQ ID NO: 56632 - DNA, 25 bp, Probe sequence
aatcccaagttacaatatcatacgc

SEQ ID NO: 56633 - DNA, 25 bp, Probe sequence
cccaagttacaatatcatacgcaac

SEQ ID NO: 56634 - DNA, 25 bp, Probe sequence
caatatcatacgcaacttgggattt

SEQ ID NO: 56635 - DNA, 25 bp, Probe sequence
tacaatatcatacgcaacttgggat

SEQ ID NO: 56636 - DNA, 25 bp, Probe sequence
ttacaatatcatacgcaacttggga

SEQ ID NO: 56637 - DNA, 25 bp, Probe sequence
gttacaatatcatacgcaacttggg

SEQ ID NO: 56638 - DNA, 25 bp, Probe sequence
acaatatcatacgcaacttgggatt

SEQ ID NO: 56639 - DNA, 25 bp, Probe sequence
tgcgtatgatattgtaacttgggat

SEQ ID NO: 56640 - DNA, 25 bp, Probe sequence
ttgcgtatgatattgtaacttggga

SEQ ID NO: 56641 - DNA, 25 bp, Probe sequence
gcgtatgatattgtaacttgggatt

SEQ ID NO: 56642 - DNA, 25 bp, Probe sequence
gttgcgtatgatattgtaacttggg

SEQ ID NO: 56643 - DNA, 25 bp, Probe sequence
atcccaagttgcgtatgatattgta

SEQ ID NO: 56644 - DNA, 25 bp, Probe sequence
aaatcccaagttgcgtatgatattg

SEQ ID NO: 56645 - DNA, 25 bp, Probe sequence
cccaagttgcgtatgatattgtaac

SEQ ID NO: 56646 - DNA, 25 bp, Probe sequence
tcccaagttgcgtatgatattgtaa

SEQ ID NO: 56647 - DNA, 25 bp, Probe sequence
aatcccaagttgcgtatgatattgt

SEQ ID NO: 56648 - DNA, 25 bp, Probe sequence
taaccactcctccaatgataagatt

SEQ ID NO: 56649 - DNA, 25 bp, Probe sequence
ttaaccactcctccaatgataagat

SEQ ID NO: 56650 - DNA, 25 bp, Probe sequence
ccactcctccaatgataagattgaa

SEQ ID NO: 56651 - DNA, 25 bp, Probe sequence
aaccactcctccaatgataagattg

SEQ ID NO: 56652 - DNA, 25 bp, Probe sequence
gataagattgaaaggcaagatgacc

SEQ ID NO: 56653 - DNA, 25 bp, Probe sequence
tgataagattgaaaggcaagatgac

SEQ ID NO: 56654 - DNA, 25 bp, Probe sequence
accactcctccaatgataagattga

SEQ ID NO: 56655 - DNA, 25 bp, Probe sequence
atgataagattgaaaggcaagatga

SEQ ID NO: 56656 - DNA, 25 bp, Probe sequence
ataagattgaaaggcaagatgacct

SEQ ID NO: 56657 - DNA, 25 bp, Probe sequence
aatcttatcattggaggagtggtta

SEQ ID NO: 56658 - DNA, 25 bp, Probe sequence
atcttatcattggaggagtggttaa

SEQ ID NO: 56659 - DNA, 25 bp, Probe sequence
ttcaatcttatcattggaggagtgg

SEQ ID NO: 56660 - DNA, 25 bp, Probe sequence
caatcttatcattggaggagtggtt

SEQ ID NO: 56661 - DNA, 25 bp, Probe sequence
ggtcatcttgcctttcaatcttatc

SEQ ID NO: 56662 - DNA, 25 bp, Probe sequence
gtcatcttgcctttcaatcttatca

SEQ ID NO: 56663 - DNA, 25 bp, Probe sequence
tcaatcttatcattggaggagtggt

SEQ ID NO: 56664 - DNA, 25 bp, Probe sequence
tcatcttgcctttcaatcttatcat

SEQ ID NO: 56665 - DNA, 25 bp, Probe sequence
aggtcatcttgcctttcaatcttat

SEQ ID NO: 56666 - DNA, 25 bp, Probe sequence
tgcttcctcccaattatttatgagt

SEQ ID NO: 56667 - DNA, 25 bp, Probe sequence
gcttcctcccaattatttatgagtt

SEQ ID NO: 56668 - DNA, 25 bp, Probe sequence
ttgcttcctcccaattatttatgag

SEQ ID NO: 56669 - DNA, 25 bp, Probe sequence
tttgcttcctcccaattatttatga

SEQ ID NO: 56670 - DNA, 25 bp, Probe sequence
gttacgaattgtaaactgcgaactg

SEQ ID NO: 56671 - DNA, 25 bp, Probe sequence
tgttacgaattgtaaactgcgaact

SEQ ID NO: 56672 - DNA, 25 bp, Probe sequence
gtgttacgaattgtaaactgcgaac

SEQ ID NO: 56673 - DNA, 25 bp, Probe sequence
agtgttacgaattgtaaactgcgaa

SEQ ID NO: 56674 - DNA, 25 bp, Probe sequence
tacgaattgtaaactgcgaactggt

SEQ ID NO: 56675 - DNA, 25 bp, Probe sequence
actcataaataattgggaggaagca

SEQ ID NO: 56676 - DNA, 25 bp, Probe sequence
tcataaataattgggaggaagcaaa

SEQ ID NO: 56677 - DNA, 25 bp, Probe sequence
ctcataaataattgggaggaagcaa

SEQ ID NO: 56678 - DNA, 25 bp, Probe sequence
aactcataaataattgggaggaagc

SEQ ID NO: 56679 - DNA, 25 bp, Probe sequence
cagttcgcagtttacaattcgtaac

SEQ ID NO: 56680 - DNA, 25 bp, Probe sequence
ttcgcagtttacaattcgtaacact

SEQ ID NO: 56681 - DNA, 25 bp, Probe sequence
gttcgcagtttacaattcgtaacac

SEQ ID NO: 56682 - DNA, 25 bp, Probe sequence
agttcgcagtttacaattcgtaaca

SEQ ID NO: 56683 - DNA, 25 bp, Probe sequence
accagttcgcagtttacaattcgta

SEQ ID NO: 56684 - DNA, 25 bp, Probe sequence
atattatttgagtaaggagcacttt

SEQ ID NO: 56685 - DNA, 25 bp, Probe sequence
tatattatttgagtaaggagcactt

SEQ ID NO: 56686 - DNA, 25 bp, Probe sequence
tattatttgagtaaggagcactttt

SEQ ID NO: 56687 - DNA, 25 bp, Probe sequence
atatattatttgagtaaggagcact

SEQ ID NO: 56688 - DNA, 25 bp, Probe sequence
aaagtgctccttactcaaataatat

SEQ ID NO: 56689 - DNA, 25 bp, Probe sequence
aagtgctccttactcaaataatata

SEQ ID NO: 56690 - DNA, 25 bp, Probe sequence
aaaagtgctccttactcaaataata

SEQ ID NO: 56691 - DNA, 25 bp, Probe sequence
agtgctccttactcaaataatatat

SEQ ID NO: 56692 - DNA, 25 bp, Probe sequence
tttctaatgtggctttgcttatcat

SEQ ID NO: 56693 - DNA, 25 bp, Probe sequence
attctgaaattggcaaagtcacatt

SEQ ID NO: 56694 - DNA, 25 bp, Probe sequence
cattctgaaattggcaaagtcacat

SEQ ID NO: 56695 - DNA, 25 bp, Probe sequence
ttctgaaattggcaaagtcacattt

SEQ ID NO: 56696 - DNA, 25 bp, Probe sequence
tctaatgtggctttgcttatcattt

SEQ ID NO: 56697 - DNA, 25 bp, Probe sequence
ttctaatgtggctttgcttatcatt

SEQ ID NO: 56698 - DNA, 25 bp, Probe sequence
ttttctaatgtggctttgcttatca

SEQ ID NO: 56699 - DNA, 25 bp, Probe sequence
gcattctgaaattggcaaagtcaca

SEQ ID NO: 56700 - DNA, 25 bp, Probe sequence
agaaaacaactgaaaggaaataagc

SEQ ID NO: 56701 - DNA, 25 bp, Probe sequence
atgataagcaaagccacattagaaa

SEQ ID NO: 56702 - DNA, 25 bp, Probe sequence
aatgtgactttgccaatttcagaat

SEQ ID NO: 56703 - DNA, 25 bp, Probe sequence
atgtgactttgccaatttcagaatg

SEQ ID NO: 56704 - DNA, 25 bp, Probe sequence
aaatgtgactttgccaatttcagaa

SEQ ID NO: 56705 - DNA, 25 bp, Probe sequence
aatgataagcaaagccacattagaa

SEQ ID NO: 56706 - DNA, 25 bp, Probe sequence
aaatgataagcaaagccacattaga

SEQ ID NO: 56707 - DNA, 25 bp, Probe sequence
tgataagcaaagccacattagaaaa

SEQ ID NO: 56708 - DNA, 25 bp, Probe sequence
tgtgactttgccaatttcagaatgc

SEQ ID NO: 56709 - DNA, 25 bp, Probe sequence
gcttatttcctttcagttgttttct

SEQ ID NO: 56710 - DNA, 25 bp, Probe sequence
atagataccgtaaagttgatgctcg

SEQ ID NO: 56711 - DNA, 25 bp, Probe sequence
aatagataccgtaaagttgatgctc

SEQ ID NO: 56712 - DNA, 25 bp, Probe sequence
tagataccgtaaagttgatgctcgt

SEQ ID NO: 56713 - DNA, 25 bp, Probe sequence
caatagataccgtaaagttgatgct

SEQ ID NO: 56714 - DNA, 25 bp, Probe sequence
agcaatagataccgtaaagttgatg

SEQ ID NO: 56715 - DNA, 25 bp, Probe sequence
aaagcaatagataccgtaaagttga

SEQ ID NO: 56716 - DNA, 25 bp, Probe sequence
aagcaatagataccgtaaagttgat

SEQ ID NO: 56717 - DNA, 25 bp, Probe sequence
agataccgtaaagttgatgctcgtc

SEQ ID NO: 56718 - DNA, 25 bp, Probe sequence
gataccgtaaagttgatgctcgtca

SEQ ID NO: 56719 - DNA, 25 bp, Probe sequence
cgagcatcaactttacggtatctat

SEQ ID NO: 56720 - DNA, 25 bp, Probe sequence
gagcatcaactttacggtatctatt

SEQ ID NO: 56721 - DNA, 25 bp, Probe sequence
acgagcatcaactttacggtatcta

SEQ ID NO: 56722 - DNA, 25 bp, Probe sequence
catcaactttacggtatctattgct

SEQ ID NO: 56723 - DNA, 25 bp, Probe sequence
agcatcaactttacggtatctattg

SEQ ID NO: 56724 - DNA, 25 bp, Probe sequence
tcaactttacggtatctattgcttt

SEQ ID NO: 56725 - DNA, 25 bp, Probe sequence
atcaactttacggtatctattgctt

SEQ ID NO: 56726 - DNA, 25 bp, Probe sequence
gacgagcatcaactttacggtatct

SEQ ID NO: 56727 - DNA, 25 bp, Probe sequence
tgacgagcatcaactttacggtatc

SEQ ID NO: 56728 - DNA, 25 bp, Probe sequence
agttatggaatattgaggtgcgaat

SEQ ID NO: 56729 - DNA, 25 bp, Probe sequence
aagttatggaatattgaggtgcgaa

SEQ ID NO: 56730 - DNA, 25 bp, Probe sequence
aatcaacttcaacgtatatcaccat

SEQ ID NO: 56731 - DNA, 25 bp, Probe sequence
tgtgaatggatttaagtggattgat

SEQ ID NO: 56732 - DNA, 25 bp, Probe sequence
atgtgaatggatttaagtggattga

SEQ ID NO: 56733 - DNA, 25 bp, Probe sequence
tgatgtgaatggatttaagtggatt

SEQ ID NO: 56734 - DNA, 25 bp, Probe sequence
aatgatgtgaatggatttaagtgga

SEQ ID NO: 56735 - DNA, 25 bp, Probe sequence
caatgatgtgaatggatttaagtgg

SEQ ID NO: 56736 - DNA, 25 bp, Probe sequence
gatgtgaatggatttaagtggattg

SEQ ID NO: 56737 - DNA, 25 bp, Probe sequence
attcgcacctcaatattccataact

SEQ ID NO: 56738 - DNA, 25 bp, Probe sequence
ttcgcacctcaatattccataactt

SEQ ID NO: 56739 - DNA, 25 bp, Probe sequence
atggtgatatacgttgaagttgatt

SEQ ID NO: 56740 - DNA, 25 bp, Probe sequence
ccacttaaatccattcacatcattg

SEQ ID NO: 56741 - DNA, 25 bp, Probe sequence
tccacttaaatccattcacatcatt

SEQ ID NO: 56742 - DNA, 25 bp, Probe sequence
aatccacttaaatccattcacatca

SEQ ID NO: 56743 - DNA, 25 bp, Probe sequence
tcaatccacttaaatccattcacat

SEQ ID NO: 56744 - DNA, 25 bp, Probe sequence
atcaatccacttaaatccattcaca

SEQ ID NO: 56745 - DNA, 25 bp, Probe sequence
atccacttaaatccattcacatcat

SEQ ID NO: 56746 - DNA, 25 bp, Probe sequence
tgtattacatataggtgtgggtaaa

SEQ ID NO: 56747 - DNA, 25 bp, Probe sequence
ttgtattacatataggtgtgggtaa

SEQ ID NO: 56748 - DNA, 25 bp, Probe sequence
gaaagacaaaataatgagtaggagt

SEQ ID NO: 56749 - DNA, 25 bp, Probe sequence
tgaaagacaaaataatgagtaggag

SEQ ID NO: 56750 - DNA, 25 bp, Probe sequence
gtattacatataggtgtgggtaaat

SEQ ID NO: 56751 - DNA, 25 bp, Probe sequence
aaagacaaaataatgagtaggagtt

SEQ ID NO: 56752 - DNA, 25 bp, Probe sequence
ttgaaagacaaaataatgagtagga

SEQ ID NO: 56753 - DNA, 25 bp, Probe sequence
attacatataggtgtgggtaaattt

SEQ ID NO: 56754 - DNA, 25 bp, Probe sequence
tattacatataggtgtgggtaaatt

SEQ ID NO: 56755 - DNA, 25 bp, Probe sequence
ttacccacacctatatgtaatacaa

SEQ ID NO: 56756 - DNA, 25 bp, Probe sequence
tttacccacacctatatgtaataca

SEQ ID NO: 56757 - DNA, 25 bp, Probe sequence
ctcctactcattattttgtctttca

SEQ ID NO: 56758 - DNA, 25 bp, Probe sequence
actcctactcattattttgtctttc

SEQ ID NO: 56759 - DNA, 25 bp, Probe sequence
atttacccacacctatatgtaatac

SEQ ID NO: 56760 - DNA, 25 bp, Probe sequence
aactcctactcattattttgtcttt

SEQ ID NO: 56761 - DNA, 25 bp, Probe sequence
tcctactcattattttgtctttcaa

SEQ ID NO: 56762 - DNA, 25 bp, Probe sequence
aaatttacccacacctatatgtaat

SEQ ID NO: 56763 - DNA, 25 bp, Probe sequence
aatttacccacacctatatgtaata

SEQ ID NO: 56764 - DNA, 25 bp, Probe sequence
atttgaagaagcattaagcgacatt

SEQ ID NO: 56765 - DNA, 25 bp, Probe sequence
tttgaagaagcattaagcgacattt

SEQ ID NO: 56766 - DNA, 25 bp, Probe sequence
aatttgaagaagcattaagcgacat

SEQ ID NO: 56767 - DNA, 25 bp, Probe sequence
aaacgaatttgaagaagcattaagc

SEQ ID NO: 56768 - DNA, 25 bp, Probe sequence
ttgaagaagcattaagcgacatttg

SEQ ID NO: 56769 - DNA, 25 bp, Probe sequence
gaatttgaagaagcattaagcgaca

SEQ ID NO: 56770 - DNA, 25 bp, Probe sequence
aacgaatttgaagaagcattaagcg

SEQ ID NO: 56771 - DNA, 25 bp, Probe sequence
cgaatttgaagaagcattaagcgac

SEQ ID NO: 56772 - DNA, 25 bp, Probe sequence
acgaatttgaagaagcattaagcga

SEQ ID NO: 56773 - DNA, 25 bp, Probe sequence
aatgtcgcttaatgcttcttcaaat

SEQ ID NO: 56774 - DNA, 25 bp, Probe sequence
aaatgtcgcttaatgcttcttcaaa

SEQ ID NO: 56775 - DNA, 25 bp, Probe sequence
atgtcgcttaatgcttcttcaaatt

SEQ ID NO: 56776 - DNA, 25 bp, Probe sequence
gcttaatgcttcttcaaattcgttt

SEQ ID NO: 56777 - DNA, 25 bp, Probe sequence
tgtcgcttaatgcttcttcaaattc

SEQ ID NO: 56778 - DNA, 25 bp, Probe sequence
caaatgtcgcttaatgcttcttcaa

SEQ ID NO: 56779 - DNA, 25 bp, Probe sequence
cgcttaatgcttcttcaaattcgtt

SEQ ID NO: 56780 - DNA, 25 bp, Probe sequence
gtcgcttaatgcttcttcaaattcg

SEQ ID NO: 56781 - DNA, 25 bp, Probe sequence
tcgcttaatgcttcttcaaattcgt

SEQ ID NO: 56782 - DNA, 25 bp, Probe sequence
attatcagtattgtagtgtgtggaa

SEQ ID NO: 56783 - DNA, 25 bp, Probe sequence
tatgaaataaatgtgtgggaggcaa

SEQ ID NO: 56784 - DNA, 25 bp, Probe sequence
tattatcagtattgtagtgtgtgga

SEQ ID NO: 56785 - DNA, 25 bp, Probe sequence
ggttatgaaataaatgtgtgggagg

SEQ ID NO: 56786 - DNA, 25 bp, Probe sequence
atgaaataaatgtgtgggaggcaat

SEQ ID NO: 56787 - DNA, 25 bp, Probe sequence
gttatgaaataaatgtgtgggaggc

SEQ ID NO: 56788 - DNA, 25 bp, Probe sequence
ttatgaaataaatgtgtgggaggca

SEQ ID NO: 56789 - DNA, 25 bp, Probe sequence
tggttatgaaataaatgtgtgggag

SEQ ID NO: 56790 - DNA, 25 bp, Probe sequence
ttggttatgaaataaatgtgtggga

SEQ ID NO: 56791 - DNA, 25 bp, Probe sequence
ttccacacactacaatactgataat

SEQ ID NO: 56792 - DNA, 25 bp, Probe sequence
ttgcctcccacacatttatttcata

SEQ ID NO: 56793 - DNA, 25 bp, Probe sequence
tccacacactacaatactgataata

SEQ ID NO: 56794 - DNA, 25 bp, Probe sequence
cctcccacacatttatttcataacc

SEQ ID NO: 56795 - DNA, 25 bp, Probe sequence
gcctcccacacatttatttcataac

SEQ ID NO: 56796 - DNA, 25 bp, Probe sequence
attgcctcccacacatttatttcat

SEQ ID NO: 56797 - DNA, 25 bp, Probe sequence
ctcccacacatttatttcataacca

SEQ ID NO: 56798 - DNA, 25 bp, Probe sequence
tgcctcccacacatttatttcataa

SEQ ID NO: 56799 - DNA, 25 bp, Probe sequence
tcccacacatttatttcataaccaa

SEQ ID NO: 56800 - DNA, 25 bp, Probe sequence
agtaaatgagctttagcgacaataa

SEQ ID NO: 56801 - DNA, 25 bp, Probe sequence
aagtaaatgagctttagcgacaata

SEQ ID NO: 56802 - DNA, 25 bp, Probe sequence
gtaaatgagctttagcgacaataat

SEQ ID NO: 56803 - DNA, 25 bp, Probe sequence
aaatgagctttagcgacaataattt

SEQ ID NO: 56804 - DNA, 25 bp, Probe sequence
aaagtaaatgagctttagcgacaat

SEQ ID NO: 56805 - DNA, 25 bp, Probe sequence
taaatgagctttagcgacaataatt

SEQ ID NO: 56806 - DNA, 25 bp, Probe sequence
aatgagctttagcgacaataatttt

SEQ ID NO: 56807 - DNA, 25 bp, Probe sequence
aaaagtaaatgagctttagcgacaa

SEQ ID NO: 56808 - DNA, 25 bp, Probe sequence
aggctttctttaaaacttttaacca

SEQ ID NO: 56809 - DNA, 25 bp, Probe sequence
tattgtcgctaaagctcatttactt

SEQ ID NO: 56810 - DNA, 25 bp, Probe sequence
ttattgtcgctaaagctcatttact

SEQ ID NO: 56811 - DNA, 25 bp, Probe sequence
attattgtcgctaaagctcatttac

SEQ ID NO: 56812 - DNA, 25 bp, Probe sequence
aaattattgtcgctaaagctcattt

SEQ ID NO: 56813 - DNA, 25 bp, Probe sequence
attgtcgctaaagctcatttacttt

SEQ ID NO: 56814 - DNA, 25 bp, Probe sequence
aattattgtcgctaaagctcattta

SEQ ID NO: 56815 - DNA, 25 bp, Probe sequence
aaaattattgtcgctaaagctcatt

SEQ ID NO: 56816 - DNA, 25 bp, Probe sequence
ttgtcgctaaagctcatttactttt

SEQ ID NO: 56817 - DNA, 25 bp, Probe sequence
tggttaaaagttttaaagaaagcct

SEQ ID NO: 56818 - DNA, 25 bp, Probe sequence
cgactaacgcattgttcaaatatag

SEQ ID NO: 56819 - DNA, 25 bp, Probe sequence
aaagtgctctcttagaagtagattt

SEQ ID NO: 56820 - DNA, 25 bp, Probe sequence
atatttaaggcatcgactaacgcat

SEQ ID NO: 56821 - DNA, 25 bp, Probe sequence
tatttaaggcatcgactaacgcatt

SEQ ID NO: 56822 - DNA, 25 bp, Probe sequence
aatatttaaggcatcgactaacgca

SEQ ID NO: 56823 - DNA, 25 bp, Probe sequence
catcgactaacgcattgttcaaata

SEQ ID NO: 56824 - DNA, 25 bp, Probe sequence
atcgactaacgcattgttcaaatat

SEQ ID NO: 56825 - DNA, 25 bp, Probe sequence
tcgactaacgcattgttcaaatata

SEQ ID NO: 56826 - DNA, 25 bp, Probe sequence
ttaaggcatcgactaacgcattgtt

SEQ ID NO: 56827 - DNA, 25 bp, Probe sequence
ctatatttgaacaatgcgttagtcg

SEQ ID NO: 56828 - DNA, 25 bp, Probe sequence
aaatctacttctaagagagcacttt

SEQ ID NO: 56829 - DNA, 25 bp, Probe sequence
atgcgttagtcgatgccttaaatat

SEQ ID NO: 56830 - DNA, 25 bp, Probe sequence
tgcgttagtcgatgccttaaatatt

SEQ ID NO: 56831 - DNA, 25 bp, Probe sequence
aatgcgttagtcgatgccttaaata

SEQ ID NO: 56832 - DNA, 25 bp, Probe sequence
tatttgaacaatgcgttagtcgatg

SEQ ID NO: 56833 - DNA, 25 bp, Probe sequence
atatttgaacaatgcgttagtcgat

SEQ ID NO: 56834 - DNA, 25 bp, Probe sequence
tatatttgaacaatgcgttagtcga

SEQ ID NO: 56835 - DNA, 25 bp, Probe sequence
tctacttctaagagagcactttatt

SEQ ID NO: 56836 - DNA, 25 bp, Probe sequence
taatcaatagacagacagtatcgct

SEQ ID NO: 56837 - DNA, 25 bp, Probe sequence
ataatcaatagacagacagtatcgc

SEQ ID NO: 56838 - DNA, 25 bp, Probe sequence
aatcaatagacagacagtatcgctg

SEQ ID NO: 56839 - DNA, 25 bp, Probe sequence
caatcattactaggcagtgagcatt

SEQ ID NO: 56840 - DNA, 25 bp, Probe sequence
atcaatagacagacagtatcgctga

SEQ ID NO: 56841 - DNA, 25 bp, Probe sequence
tcaatagacagacagtatcgctgaa

SEQ ID NO: 56842 - DNA, 25 bp, Probe sequence
atcattactaggcagtgagcattta

SEQ ID NO: 56843 - DNA, 25 bp, Probe sequence
aatcattactaggcagtgagcattt

SEQ ID NO: 56844 - DNA, 25 bp, Probe sequence
caatagacagacagtatcgctgaaa

SEQ ID NO: 56845 - DNA, 25 bp, Probe sequence
agcgatactgtctgtctattgatta

SEQ ID NO: 56846 - DNA, 25 bp, Probe sequence
gcgatactgtctgtctattgattat

SEQ ID NO: 56847 - DNA, 25 bp, Probe sequence
cagcgatactgtctgtctattgatt

SEQ ID NO: 56848 - DNA, 25 bp, Probe sequence
aatgctcactgcctagtaatgattg

SEQ ID NO: 56849 - DNA, 25 bp, Probe sequence
tcagcgatactgtctgtctattgat

SEQ ID NO: 56850 - DNA, 25 bp, Probe sequence
ttcagcgatactgtctgtctattga

SEQ ID NO: 56851 - DNA, 25 bp, Probe sequence
taaatgctcactgcctagtaatgat

SEQ ID NO: 56852 - DNA, 25 bp, Probe sequence
aaatgctcactgcctagtaatgatt

SEQ ID NO: 56853 - DNA, 25 bp, Probe sequence
tttcagcgatactgtctgtctattg

SEQ ID NO: 56854 - DNA, 25 bp, Probe sequence
cgtggatgagtgaatatgtctgata

SEQ ID NO: 56855 - DNA, 25 bp, Probe sequence
gagtgaatatgtctgataggaaggc

SEQ ID NO: 56856 - DNA, 25 bp, Probe sequence
tgagtgaatatgtctgataggaagg

SEQ ID NO: 56857 - DNA, 25 bp, Probe sequence
tggatgagtgaatatgtctgatagg

SEQ ID NO: 56858 - DNA, 25 bp, Probe sequence
ggatgagtgaatatgtctgatagga

SEQ ID NO: 56859 - DNA, 25 bp, Probe sequence
gtggatgagtgaatatgtctgatag

SEQ ID NO: 56860 - DNA, 25 bp, Probe sequence
aattgtatgagtgaggactgctatt

SEQ ID NO: 56861 - DNA, 25 bp, Probe sequence
aatctctctcatgtgataggtctcc

SEQ ID NO: 56862 - DNA, 25 bp, Probe sequence
atgagtgaatatgtctgataggaag

SEQ ID NO: 56863 - DNA, 25 bp, Probe sequence
tatcagacatattcactcatccacg

SEQ ID NO: 56864 - DNA, 25 bp, Probe sequence
gccttcctatcagacatattcactc

SEQ ID NO: 56865 - DNA, 25 bp, Probe sequence
cctatcagacatattcactcatcca

SEQ ID NO: 56866 - DNA, 25 bp, Probe sequence
ccttcctatcagacatattcactca

SEQ ID NO: 56867 - DNA, 25 bp, Probe sequence
tcctatcagacatattcactcatcc

SEQ ID NO: 56868 - DNA, 25 bp, Probe sequence
ctatcagacatattcactcatccac

SEQ ID NO: 56869 - DNA, 25 bp, Probe sequence
aatagcagtcctcactcatacaatt

SEQ ID NO: 56870 - DNA, 25 bp, Probe sequence
ggagacctatcacatgagagagatt

SEQ ID NO: 56871 - DNA, 25 bp, Probe sequence
ttcctatcagacatattcactcatc

SEQ ID NO: 56872 - DNA, 25 bp, Probe sequence
ttattaagccggtacatcatgtgcc

SEQ ID NO: 56873 - DNA, 25 bp, Probe sequence
tttattaagccggtacatcatgtgc

SEQ ID NO: 56874 - DNA, 25 bp, Probe sequence
tcgaaaattagaaatattccgtgaa

SEQ ID NO: 56875 - DNA, 25 bp, Probe sequence
ttttattaagccggtacatcatgtg

SEQ ID NO: 56876 - DNA, 25 bp, Probe sequence
atcgaaaattagaaatattccgtga

SEQ ID NO: 56877 - DNA, 25 bp, Probe sequence
aatggcctctaagtattcaatattt

SEQ ID NO: 56878 - DNA, 25 bp, Probe sequence
aaatggcctctaagtattcaatatt

SEQ ID NO: 56879 - DNA, 25 bp, Probe sequence
cgaaaattagaaatattccgtgaaa

SEQ ID NO: 56880 - DNA, 25 bp, Probe sequence
agtaaaatggcctctaagtattcaa

SEQ ID NO: 56881 - DNA, 25 bp, Probe sequence
ggcacatgatgtaccggcttaataa

SEQ ID NO: 56882 - DNA, 25 bp, Probe sequence
gcacatgatgtaccggcttaataaa

SEQ ID NO: 56883 - DNA, 25 bp, Probe sequence
ttcacggaatatttctaattttcga

SEQ ID NO: 56884 - DNA, 25 bp, Probe sequence
cacatgatgtaccggcttaataaaa

SEQ ID NO: 56885 - DNA, 25 bp, Probe sequence
tcacggaatatttctaattttcgat

SEQ ID NO: 56886 - DNA, 25 bp, Probe sequence
aatattgaatacttagaggccattt

SEQ ID NO: 56887 - DNA, 25 bp, Probe sequence
aaatattgaatacttagaggccatt

SEQ ID NO: 56888 - DNA, 25 bp, Probe sequence
tttcacggaatatttctaattttcg

SEQ ID NO: 56889 - DNA, 25 bp, Probe sequence
ttgaatacttagaggccattttact

SEQ ID NO: 56890 - DNA, 25 bp, Probe sequence
aacatagtaacgtgattcagtcgat

SEQ ID NO: 56891 - DNA, 25 bp, Probe sequence
acatagtaacgtgattcagtcgatg

SEQ ID NO: 56892 - DNA, 25 bp, Probe sequence
ttacacgatggaatgaacttacttt

SEQ ID NO: 56893 - DNA, 25 bp, Probe sequence
tttacacgatggaatgaacttactt

SEQ ID NO: 56894 - DNA, 25 bp, Probe sequence
aagcgtttacaacagaaataacagc

SEQ ID NO: 56895 - DNA, 25 bp, Probe sequence
attgatataacggcaaatgtaagcg

SEQ ID NO: 56896 - DNA, 25 bp, Probe sequence
catagtaacgtgattcagtcgatga

SEQ ID NO: 56897 - DNA, 25 bp, Probe sequence
gcgtttacaacagaaataacagcat

SEQ ID NO: 56898 - DNA, 25 bp, Probe sequence
ttaagtcaatatgaggagggatgtt

SEQ ID NO: 56899 - DNA, 25 bp, Probe sequence
atcgactgaatcacgttactatgtt

SEQ ID NO: 56900 - DNA, 25 bp, Probe sequence
catcgactgaatcacgttactatgt

SEQ ID NO: 56901 - DNA, 25 bp, Probe sequence
aagtaagttcattccatcgtgtaaa

SEQ ID NO: 56902 - DNA, 25 bp, Probe sequence
aaagtaagttcattccatcgtgtaa

SEQ ID NO: 56903 - DNA, 25 bp, Probe sequence
tcatcgactgaatcacgttactatg

SEQ ID NO: 56904 - DNA, 25 bp, Probe sequence
cgcttacatttgccgttatatcaat

SEQ ID NO: 56905 - DNA, 25 bp, Probe sequence
gctgttatttctgttgtaaacgctt

SEQ ID NO: 56906 - DNA, 25 bp, Probe sequence
atgctgttatttctgttgtaaacgc

SEQ ID NO: 56907 - DNA, 25 bp, Probe sequence
acatccctcctcatattgacttaaa

SEQ ID NO: 56908 - DNA, 25 bp, Probe sequence
ttaaattcatggcaaagctaaaccc

SEQ ID NO: 56909 - DNA, 25 bp, Probe sequence
attaaattcatggcaaagctaaacc

SEQ ID NO: 56910 - DNA, 25 bp, Probe sequence
tctaaattaaattcatggcaaagct

SEQ ID NO: 56911 - DNA, 25 bp, Probe sequence
atctaaattaaattcatggcaaagc

SEQ ID NO: 56912 - DNA, 25 bp, Probe sequence
aattaaattcatggcaaagctaaac

SEQ ID NO: 56913 - DNA, 25 bp, Probe sequence
cataacttggtgatgggattttatc

SEQ ID NO: 56914 - DNA, 25 bp, Probe sequence
tcataacttggtgatgggattttat

SEQ ID NO: 56915 - DNA, 25 bp, Probe sequence
aaattaaattcatggcaaagctaaa

SEQ ID NO: 56916 - DNA, 25 bp, Probe sequence
ctaaattaaattcatggcaaagcta

SEQ ID NO: 56917 - DNA, 25 bp, Probe sequence
gggtttagctttgccatgaatttaa

SEQ ID NO: 56918 - DNA, 25 bp, Probe sequence
ggtttagctttgccatgaatttaat

SEQ ID NO: 56919 - DNA, 25 bp, Probe sequence
agctttgccatgaatttaatttaga

SEQ ID NO: 56920 - DNA, 25 bp, Probe sequence
gctttgccatgaatttaatttagat

SEQ ID NO: 56921 - DNA, 25 bp, Probe sequence
gtttagctttgccatgaatttaatt

SEQ ID NO: 56922 - DNA, 25 bp, Probe sequence
gataaaatcccatcaccaagttatg

SEQ ID NO: 56923 - DNA, 25 bp, Probe sequence
ataaaatcccatcaccaagttatga

SEQ ID NO: 56924 - DNA, 25 bp, Probe sequence
tttagctttgccatgaatttaattt

SEQ ID NO: 56925 - DNA, 25 bp, Probe sequence
tagctttgccatgaatttaatttag

SEQ ID NO: 56926 - DNA, 25 bp, Probe sequence
acagctataattgtaaacgctatca

SEQ ID NO: 56927 - DNA, 25 bp, Probe sequence
cagctataattgtaaacgctatcat

SEQ ID NO: 56928 - DNA, 25 bp, Probe sequence
gctataattgtaaacgctatcataa

SEQ ID NO: 56929 - DNA, 25 bp, Probe sequence
tacagctataattgtaaacgctatc

SEQ ID NO: 56930 - DNA, 25 bp, Probe sequence
tgtaaacgctatcataaaatgtaac

SEQ ID NO: 56931 - DNA, 25 bp, Probe sequence
gtaaacgctatcataaaatgtaaca

SEQ ID NO: 56932 - DNA, 25 bp, Probe sequence
agctataattgtaaacgctatcata

SEQ ID NO: 56933 - DNA, 25 bp, Probe sequence
aaacgctatcataaaatgtaacaat

SEQ ID NO: 56934 - DNA, 25 bp, Probe sequence
aattgtaaacgctatcataaaatgt

SEQ ID NO: 56935 - DNA, 25 bp, Probe sequence
tgatagcgtttacaattatagctgt

SEQ ID NO: 56936 - DNA, 25 bp, Probe sequence
atgatagcgtttacaattatagctg

SEQ ID NO: 56937 - DNA, 25 bp, Probe sequence
ttatgatagcgtttacaattatagc

SEQ ID NO: 56938 - DNA, 25 bp, Probe sequence
gatagcgtttacaattatagctgta

SEQ ID NO: 56939 - DNA, 25 bp, Probe sequence
gttacattttatgatagcgtttaca

SEQ ID NO: 56940 - DNA, 25 bp, Probe sequence
tgttacattttatgatagcgtttac

SEQ ID NO: 56941 - DNA, 25 bp, Probe sequence
tatgatagcgtttacaattatagct

SEQ ID NO: 56942 - DNA, 25 bp, Probe sequence
acattttatgatagcgtttacaatt

SEQ ID NO: 56943 - DNA, 25 bp, Probe sequence
attgttacattttatgatagcgttt

SEQ ID NO: 56944 - DNA, 25 bp, Probe sequence
atcacactctatctaggaccaatct

SEQ ID NO: 56945 - DNA, 25 bp, Probe sequence
catcacactctatctaggaccaatc

SEQ ID NO: 56946 - DNA, 25 bp, Probe sequence
tcacactctatctaggaccaatcta

SEQ ID NO: 56947 - DNA, 25 bp, Probe sequence
acatcacactctatctaggaccaat

SEQ ID NO: 56948 - DNA, 25 bp, Probe sequence
gttccacacatcacactctatctag

SEQ ID NO: 56949 - DNA, 25 bp, Probe sequence
ttagttccacacatcacactctatc

SEQ ID NO: 56950 - DNA, 25 bp, Probe sequence
gttagttccacacatcacactctat

SEQ ID NO: 56951 - DNA, 25 bp, Probe sequence
agttccacacatcacactctatcta

SEQ ID NO: 56952 - DNA, 25 bp, Probe sequence
tagttccacacatcacactctatct

SEQ ID NO: 56953 - DNA, 25 bp, Probe sequence
gattggtcctagatagagtgtgatg

SEQ ID NO: 56954 - DNA, 25 bp, Probe sequence
agattggtcctagatagagtgtgat

SEQ ID NO: 56955 - DNA, 25 bp, Probe sequence
ctagatagagtgtgatgtgtggaac

SEQ ID NO: 56956 - DNA, 25 bp, Probe sequence
attggtcctagatagagtgtgatgt

SEQ ID NO: 56957 - DNA, 25 bp, Probe sequence
tagattggtcctagatagagtgtga

SEQ ID NO: 56958 - DNA, 25 bp, Probe sequence
gatagagtgtgatgtgtggaactaa

SEQ ID NO: 56959 - DNA, 25 bp, Probe sequence
atagagtgtgatgtgtggaactaac

SEQ ID NO: 56960 - DNA, 25 bp, Probe sequence
agatagagtgtgatgtgtggaacta

SEQ ID NO: 56961 - DNA, 25 bp, Probe sequence
tagatagagtgtgatgtgtggaact

SEQ ID NO: 56962 - DNA, 25 bp, Probe sequence
aaaacgacttatggagtgaggaata

SEQ ID NO: 56963 - DNA, 25 bp, Probe sequence
tgtcaccccttcatcttaatgatta

SEQ ID NO: 56964 - DNA, 25 bp, Probe sequence
tcaccccttcatcttaatgattact

SEQ ID NO: 56965 - DNA, 25 bp, Probe sequence
gtcaccccttcatcttaatgattac

SEQ ID NO: 56966 - DNA, 25 bp, Probe sequence
gtgtcaccccttcatcttaatgatt

SEQ ID NO: 56967 - DNA, 25 bp, Probe sequence
tgtgtcaccccttcatcttaatgat

SEQ ID NO: 56968 - DNA, 25 bp, Probe sequence
caccccttcatcttaatgattacta

SEQ ID NO: 56969 - DNA, 25 bp, Probe sequence
accccttcatcttaatgattactat

SEQ ID NO: 56970 - DNA, 25 bp, Probe sequence
ccccttcatcttaatgattactatt

SEQ ID NO: 56971 - DNA, 25 bp, Probe sequence
tattcctcactccataagtcgtttt

SEQ ID NO: 56972 - DNA, 25 bp, Probe sequence
taatcattaagatgaaggggtgaca

SEQ ID NO: 56973 - DNA, 25 bp, Probe sequence
aatcattaagatgaaggggtgacac

SEQ ID NO: 56974 - DNA, 25 bp, Probe sequence
gtaatcattaagatgaaggggtgac

SEQ ID NO: 56975 - DNA, 25 bp, Probe sequence
agtaatcattaagatgaaggggtga

SEQ ID NO: 56976 - DNA, 25 bp, Probe sequence
atcattaagatgaaggggtgacaca

SEQ ID NO: 56977 - DNA, 25 bp, Probe sequence
tagtaatcattaagatgaaggggtg

SEQ ID NO: 56978 - DNA, 25 bp, Probe sequence
atagtaatcattaagatgaaggggt

SEQ ID NO: 56979 - DNA, 25 bp, Probe sequence
aatagtaatcattaagatgaagggg

SEQ ID NO: 56980 - DNA, 25 bp, Probe sequence
cttaggtggctgaatgaatgtaatg

SEQ ID NO: 56981 - DNA, 25 bp, Probe sequence
tcttaggtggctgaatgaatgtaat

SEQ ID NO: 56982 - DNA, 25 bp, Probe sequence
atcttaggtggctgaatgaatgtaa

SEQ ID NO: 56983 - DNA, 25 bp, Probe sequence
ttatcttaggtggctgaatgaatgt

SEQ ID NO: 56984 - DNA, 25 bp, Probe sequence
tatcttaggtggctgaatgaatgta

SEQ ID NO: 56985 - DNA, 25 bp, Probe sequence
ttaggtggctgaatgaatgtaatgg

SEQ ID NO: 56986 - DNA, 25 bp, Probe sequence
attatcttaggtggctgaatgaatg

SEQ ID NO: 56987 - DNA, 25 bp, Probe sequence
aattatcttaggtggctgaatgaat

SEQ ID NO: 56988 - DNA, 25 bp, Probe sequence
taattatcttaggtggctgaatgaa

SEQ ID NO: 56989 - DNA, 25 bp, Probe sequence
acattcattcagccacctaagataa

SEQ ID NO: 56990 - DNA, 25 bp, Probe sequence
ttacattcattcagccacctaagat

SEQ ID NO: 56991 - DNA, 25 bp, Probe sequence
attacattcattcagccacctaaga

SEQ ID NO: 56992 - DNA, 25 bp, Probe sequence
cattacattcattcagccacctaag

SEQ ID NO: 56993 - DNA, 25 bp, Probe sequence
tacattcattcagccacctaagata

SEQ ID NO: 56994 - DNA, 25 bp, Probe sequence
cattcattcagccacctaagataat

SEQ ID NO: 56995 - DNA, 25 bp, Probe sequence
ccattacattcattcagccacctaa

SEQ ID NO: 56996 - DNA, 25 bp, Probe sequence
attcattcagccacctaagataatt

SEQ ID NO: 56997 - DNA, 25 bp, Probe sequence
ttcattcagccacctaagataatta

SEQ ID NO: 56998 - DNA, 25 bp, Probe sequence
catgttatattgaaggtgcagttgt

SEQ ID NO: 56999 - DNA, 25 bp, Probe sequence
atgttatattgaaggtgcagttgtt

SEQ ID NO: 57000 - DNA, 25 bp, Probe sequence
tcatgttatattgaaggtgcagttg

SEQ ID NO: 57001 - DNA, 25 bp, Probe sequence
gtcatgttatattgaaggtgcagtt

SEQ ID NO: 57002 - DNA, 25 bp, Probe sequence
tgtcatgttatattgaaggtgcagt

SEQ ID NO: 57003 - DNA, 25 bp, Probe sequence
atgtcatgttatattgaaggtgcag

SEQ ID NO: 57004 - DNA, 25 bp, Probe sequence
tatgtcatgttatattgaaggtgca

SEQ ID NO: 57005 - DNA, 25 bp, Probe sequence
atatgtcatgttatattgaaggtgc

SEQ ID NO: 57006 - DNA, 25 bp, Probe sequence
tcttaaatgttgttgtgttgattca

SEQ ID NO: 57007 - DNA, 25 bp, Probe sequence
acaactgcaccttcaatataacatg

SEQ ID NO: 57008 - DNA, 25 bp, Probe sequence
aacaactgcaccttcaatataacat

SEQ ID NO: 57009 - DNA, 25 bp, Probe sequence
aactgcaccttcaatataacatgac

SEQ ID NO: 57010 - DNA, 25 bp, Probe sequence
caactgcaccttcaatataacatga

SEQ ID NO: 57011 - DNA, 25 bp, Probe sequence
actgcaccttcaatataacatgaca

SEQ ID NO: 57012 - DNA, 25 bp, Probe sequence
ctgcaccttcaatataacatgacat

SEQ ID NO: 57013 - DNA, 25 bp, Probe sequence
tgcaccttcaatataacatgacata

SEQ ID NO: 57014 - DNA, 25 bp, Probe sequence
gcaccttcaatataacatgacatat

SEQ ID NO: 57015 - DNA, 25 bp, Probe sequence
tgaatcaacacaacaacatttaaga

SEQ ID NO: 57016 - DNA, 25 bp, Probe sequence
ggcacatcagatataagtagcatca

SEQ ID NO: 57017 - DNA, 25 bp, Probe sequence
tggcacatcagatataagtagcatc

SEQ ID NO: 57018 - DNA, 25 bp, Probe sequence
gcacatcagatataagtagcatcac

SEQ ID NO: 57019 - DNA, 25 bp, Probe sequence
atggcacatcagatataagtagcat

SEQ ID NO: 57020 - DNA, 25 bp, Probe sequence
tcagatataagtagcatcacagtgt

SEQ ID NO: 57021 - DNA, 25 bp, Probe sequence
cacatcagatataagtagcatcaca

SEQ ID NO: 57022 - DNA, 25 bp, Probe sequence
agatataagtagcatcacagtgttg

SEQ ID NO: 57023 - DNA, 25 bp, Probe sequence
cagatataagtagcatcacagtgtt

SEQ ID NO: 57024 - DNA, 25 bp, Probe sequence
tcatggcacatcagatataagtagc

SEQ ID NO: 57025 - DNA, 25 bp, Probe sequence
gatgctacttatatctgatgtgcca

SEQ ID NO: 57026 - DNA, 25 bp, Probe sequence
tgatgctacttatatctgatgtgcc

SEQ ID NO: 57027 - DNA, 25 bp, Probe sequence
gtgatgctacttatatctgatgtgc

SEQ ID NO: 57028 - DNA, 25 bp, Probe sequence
atgctacttatatctgatgtgccat

SEQ ID NO: 57029 - DNA, 25 bp, Probe sequence
acactgtgatgctacttatatctga

SEQ ID NO: 57030 - DNA, 25 bp, Probe sequence
tgtgatgctacttatatctgatgtg

SEQ ID NO: 57031 - DNA, 25 bp, Probe sequence
aacactgtgatgctacttatatctg

SEQ ID NO: 57032 - DNA, 25 bp, Probe sequence
caacactgtgatgctacttatatct

SEQ ID NO: 57033 - DNA, 25 bp, Probe sequence
gctacttatatctgatgtgccatga

SEQ ID NO: 57034 - DNA, 25 bp, Probe sequence
attgatgtcattataacactgtctt

SEQ ID NO: 57035 - DNA, 25 bp, Probe sequence
tgatgtcattataacactgtcttaa

SEQ ID NO: 57036 - DNA, 25 bp, Probe sequence
ttgatgtcattataacactgtctta

SEQ ID NO: 57037 - DNA, 25 bp, Probe sequence
tattgatgtcattataacactgtct

SEQ ID NO: 57038 - DNA, 25 bp, Probe sequence
taacactgtcttaaatttccatgaa

SEQ ID NO: 57039 - DNA, 25 bp, Probe sequence
ataacactgtcttaaatttccatga

SEQ ID NO: 57040 - DNA, 25 bp, Probe sequence
aacactgtcttaaatttccatgaaa

SEQ ID NO: 57041 - DNA, 25 bp, Probe sequence
tgatattgatgtcattataacactg

SEQ ID NO: 57042 - DNA, 25 bp, Probe sequence
atattgatgtcattataacactgtc

SEQ ID NO: 57043 - DNA, 25 bp, Probe sequence
aagacagtgttataatgacatcaat

SEQ ID NO: 57044 - DNA, 25 bp, Probe sequence
taagacagtgttataatgacatcaa

SEQ ID NO: 57045 - DNA, 25 bp, Probe sequence
ttaagacagtgttataatgacatca

SEQ ID NO: 57046 - DNA, 25 bp, Probe sequence
agacagtgttataatgacatcaata

SEQ ID NO: 57047 - DNA, 25 bp, Probe sequence
ttcatggaaatttaagacagtgtta

SEQ ID NO: 57048 - DNA, 25 bp, Probe sequence
tcatggaaatttaagacagtgttat

SEQ ID NO: 57049 - DNA, 25 bp, Probe sequence
tttcatggaaatttaagacagtgtt

SEQ ID NO: 57050 - DNA, 25 bp, Probe sequence
cagtgttataatgacatcaatatca

SEQ ID NO: 57051 - DNA, 25 bp, Probe sequence
acagtgttataatgacatcaatatc

SEQ ID NO: 57052 - DNA, 25 bp, Probe sequence
acagtcttgatagaatagaattggt

SEQ ID NO: 57053 - DNA, 25 bp, Probe sequence
caatgatgaacagtcttgatagaat

SEQ ID NO: 57054 - DNA, 25 bp, Probe sequence
tgatgaacagtcttgatagaataga

SEQ ID NO: 57055 - DNA, 25 bp, Probe sequence
aacagtcttgatagaatagaattgg

SEQ ID NO: 57056 - DNA, 25 bp, Probe sequence
tgaataatcaatgatgaacagtctt

SEQ ID NO: 57057 - DNA, 25 bp, Probe sequence
gaataatcaatgatgaacagtcttg

SEQ ID NO: 57058 - DNA, 25 bp, Probe sequence
atgaataatcaatgatgaacagtct

SEQ ID NO: 57059 - DNA, 25 bp, Probe sequence
gatgaacagtcttgatagaatagaa

SEQ ID NO: 57060 - DNA, 25 bp, Probe sequence
atgatgaacagtcttgatagaatag

SEQ ID NO: 57061 - DNA, 25 bp, Probe sequence
accaattctattctatcaagactgt

SEQ ID NO: 57062 - DNA, 25 bp, Probe sequence
attctatcaagactgttcatcattg

SEQ ID NO: 57063 - DNA, 25 bp, Probe sequence
tctattctatcaagactgttcatca

SEQ ID NO: 57064 - DNA, 25 bp, Probe sequence
ccaattctattctatcaagactgtt

SEQ ID NO: 57065 - DNA, 25 bp, Probe sequence
aagactgttcatcattgattattca

SEQ ID NO: 57066 - DNA, 25 bp, Probe sequence
agactgttcatcattgattattcat

SEQ ID NO: 57067 - DNA, 25 bp, Probe sequence
caagactgttcatcattgattattc

SEQ ID NO: 57068 - DNA, 25 bp, Probe sequence
ctattctatcaagactgttcatcat

SEQ ID NO: 57069 - DNA, 25 bp, Probe sequence
ttctattctatcaagactgttcatc

SEQ ID NO: 57070 - DNA, 25 bp, Probe sequence
atgacaggataagtttggagatgac

SEQ ID NO: 57071 - DNA, 25 bp, Probe sequence
tgggtatatgaagagggaatggtat

SEQ ID NO: 57072 - DNA, 25 bp, Probe sequence
agggaatggtattaagaacgctaaa

SEQ ID NO: 57073 - DNA, 25 bp, Probe sequence
tgaagagggaatggtattaagaacg

SEQ ID NO: 57074 - DNA, 25 bp, Probe sequence
gagggaatggtattaagaacgctaa

SEQ ID NO: 57075 - DNA, 25 bp, Probe sequence
gggtatatgaagagggaatggtatt

SEQ ID NO: 57076 - DNA, 25 bp, Probe sequence
agagggaatggtattaagaacgcta

SEQ ID NO: 57077 - DNA, 25 bp, Probe sequence
gtgggtatatgaagagggaatggta

SEQ ID NO: 57078 - DNA, 25 bp, Probe sequence
gaagagggaatggtattaagaacgc

SEQ ID NO: 57079 - DNA, 25 bp, Probe sequence
gtcatctccaaacttatcctgtcat

SEQ ID NO: 57080 - DNA, 25 bp, Probe sequence
ataccattccctcttcatataccca

SEQ ID NO: 57081 - DNA, 25 bp, Probe sequence
tttagcgttcttaataccattccct

SEQ ID NO: 57082 - DNA, 25 bp, Probe sequence
cgttcttaataccattccctcttca

SEQ ID NO: 57083 - DNA, 25 bp, Probe sequence
ttagcgttcttaataccattccctc

SEQ ID NO: 57084 - DNA, 25 bp, Probe sequence
aataccattccctcttcatataccc

SEQ ID NO: 57085 - DNA, 25 bp, Probe sequence
taccattccctcttcatatacccac

SEQ ID NO: 57086 - DNA, 25 bp, Probe sequence
tagcgttcttaataccattccctct

SEQ ID NO: 57087 - DNA, 25 bp, Probe sequence
gcgttcttaataccattccctcttc

SEQ ID NO: 57088 - DNA, 25 bp, Probe sequence
cgtttgtgtttattagtgattgggt

SEQ ID NO: 57089 - DNA, 25 bp, Probe sequence
agcgtttgtgtttattagtgattgg

SEQ ID NO: 57090 - DNA, 25 bp, Probe sequence
gcgtttgtgtttattagtgattggg

SEQ ID NO: 57091 - DNA, 25 bp, Probe sequence
agcaaagacatcatatttatagcgt

SEQ ID NO: 57092 - DNA, 25 bp, Probe sequence
accctcaatgaatatgtgtatttgc

SEQ ID NO: 57093 - DNA, 25 bp, Probe sequence
ccctcaatgaatatgtgtatttgct

SEQ ID NO: 57094 - DNA, 25 bp, Probe sequence
tagcgtttgtgtttattagtgattg

SEQ ID NO: 57095 - DNA, 25 bp, Probe sequence
gttaatgtcacaccctcaatgaata

SEQ ID NO: 57096 - DNA, 25 bp, Probe sequence
tattgtttaggcgttaatgtcacac

SEQ ID NO: 57097 - DNA, 25 bp, Probe sequence
acccaatcactaataaacacaaacg

SEQ ID NO: 57098 - DNA, 25 bp, Probe sequence
ccaatcactaataaacacaaacgct

SEQ ID NO: 57099 - DNA, 25 bp, Probe sequence
cccaatcactaataaacacaaacgc

SEQ ID NO: 57100 - DNA, 25 bp, Probe sequence
acgctataaatatgatgtctttgct

SEQ ID NO: 57101 - DNA, 25 bp, Probe sequence
gcaaatacacatattcattgagggt

SEQ ID NO: 57102 - DNA, 25 bp, Probe sequence
agcaaatacacatattcattgaggg

SEQ ID NO: 57103 - DNA, 25 bp, Probe sequence
tattcattgagggtgtgacattaac

SEQ ID NO: 57104 - DNA, 25 bp, Probe sequence
caatcactaataaacacaaacgcta

SEQ ID NO: 57105 - DNA, 25 bp, Probe sequence
gtgtgacattaacgcctaaacaata

SEQ ID NO: 57106 - DNA, 25 bp, Probe sequence
agtaagtggctttcctcttgataaa

SEQ ID NO: 57107 - DNA, 25 bp, Probe sequence
aagtaagtggctttcctcttgataa

SEQ ID NO: 57108 - DNA, 25 bp, Probe sequence
ataagtaagtggctttcctcttgat

SEQ ID NO: 57109 - DNA, 25 bp, Probe sequence
cataagtaagtggctttcctcttga

SEQ ID NO: 57110 - DNA, 25 bp, Probe sequence
taagtaagtggctttcctcttgata

SEQ ID NO: 57111 - DNA, 25 bp, Probe sequence
ccataagtaagtggctttcctcttg

SEQ ID NO: 57112 - DNA, 25 bp, Probe sequence
tccataagtaagtggctttcctctt

SEQ ID NO: 57113 - DNA, 25 bp, Probe sequence
gtccataagtaagtggctttcctct

SEQ ID NO: 57114 - DNA, 25 bp, Probe sequence
gtaagtggctttcctcttgataaaa

SEQ ID NO: 57115 - DNA, 25 bp, Probe sequence
ttatcaagaggaaagccacttactt

SEQ ID NO: 57116 - DNA, 25 bp, Probe sequence
tttatcaagaggaaagccacttact

SEQ ID NO: 57117 - DNA, 25 bp, Probe sequence
atcaagaggaaagccacttacttat

SEQ ID NO: 57118 - DNA, 25 bp, Probe sequence
tcaagaggaaagccacttacttatg

SEQ ID NO: 57119 - DNA, 25 bp, Probe sequence
tatcaagaggaaagccacttactta

SEQ ID NO: 57120 - DNA, 25 bp, Probe sequence
caagaggaaagccacttacttatgg

SEQ ID NO: 57121 - DNA, 25 bp, Probe sequence
aagaggaaagccacttacttatgga

SEQ ID NO: 57122 - DNA, 25 bp, Probe sequence
agaggaaagccacttacttatggac

SEQ ID NO: 57123 - DNA, 25 bp, Probe sequence
ttttatcaagaggaaagccacttac

SEQ ID NO: 57124 - DNA, 25 bp, Probe sequence
tcctcctatttgtaattgtaagcga

SEQ ID NO: 57125 - DNA, 25 bp, Probe sequence
cctcctatttgtaattgtaagcgat

SEQ ID NO: 57126 - DNA, 25 bp, Probe sequence
atcctcctatttgtaattgtaagcg

SEQ ID NO: 57127 - DNA, 25 bp, Probe sequence
ctcctatttgtaattgtaagcgatt

SEQ ID NO: 57128 - DNA, 25 bp, Probe sequence
ttagacatctaacgaaatggtggtg

SEQ ID NO: 57129 - DNA, 25 bp, Probe sequence
tcgcagtatatttagttagacatct

SEQ ID NO: 57130 - DNA, 25 bp, Probe sequence
atctaacgaaatggtggtgcaataa

SEQ ID NO: 57131 - DNA, 25 bp, Probe sequence
tcctatttgtaattgtaagcgattt

SEQ ID NO: 57132 - DNA, 25 bp, Probe sequence
tagacatctaacgaaatggtggtgc

SEQ ID NO: 57133 - DNA, 25 bp, Probe sequence
tcgcttacaattacaaataggagga

SEQ ID NO: 57134 - DNA, 25 bp, Probe sequence
cgcttacaattacaaataggaggat

SEQ ID NO: 57135 - DNA, 25 bp, Probe sequence
atcgcttacaattacaaataggagg

SEQ ID NO: 57136 - DNA, 25 bp, Probe sequence
aatcgcttacaattacaaataggag

SEQ ID NO: 57137 - DNA, 25 bp, Probe sequence
caccaccatttcgttagatgtctaa

SEQ ID NO: 57138 - DNA, 25 bp, Probe sequence
agatgtctaactaaatatactgcga

SEQ ID NO: 57139 - DNA, 25 bp, Probe sequence
ttattgcaccaccatttcgttagat

SEQ ID NO: 57140 - DNA, 25 bp, Probe sequence
aaatcgcttacaattacaaatagga

SEQ ID NO: 57141 - DNA, 25 bp, Probe sequence
gcaccaccatttcgttagatgtcta

SEQ ID NO: 57142 - DNA, 25 bp, Probe sequence
atggtaagtgtgactggtagaaatc

SEQ ID NO: 57143 - DNA, 25 bp, Probe sequence
tggtaagtgtgactggtagaaatca

SEQ ID NO: 57144 - DNA, 25 bp, Probe sequence
ggtaagtgtgactggtagaaatcag

SEQ ID NO: 57145 - DNA, 25 bp, Probe sequence
tggtagaaatcagtcactttatctt

SEQ ID NO: 57146 - DNA, 25 bp, Probe sequence
ctggtagaaatcagtcactttatct

SEQ ID NO: 57147 - DNA, 25 bp, Probe sequence
ggtagaaatcagtcactttatcttt

SEQ ID NO: 57148 - DNA, 25 bp, Probe sequence
tggaaaagacaaggagtattgaaca

SEQ ID NO: 57149 - DNA, 25 bp, Probe sequence
ttggaaaagacaaggagtattgaac

SEQ ID NO: 57150 - DNA, 25 bp, Probe sequence
attggaaaagacaaggagtattgaa

SEQ ID NO: 57151 - DNA, 25 bp, Probe sequence
gatttctaccagtcacacttaccat

SEQ ID NO: 57152 - DNA, 25 bp, Probe sequence
tgatttctaccagtcacacttacca

SEQ ID NO: 57153 - DNA, 25 bp, Probe sequence
ctgatttctaccagtcacacttacc

SEQ ID NO: 57154 - DNA, 25 bp, Probe sequence
aagataaagtgactgatttctacca

SEQ ID NO: 57155 - DNA, 25 bp, Probe sequence
agataaagtgactgatttctaccag

SEQ ID NO: 57156 - DNA, 25 bp, Probe sequence
aaagataaagtgactgatttctacc

SEQ ID NO: 57157 - DNA, 25 bp, Probe sequence
tgttcaatactccttgtcttttcca

SEQ ID NO: 57158 - DNA, 25 bp, Probe sequence
gttcaatactccttgtcttttccaa

SEQ ID NO: 57159 - DNA, 25 bp, Probe sequence
ttcaatactccttgtcttttccaat

SEQ ID NO: 57160 - DNA, 25 bp, Probe sequence
tcgtacacttctggctgagtatatt

SEQ ID NO: 57161 - DNA, 25 bp, Probe sequence
ttcgtacacttctggctgagtatat

SEQ ID NO: 57162 - DNA, 25 bp, Probe sequence
gtatatttcggtcggaagggtattt

SEQ ID NO: 57163 - DNA, 25 bp, Probe sequence
agtatatttcggtcggaagggtatt

SEQ ID NO: 57164 - DNA, 25 bp, Probe sequence
tacacttctggctgagtatatttcg

SEQ ID NO: 57165 - DNA, 25 bp, Probe sequence
gagtatatttcggtcggaagggtat

SEQ ID NO: 57166 - DNA, 25 bp, Probe sequence
cgtacacttctggctgagtatattt

SEQ ID NO: 57167 - DNA, 25 bp, Probe sequence
gtacacttctggctgagtatatttc

SEQ ID NO: 57168 - DNA, 25 bp, Probe sequence
tttcgtacacttctggctgagtata

SEQ ID NO: 57169 - DNA, 25 bp, Probe sequence
atatactcagccagaagtgtacgaa

SEQ ID NO: 57170 - DNA, 25 bp, Probe sequence
aatatactcagccagaagtgtacga

SEQ ID NO: 57171 - DNA, 25 bp, Probe sequence
aaatacccttccgaccgaaatatac

SEQ ID NO: 57172 - DNA, 25 bp, Probe sequence
aatacccttccgaccgaaatatact

SEQ ID NO: 57173 - DNA, 25 bp, Probe sequence
cgaaatatactcagccagaagtgta

SEQ ID NO: 57174 - DNA, 25 bp, Probe sequence
atacccttccgaccgaaatatactc

SEQ ID NO: 57175 - DNA, 25 bp, Probe sequence
aaatatactcagccagaagtgtacg

SEQ ID NO: 57176 - DNA, 25 bp, Probe sequence
gaaatatactcagccagaagtgtac

SEQ ID NO: 57177 - DNA, 25 bp, Probe sequence
tactcagccagaagtgtacgaaata

SEQ ID NO: 57178 - DNA, 25 bp, Probe sequence
ctttcgataagataaccatatgact

SEQ ID NO: 57179 - DNA, 25 bp, Probe sequence
ttcgataagataaccatatgacttt

SEQ ID NO: 57180 - DNA, 25 bp, Probe sequence
tttcgataagataaccatatgactt

SEQ ID NO: 57181 - DNA, 25 bp, Probe sequence
tctttcgataagataaccatatgac

SEQ ID NO: 57182 - DNA, 25 bp, Probe sequence
tcgataagataaccatatgacttta

SEQ ID NO: 57183 - DNA, 25 bp, Probe sequence
tcatctttcgataagataaccatat

SEQ ID NO: 57184 - DNA, 25 bp, Probe sequence
atcatctttcgataagataaccata

SEQ ID NO: 57185 - DNA, 25 bp, Probe sequence
tatcatctttcgataagataaccat

SEQ ID NO: 57186 - DNA, 25 bp, Probe sequence
atatcatctttcgataagataacca

SEQ ID NO: 57187 - DNA, 25 bp, Probe sequence
agtcatatggttatcttatcgaaag

SEQ ID NO: 57188 - DNA, 25 bp, Probe sequence
aagtcatatggttatcttatcgaaa

SEQ ID NO: 57189 - DNA, 25 bp, Probe sequence
aaagtcatatggttatcttatcgaa

SEQ ID NO: 57190 - DNA, 25 bp, Probe sequence
gtcatatggttatcttatcgaaaga

SEQ ID NO: 57191 - DNA, 25 bp, Probe sequence
taaagtcatatggttatcttatcga

SEQ ID NO: 57192 - DNA, 25 bp, Probe sequence
tggttatcttatcgaaagatgatat

SEQ ID NO: 57193 - DNA, 25 bp, Probe sequence
atggttatcttatcgaaagatgata

SEQ ID NO: 57194 - DNA, 25 bp, Probe sequence
tatggttatcttatcgaaagatgat

SEQ ID NO: 57195 - DNA, 25 bp, Probe sequence
atatggttatcttatcgaaagatga

SEQ ID NO: 57196 - DNA, 25 bp, Probe sequence
tagctgtgtatctacgaatgagtac

SEQ ID NO: 57197 - DNA, 25 bp, Probe sequence
ctagctgtgtatctacgaatgagta

SEQ ID NO: 57198 - DNA, 25 bp, Probe sequence
tactagctgtgtatctacgaatgag

SEQ ID NO: 57199 - DNA, 25 bp, Probe sequence
actagctgtgtatctacgaatgagt

SEQ ID NO: 57200 - DNA, 25 bp, Probe sequence
gctgtgtatctacgaatgagtacaa

SEQ ID NO: 57201 - DNA, 25 bp, Probe sequence
acatactagctgtgtatctacgaat

SEQ ID NO: 57202 - DNA, 25 bp, Probe sequence
catactagctgtgtatctacgaatg

SEQ ID NO: 57203 - DNA, 25 bp, Probe sequence
atactagctgtgtatctacgaatga

SEQ ID NO: 57204 - DNA, 25 bp, Probe sequence
agctgtgtatctacgaatgagtaca

SEQ ID NO: 57205 - DNA, 25 bp, Probe sequence
gtactcattcgtagatacacagcta

SEQ ID NO: 57206 - DNA, 25 bp, Probe sequence
ctcattcgtagatacacagctagta

SEQ ID NO: 57207 - DNA, 25 bp, Probe sequence
tactcattcgtagatacacagctag

SEQ ID NO: 57208 - DNA, 25 bp, Probe sequence
actcattcgtagatacacagctagt

SEQ ID NO: 57209 - DNA, 25 bp, Probe sequence
ttgtactcattcgtagatacacagc

SEQ ID NO: 57210 - DNA, 25 bp, Probe sequence
attcgtagatacacagctagtatgt

SEQ ID NO: 57211 - DNA, 25 bp, Probe sequence
cattcgtagatacacagctagtatg

SEQ ID NO: 57212 - DNA, 25 bp, Probe sequence
tcattcgtagatacacagctagtat

SEQ ID NO: 57213 - DNA, 25 bp, Probe sequence
tacacagctagtatgtataacgaca

SEQ ID NO: 57214 - DNA, 25 bp, Probe sequence
aatttgtatgtgtttgagcgtcttt

SEQ ID NO: 57215 - DNA, 25 bp, Probe sequence
aaatttgtatgtgtttgagcgtctt

SEQ ID NO: 57216 - DNA, 25 bp, Probe sequence
actaaatttgtatgtgtttgagcgt

SEQ ID NO: 57217 - DNA, 25 bp, Probe sequence
taaatttgtatgtgtttgagcgtct

SEQ ID NO: 57218 - DNA, 25 bp, Probe sequence
ctaaatttgtatgtgtttgagcgtc

SEQ ID NO: 57219 - DNA, 25 bp, Probe sequence
aaataagacgctcggcacactaaat

SEQ ID NO: 57220 - DNA, 25 bp, Probe sequence
aataagacgctcggcacactaaatt

SEQ ID NO: 57221 - DNA, 25 bp, Probe sequence
tttgtatgtgtttgagcgtctttta

SEQ ID NO: 57222 - DNA, 25 bp, Probe sequence
atttgtatgtgtttgagcgtctttt

SEQ ID NO: 57223 - DNA, 25 bp, Probe sequence
aaagacgctcaaacacatacaaatt

SEQ ID NO: 57224 - DNA, 25 bp, Probe sequence
acgctcaaacacatacaaatttagt

SEQ ID NO: 57225 - DNA, 25 bp, Probe sequence
aagacgctcaaacacatacaaattt

SEQ ID NO: 57226 - DNA, 25 bp, Probe sequence
agacgctcaaacacatacaaattta

SEQ ID NO: 57227 - DNA, 25 bp, Probe sequence
gacgctcaaacacatacaaatttag

SEQ ID NO: 57228 - DNA, 25 bp, Probe sequence
atttagtgtgccgagcgtcttattt

SEQ ID NO: 57229 - DNA, 25 bp, Probe sequence
aatttagtgtgccgagcgtcttatt

SEQ ID NO: 57230 - DNA, 25 bp, Probe sequence
aaaagacgctcaaacacatacaaat

SEQ ID NO: 57231 - DNA, 25 bp, Probe sequence
taaaagacgctcaaacacatacaaa

SEQ ID NO: 57232 - DNA, 25 bp, Probe sequence
ggagtgtgagatagtacgaatgagg

SEQ ID NO: 57233 - DNA, 25 bp, Probe sequence
cgtattatcttggcatttagggagt

SEQ ID NO: 57234 - DNA, 25 bp, Probe sequence
tattatcttggcatttagggagtgt

SEQ ID NO: 57235 - DNA, 25 bp, Probe sequence
gtattatcttggcatttagggagtg

SEQ ID NO: 57236 - DNA, 25 bp, Probe sequence
attatcttggcatttagggagtgtg

SEQ ID NO: 57237 - DNA, 25 bp, Probe sequence
ggcatttagggagtgtgagatagta

SEQ ID NO: 57238 - DNA, 25 bp, Probe sequence
ttagggagtgtgagatagtacgaat

SEQ ID NO: 57239 - DNA, 25 bp, Probe sequence
atttagggagtgtgagatagtacga

SEQ ID NO: 57240 - DNA, 25 bp, Probe sequence
catttagggagtgtgagatagtacg

SEQ ID NO: 57241 - DNA, 25 bp, Probe sequence
cctcattcgtactatctcacactcc

SEQ ID NO: 57242 - DNA, 25 bp, Probe sequence
actccctaaatgccaagataatacg

SEQ ID NO: 57243 - DNA, 25 bp, Probe sequence
acactccctaaatgccaagataata

SEQ ID NO: 57244 - DNA, 25 bp, Probe sequence
cactccctaaatgccaagataatac

SEQ ID NO: 57245 - DNA, 25 bp, Probe sequence
cacactccctaaatgccaagataat

SEQ ID NO: 57246 - DNA, 25 bp, Probe sequence
tactatctcacactccctaaatgcc

SEQ ID NO: 57247 - DNA, 25 bp, Probe sequence
cgtactatctcacactccctaaatg

SEQ ID NO: 57248 - DNA, 25 bp, Probe sequence
tcgtactatctcacactccctaaat

SEQ ID NO: 57249 - DNA, 25 bp, Probe sequence
attcgtactatctcacactccctaa

SEQ ID NO: 57250 - DNA, 25 bp, Probe sequence
taatctgaggtgctacattgttctt

SEQ ID NO: 57251 - DNA, 25 bp, Probe sequence
ataatctgaggtgctacattgttct

SEQ ID NO: 57252 - DNA, 25 bp, Probe sequence
ggattatcgtagcattgttgagatg

SEQ ID NO: 57253 - DNA, 25 bp, Probe sequence
attatcgtagcattgttgagatgtg

SEQ ID NO: 57254 - DNA, 25 bp, Probe sequence
gattatcgtagcattgttgagatgt

SEQ ID NO: 57255 - DNA, 25 bp, Probe sequence
cggattatcgtagcattgttgagat

SEQ ID NO: 57256 - DNA, 25 bp, Probe sequence
cgtagcattgttgagatgtggatat

SEQ ID NO: 57257 - DNA, 25 bp, Probe sequence
ttatcgtagcattgttgagatgtgg

SEQ ID NO: 57258 - DNA, 25 bp, Probe sequence
tataatctgaggtgctacattgttc

SEQ ID NO: 57259 - DNA, 25 bp, Probe sequence
aagaacaatgtagcacctcagatta

SEQ ID NO: 57260 - DNA, 25 bp, Probe sequence
agaacaatgtagcacctcagattat

SEQ ID NO: 57261 - DNA, 25 bp, Probe sequence
catctcaacaatgctacgataatcc

SEQ ID NO: 57262 - DNA, 25 bp, Probe sequence
cacatctcaacaatgctacgataat

SEQ ID NO: 57263 - DNA, 25 bp, Probe sequence
acatctcaacaatgctacgataatc

SEQ ID NO: 57264 - DNA, 25 bp, Probe sequence
atctcaacaatgctacgataatccg

SEQ ID NO: 57265 - DNA, 25 bp, Probe sequence
atatccacatctcaacaatgctacg

SEQ ID NO: 57266 - DNA, 25 bp, Probe sequence
ccacatctcaacaatgctacgataa

SEQ ID NO: 57267 - DNA, 25 bp, Probe sequence
caatgtagcacctcagattatatca

SEQ ID NO: 57268 - DNA, 25 bp, Probe sequence
aatgaactagtaaggtgtggtcagt

SEQ ID NO: 57269 - DNA, 25 bp, Probe sequence
atgaactagtaaggtgtggtcagtg

SEQ ID NO: 57270 - DNA, 25 bp, Probe sequence
aaatgaactagtaaggtgtggtcag

SEQ ID NO: 57271 - DNA, 25 bp, Probe sequence
tttaactaaacgatgacgtagctcg

SEQ ID NO: 57272 - DNA, 25 bp, Probe sequence
gacgtagctcgctaaaatgaactag

SEQ ID NO: 57273 - DNA, 25 bp, Probe sequence
tgacgtagctcgctaaaatgaacta

SEQ ID NO: 57274 - DNA, 25 bp, Probe sequence
gctaaaatgaactagtaaggtgtgg

SEQ ID NO: 57275 - DNA, 25 bp, Probe sequence
cgctaaaatgaactagtaaggtgtg

SEQ ID NO: 57276 - DNA, 25 bp, Probe sequence
tcgctaaaatgaactagtaaggtgt

SEQ ID NO: 57277 - DNA, 25 bp, Probe sequence
actgaccacaccttactagttcatt

SEQ ID NO: 57278 - DNA, 25 bp, Probe sequence
cactgaccacaccttactagttcat

SEQ ID NO: 57279 - DNA, 25 bp, Probe sequence
ctgaccacaccttactagttcattt

SEQ ID NO: 57280 - DNA, 25 bp, Probe sequence
cgagctacgtcatcgtttagttaaa

SEQ ID NO: 57281 - DNA, 25 bp, Probe sequence
ctagttcattttagcgagctacgtc

SEQ ID NO: 57282 - DNA, 25 bp, Probe sequence
tagttcattttagcgagctacgtca

SEQ ID NO: 57283 - DNA, 25 bp, Probe sequence
gttcattttagcgagctacgtcatc

SEQ ID NO: 57284 - DNA, 25 bp, Probe sequence
acaccttactagttcattttagcga

SEQ ID NO: 57285 - DNA, 25 bp, Probe sequence
cacaccttactagttcattttagcg

SEQ ID NO: 57286 - DNA, 25 bp, Probe sequence
aatcaacctcactcataagtagtat

SEQ ID NO: 57287 - DNA, 25 bp, Probe sequence
ataatcaacctcactcataagtagt

SEQ ID NO: 57288 - DNA, 25 bp, Probe sequence
gataatcaacctcactcataagtag

SEQ ID NO: 57289 - DNA, 25 bp, Probe sequence
taatcaacctcactcataagtagta

SEQ ID NO: 57290 - DNA, 25 bp, Probe sequence
tcaacctcactcataagtagtatat

SEQ ID NO: 57291 - DNA, 25 bp, Probe sequence
atcaacctcactcataagtagtata

SEQ ID NO: 57292 - DNA, 25 bp, Probe sequence
tttactttataccgaacgataatga

SEQ ID NO: 57293 - DNA, 25 bp, Probe sequence
acctcactcataagtagtatatagt

SEQ ID NO: 57294 - DNA, 25 bp, Probe sequence
actttataccgaacgataatgatta

SEQ ID NO: 57295 - DNA, 25 bp, Probe sequence
actacttatgagtgaggttgattat

SEQ ID NO: 57296 - DNA, 25 bp, Probe sequence
atactacttatgagtgaggttgatt

SEQ ID NO: 57297 - DNA, 25 bp, Probe sequence
ctacttatgagtgaggttgattatc

SEQ ID NO: 57298 - DNA, 25 bp, Probe sequence
tactacttatgagtgaggttgatta

SEQ ID NO: 57299 - DNA, 25 bp, Probe sequence
tatactacttatgagtgaggttgat

SEQ ID NO: 57300 - DNA, 25 bp, Probe sequence
atatactacttatgagtgaggttga

SEQ ID NO: 57301 - DNA, 25 bp, Probe sequence
tcattatcgttcggtataaagtaaa

SEQ ID NO: 57302 - DNA, 25 bp, Probe sequence
actatatactacttatgagtgaggt

SEQ ID NO: 57303 - DNA, 25 bp, Probe sequence
atcattatcgttcggtataaagtaa

SEQ ID NO: 57304 - DNA, 25 bp, Probe sequence
tacattaggactaaggagttgatgc

SEQ ID NO: 57305 - DNA, 25 bp, Probe sequence
attaggactaaggagttgatgcgat

SEQ ID NO: 57306 - DNA, 25 bp, Probe sequence
aattatgacttgtaggcgttgaggt

SEQ ID NO: 57307 - DNA, 25 bp, Probe sequence
caattatgacttgtaggcgttgagg

SEQ ID NO: 57308 - DNA, 25 bp, Probe sequence
cattaggactaaggagttgatgcga

SEQ ID NO: 57309 - DNA, 25 bp, Probe sequence
tcatacataggtggacaatcatatt

SEQ ID NO: 57310 - DNA, 25 bp, Probe sequence
ttacattaggactaaggagttgatg

SEQ ID NO: 57311 - DNA, 25 bp, Probe sequence
taattatgcaggaaggtgtaacgaa

SEQ ID NO: 57312 - DNA, 25 bp, Probe sequence
ttaattatgcaggaaggtgtaacga

SEQ ID NO: 57313 - DNA, 25 bp, Probe sequence
gcatcaactccttagtcctaatgta

SEQ ID NO: 57314 - DNA, 25 bp, Probe sequence
atcgcatcaactccttagtcctaat

SEQ ID NO: 57315 - DNA, 25 bp, Probe sequence
acctcaacgcctacaagtcataatt

SEQ ID NO: 57316 - DNA, 25 bp, Probe sequence
cctcaacgcctacaagtcataattg

SEQ ID NO: 57317 - DNA, 25 bp, Probe sequence
tcgcatcaactccttagtcctaatg

SEQ ID NO: 57318 - DNA, 25 bp, Probe sequence
aatatgattgtccacctatgtatga

SEQ ID NO: 57319 - DNA, 25 bp, Probe sequence
catcaactccttagtcctaatgtaa

SEQ ID NO: 57320 - DNA, 25 bp, Probe sequence
tcgttacaccttcctgcataattaa

SEQ ID NO: 57321 - DNA, 25 bp, Probe sequence
ttcgttacaccttcctgcataatta

SEQ ID NO: 57322 - DNA, 25 bp, Probe sequence
aggttgaggtgacatctctatatca

SEQ ID NO: 57323 - DNA, 25 bp, Probe sequence
atgataggttgaggtgacatctcta

SEQ ID NO: 57324 - DNA, 25 bp, Probe sequence
ggttgaggtgacatctctatatcat

SEQ ID NO: 57325 - DNA, 25 bp, Probe sequence
ttgatgattgtataggctaacgatt

SEQ ID NO: 57326 - DNA, 25 bp, Probe sequence
tgataggttgaggtgacatctctat

SEQ ID NO: 57327 - DNA, 25 bp, Probe sequence
atcaatacgattatcatctgctctt

SEQ ID NO: 57328 - DNA, 25 bp, Probe sequence
taggttgaggtgacatctctatatc

SEQ ID NO: 57329 - DNA, 25 bp, Probe sequence
gataggttgaggtgacatctctata

SEQ ID NO: 57330 - DNA, 25 bp, Probe sequence
cgatcatgtagcataactgaatcca

SEQ ID NO: 57331 - DNA, 25 bp, Probe sequence
tagagatgtcacctcaacctatcat

SEQ ID NO: 57332 - DNA, 25 bp, Probe sequence
tgatatagagatgtcacctcaacct

SEQ ID NO: 57333 - DNA, 25 bp, Probe sequence
atgatatagagatgtcacctcaacc

SEQ ID NO: 57334 - DNA, 25 bp, Probe sequence
aatcgttagcctatacaatcatcaa

SEQ ID NO: 57335 - DNA, 25 bp, Probe sequence
atagagatgtcacctcaacctatca

SEQ ID NO: 57336 - DNA, 25 bp, Probe sequence
aagagcagatgataatcgtattgat

SEQ ID NO: 57337 - DNA, 25 bp, Probe sequence
gatatagagatgtcacctcaaccta

SEQ ID NO: 57338 - DNA, 25 bp, Probe sequence
tatagagatgtcacctcaacctatc

SEQ ID NO: 57339 - DNA, 25 bp, Probe sequence
tggattcagttatgctacatgatcg

SEQ ID NO: 57340 - DNA, 25 bp, Probe sequence
ttagtggcgtattggttcattagac

SEQ ID NO: 57341 - DNA, 25 bp, Probe sequence
gttagtggcgtattggttcattaga

SEQ ID NO: 57342 - DNA, 25 bp, Probe sequence
tgttagtggcgtattggttcattag

SEQ ID NO: 57343 - DNA, 25 bp, Probe sequence
atgttagtggcgtattggttcatta

SEQ ID NO: 57344 - DNA, 25 bp, Probe sequence
gatgttagtggcgtattggttcatt

SEQ ID NO: 57345 - DNA, 25 bp, Probe sequence
attggatgttagtggcgtattggtt

SEQ ID NO: 57346 - DNA, 25 bp, Probe sequence
tgtgaatagcgatgcaatgatagat

SEQ ID NO: 57347 - DNA, 25 bp, Probe sequence
aattggatgttagtggcgtattggt

SEQ ID NO: 57348 - DNA, 25 bp, Probe sequence
gtgaatagcgatgcaatgatagata

SEQ ID NO: 57349 - DNA, 25 bp, Probe sequence
tctaatgaaccaatacgccactaac

SEQ ID NO: 57350 - DNA, 25 bp, Probe sequence
gtctaatgaaccaatacgccactaa

SEQ ID NO: 57351 - DNA, 25 bp, Probe sequence
taatgaaccaatacgccactaacat

SEQ ID NO: 57352 - DNA, 25 bp, Probe sequence
ctaatgaaccaatacgccactaaca

SEQ ID NO: 57353 - DNA, 25 bp, Probe sequence
aatgaaccaatacgccactaacatc

SEQ ID NO: 57354 - DNA, 25 bp, Probe sequence
aaccaatacgccactaacatccaat

SEQ ID NO: 57355 - DNA, 25 bp, Probe sequence
atctatcattgcatcgctattcaca

SEQ ID NO: 57356 - DNA, 25 bp, Probe sequence
accaatacgccactaacatccaatt

SEQ ID NO: 57357 - DNA, 25 bp, Probe sequence
tatctatcattgcatcgctattcac

SEQ ID NO: 57358 - DNA, 25 bp, Probe sequence
acaggttatcacaacagtattaatt

SEQ ID NO: 57359 - DNA, 25 bp, Probe sequence
aacaggttatcacaacagtattaat

SEQ ID NO: 57360 - DNA, 25 bp, Probe sequence
aaacaggttatcacaacagtattaa

SEQ ID NO: 57361 - DNA, 25 bp, Probe sequence
taattacatgttggcataacctgtt

SEQ ID NO: 57362 - DNA, 25 bp, Probe sequence
ttaattacatgttggcataacctgt

SEQ ID NO: 57363 - DNA, 25 bp, Probe sequence
aagaaaacaggttatcacaacagta

SEQ ID NO: 57364 - DNA, 25 bp, Probe sequence
taagaaaacaggttatcacaacagt

SEQ ID NO: 57365 - DNA, 25 bp, Probe sequence
agaaaacaggttatcacaacagtat

SEQ ID NO: 57366 - DNA, 25 bp, Probe sequence
attaattacatgttggcataacctg

SEQ ID NO: 57367 - DNA, 25 bp, Probe sequence
attaatactgttgtgataacctgtt

SEQ ID NO: 57368 - DNA, 25 bp, Probe sequence
aattaatactgttgtgataacctgt

SEQ ID NO: 57369 - DNA, 25 bp, Probe sequence
ttaatactgttgtgataacctgttt

SEQ ID NO: 57370 - DNA, 25 bp, Probe sequence
acaggttatgccaacatgtaattaa

SEQ ID NO: 57371 - DNA, 25 bp, Probe sequence
aacaggttatgccaacatgtaatta

SEQ ID NO: 57372 - DNA, 25 bp, Probe sequence
actgttgtgataacctgttttctta

SEQ ID NO: 57373 - DNA, 25 bp, Probe sequence
tactgttgtgataacctgttttctt

SEQ ID NO: 57374 - DNA, 25 bp, Probe sequence
atactgttgtgataacctgttttct

SEQ ID NO: 57375 - DNA, 25 bp, Probe sequence
caggttatgccaacatgtaattaat

SEQ ID NO: 57376 - DNA, 25 bp, Probe sequence
gtagacacctcatattggcatcaac

SEQ ID NO: 57377 - DNA, 25 bp, Probe sequence
tagacacctcatattggcatcaaca

SEQ ID NO: 57378 - DNA, 25 bp, Probe sequence
tgtggttaatggttgtctgactcat

SEQ ID NO: 57379 - DNA, 25 bp, Probe sequence
acatcaatgttaatactgtatcgct

SEQ ID NO: 57380 - DNA, 25 bp, Probe sequence
acctttatttgttattccatcgctg

SEQ ID NO: 57381 - DNA, 25 bp, Probe sequence
cacctttatttgttattccatcgct

SEQ ID NO: 57382 - DNA, 25 bp, Probe sequence
aagtgtggttaatggttgtctgact

SEQ ID NO: 57383 - DNA, 25 bp, Probe sequence
cctttatttgttattccatcgctga

SEQ ID NO: 57384 - DNA, 25 bp, Probe sequence
accacctttatttgttattccatcg

SEQ ID NO: 57385 - DNA, 25 bp, Probe sequence
gttgatgccaatatgaggtgtctac

SEQ ID NO: 57386 - DNA, 25 bp, Probe sequence
tgttgatgccaatatgaggtgtcta

SEQ ID NO: 57387 - DNA, 25 bp, Probe sequence
atgagtcagacaaccattaaccaca

SEQ ID NO: 57388 - DNA, 25 bp, Probe sequence
agcgatggaataacaaataaaggtg

SEQ ID NO: 57389 - DNA, 25 bp, Probe sequence
cagcgatggaataacaaataaaggt

SEQ ID NO: 57390 - DNA, 25 bp, Probe sequence
agcgatacagtattaacattgatgt

SEQ ID NO: 57391 - DNA, 25 bp, Probe sequence
tcagcgatggaataacaaataaagg

SEQ ID NO: 57392 - DNA, 25 bp, Probe sequence
agtcagacaaccattaaccacactt

SEQ ID NO: 57393 - DNA, 25 bp, Probe sequence
cgatggaataacaaataaaggtggt

SEQ ID NO: 57394 - DNA, 25 bp, Probe sequence
aagatgatgcgacttcagtaggttg

SEQ ID NO: 57395 - DNA, 25 bp, Probe sequence
atattctttgaagatgatgcgactt

SEQ ID NO: 57396 - DNA, 25 bp, Probe sequence
gacttcagtaggttggaagaataca

SEQ ID NO: 57397 - DNA, 25 bp, Probe sequence
acttcagtaggttggaagaatacaa

SEQ ID NO: 57398 - DNA, 25 bp, Probe sequence
tatattctttgaagatgatgcgact

SEQ ID NO: 57399 - DNA, 25 bp, Probe sequence
cgacttcagtaggttggaagaatac

SEQ ID NO: 57400 - DNA, 25 bp, Probe sequence
ctatattctttgaagatgatgcgac

SEQ ID NO: 57401 - DNA, 25 bp, Probe sequence
tctatattctttgaagatgatgcga

SEQ ID NO: 57402 - DNA, 25 bp, Probe sequence
atgatgcgacttcagtaggttggaa

SEQ ID NO: 57403 - DNA, 25 bp, Probe sequence
caacctactgaagtcgcatcatctt

SEQ ID NO: 57404 - DNA, 25 bp, Probe sequence
aagtcgcatcatcttcaaagaatat

SEQ ID NO: 57405 - DNA, 25 bp, Probe sequence
tgtattcttccaacctactgaagtc

SEQ ID NO: 57406 - DNA, 25 bp, Probe sequence
agtcgcatcatcttcaaagaatata

SEQ ID NO: 57407 - DNA, 25 bp, Probe sequence
ttgtattcttccaacctactgaagt

SEQ ID NO: 57408 - DNA, 25 bp, Probe sequence
gtattcttccaacctactgaagtcg

SEQ ID NO: 57409 - DNA, 25 bp, Probe sequence
tcgcatcatcttcaaagaatataga

SEQ ID NO: 57410 - DNA, 25 bp, Probe sequence
gtcgcatcatcttcaaagaatatag

SEQ ID NO: 57411 - DNA, 25 bp, Probe sequence
ttccaacctactgaagtcgcatcat

SEQ ID NO: 57412 - DNA, 25 bp, Probe sequence
atatgtagaagaggcggaatcaatt

SEQ ID NO: 57413 - DNA, 25 bp, Probe sequence
tatatgtagaagaggcggaatcaat

SEQ ID NO: 57414 - DNA, 25 bp, Probe sequence
atatatgtagaagaggcggaatcaa

SEQ ID NO: 57415 - DNA, 25 bp, Probe sequence
tatatatgtagaagaggcggaatca

SEQ ID NO: 57416 - DNA, 25 bp, Probe sequence
agtatatatgtagaagaggcggaat

SEQ ID NO: 57417 - DNA, 25 bp, Probe sequence
gtatatatgtagaagaggcggaatc

SEQ ID NO: 57418 - DNA, 25 bp, Probe sequence
tagtatatatgtagaagaggcggaa

SEQ ID NO: 57419 - DNA, 25 bp, Probe sequence
atagtatatatgtagaagaggcgga

SEQ ID NO: 57420 - DNA, 25 bp, Probe sequence
aatagtatatatgtagaagaggcgg

SEQ ID NO: 57421 - DNA, 25 bp, Probe sequence
aattgattccgcctcttctacatat

SEQ ID NO: 57422 - DNA, 25 bp, Probe sequence
attgattccgcctcttctacatata

SEQ ID NO: 57423 - DNA, 25 bp, Probe sequence
ttgattccgcctcttctacatatat

SEQ ID NO: 57424 - DNA, 25 bp, Probe sequence
tgattccgcctcttctacatatata

SEQ ID NO: 57425 - DNA, 25 bp, Probe sequence
attccgcctcttctacatatatact

SEQ ID NO: 57426 - DNA, 25 bp, Probe sequence
gattccgcctcttctacatatatac

SEQ ID NO: 57427 - DNA, 25 bp, Probe sequence
ttccgcctcttctacatatatacta

SEQ ID NO: 57428 - DNA, 25 bp, Probe sequence
tccgcctcttctacatatatactat

SEQ ID NO: 57429 - DNA, 25 bp, Probe sequence
ccgcctcttctacatatatactatt

SEQ ID NO: 57430 - DNA, 25 bp, Probe sequence
taccacctcacaaccattatagaac

SEQ ID NO: 57431 - DNA, 25 bp, Probe sequence
aagattgataagccgtatagaccac

SEQ ID NO: 57432 - DNA, 25 bp, Probe sequence
cttaccacctcacaaccattataga

SEQ ID NO: 57433 - DNA, 25 bp, Probe sequence
ccacctcacaaccattatagaacat

SEQ ID NO: 57434 - DNA, 25 bp, Probe sequence
ttaccacctcacaaccattatagaa

SEQ ID NO: 57435 - DNA, 25 bp, Probe sequence
ccttaccacctcacaaccattatag

SEQ ID NO: 57436 - DNA, 25 bp, Probe sequence
tccttaccacctcacaaccattata

SEQ ID NO: 57437 - DNA, 25 bp, Probe sequence
agattgataagccgtatagaccaca

SEQ ID NO: 57438 - DNA, 25 bp, Probe sequence
taagattgataagccgtatagacca

SEQ ID NO: 57439 - DNA, 25 bp, Probe sequence
gttctataatggttgtgaggtggta

SEQ ID NO: 57440 - DNA, 25 bp, Probe sequence
tctataatggttgtgaggtggtaag

SEQ ID NO: 57441 - DNA, 25 bp, Probe sequence
gtggtctatacggcttatcaatctt

SEQ ID NO: 57442 - DNA, 25 bp, Probe sequence
atgttctataatggttgtgaggtgg

SEQ ID NO: 57443 - DNA, 25 bp, Probe sequence
ctataatggttgtgaggtggtaagg

SEQ ID NO: 57444 - DNA, 25 bp, Probe sequence
ttctataatggttgtgaggtggtaa

SEQ ID NO: 57445 - DNA, 25 bp, Probe sequence
tataatggttgtgaggtggtaagga

SEQ ID NO: 57446 - DNA, 25 bp, Probe sequence
tggtctatacggcttatcaatctta

SEQ ID NO: 57447 - DNA, 25 bp, Probe sequence
tgtggtctatacggcttatcaatct

SEQ ID NO: 57448 - DNA, 25 bp, Probe sequence
aaattatcaaaggaggcacacaatc

SEQ ID NO: 57449 - DNA, 25 bp, Probe sequence
aaaattatcaaaggaggcacacaat

SEQ ID NO: 57450 - DNA, 25 bp, Probe sequence
aaattaacgaaattaaagcggaaaa

SEQ ID NO: 57451 - DNA, 25 bp, Probe sequence
aaaattaacgaaattaaagcggaaa

SEQ ID NO: 57452 - DNA, 25 bp, Probe sequence
gattgtgtgcctcctttgataattt

SEQ ID NO: 57453 - DNA, 25 bp, Probe sequence
attgtgtgcctcctttgataatttt

SEQ ID NO: 57454 - DNA, 25 bp, Probe sequence
tttccgctttaatttcgttaatttt

SEQ ID NO: 57455 - DNA, 25 bp, Probe sequence
ttttccgctttaatttcgttaattt

SEQ ID NO: 57456 - DNA, 25 bp, Probe sequence
acctataagtctctttcctcactag

SEQ ID NO: 57457 - DNA, 25 bp, Probe sequence
cctataagtctctttcctcactaga

SEQ ID NO: 57458 - DNA, 25 bp, Probe sequence
gacctataagtctctttcctcacta

SEQ ID NO: 57459 - DNA, 25 bp, Probe sequence
taagtctctttcctcactagatagt

SEQ ID NO: 57460 - DNA, 25 bp, Probe sequence
atattataaccctcgtaggcatagg

SEQ ID NO: 57461 - DNA, 25 bp, Probe sequence
tataaccctcgtaggcataggctta

SEQ ID NO: 57462 - DNA, 25 bp, Probe sequence
tattataaccctcgtaggcataggc

SEQ ID NO: 57463 - DNA, 25 bp, Probe sequence
tcggaatttgcacaaagatatgttt

SEQ ID NO: 57464 - DNA, 25 bp, Probe sequence
ttcggaatttgcacaaagatatgtt

SEQ ID NO: 57465 - DNA, 25 bp, Probe sequence
ctagtgaggaaagagacttataggt

SEQ ID NO: 57466 - DNA, 25 bp, Probe sequence
tctagtgaggaaagagacttatagg

SEQ ID NO: 57467 - DNA, 25 bp, Probe sequence
tagtgaggaaagagacttataggtc

SEQ ID NO: 57468 - DNA, 25 bp, Probe sequence
actatctagtgaggaaagagactta

SEQ ID NO: 57469 - DNA, 25 bp, Probe sequence
cctatgcctacgagggttataatat

SEQ ID NO: 57470 - DNA, 25 bp, Probe sequence
taagcctatgcctacgagggttata

SEQ ID NO: 57471 - DNA, 25 bp, Probe sequence
gcctatgcctacgagggttataata

SEQ ID NO: 57472 - DNA, 25 bp, Probe sequence
aacatatctttgtgcaaattccgaa

SEQ ID NO: 57473 - DNA, 25 bp, Probe sequence
aaacatatctttgtgcaaattccga

SEQ ID NO: 57474 - DNA, 25 bp, Probe sequence
ttcagagtggtagcaaattaaagtt

SEQ ID NO: 57475 - DNA, 25 bp, Probe sequence
acacatataactttgaattgcttgc

SEQ ID NO: 57476 - DNA, 25 bp, Probe sequence
attcagagtggtagcaaattaaagt

SEQ ID NO: 57477 - DNA, 25 bp, Probe sequence
cacatataactttgaattgcttgct

SEQ ID NO: 57478 - DNA, 25 bp, Probe sequence
tcagagtggtagcaaattaaagtta

SEQ ID NO: 57479 - DNA, 25 bp, Probe sequence
agttattaaattcagagtggtagca

SEQ ID NO: 57480 - DNA, 25 bp, Probe sequence
ttgtccaattatgtgtagacgattt

SEQ ID NO: 57481 - DNA, 25 bp, Probe sequence
cagagtggtagcaaattaaagttaa

SEQ ID NO: 57482 - DNA, 25 bp, Probe sequence
gttattaaattcagagtggtagcaa

SEQ ID NO: 57483 - DNA, 25 bp, Probe sequence
gcaagcaattcaaagttatatgtgt

SEQ ID NO: 57484 - DNA, 25 bp, Probe sequence
aactttaatttgctaccactctgaa

SEQ ID NO: 57485 - DNA, 25 bp, Probe sequence
agcaagcaattcaaagttatatgtg

SEQ ID NO: 57486 - DNA, 25 bp, Probe sequence
actttaatttgctaccactctgaat

SEQ ID NO: 57487 - DNA, 25 bp, Probe sequence
taactttaatttgctaccactctga

SEQ ID NO: 57488 - DNA, 25 bp, Probe sequence
tgctaccactctgaatttaataact

SEQ ID NO: 57489 - DNA, 25 bp, Probe sequence
aaatcgtctacacataattggacaa

SEQ ID NO: 57490 - DNA, 25 bp, Probe sequence
ttaactttaatttgctaccactctg

SEQ ID NO: 57491 - DNA, 25 bp, Probe sequence
ttgctaccactctgaatttaataac

SEQ ID NO: 57492 - DNA, 25 bp, Probe sequence
tgaaagttaggtatctaaaggtgcc

SEQ ID NO: 57493 - DNA, 25 bp, Probe sequence
gaaagttaggtatctaaaggtgcct

SEQ ID NO: 57494 - DNA, 25 bp, Probe sequence
ttgaaagttaggtatctaaaggtgc

SEQ ID NO: 57495 - DNA, 25 bp, Probe sequence
gtgcctagctttctttgttatgatt

SEQ ID NO: 57496 - DNA, 25 bp, Probe sequence
ggtgcctagctttctttgttatgat

SEQ ID NO: 57497 - DNA, 25 bp, Probe sequence
tgcctagctttctttgttatgatta

SEQ ID NO: 57498 - DNA, 25 bp, Probe sequence
aaggtgcctagctttctttgttatg

SEQ ID NO: 57499 - DNA, 25 bp, Probe sequence
gcctagctttctttgttatgattag

SEQ ID NO: 57500 - DNA, 25 bp, Probe sequence
aggtgcctagctttctttgttatga

SEQ ID NO: 57501 - DNA, 25 bp, Probe sequence
ggcacctttagatacctaactttca

SEQ ID NO: 57502 - DNA, 25 bp, Probe sequence
aggcacctttagatacctaactttc

SEQ ID NO: 57503 - DNA, 25 bp, Probe sequence
gcacctttagatacctaactttcaa

SEQ ID NO: 57504 - DNA, 25 bp, Probe sequence
aatcataacaaagaaagctaggcac

SEQ ID NO: 57505 - DNA, 25 bp, Probe sequence
atcataacaaagaaagctaggcacc

SEQ ID NO: 57506 - DNA, 25 bp, Probe sequence
taatcataacaaagaaagctaggca

SEQ ID NO: 57507 - DNA, 25 bp, Probe sequence
cataacaaagaaagctaggcacctt

SEQ ID NO: 57508 - DNA, 25 bp, Probe sequence
ctaatcataacaaagaaagctaggc

SEQ ID NO: 57509 - DNA, 25 bp, Probe sequence
tcataacaaagaaagctaggcacct

SEQ ID NO: 57510 - DNA, 25 bp, Probe sequence
cgattcgtatctttcaggttcaaat

SEQ ID NO: 57511 - DNA, 25 bp, Probe sequence
tcgtatctttcaggttcaaatacca

SEQ ID NO: 57512 - DNA, 25 bp, Probe sequence
cgtatctttcaggttcaaataccat

SEQ ID NO: 57513 - DNA, 25 bp, Probe sequence
ttcgtatctttcaggttcaaatacc

SEQ ID NO: 57514 - DNA, 25 bp, Probe sequence
gattcgtatctttcaggttcaaata

SEQ ID NO: 57515 - DNA, 25 bp, Probe sequence
tctttcaggttcaaataccatcatt

SEQ ID NO: 57516 - DNA, 25 bp, Probe sequence
atctttcaggttcaaataccatcat

SEQ ID NO: 57517 - DNA, 25 bp, Probe sequence
ctttcaggttcaaataccatcattt

SEQ ID NO: 57518 - DNA, 25 bp, Probe sequence
tatctttcaggttcaaataccatca

SEQ ID NO: 57519 - DNA, 25 bp, Probe sequence
atttgaacctgaaagatacgaatcg

SEQ ID NO: 57520 - DNA, 25 bp, Probe sequence
tggtatttgaacctgaaagatacga

SEQ ID NO: 57521 - DNA, 25 bp, Probe sequence
atggtatttgaacctgaaagatacg

SEQ ID NO: 57522 - DNA, 25 bp, Probe sequence
ggtatttgaacctgaaagatacgaa

SEQ ID NO: 57523 - DNA, 25 bp, Probe sequence
tatttgaacctgaaagatacgaatc

SEQ ID NO: 57524 - DNA, 25 bp, Probe sequence
aatgatggtatttgaacctgaaaga

SEQ ID NO: 57525 - DNA, 25 bp, Probe sequence
atgatggtatttgaacctgaaagat

SEQ ID NO: 57526 - DNA, 25 bp, Probe sequence
aaatgatggtatttgaacctgaaag

SEQ ID NO: 57527 - DNA, 25 bp, Probe sequence
tgatggtatttgaacctgaaagata

SEQ ID NO: 57528 - DNA, 25 bp, Probe sequence
cgaaagtaacgcatgacgattaatt

SEQ ID NO: 57529 - DNA, 25 bp, Probe sequence
aacgaaagtaacgcatgacgattaa

SEQ ID NO: 57530 - DNA, 25 bp, Probe sequence
gaaagtaacgcatgacgattaattt

SEQ ID NO: 57531 - DNA, 25 bp, Probe sequence
acgaaagtaacgcatgacgattaat

SEQ ID NO: 57532 - DNA, 25 bp, Probe sequence
gaacgaaagtaacgcatgacgatta

SEQ ID NO: 57533 - DNA, 25 bp, Probe sequence
aagtaacgcatgacgattaatttaa

SEQ ID NO: 57534 - DNA, 25 bp, Probe sequence
aaagtaacgcatgacgattaattta

SEQ ID NO: 57535 - DNA, 25 bp, Probe sequence
agtaacgcatgacgattaatttaaa

SEQ ID NO: 57536 - DNA, 25 bp, Probe sequence
taaaaggagtacgaacgaaagtaac

SEQ ID NO: 57537 - DNA, 25 bp, Probe sequence
aattaatcgtcatgcgttactttcg

SEQ ID NO: 57538 - DNA, 25 bp, Probe sequence
ttaatcgtcatgcgttactttcgtt

SEQ ID NO: 57539 - DNA, 25 bp, Probe sequence
aaattaatcgtcatgcgttactttc

SEQ ID NO: 57540 - DNA, 25 bp, Probe sequence
attaatcgtcatgcgttactttcgt

SEQ ID NO: 57541 - DNA, 25 bp, Probe sequence
taatcgtcatgcgttactttcgttc

SEQ ID NO: 57542 - DNA, 25 bp, Probe sequence
taaattaatcgtcatgcgttacttt

SEQ ID NO: 57543 - DNA, 25 bp, Probe sequence
ttaaattaatcgtcatgcgttactt

SEQ ID NO: 57544 - DNA, 25 bp, Probe sequence
tttaaattaatcgtcatgcgttact

SEQ ID NO: 57545 - DNA, 25 bp, Probe sequence
gttactttcgttcgtactcctttta

SEQ ID NO: 57546 - DNA, 25 bp, Probe sequence
ctgtttgacgtgaaaggatatatgc

SEQ ID NO: 57547 - DNA, 25 bp, Probe sequence
tgaaaggatatatgccaaacgtgtt

SEQ ID NO: 57548 - DNA, 25 bp, Probe sequence
tgacgtgaaaggatatatgccaaac

SEQ ID NO: 57549 - DNA, 25 bp, Probe sequence
gtttgacgtgaaaggatatatgcca

SEQ ID NO: 57550 - DNA, 25 bp, Probe sequence
tgtttgacgtgaaaggatatatgcc

SEQ ID NO: 57551 - DNA, 25 bp, Probe sequence
gaaaggatatatgccaaacgtgttg

SEQ ID NO: 57552 - DNA, 25 bp, Probe sequence
ttgacgtgaaaggatatatgccaaa

SEQ ID NO: 57553 - DNA, 25 bp, Probe sequence
tttgacgtgaaaggatatatgccaa

SEQ ID NO: 57554 - DNA, 25 bp, Probe sequence
gtgaaaggatatatgccaaacgtgt

SEQ ID NO: 57555 - DNA, 25 bp, Probe sequence
gcatatatcctttcacgtcaaacag

SEQ ID NO: 57556 - DNA, 25 bp, Probe sequence
aacacgtttggcatatatcctttca

SEQ ID NO: 57557 - DNA, 25 bp, Probe sequence
ggcatatatcctttcacgtcaaaca

SEQ ID NO: 57558 - DNA, 25 bp, Probe sequence
tggcatatatcctttcacgtcaaac

SEQ ID NO: 57559 - DNA, 25 bp, Probe sequence
gtttggcatatatcctttcacgtca

SEQ ID NO: 57560 - DNA, 25 bp, Probe sequence
ttggcatatatcctttcacgtcaaa

SEQ ID NO: 57561 - DNA, 25 bp, Probe sequence
tttggcatatatcctttcacgtcaa

SEQ ID NO: 57562 - DNA, 25 bp, Probe sequence
caacacgtttggcatatatcctttc

SEQ ID NO: 57563 - DNA, 25 bp, Probe sequence
acacgtttggcatatatcctttcac

SEQ ID NO: 57564 - DNA, 25 bp, Probe sequence
tgttcattaacctcgcttcttgatt

SEQ ID NO: 57565 - DNA, 25 bp, Probe sequence
tatgatattgccagtacagagactt

SEQ ID NO: 57566 - DNA, 25 bp, Probe sequence
atatgatattgccagtacagagact

SEQ ID NO: 57567 - DNA, 25 bp, Probe sequence
tatatgatattgccagtacagagac

SEQ ID NO: 57568 - DNA, 25 bp, Probe sequence
gtatatgatattgccagtacagaga

SEQ ID NO: 57569 - DNA, 25 bp, Probe sequence
gttcattaacctcgcttcttgattt

SEQ ID NO: 57570 - DNA, 25 bp, Probe sequence
tcattaacctcgcttcttgatttaa

SEQ ID NO: 57571 - DNA, 25 bp, Probe sequence
ttcattaacctcgcttcttgattta

SEQ ID NO: 57572 - DNA, 25 bp, Probe sequence
atgatattgccagtacagagacttt

SEQ ID NO: 57573 - DNA, 25 bp, Probe sequence
aatcaagaagcgaggttaatgaaca

SEQ ID NO: 57574 - DNA, 25 bp, Probe sequence
aagtctctgtactggcaatatcata

SEQ ID NO: 57575 - DNA, 25 bp, Probe sequence
agtctctgtactggcaatatcatat

SEQ ID NO: 57576 - DNA, 25 bp, Probe sequence
gtctctgtactggcaatatcatata

SEQ ID NO: 57577 - DNA, 25 bp, Probe sequence
tctctgtactggcaatatcatatac

SEQ ID NO: 57578 - DNA, 25 bp, Probe sequence
aaatcaagaagcgaggttaatgaac

SEQ ID NO: 57579 - DNA, 25 bp, Probe sequence
taaatcaagaagcgaggttaatgaa

SEQ ID NO: 57580 - DNA, 25 bp, Probe sequence
ttaaatcaagaagcgaggttaatga

SEQ ID NO: 57581 - DNA, 25 bp, Probe sequence
aaagtctctgtactggcaatatcat

SEQ ID NO: 57582 - DNA, 25 bp, Probe sequence
ctacacccatatagtaacacatcac

SEQ ID NO: 57583 - DNA, 25 bp, Probe sequence
acacccatatagtaacacatcactt

SEQ ID NO: 57584 - DNA, 25 bp, Probe sequence
acccatatagtaacacatcacttga

SEQ ID NO: 57585 - DNA, 25 bp, Probe sequence
cacccatatagtaacacatcacttg

SEQ ID NO: 57586 - DNA, 25 bp, Probe sequence
tacacccatatagtaacacatcact

SEQ ID NO: 57587 - DNA, 25 bp, Probe sequence
cgaattagtagtcaaagtgttatgg

SEQ ID NO: 57588 - DNA, 25 bp, Probe sequence
ccatatagtaacacatcacttgatt

SEQ ID NO: 57589 - DNA, 25 bp, Probe sequence
cccatatagtaacacatcacttgat

SEQ ID NO: 57590 - DNA, 25 bp, Probe sequence
actacacccatatagtaacacatca

SEQ ID NO: 57591 - DNA, 25 bp, Probe sequence
gtgatgtgttactatatgggtgtag

SEQ ID NO: 57592 - DNA, 25 bp, Probe sequence
aagtgatgtgttactatatgggtgt

SEQ ID NO: 57593 - DNA, 25 bp, Probe sequence
caagtgatgtgttactatatgggtg

SEQ ID NO: 57594 - DNA, 25 bp, Probe sequence
tcaagtgatgtgttactatatgggt

SEQ ID NO: 57595 - DNA, 25 bp, Probe sequence
agtgatgtgttactatatgggtgta

SEQ ID NO: 57596 - DNA, 25 bp, Probe sequence
ccataacactttgactactaattcg

SEQ ID NO: 57597 - DNA, 25 bp, Probe sequence
aatcaagtgatgtgttactatatgg

SEQ ID NO: 57598 - DNA, 25 bp, Probe sequence
atcaagtgatgtgttactatatggg

SEQ ID NO: 57599 - DNA, 25 bp, Probe sequence
tgtgttactatatgggtgtagttct

SEQ ID NO: 57600 - DNA, 25 bp, Probe sequence
tatagaggttctgaaaagctgtgtt

SEQ ID NO: 57601 - DNA, 25 bp, Probe sequence
agtatagaggttctgaaaagctgtg

SEQ ID NO: 57602 - DNA, 25 bp, Probe sequence
aagtatagaggttctgaaaagctgt

SEQ ID NO: 57603 - DNA, 25 bp, Probe sequence
gtatagaggttctgaaaagctgtgt

SEQ ID NO: 57604 - DNA, 25 bp, Probe sequence
atagaggttctgaaaagctgtgttt

SEQ ID NO: 57605 - DNA, 25 bp, Probe sequence
gaggttctgaaaagctgtgttttat

SEQ ID NO: 57606 - DNA, 25 bp, Probe sequence
tctgaaaagctgtgttttatagtgg

SEQ ID NO: 57607 - DNA, 25 bp, Probe sequence
agaggttctgaaaagctgtgtttta

SEQ ID NO: 57608 - DNA, 25 bp, Probe sequence
tagaggttctgaaaagctgtgtttt

SEQ ID NO: 57609 - DNA, 25 bp, Probe sequence
aacacagcttttcagaacctctata

SEQ ID NO: 57610 - DNA, 25 bp, Probe sequence
acagcttttcagaacctctatactt

SEQ ID NO: 57611 - DNA, 25 bp, Probe sequence
cacagcttttcagaacctctatact

SEQ ID NO: 57612 - DNA, 25 bp, Probe sequence
acacagcttttcagaacctctatac

SEQ ID NO: 57613 - DNA, 25 bp, Probe sequence
aaacacagcttttcagaacctctat

SEQ ID NO: 57614 - DNA, 25 bp, Probe sequence
ataaaacacagcttttcagaacctc

SEQ ID NO: 57615 - DNA, 25 bp, Probe sequence
ccactataaaacacagcttttcaga

SEQ ID NO: 57616 - DNA, 25 bp, Probe sequence
aaaacacagcttttcagaacctcta

SEQ ID NO: 57617 - DNA, 25 bp, Probe sequence
taaaacacagcttttcagaacctct

SEQ ID NO: 57618 - DNA, 25 bp, Probe sequence
tgtattgtctcaaagattagtcact

SEQ ID NO: 57619 - DNA, 25 bp, Probe sequence
ttgtattgtctcaaagattagtcac

SEQ ID NO: 57620 - DNA, 25 bp, Probe sequence
aatggtaaggtattggttaaattgt

SEQ ID NO: 57621 - DNA, 25 bp, Probe sequence
gtattgtctcaaagattagtcactt

SEQ ID NO: 57622 - DNA, 25 bp, Probe sequence
tggttaaattgtattgtctcaaaga

SEQ ID NO: 57623 - DNA, 25 bp, Probe sequence
aggtattggttaaattgtattgtct

SEQ ID NO: 57624 - DNA, 25 bp, Probe sequence
ggtattggttaaattgtattgtctc

SEQ ID NO: 57625 - DNA, 25 bp, Probe sequence
gcaaaatggtaaggtattggttaaa

SEQ ID NO: 57626 - DNA, 25 bp, Probe sequence
ttggttaaattgtattgtctcaaag

SEQ ID NO: 57627 - DNA, 25 bp, Probe sequence
agtgactaatctttgagacaataca

SEQ ID NO: 57628 - DNA, 25 bp, Probe sequence
gtgactaatctttgagacaatacaa

SEQ ID NO: 57629 - DNA, 25 bp, Probe sequence
acaatttaaccaataccttaccatt

SEQ ID NO: 57630 - DNA, 25 bp, Probe sequence
aagtgactaatctttgagacaatac

SEQ ID NO: 57631 - DNA, 25 bp, Probe sequence
tctttgagacaatacaatttaacca

SEQ ID NO: 57632 - DNA, 25 bp, Probe sequence
agacaatacaatttaaccaatacct

SEQ ID NO: 57633 - DNA, 25 bp, Probe sequence
gagacaatacaatttaaccaatacc

SEQ ID NO: 57634 - DNA, 25 bp, Probe sequence
tttaaccaataccttaccattttgc

SEQ ID NO: 57635 - DNA, 25 bp, Probe sequence
ctttgagacaatacaatttaaccaa

SEQ ID NO: 57636 - DNA, 25 bp, Probe sequence
acaaatgtaagatactgtcagtgaa

SEQ ID NO: 57637 - DNA, 25 bp, Probe sequence
aacaaatgtaagatactgtcagtga

SEQ ID NO: 57638 - DNA, 25 bp, Probe sequence
aatgtaagatactgtcagtgaaact

SEQ ID NO: 57639 - DNA, 25 bp, Probe sequence
aaatgtaagatactgtcagtgaaac

SEQ ID NO: 57640 - DNA, 25 bp, Probe sequence
caaatgtaagatactgtcagtgaaa

SEQ ID NO: 57641 - DNA, 25 bp, Probe sequence
taacaaatgtaagatactgtcagtg

SEQ ID NO: 57642 - DNA, 25 bp, Probe sequence
ataacagcatcttaacaaatgtaag

SEQ ID NO: 57643 - DNA, 25 bp, Probe sequence
ttaacaaatgtaagatactgtcagt

SEQ ID NO: 57644 - DNA, 25 bp, Probe sequence
agatactgtcagtgaaactgtgaaa

SEQ ID NO: 57645 - DNA, 25 bp, Probe sequence
tcactgacagtatcttacatttgtt

SEQ ID NO: 57646 - DNA, 25 bp, Probe sequence
ttcactgacagtatcttacatttgt

SEQ ID NO: 57647 - DNA, 25 bp, Probe sequence
agtttcactgacagtatcttacatt

SEQ ID NO: 57648 - DNA, 25 bp, Probe sequence
tttcactgacagtatcttacatttg

SEQ ID NO: 57649 - DNA, 25 bp, Probe sequence
gtttcactgacagtatcttacattt

SEQ ID NO: 57650 - DNA, 25 bp, Probe sequence
cactgacagtatcttacatttgtta

SEQ ID NO: 57651 - DNA, 25 bp, Probe sequence
cttacatttgttaagatgctgttat

SEQ ID NO: 57652 - DNA, 25 bp, Probe sequence
actgacagtatcttacatttgttaa

SEQ ID NO: 57653 - DNA, 25 bp, Probe sequence
ttcacagtttcactgacagtatctt

SEQ ID NO: 57654 - DNA, 25 bp, Probe sequence
gatggatgaaggtgattagtgagaa

SEQ ID NO: 57655 - DNA, 25 bp, Probe sequence
gagatggatgaaggtgattagtgag

SEQ ID NO: 57656 - DNA, 25 bp, Probe sequence
agatggatgaaggtgattagtgaga

SEQ ID NO: 57657 - DNA, 25 bp, Probe sequence
cgagatggatgaaggtgattagtga

SEQ ID NO: 57658 - DNA, 25 bp, Probe sequence
ttgtattctcaactaagtcaacctt

SEQ ID NO: 57659 - DNA, 25 bp, Probe sequence
atggatgaaggtgattagtgagaaa

SEQ ID NO: 57660 - DNA, 25 bp, Probe sequence
gttcgagatggatgaaggtgattag

SEQ ID NO: 57661 - DNA, 25 bp, Probe sequence
tggatgaaggtgattagtgagaaac

SEQ ID NO: 57662 - DNA, 25 bp, Probe sequence
caaccttattgataatggtgtgaga

SEQ ID NO: 57663 - DNA, 25 bp, Probe sequence
ttctcactaatcaccttcatccatc

SEQ ID NO: 57664 - DNA, 25 bp, Probe sequence
ctcactaatcaccttcatccatctc

SEQ ID NO: 57665 - DNA, 25 bp, Probe sequence
tctcactaatcaccttcatccatct

SEQ ID NO: 57666 - DNA, 25 bp, Probe sequence
tcactaatcaccttcatccatctcg

SEQ ID NO: 57667 - DNA, 25 bp, Probe sequence
aaggttgacttagttgagaatacaa

SEQ ID NO: 57668 - DNA, 25 bp, Probe sequence
ctaatcaccttcatccatctcgaac

SEQ ID NO: 57669 - DNA, 25 bp, Probe sequence
tttctcactaatcaccttcatccat

SEQ ID NO: 57670 - DNA, 25 bp, Probe sequence
gtttctcactaatcaccttcatcca

SEQ ID NO: 57671 - DNA, 25 bp, Probe sequence
tctcacaccattatcaataaggttg

SEQ ID NO: 57672 - DNA, 25 bp, Probe sequence
cccctctagcttaaaatgataagta

SEQ ID NO: 57673 - DNA, 25 bp, Probe sequence
aaaatgataagtatagctagagggg

SEQ ID NO: 57674 - DNA, 25 bp, Probe sequence
ccctctagcttaaaatgataagtat

SEQ ID NO: 57675 - DNA, 25 bp, Probe sequence
taaaatgataagtatagctagaggg

SEQ ID NO: 57676 - DNA, 25 bp, Probe sequence
tacttatcattttaagctagagggg

SEQ ID NO: 57677 - DNA, 25 bp, Probe sequence
cccctctagctatacttatcatttt

SEQ ID NO: 57678 - DNA, 25 bp, Probe sequence
atacttatcattttaagctagaggg

SEQ ID NO: 57679 - DNA, 25 bp, Probe sequence
ccctctagctatacttatcatttta

SEQ ID NO: 57680 - DNA, 25 bp, Probe sequence
ttccgactagtatgctaagaataat

SEQ ID NO: 57681 - DNA, 25 bp, Probe sequence
ataattccgactagtatgctaagaa

SEQ ID NO: 57682 - DNA, 25 bp, Probe sequence
tccgactagtatgctaagaataata

SEQ ID NO: 57683 - DNA, 25 bp, Probe sequence
tataattccgactagtatgctaaga

SEQ ID NO: 57684 - DNA, 25 bp, Probe sequence
attccgactagtatgctaagaataa

SEQ ID NO: 57685 - DNA, 25 bp, Probe sequence
aattccgactagtatgctaagaata

SEQ ID NO: 57686 - DNA, 25 bp, Probe sequence
taattccgactagtatgctaagaat

SEQ ID NO: 57687 - DNA, 25 bp, Probe sequence
tgaatataattccgactagtatgct

SEQ ID NO: 57688 - DNA, 25 bp, Probe sequence
ttgaatataattccgactagtatgc

SEQ ID NO: 57689 - DNA, 25 bp, Probe sequence
ttcttagcatactagtcggaattat

SEQ ID NO: 57690 - DNA, 25 bp, Probe sequence
attattcttagcatactagtcggaa

SEQ ID NO: 57691 - DNA, 25 bp, Probe sequence
tcttagcatactagtcggaattata

SEQ ID NO: 57692 - DNA, 25 bp, Probe sequence
tattattcttagcatactagtcgga

SEQ ID NO: 57693 - DNA, 25 bp, Probe sequence
agcatactagtcggaattatattca

SEQ ID NO: 57694 - DNA, 25 bp, Probe sequence
attcttagcatactagtcggaatta

SEQ ID NO: 57695 - DNA, 25 bp, Probe sequence
tattcttagcatactagtcggaatt

SEQ ID NO: 57696 - DNA, 25 bp, Probe sequence
ttattcttagcatactagtcggaat

SEQ ID NO: 57697 - DNA, 25 bp, Probe sequence
gcatactagtcggaattatattcaa

SEQ ID NO: 57698 - DNA, 25 bp, Probe sequence
gtcatttactaacacagccaaacat

SEQ ID NO: 57699 - DNA, 25 bp, Probe sequence
aaaggcgtttgtagtaaatgtgaat

SEQ ID NO: 57700 - DNA, 25 bp, Probe sequence
taaatgtgaatatgagtgtgccctt

SEQ ID NO: 57701 - DNA, 25 bp, Probe sequence
tcatttactaacacagccaaacatt

SEQ ID NO: 57702 - DNA, 25 bp, Probe sequence
attcgtcatttactaacacagccaa

SEQ ID NO: 57703 - DNA, 25 bp, Probe sequence
aaggcgtttgtagtaaatgtgaata

SEQ ID NO: 57704 - DNA, 25 bp, Probe sequence
tatttaggaatacacaggagccatc

SEQ ID NO: 57705 - DNA, 25 bp, Probe sequence
ctatttaggaatacacaggagccat

SEQ ID NO: 57706 - DNA, 25 bp, Probe sequence
gtaaatgtgaatatgagtgtgccct

SEQ ID NO: 57707 - DNA, 25 bp, Probe sequence
atgtttggctgtgttagtaaatgac

SEQ ID NO: 57708 - DNA, 25 bp, Probe sequence
attcacatttactacaaacgccttt

SEQ ID NO: 57709 - DNA, 25 bp, Probe sequence
aagggcacactcatattcacattta

SEQ ID NO: 57710 - DNA, 25 bp, Probe sequence
aatgtttggctgtgttagtaaatga

SEQ ID NO: 57711 - DNA, 25 bp, Probe sequence
tattcacatttactacaaacgcctt

SEQ ID NO: 57712 - DNA, 25 bp, Probe sequence
ttggctgtgttagtaaatgacgaat

SEQ ID NO: 57713 - DNA, 25 bp, Probe sequence
atggctcctgtgtattcctaaatag

SEQ ID NO: 57714 - DNA, 25 bp, Probe sequence
gatggctcctgtgtattcctaaata

SEQ ID NO: 57715 - DNA, 25 bp, Probe sequence
catattcacatttactacaaacgcc

SEQ ID NO: 57716 - DNA, 25 bp, Probe sequence
attgaatggagtatatcagcttgtt

SEQ ID NO: 57717 - DNA, 25 bp, Probe sequence
tattgaatggagtatatcagcttgt

SEQ ID NO: 57718 - DNA, 25 bp, Probe sequence
atggagtatatcagcttgtttcagg

SEQ ID NO: 57719 - DNA, 25 bp, Probe sequence
ggagtatatcagcttgtttcaggtt

SEQ ID NO: 57720 - DNA, 25 bp, Probe sequence
gagtatatcagcttgtttcaggttt

SEQ ID NO: 57721 - DNA, 25 bp, Probe sequence
aatggagtatatcagcttgtttcag

SEQ ID NO: 57722 - DNA, 25 bp, Probe sequence
tggagtatatcagcttgtttcaggt

SEQ ID NO: 57723 - DNA, 25 bp, Probe sequence
gaatggagtatatcagcttgtttca

SEQ ID NO: 57724 - DNA, 25 bp, Probe sequence
tgaatggagtatatcagcttgtttc

SEQ ID NO: 57725 - DNA, 25 bp, Probe sequence
aacaagctgatatactccattcaat

SEQ ID NO: 57726 - DNA, 25 bp, Probe sequence
acaagctgatatactccattcaata

SEQ ID NO: 57727 - DNA, 25 bp, Probe sequence
cctgaaacaagctgatatactccat

SEQ ID NO: 57728 - DNA, 25 bp, Probe sequence
aacctgaaacaagctgatatactcc

SEQ ID NO: 57729 - DNA, 25 bp, Probe sequence
aaacctgaaacaagctgatatactc

SEQ ID NO: 57730 - DNA, 25 bp, Probe sequence
ctgaaacaagctgatatactccatt

SEQ ID NO: 57731 - DNA, 25 bp, Probe sequence
tgaaacaagctgatatactccattc

SEQ ID NO: 57732 - DNA, 25 bp, Probe sequence
acctgaaacaagctgatatactcca

SEQ ID NO: 57733 - DNA, 25 bp, Probe sequence
gaaacaagctgatatactccattca

SEQ ID NO: 57734 - DNA, 25 bp, Probe sequence
cgtcagtcttgcttcatacatagtt

SEQ ID NO: 57735 - DNA, 25 bp, Probe sequence
aacgtcagtcttgcttcatacatag

SEQ ID NO: 57736 - DNA, 25 bp, Probe sequence
gtcagtcttgcttcatacatagttt

SEQ ID NO: 57737 - DNA, 25 bp, Probe sequence
acgtcagtcttgcttcatacatagt

SEQ ID NO: 57738 - DNA, 25 bp, Probe sequence
tcagtcttgcttcatacatagttta

SEQ ID NO: 57739 - DNA, 25 bp, Probe sequence
aaacgtcagtcttgcttcatacata

SEQ ID NO: 57740 - DNA, 25 bp, Probe sequence
cagtcttgcttcatacatagtttaa

SEQ ID NO: 57741 - DNA, 25 bp, Probe sequence
gaaacgtcagtcttgcttcatacat

SEQ ID NO: 57742 - DNA, 25 bp, Probe sequence
cgttattgttagtgatttcaagttt

SEQ ID NO: 57743 - DNA, 25 bp, Probe sequence
aactatgtatgaagcaagactgacg

SEQ ID NO: 57744 - DNA, 25 bp, Probe sequence
ctatgtatgaagcaagactgacgtt

SEQ ID NO: 57745 - DNA, 25 bp, Probe sequence
aaactatgtatgaagcaagactgac

SEQ ID NO: 57746 - DNA, 25 bp, Probe sequence
actatgtatgaagcaagactgacgt

SEQ ID NO: 57747 - DNA, 25 bp, Probe sequence
taaactatgtatgaagcaagactga

SEQ ID NO: 57748 - DNA, 25 bp, Probe sequence
tatgtatgaagcaagactgacgttt

SEQ ID NO: 57749 - DNA, 25 bp, Probe sequence
ttaaactatgtatgaagcaagactg

SEQ ID NO: 57750 - DNA, 25 bp, Probe sequence
atgtatgaagcaagactgacgtttc

SEQ ID NO: 57751 - DNA, 25 bp, Probe sequence
aaacttgaaatcactaacaataacg

SEQ ID NO: 57752 - DNA, 25 bp, Probe sequence
gcctgctgtaaaagattgttcataa

SEQ ID NO: 57753 - DNA, 25 bp, Probe sequence
cctgctgtaaaagattgttcataaa

SEQ ID NO: 57754 - DNA, 25 bp, Probe sequence
cgcctgctgtaaaagattgttcata

SEQ ID NO: 57755 - DNA, 25 bp, Probe sequence
aattagacagtacagtaatctcatt

SEQ ID NO: 57756 - DNA, 25 bp, Probe sequence
cataatcgcctgctgtaaaagattg

SEQ ID NO: 57757 - DNA, 25 bp, Probe sequence
tgctgtaaaagattgttcataaact

SEQ ID NO: 57758 - DNA, 25 bp, Probe sequence
ataatcgcctgctgtaaaagattgt

SEQ ID NO: 57759 - DNA, 25 bp, Probe sequence
taatcgcctgctgtaaaagattgtt

SEQ ID NO: 57760 - DNA, 25 bp, Probe sequence
ctgctgtaaaagattgttcataaac

SEQ ID NO: 57761 - DNA, 25 bp, Probe sequence
ttatgaacaatcttttacagcaggc

SEQ ID NO: 57762 - DNA, 25 bp, Probe sequence
tatgaacaatcttttacagcaggcg

SEQ ID NO: 57763 - DNA, 25 bp, Probe sequence
tttatgaacaatcttttacagcagg

SEQ ID NO: 57764 - DNA, 25 bp, Probe sequence
aatgagattactgtactgtctaatt

SEQ ID NO: 57765 - DNA, 25 bp, Probe sequence
caatcttttacagcaggcgattatg

SEQ ID NO: 57766 - DNA, 25 bp, Probe sequence
acaatcttttacagcaggcgattat

SEQ ID NO: 57767 - DNA, 25 bp, Probe sequence
agtttatgaacaatcttttacagca

SEQ ID NO: 57768 - DNA, 25 bp, Probe sequence
aacaatcttttacagcaggcgatta

SEQ ID NO: 57769 - DNA, 25 bp, Probe sequence
gtttatgaacaatcttttacagcag

SEQ ID NO: 57770 - DNA, 25 bp, Probe sequence
tgaacgacatgactatgagtaacaa

SEQ ID NO: 57771 - DNA, 25 bp, Probe sequence
ttgaacgacatgactatgagtaaca

SEQ ID NO: 57772 - DNA, 25 bp, Probe sequence
aacgacatgactatgagtaacaaca

SEQ ID NO: 57773 - DNA, 25 bp, Probe sequence
gaacgacatgactatgagtaacaac

SEQ ID NO: 57774 - DNA, 25 bp, Probe sequence
cttgaacgacatgactatgagtaac

SEQ ID NO: 57775 - DNA, 25 bp, Probe sequence
ccttgaacgacatgactatgagtaa

SEQ ID NO: 57776 - DNA, 25 bp, Probe sequence
gacatgactatgagtaacaacacaa

SEQ ID NO: 57777 - DNA, 25 bp, Probe sequence
cgacatgactatgagtaacaacaca

SEQ ID NO: 57778 - DNA, 25 bp, Probe sequence
acgacatgactatgagtaacaacac

SEQ ID NO: 57779 - DNA, 25 bp, Probe sequence
tgttactcatagtcatgtcgttcaa

SEQ ID NO: 57780 - DNA, 25 bp, Probe sequence
ttgttactcatagtcatgtcgttca

SEQ ID NO: 57781 - DNA, 25 bp, Probe sequence
gttgttactcatagtcatgtcgttc

SEQ ID NO: 57782 - DNA, 25 bp, Probe sequence
tgttgttactcatagtcatgtcgtt

SEQ ID NO: 57783 - DNA, 25 bp, Probe sequence
ttactcatagtcatgtcgttcaagg

SEQ ID NO: 57784 - DNA, 25 bp, Probe sequence
gttactcatagtcatgtcgttcaag

SEQ ID NO: 57785 - DNA, 25 bp, Probe sequence
gtgttgttactcatagtcatgtcgt

SEQ ID NO: 57786 - DNA, 25 bp, Probe sequence
tgtgttgttactcatagtcatgtcg

SEQ ID NO: 57787 - DNA, 25 bp, Probe sequence
ttgtgttgttactcatagtcatgtc

SEQ ID NO: 57788 - DNA, 25 bp, Probe sequence
ggtaaggtgttctaagtttgcgttt

SEQ ID NO: 57789 - DNA, 25 bp, Probe sequence
aaaaggggtaaggtgttctaagttt

SEQ ID NO: 57790 - DNA, 25 bp, Probe sequence
gtaaggtgttctaagtttgcgtttt

SEQ ID NO: 57791 - DNA, 25 bp, Probe sequence
aaggtgttctaagtttgcgttttaa

SEQ ID NO: 57792 - DNA, 25 bp, Probe sequence
aggtgttctaagtttgcgttttaat

SEQ ID NO: 57793 - DNA, 25 bp, Probe sequence
taaggtgttctaagtttgcgtttta

SEQ ID NO: 57794 - DNA, 25 bp, Probe sequence
gggtaaggtgttctaagtttgcgtt

SEQ ID NO: 57795 - DNA, 25 bp, Probe sequence
aaaggggtaaggtgttctaagtttg

SEQ ID NO: 57796 - DNA, 25 bp, Probe sequence
aaattacaataaggacggaaaaggg

SEQ ID NO: 57797 - DNA, 25 bp, Probe sequence
aaacgcaaacttagaacaccttacc

SEQ ID NO: 57798 - DNA, 25 bp, Probe sequence
aaacttagaacaccttacccctttt

SEQ ID NO: 57799 - DNA, 25 bp, Probe sequence
aaaacgcaaacttagaacaccttac

SEQ ID NO: 57800 - DNA, 25 bp, Probe sequence
ttaaaacgcaaacttagaacacctt

SEQ ID NO: 57801 - DNA, 25 bp, Probe sequence
attaaaacgcaaacttagaacacct

SEQ ID NO: 57802 - DNA, 25 bp, Probe sequence
caaacttagaacaccttaccccttt

SEQ ID NO: 57803 - DNA, 25 bp, Probe sequence
aacgcaaacttagaacaccttaccc

SEQ ID NO: 57804 - DNA, 25 bp, Probe sequence
taaaacgcaaacttagaacacctta

SEQ ID NO: 57805 - DNA, 25 bp, Probe sequence
cccttttccgtccttattgtaattt

SEQ ID NO: 57806 - DNA, 25 bp, Probe sequence
tctattcatttactcggatacaggg

SEQ ID NO: 57807 - DNA, 25 bp, Probe sequence
ctattcatttactcggatacagggc

SEQ ID NO: 57808 - DNA, 25 bp, Probe sequence
tgtgatgtctatattggttgcagat

SEQ ID NO: 57809 - DNA, 25 bp, Probe sequence
ttgtgatgtctatattggttgcaga

SEQ ID NO: 57810 - DNA, 25 bp, Probe sequence
gtctatattggttgcagattgttgt

SEQ ID NO: 57811 - DNA, 25 bp, Probe sequence
tgtctatattggttgcagattgttg

SEQ ID NO: 57812 - DNA, 25 bp, Probe sequence
tattcatttactcggatacagggct

SEQ ID NO: 57813 - DNA, 25 bp, Probe sequence
gatgtctatattggttgcagattgt

SEQ ID NO: 57814 - DNA, 25 bp, Probe sequence
tgatgtctatattggttgcagattg

SEQ ID NO: 57815 - DNA, 25 bp, Probe sequence
ccctgtatccgagtaaatgaataga

SEQ ID NO: 57816 - DNA, 25 bp, Probe sequence
gccctgtatccgagtaaatgaatag

SEQ ID NO: 57817 - DNA, 25 bp, Probe sequence
tctgcaaccaatatagacatcacaa

SEQ ID NO: 57818 - DNA, 25 bp, Probe sequence
atctgcaaccaatatagacatcaca

SEQ ID NO: 57819 - DNA, 25 bp, Probe sequence
caacaatctgcaaccaatatagaca

SEQ ID NO: 57820 - DNA, 25 bp, Probe sequence
acaacaatctgcaaccaatatagac

SEQ ID NO: 57821 - DNA, 25 bp, Probe sequence
agccctgtatccgagtaaatgaata

SEQ ID NO: 57822 - DNA, 25 bp, Probe sequence
aatctgcaaccaatatagacatcac

SEQ ID NO: 57823 - DNA, 25 bp, Probe sequence
caatctgcaaccaatatagacatca

SEQ ID NO: 57824 - DNA, 25 bp, Probe sequence
gcaatgaccttctatttattcgctt

SEQ ID NO: 57825 - DNA, 25 bp, Probe sequence
ttcgcaatgaccttctatttattcg

SEQ ID NO: 57826 - DNA, 25 bp, Probe sequence
cgcaatgaccttctatttattcgct

SEQ ID NO: 57827 - DNA, 25 bp, Probe sequence
tcgcaatgaccttctatttattcgc

SEQ ID NO: 57828 - DNA, 25 bp, Probe sequence
caatgaccttctatttattcgcttt

SEQ ID NO: 57829 - DNA, 25 bp, Probe sequence
tttcgcaatgaccttctatttattc

SEQ ID NO: 57830 - DNA, 25 bp, Probe sequence
gcactgaaattaacatgaatggtac

SEQ ID NO: 57831 - DNA, 25 bp, Probe sequence
agcactgaaattaacatgaatggta

SEQ ID NO: 57832 - DNA, 25 bp, Probe sequence
tagcactgaaattaacatgaatggt

SEQ ID NO: 57833 - DNA, 25 bp, Probe sequence
cgaataaatagaaggtcattgcgaa

SEQ ID NO: 57834 - DNA, 25 bp, Probe sequence
aagcgaataaatagaaggtcattgc

SEQ ID NO: 57835 - DNA, 25 bp, Probe sequence
gcgaataaatagaaggtcattgcga

SEQ ID NO: 57836 - DNA, 25 bp, Probe sequence
agcgaataaatagaaggtcattgcg

SEQ ID NO: 57837 - DNA, 25 bp, Probe sequence
gaataaatagaaggtcattgcgaaa

SEQ ID NO: 57838 - DNA, 25 bp, Probe sequence
aaagcgaataaatagaaggtcattg

SEQ ID NO: 57839 - DNA, 25 bp, Probe sequence
accattcatgttaatttcagtgcta

SEQ ID NO: 57840 - DNA, 25 bp, Probe sequence
taccattcatgttaatttcagtgct

SEQ ID NO: 57841 - DNA, 25 bp, Probe sequence
gtaccattcatgttaatttcagtgc

SEQ ID NO: 57842 - DNA, 25 bp, Probe sequence
gtagacgattcactgacacatcata

SEQ ID NO: 57843 - DNA, 25 bp, Probe sequence
tagacgattcactgacacatcataa

SEQ ID NO: 57844 - DNA, 25 bp, Probe sequence
agacgattcactgacacatcataag

SEQ ID NO: 57845 - DNA, 25 bp, Probe sequence
tgttcaattaagtgtagacgattca

SEQ ID NO: 57846 - DNA, 25 bp, Probe sequence
ttgttcaattaagtgtagacgattc

SEQ ID NO: 57847 - DNA, 25 bp, Probe sequence
tgtagacgattcactgacacatcat

SEQ ID NO: 57848 - DNA, 25 bp, Probe sequence
gttcaattaagtgtagacgattcac

SEQ ID NO: 57849 - DNA, 25 bp, Probe sequence
tttgttcaattaagtgtagacgatt

SEQ ID NO: 57850 - DNA, 25 bp, Probe sequence
atttgttcaattaagtgtagacgat

SEQ ID NO: 57851 - DNA, 25 bp, Probe sequence
tatgatgtgtcagtgaatcgtctac

SEQ ID NO: 57852 - DNA, 25 bp, Probe sequence
ttatgatgtgtcagtgaatcgtcta

SEQ ID NO: 57853 - DNA, 25 bp, Probe sequence
cttatgatgtgtcagtgaatcgtct

SEQ ID NO: 57854 - DNA, 25 bp, Probe sequence
tgaatcgtctacacttaattgaaca

SEQ ID NO: 57855 - DNA, 25 bp, Probe sequence
gaatcgtctacacttaattgaacaa

SEQ ID NO: 57856 - DNA, 25 bp, Probe sequence
atgatgtgtcagtgaatcgtctaca

SEQ ID NO: 57857 - DNA, 25 bp, Probe sequence
gtgaatcgtctacacttaattgaac

SEQ ID NO: 57858 - DNA, 25 bp, Probe sequence
aatcgtctacacttaattgaacaaa

SEQ ID NO: 57859 - DNA, 25 bp, Probe sequence
atcgtctacacttaattgaacaaat

SEQ ID NO: 57860 - DNA, 25 bp, Probe sequence
ctataaggaaacagaggaaacgcta

SEQ ID NO: 57861 - DNA, 25 bp, Probe sequence
tataaggaaacagaggaaacgctac

SEQ ID NO: 57862 - DNA, 25 bp, Probe sequence
taatgccaatcaacaccgaagttct

SEQ ID NO: 57863 - DNA, 25 bp, Probe sequence
ttctataaggaaacagaggaaacgc

SEQ ID NO: 57864 - DNA, 25 bp, Probe sequence
tactgtcacctctgcttgaaataat

SEQ ID NO: 57865 - DNA, 25 bp, Probe sequence
taatagatccatgagagtaggaacc

SEQ ID NO: 57866 - DNA, 25 bp, Probe sequence
ctactgtcacctctgcttgaaataa

SEQ ID NO: 57867 - DNA, 25 bp, Probe sequence
actgtcacctctgcttgaaataatt

SEQ ID NO: 57868 - DNA, 25 bp, Probe sequence
ataaggaaacagaggaaacgctact

SEQ ID NO: 57869 - DNA, 25 bp, Probe sequence
tagcgtttcctctgtttccttatag

SEQ ID NO: 57870 - DNA, 25 bp, Probe sequence
gtagcgtttcctctgtttccttata

SEQ ID NO: 57871 - DNA, 25 bp, Probe sequence
agaacttcggtgttgattggcatta

SEQ ID NO: 57872 - DNA, 25 bp, Probe sequence
gcgtttcctctgtttccttatagaa

SEQ ID NO: 57873 - DNA, 25 bp, Probe sequence
ggttcctactctcatggatctatta

SEQ ID NO: 57874 - DNA, 25 bp, Probe sequence
attatttcaagcagaggtgacagta

SEQ ID NO: 57875 - DNA, 25 bp, Probe sequence
ttatttcaagcagaggtgacagtag

SEQ ID NO: 57876 - DNA, 25 bp, Probe sequence
agtagcgtttcctctgtttccttat

SEQ ID NO: 57877 - DNA, 25 bp, Probe sequence
aattatttcaagcagaggtgacagt

SEQ ID NO: 57878 - DNA, 25 bp, Probe sequence
atacttattcgattgttttcaaaac

SEQ ID NO: 57879 - DNA, 25 bp, Probe sequence
gttttgaaaacaatcgaataagtat

SEQ ID NO: 57880 - DNA, 25 bp, Probe sequence
gagtctcgacggataagaattgatt

SEQ ID NO: 57881 - DNA, 25 bp, Probe sequence
agtctcgacggataagaattgatta

SEQ ID NO: 57882 - DNA, 25 bp, Probe sequence
agagtctcgacggataagaattgat

SEQ ID NO: 57883 - DNA, 25 bp, Probe sequence
cgcctcaatataatgtaggtagatt

SEQ ID NO: 57884 - DNA, 25 bp, Probe sequence
gtctcgacggataagaattgattaa

SEQ ID NO: 57885 - DNA, 25 bp, Probe sequence
aagagtctcgacggataagaattga

SEQ ID NO: 57886 - DNA, 25 bp, Probe sequence
tctcgacggataagaattgattaat

SEQ ID NO: 57887 - DNA, 25 bp, Probe sequence
tgtaggtagattgttcatattacgt

SEQ ID NO: 57888 - DNA, 25 bp, Probe sequence
atgtaggtagattgttcatattacg

SEQ ID NO: 57889 - DNA, 25 bp, Probe sequence
aatcaattcttatccgtcgagactc

SEQ ID NO: 57890 - DNA, 25 bp, Probe sequence
taatcaattcttatccgtcgagact

SEQ ID NO: 57891 - DNA, 25 bp, Probe sequence
atcaattcttatccgtcgagactct

SEQ ID NO: 57892 - DNA, 25 bp, Probe sequence
aatctacctacattatattgaggcg

SEQ ID NO: 57893 - DNA, 25 bp, Probe sequence
ttaatcaattcttatccgtcgagac

SEQ ID NO: 57894 - DNA, 25 bp, Probe sequence
tcaattcttatccgtcgagactctt

SEQ ID NO: 57895 - DNA, 25 bp, Probe sequence
attaatcaattcttatccgtcgaga

SEQ ID NO: 57896 - DNA, 25 bp, Probe sequence
acgtaatatgaacaatctacctaca

SEQ ID NO: 57897 - DNA, 25 bp, Probe sequence
cgtaatatgaacaatctacctacat

SEQ ID NO: 57898 - DNA, 25 bp, Probe sequence
aatagagaggttaagtgacgatcaa

SEQ ID NO: 57899 - DNA, 25 bp, Probe sequence
acgctatattaacctcataatcact

SEQ ID NO: 57900 - DNA, 25 bp, Probe sequence
ttgaaatagagaggttaagtgacga

SEQ ID NO: 57901 - DNA, 25 bp, Probe sequence
tgaaatagagaggttaagtgacgat

SEQ ID NO: 57902 - DNA, 25 bp, Probe sequence
acacatacttgacgacgaaataatt

SEQ ID NO: 57903 - DNA, 25 bp, Probe sequence
cgctatattaacctcataatcactc

SEQ ID NO: 57904 - DNA, 25 bp, Probe sequence
attgaaatagagaggttaagtgacg

SEQ ID NO: 57905 - DNA, 25 bp, Probe sequence
tacacatacttgacgacgaaataat

SEQ ID NO: 57906 - DNA, 25 bp, Probe sequence
aacgctatattaacctcataatcac

SEQ ID NO: 57907 - DNA, 25 bp, Probe sequence
ttgatcgtcacttaacctctctatt

SEQ ID NO: 57908 - DNA, 25 bp, Probe sequence
agtgattatgaggttaatatagcgt

SEQ ID NO: 57909 - DNA, 25 bp, Probe sequence
tcgtcacttaacctctctatttcaa

SEQ ID NO: 57910 - DNA, 25 bp, Probe sequence
atcgtcacttaacctctctatttca

SEQ ID NO: 57911 - DNA, 25 bp, Probe sequence
aattatttcgtcgtcaagtatgtgt

SEQ ID NO: 57912 - DNA, 25 bp, Probe sequence
gagtgattatgaggttaatatagcg

SEQ ID NO: 57913 - DNA, 25 bp, Probe sequence
cgtcacttaacctctctatttcaat

SEQ ID NO: 57914 - DNA, 25 bp, Probe sequence
attatttcgtcgtcaagtatgtgta

SEQ ID NO: 57915 - DNA, 25 bp, Probe sequence
gtgattatgaggttaatatagcgtt

SEQ ID NO: 57916 - DNA, 25 bp, Probe sequence
aacaagaagttaagtgacaacggtt

SEQ ID NO: 57917 - DNA, 25 bp, Probe sequence
gaagttaagtgacaacggtttacat

SEQ ID NO: 57918 - DNA, 25 bp, Probe sequence
aagaagttaagtgacaacggtttac

SEQ ID NO: 57919 - DNA, 25 bp, Probe sequence
caagaagttaagtgacaacggttta

SEQ ID NO: 57920 - DNA, 25 bp, Probe sequence
agaagttaagtgacaacggtttaca

SEQ ID NO: 57921 - DNA, 25 bp, Probe sequence
acaagaagttaagtgacaacggttt

SEQ ID NO: 57922 - DNA, 25 bp, Probe sequence
aaacaagaagttaagtgacaacggt

SEQ ID NO: 57923 - DNA, 25 bp, Probe sequence
aagttaagtgacaacggtttacatg

SEQ ID NO: 57924 - DNA, 25 bp, Probe sequence
ctctaaatagaagctgacatcggta

SEQ ID NO: 57925 - DNA, 25 bp, Probe sequence
aaccgttgtcacttaacttcttgtt

SEQ ID NO: 57926 - DNA, 25 bp, Probe sequence
taaaccgttgtcacttaacttcttg

SEQ ID NO: 57927 - DNA, 25 bp, Probe sequence
gtaaaccgttgtcacttaacttctt

SEQ ID NO: 57928 - DNA, 25 bp, Probe sequence
atgtaaaccgttgtcacttaacttc

SEQ ID NO: 57929 - DNA, 25 bp, Probe sequence
tgtaaaccgttgtcacttaacttct

SEQ ID NO: 57930 - DNA, 25 bp, Probe sequence
accgttgtcacttaacttcttgttt

SEQ ID NO: 57931 - DNA, 25 bp, Probe sequence
aaaccgttgtcacttaacttcttgt

SEQ ID NO: 57932 - DNA, 25 bp, Probe sequence
catgtaaaccgttgtcacttaactt

SEQ ID NO: 57933 - DNA, 25 bp, Probe sequence
taccgatgtcagcttctatttagag

SEQ ID NO: 57934 - DNA, 25 bp, Probe sequence
tggagcaatacgccatctataataa

SEQ ID NO: 57935 - DNA, 25 bp, Probe sequence
agcaatacgccatctataataaagc

SEQ ID NO: 57936 - DNA, 25 bp, Probe sequence
caaggtttaatgtgaatggagcaat

SEQ ID NO: 57937 - DNA, 25 bp, Probe sequence
aggtttaatgtgaatggagcaatac

SEQ ID NO: 57938 - DNA, 25 bp, Probe sequence
ggtttaatgtgaatggagcaatacg

SEQ ID NO: 57939 - DNA, 25 bp, Probe sequence
ggagcaatacgccatctataataaa

SEQ ID NO: 57940 - DNA, 25 bp, Probe sequence
aaggtttaatgtgaatggagcaata

SEQ ID NO: 57941 - DNA, 25 bp, Probe sequence
gtttaatgtgaatggagcaatacgc

SEQ ID NO: 57942 - DNA, 25 bp, Probe sequence
gagcaatacgccatctataataaag

SEQ ID NO: 57943 - DNA, 25 bp, Probe sequence
ttattatagatggcgtattgctcca

SEQ ID NO: 57944 - DNA, 25 bp, Probe sequence
gctttattatagatggcgtattgct

SEQ ID NO: 57945 - DNA, 25 bp, Probe sequence
attgctccattcacattaaaccttg

SEQ ID NO: 57946 - DNA, 25 bp, Probe sequence
gtattgctccattcacattaaacct

SEQ ID NO: 57947 - DNA, 25 bp, Probe sequence
cgtattgctccattcacattaaacc

SEQ ID NO: 57948 - DNA, 25 bp, Probe sequence
tttattatagatggcgtattgctcc

SEQ ID NO: 57949 - DNA, 25 bp, Probe sequence
tattgctccattcacattaaacctt

SEQ ID NO: 57950 - DNA, 25 bp, Probe sequence
gcgtattgctccattcacattaaac

SEQ ID NO: 57951 - DNA, 25 bp, Probe sequence
ctttattatagatggcgtattgctc

SEQ ID NO: 57952 - DNA, 25 bp, Probe sequence
gtggaagagtcctgaatttatctgt

SEQ ID NO: 57953 - DNA, 25 bp, Probe sequence
atatgacgtggaagagtcctgaatt

SEQ ID NO: 57954 - DNA, 25 bp, Probe sequence
aatatgacgtggaagagtcctgaat

SEQ ID NO: 57955 - DNA, 25 bp, Probe sequence
tctaaatagaagctgtcatcggaaa

SEQ ID NO: 57956 - DNA, 25 bp, Probe sequence
ctctaaatagaagctgtcatcggaa

SEQ ID NO: 57957 - DNA, 25 bp, Probe sequence
tggaagagtcctgaatttatctgta

SEQ ID NO: 57958 - DNA, 25 bp, Probe sequence
cgtggaagagtcctgaatttatctg

SEQ ID NO: 57959 - DNA, 25 bp, Probe sequence
tctctaaatagaagctgtcatcgga

SEQ ID NO: 57960 - DNA, 25 bp, Probe sequence
ttatctgtaaatccctatctatcgg

SEQ ID NO: 57961 - DNA, 25 bp, Probe sequence
acagataaattcaggactcttccac

SEQ ID NO: 57962 - DNA, 25 bp, Probe sequence
attcaggactcttccacgtcatatt

SEQ ID NO: 57963 - DNA, 25 bp, Probe sequence
aattcaggactcttccacgtcatat

SEQ ID NO: 57964 - DNA, 25 bp, Probe sequence
ttccgatgacagcttctatttagag

SEQ ID NO: 57965 - DNA, 25 bp, Probe sequence
tttccgatgacagcttctatttaga

SEQ ID NO: 57966 - DNA, 25 bp, Probe sequence
tacagataaattcaggactcttcca

SEQ ID NO: 57967 - DNA, 25 bp, Probe sequence
cagataaattcaggactcttccacg

SEQ ID NO: 57968 - DNA, 25 bp, Probe sequence
tccgatgacagcttctatttagaga

SEQ ID NO: 57969 - DNA, 25 bp, Probe sequence
ccgatagatagggatttacagataa

SEQ ID NO: 57970 - DNA, 25 bp, Probe sequence
tgtatgattcaatagacgtaagcga

SEQ ID NO: 57971 - DNA, 25 bp, Probe sequence
ctgtatgattcaatagacgtaagcg

SEQ ID NO: 57972 - DNA, 25 bp, Probe sequence
atgattcaatagacgtaagcgaaca

SEQ ID NO: 57973 - DNA, 25 bp, Probe sequence
tgattcaatagacgtaagcgaacaa

SEQ ID NO: 57974 - DNA, 25 bp, Probe sequence
tatgattcaatagacgtaagcgaac

SEQ ID NO: 57975 - DNA, 25 bp, Probe sequence
gtatgattcaatagacgtaagcgaa

SEQ ID NO: 57976 - DNA, 25 bp, Probe sequence
agctgtatgattcaatagacgtaag

SEQ ID NO: 57977 - DNA, 25 bp, Probe sequence
aagctgtatgattcaatagacgtaa

SEQ ID NO: 57978 - DNA, 25 bp, Probe sequence
tgaaaggtcaaatacgccaattata

SEQ ID NO: 57979 - DNA, 25 bp, Probe sequence
tcgcttacgtctattgaatcataca

SEQ ID NO: 57980 - DNA, 25 bp, Probe sequence
cgcttacgtctattgaatcatacag

SEQ ID NO: 57981 - DNA, 25 bp, Probe sequence
tgttcgcttacgtctattgaatcat

SEQ ID NO: 57982 - DNA, 25 bp, Probe sequence
ttcgcttacgtctattgaatcatac

SEQ ID NO: 57983 - DNA, 25 bp, Probe sequence
gttcgcttacgtctattgaatcata

SEQ ID NO: 57984 - DNA, 25 bp, Probe sequence
ttgttcgcttacgtctattgaatca

SEQ ID NO: 57985 - DNA, 25 bp, Probe sequence
cttacgtctattgaatcatacagct

SEQ ID NO: 57986 - DNA, 25 bp, Probe sequence
ttacgtctattgaatcatacagctt

SEQ ID NO: 57987 - DNA, 25 bp, Probe sequence
tataattggcgtatttgacctttca

SEQ ID NO: 57988 - DNA, 25 bp, Probe sequence
tggatagtatagaggagttaggcaa

SEQ ID NO: 57989 - DNA, 25 bp, Probe sequence
tgatacttatagatgcgtgatgtcg

SEQ ID NO: 57990 - DNA, 25 bp, Probe sequence
atggatagtatagaggagttaggca

SEQ ID NO: 57991 - DNA, 25 bp, Probe sequence
gttgatacttatagatgcgtgatgt

SEQ ID NO: 57992 - DNA, 25 bp, Probe sequence
ggatagtatagaggagttaggcaac

SEQ ID NO: 57993 - DNA, 25 bp, Probe sequence
atagaggagttaggcaacataagtt

SEQ ID NO: 57994 - DNA, 25 bp, Probe sequence
ttgatacttatagatgcgtgatgtc

SEQ ID NO: 57995 - DNA, 25 bp, Probe sequence
gatagtatagaggagttaggcaaca

SEQ ID NO: 57996 - DNA, 25 bp, Probe sequence
tatagaggagttaggcaacataagt

SEQ ID NO: 57997 - DNA, 25 bp, Probe sequence
ttgcctaactcctctatactatcca

SEQ ID NO: 57998 - DNA, 25 bp, Probe sequence
tgcctaactcctctatactatccat

SEQ ID NO: 57999 - DNA, 25 bp, Probe sequence
cgacatcacgcatctataagtatca

SEQ ID NO: 58000 - DNA, 25 bp, Probe sequence
acatcacgcatctataagtatcaac

SEQ ID NO: 58001 - DNA, 25 bp, Probe sequence
gttgcctaactcctctatactatcc

SEQ ID NO: 58002 - DNA, 25 bp, Probe sequence
aacttatgttgcctaactcctctat

SEQ ID NO: 58003 - DNA, 25 bp, Probe sequence
gacatcacgcatctataagtatcaa

SEQ ID NO: 58004 - DNA, 25 bp, Probe sequence
tgttgcctaactcctctatactatc

SEQ ID NO: 58005 - DNA, 25 bp, Probe sequence
ttatgttgcctaactcctctatact

SEQ ID NO: 58006 - DNA, 25 bp, Probe sequence
gtgttaatgtcagtctgtctcaatg

SEQ ID NO: 58007 - DNA, 25 bp, Probe sequence
agtgttaatgtcagtctgtctcaat

SEQ ID NO: 58008 - DNA, 25 bp, Probe sequence
tgttaatgtcagtctgtctcaatgc

SEQ ID NO: 58009 - DNA, 25 bp, Probe sequence
gagtgttaatgtcagtctgtctcaa

SEQ ID NO: 58010 - DNA, 25 bp, Probe sequence
gttaatgtcagtctgtctcaatgcc

SEQ ID NO: 58011 - DNA, 25 bp, Probe sequence
aacgagtgttaatgtcagtctgtct

SEQ ID NO: 58012 - DNA, 25 bp, Probe sequence
cgagtgttaatgtcagtctgtctca

SEQ ID NO: 58013 - DNA, 25 bp, Probe sequence
acgagtgttaatgtcagtctgtctc

SEQ ID NO: 58014 - DNA, 25 bp, Probe sequence
cttctgaaagtgatgtccattgaat

SEQ ID NO: 58015 - DNA, 25 bp, Probe sequence
attgagacagactgacattaacact

SEQ ID NO: 58016 - DNA, 25 bp, Probe sequence
cattgagacagactgacattaacac

SEQ ID NO: 58017 - DNA, 25 bp, Probe sequence
gcattgagacagactgacattaaca

SEQ ID NO: 58018 - DNA, 25 bp, Probe sequence
ttgagacagactgacattaacactc

SEQ ID NO: 58019 - DNA, 25 bp, Probe sequence
ggcattgagacagactgacattaac

SEQ ID NO: 58020 - DNA, 25 bp, Probe sequence
agacagactgacattaacactcgtt

SEQ ID NO: 58021 - DNA, 25 bp, Probe sequence
gagacagactgacattaacactcgt

SEQ ID NO: 58022 - DNA, 25 bp, Probe sequence
tgagacagactgacattaacactcg

SEQ ID NO: 58023 - DNA, 25 bp, Probe sequence
attcaatggacatcactttcagaag

SEQ ID NO: 58024 - DNA, 25 bp, Probe sequence
acattgactacgttattaagctgct

SEQ ID NO: 58025 - DNA, 25 bp, Probe sequence
cattgactacgttattaagctgctt

SEQ ID NO: 58026 - DNA, 25 bp, Probe sequence
aacattgactacgttattaagctgc

SEQ ID NO: 58027 - DNA, 25 bp, Probe sequence
tcgaacattgactacgttattaagc

SEQ ID NO: 58028 - DNA, 25 bp, Probe sequence
cgaacattgactacgttattaagct

SEQ ID NO: 58029 - DNA, 25 bp, Probe sequence
ttaaatgagcgttaatgtcagtctg

SEQ ID NO: 58030 - DNA, 25 bp, Probe sequence
taaatgagcgttaatgtcagtctgt

SEQ ID NO: 58031 - DNA, 25 bp, Probe sequence
aacatatcgaacattgactacgtta

SEQ ID NO: 58032 - DNA, 25 bp, Probe sequence
gaacattgactacgttattaagctg

SEQ ID NO: 58033 - DNA, 25 bp, Probe sequence
agcagcttaataacgtagtcaatgt

SEQ ID NO: 58034 - DNA, 25 bp, Probe sequence
aagcagcttaataacgtagtcaatg

SEQ ID NO: 58035 - DNA, 25 bp, Probe sequence
gcagcttaataacgtagtcaatgtt

SEQ ID NO: 58036 - DNA, 25 bp, Probe sequence
gcttaataacgtagtcaatgttcga

SEQ ID NO: 58037 - DNA, 25 bp, Probe sequence
agcttaataacgtagtcaatgttcg

SEQ ID NO: 58038 - DNA, 25 bp, Probe sequence
cagactgacattaacgctcatttaa

SEQ ID NO: 58039 - DNA, 25 bp, Probe sequence
acagactgacattaacgctcattta

SEQ ID NO: 58040 - DNA, 25 bp, Probe sequence
taacgtagtcaatgttcgatatgtt

SEQ ID NO: 58041 - DNA, 25 bp, Probe sequence
cagcttaataacgtagtcaatgttc

SEQ ID NO: 58042 - DNA, 25 bp, Probe sequence
aagagcagaacagagtaacatcatc

SEQ ID NO: 58043 - DNA, 25 bp, Probe sequence
cagaacagagtaacatcatcagttg

SEQ ID NO: 58044 - DNA, 25 bp, Probe sequence
gagcagaacagagtaacatcatcag

SEQ ID NO: 58045 - DNA, 25 bp, Probe sequence
agagcagaacagagtaacatcatca

SEQ ID NO: 58046 - DNA, 25 bp, Probe sequence
gcagaacagagtaacatcatcagtt

SEQ ID NO: 58047 - DNA, 25 bp, Probe sequence
agcagaacagagtaacatcatcagt

SEQ ID NO: 58048 - DNA, 25 bp, Probe sequence
agaacagagtaacatcatcagttgt

SEQ ID NO: 58049 - DNA, 25 bp, Probe sequence
acagagtaacatcatcagttgtagt

SEQ ID NO: 58050 - DNA, 25 bp, Probe sequence
aacagagtaacatcatcagttgtag

SEQ ID NO: 58051 - DNA, 25 bp, Probe sequence
gatgatgttactctgttctgctctt

SEQ ID NO: 58052 - DNA, 25 bp, Probe sequence
caactgatgatgttactctgttctg

SEQ ID NO: 58053 - DNA, 25 bp, Probe sequence
ctgatgatgttactctgttctgctc

SEQ ID NO: 58054 - DNA, 25 bp, Probe sequence
tgatgatgttactctgttctgctct

SEQ ID NO: 58055 - DNA, 25 bp, Probe sequence
aactgatgatgttactctgttctgc

SEQ ID NO: 58056 - DNA, 25 bp, Probe sequence
actgatgatgttactctgttctgct

SEQ ID NO: 58057 - DNA, 25 bp, Probe sequence
acaactgatgatgttactctgttct

SEQ ID NO: 58058 - DNA, 25 bp, Probe sequence
actacaactgatgatgttactctgt

SEQ ID NO: 58059 - DNA, 25 bp, Probe sequence
tacaactgatgatgttactctgttc

SEQ ID NO: 58060 - DNA, 25 bp, Probe sequence
gtaattgaagcggcttaacggtgaa

SEQ ID NO: 58061 - DNA, 25 bp, Probe sequence
aagtaattgaagcggcttaacggtg

SEQ ID NO: 58062 - DNA, 25 bp, Probe sequence
taattgaagcggcttaacggtgaaa

SEQ ID NO: 58063 - DNA, 25 bp, Probe sequence
aaagtaattgaagcggcttaacggt

SEQ ID NO: 58064 - DNA, 25 bp, Probe sequence
aagcggcttaacggtgaaatgtaaa

SEQ ID NO: 58065 - DNA, 25 bp, Probe sequence
agtaattgaagcggcttaacggtga

SEQ ID NO: 58066 - DNA, 25 bp, Probe sequence
gaagcggcttaacggtgaaatgtaa

SEQ ID NO: 58067 - DNA, 25 bp, Probe sequence
aattgaagcggcttaacggtgaaat

SEQ ID NO: 58068 - DNA, 25 bp, Probe sequence
aaaagtaattgaagcggcttaacgg

SEQ ID NO: 58069 - DNA, 25 bp, Probe sequence
caccgttaagccgcttcaattactt

SEQ ID NO: 58070 - DNA, 25 bp, Probe sequence
ttcaccgttaagccgcttcaattac

SEQ ID NO: 58071 - DNA, 25 bp, Probe sequence
accgttaagccgcttcaattacttt

SEQ ID NO: 58072 - DNA, 25 bp, Probe sequence
tttcaccgttaagccgcttcaatta

SEQ ID NO: 58073 - DNA, 25 bp, Probe sequence
tttacatttcaccgttaagccgctt

SEQ ID NO: 58074 - DNA, 25 bp, Probe sequence
tcaccgttaagccgcttcaattact

SEQ ID NO: 58075 - DNA, 25 bp, Probe sequence
atttcaccgttaagccgcttcaatt

SEQ ID NO: 58076 - DNA, 25 bp, Probe sequence
ttacatttcaccgttaagccgcttc

SEQ ID NO: 58077 - DNA, 25 bp, Probe sequence
ccgttaagccgcttcaattactttt

SEQ ID NO: 58078 - DNA, 25 bp, Probe sequence
atgaggattgttcgtattgcgtaat

SEQ ID NO: 58079 - DNA, 25 bp, Probe sequence
aatgaatgaggattgttcgtattgc

SEQ ID NO: 58080 - DNA, 25 bp, Probe sequence
aatgaggattgttcgtattgcgtaa

SEQ ID NO: 58081 - DNA, 25 bp, Probe sequence
aggattgttcgtattgcgtaataga

SEQ ID NO: 58082 - DNA, 25 bp, Probe sequence
gaggattgttcgtattgcgtaatag

SEQ ID NO: 58083 - DNA, 25 bp, Probe sequence
ggattgttcgtattgcgtaatagaa

SEQ ID NO: 58084 - DNA, 25 bp, Probe sequence
tgaggattgttcgtattgcgtaata

SEQ ID NO: 58085 - DNA, 25 bp, Probe sequence
gaatgaggattgttcgtattgcgta

SEQ ID NO: 58086 - DNA, 25 bp, Probe sequence
atgaatgaggattgttcgtattgcg

SEQ ID NO: 58087 - DNA, 25 bp, Probe sequence
attacgcaatacgaacaatcctcat

SEQ ID NO: 58088 - DNA, 25 bp, Probe sequence
gcaatacgaacaatcctcattcatt

SEQ ID NO: 58089 - DNA, 25 bp, Probe sequence
ttacgcaatacgaacaatcctcatt

SEQ ID NO: 58090 - DNA, 25 bp, Probe sequence
ctattacgcaatacgaacaatcctc

SEQ ID NO: 58091 - DNA, 25 bp, Probe sequence
tctattacgcaatacgaacaatcct

SEQ ID NO: 58092 - DNA, 25 bp, Probe sequence
tattacgcaatacgaacaatcctca

SEQ ID NO: 58093 - DNA, 25 bp, Probe sequence
ttctattacgcaatacgaacaatcc

SEQ ID NO: 58094 - DNA, 25 bp, Probe sequence
tacgcaatacgaacaatcctcattc

SEQ ID NO: 58095 - DNA, 25 bp, Probe sequence
cgcaatacgaacaatcctcattcat

SEQ ID NO: 58096 - DNA, 25 bp, Probe sequence
tgagttaatcactgacttcaacgtc

SEQ ID NO: 58097 - DNA, 25 bp, Probe sequence
ttaatcactgacttcaacgtcattg

SEQ ID NO: 58098 - DNA, 25 bp, Probe sequence
gttaatcactgacttcaacgtcatt

SEQ ID NO: 58099 - DNA, 25 bp, Probe sequence
taatcactgacttcaacgtcattga

SEQ ID NO: 58100 - DNA, 25 bp, Probe sequence
agttaatcactgacttcaacgtcat

SEQ ID NO: 58101 - DNA, 25 bp, Probe sequence
gagttaatcactgacttcaacgtca

SEQ ID NO: 58102 - DNA, 25 bp, Probe sequence
gtgagttaatcactgacttcaacgt

SEQ ID NO: 58103 - DNA, 25 bp, Probe sequence
aatcactgacttcaacgtcattgag

SEQ ID NO: 58104 - DNA, 25 bp, Probe sequence
aacagcttaatgatgtaatgaaatt

SEQ ID NO: 58105 - DNA, 25 bp, Probe sequence
gacgttgaagtcagtgattaactca

SEQ ID NO: 58106 - DNA, 25 bp, Probe sequence
aatgacgttgaagtcagtgattaac

SEQ ID NO: 58107 - DNA, 25 bp, Probe sequence
caatgacgttgaagtcagtgattaa

SEQ ID NO: 58108 - DNA, 25 bp, Probe sequence
atgacgttgaagtcagtgattaact

SEQ ID NO: 58109 - DNA, 25 bp, Probe sequence
tcaatgacgttgaagtcagtgatta

SEQ ID NO: 58110 - DNA, 25 bp, Probe sequence
tgacgttgaagtcagtgattaactc

SEQ ID NO: 58111 - DNA, 25 bp, Probe sequence
acgttgaagtcagtgattaactcac

SEQ ID NO: 58112 - DNA, 25 bp, Probe sequence
ctcaatgacgttgaagtcagtgatt

SEQ ID NO: 58113 - DNA, 25 bp, Probe sequence
atttcattacatcattaagctgttt

SEQ ID NO: 58114 - DNA, 25 bp, Probe sequence
tcctactaaaaccttgatttcaaaa

SEQ ID NO: 58115 - DNA, 25 bp, Probe sequence
ttcctactaaaaccttgatttcaaa

SEQ ID NO: 58116 - DNA, 25 bp, Probe sequence
tttcctactaaaaccttgatttcaa

SEQ ID NO: 58117 - DNA, 25 bp, Probe sequence
aaagggtttaaatcaaatgaaacaa

SEQ ID NO: 58118 - DNA, 25 bp, Probe sequence
ttttcctactaaaaccttgatttca

SEQ ID NO: 58119 - DNA, 25 bp, Probe sequence
aagggtttaaatcaaatgaaacaat

SEQ ID NO: 58120 - DNA, 25 bp, Probe sequence
tctttaaaacggtgtttatggattt

SEQ ID NO: 58121 - DNA, 25 bp, Probe sequence
atctttaaaacggtgtttatggatt

SEQ ID NO: 58122 - DNA, 25 bp, Probe sequence
aatctttaaaacggtgtttatggat

SEQ ID NO: 58123 - DNA, 25 bp, Probe sequence
ttgaaatcaaggttttagtaggaaa

SEQ ID NO: 58124 - DNA, 25 bp, Probe sequence
tttgaaatcaaggttttagtaggaa

SEQ ID NO: 58125 - DNA, 25 bp, Probe sequence
ttttgaaatcaaggttttagtagga

SEQ ID NO: 58126 - DNA, 25 bp, Probe sequence
ttgtttcatttgatttaaacccttt

SEQ ID NO: 58127 - DNA, 25 bp, Probe sequence
tgaaatcaaggttttagtaggaaaa

SEQ ID NO: 58128 - DNA, 25 bp, Probe sequence
attgtttcatttgatttaaaccctt

SEQ ID NO: 58129 - DNA, 25 bp, Probe sequence
aaatccataaacaccgttttaaaga

SEQ ID NO: 58130 - DNA, 25 bp, Probe sequence
atccataaacaccgttttaaagatt

SEQ ID NO: 58131 - DNA, 25 bp, Probe sequence
aatccataaacaccgttttaaagat

SEQ ID NO: 58132 - DNA, 25 bp, Probe sequence
ataacacaaaggttgatagtactca

SEQ ID NO: 58133 - DNA, 25 bp, Probe sequence
tattaacatgatagagagaagtgaa

SEQ ID NO: 58134 - DNA, 25 bp, Probe sequence
attaacatgatagagagaagtgaaa

SEQ ID NO: 58135 - DNA, 25 bp, Probe sequence
aataacacaaaggttgatagtactc

SEQ ID NO: 58136 - DNA, 25 bp, Probe sequence
aaataacacaaaggttgatagtact

SEQ ID NO: 58137 - DNA, 25 bp, Probe sequence
taacacaaaggttgatagtactcaa

SEQ ID NO: 58138 - DNA, 25 bp, Probe sequence
ttaacatgatagagagaagtgaaaa

SEQ ID NO: 58139 - DNA, 25 bp, Probe sequence
tgagtactatcaacctttgtgttat

SEQ ID NO: 58140 - DNA, 25 bp, Probe sequence
ttcacttctctctatcatgttaata

SEQ ID NO: 58141 - DNA, 25 bp, Probe sequence
tttcacttctctctatcatgttaat

SEQ ID NO: 58142 - DNA, 25 bp, Probe sequence
gagtactatcaacctttgtgttatt

SEQ ID NO: 58143 - DNA, 25 bp, Probe sequence
agtactatcaacctttgtgttattt

SEQ ID NO: 58144 - DNA, 25 bp, Probe sequence
ttgagtactatcaacctttgtgtta

SEQ ID NO: 58145 - DNA, 25 bp, Probe sequence
ttttcacttctctctatcatgttaa

SEQ ID NO: 58146 - DNA, 25 bp, Probe sequence
tattgagaataaagagagttgtgaa

SEQ ID NO: 58147 - DNA, 25 bp, Probe sequence
atattgagaataaagagagttgtga

SEQ ID NO: 58148 - DNA, 25 bp, Probe sequence
agcaaatattgagaataaagagagt

SEQ ID NO: 58149 - DNA, 25 bp, Probe sequence
gcaaatattgagaataaagagagtt

SEQ ID NO: 58150 - DNA, 25 bp, Probe sequence
aagcaaatattgagaataaagagag

SEQ ID NO: 58151 - DNA, 25 bp, Probe sequence
aatattgagaataaagagagttgtg

SEQ ID NO: 58152 - DNA, 25 bp, Probe sequence
agtcaacaaaagcaaatattgagaa

SEQ ID NO: 58153 - DNA, 25 bp, Probe sequence
aaagcaaatattgagaataaagaga

SEQ ID NO: 58154 - DNA, 25 bp, Probe sequence
tagtcaacaaaagcaaatattgaga

SEQ ID NO: 58155 - DNA, 25 bp, Probe sequence
ttcacaactctctttattctcaata

SEQ ID NO: 58156 - DNA, 25 bp, Probe sequence
actctctttattctcaatatttgct

SEQ ID NO: 58157 - DNA, 25 bp, Probe sequence
tcacaactctctttattctcaatat

SEQ ID NO: 58158 - DNA, 25 bp, Probe sequence
aactctctttattctcaatatttgc

SEQ ID NO: 58159 - DNA, 25 bp, Probe sequence
ctctctttattctcaatatttgctt

SEQ ID NO: 58160 - DNA, 25 bp, Probe sequence
cacaactctctttattctcaatatt

SEQ ID NO: 58161 - DNA, 25 bp, Probe sequence
ttctcaatatttgcttttgttgact

SEQ ID NO: 58162 - DNA, 25 bp, Probe sequence
tctctttattctcaatatttgcttt

SEQ ID NO: 58163 - DNA, 25 bp, Probe sequence
tctcaatatttgcttttgttgacta

SEQ ID NO: 58164 - DNA, 25 bp, Probe sequence
aaaccaagggcataaactaatttaa

SEQ ID NO: 58165 - DNA, 25 bp, Probe sequence
aaccaagggcataaactaatttaaa

SEQ ID NO: 58166 - DNA, 25 bp, Probe sequence
aaataaaaccaagggcataaactaa

SEQ ID NO: 58167 - DNA, 25 bp, Probe sequence
taaaaccaagggcataaactaattt

SEQ ID NO: 58168 - DNA, 25 bp, Probe sequence
aataaaaccaagggcataaactaat

SEQ ID NO: 58169 - DNA, 25 bp, Probe sequence
ataaaaccaagggcataaactaatt

SEQ ID NO: 58170 - DNA, 25 bp, Probe sequence
aaaaccaagggcataaactaattta

SEQ ID NO: 58171 - DNA, 25 bp, Probe sequence
taaataaaaccaagggcataaacta

SEQ ID NO: 58172 - DNA, 25 bp, Probe sequence
accaagggcataaactaatttaaaa

SEQ ID NO: 58173 - DNA, 25 bp, Probe sequence
ttaaattagtttatgcccttggttt

SEQ ID NO: 58174 - DNA, 25 bp, Probe sequence
tttaaattagtttatgcccttggtt

SEQ ID NO: 58175 - DNA, 25 bp, Probe sequence
ttagtttatgcccttggttttattt

SEQ ID NO: 58176 - DNA, 25 bp, Probe sequence
aaattagtttatgcccttggtttta

SEQ ID NO: 58177 - DNA, 25 bp, Probe sequence
attagtttatgcccttggttttatt

SEQ ID NO: 58178 - DNA, 25 bp, Probe sequence
aattagtttatgcccttggttttat

SEQ ID NO: 58179 - DNA, 25 bp, Probe sequence
taaattagtttatgcccttggtttt

SEQ ID NO: 58180 - DNA, 25 bp, Probe sequence
tagtttatgcccttggttttattta

SEQ ID NO: 58181 - DNA, 25 bp, Probe sequence
ttttaaattagtttatgcccttggt

SEQ ID NO: 58182 - DNA, 25 bp, Probe sequence
aagcgaccaatgttcagtatattca

SEQ ID NO: 58183 - DNA, 25 bp, Probe sequence
agcgaccaatgttcagtatattcac

SEQ ID NO: 58184 - DNA, 25 bp, Probe sequence
agtatattcacaactgacactaggc

SEQ ID NO: 58185 - DNA, 25 bp, Probe sequence
cgaccaatgttcagtatattcacaa

SEQ ID NO: 58186 - DNA, 25 bp, Probe sequence
gcgaccaatgttcagtatattcaca

SEQ ID NO: 58187 - DNA, 25 bp, Probe sequence
accaatgttcagtatattcacaact

SEQ ID NO: 58188 - DNA, 25 bp, Probe sequence
gaccaatgttcagtatattcacaac

SEQ ID NO: 58189 - DNA, 25 bp, Probe sequence
tatctacattccaaacagcaacaac

SEQ ID NO: 58190 - DNA, 25 bp, Probe sequence
ctaaataaagcgaccaatgttcagt

SEQ ID NO: 58191 - DNA, 25 bp, Probe sequence
tgaatatactgaacattggtcgctt

SEQ ID NO: 58192 - DNA, 25 bp, Probe sequence
gtgaatatactgaacattggtcgct

SEQ ID NO: 58193 - DNA, 25 bp, Probe sequence
gcctagtgtcagttgtgaatatact

SEQ ID NO: 58194 - DNA, 25 bp, Probe sequence
ttgtgaatatactgaacattggtcg

SEQ ID NO: 58195 - DNA, 25 bp, Probe sequence
tgtgaatatactgaacattggtcgc

SEQ ID NO: 58196 - DNA, 25 bp, Probe sequence
agttgtgaatatactgaacattggt

SEQ ID NO: 58197 - DNA, 25 bp, Probe sequence
gttgtgaatatactgaacattggtc

SEQ ID NO: 58198 - DNA, 25 bp, Probe sequence
ctgaacattggtcgctttatttagt

SEQ ID NO: 58199 - DNA, 25 bp, Probe sequence
actgaacattggtcgctttatttag

SEQ ID NO: 58200 - DNA, 25 bp, Probe sequence
tttacaaataaattgaagtgagggt

SEQ ID NO: 58201 - DNA, 25 bp, Probe sequence
aacgctcctatataatgtaaaacgg

SEQ ID NO: 58202 - DNA, 25 bp, Probe sequence
tattatcgaagattgcgaaagagga

SEQ ID NO: 58203 - DNA, 25 bp, Probe sequence
attatcgaagattgcgaaagaggaa

SEQ ID NO: 58204 - DNA, 25 bp, Probe sequence
ttattatcgaagattgcgaaagagg

SEQ ID NO: 58205 - DNA, 25 bp, Probe sequence
ttatcgaagattgcgaaagaggaaa

SEQ ID NO: 58206 - DNA, 25 bp, Probe sequence
ttacaaataaattgaagtgagggta

SEQ ID NO: 58207 - DNA, 25 bp, Probe sequence
tatcgaagattgcgaaagaggaaac

SEQ ID NO: 58208 - DNA, 25 bp, Probe sequence
acaaataaattgaagtgagggtata

SEQ ID NO: 58209 - DNA, 25 bp, Probe sequence
accctcacttcaatttatttgtaaa

SEQ ID NO: 58210 - DNA, 25 bp, Probe sequence
ccgttttacattatataggagcgtt

SEQ ID NO: 58211 - DNA, 25 bp, Probe sequence
tcctctttcgcaatcttcgataata

SEQ ID NO: 58212 - DNA, 25 bp, Probe sequence
ttcctctttcgcaatcttcgataat

SEQ ID NO: 58213 - DNA, 25 bp, Probe sequence
cctctttcgcaatcttcgataataa

SEQ ID NO: 58214 - DNA, 25 bp, Probe sequence
tttcctctttcgcaatcttcgataa

SEQ ID NO: 58215 - DNA, 25 bp, Probe sequence
taccctcacttcaatttatttgtaa

SEQ ID NO: 58216 - DNA, 25 bp, Probe sequence
gtttcctctttcgcaatcttcgata

SEQ ID NO: 58217 - DNA, 25 bp, Probe sequence
ataccctcacttcaatttatttgta

SEQ ID NO: 58218 - DNA, 25 bp, Probe sequence
tttgaattgtggcttaattgtttgc

SEQ ID NO: 58219 - DNA, 25 bp, Probe sequence
ttgaattgtggcttaattgtttgca

SEQ ID NO: 58220 - DNA, 25 bp, Probe sequence
ttttgaattgtggcttaattgtttg

SEQ ID NO: 58221 - DNA, 25 bp, Probe sequence
tgaattgtggcttaattgtttgcaa

SEQ ID NO: 58222 - DNA, 25 bp, Probe sequence
gaattgtggcttaattgtttgcaat

SEQ ID NO: 58223 - DNA, 25 bp, Probe sequence
attgtggcttaattgtttgcaattt

SEQ ID NO: 58224 - DNA, 25 bp, Probe sequence
aattgtggcttaattgtttgcaatt

SEQ ID NO: 58225 - DNA, 25 bp, Probe sequence
ttgtggcttaattgtttgcaattta

SEQ ID NO: 58226 - DNA, 25 bp, Probe sequence
tgtggcttaattgtttgcaatttat

SEQ ID NO: 58227 - DNA, 25 bp, Probe sequence
gcaaacaattaagccacaattcaaa

SEQ ID NO: 58228 - DNA, 25 bp, Probe sequence
tgcaaacaattaagccacaattcaa

SEQ ID NO: 58229 - DNA, 25 bp, Probe sequence
caaacaattaagccacaattcaaaa

SEQ ID NO: 58230 - DNA, 25 bp, Probe sequence
ttgcaaacaattaagccacaattca

SEQ ID NO: 58231 - DNA, 25 bp, Probe sequence
attgcaaacaattaagccacaattc

SEQ ID NO: 58232 - DNA, 25 bp, Probe sequence
aattgcaaacaattaagccacaatt

SEQ ID NO: 58233 - DNA, 25 bp, Probe sequence
aaattgcaaacaattaagccacaat

SEQ ID NO: 58234 - DNA, 25 bp, Probe sequence
taaattgcaaacaattaagccacaa

SEQ ID NO: 58235 - DNA, 25 bp, Probe sequence
ataaattgcaaacaattaagccaca

SEQ ID NO: 58236 - DNA, 25 bp, Probe sequence
aacaagactcacctcacatcaataa

SEQ ID NO: 58237 - DNA, 25 bp, Probe sequence
gaagatgaattgaacagacagaagt

SEQ ID NO: 58238 - DNA, 25 bp, Probe sequence
tgaagatgaattgaacagacagaag

SEQ ID NO: 58239 - DNA, 25 bp, Probe sequence
atgaagatgaattgaacagacagaa

SEQ ID NO: 58240 - DNA, 25 bp, Probe sequence
tgaattgaacagacagaagtaacat

SEQ ID NO: 58241 - DNA, 25 bp, Probe sequence
atgaattgaacagacagaagtaaca

SEQ ID NO: 58242 - DNA, 25 bp, Probe sequence
gatagtacctacaatagccatcgtt

SEQ ID NO: 58243 - DNA, 25 bp, Probe sequence
tgatagtacctacaatagccatcgt

SEQ ID NO: 58244 - DNA, 25 bp, Probe sequence
gtgatgagttgttgattgttaatgt

SEQ ID NO: 58245 - DNA, 25 bp, Probe sequence
ttattgatgtgaggtgagtcttgtt

SEQ ID NO: 58246 - DNA, 25 bp, Probe sequence
cttctgtctgttcaattcatcttca

SEQ ID NO: 58247 - DNA, 25 bp, Probe sequence
acttctgtctgttcaattcatcttc

SEQ ID NO: 58248 - DNA, 25 bp, Probe sequence
ttctgtctgttcaattcatcttcat

SEQ ID NO: 58249 - DNA, 25 bp, Probe sequence
tgttacttctgtctgttcaattcat

SEQ ID NO: 58250 - DNA, 25 bp, Probe sequence
atgttacttctgtctgttcaattca

SEQ ID NO: 58251 - DNA, 25 bp, Probe sequence
aacgatggctattgtaggtactatc

SEQ ID NO: 58252 - DNA, 25 bp, Probe sequence
acgatggctattgtaggtactatca

SEQ ID NO: 58253 - DNA, 25 bp, Probe sequence
acattaacaatcaacaactcatcac

SEQ ID NO: 58254 - DNA, 25 bp, Probe sequence
gatgatatgttgcgatgctaagtaa

SEQ ID NO: 58255 - DNA, 25 bp, Probe sequence
atgatatgttgcgatgctaagtaat

SEQ ID NO: 58256 - DNA, 25 bp, Probe sequence
cgatgatatgttgcgatgctaagta

SEQ ID NO: 58257 - DNA, 25 bp, Probe sequence
tgatatgttgcgatgctaagtaatt

SEQ ID NO: 58258 - DNA, 25 bp, Probe sequence
cttaatgtaatagttgatgtcgtga

SEQ ID NO: 58259 - DNA, 25 bp, Probe sequence
acttaatgtaatagttgatgtcgtg

SEQ ID NO: 58260 - DNA, 25 bp, Probe sequence
atgtaatagttgatgtcgtgataac

SEQ ID NO: 58261 - DNA, 25 bp, Probe sequence
gatatgttgcgatgctaagtaatta

SEQ ID NO: 58262 - DNA, 25 bp, Probe sequence
aatgtaatagttgatgtcgtgataa

SEQ ID NO: 58263 - DNA, 25 bp, Probe sequence
ttacttagcatcgcaacatatcatc

SEQ ID NO: 58264 - DNA, 25 bp, Probe sequence
tacttagcatcgcaacatatcatcg

SEQ ID NO: 58265 - DNA, 25 bp, Probe sequence
attacttagcatcgcaacatatcat

SEQ ID NO: 58266 - DNA, 25 bp, Probe sequence
aattacttagcatcgcaacatatca

SEQ ID NO: 58267 - DNA, 25 bp, Probe sequence
tcacgacatcaactattacattaag

SEQ ID NO: 58268 - DNA, 25 bp, Probe sequence
cacgacatcaactattacattaagt

SEQ ID NO: 58269 - DNA, 25 bp, Probe sequence
gttatcacgacatcaactattacat

SEQ ID NO: 58270 - DNA, 25 bp, Probe sequence
taattacttagcatcgcaacatatc

SEQ ID NO: 58271 - DNA, 25 bp, Probe sequence
ttaattacttagcatcgcaacatat

SEQ ID NO: 58272 - DNA, 25 bp, Probe sequence
taggtatgcttctgctggcttatta

SEQ ID NO: 58273 - DNA, 25 bp, Probe sequence
ttaggtatgcttctgctggcttatt

SEQ ID NO: 58274 - DNA, 25 bp, Probe sequence
aggtatgcttctgctggcttattaa

SEQ ID NO: 58275 - DNA, 25 bp, Probe sequence
gttaggtatgcttctgctggcttat

SEQ ID NO: 58276 - DNA, 25 bp, Probe sequence
gtatgcttctgctggcttattaaag

SEQ ID NO: 58277 - DNA, 25 bp, Probe sequence
gatgaatgcgtgggtctgaatatag

SEQ ID NO: 58278 - DNA, 25 bp, Probe sequence
ggtatgcttctgctggcttattaaa

SEQ ID NO: 58279 - DNA, 25 bp, Probe sequence
ggatgaatgcgtgggtctgaatata

SEQ ID NO: 58280 - DNA, 25 bp, Probe sequence
atgtgtttattacgtggatgaatgc

SEQ ID NO: 58281 - DNA, 25 bp, Probe sequence
taataagccagcagaagcataccta

SEQ ID NO: 58282 - DNA, 25 bp, Probe sequence
aataagccagcagaagcatacctaa

SEQ ID NO: 58283 - DNA, 25 bp, Probe sequence
ttaataagccagcagaagcatacct

SEQ ID NO: 58284 - DNA, 25 bp, Probe sequence
ataagccagcagaagcatacctaac

SEQ ID NO: 58285 - DNA, 25 bp, Probe sequence
ctttaataagccagcagaagcatac

SEQ ID NO: 58286 - DNA, 25 bp, Probe sequence
ctatattcagacccacgcattcatc

SEQ ID NO: 58287 - DNA, 25 bp, Probe sequence
tttaataagccagcagaagcatacc

SEQ ID NO: 58288 - DNA, 25 bp, Probe sequence
tatattcagacccacgcattcatcc

SEQ ID NO: 58289 - DNA, 25 bp, Probe sequence
gcattcatccacgtaataaacacat

SEQ ID NO: 58290 - DNA, 25 bp, Probe sequence
gcgtgatagtatagggaacttagac

SEQ ID NO: 58291 - DNA, 25 bp, Probe sequence
aatattaacacttgagtgacgatgt

SEQ ID NO: 58292 - DNA, 25 bp, Probe sequence
cgtgatagtatagggaacttagaca

SEQ ID NO: 58293 - DNA, 25 bp, Probe sequence
ggcgtgatagtatagggaacttaga

SEQ ID NO: 58294 - DNA, 25 bp, Probe sequence
tggcgtgatagtatagggaacttag

SEQ ID NO: 58295 - DNA, 25 bp, Probe sequence
gtggcgtgatagtatagggaactta

SEQ ID NO: 58296 - DNA, 25 bp, Probe sequence
acacttgagtgacgatgttattata

SEQ ID NO: 58297 - DNA, 25 bp, Probe sequence
tttgtggcgtgatagtatagggaac

SEQ ID NO: 58298 - DNA, 25 bp, Probe sequence
acttgagtgacgatgttattatatt

SEQ ID NO: 58299 - DNA, 25 bp, Probe sequence
gtctaagttccctatactatcacgc

SEQ ID NO: 58300 - DNA, 25 bp, Probe sequence
acatcgtcactcaagtgttaatatt

SEQ ID NO: 58301 - DNA, 25 bp, Probe sequence
tctaagttccctatactatcacgcc

SEQ ID NO: 58302 - DNA, 25 bp, Probe sequence
tgtctaagttccctatactatcacg

SEQ ID NO: 58303 - DNA, 25 bp, Probe sequence
ctaagttccctatactatcacgcca

SEQ ID NO: 58304 - DNA, 25 bp, Probe sequence
taagttccctatactatcacgccac

SEQ ID NO: 58305 - DNA, 25 bp, Probe sequence
tataataacatcgtcactcaagtgt

SEQ ID NO: 58306 - DNA, 25 bp, Probe sequence
gttccctatactatcacgccacaaa

SEQ ID NO: 58307 - DNA, 25 bp, Probe sequence
aatataataacatcgtcactcaagt

SEQ ID NO: 58308 - DNA, 25 bp, Probe sequence
cgctaccgtattaatgaaacaattt

SEQ ID NO: 58309 - DNA, 25 bp, Probe sequence
gttacttaaacacgtagacgcttta

SEQ ID NO: 58310 - DNA, 25 bp, Probe sequence
acacattacaagagttgactatatt

SEQ ID NO: 58311 - DNA, 25 bp, Probe sequence
aacacattacaagagttgactatat

SEQ ID NO: 58312 - DNA, 25 bp, Probe sequence
atgacaacacattacaagagttgac

SEQ ID NO: 58313 - DNA, 25 bp, Probe sequence
tgacaacacattacaagagttgact

SEQ ID NO: 58314 - DNA, 25 bp, Probe sequence
aatgacaacacattacaagagttga

SEQ ID NO: 58315 - DNA, 25 bp, Probe sequence
gacaacacattacaagagttgacta

SEQ ID NO: 58316 - DNA, 25 bp, Probe sequence
acaacacattacaagagttgactat

SEQ ID NO: 58317 - DNA, 25 bp, Probe sequence
aaattgtttcattaatacggtagcg

SEQ ID NO: 58318 - DNA, 25 bp, Probe sequence
taaagcgtctacgtgtttaagtaac

SEQ ID NO: 58319 - DNA, 25 bp, Probe sequence
atatagtcaactcttgtaatgtgtt

SEQ ID NO: 58320 - DNA, 25 bp, Probe sequence
aatatagtcaactcttgtaatgtgt

SEQ ID NO: 58321 - DNA, 25 bp, Probe sequence
gtcaactcttgtaatgtgttgtcat

SEQ ID NO: 58322 - DNA, 25 bp, Probe sequence
agtcaactcttgtaatgtgttgtca

SEQ ID NO: 58323 - DNA, 25 bp, Probe sequence
tcaactcttgtaatgtgttgtcatt

SEQ ID NO: 58324 - DNA, 25 bp, Probe sequence
tagtcaactcttgtaatgtgttgtc

SEQ ID NO: 58325 - DNA, 25 bp, Probe sequence
atagtcaactcttgtaatgtgttgt

SEQ ID NO: 58326 - DNA, 25 bp, Probe sequence
tagaagcatctgacacacaagtatt

SEQ ID NO: 58327 - DNA, 25 bp, Probe sequence
atagaagcatctgacacacaagtat

SEQ ID NO: 58328 - DNA, 25 bp, Probe sequence
atatagaagcatctgacacacaagt

SEQ ID NO: 58329 - DNA, 25 bp, Probe sequence
tatagaagcatctgacacacaagta

SEQ ID NO: 58330 - DNA, 25 bp, Probe sequence
tatatagaagcatctgacacacaag

SEQ ID NO: 58331 - DNA, 25 bp, Probe sequence
agaagcatctgacacacaagtattt

SEQ ID NO: 58332 - DNA, 25 bp, Probe sequence
aagtatttgtgttgctcaggtgttt

SEQ ID NO: 58333 - DNA, 25 bp, Probe sequence
gaagcatctgacacacaagtatttg

SEQ ID NO: 58334 - DNA, 25 bp, Probe sequence
caagtatttgtgttgctcaggtgtt

SEQ ID NO: 58335 - DNA, 25 bp, Probe sequence
acttgtgtgtcagatgcttctatat

SEQ ID NO: 58336 - DNA, 25 bp, Probe sequence
atacttgtgtgtcagatgcttctat

SEQ ID NO: 58337 - DNA, 25 bp, Probe sequence
aatacttgtgtgtcagatgcttcta

SEQ ID NO: 58338 - DNA, 25 bp, Probe sequence
tacttgtgtgtcagatgcttctata

SEQ ID NO: 58339 - DNA, 25 bp, Probe sequence
cttgtgtgtcagatgcttctatata

SEQ ID NO: 58340 - DNA, 25 bp, Probe sequence
aaatacttgtgtgtcagatgcttct

SEQ ID NO: 58341 - DNA, 25 bp, Probe sequence
caaatacttgtgtgtcagatgcttc

SEQ ID NO: 58342 - DNA, 25 bp, Probe sequence
aaacacctgagcaacacaaatactt

SEQ ID NO: 58343 - DNA, 25 bp, Probe sequence
aacacctgagcaacacaaatacttg

SEQ ID NO: 58344 - DNA, 25 bp, Probe sequence
cattcgtgattgagttatggaggtt

SEQ ID NO: 58345 - DNA, 25 bp, Probe sequence
gtcatagtagtctcacaattcatca

SEQ ID NO: 58346 - DNA, 25 bp, Probe sequence
tcattcgtgattgagttatggaggt

SEQ ID NO: 58347 - DNA, 25 bp, Probe sequence
tgtcatagtagtctcacaattcatc

SEQ ID NO: 58348 - DNA, 25 bp, Probe sequence
tcatagtagtctcacaattcatcat

SEQ ID NO: 58349 - DNA, 25 bp, Probe sequence
attcgtgattgagttatggaggttt

SEQ ID NO: 58350 - DNA, 25 bp, Probe sequence
aatgtcatagtagtctcacaattca

SEQ ID NO: 58351 - DNA, 25 bp, Probe sequence
gtttggtggacatttgtatggattt

SEQ ID NO: 58352 - DNA, 25 bp, Probe sequence
ttcgtgattgagttatggaggtttg

SEQ ID NO: 58353 - DNA, 25 bp, Probe sequence
aacctccataactcaatcacgaatg

SEQ ID NO: 58354 - DNA, 25 bp, Probe sequence
tgatgaattgtgagactactatgac

SEQ ID NO: 58355 - DNA, 25 bp, Probe sequence
acctccataactcaatcacgaatga

SEQ ID NO: 58356 - DNA, 25 bp, Probe sequence
gatgaattgtgagactactatgaca

SEQ ID NO: 58357 - DNA, 25 bp, Probe sequence
atgatgaattgtgagactactatga

SEQ ID NO: 58358 - DNA, 25 bp, Probe sequence
aaacctccataactcaatcacgaat

SEQ ID NO: 58359 - DNA, 25 bp, Probe sequence
tgaattgtgagactactatgacatt

SEQ ID NO: 58360 - DNA, 25 bp, Probe sequence
aaatccatacaaatgtccaccaaac

SEQ ID NO: 58361 - DNA, 25 bp, Probe sequence
caaacctccataactcaatcacgaa

SEQ ID NO: 58362 - DNA, 25 bp, Probe sequence
tatgtttgtagggcgttattgtttg

SEQ ID NO: 58363 - DNA, 25 bp, Probe sequence
cttatgtttgtagggcgttattgtt

SEQ ID NO: 58364 - DNA, 25 bp, Probe sequence
ttatgtttgtagggcgttattgttt

SEQ ID NO: 58365 - DNA, 25 bp, Probe sequence
atgcttatgtttgtagggcgttatt

SEQ ID NO: 58366 - DNA, 25 bp, Probe sequence
atgtttgtagggcgttattgtttga

SEQ ID NO: 58367 - DNA, 25 bp, Probe sequence
ccaatagagaaagggaatgtaatca

SEQ ID NO: 58368 - DNA, 25 bp, Probe sequence
gcttatgtttgtagggcgttattgt

SEQ ID NO: 58369 - DNA, 25 bp, Probe sequence
tgcttatgtttgtagggcgttattg

SEQ ID NO: 58370 - DNA, 25 bp, Probe sequence
aaagttcatgcttatgtttgtaggg

SEQ ID NO: 58371 - DNA, 25 bp, Probe sequence
aacaataacgccctacaaacataag

SEQ ID NO: 58372 - DNA, 25 bp, Probe sequence
caaacaataacgccctacaaacata

SEQ ID NO: 58373 - DNA, 25 bp, Probe sequence
aaacaataacgccctacaaacataa

SEQ ID NO: 58374 - DNA, 25 bp, Probe sequence
aataacgccctacaaacataagcat

SEQ ID NO: 58375 - DNA, 25 bp, Probe sequence
tcaaacaataacgccctacaaacat

SEQ ID NO: 58376 - DNA, 25 bp, Probe sequence
tgattacattccctttctctattgg

SEQ ID NO: 58377 - DNA, 25 bp, Probe sequence
caataacgccctacaaacataagca

SEQ ID NO: 58378 - DNA, 25 bp, Probe sequence
acaataacgccctacaaacataagc

SEQ ID NO: 58379 - DNA, 25 bp, Probe sequence
ccctacaaacataagcatgaacttt

SEQ ID NO: 58380 - DNA, 25 bp, Probe sequence
aagtcgtgattgttgtaataggaat

SEQ ID NO: 58381 - DNA, 25 bp, Probe sequence
agtcgtgattgttgtaataggaatt

SEQ ID NO: 58382 - DNA, 25 bp, Probe sequence
cttcatgttctatgttcgaccaatc

SEQ ID NO: 58383 - DNA, 25 bp, Probe sequence
acttcatgttctatgttcgaccaat

SEQ ID NO: 58384 - DNA, 25 bp, Probe sequence
aacttcatgttctatgttcgaccaa

SEQ ID NO: 58385 - DNA, 25 bp, Probe sequence
catgttctatgttcgaccaatcctt

SEQ ID NO: 58386 - DNA, 25 bp, Probe sequence
ttcatgttctatgttcgaccaatcc

SEQ ID NO: 58387 - DNA, 25 bp, Probe sequence
aaagtcgtgattgttgtaataggaa

SEQ ID NO: 58388 - DNA, 25 bp, Probe sequence
gattgaatcctaaactttatggcgg

SEQ ID NO: 58389 - DNA, 25 bp, Probe sequence
attcctattacaacaatcacgactt

SEQ ID NO: 58390 - DNA, 25 bp, Probe sequence
aattcctattacaacaatcacgact

SEQ ID NO: 58391 - DNA, 25 bp, Probe sequence
gattggtcgaacatagaacatgaag

SEQ ID NO: 58392 - DNA, 25 bp, Probe sequence
attggtcgaacatagaacatgaagt

SEQ ID NO: 58393 - DNA, 25 bp, Probe sequence
ttggtcgaacatagaacatgaagtt

SEQ ID NO: 58394 - DNA, 25 bp, Probe sequence
ggattggtcgaacatagaacatgaa

SEQ ID NO: 58395 - DNA, 25 bp, Probe sequence
aaggattggtcgaacatagaacatg

SEQ ID NO: 58396 - DNA, 25 bp, Probe sequence
ttcctattacaacaatcacgacttt

SEQ ID NO: 58397 - DNA, 25 bp, Probe sequence
ccgccataaagtttaggattcaatc

SEQ ID NO: 58398 - DNA, 25 bp, Probe sequence
tctgtttatatgaaaagttgggtgc

SEQ ID NO: 58399 - DNA, 25 bp, Probe sequence
ctgtttatatgaaaagttgggtgcg

SEQ ID NO: 58400 - DNA, 25 bp, Probe sequence
aaaattgatttcacaaagttggggt

SEQ ID NO: 58401 - DNA, 25 bp, Probe sequence
aaattgatttcacaaagttggggtg

SEQ ID NO: 58402 - DNA, 25 bp, Probe sequence
ttctgtttatatgaaaagttgggtg

SEQ ID NO: 58403 - DNA, 25 bp, Probe sequence
cttctgtttatatgaaaagttgggt

SEQ ID NO: 58404 - DNA, 25 bp, Probe sequence
aattgatttcacaaagttggggtgt

SEQ ID NO: 58405 - DNA, 25 bp, Probe sequence
tcttctgtttatatgaaaagttggg

SEQ ID NO: 58406 - DNA, 25 bp, Probe sequence
attgatttcacaaagttggggtgtc

SEQ ID NO: 58407 - DNA, 25 bp, Probe sequence
gcacccaacttttcatataaacaga

SEQ ID NO: 58408 - DNA, 25 bp, Probe sequence
cgcacccaacttttcatataaacag

SEQ ID NO: 58409 - DNA, 25 bp, Probe sequence
accccaactttgtgaaatcaatttt

SEQ ID NO: 58410 - DNA, 25 bp, Probe sequence
caccccaactttgtgaaatcaattt

SEQ ID NO: 58411 - DNA, 25 bp, Probe sequence
cacccaacttttcatataaacagaa

SEQ ID NO: 58412 - DNA, 25 bp, Probe sequence
acccaacttttcatataaacagaag

SEQ ID NO: 58413 - DNA, 25 bp, Probe sequence
acaccccaactttgtgaaatcaatt

SEQ ID NO: 58414 - DNA, 25 bp, Probe sequence
cccaacttttcatataaacagaaga

SEQ ID NO: 58415 - DNA, 25 bp, Probe sequence
gacaccccaactttgtgaaatcaat

SEQ ID NO: 58416 - DNA, 25 bp, Probe sequence
tatatccacaggtcgcttaacttaa

SEQ ID NO: 58417 - DNA, 25 bp, Probe sequence
catatatccacaggtcgcttaactt

SEQ ID NO: 58418 - DNA, 25 bp, Probe sequence
atatatccacaggtcgcttaactta

SEQ ID NO: 58419 - DNA, 25 bp, Probe sequence
acatatatccacaggtcgcttaact

SEQ ID NO: 58420 - DNA, 25 bp, Probe sequence
tcgaccacaacaattaatgatgaat

SEQ ID NO: 58421 - DNA, 25 bp, Probe sequence
gacatatatccacaggtcgcttaac

SEQ ID NO: 58422 - DNA, 25 bp, Probe sequence
tgacatatatccacaggtcgcttaa

SEQ ID NO: 58423 - DNA, 25 bp, Probe sequence
ttgacatatatccacaggtcgctta

SEQ ID NO: 58424 - DNA, 25 bp, Probe sequence
cgaccacaacaattaatgatgaata

SEQ ID NO: 58425 - DNA, 25 bp, Probe sequence
ttaagttaagcgacctgtggatata

SEQ ID NO: 58426 - DNA, 25 bp, Probe sequence
aagttaagcgacctgtggatatatg

SEQ ID NO: 58427 - DNA, 25 bp, Probe sequence
taagttaagcgacctgtggatatat

SEQ ID NO: 58428 - DNA, 25 bp, Probe sequence
agttaagcgacctgtggatatatgt

SEQ ID NO: 58429 - DNA, 25 bp, Probe sequence
attcatcattaattgttgtggtcga

SEQ ID NO: 58430 - DNA, 25 bp, Probe sequence
gttaagcgacctgtggatatatgtc

SEQ ID NO: 58431 - DNA, 25 bp, Probe sequence
taagcgacctgtggatatatgtcaa

SEQ ID NO: 58432 - DNA, 25 bp, Probe sequence
ttaagcgacctgtggatatatgtca

SEQ ID NO: 58433 - DNA, 25 bp, Probe sequence
tattcatcattaattgttgtggtcg

SEQ ID NO: 58434 - DNA, 25 bp, Probe sequence
tatggtgattatacgcccttaattt

SEQ ID NO: 58435 - DNA, 25 bp, Probe sequence
aatatggtgattatacgcccttaat

SEQ ID NO: 58436 - DNA, 25 bp, Probe sequence
atatggtgattatacgcccttaatt

SEQ ID NO: 58437 - DNA, 25 bp, Probe sequence
tgaattaatatggtgattatacgcc

SEQ ID NO: 58438 - DNA, 25 bp, Probe sequence
taatatggtgattatacgcccttaa

SEQ ID NO: 58439 - DNA, 25 bp, Probe sequence
ttaatatggtgattatacgccctta

SEQ ID NO: 58440 - DNA, 25 bp, Probe sequence
attaatatggtgattatacgccctt

SEQ ID NO: 58441 - DNA, 25 bp, Probe sequence
aattaatatggtgattatacgccct

SEQ ID NO: 58442 - DNA, 25 bp, Probe sequence
gaattaatatggtgattatacgccc

SEQ ID NO: 58443 - DNA, 25 bp, Probe sequence
aaattaagggcgtataatcaccata

SEQ ID NO: 58444 - DNA, 25 bp, Probe sequence
attaagggcgtataatcaccatatt

SEQ ID NO: 58445 - DNA, 25 bp, Probe sequence
aattaagggcgtataatcaccatat

SEQ ID NO: 58446 - DNA, 25 bp, Probe sequence
ggcgtataatcaccatattaattca

SEQ ID NO: 58447 - DNA, 25 bp, Probe sequence
taagggcgtataatcaccatattaa

SEQ ID NO: 58448 - DNA, 25 bp, Probe sequence
ttaagggcgtataatcaccatatta

SEQ ID NO: 58449 - DNA, 25 bp, Probe sequence
agggcgtataatcaccatattaatt

SEQ ID NO: 58450 - DNA, 25 bp, Probe sequence
aagggcgtataatcaccatattaat

SEQ ID NO: 58451 - DNA, 25 bp, Probe sequence
gggcgtataatcaccatattaattc

SEQ ID NO: 58452 - DNA, 25 bp, Probe sequence
ctccgaaaatgagtgttttgtaact

SEQ ID NO: 58453 - DNA, 25 bp, Probe sequence
cctccgaaaatgagtgttttgtaac

SEQ ID NO: 58454 - DNA, 25 bp, Probe sequence
tccgaaaatgagtgttttgtaacta

SEQ ID NO: 58455 - DNA, 25 bp, Probe sequence
acctccgaaaatgagtgttttgtaa

SEQ ID NO: 58456 - DNA, 25 bp, Probe sequence
cacctccgaaaatgagtgttttgta

SEQ ID NO: 58457 - DNA, 25 bp, Probe sequence
gatataggcacctccgaaaatgagt

SEQ ID NO: 58458 - DNA, 25 bp, Probe sequence
ccgaaaatgagtgttttgtaactat

SEQ ID NO: 58459 - DNA, 25 bp, Probe sequence
atataggcacctccgaaaatgagtg

SEQ ID NO: 58460 - DNA, 25 bp, Probe sequence
cgatataggcacctccgaaaatgag

SEQ ID NO: 58461 - DNA, 25 bp, Probe sequence
agttacaaaacactcattttcggag

SEQ ID NO: 58462 - DNA, 25 bp, Probe sequence
gttacaaaacactcattttcggagg

SEQ ID NO: 58463 - DNA, 25 bp, Probe sequence
ttacaaaacactcattttcggaggt

SEQ ID NO: 58464 - DNA, 25 bp, Probe sequence
tagttacaaaacactcattttcgga

SEQ ID NO: 58465 - DNA, 25 bp, Probe sequence
tacaaaacactcattttcggaggtg

SEQ ID NO: 58466 - DNA, 25 bp, Probe sequence
actcattttcggaggtgcctatatc

SEQ ID NO: 58467 - DNA, 25 bp, Probe sequence
atagttacaaaacactcattttcgg

SEQ ID NO: 58468 - DNA, 25 bp, Probe sequence
cactcattttcggaggtgcctatat

SEQ ID NO: 58469 - DNA, 25 bp, Probe sequence
ctcattttcggaggtgcctatatcg

SEQ ID NO: 58470 - DNA, 25 bp, Probe sequence
tcaactgtagtggaagacaatgatt

SEQ ID NO: 58471 - DNA, 25 bp, Probe sequence
tataggtcaactgtagtggaagaca

SEQ ID NO: 58472 - DNA, 25 bp, Probe sequence
ttataggtcaactgtagtggaagac

SEQ ID NO: 58473 - DNA, 25 bp, Probe sequence
gtcaactgtagtggaagacaatgat

SEQ ID NO: 58474 - DNA, 25 bp, Probe sequence
taggtcaactgtagtggaagacaat

SEQ ID NO: 58475 - DNA, 25 bp, Probe sequence
ataggtcaactgtagtggaagacaa

SEQ ID NO: 58476 - DNA, 25 bp, Probe sequence
tctagtatctatcaacgtcacatgc

SEQ ID NO: 58477 - DNA, 25 bp, Probe sequence
ctagtatctatcaacgtcacatgcc

SEQ ID NO: 58478 - DNA, 25 bp, Probe sequence
cgtttataggtcaactgtagtggaa

SEQ ID NO: 58479 - DNA, 25 bp, Probe sequence
aatcattgtcttccactacagttga

SEQ ID NO: 58480 - DNA, 25 bp, Probe sequence
tgtcttccactacagttgacctata

SEQ ID NO: 58481 - DNA, 25 bp, Probe sequence
gtcttccactacagttgacctataa

SEQ ID NO: 58482 - DNA, 25 bp, Probe sequence
atcattgtcttccactacagttgac

SEQ ID NO: 58483 - DNA, 25 bp, Probe sequence
ttgtcttccactacagttgacctat

SEQ ID NO: 58484 - DNA, 25 bp, Probe sequence
attgtcttccactacagttgaccta

SEQ ID NO: 58485 - DNA, 25 bp, Probe sequence
gcatgtgacgttgatagatactaga

SEQ ID NO: 58486 - DNA, 25 bp, Probe sequence
ggcatgtgacgttgatagatactag

SEQ ID NO: 58487 - DNA, 25 bp, Probe sequence
ccactacagttgacctataaacgaa

SEQ ID NO: 58488 - DNA, 25 bp, Probe sequence
agagcgtggtgaggtattgttaatc

SEQ ID NO: 58489 - DNA, 25 bp, Probe sequence
gagagcgtggtgaggtattgttaat

SEQ ID NO: 58490 - DNA, 25 bp, Probe sequence
ttatttgtctttgaatggctcgttt

SEQ ID NO: 58491 - DNA, 25 bp, Probe sequence
tttatttgtctttgaatggctcgtt

SEQ ID NO: 58492 - DNA, 25 bp, Probe sequence
tttgtgaaatatgatggatggcttg

SEQ ID NO: 58493 - DNA, 25 bp, Probe sequence
ttgtgaaatatgatggatggcttgt

SEQ ID NO: 58494 - DNA, 25 bp, Probe sequence
atagctgtatcagatcatgtgacaa

SEQ ID NO: 58495 - DNA, 25 bp, Probe sequence
aatagctgtatcagatcatgtgaca

SEQ ID NO: 58496 - DNA, 25 bp, Probe sequence
gagcgtggtgaggtattgttaatca

SEQ ID NO: 58497 - DNA, 25 bp, Probe sequence
attaacaatacctcaccacgctctc

SEQ ID NO: 58498 - DNA, 25 bp, Probe sequence
gattaacaatacctcaccacgctct

SEQ ID NO: 58499 - DNA, 25 bp, Probe sequence
aacgagccattcaaagacaaataaa

SEQ ID NO: 58500 - DNA, 25 bp, Probe sequence
aaacgagccattcaaagacaaataa

SEQ ID NO: 58501 - DNA, 25 bp, Probe sequence
caagccatccatcatatttcacaaa

SEQ ID NO: 58502 - DNA, 25 bp, Probe sequence
acaagccatccatcatatttcacaa

SEQ ID NO: 58503 - DNA, 25 bp, Probe sequence
tgtcacatgatctgatacagctatt

SEQ ID NO: 58504 - DNA, 25 bp, Probe sequence
ttgtcacatgatctgatacagctat

SEQ ID NO: 58505 - DNA, 25 bp, Probe sequence
tgattaacaatacctcaccacgctc

SEQ ID NO: 58506 - DNA, 25 bp, Probe sequence
cgtcctttattacgttataaggtgg

SEQ ID NO: 58507 - DNA, 25 bp, Probe sequence
gtcctttattacgttataaggtggt

SEQ ID NO: 58508 - DNA, 25 bp, Probe sequence
tattacgttataaggtggtaattgt

SEQ ID NO: 58509 - DNA, 25 bp, Probe sequence
tcctttattacgttataaggtggta

SEQ ID NO: 58510 - DNA, 25 bp, Probe sequence
cctttattacgttataaggtggtaa

SEQ ID NO: 58511 - DNA, 25 bp, Probe sequence
ttattacgttataaggtggtaattg

SEQ ID NO: 58512 - DNA, 25 bp, Probe sequence
ccaccttataacgtaataaaggacg

SEQ ID NO: 58513 - DNA, 25 bp, Probe sequence
accaccttataacgtaataaaggac

SEQ ID NO: 58514 - DNA, 25 bp, Probe sequence
acaattaccaccttataacgtaata

SEQ ID NO: 58515 - DNA, 25 bp, Probe sequence
taccaccttataacgtaataaagga

SEQ ID NO: 58516 - DNA, 25 bp, Probe sequence
ttaccaccttataacgtaataaagg

SEQ ID NO: 58517 - DNA, 25 bp, Probe sequence
caattaccaccttataacgtaataa

SEQ ID NO: 58518 - DNA, 25 bp, Probe sequence
agcagcattaagtggatcatcatat

SEQ ID NO: 58519 - DNA, 25 bp, Probe sequence
aagcagcattaagtggatcatcata

SEQ ID NO: 58520 - DNA, 25 bp, Probe sequence
gaagcagcattaagtggatcatcat

SEQ ID NO: 58521 - DNA, 25 bp, Probe sequence
tagtgtttgaagatttcggtcctat

SEQ ID NO: 58522 - DNA, 25 bp, Probe sequence
gtagtgtttgaagatttcggtccta

SEQ ID NO: 58523 - DNA, 25 bp, Probe sequence
aatatatatcttgccgtgctaggtg

SEQ ID NO: 58524 - DNA, 25 bp, Probe sequence
agtgtttgaagatttcggtcctatg

SEQ ID NO: 58525 - DNA, 25 bp, Probe sequence
taatatatatcttgccgtgctaggt

SEQ ID NO: 58526 - DNA, 25 bp, Probe sequence
gtaatatatatcttgccgtgctagg

SEQ ID NO: 58527 - DNA, 25 bp, Probe sequence
atatgatgatccacttaatgctgct

SEQ ID NO: 58528 - DNA, 25 bp, Probe sequence
tatgatgatccacttaatgctgctt

SEQ ID NO: 58529 - DNA, 25 bp, Probe sequence
atgatgatccacttaatgctgcttc

SEQ ID NO: 58530 - DNA, 25 bp, Probe sequence
ataggaccgaaatcttcaaacacta

SEQ ID NO: 58531 - DNA, 25 bp, Probe sequence
taggaccgaaatcttcaaacactac

SEQ ID NO: 58532 - DNA, 25 bp, Probe sequence
cacctagcacggcaagatatatatt

SEQ ID NO: 58533 - DNA, 25 bp, Probe sequence
cataggaccgaaatcttcaaacact

SEQ ID NO: 58534 - DNA, 25 bp, Probe sequence
acctagcacggcaagatatatatta

SEQ ID NO: 58535 - DNA, 25 bp, Probe sequence
cctagcacggcaagatatatattac

SEQ ID NO: 58536 - DNA, 25 bp, Probe sequence
taaagaaatgatggtgaaatgaggg

SEQ ID NO: 58537 - DNA, 25 bp, Probe sequence
ataaagaaatgatggtgaaatgagg

SEQ ID NO: 58538 - DNA, 25 bp, Probe sequence
tgataaagaaatgatggtgaaatga

SEQ ID NO: 58539 - DNA, 25 bp, Probe sequence
tgatgataaagaaatgatggtgaaa

SEQ ID NO: 58540 - DNA, 25 bp, Probe sequence
ttgatgataaagaaatgatggtgaa

SEQ ID NO: 58541 - DNA, 25 bp, Probe sequence
tttgatgataaagaaatgatggtga

SEQ ID NO: 58542 - DNA, 25 bp, Probe sequence
gataaagaaatgatggtgaaatgag

SEQ ID NO: 58543 - DNA, 25 bp, Probe sequence
attattgacaatcaaatgcctacgg

SEQ ID NO: 58544 - DNA, 25 bp, Probe sequence
ttattgacaatcaaatgcctacgga

SEQ ID NO: 58545 - DNA, 25 bp, Probe sequence
ccctcatttcaccatcatttcttta

SEQ ID NO: 58546 - DNA, 25 bp, Probe sequence
cctcatttcaccatcatttctttat

SEQ ID NO: 58547 - DNA, 25 bp, Probe sequence
tcaccatcatttctttatcatcaaa

SEQ ID NO: 58548 - DNA, 25 bp, Probe sequence
ttcaccatcatttctttatcatcaa

SEQ ID NO: 58549 - DNA, 25 bp, Probe sequence
tttcaccatcatttctttatcatca

SEQ ID NO: 58550 - DNA, 25 bp, Probe sequence
tcatttcaccatcatttctttatca

SEQ ID NO: 58551 - DNA, 25 bp, Probe sequence
ctcatttcaccatcatttctttatc

SEQ ID NO: 58552 - DNA, 25 bp, Probe sequence
ccgtaggcatttgattgtcaataat

SEQ ID NO: 58553 - DNA, 25 bp, Probe sequence
cccctcatttcaccatcatttcttt

SEQ ID NO: 58554 - DNA, 25 bp, Probe sequence
aggtaattgtttatggaggtgctaa

SEQ ID NO: 58555 - DNA, 25 bp, Probe sequence
tgagaggtaattgtttatggaggtg

SEQ ID NO: 58556 - DNA, 25 bp, Probe sequence
gaggtaattgtttatggaggtgcta

SEQ ID NO: 58557 - DNA, 25 bp, Probe sequence
atgagaggtaattgtttatggaggt

SEQ ID NO: 58558 - DNA, 25 bp, Probe sequence
ggtaattgtttatggaggtgctaac

SEQ ID NO: 58559 - DNA, 25 bp, Probe sequence
gagaggtaattgtttatggaggtgc

SEQ ID NO: 58560 - DNA, 25 bp, Probe sequence
aatgagaggtaattgtttatggagg

SEQ ID NO: 58561 - DNA, 25 bp, Probe sequence
agaggtaattgtttatggaggtgct

SEQ ID NO: 58562 - DNA, 25 bp, Probe sequence
catgctataatgagaggtaattgtt

SEQ ID NO: 58563 - DNA, 25 bp, Probe sequence
cacctccataaacaattacctctca

SEQ ID NO: 58564 - DNA, 25 bp, Probe sequence
ttagcacctccataaacaattacct

SEQ ID NO: 58565 - DNA, 25 bp, Probe sequence
tagcacctccataaacaattacctc

SEQ ID NO: 58566 - DNA, 25 bp, Probe sequence
acctccataaacaattacctctcat

SEQ ID NO: 58567 - DNA, 25 bp, Probe sequence
gttagcacctccataaacaattacc

SEQ ID NO: 58568 - DNA, 25 bp, Probe sequence
gcacctccataaacaattacctctc

SEQ ID NO: 58569 - DNA, 25 bp, Probe sequence
cctccataaacaattacctctcatt

SEQ ID NO: 58570 - DNA, 25 bp, Probe sequence
agcacctccataaacaattacctct

SEQ ID NO: 58571 - DNA, 25 bp, Probe sequence
aacaattacctctcattatagcatg

SEQ ID NO: 58572 - DNA, 25 bp, Probe sequence
catgacaagcgatataatcgtatgt

SEQ ID NO: 58573 - DNA, 25 bp, Probe sequence
acatgacaagcgatataatcgtatg

SEQ ID NO: 58574 - DNA, 25 bp, Probe sequence
tgacaagcgatataatcgtatgtat

SEQ ID NO: 58575 - DNA, 25 bp, Probe sequence
atgacaagcgatataatcgtatgta

SEQ ID NO: 58576 - DNA, 25 bp, Probe sequence
tacatgacaagcgatataatcgtat

SEQ ID NO: 58577 - DNA, 25 bp, Probe sequence
ttgattttcaaggaggaaatggaat

SEQ ID NO: 58578 - DNA, 25 bp, Probe sequence
attgattttcaaggaggaaatggaa

SEQ ID NO: 58579 - DNA, 25 bp, Probe sequence
tattgattttcaaggaggaaatgga

SEQ ID NO: 58580 - DNA, 25 bp, Probe sequence
ttattgattttcaaggaggaaatgg

SEQ ID NO: 58581 - DNA, 25 bp, Probe sequence
catacgattatatcgcttgtcatgt

SEQ ID NO: 58582 - DNA, 25 bp, Probe sequence
acatacgattatatcgcttgtcatg

SEQ ID NO: 58583 - DNA, 25 bp, Probe sequence
atacgattatatcgcttgtcatgta

SEQ ID NO: 58584 - DNA, 25 bp, Probe sequence
tacatacgattatatcgcttgtcat

SEQ ID NO: 58585 - DNA, 25 bp, Probe sequence
atacatacgattatatcgcttgtca

SEQ ID NO: 58586 - DNA, 25 bp, Probe sequence
ttccatttcctccttgaaaatcaat

SEQ ID NO: 58587 - DNA, 25 bp, Probe sequence
attccatttcctccttgaaaatcaa

SEQ ID NO: 58588 - DNA, 25 bp, Probe sequence
tccatttcctccttgaaaatcaata

SEQ ID NO: 58589 - DNA, 25 bp, Probe sequence
ccatttcctccttgaaaatcaataa

SEQ ID NO: 58590 - DNA, 25 bp, Probe sequence
tatggtgtggtgtgatgtactactt

SEQ ID NO: 58591 - DNA, 25 bp, Probe sequence
ttatggtgtggtgtgatgtactact

SEQ ID NO: 58592 - DNA, 25 bp, Probe sequence
cgttggttgtgatttgttacttcta

SEQ ID NO: 58593 - DNA, 25 bp, Probe sequence
tactgagggatgggtaatctttagg

SEQ ID NO: 58594 - DNA, 25 bp, Probe sequence
ctgagggatgggtaatctttaggaa

SEQ ID NO: 58595 - DNA, 25 bp, Probe sequence
ggatgggtaatctttaggaagcaag

SEQ ID NO: 58596 - DNA, 25 bp, Probe sequence
tgagggatgggtaatctttaggaag

SEQ ID NO: 58597 - DNA, 25 bp, Probe sequence
agttacagtgtaatcattgtggctt

SEQ ID NO: 58598 - DNA, 25 bp, Probe sequence
aagttacagtgtaatcattgtggct

SEQ ID NO: 58599 - DNA, 25 bp, Probe sequence
agtagtacatcacaccacaccataa

SEQ ID NO: 58600 - DNA, 25 bp, Probe sequence
aagtagtacatcacaccacaccata

SEQ ID NO: 58601 - DNA, 25 bp, Probe sequence
tagaagtaacaaatcacaaccaacg

SEQ ID NO: 58602 - DNA, 25 bp, Probe sequence
cctaaagattacccatccctcagta

SEQ ID NO: 58603 - DNA, 25 bp, Probe sequence
ttcctaaagattacccatccctcag

SEQ ID NO: 58604 - DNA, 25 bp, Probe sequence
cttgcttcctaaagattacccatcc

SEQ ID NO: 58605 - DNA, 25 bp, Probe sequence
cttcctaaagattacccatccctca

SEQ ID NO: 58606 - DNA, 25 bp, Probe sequence
agccacaatgattacactgtaactt

SEQ ID NO: 58607 - DNA, 25 bp, Probe sequence
aagccacaatgattacactgtaact

SEQ ID NO: 58608 - DNA, 25 bp, Probe sequence
atgatagatgctggcttagtagttg

SEQ ID NO: 58609 - DNA, 25 bp, Probe sequence
gatagatgctggcttagtagttgta

SEQ ID NO: 58610 - DNA, 25 bp, Probe sequence
aatgatagatgctggcttagtagtt

SEQ ID NO: 58611 - DNA, 25 bp, Probe sequence
tgatagatgctggcttagtagttgt

SEQ ID NO: 58612 - DNA, 25 bp, Probe sequence
atagatgctggcttagtagttgtac

SEQ ID NO: 58613 - DNA, 25 bp, Probe sequence
ttgaaatgatagatgctggcttagt

SEQ ID NO: 58614 - DNA, 25 bp, Probe sequence
aaatgatagatgctggcttagtagt

SEQ ID NO: 58615 - DNA, 25 bp, Probe sequence
tgaaatgatagatgctggcttagta

SEQ ID NO: 58616 - DNA, 25 bp, Probe sequence
attgaaatgatagatgctggcttag

SEQ ID NO: 58617 - DNA, 25 bp, Probe sequence
caactactaagccagcatctatcat

SEQ ID NO: 58618 - DNA, 25 bp, Probe sequence
tacaactactaagccagcatctatc

SEQ ID NO: 58619 - DNA, 25 bp, Probe sequence
aactactaagccagcatctatcatt

SEQ ID NO: 58620 - DNA, 25 bp, Probe sequence
acaactactaagccagcatctatca

SEQ ID NO: 58621 - DNA, 25 bp, Probe sequence
gtacaactactaagccagcatctat

SEQ ID NO: 58622 - DNA, 25 bp, Probe sequence
actaagccagcatctatcatttcaa

SEQ ID NO: 58623 - DNA, 25 bp, Probe sequence
tactaagccagcatctatcatttca

SEQ ID NO: 58624 - DNA, 25 bp, Probe sequence
actactaagccagcatctatcattt

SEQ ID NO: 58625 - DNA, 25 bp, Probe sequence
ctaagccagcatctatcatttcaat

SEQ ID NO: 58626 - DNA, 25 bp, Probe sequence
gtaatttcatgttaacgtttgactt

SEQ ID NO: 58627 - DNA, 25 bp, Probe sequence
cgtaatttcatgttaacgtttgact

SEQ ID NO: 58628 - DNA, 25 bp, Probe sequence
aatttcatgttaacgtttgacttat

SEQ ID NO: 58629 - DNA, 25 bp, Probe sequence
aaaagaacgtaatttcatgttaacg

SEQ ID NO: 58630 - DNA, 25 bp, Probe sequence
tttcatgttaacgtttgacttataa

SEQ ID NO: 58631 - DNA, 25 bp, Probe sequence
taatttcatgttaacgtttgactta

SEQ ID NO: 58632 - DNA, 25 bp, Probe sequence
atttcatgttaacgtttgacttata

SEQ ID NO: 58633 - DNA, 25 bp, Probe sequence
aagtcaaacgttaacatgaaattac

SEQ ID NO: 58634 - DNA, 25 bp, Probe sequence
agtcaaacgttaacatgaaattacg

SEQ ID NO: 58635 - DNA, 25 bp, Probe sequence
ataagtcaaacgttaacatgaaatt

SEQ ID NO: 58636 - DNA, 25 bp, Probe sequence
cgttaacatgaaattacgttctttt

SEQ ID NO: 58637 - DNA, 25 bp, Probe sequence
taagtcaaacgttaacatgaaatta

SEQ ID NO: 58638 - DNA, 25 bp, Probe sequence
ttataagtcaaacgttaacatgaaa

SEQ ID NO: 58639 - DNA, 25 bp, Probe sequence
tataagtcaaacgttaacatgaaat

SEQ ID NO: 58640 - DNA, 25 bp, Probe sequence
ccgcattgagtgtgaaattgatatt

SEQ ID NO: 58641 - DNA, 25 bp, Probe sequence
gtgactagaagtataagtgaagaca

SEQ ID NO: 58642 - DNA, 25 bp, Probe sequence
tgtgactagaagtataagtgaagac

SEQ ID NO: 58643 - DNA, 25 bp, Probe sequence
ctagacaagaaatgaatgcgatgag

SEQ ID NO: 58644 - DNA, 25 bp, Probe sequence
aaacagtgtaaataaaggaagcgta

SEQ ID NO: 58645 - DNA, 25 bp, Probe sequence
aacagtgtaaataaaggaagcgtat

SEQ ID NO: 58646 - DNA, 25 bp, Probe sequence
ctgtgactagaagtataagtgaaga

SEQ ID NO: 58647 - DNA, 25 bp, Probe sequence
tctgtgactagaagtataagtgaag

SEQ ID NO: 58648 - DNA, 25 bp, Probe sequence
tagacaagaaatgaatgcgatgagc

SEQ ID NO: 58649 - DNA, 25 bp, Probe sequence
aatatcaatttcacactcaatgcgg

SEQ ID NO: 58650 - DNA, 25 bp, Probe sequence
gtcttcacttatacttctagtcaca

SEQ ID NO: 58651 - DNA, 25 bp, Probe sequence
tgtcttcacttatacttctagtcac

SEQ ID NO: 58652 - DNA, 25 bp, Probe sequence
ctcatcgcattcatttcttgtctag

SEQ ID NO: 58653 - DNA, 25 bp, Probe sequence
tacgcttcctttatttacactgttt

SEQ ID NO: 58654 - DNA, 25 bp, Probe sequence
atacgcttcctttatttacactgtt

SEQ ID NO: 58655 - DNA, 25 bp, Probe sequence
cttcacttatacttctagtcacaga

SEQ ID NO: 58656 - DNA, 25 bp, Probe sequence
tcttcacttatacttctagtcacag

SEQ ID NO: 58657 - DNA, 25 bp, Probe sequence
gctcatcgcattcatttcttgtcta

SEQ ID NO: 58658 - DNA, 25 bp, Probe sequence
agttcagatgccaatagatttgatt

SEQ ID NO: 58659 - DNA, 25 bp, Probe sequence
ctagttcagatgccaatagatttga

SEQ ID NO: 58660 - DNA, 25 bp, Probe sequence
cgactagttcagatgccaatagatt

SEQ ID NO: 58661 - DNA, 25 bp, Probe sequence
gttcagatgccaatagatttgattt

SEQ ID NO: 58662 - DNA, 25 bp, Probe sequence
tagttcagatgccaatagatttgat

SEQ ID NO: 58663 - DNA, 25 bp, Probe sequence
gcgactagttcagatgccaatagat

SEQ ID NO: 58664 - DNA, 25 bp, Probe sequence
attaacaattttgggttgcttgact

SEQ ID NO: 58665 - DNA, 25 bp, Probe sequence
ttaacaattttgggttgcttgactg

SEQ ID NO: 58666 - DNA, 25 bp, Probe sequence
tattaacaattttgggttgcttgac

SEQ ID NO: 58667 - DNA, 25 bp, Probe sequence
aatcaaatctattggcatctgaact

SEQ ID NO: 58668 - DNA, 25 bp, Probe sequence
tcaaatctattggcatctgaactag

SEQ ID NO: 58669 - DNA, 25 bp, Probe sequence
aatctattggcatctgaactagtcg

SEQ ID NO: 58670 - DNA, 25 bp, Probe sequence
aaatcaaatctattggcatctgaac

SEQ ID NO: 58671 - DNA, 25 bp, Probe sequence
atcaaatctattggcatctgaacta

SEQ ID NO: 58672 - DNA, 25 bp, Probe sequence
atctattggcatctgaactagtcgc

SEQ ID NO: 58673 - DNA, 25 bp, Probe sequence
agtcaagcaacccaaaattgttaat

SEQ ID NO: 58674 - DNA, 25 bp, Probe sequence
cagtcaagcaacccaaaattgttaa

SEQ ID NO: 58675 - DNA, 25 bp, Probe sequence
gtcaagcaacccaaaattgttaata

SEQ ID NO: 58676 - DNA, 25 bp, Probe sequence
agagatggcggtactaaatgttatt

SEQ ID NO: 58677 - DNA, 25 bp, Probe sequence
aagagatggcggtactaaatgttat

SEQ ID NO: 58678 - DNA, 25 bp, Probe sequence
ataagagatggcggtactaaatgtt

SEQ ID NO: 58679 - DNA, 25 bp, Probe sequence
taagagatggcggtactaaatgtta

SEQ ID NO: 58680 - DNA, 25 bp, Probe sequence
tgaatatggtttggataagtctgag

SEQ ID NO: 58681 - DNA, 25 bp, Probe sequence
cataagagatggcggtactaaatgt

SEQ ID NO: 58682 - DNA, 25 bp, Probe sequence
gcatgtttcaggctttaattgtgta

SEQ ID NO: 58683 - DNA, 25 bp, Probe sequence
gaatatggtttggataagtctgaga

SEQ ID NO: 58684 - DNA, 25 bp, Probe sequence
attgcataagagatggcggtactaa

SEQ ID NO: 58685 - DNA, 25 bp, Probe sequence
aacatttagtaccgccatctcttat

SEQ ID NO: 58686 - DNA, 25 bp, Probe sequence
ataacatttagtaccgccatctctt

SEQ ID NO: 58687 - DNA, 25 bp, Probe sequence
aataacatttagtaccgccatctct

SEQ ID NO: 58688 - DNA, 25 bp, Probe sequence
ctcagacttatccaaaccatattca

SEQ ID NO: 58689 - DNA, 25 bp, Probe sequence
taacatttagtaccgccatctctta

SEQ ID NO: 58690 - DNA, 25 bp, Probe sequence
acatttagtaccgccatctcttatg

SEQ ID NO: 58691 - DNA, 25 bp, Probe sequence
tacacaattaaagcctgaaacatgc

SEQ ID NO: 58692 - DNA, 25 bp, Probe sequence
tctcagacttatccaaaccatattc

SEQ ID NO: 58693 - DNA, 25 bp, Probe sequence
ttagtaccgccatctcttatgcaat

SEQ ID NO: 58694 - DNA, 25 bp, Probe sequence
gaagtgagacattacgaggaggaac

SEQ ID NO: 58695 - DNA, 25 bp, Probe sequence
tatttgaagtgagacattacgagga

SEQ ID NO: 58696 - DNA, 25 bp, Probe sequence
atttgaagtgagacattacgaggag

SEQ ID NO: 58697 - DNA, 25 bp, Probe sequence
tgaagtgagacattacgaggaggaa

SEQ ID NO: 58698 - DNA, 25 bp, Probe sequence
ttgaagtgagacattacgaggagga

SEQ ID NO: 58699 - DNA, 25 bp, Probe sequence
ttatttgaagtgagacattacgagg

SEQ ID NO: 58700 - DNA, 25 bp, Probe sequence
aagtgagacattacgaggaggaaca

SEQ ID NO: 58701 - DNA, 25 bp, Probe sequence
tgagacattacgaggaggaacagtt

SEQ ID NO: 58702 - DNA, 25 bp, Probe sequence
agtgagacattacgaggaggaacag

SEQ ID NO: 58703 - DNA, 25 bp, Probe sequence
gttcctcctcgtaatgtctcacttc

SEQ ID NO: 58704 - DNA, 25 bp, Probe sequence
tcctcgtaatgtctcacttcaaata

SEQ ID NO: 58705 - DNA, 25 bp, Probe sequence
ctcctcgtaatgtctcacttcaaat

SEQ ID NO: 58706 - DNA, 25 bp, Probe sequence
tcctcctcgtaatgtctcacttcaa

SEQ ID NO: 58707 - DNA, 25 bp, Probe sequence
ttcctcctcgtaatgtctcacttca

SEQ ID NO: 58708 - DNA, 25 bp, Probe sequence
cctcgtaatgtctcacttcaaataa

SEQ ID NO: 58709 - DNA, 25 bp, Probe sequence
tgttcctcctcgtaatgtctcactt

SEQ ID NO: 58710 - DNA, 25 bp, Probe sequence
aactgttcctcctcgtaatgtctca

SEQ ID NO: 58711 - DNA, 25 bp, Probe sequence
ctgttcctcctcgtaatgtctcact

SEQ ID NO: 58712 - DNA, 25 bp, Probe sequence
cgccataaatgtaaacgatgctata

SEQ ID NO: 58713 - DNA, 25 bp, Probe sequence
aaagatcaccgccataaatgtaaac

SEQ ID NO: 58714 - DNA, 25 bp, Probe sequence
gaaagatcaccgccataaatgtaaa

SEQ ID NO: 58715 - DNA, 25 bp, Probe sequence
agaaagatcaccgccataaatgtaa

SEQ ID NO: 58716 - DNA, 25 bp, Probe sequence
gagaaagatcaccgccataaatgta

SEQ ID NO: 58717 - DNA, 25 bp, Probe sequence
atatgctatggttctttctcacttt

SEQ ID NO: 58718 - DNA, 25 bp, Probe sequence
aatatgctatggttctttctcactt

SEQ ID NO: 58719 - DNA, 25 bp, Probe sequence
gaaattaagaattgtaggaaggcgt

SEQ ID NO: 58720 - DNA, 25 bp, Probe sequence
tgaaattaagaattgtaggaaggcg

SEQ ID NO: 58721 - DNA, 25 bp, Probe sequence
tatagcatcgtttacatttatggcg

SEQ ID NO: 58722 - DNA, 25 bp, Probe sequence
tttacatttatggcggtgatctttc

SEQ ID NO: 58723 - DNA, 25 bp, Probe sequence
gtttacatttatggcggtgatcttt

SEQ ID NO: 58724 - DNA, 25 bp, Probe sequence
ttacatttatggcggtgatctttct

SEQ ID NO: 58725 - DNA, 25 bp, Probe sequence
tacatttatggcggtgatctttctc

SEQ ID NO: 58726 - DNA, 25 bp, Probe sequence
aagtgagaaagaaccatagcatatt

SEQ ID NO: 58727 - DNA, 25 bp, Probe sequence
aaagtgagaaagaaccatagcatat

SEQ ID NO: 58728 - DNA, 25 bp, Probe sequence
cgccttcctacaattcttaatttca

SEQ ID NO: 58729 - DNA, 25 bp, Probe sequence
acgccttcctacaattcttaatttc

SEQ ID NO: 58730 - DNA, 25 bp, Probe sequence
tattatgtaacttgtagcgaggtgg

SEQ ID NO: 58731 - DNA, 25 bp, Probe sequence
ggtattatgtaacttgtagcgaggt

SEQ ID NO: 58732 - DNA, 25 bp, Probe sequence
tggtattatgtaacttgtagcgagg

SEQ ID NO: 58733 - DNA, 25 bp, Probe sequence
gtattatgtaacttgtagcgaggtg

SEQ ID NO: 58734 - DNA, 25 bp, Probe sequence
attatgtaacttgtagcgaggtgga

SEQ ID NO: 58735 - DNA, 25 bp, Probe sequence
atggtattatgtaacttgtagcgag

SEQ ID NO: 58736 - DNA, 25 bp, Probe sequence
ttatgtaacttgtagcgaggtggag

SEQ ID NO: 58737 - DNA, 25 bp, Probe sequence
tatggtattatgtaacttgtagcga

SEQ ID NO: 58738 - DNA, 25 bp, Probe sequence
atgattgacaaagcaaagcactatt

SEQ ID NO: 58739 - DNA, 25 bp, Probe sequence
cctcgctacaagttacataatacca

SEQ ID NO: 58740 - DNA, 25 bp, Probe sequence
acctcgctacaagttacataatacc

SEQ ID NO: 58741 - DNA, 25 bp, Probe sequence
ccacctcgctacaagttacataata

SEQ ID NO: 58742 - DNA, 25 bp, Probe sequence
cacctcgctacaagttacataatac

SEQ ID NO: 58743 - DNA, 25 bp, Probe sequence
ctcgctacaagttacataataccat

SEQ ID NO: 58744 - DNA, 25 bp, Probe sequence
tccacctcgctacaagttacataat

SEQ ID NO: 58745 - DNA, 25 bp, Probe sequence
ctccacctcgctacaagttacataa

SEQ ID NO: 58746 - DNA, 25 bp, Probe sequence
tcgctacaagttacataataccata

SEQ ID NO: 58747 - DNA, 25 bp, Probe sequence
aatagtgctttgctttgtcaatcat

SEQ ID NO: 58748 - DNA, 25 bp, Probe sequence
tatttgagtgttgggcattatgttc

SEQ ID NO: 58749 - DNA, 25 bp, Probe sequence
ttatttgagtgttgggcattatgtt

SEQ ID NO: 58750 - DNA, 25 bp, Probe sequence
attatttgagtgttgggcattatgt

SEQ ID NO: 58751 - DNA, 25 bp, Probe sequence
agagatgttaggcgtttcttagtat

SEQ ID NO: 58752 - DNA, 25 bp, Probe sequence
atagagatgttaggcgtttcttagt

SEQ ID NO: 58753 - DNA, 25 bp, Probe sequence
gttgggcattatgttcaatactctt

SEQ ID NO: 58754 - DNA, 25 bp, Probe sequence
tgttgggcattatgttcaatactct

SEQ ID NO: 58755 - DNA, 25 bp, Probe sequence
gtgttgggcattatgttcaatactc

SEQ ID NO: 58756 - DNA, 25 bp, Probe sequence
gagtgttgggcattatgttcaatac

SEQ ID NO: 58757 - DNA, 25 bp, Probe sequence
gaacataatgcccaacactcaaata

SEQ ID NO: 58758 - DNA, 25 bp, Probe sequence
aacataatgcccaacactcaaataa

SEQ ID NO: 58759 - DNA, 25 bp, Probe sequence
acataatgcccaacactcaaataat

SEQ ID NO: 58760 - DNA, 25 bp, Probe sequence
actaagaaacgcctaacatctctat

SEQ ID NO: 58761 - DNA, 25 bp, Probe sequence
atactaagaaacgcctaacatctct

SEQ ID NO: 58762 - DNA, 25 bp, Probe sequence
aagagtattgaacataatgcccaac

SEQ ID NO: 58763 - DNA, 25 bp, Probe sequence
gtattgaacataatgcccaacactc

SEQ ID NO: 58764 - DNA, 25 bp, Probe sequence
gagtattgaacataatgcccaacac

SEQ ID NO: 58765 - DNA, 25 bp, Probe sequence
agagtattgaacataatgcccaaca

SEQ ID NO: 58766 - DNA, 25 bp, Probe sequence
gcaataagttgatttgatactgtcg

SEQ ID NO: 58767 - DNA, 25 bp, Probe sequence
tgatactgtcgataaagcataaagc

SEQ ID NO: 58768 - DNA, 25 bp, Probe sequence
ttgatttgatactgtcgataaagca

SEQ ID NO: 58769 - DNA, 25 bp, Probe sequence
tgatttgatactgtcgataaagcat

SEQ ID NO: 58770 - DNA, 25 bp, Probe sequence
gttgatttgatactgtcgataaagc

SEQ ID NO: 58771 - DNA, 25 bp, Probe sequence
ttgatactgtcgataaagcataaag

SEQ ID NO: 58772 - DNA, 25 bp, Probe sequence
tgcaataagttgatttgatactgtc

SEQ ID NO: 58773 - DNA, 25 bp, Probe sequence
caataagttgatttgatactgtcga

SEQ ID NO: 58774 - DNA, 25 bp, Probe sequence
gatttgatactgtcgataaagcata

SEQ ID NO: 58775 - DNA, 25 bp, Probe sequence
cgacagtatcaaatcaacttattgc

SEQ ID NO: 58776 - DNA, 25 bp, Probe sequence
gctttatgctttatcgacagtatca

SEQ ID NO: 58777 - DNA, 25 bp, Probe sequence
tgctttatcgacagtatcaaatcaa

SEQ ID NO: 58778 - DNA, 25 bp, Probe sequence
gctttatcgacagtatcaaatcaac

SEQ ID NO: 58779 - DNA, 25 bp, Probe sequence
atgctttatcgacagtatcaaatca

SEQ ID NO: 58780 - DNA, 25 bp, Probe sequence
ctttatgctttatcgacagtatcaa

SEQ ID NO: 58781 - DNA, 25 bp, Probe sequence
gacagtatcaaatcaacttattgca

SEQ ID NO: 58782 - DNA, 25 bp, Probe sequence
tcgacagtatcaaatcaacttattg

SEQ ID NO: 58783 - DNA, 25 bp, Probe sequence
tatgctttatcgacagtatcaaatc

SEQ ID NO: 58784 - DNA, 25 bp, Probe sequence
aatgattcgcatagtaatggagtta

SEQ ID NO: 58785 - DNA, 25 bp, Probe sequence
taatgattcgcatagtaatggagtt

SEQ ID NO: 58786 - DNA, 25 bp, Probe sequence
ttaatgattcgcatagtaatggagt

SEQ ID NO: 58787 - DNA, 25 bp, Probe sequence
tgattcgcatagtaatggagttaca

SEQ ID NO: 58788 - DNA, 25 bp, Probe sequence
gattcgcatagtaatggagttacat

SEQ ID NO: 58789 - DNA, 25 bp, Probe sequence
atgattcgcatagtaatggagttac

SEQ ID NO: 58790 - DNA, 25 bp, Probe sequence
ttgcgtaagtaaataattggaggac

SEQ ID NO: 58791 - DNA, 25 bp, Probe sequence
tgcgtaagtaaataattggaggact

SEQ ID NO: 58792 - DNA, 25 bp, Probe sequence
attgcgtaagtaaataattggagga

SEQ ID NO: 58793 - DNA, 25 bp, Probe sequence
aactccattactatgcgaatcatta

SEQ ID NO: 58794 - DNA, 25 bp, Probe sequence
taactccattactatgcgaatcatt

SEQ ID NO: 58795 - DNA, 25 bp, Probe sequence
actccattactatgcgaatcattaa

SEQ ID NO: 58796 - DNA, 25 bp, Probe sequence
tgtaactccattactatgcgaatca

SEQ ID NO: 58797 - DNA, 25 bp, Probe sequence
gtaactccattactatgcgaatcat

SEQ ID NO: 58798 - DNA, 25 bp, Probe sequence
atgtaactccattactatgcgaatc

SEQ ID NO: 58799 - DNA, 25 bp, Probe sequence
gtcctccaattatttacttacgcaa

SEQ ID NO: 58800 - DNA, 25 bp, Probe sequence
agtcctccaattatttacttacgca

SEQ ID NO: 58801 - DNA, 25 bp, Probe sequence
tcctccaattatttacttacgcaat

SEQ ID NO: 58802 - DNA, 25 bp, Probe sequence
cgtgtataatagtttcgttcgtgat

SEQ ID NO: 58803 - DNA, 25 bp, Probe sequence
gatgatgttgatgggtaagtgaggt

SEQ ID NO: 58804 - DNA, 25 bp, Probe sequence
gtgtataatagtttcgttcgtgatt

SEQ ID NO: 58805 - DNA, 25 bp, Probe sequence
aacgatgatgttgatgggtaagtga

SEQ ID NO: 58806 - DNA, 25 bp, Probe sequence
atgatgttgatgggtaagtgaggtg

SEQ ID NO: 58807 - DNA, 25 bp, Probe sequence
acgatgatgttgatgggtaagtgag

SEQ ID NO: 58808 - DNA, 25 bp, Probe sequence
cgatgatgttgatgggtaagtgagg

SEQ ID NO: 58809 - DNA, 25 bp, Probe sequence
cgaacatattccaaacgtgtataat

SEQ ID NO: 58810 - DNA, 25 bp, Probe sequence
tgtataatagtttcgttcgtgatta

SEQ ID NO: 58811 - DNA, 25 bp, Probe sequence
atcacgaacgaaactattatacacg

SEQ ID NO: 58812 - DNA, 25 bp, Probe sequence
acctcacttacccatcaacatcatc

SEQ ID NO: 58813 - DNA, 25 bp, Probe sequence
aatcacgaacgaaactattatacac

SEQ ID NO: 58814 - DNA, 25 bp, Probe sequence
tcacttacccatcaacatcatcgtt

SEQ ID NO: 58815 - DNA, 25 bp, Probe sequence
cacctcacttacccatcaacatcat

SEQ ID NO: 58816 - DNA, 25 bp, Probe sequence
ctcacttacccatcaacatcatcgt

SEQ ID NO: 58817 - DNA, 25 bp, Probe sequence
cctcacttacccatcaacatcatcg

SEQ ID NO: 58818 - DNA, 25 bp, Probe sequence
attatacacgtttggaatatgttcg

SEQ ID NO: 58819 - DNA, 25 bp, Probe sequence
taatcacgaacgaaactattataca

SEQ ID NO: 58820 - DNA, 25 bp, Probe sequence
ataatgataattgatggcaatggcg

SEQ ID NO: 58821 - DNA, 25 bp, Probe sequence
aataatgataattgatggcaatggc

SEQ ID NO: 58822 - DNA, 25 bp, Probe sequence
taatgataattgatggcaatggcgg

SEQ ID NO: 58823 - DNA, 25 bp, Probe sequence
gaataatgataattgatggcaatgg

SEQ ID NO: 58824 - DNA, 25 bp, Probe sequence
ggcggaaaatagatgttgtcattat

SEQ ID NO: 58825 - DNA, 25 bp, Probe sequence
tggcggaaaatagatgttgtcatta

SEQ ID NO: 58826 - DNA, 25 bp, Probe sequence
atgataattgatggcaatggcggaa

SEQ ID NO: 58827 - DNA, 25 bp, Probe sequence
aatgataattgatggcaatggcgga

SEQ ID NO: 58828 - DNA, 25 bp, Probe sequence
atggcggaaaatagatgttgtcatt

SEQ ID NO: 58829 - DNA, 25 bp, Probe sequence
cgccattgccatcaattatcattat

SEQ ID NO: 58830 - DNA, 25 bp, Probe sequence
gccattgccatcaattatcattatt

SEQ ID NO: 58831 - DNA, 25 bp, Probe sequence
ccgccattgccatcaattatcatta

SEQ ID NO: 58832 - DNA, 25 bp, Probe sequence
ccattgccatcaattatcattattc

SEQ ID NO: 58833 - DNA, 25 bp, Probe sequence
ataatgacaacatctattttccgcc

SEQ ID NO: 58834 - DNA, 25 bp, Probe sequence
taatgacaacatctattttccgcca

SEQ ID NO: 58835 - DNA, 25 bp, Probe sequence
tccgccattgccatcaattatcatt

SEQ ID NO: 58836 - DNA, 25 bp, Probe sequence
ttccgccattgccatcaattatcat

SEQ ID NO: 58837 - DNA, 25 bp, Probe sequence
atgacaacatctattttccgccatt

SEQ ID NO: 58838 - DNA, 25 bp, Probe sequence
tgtttcttaaataaggagcagtctc

SEQ ID NO: 58839 - DNA, 25 bp, Probe sequence
gtttcttaaataaggagcagtctct

SEQ ID NO: 58840 - DNA, 25 bp, Probe sequence
ctgtttcttaaataaggagcagtct

SEQ ID NO: 58841 - DNA, 25 bp, Probe sequence
agactgtttcttaaataaggagcag

SEQ ID NO: 58842 - DNA, 25 bp, Probe sequence
ttagaatgatgcgtatcgaataatc

SEQ ID NO: 58843 - DNA, 25 bp, Probe sequence
tagaatgatgcgtatcgaataatcg

SEQ ID NO: 58844 - DNA, 25 bp, Probe sequence
ttcttaaataaggagcagtctcttt

SEQ ID NO: 58845 - DNA, 25 bp, Probe sequence
tttcttaaataaggagcagtctctt

SEQ ID NO: 58846 - DNA, 25 bp, Probe sequence
aagactgtttcttaaataaggagca

SEQ ID NO: 58847 - DNA, 25 bp, Probe sequence
gagactgctccttatttaagaaaca

SEQ ID NO: 58848 - DNA, 25 bp, Probe sequence
agagactgctccttatttaagaaac

SEQ ID NO: 58849 - DNA, 25 bp, Probe sequence
ctgctccttatttaagaaacagtct

SEQ ID NO: 58850 - DNA, 25 bp, Probe sequence
agactgctccttatttaagaaacag

SEQ ID NO: 58851 - DNA, 25 bp, Probe sequence
gattattcgatacgcatcattctaa

SEQ ID NO: 58852 - DNA, 25 bp, Probe sequence
cgattattcgatacgcatcattcta

SEQ ID NO: 58853 - DNA, 25 bp, Probe sequence
aagagactgctccttatttaagaaa

SEQ ID NO: 58854 - DNA, 25 bp, Probe sequence
aaagagactgctccttatttaagaa

SEQ ID NO: 58855 - DNA, 25 bp, Probe sequence
tgctccttatttaagaaacagtctt

SEQ ID NO: 58856 - DNA, 25 bp, Probe sequence
ggtgtgaatgacattgatgttaagc

SEQ ID NO: 58857 - DNA, 25 bp, Probe sequence
attatgggaagtaggaggaaatgac

SEQ ID NO: 58858 - DNA, 25 bp, Probe sequence
gtgaatgacattgatgttaagctca

SEQ ID NO: 58859 - DNA, 25 bp, Probe sequence
tgtgaatgacattgatgttaagctc

SEQ ID NO: 58860 - DNA, 25 bp, Probe sequence
gtgtgaatgacattgatgttaagct

SEQ ID NO: 58861 - DNA, 25 bp, Probe sequence
tattatgggaagtaggaggaaatga

SEQ ID NO: 58862 - DNA, 25 bp, Probe sequence
tgcgtttgagaaataatagtgtaga

SEQ ID NO: 58863 - DNA, 25 bp, Probe sequence
ttatgggaagtaggaggaaatgacg

SEQ ID NO: 58864 - DNA, 25 bp, Probe sequence
gcgtttgagaaataatagtgtagac

SEQ ID NO: 58865 - DNA, 25 bp, Probe sequence
gcttaacatcaatgtcattcacacc

SEQ ID NO: 58866 - DNA, 25 bp, Probe sequence
gtcatttcctcctacttcccataat

SEQ ID NO: 58867 - DNA, 25 bp, Probe sequence
agcttaacatcaatgtcattcacac

SEQ ID NO: 58868 - DNA, 25 bp, Probe sequence
gagcttaacatcaatgtcattcaca

SEQ ID NO: 58869 - DNA, 25 bp, Probe sequence
tgagcttaacatcaatgtcattcac

SEQ ID NO: 58870 - DNA, 25 bp, Probe sequence
tcatttcctcctacttcccataata

SEQ ID NO: 58871 - DNA, 25 bp, Probe sequence
tctacactattatttctcaaacgca

SEQ ID NO: 58872 - DNA, 25 bp, Probe sequence
gtctacactattatttctcaaacgc

SEQ ID NO: 58873 - DNA, 25 bp, Probe sequence
cgtcatttcctcctacttcccataa

SEQ ID NO: 58874 - DNA, 25 bp, Probe sequence
aagtcattgaattgttatagcagaa

SEQ ID NO: 58875 - DNA, 25 bp, Probe sequence
taagtcattgaattgttatagcaga

SEQ ID NO: 58876 - DNA, 25 bp, Probe sequence
agaatgatgggtgtagaataagtac

SEQ ID NO: 58877 - DNA, 25 bp, Probe sequence
ttagaatgatgggtgtagaataagt

SEQ ID NO: 58878 - DNA, 25 bp, Probe sequence
agtcattgaattgttatagcagaaa

SEQ ID NO: 58879 - DNA, 25 bp, Probe sequence
ttaagtcattgaattgttatagcag

SEQ ID NO: 58880 - DNA, 25 bp, Probe sequence
tagaatgatgggtgtagaataagta

SEQ ID NO: 58881 - DNA, 25 bp, Probe sequence
tttagaatgatgggtgtagaataag

SEQ ID NO: 58882 - DNA, 25 bp, Probe sequence
gaatgatgggtgtagaataagtaca

SEQ ID NO: 58883 - DNA, 25 bp, Probe sequence
ttctgctataacaattcaatgactt

SEQ ID NO: 58884 - DNA, 25 bp, Probe sequence
tctgctataacaattcaatgactta

SEQ ID NO: 58885 - DNA, 25 bp, Probe sequence
gtacttattctacacccatcattct

SEQ ID NO: 58886 - DNA, 25 bp, Probe sequence
acttattctacacccatcattctaa

SEQ ID NO: 58887 - DNA, 25 bp, Probe sequence
tttctgctataacaattcaatgact

SEQ ID NO: 58888 - DNA, 25 bp, Probe sequence
ctgctataacaattcaatgacttaa

SEQ ID NO: 58889 - DNA, 25 bp, Probe sequence
tacttattctacacccatcattcta

SEQ ID NO: 58890 - DNA, 25 bp, Probe sequence
cttattctacacccatcattctaaa

SEQ ID NO: 58891 - DNA, 25 bp, Probe sequence
tgtacttattctacacccatcattc

SEQ ID NO: 58892 - DNA, 25 bp, Probe sequence
ttagcggtttagtgaaatgtagaac

SEQ ID NO: 58893 - DNA, 25 bp, Probe sequence
tttagcggtttagtgaaatgtagaa

SEQ ID NO: 58894 - DNA, 25 bp, Probe sequence
tagcggtttagtgaaatgtagaact

SEQ ID NO: 58895 - DNA, 25 bp, Probe sequence
agcggtttagtgaaatgtagaacta

SEQ ID NO: 58896 - DNA, 25 bp, Probe sequence
tccttagtgattttgtttgctttct

SEQ ID NO: 58897 - DNA, 25 bp, Probe sequence
ttttagcggtttagtgaaatgtaga

SEQ ID NO: 58898 - DNA, 25 bp, Probe sequence
atccttagtgattttgtttgctttc

SEQ ID NO: 58899 - DNA, 25 bp, Probe sequence
ccttagtgattttgtttgctttcta

SEQ ID NO: 58900 - DNA, 25 bp, Probe sequence
aatccttagtgattttgtttgcttt

SEQ ID NO: 58901 - DNA, 25 bp, Probe sequence
gttctacatttcactaaaccgctaa

SEQ ID NO: 58902 - DNA, 25 bp, Probe sequence
ttctacatttcactaaaccgctaaa

SEQ ID NO: 58903 - DNA, 25 bp, Probe sequence
agttctacatttcactaaaccgcta

SEQ ID NO: 58904 - DNA, 25 bp, Probe sequence
tagttctacatttcactaaaccgct

SEQ ID NO: 58905 - DNA, 25 bp, Probe sequence
agaaagcaaacaaaatcactaagga

SEQ ID NO: 58906 - DNA, 25 bp, Probe sequence
tctacatttcactaaaccgctaaaa

SEQ ID NO: 58907 - DNA, 25 bp, Probe sequence
gaaagcaaacaaaatcactaaggat

SEQ ID NO: 58908 - DNA, 25 bp, Probe sequence
tagaaagcaaacaaaatcactaagg

SEQ ID NO: 58909 - DNA, 25 bp, Probe sequence
aaagcaaacaaaatcactaaggatt

SEQ ID NO: 58910 - DNA, 25 bp, Probe sequence
aacatccagtgaatgataagataat

SEQ ID NO: 58911 - DNA, 25 bp, Probe sequence
aaacaatacataattaaagggtggt

SEQ ID NO: 58912 - DNA, 25 bp, Probe sequence
acatccagtgaatgataagataata

SEQ ID NO: 58913 - DNA, 25 bp, Probe sequence
aacaatacataattaaagggtggtt

SEQ ID NO: 58914 - DNA, 25 bp, Probe sequence
aaacatccagtgaatgataagataa

SEQ ID NO: 58915 - DNA, 25 bp, Probe sequence
ccagtgaatgataagataataaacg

SEQ ID NO: 58916 - DNA, 25 bp, Probe sequence
aactagtaaatcgcaggagtaaatt

SEQ ID NO: 58917 - DNA, 25 bp, Probe sequence
actagtaaatcgcaggagtaaattt

SEQ ID NO: 58918 - DNA, 25 bp, Probe sequence
acaatacataattaaagggtggtta

SEQ ID NO: 58919 - DNA, 25 bp, Probe sequence
attatcttatcattcactggatgtt

SEQ ID NO: 58920 - DNA, 25 bp, Probe sequence
accaccctttaattatgtattgttt

SEQ ID NO: 58921 - DNA, 25 bp, Probe sequence
tattatcttatcattcactggatgt

SEQ ID NO: 58922 - DNA, 25 bp, Probe sequence
ttatcttatcattcactggatgttt

SEQ ID NO: 58923 - DNA, 25 bp, Probe sequence
aaccaccctttaattatgtattgtt

SEQ ID NO: 58924 - DNA, 25 bp, Probe sequence
cgtttattatcttatcattcactgg

SEQ ID NO: 58925 - DNA, 25 bp, Probe sequence
aatttactcctgcgatttactagtt

SEQ ID NO: 58926 - DNA, 25 bp, Probe sequence
aaatttactcctgcgatttactagt

SEQ ID NO: 58927 - DNA, 25 bp, Probe sequence
taaccaccctttaattatgtattgt

SEQ ID NO: 58928 - DNA, 25 bp, Probe sequence
gattattggagatgtttccgcattt

SEQ ID NO: 58929 - DNA, 25 bp, Probe sequence
gattgattattggagatgtttccgc

SEQ ID NO: 58930 - DNA, 25 bp, Probe sequence
tgattgattattggagatgtttccg

SEQ ID NO: 58931 - DNA, 25 bp, Probe sequence
tgattattggagatgtttccgcatt

SEQ ID NO: 58932 - DNA, 25 bp, Probe sequence
ttgattattggagatgtttccgcat

SEQ ID NO: 58933 - DNA, 25 bp, Probe sequence
attgattattggagatgtttccgca

SEQ ID NO: 58934 - DNA, 25 bp, Probe sequence
tgggaatagatgattgattattgga

SEQ ID NO: 58935 - DNA, 25 bp, Probe sequence
ggaatagatgattgattattggaga

SEQ ID NO: 58936 - DNA, 25 bp, Probe sequence
gggaatagatgattgattattggag

SEQ ID NO: 58937 - DNA, 25 bp, Probe sequence
aaatgcggaaacatctccaataatc

SEQ ID NO: 58938 - DNA, 25 bp, Probe sequence
cggaaacatctccaataatcaatca

SEQ ID NO: 58939 - DNA, 25 bp, Probe sequence
gcggaaacatctccaataatcaatc

SEQ ID NO: 58940 - DNA, 25 bp, Probe sequence
tgcggaaacatctccaataatcaat

SEQ ID NO: 58941 - DNA, 25 bp, Probe sequence
atgcggaaacatctccaataatcaa

SEQ ID NO: 58942 - DNA, 25 bp, Probe sequence
aatgcggaaacatctccaataatca

SEQ ID NO: 58943 - DNA, 25 bp, Probe sequence
tccaataatcaatcatctattccca

SEQ ID NO: 58944 - DNA, 25 bp, Probe sequence
tctccaataatcaatcatctattcc

SEQ ID NO: 58945 - DNA, 25 bp, Probe sequence
ctccaataatcaatcatctattccc

SEQ ID NO: 58946 - DNA, 25 bp, Probe sequence
aacatgccacatcataactttaagg

SEQ ID NO: 58947 - DNA, 25 bp, Probe sequence
acatgccacatcataactttaaggt

SEQ ID NO: 58948 - DNA, 25 bp, Probe sequence
tgccacatcataactttaaggtgta

SEQ ID NO: 58949 - DNA, 25 bp, Probe sequence
gccacatcataactttaaggtgtaa

SEQ ID NO: 58950 - DNA, 25 bp, Probe sequence
atgccacatcataactttaaggtgt

SEQ ID NO: 58951 - DNA, 25 bp, Probe sequence
aaacatgccacatcataactttaag

SEQ ID NO: 58952 - DNA, 25 bp, Probe sequence
catgccacatcataactttaaggtg

SEQ ID NO: 58953 - DNA, 25 bp, Probe sequence
tcataaacgaaaacagaaattgctt

SEQ ID NO: 58954 - DNA, 25 bp, Probe sequence
ttcataaacgaaaacagaaattgct

SEQ ID NO: 58955 - DNA, 25 bp, Probe sequence
ccttaaagttatgatgtggcatgtt

SEQ ID NO: 58956 - DNA, 25 bp, Probe sequence
accttaaagttatgatgtggcatgt

SEQ ID NO: 58957 - DNA, 25 bp, Probe sequence
tacaccttaaagttatgatgtggca

SEQ ID NO: 58958 - DNA, 25 bp, Probe sequence
acaccttaaagttatgatgtggcat

SEQ ID NO: 58959 - DNA, 25 bp, Probe sequence
ttacaccttaaagttatgatgtggc

SEQ ID NO: 58960 - DNA, 25 bp, Probe sequence
cttaaagttatgatgtggcatgttt

SEQ ID NO: 58961 - DNA, 25 bp, Probe sequence
caccttaaagttatgatgtggcatg

SEQ ID NO: 58962 - DNA, 25 bp, Probe sequence
aagcaatttctgttttcgtttatga

SEQ ID NO: 58963 - DNA, 25 bp, Probe sequence
agcaatttctgttttcgtttatgaa

SEQ ID NO: 58964 - DNA, 25 bp, Probe sequence
tgttatgaattagagagcacgagaa

SEQ ID NO: 58965 - DNA, 25 bp, Probe sequence
acaaggtagttggctgatagatgaa

SEQ ID NO: 58966 - DNA, 25 bp, Probe sequence
aacaaggtagttggctgatagatga

SEQ ID NO: 58967 - DNA, 25 bp, Probe sequence
cgtatatagagtagttcggatgaga

SEQ ID NO: 58968 - DNA, 25 bp, Probe sequence
aagtgttatgaattagagagcacga

SEQ ID NO: 58969 - DNA, 25 bp, Probe sequence
gtgttatgaattagagagcacgaga

SEQ ID NO: 58970 - DNA, 25 bp, Probe sequence
agtgttatgaattagagagcacgag

SEQ ID NO: 58971 - DNA, 25 bp, Probe sequence
atgacgttgattgttagtaagagct

SEQ ID NO: 58972 - DNA, 25 bp, Probe sequence
atgaattagagagcacgagaaatgt

SEQ ID NO: 58973 - DNA, 25 bp, Probe sequence
ttctcgtgctctctaattcataaca

SEQ ID NO: 58974 - DNA, 25 bp, Probe sequence
tcatctatcagccaactaccttgtt

SEQ ID NO: 58975 - DNA, 25 bp, Probe sequence
ttcatctatcagccaactaccttgt

SEQ ID NO: 58976 - DNA, 25 bp, Probe sequence
tctcatccgaactactctatatacg

SEQ ID NO: 58977 - DNA, 25 bp, Probe sequence
tcgtgctctctaattcataacactt

SEQ ID NO: 58978 - DNA, 25 bp, Probe sequence
ctcgtgctctctaattcataacact

SEQ ID NO: 58979 - DNA, 25 bp, Probe sequence
tctcgtgctctctaattcataacac

SEQ ID NO: 58980 - DNA, 25 bp, Probe sequence
agctcttactaacaatcaacgtcat

SEQ ID NO: 58981 - DNA, 25 bp, Probe sequence
acatttctcgtgctctctaattcat

SEQ ID NO: 58982 - DNA, 25 bp, Probe sequence
acacgatgaacattgaaaactgaat

SEQ ID NO: 58983 - DNA, 25 bp, Probe sequence
tacacgatgaacattgaaaactgaa

SEQ ID NO: 58984 - DNA, 25 bp, Probe sequence
ttacacgatgaacattgaaaactga

SEQ ID NO: 58985 - DNA, 25 bp, Probe sequence
tttacacgatgaacattgaaaactg

SEQ ID NO: 58986 - DNA, 25 bp, Probe sequence
ttttacacgatgaacattgaaaact

SEQ ID NO: 58987 - DNA, 25 bp, Probe sequence
acgatgaacattgaaaactgaatga

SEQ ID NO: 58988 - DNA, 25 bp, Probe sequence
cacgatgaacattgaaaactgaatg

SEQ ID NO: 58989 - DNA, 25 bp, Probe sequence
cgatgaacattgaaaactgaatgac

SEQ ID NO: 58990 - DNA, 25 bp, Probe sequence
gatgaacattgaaaactgaatgaca

SEQ ID NO: 58991 - DNA, 25 bp, Probe sequence
attcagttttcaatgttcatcgtgt

SEQ ID NO: 58992 - DNA, 25 bp, Probe sequence
tcagttttcaatgttcatcgtgtaa

SEQ ID NO: 58993 - DNA, 25 bp, Probe sequence
ttcagttttcaatgttcatcgtgta

SEQ ID NO: 58994 - DNA, 25 bp, Probe sequence
cagttttcaatgttcatcgtgtaaa

SEQ ID NO: 58995 - DNA, 25 bp, Probe sequence
agttttcaatgttcatcgtgtaaaa

SEQ ID NO: 58996 - DNA, 25 bp, Probe sequence
cattcagttttcaatgttcatcgtg

SEQ ID NO: 58997 - DNA, 25 bp, Probe sequence
tcattcagttttcaatgttcatcgt

SEQ ID NO: 58998 - DNA, 25 bp, Probe sequence
gtcattcagttttcaatgttcatcg

SEQ ID NO: 58999 - DNA, 25 bp, Probe sequence
tgtcattcagttttcaatgttcatc

SEQ ID NO: 59000 - DNA, 25 bp, Probe sequence
aagaagaggaaagaagcaagcgatt

SEQ ID NO: 59001 - DNA, 25 bp, Probe sequence
gaagaagaggaaagaagcaagcgat

SEQ ID NO: 59002 - DNA, 25 bp, Probe sequence
taaatgagtaagcgagagccgaaga

SEQ ID NO: 59003 - DNA, 25 bp, Probe sequence
aatgagtaagcgagagccgaagaag

SEQ ID NO: 59004 - DNA, 25 bp, Probe sequence
agaagaggaaagaagcaagcgattg

SEQ ID NO: 59005 - DNA, 25 bp, Probe sequence
aagaggaaagaagcaagcgattgtc

SEQ ID NO: 59006 - DNA, 25 bp, Probe sequence
gaagaggaaagaagcaagcgattgt

SEQ ID NO: 59007 - DNA, 25 bp, Probe sequence
aaatgagtaagcgagagccgaagaa

SEQ ID NO: 59008 - DNA, 25 bp, Probe sequence
cttacgttccgctagagtagaactg

SEQ ID NO: 59009 - DNA, 25 bp, Probe sequence
aatcgcttgcttctttcctcttctt

SEQ ID NO: 59010 - DNA, 25 bp, Probe sequence
atcgcttgcttctttcctcttcttc

SEQ ID NO: 59011 - DNA, 25 bp, Probe sequence
tcttcggctctcgcttactcattta

SEQ ID NO: 59012 - DNA, 25 bp, Probe sequence
cttcttcggctctcgcttactcatt

SEQ ID NO: 59013 - DNA, 25 bp, Probe sequence
caatcgcttgcttctttcctcttct

SEQ ID NO: 59014 - DNA, 25 bp, Probe sequence
acaatcgcttgcttctttcctcttc

SEQ ID NO: 59015 - DNA, 25 bp, Probe sequence
gacaatcgcttgcttctttcctctt

SEQ ID NO: 59016 - DNA, 25 bp, Probe sequence
ttcttcggctctcgcttactcattt

SEQ ID NO: 59017 - DNA, 25 bp, Probe sequence
cagttctactctagcggaacgtaag

SEQ ID NO: 59018 - DNA, 25 bp, Probe sequence
atagagaagagcagtaagacggtat

SEQ ID NO: 59019 - DNA, 25 bp, Probe sequence
aatagagaagagcagtaagacggta

SEQ ID NO: 59020 - DNA, 25 bp, Probe sequence
tagagaagagcagtaagacggtatc

SEQ ID NO: 59021 - DNA, 25 bp, Probe sequence
gaagagcagtaagacggtatctaat

SEQ ID NO: 59022 - DNA, 25 bp, Probe sequence
agaagagcagtaagacggtatctaa

SEQ ID NO: 59023 - DNA, 25 bp, Probe sequence
gagcagtaagacggtatctaattga

SEQ ID NO: 59024 - DNA, 25 bp, Probe sequence
agagcagtaagacggtatctaattg

SEQ ID NO: 59025 - DNA, 25 bp, Probe sequence
agcagtaagacggtatctaattgaa

SEQ ID NO: 59026 - DNA, 25 bp, Probe sequence
gagaagagcagtaagacggtatcta

SEQ ID NO: 59027 - DNA, 25 bp, Probe sequence
ataccgtcttactgctcttctctat

SEQ ID NO: 59028 - DNA, 25 bp, Probe sequence
taccgtcttactgctcttctctatt

SEQ ID NO: 59029 - DNA, 25 bp, Probe sequence
gataccgtcttactgctcttctcta

SEQ ID NO: 59030 - DNA, 25 bp, Probe sequence
attagataccgtcttactgctcttc

SEQ ID NO: 59031 - DNA, 25 bp, Probe sequence
ttagataccgtcttactgctcttct

SEQ ID NO: 59032 - DNA, 25 bp, Probe sequence
caattagataccgtcttactgctct

SEQ ID NO: 59033 - DNA, 25 bp, Probe sequence
tcaattagataccgtcttactgctc

SEQ ID NO: 59034 - DNA, 25 bp, Probe sequence
ttcaattagataccgtcttactgct

SEQ ID NO: 59035 - DNA, 25 bp, Probe sequence
tagataccgtcttactgctcttctc

SEQ ID NO: 59036 - DNA, 25 bp, Probe sequence
atcaacttgaaaaggggttttatgt

SEQ ID NO: 59037 - DNA, 25 bp, Probe sequence
tcaacttgaaaaggggttttatgta

SEQ ID NO: 59038 - DNA, 25 bp, Probe sequence
aatcaacttgaaaaggggttttatg

SEQ ID NO: 59039 - DNA, 25 bp, Probe sequence
caacttgaaaaggggttttatgtat

SEQ ID NO: 59040 - DNA, 25 bp, Probe sequence
atttaatcaacttgaaaaggggttt

SEQ ID NO: 59041 - DNA, 25 bp, Probe sequence
gtatttaatcaacttgaaaaggggt

SEQ ID NO: 59042 - DNA, 25 bp, Probe sequence
tgtatttaatcaacttgaaaagggg

SEQ ID NO: 59043 - DNA, 25 bp, Probe sequence
tttaatcaacttgaaaaggggtttt

SEQ ID NO: 59044 - DNA, 25 bp, Probe sequence
tatttaatcaacttgaaaaggggtt

SEQ ID NO: 59045 - DNA, 25 bp, Probe sequence
acataaaaccccttttcaagttgat

SEQ ID NO: 59046 - DNA, 25 bp, Probe sequence
tacataaaaccccttttcaagttga

SEQ ID NO: 59047 - DNA, 25 bp, Probe sequence
cataaaaccccttttcaagttgatt

SEQ ID NO: 59048 - DNA, 25 bp, Probe sequence
atacataaaaccccttttcaagttg

SEQ ID NO: 59049 - DNA, 25 bp, Probe sequence
ccccttttcaagttgattaaataca

SEQ ID NO: 59050 - DNA, 25 bp, Probe sequence
accccttttcaagttgattaaatac

SEQ ID NO: 59051 - DNA, 25 bp, Probe sequence
aaaccccttttcaagttgattaaat

SEQ ID NO: 59052 - DNA, 25 bp, Probe sequence
aaaaccccttttcaagttgattaaa

SEQ ID NO: 59053 - DNA, 25 bp, Probe sequence
aaccccttttcaagttgattaaata

SEQ ID NO: 59054 - DNA, 25 bp, Probe sequence
gaagggattaattcgatgttgatgt

SEQ ID NO: 59055 - DNA, 25 bp, Probe sequence
tgaagggattaattcgatgttgatg

SEQ ID NO: 59056 - DNA, 25 bp, Probe sequence
tttgaagggattaattcgatgttga

SEQ ID NO: 59057 - DNA, 25 bp, Probe sequence
ttgaagggattaattcgatgttgat

SEQ ID NO: 59058 - DNA, 25 bp, Probe sequence
aagggattaattcgatgttgatgta

SEQ ID NO: 59059 - DNA, 25 bp, Probe sequence
agggattaattcgatgttgatgtat

SEQ ID NO: 59060 - DNA, 25 bp, Probe sequence
gggattaattcgatgttgatgtatt

SEQ ID NO: 59061 - DNA, 25 bp, Probe sequence
aaccccttcaaagagactgagaata

SEQ ID NO: 59062 - DNA, 25 bp, Probe sequence
tatctccttcaaacttagctttgga

SEQ ID NO: 59063 - DNA, 25 bp, Probe sequence
catcaacatcgaattaatcccttca

SEQ ID NO: 59064 - DNA, 25 bp, Probe sequence
acatcaacatcgaattaatcccttc

SEQ ID NO: 59065 - DNA, 25 bp, Probe sequence
tcaacatcgaattaatcccttcaaa

SEQ ID NO: 59066 - DNA, 25 bp, Probe sequence
atcaacatcgaattaatcccttcaa

SEQ ID NO: 59067 - DNA, 25 bp, Probe sequence
tacatcaacatcgaattaatccctt

SEQ ID NO: 59068 - DNA, 25 bp, Probe sequence
atacatcaacatcgaattaatccct

SEQ ID NO: 59069 - DNA, 25 bp, Probe sequence
aatacatcaacatcgaattaatccc

SEQ ID NO: 59070 - DNA, 25 bp, Probe sequence
tattctcagtctctttgaaggggtt

SEQ ID NO: 59071 - DNA, 25 bp, Probe sequence
caataattcgttgatttagcataca

SEQ ID NO: 59072 - DNA, 25 bp, Probe sequence
aaatggaagggctaacatcataaat

SEQ ID NO: 59073 - DNA, 25 bp, Probe sequence
aatggaagggctaacatcataaatt

SEQ ID NO: 59074 - DNA, 25 bp, Probe sequence
atggaagggctaacatcataaattt

SEQ ID NO: 59075 - DNA, 25 bp, Probe sequence
caataaaatggaagggctaacatca

SEQ ID NO: 59076 - DNA, 25 bp, Probe sequence
acaataaaatggaagggctaacatc

SEQ ID NO: 59077 - DNA, 25 bp, Probe sequence
aaaatggaagggctaacatcataaa

SEQ ID NO: 59078 - DNA, 25 bp, Probe sequence
aataaaatggaagggctaacatcat

SEQ ID NO: 59079 - DNA, 25 bp, Probe sequence
atacaataaaatggaagggctaaca

SEQ ID NO: 59080 - DNA, 25 bp, Probe sequence
tacaataaaatggaagggctaacat

SEQ ID NO: 59081 - DNA, 25 bp, Probe sequence
atttatgatgttagcccttccattt

SEQ ID NO: 59082 - DNA, 25 bp, Probe sequence
aatttatgatgttagcccttccatt

SEQ ID NO: 59083 - DNA, 25 bp, Probe sequence
aaatttatgatgttagcccttccat

SEQ ID NO: 59084 - DNA, 25 bp, Probe sequence
gatgttagcccttccattttattgt

SEQ ID NO: 59085 - DNA, 25 bp, Probe sequence
tgatgttagcccttccattttattg

SEQ ID NO: 59086 - DNA, 25 bp, Probe sequence
tttatgatgttagcccttccatttt

SEQ ID NO: 59087 - DNA, 25 bp, Probe sequence
tgttagcccttccattttattgtat

SEQ ID NO: 59088 - DNA, 25 bp, Probe sequence
atgatgttagcccttccattttatt

SEQ ID NO: 59089 - DNA, 25 bp, Probe sequence
atgttagcccttccattttattgta

SEQ ID NO: 59090 - DNA, 25 bp, Probe sequence
caagttaatgagcctacagcgatag

SEQ ID NO: 59091 - DNA, 25 bp, Probe sequence
taatgagcctacagcgatagcataa

SEQ ID NO: 59092 - DNA, 25 bp, Probe sequence
ttaatgagcctacagcgatagcata

SEQ ID NO: 59093 - DNA, 25 bp, Probe sequence
acaagttaatgagcctacagcgata

SEQ ID NO: 59094 - DNA, 25 bp, Probe sequence
taacaagttaatgagcctacagcga

SEQ ID NO: 59095 - DNA, 25 bp, Probe sequence
gtaacaagttaatgagcctacagcg

SEQ ID NO: 59096 - DNA, 25 bp, Probe sequence
aacaagttaatgagcctacagcgat

SEQ ID NO: 59097 - DNA, 25 bp, Probe sequence
aagttaatgagcctacagcgatagc

SEQ ID NO: 59098 - DNA, 25 bp, Probe sequence
aaagtatccatcaacgaaacaatct

SEQ ID NO: 59099 - DNA, 25 bp, Probe sequence
ctatcgctgtaggctcattaacttg

SEQ ID NO: 59100 - DNA, 25 bp, Probe sequence
ttatgctatcgctgtaggctcatta

SEQ ID NO: 59101 - DNA, 25 bp, Probe sequence
tatgctatcgctgtaggctcattaa

SEQ ID NO: 59102 - DNA, 25 bp, Probe sequence
tatcgctgtaggctcattaacttgt

SEQ ID NO: 59103 - DNA, 25 bp, Probe sequence
tcgctgtaggctcattaacttgtta

SEQ ID NO: 59104 - DNA, 25 bp, Probe sequence
cgctgtaggctcattaacttgttac

SEQ ID NO: 59105 - DNA, 25 bp, Probe sequence
atcgctgtaggctcattaacttgtt

SEQ ID NO: 59106 - DNA, 25 bp, Probe sequence
gctatcgctgtaggctcattaactt

SEQ ID NO: 59107 - DNA, 25 bp, Probe sequence
agattgtttcgttgatggatacttt

SEQ ID NO: 59108 - DNA, 25 bp, Probe sequence
atgtagtgcagtcttgattcttagg

SEQ ID NO: 59109 - DNA, 25 bp, Probe sequence
aaggtatatgaaatggcgaagtttg

SEQ ID NO: 59110 - DNA, 25 bp, Probe sequence
ggtatatgaaatggcgaagtttgta

SEQ ID NO: 59111 - DNA, 25 bp, Probe sequence
gcttatgtagtgcagtcttgattct

SEQ ID NO: 59112 - DNA, 25 bp, Probe sequence
aaaggtatatgaaatggcgaagttt

SEQ ID NO: 59113 - DNA, 25 bp, Probe sequence
aatggcgaagtttgtaatttgaagt

SEQ ID NO: 59114 - DNA, 25 bp, Probe sequence
aggtatatgaaatggcgaagtttgt

SEQ ID NO: 59115 - DNA, 25 bp, Probe sequence
aagtcgttgaaatgcttatgtagtg

SEQ ID NO: 59116 - DNA, 25 bp, Probe sequence
cttatgtagtgcagtcttgattctt

SEQ ID NO: 59117 - DNA, 25 bp, Probe sequence
cctaagaatcaagactgcactacat

SEQ ID NO: 59118 - DNA, 25 bp, Probe sequence
caaacttcgccatttcatatacctt

SEQ ID NO: 59119 - DNA, 25 bp, Probe sequence
tacaaacttcgccatttcatatacc

SEQ ID NO: 59120 - DNA, 25 bp, Probe sequence
agaatcaagactgcactacataagc

SEQ ID NO: 59121 - DNA, 25 bp, Probe sequence
aaacttcgccatttcatataccttt

SEQ ID NO: 59122 - DNA, 25 bp, Probe sequence
acttcaaattacaaacttcgccatt

SEQ ID NO: 59123 - DNA, 25 bp, Probe sequence
acaaacttcgccatttcatatacct

SEQ ID NO: 59124 - DNA, 25 bp, Probe sequence
cactacataagcatttcaacgactt

SEQ ID NO: 59125 - DNA, 25 bp, Probe sequence
tacttcaaattacaaacttcgccat

SEQ ID NO: 59126 - DNA, 25 bp, Probe sequence
tgagagtgatgagcattaagttgac

SEQ ID NO: 59127 - DNA, 25 bp, Probe sequence
atgagagtgatgagcattaagttga

SEQ ID NO: 59128 - DNA, 25 bp, Probe sequence
gagagtgatgagcattaagttgact

SEQ ID NO: 59129 - DNA, 25 bp, Probe sequence
agagtgatgagcattaagttgactt

SEQ ID NO: 59130 - DNA, 25 bp, Probe sequence
gtgatgagcattaagttgacttagt

SEQ ID NO: 59131 - DNA, 25 bp, Probe sequence
agtgatgagcattaagttgacttag

SEQ ID NO: 59132 - DNA, 25 bp, Probe sequence
gagtgatgagcattaagttgactta

SEQ ID NO: 59133 - DNA, 25 bp, Probe sequence
aatgagagtgatgagcattaagttg

SEQ ID NO: 59134 - DNA, 25 bp, Probe sequence
tgatgagcattaagttgacttagtt

SEQ ID NO: 59135 - DNA, 25 bp, Probe sequence
gtcaacttaatgctcatcactctca

SEQ ID NO: 59136 - DNA, 25 bp, Probe sequence
tcaacttaatgctcatcactctcat

SEQ ID NO: 59137 - DNA, 25 bp, Probe sequence
agtcaacttaatgctcatcactctc

SEQ ID NO: 59138 - DNA, 25 bp, Probe sequence
aagtcaacttaatgctcatcactct

SEQ ID NO: 59139 - DNA, 25 bp, Probe sequence
actaagtcaacttaatgctcatcac

SEQ ID NO: 59140 - DNA, 25 bp, Probe sequence
taagtcaacttaatgctcatcactc

SEQ ID NO: 59141 - DNA, 25 bp, Probe sequence
ctaagtcaacttaatgctcatcact

SEQ ID NO: 59142 - DNA, 25 bp, Probe sequence
caacttaatgctcatcactctcatt

SEQ ID NO: 59143 - DNA, 25 bp, Probe sequence
aactaagtcaacttaatgctcatca

SEQ ID NO: 59144 - DNA, 25 bp, Probe sequence
tccgtcatcttgaaattttgaatgt

SEQ ID NO: 59145 - DNA, 25 bp, Probe sequence
ttccgtcatcttgaaattttgaatg

SEQ ID NO: 59146 - DNA, 25 bp, Probe sequence
ccgtcatcttgaaattttgaatgta

SEQ ID NO: 59147 - DNA, 25 bp, Probe sequence
tttccgtcatcttgaaattttgaat

SEQ ID NO: 59148 - DNA, 25 bp, Probe sequence
cgtcatcttgaaattttgaatgtaa

SEQ ID NO: 59149 - DNA, 25 bp, Probe sequence
aattttagatagaaggggttagttt

SEQ ID NO: 59150 - DNA, 25 bp, Probe sequence
ttttagatagaaggggttagtttaa

SEQ ID NO: 59151 - DNA, 25 bp, Probe sequence
attttagatagaaggggttagttta

SEQ ID NO: 59152 - DNA, 25 bp, Probe sequence
tagatagaaggggttagtttaatac

SEQ ID NO: 59153 - DNA, 25 bp, Probe sequence
acattcaaaatttcaagatgacgga

SEQ ID NO: 59154 - DNA, 25 bp, Probe sequence
cattcaaaatttcaagatgacggaa

SEQ ID NO: 59155 - DNA, 25 bp, Probe sequence
tacattcaaaatttcaagatgacgg

SEQ ID NO: 59156 - DNA, 25 bp, Probe sequence
attcaaaatttcaagatgacggaaa

SEQ ID NO: 59157 - DNA, 25 bp, Probe sequence
ttacattcaaaatttcaagatgacg

SEQ ID NO: 59158 - DNA, 25 bp, Probe sequence
aaactaaccccttctatctaaaatt

SEQ ID NO: 59159 - DNA, 25 bp, Probe sequence
ttaaactaaccccttctatctaaaa

SEQ ID NO: 59160 - DNA, 25 bp, Probe sequence
taaactaaccccttctatctaaaat

SEQ ID NO: 59161 - DNA, 25 bp, Probe sequence
attaaactaaccccttctatctaaa

SEQ ID NO: 59162 - DNA, 25 bp, Probe sequence
gccttaggacgtgaattgaattata

SEQ ID NO: 59163 - DNA, 25 bp, Probe sequence
acttactgatggtttgacatttgtt

SEQ ID NO: 59164 - DNA, 25 bp, Probe sequence
cgccttaggacgtgaattgaattat

SEQ ID NO: 59165 - DNA, 25 bp, Probe sequence
tacttactgatggtttgacatttgt

SEQ ID NO: 59166 - DNA, 25 bp, Probe sequence
gtgttacttactgatggtttgacat

SEQ ID NO: 59167 - DNA, 25 bp, Probe sequence
ttataacgtgttacttactgatggt

SEQ ID NO: 59168 - DNA, 25 bp, Probe sequence
cgtgttacttactgatggtttgaca

SEQ ID NO: 59169 - DNA, 25 bp, Probe sequence
tgttacttactgatggtttgacatt

SEQ ID NO: 59170 - DNA, 25 bp, Probe sequence
tataacgtgttacttactgatggtt

SEQ ID NO: 59171 - DNA, 25 bp, Probe sequence
tataattcaattcacgtcctaaggc

SEQ ID NO: 59172 - DNA, 25 bp, Probe sequence
aacaaatgtcaaaccatcagtaagt

SEQ ID NO: 59173 - DNA, 25 bp, Probe sequence
ataattcaattcacgtcctaaggcg

SEQ ID NO: 59174 - DNA, 25 bp, Probe sequence
acaaatgtcaaaccatcagtaagta

SEQ ID NO: 59175 - DNA, 25 bp, Probe sequence
atgtcaaaccatcagtaagtaacac

SEQ ID NO: 59176 - DNA, 25 bp, Probe sequence
accatcagtaagtaacacgttataa

SEQ ID NO: 59177 - DNA, 25 bp, Probe sequence
tgtcaaaccatcagtaagtaacacg

SEQ ID NO: 59178 - DNA, 25 bp, Probe sequence
aatgtcaaaccatcagtaagtaaca

SEQ ID NO: 59179 - DNA, 25 bp, Probe sequence
aaccatcagtaagtaacacgttata

SEQ ID NO: 59180 - DNA, 25 bp, Probe sequence
caacctccaaatcctttgaacatat

SEQ ID NO: 59181 - DNA, 25 bp, Probe sequence
tcaacctccaaatcctttgaacata

SEQ ID NO: 59182 - DNA, 25 bp, Probe sequence
aacctccaaatcctttgaacatatt

SEQ ID NO: 59183 - DNA, 25 bp, Probe sequence
ctcaacctccaaatcctttgaacat

SEQ ID NO: 59184 - DNA, 25 bp, Probe sequence
acctccaaatcctttgaacatatta

SEQ ID NO: 59185 - DNA, 25 bp, Probe sequence
cctccaaatcctttgaacatattat

SEQ ID NO: 59186 - DNA, 25 bp, Probe sequence
tccaaatcctttgaacatattatca

SEQ ID NO: 59187 - DNA, 25 bp, Probe sequence
ctgctcaacctccaaatcctttgaa

SEQ ID NO: 59188 - DNA, 25 bp, Probe sequence
gctcaacctccaaatcctttgaaca

SEQ ID NO: 59189 - DNA, 25 bp, Probe sequence
gaaatgttaagagtgggagggcaaa

SEQ ID NO: 59190 - DNA, 25 bp, Probe sequence
aaaagtgttaaaattatgtggtcgc

SEQ ID NO: 59191 - DNA, 25 bp, Probe sequence
gtcacgaaatgttaagagtgggagg

SEQ ID NO: 59192 - DNA, 25 bp, Probe sequence
gaaaagtgttaaaattatgtggtcg

SEQ ID NO: 59193 - DNA, 25 bp, Probe sequence
aaatgttaagagtgggagggcaaaa

SEQ ID NO: 59194 - DNA, 25 bp, Probe sequence
cgtcacgaaatgttaagagtgggag

SEQ ID NO: 59195 - DNA, 25 bp, Probe sequence
tcacgaaatgttaagagtgggaggg

SEQ ID NO: 59196 - DNA, 25 bp, Probe sequence
cgaaatgttaagagtgggagggcaa

SEQ ID NO: 59197 - DNA, 25 bp, Probe sequence
agaaaagtgttaaaattatgtggtc

SEQ ID NO: 59198 - DNA, 25 bp, Probe sequence
tttgccctcccactcttaacatttc

SEQ ID NO: 59199 - DNA, 25 bp, Probe sequence
gcgaccacataattttaacactttt

SEQ ID NO: 59200 - DNA, 25 bp, Probe sequence
cctcccactcttaacatttcgtgac

SEQ ID NO: 59201 - DNA, 25 bp, Probe sequence
cgaccacataattttaacacttttc

SEQ ID NO: 59202 - DNA, 25 bp, Probe sequence
ttttgccctcccactcttaacattt

SEQ ID NO: 59203 - DNA, 25 bp, Probe sequence
ctcccactcttaacatttcgtgacg

SEQ ID NO: 59204 - DNA, 25 bp, Probe sequence
ccctcccactcttaacatttcgtga

SEQ ID NO: 59205 - DNA, 25 bp, Probe sequence
ttgccctcccactcttaacatttcg

SEQ ID NO: 59206 - DNA, 25 bp, Probe sequence
gaccacataattttaacacttttct

SEQ ID NO: 59207 - DNA, 25 bp, Probe sequence
acgatgaagcagataacagagataa

SEQ ID NO: 59208 - DNA, 25 bp, Probe sequence
aacgatgaagcagataacagagata

SEQ ID NO: 59209 - DNA, 25 bp, Probe sequence
attcttctgttgtctgctcttaact

SEQ ID NO: 59210 - DNA, 25 bp, Probe sequence
ttcttctgttgtctgctcttaactt

SEQ ID NO: 59211 - DNA, 25 bp, Probe sequence
aattcttctgttgtctgctcttaac

SEQ ID NO: 59212 - DNA, 25 bp, Probe sequence
cgatgaagcagataacagagataat

SEQ ID NO: 59213 - DNA, 25 bp, Probe sequence
tcttctgttgtctgctcttaacttg

SEQ ID NO: 59214 - DNA, 25 bp, Probe sequence
taattcttctgttgtctgctcttaa

SEQ ID NO: 59215 - DNA, 25 bp, Probe sequence
ttaattcttctgttgtctgctctta

SEQ ID NO: 59216 - DNA, 25 bp, Probe sequence
tatctctgttatctgcttcatcgtt

SEQ ID NO: 59217 - DNA, 25 bp, Probe sequence
ttatctctgttatctgcttcatcgt

SEQ ID NO: 59218 - DNA, 25 bp, Probe sequence
agttaagagcagacaacagaagaat

SEQ ID NO: 59219 - DNA, 25 bp, Probe sequence
aagttaagagcagacaacagaagaa

SEQ ID NO: 59220 - DNA, 25 bp, Probe sequence
attatctctgttatctgcttcatcg

SEQ ID NO: 59221 - DNA, 25 bp, Probe sequence
gttaagagcagacaacagaagaatt

SEQ ID NO: 59222 - DNA, 25 bp, Probe sequence
caagttaagagcagacaacagaaga

SEQ ID NO: 59223 - DNA, 25 bp, Probe sequence
taagagcagacaacagaagaattaa

SEQ ID NO: 59224 - DNA, 25 bp, Probe sequence
ttaagagcagacaacagaagaatta

SEQ ID NO: 59225 - DNA, 25 bp, Probe sequence
ttgacttgaacgtgatgatctatga

SEQ ID NO: 59226 - DNA, 25 bp, Probe sequence
tgacttgaacgtgatgatctatgat

SEQ ID NO: 59227 - DNA, 25 bp, Probe sequence
attgacttgaacgtgatgatctatg

SEQ ID NO: 59228 - DNA, 25 bp, Probe sequence
aattgacttgaacgtgatgatctat

SEQ ID NO: 59229 - DNA, 25 bp, Probe sequence
acaattacaggctgaaagaaatatc

SEQ ID NO: 59230 - DNA, 25 bp, Probe sequence
aaacaattacaggctgaaagaaata

SEQ ID NO: 59231 - DNA, 25 bp, Probe sequence
taaacaattacaggctgaaagaaat

SEQ ID NO: 59232 - DNA, 25 bp, Probe sequence
ataaacaattacaggctgaaagaaa

SEQ ID NO: 59233 - DNA, 25 bp, Probe sequence
caattacaggctgaaagaaatatct

SEQ ID NO: 59234 - DNA, 25 bp, Probe sequence
tcatagatcatcacgttcaagtcaa

SEQ ID NO: 59235 - DNA, 25 bp, Probe sequence
atcatagatcatcacgttcaagtca

SEQ ID NO: 59236 - DNA, 25 bp, Probe sequence
catagatcatcacgttcaagtcaat

SEQ ID NO: 59237 - DNA, 25 bp, Probe sequence
atagatcatcacgttcaagtcaatt

SEQ ID NO: 59238 - DNA, 25 bp, Probe sequence
gatatttctttcagcctgtaattgt

SEQ ID NO: 59239 - DNA, 25 bp, Probe sequence
tttctttcagcctgtaattgtttat

SEQ ID NO: 59240 - DNA, 25 bp, Probe sequence
atttctttcagcctgtaattgttta

SEQ ID NO: 59241 - DNA, 25 bp, Probe sequence
tatttctttcagcctgtaattgttt

SEQ ID NO: 59242 - DNA, 25 bp, Probe sequence
atatttctttcagcctgtaattgtt

SEQ ID NO: 59243 - DNA, 25 bp, Probe sequence
ttacaaagtgaagatgaggtggaat

SEQ ID NO: 59244 - DNA, 25 bp, Probe sequence
atgacgagttacaaagtgaagatga

SEQ ID NO: 59245 - DNA, 25 bp, Probe sequence
aatgacgagttacaaagtgaagatg

SEQ ID NO: 59246 - DNA, 25 bp, Probe sequence
tacaaagtgaagatgaggtggaata

SEQ ID NO: 59247 - DNA, 25 bp, Probe sequence
tgacgagttacaaagtgaagatgag

SEQ ID NO: 59248 - DNA, 25 bp, Probe sequence
gttacaaagtgaagatgaggtggaa

SEQ ID NO: 59249 - DNA, 25 bp, Probe sequence
gagttacaaagtgaagatgaggtgg

SEQ ID NO: 59250 - DNA, 25 bp, Probe sequence
gacgagttacaaagtgaagatgagg

SEQ ID NO: 59251 - DNA, 25 bp, Probe sequence
agttacaaagtgaagatgaggtgga

SEQ ID NO: 59252 - DNA, 25 bp, Probe sequence
tcatcttcactttgtaactcgtcat

SEQ ID NO: 59253 - DNA, 25 bp, Probe sequence
attccacctcatcttcactttgtaa

SEQ ID NO: 59254 - DNA, 25 bp, Probe sequence
catcttcactttgtaactcgtcatt

SEQ ID NO: 59255 - DNA, 25 bp, Probe sequence
tattccacctcatcttcactttgta

SEQ ID NO: 59256 - DNA, 25 bp, Probe sequence
ctcatcttcactttgtaactcgtca

SEQ ID NO: 59257 - DNA, 25 bp, Probe sequence
ttccacctcatcttcactttgtaac

SEQ ID NO: 59258 - DNA, 25 bp, Probe sequence
ccacctcatcttcactttgtaactc

SEQ ID NO: 59259 - DNA, 25 bp, Probe sequence
cctcatcttcactttgtaactcgtc

SEQ ID NO: 59260 - DNA, 25 bp, Probe sequence
cacctcatcttcactttgtaactcg

SEQ ID NO: 59261 - DNA, 25 bp, Probe sequence
atcattagtgttgccgttttctttt

SEQ ID NO: 59262 - DNA, 25 bp, Probe sequence
catcattagtgttgccgttttcttt

SEQ ID NO: 59263 - DNA, 25 bp, Probe sequence
tcatcattagtgttgccgttttctt

SEQ ID NO: 59264 - DNA, 25 bp, Probe sequence
aaatggtgtcatcattagtgttgcc

SEQ ID NO: 59265 - DNA, 25 bp, Probe sequence
atggtgtcatcattagtgttgccgt

SEQ ID NO: 59266 - DNA, 25 bp, Probe sequence
gtcatcattagtgttgccgttttct

SEQ ID NO: 59267 - DNA, 25 bp, Probe sequence
aatggtgtcatcattagtgttgccg

SEQ ID NO: 59268 - DNA, 25 bp, Probe sequence
ggtgtcatcattagtgttgccgttt

SEQ ID NO: 59269 - DNA, 25 bp, Probe sequence
tgtcatcattagtgttgccgttttc

SEQ ID NO: 59270 - DNA, 25 bp, Probe sequence
aaaagaaaacggcaacactaatgat

SEQ ID NO: 59271 - DNA, 25 bp, Probe sequence
aaagaaaacggcaacactaatgatg

SEQ ID NO: 59272 - DNA, 25 bp, Probe sequence
ggcaacactaatgatgacaccattt

SEQ ID NO: 59273 - DNA, 25 bp, Probe sequence
aagaaaacggcaacactaatgatga

SEQ ID NO: 59274 - DNA, 25 bp, Probe sequence
acggcaacactaatgatgacaccat

SEQ ID NO: 59275 - DNA, 25 bp, Probe sequence
agaaaacggcaacactaatgatgac

SEQ ID NO: 59276 - DNA, 25 bp, Probe sequence
cggcaacactaatgatgacaccatt

SEQ ID NO: 59277 - DNA, 25 bp, Probe sequence
aaacggcaacactaatgatgacacc

SEQ ID NO: 59278 - DNA, 25 bp, Probe sequence
aacggcaacactaatgatgacacca

SEQ ID NO: 59279 - DNA, 25 bp, Probe sequence
taatctaaattgaaggaggtaggct

SEQ ID NO: 59280 - DNA, 25 bp, Probe sequence
ctaatctaaattgaaggaggtaggc

SEQ ID NO: 59281 - DNA, 25 bp, Probe sequence
gctaatctaaattgaaggaggtagg

SEQ ID NO: 59282 - DNA, 25 bp, Probe sequence
aatctaaattgaaggaggtaggctc

SEQ ID NO: 59283 - DNA, 25 bp, Probe sequence
gcacagctaatctaaattgaaggag

SEQ ID NO: 59284 - DNA, 25 bp, Probe sequence
acagctaatctaaattgaaggaggt

SEQ ID NO: 59285 - DNA, 25 bp, Probe sequence
cacagctaatctaaattgaaggagg

SEQ ID NO: 59286 - DNA, 25 bp, Probe sequence
cagctaatctaaattgaaggaggta

SEQ ID NO: 59287 - DNA, 25 bp, Probe sequence
agctaatctaaattgaaggaggtag

SEQ ID NO: 59288 - DNA, 25 bp, Probe sequence
agcctacctccttcaatttagatta

SEQ ID NO: 59289 - DNA, 25 bp, Probe sequence
cctacctccttcaatttagattagc

SEQ ID NO: 59290 - DNA, 25 bp, Probe sequence
gcctacctccttcaatttagattag

SEQ ID NO: 59291 - DNA, 25 bp, Probe sequence
gagcctacctccttcaatttagatt

SEQ ID NO: 59292 - DNA, 25 bp, Probe sequence
ctccttcaatttagattagctgtgc

SEQ ID NO: 59293 - DNA, 25 bp, Probe sequence
acctccttcaatttagattagctgt

SEQ ID NO: 59294 - DNA, 25 bp, Probe sequence
cctccttcaatttagattagctgtg

SEQ ID NO: 59295 - DNA, 25 bp, Probe sequence
tacctccttcaatttagattagctg

SEQ ID NO: 59296 - DNA, 25 bp, Probe sequence
ctacctccttcaatttagattagct

SEQ ID NO: 59297 - DNA, 25 bp, Probe sequence
caagtatataacagaggctaatgct

SEQ ID NO: 59298 - DNA, 25 bp, Probe sequence
aagtatataacagaggctaatgctt

SEQ ID NO: 59299 - DNA, 25 bp, Probe sequence
agtatataacagaggctaatgcttt

SEQ ID NO: 59300 - DNA, 25 bp, Probe sequence
ctaatgctttagcctcttgttattt

SEQ ID NO: 59301 - DNA, 25 bp, Probe sequence
gtatataacagaggctaatgcttta

SEQ ID NO: 59302 - DNA, 25 bp, Probe sequence
taatgctttagcctcttgttatttt

SEQ ID NO: 59303 - DNA, 25 bp, Probe sequence
tatataacagaggctaatgctttag

SEQ ID NO: 59304 - DNA, 25 bp, Probe sequence
agcattagcctctgttatatacttg

SEQ ID NO: 59305 - DNA, 25 bp, Probe sequence
aagcattagcctctgttatatactt

SEQ ID NO: 59306 - DNA, 25 bp, Probe sequence
aaagcattagcctctgttatatact

SEQ ID NO: 59307 - DNA, 25 bp, Probe sequence
aaataacaagaggctaaagcattag

SEQ ID NO: 59308 - DNA, 25 bp, Probe sequence
taaagcattagcctctgttatatac

SEQ ID NO: 59309 - DNA, 25 bp, Probe sequence
aaaataacaagaggctaaagcatta

SEQ ID NO: 59310 - DNA, 25 bp, Probe sequence
ctaaagcattagcctctgttatata

SEQ ID NO: 59311 - DNA, 25 bp, Probe sequence
aaagtgaagagaggaggacatatca

SEQ ID NO: 59312 - DNA, 25 bp, Probe sequence
aaaagtgaagagaggaggacatatc

SEQ ID NO: 59313 - DNA, 25 bp, Probe sequence
aagtgaagagaggaggacatatcac

SEQ ID NO: 59314 - DNA, 25 bp, Probe sequence
tgatatgtcctcctctcttcacttt

SEQ ID NO: 59315 - DNA, 25 bp, Probe sequence
gatatgtcctcctctcttcactttt

SEQ ID NO: 59316 - DNA, 25 bp, Probe sequence
gtgatatgtcctcctctcttcactt

SEQ ID NO: 59317 - DNA, 25 bp, Probe sequence
atataaggaagggaggatttacatt

SEQ ID NO: 59318 - DNA, 25 bp, Probe sequence
aatataaggaagggaggatttacat

SEQ ID NO: 59319 - DNA, 25 bp, Probe sequence
taatataaggaagggaggatttaca

SEQ ID NO: 59320 - DNA, 25 bp, Probe sequence
ttaatataaggaagggaggatttac

SEQ ID NO: 59321 - DNA, 25 bp, Probe sequence
atttaatataaggaagggaggattt

SEQ ID NO: 59322 - DNA, 25 bp, Probe sequence
atgtaaatcctcccttccttatatt

SEQ ID NO: 59323 - DNA, 25 bp, Probe sequence
aatgtaaatcctcccttccttatat

SEQ ID NO: 59324 - DNA, 25 bp, Probe sequence
tgtaaatcctcccttccttatatta

SEQ ID NO: 59325 - DNA, 25 bp, Probe sequence
gtaaatcctcccttccttatattaa

SEQ ID NO: 59326 - DNA, 25 bp, Probe sequence
aaatcctcccttccttatattaaat

SEQ ID NO: 59327 - DNA, 25 bp, Probe sequence
accctgagtgtgttctatattaatg

SEQ ID NO: 59328 - DNA, 25 bp, Probe sequence
ccctgagtgtgttctatattaatga

SEQ ID NO: 59329 - DNA, 25 bp, Probe sequence
tttaccctgagtgtgttctatatta

SEQ ID NO: 59330 - DNA, 25 bp, Probe sequence
ttaccctgagtgtgttctatattaa

SEQ ID NO: 59331 - DNA, 25 bp, Probe sequence
cctgagtgtgttctatattaatgaa

SEQ ID NO: 59332 - DNA, 25 bp, Probe sequence
gcttttaccctgagtgtgttctata

SEQ ID NO: 59333 - DNA, 25 bp, Probe sequence
cttttaccctgagtgtgttctatat

SEQ ID NO: 59334 - DNA, 25 bp, Probe sequence
taccctgagtgtgttctatattaat

SEQ ID NO: 59335 - DNA, 25 bp, Probe sequence
ttttaccctgagtgtgttctatatt

SEQ ID NO: 59336 - DNA, 25 bp, Probe sequence
cattaatatagaacacactcagggt

SEQ ID NO: 59337 - DNA, 25 bp, Probe sequence
tcattaatatagaacacactcaggg

SEQ ID NO: 59338 - DNA, 25 bp, Probe sequence
taatatagaacacactcagggtaaa

SEQ ID NO: 59339 - DNA, 25 bp, Probe sequence
ttaatatagaacacactcagggtaa

SEQ ID NO: 59340 - DNA, 25 bp, Probe sequence
ttcattaatatagaacacactcagg

SEQ ID NO: 59341 - DNA, 25 bp, Probe sequence
tatagaacacactcagggtaaaagc

SEQ ID NO: 59342 - DNA, 25 bp, Probe sequence
atatagaacacactcagggtaaaag

SEQ ID NO: 59343 - DNA, 25 bp, Probe sequence
attaatatagaacacactcagggta

SEQ ID NO: 59344 - DNA, 25 bp, Probe sequence
aatatagaacacactcagggtaaaa

SEQ ID NO: 59345 - DNA, 25 bp, Probe sequence
gcatcgctataaataatttctcatg

SEQ ID NO: 59346 - DNA, 25 bp, Probe sequence
ttgcatcgctataaataatttctca

SEQ ID NO: 59347 - DNA, 25 bp, Probe sequence
tgcatcgctataaataatttctcat

SEQ ID NO: 59348 - DNA, 25 bp, Probe sequence
gatggtgagaaactatcatgagaga

SEQ ID NO: 59349 - DNA, 25 bp, Probe sequence
atggtgagaaactatcatgagagat

SEQ ID NO: 59350 - DNA, 25 bp, Probe sequence
ctaggttaaaatacaaggtgagctt

SEQ ID NO: 59351 - DNA, 25 bp, Probe sequence
aatacaaggtgagcttaaatgtaag

SEQ ID NO: 59352 - DNA, 25 bp, Probe sequence
tggtgagaaactatcatgagagata

SEQ ID NO: 59353 - DNA, 25 bp, Probe sequence
tttgcatcgctataaataatttctc

SEQ ID NO: 59354 - DNA, 25 bp, Probe sequence
catgagaaattatttatagcgatgc

SEQ ID NO: 59355 - DNA, 25 bp, Probe sequence
tgagaaattatttatagcgatgcaa

SEQ ID NO: 59356 - DNA, 25 bp, Probe sequence
atgagaaattatttatagcgatgca

SEQ ID NO: 59357 - DNA, 25 bp, Probe sequence
tctctcatgatagtttctcaccatc

SEQ ID NO: 59358 - DNA, 25 bp, Probe sequence
atctctcatgatagtttctcaccat

SEQ ID NO: 59359 - DNA, 25 bp, Probe sequence
aagctcaccttgtattttaacctag

SEQ ID NO: 59360 - DNA, 25 bp, Probe sequence
cttacatttaagctcaccttgtatt

SEQ ID NO: 59361 - DNA, 25 bp, Probe sequence
tatctctcatgatagtttctcacca

SEQ ID NO: 59362 - DNA, 25 bp, Probe sequence
gagaaattatttatagcgatgcaaa

SEQ ID NO: 59363 - DNA, 25 bp, Probe sequence
aattgttgagtcttggacattgtaa

SEQ ID NO: 59364 - DNA, 25 bp, Probe sequence
gcatttcattagtttatgtcccaga

SEQ ID NO: 59365 - DNA, 25 bp, Probe sequence
gagcatttcattagtttatgtccca

SEQ ID NO: 59366 - DNA, 25 bp, Probe sequence
agcatttcattagtttatgtcccag

SEQ ID NO: 59367 - DNA, 25 bp, Probe sequence
agggagcatttcattagtttatgtc

SEQ ID NO: 59368 - DNA, 25 bp, Probe sequence
atgtctactttgaagggagcatttc

SEQ ID NO: 59369 - DNA, 25 bp, Probe sequence
aagggagcatttcattagtttatgt

SEQ ID NO: 59370 - DNA, 25 bp, Probe sequence
gaagggagcatttcattagtttatg

SEQ ID NO: 59371 - DNA, 25 bp, Probe sequence
attgttgagtcttggacattgtaaa

SEQ ID NO: 59372 - DNA, 25 bp, Probe sequence
ttacaatgtccaagactcaacaatt

SEQ ID NO: 59373 - DNA, 25 bp, Probe sequence
tgggacataaactaatgaaatgctc

SEQ ID NO: 59374 - DNA, 25 bp, Probe sequence
tctgggacataaactaatgaaatgc

SEQ ID NO: 59375 - DNA, 25 bp, Probe sequence
ctgggacataaactaatgaaatgct

SEQ ID NO: 59376 - DNA, 25 bp, Probe sequence
gacataaactaatgaaatgctccct

SEQ ID NO: 59377 - DNA, 25 bp, Probe sequence
gaaatgctcccttcaaagtagacat

SEQ ID NO: 59378 - DNA, 25 bp, Probe sequence
acataaactaatgaaatgctccctt

SEQ ID NO: 59379 - DNA, 25 bp, Probe sequence
cataaactaatgaaatgctcccttc

SEQ ID NO: 59380 - DNA, 25 bp, Probe sequence
tacaatgtccaagactcaacaattt

SEQ ID NO: 59381 - DNA, 25 bp, Probe sequence
tcgtactaaatgattgctttgagat

SEQ ID NO: 59382 - DNA, 25 bp, Probe sequence
ctgtggttcaatcattacatgagtt

SEQ ID NO: 59383 - DNA, 25 bp, Probe sequence
actgtggttcaatcattacatgagt

SEQ ID NO: 59384 - DNA, 25 bp, Probe sequence
atcgtactaaatgattgctttgaga

SEQ ID NO: 59385 - DNA, 25 bp, Probe sequence
tactgtggttcaatcattacatgag

SEQ ID NO: 59386 - DNA, 25 bp, Probe sequence
atactgtggttcaatcattacatga

SEQ ID NO: 59387 - DNA, 25 bp, Probe sequence
tgataaggctttcaagttatgtaga

SEQ ID NO: 59388 - DNA, 25 bp, Probe sequence
tatactgtggttcaatcattacatg

SEQ ID NO: 59389 - DNA, 25 bp, Probe sequence
gaatgataaggctttcaagttatgt

SEQ ID NO: 59390 - DNA, 25 bp, Probe sequence
atctcaaagcaatcatttagtacga

SEQ ID NO: 59391 - DNA, 25 bp, Probe sequence
tctcaaagcaatcatttagtacgat

SEQ ID NO: 59392 - DNA, 25 bp, Probe sequence
actcatgtaatgattgaaccacagt

SEQ ID NO: 59393 - DNA, 25 bp, Probe sequence
aactcatgtaatgattgaaccacag

SEQ ID NO: 59394 - DNA, 25 bp, Probe sequence
ctcatgtaatgattgaaccacagta

SEQ ID NO: 59395 - DNA, 25 bp, Probe sequence
tcatgtaatgattgaaccacagtat

SEQ ID NO: 59396 - DNA, 25 bp, Probe sequence
tctacataacttgaaagccttatca

SEQ ID NO: 59397 - DNA, 25 bp, Probe sequence
acataacttgaaagccttatcattc

SEQ ID NO: 59398 - DNA, 25 bp, Probe sequence
catgtaatgattgaaccacagtata

SEQ ID NO: 59399 - DNA, 25 bp, Probe sequence
tttatttatttattcccacggcaaa

SEQ ID NO: 59400 - DNA, 25 bp, Probe sequence
atttatttatttattcccacggcaa

SEQ ID NO: 59401 - DNA, 25 bp, Probe sequence
tcttataacaatgtttagtgctccc

SEQ ID NO: 59402 - DNA, 25 bp, Probe sequence
atttattcccacggcaaatattgtc

SEQ ID NO: 59403 - DNA, 25 bp, Probe sequence
ttatttatttattcccacggcaaat

SEQ ID NO: 59404 - DNA, 25 bp, Probe sequence
aaagcatcttgtagaatttagttgt

SEQ ID NO: 59405 - DNA, 25 bp, Probe sequence
tatttatttatttattcccacggca

SEQ ID NO: 59406 - DNA, 25 bp, Probe sequence
tttattcccacggcaaatattgtcg

SEQ ID NO: 59407 - DNA, 25 bp, Probe sequence
ttcttataacaatgtttagtgctcc

SEQ ID NO: 59408 - DNA, 25 bp, Probe sequence
tttgccgtgggaataaataaataaa

SEQ ID NO: 59409 - DNA, 25 bp, Probe sequence
ttgccgtgggaataaataaataaat

SEQ ID NO: 59410 - DNA, 25 bp, Probe sequence
gggagcactaaacattgttataaga

SEQ ID NO: 59411 - DNA, 25 bp, Probe sequence
gacaatatttgccgtgggaataaat

SEQ ID NO: 59412 - DNA, 25 bp, Probe sequence
atttgccgtgggaataaataaataa

SEQ ID NO: 59413 - DNA, 25 bp, Probe sequence
acaactaaattctacaagatgcttt

SEQ ID NO: 59414 - DNA, 25 bp, Probe sequence
tgccgtgggaataaataaataaata

SEQ ID NO: 59415 - DNA, 25 bp, Probe sequence
cgacaatatttgccgtgggaataaa

SEQ ID NO: 59416 - DNA, 25 bp, Probe sequence
ggagcactaaacattgttataagaa

SEQ ID NO: 59417 - DNA, 25 bp, Probe sequence
caactagcgatatggaggaaacatg

SEQ ID NO: 59418 - DNA, 25 bp, Probe sequence
gcaactagcgatatggaggaaacat

SEQ ID NO: 59419 - DNA, 25 bp, Probe sequence
gagtatgatttaagaaaacgcttgc

SEQ ID NO: 59420 - DNA, 25 bp, Probe sequence
ttagaggagcctcatatgtaaatgt

SEQ ID NO: 59421 - DNA, 25 bp, Probe sequence
agaggagcctcatatgtaaatgtat

SEQ ID NO: 59422 - DNA, 25 bp, Probe sequence
ttaattagaggagcctcatatgtaa

SEQ ID NO: 59423 - DNA, 25 bp, Probe sequence
tagaggagcctcatatgtaaatgta

SEQ ID NO: 59424 - DNA, 25 bp, Probe sequence
tgagtatgatttaagaaaacgcttg

SEQ ID NO: 59425 - DNA, 25 bp, Probe sequence
gaggagcctcatatgtaaatgtatg

SEQ ID NO: 59426 - DNA, 25 bp, Probe sequence
catgtttcctccatatcgctagttg

SEQ ID NO: 59427 - DNA, 25 bp, Probe sequence
atgtttcctccatatcgctagttgc

SEQ ID NO: 59428 - DNA, 25 bp, Probe sequence
gcaagcgttttcttaaatcatactc

SEQ ID NO: 59429 - DNA, 25 bp, Probe sequence
acatttacatatgaggctcctctaa

SEQ ID NO: 59430 - DNA, 25 bp, Probe sequence
atacatttacatatgaggctcctct

SEQ ID NO: 59431 - DNA, 25 bp, Probe sequence
ttacatatgaggctcctctaattaa

SEQ ID NO: 59432 - DNA, 25 bp, Probe sequence
tacatttacatatgaggctcctcta

SEQ ID NO: 59433 - DNA, 25 bp, Probe sequence
catacatttacatatgaggctcctc

SEQ ID NO: 59434 - DNA, 25 bp, Probe sequence
caagcgttttcttaaatcatactca

SEQ ID NO: 59435 - DNA, 25 bp, Probe sequence
ccatttacagaaacatcagcaacat

SEQ ID NO: 59436 - DNA, 25 bp, Probe sequence
ttccatttacagaaacatcagcaac

SEQ ID NO: 59437 - DNA, 25 bp, Probe sequence
tccatttacagaaacatcagcaaca

SEQ ID NO: 59438 - DNA, 25 bp, Probe sequence
catttacagaaacatcagcaacatg

SEQ ID NO: 59439 - DNA, 25 bp, Probe sequence
tttccatttacagaaacatcagcaa

SEQ ID NO: 59440 - DNA, 25 bp, Probe sequence
atttccatttacagaaacatcagca

SEQ ID NO: 59441 - DNA, 25 bp, Probe sequence
aatttccatttacagaaacatcagc

SEQ ID NO: 59442 - DNA, 25 bp, Probe sequence
gacagtaattagcaataataaacgc

SEQ ID NO: 59443 - DNA, 25 bp, Probe sequence
acaactagaatttccatttacagaa

SEQ ID NO: 59444 - DNA, 25 bp, Probe sequence
atgttgctgatgtttctgtaaatgg

SEQ ID NO: 59445 - DNA, 25 bp, Probe sequence
gttgctgatgtttctgtaaatggaa

SEQ ID NO: 59446 - DNA, 25 bp, Probe sequence
tgttgctgatgtttctgtaaatgga

SEQ ID NO: 59447 - DNA, 25 bp, Probe sequence
catgttgctgatgtttctgtaaatg

SEQ ID NO: 59448 - DNA, 25 bp, Probe sequence
ttgctgatgtttctgtaaatggaaa

SEQ ID NO: 59449 - DNA, 25 bp, Probe sequence
tgctgatgtttctgtaaatggaaat

SEQ ID NO: 59450 - DNA, 25 bp, Probe sequence
gctgatgtttctgtaaatggaaatt

SEQ ID NO: 59451 - DNA, 25 bp, Probe sequence
gcgtttattattgctaattactgtc

SEQ ID NO: 59452 - DNA, 25 bp, Probe sequence
ttctgtaaatggaaattctagttgt

SEQ ID NO: 59453 - DNA, 25 bp, Probe sequence
acaatattattaggaggcaatcacc

SEQ ID NO: 59454 - DNA, 25 bp, Probe sequence
catttccattcactttaatacacgg

SEQ ID NO: 59455 - DNA, 25 bp, Probe sequence
tcatttccattcactttaatacacg

SEQ ID NO: 59456 - DNA, 25 bp, Probe sequence
atttccattcactttaatacacgga

SEQ ID NO: 59457 - DNA, 25 bp, Probe sequence
tacaatattattaggaggcaatcac

SEQ ID NO: 59458 - DNA, 25 bp, Probe sequence
acttgtctctgtgaaattaatacgt

SEQ ID NO: 59459 - DNA, 25 bp, Probe sequence
cttgtctctgtgaaattaatacgtt

SEQ ID NO: 59460 - DNA, 25 bp, Probe sequence
tacttgtctctgtgaaattaatacg

SEQ ID NO: 59461 - DNA, 25 bp, Probe sequence
ttgtctctgtgaaattaatacgttt

SEQ ID NO: 59462 - DNA, 25 bp, Probe sequence
ggtgattgcctcctaataatattgt

SEQ ID NO: 59463 - DNA, 25 bp, Probe sequence
ccgtgtattaaagtgaatggaaatg

SEQ ID NO: 59464 - DNA, 25 bp, Probe sequence
cgtgtattaaagtgaatggaaatga

SEQ ID NO: 59465 - DNA, 25 bp, Probe sequence
tccgtgtattaaagtgaatggaaat

SEQ ID NO: 59466 - DNA, 25 bp, Probe sequence
gtgattgcctcctaataatattgta

SEQ ID NO: 59467 - DNA, 25 bp, Probe sequence
acgtattaatttcacagagacaagt

SEQ ID NO: 59468 - DNA, 25 bp, Probe sequence
aacgtattaatttcacagagacaag

SEQ ID NO: 59469 - DNA, 25 bp, Probe sequence
cgtattaatttcacagagacaagta

SEQ ID NO: 59470 - DNA, 25 bp, Probe sequence
aaacgtattaatttcacagagacaa

SEQ ID NO: 59471 - DNA, 25 bp, Probe sequence
ggataacgaatatcatagaatcagc

SEQ ID NO: 59472 - DNA, 25 bp, Probe sequence
aacgaatatcatagaatcagcataa

SEQ ID NO: 59473 - DNA, 25 bp, Probe sequence
gataacgaatatcatagaatcagca

SEQ ID NO: 59474 - DNA, 25 bp, Probe sequence
acgaatatcatagaatcagcataat

SEQ ID NO: 59475 - DNA, 25 bp, Probe sequence
ataacgaatatcatagaatcagcat

SEQ ID NO: 59476 - DNA, 25 bp, Probe sequence
ctacgagttcattttcaggggataa

SEQ ID NO: 59477 - DNA, 25 bp, Probe sequence
tatcatagaatcagcataatacgaa

SEQ ID NO: 59478 - DNA, 25 bp, Probe sequence
taacgaatatcatagaatcagcata

SEQ ID NO: 59479 - DNA, 25 bp, Probe sequence
agttcattttcaggggataacgaat

SEQ ID NO: 59480 - DNA, 25 bp, Probe sequence
gctgattctatgatattcgttatcc

SEQ ID NO: 59481 - DNA, 25 bp, Probe sequence
ttatgctgattctatgatattcgtt

SEQ ID NO: 59482 - DNA, 25 bp, Probe sequence
tgctgattctatgatattcgttatc

SEQ ID NO: 59483 - DNA, 25 bp, Probe sequence
atgctgattctatgatattcgttat

SEQ ID NO: 59484 - DNA, 25 bp, Probe sequence
attatgctgattctatgatattcgt

SEQ ID NO: 59485 - DNA, 25 bp, Probe sequence
ttatcccctgaaaatgaactcgtag

SEQ ID NO: 59486 - DNA, 25 bp, Probe sequence
ttcgtattatgctgattctatgata

SEQ ID NO: 59487 - DNA, 25 bp, Probe sequence
tatgctgattctatgatattcgtta

SEQ ID NO: 59488 - DNA, 25 bp, Probe sequence
attcgttatcccctgaaaatgaact

SEQ ID NO: 59489 - DNA, 25 bp, Probe sequence
aatgtaatcgatgatatctatggaa

SEQ ID NO: 59490 - DNA, 25 bp, Probe sequence
acatatacgctatgtctttagtctt

SEQ ID NO: 59491 - DNA, 25 bp, Probe sequence
aacatatacgctatgtctttagtct

SEQ ID NO: 59492 - DNA, 25 bp, Probe sequence
atgtaatcgatgatatctatggaat

SEQ ID NO: 59493 - DNA, 25 bp, Probe sequence
aaacatatacgctatgtctttagtc

SEQ ID NO: 59494 - DNA, 25 bp, Probe sequence
ttcgatagaattgataatgtaatcg

SEQ ID NO: 59495 - DNA, 25 bp, Probe sequence
aagaaagacatagtgtatatgtgaa

SEQ ID NO: 59496 - DNA, 25 bp, Probe sequence
aaagaaagacatagtgtatatgtga

SEQ ID NO: 59497 - DNA, 25 bp, Probe sequence
taaacatatacgctatgtctttagt

SEQ ID NO: 59498 - DNA, 25 bp, Probe sequence
ttccatagatatcatcgattacatt

SEQ ID NO: 59499 - DNA, 25 bp, Probe sequence
agactaaagacatagcgtatatgtt

SEQ ID NO: 59500 - DNA, 25 bp, Probe sequence
aagactaaagacatagcgtatatgt

SEQ ID NO: 59501 - DNA, 25 bp, Probe sequence
attccatagatatcatcgattacat

SEQ ID NO: 59502 - DNA, 25 bp, Probe sequence
gactaaagacatagcgtatatgttt

SEQ ID NO: 59503 - DNA, 25 bp, Probe sequence
cgattacattatcaattctatcgaa

SEQ ID NO: 59504 - DNA, 25 bp, Probe sequence
tcacatatacactatgtctttcttt

SEQ ID NO: 59505 - DNA, 25 bp, Probe sequence
ttcacatatacactatgtctttctt

SEQ ID NO: 59506 - DNA, 25 bp, Probe sequence
actaaagacatagcgtatatgttta

SEQ ID NO: 59507 - DNA, 25 bp, Probe sequence
agtatgtgcgctgagtatatattct

SEQ ID NO: 59508 - DNA, 25 bp, Probe sequence
gtatgtgcgctgagtatatattctt

SEQ ID NO: 59509 - DNA, 25 bp, Probe sequence
aagtatgtgcgctgagtatatattc

SEQ ID NO: 59510 - DNA, 25 bp, Probe sequence
tgtgcgctgagtatatattcttatt

SEQ ID NO: 59511 - DNA, 25 bp, Probe sequence
atgtgcgctgagtatatattcttat

SEQ ID NO: 59512 - DNA, 25 bp, Probe sequence
tatgtgcgctgagtatatattctta

SEQ ID NO: 59513 - DNA, 25 bp, Probe sequence
aaagtatgtgcgctgagtatatatt

SEQ ID NO: 59514 - DNA, 25 bp, Probe sequence
aaatgttaatagaaaagtatgtgcg

SEQ ID NO: 59515 - DNA, 25 bp, Probe sequence
tttaaatttacgaaacgaggtaaca

SEQ ID NO: 59516 - DNA, 25 bp, Probe sequence
agaatatatactcagcgcacatact

SEQ ID NO: 59517 - DNA, 25 bp, Probe sequence
gaatatatactcagcgcacatactt

SEQ ID NO: 59518 - DNA, 25 bp, Probe sequence
aagaatatatactcagcgcacatac

SEQ ID NO: 59519 - DNA, 25 bp, Probe sequence
aataagaatatatactcagcgcaca

SEQ ID NO: 59520 - DNA, 25 bp, Probe sequence
ataagaatatatactcagcgcacat

SEQ ID NO: 59521 - DNA, 25 bp, Probe sequence
taagaatatatactcagcgcacata

SEQ ID NO: 59522 - DNA, 25 bp, Probe sequence
aatatatactcagcgcacatacttt

SEQ ID NO: 59523 - DNA, 25 bp, Probe sequence
cgcacatacttttctattaacattt

SEQ ID NO: 59524 - DNA, 25 bp, Probe sequence
tgttacctcgtttcgtaaatttaaa

SEQ ID NO: 59525 - DNA, 25 bp, Probe sequence
gagattactgttgtgagcaatgtta

SEQ ID NO: 59526 - DNA, 25 bp, Probe sequence
tgagattactgttgtgagcaatgtt

SEQ ID NO: 59527 - DNA, 25 bp, Probe sequence
ttgagattactgttgtgagcaatgt

SEQ ID NO: 59528 - DNA, 25 bp, Probe sequence
agattactgttgtgagcaatgttat

SEQ ID NO: 59529 - DNA, 25 bp, Probe sequence
gattactgttgtgagcaatgttatt

SEQ ID NO: 59530 - DNA, 25 bp, Probe sequence
ttctaatgcaccaatagtaagcctt

SEQ ID NO: 59531 - DNA, 25 bp, Probe sequence
taagcctttgagattactgttgtga

SEQ ID NO: 59532 - DNA, 25 bp, Probe sequence
gttctaatgcaccaatagtaagcct

SEQ ID NO: 59533 - DNA, 25 bp, Probe sequence
tgttctaatgcaccaatagtaagcc

SEQ ID NO: 59534 - DNA, 25 bp, Probe sequence
taacattgctcacaacagtaatctc

SEQ ID NO: 59535 - DNA, 25 bp, Probe sequence
acattgctcacaacagtaatctcaa

SEQ ID NO: 59536 - DNA, 25 bp, Probe sequence
aacattgctcacaacagtaatctca

SEQ ID NO: 59537 - DNA, 25 bp, Probe sequence
ataacattgctcacaacagtaatct

SEQ ID NO: 59538 - DNA, 25 bp, Probe sequence
aataacattgctcacaacagtaatc

SEQ ID NO: 59539 - DNA, 25 bp, Probe sequence
aaggcttactattggtgcattagaa

SEQ ID NO: 59540 - DNA, 25 bp, Probe sequence
tcacaacagtaatctcaaaggctta

SEQ ID NO: 59541 - DNA, 25 bp, Probe sequence
aggcttactattggtgcattagaac

SEQ ID NO: 59542 - DNA, 25 bp, Probe sequence
ggcttactattggtgcattagaaca

SEQ ID NO: 59543 - DNA, 25 bp, Probe sequence
tgattaacttaaccaggtccatgtg

SEQ ID NO: 59544 - DNA, 25 bp, Probe sequence
atgattaacttaaccaggtccatgt

SEQ ID NO: 59545 - DNA, 25 bp, Probe sequence
tatgattaacttaaccaggtccatg

SEQ ID NO: 59546 - DNA, 25 bp, Probe sequence
gattaacttaaccaggtccatgtgg

SEQ ID NO: 59547 - DNA, 25 bp, Probe sequence
attaacttaaccaggtccatgtggc

SEQ ID NO: 59548 - DNA, 25 bp, Probe sequence
gcaatttaatttgttacagaaatgt

SEQ ID NO: 59549 - DNA, 25 bp, Probe sequence
agatgcaatttaatttgttacagaa

SEQ ID NO: 59550 - DNA, 25 bp, Probe sequence
aggaatagatgcaatttaatttgtt

SEQ ID NO: 59551 - DNA, 25 bp, Probe sequence
aaggaatagatgcaatttaatttgt

SEQ ID NO: 59552 - DNA, 25 bp, Probe sequence
cacatggacctggttaagttaatca

SEQ ID NO: 59553 - DNA, 25 bp, Probe sequence
acatggacctggttaagttaatcat

SEQ ID NO: 59554 - DNA, 25 bp, Probe sequence
catggacctggttaagttaatcata

SEQ ID NO: 59555 - DNA, 25 bp, Probe sequence
ccacatggacctggttaagttaatc

SEQ ID NO: 59556 - DNA, 25 bp, Probe sequence
gccacatggacctggttaagttaat

SEQ ID NO: 59557 - DNA, 25 bp, Probe sequence
acatttctgtaacaaattaaattgc

SEQ ID NO: 59558 - DNA, 25 bp, Probe sequence
ttctgtaacaaattaaattgcatct

SEQ ID NO: 59559 - DNA, 25 bp, Probe sequence
acaaattaaattgcatctattcctt

SEQ ID NO: 59560 - DNA, 25 bp, Probe sequence
aacaaattaaattgcatctattcct

SEQ ID NO: 59561 - DNA, 25 bp, Probe sequence
agcaattaaacacagtatcaaacca

SEQ ID NO: 59562 - DNA, 25 bp, Probe sequence
gcaattaaacacagtatcaaaccat

SEQ ID NO: 59563 - DNA, 25 bp, Probe sequence
aagcaattaaacacagtatcaaacc

SEQ ID NO: 59564 - DNA, 25 bp, Probe sequence
aaagcaattaaacacagtatcaaac

SEQ ID NO: 59565 - DNA, 25 bp, Probe sequence
caattaaacacagtatcaaaccatt

SEQ ID NO: 59566 - DNA, 25 bp, Probe sequence
aagtacaaacgaataagaaaagcaa

SEQ ID NO: 59567 - DNA, 25 bp, Probe sequence
aaagtacaaacgaataagaaaagca

SEQ ID NO: 59568 - DNA, 25 bp, Probe sequence
aattaaacacagtatcaaaccattt

SEQ ID NO: 59569 - DNA, 25 bp, Probe sequence
agtacaaacgaataagaaaagcaat

SEQ ID NO: 59570 - DNA, 25 bp, Probe sequence
tggtttgatactgtgtttaattgct

SEQ ID NO: 59571 - DNA, 25 bp, Probe sequence
atggtttgatactgtgtttaattgc

SEQ ID NO: 59572 - DNA, 25 bp, Probe sequence
ggtttgatactgtgtttaattgctt

SEQ ID NO: 59573 - DNA, 25 bp, Probe sequence
gtttgatactgtgtttaattgcttt

SEQ ID NO: 59574 - DNA, 25 bp, Probe sequence
aatggtttgatactgtgtttaattg

SEQ ID NO: 59575 - DNA, 25 bp, Probe sequence
tgcttttcttattcgtttgtacttt

SEQ ID NO: 59576 - DNA, 25 bp, Probe sequence
ttgcttttcttattcgtttgtactt

SEQ ID NO: 59577 - DNA, 25 bp, Probe sequence
aaatggtttgatactgtgtttaatt

SEQ ID NO: 59578 - DNA, 25 bp, Probe sequence
attgcttttcttattcgtttgtact

SEQ ID NO: 59579 - DNA, 25 bp, Probe sequence
acggaataaaacttatatgaggcga

SEQ ID NO: 59580 - DNA, 25 bp, Probe sequence
cggaataaaacttatatgaggcgat

SEQ ID NO: 59581 - DNA, 25 bp, Probe sequence
tacggaataaaacttatatgaggcg

SEQ ID NO: 59582 - DNA, 25 bp, Probe sequence
tgattacacatgcaatagatgtatt

SEQ ID NO: 59583 - DNA, 25 bp, Probe sequence
ttatgattacacatgcaatagatgt

SEQ ID NO: 59584 - DNA, 25 bp, Probe sequence
atacggaataaaacttatatgaggc

SEQ ID NO: 59585 - DNA, 25 bp, Probe sequence
atgattacacatgcaatagatgtat

SEQ ID NO: 59586 - DNA, 25 bp, Probe sequence
ggaataaaacttatatgaggcgata

SEQ ID NO: 59587 - DNA, 25 bp, Probe sequence
tttatgattacacatgcaatagatg

SEQ ID NO: 59588 - DNA, 25 bp, Probe sequence
tcgcctcatataagttttattccgt

SEQ ID NO: 59589 - DNA, 25 bp, Probe sequence
atcgcctcatataagttttattccg

SEQ ID NO: 59590 - DNA, 25 bp, Probe sequence
cgcctcatataagttttattccgta

SEQ ID NO: 59591 - DNA, 25 bp, Probe sequence
acatctattgcatgtgtaatcataa

SEQ ID NO: 59592 - DNA, 25 bp, Probe sequence
aatacatctattgcatgtgtaatca

SEQ ID NO: 59593 - DNA, 25 bp, Probe sequence
gcctcatataagttttattccgtat

SEQ ID NO: 59594 - DNA, 25 bp, Probe sequence
atacatctattgcatgtgtaatcat

SEQ ID NO: 59595 - DNA, 25 bp, Probe sequence
tatcgcctcatataagttttattcc

SEQ ID NO: 59596 - DNA, 25 bp, Probe sequence
catctattgcatgtgtaatcataaa

SEQ ID NO: 59597 - DNA, 25 bp, Probe sequence
agttaaatgacataggaaaacgctt

SEQ ID NO: 59598 - DNA, 25 bp, Probe sequence
gttaaatgacataggaaaacgcttt

SEQ ID NO: 59599 - DNA, 25 bp, Probe sequence
tagttaaatgacataggaaaacgct

SEQ ID NO: 59600 - DNA, 25 bp, Probe sequence
agaatcatctatttaacaaacaacg

SEQ ID NO: 59601 - DNA, 25 bp, Probe sequence
ttagttaaatgacataggaaaacgc

SEQ ID NO: 59602 - DNA, 25 bp, Probe sequence
gaatcatctatttaacaaacaacgt

SEQ ID NO: 59603 - DNA, 25 bp, Probe sequence
ttaaatgacataggaaaacgctttt

SEQ ID NO: 59604 - DNA, 25 bp, Probe sequence
caacgttcatacgaacttacatgtt

SEQ ID NO: 59605 - DNA, 25 bp, Probe sequence
aacaacgttcatacgaacttacatg

SEQ ID NO: 59606 - DNA, 25 bp, Probe sequence
aagcgttttcctatgtcatttaact

SEQ ID NO: 59607 - DNA, 25 bp, Probe sequence
aaagcgttttcctatgtcatttaac

SEQ ID NO: 59608 - DNA, 25 bp, Probe sequence
agcgttttcctatgtcatttaacta

SEQ ID NO: 59609 - DNA, 25 bp, Probe sequence
cgttgtttgttaaatagatgattct

SEQ ID NO: 59610 - DNA, 25 bp, Probe sequence
gcgttttcctatgtcatttaactaa

SEQ ID NO: 59611 - DNA, 25 bp, Probe sequence
acgttgtttgttaaatagatgattc

SEQ ID NO: 59612 - DNA, 25 bp, Probe sequence
aaaagcgttttcctatgtcatttaa

SEQ ID NO: 59613 - DNA, 25 bp, Probe sequence
catgtaagttcgtatgaacgttgtt

SEQ ID NO: 59614 - DNA, 25 bp, Probe sequence
aacatgtaagttcgtatgaacgttg

SEQ ID NO: 59615 - DNA, 25 bp, Probe sequence
cgttcactccttacactatcaatgt

SEQ ID NO: 59616 - DNA, 25 bp, Probe sequence
gttcactccttacactatcaatgtg

SEQ ID NO: 59617 - DNA, 25 bp, Probe sequence
acgttcactccttacactatcaatg

SEQ ID NO: 59618 - DNA, 25 bp, Probe sequence
cacgttcactccttacactatcaat

SEQ ID NO: 59619 - DNA, 25 bp, Probe sequence
atgtattaaatttgtggaggcatgt

SEQ ID NO: 59620 - DNA, 25 bp, Probe sequence
tgtattaaatttgtggaggcatgta

SEQ ID NO: 59621 - DNA, 25 bp, Probe sequence
attaaatttgtggaggcatgtaaac

SEQ ID NO: 59622 - DNA, 25 bp, Probe sequence
ttaaatttgtggaggcatgtaaaca

SEQ ID NO: 59623 - DNA, 25 bp, Probe sequence
aatgtattaaatttgtggaggcatg

SEQ ID NO: 59624 - DNA, 25 bp, Probe sequence
acattgatagtgtaaggagtgaacg

SEQ ID NO: 59625 - DNA, 25 bp, Probe sequence
cacattgatagtgtaaggagtgaac

SEQ ID NO: 59626 - DNA, 25 bp, Probe sequence
attgatagtgtaaggagtgaacgtg

SEQ ID NO: 59627 - DNA, 25 bp, Probe sequence
cattgatagtgtaaggagtgaacgt

SEQ ID NO: 59628 - DNA, 25 bp, Probe sequence
acatgcctccacaaatttaatacat

SEQ ID NO: 59629 - DNA, 25 bp, Probe sequence
tacatgcctccacaaatttaataca

SEQ ID NO: 59630 - DNA, 25 bp, Probe sequence
gtttacatgcctccacaaatttaat

SEQ ID NO: 59631 - DNA, 25 bp, Probe sequence
tgtttacatgcctccacaaatttaa

SEQ ID NO: 59632 - DNA, 25 bp, Probe sequence
catgcctccacaaatttaatacatt

SEQ ID NO: 59633 - DNA, 25 bp, Probe sequence
taattaagaaatgcctcgggaaagg

SEQ ID NO: 59634 - DNA, 25 bp, Probe sequence
attaagaaatgcctcgggaaaggtt

SEQ ID NO: 59635 - DNA, 25 bp, Probe sequence
aattaagaaatgcctcgggaaaggt

SEQ ID NO: 59636 - DNA, 25 bp, Probe sequence
gtttaattaagaaatgcctcgggaa

SEQ ID NO: 59637 - DNA, 25 bp, Probe sequence
atgtttaattaagaaatgcctcggg

SEQ ID NO: 59638 - DNA, 25 bp, Probe sequence
ttaattaagaaatgcctcgggaaag

SEQ ID NO: 59639 - DNA, 25 bp, Probe sequence
ttaagaaatgcctcgggaaaggttc

SEQ ID NO: 59640 - DNA, 25 bp, Probe sequence
tgtttaattaagaaatgcctcggga

SEQ ID NO: 59641 - DNA, 25 bp, Probe sequence
tttaattaagaaatgcctcgggaaa

SEQ ID NO: 59642 - DNA, 25 bp, Probe sequence
cctttcccgaggcatttcttaatta

SEQ ID NO: 59643 - DNA, 25 bp, Probe sequence
acctttcccgaggcatttcttaatt

SEQ ID NO: 59644 - DNA, 25 bp, Probe sequence
aacctttcccgaggcatttcttaat

SEQ ID NO: 59645 - DNA, 25 bp, Probe sequence
cccgaggcatttcttaattaaacat

SEQ ID NO: 59646 - DNA, 25 bp, Probe sequence
ttcccgaggcatttcttaattaaac

SEQ ID NO: 59647 - DNA, 25 bp, Probe sequence
ctttcccgaggcatttcttaattaa

SEQ ID NO: 59648 - DNA, 25 bp, Probe sequence
tcccgaggcatttcttaattaaaca

SEQ ID NO: 59649 - DNA, 25 bp, Probe sequence
gaacctttcccgaggcatttcttaa

SEQ ID NO: 59650 - DNA, 25 bp, Probe sequence
tttcccgaggcatttcttaattaaa

SEQ ID NO: 59651 - DNA, 25 bp, Probe sequence
agatagtcgataatatgatgcctag

SEQ ID NO: 59652 - DNA, 25 bp, Probe sequence
aagatagtcgataatatgatgccta

SEQ ID NO: 59653 - DNA, 25 bp, Probe sequence
aaagatagtcgataatatgatgcct

SEQ ID NO: 59654 - DNA, 25 bp, Probe sequence
atcaataataaacgaataggggtgt

SEQ ID NO: 59655 - DNA, 25 bp, Probe sequence
gatagtcgataatatgatgcctagg

SEQ ID NO: 59656 - DNA, 25 bp, Probe sequence
tcaataataaacgaataggggtgtt

SEQ ID NO: 59657 - DNA, 25 bp, Probe sequence
taaagatagtcgataatatgatgcc

SEQ ID NO: 59658 - DNA, 25 bp, Probe sequence
caataataaacgaataggggtgtta

SEQ ID NO: 59659 - DNA, 25 bp, Probe sequence
tatcaataataaacgaataggggtg

SEQ ID NO: 59660 - DNA, 25 bp, Probe sequence
ctaggcatcatattatcgactatct

SEQ ID NO: 59661 - DNA, 25 bp, Probe sequence
taggcatcatattatcgactatctt

SEQ ID NO: 59662 - DNA, 25 bp, Probe sequence
aggcatcatattatcgactatcttt

SEQ ID NO: 59663 - DNA, 25 bp, Probe sequence
acacccctattcgtttattattgat

SEQ ID NO: 59664 - DNA, 25 bp, Probe sequence
cctaggcatcatattatcgactatc

SEQ ID NO: 59665 - DNA, 25 bp, Probe sequence
aacacccctattcgtttattattga

SEQ ID NO: 59666 - DNA, 25 bp, Probe sequence
ggcatcatattatcgactatcttta

SEQ ID NO: 59667 - DNA, 25 bp, Probe sequence
taacacccctattcgtttattattg

SEQ ID NO: 59668 - DNA, 25 bp, Probe sequence
cacccctattcgtttattattgata

SEQ ID NO: 59669 - DNA, 25 bp, Probe sequence
aagagtgatgtctgattcgttgatc

SEQ ID NO: 59670 - DNA, 25 bp, Probe sequence
catgaagttgtgtgctatcgctatt

SEQ ID NO: 59671 - DNA, 25 bp, Probe sequence
atgaagttgtgtgctatcgctattt

SEQ ID NO: 59672 - DNA, 25 bp, Probe sequence
taaagagtgatgtctgattcgttga

SEQ ID NO: 59673 - DNA, 25 bp, Probe sequence
atgatgaggaaagtagtgatagcat

SEQ ID NO: 59674 - DNA, 25 bp, Probe sequence
tatgatgaggaaagtagtgatagca

SEQ ID NO: 59675 - DNA, 25 bp, Probe sequence
aaagagtgatgtctgattcgttgat

SEQ ID NO: 59676 - DNA, 25 bp, Probe sequence
ttaaagagtgatgtctgattcgttg

SEQ ID NO: 59677 - DNA, 25 bp, Probe sequence
tgatgaggaaagtagtgatagcata

SEQ ID NO: 59678 - DNA, 25 bp, Probe sequence
gatcaacgaatcagacatcactctt

SEQ ID NO: 59679 - DNA, 25 bp, Probe sequence
aatagcgatagcacacaacttcatg

SEQ ID NO: 59680 - DNA, 25 bp, Probe sequence
aaatagcgatagcacacaacttcat

SEQ ID NO: 59681 - DNA, 25 bp, Probe sequence
tcaacgaatcagacatcactcttta

SEQ ID NO: 59682 - DNA, 25 bp, Probe sequence
atgctatcactactttcctcatcat

SEQ ID NO: 59683 - DNA, 25 bp, Probe sequence
tgctatcactactttcctcatcata

SEQ ID NO: 59684 - DNA, 25 bp, Probe sequence
atcaacgaatcagacatcactcttt

SEQ ID NO: 59685 - DNA, 25 bp, Probe sequence
caacgaatcagacatcactctttaa

SEQ ID NO: 59686 - DNA, 25 bp, Probe sequence
tatgctatcactactttcctcatca

SEQ ID NO: 59687 - DNA, 25 bp, Probe sequence
attgagaactgtaattagccgtaat

SEQ ID NO: 59688 - DNA, 25 bp, Probe sequence
aattgagaactgtaattagccgtaa

SEQ ID NO: 59689 - DNA, 25 bp, Probe sequence
tgagaactgtaattagccgtaataa

SEQ ID NO: 59690 - DNA, 25 bp, Probe sequence
ttgagaactgtaattagccgtaata

SEQ ID NO: 59691 - DNA, 25 bp, Probe sequence
tcttgctattgaaatgttaggatgt

SEQ ID NO: 59692 - DNA, 25 bp, Probe sequence
ctcttgctattgaaatgttaggatg

SEQ ID NO: 59693 - DNA, 25 bp, Probe sequence
tgtccaacgcaattaatattgagac

SEQ ID NO: 59694 - DNA, 25 bp, Probe sequence
tctcttgctattgaaatgttaggat

SEQ ID NO: 59695 - DNA, 25 bp, Probe sequence
gtccaacgcaattaatattgagact

SEQ ID NO: 59696 - DNA, 25 bp, Probe sequence
attacggctaattacagttctcaat

SEQ ID NO: 59697 - DNA, 25 bp, Probe sequence
ttacggctaattacagttctcaatt

SEQ ID NO: 59698 - DNA, 25 bp, Probe sequence
tattacggctaattacagttctcaa

SEQ ID NO: 59699 - DNA, 25 bp, Probe sequence
ttattacggctaattacagttctca

SEQ ID NO: 59700 - DNA, 25 bp, Probe sequence
acatcctaacatttcaatagcaaga

SEQ ID NO: 59701 - DNA, 25 bp, Probe sequence
catcctaacatttcaatagcaagag

SEQ ID NO: 59702 - DNA, 25 bp, Probe sequence
gtctcaatattaattgcgttggaca

SEQ ID NO: 59703 - DNA, 25 bp, Probe sequence
atcctaacatttcaatagcaagaga

SEQ ID NO: 59704 - DNA, 25 bp, Probe sequence
tcctaacatttcaatagcaagagaa

SEQ ID NO: 59705 - DNA, 25 bp, Probe sequence
tctggattattggaacgattagtca

SEQ ID NO: 59706 - DNA, 25 bp, Probe sequence
ttctggattattggaacgattagtc

SEQ ID NO: 59707 - DNA, 25 bp, Probe sequence
ctggattattggaacgattagtcaa

SEQ ID NO: 59708 - DNA, 25 bp, Probe sequence
ggaacagagatgaatataggttacg

SEQ ID NO: 59709 - DNA, 25 bp, Probe sequence
attctggattattggaacgattagt

SEQ ID NO: 59710 - DNA, 25 bp, Probe sequence
gcatgaacgcatattaattaggaga

SEQ ID NO: 59711 - DNA, 25 bp, Probe sequence
attgggaacagagatgaatataggt

SEQ ID NO: 59712 - DNA, 25 bp, Probe sequence
aattctggattattggaacgattag

SEQ ID NO: 59713 - DNA, 25 bp, Probe sequence
ttgggaacagagatgaatataggtt

SEQ ID NO: 59714 - DNA, 25 bp, Probe sequence
tgactaatcgttccaataatccaga

SEQ ID NO: 59715 - DNA, 25 bp, Probe sequence
gactaatcgttccaataatccagaa

SEQ ID NO: 59716 - DNA, 25 bp, Probe sequence
ttgactaatcgttccaataatccag

SEQ ID NO: 59717 - DNA, 25 bp, Probe sequence
cgtaacctatattcatctctgttcc

SEQ ID NO: 59718 - DNA, 25 bp, Probe sequence
actaatcgttccaataatccagaat

SEQ ID NO: 59719 - DNA, 25 bp, Probe sequence
tctcctaattaatatgcgttcatgc

SEQ ID NO: 59720 - DNA, 25 bp, Probe sequence
acctatattcatctctgttcccaat

SEQ ID NO: 59721 - DNA, 25 bp, Probe sequence
ctaatcgttccaataatccagaatt

SEQ ID NO: 59722 - DNA, 25 bp, Probe sequence
aacctatattcatctctgttcccaa

SEQ ID NO: 59723 - DNA, 25 bp, Probe sequence
taagtggtgtggctaataatgttga

SEQ ID NO: 59724 - DNA, 25 bp, Probe sequence
agtggtgtggctaataatgttgatt

SEQ ID NO: 59725 - DNA, 25 bp, Probe sequence
aagtggtgtggctaataatgttgat

SEQ ID NO: 59726 - DNA, 25 bp, Probe sequence
ttaagtggtgtggctaataatgttg

SEQ ID NO: 59727 - DNA, 25 bp, Probe sequence
agaggtattgagcatatagatgagt

SEQ ID NO: 59728 - DNA, 25 bp, Probe sequence
gaggtattgagcatatagatgagtt

SEQ ID NO: 59729 - DNA, 25 bp, Probe sequence
atatgattagagaggcatctatcgc

SEQ ID NO: 59730 - DNA, 25 bp, Probe sequence
tatgattagagaggcatctatcgca

SEQ ID NO: 59731 - DNA, 25 bp, Probe sequence
gtggtgtggctaataatgttgattt

SEQ ID NO: 59732 - DNA, 25 bp, Probe sequence
tcaacattattagccacaccactta

SEQ ID NO: 59733 - DNA, 25 bp, Probe sequence
atcaacattattagccacaccactt

SEQ ID NO: 59734 - DNA, 25 bp, Probe sequence
aatcaacattattagccacaccact

SEQ ID NO: 59735 - DNA, 25 bp, Probe sequence
caacattattagccacaccacttaa

SEQ ID NO: 59736 - DNA, 25 bp, Probe sequence
actcatctatatgctcaatacctct

SEQ ID NO: 59737 - DNA, 25 bp, Probe sequence
aactcatctatatgctcaatacctc

SEQ ID NO: 59738 - DNA, 25 bp, Probe sequence
gcgatagatgcctctctaatcatat

SEQ ID NO: 59739 - DNA, 25 bp, Probe sequence
tgcgatagatgcctctctaatcata

SEQ ID NO: 59740 - DNA, 25 bp, Probe sequence
aaatcaacattattagccacaccac

SEQ ID NO: 59741 - DNA, 25 bp, Probe sequence
tgagcttcactcctacataataata

SEQ ID NO: 59742 - DNA, 25 bp, Probe sequence
aaaatatgtcctgaggtgagattga

SEQ ID NO: 59743 - DNA, 25 bp, Probe sequence
tgttaaaatatgtcctgaggtgaga

SEQ ID NO: 59744 - DNA, 25 bp, Probe sequence
atgttaaaatatgtcctgaggtgag

SEQ ID NO: 59745 - DNA, 25 bp, Probe sequence
taaaatatgtcctgaggtgagattg

SEQ ID NO: 59746 - DNA, 25 bp, Probe sequence
gttaaaatatgtcctgaggtgagat

SEQ ID NO: 59747 - DNA, 25 bp, Probe sequence
gcttcactcctacataataatattg

SEQ ID NO: 59748 - DNA, 25 bp, Probe sequence
ttaaaatatgtcctgaggtgagatt

SEQ ID NO: 59749 - DNA, 25 bp, Probe sequence
gagcttcactcctacataataatat

SEQ ID NO: 59750 - DNA, 25 bp, Probe sequence
tattattatgtaggagtgaagctca

SEQ ID NO: 59751 - DNA, 25 bp, Probe sequence
tcaatctcacctcaggacatatttt

SEQ ID NO: 59752 - DNA, 25 bp, Probe sequence
tctcacctcaggacatattttaaca

SEQ ID NO: 59753 - DNA, 25 bp, Probe sequence
ctcacctcaggacatattttaacat

SEQ ID NO: 59754 - DNA, 25 bp, Probe sequence
atctcacctcaggacatattttaac

SEQ ID NO: 59755 - DNA, 25 bp, Probe sequence
caatctcacctcaggacatatttta

SEQ ID NO: 59756 - DNA, 25 bp, Probe sequence
caatattattatgtaggagtgaagc

SEQ ID NO: 59757 - DNA, 25 bp, Probe sequence
aatctcacctcaggacatattttaa

SEQ ID NO: 59758 - DNA, 25 bp, Probe sequence
atattattatgtaggagtgaagctc

SEQ ID NO: 59759 - DNA, 25 bp, Probe sequence
atgttggttaataatcaagacgcat

SEQ ID NO: 59760 - DNA, 25 bp, Probe sequence
tgttggttaataatcaagacgcata

SEQ ID NO: 59761 - DNA, 25 bp, Probe sequence
tatgttggttaataatcaagacgca

SEQ ID NO: 59762 - DNA, 25 bp, Probe sequence
gtatgttggttaataatcaagacgc

SEQ ID NO: 59763 - DNA, 25 bp, Probe sequence
gttggttaataatcaagacgcatat

SEQ ID NO: 59764 - DNA, 25 bp, Probe sequence
tggttaataatcaagacgcatatac

SEQ ID NO: 59765 - DNA, 25 bp, Probe sequence
agtatgttggttaataatcaagacg

SEQ ID NO: 59766 - DNA, 25 bp, Probe sequence
ggttaataatcaagacgcatatact

SEQ ID NO: 59767 - DNA, 25 bp, Probe sequence
ttggttaataatcaagacgcatata

SEQ ID NO: 59768 - DNA, 25 bp, Probe sequence
atgcgtcttgattattaaccaacat

SEQ ID NO: 59769 - DNA, 25 bp, Probe sequence
tgcgtcttgattattaaccaacata

SEQ ID NO: 59770 - DNA, 25 bp, Probe sequence
tatgcgtcttgattattaaccaaca

SEQ ID NO: 59771 - DNA, 25 bp, Probe sequence
gcgtcttgattattaaccaacatac

SEQ ID NO: 59772 - DNA, 25 bp, Probe sequence
atatgcgtcttgattattaaccaac

SEQ ID NO: 59773 - DNA, 25 bp, Probe sequence
gtatatgcgtcttgattattaacca

SEQ ID NO: 59774 - DNA, 25 bp, Probe sequence
cgtcttgattattaaccaacatact

SEQ ID NO: 59775 - DNA, 25 bp, Probe sequence
agtatatgcgtcttgattattaacc

SEQ ID NO: 59776 - DNA, 25 bp, Probe sequence
tatatgcgtcttgattattaaccaa

SEQ ID NO: 59777 - DNA, 25 bp, Probe sequence
gtatagaataccttcgaggtgagtt

SEQ ID NO: 59778 - DNA, 25 bp, Probe sequence
ggtatagaataccttcgaggtgagt

SEQ ID NO: 59779 - DNA, 25 bp, Probe sequence
acaaactcatcttttgggtatagaa

SEQ ID NO: 59780 - DNA, 25 bp, Probe sequence
agttacaaactcatcttttgggtat

SEQ ID NO: 59781 - DNA, 25 bp, Probe sequence
tatagaataccttcgaggtgagttt

SEQ ID NO: 59782 - DNA, 25 bp, Probe sequence
tacaaactcatcttttgggtataga

SEQ ID NO: 59783 - DNA, 25 bp, Probe sequence
aactcatcttttgggtatagaatac

SEQ ID NO: 59784 - DNA, 25 bp, Probe sequence
aaactcatcttttgggtatagaata

SEQ ID NO: 59785 - DNA, 25 bp, Probe sequence
caaactcatcttttgggtatagaat

SEQ ID NO: 59786 - DNA, 25 bp, Probe sequence
aactcacctcgaaggtattctatac

SEQ ID NO: 59787 - DNA, 25 bp, Probe sequence
actcacctcgaaggtattctatacc

SEQ ID NO: 59788 - DNA, 25 bp, Probe sequence
ttctatacccaaaagatgagtttgt

SEQ ID NO: 59789 - DNA, 25 bp, Probe sequence
atacccaaaagatgagtttgtaact

SEQ ID NO: 59790 - DNA, 25 bp, Probe sequence
aaactcacctcgaaggtattctata

SEQ ID NO: 59791 - DNA, 25 bp, Probe sequence
tctatacccaaaagatgagtttgta

SEQ ID NO: 59792 - DNA, 25 bp, Probe sequence
gtattctatacccaaaagatgagtt

SEQ ID NO: 59793 - DNA, 25 bp, Probe sequence
attctatacccaaaagatgagtttg

SEQ ID NO: 59794 - DNA, 25 bp, Probe sequence
tattctatacccaaaagatgagttt

SEQ ID NO: 59795 - DNA, 25 bp, Probe sequence
cacaatataccttcttcattcggag

SEQ ID NO: 59796 - DNA, 25 bp, Probe sequence
atcgcacaatataccttcttcattc

SEQ ID NO: 59797 - DNA, 25 bp, Probe sequence
gcacaatataccttcttcattcgga

SEQ ID NO: 59798 - DNA, 25 bp, Probe sequence
aatcgcacaatataccttcttcatt

SEQ ID NO: 59799 - DNA, 25 bp, Probe sequence
gaatcgcacaatataccttcttcat

SEQ ID NO: 59800 - DNA, 25 bp, Probe sequence
tcgcacaatataccttcttcattcg

SEQ ID NO: 59801 - DNA, 25 bp, Probe sequence
cgcacaatataccttcttcattcgg

SEQ ID NO: 59802 - DNA, 25 bp, Probe sequence
acaatataccttcttcattcggagg

SEQ ID NO: 59803 - DNA, 25 bp, Probe sequence
caatataccttcttcattcggaggc

SEQ ID NO: 59804 - DNA, 25 bp, Probe sequence
gaatgaagaaggtatattgtgcgat

SEQ ID NO: 59805 - DNA, 25 bp, Probe sequence
ctccgaatgaagaaggtatattgtg

SEQ ID NO: 59806 - DNA, 25 bp, Probe sequence
tccgaatgaagaaggtatattgtgc

SEQ ID NO: 59807 - DNA, 25 bp, Probe sequence
aatgaagaaggtatattgtgcgatt

SEQ ID NO: 59808 - DNA, 25 bp, Probe sequence
atgaagaaggtatattgtgcgattc

SEQ ID NO: 59809 - DNA, 25 bp, Probe sequence
cgaatgaagaaggtatattgtgcga

SEQ ID NO: 59810 - DNA, 25 bp, Probe sequence
ccgaatgaagaaggtatattgtgcg

SEQ ID NO: 59811 - DNA, 25 bp, Probe sequence
cctccgaatgaagaaggtatattgt

SEQ ID NO: 59812 - DNA, 25 bp, Probe sequence
gcctccgaatgaagaaggtatattg

SEQ ID NO: 59813 - DNA, 25 bp, Probe sequence
acgggaatatactgaagataaacga

SEQ ID NO: 59814 - DNA, 25 bp, Probe sequence
cgggaatatactgaagataaacgaa

SEQ ID NO: 59815 - DNA, 25 bp, Probe sequence
gcgactgtataatttctattgaggt

SEQ ID NO: 59816 - DNA, 25 bp, Probe sequence
agtgatagtagttaaagttctccca

SEQ ID NO: 59817 - DNA, 25 bp, Probe sequence
gatagtagttaaagttctcccaagg

SEQ ID NO: 59818 - DNA, 25 bp, Probe sequence
agcgactgtataatttctattgagg

SEQ ID NO: 59819 - DNA, 25 bp, Probe sequence
tacgggaatatactgaagataaacg

SEQ ID NO: 59820 - DNA, 25 bp, Probe sequence
gtgatagtagttaaagttctcccaa

SEQ ID NO: 59821 - DNA, 25 bp, Probe sequence
tgatagtagttaaagttctcccaag

SEQ ID NO: 59822 - DNA, 25 bp, Probe sequence
tcgtttatcttcagtatattcccgt

SEQ ID NO: 59823 - DNA, 25 bp, Probe sequence
ttcgtttatcttcagtatattcccg

SEQ ID NO: 59824 - DNA, 25 bp, Probe sequence
acctcaatagaaattatacagtcgc

SEQ ID NO: 59825 - DNA, 25 bp, Probe sequence
tgggagaactttaactactatcact

SEQ ID NO: 59826 - DNA, 25 bp, Probe sequence
ccttgggagaactttaactactatc

SEQ ID NO: 59827 - DNA, 25 bp, Probe sequence
cctcaatagaaattatacagtcgct

SEQ ID NO: 59828 - DNA, 25 bp, Probe sequence
cgtttatcttcagtatattcccgta

SEQ ID NO: 59829 - DNA, 25 bp, Probe sequence
ttgggagaactttaactactatcac

SEQ ID NO: 59830 - DNA, 25 bp, Probe sequence
cttgggagaactttaactactatca

SEQ ID NO: 59831 - DNA, 25 bp, Probe sequence
ttatgattacaaattggtgacgtgg

SEQ ID NO: 59832 - DNA, 25 bp, Probe sequence
attggtgacgtggcattatgaaata

SEQ ID NO: 59833 - DNA, 25 bp, Probe sequence
ttacaaattggtgacgtggcattat

SEQ ID NO: 59834 - DNA, 25 bp, Probe sequence
attacaaattggtgacgtggcatta

SEQ ID NO: 59835 - DNA, 25 bp, Probe sequence
tggtgacgtggcattatgaaataaa

SEQ ID NO: 59836 - DNA, 25 bp, Probe sequence
ttggtgacgtggcattatgaaataa

SEQ ID NO: 59837 - DNA, 25 bp, Probe sequence
aattggtgacgtggcattatgaaat

SEQ ID NO: 59838 - DNA, 25 bp, Probe sequence
attatgattacaaattggtgacgtg

SEQ ID NO: 59839 - DNA, 25 bp, Probe sequence
tcataaagcaaaggggtaacgataa

SEQ ID NO: 59840 - DNA, 25 bp, Probe sequence
ccacgtcaccaatttgtaatcataa

SEQ ID NO: 59841 - DNA, 25 bp, Probe sequence
tatttcataatgccacgtcaccaat

SEQ ID NO: 59842 - DNA, 25 bp, Probe sequence
taatgccacgtcaccaatttgtaat

SEQ ID NO: 59843 - DNA, 25 bp, Probe sequence
ataatgccacgtcaccaatttgtaa

SEQ ID NO: 59844 - DNA, 25 bp, Probe sequence
ttatttcataatgccacgtcaccaa

SEQ ID NO: 59845 - DNA, 25 bp, Probe sequence
tttatttcataatgccacgtcacca

SEQ ID NO: 59846 - DNA, 25 bp, Probe sequence
cacgtcaccaatttgtaatcataat

SEQ ID NO: 59847 - DNA, 25 bp, Probe sequence
atttcataatgccacgtcaccaatt

SEQ ID NO: 59848 - DNA, 25 bp, Probe sequence
ttatcgttacccctttgctttatga

SEQ ID NO: 59849 - DNA, 25 bp, Probe sequence
gcgtatgcaacttagaatatgatgt

SEQ ID NO: 59850 - DNA, 25 bp, Probe sequence
gtatgactatgaaagaaacgacctt

SEQ ID NO: 59851 - DNA, 25 bp, Probe sequence
aaacgaccttctattgaaatgttct

SEQ ID NO: 59852 - DNA, 25 bp, Probe sequence
tatgactatgaaagaaacgaccttc

SEQ ID NO: 59853 - DNA, 25 bp, Probe sequence
gaaacgaccttctattgaaatgttc

SEQ ID NO: 59854 - DNA, 25 bp, Probe sequence
cgtatgcaacttagaatatgatgtc

SEQ ID NO: 59855 - DNA, 25 bp, Probe sequence
acgaccttctattgaaatgttctaa

SEQ ID NO: 59856 - DNA, 25 bp, Probe sequence
aacgaccttctattgaaatgttcta

SEQ ID NO: 59857 - DNA, 25 bp, Probe sequence
taatgcgtatgactatgaaagaaac

SEQ ID NO: 59858 - DNA, 25 bp, Probe sequence
acatcatattctaagttgcatacgc

SEQ ID NO: 59859 - DNA, 25 bp, Probe sequence
aaggtcgtttctttcatagtcatac

SEQ ID NO: 59860 - DNA, 25 bp, Probe sequence
agaacatttcaatagaaggtcgttt

SEQ ID NO: 59861 - DNA, 25 bp, Probe sequence
gaaggtcgtttctttcatagtcata

SEQ ID NO: 59862 - DNA, 25 bp, Probe sequence
gaacatttcaatagaaggtcgtttc

SEQ ID NO: 59863 - DNA, 25 bp, Probe sequence
gacatcatattctaagttgcatacg

SEQ ID NO: 59864 - DNA, 25 bp, Probe sequence
ttagaacatttcaatagaaggtcgt

SEQ ID NO: 59865 - DNA, 25 bp, Probe sequence
tagaacatttcaatagaaggtcgtt

SEQ ID NO: 59866 - DNA, 25 bp, Probe sequence
gtttctttcatagtcatacgcatta

SEQ ID NO: 59867 - DNA, 25 bp, Probe sequence
atgataaagaaaggtgggtagcaat

SEQ ID NO: 59868 - DNA, 25 bp, Probe sequence
tatgataaagaaaggtgggtagcaa

SEQ ID NO: 59869 - DNA, 25 bp, Probe sequence
atatgataaagaaaggtgggtagca

SEQ ID NO: 59870 - DNA, 25 bp, Probe sequence
gatatgataaagaaaggtgggtagc

SEQ ID NO: 59871 - DNA, 25 bp, Probe sequence
agatatgataaagaaaggtgggtag

SEQ ID NO: 59872 - DNA, 25 bp, Probe sequence
atagatatgataaagaaaggtgggt

SEQ ID NO: 59873 - DNA, 25 bp, Probe sequence
tagatatgataaagaaaggtgggta

SEQ ID NO: 59874 - DNA, 25 bp, Probe sequence
aggggagcaatcatctaatttaatt

SEQ ID NO: 59875 - DNA, 25 bp, Probe sequence
gataggggagcaatcatctaattta

SEQ ID NO: 59876 - DNA, 25 bp, Probe sequence
attgctacccacctttctttatcat

SEQ ID NO: 59877 - DNA, 25 bp, Probe sequence
ttgctacccacctttctttatcata

SEQ ID NO: 59878 - DNA, 25 bp, Probe sequence
tgctacccacctttctttatcatat

SEQ ID NO: 59879 - DNA, 25 bp, Probe sequence
gctacccacctttctttatcatatc

SEQ ID NO: 59880 - DNA, 25 bp, Probe sequence
ctacccacctttctttatcatatct

SEQ ID NO: 59881 - DNA, 25 bp, Probe sequence
acccacctttctttatcatatctat

SEQ ID NO: 59882 - DNA, 25 bp, Probe sequence
tacccacctttctttatcatatcta

SEQ ID NO: 59883 - DNA, 25 bp, Probe sequence
aattaaattagatgattgctcccct

SEQ ID NO: 59884 - DNA, 25 bp, Probe sequence
taaattagatgattgctcccctatc

SEQ ID NO: 59885 - DNA, 25 bp, Probe sequence
ttgaatgatgatgttgtgtgattgt

SEQ ID NO: 59886 - DNA, 25 bp, Probe sequence
tgaatgatgatgttgtgtgattgta

SEQ ID NO: 59887 - DNA, 25 bp, Probe sequence
aatgttaaggatgttgtcgcaataa

SEQ ID NO: 59888 - DNA, 25 bp, Probe sequence
ttaatgttaaggatgttgtcgcaat

SEQ ID NO: 59889 - DNA, 25 bp, Probe sequence
taatgttaaggatgttgtcgcaata

SEQ ID NO: 59890 - DNA, 25 bp, Probe sequence
gaatgatgatgttgtgtgattgtat

SEQ ID NO: 59891 - DNA, 25 bp, Probe sequence
atttaatgttaaggatgttgtcgca

SEQ ID NO: 59892 - DNA, 25 bp, Probe sequence
tttgaatgatgatgttgtgtgattg

SEQ ID NO: 59893 - DNA, 25 bp, Probe sequence
tgcgaatatacaaagacaccattat

SEQ ID NO: 59894 - DNA, 25 bp, Probe sequence
acaatcacacaacatcatcattcaa

SEQ ID NO: 59895 - DNA, 25 bp, Probe sequence
tacaatcacacaacatcatcattca

SEQ ID NO: 59896 - DNA, 25 bp, Probe sequence
attgcgacaacatccttaacattaa

SEQ ID NO: 59897 - DNA, 25 bp, Probe sequence
ttattgcgacaacatccttaacatt

SEQ ID NO: 59898 - DNA, 25 bp, Probe sequence
tattgcgacaacatccttaacatta

SEQ ID NO: 59899 - DNA, 25 bp, Probe sequence
atacaatcacacaacatcatcattc

SEQ ID NO: 59900 - DNA, 25 bp, Probe sequence
tgcgacaacatccttaacattaaat

SEQ ID NO: 59901 - DNA, 25 bp, Probe sequence
caatcacacaacatcatcattcaaa

SEQ ID NO: 59902 - DNA, 25 bp, Probe sequence
ttgcgacaacatccttaacattaaa

SEQ ID NO: 59903 - DNA, 25 bp, Probe sequence
cataaaattaaagggatgtggagac

SEQ ID NO: 59904 - DNA, 25 bp, Probe sequence
ataaaattaaagggatgtggagaca

SEQ ID NO: 59905 - DNA, 25 bp, Probe sequence
tggtggtaataaattcagattaaag

SEQ ID NO: 59906 - DNA, 25 bp, Probe sequence
ggtggtaataaattcagattaaaga

SEQ ID NO: 59907 - DNA, 25 bp, Probe sequence
acataaaattaaagggatgtggaga

SEQ ID NO: 59908 - DNA, 25 bp, Probe sequence
tttaatgtcttttgaagtatcgaaa

SEQ ID NO: 59909 - DNA, 25 bp, Probe sequence
ttttaatgtcttttgaagtatcgaa

SEQ ID NO: 59910 - DNA, 25 bp, Probe sequence
attttaatgtcttttgaagtatcga

SEQ ID NO: 59911 - DNA, 25 bp, Probe sequence
ttaatgtcttttgaagtatcgaaaa

SEQ ID NO: 59912 - DNA, 25 bp, Probe sequence
gtctccacatccctttaattttatg

SEQ ID NO: 59913 - DNA, 25 bp, Probe sequence
tgtctccacatccctttaattttat

SEQ ID NO: 59914 - DNA, 25 bp, Probe sequence
ctttaatctgaatttattaccacca

SEQ ID NO: 59915 - DNA, 25 bp, Probe sequence
tctttaatctgaatttattaccacc

SEQ ID NO: 59916 - DNA, 25 bp, Probe sequence
tctccacatccctttaattttatgt

SEQ ID NO: 59917 - DNA, 25 bp, Probe sequence
ttcgatacttcaaaagacattaaaa

SEQ ID NO: 59918 - DNA, 25 bp, Probe sequence
tttcgatacttcaaaagacattaaa

SEQ ID NO: 59919 - DNA, 25 bp, Probe sequence
tcgatacttcaaaagacattaaaat

SEQ ID NO: 59920 - DNA, 25 bp, Probe sequence
ttttcgatacttcaaaagacattaa

SEQ ID NO: 59921 - DNA, 25 bp, Probe sequence
acagttttaatttctttgttatgca

SEQ ID NO: 59922 - DNA, 25 bp, Probe sequence
tttctttgttatgcaaatcaaaaca

SEQ ID NO: 59923 - DNA, 25 bp, Probe sequence
cagttttaatttctttgttatgcaa

SEQ ID NO: 59924 - DNA, 25 bp, Probe sequence
tctttgttatgcaaatcaaaacatt

SEQ ID NO: 59925 - DNA, 25 bp, Probe sequence
ttctttgttatgcaaatcaaaacat

SEQ ID NO: 59926 - DNA, 25 bp, Probe sequence
atttctttgttatgcaaatcaaaac

SEQ ID NO: 59927 - DNA, 25 bp, Probe sequence
aacagttttaatttctttgttatgc

SEQ ID NO: 59928 - DNA, 25 bp, Probe sequence
aatttctttgttatgcaaatcaaaa

SEQ ID NO: 59929 - DNA, 25 bp, Probe sequence
ctttgttatgcaaatcaaaacatta

SEQ ID NO: 59930 - DNA, 25 bp, Probe sequence
tttgttatgcaaatcaaaacattat

SEQ ID NO: 59931 - DNA, 25 bp, Probe sequence
tgcataacaaagaaattaaaactgt

SEQ ID NO: 59932 - DNA, 25 bp, Probe sequence
ttgcataacaaagaaattaaaactg

SEQ ID NO: 59933 - DNA, 25 bp, Probe sequence
tgttttgatttgcataacaaagaaa

SEQ ID NO: 59934 - DNA, 25 bp, Probe sequence
atgttttgatttgcataacaaagaa

SEQ ID NO: 59935 - DNA, 25 bp, Probe sequence
aatgttttgatttgcataacaaaga

SEQ ID NO: 59936 - DNA, 25 bp, Probe sequence
gttttgatttgcataacaaagaaat

SEQ ID NO: 59937 - DNA, 25 bp, Probe sequence
gcataacaaagaaattaaaactgtt

SEQ ID NO: 59938 - DNA, 25 bp, Probe sequence
ttttgatttgcataacaaagaaatt

SEQ ID NO: 59939 - DNA, 25 bp, Probe sequence
taatgttttgatttgcataacaaag

SEQ ID NO: 59940 - DNA, 25 bp, Probe sequence
ataatgttttgatttgcataacaaa

SEQ ID NO: 59941 - DNA, 25 bp, Probe sequence
ctaatacaccgccttaattcaaacc

SEQ ID NO: 59942 - DNA, 25 bp, Probe sequence
tctaatacaccgccttaattcaaac

SEQ ID NO: 59943 - DNA, 25 bp, Probe sequence
ttctaatacaccgccttaattcaaa

SEQ ID NO: 59944 - DNA, 25 bp, Probe sequence
tttctaatacaccgccttaattcaa

SEQ ID NO: 59945 - DNA, 25 bp, Probe sequence
taatacaccgccttaattcaaaccc

SEQ ID NO: 59946 - DNA, 25 bp, Probe sequence
aaccctaattctaacatttggaagt

SEQ ID NO: 59947 - DNA, 25 bp, Probe sequence
cgccttaattcaaaccctaattcta

SEQ ID NO: 59948 - DNA, 25 bp, Probe sequence
accctaattctaacatttggaagtt

SEQ ID NO: 59949 - DNA, 25 bp, Probe sequence
atacaccgccttaattcaaacccta

SEQ ID NO: 59950 - DNA, 25 bp, Probe sequence
ggtttgaattaaggcggtgtattag

SEQ ID NO: 59951 - DNA, 25 bp, Probe sequence
gtttgaattaaggcggtgtattaga

SEQ ID NO: 59952 - DNA, 25 bp, Probe sequence
ttgaattaaggcggtgtattagaaa

SEQ ID NO: 59953 - DNA, 25 bp, Probe sequence
tttgaattaaggcggtgtattagaa

SEQ ID NO: 59954 - DNA, 25 bp, Probe sequence
gggtttgaattaaggcggtgtatta

SEQ ID NO: 59955 - DNA, 25 bp, Probe sequence
tagaattagggtttgaattaaggcg

SEQ ID NO: 59956 - DNA, 25 bp, Probe sequence
acttccaaatgttagaattagggtt

SEQ ID NO: 59957 - DNA, 25 bp, Probe sequence
aacttccaaatgttagaattagggt

SEQ ID NO: 59958 - DNA, 25 bp, Probe sequence
tagggtttgaattaaggcggtgtat

SEQ ID NO: 59959 - DNA, 25 bp, Probe sequence
taagcgttttactattcggtaggca

SEQ ID NO: 59960 - DNA, 25 bp, Probe sequence
aagttgtaagcgttttactattcgg

SEQ ID NO: 59961 - DNA, 25 bp, Probe sequence
gttgtaagcgttttactattcggta

SEQ ID NO: 59962 - DNA, 25 bp, Probe sequence
taatcaaaagtgaggttaggctaaa

SEQ ID NO: 59963 - DNA, 25 bp, Probe sequence
ttaatcaaaagtgaggttaggctaa

SEQ ID NO: 59964 - DNA, 25 bp, Probe sequence
tgtaagcgttttactattcggtagg

SEQ ID NO: 59965 - DNA, 25 bp, Probe sequence
cgttttactattcggtaggcaaagc

SEQ ID NO: 59966 - DNA, 25 bp, Probe sequence
gcgttttactattcggtaggcaaag

SEQ ID NO: 59967 - DNA, 25 bp, Probe sequence
ttgtaagcgttttactattcggtag

SEQ ID NO: 59968 - DNA, 25 bp, Probe sequence
tgcctaccgaatagtaaaacgctta

SEQ ID NO: 59969 - DNA, 25 bp, Probe sequence
ccgaatagtaaaacgcttacaactt

SEQ ID NO: 59970 - DNA, 25 bp, Probe sequence
taccgaatagtaaaacgcttacaac

SEQ ID NO: 59971 - DNA, 25 bp, Probe sequence
ttagcctaacctcacttttgattaa

SEQ ID NO: 59972 - DNA, 25 bp, Probe sequence
tttagcctaacctcacttttgatta

SEQ ID NO: 59973 - DNA, 25 bp, Probe sequence
cctaccgaatagtaaaacgcttaca

SEQ ID NO: 59974 - DNA, 25 bp, Probe sequence
ctttgcctaccgaatagtaaaacgc

SEQ ID NO: 59975 - DNA, 25 bp, Probe sequence
gctttgcctaccgaatagtaaaacg

SEQ ID NO: 59976 - DNA, 25 bp, Probe sequence
accgaatagtaaaacgcttacaact

SEQ ID NO: 59977 - DNA, 25 bp, Probe sequence
caagttgtggtataatgccgttatt

SEQ ID NO: 59978 - DNA, 25 bp, Probe sequence
aagtattgagcaagttgtggtataa

SEQ ID NO: 59979 - DNA, 25 bp, Probe sequence
ttaagtattgagcaagttgtggtat

SEQ ID NO: 59980 - DNA, 25 bp, Probe sequence
attaagtattgagcaagttgtggta

SEQ ID NO: 59981 - DNA, 25 bp, Probe sequence
tattaagtattgagcaagttgtggt

SEQ ID NO: 59982 - DNA, 25 bp, Probe sequence
aagttgtggtataatgccgttatta

SEQ ID NO: 59983 - DNA, 25 bp, Probe sequence
gtattgagcaagttgtggtataatg

SEQ ID NO: 59984 - DNA, 25 bp, Probe sequence
agttgtggtataatgccgttattaa

SEQ ID NO: 59985 - DNA, 25 bp, Probe sequence
agtattgagcaagttgtggtataat

SEQ ID NO: 59986 - DNA, 25 bp, Probe sequence
aataacggcattataccacaacttg

SEQ ID NO: 59987 - DNA, 25 bp, Probe sequence
accacaacttgctcaatacttaata

SEQ ID NO: 59988 - DNA, 25 bp, Probe sequence
taccacaacttgctcaatacttaat

SEQ ID NO: 59989 - DNA, 25 bp, Probe sequence
ataccacaacttgctcaatacttaa

SEQ ID NO: 59990 - DNA, 25 bp, Probe sequence
ttataccacaacttgctcaatactt

SEQ ID NO: 59991 - DNA, 25 bp, Probe sequence
taataacggcattataccacaactt

SEQ ID NO: 59992 - DNA, 25 bp, Probe sequence
cattataccacaacttgctcaatac

SEQ ID NO: 59993 - DNA, 25 bp, Probe sequence
ttaataacggcattataccacaact

SEQ ID NO: 59994 - DNA, 25 bp, Probe sequence
attataccacaacttgctcaatact

SEQ ID NO: 59995 - DNA, 25 bp, Probe sequence
tggagtgactataaggaggacatta

SEQ ID NO: 59996 - DNA, 25 bp, Probe sequence
atactggagtgactataaggaggac

SEQ ID NO: 59997 - DNA, 25 bp, Probe sequence
catactggagtgactataaggagga

SEQ ID NO: 59998 - DNA, 25 bp, Probe sequence
acatactggagtgactataaggagg

SEQ ID NO: 59999 - DNA, 25 bp, Probe sequence
ctggagtgactataaggaggacatt

SEQ ID NO: 60000 - DNA, 25 bp, Probe sequence
tactggagtgactataaggaggaca

SEQ ID NO: 60001 - DNA, 25 bp, Probe sequence
ggagtgactataaggaggacattat

SEQ ID NO: 60002 - DNA, 25 bp, Probe sequence
tacatactggagtgactataaggag

SEQ ID NO: 60003 - DNA, 25 bp, Probe sequence
actggagtgactataaggaggacat

SEQ ID NO: 60004 - DNA, 25 bp, Probe sequence
taatgtcctccttatagtcactcca

SEQ ID NO: 60005 - DNA, 25 bp, Probe sequence
tcctccttatagtcactccagtatg

SEQ ID NO: 60006 - DNA, 25 bp, Probe sequence
gtcctccttatagtcactccagtat

SEQ ID NO: 60007 - DNA, 25 bp, Probe sequence
cctccttatagtcactccagtatgt

SEQ ID NO: 60008 - DNA, 25 bp, Probe sequence
aatgtcctccttatagtcactccag

SEQ ID NO: 60009 - DNA, 25 bp, Probe sequence
tgtcctccttatagtcactccagta

SEQ ID NO: 60010 - DNA, 25 bp, Probe sequence
ataatgtcctccttatagtcactcc

SEQ ID NO: 60011 - DNA, 25 bp, Probe sequence
ctccttatagtcactccagtatgta

SEQ ID NO: 60012 - DNA, 25 bp, Probe sequence
atgtcctccttatagtcactccagt

SEQ ID NO: 60013 - DNA, 25 bp, Probe sequence
agataaagaaggtagtgctctgaac

SEQ ID NO: 60014 - DNA, 25 bp, Probe sequence
gataaagaaggtagtgctctgaaca

SEQ ID NO: 60015 - DNA, 25 bp, Probe sequence
tagataaagaaggtagtgctctgaa

SEQ ID NO: 60016 - DNA, 25 bp, Probe sequence
atagataaagaaggtagtgctctga

SEQ ID NO: 60017 - DNA, 25 bp, Probe sequence
ataaagaaggtagtgctctgaacac

SEQ ID NO: 60018 - DNA, 25 bp, Probe sequence
tatagataaagaaggtagtgctctg

SEQ ID NO: 60019 - DNA, 25 bp, Probe sequence
atatagataaagaaggtagtgctct

SEQ ID NO: 60020 - DNA, 25 bp, Probe sequence
gctctgaacactatcattataatca

SEQ ID NO: 60021 - DNA, 25 bp, Probe sequence
tgctctgaacactatcattataatc

SEQ ID NO: 60022 - DNA, 25 bp, Probe sequence
gttcagagcactaccttctttatct

SEQ ID NO: 60023 - DNA, 25 bp, Probe sequence
tgttcagagcactaccttctttatc

SEQ ID NO: 60024 - DNA, 25 bp, Probe sequence
ttcagagcactaccttctttatcta

SEQ ID NO: 60025 - DNA, 25 bp, Probe sequence
tcagagcactaccttctttatctat

SEQ ID NO: 60026 - DNA, 25 bp, Probe sequence
gtgttcagagcactaccttctttat

SEQ ID NO: 60027 - DNA, 25 bp, Probe sequence
cagagcactaccttctttatctata

SEQ ID NO: 60028 - DNA, 25 bp, Probe sequence
agagcactaccttctttatctatat

SEQ ID NO: 60029 - DNA, 25 bp, Probe sequence
gattataatgatagtgttcagagca

SEQ ID NO: 60030 - DNA, 25 bp, Probe sequence
tgattataatgatagtgttcagagc

SEQ ID NO: 60031 - DNA, 25 bp, Probe sequence
ttaagaaggcataacaagatgacct

SEQ ID NO: 60032 - DNA, 25 bp, Probe sequence
gctttaagaaggcataacaagatga

SEQ ID NO: 60033 - DNA, 25 bp, Probe sequence
tttaagaaggcataacaagatgacc

SEQ ID NO: 60034 - DNA, 25 bp, Probe sequence
ctttaagaaggcataacaagatgac

SEQ ID NO: 60035 - DNA, 25 bp, Probe sequence
agctttaagaaggcataacaagatg

SEQ ID NO: 60036 - DNA, 25 bp, Probe sequence
ttagctttaagaaggcataacaaga

SEQ ID NO: 60037 - DNA, 25 bp, Probe sequence
tagctttaagaaggcataacaagat

SEQ ID NO: 60038 - DNA, 25 bp, Probe sequence
gaacctatttagctttaagaaggca

SEQ ID NO: 60039 - DNA, 25 bp, Probe sequence
tgaacctatttagctttaagaaggc

SEQ ID NO: 60040 - DNA, 25 bp, Probe sequence
aggtcatcttgttatgccttcttaa

SEQ ID NO: 60041 - DNA, 25 bp, Probe sequence
tcatcttgttatgccttcttaaagc

SEQ ID NO: 60042 - DNA, 25 bp, Probe sequence
ggtcatcttgttatgccttcttaaa

SEQ ID NO: 60043 - DNA, 25 bp, Probe sequence
gtcatcttgttatgccttcttaaag

SEQ ID NO: 60044 - DNA, 25 bp, Probe sequence
catcttgttatgccttcttaaagct

SEQ ID NO: 60045 - DNA, 25 bp, Probe sequence
tcttgttatgccttcttaaagctaa

SEQ ID NO: 60046 - DNA, 25 bp, Probe sequence
atcttgttatgccttcttaaagcta

SEQ ID NO: 60047 - DNA, 25 bp, Probe sequence
gccttcttaaagctaaataggttca

SEQ ID NO: 60048 - DNA, 25 bp, Probe sequence
tgccttcttaaagctaaataggttc

SEQ ID NO: 60049 - DNA, 25 bp, Probe sequence
ggaatgcttagtatgtgaataaggt

SEQ ID NO: 60050 - DNA, 25 bp, Probe sequence
tatgtgaataaggttaagagggacg

SEQ ID NO: 60051 - DNA, 25 bp, Probe sequence
gtatgtgaataaggttaagagggac

SEQ ID NO: 60052 - DNA, 25 bp, Probe sequence
agtatgtgaataaggttaagaggga

SEQ ID NO: 60053 - DNA, 25 bp, Probe sequence
gaatgcttagtatgtgaataaggtt

SEQ ID NO: 60054 - DNA, 25 bp, Probe sequence
gggaatgcttagtatgtgaataagg

SEQ ID NO: 60055 - DNA, 25 bp, Probe sequence
gaataaggttaagagggacgcagtt

SEQ ID NO: 60056 - DNA, 25 bp, Probe sequence
atgtgaataaggttaagagggacgc

SEQ ID NO: 60057 - DNA, 25 bp, Probe sequence
tgcttagtatgtgaataaggttaag

SEQ ID NO: 60058 - DNA, 25 bp, Probe sequence
accttattcacatactaagcattcc

SEQ ID NO: 60059 - DNA, 25 bp, Probe sequence
cgtccctcttaaccttattcacata

SEQ ID NO: 60060 - DNA, 25 bp, Probe sequence
gtccctcttaaccttattcacatac

SEQ ID NO: 60061 - DNA, 25 bp, Probe sequence
tccctcttaaccttattcacatact

SEQ ID NO: 60062 - DNA, 25 bp, Probe sequence
aaccttattcacatactaagcattc

SEQ ID NO: 60063 - DNA, 25 bp, Probe sequence
ccttattcacatactaagcattccc

SEQ ID NO: 60064 - DNA, 25 bp, Probe sequence
aactgcgtccctcttaaccttattc

SEQ ID NO: 60065 - DNA, 25 bp, Probe sequence
gcgtccctcttaaccttattcacat

SEQ ID NO: 60066 - DNA, 25 bp, Probe sequence
cttaaccttattcacatactaagca

SEQ ID NO: 60067 - DNA, 25 bp, Probe sequence
cgctgtgaagttagatagatgagtt

SEQ ID NO: 60068 - DNA, 25 bp, Probe sequence
acgctgtgaagttagatagatgagt

SEQ ID NO: 60069 - DNA, 25 bp, Probe sequence
gcataaatccctctaatcgctaaag

SEQ ID NO: 60070 - DNA, 25 bp, Probe sequence
gctgtgaagttagatagatgagttt

SEQ ID NO: 60071 - DNA, 25 bp, Probe sequence
cataaatccctctaatcgctaaagc

SEQ ID NO: 60072 - DNA, 25 bp, Probe sequence
tgcataaatccctctaatcgctaaa

SEQ ID NO: 60073 - DNA, 25 bp, Probe sequence
cacaactgcataaatccctctaatc

SEQ ID NO: 60074 - DNA, 25 bp, Probe sequence
ctgcataaatccctctaatcgctaa

SEQ ID NO: 60075 - DNA, 25 bp, Probe sequence
acaactgcataaatccctctaatcg

SEQ ID NO: 60076 - DNA, 25 bp, Probe sequence
aactcatctatctaacttcacagcg

SEQ ID NO: 60077 - DNA, 25 bp, Probe sequence
actcatctatctaacttcacagcgt

SEQ ID NO: 60078 - DNA, 25 bp, Probe sequence
ctttagcgattagagggatttatgc

SEQ ID NO: 60079 - DNA, 25 bp, Probe sequence
aaactcatctatctaacttcacagc

SEQ ID NO: 60080 - DNA, 25 bp, Probe sequence
gctttagcgattagagggatttatg

SEQ ID NO: 60081 - DNA, 25 bp, Probe sequence
gattagagggatttatgcagttgtg

SEQ ID NO: 60082 - DNA, 25 bp, Probe sequence
tttagcgattagagggatttatgca

SEQ ID NO: 60083 - DNA, 25 bp, Probe sequence
ttagcgattagagggatttatgcag

SEQ ID NO: 60084 - DNA, 25 bp, Probe sequence
cgattagagggatttatgcagttgt

SEQ ID NO: 60085 - DNA, 25 bp, Probe sequence
tatatttagtgaatgatagcaacgc

SEQ ID NO: 60086 - DNA, 25 bp, Probe sequence
tagtgaatgatagcaacgcgagtat

SEQ ID NO: 60087 - DNA, 25 bp, Probe sequence
ttagtgaatgatagcaacgcgagta

SEQ ID NO: 60088 - DNA, 25 bp, Probe sequence
tctaattatgccccttattgctaca

SEQ ID NO: 60089 - DNA, 25 bp, Probe sequence
ccattctaattatgccccttattgc

SEQ ID NO: 60090 - DNA, 25 bp, Probe sequence
cattctaattatgccccttattgct

SEQ ID NO: 60091 - DNA, 25 bp, Probe sequence
taattatgccccttattgctacatg

SEQ ID NO: 60092 - DNA, 25 bp, Probe sequence
ttctaattatgccccttattgctac

SEQ ID NO: 60093 - DNA, 25 bp, Probe sequence
accattctaattatgccccttattg

SEQ ID NO: 60094 - DNA, 25 bp, Probe sequence
gcgttgctatcattcactaaatata

SEQ ID NO: 60095 - DNA, 25 bp, Probe sequence
atactcgcgttgctatcattcacta

SEQ ID NO: 60096 - DNA, 25 bp, Probe sequence
tactcgcgttgctatcattcactaa

SEQ ID NO: 60097 - DNA, 25 bp, Probe sequence
tgtagcaataaggggcataattaga

SEQ ID NO: 60098 - DNA, 25 bp, Probe sequence
gcaataaggggcataattagaatgg

SEQ ID NO: 60099 - DNA, 25 bp, Probe sequence
agcaataaggggcataattagaatg

SEQ ID NO: 60100 - DNA, 25 bp, Probe sequence
gtagcaataaggggcataattagaa

SEQ ID NO: 60101 - DNA, 25 bp, Probe sequence
catgtagcaataaggggcataatta

SEQ ID NO: 60102 - DNA, 25 bp, Probe sequence
caataaggggcataattagaatggt

SEQ ID NO: 60103 - DNA, 25 bp, Probe sequence
tataaacataaagagggcataagcg

SEQ ID NO: 60104 - DNA, 25 bp, Probe sequence
ctataaacataaagagggcataagc

SEQ ID NO: 60105 - DNA, 25 bp, Probe sequence
actataaacataaagagggcataag

SEQ ID NO: 60106 - DNA, 25 bp, Probe sequence
aactataaacataaagagggcataa

SEQ ID NO: 60107 - DNA, 25 bp, Probe sequence
aataactataaacataaagagggca

SEQ ID NO: 60108 - DNA, 25 bp, Probe sequence
ataactataaacataaagagggcat

SEQ ID NO: 60109 - DNA, 25 bp, Probe sequence
taactataaacataaagagggcata

SEQ ID NO: 60110 - DNA, 25 bp, Probe sequence
aaataactataaacataaagagggc

SEQ ID NO: 60111 - DNA, 25 bp, Probe sequence
cgcttatgccctctttatgtttata

SEQ ID NO: 60112 - DNA, 25 bp, Probe sequence
gcttatgccctctttatgtttatag

SEQ ID NO: 60113 - DNA, 25 bp, Probe sequence
cttatgccctctttatgtttatagt

SEQ ID NO: 60114 - DNA, 25 bp, Probe sequence
tgccctctttatgtttatagttatt

SEQ ID NO: 60115 - DNA, 25 bp, Probe sequence
ttatgccctctttatgtttatagtt

SEQ ID NO: 60116 - DNA, 25 bp, Probe sequence
atgccctctttatgtttatagttat

SEQ ID NO: 60117 - DNA, 25 bp, Probe sequence
tatgccctctttatgtttatagtta

SEQ ID NO: 60118 - DNA, 25 bp, Probe sequence
gccctctttatgtttatagttattt

SEQ ID NO: 60119 - DNA, 25 bp, Probe sequence
gattgttgtataatggttgtgagca

SEQ ID NO: 60120 - DNA, 25 bp, Probe sequence
tgattgttgtataatggttgtgagc

SEQ ID NO: 60121 - DNA, 25 bp, Probe sequence
attgttgtataatggttgtgagcac

SEQ ID NO: 60122 - DNA, 25 bp, Probe sequence
atgattgttgtataatggttgtgag

SEQ ID NO: 60123 - DNA, 25 bp, Probe sequence
aatgattgttgtataatggttgtga

SEQ ID NO: 60124 - DNA, 25 bp, Probe sequence
ttgttgtataatggttgtgagcaca

SEQ ID NO: 60125 - DNA, 25 bp, Probe sequence
gtgagcacaagacgatataaataaa

SEQ ID NO: 60126 - DNA, 25 bp, Probe sequence
tgtgagcacaagacgatataaataa

SEQ ID NO: 60127 - DNA, 25 bp, Probe sequence
aaatgattgttgtataatggttgtg

SEQ ID NO: 60128 - DNA, 25 bp, Probe sequence
gctcacaaccattatacaacaatca

SEQ ID NO: 60129 - DNA, 25 bp, Probe sequence
tgctcacaaccattatacaacaatc

SEQ ID NO: 60130 - DNA, 25 bp, Probe sequence
gtgctcacaaccattatacaacaat

SEQ ID NO: 60131 - DNA, 25 bp, Probe sequence
ctcacaaccattatacaacaatcat

SEQ ID NO: 60132 - DNA, 25 bp, Probe sequence
tcacaaccattatacaacaatcatt

SEQ ID NO: 60133 - DNA, 25 bp, Probe sequence
tgtgctcacaaccattatacaacaa

SEQ ID NO: 60134 - DNA, 25 bp, Probe sequence
tttatttatatcgtcttgtgctcac

SEQ ID NO: 60135 - DNA, 25 bp, Probe sequence
ttatttatatcgtcttgtgctcaca

SEQ ID NO: 60136 - DNA, 25 bp, Probe sequence
cacaaccattatacaacaatcattt

SEQ ID NO: 60137 - DNA, 25 bp, Probe sequence
gttaaatcgcaatacttgtcggtta

SEQ ID NO: 60138 - DNA, 25 bp, Probe sequence
taaatcgcaatacttgtcggttatt

SEQ ID NO: 60139 - DNA, 25 bp, Probe sequence
ttaaatcgcaatacttgtcggttat

SEQ ID NO: 60140 - DNA, 25 bp, Probe sequence
ttaatcgtgcttaaccgacaagtta

SEQ ID NO: 60141 - DNA, 25 bp, Probe sequence
aaatcgcaatacttgtcggttattt

SEQ ID NO: 60142 - DNA, 25 bp, Probe sequence
agttaaatcgcaatacttgtcggtt

SEQ ID NO: 60143 - DNA, 25 bp, Probe sequence
attaatcgtgcttaaccgacaagtt

SEQ ID NO: 60144 - DNA, 25 bp, Probe sequence
aattaatcgtgcttaaccgacaagt

SEQ ID NO: 60145 - DNA, 25 bp, Probe sequence
taaccgacaagttaaatcgcaatac

SEQ ID NO: 60146 - DNA, 25 bp, Probe sequence
taaccgacaagtattgcgatttaac

SEQ ID NO: 60147 - DNA, 25 bp, Probe sequence
ataaccgacaagtattgcgatttaa

SEQ ID NO: 60148 - DNA, 25 bp, Probe sequence
aataaccgacaagtattgcgattta

SEQ ID NO: 60149 - DNA, 25 bp, Probe sequence
taacttgtcggttaagcacgattaa

SEQ ID NO: 60150 - DNA, 25 bp, Probe sequence
aaataaccgacaagtattgcgattt

SEQ ID NO: 60151 - DNA, 25 bp, Probe sequence
aaccgacaagtattgcgatttaact

SEQ ID NO: 60152 - DNA, 25 bp, Probe sequence
acttgtcggttaagcacgattaatt

SEQ ID NO: 60153 - DNA, 25 bp, Probe sequence
aacttgtcggttaagcacgattaat

SEQ ID NO: 60154 - DNA, 25 bp, Probe sequence
gtattgcgatttaacttgtcggtta

SEQ ID NO: 60155 - DNA, 25 bp, Probe sequence
tggaagcgtatatagaatgaaggtt

SEQ ID NO: 60156 - DNA, 25 bp, Probe sequence
gaagcgtatatagaatgaaggttgg

SEQ ID NO: 60157 - DNA, 25 bp, Probe sequence
ggaagcgtatatagaatgaaggttg

SEQ ID NO: 60158 - DNA, 25 bp, Probe sequence
atggaagcgtatatagaatgaaggt

SEQ ID NO: 60159 - DNA, 25 bp, Probe sequence
aatggaagcgtatatagaatgaagg

SEQ ID NO: 60160 - DNA, 25 bp, Probe sequence
gcgtatatagaatgaaggttgggta

SEQ ID NO: 60161 - DNA, 25 bp, Probe sequence
aagcgtatatagaatgaaggttggg

SEQ ID NO: 60162 - DNA, 25 bp, Probe sequence
tatagtttattgagggaggtgtcac

SEQ ID NO: 60163 - DNA, 25 bp, Probe sequence
gggtatatagtttattgagggaggt

SEQ ID NO: 60164 - DNA, 25 bp, Probe sequence
aaccttcattctatatacgcttcca

SEQ ID NO: 60165 - DNA, 25 bp, Probe sequence
accttcattctatatacgcttccat

SEQ ID NO: 60166 - DNA, 25 bp, Probe sequence
caaccttcattctatatacgcttcc

SEQ ID NO: 60167 - DNA, 25 bp, Probe sequence
ccaaccttcattctatatacgcttc

SEQ ID NO: 60168 - DNA, 25 bp, Probe sequence
ccttcattctatatacgcttccatt

SEQ ID NO: 60169 - DNA, 25 bp, Probe sequence
tacccaaccttcattctatatacgc

SEQ ID NO: 60170 - DNA, 25 bp, Probe sequence
cccaaccttcattctatatacgctt

SEQ ID NO: 60171 - DNA, 25 bp, Probe sequence
gtgacacctccctcaataaactata

SEQ ID NO: 60172 - DNA, 25 bp, Probe sequence
cctccctcaataaactatataccca

SEQ ID NO: 60173 - DNA, 25 bp, Probe sequence
cgttatgcggctatcttccttatat

SEQ ID NO: 60174 - DNA, 25 bp, Probe sequence
tcgttatgcggctatcttccttata

SEQ ID NO: 60175 - DNA, 25 bp, Probe sequence
gttatgcggctatcttccttatatt

SEQ ID NO: 60176 - DNA, 25 bp, Probe sequence
ttgatatatactgctcgttatgcgg

SEQ ID NO: 60177 - DNA, 25 bp, Probe sequence
tatatactgctcgttatgcggctat

SEQ ID NO: 60178 - DNA, 25 bp, Probe sequence
tgcggctatcttccttatattaagt

SEQ ID NO: 60179 - DNA, 25 bp, Probe sequence
atatatactgctcgttatgcggcta

SEQ ID NO: 60180 - DNA, 25 bp, Probe sequence
cggctatcttccttatattaagtgc

SEQ ID NO: 60181 - DNA, 25 bp, Probe sequence
gcggctatcttccttatattaagtg

SEQ ID NO: 60182 - DNA, 25 bp, Probe sequence
atataaggaagatagccgcataacg

SEQ ID NO: 60183 - DNA, 25 bp, Probe sequence
tataaggaagatagccgcataacga

SEQ ID NO: 60184 - DNA, 25 bp, Probe sequence
aatataaggaagatagccgcataac

SEQ ID NO: 60185 - DNA, 25 bp, Probe sequence
ccgcataacgagcagtatatatcaa

SEQ ID NO: 60186 - DNA, 25 bp, Probe sequence
atagccgcataacgagcagtatata

SEQ ID NO: 60187 - DNA, 25 bp, Probe sequence
acttaatataaggaagatagccgca

SEQ ID NO: 60188 - DNA, 25 bp, Probe sequence
tagccgcataacgagcagtatatat

SEQ ID NO: 60189 - DNA, 25 bp, Probe sequence
cacttaatataaggaagatagccgc

SEQ ID NO: 60190 - DNA, 25 bp, Probe sequence
gcacttaatataaggaagatagccg

SEQ ID NO: 60191 - DNA, 25 bp, Probe sequence
gctcgatacatttgcccgataatat

SEQ ID NO: 60192 - DNA, 25 bp, Probe sequence
ctcgatacatttgcccgataatata

SEQ ID NO: 60193 - DNA, 25 bp, Probe sequence
tcgatacatttgcccgataatatat

SEQ ID NO: 60194 - DNA, 25 bp, Probe sequence
tgctcgatacatttgcccgataata

SEQ ID NO: 60195 - DNA, 25 bp, Probe sequence
cgatacatttgcccgataatatatt

SEQ ID NO: 60196 - DNA, 25 bp, Probe sequence
gtttaaaacctccctatttgatgca

SEQ ID NO: 60197 - DNA, 25 bp, Probe sequence
ttgctcgatacatttgcccgataat

SEQ ID NO: 60198 - DNA, 25 bp, Probe sequence
acatttgcccgataatatattgata

SEQ ID NO: 60199 - DNA, 25 bp, Probe sequence
tacatttgcccgataatatattgat

SEQ ID NO: 60200 - DNA, 25 bp, Probe sequence
atattatcgggcaaatgtatcgagc

SEQ ID NO: 60201 - DNA, 25 bp, Probe sequence
tatattatcgggcaaatgtatcgag

SEQ ID NO: 60202 - DNA, 25 bp, Probe sequence
atatattatcgggcaaatgtatcga

SEQ ID NO: 60203 - DNA, 25 bp, Probe sequence
tattatcgggcaaatgtatcgagca

SEQ ID NO: 60204 - DNA, 25 bp, Probe sequence
tgcatcaaatagggaggttttaaac

SEQ ID NO: 60205 - DNA, 25 bp, Probe sequence
aatatattatcgggcaaatgtatcg

SEQ ID NO: 60206 - DNA, 25 bp, Probe sequence
attatcgggcaaatgtatcgagcaa

SEQ ID NO: 60207 - DNA, 25 bp, Probe sequence
tcaatatattatcgggcaaatgtat

SEQ ID NO: 60208 - DNA, 25 bp, Probe sequence
atcaatatattatcgggcaaatgta

SEQ ID NO: 60209 - DNA, 25 bp, Probe sequence
ttcaatgtgtgtctaaagagattct

SEQ ID NO: 60210 - DNA, 25 bp, Probe sequence
cgatattcaatgtgtgtctaaagag

SEQ ID NO: 60211 - DNA, 25 bp, Probe sequence
cttaatttaatcgccaatacaaggt

SEQ ID NO: 60212 - DNA, 25 bp, Probe sequence
accttaatttaatcgccaatacaag

SEQ ID NO: 60213 - DNA, 25 bp, Probe sequence
cgattgataacgggtaacaaataat

SEQ ID NO: 60214 - DNA, 25 bp, Probe sequence
cgggtaacaaataatagaaagtacg

SEQ ID NO: 60215 - DNA, 25 bp, Probe sequence
atgtttcgatattcaatgtgtgtct

SEQ ID NO: 60216 - DNA, 25 bp, Probe sequence
tttaatcgccaatacaaggtaattt

SEQ ID NO: 60217 - DNA, 25 bp, Probe sequence
ttgttatagcttaactcttccaagt

SEQ ID NO: 60218 - DNA, 25 bp, Probe sequence
agaatctctttagacacacattgaa

SEQ ID NO: 60219 - DNA, 25 bp, Probe sequence
ctctttagacacacattgaatatcg

SEQ ID NO: 60220 - DNA, 25 bp, Probe sequence
cttgtattggcgattaaattaaggt

SEQ ID NO: 60221 - DNA, 25 bp, Probe sequence
accttgtattggcgattaaattaag

SEQ ID NO: 60222 - DNA, 25 bp, Probe sequence
attatttgttacccgttatcaatcg

SEQ ID NO: 60223 - DNA, 25 bp, Probe sequence
aaattaccttgtattggcgattaaa

SEQ ID NO: 60224 - DNA, 25 bp, Probe sequence
agacacacattgaatatcgaaacat

SEQ ID NO: 60225 - DNA, 25 bp, Probe sequence
cgtactttctattatttgttacccg

SEQ ID NO: 60226 - DNA, 25 bp, Probe sequence
acttggaagagttaagctataacaa

SEQ ID NO: 60227 - DNA, 25 bp, Probe sequence
tgatgaaagtctagggtgttagtat

SEQ ID NO: 60228 - DNA, 25 bp, Probe sequence
atgatgaaagtctagggtgttagta

SEQ ID NO: 60229 - DNA, 25 bp, Probe sequence
catgatgaaagtctagggtgttagt

SEQ ID NO: 60230 - DNA, 25 bp, Probe sequence
gatgaaagtctagggtgttagtatt

SEQ ID NO: 60231 - DNA, 25 bp, Probe sequence
atgaaagtctagggtgttagtattt

SEQ ID NO: 60232 - DNA, 25 bp, Probe sequence
tgaaagtctagggtgttagtattta

SEQ ID NO: 60233 - DNA, 25 bp, Probe sequence
ggacattatcataacaaaatcaccc

SEQ ID NO: 60234 - DNA, 25 bp, Probe sequence
aacaaaatcaccctagacaatcatg

SEQ ID NO: 60235 - DNA, 25 bp, Probe sequence
taacaaaatcaccctagacaatcat

SEQ ID NO: 60236 - DNA, 25 bp, Probe sequence
tactaacaccctagactttcatcat

SEQ ID NO: 60237 - DNA, 25 bp, Probe sequence
atactaacaccctagactttcatca

SEQ ID NO: 60238 - DNA, 25 bp, Probe sequence
actaacaccctagactttcatcatg

SEQ ID NO: 60239 - DNA, 25 bp, Probe sequence
aatactaacaccctagactttcatc

SEQ ID NO: 60240 - DNA, 25 bp, Probe sequence
aaatactaacaccctagactttcat

SEQ ID NO: 60241 - DNA, 25 bp, Probe sequence
taaatactaacaccctagactttca

SEQ ID NO: 60242 - DNA, 25 bp, Probe sequence
gggtgattttgttatgataatgtcc

SEQ ID NO: 60243 - DNA, 25 bp, Probe sequence
catgattgtctagggtgattttgtt

SEQ ID NO: 60244 - DNA, 25 bp, Probe sequence
ttgtctagggtgattttgttatgat

SEQ ID NO: 60245 - DNA, 25 bp, Probe sequence
aaacctcctttcacactatatatcg

SEQ ID NO: 60246 - DNA, 25 bp, Probe sequence
aacctcctttcacactatatatcga

SEQ ID NO: 60247 - DNA, 25 bp, Probe sequence
acctcctttcacactatatatcgaa

SEQ ID NO: 60248 - DNA, 25 bp, Probe sequence
atgattaagacacttaaagcaaggg

SEQ ID NO: 60249 - DNA, 25 bp, Probe sequence
cctcctttcacactatatatcgaaa

SEQ ID NO: 60250 - DNA, 25 bp, Probe sequence
gctatgattaagacacttaaagcaa

SEQ ID NO: 60251 - DNA, 25 bp, Probe sequence
agctatgattaagacacttaaagca

SEQ ID NO: 60252 - DNA, 25 bp, Probe sequence
acttaaagcaaggggaggttgagta

SEQ ID NO: 60253 - DNA, 25 bp, Probe sequence
tatgattaagacacttaaagcaagg

SEQ ID NO: 60254 - DNA, 25 bp, Probe sequence
cgatatatagtgtgaaaggaggttt

SEQ ID NO: 60255 - DNA, 25 bp, Probe sequence
tcgatatatagtgtgaaaggaggtt

SEQ ID NO: 60256 - DNA, 25 bp, Probe sequence
ttcgatatatagtgtgaaaggaggt

SEQ ID NO: 60257 - DNA, 25 bp, Probe sequence
cccttgctttaagtgtcttaatcat

SEQ ID NO: 60258 - DNA, 25 bp, Probe sequence
tttcgatatatagtgtgaaaggagg

SEQ ID NO: 60259 - DNA, 25 bp, Probe sequence
tgctttaagtgtcttaatcatagct

SEQ ID NO: 60260 - DNA, 25 bp, Probe sequence
ttgctttaagtgtcttaatcatagc

SEQ ID NO: 60261 - DNA, 25 bp, Probe sequence
tactcaacctccccttgctttaagt

SEQ ID NO: 60262 - DNA, 25 bp, Probe sequence
ccttgctttaagtgtcttaatcata

SEQ ID NO: 60263 - DNA, 25 bp, Probe sequence
ggtcgctaactcaatttatcctcta

SEQ ID NO: 60264 - DNA, 25 bp, Probe sequence
atgttgttatgtgaaagcaagttgt

SEQ ID NO: 60265 - DNA, 25 bp, Probe sequence
tgttgttatgtgaaagcaagttgtt

SEQ ID NO: 60266 - DNA, 25 bp, Probe sequence
gttgttatgtgaaagcaagttgttt

SEQ ID NO: 60267 - DNA, 25 bp, Probe sequence
tttgtggtcgctaactcaatttatc

SEQ ID NO: 60268 - DNA, 25 bp, Probe sequence
aatgttgttatgtgaaagcaagttg

SEQ ID NO: 60269 - DNA, 25 bp, Probe sequence
gtcgctaactcaatttatcctctaa

SEQ ID NO: 60270 - DNA, 25 bp, Probe sequence
tggtcgctaactcaatttatcctct

SEQ ID NO: 60271 - DNA, 25 bp, Probe sequence
gtggtcgctaactcaatttatcctc

SEQ ID NO: 60272 - DNA, 25 bp, Probe sequence
tagaggataaattgagttagcgacc

SEQ ID NO: 60273 - DNA, 25 bp, Probe sequence
acaacttgctttcacataacaacat

SEQ ID NO: 60274 - DNA, 25 bp, Probe sequence
aacaacttgctttcacataacaaca

SEQ ID NO: 60275 - DNA, 25 bp, Probe sequence
aaacaacttgctttcacataacaac

SEQ ID NO: 60276 - DNA, 25 bp, Probe sequence
gataaattgagttagcgaccacaaa

SEQ ID NO: 60277 - DNA, 25 bp, Probe sequence
caacttgctttcacataacaacatt

SEQ ID NO: 60278 - DNA, 25 bp, Probe sequence
gaggataaattgagttagcgaccac

SEQ ID NO: 60279 - DNA, 25 bp, Probe sequence
agaggataaattgagttagcgacca

SEQ ID NO: 60280 - DNA, 25 bp, Probe sequence
ttagaggataaattgagttagcgac

SEQ ID NO: 60281 - DNA, 25 bp, Probe sequence
tcacataagaacctctaacttcgtt

SEQ ID NO: 60282 - DNA, 25 bp, Probe sequence
atcacataagaacctctaacttcgt

SEQ ID NO: 60283 - DNA, 25 bp, Probe sequence
gtccaatcacataagaacctctaac

SEQ ID NO: 60284 - DNA, 25 bp, Probe sequence
tccaatcacataagaacctctaact

SEQ ID NO: 60285 - DNA, 25 bp, Probe sequence
aatcacataagaacctctaacttcg

SEQ ID NO: 60286 - DNA, 25 bp, Probe sequence
ccaatcacataagaacctctaactt

SEQ ID NO: 60287 - DNA, 25 bp, Probe sequence
agaacagttgtccaatcacataaga

SEQ ID NO: 60288 - DNA, 25 bp, Probe sequence
gagaacagttgtccaatcacataag

SEQ ID NO: 60289 - DNA, 25 bp, Probe sequence
aacagttgtccaatcacataagaac

SEQ ID NO: 60290 - DNA, 25 bp, Probe sequence
aacgaagttagaggttcttatgtga

SEQ ID NO: 60291 - DNA, 25 bp, Probe sequence
acgaagttagaggttcttatgtgat

SEQ ID NO: 60292 - DNA, 25 bp, Probe sequence
gttagaggttcttatgtgattggac

SEQ ID NO: 60293 - DNA, 25 bp, Probe sequence
agttagaggttcttatgtgattgga

SEQ ID NO: 60294 - DNA, 25 bp, Probe sequence
cgaagttagaggttcttatgtgatt

SEQ ID NO: 60295 - DNA, 25 bp, Probe sequence
cttatgtgattggacaactgttctc

SEQ ID NO: 60296 - DNA, 25 bp, Probe sequence
tcttatgtgattggacaactgttct

SEQ ID NO: 60297 - DNA, 25 bp, Probe sequence
aagttagaggttcttatgtgattgg

SEQ ID NO: 60298 - DNA, 25 bp, Probe sequence
gttcttatgtgattggacaactgtt

SEQ ID NO: 60299 - DNA, 25 bp, Probe sequence
atatagacaatgtatgtgaggtgaa

SEQ ID NO: 60300 - DNA, 25 bp, Probe sequence
aatatagacaatgtatgtgaggtga

SEQ ID NO: 60301 - DNA, 25 bp, Probe sequence
tagacaatgtatgtgaggtgaaagt

SEQ ID NO: 60302 - DNA, 25 bp, Probe sequence
atagacaatgtatgtgaggtgaaag

SEQ ID NO: 60303 - DNA, 25 bp, Probe sequence
tatagacaatgtatgtgaggtgaaa

SEQ ID NO: 60304 - DNA, 25 bp, Probe sequence
taatatagacaatgtatgtgaggtg

SEQ ID NO: 60305 - DNA, 25 bp, Probe sequence
tttatcatgtcaagtaaattcgtga

SEQ ID NO: 60306 - DNA, 25 bp, Probe sequence
tcatgtcaagtaaattcgtgatata

SEQ ID NO: 60307 - DNA, 25 bp, Probe sequence
ataatatagacaatgtatgtgaggt

SEQ ID NO: 60308 - DNA, 25 bp, Probe sequence
tcacctcacatacattgtctatatt

SEQ ID NO: 60309 - DNA, 25 bp, Probe sequence
ttcacctcacatacattgtctatat

SEQ ID NO: 60310 - DNA, 25 bp, Probe sequence
actttcacctcacatacattgtcta

SEQ ID NO: 60311 - DNA, 25 bp, Probe sequence
ctttcacctcacatacattgtctat

SEQ ID NO: 60312 - DNA, 25 bp, Probe sequence
tttcacctcacatacattgtctata

SEQ ID NO: 60313 - DNA, 25 bp, Probe sequence
cacctcacatacattgtctatatta

SEQ ID NO: 60314 - DNA, 25 bp, Probe sequence
tcacgaatttacttgacatgataaa

SEQ ID NO: 60315 - DNA, 25 bp, Probe sequence
tatatcacgaatttacttgacatga

SEQ ID NO: 60316 - DNA, 25 bp, Probe sequence
acctcacatacattgtctatattat

SEQ ID NO: 60317 - DNA, 25 bp, Probe sequence
atggataattgctttaggcttcttt

SEQ ID NO: 60318 - DNA, 25 bp, Probe sequence
tatggataattgctttaggcttctt

SEQ ID NO: 60319 - DNA, 25 bp, Probe sequence
atatggataattgctttaggcttct

SEQ ID NO: 60320 - DNA, 25 bp, Probe sequence
atccatgattgaactgataaagaca

SEQ ID NO: 60321 - DNA, 25 bp, Probe sequence
tccatgattgaactgataaagacat

SEQ ID NO: 60322 - DNA, 25 bp, Probe sequence
gacatatggataattgctttaggct

SEQ ID NO: 60323 - DNA, 25 bp, Probe sequence
agacatatggataattgctttaggc

SEQ ID NO: 60324 - DNA, 25 bp, Probe sequence
acatatggataattgctttaggctt

SEQ ID NO: 60325 - DNA, 25 bp, Probe sequence
tggataattgctttaggcttctttt

SEQ ID NO: 60326 - DNA, 25 bp, Probe sequence
aaagaagcctaaagcaattatccat

SEQ ID NO: 60327 - DNA, 25 bp, Probe sequence
aagaagcctaaagcaattatccata

SEQ ID NO: 60328 - DNA, 25 bp, Probe sequence
agaagcctaaagcaattatccatat

SEQ ID NO: 60329 - DNA, 25 bp, Probe sequence
tgtctttatcagttcaatcatggat

SEQ ID NO: 60330 - DNA, 25 bp, Probe sequence
atgtctttatcagttcaatcatgga

SEQ ID NO: 60331 - DNA, 25 bp, Probe sequence
gcctaaagcaattatccatatgtct

SEQ ID NO: 60332 - DNA, 25 bp, Probe sequence
agcctaaagcaattatccatatgtc

SEQ ID NO: 60333 - DNA, 25 bp, Probe sequence
aagcctaaagcaattatccatatgt

SEQ ID NO: 60334 - DNA, 25 bp, Probe sequence
aaaagaagcctaaagcaattatcca

SEQ ID NO: 60335 - DNA, 25 bp, Probe sequence
gcatcaatagcgttagactttagac

SEQ ID NO: 60336 - DNA, 25 bp, Probe sequence
ggcatcaatagcgttagactttaga

SEQ ID NO: 60337 - DNA, 25 bp, Probe sequence
agcgttagactttagacttacctta

SEQ ID NO: 60338 - DNA, 25 bp, Probe sequence
tagcgttagactttagacttacctt

SEQ ID NO: 60339 - DNA, 25 bp, Probe sequence
tggcatcaatagcgttagactttag

SEQ ID NO: 60340 - DNA, 25 bp, Probe sequence
gcgttagactttagacttaccttag

SEQ ID NO: 60341 - DNA, 25 bp, Probe sequence
atagcgttagactttagacttacct

SEQ ID NO: 60342 - DNA, 25 bp, Probe sequence
ttggcatcaatagcgttagacttta

SEQ ID NO: 60343 - DNA, 25 bp, Probe sequence
catcaatagcgttagactttagact

SEQ ID NO: 60344 - DNA, 25 bp, Probe sequence
gtctaaagtctaacgctattgatgc

SEQ ID NO: 60345 - DNA, 25 bp, Probe sequence
tctaaagtctaacgctattgatgcc

SEQ ID NO: 60346 - DNA, 25 bp, Probe sequence
ctaaagtctaacgctattgatgcca

SEQ ID NO: 60347 - DNA, 25 bp, Probe sequence
aaggtaagtctaaagtctaacgcta

SEQ ID NO: 60348 - DNA, 25 bp, Probe sequence
taaggtaagtctaaagtctaacgct

SEQ ID NO: 60349 - DNA, 25 bp, Probe sequence
aggtaagtctaaagtctaacgctat

SEQ ID NO: 60350 - DNA, 25 bp, Probe sequence
ctaaggtaagtctaaagtctaacgc

SEQ ID NO: 60351 - DNA, 25 bp, Probe sequence
taaagtctaacgctattgatgccaa

SEQ ID NO: 60352 - DNA, 25 bp, Probe sequence
agtctaaagtctaacgctattgatg

SEQ ID NO: 60353 - DNA, 25 bp, Probe sequence
atccttaaatggagattctcggttt

SEQ ID NO: 60354 - DNA, 25 bp, Probe sequence
aatccttaaatggagattctcggtt

SEQ ID NO: 60355 - DNA, 25 bp, Probe sequence
aaatccttaaatggagattctcggt

SEQ ID NO: 60356 - DNA, 25 bp, Probe sequence
gaaatccttaaatggagattctcgg

SEQ ID NO: 60357 - DNA, 25 bp, Probe sequence
ggaaatccttaaatggagattctcg

SEQ ID NO: 60358 - DNA, 25 bp, Probe sequence
cgaggaaatccttaaatggagattc

SEQ ID NO: 60359 - DNA, 25 bp, Probe sequence
aaaccgaggaaatccttaaatggag

SEQ ID NO: 60360 - DNA, 25 bp, Probe sequence
ccgaggaaatccttaaatggagatt

SEQ ID NO: 60361 - DNA, 25 bp, Probe sequence
accgaggaaatccttaaatggagat

SEQ ID NO: 60362 - DNA, 25 bp, Probe sequence
aaaccgagaatctccatttaaggat

SEQ ID NO: 60363 - DNA, 25 bp, Probe sequence
accgagaatctccatttaaggattt

SEQ ID NO: 60364 - DNA, 25 bp, Probe sequence
aaccgagaatctccatttaaggatt

SEQ ID NO: 60365 - DNA, 25 bp, Probe sequence
cgagaatctccatttaaggatttcc

SEQ ID NO: 60366 - DNA, 25 bp, Probe sequence
ccgagaatctccatttaaggatttc

SEQ ID NO: 60367 - DNA, 25 bp, Probe sequence
ctccatttaaggatttcctcggttt

SEQ ID NO: 60368 - DNA, 25 bp, Probe sequence
gaatctccatttaaggatttcctcg

SEQ ID NO: 60369 - DNA, 25 bp, Probe sequence
aatctccatttaaggatttcctcgg

SEQ ID NO: 60370 - DNA, 25 bp, Probe sequence
atctccatttaaggatttcctcggt

SEQ ID NO: 60371 - DNA, 25 bp, Probe sequence
tgatagcatccatgtatagtgatag

SEQ ID NO: 60372 - DNA, 25 bp, Probe sequence
gatagcatccatgtatagtgatagt

SEQ ID NO: 60373 - DNA, 25 bp, Probe sequence
agcatccatgtatagtgatagtatt

SEQ ID NO: 60374 - DNA, 25 bp, Probe sequence
ttgatagcatccatgtatagtgata

SEQ ID NO: 60375 - DNA, 25 bp, Probe sequence
aacctgttgtaaagtgtatagaaga

SEQ ID NO: 60376 - DNA, 25 bp, Probe sequence
acctgttgtaaagtgtatagaagat

SEQ ID NO: 60377 - DNA, 25 bp, Probe sequence
ttgtagaccttccttattcacattt

SEQ ID NO: 60378 - DNA, 25 bp, Probe sequence
agaccttccttattcacatttatct

SEQ ID NO: 60379 - DNA, 25 bp, Probe sequence
tttgttattatcagagttggtgttt

SEQ ID NO: 60380 - DNA, 25 bp, Probe sequence
ctatcactatacatggatgctatca

SEQ ID NO: 60381 - DNA, 25 bp, Probe sequence
actatcactatacatggatgctatc

SEQ ID NO: 60382 - DNA, 25 bp, Probe sequence
tatcactatacatggatgctatcaa

SEQ ID NO: 60383 - DNA, 25 bp, Probe sequence
aatactatcactatacatggatgct

SEQ ID NO: 60384 - DNA, 25 bp, Probe sequence
tcttctatacactttacaacaggtt

SEQ ID NO: 60385 - DNA, 25 bp, Probe sequence
atcttctatacactttacaacaggt

SEQ ID NO: 60386 - DNA, 25 bp, Probe sequence
aaatgtgaataaggaaggtctacaa

SEQ ID NO: 60387 - DNA, 25 bp, Probe sequence
agataaatgtgaataaggaaggtct

SEQ ID NO: 60388 - DNA, 25 bp, Probe sequence
aaacaccaactctgataataacaaa

SEQ ID NO: 60389 - DNA, 25 bp, Probe sequence
tatttatatgacgaaaccccgctaa

SEQ ID NO: 60390 - DNA, 25 bp, Probe sequence
atatttatatgacgaaaccccgcta

SEQ ID NO: 60391 - DNA, 25 bp, Probe sequence
tatatttatatgacgaaaccccgct

SEQ ID NO: 60392 - DNA, 25 bp, Probe sequence
atttatatgacgaaaccccgctaac

SEQ ID NO: 60393 - DNA, 25 bp, Probe sequence
gaaaccccgctaaccattaataaat

SEQ ID NO: 60394 - DNA, 25 bp, Probe sequence
cgaaaccccgctaaccattaataaa

SEQ ID NO: 60395 - DNA, 25 bp, Probe sequence
attaataaatggaagtggggttcat

SEQ ID NO: 60396 - DNA, 25 bp, Probe sequence
tttatatgacgaaaccccgctaacc

SEQ ID NO: 60397 - DNA, 25 bp, Probe sequence
ttaataaatggaagtggggttcatt

SEQ ID NO: 60398 - DNA, 25 bp, Probe sequence
ttagcggggtttcgtcatataaata

SEQ ID NO: 60399 - DNA, 25 bp, Probe sequence
agcggggtttcgtcatataaatata

SEQ ID NO: 60400 - DNA, 25 bp, Probe sequence
tagcggggtttcgtcatataaatat

SEQ ID NO: 60401 - DNA, 25 bp, Probe sequence
gttagcggggtttcgtcatataaat

SEQ ID NO: 60402 - DNA, 25 bp, Probe sequence
atttattaatggttagcggggtttc

SEQ ID NO: 60403 - DNA, 25 bp, Probe sequence
tttattaatggttagcggggtttcg

SEQ ID NO: 60404 - DNA, 25 bp, Probe sequence
atgaaccccacttccatttattaat

SEQ ID NO: 60405 - DNA, 25 bp, Probe sequence
ggttagcggggtttcgtcatataaa

SEQ ID NO: 60406 - DNA, 25 bp, Probe sequence
aatgaaccccacttccatttattaa

SEQ ID NO: 60407 - DNA, 25 bp, Probe sequence
ctatgatgtgacaatatgaggagga

SEQ ID NO: 60408 - DNA, 25 bp, Probe sequence
tgtgacaatatgaggaggataactt

SEQ ID NO: 60409 - DNA, 25 bp, Probe sequence
atgtgacaatatgaggaggataact

SEQ ID NO: 60410 - DNA, 25 bp, Probe sequence
tgatgtgacaatatgaggaggataa

SEQ ID NO: 60411 - DNA, 25 bp, Probe sequence
gcaatcctatgatgtgacaatatga

SEQ ID NO: 60412 - DNA, 25 bp, Probe sequence
gatgtgacaatatgaggaggataac

SEQ ID NO: 60413 - DNA, 25 bp, Probe sequence
atgatgtgacaatatgaggaggata

SEQ ID NO: 60414 - DNA, 25 bp, Probe sequence
tatgatgtgacaatatgaggaggat

SEQ ID NO: 60415 - DNA, 25 bp, Probe sequence
cctatgatgtgacaatatgaggagg

SEQ ID NO: 60416 - DNA, 25 bp, Probe sequence
tcctcctcatattgtcacatcatag

SEQ ID NO: 60417 - DNA, 25 bp, Probe sequence
aagttatcctcctcatattgtcaca

SEQ ID NO: 60418 - DNA, 25 bp, Probe sequence
ttatcctcctcatattgtcacatca

SEQ ID NO: 60419 - DNA, 25 bp, Probe sequence
agttatcctcctcatattgtcacat

SEQ ID NO: 60420 - DNA, 25 bp, Probe sequence
tcatattgtcacatcataggattgc

SEQ ID NO: 60421 - DNA, 25 bp, Probe sequence
atcctcctcatattgtcacatcata

SEQ ID NO: 60422 - DNA, 25 bp, Probe sequence
tatcctcctcatattgtcacatcat

SEQ ID NO: 60423 - DNA, 25 bp, Probe sequence
gttatcctcctcatattgtcacatc

SEQ ID NO: 60424 - DNA, 25 bp, Probe sequence
cctcctcatattgtcacatcatagg

SEQ ID NO: 60425 - DNA, 25 bp, Probe sequence
ggacaagtttcgcagctttataatg

SEQ ID NO: 60426 - DNA, 25 bp, Probe sequence
cagctttataatgtgcaacttgtcc

SEQ ID NO: 60427 - DNA, 25 bp, Probe sequence
tttataatgtgcaacttgtccgttt

SEQ ID NO: 60428 - DNA, 25 bp, Probe sequence
ctttataatgtgcaacttgtccgtt

SEQ ID NO: 60429 - DNA, 25 bp, Probe sequence
gacaagtttcgcagctttataatgt

SEQ ID NO: 60430 - DNA, 25 bp, Probe sequence
acaagtttcgcagctttataatgtg

SEQ ID NO: 60431 - DNA, 25 bp, Probe sequence
cggacaagtttcgcagctttataat

SEQ ID NO: 60432 - DNA, 25 bp, Probe sequence
agctttataatgtgcaacttgtccg

SEQ ID NO: 60433 - DNA, 25 bp, Probe sequence
gctttataatgtgcaacttgtccgt

SEQ ID NO: 60434 - DNA, 25 bp, Probe sequence
cattataaagctgcgaaacttgtcc

SEQ ID NO: 60435 - DNA, 25 bp, Probe sequence
ggacaagttgcacattataaagctg

SEQ ID NO: 60436 - DNA, 25 bp, Probe sequence
aaacggacaagttgcacattataaa

SEQ ID NO: 60437 - DNA, 25 bp, Probe sequence
acattataaagctgcgaaacttgtc

SEQ ID NO: 60438 - DNA, 25 bp, Probe sequence
aacggacaagttgcacattataaag

SEQ ID NO: 60439 - DNA, 25 bp, Probe sequence
cacattataaagctgcgaaacttgt

SEQ ID NO: 60440 - DNA, 25 bp, Probe sequence
attataaagctgcgaaacttgtccg

SEQ ID NO: 60441 - DNA, 25 bp, Probe sequence
cggacaagttgcacattataaagct

SEQ ID NO: 60442 - DNA, 25 bp, Probe sequence
acggacaagttgcacattataaagc

SEQ ID NO: 60443 - DNA, 25 bp, Probe sequence
aatcattgctaattcacttcacctt

SEQ ID NO: 60444 - DNA, 25 bp, Probe sequence
aagcaatggttattcctacttacgg

SEQ ID NO: 60445 - DNA, 25 bp, Probe sequence
tcattgctaattcacttcaccttaa

SEQ ID NO: 60446 - DNA, 25 bp, Probe sequence
atcattgctaattcacttcacctta

SEQ ID NO: 60447 - DNA, 25 bp, Probe sequence
cattgctaattcacttcaccttaat

SEQ ID NO: 60448 - DNA, 25 bp, Probe sequence
agcaatggttattcctacttacgga

SEQ ID NO: 60449 - DNA, 25 bp, Probe sequence
cctacttacggaaatcattgctaat

SEQ ID NO: 60450 - DNA, 25 bp, Probe sequence
aaagcaatggttattcctacttacg

SEQ ID NO: 60451 - DNA, 25 bp, Probe sequence
aaatcattgctaattcacttcacct

SEQ ID NO: 60452 - DNA, 25 bp, Probe sequence
aaggtgaagtgaattagcaatgatt

SEQ ID NO: 60453 - DNA, 25 bp, Probe sequence
ccgtaagtaggaataaccattgctt

SEQ ID NO: 60454 - DNA, 25 bp, Probe sequence
ttaaggtgaagtgaattagcaatga

SEQ ID NO: 60455 - DNA, 25 bp, Probe sequence
taaggtgaagtgaattagcaatgat

SEQ ID NO: 60456 - DNA, 25 bp, Probe sequence
attaaggtgaagtgaattagcaatg

SEQ ID NO: 60457 - DNA, 25 bp, Probe sequence
tccgtaagtaggaataaccattgct

SEQ ID NO: 60458 - DNA, 25 bp, Probe sequence
attagcaatgatttccgtaagtagg

SEQ ID NO: 60459 - DNA, 25 bp, Probe sequence
cgtaagtaggaataaccattgcttt

SEQ ID NO: 60460 - DNA, 25 bp, Probe sequence
aggtgaagtgaattagcaatgattt

SEQ ID NO: 60461 - DNA, 25 bp, Probe sequence
gcaaatacacatataccatcgagga

SEQ ID NO: 60462 - DNA, 25 bp, Probe sequence
agcaaatacacatataccatcgagg

SEQ ID NO: 60463 - DNA, 25 bp, Probe sequence
gagcaaatacacatataccatcgag

SEQ ID NO: 60464 - DNA, 25 bp, Probe sequence
ggagcaaatacacatataccatcga

SEQ ID NO: 60465 - DNA, 25 bp, Probe sequence
ataccatcgaggaaattaaagtgtg

SEQ ID NO: 60466 - DNA, 25 bp, Probe sequence
tggagcaaatacacatataccatcg

SEQ ID NO: 60467 - DNA, 25 bp, Probe sequence
ttggagcaaatacacatataccatc

SEQ ID NO: 60468 - DNA, 25 bp, Probe sequence
cttggagcaaatacacatataccat

SEQ ID NO: 60469 - DNA, 25 bp, Probe sequence
caaatacacatataccatcgaggaa

SEQ ID NO: 60470 - DNA, 25 bp, Probe sequence
tcgatggtatatgtgtatttgctcc

SEQ ID NO: 60471 - DNA, 25 bp, Probe sequence
ctcgatggtatatgtgtatttgctc

SEQ ID NO: 60472 - DNA, 25 bp, Probe sequence
cctcgatggtatatgtgtatttgct

SEQ ID NO: 60473 - DNA, 25 bp, Probe sequence
tcctcgatggtatatgtgtatttgc

SEQ ID NO: 60474 - DNA, 25 bp, Probe sequence
cacactttaatttcctcgatggtat

SEQ ID NO: 60475 - DNA, 25 bp, Probe sequence
cgatggtatatgtgtatttgctcca

SEQ ID NO: 60476 - DNA, 25 bp, Probe sequence
atggtatatgtgtatttgctccaag

SEQ ID NO: 60477 - DNA, 25 bp, Probe sequence
gatggtatatgtgtatttgctccaa

SEQ ID NO: 60478 - DNA, 25 bp, Probe sequence
ttcctcgatggtatatgtgtatttg

SEQ ID NO: 60479 - DNA, 25 bp, Probe sequence
agccacgagtcataattcttcatat

SEQ ID NO: 60480 - DNA, 25 bp, Probe sequence
tagccacgagtcataattcttcata

SEQ ID NO: 60481 - DNA, 25 bp, Probe sequence
gccacgagtcataattcttcatatt

SEQ ID NO: 60482 - DNA, 25 bp, Probe sequence
gtagccacgagtcataattcttcat

SEQ ID NO: 60483 - DNA, 25 bp, Probe sequence
ctgtagccacgagtcataattcttc

SEQ ID NO: 60484 - DNA, 25 bp, Probe sequence
aatactgtagccacgagtcataatt

SEQ ID NO: 60485 - DNA, 25 bp, Probe sequence
atactgtagccacgagtcataattc

SEQ ID NO: 60486 - DNA, 25 bp, Probe sequence
tactgtagccacgagtcataattct

SEQ ID NO: 60487 - DNA, 25 bp, Probe sequence
tgtagccacgagtcataattcttca

SEQ ID NO: 60488 - DNA, 25 bp, Probe sequence
atatgaagaattatgactcgtggct

SEQ ID NO: 60489 - DNA, 25 bp, Probe sequence
tatgaagaattatgactcgtggcta

SEQ ID NO: 60490 - DNA, 25 bp, Probe sequence
atgaagaattatgactcgtggctac

SEQ ID NO: 60491 - DNA, 25 bp, Probe sequence
aatatgaagaattatgactcgtggc

SEQ ID NO: 60492 - DNA, 25 bp, Probe sequence
gaagaattatgactcgtggctacag

SEQ ID NO: 60493 - DNA, 25 bp, Probe sequence
aattatgactcgtggctacagtatt

SEQ ID NO: 60494 - DNA, 25 bp, Probe sequence
gaattatgactcgtggctacagtat

SEQ ID NO: 60495 - DNA, 25 bp, Probe sequence
agaattatgactcgtggctacagta

SEQ ID NO: 60496 - DNA, 25 bp, Probe sequence
tgaagaattatgactcgtggctaca

SEQ ID NO: 60497 - DNA, 25 bp, Probe sequence
attgatataggtgagatgcttggac

SEQ ID NO: 60498 - DNA, 25 bp, Probe sequence
tgatataggtgagatgcttggactt

SEQ ID NO: 60499 - DNA, 25 bp, Probe sequence
ttgatataggtgagatgcttggact

SEQ ID NO: 60500 - DNA, 25 bp, Probe sequence
tattgatataggtgagatgcttgga

SEQ ID NO: 60501 - DNA, 25 bp, Probe sequence
cgtctattgatataggtgagatgct

SEQ ID NO: 60502 - DNA, 25 bp, Probe sequence
tcgtctattgatataggtgagatgc

SEQ ID NO: 60503 - DNA, 25 bp, Probe sequence
tccaggcatgtcgtctattgatata

SEQ ID NO: 60504 - DNA, 25 bp, Probe sequence
tatgacagtaaggactaggtacagt

SEQ ID NO: 60505 - DNA, 25 bp, Probe sequence
ctattgatataggtgagatgcttgg

SEQ ID NO: 60506 - DNA, 25 bp, Probe sequence
gtccaagcatctcacctatatcaat

SEQ ID NO: 60507 - DNA, 25 bp, Probe sequence
agtccaagcatctcacctatatcaa

SEQ ID NO: 60508 - DNA, 25 bp, Probe sequence
aagtccaagcatctcacctatatca

SEQ ID NO: 60509 - DNA, 25 bp, Probe sequence
tccaagcatctcacctatatcaata

SEQ ID NO: 60510 - DNA, 25 bp, Probe sequence
gcatctcacctatatcaatagacga

SEQ ID NO: 60511 - DNA, 25 bp, Probe sequence
agcatctcacctatatcaatagacg

SEQ ID NO: 60512 - DNA, 25 bp, Probe sequence
tatatcaatagacgacatgcctgga

SEQ ID NO: 60513 - DNA, 25 bp, Probe sequence
actgtacctagtccttactgtcata

SEQ ID NO: 60514 - DNA, 25 bp, Probe sequence
ccaagcatctcacctatatcaatag

SEQ ID NO: 60515 - DNA, 25 bp, Probe sequence
tttccatagagttgtgacagcattt

SEQ ID NO: 60516 - DNA, 25 bp, Probe sequence
ctttccatagagttgtgacagcatt

SEQ ID NO: 60517 - DNA, 25 bp, Probe sequence
tctttccatagagttgtgacagcat

SEQ ID NO: 60518 - DNA, 25 bp, Probe sequence
gtgagtgatatttattagggaaagc

SEQ ID NO: 60519 - DNA, 25 bp, Probe sequence
tctttgttagaactctttccataga

SEQ ID NO: 60520 - DNA, 25 bp, Probe sequence
aaatctttgttagaactctttccat

SEQ ID NO: 60521 - DNA, 25 bp, Probe sequence
tgagtgatatttattagggaaagct

SEQ ID NO: 60522 - DNA, 25 bp, Probe sequence
ttccatagagttgtgacagcatttt

SEQ ID NO: 60523 - DNA, 25 bp, Probe sequence
atctttgttagaactctttccatag

SEQ ID NO: 60524 - DNA, 25 bp, Probe sequence
aaatgctgtcacaactctatggaaa

SEQ ID NO: 60525 - DNA, 25 bp, Probe sequence
aatgctgtcacaactctatggaaag

SEQ ID NO: 60526 - DNA, 25 bp, Probe sequence
atgctgtcacaactctatggaaaga

SEQ ID NO: 60527 - DNA, 25 bp, Probe sequence
gctttccctaataaatatcactcac

SEQ ID NO: 60528 - DNA, 25 bp, Probe sequence
tctatggaaagagttctaacaaaga

SEQ ID NO: 60529 - DNA, 25 bp, Probe sequence
atggaaagagttctaacaaagattt

SEQ ID NO: 60530 - DNA, 25 bp, Probe sequence
agctttccctaataaatatcactca

SEQ ID NO: 60531 - DNA, 25 bp, Probe sequence
aaaatgctgtcacaactctatggaa

SEQ ID NO: 60532 - DNA, 25 bp, Probe sequence
ctatggaaagagttctaacaaagat

SEQ ID NO: 60533 - DNA, 25 bp, Probe sequence
ttgaactatgaagacttatctgtgg

SEQ ID NO: 60534 - DNA, 25 bp, Probe sequence
tgaactatgaagacttatctgtggg

SEQ ID NO: 60535 - DNA, 25 bp, Probe sequence
gaactatgaagacttatctgtgggc

SEQ ID NO: 60536 - DNA, 25 bp, Probe sequence
tatgaagacttatctgtgggcgttt

SEQ ID NO: 60537 - DNA, 25 bp, Probe sequence
tacaagacatgacaaatcgagctat

SEQ ID NO: 60538 - DNA, 25 bp, Probe sequence
atacaagacatgacaaatcgagcta

SEQ ID NO: 60539 - DNA, 25 bp, Probe sequence
tatacaagacatgacaaatcgagct

SEQ ID NO: 60540 - DNA, 25 bp, Probe sequence
atatacaagacatgacaaatcgagc

SEQ ID NO: 60541 - DNA, 25 bp, Probe sequence
acatgacaaatcgagctatccaatt

SEQ ID NO: 60542 - DNA, 25 bp, Probe sequence
ccacagataagtcttcatagttcaa

SEQ ID NO: 60543 - DNA, 25 bp, Probe sequence
cccacagataagtcttcatagttca

SEQ ID NO: 60544 - DNA, 25 bp, Probe sequence
gcccacagataagtcttcatagttc

SEQ ID NO: 60545 - DNA, 25 bp, Probe sequence
aaacgcccacagataagtcttcata

SEQ ID NO: 60546 - DNA, 25 bp, Probe sequence
agctcgatttgtcatgtcttgtata

SEQ ID NO: 60547 - DNA, 25 bp, Probe sequence
tagctcgatttgtcatgtcttgtat

SEQ ID NO: 60548 - DNA, 25 bp, Probe sequence
atagctcgatttgtcatgtcttgta

SEQ ID NO: 60549 - DNA, 25 bp, Probe sequence
gctcgatttgtcatgtcttgtatat

SEQ ID NO: 60550 - DNA, 25 bp, Probe sequence
aattggatagctcgatttgtcatgt

SEQ ID NO: 60551 - DNA, 25 bp, Probe sequence
actatgactgataataccaaggagg

SEQ ID NO: 60552 - DNA, 25 bp, Probe sequence
tgaaccattaagttatcaagaggat

SEQ ID NO: 60553 - DNA, 25 bp, Probe sequence
atgaaccattaagttatcaagagga

SEQ ID NO: 60554 - DNA, 25 bp, Probe sequence
ctatgactgataataccaaggaggt

SEQ ID NO: 60555 - DNA, 25 bp, Probe sequence
ggacacaacttattgctatgaaagg

SEQ ID NO: 60556 - DNA, 25 bp, Probe sequence
tactatgactgataataccaaggag

SEQ ID NO: 60557 - DNA, 25 bp, Probe sequence
caaaggacacaacttattgctatga

SEQ ID NO: 60558 - DNA, 25 bp, Probe sequence
tcaaaggacacaacttattgctatg

SEQ ID NO: 60559 - DNA, 25 bp, Probe sequence
gacacaacttattgctatgaaaggc

SEQ ID NO: 60560 - DNA, 25 bp, Probe sequence
cctccttggtattatcagtcatagt

SEQ ID NO: 60561 - DNA, 25 bp, Probe sequence
tcctcttgataacttaatggttcat

SEQ ID NO: 60562 - DNA, 25 bp, Probe sequence
atcctcttgataacttaatggttca

SEQ ID NO: 60563 - DNA, 25 bp, Probe sequence
acctccttggtattatcagtcatag

SEQ ID NO: 60564 - DNA, 25 bp, Probe sequence
cctttcatagcaataagttgtgtcc

SEQ ID NO: 60565 - DNA, 25 bp, Probe sequence
ctccttggtattatcagtcatagta

SEQ ID NO: 60566 - DNA, 25 bp, Probe sequence
catagcaataagttgtgtcctttga

SEQ ID NO: 60567 - DNA, 25 bp, Probe sequence
tcatagcaataagttgtgtcctttg

SEQ ID NO: 60568 - DNA, 25 bp, Probe sequence
ctttcatagcaataagttgtgtcct

SEQ ID NO: 60569 - DNA, 25 bp, Probe sequence
aatctggagaaataggaggacattg

SEQ ID NO: 60570 - DNA, 25 bp, Probe sequence
aaatctggagaaataggaggacatt

SEQ ID NO: 60571 - DNA, 25 bp, Probe sequence
atctggagaaataggaggacattgc

SEQ ID NO: 60572 - DNA, 25 bp, Probe sequence
aaaatctggagaaataggaggacat

SEQ ID NO: 60573 - DNA, 25 bp, Probe sequence
taaaatctggagaaataggaggaca

SEQ ID NO: 60574 - DNA, 25 bp, Probe sequence
tctggagaaataggaggacattgcc

SEQ ID NO: 60575 - DNA, 25 bp, Probe sequence
ataaaatctggagaaataggaggac

SEQ ID NO: 60576 - DNA, 25 bp, Probe sequence
aataaaatctggagaaataggagga

SEQ ID NO: 60577 - DNA, 25 bp, Probe sequence
taataaaatctggagaaataggagg

SEQ ID NO: 60578 - DNA, 25 bp, Probe sequence
caatgtcctcctatttctccagatt

SEQ ID NO: 60579 - DNA, 25 bp, Probe sequence
aatgtcctcctatttctccagattt

SEQ ID NO: 60580 - DNA, 25 bp, Probe sequence
gcaatgtcctcctatttctccagat

SEQ ID NO: 60581 - DNA, 25 bp, Probe sequence
atgtcctcctatttctccagatttt

SEQ ID NO: 60582 - DNA, 25 bp, Probe sequence
tgtcctcctatttctccagatttta

SEQ ID NO: 60583 - DNA, 25 bp, Probe sequence
ggcaatgtcctcctatttctccaga

SEQ ID NO: 60584 - DNA, 25 bp, Probe sequence
gtcctcctatttctccagattttat

SEQ ID NO: 60585 - DNA, 25 bp, Probe sequence
tcctcctatttctccagattttatt

SEQ ID NO: 60586 - DNA, 25 bp, Probe sequence
cctcctatttctccagattttatta

SEQ ID NO: 60587 - DNA, 25 bp, Probe sequence
gtgataatgtgaatggattgagcaa

SEQ ID NO: 60588 - DNA, 25 bp, Probe sequence
tgataatgtgaatggattgagcaat

SEQ ID NO: 60589 - DNA, 25 bp, Probe sequence
cgtgataatgtgaatggattgagca

SEQ ID NO: 60590 - DNA, 25 bp, Probe sequence
gataatgtgaatggattgagcaatt

SEQ ID NO: 60591 - DNA, 25 bp, Probe sequence
tgaacgtgataatgtgaatggattg

SEQ ID NO: 60592 - DNA, 25 bp, Probe sequence
aacgtgataatgtgaatggattgag

SEQ ID NO: 60593 - DNA, 25 bp, Probe sequence
gaacgtgataatgtgaatggattga

SEQ ID NO: 60594 - DNA, 25 bp, Probe sequence
ttgaacgtgataatgtgaatggatt

SEQ ID NO: 60595 - DNA, 25 bp, Probe sequence
attgaacgtgataatgtgaatggat

SEQ ID NO: 60596 - DNA, 25 bp, Probe sequence
ttgctcaatccattcacattatcac

SEQ ID NO: 60597 - DNA, 25 bp, Probe sequence
attgctcaatccattcacattatca

SEQ ID NO: 60598 - DNA, 25 bp, Probe sequence
tgctcaatccattcacattatcacg

SEQ ID NO: 60599 - DNA, 25 bp, Probe sequence
aattgctcaatccattcacattatc

SEQ ID NO: 60600 - DNA, 25 bp, Probe sequence
caatccattcacattatcacgttca

SEQ ID NO: 60601 - DNA, 25 bp, Probe sequence
tcaatccattcacattatcacgttc

SEQ ID NO: 60602 - DNA, 25 bp, Probe sequence
ctcaatccattcacattatcacgtt

SEQ ID NO: 60603 - DNA, 25 bp, Probe sequence
aatccattcacattatcacgttcaa

SEQ ID NO: 60604 - DNA, 25 bp, Probe sequence
atccattcacattatcacgttcaat

SEQ ID NO: 60605 - DNA, 25 bp, Probe sequence
aagcaattcgtctctactcttatcg

SEQ ID NO: 60606 - DNA, 25 bp, Probe sequence
agcaattcgtctctactcttatcgg

SEQ ID NO: 60607 - DNA, 25 bp, Probe sequence
aaagcaattcgtctctactcttatc

SEQ ID NO: 60608 - DNA, 25 bp, Probe sequence
tatgagcgtctaacaaatagagagg

SEQ ID NO: 60609 - DNA, 25 bp, Probe sequence
tgagcgtctaacaaatagagaggta

SEQ ID NO: 60610 - DNA, 25 bp, Probe sequence
gagcgtctaacaaatagagaggtac

SEQ ID NO: 60611 - DNA, 25 bp, Probe sequence
atgagcgtctaacaaatagagaggt

SEQ ID NO: 60612 - DNA, 25 bp, Probe sequence
caattcgtctctactcttatcgggc

SEQ ID NO: 60613 - DNA, 25 bp, Probe sequence
gcaattcgtctctactcttatcggg

SEQ ID NO: 60614 - DNA, 25 bp, Probe sequence
cgataagagtagagacgaattgctt

SEQ ID NO: 60615 - DNA, 25 bp, Probe sequence
ccgataagagtagagacgaattgct

SEQ ID NO: 60616 - DNA, 25 bp, Probe sequence
gataagagtagagacgaattgcttt

SEQ ID NO: 60617 - DNA, 25 bp, Probe sequence
cctctctatttgttagacgctcata

SEQ ID NO: 60618 - DNA, 25 bp, Probe sequence
tacctctctatttgttagacgctca

SEQ ID NO: 60619 - DNA, 25 bp, Probe sequence
gtacctctctatttgttagacgctc

SEQ ID NO: 60620 - DNA, 25 bp, Probe sequence
acctctctatttgttagacgctcat

SEQ ID NO: 60621 - DNA, 25 bp, Probe sequence
cccgataagagtagagacgaattgc

SEQ ID NO: 60622 - DNA, 25 bp, Probe sequence
gcccgataagagtagagacgaattg

SEQ ID NO: 60623 - DNA, 25 bp, Probe sequence
ggctaatgtgtaagagtctgagata

SEQ ID NO: 60624 - DNA, 25 bp, Probe sequence
gctaatgtgtaagagtctgagatat

SEQ ID NO: 60625 - DNA, 25 bp, Probe sequence
aatatagattgagcacgaagtgatt

SEQ ID NO: 60626 - DNA, 25 bp, Probe sequence
acgaagtgatttgaaataaggttgt

SEQ ID NO: 60627 - DNA, 25 bp, Probe sequence
gcggttctttatcatttctatctca

SEQ ID NO: 60628 - DNA, 25 bp, Probe sequence
ttgttagcggttctttatcatttct

SEQ ID NO: 60629 - DNA, 25 bp, Probe sequence
cgaagtgatttgaaataaggttgtg

SEQ ID NO: 60630 - DNA, 25 bp, Probe sequence
agcggttctttatcatttctatctc

SEQ ID NO: 60631 - DNA, 25 bp, Probe sequence
atttgaaataaggttgtgaaaggga

SEQ ID NO: 60632 - DNA, 25 bp, Probe sequence
tatctcagactcttacacattagcc

SEQ ID NO: 60633 - DNA, 25 bp, Probe sequence
atatctcagactcttacacattagc

SEQ ID NO: 60634 - DNA, 25 bp, Probe sequence
aatcacttcgtgctcaatctatatt

SEQ ID NO: 60635 - DNA, 25 bp, Probe sequence
agaaatgataaagaaccgctaacaa

SEQ ID NO: 60636 - DNA, 25 bp, Probe sequence
tgagatagaaatgataaagaaccgc

SEQ ID NO: 60637 - DNA, 25 bp, Probe sequence
acaaccttatttcaaatcacttcgt

SEQ ID NO: 60638 - DNA, 25 bp, Probe sequence
cacaaccttatttcaaatcacttcg

SEQ ID NO: 60639 - DNA, 25 bp, Probe sequence
gagatagaaatgataaagaaccgct

SEQ ID NO: 60640 - DNA, 25 bp, Probe sequence
tccctttcacaaccttatttcaaat

SEQ ID NO: 60641 - DNA, 25 bp, Probe sequence
tgcgattctgatacaagattatgat

SEQ ID NO: 60642 - DNA, 25 bp, Probe sequence
atgcgattctgatacaagattatga

SEQ ID NO: 60643 - DNA, 25 bp, Probe sequence
tgttatgcgattctgatacaagatt

SEQ ID NO: 60644 - DNA, 25 bp, Probe sequence
gatcaattacacattagtggtgctt

SEQ ID NO: 60645 - DNA, 25 bp, Probe sequence
gttatgcgattctgatacaagatta

SEQ ID NO: 60646 - DNA, 25 bp, Probe sequence
attcgttgttatgcgattctgatac

SEQ ID NO: 60647 - DNA, 25 bp, Probe sequence
tatgcgattctgatacaagattatg

SEQ ID NO: 60648 - DNA, 25 bp, Probe sequence
aattcgttgttatgcgattctgata

SEQ ID NO: 60649 - DNA, 25 bp, Probe sequence
ttcgttgttatgcgattctgataca

SEQ ID NO: 60650 - DNA, 25 bp, Probe sequence
tcataatcttgtatcagaatcgcat

SEQ ID NO: 60651 - DNA, 25 bp, Probe sequence
atcataatcttgtatcagaatcgca

SEQ ID NO: 60652 - DNA, 25 bp, Probe sequence
aatcttgtatcagaatcgcataaca

SEQ ID NO: 60653 - DNA, 25 bp, Probe sequence
aagcaccactaatgtgtaattgatc

SEQ ID NO: 60654 - DNA, 25 bp, Probe sequence
taatcttgtatcagaatcgcataac

SEQ ID NO: 60655 - DNA, 25 bp, Probe sequence
gtatcagaatcgcataacaacgaat

SEQ ID NO: 60656 - DNA, 25 bp, Probe sequence
cataatcttgtatcagaatcgcata

SEQ ID NO: 60657 - DNA, 25 bp, Probe sequence
tatcagaatcgcataacaacgaatt

SEQ ID NO: 60658 - DNA, 25 bp, Probe sequence
tgtatcagaatcgcataacaacgaa

SEQ ID NO: 60659 - DNA, 25 bp, Probe sequence
ttggttacagtttaaaggagtattt

SEQ ID NO: 60660 - DNA, 25 bp, Probe sequence
tttggttacagtttaaaggagtatt

SEQ ID NO: 60661 - DNA, 25 bp, Probe sequence
aaagcctccagtattttgaaatttt

SEQ ID NO: 60662 - DNA, 25 bp, Probe sequence
agcctccagtattttgaaattttaa

SEQ ID NO: 60663 - DNA, 25 bp, Probe sequence
aagcctccagtattttgaaatttta

SEQ ID NO: 60664 - DNA, 25 bp, Probe sequence
aaaagcctccagtattttgaaattt

SEQ ID NO: 60665 - DNA, 25 bp, Probe sequence
aactaaaaggtggagtaatatgttt

SEQ ID NO: 60666 - DNA, 25 bp, Probe sequence
gtaactaaaaggtggagtaatatgt

SEQ ID NO: 60667 - DNA, 25 bp, Probe sequence
tgtaactaaaaggtggagtaatatg

SEQ ID NO: 60668 - DNA, 25 bp, Probe sequence
aatactcctttaaactgtaaccaaa

SEQ ID NO: 60669 - DNA, 25 bp, Probe sequence
aaatactcctttaaactgtaaccaa

SEQ ID NO: 60670 - DNA, 25 bp, Probe sequence
aaaatttcaaaatactggaggcttt

SEQ ID NO: 60671 - DNA, 25 bp, Probe sequence
taaaatttcaaaatactggaggctt

SEQ ID NO: 60672 - DNA, 25 bp, Probe sequence
ttaaaatttcaaaatactggaggct

SEQ ID NO: 60673 - DNA, 25 bp, Probe sequence
aaatttcaaaatactggaggctttt

SEQ ID NO: 60674 - DNA, 25 bp, Probe sequence
catattactccaccttttagttaca

SEQ ID NO: 60675 - DNA, 25 bp, Probe sequence
acatattactccaccttttagttac

SEQ ID NO: 60676 - DNA, 25 bp, Probe sequence
aaacatattactccaccttttagtt

SEQ ID NO: 60677 - DNA, 25 bp, Probe sequence
tgatacatcaatgcagcttcaacgt

SEQ ID NO: 60678 - DNA, 25 bp, Probe sequence
atcaatgcagcttcaacgttataat

SEQ ID NO: 60679 - DNA, 25 bp, Probe sequence
catcaatgcagcttcaacgttataa

SEQ ID NO: 60680 - DNA, 25 bp, Probe sequence
tcaatgcagcttcaacgttataata

SEQ ID NO: 60681 - DNA, 25 bp, Probe sequence
tgcagcttcaacgttataataagat

SEQ ID NO: 60682 - DNA, 25 bp, Probe sequence
atgcagcttcaacgttataataaga

SEQ ID NO: 60683 - DNA, 25 bp, Probe sequence
caatgcagcttcaacgttataataa

SEQ ID NO: 60684 - DNA, 25 bp, Probe sequence
acatcaatgcagcttcaacgttata

SEQ ID NO: 60685 - DNA, 25 bp, Probe sequence
tacatcaatgcagcttcaacgttat

SEQ ID NO: 60686 - DNA, 25 bp, Probe sequence
acgttgaagctgcattgatgtatca

SEQ ID NO: 60687 - DNA, 25 bp, Probe sequence
attataacgttgaagctgcattgat

SEQ ID NO: 60688 - DNA, 25 bp, Probe sequence
ttataacgttgaagctgcattgatg

SEQ ID NO: 60689 - DNA, 25 bp, Probe sequence
tattataacgttgaagctgcattga

SEQ ID NO: 60690 - DNA, 25 bp, Probe sequence
tcttattataacgttgaagctgcat

SEQ ID NO: 60691 - DNA, 25 bp, Probe sequence
atcttattataacgttgaagctgca

SEQ ID NO: 60692 - DNA, 25 bp, Probe sequence
taacgttgaagctgcattgatgtat

SEQ ID NO: 60693 - DNA, 25 bp, Probe sequence
ataacgttgaagctgcattgatgta

SEQ ID NO: 60694 - DNA, 25 bp, Probe sequence
tataacgttgaagctgcattgatgt

SEQ ID NO: 60695 - DNA, 25 bp, Probe sequence
tataactgaatgtgattggtgacaa

SEQ ID NO: 60696 - DNA, 25 bp, Probe sequence
tacagatggctttcagtagagtagt

SEQ ID NO: 60697 - DNA, 25 bp, Probe sequence
atacagatggctttcagtagagtag

SEQ ID NO: 60698 - DNA, 25 bp, Probe sequence
atggctttcagtagagtagtggatt

SEQ ID NO: 60699 - DNA, 25 bp, Probe sequence
ttataactgaatgtgattggtgaca

SEQ ID NO: 60700 - DNA, 25 bp, Probe sequence
atatacagatggctttcagtagagt

SEQ ID NO: 60701 - DNA, 25 bp, Probe sequence
ataactgaatgtgattggtgacaat

SEQ ID NO: 60702 - DNA, 25 bp, Probe sequence
gatggctttcagtagagtagtggat

SEQ ID NO: 60703 - DNA, 25 bp, Probe sequence
attataactgaatgtgattggtgac

SEQ ID NO: 60704 - DNA, 25 bp, Probe sequence
ttgtcaccaatcacattcagttata

SEQ ID NO: 60705 - DNA, 25 bp, Probe sequence
actactctactgaaagccatctgta

SEQ ID NO: 60706 - DNA, 25 bp, Probe sequence
ctactctactgaaagccatctgtat

SEQ ID NO: 60707 - DNA, 25 bp, Probe sequence
aatccactactctactgaaagccat

SEQ ID NO: 60708 - DNA, 25 bp, Probe sequence
tgtcaccaatcacattcagttataa

SEQ ID NO: 60709 - DNA, 25 bp, Probe sequence
actctactgaaagccatctgtatat

SEQ ID NO: 60710 - DNA, 25 bp, Probe sequence
attgtcaccaatcacattcagttat

SEQ ID NO: 60711 - DNA, 25 bp, Probe sequence
atccactactctactgaaagccatc

SEQ ID NO: 60712 - DNA, 25 bp, Probe sequence
gtcaccaatcacattcagttataat

SEQ ID NO: 60713 - DNA, 25 bp, Probe sequence
agtatgatagggaagggtgagataa

SEQ ID NO: 60714 - DNA, 25 bp, Probe sequence
aagtatgatagggaagggtgagata

SEQ ID NO: 60715 - DNA, 25 bp, Probe sequence
taagtatgatagggaagggtgagat

SEQ ID NO: 60716 - DNA, 25 bp, Probe sequence
ataagtatgatagggaagggtgaga

SEQ ID NO: 60717 - DNA, 25 bp, Probe sequence
aataagtatgatagggaagggtgag

SEQ ID NO: 60718 - DNA, 25 bp, Probe sequence
gtatgatagggaagggtgagataat

SEQ ID NO: 60719 - DNA, 25 bp, Probe sequence
aaataagtatgatagggaagggtga

SEQ ID NO: 60720 - DNA, 25 bp, Probe sequence
atgatagggaagggtgagataattt

SEQ ID NO: 60721 - DNA, 25 bp, Probe sequence
atggaacataaacagttaggtcatt

SEQ ID NO: 60722 - DNA, 25 bp, Probe sequence
tctcacccttccctatcatacttat

SEQ ID NO: 60723 - DNA, 25 bp, Probe sequence
atctcacccttccctatcatactta

SEQ ID NO: 60724 - DNA, 25 bp, Probe sequence
tatctcacccttccctatcatactt

SEQ ID NO: 60725 - DNA, 25 bp, Probe sequence
ttatctcacccttccctatcatact

SEQ ID NO: 60726 - DNA, 25 bp, Probe sequence
ctcacccttccctatcatacttatt

SEQ ID NO: 60727 - DNA, 25 bp, Probe sequence
attatctcacccttccctatcatac

SEQ ID NO: 60728 - DNA, 25 bp, Probe sequence
tcacccttccctatcatacttattt

SEQ ID NO: 60729 - DNA, 25 bp, Probe sequence
aaattatctcacccttccctatcat

SEQ ID NO: 60730 - DNA, 25 bp, Probe sequence
aatgacctaactgtttatgttccat

SEQ ID NO: 60731 - DNA, 25 bp, Probe sequence
aacgacggtagaaggaggaattatt

SEQ ID NO: 60732 - DNA, 25 bp, Probe sequence
gctttgtgtggtttgttattatctt

SEQ ID NO: 60733 - DNA, 25 bp, Probe sequence
aaacgacggtagaaggaggaattat

SEQ ID NO: 60734 - DNA, 25 bp, Probe sequence
tttgtgtggtttgttattatcttgt

SEQ ID NO: 60735 - DNA, 25 bp, Probe sequence
agctttgtgtggtttgttattatct

SEQ ID NO: 60736 - DNA, 25 bp, Probe sequence
aagtagctttgtgtggtttgttatt

SEQ ID NO: 60737 - DNA, 25 bp, Probe sequence
aataagtagctttgtgtggtttgtt

SEQ ID NO: 60738 - DNA, 25 bp, Probe sequence
aaataagtagctttgtgtggtttgt

SEQ ID NO: 60739 - DNA, 25 bp, Probe sequence
agtagctttgtgtggtttgttatta

SEQ ID NO: 60740 - DNA, 25 bp, Probe sequence
aataattcctccttctaccgtcgtt

SEQ ID NO: 60741 - DNA, 25 bp, Probe sequence
aagataataacaaaccacacaaagc

SEQ ID NO: 60742 - DNA, 25 bp, Probe sequence
ataattcctccttctaccgtcgttt

SEQ ID NO: 60743 - DNA, 25 bp, Probe sequence
acaagataataacaaaccacacaaa

SEQ ID NO: 60744 - DNA, 25 bp, Probe sequence
acaaaccacacaaagctacttattt

SEQ ID NO: 60745 - DNA, 25 bp, Probe sequence
aacaaaccacacaaagctacttatt

SEQ ID NO: 60746 - DNA, 25 bp, Probe sequence
aataacaaaccacacaaagctactt

SEQ ID NO: 60747 - DNA, 25 bp, Probe sequence
agataataacaaaccacacaaagct

SEQ ID NO: 60748 - DNA, 25 bp, Probe sequence
taataacaaaccacacaaagctact

SEQ ID NO: 60749 - DNA, 25 bp, Probe sequence
agtaatacgttgtagatgtggtcat

SEQ ID NO: 60750 - DNA, 25 bp, Probe sequence
tagtaatacgttgtagatgtggtca

SEQ ID NO: 60751 - DNA, 25 bp, Probe sequence
ccttaaattggagcgattgtcataa

SEQ ID NO: 60752 - DNA, 25 bp, Probe sequence
accttaaattggagcgattgtcata

SEQ ID NO: 60753 - DNA, 25 bp, Probe sequence
gtaatacgttgtagatgtggtcatt

SEQ ID NO: 60754 - DNA, 25 bp, Probe sequence
tggagcgattgtcataaattagaaa

SEQ ID NO: 60755 - DNA, 25 bp, Probe sequence
ttggagcgattgtcataaattagaa

SEQ ID NO: 60756 - DNA, 25 bp, Probe sequence
aaccttaaattggagcgattgtcat

SEQ ID NO: 60757 - DNA, 25 bp, Probe sequence
tatcaaccttaaattggagcgattg

SEQ ID NO: 60758 - DNA, 25 bp, Probe sequence
tgaccacatctacaacgtattacta

SEQ ID NO: 60759 - DNA, 25 bp, Probe sequence
atgaccacatctacaacgtattact

SEQ ID NO: 60760 - DNA, 25 bp, Probe sequence
ttatgacaatcgctccaatttaagg

SEQ ID NO: 60761 - DNA, 25 bp, Probe sequence
tatgacaatcgctccaatttaaggt

SEQ ID NO: 60762 - DNA, 25 bp, Probe sequence
aatgaccacatctacaacgtattac

SEQ ID NO: 60763 - DNA, 25 bp, Probe sequence
caatcgctccaatttaaggttgata

SEQ ID NO: 60764 - DNA, 25 bp, Probe sequence
atgacaatcgctccaatttaaggtt

SEQ ID NO: 60765 - DNA, 25 bp, Probe sequence
ttctaatttatgacaatcgctccaa

SEQ ID NO: 60766 - DNA, 25 bp, Probe sequence
tttctaatttatgacaatcgctcca

SEQ ID NO: 60767 - DNA, 25 bp, Probe sequence
tttgcatttgttggtaattttgaca

SEQ ID NO: 60768 - DNA, 25 bp, Probe sequence
atttgcatttgttggtaattttgac

SEQ ID NO: 60769 - DNA, 25 bp, Probe sequence
aatttgcatttgttggtaattttga

SEQ ID NO: 60770 - DNA, 25 bp, Probe sequence
gcatttgttggtaattttgacaacg

SEQ ID NO: 60771 - DNA, 25 bp, Probe sequence
aatttaatttgcatttgttggtaat

SEQ ID NO: 60772 - DNA, 25 bp, Probe sequence
tttaatttgcatttgttggtaattt

SEQ ID NO: 60773 - DNA, 25 bp, Probe sequence
aaatttaatttgcatttgttggtaa

SEQ ID NO: 60774 - DNA, 25 bp, Probe sequence
ttgcatttgttggtaattttgacaa

SEQ ID NO: 60775 - DNA, 25 bp, Probe sequence
tgcatttgttggtaattttgacaac

SEQ ID NO: 60776 - DNA, 25 bp, Probe sequence
gtcaaaattaccaacaaatgcaaat

SEQ ID NO: 60777 - DNA, 25 bp, Probe sequence
tgtcaaaattaccaacaaatgcaaa

SEQ ID NO: 60778 - DNA, 25 bp, Probe sequence
tcaaaattaccaacaaatgcaaatt

SEQ ID NO: 60779 - DNA, 25 bp, Probe sequence
cgttgtcaaaattaccaacaaatgc

SEQ ID NO: 60780 - DNA, 25 bp, Probe sequence
attaccaacaaatgcaaattaaatt

SEQ ID NO: 60781 - DNA, 25 bp, Probe sequence
ttaccaacaaatgcaaattaaattt

SEQ ID NO: 60782 - DNA, 25 bp, Probe sequence
aaattaccaacaaatgcaaattaaa

SEQ ID NO: 60783 - DNA, 25 bp, Probe sequence
ttgtcaaaattaccaacaaatgcaa

SEQ ID NO: 60784 - DNA, 25 bp, Probe sequence
gttgtcaaaattaccaacaaatgca

SEQ ID NO: 60785 - DNA, 25 bp, Probe sequence
gaaggaatcgtagttcaataatgtt

SEQ ID NO: 60786 - DNA, 25 bp, Probe sequence
agtaacagtttgaaggaatcgtagt

SEQ ID NO: 60787 - DNA, 25 bp, Probe sequence
aagtaacagtttgaaggaatcgtag

SEQ ID NO: 60788 - DNA, 25 bp, Probe sequence
ctaagtaacagtttgaaggaatcgt

SEQ ID NO: 60789 - DNA, 25 bp, Probe sequence
gtaacagtttgaaggaatcgtagtt

SEQ ID NO: 60790 - DNA, 25 bp, Probe sequence
taacagtttgaaggaatcgtagttc

SEQ ID NO: 60791 - DNA, 25 bp, Probe sequence
actaagtaacagtttgaaggaatcg

SEQ ID NO: 60792 - DNA, 25 bp, Probe sequence
taagtaacagtttgaaggaatcgta

SEQ ID NO: 60793 - DNA, 25 bp, Probe sequence
gaaattgagtgtcgaaagcatagaa

SEQ ID NO: 60794 - DNA, 25 bp, Probe sequence
aacattattgaactacgattccttc

SEQ ID NO: 60795 - DNA, 25 bp, Probe sequence
actacgattccttcaaactgttact

SEQ ID NO: 60796 - DNA, 25 bp, Probe sequence
acgattccttcaaactgttacttag

SEQ ID NO: 60797 - DNA, 25 bp, Probe sequence
ctacgattccttcaaactgttactt

SEQ ID NO: 60798 - DNA, 25 bp, Probe sequence
aactacgattccttcaaactgttac

SEQ ID NO: 60799 - DNA, 25 bp, Probe sequence
gaactacgattccttcaaactgtta

SEQ ID NO: 60800 - DNA, 25 bp, Probe sequence
cgattccttcaaactgttacttagt

SEQ ID NO: 60801 - DNA, 25 bp, Probe sequence
tacgattccttcaaactgttactta

SEQ ID NO: 60802 - DNA, 25 bp, Probe sequence
ctatgctttcgacactcaatttcaa

SEQ ID NO: 60803 - DNA, 25 bp, Probe sequence
aatgaagtggtttgaaggttgttaa

SEQ ID NO: 60804 - DNA, 25 bp, Probe sequence
atgaagtggtttgaaggttgttaat

SEQ ID NO: 60805 - DNA, 25 bp, Probe sequence
caatgaagtggtttgaaggttgtta

SEQ ID NO: 60806 - DNA, 25 bp, Probe sequence
tgaagtggtttgaaggttgttaata

SEQ ID NO: 60807 - DNA, 25 bp, Probe sequence
gaagtggtttgaaggttgttaataa

SEQ ID NO: 60808 - DNA, 25 bp, Probe sequence
aagtggtttgaaggttgttaataaa

SEQ ID NO: 60809 - DNA, 25 bp, Probe sequence
gttgttaataaacctttgagtcact

SEQ ID NO: 60810 - DNA, 25 bp, Probe sequence
tgttaataaacctttgagtcacttc

SEQ ID NO: 60811 - DNA, 25 bp, Probe sequence
gttaataaacctttgagtcacttca

SEQ ID NO: 60812 - DNA, 25 bp, Probe sequence
ttaacaaccttcaaaccacttcatt

SEQ ID NO: 60813 - DNA, 25 bp, Probe sequence
attaacaaccttcaaaccacttcat

SEQ ID NO: 60814 - DNA, 25 bp, Probe sequence
taacaaccttcaaaccacttcattg

SEQ ID NO: 60815 - DNA, 25 bp, Probe sequence
tattaacaaccttcaaaccacttca

SEQ ID NO: 60816 - DNA, 25 bp, Probe sequence
ttattaacaaccttcaaaccacttc

SEQ ID NO: 60817 - DNA, 25 bp, Probe sequence
tttattaacaaccttcaaaccactt

SEQ ID NO: 60818 - DNA, 25 bp, Probe sequence
agtgactcaaaggtttattaacaac

SEQ ID NO: 60819 - DNA, 25 bp, Probe sequence
gaagtgactcaaaggtttattaaca

SEQ ID NO: 60820 - DNA, 25 bp, Probe sequence
tgaagtgactcaaaggtttattaac

SEQ ID NO: 60821 - DNA, 25 bp, Probe sequence
ataataatgacaaggagttggtggc

SEQ ID NO: 60822 - DNA, 25 bp, Probe sequence
tataataatgacaaggagttggtgg

SEQ ID NO: 60823 - DNA, 25 bp, Probe sequence
taataatgacaaggagttggtggct

SEQ ID NO: 60824 - DNA, 25 bp, Probe sequence
agtaaattgaagcgagttgtagtaa

SEQ ID NO: 60825 - DNA, 25 bp, Probe sequence
aagtaaattgaagcgagttgtagta

SEQ ID NO: 60826 - DNA, 25 bp, Probe sequence
taagtaaattgaagcgagttgtagt

SEQ ID NO: 60827 - DNA, 25 bp, Probe sequence
gtaaattgaagcgagttgtagtaaa

SEQ ID NO: 60828 - DNA, 25 bp, Probe sequence
atataataatgacaaggagttggtg

SEQ ID NO: 60829 - DNA, 25 bp, Probe sequence
ttaagtaaattgaagcgagttgtag

SEQ ID NO: 60830 - DNA, 25 bp, Probe sequence
gccaccaactccttgtcattattat

SEQ ID NO: 60831 - DNA, 25 bp, Probe sequence
ccaccaactccttgtcattattata

SEQ ID NO: 60832 - DNA, 25 bp, Probe sequence
agccaccaactccttgtcattatta

SEQ ID NO: 60833 - DNA, 25 bp, Probe sequence
actacaactcgcttcaatttactta

SEQ ID NO: 60834 - DNA, 25 bp, Probe sequence
tactacaactcgcttcaatttactt

SEQ ID NO: 60835 - DNA, 25 bp, Probe sequence
ttactacaactcgcttcaatttact

SEQ ID NO: 60836 - DNA, 25 bp, Probe sequence
tttactacaactcgcttcaatttac

SEQ ID NO: 60837 - DNA, 25 bp, Probe sequence
caccaactccttgtcattattatat

SEQ ID NO: 60838 - DNA, 25 bp, Probe sequence
ctacaactcgcttcaatttacttaa

SEQ ID NO: 60839 - DNA, 25 bp, Probe sequence
cttgtagccatgaaagttcaataat

SEQ ID NO: 60840 - DNA, 25 bp, Probe sequence
cgttagtaatgaactcatgaatgct

SEQ ID NO: 60841 - DNA, 25 bp, Probe sequence
tcgttagtaatgaactcatgaatgc

SEQ ID NO: 60842 - DNA, 25 bp, Probe sequence
gtaatgaactcatgaatgcttgtag

SEQ ID NO: 60843 - DNA, 25 bp, Probe sequence
gcttgtagccatgaaagttcaataa

SEQ ID NO: 60844 - DNA, 25 bp, Probe sequence
agtaatgaactcatgaatgcttgta

SEQ ID NO: 60845 - DNA, 25 bp, Probe sequence
tagtaatgaactcatgaatgcttgt

SEQ ID NO: 60846 - DNA, 25 bp, Probe sequence
tgcttgtagccatgaaagttcaata

SEQ ID NO: 60847 - DNA, 25 bp, Probe sequence
tggtgaaattattcgttagtaatga

SEQ ID NO: 60848 - DNA, 25 bp, Probe sequence
gcattcatgagttcattactaacga

SEQ ID NO: 60849 - DNA, 25 bp, Probe sequence
agcattcatgagttcattactaacg

SEQ ID NO: 60850 - DNA, 25 bp, Probe sequence
attattgaactttcatggctacaag

SEQ ID NO: 60851 - DNA, 25 bp, Probe sequence
ctacaagcattcatgagttcattac

SEQ ID NO: 60852 - DNA, 25 bp, Probe sequence
ttattgaactttcatggctacaagc

SEQ ID NO: 60853 - DNA, 25 bp, Probe sequence
acaagcattcatgagttcattacta

SEQ ID NO: 60854 - DNA, 25 bp, Probe sequence
tacaagcattcatgagttcattact

SEQ ID NO: 60855 - DNA, 25 bp, Probe sequence
tattgaactttcatggctacaagca

SEQ ID NO: 60856 - DNA, 25 bp, Probe sequence
tcattactaacgaataatttcacca

SEQ ID NO: 60857 - DNA, 25 bp, Probe sequence
aactattcggttaaattgaacgtag

SEQ ID NO: 60858 - DNA, 25 bp, Probe sequence
ttaaactattcggttaaattgaacg

SEQ ID NO: 60859 - DNA, 25 bp, Probe sequence
actattcggttaaattgaacgtagt

SEQ ID NO: 60860 - DNA, 25 bp, Probe sequence
aaactattcggttaaattgaacgta

SEQ ID NO: 60861 - DNA, 25 bp, Probe sequence
taaactattcggttaaattgaacgt

SEQ ID NO: 60862 - DNA, 25 bp, Probe sequence
cgttcaatttaaccgaatagtttaa

SEQ ID NO: 60863 - DNA, 25 bp, Probe sequence
acgttcaatttaaccgaatagttta

SEQ ID NO: 60864 - DNA, 25 bp, Probe sequence
tacgttcaatttaaccgaatagttt

SEQ ID NO: 60865 - DNA, 25 bp, Probe sequence
atcattaacagtaccaaattcgcat

SEQ ID NO: 60866 - DNA, 25 bp, Probe sequence
tcattaacagtaccaaattcgcata

SEQ ID NO: 60867 - DNA, 25 bp, Probe sequence
tatcattaacagtaccaaattcgca

SEQ ID NO: 60868 - DNA, 25 bp, Probe sequence
cattaacagtaccaaattcgcatat

SEQ ID NO: 60869 - DNA, 25 bp, Probe sequence
ttatcattaacagtaccaaattcgc

SEQ ID NO: 60870 - DNA, 25 bp, Probe sequence
aacagtaccaaattcgcatatgatg

SEQ ID NO: 60871 - DNA, 25 bp, Probe sequence
cagtaccaaattcgcatatgatgta

SEQ ID NO: 60872 - DNA, 25 bp, Probe sequence
ttaacagtaccaaattcgcatatga

SEQ ID NO: 60873 - DNA, 25 bp, Probe sequence
taacagtaccaaattcgcatatgat

SEQ ID NO: 60874 - DNA, 25 bp, Probe sequence
atgcgaatttggtactgttaatgat

SEQ ID NO: 60875 - DNA, 25 bp, Probe sequence
tgcgaatttggtactgttaatgata

SEQ ID NO: 60876 - DNA, 25 bp, Probe sequence
tatgcgaatttggtactgttaatga

SEQ ID NO: 60877 - DNA, 25 bp, Probe sequence
atatgcgaatttggtactgttaatg

SEQ ID NO: 60878 - DNA, 25 bp, Probe sequence
gcgaatttggtactgttaatgataa

SEQ ID NO: 60879 - DNA, 25 bp, Probe sequence
catcatatgcgaatttggtactgtt

SEQ ID NO: 60880 - DNA, 25 bp, Probe sequence
tcatatgcgaatttggtactgttaa

SEQ ID NO: 60881 - DNA, 25 bp, Probe sequence
tacatcatatgcgaatttggtactg

SEQ ID NO: 60882 - DNA, 25 bp, Probe sequence
atcatatgcgaatttggtactgtta

SEQ ID NO: 60883 - DNA, 25 bp, Probe sequence
agtcaatcatatcatattaaacgca

SEQ ID NO: 60884 - DNA, 25 bp, Probe sequence
gtcaatcatatcatattaaacgcat

SEQ ID NO: 60885 - DNA, 25 bp, Probe sequence
aagtcaatcatatcatattaaacgc

SEQ ID NO: 60886 - DNA, 25 bp, Probe sequence
tataacgattaatattggagaggaa

SEQ ID NO: 60887 - DNA, 25 bp, Probe sequence
ataacgattaatattggagaggaaa

SEQ ID NO: 60888 - DNA, 25 bp, Probe sequence
tgcgtttaatatgatatgattgact

SEQ ID NO: 60889 - DNA, 25 bp, Probe sequence
atgcgtttaatatgatatgattgac

SEQ ID NO: 60890 - DNA, 25 bp, Probe sequence
gcgtttaatatgatatgattgactt

SEQ ID NO: 60891 - DNA, 25 bp, Probe sequence
ttcctctccaatattaatcgttata

SEQ ID NO: 60892 - DNA, 25 bp, Probe sequence
tttcctctccaatattaatcgttat

SEQ ID NO: 60893 - DNA, 25 bp, Probe sequence
aggattatgttgctaattcatgtta

SEQ ID NO: 60894 - DNA, 25 bp, Probe sequence
taggattatgttgctaattcatgtt

SEQ ID NO: 60895 - DNA, 25 bp, Probe sequence
ttaggattatgttgctaattcatgt

SEQ ID NO: 60896 - DNA, 25 bp, Probe sequence
ggattatgttgctaattcatgttaa

SEQ ID NO: 60897 - DNA, 25 bp, Probe sequence
aagatttaatgacgttaaggagttt

SEQ ID NO: 60898 - DNA, 25 bp, Probe sequence
aaagatttaatgacgttaaggagtt

SEQ ID NO: 60899 - DNA, 25 bp, Probe sequence
attaggattatgttgctaattcatg

SEQ ID NO: 60900 - DNA, 25 bp, Probe sequence
agatttaatgacgttaaggagtttt

SEQ ID NO: 60901 - DNA, 25 bp, Probe sequence
aaaagatttaatgacgttaaggagt

SEQ ID NO: 60902 - DNA, 25 bp, Probe sequence
aacatgaattagcaacataatccta

SEQ ID NO: 60903 - DNA, 25 bp, Probe sequence
taacatgaattagcaacataatcct

SEQ ID NO: 60904 - DNA, 25 bp, Probe sequence
acatgaattagcaacataatcctaa

SEQ ID NO: 60905 - DNA, 25 bp, Probe sequence
ttaacatgaattagcaacataatcc

SEQ ID NO: 60906 - DNA, 25 bp, Probe sequence
aactccttaacgtcattaaatcttt

SEQ ID NO: 60907 - DNA, 25 bp, Probe sequence
aaactccttaacgtcattaaatctt

SEQ ID NO: 60908 - DNA, 25 bp, Probe sequence
catgaattagcaacataatcctaat

SEQ ID NO: 60909 - DNA, 25 bp, Probe sequence
actccttaacgtcattaaatctttt

SEQ ID NO: 60910 - DNA, 25 bp, Probe sequence
aaaactccttaacgtcattaaatct

SEQ ID NO: 60911 - DNA, 25 bp, Probe sequence
cgtattgcttacttgttatagatga

SEQ ID NO: 60912 - DNA, 25 bp, Probe sequence
tcgtattgcttacttgttatagatg

SEQ ID NO: 60913 - DNA, 25 bp, Probe sequence
gttatagatgaaaggtacagcgttt

SEQ ID NO: 60914 - DNA, 25 bp, Probe sequence
tgcttacttgttatagatgaaaggt

SEQ ID NO: 60915 - DNA, 25 bp, Probe sequence
tgttatagatgaaaggtacagcgtt

SEQ ID NO: 60916 - DNA, 25 bp, Probe sequence
ttgttatagatgaaaggtacagcgt

SEQ ID NO: 60917 - DNA, 25 bp, Probe sequence
cttgttatagatgaaaggtacagcg

SEQ ID NO: 60918 - DNA, 25 bp, Probe sequence
acttgttatagatgaaaggtacagc

SEQ ID NO: 60919 - DNA, 25 bp, Probe sequence
gtaattaataaaggagagaaacggc

SEQ ID NO: 60920 - DNA, 25 bp, Probe sequence
catctataacaagtaagcaatacga

SEQ ID NO: 60921 - DNA, 25 bp, Probe sequence
tcatctataacaagtaagcaatacg

SEQ ID NO: 60922 - DNA, 25 bp, Probe sequence
aaacgctgtacctttcatctataac

SEQ ID NO: 60923 - DNA, 25 bp, Probe sequence
acctttcatctataacaagtaagca

SEQ ID NO: 60924 - DNA, 25 bp, Probe sequence
acgctgtacctttcatctataacaa

SEQ ID NO: 60925 - DNA, 25 bp, Probe sequence
aacgctgtacctttcatctataaca

SEQ ID NO: 60926 - DNA, 25 bp, Probe sequence
cgctgtacctttcatctataacaag

SEQ ID NO: 60927 - DNA, 25 bp, Probe sequence
gctgtacctttcatctataacaagt

SEQ ID NO: 60928 - DNA, 25 bp, Probe sequence
gccgtttctctcctttattaattac

SEQ ID NO: 60929 - DNA, 25 bp, Probe sequence
agaaattatataggagtgtcaatcg

SEQ ID NO: 60930 - DNA, 25 bp, Probe sequence
tgctatctaaaacgcaaagttgatc

SEQ ID NO: 60931 - DNA, 25 bp, Probe sequence
ctgctatctaaaacgcaaagttgat

SEQ ID NO: 60932 - DNA, 25 bp, Probe sequence
actgctatctaaaacgcaaagttga

SEQ ID NO: 60933 - DNA, 25 bp, Probe sequence
tgagaaattatataggagtgtcaat

SEQ ID NO: 60934 - DNA, 25 bp, Probe sequence
attgagaaattatataggagtgtca

SEQ ID NO: 60935 - DNA, 25 bp, Probe sequence
gctatctaaaacgcaaagttgatca

SEQ ID NO: 60936 - DNA, 25 bp, Probe sequence
ttgagaaattatataggagtgtcaa

SEQ ID NO: 60937 - DNA, 25 bp, Probe sequence
cgattgacactcctatataatttct

SEQ ID NO: 60938 - DNA, 25 bp, Probe sequence
atcaactttgcgttttagatagcag

SEQ ID NO: 60939 - DNA, 25 bp, Probe sequence
gatcaactttgcgttttagatagca

SEQ ID NO: 60940 - DNA, 25 bp, Probe sequence
tcaactttgcgttttagatagcagt

SEQ ID NO: 60941 - DNA, 25 bp, Probe sequence
tgacactcctatataatttctcaat

SEQ ID NO: 60942 - DNA, 25 bp, Probe sequence
attgacactcctatataatttctca

SEQ ID NO: 60943 - DNA, 25 bp, Probe sequence
tgatcaactttgcgttttagatagc

SEQ ID NO: 60944 - DNA, 25 bp, Probe sequence
ttgacactcctatataatttctcaa

SEQ ID NO: 60945 - DNA, 25 bp, Probe sequence
ttatacataatcgtaacaaacaccc

SEQ ID NO: 60946 - DNA, 25 bp, Probe sequence
taatcgtaacaaacacccctaacat

SEQ ID NO: 60947 - DNA, 25 bp, Probe sequence
ataatcgtaacaaacacccctaaca

SEQ ID NO: 60948 - DNA, 25 bp, Probe sequence
cataatcgtaacaaacacccctaac

SEQ ID NO: 60949 - DNA, 25 bp, Probe sequence
acataatcgtaacaaacacccctaa

SEQ ID NO: 60950 - DNA, 25 bp, Probe sequence
atacataatcgtaacaaacacccct

SEQ ID NO: 60951 - DNA, 25 bp, Probe sequence
ccctaacattgtttagctgatgata

SEQ ID NO: 60952 - DNA, 25 bp, Probe sequence
tacataatcgtaacaaacaccccta

SEQ ID NO: 60953 - DNA, 25 bp, Probe sequence
aatcgtaacaaacacccctaacatt

SEQ ID NO: 60954 - DNA, 25 bp, Probe sequence
gggtgtttgttacgattatgtataa

SEQ ID NO: 60955 - DNA, 25 bp, Probe sequence
ttaggggtgtttgttacgattatgt

SEQ ID NO: 60956 - DNA, 25 bp, Probe sequence
gttaggggtgtttgttacgattatg

SEQ ID NO: 60957 - DNA, 25 bp, Probe sequence
tgttaggggtgtttgttacgattat

SEQ ID NO: 60958 - DNA, 25 bp, Probe sequence
atgttaggggtgtttgttacgatta

SEQ ID NO: 60959 - DNA, 25 bp, Probe sequence
aggggtgtttgttacgattatgtat

SEQ ID NO: 60960 - DNA, 25 bp, Probe sequence
tatcatcagctaaacaatgttaggg

SEQ ID NO: 60961 - DNA, 25 bp, Probe sequence
taggggtgtttgttacgattatgta

SEQ ID NO: 60962 - DNA, 25 bp, Probe sequence
aatgttaggggtgtttgttacgatt

SEQ ID NO: 60963 - DNA, 25 bp, Probe sequence
tgtacccactttcattactcaattt

SEQ ID NO: 60964 - DNA, 25 bp, Probe sequence
atgtacccactttcattactcaatt

SEQ ID NO: 60965 - DNA, 25 bp, Probe sequence
acccactttcattactcaatttaat

SEQ ID NO: 60966 - DNA, 25 bp, Probe sequence
gtacccactttcattactcaattta

SEQ ID NO: 60967 - DNA, 25 bp, Probe sequence
aatgtacccactttcattactcaat

SEQ ID NO: 60968 - DNA, 25 bp, Probe sequence
tacccactttcattactcaatttaa

SEQ ID NO: 60969 - DNA, 25 bp, Probe sequence
cccactttcattactcaatttaatt

SEQ ID NO: 60970 - DNA, 25 bp, Probe sequence
catattcatttaaagacatgctagt

SEQ ID NO: 60971 - DNA, 25 bp, Probe sequence
catttaaagacatgctagttatagt

SEQ ID NO: 60972 - DNA, 25 bp, Probe sequence
aaattgagtaatgaaagtgggtaca

SEQ ID NO: 60973 - DNA, 25 bp, Probe sequence
aattgagtaatgaaagtgggtacat

SEQ ID NO: 60974 - DNA, 25 bp, Probe sequence
attaaattgagtaatgaaagtgggt

SEQ ID NO: 60975 - DNA, 25 bp, Probe sequence
taaattgagtaatgaaagtgggtac

SEQ ID NO: 60976 - DNA, 25 bp, Probe sequence
attgagtaatgaaagtgggtacatt

SEQ ID NO: 60977 - DNA, 25 bp, Probe sequence
ttaaattgagtaatgaaagtgggta

SEQ ID NO: 60978 - DNA, 25 bp, Probe sequence
aattaaattgagtaatgaaagtggg

SEQ ID NO: 60979 - DNA, 25 bp, Probe sequence
actagcatgtctttaaatgaatatg

SEQ ID NO: 60980 - DNA, 25 bp, Probe sequence
actataactagcatgtctttaaatg

SEQ ID NO: 60981 - DNA, 25 bp, Probe sequence
aaactgcttgataggctaagaaacc

SEQ ID NO: 60982 - DNA, 25 bp, Probe sequence
ctgcttgataggctaagaaaccttt

SEQ ID NO: 60983 - DNA, 25 bp, Probe sequence
gcttgataggctaagaaacctttca

SEQ ID NO: 60984 - DNA, 25 bp, Probe sequence
tgcttgataggctaagaaacctttc

SEQ ID NO: 60985 - DNA, 25 bp, Probe sequence
actgcttgataggctaagaaacctt

SEQ ID NO: 60986 - DNA, 25 bp, Probe sequence
aactgcttgataggctaagaaacct

SEQ ID NO: 60987 - DNA, 25 bp, Probe sequence
ataggctaagaaacctttcaagcag

SEQ ID NO: 60988 - DNA, 25 bp, Probe sequence
gataggctaagaaacctttcaagca

SEQ ID NO: 60989 - DNA, 25 bp, Probe sequence
tgataggctaagaaacctttcaagc

SEQ ID NO: 60990 - DNA, 25 bp, Probe sequence
ggtttcttagcctatcaagcagttt

SEQ ID NO: 60991 - DNA, 25 bp, Probe sequence
aaaggtttcttagcctatcaagcag

SEQ ID NO: 60992 - DNA, 25 bp, Probe sequence
gaaaggtttcttagcctatcaagca

SEQ ID NO: 60993 - DNA, 25 bp, Probe sequence
tgaaaggtttcttagcctatcaagc

SEQ ID NO: 60994 - DNA, 25 bp, Probe sequence
aggtttcttagcctatcaagcagtt

SEQ ID NO: 60995 - DNA, 25 bp, Probe sequence
aaggtttcttagcctatcaagcagt

SEQ ID NO: 60996 - DNA, 25 bp, Probe sequence
gcttgaaaggtttcttagcctatca

SEQ ID NO: 60997 - DNA, 25 bp, Probe sequence
tgcttgaaaggtttcttagcctatc

SEQ ID NO: 60998 - DNA, 25 bp, Probe sequence
ctgcttgaaaggtttcttagcctat

SEQ ID NO: 60999 - DNA, 25 bp, Probe sequence
aagttctcctccagacatactatcc

SEQ ID NO: 61000 - DNA, 25 bp, Probe sequence
ttctcctccagacatactatccgtt

SEQ ID NO: 61001 - DNA, 25 bp, Probe sequence
agttctcctccagacatactatccg

SEQ ID NO: 61002 - DNA, 25 bp, Probe sequence
gttctcctccagacatactatccgt

SEQ ID NO: 61003 - DNA, 25 bp, Probe sequence
aaagttctcctccagacatactatc

SEQ ID NO: 61004 - DNA, 25 bp, Probe sequence
acaactttctttgattcaatgccat

SEQ ID NO: 61005 - DNA, 25 bp, Probe sequence
ttctttgattcaatgccatgctaaa

SEQ ID NO: 61006 - DNA, 25 bp, Probe sequence
tttctttgattcaatgccatgctaa

SEQ ID NO: 61007 - DNA, 25 bp, Probe sequence
caactttctttgattcaatgccatg

SEQ ID NO: 61008 - DNA, 25 bp, Probe sequence
ggatagtatgtctggaggagaactt

SEQ ID NO: 61009 - DNA, 25 bp, Probe sequence
aacggatagtatgtctggaggagaa

SEQ ID NO: 61010 - DNA, 25 bp, Probe sequence
cggatagtatgtctggaggagaact

SEQ ID NO: 61011 - DNA, 25 bp, Probe sequence
acggatagtatgtctggaggagaac

SEQ ID NO: 61012 - DNA, 25 bp, Probe sequence
gatagtatgtctggaggagaacttt

SEQ ID NO: 61013 - DNA, 25 bp, Probe sequence
atggcattgaatcaaagaaagttgt

SEQ ID NO: 61014 - DNA, 25 bp, Probe sequence
catggcattgaatcaaagaaagttg

SEQ ID NO: 61015 - DNA, 25 bp, Probe sequence
ttagcatggcattgaatcaaagaaa

SEQ ID NO: 61016 - DNA, 25 bp, Probe sequence
tttagcatggcattgaatcaaagaa

SEQ ID NO: 61017 - DNA, 25 bp, Probe sequence
aatgtgttgtttcaatttaacggaa

SEQ ID NO: 61018 - DNA, 25 bp, Probe sequence
aaatgtgttgtttcaatttaacgga

SEQ ID NO: 61019 - DNA, 25 bp, Probe sequence
ttcaatttaacggaaatagcacatt

SEQ ID NO: 61020 - DNA, 25 bp, Probe sequence
gtttcaatttaacggaaatagcaca

SEQ ID NO: 61021 - DNA, 25 bp, Probe sequence
tgtttcaatttaacggaaatagcac

SEQ ID NO: 61022 - DNA, 25 bp, Probe sequence
tgtgttgtttcaatttaacggaaat

SEQ ID NO: 61023 - DNA, 25 bp, Probe sequence
atgtgttgtttcaatttaacggaaa

SEQ ID NO: 61024 - DNA, 25 bp, Probe sequence
tcaatttaacggaaatagcacatta

SEQ ID NO: 61025 - DNA, 25 bp, Probe sequence
ttgtttcaatttaacggaaatagca

SEQ ID NO: 61026 - DNA, 25 bp, Probe sequence
ttccgttaaattgaaacaacacatt

SEQ ID NO: 61027 - DNA, 25 bp, Probe sequence
tccgttaaattgaaacaacacattt

SEQ ID NO: 61028 - DNA, 25 bp, Probe sequence
aatgtgctatttccgttaaattgaa

SEQ ID NO: 61029 - DNA, 25 bp, Probe sequence
gtgctatttccgttaaattgaaaca

SEQ ID NO: 61030 - DNA, 25 bp, Probe sequence
tgtgctatttccgttaaattgaaac

SEQ ID NO: 61031 - DNA, 25 bp, Probe sequence
tttccgttaaattgaaacaacacat

SEQ ID NO: 61032 - DNA, 25 bp, Probe sequence
atttccgttaaattgaaacaacaca

SEQ ID NO: 61033 - DNA, 25 bp, Probe sequence
taatgtgctatttccgttaaattga

SEQ ID NO: 61034 - DNA, 25 bp, Probe sequence
tgctatttccgttaaattgaaacaa

SEQ ID NO: 61035 - DNA, 25 bp, Probe sequence
aattaaccgagataactcatcacct

SEQ ID NO: 61036 - DNA, 25 bp, Probe sequence
cgagataactcatcacctagcaata

SEQ ID NO: 61037 - DNA, 25 bp, Probe sequence
ttaaccgagataactcatcacctag

SEQ ID NO: 61038 - DNA, 25 bp, Probe sequence
attaaccgagataactcatcaccta

SEQ ID NO: 61039 - DNA, 25 bp, Probe sequence
tgatgctatgaggatattcagtaga

SEQ ID NO: 61040 - DNA, 25 bp, Probe sequence
taaccgagataactcatcacctagc

SEQ ID NO: 61041 - DNA, 25 bp, Probe sequence
ccgagataactcatcacctagcaat

SEQ ID NO: 61042 - DNA, 25 bp, Probe sequence
atgatgctatgaggatattcagtag

SEQ ID NO: 61043 - DNA, 25 bp, Probe sequence
gagataactcatcacctagcaatat

SEQ ID NO: 61044 - DNA, 25 bp, Probe sequence
aggtgatgagttatctcggttaatt

SEQ ID NO: 61045 - DNA, 25 bp, Probe sequence
tattgctaggtgatgagttatctcg

SEQ ID NO: 61046 - DNA, 25 bp, Probe sequence
ctaggtgatgagttatctcggttaa

SEQ ID NO: 61047 - DNA, 25 bp, Probe sequence
taggtgatgagttatctcggttaat

SEQ ID NO: 61048 - DNA, 25 bp, Probe sequence
tctactgaatatcctcatagcatca

SEQ ID NO: 61049 - DNA, 25 bp, Probe sequence
gctaggtgatgagttatctcggtta

SEQ ID NO: 61050 - DNA, 25 bp, Probe sequence
attgctaggtgatgagttatctcgg

SEQ ID NO: 61051 - DNA, 25 bp, Probe sequence
ctactgaatatcctcatagcatcat

SEQ ID NO: 61052 - DNA, 25 bp, Probe sequence
atattgctaggtgatgagttatctc

SEQ ID NO: 61053 - DNA, 25 bp, Probe sequence
aagataattgaagggtgttttgttt

SEQ ID NO: 61054 - DNA, 25 bp, Probe sequence
aaagataattgaagggtgttttgtt

SEQ ID NO: 61055 - DNA, 25 bp, Probe sequence
aaaagataattgaagggtgttttgt

SEQ ID NO: 61056 - DNA, 25 bp, Probe sequence
gaatctaggttattttaaagtgaca

SEQ ID NO: 61057 - DNA, 25 bp, Probe sequence
aacaaaacacccttcaattatcttt

SEQ ID NO: 61058 - DNA, 25 bp, Probe sequence
aaacaaaacacccttcaattatctt

SEQ ID NO: 61059 - DNA, 25 bp, Probe sequence
acaaaacacccttcaattatctttt

SEQ ID NO: 61060 - DNA, 25 bp, Probe sequence
tgtcactttaaaataacctagattc

SEQ ID NO: 61061 - DNA, 25 bp, Probe sequence
caattgatagatctggcatgagtaa

SEQ ID NO: 61062 - DNA, 25 bp, Probe sequence
gatctggcatgagtaaaatctggag

SEQ ID NO: 61063 - DNA, 25 bp, Probe sequence
aattgatagatctggcatgagtaaa

SEQ ID NO: 61064 - DNA, 25 bp, Probe sequence
ctggagcagaatataaagttcttaa

SEQ ID NO: 61065 - DNA, 25 bp, Probe sequence
atctggcatgagtaaaatctggagc

SEQ ID NO: 61066 - DNA, 25 bp, Probe sequence
atctggagcagaatataaagttctt

SEQ ID NO: 61067 - DNA, 25 bp, Probe sequence
aatctggagcagaatataaagttct

SEQ ID NO: 61068 - DNA, 25 bp, Probe sequence
tctggagcagaatataaagttctta

SEQ ID NO: 61069 - DNA, 25 bp, Probe sequence
aaatctggagcagaatataaagttc

SEQ ID NO: 61070 - DNA, 25 bp, Probe sequence
ttactcatgccagatctatcaattg

SEQ ID NO: 61071 - DNA, 25 bp, Probe sequence
ctccagattttactcatgccagatc

SEQ ID NO: 61072 - DNA, 25 bp, Probe sequence
tttactcatgccagatctatcaatt

SEQ ID NO: 61073 - DNA, 25 bp, Probe sequence
ttaagaactttatattctgctccag

SEQ ID NO: 61074 - DNA, 25 bp, Probe sequence
gctccagattttactcatgccagat

SEQ ID NO: 61075 - DNA, 25 bp, Probe sequence
agaactttatattctgctccagatt

SEQ ID NO: 61076 - DNA, 25 bp, Probe sequence
aagaactttatattctgctccagat

SEQ ID NO: 61077 - DNA, 25 bp, Probe sequence
gaactttatattctgctccagattt

SEQ ID NO: 61078 - DNA, 25 bp, Probe sequence
taagaactttatattctgctccaga

SEQ ID NO: 61079 - DNA, 25 bp, Probe sequence
ggctttcctcaaatatataagttgt

SEQ ID NO: 61080 - DNA, 25 bp, Probe sequence
tggctttcctcaaatatataagttg

SEQ ID NO: 61081 - DNA, 25 bp, Probe sequence
gctttcctcaaatatataagttgta

SEQ ID NO: 61082 - DNA, 25 bp, Probe sequence
caacttatatatttgaggaaagcca

SEQ ID NO: 61083 - DNA, 25 bp, Probe sequence
acaacttatatatttgaggaaagcc

SEQ ID NO: 61084 - DNA, 25 bp, Probe sequence
tacaacttatatatttgaggaaagc

SEQ ID NO: 61085 - DNA, 25 bp, Probe sequence
tgattaagcacttatgataacttgt

SEQ ID NO: 61086 - DNA, 25 bp, Probe sequence
ttcaaatgtgatagttataaacgca

SEQ ID NO: 61087 - DNA, 25 bp, Probe sequence
agttataaacgcattcaattcctaa

SEQ ID NO: 61088 - DNA, 25 bp, Probe sequence
tgtgatagttataaacgcattcaat

SEQ ID NO: 61089 - DNA, 25 bp, Probe sequence
atgtgatagttataaacgcattcaa

SEQ ID NO: 61090 - DNA, 25 bp, Probe sequence
tcaaatgtgatagttataaacgcat

SEQ ID NO: 61091 - DNA, 25 bp, Probe sequence
atgattaagcacttatgataacttg

SEQ ID NO: 61092 - DNA, 25 bp, Probe sequence
atagttataaacgcattcaattcct

SEQ ID NO: 61093 - DNA, 25 bp, Probe sequence
gatagttataaacgcattcaattcc

SEQ ID NO: 61094 - DNA, 25 bp, Probe sequence
acaagttatcataagtgcttaatca

SEQ ID NO: 61095 - DNA, 25 bp, Probe sequence
tgcgtttataactatcacatttgaa

SEQ ID NO: 61096 - DNA, 25 bp, Probe sequence
ttaggaattgaatgcgtttataact

SEQ ID NO: 61097 - DNA, 25 bp, Probe sequence
atgcgtttataactatcacatttga

SEQ ID NO: 61098 - DNA, 25 bp, Probe sequence
ttgaatgcgtttataactatcacat

SEQ ID NO: 61099 - DNA, 25 bp, Probe sequence
attgaatgcgtttataactatcaca

SEQ ID NO: 61100 - DNA, 25 bp, Probe sequence
caagttatcataagtgcttaatcat

SEQ ID NO: 61101 - DNA, 25 bp, Probe sequence
aggaattgaatgcgtttataactat

SEQ ID NO: 61102 - DNA, 25 bp, Probe sequence
ggaattgaatgcgtttataactatc

SEQ ID NO: 61103 - DNA, 25 bp, Probe sequence
ttgtcaaatgtagcaatgttgtaat

SEQ ID NO: 61104 - DNA, 25 bp, Probe sequence
tgtcaaatgtagcaatgttgtaata

SEQ ID NO: 61105 - DNA, 25 bp, Probe sequence
gtcaaatgtagcaatgttgtaatac

SEQ ID NO: 61106 - DNA, 25 bp, Probe sequence
atctgtcgtggaaaagaagaataac

SEQ ID NO: 61107 - DNA, 25 bp, Probe sequence
caatctgtcgtggaaaagaagaata

SEQ ID NO: 61108 - DNA, 25 bp, Probe sequence
attgtcaaatgtagcaatgttgtaa

SEQ ID NO: 61109 - DNA, 25 bp, Probe sequence
atattgtcaaatgtagcaatgttgt

SEQ ID NO: 61110 - DNA, 25 bp, Probe sequence
aataacagctttaagcatgacatgg

SEQ ID NO: 61111 - DNA, 25 bp, Probe sequence
aatctgtcgtggaaaagaagaataa

SEQ ID NO: 61112 - DNA, 25 bp, Probe sequence
attacaacattgctacatttgacaa

SEQ ID NO: 61113 - DNA, 25 bp, Probe sequence
tattacaacattgctacatttgaca

SEQ ID NO: 61114 - DNA, 25 bp, Probe sequence
gtattacaacattgctacatttgac

SEQ ID NO: 61115 - DNA, 25 bp, Probe sequence
tattcttcttttccacgacagattg

SEQ ID NO: 61116 - DNA, 25 bp, Probe sequence
gttattcttcttttccacgacagat

SEQ ID NO: 61117 - DNA, 25 bp, Probe sequence
ttacaacattgctacatttgacaat

SEQ ID NO: 61118 - DNA, 25 bp, Probe sequence
acaacattgctacatttgacaatat

SEQ ID NO: 61119 - DNA, 25 bp, Probe sequence
ttattcttcttttccacgacagatt

SEQ ID NO: 61120 - DNA, 25 bp, Probe sequence
ccatgtcatgcttaaagctgttatt

SEQ ID NO: 61121 - DNA, 25 bp, Probe sequence
gcaatccacatacctaattcattaa

SEQ ID NO: 61122 - DNA, 25 bp, Probe sequence
aatgagtaaggaaatgtgggtaagg

SEQ ID NO: 61123 - DNA, 25 bp, Probe sequence
aatccacatacctaattcattaacg

SEQ ID NO: 61124 - DNA, 25 bp, Probe sequence
aaatgagtaaggaaatgtgggtaag

SEQ ID NO: 61125 - DNA, 25 bp, Probe sequence
tgcaatccacatacctaattcatta

SEQ ID NO: 61126 - DNA, 25 bp, Probe sequence
atccacatacctaattcattaacgt

SEQ ID NO: 61127 - DNA, 25 bp, Probe sequence
atgagtaaggaaatgtgggtaaggg

SEQ ID NO: 61128 - DNA, 25 bp, Probe sequence
caatccacatacctaattcattaac

SEQ ID NO: 61129 - DNA, 25 bp, Probe sequence
aaaatgagtaaggaaatgtgggtaa

SEQ ID NO: 61130 - DNA, 25 bp, Probe sequence
ttaatgaattaggtatgtggattgc

SEQ ID NO: 61131 - DNA, 25 bp, Probe sequence
ccttacccacatttccttactcatt

SEQ ID NO: 61132 - DNA, 25 bp, Probe sequence
cgttaatgaattaggtatgtggatt

SEQ ID NO: 61133 - DNA, 25 bp, Probe sequence
cttacccacatttccttactcattt

SEQ ID NO: 61134 - DNA, 25 bp, Probe sequence
taatgaattaggtatgtggattgca

SEQ ID NO: 61135 - DNA, 25 bp, Probe sequence
acgttaatgaattaggtatgtggat

SEQ ID NO: 61136 - DNA, 25 bp, Probe sequence
cccttacccacatttccttactcat

SEQ ID NO: 61137 - DNA, 25 bp, Probe sequence
gttaatgaattaggtatgtggattg

SEQ ID NO: 61138 - DNA, 25 bp, Probe sequence
ttacccacatttccttactcatttt

SEQ ID NO: 61139 - DNA, 25 bp, Probe sequence
gatggaacagtgtattctaattgga

SEQ ID NO: 61140 - DNA, 25 bp, Probe sequence
agatggaacagtgtattctaattgg

SEQ ID NO: 61141 - DNA, 25 bp, Probe sequence
atggaacagtgtattctaattggat

SEQ ID NO: 61142 - DNA, 25 bp, Probe sequence
tggaacagtgtattctaattggata

SEQ ID NO: 61143 - DNA, 25 bp, Probe sequence
tgaagaagtataaatgaggtgttga

SEQ ID NO: 61144 - DNA, 25 bp, Probe sequence
ctgaagaagtataaatgaggtgttg

SEQ ID NO: 61145 - DNA, 25 bp, Probe sequence
tctgaagaagtataaatgaggtgtt

SEQ ID NO: 61146 - DNA, 25 bp, Probe sequence
ggaacagtgtattctaattggatat

SEQ ID NO: 61147 - DNA, 25 bp, Probe sequence
gaagaagtataaatgaggtgttgaa

SEQ ID NO: 61148 - DNA, 25 bp, Probe sequence
tccaattagaatacactgttccatc

SEQ ID NO: 61149 - DNA, 25 bp, Probe sequence
ccaattagaatacactgttccatct

SEQ ID NO: 61150 - DNA, 25 bp, Probe sequence
atccaattagaatacactgttccat

SEQ ID NO: 61151 - DNA, 25 bp, Probe sequence
tatccaattagaatacactgttcca

SEQ ID NO: 61152 - DNA, 25 bp, Probe sequence
tcaacacctcatttatacttcttca

SEQ ID NO: 61153 - DNA, 25 bp, Probe sequence
caacacctcatttatacttcttcag

SEQ ID NO: 61154 - DNA, 25 bp, Probe sequence
aacacctcatttatacttcttcaga

SEQ ID NO: 61155 - DNA, 25 bp, Probe sequence
atatccaattagaatacactgttcc

SEQ ID NO: 61156 - DNA, 25 bp, Probe sequence
acacctcatttatacttcttcagaa

SEQ ID NO: 61157 - DNA, 25 bp, Probe sequence
caagattaggagtgtggcagagatg

SEQ ID NO: 61158 - DNA, 25 bp, Probe sequence
agattaggagtgtggcagagatgaa

SEQ ID NO: 61159 - DNA, 25 bp, Probe sequence
aagattaggagtgtggcagagatga

SEQ ID NO: 61160 - DNA, 25 bp, Probe sequence
attaggagtgtggcagagatgaaat

SEQ ID NO: 61161 - DNA, 25 bp, Probe sequence
aaattcatttctgccacactccttt

SEQ ID NO: 61162 - DNA, 25 bp, Probe sequence
ttaggagtgtggcagagatgaaatt

SEQ ID NO: 61163 - DNA, 25 bp, Probe sequence
gattaggagtgtggcagagatgaaa

SEQ ID NO: 61164 - DNA, 25 bp, Probe sequence
tttatcgtcacaatttgggtgtttg

SEQ ID NO: 61165 - DNA, 25 bp, Probe sequence
taggagtgtggcagagatgaaattt

SEQ ID NO: 61166 - DNA, 25 bp, Probe sequence
catctctgccacactcctaatcttg

SEQ ID NO: 61167 - DNA, 25 bp, Probe sequence
tcatctctgccacactcctaatctt

SEQ ID NO: 61168 - DNA, 25 bp, Probe sequence
ttcatctctgccacactcctaatct

SEQ ID NO: 61169 - DNA, 25 bp, Probe sequence
atttcatctctgccacactcctaat

SEQ ID NO: 61170 - DNA, 25 bp, Probe sequence
aaaggagtgtggcagaaatgaattt

SEQ ID NO: 61171 - DNA, 25 bp, Probe sequence
aatttcatctctgccacactcctaa

SEQ ID NO: 61172 - DNA, 25 bp, Probe sequence
tttcatctctgccacactcctaatc

SEQ ID NO: 61173 - DNA, 25 bp, Probe sequence
caaacacccaaattgtgacgataaa

SEQ ID NO: 61174 - DNA, 25 bp, Probe sequence
atctctgccacactcctaatcttgc

SEQ ID NO: 61175 - DNA, 25 bp, Probe sequence
tgaatgaagaaatagacaccacaaa

SEQ ID NO: 61176 - DNA, 25 bp, Probe sequence
atgaatgaagaaatagacaccacaa

SEQ ID NO: 61177 - DNA, 25 bp, Probe sequence
aatgaatgaagaaatagacaccaca

SEQ ID NO: 61178 - DNA, 25 bp, Probe sequence
aatgaagaaatagacaccacaaatg

SEQ ID NO: 61179 - DNA, 25 bp, Probe sequence
atgaagaaatagacaccacaaatgt

SEQ ID NO: 61180 - DNA, 25 bp, Probe sequence
gaatgaagaaatagacaccacaaat

SEQ ID NO: 61181 - DNA, 25 bp, Probe sequence
aaatgaatgaagaaatagacaccac

SEQ ID NO: 61182 - DNA, 25 bp, Probe sequence
tgaagaaatagacaccacaaatgta

SEQ ID NO: 61183 - DNA, 25 bp, Probe sequence
tagacaccacaaatgtatagacttt

SEQ ID NO: 61184 - DNA, 25 bp, Probe sequence
tttgtggtgtctatttcttcattca

SEQ ID NO: 61185 - DNA, 25 bp, Probe sequence
tgtggtgtctatttcttcattcatt

SEQ ID NO: 61186 - DNA, 25 bp, Probe sequence
ttgtggtgtctatttcttcattcat

SEQ ID NO: 61187 - DNA, 25 bp, Probe sequence
catttgtggtgtctatttcttcatt

SEQ ID NO: 61188 - DNA, 25 bp, Probe sequence
acatttgtggtgtctatttcttcat

SEQ ID NO: 61189 - DNA, 25 bp, Probe sequence
gtggtgtctatttcttcattcattt

SEQ ID NO: 61190 - DNA, 25 bp, Probe sequence
atttgtggtgtctatttcttcattc

SEQ ID NO: 61191 - DNA, 25 bp, Probe sequence
tacatttgtggtgtctatttcttca

SEQ ID NO: 61192 - DNA, 25 bp, Probe sequence
aaagtctatacatttgtggtgtcta

SEQ ID NO: 61193 - DNA, 25 bp, Probe sequence
atgagtgacacatataacatggagg

SEQ ID NO: 61194 - DNA, 25 bp, Probe sequence
tgagtgacacatataacatggaggt

SEQ ID NO: 61195 - DNA, 25 bp, Probe sequence
tgacacatataacatggaggtgaat

SEQ ID NO: 61196 - DNA, 25 bp, Probe sequence
gtgacacatataacatggaggtgaa

SEQ ID NO: 61197 - DNA, 25 bp, Probe sequence
gacacatataacatggaggtgaatc

SEQ ID NO: 61198 - DNA, 25 bp, Probe sequence
acacatataacatggaggtgaatcc

SEQ ID NO: 61199 - DNA, 25 bp, Probe sequence
gagtgacacatataacatggaggtg

SEQ ID NO: 61200 - DNA, 25 bp, Probe sequence
agtgacacatataacatggaggtga

SEQ ID NO: 61201 - DNA, 25 bp, Probe sequence
ttacccatgagtgacacatataaca

SEQ ID NO: 61202 - DNA, 25 bp, Probe sequence
cctccatgttatatgtgtcactcat

SEQ ID NO: 61203 - DNA, 25 bp, Probe sequence
acctccatgttatatgtgtcactca

SEQ ID NO: 61204 - DNA, 25 bp, Probe sequence
attcacctccatgttatatgtgtca

SEQ ID NO: 61205 - DNA, 25 bp, Probe sequence
ttcacctccatgttatatgtgtcac

SEQ ID NO: 61206 - DNA, 25 bp, Probe sequence
gattcacctccatgttatatgtgtc

SEQ ID NO: 61207 - DNA, 25 bp, Probe sequence
ggattcacctccatgttatatgtgt

SEQ ID NO: 61208 - DNA, 25 bp, Probe sequence
cacctccatgttatatgtgtcactc

SEQ ID NO: 61209 - DNA, 25 bp, Probe sequence
tcacctccatgttatatgtgtcact

SEQ ID NO: 61210 - DNA, 25 bp, Probe sequence
tgttatatgtgtcactcatgggtaa

SEQ ID NO: 61211 - DNA, 25 bp, Probe sequence
ttcgcattaattgagtttgttgaaa

SEQ ID NO: 61212 - DNA, 25 bp, Probe sequence
attcgcattaattgagtttgttgaa

SEQ ID NO: 61213 - DNA, 25 bp, Probe sequence
aattcgcattaattgagtttgttga

SEQ ID NO: 61214 - DNA, 25 bp, Probe sequence
taattcgcattaattgagtttgttg

SEQ ID NO: 61215 - DNA, 25 bp, Probe sequence
tcgcattaattgagtttgttgaaaa

SEQ ID NO: 61216 - DNA, 25 bp, Probe sequence
cgataattcgcattaattgagtttg

SEQ ID NO: 61217 - DNA, 25 bp, Probe sequence
gataattcgcattaattgagtttgt

SEQ ID NO: 61218 - DNA, 25 bp, Probe sequence
ataattcgcattaattgagtttgtt

SEQ ID NO: 61219 - DNA, 25 bp, Probe sequence
aagtgaaaatagtattggaactcaa

SEQ ID NO: 61220 - DNA, 25 bp, Probe sequence
tttcaacaaactcaattaatgcgaa

SEQ ID NO: 61221 - DNA, 25 bp, Probe sequence
ttcaacaaactcaattaatgcgaat

SEQ ID NO: 61222 - DNA, 25 bp, Probe sequence
tcaacaaactcaattaatgcgaatt

SEQ ID NO: 61223 - DNA, 25 bp, Probe sequence
caacaaactcaattaatgcgaatta

SEQ ID NO: 61224 - DNA, 25 bp, Probe sequence
ttttcaacaaactcaattaatgcga

SEQ ID NO: 61225 - DNA, 25 bp, Probe sequence
caaactcaattaatgcgaattatcg

SEQ ID NO: 61226 - DNA, 25 bp, Probe sequence
acaaactcaattaatgcgaattatc

SEQ ID NO: 61227 - DNA, 25 bp, Probe sequence
aacaaactcaattaatgcgaattat

SEQ ID NO: 61228 - DNA, 25 bp, Probe sequence
tgagttccaatactattttcacttt

SEQ ID NO: 61229 - DNA, 25 bp, Probe sequence
cgtttatgaatgccttttaatgtgt

SEQ ID NO: 61230 - DNA, 25 bp, Probe sequence
acgtttatgaatgccttttaatgtg

SEQ ID NO: 61231 - DNA, 25 bp, Probe sequence
acaatactcaggtacattcaaaatc

SEQ ID NO: 61232 - DNA, 25 bp, Probe sequence
caatactcaggtacattcaaaatct

SEQ ID NO: 61233 - DNA, 25 bp, Probe sequence
aaacaatactcaggtacattcaaaa

SEQ ID NO: 61234 - DNA, 25 bp, Probe sequence
aaaacaatactcaggtacattcaaa

SEQ ID NO: 61235 - DNA, 25 bp, Probe sequence
aacaatactcaggtacattcaaaat

SEQ ID NO: 61236 - DNA, 25 bp, Probe sequence
gtttatgaatgccttttaatgtgta

SEQ ID NO: 61237 - DNA, 25 bp, Probe sequence
tacgtttatgaatgccttttaatgt

SEQ ID NO: 61238 - DNA, 25 bp, Probe sequence
acacattaaaaggcattcataaacg

SEQ ID NO: 61239 - DNA, 25 bp, Probe sequence
cacattaaaaggcattcataaacgt

SEQ ID NO: 61240 - DNA, 25 bp, Probe sequence
gattttgaatgtacctgagtattgt

SEQ ID NO: 61241 - DNA, 25 bp, Probe sequence
tttgaatgtacctgagtattgtttt

SEQ ID NO: 61242 - DNA, 25 bp, Probe sequence
ttttgaatgtacctgagtattgttt

SEQ ID NO: 61243 - DNA, 25 bp, Probe sequence
agattttgaatgtacctgagtattg

SEQ ID NO: 61244 - DNA, 25 bp, Probe sequence
attttgaatgtacctgagtattgtt

SEQ ID NO: 61245 - DNA, 25 bp, Probe sequence
acattaaaaggcattcataaacgta

SEQ ID NO: 61246 - DNA, 25 bp, Probe sequence
tacacattaaaaggcattcataaac

SEQ ID NO: 61247 - DNA, 25 bp, Probe sequence
agccctcattaatgggagcttcttt

SEQ ID NO: 61248 - DNA, 25 bp, Probe sequence
aaagaagccctcattaatgggagct

SEQ ID NO: 61249 - DNA, 25 bp, Probe sequence
gccctcattaatgggagcttctttt

SEQ ID NO: 61250 - DNA, 25 bp, Probe sequence
aaaagaagccctcattaatgggagc

SEQ ID NO: 61251 - DNA, 25 bp, Probe sequence
aagccctcattaatgggagcttctt

SEQ ID NO: 61252 - DNA, 25 bp, Probe sequence
aagaagccctcattaatgggagctt

SEQ ID NO: 61253 - DNA, 25 bp, Probe sequence
agctcccattaatgagggcttcttt

SEQ ID NO: 61254 - DNA, 25 bp, Probe sequence
aaagaagctcccattaatgagggct

SEQ ID NO: 61255 - DNA, 25 bp, Probe sequence
gctcccattaatgagggcttctttt

SEQ ID NO: 61256 - DNA, 25 bp, Probe sequence
aaaagaagctcccattaatgagggc

SEQ ID NO: 61257 - DNA, 25 bp, Probe sequence
aagctcccattaatgagggcttctt

SEQ ID NO: 61258 - DNA, 25 bp, Probe sequence
aagaagctcccattaatgagggctt

SEQ ID NO: 61259 - DNA, 25 bp, Probe sequence
acttatgtgctctacaatcttatgg

SEQ ID NO: 61260 - DNA, 25 bp, Probe sequence
aatgcgatttgtagtgttatgtgaa

SEQ ID NO: 61261 - DNA, 25 bp, Probe sequence
taatgcgatttgtagtgttatgtga

SEQ ID NO: 61262 - DNA, 25 bp, Probe sequence
atgcgatttgtagtgttatgtgaac

SEQ ID NO: 61263 - DNA, 25 bp, Probe sequence
aaatcatacgctttccattgagtaa

SEQ ID NO: 61264 - DNA, 25 bp, Probe sequence
aatcatacgctttccattgagtaat

SEQ ID NO: 61265 - DNA, 25 bp, Probe sequence
ttatgtgctctacaatcttatggga

SEQ ID NO: 61266 - DNA, 25 bp, Probe sequence
ttccattgagtaatgagtgtaatgt

SEQ ID NO: 61267 - DNA, 25 bp, Probe sequence
tatgtgctctacaatcttatgggat

SEQ ID NO: 61268 - DNA, 25 bp, Probe sequence
ccataagattgtagagcacataagt

SEQ ID NO: 61269 - DNA, 25 bp, Probe sequence
ttcacataacactacaaatcgcatt

SEQ ID NO: 61270 - DNA, 25 bp, Probe sequence
tcacataacactacaaatcgcatta

SEQ ID NO: 61271 - DNA, 25 bp, Probe sequence
gttcacataacactacaaatcgcat

SEQ ID NO: 61272 - DNA, 25 bp, Probe sequence
ttactcaatggaaagcgtatgattt

SEQ ID NO: 61273 - DNA, 25 bp, Probe sequence
attactcaatggaaagcgtatgatt

SEQ ID NO: 61274 - DNA, 25 bp, Probe sequence
tcccataagattgtagagcacataa

SEQ ID NO: 61275 - DNA, 25 bp, Probe sequence
cccataagattgtagagcacataag

SEQ ID NO: 61276 - DNA, 25 bp, Probe sequence
atcccataagattgtagagcacata

SEQ ID NO: 61277 - DNA, 25 bp, Probe sequence
gccattaactaattcttaacttcgt

SEQ ID NO: 61278 - DNA, 25 bp, Probe sequence
tgccattaactaattcttaacttcg

SEQ ID NO: 61279 - DNA, 25 bp, Probe sequence
gctaactcctcatttcttcaatttg

SEQ ID NO: 61280 - DNA, 25 bp, Probe sequence
ttgaactaagaatatcagaagtgtt

SEQ ID NO: 61281 - DNA, 25 bp, Probe sequence
aataggagtcaaaataagaggaggg

SEQ ID NO: 61282 - DNA, 25 bp, Probe sequence
ctaactcctcatttcttcaatttga

SEQ ID NO: 61283 - DNA, 25 bp, Probe sequence
ccattaactaattcttaacttcgtt

SEQ ID NO: 61284 - DNA, 25 bp, Probe sequence
atgccattaactaattcttaacttc

SEQ ID NO: 61285 - DNA, 25 bp, Probe sequence
ataggagtcaaaataagaggagggc

SEQ ID NO: 61286 - DNA, 25 bp, Probe sequence
cgaagttaagaattagttaatggca

SEQ ID NO: 61287 - DNA, 25 bp, Probe sequence
acgaagttaagaattagttaatggc

SEQ ID NO: 61288 - DNA, 25 bp, Probe sequence
caaattgaagaaatgaggagttagc

SEQ ID NO: 61289 - DNA, 25 bp, Probe sequence
aacacttctgatattcttagttcaa

SEQ ID NO: 61290 - DNA, 25 bp, Probe sequence
ccctcctcttattttgactcctatt

SEQ ID NO: 61291 - DNA, 25 bp, Probe sequence
tcaaattgaagaaatgaggagttag

SEQ ID NO: 61292 - DNA, 25 bp, Probe sequence
gaagttaagaattagttaatggcat

SEQ ID NO: 61293 - DNA, 25 bp, Probe sequence
aacgaagttaagaattagttaatgg

SEQ ID NO: 61294 - DNA, 25 bp, Probe sequence
gccctcctcttattttgactcctat

SEQ ID NO: 61295 - DNA, 25 bp, Probe sequence
actcctgttcgttatacttcaatca

SEQ ID NO: 61296 - DNA, 25 bp, Probe sequence
gactcctgttcgttatacttcaatc

SEQ ID NO: 61297 - DNA, 25 bp, Probe sequence
ctcctgttcgttatacttcaatcaa

SEQ ID NO: 61298 - DNA, 25 bp, Probe sequence
ggactcctgttcgttatacttcaat

SEQ ID NO: 61299 - DNA, 25 bp, Probe sequence
gatggactcctgttcgttatacttc

SEQ ID NO: 61300 - DNA, 25 bp, Probe sequence
cctgttcgttatacttcaatcaact

SEQ ID NO: 61301 - DNA, 25 bp, Probe sequence
tcctgttcgttatacttcaatcaac

SEQ ID NO: 61302 - DNA, 25 bp, Probe sequence
atggactcctgttcgttatacttca

SEQ ID NO: 61303 - DNA, 25 bp, Probe sequence
tggactcctgttcgttatacttcaa

SEQ ID NO: 61304 - DNA, 25 bp, Probe sequence
tgattgaagtataacgaacaggagt

SEQ ID NO: 61305 - DNA, 25 bp, Probe sequence
gattgaagtataacgaacaggagtc

SEQ ID NO: 61306 - DNA, 25 bp, Probe sequence
ttgattgaagtataacgaacaggag

SEQ ID NO: 61307 - DNA, 25 bp, Probe sequence
attgaagtataacgaacaggagtcc

SEQ ID NO: 61308 - DNA, 25 bp, Probe sequence
gaagtataacgaacaggagtccatc

SEQ ID NO: 61309 - DNA, 25 bp, Probe sequence
gttgattgaagtataacgaacagga

SEQ ID NO: 61310 - DNA, 25 bp, Probe sequence
agttgattgaagtataacgaacagg

SEQ ID NO: 61311 - DNA, 25 bp, Probe sequence
tgaagtataacgaacaggagtccat

SEQ ID NO: 61312 - DNA, 25 bp, Probe sequence
ttgaagtataacgaacaggagtcca

SEQ ID NO: 61313 - DNA, 25 bp, Probe sequence
aaagatagacgaaagaaatgggttg

SEQ ID NO: 61314 - DNA, 25 bp, Probe sequence
gaaagaaatgggttgctcctataat

SEQ ID NO: 61315 - DNA, 25 bp, Probe sequence
cgaaagaaatgggttgctcctataa

SEQ ID NO: 61316 - DNA, 25 bp, Probe sequence
aaagaggttaatggcattgataagc

SEQ ID NO: 61317 - DNA, 25 bp, Probe sequence
aagatagacgaaagaaatgggttgc

SEQ ID NO: 61318 - DNA, 25 bp, Probe sequence
aggtttaccaacgaatgtttgaaat

SEQ ID NO: 61319 - DNA, 25 bp, Probe sequence
aaggtttaccaacgaatgtttgaaa

SEQ ID NO: 61320 - DNA, 25 bp, Probe sequence
aaaggtttaccaacgaatgtttgaa

SEQ ID NO: 61321 - DNA, 25 bp, Probe sequence
taaaggtttaccaacgaatgtttga

SEQ ID NO: 61322 - DNA, 25 bp, Probe sequence
caacccatttctttcgtctatcttt

SEQ ID NO: 61323 - DNA, 25 bp, Probe sequence
attataggagcaacccatttctttc

SEQ ID NO: 61324 - DNA, 25 bp, Probe sequence
ttataggagcaacccatttctttcg

SEQ ID NO: 61325 - DNA, 25 bp, Probe sequence
gcttatcaatgccattaacctcttt

SEQ ID NO: 61326 - DNA, 25 bp, Probe sequence
gcaacccatttctttcgtctatctt

SEQ ID NO: 61327 - DNA, 25 bp, Probe sequence
ttcaaacattcgttggtaaaccttt

SEQ ID NO: 61328 - DNA, 25 bp, Probe sequence
tttcaaacattcgttggtaaacctt

SEQ ID NO: 61329 - DNA, 25 bp, Probe sequence
atttcaaacattcgttggtaaacct

SEQ ID NO: 61330 - DNA, 25 bp, Probe sequence
tcaaacattcgttggtaaaccttta

SEQ ID NO: 61331 - DNA, 25 bp, Probe sequence
aagtagaaaatgatgtgaaaacaaa

SEQ ID NO: 61332 - DNA, 25 bp, Probe sequence
aaagtagaaaatgatgtgaaaacaa

SEQ ID NO: 61333 - DNA, 25 bp, Probe sequence
agtagaaaatgatgtgaaaacaaat

SEQ ID NO: 61334 - DNA, 25 bp, Probe sequence
gtagaaaatgatgtgaaaacaaatt

SEQ ID NO: 61335 - DNA, 25 bp, Probe sequence
taaagtagaaaatgatgtgaaaaca

SEQ ID NO: 61336 - DNA, 25 bp, Probe sequence
ttgttttcacatcattttctacttt

SEQ ID NO: 61337 - DNA, 25 bp, Probe sequence
tttgttttcacatcattttctactt

SEQ ID NO: 61338 - DNA, 25 bp, Probe sequence
atttgttttcacatcattttctact

SEQ ID NO: 61339 - DNA, 25 bp, Probe sequence
tgttttcacatcattttctacttta

SEQ ID NO: 61340 - DNA, 25 bp, Probe sequence
aatttgttttcacatcattttctac

SEQ ID NO: 61341 - DNA, 25 bp, Probe sequence
aagtaaccaaatattgaagaggtgt

SEQ ID NO: 61342 - DNA, 25 bp, Probe sequence
gtgagtaggtaaaacgaactattca

SEQ ID NO: 61343 - DNA, 25 bp, Probe sequence
gtaaccaaatattgaagaggtgtac

SEQ ID NO: 61344 - DNA, 25 bp, Probe sequence
agtgagtaggtaaaacgaactattc

SEQ ID NO: 61345 - DNA, 25 bp, Probe sequence
agtaaccaaatattgaagaggtgta

SEQ ID NO: 61346 - DNA, 25 bp, Probe sequence
aaagtaaccaaatattgaagaggtg

SEQ ID NO: 61347 - DNA, 25 bp, Probe sequence
tgagtaggtaaaacgaactattcaa

SEQ ID NO: 61348 - DNA, 25 bp, Probe sequence
atttagtgagtaggtaaaacgaact

SEQ ID NO: 61349 - DNA, 25 bp, Probe sequence
gtaaagtaaccaaatattgaagagg

SEQ ID NO: 61350 - DNA, 25 bp, Probe sequence
acacctcttcaatatttggttactt

SEQ ID NO: 61351 - DNA, 25 bp, Probe sequence
tgaatagttcgttttacctactcac

SEQ ID NO: 61352 - DNA, 25 bp, Probe sequence
gtacacctcttcaatatttggttac

SEQ ID NO: 61353 - DNA, 25 bp, Probe sequence
gaatagttcgttttacctactcact

SEQ ID NO: 61354 - DNA, 25 bp, Probe sequence
tacacctcttcaatatttggttact

SEQ ID NO: 61355 - DNA, 25 bp, Probe sequence
cacctcttcaatatttggttacttt

SEQ ID NO: 61356 - DNA, 25 bp, Probe sequence
ttgaatagttcgttttacctactca

SEQ ID NO: 61357 - DNA, 25 bp, Probe sequence
agttcgttttacctactcactaaat

SEQ ID NO: 61358 - DNA, 25 bp, Probe sequence
cctcttcaatatttggttactttac

SEQ ID NO: 61359 - DNA, 25 bp, Probe sequence
aagcaaatatgagttgtagcccaaa

SEQ ID NO: 61360 - DNA, 25 bp, Probe sequence
caagcaaatatgagttgtagcccaa

SEQ ID NO: 61361 - DNA, 25 bp, Probe sequence
agaaacttacacaagcaaatatgag

SEQ ID NO: 61362 - DNA, 25 bp, Probe sequence
gaaacttacacaagcaaatatgagt

SEQ ID NO: 61363 - DNA, 25 bp, Probe sequence
aagaaacttacacaagcaaatatga

SEQ ID NO: 61364 - DNA, 25 bp, Probe sequence
tccgatgcaaataatttcctcctaa

SEQ ID NO: 61365 - DNA, 25 bp, Probe sequence
ccgatgcaaataatttcctcctaat

SEQ ID NO: 61366 - DNA, 25 bp, Probe sequence
gtccgatgcaaataatttcctccta

SEQ ID NO: 61367 - DNA, 25 bp, Probe sequence
cgatgcaaataatttcctcctaatg

SEQ ID NO: 61368 - DNA, 25 bp, Probe sequence
tttgggctacaactcatatttgctt

SEQ ID NO: 61369 - DNA, 25 bp, Probe sequence
ttgggctacaactcatatttgcttg

SEQ ID NO: 61370 - DNA, 25 bp, Probe sequence
ctcatatttgcttgtgtaagtttct

SEQ ID NO: 61371 - DNA, 25 bp, Probe sequence
actcatatttgcttgtgtaagtttc

SEQ ID NO: 61372 - DNA, 25 bp, Probe sequence
tcatatttgcttgtgtaagtttctt

SEQ ID NO: 61373 - DNA, 25 bp, Probe sequence
ttaggaggaaattatttgcatcgga

SEQ ID NO: 61374 - DNA, 25 bp, Probe sequence
attaggaggaaattatttgcatcgg

SEQ ID NO: 61375 - DNA, 25 bp, Probe sequence
taggaggaaattatttgcatcggac

SEQ ID NO: 61376 - DNA, 25 bp, Probe sequence
cattaggaggaaattatttgcatcg

SEQ ID NO: 61377 - DNA, 25 bp, Probe sequence
atcattagcatagtcatcaaagcct

SEQ ID NO: 61378 - DNA, 25 bp, Probe sequence
agcatagtcatcaaagccttatcaa

SEQ ID NO: 61379 - DNA, 25 bp, Probe sequence
tcattagcatagtcatcaaagcctt

SEQ ID NO: 61380 - DNA, 25 bp, Probe sequence
aatcattagcatagtcatcaaagcc

SEQ ID NO: 61381 - DNA, 25 bp, Probe sequence
tagcatagtcatcaaagccttatca

SEQ ID NO: 61382 - DNA, 25 bp, Probe sequence
gatttcaacagaagaaggaagatgg

SEQ ID NO: 61383 - DNA, 25 bp, Probe sequence
gcatagtcatcaaagccttatcaag

SEQ ID NO: 61384 - DNA, 25 bp, Probe sequence
cgtagagatttcaacagaagaagga

SEQ ID NO: 61385 - DNA, 25 bp, Probe sequence
agagatttcaacagaagaaggaaga

SEQ ID NO: 61386 - DNA, 25 bp, Probe sequence
aggctttgatgactatgctaatgat

SEQ ID NO: 61387 - DNA, 25 bp, Probe sequence
ggctttgatgactatgctaatgatt

SEQ ID NO: 61388 - DNA, 25 bp, Probe sequence
aaggctttgatgactatgctaatga

SEQ ID NO: 61389 - DNA, 25 bp, Probe sequence
ttgataaggctttgatgactatgct

SEQ ID NO: 61390 - DNA, 25 bp, Probe sequence
tgataaggctttgatgactatgcta

SEQ ID NO: 61391 - DNA, 25 bp, Probe sequence
cttgataaggctttgatgactatgc

SEQ ID NO: 61392 - DNA, 25 bp, Probe sequence
ccatcttccttcttctgttgaaatc

SEQ ID NO: 61393 - DNA, 25 bp, Probe sequence
tccttcttctgttgaaatctctacg

SEQ ID NO: 61394 - DNA, 25 bp, Probe sequence
tcttccttcttctgttgaaatctct

SEQ ID NO: 61395 - DNA, 25 bp, Probe sequence
cgtggttaaatagggaatacataca

SEQ ID NO: 61396 - DNA, 25 bp, Probe sequence
gggaatacatacatataatctcggt

SEQ ID NO: 61397 - DNA, 25 bp, Probe sequence
agggaatacatacatataatctcgg

SEQ ID NO: 61398 - DNA, 25 bp, Probe sequence
ggaatacatacatataatctcggtt

SEQ ID NO: 61399 - DNA, 25 bp, Probe sequence
acgtggttaaatagggaatacatac

SEQ ID NO: 61400 - DNA, 25 bp, Probe sequence
cactatttcttaactggagattacc

SEQ ID NO: 61401 - DNA, 25 bp, Probe sequence
aaacgtggttaaatagggaatacat

SEQ ID NO: 61402 - DNA, 25 bp, Probe sequence
actatttcttaactggagattacct

SEQ ID NO: 61403 - DNA, 25 bp, Probe sequence
cattccttgttttactgggtgtttt

SEQ ID NO: 61404 - DNA, 25 bp, Probe sequence
tgtatgtattccctatttaaccacg

SEQ ID NO: 61405 - DNA, 25 bp, Probe sequence
accgagattatatgtatgtattccc

SEQ ID NO: 61406 - DNA, 25 bp, Probe sequence
ccgagattatatgtatgtattccct

SEQ ID NO: 61407 - DNA, 25 bp, Probe sequence
aaccgagattatatgtatgtattcc

SEQ ID NO: 61408 - DNA, 25 bp, Probe sequence
gtatgtattccctatttaaccacgt

SEQ ID NO: 61409 - DNA, 25 bp, Probe sequence
ggtaatctccagttaagaaatagtg

SEQ ID NO: 61410 - DNA, 25 bp, Probe sequence
atgtattccctatttaaccacgttt

SEQ ID NO: 61411 - DNA, 25 bp, Probe sequence
aaaacacccagtaaaacaaggaatg

SEQ ID NO: 61412 - DNA, 25 bp, Probe sequence
aggtaatctccagttaagaaatagt

SEQ ID NO: 61413 - DNA, 25 bp, Probe sequence
cacataagatgcgtaacaccaaatt

SEQ ID NO: 61414 - DNA, 25 bp, Probe sequence
acataagatgcgtaacaccaaatta
